(19) United States
(12) Patent Application Publication
(10) Pub. No.: US 2022/0162320 A1
(43) Pub. Date: May 26, 2022

(54) MULTISPECIFIC BINDING PROTEINS

(71) Applicant: Gritstone bio, Inc., Emeryville, CA (US)

(72) Inventors: Karin Jooss, Emeryville, CA (US); Godfrey Jonah Anderson Rainey, San Diego, CA (US); Wade Blair, Gaithersburg, MD (US); Michele Anne Busby, Needham, MA (US); Gijsbert Marnix Grotenbreg, Berkeley, CA (US); Roman Yelensky, Newton, MA (US); Shan Liu Hwang, Fremont, CA (US); Gayatri Prakash, El Cerrito, CA (US)

(21) Appl. No.: 17/426,627

(22) PCT Filed: Jan. 29, 2020
(86) PCT No.: PCT/US20/15736

§ 371 Date: Jul. 28, 2021

Related U.S. Application Data
(60) Provisional application No. 62/798,450, filed on Jan. 29, 2019.
(60) Provisional application No. 62/807,702, filed on Feb. 19, 2019.
(60) Provisional application No. 62/869,992, filed on Jul. 2, 2019.

(51) Int. Cl. C07K 16/28; A61P 35/00

(52) U.S. Cl. CPC C07K 16/2833; A61P 35/00; C07K 16/2809; A61K 2039/505; C07K 2317/622; C07K 2317/40; C07K 2317/31

(57) ABSTRACT

Provided herein are HLA-PEPTIDE targets and multispecific antigen binding proteins that bind HLA-PEPTIDE targets. Provided herein is an isolated multispecific antigen binding protein (ABP), comprising: a first antigen binding domain (ABD) that specifically binds to a human leukocyte antigen (HLA)-PEPTIDE target; and an additional ABD that specifically binds an additional antigen, wherein the HLA-PEPTIDE target comprises an HLA-restricted peptide complexed with an HLA Class I molecule, wherein the HLA-restricted peptide is located in the peptide binding groove of an α1/α2 heterodimer portion of the HLA Class I molecule, and wherein the HLA-PEPTIDE target is selected from Table A, Table A1, or Table A2.

### CROSS REFERENCE TO RELATED APPLICATIONS

[0001] This application claims the benefit of U.S. Provisional Application No. 62/798,450, filed Jan. 29, 2019, U.S. Provisional Application No. 62/807,702, filed Feb. 19, 2019, and U.S. Provisional Application No. 62/869,992, filed Jul. 2, 2019, which applications are hereby incorporated in their entirety by reference.

### INFORMAL SEQUENCE TABLES

[0002] This patent application contains a lengthy sequence table section. Copies of the additional sequence tables have been submitted electronically as an ASCII text file and are hereby incorporated herein by reference, and may be employed in the practice of the invention. Said ASCII text file, created on Jan. 24, 2020, is named GSO-027WO_Informal_Sequence_Tables.txt, and is 26,487,915 bytes in size.

### BACKGROUND

[0003] The immune system employs two types of adaptive immune responses to provide antigen specific protection from pathogens; humoral immune responses, and cellular immune responses, which involve specific recognition of pathogen antigens via B lymphocytes and T lymphocytes, respectively.

[0004] T lymphocytes, by virtue of being the antigen specific effectors of cellular immunity, play a central role in the body's defense against diseases mediated by intracellular pathogens, such as viruses, intracellular bacteria, mycoplasmas, and intracellular parasites, and against cancer cells by directly cytolysing the affected cells. The specificity of T lymphocyte responses is conferred by, and activated through T-cell receptors (TCRs) binding to (major histocompatibility complex) WIC molecules on the surface of affected cells. T-cell receptors are antigen specific receptors clonally distributed on individual T lymphocytes whose repertoire of antigenic specificity is generated via somatic gene rearrangement mechanisms analogous to those involved in generating the antibody gene repertoire. T-cell receptors include a heterodimer of transmembrane molecules, the main type being composed of an alpha-beta polypeptide dimer and a smaller subset of a gamma-delta polypeptide dimer. T lymphocyte receptor subunits comprise a variable and constant region similar to immunoglobulins in the extracellular domain, a short hinge region with cysteine that promotes alpha and beta chain pairing, a transmembrane and a short cytoplasmic region. Signal transduction triggered by TCRs is indirectly mediated via CD3-zeta, an associated multi-subunit complex comprising signal transducing subunits.

[0005] T lymphocyte receptors do not generally recognize native antigens but rather recognize cell-surface displayed complexes comprising an intracellularly processed fragment of an antigen in association with a major histocompatibility complex (MHC) for presentation of peptide antigens. Major histocompatibility complex genes are highly polymorphic across species populations, comprising multiple common alleles for each individual gene. In humans, MHC is referred to as human leukocyte antigen (HLA).

[0006] Major histocompatibility complex class I molecules are expressed on the surface of virtually all nucleated cells in the body and are dimeric molecules comprising a transmembrane heavy chain, comprising the peptide antigen binding cleft, and a smaller extracellular chain termed beta2-microglobulin. MHC class I molecules present peptides derived from the degradation of cytosolic proteins by the proteasome, a multi-unit structure in the cytoplasm, (Niedermann G., 2002. Curr Top Microbiol Immunol. 268:91-136; for processing of bacterial antigens, refer to Wick M J, and Ljunggren H G., 1999. Immunol Rev. 172:153-62). Cleaved peptides are transported into the lumen of the endoplasmic reticulum (ER) by the transporter associated with antigen processing (TAP) where they are bound to the groove of the assembled class I molecule, and the resultant MHC/peptide complex is transported to the cell membrane to enable antigen presentation to T lymphocytes (Yewdell J W., 2001. Trends Cell Biol. 11:294-7; Yewdell J W. and Bennink J R., 2001. Curr Opin Immunol. 13:13-8). Alternatively, cleaved peptides can be loaded onto MHC class I molecules in a TAP-independent manner and can also present extracellularly-derived proteins through a process of cross-presentation. As such, a given MHC/peptide complex presents a novel protein structure on the cell surface that can be targeted by a novel antigen-binding protein (e.g., antibodies or TCRs) once the identity of the complex's structure (peptide sequence and MHC subtype) is determined.

[0007] Tumor cells can express antigens and may display such antigens on the surface of the tumor cell. Such tumor-associated antigens can be used for development of novel immunotherapeutic reagents for the specific targeting of tumor cells. For example, tumor-associated antigens can be used to identify therapeutic antigen binding proteins, e.g., TCRs, antibodies, or antigen-binding fragments. Such tumor-associated antigens may also be utilized in pharmaceutical compositions, e.g., vaccines.

### SUMMARY

[0008] Provided herein is an isolated multispecific ABP comprising a first scFv and a second scFv that each specifically bind a first target antigen, a Fab that specifically binds an additional target antigen that is distinct from the first target antigen, and an Fc domain, wherein the ABP comprises a first polypeptide, a second polypeptide, and a third polypeptide, wherein the first polypeptide comprises, in an N→C direction, the first scFv —CH2-CH3, wherein the second polypeptide comprises, in an N→C direction, a VH domain of the Fab-a CH1 domain of the Fab-CH2-CH3, wherein the third polypeptide comprises, in an N→C direction, a VL domain of the Fab-a CL domain of the Fab, and wherein the second scFv is attached, directly or indirectly, to the N-terminus of the second polypeptide or the third polypeptide. In some embodiments, the second scFv is attached, directly or indirectly, to the N-terminus of the second polypeptide. In some embodiments, the second scFv is attached, directly or indirectly, to the N-terminus of the third polypeptide.

[0009] In some embodiments, a variable domain of the first scFv interacts with a variable domain of the second scFv.

[0010] In some embodiments, the VH domain of the first scFv interacts with the VL domain of the second scFv.

[0011] In some embodiments, the VL domain of the first scFv interacts with the VH domain of the second scFv.

[0012] In some embodiments, the VL domain of the first scFv interacts with the VH domain of the second scFv and wherein the VH domain of the first scFv interacts with the VL domain of the second scFv.

[0013] In some embodiments, the interaction of the VL domain of the first scFv with the VH domain of the second scFv and the interaction of the VH domain of the first scFv with the VL domain of the second scFv results in a circularized conformation.

[0014] In some embodiments, proteolysis of a purified population of the multispecific ABP with a cysteine protease that digests human IgG1 at one specific site above the hinge (KSCDKT/HTCPPC) produces a fragment comprising the first scFv, the second scFv, and the Fab.

[0015] In some embodiments, the fragment comprising the first scFv, the second scFv, and the Fab binds to Protein A and exhibits a retention time that aligns with retention time of the multispecific ABP which has not been digested with the cysteine protease, as measured by SEC-HPLC.

[0016] In some embodiments, the VL domain of the first scFv interacts with the VH domain of the first scFv, and wherein the VL domain of the second scFv interacts with the VH domain of the second scFv.

[0017] some embodiments, proteolysis of a purified population of the multispecific ABP with a cysteine protease that digests human IgG1 at one specific site above the hinge (KSCDKT/HTCPPC) produces (i) a first fragment comprising the first scFv and the Fc domain, and (ii) a second fragment comprising the second scFv and the Fab.

[0018] In some embodiments, the first fragment binds to Protein A and exhibits a retention time that is greater than retention time of the multispecific ABP which has not been digested with the cysteine protease, as measured by SEC-HPLC.

[0019] In some embodiments, the second fragment does not bind to Protein A and exhibits a retention time that is greater than retention time of the multispecific ABP which has not been digested with the cysteine protease, as measured by SEC-HPLC.

[0020] In some embodiments, the VH domain of the first scFv comprises a cysteine at amino acid residue 44 of the VH domain according to the Kabat numbering system and wherein the VL domain of the first scFv comprises a cysteine residue at amino acid residue 100 of the VL domain according to the Kabat numbering system.

[0021] In some embodiments, the VH domain of the second scFv comprises a cysteine at amino acid residue 44 of the VH domain according to the Kabat numbering system and wherein the VL domain of the second scFv comprises a cysteine residue at amino acid residue 100 of the VL domain according to the Kabat numbering system.

[0022] In some embodiments, the VH domains of the first and second scFv each comprise a cysteine at amino acid residue 44 of the VH domain according to the Kabat numbering system and wherein the VL domain of the first and second scFv each comprise a cysteine residue at amino acid residue 100 of the VL domain according to the Kabat numbering system.

[0023] Also provided herein is an isolated multispecific ABP comprising a first scFv and a second scFv that each specifically bind a first target antigen, a Fab that specifically binds an additional antigen that is distinct from the first target antigen, and an Fc domain, wherein the ABP comprises a first polypeptide, a second polypeptide, and a third polypeptide, wherein the first polypeptide comprises, in an N→C direction, the first scFv -optional linker-CH2-CH3, wherein the second polypeptide comprises, in an N→C direction, a VH domain of the Fab-a CH1 domain of the Fab-CH2-CH3, wherein the third polypeptide comprises, in an N→C direction, a VL domain of the Fab-a CL domain of the Fab, and wherein the second scFv is attached, directly or indirectly, to the N-terminus of the second polypeptide or the third polypeptide, wherein the VL domain of the first scFv interacts with the VH domain of the second scFv, and wherein the VH domain of the first scFv interacts with the VL domain of the second scFv.

[0024] In some embodiments, the interaction of the VL domain of the first scFv with the VH domain of the second scFv and the interaction of the VH domain of the first scFv with the VL domain of the second scFv results in a circularized conformation.

[0025] In some embodiments, the second scFv is attached, directly or indirectly, to the N-terminus of the second polypeptide.

[0026] In some embodiments, the second scFv is attached, directly or indirectly, to the N-terminus of the third polypeptide.

[0027] In some embodiments, proteolysis of a purified population of the multispecific ABP with a cysteine protease that digests human IgG1 at one specific site above the hinge (KSCDKT/HTCPPC) produces a fragment comprising the first scFv, the second scFv, and the Fab.

[0028] In some embodiments, the fragment comprising the first scFv, the second scFv, and the Fab binds to Protein A and exhibits a retention time that aligns with retention time of the multispecific ABP which has not been digested with the cysteine protease, as measured by SEC-HPLC.

[0029] In some embodiments, the first scFv and the second scFv each bind to the same target.

[0030] In some embodiments, the first scFv and the second scFv each bind to the same epitope of the target.

[0031] In some embodiments, the first scFv and the second scFv each comprise identical CDR sequences.

[0032] In some embodiments, the first scFv and the second scFv each comprise identical VH and VL sequences.

[0033] Also provided herein is an isolated, multispecific ABP comprising an scFv that specifically binds a first target antigen and a Fab that specifically binds a second target antigen, wherein the ABP comprises a first polypeptide, a second polypeptide, and a third polypeptide, wherein the first polypeptide comprises, in an N→C direction, optional hinge-CH2-CH3, wherein the second polypeptide comprises, in an N→C direction, a VH domain of the Fab-a CH1 domain of the Fab-CH2-CH3, wherein the third polypeptide comprises, in an N→C direction, a VL domain of the Fab-a CL domain of the Fab, and wherein the scFv is attached, directly or indirectly, to the N-terminus of the second polypeptide or the third polypeptide

[0034] In some embodiments, the first scFv and the second scFv each bind to an HLA-PEPTIDE target, wherein the HLA-PEPTIDE target comprises an HLA-restricted peptide complexed with an HLA Class I molecule, wherein the HLA-restricted peptide is located in the peptide binding groove of an α1/α2 heterodimer portion of the HLA Class I molecule, and wherein the HLA-PEPTIDE target is selected from Table A, Table A1, or Table A2.

[0035] In some embodiments, (a) the HLA Class I molecule is HLA subtype A*01:01 and the HLA-restricted peptide comprises the sequence NTDNNLAVY, (b) the HLA Class I molecule is HLA subtype A*02:01 and the HLA-restricted peptide comprises the sequence AIFPGAVPAA; (c) the HLA Class I molecule is HLA subtype A*01:01 and the HLA-restricted peptide comprises the sequence ASSLPTTMNY; (d) the HLA Class I molecule is HLA subtype A*02:01 and the HLA-restricted peptide comprises the sequence LLASSILCA; or (e) the HLA Class I molecule is HLA subtype B*35:01 and the HLA-restricted peptide comprises the sequence EVDPIGHVY.

[0036] In some embodiments, the HLA-restricted peptide is between about 5-15 amino acids in length.

[0037] In some embodiments, the HLA-restricted peptide is between about 8-12 amino acids in length.

[0038] In some embodiments, (a) the HLA Class I molecule is HLA subtype A*01:01 and the HLA-restricted peptide consists of the sequence NTDNNLAVY, (b) the HLA Class I molecule is HLA subtype A*02:01 and the HLA-restricted peptide consists of the sequence AIFPGAVPAA; (c) the HLA Class I molecule is HLA subtype A*01:01 and the HLA-restricted peptide consists of the sequence ASSLPTTMNY; (d) the HLA Class I molecule is HLA subtype A*02:01 and the HLA-restricted peptide consists of the sequence LLASSILCA; or (e) the HLA Class I molecule is HLA subtype B*35:01 and the HLA-restricted peptide consists of the sequence EVDPIGHVY.

[0039] Provided herein is an isolated multispecific antigen binding protein (ABP), comprising: a first antigen binding domain (ABD) that specifically binds to a human leukocyte antigen (HLA)-PEPTIDE target; and an additional ABD that specifically binds an additional antigen, wherein the HLA-PEPTIDE target comprises an HLA-restricted peptide complexed with an HLA Class I molecule, wherein the HLA-restricted peptide is located in the peptide binding groove of an α1/α2 heterodimer portion of the HLA Class I molecule, and wherein the HLA-PEPTIDE target is selected from Table A, Table A1, or Table A2.

[0040] In some embodiments: the HLA Class I molecule is HLA subtype A*01:01 and the HLA-restricted peptide comprises the sequence NTDNNLAVY, the HLA Class I molecule is HLA subtype B*35:01 and the HLA-restricted peptide comprises the sequence EVDPIGHVY, the HLA Class I molecule is HLA subtype A*02:01 and the HLA-restricted peptide comprises the sequence LLASSILCA; the HLA Class I molecule is HLA subtype A*02:01 and the HLA-restricted peptide comprises the sequence AIFPGAVPAA; or the HLA Class I molecule is HLA subtype A*01:01 and the HLA-restricted peptide comprises the sequence ASSLPTTMNY.

[0041] In some embodiments, the HLA-restricted peptide is between about 5-15 amino acids in length.

[0042] In some embodiments, the HLA-restricted peptide is between about 8-12 amino acids in length.

[0043] In some embodiments, the HLA Class I molecule is HLA subtype A*01:01 and the HLA-restricted peptide consists of the sequence NTDNNLAVY, the HLA Class I molecule is HLA subtype B*35:01 and the HLA-restricted peptide consists of the sequence EVDPIGHVY, the HLA Class I molecule is HLA subtype A*02:01 and the HLA-restricted peptide consists of the sequence LLASSILCA; the HLA Class I molecule is HLA subtype A*02:01 and the HLA-restricted peptide consists of the sequence AIFPGAVPAA; or the HLA Class I molecule is HLA subtype A*01:01 and the HLA-restricted peptide consists of the sequence ASSLPTTMNY.

[0044] In some embodiments, the first ABD comprises an antibody or antigen-binding fragment thereof.

[0045] In some embodiments, the additional ABD comprises an antibody or antigen-binding fragment thereof.

[0046] In some embodiments, the multispecific ABP is a BiTE, wherein the first ABD is a first scFv and wherein the additional ABD is a second scFv. In some embodiments, the first scFv and the second scFv are attached via a linker. In some embodiments, the BiTE comprises, in an N→C direction, the first scFv—the linker—the second scFv. In some embodiments, the BiTE comprises, in an N→C direction, the second scFv—the linker—the first scFv. In some embodiments, the linker comprises GGGGS. In some embodiments, the linker comprises (GGGGS)_{N}, wherein N=1-10. In some embodiments, N=1-4. In some embodiments, N=1. The targets of the multispecific ABP are distinct in certain aspects, for example, the targets can be distinct proteins or distinct portions of the same protein.

[0047] In some embodiments, the multispecific ABP comprises the sequence

MGWSCIILFLVATATGVHSDIQMTQSPSSLSASVGDRVTITCQASQDISN
YLNWYQQKPGKAPKLLIYAASSLQSGVPSRFSGSGSGTDFTLTISSLQPE
DFATYYCQQYYSYPFTFGPGTKVDIKGGGGSGGGGSGGGGSGGGGSQVQL
VQSGAEVKKPGASVKVSCKASGYTFTNYYMHWVRQAPGQGLEWMGMINPS
GGGTSYAQKFQGRVTMTRDTSTSTVYMELSSLRSEDTAVYYCARGNPWEL
RLDYWGQGTLVTVSSGGGGSQVQLQQSGAELARPGASVKMSCKASGYTFT
RYTMHWVKQRPGQGLEWIGYINPSRGYTNYNQKFKDKATLTTDKSSSTAY
MQLSSLTSEDSAVYYCARYYDDHYSLDYWGQGTTLTVSSVEGGSGGSGGS
GGSGGVDQIVLTQSPAIMSASPGEKVTMTCSASSSVSYMNWYQQKSGTSP
KRWIYDTSKLASGVPAHFRGSGSGTSYSLTISGMEAEDAATYYCQQWSSN
PFTFGSGTKLEINGGGGSHHHHHHHH.

[0048] In some embodiments, the multispecific ABP comprises the sequence

MGWSCIILFLVATATGVHSDIQMTQSPSSLSASVGDRVTITCQASQDISN
YLNWYQQKPGKAPKLLIYAASSLQSGVPSRFSGSGSGTDFTLTISSLQPE
DFATYYCQQAISFPLTFGQSTKVEIKGGGGSGGGGSGGGGSGGGGSEVQL
LESGGGLVKPGGSLRLSCAASGFSFSSYWMSWVRQAPGKGLEWISYISGD
SGYTNYADSVKGRFTISRDDSKNTLYLQMNSLKTEDTAVYYCASHDYGDY
GEYFQHWGQGTLVTVSSGGGGSQVQLQQSGAELARPGASVKMSCKASGYT
FTRYTMHWVKQRPGQGLEWIGYINPSRGYTNYNQKFKDKATLTTDKSSST
AYMQLSSLTSEDSAVYYCARYYDDHYSLDYWGQGTTLTVSSVEGGSGGSG
GSGGSGGVDQIVLTQSPAIMSASPGEKVTMTCSASSSVSYMNWYQQKSGT
SPKRWIYDTSKLASGVPAHFRGSGSGTSYSLTISGMEAEDAATYYCQQWS
SNPFTFGSGTKLEINGGGGSHHHHHHHH.

[0049] In some embodiments, the isolated multispecific ABP comprises an scFv sequence that is DIQMTQSPSSLSASVGDRVTITCQASQDISNYLNWYQQKPGKAPKLLIYAASSLQSGV PSRFSGSGSGTDFTLTISSLQPEDFATYYCQQYYSYPFTFGPGTKVDIKGGGGSGGGG SGGGGSGGGGSQVQLVQSGAEVKKPGASVKVSCKASGYTFTNYYMHWVRQAPGQ GLEWMGMINPSGGGTSYAQKFQGRVTMTRDTSTSTVYMELSSLRSEDTAVYYCAR GNPWELRLDYWGQGTLVTVSS, a first linker, and a second scFv sequence that is selected from

QVQLVQSGAEVKKPGASVKVSCKASGYTFTRYTMHWVRQAPGQGLEWMGY
INPSRGYTNYNQKFKDRVTLTTDKSSSTAYMELSSLRSEDTAVYYCARYY
DDHYSLDYWGQGTLVTVSSVEGGSGGSGGSGGSGGVDDIQMTQSPSSLSA
SVGDRVTITCSASSSVSYMNWYQQKPGKAPKRLIYDTSKLASGVPSRFSG
SGSGTDFTLTISSLQPEDFATYYCQQWSSNPFTFGQGTKLEIK
and
EVQLVESGGGLVQPGGSLRLSCAASGFTFSTYAMNWVRQAPGKGLEWVGR
IRSKYNNYATYYADSVKGRFTISRDDSKNTLYLQMNSLRAEDTAVYYCVR
HGNFGDSYVSWFAYWGQGTLVTVSSGKPGSGKPGSGKPGSGKPGSQAVVT
QEPSLTVSPGGTVTLTCGSSTGAVTTSNYANWVQQKPGKSPRGLIGGTNK
RAPGVPARFSGSLLGGKAALTISGAQPEDEADYYCALWYSNHWVFGGGTK
LTVL.

[0050] In some embodiments, the multispecific ABP comprises an scFv sequence that is DIQMTQSPSSLSASVGDRVTITCRASQSISSWLAWYQQKPGKAPKLLIYAASTLQSGV PSRFSGSGSGTDFTLTISSLQPEDFATYYCQQSYSIPLTFGGGTKVEIKGGGGSGGGGS GGGGSGGGGSQVQLVQSGAEVKKPGSSVKVSCKASGGTFSNFGVSWLRQAPGQGL EWMGGIIPILGTANYAQKFQGRVTITADESTSTAYMELSSLRSEDTAVYYCATPTNSG YYGPYYYYGMDVWGQGTTVTVSS, a first linker, and a second scFv sequence that is selected from

QVQLVQSGAEVKKPGASVKVSCKASGYTFTRYTMHWVRQAPGQGLEWMGY
INPSRGYTNYNQKFKDRVTLTTDKSSSTAYMELSSLRSEDTAVYYCARYY
DDHYSLDYWGQGTLVTVSSVEGGSGGSGGSGGSGGVDDIQMTQSPSSLSA
SVGDRVTITCSASSSVSYMNWYQQKPGKAPKRLIYDTSKLASGVPSRFSG
SGSGTDFTLTISSLQPEDFATYYCQQWSSNPFTFGQGTKLEIK
and
EVQLVESGGGLVQPGGSLRLSCAASGFTFSTYAMNWVRQAPGKGLEWVGR
IRSKYNNYATYYADSVKGRFTISRDDSKNTLYLQMNSLRAEDTAVYYCVR
HGNFGDSYVSWFAYWGQGTLVTVSSGKPGSGKPGSGKPGSGKPGSQAVVT
QEPSLTVSPGGTVTLTCGSSTGAVTTSNYANWVQQKPGKSPRGLIGGTNK
RAPGVPARFSGSLLGGKAALTISGAQPEDEADYYCALWYSNHWVFGGGTK
LTVL.

[0051] In some embodiments, the linker is GGGGS.

[0052] In some embodiments, the multispecific ABP is a trivalent, multispecific ABP comprising a first scFv and a second scFv that each specifically bind the HLA-PEPTIDE target, a Fab that specifically binds the additional antigen that is distinct from the first target antigen, and an Fc domain, wherein the ABP comprises a first polypeptide, a second polypeptide, and a third polypeptide, wherein the first polypeptide comprises, in an N→C direction, the first scFv -optional linker-CH2-CH3, wherein the second polypeptide comprises, in an N→C direction, a VH domain of the Fab-a CH1 domain of the Fab-CH2-CH3, wherein the third polypeptide comprises, in an N→C direction, a VL domain of the Fab-a CL domain of the Fab, and wherein the second scFv is attached, directly or indirectly, to the N-terminus of the second polypeptide or the third polypeptide. In some embodiments, the second scFv is attached, directly or indirectly, to the N-terminus of the second polypeptide. In some embodiments, the second scFv is attached, directly or indirectly, to the N-terminus of the third polypeptide. In some embodiments, the first scFv and the second scFv each bind to an HLA-PEPTIDE target. In some embodiments, the first scFv and the second scFv each bind to the same HLA-PEPTIDE target. In some embodiments, the first scFv and the second scFv each bind to the same epitope of the HLA-PEPTIDE target. In some embodiments, the first scFv and the second scFv each comprise identical CDR sequences. In some embodiments, the first scFv and the second scFv each comprise identical VH and VL sequences. In some embodiments, the linker comprises (GGGGS)_{N}, wherein _{N}=1-10. In some embodiments, _{N}=1-4. In some embodiments, _{N}=2. The targets of the multispecific ABP are distinct in certain aspects, for example, the targets can be distinct proteins or distinct portions of the same protein.

[0053] In some embodiments, a variable domain of the first scFv interacts with a variable domain of the second scFv.

[0054] In some embodiments, the VH domain of the first scFv interacts with the VL domain of the second scFv.

[0055] In some embodiments, the VL domain of the first scFv interacts with the VH domain of the second scFv.

[0056] In some embodiments, the VL domain of the first scFv interacts with the VH domain of the second scFv and wherein the VH domain of the first scFv interacts with the VL domain of the second scFv.

[0057] In some embodiments, the interaction of the VL domain of the first scFv with the VH domain of the second scFv and the interaction of the VH domain of the first scFv with the VL domain of the second scFv results in a circularized conformation.

[0058] In some embodiments, proteolysis of a purified population of the isolated multispecific ABP with a cysteine protease that digests human IgG1 at one specific site above the hinge (KSCDKT/HTCPPC) produces a fragment comprising the first scFv, the second scFv, and the Fab.

[0059] some embodiments, the fragment comprising the first scFv, the second scFv, and the Fab binds to Protein A and exhibits a retention time that aligns with retention time of the isolated multispecific ABP which has not been digested with the cysteine protease, as measured by SEC-HPLC.

[0060] In some embodiments, the VL domain of the first scFv interacts with the VH domain of the first scFv, and wherein the VL domain of the second scFv interacts with the VH domain of the second scFv.

[0061] In some embodiments, proteolysis of a purified population of the isolated multispecific ABP with a cysteine protease that digests human IgG1 at one specific site above the hinge (KSCDKT/HTCPPC) produces (i) a first fragment comprising the first scFv and the Fc domain, and (ii) a second fragment comprising the second scFv and the Fab.

[0062] In some embodiments, the first fragment binds to Protein A and exhibits a retention time that is greater than retention time of the isolated multispecific ABP which has not been digested with the cysteine protease, as measured by SEC-HPLC.

[0063] In some embodiments, the second fragment does not bind to Protein A and exhibits a retention time that is greater than retention time of the isolated multispecific ABP which has not been digested with the cysteine protease, as measured by SEC-HPLC.

[0064] In some embodiments, the VH domain of the first scFv comprises a cysteine at amino acid residue 44 of the VH domain according to the Kabat numbering system and wherein the VL domain of the first scFv comprises a cysteine residue at amino acid residue 100 of the VL domain according to the Kabat numbering system.

[0065] In some embodiments, the VH domain of the second scFv comprises a cysteine at amino acid residue 44 of the VH domain according to the Kabat numbering system and wherein the VL domain of the second scFv comprises a cysteine residue at amino acid residue 100 of the VL domain according to the Kabat numbering system.

[0066] In some embodiments, the VH domains of the first and second scFv each comprise a cysteine at amino acid residue 44 of the VH domain according to the Kabat numbering system and wherein the VL domain of the first and second scFv each comprise a cysteine residue at amino acid residue 100 of the VL domain according to the Kabat numbering system.

[0067] In some embodiments, (a) the first polypeptide comprises the sequence MGWSCIILFLVATATGVHSQVQLVQSGAEVKKPGASVKVSCKASGYTFTNYYMHW VRQAPGQGLEWMGMINPSGGGTSYAQKFQGRVTMTRDTSTSTVYMELSSLRSEDT AVYYCARGNPWELRLDYWGQGTLVTVSSGGGGSGGGGSGGGGSGGGGSDIQMTQ SPSSLSASVGDRVTITCQASQDISNYLNWYQQKPGKAPKLLIYAASSLQSGVPSRFSG SGSGTDFTLTISSLQPEDFATYYCQQYYSYPFTFGPGTKVDIKGGGGSEPKSSDKTHT CPPCPAPELLGGPSVFLFPPKPKDTLMISRTPEVTCVVVDVSHEDPEVKFNWYVDGV EVHNAKTKPREEQYQSTYRVVSVLTVLHQDWLNGKEYKCKVSNKALPAPIEKTISK AKGQPREPQVYTLPPCREEMTKNQVSLWCLVKGFYPSDIAVEWESNGQPENNYKTT PPVLDSDGSFFLYSKLTVDKSRWQQGNVFSCSVMHEALHNHYTQKSLSLSPGK; (b) the second polypeptide comprises the sequence MGWSCIILFLVATATGVHSQVQLVQSGAEVKKPGASVKVSCKASGYTFTNYYMHW VRQAPGQGLEWMGMINPSGGGTSYAQKFQGRVTMTRDTSTSTVYMELSSLRSEDT AVYYCARGNPWELRLDYWGQGTLVTVSSGGGGSGGGGSGGGGSGGGGSDIQMTQ SPSSLSASVGDRVTITCQASQDISNYLNWYQQKPGKAPKLLIYAASSLQSGVPSRFSG SGSGTDFTLTISSLQPEDFATYYCQQYYSYPFTFGPGTKVDIKGGGGSGGGGSQVQL QQSGAELARPGASVKMSCKASGYTFTRYTMHWVKQRPGQGLEWIGYINPSRGYTN YNQKFKDKATLTTDKSSSTAYMQLSSLTSEDSAVYYCARYYDDHYSLDYWGQGTT LTVSSASTKGPSVFPLAPSSKSTSGGTAALGCLVKDYFPEPVTVSWNSGALTSGVHTF PAVLQSSGLYSLSSVVTVPSSSLGTQTYICNVNHKPSNTKVDKRVEPKSCDKTHTCPP CPAPELLGGPSVFLFPPKPKDTLMISRTPEVTCVVVDVSHEDPEVKFNWYVDGVEVH NAKTKPREEQYQSTYRVVSVLTVLHQDWLNGKEYKCKVSNKALPAPIEKTISKAKG QPREPQVCTLPPSREEMTKNQVSLSCAVKGFYPSDIAVEWESNGQPENNYKTTPPVL DSDGSFFLVSKLTVDKSRWQQGNVFSCSVMHEALHNRFTQKSLSLSPGK; and (c) the third polypeptide comprises the sequence

MDMRVPAQLLGLLLLWLPGARCQIVLTQSPAIMSASPGEKVTMTCSASSS
VSYMNWYQQKSGTSPKRWIYDTSKLASGVPAHFRGSGSGTSYSLTISGME
AEDAATYYCQQWSSNPFTFGSGTKLEINRTVAAPSVFIFPPSDEQLKSGT
ASVVCLLNNFYPREAKVQWKVDNALQSGNSQESVTEQDSKDSTYSLSSTL
TLSKADYEKHKVYACEVTHQGLSSPVTKSFNRGEC.

[0068] In some embodiments, (a) the first polypeptide comprises the sequence MGWSCIILFLVATATGVHSEVQLLESGGGLVKPGGSLRLSCAASGFSFSSYWMSWV RQAPGKGLEWISYISGDSGYTNYADSVKGRFTISRDDSKNTLYLQMNSLKTEDTAVY YCASHDYGDYGEYFQHWGQGTLVTVSSGGGGSGGGGSGGGGSGGGGSDIQMTQSP SSLSASVGDRVTITCQASQDISNYLNWYQQKPGKAPKLLIYAASSLQSGVPSRFSGSG SGTDFTLTISSLQPEDFATYYCQQAISFPLTFGQSTKVEIKGGGSEPKSSDKTHTCPPCP APELLGGPSVFLFPPKPKDTLMISRTPEVTCVVVDVSHEDPEVKFNWYVDGVEVHNA KTKPREEQYQSTYRVVSVLTVLHQDWLNGKEYKCKVSNKALPAPIEKTISKAKGQP REPQVYTLPPCREEMTKNQVSLWCLVKGFYPSDIAVEWESNGQPENNYKTTPPVLD SDGSFFLYSKLTVDKSRWQQGNVFSCSVMHEALHNHYTQKSLSLSPGK; (b) the second polypeptide comprises the sequence MGWSCIILFLVATATGVHSEVQLLESGGGLVKPGGSLRLSCAASGFSFSSYWMSWV RQAPGKGLEWISYISGDSGYTNYADSVKGRFTISRDDSKNTLYLQMNSLKTEDTAVY YCASHDYGDYGEYFQHWGQGTLVTVSSGGGGSGGGGSGGGGSGGGGSDIQMTQSP SSLSASVGDRVTITCQASQDISNYLNWYQQKPGKAPKLLIYAASSLQSGVPSRFSGSG SGTDFTLTISSLQPEDFATYYCQQAISFPLTFGQSTKVEIKGGGSGGGGSQVQLQQSG AELARPGASVKMSCKASGYTFTRYTMHWVKQRPGQGLEWIGYINPSRGYTNYNQK FKDKATLTTDKSSSTAYMQLSSLTSEDSAVYYCARYYDDHYSLDYWGQGTTLTVSS ASTKGPSVFPLAPSSKSTSGGTAALGCLVKDYFPEPVTVSWNSGALTSGVHTFPAVL QSSGLYSLSSVVTVPSSSLGTQTYICNVNHKPSNTKVDKRVEPKSCDKTHTCPPCPAP ELLGGPSVFLFPPKPKDTLMISRTPEVTCVVVDVSHEDPEVKFNWYVDGVEVHNAK TKPREEQYQSTYRVVSVLTVLHQDWLNGKEYKCKVSNKALPAPIEKTISKAKGQPR EPQVCTLPPSREEMTKNQVSLSCAVKGFYPSDIAVEWESNGQPENNYKTTPPVLDSD GSFFLVSKLTVDKSRWQQGNVFSCSVMHEALHNRFTQKSLSLSPGK; and (c) the third polypeptide comprises the sequence

MDMRVPAQLLGLLLLWLPGARCQIVLTQSPAIMSASPGEKVTMTCSASSS
VSYMNWYQQKSGTSPKRWIYDTSKLASGVPAHFRGSGSGTSYSLTISGME
AEDAATYYCQQWSSNPFTFGSGTKLEINRTVAAPSVFIFPPSDEQLKSGT
ASVVCLLNNFYPREAKVQWKVDNALQSGNSQESVTEQDSKDSTYSLSSTL
TLSKADYEKHKVYACEVTHQGLSSPVTKSFNRGEC.

[0069] In some embodiments, the first and second scFv comprises the sequence QVQLVQSGAEVKKPGASVKVSCKASGYTFTNYYMHWVRQAPGQGLEWMGMINPS GGGTSYAQKFQGRVTMTRDTSTSTVYMELSSLRSEDTAVYYCARGNPWELRLDYW GQGTLVTVSSGGGGSGGGGSGGGGSGGGGSDIQMTQSPSSLSASVGDRVTITCQASQ DISNYLNWYQQKPGKAPKLLIYAASSLQSGVPSRFSGSGSGTDFTLTISSLQPEDFATY YCQQYYSYPFTFGPGTKVDIK, the linker_CH2_CH3 of the first polypeptide comprises the sequence GGGGSEPKSSDKTHTCPPCPAPELLGGPSVFLFPPKPKDTLMISRTPEVTCVVVDVSH EDPEVKFNWYVDGVEVHNAKTKPREEQYQSTYRVVSVLTVLHQDWLNGKEYKCK VSNKALPAPIEKTISKAKGQPREPQVYTLPPCREEMTKNQVSLWCLVKGFYPSDIAVE WESNGQPENNYKTTPPVLDSDGSFFLYSKLTVDKSRWQQGNVFSCSVMHEALHNH YTQKSLSLSPGK, the VH comprises the sequence QVQLVQSGAEVKKPGASVKVSCKASGYTFTRYTMHWVRQAPGQGLEWMGYINPS RGYTNYNQKFKDRVTLTTDKSSSTAYMELSSLRSEDTAVYYCARYYDDHYSLDYW GQGTLVTVSS, CH1-CH2-CH3 of the second polypeptide comprises the sequence ASTKGPSVFPLAPSSKSTSGGTAALGCLVKDYFPEPVTVSWNSGALTSGVHTFPAVL QSSGLYSLSSVVTVPSSSLGTQTYICNVNHKPSNTKVDKRVEPKSCDKTHTCPPCPAP ELLGGPSVFLFPPKPKDTLMISRTPEVTCVVVDVSHEDPEVKFNWYVDGVEVHNAK TKPREEQYQSTYRVVSVLTVLHQDWLNGKEYKCKVSNKALPAPIEKTISKAKGQPR EPQVCTLPPSREEMTKNQVSLSCAVKGFYPSDIAVEWESNGQPENNYKTTPPVLDSD GSFFLVSKLTVDKSRWQQGNVFSCSVMHEALHNRFTQKSLSLSPGK, and the third polypeptide comprises the sequence

DIQMTQSPSSLSASVGDRVTITCSASSSVSYMNWYQQKPGKAPKRLIYDT
SKLASGVPSRFSGSGSGTDFTLTISSLQPEDFATYYCQQWSSNPFTFGQG
TKLEIKRTVAAPSVFIFPPSDEQLKSGTASVVCLLNNFYPREAKVQWKVD
NALQSGNSQESVTEQDSKDSTYSLSSTLTLSKADYEKHKVYACEVTHQGL
SSPVTKSFNRGEC.

[0070] In some embodiments, the first and second scFv comprises the sequence QVQLVQSGAEVKKPGASVKVSCKASGYTFTNYYMEIWVRQAPGQGLEWMGMINPS GGGTSYAQKFQGRVTMTRDTSTSTVYMELSSLRSEDTAVYYCARGNPWELRLDYW GQGTLVTVSSGGGGSGGGGSGGGGSGGGGSDIQMTQSPSSLSASVGDRVTITCQASQ DISNYLNWYQQKPGKAPKLLIYAASSLQSGVPSRFSGSGSGTDFTLTISSLQPEDFATY YCQQYYSYPFTFGPGTKVDIK, the linker_CH2_CH3 of the first polypeptide comprises the sequence GGGGSEPKSSDKTHTCPPCPAPELLGGPSVFLFPPKPKDTLMISRTPEVTCVVVDVSH EDPEVKFNWYVDGVEVHNAKTKPREEQYQSTYRVVSVLTVLHQDWLNGKEYKCK VSNKALPAPIEKTISKAKGQPREPQVYTLPPCREEMTKNQVSLWCLVKGFYPSDIAVE WESNGQPENNYKTTPPVLDSDGSFFLYSKLTVDKSRWQQGNVFSCSVMHEALHNH YTQKSLSLSPGK, the VH comprises the sequence EVQLVESGGGLVQPGGSLRLSCAASGFTFSTYAMNWVRQAPGKGLEWVGRIRSKY NNYATYYADSVKGRFTISRDDSKNTLYLQMNSLRAEDTAVYYCVRHGNFGDSYVS WFAYWGQGTLVTVSS, CH1-CH2-CH3 of the second polypeptide comprises the sequence ASTKGPSVFPLAPSSKSTSGGTAALGCLVKDYFPEPVTVSWNSGALTSGVHTFPAVL QSSGLYSLSSVVTVPSSSLGTQTYICNVNHKPSNTKVDKRVEPKSCDKTHTCPPCPAP ELLGGPSVFLFPPKPKDTLMISRTPEVTCVVVDVSHEDPEVKFNWYVDGVEVHNAK TKPREEQYQSTYRVVSVLTVLHQDWLNGKEYKCKVSNKALPAPIEKTISKAKGQPR EPQVCTLPPSREEMTKNQVSLSCAVKGFYPSDIAVEWESNGQPENNYKTTPPVLDSD GSFFLVSKLTVDKSRWQQGNVFSCSVMHEALHNRFTQKSLSLSPGK, and the third polypeptide comprises the sequence

QAVVTQEPSLTVSPGGTVTLTCGSSTGAVTTSNYANWVQQKPGKSPRGLI
GGTNKRAPGVPARFSGSLLGGKAALTISGAQPEDEADYYCALWYSNHWVF
GGGTKLTVLRTVAAPSVFIFPPSDEQLKSGTASVVCLLNNFYPREAKVQW
KVDNALQSGNSQESVTEQDSKDSTYSLSSTLTLSKADYEKHKVYACEVTH
QGLSSPVTKSFNRGEC.

[0071] In some embodiments, the first and second scFv comprises the sequence QVQLVQSGAEVKKPGSSVKVSCKASGGTFSNFGVSWLRQAPGQGLEWMGGIIPILG TANYAQKFQGRVTITADESTSTAYMELSSLRSEDTAVYYCATPTNSGYYGPYYYYG MDVWGQGTTVTVSSGGGGSGGGGSGGGGSGGGGSDIQMTQSPSSLSASVGDRVTIT CRASQSISSWLAWYQQKPGKAPKLLIYAASTLQSGVPSRFSGSGSGTDFTLTISSLQPE DFATYYCQQSYSIPLTFGGGTKVEIK, the linker_CH2_CH3 of the first polypeptide comprises the sequence GGGGSEPKSSDKTHTCPPCPAPELLGGPSVFLFPPKPKDTLMISRTPEVTCVVVDVSH EDPEVKFNWYVDGVEVHNAKTKPREEQYQSTYRVVSVLTVLHQDWLNGKEYKCK VSNKALPAPIEKTISKAKGQPREPQVYTLPPCREEMTKNQVSLWCLVKGFYPSDIAVE WESNGQPENNYKTTPPVLDSDGSFFLYSKLTVDKSRWQQGNVFSCSVMHEALHNH YTQKSLSLSPGK, VH comprises the sequence QVQLVQSGAEVKKPGASVKVSCKASGYTFTRYTMHWVRQAPGQGLEWMGYINPS RGYTNYNQKFKDRVTLTTDKSSSTAYMELSSLRSEDTAVYYCARYYDDHYSLDYW GQGTLVTVSS, CH1-CH2-CH3 of the second polypeptide comprises the sequence ASTKGPSVFPLAPSSKSTSGGTAALGCLVKDYFPEPVTVSWNSGALTSGVHTFPAVL QSSGLYSLSSVVTVPSSSLGTQTYICNVNHKPSNTKVDKRVEPKSCDKTHTCPPCPAP ELLGGPSVFLFPPKPKDTLMISRTPEVTCVVVDVSHEDPEVKFNWYVDGVEVHNAK TKPREEQYQSTYRVVSVLTVLHQDWLNGKEYKCKVSNKALPAPIEKTISKAKGQPR EPQVCTLPPSREEMTKNQVSLSCAVKGFYPSDIAVEWESNGQPENNYKTTPPVLDSD GSFFLVSKLTVDKSRWQQGNVFSCSVMHEALHNRFTQKSLSLSPGK, and the third polypeptide comprises the sequence

DIQMTQSPSSLSASVGDRVTITCSASSSVSYMNWYQQKPGKAPKRLIYDT
SKLASGVPSRFSGSGSGTDFTLTISSLQPEDFATYYCQQWSSNPFTFGQG
TKLEIKRTVAAPSVFIFPPSDEQLKSGTASVVCLLNNFYPREAKVQWKVD
NALQSGNSQESVTEQDSKDSTYSLSSTLTLSKADYEKHKVYACEVTHQGL
SSPVTKSFNRGEC.

[0072] In some embodiments, the first and second scFv comprises the sequence QVQLVQSGAEVKKPGSSVKVSCKASGGTFSNFGVSWLRQAPGQGLEWMGGIIPILG TANYAQKFQGRVTITADESTSTAYMELSSLRSEDTAVYYCATPTNSGYYGPYYYYG MDVWGQGTTVTVSSGGGGSGGGGSGGGGSGGGGSDIQMTQSPSSLSASVGDRVTIT CRASQSISSWLAWYQQKPGKAPKLLIYAASTLQSGVPSRFSGSGSGTDFTLTISSLQPE DFATYYCQQSYSIPLTFGGGTKVEIK, the linker_CH2_CH3 of the first polypeptide comprises the sequence GGGGSEPKSSDKTHTCPPCPAPELLGGPSVFLFPPKPKDTLMISRTPEVTCVVVDVSH EDPEVKFNWYVDGVEVHNAKTKPREEQYQSTYRVVSVLTVLHQDWLNGKEYKCK VSNKALPAPIEKTISKAKGQPREPQVYTLPPCREEMTKNQVSLWCLVKGFYPSDIAVE WESNGQPENNYKTTPPVLDSDGSFFLYSKLTVDKSRWQQGNVFSCSVMHEALHNH YTQKSLSLSPGK, VH comprises the sequence EVQLVESGGGLVQPGGSLRLSCAASGFTFSTYAMNWVRQAPGKGLEWVGRIRSKY NNYATYYADSVKGRFTISRDDSKNTLYLQMNSLRAEDTAVYYCVRHGNFGDSYVS WFAYWGQGTLVTVSS, CH1-CH2-CH3 of the second polypeptide comprises the sequence ASTKGPSVFPLAPSSKSTSGGTAALGCLVKDYFPEPVTVSWNSGALTSGVHTFPAVL QSSGLYSLSSVVTVPSSSLGTQTYICNVNHKPSNTKVDKRVEPKSCDKTHTCPPCPAP ELLGGPSVFLFPPKPKDTLMISRTPEVTCVVVDVSHEDPEVKFNWYVDGVEVHNAK TKPREEQYQSTYRVVSVLTVLHQDWLNGKEYKCKVSNKALPAPIEKTISKAKGQPR EPQVCTLPPSREEMTKNQVSLSCAVKGFYPSDIAVEWESNGQPENNYKTTPPVLDSD GSFFLVSKLTVDKSRWQQGNVFSCSVMHEALHNRFTQKSLSLSPGK, and the third polypeptide comprises the sequence

QAVVTQEPSLTVSPGGTVTLTCGSSTGAVTTSNYANWVQQKPGKSPRGLI
GGTNKRAPGVPARFSGSLLGGKAALTISGAQPEDEADYYCALWYSNHWVF
GGGTKLTVLRTVAAPSVFIFPPSDEQLKSGTASVVCLLNNFYPREAKVQW
KVDNALQSGNSQESVTEQDSKDSTYSLSSTLTLSKADYEKHKVYACEVTH
QGLSSPVTKSFNRGEC.

[0073] In some embodiments, the multispecific ABP comprises an scFv and a Fab, wherein the ABP comprises a first polypeptide, a second polypeptide, and a third polypeptide, wherein the first polypeptide comprises, in an N→C direction, the first scFv —CH2-CH3, wherein the second polypeptide comprises, in an N→C direction, a VH domain of the Fab-a CH1 domain of the Fab-CH2-CH3, wherein the third polypeptide comprises, in an N→C direction, a VL domain of the Fab-a CL domain of the Fab. In some embodiments, the first ABD comprises the scFv and the additional ABD comprises the Fab. In some embodiments, the first ABD comprises the Fab and the additional ABD comprises the scFv. In some embodiments, the scFv is attached to CH2 via the linker. In some embodiments, the linker comprises (GGGGS)_{N}, wherein _{N}=1-10. In some embodiments, _{N}=1-4. In some embodiments, _{N}=1. The targets of the multispecific ABP are distinct in certain aspects, for example, the targets can be distinct proteins or distinct portions of the same protein.

[0074] In some embodiments, (a) the first polypeptide comprises the sequence MGWSCIILFLVATATGVHSQVQLVQSGAEVKKPGASVKVSCKASGYTFTNYYMHW VRQAPGQGLEWMGMINPSGGGTSYAQKFQGRVTMTRDTSTSTVYMELSSLRSEDT AVYYCARGNPWELRLDYWGQGTLVTVSSGGGGSGGGGSGGGGSGGGGSDIQMTQ SPSSLSASVGDRVTITCQASQDISNYLNWYQQKPGKAPKLLIYAASSLQSGVPSRFSG SGSGTDFTLTISSLQPEDFATYYCQQYYSYPFTFGPGTKVDIKGGGGSEPKSSDKTHT CPPCPAPELLGGPSVFLFPPKPKDTLMISRTPEVTCVVVDVSHEDPEVKFNWYVDGV EVHNAKTKPREEQYQSTYRVVSVLTVLHQDWLNGKEYKCKVSNKALPAPIEKTISK AKGQPREPQVYTLPPCREEMTKNQVSLWCLVKGFYPSDIAVEWESNGQPENNYKTT PPVLDSDGSFFLYSKLTVDKSRWQQGNVFSCSVMHEALHNHYTQKSLSLSPGK; (b) the second polypeptide comprises the sequence MGWSCIILFLVATATGVHSQVQLQQSGAELARPGASVKMSCKASGYTFTRYTMHW VKQRPGQGLEWIGYINPSRGYTNYNQKFKDKATLTTDKSSSTAYMQLSSLTSEDSAV YYCARYYDDHYSLDYWGQGTTLTVSSASTKGPSVFPLAPSSKSTSGGTAALGCLVK DYFPEPVTVSWNSGALTSGVHTFPAVLQSSGLYSLSSVVTVPSSSLGTQTYICNVNHK PSNTKVDKRVEPKSCDKTHTCPPCPAPELLGGPSVFLFPPKPKDTLMISRTPEVTCVV VDVSHEDPEVKFNWYVDGVEVHNAKTKPREEQYQSTYRVVSVLTVLHQDWLNGK EYKCKVSNKALPAPIEKTISKAKGQPREPQVCTLPPSREEMTKNQVSLSCAVKGFYPS DIAVEWESNGQPENNYKTTPPVLDSDGSFFLVSKLTVDKSRWQQGNVFSCSVMHEA LHNRFTQKSLSLSPGK; and (c) the third polypeptide comprises the sequence

MDMRVPAQLLGLLLLWLPGARCQIVLTQSPAIMSASPGEKVTMTCSASSS
VSYMNWYQQKSGTSPKRWIYDTSKLASGVPAHFRGSGSGTSYSLTISGME
AEDAATYYCQQWSSNPFTFGSGTKLEINRTVAAPSVFIFPPSDEQLKSGT
ASVVCLLNNFYPREAKVQWKVDNALQSGNSQESVTEQDSKDSTYSLSSTL
TLSKADYEKHKVYACEVTHQGLSSPVTKSFNRGEC.

[0075] In some embodiments, (a) the first polypeptide comprises the sequence MGWSCIILFLVATATGVHSEVQLLESGGGLVKPGGSLRLSCAASGFSFSSYWMSWV RQAPGKGLEWISYISGDSGYTNYADSVKGRFTISRDDSKNTLYLQMNSLKTEDTAVY YCASHDYGDYGEYFQHWGQGTLVTVSSGGGGSGGGGSGGGGSGGGGSDIQMTQSP SSLSASVGDRVTITCQASQDISNYLNWYQQKPGKAPKLLIYAASSLQSGVPSRFSGSG SGTDFTLTISSLQPEDFATYYCQQAISFPLTFGQSTKVEIKGGGSEPKSSDKTHTCPPCP APELLGGPSVFLFPPKPKDTLMISRTPEVTCVVVDVSHEDPEVKFNWYVDGVEVHNA KTKPREEQYQSTYRVVSVLTVLHQDWLNGKEYKCKVSNKALPAPIEKTISKAKGQP REPQVYTLPPCREEMTKNQVSLWCLVKGFYPSDIAVEWESNGQPENNYKTTPPVLD SDGSFFLYSKLTVDKSRWQQGNVFSCSVMHEALHNHYTQKSLSLSPGK; (b) the second polypeptide comprises the sequence MGWSCIILFLVATATGVHSQVQLQQSGAELARPGASVKMSCKASGYTFTRYTMHW VKQRPGQGLEWIGYINPSRGYTNYNQKFKDKATLTTDKSSSTAYMQLSSLTSEDSAV YYCARYYDDHYSLDYWGQGTTLTVSSASTKGPSVFPLAPSSKSTSGGTAALGCLVK DYFPEPVTVSWNSGALTSGVHTFPAVLQSSGLYSLSSVVTVPSSSLGTQTYICNVNHK PSNTKVDKRVEPKSCDKTHTCPPCPAPELLGGPSVFLFPPKPKDTLMISRTPEVTCVV VDVSHEDPEVKFNWYVDGVEVHNAKTKPREEQYQSTYRVVSVLTVLHQDWLNGK EYKCKVSNKALPAPIEKTISKAKGQPREPQVCTLPPSREEMTKNQVSLSCAVKGFYPS DIAVEWESNGQPENNYKTTPPVLDSDGSFFLVSKLTVDKSRWQQGNVFSCSVMHEA LHNRFTQKSLSLSPGK; and (c) the third polypeptide comprises the sequence

MDMRVPAQLLGLLLLWLPGARCQIVLTQSPAIMSASPGEKVTMTCSASSS
VSYMNWYQQKSGTSPKRWIYDTSKLASGVPAHFRGSGSGTSYSLTISGME
AEDAATYYCQQWSSNPFTFGSGTKLEINRTVAAPSVFIFPPSDEQLKSGT
ASVVCLLNNFYPREAKVQWKVDNALQSGNSQESVTEQDSKDSTYSLSSTL
TLSKADYEKHKVYACEVTHQGLSSPVTKSFNRGEC.

[0076] In some embodiments, the VH of the second polypeptide comprises the sequence QVQLVQSGAEVKKPGASVKVSCKASGYTFTRYTMHWVRQAPGQGLEWMGYINPS RGYTNYNQKFKDRVTLTTDKSSSTAYMELSSLRSEDTAVYYCARYYDDHYSLDYW GQGTLVTVSS, the CH1-CH2-CH3 of the second polypeptide comprises the sequence ASTKGPSVFPLAPSSKSTSGGTAALGCLVKDYFPEPVTVSWNSGALTSGVHTFPAVL QSSGLYSLSSVVTVPSSSLGTQTYICNVNHKPSNTKVDKRVEPKSCDKTHTCPPCPAP ELLGGPSVFLFPPKPKDTLMISRTPEVTCVVVDVSHEDPEVKFNWYVDGVEVHNAK TKPREEQYQSTYRVVSVLTVLHQDWLNGKEYKCKVSNKALPAPIEKTISKAKGQPR EPQVCTLPPSREEMTKNQVSLSCAVKGFYPSDIAVEWESNGQPENNYKTTPPVLDSD GSFFLVSKLTVDKSRWQQGNVFSCSVMHEALHNRFTQKSLSLSPGK, the scFv of the first polypeptide comprises the sequence QVQLVQSGAEVKKPGASVKVSCKASGYTFTNYYMEIWVRQAPGQGLEWMGMINPS GGGTSYAQKFQGRVTMTRDTSTSTVYMELSSLRSEDTAVYYCARGNPWELRLDYW GQGTLVTVSSGGGGSGGGGSGGGGSGGGGSDIQMTQSPSSLSASVGDRVTITCQASQ DISNYLNWYQQKPGKAPKLLIYAASSLQSGVPSRFSGSGSGTDFTLTISSLQPEDFATY YCQQYYSYPFTFGPGTKVDIK, the linker_CH2_CH3 of the first polypeptide comprises the sequence GGGGSEPKSSDKTHTCPPCPAPELLGGPSVFLFPPKPKDTLMISRTPEVTCVVVDVSH EDPEVKFNWYVDGVEVHNAKTKPREEQYQSTYRVVSVLTVLHQDWLNGKEYKCK VSNKALPAPIEKTISKAKGQPREPQVYTLPPCREEMTKNQVSLWCLVKGFYPSDIAVE WESNGQPENNYKTTPPVLDSDGSFFLYSKLTVDKSRWQQGNVFSCSVMHEALHNH YTQKSLSLSPGK, and the third polypeptide comprises the sequence

DIQMTQSPSSLSASVGDRVTITCSASSSVSYMNWYQQKPGKAPKRLIYDT
SKLASGVPSRFSGSGSGTDFTLTISSLQPEDFATYYCQQWSSNPFTFGQG
TKLEIKRTVAAPSVFIFPPSDEQLKSGTASVVCLLNNFYPREAKVQWKVD
NALQSGNSQESVTEQDSKDSTYSLSSTLTLSKADYEKHKVYACEVTHQGL
SSPVTKSFNRGEC.

[0077] In some embodiments, the VH of the second polypeptide comprises the sequence EVQLVESGGGLVQPGGSLRLSCAASGFTFSTYAMNWVRQAPGKGLEWVGRIRSKY NNYATYYADSVKGRFTISRDDSKNTLYLQMNSLRAEDTAVYYCVRHGNFGDSYVS WFAYWGQGTLVTVSS, the CH1-CH2-CH3 of the second polypeptide comprises the sequence ASTKGPSVFPLAPSSKSTSGGTAALGCLVKDYFPEPVTVSWNSGALTSGVHTFPAVL QSSGLYSLSSVVTVPSSSLGTQTYICNVNHKPSNTKVDKRVEPKSCDKTHTCPPCPAP ELLGGPSVFLFPPKPKDTLMISRTPEVTCVVVDVSHEDPEVKFNWYVDGVEVHNAK TKPREEQYQSTYRVVSVLTVLHQDWLNGKEYKCKVSNKALPAPIEKTISKAKGQPR EPQVCTLPPSREEMTKNQVSLSCAVKGFYPSDIAVEWESNGQPENNYKTTPPVLDSD GSFFLVSKLTVDKSRWQQGNVFSCSVMHEALHNRFTQKSLSLSPGK, the scFv of the first polypeptide comprises the sequence QVQLVQSGAEVKKPGASVKVSCKASGYTFTNYYMHWVRQAPGQGLEWMGMINPS GGGTSYAQKFQGRVTMTRDTSTSTVYMELSSLRSEDTAVYYCARGNPWELRLDYW GQGTLVTVSSGGGGSGGGGSGGGGSGGGGSDIQMTQSPSSLSASVGDRVTITCQASQ DISNYLNWYQQKPGKAPKLLIYAASSLQSGVPSRFSGSGSGTDFTLTISSLQPEDFATY YCQQYYSYPFTFGPGTKVDIK, the linker_CH2_CH3 of the first polypeptide comprises the sequence GGGGSEPKSSDKTHTCPPCPAPELLGGPSVFLFPPKPKDTLMISRTPEVTCVVVDVSH EDPEVKFNWYVDGVEVHNAKTKPREEQYQSTYRVVSVLTVLHQDWLNGKEYKCK VSNKALPAPIEKTISKAKGQPREPQVYTLPPCREEMTKNQVSLWCLVKGFYPSDIAVE WESNGQPENNYKTTPPVLDSDGSFFLYSKLTVDKSRWQQGNVFSCSVMHEALHNH YTQKSLSLSPGK, and the third polypeptide comprises the sequence

QAVVTQEPSLTVSPGGTVTLTCGSSTGAVTTSNYANWVQQKPGKSPRGLI
GGTNKRAPGVPARFSGSLLGGKAALTISGAQPEDEADYYCALWYSNHWVF
GGGTKLTVLRTVAAPSVFIFPPSDEQLKSGTASVVCLLNNFYPREAKVQW
KVDNALQSGNSQESVTEQDSKDSTYSLSSTLTLSKADYEKHKVYACEVTH
QGLSSPVTKSFNRGEC.

[0078] In some embodiments, the VH of the second polypeptide comprises the sequence QVQLVQSGAEVKKPGASVKVSCKASGYTFTRYTMHWVRQAPGQGLEWMGYINPS RGYTNYNQKFKDRVTLTTDKSSSTAYMELSSLRSEDTAVYYCARYYDDHYSLDYW GQGTLVTVSS, the CH1-CH2-CH3 of the second polypeptide comprises the sequence ASTKGPSVFPLAPSSKSTSGGTAALGCLVKDYFPEPVTVSWNSGALTSGVHTFPAVL QSSGLYSLSSVVTVPSSSLGTQTYICNVNHKPSNTKVDKRVEPKSCDKTHTCPPCPAP ELLGGPSVFLFPPKPKDTLMISRTPEVTCVVVDVSHEDPEVKFNWYVDGVEVHNAK TKPREEQYQSTYRVVSVLTVLHQDWLNGKEYKCKVSNKALPAPIEKTISKAKGQPR EPQVCTLPPSREEMTKNQVSLSCAVKGFYPSDIAVEWESNGQPENNYKTTPPVLDSD GSFFLVSKLTVDKSRWQQGNVFSCSVMHEALHNRFTQKSLSLSPGK, the scFv of the first polypeptide comprises the sequence QVQLVQSGAEVKKPGSSVKVSCKASGGTFSNFGVSWLRQAPGQGLEWMGGIIPILG TANYAQKFQGRVTITADESTSTAYMELSSLRSEDTAVYYCATPTNSGYYGPYYYYG MDVWGQGTTVTVSSGGGGSGGGGSGGGGSGGGGSDIQMTQSPSSLSASVGDRVTIT CRASQSISSWLAWYQQKPGKAPKLLIYAASTLQSGVPSRFSGSGSGTDFTLTISSLQPE DFATYYCQQSYSIPLTFGGGTKVEIK, the linker_CH2_CH3 of the first polypeptide comprises the sequence GGGGSEPKSSDKTHTCPPCPAPELLGGPSVFLFPPKPKDTLMISRTPEVTCVVVDVSH EDPEVKFNWYVDGVEVHNAKTKPREEQYQSTYRVVSVLTVLHQDWLNGKEYKCK VSNKALPAPIEKTISKAKGQPREPQVYTLPPCREEMTKNQVSLWCLVKGFYPSDIAVE WESNGQPENNYKTTPPVLDSDGSFFLYSKLTVDKSRWQQGNVFSCSVMHEALHNH YTQKSLSLSPGK and the third polypeptide comprises the sequence

DIQMTQSPSSLSASVGDRVTITCSASSSVSYMNWYQQKPGKAPKRLIYDT
SKLASGVPSRFSGSGSGTDFTLTISSLQPEDFATYYCQQWSSNPFTFGQG
TKLEIKRTVAAPSVFIFPPSDEQLKSGTASVVCLLNNFYPREAKVQWKVD
NALQSGNSQESVTEQDSKDSTYSLSSTLTLSKADYEKHKVYACEVTHQGL
SSPVTKSFNRGEC.

[0079] In some embodiments, the VH of the second polypeptide comprises the sequence EVQLVESGGGLVQPGGSLRLSCAASGFTFSTYAMNWVRQAPGKGLEWVGRIRSKY NNYATYYADSVKGRFTISRDDSKNTLYLQMNSLRAEDTAVYYCVRHGNFGDSYVS WFAYWGQGTLVTVSS, the CH1-CH2-CH3 of the second polypeptide comprises the sequence ASTKGPSVFPLAPSSKSTSGGTAALGCLVKDYFPEPVTVSWNSGALTSGVHTFPAVL QSSGLYSLSSVVTVPSSSLGTQTYICNVNHKPSNTKVDKRVEPKSCDKTHTCPPCPAP ELLGGPSVFLFPPKPKDTLMISRTPEVTCVVVDVSHEDPEVKFNWYVDGVEVHNAK TKPREEQYQSTYRVVSVLTVLHQDWLNGKEYKCKVSNKALPAPIEKTISKAKGQPR EPQVCTLPPSREEMTKNQVSLSCAVKGFYPSDIAVEWESNGQPENNYKTTPPVLDSD GSFFLVSKLTVDKSRWQQGNVFSCSVMHEALHNRFTQKSLSLSPGK, the scFv of the first polypeptide comprises the sequence QVQLVQSGAEVKKPGSSVKVSCKASGGTFSNFGVSWLRQAPGQGLEWMGGIIPILG TANYAQKFQGRVTITADESTSTAYMELSSLRSEDTAVYYCATPTNSGYYGPYYYYG MDVWGQGTTVTVSSGGGGSGGGGSGGGGSGGGGSDIQMTQSPSSLSASVGDRVTIT CRASQSISSWLAWYQQKPGKAPKLLIYAASTLQSGVPSRFSGSGSGTDFTLTISSLQPE DFATYYCQQSYSIPLTFGGGTKVEIK, the linker_CH2_CH3 of the first polypeptide comprises the sequence GGGGSEPKSSDKTHTCPPCPAPELLGGPSVFLFPPKPKDTLMISRTPEVTCVVVDVSH EDPEVKFNWYVDGVEVHNAKTKPREEQYQSTYRVVSVLTVLHQDWLNGKEYKCK VSNKALPAPIEKTISKAKGQPREPQVYTLPPCREEMTKNQVSLWCLVKGFYPSDIAVE WESNGQPENNYKTTPPVLDSDGSFFLYSKLTVDKSRWQQGNVFSCSVMHEALHNH YTQKSLSLSPGK, and the third polypeptide comprises the sequence

QAVVTQEPSLTVSPGGTVTLTCGSSTGAVTTSNYANWVQQKPGKSPRGLI
GGTNKRAPGVPARFSGSLLGGKAALTISGAQPEDEADYYCALWYSNHWVF
GGGTKLTVLRTVAAPSVFIFPPSDEQLKSGTASVVCLLNNFYPREAKVQW
KVDNALQSGNSQESVTEQDSKDSTYSLSSTLTLSKADYEKHKVYACEVTH
QGLSSPVTKSFNRGEC.

[0080] In some embodiments, the multispecific ABP comprises a first and second scFv and a first and second Fab, wherein the multispecific ABP comprises a first polypeptide, a second polypeptide, a third polypeptide, and a fourth polypeptide, wherein the first polypeptide comprises, in an N→C direction, a VH domain of the first Fab-CH1-CH2-CH3-optional linker-the first scFv, wherein the second polypeptide comprises, in an N→C direction, a VH domain of the second Fab-CH1-CH2-CH3-optional linker-the second scFv, wherein the third polypeptide comprises, in an N→C direction, a VL domain of the first Fab-a Cl domain of the first Fab, and wherein the fourth polypeptide comprises, in an N→C direction, a VL domain of the second Fab-a Cl domain of the second Fab. In some embodiments, the first scFv and the second scFv each bind to an HLA-PEPTIDE target. In some embodiments, the first scFv and the second scFv each bind to the same HLA-PEPTIDE target. In some embodiments, the first scFv and the second scFv each bind to the same epitope of the HLA-PEPTIDE target. In some embodiments, the first scFv and the second scFv each comprise identical CDR sequences. In some embodiments, the first scFv and the second scFv each comprise identical VH and VL sequences. In some embodiments, the first Fab and the second Fab each bind the additional antigen. In some embodiments, the first Fab and the second Fab each bind to the same epitope of the additional antigen. In some embodiments, the first Fab and the second Fab each comprise identical CDR sequences. In some embodiments, the first Fab and the second Fab each comprise identical VH and VL sequences. In some embodiments, the first and second polypeptide chains are identical and the third and fourth polypeptide chains are identical. In some embodiments, the first polypeptide comprises, in an N→C direction, a VH domain of the first Fab-CH1-CH2-CH3-linker-the first scFv. In some embodiments, the second polypeptide comprises, in an N→C direction, a VH domain of the second Fab-CH1-CH2-CH3-linker-the second scFv. In some embodiments, the linker comprises (GGGGS)_{N}, wherein _{N}=1-10. In some embodiments, _{N}=1-4. In some embodiments, _{N}=2. The targets of the multispecific ABP are distinct in certain aspects, for example, the targets can be distinct proteins or distinct portions of the same protein.

[0081] In some embodiments, the first and second polypeptides comprise the sequence MGWSCIILFLVATATGVHSQVQLQQSGAELARPGASVKMSCKASGYTFTRYTMHW VKQRPGQGLEWIGYINPSRGYTNYNQKFKDKATLTTDKSSSTAYMQLSSLTSEDSAV YYCARYYDDHYSLDYWGQGTTLTVSSASTKGPSVFPLAPSSKSTSGGTAALGCLVK DYFPEPVTVSWNSGALTSGVHTFPAVLQSSGLYSLSSVVTVPSSSLGTQTYICNVNHK PSNTKVDKRVEPKSCDKTHTCPPCPAPELLGGPSVFLFPPKPKDTLMISRTPEVTCVV VDVSHEDPEVKFNWYVDGVEVHNAKTKPREEQYQSTYRVVSVLTVLHQDWLNGK EYKCKVSNKALPAPIEKTISKAKGQPREPQVYTLPPSREEMTKNQVSLTCLVKGFYPS DIAVEWESNGQPENNYKTTPPVLDSDGSFFLYSKLTVDKSRWQQGNVFSCSVMHEA LHNHYTQKSLSLSPGKGGGGSGGGGSQVQLVQSGAEVKKPGASVKVSCKASGYTFT NYYMHWVRQAPGQGLEWMGMINPSGGGTSYAQKFQGRVTMTRDTSTSTVYMELS SLRSEDTAVYYCARGNPWELRLDYWGQGTLVTVSSGGGGSGGGGSGGGGSGGGGS DIQMTQSPSSLSASVGDRVTITCQASQDISNYLNWYQQKPGKAPKLLIYAASSLQSGV PSRFSGSGSGTDFTLTISSLQPEDFATYYCQQYYSYPFTFGPGTKVDIK; and the third and fourth polypeptides comprise the sequence

MDMRVPAQLLGLLLLWLPGARCQIVLTQSPAIMSASPGEKVTMTCSASSS
VSYMNWYQQKSGTSPKRWIYDTSKLASGVPAHFRGSGSGTSYSLTISGME
AEDAATYYCQQWSSNPFTFGSGTKLEINRTVAAPSVFIFPPSDEQLKSGT
ASVVCLLNNFYPREAKVQWKVDNALQSGNSQESVTEQDSKDSTYSLSSTL
TLSKADYEKHKVYACEVTHQGLSSPVTKSFNRGEC.

[0082] In some embodiments, (a) the first and second polypeptides comprise the sequence MGWSCIILFLVATATGVHSQVQLQQSGAELARPGASVKMSCKASGYTFTRYTMHW VKQRPGQGLEWIGYINPSRGYTNYNQKFKDKATLTTDKSSSTAYMQLSSLTSEDSAV YYCARYYDDHYSLDYWGQGTTLTVSSASTKGPSVFPLAPSSKSTSGGTAALGCLVK DYFPEPVTVSWNSGALTSGVHTFPAVLQSSGLYSLSSVVTVPSSSLGTQTYICNVNHK PSNTKVDKRVEPKSCDKTHTCPPCPAPELLGGPSVFLFPPKPKDTLMISRTPEVTCVV VDVSHEDPEVKFNWYVDGVEVHNAKTKPREEQYQSTYRVVSVLTVLHQDWLNGK EYKCKVSNKALPAPIEKTISKAKGQPREPQVYTLPPSREEMTKNQVSLTCLVKGFYPS DIAVEWESNGQPENNYKTTPPVLDSDGSFFLYSKLTVDKSRWQQGNVFSCSVMHEA LHNHYTQKSLSLSPGKGGGGSGGGGSEVQLLESGGGLVKPGGSLRLSCAASGFSFSS YWMSWVRQAPGKGLEWISYISGDSGYTNYADSVKGRFTISRDDSKNTLYLQMNSLK TEDTAVYYCASHDYGDYGEYFQHWGQGTLVTVSSGGGGSGGGGSGGGGSGGGGS DIQMTQSPSSLSASVGDRVTITCQASQDISNYLNWYQQKPGKAPKLLIYAASSLQSGV PSRFSGSGSGTDFTLTISSLQPEDFATYYCQQAISFPLTFGQSTKVEIK; and (b) the third and fourth polypeptides comprise the sequence

MDMRVPAQLLGLLLLWLPGARCQIVLTQSPAIMSASPGEKVTMTCSASSS
VSYMNWYQQKSGTSPKRWIYDTSKLASGVPAHFRGSGSGTSYSLTISGME
AEDAATYYCQQWSSNPFTFGSGTKLEINRTVAAPSVFIFPPSDEQLKSGT
ASVVCLLNNFYPREAKVQWKVDNALQSGNSQESVTEQDSKDSTYSLSSTL
TLSKADYEKHKVYACEVTHQGLSSPVTKSFNRGEC.

[0083] In some embodiments, the VH of the first and second polypeptide chains comprise the sequence QVQLVQSGAEVKKPGASVKVSCKASGYTFTRYTMHWVRQAPGQGLEWMGYINPS RGYTNYNQKFKDRVTLTTDKSSSTAYMELSSLRSEDTAVYYCARYYDDHYSLDYW GQGTLVTVSS, the CH1-CH2-CH3 of the first and second polypeptide chains comprise the sequence ASTKGPSVFPLAPSSKSTSGGTAALGCLVKDYFPEPVTVSWNSGALTSGVHTFPAVL QSSGLYSLSSVVTVPSSSLGTQTYICNVNHKPSNTKVDKRVEPKSCDKTHTCPPCPAP ELLGGPSVFLFPPKPKDTLMISRTPEVTCVVVDVSHEDPEVKFNWYVDGVEVHNAK TKPREEQYQSTYRVVSVLTVLHQDWLNGKEYKCKVSNKALPAPIEKTISKAKGQPR EPQVYTLPPSREEMTKNQVSLTCLVKGFYPSDIAVEWESNGQPENNYKTTPPVLDSD GSFFLYSKLTVDKSRWQQGNVFSCSVMHEALHNHYTQKSLSLSPGK, the scFv of the first and second polypeptide chains comprise the sequence QVQLVQSGAEVKKPGASVKVSCKASGYTFTNYYMHWVRQAPGQGLEWMGMINPS GGGTSYAQKFQGRVTMTRDTSTSTVYMELSSLRSEDTAVYYCARGNPWELRLDYW GQGTLVTVSSGGGGSGGGGSGGGGSGGGGSDIQMTQSPSSLSASVGDRVTITCQASQ DISNYLNWYQQKPGKAPKLLIYAASSLQSGVPSRFSGSGSGTDFTLTISSLQPEDFATY YCQQYYSYPFTFGPGTKVDIK, and the VL_CL of the third and fourth polypeptide chains comprise the sequence

DIQMTQSPSSLSASVGDRVTITCSASSSVSYMNWYQQKPGKAPKRLIYDT
SKLASGVPSRFSGSGSGTDFTLTISSLQPEDFATYYCQQWSSNPFTFGQG
TKLEIKRTVAAPSVFIFPPSDEQLKSGTASVVCLLNNFYPREAKVQWKVD
NALQSGNSQESVTEQDSKDSTYSLSSTLTLSKADYEKHKVYACEVTHQGL
SSPVTKSFNRGEC.

[0084] In some embodiments, the VH of the first and second polypeptide chains comprise the sequence EVQLVESGGGLVQPGGSLRLSCAASGFTFSTYAMNWVRQAPGKGLEWVGRIRSKY NNYATYYADSVKGRFTISRDDSKNTLYLQMNSLRAEDTAVYYCVRHGNFGDSYVS WFAYWGQGTLVTVSS, the CH1-CH2-CH3 of the first and second polypeptide chains comprise the sequence ASTKGPSVFPLAPSSKSTSGGTAALGCLVKDYFPEPVTVSWNSGALTSGVHTFPAVL QSSGLYSLSSVVTVPSSSLGTQTYICNVNHKPSNTKVDKRVEPKSCDKTHTCPPCPAP ELLGGPSVFLFPPKPKDTLMISRTPEVTCVVVDVSHEDPEVKFNWYVDGVEVHNAK TKPREEQYQSTYRVVSVLTVLHQDWLNGKEYKCKVSNKALPAPIEKTISKAKGQPR EPQVYTLPPSREEMTKNQVSLTCLVKGFYPSDIAVEWESNGQPENNYKTTPPVLDSD GSFFLYSKLTVDKSRWQQGNVFSCSVMHEALHNHYTQKSLSLSPGK, the scFv of the first and second polypeptide chains comprise the sequence QVQLVQSGAEVKKPGASVKVSCKASGYTFTNYYMHWVRQAPGQGLEWMGMINPS GGGTSYAQKFQGRVTMTRDTSTSTVYMELSSLRSEDTAVYYCARGNPWELRLDYW GQGTLVTVSSGGGGSGGGGSGGGGSGGGGSDIQMTQSPSSLSASVGDRVTITCQASQ DISNYLNWYQQKPGKAPKLLIYAASSLQSGVPSRFSGSGSGTDFTLTISSLQPEDFATY YCQQYYSYPFTFGPGTKVDIK, and the VL_CL of the third and fourth polypeptide chains comprise the sequence

QAVVTQEPSLTVSPGGTVTLTCGSSTGAVTTSNYANWVQQKPGKSPRGLI
GGTNKRAPGVPARFSGSLLGGKAALTISGAQPEDEADYYCALWYSNHWVF
GGGTKLTVLRTVAAPSVFIFPPSDEQLKSGTASVVCLLNNFYPREAKVQW
KVDNALQSGNSQESVTEQDSKDSTYSLSSTLTLSKADYEKHKVYACEVTH
QGLSSPVTKSFNRGEC.

[0085] In some embodiments, the VH of the first and second polypeptide chains comprise the sequence QVQLVQSGAEVKKPGASVKVSCKASGYTFTRYTMHWVRQAPGQGLEWMGYINPS RGYTNYNQKFKDRVTLTTDKSSSTAYMELSSLRSEDTAVYYCARYYDDHYSLDYW GQGTLVTVSS, the CH1-CH2-CH3 of the first and second polypeptide chains comprise the sequence ASTKGPSVFPLAPSSKSTSGGTAALGCLVKDYFPEPVTVSWNSGALTSGVHTFPAVL QSSGLYSLSSVVTVPSSSLGTQTYICNVNHKPSNTKVDKRVEPKSCDKTHTCPPCPAP ELLGGPSVFLFPPKPKDTLMISRTPEVTCVVVDVSHEDPEVKFNWYVDGVEVHNAK TKPREEQYQSTYRVVSVLTVLHQDWLNGKEYKCKVSNKALPAPIEKTISKAKGQPR EPQVYTLPPSREEMTKNQVSLTCLVKGFYPSDIAVEWESNGQPENNYKTTPPVLDSD GSFFLYSKLTVDKSRWQQGNVFSCSVMHEALHNHYTQKSLSLSPGK, the scFv of the first and second polypeptide chains comprise the sequence QVQLVQSGAEVKKPGSSVKVSCKASGGTFSNFGVSWLRQAPGQGLEWMGGIIPILG TANYAQKFQGRVTITADESTSTAYMELSSLRSEDTAVYYCATPTNSGYYGPYYYYG MDVWGQGTTVTVSSGGGGSGGGGSGGGGSGGGGSDIQMTQSPSSLSASVGDRVTIT CRASQSISSWLAWYQQKPGKAPKLLIYAASTLQSGVPSRFSGSGSGTDFTLTISSLQPE DFATYYCQQSYSIPLTFGGGTKVEIK, and the VL_CL of the third and fourth polypeptide chains comprise the sequence

DIQMTQSPSSLSASVGDRVTITCSASSSVSYMNWYQQKPGKAPKRLIYDT
SKLASGVPSRFSGSGSGTDFTLTISSLQPEDFATYYCQQWSSNPFTFGQG
TKLEIKRTVAAPSVFIFPPSDEQLKSGTASVVCLLNNFYPREAKVQWKVD
NALQSGNSQESVTEQDSKDSTYSLSSTLTLSKADYEKHKVYACEVTHQGL
SSPVTKSFNRGEC.

[0086] In some embodiments, the VH of the first and second polypeptide chains comprise the sequence EVQLVESGGGLVQPGGSLRLSCAASGFTFSTYAMNWVRQAPGKGLEWVGRIRSKY NNYATYYADSVKGRFTISRDDSKNTLYLQMNSLRAEDTAVYYCVRHGNFGDSYVS WFAYWGQGTLVTVSS, the CH1-CH2-CH3 of the first and second polypeptide chains comprise the sequence ASTKGPSVFPLAPSSKSTSGGTAALGCLVKDYFPEPVTVSWNSGALTSGVHTFPAVL QSSGLYSLSSVVTVPSSSLGTQTYICNVNHKPSNTKVDKRVEPKSCDKTHTCPPCPAP ELLGGPSVFLFPPKPKDTLMISRTPEVTCVVVDVSHEDPEVKFNWYVDGVEVHNAK TKPREEQYQSTYRVVSVLTVLHQDWLNGKEYKCKVSNKALPAPIEKTISKAKGQPR EPQVYTLPPSREEMTKNQVSLTCLVKGFYPSDIAVEWESNGQPENNYKTTPPVLDSD GSFFLYSKLTVDKSRWQQGNVFSCSVMHEALHNHYTQKSLSLSPGK, the scFv of the first and second polypeptide chains comprise the sequence QVQLVQSGAEVKKPGSSVKVSCKASGGTFSNFGVSWLRQAPGQGLEWMGGIIPILG TANYAQKFQGRVTITADESTSTAYMELSSLRSEDTAVYYCATPTNSGYYGPYYYYG MDVWGQGTTVTVSSGGGGSGGGGSGGGGSGGGGSDIQMTQSPSSLSASVGDRVTIT CRASQSISSWLAWYQQKPGKAPKLLIYAASTLQSGVPSRFSGSGSGTDFTLTISSLQPE DFATYYCQQSYSIPLTFGGGTKVEIK, and the VL_CL of the third and fourth polypeptide chains comprise the sequence

QAVVTQEPSLTVSPGGTVTLTCGSSTGAVTTSNYANWVQQKPGKSPRGLI
GGTNKRAPGVPARFSGSLLGGKAALTISGAQPEDEADYYCALWYSNHWVF
GGGTKLTVLRTVAAPSVFIFPPSDEQLKSGTASVVCLLNNFYPREAKVQW
KVDNALQSGNSQESVTEQDSKDSTYSLSSTLTLSKADYEKHKVYACEVTH
QGLSSPVTKSFNRGEC.

[0087] In some embodiments, the multispecific ABP comprises an scFv and a Fab, wherein the ABP comprises a first polypeptide, a second polypeptide, and a third polypeptide, wherein the first polypeptide comprises, in an N→C direction, optional hinge-CH2-CH3, wherein the second polypeptide comprises, in an N→C direction, a VH domain of the Fab-a CH1 domain of the Fab-CH2-CH3, wherein the third polypeptide comprises, in an N→C direction, a VL domain of the Fab-a CL domain of the Fab, and wherein the scFv is attached, directly or indirectly, to the N-terminus of the second polypeptide or the third polypeptide. In some embodiments, the scFv is attached, directly or indirectly, to the N-terminus of the second polypeptide. In some embodiments, the scFv is attached, directly or indirectly, to the N-terminus of the third polypeptide. In some embodiments, the first ABD comprises the scFv and the additional ABD comprises the Fab. In some embodiments, the first ABD comprises the Fab and the additional ABD comprises the scFv. In some embodiments, the scFv is attached to the N-terminus of the second polypeptide or the third polypeptide via a linker. In some embodiments, the linker comprises (GGGGS)_{N}, wherein _{N}=1-10. In some embodiments, _{N}=1-4. In some embodiments, _{N}=2. The targets of the multispecific ABP are distinct in certain aspects, for example, the targets can be distinct proteins or distinct portions of the same protein.

[0088] In some embodiments, (a) the first polypeptide comprises the sequence MGWSCIILFLVATATGVHSGSEPKSSDKTHTCPPCPAPELLGGPSVFLFPPKPKDTLMI SRTPEVTCVVVDVSHEDPEVKFNWYVDGVEVHNAKTKPREEQYQSTYRVVSVLTV LHQDWLNGKEYKCKVSNKALPAPIEKTISKAKGQPREPQVYTLPPCREEMTKNQVS LWCLVKGFYPSDIAVEWESNGQPENNYKTTPPVLDSDGSFFLYSKLTVDKSRWQQG NVFSCSVMHEALHNHYTQKSLSLSPGK; (b) the second polypeptide comprises the sequence MGWSCIILFLVATATGVHSQVQLVQSGAEVKKPGASVKVSCKASGYTFTNYYMHW VRQAPGQGLEWMGMINPSGGGTSYAQKFQGRVTMTRDTSTSTVYMELSSLRSEDT AVYYCARGNPWELRLDYWGQGTLVTVSSGGGGSGGGGSGGGGSGGGGSDIQMTQ SPSSLSASVGDRVTITCQASQDISNYLNWYQQKPGKAPKLLIYAASSLQSGVPSRFSG SGSGTDFTLTISSLQPEDFATYYCQQYYSYPFTFGPGTKVDIKGGGGSGGGGSQVQL QQSGAELARPGASVKMSCKASGYTFTRYTMHWVKQRPGQGLEWIGYINPSRGYTN YNQKFKDKATLTTDKSSSTAYMQLSSLTSEDSAVYYCARYYDDHYSLDYWGQGTT LTVSSASTKGPSVFPLAPSSKSTSGGTAALGCLVKDYFPEPVTVSWNSGALTSGVHTF PAVLQSSGLYSLSSVVTVPSSSLGTQTYICNVNHKPSNTKVDKRVEPKSCDKTHTCPP CPAPELLGGPSVFLFPPKPKDTLMISRTPEVTCVVVDVSHEDPEVKFNWYVDGVEVH NAKTKPREEQYQSTYRVVSVLTVLHQDWLNGKEYKCKVSNKALPAPIEKTISKAKG QPREPQVCTLPPSREEMTKNQVSLSCAVKGFYPSDIAVEWESNGQPENNYKTTPPVL DSDGSFFLVSKLTVDKSRWQQGNVFSCSVMHEALHNRFTQKSLSLSPGK; and (C) the third polypeptide comprises the sequence

MDMRVPAQLLGLLLLWLPGARCQIVLTQSPAIMSASPGEKVTMTCSASSS
VSYMNWYQQKSGTSPKRWIYDTSKLASGVPAHFRGSGSGTSYSLTISGME
AEDAATYYCQQWSSNPFTFGSGTKLEINRTVAAPSVFIFPPSDEQLKSGT
ASVVCLLNNFYPREAKVQWKVDNALQSGNSQESVTEQDSKDSTYSLSSTL
TLSKADYEKHKVYACEVTHQGLSSPVTKSFNRGEC.

[0089] In some embodiments, (a) the first polypeptide comprises the sequence MGWSCIILFLVATATGVHSGSEPKSSDKTHTCPPCPAPELLGGPSVFLFPPKPKDTLMI SRTPEVTCVVVDVSHEDPEVKFNWYVDGVEVHNAKTKPREEQYQSTYRVVSVLTV LHQDWLNGKEYKCKVSNKALPAPIEKTISKAKGQPREPQVYTLPPCREEMTKNQVS LWCLVKGFYPSDIAVEWESNGQPENNYKTTPPVLDSDGSFFLYSKLTVDKSRWQQG NVFSCSVMHEALHNHYTQKSLSLSPGK; (b) the second polypeptide comprises the sequence MGWSCIILFLVATATGVHSEVQLLESGGGLVKPGGSLRLSCAASGFSFSSYWMSWV RQAPGKGLEWISYISGDSGYTNYADSVKGRFTISRDDSKNTLYLQMNSLKTEDTAVY YCASHDYGDYGEYFQHWGQGTLVTVSSGGGGSGGGGSGGGGSGGGGSDIQMTQSP SSLSASVGDRVTITCQASQDISNYLNWYQQKPGKAPKLLIYAASSLQSGVPSRFSGSG SGTDFTLTISSLQPEDFATYYCQQAISFPLTFGQSTKVEIKGGGSGGGGSQVQLQQSG AELARPGASVKMSCKASGYTFTRYTMHWVKQRPGQGLEWIGYINPSRGYTNYNQK FKDKATLTTDKSSSTAYMQLSSLTSEDSAVYYCARYYDDHYSLDYWGQGTTLTVSS ASTKGPSVFPLAPSSKSTSGGTAALGCLVKDYFPEPVTVSWNSGALTSGVHTFPAVL QSSGLYSLSSVVTVPSSSLGTQTYICNVNHKPSNTKVDKRVEPKSCDKTHTCPPCPAP ELLGGPSVFLFPPKPKDTLMISRTPEVTCVVVDVSHEDPEVKFNWYVDGVEVHNAK TKPREEQYQSTYRVVSVLTVLHQDWLNGKEYKCKVSNKALPAPIEKTISKAKGQPR EPQVCTLPPSREEMTKNQVSLSCAVKGFYPSDIAVEWESNGQPENNYKTTPPVLDSD GSFFLVSKLTVDKSRWQQGNVFSCSVMHEALHNRFTQKSLSLSPGK; and (c) the third polypeptide comprises the sequence

MDMRVPAQLLGLLLLWLPGARCQIVLTQSPAIMSASPGEKVTMTCSASSS
VSYMNWYQQKSGTSPKRWIYDTSKLASGVPAHFRGSGSGTSYSLTISGME
AEDAATYYCQQWSSNPFTFGSGTKLEINRTVAAPSVFIFPPSDEQLKSGT
ASVVCLLNNFYPREAKVQWKVDNALQSGNSQESVTEQDSKDSTYSLSSTL
TLSKADYEKHKVYACEVTHQGLSSPVTKSFNRGEC.

[0090] In some embodiments, the hinge-CH2-CH3 of the first polypeptide comprises the sequence GSEPKSSDKTHTCPPCPAPELLGGPSVFLFPPKPKDTLMISRTPEVTCVVVDVSHEDPE VKFNWYVDGVEVHNAKTKPREEQYQSTYRVVSVLTVLHQDWLNGKEYKCKVSNK ALPAPIEKTISKAKGQPREPQVYTLPPCREEMTKNQVSLWCLVKGFYPSDIAVEWES NGQPENNYKTTPPVLDSDGSFFLYSKLTVDKSRWQQGNVFSCSVMHEALHNHYTQ KSLSLSPGK, the VH of the second polypeptide comprises the sequence QVQLVQSGAEVKKPGASVKVSCKASGYTFTRYTMHWVRQAPGQGLEWMGYINPS RGYTNYNQKFKDRVTLTTDKSSSTAYMELSSLRSEDTAVYYCARYYDDHYSLDYW GQGTLVTVSS, the CH1-CH2-CH3 of the second polypeptide comprises the sequence ASTKGPSVFPLAPSSKSTSGGTAALGCLVKDYFPEPVTVSWNSGALTSGVHTFPAVL QSSGLYSLSSVVTVPSSSLGTQTYICNVNHKPSNTKVDKRVEPKSCDKTHTCPPCPAP ELLGGPSVFLFPPKPKDTLMISRTPEVTCVVVDVSHEDPEVKFNWYVDGVEVHNAK TKPREEQYQSTYRVVSVLTVLHQDWLNGKEYKCKVSNKALPAPIEKTISKAKGQPR EPQVCTLPPSREEMTKNQVSLSCAVKGFYPSDIAVEWESNGQPENNYKTTPPVLDSD GSFFLVSKLTVDKSRWQQGNVFSCSVMHEALHNRFTQKSLSLSPGK, the third polypeptide comprises the sequence DIQMTQSPSSLSASVGDRVTITCSASSSVSYMNWYQQKPGKAPKRLIYDTSKLASGV PSRFSGSGSGTDFTLTISSLQPEDFATYYCQQWSSNPFTFGQGTKLEIKRTVAAPSVFIF PPSDEQLKSGTASVVCLLNNFYPREAKVQWKVDNALQSGNSQESVTEQDSKDSTYS LSSTLTLSKADYEKHKVYACEVTHQGLSSPVTKSFNRGEC, and the scFv comprises the sequence

QVQLVQSGAEVKKPGASVKVSCKASGYTFTNYYMHWVRQAPGQGLEWMG
MINPSGGGTSYAQKFQGRVTMTRDTSTSTVYMELSSLRSEDTAVYYCARG
NPWELRLDYWGQGTLVTVSSGGGGSGGGGSGGGGSGGGGSDIQMTQSPSS
LSASVGDRVTITCQASQDISNYLNWYQQKPGKAPKLLIYAASSLQSGVPS
RFSGSGSGTDFTLTISSLQPEDFATYYCQQYYSYPFTFGPGTKVDIK.

[0091] In some embodiments, the hinge-CH2-CH3 of the first polypeptide comprises the sequence GSEPKSSDKTHTCPPCPAPELLGGPSVFLFPPKPKDTLMISRTPEVTCVVVDVSHEDPE VKFNWYVDGVEVHNAKTKPREEQYQSTYRVVSVLTVLHQDWLNGKEYKCKVSNK ALPAPIEKTISKAKGQPREPQVYTLPPCREEMTKNQVSLWCLVKGFYPSDIAVEWES NGQPENNYKTTPPVLDSDGSFFLYSKLTVDKSRWQQGNVFSCSVMHEALHNHYTQ KSLSLSPGK, the VH of the second polypeptide comprises the sequence EVQLVESGGGLVQPGGSLRLSCAASGFTFSTYAMNWVRQAPGKGLEWVGRIRSKY NNYATYYADSVKGRFTISRDDSKNTLYLQMNSLRAEDTAVYYCVRHGNFGDSYVS WFAYWGQGTLVTVSS, the CH1-CH2-CH3 of the second polypeptide comprises the sequence ASTKGPSVFPLAPSSKSTSGGTAALGCLVKDYFPEPVTVSWNSGALTSGVHTFPAVL QSSGLYSLSSVVTVPSSSLGTQTYICNVNHKPSNTKVDKRVEPKSCDKTHTCPPCPAP ELLGGPSVFLFPPKPKDTLMISRTPEVTCVVVDVSHEDPEVKFNWYVDGVEVHNAK TKPREEQYQSTYRVVSVLTVLHQDWLNGKEYKCKVSNKALPAPIEKTISKAKGQPR EPQVCTLPPSREEMTKNQVSLSCAVKGFYPSDIAVEWESNGQPENNYKTTPPVLDSD GSFFLVSKLTVDKSRWQQGNVFSCSVMHEALHNRFTQKSLSLSPGK, the third polypeptide comprises the sequence QAVVTQEPSLTVSPGGTVTLTCGSSTGAVTTSNYANWVQQKPGKSPRGLIGGTNKR APGVPARFSGSLLGGKAALTISGAQPEDEADYYCALWYSNHWVFGGGTKLTVLRTV AAPSVFIFPPSDEQLKSGTASVVCLLNNFYPREAKVQWKVDNALQSGNSQESVTEQD SKDSTYSLSSTLTLSKADYEKHKVYACEVTHQGLSSPVTKSFNRGEC, and the scFv comprises the sequence

QVQLVQSGAEVKKPGASVKVSCKASGYTFTNYYMHWVRQAPGQGLEWMG
MINPSGGGTSYAQKFQGRVTMTRDTSTSTVYMELSSLRSEDTAVYYCARG
NPWELRLDYWGQGTLVTVSSGGGGSGGGGSGGGGSGGGGSDIQMTQSPSS
LSASVGDRVTITCQASQDISNYLNWYQQKPGKAPKLLIYAASSLQSGVPS
RFSGSGSGTDFTLTISSLQPEDFATYYCQQYYSYPFTFGPGTKVDIK.

[0092] In some embodiments, the hinge-CH2-CH3 of the first polypeptide comprises the sequence GSEPKSSDKTHTCPPCPAPELLGGPSVFLFPPKPKDTLMISRTPEVTCVVVDVSHEDPE VKFNWYVDGVEVHNAKTKPREEQYQSTYRVVSVLTVLHQDWLNGKEYKCKVSNK ALPAPIEKTISKAKGQPREPQVYTLPPCREEMTKNQVSLWCLVKGFYPSDIAVEWES NGQPENNYKTTPPVLDSDGSFFLYSKLTVDKSRWQQGNVFSCSVMHEALHNHYTQ KSLSLSPGK, the VH of the second polypeptide comprises the sequence QVQLVQSGAEVKKPGASVKVSCKASGYTFTRYTMHWVRQAPGQGLEWMGYINPS RGYTNYNQKFKDRVTLTTDKSSSTAYMELSSLRSEDTAVYYCARYYDDHYSLDYW GQGTLVTVSS, the CH1-CH2-CH3 of the second polypeptide comprises the sequence ASTKGPSVFPLAPSSKSTSGGTAALGCLVKDYFPEPVTVSWNSGALTSGVHTFPAVL QSSGLYSLSSVVTVPSSSLGTQTYICNVNHKPSNTKVDKRVEPKSCDKTHTCPPCPAP ELLGGPSVFLFPPKPKDTLMISRTPEVTCVVVDVSHEDPEVKFNWYVDGVEVHNAK TKPREEQYQSTYRVVSVLTVLHQDWLNGKEYKCKVSNKALPAPIEKTISKAKGQPR EPQVCTLPPSREEMTKNQVSLSCAVKGFYPSDIAVEWESNGQPENNYKTTPPVLDSD GSFFLVSKLTVDKSRWQQGNVFSCSVMHEALHNRFTQKSLSLSPGK, the third polypeptide comprises the sequence DIQMTQSPSSLSASVGDRVTITCSASSSVSYMNWYQQKPGKAPKRLIYDTSKLASGV PSRFSGSGSGTDFTLTISSLQPEDFATYYCQQWSSNPFTFGQGTKLEIKRTVAAPSVFIF PPSDEQLKSGTASVVCLLNNFYPREAKVQWKVDNALQSGNSQESVTEQDSKDSTYS LSSTLTLSKADYEKHKVYACEVTHQGLSSPVTKSFNRGEC, and the scFv comprises the sequence

QVQLVQSGAEVKKPGSSVKVSCKASGGTFSNFGVSWLRQAPGQGLEWMGG
IIPILGTANYAQKFQGRVTITADESTSTAYMELSSLRSEDTAVYYCATPT
NSGYYGPYYYYGMDVWGQGTTVTVSSGGGGSGGGGSGGGGSGGGGSDIQM
TQSPSSLSASVGDRVTITCRASQSISSWLAWYQQKPGKAPKLLIYAASTL
QSGVPSRFSGSGSGTDFTLTISSLQPEDFATYYCQQSYSIPLTFGGGTKV
EIK.

[0093] In some embodiments, the hinge-CH2-CH3 of the first polypeptide comprises the sequence GSEPKSSDKTHTCPPCPAPELLGGPSVFLFPPKPKDTLMISRTPEVTCVVVDVSHEDPE VKFNWYVDGVEVHNAKTKPREEQYQSTYRVVSVLTVLHQDWLNGKEYKCKVSNK ALPAPIEKTISKAKGQPREPQVYTLPPCREEMTKNQVSLWCLVKGFYPSDIAVEWES NGQPENNYKTTPPVLDSDGSFFLYSKLTVDKSRWQQGNVFSCSVMHEALHNHYTQ KSLSLSPGK, the VH of the second polypeptide comprises the sequence EVQLVESGGGLVQPGGSLRLSCAASGFTFSTYAMNWVRQAPGKGLEWVGRIRSKY NNYATYYADSVKGRFTISRDDSKNTLYLQMNSLRAEDTAVYYCVRHGNFGDSYVS WFAYWGQGTLVTVSS, the CH1-CH2-CH3 of the second polypeptide comprises the sequence ASTKGPSVFPLAPSSKSTSGGTAALGCLVKDYFPEPVTVSWNSGALTSGVHTFPAVL QSSGLYSLSSVVTVPSSSLGTQTYICNVNHKPSNTKVDKRVEPKSCDKTHTCPPCPAP ELLGGPSVFLFPPKPKDTLMISRTPEVTCVVVDVSHEDPEVKFNWYVDGVEVHNAK TKPREEQYQSTYRVVSVLTVLHQDWLNGKEYKCKVSNKALPAPIEKTISKAKGQPR EPQVCTLPPSREEMTKNQVSLSCAVKGFYPSDIAVEWESNGQPENNYKTTPPVLDSD GSFFLVSKLTVDKSRWQQGNVFSCSVMHEALHNRFTQKSLSLSPGK, the third polypeptide comprises the sequence QAVVTQEPSLTVSPGGTVTLTCGSSTGAVTTSNYANWVQQKPGKSPRGLIGGTNKR APGVPARFSGSLLGGKAALTISGAQPEDEADYYCALWYSNHWVFGGGTKLTVLRTV AAPSVFIFPPSDEQLKSGTASVVCLLNNFYPREAKVQWKVDNALQSGNSQESVTEQD SKDSTYSLSSTLTLSKADYEKHKVYACEVTHQGLSSPVTKSFNRGEC, and the scFv comprises the sequence

QVQLVQSGAEVKKPGSSVKVSCKASGGTFSNFGVSWLRQAPGQGLEWMGG
IIPILGTANYAQKFQGRVTITADESTSTAYMELSSLRSEDTAVYYCATPT
NSGYYGPYYYYGMDVWGQGTTVTVSSGGGGSGGGGSGGGGSGGGGSDIQM
TQSPSSLSASVGDRVTITCRASQSISSWLAWYQQKPGKAPKLLIYAASTL
QSGVPSRFSGSGSGTDFTLTISSLQPEDFATYYCQQSYSIPLTFGGGTKV
EIK.

[0094] In some embodiments, the multispecific ABP comprises a first and second scFv and a first and second Fab, wherein the multispecific ABP comprises a first polypeptide, a second polypeptide, a third polypeptide, and a fourth polypeptide, wherein the first polypeptide comprises, in an N→C direction, a VH domain of the first Fab-CH1-CH2-CH3, wherein the second polypeptide comprises, in an N→C direction, a VH domain of the second Fab-CH1-CH2-CH3, wherein the third polypeptide comprises, in an N→C direction, a VL domain of the first Fab-a Cl domain of the first Fab, and wherein the fourth polypeptide comprises, in an N→C direction, a VL domain of the second Fab-a Cl domain of the second Fab, and wherein the first scFv is attached, directly or indirectly, to the N-terminus of the first or third polypeptide, and wherein the second scFv is attached, directly or indirectly, to the N-terminus of the second or fourth polypeptide. In some embodiments, the first scFv is attached, directly or indirectly, to the N-terminus of the first polypeptide. In some embodiments, the first scFv is attached, directly or indirectly, to the N-terminus of the third polypeptide. In some embodiments, the second scFv is attached, directly or indirectly, to the N-terminus of the second polypeptide. In some embodiments, the first scFv is attached, directly or indirectly, to the N-terminus of the fourth polypeptide. In some embodiments, the first scFv and the second scFv each bind to an HLA-PEPTIDE target. In some embodiments, the first scFv and the second scFv each bind to the same HLA-PEPTIDE target. In some embodiments, the first scFv and the second scFv each bind to the same epitope of the HLA-PEPTIDE target. In some embodiments, the first scFv and the second scFv each comprise identical CDR sequences. In some embodiments, the first scFv and the second scFv each comprise identical VH and VL sequences. In some embodiments, the first Fab and the second Fab each bind the additional antigen. In some embodiments, the first Fab and the second Fab each bind to the same epitope of the additional antigen. In some embodiments, the first Fab and the second Fab each comprise identical CDR sequences. In some embodiments, the first Fab and the second Fab each comprise identical VH and VL sequences. In some embodiments, the first and second polypeptide chains are identical and the third and fourth polypeptide chains are identical. In some embodiments, the first scFv is attached to the N-terminus of the first or third polypeptide via a linker. In some embodiments, the second scFv is attached to the N-terminus of the second or fourth polypeptide via a linker. In some embodiments, the linker comprises (GGGGS)_{N}, wherein _{N}=1-10. In some embodiments, _{N}=1-4. In some embodiments, _{N}=2. The targets of the multispecific ABP are distinct in certain aspects, for example, the targets can be distinct proteins or distinct portions of the same protein.

[0095] In some embodiments, (a) the first and second polypeptides comprise the sequence MGWSCIILFLVATATGVHSQVQLVQSGAEVKKPGASVKVSCKASGYTFTNYYMHW VRQAPGQGLEWMGMINPSGGGTSYAQKFQGRVTMTRDTSTSTVYMELSSLRSEDT AVYYCARGNPWELRLDYWGQGTLVTVSSGGGGSGGGGSGGGGSGGGGSDIQMTQ SPSSLSASVGDRVTITCQASQDISNYLNWYQQKPGKAPKLLIYAASSLQSGVPSRFSG SGSGTDFTLTISSLQPEDFATYYCQQYYSYPFTFGPGTKVDIKGGGGSGGGGSQVQL QQSGAELARPGASVKMSCKASGYTFTRYTMHWVKQRPGQGLEWIGYINPSRGYTN YNQKFKDKATLTTDKSSSTAYMQLSSLTSEDSAVYYCARYYDDHYSLDYWGQGTT LTVSSASTKGPSVFPLAPSSKSTSGGTAALGCLVKDYFPEPVTVSWNSGALTSGVHTF PAVLQSSGLYSLSSVVTVPSSSLGTQTYICNVNHKPSNTKVDKRVEPKSCDKTHTCPP CPAPELLGGPSVFLFPPKPKDTLMISRTPEVTCVVVDVSHEDPEVKFNWYVDGVEVH NAKTKPREEQYQSTYRVVSVLTVLHQDWLNGKEYKCKVSNKALPAPIEKTISKAKG QPREPQVYTLPPSREEMTKNQVSLTCLVKGFYPSDIAVEWESNGQPENNYKTTPPVL DSDGSFFLYSKLTVDKSRWQQGNVFSCSVMHEALHNHYTQKSLSLSPGK; and (b) the third and fourth polypeptides comprises the sequence

MDMRVPAQLLGLLLLWLPGARCQIVLTQSPAIMSASPGEKVTMTCSASSS
VSYMNWYQQKSGTSPKRWIYDTSKLASGVPAHFRGSGSGTSYSLTISGME
AEDAATYYCQQWSSNPFTFGSGTKLEINRTVAAPSVFIFPPSDEQLKSGT
ASVVCLLNNFYPREAKVQWKVDNALQSGNSQESVTEQDSKDSTYSLSSTL
TLSKADYEKHKVYACEVTHQGLSSPVTKSFNRGEC.

[0096] In some embodiments, (a) the first and second polypeptides comprise the sequence MGWSCIILFLVATATGVHSEVQLLESGGGLVKPGGSLRLSCAASGFSFSSYWMSWV RQAPGKGLEWISYISGDSGYTNYADSVKGRFTISRDDSKNTLYLQMNSLKTEDTAVY YCASHDYGDYGEYFQHWGQGTLVTVSSGGGGSGGGGSGGGGSGGGGSDIQMTQSP SSLSASVGDRVTITCQASQDISNYLNWYQQKPGKAPKLLIYAASSLQSGVPSRFSGSG SGTDFTLTISSLQPEDFATYYCQQAISFPLTFGQSTKVEIKGGGGSGGGGSQVQLQQS GAELARPGASVKMSCKASGYTFTRYTMHWVKQRPGQGLEWIGYINPSRGYTNYNQ KFKDKATLTTDKSSSTAYMQLSSLTSEDSAVYYCARYYDDHYSLDYWGQGTTLTVS SASTKGPSVFPLAPSSKSTSGGTAALGCLVKDYFPEPVTVSWNSGALTSGVHTFPAVL QSSGLYSLSSVVTVPSSSLGTQTYICNVNHKPSNTKVDKRVEPKSCDKTHTCPPCPAP ELLGGPSVFLFPPKPKDTLMISRTPEVTCVVVDVSHEDPEVKFNWYVDGVEVHNAK TKPREEQYQSTYRVVSVLTVLHQDWLNGKEYKCKVSNKALPAPIEKTISKAKGQPR EPQVYTLPPSREEMTKNQVSLTCLVKGFYPSDIAVEWESNGQPENNYKTTPPVLDSD GSFFLYSKLTVDKSRWQQGNVFSCSVMHEALHNHYTQKSLSLSPGK; and (b) the third and fourth polypeptides comprises the sequence

MDMRVPAQLLGLLLLWLPGARCQIVLTQSPAIMSASPGEKVTMTCSASSS
VSYMNWYQQKSGTSPKRWIYDTSKLASGVPAHFRGSGSGTSYSLTISGME
AEDAATYYCQQWSSNPFTFGSGTKLEINRTVAAPSVFIFPPSDEQLKSGT
ASVVCLLNNFYPREAKVQWKVDNALQSGNSQESVTEQDSKDSTYSLSSTL
TLSKADYEKHKVYACEVTHQGLSSPVTKSFNRGEC.

[0097] In some embodiments, the first and second scFv comprise the sequence QVQLVQSGAEVKKPGASVKVSCKASGYTFTNYYMEIWVRQAPGQGLEWMGMINPS GGGTSYAQKFQGRVTMTRDTSTSTVYMELSSLRSEDTAVYYCARGNPWELRLDYW GQGTLVTVSSGGGGSGGGGSGGGGSGGGGSDIQMTQSPSSLSASVGDRVTITCQASQ DISNYLNWYQQKPGKAPKLLIYAASSLQSGVPSRFSGSGSGTDFTLTISSLQPEDFATY YCQQYYSYPFTFGPGTKVDIK, the VH of the first and second polypeptides comprises the sequence QVQLVQSGAEVKKPGASVKVSCKASGYTFTRYTMHWVRQAPGQGLEWMGYINPS RGYTNYNQKFKDRVTLTTDKSSSTAYMELSSLRSEDTAVYYCARYYDDHYSLDYW GQGTLVTVSS, the CH1-CH2-CH3 of the first and second polypeptides comprise the sequence ASTKGPSVFPLAPSSKSTSGGTAALGCLVKDYFPEPVTVSWNSGALTSGVHTFPAVL QSSGLYSLSSVVTVPSSSLGTQTYICNVNHKPSNTKVDKRVEPKSCDKTHTCPPCPAP ELLGGPSVFLFPPKPKDTLMISRTPEVTCVVVDVSHEDPEVKFNWYVDGVEVHNAK TKPREEQYQSTYRVVSVLTVLHQDWLNGKEYKCKVSNKALPAPIEKTISKAKGQPR EPQVYTLPPSREEMTKNQVSLTCLVKGFYPSDIAVEWESNGQPENNYKTTPPVLDSD GSFFLYSKLTVDKSRWQQGNVFSCSVMHEALHNHYTQKSLSLSPGK, the VL-CL of the third and fourth polypeptides comprise the sequence DIQMTQSPSSLSASVGDRVTITCSASSSVSYMNWYQQKPGKAPKRLIYDTSKLASGV PSRFSGSGSGTDFTLTISSLQPEDFATYYCQQWSSNPFTFGQGTKLEIKRTVAAPSVFIF PPSDEQLKSGTASVVCLLNNFYPREAKVQWKVDNALQSGNSQESVTEQDSKDSTYS LSSTLTLSKADYEKHKVYACEVTHQGLSSPVTKSFNRGEC, and the first and second scFvs are optionally attached to the N-terminus of the first and second polypeptides by a linker comprising the sequence GGGGSGGGGS.

[0098] In some embodiments, the first and second scFv comprise the sequence QVQLVQSGAEVKKPGASVKVSCKASGYTFTNYYMHWVRQAPGQGLEWMGMINPS GGGTSYAQKFQGRVTMTRDTSTSTVYMELSSLRSEDTAVYYCARGNPWELRLDYW GQGTLVTVSSGGGGSGGGGSGGGGSGGGGSDIQMTQSPSSLSASVGDRVTITCQASQ DISNYLNWYQQKPGKAPKLLIYAASSLQSGVPSRFSGSGSGTDFTLTISSLQPEDFATY YCQQYYSYPFTFGPGTKVDIK, the VH of the first and second polypeptides comprises the sequence EVQLVESGGGLVQPGGSLRLSCAASGFTFSTYAMNWVRQAPGKGLEWVGRIRSKY NNYATYYADSVKGRFTISRDDSKNTLYLQMNSLRAEDTAVYYCVRHGNFGDSYVS WFAYWGQGTLVTVSS, the CH1-CH2-CH3 of the first and second polypeptides comprise the sequence ASTKGPSVFPLAPSSKSTSGGTAALGCLVKDYFPEPVTVSWNSGALTSGVHTFPAVL QSSGLYSLSSVVTVPSSSLGTQTYICNVNHKPSNTKVDKRVEPKSCDKTHTCPPCPAP ELLGGPSVFLFPPKPKDTLMISRTPEVTCVVVDVSHEDPEVKFNWYVDGVEVHNAK TKPREEQYQSTYRVVSVLTVLHQDWLNGKEYKCKVSNKALPAPIEKTISKAKGQPR EPQVYTLPPSREEMTKNQVSLTCLVKGFYPSDIAVEWESNGQPENNYKTTPPVLDSD GSFFLYSKLTVDKSRWQQGNVFSCSVMHEALHNHYTQKSLSLSPGK, the VL-CL of the third and fourth polypeptides comprise the sequence QAVVTQEPSLTVSPGGTVTLTCGSSTGAVTTSNYANWVQQKPGKSPRGLIGGTNKR APGVPARFSGSLLGGKAALTISGAQPEDEADYYCALWYSNHWVFGGGTKLTVLRTV AAPSVFIFPPSDEQLKSGTASVVCLLNNFYPREAKVQWKVDNALQSGNSQESVTEQD SKDSTYSLSSTLTLSKADYEKHKVYACEVTHQGLSSPVTKSFNRGEC, and the first and second scFvs are attached to the N-terminus of the first and second polypeptides by a linker comprising the sequence GGGGSGGGGS.

[0099] In some embodiments, the first and second scFv comprise the sequence QVQLVQSGAEVKKPGSSVKVSCKASGGTFSNFGVSWLRQAPGQGLEWMGGIIPILG TANYAQKFQGRVTITADESTSTAYMELSSLRSEDTAVYYCATPTNSGYYGPYYYYG MDVWGQGTTVTVSSGGGGSGGGGSGGGGSGGGGSDIQMTQSPSSLSASVGDRVTIT CRASQSISSWLAWYQQKPGKAPKLLIYAASTLQSGVPSRFSGSGSGTDFTLTISSLQPE DFATYYCQQSYSIPLTFGGGTKVEIK, the VH of the first and second polypeptides comprises the sequence QVQLVQSGAEVKKPGASVKVSCKASGYTFTRYTMHWVRQAPGQGLEWMGYINPS RGYTNYNQKFKDRVTLTTDKSSSTAYMELSSLRSEDTAVYYCARYYDDHYSLDYW GQGTLVTVSS, the CH1-CH2-CH3 of the first and second polypeptides comprise the sequence ASTKGPSVFPLAPSSKSTSGGTAALGCLVKDYFPEPVTVSWNSGALTSGVHTFPAVL QSSGLYSLSSVVTVPSSSLGTQTYICNVNHKPSNTKVDKRVEPKSCDKTHTCPPCPAP ELLGGPSVFLFPPKPKDTLMISRTPEVTCVVVDVSHEDPEVKFNWYVDGVEVHNAK TKPREEQYQSTYRVVSVLTVLHQDWLNGKEYKCKVSNKALPAPIEKTISKAKGQPR EPQVYTLPPSREEMTKNQVSLTCLVKGFYPSDIAVEWESNGQPENNYKTTPPVLDSD GSFFLYSKLTVDKSRWQQGNVFSCSVMHEALHNHYTQKSLSLSPGK, the VL-CL of the third and fourth polypeptides comprise the sequence DIQMTQSPSSLSASVGDRVTITCSASSSVSYMNWYQQKPGKAPKRLIYDTSKLASGV PSRFSGSGSGTDFTLTISSLQPEDFATYYCQQWSSNPFTFGQGTKLEIKRTVAAPSVFIF PPSDEQLKSGTASVVCLLNNFYPREAKVQWKVDNALQSGNSQESVTEQDSKDSTYS LSSTLTLSKADYEKHKVYACEVTHQGLSSPVTKSFNRGEC, and the first and second scFvs are optionally attached to the N-terminus of the first and second polypeptides by a linker comprising the sequence GGGGSGGGGS.

[0100] In some embodiments, the first and second scFv comprise the sequence QVQLVQSGAEVKKPGSSVKVSCKASGGTFSNFGVSWLRQAPGQGLEWMGGIIPILG TANYAQKFQGRVTITADESTSTAYMELSSLRSEDTAVYYCATPTNSGYYGPYYYYG MDVWGQGTTVTVSSGGGGSGGGGSGGGGSGGGGSDIQMTQSPSSLSASVGDRVTIT CRASQSISSWLAWYQQKPGKAPKLLIYAASTLQSGVPSRFSGSGSGTDFTLTISSLQPE DFATYYCQQSYSIPLTFGGGTKVEIK, the VH of the first and second polypeptides comprises the sequence EVQLVESGGGLVQPGGSLRLSCAASGFTFSTYAMNWVRQAPGKGLEWVGRIRSKY NNYATYYADSVKGRFTISRDDSKNTLYLQMNSLRAEDTAVYYCVRHGNFGDSYVS WFAYWGQGTLVTVSS, the CH1-CH2-CH3 of the first and second polypeptides comprise the sequence ASTKGPSVFPLAPSSKSTSGGTAALGCLVKDYFPEPVTVSWNSGALTSGVHTFPAVL QSSGLYSLSSVVTVPSSSLGTQTYICNVNHKPSNTKVDKRVEPKSCDKTHTCPPCPAP ELLGGPSVFLFPPKPKDTLMISRTPEVTCVVVDVSHEDPEVKFNWYVDGVEVHNAK TKPREEQYQSTYRVVSVLTVLHQDWLNGKEYKCKVSNKALPAPIEKTISKAKGQPR EPQVYTLPPSREEMTKNQVSLTCLVKGFYPSDIAVEWESNGQPENNYKTTPPVLDSD GSFFLYSKLTVDKSRWQQGNVFSCSVMHEALHNHYTQKSLSLSPGK, the VL-CL of the third and fourth polypeptides comprise the sequence QAVVTQEPSLTVSPGGTVTLTCGSSTGAVTTSNYANWVQQKPGKSPRGLIGGTNKR APGVPARFSGSLLGGKAALTISGAQPEDEADYYCALWYSNHWVFGGGTKLTVLRTV AAPSVFIFPPSDEQLKSGTASVVCLLNNFYPREAKVQWKVDNALQSGNSQESVTEQD SKDSTYSLSSTLTLSKADYEKHKVYACEVTHQGLSSPVTKSFNRGEC, and the first and second scFvs are optionally attached to the N-terminus of the first and second polypeptides by a linker comprising the sequence GGGGSGGGGS.

[0101] In some embodiments, the multispecific ABP comprises a molecule selected from the group consisting of a single domain antibody, a DVD-Ig™, a DART™, a Duobody®, a CovX-Body, an Fcab antibody, a TandAb® antibody, a tandem Fab, a Zybody™, a BEAT® molecule, a diabody, a triabody, a tetrabody, a tandem diabody, and an alternative scaffold.

[0102] In some embodiments, the alternative scaffold is selected from an Anticalin®, an Adnectin™, an iMab, an EETI-II/AGRP, a Kunitz domain, a thioredoxin peptide aptamer, an Affibody®, a DARPin, an Affilin, a Tetranectin, a Fynomer, and an Avimer.

[0103] In some embodiments, the multispecific ABP comprises a diabody, a triabody, a tetrabody, or a tandem diabody.

[0104] In some embodiments, the multispecific ABP comprises a first scFv, a second scFv, and a single domain antibody, wherein the multispecific ABP comprises a first polypeptide chain and a second polypeptide chain, wherein the first polypeptide chain comprises, in an N→C direction, the first scFv-CH2-CH3, and wherein the second polypeptide chain comprises the second scFv-the single domain antibody-CH2-CH3.

[0105] In some embodiments, the multispecific ABP comprises a first Fab, a second Fab, and a single domain antibody, wherein the second Fab is attached, directly or indirectly, to the N-terminus of the single domain antibody, and wherein the first Fab and single domain antibody are attached, directly or indirectly, to an Fc region.

[0106] In some embodiments, the multispecific ABP comprises an scFv, a Fab, and a single domain antibody, wherein either (i) the scFv is attached, directly or indirectly, to the N-terminus of the single domain antibody and the single domain antibody and Fab are attached, directly or indirectly to an Fc region, or (ii) the Fab is attached, directly or indirectly to the N-terminus of the single domain antibody and the single domain antibody and scFv are attached, directly or indirectly, to an Fc region.

[0107] In some embodiments, the single domain antibody is a huVH single domain.

[0108] In some embodiments: (a) the first and second scFv each bind to an HLA-PEPTIDE target and wherein the single domain antibody binds to the additional antigen, or (b) the first and second Fab each bind to an HLA-PEPTIDE target and wherein the single domain antibody binds to the additional antigen.

[0109] In some embodiments, the multispecific ABP comprises a first scFv and a second scFv that each specifically bind the HLA-PEPTIDE target, a Fab that specifically binds an additional antigen that is distinct from the first target antigen, and an Fc domain, wherein the ABP comprises a first polypeptide, a second polypeptide, and a third polypeptide, wherein the first polypeptide comprises, in an N→C direction, the first scFv -optional linker-CH2-CH3, wherein the second polypeptide comprises, in an N→C direction, a VH domain of the Fab-a CH1 domain of the Fab-CH2-CH3, wherein the third polypeptide comprises, in an N→C direction, a VL domain of the Fab-a CL domain of the Fab, and wherein the second scFv is attached, directly or indirectly, to the N-terminus of the second polypeptide or the third polypeptide, wherein the VL domain of the first scFv interacts with the VH domain of the second scFv, and wherein the VH domain of the first scFv interacts with the VL domain of the second scFv.

[0110] In some embodiments, the additional antigen is a cell surface molecule present on a T cell or NK cell.

[0111] In some embodiments, the cell surface molecule is present on a T cell. In some embodiments, the cell surface molecule is CD3, optionally CD3c.

[0112] In some embodiments, the additional ABD comprises the VH sequence QVQLVESGGGVVQPGRSLRLSCAASGFTFRSYGMHWVRQAPGKGLEWVAIIWYDG SKKNYADSVKGRFTISRDNSKNTLYLQMNSLRAEDTAVYYCARGTGYNWFDPWGQ GTLVTVSS and the VL sequence EIVLTQSPRTLSLSPGERATLSCRASQSVSSSYLAWYQQKPGQAPRLLIYGASSRATGI PDRFSGSGSGTDFTLTISRLDPEDFAVYYCQQYGSSPITFGQGTRLEIK. In some embodiments, the additional ABD comprises a VH CDR1 comprising the amino acid sequence SYGMH; a VH CDR2 comprising the amino acid sequence of IIWYDGSKKNYADSVKG; a VH CDR3 comprising the amino acid sequence of GTGYNWFDP; a VL CDR1 comprising the amino acid sequence of RASQSVSSSYLA; a VL CDR2 comprising the amino acid sequence of GASSRAT; and a VL CDR3 comprising the amino acid sequence of QQYGSSPIT, according to the Kabat or Chothia numbering schemes. In some embodiments, the additional ABD comprises the VH sequence QVQLVESGGGVVQPGRSLRLSCAASGFTFRSYGMHWVRQAPGKGLEWVAIIWYDG SKKNYADSVKGRFTISRDNSKNTLYLQMNSLRAEDTAVYYCARGTGYNWFDPWGQ GTLVTVSS and the VL sequence EIVLTQSPRTLSLSPGERATLSCRASQSVSSSYLAWYQQKPGQAPRLLIYGASSRATGI PDRFSGSGSGTDFTLTISRLDPEDFAVYYCQQYGSSPITFGQGTRLEIK. In some embodiments, the additional ABD comprises a VH CDR1 comprising the amino acid sequence RYTMH; a VH CDR2 comprising the amino acid sequence YINPSRGYTNYNQKFKD; a VH CDR3 comprising the amino acid sequence YYDDHYSLDY; a VL CDR1 comprising the amino acid sequence SASSSVSYMN; a VL CDR2 comprising the amino acid sequence DTSKLAS; and a VL CDR3 comprising the amino acid sequence QQWSSNPFT, according to the Kabat numbering scheme.

[0113] In some embodiments, the additional ABD comprises the VH sequence QVQLVQSGAEVKKPGASVKVSCKASGYTFTRYTMHWVRQAPGQGLEWMGYINPS RGYTNYNQKFKDRVTLTTDKSSSTAYMELSSLRSEDTAVYYCARYYDDHYSLDYW GQGTLVTVSS and the VL sequence

DIQMTQSPSSLSASVGDRVTITCSASSSVSYMNWYQQKPGKAPKRLIYDT
SKLASGVPSRFSGSGSGTDFTLTISSLQPEDFATYYCQQWSSNPFTFGQG
TKLEIK.

[0114] In some embodiments, the additional ABD comprises a VH CDR1 comprising the amino acid sequence YTFTRYTMH; a VH CDR2 comprising the amino acid sequence GYINPSRGYTNYN; a VH CDR3 comprising the amino acid sequence CARYYDDHYSLDYW; a VL CDR1 comprising the amino acid sequence SASSSVSYMN; a VL CDR2 comprising the amino acid sequence DTSKLAS; and a VL CDR3 comprising the amino acid sequence CQQWSSNPFTF, according to the Kabat numbering scheme.

[0115] In some embodiments, the additional ABD comprises the VH sequence EVQLVESGGGLVQPGGSLRLSCAASGFTFSTYAMNWVRQAPGKGLEWVGRIRSKY NNYATYYADSVKGRFTISRDDSKNTLYLQMNSLRAEDTAVYYCVRHGNFGDSYVS WFAYWGQGTLVTVSS and the VL sequence

QAVVTQEPSLTVSPGGTVTLTCGSSTGAVTTSNYANWVQQKPGKSPRGLI
GGTNKRAPGVPARFSGSLLGGKAALTISGAQPEDEADYYCALWYSNHWVF
GGGTKLTVL.

[0116] In some embodiments, the additional ABD comprises a VH CDR1 comprising the amino acid sequence FTFSTYAMNWVRQAPGKGLE; a VH CDR2 comprising the amino acid sequence TYYADSVKGRFTISRD; a VH CDR3 comprising the amino acid sequence CVRHGNFGDSYVSWFAYW; a VL CDR1 comprising the amino acid sequence GSSTGAVTTSNYAN; a VL CDR2 comprising the amino acid sequence GTNKRAP; and a VL CDR3 comprising the amino acid sequence CALWYSNHWVF, according to the Kabat numbering scheme.

[0117] In some embodiments, the cell surface molecule is present on an NK cell.

[0118] In some embodiments, the cell surface molecule is CD16.

[0119] In some embodiments of a multispecific ABP disclosed herein, a sequence comprising the CH2-CH3 domains of the first polypeptide is distinct from a sequence comprising the CH2-CH3 domains of the second polypeptide.

[0120] In some embodiments, the multispecific ABP comprises a variant Fc region.

[0121] In some embodiments, the variant Fc region comprises a modification that alters an affinity of the ABP for an Fc receptor as compared to a multispecific ABP with a non-variant Fc region.

[0122] In some embodiments, the variant Fc region comprises a human IgG4 Fc region comprising one or more of the hinge stabilizing mutations S228P and L235E, or comprising one or more of the following mutations: E233P, F234V, and L235A, according to EU numbering.

[0123] In some embodiments, the variant Fc region is a human IgG1 Fc region comprising one or more mutations to reduce Fc receptor binding, optionally wherein the one or more mutations are in residues selected from 5228 (e.g., S228A), L234 (e.g., L234A), L235 (e.g., L235A), D265 (e.g., D265A), and N297 (e.g., N297A or N297Q), or optionally wherein the amino acid sequence ELLG, from amino acid position 233 to 236 of IgG1 or EFLG of IgG4, is replaced by PVA, according to EU numbering.

[0124] In some embodiments, the variant Fc region is a human IgG2 Fc region comprising one or more of mutations A330S and P331S, according to EU numbering.

[0125] In some embodiments, the variant Fc region comprises an amino acid substitution at one or more positions selected from 238, 265, 269, 270, 297, 327 and 329, optionally wherein the variant Fc region comprises substitutions at two or more of amino acid positions 265, 269, 270, 297 and 327, optionally wherein the variant Fc region comprises substitution of residues 265 or 297 with alanine, optionally wherein the variant Fc region comprises substitution of residues 265 and 297 with alanine, according to EU numbering.

[0126] In some embodiments, the variant Fc region comprises one or more amino acid substitutions which improve ADCC, such as a substitution at one or more of positions 298, 333, and 334 of the Fc region, or a substitution at one or more of positions 239, 332, and 330 of the Fc region, according to EU numbering.

[0127] In some embodiments, the variant Fc region comprises one or more modifications to increase half-life, optionally wherein the Fc variant comprises substitutions at one or more of Fc region residues: 238, 250, 256, 265, 272, 286, 303, 305, 307, 311, 312, 314, 317, 340, 356, 360, 362, 376, 378, 380, 382, 413, 424, 428, and 434 of an IgG, according to EU numbering.

[0128] In some embodiments, the multispecific ABP comprises a G1m17,1 allotype.

[0129] In some embodiments, the variant Fc region comprises a knob-in-hole modification. In some embodiments, one Fc-bearing chain of the multispecific ABP comprises a T366W mutation, and the other Fc-bearing chain of the multispecific ABP comprises a T366S, L368A, and Y407V mutation, according to EU numbering. In some embodiments, the multispecific ABP further comprises an engineered disulfide bridge in the Fc region. In some embodiments: (a) the engineered disulfide bridge comprises a K392C mutation in one Fc-bearing chain of the multispecific ABP, and a D399C in the other Fc-bearing chain of the multispecific ABP, according to EU numbering, (b) the engineered disulfide bridge comprises a S354C mutation in one Fc-bearing chain of the multispecific ABP, and a Y349C mutation in the other Fc-bearing chain of the multispecific ABP, according to EU numbering, or (c) the engineered disulfide bridge comprises a 447C mutation in both Fc-bearing chains of the multispecific ABP, which 447C mutations are provided by extension of the C-terminus of a CH3 domain incorporating a KSC tripeptide sequence, according to EU numbering. In some embodiments, the multispecific ABP comprises an S354C and T366W mutation in one Fc-bearing chain and a Y349C, T366S, L368A and Y407V mutation in the other Fc-bearing chain, according to EU numbering.

[0130] In some embodiments, a first Fc-bearing chain of the variant Fc region is capable of binding Protein A and the other Fc-bearing chain of the variant Fc region comprises a mutation that reduces binding affinity of such Fc-bearing chain to Protein A as compared to the first Fc-bearing chain. In some embodiments, the other Fc-bearing chain comprises a H435R_Y436F mutation, according to EU numbering.

[0131] In some embodiments: (a) a first Fc-bearing chain of the variant Fc region comprises a F405A and a Y407V mutation and the second Fc-bearing chain of the variant fc region comprises a T394W mutation, (b) a first Fc-bearing chain of the variant Fc region comprises a F405A and a Y407V mutation and the second Fc-bearing chain of the variant fc region comprises a T366I and a T394W mutation, (c) a first Fc-bearing chain of the variant Fc region comprises a F405A and a Y407V mutation and the second Fc-bearing chain of the variant fc region comprises a T366L and a T394W mutation, (d) a first Fc-bearing chain of the variant Fc region comprises a F405A and a Y407V mutation and the second Fc-bearing chain of the variant fc region comprises a T366L mutation, a K392M mutation, and a T394W mutation, (e) a first Fc-bearing chain of the variant Fc region comprises a L351Y mutation, a F405A mutation, and a Y407V mutation and the second Fc-bearing chain of the variant fc region comprises a T366L mutation, a K392M mutation, and a T394W mutation, (f) a first Fc-bearing chain of the variant Fc region comprises a T350V mutation, a L351Y mutation, a F405A mutation, and a Y407V mutation and the second Fc-bearing chain of the variant fc region comprises a T350V mutation, a T366L mutation, a K392M mutation, and a T394W mutation, or (g) a first Fc-bearing chain of the variant Fc region comprises a T350V mutation, a L351Y mutation, a F405A mutation, and a Y407V mutation and the second Fc-bearing chain of the variant fc region comprises a T350V mutation, a T366L mutation, a K392M mutation, and a T394W mutation, wherein the amino acid numbering is according to EU numbering.

[0132] In some embodiments, the variant Fc region is an IgG1 Fc, and the Fc modification comprises a K409R mutation in one Fc-bearing chain and a mutation selected from a Y407, L368, F405, K370, and D399 mutation in the other Fc-bearing chain, according to EU numbering.

[0133] In some embodiments, the variant Fc region comprises a set of mutations that renders homodimerization electrostatically unfavorable but heterodimerization favorable.

[0134] In some embodiments, the variant Fc comprises a K409D and a K392D mutation in one Fc-bearing chain, and a D399K and a E356K mutation in the other Fc-bearing chain, according to EU numbering.

[0135] In some embodiments, the variant Fc comprises a K409R mutation in one Fc-bearing chain and a L368E or L368D mutation in the other Fc-bearing chain, according to EU numbering.

[0136] In some embodiments, the variant Fc comprises a D221E, P228E, and L368E mutation in one Fc-bearing chain and a D221R, P228R, and K409R in the other Fc-bearing chain, according to EU numbering.

[0137] In some embodiments, the variant Fc comprises an S364H and F405A mutation in one Fc-bearing chain and a Y349T and T394F mutation in the other Fc-bearing chain, according to EU numbering.

[0138] In some embodiments, the variant Fc comprises an E375Q and S364K mutation in one Fc-bearing chain and a L368D and K370S mutation in the other Fc-bearing chain, according to EU numbering.

[0139] In some embodiments, the variant Fc comprises strand-exchange engineered domain (SEED) CH3 heterodimers.

[0140] In some embodiments of the multispecific ABP, the HLA Class I molecule is HLA subtype A*01:01 and the HLA-restricted peptide comprises the sequence NTDNNLAVY.

[0141] In some embodiments, the HLA Class I molecule is HLA subtype A*01:01 and the HLA-restricted peptide consists of the sequence NTDNNLAVY.

[0142] In some embodiments, the ABP comprises a CDR-H3 comprising a sequence selected from: CAATEWLGVW, CARANWLDYW, CARANWLDYW, CARDWVLDYW, CARGEWLDYW, CARGWELGYW, CARDFVGYDDW, CARDYGDLDYW, CARGSYGMDVW, CARDGYSGLDVW, CARDSGVGMDVW, CARDGVAVASDYW, CARGVNVDDFDYW, CARGDYTGNWYFDLW, CARANWLDYW, CARDQFYGGNSGGHDYW, CAREEDYW, CARGDWFDPW, CARGDWFDPW, CARGEWFDPW, CARSDWFDPW, CARDSGSYFDYW, CARDYGGYVDYW, CAREGPAALDVW, CARERRSGMDVW, CARVLQEGMDVW, CASERELPFDIW, CAKGGGGYGMDVW, CAAMGIAVAGGMDVW, CARNWNLDYW, CATYDDGMDVW, CARGGGGALDYW, CALSGNYYGMDVW, CARGNPWELRLDYW, and CARDKNYYGMDVW.

[0143] In some embodiments, the ABP comprises a CDR-L3 comprising a sequence selected from: CQQSYNTPYTF, CQQSYSTPYTF, CQQSYSTPYSF, CQQSYSTPFTF, CQQSYGVPYTF, CQQSYSAPYTF, CQQSYSAPYTF, CQQSYSAPYSF, CQQSYSTPYTF, CQQSYSVPYSF, CQQSYSAPYTF, CQQSYSVPYSF, CQQSYSTPQTF, CQQLDSYPFTF, CQQSYSSPYTF, CQQSYSTPLTF, CQQSYSTPYSF, CQQSYSTPYTF, CQQSYSTPYTF, CQQSYSTPFTF, CQQSYSTPTF, CQQTYAIPLTF, CQQSYSTPYTF, CQQSYIAPFTF, CQQSYSIPLTF, CQQSYSNPTF, CQQSYSTPYSF, CQQSYSDQWTF, CQQSYLPPYSF, CQQSYSSPYTF, CQQSYTTPWTF, CQQSYLPPYSF, CQEGITYTF, CQQYYSYPFTF, and CQHYGYSPVTF.

[0144] In some embodiments, the ABP comprises the CDR-H3 and the CDR-L3 from the scFv designated G2(1H11), G2(2E07), G2(2E03), G2(2A11), G2(2C06), G2(1G01), G2(1C02), G2(1H01), G2(1B12), G2(1B06), G2(2H10), G2(1H10), G2(2C11), G2(1C09), G2(1A10), G2(1B10), G2(1D07), G2(1E05), G2(1D03), G2(1G12), G2(2H11), G2(1C03), G2(1G07), G2(1F12), G2(1G03), G2(2B08), G2(2A10), G2(2D04), G2(1C06), G2(2A09), G2(1B08), G2(1E03), G2(2A03), G2(2F01), or G2(1D06).

[0145] In some embodiments, the ABP comprises all three heavy chain CDRs and all three light chain CDRs from the scFv designated G2(1H11), G2(2E07), G2(2E03), G2(2A11), G2(2C06), G2(1G01), G2(1C02), G2(1H01), G2(1B12), G2(1B06), G2(2H10), G2(1H10), G2(2C11), G2(1C09), G2(1A10), G2(1B10), G2(1D07), G2(1E05), G2(1D03), G2(1G12), G2(2H11), G2(1C03), G2(1G07), G2(1F12), G2(1G03), G2(2B08), G2(2A10), G2(2D04), G2(1C06), G2(2A09), G2(1B08), G2(1E03), G2(2A03), G2(2F01), or G2(1D06).

[0146] In some embodiments, the ABP comprises a VH sequence selected from

QVQLVQSGAEVKKPGASVKVSCKASGGTFSSATISWVRQAPGQGLEWMGW
IYPNSGGTVYAQKFQGRVTMTRDTSTSTVYMELSSLRSEDTAVYYCAATE
WLGVWGQGTTVTVSS,
EVQLLQSGAEVKKPGSSVKVSCKASGGTFSSYAISWVRQAPGQGLEWMGW
INPNSGGTISAPNFQGRVTMTRDTSTSTVYMELSSLRSEDTAVYYCARAN
WLDYWGQGTLVTVSS,
EVQLLESGAEVKKPGASVKVSCKASGYTFTTYDLAWVRQAPGQGLEWMGW
INPNSGGTNYAQKFQGRVTMTRDTSTSTVYMELSSLRSEDTAVYYCARAN
WLDYWGQGTLVTVSS,
QVQLVQSGAEVKKPGASVKVSCKSSGYSFDSYVVNWVRQAPGQGLEWMGW
INPNSGGTNYAQKFQGRVTMTRDTSTSTVYMELSSLRSEDTAVYYCARDW
VLDYWGQGTLVTVSS,
QVQLVQSGAEVKKPGASVKVSCKASGYTFTSYGISWVRQAPGQGLEWMGW
MNPNSGGTNYAQKFQGRVTMTRDTSTSTVYMELSSLRSEDTAVYYCARGE
WLDYWGQGTLVTVSS,
QVQLVQSGAEVKKPGASVKVSCKASGYTFTSYGISWVRQAPGQGLEWMGW
INPNSGGTNYAQKFQGRVTMTRDTSTSTVYMELSSLRSEDTAVYYCARGW
ELGYWGQGTLVTVSS,
QVQLVQSGAEVKKPGASVKVSCKASGYTFTRYTINWVRQAPGQGLEWMGW
INPNSGGTNYAQKFQGRVTMTRDTSTSTVYMELSSLRSEDTAVYYCARDF
VGYDDWGQGTLVTVSS,
QVQLVQSGAEVKKPGASVKVSCKASGYTFTSYGITWVRQAPGQGLEWMGW
INPNSGGTNYAQKFQGRVTMTRDTSTSTVYMELSSLRSEDTAVYYCARDY
GDLDYWGQGTLVTVSS,
QVQLVQSGAEVKKPGASVKVSCKASGGTFSNYILSWVRQAPGQGLEWMGW
INPDSGGTNYAQKFQGRVTMTRDTSTSTVYMELSSLRSEDTAVYYCARGS
YGMDVWGQGTTVTVSS,
QVQLVQSGAEVKKPGASVKVSCKASGYSFTRYNMHWVRQAPGQGLEWMGW
INPNSGGTNYAQKFQGRVTMTRDTSTSTVYMELSSLRSEDTAVYYCARDG
YSGLDVWGKGTTVTVSS,
QVQLVQSGAEVKKPGASVKVSCKASGGTFSSYAISWVRQAPGQGLEWMGW
INPNNGGTNYAQKFQGRVTMTRDTSTSTVYMELSSLRSEDTAVYYCARDS
GVGMDVWGQGTTVTVSS,
QVQLVQSGAEVKKPGASVKVSCKASGGTFNNYAFSWVRQAPGQGLEWMGW
INPNSGGTNYAQKFQGRVTMTRDTSTSTVYMELSSLRSEDTAVYYCARDG
VAVASDYWGQGTLVTVSS,
QVQLVQSGAEVKKPGASVKVSCKASGYTFSSYNMHWVRQAPGQGLEWMG
WINGNTGGTNYAQKFQGRVTMTRDTSTSTVYMELSSLRSEDTAVYYCARG
VNVDDFDYWGQGTLVTVSS,
QVQLVQSGAEVKKPGASVKVSCKASGGTFSSYAFSWVRQAPGQGLEWMGW
INPDTGYTRYAQKFQGRVTMTRDTSTSTVYMELSSLRSEDTAVYYCARGD
YTGNWYFDLWGRGTLVTVSS,
EVQLLESGAEVKKPGASVKVSCKASGYTFTSYGISWVRQAPGQGLEWMGW
INPYSGGTNYAQKLQGRVTMTRDTSTSTVYMELSSLRSEDTAVYYCARAN
WLDYWGQGTLVTVSS,
QVQLVQSGAEVKKPGASVKVSCKASGYTFTSYGISWVRQAPGQGLEWMGW
ISAYNGYTNYAQNLQGRVTMTRDTSTSTVYMELSSLRSEDTAVYYCARDQ
FYGGNSGGHDYWGQGTLVTVSS,
QVQLVQSGAEVKKPGASVKVSCKASGYTFTDYNMHWVRQAPGQGLEWMG
WMNPNSGGTNYAQKFQGRVTMTRDTSTSTVYMELSSLRSEDTAVYYCAR
E-EDYWGQGTLVTVSS,
QVQLVQSGAEVKKPGASVKVSCKASGYTFTRYTINWVRQAPGQGLEWMGW
INPNSGGANYAQKFQGRVTMTRDTSTSTVYMELSSLRSEDTAVYYCARGD
WFDPWGQGTLVTVSS,
QVQLVQSGAEVKKPGASVKVSCKASGYTFTSYLMHWVRQAPGQGLEWMG
WISPNSGGTNYAQKFQGRVTMTRDTSTSTVYMELSSLRSEDTAVYYCARG
DWFDPWGQGTLVTVSS,
QVQLVQSGAEVKKPGASVKVSCKASGYTFSDYYVHWVRQAPGQGLEWMGW
INPNSGGTNYAQKFQGRVTMTRDTSTSTVYMELSSLRSEDTAVYYCARGE
WFDPWGQGTLVTVSS,
QVQLVQSGAEVKKPGASVKVSCKASGYTFTTYYMHWVRQAPGQGLEWMGW
INPNSGGTNYAQKFQGRVTMTRDTSTSTVYMELSSLRSEDTAVYYCARSD
WFDPWGQGTLVTVSS,
QVQLVQSGAEVKKPGASVKVSCKASGGTFSNYAINWVRQAPGQGLEWMGW
ISPYSGGTNYAQKFQGRVTMTRDTSTSTVYMELSSLRSEDTAVYYCARDS
GSYFDYWGQGTLVTVSS,
QVQLVQSGAEVKKPGASVKVSCKASGYTFTDYYMHWVRQAPGQGLEWMG
WIYPNTGGTNYAQKFQGRVTMTRDTSTSTVYMELSSLRSEDTAVYYCARD
YGGYVDYWGQGTLVTVSS,
EVQLLESGAEVKKPGASVKVSCKASGYTFTSYAMNWVRQAPGQGLEWMGW
MNPNSGGTKYAQKFQGRVTMTRDTSTSTVYMELSSLRSEDTAVYYCAREG
PAALDVWGQGTLVTVSS,
QVQLVQSGAEVKKPGASVKVSCKASGYTLTSHLIHWVRQAPGQGLEWMGW
INPNSGGTNYAQKFQGRVTMTRDTSTSTVYMELSSLRSEDTAVYYCARER
RSGMDVWGQGTTVTVSS,
EVQLLESGAEVKKPGASVKVSCKASGYSFTDYIVHWVRQAPGQGLEWMGW
INPYSGGTKYAQKFQGRVTMTRDTSTSTVYMELSSLRSEDTAVYYCARVL
QEGMDVWGQGTLVTVSS,
QVQLVQSGAEVKKPGASVKVSCKASGYTFSNFLINWVRQAPGQGLEWMGW
INPNSGGTNYAQKFQGRVTMTRDTSTSTVYMELSSLRSEDTAVYYCASER
ELPFDIWGQGTMVTVSS,
QVQLVQSGAEVKKPGASVKVSCKASGYTFTDYQMFWVRQAPGQGLEWMGW
INPNSGGTNYAQKFQGRVTMTRDTSTSTVYMELSSLRSEDTAVYYCAKGG
GGYGMDVWGQGTTVTVSS,
QVQLVQSGAEVKKPGASVKVSCKASGGTFSSYAISWVRQAPGQGLEWMGW
INPNSGGTNYAQKFQGRVTMTRDTSTSTVYMELSSLRSEDTAVYYCAAMG
IAVAGGMDVWGQGTLVTVSS,
QVQLVQSGAEVKKPGASVKVSCKASGYTFTNYHMHWVRQAPGQGLEWMG
WIHPDSGGTSYAQKFQGRVTMTRDTSTSTVYMELSSLRSEDTAVYYCARN
WNLDYWGQGTLVTVSS,
QVQLVQSGAEVKKPGASVKVSCKASGYTFTGYYMHWVRQAPGQGLEWMG
WMNPNSGNTGYAQKFQGRVTMTRDTSTSTVYMELSSLRSEDTAVYYCATY
DDGMDVWGQGTTVTVSS,
QVQLVQSGAEVKKPGASVKVSCKASGYTFTSYTVNWVRQAPGQGLEWMGW
INPNSGGTKYAQNFQGRVTMTRDTSTSTVYMELSSLRSEDTAVYYCARGG
GGALDYWGQGTLVTVSS,
QVQLVQSGAEVKKPGASVKVSCKASGYTFTSYYMHWVRQAPGQGLEWMGM
INPRDDTTDYARDFQGRVTMTRDTSTSTVYMELSSLRSEDTAVYYCALSG
NYYGMDVWGQGTTVTVSS,
QVQLVQSGAEVKKPGASVKVSCKASGYTFTNYYMHWVRQAPGQGLEWMG
MINPSGGGTSYAQKFQGRVTMTRDTSTSTVYMELSSLRSEDTAVYYCARG
NPWELRLDYWGQGTLVTVSS,
and
QVQLVQSGAEVKKPGSSVKVSCKASGYTFTSQYMHWVRQAPGQGLEWMGR
IIPLLGIVNYAQKFQGRVTITADESTSTAYMELSSLRSEDTAVYYCARDK
NYYGMDVWGQGTTVTVSS.

[0147] In some embodiments, the ABP comprises a VL sequence selected from

DIQMTQSPSSLSASVGDRVTITCRASQSISTWLAWYQQKPGKAPKLLIYA
ASSLRSGVPSRFSGSGSGTDFTLTISSLQPEDFATYYCQQSYNTPYTFGQ
GTKLEIK,
DIQMTQSPSSLSASVGDRVTITCRASQSISRWLAWYQQKPGKAPKLLIYA
ASTVQSGVPSRFSGSGSGTDFTLTISSLQPEDFATYYCQQSYSTPYTFGQ
GTKLEIK,
DIQMTQSPSSLSASVGDRVTITCRASQDISRWLAWYQQKPGKAPKLLIYA
ASRLQAGVPSRFSGSGSGTDFTLTISSLQPEDFATYYCQQSYSTPYSFGQ
GTKLEIK,
DIQMTQSPSSLSASVGDRVTITCRASQTISSWLAWYQQKPGKAPKLLIYA
ASSLQSGVPSRFSGSGSGTDFTLTISSLQPEDFATYYCQQSYSTPFTFGP
GTKVDIK,
DIQMTQSPSSLSASVGDRVTITCRASQTISSWLAWYQQKPGKAPKLLIYA
ASSLQSGVPSRFSGSGSGTDFTLTISSLQPEDFATYYCQQSYGVPYTFGQ
GTKVEIK,
DIQMTQSPSSLSASVGDRVTITCRASQSISNWLAWYQQKPGKAPKLLIYA
ASSLQSGVPSRFSGSGSGTDFTLTISSLQPEDFATYYCQQSYSAPYTFGP
GTKVDIK,
DIQMTQSPSSLSASVGDRVTITCRASQSVGNWLAWYQQKPGKAPKWYGAS
SLQTGVPSRFSGSGSGTDFTLTISSLQPEDFATYYCQQSYSAPYTFGQGT
KVEIK,
DIQMTQSPSSLSASVGDRVTITCRASQNIGNWLAWYQQKPGKAPKLLIYA
ASTLQTGVPSRFSGSGSGTDFTLTISSLQPEDFATYYCQQSYSAPYSFGQ
GTKLEIK,
DIQMTQSPSSLSASVGDRVTITCRASQSISRWLAWYQQKPGKAPKLLIYA
ASSLQSGVPSRFSGSGSGTDFTLTISSLQPEDFATYYCQQSYSTPYTFGQ
GTKLEIK,
DIQMTQSPSSLSASVGDRVTITCRASQSISSWLAWYQQKPGKAPKLLIYG
ASSLQSGVPSRFSGSGSGTDFTLTISSLQPEDFATYYCQQSYSVPYSFGQ
GTKLEIK,
DIQMTQSPSSLSASVGDRVTITCRASQSISKWLAWYQQKPGKAPKLLIYA
ASSLQSGVPSRFSGSGSGTDFTLTISSLQPEDFATYYCQQSYSAPYTFGQ
GTKVEIK,
DIQMTQSPSSLSASVGDRVTITCRASQGISNYLAWYQQKPGKAPKLLIYA
ASTLQSGVPSRFSGSGSGTDFTLTISSLQPEDFATYYCQQSYSVPYSFGQ
GTKLEIK,
DIQMTQSPSSLSASVGDRVTITCRASQTISNYLNWYQQKPGKAPKLLIYA
ASNLQSGVPSRFSGSGSGTDFTLTISSLQPEDFATYYCQQSYSTPQTFGQ
GTKVEIK,
DIQMTQSPSSLSASVGDRVTITCRASRDIGRAVGWYQQKPGKAPKLLIYA
ASSLQSGVPSRFSGSGSGTDFTLTISSLQPEDFATYYCQQLDSYPFTFGP
GTKVDIK,
DIQMTQSPSSLSASVGDRVTITCRASQSISSWLAWYQQKPGKAPKLLIYA
ASTLQSGVPSRFSGSGSGTDFTLTISSLQPEDFATYYCQQSYSSPYTFGP
GTKVDIK,
DIQMTQSPSSLSASVGDRVTITCQASQDISNYLNWYQQKPGKAPKLLIYA
ASSLQSGVPSRFSGSGSGTDFTLTISSLQPEDFATYYCQQSYSTPLTFGG
GTKLEIK,
DIQMTQSPSSLSASVGDRVTITCRASQSIGRWLAWYQQKPGKAPKLLIYA
ASSLQSGVPSRFSGSGSGTDFTLTISSLQPEDFATYYCQQSYSTPYSFGQ
GTKVEIK,
DIQMTQSPSSLSASVGDRVTITCRASQSISTWLAWYQQKPGKAPKLLIYA
ASTLQSGVPSRFSGSGSGTDFTLTISSLQPEDFATYYCQQSYSTPYTFAQ
GTKLEIK,
DIQMTQSPSSLSASVGDRVTITCQASQDISNYLNWYQQKPGKAPKWYGAS
RLQSGVPSRFSGSGSGTDFTLTISSLQPEDFATYYCQQSYSTPYTFGQGT
KLEIK,
DIQMTQSPSSLSASVGDRVTITCRASQSISSWLAWYQQKPGKAPKLLIYA
ASTLQSGVPSRFSGSGSGTDFTLTISSLQPEDFATYYCQQSYSTPFTFGP
GTKVDIK,
DIQMTQSPSSLSASVGDRVTITCRASQSVSNWLAWYQQKPGKAPKLLIYA
ASSLQSGVPSRFSGSGSGTDFTLTISSLQPEDFATYYCQQSYSTPTFGQG
TKLEIK,
DIQMTQSPSSLSASVGDRVTITCQASQDISNYLNWYQQKPGKAPKLLIYA
ASTLQSGVPSRFSGSGSGTDFTLTISSLQPEDFATYYCQQTYAIPLTFGG
GTKVEIK,
DIQMTQSPSSLSASVGDRVTITCQASQDIGSWLAWYQQKPGKAPKLLIYA
TSSLQSGVPSRFSGSGSGTDFTLTISSLQPEDFATYYCQQSYSTPYTFGQ
GTKLEIK,
DIQMTQSPSSLSASVGDRVTITCRASQGISRWLAWYQQKPGKAPKLLIYA
ASTLQPGVPSRFSGSGSGTDFTLTISSLQPEDFATYYCQQSYIAPFTFGP
GTKVDIK,
DIQMTQSPSSLSASVGDRVTITCRASQGISNYLAWYQQKPGKAPKLLIYA
ASRLESGVPSRFSGSGSGTDFTLTISSLQPEDFATYYCQQSYSIPLTFGG
GTKVEIK,
DIQMTQSPSSLSASVGDRVTITCRASQSISSYLNWYQQKPGKAPKWYGVS
SLQSGVPSRFSGSGSGTDFTLTISSLQPEDFATYYCQQSYSNPTFGQGTK
VEIK,
DIQMTQSPSSLSASVGDRVTITCRASQSISSWVAWYQQKPGKAPKLLIYG
ASNLESGVPSRFSGSGSGTDFTLTISSLQPEDFATYYCQQSYSTPYSFGQ
GTKLEIK,
DIQMTQSPSSLSASVGDRVTITCRASQGISNYLAWYQQKPGKAPKLLIYA
ASSLQSGVPSRFSGSGSGTDFTLTISSLQPEDFATYYCQQSYSDQWTFGQ
GTKVEIK,
DIQMTQSPSSLSASVGDRVTITCRASQSISRWLAWYQQKPGKAPKLLIYA
ASSLQSGVPSRFSGSGSGTDFTLTISSLQPEDFATYYCQQSYLPPYSFGQ
GTKVEIK,
DIQMTQSPSSLSASVGDRVTITCRASQSISNWLAWYQQKPGKAPKLLIYA
ASSLQSGVPSRFSGSGSGTYFTLTISSLQPEDFATYYCQQSYSSPYTFGQ
GTKLEIK,
DIQMTQSPSSLSASVGDRVTITCRASQSISHYLNWYQQKPGKAPKLLIYG
ASSLQSGVPSRFSGSGSGTDFTLTISSLQPEDFATYYCQQSYTTPWTFGQ
GTRLEIK,
DIQMTQSPSSLSASVGDRVTITCRASQSISSWLAWYQQKPGKAPKLLIYA
ASTLQSGVPSRFSGSGSGTDFTLTISSLQPEDFATYYCQQSYLPPYSFGQ
GTKLEIK,
DIQMTQSPSSLSASVGDRVTITCQASQDISNYLNWYQQKPGKAPKLLIYG
ASRLQSGVPSRFSGSGSGTDFTLTISSLQPEDFATYYCQEGITYTFGQGT
KVEIK,
DIQMTQSPSSLSASVGDRVTITCQASQDISNYLNWYQQKPGKAPKLLIYA
ASSLQSGVPSRFSGSGSGTDFTLTISSLQPEDFATYYCQQYYSYPFTFGP
GTKVDIK,
and
EIVMTQSPATLSVSPGERATLSCRASQSVSRNLAWYQQKPGQAPRLLIYG
ASTRATGIPARFSGSGSGTEFTLTISSLQSEDFAVYYCQHYGYSPVTFGQ
GTKLEIK.

[0148] In some embodiments, the ABP comprises the VH sequence and the VL sequence from the scFv designated G2(1H11), G2(2E07), G2(2E03), G2(2A11), G2(2C06), G2(1G01), G2(1C02), G2(1H01), G2(1B12), G2(1B06), G2(2H10), G2(1H10), G2(2C11), G2(1C09), G2(1A10), G2(1B10), G2(1D07), G2(1E05), G2(1D03), G2(1G12), G2(2H11), G2(1C03), G2(1G07), G2(1F12), G2(1G03), G2(2B08), G2(2A10), G2(2D04), G2(1C06), G2(2A09), G2(1B08), G2(1E03), G2(2A03), G2(2F01), or G2(1D06). In some embodiments, the ABP comprises the VH sequence and the VL sequence from the scFv designated G2(1H11).

[0149] In some embodiments, the multispecific ABP binds to any one or more of amino acid positions 3-9 of the restricted peptide NTDNNLAVY. In some embodiments, the multispecific ABP binds to any one or more of amino acid positions 6-9 of the restricted peptide NTDNNLAVY. In some embodiments, the multispecific ABP binds to any one or more of amino acid positions 70-85 of the alpha 1 helix of HLA subtype A*01:01. In some embodiments, the multispecific ABP binds to any one or more of amino acid positions 140-160 of the alpha 2 helix of HLA subtype A*01:01. In some embodiments, the multispecific ABP binds to any one or more of amino acid positions 157-160 of the alpha 2 helix of HLA subtype A*01:01.

[0150] In some embodiments of the multispecific ABP, the HLA Class I molecule is HLA subtype B*35:01 and the HLA-restricted peptide comprises the sequence EVDPIGHVY.

[0151] In some embodiments, the HLA Class I molecule is HLA subtype B*35:01 and the HLA-restricted peptide consists of the sequence EVDPIGHVY.

[0152] In some embodiments, the ABP comprises a CDR-H3 comprising a sequence selected from: CARDGVRYYGMDVW, CARGVRGYDRSAGYW, CASHDYGDYGEYFQHW, CARVSWYCSSTSCGVNWFDPW, CAKVNWNDGPYFDYW, CATPTNSGYYGPYYYYGMDVW, CARDVMDVW, CAREGYGMDVW, CARDNGVGVDYW, CARGIADSGSYYGNGRDYYYGMDVW, CARGDYYFDYW, CARDGTRYYGMDVW, CARDVVANFDYW, CARGHSSGWYYYYGMDVW, CAKDLGSYGGYYW, CARS WFGGFNYHYYGMDVW, CARELPIGYGMDVW, and CARGGSYYYYGMDVW.

[0153] In some embodiments, the ABP comprises a CDR-L3 comprising a sequence selected from: CMQGLQTPITF, CMQALQTPPTF, CQQAISFPLTF, CQQANSFPLTF, CQQANSFPLTF, CQQSYSIPLTF, CQQTYMMPYTF, CQQSYITPWTF, CQQSYITPYTF, CQQYYTTPYTF, CQQSYSTPLTF, CMQALQTPLTF, CQQYGSWPRTF, CQQSYSTPVTF, CMQALQTPYTF, CQQANSFPFTF, CMQALQTPLTF, and CQQSYSTPLTF.

[0154] In some embodiments, the ABP comprises the CDR-H3 and the CDR-L3 from the scFv designated G5(7A05), G5(1C12), G5(7E07), G5(7B03), G5(7F06), G5(1B12), G5(1E05), G5(3G01), G5(3G08), G5(4B02), G5(4E04), G5(1D06), G5(1H11), G5(2B10), G5(2H08), G5(3G05), G5(4A07), or G5(4B01).

[0155] In some embodiments, the ABP comprises all three heavy chain CDRs and all three light chain CDRs from the scFv designated G5(7A05), G5(1C12), G5(7E07), G5(7B03), G5(7F06), G5(1B12), G5(1E05), G5(3G01), G5(3G08), G5(4B02), G5(4E04), G5(1D06), G5(1H11), G5(2B10), G5(2H08), G5(3G05), G5(4A07), or G5(4B01).

[0156] In some embodiments, the ABP comprises a VH sequence selected from

QVQLVQSGAEVKKPGASVKVSCKASGYTFTSYDINWVRQAPGQGLEWMGI
INPRSGSTKYAQKFQGRVTMTRDTSTSTVYMELSSLRSEDTAVYYCARDG
VRYYGMDVWGQGTTVTVSS,
QVQLVQSGAEVKKPGSSVKVSCKASGYTFTSHDINWVRQAPGQGLEWMGW
MNPNSGDTGYAQKFQGRVTITADESTSTAYMELSSLRSEDTAVYYCARGV
RGYDRSAGYWGQGTLVIVSS,
EVQLLESGGGLVKPGGSLRLSCAASGFSFSSYWMSWVRQAPGKGLEWISY
ISGDSGYTNYADSVKGRFTISRDDSKNTLYLQMNSLKTEDTAVYYCASHD
YGDYGEYFQHWGQGTLVTVSS,
EVQLLQSGGGLVQPGGSLRLSCAASGFTFSNSDMNWVRQAPGKGLEWVAY
ISSGSSTIYYADSVKGRFTISRDNSKNTLYLQMNSLRAEDTAVYYCARVS
WYCSSTSCGVNWFDPWGQGTLVTVSS,
EVQLLESGGGLVQPGGSLRLSCAASGFTFSNSDMNWVRQAPGKGLEWVAS
ISSSGGYINYADSVKGRFTISRDNSKNTLYLQMNSLRAEDTAVYYCAKVN
WNDGPYFDYWGQGTLVTVSS,
QVQLVQSGAEVKKPGSSVKVSCKASGGTFSNFGVSWLRQAPGQGLEWMGG
IIPILGTANYAQKFQGRVTITADESTSTAYMELSSLRSEDTAVYYCATPT
NSGYYGPYYYYGMDVWGQGTTVTVSS,
QVQLVQSGAEVKKPGASVKVSCKASGYTFTSYNMHWVRQAPGQGLEWMGW
INPNSGGTNYAQKFQGRVTMTRDTSTSTVYMELSSLRSEDTAVYYCARDV
MDVWGQGTTVTVSS,
QVQLVQSGAEVKKPGASVKVSCKASGGTFSGYLVSWVRQAPGQGLEWMGW
INPNSGGTNTAQKFQGRVTMTRDTSTSTVYMELSSLRSEDTAVYYCAREG
YGMDVWGQGTTVTVSS,
QVQLVQSGAEVKKPGASVKVSCKASGYIFRNYPMHWVRQAPGQGLEWMGW
INPDSGGTKYAQKFQGRVTMTRDTSTSTVYMELSSLRSEDTAVYYCARDN
GVGVDYWGQGTLVTVSS,
QVQLVQSGAEVKKPGASVKVSCKASGYTFTGYYMHWVRQAPGQGLEWMGW
MNPNIGNTGYAQKFQGRVTMTRDTSTSTVYMELSSLRSEDTAVYYCARGI
ADSGSYYGNGRDYYYGMDVWGQGTTVTVSS,
QVQLVQSGAEVKKPGASVKVSCKASGGTFSSYGISWVRQAPGQGLEWMGW
INPNSGVTKYAQKFQGRVTMTRDTSTSTVYMELSSLRSEDTAVYYCARGD
YYFDYWGQGTLVTVSS,
QVQLVQSGAEVKKPGASVKVSCKASGYTFTSYDINWVRQAPGQGLEWMGW
INPNSGDTKYSQKFQGRVTMTRDTSTSTVYMELSSLRSEDTAVYYCARDG
TRYYGMDVWGQGTTVTVSS,
EVQLLESGGGLVKPGGSLRLSCAASGFTFSDYYMSWVRQAPGKGLEWVSY
ISSSSSYTNYADSVKGRFTISRDDSKNTLYLQMNSLKTEDTAVYYCARDV
VANFDYWGQGTLVTVSS,
QVQLVQSGAEVKKPGASVKVSCKASGGTFSSYAISWVRQAPGQGLEWMGW
MNPDSGSTGYAQRFQGRVTMTRDTSTSTVYMELSSLRSEDTAVYYCARGH
SSGWYYYYGMDVWGQGTTVTVSS,
EVQLLESGGGLVQPGGSLRLSCAASGFTFTSYSMHWVRQAPGKGLEWVSS
ITSFTNTMYYADSVKGRFTISRDNSKNTLYLQMNSLRAEDTAVYYCAKDL
GSYGGYYWGQGTLVTVSS,
QVQLVQSGAEVKKPGASVKVSCKASGYTFTNYYMHWVRQAPGQGLEWMGI
INPSGGSTSYAQKFQGRVTMTRDTSTSTVYMELSSLRSEDTAVYYCARSW
FGGFNYHYYGMDVWGQGTTVTVSS,
QVQLVQSGAEVKKPGASVKVSCKASGYTFTSYYMHWVRQAPGQGLEWMGW
MNPNSGNTGYAQKFQGRVTMTRDTSTSTVYMELSSLRSEDTAVYYCAREL
PIGYGMDVWGQGTTVTVSS,
and
QVQLVQSGAEVKKPGSSVKVSCKASGGTFSSYAISWVRQAPGQGLEWMGG
IIPIVGTANYAQKFQGRVTITADESTSTAYMELSSLRSEDTAVYYCARGG
SYYYYGMDVWGQGTTVTVSS.

[0157] In some embodiments, the ABP comprises a VL sequence selected from

DIVMTQSPLSLPVTPGEPASISCRSSQSLLHSNGYNYLDWYLQKPGQSPQ
LLIYLGSYRASGVPDRFSGSGSGTDFTLKISRVEAEDVGVYYCMQGLQTP
ITFGQGTRLEIK,
DIVMTQSPLSLPVTPGEPASISCRSSQSLLHSNGYNYLDWYLQKPGQSPQ
LLIYLGSSRASGVPDRFSGSGSGTDFTLKISRVEAEDVGVYYCMQALQTP
PTFGPGTKVDIK,
DIQMTQSPSSLSASVGDRVTITCQASQDISNYLNWYQQKPGKAPKLLIYA
ASSLQSGVPSRFSGSGSGTDFTLTISSLQPEDFATYYCQQAISFPLTFGQ
STKVEIK,
DIQMTQSPSSLSASVGDRVTITCRASQSISSWLAWYQQKPGKAPKLLIYS
ASTLQSGVPSRFSGSGSGTDFTLTISSLQPEDFATYYCQQANSFPLTFGG
GTKVEIK,
DIQMTQSPSSLSASVGDRVTITCRASQSISSWLAWYQQKPGKAPKLLIYA
ASSLQSGVPSRFSGSGSGTDFTLTISSLQPEDFATYYCQQANSFPLTFGG
GTKVEIK,
DIQMTQSPSSLSASVGDRVTITCRASQSISSWLAWYQQKPGKAPKLLIYA
ASTLQSGVPSRFSGSGSGTDFTLTISSLQPEDFATYYCQQSYSIPLTFGG
GTKVEIK,
DIQMTQSPSSLSASVGDRVTITCRASQGISNYLNWYQQKPGKAPKLLIYY
ASSLQSGVPSRFSGSGSGTDFTLTISSLQPEDFATYYCQQTYMMPYTFGQ
GTKVEIK,
DIQMTQSPSSLSASVGDRVTITCRASQSISSYLNWYQQKPGKAPKWYGAS
SLQSGVPSRFSGSGSGTDFTLTISSLQPEDFATYYCQQSYITPWTFGQGT
KVEIK,
DIQMTQSPSSLSASVGDRVTITCRASQGISNYLAWYQQKPGKAPKLLIYA
ASSLQSGVPSRFSGSGSGTDFTLTISSLQPEDFATYYCQQSYITPYTFGQ
GTKLEIK,
DIVMTQSPDSLAVSLGERATINCKTSQSVLYRPNNENYLAWYQQKPGQPP
KLLIYQASIREPGVPDRFSGSGSGTDFTLTISSLQAEDVAVYYCQQYYTT
PYTFGQGTKLEIK,
DIQMTQSPSSLSASVGDRVTITCRASQSISRFLNWYQQKPGKAPKWYGAS
RPQSGVPSRFSGSGSGTDFTLTISSLQPEDFATYYCQQSYSTPLTFGQGT
KVEIK,
DIVMTQSPLSLPVTPGEPASISCRSSQSLLHSNGYNYLDWYLQKPGQSPQ
LLIYLGSHRASGVPDRFSGSGSGTDFTLKISRVEAEDVGVYYCMQALQTP
LTFGGGTKVEIK,
EIVMTQSPATLSVSPGERATLSCRASQSVSSNLAWYQQKPGQAPRLLIYA
ASARASGIPARFSGSGSGTEFTLTISSLQSEDFAVYYCQQYGSWPRTFGQ
GTKVEIK,
DIQMTQSPSSLSASVGDRVTITCRASQSISSYLNWYQQKPGKAPKWYGAS
RLQSGVPSRFSGSGSGTDFTLTISSLQPEDFATYYCQQSYSTPVTFGQGT
KVEIK,
DIVMTQSPLSLPVTPGEPASISCRSSQSLLHSNGYNYLDWYLQKPGQSPQ
LLIYLGSNRASGVPDRFSGSGSGTDFTLKISRVEAEDVGVYYCMQALQTP
YTFGQGTKVEIK,
DIQMTQSPSSLSASVGDRVTITCQASEDISNHLNWYQQKPGKAPKLLIYD
ALSLQSGVPSRFSGSGSGTDFTLTISSLQPEDFATYYCQQANSFPFTFGP
GTKVDIK,
DIVMTQSPLSLPVTPGEPASISCRSSQSLLHSNGYNYLDWYLQKPGQSPQ
LLIYLGSNRASGVPDRFSGSGSGTDFTLKISRVEAEDVGVYYCMQALQTP
LTFGQGTKVEIK,
and
DIQMTQSPSSLSASVGDRVTITCRASQSISSYLNWYQQKPGKAPKLLIYA
ASSLQSGVPSRFSGSGSGTDFTLTISSLQPEDFATYYCQQSYSTPLTFGG
GTKVEIK.

[0158] In some embodiments, the ABP comprises the VH sequence and VL sequence from the scFv designated G5(7A05), G5(1C12), G5(7E07), G5(7B03), G5(7F06), G5(1B12), G5(1E05), G5(3G01), G5(3G08), G5(4B02), G5(4E04), G5(1D06), G5(1H11), G5(2B10), G5(2H08), G5(3G05), G5(4A07), or G5(4B01).

[0159] In some embodiments, the ABP comprises the VH sequence and VL sequence from the scFv designated G5(7A05).

[0160] In some embodiments, the ABP comprises the VH sequence and VL sequence from the scFv designated G5(1C12).

[0161] In some embodiments, the multispecific ABP binds to any one or more of amino acid positions 2-8 on the restricted peptide EVDPIGHVY.

[0162] In some embodiments, the multispecific ABP binds to any one or more of amino acid positions 50, 54, 55, 57, 61, 62, 74, 81, 82 and 85 of the α1 helix of the HLA protein. In some embodiments, the multispecific ABP binds to any one or more of amino acid positions 147 and 148 of the α2 helix of the HLA protein.

[0163] In some embodiments, the multispecific ABP comprises the sequence

MGWSCIILFLVATATGVHSDIQMTQSPSSLSASVGDRVTITCQASQDISN
YLNWYQQKPGKAPKLLIYAASSLQSGVPSRFSGSGSGTDFTLTISSLQPE
DFATYYCQQAISFPLTFGQSTKVEIKGGGGSGGGGSGGGGSGGGGSEVQL
LESGGGLVKPGGSLRLSCAASGFSFSSYWMSWVRQAPGKGLEWISYISGD
SGYTNYADSVKGRFTISRDDSKNTLYLQMNSLKTEDTAVYYCASHDYGDY
GEYFQHWGQGTLVTVSSGGGGSQVQLQQSGAELARPGASVKMSCKASGYT
FTRYTMHWVKQRPGQGLEWIGYINPSRGYTNYNQKFKDKATLTTDKSSST
AYMQLSSLTSEDSAVYYCARYYDDHYSLDYWGQGTTLTVSSVEGGSGGSG
GSGGSGGVDQIVLTQSPAIMSASPGEKVTMTCSASSSVSYMNWYQQKSGT
SPKRWIYDTSKLASGVPAHFRGSGSGTSYSLTISGMEAEDAATYYCQQWS
SNPFTFGSGTKLEINGGGGSHHHHHHHH.

[0164] In some embodiments of the multispecific ABP, the HLA Class I molecule is HLA subtype A*02:01 and the HLA-restricted peptide comprises the sequence AIFPGAVPAA.

[0165] In some embodiments, the HLA Class I molecule is HLA subtype A*02:01 and the HLA-restricted peptide consists of the sequence AIFPGAVPAA.

[0166] In some embodiments, the ABP comprises a CDR-H3 comprising a sequence selected from: CARDDYGDYVAYFQHW, CARDLSYYYGMDVW, CARVYDFWSVLSGFDIW, CARVEQGYDIYYYYYMDVW, CARSYDYGDYLNFDYW, CARASGSGYYYYYGMDVW, CAASTWIQPFDYW, CASNGNYYGSGSYYNYW, CARAVYYDFWSGPFDYW, CAKGGIYYGSGSYPSW, CARGLYYMDVW, CARGLYGDYFLYYGMDVW, CARGLLGFGEFLTYGMDVW, CARDRDSSWTYYYYGMDVW, CARGLYGDYFLYYGMDVW, CARGDYYDSSGYYFPVYFDYW, and CAKDPFWSGHYYYYGMDVW.

[0167] In some embodiments, the ABP comprises a CDR-L3 comprising a sequence selected from: CQQNYNSVTF, CQQSYNTPWTF, CGQSYSTPPTF, CQQSYSAPYTF, CQQSYSIPPTF, CQQSYSAPYTF, CQQHNSYPPTF, CQQYSTYPITI, CQQANSFPWTF, CQQSHSTPQTF, CQQSYSTPLTF, CQQSYSTPLTF, CQQTYSTPWTF, CQQYGSSPYTF, CQQSHSTPLTF, CQQANGFPLTF, and CQQSYSTPLTF.

[0168] In some embodiments, the ABP comprises the CDR-H3 and the CDR-L3 from the scFv designated G8(2C10), G8(1A03), G8(1A04), G8(1A06), G8(1B03), G8(1C11), G8(1D02), G8(1H08), G8(2B05), G8(2E06), G8(2E04), G8(4F05), G8(5C03), G8(5F02), G8(5G08), G8(1C01), or G8(2C11).

[0169] In some embodiments, the ABP comprises all three heavy chain CDRs and all three light chain CDRs from the scFv designated G8(2C10), G8(1A03), G8(1A04), G8(1A06), G8(1B03), G8(1C11), G8(1D02), G8(1H08), G8(2B05), G8(2E06), G8(2E04), G8(4F05), G8(5C03), G8(5F02), G8(5G08), G8(1C01), or G8(2C11).

[0170] In some embodiments, the ABP comprises a VH sequence selected from:

QVQLVQSGAEVKKPGASVKVSCKASGGTFSRSAITWVRQAPGQGLEWMGW
INPNSGATNYAQKFQGRVTMTRDTSTSTVYMELSSLRSEDTAVYYCARDD
YGDYVAYFQHWGQGTLVTVSS,
QVQLVQSGAEVKKPGASVKVSCKASGYPFIGQYLHWVRQAPGQGLEWMGI
INPSGDSATYAQKFQGRVTMTRDTSTSTVYMELSSLRSEDTAVYYCARDL
SYYYGMDVWGQGTTVTVSS,
QVQLVQSGAEVKKPGASVKVSCKASGYTFTNYYMHWVRQAPGQGLEWMGW
MNPIGGGTGYAQKFQGRVTMTRDTSTSTVYMELSSLRSEDTAVYYCARVY
DFWSVLSGFDIWGQGTLVTVSS,
EVQLLESGGGLVQPGGSLRLSCAASGFTFSDYYMSWVRQAPGKGLEWVSG
INWNGGSTGYADSVKGRFTISRDNSKNTLYLQMNSLRAEDTAVYYCARVE
QGYDIYYYYYMDVWGKGTTVTVSS,
QVQLVQSGAEVKKPGASVKVSCKASGGTLSSYPINWVRQAPGQGLEWMGW
ISTYSGHADYAQKLQGRVTMTRDTSTSTVYMELSSLRSEDTAVYYCARSY
DYGDYLNFDYWGQGTLVTVSS,
EVQLLESGGGLVQPGGSLRLSCAASGFTFSSYWMSWVRQAPGKGLEWVSS
ISGRGDNTYYADSVKGRFTISRDNSKNTLYLQMNSLRAEDTAVYYCARAS
GSGYYYYYGMDVWGQGTTVTVSS,
QVQLVQSGAEVKKPGASVKVSCKASGYTFGNYFMHWVRQAPGQGLEWMGM
VNPSGGSETFAQKFQGRVTMTRDTSTSTVYMELSSLRSEDTAVYYCAAST
WIQPFDYWGQGTLVTVSS,
EVQLLESGGGLVQPGGSLRLSCAASGFDFSIYSMNWVRQAPGKGLEWVSA
ISGSGGSTYYADSVKGRFTISRDNSKNTLYLQMNSLRAEDTAVYYCASNG
NYYGSGSYYNYWGQGTLVTVSS,
QVQLVQSGAEVKKPGASVKVSCKASGYTLTTYYMHWVRQAPGQGLEWMGW
INPNSGGTNYAQKFQGRVTMTRDTSTSTVYMELSSLRSEDTAVYYCARAV
YYDFWSGPFDYWGQGTLVTVSS,
QVQLVQSGAEVKKPGASVKVSCKASGYTFTSYYMHWVRQAPGQGLEWMGW
INPYSGGTNYAQKFQGRVTMTRDTSTSTVYMELSSLRSEDTAVYYCAKGG
IYYGSGSYPSWGQGTLVTVSS,
QVQLVQSGAEVKKPGSSVKVSCKASGGTFSSYGVSWVRQAPGQGLEWMGW
ISPYSGNTDYAQKFQGRVTITADESTSTAYMELSSLRSEDTAVYYCARGL
YYMDVWGKGTTVTVSS,
QVQLVQSGAEVKKPGASVKVSCKASGYTFSNMYLHWVRQAPGQGLEWMGW
INPNTGDTNYAQTFQGRVTMTRDTSTSTVYMELSSLRSEDTAVYYCARGL
YGDYFLYYGMDVWGQGTKVTVSS,
QVQLVQSGAEVKKPGASVKVSCKASGYTFTSYYMHWVRQAPGQGLEWMGW
MNPNSGNTGYAQKFQGRVTMTRDTSTSTVYMELSSLRSEDTAVYYCARGL
LGFGEFLTYGMDVWGQGTLVTVSS,
QVQLVQSGAEVKKPGASVKVSCKASGYTFTGYYIEWVRQAPGQGLEWMGV
INPSGGSTTYAQKLQGRVTMTRDTSTSTVYMELSSLRSEDTAVYYCARDR
DSSWTYYYYGMDVWGQGTTVTVSS,
QVQLVQSGAEVKKPGASVKVSCKASGYTFTSNYMHWVRQAPGQGLEWMGW
MNPNSGNTGYAQKFQGRVTMTRDTSTSTVYMELSSLRSEDTAVYYCARGL
YGDYFLYYGMDVWGQGTTVTVSS,
QVQLVQSGAEVKKPGASVKVSCKASGGTFSSHAISWVRQAPGQGLEWMGV
IIPSGGTSYTQKFQGRVTMTRDTSTSTVYMELSSLRSEDTAVYYCARGDY
YDSSGYYFPVYFDYWGQGTLVTVSS,
and
QVQLVQSGAEVKKPGASVKVSCKASGYTFTSYAMNWVRQAPGQGLEWMGW
INPNSGGTNYAQKFQGRVTMTRDTSTSTVYMELSSLRSEDTAVYYCARDP
FWSGHYYYYGMDVWGQGTTVTVSS.

[0171] In some embodiments, the ABP comprises a VL sequence selected from:

DIQMTQSPSSLSASVGDRVTITCRASQSITSYLNWYQQKPGKAPKLLIYD
ASNLETGVPSRFSGSGSGTDFTLTISSLQPEDFATYYCQQNYNSVTFGQG
TKLEIK,
DIQMTQSPSSLSASVGDRVTITCWASQGISSYLAWYQQKPGKAPKLLIYA
ASSLQSGVPSRFSGSGSGTDFTLTISSLQPEDFATYYCQQSYNTPWTFGP
GTKVDIK,
DIQMTQSPSSLSASVGDRVTITCRASQAISNSLAWYQQKPGKAPKLLIYA
ASTLQSGVPSRFSGSGSGTDFTLTISSLQPEDFATYYCGQSYSTPPTFGQ
GTKLEIK,
DIQMTQSPSSLSASVGDRVTITCRASQSISSYLNWYQQKPGKAPKLLIYK
ASSLESGVPSRFSGSGSGTDFTLTISSLQPEDFATYYCQQSYSAPYTFGP
GTKVDIK,
DIQMTQSPSSLSASVGDRVTITCQASQDISNYLNWYQQKPGKAPKLLIYA
ASSLQSGVPSRFSGSGSGTDFTLTISSLQPEDFATYYCQQSYSIPPTFGG
GTKVDIK,
DIQMTQSPSSLSASVGDRVTITCQASQDISNYLNWYQQKPGKAPKLLIYA
ASSLQSGVPSRFSGSGSGTDFTLTISSLQPEDFATYYCQQSYSAPYTFGG
GTKVEIK,
DIQMTQSPSSLSASVGDRVTITCRASQGINSYLAWYQQKPGKAPKWYDAS
NLETGVPSRFSGSGSGTDFTLTISSLQPEDFATYYCQQHNSYPPTFGQGT
KLEIK,
DIQMTQSPSSLSASVGDRVTITCRASQSISRWLAWYQQKPGKAPKLLIYA
ASSLQSGVPSRFSGSGSGTDFTLTISSLQPEDFATYYCQQYSTYPITIGQ
GTKVEIK,
DIQMTQSPSSLSASVGDRVTITCRASQGISNSLAWYQQKPGKAPKLLIYA
ASSLQSGVPSRFSGSGSGTDFTLTISSLQPEDFATYYCQQANSFPWTFGQ
GTKLEIK,
DIQMTQSPSSLSASVGDRVTITCRASQDVSTWLAWYQQKPGKAPKLLIYA
ASSLQSGVPSRFSGSGSGTDFTLTISSLQPEDFATYYCQQSHSTPQTFGQ
GTKVEIK,
DIQMTQSPSSLSASVGDRVTITCRASQSISSWLAWYQQKPGKAPKLLIYD
ASNLETGVPSRFSGSGSGTDFTLTISSLQPEDFATYYCQQSYSTPLTFGG
GTKLEIK,
DIQMTQSPSSLSASVGDRVTITCRASQGISNYLAWYQQKPGKAPKLLIYA
ASTLQSGVPSRFSGSGSGTDFTLTISSLQPEDFATYYCQQSYSTPLTFGG
GTKVEIK,
DIQMTQSPSSLSASVGDRVTITCRASQGISNWLAWYQQKPGKAPKLLIYA
ASTLQSGVPSRFSGSGSGTDFTLTISSLQPEDFATYYCQQTYSTPWTFGQ
GTKLEIK,
EIVMTQSPATLSVSPGERATLSCRASQSVGNSLAWYQQKPGQAPRLLIYG
ASTRATGIPARFSGSGSGTEFTLTISSLQSEDFAVYYCQQYGSSPYTFGQ
GTKVEIK,
DIQMTQSPSSLSASVGDRVTITCRASQSISGYLNWYQQKPGKAPKLLIYA
ASSLQSGVPSRFSGSGSGTDFTLTISSLQPEDFATYYCQQSHSTPLTFGQ
GTKVEIK,
DIQMTQSPSSLSASVGDRVTITCRASQNIYTYLNWYQQKPGKAPKWYDAS
NLETGVPSRFSGSGSGTDFTLTISSLQPEDFATYYCQQANGFPLTFGGGT
KVEIK,
and
DIQMTQSPSSLSASVGDRVTITCRASQSISSYLNWYQQKPGKAPKLLIYA
ASSLQSGVPSRFSGSGSGTDFTLTISSLQPEDFATYYCQQSYSTPLTFGG
GTKVEIK.

[0172] In some embodiments, the ABP comprises the VH sequence and VL sequence from the scFv designated G8(2C10), G8(1A03), G8(1A04), G8(1A06), G8(1B03), G8(1C11), G8(1D02), G8(1H08), G8(2B05), G8(2E06), G8(2E04), G8(4F05), G8(5C03), G8(5F02), G8(5G08), G8(1C01), or G8(2C11).

[0173] In some embodiments, the multispecific ABP binds to any one or more of amino acid positions 1-6 of the restricted peptide AIFPGAVPAA. In some embodiments, the multispecific ABP binds to any one or more of amino acid positions 1-5 of the restricted peptide AIFPGAVPAA. In some embodiments, the multispecific ABP binds to one or both of amino acid positions 4 and 5 of the restricted peptide AIFPGAVPAA. In some embodiments, the multispecific ABP binds to amino acid position 6 of the restricted peptide AIFPGAVPAA.

[0174] In some embodiments, the multispecific ABP binds to any one or more of amino acid positions 45-60 of HLA subtype A*02:01. In some embodiments, the multispecific ABP binds to any one or more of amino acid positions 45-60, 66, 67, and 73 of the α1 helix of HLA subtype A*02:01. In some embodiments, the multispecific ABP binds to any one or more of amino acid positions 46, 49, 55, 61, 74, 76, 77, 78, 81 and 84 of the α1 helix of HLA subtype A*02:01. In some embodiments, the multispecific ABP binds to any one or more of amino acid positions 46, 49, 55, 66, 67, and 73 of the α1 helix of HLA subtype A*02:01. In some embodiments, the multispecific ABP binds to any one or more of amino acid positions 138, 145, 147, 152-156, 164, 167 of the α2 helix of HLA subtype A*02:01. In some embodiments, the multispecific ABP binds to any one or more of amino acid positions 56, 59, 60, 63, 64, 66, 67, 70, 73, 74, 132, 150-153, 155, 156, 158-160, 162-164, 166-168, 170, and 171 of HLA subtype A*02:01.

[0175] In some embodiments, the multispecific ABP comprises a VH region comprising a paratope comprising at least one, two, three, or four of residues Tyr32, Gly99, Asp100, and Tyr100A of the VH region shown in the sequence QVQLVQSGAEVKKPGASVKVSCKASGGTLSSYPINWVRQAPGQGLEWMGWISTYS GHADYAQKLQGRVTMTRDTSTSTVYMELSSLRSEDTAVYYCARSYDYGDYLNFDY WGQGTLVTVSS, as numbered by the Kabat numbering system.

[0176] In some embodiments, the multispecific ABP comprises a VH region comprising a paratope comprising at least 1, 2, 3, 4, 5, 6, 7, 8, 9, 10, 11, 12, 13, 14, 15, 16, 17, 18, 19, 20, 21, or 22 of residues Thr28, Leu 29, Ser 30, Ser 31, Tyr 32, Pro 33, Trp 47, Trp 50, Ser 52, Tyr 53, Ser 54, His 56, Asp 58, Tyr 59, Gln 61, Gln 64, Asp 97, Tyr 98, Gly 99, Asp100, Tyr100A, Leu100B, and Asn100C of the VH region shown in the sequence QVQLVQSGAEVKKPGASVKVSCKASGGTLSSYPINWVRQAPGQGLEWMGWISTYS GHADYAQKLQGRVTMTRDTSTSTVYMELSSLRSEDTAVYYCARSYDYGDYLNFDY WGQGTLVTVSS, as numbered by the Kabat numbering system.

[0177] In some embodiments, the paratope comprises at least 1, 2, 3, 4, 5, 6, or 7 of residues Ser 30, Ser 31, Tyr 32, Tyr 98, Gly 99, Asp 100, and Tyr 100A of the VH region, as numbered by the Kabat numbering system.

[0178] In some embodiments, the multispecific ABP comprises a VL region comprising a paratope comprising at least one, two, or three of residues Tyr32, Ser 91, and Tyr 92 of the VL region shown in the sequence DIQMTQSPSSLSASVGDRVTITCQASQDISNYLNWYQQKPGKAPKLLIYAASSLQSGV PSRFSGSGSGTDFTLTISSLQPEDFATYYCQQSYSIPPTFGGGTKVDIK, as numbered by the Kabat numbering system.

[0179] In some embodiments, the multispecific ABP comprises a VL region comprising a paratope comprising at least 1, 2, 3, 4, 5, 6, 7, 8, 9, 10, 11, 12, or 13 of residues Asp1, Ser30, Asn31, Tyr32, Tyr49, Ala50, Ser53, Ser67, Ser91, Tyr92, Ser93, Ile94, and Pro95 of the VL region shown in the sequence DIQMTQSPSSLSASVGDRVTITCQASQDISNYLNWYQQKPGKAPKLLIYAASSLQSGV PSRFSGSGSGTDFTLTISSLQPEDFATYYCQQSYSIPPTFGGGTKVDIK, as numbered by the Kabat numbering system.

[0180] In some embodiments, the paratope comprises at least 1, 2, 3, 4, 5, or 6 of residues Asp1, Asn31, Tyr32, Ser91, Tyr92, and Ile94 of the VL region, as numbered by the Kabat numbering system.

[0181] In some embodiments of the multispecific ABP, the HLA Class I molecule is HLA subtype A*01:01 and the HLA-restricted peptide comprises the sequence ASSLPTTMNY.

[0182] In some embodiments, the HLA Class I molecule is HLA subtype A*01:01 and the HLA-restricted peptide consists of the sequence ASSLPTTMNY.

[0183] In some embodiments, the ABP comprises a CDR-H3 comprising a sequence selected from: CARDQDTIFGVVITWFDPW, CARDKVYGDGFDPW, CAREDDSMDVW, CARDSSGLDPW, CARGVGNLDYW, CARDAHQYYDFWSGYYSGTYYYGMDVW, CAREQWPSYWYFDLW, CARDRGYSYGYFDYW, CARGSGDPNYYYYYGLDVW, CARDTGDHFDYW, CARAENGMDVW, CARDPGGYMDVW, CARDGDAFDIW, CARDMGDAFDIW, CAREEDGMDVW, CARDTGDHFDYW, CARGEYSSGFFFVGWFDLW, and CARETGDDAFDIW.

[0184] In some embodiments, the ABP comprises a CDR-L3 comprising a sequence selected from: CQQYFTTPYTF, CQQAEAFPYTF, CQQSYSTPITF, CQQSYIIPYTF, CHQTYSTPLTF, CQQAYSFPWTF, CQQGYSTPLTF, CQQANSFPRTF, CQQANSLPYTF, CQQSYSTPFTF, CQQSYSTPFTF, CQQSYGVPTF, CQQSYSTPLTF, CQQSYSTPLTF, CQQYYSYPWTF, CQQSYSTPFTF, CMQTLKTPLSF, and CQQSYSTPLTF.

[0185] In some embodiments, the ABP comprises the CDR-H3 and the CDR-L3 from the scFv designated G10(1A07), G10(1B07), G10(1E12), G10(1F06), G10(1H01), G10(1H08), G10(2C04), G10(2G11), G10(3E04), G10(4A02), G10(4C05), G10(4D04), G10(4D10), G10(4E07), G10(4E12), G10(4G06), G10(5A08), or G10(5C08).

[0186] In some embodiments, the ABP comprises all three heavy chain CDRs and all three light chain CDRs from the scFv designated G10(1A07), G10(1B07), G10(1E12), G10(1F06), G10(1H01), G10(1H08), G10(2C04), G10(2G11), G10(3E04), G10(4A02), G10(4C05), G10(4D04), G10(4D10), G10(4E07), G10(4E12), G10(4G06), G10(5A08), or G10(5C08).

[0187] In some embodiments, the ABP comprises a VH sequence selected from:

EVQLLESGGGLVKPGGSLRLSCAASGFTFSSYWMSWVRQAPGKGLEWVSG
ISARSGRTYYADSVKGRFTISRDDSKNTLYLQMNSLKTEDTAVYYCARDQ
DTIFGVVITWFDPWGQGTLVTVSS,
QVQLVQSGAEVKKPGASVKVSCKASGYTFTSYYMHWVRQAPGQGLEWMGI
IHPGGGTTSYAQKFQGRVTMTRDTSTSTVYMELSSLRSEDTAVYYCARDK
VYGDGFDPWGQGTLVTVSS,
QVQLVQSGAEVKKPGASVKVSCKASGYIFTGYYMHWVRQAPGQGLEWMGM
IGPSDGSTSYAQKFQGRVTMTRDTSTSTVYMELSSLRSEDTAVYYCARED
DSMDVWGKGTTVTVSS,
QVQLVQSGAEVKKPGASVKVSCKASGYTFIGYYMHWVRQAPGQGLEWMGM
IGPSDGSTSYAQKFQGRVTMTRDTSTSTVYMELSSLRSEDTAVYYCARDS
SGLDPWGQGTLVTVSS,
QVQLVQSGAEVKKPGASVKVSCKASGYTFTGYYMHWVRQAPGQGLEWMGM
IGPSDGSTSYAQKFQGRVTMTRDTSTSTVYMELSSLRSEDTAVYYCARGV
GNLDYWGQGTLVTVSS,
QVQLVQSGAEVKKPGASVKVSCKASGVTFSTSAISWVRQAPGQGLEWMGW
ISPYNGNTDYAQMLQGRVTMTRDTSTSTVYMELSSLRSEDTAVYYCARDA
HQYYDFWSGYYSGTYYYGMDVWGQGTTVTVSS,
QVQLVQSGAEVKKPGASVKVSCKASGGTFSNSIINWVRQAPGQGLEWMGW
MNPNSGNTNYAQKFQGRVTMTRDTSTSTVYMELSSLRSEDTAVYYCAREQ
WPSYWYFDLWGRGTLVTVSS,
QVQLVQSGAEVKKPGASVKVSCKASGGTFSTHDINWVRQAPGQGLEWMGV
INPSGGSAIYAQKFQGRVTMTRDTSTSTVYMELSSLRSEDTAVYYCARDR
GYSYGYFDYWGQGTLVTVSS,
QVQLVQSGAEVKKPGASVKVSCKASGNTFIGYYVHWVRQAPGQGLEWVGI
INPNGGSISYAQKFQGRVTMTRDTSTSTVYMELSSLRSEDTAVYYCARGS
GDPNYYYYYGLDVWGQGTTVTVSS,
QVQLVQSGAEVKKPGASVKVSCKASGYTLSYYYMHWVRQAPGQGLEWMGM
IGPSDGSTSYAQRFQGRVTMTRDTSTGTVYMELSSLRSEDTAVYYCARDT
GDHFDYWGQGTLVTVSS,
QVQLVQSGAEVKKPGASVKVSCKASGYTFTGYYMHWVRQAPGQGLEWMGI
IGPSDGSTTYAQKFQGRVTMTRDTSTSTVYMELSSLRSEDTAVYYCARAE
NGMDVWGQGTTVTVSS,
QVQLVQSGAEVKKPGASVKVSCKASGYTFTGYYVHWVRQAPGQGLEWMGI
IAPSDGSTNYAQKFQGRVTMTRDTSTSTVYMELSSLRSEDTAVYYCARDP
GGYMDVWGKGTTVTVSS,
QVQLVQSGAEVKKPGASVKVSCKASGYTFTGYYLHWVRQAPGQGLEWMGM
IGPSDGSTSYAQKFQGRVTMTRDTSTSTVYMELSSLRSEDTAVYYCARDG
DAFDIWGQGTMVTVSS,
QVQLVQSGAEVKKPGSSVKVSCKASGYTFTGYYMHWVRQAPGQGLEWMGR
ISPSDGSTTYAPKFQGRVTITADESTSTAYMELSSLRSEDTAVYYCARDM
GDAFDIWGQGTTVTVSS,
QVQLVQSGAEVKKPGASVKVSCKASGYTFTGYYMHWVRQAPGQGLEWMGM
IGPSDGSTSYAQRFQGRVTMTRDTSTSTVYMELSSLRSEDTAVYYCAREE
DGMDVWGQGTTVTVSS,
QVQLVQSGAEVKKPGASVKVSCKASGYTLSYYYMHWVRQAPGQGLEWMGM
IGPSDGSTSYAQRFQGRVTMTRDTSTGTVYMELSSLRSEDTAVYYCARDT
GDHFDYWGQGTLVTVSS,
QVQLVQSGAEVKKPGSSVKVSCKASGGTFNNFAISWVRQAPGQGLEWMGG
IIPIFDATNYAQKFQGRVTFTADESTSTAYMELSSLRSEDTAVYYCARGE
YSSGFFFVGWFDLWGRGTQVTVSS,
and
QVQLVQSGAEVKKPGASVKVSCKASGYNFTGYYMHWVRQAPGQGLEWMGI
IAPSDGSTNYAQKFQGRVTMTRDTSTSTVYMELSSLRSEDTAVYYCARET
GDDAFDIWGQGTMVTVSS.

[0188] In some embodiments, the ABP comprises a VL sequence selected:

DIQMTQSPSSLSASVGDRVTITCRASQGISNYLAWYQQKPGKAPKLLIYA
ASSLQGGVPSRFSGSGSGTDFTLTISSLQPEDFATYYCQQYFTTPYTFGQ
GTKLEIK,
DIQMTQSPSSLSASVGDRVTITCRASQSISRWLAWYQQKPGKAPKLLIFD
ASRLQSGVPSRFSGSGSGTDFTLTISSLQPEDFATYYCQQAEAFPYTFGQ
GTKVEIK,
DIQMTQSPSSLSASVGDRVTITCRASQSISSYLNWYQQKPGKAPKLLIYA
ASSLQSGVPSRFSGSGSGTDFTLTISSLQPEDFATYYCQQSYSTPITFGQ
GTRLEIK,
DIQMTQSPSSLSASVGDRVTITCRASQSISNYLNWYQQKPGKAPKWYKAS
SLESGVPSRFSGSGSGTDFTLTISSLQPEDFATYYCQQSYIIPYTFGQGT
KLEIK,
DIQMTQSPSSLSASVGDRVTITCRASQSISNYLNWYQQKPGKAPKLLIYA
ASSLQSGVPSRFSGSGSGTDFTLTISSLQPEDFATYYCHQTYSTPLTFGQ
GTKVEIK,
DIQMTQSPSSLSASVGDRVTITCRASQGISNYLAWYQQKPGKAPKWYSAS
NLQSGVPSRFSGSGSGTDFTLTISSLQPEDFATYYCQQAYSFPWTFGQGT
KVEIK,
DIQMTQSPSSLSASVGDRVTITCRASQNISSYLNWYQQKPGKAPKLLIYA
ASSLQSGVPSRFSGSGSGTDFTLTISSLQPEDFATYYCQQGYSTPLTFGQ
GTRLEIK,
DIQMTQSPSSLSASVGDRVTITCRASQDISRYLAWYQQKPGKAPKLLIYD
ASNLETGVPSRFSGSGSGTDFTLTISSLQPEDFATYYCQQANSFPRTFGQ
GTKVEIK,
DIQMTQSPSSLSASVGDRVTITCQASQDISNYLNWYQQKPGKAPKLLIYA
ASNLQSGVPSRFSGSGSGTDFTLTISSLQPEDFATYYCQQANSLPYTFGQ
GTKVEIK,
DIQMTQSPSSLSASVGDRVTITCRASQSISSYLNWYQQKPGKAPKLLIYA
ASTLQNGVPSRFSGSGSGTDFTLTISSLQPEDFATYYCQQSYSTPFTFGP
GTKVDIK,
DIQMTQSPSSLSASVGDRVTITCRASQRISSYLNWYQQKPGKAPKWYSAS
TLQSGVPSRFSGSGSGTDFTLTISSLQPEDFATYYCQQSYSTPFTFGPGT
KVDIK,
DIQMTQSPSSLSASVGDRVTITCRASQSISSYLAWYQQKPGKAPKLLIYD
ASKLETGVPSRFSGSGSGTDFTLTISSLQPEDFATYYCQQSYGVPTFGQG
TKLEIK,
DIQMTQSPSSLSASVGDRVTITCRASQGISSWLAWYQQKPGKAPKWYDAS
NLETGVPSRFSGSGSGTDFTLTISSLQPEDFATYYCQQSYSTPLTFGGGT
KVEIK,
DIQMTQSPSSLSASVGDRVTITCRASQSISSYLNWYQQKPGKAPKLLIYA
ASSLQSGVPSRFSGSGSGTDFTLTISSLQPEDFATYYCQQSYSTPLTFGG
GTKVEIK,
DIQMTQSPSSLSASVGDRVTITCRASQGISTYLAWYQQKPGKAPKWYDAS
SLQSGVPSRFSGSGSGTDFTLTISSLQPEDFATYYCQQYYSYPWTFGQGT
RLEIK,
DIQMTQSPSSLSASVGDRVTITCRASQSISSYLNWYQQKPGKAPKLLIYA
ASTLQNGVPSRFSGSGSGTDFTLTISSLQPEDFATYYCQQSYSTPFTFGP
GTKVDIK,
DIVMTQSPLSLPVTPGEPASISCRSSQSLLHSNGYNYLDWYLQKPGQSPQ
LLIYLGSNRASGVPDRFSGSGSGTDFTLKISRVEAEDVGVYYCMQTLKTP
LSFGGGTKVEIK,
and
DIQMTQSPSSLSASVGDRVTITCRASQSISSYLNWYQQKPGKAPKLLIYA
ASSLQSGVPSRFSGSGSGTDFTLTISSLQPEDFATYYCQQSYSTPLTFGG
GTKVEIK.

[0189] In some embodiments, the ABP comprises the VH sequence and VL sequence from the scFv designated G10(1A07), G10(1B07), G10(1E12), G10(1F06), G10(1H01), G10(1H08), G10(2C04), G10(2G11), G10(3E04), G10(4A02), G10(4C05), G10(4D04), G10(4D10), G10(4E07), G10(4E12), G10(4G06), G10(5A08), or G10(5C08).

[0190] In some embodiments, the ABP binds to any one or more of amino acid positions 4, 6, and 7 of the restricted peptide ASSLPTTMNY.

[0191] In some embodiments, the ABP binds to any one or more of amino acid positions 49-56 of HLA subtype A*01:01.

[0192] In some embodiments, the HLA Class I molecule is HLA subtype A*02:01 and the HLA-restricted peptide comprises the sequence LLASSILCA.

[0193] In some embodiments, the HLA Class I molecule is HLA subtype A*02:01 and the HLA-restricted peptide consists of the sequence LLASSILCA.

[0194] In some embodiments, the ABP comprises a CDR-H3 comprising a sequence selected from: CARDGYDFWSGYTSDDYW, CASDYGDYR, CARDLMTTVVTPGDYGMDVW, CARQDGGAFAFDIW, CARELGYYYGMDVW, CARALIFGVPLLPYGMDVW, CAKDLATVGEPYYYYGMDVW, and CARLWFGELHYYYYYGMDVW.

[0195] In some embodiments, the ABP comprises a CDR-L3 comprising a sequence selected from: CHHYGRSHTF, CQQANAFPPTF, CQQYYSIPLTF, CQQSYSTPPTF, CQQSYSFPYTF, CMQALQTPLTF, CQQGNTFPLTF, and CMQGSHWPPSF.

[0196] In some embodiments, the ABP comprises the CDR-H3 and the CDR-L3 from the scFv designated G7(2E09), G7(1C06), G7(1G10), G7(1B04), C, G7(1A03), G7(1F08), or G7(3A09).

[0197] In some embodiments, the ABP comprises all three heavy chain CDRs and all three light chain CDRs from the scFv designated G7(2E09), G7(1C06), G7(1G10), G7(1B04), G7(2C02), G7(1A03), G7(1F08), or G7(3A09).

[0198] In some embodiments, the ABP comprises a VH sequence selected from

QVQLVQSGAEVKKPGASVKVSCKASGGTFSNYGISWVRQAPGQGLEWMGI
INPGGSTSYAQKFQGRVTMTRDTSTSTVYMELSSLRSEDTAVYYCARDGY
DFWSGYTSDDYWGQGTLVTVSS,
EVQLLESGGGLVQPGGSLRLSCAASGFTFSSYAMHWVRQAPGKGLEWVSG
ISGSGGSTYYADSVKGRFTISRDNSKNTLYLQMNSLRAEDTAVYYCASDY
GDYRGQGTLVTVSS,
QVQLVQSGAEVKKPGASVKVSCKASGYTFSNYYIHWVRQAPGQGLEWMGW
LNPNSGNTGYAQRFQGRVTMTRDTSTSTVYMELSSLRSEDTAVYYCARDL
MTTVVTPGDYGMDVWGQGTTVTVSS,
QVQLVQSGAEVKKPGASMKVSCKASGYTFTTDGISWVRQAPGQGLEWMGR
IYPHSGYTEYAKKFKGRVTMTRDTSTSTVYMELSSLRSEDTAVYYCARQD
GGAFAFDIWGQGTMVTVSS,
QVQLVQSGAEVKKPGASVKVSCKASGYTFTSQYMHWVRQAPGQGLEWMGW
ISPNNGDTNYAQKFQGRVTMTRDTSTSTVYMELSSLRSEDTAVYYCAREL
GYYYGMDVWGQGTTVTVSS,
QVQLVQSGAEVKKPGSSVKVSCKASRYTFTSYDINWVRQAPGQGLEWMGR
IIPMLNIANYAPKFQGRVTITADESTSTAYMELSSLRSEDTAVYYCARAL
IFGVPLLPYGMDVWGQGTTVTVSS,
EVQLLQSGGGLVQPGGSLRLSCAASGFTFSSSWMHWVRQAPGKGLEWVSF
ISTSSGYIYYADSVKGRFTISRDNSKNTLYLQMNSLRAEDTAVYYCAKDL
ATVGEPYYYYGMDVWGQGTTVTVSS,
and
QVQLVQSGAEVKKPGSSVKVSCKASGDTFNTYALSWVRQAPGQGLEWMGW
MNPNSGNAGYAQKFQGRVTITADESTSTAYMELSSLRSEDTAVYYCARLW
FGELHYYYYYGMDVWGQGTMVTVSS.

[0199] In some embodiments, the ABP comprises a VL sequence selected from

EIVMTQSPATLSVSPGERATLSCRASQSVSSSNLAWYQQKPGQAPRLLIY
GASTRATGIPARFSGSGSGTEFTLTISSLQSEDFAVYYCHHYGRSHTFGQ
GTKVEIK,
DIQMTQSPSSLSASVGDRVTITCRASQDIRNDLGWYQQKPGKAPKLLIYA
ASSLQSGVPSRFSGSGSGTDFTLTISSLQPEDFATYYCQQANAFPPTFGQ
GTKVEIK,
DIVMTQSPDSLAVSLGERATINCKSSQSVFYSSNNKNQLAWYQQKPGQPP
KWYWASTRESGVPDRFSGSGSGTDFTLTISSLQAEDVAVYYCQQYYSIPL
TFGQGTKLEIK,
DIQMTQSPSSLSASVGDRVTITCQASQDIFKYLNWYQQKPGKAPKLLIYA
ASTLQSGVPSRFSGSGSGTDFTLTISSLQPEDFATYYCQQSYSTPPTFGQ
GTRLEIK,
DIQMTQSPSSLSASVGDRVTITCRASQSISTWLAWYQQKPGKAPKLLIYY
ASSLQSGVPSRFSGSGSGTDFTLTISSLQPEDFATYYCQQSYSFPYTFGQ
GTKVEIK,
DIVMTQSPLSLPVTPGEPASISCSSSQSLLHSNGYNYLDWYLQKPGQSPQ
LLIYLGSNRASGVPDRFSGSGSGTDFTLKISRVEAEDVGVYYCMQALQTP
LTFGGGTKVEIK,
DIQMTQSPSSLSASVGDRVTITCQASQDISNYLNWYQQKPGKAPKWYSAS
NLRSGVPSRFSGSGSGTDFTLTISSLQPEDFATYYCQQGNTFPLTFGQGT
KVEIK,
and
DIVMTQSPLSLPVTPGEPASISCRSSQSLLHSNGYNYLDWYLQKPGQSPQ
LLIYLGSNRASGVPDRFSGSGSGTDFTLKISRVEAEDVGVYYCMQGSHWP
PSFGQGTRLEIK.

[0200] In some embodiments, the ABP comprises the VH sequence and VL sequence from the scFv designated G7(2E09), G7(1C06), G7(1G10), G7(1B04), G7(2C02), G7(1A03), G7(1F08), or G7(3A09).

[0201] In some embodiments, the multispecific ABP binds to the HLA-PEPTIDE target via any one or more of residues 1-5 of the restricted peptide LLASSILCA.

[0202] In some embodiments, the antigen binding protein is linked to a scaffold, optionally wherein the scaffold comprises serum albumin or Fc, optionally wherein Fc is human Fc and is an IgG (IgG1, IgG2, IgG3, IgG4), an IgA (IgA1, IgA2), an IgD, an IgE, or an IgM isotype Fc.

[0203] In some embodiments, the antigen binding protein is linked to a scaffold via a linker, optionally wherein the linker is a peptide linker, optionally wherein the peptide linker is a hinge region of a human antibody.

[0204] In some embodiments, the antigen binding protein comprises an Fv fragment, a Fab fragment, a F(ab′)₂ fragment, a Fab′ fragment, an scFv fragment, an scFv-Fc fragment, and/or a single-domain antibody or antigen binding fragment thereof.

[0205] In some embodiments, the antigen binding protein comprises an scFv fragment.

[0206] In some embodiments, the antigen binding protein comprises one or more antibody complementarity determining regions (CDRs), optionally six antibody CDRs.

[0207] In some embodiments, the ABP comprises an antibody.

[0208] In some embodiments, the antibody is a monoclonal antibody.

[0209] In some embodiments, the antibody is a humanized, human, or chimeric antibody.

[0210] In some embodiments, the ABP is bispecific.

[0211] In some embodiments, the antigen binding protein comprises a heavy chain constant region of a class selected from IgG, IgA, IgD, IgE, and IgM.

[0212] In some embodiments, the ABP comprises a heavy chain constant region of the class human IgG and a subclass selected from IgG1, IgG4, IgG2, and IgG3.

[0213] In some embodiments, the ABP comprises a modification that extends half-life.

[0214] In some embodiments, the ABP comprises a modified Fc, optionally wherein the modified Fc comprises one or more mutations that extend half-life, optionally wherein the one or more mutations that extend half-life is YTE.

[0215] In some embodiments, the antigen binding protein is a portion of a chimeric antigen receptor (CAR) comprising: an extracellular portion comprising the antigen binding protein; and an intracellular signaling domain.

[0216] In some embodiments, the extracellular portion comprises an scFv and the intracellular signaling domain comprises an ITAM.

[0217] In some embodiments, the intracellular signaling domain comprises a signaling domain of a zeta chain of a CD3-zeta (CD3) chain.

[0218] In some embodiments, the ABP comprises a transmembrane domain linking the extracellular domain and the intracellular signaling domain.

[0219] In some embodiments, the transmembrane domain comprises a transmembrane portion of CD28.

[0220] In some embodiments, the ABP comprises an intracellular signaling domain of a T cell costimulatory molecule.

[0221] In some embodiments, the T cell costimulatory molecule is CD28, 4-1BB, OX-40, ICOS, or any combination thereof.

[0222] In some embodiments, the antigen binding protein binds to the HLA-PEPTIDE target through a contact point with the HLA Class I molecule and through a contact point with the HLA-restricted peptide of the HLA-PEPTIDE target.

[0223] In some embodiments, the contact points are determined via positional scanning, hydrogen-deuterium exchange, or protein crystallography.

[0224] In some embodiments, the ABP is for use as a medicament.

[0225] In some embodiments, the ABP is for use in treatment of cancer, optionally wherein the cancer expresses or is predicted to express the HLA-PEPTIDE target.

[0226] In some embodiments, the ABP is for use in treatment of cancer, wherein the cancer is selected from a solid tumor and a hematological tumor.

[0227] Also provided herein is an ABP which is a conservatively modified variant of the isolated multispecific ABP described herein.

[0228] Also provided herein is an antigen binding protein (ABP) that competes for binding with the isolated multispecific ABP described herein.

[0229] Also provided herein is an antigen binding protein (ABP) that binds the same HLA-PEPTIDE epitope bound by the isolated multispecific ABP described herein.

[0230] Also provided herein is an engineered cell expressing a receptor comprising the isolated multispecific ABP described herein.

[0231] In some embodiments, the engineered cell is a T cell, optionally a cytotoxic T cell (CTL).

[0232] In some embodiments, the antigen binding protein is expressed from a heterologous promoter.

[0233] Also provided herein is an isolated polynucleotide or set of polynucleotides encoding the isolated multispecific ABP described herein or an antigen-binding portion thereof.

[0234] Also provided herein is a vector or set of vectors comprising the polynucleotide or set of polynucleotides described herein.

[0235] Also provided herein is a host cell comprising the polynucleotide or set of polynucleotides described herein or the vector or set of vectors described herein, optionally wherein the host cell is CHO or HEK293, or optionally wherein the host cell is a T cell.

[0236] Also provided herein is a method of producing an antigen binding protein comprising expressing the antigen binding protein with the host cell and isolating the expressed antigen binding protein.

[0237] Also provided herein is a pharmaceutical composition comprising the isolated multispecific ABP described herein and a pharmaceutically acceptable excipient.

[0238] Also provided herein is a method of treating cancer in a subject, comprising administering to the subject an effective amount of the isolated multispecific ABP described herein or a pharmaceutical composition described herein, optionally wherein the cancer is selected from a solid tumor and a hematological tumor.

[0239] In some embodiments, the cancer expresses or is predicted to express the HLA-PEPTIDE target.

[0240] Also provided herein is a kit comprising the isolated multispecific ABP described herein or a pharmaceutical composition described herein and instructions for use.

[0241] Also provided herein is a virus comprising the isolated polynucleotide or set of polynucleotides described herein.

[0242] In some embodiments, the virus is a filamentous phage.

### BRIEF DESCRIPTION OF THE SEVERAL VIEWS OF THE DRAWINGS

[0243] These and other features, aspects, and advantages of the present invention will become better understood with regard to the following description, and accompanying drawings, where:

[0244] FIG. 1 shows the general structure of a Human Leukocyte Antigen (HLA) Class I molecule. By User atropos235 on en.wikipedia—Own work, CC BY 2.5, https://commons.wikimedia.org/w/index.php?curid=1805424

[0245] FIG. 2 shows the target and minipool negative control design for HLA-PEPTIDE target “G5”.

[0246] FIG. 3 shows the target and minipool negative control design for HLA-PEPTIDE targets “G8” and “G10”.

[0247] FIGS. 4A and 4B show HLA stability results for the G5 counterscreen “minipool” and G5 target.

[0248] FIGS. 5A-5E show HLA stability results for the G5 “complete” pool counterscreen peptides.

[0249] FIGS. 6A and 6B show HLA stability results for counterscreen peptides and G8 target.

[0250] FIGS. 7A and 7B show HLA stability results for the G10 counterscreen “minipool” and G10 target.

[0251] FIGS. 8A-8D show HLA stability results for the additional G8 and G10 “complete” pool counterscreen peptides.

[0252] FIGS. 9A-9C show phage supernatant ELISA results, indicating progressive enrichment of G5-, G8 and G10 binding phage with successive panning rounds.

[0253] FIG. 10 shows a flow chart describing the antibody selection process, including criteria and intended application for the scFv, Fab, and IgG formats.

[0254] FIGS. 11A, 11B, and 11C depict bio-layer interferometry (BLI) results for Fab clone G5(7A05) to HLA-PEPTIDE target B*35:01-EVDPIGHVY (11A), Fab clones G8(2C10) and G8(1C11) to HLA-PEPTIDE target A*02:01-AIFPGAVPAA (11B, 2C10 on left and 1C11 on right), and Fab clone G10(1B07) to HLA-PEPTIDE target A*01:01-ASSLPTTMNY (11C).

[0255] FIG. 12 shows a general experimental design for the positional scanning experiments.

[0256] FIG. 13A shows stability results for the G5 positional variant-HLAs.

[0257] FIG. 13B shows binding affinity of Fab clone G5(7A05) to the G5 positional variant-HLAs.

[0258] FIG. 14A shows stability results for the G8 positional variant-HLAs.

[0259] FIG. 14B shows binding affinity of Fab clone G8(2C10) to the G8 positional variant-HLAs.

[0260] FIG. 15A shows stability results for the G10 positional variant-HLAs.

[0261] FIG. 15B shows binding affinity of Fab clone G10(1B07) to the G10 positional variant-HLAs.

[0262] FIGS. 16A, 16B, and 16C show representative examples of antibody binding to either G5-, G8- or G10-presenting K562 cells, as detected by flow cytometry.

[0263] FIGS. 17A-17C show histogram plots of K562 cell binding to generated target-specific antibodies.

[0264] FIGS. 18A-18C show histogram plots of cell binding assays using tumor cell lines which express HLA subtypes and target genes of selected HLA-PEPTIDE targets.

[0265] FIG. 19A shows an exemplary heatmap for scFv G8(1H08), visualized across the HLA portion of HLA-PEPTIDE target G8 in its entirety using a consolidated perturbation view. FIG. 19B shows an example of HDX data from scFv G8(1H08) plotted on a crystal structure PDB5bs0.

[0266] FIG. 20A shows heat maps across the HLA α1 helix for all ABPs tested for HLA-PEPTIDE target G8 (HLA-A*02:01_AIFPGAVPAA). FIG. 20B shows heat maps across the HLA α2 helix for all ABPs tested for HLA-PEPTIDE target G8 (HLA-A*02:01_AIFPGAVPAA. FIG. 20C shows resulting heat maps across the restricted peptide AIFPGAVPAA for all ABPs tested.

[0267] FIG. 21A shows an exemplary heatmap for scFv G10(2G11), visualized across the HLA portion of HLA-PEPTIDE target G10 in its entirety using a consolidated perturbation view.

[0268] FIG. 21B shows an example of HDX data from scFv G10(2G11) plotted on a crystal structure PDB5bs0.

[0269] FIG. 22A shows resulting heat maps across the HLA α1 helix for all ABPs tested for HLA-PEPTIDE target G10 (HLA-A*01:01_ASSLPTTMNY). FIG. 22B shows resulting heat maps across the HLA α2 helix for all ABPs tested for HLA-PEPTIDE target G10 (HLA-A*01:01_ASSLPTTMNY). FIG. 22C shows resulting heat maps across the restricted peptide ASSLPTTMNY for all ABPs tested.

[0270] FIG. 23 depicts exemplary spectral data for peptide EVDPIGHVY. The figure contains the peptide fragmentation information as well as information related to the patient sample, including HLA types.

[0271] FIG. 24 depicts exemplary spectral data for peptide AIFPGAVPAA. The figure contains the peptide fragmentation information as well as information related to the patient sample, including HLA types.

[0272] FIG. 25 depicts exemplary spectral data for peptide ASSLPTTMNY. The figure contains the peptide fragmentation information as well as information related to the patient sample, including HLA types.

[0273] FIGS. 26A and 26B depict size exclusion chromatography fractions (A) and SDS-PAGE analysis of the chromatography fractions under reducing conditions (B).

[0274] FIG. 27 depicts photomicrographs of an exemplary crystal of a complex comprising Fab clone G8(1C11) and HLA-PEPTIDE target A*02:01_AIFPGAVPAA (“G8”).

[0275] FIG. 28 depicts the overall structure of a complex formed by binding of Fab clone G8(1C11) to HLA-PEPTIDE target A*02:01_AIFPGAVPAA (“G8”).

[0276] FIG. 29 depicts a refinement electron density region of the crystal structure of Fab clone G8(1C11) complexed with HLA-PEPTIDE target A*02:01_AIFPGAVPAA (“G8”), the region depicted corresponding to the restricted peptide AIFPGAVPAA.

[0277] FIG. 30 depicts a LigPlot of the interactions between the HLA and restricted peptide. The crystal structure corresponds to Fab clone G8(1C11) complexed with HLA-PEPTIDE target A*02:01_AIFPGAVPAA (“G8”).

[0278] FIG. 31 depicts a plot of interacting residues between the Fab VH and VL chains and the restricted peptide. The crystal structure corresponds to Fab clone G8(1C11) complexed with HLA-PEPTIDE target A*02:01_AIFPGAVPAA (“G8”).

[0279] FIG. 32 depicts a LigPlot of the interactions between the restricted peptide and Fab chains. The crystal structure corresponds to Fab clone G8(1C11) complexed with HLA-PEPTIDE target A*02:01_AIFPGAVPAA (“G8”).

[0280] FIG. 33 depicts a LigPlot of the interactions between the Fab VH chain and the HLA. The crystal structure corresponds to Fab clone G8(1C11) complexed with HLA-PEPTIDE target A*02:01_AIFPGAVPAA (“G8”).

[0281] FIG. 34 depicts a LigPlot of the interactions between the Fab VL chain and the HLA. The crystal structure corresponds to Fab clone G8(1C11) complexed with HLA-PEPTIDE target A*02:01_AIFPGAVPAA (“G8”).

[0282] FIG. 35 depicts the interface summary of a Pisa analysis of interactions between HLA and restricted peptide. The crystal structure corresponds to Fab clone G8(1C11) complexed with HLA-PEPTIDE target A*02:01_AIFPGAVPAA (“G8”).

[0283] FIG. 36 depicts Pisa analysis of the interacting residues between the HLA and restricted peptide. The crystal structure corresponds to Fab clone G8(1C11) complexed with HLA-PEPTIDE target A*02:01_AIFPGAVPAA (“G8”).

[0284] FIG. 37 depicts Pisa analysis of the interacting residues between the Fab VH chain and the restricted peptide. The crystal structure corresponds to Fab clone G8(1C11) complexed with HLA-PEPTIDE target A*02:01_AIFPGAVPAA (“G8”).

[0285] FIG. 38 depicts Pisa analysis of the interacting residues between the Fab VL chain and the restricted peptide. The crystal structure corresponds to Fab clone G8(1C11) complexed with HLA-PEPTIDE target A*02:01_AIFPGAVPAA (“G8”).

[0286] FIG. 39 depicts the interface summary of a Pisa analysis of interactions between the Fab VH chain and HLA. The crystal structure corresponds to Fab clone G8(1C11) complexed with HLA-PEPTIDE target A*02:01_AIFPGAVPAA (“G8”).

[0287] FIG. 40 depicts Pisa analysis of the interacting residues between the Fab VH chain and HLA. The crystal structure corresponds to Fab clone G8(1C11) complexed with HLA-PEPTIDE target A*02:01_AIFPGAVPAA (“G8”).

[0288] FIG. 41 depicts the interface summary of a Pisa analysis of interactions between the Fab VL chain and HLA. The crystal structure corresponds to Fab clone G8(1C11) complexed with HLA-PEPTIDE target A*02:01_AIFPGAVPAA (“G8”).

[0289] FIG. 42 depicts Pisa analysis of the interacting residues between the Fab VL chain and HLA. The crystal structure corresponds to Fab clone G8(1C11) complexed with HLA-PEPTIDE target A*02:01_AIFPGAVPAA (“G8”).

[0290] FIG. 43A depicts an exemplary heatmap of the HLA portion of the G8 HLA-PEPTIDE complex when incubated with scFv clone G8(1C11), visualized in its entirety using a consolidated perturbation view.

[0291] FIG. 43B depicts an example of the HDX data from scFv G8(1C11) plotted on a crystal structure of Fab clone G8(1C11) complexed with HLA-PEPTIDE target A*02:01_AIFPGAVPAA (“G8”).

[0292] FIG. 44 depicts binding affinity of Fab clone G8(1C11) to the G8 positional variant-HLAs.

[0293] FIG. 45 shows histogram plots of K562 cell binding to G8(1C11), a target-specific antibody to HLA-PEPTIDE target A*02:01_AIFPGAVPAA (“G8”).

[0294] FIG. 46 shows spectra data for peptide EVDPIGHLY. The figure contains the peptide fragmentation information as well as information related to the patient sample, including HLA types.

[0295] FIG. 47 shows spectra data for peptide GVHGGILNK. The figure contains the peptide fragmentation information as well as information related to the patient sample, including HLA types.

[0296] FIG. 48 shows spectra data for peptide GVYDGEEHSV.

[0297] FIG. 49 shows spectra data for peptide NTDNNLAVY.

[0298] FIGS. 50-58 show spectra data for additional peptides disclosed in Table A.

[0299] FIG. 59 shows the design of target screen 1 for the G2 target HLA-A*01:01_NTDNNLAVY.

[0300] FIG. 60A shows the target and minipool negative control design for the G2 target.

[0301] FIG. 60B shows stability ELISA results for the G2 counterscreen “minipool” and G2 targets.

[0302] FIG. 61 shows stability ELISA results for the additional G2 “complete” pool counterscreen peptides.

[0303] FIG. 62 shows the design of target screen 2 for the G7 target HLA-A*02:01 LLASSILCA.

[0304] FIG. 63 shows stability ELISA results for the additional G7 “complete pool” counterscreen peptides.

[0305] FIG. 64A shows the target and minipool negative control design for the G7 target.

[0306] FIG. 64B shows stability ELISA results for the G7 counterscreen “minipool” and G7 targets.

[0307] FIGS. 65A and 65B show phage panning results for the G2 and G7 targets, respectively.

[0308] FIGS. 66A and 66B show biolayer interferometry (BLI) results for G2 target Fab clone G2(1H11) and G7 target G7(2E09), respectively.

[0309] FIG. 67 shows a map of the amino acid substitutions for the positional scanning experiment described herein.

[0310] FIG. 68A shows a stability heat map for the G2 positional variant-HLAs.

[0311] FIG. 68B shows an affinity heat map for Fab clone G2(1H11).

[0312] FIG. 69A shows a stability heat map for the G7 positional variants.

[0313] FIG. 69B shows an affinity heat map for Fab clone G7(2E09).

[0314] FIG. 70 shows cell binding results for Fab clones G2(1H11) and G7(2E09) to HLA-transduced K562 cells pulsed with target or negative control peptides.

[0315] FIG. 71 shows cell binding results for Fab clones G2(1H11) and G7(2E09) to HLA-transduced K562 cells pulsed with target or negative control peptides.

[0316] FIG. 72 shows an example of hydrogen-deuterium exchange (HDX) data plotted on a crystal structure PDB 5bs0.

[0317] FIG. 73 shows an exemplary HDX heatmap for scFv clone G2(1G07) visualized in its entirety using a consolidated perturbation view.

[0318] FIG. 74 shows HDX heat maps across the HLA α1 and α2 helices for the tested G2 scFv and Fab clones.

[0319] FIG. 75 shows an HDX heat map across the restricted peptide NTDNNLAVY for the tested G2 scFv and Fab clones.

[0320] FIG. 76 shows the architecture of bispecific antibodies that specifically bind a first target and a second target (e.g., HLA-PEPTIDE target and CD3).

[0321] FIGS. 77A, 77B, and 77C depict architectures and nomenclatures for exemplary HLA-PEPTIDE/CD3 bispecific antibodies described herein.

[0322] FIGS. 78A-D show BLI results for the different bispecific formats with the G2(1H11) clone as an ScFv or Fab against HLA-PEPTIDE target A*01:01-NTDNNLAVY.

[0323] FIGS. 79A-D show dynamic light scattering stability results for bispecific antibodies using G2(1H11) as the scFv or Fab and OKT3 as the CD3 antigen-binding domain.

[0324] FIGS. 80A-C depict K562 cell binding data for bispecific antibodies using G2(1H11) as the scFv or Fab and OKT3 as the CD3 antigen-binding domain.

[0325] FIGS. 81A-C depict Jurkat (CD3+/−) cell binding data for bispecific antibodies using G2(1H11) as the scFv or Fab and OKT3 as the CD3 antigen-binding domain.

[0326] FIGS. 82A and 82B depict comparative results from formats 1, 3, and 4, for the K562 cell binding assay (FIG. 82A) and Jurkat cell binding assay (FIG. 82B).

[0327] FIG. 83 depicts the experimental design and conditions of an in vivo experiments assessing the effect of an exemplary HLA-PEPTIDE/CD3 bispecific antibody in a mouse tumor cell model.

[0328] FIG. 84 depicts results of an in vivo experiments assessing the effect of an exemplary HLA-PEPTIDE/CD3 bispecific antibody in a mouse tumor cell model.

[0329] FIGS. 85A and 85B depicts exemplary bispecific molecules comprising a single domain antibody.

[0330] FIG. 86A depicts the bispecific formats of the 01:01_NTDNNLAVY T cell redirecting bispecific binding molecules used for in vitro cytotoxicity testing.

[0331] FIG. 86B. shows calcein AM cytotoxicity results for the A*01:01_NTDNNLAVY/CD3 bispecific molecules in various bispecific formats.

[0332] FIG. 87A depicts the bispecific formats of the B*35:01_EVDPIGHVY T cell redirecting bispecific binding molecules used for in vitro cytotoxicity testing.

[0333] FIG. 87B. shows calcein AM cytotoxicity results for the A*01:01_B*35:01 EVDPIGHVY/CD3 bispecific molecules in various bispecific formats.

[0334] FIG. 88A shows results from a luciferase assay in A375 cells engineered to express the restricted peptide NTDNNLAVY.

[0335] FIG. 88B shows results from an LDH assay in A375 cells engineered to express the restricted peptide NTDNNLAVY.

[0336] FIG. 89 shows an example of HDX data from scFv G2(2C11) plotted on a crystal structure PDB 5bs0.

[0337] FIG. 90 shows high resolution G2 HDX data plotted on a crystal structure PDB 5bs0.

[0338] FIG. 91 shows heat maps from a second round of G2 HDX data.

[0339] FIG. 92 shows heat maps from a second round of G10 HDX data.

[0340] FIG. 93 shows K562 binding results for bispecific formats of clone G2(1H11) with an anti-CD3 arm.

[0341] FIG. 94 shows 375 binding results for bispecific formats of clone G2(1H11) with an anti-CD3 arm.

[0342] FIG. 95 shows Jurkat binding results for bispecific formats of clone G2(1H11) with an anti-CD3 arm.

[0343] FIG. 96 shows K562 binding results for bispecific formats of clone G2(1H11) with an hOKT3 arm.

[0344] FIG. 97 shows A375 binding results for bispecific formats of clone G2(1H11) with an hOKT3 arm

[0345] FIG. 98A shows additional results from a second round of a luciferase cytotoxicity assay in A375 cells, testing bispecific molecules that bind A*01:01_NTDNNLAVY and CD3.

[0346] FIG. 98B shows additional results from a second round of a luciferase cytotoxicity assay in A375 cells, testing bispecific molecules that bind A*01:01_NTDNNLAVY and CD3.

[0347] FIG. 99A shows results from a spheroid cytotoxicity assay in A375 cells engineered to express the G2 restricted peptide NTDNNLAVY, testing bispecific molecules that bind A*01:01_NTDNNLAVY and CD3. FIG. 99A also shows results from a spheroid cytotoxicity assay in A375 cells engineered to express low or high levels of the G2 restricted peptide.

[0348] FIG. 99B shows results from a spheroid cytotoxicity assay in A375 cells engineered to express the G8 restricted peptide AIFPGAVPAA, testing bispecific molecules that bind A*02:01_AIFPGAVPAA.

[0349] FIG. 99C shows results from a spheroid cytotoxicity assay in LN229 cells engineered to express the G5 restricted peptide EVDPIGHVY, testing bispecific molecules that bind B*35:01_EVDPIGHVY.

[0350] FIG. 100 shows binding affinity results for the antibody designated αCD3 (also referred to as anti-CD3), in IgG format, and the hOKT3 IgG.

[0351] FIG. 101 shows binding affinity results for the bispecific antibody designated 3-G2(1H11)-hOKT3.

[0352] FIG. 102 shows binding affinity results for the bispecific antibody designated 4-G2(1H11)-hOKT3.

[0353] FIG. 103 shows binding affinity results for the bispecific antibody designated 2-G2(1H11)-αCD3.

[0354] FIG. 104 shows binding affinity results for the bispecific antibody designated 4-G2(1H11)-αCD3.

[0355] FIG. 105 shows binding affinity results for the bispecific antibody designated 5-G2(1H11)-αCD3.

[0356] FIG. 106 shows binding affinity results for the bispecific antibody designated 6-G2(1H11)-αCD3.

[0357] FIG. 107 shows an example of data from a second round of HDX studies, from scFv-G10-P5A08, plotted on a crystal structure 5bs0.pd

[0358] FIG. 108 shows an example of high resolution data from scFv clone G5-P1C12 plotted on crystal structure of HLA-B*35:01 (5xos.pdb; https://www.rcsb.org/structure/5XOS).

[0359] FIG. 109 shows resulting color heat maps from high resolution HDX experiments across the HLA α1 helix, the HLA α2 helix, and restricted peptide EVDPIGHVY for all ABPs tested for HLA-PEPTIDE target G5 (HLA-B*35:01_EVDPIGHVY).

[0360] FIG. 110 shows a numerical representation of the color heat map of FIG. 109.

[0361] FIG. 111 shows an example of high-resolution HDX data from scFv G8-P1H08 plotted on a crystal structure of Fab clone G8-P1C11 complexed with HLA-PEPTIDE target A*02:01_AIFPGAVPAA (“G8”).

[0362] FIG. 112 shows resulting color heat maps from high resolution HDX experiments across the HLA α1 helix, the HLA α2 helix, and restricted peptide AIFPGAVPAA for all ABPs tested for HLA-PEPTIDE target G8 (HLA-A*02:01_AIFPGAVPAA).

[0363] FIG. 113 shows a numerical representation of the color heat maps of FIG. 112.

[0364] FIG. 114 shows SEC-HPLC results from a product quality screening of antibodies using a TSKgel SuperSW mAb HTP column (top panel), where a peak tailing between 4.5-5.5 minutes suggested presence of an additional antibody moiety that either interacts more with the SEC column, or is more compacted and thus migrates slower than the main antibody conformation. FIG. 114 also shows SEC-HPLC results from a TSKgel G3000SWx1 column (bottom panel) which resolved the tailing into a “split peak”.

[0365] FIG. 115A shows expected protein digestion fragments of “standard” Format 4 antibodies and a “diabody” isomer of Format 4.

[0366] FIG. 115B shows SEC-HPLC results from a Fabalactica digestion experiment, where Format 4 antibodies were treated with a cysteine protease that digests human IgG1 at one specific site above the hinge (KSCDKT/HTCPPC).

[0367] FIG. 116 shows a diagram representation of the undigested Format 4 “separate scFv” conformation (left), the alternate diabody conformation without digestion (middle), and the alternate diabody conformation with digestion (right).

[0368] FIG. 117 shows results from an electron microscopy study of a representative Format 4 antibody, Format 4-hOKT3-G5(1C12).

[0369] FIG. 118 shows SEC-HPLC results from a Format 4 G2(1H11) bispecific antibody with an engineered VH44/VL100 disulfide bond (top panel), and without the engineered disulfide bond (bottom panel).

[0370] FIG. 119 shows SEC-HPLC results from a Format 4 G5(1C12) bispecific antibody with an engineered VH44/VL100 disulfide bond (top panel), and without the engineered disulfide bond (bottom panel).

[0371] FIG. 120 shows BLI results from representative bispecific Format 4 antibodies with and without the engineered VH44/VL100 disulfide bond.

[0372] FIG. 121 shows MSD results from representative bispecific Format 4 antibodies with and without the engineered VH44/VL100 disulfide bond.

[0373] FIG. 122 shows cell binding results from representative bispecific Format 4 antibodies with and without the engineered VH44/VL100 disulfide bond.

[0374] FIG. 123 shows 2D cytotoxicity and spheroid toxicity results from a representative G5 Format 4 antibody with and without the engineered VH44/VL100 disulfide bond.

[0375] FIG. 124 shows 2D cytotoxicity and spheroid toxicity results from representative G2 Format 4 antibodies with and without the engineered VH44/VL100 disulfide bond.

### DETAILED DESCRIPTION

[0376] Unless otherwise defined, all terms of art, notations and other scientific terminology used herein are intended to have the meanings commonly understood by those of skill in the art. In some cases, terms with commonly understood meanings are defined herein for clarity and/or for ready reference, and the inclusion of such definitions herein should not necessarily be construed to represent a difference over what is generally understood in the art. The techniques and procedures described or referenced herein are generally well understood and commonly employed using conventional methodologies by those skilled in the art, such as, for example, the widely utilized molecular cloning methodologies described in Sambrook et al., Molecular Cloning: A Laboratory Manual 4th ed. (2012) Cold Spring Harbor Laboratory Press, Cold Spring Harbor, N.Y. As appropriate, procedures involving the use of commercially available kits and reagents are generally carried out in accordance with manufacturer-defined protocols and conditions unless otherwise noted.

[0377] As used herein, the singular forms “a,” “an,” and “the” include the plural referents unless the context clearly indicates otherwise. The terms “include,” “such as,” and the like are intended to convey inclusion without limitation, unless otherwise specifically indicated.

[0378] As used herein, the term “comprising” also specifically includes embodiments “consisting of” and “consisting essentially of” the recited elements, unless specifically indicated otherwise. For example, a multispecific ABP “comprising a diabody” includes a multispecific ABP “consisting of a diabody” and a multispecific ABP “consisting essentially of a diabody.”

[0379] The term “about” indicates and encompasses an indicated value and a range above and below that value. In certain embodiments, the term “about” indicates the designated value ±10%, ±5%, or ±1%. In certain embodiments, where applicable, the term “about” indicates the designated value(s) ±one standard deviation of that value(s).

[0380] The term “immunoglobulin” refers to a class of structurally related proteins generally comprising two pairs of polypeptide chains: one pair of light (L) chains and one pair of heavy (H) chains. In an “intact immunoglobulin,” all four of these chains are interconnected by disulfide bonds. The structure of immunoglobulins has been well characterized. See, e.g., Paul, Fundamental Immunology 7th ed., Ch. 5 (2013) Lippincott Williams & Wilkins, Philadelphia, Pa. Briefly, each heavy chain typically comprises a heavy chain variable region (V_{H}) and a heavy chain constant region (C_{H}). The heavy chain constant region typically comprises three domains, abbreviated C_{H}1, C_{H}2, and C_{H}3. Each light chain typically comprises a light chain variable region (V_{L}) and a light chain constant region. The light chain constant region typically comprises one domain, abbreviated CL.

[0381] The term “antigen binding protein” or “ABP” is used herein in its broadest sense and includes certain types of molecules comprising one or more antigen-binding domains that specifically bind to an antigen or epitope.

[0382] In some embodiments, the ABP comprises an antibody. In some embodiments, the ABP consists of an antibody. In some embodiments, the ABP consists essentially of an antibody. An ABP specifically includes intact antibodies (e.g., intact immunoglobulins), antibody fragments, ABP fragments, and multi-specific antibodies. In some embodiments, the ABP comprises an alternative scaffold. In some embodiments, the ABP consists of an alternative scaffold. In some embodiments, the ABP consists essentially of an alternative scaffold. In some embodiments, the ABP comprises an antibody fragment. In some embodiments, the ABP consists of an antibody fragment. In some embodiments, the ABP consists essentially of an antibody fragment. In some embodiments, a CAR comprises an ABP provided herein. An “HLA-PEPTIDE ABP,” “anti-HLA-PEPTIDE ABP,” or “HLA-PEPTIDE-specific ABP” is an ABP, as provided herein, which specifically binds to the antigen HLA-PEPTIDE. An ABP includes proteins comprising one or more antigen-binding domains that specifically bind to an antigen or epitope via a variable region, such as a variable region derived from a B cell (e.g., antibody) or T cell (e.g., TCR).

[0383] The term “antibody” herein is used in the broadest sense and includes polyclonal and monoclonal antibodies, including intact antibodies and functional (antigen-binding) antibody fragments, including fragment antigen binding (Fab) fragments, F(ab′)2 fragments, Fab′ fragments, Fv fragments, recombinant IgG (rIgG) fragments, variable heavy chain (VH) regions capable of specifically binding the antigen, single chain antibody fragments, including single chain variable fragments (scFv), and single domain antibodies (e.g., sdAb, sdFv, nanobody, camelid VHH, engineered or evolved human VH that does not require pairing to VL for solubility or activity) fragments. The term encompasses genetically engineered and/or otherwise modified forms of immunoglobulins, such as intrabodies, peptibodies, chimeric antibodies, fully human antibodies, humanized antibodies, and heteroconjugate antibodies, multispecific, e.g., bispecific, antibodies, diabodies, triabodies, and tetrabodies, tandem di-scFv, tandem tri-scFv. Unless otherwise stated, the term “antibody” should be understood to encompass functional antibody fragments thereof. The term also encompasses intact or full-length antibodies, including antibodies of any class or sub-class, including IgG and sub-classes thereof, IgM, IgE, IgA, and IgD.

[0384] As used herein, “variable region” refers to a variable nucleotide sequence that arises from a recombination event, for example, it can include a V, J, and/or D region of an immunoglobulin or T cell receptor (TCR) sequence from a B cell or T cell, such as an activated T cell or an activated B cell.

[0385] The term “antigen-binding domain” means the portion of an ABP that is capable of specifically binding to an antigen or epitope. One example of an antigen-binding domain is an antigen-binding domain formed by an antibody V_{H}-V_{L} dimer of an ABP. Another example of an antigen-binding domain is an antigen-binding domain formed by diversification of certain loops from the tenth fibronectin type III domain of an Adnectin. An antigen-binding domain can include antibody CDRs 1, 2, and 3 from a heavy chain in that order; and antibody CDRs 1, 2, and 3 from a light chain in that order. An antigen-binding domain can include TCR CDRs, e.g., αCDR1, αCDR2, αCDR3, βCDR1, βCDR2, and βCDR3. TCR CDRs are described herein.

[0386] The antibody V_{H} and V_{L} regions may be further subdivided into regions of hypervariability (“hypervariable regions (HVRs);” also called “complementarity determining regions” (CDRs)) interspersed with regions that are more conserved. The more conserved regions are called framework regions (FRs). Each VH and VL generally comprises three antibody CDRs and four FRs, arranged in the following order (from N-terminus to C-terminus): FR1-CDR1-FR2-CDR2-FR3-CDR3-FR4. The antibody CDRs are involved in antigen binding, and influence antigen specificity and binding affinity of the ABP. See Kabat et al., Sequences of Proteins of Immunological Interest 5th ed. (1991) Public Health Service, National Institutes of Health, Bethesda, Md., incorporated by reference in its entirety.

[0387] The light chain from any vertebrate species can be assigned to one of two types, called kappa (κ) and lambda (λ), based on the sequence of its constant domain.

[0388] The heavy chain from any vertebrate species can be assigned to one of five different classes (or isotypes): IgA, IgD, IgE, IgG, and IgM. These classes are also designated α, δ, ε, γ, and μ, respectively. The IgG and IgA classes are further divided into subclasses on the basis of differences in sequence and function. Humans express the following subclasses: IgG1, IgG2, IgG3, IgG4, IgA1, and IgA2.

[0389] The amino acid sequence boundaries of an antibody CDR can be determined by one of skill in the art using any of a number of known numbering schemes, including those described by Kabat et al., supra (“Kabat” numbering scheme); Al-Lazikani et al., 1997, J. Mol. Biol., 273:927-948 (“Chothia” numbering scheme); MacCallum et al., 1996, J. Mol. Biol. 262:732-745 (“Contact” numbering scheme); Lefranc et al., Dev. Comp. Immunol., 2003, 27:55-77 (“IMGT” numbering scheme); and Honegge and Plückthun, J. Mol. Biol., 2001, 309:657-70 (“AHo” numbering scheme); each of which is incorporated by reference in its entirety.

[0390] Table 14 provides the positions of antibody CDR-L1, CDR-L2, CDR-L3, CDR-H1, CDR-H2, and CDR-H3 as identified by the Kabat and Chothia schemes. For CDR-H1, residue numbering is provided using both the Kabat and Chothia numbering schemes.

[0391] Antibody CDRs may be assigned, for example, using ABP numbering software, such as Abnum, available at www.bioinf org.uk/abs/abnum/, and described in Abhinandan and Martin, Immunology, 2008, 45:3832-3839, incorporated by reference in its entirety.

TABLE 14
Residues in CDRs according to Kabat and Chothia numbering schemes

| CDR | Kabat | Chothia |
|---|---|---|
| L1 | L24-L34 | L24-L34 |
| L2 | L50-L56 | L50-L56 |
| L3 | L89-L97 | L89-L97 |
| H1 (Kabat Numbering) | H31-H35B | H26-H32 or H34* |
| H1 (Chothia Numbering) | H31-H35 | H26-H32 |
| H2 | H50-H65 | H52-H56 |
| H3 | H95-H102 | H95-H102 |

*The C-terminus of CDR-H1, when numbered using the Kabat numbering convention, varies between H32 and H34, depending on the length of the CDR.

[0392] The “EU numbering scheme” is generally used when referring to a residue in an ABP heavy chain constant region (e.g., as reported in Kabat et al., supra). Unless stated otherwise, the EU numbering scheme is used to refer to residues in ABP heavy chain constant regions described herein.

[0393] The terms “full length antibody,” “intact antibody,” and “whole antibody” are used herein interchangeably to refer to an antibody having a structure substantially similar to a naturally occurring antibody structure and having heavy chains that comprise an Fc region. For example, when used to refer to an IgG molecule, a “full length antibody” is an antibody that comprises two heavy chains and two light chains.

[0394] The amino acid sequence boundaries of a TCR CDR can be determined by one of skill in the art using any of a number of known numbering schemes, including but not limited to the IMGT unique numbering, as described by LeFranc, M.-P, Immunol Today. 1997 November; 18(11):509; Lefranc, M.-P., “IMGT Locus on Focus: A new section of Experimental and Clinical Immunogenetics”, Exp. Clin. Immunogenet., 15, 1-7 (1998); Lefranc and Lefranc, The T Cell Receptor FactsBook; and M.-P. Lefranc/Developmental and Comparative Immunology 27 (2003) 55-77, all of which are incorporated by reference in their entirety.

[0395] An “ABP fragment” comprises a portion of an intact ABP, such as the antigen-binding or variable region of an intact ABP. ABP fragments include, for example, Fv fragments, Fab fragments, F(ab′)₂ fragments, Fab′ fragments, scFv (sFv) fragments, and scFv-Fc fragments. ABP fragments include antibody fragments. Antibody fragments can include Fv fragments, Fab fragments, F(ab′)₂ fragments, Fab′ fragments, scFv (sFv) fragments, scFv-Fc fragments, and TCR fragments.

[0396] “Fv” fragments comprise a non-covalently-linked dimer of one heavy chain variable domain and one light chain variable domain.

[0397] “Fab” fragments comprise, in addition to the heavy and light chain variable domains, the constant domain of the light chain and the first constant domain (CHO of the heavy chain. Fab fragments may be generated, for example, by recombinant methods or by papain digestion of a full-length ABP.

[0398] “F(ab′)₂” fragments contain two Fab′ fragments joined, near the hinge region, by disulfide bonds. F(ab′)₂ fragments may be generated, for example, by recombinant methods or by pepsin digestion of an intact ABP. The F(ab′) fragments can be dissociated, for example, by treatment with β-mercaptoethanol.

[0399] “Single-chain Fv” or “sFv” or “scFv” fragments comprise a V_{H} domain and a V_{L} domain in a single polypeptide chain. The V_{H} and V_{L} are generally linked by a peptide linker. See Plückthun A. (1994). Any suitable linker may be used. In some embodiments, the linker is a (GGGGS)ₙ. In some embodiments, n=1, 2, 3, 4, 5, or 6. See ABPs from Escherichia coli. In Rosenberg M. & Moore G. P. (Eds.), The Pharmacology of Monoclonal ABPs vol. 113 (pp. 269-315). Springer-Verlag, New York, incorporated by reference in its entirety.

[0400] “scFv-Fc” fragments comprise an scFv attached to an Fc domain. For example, an Fc domain may be attached to the C-terminal of the scFv. The Fc domain may follow the V_{H} or V_{L}, depending on the orientation of the variable domains in the scFv (i.e., V_{H}-V_{L} or V_{L}-V_{H}). Any suitable Fc domain known in the art or described herein may be used. In some cases, the Fc domain comprises an IgG4 Fc domain.

[0401] The term “single domain antibody” refers to a molecule in which one variable domain of an ABP specifically binds to an antigen without the presence of the other variable domain. Single domain ABPs, and fragments thereof, are described in Arabi Ghahroudi et al., FEBS Letters, 1998, 414:521-526 and Muyldermans et al., Trends in Biochem. Sci., 2001, 26:230-245, each of which is incorporated by reference in its entirety. Single domain ABPs are also known as sdAbs or nanobodies.

[0402] The term “Fc region” or “Fc” means the C-terminal region of an immunoglobulin heavy chain that, in naturally occurring antibodies, interacts with Fc receptors and certain proteins of the complement system. The structures of the Fc regions of various immunoglobulins, and the glycosylation sites contained therein, are known in the art. See Schroeder and Cavacini, J. Allergy Clin. Immunol., 2010, 125:S41-52, incorporated by reference in its entirety. The Fc region may be a naturally occurring Fc region, or an Fc region modified as described in the art or elsewhere in this disclosure.

[0403] The term “alternative scaffold” refers to a molecule in which one or more regions may be diversified to produce one or more antigen-binding domains that specifically bind to an antigen or epitope. In some embodiments, the antigen-binding domain binds the antigen or epitope with specificity and affinity similar to that of an ABP. Exemplary alternative scaffolds include those derived from fibronectin (e.g., Adnectins™), the β-sandwich (e.g., iMab), lipocalin (e.g., Anticalins®), EETI-II/AGRP, BPTI/LACI-D1/ITI-D2 (e.g., Kunitz domains), thioredoxin peptide aptamers, protein A (e.g., Affibody®), ankyrin repeats (e.g., DARPins), gamma-B-crystallin/ubiquitin (e.g., Affilins), CTLD₃ (e.g., Tetranectins), Fynomers, and (LDLR-A module) (e.g., Avimers). Additional information on alternative scaffolds is provided in Binz et al., Nat. Biotechnol., 2005 23:1257-1268; Skerra, Current Opin. in Biotech., 2007 18:295-304; and Silacci et al., J. Biol. Chem., 2014, 289:14392-14398; each of which is incorporated by reference in its entirety. An alternative scaffold is one type of ABP.

[0404] A “multi specific ABP” is an ABP that comprises two or more different antigen-binding domains that collectively specifically bind two or more different epitopes. The two or more different epitopes may be epitopes on the same antigen (e.g., a single HLA-PEPTIDE molecule expressed by a cell) or on different antigens (e.g., different HLA-PEPTIDE molecules expressed by the same cell, or a HLA-PEPTIDE molecule and a non-HLA-PEPTIDE molecule). In some aspects, a multi-specific ABP binds two different epitopes (i.e., a “bispecific ABP”). In some aspects, a multi-specific ABP binds three different epitopes (i.e., a “tri specific ABP”).

[0405] The term “monoclonal antibody” refers to an antibody from a population of substantially homogeneous antibodies. A population of substantially homogeneous antibodies comprises antibodies that are substantially similar and that bind the same epitope(s), except for variants that may normally arise during production of the monoclonal antibody. Such variants are generally present in only minor amounts. A monoclonal antibody is typically obtained by a process that includes the selection of a single antibody from a plurality of antibodies. For example, the selection process can be the selection of a unique clone from a plurality of clones, such as a pool of hybridoma clones, phage clones, yeast clones, bacterial clones, or other recombinant DNA clones. The selected antibody can be further altered, for example, to improve affinity for the target (“affinity maturation”), to humanize the antibody, to improve its production in cell culture, and/or to reduce its immunogenicity in a subject.

[0406] The term “chimeric antibody” refers to an antibody in which a portion of the heavy and/or light chain is derived from a particular source or species, while the remainder of the heavy and/or light chain is derived from a different source or species.

[0407] “Humanized” forms of non-human antibodies are chimeric antibodies that contain minimal sequence derived from the non-human antibody. A humanized antibody is generally a human antibody (recipient antibody) in which residues from one or more CDRs are replaced by residues from one or more CDRs of a non-human antibody (donor antibody). The donor antibody can be any suitable non-human antibody, such as a mouse, rat, rabbit, chicken, or non-human primate antibody having a desired specificity, affinity, or biological effect. In some instances, selected framework region residues of the recipient antibody are replaced by the corresponding framework region residues from the donor antibody. Humanized antibodies may also comprise residues that are not found in either the recipient antibody or the donor antibody. Such modifications may be made to further refine antibody function. For further details, see Jones et al., Nature, 1986, 321:522-525; Riechmann et al., Nature, 1988, 332:323-329; and Presta, Curr. Op. Struct. Biol., 1992, 2:593-596, each of which is incorporated by reference in its entirety.

[0408] A “human antibody” is one which possesses an amino acid sequence corresponding to that of an antibody produced by a human or a human cell, or derived from a non-human source that utilizes a human antibody repertoire or human antibody-encoding sequences (e.g., obtained from human sources or designed de novo). Human antibodies specifically exclude humanized antibodies.

[0409] “Affinity” refers to the strength of the sum total of non-covalent interactions between a single binding site of a molecule (e.g., an ABP) and its binding partner (e.g., an antigen or epitope). Unless indicated otherwise, as used herein, “affinity” refers to intrinsic binding affinity, which reflects a 1:1 interaction between members of a binding pair (e.g., ABP and antigen or epitope). The affinity of a molecule X for its partner Y can be represented by the dissociation equilibrium constant (K_{D}). The kinetic components that contribute to the dissociation equilibrium constant are described in more detail below. Affinity can be measured by common methods known in the art, including those described herein, such as surface plasmon resonance (SPR) technology (e.g., BIACORE) or biolayer interferometry (e.g., FORTEBIO®).

[0410] With regard to the binding of an ABP to a target molecule, the terms “bind,” “specific binding,” “specifically binds to,” “specific for,” “selectively binds,” and “selective for” a particular antigen (e.g., a polypeptide target) or an epitope on a particular antigen mean binding that is measurably different from a non-specific or non-selective interaction (e.g., with a non-target molecule). Specific binding can be measured, for example, by measuring binding to a target molecule and comparing it to binding to a non-target molecule. Specific binding can also be determined by competition with a control molecule that mimics the epitope recognized on the target molecule. In that case, specific binding is indicated if the binding of the ABP to the target molecule is competitively inhibited by the control molecule. In some aspects, the affinity of a HLA-PEPTIDE ABP for a non-target molecule is less than about 50% of the affinity for HLA-PEPTIDE. In some aspects, the affinity of a HLA-PEPTIDE ABP for a non-target molecule is less than about 40% of the affinity for HLA-PEPTIDE. In some aspects, the affinity of a HLA-PEPTIDE ABP for a non-target molecule is less than about 30% of the affinity for HLA-PEPTIDE. In some aspects, the affinity of a HLA-PEPTIDE ABP for a non-target molecule is less than about 20% of the affinity for HLA-PEPTIDE. In some aspects, the affinity of a HLA-PEPTIDE ABP for a non-target molecule is less than about 10% of the affinity for HLA-PEPTIDE. In some aspects, the affinity of a HLA-PEPTIDE ABP for a non-target molecule is less than about 1% of the affinity for HLA-PEPTIDE. In some aspects, the affinity of a HLA-PEPTIDE ABP for a non-target molecule is less than about 0.1% of the affinity for HLA-PEPTIDE.

[0411] The term “k_{d}” (sec⁻¹), as used herein, refers to the dissociation rate constant of a particular ABP—antigen interaction. This value is also referred to as the k_{off} value.

[0412] The term “kₐ” (M⁻¹×sec⁻¹), as used herein, refers to the association rate constant of a particular ABP-antigen interaction. This value is also referred to as the kₒₙ value.

[0413] The term “K_{D}” (M), as used herein, refers to the dissociation equilibrium constant of a particular ABP-antigen interaction. K_{D}=k_{d}/kₐ. In some embodiments, the affinity of an ABP is described in terms of the K_{D} for an interaction between such ABP and its antigen. For clarity, as known in the art, a smaller K_{D} value indicates a higher affinity interaction, while a larger K_{D} value indicates a lower affinity interaction.

[0414] The term “K_{A}” (M⁻¹), as used herein, refers to the association equilibrium constant of a particular ABP-antigen interaction. K_{A}=kₐ/k_{d}.

[0415] An “immunoconjugate” is an ABP conjugated to one or more heterologous molecule(s), such as a therapeutic (cytokine, for example) or diagnostic agent.

[0416] “Fc effector functions” refer to those biological activities mediated by the Fc region of an ABP having an Fc region, which activities may vary depending on isotype. Examples of ABP effector functions include C1q binding to activate complement dependent cytotoxicity (CDC), Fc receptor binding to activate ABP-dependent cellular cytotoxicity (ADCC), and ABP dependent cellular phagocytosis (ADCP).

[0417] When used herein in the context of two or more ABPs, the term “competes with” or “cross-competes with” indicates that the two or more ABPs compete for binding to an antigen (e.g., HLA-PEPTIDE). In one exemplary assay, HLA-PEPTIDE is coated on a surface and contacted with a first HLA-PEPTIDE ABP, after which a second HLA-PEPTIDE ABP is added. In another exemplary assay, a first HLA-PEPTIDE ABP is coated on a surface and contacted with HLA-PEPTIDE, and then a second HLA-PEPTIDE ABP is added. If the presence of the first HLA-PEPTIDE ABP reduces binding of the second HLA-PEPTIDE ABP, in either assay, then the ABPs compete with each other. The term “competes with” also includes combinations of ABPs where one ABP reduces binding of another ABP, but where no competition is observed when the ABPs are added in the reverse order. However, in some embodiments, the first and second ABPs inhibit binding of each other, regardless of the order in which they are added. In some embodiments, one ABP reduces binding of another ABP to its antigen by at least 25%, at least 50%, at least 60%, at least 70%, at least 80%, at least 85%, at least 90%, or at least 95%. A skilled artisan can select the concentrations of the ABPs used in the competition assays based on the affinities of the ABPs for HLA-PEPTIDE and the valency of the ABPs. The assays described in this definition are illustrative, and a skilled artisan can utilize any suitable assay to determine if ABPs compete with each other. Suitable assays are described, for example, in Cox et al., “Immunoassay Methods,” in Assay Guidance Manual [Internet], Updated Dec. 24, 2014 (www.ncbi.nlm.nih.gov/books/NBK92434/; accessed Sep. 29, 2015); Silman et al., Cytometry, 2001, 44:30-37; and Finco et al., J. Pharm. Biomed. Anal., 2011, 54:351-358; each of which is incorporated by reference in its entirety.

[0418] The term “epitope” means a portion of an antigen that specifically binds to an ABP. Epitopes frequently consist of surface-accessible amino acid residues and/or sugar side chains and may have specific three dimensional structural characteristics, as well as specific charge characteristics. Conformational and non-conformational epitopes are distinguished in that the binding to the former but not the latter may be lost in the presence of denaturing solvents. An epitope may comprise amino acid residues that are directly involved in the binding, and other amino acid residues, which are not directly involved in the binding. The epitope to which an ABP binds can be determined using known techniques for epitope determination such as, for example, testing for ABP binding to HLA-PEPTIDE variants with different point-mutations, or to chimeric HLA-PEPTIDE variants.

[0419] Percent “identity” between a polypeptide sequence and a reference sequence, is defined as the percentage of amino acid residues in the polypeptide sequence that are identical to the amino acid residues in the reference sequence, after aligning the sequences and introducing gaps, if necessary, to achieve the maximum percent sequence identity. Alignment for purposes of determining percent amino acid sequence identity can be achieved in various ways that are within the skill in the art, for instance, using publicly available computer software such as BLAST, BLAST-2, ALIGN, MEGALIGN (DNASTAR), CLUSTALW, CLUSTAL OMEGA, or MUSCLE software. Those skilled in the art can determine appropriate parameters for aligning sequences, including any algorithms needed to achieve maximal alignment over the full length of the sequences being compared.

[0420] A “conservative substitution” or a “conservative amino acid substitution,” refers to the substitution an amino acid with a chemically or functionally similar amino acid. Conservative substitution tables providing similar amino acids are well known in the art. By way of example, the groups of amino acids provided in Tables 15-17 are, in some embodiments, considered conservative substitutions for one another.

TABLE 15
Selected groups of amino acids that are considered conservative
substitutions for one another, in certain embodiments.

| | |
|---|---|
| Acidic Residues | D and E |
| Basic Residues | K, R, and H |
| Hydrophilic Uncharged Residues | S, T, N, and Q |
| Aliphatic Uncharged Residues | G, A, V, L, and I |
| Non-polar Uncharged Residues | C, M, and P |
| Aromatic Residues | F, Y, and W |

TABLE 16
Additional selected groups of amino acids that are considered conservative
substitutions for one another, in certain embodiments.

| | |
|---|---|
| Group 1 | A, S, and T |
| Group 2 | D and E |
| Group 3 | N and Q |
| Group 4 | R and K |
| Group 5 | I, L, and M |
| Group 6 | F, Y, and W |

TABLE 17
Further selected groups of amino acids that are considered conservative
substitutions for one another, in certain embodiments.

| | |
|---|---|
| Group A | A and G |
| Group B | D and E |
| Group C | N and Q |
| Group D | R, K, and H |
| Group E | I, L, M, V |
| Group F | F, Y, and W |
| Group G | S and T |
| Group H | C and M |

[0421] Additional conservative substitutions may be found, for example, in Creighton, Proteins: Structures and Molecular Properties 2nd ed. (1993) W. H. Freeman & Co., New York, N.Y. An ABP generated by making one or more conservative substitutions of amino acid residues in a parent ABP is referred to as a “conservatively modified variant.”

[0422] The term “amino acid” refers to the twenty common naturally occurring amino acids. Naturally occurring amino acids include alanine (Ala; A), arginine (Arg; R), asparagine (Asn; N), aspartic acid (Asp; D), cysteine (Cys; C); glutamic acid (Glu; E), glutamine (Gln; Q), Glycine (Gly; G); histidine (His; H), isoleucine (Ile; I), leucine (Leu; L), lysine (Lys; K), methionine (Met; M), phenylalanine (Phe; F), proline (Pro; P), serine (Ser; S), threonine (Thr; T), tryptophan (Trp; W), tyrosine (Tyr; Y), and valine (Val; V).

[0423] The term “vector,” as used herein, refers to a nucleic acid molecule capable of propagating another nucleic acid to which it is linked. The term includes the vector as a self-replicating nucleic acid structure as well as the vector incorporated into the genome of a host cell into which it has been introduced. Certain vectors are capable of directing the expression of nucleic acids to which they are operatively linked. Such vectors are referred to herein as “expression vectors.”

[0424] The terms “host cell,” “host cell line,” and “host cell culture” are used interchangeably and refer to cells into which an exogenous nucleic acid has been introduced, and the progeny of such cells. Host cells include “transformants” (or “transformed cells”) and “transfectants” (or “transfected cells”), which each include the primary transformed or transfected cell and progeny derived therefrom. Such progeny may not be completely identical in nucleic acid content to a parent cell, and may contain mutations.

[0425] The term “treating” (and variations thereof such as “treat” or “treatment”) refers to clinical intervention in an attempt to alter the natural course of a disease or condition in a subject in need thereof. Treatment can be performed both for prophylaxis and during the course of clinical pathology. Desirable effects of treatment include preventing occurrence or recurrence of disease, alleviation of symptoms, diminishment of any direct or indirect pathological consequences of the disease, preventing metastasis, decreasing the rate of disease progression, amelioration or palliation of the disease state, and remission or improved prognosis.

[0426] As used herein, the term “therapeutically effective amount” or “effective amount” refers to an amount of an ABP or pharmaceutical composition provided herein that, when administered to a subject, is effective to treat a disease or disorder.

[0427] As used herein, the term “subject” means a mammalian subject. Exemplary subjects include humans, monkeys, dogs, cats, mice, rats, cows, horses, camels, goats, rabbits, and sheep. In certain embodiments, the subject is a human. In some embodiments the subject has a disease or condition that can be treated with an ABP provided herein. In some aspects, the disease or condition is a cancer. In some aspects, the disease or condition is a viral infection.

[0428] The term “package insert” is used to refer to instructions customarily included in commercial packages of therapeutic or diagnostic products (e.g., kits) that contain information about the indications, usage, dosage, administration, combination therapy, contraindications and/or warnings concerning the use of such therapeutic or diagnostic products.

[0429] The term “tumor” refers to all neoplastic cell growth and proliferation, whether malignant or benign, and all pre-cancerous and cancerous cells and tissues. The terms “cancer,” “cancerous,” “cell proliferative disorder,” “proliferative disorder” and “tumor” are not mutually exclusive as referred to herein. The terms “cell proliferative disorder” and “proliferative disorder” refer to disorders that are associated with some degree of abnormal cell proliferation. In some embodiments, the cell proliferative disorder is a cancer. In some aspects, the tumor is a solid tumor. In some aspects, the tumor is a hematologic malignancy.

[0430] The term “pharmaceutical composition” refers to a preparation which is in such form as to permit the biological activity of an active ingredient contained therein to be effective in treating a subject, and which contains no additional components which are unacceptably toxic to the subject in the amounts provided in the pharmaceutical composition.

[0431] The terms “modulate” and “modulation” refer to reducing or inhibiting or, alternatively, activating or increasing, a recited variable.

[0432] The terms “increase” and “activate” refer to an increase of 10%, 20%, 30%, 40%, 50%, 60%, 70%, 75%, 80%, 85%, 90%, 95%, 100%, 2-fold, 3-fold, 4-fold, 5-fold, 10-fold, 20-fold, 50-fold, 100-fold, or greater in a recited variable.

[0433] The terms “reduce” and “inhibit” refer to a decrease of 10%, 20%, 30%, 40%, 50%, 60%, 70%, 75%, 80%, 85%, 90%, 95%, 2-fold, 3-fold, 4-fold, 5-fold, 10-fold, 20-fold, 50-fold, 100-fold, or greater in a recited variable.

[0434] The term “agonize” refers to the activation of receptor signaling to induce a biological response associated with activation of the receptor. An “agonist” is an entity that binds to and agonizes a receptor.

[0435] The term “antagonize” refers to the inhibition of receptor signaling to inhibit a biological response associated with activation of the receptor. An “antagonist” is an entity that binds to and antagonizes a receptor.

[0436] The terms “nucleic acids” and “polynucleotides” may be used interchangeably herein to refer to polymeric form of nucleotides of any length, either deoxyribonucleotides or ribonucleotides, or analogs thereof. Polynucleotides can include, but are not limited to coding or non-coding regions of a gene or gene fragment, loci (locus) defined from linkage analysis, exons, introns, messenger RNA (mRNA), cDNA, recombinant polynucleotides, branched polynucleotides, plasmids, vectors, isolated DNA, isolated RNA, nucleic acid probes, and primers. A polynucleotide may comprise modified nucleotides, such as methylated nucleotides and nucleotide analogs. Exemplary modified nucleotides include, e.g., 5-fluorouracil, 5-bromouracil, 5-chlorouracil, 5-iodouracil, hypoxanthine, xanthine, 4-acetylcytosine, 5-(carboxyhydroxymethyl) uracil, 5-carboxymethylaminomethyl-2-thiouridine, 5-carboxymethylaminomethyluracil, dihydrouracil, beta-D-galactosylqueosine, inosine, N6-isopentenyladenine, 1-methylguanine, 1-methylinosine, 2,2-dimethylguanine, 2-methyladenine, 2-methylguanine, 3-methylcytosine, 5-methylcytosine, N6-substituted adenine, 7-methylguanine, 5-methylaminomethyluracil, 5-methoxyaminomethyl-2-thiouracil, beta-D-mannosylqueosine, 5′-methoxycarboxymethyluracil, 5-methoxyuracil, 2-methylthioN6-isopentenyladenine, uracil-5-oxyacetic acid (v), wybutoxosine, pseudouracil, queosine, 2-thiocytosine, 5-methyl-2-thiouracil, 2-thiouracil, 4-thiouracil, 5-methyluracil, uracil-5-oxyacetic acid methylester, 3-(3-amino-3-N-2-carboxypropyl) uracil, and 2,6-diaminopurine.

[0437] Isolated HLA-Peptide Targets

[0438] The major histocompatibility complex (MHC) is a complex of antigens encoded by a group of linked loci, which are collectively termed H-2 in the mouse and HLA in humans. The two principal classes of the MHC antigens, class I and class II, each comprise a set of cell surface glycoproteins which play a role in determining tissue type and transplant compatibility. In transplantation reactions, cytotoxic T-cells (CTLs) respond mainly against class I glycoproteins, while helper T-cells respond mainly against class II glycoproteins.

[0439] Human major histocompatibility complex (MHC) class I molecules, referred to interchangeably herein as HLA Class I molecules, are expressed on the surface of nearly all cells. These molecules function in presenting peptides which are mainly derived from endogenously synthesized proteins to, e.g., CD8+ T cells via an interaction with the alpha-beta T-cell receptor. The class I MHC molecule comprises a heterodimer composed of a 46-kDa ci chain which is non-covalently associated with the 12-kDa light chain beta-2 microglobulin. The α chain generally comprises α1 and α2 domains which form a groove for presenting an HLA-restricted peptide, and an α3 plasma membrane-spanning domain which interacts with the CD8 co-receptor of T-cells. FIG. 1 (prior art) depicts the general structure of a Class I HLA molecule. Some TCRs can bind MHC class I independently of CD8 coreceptor (see, e.g., Kerry S E, Buslepp J, Cramer L A, et al. Interplay between TCR Affinity and Necessity of Coreceptor Ligation: High-Affinity Peptide-MHC/TCR Interaction Overcomes Lack of CD8 Engagement. Journal of immunology (Baltimore, Md.: 1950). 2003; 171(9):4493-4503.)

[0440] Class I MHC-restricted peptides (also referred to interchangeably herein as HLA-restricted antigens, HLA-restricted peptides, MHC-restricted antigens, restricted peptides, or peptides) generally bind to the heavy chain alpha1-alpha2 groove via about two or three anchor residues that interact with corresponding binding pockets in the MHC molecule. The beta-2 microglobulin chain plays an important role in MHC class I intracellular transport, peptide binding, and conformational stability. For most class I molecules, the formation of a heterotrimeric complex of the MHC class I heavy chain, peptide (self, non-self, and/or antigenic) and beta-2 microglobulin leads to protein maturation and export to the cell-surface.

[0441] Binding of a given HLA subtype to an HLA-restricted peptide forms a complex with a unique and novel surface that can be specifically recognized by an ABP such as, e.g., a TCR on a T cell or an antibody or antigen-binding fragment thereof. HLA complexed with an HLA-restricted peptide is referred to herein as an HLA-PEPTIDE or HLA-PEPTIDE target. In some cases, the restricted peptide is located in the α1/α2 groove of the HLA molecule. In some cases, the restricted peptide is bound to the α1/α2 groove of the HLA molecule via about two or three anchor residues that interact with corresponding binding pockets in the HLA molecule.

[0442] Accordingly, provided herein are antigens comprising HLA-PEPTIDE targets. The HLA-PEPTIDE targets may comprise a specific HLA-restricted peptide having a defined amino acid sequence complexed with a specific HLA subtype.

[0443] HLA-PEPTIDE targets identified herein may be useful for cancer immunotherapy. In some embodiments, the HLA-PEPTIDE targets identified herein are presented on the surface of a tumor cell. The HLA-PEPTIDE targets identified herein may be expressed by tumor cells in a human subject. The HLA-PEPTIDE targets identified herein may be expressed by tumor cells in a population of human subjects. For example, the HLA-PEPTIDE targets identified herein may be shared antigens which are commonly expressed in a population of human subjects with cancer.

[0444] The HLA-PEPTIDE targets identified herein may have a prevalence with an individual tumor type The prevalence with an individual tumor type may be about 0.1%, 0.2%, 0.3%, 0.4%, 0.5%, 0.6%, 0.7%, 0.8%, 0.9%, 1%, 1%, 2%, 3%, 4%, 5%, 6%, 7%, 8%, 9%, 10%, 11%, 12%, 13%, 14%, 15%, 16%, 17%, 18%, 19%, 20%, 21%, 22%, 23%, 24%, 25%, 26%, 27%, 28%, 29%, 30%, 31%, 32%, 33%, 34%, 35%, 36%, 37%, 38%, 39%, 40%, 41%, 42%, 43%, 44%, 45%, 46%, 47%, 48%, 49%, 50%, 51%, 52%, 53%, 54%, 55%, 56%, 57%, 58%, 59%, 60%, 61%, 62%, 63%, 64%, 65%, 66%, 67%, 68%, 69%, 70%, 71%, 72%, 73%, 74%, 75%, 76%, 77%, 78%, 79%, 80%, 81%, 82%, 83%, 84%, 85%, 86%, 87%, 88%, 89%, 90%, 91%, 92%, 93%, 94%, 95%, 96%, 97%, 98%, 99%, or 100%. The prevalence with an individual tumor type may be about 0.1%-100%, 0.2-50%, 0.5-25%, or 1-10%.

[0445] Preferably, HLA-PEPTIDE targets are not generally expressed in most normal tissues. For example, the HLA-PEPTIDE targets may in some cases not be expressed in tissues in the Genotype-Tissue Expression (GTEx) Project, or may in some cases be expressed only in immune privileged or non-essential tissues. Exemplary immune privileged or non-essential tissues include testis, minor salivary glands, the endocervix, and the thyroid. In some cases, an HLA-PEPTIDE target may be deemed to not be expressed on essential tissues or non-immune privileged tissues if the median expression of a gene from which the restricted peptide is derived is less than 0.5 RPKM (Reads Per Kilobase of transcript per Million napped reads) across GTEx samples, if the gene is not expressed with greater than 10 RPKM across GTEX samples, if the gene was expressed at >=5 RPKM in no more two samples across all essential tissue samples, or any combination thereof.

[0446] Exemplary HLA Class I Subtypes of the HLA-PEPTIDE Targets

[0447] In humans, there are many MHC haplotypes (referred to interchangeably herein as MHC subtypes, HLA subtypes, MHC types, and HLA types). Exemplary HLA subtypes include, by way of example only, HLA-A2, HLA-A1, HLA-A3, HLA-A11, HLA-A23, HLA-A24, HLA-A25, HLA-A26, HLA-A28, HLA-A29, HLA-A30, HLA-A31, HLA-A32, HLA-A33, HLA-A34, HLA-68, HLA-B7, HLA-B8, HLA-B40, HLA-B44, HLA-B13, HLA-B15, HLA-B-18, HLA-B27, HLA-B35, HLA-B37, HLA-B38, HLA-B39, HLA-B45, HLA-B46, HLA-B49, HLA-B51, HLA-B54, HLA-B55, HLA-B56, HLA-B57, HLA-B58, HLA-C*01, HLA-C*02, HLA-C*03, HLA-C*04, HLA-C*05, HLA-C*06, HLA-C*07, HLA-C*12, HLA-C*14, HLA-C*16, HLA-Cw8, HLA-A*01:01, HLA-A*02:01, HLA-A*02:03, HLA-A*02:04, HLA-A*02:07, HLA-A*03:01, HLA-A*03:02, HLA-A*11:01, HLA-A*23:01, HLA-A*24:02, HLA-A*25:01, HLA-A*26:01, HLA-A*29:02, HLA-A*30:01, HLA-A*30:02, HLA-A*31:01, HLA-A*32:01, HLA-A*33:01, HLA-A*33:03, HLA-A*68:01, HLA-A*68:02, HLA-B*07:02, HLA-B*08:01, HLA-B*13:02, HLA-B*15:01, HLA-B*15:03, HLA-B*18:01, HLA-B*27:02, HLA-B*27:05, HLA-B*35:01, HLA-B*35:03, HLA-B*37:01, HLA-B*38:01, HLA-B*39:01, HLA-B*40:01, HLA-B*40:02, HLA-B*44:02, HLA-B*44:03, HLA-B*46:01, HLA-B*49:01, HLA-B*51:01, HLA-B*54:01, HLA-B*55:01, HLA-B*56:01, HLA-B*57:01, HLA-B*58:01, HLA-C*01:02, HLA-C*02:02, HLA-C*03:03, HLA-C*03:04, HLA-C*04:01, HLA-C*05:01, HLA-C*06:02, HLA-C*07:01, HLA-C*07:02, HLA-C*07:04, HLA-C*07:06, HLA-C*12:03, HLA-C*14:02, HLA-C*16:01, HLA-C*16:02, HLA-C*16:04, and all subtypes thereof, including, e.g., 4 digit, 6 digit, and 8 digit subtypes. As is known to those skilled in the art there are allelic variants of the above HLA types, all of which are encompassed by the present invention. A full list of HLA Class Alleles can be found on http://hla.alleles.org/alleles/. For example, a full list of HLA Class I Alleles can be found on http://hla.alleles.org/alleles/class1.html.

[0448] HLA-Restricted Peptides

[0449] The HLA-restricted peptides (referred to interchangeably herein) as “restricted peptides” can be peptide fragments of tumor-specific genes, e.g., cancer-specific genes. Preferably, the cancer-specific genes are expressed in cancer samples. Genes which are aberrantly expressed in cancer samples can be identified through a database. Exemplary databases include, by way of example only, The Cancer Genome Atlas (TCGA) Research Network: http://cancergenome.nih.gov/; the International Cancer Genome Consortium: https://dcc.icgc.org/. In some embodiments, the cancer-specific gene has an observed expression of at least 10 RPKM in at least 5 samples from the TCGA database. The cancer-specific gene may have an observable bimodal distribution.

[0450] The cancer-specific gene may have an observed expression of greater than 10, 20, 30, 40, 50, 60, 70, 80, 90, or 100 transcripts per million (TPM) in at least one TCGA tumor tissue. In preferred embodiments, the cancer-specific gene has an observed expression of greater than 100 TPM in at least one TCGA tumor tissue. In some cases, the cancer specific gene has an observed bimodal distribution of expression across TCGA samples. Without wishing to be bound by theory, such bimodal expression pattern is consistent with a biological model in which there is minimal expression at baseline in all tumor samples and higher expression in a subset of tumors experiencing epigenetic dysregulation.

[0451] Preferably, the cancer-specific gene is not generally expressed in most normal tissues. For example, the cancer-specific gene may in some cases not be expressed in tissues in the Genotype-Tissue Expression (GTEx) Project, or may in some cases be expressed in immune privileged or non-essential tissues. Exemplary immune privileged or non-essential tissues include testis, minor salivary glands, the endocervix, and thyroid. In some cases, an cancer-specific gene may be deemed to not be expressed an essential tissues or non-immune privileged tissue if the median expression of the cancer-specific gene is less than 0.5 RPKM (Reads Per Kilobase of transcript per Million napped reads) across GTEx samples, if the gene is not expressed with greater than 10 RPKM across GTEX samples, if the gene was expressed at >=5 RPKM in no more two samples across all essential tissue samples, or any combination thereof.

[0452] In some embodiments, the cancer-specific gene meets the following criteria by assessment of the GTEx: (1) median GTEx expression in brain, heart, or lung is less than 0.1 transcripts per million (TPM), with no one sample exceeding 5 TPM, (2) median GTEx expression in other essential organs (excluding testis, thyroid, minor salivary gland) is less than 2 TPM with no one sample exceeding 10 TPM.

[0453] In some embodiments, the cancer-specific gene is not likely expressed in immune cells generally, e.g., is not an interferon family gene, is not an eye-related gene, not an olfactory or taste receptor gene, and is not a gene related to the circadian cycle (e.g., not a CLOCK, PERIOD, CRY gene).

[0454] The restricted peptide preferably may be presented on the surface of a tumor.

[0455] The restricted peptides may have a size of about 5, about 6, about 7, about 8, about 9, about 10, about 11, about 12, about 13, about 14, or about 15 amino molecule residues, and any range derivable therein. In particular embodiments, the restricted peptide has a size of about 8, about 9, about 10, about 11, or about 12 amino molecule residues. The restricted peptide may be about 5-15 amino acids in length, preferably may be about 7-12 amino acids in length, or more preferably may be about 8-11 amino acids in length.

[0456] Exemplary HLA-PEPTIDE Targets

[0457] Exemplary HLA-PEPTIDE targets are shown in Tables A, A1, and A2. Tables A, A1, and A2 are included in an ASCII text file named GSO-027WO_Informal_Sequence_Tables, which is hereby incorporated by reference in its entirety. In each row of the Tables, the HLA allele and corresponding HLA-restricted peptide sequence of each complex is shown. The peptide sequence can consist of the respective sequence shown in any one of the rows of Tables A, A1, or A2. Alternatively, the peptide sequence can comprise the respective sequence shown in any one of the rows of Tables A, A1, or A2. Alternatively, the peptide sequence can consist essentially of the respective sequence shown in any one of the rows of Tables A, A1, or A2.

[0458] In some embodiments, the HLA-PEPTIDE target is a target as shown in Table A, A1, or A2.

[0459] In some embodiments, the HLA-PEPTIDE target is a target shown in Table A, A1, or A2, with the proviso that the isolated HLA-PEPTIDE target is not any one of Target nos. 6364-6369, 6386-6389, 6500, 6521-6524, or 6578 of Table A2, and is not an HLA-PEPTIDE target found in Table B or Table C.

[0460] In some embodiments, the HLA-restricted peptide is not from a gene selected from WT1 or MART1.

[0461] HLA Class I molecules which do not associate with a restricted peptide ligand are generally unstable. Accordingly, the association of the restricted peptide with the α1/α2 groove of the HLA molecule may stabilize the non-covalent association of the β2-microglobulin subunit of the HLA subtype with the α-subunit of the HLA subtype.

[0462] Stability of the non-covalent association of the β2-microglobulin subunit of the HLA subtype with the α-subunit of the HLA subtype can be determined using any suitable means. For example, such stability may be assessed by dissolving insoluble aggregates of HLA molecules in high concentrations of urea (e.g., about 8M urea), and determining the ability of the HLA molecule to refold in the presence of the restricted peptide during urea removal, e.g., urea removal by dialysis. Such refolding approaches are described in, e.g., Proc. Natl. Acad. Sci. USA Vol. 89, pp. 3429-3433, April 1992, hereby incorporated by reference in its entirety.

[0463] For other example, such stability may be assessed using conditional HLA Class I ligands. Conditional HLA Class I ligands are generally designed as short restricted peptides which stabilize the association of the (32 and a subunits of the HLA Class I molecule by binding to the α1/α2 groove of the HLA molecule, and which contain one or more amino acid modifications allowing cleavage of the restricted peptide upon exposure to a conditional stimulus. Upon cleavage of the conditional ligand, the β2 and α-subunits of the HLA molecule dissociate, unless such conditional ligand is exchanged for a restricted peptide which binds to the α1/α2 groove and stabilizes the HLA molecule. Conditional ligands can be designed by introducing amino acid modifications in either known HLA peptide ligands or in predicted high-affinity HLA peptide ligands. For HLA alleles for which structural information is available, water-accessibility of side chains may also be used to select positions for introduction of the amino acid modifications. Use of conditional HLA ligands may be advantageous by allowing the batch preparation of stable HLA-peptide complexes which may be used to interrogate test restricted peptides in a high throughput manner. Conditional HLA Class I ligands, and methods of production, are described in, e.g., Proc Natl Acad Sci USA. 2008 Mar. 11; 105(10): 3831-3836; Proc Natl Acad Sci USA. 2008 Mar. 11; 105(10): 3825-3830; J Exp Med. 2018 May 7; 215(5): 1493-1504; Choo, J. A. L. et al. Bioorthogonal cleavage and exchange of major histocompatibility complex ligands by employing azobenzene-containing peptides. Angew Chem Int Ed Engl 53, 13390-13394 (2014); Amore, A. et al. Development of a Hypersensitive Periodate-Cleavable Amino Acid that is Methionine- and Disulfide-Compatible and its Application in MHC Exchange Reagents for T Cell Characterisation. ChemBioChem 14, 123-131 (2012); Rodenko, B. et al. Class I Major Histocompatibility Complexes Loaded by a Periodate Trigger. J Am Chem Soc 131, 12305-12313 (2009); and Chang, C. X. L. et al. Conditional ligands for Asian HLA variants facilitate the definition of CD8+ T-cell responses in acute and chronic viral diseases. Eur J Immunol 43, 1109-1120 (2013). These references are incorporated by reference in their entirety.

[0464] Accordingly, in some embodiments, the ability of an HLA-restricted peptide described herein, e.g., described in Table A, A1, or A2, to stabilize the association of the β2- and α-subunits of the HLA molecule, is assessed by performing a conditional ligand mediated-exchange reaction and assay for HLA stability. HLA stability can be assayed using any suitable method, including, e.g., mass spectrometry analysis, immunoassays (e.g., ELISA), size exclusion chromatography, and HLA multimer staining followed by flow cytometry assessment of T cells.

[0465] Other exemplary methods for assessing stability of the non-covalent association of the β2-microglobulin subunit of the HLA subtype with the α-subunit of the HLA subtype include peptide exchange using dipeptides. Peptide exchange using dipeptides has been described in, e.g., Proc Natl Acad Sci USA. 2013 Sep. 17, 110(38):15383-8; Proc Natl Acad Sci USA. 2015 Jan. 6, 112(1):202-7, which is hereby incorporated by reference in its entirety.

[0466] Provided herein are useful antigens comprising an HLA-PEPTIDE target. The HLA-PEPTIDE targets may comprise a specific HLA-restricted peptide having a defined amino acid sequence complexed with a specific HLA subtype allele.

[0467] The HLA-PEPTIDE target may be isolated and/or in substantially pure form. For example, the HLA-PEPTIDE targets may be isolated from their natural environment, or may be produced by means of a technical process. In some cases, the HLA-PEPTIDE target is provided in a form which is substantially free of other peptides or proteins.

[0468] THE HLA-PEPTIDE targets may be presented in soluble form, and optionally may be a recombinant HLA-PEPTIDE target complex. The skilled artisan may use any suitable method for producing and purifying recombinant HLA-PEPTIDE targets. Suitable methods include, e.g., use of E. coli expression systems, insect cells, and the like. Other methods include synthetic production, e.g., using cell free systems. An exemplary suitable cell free system is described in WO2017089756, which is hereby incorporated by reference in its entirety.

[0469] Also provided herein are compositions comprising an HLA-PEPTIDE target.

[0470] In some cases, the composition comprises an HLA-PEPTIDE target attached to a solid support. Exemplary solid supports include, but are not limited to, beads, wells, membranes, tubes, columns, plates, sepharose, magnetic beads, and chips. Exemplary solid supports are described in, e.g., Catalysts 2018, 8, 92; doi:10.3390/cata18020092, which is hereby incorporated by reference in its entirety.

[0471] The HLA-PEPTIDE target may be attached to the solid support by any suitable methods known in the art. In some cases, the HLA-PEPTIDE target is covalently attached to the solid support.

[0472] In some cases, the HLA-PEPTIDE target is attached to the solid support by way of an affinity binding pair. Affinity binding pairs generally involved specific interactions between two molecules. A ligand having an affinity for its binding partner molecule can be covalently attached to the solid support, and thus used as bait for immobilizing Common affinity binding pairs include, e.g., streptavidin and biotin, avidin and biotin; polyhistidine tags with metal ions such as copper, nickel, zinc, and cobalt; and the like.

[0473] The HLA-PEPTIDE target may comprise a detectable label.

[0474] Pharmaceutical compositions comprising HLA-PEPTIDE targets.

[0475] The composition comprising an HLA-PEPTIDE target may be a pharmaceutical composition. Such a composition may comprise multiple HLA-PEPTIDE targets. Exemplary pharmaceutical compositions are described herein. The composition may be capable of eliciting an immune response. The composition may comprise an adjuvant. Suitable adjuvants include, but are not limited to 1018 ISS, alum, aluminium salts, Amplivax, AS15, BCG, CP-870,893, CpG7909, CyaA, dSLIM, GM-CSF, IC30, IC31, Imiquimod, ImuFact IMP321, IS Patch, ISS, ISCOMATRIX, Juvlmmune, LipoVac, MF59, monophosphoryl lipid A, Montanide IMS 1312, Montanide ISA 206, Montanide ISA 50V, Montanide ISA-51, OK-432, OM-174, OM-197-MP-EC, ONTAK, PepTel vector system, PLG microparticles, resiquimod, SRL172, Virosomes and other Virus-like particles, YF-17D, VEGF trap, R848, beta-glucan, Pam3Cys, Aquila's QS21 stimulon (Aquila Biotech, Worcester, Mass., USA) which is derived from saponin, mycobacterial extracts and synthetic bacterial cell wall mimics, and other proprietary adjuvants such as Ribi's Detox. Quil or Superfos. Adjuvants such as incomplete Freund's or GM-CSF are useful. Several immunological adjuvants (e.g., MF59) specific for dendritic cells and their preparation have been described previously (Dupuis M, et al., Cell Immunol. 1998; 186(1):18-27; Allison A C; Dev Biol Stand. 1998; 92:3-11). Also cytokines can be used. Several cytokines have been directly linked to influencing dendritic cell migration to lymphoid tissues (e.g., TNF-alpha), accelerating the maturation of dendritic cells into efficient antigen-presenting cells for T-lymphocytes (e.g., GM-CSF, IL-1 and IL-4) (U.S. Pat. No. 5,849,589, specifically incorporated herein by reference in its entirety) and acting as immunoadjuvants (e.g., IL-12) (Gabrilovich D I, et al., J Immunother Emphasis Tumor Immunol. 1996 (6):414-418). HLA surface expression and processing of intracellular proteins into peptides to present on HLA can also be enhanced by interferon-gamma (IFN-γ). See, e.g., York I A, Goldberg A L, Mo X Y, Rock K L. Proteolysis and class I major histocompatibility complex antigen presentation. Immunol Rev. 1999; 172:49-66; and Rock K L, Goldberg A L. Degradation of cell proteins and the generation of MEW class I-presented peptides. Ann Rev Immunol. 1999; 17: 12. 739-779, which are incorporated herein by reference in their entirety.

[0476] HLA-PEPTIDE ABPs

[0477] Also provided herein are ABPs, e.g., ABPs that specifically bind to HLA-PEPTIDE target as disclosed herein.

[0478] The HLA-PEPTIDE target may be expressed on the surface of any suitable target cell including a tumor cell.

[0479] The ABP can specifically bind to a human leukocyte antigen (HLA)-PEPTIDE target, wherein the HLA-PEPTIDE target comprises an HLA-restricted peptide complexed with an HLA Class I molecule, wherein the HLA-restricted peptide is located in the peptide binding groove of an α1/α2 heterodimer portion of the HLA Class I molecule.

[0480] In some aspects, the ABP does not bind HLA class I in the absence of HLA-restricted peptide. In some aspects, the ABP does not bind HLA-restricted peptide in the absence of human MHC class I. In some aspects, the ABP binds tumor cells presenting human MHC class I being complexed with HLA-restricted peptide, optionally wherein the HLA restricted peptide is a tumor antigen characterizing the cancer.

[0481] An ABP can bind to each portion of an HLA-PEPTIDE complex (i.e., HLA and peptide representing each portion of the complex), which when bound together form a novel target and protein surface for interaction with and binding by the ABP, distinct from a surface presented by the peptide alone or HLA subtype alone. Generally the novel target and protein surface formed by binding of HLA to peptide does not exist in the absence of each portion of the HLA-PEPTIDE complex.

[0482] An ABP can be capable of specifically binding a complex comprising HLA and an HLA-restricted peptide (HLA-PEPTIDE), e.g., derived from a tumor. In some aspects, the ABP does not bind HLA in an absence of the HLA-restricted peptide derived from the tumor. In some aspects, the ABP does not bind the HLA-restricted peptide derived from the tumor in an absence of HLA. In some aspects, the ABP binds a complex comprising HLA and HLA-restricted peptide when naturally presented on a cell such as a tumor cell.

[0483] In some embodiments, an ABP provided herein modulates binding of HLA-PEPTIDE to one or more ligands of HLA-PEPTIDE.

[0484] The ABP may specifically bind to any one of the HLA-PEPTIDE targets as disclosed in Table A, A1, or A2. In some embodiments, the HLA-restricted peptide is not from a gene selected from WT1 or MART1. In some embodiments, the ABP does not specifically bind to any one of Target nos. 6364-6369, 6386-6389, 6500, 6521-6524, or 6578 and does not specifically bind to an HLA-PEPTIDE target found in Table B or Table C.

[0485] In more particular embodiments, the ABP specifically binds to an HLA-PEPTIDE target selected from any one of: HLA subtype A*02:01 complexed with an HLA-restricted peptide comprising the sequence LLASSILCA, HLA subtype A*01:01 complexed with an HLA-restricted peptide comprising the sequence EVDPIGHLY, HLA subtype B*44:02 complexed with an HLA-restricted peptide comprising the sequence GEMSSNSTAL, HLA subtype A*02:01 complexed with an HLA-restricted peptide comprising the sequence GVYDGEEHSV, HLA subtype *01:01 complexed with an HLA-restricted peptide comprising the sequence EVDPIGHVY, HLA subtype HLA-A*01:01 complexed with an HLA-restricted peptide comprising the sequence NTDNNLAVY, HLA subtype B*35:01 complexed with an HLA-restricted peptide comprising the sequence EVDPIGHVY, HLA subtype A*02:01 complexed with an HLA-restricted peptide comprising the sequence AIFPGAVPAA, and HLA subtype A*01:01 complexed with an HLA-restricted peptide comprising the sequence ASSLPTTMNY.

[0486] In more particular embodiments, the ABP specifically binds to an HLA-PEPTIDE target selected from any one of: HLA subtype A*02:01 complexed with an HLA-restricted peptide consisting essentially of the sequence LLASSILCA, HLA subtype A*01:01 complexed with an HLA-restricted peptide consisting essentially of the sequence EVDPIGHLY, HLA subtype B*44:02 complexed with an HLA-restricted peptide consisting essentially of the sequence GEMSSNSTAL, HLA subtype A*02:01 complexed with an HLA-restricted peptide consisting essentially of the sequence GVYDGEEHSV, HLA subtype*01:01 complexed with an HLA-restricted peptide consisting essentially of the sequence EVDPIGHVY, HLA subtype HLA-A*01:01 complexed with an HLA-restricted peptide consisting essentially of the sequence NTDNNLAVY, HLA subtype B*35:01 complexed with an HLA-restricted peptide consisting essentially of the sequence EVDPIGHVY, HLA subtype A*02:01 complexed with an HLA-restricted peptide consisting essentially of the sequence AIFPGAVPAA, and HLA subtype A*01:01 complexed with an HLA-restricted peptide consisting essentially of the sequence ASSLPTTMNY.

[0487] In more particular embodiments, the ABP specifically binds to an HLA-PEPTIDE target selected from any one of: HLA subtype A*02:01 complexed with an HLA-restricted peptide consisting of the sequence LLASSILCA, HLA subtype A*01:01 complexed with an HLA-restricted peptide consisting of the sequence EVDPIGHLY, HLA subtype B*44:02 complexed with an HLA-restricted peptide consisting of the sequence GEMSSNSTAL, HLA subtype A*02:01 complexed with an HLA-restricted peptide consisting of the sequence GVYDGEEHSV, HLA subtype*01:01 complexed with an HLA-restricted peptide consisting of the sequence EVDPIGHVY, HLA subtype HLA-A*01:01 complexed with an HLA-restricted peptide consisting of the sequence NTDNNLAVY, HLA subtype B*35:01 complexed with an HLA-restricted peptide consisting of the sequence EVDPIGHVY, HLA subtype A*02:01 complexed with an HLA-restricted peptide consisting of the sequence AIFPGAVPAA, and HLA subtype A*01:01 complexed with an HLA-restricted peptide consisting of the sequence ASSLPTTMNY.

[0488] In some embodiments, an ABP is an ABP that competes with an illustrative ABP provided herein. In some aspects, the ABP that competes with the illustrative ABP provided herein binds the same epitope as an illustrative ABP provided herein.

[0489] In some embodiments, the ABPs described herein are referred to herein as “variants.” In some embodiments, such variants are derived from a sequence provided herein, for example, by affinity maturation, site directed mutagenesis, random mutagenesis, or any other method known in the art or described herein. In some embodiments, such variants are not derived from a sequence provided herein and may, for example, be isolated de novo according to the methods provided herein for obtaining ABPs. In some embodiments, a variant is derived from any of the sequences provided herein, wherein one or more conservative amino acid substitutions are made. In some embodiments, a variant is derived from any of the sequences provided herein, wherein one or more nonconservative amino acid substitutions are made. Conservative amino acid substitutions are described herein. Exemplary nonconservative amino acid substitutions include those described in J Immunol. 2008 May 1; 180(9):6116-31, which is hereby incorporated by reference in its entirety. In preferred embodiments, the non-conservative amino acid substitution does not interfere with or inhibit the biological activity of the functional variant. In yet more preferred embodiments, the non-conservative amino acid substitution enhances the biological activity of the functional variant, such that the biological activity of the functional variant is increased as compared to the parent ABP.

[0490] ABPs Comprising an Antibody or Antigen-Binding Fragment Thereof

[0491] An ABP may comprise an antibody or antigen-binding fragment thereof.

[0492] In some embodiments, the ABPs provided herein comprise a light chain. In some aspects, the light chain is a kappa light chain. In some aspects, the light chain is a lambda light chain.

[0493] In some embodiments, the ABPs provided herein comprise a heavy chain. In some aspects, the heavy chain is an IgA. In some aspects, the heavy chain is an IgD. In some aspects, the heavy chain is an IgE. In some aspects, the heavy chain is an IgG. In some aspects, the heavy chain is an IgM. In some aspects, the heavy chain is an IgG1. In some aspects, the heavy chain is an IgG2. In some aspects, the heavy chain is an IgG3. In some aspects, the heavy chain is an IgG4. In some aspects, the heavy chain is an IgA1. In some aspects, the heavy chain is an IgA2.

[0494] In some embodiments, the ABPs provided herein comprise an antibody fragment. In some embodiments, the ABPs provided herein consist of an antibody fragment. In some embodiments, the ABPs provided herein consist essentially of an antibody fragment. In some aspects, the ABP fragment is an Fv fragment. In some aspects, the ABP fragment is a Fab fragment. In some aspects, the ABP fragment is a F(ab′)₂ fragment. In some aspects, the ABP fragment is a Fab′ fragment. In some aspects, the ABP fragment is an scFv (sFv) fragment. In some aspects, the ABP fragment is an scFv-Fc fragment. In some aspects, the ABP fragment is a fragment of a single domain ABP.

[0495] In some embodiments, an ABP fragment provided herein is derived from an illustrative ABP provided herein. In some embodiments, an ABP fragments provided herein is not derived from an illustrative ABP provided herein and may, for example, be isolated de novo according to the methods provided herein for obtaining ABP fragments.

[0496] In some embodiments, an ABP fragment provided herein retains the ability to bind the HLA-PEPTIDE target, as measured by one or more assays or biological effects described herein. In some embodiments, an ABP fragment provided herein retains the ability to prevent HLA-PEPTIDE from interacting with one or more of its ligands, as described herein.

[0497] In some embodiments, the ABPs provided herein are monoclonal ABPs. In some embodiments, the ABPs provided herein are polyclonal ABPs.

[0498] In some embodiments, the ABPs provided herein comprise a chimeric ABP. In some embodiments, the ABPs provided herein consist of a chimeric ABP. In some embodiments, the ABPs provided herein consist essentially of a chimeric ABP. In some embodiments, the ABPs provided herein comprise a humanized ABP. In some embodiments, the ABPs provided herein consist of a humanized ABP. In some embodiments, the ABPs provided herein consist essentially of a humanized ABP. In some embodiments, the ABPs provided herein comprise a human ABP. In some embodiments, the ABPs provided herein consist of a human ABP. In some embodiments, the ABPs provided herein consist essentially of a human ABP.

[0499] In some embodiments, the ABPs provided herein comprise an alternative scaffold. In some embodiments, the ABPs provided herein consist of an alternative scaffold. In some embodiments, the ABPs provided herein consist essentially of an alternative scaffold. Any suitable alternative scaffold may be used. In some aspects, the alternative scaffold is selected from an Adnectin™, an iMab, an Anticalin, an EETI-II/AGRP, a Kunitz domain, a thioredoxin peptide aptamer, an Affibody, a DARPin, an Affilin, a Tetranectin, a Fynomer, and an Avimer.

[0500] Also disclosed herein is an isolated humanized, human, or chimeric ABP that competes for binding to an HLA-PEPTIDE with an ABP disclosed herein.

[0501] Also disclosed herein is an isolated humanized, human, or chimeric ABP that binds an HLA-PEPTIDE epitope bound by an ABP disclosed herein.

[0502] In certain aspects, an ABP comprises a human Fc region comprising at least one modification that reduces binding to a human Fc receptor.

[0503] It is known that when an ABP is expressed in cells, the ABP is modified after translation. Examples of the posttranslational modification include cleavage of lysine at the C terminus of the heavy chain by a carboxypeptidase; modification of glutamine or glutamic acid at the N terminus of the heavy chain and the light chain to pyroglutamic acid by pyroglutamylation; glycosylation; oxidation; deamidation; and glycation, and it is known that such posttranslational modifications occur in various ABPs (See Journal of Pharmaceutical Sciences, 2008, Vol. 97, p. 2426-2447, incorporated by reference in its entirety). In some embodiments, an ABP is an ABP or antigen-binding fragment thereof which has undergone posttranslational modification. Examples of an ABP or antigen-binding fragment thereof which have undergone posttranslational modification include an ABP or antigen-binding fragments thereof which have undergone pyroglutamylation at the N terminus of the heavy chain variable region and/or deletion of lysine at the C terminus of the heavy chain. It is known in the art that such posttranslational modification due to pyroglutamylation at the N terminus and deletion of lysine at the C terminus does not have any influence on the activity of the ABP or fragment thereof (Analytical Biochemistry, 2006, Vol. 348, p. 24-39, incorporated by reference in its entirety).

### Multispecific ABPs

[0504] In some embodiments, the ABPs provided herein are multispecific ABPs.

[0505] In some embodiments, a multispecific ABP provided herein binds more than one antigen. In some embodiments, a multispecific ABP binds 2 antigens. In some embodiments, a multispecific ABP binds 3 antigens. In some embodiments, a multispecific ABP binds 4 antigens. In some embodiments, a multispecific ABP binds 5 antigens.

[0506] In some embodiments, a multispecific ABP provided herein binds more than one epitope on a HLA-PEPTIDE antigen. In some embodiments, a multispecific ABP binds 2 epitopes on a HLA-PEPTIDE antigen. In some embodiments, a multispecific ABP binds 3 epitopes on a HLA-PEPTIDE antigen.

[0507] In some embodiments, the multispecific ABP comprises an antigen-binding domain (ABD) that specifically binds to an HLA-PEPTIDE target and an additional ABD that binds to an additional antigen. The HLA-PEPTIDE target may be a target selected from Table A, Table A1, or Table A2.

[0508] In some embodiments, the additional antigen is a cell surface molecule present on a T cell or natural killer (NK) cell. In some embodiments, the additional antigen is a cell surface molecule present on a T cell. In some embodiments, the additional antigen is a cell surface molecule present on an NK cell.

[0509] In some embodiments, the cell surface molecule present on the T cell is CD3, optionally CD3c.

[0510] The additional ABD may be an antibody or antigen-binding fragment thereof that binds to CD3, optionally CD3c. Antibodies that specifically bind CD3, e.g., CD3c include, e.g., foralumab, which is described in U.S. Pat. No. 9,850,304, which is fully incorporated by reference in its entirety. Other exemplary CD3 antibodies include OKT3. Other exemplary CD3 antibodies include humanized versions of OKT3. Other exemplary CD3 antibodies include SP34. Other exemplary CD3 antibodies include humanized versions of SP34. Other exemplary CD3 antibodies include CRIS7. OKT3 is described in Kung P et al., Monoclonal antibodies defining distinctive human T cell surface antigens. Science 206(4416), 347-349 (1979), which is hereby incorporated by reference in its entirety. Other CD3 antibodies and antigen-binding fragments are described in Kuhn and Weiner, Immunotherapy (2016) 8(8), 889-906, which is hereby incorporated by reference in its entirety.

[0511] In some embodiments, the additional ABD comprises the VH sequence QVQLVESGGGVVQPGRSLRLSCAASGFTFRSYGMHWVRQAPGKGLEWVAIIWYDGSK KNYADSVKGRFTISRDNSKNTLYLQMNSLRAEDTAVYYCARGTGYNWFDPWGQGTLV TVSS and the VL sequence

EIVLTQSPRTLSLSPGERATLSCRASQSVSSSYLAWYQQKPGQAPRLLIY
GASSRATGIPDRFSGSGSGTDFTLTISRLDPEDFAVYYCQQYGSSPITFG
QGTRLEIK.

[0512] In some embodiments, the additional ABD comprises a VH CDR1 comprising the amino acid sequence SYGMH; a VH CDR2 comprising the amino acid sequence of IIWYDGSKKNYADSVKG; a VH CDR3 comprising the amino acid sequence of GTGYNWFDP; a VL CDR1 comprising the amino acid sequence of RASQSVSSSYLA; a VL CDR2 comprising the amino acid sequence of GASSRAT; and a VL CDR3 comprising the amino acid sequence of QQYGSSPIT, according to the Kabat or Chothia numbering scheme.

[0513] In some embodiments, the additional ABD comprises the VH sequence QVQLVESGGGVVQPGRSLRLSCAASGFTFRSYGMHWVRQAPGKGLEWVAIIWYDG SKKNYADSVKGRFTISRDNSKNTLYLQMNSLRAEDTAVYYCARGTGYNWFDPWGQ GTLVTVSS and the VL sequence

EIVLTQSPRTLSLSPGERATLSCRASQSVSSSYLAWYQQKPGQAPRLLIY
GASSRATGIPDRFSGSGSGTDFTLTISRLDPEDFAVYYCQQYGSSPITFG
QGTRLEIK.

[0514] In some embodiments, the additional ABD comprises a VH CDR1 comprising the amino acid sequence RYTMH; a VH CDR2 comprising the amino acid sequence YINPSRGYTNYNQKFKD; a VH CDR3 comprising the amino acid sequence YYDDHYSLDY; a VL CDR1 comprising the amino acid sequence SASSSVSYMN; a VL CDR2 comprising the amino acid sequence DTSKLAS; and a VL CDR3 comprising the amino acid sequence QQWSSNPFT, according to the Kabat numbering system.

[0515] In some embodiments, the additional ABD comprises the VH sequence QVQLVQSGAEVKKPGASVKVSCKASGYTFTRYTMHWVRQAPGQGLEWMGYINPS RGYTNYNQKFKDRVTLTTDKSSSTAYMELSSLRSEDTAVYYCARYYDDHYSLDYW GQGTLVTVSS and the VL sequence

DIQMTQSPSSLSASVGDRVTITCSASSSVSYMNWYQQKPGKAPKRLIYDT
SKLASGVPSRFSGSGSGTDFTLTISSLQPEDFATYYCQQWSSNPFTFGQG
TKLEIK.

[0516] In some embodiments, the additional ABD comprises a VH CDR1 comprising the amino acid sequence YTFTRYTMH; a VH CDR2 comprising the amino acid sequence GYINPSRGYTNYN; a VH CDR3 comprising the amino acid sequence CARYYDDHYSLDYW; a VL CDR1 comprising the amino acid sequence SASSSVSYMN; a VL CDR2 comprising the amino acid sequence DTSKLAS; and a VL CDR3 comprising the amino acid sequence CQQWSSNPFTF, according to the Kabat numbering scheme.

[0517] In some embodiments, the additional ABD comprises the VH sequence EVQLVESGGGLVQPGGSLRLSCAASGFTFSTYAMNWVRQAPGKGLEWVGRIRSKY NNYATYYADSVKGRFTISRDDSKNTLYLQMNSLRAEDTAVYYCVRHGNFGDSYVS WFAYWGQGTLVTVSS and the VL sequence

QAVVTQEPSLTVSPGGTVTLTCGSSTGAVTTSNYANWVQQKPGKSPRGLI
GGTNKRAPGVPARFSGSLLGGKAALTISGAQPEDEADYYCALWYSNHWVF
GGGTKLTVL.

[0518] In some embodiments, the additional ABD comprises a VH CDR1 comprising the amino acid sequence FTFSTYAMNWVRQAPGKGLE; a VH CDR2 comprising the amino acid sequence TYYADSVKGRFTISRD; a VH CDR3 comprising the amino acid sequence CVRHGNFGDSYVSWFAYW; a VL CDR1 comprising the amino acid sequence GSSTGAVTTSNYAN; a VL CDR2 comprising the amino acid sequence GTNKRAP; and a VL CDR3 comprising the amino acid sequence CALWYSNHWVF, according to the Kabat numbering scheme.

[0519] The additional ABD may be an antibody or antigen-binding fragment thereof that binds to another domain of the TCR complex, such as, e.g., CD3 delta, CD3 gamma, or major domains including TCR alpha or TCR beta, or any combination thereof. The additional ABD may be an antibody or antigen-binding fragment thereof that binds to CD3 zeta, CD4, or CD8, or any combination thereof.

[0520] In some embodiments, the cell surface molecule present on the NK cell is CD16. Accordingly, the additional ABD may comprise an antibody, antigen-binding fragment thereof, or alternative scaffold that specifically binds CD16. In some embodiments, the additional ABD comprises an antibody or antigen-binding fragment thereof as described in U.S. Pat. No. 9,035,026, which is hereby incorporated by reference in its entirety.

[0521] In some embodiments, the multispecific ABP comprises an additional ABD capable of specifically binding an immunomodulatory protein, e.g., an immune checkpoint inhibitor. Exemplary immune checkpoint inhibitors include, e.g., PD1, PDL1, CTLA-4, PDL2, B7-H3, B7-H4, BTLA, BY55, VISTA, TIM3, GAL5, LAG3, KIR, 2B4, and CGEN-15049. In some embodiments, the multispecific ABP comprises an additional ABD capable of specifically binding 41BB.

[0522] In some embodiments, the multispecific ABP comprises an additional ABD capable of specifically binding an immunomodulatory protein that enhances immune function. Exemplary immunomodulatory proteins that enhance immune function include, e.g., 41BB, CD28, GITR, OX40, CD40, CD27, and ICOS.

[0523] Many multispecific ABP constructs are known in the art, and the ABPs provided herein may be provided in the form of any suitable multispecific construct.

[0524] In some embodiments, the multispecific ABP comprises an immunoglobulin comprising at least two different heavy chain variable regions each paired with a common light chain variable region (i.e., a “common light chain ABP”). The common light chain variable region forms a distinct antigen-binding domain with each of the two different heavy chain variable regions. See Merchant et al., Nature Biotechnol., 1998, 16:677-681, incorporated by reference in its entirety.

[0525] In some embodiments, the multispecific ABP comprises an immunoglobulin comprising an ABP or fragment thereof attached to one or more of the N- or C-termini of the heavy or light chains of such immunoglobulin. See Coloma and Morrison, Nature Biotechnol., 1997, 15:159-163, incorporated by reference in its entirety. In some aspects, such ABP comprises a tetravalent bispecific ABP.

[0526] In some embodiments, the multispecific ABP comprises a hybrid immunoglobulin comprising at least two different heavy chain variable regions and at least two different light chain variable regions. See Milstein and Cuello, Nature, 1983, 305:537-540; and Staerz and Bevan, Proc. Natl. Acad. Sci. USA, 1986, 83:1453-1457; each of which is incorporated by reference in its entirety.

[0527] In some embodiments, the multispecific ABP comprises immunoglobulin chains with alterations to reduce the formation of side products that do not have multispecificity. In some aspects, the ABPs comprise one or more “knobs-into-holes” modifications as described in U.S. Pat. No. 5,731,168, incorporated by reference in its entirety.

[0528] In some embodiments, the multispecific ABP comprises immunoglobulin chains with one or more electrostatic modifications to promote the assembly of Fc hetero-multimers. See WO 2009/089004, incorporated by reference in its entirety.

[0529] In some embodiments, the multispecific ABP comprises a bispecific single chain molecule. See Traunecker et al., EMBO J., 1991, 10:3655-3659; and Gruber et al., J. Immunol., 1994, 152:5368-5374; each of which is incorporated by reference in its entirety.

[0530] In some embodiments, the multispecific ABP comprises a heavy chain variable domain and a light chain variable domain connected by a polypeptide linker, where the length of the linker is selected to promote assembly of multispecific ABP with the desired multispecificity. For example, monospecific scFvs generally form when a heavy chain variable domain and light chain variable domain are connected by a polypeptide linker of more than 12 amino acid residues. See U.S. Pat. Nos. 4,946,778 and 5,132,405, each of which is incorporated by reference in its entirety. In some embodiments, reduction of the polypeptide linker length to less than 12 amino acid residues prevents pairing of heavy and light chain variable domains on the same polypeptide chain, thereby allowing pairing of heavy and light chain variable domains from one chain with the complementary domains on another chain. The resulting ABP therefore has multispecificity, with the specificity of each binding site contributed by more than one polypeptide chain. Polypeptide chains comprising heavy and light chain variable domains that are joined by linkers between 3 and 12 amino acid residues form predominantly dimers (termed diabodies). With linkers between 0 and 2 amino acid residues, trimers (termed triabodies) and tetramers (termed tetrabodies) are favored. However, the exact type of oligomerization appears to depend on the amino acid residue composition and the order of the variable domain in each polypeptide chain (e.g., V_{H}-linker-V_{L} vs. V_{L}-linker-V_{H}), in addition to the linker length. A skilled person can select the appropriate linker length based on the desired multispecificity.

[0531] In some embodiments, the multispecific ABP comprises a diabody. See Hollinger et al., Proc. Natl. Acad. Sci. USA, 1993, 90:6444-6448, and U.S. Pat. No. 7,129,330, each of which is incorporated by reference in its entirety. In some embodiments, the multispecific ABP comprises a triabody. See Todorovska et al., J. Immunol. Methods, 2001, 248:47-66, incorporated by reference in its entirety. In some embodiments, the multispecific ABP comprises a tetrabody. See id, incorporated by reference in its entirety. In some embodiments, the multispecific ABP comprises a tandem diabody. See Kipriyanov S M et al., J Mol Biol. 1999 Oct. 15; 293(1):41-56 which is hereby incorporated by reference in its entirety.

[0532] In some embodiments, the multispecific ABP comprises a trispecific F(ab′)3 derivative. See Tutt et al. J. Immunol., 1991, 147:60-69, incorporated by reference in its entirety.

[0533] In some embodiments, the multispecific ABP comprises a cross-linked antibody. See U.S. Pat. No. 4,676,980; Brennan et al., Science, 1985, 229:81-83; Staerz, et al. Nature, 1985, 314:628-631; and EP 0453082; each of which is incorporated by reference in its entirety.

[0534] In some embodiments, the multispecific ABP comprises antigen-binding domains assembled by leucine zippers. See Kostelny et al., J. Immunol., 1992, 148:1547-1553, incorporated by reference in its entirety.

[0535] In some embodiments, the multispecific ABP comprises complementary protein domains. In some aspects, the complementary protein domains comprise an anchoring domain (AD) and a dimerization and docking domain (DDD). In some embodiments, the AD and DDD bind to each other and thereby enable assembly of multispecific antibody structures via the “dock and lock” (DNL) approach. Antibodies of many specificities may be assembled, including bispecific antibodies, trispecific antibodies, tetraspecific antibodies, quintspecific antibodies, and hexaspecific antibodies. Multispecific antibodies comprising complementary protein domains are described, for example, in U.S. Pat. Nos. 7,521,056; 7,550,143; 7,534,866; and 7,527,787; each of which is incorporated by reference in its entirety.

[0536] In some embodiments, the multispecific ABP comprises a dual action Fab (DAF) antibody as described in U.S. Pat. Pub. No. 2008/0069820, incorporated by reference in its entirety.

[0537] In some embodiments, the multispecific ABP comprises an antibody formed by reduction of two parental molecules followed by mixing of the two parental molecules and reoxidation to assembly a hybrid structure. See Carlring et al., PLoS One, 2011, 6:e22533, incorporated by reference in its entirety.

[0538] In some embodiments, the multispecific ABP comprises a DVD-Ig™. A DVD-Ig™ is a dual variable domain immunoglobulin that can bind to two or more antigens. DVD-Igs™ are described in U.S. Pat. No. 7,612,181, incorporated by reference in its entirety.

[0539] In some embodiments, the multispecific ABP comprises a DART™. DARTs™ are described in Moore et al., Blood, 2011, 117:454-451, incorporated by reference in its entirety.

[0540] In some embodiments, the multispecific ABP comprises a DuoBody®. DuoBodies® are described in Labrijn et al., Proc. Natl. Acad. Sci. USA, 2013, 110:5145-5150; Gramer et al., mAbs, 2013, 5:962-972; and Labrijn et al., Nature Protocols, 2014, 9:2450-2463; each of which is incorporated by reference in its entirety.

[0541] In some embodiments, the multispecific ABP comprises an antibody fragment attached to another antibody or fragment. The attachment can be covalent or non-covalent. When the attachment is covalent, it may be in the form of a fusion protein or via a chemical linker. Illustrative examples of multispecific antibodies comprising antibody fragments attached to other antibodies include tetravalent bispecific antibodies, where an scFv is fused to the C-terminus of the C_{H3} from an IgG. See Coloma and Morrison, Nature Biotechnol., 1997, 15:159-163. Other examples include antibodies in which a Fab molecule is attached to the constant region of an immunoglobulin. See Miler et al., J. Immunol., 2003, 170:4854-4861, incorporated by reference in its entirety. Any suitable fragment may be used, including any of the fragments described herein or known in the art.

[0542] In some embodiments, the multispecific ABP comprises a CovX-Body. CovX-Bodies are described, for example, in Doppalapudi et al., Proc. Natl. Acad. Sci. USA, 2010, 107:22611-22616, incorporated by reference in its entirety.

[0543] In some embodiments, the multispecific ABP comprises an Fcab antibody, where one or more antigen-binding domains are introduced into an Fc region. Fcab antibodies are described in Wozniak-Knopp et al., Protein Eng. Des. Sel., 2010, 23:289-297, incorporated by reference in its entirety.

[0544] In some embodiments, the multispecific ABP comprises a TandAb® antibody. TandAb® antibodies are described in Kipriyanov et al., J. Mol. Biol., 1999, 293:41-56 and Zhukovsky et al., Blood, 2013, 122:5116, each of which is incorporated by reference in its entirety. In some embodiments, the multispecific ABP is a TandAb® comprising, in an N→C direction, a first Fv, a second Fv, a third Fv, and a fourth Fv, wherein the first Fv is attached, indirectly or directly, to the second Fv, the second Fv is attached, indirectly or directly, to the third Fv, and the third Fv is attached, indirectly or directly, to the fourth Fv. In some embodiments, the first and fourth Fvs specifically bind a cell surface marker present on a T cell or NK cell, e.g., CD3 or CD16, and the second and third Fvs specifically bind an HLA-PEPTIDE target.

[0545] In some embodiments, the multispecific ABP comprises a tandem Fab. Tandem Fabs are described in WO 2015/103072, incorporated by reference in its entirety.

[0546] In some embodiments, the multispecific ABP comprises a Zybody™. Zybodies™ are described in LaFleur et al., mAbs, 2013, 5:208-218, incorporated by reference in its entirety.

[0547] In some embodiments, the multispecific ABP is a BEAT® molecule, which is described in U.S. Pat. No. 9,683,052, and in Moretti P et al., BMC Proceedings 2013 7 (Suppl 6):O9, available at https://doi.org/10.1186/1753-6561-7-S6-O9, each of which is hereby incorporated by reference in its entirety.

[0548] In some embodiments, the multispecific ABP is a trivalent, bispecific ABP comprising a first and a second scFv that specifically binds an HLA-PEPTIDE target and a Fab fragment that specifically binds another target, e.g., a cell surface molecule present on the surface of a T cell or NK cell. In some embodiments, the multispecific ABP comprises a first polypeptide and a second polypeptide, wherein the first polypeptide comprises the first scFv and the second polypeptide comprises the second scFv and the Fab fragment, wherein the second scFv is attached, directly or indirectly, to the N-terminus of the Fab fragment. In some embodiments, the first scFv and the Fab fragment are connected, directly or indirectly, to an Fc domain, the Fc domain optionally comprising a knob-hole or other orthogonal mutation.

[0549] Also provided herein is a trivalent, bispecific ABP comprising a first and second scFv that specifically binds a first target antigen and a Fab fragment that specifically binds a second target antigen, wherein the multispecific ABP comprises a first polypeptide and a second polypeptide, wherein the first polypeptide comprises the first scFv and the second polypeptide comprises the second scFv and the Fab fragment, wherein the second scFv is attached, directly or indirectly, to the N-terminus of the Fab fragment. In some embodiments, the first scFv and the Fab fragment are connected, directly or indirectly, to an Fc domain, the Fc domain optionally comprising a knob-hole or other orthogonal mutation.

[0550] In some embodiments of the trivalent, bispecific ABP, a variable domain of the first scFv interacts with a variable domain of the second scFv. In some embodiments, the VH domain of the first scFv interacts with the VL domain of the second scFv. In some embodiments, the VL domain of the first scFv interacts with the VH domain of the second scFv. In some embodiments, the VL domain of the first scFv interacts with the VH domain of the second scFv and wherein the VH domain of the first scFv interacts with the VL domain of the second scFv. In some embodiments, the interaction of the VL domain of the first scFv with the VH domain of the second scFv and the interaction of the VH domain of the first scFv with the VL domain of the second scFv results in a circularized conformation. In some embodiments, proteolysis of a purified population of the isolated multispecific ABP with a cysteine protease that digests human IgG1 at one specific site above the hinge (KSCDKT/HTCPPC) produces a fragment comprising the first scFv, the second scFv, and the Fab. some embodiments, the fragment comprising the first scFv, the second scFv, and the Fab binds to Protein A and exhibits a retention time that aligns with retention time of the isolated multispecific ABP which has not been digested with the cysteine protease, as measured by SEC-HPLC.

[0551] In some embodiments of the trivalent, bispecific ABP, the VL domain of the first scFv interacts with the VH domain of the first scFv, and wherein the VL domain of the second scFv interacts with the VH domain of the second scFv. In some embodiments, proteolysis of a purified population of the isolated multispecific ABP with a cysteine protease that digests human IgG1 at one specific site above the hinge (KSCDKT/HTCPPC) produces (i) a first fragment comprising the first scFv and the Fc domain, and (ii) a second fragment comprising the second scFv and the Fab. In some embodiments, the first fragment binds to Protein A and exhibits a retention time that is greater than retention time of the isolated multispecific ABP which has not been digested with the cysteine protease, as measured by SEC-HPLC. In some embodiments, the second fragment does not bind to Protein A and exhibits a retention time that is greater than retention time of the isolated multispecific ABP which has not been digested with the cysteine protease, as measured by SEC-HPLC. In some embodiments, the VH domain of the first scFv comprises a cysteine at amino acid residue 44 of the VH domain according to the Kabat numbering system and wherein the VL domain of the first scFv comprises a cysteine residue at amino acid residue 100 of the VL domain according to the Kabat numbering system. In some embodiments, the VH domain of the second scFv comprises a cysteine at amino acid residue 44 of the VH domain according to the Kabat numbering system and wherein the VL domain of the second scFv comprises a cysteine residue at amino acid residue 100 of the VL domain according to the Kabat numbering system. In some embodiments, the VH domains of the first and second scFv each comprise a cysteine at amino acid residue 44 of the VH domain according to the Kabat numbering system and wherein the VL domain of the first and second scFv each comprise a cysteine residue at amino acid residue 100 of the VL domain according to the Kabat numbering system.

[0552] In some embodiments, the multispecific ABP comprises a first scFv and a second scFv that each specifically bind a first target antigen, a Fab that specifically binds an additional antigen that is distinct from the first target antigen, and an Fc domain, wherein the ABP comprises a first polypeptide, a second polypeptide, and a third polypeptide, wherein the first polypeptide comprises, in an N→C direction, the first scFv -optional linker-CH2-CH3, wherein the second polypeptide comprises, in an N→C direction, a VH domain of the Fab-a CH1 domain of the Fab-CH2-CH3, wherein the third polypeptide comprises, in an N→C direction, a VL domain of the Fab-a CL domain of the Fab, and wherein the second scFv is attached, directly or indirectly, to the N-terminus of the second polypeptide or the third polypeptide, wherein the VL domain of the first scFv interacts with the VH domain of the second scFv, and wherein the VH domain of the first scFv interacts with the VL domain of the second scFv.

[0553] In some embodiments, the multispecific ABP comprises a single domain antibody. Single domain antibodies are described herein. For example, the first ABD, second ABD, or first and second ABD may comprise a single domain antibody. In some embodiments, the multispecific ABP comprises a first ABD comprising an scFv and a second ABD comprising a single domain antibody. In some embodiments, the multispecific ABP comprises a first ABD comprising a Fab and a second ABD comprising a single domain antibody. In some embodiments, the first ABD and second ABD are attached to an Fc region. In some embodiments, the multispecific ABP further comprises a third ABD which is an scFv or Fab attached, directly or indirectly, to the N-terminus of the single domain antibody. In some embodiments, the C-terminus of the first and second ABDs are attached to the N-terminus of the Fc region. In particular embodiments, the Fc region comprises one or more modifications that promote heterodimerization, e.g., a knob-in-hole modification, a charged pair mutation. In some embodiments, the single domain antibody of the first ABD is a fully human VH single domain. In some embodiments, the second ABD is capable of selectively binding a cell surface protein of a T cell, e.g., CD3, or a cell surface protein of an NK cell, e.g., CD16.

[0554] In some embodiments, the multispecific ABP comprises a human heavy chain antibody. Human heavy chain antibodies are described in Clark et al., Front Immunol. 2019 Jan. 7; 9:3037. doi: 10.3389/fimmu.2018.03037, which is incorporated by reference in its entirety.

[0555] In some embodiments, the multispecific ABP comprises an alternative scaffold. Alternative scaffolds are described herein.

[0556] In some embodiments, the multispecific ABP comprises one or more anticalins. Anticalins, as well as methods of making anticalins, are described in, e.g., U.S. Pat. Nos. 7,250,297 and 7,585,940, each of which is hereby incorporated by reference in its entirety. In some embodiments, the multispecific ABP is a multispecific anticalin-based fusion protein. Multispecific anticalin-based fusion proteins can include, e.g., multispecific Fc-anticalin proteins, pure anticalin proteins comprising two or more anticalins attached by one or more linkers, and multispecific fusion proteins comprising one or more anticalins fused, directly or indirectly, with an antibody or antigen-binding fragment thereof. Exemplary multispecific ABPs comprising one or more anticalins are described in e.g., Rothe C, Skerra A. Anticalin® Proteins as Therapeutic Agents in Human Diseases. BioDrugs. 2018; 32(3):233-243, which is hereby incorporated by reference in its entirety. In some embodiments, an anticalin of the multispecific ABP is capable of specifically binding an HLA-PEPTIDE target. In some embodiments, an anticalin of the multispecific ABP is capable of binding the additional antigen.

[0557] In some embodiments, the multispecific ABP is a BiTE, wherein the first ABD is a first scFv and wherein the additional ABD is a second scFv. In some embodiments, the first scFv and the second scFv are attached via a linker. In some embodiments, the BiTE comprises, in an N→C direction, the first scFv—the linker—the second scFv. In some embodiments, the BiTE comprises, in an N→C direction, the second scFv—the linker—the first scFv. In some embodiments, the linker comprises (GGGGS)_{N}, wherein _{N}=1-10. In some embodiments, _{N}=1-4. In some embodiments, _{N}=1.

[0558] Also provided herein is a trivalent, multispecific ABP comprising a first scFv and a second scFv that each specifically bind a first target antigen, a Fab that specifically binds a second target antigen that is distinct from the first target antigen, and an Fc domain. In some embodiments, the multispecific ABP is a trivalent, multispecific ABP comprising a first scFv and a second scFv that each specifically bind the first target antigen and a Fab that specifically binds the additional antigen. In some embodiments, the ABP comprises a first polypeptide, a second polypeptide, and a third polypeptide, wherein the first polypeptide comprises, in an N→C direction, the first scFv -optional linker-CH2-CH3, wherein the second polypeptide comprises, in an N→C direction, a VH domain of the Fab-a CH1 domain of the Fab-CH2-CH3, wherein the third polypeptide comprises, in an N→C direction, a VL domain of the Fab-a CL domain of the Fab, and wherein the second scFv is attached, directly or indirectly, to the N-terminus of the second polypeptide or the third polypeptide. In some embodiments, the second scFv is attached, directly or indirectly, to the N-terminus of the second polypeptide. In some embodiments, the second scFv is attached, directly or indirectly, to the N-terminus of the third polypeptide. In some embodiments, the first scFv and the second scFv each bind to an HLA-PEPTIDE target. In some embodiments, the first scFv and the second scFv each bind to the same HLA-PEPTIDE target. In some embodiments, the first scFv and the second scFv each bind to the same epitope of the HLA-PEPTIDE target. In some embodiments, the first scFv and the second scFv each comprise identical CDR sequences. In some embodiments, the first scFv and the second scFv each comprise identical VH and VL sequences. In some embodiments, the linker comprises (GGGGS)_{N}, wherein _{N}=1-10. In some embodiments, _{N}=1-4. In some embodiments, _{N}=2.

[0559] In some embodiments, the multispecific ABP comprises an scFv and a Fab, wherein the ABP comprises a first polypeptide, a second polypeptide, and a third polypeptide, wherein the first polypeptide comprises, in an N→C direction, the first scFv —CH2-CH3, wherein the second polypeptide comprises, in an N→C direction, a VH domain of the Fab-a CH1 domain of the Fab-CH2-CH3, wherein the third polypeptide comprises, in an N→C direction, a VL domain of the Fab-a CL domain of the Fab. In some embodiments, the first ABD comprises the scFv and the additional ABD comprises the Fab. In some embodiments, the first ABD comprises the Fab and the additional ABD comprises the scFv. In some embodiments, the scFv is attached to CH2 via the linker. In some embodiments, the linker comprises (GGGGS)_{N}, wherein _{N}=1-10. In some embodiments, _{N}=1-4. In some embodiments, _{N}=1.

[0560] In some embodiments, the multispecific ABP comprises a first and second scFv and a first and second Fab, wherein the multispecific ABP comprises a first polypeptide, a second polypeptide, a third polypeptide, and a fourth polypeptide, wherein the first polypeptide comprises, in an N→C direction, a VH domain of the first Fab-CH1-CH2-CH3-optional linker-the first scFv, wherein the second polypeptide comprises, in an N→C direction, a VH domain of the second Fab-CH1-CH2-CH3-optional linker-the second scFv, wherein the third polypeptide comprises, in an N→C direction, a VL domain of the first Fab-a Cl domain of the first Fab, and wherein the fourth polypeptide comprises, in an N→C direction, a VL domain of the second Fab-a Cl domain of the second Fab. In some embodiments, the first scFv and the second scFv each bind to an HLA-PEPTIDE target. In some embodiments, the first scFv and the second scFv each bind to the same HLA-PEPTIDE target. In some embodiments, the first scFv and the second scFv each bind to the same epitope of the HLA-PEPTIDE target. In some embodiments, the first scFv and the second scFv each comprise identical CDR sequences. In some embodiments, the first scFv and the second scFv each comprise identical VH and VL sequences. In some embodiments, the first Fab and the second Fab each bind the additional antigen. In some embodiments, the first Fab and the second Fab each bind to the same epitope of the additional antigen. In some embodiments, the first Fab and the second Fab each comprise identical CDR sequences. In some embodiments, the first Fab and the second Fab each comprise identical VH and VL sequences. In some embodiments, the first and second polypeptide chains are identical and the third and fourth polypeptide chains are identical. In some embodiments, the first polypeptide comprises, in an N→C direction, a VH domain of the first Fab-CH1-CH2-CH3-linker-the first scFv. In some embodiments, the second polypeptide comprises, in an N→C direction, a VH domain of the second Fab-CH1-CH2-CH3-linker-the second scFv. In some embodiments, the linker comprises (GGGGS)_{N}, wherein _{N}=1-10. In some embodiments, _{N}=1-4. In some embodiments, _{N}=2.

[0561] In some embodiments, the multispecific ABP comprises an scFv and a Fab, wherein the ABP comprises a first polypeptide, a second polypeptide, and a third polypeptide, wherein the first polypeptide comprises, in an N→C direction, optional hinge-CH2-CH3, wherein the second polypeptide comprises, in an N→C direction, a VH domain of the Fab-a CH1 domain of the Fab-CH2-CH3, wherein the third polypeptide comprises, in an N→C direction, a VL domain of the Fab-a CL domain of the Fab, and wherein the scFv is attached, directly or indirectly, to the N-terminus of the second polypeptide or the third polypeptide. In some embodiments, the scFv is attached, directly or indirectly, to the N-terminus of the second polypeptide. In some embodiments, the scFv is attached, directly or indirectly, to the N-terminus of the third polypeptide. In some embodiments, the first ABD comprises the scFv and the additional ABD comprises the Fab. In some embodiments, the first ABD comprises the Fab and the additional ABD comprises the scFv. In some embodiments, the scFv is attached to the N-terminus of the second polypeptide or the third polypeptide via a linker. In some embodiments, the linker comprises (GGGGS)_{N}, wherein _{N}=1-10. In some embodiments, _{N}=1-4. In some embodiments, _{N}=2.

[0562] In some embodiments, the multispecific ABP comprises a first and second scFv and a first and second Fab, wherein the multispecific ABP comprises a first polypeptide, a second polypeptide, a third polypeptide, and a fourth polypeptide, wherein the first polypeptide comprises, in an N→C direction, a VH domain of the first Fab-CH1-CH2-CH3, wherein the second polypeptide comprises, in an N→C direction, a VH domain of the second Fab-CH1-CH2-CH3, wherein the third polypeptide comprises, in an N→C direction, a VL domain of the first Fab-a Cl domain of the first Fab, and wherein the fourth polypeptide comprises, in an N→C direction, a VL domain of the second Fab-a Cl domain of the second Fab, and wherein the first scFv is attached, directly or indirectly, to the N-terminus of the first or third polypeptide, and wherein the second scFv is attached, directly or indirectly, to the N-terminus of the second or fourth polypeptide. In some embodiments, the first scFv is attached, directly or indirectly, to the N-terminus of the first polypeptide. In some embodiments, the first scFv is attached, directly or indirectly, to the N-terminus of the third polypeptide. In some embodiments, the second scFv is attached, directly or indirectly, to the N-terminus of the second polypeptide. In some embodiments, the first scFv is attached, directly or indirectly, to the N-terminus of the fourth polypeptide. In some embodiments, the first scFv and the second scFv each bind to an HLA-PEPTIDE target. In some embodiments, the first scFv and the second scFv each bind to the same HLA-PEPTIDE target. In some embodiments, the first scFv and the second scFv each bind to the same epitope of the HLA-PEPTIDE target. In some embodiments, the first scFv and the second scFv each comprise identical CDR sequences. In some embodiments, the first scFv and the second scFv each comprise identical VH and VL sequences. In some embodiments, the first Fab and the second Fab each bind the additional antigen. In some embodiments, the first Fab and the second Fab each bind to the same epitope of the additional antigen. In some embodiments, the first Fab and the second Fab each comprise identical CDR sequences. In some embodiments, the first Fab and the second Fab each comprise identical VH and VL sequences. In some embodiments, the first and second polypeptide chains are identical and the third and fourth polypeptide chains are identical. In some embodiments, the first scFv is attached to the N-terminus of the first or third polypeptide via a linker. In some embodiments, the second scFv is attached to the N-terminus of the second or fourth polypeptide via a linker. In some embodiments, the linker comprises (GGGGS)_{N}, wherein _{N}=1-10. In some embodiments, _{N}=1-4. In some embodiments, _{N}=2.

### Fc Region and Variants

[0563] In certain embodiments, a multispecific ABP provided herein comprises an Fc region. An Fc region can be wild-type or a variant thereof. In certain embodiments, an ABP provided herein comprises an Fc region with one or more amino acid substitutions, insertions, or deletions in comparison to a naturally occurring Fc region. In some aspects, such substitutions, insertions, or deletions yield ABP with altered stability, glycosylation, or other characteristics. In some aspects, such substitutions, insertions, or deletions yield a glycosylated ABP.

[0564] A “variant Fc region” or “engineered Fc region” comprises an amino acid sequence that differs from that of a native-sequence Fc region by virtue of at least one amino acid modification, preferably one or more amino acid substitution(s). Preferably, the variant Fc region has at least one amino acid substitution compared to a native-sequence Fc region or to the Fc region of a parent polypeptide, e.g., from about one to about ten amino acid substitutions, and preferably from about one to about five amino acid substitutions in a native-sequence Fc region or in the Fc region of the parent polypeptide. The variant Fc region herein will preferably possess at least about 80% homology with a native-sequence Fc region and/or with an Fc region of a parent polypeptide, and most preferably at least about 90% homology therewith, more preferably at least about 95% homology therewith.

[0565] The term “Fc-region-comprising ABP” refers to an ABP that comprises an Fc region. The C-terminal lysine (residue 447 according to the EU numbering system) of the Fc region may be removed, for example, during purification of the ABP or by recombinant engineering the nucleic acid encoding the ABP. Accordingly, an ABP having an Fc region can comprise an ABP with or without K447.

[0566] In some aspects, the Fc region of an ABP provided herein is modified to yield an ABP with altered affinity for an Fc receptor, or an ABP that is more immunologically inert. In some embodiments, the ABP variants provided herein possess some, but not all, effector functions. Such ABPs may be useful, for example, when the half-life of the ABP is important in vivo, but when certain effector functions (e.g., complement activation and ADCC) are unnecessary or deleterious.

[0567] In some embodiments, the Fc region of an ABP provided herein is a human IgG4 Fc region comprising one or more of the hinge stabilizing mutations S228P and L235E, according to EU numbering. See Aalberse et al., Immunology, 2002, 105:9-19, incorporated by reference in its entirety. In some embodiments, the IgG4 Fc region comprises one or more of the following mutations: E233P, F234V, and L235A, according to EU numbering. See Armour et al., Mol. Immunol., 2003, 40:585-593, incorporated by reference in its entirety. In some embodiments, the IgG4 Fc region comprises a deletion at position G236.

[0568] In some embodiments, the Fc region of an ABP provided herein is a human IgG1 Fc region comprising one or more mutations to reduce Fc receptor binding. In some aspects, the one or more mutations are in residues selected from S228 (e.g., S228A), L234 (e.g., L234A), L235 (e.g., L235A), D265 (e.g., D265A), and N297 (e.g., N297A), according to EU numbering. In some aspects, the ABP comprises a PVA236 mutation. PVA236 means that the amino acid sequence ELLG, from amino acid position 233 to 236 of IgG1 or EFLG of IgG4, is replaced by PVA, according to EU numbering. See U.S. Pat. No. 9,150,641, incorporated by reference in its entirety.

[0569] In some embodiments, the Fc region of an ABP provided herein is modified as described in Armour et al., Eur. J. Immunol., 1999, 29:2613-2624; WO 1999/058572; and/or U.K. Pat. App. No. 98099518; each of which is incorporated by reference in its entirety.

[0570] In some embodiments, the Fc region of an ABP provided herein is a human IgG2 Fc region comprising one or more of mutations A330S and P331S, according to EU numbering.

[0571] In some embodiments, the Fc region of an ABP provided herein has an amino acid substitution at one or more positions selected from 238, 265, 269, 270, 297, 327 and 329, according to EU numbering. See U.S. Pat. No. 6,737,056, incorporated by reference in its entirety. Such Fc mutants include Fc mutants with substitutions at two or more of amino acid positions 265, 269, 270, 297 and 327, including the so-called “DANA” Fc mutant with substitution of residues 265 and 297 with alanine, according to EU numbering. See U.S. Pat. No. 7,332,581, incorporated by reference in its entirety. In some embodiments, the ABP comprises an alanine at amino acid position 265. In some embodiments, the ABP comprises an alanine at amino acid position 297.

[0572] In certain embodiments, an ABP provided herein comprises an Fc region with one or more amino acid substitutions which improve ADCC, such as a substitution at one or more of positions 298, 333, and 334 of the Fc region, according to EU numbering. In some embodiments, an ABP provided herein comprises an Fc region with one or more amino acid substitutions at positions 239, 332, and 330, as described in Lazar et al., Proc. Natl. Acad. Sci. USA, 2006, 103:4005-4010, incorporated by reference in its entirety, according to EU numbering.

[0573] In some embodiments, an ABP provided herein comprises one or more alterations that improves or diminishes C1q binding and/or CDC. See U.S. Pat. No. 6,194,551; WO 99/51642; and Idusogie et al., J. Immunol., 2000, 164:4178-4184; each of which is incorporated by reference in its entirety.

[0574] In some embodiments, an ABP provided herein comprises one or more alterations to increase half-life. ABPs with increased half-lives and improved binding to the neonatal Fc receptor (FcRn) are described, for example, in Hinton et al., J. Immunol., 2006, 176:346-356; and U.S. Pat. Pub. No. 2005/0014934; each of which is incorporated by reference in its entirety. Such Fc variants include those with substitutions at one or more of Fc region residues: 238, 250, 256, 265, 272, 286, 303, 305, 307, 311, 312, 314, 317, 340, 356, 360, 362, 376, 378, 380, 382, 413, 424, 428, and 434 of an IgG, according to EU numbering. In some embodiments, the ABP comprises one or more non-Fc modifications that extend half-life. Exemplary non-Fc modifications that extend half-life are described in, e.g., US20170218078, which is hereby incorporated by reference in its entirety.

[0575] In some embodiments, an ABP provided herein comprises a G1m17,1 allotype. Such allotype is described in, e.g., Lefranc G, Lefranc M-P. Gm allotype and Gm haplotypes> Allotypes. In IMGT Repertoire (IG and TR). IMGT®, the international ImMunoGeneTics Information System®. http://http://www.imgt.org/IMGTrepertoire/Proteins/allotypes/human/IGH/IGHC/G1m_allotypes .html, which is hereby incorporated by reference in its entirety.

[0576] In some embodiments, an ABP provided herein comprises one or more Fc region variants as described in U.S. Pat. Nos. 7,371,826 5,648,260, and 5,624,821; Duncan and Winter, Nature, 1988, 322:738-740; and WO 94/29351; each of which is incorporated by reference in its entirety.

[0577] In some embodiments, the multispecific ABP comprises one or more Fc modifications that promote heteromultimerization. In some embodiments, the Fc modification comprises a knob-in-hole modification. Knob-in-hole modifications are described in, .e.g., U.S. Pat. No. 7,695,936, Merchant et al., Nature Biotechnology 1998 Jul.; 16(7):677-81; Ridgway et al., Protein Engineering 1996 July; 9(7):617-21; and Atwell et al., J Mol Biol. 1997 Jul. 4; 270(1):26-35, each of which is incorporated by reference in its entirety. In some embodiments, one Fc-bearing chain of the multispecific ABP comprises a T366W mutation, and the other Fc-bearing chain of the multispecific ABP comprises a T366S, L368A, and Y407V mutation, according to EU numbering. In some embodiments, the multispecific ABP comprising a knob-in-hole modification further comprises an engineered disulfide bridge in the Fc region. In some embodiments, the engineered disulfide bridge comprises a K392C mutation in one Fc-bearing chain of the multispecific ABP, and a D399C in the other Fc-bearing chain of the multispecific ABP, according to EU numbering. In some embodiments, the engineered disulfide bridge comprises a S354C mutation in one Fc-bearing chain of the multispecific ABP, and a Y349C mutation in the other Fc-bearing chain of the multispecific ABP, according to EU numbering. In some embodiments, the engineered disulfide bridge comprises a 447C mutation in both Fc-bearing chains of the multispecific ABP, which 447C mutations are provided by extension of the C-terminus of a CH3 domain incorporating a KSC tripeptide sequence. In some embodiments, the multispecific ABP comprises an S354C and T366W mutation in one Fc-bearing chain and a Y349C, T366S, L368A and Y407V mutation in the other Fc-bearing chain, according to EU numbering.

[0578] In some embodiments, the Fc modification comprises a set of mutations described in Von Kreudenstein T S, Escobar-Carbrera E, Lario P I, et al. Improving biophysical properties of a bispecific antibody scaffold to aid developability: quality by molecular design. MAbs. 2013; 5(5):646-54, which is hereby incorporated by reference in its entirety. In some embodiments, the Fc modification comprises a set of mutations as provided in the following table (numbering is according to EU numbering).

| Chain-A | Chain-B |
|---|---|
| F405A_Y407V | T394W |
| F405A_Y407V | T366I_T394W |
| F405A_Y407V | T366L_T394W |
| F405A_Y407V | T366L_K392M_T394W |
| L351Y_F405A_Y407V | T366L_K392M_T394W |
| T350V_L351Y_F405A_Y407V | T350V_T366L_K392M_T394W |
| T350V_L351Y_F405A_Y407V | T350V_T366L_K392L_T394W |

[0579] In some embodiments, the Fc modification comprises a set of mutations described in Labrijn A F, et al., Proc Natl Acad Sci USA. 2013 Mar. 26; 110(13):5145-50. doi: 10.1073/pnas. In some embodiments, the Fc region is an IgG1 Fc, and the Fc modification comprises a K409R mutation in one Fc-bearing chain and a mutation selected from a Y407, L368, F405, K370, and D399 mutation in the other Fc-bearing chain, according to EU numbering. In some embodiments, the Fc modification comprises a K409R mutation in one Fc-bearing chain and a F405L mutation in the other Fc-bearing chain, according to EU numbering.

[0580] In some embodiments, the Fc modification comprises a set of mutations that renders homodimerization electrostatically unfavorable but heterodimerization favorable. An exemplary set of mutations is described in U.S. Pat. No. 8,592,562, and in Gunasekaran K et al., The Journal of Biological Chemistry 285, 19637-19646, doi: 10.1074/jbc.M110.117382, which are each incorporated by reference in its entirety. In some embodiments, the Fc modification comprises a K409D K392D mutation in one Fc-bearing chain and a D399K_E356K mutation in the other Fc-bearing chain, according to EU numbering.

[0581] In some embodiments, the Fc modification comprises a set of mutations described in WO2011143545, which is hereby incorporated by reference in its entirety. In some embodiments, the Fc modification comprises a K409R mutation in one Fc-bearing chain and a L368E or L368D mutation in the other Fc-bearing chain, according to EU numbering. In some embodiments, the Fc modification comprises a set of mutations described in Strop P et al., J. Mol. Biol., 420 (2012), pp. 204-219, which is hereby incorporated by reference in its entirety. In some embodiments, the Fc modification comprises a D221E, P228E, and L368E mutation in one Fc-bearing chain and a D221R, P228R, and K409R in the other Fc-bearing chain, according to EU numbering.

[0582] In some embodiments, the Fc modification comprises a set of mutations described in Moore G L, et al., mAbs, 3 (2011), pp. 546-557, which is hereby incorporated by reference in its entirety. In some embodiments, the Fc modification comprises an S364H and F405A mutation in one Fc-bearing chain and a Y349T and T394F mutation in the other Fc-bearing chain, according to EU numbering. In some embodiments, the Fc modification comprises a set of mutations described in U.S. Pat. No. 9,822,186, which is hereby incorporated by reference in its entirety. In some embodiments, the Fc modification comprises an E375Q and S364K mutation in one Fc-bearing chain and a L368D and K370S mutation in the other Fc-bearing chain, according to EU numbering.

[0583] In some embodiments, the Fc modification comprises strand-exchange engineered domain (SEED) CH3 heterodimers. Such SEED CH3 heterodimers are described in, e.g., Davis J H et al., Protein Eng Des Sel. 2010 April; 23(4):195-202. doi: 10.1093/protein/gzp094, which is hereby incorporated by reference in its entirety.

[0584] In some embodiments, the Fc modification comprises a modification in the CH3 sequence that affects the ability of the CH3 domain to bind an affinity agent, e.g., Protein A. Such modifications, and methods of producing multispecific ABPs comprising the modifications, are described in U.S. Pat. No. 8,586,713, US20160024147A1, and Smith E J, et al., Scientific Reports 2015 Dec. 11; 5:17943. doi: 10.1038/srep17943., each of which is hereby incorporated by reference in its entirety. In some embodiments, the Fc modification comprises a H435R and Y436F mutation in one Fc-bearing chain, according to EU numbering. In some embodiments, the other Fc-bearing chain does not comprise an amino acid mutation.

[0585] Antibodies Specific for B*35:01_EVDPIGHVY (HLA-PEPTIDE Target “G5”)

[0586] In some aspects, provided herein are ABPs comprising antibodies or antigen-binding fragments thereof that specifically bind an HLA-PEPTIDE target, wherein the HLA Class I molecule of the HLA-PEPTIDE target is HLA subtype B*35:01 and the HLA-restricted peptide of the HLA-PEPTIDE target comprises, consists of, or essentially consists of the sequence EVDPIGHVY (“G5”).

[0587] HLA-PEPTIDE target B*35:01_EVDPIGHVY refers to an HLA-PEPTIDE target comprising the HLA-restricted peptide EVDPIGHVY complexed with the HLA Class I molecule B*35:01, wherein the HLA-restricted peptide is located in the peptide binding groove of an α1/α2 heterodimer portion of the HLA Class I molecule. The restricted peptide is from tumor-specific gene product MAGEA6.

[0588] CDRs

[0589] The ABP specific for B*35:01_EVDPIGHVY may comprise one or more antibody complementarity determining region (CDR) sequences, e.g., may comprise three heavy chain CDRs (CDR-H1, CDR-H2, CDR-H3) and three light chain CDRs (CDR-L1, CDR-L2, CDR-L3).

[0590] The ABP specific for B*35:01_EVDPIGHVY may comprise a CDR-H3 sequence. The CDR-H3 sequence may be selected from CARDGVRYYGMDVW, CARGVRGYDRSAGYW, CASHDYGDYGEYFQHW, CARVSWYCSSTSCGVNWFDPW, CAKVNWNDGPYFDYW, CATPTNSGYYGPYYYYGMDVW, CARDVMDVW, CAREGYGMDVW, CARDNGVGVDYW, CARGIADSGSYYGNGRDYYYGMDVW, CARGDYYFDYW, CARDGTRYYGMDVW, CARDVVANFDYW, CARGHSSGWYYYYGMDVW, CAKDLGSYGGYYW, CARSWFGGFNYHYYGMDVW, CARELPIGYGMDVW, and CARGGSYYYYGMDVW.

[0591] The ABP specific for B*35:01_EVDPIGHVY may comprise a CDR-L3 sequence. The CDR-L3 sequence may be selected from CMQGLQTPITF, CMQALQTPPTF, CQQAISFPLTF, CQQANSFPLTF, CQQANSFPLTF, CQQSYSIPLTF, CQQTYMMPYTF, CQQSYITPWTF, CQQSYITPYTF, CQQYYTTPYTF, CQQSYSTPLTF, CMQALQTPLTF, CQQYGSWPRTF, CQQSYSTPVTF, CMQALQTPYTF, CQQANSFPFTF, CMQALQTPLTF, and CQQSYSTPLTF.

[0592] The ABP specific for B*35:01_EVDPIGHVY may comprise a particular heavy chain CDR3 (CDR-H3) sequence and a particular light chain CDR3 (CDR-L3) sequence. In some embodiments, the ABP comprises the CDR-H3 and the CDR-L3 from the scFv designated G5(7E07), G5(7B03), G5(7A05), G5(7F06), G5(1B12), G5(1C12), G5(1E05), G5(3G01), G5(3G08), G5(4B02), G5(4E04), G5(1D06), G5(1H11), G5(2B10), G5(2H08), G5(3G05), G5(4A07), or G5(4B01). CDR sequences of identified scFvs that specifically bind B*35:01_EVDPIGHVY are shown in Table 5. For clarity, each identified scFv hit is designated a clone name, and each row contains the CDR sequences for that particular clone name. For example, the scFv identified by clone name G5(7E07) comprises the heavy chain CDR3 sequence CARDGVRYYGMDVW and the light chain CDR3 sequence CMQGLQTPITF.

[0593] The ABP specific for B*35:01_EVDPIGHVY may comprise all six CDRs from the scFv designated G5(7E07), G5(7B03), G5(7A05), G5(7F06), G5(1B12), G5(1C12), G5(1E05), G5(3G01), G5(3G08), G5(4B02), G5(4E04), G5(1D06), G5(1H11), G5(2B10), G5(2H08), G5(3G05), G5(4A07), or G5(4B01).

[0594] VH

[0595] The ABP specific for B*35:01_EVDPIGHVY may comprise a VH sequence. The VH sequence may be selected from

QVQLVQSGAEVKKPGASVKVSCKASGYTFTSYDINWVRQAPGQGLEWMGI
INPRSGSTKYAQKFQGRVTMTRDTSTSTVYMELSSLRSEDTAVYYCARDG
VRYYGMDVWGQGTTVTVSS,
QVQLVQSGAEVKKPGSSVKVSCKASGYTFTSHDINWVRQAPGQGLEWMGW
MNPNSGDTGYAQKFQGRVTITADESTSTAYMELSSLRSEDTAVYYCARGV
RGYDRSAGYWGQGTLVIVSS,
EVQLLESGGGLVKPGGSLRLSCAASGFSFSSYWMSWVRQAPGKGLEWISY
ISGDSGYTNYADSVKGRFTISRDDSKNTLYLQMNSLKTEDTAVYYCASHD
YGDYGEYFQHWGQGTLVTVSS,
EVQLLQSGGGLVQPGGSLRLSCAASGFTFSNSDMNWVRQAPGKGLEWVAY
ISSGSSTIYYADSVKGRFTISRDNSKNTLYLQMNSLRAEDTAVYYCARVS
WYCSSTSCGVNWFDPWGQGTLVTVSS,
EVQLLESGGGLVQPGGSLRLSCAASGFTFSNSDMNWVRQAPGKGLEWVAS
ISSSGGYINYADSVKGRFTISRDNSKNTLYLQMNSLRAEDTAVYYCAKVN
WNDGPYFDYWGQGTLVTVSS,
QVQLVQSGAEVKKPGSSVKVSCKASGGTFSNFGVSWLRQAPGQGLEWMGG
IIPILGTANYAQKFQGRVTITADESTSTAYMELSSLRSEDTAVYYCATPT
NSGYYGPYYYYGMDVWGQGTTVTVSS,
QVQLVQSGAEVKKPGASVKVSCKASGYTFTSYNMHWVRQAPGQGLEWMGW
INPNSGGTNYAQKFQGRVTMTRDTSTSTVYMELSSLRSEDTAVYYCARDV
MDVWGQGTTVTVSS,
QVQLVQSGAEVKKPGASVKVSCKASGGTFSGYLVSWVRQAPGQGLEWMGW
INPNSGGTNTAQKFQGRVTMTRDTSTSTVYMELSSLRSEDTAVYYCAREG
YGMDVWGQGTTVTVSS,
QVQLVQSGAEVKKPGASVKVSCKASGYIFRNYPMHWVRQAPGQGLEWMGW
INPDSGGTKYAQKFQGRVTMTRDTSTSTVYMELSSLRSEDTAVYYCARDN
GVGVDYWGQGTLVTVSS,
QVQLVQSGAEVKKPGASVKVSCKASGYTFTGYYMHWVRQAPGQGLEWMGW
MNPNIGNTGYAQKFQGRVTMTRDTSTSTVYMELSSLRSEDTAVYYCARGI
ADSGSYYGNGRDYYYGMDVWGQGTTVTVSS,
QVQLVQSGAEVKKPGASVKVSCKASGGTFSSYGISWVRQAPGQGLEWMGW
INPNSGVTKYAQKFQGRVTMTRDTSTSTVYMELSSLRSEDTAVYYCARGD
YYFDYWGQGTLVTVSS,
QVQLVQSGAEVKKPGASVKVSCKASGYTFTSYDINWVRQAPGQGLEWMGW
INPNSGDTKYSQKFQGRVTMTRDTSTSTVYMELSSLRSEDTAVYYCARDG
TRYYGMDVWGQGTTVTVSS,
EVQLLESGGGLVKPGGSLRLSCAASGFTFSDYYMSWVRQAPGKGLEWVSY
ISSSSSYTNYADSVKGRFTISRDDSKNTLYLQMNSLKTEDTAVYYCARDV
VANFDYWGQGTLVTVSS,
QVQLVQSGAEVKKPGASVKVSCKASGGTFSSYAISWVRQAPGQGLEWMGW
MNPDSGSTGYAQRFQGRVTMTRDTSTSTVYMELSSLRSEDTAVYYCARGH
SSGWYYYYGMDVWGQGTTVTVSS,
EVQLLESGGGLVQPGGSLRLSCAASGFTFTSYSMHWVRQAPGKGLEWVSS
ITSFTNTMYYADSVKGRFTISRDNSKNTLYLQMNSLRAEDTAVYYCAKDL
GSYGGYYWGQGTLVTVSS,
QVQLVQSGAEVKKPGASVKVSCKASGYTFTNYYMHWVRQAPGQGLEWMGI
INPSGGSTSYAQKFQGRVTMTRDTSTSTVYMELSSLRSEDTAVYYCARSW
FGGFNYHYYGMDVWGQGTTVTVSS,
QVQLVQSGAEVKKPGASVKVSCKASGYTFTSYYMHWVRQAPGQGLEWMGW
MNPNSGNTGYAQKFQGRVTMTRDTSTSTVYMELSSLRSEDTAVYYCAREL
PIGYGMDVWGQGTTVTVSS,
and
QVQLVQSGAEVKKPGSSVKVSCKASGGTFSSYAISWVRQAPGQGLEWMGG
IIPIVGTANYAQKFQGRVTITADESTSTAYMELSSLRSEDTAVYYCARGG
SYYYYGMDVWGQGTTVTVSS.

[0596] VL

[0597] The ABP specific for B*35:01_EVDPIGHVY may comprise a VL sequence. The VL sequence may be selected from

DIVMTQSPLSLPVTPGEPASISCRSSQSLLHSNGYNYLDWYLQKPGQSPQ
LLIYLGSYRASGVPDRFSGSGSGTDFTLKISRVEAEDVGVYYCMQGLQTP
ITFGQGTRLEIK,
DIVMTQSPLSLPVTPGEPASISCRSSQSLLHSNGYNYLDWYLQKPGQSPQ
LLIYLGSSRASGVPDRFSGSGSGTDFTLKISRVEAEDVGVYYCMQALQTP
PTFGPGTKVDIK,
DIQMTQSPSSLSASVGDRVTITCQASQDISNYLNWYQQKPGKAPKLLIYA
ASSLQSGVPSRFSGSGSGTDFTLTISSLQPEDFATYYCQQAISFPLTFGQ
STKVEIK,
DIQMTQSPSSLSASVGDRVTITCRASQSISSWLAWYQQKPGKAPKLLIYS
ASTLQSGVPSRFSGSGSGTDFTLTISSLQPEDFATYYCQQANSFPLTFGG
GTKVEIK,
DIQMTQSPSSLSASVGDRVTITCRASQSISSWLAWYQQKPGKAPKLLIYA
ASSLQSGVPSRFSGSGSGTDFTLTISSLQPEDFATYYCQQANSFPLTFGG
GTKVEIK,
DIQMTQSPSSLSASVGDRVTITCRASQSISSWLAWYQQKPGKAPKLLIYA
ASTLQSGVPSRFSGSGSGTDFTLTISSLQPEDFATYYCQQSYSIPLTFGG
GTKVEIK,
DIQMTQSPSSLSASVGDRVTITCRASQGISNYLNWYQQKPGKAPKLLIYY
ASSLQSGVPSRFSGSGSGTDFTLTISSLQPEDFATYYCQQTYMMPYTFGQ
GTKVEIK,
DIQMTQSPSSLSASVGDRVTITCRASQSISSYLNWYQQKPGKAPKWYGAS
SLQSGVPSRFSGSGSGTDFTLTISSLQPEDFATYYCQQSYITPWTFGQGT
KVEIK,
DIQMTQSPSSLSASVGDRVTITCRASQGISNYLAWYQQKPGKAPKLLIYA
ASSLQSGVPSRFSGSGSGTDFTLTISSLQPEDFATYYCQQSYITPYTFGQ
GTKLEIK,
DIVMTQSPDSLAVSLGERATINCKTSQSVLYRPNNENYLAWYQQKPGQPP
KLLIYQASIREPGVPDRFSGSGSGTDFTLTISSLQAEDVAVYYCQQYYTT
PYTFGQGTKLEIK,
DIQMTQSPSSLSASVGDRVTITCRASQSISRFLNWYQQKPGKAPKWYGAS
RPQSGVPSRFSGSGSGTDFTLTISSLQPEDFATYYCQQSYSTPLTFGQGT
KVEIK,
DIVMTQSPLSLPVTPGEPASISCRSSQSLLHSNGYNYLDWYLQKPGQSPQ
LLIYLGSHRASGVPDRFSGSGSGTDFTLKISRVEAEDVGVYYCMQALQTP
LTFGGGTKVEIK,
EIVMTQSPATLSVSPGERATLSCRASQSVSSNLAWYQQKPGQAPRLLIYA
ASARASGIPARFSGSGSGTEFTLTISSLQSEDFAVYYCQQYGSWPRTFGQ
GTKVEIK,
DIQMTQSPSSLSASVGDRVTITCRASQSISSYLNWYQQKPGKAPKWYGAS
RLQSGVPSRFSGSGSGTDFTLTISSLQPEDFATYYCQQSYSTPVTFGQGT
KVEIK,
DIVMTQSPLSLPVTPGEPASISCRSSQSLLHSNGYNYLDWYLQKPGQSPQ
LLIYLGSNRASGVPDRFSGSGSGTDFTLKISRVEAEDVGVYYCMQALQTP
YTFGQGTKVEIK,
DIQMTQSPSSLSASVGDRVTITCQASEDISNHLNWYQQKPGKAPKLLIYD
ALSLQSGVPSRFSGSGSGTDFTLTISSLQPEDFATYYCQQANSFPFTFGP
GTKVDIK,
DIVMTQSPLSLPVTPGEPASISCRSSQSLLHSNGYNYLDWYLQKPGQSPQ
LLIYLGSNRASGVPDRFSGSGSGTDFTLKISRVEAEDVGVYYCMQALQTP
LTFGQGTKVEIK,
and
DIQMTQSPSSLSASVGDRVTITCRASQSISSYLNWYQQKPGKAPKLLIYA
ASSLQSGVPSRFSGSGSGTDFTLTISSLQPEDFATYYCQQSYSTPLTFGG
GTKVEIK.

[0598] VH-VL Combinations

[0599] The ABP specific for B*35:01_EVDPIGHVY may comprise a particular VH sequence and a particular VL sequence. In some embodiments, the ABP specific for B*35:01_EVDPIGHVY comprises a VH sequence and VL sequence from the scFv designated G5(7E07), G5(7B03), G5(7A05), G5(7F06), G5(1B12), G5(1C12), G5(1E05), G5(3G01), G5(3G08), G5(4B02), G5(4E04), G5(1D06), G5(1H11), G5(2B10), G5(2H08), G5(3G05), G5(4A07), or G5(4B01). The VH and VL sequences of identified scFvs that specifically bind B*35:01_EVDPIGHVY are shown in Table 4. For clarity, each identified scFv hit is designated a clone name, and each row contains the VH and VL sequences for that particular clone name. For example, the scFv identified by clone name G5(7E07) comprises the VH sequence QVQLVQSGAEVKKPGASVKVSCKASGYTFTSYDINWVRQAPGQGLEWMGIINPRSG STKYAQKFQGRVTMTRDTSTSTVYMELSSLRSEDTAVYYCARDGVRYYGMDVWG QGTTVTVSS and the VL sequence

DIVMTQSPLSLPVTPGEPASISCRSSQSLLHSNGYNYLDWYLQKPGQSPQ
LLIYLGSYRASGVPDRFSGSGSGTDFTLKISRVEAEDVGVYYCMQGLQTP
ITFGQGTRLEIK.

[0600] Antibodies Specific for A*02:01_AIFPGAVPAA (HLA-PEPTIDE Target “G8”)

[0601] In some aspects, provided herein are ABPs comprising antibodies or antigen-binding fragments thereof that specifically bind an HLA-PEPTIDE target, wherein the HLA Class I molecule of the HLA-PEPTIDE target is HLA subtype A*02:01 and the HLA-restricted peptide of the HLA-PEPTIDE target comprises, consists of, or essentially consists of the sequence AIFPGAVPAA (“G8”).

[0602] HLA-PEPTIDE target A*02:01_AIFPGAVPAA, disclosed as Target #24053 in Table A, refers to an HLA-PEPTIDE target comprising the HLA-restricted peptide AIFPGAVPAA complexed with the HLA Class I molecule A*02:01, wherein the HLA-restricted peptide is located in the peptide binding groove of an α1/α2 heterodimer portion of the HLA Class I molecule. The restricted peptide is from tumor-specific gene product FOXE1.

[0603] CDRs

[0604] The ABP specific for A*02:01_AIFPGAVPAA may comprise one or more antibody complementarity determining region (CDR) sequences, e.g., may comprise three heavy chain CDRs (CDR-H1, CDR-H2, CDR-H3) and three light chain CDRs (CDR-L1, CDR-L2, CDR-L3).

[0605] The ABP specific for A*02:01_AIFPGAVPAA may comprise a CDR-H3 sequence. The CDR-H3 sequence may be selected from CARDDYGDYVAYFQHW, CARDLSYYYGMDVW, CARVYDFWSVLSGFDIW, CARVEQGYDIYYYYYMDVW, CARSYDYGDYLNFDYW, CARASGSGYYYYYGMDVW, CAASTWIQPFDYW, CASNGNYYGSGSYYNYW, CARAVYYDFWSGPFDYW, CAKGGIYYGSGSYPSW, CARGLYYMDVW, CARGLYGDYFLYYGMDVW, CARGLLGFGEFLTYGMDVW, CARDRDSSWTYYYYGMDVW, CARGLYGDYFLYYGMDVW, CARGDYYDSSGYYFPVYFDYW, and CAKDPFWSGHYYYYGMDVW.

[0606] The ABP specific for A*02:01_AIFPGAVPAA may comprise a CDR-L3 sequence. The CDR-L3 sequence may be selected from CQQNYNSVTF, CQQSYNTPWTF, CGQSYSTPPTF, CQQSYSAPYTF, CQQSYSIPPTF, CQQSYSAPYTF, CQQHNSYPPTF, CQQYSTYPITI, CQQANSFPWTF, CQQSHSTPQTF, CQQSYSTPLTF, CQQSYSTPLTF, CQQTYSTPWTF, CQQYGSSPYTF, CQQSHSTPLTF, CQQANGFPLTF, and CQQSYSTPLTF.

[0607] The ABP specific for A*02:01_AIFPGAVPAA may comprise a particular heavy chain CDR3 (CDR-H3) sequence and a particular light chain CDR3 (CDR-L3) sequence. In some embodiments, the ABP comprises the CDR-H3 and the CDR-L3 from the scFv designated G8(1A03), G8(1A04), G8(1A06), G8(1B03), G8(1C11), G8(1D02), G8(1H08), G8(2B05), G8(2E06), G8(2C10), G8(2E04), G8(4F05), G8(5C03), G8(5F02), G8(5G08), G8(1C01), or G8(2C11). CDR sequences of identified scFvs that specifically bind A*02:01 AIFPGAVPAA are shown in Table 7. For clarity, each identified scFv hit is designated a clone name, and each row contains the CDR sequences for that particular clone name. For example, the scFv identified by clone name G8(1A03) comprises the heavy chain CDR3 sequence CARDDYGDYVAYFQHW and the light chain CDR3 sequence CQQNYNSVTF.

[0608] The ABP specific for A*02:01_AIFPGAVPAA may comprise all six CDRs from the scFv designated G8(1A03), G8(1A04), G8(1A06), G8(1B03), G8(1C11), G8(1D02), G8(1H08), G8(2B05), G8(2E06), G8(2C10), G8(2E04), G8(4F05), G8(5C03), G8(5F02), G8(5G08), G8(1C01), or G8(2C11).

[0609] VH

[0610] The ABP specific for A*02:01_AIFPGAVPAA may comprise a VH sequence. The VH sequence may be selected from

QVQLVQSGAEVKKPGASVKVSCKASGGTFSRSAITWVRQAPGQGLEWMGW
INPNSGATNYAQKFQGRVTMTRDTSTSTVYMELSSLRSEDTAVYYCARDD
YGDYVAYFQHWGQGTLVTVSS,
QVQLVQSGAEVKKPGASVKVSCKASGYPFIGQYLHWVRQAPGQGLEWMGI
INPSGDSATYAQKFQGRVTMTRDTSTSTVYMELSSLRSEDTAVYYCARDL
SYYYGMDVWGQGTTVTVSS,
QVQLVQSGAEVKKPGASVKVSCKASGYTFTNYYMHWVRQAPGQGLEWMGW
MNPIGGGTGYAQKFQGRVTMTRDTSTSTVYMELSSLRSEDTAVYYCARVY
DFWSVLSGFDIWGQGTLVTVSS,
EVQLLESGGGLVQPGGSLRLSCAASGFTFSDYYMSWVRQAPGKGLEWVSG
INWNGGSTGYADSVKGRFTISRDNSKNTLYLQMNSLRAEDTAVYYCARVE
QGYDIYYYYYMDVWGKGTTVTVSS,
QVQLVQSGAEVKKPGASVKVSCKASGGTLSSYPINWVRQAPGQGLEWMGW
ISTYSGHADYAQKLQGRVTMTRDTSTSTVYMELSSLRSEDTAVYYCARSY
DYGDYLNFDYWGQGTLVTVSS,
EVQLLESGGGLVQPGGSLRLSCAASGFTFSSYWMSWVRQAPGKGLEWVSS
ISGRGDNTYYADSVKGRFTISRDNSKNTLYLQMNSLRAEDTAVYYCARAS
GSGYYYYYGMDVWGQGTTVTVSS,
QVQLVQSGAEVKKPGASVKVSCKASGYTFGNYFMHWVRQAPGQGLEWMGM
VNPSGGSETFAQKFQGRVTMTRDTSTSTVYMELSSLRSEDTAVYYCAAST
WIQPFDYWGQGTLVTVSS,
EVQLLESGGGLVQPGGSLRLSCAASGFDFSIYSMNWVRQAPGKGLEWVSA
ISGSGGSTYYADSVKGRFTISRDNSKNTLYLQMNSLRAEDTAVYYCASNG
NYYGSGSYYNYWGQGTLVTVSS,
QVQLVQSGAEVKKPGASVKVSCKASGYTLTTYYMHWVRQAPGQGLEWMGW
INPNSGGTNYAQKFQGRVTMTRDTSTSTVYMELSSLRSEDTAVYYCARAV
YYDFWSGPFDYWGQGTLVTVSS,
QVQLVQSGAEVKKPGASVKVSCKASGYTFTSYYMHWVRQAPGQGLEWMGW
INPYSGGTNYAQKFQGRVTMTRDTSTSTVYMELSSLRSEDTAVYYCAKGG
IYYGSGSYPSWGQGTLVTVSS,
QVQLVQSGAEVKKPGSSVKVSCKASGGTFSSYGVSWVRQAPGQGLEWMGW
ISPYSGNTDYAQKFQGRVTITADESTSTAYMELSSLRSEDTAVYYCARGL
YYMDVWGKGTTVTVSS,
QVQLVQSGAEVKKPGASVKVSCKASGYTFSNMYLHWVRQAPGQGLEWMGW
INPNTGDTNYAQTFQGRVTMTRDTSTSTVYMELSSLRSEDTAVYYCARGL
YGDYFLYYGMDVWGQGTKVTVSS,
QVQLVQSGAEVKKPGASVKVSCKASGYTFTSYYMHWVRQAPGQGLEWMGW
MNPNSGNTGYAQKFQGRVTMTRDTSTSTVYMELSSLRSEDTAVYYCARGL
LGFGEFLTYGMDVWGQGTLVTVSS,
QVQLVQSGAEVKKPGASVKVSCKASGYTFTGYYIEWVRQAPGQGLEWMGV
INPSGGSTTYAQKLQGRVTMTRDTSTSTVYMELSSLRSEDTAVYYCARDR
DSSWTYYYYGMDVWGQGTTVTVSS,
QVQLVQSGAEVKKPGASVKVSCKASGYTFTSNYMHWVRQAPGQGLEWMGW
MNPNSGNTGYAQKFQGRVTMTRDTSTSTVYMELSSLRSEDTAVYYCARGL
YGDYFLYYGMDVWGQGTTVTVSS,
QVQLVQSGAEVKKPGASVKVSCKASGGTFSSHAISWVRQAPGQGLEWMGV
IIPSGGTSYTQKFQGRVTMTRDTSTSTVYMELSSLRSEDTAVYYCARGDY
YDSSGYYFPVYFDYWGQGTLVTVSS,
and
QVQLVQSGAEVKKPGASVKVSCKASGYTFTSYAMNWVRQAPGQGLEWMGW
INPNSGGTNYAQKFQGRVTMTRDTSTSTVYMELSSLRSEDTAVYYCARDP
FWSGHYYYYGMDVWGQGTTVTVSS.

[0611] VL

[0612] The ABP specific for A*02:01_AIFPGAVPAA may comprise a VL sequence. The VL sequence may be selected from

DIQMTQSPSSLSASVGDRVTITCRASQSITSYLNWYQQKPGKAPKWYDAS
NLETGVPSRFSGSGSGTDFTLTISSLQPEDFATYYCQQNYNSVTFGQGTK
LEIK,
DIQMTQSPSSLSASVGDRVTITCWASQGISSYLAWYQQKPGKAPKLLIYA
ASSLQSGVPSRFSGSGSGTDFTLTISSLQPEDFATYYCQQSYNTPWTFGP
GTKVDIK,
DIQMTQSPSSLSASVGDRVTITCRASQAISNSLAWYQQKPGKAPKLLIYA
ASTLQSGVPSRFSGSGSGTDFTLTISSLQPEDFATYYCGQSYSTPPTFGQ
GTKLEIK,
DIQMTQSPSSLSASVGDRVTITCRASQSISSYLNWYQQKPGKAPKWYKAS
SLESGVPSRFSGSGSGTDFTLTISSLQPEDFATYYCQQSYSAPYTFGPGT
KVDIK,
DIQMTQSPSSLSASVGDRVTITCQASQDISNYLNWYQQKPGKAPKLLIYA
ASSLQSGVPSRFSGSGSGTDFTLTISSLQPEDFATYYCQQSYSIPPTFGG
GTKVDIK,
DIQMTQSPSSLSASVGDRVTITCQASQDISNYLNWYQQKPGKAPKLLIYA
ASSLQSGVPSRFSGSGSGTDFTLTISSLQPEDFATYYCQQSYSAPYTFGG
GTKVEIK,
DIQMTQSPSSLSASVGDRVTITCRASQGINSYLAWYQQKPGKAPKWYDAS
NLETGVPSRFSGSGSGTDFTLTISSLQPEDFATYYCQQHNSYPPTFGQGT
KLEIK,
DIQMTQSPSSLSASVGDRVTITCRASQSISRWLAWYQQKPGKAPKLLIYA
ASSLQSGVPSRFSGSGSGTDFTLTISSLQPEDFATYYCQQYSTYPITIGQ
GTKVEIK,
DIQMTQSPSSLSASVGDRVTITCRASQGISNSLAWYQQKPGKAPKLLIYA
ASSLQSGVPSRFSGSGSGTDFTLTISSLQPEDFATYYCQQANSFPWTFGQ
GTKLEIK,
DIQMTQSPSSLSASVGDRVTITCRASQDVSTWLAWYQQKPGKAPKLLIYA
ASSLQSGVPSRFSGSGSGTDFTLTISSLQPEDFATYYCQQSHSTPQTFGQ
GTKVEIK,
DIQMTQSPSSLSASVGDRVTITCRASQSISSWLAWYQQKPGKAPKLLIYD
ASNLETGVPSRFSGSGSGTDFTLTISSLQPEDFATYYCQQSYSTPLTFGG
GTKLEIK,
DIQMTQSPSSLSASVGDRVTITCRASQGISNYLAWYQQKPGKAPKLLIYA
ASTLQSGVPSRFSGSGSGTDFTLTISSLQPEDFATYYCQQSYSTPLTFGG
GTKVEIK,
DIQMTQSPSSLSASVGDRVTITCRASQGISNWLAWYQQKPGKAPKLLIYA
ASTLQSGVPSRFSGSGSGTDFTLTISSLQPEDFATYYCQQTYSTPWTFGQ
GTKLEIK,
EIVMTQSPATLSVSPGERATLSCRASQSVGNSLAWYQQKPGQAPRLLIYG
ASTRATGIPARFSGSGSGTEFTLTISSLQSEDFAVYYCQQYGSSPYTFGQ
GTKVEIK,
DIQMTQSPSSLSASVGDRVTITCRASQSISGYLNWYQQKPGKAPKLLIYA
ASSLQSGVPSRFSGSGSGTDFTLTISSLQPEDFATYYCQQSHSTPLTFGQ
GTKVEIK,
DIQMTQSPSSLSASVGDRVTITCRASQNIYTYLNWYQQKPGKAPKWYDAS
NLETGVPSRFSGSGSGTDFTLTISSLQPEDFATYYCQQANGFPLTFGGGT
KVEIK,
and
DIQMTQSPSSLSASVGDRVTITCRASQSISSYLNWYQQKPGKAPKLLIYA
ASSLQSGVPSRFSGSGSGTDFTLTISSLQPEDFATYYCQQSYSTPLTFGG
GTKVEIK.

[0613] VH-VL Combinations

[0614] The ABP specific for A*02:01_AIFPGAVPAA may comprise a particular VH sequence and a particular VL sequence. In some embodiments, the ABP specific for A*02:01_AIFPGAVPAA comprises a VH sequence and VL sequence from the scFv designated G8(1A03), G8(1A04), G8(1A06), G8(1B03), G8(1C11), G8(1D02), G8(1H08), G8(2B05), G8(2E06), G8(2C10), G8(2E04), G8(4F05), G8(5C03), G8(5F02), G8(5G08), G8(1C01), or G8(2C11). The VH and VL sequences of identified scFvs that specifically bind A*02:01_AIFPGAVPAA are shown in Table 6. For clarity, each identified scFv hit is designated a clone name, and each row contains the VH and VL sequences for that particular clone name. For example, the scFv identified by clone name G8(1A03) comprises the VH sequence QVQLVQSGAEVKKPGASVKVSCKASGGTFSRSAITWVRQAPGQGLEWMGWINPNS GATNYAQKFQGRVTMTRDTSTSTVYMELSSLRSEDTAVYYCARDDYGDYVAYFQH WGQGTLVTVSS and the VL sequence

DIQMTQSPSSLSASVGDRVTITCRASQSITSYLNWYQQKPGKAPKLLIYD
ASNLETGVPSRFSGSGSGTDFTLTISSLQPEDFATYYCQQNYNSVTFGQG
TKLEIK.

[0615] Antibodies Specific for A*01:01_ASSLPTTMNY (HLA-PEPTIDE Target “G10”)

[0616] In some aspects, provided herein are ABPs comprising antibodies or antigen-binding fragments thereof that specifically bind an HLA-PEPTIDE target, wherein the HLA Class I molecule of the HLA-PEPTIDE target is HLA subtype A*01:01 and the HLA-restricted peptide of the HLA-PEPTIDE target comprises, consists of, or essentially consists of the sequence ASSLPTTMNY (“G10”).

[0617] HLA-PEPTIDE target A*01:01_ASSLPTTMNY, disclosed as Target #39108 in Table A, refers to an HLA-PEPTIDE target comprising the HLA-restricted peptide ASSLPTTMNY complexed with the HLA Class I molecule A*01:01, wherein the HLA-restricted peptide is located in the peptide binding groove of an α1/α2 heterodimer portion of the HLA Class I molecule. The restricted peptide is from tumor-specific gene products MAGEA3 and MAGEA6.

[0618] CDRs

[0619] The ABP specific for A*01:01_ASSLPTTMNY may comprise one or more antibody complementarity determining region (CDR) sequences, e.g., may comprise three heavy chain CDRs (CDR-H1, CDR-H2, CDR-H3) and three light chain CDRs (CDR-L1, CDR-L2, CDR-L3).

[0620] The ABP specific for A*01:01_ASSLPTTMNY may comprise a CDR-H3 sequence. The CDR-H3 sequence may be selected from CARDQDTIFGVVITWFDPW, CARDKVYGDGFDPW, CAREDDSMDVW, CARDSSGLDPW, CARGVGNLDYW, CARDAHQYYDFWSGYYSGTYYYGMDVW, CAREQWPSYWYFDLW, CARDRGYSYGYFDYW, CARGSGDPNYYYYYGLDVW, CARDTGDHFDYW, CARAENGMDVW, CARDPGGYMDVW, CARDGDAFDIW, CARDMGDAFDIW, CAREEDGMDVW, CARDTGDHFDYW, CARGEYSSGFFFVGWFDLW, and CARETGDDAFDIW.

[0621] The ABP specific for A*01:01_ASSLPTTMNY may comprise a CDR-L3 sequence. The CDR-L3 sequence may be selected from CQQYFTTPYTF, CQQAEAFPYTF, CQQSYSTPITF, CQQSYIIPYTF, CHQTYSTPLTF, CQQAYSFPWTF, CQQGYSTPLTF, CQQANSFPRTF, CQQANSLPYTF, CQQSYSTPFTF, CQQSYSTPFTF, CQQSYGVPTF, CQQSYSTPLTF, CQQSYSTPLTF, CQQYYSYPWTF, CQQSYSTPFTF, CMQTLKTPLSF, and CQQSYSTPLTF.

[0622] The ABP specific for A*01:01_ASSLPTTMNY may comprise a particular heavy chain CDR3 (CDR-H3) sequence and a particular light chain CDR3 (CDR-L3) sequence. In some embodiments, the ABP comprises the CDR-H3 and the CDR-L3 from the scFv designated G10(1A07), G10(1B07), G10(1E12), G10(1F06), G10(1H01), G10(1H08), G10(2C04), G10(2G11), G10(3E04), G10(4A02), G10(4C05), G10(4D04), G10(4D10), G10(4E07), G10(4E12), G10(4G06), G10(5A08), or G10(5C08). CDR sequences of identified scFvs that specifically bind A*01:01_ASSLPTTMNY are shown in Table 9. For clarity, each identified scFv hit is designated a clone name, and each row contains the CDR sequences for that particular clone name. For example, the scFv identified by clone name G10(1A07) comprises the heavy chain CDR3 sequence CARDQDTIFGVVITWFDPW and the light chain CDR3 sequence CQQYFTTPYTF.

[0623] The ABP specific for A*01:01_ASSLPTTMNY may comprise all six CDRs from the scFv designated G10(1A07), G10(1B07), G10(1E12), G10(1F06), G10(1H01), G10(1H08), G10(2C04), G10(2G11), G10(3E04), G10(4A02), G10(4C05), G10(4D04), G10(4D10), G10(4E07), G10(4E12), G10(4G06), G10(5A08), or G10(5C08).

[0624] VH

[0625] The ABP specific for A*01:01_ASSLPTTMNY may comprise a VH sequence. The VH sequence may be selected from

EVQLLESGGGLVKPGGSLRLSCAASGFTFSSYWMSWVRQAPGKGLEWVSG
ISARSGRTYYADSVKGRFTISRDDSKNTLYLQMNSLKTEDTAVYYCARDQ
DTIFGVVITWFDPWGQGTLVTVSS,
QVQLVQSGAEVKKPGASVKVSCKASGYTFTSYYMHWVRQAPGQGLEWMGI
IHPGGGTTSYAQKFQGRVTMTRDTSTSTVYMELSSLRSEDTAVYYCARDK
VYGDGFDPWGQGTLVTVSS,
QVQLVQSGAEVKKPGASVKVSCKASGYIFTGYYMHWVRQAPGQGLEWMGM
IGPSDGSTSYAQKFQGRVTMTRDTSTSTVYMELSSLRSEDTAVYYCARED
DSMDVWGKGTTVTVSS,
QVQLVQSGAEVKKPGASVKVSCKASGYTFIGYYMHWVRQAPGQGLEWMGM
IGPSDGSTSYAQKFQGRVTMTRDTSTSTVYMELSSLRSEDTAVYYCARDS
SGLDPWGQGTLVTVSS,
QVQLVQSGAEVKKPGASVKVSCKASGYTFTGYYMHWVRQAPGQGLEWMGM
IGPSDGSTSYAQKFQGRVTMTRDTSTSTVYMELSSLRSEDTAVYYCARGV
GNLDYWGQGTLVTVSS,
QVQLVQSGAEVKKPGASVKVSCKASGVTFSTSAISWVRQAPGQGLEWMGW
ISPYNGNTDYAQMLQGRVTMTRDTSTSTVYMELSSLRSEDTAVYYCARDA
HQYYDFWSGYYSGTYYYGMDVWGQGTTVTVSS,
QVQLVQSGAEVKKPGASVKVSCKASGGTFSNSIINWVRQAPGQGLEWMGW
MNPNSGNTNYAQKFQGRVTMTRDTSTSTVYMELSSLRSEDTAVYYCAREQ
WPSYWYFDLWGRGTLVTVSS,
QVQLVQSGAEVKKPGASVKVSCKASGGTFSTHDINWVRQAPGQGLEWMGV
INPSGGSAIYAQKFQGRVTMTRDTSTSTVYMELSSLRSEDTAVYYCARDR
GYSYGYFDYWGQGTLVTVSS,
QVQLVQSGAEVKKPGASVKVSCKASGNTFIGYYVHWVRQAPGQGLEWVGI
INPNGGSISYAQKFQGRVTMTRDTSTSTVYMELSSLRSEDTAVYYCARGS
GDPNYYYYYGLDVWGQGTTVTVSS,
QVQLVQSGAEVKKPGASVKVSCKASGYTLSYYYMHWVRQAPGQGLEWMGM
IGPSDGSTSYAQRFQGRVTMTRDTSTGTVYMELSSLRSEDTAVYYCARDT
GDHFDYWGQGTLVTVSS,
QVQLVQSGAEVKKPGASVKVSCKASGYTFTGYYMHWVRQAPGQGLEWMGI
IGPSDGSTTYAQKFQGRVTMTRDTSTSTVYMELSSLRSEDTAVYYCARAE
NGMDVWGQGTTVTVSS,
QVQLVQSGAEVKKPGASVKVSCKASGYTFTGYYVHWVRQAPGQGLEWMGI
IAPSDGSTNYAQKFQGRVTMTRDTSTSTVYMELSSLRSEDTAVYYCARDP
GGYMDVWGKGTTVTVSS,
QVQLVQSGAEVKKPGASVKVSCKASGYTFTGYYLHWVRQAPGQGLEWMGM
IGPSDGSTSYAQKFQGRVTMTRDTSTSTVYMELSSLRSEDTAVYYCARDG
DAFDIWGQGTMVTVSS,
QVQLVQSGAEVKKPGSSVKVSCKASGYTFTGYYMHWVRQAPGQGLEWMGR
ISPSDGSTTYAPKFQGRVTITADESTSTAYMELSSLRSEDTAVYYCARDM
GDAFDIWGQGTTVTVSS,
QVQLVQSGAEVKKPGASVKVSCKASGYTFTGYYMHWVRQAPGQGLEWMGM
IGPSDGSTSYAQRFQGRVTMTRDTSTSTVYMELSSLRSEDTAVYYCAREE
DGMDVWGQGTTVTVSS,
QVQLVQSGAEVKKPGASVKVSCKASGYTLSYYYMHWVRQAPGQGLEWMGM
IGPSDGSTSYAQRFQGRVTMTRDTSTGTVYMELSSLRSEDTAVYYCARDT
GDHFDYWGQGTLVTVSS,
QVQLVQSGAEVKKPGSSVKVSCKASGGTFNNFAISWVRQAPGQGLEWMGG
IIPIFDATNYAQKFQGRVTFTADESTSTAYMELSSLRSEDTAVYYCARGE
YSSGFFFVGWFDLWGRGTQVTVSS,
and
QVQLVQSGAEVKKPGASVKVSCKASGYNFTGYYMHWVRQAPGQGLEWMGI
IAPSDGSTNYAQKFQGRVTMTRDTSTSTVYMELSSLRSEDTAVYYCARET
GDDAFDIWGQGTMVTVSS.

[0626] VL

[0627] The ABP specific for A*01:01_ASSLPTTMNY may comprise a VL sequence. The VL sequence may be selected from

DIQMTQSPSSLSASVGDRVTITCRASQGISNYLAWYQQKPGKAPKLLIYA
ASSLQGGVPSRFSGSGSGTDFTLTISSLQPEDFATYYCQQYFTTPYTFGQ
GTKLEIK,
DIQMTQSPSSLSASVGDRVTITCRASQSISRWLAWYQQKPGKAPKLLIFD
ASRLQSGVPSRFSGSGSGTDFTLTISSLQPEDFATYYCQQAEAFPYTFGQ
GTKVEIK,
DIQMTQSPSSLSASVGDRVTITCRASQSISSYLNWYQQKPGKAPKLLIYA
ASSLQSGVPSRFSGSGSGTDFTLTISSLQPEDFATYYCQQSYSTPITFGQ
GTRLEIK,
DIQMTQSPSSLSASVGDRVTITCRASQSISNYLNWYQQKPGKAPLLIYKA
SSLESGVPSRFSGSGSGTDFTLTISSLQPEDFATYYCQQSYIIPYTFGQG
TKLEIK,
DIQMTQSPSSLSASVGDRVTITCRASQSISNYLNWYQQKPGKAPKLLIYA
ASSLQSGVPSRFSGSGSGTDFTLTISSLQPEDFATYYCHQTYSTPLTFGQ
GTKVEIK,
DIQMTQSPSSLSASVGDRVTITCRASQGISNYLAWYQQKPGKAPKLLIYS
ASNLQSGVPSRFSGSGSGTDFTLTISSLQPEDFATYYCQQAYSFPWTFGQ
GTKVEIK,
DIQMTQSPSSLSASVGDRVTITCRASQNISSYLNWYQQKPGKAPKLLIYA
ASSLQSGVPSRFSGSGSGTDFTLTISSLQPEDFATYYCQQGYSTPLTFGQ
GTRLEIK,
DIQMTQSPSSLSASVGDRVTITCRASQDISRYLAWYQQKPGKAPKLLIYD
ASNLETGVPSRFSGSGSGTDFTLTISSLQPEDFATYYCQQANSFPRTFGQ
GTKVEIK,
DIQMTQSPSSLSASVGDRVTITCQASQDISNYLNWYQQKPGKAPKLLIYA
ASNLQSGVPSRFSGSGSGTDFTLTISSLQPEDFATYYCQQANSLPYTFGQ
GTKVEIK,
DIQMTQSPSSLSASVGDRVTITCRASQSISSYLNWYQQKPGKAPKLLIYA
ASTLQNGVPSRFSGSGSGTDFTLTISSLQPEDFATYYCQQSYSTPFTFGP
GTKVDIK,
DIQMTQSPSSLSASVGDRVTITCRASQRISSYLNWYQQKPGKAPKLLIYS
ASTLQSGVPSRFSGSGSGTDFTLTISSLQPEDFATYYCQQSYSTPFTFGP
GTKVDIK,
DIQMTQSPSSLSASVGDRVTITCRASQSISSYLAWYQQKPGKAPKLLIYD
ASKLETGVPSRFSGSGSGTDFTLTISSLQPEDFATYYCQQSYGVPTFGQG
TKLEIK,
DIQMTQSPSSLSASVGDRVTITCRASQGISSWLAWYQQKPGKAPKLLIYD
ASNLETGVPSRFSGSGSGTDFTLTISSLQPEDFATYYCQQSYSTPLTFGG
GTKVEIK,
DIQMTQSPSSLSASVGDRVTITCRASQSISSYLNWYQQKPGKAPKLLIYA
ASSLQSGVPSRFSGSGSGTDFTLTISSLQPEDFATYYCQQSYSTPLTFGG
GTKVEIK,
DIQMTQSPSSLSASVGDRVTITCRASQGISTYLAWYQQKPGKAPKLLIYD
ASSLQSGVPSRFSGSGSGTDFTLTISSLQPEDFATYYCQQYYSYPWTFGQ
GTRLEIK,
DIQMTQSPSSLSASVGDRVTITCRASQSISSYLNWYQQKPGKAPKLLIYA
ASTLQNGVPSRFSGSGSGTDFTLTISSLQPEDFATYYCQQSYSTPFTFGP
GTKVDIK,
DIVMTQSPLSLPVTPGEPASISCRSSQSLLHSNGYNYLDWYLQKPGQSPQ
LLIYLGSNRASGVPDRFSGSGSGTDFTLKISRVEAEDVGVYYCMQTLKTP
LSFGGGTKVEIK,
and
DIQMTQSPSSLSASVGDRVTITCRASQSISSYLNWYQQKPGKAPKLLIYA
ASSLQSGVPSRFSGSGSGTDFTLTISSLQPEDFATYYCQQSYSTPLTFGG
GTKVEIK.

[0628] VH-VL Combinations

[0629] The ABP specific for A*01:01_ASSLPTTMNY may comprise a particular VH sequence and a particular VL sequence. In some embodiments, the ABP specific for A*01:01_ASSLPTTMNY comprises a VH sequence and VL sequence from the scFv designated G10(1A07), G10(1B07), G10(1E12), G10(1F06), G10(1H01), G10(1H08), G10(2C04), G10(2G11), G10(3E04), G10(4A02), G10(4C05), G10(4D04), G10(4D10), G10(4E07), G10(4E12), G10(4G06), G10(5A08), or G10(5C08). The VH and VL sequences of identified scFvs that specifically bind A*01:01_ASSLPTTMNY are shown in Table 8. For clarity, each identified scFv hit is designated a clone name, and each row contains the VH and VL sequences for that particular clone name. For example, the scFv identified by clone name G10(1A07) comprises the VH sequence EVQLLESGGGLVKPGGSLRLSCAASGFTFSSYWMSWVRQAPGKGLEWVSGISARSG RTYYADSVKGRFTISRDDSKNTLYLQMNSLKTEDTAVYYCARDQDTIFGVVITWFDP WGQGTLVTVSS and the VL sequence

DIQMTQSPSSLSASVGDRVTITCRASQGISNYLAWYQQKPGKAPKLLIYA
ASSLQGGVPSRFSGSGSGTDFTLTISSLQPEDFATYYCQQYFTTPYTFGQ
GTKLEIK.

[0630] Antibodies Specific for A*02:01_LLASSILCA (G7)

[0631] In some aspects, provided herein are ABPs comprising antibodies or antigen-binding fragments thereof that specifically bind an HLA-PEPTIDE target, wherein the HLA Class I molecule of the HLA-PEPTIDE target is HLA subtype A*02:01 and the HLA-restricted peptide of the HLA-PEPTIDE target comprises, consists of, or consists essentially of the sequence LLASSILCA (“G7”).

[0632] HLA-PEPTIDE target A*02:01_LLASSILCA, also referred to herein as “G7”, refers to an HLA-PEPTIDE target comprising the HLA-restricted peptide LLASSILCA complexed with the HLA Class I molecule A*02:01, wherein the HLA-restricted peptide is located in the peptide binding groove of an α1/α2 heterodimer portion of the HLA Class I molecule. The restricted peptide is from tumor-specific gene product KKLC-1. HLA-PEPTIDE target A*02:01_LLASSILCA is included in Table A2 as Target #6427.

[0633] Sequences of G7-Specific Antibodies

[0634] The ABP specific for A*02:01_LLASSILCA may comprise one or more sequences, as described in further detail.

[0635] CDRs

[0636] The ABP specific for A*02:01_LLASSILCA may comprise one or more antibody complementarity determining region (CDR) sequences, e.g., may comprise three heavy chain CDRs (CDR-H1, CDR-H2, CDR-H3) and three light chain CDRs (CDR-L1, CDR-L2, CDR-L3).

[0637] The ABP specific for A*02:01_LLASSILCA may comprise a CDR-H3 sequence. The CDR-H3 sequence may be selected from CARDGYDFWSGYTSDDYW, CASDYGDYR, CARDLMTTVVTPGDYGMDVW, CARQDGGAFAFDIW, CARELGYYYGMDVW, CARALIFGVPLLPYGMDVW, CAKDLATVGEPYYYYGMDVW, and CARLWFGELHYYYYYGMDVW.

[0638] The ABP specific for A*02:01_LLASSILCA may comprise a CDR-L3 sequence. The CDR-L3 sequence may be selected from CHHYGRSHTF, CQQANAFPPTF, CQQYYSIPLTF, CQQSYSTPPTF, CQQSYSFPYTF, CMQALQTPLTF, CQQGNTFPLTF, and CMQGSHWPPSF.

[0639] The ABP specific for A*02:01_LLASSILCA may comprise a particular heavy chain CDR3 (CDR-H3) sequence and a particular light chain CDR3 (CDR-L3) sequence. In some embodiments, the ABP comprises the CDR-H3 and the CDR-L3 from the scFv designated G7(1C06), G7(1G10), G7(1B04), G7(2C02), G7(1A03), G7(2E09), G7(1F08), or G7(3A09). CDR sequences of identified scFvs that specifically bind A*02:01_LLASSILCA are shown in Table 30. For clarity, each identified scFv hit is designated a clone name, and each row contains the CDR sequences for that particular clone name. For example, the scFv identified by clone name G7(1C06) comprises the heavy chain CDR3 sequence CARDGYDFWSGYTSDDYW and the light chain CDR3 sequence CHHYGRSHTF.

[0640] The ABP specific for A*02:01_LLASSILCA may comprise all six CDRs from the scFv designated G7(1C06), G7(1G10), G7(1B04), G7(2C02), G7(1A03), G7(2E09), G7(1F08), or G7(3A09).

[0641] The ABP specific for *02:01_LLASSILCA may comprise a VL sequence. The VL sequence may be selected from

EIVMTQSPATLSVSPGERATLSCRASQSVSSSNLAWYQQKPGQAPRLLIY
GASTRATGIPARFSGSGSGTEFTLTISSLQSEDFAVYYCHHYGRSHTFGQ
GTKVEIK,
DIQMTQSPSSLSASVGDRVTITCRASQDIRNDLGWYQQKPGKAPKLLIYA
ASSLQSGVPSRFSGSGSGTDFTLTISSLQPEDFATYYCQQANAFPPTFGQ
GTKVEIK,
DIVMTQSPDSLAVSLGERATINCKSSQSVFYSSNNKNQLAWYQQKPGQPP
KLLIYWASTRESGVPDRFSGSGSGTDFTLTISSLQAEDVAVYYCQQYYSI
PLTFGQGTKLEIK,
DIQMTQSPSSLSASVGDRVTITCQASQDIFKYLNWYQQKPGKAPKLLIYA
ASTLQSGVPSRFSGSGSGTDFTLTISSLQPEDFATYYCQQSYSTPPTFGQ
GTRLEIK,
DIQMTQSPSSLSASVGDRVTITCRASQSISTWLAWYQQKPGKAPKLLIYY
ASSLQSGVPSRFSGSGSGTDFTLTISSLQPEDFATYYCQQSYSFPYTFGQ
GTKVEIK,
DIVMTQSPLSLPVTPGEPASISCSSSQSLLHSNGYNYLDWYLQKPGQSPQ
LLIYLGSNRASGVPDRFSGSGSGTDFTLKISRVEAEDVGVYYCMQALQTP
LTFGGGTKVEIK,
DIQMTQSPSSLSASVGDRVTITCQASQDISNYLNWYQQKPGKAPKLLIYS
ASNLRSGVPSRFSGSGSGTDFTLTISSLQPEDFATYYCQQGNTFPLTFGQ
GTKVEIK,
and
DIVMTQSPLSLPVTPGEPASISCRSSQSLLHSNGYNYLDWYLQKPGQSPQ
LLIYLGSNRASGVPDRFSGSGSGTDFTLKISRVEAEDVGVYYCMQGSHWP
PSFGQGTRLEIK.

[0642] VH

[0643] The ABP specific for *02:01_LLASSILCA may comprise a VH sequence. The VH sequence may be selected from

QVQLVQSGAEVKKPGASVKVSCKASGGTFSNYGISWVRQAPGQGLEWMGI
INPGGSTSYAQKFQGRVTMTRDTSTSTVYMELSSLRSEDTAVYYCARDGY
DFWSGYTSDDYWGQGTLVTVSS,
EVQLLESGGGLVQPGGSLRLSCAASGFTFSSYAMEIWVRQAPGKGLEWVS
GISGSGGSTYYADSVKGRFTISRDNSKNTLYLQMNSLRAEDTAVYYCASD
YGDYRGQGTLVTVSS,
QVQLVQSGAEVKKPGASVKVSCKASGYTFSNYYIHWVRQAPGQGLEWMGW
LNPNSGNTGYAQRFQGRVTMTRDTSTSTVYMELSSLRSEDTAVYYCARDL
MTTVVTPGDYGMDVWGQGTTVTVSS,
QVQLVQSGAEVKKPGASMKVSCKASGYTFTTDGISWVRQAPGQGLEWMGR
IYPHSGYTEYAKKFKGRVTMTRDTSTSTVYMELSSLRSEDTAVYYCARQD
GGAFAFDIWGQGTMVTVSS,
QVQLVQSGAEVKKPGASVKVSCKASGYTFTSQYMHWVRQAPGQGLEWMGW
ISPNNGDTNYAQKFQGRVTMTRDTSTSTVYMELSSLRSEDTAVYYCAREL
GYYYGMDVWGQGTTVTVSS,
QVQLVQSGAEVKKPGSSVKVSCKASRYTFTSYDINWVRQAPGQGLEWMGR
IIPMLNIANYAPKFQGRVTITADESTSTAYMELSSLRSEDTAVYYCARAL
IFGVPLLPYGMDVWGQGTTVTVSS,
EVQLLQSGGGLVQPGGSLRLSCAASGFTFSSSWMHWVRQAPGKGLEWVSF
ISTSSGYIYYADSVKGRFTISRDNSKNTLYLQMNSLRAEDTAVYYCAKDL
ATVGEPYYYYGMDVWGQGTTVTVSS,
and
QVQLVQSGAEVKKPGSSVKVSCKASGDTFNTYALSWVRQAPGQGLEWMGW
MNPNSGNAGYAQKFQGRVTITADESTSTAYMELSSLRSEDTAVYYCARLW
FGELHYYYYYGMDVWGQGTMVTVSS.

[0644] VH-VL Combinations

[0645] The ABP specific for A*02:01_LLASSILCA may comprise a particular VH sequence and a particular VL sequence. In some embodiments, the ABP specific for A*02:01_LLASSILCA comprises a VH sequence and a VL sequence from the scFv designated G7(1C06), G7(1G10), G7(1B04), G7(2C02), G7(1A03), G7(2E09), G7(1F08), or G7(3A09). The VH and VL sequences of identified scFvs that specifically bind A*02:01 LLASSILCA are shown in Table 29. For clarity, each identified scFv hit is designated a clone name, and each row contains the VH and VL sequences for that particular clone name. For example, the scFv identified by clone name G7(1C06) comprises the VH sequence QVQLVQSGAEVKKPGASVKVSCKASGGTFSNYGISWVRQAPGQGLEWMGIINPGGS TSYAQKFQGRVTMTRDTSTSTVYMELSSLRSEDTAVYYCARDGYDFWSGYTSDDY WGQGTLVTVSS and the VL sequence

EIVMTQSPATLSVSPGERATLSCRASQSVSSSNLAWYQQKPGQAPRLLIY
GASTRATGIPARFSGSGSGTEFTLTISSLQSEDFAVYYCHHYGRSHTFGQ
GTKVEIK.

[0646] Antibodies Specific for A*01:01_NTDNNLAVY (G2)

[0647] In some aspects, provided herein are ABPs comprising antibodies or antigen-binding fragments thereof that specifically bind an HLA-PEPTIDE target, wherein the HLA Class I molecule of the HLA-PEPTIDE target is HLA subtype A*01:01 and the HLA-restricted peptide of the HLA-PEPTIDE target comprises, consists of, or consists essentially of the sequence NTDNNLAVY (“G2”).

[0648] HLA-PEPTIDE target A*01:01_NTDNNLAVY, also referred to herein as “G2”, refers to an HLA-PEPTIDE target comprising the HLA-restricted peptide NTDNNLAVY complexed with the HLA Class I molecule A*01:01, wherein the HLA-restricted peptide is located in the peptide binding groove of an α1/α2 heterodimer portion of the HLA Class I molecule. The restricted peptide is from tumor-specific gene product KKLC-1. HLA-PEPTIDE target A*01:01_NTDNNLAVY is included in Table A1 as Target #33 and in Table A2 as Target #6500.

[0649] Sequences of G2-Specific Antibodies

[0650] The ABP specific for A*01:01_NTDNNLAVY may comprise one or more sequences, as described in further detail.

[0651] CDRs

[0652] The ABP specific for A*01:01_NTDNNLAVY may comprise one or more antibody complementarity determining region (CDR) sequences, e.g., may comprise three heavy chain CDRs (CDR-H1, CDR-H2, CDR-H3) and three light chain CDRs (CDR-L1, CDR-L2, CDR-L3).

[0653] The ABP specific for A*01:01_NTDNNLAVY may comprise a CDR-H3 sequence. The CDR-H3 sequence may be selected from CAATEWLGVW, CARANWLDYW, CARANWLDYW, CARDWVLDYW, CARGEWLDYW, CARGWELGYW, CARDFVGYDDW, CARDYGDLDYW, CARGSYGMDVW, CARDGYSGLDVW, CARDSGVGMDVW, CARDGVAVASDYW, CARGVNVDDFDYW, CARGDYTGNWYFDLW, CARANWLDYW, CARDQFYGGNSGGHDYW, CAREEDYW, CARGDWFDPW, CARGDWFDPW, CARGEWFDPW, CARSDWFDPW, CARDSGSYFDYW, CARDYGGYVDYW, CAREGPAALDVW, CARERRSGMDVW, CARVLQEGMDVW, CASERELPFDIW, CAKGGGGYGMDVW, CAAMGIAVAGGMDVW, CARNWNLDYW, CATYDDGMDVW, CARGGGGALDYW, CALSGNYYGMDVW, CARGNPWELRLDYW, and CARDKNYYGMDVW.

[0654] The ABP specific for A*01:01_NTDNNLAVY may comprise a CDR-L3 sequence. The CDR-L3 sequence may be selected from CQQSYNTPYTF, CQQSYSTPYTF, CQQSYSTPYSF, CQQSYSTPFTF, CQQSYGVPYTF, CQQSYSAPYTF, CQQSYSAPYTF, CQQSYSAPYSF, CQQSYSTPYTF, CQQSYSVPYSF, CQQSYSAPYTF, CQQSYSVPYSF, CQQSYSTPQTF, CQQLDSYPFTF, CQQSYSSPYTF, CQQSYSTPLTF, CQQSYSTPYSF, CQQSYSTPYTF, CQQSYSTPYTF, CQQSYSTPFTF, CQQSYSTPTF, CQQTYAIPLTF, CQQSYSTPYTF, CQQSYIAPFTF, CQQSYSIPLTF, CQQSYSNPTF, CQQSYSTPYSF, CQQSYSDQWTF, CQQSYLPPYSF, CQQSYSSPYTF, CQQSYTTPWTF, CQQSYLPPYSF, CQEGITYTF, CQQYYSYPFTF, and CQHYGYSPVTF.

[0655] The ABP specific for A*01:01_NTDNNLAVY may comprise a particular heavy chain CDR3 (CDR-H3) sequence and a particular light chain CDR3 (CDR-L3) sequence. In some embodiments, the ABP comprises the CDR-H3 and the CDR-L3 from the scFv designated G2(2E07), G2(2E03), G2(2A11), G2(2C06), G2(1G01), G2(1C02), G2(1H01), G2(1B12), G2(1B06), G2(2H10), G2(1H10), G2(2C11), G2(1C09), G2(1A10), G2(1B10), G2(1D07), G2(1E05), G2(1D03), G2(1G12), G2(2H11), G2(1C03), G2(1G07), G2(1F12), G2(1G03), G2(2B08), G2(2A10), G2(2D04), G2(1C06), G2(2A09), G2(1B08), G2(1E03), G2(2A03), G2(2F01), G2(1H11), or G2(1D06). CDR sequences of identified scFvs that specifically bind A*01:01_NTDNNLAVY are found in Table 28. For clarity, each identified scFv hit is designated a clone name, and each row contains the CDR sequences for that particular clone name. For example, the scFv identified by clone name G2(2E07) comprises the heavy chain CDR3 sequence CAATEWLGVW and the light chain CDR3 sequence CQQSYNTPYTF.

[0656] The ABP specific for A*01:01_NTDNNLAVY may comprise all six CDRs from the scFv designated G2(2E07), G2(2E03), G2(2A11), G2(2C06), G2(1G01), G2(1C02), G2(1H01), G2(1B12), G2(1B06), G2(2H10), G2(1H10), G2(2C11), G2(1C09), G2(1A10), G2(1B10), G2(1D07), G2(1E05), G2(1D03), G2(1G12), G2(2H11), G2(1C03), G2(1G07), G2(1F12), G2(1G03), G2(2B08), G2(2A10), G2(2D04), G2(1C06), G2(2A09), G2(1B08), G2(1E03), G2(2A03), G2(2F01), G2(1H11), or G2(1D06).

[0657] VL

[0658] The ABP specific for A*01:01_NTDNNLAVY may comprise a VL sequence. The VL sequence may be selected from

DIQMTQSPSSLSASVGDRVTITCRASQSISTWLAWYQQKPGKAPKLLIYA
ASSLRSGVPSRFSGSGSGTDFTLTISSLQPEDFATYYCQQSYNTPYTFGQ
GTKLEIK,
DIQMTQSPSSLSASVGDRVTITCRASQSISRWLAWYQQKPGKAPKLLIYA
ASTVQSGVPSRFSGSGSGTDFTLTISSLQPEDFATYYCQQSYSTPYTFGQ
GTKLEIK,
DIQMTQSPSSLSASVGDRVTITCRASQDISRWLAWYQQKPGKAPKLLIYA
ASRLQAGVPSRFSGSGSGTDFTLTISSLQPEDFATYYCQQSYSTPYSFGQ
GTKLEIK,
DIQMTQSPSSLSASVGDRVTITCRASQTISSWLAWYQQKPGKAPKLLIYA
ASSLQSGVPSRFSGSGSGTDFTLTISSLQPEDFATYYCQQSYSTPFTFGP
GTKVDIK,
DIQMTQSPSSLSASVGDRVTITCRASQTISSWLAWYQQKPGKAPKLLIYA
ASSLQSGVPSRFSGSGSGTDFTLTISSLQPEDFATYYCQQSYGVPYTFGQ
GTKVEIK,
DIQMTQSPSSLSASVGDRVTITCRASQSISNWLAWYQQKPGKAPKLLIYA
ASSLQSGVPSRFSGSGSGTDFTLTISSLQPEDFATYYCQQSYSAPYTFGP
GTKVDIK,
DIQMTQSPSSLSASVGDRVTITCRASQSVGNWLAWYQQKPGKAPKLLIYG
ASSLQTGVPSRFSGSGSGTDFTLTISSLQPEDFATYYCQQSYSAPYTFGQ
GTKVEIK,
DIQMTQSPSSLSASVGDRVTITCRASQNIGNWLAWYQQKPGKAPKLLIYA
ASTLQTGVPSRFSGSGSGTDFTLTISSLQPEDFATYYCQQSYSAPYSFGQ
GTKLEIK,
DIQMTQSPSSLSASVGDRVTITCRASQSISRWLAWYQQKPGKAPKLLIYA
ASSLQSGVPSRFSGSGSGTDFTLTISSLQPEDFATYYCQQSYSTPYTFGQ
GTKLEIK,
DIQMTQSPSSLSASVGDRVTITCRASQSISSWLAWYQQKPGKAPKLLIYG
ASSLQSGVPSRFSGSGSGTDFTLTISSLQPEDFATYYCQQSYSVPYSFGQ
GTKLEIK,
DIQMTQSPSSLSASVGDRVTITCRASQSISKWLAWYQQKPGKAPKLLIYA
ASSLQSGVPSRFSGSGSGTDFTLTISSLQPEDFATYYCQQSYSAPYTFGQ
GTKVEIK,
DIQMTQSPSSLSASVGDRVTITCRASQGISNYLAWYQQKPGKAPKLLIYA
ASTLQSGVPSRFSGSGSGTDFTLTISSLQPEDFATYYCQQSYSVPYSFGQ
GTKLEIK,
DIQMTQSPSSLSASVGDRVTITCRASQTISNYLNWYQQKPGKAPKLLIYA
ASNLQSGVPSRFSGSGSGTDFTLTISSLQPEDFATYYCQQSYSTPQTFGQ
GTKVEIK,
DIQMTQSPSSLSASVGDRVTITCRASRDIGRAVGWYQQKPGKAPKLLIYA
ASSLQSGVPSRFSGSGSGTDFTLTISSLQPEDFATYYCQQLDSYPFTFGP
GTKVDIK,
DIQMTQSPSSLSASVGDRVTITCRASQSISSWLAWYQQKPGKAPKLLIYA
ASTLQSGVPSRFSGSGSGTDFTLTISSLQPEDFATYYCQQSYSSPYTFGP
GTKVDIK,
DIQMTQSPSSLSASVGDRVTITCQASQDISNYLNWYQQKPGKAPKLLIYA
ASSLQSGVPSRFSGSGSGTDFTLTISSLQPEDFATYYCQQSYSTPLTFGG
GTKLEIK,
DIQMTQSPSSLSASVGDRVTITCRASQSIGRWLAWYQQKPGKAPKLLIYA
ASSLQSGVPSRFSGSGSGTDFTLTISSLQPEDFATYYCQQSYSTPYSFGQ
GTKVEIK,
DIQMTQSPSSLSASVGDRVTITCRASQSISTWLAWYQQKPGKAPKLLIYA
ASTLQSGVPSRFSGSGSGTDFTLTISSLQPEDFATYYCQQSYSTPYTFAQ
GTKLEIK,
DIQMTQSPSSLSASVGDRVTITCQASQDISNYLNWYQQKPGKAPKLLIYG
ASRLQSGVPSRFSGSGSGTDFTLTISSLQPEDFATYYCQQSYSTPYTFGQ
GTKLEIK,
DIQMTQSPSSLSASVGDRVTITCRASQSISSWLAWYQQKPGKAPKLLIYA
ASTLQSGVPSRFSGSGSGTDFTLTISSLQPEDFATYYCQQSYSTPFTFGP
GTKVDIK,
DIQMTQSPSSLSASVGDRVTITCRASQSVSNWLAWYQQKPGKAPKLLIYA
ASSLQSGVPSRFSGSGSGTDFTLTISSLQPEDFATYYCQQSYSTPTFGQG
TKLEIK,
DIQMTQSPSSLSASVGDRVTITCQASQDISNYLNWYQQKPGKAPKLLIYA
ASTLQSGVPSRFSGSGSGTDFTLTISSLQPEDFATYYCQQTYAIPLTFGG
GTKVEIK,
DIQMTQSPSSLSASVGDRVTITCQASQDIGSWLAWYQQKPGKAPKLLIYA
TSSLQSGVPSRFSGSGSGTDFTLTISSLQPEDFATYYCQQSYSTPYTFGQ
GTKLEIK,
DIQMTQSPSSLSASVGDRVTITCRASQGISRWLAWYQQKPGKAPKLLIYA
ASTLQPGVPSRFSGSGSGTDFTLTISSLQPEDFATYYCQQSYIAPFTFGP
GTKVDIK,
DIQMTQSPSSLSASVGDRVTITCRASQGISNYLAWYQQKPGKAPKLLIYA
ASRLESGVPSRFSGSGSGTDFTLTISSLQPEDFATYYCQQSYSIPLTFGG
GTKVEIK,
DIQMTQSPSSLSASVGDRVTITCRASQSISSYLNWYQQKPGKAPKLLIYG
VSSLQSGVPSRFSGSGSGTDFTLTISSLQPEDFATYYCQQSYSNPTFGQG
TKVEIK,
DIQMTQSPSSLSASVGDRVTITCRASQSISSWVAWYQQKPGKAPKLLIYG
ASNLESGVPSRFSGSGSGTDFTLTISSLQPEDFATYYCQQSYSTPYSFGQ
GTKLEIK,
DIQMTQSPSSLSASVGDRVTITCRASQGISNYLAWYQQKPGKAPKLLIYA
ASSLQSGVPSRFSGSGSGTDFTLTISSLQPEDFATYYCQQSYSDQWTFGQ
GTKVEIK,
DIQMTQSPSSLSASVGDRVTITCRASQSISRWLAWYQQKPGKAPKLLIYA
ASSLQSGVPSRFSGSGSGTDFTLTISSLQPEDFATYYCQQSYLPPYSFGQ
GTKVEIK,
DIQMTQSPSSLSASVGDRVTITCRASQSISNWLAWYQQKPGKAPKLLIYA
ASSLQSGVPSRFSGSGSGTYFTLTISSLQPEDFATYYCQQSYSSPYTFGQ
GTKLEIK,
DIQMTQSPSSLSASVGDRVTITCRASQSISHYLNWYQQKPGKAPKLLIYG
ASSLQSGVPSRFSGSGSGTDFTLTISSLQPEDFATYYCQQSYTTPWTFGQ
GTRLEIK,
DIQMTQSPSSLSASVGDRVTITCRASQSISSWLAWYQQKPGKAPKLLIYA
ASTLQSGVPSRFSGSGSGTDFTLTISSLQPEDFATYYCQQSYLPPYSFGQ
GTKLEIK,
DIQMTQSPSSLSASVGDRVTITCQASQDISNYLNWYQQKPGKAPKLLIYG
ASRLQSGVPSRFSGSGSGTDFTLTISSLQPEDFATYYCQEGITYTFGQGT
KVEIK,
DIQMTQSPSSLSASVGDRVTITCQASQDISNYLNWYQQKPGKAPKLLIYA
ASSLQSGVPSRFSGSGSGTDFTLTISSLQPEDFATYYCQQYYSYPFTFGP
GTKVDIK,
and
EIVMTQSPATLSVSPGERATLSCRASQSVSRNLAWYQQKPGQAPRLLIYG
ASTRATGIPARFSGSGSGTEFTLTISSLQSEDFAVYYCQHYGYSPVTFGQ
GTKLEIK.

[0659] VH

[0660] The ABP specific for A*01:01_NTDNNLAVY may comprise a VH sequence. The VH sequence may be selected from

QVQLVQSGAEVKKPGASVKVSCKASGGTFSSATISWVRQAPGQGLEWMGW
IYPNSGGTVYAQKFQGRVTMTRDTSTSTVYMELSSLRSEDTAVYYCAATE
WLGVWGQGTTVTVSS,
EVQLLQSGAEVKKPGSSVKVSCKASGGTFSSYAISWVRQAPGQGLEWMGW
INPNSGGTISAPNFQGRVTMTRDTSTSTVYMELSSLRSEDTAVYYCARAN
WLDYWGQGTLVTVSS,
EVQLLESGAEVKKPGASVKVSCKASGYTFTTYDLAWVRQAPGQGLEWMGW
INPNSGGTNYAQKFQGRVTMTRDTSTSTVYMELSSLRSEDTAVYYCARAN
WLDYWGQGTLVTVSS,
QVQLVQSGAEVKKPGASVKVSCKSSGYSFDSYVVNWVRQAPGQGLEWMGW
INPNSGGTNYAQKFQGRVTMTRDTSTSTVYMELSSLRSEDTAVYYCARDW
VLDYWGQGTLVTVSS,
QVQLVQSGAEVKKPGASVKVSCKASGYTFTSYGISWVRQAPGQGLEWMGW
MNPNSGGTNYAQKFQGRVTMTRDTSTSTVYMELSSLRSEDTAVYYCARGE
WLDYWGQGTLVTVSS,
QVQLVQSGAEVKKPGASVKVSCKASGYTFTSYGISWVRQAPGQGLEWMGW
INPNSGGTNYAQKFQGRVTMTRDTSTSTVYMELSSLRSEDTAVYYCARGW
ELGYWGQGTLVTVSS,
QVQLVQSGAEVKKPGASVKVSCKASGYTFTRYTINWVRQAPGQGLEWMGW
INPNSGGTNYAQKFQGRVTMTRDTSTSTVYMELSSLRSEDTAVYYCARDF
VGYDDWGQGTLVTVSS,
QVQLVQSGAEVKKPGASVKVSCKASGYTFTSYGITWVRQAPGQGLEWMGW
INPNSGGTNYAQKFQGRVTMTRDTSTSTVYMELSSLRSEDTAVYYCARDY
GDLDYWGQGTLVTVSS,
QVQLVQSGAEVKKPGASVKVSCKASGGTFSNYILSWVRQAPGQGLEWMGW
INPDSGGTNYAQKFQGRVTMTRDTSTSTVYMELSSLRSEDTAVYYCARGS
YGMDVWGQGTTVTVSS,
QVQLVQSGAEVKKPGASVKVSCKASGYSFTRYNMHWVRQAPGQGLEWMGW
INPNSGGTNYAQKFQGRVTMTRDTSTSTVYMELSSLRSEDTAVYYCARDG
YSGLDVWGKGTTVTVSS,
QVQLVQSGAEVKKPGASVKVSCKASGGTFSSYAISWVRQAPGQGLEWMGW
INPNNGGTNYAQKFQGRVTMTRDTSTSTVYMELSSLRSEDTAVYYCARDS
GVGMDVWGQGTTVTVSS,
QVQLVQSGAEVKKPGASVKVSCKASGGTFNNYAFSWVRQAPGQGLEWMGW
INPNSGGTNYAQKFQGRVTMTRDTSTSTVYMELSSLRSEDTAVYYCARDG
VAVASDYWGQGTLVTVSS,
QVQLVQSGAEVKKPGASVKVSCKASGYTFSSYNMEIWVRQAPGQGLEWMG
WINGNTGGTNYAQKFQGRVTMTRDTSTSTVYMELSSLRSEDTAVYYCARG
VNVDDFDYWGQGTLVTVSS,
QVQLVQSGAEVKKPGASVKVSCKASGGTFSSYAFSWVRQAPGQGLEWMGW
INPDTGYTRYAQKFQGRVTMTRDTSTSTVYMELSSLRSEDTAVYYCARGD
YTGNWYFDLWGRGTLVTVSS,
EVQLLESGAEVKKPGASVKVSCKASGYTFTSYGISWVRQAPGQGLEWMGW
INPYSGGTNYAQKLQGRVTMTRDTSTSTVYMELSSLRSEDTAVYYCARAN
WLDYWGQGTLVTVSS,
QVQLVQSGAEVKKPGASVKVSCKASGYTFTSYGISWVRQAPGQGLEWMGW
ISAYNGYTNYAQNLQGRVTMTRDTSTSTVYMELSSLRSEDTAVYYCARDQ
FYGGNSGGHDYWGQGTLVTVSS,
QVQLVQSGAEVKKPGASVKVSCKASGYTFTDYNMEIWVRQAPGQGLEWMG
WMNPNSGGTNYAQKFQGRVTMTRDTSTSTVYMELSSLRSEDTAVYYCAR
E-EDYWGQGTLVTVSS,
QVQLVQSGAEVKKPGASVKVSCKASGYTFTRYTINWVRQAPGQGLEWMGW
INPNSGGANYAQKFQGRVTMTRDTSTSTVYMELSSLRSEDTAVYYCARGD
WFDPWGQGTLVTVSS,
QVQLVQSGAEVKKPGASVKVSCKASGYTFTSYLMEIWVRQAPGQGLEWMG
WISPNSGGTNYAQKFQGRVTMTRDTSTSTVYMELSSLRSEDTAVYYCARG
DWFDPWGQGTLVTVSS,
QVQLVQSGAEVKKPGASVKVSCKASGYTFSDYYVHWVRQAPGQGLEWMGW
INPNSGGTNYAQKFQGRVTMTRDTSTSTVYMELSSLRSEDTAVYYCARGE
WFDPWGQGTLVTVSS,
QVQLVQSGAEVKKPGASVKVSCKASGYTFTTYYMHWVRQAPGQGLEWMGW
INPNSGGTNYAQKFQGRVTMTRDTSTSTVYMELSSLRSEDTAVYYCARSD
WFDPWGQGTLVTVSS,
QVQLVQSGAEVKKPGASVKVSCKASGGTFSNYAINWVRQAPGQGLEWMGW
ISPYSGGTNYAQKFQGRVTMTRDTSTSTVYMELSSLRSEDTAVYYCARDS
GSYFDYWGQGTLVTVSS,
QVQLVQSGAEVKKPGASVKVSCKASGYTFTDYYMEIWVRQAPGQGLEWMG
WIYPNTGGTNYAQKFQGRVTMTRDTSTSTVYMELSSLRSEDTAVYYCARD
YGGYVDYWGQGTLVTVSS,
EVQLLESGAEVKKPGASVKVSCKASGYTFTSYAMNWVRQAPGQGLEWMGW
MNPNSGGTKYAQKFQGRVTMTRDTSTSTVYMELSSLRSEDTAVYYCAREG
PAALDVWGQGTLVTVSS,
QVQLVQSGAEVKKPGASVKVSCKASGYTLTSHLIHWVRQAPGQGLEWMGW
INPNSGGTNYAQKFQGRVTMTRDTSTSTVYMELSSLRSEDTAVYYCARER
RSGMDVWGQGTTVTVSS,
EVQLLESGAEVKKPGASVKVSCKASGYSFTDYIVHWVRQAPGQGLEWMGW
INPYSGGTKYAQKFQGRVTMTRDTSTSTVYMELSSLRSEDTAVYYCARVL
QEGMDVWGQGTLVTVSS,
QVQLVQSGAEVKKPGASVKVSCKASGYTFSNFLINWVRQAPGQGLEWMGW
INPNSGGTNYAQKFQGRVTMTRDTSTSTVYMELSSLRSEDTAVYYCASER
ELPFDIWGQGTMVTVSS,
QVQLVQSGAEVKKPGASVKVSCKASGYTFTDYQMFWVRQAPGQGLEWMGW
INPNSGGTNYAQKFQGRVTMTRDTSTSTVYMELSSLRSEDTAVYYCAKGG
GGYGMDVWGQGTTVTVSS,
QVQLVQSGAEVKKPGASVKVSCKASGGTFSSYAISWVRQAPGQGLEWMGW
INPNSGGTNYAQKFQGRVTMTRDTSTSTVYMELSSLRSEDTAVYYCAAMG
IAVAGGMDVWGQGTLVTVSS,
QVQLVQSGAEVKKPGASVKVSCKASGYTFTNYHMEIWVRQAPGQGLEWMG
WIHPDSGGTSYAQKFQGRVTMTRDTSTSTVYMELSSLRSEDTAVYYCARN
WNLDYWGQGTLVTVSS,
QVQLVQSGAEVKKPGASVKVSCKASGYTFTGYYMEIWVRQAPGQGLEWMG
WMNPNSGNTGYAQKFQGRVTMTRDTSTSTVYMELSSLRSEDTAVYYCATY
DDGMDVWGQGTTVTVSS,
QVQLVQSGAEVKKPGASVKVSCKASGYTFTSYTVNWVRQAPGQGLEWMGW
INPNSGGTKYAQNFQGRVTMTRDTSTSTVYMELSSLRSEDTAVYYCARGG
GGALDYWGQGTLVTVSS,
QVQLVQSGAEVKKPGASVKVSCKASGYTFTSYYMHWVRQAPGQGLEWMGM
INPRDDTTDYARDFQGRVTMTRDTSTSTVYMELSSLRSEDTAVYYCALSG
NYYGMDVWGQGTTVTVSS,
QVQLVQSGAEVKKPGASVKVSCKASGYTFTNYYMEIWVRQAPGQGLEWMG
MINPSGGGTSYAQKFQGRVTMTRDTSTSTVYMELSSLRSEDTAVYYCARG
NPWELRLDYWGQGTLVTVSS,
and
QVQLVQSGAEVKKPGSSVKVSCKASGYTFTSQYMHWVRQAPGQGLEWMGR
IIPLLGIVNYAQKFQGRVTITADESTSTAYMELSSLRSEDTAVYYCARDK
NYYGMDVWGQGTTVTVSS.

[0661] VH-VL Combinations

[0662] The ABP specific for A*01:01_NTDNNLAVY may comprise a particular VH sequence and a particular VL sequence. In some embodiments, the ABP specific for A*01:01_NTDNNLAVY comprises the VH sequence and the VL sequence from the scFv designated G2(2E07), G2(2E03), G2(2A11), G2(2C06), G2(1G01), G2(1C02), G2(1H01), G2(1B12), G2(1B06), G2(2H10), G2(1H10), G2(2C11), G2(1C09), G2(1A10), G2(1B10), G2(1D07), G2(1E05), G2(1D03), G2(1G12), G2(2H11), G2(1C03), G2(1G07), G2(1F12), G2(1G03), G2(2B08), G2(2A10), G2(2D04), G2(1C06), G2(2A09), G2(1B08), G2(1E03), G2(2A03), G2(2F01), G2(1H11), or G2(1D06). VH and VL sequences of identified scFvs that specifically bind A*01:01_NTDNNLAVY are found in Table 27. For clarity, each identified scFv hit is designated a clone name, and each row contains the CDR sequences for that particular clone name. For example, the scFv identified by clone name G2(2E07) comprises the VH sequence QVQLVQSGAEVKKPGASVKVSCKASGGTFSSATISWVRQAPGQGLEWMGWIYPNS GGTVYAQKFQGRVTMTRDTSTSTVYMELSSLRSEDTAVYYCAATEWLGVWGQGTT VTVSS and the VL sequence

DIQMTQSPSSLSASVGDRVTITCRASQSISTWLAWYQQKPGKAPKLLIYA
ASSLRSGVPSRFSGSGSGTDFTLTISSLQPEDFATYYCQQSYNTPYTFGQ
GTKLEIK.

[0663] Receptors

[0664] Among the provided ABPs, e.g., HLA-PEPTIDE ABPs, are receptors. The receptors can include antigen receptors and other chimeric receptors that specifically bind an HLA-PEPTIDE target disclosed herein. The receptor may be a chimeric antigen receptor (CAR).

[0665] Also provided are cells expressing the receptors and uses thereof in adoptive cell therapy, such as treatment of diseases and disorders associated with HLA-PEPTIDE expression, including cancer.

[0666] Exemplary antigen receptors, including CARs, and methods for engineering and introducing such receptors into cells, include those described, for example, in international patent application publication numbers WO200014257, WO2013126726, WO2012/129514, WO2014031687, WO2013/166321, WO2013/071154, WO2013/123061 U.S. patent application publication numbers US2002131960, US2013287748, US20130149337, U.S. Pat. Nos. 6,451,995, 7,446,190, 8,252,592, 8,339,645, 8,398,282, 7,446,179, 6,410,319, 7,070,995, 7,265,209, 7,354,762, 7,446,191, 8,324,353, and 8,479,118, and European patent application number EP2537416, and/or those described by Sadelain et al., Cancer Discov. 2013 April; 3(4): 388-398; Davila et al. (2013) PLoS ONE 8(4): e61338; Turtle et al., Curr. Opin. Immunol., 2012 October; 24(5): 633-39; Wu et al., Cancer, 2012 Mar. 18(2): 160-75. In some aspects, the antigen receptors include a CAR as described in U.S. Pat. No. 7,446,190, and those described in International Patent Application Publication No.: WO/2014055668 A1. Exemplary of the CARs include CARs as disclosed in any of the aforementioned publications, such as WO2014031687, U.S. Pat. Nos. 8,339,645, 7,446,179, US 2013/0149337, U.S. Pat. Nos. 7,446,190, 8,389,282, e.g., and in which the antigen-binding portion, e.g., scFv, is replaced by an antibody, e.g., as provided herein.

[0667] Among the chimeric receptors are chimeric antigen receptors (CARs). The chimeric receptors, such as CARs, generally include an extracellular antigen binding domain that includes, is, or is comprised within, one of the provided anti-HLA-PEPTIDE ABPs such as anti-HLA-PEPTIDE antibodies. Thus, the chimeric receptors, e.g., CARs, typically include in their extracellular portions one or more HLA-PEPTIDE-ABPs, such as one or more antigen-binding fragment, domain, or portion, or one or more antibody variable domains, and/or antibody molecules, such as those described herein. In some embodiments, the CAR includes a HLA-PEPTIDE-binding portion or portions of the ABP (e.g., antibody) molecule, such as a variable heavy (VH) chain region and/or variable light (VL) chain region of the antibody, e.g., an scFv antibody fragment.

[0668] CARs

[0669] In an aspect, the ABPs provided herein, e.g., ABPs that specifically bind HLA-PEPTIDE targets disclosed herein, include CARs.

[0670] In some embodiments, the CAR is a recombinant CAR.

[0671] The recombinant CAR may be a human CAR, comprising fully human sequences, e.g., natural human sequences.

[0672] In some embodiments, the recombinant receptor such as a CAR, such as the antibody portion thereof, further includes a spacer, which may be or include at least a portion of an immunoglobulin constant region or variant or modified version thereof, such as a hinge region, e.g., an IgG4 hinge region, and/or a CH1/CL and/or Fc region. In some embodiments, the constant region or portion is of a human IgG, such as IgG4 or IgG1. In some aspects, the portion of the constant region serves as a spacer region between the antigen-recognition component, e.g., scFv, and transmembrane domain. The spacer can be of a length that provides for increased responsiveness of the cell following antigen binding, as compared to in the absence of the spacer. In some examples, the spacer is at or about 12 amino acids in length or is no more than 12 amino acids in length. Exemplary spacers include those having at least about 10 to 229 amino acids, about 10 to 200 amino acids, about 10 to 175 amino acids, about 10 to 150 amino acids, about 10 to 125 amino acids, about 10 to 100 amino acids, about 10 to 75 amino acids, about 10 to 50 amino acids, about 10 to 40 amino acids, about 10 to 30 amino acids, about 10 to 20 amino acids, or about 10 to 15 amino acids, and including any integer between the endpoints of any of the listed ranges. In some embodiments, a spacer region has about 12 amino acids or less, about 119 amino acids or less, or about 229 amino acids or less. Exemplary spacers include IgG4 hinge alone, IgG4 hinge linked to CH2 and CH3 domains, or IgG4 hinge linked to the CH3 domain. Exemplary spacers include, but are not limited to, those described in Hudecek et al. (2013) Clin. Cancer Res., 19:3153 or international patent application publication number WO2014031687. In some embodiments, the constant region or portion is of IgD.

[0673] The antigen recognition domain of a receptor such as a CAR can be linked to one or more intracellular signaling components, such as signaling components that mimic activation through an antigen receptor complex, such as a TCR complex, in the case of a CAR, and/or signal via another cell surface receptor. Thus, in some embodiments, the HLA-PEPTIDE-specific binding component (e.g., ABP) is linked to one or more transmembrane and intracellular signaling domains. In some embodiments, the transmembrane domain is fused to the extracellular domain. In one embodiment, a transmembrane domain that naturally is associated with one of the domains in the receptor, e.g., CAR, is used. In some instances, the transmembrane domain is selected or modified by amino acid substitution to avoid binding of such domains to the transmembrane domains of the same or different surface membrane proteins to minimize interactions with other members of the receptor complex.

[0674] The transmembrane domain in some embodiments is derived either from a natural or from a synthetic source. Where the source is natural, the domain in some aspects is derived from any membrane-bound or transmembrane protein. Transmembrane regions include those derived from (i.e. comprise at least the transmembrane region(s) of) the alpha, beta or zeta chain of the T-cell receptor, CD28, CD3 epsilon, CD45, CD4, CD5, CDS, CD9, CD 16, CD22, CD33, CD37, CD64, CD80, CD86, CD 134, CD137, and/or CD 154. Alternatively the transmembrane domain in some embodiments is synthetic. In some aspects, the synthetic transmembrane domain comprises predominantly hydrophobic residues such as leucine and valine. In some aspects, a triplet of phenylalanine, tryptophan and valine will be found at each end of a synthetic transmembrane domain. In some embodiments, the linkage is by linkers, spacers, and/or transmembrane domain(s).

[0675] Among the intracellular signaling domains are those that mimic or approximate a signal through a natural antigen receptor, a signal through such a receptor in combination with a costimulatory receptor, and/or a signal through a costimulatory receptor alone. In some embodiments, a short oligo- or polypeptide linker, for example, a linker of between 2 and 10 amino acids in length, such as one containing glycines and serines, e.g., glycine-serine doublet, is present and forms a linkage between the transmembrane domain and the cytoplasmic signaling domain of the receptor.

[0676] The receptor, e.g., the CAR, can include at least one intracellular signaling component or components. In some embodiments, the receptor includes an intracellular component of a TCR complex, such as a TCR CD3 chain that mediates T-cell activation and cytotoxicity, e.g., CD3 zeta chain. Thus, in some aspects, the HLA-PEPTIDE-binding ABP (e.g., antibody) is linked to one or more cell signaling modules. In some embodiments, cell signaling modules include CD3 transmembrane domain, CD3 intracellular signaling domains, and/or other CD transmembrane domains. In some embodiments, the receptor, e.g., CAR, further includes a portion of one or more additional molecules such as Fc receptor-gamma, CD8, CD4, CD25, or CD16. For example, in some aspects, the CAR includes a chimeric molecule between CD3-zeta or Fc receptor-gamma and CD8, CD4, CD25 or CD16.

[0677] In some embodiments, upon ligation of the CAR, the cytoplasmic domain or intracellular signaling domain of the receptor activates at least one of the normal effector functions or responses of the immune cell, e.g., T cell engineered to express the receptor. For example, in some contexts, the receptor induces a function of a T cell such as cytolytic activity or T-helper activity, such as secretion of cytokines or other factors. In some embodiments, a truncated portion of an intracellular signaling domain of an antigen receptor component or costimulatory molecule is used in place of an intact immunostimulatory chain, for example, if it transduces the effector function signal. In some embodiments, the intracellular signaling domain or domains include the cytoplasmic sequences of the T cell receptor (TCR), and in some aspects also those of co-receptors that in the natural context act in concert with such receptor to initiate signal transduction following antigen receptor engagement, and/or any derivative or variant of such molecules, and/or any synthetic sequence that has the same functional capability.

[0678] In the context of a natural TCR, full activation generally requires not only signaling through the TCR, but also a costimulatory signal. Thus, in some embodiments, to promote full activation, a component for generating secondary or co-stimulatory signal is also included in the receptor. In other embodiments, the receptor does not include a component for generating a costimulatory signal. In some aspects, an additional receptor is expressed in the same cell and provides the component for generating the secondary or costimulatory signal.

[0679] T cell activation is in some aspects described as being mediated by two classes of cytoplasmic signaling sequences: those that initiate antigen-dependent primary activation through the TCR (primary cytoplasmic signaling sequences), and those that act in an antigen-independent manner to provide a secondary or co-stimulatory signal (secondary cytoplasmic signaling sequences). In some aspects, the receptor includes one or both of such signaling components.

[0680] In some aspects, the receptor includes a primary cytoplasmic signaling sequence that regulates primary activation of the TCR complex. Primary cytoplasmic signaling sequences that act in a stimulatory manner may contain signaling motifs which are known as immunoreceptor tyrosine-based activation motifs or ITAMs. Examples of ITAM containing primary cytoplasmic signaling sequences include those derived from TCR or CD3 zeta, FcR gamma, FcR beta, CD3 gamma, CD3 delta, CD3 epsilon, CDS, CD22, CD79a, CD79b, and CD66d. In some embodiments, cytoplasmic signaling molecule(s) in the CAR contain(s) a cytoplasmic signaling domain, portion thereof, or sequence derived from CD3 zeta.

[0681] In some embodiments, the receptor includes a signaling domain and/or transmembrane portion of a costimulatory receptor, such as CD28, 4-1BB, OX40, DAP10, and ICOS. In some aspects, the same receptor includes both the activating and costimulatory components.

[0682] In some embodiments, the activating domain is included within one receptor, whereas the costimulatory component is provided by another receptor recognizing another antigen. In some embodiments, the receptors include activating or stimulatory receptors, and costimulatory receptors, both expressed on the same cell (see WO2014/055668). In some aspects, the HLA-PEPTIDE-targeting receptor is the stimulatory or activating receptor; in other aspects, it is the costimulatory receptor. In some embodiments, the cells further include inhibitory receptors (e.g., iCARs, see Fedorov et al., Sci. Transl. Medicine, 5(215) (December, 2013), such as a receptor recognizing an antigen other than HLA-PEPTIDE, whereby an activating signal delivered through the HLA-PEPTIDE-targeting receptor is diminished or inhibited by binding of the inhibitory receptor to its ligand, e.g., to reduce off-target effects.

[0683] In certain embodiments, the intracellular signaling domain comprises a CD28 transmembrane and signaling domain linked to a CD3 (e.g., CD3-zeta) intracellular domain. In some embodiments, the intracellular signaling domain comprises a chimeric CD28 and CD137 (4-1BB, TNFRSF9) co-stimulatory domains, linked to a CD3 zeta intracellular domain.

[0684] In some embodiments, the receptor encompasses one or more, e.g., two or more, costimulatory domains and an activation domain, e.g., primary activation domain, in the cytoplasmic portion. Exemplary receptors include intracellular components of CD3-zeta, CD28, and 4-1BB.

[0685] In some embodiments, the CAR or other antigen receptor further includes a marker, such as a cell surface marker, which may be used to confirm transduction or engineering of the cell to express the receptor, such as a truncated version of a cell surface receptor, such as truncated EGFR (tEGFR). In some aspects, the marker includes all or part (e.g., truncated form) of CD34, a nerve growth factor receptor (NGFR), or epidermal growth factor receptor (e.g., tEGFR). In some embodiments, the nucleic acid encoding the marker is operably linked to a polynucleotide encoding for a linker sequence, such as a cleavable linker sequence or a ribosomal skip sequence, e.g., T2A. See WO2014031687. In some embodiments, introduction of a construct encoding the CAR and EGFRt separated by a T2A ribosome switch can express two proteins from the same construct, such that the EGFRt can be used as a marker to detect cells expressing such construct. In some embodiments, a marker, and optionally a linker sequence, can be any as disclosed in published patent application No. WO2014031687. For example, the marker can be a truncated EGFR (tEGFR) that is, optionally, linked to a linker sequence, such as a T2A ribosomal skip sequence.

[0686] In some embodiments, the marker is a molecule, e.g., cell surface protein, not naturally found on T cells or not naturally found on the surface of T cells, or a portion thereof.

[0687] In some embodiments, the molecule is a non-self molecule, e.g., non-self protein, i.e., one that is not recognized as “self” by the immune system of the host into which the cells will be adoptively transferred.

[0688] In some embodiments, the marker serves no therapeutic function and/or produces no effect other than to be used as a marker for genetic engineering, e.g., for selecting cells successfully engineered. In other embodiments, the marker may be a therapeutic molecule or molecule otherwise exerting some desired effect, such as a ligand for a cell to be encountered in vivo, such as a costimulatory or immune checkpoint molecule to enhance and/or dampen responses of the cells upon adoptive transfer and encounter with ligand.

[0689] The CAR may comprise one or modified synthetic amino acids in place of one or more naturally-occurring amino acids. Exemplary modified amino acids include, but are not limited to, aminocyclohexane carboxylic acid, norleucine, α-amino n-decanoic acid, homoserine, S-acetylaminomethylcysteine, trans-3- and trans-4-hydroxyproline, 4-aminophenylalanine, 4-nitrophenylalanine, 4-chlorophenylalanine, 4-carboxyphenylalanine, (3-phenylserine (3-hydroxyphenylalanine, phenylglycine, α-naphthylalanine, cyclohexylalanine, cyclohexylglycine, indoline-2-carboxylic acid, 1,2,3,4-tetrahydroisoquinoline-3-carboxylic acid, aminomalonic acid, aminomalonic acid monoamide, N′-benzyl-N′-methyl-lysine, N′,N′-dibenzyl-lysine, 6-hydroxylysine, ornithine, α-aminocyclopentane carboxylic acid, α-aminocyclohexane carboxylic acid, α-aminocycloheptane carboxylic acid, α-(2-amino-2-norbomane)-carboxylic acid, α,γ-diaminobutyric acid, α,γ-diaminopropionic acid, homophenylalanine, and α-tertbutylglycine.

[0690] In some cases, CARs are referred to as first, second, and/or third generation CARs. In some aspects, a first generation CAR is one that solely provides a CD3-chain induced signal upon antigen binding; in some aspects, a second-generation CAR is one that provides such a signal and costimulatory signal, such as one including an intracellular signaling domain from a costimulatory receptor such as CD28 or CD137; in some aspects, a third generation CAR in some aspects is one that includes multiple costimulatory domains of different costimulatory receptors.

[0691] In some embodiments, the chimeric antigen receptor includes an extracellular portion containing an antibody or fragment described herein. In some aspects, the chimeric antigen receptor includes an extracellular portion containing an antibody or fragment described herein and an intracellular signaling domain. In some embodiments, an antibody or fragment includes an scFv or a single-domain VH antibody and the intracellular domain contains an ITAM. In some aspects, the intracellular signaling domain includes a signaling domain of a zeta chain of a CD3-zeta (CD3) chain. In some embodiments, the chimeric antigen receptor includes a transmembrane domain linking the extracellular domain and the intracellular signaling domain.

[0692] In some aspects, the transmembrane domain contains a transmembrane portion of CD28. The extracellular domain and transmembrane can be linked directly or indirectly. In some embodiments, the extracellular domain and transmembrane are linked by a spacer, such as any described herein. In some embodiments, the chimeric antigen receptor contains an intracellular domain of a T cell costimulatory molecule, such as between the transmembrane domain and intracellular signaling domain. In some aspects, the T cell costimulatory molecule is CD28 or 41BB.

[0693] In some embodiments, the CAR contains an antibody, e.g., an antibody fragment, a transmembrane domain that is or contains a transmembrane portion of CD28 or a functional variant thereof, and an intracellular signaling domain containing a signaling portion of CD28 or functional variant thereof and a signaling portion of CD3 zeta or functional variant thereof. In some embodiments, the CAR contains an antibody, e.g., antibody fragment, a transmembrane domain that is or contains a transmembrane portion of CD28 or a functional variant thereof, and an intracellular signaling domain containing a signaling portion of a 4-1BB or functional variant thereof and a signaling portion of CD3 zeta or functional variant thereof. In some such embodiments, the receptor further includes a spacer containing a portion of an Ig molecule, such as a human Ig molecule, such as an Ig hinge, e.g. an IgG4 hinge, such as a hinge-only spacer.

[0694] In some embodiments, the transmembrane domain of the receptor, e.g., the CAR, is a transmembrane domain of human CD28 or variant thereof, e.g., a 27-amino acid transmembrane domain of a human CD28 (Accession No.: P10747.1).

[0695] In some embodiments, the chimeric antigen receptor contains an intracellular domain of a T cell costimulatory molecule. In some aspects, the T cell costimulatory molecule is CD28 or 41BB.

[0696] In some embodiments, the intracellular signaling domain comprises an intracellular costimulatory signaling domain of human CD28 or functional variant or portion thereof, such as a 41 amino acid domain thereof and/or such a domain with an LL to GG substitution at positions 186-187 of a native CD28 protein. In some embodiments, the intracellular domain comprises an intracellular costimulatory signaling domain of 41BB or functional variant or portion thereof, such as a 42-amino acid cytoplasmic domain of a human 4-1BB (Accession No. Q07011.1) or functional variant or portion thereof.

[0697] In some embodiments, the intracellular signaling domain comprises a human CD3 zeta stimulatory signaling domain or functional variant thereof, such as a 112 AA cytoplasmic domain of isoform 3 of human CD3.zeta. (Accession No.: P20963.2) or a CD3 zeta signaling domain as described in U.S. Pat. No. 7,446,190 or 8,911,993.

[0698] In some aspects, the spacer contains only a hinge region of an IgG, such as only a hinge of IgG4 or IgG1. In other embodiments, the spacer is an Ig hinge, e.g., and IgG4 hinge, linked to a CH2 and/or CH3 domains. In some embodiments, the spacer is an Ig hinge, e.g., an IgG4 hinge, linked to CH2 and CH3 domains. In some embodiments, the spacer is an Ig hinge, e.g., an IgG4 hinge, linked to a CH3 domain only. In some embodiments, the spacer is or comprises a glycine-serine rich sequence or other flexible linker such as known flexible linkers.

[0699] For example, in some embodiments, the CAR includes an antibody or fragment thereof, such as any of the HLA-PEPTIDE antibodies, including single chain antibodies (sdAbs, e.g. containing only the VH region) and scFvs, described herein, a spacer such as any of the Ig-hinge containing spacers, a CD28 transmembrane domain, a CD28 intracellular signaling domain, and a CD3 zeta signaling domain. In some embodiments, the CAR includes an antibody or fragment, such as any of the HLA-PEPTIDE antibodies, including sdAbs and scFvs described herein, a spacer such as any of the Ig-hinge containing spacers, a CD28 transmembrane domain, a CD28 intracellular signaling domain, and a CD3 zeta signaling domain.

### Engineered Cells

[0700] Also provided are cells such as cells that contain an antigen receptor, e.g., that contains an extracellular domain including an anti-HLA-PEPTIDE ABP (e.g., a CAR), described herein. Also provided are populations of such cells, and compositions containing such cells. In some embodiments, compositions or populations are enriched for such cells, such as in which cells expressing the HLA-PEPTIDE ABP make up at least 1, 5, 10, 20, 30, 40, 50, 60, 70, 80, 90, 91, 92, 93, 94, 95, 96, 97, 98, 99, or more than 99 percent of the total cells in the composition or cells of a certain type such as T cells or CD8+ or CD4+ cells. In some embodiments, a composition comprises at least one cell containing an antigen receptor disclosed herein. Among the compositions are pharmaceutical compositions and formulations for administration, such as for adoptive cell therapy. Also provided are therapeutic methods for administering the cells and compositions to subjects, e.g., patients.

[0701] Thus also provided are genetically engineered cells expressing an ABP comprising a receptor, e.g., a CAR. The cells generally are eukaryotic cells, such as mammalian cells, and typically are human cells. In some embodiments, the cells are derived from the blood, bone marrow, lymph, or lymphoid organs, are cells of the immune system, such as cells of the innate or adaptive immunity, e.g., myeloid or lymphoid cells, including lymphocytes, typically T cells and/or NK cells. Other exemplary cells include stem cells, such as multipotent and pluripotent stem cells, including induced pluripotent stem cells (iPSCs). The cells typically are primary cells, such as those isolated directly from a subject and/or isolated from a subject and frozen. In some embodiments, the cells include one or more subsets of T cells or other cell types, such as whole T cell populations, CD4+ cells, CD8+ cells, and subpopulations thereof, such as those defined by function, activation state, maturity, potential for differentiation, expansion, recirculation, localization, and/or persistence capacities, antigen-specificity, type of antigen receptor, presence in a particular organ or compartment, marker or cytokine secretion profile, and/or degree of differentiation. With reference to the subject to be treated, the cells may be allogeneic and/or autologous. Among the methods include off-the-shelf methods. In some aspects, such as for off-the-shelf technologies, the cells are pluripotent and/or multipotent, such as stem cells, such as induced pluripotent stem cells (iPSCs). In some embodiments, the methods include isolating cells from the subject, preparing, processing, culturing, and/or engineering them, as described herein, and re-introducing them into the same patient, before or after cryopreservation.

[0702] Among the sub-types and subpopulations of T cells and/or of CD4+ and/or of CD8+ T cells are naive T (TN) cells, effector T cells (TEFF), memory T cells and sub-types thereof, such as stem cell memory T (TSCM), central memory T (TCM), effector memory T (TEM), or terminally differentiated effector memory T cells, tumor-infiltrating lymphocytes (TIL), immature T cells, mature T cells, helper T cells, cytotoxic T cells, mucosa-associated invariant T (MALT) cells, naturally occurring and adaptive regulatory T (Treg) cells, helper T cells, such as TH1 cells, TH2 cells, TH3 cells, TH17 cells, TH9 cells, TH22 cells, follicular helper T cells, alpha/beta T cells, and delta/gamma T cells.

[0703] In some embodiments, the cells are natural killer (NK) cells. In some embodiments, the cells are monocytes or granulocytes, e.g., myeloid cells, macrophages, neutrophils, dendritic cells, mast cells, eosinophils, and/or basophils.

[0704] The cells may be genetically modified to reduce expression or knock out endogenous TCRs. Such modifications are described in Mol Ther Nucleic Acids. 2012 December; 1(12): e63; Blood. 2011 Aug. 11; 118(6):1495-503; Blood. 2012 Jun. 14; 119(24): 5697-5705; Torikai, Hiroki et al “HLA and TCR Knockout by Zinc Finger Nucleases: Toward “off-the-Shelf” Allogeneic T-Cell Therapy for CD19+ Malignancies.” Blood 116.21 (2010): 3766; Blood. 2018 Jan. 18; 131(3):311-322. doi: 10.1182/blood-2017-05-787598; and WO2016069283, which are incorporated by reference in their entirety.

[0705] The cells may be genetically modified to promote cytokine secretion. Such modifications are described in Hsu C, Hughes M S, Zheng Z, Bray R B, Rosenberg S A, Morgan R A. Primary human T lymphocytes engineered with a codon-optimized IL-15 gene resist cytokine withdrawal-induced apoptosis and persist long-term in the absence of exogenous cytokine. J Immunol. 2005; 175:7226-34; Quintarelli C, Vera J F, Savoldo B, Giordano Attianese G M, Pule M, Foster A E, Co-expression of cytokine and suicide genes to enhance the activity and safety of tumor-specific cytotoxic T lymphocytes. Blood. 2007; 110:2793-802; and Hsu C, Jones S A, Cohen C J, Zheng Z, Kerstann K, Zhou J, Cytokine-independent growth and clonal expansion of a primary human CD8+ T-cell clone following retroviral transduction with the IL-15 gene. Blood. 2007; 109:5168-77.

[0706] Mismatching of chemokine receptors on T cells and tumor-secreted chemokines has been shown to account for the suboptimal trafficking of T cells into the tumor microenvironment. To improve efficacy of therapy, the cells may be genetically modified to increase recognition of chemokines in tumor micro environment. Examples of such modifications are described in Moon et al., Expression of a functional CCR2 receptor enhances tumor localization and tumor eradication by retargeted human T cells expressing a mesothelin-specific chimeric antibody receptor. Clin Cancer Res. 2011; 17: 4719-4730; and Craddock et al., Enhanced tumor trafficking of GD2 chimeric antigen receptor T cells by expression of the chemokine receptor CCR2b. J Immunother. 2010; 33: 780-788.

[0707] The cells may be genetically modified to enhance expression of costimulatory/enhancing receptors, such as CD28 and 41BB.

[0708] Adverse effects of T cell therapy can include cytokine release syndrome and prolonged B-cell depletion. Introduction of a suicide/safety switch in the recipient cells may improve the safety profile of a cell-based therapy. Accordingly, the cells may be genetically modified to include a suicide/safety switch. The suicide/safety switch may be a gene that confers sensitivity to an agent, e.g., a drug, upon the cell in which the gene is expressed, and which causes the cell to die when the cell is contacted with or exposed to the agent. Exemplary suicide/safety switches are described in Protein Cell. 2017 August; 8(8): 573-589. The suicide/safety switch may be HSV-TK. The suicide/safety switch may be cytosine deaminase, purine nucleoside phosphorylase, or nitroreductase. The suicide/safety switch may be RapaCIDe™, described in U.S. Patent Application Pub. No. US20170166877A1. The suicide/safety switch system may be CD20/Rituximab, described in Haematologica. 2009 September; 94(9): 1316-1320. These references are incorporated by reference in their entirety.

[0709] The CAR may be introduced into the recipient cell as a split receptor which assembles only in the presence of a heterodimerizing small molecule. Such systems are described in Science. 2015 Oct. 16; 350(6258): aab4077, and in U.S. Pat. No. 9,587,020, which are hereby incorporated by reference in its entirety.

[0710] In some embodiments, the cells include one or more nucleic acids, e.g., a polynucleotide encoding a CAR disclosed herein, wherein the polynucleotide is introduced via genetic engineering, and thereby express recombinant or genetically engineered receptors, e.g., CARs, as disclosed herein. In some embodiments, the nucleic acids are heterologous, i.e., normally not present in a cell or sample obtained from the cell, such as one obtained from another organism or cell, which for example, is not ordinarily found in the cell being engineered and/or an organism from which such cell is derived. In some embodiments, the nucleic acids are not naturally occurring, such as a nucleic acid not found in nature, including one comprising chimeric combinations of nucleic acids encoding various domains from multiple different cell types.

[0711] The nucleic acids may include a codon-optimized nucleotide sequence. Without being bound to a particular theory or mechanism, it is believed that codon optimization of the nucleotide sequence increases the translation efficiency of the mRNA transcripts. Codon optimization of the nucleotide sequence may involve substituting a native codon for another codon that encodes the same amino acid, but can be translated by tRNA that is more readily available within a cell, thus increasing translation efficiency. Optimization of the nucleotide sequence may also reduce secondary mRNA structures that would interfere with translation, thus increasing translation efficiency.

[0712] A construct or vector may be used to introduce the CAR into the recipient cell. Exemplary constructs are described herein. Polynucleotides encoding the alpha and beta chains of the CAR may in a single construct or in separate constructs. The polynucleotides encoding the alpha and beta chains may be operably linked to a promoter, e.g., a heterologous promoter. The heterologous promoter may be a strong promoter, e.g., EF1alpha, CMV, PGK1, Ubc, beta actin, CAG promoter, and the like. The heterologous promoter may be a weak promoter. The heterologous promoter may be an inducible promoter. Exemplary inducible promoters include, but are not limited to TRE, NFAT, GAL4, LAC, and the like. Other exemplary inducible expression systems are described in U.S. Pat. Nos. 5,514,578; 6,245,531; 7,091,038 and European Patent No. 0517805, which are incorporated by reference in their entirety.

[0713] The construct for introducing the CAR into the recipient cell may also comprise a polynucleotide encoding a signal peptide (signal peptide element). The signal peptide may promote surface trafficking of the introduced CAR. Exemplary signal peptides include, but are not limited to CD8 signal peptide, immunoglobulin signal peptides, where specific examples include GM-CSF and IgG kappa. Such signal peptides are described in Trends Biochem Sci. 2006 October; 31(10):563-71. Epub 2006 Aug. 21; and An, et al. “Construction of a New Anti-CD19 Chimeric Antigen Receptor and the Anti-Leukemia Function Study of the Transduced T Cells.” Oncotarget 7.9 (2016): 10638-10649. PMC. Web. 16 Aug. 2018; which are hereby incorporated by reference in its entirety.

[0714] In some cases, e.g., cases wherein a marker gene is included in the construct, the construct may comprise a ribosomal skip sequence. The ribosomal skip sequence may be a 2A peptide, e.g., a P2A or T2A peptide. Exemplary P2A and T2A peptides are described in Scientific Reports volume 7, Article number: 2193 (2017), hereby incorporated by reference in its entirety. In some cases, a FURIN/PACE cleavage site is introduced upstream of the 2A element. FURIN/PACE cleavage sites are described in, e.g., http://www.nuolan.net/substrates.html. The cleavage peptide may also be a factor Xa cleavage site. In cases where the alpha and beta chains are expressed from a single construct or open reading frame, the construct may comprise an internal ribosome entry site (IRES).

[0715] The construct may further comprise one or more marker genes. Exemplary marker genes include but are not limited to GFP, luciferase, HA, lacZ. The marker may be a selectable marker, such as an antibiotic resistance marker, a heavy metal resistance marker, or a biocide resistant marker, as is known to those of skill in the art. The marker may be a complementation marker for use in an auxotrophic host. Exemplary complementation markers and auxotrophic hosts are described in Gene. 2001 Jan. 24; 263(1-2):159-69. Such markers may be expressed via an IRES, a frameshift sequence, a 2A peptide linker, a fusion with the CAR, or expressed separately from a separate promoter.

[0716] Exemplary vectors or systems for introducing receptors, e.g., CARs into recipient cells include, but are not limited to Adeno-associated virus, Adenovirus, Adenovirus+Modified vaccinia, Ankara virus (MVA), Adenovirus+Retrovirus, Adenovirus+Sendai virus, Adenovirus+Vaccinia virus, Alphavirus (VEE) Replicon Vaccine, Antisense oligonucleotide, Bifidobacterium longum, CRISPR-Cas9, E. coli, Flavivirus, Gene gun, Herpesviruses, Herpes simplex virus, Lactococcus lactis, Electroporation, Lentivirus, Lipofection, Listeria monocytogenes, Measles virus, Modified Vaccinia Ankara virus (MVA), mRNA Electroporation, Naked/Plasmid DNA, Naked/Plasmid DNA+Adenovirus, Naked/Plasmid DNA+Modified Vaccinia Ankara virus (MVA), Naked/Plasmid DNA+RNA transfer, Naked/Plasmid DNA+Vaccinia virus, Naked/Plasmid DNA+Vesicular stomatitis virus, Newcastle disease virus, Non-viral, PiggyBac™ (PB) Transposon, nanoparticle-based systems, Poliovirus, Poxvirus, Poxvirus+Vaccinia virus, Retrovirus, RNA transfer, RNA transfer+Naked/Plasmid DNA, RNA virus, Saccharomyces cerevisiae, Salmonella typhimurium, Semliki forest virus, Sendai virus, Shigella dysenteriae, Simian virus, siRNA, Sleeping Beauty transposon, Streptococcus mutans, Vaccinia virus, Venezuelan equine encephalitis virus replicon, Vesicular stomatitis virus, and Vibrio cholera.

[0717] In preferred embodiments, the CAR is introduced into the recipient cell via adeno associated virus (AAV), adenovirus, CRISPR-CAS9, herpesvirus, lentivirus, lipofection, mRNA electroporation, PiggyBac™ (PB) Transposon, retrovirus, RNA transfer, or Sleeping Beauty transposon.

[0718] In some embodiments, a vector for introducing a CAR into a recipient cell is a viral vector. Exemplary viral vectors include adenoviral vectors, adeno-associated viral (AAV) vectors, lentiviral vectors, herpes viral vectors, retroviral vectors, and the like. Such vectors are described herein.

[0719] Nucleotides, Vectors, Host Cells, and Related Methods

[0720] Also provided are isolated nucleic acids encoding HLA-PEPTIDE ABPs, vectors comprising the nucleic acids, and host cells comprising the vectors and nucleic acids, as well as recombinant techniques for the production of the ABPs.

[0721] The nucleic acids may be recombinant. The recombinant nucleic acids may be constructed outside living cells by joining natural or synthetic nucleic acid segments to nucleic acid molecules that can replicate in a living cell, or replication products thereof. For purposes herein, the replication can be in vitro replication or in vivo replication.

[0722] For recombinant production of an ABP, the nucleic acid(s) encoding it may be isolated and inserted into a replicable vector for further cloning (i.e., amplification of the DNA) or expression. In some aspects, the nucleic acid may be produced by homologous recombination, for example as described in U.S. Pat. No. 5,204,244, incorporated by reference in its entirety.

[0723] Many different vectors are known in the art. The vector components generally include one or more of the following: a signal sequence, an origin of replication, one or more marker genes, an enhancer element, a promoter, and a transcription termination sequence, for example as described in U.S. Pat. No. 5,534,615, incorporated by reference in its entirety.

[0724] Exemplary vectors or constructs suitable for expressing an ABP, e.g., a CAR, antibody, or antigen binding fragment thereof, include, e.g., the pUC series (Fermentas Life Sciences), the pBluescript series (Stratagene, LaJolla, Calif.), the pET series (Novagen, Madison, Wis.), the pGEX series (Pharmacia Biotech, Uppsala, Sweden), and the pEX series (Clontech, Palo Alto, Calif.). Bacteriophage vectors, such as AGTlO, AGTl 1, AZapII (Stratagene), AEMBL4, and ANMl 149, are also suitable for expressing an ABP disclosed herein.

[0725] Illustrative examples of suitable host cells are provided below. These host cells are not meant to be limiting, and any suitable host cell may be used to produce the ABPs provided herein.

[0726] Suitable host cells include any prokaryotic (e.g., bacterial), lower eukaryotic (e.g., yeast), or higher eukaryotic (e.g., mammalian) cells. Suitable prokaryotes include eubacteria, such as Gram-negative or Gram-positive organisms, for example, Enterobacteriaceae such as Escherichia (E. coli), Enterobacter, Envinia, Klebsiella, Proteus, Salmonella (S. typhimurium), Serratia (S. marcescans), Shigella, Bacilli (B. subtilis and B. licheniformis), Pseudomonas (P. aeruginosa), and Streptomyces. One useful E. coli cloning host is E. coli 294, although other strains such as E. coli B, E. coli X1776, and E. coli W3110 are also suitable.

[0727] In addition to prokaryotes, eukaryotic microbes such as filamentous fungi or yeast are also suitable cloning or expression hosts for HLA-PEPTIDE ABP-encoding vectors. Saccharomyces cerevisiae, or common baker's yeast, is a commonly used lower eukaryotic host microorganism. However, a number of other genera, species, and strains are available and useful, such as Schizosaccharomyces pombe, Kluyveromyces (K. lactis, K. fragilis, K. bulgaricus K. wickeramii, K. waltii, K. drosophilarum, K. thermotolerans, and K. marxianus), Yarrowia, Pichia pastoris, Candida (C. albicans), Trichoderma reesia, Neurospora crassa, Schwanniomyces (S. occidentalis), and filamentous fungi such as, for example Penicillium, Tolypocladium, and Aspergillus (A. nidulans and A. niger).

[0728] Useful mammalian host cells include COS-7 cells, HEK293 cells; baby hamster kidney (BHK) cells; Chinese hamster ovary (CHO); mouse sertoli cells; African green monkey kidney cells (VERO-76), and the like.

[0729] The host cells used to produce the HLA-PEPTIDE ABP may be cultured in a variety of media. Commercially available media such as, for example, Ham's F10, Minimal Essential Medium (MEM), RPMI-1640, and Dulbecco's Modified Eagle's Medium (DMEM) are suitable for culturing the host cells. In addition, any of the media described in Ham et al., Meth. Enz., 1979, 58:44; Barnes et al., Anal. Biochem., 1980, 102:255; and U.S. Pat. Nos. 4,767,704, 4,657,866, 4,927,762, 4,560,655, and 5,122,469; or WO 90/03430 and WO 87/00195 may be used. Each of the foregoing references is incorporated by reference in its entirety.

[0730] Any of these media may be supplemented as necessary with hormones and/or other growth factors (such as insulin, transferrin, or epidermal growth factor), salts (such as sodium chloride, calcium, magnesium, and phosphate), buffers (such as HEPES), nucleotides (such as adenosine and thymidine), antibiotics, trace elements (defined as inorganic compounds usually present at final concentrations in the micromolar range), and glucose or an equivalent energy source. Any other necessary supplements may also be included at appropriate concentrations that would be known to those skilled in the art.

[0731] The culture conditions, such as temperature, pH, and the like, are those previously used with the host cell selected for expression, and will be apparent to the ordinarily skilled artisan.

[0732] When using recombinant techniques, the ABP can be produced intracellularly, in the periplasmic space, or directly secreted into the medium. If the ABP is produced intracellularly, as a first step, the particulate debris, either host cells or lysed fragments, is removed, for example, by centrifugation or ultrafiltration. For example, Carter et al. (Bio/Technology, 1992, 10:163-167, incorporated by reference in its entirety) describes a procedure for isolating ABPs which are secreted to the periplasmic space of E. coli. Briefly, cell paste is thawed in the presence of sodium acetate (pH 3.5), EDTA, and phenylmethylsulfonylfluoride (PMSF) over about 30 min. Cell debris can be removed by centrifugation.

[0733] In some embodiments, the ABP is produced in a cell-free system. In some aspects, the cell-free system is an in vitro transcription and translation system as described in Yin et al., mAbs, 2012, 4:217-225, incorporated by reference in its entirety. In some aspects, the cell-free system utilizes a cell-free extract from a eukaryotic cell or from a prokaryotic cell. In some aspects, the prokaryotic cell is E. coli. Cell-free expression of the ABP may be useful, for example, where the ABP accumulates in a cell as an insoluble aggregate, or where yields from periplasmic expression are low.

[0734] Where the ABP is secreted into the medium, supernatants from such expression systems are generally first concentrated using a commercially available protein concentration filter, for example, an Amicon® or Millipore® Pellcon® ultrafiltration unit. A protease inhibitor such as PMSF may be included in any of the foregoing steps to inhibit proteolysis and antibiotics may be included to prevent the growth of adventitious contaminants.

[0735] The ABP composition prepared from the cells can be purified using, for example, hydroxylapatite chromatography, gel electrophoresis, dialysis, and affinity chromatography, with affinity chromatography being a particularly useful purification technique. The suitability of protein A as an affinity ligand depends on the species and isotype of any immunoglobulin Fc domain that is present in the ABP. Protein A can be used to purify ABPs that comprise human γ1, γ2, or γ4 heavy chains (Lindmark et al., J. Immunol. Meth., 1983, 62:1-13, incorporated by reference in its entirety). Protein G is useful for all mouse isotypes and for human γ3 (Guss et al., EMBO J., 1986, 5:1567-1575, incorporated by reference in its entirety).

[0736] The matrix to which the affinity ligand is attached is most often agarose, but other matrices are available. Mechanically stable matrices such as controlled pore glass or poly(styrenedivinyl)benzene allow for faster flow rates and shorter processing times than can be achieved with agarose. Where the ABP comprises a C_{H3} domain, the BakerBond ABX® resin is useful for purification.

[0737] Other techniques for protein purification, such as fractionation on an ion-exchange column, ethanol precipitation, Reverse Phase HPLC, chromatography on silica, chromatography on heparin Sepharose®, chromatofocusing, SDS-PAGE, and ammonium sulfate precipitation are also available, and can be applied by one of skill in the art.

[0738] Following any preliminary purification step(s), the mixture comprising the ABP of interest and contaminants may be subjected to low pH hydrophobic interaction chromatography using an elution buffer at a pH between about 2.5 to about 4.5, generally performed at low salt concentrations (e.g., from about 0 to about 0.25 M salt).

[0739] Methods of Making HLA-PEPTIDE ABPs

### HLA-PEPTIDE Antigen Preparation

[0740] The HLA-PEPTIDE antigen used for isolation or creation of the ABPs provided herein may be intact HLA-PEPTIDE or a fragment of HLA-PEPTIDE. The HLA-PEPTIDE antigen may be, for example, in the form of isolated protein or a protein expressed on the surface of a cell.

[0741] In some embodiments, the HLA-PEPTIDE antigen is a non-naturally occurring variant of HLA-PEPTIDE, such as a HLA-PEPTIDE protein having an amino acid sequence or post-translational modification that does not occur in nature.

[0742] In some embodiments, the HLA-PEPTIDE antigen is truncated by removal of, for example, intracellular or membrane-spanning sequences, or signal sequences. In some embodiments, the HLA-PEPTIDE antigen is fused at its C-terminus to a human IgG1 Fc domain or a polyhistidine tag.

### Methods of Identifying ABPs

[0743] ABPs that bind HLA-PEPTIDE can be identified using any method known in the art, e.g., phage display or immunization of a subject.

[0744] One method of identifying an antigen binding protein includes providing at least one HLA-PEPTIDE target; and binding the at least one target with an antigen binding protein, thereby identifying the antigen binding protein. The antigen binding protein can be present in a library comprising a plurality of distinct antigen binding proteins.

[0745] In some embodiments, the library is a phage display library. The phage display library can be developed so that it is substantially free of antigen binding proteins that non-specifically bind the HLA of the HLA-PEPTIDE target. The antigen binding protein can be present in a yeast display library comprising a plurality of distinct antigen binding proteins. The yeast display library can be developed so that it is substantially free of antigen binding proteins that non-specifically bind the HLA of the HLA-PEPTIDE target.

[0746] In some embodiments, the library is a yeast display library.

[0747] In some embodiments, the library is a TCR display library. Exemplary TCR display libraries and methods of using such TCR display libraries are described in WO 98/39482; WO 01/62908; WO 2004/044004: WO2005116646, WO2014018863, WO2015136072, WO2017046198; and Helmut et al, (2000) PNAS 97 (26) 14578-14583, which are hereby incorporated by reference in their entirety.

[0748] In some aspects, the binding step is performed more than once, optionally at least three times, e.g., at least 1, 2, 3, 4, 5, 6, 7, 8, 9, or 10×.

[0749] In addition, the method can also include contacting the antigen binding protein with one or more peptide-HLA complexes that are distinct from the HLA-PEPTIDE target to determine if the antigen binding protein selectively binds the HLA-PEPTIDE target.

[0750] Another method of identifying an antigen binding protein can include obtaining at least one HLA-PEPTIDE target; administering the HLA-PEPTIDE target to a subject (e.g., a mouse, rabbit or a llama), optionally in combination with an adjuvant; and isolating the antigen binding protein from the subject. Isolating the antigen binding protein can include screening the serum of the subject to identify the antigen binding protein. The method can also include contacting the antigen binding protein with one or more peptide-HLA complexes that are distinct from the HLA-PEPTIDE target, e.g., to determine if the antigen binding protein selectively binds to the HLA-PEPTIDE target. An antigen binding protein that is identified can be humanized.

[0751] In some aspects, isolating the antigen binding protein comprises isolating a B cell from the subject that expresses the antigen binding protein. The B cell can be used to create a hybridoma. The B cell can also be used for cloning one or more of its CDRs. The B cell can also be immortalized, for example, by using EBV transformation. Sequences encoding an antigen binding protein can be cloned from immortalized B cells or can be cloned directly from B cells isolated from an immunized subject. A library that comprises the antigen binding protein of the B cell can also be created, optionally wherein the library is phage display or yeast display.

[0752] Another method of identifying an antigen binding protein can include obtaining a cell comprising the antigen binding protein; contacting the cell with an HLA-multimer (e.g., a tetramer) comprising at least one HLA-PEPTIDE target; and identifying the antigen binding protein via binding between the HLA-multimer and the antigen binding protein.

[0753] The cell can be, e.g., a T cell, optionally a cytotoxic T lymphocyte (CTL), or a natural killer (NK) cell, for example. The method can further include isolating the cell, optionally using flow cytometry, magnetic separation, or single cell separation. The method can further include sequencing the antigen binding protein.

[0754] Another method of identifying an antigen binding protein can include obtaining one or more cells comprising the antigen binding protein; activating the one or more cells with at least one HLA-PEPTIDE target presented on at least one antigen presenting cell (APC); and identifying the antigen binding protein via selection of one or more cells activated by interaction with at least one HLA-PEPTIDE target.

[0755] The cell can be, e.g., a T cell, optionally a CTL, or an NK cell, for example. The method can further include isolating the cell, optionally using flow cytometry, magnetic separation, or single cell separation. The method can further include sequencing the antigen binding protein.

### Methods of Making Monoclonal ABPs

[0756] Monoclonal ABPs may be obtained, for example, using the hybridoma method first described by Kohler et al., Nature, 1975, 256:495-497 (incorporated by reference in its entirety), and/or by recombinant DNA methods (see e.g., U.S. Pat. No. 4,816,567, incorporated by reference in its entirety). Monoclonal ABPs may also be obtained, for example, using phage or yeast-based libraries. See e.g., U.S. Pat. Nos. 8,258,082 and 8,691,730, each of which is incorporated by reference in its entirety.

[0757] In the hybridoma method, a mouse or other appropriate host animal is immunized to elicit lymphocytes that produce or are capable of producing ABPs that will specifically bind to the protein used for immunization. Alternatively, lymphocytes may be immunized in vitro. Lymphocytes are then fused with myeloma cells using a suitable fusing agent, such as polyethylene glycol, to form a hybridoma cell. See Goding J. W., Monoclonal ABPs: Principles and Practice 3^{rd} ed. (1986) Academic Press, San Diego, Calif., incorporated by reference in its entirety.

[0758] The hybridoma cells are seeded and grown in a suitable culture medium that contains one or more substances that inhibit the growth or survival of the unfused, parental myeloma cells. For example, if the parental myeloma cells lack the enzyme hypoxanthine guanine phosphoribosyl transferase (HGPRT or HPRT), the culture medium for the hybridomas typically will include hypoxanthine, aminopterin, and thymidine (HAT medium), which substances prevent the growth of HGPRT-deficient cells.

[0759] Useful myeloma cells are those that fuse efficiently, support stable high-level production of ABP by the selected ABP-producing cells, and are sensitive media conditions, such as the presence or absence of HAT medium. Among these, preferred myeloma cell lines are murine myeloma lines, such as those derived from MOPC-21 and MC-11 mouse tumors (available from the Salk Institute Cell Distribution Center, San Diego, Calif.), and SP-2 or X63-Ag8-653 cells (available from the American Type Culture Collection, Rockville, Md.). Human myeloma and mouse-human heteromyeloma cell lines also have been described for the production of human monoclonal ABPs. See e.g., Kozbor, J. Immunol., 1984, 133:3001, incorporated by reference in its entirety.

[0760] After the identification of hybridoma cells that produce ABPs of the desired specificity, affinity, and/or biological activity, selected clones may be subcloned by limiting dilution procedures and grown by standard methods. See Goding, supra. Suitable culture media for this purpose include, for example, D-MEM or RPMI-1640 medium. In addition, the hybridoma cells may be grown in vivo as ascites tumors in an animal.

[0761] DNA encoding the monoclonal ABPs may be readily isolated and sequenced using conventional procedures (e.g., by using oligonucleotide probes that are capable of binding specifically to genes encoding the heavy and light chains of the monoclonal ABPs). Thus, the hybridoma cells can serve as a useful source of DNA encoding ABPs with the desired properties. Once isolated, the DNA may be placed into expression vectors, which are then transfected into host cells such as bacteria (e.g., E. coli), yeast (e.g., Saccharomyces or Pichia sp.), COS cells, Chinese hamster ovary (CHO) cells, or myeloma cells that do not otherwise produce ABP, to produce the monoclonal ABPs.

### Methods of Making Chimeric ABPs

[0762] Illustrative methods of making chimeric ABPs are described, for example, in U.S. Pat. No. 4,816,567; and Morrison et al., Proc. Natl. Acad. Sci. USA, 1984, 81:6851-6855; each of which is incorporated by reference in its entirety. In some embodiments, a chimeric ABP is made by using recombinant techniques to combine a non-human variable region (e.g., a variable region derived from a mouse, rat, hamster, rabbit, or non-human primate, such as a monkey) with a human constant region.

### Methods of Making Humanized ABPs

[0763] Humanized ABPs may be generated by replacing most, or all, of the structural portions of a non-human monoclonal ABP with corresponding human ABP sequences. Consequently, a hybrid molecule is generated in which only the antigen-specific variable, or CDR, is composed of non-human sequence. Methods to obtain humanized ABPs include those described in, for example, Winter and Milstein, Nature, 1991, 349:293-299; Rader et al., Proc. Nat. Acad. Sci. U.S.A., 1998, 95:8910-8915; Steinberger et al., J. Biol. Chem., 2000, 275:36073-36078; Queen et al., Proc. Natl. Acad. Sci. U.S.A., 1989, 86:10029-10033; and U.S. Pat. Nos. 5,585,089, 5,693,761, 5,693,762, and 6,180,370; each of which is incorporated by reference in its entirety.

### Methods of Making Human ABPs

[0764] Human ABPs can be generated by a variety of techniques known in the art, for example by using transgenic animals (e.g., humanized mice). See, e.g., Jakobovits et al., Proc. Natl. Acad. Sci. U.S.A., 1993, 90:2551; Jakobovits et al., Nature, 1993, 362:255-258; Bruggermann et al., Year in Immuno., 1993, 7:33; and U.S. Pat. Nos. 5,591,669, 5,589,369 and 5,545,807; each of which is incorporated by reference in its entirety. Human ABPs can also be derived from phage-display libraries (see e.g., Hoogenboom et al., J. Mol. Biol., 1991, 227:381-388; Marks et al., J. Mol. Biol., 1991, 222:581-597; and U.S. Pat. Nos. 5,565,332 and 5,573,905; each of which is incorporated by reference in its entirety). Human ABPs may also be generated by in vitro activated B cells (see e.g., U.S. Pat. Nos. 5,567,610 and 5,229,275, each of which is incorporated by reference in its entirety). Human ABPs may also be derived from yeast-based libraries (see e.g., U.S. Pat. No. 8,691,730, incorporated by reference in its entirety).

### Methods of Making ABP Fragments

[0765] The ABP fragments provided herein may be made by any suitable method, including the illustrative methods described herein or those known in the art. Suitable methods include recombinant techniques and proteolytic digestion of whole ABPs. Illustrative methods of making ABP fragments are described, for example, in Hudson et al., Nat. Med., 2003, 9:129-134, incorporated by reference in its entirety. Methods of making scFv ABPs are described, for example, in Plückthun, in The Pharmacology of Monoclonal ABPs, vol. 113, Rosenburg and Moore eds., Springer-Verlag, New York, pp. 269-315 (1994); WO 93/16185; and U.S. Pat. Nos. 5,571,894 and 5,587,458; each of which is incorporated by reference in its entirety.

### Methods of Making Alternative Scaffolds

[0766] The alternative scaffolds provided herein may be made by any suitable method, including the illustrative methods described herein or those known in the art. For example, methods of preparing Adnectins™ are described in Emanuel et al., mAbs, 2011, 3:38-48, incorporated by reference in its entirety. Methods of preparing iMabs are described in U.S. Pat. Pub. No. 2003/0215914, incorporated by reference in its entirety. Methods of preparing Anticalins® are described in Vogt and Skerra, Chem. Biochem., 2004, 5:191-199, incorporated by reference in its entirety. Methods of preparing Kunitz domains are described in Wagner et al., Biochem. & Biophys. Res. Comm., 1992, 186:118-1145, incorporated by reference in its entirety. Methods of preparing thioredoxin peptide aptamers are provided in Geyer and Brent, Meth. Enzymol., 2000, 328:171-208, incorporated by reference in its entirety. Methods of preparing Affibodies are provided in Fernandez, Curr. Opinion in Biotech., 2004, 15:364-373, incorporated by reference in its entirety. Methods of preparing DARPins are provided in Zahnd et al., J. Mol. Biol., 2007, 369:1015-1028, incorporated by reference in its entirety. Methods of preparing Affilins are provided in Ebersbach et al., J. Mol. Biol., 2007, 372:172-185, incorporated by reference in its entirety. Methods of preparing Tetranectins are provided in Graversen et al., J. Biol. Chem., 2000, 275:37390-37396, incorporated by reference in its entirety. Methods of preparing Avimers are provided in Silverman et al., Nature Biotech., 2005, 23:1556-1561, incorporated by reference in its entirety. Methods of preparing Fynomers are provided in Silacci et al., J. Biol. Chem., 2014, 289:14392-14398, incorporated by reference in its entirety. Further information on alternative scaffolds is provided in Binz et al., Nat. Biotechnol., 2005 23:1257-1268; and Skerra, Current Opin. in Biotech., 2007 18:295-304, each of which is incorporated by reference in its entirety.

### Methods of Making Multispecific ABPs

[0767] The multispecific ABPs provided herein may be made by any suitable method, including the illustrative methods described herein or those known in the art. Methods of making common light chain ABPs are described in Merchant et al., Nature Biotechnol., 1998, 16:677-681, incorporated by reference in its entirety. Methods of making tetravalent bispecific ABPs are described in Coloma and Morrison, Nature Biotechnol., 1997, 15:159-163, incorporated by reference in its entirety. Methods of making hybrid immunoglobulins are described in Milstein and Cuello, Nature, 1983, 305:537-540; and Staerz and Bevan, Proc. Natl. Acad. Sci. USA, 1986, 83:1453-1457; each of which is incorporated by reference in its entirety. Methods of making immunoglobulins with knobs-into-holes modification are described in U.S. Pat. No. 5,731,168, incorporated by reference in its entirety. Methods of making immunoglobulins with electrostatic modifications are provided in WO 2009/089004, incorporated by reference in its entirety. Methods of making bispecific single chain ABPs are described in Traunecker et al., EMBO J. 1991, 10:3655-3659; and Gruber et al., J. Immunol., 1994, 152:5368-5374; each of which is incorporated by reference in its entirety. Methods of making single-chain ABPs, whose linker length may be varied, are described in U.S. Pat. Nos. 4,946,778 and 5,132,405, each of which is incorporated by reference in its entirety. Methods of making diabodies are described in Hollinger et al., Proc. Natl. Acad. Sci. USA, 1993, 90:6444-6448, incorporated by reference in its entirety. Methods of making triabodies and tetrabodies are described in Todorovska et al., J. Immunol. Methods, 2001, 248:47-66, incorporated by reference in its entirety. Methods of making trispecific F(ab′)3 derivatives are described in Tutt et al. J. Immunol., 1991, 147:60-69, incorporated by reference in its entirety. Methods of making cross-linked ABPs are described in U.S. Pat. No. 4,676,980; Brennan et al., Science, 1985, 229:81-83; Staerz, et al. Nature, 1985, 314:628-631; and EP 0453082; each of which is incorporated by reference in its entirety. Methods of making antigen-binding domains assembled by leucine zippers are described in Kostelny et al., J. Immunol., 1992, 148:1547-1553, incorporated by reference in its entirety. Methods of making ABPs via the DNL approach are described in U.S. Pat. Nos. 7,521,056; 7,550,143; 7,534,866; and 7,527,787; each of which is incorporated by reference in its entirety. Methods of making hybrids of ABP and non-ABP molecules are described in WO 93/08829, incorporated by reference in its entirety, for examples of such ABPs. Methods of making DAF ABPs are described in U.S. Pat. Pub. No. 2008/0069820, incorporated by reference in its entirety. Methods of making ABPs via reduction and oxidation are described in Carlring et al., PLoS One, 2011, 6:e22533, incorporated by reference in its entirety. Methods of making DVD-Igs™ are described in U.S. Pat. No. 7,612,181, incorporated by reference in its entirety. Methods of making DARTs™ are described in Moore et al., Blood, 2011, 117:454-451, incorporated by reference in its entirety. Methods of making DuoBodies® are described in Labrijn et al., Proc. Natl. Acad. Sci. USA, 2013, 110:5145-5150; Gramer et al., mAbs, 2013, 5:962-972; and Labrijn et al., Nature Protocols, 2014, 9:2450-2463; each of which is incorporated by reference in its entirety. Methods of making ABPs comprising scFvs fused to the C-terminus of the C_{H3} from an IgG are described in Coloma and Morrison, Nature Biotechnol., 1997, 15:159-163, incorporated by reference in its entirety. Methods of making ABPs in which a Fab molecule is attached to the constant region of an immunoglobulin are described in Miler et al., J. Immunol., 2003, 170:4854-4861, incorporated by reference in its entirety. Methods of making CovX-Bodies are described in Doppalapudi et al., Proc. Natl. Acad. Sci. USA, 2010, 107:22611-22616, incorporated by reference in its entirety. Methods of making Fcab ABPs are described in Wozniak-Knopp et al., Protein Eng. Des. Sel., 2010, 23:289-297, incorporated by reference in its entirety. Methods of making TandAb® ABPs are described in Kipriyanov et al., J. Mol. Biol., 1999, 293:41-56 and Zhukovsky et al., Blood, 2013, 122:5116, each of which is incorporated by reference in its entirety. Methods of making tandem Fabs are described in WO 2015/103072, incorporated by reference in its entirety. Methods of making Zybodies™ are described in LaFleur et al., mAbs, 2013, 5:208-218, incorporated by reference in its entirety.

### Methods of Making Variants

[0768] Any suitable method can be used to introduce variability into a polynucleotide sequence(s) encoding an ABP, including error-prone PCR, chain shuffling, and oligonucleotide-directed mutagenesis such as trinucleotide-directed mutagenesis (TRIM). In some aspects, several CDR residues (e.g., 4-6 residues at a time) are randomized. CDR residues involved in antigen binding may be specifically identified, for example, using alanine scanning mutagenesis or modeling. CDR-H3 and CDR-L3 in particular are often targeted for mutation.

[0769] The introduction of diversity into the variable regions and/or CDRs can be used to produce a secondary library. The secondary library is then screened to identify ABP variants with improved affinity. Affinity maturation by constructing and reselecting from secondary libraries has been described, for example, in Hoogenboom et al., Methods in Molecular Biology, 2001, 178:1-37, incorporated by reference in its entirety.

[0770] Methods for Engineering Cells with ABPs

[0771] Also provided are methods, nucleic acids, compositions, and kits, for expressing the ABPs, including receptors comprising antibodies, and CARs, and for producing genetically engineered cells expressing such ABPs. The genetic engineering generally involves introduction of a nucleic acid encoding the recombinant or engineered component into the cell, such as by retroviral transduction, transfection, or transformation.

[0772] In some embodiments, gene transfer is accomplished by first stimulating the cell, such as by combining it with a stimulus that induces a response such as proliferation, survival, and/or activation, e.g., as measured by expression of a cytokine or activation marker, followed by transduction of the activated cells, and expansion in culture to numbers sufficient for clinical applications.

[0773] In some contexts, overexpression of a stimulatory factor (for example, a lymphokine or a cytokine) may be toxic to a subject. Thus, in some contexts, the engineered cells include gene segments that cause the cells to be susceptible to negative selection in vivo, such as upon administration in adoptive immunotherapy. For example in some aspects, the cells are engineered so that they can be eliminated as a result of a change in the in vivo condition of the patient to which they are administered. The negative selectable phenotype may result from the insertion of a gene that confers sensitivity to an administered agent, for example, a compound. Negative selectable genes include the Herpes simplex virus type I thymidine kinase (HSV-I TK) gene (Wigler et al., Cell II: 223, 1977) which confers ganciclovir sensitivity; the cellular hypoxanthine phosphribosyltransferase (HPRT) gene, the cellular adenine phosphoribosyltransferase (APRT) gene, bacterial cytosine deaminase, (Mullen et al., Proc. Natl. Acad. Sci. USA. 89:33 (1992)).

[0774] In some aspects, the cells further are engineered to promote expression of cytokines or other factors. Various methods for the introduction of genetically engineered components, e.g., antigen receptors, e.g., CARs, are well known and may be used with the provided methods and compositions. Exemplary methods include those for transfer of nucleic acids encoding the receptors, including via viral, e.g., retroviral or lentiviral, transduction, transposons, and electroporation.

[0775] In some embodiments, recombinant nucleic acids are transferred into cells using recombinant infectious virus particles, such as, e.g., vectors derived from simian virus 40 (SV40), adenoviruses, adeno-associated virus (AAV). In some embodiments, recombinant nucleic acids are transferred into T cells using recombinant lentiviral vectors or retroviral vectors, such as gamma-retroviral vectors (see, e.g., Koste et al. (2014) Gene Therapy 2014 Apr. 3. doi: 10.1038/gt.2014.25; Carlens et al. (2000) Exp Hematol 28(10): 1137-46; Alonso-Camino et al. (2013) Mol Ther Nucl Acids 2, e93; Park et al., Trends Biotechnol. 2011 Nov. 29(11): 550-557.

[0776] In some embodiments, the retroviral vector has a long terminal repeat sequence (LTR), e.g., a retroviral vector derived from the Moloney murine leukemia virus (MoMLV), myeloproliferative sarcoma virus (MPSV), murine embryonic stem cell virus (MESV), murine stem cell virus (MSCV), spleen focus forming virus (SFFV), or adeno-associated virus (AAV). Most retroviral vectors are derived from murine retroviruses. In some embodiments, the retroviruses include those derived from any avian or mammalian cell source. The retroviruses typically are amphotropic, meaning that they are capable of infecting host cells of several species, including humans. In one embodiment, the gene to be expressed replaces the retroviral gag, pol and/or env sequences. A number of illustrative retroviral systems have been described (e.g., U.S. Pat. Nos. 5,219,740; 6,207,453; 5,219,740; Miller and Rosman (1989) BioTechniques 7:980-990; Miller, A. D. (1990) Human Gene Therapy 1:5-14; Scarpa et al. (1991) Virology 180:849-852; Burns et al. (1993) Proc. Natl. Acad. Sci. USA 90:8033-8037; and Boris-Lawrie and Temin (1993) Cur. Opin. Genet. Develop. 3:102-109.

[0777] Methods of lentiviral transduction are known. Exemplary methods are described in, e.g., Wang et al. (2012) J. Immunother. 35(9): 689-701; Cooper et al. (2003) Blood. 101:1637-1644; Verhoeyen et al. (2009) Methods Mol Biol. 506: 97-114; and Cavalieri et al. (2003) Blood. 102(2): 497-505.

[0778] In some embodiments, recombinant nucleic acids are transferred into T cells via electroporation (see, e.g., Chicaybam et al, (2013) PLoS ONE 8(3): e60298; Van Tedeloo et al. (2000) Gene Therapy 7(16): 1431-1437; and Roth et al. (2018) Nature 559:405-409). In some embodiments, recombinant nucleic acids are transferred into T cells via transposition (see, e.g., Manuri et al. (2010) Hum Gene Ther 21(4): 427-437; Sharma et al. (2013) Molec Ther Nucl Acids 2, e74; and Huang et al. (2009) Methods Mol Biol 506: 115-126). Other methods of introducing and expressing genetic material in immune cells include calcium phosphate transfection (e.g., as described in Current Protocols in Molecular Biology, John Wiley & Sons, —New York. N.Y.), protoplast fusion, cationic liposome-mediated transfection; tungsten particle-facilitated microparticle bombardment (Johnston, Nature, 346: 776-777 (1990)); and strontium phosphate DNA co-precipitation (Brash et al., Mol. Cell Biol., 7: 2031-2034 (1987)).

[0779] Other approaches and vectors for transfer of the nucleic acids encoding the recombinant products are those described, e.g., in international patent application, Publication No.: WO2014055668, and U.S. Pat. No. 7,446,190.

[0780] Among additional nucleic acids, e.g., genes for introduction are those to improve the efficacy of therapy, such as by promoting viability and/or function of transferred cells; genes to provide a genetic marker for selection and/or evaluation of the cells, such as to assess in vivo survival or localization; genes to improve safety, for example, by making the cell susceptible to negative selection in vivo as described by Lupton S. D. et al., Mol. and Cell Biol., 11:6 (1991); and Riddell et al., Human Gene Therapy 3:319-338 (1992); see also the publications of PCT/US91/08442 and PCT/US94/05601 by Lupton et al. describing the use of bifunctional selectable fusion genes derived from fusing a dominant positive selectable marker with a negative selectable marker. See, e.g., Riddell et al., U.S. Pat. No. 6,040,177, at columns 14-17.

[0781] Preparation of Engineered Cells

[0782] In some embodiments, preparation of the engineered cells includes one or more culture and/or preparation steps. The cells for introduction of the HLA-PEPTIDE-ABP, e.g., CAR, can be isolated from a sample, such as a biological sample, e.g., one obtained from or derived from a subject. In some embodiments, the subject from which the cell is isolated is one having the disease or condition or in need of a cell therapy or to which cell therapy will be administered. The subject in some embodiments is a human in need of a particular therapeutic intervention, such as the adoptive cell therapy for which cells are being isolated, processed, and/or engineered.

[0783] Accordingly, the cells in some embodiments are primary cells, e.g., primary human cells. The samples include tissue, fluid, and other samples taken directly from the subject, as well as samples resulting from one or more processing steps, such as separation, centrifugation, genetic engineering (e.g. transduction with viral vector), washing, and/or incubation. The biological sample can be a sample obtained directly from a biological source or a sample that is processed. Biological samples include, but are not limited to, body fluids, such as blood, plasma, serum, cerebrospinal fluid, synovial fluid, urine and sweat, tissue and organ samples, including processed samples derived therefrom.

[0784] In some aspects, the sample from which the cells are derived or isolated is blood or a blood-derived sample, or is or is derived from an apheresis or leukapheresis product. Exemplary samples include whole blood, peripheral blood mononuclear cells (PBMCs), leukocytes, bone marrow, thymus, tissue biopsy, tumor, leukemia, lymphoma, lymph node, gut associated lymphoid tissue, mucosa associated lymphoid tissue, spleen, other lymphoid tissues, liver, lung, stomach, intestine, colon, kidney, pancreas, breast, bone, prostate, cervix, testes, ovaries, tonsil, or other organ, and/or cells derived therefrom. Samples include, in the context of cell therapy, e.g., adoptive cell therapy, samples from autologous and allogeneic sources.

[0785] In some embodiments, the cells are derived from cell lines, e.g., T cell lines. The cells in some embodiments are obtained from a xenogeneic source, for example, from mouse, rat, non-human primate, or pig.

[0786] In some embodiments, isolation of the cells includes one or more preparation and/or non-affinity based cell separation steps. In some examples, cells are washed, centrifuged, and/or incubated in the presence of one or more reagents, for example, to remove unwanted components, enrich for desired components, lyse or remove cells sensitive to particular reagents. In some examples, cells are separated based on one or more property, such as density, adherent properties, size, sensitivity and/or resistance to particular components.

[0787] In some examples, cells from the circulating blood of a subject are obtained, e.g., by apheresis or leukapheresis. The samples, in some aspects, contain lymphocytes, including T cells, monocytes, granulocytes, B cells, other nucleated white blood cells, red blood cells, and/or platelets, and in some aspects contains cells other than red blood cells and platelets.

[0788] In some embodiments, the blood cells collected from the subject are washed, e.g., to remove the plasma fraction and to place the cells in an appropriate buffer or media for subsequent processing steps. In some embodiments, the cells are washed with phosphate buffered saline (PBS). In some embodiments, the wash solution lacks calcium and/or magnesium and/or many or all divalent cations. In some aspects, a washing step is accomplished a semi-automated “flow-through” centrifuge (for example, the Cobe 2991 cell processor, Baxter) according to the manufacturer's instructions. In some aspects, a washing step is accomplished by tangential flow filtration (TFF) according to the manufacturer's instructions. In some embodiments, the cells are resuspended in a variety of biocompatible buffers after washing, such as, for example, Ca++/Mg++ free PBS. In certain embodiments, components of a blood cell sample are removed and the cells directly resuspended in culture media.

[0789] In some embodiments, the methods include density-based cell separation methods, such as the preparation of white blood cells from peripheral blood by lysing the red blood cells and centrifugation through a Percoll or Ficoll gradient.

[0790] In some embodiments, the isolation methods include the separation of different cell types based on the expression or presence in the cell of one or more specific molecules, such as surface markers, e.g., surface proteins, intracellular markers, or nucleic acid. In some embodiments, any known method for separation based on such markers may be used. In some embodiments, the separation is affinity- or immunoaffinity-based separation. For example, the isolation in some aspects includes separation of cells and cell populations based on the cells' expression or expression level of one or more markers, typically cell surface markers, for example, by incubation with an antibody or binding partner that specifically binds to such markers, followed generally by washing steps and separation of cells having bound the antibody or binding partner, from those cells having not bound to the antibody or binding partner.

[0791] Such separation steps can be based on positive selection, in which the cells having bound the reagents are retained for further use, and/or negative selection, in which the cells having not bound to the antibody or binding partner are retained. In some examples, both fractions are retained for further use. In some aspects, negative selection can be particularly useful where no antibody is available that specifically identifies a cell type in a heterogeneous population, such that separation is best carried out based on markers expressed by cells other than the desired population.

[0792] The separation need not result in 100% enrichment or removal of a particular cell population or cells expressing a particular marker. For example, positive selection of or enrichment for cells of a particular type, such as those expressing a marker, refers to increasing the number or percentage of such cells, but need not result in a complete absence of cells not expressing the marker. Likewise, negative selection, removal, or depletion of cells of a particular type, such as those expressing a marker, refers to decreasing the number or percentage of such cells, but need not result in a complete removal of all such cells.

[0793] In some examples, multiple rounds of separation steps are carried out, where the positively or negatively selected fraction from one step is subjected to another separation step, such as a subsequent positive or negative selection. In some examples, a single separation step can deplete cells expressing multiple markers simultaneously, such as by incubating cells with a plurality of antibodies or binding partners, each specific for a marker targeted for negative selection. Likewise, multiple cell types can simultaneously be positively selected by incubating cells with a plurality of antibodies or binding partners expressed on the various cell types.

[0794] For example, in some aspects, specific subpopulations of T cells, such as cells positive or expressing high levels of one or more surface markers, e.g., CD28+, CD62L+, CCR7+, CD27+, CD127+, CD4+, CD8+, CD45RA+, and/or CD45RO+ T cells, are isolated by positive or negative selection techniques.

[0795] For example, CD3+, CD28+ T cells can be positively selected using CD3/CD28 conjugated magnetic beads (e.g., DYNABEADS™. M-450 CD3/CD28 T Cell Expander).

[0796] In some embodiments, isolation is carried out by enrichment for a particular cell population by positive selection, or depletion of a particular cell population, by negative selection. In some embodiments, positive or negative selection is accomplished by incubating cells with one or more antibodies or other binding agent that specifically bind to one or more surface markers expressed or expressed (marker+) at a relatively higher level (marker^{high}) on the positively or negatively selected cells, respectively.

[0797] In some embodiments, T cells are separated from a peripheral blood mononuclear cell (PBMC) sample by negative selection of markers expressed on non-T cells, such as B cells, monocytes, or other white blood cells, such as CD14. In some aspects, a CD4+ or CD8+ selection step is used to separate CD4+ helper and CD8+ cytotoxic T cells. Such CD4+ and CD8+ populations can be further sorted into sub-populations by positive or negative selection for markers expressed or expressed to a relatively higher degree on one or more naive, memory, and/or effector T cell subpopulations.

[0798] In some embodiments, CD8+ cells are further enriched for or depleted of naive, central memory, effector memory, and/or central memory stem cells, such as by positive or negative selection based on surface antigens associated with the respective subpopulation. In some embodiments, enrichment for central memory T (TCM) cells is carried out to increase efficacy, such as to improve long-term survival, expansion, and/or engraftment following administration, which in some aspects is particularly robust in such sub-populations. See Terakura et al. (2012) Blood. 1:72-82; Wang et al. (2012) J Immunother. 35(9):689-701. In some embodiments, combining TCM-enriched CD8+ T cells and CD4+ T cells further enhances efficacy.

[0799] In embodiments, memory T cells are present in both CD62L+ and CD62L− subsets of CD8+ peripheral blood lymphocytes. Peripheral blood mononuclear cell (PBMC) can be enriched for or depleted of CD62L-CD8+ and/or CD62L+CD8+ fractions, such as using anti-CD8 and anti-CD62L antibodies.

[0800] In some embodiments, the enrichment for central memory T (TCM) cells is based on positive or high surface expression of CD45RO, CD62L, CCR7, CD28, CD3, and/or CD 127; in some aspects, it is based on negative selection for cells expressing or highly expressing CD45RA and/or granzyme B. In some aspects, isolation of a CD8+ population enriched for TCM cells is carried out by depletion of cells expressing CD4, CD14, CD45RA, and positive selection or enrichment for cells expressing CD62L. In one aspect, enrichment for central memory T (TCM) cells is carried out starting with a negative fraction of cells selected based on CD4 expression, which is subjected to a negative selection based on expression of CD14 and CD45RA, and a positive selection based on CD62L. Such selections in some aspects are carried out simultaneously and in other aspects are carried out sequentially, in either order. In some aspects, the same CD4 expression-based selection step used in preparing the CD8+ cell population or subpopulation, also is used to generate the CD4+ cell population or sub-population, such that both the positive and negative fractions from the CD4-based separation are retained and used in subsequent steps of the methods, optionally following one or more further positive or negative selection steps.

[0801] In a particular example, a sample of PBMCs or other white blood cell sample is subjected to selection of CD4+ cells, where both the negative and positive fractions are retained. The negative fraction then is subjected to negative selection based on expression of CD14 and CD45RA or ROR1, and positive selection based on a marker characteristic of central memory T cells, such as CD62L or CCR7, where the positive and negative selections are carried out in either order.

[0802] CD4+T helper cells are sorted into naive, central memory, and effector cells by identifying cell populations that have cell surface antigens. CD4+ lymphocytes can be obtained by standard methods. In some embodiments, naive CD4+T lymphocytes are CD45RO−, CD45RA+, CD62L+, CD4+ T cells. In some embodiments, central memory CD4+ cells are CD62L+ and CD45RO+. In some embodiments, effector CD4+ cells are CD62L− and CD45RO.

[0803] In one example, to enrich for CD4+ cells by negative selection, a monoclonal antibody cocktail typically includes antibodies to CD14, CD20, CD11b, CD16, HLA-DR, and CD8. In some embodiments, the antibody or binding partner is bound to a solid support or matrix, such as a magnetic bead or paramagnetic bead, to allow for separation of cells for positive and/or negative selection. For example, in some embodiments, the cells and cell populations are separated or isolated using immune-magnetic (or affinity-magnetic) separation techniques (reviewed in Methods in Molecular Medicine, vol. 58: Metastasis Research Protocols, Vol. 2: Cell Behavior In Vitro and In Vivo, p 17-25 Edited by: S. A. Brooks and U. Schumacher Humana Press Inc., Totowa, N.J.).

[0804] In some aspects, the sample or composition of cells to be separated is incubated with small, magnetizable or magnetically responsive material, such as magnetically responsive particles or microparticles, such as paramagnetic beads (e.g., such as Dynabeads or MACS beads). The magnetically responsive material, e.g., particle, generally is directly or indirectly attached to a binding partner, e.g., an antibody, that specifically binds to a molecule, e.g., surface marker, present on the cell, cells, or population of cells that it is desired to separate, e.g., that it is desired to negatively or positively select.

[0805] In some embodiments, the magnetic particle or bead comprises a magnetically responsive material bound to a specific binding member, such as an antibody or other binding partner. There are many well-known magnetically responsive materials used in magnetic separation methods. Suitable magnetic particles include those described in Molday, U.S. Pat. No. 4,452,773, and in European Patent Specification EP 452342 B, which are hereby incorporated by reference in its entirety. Colloidal sized particles, such as those described in Owen U.S. Pat. No. 4,795,698, and Liberti et al., U.S. Pat. No. 5,200,084 are other examples.

[0806] The incubation generally is carried out under conditions whereby the antibodies or binding partners, or molecules, such as secondary antibodies or other reagents, which specifically bind to such antibodies or binding partners, which are attached to the magnetic particle or bead, specifically bind to cell surface molecules if present on cells within the sample.

[0807] In some aspects, the sample is placed in a magnetic field, and those cells having magnetically responsive or magnetizable particles attached thereto will be attracted to the magnet and separated from the unlabeled cells. For positive selection, cells that are attracted to the magnet are retained; for negative selection, cells that are not attracted (unlabeled cells) are retained. In some aspects, a combination of positive and negative selection is performed during the same selection step, where the positive and negative fractions are retained and further processed or subject to further separation steps.

[0808] In certain embodiments, the magnetically responsive particles are coated in primary antibodies or other binding partners, secondary antibodies, lectins, enzymes, or streptavidin. In certain embodiments, the magnetic particles are attached to cells via a coating of primary antibodies specific for one or more markers. In certain embodiments, the cells, rather than the beads, are labeled with a primary antibody or binding partner, and then cell-type specific secondary antibody- or other binding partner (e.g., streptavidin)-coated magnetic particles, are added. In certain embodiments, streptavidin-coated magnetic particles are used in conjunction with biotinylated primary or secondary antibodies.

[0809] In some embodiments, the magnetically responsive particles are left attached to the cells that are to be subsequently incubated, cultured and/or engineered; in some aspects, the particles are left attached to the cells for administration to a patient. In some embodiments, the magnetizable or magnetically responsive particles are removed from the cells. Methods for removing magnetizable particles from cells are known and include, e.g., the use of competing non-labeled antibodies, magnetizable particles or antibodies conjugated to cleavable linkers, etc. In some embodiments, the magnetizable particles are biodegradable.

[0810] In some embodiments, the affinity-based selection is via magnetic-activated cell sorting (MACS) (Miltenyi Biotech, Auburn, Calif.). Magnetic Activated Cell Sorting (MACS) systems are capable of high-purity selection of cells having magnetized particles attached thereto. In certain embodiments, MACS operates in a mode wherein the non-target and target species are sequentially eluted after the application of the external magnetic field. That is, the cells attached to magnetized particles are held in place while the unattached species are eluted. Then, after this first elution step is completed, the species that were trapped in the magnetic field and were prevented from being eluted are freed in some manner such that they can be eluted and recovered. In certain embodiments, the non-target cells are labelled and depleted from the heterogeneous population of cells.

[0811] In certain embodiments, the isolation or separation is carried out using a system, device, or apparatus that carries out one or more of the isolation, cell preparation, separation, processing, incubation, culture, and/or formulation steps of the methods. In some aspects, the system is used to carry out each of these steps in a closed or sterile environment, for example, to minimize error, user handling and/or contamination. In one example, the system is a system as described in International Patent Application, Publication Number WO2009/072003, or US 20110003380 A1.

[0812] In some embodiments, the system or apparatus carries out one or more, e.g., all, of the isolation, processing, engineering, and formulation steps in an integrated or self-contained system, and/or in an automated or programmable fashion. In some aspects, the system or apparatus includes a computer and/or computer program in communication with the system or apparatus, which allows a user to program, control, assess the outcome of, and/or adjust various aspects of the processing, isolation, engineering, and formulation steps.

[0813] In some aspects, the separation and/or other steps is carried out using CliniMACS system (Miltenyi Biotec), for example, for automated separation of cells on a clinical-scale level in a closed and sterile system. Components can include an integrated microcomputer, magnetic separation unit, peristaltic pump, and various pinch valves. The integrated computer in some aspects controls all components of the instrument and directs the system to perform repeated procedures in a standardized sequence. The magnetic separation unit in some aspects includes a movable permanent magnet and a holder for the selection column. The peristaltic pump controls the flow rate throughout the tubing set and, together with the pinch valves, ensures the controlled flow of buffer through the system and continual suspension of cells.

[0814] The CliniMACS system in some aspects uses antibody-coupled magnetizable particles that are supplied in a sterile, non-pyrogenic solution. In some embodiments, after labelling of cells with magnetic particles the cells are washed to remove excess particles. A cell preparation bag is then connected to the tubing set, which in turn is connected to a bag containing buffer and a cell collection bag. The tubing set consists of pre-assembled sterile tubing, including a pre-column and a separation column, and are for single use only. After initiation of the separation program, the system automatically applies the cell sample onto the separation column. Labeled cells are retained within the column, while unlabeled cells are removed by a series of washing steps. In some embodiments, the cell populations for use with the methods described herein are unlabeled and are not retained in the column. In some embodiments, the cell populations for use with the methods described herein are labeled and are retained in the column. In some embodiments, the cell populations for use with the methods described herein are eluted from the column after removal of the magnetic field, and are collected within the cell collection bag.

[0815] In certain embodiments, separation and/or other steps are carried out using the CliniMACS Prodigy system (Miltenyi Biotec). The CliniMACS Prodigy system in some aspects is equipped with a cell processing unity that permits automated washing and fractionation of cells by centrifugation. The CliniMACS Prodigy system can also include an onboard camera and image recognition software that determines the optimal cell fractionation endpoint by discerning the macroscopic layers of the source cell product. For example, peripheral blood may be automatically separated into erythrocytes, white blood cells and plasma layers. The CliniMACS Prodigy system can also include an integrated cell cultivation chamber which accomplishes cell culture protocols such as, e.g., cell differentiation and expansion, antigen loading, and long-term cell culture. Input ports can allow for the sterile removal and replenishment of media and cells can be monitored using an integrated microscope. See, e.g., Klebanoff et al. (2012) J Immunother. 35(9): 651-660, Terakura et al. (2012) Blood. 1:72-82, and Wang et al. (2012) J Immunother. 35(9):689-701.

[0816] In some embodiments, a cell population described herein is collected and enriched (or depleted) via flow cytometry, in which cells stained for multiple cell surface markers are carried in a fluidic stream. In some embodiments, a cell population described herein is collected and enriched (or depleted) via preparative scale fluorescence activated cell sorting (FACS). In certain embodiments, a cell population described herein is collected and enriched (or depleted) by use of microelectromechanical systems (MEMS) chips in combination with a FACS-based detection system (see, e.g., WO 2010/033140, Cho et al. (2010) Lab Chip 10, 1567-1573; and Godin et al. (2008) J Biophoton. 1(5):355-376. In both cases, cells can be labeled with multiple markers, allowing for the isolation of well-defined T cell subsets at high purity.

[0817] In some embodiments, the antibodies or binding partners are labeled with one or more detectable marker, to facilitate separation for positive and/or negative selection. For example, separation may be based on binding to fluorescently labeled antibodies. In some examples, separation of cells based on binding of antibodies or other binding partners specific for one or more cell surface markers are carried in a fluidic stream, such as by fluorescence-activated cell sorting (FACS), including preparative scale (FACS) and/or microelectromechanical systems (MEMS) chips, e.g., in combination with a flow-cytometric detection system. Such methods allow for positive and negative selection based on multiple markers simultaneously.

[0818] In some embodiments, the preparation methods include steps for freezing, e.g., cryopreserving, the cells, either before or after isolation, incubation, and/or engineering. In some embodiments, the freeze and subsequent thaw step removes granulocytes and, to some extent, monocytes in the cell population. In some embodiments, the cells are suspended in a freezing solution, e.g., following a washing step to remove plasma and platelets. Any of a variety of known freezing solutions and parameters in some aspects may be used. One example involves using PBS containing 20% DMSO and 8% human serum albumin (HSA), or other suitable cell freezing media. This can then be diluted 1:1 with media so that the final concentration of DMSO and HSA are 10% and 4%, respectively. Other examples include Cryostor®, CTL-Cryo™ ABC freezing media, and the like. The cells are then frozen to −80 degrees C. at a rate of 1 degree per minute and stored in the vapor phase of a liquid nitrogen storage tank.

[0819] In some embodiments, the provided methods include cultivation, incubation, culture, and/or genetic engineering steps. For example, in some embodiments, provided are methods for incubating and/or engineering the depleted cell populations and culture-initiating compositions.

[0820] Thus, in some embodiments, the cell populations are incubated in a culture-initiating composition. The incubation and/or engineering may be carried out in a culture vessel, such as a unit, chamber, well, column, tube, tubing set, valve, vial, culture dish, bag, or other container for culture or cultivating cells.

[0821] In some embodiments, the cells are incubated and/or cultured prior to or in connection with genetic engineering. The incubation steps can include culture, cultivation, stimulation, activation, and/or propagation. In some embodiments, the compositions or cells are incubated in the presence of stimulating conditions or a stimulatory agent. Such conditions include those designed to induce proliferation, expansion, activation, and/or survival of cells in the population, to mimic antigen exposure, and/or to prime the cells for genetic engineering, such as for the introduction of a recombinant antigen receptor.

[0822] The conditions can include one or more of particular media, temperature, oxygen content, carbon dioxide content, time, agents, e.g., nutrients, amino acids, antibiotics, ions, and/or stimulatory factors, such as cytokines, chemokines, antigens, binding partners, fusion proteins, recombinant soluble receptors, and any other agents designed to activate the cells.

[0823] In some embodiments, the stimulating conditions or agents include one or more agent, e.g., ligand, which is capable of activating an intracellular signaling domain of a TCR complex. In some aspects, the agent turns on or initiates TCR/CD3 intracellular signaling cascade in a T cell. Such agents can include antibodies, such as those specific for a TCR component and/or costimulatory receptor, e.g., anti-CD3, anti-CD28, for example, bound to solid support such as a bead, and/or one or more cytokines. Optionally, the expansion method may further comprise the step of adding anti-CD3 and/or anti CD28 antibody to the culture medium (e.g., at a concentration of at least about 0.5 ng/ml). In some embodiments, the stimulating agents include IL-2 and/or IL-15, for example, an IL-2 concentration of at least about 10 units/mL.

[0824] In some aspects, incubation is carried out in accordance with techniques such as those described in U.S. Pat. No. 6,040,177 to Riddell et al., Klebanoff et al. (2012) J Immunother. 35(9): 651-660, Terakura et al. (2012) Blood. 1:72-82, and/or Wang et al. (2012) J Immunother. 35(9):689-701.

[0825] In some embodiments, the T cells are expanded by adding to the culture-initiating composition feeder cells, such as non-dividing peripheral blood mononuclear cells (PBMC), (e.g., such that the resulting population of cells contains at least about 5, 10, 20, or 40 or more PBMC feeder cells for each T lymphocyte in the initial population to be expanded); and incubating the culture (e.g. for a time sufficient to expand the numbers of T cells). In some aspects, the non-dividing feeder cells can comprise gamma-irradiated PBMC feeder cells. In some embodiments, the PBMC are irradiated with gamma rays in the range of about 3000 to 3600 rads to prevent cell division. In some embodiments, the PBMC feeder cells are inactivated with Mytomicin C. In some aspects, the feeder cells are added to culture medium prior to the addition of the populations of T cells.

[0826] In some embodiments, the stimulating conditions include temperature suitable for the growth of human T lymphocytes, for example, at least about 25 degrees Celsius, generally at least about 30 degrees, and generally at or about 37 degrees Celsius. Optionally, the incubation may further comprise adding non-dividing EBV-transformed lymphoblastoid cells (LCL) as feeder cells. LCL can be irradiated with gamma rays in the range of about 6000 to 10,000 rads. The LCL feeder cells in some aspects is provided in any suitable amount, such as a ratio of LCL feeder cells to initial T lymphocytes of at least about 10:1.

[0827] In embodiments, antigen-specific T cells, such as antigen-specific CD4+ and/or CD8+ T cells, are obtained by stimulating naive or antigen specific T lymphocytes with antigen. For example, antigen-specific T cell lines or clones can be generated to cytomegalovirus antigens by isolating T cells from infected subjects and stimulating the cells in vitro with the same antigen.

[0828] Assays

[0829] A variety of assays known in the art may be used to identify and characterize an HLA-PEPTIDE ABP provided herein.

### Binding, Competition, and Epitope Mapping Assays

[0830] Specific antigen-binding activity of an ABP provided herein may be evaluated by any suitable method, including using SPR, BLI, RIA and MSD, as described elsewhere in this disclosure. Additionally, antigen-binding activity may be evaluated by ELISA assays, using flow cytometry, and/or Western blot assays.

[0831] Assays for measuring competition between two ABPs, or an ABP and another molecule (e.g., one or more ligands of HLA-PEPTIDE such as a TCR) are described elsewhere in this disclosure and, for example, in Harlow and Lane, ABPs: A Laboratory Manual ch. 14, 1988, Cold Spring Harbor Laboratory, Cold Spring Harbor, N.Y, incorporated by reference in its entirety.

[0832] Assays for mapping the epitopes to which an ABP provided herein bind are described, for example, in Morris “Epitope Mapping Protocols,” in Methods in Molecular Biology vol. 66, 1996, Humana Press, Totowa, N.J., incorporated by reference in its entirety. In some embodiments, the epitope is determined by peptide competition. In some embodiments, the epitope is determined by mass spectrometry. In some embodiments, the epitope is determined by mutagenesis. In some embodiments, the epitope is determined by crystallography.

### Assays for Effector Functions

[0833] Effector function following treatment with an ABP and/or cell provided herein may be evaluated using a variety of in vitro and in vivo assays known in the art, including those described in Ravetch and Kinet, Annu. Rev. Immunol., 1991, 9:457-492; U.S. Pat. Nos. 5,500,362, 5,821,337; Hellstrom et al., Proc. Nat'l Acad. Sci. USA, 1986, 83:7059-7063; Hellstrom et al., Proc. Nat'l Acad. Sci. USA, 1985, 82:1499-1502; Bruggemann et al., J. Exp. Med., 1987, 166:1351-1361; Clynes et al., Proc. Nat'l Acad. Sci. USA, 1998, 95:652-656; WO 2006/029879; WO 2005/100402; Gazzano-Santoro et al., J. Immunol. Methods, 1996, 202:163-171; Cragg et al., Blood, 2003, 101:1045-1052; Cragg et al. Blood, 2004, 103:2738-2743; and Petkova et al., Int'l. Immunol., 2006, 18:1759-1769; each of which is incorporated by reference in its entirety.

[0834] Pharmaceutical Compositions

[0835] An ABP, cell, or HLA-PEPTIDE target provided herein can be formulated in any appropriate pharmaceutical composition and administered by any suitable route of administration. Suitable routes of administration include, but are not limited to, the intra-arterial, intradermal, intramuscular, intraperitoneal, intravenous, nasal, parenteral, pulmonary, and subcutaneous routes.

[0836] The pharmaceutical composition may comprise one or more pharmaceutical excipients. Any suitable pharmaceutical excipient may be used, and one of ordinary skill in the art is capable of selecting suitable pharmaceutical excipients. Accordingly, the pharmaceutical excipients provided below are intended to be illustrative, and not limiting. Additional pharmaceutical excipients include, for example, those described in the Handbook of Pharmaceutical Excipients, Rowe et al. (Eds.) 6th Ed. (2009), incorporated by reference in its entirety.

[0837] In some embodiments, the pharmaceutical composition comprises an anti-foaming agent. Any suitable anti-foaming agent may be used. In some aspects, the anti-foaming agent is selected from an alcohol, an ether, an oil, a wax, a silicone, a surfactant, and combinations thereof. In some aspects, the anti-foaming agent is selected from a mineral oil, a vegetable oil, ethylene bis stearamide, a paraffin wax, an ester wax, a fatty alcohol wax, a long chain fatty alcohol, a fatty acid soap, a fatty acid ester, a silicon glycol, a fluorosilicone, a polyethylene glycol-polypropylene glycol copolymer, polydimethylsiloxane-silicon dioxide, ether, octyl alcohol, capryl alcohol, sorbitan trioleate, ethyl alcohol, 2-ethyl-hexanol, dimethicone, oleyl alcohol, simethicone, and combinations thereof.

[0838] In some embodiments, the pharmaceutical composition comprises a co-solvent. Illustrative examples of co-solvents include ethanol, poly(ethylene) glycol, butylene glycol, dimethylacetamide, glycerin, propylene glycol, and combinations thereof.

[0839] In some embodiments, the pharmaceutical composition comprises a buffer. Illustrative examples of buffers include acetate, borate, carbonate, lactate, malate, phosphate, citrate, hydroxide, diethanolamine, monoethanolamine, glycine, methionine, guar gum, monosodium glutamate, and combinations thereof.

[0840] In some embodiments, the pharmaceutical composition comprises a carrier or filler. Illustrative examples of carriers or fillers include lactose, maltodextrin, mannitol, sorbitol, chitosan, stearic acid, xanthan gum, guar gum, and combinations thereof.

[0841] In some embodiments, the pharmaceutical composition comprises a surfactant. Illustrative examples of surfactants include d-alpha tocopherol, benzalkonium chloride, benzethonium chloride, cetrimide, cetylpyridinium chloride, docusate sodium, glyceryl behenate, glyceryl monooleate, lauric acid, macrogol 15 hydroxystearate, myristyl alcohol, phospholipids, polyoxyethylene alkyl ethers, polyoxyethylene sorbitan fatty acid esters, polyoxyethylene stearates, polyoxylglycerides, sodium lauryl sulfate, sorbitan esters, vitamin E polyethylene(glycol) succinate, and combinations thereof.

[0842] In some embodiments, the pharmaceutical composition comprises an anti-caking agent. Illustrative examples of anti-caking agents include calcium phosphate (tribasic), hydroxymethyl cellulose, hydroxypropyl cellulose, magnesium oxide, and combinations thereof.

[0843] Other excipients that may be used with the pharmaceutical compositions include, for example, albumin, antioxidants, antibacterial agents, antifungal agents, bioabsorbable polymers, chelating agents, controlled release agents, diluents, dispersing agents, dissolution enhancers, emulsifying agents, gelling agents, ointment bases, penetration enhancers, preservatives, solubilizing agents, solvents, stabilizing agents, sugars, and combinations thereof. Specific examples of each of these agents are described, for example, in the Handbook of Pharmaceutical Excipients, Rowe et al. (Eds.) 6th Ed. (2009), The Pharmaceutical Press, incorporated by reference in its entirety.

[0844] In some embodiments, the pharmaceutical composition comprises a solvent. In some aspects, the solvent is saline solution, such as a sterile isotonic saline solution or dextrose solution. In some aspects, the solvent is water for injection.

[0845] In some embodiments, the pharmaceutical compositions are in a particulate form, such as a microparticle or a nanoparticle. Microparticles and nanoparticles may be formed from any suitable material, such as a polymer or a lipid. In some aspects, the microparticles or nanoparticles are micelles, liposomes, or polymersomes.

[0846] Further provided herein are anhydrous pharmaceutical compositions and dosage forms comprising an ABP, since water can facilitate the degradation of some ABPs.

[0847] Anhydrous pharmaceutical compositions and dosage forms provided herein can be prepared using anhydrous or low moisture containing ingredients and low moisture or low humidity conditions. Pharmaceutical compositions and dosage forms that comprise lactose and at least one active ingredient that comprises a primary or secondary amine can be anhydrous if substantial contact with moisture and/or humidity during manufacturing, packaging, and/or storage is expected.

[0848] An anhydrous pharmaceutical composition should be prepared and stored such that its anhydrous nature is maintained. Accordingly, anhydrous compositions can be packaged using materials known to prevent exposure to water such that they can be included in suitable formulary kits. Examples of suitable packaging include, but are not limited to, hermetically sealed foils, plastics, unit dose containers (e.g., vials), blister packs, and strip packs.

[0849] In certain embodiments, an ABP and/or cell provided herein is formulated as parenteral dosage forms. Parenteral dosage forms can be administered to subjects by various routes including, but not limited to, subcutaneous, intravenous (including infusions and bolus injections), intramuscular, and intra-arterial. Because their administration typically bypasses subjects' natural defenses against contaminants, parenteral dosage forms are typically, sterile or capable of being sterilized prior to administration to a subject. Examples of parenteral dosage forms include, but are not limited to, solutions ready for injection, dry (e.g., lyophilized) products ready to be dissolved or suspended in a pharmaceutically acceptable vehicle for injection, suspensions ready for injection, and emulsions.

[0850] Suitable vehicles that can be used to provide parenteral dosage forms are well known to those skilled in the art. Examples include, but are not limited to: Water for Injection USP; aqueous vehicles such as, but not limited to, Sodium Chloride Injection, Ringer's Injection, Dextrose Injection, Dextrose and Sodium Chloride Injection, and Lactated Ringer's Injection; water miscible vehicles such as, but not limited to, ethyl alcohol, polyethylene glycol, and polypropylene glycol; and non-aqueous vehicles such as, but not limited to, corn oil, cottonseed oil, peanut oil, sesame oil, ethyl oleate, isopropyl myristate, and benzyl benzoate.

[0851] Excipients that increase the solubility of one or more of the ABPs and/or cells disclosed herein can also be incorporated into the parenteral dosage forms.

[0852] In some embodiments, the parenteral dosage form is lyophilized. Exemplary lyophilized formulations are described, for example, in U.S. Pat. Nos. 6,267,958 and 6,171,586; and WO 2006/044908; each of which is incorporated by reference in its entirety.

[0853] In human therapeutics, the doctor will determine the posology which he considers most appropriate according to a preventive or curative treatment and according to the age, weight, condition and other factors specific to the subject to be treated.

[0854] In certain embodiments, a composition provided herein is a pharmaceutical composition or a single unit dosage form. Pharmaceutical compositions and single unit dosage forms provided herein comprise a prophylactically or therapeutically effective amount of one or more prophylactic or therapeutic ABP.

[0855] The amount of the ABP, cell, or composition which will be effective in the prevention or treatment of a disorder or one or more symptoms thereof will vary with the nature and severity of the disease or condition, and the route by which the ABP and/or cell is administered. The frequency and dosage will also vary according to factors specific for each subject depending on the specific therapy (e.g., therapeutic or prophylactic agents) administered, the severity of the disorder, disease, or condition, the route of administration, as well as age, body, weight, response, and the past medical history of the subject. Effective doses may be extrapolated from dose-response curves derived from in vitro or animal model test systems.

[0856] Different therapeutically effective amounts may be applicable for different diseases and conditions, as will be readily known by those of ordinary skill in the art. Similarly, amounts sufficient to prevent, manage, treat or ameliorate such disorders, but insufficient to cause, or sufficient to reduce, adverse effects associated with the ABPs and/or cells provided herein are also encompassed by the dosage amounts and dose frequency schedules provided herein. Further, when a subject is administered multiple dosages of a composition provided herein, not all of the dosages need be the same. For example, the dosage administered to the subject may be increased to improve the prophylactic or therapeutic effect of the composition or it may be decreased to reduce one or more side effects that a particular subject is experiencing.

[0857] In certain embodiments, treatment or prevention can be initiated with one or more loading doses of an ABP or composition provided herein followed by one or more maintenance doses.

[0858] In certain embodiments, a dose of an ABP, cell, or composition provided herein can be administered to achieve a steady-state concentration of the ABP and/or cell in blood or serum of the subject. The steady-state concentration can be determined by measurement according to techniques available to those of skill or can be based on the physical characteristics of the subject such as height, weight and age.

[0859] As discussed in more detail elsewhere in this disclosure, an ABP and/or cell provided herein may optionally be administered with one or more additional agents useful to prevent or treat a disease or disorder. The effective amount of such additional agents may depend on the amount of ABP present in the formulation, the type of disorder or treatment, and the other factors known in the art or described herein.

[0860] Therapeutic Applications

[0861] For therapeutic applications, ABPs and/or cells are administered to a mammal, generally a human, in a pharmaceutically acceptable dosage form such as those known in the art and those discussed above. For example, ABPs and/or cells may be administered to a human intravenously as a bolus or by continuous infusion over a period of time, by intramuscular, intraperitoneal, intra-cerebrospinal, subcutaneous, intra-articular, intrasynovial, intrathecal, or intratumoral routes. The ABPs also are suitably administered by peritumoral, intralesional, or perilesional routes, to exert local as well as systemic therapeutic effects. The intraperitoneal route may be particularly useful, for example, in the treatment of ovarian tumors.

[0862] The ABPs and/or cells provided herein can be useful for the treatment of any disease or condition involving HLA-PEPTIDE. In some embodiments, the disease or condition is a disease or condition that can benefit from treatment with an anti-HLA-PEPTIDE ABP and/or cell. In some embodiments, the disease or condition is a tumor. In some embodiments, the disease or condition is a cell proliferative disorder. In some embodiments, the disease or condition is a cancer.

[0863] In some embodiments, the ABPs and/or cells provided herein are provided for use as a medicament. In some embodiments, the ABPs and/or cells provided herein are provided for use in the manufacture or preparation of a medicament. In some embodiments, the medicament is for the treatment of a disease or condition that can benefit from an anti-HLA-PEPTIDE ABP and/or cell. In some embodiments, the disease or condition is a tumor. In some embodiments, the disease or condition is a cell proliferative disorder. In some embodiments, the disease or condition is a cancer.

[0864] In some embodiments, provided herein is a method of treating a disease or condition in a subject in need thereof by administering an effective amount of an ABP and/or cell provided herein to the subject. In some aspects, the disease or condition is a cancer.

[0865] In some embodiments, provided herein is a method of treating a disease or condition in a subject in need thereof by administering an effective amount of an ABP and/or cell provided herein to the subject, wherein the disease or condition is a cancer, and the cancer is selected from a solid tumor and a hematological tumor.

[0866] In some embodiments, provided herein is a method of modulating an immune response in a subject in need thereof, comprising administering to the subject an effective amount of an ABP and/or cell or a pharmaceutical composition disclosed herein.

[0867] Combination Therapies

[0868] In some embodiments, an ABP and/or cell provided herein is administered with at least one additional therapeutic agent. Any suitable additional therapeutic agent may be administered with an ABP and/or cell provided herein. An additional therapeutic agent can be fused to an ABP. In some aspects, the additional therapeutic agent is selected from radiation, a cytotoxic agent, a toxin, a chemotherapeutic agent, a cytostatic agent, an anti-hormonal agent, an EGFR inhibitor, an immunomodulatory agent, an anti-angiogenic agent, and combinations thereof. In some embodiments, the additional therapeutic agent is an ABP.

[0869] Diagnostic Methods

[0870] Also provided are methods for predicting and/or detecting the presence of a given HLA-PEPTIDE on a cell from a subject. Such methods may be used, for example, to predict and evaluate responsiveness to treatment with an ABP and/or cell provided herein.

[0871] In some embodiments, a blood or tumor sample is obtained from a subject and the fraction of cells expressing HLA-PEPTIDE is determined. In some aspects, the relative amount of HLA-PEPTIDE expressed by such cells is determined. The fraction of cells expressing HLA-PEPTIDE and the relative amount of HLA-PEPTIDE expressed by such cells can be determined by any suitable method. In some embodiments, flow cytometry is used to make such measurements. In some embodiments, fluorescence assisted cell sorting (FACS) is used to make such measurement. See Li et al., J. Autoimmunity, 2003, 21:83-92 for methods of evaluating expression of HLA-PEPTIDE in peripheral blood.

[0872] In some embodiments, detecting the presence of a given HLA-PEPTIDE on a cell from a subject is performed using immunoprecipitation and mass spectrometry. This can be performed by obtaining a tumor sample (e.g., a frozen tumor sample) such as a primary tumor specimen and applying immunoprecipitation to isolate one or more peptides. The HLA alleles of the tumor sample can be determined experimentally or obtained from a third party source. The one or more peptides can be subjected to mass spectrometry (MS) to determine their sequence(s). The spectra from the MS can then be searched against a database. An example is provided in the Examples section below.

[0873] In some embodiments, predicting the presence of a given HLA-PEPTIDE on a cell from a subject is performed using a computer-based model applied to the peptide sequence and/or RNA measurements of one or more genes comprising that peptide sequence (e.g., RNA seq or RT-PCR, or nanostring) from a tumor sample. The model used can be as described in international patent application no. PCT/US2016/067159, herein incorporated by reference, in its entirety, for all purposes.

[0874] Kits

[0875] Also provided are kits comprising an ABP and/or cell provided herein. The kits may be used for the treatment, prevention, and/or diagnosis of a disease or disorder, as described herein.

[0876] In some embodiments, the kit comprises a container and a label or package insert on or associated with the container. Suitable containers include, for example, bottles, vials, syringes, and IV solution bags. The containers may be formed from a variety of materials, such as glass or plastic. The container holds a composition that is by itself, or when combined with another composition, effective for treating, preventing and/or diagnosing a disease or disorder. The container may have a sterile access port. For example, if the container is an intravenous solution bag or a vial, it may have a port that can be pierced by a needle. At least one active agent in the composition is an ABP provided herein. The label or package insert indicates that the composition is used for treating the selected condition.

[0877] In some embodiments, the kit comprises (a) a first container with a first composition contained therein, wherein the first composition comprises an ABP and/or cell provided herein; and (b) a second container with a second composition contained therein, wherein the second composition comprises a further therapeutic agent. The kit in this embodiment can further comprise a package insert indicating that the compositions can be used to treat a particular condition, e.g., cancer.

[0878] Alternatively, or additionally, the kit may further comprise a second (or third) container comprising a pharmaceutically-acceptable excipient. In some aspects, the excipient is a buffer. The kit may further include other materials desirable from a commercial and user standpoint, including filters, needles, and syringes.

### EXAMPLES

[0879] Below are examples of specific embodiments for carrying out the present invention. The examples are offered for illustrative purposes only, and are not intended to limit the scope of the present invention in any way. Efforts have been made to ensure accuracy with respect to numbers used (e.g., amounts, temperatures, etc.), but some experimental error and deviation should, of course, be allowed for.

[0880] The practice of the present invention will employ, unless otherwise indicated, conventional methods of protein chemistry, biochemistry, recombinant DNA techniques and pharmacology, within the skill of the art. Such techniques are explained fully in the literature. See, e.g., T. E. Creighton, Proteins: Structures and Molecular Properties (W.H. Freeman and Company, 1993); A. L. Lehninger, Biochemistry (Worth Publishers, Inc., current addition); Sambrook, et al., Molecular Cloning: A Laboratory Manual (2nd Edition, 1989); Methods In Enzymology (S. Colowick and N. Kaplan eds., Academic Press, Inc.); Remington's Pharmaceutical Sciences, 18th Edition (Easton, Pa.: Mack Publishing Company, 1990); Carey and Sundberg Advanced Organic Chemistry 3^{rd} Ed. (Plenum Press) Vols A and B(1992).

### Example 1: Identification of Predicted HLA-PEPTIDE Complexes (Table A)

[0881] We identified two classes of cancer specific HLA-peptide targets: The first class (cancer testis antigens, CTAs) are not expressed or are expressed at minimal levels in most normal tissues and expressed in tumor samples. The second class (tumor associated antigens, TAAs) are expressed highly in tumor samples and may have low expression in normal tissues.

[0882] We identified gene targets using three computational steps: First, we identified genes with low or no expression in most normal tissues using data available through the Genotype-Tissue Expression (GTEx) Project [1]. We obtained aggregated gene expression data from the Genotype-Tissue Expression (GTEx) Project (version V7p2). This dataset comprised 11,688 post-mortem samples from 714 individuals and fifty-three different tissue types. Expression was measured using RNA-Seq and computationally processed according to the GTEx standard pipeline (https://www.gtexportal.org/home/documentationPage). Gene expression was calculated using the sum of isoform expression that were calculated using RSEM v1.2.22 [2].

[0883] Next, we identified which of those genes are aberrantly expressed in cancer samples using data from The Cancer Genome Atlas (TCGA) Research Network: http://cancergenome.nih.gov/. We examined 11,093 samples available from TCGA (Data Release 6.0). Because GTEx and TCGA use different annotations of the human genome in their computational analyses, we only included genes for which there were available ENCODE mappings between the two datasets.

[0884] Finally, in these genes, we identified which peptides are likely to be presented as cell surface antigens by MHC Class I proteins using a deep learning model trained on HLA presented peptides sequenced by tandem mass spectrometry (MS/MS), as described in international patent application no. PCT/US2016/067159, herein incorporated by reference, in its entirety, for all purposes.

[0885] Specific criteria for the two classes of genes is given below.

[0886] CTA Inclusion Criteria

[0887] To identify the CTAs, we sought to define a criteria to exclude genes that were expressed in normal tissue that was strict enough to ensure tumor specificity, but would not exclude non-zero measurements arising from potential artifacts such as read misalignment. Genes were eligible for inclusion as CTAs if they met the following criteria: The median GTEx expression in each organ that was a part of the brain, heart, or lung was less than 0.1 transcripts per million (TPM) with no one sample exceeding 5 TPM. The median GTEx expression in other essential organs was less than 2 TPM with no one sample exceeding 10 TPM. Expression was ignored for organs classified as non-essential (testis, thyroid, and minor salivary gland). Genes were considered expressed in tumor samples if they had expression in TCGA of greater than 20 TPM in at least 30 samples.

[0888] We then examined the distribution of the expression of the remaining genes across the TCGA samples. When we examined the known CTAs, e.g. the MAGE family of genes, we observed that the expression these genes in log space was generally characterized by a bimodal distribution. This distribution consisted of a left mode around a lower expression value and a right mode (or thick tail) at a higher expression level. This expression pattern is consistent with a biological model in which some minimal expression is detected at baseline in all samples and higher expression of the gene is observed in a subset of tumors experiencing epigenetic dysregulation. We reviewed the distribution of expression of each gene across TCGA samples and discarded those where we observed only a unimodal distribution with no significant right-hand tail.

[0889] TAA Inclusion Criteria

[0890] The TAAs were identified by focusing on genes with much higher expression in tumor tissues than in normal tissue: We first identified genes with a median TPM of less than 10 in all GTEx essential, normal tissues and then selected the subset which had expression of greater than 100 TPM in at least one TCGA tumor tissues. Then, we examined the distribution of each of these genes and selected those with a bimodal distribution of expression, as well as additional evidence of significantly elevated expression in one or more tumor types.

[0891] Lists were further reviewed to eliminate genes which are known to have expression in tissues not adequately represented in GTEx or which could have originated from immune cell infiltrates within the tumor. These steps left of us with a final list of 56 CTA and 58 TAA genes.

[0892] We also added peptides from two additional proteins known to be present in cancer. We added the junction peptides from the EGFR-SEPT14 fusion protein [3] and we added peptides from KLK3 (PSA). We also added peptides from two genes from the same gene family as PSA: KLK2 and KLK4.

[0893] To identify the peptides that are likely to be presented as cell surface antigens by MEW Class I proteins, we used a sliding window to parse each of these proteins into its constituent 8-11 amino acid sequences. We processed these peptides and their flanking sequences with the HLA peptide presentation deep learning model to calculate the likelihood of presentation of each peptide at the max expression level observed for this gene in TCGA. We considered a peptide likely to be presented (i.e., a candidate target) if its quantile normalized probability of presentation calculated by our model was greater than 0.001.

[0894] The results are shown in Table A. Table A is included in an ASCII text file named “GSO-027WO_Informal_Sequence_Tables.txt”, which is hereby incorporated by reference in its entirety. For clarity, each HLA-PEPTIDE was assigned a target number in Table A. For example, HLA-PEPTIDE target 1 is HLA-C*16:01_AAACSRMVI, HLA-PEPTIDE target 2 is HLA-C*16:02_AAACSRMVI, and so forth.

[0895] In summary, the example provides a large set of tumor-specific HLA-PEPTIDEs that can be pursued as candidate targets for ABP development.

### REFERENCES

[0896] 1. Consortium, G. T., The Genotype-Tissue Expression (GTEx) project. Nat Genet, 2013. 45(6): p. 580-5.
[0897] 2. Li B, Dewey C N, RSEM: accurate transcript quantification from RNA-Seq data with or without a reference genome. BMC Bioinformatics. 2011 Aug. 4; 12:323.
[0898] 3. Frattini V, Trifonov V, Chan J M, Castano A, Lia M, Abate F, Keir S T, Ji A X, Zoppoli P, Niola F, Danussi C, Dolgalev I, Porrati P, Pellegatta S, Heguy A, Gupta G, Pisapia D J, Canoll P, Bruce J N, McLendon R E, Yan H, Aldape K, Finocchiaro G, Mikkelsen T, Privé GG, Bigner D D, Lasorella A, Rabadan R, Iavarone A. The integrated landscape of driver genomic alterations in glioblastoma. Nat Genet. 2013 October; 45(10):1141-9.

### Example 2: Validation of Predicted HLA-PEPTIDE Complexes

[0899] The presence of peptides from the HLA-PEPTIDE complexes of Tables A, A1, and A2 was determined using mass spectrometry (MS) on tumor samples known to be positive for each given HLA allele from the respective HLA-PEPTIDE complex.

[0900] Isolation of HLA-peptide molecules was performed using classic immunoprecipitation (IP) methods after lysis and solubilization of the tissue sample (1-4). Fresh frozen tissue was first frozen in liquid nitrogen and pulverized (CryoPrep; Covaris, Woburn, Mass.). Lysis buffer (1% CHAPS, 20 mM Tris-HCl, 150 mM NaCl, protease and phosphatase inhibitors, pH=8) was added to solubilize the tissue and 1/10^{th} of the sample was aliquoted for proteomics and genomic sequencing efforts. The remainder of the sample was spun at 4° C. for 2 hrs to pellet debris. The clarified lysate was used for the HLA specific IP.

[0901] Immunoprecipitation was performed using antibodies coupled to beads where the antibody was specific for HLA molecules. For a pan-Class I HLA immunoprecipitation, the antibody W6/32 (5) was used, for Class II HLA-DR, antibody L243 (6) was used. Antibody was covalently attached to NHS-sepharose beads during overnight incubation. After covalent attachment, the beads were washed and aliquoted for IP. Additional methods for IP can be used including but not limited to Protein A/G capture of antibody, magnetic bead isolation, or other methods commonly used for immunoprecipitation.

[0902] The lysate was added to the antibody beads and rotated at 4° C. overnight for the immunoprecipitation. After immunoprecipitation, the beads were removed from the lysate and the lysate was stored for additional experiments, including additional IPs. The IP beads were washed to remove non-specific binding and the HLA/peptide complex was eluted from the beads with 2N acetic acid. The protein components were removed from the peptides using a molecular weight spin column. The resultant peptides were taken to dryness by SpeedVac evaporation and can be stored at −20° C. prior to MS analysis.

[0903] Dried peptides were reconstituted in HPLC buffer A and loaded onto a C-18 microcapillary HPLC column for gradient elution in to the mass spectrometer. A gradient of 0-40% B (solvent A—0.1% formic acid, solvent B—0.1% formic acid in 80% acetonitrile) in 180 minutes was used to elute the peptides into the Fusion Lumos mass spectrometer (Thermo). MS1 spectra of peptide mass/charge (m/z) were collected in the Orbitrap detector with 120,000 resolution followed by 20 MS2 scans. Selection of MS2 ions was performed using data dependent acquisition mode and dynamic exclusion of 30 sec after MS2 selection of an ion. Automatic gain control (AGC) for MS1 scans was set to 4×105 and for MS2 scans was set to 1×104. For sequencing HLA peptides, +1, +2 and +3 charge states can be selected for MS2 fragmentation. Alternatively, MS2 spectra can be acquired using mass targeting methods where only masses listed in the inclusion list were selected for isolation and fragmentation. This was commonly referred to as Targeted Mass Spectrometry and was performed in either a qualitative manner or can be quantitative. Quantitation methods require each peptide to be quantitated to be synthesized using heavy labeled amino acids. (Doerr 2013)

[0904] MS2 spectra from each analysis were searched against a protein database using Comet (7-8) and the peptide identification was scored using Percolator (9-11) or using the integrated de novo sequencing and database search algorithm of PEAKS. Peptides from targeted MS2 experiments were analyzed using Skyline (Lindsay K. Pino et al. 2017) or other method to analyze predicted fragment ions.

[0905] The presence of multiple peptides from the predicted HLA-PEPTIDE complexes was determined using mass spectrometry (MS) on various tumor samples known to be positive for each given HLA allele from the respective HLA-PEPTIDE complex.

[0906] Representative spectra data for selected HLA-restricted peptides is shown in FIGS. 46-58. Each spectra contains the peptide fragmentation information as well as information related to the patient sample, including HLA types.

[0907] The spontaneous modification of amino acids can occur to many amino acids. Cysteine was especially susceptible to this modification and can be oxidized or modified with a free cysteine. Additionally N-terminal glutamine amino acids can be converted to pyro-glutamic acid. Since each of these modifications results in a change in mass, they can be definitively assigned in the MS2 spectra. To use these peptides in preparation of ABPs the peptide may need to contain the same modification as seen in the mass spectrometer. These modifications can be created using simple laboratory and peptide synthesis methods (Lee et al.; Ref 14).

### REFERENCES

[0908] (1) Hunt D F, Henderson R A, Shabanowitz J, Sakaguchi K, Michel H, Sevilir N, Cox A L, Appella E, Engelhard V H. Characterization of peptides bound to the class I MHC molecule HLA-A2.1 by mass spectrometry. Science 1992. 255: 1261-1263.
[0909] (2) Zarling A L, Polefrone J M, Evans A M, Mikesh L M, Shabanowitz J, Lewis S T, Engelhard V H, Hunt D F. Identification of class I MHC-associated phosphopeptides as targets for cancer immunotherapy. Proc Natl Acad Sci USA. 2006 Oct. 3; 103(40):14889-94.
[0910] (3) Bassani-Sternberg M, Pletscher-Frankild S, Jensen L J, Mann M. Mass spectrometry of human leukocyte antigen class I peptidomes reveals strong effects of protein abundance and turnover on antigen presentation. Mol Cell Proteomics. 2015 March; 14(3):658-73. doi: 10.1074/mcp.M114.042812.
[0911] (4) Abelin J G, Trantham P D, Penny S A, Patterson A M, Ward S T, Hildebrand W H, Cobbold M, Bai D L, Shabanowitz J, Hunt D F. Complementary IMAC enrichment methods for HLA-associated phosphopeptide identification by mass spectrometry. Nat Protoc. 2015 September; 10(9):1308-18. doi: 10.1038/nprot.2015.086. Epub 2015 Aug. 6
[0912] (5) Barnstable C J, Bodmer W F, Brown G, Galfre G, Milstein C, Williams A F, Ziegler A. Production of monoclonal antibodies to group A erythrocytes, HLA and other human cell surface antigens-new tools for genetic analysis. Cell. 1978 May; 14(1):9-20.
[0913] (6) Goldman J M, Hibbin J, Kearney L, Orchard K, Th'ng KH. HLA-DR monoclonal antibodies inhibit the proliferation of normal and chronic granulocytic leukaemia myeloid progenitor cells. Br J Haematol. 1982 November; 52(3):411-20.
[0914] (7) Eng J K, Jahan T A, Hoopmann M R. Comet: an open-source MS/MS sequence database search tool. Proteomics. 2013 January; 13(1):22-4. doi: 10.1002/pmic.201200439. Epub 2012 Dec. 4.
[0915] (8) Eng J K, Hoopmann M R, Jahan T A, Egertson J D, Noble W S, MacCoss MJ. A deeper look into Comet—implementation and features. J Am Soc Mass Spectrom. 2015 November; 26(11):1865-74. doi: 10.1007/s13361-015-1179-x. Epub 2015 Jun. 27.
[0916] (9) Lukas Käll, Jesse Canterbury, Jason Weston, William Stafford Noble and Michael J. MacCoss. Semi-supervised learning for peptide identification from shotgun proteomics datasets. Nature Methods 4:923-925, November 2007.
[0917] (10) Lukas Käll, John D. Storey, Michael J. MacCoss and William Stafford Noble. Assigning confidence measures to peptides identified by tandem mass spectrometry. Journal of Proteome Research, 7(1):29-34, January 2008.
[0918] (11) Lukas Käll, John D. Storey and William Stafford Noble. Nonparametric estimation of posterior error probabilities associated with peptides identified by tandem mass spectrometry. Bioinformatics, 24(16):i42-i48, August 2008.
[0919] (12) Doerr, A. (2013) Mass Spectrometry-based targeted proteomics. Nature Methods, 10, 23.
[0920] (13) Lindsay K. Pino, Brian C. Searle, James G. Bollinger, Brook Nunn, Brendan MacLean & M. J. MacCoss (2017) The Skyline ecosystem: Informatics for quantitative mass spectrometry proteomics. Mass Spectrometry Reviews.
[0921] (14) Lee W Thompson; Kevin T Hogan; Jennifer A Caldwell; Richard A Pierce; Ronald C Hendrickson; Donna H Deacon; Robert E Settlage; Laurence H Brinckerhoff; Victor H Engelhard; Jeffrey Shabanowitz; Donald F Hunt; Craig L Slingluff. Preventing the spontaneous modification of an HLA-A2-restricted peptide at an N-terminal glutamine or an internal cysteine residue enhances peptide antigenicity. Journal of Immunotherapy (Hagerstown, Md.: 1997). 27(3):177-83, MAY 2004.

### Example 3: Identification of Antibodies and Antigen Binding Fragments Thereof that Bind HLA-PEPTIDE Targets

[0922] Overview

[0923] The following exemplification demonstrates that antibodies (Abs) can be identified that recognize tumor-specific HLA-restricted peptides. The overall epitope that is recognized by such Abs generally comprises a composite surface of both the peptide as well as the HLA protein presenting that particular peptide. Abs that recognize HLA complexes in a peptide-specific manner are often referred to as T cell receptor (TCR)-like Abs or TCR-mimetic Abs. Exemplary HLA-PEPTIDE targets included HLA-A*01:01_NTDNNLAVY (HLA-PEPTIDE target “G2”), HLA-A*02:01_LLASSILCA (HLA-PEPTIDE target “G7”), HLA-B*35:01_EVDPIGHVY (HLA-PEPTIDE target “G5”), HLA-A*02:01_AIFPGAVPAA (HLA-PEPTIDE target “G8”), and HLA-A*01:01_ASSLPTTMNY (HLA-PEPTIDE target “G10”), respectively. Cell surface presentation of these HLA-PEPTIDE targets was confirmed by mass spectrometry analysis of HLA complexes obtained from tumor samples as described in Example 2. Representative plots are depicted in FIGS. 23-25.

[0924] HLA-PEPTIDE target complexes and counterscreen peptide-HLA complexes The HLA-PEPTIDE targets G5, G8, G10, as well as counterscreen negative control peptide-HLAs, were produced recombinantly using conditional ligands for HLA molecules using established methods. In all, 18 counterscreen HLA-peptides were generated for each of the HLA-PEPTIDE targets. The 18 counterscreen HLA-peptides were designed such that (A) the negative control peptide was known to be presented by the same HLA subtype (i.e. the HLA-related controls) or (B) the negative control peptides were known to be presented by a different HLA subtype. The grouping of the target and the negative control peptide-HLA complexes for screen 1 is shown in FIG. 2 (with detailed sequence information provided in Table 1), and for screen 2 shown in FIG. 3 (with detailed sequence information provided in Table 2.

TABLE 1
HLA-PEPTIDE sequence design for Screen 1 negative control peptides and “G5” target

| Group | HLA | Peptide | Gene | Target |
|---|---|---|---|---|
| G1 | HLA-A*02:01 | LLFGYPVYV | | Neg Ctrl 1 |
| | HLA-A*02:01 | GILGFVFTL | | Neg Ctrl 2 |
| | HLA-A*02:01 | FLLTRILTI | | Neg Ctrl 3 |
| G2 | HLA-A*01:01 | YSEHPTFTSQY | | Neg Ctrl 1 |
| | HLA-A*01:01 | VSDGGPNLY | | Neg Ctrl 2 |
| | HLA-A*01:01 | ATDALMTGY | | Neg Ctrl 3 |
| G3 | HLA-A*11:01 | IVTDFSVIK | | Neg Ctrl 1 |
| | HLA-A*11:01 | KSMREEYRK | | Neg Ctrl 2 |
| | HLA-A*11:01 | SSCSSCPLSK | | Neg Ctrl 3 |
| G4 | HLA-A*11:01 | ATIGTAMYK | | Neg Ctrl 1 |
| | HLA-A*11:01 | AVFDRKSDAK | | Neg Ctrl 2 |
| | HLA-A*11:01 | SIIPSGPLK | | Neg Ctrl 3 |
| G5 | HLA-B*35:01 | EVDPIGHVY | MAGEA6 | Target |
| | HLA-B*35:01 | IPSINVHHY | | Neg Ctrl 1 |
| | HLA-B*35:01 | EPLPQGQLTAY | | Neg Ctrl 2 |
| | HLA-B*35:01 | VPLDEDFRKY | | Neg Ctrl 3 |
| G6 | HLA-A*03:01 | RLRAEAQVK | | Neg Ctrl 1 |
| | HLA-A*03:01 | RLRPGGKKK | | Neg Ctrl 2 |
| | HLA-A*03:01 | QVPLRPMTYK | | Neg Ctrl 3 |

TABLE 2
HLA-PEPTIDE sequence design for Screen 2 negative control peptides, G8, and G10 targets*

| Group | HLA | Peptide | Gene | Target |
|---|---|---|---|---|
| G7/G8* | A*02:01 | LLFGYPVYV | | Neg Ctrl 1 |
| | A*02:01 | GILGFVFTL | | Neg Ctrl 2 |
| | A*02:01 | FLLTRILTI | | Neg Ctrl 3 |
| G9 | A*24:02 | TYGPVFMCL | | Neg Ctrl 1 |
| | A*24:02 | RYLKDQQLL | | Neg Ctrl 2 |
| | A*24:02 | PYLFWLAAI | | Neg Ctrl 3 |
| G10 | A*01:01 | ASSLPTTMNY | MAGE3/6 | Target |
| | A*01:01 | YSEHPTFTSQY | | Neg Ctrl 1 |
| | A*01:01 | VSDGGPNLY | | Neg Ctrl 2 |
| | A*01:01 | ATDALMTGY | | Neg Ctrl 3 |
| G11 (=G3) | A*11:01 | IVTDFSVIK | | Neg Ctrl 1 |
| | A*11:01 | KSMREEYRK | | Neg Ctrl 2 |
| | A*11:01 | SSCSSCPLSK | | Neg Ctrl 3 |
| G12 (=G6) | A*03:01 | RLRAEAQVK | | Neg Ctrl 1 |
| | A*03:01 | RLRPGGKKK | | Neg Ctrl 2 |
| | A*03:01 | QVPLRPMTYK | | Neg Ctrl 3 |

### Generation and Stability Analysis of HLA-PEPTIDE Target Complexes and Counterscreen Peptide-HLA Complexes

[0925] Results for the G5 counterscreen “minipool” and G2 target are shown in FIG. 4. All three counterscreen peptides and the G5 peptide rescued the HLA complex from dissociation.

[0926] Results for the additional G5 “complete” pool counterscreen peptides are shown in FIG. 5, demonstrating that they also form stable HLA-peptide complexes.

[0927] Results for counterscreen peptides and G8 target are shown in FIG. 6. All three counterscreen peptides and the G8 peptide rescued the HLA complex from dissociation.

[0928] Results for the G10 counterscreen “minipool” and G10 target are shown in FIG. 7. All three counterscreen peptides and the G10 peptide rescued the HLA complex from dissociation.

[0929] Results for the additional G8 and G10 “complete” pool counterscreen peptides are shown in FIG. 8, demonstrating that they also form stable HLA-peptide complexes.

[0930] Phage Library Screening

[0931] The highly diverse SuperHuman 2.0 synthetic naïve scFv library from Distributed Bio Inc was used as input material for phage display, which has a 7.6×10¹⁰ total diversity on ultra-stable and diverse VH/VL scaffolds. For both screen 1 (see FIG. 2) and screen 2 (see FIG. 3) three to four rounds of bead-based phage panning with the target pHLA complex (as shown in Table 3) were conducted using established protocols to identify scFv binders to pHLAs G5, G8 and G10, respectively. For each round of panning, the phage library was initially depleted with 18 pooled negative pHLA complexes prior to the binding step with the target pHLAs. The phage titer was determined at every round of panning to establish removal of non-binding phage. The output phage supernatant was also tested for target binding by ELISA and suggested progressive enrichment of G5-, G8 and G10 binding phage (see FIG. 9).

TABLE 3
Phage library screening strategy

| Round | Antigen concentration | Washes |
|---|---|---|
| R1 | 100 pmol | 3X PBST + 3X PBS (5 min washes) |
| R2 | 25 pmol | 5 PBST (2x 30 sec, 3x 5 min) + 5 PBS (2x 30 sec, 3x 5 min) |
| R3 | 10 pmol | 8 PBST (4x 30 sec, 4x 5 min) + 8 PBS (4x 30 sec, 4x 5 min) |
| R4 | 5 pmol, 10 pmol | 30 min PBST + 30 min PBS |

[0932] Bacterial periplasmic extracts (PPEs) of individual output clones were subsequently generated in 96-well plates using well-established protocols. The PPEs were used to test for binding to the target pHLA antigen by high throughput PPE ELISA. Positive clones were sequenced and re-arrayed to select sequence-unique clones. Sequence unique clones were then tested in a secondary ELISA for binding to target pHLA versus the panel of HLA-matched negative control pHLA complexes, thus establishing target specificity. The G8 negative control HLA complexes (i.e. A*24:02) did not HLA-match with the G8 target HLA complex (i.e. A*02:01). Therefore, HLA-A*02:01 complexes presenting the peptides LLFGYPVYV, GILGFVFTL or FLLTRILTI from G7 were used as HLA-matched minipool of negative controls for G8 in further biochemical and functional characterization assays for the TCR-mimetic Abs retrieved from the scFv library.

[0933] Isolation of scFv Hits

[0934] Individual, soluble scFv protein fragments were produced and purified for the scFv clones that were found to be selective when expressed in PPEs. As shown by scFv PPE ELISA, these clones exhibited at least three-fold selective binding to the target pHLA as compared to binding to the minipool of negative control pHLAs. Soluble scFv production allowed for further biochemical and functional characterization.

[0935] The resulting VH and VL sequences for the scFvs that bind target G5 are shown in Table 4. To clarify the organization of Table 4, and other Tables of scFv sequences, each scFv was assigned a clone name. For all clone names, clone names recite the target (e.g., G5), the plate number (e.g., plate 7), and well number (e.g., well E7) of the 96-well plate from which the clone was originally picked. For example, clone names, G5-P7E07, G5-7E7, G5(7E7), G5(7E07), all refer to the same scFv clone. For example, in Table 4, the scFv from clone G5(7E07) has the VH sequence QVQLVQSGAEVKKPGASVKVSCKASGYTFTSYDINWVRQAPGQGLEWMGIINPRSG STKYAQKFQGRVTMTRDTSTSTVYMELSSLRSEDTAVYYCARDGVRYYGMDVWG QGTTVTVSS and the VL sequence

DIVMTQSPLSLPVTPGEPASISCRSSQSLLHSNGYNYLDWYLQKPGQSPQ
LLIYLGSYRASGVPDRFSGSGSGTDFTLKISRVEAEDVGVYYCMQGLQTP
ITFGQGTRLEIK.

[0936] The resulting CDR sequences for the scFvs that bind target G5 are shown in Table 5. To clarify the organization of Table 5, each scFv was assigned a clone name in Table 5. For example, the scFv from clone G5(7E07) has an HCDR1 sequence that is YTFTSYDIN, an HCDR2 sequence that is GIINPRSGSTKYA, an HCDR3 sequence that is CARDGVRYYGMDVW, an LCDR1 sequence that is RSSQSLLHSNGYNYLD, an LCDR2 sequence that is LGSYRAS, and an LCDR3 sequence that is CMQGLQTPITF, according to the Kabat numbering system.

[0937] The resulting VH and VL sequences for the scFvs that bind target G8 are shown in Table 6. Table 6 is organized similarly to Table 4.

[0938] The resulting CDR sequences for the scFvs that bind target G8 are shown in Table 7. Table 7 is organized similarly to Table 5.

[0939] The resulting VH and VL sequences for the scFvs that bind target G10 are shown in Table 8. Table 8 is organized similarly to Table 4.

[0940] The resulting CDR sequences for the scFvs that bind target G10 are shown in Table 9. Table 9 is organized similarly to Table 5.

[0941] Resulting VH and VL sequences for scFvs that bind target G2 are shown in Table 27. Table 27 is organized similarly to Table 4.

[0942] Resulting CDR sequences for scFvs that bind target G2 are shown in Table 28. Table 28 is organized similarly to Table 5.

[0943] Resulting VH and VL sequences for scFvs that bind target G7 are shown in Table 29. Table 29 is organized similarly to Table 4.

[0944] Resulting CDR sequences for scFvs that bind target G7 are shown in Table 30. Table 30 is organized similarly to Table 5.

[0945] A number of clones were formatted into scFv, Fab, and IgG to facilitate biochemical, structural, and functional characterization (see Table 10).

TABLE 10
Hit rate of the screening campaigns. Clones were reformatted into (a)
IgG for biochemical and functional characterization, (b) Fab constructs
for protein crystallography and HDX mass spectrometry, and (c)
scFv constructs for HDX mass spectrometry.

| Group | G5 | G8 | G10 |
|---|---|---|---|
| HLA | B*35:01 | A*02:01 | A*01:01 |
| Peptide | MAGEA6 | FOXE1 | MAGE3/6 |
| Sequence Unique | 81 | 17 | 23 |
| Binders | | | |
| Selective Binders | 18 | 17 | 18 |
| IgG | 18 | 17 | 18 |
| Fab | 4 | 3 | 2 |
| scFv | 8 | 7 | 6 |

[0946] FIG. 10 depicts a flow chart describing the antibody selection process, including criteria and intended application for the scFv, Fab, and IgG formats. Briefly, clones were selected for further characterization based on sequence diversity, binding affinity, selectivity, and CDR3 diversity.

[0947] To assess sequence diversity, dendrograms were produced using clustal software. The predicted 3D structures of the scFv sequences, based on the VH type, were also taken into consideration. Binding affinity as determined by the equilibrium dissociation constant (K_{D}) was measured using an Octet HTX (ForteBio). Selectivity for the specific peptide-HLA complexes was determined with an ELISA titration of the purified scFvs as compared to the minipool of negative control pHLA complexes or streptavidin alone. Cutoff values for the K_{D} and selectivity were determined for each target set based on the range of values obtained for the Fabs within each set. Final clones were selected based on diversity in sequence families and CDR3 sequences.

[0948] The overall number of hits following phage library screening and scFv isolation are listed in Table 10, above.

[0949] Materials and Methods

[0950] HLA Expression and Purification:

[0951] Recombinant proteins were obtained through bacterial expression using established procedures (Garboczi, Hung, & Wiley, 1992). Briefly, the α chain and β2 microglobulin chain of various human leukocyte antigens (HLA) were expressed separately in BL21 competent E. Coli cells (New England Biolabs). Following auto-induction, cells were lysed via sonication in Bugbuster® plus benzonase protein extraction reagent (Novagen). The resulting inclusion bodies were washed and sonicated in wash buffer with and without 0.5% Triton X-100 (50 mM Tris, 100 mM NaCl, 1 mM EDTA). After the final centrifugation, inclusion pellets were dissolved in urea solution (8 M urea, 25 mM MES, 10 mM EDTA, 0.1 mM DTT, pH 6.0). Bradford assay (Biorad) was used to quantify the concentration and the inclusion bodies were stored at −80° C.

[0952] Refold of pHLA and Purification:

[0953] HLA complexes were obtained by refolding of recombinantly produced subunits and a synthetically obtained peptide using established procedures (Garboczi et al., 1992). Briefly, the purified α and β2 microglobulin chains were refolded in refold buffer (100 mM Tris pH 8.0, 400 mM L-Arginine HCl, 2 mM EDTA, 50 mM oxidized glutathione, 5 mM reduced glutathione, protease inhibitor tablet) with either the target peptide or a cleavable ligand. The refold solution was concentrated with a Vivaflow 50 or 50R crossflow cassette (Sartorius Stedim). Three rounds of dialyses in 20 mM Tris pH 8.0 were performed for at least 8 hours each. For the antibody screening and functional assays, the refolded HLA was enzymatically biotinylated using BirA biotin ligase (Avidity). Refolded protein complexes were purified using a HiPrep (16/60 Sephacryl 5200) size exclusion column attached to an AKTA FPLC system. Biotinylation was confirmed in a streptavidin gel-shift assay under non-reducing conditions by incubating the refolded protein with an excess of streptavidin at room temperature for 15 minutes prior to SDS-PAGE. The peptide-HLA complexes were aliquoted and stored at −80° C.

[0954] Peptide Exchange:

[0955] HLA-peptide stability was assessed by conditional ligand peptide exchange and stability ELISA assay. Briefly, conditional ligand-HLA complexes were subjected to ±conditional stimulus in the presence or absence of the counterscreen or test peptides. Exposure to the conditional stimulus cleaves the conditional ligand from the HLA complex, resulting in dissociation of the HLA complex. If the counterscreen or test peptide stably binds the α1/α2 groove of the HLA complex, it “rescues” the HLA complex from disassociation. In short, a mixture of 100 μL of 50 μM of the novel peptide (Genscript) and 0.5 μM recombinantly produced cleavable ligand-loaded HLA in 20 mM Tris HCl and 50 mM NaCl at pH 8 was placed on ice. The mixture was irradiated for 15 min in a UV cross-linker (CL-1000, UVP) equipped with 365-nm UV lamps at ˜10 cm distance.

[0956] MHC Stability Assay:

[0957] The MHC stability ELISA was performed using established procedures. (Chew et al., 2011; Rodenko et al., 2006) A 384-well clear flat bottom polystyrene microplate (Corning) was precoated with 50 μl of streptavidin (Invitrogen) at 2 μg/mL in PBS. Following 2 h of incubation at 37° C., the wells were washed with 0.05% Tween 20 in PBS (four times, 50 μL) wash buffer, treated with 50 μl of blocking buffer (2% BSA in PBS), and incubated for 30 min at room temperature. Subsequently, 25 μl of peptide-exchanged samples that were 300× diluted with 20 mM Tris HCl/50 mM NaCl were added in quadruplicate. The samples were incubated for 15 min at RT, washed with 0.05% Tween wash buffer (4×50 μL), treated for 15 min with 25 μL of HRP-conjugated anti-β2m (1 μg/mL in PBS) at RT, washed with 0.05% Tween wash buffer (4×50 μL), and developed for 10-15 min with 25 μL of ABTS-solution (Invitrogen). The reactions were stopped by the addition of 12.5 μL of stop buffer (0.01% sodium azide in 0.1 M citric acid). Absorbance was subsequently measured at 415 nm using a spectrophotometer (SpectraMax i3x; Molecular Devices).

[0958] Phage Panning:

[0959] For each round of panning, an aliquot of starting phage was set aside for input titering and the remaining phage was depleted three times against Dynabead M-280 streptavidin beads (Life Technologies) followed by a depletion against Streptavidin beads pre-bound with 100 pmoles of pooled negative peptide-HLA complexes. For the first round of panning, 100 pmoles of peptide-HLA complex bound to streptavidin beads was incubated with depleted phage for 2 hours at room temperature with rotation. Three five-minute washes with 0.5% BSA in 1×PBST (PBS+0.05% Tween-20) followed by three five-minute washes with 0.5% BSA in 1×PBS were utilized to remove any unbound phage to the peptide-HLA complex bound beads. To elute the bound phage from the washed beads, 1 mL 0.1M TEA was added and incubated for 10 minutes at room temperature with rotation. The eluted phage was collected from the beads and neutralized with 0.5 mL 1M Tris-HCl pH 7.5. The neutralized phage was then used to infect log growth TG-1 cells (0D600=0.5) and after an hour of infection at 37° C., cells were plated onto 2YT media with 100m/mL carbenicillin and 2% glucose (2YTCG) agar plates for output titer and bacterial growth for subsequent panning rounds. For subsequent rounds of panning, selection antigen concentrations were lowered while washes increased by amount and length of wash times at show in Table 3.

[0960] Input/Output Phage Titer:

[0961] Each round of input titer was serially diluted in 2YT media to 10¹⁰. Log phase TG-1 cells are infected with diluted phage titers (10⁷-10¹⁰) and incubated at 37° C. for 30 minutes without shaking followed by another 30 minutes with gentle shaking. Infected cells are plated onto 2YTCG plates and incubated overnight at 30° C. Individual colonies were counted to determine input titer. Output titers were performed following 1 h infection of eluted phage into TG-1 cells. 1, 0.1, 0.01, and 0.001 μL of infected cells were plated onto 2YTCG platers and incubated overnight at 30° C. Individual colonies were counted to determine output titer.

[0962] Selective Target Binding of Bacterial Periplasmic Extracts:

[0963] For scFv PPE ELISAs, 96-well and/or 384-well streptavidin coated plates (Pierce) were coated with 2 μg/mL peptide-HLA complex in HLA buffer and incubated overnight at 4° C. Plates were washed three times between each step with PBST (PBS+0.05% Tween-20). The antigen coated plates were blocked with 3% BSA in PBS (blocking buffer) for 1 hour at room temperature. After washing, scFv PPEs were added to the plates and incubated at room temperature for 1 hour. Following washing, mouse anti-v5 antibody (Invitrogen) in blocking buffer was added to detect scFv and incubated at room temperature for 1 hour. After washing, HRP-goat anti-mouse antibody (Jackson ImmunoResearch) was added and incubated at room temperature for 1 hour. The plates were then washed three times with PBST and 3 times with PBS before HRP activity was detected with TMB 1-component Microwell Peroxidase Substrate (Seracare) and neutralized with 2N sulfuric acid.

[0964] For negative peptide-HLA complex counterscreening, the scFv PPE ELISAs were performed as described above, except for the coating antigen. Namely, the HLA mini-pools (see Tables 1 and 2) were used that consisted of 2 μg/mL of each of the three negative peptide-HLA complexes pooled and coated onto streptavidin plates for comparison binding to their particular pHLA complex. Alternatively, HLA complete pools consisted of 2 μg/mL of each of all 18 negative peptide-HLA complexes pooled together and coated onto streptavidin plates for comparison binding to their particular pHLA complex.

[0965] Construction and Production of scFv Protein Fragments:

[0966] The expression plasmid was transformed into BL21(DE3) strain and co-expressed with a periplasmid chaperone in a 400 mL E. coli culture. The cell pellet was reconstituted as follows: 10 mL/1 g biomass with (25 mM HEPES, pH7.4, 0.3M NaCl, 10 mM MgCl2, 10% glycerol, 0.75% CHAPS, 1 mM DTT) plus lysozyme, and benzonase and Lake Pharma protease inhibitor cocktail. The cell suspension was incubated on a shaking platform at RT for 30 minutes. Lysates were clarified by centrifugation at 4° C., 13,000×rpm for 15 min. The clarified lysate was loaded onto 5 mL of Ni NTA resin pre-equilibrated in IMAC Buffer A (20 mM Tris-HCl, Ph7.5; 300 mM NaCl/10% Glycerol/1 mM DTT). The resin was washed with 10 column volumes (CVs) of Buffer A (or until a stable baseline was reached), followed by 10 CVs of 8% IMAC Buffer B (20 mM Tris-HCl, Ph7.5; 300 mM NaCl/10% Glycerol/1 mM DTT/250 mM Imidazole). The target protein was eluted in a 20CV gradient to 100% IMAC Buffer B. The column was washed with 5CVs of 100% IMAC B to ensure complete protein removal. Elution fractions were analyzed by SDS-PAGE and Western blot (anti-His) and pooled accordingly. The pool was dialyzed with the final formulation buffer (20 mM Tris-HCl, Ph7.5; 300 mM NaCl/10% glycerol/1 mM DTT), concentrated to a final protein concentration >0.3 mg/mL, aliquoted into 1 mL vials, and flash frozen in liquid nitrogen. Final QC steps included SDS-PAGE and A280 absorbance measurements.

[0967] Construction and Production of Fab Protein Fragments:

[0968] The constructs of selected G5, G8 and G10 Fabs were cloned into a vector optimized for mammalian expression. Each DNA construct was scaled up for transfection and sequences were confirmed. A 100 mL transient production was completed in HEK293 cells (Tuna293™ Process) for each. The proteins were purified by anti-CH1 purification subsequently purified by size exclusion chromatography (SEC) via HiLoad 16/600 Superdex 200. The mobile phase used for SEC-polishing was 20 mM Tris, 50 mM NaCl, pH 7. Final confirmatory CE-SDS analysis was performed.

[0969] Construction and Production of IgG Proteins:

[0970] The expression constructs of the G series antibodies were cloned into a vector optimized for mammalian expression. Each DNA construct was scaled up for transfection and sequences were confirmed. A 10 mL transient production was completed in HEK293 cells (Tuna293™ Process) for each. The proteins were purified by Protein A purification and final CE-SDS analysis was performed.

### Example 4: Affinity of Fab Clones for their Respective HLA-PEPTIDE Targets

[0971] Fab-formatted antibodies allow for accurate assessment of monomeric binding to their respective HLA-PEPTIDE targets, while avoiding confounding effects of bivalent interactions with the IgG antibody format. Binding affinity was assessed by bio-layer interferometry (BLI) using an Octet Qke (ForteBio). Briefly, biotinylated pHLA complexes in kinetics buffer were loaded onto streptavidin sensors for 300 seconds, at concentrations which gave the optimal nm shift response (approximately 0.6 nm) for each Fab at the highest concentration used. The ligand-loaded tips were subsequently equilibrated in the kinetics buffer for 120 seconds. The ligand-loaded biosensors were then dipped for 200 seconds in the Fab solution titrated into 2-fold dilutions. Starting Fab concentrations ranged from 100 nM to 2 μM, iteratively optimized based on the K_{D} values of the Fab. The dissociation step in the kinetics buffer was measured for 200 seconds. Data were analyzed using the ForteBio data analysis software using a 1:1 binding model.

[0972] Results for HLA-PEPTIDE targets HLA-B*35:01_EVDPIGHVY, HLA-A*02:01_AIFPGAVPAA, and HLA-A*01:01_ASSLPTTMNY are shown in Table 11, below. The Fab-formatted antibodies bind to their respective HLA-PEPTIDE targets with high affinity.

TABLE 11
Optimized Octet BLI affinity measurements of Fabs binding to their target
peptide-HLA complex

| Target | Fab clone | KD (M) | Kon (1/Ms) | Kdis (1/s) | Full R\hat{ }2 |
|---|---|---|---|---|---|
| G5 | G5(7A05) | 1.19E−07 | 4.10E+05 | 4.87E−02 | 0.997 |
| G5 | G5(7B03) | 2.54E−07 | 4.42E+05 | 9.09E−02 | 0.993 |
| G5 | G5(7E07) | 2.82E−08 | 9.02E+05 | 2.48E−02 | 0.991 |
| G5 | G5(7F06) | 3.37E−08 | 9.15E+05 | 3.06E−02 | 0.995 |
| G8 | G8(2C10) | 1.77E−08 | 7.50E+04 | 1.30E−03 | 0.997 |
| G8 | G8(1C11) | 1.78E−07 | 1.90E+05 | 3.38E−02 | 0.997 |
| G8 | G8(2E04) | 2.86E−07 | 5.45E+05 | 7.89E−02 | 0.842 |
| G10 | G10(1B07) | 3.75E−08 | 1.65E+05 | 6.15E−03 | 0.997 |
| G10 | G10(4E07) | 4.28E−07 | 4.77E+05 | 1.11E−01 | 0.990 |

[0973] FIGS. 11A, 11B, and 11C depicts BLI results for Fab clone G5(7A05) to HLA-PEPTIDE target B*35:01-EVDPIGHVY (11A), Fab clones G8(2C10) and G8(1C11) to HLA-PEPTIDE target A*02:01-AIFPGAVPAA (11B, 2C10 on left and 1C11 on right), and Fab clone G10(1B07) to HLA-PEPTIDE target A*01:01-ASSLPTTMNY (11C), respectively.

[0974] FIGS. 66A and 66 B show BLI results for G2 target Fab clone G2(1H11) and for G7 target Fab clone G7(2E09), respectively.

[0975] Results are shown in the Table below.

TABLE 31
Optimized Octet BLI affinity measurements of Fabs
binding to their target peptide-HLA complex

| Target | Fab clone | KD (M) | Kon (1/Ms) | Kdis (1/s) | Full R\hat{ }2 |
|---|---|---|---|---|---|
| G2 | G2(1B06) | 4.44E−08 | 1.06E+06 | 3.23E−02 | 0.991 |
| G2 | G2(2A03) | 1.09E−07 | 3.32E+05 | 3.60E−02 | 0.998 |
| G2 | G2(1B12) | 2.28E−08 | 3.66E+05 | 7.28E−03 | 0.980 |
| G2 | G2(2A11) | 2.81E−08 | 6.33E+05 | 1.72E−02 | 0.992 |
| G2 | G2(1H01) | 1.55E−08 | 9.52E+05 | 1.48E−02 | 0.984 |
| G2 | G2(1H11) | 4.99E−08 | 5.81E+05 | 2.80E−02 | 0.994 |
| G7 | G7(2C02) | 5.31E−07 | 1.04E+05 | 5.43E−02 | 0.986 |
| G7 | G7(1A03) | 5.32E−07 | 1.97E+05 | 9.94E−02 | 0.988 |
| G7 | G7(2E09) | 1.18E−08 | 1.85E+05 | 2.12E−03 | 0.992 |

### Example 5: Positional Scanning of G2, G5, G7, G8, and G10 Restricted Peptide Sequences

[0976] Positional scanning of the G2, G5, G7, G8, and G10 restricted peptides was carried out to determine the amino acid residues which act as contact points for selected Fab clones or critical residues that impact, directly or indirectly, the interaction of the HLA-PEPTIDE target with the Fab.

[0977] FIG. 12 depicts a general experimental design for the positional scanning experiments. Positional scanning libraries of variant G2, G5, G7, G8, and G10 restricted peptides were generated with amino acid substitutions at a single position in the restricted peptide sequence, scanning across all positions. The amino acid substitutions at a given position were either alanine (conservative substitution), arginine (positively charged), or aspartate (negatively charged). Peptide-HLA complexes comprising the positional scanning library members and the HLA subtype allele were generated as described in Example 3. Stability of the resulting complexes was determined using conditional ligand peptide exchange and stability ELISA as described in Example 3. Such stability analysis may identify residues on the restricted peptide which are important for binding and stabilizing the HLA molecule. Binding affinity of the selected Fab clone to the variant peptide-HLA complexes was assessed by BLI as described in Example 4. Positional variants that result in stable HLA complex formation and weakened Fab binding may identify residues that are likely involved, directly or indirectly, in determining the interaction of the peptide-HLA complex with the Fab clone.

[0978] FIG. 13A depicts stability results for the G5 positional variant-HLAs, indicating that the majority of peptide mutations does not impact binding of those peptides to the relevant pHLA.

[0979] FIG. 13B depicts binding affinity of Fab clone G5(7A05) to the G5 positional variant-HLAs, indicating positions P2-P8 of the restricted peptide as likely involved, directly or indirectly, in determining the interaction of the peptide-HLA complex with the Fab clone.

[0980] FIG. 14A depicts stability results for the G8 positional variant-HLAs, indicating that positions P2, P7 and P10 were not amenable to substitution with the Arg- or Asp-residue and therefore are likely to be important for the peptide to bind the HLA protein.

[0981] FIG. 14B depicts binding affinity of Fab clone G8(2C10) to the G8 positional variant-HLAs, indicating positions P1-P5 of the restricted peptide as likely involved, directly or indirectly, in determining the interaction of the peptide-HLA complex with the Fab clone.

[0982] FIG. 44 depicts binding affinity of Fab clone G8(1C11) to the G8 positional variant-HLAs, indicating positions P3-P6 of the restricted peptide as likely involved, directly or indirectly, in determining the interaction of the peptide-HLA complex with the Fab clone.

[0983] FIG. 15A depicts stability results for the G10 positional variant-HLAs, indicating that positions 2, 5, 8, and 10 were not amenable to amino acid substitution and therefore are likely to be important for the peptide to bind the HLA protein.

[0984] FIG. 15B depicts binding affinity of Fab clone G10(1B07) to the G10 positional variant-HLAs, indicating positions P4, P6, and P7 of the restricted peptide as likely involved, directly or indirectly, in determining the interaction of the peptide-HLA complex with the Fab clone.

[0985] A map of the amino acid substitutions for the positional scanning experiments for G2 and G7 restricted peptides is shown in FIG. 67. Asterisks denote lack of amino acid substitution.

[0986] FIG. 68A depicts stability results for the G2 positional variant-HLAs, indicating that positions 2, 3, and 9 were not amenable to amino acid substitutions and therefore are likely to be important for the peptide to bind the HLA protein.

[0987] FIG. 68B depicts binding affinity of Fab clone G2(1H11) to the G2 positional variant-HLAs, indicating positions 3-8 of the restricted peptide as likely involved, directly or indirectly, in determining the interaction of the peptide-HLA complex with the Fab clone.

[0988] FIG. 69A depicts stability results for the G7 positional variant-HLAs, indicating that positions 1, 2, 6, and 9 were not amenable to amino acid substitutions and therefore are likely to be important for the peptide to bind the HLA protein.

[0989] FIG. 69B depicts binding affinity of Fab clone G7(2E09) to the G7 positional variant-HLAs, indicating positions 1-5 of the restricted peptide as likely involved, directly or indirectly, in determining the interaction of the peptide-HLA complex with the Fab clone.

### Example 6: Antibodies Bind Cells Presenting HLA-PEPTIDE Target Antigens

[0990] To verify that the identified TCR-like antibodies bind their pHLA target G2, G5, G7, G8 and G10 in their natural context, e.g., on the surface of antigen-presenting cells, selected clones were reformatted to IgG and used in binding experiments with K562 cells expressing the cognate HLA-PEPTIDE target. Briefly, cells were transduced with either HLA-B*35:01 for the G5 target peptide, HLA-A*02:01 for the G7 and G8 target peptides, or HLA-A*01:01 for the G2 and G10 target peptides. The cells were then exogenously pulsed with target or negative control peptide as specified in Tables 1 and 2, using established methods to generate the relevant pHLA complexes on the cell surface.

[0991] Materials and Methods

[0992] Retroviral Production

[0993] The Phoenix-AMPHO cells (ATCC®, CRL-3213™) were cultured in DMEM (Corning™, 17-205-CV) supplemented with 10% FBS (Seradigm, 97068-091) and Glutamax (Gibco™, 35050079). K-562 cells (ATCC®, CRL-243™) were cultured in IMDM (Gibco™, 31980097) supplemented with 10% FBS. Lipofectamine LTX PLUS (Fisher Scientific, 15338100) contains a Lipofectamine reagent and a PLUS reagent. Opti-MEM (Gibco™, 31985062) was purchased from Fisher Scientific.

[0994] Phoenix cells were plated at 5×10⁵ cells/well in a 6 well plate and incubated overnight at 37° C. For the transfection, 10 μg plasmid, 10 μL, Plus reagent and 100 μL Opti-MEM were incubated at room temperature for 15 minutes. Simultaneously, 8 μL Lipofectamine was incubated with 92 μL Opti-MEM at room temperature for 15 minutes. These two reactions were combined and incubated again for 15 minutes at room temperature after which 800 μL Opti-MEM was added. The culture media was aspirated from the Phoenix cells and they were washed with 5 mL pre-warmed Opti-MEM. The Opti-MEM was aspirated from the cells and the lipofectamine mixture was added. The cells were incubated for 3 hours at 37° C. and 3 mL complete culture medium was added. The plate was then incubated overnight at 37° C. The media was replaced with Phoenix culture medium and the plate incubated an additional 2 days at 37° C.

[0995] The media was collected and filtered through a 0.45 μm filter into a clean 6 well dish. 20 μL Plus reagent was added to each virus suspension and incubated at room temperature for 15 minutes followed by the addition of 8 μL/well of Lipofectamine and another 15 min room temperature incubation.

[0996] K562 Cell Line Generation (Retroviral Transduction with HLA)

[0997] K562 cells were counted and resuspended to 5E6 cells/mL and 100 μL added to each virus suspension. The 6 well plate was centrifuged at 700 g for 30 minutes and then incubated at 37° C. for 5-6 hours. The cells and virus suspension were then transferred to a T25 flask and 7 mL K562 culture medium was added. The cells were then incubated for three days. The transduced K562 cells were then cultured in medium supplemented with 0.6 μg/mL Puromycin (Invivogen, ant-pr-1) and selection monitored by flow cytometry.

[0998] Flow Cytometry Methods:

[0999] HLA-transduced K562 cells were pulsed the night before with 50 μM of peptide (Genscript) in IDMEM containing 1% FBS in 6 well plates and incubated under standard tissue culture conditions. Cells were harvested, washed in PBS, and stained with eBioscience Fixable Viability Dye eFluor 450 for 15 minutes at room temperature. Following another wash in PBS+1-2% FBS, cells were resuspended with IgGs at varying concentrations. Cells were incubated with antibodies for 1 hour at 4° C. After another wash, PE-conjugated goat anti-human IgG secondary antibody (Jackson ImmunoResearch) was added at 1:100 to 1:200 for 30 minutes at 4° C. After washing in PBS+1-2% FBS, cells were resuspended in PBS+1-2% FBS and analyzed by flow cytometry. Flow cytometric analysis was performed on the Attune NxT Flow Cytometer (ThermoFisher) using the Attune NxT Software. Data was analyzed using FlowJo.

[1000] Results

[1001] Four representative examples of antibody binding to either G5-, G8- or G10-presenting K562 cells, as detected by flow cytometry, are shown in FIGS. 16A, 16B, and 16C. Antibody binding was observed in a dose-dependent manner that was selective for the relevant target peptides.

[1002] In another flow cytometry experiment, HLA-transduced K562 cells were pulsed with 50 μM of target or control peptides as listed in Table 1 for G5 and in Table 2 for G8 and G10, and pHLA-specific antibodies were detected by flow cytometry. HLA-transduced K562 cells were pulsed with 50 μM of target or negative control peptides and antibody binding histograms were plotted for G5(7A05) at 20 μg/mL, G8(2C10) at 30 μg/mL, G10(1B07) at 30 μg/mL, and G8(1C11) at 30 μg/mL. Histograms are depicted in FIG. 17 and FIG. 45.

[1003] Results are shown in FIGS. 70 and 71 for the G2 and G7 transduced cells. Both G2(1H11) and G7(2E09) selectively bound HLA-transduced K562 cells pulsed with the target peptide, as compared to HLA-transduced cells pulsed with the negative control peptides.

### Example 7: Antibodies Bind to Tumor Cell Lines that Express the Target Gene and HLA Subtype

[1004] Tumor cell lines were chosen based on expression of the HLA subtype and target gene of interest, as assessed by a publicly available database (TRON http://celllines.tron-mainz.de). The selection of the tumor cell line for cell binding assays is shown in Table 12 below.

TABLE 12
selection of tumor cell lines for cell binding assay

| Cell line | Target expression | HLA type |
|---|---|---|
| LN229 (G5) | MAGEA6 (137.6 RPKM) | B*35:01; B*35:01 (26.53 RPKM) |
| BV173 (G8) | FOXE1 (18.1 RPKM) | A*30:01; A*02:01 (142.25 RPKM) |
| Colo829 (G10) | MAGEA3 (119.3 RPKM) | A*01:01; A*0101 (143.7 RPKM) |
| | MAGEA6 (215.4 RPKM) | |

[1005] The LN229, BV173, and Colo829 tumor cell lines were propagated under standard tissue culture conditions. Flow cytometry was performed as described in Example 6. Cells were incubated with 30 μg/mL or 0 μg/mL antibody followed by PE conjugated anti-human secondary IgG.

[1006] Results are depicted in FIG. 18. Panel A shows a histogram plot for G5(7A05) binding to glioblastoma line LN229. Panel B shows a histogram plot for G8(2C10) binding to leukemia line BV173. Panel C shows a histogram plot for G10(1B07) binding to CRC line Colo829.

### Example 8: Identification of Antibodies or Antigen-Binding Fragments Thereof that Bind HLA-PEPTIDE Complexes

[1007] Identification of Single-Chain Variable Fragment (scFv) Antibodies Targeting MHC Class I Molecules Presenting Tumor Antigens

[1008] Potent and selective single chain antibodies targeting human class I MHC molecules presenting tumor antigens of interest are identified using phage display. Phage libraries are prepared for screening by removing non-specific class I MHC binders. Multiple soluble human peptide-MHC (pMHC) molecules different from the target pMHCs are utilized to pan pre-existing phage libraries to remove scFvs that non-specifically bind class I MHC. To identify scFvs that selectively bind pMHCs of interest, target pMHCs are utilized for at least 1-3 rounds of panning with the prepared phage library. scFv hits identified in the screen are then evaluated against a panel of irrelevant pMHCs to identify scFv leads that bind selectively to the target pMHCs. Lead scFvs are characterized to determine target binding specificity and affinity. Lead scFvs that demonstrate potent and selective binding are converted to full-length IgG monoclonal antibody (mAb) constructs. In addition, the lead scFvs are incorporated into bi-specific mAb constructs and chimeric antigen receptor (CAR) constructs that can be used to generate CAR T-cells. Full-length bi-specifics or scFV-based bi-specifics can be constructed.

[1009] Demonstrate Targeting of Human Tumor Cells In Vitro

[1010] Immunohistochemistry techniques are utilized to demonstrate specific binding of lead antibodies to human tumor cells or cell lines expressing target pMHC molecules. T-cell lines transfected with CAR-T constructs are incubated with human tumor cells to demonstrate killing of tumor cells in vitro. Alternatively, tumor cells expressing the target are incubated with bi-specific constructs (encoding the ABP and an effector domain) and PBMCs or T cells.

[1011] In Vivo Proof-of-Concept

[1012] Lead antibody or CAR-T constructs are evaluated in vivo to demonstrate directed tumor killing in humanized mouse tumor models. Lead antibody or CAR-T constructs are evaluated in xenograft tumor models engrafted with human tumors and PBMCs. Anti-tumor activity is measured and compared to control constructs to demonstrate target-specific tumor killing.

[1013] Identification of Monoclonal Antibodies (mAbs) that Target MHC Class I Molecules Presenting Tumor Antigens Using Rabbit B Cell Cloning Technologies

[1014] Potent and selective mAbs targeting human class I MHC molecules presenting tumor antigens of interest are identified. Soluble human pMHC molecules presenting human tumor antigens are utilized for multiple mouse or rabbit immunizations followed by screening of B cells derived from the immunized animals to identify B cells that express mAbs that bind to target class I MHC molecules. Sequences encoding the mAbs identified from the mouse or rabbit screens will be cloned from the isolated B cells. The recovered mAbs are then evaluated against a panel of irrelevant pMHCs to identify lead mAbs that bind selectively to the target pMHCs. Lead mAbs will be fully characterized to determine target binding affinity and selectivity. Lead mAbs that demonstrate potent and selective binding are humanized to generate full-length human IgG monoclonal antibody (mAb) constructs. In addition, the lead mAbs are incorporated into bi-specific mAb constructs and chimeric antigen receptor (CAR) constructs that can be used to generate CAR T-cells. Full-length bi-specifics or scFV-based bi-specifics can be constructed.

[1015] Demonstrate Targeting of Human Tumor Cells In Vitro

[1016] Immunohistochemistry techniques are utilized to demonstrate specific binding of lead antibodies to human tumor cells expressing target pMHC molecules. T-cell lines transfected with CAR-T constructs are incubated with human tumor cells to demonstrate killing of tumor cells in vitro. Alternatively, tumor cells expressing the target are incubated with bi-specific constructs (encoding the ABP and an effector domain) and PBMCs or T cells.

[1017] In Vivo Proof-of-Concept

[1018] Lead antibody or CAR-T constructs are evaluated in vivo to demonstrate directed tumor killing in humanized mouse tumor models. Lead antibody or CAR-T constructs are evaluated in xenograft tumor models engrafted with human PBMCs. Anti-tumor activity is measured and compared to control constructs to demonstrate target-dependent tumor killing.

[1019] Potent and selective ABPs that selectively target human class I MHC molecules presenting tumor antigens will be identified using phage display or B cell cloning technologies. The utility of the ABPs will be demonstrated by showing that the ABPs mediated tumor cell killing in vitro and in vivo when incorporated into antibody or CAR-T cell constructs.

### Example 9: Identification of Monoclonal Antibodies (mAbs) that Target MHC Class I Molecules Presenting Tumor Antigens Using Rabbit B Cell Cloning Technologies

[1020] Potent and selective mAbs targeting human class I MHC molecules presenting tumor antigens of interest are identified. Soluble human pMHC molecules presenting human tumor antigens are utilized for multiple mouse or rabbit immunizations followed by screening of B cells derived from the immunized animals to identify B cells that express mAbs that bind to target class I MHC molecules. Sequences encoding the mAbs identified from the mouse or rabbit screens will be cloned from the isolated B cells. The recovered mAbs are then evaluated against a panel of irrelevant pMHCs to identify lead mAbs that bind selectively to the target pMHCs. Lead mAbs will be fully characterized to determine target binding affinity and selectivity. Lead mAbs that demonstrate potent and selective binding are humanized to generate full-length human IgG monoclonal antibody (mAb) constructs. In addition, the lead mAbs are incorporated into bi-specific mAb constructs and chimeric antigen receptor (CAR) constructs that can be used to generate CAR T-cells. Full-length bi-specifics or scFV-based bi-specifics can be constructed.

[1021] Demonstrate Targeting of Human Tumor Cells In Vitro

[1022] Immunohistochemistry techniques are utilized to demonstrate specific binding of lead antibodies to human tumor cells expressing target pMHC molecules. T-cell lines transfected with CAR-T constructs are incubated with human tumor cells to demonstrate killing of tumor cells in vitro. Alternatively, tumor cells expressing the target are incubated with bi-specific constructs (encoding the ABP and an effector domain) and PBMCs or T cells.

[1023] In Vivo Proof-of-Concept

[1024] Lead antibody or CAR-T constructs are evaluated in vivo to demonstrate directed tumor killing in humanized mouse tumor models. Lead antibody or CAR-T constructs are evaluated in xenograft tumor models engrafted with human PBMCs. Anti-tumor activity is measured and compared to control constructs to demonstrate target-dependent tumor killing.

[1025] Potent and selective ABPs that selectively target human class I MHC molecules presenting tumor antigens will be identified using phage display or B cell cloning technologies. The utility of the ABPs will be demonstrated by showing that the ABPs mediated tumor cell killing in vitro and in vivo when incorporated into antibody or CAR-T cell constructs.

### Example 10: Assessment of scFv-pHLA or Fab-pHLA Structures by Hydrogen/Deuterium Exchange and Mass Spectrometry

[1026] Experimental Procedures

[1027] Hydrogen/Deuterium Exchange.

[1028] 20 μM of HLA-peptide was incubated with a ˜3-fold molar excess of scFv or Fab formatted proteins for 20 min at room temperature (20-25° C.) to generate complexes for the exchange experiments. For the Apo (unbound) control, the HLA-peptide was incubated with an equal volume of 50 mM NaCl, 20 mM Tris pH 8.0. All subsequent reaction steps were performed at 4° C. by an automated HDX PAL system controlled by Chronos 4.8.0 software (Leap Technologies, Morrisville, N.C.). 5 μl of protein complexes were diluted 10-fold into H20 or 50 mM NaCl, 20 mM Tris pH 8.0 (for the 0 min. control time-point) or the same buffer made with D20 for 30s prior to quenching in 0.8 M guanidine hydrochloride, 0.4% acetic acid (v/v), and 75 mM tris(2-carboxyethyl) phosphine for 3 min. ˜50 pmol of quenched protein complexes were transferred onto an immobilized Protein XIII/Pepsin column (NovaBioAssays, Woburn, Mass.) for integrated on-line protein digestion.

[1029] Liquid Chromatography, Mass Spectrometry, and HDX Analysis

[1030] Chromatographic separation of peptides was carried out using an UltiMate 3000 Basic Manual UHPLC System (ThermoFisher Scientific, Waltham, Mass.), which contained a trap C18 column (5 μM particle size and 2.1 mm diameter) and an analytical C18 column (1.9 μM particle size and 1 mm diameter). Samples were desalted with 10% acetonitrile, 0.05% trifluoroacetic acid or 10% acetonitrile, 0.5% formic acid at a 40 μl/min flow rate for 2 min and peptides were eluted at a 40 μl/min flow rate with an increasing concentration gradient of 95% acetonitrile with trifluoro acetic acid or formic acid. Mass spectrometry was performed with an Orbitrap Fusion Lumos mass spectrometer (ThermoFisher, Waltham, Mass.) with the ESI source set at a positive ion voltage of 3500-3800 V. Prior to performing hydrogen-deuterium exchange experiments, peptide fragments of each HLA-peptide complex were analyzed by data-dependent LC/MS/MS and the data searched using PEAKS Studio (Bioinformatics Solutions Inc., Waterloo, ON, Canada) with a peptide precursor mass tolerance of 20 ppm and fragment ion mass tolerance of 0.2 Da. The HLA, β2M, and target peptide sequences were searched, and false detection rates identified using a decoy-database strategy. Peptides from the hydrogen-deuterium experiments were detected by LC/MS and analyzed by HDX Workbench (Omics Informatics, Honolulu, Hi.) with a retention time window size of 0.22 min and a 7.0 ppm error tolerance. High-resolution HD exchange data for selected peptides were obtained by fragmenting the peptides by Electron Transfer Dissociation (ETD) with a reaction time of 200 ms (G2) or 100 ms (G10), using fluoranthene as the reagent anion. Peptide fragments were analyzed by HDExaminer (Sierra Analytics) with a retention time window size of 18s and a peptide m/z tolerance of 2 Da. Heat maps of deuterium uptake differences were generated by Microsoft Excel and mapped on to relevant protein crystallographic structures using Pymol (Schrödinger, Cambridge, Mass.).

[1031] Results

[1032] FIG. 19A shows an exemplary heatmap of the HLA portion of the G8 HLA-PEPTIDE complex when incubated with scFv clone G8(1H08), visualized in its entirety using a consolidated perturbation view.

[1033] An example of the data from scFv G8(1H08) plotted on the crystal structure described in Example 11 is shown in FIG. 19B.

[1034] FIG. 43A shows an exemplary heatmap of the HLA portion of the G8 HLA-PEPTIDE complex when incubated with scFv clone G8(1C11), visualized in its entirety using a consolidated perturbation view.

[1035] An example of the data from scFv G8(1C11) plotted on the crystal structure described in Example 11 is shown in FIG. 43B.

[1036] FIG. 21A shows an exemplary heatmap of the HLA portion of the G10 HLA-PEPTIDE complex when incubated with scFv clone G10(2G11), visualized in its entirety using a consolidated perturbation view.

[1037] An example of the data from scFv G10(2G11) plotted on a crystal structure PDB5bs0 is shown in FIG. 21B. The crystal structure, depicting a restricted peptide in the HLA binding cleft formed by the α1 and α2 helices, can be found at URL https://www.rcsb.org/structure/5bs0 (Raman et al).

[1038] An example of data from a second round of HDX studies, from scFv-G10-P5A08, plotted on a crystal structure 5bs0.pdb is shown in FIG. 107. The crystal structure, depicting a restricted peptide in the HLA binding cleft formed by the α1 and α2 helices, can be found at URL https://www.rcsb.org/structure/5bs0 (Raman et al).

[1039] To better compare the data across the ABPs tested for a given HLA-PEPTIDE target, data for each ABP was exported, and a heat map was generated in Excel. FIG. 20A shows resulting heat maps across the HLA α1 helix for all ABPs tested for HLA-PEPTIDE target G8 (HLA-A*02:01_AIFPGAVPAA). FIG. 20B shows resulting heat maps across the HLA α2 helix for all ABPs tested for HLA-PEPTIDE target G8 (HLA-A*02:01_AIFPGAVPAA. FIG. 20C shows resulting heat maps across the restricted peptide AIFPGAVPAA for all ABPs tested. The heat maps indicate positions 45-60 of the HLA protein (in the α1 helix) of HLA-PEPTIDE target G8 (HLA-A*02:01_AIFPGAVPAA) as likely involved, directly or indirectly, in determining the interaction between the HLA-PEPTIDE target and G8-specific antibody-based ABPs.

[1040] FIG. 22A shows resulting heat maps from a first round of HDX experiments across the HLA α1 helix for all ABPs tested for HLA-PEPTIDE target G10 (HLA-A*01:01 ASSLPTTMNY). FIG. 22B shows resulting heat maps from a first round of HDX experiments across the HLA α2 helix for all ABPs tested for HLA-PEPTIDE target G10 (HLA-A*01:01_ASSLPTTMNY). FIG. 22C shows resulting heat maps from a first round of HDX experiments across the restricted peptide ASSLPTTMNY for all ABPs tested. FIG. 92 shows resulting heat maps from a second round of HDX experiments across the HLA α1 helix, the HLA α2 helix, and the restricted peptide ASSLPTTMNY for all ABPs tested. Taken together, the heat maps indicate positions 49-56 and/or 59-66 of the HLA protein (in the α1 helix), as well as positions 136-147 and 157-160 of the α2 helix of the HLA protein, as likely involved, directly or indirectly, in determining the interaction between the HLA-PEPTIDE target and G10-specific antibody-based ABPs. In particular, all of the ABPs tested decreased solvent accessibility of positions 52-54 of the HLA α1 helix.

[1041] An example of the data from scFv G2(1G07) plotted on a crystal structure PDB 5bs0 is shown in FIG. 72. The crystal structure can be found at URL https://www.rcsb.org/structure/5bs0 (Raman et al). Areas not covered with MS data are shown in black and those with the greatest decrease in D exchange (indicating a binding site for the ABP) is circled. For clarity, only the binding groove and helices are shown.

[1042] An exemplary heatmap for scFv clone G2(1G07) visualized in its entirety using a consolidated perturbation view is shown in FIG. 73.

[1043] An example of the data from scFv G2(2C11)plotted on a crystal structure PDB 5bs0 is shown in FIG. 89.

[1044] FIG. 90 shows high resolution HDX data plotted on a crystal structure PDB 5bs0. Data for G2 bound to four different scFvs were obtained by fragmenting peptides by Electron Transfer Dissociation (ETD) as described in the Experimental Procedures.

[1045] To better compare the data across the ABPs tested for a given HLA-PEPTIDE target, data for each ABP was exported, and a heat map was generated in Excel. Resulting heat maps are shown in FIG. 74 showing a heat map across the α1 helix (top) and across the α2 helix (bottom). FIG. 75 shows a heat map for all ABPs tested for A*01:01_NTDNNLAVY, across restricted peptide residues 1-9. Heat maps from a second round of HDX data are shown in FIG. 91. Taken together, the heat maps elucidated regions of reduced solvent accessibility in the HLA alpha subunits that bind and display the target peptide. Many of these regions were shared across multiple A*01:01_NTDNNLAVY specific ABPs. The two regions which most commonly exhibited decreased solvent accessibility include A70-Y85 of the alpha 1 helix, and/or positions A140-Y160 of the alpha 2 helix, with all ABPs shielding R157-Y160 of the helix. Taken together, the heat maps also indicate HLA-PEPTIDE/ABP interactions that decrease solvent accessibility across positions 3-9 of the restricted peptide. The effect was increasingly pronounced towards the C-terminal direction. This pattern was consistent for 14 of the 15 antibodies examined, with positions 6-9 invariably being shielded by presence of the ABPs. Furthermore, the heat maps indicate that HLA residues 157-160 (RRVY) are important contact points of the A*01:01_NTDNNLAVY HLA-PEPTIDE target complex for binding to its specific ABP. All clone entries in the HDX heat maps are scFv formats unless otherwise noted.

[1046] FIG. 108 shows an example of high resolution data from scFv clone G5-P1C12 plotted on crystal structure of HLA-B*35:01 (5xos.pdb; https://www.rcsb.org/structure/5XOS).

[1047] FIG. 109 shows resulting color heat maps from high resolution HDX experiments across the HLA α1 helix, the HLA α2 helix, and restricted peptide EVDPIGHVY for all ABPs tested for HLA-PEPTIDE target G5 (HLA-B*35:01_EVDPIGHVY). FIG. 110 shows a numerical representation of the color heat map of FIG. 109. These heat maps indicate positions 50, 54, 55, 57, 61, 62, 74, 81, 82 and 85 of the HLA protein (in the α1 helix) as likely involved, directly or indirectly, in determining the interaction between the HLA-PEPTIDE target and G5-specific antibody-based ABPs. These heat maps indicate positions 147 and 148 of the HLA protein (in the α2 helix) as likely involved, directly or indirectly, in determining the interaction between the HLA-PEPTIDE target and G5-specific antibody-based ABPs.

[1048] An example of high-resolution HDX data from scFv G8-P1H08 plotted on a crystal structure of Fab clone G8-P1C11 complexed with HLA-PEPTIDE target A*02:01_AIFPGAVPAA (“G8”), is shown in FIG. 111.

[1049] FIG. 112 shows resulting color heat maps from high resolution HDX experiments across the HLA α1 helix, the HLA α2 helix, and restricted peptide AIFPGAVPAA for all ABPs tested for HLA-PEPTIDE target G8 (HLA-A*02:01_AIFPGAVPAA). FIG. 113 shows a numerical representation of the color heat maps of FIG. 112. The heat maps from the second round of HDX data indicate positions 46, 49, 55, 61, 74, 76, 77, 78, 81 and 84 of the HLA protein (in the α1 helix) as likely involved, directly or indirectly, in determining the interaction between the HLA-PEPTIDE target and G8-specific antibody-based ABPs. The heat maps from the second round of HDX data indicate positions 137, 138, 145, 147, 152-157 of the HLA protein (in the α2 helix) as likely involved, directly or indirectly, in determining the interaction between the HLA-PEPTIDE target and G8-specific antibody-based ABPs. The heat maps from the second round of HDX data indicate positions 5 and 6 of the restricted peptide AIFPGAVPAA as likely involved, directly or indirectly, in determining the interaction between the HLA-PEPTIDE target and G8-specific antibody-based ABPs.

### Example 11: Assessment of Fab-pHLA Structures by Crystallography

[1050] Materials and Methods

[1051] Complex Purification and Crystal Screening

[1052] Fab fragments corresponding to, e.g., HLA-PEPTIDE target G8 (A*02:01_AIFPGAVPAA) were concentrated to reach 5 mg/mL (100 μM) before addition of its corresponding HLA-MHC (1:1 molar ratio) and incubated for 30 minutes at 4° C. The mixture was then injected on size exclusion chromatography column (S200 16/60) equilibrated in 1×PBS buffer for complex purification. Fractions containing both Fab and HLA and with an elution volume coherent with a complex of ˜94 kDa were pooled and concentrated to 10-12 mg/mL (1AU=1 mg/mL) Each purified complex was screened for crystallization conditions using commercial screens: PEGIon (Hampton research), JCSG+(Molecular Dimensions) and JBS Screen 3 and 4 (Jena Biosciences). The choice of the kits was driven by the characteristic of known crystal conditions of HLA-Fab complexes that are mainly based on the use of PEG3350 or PEG4000 as precipitant. 3 to 4 weeks after screen, diffraction suitable crystals appeared for HLA-Fab combinations in several crystallization conditions (Table 18). The protein nature of the crystals was checked by UV. Crystals were transferred into a cryoprotectant solution (crystallization solution supplemented with 25% Glycerol) and flash frozen in liquid nitrogen.

[1053] Data Collection and Processing

[1054] Diffraction data was collected on the Proxima 2A beamline at SOLEIL synchrotron (Gif sur Yvette, France). Data processing and scaling was performed using XDS (1). Molecular replacement was performed using MolRep and Arp/Warp from the CCP4 suite (2) using PDB 5E61 for HLA (100% sequence identity) and 5AZE (90% sequence identity with VH) and 5115 (97% sequence identity with VL) for Fab as entry models. Refinement was performed using Buster TNT (GlobalPhasing, Inc) and manual model modifications in Coot (CCP4 suite).

[1055] Complex Purification

[1056] Combinations produced a good separation between the individual protein peak and the formed complex peak (FIG. 26A). Increasing incubation time to 16 hours (overnight) did not change the ratio of complex formed (˜50% of the protein is present in complex and 50% as free proteins). Peak analysis by SDS PAGE under reducing conditions showed the presence of both Fab chains (30 kDa), HLA heavy chain (˜35 kDa), and HLA light chain (BLM, <10 kDa) in the pooled fractions (FIG. 26B).

[1057] Crystallization and Data Collection

[1058] Complex pooled fractions were concentrated and screened. After 3-4 weeks crystals appeared for some of the HLA-Fab combinations. A summary of the crystallography conditions for the A*02:01_AIFPGAVPAA-G8(1C11) Fab complex and resulting crystal formation is shown in Table 18.

TABLE 18
Crystallography conditions

| Commercial | | Crystals Obtained |
|---|---|---|
| Kit | Experimental Conditions | (Y/N) |
| JBS | 20% PEG4000, 200 mM Magnesium sulfate, | No |
| | 10% glycerol (GOL) | |
| JBS | 20% PEG4000, 200 mM Magnesium sulfate, | Yes |
| | 5% 2-Propanol | |
| JBS | 20 % w/v Polyethylene glycol 4,000 10% w/v | No |
| | 2-Propanol, 100 mM HEPES; pH 7.5 | |
| JCSG | 20% (w/v) PEG 3350 200 mM Ammonium | No |
| | chloride | |
| JCSG | 30% (w/v) PEG 2000 MME 100 mM Potassium | No |
| | thiocyanate | |
| JCSG | 25% (w/v) PEG 3350 100 mM Bis-Tris/ | Yes |
| | Hydrochloric acid pH 5.5 | (integrated into P1 |
| | | Space group) |
| JCSG | 30% v/v Jeffamine ® M-600, 0.1M HEPES pH | Yes |
| | 7.0 | |
| JCSG | 25% (w/v) PEG 3350 100 mM Bis-Tris/ | No |
| | Hydrochloric acid pH 5.5, 200 mM Lithium | |
| | sulfate | |
| PEGion | 0.2M Ammonium tartrate dibasic pH 7.0, 20% | Yes |
| | w/v Polyethylene glycol 3,350 | (integrated into P1 |
| | | Space group) |
| PEGion | 2% v/v Tacsimate ™ pH 6.0 0.1M BIS-TRIS | No |
| | pH 6.5 20% PEG3350 | |
| PEGion | 1% w/v Tryptone 0.001M Sodium azide, | No |
| | 0.05M HEPES sodium pH 7.0, 20% w/v | |
| | Polyethylene glycol 3,350 | |

[1059] Out of the tested conditions, four yielded crystals. Two yielded crystals which diffracted well (1.7 to 2.0 Å resolution) and were integrated into a P1 space group (Table 18). Structure resolution was possible by combining molecular replacement (MolRep) and software automated model building using Arp/Warp.

[1060] An exemplary crystal of a complex comprising Fab clone G8(1C11) and HLA-PEPTIDE target A*02:01_AIFPGAVPAA (“G8”) is shown in FIG. 27. This crystal was grown using the commercial screen JCSG, using 25% (w/v) PEG 3350 100 mM Bis-Tris/Hydrochloric acid pH 5.5. This crystal was used to generate the structural data below.

[1061] Structural Analysis

[1062] The overall structure of a complex formed by binding of Fab clone G8(1C11) to HLA-PEPTIDE target A*02:01_AIFPGAVPAA (“G8”) is shown in FIG. 28. The individual proteins are represented as surfaces. The interface area between the HLA and the VH and VL is 747 Å² and 285 Å², respectively.

[1063] During refinement electron density region corresponding to the peptide was clearly visible and allowed peptide side chain unambiguous positioning (FIG. 29) with the provided 10 residue peptide sequence AIFPGAVPAA. All areas relevant to interaction interfaces are refined; however, some refinement is still required in antibody constant regions.

[1064] Coding of monomers in the complex, which is referred to in the following data, is provided in Table 19 below.

TABLE 19
monomer coding used in crystal analysis

| Monomer | Monomer Code (ID) |
|---|---|
| HLA heavy chain (α1, α2, α3) | A |
| HLA β2 microglobulin (light chain) | B |
| Restricted peptide | I |
| Fab heavy chain (VH-CH1) | C |
| Fab light chain (VL-CL) | D |

[1065] HLA-Peptide Interaction

[1066] The restricted peptide AIFPGAVPAA is mainly buried in the HLA A*02:01 binding pocket with the residues P4G5A6 protruding towards the Fab. The interaction surface between the peptide and the HLA is 926 Å² and represents 76% of the total peptide solvent accessible surface (1215 Å²). The binding of the peptide to the HLA involves 9 hydrogen bonds and van der Waals interactions (FIG. 30) and yields a binding energy of −16.4 kcal/mol.

[1067] A list of hydrogen interactions is shown in Table 20, below.

TABLE 20
Hydrogen bond interactions between restricted peptide and HLA.

| | Distance | |
|---|---|---|
| Peptide | (Angstroms) | HLA |
| I:ALA 1[N] | 2.72 | A:TYR 172[OH] |
| I:ALA 1[N] | 2.86 | A:TYR 8[OH] |
| I:ILE 2[N] | 2.81 | A:GLU 64[OE1] |
| I:ILE 2[N] | 3.71 | A:TYR 8[OH] |
| I:PHE 3[N] | 2.94 | A:TYR 100[OH] |
| I:ALA 1[O] | 2.67 | A:TYR 160[OH] |
| I:PRO 8[O] | 2.93 | A:ARG 98[NH2] |
| I:PRO 8[O] | 2.89 | A:ARG 98[NH1] |
| I:ALA 9[O] | 2.71 | A:TRP 148[NE1] |
| I:ALA 1[N] | 2.72 | A:TYR 172[OH] |

[1068] A complete interface summary of the HLA and restricted peptide is shown in FIG. 35.

[1069] A complete list of the interacting residues from the restricted peptide and HLA is shown in FIG. 36.

[1070] Fab-Restricted Peptide Interactions

[1071] As most of the peptide is buried in the binding pocket of the HLA, only part of it available for interactions with the Fab chains. This is confirmed by the observation that 76% of the solvent accessible area of the peptide is occupied by its interaction with the HLA. Interaction surface between the peptide and the heavy chain and the light chain of the Fab is 114.3 and 113.9 Å² respectively. This corresponds to 18% of the total peptide solvent accessible area. PISA analysis showed that only two hydrogen bonds are involved in the interaction between the Fab and the peptide: hydroxyl group of Tyr32 from the light chain interacts with the backbone carbonyl of Gly5 of the peptide and the Tyr100A backbone amide interacting with the backbone carbonyl group of Pro4 of the peptide (See Table 21 for a list of the hydrogen interactions, below).

TABLE 21
Fab/restricted peptide H bond interactions

| Peptide | Distance (A) | Fab |
|---|---|---|
| I:PRO 4[O] | 3.0 | C:TYR 100A[OH] |
| | | (VH) |
| I:GLY 5[O] | 3.7 | D:TRY 32[OH] (VL) |

[1072] The recognition mode of the Fab towards the restricted peptide is mainly through hydrophobic interactions and hydrogen bonds involving solvent molecules (FIGS. 31 and 32). The binding energy of the interaction between the Fab and restricted peptide is −2.0 and −1.9 kcal/mol with the VH and VL chains respectively.

[1073] A complete interface summary of the Fab VH chain and restricted peptide, and a complete list of the interacting residues from the Fab VH chain and restricted peptide, is shown in FIG. 37.

[1074] A complete interface summary of the Fab VL chain and restricted peptide, and a complete list of the interacting residues from the Fab VL chain and restricted peptide, is shown in FIG. 38.

[1075] Fab-HLA Interactions

[1076] The Fab and the HLA moieties interacts extensively as shown by interface area between the HLA and the Fab with a total of 1032 Å². The interaction between the HLA and the VH chain is composed of hydrophobic interactions, 6H bonds and 3 salt bridges (FIG. 33, interaction between VH and HLA; and FIG. 34, interaction between VL and HLA). This interaction represents the major interaction are with 747 Å² (72% of the total contact area).

[1077] A table of the hydrogen bond contacts between the VH chain of the Fab and the HLA protein is shown below.

TABLE 22
hydrogen bond contacts
between VH and HLA.

| Fab VII | Distance | HLA |
|---|---|---|
| C:SER 31[OG] | 2.71 | A:THR 164[OG1] |
| C:TYR 100A[OH] | 2.55 | A:THR 164[OG1] |
| C:SER 31[N] | 3.17 | A:GLU 167[OE1] |
| C:SER 30[N] | 2.86 | A:GLU 167[OE2] |
| C:TYR 32[OH] | 2.80 | A:LYS 67[NZ] |
| C:TYR 98[O] | 2.94 | A:ARG 66[NH2] |
| C:ASP 100[OD1] | 2.88 | A:ARG 66[NH1] |

[1078] A table of the salt bridge contacts between the VH chain of the Fab and the HLA protein is shown below.

TABLE 23
salt bridge contacts between
VH and HLA.

| Fab VII | Distance | HLA |
|---|---|---|
| C:ASP 100[OD1] | 2.88 | A:ARG 66[NH1] |
| C:ASP 100[OD1] | 3.39 | A:ARG 66[NH2] |
| C:ASP 100[OD2] | 3.40 | A:ARG 66[NH1] |

[1079] A complete interface summary of the Fab VH chain and HLA protein is shown in FIG. 39.

[1080] A complete list of the interacting residues from the Fab VH chain and HLA protein is shown in FIG. 40.

[1081] A table of the hydrogen bond contacts between the VL chain of the Fab and the HLA protein is shown in Table 24 below.

TABLE 24
hydrogen bonds between VL and HLA.

| Fab VL | Distance | HLA |
|---|---|---|
| D:LE 94[N] | 3.56 | A:ALA 151[O] |
| D:SER 30[OG] | 2.84 | A:GLN 73[NE2] |
| D:LE 94[O] | 3.00 | A:HIS 152[ND1] |

[1082] A complete interface summary of the Fab VL chain and HLA protein is shown in FIG. 41.

[1083] A complete list of the interacting residues from the Fab VL chain and HLA protein is shown in FIG. 42.

### Example 12: Identification of Predicted HLA-PEPTIDE Complexes (Table A1)

[1084] We identified cancer specific HLA-peptide targets using three computational steps: First, we identified genes that are not generally expressed in most normal tissues using data available through the Genotype-Tissue Expression (GTEx) Project [1]. We then identified which of those genes are aberrantly expressed in cancer samples using data from The Cancer Genome Atlas (TCGA) Research Network: http://cancergenome.nih.gov/. In these genes, we identified which peptides are likely to be presented as cell surface antigens by MHC Class I proteins using a deep learning model trained on HLA presented peptides sequenced by MS/MS, as described in international patent application no. PCT/US2016/067159, herein incorporated by reference, in its entirety, for all purposes.

[1085] To identify genes that are not usually expressed in normal tissues, we obtained aggregated gene expression data from the Genotype-Tissue Expression (GTEx) Project (version V6p). This dataset comprised 8,555 post-mortem samples from over 50 tissue types. Expression was measured using RNA-Seq and computationally processed according to the GTEx standard pipeline (https://www.gtexportal.org/home/documentationPage). For the purposes of this analysis, genes were considered not expressed in normal tissues if they were found not to be expressed in any tissues in GTEx or were only expressed in one or more of testis, minor salivary gland, and the endocervix (i.e., immune privileged or non-essential tissues). We also restricted our search to only include protein coding genes. Because GTEx and TCGA use different annotations of the human genome in their computational analyses, we excluded genes which we could not map between the two datasets using standard techniques such as ENCODE mappings.

[1086] We sought to define criteria to excluded genes that were expressed in normal tissue that was strict to ensure tumor specificity, but would not exclude non-zero measurements arising from sporadic, low level transcription or potential artifacts such as read misalignment. Therefore, we designated a gene to be not normally expressed in a non-immune privileged or essential tissue if its median expression across GTEx samples was less than 0.5 RPKM (Reads Per Kilobase of transcript per Million mapped reads), and it was never expressed with greater than 10 RPKM, and it was expressed at 5 RPKM in no more than two samples across all essential tissue samples. To exclude genes which were potentially expressed but could not be measured by RNA-Seq using the GTEX analysis pipeline, we also excluded genes which were measured at 0 RPKM in all samples. These criteria left us with a set of protein coding genes that did not appear to be expressed in most normal tissues.

[1087] We next sought to identify which of these genes are aberrantly expressed in tumors. We examined 11,093 samples available from TCGA (Data Release 6.0). We considered a gene expressed if it was observed at expression of at least 5 FPKM (Fragments Per Kilobase of transcript per Million mapped reads) in at least 5 samples. Because one fragment usually consists of two mapped reads, 5 FPKM equals approximately 10 RPKM.

[1088] While the GTEx data spans a broad range of tissue types, it does not include all cell types that are present in the human body. We therefore further examined the list for the gene's biological function category using the DAVID v 6.8 [2] and used this analysis, along with literature review, to filter the gene list further. We removed genes likely to be expressed in immune cells (e.g., interferon family genes), eye-related genes (e.g., retina in the FANTOM5 dataset http://www.proteinatlas.org), genes expressed in the mouth and nose (e.g. olfactory genes and taste receptors), and genes related to the circadian cycle. We also excluded genes that are part of large gene families, including histone genes, because their expression is difficult to accurately assess with RNA Sequencing due to sequence homology.

[1089] We then examined the distribution of the expression of the remaining genes across the TCGA samples. When we examined the known Cancer Testis Antigens (CTAs), e.g., the MAGE family of genes, we observed that the expression of these genes in log space was generally characterized by a bimodal distribution across samples in the TCGA. This distribution included a left mode around a lower expression value and a right mode (or thick tail) at a higher expression level. This expression pattern is consistent with a biological model in which some minimal expression is detected at baseline in all samples and higher expression of the gene is observed in a subset of tumors experiencing epigenetic dysregulation. We reviewed the distribution of expression of each gene across TCGA samples and discarded those where we observed only a unimodal distribution with no significant right-hand tail, as this distribution may (as a non-limiting example) more likely characterize genes that have a low baseline of expression in normal tissues.

[1090] This left us with a remaining gene list of >630 genes that was highly enriched for genes involved in testis-specific biological processes and development. Because many of these genes produce different isoforms, these genes mapped to >1,200 proteins using the UNIPROT mapping service. In addition to the genes that met our strict computational criteria, we added several genes that have previously been identified in the scientific literature as cancer testes antigens.

[1091] To identify the peptides that are likely to be presented as cell surface antigens by MEW Class I proteins, we used a sliding window to parse each of these proteins into its constituent 8-11 amino acid sequences. We processed these peptides and their flanking sequences with the HLA peptide presentation deep learning model to calculate the likelihood of presentation of each peptide at expression levels between five TPM, which approximately corresponds to one transcript per cell [3], to 200 TPM (i.e., a high level of expression). We considered a peptide a putative HLA-PEPTIDE target if its probability of presentation calculated by our model was greater than 0.1 in 10 or more patients in the TCGA dataset with expression 5 TPM or greater.

[1092] The results are shown in Table A1. From this example, there are >1,800 HLA-PEPTIDE targets across ˜400 genes and 25 analyzed HLA alleles. Table A1 is included in an ASCII text file named “GSO-027WO_Informal_Sequence_Tables.txt”, which is hereby incorporated by reference in its entirety, which is hereby incorporated by reference in its entirety. For clarity, each HLA-PEPTIDE was assigned a target number in Table A1. For example, HLA-PEPTIDE target 1 is HLA-A*01:01_EVDPIGHLY, HLA-PEPTIDE target 2 is HLA-A*29:02_FVQENYLEY, and so forth.

[1093] Collectively, this list of HLA-PEPTIDE targets is expected to be a significant contribution to the state of knowledge of cancer specific targets. In summary, the example provides a large set of tumor-specific HLA-PEPTIDEs that can be pursued as candidate targets for ABP research and development.

### REFERENCES

[1094] 1. Consortium, G. T., The Genotype-Tissue Expression (GTEx) project. Nat Genet, 2013. 45(6): p. 580-5.
[1095] 2. Huang da, W., B. T. Sherman, and R. A. Lempicki, Systematic and integrative analysis of large gene lists using DAVID bioinformatics resources. Nat Protoc, 2009. 4(1): p. 44-57.
[1096] 3. Shapiro, E., T. Biezuner, and S. Linnarsson, Single-cell sequencing-based technologies will revolutionize whole-organism science. Nat Rev Genet, 2013. 14(9): p. 618-30.

### Example 13: Initial Validation of Predicted HLA-PEPTIDE Complexes

[1097] As an initial assessment to validate the predicted HLA-PEPTIDE targets arising from the above described approach, we evaluated public databases and selected literature for reports of these targets as having been previously identified by various assay techniques, including HLA binding affinity measurements, HLA peptide mass-spectrometry, as well as measures of T cell responses. Two comprehensive databases containing assay result annotations for HLA-PEPTIDE pairs were used: IEDB (Vita et al., 2015) and T antigen (Olsen et al., 2017). We determined that 19 (15 unique across genes) of the computationally predicted targets were previously reported in the databases, many in genes (e.g., cancer testis antigens) that have long been the subject of study in cancer immunology. See Table B.

TABLE B

| | | Found in | | |
|---|---|---|---|---|
| Protein | | IEDB or | IEDB | Tantigen |
| Name | HLA-PEPTIDE | Tantigen | Status | Status |
| MAGEA3 | HLA-A*01:01_EVDPIGHLY | TRUE | Found | Found |
| MAGEA3 | HLA-A*29:02_FVQENYLEY | TRUE | Found | Not found |
| MAGEA3 | HLA-A*29:02_LVHFLLLKY | TRUE | Found | Not found |
| MAGEA3 | HLA-B*44:03_MEVDPIGHLY | TRUE | Not found | Found |
| MAGEA6 | HLA-A*29:02_FVQENYLEY | TRUE | Found | Not found |
| MAGEA6 | HLA-A*29:02_LVHFLLLKY | TRUE | Found | Not found |
| MAGEA4 | HLA-A*01:01_EVDPASNTY | TRUE | Not found | Found |
| MAGEA1 | HLA-A*02:01_KVLEYVIKV | TRUE | Found | Found |
| MAGEAC | HLA-A*29:02_LVHFLLLKY | TRUE | Found | Not found |
| MAGEAC | HLA-A*29:02_LVQENYLEY | TRUE | Found | Not found |
| SSX1 | HLA-C*04:01_AFDDIATYF | TRUE | Found | Not found |
| MAGEA4 | HLA-A*29:02_WVQENYLEY | TRUE | Found | Not found |
| MAGB2 | HLA-A*02:01_GVYDGEEHSV | TRUE | Found | Not found |
| MAGEA1 | HLA-A*03:01_SLFRAVITK | TRUE | Found | Found |
| MAGEA4 | HLA-A*11:0l_ALAETSYVK | TRUE | Found | Not found |
| SAGE1 | HLA-A*24:02_LYATVIHDI | TRUE | Not found | Found |
| PASD1 | HLA-A*02:01_QLLDGFMITL | TRUE | Found | Not found |
| MAGEA8 | HLA-A*29:02_WVQENYLEY | TRUE | Found | Not found |
| MAGEAC | HLA-A*29:02_STLPTTINY | TRUE | Found | Not found |

[1098] Additional limited literature review was carried out for peptides not found in the above public databases. The following peptides were identified, as shown in Table C:

TABLE C

| | | HLA/peptide known | HLA/peptide known status in |
|---|---|---|---|
| | Protein | status IEDB or | literature (preliminary) if not in |
| HLA allele/peptide complex | Name | Tantigen 2017 | IEDB or Tantigen |
| HLA-A*01:01_NTDNNLAVY | KKLC1 | Not known | WO 2017/089756 A1 |
| | | | (Stevanović et al., 2017) |
| HLA-B*35:01_YPAPLESLDY | PRA10 | Not known | WO2008118017 A2 |
| HLA-A*11:01_ATLENLLSH | PRAM4 | Not known | WO2008118017 A2 |
| HLA-B*51:01_DALLAQKV | PRA12 | Not known | WO2008118017 A2 |
| HLA-B*44:03_SESDLKHLSW | PRA12 | Not known | WO2008118017 A2 |
| HLA-A*11:01_ATLENLLSH | PRAM9 | Not known | WO2008118017 A2 |
| HLA-A*02:07_TLDEYLTYL | PRAM9 | Not known | WO2008118017 A2 |

[1099] One notable example from Table C was KKLC1 HLA-A*01:01_NTDNNLAVY. Kita-kyushu lung cancer antigen-1 (KK-LC-1; CT83) is a cancer testis antigen (CTA) that has been shown to be widely expressed in many different cancer types. It was originally discovered based on a cloned CTL to KK-LC-1 peptide 76-84-RQKRILVNL (Fukuyama et al., 2006). More recently Stevanović et al., 2017 revealed another peptide from KK-LC-1 recognized by a CTL in a patient with cervical cancer, the predicted peptide KK-LC-1 52-60 NTDNNLAVY. The corresponding TCR for this CTL is now listed on the NIH website https://www.ott.nih.gov/technology/e-153-2016/ and the peptide is listed in WO 2017/089756 A1, herein incorporated by reference, in its entirety, for all purposes.

[1100] This example highlights the expected value of predicted HLA-PEPTIDE targets in Table A: Although no information on which CTA HLA-PEPTIDE targets were previously known was incorporated in the prediction, the analysis yielded many targets that were described in the literature, indicating that many of the novel targets can likewise be validated experimentally and ultimately serve as targets for one or more ABPs.

### REFERENCES

[1101] Fukuyama, T., Hanagiri, T., Takenoyama, M., Ichiki, Y., Mizukami, M., So, T., Sugaya, M., So, T., Sugio, K., and Yasumoto, K. (2006). Identification of a new cancer/germline gene, KK-LC-1, encoding an antigen recognized by autologous CTL induced on human lung adenocarcinoma. Cancer Res. 66, 4922-4928.
[1102] Olsen, L. R., Tongchusak, S., Lin, H., Reinherz, E. L., Brusic, V, and Zhang, G. L. (2017). TANTIGEN: a comprehensive database of tumor T cell antigens. Cancer Immunol. Immunother. CII 66, 731-735.
[1103] Stevanović, S., Pasetto, A., Helman, S. R., Gartner, J. J., Prickett, T. D., Howie, B., Robins, H. S., Robbins, P. F., Klebanoff, C. A., Rosenberg, S. A., et al. (2017). Landscape of immunogenic tumor antigens in successful immunotherapy of virally induced epithelial cancer. Science 356, 200-205.
[1104] Vita, R., Overton, J. A., Greenbaum, J. A., Ponomarenko, J., Clark, J. D., Cantrell, J. R., Wheeler, D. K., Gabbard, J. L., Hix, D., Sette, A., et al. (2015). The immune epitope database (IEDB) 3.0. Nucleic Acids Res. 43, D405-412.

### Example 14: Identification of Predicted HLA-PEPTIDE Complexes (Table A2)

[1105] Next, HLA-peptide targets from proteins of seven genes were identified: AFP, KKLC-1, MAGE-A4, MAGE-A10, MART-1, NY-ESO-1, and WT1.

[1106] To identify peptides that are likely to be presented as cell surface antigens by MHC Class I proteins, a sliding window was used to parse each of these proteins into its constituent 8-11 amino acid sequences. These peptides and their flanking sequences were then processed with the HLA peptide presentation deep learning model (see PCT/US2016/067159 and Example 12 above) to calculate the likelihood of presentation of each peptide at an expression level of 100 TPM (high expression) for each of 64 Class I HLA types. Potential modeling artifacts were removed that could give stronger scores to certain HLAs due to training data biases by quantile normalizing model scores for each HLA so that each HLA present scores from the same distribution. In the normalization, the seven target genes as well as 50 randomly selected genes were included to control for HLA allele sequence preferences. A gene was considered likely to be presented if the model normalized score was higher than 0.00075, which was chosen based on the presentation scores of peptides known to be presented in the literature.

[1107] The results are shown in Table A2. Target numbers were assigned to each HLA-PEPTIDE target as described in Example 12. Table A2 is included in an ASCII text file named “GSO-027WO_Informal_Sequence_Tables.txt”, which is hereby incorporated by reference in its entirety.

### Example 15: Identification of Antibodies or Antigen-Binding Fragments Thereof that Bind HLA-PEPTIDE Complexes

[1108] Overview

[1109] The following exemplification demonstrates that antibodies (Abs) can be identified that recognize tumor-specific HLA-restricted peptides. The overall epitope that is recognized by such Abs generally comprises a composite surface of both the peptide as well as the HLA protein presenting that particular peptide. Abs that recognize HLA complexes in a peptide-specific manner are often referred to as T cell receptor (TCR)-like Abs or TCR-mimetic Abs. The HLA-PEPTIDE target antigens that were selected for antibody discovery are HLA-A*01:01_NTDNNLAVY (Target 33 in Table A1 designated as “G2”) and HLA-A*02:01_LLASSILCA (Target 6427 in Table A2, designated as “G7”). Cell surface presentation of these HLA-PEPTIDE antigens was confirmed by mass spectrometry analysis of HLA complexes obtained from tumor samples, as described in Example 2.

[1110] Generation of HLA-PEPTIDE Target Complexes and Counterscreen Peptide-HLA Complexes, and Stability Analysis

[1111] The HLA-PEPTIDE targets G2 and G7, as well as counterscreen negative control peptide-HLAs, were produced recombinantly using conditional ligands for HLA molecules using established methods. In all, 18 counterscreen HLA-peptides were generated for each of the G2 and G7 targets.

[1112] Overall Design of Phage Library Screening

[1113] The highly diverse SuperHuman 2.0 synthetic naïve scFv library from Distributed Bio Inc (7.6e10 total diversity on ultra-stable and diverse VH/VL scaffolds) was used for phage display. The phage library was initially depleted with 18 pooled negative pHLA complexes (the “complete pool”) followed by three to four rounds of bead-based phage panning with the target pHLA complex using established protocols to identify scFv binders to HLA-PEPTIDE targets G2 and G7, respectively. The phage titer was determined at every round of panning to establish removal of non-binding phage. Phage ELISA results are shown in FIGS. 65A and 65B. There was an enrichment of bound phage in later rounds of panning for each of the G2 and G7 targets. The output phage supernatant was also tested for target binding by ELISA.

[1114] The design of target screen 1 for the G2 target is shown in FIG. 59. Similarly, the design of target screen 2 for the G7 target is shown in FIG. 62. Briefly, for each target, three “minipool” counterscreen peptides were selected for their ability to bind the same HLA allele as the target and also to have significantly different ABP-facing features such as charge, bulk, aromatic, or hydrophobic residues. See FIG. 60A for G2 and FIG. 64A for G7. In addition, additional counterscreen peptide-HLA complexes, featuring distinct restricted peptide sequences and different HLA alleles were generated. The 15 additional counterscreen HLA-peptides plus the three “minipool” HLA-peptides formed a “complete pool” of 18 total counterscreen HLA-peptide complexes.

[1115] Generation of Peptide-HLA Complexes

[1116] α-, and β2 microglobulin chain of various human leukocyte antigens (HLA) were expressed separately in BL21 competent E. Coli cells (New England Biolabs) using established procedures (Garboczi, Hung, & Wiley, 1992). Following auto-induction, cells were lysed via sonication in Bugbuster® plus benzonase protein extraction reagent (Novagen). The resulting inclusion bodies were washed and sonicated in wash buffer with and without 0.5% Triton X-100 (50 mM Tris, 100 mM NaCl, 1 mM EDTA). After the final centrifugation, inclusion pellets were dissolved in urea solution (8 M urea, 25 mM MES, 10 mM EDTA, 0.1 mM DTT, pH 6.0). Bradford assay (Biorad) was used to quantify the concentration and the inclusion bodies were stored at −80° C.

[1117] HLA complexes were obtained by refolding of recombinantly produced subunits and a synthetically obtained peptide using established procedures. (Garboczi et al., 1992). Briefly, the purified a and (32 microglobulin chains were refolded in refold buffer (100 mM Tris pH 8.0, 400 mM L-Arginine HCl, 2 mM EDTA, 50 mM oxidized glutathione, 5 mM reduced glutathione, protease inhibitor tablet) with the restricted peptide of choice. In some experiments, the restricted peptide of choice was a conditional ligand peptide, which is cleavable upon exposure to a conditional stimulus. In some experiments, the restricted peptide of choice was the G2 or G7 target peptide, or counterscreen peptide. The refold solution was concentrated with a Vivaflow 50 or 50R crossflow cassette (Sartorius Stedim). Three rounds of dialyses in 20 mM Tris pH 8.0 were performed for at least 8 hours each. For the antibody screening and functional assays, the refolded HLA was enzymatically biotinylated using BirA biotin ligase (Avidity). Refolded protein complexes were purified using a HiPrep (16/60 Sephacryl 5200) size exclusion column attached to an Akta FPLC system. Biotinylation was confirmed in a streptavidin gel-shift assay under non-reducing conditions by incubating the refolded protein with an excess of streptavidin at room temperature for 15 minutes prior to SDS-PAGE. The resulting peptide-HLA complexes were aliquoted and stored at −80° C.

[1118] Stability Analysis of the Peptide-HLA Complexes

[1119] HLA-peptide stability was assessed by conditional ligand peptide exchange and stability ELISA assay. Briefly, conditional ligand-HLA complexes were subjected to ±conditional stimulus in the presence or absence of the counterscreen or test peptides. Exposure to the conditional stimulus cleaves the conditional ligand from the HLA complex, resulting in dissociation of the HLA complex. If the counterscreen or test peptide stably binds the α1/α2 groove of the HLA complex, it “rescues” the HLA complex from disassociation.

[1120] The HLA stability ELISA was performed using established procedures. (Chew et al., 2011; Rodenko et al., 2006) A 384-well clear flat bottom polystyrene microplate (Corning) was precoated with 50 μl of streptavidin (Invitrogen) at 2 μg mL⁻¹ in PBS. Following 2 h of incubation at 37° C., the wells were washed with 0.05% Tween 20 in PBS (four times, 50 μL) wash buffer, treated with 50 μl of blocking buffer (2% BSA in PBS), and incubated 30 min at room temperature. Subsequently, 25 μl of peptide-exchanged samples that were 300× diluted with 20 mM Tris HCl/50 mM NaCl were added in quadruplicate. The samples were incubated for 15 min at RT, washed with 0.05% Tween wash buffer (4×50 μL), treated for 15 min with 25 μL of HRP-conjugated anti-β2m (1 μg mL⁻¹ in PBS) at RT, washed with 0.05% Tween wash buffer (4×50 μL), and developed for 10-15 min with 25 μL of ABTS-solution (Invitrogen), and the reactions were stopped by the addition of 12.5 μL of stop buffer (0.01% sodium azide in 0.1 M citric acid). Absorbance was subsequently measured at 415 nm using a spectrophotometer (SpectraMax i3x; Molecular Devices).

[1121] Results for the G2 counterscreen “minipool” and G2 target are shown in FIG. 60B. All three counterscreen peptides and the G2 peptide rescued the HLA complex from dissociation.

[1122] Results for the additional G2 “complete” pool counterscreen peptides are shown in FIG. 61, demonstrating that they also form stable HLA-peptide complexes.

[1123] Results for the G7 counterscreen “minipool” and G7 target are shown in FIG. 64B. All three counterscreen peptides and the G7 peptide rescued the HLA complex from dissociation.

[1124] Results for the additional G7 “complete” pool counterscreen peptides are shown in FIG. 63, demonstrating that they also form stable HLA-peptide complexes.

[1125] Phage Library Screening

[1126] Phage library screening was carried out according to the overall screening design described above. Three to four rounds of bead-based panning were performed to identify scFv binders to each peptide-HLA complex. For each round of panning, an aliquot of starting phage was set aside for input titering and the remaining phage was depleted three times against Dynabead M-280 streptavidin beads (Life Technologies) followed by a depletion against Streptavidin beads pre-bound with 100 pmoles of pooled negative peptide-HLA complexes. For the first round of panning, 100 pmoles of peptide-HLA complex bound to streptavidin beads was incubated with depleted phage for 2 hours at room temperature with rotation. Three five-minute washes with 0.5% BSA in 1×PBST (PBS+0.05% Tween-20) followed by three five-minute washes with 0.5% BSA in 1×PBS were utilized to remove any unbound phage to the peptide-HLA complex bound beads. To elute the bound phage from the washed beads, 1 ml 0.1M TEA was added and incubated for 10 minutes at room temperature with rotation. The eluted phage was collected from the beads and neutralized with 0.5 ml 1M Tris-HCl pH 7.5. The neutralized phage was then used to infect log growth TG-1 cells (OD₆₀₀=0.5) and after an hour of infection at 37° C., cells were plated onto 2YT media with 100 μg/ml carbenicillin and 2% glucose (2YTCG) agar plates for output titer and bacterial growth for subsequent panning rounds. For subsequent rounds of panning, selection antigen concentrations were lowered while washes increased by amount and length of wash times at show in Table 25.

TABLE 25
Phage library screening strategy

| Round | Antigen concentration | Washes |
|---|---|---|
| R1 | 100 pmol | 3X PBST + 3X PBS (5 min washes) |
| R2 | 25 pmol | 5 PBST (2x 30 sec, 3x 5 min) + 5 PBS (2x 30 sec, 3x 5 |
| | | min) |
| R3 | 10 pmol | 8 PBST (4x 30 sec, 4x 5 min) + 8 PBS (4x 30 sec, 4x 5 |
| | | min) |
| R4 | 5 pmol, 10 pmol | 30 min PBST + 30 min PBS |

[1127] Individual scFvs were cloned from phage and sequenced by DNA Sanger sequencing (“Sequence Unique Binders”). The individual scFvs were also expressed in E. coli and periplasmic extracts (PPE) from E. coli containing the individual crude scFvs were subjected to scFv ELISA

[1128] scFv Periplasmic Extract (PPE) ELISA

[1129] The individual scFv cloned from phage obtained in the final round of panning, and expressed in E. coli, was subjected to scFv PPE ELISA as follows.

[1130] 96-well and/or 384-well streptavidin coated plates (Pierce) were coated with 2 ug/ml peptide-HLA complex in HLA buffer and incubated overnight at 4° C. Plates were washed three times between each step with PBST (PBS+0.05%). The antigen coated plates were blocked with 3% BSA in PBS (blocking buffer) for 1 hour at room temperature. After washing, scFv PPEs were added to the plates and incubated at room temperature for 1 hour. Following washing, mouse anti-v5 antibody (Invitrogen) in blocking buffer was added to detect scFv and incubated at room temperature for 1 hour. After washing, HRP-goat anti-mouse antibody (Jackson ImmunoResearch) was added and incubated at room temperature for 1 hour. The plates were then washed three times with PBST and 3 times with PBS before HRP activity was detected with TMB 1-component Microwell Peroxidase Substrate (Seracare) and neutralized with 2N sulfuric acid.

[1131] For negative peptide-HLA complex counter-screening, scFv PPE ELISAs were performed as described above, except for the coating antigen. HLA mini-pools consisted of 2 ug/ml of each of the three negative peptide-HLA complexes pooled together and coated onto streptavidin plates for comparison binding to their particular peptide-HLA complex. HLA big pools consisted of 2 ug/ml of each of all 18 negative peptide-HLA complexes pooled together and coated onto streptavidin plates for comparison binding to their particular peptide-HLA complex.

[1132] Those scFvs that showed selectivity for target pHLA compared to negative control pHLA by scFv-ELISA as crude PPE, were separately expressed and purified. The purified scFvs were titratated by scFv ELISA for confirmation of binding only target pHLA compared to negative control pHLA (“Selective Binders”).

[1133] Clones were formatted into IgG, Fab, or scFv for further biochemical and functional analysis. ScFv clones selected for Fab production to be used for crystallization with their corresponding pHLA complexes were selected based on several parameters: sequence diversity, binding affinity, selectivity, and CDR3 diversity. The clustal software was used to produce a dendrogram and assess the sequence diversity of the Fab clones. The canonical 3D structures of the scFv sequences, based on the VH type, were also considered when possible. Binding affinity, as determined by the equilibrium dissociation constant (KD), was measured using an Octet HTX (ForteBio). Selectivity for the specific peptide-HLA complexes was determined with an ELISA titration of the purified scFvs and compared to negative peptides or streptavidin alone. Cutoff values for the KD and selectivity were determined for each target set based on the range of values obtained for the Fabs within each set. Final clones were then selected to obtain the highest diversity in sequence families and CDR3.

TABLE 26
shows the hit rate for the screening campaign described above.
hit rate for screening campaigns

| Group | G2 | G7 |
|---|---|---|
| Gene target | CT83 | CT83 |
| HLA | A*01:01 | A*02:01 |
| Restricted peptide | NTDNNLAVY | LLASSILCA |
| # Sequence Unique | 74 | 8 |
| Binders | | |
| # Selective Binders | 27 | 6 |
| # selected for IgG | 20 | 8 |
| # selected for Fab | 6 | 3 |
| # selected for scFv | 20 | 7 |

[1134] Table 27 shows the VH and VL sequences of the G2 scFv Selective Binders, selective for HLA-PEPTIDE Target HLA-A*01:01_NTDNNLAVY

[1135] Table 28 shows the CDR sequences for the G2 Selective Binders, selective for HLA-PEPTIDE Target HLA-A*01:01_NTDNNLAVY. CDRs were determined according to the Kabat numbering system.

[1136] Table 29 shows the VH and VL sequences of the G7 scFv Selective Binders, selective for HLA-PEPTIDE Target HLA-A*02:01_LLASSILCA.

[1137] Table 30 shows the CDR sequences for the G7 Selective Binders, selective for HLA-PEPTIDE Target HLA-A*02:01_LLASSILCA. CDRs were determined according to the Kabat numbering system.

### Example 16: In Vivo Proof-of-Concept

[1138] Lead antibody or CAR-T constructs are evaluated in vivo to demonstrate directed tumor killing in humanized mouse tumor models. Lead antibody or CAR-T constructs are evaluated in xenograft tumor models engrafted with human tumors and PBMCs. Anti-tumor activity is measured and compared to control constructs to demonstrate target-specific tumor killing.

### Example 17: Generation of Bispecific Antibodies that Specifically Bind an HLA-PEPTIDE Target and CD3

[1139] Antigen binding domains specific for various combinations of distinct targets were formatted into six bispecific construct designs (also referred to herein as formats). See FIG. 76. For clarity, for designs #2-#6, the antigen binding domains are attached, directly or indirectly, to an Fc region. Designs #3, #4, and #5 optionally comprise knob-hole or other Fc heterodimerization modification(s). Designs #2 and #6 optionally comprise WT IgG1 Fc sequences without knob-hole modification(s). In some embodiments, Target 1 is the HLA-PEPTIDE target and Target 2 is a cell surface molecule present on a T cell or NK cell. In some embodiments, target 2 is CD3. The antigen binding domain specific for CD3 can comprise CDRs or variable regions from any anti-CD3 antibody or antigen binding fragment thereof. In some embodiments, target 2 is CD16. In some embodiments, target 1 is an HLA-PEPTIDE target listed in Table A, A1, or A2. In particular embodiments, target one is A*01:01_NTDNNLAVY, A*02:01_LLASSILCA, B*35:01_EVDPIGHVY, A*02:01_AIFPGAVPAA, or A*01:01_ASSLPTTMNY. In more particular embodiments, the antigen binding domain for target 1 (the HLA-PEPTIDE target) comprises CDR sequences from any one of the scFvs specific for A*01:01_NTDNNLAVY, A*02:01_LLASSILCA, B*35:01_EVDPIGHVY, A*02:01_AIFPGAVPAA, or A*01:01_ASSLPTTMNY. In yet more particular embodiments, the antigen binding domain for target 1 (the HLA-PEPTIDE target) comprises the VH and VL sequences from any one of the scFvs specific for A*01:01_NTDNNLAVY, A*02:01_LLASSILCA, B*35:01_EVDPIGHVY, A*02:01_AIFPGAVPAA, or A*01:01_ASSLPTTMNY.

[1140] Briefly, bispecific antibodies were generated using standard molecular cloning techniques, including restriction digestion and ligation, gene synthesis, and homology-based cloning methods such as In-fusion (Takara). Positive clones were confirmed by DNA sequencing and used to generate bispecific antibody molecules by transfecting Expi-CHO cells (Thermo) according to the manufacturer's protocol. Cultures were harvested and bispecific antibodies were purified from the supernatants using protein A, kappa-select, or IMAC (GE healthcare) based chromatography methods. If necessary, bispecific antibodies or controls were polished by SEC or mixed-mode (CHT, BIO-RAD) chromatography. Molecules were formulated in PBS by dialysis or desalting chromatography. Molecules were evaluated to confirm high monomer purity (>95%) and low endotoxin (<1 EU/mg) prior to subsequent testing.

[1141] For clarity, the nomenclature of the generated and tested bispecific antibodies recites for formats #2-#6: the format # of the bispecific design in FIG. 76—the scFv binder-the Fab binder; or for format #1 (BiTE): format # of the bispecific design in FIG. 76—the N-term scFv-the C-term scFv binder. Exemplary nomenclatures are shown in FIGS. 77A-C. For instance, the bispecific designated “1-G2(1H11)-OKT3” is format #1 (BiTE): N-term scFv=G2 clone 1H11, C-term scFv=CD3 binder OKT3 (FIG. 77A). For instance, the bispecific designated “3-G2(1H11)-OKT3” is format #3 (scFv/Fab): scFv=G2(1H11), Fab=OKT3 (FIG. 77B). For yet other instance, the bispecific designated “4-G2(1H11)-OKT3” is format #4 (scFv/scFv-Fab): scFv=G2(1H11), Fab=OKT3 (FIG. 77C).

[1142] A list of exemplary bispecific antibodies created using the methods described above is listed in the following table.

TABLE 32
Exemplary bispecific antibodies

| | scFv (N- | scFv (C- | | |
|---|---|---|---|---|
| Format # | term) | term) | scFv | Fab |
| 1. BiTE | G2(1H11) | OKT3 | | |
| 1. BiTE | G7(2E09) | OKT3 | | |
| 1. BiTE | G5(7A05) | OKT3 | | |
| 1. BiTE | G8(2C10) | OKT3 | | |
| 1. BiTE | G2(1H11) | foralumab | | |
| 1. BiTE | G5(7A05) | foralumab | | |
| 1. BiTE | G7(2E09) | foralumab | | |
| 1. BiTE | G8(2C10) | foralumab | | |
| 3. scFv/Fab | | | OKT3 | G2(1H11) |
| 3. scFv/Fab | | | G2(1H11) | OKT3 |
| 3. scFv/Fab | | | G5(7A05) | OKT3 |
| 3. scFv/Fab | | | G7(2E09) | OKT3 |
| 3. scFv/Fab | | | G8(2C10) | OKT3 |
| 3. scFv/Fab | | | G2(1H11) | foralumab |
| 3. scFv/Fab | | | G5(7A05) | foralumab |
| 3. scFv/Fab | | | G7(2E09) | foralumab |
| 3. scFv/Fab | | | G8(2C10) | foralumab |
| 4. scFv/scFv- | | | G2(1H11) | OKT3 |
| Fab | | | | |
| 4. scFv/scFv- | | | G5(7A05) | OKT3 |
| Fab | | | | |
| 4. scFv/scFv- | | | G7(2E09) | OKT3 |
| Fab | | | | |
| 4. scFv/scFv- | | | G8(2C10) | OKT3 |
| Fab | | | | |
| 4. scFv/scFv- | | | G2(1H11) | foralumab |
| Fab | | | | |
| 4. scFv/scFv- | | | G5(7A05) | foralumab |
| Fab | | | | |
| 4. scFv/scFv- | | | G7(2E09) | foralumab |
| Fab | | | | |
| 4. scFv/scFv- | | | G8(2C10) | foralumab |
| Fab | | | | |
| 5. Fc/scFv-Fab | | | G2(1H11) | OKT3 |
| 5. Fc/scFv-Fab | | | G5(7A05) | OKT3 |
| 6. scFv- | | | G2(1H11) | OKT3 |
| Fab/scFv-Fab | | | | |
| 6. scFv- | | | G5(7A05) | OKT3 |
| Fab/scFv-Fab | | | | |
| 2. Fab- | | | G2(1H11) | OKT3 |
| scFv/Fab-scFv | | | | |
| 2. Fab- | | | G5(7A05) | OKT3 |
| scFv/Fab-scFv | | | | |

[1143] Amino Acid and nucleotide sequences of exemplary bispecific molecules generated are provided in the Sequences section.

### Example 18: Affinity of Bispecific Formats for the HLA-PEPTIDE Target

[1144] Affinity measurements were performed as described herein. Starting antibody concentration was 100 nM and then titrated 1:2 thereafter. The dissociation step in the kinetics buffer was measured for 200 seconds. Data was analyzed using the ForteBio data analysis software using a 1:1 binding model.

[1145] FIGS. 78A-D show BLI results for the different bispecific formats with the G2(1H11) clone as an ScFv or Fab against HLA-PEPTIDE target A*01:01-NTDNNLAVY. All tested bispecific formats exhibited affinity for the HLA-PEPTIDE target, with an apparent KD below 25 nM (FIGS. 78A-D. The 4-G2(1H11)-OKT3 bispecific (FIG. 78D) shows the highest binding affinity, with an apparent KD of 1.27 nM.

[1146] In another set of affinity experiments, starting Fab concentration was 250 nM and titrated 1:2 thereafter. Results for the antibody designated αCD3 (also referred to as anti-CD3) and the hOKT3 IgG are shown in FIG. 100. Both antibodies exhibit binding to CD3 in a dose dependent manner.

[1147] Results for the bispecific antibody designated 3-G2(1H11)-hOKT3 are shown in FIG. 101. The bispecific antibody exhibits binding to CD3 and HLA-PEPTIDE target A*01:01_NTDNNLAVY in a dose dependent manner.

[1148] Results for the bispecific antibody designated 4-G2(1H11)-hOKT3 are shown in FIG. 102. The bispecific antibody exhibits binding to CD3 and HLA-PEPTIDE target A*01:01_NTDNNLAVY in a dose dependent manner.

[1149] Results for the bispecific antibody designated 2-G2(1H11)-αCD3 are shown in FIG. 103. The bispecific antibody exhibits binding to CD3 and HLA-PEPTIDE target A*01:01_NTDNNLAVY in a dose dependent manner.

[1150] Results for the bispecific antibody designated 4-G2(1H11)-αCD3 are shown in FIG. 104. The bispecific antibody exhibits binding to CD3 and HLA-PEPTIDE target A*01:01_NTDNNLAVY in a dose dependent manner.

[1151] Results for the bispecific antibody designated 5-G2(1H11)-αCD3 are shown in FIG. 105. The bispecific antibody exhibits binding to CD3 and HLA-PEPTIDE target A*01:01_NTDNNLAVY in a dose dependent manner.

[1152] Results for the bispecific antibody designated 6-G2(1H11)-αCD3 are shown in FIG. 106. The bispecific antibody exhibits binding to CD3 and HLA-PEPTIDE target A*01:01_NTDNNLAVY in a dose dependent manner.

### Example 19: Stability of Bispecific Formats

[1153] The stability of the bispecific formats was assessed by dynamic light scattering on the Mobius (Wyatt). Samples were stored for 2 months at 4° C. prior to measurement.

[1154] FIGS. 79A-D show the population of the non-aggregated bispecifics at lower calculated radii (<10¹ nm) and any resulting aggregate peak at much higher calculated radii (˜10³ nm) due to instability during storage at 4° C. The 4-G2(1H11)-OKT3 bispecific (FIG. 79D) shows the greatest stability, with no aggregate peak detected compared to the other formats.

### Example 20: Tested Bispecific Formats Specifically Bind Cells that Present the HLA-PEPTIDE Target and CD3+ Jurkat Cells

[1155] To verify that the generated bispecific antibodies can specifically bind to their HLA-PEPTIDE targets in their natural context, e.g., on the surface of antigen-presenting cells; generated bispecific antibodies specific for G2 and CD3 were used in binding experiments with K562 cells expressing the HLA-PEPTIDE target. Briefly, K562 cells were transduced with HLA-A*01:01 and then pulsed with target or negative control peptide, using the methods described in Example 6. Bispecific binding was detected by flow cytometry.

[1156] Results are depicted in FIGS. 80A-C. All tested formats exhibited specific binding to HLA-PEPTIDE target G2 (A*01:01_NTDNNLAVY), with format 4 (FIG. 80C) exhibiting the strongest binding to the target-specific cells.

[1157] To verify that the generated bispecific antibodies specifically bind to CD3, the generated bispecific antibodies were used in binding experiments with CD3+ and CD3− Jurkat cells. Results are depicted in FIGS. 81A-C. All tested formats exhibited specific binding to CD3+ Jurkat cells but not CD3− Jurkat cells.

[1158] FIGS. 82A and 82B depict comparative results from formats 1, 3, and 4, for the K562 cell binding assay (FIG. 82A) and Jurkat cell binding assay (FIG. 82B), demonstrating the relative advantages of format 4.

### Example 21: Bispecific Antibody 4-G2(1H11)-OKT3 Prevents the Establishment of Tumors in an In Vivo Mouse Model

[1159] We established in vivo proof of concept with the format 4 bispecific molecule. The experimental design and conditions of the in vivo experiment is shown in FIG. 83. Briefly, human CD3+ T cells were pre-loaded with the 4-G2(1H11)-OKT3 bispecific and mixed with the A375-10×9mer-Luc tumor cell line, just prior to subcutaneous injection into immunodeficient NSG mice on Day 0. On Day 4, a second dose of the same bispecific was administered.

[1160] Results are depicted in FIG. 84. Mice injected with T cells pre-treated with PBS formed tumors as measured by bioluminescence from the A375-10×9mer-Luc tumor cells. However, all mice treated with pre-loaded T cells did not form of any tumor across a range of effector to target ratios (3.5:1, 5:1, and 10:1). Therefore, the bispecific prevented the establishment of tumors expressing the target in vivo in a mouse model.

### Example 22: Generation of Bispecific Formats Comprising a Single Domain Antibody

[1161] Antigen binding domains specific for various HLA-PEPTIDE targets are formatted as either scFv or Fab, along with anti-CD3 single domain antibody into a trivalent bispecific format.

[1162] FIG. 85 depicts some exemplary embodiments.

[1163] In a first embodiment, FIG. 85A, the ABP comprises two scFvs, each of which bind to the HLA-PEPTIDE target, and an anti-CD3 single domain antibody, e.g., a huVH single domain. The second scFv is attached, directly or indirectly, to the N-terminus of the anti-CD3 domain antibody. The first scFv and the anti-CD3 domain antibody are attached, directly or indirectly, to an Fc region which optionally comprises a knob-hole modification.

[1164] In a second embodiment, FIG. 85B, the ABP comprises two Fabs, each of which bind to the HLA-PEPTIDE target, and an anti-CD3 single domain antibody, e.g., a huVH single domain. The second Fab is attached, directly or indirectly, to the N-terminus of the anti-CD3 domain antibody. The first Fab and the anti-CD3 domain antibody are attached, directly or indirectly, to an Fc region which optionally comprises a knob-hole modification.

[1165] Other embodiments comprise combinations of the above two molecules. By way of example only, the ABP can comprise an scFv and a Fab which bind the HLA-PEPTIDE target and an anti-CD3 single domain antibody. In some embodiments, the scFv and the anti-CD3 domain antibody are attached directly or indirectly to the Fc region and the Fab is attached directly or indirectly to the N-terminus of the anti-CD3 domain antibody. In some embodiments, the Fab and the anti-CD3 domain antibody are attached, directly or indirectly to the Fc region and the scFv is attached directly or indirectly to the N-terminus of the anti-CD3 domain antibody.

[1166] Affinities of the generated trivalent, bispecific molecules for their HLA-PEPTIDE targets are measured according to methods described in, e.g., Example 18. The generated molecules exhibit specific binding in the nanomolar range to their respective HLA-PEPTIDE target.

[1167] Stability of the generated molecules are tested according to methods described in Example 18. The generated molecules exhibit suitable stability with low aggregation.

[1168] Binding of the generated molecules to K562 cells transduced with the HLA allele and then pulsed with the restricted peptide is assessed according to the methods described in Example 20. Binding of the generated molecules to CD3+/− Jurkat cells are also assessed according to methods described in Example 20. The generated molecules bind to the K562 cells and to CD3+, but not CD3− Jurkat cells.

[1169] When tested in a mouse model of tumor burden, e.g., according to the methods described in Example 21, the generated molecules either prevent tumor growth or shrink the tumors.

### Example 23: In Vitro Cytotoxicity for G2 and G5 Lead Bispecific Designs

[1170] Materials and Methods

[1171] T Cell Activation

[1172] For all cytotoxicity assays, negatively selected pan CD3 T cells (AllCells cat# LP, CR, CD3+, NS, 25M) were thawed using dropwise mixing into ImmunoCult media (Stemcell Technologies cat#10981) and activated using ImmunoCult CD3/CD28 activator (Stemcell Technologies #10991) according to manufacturer's instructions. Cells were cultured under standard tissue culture (TC) conditions, 37 deg C., 5% CO₂. 3 days post activation, T cells were checked for activation by visual clumping and used in assays as described below.

[1173] Calcein AM Release Cytotoxicity Assay (K562 Cells)

[1174] Target cells (K562 cells transduced with the desired HLA and either (1) pulsed with restricted peptide corresponding to the HLA-PEPTIDE target or (2) no restricted peptide control) were pelleted, washed and re-suspended in PBS at 1e7/mL. 1 mM Calcein AM was added and cells incubated for 30 min at 37° C. with mixing every 10 min. Following incubation, cells were pelleted, washed in PBS, and re-suspended at 2e6/mL in serum-free RPMI. 25 μL of target cells were plated in clear TC-treated 96-well U-bottom plates (5e4/well). 25 μL of serially diluted bispecific molecules were added so that final concentrations are as indicated in figures. 25 μL of T cells, washed and re-suspended at 2e7/mL in serum-free RPMI, were added to plates to give a 10:1 T cell:target cell ratio. RPMI-only, target cell only, and 1% triton-lysed cells were included to measure background, spontaneous and maximum release, respectively. Plates were incubated for 6 hours under standard TC conditions. Following incubation, plates were spun down at 300 g for 5 minutes. 60 μL of supernatant (SN) were transferred to opaque black 96 well plates. Fluorescence intensity (495 nm) was measured on a SpectraMax plate reader using SoftMax Pro software. To calculate % killing, RPMI background was first subtracted from all values. % killing was determined using % cytotoxicity w/ Ab−% cytotoxicity w/o Ab. % cytotoxicity was calculated as [(A−B)/(C−B)]×100, where A=experimental release, B=spontaneous release, C=maximal release.

[1175] Luciferase Cytotoxicity Assay (A3 75/G2 Cells)

[1176] A375 cells, which express HLA-A*01:01, were engineered to express the restricted peptide NTDNNLAVY using a lentivirus transduction of a cassette containing a 10× repeat of the peptide, Luciferase, and puromycin-resistance. Cassette-expressing cells were selected using 0.5 ug/mL of puromycin. For the assay, cells were pelleted, washed in PBS, and re-suspended at 2e6/mL in RPMI with 10% FBS. 25 μL of target cells were plated in opaque white 96-well plates. Serial dilutions of the bispecific molecules were added as described above. T cells were added to the plates to give a 10:1 T cell: target ratio as described above. Following 24-hour incubation, Bio-Glo luciferase substrate (Promega cat# G7941) was added and plate incubated and read according to manufacturer's instructions. To calculate % killing, RPMI background RLU was first subtracted from all values. % killing was determined as % cytotoxicity w/ Ab−% cytotoxicity w/o Ab, where % cytotoxicity was calculated as 100%-% viability. % viability was calculated as % of RLU in experimental wells normalized against target cells alone.

[1177] LDH Release Cytotoxicity Assay (A3 75/G2 Cells)

[1178] Plates contained serial dilutions of the bispecific molecules and 10:1 T cell: target ratio as described above and incubated for 48h in clear TC-treated 96w U-bottom plates. Plates were spun down at 300g×5 min, and supernatant removed and diluted 1:100. LDH-Glo assay kit was used (Promega cat# J2381) and % killing calculated according to manufacturer's instructions.

[1179] Results

[1180] FIG. 86A depicts the bispecific formats tested for the 01:01_NTDNNLAVY T cell redirecting bispecific binding molecules. The binding domain(s) specific for *01:01 NTDNNLAVY were from the G2(1H11) clone. The binding domain specific for CD3 were from CD3 antibody OKT3. Calcein AM cytotoxicity results for the A*01:01 NTDNNLAVY/CD3 bispecific molecules, in various bispecific formats are shown in FIG. 86B. All formats induced cytotoxicity in the K562 cells expressing HLA-PEPTIDE target A*01:01 NTDNNLAVY, relative to K562 cells not expressing the HLA-PEPTIDE target (unpulsed controls). Redirecting bispecific molecules in BiTE format (format #1) and the scFv/scFv-Fab format (format #4) induced greater cytotoxicity as compared to the scFv/Fab format (format #3).

[1181] FIG. 87A depicts the bispecific formats tested for the B*35:01_EVDPIGHVY T cell redirecting bispecific binding molecules. The binding domain(s) specific for B*35:01_EVDPIGHVY were from the G5(7A05) clone. The binding domain specific for CD3 were from CD3 antibody OKT3. Calcein AM cytotoxicity results for the B*35:01_EVDPIGHVY/CD3 bispecific molecules, in various bispecific formats are shown in FIG. 87B. All formats induced cytotoxicity in the K562 cells expressing HLA-PEPTIDE target B*35:01_EVDPIGHVY, relative to K562 cells not expressing the HLA-PEPTIDE target (unpulsed controls). Redirecting bispecific molecules in BiTE format (format #1) and the scFv/scFv-Fab format (format #4) induced greater cytotoxicity as compared to the scFv/Fab format (format #3).

[1182] Results from the luciferase assay in A375 cells are shown in FIG. 88A. Bispecific molecules that bind *01:01_NTDNNLAVY and CD3 were tested. The binding domains specific for *01:01_NTDNNLAVY were from the G2(1H11) clone. The binding domains specific for CD3 were from CD3 antibody OKT3. As demonstrated, the highest dose caused cellular cytotoxicity for all bispecific formats tested. The serial dilution curves demonstrate that Format #4 (scFv/scFv-Fab exhibited the strongest dose-response curve out of the three formats, followed by Format #1 (BiTE), followed by Format #3 (scFv/Fab).

[1183] Additional results from a second round of the luciferase assay in A375 cells are shown in FIG. 98A and FIG. 98B. Bispecific molecules that bind A*01:01_NTDNNLAVY and CD3 were tested. The binding domains specific for A*01:01_NTDNNLAVY were from the G2(1H11) clone. The binding domains specific for CD3 were from an anti-CD3 antibody (FIG. 98A) or CD3 antibody hOKT3 (FIG. 98B). As demonstrated in FIG. 98A, all formats induced cytotoxicity in a dose-dependent manner. As demonstrated in FIG. 98B, the highest dose caused cellular cytotoxicity for formats 3 and 4. In particular, format #4 of the bispecific antibody G2(1H11)-hOKT3 resulted in a high levels of cytotoxicity across all concentrations tested.

[1184] Results from the LDH assay in A375 cells are shown in FIG. 88B. At the highest dose, all tested formats induced cytotoxicity, with Formats #1 (BiTE) and #4 (scFv/scFv-Fab) showing higher cytotoxicity as compared to the Format #3 (scFv/Fab) bispecific antibodies.

### Example 24: Bispecific Antibodies Bind Cells that Present the HLA-PEPTIDE Target and CD3+ Jurkat Cells

[1185] After reformatting our TRCm antibody into various bispecific formats, we tested their ability to bind the specific pHLA target as well as CD3+ Jurkats. See sequence tables labeled Exemplary Bispecific Format 1 Constructs, Exemplary Bispecific Format 2 Constructs, Exemplary Bispecific Format 3 Constructs, Exemplary Bispecific Format 4 Constructs, Exemplary Bispecific Format 5 Constructs, and Exemplary Bispecific Format 6 Constructs for amino acid sequence information of the tested bispecific antibodies. Therefore, we conducted titration experiments on K562 cells that were transduced HLA-A*01:01 and exogenously pulsed with target or negative control peptide. Target specific binding was also tested on A375 cells transduced with high or medium levels of target as well as A375 transduced with control construct. Bispecific binding was detected by flow cytometry.

[1186] Materials and Methods

[1187] K562 cell lines were generated as described in Example 6.

[1188] A375 cell lines, which express HLA-A*01:01, were engineered to express the restricted peptide NTDNNLAVY as described in Example 23.

[1189] Flow Cytometry Methods:

[1190] HLA-transduced K562 cells were pulsed as described in Example 6. Cells were harvested, washed in PBS, and stained with eBioscience Fixable Viability Dye eFluor 450 for 15 minutes at room temperature. Following another wash in PBS+2% FBS, cells were resuspended with bispecifics at varying concentrations. Cells were incubated with bispecifics for 1 hour at 4° C. After another wash, PE-conjugated goat anti-human IgG secondary antibody (Jackson ImmunoResearch) was added at 1:100, or anti-His Alexa Fluor 647 (BioRad) at 1:20 for detection of the BiTE molecule. After incubating at 4° C. for 45 minutes and washing in PBS+2% FBS, cells were resuspended in PBS+2% FBS and analyzed by flow cytometry. Jurkat E6-1 (ATCC TIB-152) and Jurkat T3.5 (ATCC TIB-153) cells were grown under standard tissue culture conditions. All cell lines were stained and analyzed with bispecific binding using the same methods as the K562 cells.

[1191] Flow cytometric analysis was performed on the Attune NxT Flow Cytometer (ThermoFisher) using the Attune NxT Software. Data was analyzed using FlowJo.

[1192] Results

[1193] K562 binding results for bispecific formats of clone G2(1H11) with an anti-CD3 arm are shown in FIG. 93. Bispecifics in formats 2-6 (see FIG. 76) exhibited specific binding to K562 cells pulsed with target restricted peptide, as compared to K562 cells pulsed with a known off target peptide (YSEHPTFTSQY) or unpulsed controls.

[1194] A375 binding results for bispecific formats of clone G2(1H11) with an anti-CD3 arm are shown in FIG. 94. Low MOI refers to low antigen expression, high MOI refers to high antigen expression. Low and high antigen expression was achieved as described in Example 25.

[1195] Jurkat binding results for bispecific formats of clone G2(1H11) with an anti-CD3 arm are shown in FIG. 95. Bispecifics in formats 2-6 (see FIG. 76) exhibited specific binding to CD3+ Jurkat cells as compared to CD3− Jurkat cells.

[1196] K562 binding results for bispecific formats of clone G2(1H11) with an hOKT3 arm are shown in FIG. 96. Bispecifics in formats 3 and 4 (see FIG. 76) exhibited specific binding to K562 cells pulsed with target restricted peptide, as compared to K562 cells pulsed with a known off target peptide (YSEHPTFTSQY) or unpulsed controls.

[1197] A375 binding results for bispecific formats of clone G2(1H11) with an hOKT3 arm are shown in FIG. 97. Low MOI refers to low antigen expression, high MOI refers to high antigen expression. Low and high antigen expression was achieved as described in Example 25.

[1198] All formats tested bind in a dose-dependent manner that is selective for the relevant target peptide on all cells. In addition, all formats bind to CD3+, but not CD3-, Jurkat cell lines, indicating that this interaction is made through the anti-CD3 portion of the bispecific molecules.

### Example 25: Bispecific Antibodies Induced T-Cell Mediated Cytotoxicity of Tumor Cell Lines Expressing HLA-PEPTIDE Targets in a Spheroid Toxicity Model

[1199] Bispecific antibodies to various HLA-PEPTIDE targets, carrying various anti-CD3 binding domains, were tested in a spheroid cytotoxicity model. See sequence tables labeled Exemplary Bispecific Format 1 Constructs, Exemplary Bispecific Format 2 Constructs, Exemplary Bispecific Format 3 Constructs, Exemplary Bispecific Format 4 Constructs, Exemplary Bispecific Format 5 Constructs, and Exemplary Bispecific Format 6 Constructs for amino acid sequence information of exemplary tested bispecific antibodies. Also tested (full chain sequence data not shown) were formats #1-#6 using foralumab as the antigen binding domain specific for CD3. When grown in low attachment plates, cancer cell lines aggregate into spheroid bodies, which more closely mimic three dimensional tumors as compared to cell lines grown under adherent conditions. See, e.g., SLAS Discovery 2017, Vol. 22(5) 456-472, which is hereby incorporated by reference in its entirety.

[1200] Materials and Methods

[1201] Cell Lines

[1202] The cell lines used to express the desired HLA-PEPTIDE targets were as follows: A375 cells (which express HLA subtype A*01:01) engineered to express the G2 restricted peptide NTDNNLAVY, LN229 (which express HLA subtype B*35:01) engineered to express the G5 restricted peptide EVDPIGHVY; and A375 (which also express HLA subtype A*02:01) engineered to express the G8 restricted peptide AIFPGAVPAA. All cell lines were also engineered to express luciferase.

[1203] Luciferase expressing cells were plated in 100 μL, at 10,000-15,000 cells/well in Corning ultra-low attachment plates (Corning #4515) in corresponding culture medium without selection. Plates were incubated for two days at 37° C. and 5% CO2 to allow spheroid formation. Antibody was titrated at and added as 10 μL/well. Normal human PBMCs were thawed and rested for 4-6 hours at 37° C. and added as 100,000 cells/well in 50 μL, giving an Effector:Target ratio of 10:1. Plates were then incubated for 4 days at 37° C. and 5% CO2. At the end of the incubation period 100 μL, Luciferin (Pierce #88292) at 300 μg/mL was added to the plate. Luciferase was read on the SpectraMax iE3. Percent cytotoxicity was calculated as (Media control-sample signal)/(Media control-maximum lyis)*100.

[1204] Results for G2(1H11)-αCD3 bispecific antibodies in various formats are shown in FIG. 99A. FIG. 99A also shows maximum and minimum cytotoxicity, as well as IC50 data, for bispecifics for which dose-response curves were generated. Formats 6 and 4 were the most potent in inducing cytotoxicity, each inducing similar high levels of maximum cell killing. Format 2 also induced cytotoxicity to a higher level than αCD3 alone. However, Format 5 did not induce increased cell killing as compared to αCD3 alone.

[1205] FIG. 99A (cont'd) also shows Format 2, 4, and 6 bispecific dose-response curves for A375 cells engineered to express low (left panel) and high (right panel) levels of the G2 restricted peptide. Differing levels of antigen expression were achieved by transduction with varying titers of virus and selection of different clonal cell lines by limiting dilution. Results show that the bispecifics induce cytotoxicity in a dose-dependent manner. At low levels of G2 expression, Format 6 was the most potent in inducing cytotoxicity, followed by Format 4, then Format 2. However, both formats 4 and 6 induced similar maximum levels of cytotoxicity at the highest dose. At high levels of G2 expression, Formats 4 and 6 exhibited similar high potency, followed by Format 2.

[1206] Results for G8(2C10)-foralumab bispecific antibodies in formats #2 and #3 are shown in FIG. 99B. Both formats enhanced T-cell mediated cytotoxicity in a dose-dependent manner, as compared to G8(2C10) IgG.

[1207] Results for G5(7A05) bispecific antibodies with foralumab or hOKT3 arms tested against the engineered LN229 cell line are shown in FIG. 99C. Format 2 with the foralumab arm exhibited the highest potency, followed by format 1-foralumab, followed by format 1-OKT3.

### Example 26: SEC-HPLC Analysis of Format 4 Bispecific Antibodies Reveal Presence of an Alternative Isomer

[1208] Methods

[1209] Analytical SEC-HPLC was performed on an Agilent 1200 series HPLC system equipped with a degasser (G1379B), binary pump (G1312B), high performance autosampler (G1367D), and wide range diode array detector (DAD, G7115A). Approximately 50-100 ug of Format 4 G5(1C12) protein A eluate, neutralized to pH 7 using 1M Tris buffer pH 7.5, was loaded onto a TSKgel SuperSW mAb HTP column (4.6 mm ID×15 cm) with the TSKgel Guardcolumn SuperSW mAb guard column in line, or TSKgel G3000 SWxl column (7.8 mm ID×30 cm) with the TSKgel G2000SWxl-G4000SWx1 Guard Column in line from Tosoh Bioscience. The TSKgel SuperSW mAb HTP column was operated at 0.35 ml/min for 7 min in PBS pH 7.4. The TSKgel G3000 SWxl column was operated at 0.5 ml/min for 35 min in PBS, pH 7.4. The DAD was set to collect absorbance at 280 nm for both methods.

[1210] Results:

[1211] Analysis of Format 4 G5(1C12) proteinA eluate using the TSKgel SuperSW mAb HTP column (FIG. 114, top), used for quick product quality screening of antibodies, revealed the presence of aggregates between 3-4 min, a main peak, and an unexpected significant tailing between 4.5-5.5 minutes. The observed tailing suggested the presence of an additional antibody moiety that either interacts more with the SEC column, or is more compacted and thus migrates slower than the main antibody conformation. Analyzing the same proteinA eluate using the TSKgel G3000SWx1 column, which has greater resolving power than the shorter TSKgel SuperSW mAb HTP column, shows that the tailing initially observed resolves into a “split peak” (FIG. 114, bottom). Mass spectrometry analysis of the G5(1C12) Format 4 antibody suggested no fragmentation (data not shown). Accordingly, the “split peak” was hypothesized to be a diabody isoform of the Format 4 antibody, where the VH of one of the scFvs interacts with the VL of the other scFv and vice versa. (FIG. 114, bottom panel, bispecific diagram on the right).

### Example 27: Determination of Alternate Diabody Isoform

[1212] Materials and Methods

[1213] Antibody Digestion Experiment

[1214] 0.4 mg each of purified G5(1C12) format 3, 4 and 5 bispecific antibodies were buffer exchanged from PBS pH 7.4 into 150 mM sodium phosphate buffer at pH 7.0. The samples were then concentrated to a volume of approximately 100 uL, with corresponding concentrations ranging from 3-4 mg/mL, loaded onto FabALACTICA microspin columns (Genovis), and incubated for 16 hr with end over end mixing. FabALACTICA antibody digestion involves a cysteine protease that digests human IgG1 at one specific site above the hinge (KSCDKT/HTCPPC), generating intact Fab and Fc fragments. The name of the enzyme is derived from the pathogen Streptococcus agalactiae, where it was first discovered. Spoerry, Christian & Hessle, Pontus & Lewis, Melanie & Paton, Lois & Woof, Jenny & Pawel-Rammingen, Ulrich. (2016). Novel IgG-Degrading Enzymes of the IgdE Protease Family Link Substrate Specificity to Host Tropism of Streptococcus Species. PLoS ONE. 11. e0164809. 10.1371/journal.pone.0164809), which is hereby incorporated by reference in its entirety. To collect the digested products, the columns were centrifuged at 1000×g for 1 min, followed by two additional rounds of elution using 100 uL PBS pH 7.4. The elution fractions were pooled and subsequently loaded onto a CaptureSelect (Genovis) column, and incubated for 30 min with end over end mixing. The flowthrough was collected by centrifugation at 200×g for 1 min, followed by two wash steps with 100 uL PBS (200×g for 1 min, and 100×g for 1 min, respectively). The flowthrough and wash fractions were pooled, and are henceforth referred to as “ProteinA Flowthrough”. The ProteinA bound fragments were eluted using 100 uL of 0.1M Glycine, pH 3 by centrifugation at 200×g for 1 min, and immediately neutralized with 50 uL 1M tris pH 7.5. A second elution step was performed by centrifugation at 1000×g for 1 min, and neutralized immediately as described. The elution fractions were pooled and are henceforth referred to as “ProteinA bound/Eluted”

[1215] SEC-HPLC Analysis

[1216] Analytical SEC-HPLC was performed on an Agilent 1200 series HPLC system equipped with a degasser (G1379B), binary pump (G1312B), high performance autosampler (G1367D), and wide range diode array detector (DAD, G7115A. Approximately 40 uL of each of untreated antibody, digested proteinA flowthrough, and digested ProteinA bound/eluted was loaded onto a TSKgel G3000 SWxl column (7.8 mm ID×30 cm) with the TSKgel G2000SWxl-G4000SWxl Guard Column in line from Tosoh Bioscience. The column was operated at 0.5 ml/min for 60 min in PBS, pH 7.4. The DAD was set to collect absorbance at 280 nm.

[1217] Results

[1218] FIG. 115A depicts expected protein digestion fragments of “standard” Format 4 antibodies and a “diabody” isomer of Format 4. FabALACTICA digestion of “standard” Format 4 conformation (scFv/scFv-Fab) antibodies with two separate scFvs, without presence of any alternative “diabody” isoforms, would be expected to yield two peaks: one corresponding to the scFv-Fc fragment and one corresponding to the scFv-Fab fragment. Presence of a Format 4 “alternative diabody” conformation would be expected to reveal presence of a third peak that aligns with the undigested Format 4 main peak.

[1219] SEC-HPLC results are depicted in FIG. 115B. Digested format 5 ProteinA flowthrough is used as the ScFv Fab standard, and digested format 3 Protein A bound/Eluted is used as the ScFv-Fc standard. The undigested format 4 SEC-HPLC profile shows the previously described split peak. Digested format 4 ProteinA flowthrough showed a peak with a retention time that aligned with the ScFv-Fab standard. Digested format 4 ProteinA bound/Eluted SEC-HPLC profile showed a peak that aligned with the ScFv-Fc standard expected to be seen for the “standard” Format 4, as well as a peak that aligned with the undigested format 4. The presence of the latter peak indicated the presence of the alternate diabody conformation.

[1220] FIG. 116 depicts a diagram representation of the undigested Format 4 “separate scFv” conformation (left), the alternate diabody conformation without digestion (middle), and the alternate diabody conformation with digestion (right).

### Example 28: Negative Stain Electron Microscopy and 2D Class Averaging

[1221] Materials and Methods

[1222] Grid Preparation

[1223] A sample of Format 4-hOKT3-G5(1C12) bispecific antibody was diluted to 18 ug/mL using PBS prior to imaging. The sample was imaged over a layer of continuous carbon supported by nitro-cellulose on a 400-mesh copper grid. The grids were prepared by applying 3 μl of sample suspension to a cleaned grid, blotting away with filter paper, and immediately staining with uranyl formate.

[1224] EM Imaging

[1225] Electron microscopy was performed using an FEI Tecnai T12 electron microscope (serial number D1100), operating at 120 keV equipped with an FEI Eagle 4k×4k CCD camera. Negative stain grids were transferred into the electron microscope using a room temperature stage.

[1226] Images of each grid were acquired at multiple scales to assess the overall distribution of the specimen. After identifying potentially suitable target areas for imaging at lower magnifications, high magnification images were acquired at nominal magnifications of 110,000×(0.10 nm/pixel) and 67,000×(0.16 nm/pixel). The images were acquired at a nominal underfocus of −1.6 μm to −0.8 μm and electron doses of ˜25 e/A.

[1227] 2D Averaging Analysis

[1228] Particles were identified in the high magnification images prior to alignment and classification. The individual particles were then selected, boxed out, and individual sub-images are combined into a stack to be processed using reference-free classification.

[1229] Particle Selection: Individual particles in the 67,000×high magnification images were selected using automated picking protocols described in Lander, G. C., S. M. Stagg, et al. (2009). “Appion: an integrated, database-driven pipeline to facilitate EM image processing.” J Struct Biol 166(1): 95-102, which is hereby incorporated by reference in its entirety, and manual picking. An initial round of alignments was done on each sample and from that alignment class averages that appeared to contain recognizable particles were selected for additional rounds of alignment.

[1230] Particle Alignment and Classification: A reference-free alignment strategy based on the XMIPP (Sorzano, Marabini et al. 2004) processing package, described in Sorzano, C., R. Marabini, et al. (2004). XMIPP: a new generation of an open-source image-processing package for electron microscopy. J Struct Biol. 148: 194-204, which is hereby incorporated by reference in its entirety, was used. Algorithms in this package align the selected particles and sort them into self-similar groups of classes.

[1231] Results

[1232] FIG. 117 depicts electron microscopy results. Visible in the sample were particles that displayed different sizes and morphologies. Particles ranged from ˜16-22 nm in their longest dimension and had a wide range of conformations; some particles had a branched appearance and others were irregular in shape. Class averages showed particles that ranged from ˜5 to 10 nm in width and ˜16 to 18 nm in length (see FIG. 117). The majority of the class averages contained features that resembled those seen for IgG molecules: a single Fc domain and two antibody arms. However, there were aspects that distinguished these particles from a typical antibody sample: 1. One of the antibody arms contained a peanut-shaped moiety closely resembling a typical Fab (FIG. 117, panel A, black arrow). The other arm appeared to contain two spherical domains, but at a greater distance from each other when compared to that seen in a standard Fab arm (FIG. 117A, panel A, light gray arrow). Based on the model of this bispecific antibody, it is likely that only one of these two spherical domains was connected to the Fc region, whereas the other was in fact connected to the end of the neighboring arm. It seems to be flexibly linked, as it can bend down and interact with the tip of the neighboring Fab arm. These interacting spherical domains are mostly likely the two scFv domains of the Format 4 antibody. Thus the EM revealed visual evidence of the alternative diabody isomer.

[1233] It should be noted that in a few class averages, the Fc and Fab domains were stacked in a straight line making it impossible to distinguish between them (FIG. 117, panels E and F). These are likely side views of the particle described above.

[1234] Averages were generally well-defined, with some portions of the Fc domain not as clearly resolved as others.

### Example 29: Introduction of DSB44/100 Removes Putative Diabody Peak

[1235] Materials and Methods

[1236] DSB Engineering

[1237] Position 44 of the VH (Kabat) is often in close proximity to position 100 of VL (Kabat). By introducing Cys residues at both of these positions, a disulfide bond (DSB) can be formed that stabilizes the VH/VL interactions within each scFv, prior to assembly of the bispecific antibody chains. Such a stabilizing DSB would be expected to reduce the probability that the two scFvs of the Format 4 antibodies interact to form the alternative diabody isomer.

[1238] Gene fragments incorporating the H44-L100 DSB mutations (Kabat numbering) were ordered through Genewiz, incorporating 18-base pair overlaps with digested vector. Fragments were cloned using In-Fusion homologous recombination (Takara) according to manufacturer's instructions. Clones were confirmed to be correct by sequencing (Elim Biopharmaceuticals). Molecules were generated by transfection of Expi293F cells according to manufacturer's recommended protocols (Life Technologies). Molecules were purified on Akta AVANT using protein A and Kappa Select Light columns (GE Healthcare) and polished using CHT (Bio-Rad) for aggregate removal.

[1239] SEC-HPLC

[1240] Analytical SEC-HPLC was performed on an Agilent 1200 series HPLC system equipped with a degasser (G1379B), binary pump (G1312B), high performance autosampler (G1367D), and wide range diode array detector (DAD, G7115A). Purified Format 4 G5(1C12) and G2(1H11) antibodies, with and without the DSB were loaded onto a TSKgel G3000 SWx1 column (7.8 mm ID×30 cm) with the TSKgel G2000SWxl-G4000SWx1 Guard Column in line from Tosoh Bioscience. The column was operated at 0.5 ml/min for 30 min in PBS, pH 7.4. The DAD was set to collect absorbance at 280 nm.

[1241] Results

[1242] Bottom panels of FIGS. 118 and 119 show the previously observed split peak for both Format 4 G5 and G2 molecules, indicating the presence of both “standard” (with two separate scFvs) and alternate diabody conformation across all Format 4 molecules. Introduction of a stabilizing disulfide bond within the ScFv regions of both molecules is shown to remove the split peak (top panels of FIGS. 118 and 119). A retention time that aligns with that of the Format 4 “standard” conformation suggests that the introduction of a disulfide bond stabilizes the standard conformation with two separate scFvs for both G5 and G2 molecules and reduces their isomerization into the alternative diabody format.

### Example 30: Effect of Engineered DSB on Apparent Affinity as Measured by BLI

[1243] Format 4 bispecific antibodies with or without DSB mutations as described in Example 29 were generated. The affinity of wildtype and DSB mutants were analyzed on the ForteBio Octet HTX in 96-channel mode with biolayer interferometry (BLI) detection. High Precision Streptavidin SAX biosensors (P/N 18-5117) were loaded into the instrument. Biotinylated G2-pHLA or G5-pHLA was captured on the SAX biosensor at 2 μg/mL and ran for 120s in the assay buffer composed of 0.02% Tween-20 and 0.1% BSA. The biosensors were then dipped in assay buffer for a baseline. Subsequently, the biosensors were dipped into wells containing varying concentrations of the bispecific antibody samples (3.125, 6.25, 12.5, 25, 50, 100 and 200 nM) to measure the association rate for 50 seconds. The biosensors were finally dipped into wells containing assay buffer to measure the dissociation rate for another 50 seconds. Referencing was completed by having a biosensor with no immobilized ligand dipped into analyte. Kinetic data was processed with Octet™ software using a 1:1 kinetic model with errors within 10%, X² below 3, and R² above 0.9.

[1244] Results are depicted in FIG. 120. Introduction of the DSB mutation increased the K_{D} of the G2 Format 4 bispecific from 18 nM to 35.1 nM. Introduction of the DSB mutation increased the K_{D} of the G5 Format 4 bispecific from 1.09 nM to 1.35 nM.

### Example 31: Effect of DSB on Apparent Affinity as Measured by MSD

[1245] The effect of the stabilizing DSB on cell binding of Format 4 G2 and G5 antibodies was assessed using the Meso Scale Discovery U-PLEX Development Pack, 9-assay (cat. No. K15234N). Biotinylated pHLA and biotinylated Protein A were each diluted to 33 nM using PBS+0.5% BSA. For each plate, 200 μL, of the diluted pHLA or protein A was mixed with 300 μL, Linker and incubated at room temperature for 30 minutes.

[1246] Following the 30 minute incubation, 200 μL, Stop solution was added to each linker-pHLA solution. They were again incubated for 30 minutes at room temperature. These volumes were scaled based on the number of plates. At this point, the linker-pHLA solutions were a 10× solution. They were then pooled together and further diluted with stop solution to the final 1× concentration. All volumes were scaled for additional plates. The pooled linker-pHLA solutions were then coated onto the 10-spot plate as 50 μL/well, the plate sealed and stored at 4° C. overnight.

[1247] Format 4 G2(1H11) and Format 4 G5(1C12) antibodies, with or without the DSB described in Example 29, were serially diluted 3-fold with PBS+1% BSA. The plate was washed 3 times with PBS+0.05% Tween and samples added as 50 μL/well. Plates were incubated at room temperature shaking for 2 hours. The plates were washed as before and 50 μL of 1 μg/mL SulfoTag donkey anti-human Fc, (Jackson ImmunoResearch 709-005-098) was added to each well. The anti-human Fc antibody was sulfo-tag labeled using the MSD Gold Sulfo-tag NETS-Ester Conjugation kit (Meso Scale Discovery, R31AA-2) at a challenge ratio of 10. The plates were incubated for 1 hour shaking at room temperature. The plate wash was repeated and 1504, 2× Read Buffer T (Meso Scale Discovery, R92TC-2) was added to all wells and the plate read immediately on the Quickplex SQ 120.

[1248] Results are depicted in FIG. 121. G2 Format 4 binding as measured by MSD is 0.546 nM without the DSB and 46.42 nM with the DSB. The G5 data did not fit a curve. However, the G5 dose-response curve without the DSB was leftward shifted as compared to the G5 dose-response curve with the DSB.

### Example 32: Effect of Engineered DSB on Cell Binding

[1249] Format 4 bispecific antibodies with and without the stabilizing DSB as described in Example 29 were tested for their ability to specifically bind to the HLA-PEPTIDE targets on the surface of antigen presenting cells.

[1250] The cell lines used to express the desired HLA-PEPTIDE targets were as follows: A375 cells (which express HLA subtype*01:01) engineered to express the G2 restricted peptide NTDNNLAVY, LN229 (which express HLA subtype B*35:01) engineered to express the G5 restricted peptide EVDPIGHVY. All cell lines were also engineered to express luciferase.

[1251] Tumor cells engineered to express target peptide were harvested, washed in PBS, and stained with eBioscience Fixable Viability Dye eFluor 450 for 15 minutes at room temperature. Following another wash in PBS+1-2% FBS, cells were resuspended with the indicated molecules at varying concentrations and incubated for 1 hour at 4° C. After another wash, PE-conjugated goat anti-human IgG secondary antibody (Jackson ImmunoResearch) was added at 1:100 to 1:200 for 30 minutes at 4° C. After washing in PBS+1-2% FBS, cells were resuspended in PBS+1-2% FBS and analyzed by flow cytometry. Flow cytometric analysis was performed on the Attune NxT Flow Cytometer (ThermoFisher) using the Attune NxT Software. Data was analyzed using FlowJo.

[1252] Results

[1253] Results are depicted in FIG. 122. Introduction of the stabilizing H44/L100 DSB reduces cell binding for G2(1H11) as measured by an EC50 shift from 9.8 nM without the DSB to 1.75 μM with the DSB. For G5(1C12), addition of the DSB shifted the EC50 from 14.3 nM to 43.2 nM.

### Example 33: In Vitro Cytotoxicity for G2 and G5 Format 4+/−DSB

[1254] Materials and Methods

[1255] Spheroid Toxicity

[1256] The cell lines used to express the desired HLA-PEPTIDE targets were as follows: A375 cells (which express HLA subtype*01:01) engineered to express the G2 restricted peptide NTDNNLAVY, LN229 (which express HLA subtype B*35:01) engineered to express the G5 restricted peptide EVDPIGHVY. All cell lines were also engineered to express luciferase.

[1257] Luciferase expressing cells were plated in 100 μL, at 10,000-15,000 cells/well in Corning ultra-low attachment plates (Corning #4515) in corresponding culture medium without selection. Plates were incubated for two days at 37° C. and 5% CO2 to allow spheroid formation. Antibody (Format 4 G5(1C12)-hOKT3 or Format 4 G2(1H11), plus or minus the stabilizing disulfide bond described in Example 29), was titrated at and added as 10 μL/well. Normal human PBMCs were thawed and rested for 4-6 hours at 37° C. and added as 100,000 cells/well in 50 μL, giving an Effector:Target ratio of 10:1. Plates were then incubated for 4 days at 37° C. and 5% CO2. At the end of the incubation period 100 μL, Luciferin (Pierce #88292) at 300 μg/mL was added to the plate. Luciferase was read on the SpectraMax iE3. Percent cytotoxicity was calculated as (Media control-sample signal)/(Media control-maximum lysis)*100.

[1258] 2D Cytotoxicity

[1259] Target and control cells were plated at 40,000 cells per well of 96 well plate. For the G5 molecules the target cell line was LN229 transduced with a 10×9mer cassette expressing the target peptide and luciferase. LN229s transduced with luciferase alone serve as a negative control. For the G2 molecules the target cell line with A375 transduced with a 10×9mer cassette expressing the target peptide and luciferase. A375s transduced with luciferase alone serve as a negative control. After allowing the cells to adhere for 30 minutes, human PBMCs (Stem Cell Technologies) were added at a ratio of 5:1 effector to target cells. Bispecific antibody was added to the well at indicated final concentration. Each concentration was performed in duplicate. Cultures were incubated for three days. Luciferase signal was assessed using Promega's Bio-Glo assay system (Cat.# G7941) according to manufacturer's instructions and read on the SpectraMax M5. Signal was normalized to control wells to determine the percent of cytotoxicity. Loss of luciferase signal is interpreted as loss of cell viability.

[1260] Results

[1261] Results for G5 are depicted in FIG. 123. Introduction of the stabilizing disulfide bond resulted in lower cytotoxicity, as indicated by the rightward shift in the dose-response curve.

[1262] Results for G2 are depicted in FIG. 124. G2 Format 4 antibodies with the stabilizing disulfide bond resulted in lower cytotoxicity, as indicated by the rightward shift in the dose-response curve.

[1263] While the invention has been particularly shown and described with reference to a preferred embodiment and various alternate embodiments, it will be understood by persons skilled in the relevant art that various changes in form and details can be made therein without departing from the spirit and scope of the invention.

[1264] All references, issued patents and patent applications cited within the body of the instant specification are hereby incorporated by reference in their entirety, for all purposes.

### SEQUENCES

TABLE 4
VH and VL sequences of scFv hits that bind target G5
Table 4: VH and VL sequences of scFv hits that bind target G5

| Target | Clone | | |
|---|---|---|---|
| group | name | V_{H} | V_{L} |
| G5 | G5(7E07) | QVQLVQSGAEVKKPGASVKVSCK | DIVMTQSPLSLPVTPGEPASISCRSS |
| | | ASGYTFTSYDINWVRQAPGQGLE | QSLLHSNGYNYLDWYLQKPGQSP |
| | | WMGIINPRSGSTKYAQKFQGRVT | QLLIYLGSYRASGVPDRFSGSGSGT |
| | | MTRDTSTSTVYMELSSLRSEDTAV | DFTLKISRVEAEDVGVYYCMQGL |
| | | YYCARDGVRYYGMDVWGQGTTV | QTPITFGQGTRLEIK |
| | | TVSS | |
| G5 | G5(7B03) | QVQLVQSGAEVKKPGSSVKVSCK | DIVMTQSPLSLPVTPGEPASISCRSS |
| | | ASGYTFTSHDINWVRQAPGQGLE | QSLLHSNGYNYLDWYLQKPGQSP |
| | | WMGWMNPNSGDTGYAQKFQGR | QLLIYLGSSRASGVPDRFSGSGSGT |
| | | VTITADESTSTAYMELSSLRSEDTA | DFTLKISRVEAEDVGVYYCMQAL |
| | | VYYCARGVRGYDRSAGYWGQGT | QTPPTFGPGTKVDIK |
| | | LVIVSS | |
| G5 | G5(7A05) | EVQLLESGGGLVKPGGSLRLSCAA | DIQMTQSPSSLSASVGDRVTITCQA |
| | | SGFSFSSYWMSWVRQAPGKGLEW | SQDISNYLNWYQQKPGKAPKLLIY |
| | | ISYISGDSGYTNYADSVKGRFTISR | AASSLQSGVPSRFSGSGSGTDFTLT |
| | | DDSKNTLYLQMNSLKTEDTAVYY | ISSLQPEDFATYYCQQAISFPLTFG |
| | | CASHDYGDYGEYFQHWGQGTLV | QSTKVEIK |
| | | TVSS | |
| G5 | G5(7F06) | EVQLLQSGGGLVQPGGSLRLSCAA | DIQMTQSPSSLSASVGDRVTITCRA |
| | | SGFTFSNSDMNWVRQAPGKGLEW | SQSISSWLAWYQQKPGKAPKLLIY |
| | | VAYISSGSSTIYYADSVKGRFTISR | SASTLQSGVPSRFSGSGSGTDFTLT |
| | | DNSKNTLYLQMNSLRAEDTAVYY | ISSLQPEDFATYYCQQANSFPLTFG |
| | | CARVSWYCSSTSCGVNWFDPWGQ | GGTKVEIK |
| | | GTLVTVSS | |
| G5 | G5(1B12) | EVQLLESGGGLVQPGGSLRLSCAA | DIQMTQSPSSLSASVGDRVTITCRA |
| | | SGFTFSNSDMNWVRQAPGKGLEW | SQSISSWLAWYQQKPGKAPKLLIY |
| | | VASISSSGGYINYADSVKGRFTISR | AASSLQSGVPSRFSGSGSGTDFTLT |
| | | DNSKNTLYLQMNSLRAEDTAVYY | ISSLQPEDFATYYCQQANSFPLTFG |
| | | CAKVNWNDGPYFDYWGQGTLVT | GGTKVEIK |
| | | VSS | |
| G5 | G5(1C12) | QVQLVQSGAEVKKPGSSVKVSCK | DIQMTQSPSSLSASVGDRVTITCRA |
| | | ASGGTFSNFGVSWLRQAPGQGLE | SQSISSWLAWYQQKPGKAPKLLIY |
| | | WMGGIIPILGTANYAQKFQGRVTI | AASTLQSGVPSRFSGSGSGTDFTLT |
| | | TADESTSTAYMELSSLRSEDTAVY | ISSLQPEDFATYYCQQSYSIPLTFG |
| | | YCATPTNSGYYGPYYYYGMDVW | GGTKVEIK |
| | | GQGTTVTVSS | |
| G5 | G5(1E05) | QVQLVQSGAEVKKPGASVKVSCK | DIQMTQSPSSLSASVGDRVTITCRA |
| | | ASGYTFTSYNMHWVRQAPGQGLE | SQGISNYLNWYQQKPGKAPKLLIY |
| | | WMGWINPNSGGTNYAQKFQGRV | YASSLQSGVPSRFSGSGSGTDFTLT |
| | | TMTRDTSTSTVYMELSSLRSEDTA | ISSLQPEDFATYYCQQTYMMPYTF |
| | | VYYCARDVMDVWGQGTTVTVSS | GQGTKVEIK |
| G5 | G5(3G01) | QVQLVQSGAEVKKPGASVKVSCK | DIQMTQSPSSLSASVGDRVTITCRA |
| | | ASGGTFSGYLVSWVRQAPGQGLE | SQSISSYLNWYQQKPGKAPKLLIY |
| | | WMGWINPNSGGTNTAQKFQGRVT | GASSLQSGVPSRFSGSGSGTDFTLT |
| | | MTRDTSTSTVYMELSSLRSEDTAV | ISSLQPEDFATYYCQQSYITPWTFG |
| | | YYCAREGYGMDVWGQGTTVTVS | QGTKVEIK |
| | | S | |
| G5 | G5(3G08) | QVQLVQSGAEVKKPGASVKVSCK | DIQMTQSPSSLSASVGDRVTITCRA |
| | | ASGYIFRNYPMHWVRQAPGQGLE | SQGISNYLAWYQQKPGKAPKLLIY |
| | | WMGWINPDSGGTKYAQKFQGRV | AASSLQSGVPSRFSGSGSGTDFTLT |
| | | TMTRDTSTSTVYMELSSLRSEDTA | ISSLQPEDFATYYCQQSYITPYTFG |
| | | VYYCARDNGVGVDYWGQGTLVT | QGTKLEIK |
| | | VSS | |
| G5 | G5(4B02) | QVQLVQSGAEVKKPGASVKVSCK | DIVMTQSPDSLAVSLGERATINCK |
| | | ASGYTFTGYYMHWVRQAPGQGL | TSQSVLYRPNNENYLAWYQQKPG |
| | | EWMGWMNPNIGNTGYAQKFQGR | QPPKLLIYQASIREPGVPDRFSGSG |
| | | VTMTRDTSTSTVYMELSSLRSEDT | SGTDFTLTISSLQAEDVAVYYCQQ |
| | | AVYYCARGIADSGSYYGNGRDYY | YYTTPYTFGQGTKLEIK |
| | | YGMDVWGQGTTVTVSS | |
| G5 | G5(4E04) | QVQLVQSGAEVKKPGASVKVSCK | DIQMTQSPSSLSASVGDRVTITCRA |
| | | ASGGTFSSYGISWVRQAPGQGLE | SQSISRFLNWYQQKPGKAPKLLIY |
| | | WMGWINPNSGVTKYAQKFQGRV | GASRPQSGVPSRFSGSGSGTDFTLT |
| | | TMTRDTSTSTVYMELSSLRSEDTA | ISSLQPEDFATYYCQQSYSTPLTFG |
| | | VYYCARGDYYFDYWGQGTLVTV | QGTKVEIK |
| | | SS | |
| G5 | G5(1D06) | QVQLVQSGAEVKKPGASVKVSCK | DIVMTQSPLSLPVTPGEPASISCRSS |
| | | ASGYTFTSYDINWVRQAPGQGLE | QSLLHSNGYNYLDWYLQKPGQSP |
| | | WMGWINPNSGDTKYSQKFQGRVT | QLLIYLGSHRASGVPDRFSGSGSGT |
| | | MTRDTSTSTVYMELSSLRSEDTAV | DFTLKISRVEAEDVGVYYCMQAL |
| | | YYCARDGTRYYGMDVWGQGTTV | QTPLTFGGGTKVEIK |
| | | TVSS | |
| G5 | G5(1H11) | EVQLLESGGGLVKPGGSLRLSCAA | EIVMTQSPATLSVSPGERATLSCRA |
| | | SGFTFSDYYMSWVRQAPGKGLEW | SQSVSSNLAWYQQKPGQAPRLLIY |
| | | VSYISSSSSYTNYADSVKGRFTISR | AASARASGIPARFSGSGSGTEFTLT |
| | | DDSKNTLYLQMNSLKTEDTAVYY | ISSLQSEDFAVYYCQQYGSWPRTF |
| | | CARDVVANFDYWGQGTLVTVSS | GQGTKVEIK |
| G5 | G5(2B10) | QVQLVQSGAEVKKPGASVKVSCK | DIQMTQSPSSLSASVGDRVTITCRA |
| | | ASGGTFSSYAISWVRQAPGQGLE | SQSISSYLNWYQQKPGKAPKLLIY |
| | | WMGWMNPDSGSTGYAQRFQGRV | GASRLQSGVPSRFSGSGSGTDFTLT |
| | | TMTRDTSTSTVYMELSSLRSEDTA | ISSLQPEDFATYYCQQSYSTPVTFG |
| | | VYYCARGHSSGWYYYYGMDVW | QGTKVEIK |
| | | GQGTTVTVSS | |
| G5 | G5(2H08) | EVQLLESGGGLVQPGGSLRLSCAA | DIVMTQSPLSLPVTPGEPASISCRSS |
| | | SGFTFTSYSMHWVRQAPGKGLEW | QSLLHSNGYNYLDWYLQKPGQSP |
| | | VSSITSFTNTMYYADSVKGRFTISR | QLLIYLGSNRASGVPDRFSGSGSGT |
| | | DNSKNTLYLQMNSLRAEDTAVYY | DFTLKISRVEAEDVGVYYCMQAL |
| | | CAKDLGSYGGYYWGQGTLVTVSS | QTPYTFGQGTKVEIK |
| G5 | G5(3G05) | QVQLVQSGAEVKKPGASVKVSCK | DIQMTQSPSSLSASVGDRVTITCQA |
| | | ASGYTFTNYYMHWVRQAPGQGL | SEDISNHLNWYQQKPGKAPKLLIY |
| | | EWMGIINPSGGSTSYAQKFQGRVT | DALSLQSGVPSRFSGSGSGTDFTLT |
| | | MTRDTSTSTVYMELSSLRSEDTAV | ISSLQPEDFATYYCQQANSFPFTFG |
| | | YYCARSWFGGFNYHYYGMDVWG | PGTKVDIK |
| | | QGTTVTVSS | |
| G5 | G5(4A07) | QVQLVQSGAEVKKPGASVKVSCK | DIVMTQSPLSLPVTPGEPASISCRSS |
| | | ASGYTFTSYYMHWVRQAPGQGLE | QSLLHSNGYNYLDWYLQKPGQSP |
| | | WMGWMNPNSGNTGYAQKFQGR | QLLIYLGSNRASGVPDRFSGSGSGT |
| | | VTMTRDTSTSTVYMELSSLRSEDT | DFTLKISRVEAEDVGVYYCMQAL |
| | | AVYYCARELPIGYGMDVWGQGTT | QTPLTFGQGTKVEIK |
| | | VTVSS | |
| G5 | G5(4B01) | QVQLVQSGAEVKKPGSSVKVSCK | DIQMTQSPSSLSASVGDRVTITCRA |
| | | ASGGTFSSYAISWVRQAPGQGLE | SQSISSYLNWYQQKPGKAPKLLIY |
| | | WMGGIIPIVGTANYAQKFQGRVTI | AASSLQSGVPSRFSGSGSGTDFTLT |
| | | TADESTSTAYMELSSLRSEDTAVY | ISSLQPEDFATYYCQQSYSTPLTFG |
| | | YCARGGSYYYYGMDVWGQGTTV | GGTKVEIK |
| | | TVSS | |

TABLE 5
CDR sequences of identified scFvs to G5, numbered according to the
Kabat numbering scheme

| Target | Clone | | | | | | |
|---|---|---|---|---|---|---|---|
| group | name | HCDR1 | HCDR2 | HCDR3 | LCDR1 | LCDR2 | LCDR3 |
| G5 | G5(7E07) | YTFTS | GIINPRS | CARDGVR | RSSQSLLH | LGSYR | CMQGLQ |
| | | YDIN | GSTKYA | YYGMDV | SNGYNYL | AS | TPITF |
| | | | | W | D | | |
| G5 | G5(7B03) | YTFTS | GWMNP | CARGVRG | RSSQSLLH | LGSSR | CMQALQ |
| | | HDIN | NSGDTG | YDRSAGY | SNGYNYL | AS | TPPTF |
| | | | YA | W | D | | |
| G5 | G5(7A05) | FSFSSY | SYISGDS | CASHDYG | QASQDISN | AASSL | CQQAISF |
| | | WMS | GYTNYA | DYGEYFQ | YLN | QS | PLTF |
| | | | | HW | | | |
| G5 | G5(7F06) | FTFSNS | AYISSGS | CARVSWY | RASQSISS | SASTLQ | CQQANS |
| | | DMN | STIYYA | CSSTSCGV | WLA | S | FPLTF |
| | | | | NWFDPW | | | |
| G5 | G5(1B12) | FTFSNS | ASISSSG | CAKVNW | RASQSISS | AASSL | CQQANS |
| | | DMN | GYINYA | NDGPYFD | WLA | QS | FPLTF |
| | | | | YW | | | |
| G5 | G5(1C12) | GTFSNF | GGIIPILG | CATPTNS | RASQSISS | AASTL | CQQSYSI |
| | | GVS | TANYA | GYYGPYY | WLA | QS | PLTF |
| | | | | YYGMDV | | | |
| | | | | W | | | |
| G5 | G5(1E05) | YTFTS | GWINPN | CARDVM | RASQGISN | YASSL | CQQTYM |
| | | YNMH | SGGTNY | DVW | YLN | QS | MPYTF |
| | | | A | | | | |
| G5 | G5(3G01) | GTFSG | GWINPN | CAREGYG | RASQSISS | GASSL | CQQSYIT |
| | | YLVS | SGGTNT | MDVW | YLN | QS | PWTF |
| | | | A | | | | |
| G5 | G5(3G08) | YIFRNY | GWINPD | CARDNGV | RASQGISN | AASSL | CQQSYIT |
| | | PMH | SGGTKY | GVDYW | YLA | QS | PYTF |
| | | | A | | | | |
| G5 | G5(4B02) | YTFTG | GWMNP | CARGIAD | KTSQSVL | QASIRE | CQQYYT |
| | | YYMH | NIGNTG | SGSYYGN | YRPNNEN | P | TPYTF |
| | | | YA | GRDYYYG | YLA | | |
| | | | | MDVW | | | |
| G5 | G5(4E04) | GTFSSY | GWINPN | CARGDYY | RASQSISR | GASRP | CQQSYS |
| | | GIS | SGVTKY | FDYW | FLN | QS | TPLTF |
| | | | A | | | | |
| G5 | G5(1D06) | YTFTS | GWINPN | CARDGTR | RSSQSLLH | LGSHR | CMQALQ |
| | | YDIN | SGDTKY | YYGMDV | SNGYNYL | AS | TPLTF |
| | | | S | W | D | | |
| G5 | G5(1H11) | FTFSDY | SYISSSSS | CARDVVA | RASQSVSS | AASAR | CQQYGS |
| | | YMS | YTNYA | NFDYW | NLA | AS | WPRTF |
| G5 | G5(2B10) | GTFSSY | GWMNP | CARGHSS | RASQSISS | GASRL | CQQSYS |
| | | AIS | DSGSTG | GWYYYY | YLN | QS | TPVTF |
| | | | YA | GMDVW | | | |
| G5 | G5(2H08) | FTFTSY | SSITSFTN | CAKDLGS | RSSQSLLH | LGSNR | CMQALQ |
| | | SMH | TMYYA | YGGYYW | SNGYNYL | AS | TPYTF |
| | | | | | D | | |
| G5 | G5(3G05) | YTFTN | GIINPSG | CARSWFG | QASEDISN | DALSL | CQQANS |
| | | YYMH | GSTSYA | GFNYHYY | HLN | QS | FPFTF |
| | | | | GMDVW | | | |
| G5 | G5(4A07) | YTFTS | GWMNP | CARELPIG | RSSQSLLH | LGSNR | CMQALQ |
| | | YYMH | NSGNTG | YGMDVW | SNGYNYL | AS | TPLTF |
| | | | YA | | D | | |
| G5 | G5(4B01) | GTFSSY | GGIIPVM | CARGGSY | RASQSISS | AASSL | CQQSYS |
| | | AIS | GTGNYA | YYYGMD | YLN | QS | TPLTF |
| | | | | VW | | | |

TABLE 6
VH and VL sequences of scFv hits that bind target G8

| Target | Clone | | |
|---|---|---|---|
| group | name | V_{H} | V_{L} |
| G8 | G8(1A03) | QVQLVQSGAEVKKPGASVKVSCK | DIQMTQSPSSLSASVGDRVTITCRA |
| | | ASGGTFSRSAITWVRQAPGQGLE | SQSITSYLNWYQQKPGKAPKLLIY |
| | | WMGWINPNSGATNYAQKFQGRV | DASNLETGVPSRFSGSGSGTDFTLT |
| | | TMTRDTSTSTVYMELSSLRSEDTA | ISSLQPEDFATYYCQQNYNSVTFG |
| | | VYYCARDDYGDYVAYFQHWGQG | QGTKLEIK |
| | | TLVTVSS | |
| G8 | G8(1A04) | QVQLVQSGAEVKKPGASVKVSCK | DIQMTQSPSSLSASVGDRVTITCW |
| | | ASGYPFIGQYLHWVRQAPGQGLE | ASQGISSYLAWYQQKPGKAPKLLI |
| | | WMGIINPSGDSATYAQKFQGRVT | YAASSLQSGVPSRFSGSGSGTDFTL |
| | | MTRDTSTSTVYMELSSLRSEDTAV | TISSLQPEDFATYYCQQSYNTPWT |
| | | YYCARDLSYYYGMDVWGQGTTV | FGPGTKVDIK |
| | | TVSS | |
| G8 | G8(1A06) | QVQLVQSGAEVKKPGASVKVSCK | DIQMTQSPSSLSASVGDRVTITCRA |
| | | ASGYTFTNYYMHWVRQAPGQGL | SQAISNSLAWYQQKPGKAPKLLIY |
| | | EWMGWMNPIGGGTGYAQKFQGR | AASTLQSGVPSRFSGSGSGTDFTLT |
| | | VTMTRDTSTSTVYMELSSLRSEDT | ISSLQPEDFATYYCGQSYSTPPTFG |
| | | AVYYCARVYDFWSVLSGFDIWGQ | QGTKLEIK |
| | | GTLVTVSS | |
| G8 | G8(1B03) | EVQLLESGGGLVQPGGSLRLSCAA | DIQMTQSPSSLSASVGDRVTITCRA |
| | | SGFTFSDYYMSWVRQAPGKGLEW | SQSISSYLNWYQQKPGKAPKLLIY |
| | | VSGINWNGGSTGYADSVKGRFTIS | KASSLESGVPSRFSGSGSGTDFTLT |
| | | RDNSKNTLYLQMNSLRAEDTAVY | ISSLQPEDFATYYCQQSYSAPYTFG |
| | | YCARVEQGYDIYYYYYMDVWGK | PGTKVDIK |
| | | GTTVTVSS | |
| G8 | G8(1C11) | QVQLVQSGAEVKKPGASVKVSCK | DIQMTQSPSSLSASVGDRVTITCQA |
| | | ASGGTLSSYPINWVRQAPGQGLE | SQDISNYLNWYQQKPGKAPKLLIY |
| | | WMGWISTYSGHADYAQKLQGRV | AASSLQSGVPSRFSGSGSGTDFTLT |
| | | TMTRDTSTSTVYMELSSLRSEDTA | ISSLQPEDFATYYCQQSYSIPPTFG |
| | | VYYCARSYDYGDYLNFDYWGQG | GGTKVDIK |
| | | TLVTVSS | |
| G8 | G8(1D02) | EVQLLESGGGLVQPGGSLRLSCAA | DIQMTQSPSSLSASVGDRVTITCQA |
| | | SGFTFSSYWMSWVRQAPGKGLEW | SQDISNYLNWYQQKPGKAPKLLIY |
| | | VSSISGRGDNTYYADSVKGRFTISR | AASSLQSGVPSRFSGSGSGTDFTLT |
| | | DNSKNTLYLQMNSLRAEDTAVYY | ISSLQPEDFATYYCQQSYSAPYTFG |
| | | CARASGSGYYYYYGMDVWGQGT | GGTKVEIK |
| | | TVTVSS | |
| G8 | G8(1H08) | QVQLVQSGAEVKKPGASVKVSCK | DIQMTQSPSSLSASVGDRVTITCRA |
| | | ASGYTFGNYFMHWVRQAPGQGLE | SQGINSYLAWYQQKPGKAPKLLIY |
| | | WMGMVNPSGGSETFAQKFQGRVT | DASNLETGVPSRFSGSGSGTDFTLT |
| | | MTRDTSTSTVYMELSSLRSEDTAV | ISSLQPEDFATYYCQQHNSYPPTFG |
| | | YYCAASTWIQPFDYWGQGTLVTV | QGTKLEIK |
| | | SS | |
| G8 | G8(2B05) | EVQLLESGGGLVQPGGSLRLSCAA | DIQMTQSPSSLSASVGDRVTITCRA |
| | | SGFDFSIYSMNWVRQAPGKGLEW | SQSISRWLAWYQQKPGKAPKLLIY |
| | | VSAISGSGGSTYYADSVKGRFTISR | AASSLQSGVPSRFSGSGSGTDFTLT |
| | | DNSKNTLYLQMNSLRAEDTAVYY | ISSLQPEDFATYYCQQYSTYPITIG |
| | | CASNGNYYGSGSYYNYWGQGTL | QGTKVEIK |
| | | VTVSS | |
| G8 | G8(2E06) | QVQLVQSGAEVKKPGASVKVSCK | DIQMTQSPSSLSASVGDRVTITCRA |
| | | ASGYTLTTYYMHWVRQAPGQGLE | SQGISNSLAWYQQKPGKAPKLLIY |
| | | WMGWINPNSGGTNYAQKFQGRV | AASSLQSGVPSRFSGSGSGTDFTLT |
| | | TMTRDTSTSTVYMELSSLRSEDTA | ISSLQPEDFATYYCQQANSFPWTF |
| | | VYYCARAVYYDFWSGPFDYWGQ | GQGTKLEIK |
| | | GTLVTVSS | |
| G8 | G8(2C10) | QVQLVQSGAEVKKPGASVKVSCK | DIQMTQSPSSLSASVGDRVTITCRA |
| | | ASGYTFTSYYMHWVRQAPGQGLE | SQDVSTWLAWYQQKPGKAPKLLI |
| | | WMGWINPYSGGTNYAQKFQGRV | YAASSLQSGVPSRFSGSGSGTDFTL |
| | | TMTRDTSTSTVYMELSSLRSEDTA | TISSLQPEDFATYYCQQSHSTPQTF |
| | | VYYCAKGGIYYGSGSYPSWGQGT | GQGTKVEIK |
| | | LVTVSS | |
| G8 | G8(2E04) | QVQLVQSGAEVKKPGSSVKVSCK | DIQMTQSPSSLSASVGDRVTITCRA |
| | | ASGGTFSSYGVSWVRQAPGQGLE | SQSISSWLAWYQQKPGKAPKLLIY |
| | | WMGWISPYSGNTDYAQKFQGRVT | DASNLETGVPSRFSGSGSGTDFTLT |
| | | ITADESTSTAYMELSSLRSEDTAVY | ISSLQPEDFATYYCQQSYSTPLTFG |
| | | YCARGLYYMDVWGKGTTVTVSS | GGTKLEIK |
| G8 | G8(4F05) | QVQLVQSGAEVKKPGASVKVSCK | DIQMTQSPSSLSASVGDRVTITCRA |
| | | ASGYTFSNMYLHWVRQAPGQGLE | SQGISNYLAWYQQKPGKAPKLLIY |
| | | WMGWINPNTGDTNYAQTFQGRV | AASTLQSGVPSRFSGSGSGTDFTLT |
| | | TMTRDTSTSTVYMELSSLRSEDTA | ISSLQPEDFATYYCQQSYSTPLTFG |
| | | VYYCARGLYGDYFLYYGMDVWG | GGTKVEIK |
| | | QGTKVTVSS | |
| G8 | G8(5C03) | QVQLVQSGAEVKKPGASVKVSCK | DIQMTQSPSSLSASVGDRVTITCRA |
| | | ASGYTFTSYYMHWVRQAPGQGLE | SQGISNWLAWYQQKPGKAPKLLI |
| | | WMGWMNPNSGNTGYAQKFQGR | YAASTLQSGVPSRFSGSGSGTDFTL |
| | | VTMTRDTSTSTVYMELSSLRSEDT | TISSLQPEDFATYYCQQTYSTPWTF |
| | | AVYYCARGLLGFGEFLTYGMDV | GQGTKLEIK |
| | | WGQGTLVTVSS | |
| G8 | G8(5F02) | QVQLVQSGAEVKKPGASVKVSCK | EIVMTQSPATLSVSPGERATLSCRA |
| | | ASGYTFTGYYIHWVRQAPGQGLE | SQSVGNSLAWYQQKPGQAPRLLIY |
| | | WMGVINPSGGSTTYAQKLQGRVT | GASTRATGIPARFSGSGSGTEFTLTI |
| | | MTRDTSTSTVYMELSSLRSEDTAV | SSLQSEDFAVYYCQQYGSSPYTFG |
| | | YYCARDRDSSWTYYYYGMDVWG | QGTKVEIK |
| | | QGTTVTVSS | |
| G8 | G8(5G08) | QVQLVQSGAEVKKPGASVKVSCK | DIQMTQSPSSLSASVGDRVTITCRA |
| | | ASGYTFTSNYMHWVRQAPGQGLE | SQSISGYLNWYQQKPGKAPKLLIY |
| | | WMGWMNPNSGNTGYAQKFQGR | AASSLQSGVPSRFSGSGSGTDFTLT |
| | | VTMTRDTSTSTVYMELSSLRSEDT | ISSLQPEDFATYYCQQSHSTPLTFG |
| | | AVYYCARGLYGDYFLYYGMDVW | QGTKVEIK |
| | | GQGTTVTVSS | |
| G8 | G8(1C01) | QVQLVQSGAEVKKPGASVKVSCK | DIQMTQSPSSLSASVGDRVTITCRA |
| | | ASGGTFSSHAISWVRQAPGQGLE | SQNIYTYLNWYQQKPGKAPKLLIY |
| | | WMGVIIPSGGTSYTQKFQGRVTMT | DASNLETGVPSRFSGSGSGTDFTLT |
| | | RDTSTSTVYMELSSLRSEDTAVYY | ISSLQPEDFATYYCQQANGFPLTFG |
| | | CARGDYYDSSGYYFPVYFDYWGQ | GGTKVEIK |
| | | GTLVTVSS | |
| G8 | G8(2C11) | QVQLVQSGAEVKKPGASVKVSCK | DIQMTQSPSSLSASVGDRVTITCRA |
| | | ASGYTFTSYAMNWVRQAPGQGLE | SQSISSYLNWYQQKPGKAPKLLIY |
| | | WMGWINPNSGGTNYAQKFQGRV | AASSLQSGVPSRFSGSGSGTDFTLT |
| | | TMTRDTSTSTVYMELSSLRSEDTA | ISSLQPEDFATYYCQQSYSTPLTFG |
| | | VYYCARDPFWSGHYYYYGMDVW | GGTKVEIK |
| | | GQGTTVTVSS | |

TABLE 7
CDR sequences of identified scFvs to G8, numbered according to the Kabat
numbering scheme

| Target | Clone | | | | | | |
|---|---|---|---|---|---|---|---|
| group | name | HCDR1 | HCDR2 | HCDR3 | LCDR1 | LCDR2 | LCDR3 |
| G8 | G8(1A0 | GTFSRS | GWINPN | CARDDYG | RASQSITS | DASNL | CQQNYN |
| | 3) | AIT | SGATNY | DYVAYFQ | YLN | ET | SVTF |
| | | | A | HW | | | |
| G8 | G8(1A04) | YPFIGQ | GIINPSG | CARDLSY | WASQGISS | AASSL | CQQSYN |
| | | YLH | DSATYA | YYGMDV | YLA | QS | TPWTF |
| | | | | W | | | |
| G8 | G8(1A06) | YTFTN | GWMNPI | CARVYDF | RASQAISN | AASTL | CGQSYS |
| | | YYMH | GGGTGY | WSVLSGF | SLA | QS | TPPTF |
| | | | A | DIW | | | |
| G8 | G8(1B03) | FTFSDY | SGINWN | CARVEQG | RASQSISS | KASSLE | CQQSYS |
| | | YMS | GGSTGY | YDIYYYY | YLN | S | APYTF |
| | | | A | YMDVW | | | |
| G8 | G8(1C11) | GTLSS | GWISTYS | CARSYDY | QASQDISN | AASSL | CQQSYSI |
| | | YPIN | GHADYA | GDYLNFD | YLN | QS | PPTF |
| | | | | YW | | | |
| G8 | G8(1D02) | FTFSSY | SSISGRG | CARASGS | QASQDISN | AASSL | CQQSYS |
| | | WMS | DNTYYA | GYYYYYG | YLN | QS | APYTF |
| | | | | MDVW | | | |
| G8 | G8(1H08) | YTFGN | GMVNPS | CAASTWI | RASQGINS | DASNL | CQQHNS |
| | | YFMH | GGSETFA | QPFDYW | YLA | ET | YPPTF |
| G8 | G8(2B05) | FDFSIY | SAISGSG | CASNGNY | RASQSISR | AASSL | CQQYST |
| | | SMN | GSTYYA | YGSGSYY | WLA | QS | YPITI |
| | | | | NYW | | | |
| G8 | G8(2E06) | YTLTT | GWINPN | CARAVYY | RASQGISN | AASSL | CQQANS |
| | | YYMH | SGGTNY | DFWSGPF | SLA | QS | FPWTF |
| | | | A | DYW | | | |
| G8 | G8(2C10) | YTFTS | GWINPY | CAKGGIY | RASQDVS | AASSL | CQQSHS |
| | | YYMH | SGGTNY | YGSGSYP | TWLA | QS | TPQTF |
| | | | A | SW | | | |
| G8 | G8(2E04) | GTFSSY | GWISPYS | CARGLYY | RASQSISS | DASNL | CQQSYS |
| | | GVS | GNTDYA | MDVW | WLA | ET | TPLTF |
| G8 | G8(4F05) | YTFSN | GWINPN | CARGLYG | RASQGISN | AASTL | CQQSYS |
| | | MYLH | TGDTNY | DYFLYYG | YLA | QS | TPLTF |
| | | | A | MDVW | | | |
| G8 | G8(5C03) | YTFTS | GWMNP | CARGLLG | RASQGISN | AASTL | CQQTYS |
| | | YYMH | NSGNTG | FGEFLTY | WLA | QS | TPWTF |
| | | | YA | GMDVW | | | |
| G8 | G8(5F02) | YTFTG | GVINPSG | CARDRDS | RASQSVG | GASTR | CQQYGS |
| | | YYIH | GSTTYA | SWTYYYY | NSLA | AT | SPYTF |
| | | | | GMDVW | | | |
| G8 | G8(5G08) | YTFTS | GWMNP | CARGLYG | RASQSISG | AASSL | CQQSHS |
| | | NYMH | NSGNTG | DYFLYYG | YLN | QS | TPLTF |
| | | | YA | MDVW | | | |
| G8 | G8(1C01) | GTFSSH | GVIIPSG | CARGDYY | RASQNIYT | DASNL | CQQANG |
| | | AIS | GTSYT | DSSGYYF | YLN | ET | FPLTF |
| | | | | PVYFDYW | | | |
| G8 | G8(2C11) | YTFTS | GWINPN | CAKDPFW | RASQSISS | AASSL | CQQSYS |
| | | YAMN | SGGTNY | SGHYYYY | YLN | QS | TPLTF |
| | | | A | GMDVW | | | |

TABLE 8
VH and VL sequences of scFv hits that bind target G10

| Target | Clone | | |
|---|---|---|---|
| group | name | V_{H} | V_{L} |
| G10 | G10(1A07) | EVQLLESGGGLVKPGGSLRLSCAAS | [sequence omitted] |
| | | GFTFSSYWMSWVRQAPGKGLEWVS | QGISNYLAWYQQKPGKAPKLLIYAAS |
| | | GISARSGRTYYADSVKGRFTISRDDS | SLQGGVPSRFSGSGSGTDFTLTISSL |
| | | KNTLYLQMNSLKTEDTAVYYCARDQ | QPEDFATYYCQQYFTTPYTFGQGTKL |
| | | DTIFGVVITWFDPWGQGTLVTVSS | EIK |
| G10 | G10(1B07) | [sequence omitted] | [sequence omitted] |
| | | GYTFTSYYMHWVRQAPGQGLEWMG | QSISRWLAWYQQKPGKAPKLLIFDAS |
| | | IIHPGGGTTSYAQKFQGRVTMTRDTS | RLQSGVPSRFSGSGSGTDFTLTISSL |
| | | TSTVYMELSSLRSEDTAVYYCARDKV | QPEDFATYYCQQAEAFPYTFGQGTK |
| | | YGDGFDPWGQGTLVTVSS | VEIK |
| G10 | G10(1E12) | [sequence omitted] | [sequence omitted] |
| | | GYIFTGYYMHWVRQAPGQGLEWMG | QSISSYLNWYQQKPGKAPKLLIYAAS |
| | | MIGPSDGSTSYAQKFQGRVTMTRDT | SLQSGVPSRFSGSGSGTDFTLTISSL |
| | | STSTVYMELSSLRSEDTAVYYCARED | QPEDFATYYCQQSYSTPITFGQGTRL |
| | | DSMDVWGKGTTVTVSS | EIK |
| G10 | G10(1F6) | [sequence omitted] | [sequence omitted] |
| | | GYTFIGYYMHWVRQAPGQGLEWMG | QSISNYLNWYQQKPGKAPKLLIYKAS |
| | | MIGPSDGSTSYAQKFQGRVTMTRDT | SLESGVPSRFSGSGSGTDFTLTISSL |
| | | STSTVYMELSSLRSEDTAVYYCARDS | QPEDFATYYCQQSYIIPYTFGQGTKL |
| | | SGLDPWGQGTLVTVSS | EIK |
| G10 | G10(1H01) | [sequence omitted] | [sequence omitted] |
| | | GYTFTGYYMHWVRQAPGQGLEWMG | QSISNYLNWYQQKPGKAPKLLIYAAS |
| | | MIGPSDGSTSYAQKFQGRVTMTRDT | SLQSGVPSRFSGSGSGTDFTLTISSL |
| | | STSTVYMELSSLRSEDTAVYYCARGV | QPEDFATYYCHQTYSTPLTFGQGTKV |
| | | GNLDYWGQGTLVTVSS | EIK |
| G10 | G10(1H08) | [sequence omitted] | [sequence omitted] |
| | | GVTFSTSAISWVRQAPGQGLEWMG | QGISNYLAWYQQKPGKAPKWYSAS |
| | | WISPYNGNTDYAQMLQGRVTMTRDT | NLQSGVPSRFSGSGSGTDFTLTISSL |
| | | STSTVYMELSSLRSEDTAVYYCARDA | QPEDFATYYCQQAYSFPVVTFGQGTK |
| | | HQYYDFWSGYYSGTYYYGMDVWGQ | VEIK |
| | | GTTVTVSS | |
| G10 | G10(2C04) | [sequence omitted] | [sequence omitted] |
| | | GGTFSNSIINWVRQAPGQGLEWMG | QNISSYLNWYQQKPGKAPKLLIYAAS |
| | | WMNPNSGNTNYAQKFQGRVTMTRD | SLQSGVPSRFSGSGSGTDFTLTISSL |
| | | TSTSTVYMELSSLRSEDTAVYYCARE | QPEDFATYYCQQGYSTPLTFGQGTR |
| | | QWPSYWYFDLWGRGTLVTVSS | LEIK |
| G10 | G10(2G11) | [sequence omitted] | [sequence omitted] |
| | | GGTFSTHDINWVRQAPGQGLEWMG | QDISRYLAWYQQKPGKAPKLLIYDAS |
| | | VINPSGGSAIYAQKFQGRVTMTRDTS | NLETGVPSRFSGSGSGTDFTLTISSL |
| | | TSTVYMELSSLRSEDTAVYYCARDRG | QPEDFATYYCQQANSFPRTFGQGTK |
| | | YSYGYFDYWGQGTLVTVSS | VEIK |
| G10 | G10(3E04) | [sequence omitted] | DIQMTQSPSSLSASVGDRVTITCQAS |
| | | GNTFIGYYVHWVRQAPGQGLEWVGII | QDISNYLNWYQQKPGKAPKLLIYAAS |
| | | NPNGGSISYAQKFQGRVTMTRDTST | NLQSGVPSRFSGSGSGTDFTLTISSL |
| | | STVYMELSSLRSEDTAVYYCARGSG | QPEDFATYYCQQANSLPYTFGQGTK |
| | | DPNYYYYYGLDVWGQGTTVTVSS | VEIK |
| G10 | G10(4A02) | [sequence omitted] | [sequence omitted] |
| | | GYTLSYYYMHWVRQAPGQGLEWMG | QSISSYLNWYQQKPGKAPKLLIYAAS |
| | | MIGPSDGSTSYAQRFQGRVTMTRDT | TLQNGVPSRFSGSGSGTDFTLTISSL |
| | | STGTVYMELSSLRSEDTAVYYCARDT | QPEDFATYYCQQSYSTPFTFGPGTK |
| | | GDHFDYWGQGTLVTVSS | VDIK |
| G10 | G10(4C5) | [sequence omitted] | [sequence omitted] |
| | | GYTFTGYYMHWVRQAPGQGLEWMG | QRISSYLNWYQQKPGKAPKWYSAS |
| | | IIGPSDGSTTYAQKFQGRVTMTRDTS | TLQSGVPSRFSGSGSGTDFTLTISSL |
| | | TSTVYMELSSLRSEDTAVYYCARAEN | QPEDFATYYCQQSYSTPFTFGPGTK |
| | | GMDVWGQGTTVTVSS | VDIK |
| G10 | G10(4D04) | [sequence omitted] | [sequence omitted] |
| | | GYTFTGYYVHWVRQAPGQGLEWMG | QSISSYLAWYQQKPGKAPKLLIYDAS |
| | | IIAPSDGSTNYAQKFQGRVTMTRDTS | KLETGVPSRFSGSGSGTDFTLTISSL |
| | | TSTVYMELSSLRSEDTAVYYCARDPG | QPEDFATYYCQQSYGVPTFGQGTKL |
| | | GYMDVWGKGTTVTVSS | EIK |
| G10 | G10(4D10) | [sequence omitted] | [sequence omitted] |
| | | GYTFTGYYLHWVRQAPGQGLEWMG | QGISSWLAWYQQKPGKAPKLLIYDAS |
| | | MIGPSDGSTSYAQKFQGRVTMTRDT | NLETGVPSRFSGSGSGTDFTLTISSL |
| | | STSTVYMELSSLRSEDTAVYYCARDG | QPEDFATYYCQQSYSTPLTFGGGTK |
| | | DAFDIWGQGTMVTVSS | VEIK |
| G10 | G10(4E7) | [sequence omitted] | [sequence omitted] |
| | | GYTFTGYYMHWVRQAPGQGLEWMG | QSISSYLNWYQQKPGKAPKLLIYAAS |
| | | RISPSDGSTTYAPKFQGRVTITADEST | SLQSGVPSRFSGSGSGTDFTLTISSL |
| | | STAYMELSSLRSEDTAVYYCARDMG | QPEDFATYYCQQSYSTPLTFGGGTK |
| | | DAFDIWGQGTTVTVSS | VEIK |
| G10 | G10(4E12) | [sequence omitted] | [sequence omitted] |
| | | GYTFTGYYMHWVRQAPGQGLEWMG | QGISTYLAWYQQKPGKAPKLLIYDAS |
| | | MIGPSDGSTSYAQRFQGRVTMTRDT | SLQSGVPSRFSGSGSGTDFTLTISSL |
| | | STSTVYMELSSLRSEDTAVYYCAREE | QPEDFATYYCQQYYSYPVVTFGQGTR |
| | | DGMDVWGQGTTVTVSS | LEIK |
| G10 | G10(4G06) | [sequence omitted] | [sequence omitted] |
| | | GYTLSYYYMHWVRQAPGQGLEWMG | QSISSYLNWYQQKPGKAPKLLIYAAS |
| | | MIGPSDGSTSYAQRFQGRVTMTRDT | TLQNGVPSRFSGSGSGTDFTLTISSL |
| | | STGTVYMELSSLRSEDTAVYYCARDT | QPEDFATYYCQQSYSTPFTFGPGTK |
| | | GDHFDYWGQGTLVTVSS | VDIK |
| G10 | G10(5A8) | [sequence omitted] | DIVMTQSPLSLPVTPGEPASISCRSSQ |
| | | GGTFNNFAISWVRQAPGQGLEWMG | SLLHSNGYNYLDWYLQKPGQSPQLLI |
| | | GIIPIFDATNYAQKFQGRVTFTADEST | YLGSNRASGVPDRFSGSGSGTDFTL |
| | | STAYMELSSLRSEDTAVYYCARGEYS | KISRVEAEDVGVYYCMQTLKTPLSFG |
| | | SGFFFVGWFDLWGRGTQVTVSS | GGTKVEIK |
| G10 | G10(5C08) | [sequence omitted] | [sequence omitted] |
| | | GYNFTGYYMHWVRQAPGQGLEWM | QSISSYLNWYQQKPGKAPKLLIYAAS |
| | | GIIAPSDGSTNYAQKFQGRVTMTRDT | SLQSGVPSRFSGSGSGTDFTLTISSL |
| | | STSTVYMELSSLRSEDTAVYYCARET | QPEDFATYYCQQSYSTPLTFGGGTK |
| | | GDDAFDIWGQGTMVTVSS | VEIK |

TABLE 9
CDR sequences of identified scFvs to G10, numbered according to the Kabat
numbering scheme

| Target | Clone | | | | | | |
|---|---|---|---|---|---|---|---|
| group | name | HCDR1 | HCDR2 | HCDR3 | LCDR1 | LCDR2 | LCDR3 |
| G10 | G10(1A07) | FTFSSYW | SGISARS | CARDQDTI | RASQGISN | AASSLQ | CQQYFTT |
| | | MS | GRTYYA | FGVVITWF | YLA | G | PYTF |
| | | | | DPW | | | |
| G10 | G10(1B07) | YTFTSYY | GIIHPGG | CARDKVYG | RASQSISR | DASRLQ | CQQAEAF |
| | | MH | GTTSYA | DGFDPW | WLA | S | PYTF |
| G10 | G10(1E12) | YIFTGYYM | GMIGPSD | CAREDDS | RASQSISS | AASSLQ | CQQSYST |
| | | H | GSTSYA | MDVW | YLN | S | PITF |
| G10 | G10(1F06) | YTFIGYYM | GMIGPSD | CARDSSGL | RASQSISN | KASSLE | CQQSYIIP |
| | | H | GSTSYA | DPW | YLN | S | YTF |
| G10 | G10(1H01) | YTFTGYY | GMIGPSD | CARGVGNL | RASQSISN | AASSLQ | CHQTYST |
| | | MH | GSTSYA | DYW | YLN | S | PLTF |
| G10 | G10(1H08) | VTFSTSAI | GWISPYN | CARDAHQ | RASQGISN | SASNLQ | CQQAYSF |
| | | S | GNTDYA | YYDFWSG | YLA | S | PVVTF |
| | | | | YYSGTYYY | | | |
| | | | | GMDVW | | | |
| G10 | G10(2C04) | GTFSNSII | GWMNPN | CAREQWP | RASQNISS | AASSLQ | CQQGYS |
| | | N | SGNTNYA | SYWYFDL | YLN | S | TPLTF |
| | | | | W | | | |
| G10 | G10(2G11) | GTFSTHDI | GVINPSG | CARDRGY | RASQDISR | DASNLE | CQQANS |
| | | N | GSAIYA | SYGYFDY | YLA | T | FPRTF |
| | | | | W | | | |
| G10 | G10(3E04) | NTFIGYYV | GIINPNG | CARGSGD | QASQDISN | AASNLQ | CQQANSL |
| | | H | GSISYA | PNYYYYYG | YLN | S | PYTF |
| | | | | LDVW | | | |
| G10 | G10(4A02) | YTLSYYY | GMIGPSD | CARDTGD | RASQSISS | AASTLQ | CQQSYST |
| | | MH | GSTSYA | HFDYW | YLN | N | PFTF |
| G10 | G10(4C05) | YTFTGYY | GIIGPSDG | CARAENG | RASQRISS | SASTLQ | CQQSYST |
| | | MH | STTYA | MDVW | YLN | S | PFTF |
| G10 | G10(4D04) | YTFTGYY | GIIAPSDG | CARDPGG | RASQSISS | DASKLE | CQQSYG |
| | | VH | STNYA | YMDVW | YLA | T | VPTF |
| G10 | G10(4D10) | YTFTGYYL | GMIGPSD | CARDGDAF | RASQGISS | DASNLE | CQQSYST |
| | | H | GSTSYA | DIW | WLA | T | PLTF |
| G10 | G10(4E07) | YTFTGYY | GRISPSD | CARDMGD | RASQSISS | AASSLQ | CQQSYST |
| | | MH | GSTTYA | AFDIW | YLN | S | PLTF |
| G10 | G10(4E12) | YTFTGYY | GMIGPSD | CAREEDG | RASQGIST | DASSLQ | CQQYYS |
| | | MH | GSTSYA | MDVW | YLA | S | YPVVTF |
| G10 | G10(4G06) | YTLSYYY | GMIGPSD | CARDTGD | RASQSISS | AASTLQ | CQQSYST |
| | | MH | GSTSYA | HFDYW | YLN | N | PFTF |
| G10 | G10(5A08) | GTFNNFAI | GGIIPIFD | CARGEYSS | RSSQSLLH | LGSNRA | CMQTLKT |
| | | S | ATNYA | GFFFVGWF | SNGYNYLD | S | PLSF |
| | | | | DLW | | | |
| G10 | G10(5C08) | YNFTGYY | GIIAPSDG | CARETGDD | RASQSISS | AASSLQ | CQQSYST |
| | | MH | STNYA | AFDIW | YLN | S | PLTF |

TABLE 27
VH and VL sequences for G2 scFv Selective Binders, selective for
HLA-PEPTIDE Target HLA-A*01:01 NTDNNLAVY.

| Target | Clone | | |
|---|---|---|---|
| group | name | VH | VL |
| G2 | G2(2E07) | QVQLVQSGAEVKKPGASVKV | DIQMTQSPSSLSASVGDRVTI |
| | | SCKASGGTFSSATISWVRQAP | TCRASQSISTWLAWYQQKPG |
| | | GQGLEWMGWIYPNSGGTVY | KAPKLLIYAASSLRSGVPSRF |
| | | AQKFQGRVTMTRDTSTSTVY | SGSGSGTDFTLTISSLQPEDFA |
| | | MELSSLRSEDTAVYYCAATE | TYYCQQSYNTPYTFGQGTKL |
| | | WLGVWGQGTTVTVSS | EIK |
| G2 | G2(2E03) | EVQLLQSGAEVKKPGSSVKV | DIQMTQSPSSLSASVGDRVTI |
| | | SCKASGGTFSSYAISWVRQAP | TCRASQSISRWLAWYQQKPG |
| | | GQGLEWMGWINPNSGGTISA | KAPKLLIYAASTVQSGVPSRF |
| | | PNFQGRVTMTRDTSTSTVYM | SGSGSGTDFTLTISSLQPEDFA |
| | | ELSSLRSEDTAVYYCARANW | TYYCQQSYSTPYTFGQGTKL |
| | | LDYWGQGTLVTVSS | EIK |
| G2 | G2(2A11) | EVQLLESGAEVKKPGASVKV | DIQMTQSPSSLSASVGDRVTI |
| | | SCKASGYTFTTYDLAWVRQA | TCRASQDISRWLAWYQQKPG |
| | | PGQGLEWMGWINPNSGGTN | KAPKLLIYAASRLQAGVPSRF |
| | | YAQKFQGRVTMTRDTSTSTV | SGSGSGTDFTLTISSLQPEDFA |
| | | YMELSSLRSEDTAVYYCARA | TYYCQQSYSTPYSFGQGTKLE |
| | | NWLDYWGQGTLVTVSS | IK |
| G2 | G2(2C06) | QVQLVQSGAEVKKPGASVKV | DIQMTQSPSSLSASVGDRVTI |
| | | SCKSSGYSFDSYVVNWVRQA | TCRASQTISSWLAWYQQKPG |
| | | PGQGLEWMGWINPNSGGTN | KAPKLLIYAASSLQSGVPSRF |
| | | YAQKFQGRVTMTRDTSTSTV | SGSGSGTDFTLTISSLQPEDFA |
| | | YMELSSLRSEDTAVYYCARD | TYYCQQSYSTPFTFGPGTKVD |
| | | WVLDYWGQGTLVTVSS | IK |
| G2 | G2(1G1) | QVQLVQSGAEVKKPGASVKV | DIQMTQSPSSLSASVGDRVTI |
| | | SCKASGYTFTSYGISWVRQAP | TCRASQTISSWLAWYQQKPG |
| | | GQGLEWMGWMNPNSGGTN | KAPKLLIYAASSLQSGVPSRF |
| | | YAQKFQGRVTMTRDTSTSTV | SGSGSGTDFTLTISSLQPEDFA |
| | | YMELSSLRSEDTAVYYCARG | TYYCQQSYGVPYTFGQGTKV |
| | | EWLDYWGQGTLVTVSS | EIK |
| G2 | G2(1C2) | QVQLVQSGAEVKKPGASVKV | DIQMTQSPSSLSASVGDRVTI |
| | | SCKASGYTFTSYGISWVRQAP | TCRASQSISNWLAWYQQKPG |
| | | GQGLEWMGWINPNSGGTNY | KAPKLLIYAASSLQSGVPSRF |
| | | AQKFQGRVTMTRDTSTSTVY | SGSGSGTDFTLTISSLQPEDFA |
| | | MELSSLRSEDTAVYYCARGW | TYYCQQSYSAPYTFGPGTKV |
| | | ELGYWGQGTLVTVSS | DIK |
| G2 | G2(1H01) | QVQLVQSGAEVKKPGASVKV | DIQMTQSPSSLSASVGDRVTI |
| | | SCKASGYTFTRYTINWVRQA | TCRASQSVGNWLAWYQQKP |
| | | PGQGLEWMGWINPNSGGTN | GKAPKLLIYGASSLQTGVPSR |
| | | YAQKFQGRVTMTRDTSTSTV | FSGSGSGTDFTLTISSLQPEDF |
| | | YMELSSLRSEDTAVYYCARD | ATYYCQQSYSAPYTFGQGTK |
| | | FVGYDDWGQGTLVTVSS | VEIK |
| G2 | G2(1B12) | QVQLVQSGAEVKKPGASVKV | DIQMTQSPSSLSASVGDRVTI |
| | | SCKASGYTFTSYGITWVRQAP | TCRASQNIGNWLAWYQQKP |
| | | GQGLEWMGWINPNSGGTNY | GKAPKLLIYAASTLQTGVPSR |
| | | AQKFQGRVTMTRDTSTSTVY | FSGSGSGTDFTLTISSLQPEDF |
| | | MELSSLRSEDTAVYYCARDY | ATYYCQQSYSAPYSFGQGTK |
| | | GDLDYWGQGTLVTVSS | LEIK |
| G2 | G2(1B06) | QVQLVQSGAEVKKPGASVKV | DIQMTQSPSSLSASVGDRVTI |
| | | SCKASGGTFSNYILSWVRQAP | TCRASQSISRWLAWYQQKPG |
| | | GQGLEWMGWINPDSGGTNY | KAPKLLIYAASSLQSGVPSRF |
| | | AQKFQGRVTMTRDTSTSTVY | SGSGSGTDFTLTISSLQPEDFA |
| | | MELSSLRSEDTAVYYCARGS | TYYCQQSYSTPYTFGQGTKL |
| | | YGMDVWGQGTTVTVSS | EIK |
| G2 | G2(2H10) | QVQLVQSGAEVKKPGASVKV | DIQMTQSPSSLSASVGDRVTI |
| | | SCKASGYSFTRYNMHWVRQ | TCRASQSISSWLAWYQQKPG |
| | | APGQGLEWMGWINPNSGGT | KAPKLLIYGASSLQSGVPSRF |
| | | NYAQKFQGRVTMTRDTSTST | SGSGSGTDFTLTISSLQPEDFA |
| | | VYMELSSLRSEDTAVYYCAR | TYYCQQSYSVPYSFGQGTKL |
| | | DGYSGLDVWGKGTTVTVSS | EIK |
| G2 | G2(1H10) | QVQLVQSGAEVKKPGASVKV | DIQMTQSPSSLSASVGDRVTI |
| | | SCKASGGTFSSYAISWVRQAP | TCRASQSISKWLAWYQQKPG |
| | | GQGLEWMGWINPNNGGTNY | KAPKLLIYAASSLQSGVPSRF |
| | | AQKFQGRVTMTRDTSTSTVY | SGSGSGTDFTLTISSLQPEDFA |
| | | MELSSLRSEDTAVYYCARDS | TYYCQQSYSAPYTFGQGTKV |
| | | GVGMDVWGQGTTVTVSS | EIK |
| G2 | G2(2C11) | QVQLVQSGAEVKKPGASVKV | DIQMTQSPSSLSASVGDRVTI |
| | | SCKASGGTFNNYAFSWVRQA | TCRASQGISNYLAWYQQKPG |
| | | PGQGLEWMGWINPNSGGTN | KAPKLLIYAASTLQSGVPSRF |
| | | YAQKFQGRVTMTRDTSTSTV | SGSGSGTDFTLTISSLQPEDFA |
| | | YMELSSLRSEDTAVYYCARD | TYYCQQSYSVPYSFGQGTKL |
| | | GVAVASDYWGQGTLVTVSS | EIK |
| G2 | G2(1C9) | QVQLVQSGAEVKKPGASVKV | DIQMTQSPSSLSASVGDRVTI |
| | | SCKASGYTFSSYNMHWVRQ | TCRASQTISNYLNWYQQKPG |
| | | APGQGLEWMGWINGNTGGT | KAPKLLIYAASNLQSGVPSRF |
| | | NYAQKFQGRVTMTRDTSTST | SGSGSGTDFTLTISSLQPEDFA |
| | | VYMELSSLRSEDTAVYYCAR | TYYCQQSYSTPQTFGQGTKV |
| | | GVNVDDFDYWGQGTLVTVS | EIK |
| | | S | |
| G2 | G2(1A10) | QVQLVQSGAEVKKPGASVKV | DIQMTQSPSSLSASVGDRVTI |
| | | SCKASGGTFSSYAFSWVRQA | TCRASRDIGRAVGWYQQKPG |
| | | PGQGLEWMGWINPDTGYTR | KAPKLLIYAASSLQSGVPSRF |
| | | YAQKFQGRVTMTRDTSTSTV | SGSGSGTDFTLTISSLQPEDFA |
| | | YMELSSLRSEDTAVYYCARG | TYYCQQLDSYPFTFGPGTKV |
| | | DYTGNWYFDLWGRGTLVTV | DIK |
| | | SS | |
| G2 | G2(1B10) | EVQLLESGAEVKKPGASVKV | DIQMTQSPSSLSASVGDRVTI |
| | | SCKASGYTFTSYGISWVRQAP | TCRASQSISSWLAWYQQKPG |
| | | GQGLEWMGWINPYSGGTNY | KAPKLLIYAASTLQSGVPSRF |
| | | AQKLQGRVTMTRDTSTSTVY | SGSGSGTDFTLTISSLQPEDFA |
| | | MELSSLRSEDTAVYYCARAN | TYYCQQSYSSPYTFGPGTKV |
| | | WLDYWGQGTLVTVSS | DIK |
| G2 | G2(1D07) | QVQLVQSGAEVKKPGASVKV | DIQMTQSPSSLSASVGDRVTI |
| | | SCKASGYTFTSYGISWVRQAP | TCQASQDISNYLNWYQQKPG |
| | | GQGLEWMGWISAYNGYTNY | KAPKLLIYAASSLQSGVPSRF |
| | | AQNLQGRVTMTRDTSTSTVY | SGSGSGTDFTLTISSLQPEDFA |
| | | MELSSLRSEDTAVYYCARDQ | TYYCQQSYSTPLTFGGGTKLE |
| | | FYGGNSGGHDYWGQGTLVT | IK |
| | | VSS | |
| G2 | G2(1E05) | QVQLVQSGAEVKKPGASVKV | DIQMTQSPSSLSASVGDRVTI |
| | | SCKASGYTFTDYNMHWVRQ | TCRASQSIGRWLAWYQQKPG |
| | | APGQGLEWMGWMNPNSGGT | KAPKLLIYAASSLQSGVPSRF |
| | | SGSGSGTDFTLTISSLQPEDFA | NYAQKFQGRVTMTRDTSTST |
| | | VYMELSSLRSEDTAVYYCAR | TYYCQQSYSTPYSFGQGTKV |
| | | E-EDYWGQGTLVTVSS | EIK |
| G2 | G2(1D03) | QVQLVQSGAEVKKPGASVKV | DIQMTQSPSSLSASVGDRVTI |
| | | SCKASGYTFTRYTINWVRQA | TCRAQSISTWLAWYQQKPG |
| | | PGQGLEWMGWINPNSGGAN | KAPKLLIYAASTLQSGVPSRF |
| | | YAQKFQGRVTMTRDTSTSTV | SGSGSGTDFTLTISSLQPEDFA |
| | | YMELSSLRSEDTAVYYCARG | TYYCQQSYSTPYTFAQGTKL |
| | | DWFDPWGQGTLVTVSS | EIK |
| G2 | G2(1G12) | QVQLVQSGAEVKKPGASVKV | DIQMTQSPSSLSASVGDRVTI |
| | | SCKASGYTFTSYLMHWVRQA | TCQASQDISNYLNWYQQKPG |
| | | PGQGLEWMGWISPNSGGTNY | KAPKLLIYGASRLQSGVPSRF |
| | | AQKFQGRVTMTRDTSTSTVY | SGSGSGTDFTLTISSLQPEDFA |
| | | MELSSLRSEDTAVYYCARGD | TYYCQQSYSTPYTFGQGTKL |
| | | WFDPWGQGTLVTVSS | EIK |
| G2 | G2 (2H11) | QVQLVQSGAEVKKPGASVKV | DIQMTQSPSSLSASVGDRVTI |
| | | SCKASGYTFSDYYVHWVRQ | TCRASQSISSWLAWYQQKPG |
| | | APGQGLEWMGWINPNSGGT | KAPKLLIYAASTLQSGVPSRF |
| | | NYAQKFQGRVTMTRDTSTST | SGSGSGTDFTLTISSLQPEDFA |
| | | VYMELSSLRSEDTAVYYCAR | TYYCQQ SYSTPFTFGPGTKVD |
| | | GEWFDPWGQGTLVTVSS | IK |
| G2 | G2(1C03) | QVQLVQSGAEVKKPGASVKV | DIQMTSPSSLSASVGDRVTI |
| | | SCKASGYTFTTYYMHWVRQ | TCRASQSVSNWLAWYQQKP |
| | | APGQGLEWMGWINPNSGGT | GKAPKLLIYAASSLQSGVPSR |
| | | NYAQKFQGRVTMTRDTSTST | FSGSGSGTDFTLTISSLQPEDF |
| | | VYMELSSLRSEDTAVYYCAR | ATYYCQQSYSTPTFGQGTKL |
| | | SDWFDPWGQGTLVTVSS | EIK |
| G2 | G2(1G07) | QVQLVQSGAEVKKPGASVKV | DIQMTQSPSSLSASVGDRVTI |
| | | SCKASGGTFSNYAINWVRQA | TCQASQDISNYLNWYQQKPG |
| | | PGQGLEWMGWISPYSGGTNY | KAPKLLIYAASTLQSGVPSRF |
| | | AQKFQGRVTMTRDTSTSTVY | SGSGSGTDFTLTISSLQPEDFA |
| | | MELSSLRSEDTAVYYCARDS | TYYCQQTYAIPLTFGGGTKVE |
| | | GSYFDYWGQGTLVTVSS | IK |
| G2 | G2(1F12) | QVQLVQSGAEVKKPGASVKV | DIQMTQSPSSLSASVGDRVTI |
| | | SCKASGYTFTDYYMHWVRQ | TCQASQDIGSWLAWYQQKPG |
| | | APGQGLEWMGWIYPNTGGT | KAPKLLIYATSSLQSGVPSRFS |
| | | NYAQKFQGRVTMTRDTSTST | GSGSGTDFTLTISSLQPEDFAT |
| | | VYMELSSLRSEDTAVYYCAR | YYCQQSYSTPYTFGQGTKLEI |
| | | DYGGYVDYWGQGTLVTVSS | K |
| G2 | G2(1G03) | EVQLLESGAEVKKPGASVKV | DIQMTQSPSSLSASVGDRVTI |
| | | SCKASGYTFTSYAMNWVRQ | TCRASQGISRWLAWYQQKPG |
| | | APGQGLEWMGWMNPNSGGT | KAPKLLIYAASTLQPGVPSRF |
| | | KYAQKFQGRVTMTRDTSTST | SGSGSGTDFTLTISSLQPEDFA |
| | | VYMELSSLRSEDTAVYYCAR | TYYCQQSYIAPFTFGPGTKVD |
| | | EGPAALDVWGQGTLVTVSS | IK |
| G2 | G2(2B8) | QVQLVQSGAEVKKPGASVKV | DIQMTQSPSSLSASVGDRVTI |
| | | SCKASGYTLTSHLIHWVRQA | TCRASQGISNYLAWYQQKPG |
| | | PGQGLEWMGWINPNSGGTN | KAPKLLIYAASRLESGVPSRF |
| | | YAQKFQGRVTMTRDTSTSTV | SGSGSGTDFTLTISSLQPEDFA |
| | | YMELSSLRSEDTAVYYCARE | TYYCQQSYSIPLTFGGGTKVE |
| | | RRSGMDVWGQGTTVTVSS | IK |
| G2 | G2(2A10) | EVQLLESGAEVKKPGASVKV | DIQMTQSPSSLSASVGDRVTI |
| | | SCKASGYSFTDYIVHWVRQA | TCRASQSISSYLNWYQQKPG |
| | | PGQGLEWMGWINPYSGGTK | KAPKLLIYGVSSLQSGVPSRF |
| | | YAQKFQGRVTMTRDTSTSTV | SGSGSGTDFTLTISSLQPEDFA |
| | | YMELSSLRSEDTAVYYCARV | TYYCQQSYSNPTFGQGTKVEI |
| | | LQEGMDVWGQGTLVTVSS | K |
| G2 | G2(2D04) | QVQLVQSGAEVKKPGASVKV | DIQMTQSPSSLSASVGDRVTI |
| | | SCKASGYTFSNFLINWVRQAP | TCRASQSISSWVAWYQQKPG |
| | | GQGLEWMGWINPNSGGTNY | KAPKLLIYGASNLESGVPSRF |
| | | AQKFQGRVTMTRDTSTSTVY | SGSGSGTDFTLTISSLQPEDFA |
| | | MELSSLRSEDTAVYYCASERE | TYYCQQSYSTPYSFGQGTKLE |
| | | LPFDIWGQGTMVTVSS | IK |
| G2 | G2(1C06) | QVQLVQSGAEVKKPGASVKV | DIQMTQSPSSLSASVGDRVTI |
| | | SCKASGYTFTDYQMFWVRQ | TCRASQGISNYLAWYQQKPG |
| | | APGQGLEWMGWINPNSGGT | KAPKLLIYAASSLQSGVPSRF |
| | | NYAQKFQGRVTMTRDTSTST | SGSGSGTDFTLTISSLQPEDFA |
| | | VYMELSSLRSEDTAVYYCAK | TYYCQQSYSDQWTFGQGTK |
| | | GGGGYGMDVWGQGTTVTVS | VEIK |
| | | S | |
| G2 | G2(2A9) | QVQLVQSGAEVKKPGASVKV | DIQMTQSPSSLSASVGDRVTI |
| | | SCKASGGTFSSYAISWVRQAP | TCRASQSISRWLAWYQQKPG |
| | | GQGLEWMGWINPNSGGTNY | KAPKLLIYAASSLQSGVPSRF |
| | | AQKFQGRVTMTRDTSTSTVY | SGSGSGTDFTLTISSLQPEDFA |
| | | MELSSLRSEDTAVYYCAAMG | TYYCQQSYLPPYSFGQGTKV |
| | | IAVAGGMDVWGQGTLVTVS | EIK |
| | | S | |
| G2 | G2(1B08) | QVQLVQSGAEVKKPGASVKV | DIQMTQSPSSLSASVGDRVTI |
| | | SCKASGYTFTNYHMHWVRQ | TCRASQSISNWLAWYQQKPG |
| | | APGQGLEWMGWIHPDSGGTS | KAPKLLIYAASSLQSGVPSRF |
| | | YAQKFQGRVTMTRDTSTSTV | SGSGSGTYFTLTISSLQPEDFA |
| | | YMELSSLRSEDTAVYYCARN | TYYCQQSYSSPYTFGQGTKLE |
| | | WNLDYWGQGTLVTVSS | IK |
| G2 | G2(1E03) | QVQLVQSGAEVKKPGASVKV | DIQMTQSPSSLSASVGDRVTI |
| | | SCKASGYTFTGYYMHWVRQ | TCRASQSISHYLNWYQQKPG |
| | | APGQGLEWMGWMNPNSGNT | KAPKLLIYGASSLQSGVPSRF |
| | | GYAQKFQGRVTMTRDTSTST | SGSGSGTDFTLTISSLQPEDFA |
| | | VYMELSSLRSEDTAVYYCAT | TYYCQQSYTTPWTFGQGTRL |
| | | YDDGMDVWGQGTTVTVSS | EIK |
| G2 | G2(2A03) | QVQLVQSGAEVKKPGASVKV | DIQMTQSPSSLSASVGDRVTI |
| | | SCKASGYTFTSYTVNWVRQA | TCRASQSISSWLAWYQQKPG |
| | | PGQGLEWMGWINPNSGGTK | KAPKLLIYAASTLQSGVPSRF |
| | | YAQNFQGRVTMTRDTSTSTV | SGSGSGTDFTLTISSLQPEDFA |
| | | YMELSSLRSEDTAVYYCARG | TYYCQQSYLPPYSFGQGTKLE |
| | | GGGALDYWGQGTLVTVSS | IK |
| G2 | G2(2F01) | QVQLVQSGAEVKKPGASVKV | DIQMTQSPSSLSASVGDRVTI |
| | | SCKASGYTFTSYYMHWVRQ | TCQASQDISNYLNWYQQKPG |
| | | APGQGLEWMGMINPRDDTT | KAPKLLIYGASRLQSGVPSRF |
| | | DYARDFQGRVTMTRDTSTST | SGSGSGTDFTLTISSLQPEDFA |
| | | VYMELSSLRSEDTAVYYCAL | TYYCQEGITYTFGQGTKVEIK |
| | | SGNYYGMDVWGQGTTVTVS | |
| | | S | |
| G2 | G2(1H11) | QVQLVQSGAEVKKPGASVKV | DIQMTQSPSSLSASVGDRVTI |
| | | SCKASGYTFTNYYMHWVRQ | TCQASQDISNYLNWYQQKPG |
| | | APGQGLEWMGMINPSGGGTS | KAPKLLIYAASSLQSGVPSRF |
| | | YAQKFQGRVTMTRDTSTSTV | SGSGSGTDFTLTISSLQPEDFA |
| | | YMELSSLRSEDTAVYYCARG | TYYCQQYYSYPFTFGPGTKV |
| | | NPWELRLDYWGQGTLVTVSS | DIK |
| G2 | G2(1D06) | QVQLVQSGAEVKKPGSSVKV | EIVMTQSPATLSVSPGERATL |
| | | SCKASGYTFTSQYMHWVRQ | SCRASQSVSRNLAWYQQKPG |
| | | APGQGLEWMGRIIPLLGIVNY | QAPRLLIYGASTRATGIPARFS |
| | | AQKFQGRVTITADESTSTAY | GSGSGTEFTLTISSLQSEDFAV |
| | | MELSSLRSEDTAVYYCARDK | YYCQHYGYSPVTFGQGTKLE |
| | | NYYGMDVWGQGTTVTVSS | IK |

TABLE 28
CDR sequences for G2 selective binders, selective for HLA-PEPTIDE
Target HLA-A*01:01 NTDNNLAVY (determined according to Kabat
numbering)

| Target | Clone | | | | | | |
|---|---|---|---|---|---|---|---|
| group | name | CDR-H1 | CDR-H2 | CDR-H3 | CDR-L1 | CDR-L2 | CDR-L3 |
| G2 | G2(2E07) | GTFSSA | GWIYPN | CAATE | RASQSI | AASSLR | CQQSYN |
| | | TIS | SGGTVY | WLGVW | STWLA | S | TPYTF |
| | | | A | | | | |
| G2 | G2(2E03) | GTFSSY | GWINPN | CARAN | RASQSI | AASTV | CQQSYS |
| | | AIS | SGGTIS | WLDYW | SRWLA | QS | TPYTF |
| | | | A | | | | |
| G2 | G2(2A11) | YTFTTY | GWINPN | CARAN | RASQDI | AASRLQ | CQQSYS |
| | | DLA | SGGTNY | WLDYW | SRWLA | A | TPYSF |
| | | | A | | | | |
| G2 | G2(2C06) | YSFDSY | GWINPN | CARDW | RASQTI | AASSLQ | CQQSYS |
| | | VVN | SGGTNY | VLDYW | SSWLA | S | TPFTF |
| | | | A | | | | |
| G2 | G2(1G01) | YTFTSY | GWMNP | CARGE | RASQTI | AASSLQ | CQQSYG |
| | | GIS | NSGGTN | WLDYW | SSWLA | S | VPYTF |
| | | | YA | | | | |
| G2 | G2(1C02) | YTFTSY | GWINPN | CARGW | RASQSI | AASSLQ | CQQSYS |
| | | GIS | SGGTNY | ELGYW | SNWLA | S | APYTF |
| | | | A | | | | |
| G2 | G2(1H01) | YTFTRY | GWINPN | CARDFV | RASQSV | GASSLQ | CQQSYS |
| | | TIN | SGGTNY | GYDDW | GNWLA | T | APYTF |
| | | | A | | | | |
| G2 | G2(1B12) | YTFTSY | GWINPN | CARDY | RASQNI | AASTLQ | CQQSYS |
| | | GIT | SGGTNY | GDLDY | GNWLA | T | APYSF |
| | | | A | W | | | |
| G2 | G2(1B06) | GTFSNY | GWINPD | CARGSY | RASQSI | AASSLQ | CQQSYS |
| | | ILS | SGGTNY | GMDVW | SRWLA | S | TPYTF |
| | | | A | | | | |
| G2 | G2(2H10) | YSFTRY | GWINPN | CARDG | RASQSI | GASSLQ | CQQSYS |
| | | NMH | SGGTNY | YSGLDV | SSWLA | S | VPYSF |
| | | | A | W | | | |
| G2 | G2(1H10) | GTFSSY | GWINPN | CARDSG | RASQSI | AASSLQ | CQQSYS |
| | | AIS | NGGTN | VGMDV | SKWLA | S | APYTF |
| | | | YA | W | | | |
| G2 | G2(2C11) | GTFNNY | GWINPN | CARDG | RASQGI | AASTLQ | CQQSYS |
| | | AFS | SGGTNY | VAVAS | SNYLA | S | VPYSF |
| | | | A | DYW | | | |
| G2 | G2(1C9) | YTFSSY | GWING | CARGV | RASQTI | AASNL | CQQSYS |
| | | NMH | NTGGT | NVDDF | SNYLN | QS | TPQTF |
| | | | NYA | DYW | | | |
| G2 | G2(1A10) | GTFSSY | GWINPD | CARGD | RASRDI | AASSLQ | CQQLDS |
| | | AFS | TGYTRY | YTGNW | GRAVG | S | YPFTF |
| | | | A | YFDLW | | | |
| G2 | G2(1B10) | YTFTSY | GWINPY | CARAN | RASQSI | AASTLQ | CQQSYS |
| | | GIS | SGGTNY | WLDYW | SSWLA | S | SPYTF |
| | | | A | | | | |
| G2 | G2(1D07) | YTFTSY | GWISAY | CARDQF | QASQDI | AASSLQ | CQQSYS |
| | | GIS | NGYTN | YGGNS | SNYLN | S | TPLTF |
| | | | YA | GGHDY | | | |
| | | | | W | | | |
| G2 | G2(1E05) | YTFTDY | GWMNP | CAREED | RASQSI | AASSLQ | CQQSYS |
| | | NMH | NSGGTN | YW | GRWLA | S | TPYSF |
| | | | YA | | | | |
| G2 | G2(1D03) | YTFTRY | GWINPN | CARGD | RASQSI | AASTLQ | CQQSYS |
| | | TIN | SGGAN | WFDPW | STWLA | S | TPYTF |
| | | | YA | | | | |
| G2 | G2(1G12) | YTFTSY | GWISPN | CARGD | QASQDI | GASRLQ | CQQSYS |
| | | LMH | SGGTNY | WFDPW | SNYLN | S | TPYTF |
| | | | A | | | | |
| G2 | G2(2H11) | YTFSDY | GWINPN | CARGE | RASQSI | AASTLQ | CQQSYS |
| | | YVH | SGGTNY | WFDPW | SSWLA | S | TPFTF |
| | | | A | | | | |
| G2 | G2(1C03) | YTFTTY | GWINPN | CARSD | RASQSV | AASSLQ | CQQSYS |
| | | YMH | SGGTNY | WFDPW | SNWLA | S | TPTF |
| | | | A | | | | |
| G2 | G2(1G07) | GTFSNY | GWISPY | CARDSG | QASQDI | AASTLQ | CQQTY |
| | | AIN | SGGTNY | SYFDY | SNYLN | S | AIPLTF |
| | | | A | W | | | |
| G2 | G2(1F12) | YTFTDY | GWIYPN | CARDY | QASQDI | ATSSLQ | CQQSYS |
| | | YMH | TGGTN | GGYVD | GSWLA | S | TPYTF |
| | | | YA | YW | | | |
| G2 | G2(1G03) | YTFTSY | GWMNP | CAREGP | RASQGI | AASTLQ | CQQSYI |
| | | AMN | NSGGTK | AALDV | SRWLA | P | APFTF |
| | | | YA | W | | | |
| G2 | G2(2B08) | YTLTSH | GWINPN | CARERR | RASQGI | AASRLE | CQQSYS |
| | | LIH | SGGTNY | SGMDV | SNYLA | S | IPLTF |
| | | | A | W | | | |
| G2 | G2(2A10) | | GWINPY | CARVL | | | |
| | | YSFTDY | SGGTKY | QEGMD | RASQSI | GVSSLQ | CQQSYS |
| | | IVH | A | VW | SSYLN | S | NPTF |
| G2 | G2(2D04) | YTFSNF | GWINPN | CASERE | RASQSI | GASNLE | CQQSYS |
| | | LIN | SGGTNY | LPFDIW | SSWVA | S | TPYSF |
| | | | A | | | | |
| G2 | G2(1C06) | YTFTDY | GWINPN | CAKGG | RASQGI | AASSLQ | CQQSYS |
| | | QMF | SGGTNY | GGYGM | SNYLA | S | DQWTF |
| | | | A | DVW | | | |
| G2 | G2(2A09) | GTFSSY | GWINPN | CAAMGI | RASQSI | AASSLQ | CQQSYL |
| | | AIS | SGGTNY | AVAGG | SRWLA | S | PPYSF |
| | | | A | MDVW | | | |
| G2 | G2(1B08) | YTFTNY | GWIHPD | CARNW | RASQSI | AASSLQ | CQQSYS |
| | | HMH | SGGTSY | NLDYW | SNWLA | S | SPYTF |
| | | | A | | | | |
| G2 | G2(1E03) | YTFTGY | GWMNP | CATYD | RASQSI | GASSLQ | CQQSYT |
| | | YMH | NSGNTG | DGMDV | SHYLN | S | TPWTF |
| | | | YA | W | | | |
| G2 | G2(2A03) | YTFTSY | GWINPN | CARGG | RASQSI | AASTLQ | CQQSYL |
| | | TVN | SGGTKY | GGALD | SSWLA | S | PPYSF |
| | | | A | YW | | | |
| G2 | G2(2F01) | YTFTSY | GMINPR | CALSGN | QASQDI | GASRLQ | CQEGIT |
| | | YMH | DDTTD | YYGMD | SNYLN | S | YTF |
| | | | YA | VW | | | |
| G2 | G2(1H11) | YTFTNY | GMINPS | CARGNP | QASQDI | AASSLQ | CQQYYS |
| | | YMH | GGGTSY | WELRL | SNYLN | S | YPFTF |
| | | | A | DYW | | | |
| G2 | G2(1D06) | YTFTSQ | GRIIPLL | CARDK | RASQSV | GASTRA | CQHYG |
| | | YMH | GIVNYA | NYYGM | SRNLA | T | YSPVTF |
| | | | | DVW | | | |

TABLE 29
VH and VL sequences for scFv selective binders selective for HLA-
PEPTIDE Target HLA-A*02:01 LLASSILCA.

| Target | Clone | | |
|---|---|---|---|
| group | name | VH | VL |
| G7 | G7(1C06) | QVQLVQSGAEVKKPGASVKV | EIVMTQSPATLSVSPGERATL |
| | | SCKASGGTFSNYGISWVRQAP | SCRASQSVSSSNLAWYQQKP |
| | | GQGLEWMGIINPGGSTSYAQK | GQAPRLLIYGASTRATGIPAR |
| | | FQGRVTMTRDTSTSTVYMELS | FSGSGSGTEFTLTISSLQSEDF |
| | | SLRSEDTAVYYCARDGYDFW | AVYYCHHYGRSHTFGQGTKV |
| | | SGYTSDDYWGQGTLVTVSS | EIK |
| G7 | G7(1G10) | EVQLLESGGGLVQPGGSLRLS | DIQMTQSPSSLSASVGDRVTIT |
| | | CAASGFTFSSYAMHWVRQAP | CRASQDIRNDLGWYQQKPGK |
| | | GKGLEWVSGISGSGGSTYYAD | APKLLIYAASSLQSGVPSRFSG |
| | | SVKGRFTISRDNSKNTLYLQM | SGSGTDFTLTISSLQPEDFATY |
| | | NSLRAEDTAVYYCASDYGDY | YCQQANAFPPTFGQGTKVEIK |
| | | RGQGTLVTVSS | |
| G7 | G7(1B04) | QVQLVQSGAEVKKPGASVKV | DIVMTQSPDSLAVSLGERATI |
| | | SCKASGYTFSNYYIHWVRQAP | NCKSSQSVFYSSNNKNQLAW |
| | | GQGLEWMGWLNPNSGNTGY | YQQKPGQPPKLLIYWASTRES |
| | | AQRFQGRVTMTRDTSTSTVY | GVPDRFSGSGSGTDFTLTISSL |
| | | MELSSLRSEDTAVYYCARDL | QAEDVAVYYCQQYYSIPLTF |
| | | MTTVVTPGDYGMDVWGQGT | GQGTKLEIK |
| | | TVTVSS | |
| G7 | G7(2C02) | QVQLVQSGAEVKKPGASMKV | DIQMTQSPSSLSASVGDRVTIT |
| | | SCKASGYTFTTDGISWVRQAP | CQASQDIFKYLNWYQQKPGK |
| | | GQGLEWMGRIYPHSGYTEYA | APKLLIYAASTLQSGVPSRFS |
| | | KKFKGRVTMTRDTSTSTVYM | GSGSGTDFTLTISSLQPEDFAT |
| | | ELSSLRSEDTAVYYCARQDGG | YYCQQSYSTPPTFGQGTRLEI |
| | | AFAFDIWGQGTMVTVSS | K |
| G7 | G7(1A03) | QVQLVQSGAEVKKPGASVKV | DIQMTQSPSSLSASVGDRVTIT |
| | | SCKASGYTFTSQYMHWVRQA | CRASQSISTWLAWYQQKPGK |
| | | PGQGLEWMGWISPNNGDTNY | APKLLIYYASSLQSGVPSRFSG |
| | | AQKFQGRVTMTRDTSTSTVY | SGSGTDFTLTISSLQPEDFATY |
| | | MELSSLRSEDTAVYYCARELG | YCQQSYSFPYTFGQGTKVEIK |
| | | YYYGMDVWGQGTTVTVSS | |
| G7 | G7(2E09) | QVQLVQSGAEVKKPGSSVKV | DIVMTQSPLSLPVTPGEPASIS |
| | | SCKASRYTFTSYDINWVRQAP | CSSSQSLLHSNGYNYLDWYL |
| | | GQGLEWMGRIIPMLNIANYAP | QKPGQSPQLLIYLGSNRASGV |
| | | KFQGRVTITADESTSTAYMEL | PDRFSGSGSGTDFTLKISRVEA |
| | | SSLRSEDTAVYYCARALIFGV | EDVGVYYCMQALQTPLTFGG |
| | | PLLPYGMDVWGQGTTVTVSS | GTKVEIK |
| G7 | G7(1F08) | EVQLLQSGGGLVQPGGSLRLS | DIQMTQSPSSLSASVGDRVTIT |
| | | CAASGFTFSSSWMHWVRQAP | CQASQDISNYLNWYQQKPGK |
| | | GKGLEWVSFISTSSGYIYYADS | APKLLIYSASNLRSGVPSRFSG |
| | | VKGRFTISRDNSKNTLYLQMN | SGSGTDFTLTISSLQPEDFATY |
| | | SLRAEDTAVYYCAKDLATVG | YCQQGNTFPLTFGQGTKVEIK |
| | | EPYYYYGMDVWGQGTTVTV | |
| | | SS | |
| G7 | G7(3A09) | QVQLVQSGAEVKKPGSSVKV | DIVMTQSPLSLPVTPGEPASIS |
| | | SCKASGDTFNTYALSWVRQA | CRSSQSLLHSNGYNYLDWYL |
| | | PGQGLEWMGWMNPNSGNAG | QKPGQSPQLLIYLGSNRASGV |
| | | YAQKFQGRVTITADESTSTAY | PDRFSGSGSGTDFTLKISRVEA |
| | | MELSSLRSEDTAVYYCARLW | EDVGVYYCMQGSHWPPSFG |
| | | FGELHYYYYYGMDVWGQGT | QGTRLEIK |
| | | MVTVSS | |

TABLE 30
CDR sequences for G7 selective binders selective for HLA-PEPTIDE
Target HLA-A*02:01 LLASSILCA

| Target | Clone | | | | | | |
|---|---|---|---|---|---|---|---|
| group | name | CDR-H1 | CDR-H2 | CDR-H3 | CDR-L1 | CDR-L2 | CDR-L3 |
| G7 | G7(1C06) | GTFSNY | GIINPG | CARDG | RASQSV | GASTRAT | CHHY |
| | | GIS | GSTSYA | YDFWS | SSSNLA | | GRSHT |
| | | | | GYTSDD | | | F |
| | | | | YW | | | |
| G7 | G7(1G10) | FTFSSY | SGISGS | CASDY | RASQDI | AASSLQS | CQQA |
| | | AMH | GGSTYY | GDYR | RNDLG | | NAFPP |
| | | | A | | | | TF |
| G7 | G7(1B04) | YTFSNY | GWLNP | CARDL | KSSQSV | WASTRES | CQQY |
| | | YIH | NSGNTG | MTTVV | FYSSNN | | YSIPLT |
| | | | YA | TPGDYG | KNQLA | | F |
| | | | | MDVW | | | |
| G7 | G7(2C02) | YTFTTD | GRIYPH | CARQD | QASQDI | AASTLQS | CQQSY |
| | | GIS | SGYTEY | GGAFAF | FKYLN | | STPPTF |
| | | | A | DIW | | | |
| G7 | G7(1A03) | YTFTSQ | GWISPN | CARELG | RASQSI | YASSLQS | CQQSY |
| | | YMH | NGDTN | YYYGM | STWLA | | SFPYT |
| | | | YA | DVW | | | F |
| G7 | G7(2E09) | YTFTSY | GRIIPM | CARALI | SSSQSL | LGSNRAS | CMQA |
| | | DIN | LNIANY | FGVPLL | LHSNGY | | LQTPL |
| | | | A | PYGMD | NYLD | | TF |
| | | | | VW | | | |
| G7 | G7(1F08) | FTFSSS | SFISTSS | CAKDL | QASQDI | SASNLRS | CQQG |
| | | WMH | GYIYYA | ATVGEP | SNYLN | | NTFPL |
| | | | | YYYYG | | | TF |
| | | | | MDVW | | | |
| G7 | G7(3A09) | DTFNTY | GWMNP | CARLW | RSSQSL | LGSNRAS | CMQG |
| | | ALS | NSGNA | FGELHY | LHSNGY | | SHWPP |
| | | | GYA | YYYYG | NYLD | | SF |
| | | | | MDVW | | | |

TABLE 33
Exemplary Bispecific Format 1 Constructs

| | Anti-HLA-peptide | | |
|---|---|---|---|
| Name | scFv | Linker | Anti-CD3 scFv |
| 1-G2(1H11)-hOKT3 | DIQMTQSPSSLSAS | GGGGS | QVQLVQSGAEVKK |
| | VGDRVTITCQASQD | | PGASVKVSCKASG |
| | ISNYLNWYQQKPG | | YTFTRYTMHWVRQ |
| | KAPKLLIYAASSLQ | | APGQGLEWMGYIN |
| | SGVPSRFSGSGSGT | | PSRGYTNYNQKFK |
| | DFTLTISSLQPEDFA | | DRVTLTTDKSSSTA |
| | TYYCQQYYSYPFTF | | YMELSSLRSEDTAV |
| | GPGTKVDIKGGGG | | YYCARYYDDHYSL |
| | SGGGGSGGGGSGG | | DYWGQGTLVTVSS |
| | GGSQVQLVQSGAE | | VEGGSGGSGGSGG |
| | VKKPGASVKVSCK | | SGGVDDIQMTQSPS |
| | ASGYTFTNYYMHW | | SLSASVGDRVTITC |
| | VRQAPGQGLEWM | | SASSSVSYMNWYQ |
| | GMINPSGGGTSYA | | QKPGKAPKRLIYDT |
| | QKFQGRVTMTRDT | | SKLASGVPSRFSGS |
| | STSTVYMELSSLRS | | GSGTDFTLTISSLQP |
| | EDTAVYYCARGNP | | EDFATYYCQQWSS |
| | WELRLDYWGQGTL | | NPFTFGQGTKLEIK |
| | VTVSS | | |
| 1-G2(1H11)-anti-CD3 | DIQMTQSPSSLSAS | GGGGS | EVQLVESGGGLVQ |
| | VGDRVTITCQASQD | | PGGSLRLSCAASGF |
| | ISNYLNWYQQKPG | | TFSTYAMNWVRQA |
| | KAPKLLIYAASSLQ | | PGKGLEWVGRIRS |
| | SGVPSRFSGSGSGT | | KYNNYATYYADSV |
| | DFTLTISSLQPEDFA | | KGRFTISRDDSKNT |
| | TYYCQQYYSYPFTF | | LYLQMNSLRAEDT |
| | GPGTKVDIKGGGG | | AVYYCVRHGNFGD |
| | SGGGGSGGGGSGG | | SYVSWFAYWGQGT |
| | GGSQVQLVQSGAE | | LVTVSSGKPGSGKP |
| | VKKPGASVKVSCK | | GSGKPGSGKPGSQ |
| | ASGYTFTNYYMHW | | AVVTQEPSLTVSPG |
| | VRQAPGQGLEWM | | GTVTLTCGSSTGAV |
| | GMINPSGGGTSYA | | TTSNYANWVQQKP |
| | QKFQGRVTMTRDT | | GKSPRGLIGGTNKR |
| | STSTVYMELSSLRS | | APGVPARFSGSLLG |
| | EDTAVYYCARGNP | | GKAALTISGAQPED |
| | WELRLDYWGQGTL | | EADYYCALWYSNH |
| | VTVSS | | WVFGGGTKLTVL |
| 1-G5(1C12)-hOKT3 | DIQMTQSPSSLSAS | GGGGS | QVQLVQSGAEVKK |
| | VGDRVTITCRASQS | | PGASVKVSCKASG |
| | ISSWLAWYQQKPG | | YTFTRYTMHWVRQ |
| | KAPKLLIYAASTLQ | | APGQGLEWMGYIN |
| | SGVPSRFSGSGSGT | | PSRGYTNYNQKFK |
| | DFTLTISSLQPEDFA | | DRVTLTTDKSSSTA |
| | TYYCQQSYSIPLTF | | YMELSSLRSEDTAV |
| | GGGTKVEIKGGGG | | YYCARYYDDHYSL |
| | SGGGGSGGGGSGG | | DYWGQGTLVTVSS |
| | GGSQVQLVQSGAE | | VEGGSGGSGGSGG |
| | VKKPGSSVKVSCK | | SGGVDDIQMTQSPS |
| | ASGGTFSNFGVSW | | SLSASVGDRVTITC |
| | LRQAPGQGLEWMG | | SASSSVSYMNWYQ |
| | GIIPILGTANYAQKF | | QKPGKAPKRLIYDT |
| | QGRVTITADESTST | | SKLASGVPSRFSGS |
| | AYMELSSLRSEDTA | | GSGTDFTLTISSLQP |
| | VYYCATPTNSGYY | | EDFATYYCQQWSS |
| | GPYYYYGMDVWG | | NPFTFGQGTKLEIK |
| | QGTTVTVSS | | |
| 1-G5(1C12)-anti-CD3 | DIQMTQSPSSLSAS | GGGGS | EVQLVESGGGLVQ |
| | VGDRVTITCRASQS | | PGGSLRLSCAASGF |
| | ISSWLAWYQQKPG | | TFSTYAMNWVRQA |
| | KAPKLLIYAASTLQ | | PGKGLEWVGRIRS |
| | SGVPSRFSGSGSGT | | KYNNYATYYADSV |
| | DFTLTISSLQPEDFA | | KGRFTISRDDSKNT |
| | TYYCQQSYSIPLTF | | LYLQMNSLRAEDT |
| | GGGTKVEIKGGGG | | AVYYCVRHGNFGD |
| | SGGGGSGGGGSGG | | SYVSWFAYWGQGT |
| | GGSQVQLVQSGAE | | LVTVSSGKPGSGKP |
| | VKKPGSSVKVSCK | | GSGKPGSGKPGSQ |
| | ASGGTFSNFGVSW | | AVVTQEPSLTVSPG |
| | LRQAPGQGLEWMG | | GTVTLTCGSSTGAV |
| | GIIPILGTANYAQKF | | TTSNYANWVQQKP |
| | QGRVTITADESTST | | GKSPRGLIGGTNKR |
| | AYMELSSLRSEDTA | | APGVPARFSGSLLG |
| | VYYCATPTNSGYY | | GKAALTISGAQPED |
| | GPYYYYGMDVWG | | EADYYCALWYSNH |
| | QGTTVTVSS | | WVFGGGTKLTVL |

TABLE 34
Exemplary Bispecific Format 2 Constructs

| | | CH1_CH2_ | Linker | | |
|---|---|---|---|---|---|
| | VH (Chains 1 | CH3 (Chains | (Chains 1 | scFv (Chains 1 | LC (Chains 3 |
| Name | and 2 | 1 and 2) | and 2) | and 2) | and 4) |
| 2-hOKT3- | QVQLVQSG | ASTKGPSVF | GGGGSGGG | QVQLVQSG | DIQMTQSPS |
| G2(1H11) | AEVKKPGA | PLAPSSKST | GS | AEVKKPGA | SLSASVGDR |
| | SVKVSCKA | SGGTAALG | | SVKVSCKA | VTITCSASS |
| | SGYTFTRYT | CLVKDYFP | | SGYTFTNY | SVSYMNWY |
| | MHWVRQA | EPVTVSWN | | YMHWVRQ | QQKPGKAP |
| | PGQGLEWM | SGALTSGV | | APGQGLEW | KRLIYDTSK |
| | GYINPSRGY | HTFPAVLQS | | MGMINPSG | LASGVPSRF |
| | TNYNQKFK | SGLYSLSSV | | GGTSYAQK | SGSGSGTDF |
| | DRVTLTTD | VTVPSSSLG | | FQGRVTMT | TLTISSLQPE |
| | KSSSTAYM | TQTYICNVN | | RDTSTSTVY | DFATYYCQ |
| | ELSSLRSED | HKPSNTKV | | MELSSLRSE | QWSSNPFTF |
| | TAVYYCAR | DKRVEPKS | | DTAVYYCA | GQGTKLEIK |
| | YYDDHYSL | CDKTHTCPP | | RGNPWELR | RTVAAPSVF |
| | DYWGQGTL | CPAPELLGG | | LDYWGQGT | IFPPSDEQL |
| | VTVSS | PSVFLFPPK | | LVTVSSGG | KSGTASVV |
| | | PKDTLMISR | | GGSGGGGS | CLLNNFYPR |
| | | TPEVTCVV | | GGGGSGGG | EAKVQWK |
| | | VDVSHEDP | | GSDIQMTQS | VDNALQSG |
| | | EVKFNWYV | | PSSLSASVG | NSQESVTEQ |
| | | DGVEVHNA | | DRVTITCQA | DSKDSTYSL |
| | | KTKPREEQ | | SQDISNYLN | SSTLTLSKA |
| | | YQSTYRVV | | WYQQKPGK | DYEKHKVY |
| | | SVLTVLHQ | | APKLLIYAA | ACEVTHQG |
| | | DWLNGKEY | | SSLQSGVPS | LSSPVTKSF |
| | | KCKVSNKA | | RFSGSGSGT | NRGEC |
| | | LPAPIEKTIS | | DFTLTISSL | |
| | | KAKGQPRE | | QPEDFATY | |
| | | PQVYTLPPS | | YCQQYYSY | |
| | | REEMTKNQ | | PFTFGPGTK | |
| | | VSLTCLVK | | VDIK | |
| | | GFYPSDIAV | | | |
| | | EWESNGQP | | | |
| | | ENNYKTTPP | | | |
| | | VLDSDGSFF | | | |
| | | LYSKLTVD | | | |
| | | KSRWQQGN | | | |
| | | VFSCSVMH | | | |
| | | EALHNHYT | | | |
| | | QKSLSLSPG | | | |
| | | K | | | |
| 2-anti-CD3- | EVQLVESG | ASTKGPSVF | GGGGSGGG | QVQLVQSG | QAVVTQEP |
| G2(1H11) | GGLVQPGG | PLAPSSKST | GS | AEVKKPGA | SLTVSPGGT |
| | SLRLSCAAS | SGGTAALG | | SVKVSCKA | VTLTCGSST |
| | GFTFSTYA | CLVKDYFP | | SGYTFTNY | GAVTTSNY |
| | MNWVRQA | EPVTVSWN | | YMHWVRQ | ANWVQQKP |
| | PGKGLEWV | SGALTSGV | | APGQGLEW | GKSPRGLIG |
| | GRIRSKYNN | HTFPAVLQS | | MGMINPSG | GTNKRAPG |
| | YATYYADS | SGLYSLSSV | | GGTSYAQK | VPARFSGSL |
| | VKGRFTISR | VTVPSSSLG | | FQGRVTMT | LGGKAALTI |
| | DDSKNTLY | TQTYICNVN | | RDTSTSTVY | SGAQPEDE |
| | LQMNSLRA | HKPSNTKV | | MELSSLRSE | ADYYCALW |
| | EDTAVYYC | DKRVEPKS | | DTAVYYCA | YSNHWVFG |
| | VRHGNFGD | CDKTHTCPP | | RGNPWELR | GGTKLTVL |
| | SYVSWFAY | CPAPELLGG | | LDYWGQGT | RTVAAPSVF |
| | WGQGTLVT | PSVFLFPPK | | LVTVSSGG | IFPPSDEQL |
| | VSS | PKDTLMISR | | GGSGGGGS | KSGTASVV |
| | | TPEVTCVV | | GGGGSGGG | CLLNNFYPR |
| | | VDVSHEDP | | GSDIQMTQS | EAKVQWK |
| | | EVKFNWYV | | PSSLSASVG | VDNALQSG |
| | | DGVEVHNA | | DRVTITCQA | NSQESVTEQ |
| | | KTKPREEQ | | SQDISNYLN | DSKDSTYSL |
| | | YQSTYRVV | | WYQQKPGK | SSTLTLSKA |
| | | SVLTVLHQ | | APKLLIYAA | DYEKHKVY |
| | | DWLNGKEY | | SSLQSGVPS | ACEVTHQG |
| | | KCKVSNKA | | RFSGSGSGT | LSSPVTKSF |
| | | LPAPIEKTIS | | DFTLTISSL | NRGEC |
| | | KAKGQPRE | | QPEDFATY | |
| | | PQVYTLPPS | | YCQQYYSY | |
| | | REEMTKNQ | | PFTFGPGTK | |
| | | VSLTCLVK | | VDIK | |
| | | GFYPSDIAV | | | |
| | | EWESNGQP | | | |
| | | ENNYKTTPP | | | |
| | | VLDSDGSFF | | | |
| | | LYSKLTVD | | | |
| | | KSRWQQGN | | | |
| | | VFSCSVMH | | | |
| | | EALHNHYT | | | |
| | | QKSLSLSPG | | | |
| | | K | | | |
| 2-hOKT3- | QVQLVQSG | ASTKGPSVF | GGGGSGGG | QVQLVQSG | DIQMTQSPS |
| G5(1C12) | AEVKKPGA | PLAPSSKST | GS | AEVKKPGS | SLSASVGDR |
| | SVKVSCKA | SGGTAALG | | SVKVSCKA | VTITCSASS |
| | SGYTFTRYT | CLVKDYFP | | SGGTFSNFG | SVSYMNWY |
| | MHWVRQA | EPVTVSWN | | VSWLRQAP | QQKPGKAP |
| | PGQGLEWM | SGALTSGV | | GQGLEWM | KRLIYDTSK |
| | GYINPSRGY | HTFPAVLQS | | GGIIPILGTA | LASGVPSRF |
| | TNYNQKFK | SGLYSLSSV | | NYAQKFQG | SGSGSGTDF |
| | DRVTLTTD | VTVPSSSLG | | RVTITADES | TLTISSLQPE |
| | KSSSTAYM | TQTYICNVN | | TSTAYMEL | DFATYYCQ |
| | ELSSLRSED | HKPSNTKV | | SSLRSEDTA | QWSSNPFTF |
| | TAVYYCAR | DKRVEPKS | | VYYCATPT | GQGTKLEIK |
| | YYDDHYSL | CDKTHTCPP | | NSGYYGPY | RTVAAPSVF |
| | DYWGQGTL | CPAPELLGG | | YYYGMDV | IFPPSDEQL |
| | VTVSS | PSVFLFPPK | | WGQGTTVT | KSGTASVV |
| | | PKDTLMISR | | VSSGGGGS | CLLNNFYPR |
| | | TPEVTCVV | | GGGGSGGG | EAKVQWK |
| | | VDVSHEDP | | GSGGGGSDI | VDNALQSG |
| | | EVKFNWYV | | QMTQSPSSL | NSQESVTEQ |
| | | DGVEVHNA | | SASVGDRV | DSKDSTYSL |
| | | KTKPREEQ | | TITCRASQSI | SSTLTLSKA |
| | | YQSTYRVV | | SSWLAWYQ | DYEKHKVY |
| | | SVLTVLHQ | | QKPGKAPK | ACEVTHQG |
| | | DWLNGKEY | | LLIYAASTL | LSSPVTKSF |
| | | KCKVSNKA | | QSGVPSRFS | NRGEC |
| | | LPAPIEKTIS | | GSGSGTDFT | |
| | | KAKGQPRE | | LTISSLQPE | |
| | | PQVYTLPPS | | DFATYYCQ | |
| | | REEMTKNQ | | QSYSIPLTF | |
| | | VSLTCLVK | | GGGTKVEI | |
| | | GFYPSDIAV | | K | |
| | | EWESNGQP | | | |
| | | ENNYKTTPP | | | |
| | | VLDSDGSFF | | | |
| | | LYSKLTVD | | | |
| | | KSRWQQGN | | | |
| | | VFSCSVMH | | | |
| | | EALHNHYT | | | |
| | | QKSLSLSPG | | | |
| | | K | | | |
| 2-anti-CD3- | EVQLVESG | ASTKGPSVF | GGGGSGGG | QVQLVQSG | QAVVTQEP |
| G5(1C12) | GGLVQPGG | PLAPSSKST | GS | AEVKKPGS | SLTVSPGGT |
| | SLRLSCAAS | SGGTAALG | | SVKVSCKA | VTLTCGSST |
| | GFTFSTYA | CLVKDYFP | | SGGTFSNFG | GAVTTSNY |
| | MNWVRQA | EPVTVSWN | | VSWLRQAP | ANWVQQKP |
| | PGKGLEWV | SGALTSGV | | GQGLEWM | GKSPRGLIG |
| | GRIRSKYNN | HTFPAVLQS | | GGIIPILGTA | GTNKRAPG |
| | YATYYADS | SGLYSLSSV | | NYAQKFQG | VPARFSGSL |
| | VKGRFTISR | VTVPSSSLG | | RVTITADES | LGGKAALTI |
| | DDSKNTLY | TQTYICNVN | | TSTAYMEL | SGAQPEDE |
| | LQMNSLRA | HKPSNTKV | | SSLRSEDTA | ADYYCALW |
| | EDTAVYYC | DKRVEPKS | | VYYCATPT | YSNHWVFG |
| | VRHGNFGD | CDKTHTCPP | | NSGYYGPY | GGTKLTVL |
| | SYVSWFAY | CPAPELLGG | | YYYGMDV | RTVAAPSVF |
| | WGQGTLVT | PSVFLFPPK | | WGQGTTVT | IFPPSDEQL |
| | VSS | PKDTLMISR | | VSSGGGGS | KSGTASVV |
| | | TPEVTCVV | | GGGGSGGG | CLLNNFYPR |
| | | VDVSHEDP | | GSGGGGSDI | EAKVQWK |
| | | EVKFNWYV | | QMTQSPSSL | VDNALQSG |
| | | DGVEVHNA | | SASVGDRV | NSQESVTEQ |
| | | KTKPREEQ | | TITCRASQSI | DSKDSTYSL |
| | | YQSTYRVV | | SSWLAWYQ | SSTLTLSKA |
| | | SVLTVLHQ | | QKPGKAPK | DYEKHKVY |
| | | DWLNGKEY | | LLIYAASTL | ACEVTHQG |
| | | KCKVSNKA | | QSGVPSRFS | LSSPVTKSF |
| | | LPAPIEKTIS | | GSGSGTDFT | NRGEC |
| | | KAKGQPRE | | LTISSLQPE | |
| | | PQVYTLPPS | | DFATYYCQ | |
| | | REEMTKNQ | | QSYSIPLTF | |
| | | VSLTCLVK | | GGGTKVEI | |
| | | GFYPSDIAV | | K | |
| | | EWESNGQP | | | |
| | | ENNYKTTPP | | | |
| | | VLDSDGSFF | | | |
| | | LYSKLTVD | | | |
| | | KSRWQQGN | | | |
| | | VFSCSVMH | | | |
| | | EALHNHYT | | | |
| | | QKSLSLSPG | | | |
| | | K | | | |

TABLE 35
Exemplary Bispecific Format 3 Constructs

| | | CH1_CH2_ | scFv | Linker-Fc | |
|---|---|---|---|---|---|
| Name | VH (Chain2) | CH3 (Chain2) | (Chain1) | (Chain1) | LC (Chain 3) |
| 3-hOKT3- | QVQLVQSG | ASTKGPSVF | QVQLVQSG | GGGGSEPK | DIQMTQSPS |
| G2(1H11) | AEVKKPGA | PLAPSSKST | AEVKKPGA | SSDKTHTCP | SLSASVGDR |
| | SVKVSCKA | SGGTAALG | SVKVSCKA | PCPAPELLG | VTITCSASS |
| | SGYTFTRYT | CLVKDYFP | SGYTFTNY | GPSVFLFPP | SVSYMNWY |
| | MHWVRQA | EPVTVSWN | YMHWVRQ | KPKDTLMIS | QQKPGKAP |
| | PGQGLEWM | SGALTSGV | APGQGLEW | RTPEVTCV | KRLIYDTSK |
| | GYINPSRGY | HTFPAVLQS | MGMINPSG | VVDVSHED | LASGVPSRF |
| | TNYNQKFK | SGLYSLSSV | GGTSYAQK | PEVKFNWY | SGSGSGTDF |
| | DRVTLTTD | VTVPSSSLG | FQGRVTMT | VDGVEVHN | TLTISSLQPE |
| | KSSSTAYM | TQTYICNVN | RDTSTSTVY | AKTKPREE | DFATYYCQ |
| | ELSSLRSED | HKPSNTKV | MELSSLRSE | QYQSTYRV | QWSSNPFTF |
| | TAVYYCAR | DKRVEPKS | DTAVYYCA | VSVLTVLH | GQGTKLEIK |
| | YYDDHYSL | CDKTHTCPP | RGNPWELR | QDWLNGKE | RTVAAPSVF |
| | DYWGQGTL | CPAPELLGG | LDYWGQGT | YKCKVSNK | IFPPSDEQL |
| | VTVSS | PSVFLFPPK | LVTVSSGG | ALPAPIEKTI | KSGTASVV |
| | | PKDTLMISR | GGSGGGGS | SKAKGQPR | CLLNNFYPR |
| | | TPEVTCVV | GGGGSGGG | EPQVYTLPP | EAKVQWK |
| | | VDVSHEDP | GSDIQMTQS | CREEMTKN | VDNALQSG |
| | | EVKFNWYV | PSSLSASVG | QVSLWCLV | NSQESVTEQ |
| | | DGVEVHNA | DRVTITCQA | KGFYPSDIA | DSKDSTYSL |
| | | KTKPREEQ | SQDISNYLN | VEWESNGQ | SSTLTLSKA |
| | | YQSTYRVV | WYQQKPGK | PENNYKTTP | DYEKHKVY |
| | | SVLTVLHQ | APKLLIYAA | PVLDSDGSF | ACEVTHQG |
| | | DWLNGKEY | SSLQSGVPS | FLYSKLTVD | LSSPVTKSF |
| | | KCKVSNKA | RFSGSGSGT | KSRWQQGN | NRGEC |
| | | LPAPIEKTIS | DFTLTISSL | VFSCSVMH | |
| | | KAKGQPRE | QPEDFATY | EALHNHYT | |
| | | PQVCTLPPS | YCQQYYSY | QKSLSLSPG | |
| | | REEMTKNQ | PFTFGPGTK | K | |
| | | VSLSCAVK | VDIK | | |
| | | GFYPSDIAV | | | |
| | | EWESNGQP | | | |
| | | ENNYKTTPP | | | |
| | | VLDSDGSFF | | | |
| | | LVSKLTVD | | | |
| | | KSRWQQGN | | | |
| | | VFSCSVMH | | | |
| | | EALHNRFT | | | |
| | | QKSLSLSPG | | | |
| | | K | | | |
| 3-anti-CD3- | EVQLVESG | ASTKGPSVF | QVQLVQSG | GGGGSEPK | QAVVTQEP |
| G2(1H11) | GGLVQPGG | PLAPSSKST | AEVKKPGA | SSDKTHTCP | SLTVSPGGT |
| | SLRLSCAAS | SGGTAALG | SVKVSCKA | PCPAPELLG | VTLTCGSST |
| | GFTFSTYA | CLVKDYFP | SGYTFTNY | GPSVFLFPP | GAVTTSNY |
| | MNWVRQA | EPVTVSWN | YMHWVRQ | KPKDTLMIS | ANWVQQKP |
| | PGKGLEWV | SGALTSGV | APGQGLEW | RTPEVTCV | GKSPRGLIG |
| | GRIRSKYNN | HTFPAVLQS | MGMINPSG | VVDVSHED | GTNKRAPG |
| | YATYYADS | SGLYSLSSV | GGTSYAQK | PEVKFNWY | VPARFSGSL |
| | VKGRFTISR | VTVPSSSLG | FQGRVTMT | VDGVEVHN | LGGKAALTI |
| | DDSKNTLY | TQTYICNVN | RDTSTSTVY | AKTKPREE | SGAQPEDE |
| | LQMNSLRA | HKPSNTKV | MELSSLRSE | QYQSTYRV | ADYYCALW |
| | EDTAVYYC | DKRVEPKS | DTAVYYCA | VSVLTVLH | YSNHWVFG |
| | VRHGNFGD | CDKTHTCPP | RGNPWELR | QDWLNGKE | GGTKLTVL |
| | SYVSWFAY | CPAPELLGG | LDYWGQGT | YKCKVSNK | RTVAAPSVF |
| | WGQGTLVT | PSVFLFPPK | LVTVSSGG | ALPAPIEKTI | IFPPSDEQL |
| | VSS | PKDTLMISR | GGSGGGGS | SKAKGQPR | KSGTASVV |
| | | TPEVTCVV | GGGGSGGG | EPQVYTLPP | CLLNNFYPR |
| | | VDVSHEDP | GSDIQMTQS | CREEMTKN | EAKVQWK |
| | | EVKFNWYV | PSSLSASVG | QVSLWCLV | VDNALQSG |
| | | DGVEVHNA | DRVTITCQA | KGFYPSDIA | NSQESVTEQ |
| | | KTKPREEQ | SQDISNYLN | VEWESNGQ | DSKDSTYSL |
| | | YQSTYRVV | WYQQKPGK | PENNYKTTP | SSTLTLSKA |
| | | SVLTVLHQ | APKLLIYAA | PVLDSDGSF | DYEKHKVY |
| | | DWLNGKEY | SSLQSGVPS | FLYSKLTVD | ACEVTHQG |
| | | KCKVSNKA | RFSGSGSGT | KSRWQQGN | LSSPVTKSF |
| | | LPAPIEKTIS | DFTLTISSL | VFSCSVMH | NRGEC |
| | | KAKGQPRE | QPEDFATY | EALHNHYT | |
| | | PQVCTLPPS | YCQQYYSY | QKSLSLSPG | |
| | | REEMTKNQ | PFTFGPGTK | K | |
| | | VSLSCAVK | VDIK | | |
| | | GFYPSDIAV | | | |
| | | EWESNGQP | | | |
| | | ENNYKTTPP | | | |
| | | VLDSDGSFF | | | |
| | | LVSKLTVD | | | |
| | | KSRWQQGN | | | |
| | | VFSCSVMH | | | |
| | | EALHNRFT | | | |
| | | QKSLSLSPG | | | |
| | | K | | | |
| 3-hOKT3- | QVQLVQSG | ASTKGPSVF | QVQLVQSG | GGGGSEPK | DIQMTQSPS |
| G5(1C12) | AEVKKPGA | PLAPSSKST | AEVKKPGS | SSDKTHTCP | SLSASVGDR |
| | SVKVSCKA | SGGTAALG | SVKVSCKA | PCPAPELLG | VTITCSASS |
| | SGYTFTRYT | CLVKDYFP | SGGTFSNFG | GPSVFLFPP | SVSYMNWY |
| | MHWVRQA | EPVTVSWN | VSWLRQAP | KPKDTLMIS | QQKPGKAP |
| | PGQGLEWM | SGALTSGV | GQGLEWM | RTPEVTCV | KRLIYDTSK |
| | GYINPSRGY | HTFPAVLQS | GGIIPILGTA | VVDVSHED | LASGVPSRF |
| | TNYNQKFK | SGLYSLSSV | NYAQKFQG | PEVKFNWY | SGSGSGTDF |
| | DRVTLTTD | VTVPSSSLG | RVTITADES | VDGVEVHN | TLTISSLQPE |
| | KSSSTAYM | TQTYICNVN | TSTAYMEL | AKTKPREE | DFATYYCQ |
| | ELSSLRSED | HKPSNTKV | SSLRSEDTA | QYQSTYRV | QWSSNPFTF |
| | TAVYYCAR | DKRVEPKS | VYYCATPT | VSVLTVLH | GQGTKLEIK |
| | YYDDHYSL | CDKTHTCPP | NSGYYGPY | QDWLNGKE | RTVAAPSVF |
| | DYWGQGTL | CPAPELLGG | YYYGMDV | YKCKVSNK | IFPPSDEQL |
| | VTVSS | PSVFLFPPK | WGQGTTVT | ALPAPIEKTI | KSGTASVV |
| | | PKDTLMISR | VSSGGGGS | SKAKGQPR | CLLNNFYPR |
| | | TPEVTCVV | GGGGSGGG | EPQVYTLPP | EAKVQWK |
| | | VDVSHEDP | GSGGGGSDI | CREEMTKN | VDNALQSG |
| | | EVKFNWYV | QMTQSPSSL | QVSLWCLV | NSQESVTEQ |
| | | DGVEVHNA | SASVGDRV | KGFYPSDIA | DSKDSTYSL |
| | | KTKPREEQ | TITCRASQSI | VEWESNGQ | SSTLTLSKA |
| | | YQSTYRVV | SSWLAWYQ | PENNYKTTP | DYEKHKVY |
| | | SVLTVLHQ | QKPGKAPK | PVLDSDGSF | ACEVTHQG |
| | | DWLNGKEY | LLIYAASTL | FLYSKLTVD | LSSPVTKSF |
| | | KCKVSNKA | QSGVPSRFS | KSRWQQGN | NRGEC |
| | | LPAPIEKTIS | GSGSGTDFT | VFSCSVMH | |
| | | KAKGQPRE | LTISSLQPE | EALHNHYT | |
| | | PQVCTLPPS | DFATYYCQ | QKSLSLSPG | |
| | | REEMTKNQ | QSYSIPLTF | K | |
| | | VSLSCAVK | GGGTKVEI | | |
| | | GFYPSDIAV | K | | |
| | | EWESNGQP | | | |
| | | ENNYKTTPP | | | |
| | | VLDSDGSFF | | | |
| | | LVSKLTVD | | | |
| | | KSRWQQGN | | | |
| | | VFSCSVMH | | | |
| | | EALHNRFT | | | |
| | | QKSLSLSPG | | | |
| | | K | | | |
| 3-anti-CD3- | EVQLVESG | ASTKGPSVF | QVQLVQSG | GGGGSEPK | QAVVTQEP |
| G5(1C12) | GGLVQPGG | PLAPSSKST | AEVKKPGS | SSDKTHTCP | SLTVSPGGT |
| | SLRLSCAAS | SGGTAALG | SVKVSCKA | PCPAPELLG | VTLTCGSST |
| | GFTFSTYA | CLVKDYFP | SGGTFSNFG | GPSVFLFPP | GAVTTSNY |
| | MNWVRQA | EPVTVSWN | VSWLRQAP | KPKDTLMIS | ANWVQQKP |
| | PGKGLEWV | SGALTSGV | GQGLEWM | RTPEVTCV | GKSPRGLIG |
| | GRIRSKYNN | HTFPAVLQS | GGIIPILGTA | VVDVSHED | GTNKRAPG |
| | YATYYADS | SGLYSLSSV | NYAQKFQG | PEVKFNWY | VPARFSGSL |
| | VKGRFTISR | VTVPSSSLG | RVTITADES | VDGVEVHN | LGGKAALTI |
| | DDSKNTLY | TQTYICNVN | TSTAYMEL | AKTKPREE | SGAQPEDE |
| | LQMNSLRA | HKPSNTKV | SSLRSEDTA | QYQSTYRV | ADYYCALW |
| | EDTAVYYC | DKRVEPKS | VYYCATPT | VSVLTVLH | YSNHWVFG |
| | VRHGNFGD | CDKTHTCPP | NSGYYGPY | QDWLNGKE | GGTKLTVL |
| | SYVSWFAY | CPAPELLGG | YYYGMDV | YKCKVSNK | RTVAAPSVF |
| | WGQGTLVT | PSVFLFPPK | WGQGTTVT | ALPAPIEKTI | IFPPSDEQL |
| | VSS | PKDTLMISR | VSSGGGGS | SKAKGQPR | KSGTASVV |
| | | TPEVTCVV | GGGGSGGG | EPQVYTLPP | CLLNNFYPR |
| | | VDVSHEDP | GSGGGGSDI | CREEMTKN | EAKVQWK |
| | | EVKFNWYV | QMTQSPSSL | QVSLWCLV | VDNALQSG |
| | | DGVEVHNA | SASVGDRV | KGFYPSDIA | NSQESVTEQ |
| | | KTKPREEQ | TITCRASQSI | VEWESNGQ | DSKDSTYSL |
| | | YQSTYRVV | SSWLAWYQ | PENNYKTTP | SSTLTLSKA |
| | | SVLTVLHQ | QKPGKAPK | PVLDSDGSF | DYEKHKVY |
| | | DWLNGKEY | LLIYAASTL | FLYSKLTVD | ACEVTHQG |
| | | KCKVSNKA | QSGVPSRFS | KSRWQQGN | LSSPVTKSF |
| | | LPAPIEKTIS | GSGSGTDFT | VFSCSVMH | NRGEC |
| | | KAKGQPRE | LTISSLQPE | EALHNHYT | |
| | | PQVCTLPPS | DFATYYCQ | QKSLSLSPG | |
| | | REEMTKNQ | QSYSIPLTF | K | |
| | | VSLSCAVK | GGGTKVEI | | |
| | | GFYPSDIAV | K | | |
| | | EWESNGQP | | | |
| | | ENNYKTTPP | | | |
| | | VLDSDGSFF | | | |
| | | LVSKLTVD | | | |
| | | KSRWQQGN | | | |
| | | VFSCSVMH | | | |
| | | EALHNRFT | | | |
| | | QKSLSLSPG | | | |
| | | K | | | |

TABLE 36
Exemplary Bispecific Format 4 Constructs

| | | scFv | | | CH1-CH2- | |
|---|---|---|---|---|---|---|
| | Linker-Fc | (Chains 1 | Linker | VH | CH3 | LC |
| Name | (Chain1) | and 2) | (Chain2) | (Chain2) | (Chain2) | (Chain 3) |
| 4-hOKT3- | GGGGSEP | QVQLVQS | GGGGSG | QVQLVQS | ASTKGPS | DIQMTQS |
| G2(1H11) | KSSDKTH | GAEVKKP | GGGS | GAEVKKP | VFPLAPSS | PSSLSASV |
| | TCPPCPA | GASVKVS | | GASVKVS | KSTSGGT | GDRVTIT |
| | PELLGGP | CKASGYT | | CKASGYT | AALGCLV | CSASSSV |
| | SVFLFPPK | FTNYYM | | FTRYTMH | KDYFPEP | SYMNWY |
| | PKDTLMI | HWVRQA | | WVRQAP | VTVSWNS | QQKPGK |
| | SRTPEVT | PGQGLE | | GQGLEW | GALTSGV | APKRLIY |
| | CVVVDVS | WMGMIN | | MGYINPS | HTFPAVL | DTSKLAS |
| | HEDPEVK | PSGGGTS | | RGYTNY | QSSGLYS | GVPSRFS |
| | FNWYVD | YAQKFQ | | NQKFKDR | LSSVVTV | GSGSGTD |
| | GVEVHN | GRVTMT | | VTLTTDK | PSSSLGT | FTLTISSL |
| | AKTKPRE | RDTSTST | | SSSTAYM | QTYICNV | QPEDFAT |
| | EQYQSTY | VYMELSS | | ELSSLRSE | NHKPSNT | YYCQQW |
| | RVVSVLT | LRSEDTA | | DTAVYY | KVDKRV | SSNPFTFG |
| | VLHQDW | VYYCAR | | CARYYD | EPKSCDK | QGTKLEI |
| | LNGKEYK | GNPWELR | | DHYSLDY | THTCPPC | KRTVAAP |
| | CKVSNKA | LDYWGQ | | WGQGTL | PAPELLG | SVFIFPPS |
| | LPAPIEKT | GTLVTVS | | VTVSS | GPSVFLFP | DEQLKSG |
| | ISKAKGQ | SGGGGSG | | | PKPKDTL | TASVVCL |
| | PREPQVY | GGGSGG | | | MISRTPE | LNNFYPR |
| | TLPPCRE | GGSGGG | | | VTCVVV | EAKVQW |
| | EMTKNQ | GSDIQMT | | | DVSHEDP | KVDNAL |
| | VSLWCLV | QSPSSLSA | | | EVKFNW | QSGNSQE |
| | KGFYPSD | SVGDRVT | | | YVDGVE | SVTEQDS |
| | IAVEWES | ITCQASQ | | | VHNAKT | KDSTYSL |
| | NGQPENN | DISNYLN | | | KPREEQY | SSTLTLSK |
| | YKTTPPV | WYQQKP | | | QSTYRVV | ADYEKH |
| | LDSDGSF | GKAPKLL | | | SVLTVLH | KVYACE |
| | FLYSKLT | IYAASSL | | | QDWLNG | VTHQGLS |
| | VDKSRW | QSGVPSR | | | KEYKCK | SPVTKSF |
| | QQGNVFS | FSGSGSG | | | VSNKALP | NRGEC |
| | CSVMHE | TDFTLTIS | | | APIEKTIS | |
| | ALHNHYT | SLQPEDF | | | KAKGQPR | |
| | QKSLSLS | ATYYCQ | | | EPQVCTL | |
| | PGK | QYYSYPF | | | PPSREEM | |
| | | TFGPGTK | | | TKNQVSL | |
| | | VDIK | | | SCAVKGF | |
| | | | | | YPSDIAV | |
| | | | | | EWESNG | |
| | | | | | QPENNYK | |
| | | | | | TTPPVLD | |
| | | | | | SDGSFFL | |
| | | | | | VSKLTVD | |
| | | | | | KSRWQQ | |
| | | | | | GNVFSCS | |
| | | | | | VMHEAL | |
| | | | | | HNRFTQK | |
| | | | | | SLSLSPG | |
| | | | | | K | |
| 4-anti- | GGGGSEP | QVQLVQS | GGGGSG | EVQLVES | ASTKGPS | QAVVTQE |
| CD3- | KSSDKTH | GAEVKKP | GGGS | GGGLVQP | VFPLAPSS | PSLTVSP |
| G2(1H11) | TCPPCPA | GASVKVS | | GGSLRLS | KSTSGGT | GGTVTLT |
| | PELLGGP | CKASGYT | | CAASGFT | AALGCLV | CGSSTGA |
| | SVFLFPPK | FTNYYM | | FSTYAMN | KDYFPEP | VTTSNYA |
| | PKDTLMI | HWVRQA | | WVRQAP | VTVSWNS | NWVQQK |
| | SRTPEVT | PGQGLE | | GKGLEW | GALTSGV | PGKSPRG |
| | CVVVDVS | WMGMIN | | VGRIRSK | HTFPAVL | LIGGTNK |
| | HEDPEVK | PSGGGTS | | YNNYAT | QSSGLYS | RAPGVPA |
| | FNWYVD | YAQKFQ | | YYADSV | LSSVVTV | RFSGSLL |
| | GVEVHN | GRVTMT | | KGRFTISR | PSSSLGT | GGKAALT |
| | AKTKPRE | RDTSTST | | DDSKNTL | QTYICNV | ISGAQPE |
| | EQYQSTY | VYMELSS | | YLQMNSL | NHKPSNT | DEADYY |
| | RVVSVLT | LRSEDTA | | RAEDTAV | KVDKRV | CALWYS |
| | VLHQDW | VYYCAR | | YYCVRH | EPKSCDK | NHWVFG |
| | LNGKEYK | GNPWELR | | GNFGDSY | THTCPPC | GGTKLTV |
| | CKVSNKA | LDYWGQ | | VSWFAY | PAPELLG | LRTVAAP |
| | LPAPIEKT | GTLVTVS | | WGQGTL | GPSVFLFP | SVFIFPPS |
| | ISKAKGQ | SGGGGSG | | VTVSS | PKPKDTL | DEQLKSG |
| | PREPQVY | GGGSGG | | | MISRTPE | TASVVCL |
| | TLPPCRE | GGSGGG | | | VTCVVV | LNNFYPR |
| | EMTKNQ | GSDIQMT | | | DVSHEDP | EAKVQW |
| | VSLWCLV | QSPSSLSA | | | EVKFNW | KVDNAL |
| | KGFYPSD | SVGDRVT | | | YVDGVE | QSGNSQE |
| | IAVEWES | ITCQASQ | | | VHNAKT | SVTEQDS |
| | NGQPENN | DISNYLN | | | KPREEQY | KDSTYSL |
| | YKTTPPV | WYQQKP | | | QSTYRVV | SSTLTLSK |
| | LDSDGSF | GKAPKLL | | | SVLTVLH | ADYEKH |
| | FLYSKLT | IYAASSL | | | QDWLNG | KVYACE |
| | VDKSRW | QSGVPSR | | | KEYKCK | VTHQGLS |
| | QQGNVFS | FSGSGSG | | | VSNKALP | SPVTKSF |
| | CSVMHE | TDFTLTIS | | | APIEKTIS | NRGEC |
| | ALHNHYT | SLQPEDF | | | KAKGQPR | |
| | QKSLSLS | ATYYCQ | | | EPQVCTL | |
| | PGK | QYYSYPF | | | PPSREEM | |
| | | TFGPGTK | | | TKNQVSL | |
| | | VDIK | | | SCAVKGF | |
| | | | | | YPSDIAV | |
| | | | | | EWESNG | |
| | | | | | QPENNYK | |
| | | | | | TTPPVLD | |
| | | | | | SDGSFFL | |
| | | | | | VSKLTVD | |
| | | | | | KSRWQQ | |
| | | | | | GNVFSCS | |
| | | | | | VMHEAL | |
| | | | | | HNRFTQK | |
| | | | | | SLSLSPG | |
| | | | | | K | |
| 4-hOKT3- | GGGGSEP | QVQLVQS | GGGGSG | QVQLVQS | ASTKGPS | DIQMTQS |
| G5(1C12) | KSSDKTH | GAEVKKP | GGGS | GAEVKKP | VFPLAPSS | PSSLSASV |
| | TCPPCPA | GSSVKVS | | GASVKVS | KSTSGGT | GDRVTIT |
| | PELLGGP | CKASGGT | | CKASGYT | AALGCLV | CSASSSV |
| | SVFLFPPK | FSNFGVS | | FTRYTMH | KDYFPEP | SYMNWY |
| | PKDTLMI | WLRQAP | | WVRQAP | VTVSWNS | QQKPGK |
| | SRTPEVT | GQGLEW | | GQGLEW | GALTSGV | APKRLIY |
| | CVVVDVS | MGGIIPIL | | MGYINPS | HTFPAVL | DTSKLAS |
| | HEDPEVK | GTANYA | | RGYTNY | QSSGLYS | GVPSRFS |
| | FNWYVD | QKFQGRV | | NQKFKDR | LSSVVTV | GSGSGTD |
| | GVEVHN | TITADEST | | VTLTTDK | PSSSLGT | FTLTISSL |
| | AKTKPRE | STAYMEL | | SSSTAYM | QTYICNV | QPEDFAT |
| | EQYQSTY | SSLRSED | | ELSSLRSE | NHKPSNT | YYCQQW |
| | RVVSVLT | TAVYYC | | DTAVYY | KVDKRV | SSNPFTFG |
| | VLHQDW | ATPTNSG | | CARYYD | EPKSCDK | QGTKLEI |
| | LNGKEYK | YYGPYY | | DHYSLDY | THTCPPC | KRTVAAP |
| | CKVSNKA | YYGMDV | | WGQGTL | PAPELLG | SVFIFPPS |
| | LPAPIEKT | WGQGTT | | VTVSS | GPSVFLFP | DEQLKSG |
| | ISKAKGQ | VTVSSGG | | | PKPKDTL | TASVVCL |
| | PREPQVY | GGSGGG | | | MISRTPE | LNNFYPR |
| | TLPPCRE | GSGGGGS | | | VTCVVV | EAKVQW |
| | EMTKNQ | GGGGSDI | | | DVSHEDP | KVDNAL |
| | VSLWCLV | QMTQSPS | | | EVKFNW | QSGNSQE |
| | KGFYPSD | SLSASVG | | | YVDGVE | SVTEQDS |
| | IAVEWES | DRVTITC | | | VHNAKT | KDSTYSL |
| | NGQPENN | RASQSISS | | | KPREEQY | SSTLTLSK |
| | YKTTPPV | WLAWYQ | | | QSTYRVV | ADYEKH |
| | LDSDGSF | QKPGKAP | | | SVLTVLH | KVYACE |
| | FLYSKLT | KLLIYAA | | | QDWLNG | VTHQGLS |
| | VDKSRW | STLQSGV | | | KEYKCK | SPVTKSF |
| | QQGNVFS | PSRFSGS | | | VSNKALP | NRGEC |
| | CSVMHE | GSGTDFT | | | APIEKTIS | |
| | ALHNHYT | LTISSLQP | | | KAKGQPR | |
| | QKSLSLS | EDFATYY | | | EPQVCTL | |
| | PGK | CQQSYSIP | | | PPSREEM | |
| | | LTFGGGT | | | TKNQVSL | |
| | | KVEIK | | | SCAVKGF | |
| | | | | | YPSDIAV | |
| | | | | | EWESNG | |
| | | | | | QPENNYK | |
| | | | | | TTPPVLD | |
| | | | | | SDGSFFL | |
| | | | | | VSKLTVD | |
| | | | | | KSRWQQ | |
| | | | | | GNVFSCS | |
| | | | | | VMHEAL | |
| | | | | | HNRFTQK | |
| | | | | | SLSLSPG | |
| | | | | | K | |
| 4-anti- | GGGGSEP | QVQLVQS | GGGGSG | EVQLVES | ASTKGPS | QAVVTQE |
| CD3- | KSSDKTH | GAEVKKP | GGGS | GGGLVQP | VFPLAPSS | PSLTVSP |
| G5(1C12) | TCPPCPA | GSSVKVS | | GGSLRLS | KSTSGGT | GGTVTLT |
| | PELLGGP | CKASGGT | | CAASGFT | AALGCLV | CGSSTGA |
| | SVFLFPPK | FSNFGVS | | FSTYAMN | KDYFPEP | VTTSNYA |
| | PKDTLMI | WLRQAP | | WVRQAP | VTVSWNS | NWVQQK |
| | SRTPEVT | GQGLEW | | GKGLEW | GALTSGV | PGKSPRG |
| | CVVVDVS | MGGIIPIL | | VGRIRSK | HTFPAVL | LIGGTNK |
| | HEDPEVK | GTANYA | | YNNYAT | QSSGLYS | RAPGVPA |
| | FNWYVD | QKFQGRV | | YYADSV | LSSVVTV | RFSGSLL |
| | GVEVHN | TITADEST | | KGRFTISR | PSSSLGT | GGKAALT |
| | AKTKPRE | STAYMEL | | DDSKNTL | QTYICNV | ISGAQPE |
| | EQYQSTY | SSLRSED | | YLQMNSL | NHKPSNT | DEADYY |
| | RVVSVLT | TAVYYC | | RAEDTAV | KVDKRV | CALWYS |
| | VLHQDW | ATPTNSG | | YYCVRH | EPKSCDK | NHWVFG |
| | LNGKEYK | YYGPYY | | GNFGDSY | THTCPPC | GGTKLTV |
| | CKVSNKA | YYGMDV | | VSWFAY | PAPELLG | LRTVAAP |
| | LPAPIEKT | WGQGTT | | WGQGTL | GPSVFLFP | SVFIFPPS |
| | ISKAKGQ | VTVSSGG | | VTVSS | PKPKDTL | DEQLKSG |
| | PREPQVY | GGSGGG | | | MISRTPE | TASVVCL |
| | TLPPCRE | GSGGGGS | | | VTCVVV | LNNFYPR |
| | EMTKNQ | GGGGSDI | | | DVSHEDP | EAKVQW |
| | VSLWCLV | QMTQSPS | | | EVKFNW | KVDNAL |
| | KGFYPSD | SLSASVG | | | YVDGVE | QSGNSQE |
| | IAVEWES | DRVTITC | | | VHNAKT | SVTEQDS |
| | NGQPENN | RASQSISS | | | KPREEQY | KDSTYSL |
| | YKTTPPV | WLAWYQ | | | QSTYRVV | SSTLTLSK |
| | LDSDGSF | QKPGKAP | | | SVLTVLH | ADYEKH |
| | FLYSKLT | KLLIYAA | | | QDWLNG | KVYACE |
| | VDKSRW | STLQSGV | | | KEYKCK | VTHQGLS |
| | QQGNVFS | PSRFSGS | | | VSNKALP | SPVTKSF |
| | CSVMHE | GSGTDFT | | | APIEKTIS | NRGEC |
| | ALHNHYT | LTISSLQP | | | KAKGQPR | |
| | QKSLSLS | EDFATYY | | | EPQVCTL | |
| | PGK | CQQSYSIP | | | PPSREEM | |
| | | LTFGGGT | | | TKNQVSL | |
| | | KVEIK | | | SCAVKGF | |
| | | | | | YPSDIAV | |
| | | | | | EWESNG | |
| | | | | | QPENNYK | |
| | | | | | TTPPVLD | |
| | | | | | SDGSFFL | |
| | | | | | VSKLTVD | |
| | | | | | KSRWQQ | |
| | | | | | GNVFSCS | |
| | | | | | VMHEAL | |
| | | | | | HNRFTQK | |
| | | | | | SLSLSPG | |
| | | | | | K | |

TABLE 37
Exemplary Bispecific Format 5 Constructs

| | | | | | CH1-CH2- | |
|---|---|---|---|---|---|---|
| | Hinge-Fc | scFv | Linker | VH | CH3 | LC |
| Name | (Chain1) | (Chain2) | (Chain2) | (Chain2) | (Chain2) | (Chain 3) |
| 5-hOKT3- | GSEPKSS | QVQLVQS | GGGGSG | QVQLVQS | ASTKGPS | DIQMTQS |
| G2(1H11) | DKTHTCP | GAEVKKP | GGGS | GAEVKKP | VFPLAPSS | PSSLSASV |
| | PCPAPEL | GASVKVS | | GASVKVS | KSTSGGT | GDRVTIT |
| | LGGPSVF | CKASGYT | | CKASGYT | AALGCLV | CSASSSV |
| | LFPPKPK | FTNYYM | | FTRYTMH | KDYFPEP | SYMNWY |
| | DTLMISR | HWVRQA | | WVRQAP | VTVSWNS | QQKPGK |
| | TPEVTCV | PGQGLE | | GQGLEW | GALTSGV | APKRLIY |
| | VVDVSHE | WMGMIN | | MGYINPS | HTFPAVL | DTSKLAS |
| | DPEVKFN | PSGGGTS | | RGYTNY | QSSGLYS | GVPSRFS |
| | WYVDGV | YAQKFQ | | NQKFKDR | LSSVVTV | GSGSGTD |
| | EVHNAKT | GRVTMT | | VTLTTDK | PSSSLGT | FTLTISSL |
| | KPREEQY | RDTSTST | | SSSTAYM | QTYICNV | QPEDFAT |
| | QSTYRVV | VYMELSS | | ELSSLRSE | NHKPSNT | YYCQQW |
| | SVLTVLH | LRSEDTA | | DTAVYY | KVDKRV | SSNPFTFG |
| | QDWLNG | VYYCAR | | CARYYD | EPKSCDK | QGTKLEI |
| | KEYKCK | GNPWELR | | DHYSLDY | THTCPPC | KRTVAAP |
| | VSNKALP | LDYWGQ | | WGQGTL | PAPELLG | SVFIFPPS |
| | APIEKTIS | GTLVTVS | | VTVSS | GPSVFLFP | DEQLKSG |
| | KAKGQPR | SGGGGSG | | | PKPKDTL | TASVVCL |
| | EPQVYTL | GGGSGG | | | MISRTPE | LNNFYPR |
| | PPCREEM | GGSGGG | | | VTCVVV | EAKVQW |
| | TKNQVSL | GSDIQMT | | | DVSHEDP | KVDNAL |
| | WCLVKG | QSPSSLSA | | | EVKFNW | QSGNSQE |
| | FYPSDIA | SVGDRVT | | | YVDGVE | SVTEQDS |
| | VEWESN | ITCQASQ | | | VHNAKT | KDSTYSL |
| | GQPENNY | DISNYLN | | | KPREEQY | SSTLTLSK |
| | KTTPPVL | WYQQKP | | | QSTYRVV | ADYEKH |
| | DSDGSFF | GKAPKLL | | | SVLTVLH | KVYACE |
| | LYSKLTV | IYAASSL | | | QDWLNG | VTHQGLS |
| | DKSRWQ | QSGVPSR | | | KEYKCK | SPVTKSF |
| | QGNVFSC | FSGSGSG | | | VSNKALP | NRGEC |
| | SVMHEAL | TDFTLTIS | | | APIEKTIS | |
| | HNHYTQ | SLQPEDF | | | KAKGQPR | |
| | KSLSLSP | ATYYCQ | | | EPQVCTL | |
| | GK | QYYSYPF | | | PPSREEM | |
| | | TFGPGTK | | | TKNQVSL | |
| | | VDIK | | | SCAVKGF | |
| | | | | | YPSDIAV | |
| | | | | | EWESNG | |
| | | | | | QPENNYK | |
| | | | | | TTPPVLD | |
| | | | | | SDGSFFL | |
| | | | | | VSKLTVD | |
| | | | | | KSRWQQ | |
| | | | | | GNVFSCS | |
| | | | | | VMHEAL | |
| | | | | | HNRFTQK | |
| | | | | | SLSLSPG | |
| | | | | | K | |
| 5-anti- | GSEPKSS | QVQLVQS | GGGGSG | EVQLVES | ASTKGPS | QAVVTQE |
| CD3- | DKTHTCP | GAEVKKP | GGGS | GGGLVQP | VFPLAPSS | PSLTVSP |
| G2(1H11) | PCPAPEL | GASVKVS | | GGSLRLS | KSTSGGT | GGTVTLT |
| | LGGPSVF | CKASGYT | | CAASGFT | AALGCLV | CGSSTGA |
| | LFPPKPK | FTNYYM | | FSTYAMN | KDYFPEP | VTTSNYA |
| | DTLMISR | HWVRQA | | WVRQAP | VTVSWNS | NWVQQK |
| | TPEVTCV | PGQGLE | | GKGLEW | GALTSGV | PGKSPRG |
| | VVDVSHE | WMGMIN | | VGRIRSK | HTFPAVL | LIGGTNK |
| | DPEVKFN | PSGGGTS | | YNNYAT | QSSGLYS | RAPGVPA |
| | WYVDGV | YAQKFQ | | YYADSV | LSSVVTV | RFSGSLL |
| | EVHNAKT | GRVTMT | | KGRFTISR | PSSSLGT | GGKAALT |
| | KPREEQY | RDTSTST | | DDSKNTL | QTYICNV | ISGAQPE |
| | QSTYRVV | VYMELSS | | YLQMNSL | NHKPSNT | DEADYY |
| | SVLTVLH | LRSEDTA | | RAEDTAV | KVDKRV | CALWYS |
| | QDWLNG | VYYCAR | | YYCVRH | EPKSCDK | NHWVFG |
| | KEYKCK | GNPWELR | | GNFGDSY | THTCPPC | GGTKLTV |
| | VSNKALP | LDYWGQ | | VSWFAY | PAPELLG | LRTVAAP |
| | APIEKTIS | GTLVTVS | | WGQGTL | GPSVFLFP | SVFIFPPS |
| | KAKGQPR | SGGGGSG | | VTVSS | PKPKDTL | DEQLKSG |
| | EPQVYTL | GGGSGG | | | MISRTPE | TASVVCL |
| | PPCREEM | GGSGGG | | | VTCVVV | LNNFYPR |
| | TKNQVSL | GSDIQMT | | | DVSHEDP | EAKVQW |
| | WCLVKG | QSPSSLSA | | | EVKFNW | KVDNAL |
| | FYPSDIA | SVGDRVT | | | YVDGVE | QSGNSQE |
| | VEWESN | ITCQASQ | | | VHNAKT | SVTEQDS |
| | GQPENNY | DISNYLN | | | KPREEQY | KDSTYSL |
| | KTTPPVL | WYQQKP | | | QSTYRVV | SSTLTLSK |
| | DSDGSFF | GKAPKLL | | | SVLTVLH | ADYEKH |
| | LYSKLTV | IYAASSL | | | QDWLNG | KVYACE |
| | DKSRWQ | QSGVPSR | | | KEYKCK | VTHQGLS |
| | QGNVFSC | FSGSGSG | | | VSNKALP | SPVTKSF |
| | SVMHEAL | TDFTLTIS | | | APIEKTIS | NRGEC |
| | HNHYTQ | SLQPEDF | | | KAKGQPR | |
| | KSLSLSP | ATYYCQ | | | EPQVCTL | |
| | GK | QYYSYPF | | | PPSREEM | |
| | | TFGPGTK | | | TKNQVSL | |
| | | VDIK | | | SCAVKGF | |
| | | | | | YPSDIAV | |
| | | | | | EWESNG | |
| | | | | | QPENNYK | |
| | | | | | TTPPVLD | |
| | | | | | SDGSFFL | |
| | | | | | VSKLTVD | |
| | | | | | KSRWQQ | |
| | | | | | GNVFSCS | |
| | | | | | VMHEAL | |
| | | | | | HNRFTQK | |
| | | | | | SLSLSPG | |
| | | | | | K | |
| 5-hOKT3- | GSEPKSS | QVQLVQS | GGGGSG | QVQLVQS | ASTKGPS | DIQMTQS |
| G5(1C12) | DKTHTCP | GAEVKKP | GGGS | GAEVKKP | VFPLAPSS | PSSLSASV |
| | PCPAPEL | GSSVKVS | | GASVKVS | KSTSGGT | GDRVTIT |
| | LGGPSVF | CKASGGT | | CKASGYT | AALGCLV | CSASSSV |
| | LFPPKPK | FSNFGVS | | FTRYTMH | KDYFPEP | SYMNWY |
| | DTLMISR | WLRQAP | | WVRQAP | VTVSWNS | QQKPGK |
| | TPEVTCV | GQGLEW | | GQGLEW | GALTSGV | APKRLIY |
| | VVDVSHE | MGGIIPIL | | MGYINPS | HTFPAVL | DTSKLAS |
| | DPEVKFN | GTANYA | | RGYTNY | QSSGLYS | GVPSRFS |
| | WYVDGV | QKFQGRV | | NQKFKDR | LSSVVTV | GSGSGTD |
| | EVHNAKT | TITADEST | | VTLTTDK | PSSSLGT | FTLTISSL |
| | KPREEQY | STAYMEL | | SSSTAYM | QTYICNV | QPEDFAT |
| | QSTYRVV | SSLRSED | | ELSSLRSE | NHKPSNT | YYCQQW |
| | SVLTVLH | TAVYYC | | DTAVYY | KVDKRV | SSNPFTFG |
| | QDWLNG | ATPTNSG | | CARYYD | EPKSCDK | QGTKLEI |
| | KEYKCK | YYGPYY | | DHYSLDY | THTCPPC | KRTVAAP |
| | VSNKALP | YYGMDV | | WGQGTL | PAPELLG | SVFIFPPS |
| | APIEKTIS | WGQGTT | | VTVSS | GPSVFLFP | DEQLKSG |
| | KAKGQPR | VTVSSGG | | | PKPKDTL | TASVVCL |
| | EPQVYTL | GGSGGG | | | MISRTPE | LNNFYPR |
| | PPCREEM | GSGGGGS | | | VTCVVV | EAKVQW |
| | TKNQVSL | GGGGSDI | | | DVSHEDP | KVDNAL |
| | WCLVKG | QMTQSPS | | | EVKFNW | QSGNSQE |
| | FYPSDIA | SLSASVG | | | YVDGVE | SVTEQDS |
| | VEWESN | DRVTITC | | | VHNAKT | KDSTYSL |
| | GQPENNY | RASQSISS | | | KPREEQY | SSTLTLSK |
| | KTTPPVL | WLAWYQ | | | QSTYRVV | ADYEKH |
| | DSDGSFF | QKPGKAP | | | SVLTVLH | KVYACE |
| | LYSKLTV | KLLIYAA | | | QDWLNG | VTHQGLS |
| | DKSRWQ | STLQSGV | | | KEYKCK | SPVTKSF |
| | QGNVFSC | PSRFSGS | | | VSNKALP | NRGEC |
| | SVMHEAL | GSGTDFT | | | APIEKTIS | |
| | HNHYTQ | LTISSLQP | | | KAKGQPR | |
| | KSLSLSP | EDFATYY | | | EPQVCTL | |
| | GK | CQQSYSIP | | | PPSREEM | |
| | | LTFGGGT | | | TKNQVSL | |
| | | KVEIK | | | SCAVKGF | |
| | | | | | YPSDIAV | |
| | | | | | EWESNG | |
| | | | | | QPENNYK | |
| | | | | | TTPPVLD | |
| | | | | | SDGSFFL | |
| | | | | | VSKLTVD | |
| | | | | | KSRWQQ | |
| | | | | | GNVFSCS | |
| | | | | | VMHEAL | |
| | | | | | HNRFTQK | |
| | | | | | SLSLSPG | |
| | | | | | K | |
| 5-anti- | GSEPKSS | QVQLVQS | GGGGSG | EVQLVES | ASTKGPS | QAVVTQE |
| CD3- | DKTHTCP | GAEVKKP | GGGS | GGGLVQP | VFPLAPSS | PSLTVSP |
| G5(1C12) | PCPAPEL | GSSVKVS | | GGSLRLS | KSTSGGT | GGTVTLT |
| | LGGPSVF | CKASGGT | | CAASGFT | AALGCLV | CGSSTGA |
| | LFPPKPK | FSNFGVS | | FSTYAMN | KDYFPEP | VTTSNYA |
| | DTLMISR | WLRQAP | | WVRQAP | VTVSWNS | NWVQQK |
| | TPEVTCV | GQGLEW | | GKGLEW | GALTSGV | PGKSPRG |
| | VVDVSHE | MGGIIPIL | | VGRIRSK | HTFPAVL | LIGGTNK |
| | DPEVKFN | GTANYA | | YNNYAT | QSSGLYS | RAPGVPA |
| | WYVDGV | QKFQGRV | | YYADSV | LSSVVTV | RFSGSLL |
| | EVHNAKT | TITADEST | | KGRFTISR | PSSSLGT | GGKAALT |
| | KPREEQY | STAYMEL | | DDSKNTL | QTYICNV | ISGAQPE |
| | QSTYRVV | SSLRSED | | YLQMNSL | NHKPSNT | DEADYY |
| | SVLTVLH | TAVYYC | | RAEDTAV | KVDKRV | CALWYS |
| | QDWLNG | ATPTNSG | | YYCVRH | EPKSCDK | NHWVFG |
| | KEYKCK | YYGPYY | | GNFGDSY | THTCPPC | GGTKLTV |
| | VSNKALP | YYGMDV | | VSWFAY | PAPELLG | LRTVAAP |
| | APIEKTIS | WGQGTT | | WGQGTL | GPSVFLFP | SVFIFPPS |
| | KAKGQPR | VTVSSGG | | VTVSS | PKPKDTL | DEQLKSG |
| | EPQVYTL | GGSGGG | | | MISRTPE | TASVVCL |
| | PPCREEM | GSGGGGS | | | VTCVVV | LNNFYPR |
| | TKNQVSL | GGGGSDI | | | DVSHEDP | EAKVQW |
| | WCLVKG | QMTQSPS | | | EVKFNW | KVDNAL |
| | FYPSDIA | SLSASVG | | | YVDGVE | QSGNSQE |
| | VEWESN | DRVTITC | | | VHNAKT | SVTEQDS |
| | GQPENNY | RASQSISS | | | KPREEQY | KDSTYSL |
| | KTTPPVL | WLAWYQ | | | QSTYRVV | SSTLTLSK |
| | DSDGSFF | QKPGKAP | | | SVLTVLH | ADYEKH |
| | LYSKLTV | KLLIYAA | | | QDWLNG | KVYACE |
| | DKSRWQ | STLQSGV | | | KEYKCK | VTHQGLS |
| | QGNVFSC | PSRFSGS | | | VSNKALP | SPVTKSF |
| | SVMHEAL | GSGTDFT | | | APIEKTIS | NRGEC |
| | HNHYTQ | LTISSLQP | | | KAKGQPR | |
| | KSLSLSP | EDFATYY | | | EPQVCTL | |
| | GK | CQQSYSIP | | | PPSREEM | |
| | | LTFGGGT | | | TKNQVSL | |
| | | KVEIK | | | SCAVKGF | |
| | | | | | YPSDIAV | |
| | | | | | EWESNG | |
| | | | | | QPENNYK | |
| | | | | | TTPPVLD | |
| | | | | | SDGSFFL | |
| | | | | | VSKLTVD | |
| | | | | | KSRWQQ | |
| | | | | | GNVFSCS | |
| | | | | | VMHEAL | |
| | | | | | HNRFTQK | |
| | | | | | SLSLSPG | |
| | | | | | K | |

TABLE 38
Exemplary Bispecific Format 6 Constructs

| | | | | CH1_CH2_ | |
|---|---|---|---|---|---|
| | scFv (Chain | | VH (Chain 1 | CH3 (Chain 1 | LC (Chains 3 |
| Name | 1 and 2) | Linker | and 2) | and 2) | and 4)) |
| 6-hOKT3- | QVQLVQSG | GGGGSGGG | QVQLVQSG | ASTKGPSVF | DIQMTQSPS |
| G2(1H11) | AEVKKPGA | GS | AEVKKPGA | PLAPSSKST | SLSASVGDR |
| | SVKVSCKA | | SVKVSCKA | SGGTAALG | VTITCSASS |
| | SGYTFTNY | | SGYTFTRYT | CLVKDYFP | SVSYMNWY |
| | YMHWVRQ | | MHWVRQA | EPVTVSWN | QQKPGKAP |
| | APGQGLEW | | PGQGLEWM | SGALTSGV | KRLIYDTSK |
| | MGMINPSG | | GYINPSRGY | HTFPAVLQS | LASGVPSRF |
| | GGTSYAQK | | TNYNQKFK | SGLYSLSSV | SGSGSGTDF |
| | FQGRVTMT | | DRVTLTTD | VTVPSSSLG | TLTISSLQPE |
| | RDTSTSTVY | | KSSSTAYM | TQTYICNVN | DFATYYCQ |
| | MELSSLRSE | | ELSSLRSED | HKPSNTKV | QWSSNPFTF |
| | DTAVYYCA | | TAVYYCAR | DKRVEPKS | GQGTKLEIK |
| | RGNPWELR | | YYDDHYSL | CDKTHTCPP | RTVAAPSVF |
| | LDYWGQGT | | DYWGQGTL | CPAPELLGG | IFPPSDEQL |
| | LVTVSSGG | | VTVSS | PSVFLFPPK | KSGTASVV |
| | GGSGGGGS | | | PKDTLMISR | CLLNNFYPR |
| | GGGGSGGG | | | TPEVTCVV | EAKVQWK |
| | GSDIQMTQS | | | VDVSHEDP | VDNALQSG |
| | PSSLSASVG | | | EVKFNWYV | NSQESVTEQ |
| | DRVTITCQA | | | DGVEVHNA | DSKDSTYSL |
| | SQDISNYLN | | | KTKPREEQ | SSTLTLSKA |
| | WYQQKPGK | | | YQSTYRVV | DYEKHKVY |
| | APKLLIYAA | | | SVLTVLHQ | ACEVTHQG |
| | SSLQSGVPS | | | DWLNGKEY | LSSPVTKSF |
| | RFSGSGSGT | | | KCKVSNKA | NRGEC |
| | DFTLTISSL | | | LPAPIEKTIS | |
| | QPEDFATY | | | KAKGQPRE | |
| | YCQQYYSY | | | PQVYTLPPS | |
| | PFTFGPGTK | | | REEMTKNQ | |
| | VDIK | | | VSLTCLVK | |
| | | | | GFYPSDIAV | |
| | | | | EWESNGQP | |
| | | | | ENNYKTTPP | |
| | | | | VLDSDGSFF | |
| | | | | LYSKLTVD | |
| | | | | KSRWQQGN | |
| | | | | VFSCSVMH | |
| | | | | EALHNHYT | |
| | | | | QKSLSLSPG | |
| | | | | K | |
| 6-anti-CD3- | QVQLVQSG | GGGGSGGG | EVQLVESG | ASTKGPSVF | QAVVTQEP |
| G2(1H11) | AEVKKPGA | GS | GGLVQPGG | PLAPSSKST | SLTVSPGGT |
| | SVKVSCKA | | SLRLSCAAS | SGGTAALG | VTLTCGSST |
| | SGYTFTNY | | GFTFSTYA | CLVKDYFP | GAVTTSNY |
| | YMHWVRQ | | MNWVRQA | EPVTVSWN | ANWVQQKP |
| | APGQGLEW | | PGKGLEWV | SGALTSGV | GKSPRGLIG |
| | MGMINPSG | | GRIRSKYNN | HTFPAVLQS | GTNKRAPG |
| | GGTSYAQK | | YATYYADS | SGLYSLSSV | VPARFSGSL |
| | FQGRVTMT | | VKGRFTISR | VTVPSSSLG | LGGKAALTI |
| | RDTSTSTVY | | DDSKNTLY | TQTYICNVN | SGAQPEDE |
| | MELSSLRSE | | LQMNSLRA | HKPSNTKV | ADYYCALW |
| | DTAVYYCA | | EDTAVYYC | DKRVEPKS | YSNHWVFG |
| | RGNPWELR | | VRHGNFGD | CDKTHTCPP | GGTKLTVL |
| | LDYWGQGT | | SYVSWFAY | CPAPELLGG | RTVAAPSVF |
| | LVTVSSGG | | WGQGTLVT | PSVFLFPPK | IFPPSDEQL |
| | GGSGGGGS | | VSS | PKDTLMISR | KSGTASVV |
| | GGGGSGGG | | | TPEVTCVV | CLLNNFYPR |
| | GSDIQMTQS | | | VDVSHEDP | EAKVQWK |
| | PSSLSASVG | | | EVKFNWYV | VDNALQSG |
| | DRVTITCQA | | | DGVEVHNA | NSQESVTEQ |
| | SQDISNYLN | | | KTKPREEQ | DSKDSTYSL |
| | WYQQKPGK | | | YQSTYRVV | SSTLTLSKA |
| | APKLLIYAA | | | SVLTVLHQ | DYEKHKVY |
| | SSLQSGVPS | | | DWLNGKEY | ACEVTHQG |
| | RFSGSGSGT | | | KCKVSNKA | LSSPVTKSF |
| | DFTLTISSL | | | LPAPIEKTIS | NRGEC |
| | QPEDFATY | | | KAKGQPRE | |
| | YCQQYYSY | | | PQVYTLPPS | |
| | PFTFGPGTK | | | REEMTKNQ | |
| | VDIK | | | VSLTCLVK | |
| | | | | GFYPSDIAV | |
| | | | | EWESNGQP | |
| | | | | ENNYKTTPP | |
| | | | | VLDSDGSFF | |
| | | | | LYSKLTVD | |
| | | | | KSRWQQGN | |
| | | | | VFSCSVMH | |
| | | | | EALHNHYT | |
| | | | | QKSLSLSPG | |
| | | | | K | |
| 6-hOKT3- | QVQLVQSG | GGGGSGGG | QVQLVQSG | ASTKGPSVF | DIQMTQSPS |
| G5(1C12) | AEVKKPGS | GS | AEVKKPGA | PLAPSSKST | SLSASVGDR |
| | SVKVSCKA | | SVKVSCKA | SGGTAALG | VTITCSASS |
| | SGGTFSNFG | | SGYTFTRYT | CLVKDYFP | SVSYMNWY |
| | VSWLRQAP | | MHWVRQA | EPVTVSWN | QQKPGKAP |
| | GQGLEWM | | PGQGLEWM | SGALTSGV | KRLIYDTSK |
| | GGIIPILGTA | | GYINPSRGY | HTFPAVLQS | LASGVPSRF |
| | NYAQKFQG | | TNYNQKFK | SGLYSLSSV | SGSGSGTDF |
| | RVTITADES | | DRVTLTTD | VTVPSSSLG | TLTISSLQPE |
| | TSTAYMEL | | KSSSTAYM | TQTYICNVN | DFATYYCQ |
| | SSLRSEDTA | | ELSSLRSED | HKPSNTKV | QWSSNPFTF |
| | VYYCATPT | | TAVYYCAR | DKRVEPKS | GQGTKLEIK |
| | NSGYYGPY | | YYDDHYSL | CDKTHTCPP | RTVAAPSVF |
| | YYYGMDV | | DYWGQGTL | CPAPELLGG | IFPPSDEQL |
| | WGQGTTVT | | VTVSS | PSVFLFPPK | KSGTASVV |
| | VSSGGGGS | | | PKDTLMISR | CLLNNFYPR |
| | GGGGSGGG | | | TPEVTCVV | EAKVQWK |
| | GSGGGGSDI | | | VDVSHEDP | VDNALQSG |
| | QMTQSPSSL | | | EVKFNWYV | NSQESVTEQ |
| | SASVGDRV | | | DGVEVHNA | DSKDSTYSL |
| | TITCRASQSI | | | KTKPREEQ | SSTLTLSKA |
| | SSWLAWYQ | | | YQSTYRVV | DYEKHKVY |
| | QKPGKAPK | | | SVLTVLHQ | ACEVTHQG |
| | LLIYAASTL | | | DWLNGKEY | LSSPVTKSF |
| | QSGVPSRFS | | | KCKVSNKA | NRGEC |
| | GSGSGTDFT | | | LPAPIEKTIS | |
| | LTISSLQPE | | | KAKGQPRE | |
| | DFATYYCQ | | | PQVYTLPPS | |
| | QSYSIPLTF | | | REEMTKNQ | |
| | GGGTKVEI | | | VSLTCLVK | |
| | K | | | GFYPSDIAV | |
| | | | | EWESNGQP | |
| | | | | ENNYKTTPP | |
| | | | | VLDSDGSFF | |
| | | | | LYSKLTVD | |
| | | | | KSRWQQGN | |
| | | | | VFSCSVMH | |
| | | | | EALHNHYT | |
| | | | | QKSLSLSPG | |
| | | | | K | |
| 6-anti-CD3- | QVQLVQSG | GGGGSGGG | EVQLVESG | ASTKGPSVF | QAVVTQEP |
| G5(1C12) | AEVKKPGS | GS | GGLVQPGG | PLAPSSKST | SLTVSPGGT |
| | SVKVSCKA | | SLRLSCAAS | SGGTAALG | VTLTCGSST |
| | SGGTFSNFG | | GFTFSTYA | CLVKDYFP | GAVTTSNY |
| | VSWLRQAP | | MNWVRQA | EPVTVSWN | ANWVQQKP |
| | GQGLEWM | | PGKGLEWV | SGALTSGV | GKSPRGLIG |
| | GGIIPILGTA | | GRIRSKYNN | HTFPAVLQS | GTNKRAPG |
| | NYAQKFQG | | YATYYADS | SGLYSLSSV | VPARFSGSL |
| | RVTITADES | | VKGRFTISR | VTVPSSSLG | LGGKAALTI |
| | TSTAYMEL | | DDSKNTLY | TQTYICNVN | SGAQPEDE |
| | SSLRSEDTA | | LQMNSLRA | HKPSNTKV | ADYYCALW |
| | VYYCATPT | | EDTAVYYC | DKRVEPKS | YSNHWVFG |
| | NSGYYGPY | | VRHGNFGD | CDKTHTCPP | GGTKLTVL |
| | YYYGMDV | | SYVSWFAY | CPAPELLGG | RTVAAPSVF |
| | WGQGTTVT | | WGQGTLVT | PSVFLFPPK | IFPPSDEQL |
| | VSSGGGGS | | VSS | PKDTLMISR | KSGTASVV |
| | GGGGSGGG | | | TPEVTCVV | CLLNNFYPR |
| | GSGGGGSDI | | | VDVSHEDP | EAKVQWK |
| | QMTQSPSSL | | | EVKFNWYV | VDNALQSG |
| | SASVGDRV | | | DGVEVHNA | NSQESVTEQ |
| | TITCRASQSI | | | KTKPREEQ | DSKDSTYSL |
| | SSWLAWYQ | | | YQSTYRVV | SSTLTLSKA |
| | QKPGKAPK | | | SVLTVLHQ | DYEKHKVY |
| | LLIYAASTL | | | DWLNGKEY | ACEVTHQG |
| | QSGVPSRFS | | | KCKVSNKA | LSSPVTKSF |
| | GSGSGTDFT | | | LPAPIEKTIS | NRGEC |
| | LTISSLQPE | | | KAKGQPRE | |
| | DFATYYCQ | | | PQVYTLPPS | |
| | QSYSIPLTF | | | REEMTKNQ | |
| | GGGTKVEI | | | VSLTCLVK | |
| | K | | | GFYPSDIAV | |
| | | | | EWESNGQP | |
| | | | | ENNYKTTPP | |
| | | | | VLDSDGSFF | |
| | | | | LYSKLTVD | |
| | | | | KSRWQQGN | |
| | | | | VFSCSVMH | |
| | | | | EALHNHYT | |
| | | | | QKSLSLSPG | |
| | | | | K | |

Exemplary sequences of Format 4 bispecific antibodies with engineered disulfide
bond (DSB)

| | | | | | CH1-CH2- | |
|---|---|---|---|---|---|---|
| | Linker-Fc | scFv (Chains 1 | Linker | VH | CH3 | LC |
| Name | (Chain1) | and 2) | (Chain2) | (Chain2) | (Chain2) | (Chain 3) |
| 4- | GGGGSEPKSSDK | QVQLVQSGAE | GGG | QVQLVQSG | ASTKGP | DIQMTQSPSS |
| hOKT3- | THTCPPCPAPEL | VKKPGASVKVS | GSG | AEVKKPGAS | SVFPLAP | LSASVGDRV |
| G2 | LGGPSVFLFPPK | CKASGYTFTNY | GGG | VKVSCKASG | SSKSTSG | TITCSASSSVS |
| (1H11) | PKDTLMISRTPE | YMHWVRQAPG | S | YTFTRYTMH | GTAALG | YMNWYQQK |
| | VTCVVVDVSHE | QCLEWMGMIN | | WVRQAPGQ | CLVKDY | PGKAPKRLIY |
| | DPEVKFNWYVD | PSGGGTSYAQK | | GLEWMGYI | FPEPVT | DTSKLASGVP |
| | GVEVHNAKTKP | FQGRVTMTRDT | | NPSRGYTNY | VSWNSG | SRFSGSGSGT |
| | REEQYQSTYRV | STSTVYMELSS | | NQKFKDRV | ALTSGV | DFTLTISSLQP |
| | VSVLTVLHQDW | LRSEDTAVYYC | | TLTTDKSSS | HTFPAV | EDFATYYCQ |
| | LNGKEYKCKVS | ARGNPWELRL | | TAYMELSSL | LQSSGL | QWSSNPFTFG |
| | NKALPAPIEKTIS | DYWGQGTLVT | | RSEDTAVYY | YSLSSV | QGTKLEIKRT |
| | KAKGQPREPQV | VSSGGGGSGGG | | CARYYDDH | VTVPSSS | VAAPSVFIFP |
| | YTLPPCREEMTK | GSGGGGSGGG | | YSLDYWGQ | LGTQTY | PSDEQLKSGT |
| | NQVSLWCLVKG | GSDIQMTQSPSS | | GTLVTVSS | ICNVNH | ASVVCLLNN |
| | FYPSDIAVEWES | LSASVGDRVTI | | | KPSNTK | FYPREAKVQ |
| | NGQPENNYKTT | TCQASQDISNY | | | VDKRVE | WKVDNALQS |
| | PPVLDSDGSFFL | LNWYQQKPGK | | | PKSCDK | GNSQESVTE |
| | YSKLTVDKSRW | APKLLIYAASSL | | | THTCPP | QDSKDSTYSL |
| | QQGNVFSCSVM | QSGVPSRFSGS | | | CPAPEL | SSTLTLSKAD |
| | HEALHNHYTQK | GSGTDFTLTISS | | | LGGPSV | YEKHKVYAC |
| | SLSLSPGK | LQPEDFATYYC | | | FLFPPKP | EVTHQGLSSP |
| | | QQYYSYPFTFG | | | KDTLMI | VTKSFNRGE |
| | | CGTKVDIK | | | SRTPEV | C |
| | | | | | TCVVVD | |
| | | | | | VSHEDP | |
| | | | | | EVKFNW | |
| | | | | | YVDGVE | |
| | | | | | VHNAKT | |
| | | | | | KPREEQ | |
| | | | | | YQSTYR | |
| | | | | | VVSVLT | |
| | | | | | VLHQD | |
| | | | | | WLNGK | |
| | | | | | EYKCKV | |
| | | | | | SNKALP | |
| | | | | | APIEKTI | |
| | | | | | SKAKGQ | |
| | | | | | PREPQV | |
| | | | | | CTLPPSR | |
| | | | | | EEMTKN | |
| | | | | | QVSLSC | |
| | | | | | AVKGFY | |
| | | | | | PSDIAVE | |
| | | | | | WESNGQ | |
| | | | | | PENNYK | |
| | | | | | TTPPVL | |
| | | | | | DSDGSF | |
| | | | | | FLVSKL | |
| | | | | | TVDKSR | |
| | | | | | WQQGN | |
| | | | | | VFSCSV | |
| | | | | | MHEALH | |
| | | | | | NRFTQK | |
| | | | | | SLSLSPG | |
| | | | | | K | |
| 4- | GGGGSEPKSSDK | QVQLVQSGAE | GGG | QVQLVQSG | ASTKGP | DIQMTQSPSS |
| hOKT3- | THTCPPCPAPEL | VKKPGSSVKVS | GSG | AEVKKPGAS | SVFPLAP | LSASVGDRV |
| G5 | LGGPSVFLFPPK | CKASGGTFSNF | GGG | VKVSCKASG | SSKSTSG | TITCSASSSVS |
| (1C12) | PKDTLMISRTPE | GVSWLRQAPG | S | YTFTRYTMH | GTAALG | YMNWYQQK |
| | VTCVVVDVSHE | QCLEWMGGIIPI | | WVRQAPGQ | CLVKDY | PGKAPKRLIY |
| | DPEVKFNWYVD | LGTANYAQKF | | GLEWMGYI | FPEPVT | DTSKLASGVP |
| | GVEVHNAKTKP | QGRVTITADES | | NPSRGYTNY | VSWNSG | SRFSGSGSGT |
| | REEQYQSTYRV | TSTAYMELSSL | | NQKFKDRV | ALTSGV | DFTLTISSLQP |
| | VSVLTVLHQDW | RSEDTAVYYCA | | TLTTDKSSS | HTFPAV | EDFATYYCQ |
| | LNGKEYKCKVS | TPTNSGYYGPY | | TAYMELSSL | LQSSGL | QWSSNPFTFG |
| | NKALPAPIEKTIS | YYYGMDVWG | | RSEDTAVYY | YSLSSV | QGTKLEIKRT |
| | KAKGQPREPQV | QGTTVTVSSGG | | CARYYDDH | VTVPSSS | VAAPSVFIFP |
| | YTLPPCREEMTK | GGSGGGGSGG | | YSLDYWGQ | LGTQTY | PSDEQLKSGT |
| | NQVSLWCLVKG | GGSGGGGSDIQ | | GTLVTVSS | ICNVNH | ASVVCLLNN |
| | FYPSDIAVEWES | MTQSPSSLSAS | | | KPSNTK | FYPREAKVQ |
| | NGQPENNYKTT | VGDRVTITCRA | | | VDKRVE | WKVDNALQS |
| | PPVLDSDGSFFL | SQSISSWLAWY | | | PKSCDK | GNSQESVTE |
| | YSKLTVDKSRW | QQKPGKAPKLL | | | THTCPP | QDSKDSTYSL |
| | QQGNVFSCSVM | IYAASTLQSGV | | | CPAPEL | SSTLTLSKAD |
| | HEALHNHYTQK | PSRFSGSGSGTD | | | LGGPSV | YEKHKVYAC |
| | SLSLSPGK | FTLTISSLQPED | | | FLFPPKP | EVTHQGLSSP |
| | | FATYYCQQSYS | | | KDTLMI | VTKSFNRGE |
| | | IPLTFGGGTKV | | | SRTPEV | C |
| | | EIK | | | TCVVVD | |
| | | | | | VSHEDP | |
| | | | | | EVKFNW | |
| | | | | | YVDGVE | |
| | | | | | VHNAKT | |
| | | | | | KPREEQ | |
| | | | | | YQSTYR | |
| | | | | | VVSVLT | |
| | | | | | VLHQD | |
| | | | | | WLNGK | |
| | | | | | EYKCKV | |
| | | | | | SNKALP | |
| | | | | | APIEKTI | |
| | | | | | SKAKGQ | |
| | | | | | PREPQV | |
| | | | | | CTLPPSR | |
| | | | | | EEMTKN | |
| | | | | | QVSLSC | |
| | | | | | AVKGFY | |
| | | | | | PSDIAVE | |
| | | | | | WESNGQ | |
| | | | | | PENNYK | |
| | | | | | TTPPVL | |
| | | | | | DSDGSF | |
| | | | | | FLVSKL | |
| | | | | | TVDKSR | |
| | | | | | WQQGN | |
| | | | | | VFSCSV | |
| | | | | | MHEALH | |
| | | | | | NRFTQK | |
| | | | | | SLSLSPG | |
| | | | | | K | |

bold text indicates the engineered cysteine residue

### TABLE A

[1267] Table A is included in an ASCII text file named “GSO-027WO_Informal_Sequence_Tables.txt”, which is hereby incorporated by reference in its entirety. Refer to SEQ ID NOS. 1-102842 of the text file. For clarity, each HLA-PEPTIDE target is assigned a unique SEQ ID. NO. Each of the above sequence identifiers is associated with a Table A target number, HLA subtype, the gene name corresponding to the restricted peptide, the gene Ensemble ID, whether the target type is a tumor-associated antigen (TAA) or cancer/testis antigen (CTA), and the amino acid sequence of the restricted peptide. For example, SEQ ID NO: 1 refers to Table A, target 1. Table A, target 1 refers to HLA-PEPTIDE target C*16:01_AAACSRMVI, the restricted peptide AAACSRMVI corresponding to gene ABCB5, Ensemble ID ENSG00000004846, which is a TAA.

### TABLE A1

[1268] Table A1 is included in an ASCII text file named “GSO-027WO_Informal_Sequence_Tables.txt”, which is hereby incorporated by reference in its entirety. For clarity, each HLA-PEPTIDE was assigned a target number in Table A1. For example, HLA-PEPTIDE target 1 of Table A1 is HLA-C*16:01_AAACSRMVI, corresponding to gene product MAGA3, Ensemble ID ENSG00000221867; HLA-PEPTIDE target 2 is HLA-C*16:02_AAACSRMVI, corresponding to gene product MAGA3, Ensemble ID ENSG00000221867, and so forth.

### TABLE A2

[1269] Table A2 is included in an ASCII text file named “GSO-027WO_Informal_Sequence_Tables.txt”, which is hereby incorporated by reference in its entirety. For clarity, each HLA-PEPTIDE was assigned a target number in Table A2. For example, HLA-PEPTIDE target 1877 of Table A2 is HLA-A*02:07 AADIIIGHL, corresponding to gene product AFP, Ensemble ID ENSG00000081051; HLA-PEPTIDE target 1878 of Table A2 is HLA-A*68:02_AADIIIGHL, corresponding to gene product AFP, Ensemble ID ENSG00000081051, and so forth.

1. An isolated multispecific ABP comprising a first scFv and a second scFv that each specifically bind a first target antigen, a Fab that specifically binds an additional target antigen that is distinct from the first target antigen, and an Fc domain, wherein the ABP comprises a first polypeptide, a second polypeptide, and a third polypeptide, wherein the first polypeptide comprises, in an N→C direction, the first scFv —CH2-CH3, wherein the second polypeptide comprises, in an N→C direction, a VH domain of the Fab-a CH1 domain of the Fab-CH2-CH3, wherein the third polypeptide comprises, in an N→C direction, a VL domain of the Fab-a CL domain of the Fab, and wherein the second scFv is attached, directly or indirectly, to the N-terminus of the second polypeptide or the third polypeptide.

2. The isolated multispecific ABP of claim 1, wherein the second scFv is attached, directly or indirectly, to the N-terminus of the second polypeptide.

3. The isolated multispecific ABP of claim 1, wherein the second scFv is attached, directly or indirectly, to the N-terminus of the third polypeptide.

4. The isolated multispecific ABP of any one of claims 1-3, wherein a variable domain of the first scFv interacts with a variable domain of the second scFv.

5. The isolated multispecific ABP of claim 4, wherein the VH domain of the first scFv interacts with the VL domain of the second scFv.

6. The isolated multispecific ABP of claim 4, wherein the VL domain of the first scFv interacts with the VH domain of the second scFv.

7. The isolated multispecific ABP of claim 4, wherein the VL domain of the first scFv interacts with the VH domain of the second scFv and wherein the VH domain of the first scFv interacts with the VL domain of the second scFv.

8. The isolated multispecific ABP of claim 7, wherein the interaction of the VL domain of the first scFv with the VH domain of the second scFv and the interaction of the VH domain of the first scFv with the VL domain of the second scFv results in a circularized conformation.

9. The isolated multispecific ABP of any one of claims 4-8, wherein proteolysis of a purified population of the multispecific ABP with a cysteine protease that digests human IgG1 at one specific site above the hinge (KSCDKT/HTCPPC) produces a fragment comprising the first scFv, the second scFv, and the Fab.

10. The isolated multispecific ABP of claim 9, wherein the fragment comprising the first scFv, the second scFv, and the Fab binds to Protein A and exhibits a retention time that aligns with retention time of the multispecific ABP which has not been digested with the cysteine protease, as measured by SEC-HPLC.

11. The isolated multispecific ABP of any one of claims 1-3, wherein the VL domain of the first scFv interacts with the VH domain of the first scFv, and wherein the VL domain of the second scFv interacts with the VH domain of the second scFv.

12. The isolated multispecific ABP of claim 11, wherein proteolysis of a purified population of the multispecific ABP with a cysteine protease that digests human IgG1 at one specific site above the hinge (KSCDKT/HTCPPC) produces (i) a first fragment comprising the first scFv and the Fc domain, and (ii) a second fragment comprising the second scFv and the Fab.

13. The isolated multispecific ABP of claim 12, wherein the first fragment binds to Protein A and exhibits a retention time that is greater than retention time of the multispecific ABP which has not been digested with the cysteine protease, as measured by SEC-HPLC.

14. The isolated multispecific ABP of claim 12, wherein the second fragment does not bind to Protein A and exhibits a retention time that is greater than retention time of the multispecific ABP which has not been digested with the cysteine protease, as measured by SEC-HPLC.

15. The isolated multispecific ABP of any one of claims 11-14, wherein the VH domain of the first scFv comprises a cysteine at amino acid residue 44 of the VH domain according to the Kabat numbering system and wherein the VL domain of the first scFv comprises a cysteine residue at amino acid residue 100 of the VL domain according to the Kabat numbering system.

16. The isolated multispecific ABP of any one of claims 11-15, wherein the VH domain of the second scFv comprises a cysteine at amino acid residue 44 of the VH domain according to the Kabat numbering system and wherein the VL domain of the second scFv comprises a cysteine residue at amino acid residue 100 of the VL domain according to the Kabat numbering system.

17. The isolated multispecific ABP of any one of claims 11-16, wherein the VH domains of the first and second scFv each comprise a cysteine at amino acid residue 44 of the VH domain according to the Kabat numbering system and wherein the VL domain of the first and second scFv each comprise a cysteine residue at amino acid residue 100 of the VL domain according to the Kabat numbering system.

18. An isolated multispecific ABP comprising a first scFv and a second scFv that each specifically bind a first target antigen, a Fab that specifically binds an additional antigen that is distinct from the first target antigen, and an Fc domain, wherein the ABP comprises a first polypeptide, a second polypeptide, and a third polypeptide, wherein the first polypeptide comprises, in an N→C direction, the first scFv -optional linker-CH2-CH3, wherein the second polypeptide comprises, in an N→C direction, a VH domain of the Fab-a CH1 domain of the Fab-CH2-CH3, wherein the third polypeptide comprises, in an N→C direction, a VL domain of the Fab-a CL domain of the Fab, and wherein the second scFv is attached, directly or indirectly, to the N-terminus of the second polypeptide or the third polypeptide, wherein the VL domain of the first scFv interacts with the VH domain of the second scFv, and wherein the VH domain of the first scFv interacts with the VL domain of the second scFv.

19. The isolated multispecific ABP of claim 18, wherein the interaction of the VL domain of the first scFv with the VH domain of the second scFv and the interaction of the VH domain of the first scFv with the VL domain of the second scFv results in a circularized conformation.

20. The isolated multispecific ABP of claim 18 or 19, wherein the second scFv is attached, directly or indirectly, to the N-terminus of the second polypeptide.

21. The isolated multispecific ABP of claim 18 or 19, wherein the second scFv is attached, directly or indirectly, to the N-terminus of the third polypeptide.

22. The trivalent, multispecific ABP of any one of claims 18-21, wherein proteolysis of a purified population of the multispecific ABP with a cysteine protease that digests human IgG1 at one specific site above the hinge (KSCDKT/HTCPPC) produces a fragment comprising the first scFv, the second scFv, and the Fab.

23. The trivalent, multispecific ABP of claim 22, wherein the fragment comprising the first scFv, the second scFv, and the Fab binds to Protein A and exhibits a retention time that aligns with retention time of the multispecific ABP which has not been digested with the cysteine protease, as measured by SEC-HPLC.

24. The isolated multispecific ABP of any one of the preceding claims, wherein the first scFv and the second scFv each bind to the same target.

25. The isolated multispecific ABP of claim 24, wherein the first scFv and the second scFv each bind to the same epitope of the target.

26. The isolated multispecific ABP of claim 25, wherein the first scFv and the second scFv each comprise identical CDR sequences.

27. The isolated multispecific ABP of claim 26, wherein the first scFv and the second scFv each comprise identical VH and VL sequences.

28. An isolated, multispecific ABP comprising an scFv that specifically binds a first target antigen and a Fab that specifically binds a second target antigen, wherein the ABP comprises a first polypeptide, a second polypeptide, and a third polypeptide, wherein the first polypeptide comprises, in an N→C direction, optional hinge-CH2-CH3, wherein the second polypeptide comprises, in an N→C direction, a VH domain of the Fab-a CH1 domain of the Fab-CH2-CH3, wherein the third polypeptide comprises, in an N→C direction, a VL domain of the Fab-a CL domain of the Fab, and wherein the scFv is attached, directly or indirectly, to the N-terminus of the second polypeptide or the third polypeptide

29. The isolated multispecific ABP of any one of the preceding claims, wherein the first scFv and the second scFv each bind to an HLA-PEPTIDE target, wherein the HLA-PEPTIDE target comprises an HLA-restricted peptide complexed with an HLA Class I molecule, wherein the HLA-restricted peptide is located in the peptide binding groove of an α1/α2 heterodimer portion of the HLA Class I molecule, and wherein the HLA-PEPTIDE target is selected from Table A, Table A1, or Table A2.

30. The isolated multispecific ABP of claim 29, wherein
a. the HLA Class I molecule is HLA subtype A*01:01 and the HLA-restricted peptide comprises the sequence NTDNNLAVY,
b. the HLA Class I molecule is HLA subtype A*02:01 and the HLA-restricted peptide comprises the sequence AIFPGAVPAA;
c. the HLA Class I molecule is HLA subtype A*01:01 and the HLA-restricted peptide comprises the sequence ASSLPTTMNY;
d. the HLA Class I molecule is HLA subtype A*02:01 and the HLA-restricted peptide comprises the sequence LLASSILCA; or
e. the HLA Class I molecule is HLA subtype B*35:01 and the HLA-restricted peptide comprises the sequence EVDPIGHVY.

31. The isolated multispecific ABP of claim 29 or 30, wherein the HLA-restricted peptide is between about 5-15 amino acids in length.

32. The isolated multispecific ABP of claim 31, wherein the HLA-restricted peptide is between about 8-12 amino acids in length.

33. The isolated multispecific ABP of any one of claims 29-33, wherein
a. the HLA Class I molecule is HLA subtype A*01:01 and the HLA-restricted peptide consists of the sequence NTDNNLAVY,
b. the HLA Class I molecule is HLA subtype A*02:01 and the HLA-restricted peptide consists of the sequence AIFPGAVPAA;
c. the HLA Class I molecule is HLA subtype A*01:01 and the HLA-restricted peptide consists of the sequence ASSLPTTMNY;
d. the HLA Class I molecule is HLA subtype A*02:01 and the HLA-restricted peptide consists of the sequence LLASSILCA; or
e. the HLA Class I molecule is HLA subtype B*35:01 and the HLA-restricted peptide consists of the sequence EVDPIGHVY.

34. An isolated multispecific antigen binding protein (ABP), comprising:
a. a first antigen binding domain (ABD) that specifically binds to a human leukocyte antigen (HLA)-PEPTIDE target; and
b. an additional ABD that specifically binds an additional antigen, wherein the HLA-PEPTIDE target comprises an HLA-restricted peptide complexed with an HLA Class I molecule, wherein the HLA-restricted peptide is located in the peptide binding groove of an α1/α2 heterodimer portion of the HLA Class I molecule, and wherein the HLA-PEPTIDE target is selected from Table A, Table A1, or Table A2.

35. The isolated multispecific ABP of claim 34, wherein:
a. the HLA Class I molecule is HLA subtype A*01:01 and the HLA-restricted peptide comprises the sequence NTDNNLAVY,
b. the HLA Class I molecule is HLA subtype A*02:01 and the HLA-restricted peptide comprises the sequence AIFPGAVPAA;
c. the HLA Class I molecule is HLA subtype A*01:01 and the HLA-restricted peptide comprises the sequence ASSLPTTMNY;
d. the HLA Class I molecule is HLA subtype A*02:01 and the HLA-restricted peptide comprises the sequence LLASSILCA; or
e. the HLA Class I molecule is HLA subtype B*35:01 and the HLA-restricted peptide comprises the sequence EVDPIGHVY.

36. The isolated multispecific ABP of claim 34 or 35, wherein the HLA-restricted peptide is between about 5-15 amino acids in length.

37. The isolated multispecific ABP of claim 36, wherein the HLA-restricted peptide is between about 8-12 amino acids in length.

38. The isolated multispecific ABP of any one of claims 34-37, wherein
a. the HLA Class I molecule is HLA subtype A*01:01 and the HLA-restricted peptide consists of the sequence NTDNNLAVY,
b. the HLA Class I molecule is HLA subtype A*02:01 and the HLA-restricted peptide consists of the sequence AIFPGAVPAA;
c. the HLA Class I molecule is HLA subtype A*01:01 and the HLA-restricted peptide consists of the sequence ASSLPTTMNY;
d. the HLA Class I molecule is HLA subtype A*02:01 and the HLA-restricted peptide consists of the sequence LLASSILCA; or
e. the HLA Class I molecule is HLA subtype B*35:01 and the HLA-restricted peptide consists of the sequence EVDPIGHVY.

39. The isolated multispecific ABP of any of the preceding claims, wherein the first ABD comprises an antibody or antigen-binding fragment thereof.

40. The isolated multispecific ABP of any of the preceding claims, wherein the additional ABD comprises an antibody or antigen-binding fragment thereof.

41. The isolated multispecific ABP of any of claims 34-40, which is a BiTE, wherein the first ABD is a first scFv and wherein the additional ABD is a second scFv.

42. The isolated multispecific ABP of claim 41, wherein the first scFv and the second scFv are attached via a linker.

43. The isolated multispecific ABP of claim 42, wherein the BiTE comprises, in an N→C direction, the first scFv—the linker—the second scFv.

44. The isolated multispecific ABP of claim 42, wherein the BiTE comprises, in an N→C direction, the second scFv—the linker—the first scFv.

45. The isolated multispecific ABP of claim 42, wherein the linker comprises GGGGS.

46. The isolated multispecific ABP of any one of claims 34-40, which is a trivalent, multispecific ABP comprising a first scFv and a second scFv that each specifically bind the HLA-PEPTIDE target, a Fab that specifically binds the additional antigen that is distinct from the first target antigen, and an Fc domain, wherein the ABP comprises a first polypeptide, a second polypeptide, and a third polypeptide, wherein the first polypeptide comprises, in an N→C direction, the first scFv -optional linker-CH2-CH3, wherein the second polypeptide comprises, in an N→C direction, a VH domain of the Fab-a CH1 domain of the Fab-CH2-CH3, wherein the third polypeptide comprises, in an N→C direction, a VL domain of the Fab-a CL domain of the Fab, and wherein the second scFv is attached, directly or indirectly, to the N-terminus of the second polypeptide or the third polypeptide.

47. The isolated multispecific ABP of claim 46, wherein the second scFv is attached, directly or indirectly, to the N-terminus of the second polypeptide.

48. The isolated multispecific ABP of claim 46, wherein the second scFv is attached, directly or indirectly, to the N-terminus of the third polypeptide.

49. The isolated multispecific ABP of any one of claims 46-48, wherein the first scFv and the second scFv each bind to an HLA-PEPTIDE target.

50. The isolated multispecific ABP of claim 49, wherein the first scFv and the second scFv each bind to the same HLA-PEPTIDE target.

51. The isolated multispecific ABP of claim 50, wherein the first scFv and the second scFv each bind to the same epitope of the HLA-PEPTIDE target.

52. The isolated multispecific ABP of claim 51, wherein the first scFv and the second scFv each comprise identical CDR sequences.

53. The isolated multispecific ABP of claim 52, wherein the first scFv and the second scFv each comprise identical VH and VL sequences.

54. The isolated multispecific ABP of any one of claims 46-53, wherein the linker comprises (GGGGS)_{N}, wherein _{N}=1-10.

55. The isolated multispecific ABP of claim 54, wherein _{N}=1-4.

56. The isolated multispecific ABP of claim 54, wherein _{N}=2.

57. The isolated multispecific ABP of any one of claims 46-56, wherein a variable domain of the first scFv interacts with a variable domain of the second scFv.

58. The isolated multispecific ABP of claim 57, wherein the VH domain of the first scFv interacts with the VL domain of the second scFv.

59. The isolated multispecific ABP of claim 57, wherein the VL domain of the first scFv interacts with the VH domain of the second scFv.

60. The isolated multispecific ABP of claim 57, wherein the VL domain of the first scFv interacts with the VH domain of the second scFv and wherein the VH domain of the first scFv interacts with the VL domain of the second scFv.

61. The isolated multispecific ABP of claim 60, wherein the interaction of the VL domain of the first scFv with the VH domain of the second scFv and the interaction of the VH domain of the first scFv with the VL domain of the second scFv results in a circularized conformation.

62. The isolated multispecific ABP of any one of claims 57-61, wherein proteolysis of a purified population of the isolated multispecific ABP with a cysteine protease that digests human IgG1 at one specific site above the hinge (KSCDKT/HTCPPC) produces a fragment comprising the first scFv, the second scFv, and the Fab.

63. The isolated multispecific ABP of claim 62, wherein the fragment comprising the first scFv, the second scFv, and the Fab binds to Protein A and exhibits a retention time that aligns with retention time of the isolated multispecific ABP which has not been digested with the cysteine protease, as measured by SEC-HPLC.

64. The isolated multispecific ABP of any one of claims 46-56, wherein the VL domain of the first scFv interacts with the VH domain of the first scFv, and wherein the VL domain of the second scFv interacts with the VH domain of the second scFv.

65. The isolated multispecific ABP of claim 64, wherein proteolysis of a purified population of the isolated multispecific ABP with a cysteine protease that digests human IgG1 at one specific site above the hinge (KSCDKT/HTCPPC) produces (i) a first fragment comprising the first scFv and the Fc domain, and (ii) a second fragment comprising the second scFv and the Fab.

66. The isolated multispecific ABP of claim 65, wherein the first fragment binds to Protein A and exhibits a retention time that is greater than retention time of the isolated multispecific ABP which has not been digested with the cysteine protease, as measured by SEC-HPLC.

67. The isolated multispecific ABP of claim 65, wherein the second fragment does not bind to Protein A and exhibits a retention time that is greater than retention time of the isolated multispecific ABP which has not been digested with the cysteine protease, as measured by SEC-HPLC.

68. The isolated multispecific ABP of any one of claims 64-67, wherein the VH domain of the first scFv comprises a cysteine at amino acid residue 44 of the VH domain according to the Kabat numbering system and wherein the VL domain of the first scFv comprises a cysteine residue at amino acid residue 100 of the VL domain according to the Kabat numbering system.

69. The isolated multispecific ABP of any one of claims 64-68, wherein the VH domain of the second scFv comprises a cysteine at amino acid residue 44 of the VH domain according to the Kabat numbering system and wherein the VL domain of the second scFv comprises a cysteine residue at amino acid residue 100 of the VL domain according to the Kabat numbering system.

70. The isolated multispecific ABP of any one of claims 64-69, wherein the VH domains of the first and second scFv each comprise a cysteine at amino acid residue 44 of the VH domain according to the Kabat numbering system and wherein the VL domain of the first and second scFv each comprise a cysteine residue at amino acid residue 100 of the VL domain according to the Kabat numbering system.

71. The isolated multispecific ABP of any one of claims 34-40, comprising an scFv and a Fab, wherein the ABP comprises a first polypeptide, a second polypeptide, and a third polypeptide, wherein the first polypeptide comprises, in an N→C direction, the scFv -optional linker CH2-CH3, wherein the second polypeptide comprises, in an N→C direction, a VH domain of the Fab-a CH1 domain of the Fab-CH2-CH3, wherein the third polypeptide comprises, in an N→C direction, a VL domain of the Fab-a CL domain of the Fab.

72. The isolated multispecific ABP of claim 71, wherein the first ABD comprises the scFv and wherein the additional ABD comprises the Fab.

73. The isolated multispecific ABP of claim 71, wherein the first ABD comprises the Fab and wherein the additional ABD comprises the scFv.

74. The isolated multispecific ABP of any one of claims 71-73, wherein the scFv is attached to CH2 via the linker.

75. The isolated multispecific ABP of claim 74, wherein the linker comprises (GGGGS)_{N}, wherein _{N}=1-10.

76. The isolated multispecific ABP of claim 75, wherein _{N}=1-4.

77. The isolated multispecific ABP of claim 75, wherein _{N}=1.

78. The isolated multispecific ABP of any one of claims 34-40, comprising a first and second scFv, a first and second Fab, wherein the multispecific ABP comprises a first polypeptide, a second polypeptide, a third polypeptide, and a fourth polypeptide, wherein the first polypeptide comprises, in an N→C direction, a VH domain of the first Fab-CH1-CH2-CH3-optional linker-the first scFv, wherein the second polypeptide comprises, in an N→C direction, a VH domain of the second Fab-CH1-CH2-CH3-optional linker-the second scFv, wherein the third polypeptide comprises, in an N→C direction, a VL domain of the first Fab-a Cl domain of the first Fab, and wherein the fourth polypeptide comprises, in an N→C direction, a VL domain of the second Fab-a Cl domain of the second Fab.

79. The isolated multispecific ABP of claim 78, wherein the first scFv and the second scFv each bind to an HLA-PEPTIDE target.

80. The isolated multispecific ABP of claim 79, wherein the first scFv and the second scFv each bind to the same HLA-PEPTIDE target.

81. The isolated multispecific ABP of claim 80, wherein the first scFv and the second scFv each bind to the same epitope of the HLA-PEPTIDE target.

82. The isolated multispecific ABP of claim 81, wherein the first scFv and the second scFv each comprise identical CDR sequences.

83. The isolated multispecific ABP of claim 82, wherein the first scFv and the second scFv each comprise identical VH and VL sequences.

84. The isolated multispecific ABP of any one of claims 78-83, wherein the first Fab and the second Fab each bind the additional antigen.

85. The isolated multispecific ABP of claim 84, wherein the first Fab and the second Fab each bind to the same epitope of the additional antigen.

86. The isolated multispecific ABP of claim 85, wherein the first Fab and the second Fab each comprise identical CDR sequences.

87. The isolated multispecific ABP of claim 86, wherein the first Fab and the second Fab each comprise identical VH and VL sequences.

88. The isolated multispecific ABP of any one of claims 78-87, wherein the first and second polypeptide chains are identical and wherein the third and fourth polypeptide chains are identical.

89. The isolated multispecific ABP of any one of claims 78-88, wherein the linker comprises (GGGGS)_{N}, wherein _{N}=1-10.

90. The isolated multispecific ABP of claim 89, wherein _{N}=1-4.

91. The isolated multispecific ABP of claim 89, wherein _{N}=2.

92. The isolated multispecific ABP of any one of claims 34-40, comprising an scFv and a Fab, wherein the ABP comprises a first polypeptide, a second polypeptide, and a third polypeptide, wherein the first polypeptide comprises, in an N→C direction, optional hinge-CH2-CH3, wherein the second polypeptide comprises, in an N→C direction, a VH domain of the Fab-a CH1 domain of the Fab-CH2-CH3, wherein the third polypeptide comprises, in an N→C direction, a VL domain of the Fab-a CL domain of the Fab, and wherein the scFv is attached, directly or indirectly, to the N-terminus of the second polypeptide or the third polypeptide.

93. The isolated multispecific ABP of claim 92, wherein the scFv is attached, directly or indirectly, to the N-terminus of the second polypeptide.

94. The isolated multispecific ABP of claim 92, wherein the scFv is attached, directly or indirectly, to the N-terminus of the third polypeptide.

95. The isolated multispecific ABP of any one of claims 92-94, wherein the first ABD comprises the scFv and wherein the additional ABD comprises the Fab.

96. The isolated multispecific ABP of any one of claims 92-94, wherein the first ABD comprises the Fab and wherein the additional ABD comprises the scFv.

97. The isolated multispecific ABP of any one of claims 92-96, wherein the scFv is attached to the N-terminus of the second polypeptide or the third polypeptide via a linker.

98. The isolated multispecific ABP of claim 97, wherein the linker comprises (GGGGS)_{N}, wherein _{N}=1-10.

99. The isolated multispecific ABP of claim 98, wherein _{N}=1-4.

100. The isolated multispecific ABP of claim 98, wherein _{N}=2.

101. The isolated multispecific ABP of any one of claims 34-40, comprising a first and second scFv and a first and second Fab, wherein the multispecific ABP comprises a first polypeptide, a second polypeptide, a third polypeptide, and a fourth polypeptide, wherein the first polypeptide comprises, in an N→C direction, a VH domain of the first Fab-CH1-CH2-CH3, wherein the second polypeptide comprises, in an N→C direction, a VH domain of the second Fab-CH1-CH2-CH3, wherein the third polypeptide comprises, in an N→C direction, a VL domain of the first Fab-a Cl domain of the first Fab, and wherein the fourth polypeptide comprises, in an N→C direction, a VL domain of the second Fab-a Cl domain of the second Fab, and wherein the first scFv is attached, directly or indirectly, to the N-terminus of the first or third polypeptide, and wherein the second scFv is attached, directly or indirectly, to the N-terminus of the second or fourth polypeptide.

102. The isolated multispecific ABP of claim 101, wherein the first scFv is attached, directly or indirectly, to the N-terminus of the first polypeptide.

103. The isolated multispecific ABP of claim 101, wherein the first scFv is attached, directly or indirectly, to the N-terminus of the third polypeptide.

104. The isolated multispecific ABP of any one of claims 101-103, wherein the second scFv is attached, directly or indirectly, to the N-terminus of the second polypeptide.

105. The isolated multispecific ABP of any one of claims 101-103, wherein the first scFv is attached, directly or indirectly, to the N-terminus of the fourth polypeptide.

106. The isolated multispecific ABP of any one of claims 101-105, wherein the first scFv and the second scFv each bind to an HLA-PEPTIDE target.

107. The isolated multispecific ABP of claim 106, wherein the first scFv and the second scFv each bind to the same HLA-PEPTIDE target.

108. The isolated multispecific ABP of claim 107, wherein the first scFv and the second scFv each bind to the same epitope of the HLA-PEPTIDE target.

109. The isolated multispecific ABP of claim 108, wherein the first scFv and the second scFv each comprise identical CDR sequences.

110. The isolated multispecific ABP of claim 109, wherein the first scFv and the second scFv each comprise identical VH and VL sequences.

111. The isolated multispecific ABP of any one of claims 101-110, wherein the first Fab and the second Fab each bind the additional antigen.

112. The isolated multispecific ABP of claim 111, wherein the first Fab and the second Fab each bind to the same epitope of the additional antigen.

113. The isolated multispecific ABP of claim 112, wherein the first Fab and the second Fab each comprise identical CDR sequences.

114. The isolated multispecific ABP of claim 113, wherein the first Fab and the second Fab each comprise identical VH and VL sequences.

115. The isolated multispecific ABP of any one of claims 101-114, wherein the first and second polypeptide chains are identical and wherein the third and fourth polypeptide chains are identical.

116. The isolated multispecific ABP of any one of claims 101-115, wherein the first scFv is attached to the N-terminus of the first or third polypeptide via a linker.

117. The isolated multispecific ABP of any one of claims 101-116, wherein the second scFv is attached to the N-terminus of the second or fourth polypeptide via a linker.

118. The isolated multispecific ABP of claim 116 or 117, wherein the linker comprises (GGGGS)_{N}, wherein _{N}=1-10.

119. The isolated multispecific ABP of claim 118, wherein _{N}=1-4.

120. The isolated multispecific ABP of claim 118, wherein _{N}=2.

121. The isolated multispecific ABP of any one of claims 1-120, wherein the multispecific ABP comprises a molecule selected from the group consisting of a single domain antibody, a DVD-Ig™, a DART™, a Duobody®, a CovX-Body, an Fcab antibody, a TandAb® antibody, a tandem Fab, a Zybody™, a BEAT® molecule, a diabody, a triabody, a tetrabody, a tandem diabody, and an alternative scaffold.

122. The isolated multispecific ABP of claim 121, wherein the alternative scaffold is selected from an Anticalin®, an Adnectin™, an iMab, an EETI-II/AGRP, a Kunitz domain, a thioredoxin peptide aptamer, an Affibody®, a DARPin, an Affilin, a Tetranectin, a Fynomer, and an Avimer.

123. The isolated multispecific ABP of claim 121, wherein the multispecific ABP comprises a diabody, a triabody, a tetrabody, or a tandem diabody.

124. The isolated multispecific ABP of claim 121, comprising a first scFv, a second scFv, and a single domain antibody, wherein the multispecific ABP comprises a first polypeptide chain and a second polypeptide chain, wherein the first polypeptide chain comprises, in an N→C direction, the first scFv-CH2-CH3, and wherein the second polypeptide chain comprises the second scFv-the single domain antibody-CH2-CH3.

125. The isolated multispecific ABP of claim 121, comprising a first Fab, a second Fab, and a single domain antibody, wherein the second Fab is attached, directly or indirectly, to the N-terminus of the single domain antibody, and wherein the first Fab and single domain antibody are attached, directly or indirectly, to an Fc region.

126. The isolated multispecific ABP of claim 121, comprising an scFv, a Fab, and a single domain antibody, wherein either (i) the scFv is attached, directly or indirectly, to the N-terminus of the single domain antibody and the single domain antibody and Fab are attached, directly or indirectly to an Fc region, or (ii) the Fab is attached, directly or indirectly to the N-terminus of the single domain antibody and the single domain antibody and scFv are attached, directly or indirectly, to an Fc region.

127. The isolated multispecific ABP of claim 124 or 125, wherein the single domain antibody is a huVH single domain.

128. The isolated multispecific ABP of any one of claims 124-127, wherein
a. the first and second scFv each bind to an HLA-PEPTIDE target and wherein the single domain antibody binds to the additional antigen, or
b. the first and second Fab each bind to an HLA-PEPTIDE target and wherein the single domain antibody binds to the additional antigen.

129. The isolated multispecific ABP of any one of claims 34-40, comprising a first scFv and a second scFv that each specifically bind the HLA-PEPTIDE target, a Fab that specifically binds an additional antigen that is distinct from the first target antigen, and an Fc domain, wherein the ABP comprises a first polypeptide, a second polypeptide, and a third polypeptide, wherein the first polypeptide comprises, in an N→C direction, the first scFv -optional linker-CH2-CH3, wherein the second polypeptide comprises, in an N→C direction, a VH domain of the Fab-a CH1 domain of the Fab-CH2-CH3, wherein the third polypeptide comprises, in an N→C direction, a VL domain of the Fab-a CL domain of the Fab, and wherein the second scFv is attached, directly or indirectly, to the N-terminus of the second polypeptide or the third polypeptide, wherein the VL domain of the first scFv interacts with the VH domain of the second scFv, and wherein the VH domain of the first scFv interacts with the VL domain of the second scFv.

130. The isolated multispecific ABP of any of the preceding claims, wherein the additional antigen is a cell surface molecule present on a T cell or NK cell.

131. The isolated multispecific ABP of claim 130, wherein the cell surface molecule is present on a T cell.

132. The isolated multispecific ABP of claim 131, wherein the cell surface molecule is CD3, optionally CD3c.

133. The isolated multispecific ABP of claim 132, wherein the additional ABD comprises the VH sequence QVQLVESGGGVVQPGRSLRLSCAASGFTFRSYGMHWVRQAPGKGLEWVAIIWYDG SKKNYADSVKGRFTISRDNSKNTLYLQMNSLRAEDTAVYYCARGTGYNWFDPWGQ GTLVTVSS and the VL sequence
EIVLTQSPRTLSLSPGERATLSCRASQSVSSSYLAWYQQKPGQAPRLLIY
GASSRATGIPDRFSGSGSGTDFTLTISRLDPEDFAVYYCQQYGSSPITFG
QGTRLEIK.

134. The isolated multispecific ABP of claim 132, wherein the additional ABD comprises a VH CDR1 comprising the amino acid sequence SYGMH; a VH CDR2 comprising the amino acid sequence of IIWYDGSKKNYADSVKG; a VH CDR3 comprising the amino acid sequence of GTGYNWFDP; a VL CDR1 comprising the amino acid sequence of RASQSVSSSYLA; a VL CDR2 comprising the amino acid sequence of GASSRAT; and a VL CDR3 comprising the amino acid sequence of QQYGSSPIT, according to the Kabat or Chothia numbering scheme.

135. The isolated multispecific ABP of claim 132, wherein the additional ABD comprises the VH sequence QVQLVESGGGVVQPGRSLRLSCAASGFTFRSYGMHWVRQAPGKGLEWVAIIWYDG SKKNYADSVKGRFTISRDNSKNTLYLQMNSLRAEDTAVYYCARGTGYNWFDPWGQ GTLVTVSS and the VL sequence
EIVLTQSPRTLSLSPGERATLSCRASQSVSSSYLAWYQQKPGQAPRLLIY
GASSRATGIPDRFSGSGSGTDFTLTISRLDPEDFAVYYCQQYGSSPITFG
QGTRLEIK.

136. The isolated multispecific ABP of claim 132, wherein the additional ABD comprises a VH CDR1 comprising the amino acid sequence RYTMH; a VH CDR2 comprising the amino acid sequence YINPSRGYTNYNQKFKD; a VH CDR3 comprising the amino acid sequence YYDDHYSLDY; a VL CDR1 comprising the amino acid sequence SASSSVSYMN; a VL CDR2 comprising the amino acid sequence DTSKLAS; and a VL CDR3 comprising the amino acid sequence QQWSSNPFT, according to the Kabat numbering scheme.

137. The isolated multispecific ABP of claim 132, wherein the additional ABD comprises the VH sequence QVQLVQSGAEVKKPGASVKVSCKASGYTFTRYTMHWVRQAPGQGLEWMGYINPS RGYTNYNQKFKDRVTLTTDKSSSTAYMELSSLRSEDTAVYYCARYYDDHYSLDYW GQGTLVTVSS and the VL sequence
DIQMTQSPSSLSASVGDRVTITCSASSSVSYMNWYQQKPGKAPKRLIYDT
SKLASGVPSRFSGSGSGTDFTLTISSLQPEDFATYYCQQWSSNPFTFGQG
TKLEIK.

138. The isolated multispecific ABP of claim 132, wherein the additional ABD comprises a VH CDR1 comprising the amino acid sequence YTFTRYTMH; a VH CDR2 comprising the amino acid sequence GYINPSRGYTNYN; a VH CDR3 comprising the amino acid sequence CARYYDDHYSLDYW; a VL CDR1 comprising the amino acid sequence SASSSVSYMN; a VL CDR2 comprising the amino acid sequence DTSKLAS; and a VL CDR3 comprising the amino acid sequence CQQWSSNPFTF, according to the Kabat numbering scheme.

139. The isolated multispecific ABP of claim 132, wherein the additional ABD comprises the VH sequence EVQLVESGGGLVQPGGSLRLSCAASGFTFSTYAMNWVRQAPGKGLEWVGRIRSKY NNYATYYADSVKGRFTISRDDSKNTLYLQMNSLRAEDTAVYYCVRHGNFGDSYVS WFAYWGQGTLVTVSS and the VL sequence
QAVVTQEPSLTVSPGGTVTLTCGSSTGAVTTSNYANWVQQKPGKSPRGLI
GGTNKRAPGVPARFSGSLLGGKAALTISGAQPEDEADYYCALWYSNHWVF
GGGTKLTVL.

140. The isolated multispecific ABP of claim 132, wherein the additional ABD comprises a VH CDR1 comprising the amino acid sequence FTFSTYAMNWVRQAPGKGLE; a VH CDR2 comprising the amino acid sequence TYYADSVKGRFTISRD; a VH CDR3 comprising the amino acid sequence CVRHGNFGDSYVSWFAYW; a VL CDR1 comprising the amino acid sequence GSSTGAVTTSNYAN; a VL CDR2 comprising the amino acid sequence GTNKRAP; and a VL CDR3 comprising the amino acid sequence CALWYSNHWVF, according to the Kabat numbering scheme.

141. The isolated multispecific ABP of claim 130, wherein the cell surface molecule is present on an NK cell.

142. The isolated multispecific ABP of claim 141, wherein the cell surface molecule is CD16.

143. The isolated multispecific ABP of any one of claim 1-40 or 46-142, wherein a sequence comprising the CH2-CH3 domains of the first polypeptide is distinct from a sequence comprising the CH2-CH3 domains of the second polypeptide.

144. The isolated multispecific ABP of any of the preceding claims, comprising a variant Fc region.

145. The isolated multispecific ABP of claim 144, wherein the variant Fc region comprises a modification that alters an affinity of the ABP for an Fc receptor as compared to a multispecific ABP with a non-variant Fc region.

146. The isolated multispecific ABP of claim 144, wherein the variant Fc region comprises a human IgG4 Fc region comprising one or more of the hinge stabilizing mutations S228P and L235E, or comprising one or more of the following mutations: E233P, F234V, and L235A, according to EU numbering.

147. The isolated multispecific ABP of claim 144, wherein the variant Fc region is a human IgG1 Fc region comprising one or more mutations to reduce Fc receptor binding, optionally wherein the one or more mutations are in residues selected from 5228 (e.g., S228A), L234 (e.g., L234A), L235 (e.g., L235A), D265 (e.g., D265A), and N297 (e.g., N297A or N297Q), or optionally wherein the amino acid sequence ELLG, from amino acid position 233 to 236 of IgG1 or EFLG of IgG4, is replaced by PVA, according to EU numbering.

148. The isolated multispecific ABP of claim 144, wherein the variant Fc region is a human IgG2 Fc region comprising one or more of mutations A330S and P331S, according to EU numbering.

149. The isolated multispecific ABP of claim 144, wherein the variant Fc region comprises an amino acid substitution at one or more positions selected from 238, 265, 269, 270, 297, 327 and 329, optionally wherein the variant Fc region comprises substitutions at two or more of amino acid positions 265, 269, 270, 297 and 327, optionally wherein the variant Fc region comprises substitution of residues 265 or 297 with alanine, optionally wherein the variant Fc region comprises substitution of residues 265 and 297 with alanine, according to EU numbering.

150. The isolated multispecific ABP of claim 144, wherein the variant Fc region comprises one or more amino acid substitutions which improve ADCC, such as a substitution at one or more of positions 298, 333, and 334 of the Fc region, or a substitution at one or more of positions 239, 332, and 330 of the Fc region, according to EU numbering.

151. The isolated multispecific ABP of claim 144, wherein the variant Fc region comprises one or more modifications to increase half-life, optionally wherein the Fc variant comprises substitutions at one or more of Fc region residues: 238, 250, 256, 265, 272, 286, 303, 305, 307, 311, 312, 314, 317, 340, 356, 360, 362, 376, 378, 380, 382, 413, 424, 428, and 434 of an IgG, according to EU numbering.

152. The isolated multispecific ABP of any of the preceding claims, comprising a G1m17,1 allotype.

153. The isolated multispecific ABP of claim 144, wherein the variant Fc region comprises a knob-in-hole modification.

154. The isolated multispecific ABP of claim 153, wherein one Fc-bearing chain of the multispecific ABP comprises a T366W mutation, and the other Fc-bearing chain of the multispecific ABP comprises a T366S, L368A, and Y407V mutation, according to EU numbering.

155. The isolated multispecific ABP of claim 153 or 154, further comprising an engineered disulfide bridge in the Fc region.

156. The isolated multispecific ABP of claim 155, wherein
a. the engineered disulfide bridge comprises a K392C mutation in one Fc-bearing chain of the multispecific ABP, and a D399C in the other Fc-bearing chain of the multispecific ABP, according to EU numbering,
b. the engineered disulfide bridge comprises a S354C mutation in one Fc-bearing chain of the multispecific ABP, and a Y349C mutation in the other Fc-bearing chain of the multispecific ABP, according to EU numbering, or
c. the engineered disulfide bridge comprises a 447C mutation in both Fc-bearing chains of the multispecific ABP, which 447C mutations are provided by extension of the C-terminus of a CH3 domain incorporating a KSC tripeptide sequence, according to EU numbering.

157. The isolated multispecific ABP of claim 156, comprising an S354C and T366W mutation in one Fc-bearing chain and a Y349C, T366S, L368A and Y407V mutation in the other Fc-bearing chain, according to EU numbering.

158. The isolated multispecific ABP of claim 144, wherein a first Fc-bearing chain of the variant Fc region is capable of binding Protein A and the other Fc-bearing chain of the variant Fc region comprises a mutation that reduces binding affinity of such Fc-bearing chain to Protein A as compared to the first Fc-bearing chain.

159. The isolated multispecific ABP of claim 158, wherein the other Fc-bearing chain comprises a H435R_Y436F mutation, according to EU numbering.

160. The isolated multispecific ABP of claim 144, wherein:
a. a first Fc-bearing chain of the variant Fc region comprises a F405A and a Y407V mutation and the second Fc-bearing chain of the variant fc region comprises a T394W mutation,
b. a first Fc-bearing chain of the variant Fc region comprises a F405A and a Y407V mutation and the second Fc-bearing chain of the variant fc region comprises a T366I and a T394W mutation,
c. a first Fc-bearing chain of the variant Fc region comprises a F405A and a Y407V mutation and the second Fc-bearing chain of the variant fc region comprises a T366L and a T394W mutation,
d. a first Fc-bearing chain of the variant Fc region comprises a F405A and a Y407V mutation and the second Fc-bearing chain of the variant fc region comprises a T366L mutation, a K392M mutation, and a T394W mutation,
e. a first Fc-bearing chain of the variant Fc region comprises a L351Y mutation, a F405A mutation, and a Y407V mutation and the second Fc-bearing chain of the variant fc region comprises a T366L mutation, a K392M mutation, and a T394W mutation,
f. a first Fc-bearing chain of the variant Fc region comprises a T350V mutation, a L351Y mutation, a F405A mutation, and a Y407V mutation and the second Fc-bearing chain of the variant fc region comprises a T350V mutation, a T366L mutation, a K392M mutation, and a T394W mutation, or
g. a first Fc-bearing chain of the variant Fc region comprises a T350V mutation, a L351Y mutation, a F405A mutation, and a Y407V mutation and the second Fc-bearing chain of the variant fc region comprises a T350V mutation, a T366L mutation, a K392M mutation, and a T394W mutation,
according to EU numbering.

161. The isolated multispecific ABP of claim 144, wherein the variant Fc region is an IgG1 Fc, and the Fc modification comprises a K409R mutation in one Fc-bearing chain and a mutation selected from a Y407, L368, F405, K370, and D399 mutation in the other Fc-bearing chain, according to EU numbering.

162. The isolated multispecific ABP of claim 144, wherein the variant Fc region comprises a set of mutations that renders homodimerization electrostatically unfavorable but heterodimerization favorable.

163. The isolated multispecific ABP of claim 162, wherein the variant Fc comprises a K409D and a K392D mutation in one Fc-bearing chain, and a D399K and a E356K mutation in the other Fc-bearing chain, according to EU numbering.

164. The isolated multispecific ABP of claim 144, wherein the variant Fc comprises a K409R mutation in one Fc-bearing chain and a L368E or L368D mutation in the other Fc-bearing chain, according to EU numbering.

165. The isolated multispecific ABP of claim 144, wherein the variant Fc comprises a D221E, P228E, and L368E mutation in one Fc-bearing chain and a D221R, P228R, and K409R in the other Fc-bearing chain, according to EU numbering.

166. The isolated multispecific ABP of claim 144, wherein the variant Fc comprises an S364H and F405A mutation in one Fc-bearing chain and a Y349T and T394F mutation in the other Fc-bearing chain, according to EU numbering.

167. The isolated multispecific ABP of claim 144, wherein the variant Fc comprises an E375Q and S364K mutation in one Fc-bearing chain and a L368D and K370S mutation in the other Fc-bearing chain, according to EU numbering.

168. The isolated multispecific ABP of claim 144, wherein the variant Fc comprises strand-exchange engineered domain (SEED) CH3 heterodimers.

169. The isolated multispecific ABP of any of the preceding claims, wherein the HLA Class I molecule is HLA subtype A*01:01 and the HLA-restricted peptide comprises the sequence NTDNNLAVY.

170. The isolated multispecific ABP of claim 169, wherein the HLA Class I molecule is HLA subtype A*01:01 and the HLA-restricted peptide consists of the sequence NTDNNLAVY.

171. The isolated multispecific ABP of claim 169 or 170, wherein the ABP comprises a CDR-H3 comprising a sequence selected from: CAATEWLGVW, CARANWLDYW, CARANWLDYW, CARDWVLDYW, CARGEWLDYW, CARGWELGYW, CARDFVGYDDW, CARDYGDLDYW, CARGSYGMDVW, CARDGYSGLDVW, CARDSGVGMDVW, CARDGVAVASDYW, CARGVNVDDFDYW, CARGDYTGNWYFDLW, CARANWLDYW, CARDQFYGGNSGGHDYW, CAREEDYW, CARGDWFDPW, CARGDWFDPW, CARGEWFDPW, CARSDWFDPW, CARDSGSYFDYW, CARDYGGYVDYW, CAREGPAALDVW, CARERRSGMDVW, CARVLQEGMDVW, CASERELPFDIW, CAKGGGGYGMDVW, CAAMGIAVAGGMDVW, CARNWNLDYW, CATYDDGMDVW, CARGGGGALDYW, CALSGNYYGMDVW, CARGNPWELRLDYW, and CARDKNYYGMDVW.

172. The isolated multispecific ABP of any one of claims 169-171, wherein the ABP comprises a CDR-L3 comprising a sequence selected from: CQQSYNTPYTF, CQQSYSTPYTF, CQQSYSTPYSF, CQQSYSTPFTF, CQQSYGVPYTF, CQQSYSAPYTF, CQQSYSAPYTF, CQQSYSAPYSF, CQQSYSTPYTF, CQQSYSVPYSF, CQQSYSAPYTF, CQQSYSVPYSF, CQQSYSTPQTF, CQQLDSYPFTF, CQQSYSSPYTF, CQQSYSTPLTF, CQQSYSTPYSF, CQQSYSTPYTF, CQQSYSTPYTF, CQQSYSTPFTF, CQQSYSTPTF, CQQTYAIPLTF, CQQSYSTPYTF, CQQSYIAPFTF, CQQSYSIPLTF, CQQSYSNPTF, CQQSYSTPYSF, CQQSYSDQWTF, CQQSYLPPYSF, CQQSYSSPYTF, CQQSYTTPWTF, CQQSYLPPYSF, CQEGITYTF, CQQYYSYPFTF, and CQHYGYSPVTF.

173. The isolated multispecific ABP of any one of claims 169-172, wherein the ABP comprises the CDR-H3 and the CDR-L3 from the scFv designated G2(1H11), G2(2E07), G2(2E03), G2(2A11), G2(2C06), G2(1G01), G2(1C02), G2(1H01), G2(1B12), G2(1B06), G2(2H10), G2(1H10), G2(2C11), G2(1C09), G2(1A10), G2(1B10), G2(1D07), G2(1E05), G2(1D03), G2(1G12), G2(2H11), G2(1C03), G2(1G07), G2(1F12), G2(1G03), G2(2B08), G2(2A10), G2(2D04), G2(1C06), G2(2A09), G2(1B08), G2(1E03), G2(2A03), G2(2F01), or G2(1D06).

174. The isolated multispecific ABP of claim 173, wherein the ABP comprises the CDR-H3 and the CDR-L3 from the scFv designated G2(1H11).

175. The isolated multispecific ABP of any one of claims 169-173, wherein the ABP comprises all three heavy chain CDRs and all three light chain CDRs from the scFv designated G2(1H11), G2(2E07), G2(2E03), G2(2A11), G2(2C06), G2(1G01), G2(1C02), G2(1H01), G2(1B12), G2(1B06), G2(2H10), G2(1H10), G2(2C11), G2(1C09), G2(1A10), G2(1B10), G2(1D07), G2(1E05), G2(1D03), G2(1G12), G2(2H11), G2(1C03), G2(1G07), G2(1F12), G2(1G03), G2(2B08), G2(2A10), G2(2D04), G2(1C06), G2(2A09), G2(1B08), G2(1E03), G2(2A03), G2(2F01), or G2(1D06).

176. The isolated multispecific ABP of claim 175, wherein the ABP comprises all three heavy chain CDRs and all three light chain CDRs from the scFv designated G2(1H11).

177. The isolated multispecific ABP of any one of claims 169-175, wherein the ABP comprises a VH sequence selected from
QVQLVQSGAEVKKPGASVKVSCKASGYTFTNYYMHWVRQAPGQGLEWMGM
INPSGGGTSYAQKFQGRVTMTRDTSTSTVYMELSSLRSEDTAVYYCARGN
PWELRLDYWGQGTLVTVSS,
QVQLVQSGAEVKKPGASVKVSCKASGGTFSSATISWVRQAPGQGLEWMGW
IYPNSGGTVYAQKFQGRVTMTRDTSTSTVYMELSSLRSEDTAVYYCAATE
WLGVWGQGTTVTVSS,
EVQLLQSGAEVKKPGSSVKVSCKASGGTFSSYAISWVRQAPGQGLEWMGW
INPNSGGTISAPNFQGRVTMTRDTSTSTVYMELSSLRSEDTAVYYCARAN
WLDYWGQGTLVTVSS,
EVQLLESGAEVKKPGASVKVSCKASGYTFTTYDLAWVRQAPGQGLEWMGW
INPNSGGTNYAQKFQGRVTMTRDTSTSTVYMELSSLRSEDTAVYYCARAN
WLDYWGQGTLVTVSS,
QVQLVQSGAEVKKPGASVKVSCKSSGYSFDSYVVNWVRQAPGQGLEWMGW
INPNSGGTNYAQKFQGRVTMTRDTSTSTVYMELSSLRSEDTAVYYCARDW
VLDYWGQGTLVTVSS,
QVQLVQSGAEVKKPGASVKVSCKASGYTFTSYGISWVRQAPGQGLEWMGW
MNPNSGGTNYAQKFQGRVTMTRDTSTSTVYMELSSLRSEDTAVYYCARGE
WLDYWGQGTLVTVSS,
QVQLVQSGAEVKKPGASVKVSCKASGYTFTSYGISWVRQAPGQGLEWMGW
INPNSGGTNYAQKFQGRVTMTRDTSTSTVYMELSSLRSEDTAVYYCARGW
ELGYWGQGTLVTVSS,
QVQLVQSGAEVKKPGASVKVSCKASGYTFTRYTINWVRQAPGQGLEWMGW
INPNSGGTNYAQKFQGRVTMTRDTSTSTVYMELSSLRSEDTAVYYCARDF
VGYDDWGQGTLVTVSS,
QVQLVQSGAEVKKPGASVKVSCKASGYTFTSYGITWVRQAPGQGLEWMGW
INPNSGGTNYAQKFQGRVTMTRDTSTSTVYMELSSLRSEDTAVYYCARDY
GDLDYWGQGTLVTVSS,
QVQLVQSGAEVKKPGASVKVSCKASGGTFSNYILSWVRQAPGQGLEWMGW
INPDSGGTNYAQKFQGRVTMTRDTSTSTVYMELSSLRSEDTAVYYCARGS
YGMDVWGQGTTVTVSS,
QVQLVQSGAEVKKPGASVKVSCKASGYSFTRYNMHWVRQAPGQGLEWMGW
INPNSGGTNYAQKFQGRVTMTRDTSTSTVYMELSSLRSEDTAVYYCARDG
YSGLDVWGKGTTVTVSS,
QVQLVQSGAEVKKPGASVKVSCKASGGTFSSYAISWVRQAPGQGLEWMGW
INPNNGGTNYAQKFQGRVTMTRDTSTSTVYMELSSLRSEDTAVYYCARDS
GVGMDVWGQGTTVTVSS,
QVQLVQSGAEVKKPGASVKVSCKASGGTFNNYAFSWVRQAPGQGLEWMGW
INPNSGGTNYAQKFQGRVTMTRDTSTSTVYMELSSLRSEDTAVYYCARDG
VAVASDYWGQGTLVTVSS,
QVQLVQSGAEVKKPGASVKVSCKASGYTFSSYNMHWVRQAPGQGLEWMG
WINGNTGGTNYAQKFQGRVTMTRDTSTSTVYMELSSLRSEDTAVYYCAR
GVNVDDFDYWGQGTLVTVSS,
QVQLVQSGAEVKKPGASVKVSCKASGGTFSSYAFSWVRQAPGQGLEWMGW
INPDTGYTRYAQKFQGRVTMTRDTSTSTVYMELSSLRSEDTAVYYCARGD
YTGNWYFDLWGRGTLVTVSS,
EVQLLESGAEVKKPGASVKVSCKASGYTFTSYGISWVRQAPGQGLEWMGW
INPYSGGTNYAQKLQGRVTMTRDTSTSTVYMELSSLRSEDTAVYYCARAN
WLDYWGQGTLVTVSS,
QVQLVQSGAEVKKPGASVKVSCKASGYTFTSYGISWVRQAPGQGLEWMGW
ISAYNGYTNYAQNLQGRVTMTRDTSTSTVYMELSSLRSEDTAVYYCARDQ
FYGGNSGGHDYWGQGTLVTVSS,
QVQLVQSGAEVKKPGASVKVSCKASGYTFTDYNMEIWVRQAPGQGLEWMG
WMNPNSGGTNYAQKFQGRVTMTRDTSTSTVYMELSSLRSEDTAVYYCAR
E-EDYWGQGTLVTVSS,
QVQLVQSGAEVKKPGASVKVSCKASGYTFTRYTINWVRQAPGQGLEWMGW
INPNSGGANYAQKFQGRVTMTRDTSTSTVYMELSSLRSEDTAVYYCARGD
WFDPWGQGTLVTVSS,
QVQLVQSGAEVKKPGASVKVSCKASGYTFTSYLMEIWVRQAPGQGLEWMG
WISPNSGGTNYAQKFQGRVTMTRDTSTSTVYMELSSLRSEDTAVYYCARG
DWFDPWGQGTLVTVSS,
QVQLVQSGAEVKKPGASVKVSCKASGYTFSDYYVHWVRQAPGQGLEWMGW
INPNSGGTNYAQKFQGRVTMTRDTSTSTVYMELSSLRSEDTAVYYCARGE
WFDPWGQGTLVTVSS,
QVQLVQSGAEVKKPGASVKVSCKASGYTFTTYYMHWVRQAPGQGLEWMGW
INPNSGGTNYAQKFQGRVTMTRDTSTSTVYMELSSLRSEDTAVYYCARSD
WFDPWGQGTLVTVSS,
QVQLVQSGAEVKKPGASVKVSCKASGGTFSNYAINWVRQAPGQGLEWMGW
ISPYSGGTNYAQKFQGRVTMTRDTSTSTVYMELSSLRSEDTAVYYCARDS
GSYFDYWGQGTLVTVSS,
QVQLVQSGAEVKKPGASVKVSCKASGYTFTDYYMEIWVRQAPGQGLEWMG
WIYPNTGGTNYAQKFQGRVTMTRDTSTSTVYMELSSLRSEDTAVYYCARD
YGGYVDYWGQGTLVTVSS,
EVQLLESGAEVKKPGASVKVSCKASGYTFTSYAMNWVRQAPGQGLEWMGW
MNPNSGGTKYAQKFQGRVTMTRDTSTSTVYMELSSLRSEDTAVYYCAREG
PAALDVWGQGTLVTVSS,
QVQLVQSGAEVKKPGASVKVSCKASGYTLTSHLIHWVRQAPGQGLEWMGW
INPNSGGTNYAQKFQGRVTMTRDTSTSTVYMELSSLRSEDTAVYYCARER
RSGMDVWGQGTTVTVSS,
EVQLLESGAEVKKPGASVKVSCKASGYSFTDYIVHWVRQAPGQGLEWMGW
INPYSGGTKYAQKFQGRVTMTRDTSTSTVYMELSSLRSEDTAVYYCARVL
QEGMDVWGQGTLVTVSS,
QVQLVQSGAEVKKPGASVKVSCKASGYTESNFLINWVRQAPGQGLEWMGW
INPNSGGTNYAQKFQGRVTMTRDTSTSTVYMELSSLRSEDTAVYYCASER
ELPFDIWGQGTMVTVSS,
QVQLVQSGAEVKKPGASVKVSCKASGYTFTDYQMFWVRQAPGQGLEWMGW
INPNSGGTNYAQKFQGRVTMTRDTSTSTVYMELSSLRSEDTAVYYCAKGG
GGYGMDVWGQGTTVTVSS,
QVQLVQSGAEVKKPGASVKVSCKASGGTFSSYAISWVRQAPGQGLEWMGW
INPNSGGTNYAQKFQGRVTMTRDTSTSTVYMELSSLRSEDTAVYYCAAMG
IAVAGGMDVWGQGTLVTVSS,
QVQLVQSGAEVKKPGASVKVSCKASGYTFTNYHMEIWVRQAPGQGLEWMG
WIHPDSGGTSYAQKFQGRVTMTRDTSTSTVYMELSSLRSEDTAVYYCARN
WNLDYWGQGTLVTVSS,
QVQLVQSGAEVKKPGASVKVSCKASGYTFTGYYMHWVRQAPGQGLEWMGW
MNPNSGNTGYAQKFQGRVTMTRDTSTSTVYMELSSLRSEDTAVYYCATYD
DGMDVWGQGTTVTVSS,
QVQLVQSGAEVKKPGASVKVSCKASGYTFTSYTVNWVRQAPGQGLEWMGW
INPNSGGTKYAQNFQGRVTMTRDTSTSTVYMELSSLRSEDTAVYYCARGG
GGALDYWGQGTLVTVSS,
QVQLVQSGAEVKKPGASVKVSCKASGYTFTSYYMHWVRQAPGQGLEWMGM
INPRDDTTDYARDFQGRVTMTRDTSTSTVYMELSSLRSEDTAVYYCALSG
NYYGMDVWGQGTTVTVSS,
and
QVQLVQSGAEVKKPGSSVKVSCKASGYTFTSQYMHWVRQAPGQGLEWMGR
IIPLLGIVNYAQKFQGRVTITADESTSTAYMELSSLRSEDTAVYYCARDK
NYYGMDVWGQGTTVTVSS.

178. The isolated multispecific ABP of any one of claims 169-177, wherein the ABP comprises a VL sequence selected from
DIQMTQSPSSLSASVGDRVTITCQASQDISNYLNWYQQKPGKAPKLLIYA
ASSLQSGVPSRFSGSGSGTDFTLTISSLQPEDFATYYCQQYYSYPFTFGP
GTKVDIK,
DIQMTQSPSSLSASVGDRVTITCRASQSISTWLAWYQQKPGKAPKLLIYA
ASSLRSGVPSRFSGSGSGTDFTLTISSLQPEDFATYYCQQSYNTPYTFGQ
GTKLEIK,
DIQMTQSPSSLSASVGDRVTITCRASQSISRWLAWYQQKPGKAPKLLIYA
ASTVQSGVPSRFSGSGSGTDFTLTISSLQPEDFATYYCQQSYSTPYTFGQ
GTKLEIK,
DIQMTQSPSSLSASVGDRVTITCRASQDISRWLAWYQQKPGKAPKLLIYA
ASRLQAGVPSRFSGSGSGTDFTLTISSLQPEDFATYYCQQSYSTPYSFGQ
GTKLEIK,
DIQMTQSPSSLSASVGDRVTITCRASQTISSWLAWYQQKPGKAPKLLIYA
ASSLQSGVPSRFSGSGSGTDFTLTISSLQPEDFATYYCQQSYSTPFTFGP
GTKVDIK,
DIQMTQSPSSLSASVGDRVTITCRASQTISSWLAWYQQKPGKAPKLLIYA
ASSLQSGVPSRFSGSGSGTDFTLTISSLQPEDFATYYCQQSYGVPYTFGQ
GTKVEIK,
DIQMTQSPSSLSASVGDRVTITCRASQSISNWLAWYQQKPGKAPKLLIYA
ASSLQSGVPSRFSGSGSGTDFTLTISSLQPEDFATYYCQQSYSAPYTFGP
GTKVDIK,
DIQMTQSPSSLSASVGDRVTITCRASQSVGNWLAWYQQKPGKAPKWYGAS
SLQTGVPSRFSGSGSGTDFTLTISSLQPEDFATYYCQQSYSAPYTFGQGT
KVEIK,
DIQMTQSPSSLSASVGDRVTITCRASQNIGNWLAWYQQKPGKAPKLLIYA
ASTLQTGVPSRFSGSGSGTDFTLTISSLQPEDFATYYCQQSYSAPYSFGQ
GTKLEIK,
DIQMTQSPSSLSASVGDRVTITCRASQSISRWLAWYQQKPGKAPKLLIYA
ASSLQSGVPSRFSGSGSGTDFTLTISSLQPEDFATYYCQQSYSTPYTFGQ
GTKLEIK,
DIQMTQSPSSLSASVGDRVTITCRASQSISSWLAWYQQKPGKAPKLLIYG
ASSLQSGVPSRFSGSGSGTDFTLTISSLQPEDFATYYCQQSYSVPYSFGQ
GTKLEIK,
DIQMTQSPSSLSASVGDRVTITCRASQSISKWLAWYQQKPGKAPKLLIYA
ASSLQSGVPSRFSGSGSGTDFTLTISSLQPEDFATYYCQQSYSAPYTFGQ
GTKVEIK,
DIQMTQSPSSLSASVGDRVTITCRASQGISNYLAWYQQKPGKAPKLLIYA
ASTLQSGVPSRFSGSGSGTDFTLTISSLQPEDFATYYCQQSYSVPYSFGQ
GTKLEIK,
DIQMTQSPSSLSASVGDRVTITCRASQTISNYLNWYQQKPGKAPKLLIY
AASNLQSGVPSRFSGSGSGTDFTLTISSLQPEDFATYYCQQSYSTPQTF
GQGTKVEIK,
DIQMTQSPSSLSASVGDRVTITCRASRDIGRAVGWYQQKPGKAPKLLIY
AASSLQSGVPSRFSGSGSGTDFTLTISSLQPEDFATYYCQQLDSYPFTF
GPGTKVDIK,
DIQMTQSPSSLSASVGDRVTITCRASQSISSWLAWYQQKPGKAPKLLIY
AASTLQSGVPSRFSGSGSGTDFTLTISSLQPEDFATYYCQQSYSSPYTF
GPGTKVDIK,
DIQMTQSPSSLSASVGDRVTITCQASQDISNYLNWYQQKPGKAPKLLIY
AASSLQSGVPSRFSGSGSGTDFTLTISSLQPEDFATYYCQQSYSTPLTF
GGGTKLEIK,
DIQMTQSPSSLSASVGDRVTITCRASQSIGRWLAWYQQKPGKAPKLLIY
AASSLQSGVPSRFSGSGSGTDFTLTISSLQPEDFATYYCQQSYSTPYSFG
QGTKVEIK,
DIQMTQSPSSLSASVGDRVTITCRASQSISTWLAWYQQKPGKAPKLLIY
AASTLQSGVPSRFSGSGSGTDFTLTISSLQPEDFATYYCQQSYSTPYTF
AQGTKLEIK,
DIQMTQSPSSLSASVGDRVTITCQASQDISNYLNWYQQKPGKAPKWYGA
SRLQSGVPSRFSGSGSGTDFTLTISSLQPEDFATYYCQQSYSTPYTFGQ
GTKLEIK,
DIQMTQSPSSLSASVGDRVTITCRASQSISSWLAWYQQKPGKAPKLLIY
AASTLQSGVPSRFSGSGSGTDFTLTISSLQPEDFATYYCQQSYSTPFTF
GPGTKVDIK,
DIQMTQSPSSLSASVGDRVTITCRASQSVSNWLAWYQQKPGKAPKLLIY
AASSLQSGVPSRFSGSGSGTDFTLTISSLQPEDFATYYCQQSYSTPTFG
QGTKLEIK,
DIQMTQSPSSLSASVGDRVTITCQASQDISNYLNWYQQKPGKAPKLLIY
AASTLQSGVPSRFSGSGSGTDFTLTISSLQPEDFATYYCQQTYAIPLTF
GGGTKVEIK,
DIQMTQSPSSLSASVGDRVTITCQASQDIGSWLAWYQQKPGKAPKLLIY
ATSSLQSGVPSRFSGSGSGTDFTLTISSLQPEDFATYYCQQSYSTPYTF
GQGTKLEIK,
DIQMTQSPSSLSASVGDRVTITCRASQGISRWLAWYQQKPGKAPKLLIY
AASTLQPGVPSRFSGSGSGTDFTLTISSLQPEDFATYYCQQSYIAPFTF
GPGTKVDIK,
DIQMTQSPSSLSASVGDRVTITCRASQGISNYLAWYQQKPGKAPKLLIY
AASRLESGVPSRFSGSGSGTDFTLTISSLQPEDFATYYCQQSYSIPLTF
GGGTKVEIK,
DIQMTQSPSSLSASVGDRVTITCRASQSISSYLNWYQQKPGKAPKWYGV
SSLQSGVPSRFSGSGSGTDFTLTISSLQPEDFATYYCQQSYSNPTFGQG
TKVEIK,
DIQMTQSPSSLSASVGDRVTITCRASQSISSWVAWYQQKPGKAPKLLIY
GASNLESGVPSRFSGSGSGTDFTLTISSLQPEDFATYYCQQSYSTPYSF
GQGTKLEIK,
DIQMTQSPSSLSASVGDRVTITCRASQGISNYLAWYQQKPGKAPKLLIY
AASSLQSGVPSRFSGSGSGTDFTLTISSLQPEDFATYYCQQSYSDQWTF
GQGTKVEIK,
DIQMTQSPSSLSASVGDRVTITCRASQSISRWLAWYQQKPGKAPKLLIY
AASSLQSGVPSRFSGSGSGTDFTLTISSLQPEDFATYYCQQSYLPPYSF
GQGTKVEIK,
DIQMTQSPSSLSASVGDRVTITCRASQSISNWLAWYQQKPGKAPKLLIY
AASSLQSGVPSRFSGSGSGTYFTLTISSLQPEDFATYYCQQSYSSPYTF
GQGTKLEIK,
DIQMTQSPSSLSASVGDRVTITCRASQSISHYLNWYQQKPGKAPKLLIY
GASSLQSGVPSRFSGSGSGTDFTLTISSLQPEDFATYYCQQSYTTPWTF
GQGTRLEIK,
DIQMTQSPSSLSASVGDRVTITCRASQSISSWLAWYQQKPGKAPKLLIY
AASTLQSGVPSRFSGSGSGTDFTLTISSLQPEDFATYYCQQSYLPPYSF
GQGTKLEIK,
DIQMTQSPSSLSASVGDRVTITCQASQDISNYLNWYQQKPGKAPKLLIY
GASRLQSGVPSRFSGSGSGTDFTLTISSLQPEDFATYYCQEGITYTFGQ
GTKVEIK,
and
EIVMTQSPATLSVSPGERATLSCRASQSVSRNLAWYQQKPGQAPRLLIY
GASTRATGIPARFSGSGSGTEFTLTISSLQSEDFAVYYCQHYGYSPVTF
GQGTKLEIK.

179. The isolated multispecific ABP of any one of claims 169-178, wherein the ABP comprises the VH sequence and the VL sequence from the scFv designated G2(1H11), G2(2E07), G2(2E03), G2(2A11), G2(2C06), G2(1G01), G2(1C02), G2(1H01), G2(1B12), G2(1B06), G2(2H10), G2(1H10), G2(2C11), G2(1C09), G2(1A10), G2(1B10), G2(1D07), G2(1E05), G2(1D03), G2(1G12), G2(2H11), G2(1C03), G2(1G07), G2(1F12), G2(1G03), G2(2B08), G2(2A10), G2(2D04), G2(1C06), G2(2A09), G2(1B08), G2(1E03), G2(2A03), G2(2F01), or G2(1D06).

180. The isolated multispecific ABP of claim 179, wherein the ABP comprises the VH sequence and the VL sequence from the scFv designated G2(1H11).

181. The isolated multispecific ABP of any one of claims 169-180, wherein the multispecific ABP binds to any one or more of amino acid positions 3-9 of the restricted peptide NTDNNLAVY.

182. The isolated multispecific ABP of claim 181, wherein the multispecific ABP binds to any one or more of amino acid positions 6-9 of the restricted peptide NTDNNLAVY.

183. The isolated multispecific ABP of any one of claims 169-182, wherein the multispecific ABP binds to any one or more of amino acid positions 70-85 of the alpha 1 helix of HLA subtype A*01:01.

184. The isolated multispecific ABP of any one of claims 169-183, wherein the multispecific ABP binds to any one or more of amino acid positions 140-160 of the alpha 2 helix of HLA subtype A*01:01.

185. The isolated multispecific ABP of claim 184, wherein the multispecific ABP binds to any one or more of amino acid positions 157-160 of the alpha 2 helix of HLA subtype A*01:01.

186. The isolated multispecific ABP of claim 41, comprising the sequence
MGWSCIILFLVATATGVHSDIQMTQSPSSLSASVGDRVTITCQASQDISN
YLNWYQQKPGKAPKLLIYAASSLQSGVPSRFSGSGSGTDFTLTISSLQPE
DFATYYCQQYYSYPFTFGPGTKVDIKGGGGSGGGGSGGGGSGGGGSQVQL
VQSGAEVKKPGASVKVSCKASGYTFTNYYMHWVRQAPGQGLEWMGMINPS
GGGTSYAQKFQGRVTMTRDTSTSTVYMELSSLRSEDTAVYYCARGNPWEL
RLDYWGQGTLVTVSSGGGGSQVQLQQSGAELARPGASVKMSCKASGYTFT
RYTMHWVKQRPGQGLEWIGYINPSRGYTNYNQKFKDKATLTTDKSSSTAY
MQLSSLTSEDSAVYYCARYYDDHYSLDYWGQGTTLTVSSVEGGSGGSGGS
GGSGGVDQIVLTQSPAIMSASPGEKVTMTCSASSSVSYMNWYQQKSGTSP
KRWIYDTSKLASGVPAHFRGSGSGTSYSLTISGMEAEDAATYYCQQWSSN
PFTFGSGTKLEINGGGGSHHHHHHHH.

187. The isolated multispecific ABP of claim 78, wherein
a. the first and second polypeptides comprise the sequence
MGWSCIILFLVATATGVHSQVQLQQSGAELARPGASVKMSCKASGYT
FTRYTMHWVKQRPGQGLEWIGYINPSRGYTNYNQKFKDKATLTTDK
SSSTAYMQLSSLTSEDSAVYYCARYYDDHYSLDYWGQGTTLTVSSAS
TKGPSVFPLAPSSKSTSGGTAALGCLVKDYFPEPVTVSWNSGALTSGV
HTFPAVLQSSGLYSLSSVVTVPSSSLGTQTYICNVNHKPSNTKVDKRV
EPKSCDKTHTCPPCPAPELLGGPSVFLEPPKPKDTLMISRTPEVTCVVV
DVSHEDPEVKFNWYVDGVEVHNAKTKPREEQYQSTYRVVSVLTVLH
QDWLNGKEYKCKVSNKALPAPIEKTISKAKGQPREPQVYTLPPSREEM
TKNQVSLTCLVKGFYPSDIAVEWESNGQPENNYKTTPPVLDSDGSFFL
YSKLTVDKSRWQQGNVFSCSVMHEALHNHYTQKSLSLSPGKGGGGS
GGGGSQVQLVQSGAEVKKPGASVKVSCKASGYTFTNYYMHWVRQA
PGQGLEWMGMINPSGGGTSYAQKFQGRVTMTRDTSTSTVYMELSSLR
SEDTAVYYCARGNPWELRLDYWGQGTLVTVSSGGGGSGGGGSGGG
GSGGGGSDIQMTQSPSSLSASVGDRVTITCQASQDISNYLNWYQQKPG
KAPKLLIYAASSLQSGVPSRFSGSGSGTDFTLTISSLQPEDFATYYCQQ
YYSYPFTFGPGTKVDIK;
and
b. the third and fourth polypeptides comprise the sequence
MDMRVPAQLLGLLLLWLPGARCQIVLTQSPAIMSASPGEKVTMTCSA
SSSVSYMNWYQQKSGTSPKRWIYDTSKLASGVPAHFRGSGSGTSYSL
TISGMEAEDAATYYCQQWSSNPFTFGSGTKLEINRTVAAPSVFIFPPSD
EQLKSGTASVVCLLNNFYPREAKVQWKVDNALQSGNSQESVTEQDS
KDSTYSLSSTLTLSKADYEKHKVYACEVTHQGLSSPVTKSFNRGEC.

188. The isolated multispecific ABP of claim 71, wherein
a. the first polypeptide comprises the sequence
MGWSCIILFLVATATGVHSQVQLVQSGAEVKKPGASVKVSCKASGYT
FTNYYMHWVRQAPGQGLEWMGMINPSGGGTSYAQKFQGRVTMTRD
TSTSTVYMELSSLRSEDTAVYYCARGNPWELRLDYWGQGTLVTVSSG
GGGSGGGGSGGGGSGGGGSDIQMTQSPSSLSASVGDRVTITCQASQDI
SNYLNWYQQKPGKAPKLLIYAASSLQSGVPSRFSGSGSGTDFTLTISSL
QPEDFATYYCQQYYSYPFTFGPGTKVDIKGGGGSEPKSSDKTHTCPPC
PAPELLGGPSVFLEPPKPKDTLMISRTPEVTCVVVDVSHEDPEVKFNW
YVDGVEVHNAKTKPREEQYQSTYRVVSVLTVLHQDWLNGKEYKCK
VSNKALPAPIEKTISKAKGQPREPQVYTLPPCREEMTKNQVSLWCLVK
GEYPSDIAVEWESNGQPENNYKTTPPVLDSDGSFFLYSKLTVDKSRWQ
QGNVFSCSVMHEALHNHYTQKSLSLSPGK;
b. the second polypeptide comprises the sequence
MGWSCIILFLVATATGVHSQVQLQQSGAELARPGASVKMSCKASGYT
FTRYTMHWVKQRPGQGLEWIGYINPSRGYTNYNQKFKDKATLTTDK
SSSTAYMQLSSLTSEDSAVYYCARYYDDHYSLDYWGQGTTLTVSSAS
TKGPSVFPLAPSSKSTSGGTAALGCLVKDYFPEPVTVSWNSGALTSGV
HTFPAVLQSSGLYSLSSVVTVPSSSLGTQTYICNVNHKPSNTKVDKRV
EPKSCDKTHTCPPCPAPELLGGPSVFLEPPKPKDTLMISRTPEVTCVVV
DVSHEDPEVKFNWYVDGVEVHNAKTKPREEQYQSTYRVVSVLTVLH
QDWLNGKEYKCKVSNKALPAPIEKTISKAKGQPREPQVCTLPPSREEM
TKNQVSLSCAVKGFYPSDIAVEWESNGQPENNYKTTPPVLDSDGSFFL
VSKLTVDKSRWQQGNVFSCSVMHEALHNRFTQKSLSLSPGK;
and
c. the third polypeptide comprises the sequence
MDMRVPAQLLGLLLLWLPGARCQIVLTQSPAIMSASPGEKVTMTCSA
SSSVSYMNWYQQKSGTSPKRWIYDTSKLASGVPAHFRGSGSGTSYSL
TISGMEAEDAATYYCQQWSSNPFTFGSGTKLEINRTVAAPSVFIFPPSD
EQLKSGTASVVCLLNNFYPREAKVQWKVDNALQSGNSQESVTEQDS
KDSTYSLSSTLTLSKADYEKHKVYACEVTHQGLSSPVTKSFNRGEC.

189. The isolated multispecific ABP of claim 46, wherein
a. the first polypeptide comprises the sequence
MGWSCIILFLVATATGVHSQVQLVQSGAEVKKPGASVKVSCKASGYT
FTNYYMHWVRQAPGQGLEWMGMINPSGGGTSYAQKFQGRVTMTRD
TSTSTVYMELSSLRSEDTAVYYCARGNPWELRLDYWGQGTLVTVSSG
GGGSGGGGSGGGGSGGGGSDIQMTQSPSSLSASVGDRVTITCQASQDI
SNYLNWYQQKPGKAPKLLIYAASSLQSGVPSRFSGSGSGTDFTLTISSL
QPEDFATYYCQQYYSYPFTFGPGTKVDIKGGGGSEPKSSDKTHTCPPC
PAPELLGGPSVFLEPPKPKDTLMISRTPEVTCVVVDVSHEDPEVKFNW
YVDGVEVHNAKTKPREEQYQSTYRVVSVLTVLHQDWLNGKEYKCK
VSNKALPAPIEKTISKAKGQPREPQVYTLPPCREEMTKNQVSLWCLVK
GEYPSDIAVEWESNGQPENNYKTTPPVLDSDGSFFLYSKLTVDKSRWQ
QGNVFSCSVMHEALHNHYTQKSLSLSPGK;
b. the second polypeptide comprises the sequence
MGWSCIILFLVATATGVHSQVQLVQSGAEVKKPGASVKVSCKASGYT
FTNYYMHWVRQAPGQGLEWMGMINPSGGGTSYAQKFQGRVTMTRD
TSTSTVYMELSSLRSEDTAVYYCARGNPWELRLDYWGQGTLVTVSSG
GGGSGGGGSGGGGSGGGGSDIQMTQSPSSLSASVGDRVTITCQASQDI
SNYLNWYQQKPGKAPKLLIYAASSLQSGVPSRFSGSGSGTDFTLTISSL
QPEDFATYYCQQYYSYPFTFGPGTKVDIKGGGGSGGGGSQVQLQQSG
AELARPGASVKMSCKASGYTFTRYTMHWVKQRPGQGLEWIGYINPSR
GYTNYNQKFKDKATLTTDKSSSTAYMQLSSLTSEDSAVYYCARYYDD
HYSLDYWGQGTTLTVSSASTKGPSVFPLAPSSKSTSGGTAALGCLVKD
YFPEPVTVSWNSGALTSGVHTFPAVLQSSGLYSLSSVVTVPSSSLGTQT
YICNVNHKPSNTKVDKRVEPKSCDKTHTCPPCPAPELLGGPSVFLFPPK
PKDTLMISRTPEVTCVVVDVSHEDPEVKFNWYVDGVEVHNAKTKPRE
EQYQSTYRVVSVLTVLHQDWLNGKEYKCKVSNKALPAPIEKTISKAK
GQPREPQVCTLPPSREEMTKNQVSLSCAVKGFYPSDIAVEWESNGQPE
NNYKTTPPVLDSDGSFFLVSKLTVDKSRWQQGNVFSCSVMHEALHNR
FTQKSLSLSPGK;
and
c. the third polypeptide comprises the sequence
MDMRVPAQLLGLLLLWLPGARCQIVLTQSPAIMSASPGEKVTMTCSA
SSSVSYMNWYQQKSGTSPKRWIYDTSKLASGVPAHFRGSGSGTSYSL
TISGMEAEDAATYYCQQWSSNPFTFGSGTKLEINRTVAAPSVFIFPPSD
EQLKSGTASVVCLLNNFYPREAKVQWKVDNALQSGNSQESVTEQDS
KDSTYSLSSTLTLSKADYEKHKVYACEVTHQGLSSPVTKSFNRGEC.

190. The isolated multispecific ABP of claim 92, wherein
a. the first polypeptide comprises the sequence
MGWSCIILFLVATATGVHSGSEPKSSDKTHTCPPCPAPELLGGPSVFLF
PPKPKDTLMISRTPEVTCVVVDVSHEDPEVKFNWYVDGVEVHNAKTKPR
EEQYQSTYRVVSVLTVLHQDWLNGKEYKCKVSNKALPAPIEKTISKAKG
QPREPQVYTLPPCREEMTKNQVSLWCLVKGFYPSDIAVEWESNGQPENN
YKTTPPVLDSDGSFFLYSKLTVDKSRWQQGNVFSCSVMHEALHNHYTQK
SLSLSPGK;
b. the second polypeptide comprises the sequence
MGWSCIILFLVATATGVHSQVQLVQSGAEVKKPGASVKVSCKASGYT
FTNYYMHWVRQAPGQGLEWMGMINPSGGGTSYAQKFQGRVTMTRDTS
TSTVYMELSSLRSEDTAVYYCARGNPWELRLDYWGQGTLVTVSSGGG
GSGGGGSGGGGSGGGGSDIQMTQSPSSLSASVGDRVTITCQASQDIS
NYLNWYQQKPGKAPKLLIYAASSLQSGVPSRFSGSGSGTDFTLTISS
LQPEDFATYYCQQYYSYPFTFGPGTKVDIKGGGGSGGGGSQVQLQQS
GAELARPGASVKMSCKASGYTFTRYTMHWVKQRPGQGLEWIGYINPS
RGYTNYNQKFKDKATLTTDKSSSTAYMQLSSLTSEDSAVYYCARYYD
DHYSLDYWGQGTTLTVSSASTKGPSVFPLAPSSKSTSGGTAALGCLV
KDYFPEPVTVSWNSGALTSGVHTFPAVLQSSGLYSLSSVVTVPSSSLGTQ
TYICNVNFKPSNTKVDKRVEPKSCDKTHTCPPCPAPELLGGPSVFLFPPK
PKDTLMISRTPEVTCVVVDVSHEDPEVKFNWYVDGVEVHNAKTKPRE
EQYQSTYRVVSVLTVLHQDWLNGKEYKCKVSNKALPAPIEKTISKAK
GQPREPQVCTLPPSREEMTKNQVSLSCAVKGFYPSDIAVEWESNGQPE
NNYKTTPPVLDSDGSFFLVSKLTVDKSRWQQGNVFSCSVMHEALHNR
FTQKSLSLSPGK;
and
c. the third polypeptide comprises the sequence
MDMRVPAQLLGLLLLWLPGARCQIVLTQSPAIMSASPGEKVTMTCSA
SSSVSYMNWYQQKSGTSPKRWIYDTSKLASGVPAHFRGSGSGTSYSL
TISGMEAEDAATYYCQQWSSNPFTFGSGTKLEINRTVAAPSVFIFPPS
DEQLKSGTASVVCLLNNFYPREAKVQWKVDNALQSGNSQESVTEQDS
KDSTYSLSSTLTLSKADYEKHKVYACEVTHQGLSSPVTKSFNRGEC.

191. The isolated multispecific ABP of claim 101, wherein
a. the first and second polypeptides comprise the sequence
MGWSCIILFLVATATGVHSQVQLVQSGAEVKKPGASVKVSCKASGYT
FTNYYMHWVRQAPGQGLEWMGMINPSGGGTSYAQKFQGRVTMTRD
TSTSTVYMELSSLRSEDTAVYYCARGNPWELRLDYWGQGTLVTVSSG
GGGSGGGGSGGGGSGGGGSDIQMTQSPSSLSASVGDRVTITCQASQDI
SNYLNWYQQKPGKAPKLLIYAASSLQSGVPSRFSGSGSGTDFTLTISSL
QPEDFATYYCQQYYSYPFTFGPGTKVDIKGGGGSGGGGSQVQLQQSG
AELARPGASVKMSCKASGYTFTRYTMHWVKQRPGQGLEWIGYINPSR
GYTNYNQKFKDKATLTTDKSSSTAYMQLSSLTSEDSAVYYCARYYDD
HYSLDYWGQGTTLTVSSASTKGPSVFPLAPSSKSTSGGTAALGCLVKD
YFPEPVTVSWNSGALTSGVHTFPAVLQSSGLYSLSSVVTVPSSSLGTQT
YICNVNHKPSNTKVDKRVEPKSCDKTHTCPPCPAPELLGGPSVFLFPPK
PKDTLMISRTPEVTCVVVDVSHEDPEVKFNWYVDGVEVHNAKTKPRE
EQYQSTYRVVSVLTVLHQDWLNGKEYKCKVSNKALPAPIEKTISKAK
GQPREPQVYTLPPSREEMTKNQVSLTCLVKGEYPSDIAVEWESNGQPE
NNYKTTPPVLDSDGSFFLYSKLTVDKSRWQQGNVFSCSVMHEALHNH
YTQKSLSLSPGK;
and
b. the third and fourth polypeptides comprises the sequence
MDMRVPAQLLGLLLLWLPGARCQIVLTQSPAIMSASPGEKVTMTCSA
SSSVSYMNWYQQKSGTSPKRWIYDTSKLASGVPAHFRGSGSGTSYSL
TISGMEAEDAATYYCQQWSSNPFTFGSGTKLEINRTVAAPSVFIFPPSD
EQLKSGTASVVCLLNNFYPREAKVQWKVDNALQSGNSQESVTEQDS
KDSTYSLSSTLTLSKADYEKHKVYACEVTHQGLSSPVTKSFNRGEC.

192. The isolated multispecific ABP of claim 41, comprising an scFv sequence that is DIQMTQSPSSLSASVGDRVTITCQASQDISNYLNWYQQKPGKAPKLLIYAASSLQSGV PSRFSGSGSGTDFTLTISSLQPEDFATYYCQQYYSYPFTFGPGTKVDIKGGGGSGGGG SGGGGSGGGGSQVQLVQSGAEVKKPGASVKVSCKASGYTFTNYYMHWVRQAPGQ GLEWMGMINPSGGGTSYAQKFQGRVTMTRDTSTSTVYMELSSLRSEDTAVYYCAR GNPWELRLDYWGQGTLVTVSS, a first linker, and a second scFv sequence that is selected from
QVQLVQSGAEVKKPGASVKVSCKASGYTFTRYTMHWVRQAPGQGLE
WMGYINPSRGYTNYNQKFKDRVTLTTDKSSSTAYMELSSLRSEDTAV
YYCARYYDDHYSLDYWGQGTLVTVSSVEGGSGGSGGSGGSGGVDDI
QMTQSPSSLSASVGDRVTITCSASSSVSYMNWYQQKPGKAPKRLIYDT
SKLASGVPSRFSGSGSGTDFTLTISSLQPEDFATYYCQQWSSNPFTFGQ
GTKLEIK;
a.
EVQLVESGGGLVQPGGSLRLSCAASGFTFSTYAMNWVRQAPGKGLEWVGR
IRSKYNNYATYYADSVKGRFTISRDDSKNTLYLQMNSLRAEDTAVYYCVR
HGNFGDSYVSWFAYWGQGTLVTVSSGKPGSGKPGSGKPGSGKPGSQAVVT
QEPSLTVSPGGTVTLTCGSSTGAVTTSNYANWVQQKPGKSPRGLIGGTNK
RAPGVPARFSGSLLGGKAALTISGAQPEDEADYYCALWYSNHWVFGGGTK
LTVL.
b.

193. The isolated multispecific ABP of claim 192, wherein the linker is GGGGS.

194. The isolated multispecific ABP of claim 78, wherein the VH of the first and second polypeptide chains comprise the sequence QVQLVQSGAEVKKPGASVKVSCKASGYTFTRYTMHWVRQAPGQGLEWMGYINPS RGYTNYNQKFKDRVTLTTDKSSSTAYMELSSLRSEDTAVYYCARYYDDHYSLDYW GQGTLVTVSS, the CH1-CH2-CH3 of the first and second polypeptide chains comprise the sequence ASTKGPSVFPLAPSSKSTSGGTAALGCLVKDYFPEPVTVSWNSGALTSGVHTFPAVL QSSGLYSLSSVVTVPSSSLGTQTYICNVNHKPSNTKVDKRVEPKSCDKTHTCPPCPAP ELLGGPSVFLFPPKPKDTLMISRTPEVTCVVVDVSHEDPEVKFNWYVDGVEVHNAK TKPREEQYQSTYRVVSVLTVLHQDWLNGKEYKCKVSNKALPAPIEKTISKAKGQPR EPQVYTLPPSREEMTKNQVSLTCLVKGFYPSDIAVEWESNGQPENNYKTTPPVLDSD GSFFLYSKLTVDKSRWQQGNVFSCSVMHEALHNHYTQKSLSLSPGK, the scFv of the first and second polypeptide chains comprise the sequence QVQLVQSGAEVKKPGASVKVSCKASGYTFTNYYMEIWVRQAPGQGLEWMGMINPS GGGTSYAQKFQGRVTMTRDTSTSTVYMELSSLRSEDTAVYYCARGNPWELRLDYW GQGTLVTVSSGGGGSGGGGSGGGGSGGGGSDIQMTQSPSSLSASVGDRVTITCQASQ DISNYLNWYQQKPGKAPKLLIYAASSLQSGVPSRFSGSGSGTDFTLTISSLQPEDFATY YCQQYYSYPFTFGPGTKVDIK, and the VL_CL of the third and fourth polypeptide chains comprise the sequence
DIQMTQSPSSLSASVGDRVTITCSASSSVSYMNWYQQKPGKAPKRLIYD
TSKLASGVPSRFSGSGSGTDFTLTISSLQPEDFATYYCQQWSSNPFTFG
QGTKLEIKRTVAAPSVFIFPPSDEQLKSGTASVVCLLNNFYPREAKVQW
KVDNALQSGNSQESVTEQDSKDSTYSLSSTLTLSKADYEKHKVYACEVT
HQGLSSPVTKSFNRGEC.

195. The isolated multispecific ABP of claim 78, wherein the VH of the first and second polypeptide chains comprise the sequence EVQLVESGGGLVQPGGSLRLSCAASGFTFSTYAMNWVRQAPGKGLEWVGRIRSKY NNYATYYADSVKGRFTISRDDSKNTLYLQMNSLRAEDTAVYYCVRHGNFGDSYVS WFAYWGQGTLVTVSS, the CH1-CH2-CH3 of the first and second polypeptide chains comprise the sequence ASTKGPSVFPLAPSSKSTSGGTAALGCLVKDYFPEPVTVSWNSGALTSGVHTFPAVL QSSGLYSLSSVVTVPSSSLGTQTYICNVNHKPSNTKVDKRVEPKSCDKTHTCPPCPAP ELLGGPSVFLFPPKPKDTLMISRTPEVTCVVVDVSHEDPEVKFNWYVDGVEVHNAK TKPREEQYQSTYRVVSVLTVLHQDWLNGKEYKCKVSNKALPAPIEKTISKAKGQPR EPQVYTLPPSREEMTKNQVSLTCLVKGFYPSDIAVEWESNGQPENNYKTTPPVLDSD GSFFLYSKLTVDKSRWQQGNVFSCSVMHEALHNHYTQKSLSLSPGK, the scFv of the first and second polypeptide chains comprise the sequence QVQLVQSGAEVKKPGASVKVSCKASGYTFTNYYMEIWVRQAPGQGLEWMGMINPS GGGTSYAQKFQGRVTMTRDTSTSTVYMELSSLRSEDTAVYYCARGNPWELRLDYW GQGTLVTVSSGGGGSGGGGSGGGGSGGGGSDIQMTQSPSSLSASVGDRVTITCQASQ DISNYLNWYQQKPGKAPKLLIYAASSLQSGVPSRFSGSGSGTDFTLTISSLQPEDFATY YCQQYYSYPFTFGPGTKVDIK, and the VL_CL of the third and fourth polypeptide chains comprise the sequence
QAVVTQEPSLTVSPGGTVTLTCGSSTGAVTTSNYANWVQQKPGKSPRGL
IGGTNKRAPGVPARFSGSLLGGKAALTISGAQPEDEADYYCALWYSNHW
VFGGGTKLTVLRTVAAPSVFIFPPSDEQLKSGTASVVCLLNNFYPREAK
VQWKVDNALQSGNSQESVTEQDSKDSTYSLSSTLTLSKADYEKHKVYAC
EVTHQGLSSPVTKSFNRGEC.

196. The isolated multispecific ABP of claim 71, wherein the VH of the second polypeptide comprises the sequence QVQLVQSGAEVKKPGASVKVSCKASGYTFTRYTMHWVRQAPGQGLEWMGYINPS RGYTNYNQKFKDRVTLTTDKSSSTAYMELSSLRSEDTAVYYCARYYDDHYSLDYW GQGTLVTVSS, the CH1-CH2-CH3 of the second polypeptide comprises the sequence ASTKGPSVFPLAPSSKSTSGGTAALGCLVKDYFPEPVTVSWNSGALTSGVHTFPAVL QSSGLYSLSSVVTVPSSSLGTQTYICNVNHKPSNTKVDKRVEPKSCDKTHTCPPCPAP ELLGGPSVFLFPPKPKDTLMISRTPEVTCVVVDVSHEDPEVKFNWYVDGVEVHNAK TKPREEQYQSTYRVVSVLTVLHQDWLNGKEYKCKVSNKALPAPIEKTISKAKGQPR EPQVCTLPPSREEMTKNQVSLSCAVKGFYPSDIAVEWESNGQPENNYKTTPPVLDSD GSFFLVSKLTVDKSRWQQGNVFSCSVMHEALHNRFTQKSLSLSPGK, the scFv of the first polypeptide comprises the sequence QVQLVQSGAEVKKPGASVKVSCKASGYTFTNYYMEIWVRQAPGQGLEWMGMINPS GGGTSYAQKFQGRVTMTRDTSTSTVYMELSSLRSEDTAVYYCARGNPWELRLDYW GQGTLVTVSSGGGGSGGGGSGGGGSGGGGSDIQMTQSPSSLSASVGDRVTITCQASQ DISNYLNWYQQKPGKAPKLLIYAASSLQSGVPSRFSGSGSGTDFTLTISSLQPEDFATY YCQQYYSYPFTFGPGTKVDIK, the linker_CH2_CH3 of the first polypeptide comprises the sequence GGGGSEPKSSDKTHTCPPCPAPELLGGPSVFLFPPKPKDTLMISRTPEVTCVVVDVSH EDPEVKFNWYVDGVEVHNAKTKPREEQYQSTYRVVSVLTVLHQDWLNGKEYKCK VSNKALPAPIEKTISKAKGQPREPQVYTLPPCREEMTKNQVSLWCLVKGFYPSDIAVE WESNGQPENNYKTTPPVLDSDGSFFLYSKLTVDKSRWQQGNVFSCSVMHEALHNH YTQKSLSLSPGK, and the third polypeptide comprises the sequence
DIQMTQSPSSLSASVGDRVTITCSASSSVSYMNWYQQKPGKAPKRLIYD
TSKLASGVPSRFSGSGSGTDFTLTISSLQPEDFATYYCQQWSSNPFTFG
QGTKLEIKRTVAAPSVFIFPPSDEQLKSGTASVVCLLNNFYPREAKVQW
KVDNALQSGNSQESVTEQDSKDSTYSLSSTLTLSKADYEKHKVYACEVT
HQGLSSPVTKSFNRGEC.

197. The isolated multispecific ABP of claim 71, wherein the VH of the second polypeptide comprises the sequence EVQLVESGGGLVQPGGSLRLSCAASGFTFSTYAMNWVRQAPGKGLEWVGRIRSKY NNYATYYADSVKGRFTISRDDSKNTLYLQMNSLRAEDTAVYYCVRHGNFGDSYVS WFAYWGQGTLVTVSS, the CH1-CH2-CH3 of the second polypeptide comprises the sequence ASTKGPSVFPLAPSSKSTSGGTAALGCLVKDYFPEPVTVSWNSGALTSGVHTFPAVL QSSGLYSLSSVVTVPSSSLGTQTYICNVNHKPSNTKVDKRVEPKSCDKTHTCPPCPAP ELLGGPSVFLFPPKPKDTLMISRTPEVTCVVVDVSHEDPEVKFNWYVDGVEVHNAK TKPREEQYQSTYRVVSVLTVLHQDWLNGKEYKCKVSNKALPAPIEKTISKAKGQPR EPQVCTLPPSREEMTKNQVSLSCAVKGFYPSDIAVEWESNGQPENNYKTTPPVLDSD GSFFLVSKLTVDKSRWQQGNVFSCSVMHEALHNRFTQKSLSLSPGK, the scFv of the first polypeptide comprises the sequence QVQLVQSGAEVKKPGASVKVSCKASGYTFTNYYMHWVRQAPGQGLEWMGMINPS GGGTSYAQKFQGRVTMTRDTSTSTVYMELSSLRSEDTAVYYCARGNPWELRLDYW GQGTLVTVSSGGGGSGGGGSGGGGSGGGGSDIQMTQSPSSLSASVGDRVTITCQASQ DISNYLNWYQQKPGKAPKLLIYAASSLQSGVPSRFSGSGSGTDFTLTISSLQPEDFATY YCQQYYSYPFTFGPGTKVDIK, the linker_CH2_CH3 of the first polypeptide comprises the sequence GGGGSEPKSSDKTHTCPPCPAPELLGGPSVFLFPPKPKDTLMISRTPEVTCVVVDVSH EDPEVKFNWYVDGVEVHNAKTKPREEQYQSTYRVVSVLTVLHQDWLNGKEYKCK VSNKALPAPIEKTISKAKGQPREPQVYTLPPCREEMTKNQVSLWCLVKGFYPSDIAVE WESNGQPENNYKTTPPVLDSDGSFFLYSKLTVDKSRWQQGNVFSCSVMHEALHNH YTQKSLSLSPGK, and the third polypeptide comprises the sequence
QAVVTQEPSLTVSPGGTVTLTCGSSTGAVTTSNYANWVQQKPGKSPRGL
IGGTNKRAPGVPARFSGSLLGGKAALTISGAQPEDEADYYCALWYSNHW
VFGGGTKLTVLRTVAAPSVFIFPPSDEQLKSGTASVVCLLNNFYPREAK
VQWKVDNALQSGNSQESVTEQDSKDSTYSLSSTLTLSKADYEKHKVYAC
EVTHQGLSSPVTKSFNRGEC.

198. The isolated multispecific ABP of claim 46, wherein the first and second scFv comprises the sequence QVQLVQSGAEVKKPGASVKVSCKASGYTFTNYYMHWVRQAPGQGLEWMGMINPS GGGTSYAQKFQGRVTMTRDTSTSTVYMELSSLRSEDTAVYYCARGNPWELRLDYW GQGTLVTVSSGGGGSGGGGSGGGGSGGGGSDIQMTQSPSSLSASVGDRVTITCQASQ DISNYLNWYQQKPGKAPKLLIYAASSLQSGVPSRFSGSGSGTDFTLTISSLQPEDFATY YCQQYYSYPFTFGPGTKVDIK, the linker_CH2_CH3 of the first polypeptide comprises the sequence GGGGSEPKSSDKTHTCPPCPAPELLGGPSVFLFPPKPKDTLMISRTPEVTCVVVDVSH EDPEVKFNWYVDGVEVHNAKTKPREEQYQSTYRVVSVLTVLHQDWLNGKEYKCK VSNKALPAPIEKTISKAKGQPREPQVYTLPPCREEMTKNQVSLWCLVKGFYPSDIAVE WESNGQPENNYKTTPPVLDSDGSFFLYSKLTVDKSRWQQGNVFSCSVMHEALHNH YTQKSLSLSPGK, the VH comprises the sequence QVQLVQSGAEVKKPGASVKVSCKASGYTFTRYTMHWVRQAPGQGLEWMGYINPS RGYTNYNQKFKDRVTLTTDKSSSTAYMELSSLRSEDTAVYYCARYYDDHYSLDYW GQGTLVTVSS, CH1-CH2-CH3 of the second polypeptide comprises the sequence ASTKGPSVFPLAPSSKSTSGGTAALGCLVKDYFPEPVTVSWNSGALTSGVHTFPAVL QSSGLYSLSSVVTVPSSSLGTQTYICNVNHKPSNTKVDKRVEPKSCDKTHTCPPCPAP ELLGGPSVFLFPPKPKDTLMISRTPEVTCVVVDVSHEDPEVKFNWYVDGVEVHNAK TKPREEQYQSTYRVVSVLTVLHQDWLNGKEYKCKVSNKALPAPIEKTISKAKGQPR EPQVCTLPPSREEMTKNQVSLSCAVKGFYPSDIAVEWESNGQPENNYKTTPPVLDSD GSFFLVSKLTVDKSRWQQGNVFSCSVMHEALHNRFTQKSLSLSPGK, and the third polypeptide comprises the sequence
DIQMTQSPSSLSASVGDRVTITCSASSSVSYMNWYQQKPGKAPKRLIYD
TSKLASGVPSRFSGSGSGTDFTLTISSLQPEDFATYYCQQWSSNPFTFG
QGTKLEIKRTVAAPSVFIFPPSDEQLKSGTASVVCLLNNFYPREAKVQW
KVDNALQSGNSQESVTEQDSKDSTYSLSSTLTLSKADYEKHKVYACEVT
HQGLSSPVTKSFNRGEC.

199. The isolated multispecific ABP of claim 46, wherein the first and second scFv comprises the sequence QVQLVQSGAEVKKPGASVKVSCKASGYTFTNYYMHWVRQAPGQGLEWMGMINPS GGGTSYAQKFQGRVTMTRDTSTSTVYMELSSLRSEDTAVYYCARGNPWELRLDYW GQGTLVTVSSGGGGSGGGGSGGGGSGGGGSDIQMTQSPSSLSASVGDRVTITCQASQ DISNYLNWYQQKPGKAPKLLIYAASSLQSGVPSRFSGSGSGTDFTLTISSLQPEDFATY YCQQYYSYPFTFGPGTKVDIK, the linker_CH2_CH3 of the first polypeptide comprises the sequence GGGGSEPKSSDKTHTCPPCPAPELLGGPSVFLFPPKPKDTLMISRTPEVTCVVVDVSH EDPEVKFNWYVDGVEVHNAKTKPREEQYQSTYRVVSVLTVLHQDWLNGKEYKCK VSNKALPAPIEKTISKAKGQPREPQVYTLPPCREEMTKNQVSLWCLVKGFYPSDIAVE WESNGQPENNYKTTPPVLDSDGSFFLYSKLTVDKSRWQQGNVFSCSVMHEALHNH YTQKSLSLSPGK, the VH comprises the sequence EVQLVESGGGLVQPGGSLRLSCAASGFTFSTYAMNWVRQAPGKGLEWVGRIRSKY NNYATYYADSVKGRFTISRDDSKNTLYLQMNSLRAEDTAVYYCVRHGNFGDSYVS WFAYWGQGTLVTVSS, CH1-CH2-CH3 of the second polypeptide comprises the sequence ASTKGPSVFPLAPSSKSTSGGTAALGCLVKDYFPEPVTVSWNSGALTSGVHTFPAVL QSSGLYSLSSVVTVPSSSLGTQTYICNVNHKPSNTKVDKRVEPKSCDKTHTCPPCPAP ELLGGPSVFLFPPKPKDTLMISRTPEVTCVVVDVSHEDPEVKFNWYVDGVEVHNAK TKPREEQYQSTYRVVSVLTVLHQDWLNGKEYKCKVSNKALPAPIEKTISKAKGQPR EPQVCTLPPSREEMTKNQVSLSCAVKGFYPSDIAVEWESNGQPENNYKTTPPVLDSD GSFFLVSKLTVDKSRWQQGNVFSCSVMHEALHNRFTQKSLSLSPGK, and the third polypeptide comprises the sequence
QAVVTQEPSLTVSPGGTVTLTCGSSTGAVTTSNYANWVQQKPGKSPRGL
IGGTNKRAPGVPARFSGSLLGGKAALTISGAQPEDEADYYCALWYSNHW
VFGGGTKLTVLRTVAAPSVFIFPPSDEQLKSGTASVVCLLNNFYPREAK
VQWKVDNALQSGNSQESVTEQDSKDSTYSLSSTLTLSKADYEKHKVYAC
EVTHQGLSSPVTKSFNRGEC.

200. The isolated multispecific ABP of claim 92, wherein the hinge-CH2-CH3 of the first polypeptide comprises the sequence GSEPKSSDKTHTCPPCPAPELLGGPSVFLFPPKPKDTLMISRTPEVTCVVVDVSHEDPE VKFNWYVDGVEVHNAKTKPREEQYQSTYRVVSVLTVLHQDWLNGKEYKCKVSNK ALPAPIEKTISKAKGQPREPQVYTLPPCREEMTKNQVSLWCLVKGFYPSDIAVEWES NGQPENNYKTTPPVLDSDGSFFLYSKLTVDKSRWQQGNVFSCSVMHEALHNHYTQ KSLSLSPGK, the VH of the second polypeptide comprises the sequence QVQLVQSGAEVKKPGASVKVSCKASGYTFTRYTMHWVRQAPGQGLEWMGYINPS RGYTNYNQKFKDRVTLTTDKSSSTAYMELSSLRSEDTAVYYCARYYDDHYSLDYW GQGTLVTVSS, the CH1-CH2-CH3 of the second polypeptide comprises the sequence ASTKGPSVFPLAPSSKSTSGGTAALGCLVKDYFPEPVTVSWNSGALTSGVHTFPAVL QSSGLYSLSSVVTVPSSSLGTQTYICNVNHKPSNTKVDKRVEPKSCDKTHTCPPCPAP ELLGGPSVFLFPPKPKDTLMISRTPEVTCVVVDVSHEDPEVKFNWYVDGVEVHNAK TKPREEQYQSTYRVVSVLTVLHQDWLNGKEYKCKVSNKALPAPIEKTISKAKGQPR EPQVCTLPPSREEMTKNQVSLSCAVKGFYPSDIAVEWESNGQPENNYKTTPPVLDSD GSFFLVSKLTVDKSRWQQGNVFSCSVMHEALHNRFTQKSLSLSPGK, wherein the third polypeptide comprises the sequence DIQMTQSPSSLSASVGDRVTITCSASSSVSYMNWYQQKPGKAPKRLIYDTSKLASGV PSRFSGSGSGTDFTLTISSLQPEDFATYYCQQWSSNPFTFGQGTKLEIKRTVAAPSVFIF PPSDEQLKSGTASVVCLLNNFYPREAKVQWKVDNALQSGNSQESVTEQDSKDSTYS LSSTLTLSKADYEKHKVYACEVTHQGLSSPVTKSFNRGEC, and the scFv comprises the sequence
QVQLVQSGAEVKKPGASVKVSCKASGYTFTNYYMEIWVRQAPGQGLEWM
GMINPSGGGTSYAQKFQGRVTMTRDTSTSTVYMELSSLRSEDTAVYYCA
RGNPWELRLDYWGQGTLVTVSSGGGGSGGGGSGGGGSGGGGSDIQMTQS
PSSLSASVGDRVTITCQASQDISNYLNWYQQKPGKAPKLLIYAASSLQS
GVPSRFSGSGSGTDFTLTISSLQPEDFATYYCQQYYSYPFTFGPGTKVD
IK.

201. The isolated multispecific ABP of claim 92, wherein the hinge-CH2-CH3 of the first polypeptide comprises the sequence GSEPKSSDKTHTCPPCPAPELLGGPSVFLFPPKPKDTLMISRTPEVTCVVVDVSHEDPE VKFNWYVDGVEVHNAKTKPREEQYQSTYRVVSVLTVLHQDWLNGKEYKCKVSNK ALPAPIEKTISKAKGQPREPQVYTLPPCREEMTKNQVSLWCLVKGFYPSDIAVEWES NGQPENNYKTTPPVLDSDGSFFLYSKLTVDKSRWQQGNVFSCSVMHEALHNHYTQ KSLSLSPGK, the VH of the second polypeptide comprises the sequence EVQLVESGGGLVQPGGSLRLSCAASGFTFSTYAMNWVRQAPGKGLEWVGRIRSKY NNYATYYADSVKGRFTISRDDSKNTLYLQMNSLRAEDTAVYYCVRHGNFGDSYVS WFAYWGQGTLVTVSS, the CH1-CH2-CH3 of the second polypeptide comprises the sequence ASTKGPSVFPLAPSSKSTSGGTAALGCLVKDYFPEPVTVSWNSGALTSGVHTFPAVL QSSGLYSLSSVVTVPSSSLGTQTYICNVNHKPSNTKVDKRVEPKSCDKTHTCPPCPAP ELLGGPSVFLFPPKPKDTLMISRTPEVTCVVVDVSHEDPEVKFNWYVDGVEVHNAK TKPREEQYQSTYRVVSVLTVLHQDWLNGKEYKCKVSNKALPAPIEKTISKAKGQPR EPQVCTLPPSREEMTKNQVSLSCAVKGFYPSDIAVEWESNGQPENNYKTTPPVLDSD GSFFLVSKLTVDKSRWQQGNVFSCSVMHEALHNRFTQKSLSLSPGK, wherein the third polypeptide comprises the sequence QAVVTQEPSLTVSPGGTVTLTCGSSTGAVTTSNYANWVQQKPGKSPRGLIGGTNKR APGVPARFSGSLLGGKAALTISGAQPEDEADYYCALWYSNHWVFGGGTKLTVLRTV AAPSVFIFPPSDEQLKSGTASVVCLLNNFYPREAKVQWKVDNALQSGNSQESVTEQD SKDSTYSLSSTLTLSKADYEKHKVYACEVTHQGLSSPVTKSFNRGEC, and the scFv comprises the sequence
QVQLVQSGAEVKKPGASVKVSCKASGYTFTNYYMEIWVRQAPGQGLEWM
GMINPSGGGTSYAQKFQGRVTMTRDTSTSTVYMELSSLRSEDTAVYYCA
RGNPWELRLDYWGQGTLVTVSSGGGGSGGGGSGGGGSGGGGSDIQMTQS
PSSLSASVGDRVTITCQASQDISNYLNWYQQKPGKAPKLLIYAASSLQS
GVPSRFSGSGSGTDFTLTISSLQPEDFATYYCQQYYSYPFTFGPGTKVD
IK.

202. The isolated multispecific ABP of claim 101, wherein the first and second scFv comprise the sequence QVQLVQSGAEVKKPGASVKVSCKASGYTFTNYYMEIWVRQAPGQGLEWMGMINPS GGGTSYAQKFQGRVTMTRDTSTSTVYMELSSLRSEDTAVYYCARGNPWELRLDYW GQGTLVTVSSGGGGSGGGGSGGGGSGGGGSDIQMTQSPSSLSASVGDRVTITCQASQ DISNYLNWYQQKPGKAPKLLIYAASSLQSGVPSRFSGSGSGTDFTLTISSLQPEDFATY YCQQYYSYPFTFGPGTKVDIK, wherein the VH of the first and second polypeptides comprises the sequence QVQLVQSGAEVKKPGASVKVSCKASGYTFTRYTMHWVRQAPGQGLEWMGYINPS RGYTNYNQKFKDRVTLTTDKSSSTAYMELSSLRSEDTAVYYCARYYDDHYSLDYW GQGTLVTVSS, wherein the CH1-CH2-CH3 of the first and second polypeptides comprise the sequence ASTKGPSVFPLAPSSKSTSGGTAALGCLVKDYFPEPVTVSWNSGALTSGVHTFPAVL QSSGLYSLSSVVTVPSSSLGTQTYICNVNHKPSNTKVDKRVEPKSCDKTHTCPPCPAP ELLGGPSVFLFPPKPKDTLMISRTPEVTCVVVDVSHEDPEVKFNWYVDGVEVHNAK TKPREEQYQSTYRVVSVLTVLHQDWLNGKEYKCKVSNKALPAPIEKTISKAKGQPR EPQVYTLPPSREEMTKNQVSLTCLVKGFYPSDIAVEWESNGQPENNYKTTPPVLDSD GSFFLYSKLTVDKSRWQQGNVFSCSVMHEALHNHYTQKSLSLSPGK, wherein the VL-CL of the third and fourth polypeptides comprise the sequence DIQMTQSPSSLSASVGDRVTITCSASSSVSYMNWYQQKPGKAPKRLIYDTSKLASGV PSRFSGSGSGTDFTLTISSLQPEDFATYYCQQWSSNPFTFGQGTKLEIKRTVAAPSVFIF PPSDEQLKSGTASVVCLLNNFYPREAKVQWKVDNALQSGNSQESVTEQDSKDSTYS LSSTLTLSKADYEKHKVYACEVTHQGLSSPVTKSFNRGEC, and wherein the first and second scFvs are optionally attached to the N-terminus of the first and second polypeptides by a linker comprising the sequence GGGGSGGGGS.

203. The isolated multispecific ABP of claim 101, wherein the first and second scFv comprise the sequence QVQLVQSGAEVKKPGASVKVSCKASGYTFTNYYMEIWVRQAPGQGLEWMGMINPS GGGTSYAQKFQGRVTMTRDTSTSTVYMELSSLRSEDTAVYYCARGNPWELRLDYW GQGTLVTVSSGGGGSGGGGSGGGGSGGGGSDIQMTQSPSSLSASVGDRVTITCQASQ DISNYLNWYQQKPGKAPKLLIYAASSLQSGVPSRFSGSGSGTDFTLTISSLQPEDFATY YCQQYYSYPFTFGPGTKVDIK, wherein the VH of the first and second polypeptides comprises the sequence EVQLVESGGGLVQPGGSLRLSCAASGFTFSTYAMNWVRQAPGKGLEWVGRIRSKY NNYATYYADSVKGRFTISRDDSKNTLYLQMNSLRAEDTAVYYCVRHGNFGDSYVS WFAYWGQGTLVTVSS, wherein the CH1-CH2-CH3 of the first and second polypeptides comprise the sequence ASTKGPSVFPLAPSSKSTSGGTAALGCLVKDYFPEPVTVSWNSGALTSGVHTFPAVL QSSGLYSLSSVVTVPSSSLGTQTYICNVNHKPSNTKVDKRVEPKSCDKTHTCPPCPAP ELLGGPSVFLFPPKPKDTLMISRTPEVTCVVVDVSHEDPEVKFNWYVDGVEVHNAK TKPREEQYQSTYRVVSVLTVLHQDWLNGKEYKCKVSNKALPAPIEKTISKAKGQPR EPQVYTLPPSREEMTKNQVSLTCLVKGFYPSDIAVEWESNGQPENNYKTTPPVLDSD GSFFLYSKLTVDKSRWQQGNVFSCSVMHEALHNHYTQKSLSLSPGK, wherein the VL-CL of the third and fourth polypeptides comprise the sequence QAVVTQEPSLTVSPGGTVTLTCGSSTGAVTTSNYANWVQQKPGKSPRGLIGGTNKR APGVPARFSGSLLGGKAALTISGAQPEDEADYYCALWYSNHWVFGGGTKLTVLRTV AAPSVFIFPPSDEQLKSGTASVVCLLNNFYPREAKVQWKVDNALQSGNSQESVTEQD SKDSTYSLSSTLTLSKADYEKHKVYACEVTHQGLSSPVTKSFNRGEC, and wherein the first and second scFvs are attached to the N-terminus of the first and second polypeptides by a linker comprising the sequence GGGGSGGGGS.

204. The isolated multispecific ABP of any one of claims 1-168, wherein the HLA Class I molecule is HLA subtype B*35:01 and the HLA-restricted peptide comprises the sequence EVDPIGHVY.

205. The isolated multispecific ABP of claim 204, wherein the HLA Class I molecule is HLA subtype B*35:01 and the HLA-restricted peptide consists of the sequence EVDPIGHVY.

206. The isolated multispecific ABP of claim 204 or 205, wherein the ABP comprises a CDR-H3 comprising a sequence selected from: CARDGVRYYGMDVW, CARGVRGYDRSAGYW, CASHDYGDYGEYFQHW, CARVSWYCSSTSCGVNWFDPW, CAKVNWNDGPYFDYW, CATPTNSGYYGPYYYYGMDVW, CARDVMDVW, CAREGYGMDVW, CARDNGVGVDYW, CARGIADSGSYYGNGRDYYYGMDVW, CARGDYYFDYW, CARDGTRYYGMDVW, CARDVVANFDYW, CARGHSSGWYYYYGMDVW, CAKDLGSYGGYYW, CARSWFGGFNYHYYGMDVW, CARELPIGYGMDVW, and CARGGSYYYYGMDVW.

207. The isolated multispecific ABP of any one of claims 204-206, wherein the ABP comprises a CDR-L3 comprising a sequence selected from: CMQGLQTPITF, CMQALQTPPTF, CQQAISFPLTF, CQQANSFPLTF, CQQANSFPLTF, CQQSYSIPLTF, CQQTYMMPYTF, CQQSYITPWTF, CQQSYITPYTF, CQQYYTTPYTF, CQQSYSTPLTF, CMQALQTPLTF, CQQYGSWPRTF, CQQSYSTPVTF, CMQALQTPYTF, CQQANSFPFTF, CMQALQTPLTF, and CQQSYSTPLTF.

208. The isolated multispecific ABP of any one of claims 204-207, wherein the ABP comprises the CDR-H3 and the CDR-L3 from the scFv designated G5(7A05), G5(1C12), G5(7E07), G5(7B03), G5(7F06), G5(1B12), G5(1E05), G5(3G01), G5(3G08), G5(4B02), G5(4E04), G5(1D06), G5(1H11), G5(2B10), G5(2H08), G5(3G05), G5(4A07), or G5(4B01).

209. The isolated multispecific ABP of claim 208, wherein the ABP comprises the CDR-H3 and the CDR-L3 from the scFv designated G5(7A05).

210. The isolated multispecific ABP of any one of claims 204-208, wherein the ABP comprises all three heavy chain CDRs and all three light chain CDRs from the scFv designated G5(7A05), G5(1C12), G5(7E07), G5(7B03), G5(7F06), G5(1B12), G5(1E05), G5(3G01), G5(3G08), G5(4B02), G5(4E04), G5(1D06), G5(1H11), G5(2B10), G5(2H08), G5(3G05), G5(4A07), or G5(4B01).

211. The isolated multispecific ABP of claim 210, wherein the ABP comprises all three heavy chain CDRs and all three light chain CDRs from the scFv designated G5(7A05).

212. The isolated multispecific ABP of any one of claims 204-210, wherein the ABP comprises a VH sequence selected from
EVQLLESGGGLVKPGGSLRLSCAASGFSFSSYWMSWVRQAPGKGLEWIS
YISGDSGYTNYADSVKGRFTISRDDSKNTLYLQMNSLKTEDTAVYYCAS
HDYGDYGEYFQHWGQGTLVTVSS,
QVQLVQSGAEVKKPGASVKVSCKASGYTFTSYDINWVRQAPGQGLEWMG
IINPRSGSTKYAQKFQGRVTMTRDTSTSTVYMELSSLRSEDTAVYYCAR
DGVRYYGMDVWGQGTTVTVSS,
QVQLVQSGAEVKKPGSSVKVSCKASGYTFTSHDINWVRQAPGQGLEWMG
WMNPNSGDTGYAQKFQGRVTITADESTSTAYMELSSLRSEDTAVYYCAR
GVRGYDRSAGYWGQGTLVIVSS,
EVQLLQSGGGLVQPGGSLRLSCAASGFTFSNSDMNWVRQAPGKGLEWVA
YISSGSSTIYYADSVKGRFTISRDNSKNTLYLQMNSLRAEDTAVYYCAR
VSWYCSSTSCGVNWFDPWGQGTLVTVSS,
EVQLLESGGGLVQPGGSLRLSCAASGFTFSNSDMNWVRQAPGKGLEWVA
SISSSGGYINYADSVKGRFTISRDNSKNTLYLQMNSLRAEDTAVYYCAK
VNWNDGPYFDYWGQGTLVTVSS,
QVQLVQSGAEVKKPGSSVKVSCKASGGTFSNFGVSWLRQAPGQGLEWMG
GIIPILGTANYAQKFQGRVTITADESTSTAYMELSSLRSEDTAVYYCAT
PTNSGYYGPYYYYGMDVWGQGTTVTVSS,
QVQLVQSGAEVKKPGASVKVSCKASGYTFTSYNMHWVRQAPGQGLEWMG
WINPNSGGTNYAQKFQGRVTMTRDTSTSTVYMELSSLRSEDTAVYYCAR
DVMDVWGQGTTVTVSS,
QVQLVQSGAEVKKPGASVKVSCKASGGTFSGYLVSWVRQAPGQGLEWMG
WINPNSGGTNTAQKFQGRVTMTRDTSTSTVYMELSSLRSEDTAVYYCAR
EGYGMDVWGQGTTVTVSS,
QVQLVQSGAEVKKPGASVKVSCKASGYIFRNYPMHWVRQAPGQGLEWMG
WINPDSGGTKYAQKFQGRVTMTRDTSTSTVYMELSSLRSEDTAVYYCAR
DNGVGVDYWGQGTLVTVSS,
QVQLVQSGAEVKKPGASVKVSCKASGYTFTGYYMEIWVRQAPGQGLEWM
GWMNPNIGNTGYAQKFQGRVTMTRDTSTSTVYMELSSLRSEDTAVYYCA
RGIADSGSYYGNGRDYYYGMDVWGQGTTVTVSS,
QVQLVQSGAEVKKPGASVKVSCKASGGTFSSYGISWVRQAPGQGLEWMG
WINPNSGVTKYAQKFQGRVTMTRDTSTSTVYMELSSLRSEDTAVYYCAR
GDYYFDYWGQGTLVTVSS,
QVQLVQSGAEVKKPGASVKVSCKASGYTFTSYDINWVRQAPGQGLEWMG
WINPNSGDTKYSQKFQGRVTMTRDTSTSTVYMELSSLRSEDTAVYYCAR
DGTRYYGMDVWGQGTTVTVSS,
EVQLLESGGGLVKPGGSLRLSCAASGFTFSDYYMSWVRQAPGKGLEWVS
YISSSSSYTNYADSVKGRFTISRDDSKNTLYLQMNSLKTEDTAVYYCAR
DVVANFDYWGQGTLVTVSS,
QVQLVQSGAEVKKPGASVKVSCKASGGTFSSYAISWVRQAPGQGLEWMG
WMNPDSGSTGYAQRFQGRVTMTRDTSTSTVYMELSSLRSEDTAVYYCAR
GHSSGWYYYYGMDVWGQGTTVTVSS,
EVQLLESGGGLVQPGGSLRLSCAASGFTFTSYSMHWVRQAPGKGLEWVS
SITSFTNTMYYADSVKGRFTISRDNSKNTLYLQMNSLRAEDTAVYYCAK
DLGSYGGYYWGQGTLVTVSS,
QVQLVQSGAEVKKPGASVKVSCKASGYTFTNYYMEIWVRQAPGQGLEWM
GIINPSGGSTSYAQKFQGRVTMTRDTSTSTVYMELSSLRSEDTAVYYCA
RSWFGGFNYHYYGMDVWGQGTTVTVSS,
QVQLVQSGAEVKKPGASVKVSCKASGYTFTSYYMHWVRQAPGQGLEWMG
WMNPNSGNTGYAQKFQGRVTMTRDTSTSTVYMELSSLRSEDTAVYYCAR
ELPIGYGMDVWGQGTTVTVSS,
and
QVQLVQSGAEVKKPGSSVKVSCKASGGTFSSYAISWVRQAPGQGLEWMG
GIIPIVGTANYAQKFQGRVTITADESTSTAYMELSSLRSEDTAVYYCAR
GGSYYYYGMDVWGQGTTVTVSS.

213. The isolated multispecific ABP of any one of claims 204-212, wherein the ABP comprises a VL sequence selected from
DIQMTQSPSSLSASVGDRVTITCQASQDISNYLNWYQQK
PGKAPKLLIYAASSLQSGVPSRFSGSGSGTDFTLTISSL
QPEDFATYYCQQAISFPLTFGQSTKVEIK,
DIVMTQSPLSLPVTPGEPASISCRSSQSLLHSNGYNYLD
WYLQKPGQSPQLLIYLGSYRASGVPDRFSGSGSGTDFTL
KISRVEAEDVGVYYCMQGLQTPITFGQGTRLEIK,
DIVMTQSPLSLPVTPGEPASISCRSSQSLLHSNGYNYLD
WYLQKPGQSPQLLIYLGSSRASGVPDRFSGSGSGTDFTL
KISRVEAEDVGVYYCMQALQTPPTFGPGTKVDIK,
DIQMTQSPSSLSASVGDRVTITCRASQSISSWLAWYQQK
PGKAPKLLIYSASTLQSGVPSRFSGSGSGTDFTLTISSL
QPEDFATYYCQQANSFPLTFGGGTKVEIK,
DIQMTQSPSSLSASVGDRVTITCRASQSISSWLAWYQQK
PGKAPKLLIYAASSLQSGVPSRFSGSGSGTDFTLTISSL
QPEDFATYYCQQANSFPLTFGGGTKVEIK,
DIQMTQSPSSLSASVGDRVTITCRASQSISSWLAWYQQK
PGKAPKLLIYAASTLQSGVPSRFSGSGSGTDFTLTISSL
QPEDFATYYCQQSYSIPLTFGGGTKVEIK,
DIQMTQSPSSLSASVGDRVTITCRASQGISNYLNWYQQK
PGKAPKLLIYYASSLQSGVPSRFSGSGSGTDFTLTISSL
QPEDFATYYCQQTYMMPYTFGQGTKVEIK,
DIQMTQSPSSLSASVGDRVTITCRASQSISSYLNWYQQK
PGKAPKWYGASSLQSGVPSRFSGSGSGTDFTLTISSLQP
EDFATYYCQQSYITPWTFGQGTKVEIK,
DIQMTQSPSSLSASVGDRVTITCRASQGISNYLAWYQQK
PGKAPKLLIYAASSLQSGVPSRFSGSGSGTDFTLTISSL
QPEDFATYYCQQSYITPYTFGQGTKLEIK,
DIVMTQSPDSLAVSLGERATINCKTSQSVLYRPNNENYL
AWYQQKPGQPPKLLIYQASIREPGVPDRFSGSGSGTDFT
LTISSLQAEDVAVYYCQQYYTTPYTFGQGTKLEIK,
DIQMTQSPSSLSASVGDRVTITCRASQSISRFLNWYQQK
PGKAPKWYGASRPQSGVPSRFSGSGSGTDFTLTISSLQP
EDFATYYCQQSYSTPLTFGQGTKVEIK,
DIVMTQSPLSLPVTPGEPASISCRSSQSLLHSNGYNYLD
WYLQKPGQSPQLLIYLGSHRASGVPDRFSGSGSGTDFTL
KISRVEAEDVGVYYCMQALQTPLTFGGGTKVEIK,
EIVMTQSPATLSVSPGERATLSCRASQSVSSNLAWYQQK
PGQAPRLLIYAASARASGIPARFSGSGSGTEFTLTISSL
QSEDFAVYYCQQYGSWPRTFGQGTKVEIK,
DIQMTQSPSSLSASVGDRVTITCRASQSISSYLNWYQQK
PGKAPKWYGASRLQSGVPSRFSGSGSGTDFTLTISSLQP
EDFATYYCQQSYSTPVTFGQGTKVEIK,
DIVMTQSPLSLPVTPGEPASISCRSSQSLLHSNGYNYLD
WYLQKPGQSPQLLIYLGSNRASGVPDRFSGSGSGTDFTL
KISRVEAEDVGVYYCMQALQTPYTFGQGTKVEIK,
DIQMTQSPSSLSASVGDRVTITCQASEDISNHLNWYQQK
PGKAPKLLIYDALSLQSGVPSRFSGSGSGTDFTLTISSL
QPEDFATYYCQQANSFPFTFGPGTKVDIK,
DIVMTQSPLSLPVTPGEPASISCRSSQSLLHSNGYNYLD
WYLQKPGQSPQLLIYLGSNRASGVPDRFSGSGSGTDFTL
KISRVEAEDVGVYYCMQALQTPLTFGQGTKVEIK,
and
DIQMTQSPSSLSASVGDRVTITCRASQSISSYLNAVYQQ
KPGKAPKLLIYAASSLQSGVPSRFSGSGSGTDFTLTISS
LQPEDFATYYCQQSYSTPLTFGGGTKVEIK.

214. The isolated multispecific ABP of any one of claims 204-213, wherein the ABP comprises the VH sequence and VL sequence from the scFv designated G5(7A05), G5(1C12), G5(7E07), G5(7B03), G5(7F06), G5(1B12), G5(1E05), G5(3G01), G5(3G08), G5(4B02), G5(4E04), G5(1D06), G5(1H11), G5(2B10), G5(2H08), G5(3G05), G5(4A07), or G5(4B01).

215. The isolated multispecific ABP of claim 214, wherein the ABP comprises the VH sequence and VL sequence from the scFv designated G5(7A05).

216. The isolated multispecific ABP of claim 214, wherein the ABP comprises the VH sequence and VL sequence from the scFv designated G5(1C12).

217. The isolated multispecific ABP of any one of claims 204-214, wherein the ABP binds to any one or more of amino acid positions 2-8 on the restricted peptide EVDPIGHVY.

218. The isolated multispecific ABP of any one of claims 204-214, wherein the ABP binds to any one or more of amino acid positions 50, 54, 55, 57, 61, 62, 74, 81, 82 and 85 of the α1 helix of the HLA protein.

219. The isolated multispecific ABP of any one of claims 204-214, wherein the ABP binds to any one or more of amino acid positions 147 and 148 of the α2 helix of the HLA protein.

220. The isolated multispecific ABP of claim 41, comprising the sequence
MGWSCIILFLVATATGVHSDIQMTQSPSSLSASVGDRVT
ITCQASQDISNYLNWYQQKPGKAPKLLIYAASSLQSGVP
SRFSGSGSGTDFTLTISSLQPEDFATYYCQQAISFPLTF
GQSTKVEIKGGGGSGGGGSGGGGSGGGGSEVQLLESGGG
LVKPGGSLRLSCAASGFSFSSYWMSWVRQAPGKGLEWIS
YISGDSGYTNYADSVKGRFTISRDDSKNTLYLQMNSLKT
EDTAVYYCASHDYGDYGEYFQHWGQGTLVTVSSGGGGSQ
VQLQQSGAELARPGASVKMSCKASGYTFTRYTMHWVKQR
PGQGLEWIGYINPSRGYTNYNQKFKDKATLTTDKSSSTA
YMQLSSLTSEDSAVYYCARYYDDHYSLDYWGQGTTLTVS
SVEGGSGGSGGSGGSGGVDQIVLTQSPAIMSASPGEKVT
MTCSASSSVSYMNWYQQKSGTSPKRWIYDTSKLASGVPA
HFRGSGSGTSYSLTISGMEAEDAATYYCQQWSSNPFTFG
SGTKLEINGGGGSHHHHHHHH.

221. The isolated multispecific ABP of claim 78, wherein
a. the first and second polypeptides comprise the sequence
MGWSCIILFLVATATGVHSQVQLQQSGAELARPGASVKM
SCKASGYTFTRYTMHWVKQRPGQGLEWIGYINPSRGYTN
YNQKFKDKATLTTDKSSSTAYMQLSSLTSEDSAVYYCAR
YYDDHYSLDYWGQGTTLTVSSASTKGPSVFPLAPSSKST
SGGTAALGCLVKDYFPEPVTVSWNSGALTSGVHTFPAVL
QSSGLYSLSSVVTVPSSSLGTQTYICNVNHKPSNTKVDK
RVEPKSCDKTHTCPPCPAPELLGGPSVFLEPPKPKDTLM
ISRTPEVTCVVVDVSHEDPEVKFNWYVDGVEVHNAKTKP
REEQYQSTYRVVSVLTVLHQDWLNGKEYKCKVSNKALPA
PIEKTISKAKGQPREPQVYTLPPSREEMTKNQVSLTCLV
KGFYPSDIAVEWESNGQPENNYKTTPPVLDSDGSFFL
YSKLTVDKSRWQQGNVFSCSVMHEALHNHYTQKSLSLSP
GKGGGGSGGGGSEVQLLESGGGLVKPGGSLRLSCAASGF
SFSSYWMSWVRQAPGKGLEWISYISGDSGYTNYADSVKG
RFTISRDDSKNTLYLQMNSLKTEDTAVYYCASHDYGDYG
EYFQHWGQGTLVTVSSGGGGSGGGGSGGGGSGGGGSDIQ
MTQSPSSLSASVGDRVTITCQASQDISNYLNWYQQKPGK
APKLLIYAASSLQSGVPSRFSGSGSGTDFTLTISSLQPE
DFATYYCQQAISFPLTFGQSTKVEIK;
and
b. the third and fourth polypeptides comprise the sequence
MDMRVPAQLLGLLLLWLPGARCQIVLTQSPAIMSASPGE
KVTMTCSASSSVSYMNWYQQKSGTSPKRWIYDTSKLASG
VPAHFRGSGSGTSYSLTISGMEAEDAATYYCQQWSSNPF
TFGSGTKLEINRTVAAPSVFIFPPSDEQLKSGTASVVCL
LNNFYPREAKVQWKVDNALQSGNSQESVTEQDSKDSTYS
LSSTLTLSKADYEKHKVYACEVTHQGLSSPVTKSFNRGEC.

222. The isolated multispecific ABP of claim 71, wherein
a. the first polypeptide comprises the sequence
MGWSCIILFLVATATGVHSEVQLLESGGGLVKPGGSLR
LSCAASGFSFSSYWMSWVRQAPGKGLEWISYISGDSGY
TNYADSVKGRFTISRDDSKNTLYLQMNSLKTEDTAVYY
CASHDYGDYGEYFQHWGQGTLVTVSSGGGGSGGGGSGG
GGSGGGGSDIQMTQSPSSLSASVGDRVTITCQASQDI
SNYLNWYQQKPGKAPKLLIYAASSLQSGVPSRFSGSGS
GTDFTLTISSLQPEDFATYYCQQAISFPLTFGQSTKVE
IKGGGSEPKSSDKTHTCPPCPAPELLGGPSVFLEPPKP
KDTLMISRTPEVTCVVVDVSHEDPEVKFNWYVDGVEVH
NAKTKPREEQYQSTYRVVSVLTVLHQDWLNGKEYKCKVSN
KALPAPIEKTISKAKGQPREPQVYTLPPCREEMTKNQVS
LWCLVKGFYPSDIAVEWESNGQPENNYKTTPPVLDSDG
SFFLYSKLTVDKSRWQQGNVFSCSVMHEALHNHYTQKS
LSLSPGK;
b. the second polypeptide comprises the sequence
MGWSCIILFLVATATGVHSQVQLQQSGAELARPGASVKM
SCKASGYTFTRYTMHWVKQRPGQGLEWIGYINPSRGYTN
YNQKFKDKATLTTDKSSSTAYMQLSSLTSEDSAVYYCAR
YYDDHYSLDYWGQGTTLTVSSASTKGPSVFPLAPSSKST
SGGTAALGCLVKDYFPEPVTVSWNSGALTSGVHTFPAVL
QSSGLYSLSSVVTVPSSSLGTQTYICNVNHKPSNTKVDK
RVEPKSCDKTHTCPPCPAPELLGGPSVFLEPPKPKDTLM
ISRTPEVTCVVVDVSHEDPEVKFNWYVDGVEVHNAKTKP
REEQYQSTYRVVSVLTVLHQDWLNGKEYKCKVSNKALPA
PIEKTISKAKGQPREPQVCTLPPSREEMTKNQVSLSCAV
KGFYPSDIAVEWESNGQPENNYKTTPPVLDSDGSFEL
VSKLTVDKSRWQQGNVFSCSVMHEALHNRFTQKSLSLS
PGK;
and
c. the third polypeptide comprises the sequence
MDMRVPAQLLGLLLLWLPGARCQIVLTQSPAIMSASPGE
KVTMTCSASSSVSYMNWYQQKSGTSPKRWIYDTSKLASG
VPAHFRGSGSGTSYSLTISGMEAEDAATYYCQQWSSNPF
TFGSGTKLEINRTVAAPSVFIFPPSDEQLKSGTASVVCL
LNNFYPREAKVQWKVDNALQSGNSQESVTEQDSKDSTYS
LSSTLTLSKADYEKHKVYACEVTHQGLSSPVTKSFNRGEC.

223. The isolated multispecific ABP of claim 46, wherein
a. the first polypeptide comprises the sequence
MGWSCIILFLVATATGVHSEVQLLESGGGLVKPGGSLRLS
CAASGFSFSSYWMSWVRQAPGKGLEWISYISGDSGYTNYA
DSVKGRFTISRDDSKNTLYLQMNSLKTEDTAVYYCASHDY
GDYGEYFQHWGQGTLVTVSSGGGGSGGGGSGGGGSGGGGS
DIQMTQSPSSLSASVGDRVTITCQASQDISNYLNWYQQKP
GKAPKLLIYAASSLQSGVPSRFSGSGSGTDFTLTISSL
QPEDFATYYCQQAISFPLTFGQSTKVEIKGGGSEPKSSDK
THTCPPCPAPELLGGPSVFLFPPKPKDTLMISRTPEVTCV
VVDVSHEDPEVKFNWYVDGVEVHNAKTKPREEQYQSTYRV
VSVLTVLHQDWLNGKEYKCKVSNKALPAPIEKTISKAKGQ
PREPQVYTLPPCREEMTKNQVSLWCLVKGFYPSDIAVEWE
SNGQPENNYKTTPPVLDSDGSFFLYSKLTVDKSRWQQG
NVFSCSVMHEALHNHYTQKSLSLSPGK;
b. the second polypeptide comprises the sequence
MGWSCIILFLVATATGVHSEVQLLESGGGLVKPGGSLRLS
CAASGESFSSYWMSWVRQAPGKGLEWISYISGDSGYTNYA
DSVKGRFTISRDDSKNTLYLQMNSLKTEDTAVYYCASHDY
GDYGEYFQHWGQGTLVTVSSGGGGSGGGGSGGGGSGGGGS
DIQMTQSPSSLSASVGDRVTITCQASQDISNYLNWYQQKP
GKAPKLLIYAASSLQSGVPSRFSGSGSGTDFTLTISSL
QPEDFATYYCQQAISFPLTFGQSTKVEIKGGGSGGGGSQV
QLQQSGAELARPGASVKMSCKASGYTFTRYTMHWVKQRPG
QGLEWIGYINPSRGYTNYNQKFKDKATLTTDKSSSTAYMQ
LSSLTSEDSAVYYCARYYDDHYSLDYWGQGTTLTVSSAST
KGPSVFPLAPSSKSTSGGTAALGCLVKDYFPEPVTVSWNS
GALTSGVHTFPAVLQSSGLYSLSSVVTVPSSSLGTQTY
ICNVNHKPSNTKVDKRVEPKSCDKTHTCPPCPAPELLGGP
SVFLFPPKPKDTLMISRTPEVTCVVVDVSHEDPEVKFNW
YVDGVEVHNAKTKPREEQYQSTYRVVSVLTVLHQDWLNG
KEYKCKVSNKALPAPIEKTISKAKGQPREPQVCTLPPSR
EEMTKNQVSLSCAVKGFYPSDIAVEWESNGQPENNYKTT
PPVLDSDGSFFLVSKLTVDKSRWQQGNVFSCSVMHEALH
NRFTQKSLSLSPGK;
and
c. the third polypeptide comprises the sequence
MDMRVPAQLLGLLLLWLPGARCQIVLTQSPAIMSASPGEK
VTMTCSASSSVSYMNWYQQKSGTSPKRWIYDTSKLASGVP
AHFRGSGSGTSYSLTISGMEAEDAATYYCQQWSSNPFTFG
SGTKLEINRTVAAPSVFIFPPSDEQLKSGTASVVCLLNNF
YPREAKVQWKVDNALQSGNSQESVTEQDSKDSTYSLSSTL
TLSKADYEKHKVYACEVTHQGLSSPVTKSFNRGEC.

224. The isolated multispecific ABP of claim 92, wherein
a. the first polypeptide comprises the sequence
MGWSCIILFLVATATGVHSGSEPKSSDKTHTCPPCPAPEL
LGGPSVFLFPPKPKDTLMISRTPEVTCVVVDVSHEDPEVK
FNWYVDGVEVHNAKTKPREEQYQSTYRVVSVLTVLHQDWL
NGKEYKCKVSNKALPAPIEKTISKAKGQPREPQVYTLPPC
REEMTKNQVSLWCLVKGFYPSDIAVEWESNGQPENNYKTT
PPVLDSDGSFFLYSKLTVDKSRWQQGNVFSCSVMHEAL
HNHYTQKSLSLSPGK;
b. the second polypeptide comprises the sequence
MGWSCIILFLVATATGVHSEVQLLESGGGLVKPGGSLRLS
CAASGFSFSSYWMSWVRQAPGKGLEWISYISGDSGYTNYA
DSVKGRFTISRDDSKNTLYLQMNSLKTEDTAVYYCASHDY
GDYGEYFQHWGQGTLVTVSSGGGGSGGGGSGGGGSGGGGS
DIQMTQSPSSLSASVGDRVTITCQASQDISNYLNWYQQKP
GKAPKLLIYAASSLQSGVPSRFSGSGSGTDFTLTISSLQP
EDFATYYCQQAISFPLTFGQSTKVEIKGGGSGGGGSQVQL
QQSGAELARPGASVKMSCKASGYTFTRYTMHWVKQRPGQG
LEWIGYINPSRGYTNYNQKFKDKATLTTDKSSSTAYMQLS
SLTSEDSAVYYCARYYDDHYSLDYWGQGTTLTVSSASTKG
PSVFPLAPSSKSTSGGTAALGCLVKDYFPEPVTVSWNSGA
LTSGVHTFPAVLQSSGLYSLSSVVTVPSSSLGTQTYICNV
NHKPSNTKVDKRVEPKSCDKTHTCPPCPAPELLGGPSVFL
FPPKPKDTLMISRTPEVTCVVVDVSHEDPEVKFNWYVDGV
EVHNAKTKPREEQYQSTYRVVSVLTVLHQDWLNGKEYKCK
VSNKALPAPIEKTISKAKGQPREPQVCTLPPSREEMTKNQ
VSLSCAVKGFYPSDIAVEWESNGQPENNYKTTPPVLDSDG
SFFLVSKLTVDKSRWQQGNVFSCSVMHEALHNRFTQKSLS
LSPGK;
and
c. the third polypeptide comprises the sequence
MDMRVPAQLLGLLLLWLPGARCQIVLTQSPAIMSASPGEK
VTMTCSASSSVSYMNWYQQKSGTSPKRWIYDTSKLASGVP
AHFRGSGSGTSYSLTISGMEAEDAATYYCQQWSSNPFTFG
SGTKLEINRTVAAPSVFIFPPSDEQLKSGTASVVCLLNNF
YPREAKVQWKVDNALQSGNSQESVTEQDSKDSTYSLSSTL
TLSKADYEKHKVYACEVTHQGLSSPVTKSFNRGEC.

225. The isolated multispecific ABP of claim 101, wherein
a. the first and second polypeptides comprise the sequence
MGWSCIILFLVATATGVHSEVQLLESGGGLVKPGGSLRLS
CAASGFSFSSYWMSWVRQAPGKGLEWISYISGDSGYTNYA
DSVKGRFTISRDDSKNTLYLQMNSLKTEDTAVYYCASHDY
GDYGEYFQHWGQGTLVTVSSGGGGSGGGGSGGGGSGGGGS
DIQMTQSPSSLSASVGDRVTITCQASQDISNYLNWYQQKP
GKAPKLLIYAASSLQSGVPSRFSGSGSGTDFTLTISSLQP
EDFATYYCQQAISFPLTFGQSTKVEIKGGGGSGGGGSQVQ
LQQSGAELARPGASVKMSCKASGYTFTRYTMHWVKQRPGQ
GLEWIGYINPSRGYTNYNQKFKDKATLTTDKSSSTAYMQL
SSLTSEDSAVYYCARYYDDHYSLDYWGQGTTLTVSSASTK
GPSVFPLAPSSKSTSGGTAALGCLVKDYFPEPVTVSWNSG
ALTSGVHTFPAVLQSSGLYSLSSVVTVPSSSLGTQTYICN
VNHKPSNTKVDKRVEPKSCDKTHTCPPCPAPELLGGPSVF
LFPPKPKDTLMISRTPEVTCVVVDVSHEDPEVKFNWYVDG
VEVHNAKTKPREEQYQSTYRVVSVLTVLHQDWLNGKEYKC
KVSNKALPAPIEKTISKAKGQPREPQVYTLPPSREEMTKN
QVSLTCLVKGFYPSDIAVEWESNGQPENNYKTTPPVLDSD
GSFFLYSKLTVDKSRWQQGNVFSCSVMHEALHNHYTQKSL
SLSPGK;
and
b. the third and fourth polypeptides comprises the sequence
MDMRVPAQLLGLLLLWLPGARCQIVLTQSPAIMSASPGEKVTMTCSAS
SSVSYMNWYQQKSGTSPKRWIYDTSKLASGVPAHFRGSGSGTSYSLTI
SGMEAEDAATYYCQQWSSNPFTFGSGTKLEINRTVAAPSVFIFPPSDE
QLKSGTASVVCLLNNFYPREAKVQWKVDNALQSGNSQESVTEQDSKDS
TYSLSSTLTLSKADYEKHKVYACEVTHQGLSSPVTKSFNRGEC.

226. The isolated multispecific ABP of claim 41, comprising an scFv sequence that is DIQMTQSPSSLSASVGDRVTITCRASQSISSWLAWYQQKPGKAPKLLIYAASTLQSGV PSRFSGSGSGTDFTLTISSLQPEDFATYYCQQSYSIPLTFGGGTKVEIKGGGGSGGGGS GGGGSGGGGSQVQLVQSGAEVKKPGSSVKVSCKASGGTFSNFGVSWLRQAPGQGL EWMGGIIPILGTANYAQKFQGRVTITADESTSTAYMELSSLRSEDTAVYYCATPTNSG YYGPYYYYGMDVWGQGTTVTVSS, a first linker, and a second scFv sequence that is selected from
a.
QVQLVQSGAEVKKPGASVKVSCKASGYTFTRYTMHWVRQ
APGQGLEWMGYINPSRGYTNYNQKFKDRVTLTTDKSSST
AYMELSSLRSEDTAVYYCARYYDDHYSLDYWGQGTLVTV
SSVEGGSGGSGGSGGSGGVDDIQMTQSPSSLSASVGDRV
TITCSASSSVSYMNWYQQKPGKAPKRLIYDTSKLASGVP
SRFSGSGSGTDFTLTISSLQPEDFATYYCQQWSSNPFTF
GQGTKLEIK;
and
b.
EVQLVESGGGLVQPGGSLRLSCAASGFTFSTYAMNWVRQAPGKGLEWVGR
IRSKYNNYATYYADSVKGRFTISRDDSKNTLYLQMNSLRAEDTAVYYCVR
HGNFGDSYVSWFAYWGQGTLVTVSSGKPGSGKPGSGKPGSGKPGSQAVVT
QEPSLTVSPGGTVTLTCGSSTGAVTTSNYANWVQQKPGKSPRGLIGGTNK
RAPGVPARFSGSLLGGKAALTISGAQPEDEADYYCALWYSNHWVFGGGTK
LTVL.

227. The isolated multispecific ABP of claim 226, wherein the linker is GGGGS.

228. The isolated multispecific ABP of claim 78, wherein the VH of the first and second polypeptide chains comprise the sequence QVQLVQSGAEVKKPGASVKVSCKASGYTFTRYTMHWVRQAPGQGLEWMGYINPS RGYTNYNQKFKDRVTLTTDKSSSTAYMELSSLRSEDTAVYYCARYYDDHYSLDYW GQGTLVTVSS, the CH1-CH2-CH3 of the first and second polypeptide chains comprise the sequence ASTKGPSVFPLAPSSKSTSGGTAALGCLVKDYFPEPVTVSWNSGALTSGVHTFPAVL QSSGLYSLSSVVTVPSSSLGTQTYICNVNHKPSNTKVDKRVEPKSCDKTHTCPPCPAP ELLGGPSVFLFPPKPKDTLMISRTPEVTCVVVDVSHEDPEVKFNWYVDGVEVHNAK TKPREEQYQSTYRVVSVLTVLHQDWLNGKEYKCKVSNKALPAPIEKTISKAKGQPR EPQVYTLPPSREEMTKNQVSLTCLVKGFYPSDIAVEWESNGQPENNYKTTPPVLDSD GSFFLYSKLTVDKSRWQQGNVFSCSVMHEALHNHYTQKSLSLSPGK, the scFv of the first and second polypeptide chains comprise the sequence QVQLVQSGAEVKKPGSSVKVSCKASGGTFSNFGVSWLRQAPGQGLEWMGGIIPILG TANYAQKFQGRVTITADESTSTAYMELSSLRSEDTAVYYCATPTNSGYYGPYYYYG MDVWGQGTTVTVSSGGGGSGGGGSGGGGSGGGGSDIQMTQSPSSLSASVGDRVTIT CRASQSISSWLAWYQQKPGKAPKLLIYAASTLQSGVPSRFSGSGSGTDFTLTISSLQPE DFATYYCQQSYSIPLTFGGGTKVEIK, and the VL_CL of the third and fourth polypeptide chains comprise the sequence
DIQMTQSPSSLSASVGDRVTITCSASSSVSYMNWYQQKPGKAPKRLIY
DTSKLASGVPSRFSGSGSGTDFTLTISSLQPEDFATYYCQQWSSNPFT
FGQGTKLEIKRTVAAPSVFIFPPSDEQLKSGTASVVCLLNNFYPREAK
VQWKVDNALQSGNSQESVTEQDSKDSTYSLSSTLTLSKADYEKHKVYA
CEVTHQGLSSPVTKSFNRGEC.

229. The isolated multispecific ABP of claim 78, wherein the VH of the first and second polypeptide chains comprise the sequence EVQLVESGGGLVQPGGSLRLSCAASGFTFSTYAMNWVRQAPGKGLEWVGRIRSKY NNYATYYADSVKGRFTISRDDSKNTLYLQMNSLRAEDTAVYYCVRHGNFGDSYVS WFAYWGQGTLVTVSS, the CH1-CH2-CH3 of the first and second polypeptide chains comprise the sequence ASTKGPSVFPLAPSSKSTSGGTAALGCLVKDYFPEPVTVSWNSGALTSGVHTFPAVL QSSGLYSLSSVVTVPSSSLGTQTYICNVNHKPSNTKVDKRVEPKSCDKTHTCPPCPAP ELLGGPSVFLFPPKPKDTLMISRTPEVTCVVVDVSHEDPEVKFNWYVDGVEVHNAK TKPREEQYQSTYRVVSVLTVLHQDWLNGKEYKCKVSNKALPAPIEKTISKAKGQPR EPQVYTLPPSREEMTKNQVSLTCLVKGFYPSDIAVEWESNGQPENNYKTTPPVLDSD GSFFLYSKLTVDKSRWQQGNVFSCSVMHEALHNHYTQKSLSLSPGK, the scFv of the first and second polypeptide chains comprise the sequence QVQLVQSGAEVKKPGSSVKVSCKASGGTFSNFGVSWLRQAPGQGLEWMGGIIPILG TANYAQKFQGRVTITADESTSTAYMELSSLRSEDTAVYYCATPTNSGYYGPYYYYG MDVWGQGTTVTVSSGGGGSGGGGSGGGGSGGGGSDIQMTQSPSSLSASVGDRVTIT CRASQSISSWLAWYQQKPGKAPKLLIYAASTLQSGVPSRFSGSGSGTDFTLTISSLQPE DFATYYCQQSYSIPLTFGGGTKVEIK, and the VL_CL of the third and fourth polypeptide chains comprise the sequence
QAVVTQEPSLTVSPGGTVTLTCGSSTGAVTTSNYANWVQQKPGKSPRG
LIGGTNKRAPGVPARFSGSLLGGKAALTISGAQPEDEADYYCALWYSN
HWVFGGGTKLTVLRTVAAPSVFIFPPSDEQLKSGTASVVCLLNNFYPR
EAKVQWKVDNALQSGNSQESVTEQDSKDSTYSLSSTLTLSKADYEKHK
VYACEVTHQGLSSPVTKSFNRGEC.

230. The isolated multispecific ABP of any claim 71, wherein the VH of the second polypeptide comprises the sequence QVQLVQSGAEVKKPGASVKVSCKASGYTFTRYTMHWVRQAPGQGLEWMGYINPS RGYTNYNQKFKDRVTLTTDKSSSTAYMELSSLRSEDTAVYYCARYYDDHYSLDYW GQGTLVTVSS, the CH1-CH2-CH3 of the second polypeptide comprises the sequence ASTKGPSVFPLAPSSKSTSGGTAALGCLVKDYFPEPVTVSWNSGALTSGVHTFPAVL QSSGLYSLSSVVTVPSSSLGTQTYICNVNHKPSNTKVDKRVEPKSCDKTHTCPPCPAP ELLGGPSVFLFPPKPKDTLMISRTPEVTCVVVDVSHEDPEVKFNWYVDGVEVHNAK TKPREEQYQSTYRVVSVLTVLHQDWLNGKEYKCKVSNKALPAPIEKTISKAKGQPR EPQVCTLPPSREEMTKNQVSLSCAVKGFYPSDIAVEWESNGQPENNYKTTPPVLDSD GSFFLVSKLTVDKSRWQQGNVFSCSVMHEALHNRFTQKSLSLSPGK, the scFv of the first polypeptide comprises the sequence QVQLVQSGAEVKKPGSSVKVSCKASGGTFSNFGVSWLRQAPGQGLEWMGGIIPILG TANYAQKFQGRVTITADESTSTAYMELSSLRSEDTAVYYCATPTNSGYYGPYYYYG MDVWGQGTTVTVSSGGGGSGGGGSGGGGSGGGGSDIQMTQSPSSLSASVGDRVTIT CRASQSISSWLAWYQQKPGKAPKLLIYAASTLQSGVPSRFSGSGSGTDFTLTISSLQPE DFATYYCQQSYSIPLTFGGGTKVEIK, the linker_CH2_CH3 of the first polypeptide comprises the sequence GGGGSEPKSSDKTHTCPPCPAPELLGGPSVFLFPPKPKDTLMISRTPEVTCVVVDVSH EDPEVKFNWYVDGVEVHNAKTKPREEQYQSTYRVVSVLTVLHQDWLNGKEYKCK VSNKALPAPIEKTISKAKGQPREPQVYTLPPCREEMTKNQVSLWCLVKGFYPSDIAVE WESNGQPENNYKTTPPVLDSDGSFFLYSKLTVDKSRWQQGNVFSCSVMHEALHNH YTQKSLSLSPGK and the third polypeptide comprises the sequence
DIQMTQSPSSLSASVGDRVTITCSASSSVSYMNWYQQKPGKAPKRLIY
DTSKLASGVPSRFSGSGSGTDFTLTISSLQPEDFATYYCQQWSSNPFT
FGQGTKLEIKRTVAAPSVFIFPPSDEQLKSGTASVVCLLNNFYPREAK
VQWKVDNALQSGNSQESVTEQDSKDSTYSLSSTLTLSKADYEKHKVYA
CEVTHQGLSSPVTKSFNRGEC.

231. The isolated multispecific ABP of claim 71, wherein the VH of the second polypeptide comprises the sequence EVQLVESGGGLVQPGGSLRLSCAASGFTFSTYAMNWVRQAPGKGLEWVGRIRSKY NNYATYYADSVKGRFTISRDDSKNTLYLQMNSLRAEDTAVYYCVRHGNFGDSYVS WFAYWGQGTLVTVSS, the CH1-CH2-CH3 of the second polypeptide comprises the sequence ASTKGPSVFPLAPSSKSTSGGTAALGCLVKDYFPEPVTVSWNSGALTSGVHTFPAVL QSSGLYSLSSVVTVPSSSLGTQTYICNVNHKPSNTKVDKRVEPKSCDKTHTCPPCPAP ELLGGPSVFLFPPKPKDTLMISRTPEVTCVVVDVSHEDPEVKFNWYVDGVEVHNAK TKPREEQYQSTYRVVSVLTVLHQDWLNGKEYKCKVSNKALPAPIEKTISKAKGQPR EPQVCTLPPSREEMTKNQVSLSCAVKGFYPSDIAVEWESNGQPENNYKTTPPVLDSD GSFFLVSKLTVDKSRWQQGNVFSCSVMHEALHNRFTQKSLSLSPGK, the scFv of the first polypeptide comprises the sequence QVQLVQSGAEVKKPGSSVKVSCKASGGTFSNFGVSWLRQAPGQGLEWMGGIIPILG TANYAQKFQGRVTITADESTSTAYMELSSLRSEDTAVYYCATPTNSGYYGPYYYYG MDVWGQGTTVTVSSGGGGSGGGGSGGGGSGGGGSDIQMTQSPSSLSASVGDRVTIT CRASQSISSWLAWYQQKPGKAPKLLIYAASTLQSGVPSRFSGSGSGTDFTLTISSLQPE DFATYYCQQSYSIPLTFGGGTKVEIK, the linker_CH2_CH3 of the first polypeptide comprises the sequence GGGGSEPKSSDKTHTCPPCPAPELLGGPSVFLFPPKPKDTLMISRTPEVTCVVVDVSH EDPEVKFNWYVDGVEVHNAKTKPREEQYQSTYRVVSVLTVLHQDWLNGKEYKCK VSNKALPAPIEKTISKAKGQPREPQVYTLPPCREEMTKNQVSLWCLVKGFYPSDIAVE WESNGQPENNYKTTPPVLDSDGSFFLYSKLTVDKSRWQQGNVFSCSVMHEALHNH YTQKSLSLSPGK, and the third polypeptide comprises the sequence
QAVVTQEPSLTVSPGGTVTLTCGSSTGAVTTSNYANWVQQKPGKSPRG
LIGGTNKRAPGVPARFSGSLLGGKAALTISGAQPEDEADYYCALWYSN
HWVFGGGTKLTVLRTVAAPSVFIFPPSDEQLKSGTASVVCLLNNFYPR
EAKVQWKVDNALQSGNSQESVTEQDSKDSTYSLSSTLTLSKADYEKHK
VYACEVTHQGLSSPVTKSFNRGEC.

232. The isolated multispecific ABP of claim 46, wherein the first and second scFv comprises the sequence QVQLVQSGAEVKKPGSSVKVSCKASGGTFSNFGVSWLRQAPGQGLEWMGGIIPILG TANYAQKFQGRVTITADESTSTAYMELSSLRSEDTAVYYCATPTNSGYYGPYYYYG MDVWGQGTTVTVSSGGGGSGGGGSGGGGSGGGGSDIQMTQSPSSLSASVGDRVTIT CRASQSISSWLAWYQQKPGKAPKLLIYAASTLQSGVPSRFSGSGSGTDFTLTISSLQPE DFATYYCQQSYSIPLTFGGGTKVEIK, the linker_CH2_CH3 of the first polypeptide comprises the sequence GGGGSEPKSSDKTHTCPPCPAPELLGGPSVFLFPPKPKDTLMISRTPEVTCVVVDVSH EDPEVKFNWYVDGVEVHNAKTKPREEQYQSTYRVVSVLTVLHQDWLNGKEYKCK VSNKALPAPIEKTISKAKGQPREPQVYTLPPCREEMTKNQVSLWCLVKGFYPSDIAVE WESNGQPENNYKTTPPVLDSDGSFFLYSKLTVDKSRWQQGNVFSCSVMHEALHNH YTQKSLSLSPGK, VH comprises the sequence QVQLVQSGAEVKKPGASVKVSCKASGYTFTRYTMHWVRQAPGQGLEWMGYINPS RGYTNYNQKFKDRVTLTTDKSSSTAYMELSSLRSEDTAVYYCARYYDDHYSLDYW GQGTLVTVSS, CH1-CH2-CH3 of the second polypeptide comprises the sequence ASTKGPSVFPLAPSSKSTSGGTAALGCLVKDYFPEPVTVSWNSGALTSGVHTFPAVL QSSGLYSLSSVVTVPSSSLGTQTYICNVNHKPSNTKVDKRVEPKSCDKTHTCPPCPAP ELLGGPSVFLFPPKPKDTLMISRTPEVTCVVVDVSHEDPEVKFNWYVDGVEVHNAK TKPREEQYQSTYRVVSVLTVLHQDWLNGKEYKCKVSNKALPAPIEKTISKAKGQPR EPQVCTLPPSREEMTKNQVSLSCAVKGFYPSDIAVEWESNGQPENNYKTTPPVLDSD GSFFLVSKLTVDKSRWQQGNVFSCSVMHEALHNRFTQKSLSLSPGK, and the third polypeptide comprises the sequence
DIQMTQSPSSLSASVGDRVTITCSASSSVSYMNWYQQKPGKAPKRLIY
DTSKLASGVPSRFSGSGSGTDFTLTISSLQPEDFATYYCQQWSSNPFT
FGQGTKLEIKRTVAAPSVFIFPPSDEQLKSGTASVVCLLNNFYPREAK
VQWKVDNALQSGNSQESVTEQDSKDSTYSLSSTLTLSKADYEKHKVYA
CEVTHQGLSSPVTKSFNRGEC.

233. The isolated multispecific ABP of claim 46, wherein the first and second scFv comprises the sequence QVQLVQSGAEVKKPGSSVKVSCKASGGTFSNFGVSWLRQAPGQGLEWMGGIIPILG TANYAQKFQGRVTITADESTSTAYMELSSLRSEDTAVYYCATPTNSGYYGPYYYYG MDVWGQGTTVTVSSGGGGSGGGGSGGGGSGGGGSDIQMTQSPSSLSASVGDRVTIT CRASQSISSWLAWYQQKPGKAPKLLIYAASTLQSGVPSRFSGSGSGTDFTLTISSLQPE DFATYYCQQSYSIPLTFGGGTKVEIK, the linker_CH2_CH3 of the first polypeptide comprises the sequence GGGGSEPKSSDKTHTCPPCPAPELLGGPSVFLFPPKPKDTLMISRTPEVTCVVVDVSH EDPEVKFNWYVDGVEVHNAKTKPREEQYQSTYRVVSVLTVLHQDWLNGKEYKCK VSNKALPAPIEKTISKAKGQPREPQVYTLPPCREEMTKNQVSLWCLVKGFYPSDIAVE WESNGQPENNYKTTPPVLDSDGSFFLYSKLTVDKSRWQQGNVFSCSVMHEALHNH YTQKSLSLSPGK, VH comprises the sequence EVQLVESGGGLVQPGGSLRLSCAASGFTFSTYAMNWVRQAPGKGLEWVGRIRSKY NNYATYYADSVKGRFTISRDDSKNTLYLQMNSLRAEDTAVYYCVRHGNFGDSYVS WFAYWGQGTLVTVSS, CH1-CH2-CH3 of the second polypeptide comprises the sequence ASTKGPSVFPLAPSSKSTSGGTAALGCLVKDYFPEPVTVSWNSGALTSGVHTFPAVL QSSGLYSLSSVVTVPSSSLGTQTYICNVNHKPSNTKVDKRVEPKSCDKTHTCPPCPAP ELLGGPSVFLFPPKPKDTLMISRTPEVTCVVVDVSHEDPEVKFNWYVDGVEVHNAK TKPREEQYQSTYRVVSVLTVLHQDWLNGKEYKCKVSNKALPAPIEKTISKAKGQPR EPQVCTLPPSREEMTKNQVSLSCAVKGFYPSDIAVEWESNGQPENNYKTTPPVLDSD GSFFLVSKLTVDKSRWQQGNVFSCSVMHEALHNRFTQKSLSLSPGK, and the third polypeptide comprises the sequence
QAVVTQEPSLTVSPGGTVTLTCGSSTGAVTTSNYANWVQQKPGKSPRG
LIGGTNKRAPGVPARFSGSLLGGKAALTISGAQPEDEADYYCALWYSN
HWVFGGGTKLTVLRTVAAPSVFIFPPSDEQLKSGTASVVCLLNNFYPR
EAKVQWKVDNALQSGNSQESVTEQDSKDSTYSLSSTLTLSKADYEKHK
VYACEVTHQGLSSPVTKSFNRGEC.

234. The isolated multispecific ABP of claim 92, wherein the hinge-CH2-CH3 of the first polypeptide comprises the sequence GSEPKSSDKTHTCPPCPAPELLGGPSVFLFPPKPKDTLMISRTPEVTCVVVDVSHEDPE VKFNWYVDGVEVHNAKTKPREEQYQSTYRVVSVLTVLHQDWLNGKEYKCKVSNK ALPAPIEKTISKAKGQPREPQVYTLPPCREEMTKNQVSLWCLVKGFYPSDIAVEWES NGQPENNYKTTPPVLDSDGSFFLYSKLTVDKSRWQQGNVFSCSVMHEALHNHYTQ KSLSLSPGK, the VH of the second polypeptide comprises the sequence QVQLVQSGAEVKKPGASVKVSCKASGYTFTRYTMHWVRQAPGQGLEWMGYINPS RGYTNYNQKFKDRVTLTTDKSSSTAYMELSSLRSEDTAVYYCARYYDDHYSLDYW GQGTLVTVSS, the CH1-CH2-CH3 of the second polypeptide comprises the sequence ASTKGPSVFPLAPSSKSTSGGTAALGCLVKDYFPEPVTVSWNSGALTSGVHTFPAVL QSSGLYSLSSVVTVPSSSLGTQTYICNVNHKPSNTKVDKRVEPKSCDKTHTCPPCPAP ELLGGPSVFLFPPKPKDTLMISRTPEVTCVVVDVSHEDPEVKFNWYVDGVEVHNAK TKPREEQYQSTYRVVSVLTVLHQDWLNGKEYKCKVSNKALPAPIEKTISKAKGQPR EPQVCTLPPSREEMTKNQVSLSCAVKGFYPSDIAVEWESNGQPENNYKTTPPVLDSD GSFFLVSKLTVDKSRWQQGNVFSCSVMHEALHNRFTQKSLSLSPGK, wherein the third polypeptide comprises the sequence DIQMTQSPSSLSASVGDRVTITCSASSSVSYMNWYQQKPGKAPKRLIYDTSKLASGV PSRFSGSGSGTDFTLTISSLQPEDFATYYCQQWSSNPFTFGQGTKLEIKRTVAAPSVFIF PPSDEQLKSGTASVVCLLNNFYPREAKVQWKVDNALQSGNSQESVTEQDSKDSTYS LSSTLTLSKADYEKHKVYACEVTHQGLSSPVTKSFNRGEC, and the scFv comprises the sequence
QVQLVQSGAEVKKPGSSVKVSCKASGGTFSNFGVSWLRQAPGQGLEWM
GGIIPILGTANYAQKFQGRVTITADESTSTAYMELSSLRSEDTAVYYC
ATPTNSGYYGPYYYYGMDVWGQGTTVTVSSGGGGSGGGGSGGGGSGGG
GSDIQMTQSPSSLSASVGDRVTITCRASQSISSWLAWYQQKPGKAPKL
LIYAASTLQSGVPSRFSGSGSGTDFTLTISSLQPEDFATYYCQQSYSI
PLTFGGGTKVEIK.

235. The isolated multispecific ABP of claim 92, wherein the hinge-CH2-CH3 of the first polypeptide comprises the sequence GSEPKSSDKTHTCPPCPAPELLGGPSVFLFPPKPKDTLMISRTPEVTCVVVDVSHEDPE VKFNWYVDGVEVHNAKTKPREEQYQSTYRVVSVLTVLHQDWLNGKEYKCKVSNK ALPAPIEKTISKAKGQPREPQVYTLPPCREEMTKNQVSLWCLVKGFYPSDIAVEWES NGQPENNYKTTPPVLDSDGSFFLYSKLTVDKSRWQQGNVFSCSVMHEALHNHYTQ KSLSLSPGK, the VH of the second polypeptide comprises the sequence EVQLVESGGGLVQPGGSLRLSCAASGFTFSTYAMNWVRQAPGKGLEWVGRIRSKY NNYATYYADSVKGRFTISRDDSKNTLYLQMNSLRAEDTAVYYCVRHGNFGDSYVS WFAYWGQGTLVTVSS, the CH1-CH2-CH3 of the second polypeptide comprises the sequence ASTKGPSVFPLAPSSKSTSGGTAALGCLVKDYFPEPVTVSWNSGALTSGVHTFPAVL QSSGLYSLSSVVTVPSSSLGTQTYICNVNHKPSNTKVDKRVEPKSCDKTHTCPPCPAP ELLGGPSVFLFPPKPKDTLMISRTPEVTCVVVDVSHEDPEVKFNWYVDGVEVHNAK TKPREEQYQSTYRVVSVLTVLHQDWLNGKEYKCKVSNKALPAPIEKTISKAKGQPR EPQVCTLPPSREEMTKNQVSLSCAVKGFYPSDIAVEWESNGQPENNYKTTPPVLDSD GSFFLVSKLTVDKSRWQQGNVFSCSVMHEALHNRFTQKSLSLSPGK, wherein the third polypeptide comprises the sequence QAVVTQEPSLTVSPGGTVTLTCGSSTGAVTTSNYANWVQQKPGKSPRGLIGGTNKR APGVPARFSGSLLGGKAALTISGAQPEDEADYYCALWYSNHWVFGGGTKLTVLRTV AAPSVFIFPPSDEQLKSGTASVVCLLNNFYPREAKVQWKVDNALQSGNSQESVTEQD SKDSTYSLSSTLTLSKADYEKHKVYACEVTHQGLSSPVTKSFNRGEC, and the scFv comprises the sequence
QVQLVQSGAEVKKPGSSVKVSCKASGGTFSNFGVSWLRQAPGQGLEWM
GGIIPILGTANYAQKFQGRVTITADESTSTAYMELSSLRSEDTAVYYC
ATPTNSGYYGPYYYYGMDVWGQGTTVTVSSGGGGSGGGGSGGGGSGGG
GSDIQMTQSPSSLSASVGDRVTITCRASQSISSWLAWYQQKPGKAPKL
LIYAASTLQSGVPSRFSGSGSGTDFTLTISSLQPEDFATYYCQQSYSI
PLTFGGGTKVEIK.

236. The isolated multispecific ABP of claim 101, wherein the first and second scFv comprise the sequence QVQLVQSGAEVKKPGSSVKVSCKASGGTFSNFGVSWLRQAPGQGLEWMGGIIPILG TANYAQKFQGRVTITADESTSTAYMELSSLRSEDTAVYYCATPTNSGYYGPYYYYG MDVWGQGTTVTVSSGGGGSGGGGSGGGGSGGGGSDIQMTQSPSSLSASVGDRVTIT CRASQSISSWLAWYQQKPGKAPKLLIYAASTLQSGVPSRFSGSGSGTDFTLTISSLQPE DFATYYCQQSYSIPLTFGGGTKVEIK, wherein the VH of the first and second polypeptides comprises the sequence QVQLVQSGAEVKKPGASVKVSCKASGYTFTRYTMHWVRQAPGQGLEWMGYINPS RGYTNYNQKFKDRVTLTTDKSSSTAYMELSSLRSEDTAVYYCARYYDDHYSLDYW GQGTLVTVSS, wherein the CH1-CH2-CH3 of the first and second polypeptides comprise the sequence ASTKGPSVFPLAPSSKSTSGGTAALGCLVKDYFPEPVTVSWNSGALTSGVHTFPAVL QSSGLYSLSSVVTVPSSSLGTQTYICNVNHKPSNTKVDKRVEPKSCDKTHTCPPCPAP ELLGGPSVFLFPPKPKDTLMISRTPEVTCVVVDVSHEDPEVKFNWYVDGVEVHNAK TKPREEQYQSTYRVVSVLTVLHQDWLNGKEYKCKVSNKALPAPIEKTISKAKGQPR EPQVYTLPPSREEMTKNQVSLTCLVKGFYPSDIAVEWESNGQPENNYKTTPPVLDSD GSFFLYSKLTVDKSRWQQGNVFSCSVMHEALHNHYTQKSLSLSPGK, wherein the VL-CL of the third and fourth polypeptides comprise the sequence DIQMTQSPSSLSASVGDRVTITCSASSSVSYMNWYQQKPGKAPKRLIYDTSKLASGV PSRFSGSGSGTDFTLTISSLQPEDFATYYCQQWSSNPFTFGQGTKLEIKRTVAAPSVFIF PPSDEQLKSGTASVVCLLNNFYPREAKVQWKVDNALQSGNSQESVTEQDSKDSTYS LSSTLTLSKADYEKHKVYACEVTHQGLSSPVTKSFNRGEC, and wherein the first and second scFvs are optionally attached to the N-terminus of the first and second polypeptides by a linker comprising the sequence GGGGSGGGGS.

237. The isolated multispecific ABP of claim 101, wherein the first and second scFv comprise the sequence QVQLVQSGAEVKKPGSSVKVSCKASGGTFSNFGVSWLRQAPGQGLEWMGGIIPILG TANYAQKFQGRVTITADESTSTAYMELSSLRSEDTAVYYCATPTNSGYYGPYYYYG MDVWGQGTTVTVSSGGGGSGGGGSGGGGSGGGGSDIQMTQSPSSLSASVGDRVTIT CRASQSISSWLAWYQQKPGKAPKLLIYAASTLQSGVPSRFSGSGSGTDFTLTISSLQPE DFATYYCQQSYSIPLTFGGGTKVEIK, wherein the VH of the first and second polypeptides comprises the sequence EVQLVESGGGLVQPGGSLRLSCAASGFTFSTYAMNWVRQAPGKGLEWVGRIRSKY NNYATYYADSVKGRFTISRDDSKNTLYLQMNSLRAEDTAVYYCVRHGNFGDSYVS WFAYWGQGTLVTVSS, wherein the CH1-CH2-CH3 of the first and second polypeptides comprise the sequence ASTKGPSVFPLAPSSKSTSGGTAALGCLVKDYFPEPVTVSWNSGALTSGVHTFPAVL QSSGLYSLSSVVTVPSSSLGTQTYICNVNHKPSNTKVDKRVEPKSCDKTHTCPPCPAP ELLGGPSVFLFPPKPKDTLMISRTPEVTCVVVDVSHEDPEVKFNWYVDGVEVHNAK TKPREEQYQSTYRVVSVLTVLHQDWLNGKEYKCKVSNKALPAPIEKTISKAKGQPR EPQVYTLPPSREEMTKNQVSLTCLVKGFYPSDIAVEWESNGQPENNYKTTPPVLDSD GSFFLYSKLTVDKSRWQQGNVFSCSVMHEALHNHYTQKSLSLSPGK, wherein the VL-CL of the third and fourth polypeptides comprise the sequence QAVVTQEPSLTVSPGGTVTLTCGSSTGAVTTSNYANWVQQKPGKSPRGLIGGTNKR APGVPARFSGSLLGGKAALTISGAQPEDEADYYCALWYSNHWVFGGGTKLTVLRTV AAPSVFIFPPSDEQLKSGTASVVCLLNNFYPREAKVQWKVDNALQSGNSQESVTEQD SKDSTYSLSSTLTLSKADYEKHKVYACEVTHQGLSSPVTKSFNRGEC, and wherein the first and second scFvs are optionally attached to the N-terminus of the first and second polypeptides by a linker comprising the sequence GGGGSGGGGS.

238. The isolated multispecific ABP of any one of claims 1-168, wherein the HLA Class I molecule is HLA subtype A*02:01 and the HLA-restricted peptide comprises the sequence AIFPGAVPAA.

239. The isolated multispecific ABP of claim 238, wherein the HLA Class I molecule is HLA subtype A*02:01 and the HLA-restricted peptide consists of the sequence AIFPGAVPAA.

240. The isolated multispecific ABP of claim 238 or 239, wherein the ABP comprises a CDR-H3 comprising a sequence selected from: CARDDYGDYVAYFQHW, CARDLSYYYGMDVW, CARVYDFWSVLSGFDIW, CARVEQGYDIYYYYYMDVW, CARSYDYGDYLNFDYW, CARASGSGYYYYYGMDVW, CAASTWIQPFDYW, CASNGNYYGSGSYYNYW, CARAVYYDFWSGPFDYW, CAKGGIYYGSGSYPSW, CARGLYYMDVW, CARGLYGDYFLYYGMDVW, CARGLLGFGEFLTYGMDVW, CARDRDSSWTYYYYGMDVW, CARGLYGDYFLYYGMDVW, CARGDYYDSSGYYFPVYFDYW, and CAKDPFWSGHYYYYGMDVW.

241. The isolated multispecific ABP of any one of claims 238-240, wherein the ABP comprises a CDR-L3 comprising a sequence selected from: CQQNYNSVTF, CQQSYNTPWTF, CGQSYSTPPTF, CQQSYSAPYTF, CQQSYSIPPTF, CQQSYSAPYTF, CQQHNSYPPTF, CQQYSTYPITI, CQQANSFPWTF, CQQSHSTPQTF, CQQSYSTPLTF, CQQSYSTPLTF, CQQTYSTPWTF, CQQYGSSPYTF, CQQSHSTPLTF, CQQANGFPLTF, and CQQSYSTPLTF.

242. The isolated multispecific ABP of any one of claims 238-241, wherein the ABP comprises the CDR-H3 and the CDR-L3 from the scFv designated G8(2C10), G8(1A03), G8(1A04), G8(1A06), G8(1B03), G8(1C11), G8(1D02), G8(1H08), G8(2B05), G8(2E06), G8(2E04), G8(4F05), G8(5C03), G8(5F02), G8(5G08), G8(1C01), or G8(2C11).

243. The isolated multispecific ABP of any one of claims 238-242, wherein the ABP comprises all three heavy chain CDRs and all three light chain CDRs from the scFv designated G8(2C10), G8(1A03), G8(1A04), G8(1A06), G8(1B03), G8(1C11), G8(1D02), G8(1H08), G8(2B05), G8(2E06), G8(2E04), G8(4F05), G8(5C03), G8(5F02), G8(5G08), G8(1C01), or G8(2C11).

244. The isolated multispecific ABP of any one of claims 238-243, wherein the ABP comprises a VH sequence selected from:
QVQLVQSGAEVKKPGASVKVSCKASGGTFSRSAITWVRQAPGQGLEWM
GWINPNSGATNYAQKFQGRVTMTRDTSTSTVYMELSSLRSEDTAVYYC
ARDDYGDYVAYFQHWGQGTLVTVSS,
QVQLVQSGAEVKKPGASVKVSCKASGYPFIGQYLHWVRQAPGQGLEWM
GIINPSGDSATYAQKFQGRVTMTRDTSTSTVYMELSSLRSEDTAVYYC
ARDLSYYYGMDVWGQGTTVTVSS,
QVQLVQSGAEVKKPGASVKVSCKASGYTFTNYYMHWVRQAPGQGLEWM
GWMNPIGGGTGYAQKFQGRVTMTRDTSTSTVYMELSSLRSEDTAVYYC
ARVYDFWSVLSGFDIWGQGTLVTVSS,
EVQLLESGGGLVQPGGSLRLSCAASGFTFSDYYMSWVRQAPGKGLEWV
SGINWNGGSTGYADSVKGRFTISRDNSKNTLYLQMNSLRAEDTAVYYC
ARVEQGYDIYYYYYMDVWGKGTTVTVSS,
QVQLVQSGAEVKKPGASVKVSCKASGGTLSSYPINWVRQAPGQGLEWM
GWISTYSGHADYAQKLQGRVTMTRDTSTSTVYMELSSLRSEDTAVYYC
ARSYDYGDYLNFDYWGQGTLVTVSS,
EVQLLESGGGLVQPGGSLRLSCAASGFTFSSYWMSWVRQAPGKGLEWV
SSISGRGDNTYYADSVKGRFTISRDNSKNTLYLQMNSLRAEDTAVYYC
ARASGSGYYYYYGMDVWGQGTTVTVSS,
QVQLVQSGAEVKKPGASVKVSCKASGYTFGNYFMHWVRQAPGQGLEWM
GMVNPSGGSETFAQKFQGRVTMTRDTSTSTVYMELSSLRSEDTAVYYC
AASTWIQPFDYWGQGTLVTVSS,
EVQLLESGGGLVQPGGSLRLSCAASGFDFSIYSMNWVRQAPGKGLEWV
SAISGSGGSTYYADSVKGRFTISRDNSKNTLYLQMNSLRAEDTAVYYC
ASNGNYYGSGSYYNYWGQGTLVTVSS,
QVQLVQSGAEVKKPGASVKVSCKASGYTLTTYYMHWVRQAPGQGLEWM
GWINPNSGGTNYAQKFQGRVTMTRDTSTSTVYMELSSLRSEDTAVYYC
ARAVYYDFWSGPFDYWGQGTLVTVSS,
QVQLVQSGAEVKKPGASVKVSCKASGYTFTSYYMHWVRQAPGQGLEWM
GWINPYSGGTNYAQKFQGRVTMTRDTSTSTVYMELSSLRSEDTAVYYC
AKGGIYYGSGSYPSWGQGTLVTVSS,
QVQLVQSGAEVKKPGSSVKVSCKASGGTFSSYGVSWVRQAPGQGLEWM
GWISPYSGNTDYAQKFQGRVTITADESTSTAYMELSSLRSEDTAVYYC
ARGLYYMDVWGKGTTVTVSS,
QVQLVQSGAEVKKPGASVKVSCKASGYTFSNMYLHWVRQAPGQGLEWM
GWINPNTGDTNYAQTFQGRVTMTRDTSTSTVYMELSSLRSEDTAVYYC
ARGLYGDYFLYYGMDVWGQGTKVTVSS,
QVQLVQSGAEVKKPGASVKVSCKASGYTFTSYYMHWVRQAPGQGLEWM
GWMNPNSGNTGYAQKFQGRVTMTRDTSTSTVYMELSSLRSEDTAVYYC
ARGLLGFGEFLTYGMDVWGQGTLVTVSS,
QVQLVQSGAEVKKPGASVKVSCKASGYTFTGYYIHWVRQAPGQGLEWM
GVINPSGGSTTYAQKLQGRVTMTRDTSTSTVYMELSSLRSEDTAVYYC
ARDRDSSWTYYYYGMDVWGQGTTVTVSS,
QVQLVQSGAEVKKPGASVKVSCKASGYTFTSNYMHWVRQAPGQGLEWM
GWMNPNSGNTGYAQKFQGRVTMTRDTSTSTVYMELSSLRSEDTAVYYC
ARGLYGDYFLYYGMDVWGQGTTVTVSS,
QVQLVQSGAEVKKPGASVKVSCKASGGTFSSHAISWVRQAPGQGLEWM
GVIIPSGGTSYTQKFQGRVTMTRDTSTSTVYMELSSLRSEDTAVYYCA
RGDYYDSSGYYFPVYFDYWGQGTLVTVSS,
and
QVQLVQSGAEVKKPGASVKVSCKASGYTFTSYAMNWVRQAPGQGLEWM
GWINPNSGGTNYAQKFQGRVTMTRDTSTSTVYMELSSLRSEDTAVYYC
ARDPFWSGHYYYYGMDVWGQGTTVTVSS.

245. The isolated multispecific ABP of any one of claims 238-244, wherein the ABP comprises a VL sequence selected from:
DIQMTQSPSSLSASVGDRVTITCRASQSITSYLNWYQQKPGKAPKWYD
ASNLETGVPSRFSGSGSGTDFTLTISSLQPEDFATYYCQQNYNSVTFG
QGTKLEIK,
DIQMTQSPSSLSASVGDRVTITCWASQGISSYLAWYQQKPGKAPKLLI
YAASSLQSGVPSRFSGSGSGTDFTLTISSLQPEDFATYYCQQSYNTPW
TFGPGTKVDIK,
DIQMTQSPSSLSASVGDRVTITCRASQAISNSLAWYQQKPGKAPKLLI
YAASTLQSGVPSRFSGSGSGTDFTLTISSLQPEDFATYYCGQSYSTPP
TFGQGTKLEIK,
DIQMTQSPSSLSASVGDRVTITCRASQSISSYLNWYQQKPGKAPKWYK
ASSLESGVPSRFSGSGSGTDFTLTISSLQPEDFATYYCQQSYSAPYTF
GPGTKVDIK,
DIQMTQSPSSLSASVGDRVTITCQASQDISNYLNWYQQKPGKAPKLLI
YAASSLQSGVPSRFSGSGSGTDFTLTISSLQPEDFATYYCQQSYSIPP
TFGGGTKVDIK,
DIQMTQSPSSLSASVGDRVTITCQASQDISNYLNWYQQKPGKAPKLLI
YAASSLQSGVPSRFSGSGSGTDFTLTISSLQPEDFATYYCQQSYSAPY
TFGGGTKVEIK,
DIQMTQSPSSLSASVGDRVTITCRASQGINSYLAWYQQKPGKAPKWYD
ASNLETGVPSRFSGSGSGTDFTLTISSLQPEDFATYYCQQHNSYPPTF
GQGTKLEIK,
DIQMTQSPSSLSASVGDRVTITCRASQSISRWLAWYQQKPGKAPKLLI
YAASSLQSGVPSRFSGSGSGTDFTLTISSLQPEDFATYYCQQYSTYPI
TIGQGTKVEIK,
DIQMTQSPSSLSASVGDRVTITCRASQGISNSLAWYQQKPGKAPKLLI
YAASSLQSGVPSRFSGSGSGTDFTLTISSLQPEDFATYYCQQANSFPW
TFGQGTKLEIK,
DIQMTQSPSSLSASVGDRVTITCRASQDVSTWLAWYQQKPGKAPKLLI
YAASSLQSGVPSRFSGSGSGTDFTLTISSLQPEDFATYYCQQSHSTPQ
TFGQGTKVEIK,
DIQMTQSPSSLSASVGDRVTITCRASQSISSWLAWYQQKPGKAPKLLI
YDASNLETGVPSRFSGSGSGTDFTLTISSLQPEDFATYYCQQSYSTPL
TFGGGTKLEIK,
DIQMTQSPSSLSASVGDRVTITCRASQGISNYLAWYQQKPGKAPKLLI
YAASTLQSGVPSRFSGSGSGTDFTLTISSLQPEDFATYYCQQSYSTPL
TFGGGTKVEIK,
DIQMTQSPSSLSASVGDRVTITCRASQGISNWLAWYQQKPGKAPKLLI
YAASTLQSGVPSRFSGSGSGTDFTLTISSLQPEDFATYYCQQTYSTPW
TFGQGTKLEIK,
EIVMTQSPATLSVSPGERATLSCRASQSVGNSLAWYQQKPGQAPRLLI
YGASTRATGIPARFSGSGSGTEFTLTISSLQSEDFAVYYCQQYGSSPY
TFGQGTKVEIK,
DIQMTQSPSSLSASVGDRVTITCRASQSISGYLNWYQQKPGKAPKLLI
YAASSLQSGVPSRFSGSGSGTDFTLTISSLQPEDFATYYCQQSHSTPL
TFGQGTKVEIK,
DIQMTQSPSSLSASVGDRVTITCRASQNIYTYLNWYQQKPGKAPKWYD
ASNLETGVPSRFSGSGSGTDFTLTISSLQPEDFATYYCQQANGFPLTF
GGGTKVEIK,
and
[sequence omitted]

246. The isolated multispecific ABP of any one of claims 238-245, wherein the ABP comprises the VH sequence and VL sequence from the scFv designated G8(2C10), G8(1A03), G8(1A04), G8(1A06), G8(1B03), G8(1C11), G8(1D02), G8(1H08), G8(2B05), G8(2E06), G8(2E04), G8(4F05), G8(5C03), G8(5F02), G8(5G08), G8(1C01), or G8(2C11).

247. The isolated multispecific ABP of any one of claims 238-246, wherein the ABP binds to any one or more of amino acid positions 1-6 of the restricted peptide AIFPGAVPAA.

248. The isolated multispecific ABP of claim 247, wherein the ABP binds to any one or more of amino acid positions 1-5 of the restricted peptide AIFPGAVPAA.

249. The isolated multispecific ABP of claim 248, wherein the ABP binds to one or both of amino acid positions 4 and 5 of the restricted peptide AIFPGAVPAA.

250. The isolated multispecific ABP of claim 247, wherein the ABP binds to amino acid position 6 of the restricted peptide AIFPGAVPAA.

251. The isolated multispecific ABP of any one of claims 238-250, wherein the ABP binds to any one or more of amino acid positions 45-60 of HLA subtype A*02:01.

252. The isolated multispecific ABP of any one of claims 238-251, wherein the ABP binds to any one or more of amino acid positions 45-60, 66, 67, and 73 of the α1 helix of HLA subtype A*02:01.

253. The isolated multispecific ABP of any one of claims 238-252, wherein the ABP binds to any one or more of amino acid positions 46, 49, 55, 61, 74, 76, 77, 78, 81 and 84 of the α1 helix of HLA subtype A*02:01.

254. The isolated multispecific ABP of claim 252, wherein the ABP binds to any one or more of amino acid positions 46, 49, 55, 66, 67, and 73 of the α1 helix of HLA subtype A*02:01.

255. The isolated multispecific ABP of any one of claims 238-254, wherein the ABP binds to any one or more of amino acid positions 138, 145, 147, 152-156, 164, 167 of the α2 helix of HLA subtype A*02:01.

256. The isolated multispecific ABP of any one of claims 238-255, wherein the ABP binds to any one or more of amino acid positions 56, 59, 60, 63, 64, 66, 67, 70, 73, 74, 132, 150-153, 155, 156, 158-160, 162-164, 166-168, 170, and 171 of HLA subtype A*02:01.

257. The isolated multispecific ABP of any one of claims 238-256, comprising a VH region comprising a paratope comprising at least one, two, three, or four of residues Tyr32, Gly99, Asp100, and Tyr100A of the VH region shown in the sequence QVQLVQSGAEVKKPGASVKVSCKASGGTLSSYPINWVRQAPGQGLEWMGWISTYS GHADYAQKLQGRVTMTRDTSTSTVYMELSSLRSEDTAVYYCARSYDYGDYLNFD YWGQGTLVTVSS, as numbered by the Kabat numbering system.

258. The isolated multispecific ABP of any one of claims 238-257, comprising a VH region comprising a paratope comprising at least 1, 2, 3, 4, 5, 6, 7, 8, 9, 10, 11, 12, 13, 14, 15, 16, 17, 18, 19, 20, 21, or 22 of residues Thr28, Leu 29, Ser 30, Ser 31, Tyr 32, Pro 33, Trp 47, Trp 50, Ser 52, Tyr 53, Ser 54, His 56, Asp 58, Tyr 59, Gln 61, Gln 64, Asp 97, Tyr 98, Gly 99, Asp100, Tyr100A, Leu100B, and Asn100C of the VH region shown in the sequence QVQLVQSGAEVKKPGASVKVSCKASGGTLSSYPINWVRQAPGQGLEWMGWISTYS GHADYAQKLQGRVTMTRDTSTSTVYMELSSLRSEDTAVYYCARSYDYGDYLNFD YWGQGTLVTVSS, as numbered by the Kabat numbering system.

259. The isolated multispecific ABP of claim 258, wherein the paratope comprises at least 1, 2, 3, 4, 5, 6, or 7 of residues Ser 30, Ser 31, Tyr 32, Tyr 98, Gly 99, Asp 100, and Tyr 100A of the VH region, as numbered by the Kabat numbering system.

260. The isolated multispecific ABP of any one of claims 238-259, comprising a VL region comprising a paratope comprising at least one, two, or three of residues Tyr32, Ser 91, and Tyr 92 of the VL region shown in the sequence DIQMTQSPSSLSASVGDRVTITCQASQDISNYLNWYQQKPGKAPKLLIYAASSLQSG VPSRFSGSGSGTDFTLTISSLQPEDFATYYCQQSYSIPPTFGGGTKVDIK, as numbered by the Kabat numbering system.

261. The isolated multispecific ABP of any one of claims 238-260, comprising a VL region comprising a paratope comprising at least 1, 2, 3, 4, 5, 6, 7, 8, 9, 10, 11, 12, or 13 of residues Asp1, Ser30, Asn31, Tyr32, Tyr49, Ala50, Ser53, Ser67, Ser91, Tyr92, Ser93, Ile94, and Pro95 of the VL region shown in the sequence DIQMTQSPSSLSASVGDRVTITCQASQDISNYLNWYQQKPGKAPKLLIYAASSLQSG VPSRFSGSGSGTDFTLTISSLQPEDFATYYCQQSYSIPPTFGGGTKVDIK, as numbered by the Kabat numbering system.

262. The isolated multispecific ABP of claim 261, wherein the paratope comprises at least 1, 2, 3, 4, 5, or 6 of residues Asp1, Asn31, Tyr32, Ser91, Tyr92, and Ile94 of the VL region, as numbered by the Kabat numbering system.

263. The isolated multispecific ABP of any one of claim 1168, wherein the HLA Class I molecule is HLA subtype A*01:01 and the HLA-restricted peptide comprises the sequence ASSLPTTMNY.

264. The isolated multispecific ABP of claim 263, wherein the HLA Class I molecule is HLA subtype A*01:01 and the HLA-restricted peptide consists of the sequence ASSLPTTMNY.

265. The isolated multispecific ABP of claim 263 or 264, wherein the ABP comprises a CDR-H3 comprising a sequence selected from: CARDQDTIFGVVITWFDPW, CARDKVYGDGFDPW, CAREDDSMDVW, CARDSSGLDPW, CARGVGNLDYW, CARDAHQYYDFWSGYYSGTYYYGMDVW, CAREQWPSYWYFDLW, CARDRGYSYGYFDYW, CARGSGDPNYYYYYGLDVW, CARDTGDHFDYW, CARAENGMDVW, CARDPGGYMDVW, CARDGDAFDIW, CARDMGDAFDIW, CAREEDGMDVW, CARDTGDHFDYW, CARGEYSSGFFFVGWFDLW, and CARETGDDAFDIW.

266. The isolated multispecific ABP of any one of claims 263-265, wherein the ABP comprises a CDR-L3 comprising a sequence selected from: CQQYFTTPYTF, CQQAEAFPYTF, CQQSYSTPITF, CQQSYIIPYTF, CHQTYSTPLTF, CQQAYSFPWTF, CQQGYSTPLTF, CQQANSFPRTF, CQQANSLPYTF, CQQSYSTPFTF, CQQSYSTPFTF, CQQSYGVPTF, CQQSYSTPLTF, CQQSYSTPLTF, CQQYYSYPWTF, CQQSYSTPFTF, CMQTLKTPLSF, and CQQSYSTPLTF.

267. The isolated multispecific ABP of any one of claims 263-266, wherein the ABP comprises the CDR-H3 and the CDR-L3 from the scFv designated G10(1A07), G10(1B07), G10(1E12), G10(1F06), G10(1H01), G10(1H08), G10(2C04), G10(2G11), G10(3E04), G10(4A02), G10(4C05), G10(4D04), G10(4D10), G10(4E07), G10(4E12), G10(4G06), G10(5A08), or G10(5C08).

268. The isolated multispecific ABP of any one of claims 263-267, wherein the ABP comprises all three heavy chain CDRs and all three light chain CDRs from the scFv designated G10(1A07), G10(1B07), G10(1E12), G10(1F06), G10(1H01), G10(1H08), G10(2C04), G10(2G11), G10(3E04), G10(4A02), G10(4C05), G10(4D04), G10(4D10), G10(4E07), G10(4E12), G10(4G06), G10(5A08), or G10(5C08).

269. The isolated multispecific ABP of any one of claims 263-268, wherein the ABP comprises a VH sequence selected from:
EVQLLESGGGLVKPGGSLRLSCAASGFTFSSYWMSWVRQAPGKGLEWV
SGISARSGRTYYADSVKGRFTISRDDSKNTLYLQMNSLKTEDTAVYYC
ARDQDTIFGVVITWFDPWGQGTLVTVSS,
QVQLVQSGAEVKKPGASVKVSCKASGYTFTSYYMHWVRQAPGQGLEWM
GIIHPGGGTTSYAQKFQGRVTMTRDTSTSTVYMELSSLRSEDTAVYYC
ARDKVYGDGFDPWGQGTLVTVSS,
QVQLVQSGAEVKKPGASVKVSCKASGYIFTGYYMHWVRQAPGQGLEWM
GMIGPSDGSTSYAQKFQGRVTMTRDTSTSTVYMELSSLRSEDTAVYYC
AREDDSMDVWGKGTTVTVSS,
QVQLVQSGAEVKKPGASVKVSCKASGYTFIGYYMHWVRQAPGQGLEWM
GMIGPSDGSTSYAQKFQGRVTMTRDTSTSTVYMELSSLRSEDTAVYYC
ARDSSGLDPWGQGTLVTVSS,
QVQLVQSGAEVKKPGASVKVSCKASGYTFTGYYMHWVRQAPGQGLEWM
GMIGPSDGSTSYAQKFQGRVTMTRDTSTSTVYMELSSLRSEDTAVYYC
ARGVGNLDYWGQGTLVTVSS,
QVQLVQSGAEVKKPGASVKVSCKASGVTFSTSAISWVRQAPGQGLEWM
GWISPYNGNTDYAQMLQGRVTMTRDTSTSTVYMELSSLRSEDTAVYYC
ARDAHQYYDFWSGYYSGTYYYGMDVWGQGTTVTVSS,
QVQLVQSGAEVKKPGASVKVSCKASGGTFSNSIINWVRQAPGQGLEWM
GWMNPNSGNTNYAQKFQGRVTMTRDTSTSTVYMELSSLRSEDTAVYYC
AREQWPSYWYFDLWGRGTLVTVSS,
QVQLVQSGAEVKKPGASVKVSCKASGGTFSTHDINWVRQAPGQGLEWM
GVINPSGGSAIYAQKFQGRVTMTRDTSTSTVYMELSSLRSEDTAVYYC
ARDRGYSYGYFDYWGQGTLVTVSS,
QVQLVQSGAEVKKPGASVKVSCKASGNTFIGYYVHWVRQAPGQGLEWV
GIINPNGGSISYAQKFQGRVTMTRDTSTSTVYMELSSLRSEDTAVYYC
ARGSGDPNYYYYYGLDVWGQGTTVTVSS,
QVQLVQSGAEVKKPGASVKVSCKASGYTLSYYYMHWVRQAPGQGLEWM
GMIGPSDGSTSYAQRFQGRVTMTRDTSTGTVYMELSSLRSEDTAVYYC
ARDTGDHFDYWGQGTLVTVSS,
QVQLVQSGAEVKKPGASVKVSCKASGYTFTGYYMHWVRQAPGQGLEWM
GIIGPSDGSTTYAQKFQGRVTMTRDTSTSTVYMELSSLRSEDTAVYYC
ARAENGMDVWGQGTTVTVSS,
QVQLVQSGAEVKKPGASVKVSCKASGYTFTGYYVHWVRQAPGQGLEWM
GIIAPSDGSTNYAQKFQGRVTMTRDTSTSTVYMELSSLRSEDTAVYYC
ARDPGGYMDVWGKGTTVTVSS,
QVQLVQSGAEVKKPGASVKVSCKASGYTFTGYYLHWVRQAPGQGLEWM
GMIGPSDGSTSYAQKFQGRVTMTRDTSTSTVYMELSSLRSEDTAVYYC
ARDGDAFDIWGQGTMVTVSS,
QVQLVQSGAEVKKPGSSVKVSCKASGYTFTGYYMHWVRQAPGQGLEWM
GRISPSDGSTTYAPKFQGRVTITADESTSTAYMELSSLRSEDTAVYYC
ARDMGDAFDIWGQGTTVTVSS,
QVQLVQSGAEVKKPGASVKVSCKASGYTFTGYYMHWVRQAPGQGLEWM
GMIGPSDGSTSYAQRFQGRVTMTRDTSTSTVYMELSSLRSEDTAVYYC
AREEDGMDVWGQGTTVTVSS,
QVQLVQSGAEVKKPGASVKVSCKASGYTLSYYYMHWVRQAPGQGLEWM
GMIGPSDGSTSYAQRFQGRVTMTRDTSTGTVYMELSSLRSEDTAVYYC
ARDTGDHFDYWGQGTLVTVSS,
QVQLVQSGAEVKKPGSSVKVSCKASGGTFNNFAISWVRQAPGQGLEWM
GGIIPIFDATNYAQKFQGRVTFTADESTSTAYMELSSLRSEDTAVYYC
ARGEYSSGFFFVGWFDLWGRGTQVTVSS,
and
QVQLVQSGAEVKKPGASVKVSCKASGYNFTGYYMHWVRQAPGQGLEWM
GIIAPSDGSTNYAQKFQGRVTMTRDTSTSTVYMELSSLRSEDTAVYYC
ARETGDDAFDIWGQGTMVTVSS.

270. The isolated multispecific ABP of any one of claims 263-269, wherein the ABP comprises a VL sequence selected:
DIQMTQSPSSLSASVGDRVTITCRASQGISNYLAWYQQKPGKAPKLLI
YAASSLQGGVPSRFSGSGSGTDFTLTISSLQPEDFATYYCQQYFTTPY
TFGQGTKLEIK,
DIQMTQSPSSLSASVGDRVTITCRASQSISRWLAWYQQKPGKAPKLLI
FDASRLQSGVPSRFSGSGSGTDFTLTISSLQPEDFATYYCQQAEAFPY
TFGQGTKVEIK,
DIQMTQSPSSLSASVGDRVTITCRASQSISSYLNWYQQKPGKAPKLLI
YAASSLQSGVPSRFSGSGSGTDFTLTISSLQPEDFATYYCQQSYSTPI
TFGQGTRLEIK,
DIQMTQSPSSLSASVGDRVTITCRASQSISNYLNWYQQKPGKAPKWYK
ASSLESGVPSRFSGSGSGTDFTLTISSLQPEDFATYYCQQSYIIPYTF
GQGTKLEIK,
DIQMTQSPSSLSASVGDRVTITCRASQSISNYLNWYQQKPGKAPKLLI
YAASSLQSGVPSRFSGSGSGTDFTLTISSLQPEDFATYYCHQTYSTPL
TFGQGTKVEIK,
DIQMTQSPSSLSASVGDRVTITCRASQGISNYLAWYQQKPGKAPKWYS
ASNLQSGVPSRFSGSGSGTDFTLTISSLQPEDFATYYCQQAYSFPWTF
GQGTKVEIK,
DIQMTQSPSSLSASVGDRVTITCRASQNISSYLNWYQQKPGKAPKLLI
YAASSLQSGVPSRFSGSGSGTDFTLTISSLQPEDFATYYCQQGYSTPL
TFGQGTRLEIK,
DIQMTQSPSSLSASVGDRVTITCRASQDISRYLAWYQQKPGKAPKLLI
YDASNLETGVPSRFSGSGSGTDFTLTISSLQPEDFATYYCQQANSFPR
TFGQGTKVEIK,
DIQMTQSPSSLSASVGDRVTITCQASQDISNYLNWYQQKPGKAPKLLI
YAASNLQSGVPSRFSGSGSGTDFTLTISSLQPEDFATYYCQQANSLPY
TFGQGTKVEIK,
DIQMTQSPSSLSASVGDRVTITCRASQSISSYLNWYQQKPGKAPKLLI
YAASTLQNGVPSRFSGSGSGTDFTLTISSLQPEDFATYYCQQSYSTPF
TFGPGTKVDIK,
DIQMTQSPSSLSASVGDRVTITCRASQRISSYLNWYQQKPGKAPKWYS
ASTLQSGVPSRFSGSGSGTDFTLTISSLQPEDFATYYCQQSYSTPFTF
GPGTKVDIK,
DIQMTQSPSSLSASVGDRVTITCRASQSISSYLAWYQQKPGKAPKLLI
YDASKLETGVPSRFSGSGSGTDFTLTISSLQPEDFATYYCQQSYGVPT
FGQGTKLEIK,
DIQMTQSPSSLSASVGDRVTITCRASQGISSWLAWYQQKPGKAPKLLI
YDASNLETGVPSRFSGSGSGTDFTLTISSLQPEDFATYYCQQSYSTPL
TFGGGTKVEIK,
DIQMTQSPSSLSASVGDRVTITCRASQSISSYLNWYQQKPGKAPKLLI
YAASSLQSGVPSRFSGSGSGTDFTLTISSLQPEDFATYYCQQSYSTPL
TFGGGTKVEIK,
DIQMTQSPSSLSASVGDRVTITCRASQGISTYLAWYQQKPGKAPKWYD
ASSLQSGVPSRFSGSGSGTDFTLTISSLQPEDFATYYCQQYYSYPWTF
GQGTRLEIK,
DIQMTQSPSSLSASVGDRVTITCRASQSISSYLNWYQQKPGKAPKLLI
YAASTLQNGVPSRFSGSGSGTDFTLTISSLQPEDFATYYCQQSYSTPF
TFGPGTKVDIK,
DIVMTQSPLSLPVTPGEPASISCRSSQSLLHSNGYNYLDWYLQKPGQS
PQLLIYLGSNRASGVPDRFSGSGSGTDFTLKISRVEAEDVGVYYCMQT
LKTPLSFGGGTKVEIK,
and
[sequence omitted]

271. The isolated multispecific ABP of any one of claims 263-270, wherein the ABP comprises the VH sequence and VL sequence from the scFv designated G10(1A07), G10(1B07), G10(1E12), G10(1F06), G10(1H01), G10(1H08), G10(2C04), G10(2G11), G10(3E04), G10(4A02), G10(4C05), G10(4D04), G10(4D10), G10(4E07), G10(4E12), G10(4G06), G10(5A08), or G10(5C08).

272. The isolated multispecific ABP of any one of claims 263-271, wherein the ABP binds to any one or more of amino acid positions 4, 6, and 7 of the restricted peptide ASSLPTTMNY.

273. The isolated multispecific ABP of any one of claims 263-272, wherein the ABP binds to any one or more of amino acid positions 49-56 of HLA subtype A*01:01.

274. The isolated multispecific ABP of any one of claims 1-168, wherein the HLA Class I molecule is HLA subtype A*02:01 and the HLA-restricted peptide comprises the sequence LLASSILCA.

275. The isolated multispecific ABP of claim 274, wherein the HLA Class I molecule is HLA subtype A*02:01 and the HLA-restricted peptide consists of the sequence LLASSILCA.

276. The isolated multispecific ABP of claim 274 or 275, wherein the ABP comprises a CDR-H3 comprising a sequence selected from: CARDGYDFWSGYTSDDYW, CASDYGDYR, CARDLMTTVVTPGDYGMDVW, CARQDGGAFAFDIW, CARELGYYYGMDVW, CARALIFGVPLLPYGMDVW, CAKDLATVGEPYYYYGMDVW, and CARLWFGELHYYYYYGMDVW.

277. The isolated multispecific ABP of any one of claims 274-276, wherein the ABP comprises a CDR-L3 comprising a sequence selected from: CHHYGRSHTF, CQQANAFPPTF, CQQYYSIPLTF, CQQSYSTPPTF, CQQSYSFPYTF, CMQALQTPLTF, CQQGNTFPLTF, and CMQGSHWPPSF.

278. The isolated multispecific ABP of any one of claims 274-277, wherein the ABP comprises the CDR-H3 and the CDR-L3 from the scFv designated G7(2E09), G7(1C06), G7(1G10), G7(1B04), G7(2C02), G7(1A03), G7(1F08), or G7(3A09).

279. The isolated multispecific ABP of any one of claims 274-278, wherein the ABP comprises all three heavy chain CDRs and all three light chain CDRs from the scFv designated G7(2E09), G7(1C06), G7(1G10), G7(1B04), G7(2C02), G7(1A03), G7(1F08), or G7(3A09).

280. The isolated multispecific ABP of any one of claims 274-279, wherein the ABP comprises a VH sequence selected from
QVQLVQSGAEVKKPGASVKVSCKASGGTFSNYGISWVRQAPGQGLEWM
GIINPGGSTSYAQKFQGRVTMTRDTSTSTVYMELSSLRSEDTAVYYCA
RDGYDFWSGYTSDDYWGQGTLVTVSS,
EVQLLESGGGLVQPGGSLRLSCAASGFTFSSYAMHWVRQAPGKGLEWV
SGISGSGGSTYYADSVKGRFTISRDNSKNTLYLQMNSLRAEDTAVYYC
ASDYGDYRGQGTLVTVSS,
QVQLVQSGAEVKKPGASVKVSCKASGYTFSNYYIHWVRQAPGQGLEWM
GWLNPNSGNTGYAQRFQGRVTMTRDTSTSTVYMELSSLRSEDTAVYYC
ARDLMTTVVTPGDYGMDVWGQGTTVTVSS,
QVQLVQSGAEVKKPGASMKVSCKASGYTFTTDGISWVRQAPGQGLEWM
GRIYPHSGYTEYAKKFKGRVTMTRDTSTSTVYMELSSLRSEDTAVYYC
ARQDGGAFAFDIWGQGTMVTVSS,
QVQLVQSGAEVKKPGASVKVSCKASGYTFTSQYMHWVRQAPGQGLEWM
GWISPNNGDTNYAQKFQGRVTMTRDTSTSTVYMELSSLRSEDTAVYYC
ARELGYYYGMDVWGQGTTVTVSS,
QVQLVQSGAEVKKPGSSVKVSCKASRYTFTSYDINWVRQAPGQGLEWM
GRIIPMLNIANYAPKFQGRVTITADESTSTAYMELSSLRSEDTAVYYC
ARALIFGVPLLPYGMDVWGQGTTVTVSS,
EVQLLQSGGGLVQPGGSLRLSCAASGFTESSSWMHWVRQAPGKGLEWV
SFISTSSGYIYYADSVKGRFTISRDNSKNTLYLQMNSLRAEDTAVYYC
AKDLATVGEPYYYYGMDVWGQGTTVTVSS,
and
QVQLVQSGAEVKKPGSSVKVSCKASGDTFNTYALSWVRQAPGQGLEWM
GWMNPNSGNAGYAQKFQGRVTITADESTSTAYMELSSLRSEDTAVYYC
ARLWFGELHYYYYYGMDVWGQGTMVTVSS.

281. The isolated multispecific ABP of any one of claims 274-280, wherein the ABP comprises a VL sequence selected from
EIVMTQSPATLSVSPGERATLSCRASQSVSSSNLAWYQQKPGQAPRLL
IYGASTRATGIPARFSGSGSGTEFTLTISSLQSEDFAVYYCHHYGRSH
TFGQGTKVEIK,
DIQMTQSPSSLSASVGDRVTITCRASQDIRNDLGWYQQKPGKAPKLLI
YAASSLQSGVPSRFSGSGSGTDFTLTISSLQPEDFATYYCQQANAFPP
TFGQGTKVEIK,
DIVMTQSPDSLAVSLGERATINCKSSQSVFYSSNNKNQLAWYQQKPGQ
PPKLLIYWASTRESGVPDRFSGSGSGTDFTLTISSLQAEDVAVYYCQQ
YYSIPLTFGQGTKLEIK,
DIQMTQSPSSLSASVGDRVTITCQASQDIFKYLNWYQQKPGKAPKLLI
YAASTLQSGVPSRFSGSGSGTDFTLTISSLQPEDFATYYCQQSYSTPP
TFGQGTRLEIK,
DIQMTQSPSSLSASVGDRVTITCRASQSISTWLAWYQQKPGKAPKLLI
YYASSLQSGVPSRFSGSGSGTDFTLTISSLQPEDFATYYCQQSYSFPY
TFGQGTKVEIK,
DIVMTQSPLSLPVTPGEPASISCSSSQSLLHSNGYNYLDWYLQKPGQS
PQLLIYLGSNRASGVPDRFSGSGSGTDFTLKISRVEAEDVGVYYCMQA
LQTPLTFGGGTKVEIK,
DIQMTQSPSSLSASVGDRVTITCQASQDISNYLNWYQQKPGKAPKLLI
YSASNLRSGVPSRFSGSGSGTDFTLTISSLQPEDFATYYCQQGNTFPL
TFGQGTKVEIK,
and
DIVMTQSPLSLPVTPGEPASISCRSSQSLLHSNGYNYLDWYLQKPGQS
PQLLIYLGSNRASGVPDRFSGSGSGTDFTLKISRVEAEDVGVYYCMQG
SHWPPSFGQGTRLEIK.

282. The isolated multispecific ABP of any one of claims 274-281, wherein the ABP comprises the VH sequence and VL sequence from the scFv designated G7(2E09), G7(1C06), G7(1G10), G7(1B04), G7(2C02), G7(1A03), G7(1F08), or G7(3A09).

283. The isolated multispecific ABP of any one of claims 274-282, wherein the multispecific ABP binds to the HLA-PEPTIDE target via any one or more of residues 1-5 of the restricted peptide LLASSILCA.

284. The multispecific ABP of any of the above claims, wherein the antigen binding protein is linked to a scaffold, optionally wherein the scaffold comprises serum albumin or Fc, optionally wherein Fc is human Fc and is an IgG (IgG1, IgG2, IgG3, IgG4), an IgA (IgA1, IgA2), an IgD, an IgE, or an IgM isotype Fc.

285. The multispecific ABP of any of the above claims, wherein the antigen binding protein is linked to a scaffold via a linker, optionally wherein the linker is a peptide linker, optionally wherein the peptide linker is a hinge region of a human antibody.

286. The multispecific ABP of any of the above claims, wherein the antigen binding protein comprises an Fv fragment, a Fab fragment, a F(ab′)₂ fragment, a Fab′ fragment, an scFv fragment, an scFv-Fc fragment, and/or a single-domain antibody or antigen binding fragment thereof.

287. The multispecific ABP of any of the above claims, wherein the antigen binding protein comprises an scFv fragment.

288. The multispecific ABP of any of the above claims, wherein the antigen binding protein comprises one or more antibody complementarity determining regions (CDRs), optionally six antibody CDRs.

289. The multispecific ABP of any of the above claims, wherein the antigen binding protein comprises an antibody.

290. The multispecific ABP of any of the above claims, wherein the antigen binding protein is a monoclonal antibody.

291. The multispecific ABP of any of the above claims, wherein the antigen binding protein is a humanized, human, or chimeric antibody.

292. The multispecific ABP of any of the above claims, wherein the antigen binding protein is bispecific.

293. The multispecific ABP of any of the above claims, wherein the antigen binding protein comprises a heavy chain constant region of a class selected from IgG, IgA, IgD, IgE, and IgM.

294. The multispecific ABP of any one of the above claims, comprising a heavy chain constant region of the class human IgG and a subclass selected from IgG1, IgG4, IgG2, and IgG3.

295. The multispecific ABP of any one of the above claims, comprising a modification that extends half-life.

296. The multispecific ABP of any one of the above claims, comprising a modified Fc, optionally wherein the modified Fc comprises one or more mutations that extend half-life, optionally wherein the one or more mutations that extend half-life is YTE.

297. The multispecific ABP of any of the above claims, wherein the antigen binding protein is a portion of a chimeric antigen receptor (CAR) comprising: an extracellular portion comprising the antigen binding protein; and an intracellular signaling domain.

298. The multispecific ABP of claim 297, wherein the extracellular portion comprises an scFv and the intracellular signaling domain comprises an ITAM.

299. The multispecific ABP of claim 297 or 298, wherein the intracellular signaling domain comprises a signaling domain of a zeta chain of a CD3-zeta (CD3) chain.

300. The multispecific ABP of any of claims 297-299, further comprising a transmembrane domain linking the extracellular domain and the intracellular signaling domain.

301. The multispecific ABP of claim 300, wherein the transmembrane domain comprises a transmembrane portion of CD28.

302. The multispecific ABP of any of claims 297-301, further comprising an intracellular signaling domain of a T cell costimulatory molecule.

303. The multispecific ABP of claim 302, wherein the T cell costimulatory molecule is CD28, 4-1BB, OX-40, ICOS, or any combination thereof.

304. The multispecific ABP of any of the above claims, wherein the antigen binding protein binds to the HLA-PEPTIDE target through a contact point with the HLA Class I molecule and through a contact point with the HLA-restricted peptide of the HLA-PEPTIDE target.

305. The multispecific ABP of any one of the preceding claims, wherein the contact points are determined via positional scanning, hydrogen-deuterium exchange, or protein crystallography.

306. The multispecific ABP of any of the above claims for use as a medicament.

307. The multispecific ABP of any of the above claims for use in treatment of cancer, optionally wherein the cancer expresses or is predicted to express the HLA-PEPTIDE target.

308. The multispecific ABP of any of the above claims for use in treatment of cancer, wherein the cancer is selected from a solid tumor and a hematological tumor.

309. An ABP which is a conservatively modified variant of the multispecific ABP of any one of the preceding claims.

310. An antigen binding protein (ABP) that competes for binding with the multispecific ABP of any of the above claims.

311. An antigen binding protein (ABP) that binds the same HLA-PEPTIDE epitope bound by the multispecific ABP of any of the above claims.

312. An engineered cell expressing a receptor comprising the multispecific ABP of any one of the preceding claims.

313. The engineered cell of claim 312, which is a T cell, optionally a cytotoxic T cell (CTL).

314. The engineered cell of claim 312 or 313, wherein the antigen binding protein is expressed from a heterologous promoter.

315. An isolated polynucleotide or set of polynucleotides encoding the multispecific ABP of any of the above claims or an antigen-binding portion thereof.

316. A vector or set of vectors comprising the polynucleotide or set of polynucleotides of claim 315.

317. A host cell comprising the polynucleotide or set of polynucleotides of any of the preceding claims or the vector or set of vectors of claim 316, optionally wherein the host cell is CHO or HEK293, or optionally wherein the host cell is a T cell.

318. A method of producing an antigen binding protein comprising expressing the antigen binding protein with the host cell of claim 317 and isolating the expressed antigen binding protein.

319. A pharmaceutical composition comprising the multispecific ABP of any of the preceding claims and a pharmaceutically acceptable excipient.

320. A method of treating cancer in a subject, comprising administering to the subject an effective amount of the multispecific ABP of any of the preceding claims or a pharmaceutical composition of claim 319, optionally wherein the cancer is selected from a solid tumor and a hematological tumor.

321. The method of claim 320, wherein the cancer expresses or is predicted to express the HLA-PEPTIDE target.

322. A kit comprising the multispecific ABP of any of the preceding claims or a pharmaceutical composition of claim 319 and instructions for use.

323. A virus comprising the isolated polynucleotide or set of polynucleotides of any of the preceding claims.

324. The virus of claim 323, wherein the virus is a filamentous phage.

The application's sequence listing, which the Patent Office published only in electronic form, follows.

SEQUENCE LISTING (111005 sequences)

SEQ ID NO: 1 - protein, 9 aa, Homo sapiens
  misc_feature: Table A; Target 1; HLA-C*16:01; ABCB5; ENSG00000004846; TAA
AAACSRMVI

SEQ ID NO: 2 - protein, 9 aa, Homo sapiens
  misc_feature: Table A; Target 2; HLA-C*16:02; ABCB5; ENSG00000004846; TAA
AAACSRMVI

SEQ ID NO: 3 - protein, 8 aa, Homo sapiens
  misc_feature: Table A; Target 3; HLA-B*08:01; ABCB5; ENSG00000004846; TAA
AACSRMVI

SEQ ID NO: 4 - protein, 8 aa, Homo sapiens
  misc_feature: Table A; Target 4; HLA-C*16:01; ABCB5; ENSG00000004846; TAA
AACSRMVI

SEQ ID NO: 5 - protein, 8 aa, Homo sapiens
  misc_feature: Table A; Target 5; HLA-A*02:03; ABCB5; ENSG00000004846; TAA
AAFHIFQV

SEQ ID NO: 6 - protein, 8 aa, Homo sapiens
  misc_feature: Table A; Target 6; HLA-A*02:04; ABCB5; ENSG00000004846; TAA
AAFHIFQV

SEQ ID NO: 7 - protein, 8 aa, Homo sapiens
  misc_feature: Table A; Target 7; HLA-B*13:02; ABCB5; ENSG00000004846; TAA
AAFHIFQV

SEQ ID NO: 8 - protein, 8 aa, Homo sapiens
  misc_feature: Table A; Target 8; HLA-B*51:01; ABCB5; ENSG00000004846; TAA
AAFHIFQV

SEQ ID NO: 9 - protein, 8 aa, Homo sapiens
  misc_feature: Table A; Target 9; HLA-C*02:02; ABCB5; ENSG00000004846; TAA
AAFHIFQV

SEQ ID NO: 10 - protein, 8 aa, Homo sapiens
  misc_feature: Table A; Target 10; HLA-C*12:03; ABCB5; ENSG00000004846; TAA
AAFHIFQV

SEQ ID NO: 11 - protein, 9 aa, Homo sapiens
  misc_feature: Table A; Target 11; HLA-A*02:04; ABCB5; ENSG00000004846; TAA
AAFHIFQVI

SEQ ID NO: 12 - protein, 9 aa, Homo sapiens
  misc_feature: Table A; Target 12; HLA-A*02:07; ABCB5; ENSG00000004846; TAA
AAFHIFQVI

SEQ ID NO: 13 - protein, 9 aa, Homo sapiens
  misc_feature: Table A; Target 13; HLA-A*68:02; ABCB5; ENSG00000004846; TAA
AAFHIFQVI

SEQ ID NO: 14 - protein, 9 aa, Homo sapiens
  misc_feature: Table A; Target 14; HLA-B*13:02; ABCB5; ENSG00000004846; TAA
AAFHIFQVI

SEQ ID NO: 15 - protein, 9 aa, Homo sapiens
  misc_feature: Table A; Target 15; HLA-B*51:01; ABCB5; ENSG00000004846; TAA
AAFHIFQVI

SEQ ID NO: 16 - protein, 9 aa, Homo sapiens
  misc_feature: Table A; Target 16; HLA-B*54:01; ABCB5; ENSG00000004846; TAA
AAFHIFQVI

SEQ ID NO: 17 - protein, 9 aa, Homo sapiens
  misc_feature: Table A; Target 17; HLA-B*56:01; ABCB5; ENSG00000004846; TAA
AAFHIFQVI

SEQ ID NO: 18 - protein, 9 aa, Homo sapiens
  misc_feature: Table A; Target 18; HLA-B*57:01; ABCB5; ENSG00000004846; TAA
AAFHIFQVI

SEQ ID NO: 19 - protein, 9 aa, Homo sapiens
  misc_feature: Table A; Target 19; HLA-C*02:02; ABCB5; ENSG00000004846; TAA
AAFHIFQVI

SEQ ID NO: 20 - protein, 9 aa, Homo sapiens
  misc_feature: Table A; Target 20; HLA-C*12:03; ABCB5; ENSG00000004846; TAA
AAFHIFQVI

SEQ ID NO: 21 - protein, 9 aa, Homo sapiens
  misc_feature: Table A; Target 21; HLA-A*01:01; ABCB5; ENSG00000004846; TAA
AAGFRFGAY

SEQ ID NO: 22 - protein, 9 aa, Homo sapiens
  misc_feature: Table A; Target 22; HLA-A*30:02; ABCB5; ENSG00000004846; TAA
AAGFRFGAY

SEQ ID NO: 23 - protein, 9 aa, Homo sapiens
  misc_feature: Table A; Target 23; HLA-C*02:02; ABCB5; ENSG00000004846; TAA
AAGFRFGAY

SEQ ID NO: 24 - protein, 9 aa, Homo sapiens
  misc_feature: Table A; Target 24; HLA-C*16:01; ABCB5; ENSG00000004846; TAA
AAGFRFGAY

SEQ ID NO: 25 - protein, 9 aa, Homo sapiens
  misc_feature: Table A; Target 25; HLA-A*03:01; ABCB5; ENSG00000004846; TAA
AAMTGFANK

SEQ ID NO: 26 - protein, 9 aa, Homo sapiens
  misc_feature: Table A; Target 26; HLA-A*03:02; ABCB5; ENSG00000004846; TAA
AAMTGFANK

SEQ ID NO: 27 - protein, 9 aa, Homo sapiens
  misc_feature: Table A; Target 27; HLA-A*11:01; ABCB5; ENSG00000004846; TAA
AAMTGFANK

SEQ ID NO: 28 - protein, 9 aa, Homo sapiens
  misc_feature: Table A; Target 28; HLA-A*31:01; ABCB5; ENSG00000004846; TAA
AAMTGFANK

SEQ ID NO: 29 - protein, 9 aa, Homo sapiens
  misc_feature: Table A; Target 29; HLA-A*33:01; ABCB5; ENSG00000004846; TAA
AAMTGFANK

SEQ ID NO: 30 - protein, 9 aa, Homo sapiens
  misc_feature: Table A; Target 30; HLA-A*33:03; ABCB5; ENSG00000004846; TAA
AAMTGFANK

SEQ ID NO: 31 - protein, 9 aa, Homo sapiens
  misc_feature: Table A; Target 31; HLA-A*68:01; ABCB5; ENSG00000004846; TAA
AAMTGFANK

SEQ ID NO: 32 - protein, 9 aa, Homo sapiens
  misc_feature: Table A; Target 32; HLA-B*57:01; ABCB5; ENSG00000004846; TAA
AAMTGFANK

SEQ ID NO: 33 - protein, 9 aa, Homo sapiens
  misc_feature: Table A; Target 33; HLA-B*58:01; ABCB5; ENSG00000004846; TAA
AAMTGFANK

SEQ ID NO: 34 - protein, 9 aa, Homo sapiens
  misc_feature: Table A; Target 34; HLA-C*01:02; ABCB5; ENSG00000004846; TAA
AAMTGFANK

SEQ ID NO: 35 - protein, 9 aa, Homo sapiens
  misc_feature: Table A; Target 35; HLA-C*07:06; ABCB5; ENSG00000004846; TAA
AAMTGFANK

SEQ ID NO: 36 - protein, 10 aa, Homo sapiens
  misc_feature: Table A; Target 36; HLA-A*25:01; ABCB5; ENSG00000004846; TAA
AANAANIHSF

SEQ ID NO: 37 - protein, 10 aa, Homo sapiens
  misc_feature: Table A; Target 37; HLA-A*26:01; ABCB5; ENSG00000004846; TAA
AANAANIHSF

SEQ ID NO: 38 - protein, 10 aa, Homo sapiens
  misc_feature: Table A; Target 38; HLA-A*30:02; ABCB5; ENSG00000004846; TAA
AANAANIHSF

SEQ ID NO: 39 - protein, 10 aa, Homo sapiens
  misc_feature: Table A; Target 39; HLA-A*32:01; ABCB5; ENSG00000004846; TAA
AANAANIHSF

SEQ ID NO: 40 - protein, 10 aa, Homo sapiens
  misc_feature: Table A; Target 40; HLA-B*15:01; ABCB5; ENSG00000004846; TAA
AANAANIHSF

SEQ ID NO: 41 - protein, 10 aa, Homo sapiens
  misc_feature: Table A; Target 41; HLA-B*44:02; ABCB5; ENSG00000004846; TAA
AANAANIHSF

SEQ ID NO: 42 - protein, 10 aa, Homo sapiens
  misc_feature: Table A; Target 42; HLA-B*44:03; ABCB5; ENSG00000004846; TAA
AANAANIHSF

SEQ ID NO: 43 - protein, 10 aa, Homo sapiens
  misc_feature: Table A; Target 43; HLA-B*46:01; ABCB5; ENSG00000004846; TAA
AANAANIHSF

SEQ ID NO: 44 - protein, 10 aa, Homo sapiens
  misc_feature: Table A; Target 44; HLA-B*57:01; ABCB5; ENSG00000004846; TAA
AANAANIHSF

SEQ ID NO: 45 - protein, 10 aa, Homo sapiens
  misc_feature: Table A; Target 45; HLA-B*58:01; ABCB5; ENSG00000004846; TAA
AANAANIHSF

SEQ ID NO: 46 - protein, 10 aa, Homo sapiens
  misc_feature: Table A; Target 46; HLA-C*02:02; ABCB5; ENSG00000004846; TAA
AANAANIHSF

SEQ ID NO: 47 - protein, 10 aa, Homo sapiens
  misc_feature: Table A; Target 47; HLA-C*03:04; ABCB5; ENSG00000004846; TAA
AANAANIHSF

SEQ ID NO: 48 - protein, 10 aa, Homo sapiens
  misc_feature: Table A; Target 48; HLA-C*16:02; ABCB5; ENSG00000004846; TAA
AANAANIHSF

SEQ ID NO: 49 - protein, 10 aa, Homo sapiens
  misc_feature: Table A; Target 49; HLA-C*16:04; ABCB5; ENSG00000004846; TAA
AANAANIHSF

SEQ ID NO: 50 - protein, 8 aa, Homo sapiens
  misc_feature: Table A; Target 50; HLA-A*30:02; ABCB5; ENSG00000004846; TAA
AAREANAY

SEQ ID NO: 51 - protein, 8 aa, Homo sapiens
  misc_feature: Table A; Target 51; HLA-B*15:01; ABCB5; ENSG00000004846; TAA
AAREANAY

SEQ ID NO: 52 - protein, 8 aa, Homo sapiens
  misc_feature: Table A; Target 52; HLA-B*15:03; ABCB5; ENSG00000004846; TAA
AAREANAY

SEQ ID NO: 53 - protein, 8 aa, Homo sapiens
  misc_feature: Table A; Target 53; HLA-B*46:01; ABCB5; ENSG00000004846; TAA
AAREANAY

SEQ ID NO: 54 - protein, 8 aa, Homo sapiens
  misc_feature: Table A; Target 54; HLA-C*01:02; ABCB5; ENSG00000004846; TAA
AAREANAY

SEQ ID NO: 55 - protein, 8 aa, Homo sapiens
  misc_feature: Table A; Target 55; HLA-C*14:02; ABCB5; ENSG00000004846; TAA
AAREANAY

SEQ ID NO: 56 - protein, 8 aa, Homo sapiens
  misc_feature: Table A; Target 56; HLA-C*16:01; ABCB5; ENSG00000004846; TAA
AAREANAY

SEQ ID NO: 57 - protein, 8 aa, Homo sapiens
  misc_feature: Table A; Target 57; HLA-C*16:02; ABCB5; ENSG00000004846; TAA
AAREANAY

SEQ ID NO: 58 - protein, 9 aa, Homo sapiens
  misc_feature: Table A; Target 58; HLA-A*02:07; ABCB5; ENSG00000004846; TAA
AAVPHFETF

SEQ ID NO: 59 - protein, 9 aa, Homo sapiens
  misc_feature: Table A; Target 59; HLA-A*23:01; ABCB5; ENSG00000004846; TAA
AAVPHFETF

SEQ ID NO: 60 - protein, 9 aa, Homo sapiens
  misc_feature: Table A; Target 60; HLA-A*24:02; ABCB5; ENSG00000004846; TAA
AAVPHFETF

SEQ ID NO: 61 - protein, 9 aa, Homo sapiens
  misc_feature: Table A; Target 61; HLA-A*25:01; ABCB5; ENSG00000004846; TAA
AAVPHFETF

SEQ ID NO: 62 - protein, 9 aa, Homo sapiens
  misc_feature: Table A; Target 62; HLA-A*26:01; ABCB5; ENSG00000004846; TAA
AAVPHFETF

SEQ ID NO: 63 - protein, 9 aa, Homo sapiens
  misc_feature: Table A; Target 63; HLA-A*30:01; ABCB5; ENSG00000004846; TAA
AAVPHFETF

SEQ ID NO: 64 - protein, 9 aa, Homo sapiens
  misc_feature: Table A; Target 64; HLA-A*30:02; ABCB5; ENSG00000004846; TAA
AAVPHFETF

SEQ ID NO: 65 - protein, 9 aa, Homo sapiens
  misc_feature: Table A; Target 65; HLA-A*32:01; ABCB5; ENSG00000004846; TAA
AAVPHFETF

SEQ ID NO: 66 - protein, 9 aa, Homo sapiens
  misc_feature: Table A; Target 66; HLA-A*68:02; ABCB5; ENSG00000004846; TAA
AAVPHFETF

SEQ ID NO: 67 - protein, 9 aa, Homo sapiens
  misc_feature: Table A; Target 67; HLA-B*07:02; ABCB5; ENSG00000004846; TAA
AAVPHFETF

SEQ ID NO: 68 - protein, 9 aa, Homo sapiens
  misc_feature: Table A; Target 68; HLA-B*15:01; ABCB5; ENSG00000004846; TAA
AAVPHFETF

SEQ ID NO: 69 - protein, 9 aa, Homo sapiens
  misc_feature: Table A; Target 69; HLA-B*15:03; ABCB5; ENSG00000004846; TAA
AAVPHFETF

SEQ ID NO: 70 - protein, 9 aa, Homo sapiens
  misc_feature: Table A; Target 70; HLA-B*18:01; ABCB5; ENSG00000004846; TAA
AAVPHFETF

SEQ ID NO: 71 - protein, 9 aa, Homo sapiens
  misc_feature: Table A; Target 71; HLA-B*27:02; ABCB5; ENSG00000004846; TAA
AAVPHFETF

SEQ ID NO: 72 - protein, 9 aa, Homo sapiens
  misc_feature: Table A; Target 72; HLA-B*35:01; ABCB5; ENSG00000004846; TAA
AAVPHFETF

SEQ ID NO: 73 - protein, 9 aa, Homo sapiens
  misc_feature: Table A; Target 73; HLA-B*35:03; ABCB5; ENSG00000004846; TAA
AAVPHFETF

SEQ ID NO: 74 - protein, 9 aa, Homo sapiens
  misc_feature: Table A; Target 74; HLA-B*37:01; ABCB5; ENSG00000004846; TAA
AAVPHFETF

SEQ ID NO: 75 - protein, 9 aa, Homo sapiens
  misc_feature: Table A; Target 75; HLA-B*38:01; ABCB5; ENSG00000004846; TAA
AAVPHFETF

SEQ ID NO: 76 - protein, 9 aa, Homo sapiens
  misc_feature: Table A; Target 76; HLA-B*40:01; ABCB5; ENSG00000004846; TAA
AAVPHFETF

SEQ ID NO: 77 - protein, 9 aa, Homo sapiens
  misc_feature: Table A; Target 77; HLA-B*44:02; ABCB5; ENSG00000004846; TAA
AAVPHFETF

SEQ ID NO: 78 - protein, 9 aa, Homo sapiens
  misc_feature: Table A; Target 78; HLA-B*44:03; ABCB5; ENSG00000004846; TAA
AAVPHFETF

SEQ ID NO: 79 - protein, 9 aa, Homo sapiens
  misc_feature: Table A; Target 79; HLA-B*46:01; ABCB5; ENSG00000004846; TAA
AAVPHFETF

SEQ ID NO: 80 - protein, 9 aa, Homo sapiens
  misc_feature: Table A; Target 80; HLA-B*51:01; ABCB5; ENSG00000004846; TAA
AAVPHFETF

SEQ ID NO: 81 - protein, 9 aa, Homo sapiens
  misc_feature: Table A; Target 81; HLA-B*54:01; ABCB5; ENSG00000004846; TAA
AAVPHFETF

SEQ ID NO: 82 - protein, 9 aa, Homo sapiens
  misc_feature: Table A; Target 82; HLA-B*55:01; ABCB5; ENSG00000004846; TAA
AAVPHFETF

SEQ ID NO: 83 - protein, 9 aa, Homo sapiens
  misc_feature: Table A; Target 83; HLA-B*57:01; ABCB5; ENSG00000004846; TAA
AAVPHFETF

SEQ ID NO: 84 - protein, 9 aa, Homo sapiens
  misc_feature: Table A; Target 84; HLA-B*58:01; ABCB5; ENSG00000004846; TAA
AAVPHFETF

SEQ ID NO: 85 - protein, 9 aa, Homo sapiens
  misc_feature: Table A; Target 85; HLA-C*01:02; ABCB5; ENSG00000004846; TAA
AAVPHFETF

SEQ ID NO: 86 - protein, 9 aa, Homo sapiens
  misc_feature: Table A; Target 86; HLA-C*02:02; ABCB5; ENSG00000004846; TAA
AAVPHFETF

SEQ ID NO: 87 - protein, 9 aa, Homo sapiens
  misc_feature: Table A; Target 87; HLA-C*03:03; ABCB5; ENSG00000004846; TAA
AAVPHFETF

SEQ ID NO: 88 - protein, 9 aa, Homo sapiens
  misc_feature: Table A; Target 88; HLA-C*03:04; ABCB5; ENSG00000004846; TAA
AAVPHFETF

SEQ ID NO: 89 - protein, 9 aa, Homo sapiens
  misc_feature: Table A; Target 89; HLA-C*05:01; ABCB5; ENSG00000004846; TAA
AAVPHFETF

SEQ ID NO: 90 - protein, 9 aa, Homo sapiens
  misc_feature: Table A; Target 90; HLA-C*07:06; ABCB5; ENSG00000004846; TAA
AAVPHFETF

SEQ ID NO: 91 - protein, 9 aa, Homo sapiens
  misc_feature: Table A; Target 91; HLA-C*12:03; ABCB5; ENSG00000004846; TAA
AAVPHFETF

SEQ ID NO: 92 - protein, 9 aa, Homo sapiens
  misc_feature: Table A; Target 92; HLA-C*14:02; ABCB5; ENSG00000004846; TAA
AAVPHFETF

SEQ ID NO: 93 - protein, 9 aa, Homo sapiens
  misc_feature: Table A; Target 93; HLA-C*16:01; ABCB5; ENSG00000004846; TAA
AAVPHFETF

SEQ ID NO: 94 - protein, 9 aa, Homo sapiens
  misc_feature: Table A; Target 94; HLA-C*16:02; ABCB5; ENSG00000004846; TAA
AAVPHFETF

SEQ ID NO: 95 - protein, 9 aa, Homo sapiens
  misc_feature: Table A; Target 95; HLA-C*16:04; ABCB5; ENSG00000004846; TAA
AAVPHFETF

SEQ ID NO: 96 - protein, 9 aa, Homo sapiens
  misc_feature: Table A; Target 96; HLA-B*40:02; ABCB5; ENSG00000004846; TAA
ACSRMVISL

SEQ ID NO: 97 - protein, 9 aa, Homo sapiens
  misc_feature: Table A; Target 97; HLA-C*12:03; ABCB5; ENSG00000004846; TAA
ACSRMVISL

SEQ ID NO: 98 - protein, 9 aa, Homo sapiens
  misc_feature: Table A; Target 98; HLA-A*30:01; ABCB5; ENSG00000004846; TAA
ADGLDITLM

SEQ ID NO: 99 - protein, 9 aa, Homo sapiens
  misc_feature: Table A; Target 99; HLA-B*37:01; ABCB5; ENSG00000004846; TAA
ADGLDITLM

SEQ ID NO: 100 - protein, 8 aa, Homo sapiens
  misc_feature: Table A; Target 100; HLA-B*27:02; ABCB5; ENSG00000004846; TAA
ADLIVTLK

SEQ ID NO: 101 - protein, 8 aa, Homo sapiens
  misc_feature: Table A; Target 101; HLA-B*37:01; ABCB5; ENSG00000004846; TAA
ADLIVTLK

SEQ ID NO: 102 - protein, 8 aa, Homo sapiens
  misc_feature: Table A; Target 102; HLA-B*37:01; ABCB5; ENSG00000004846; TAA
ADLIVVLH

SEQ ID NO: 103 - protein, 8 aa, Homo sapiens
  misc_feature: Table A; Target 103; HLA-C*04:01; ABCB5; ENSG00000004846; TAA
ADLIVVLH

SEQ ID NO: 104 - protein, 8 aa, Homo sapiens
  misc_feature: Table A; Target 104; HLA-C*16:04; ABCB5; ENSG00000004846; TAA
AEEMQENY

SEQ ID NO: 105 - protein, 10 aa, Homo sapiens
  misc_feature: Table A; Target 105; HLA-B*27:02; ABCB5; ENSG00000004846; TAA
AEESTQSKEI

SEQ ID NO: 106 - protein, 10 aa, Homo sapiens
  misc_feature: Table A; Target 106; HLA-B*40:01; ABCB5; ENSG00000004846; TAA
AEESTQSKEI

SEQ ID NO: 107 - protein, 10 aa, Homo sapiens
  misc_feature: Table A; Target 107; HLA-B*44:02; ABCB5; ENSG00000004846; TAA
AEESTQSKEI

SEQ ID NO: 108 - protein, 10 aa, Homo sapiens
  misc_feature: Table A; Target 108; HLA-B*44:03; ABCB5; ENSG00000004846; TAA
AEESTQSKEI

SEQ ID NO: 109 - protein, 10 aa, Homo sapiens
  misc_feature: Table A; Target 109; HLA-B*49:01; ABCB5; ENSG00000004846; TAA
AEESTQSKEI

SEQ ID NO: 110 - protein, 8 aa, Homo sapiens
  misc_feature: Table A; Target 110; HLA-B*49:01; ABCB5; ENSG00000004846; TAA
AEEVLSSI

SEQ ID NO: 111 - protein, 11 aa, Homo sapiens
  misc_feature: Table A; Target 111; HLA-A*30:01; ABCB5; ENSG00000004846; TAA
AEEVLSSIRTV

SEQ ID NO: 112 - protein, 11 aa, Homo sapiens
  misc_feature: Table A; Target 112; HLA-B*40:01; ABCB5; ENSG00000004846; TAA
AEEVLSSIRTV

SEQ ID NO: 113 - protein, 11 aa, Homo sapiens
  misc_feature: Table A; Target 113; HLA-B*40:02; ABCB5; ENSG00000004846; TAA
AEEVLSSIRTV

SEQ ID NO: 114 - protein, 11 aa, Homo sapiens
  misc_feature: Table A; Target 114; HLA-B*44:02; ABCB5; ENSG00000004846; TAA
AEEVLSSIRTV

SEQ ID NO: 115 - protein, 11 aa, Homo sapiens
  misc_feature: Table A; Target 115; HLA-B*49:01; ABCB5; ENSG00000004846; TAA
AEEVLSSIRTV

SEQ ID NO: 116 - protein, 8 aa, Homo sapiens
  misc_feature: Table A; Target 116; HLA-B*44:02; ABCB5; ENSG00000004846; TAA
AEIYSMIF

SEQ ID NO: 117 - protein, 9 aa, Homo sapiens
  misc_feature: Table A; Target 117; HLA-B*49:01; ABCB5; ENSG00000004846; TAA
AEIYSMIFV

SEQ ID NO: 118 - protein, 10 aa, Homo sapiens
  misc_feature: Table A; Target 118; HLA-B*44:02; ABCB5; ENSG00000004846; TAA
AEIYSMIFVI

SEQ ID NO: 119 - protein, 10 aa, Homo sapiens
  misc_feature: Table A; Target 119; HLA-B*49:01; ABCB5; ENSG00000004846; TAA
AEIYSMIFVI

SEQ ID NO: 120 - protein, 9 aa, Homo sapiens
  misc_feature: Table A; Target 120; HLA-A*30:01; ABCB5; ENSG00000004846; TAA
AEKGAHAEL

SEQ ID NO: 121 - protein, 9 aa, Homo sapiens
  misc_feature: Table A; Target 121; HLA-B*07:02; ABCB5; ENSG00000004846; TAA
AEKGAHAEL

SEQ ID NO: 122 - protein, 9 aa, Homo sapiens
  misc_feature: Table A; Target 122; HLA-B*37:01; ABCB5; ENSG00000004846; TAA
AEKGAHAEL

SEQ ID NO: 123 - protein, 9 aa, Homo sapiens
  misc_feature: Table A; Target 123; HLA-B*40:01; ABCB5; ENSG00000004846; TAA
AEKGAHAEL

SEQ ID NO: 124 - protein, 9 aa, Homo sapiens
  misc_feature: Table A; Target 124; HLA-B*40:02; ABCB5; ENSG00000004846; TAA
AEKGAHAEL

SEQ ID NO: 125 - protein, 9 aa, Homo sapiens
  misc_feature: Table A; Target 125; HLA-B*44:02; ABCB5; ENSG00000004846; TAA
AEKGAHAEL

SEQ ID NO: 126 - protein, 9 aa, Homo sapiens
  misc_feature: Table A; Target 126; HLA-B*44:03; ABCB5; ENSG00000004846; TAA
AEKGAHAEL

SEQ ID NO: 127 - protein, 9 aa, Homo sapiens
  misc_feature: Table A; Target 127; HLA-B*49:01; ABCB5; ENSG00000004846; TAA
AEKGAHAEL

SEQ ID NO: 128 - protein, 9 aa, Homo sapiens
  misc_feature: Table A; Target 128; HLA-C*02:02; ABCB5; ENSG00000004846; TAA
AEKGAHAEL

SEQ ID NO: 129 - protein, 9 aa, Homo sapiens
  misc_feature: Table A; Target 129; HLA-C*16:04; ABCB5; ENSG00000004846; TAA
AEKGAHAEL

SEQ ID NO: 130 - protein, 10 aa, Homo sapiens
  misc_feature: Table A; Target 130; HLA-A*30:01; ABCB5; ENSG00000004846; TAA
AEKGAHAELM

SEQ ID NO: 131 - protein, 10 aa, Homo sapiens
  misc_feature: Table A; Target 131; HLA-B*37:01; ABCB5; ENSG00000004846; TAA
AEKGAHAELM

SEQ ID NO: 132 - protein, 10 aa, Homo sapiens
  misc_feature: Table A; Target 132; HLA-B*40:01; ABCB5; ENSG00000004846; TAA
AEKGAHAELM

SEQ ID NO: 133 - protein, 10 aa, Homo sapiens
  misc_feature: Table A; Target 133; HLA-B*40:02; ABCB5; ENSG00000004846; TAA
AEKGAHAELM

SEQ ID NO: 134 - protein, 10 aa, Homo sapiens
  misc_feature: Table A; Target 134; HLA-B*44:02; ABCB5; ENSG00000004846; TAA
AEKGAHAELM

SEQ ID NO: 135 - protein, 10 aa, Homo sapiens
  misc_feature: Table A; Target 135; HLA-B*44:03; ABCB5; ENSG00000004846; TAA
AEKGAHAELM

SEQ ID NO: 136 - protein, 10 aa, Homo sapiens
  misc_feature: Table A; Target 136; HLA-B*49:01; ABCB5; ENSG00000004846; TAA
AEKGAHAELM

SEQ ID NO: 137 - protein, 9 aa, Homo sapiens
  misc_feature: Table A; Target 137; HLA-B*44:02; ABCB5; ENSG00000004846; TAA
AELMAKRGL

SEQ ID NO: 138 - protein, 9 aa, Homo sapiens
  misc_feature: Table A; Target 138; HLA-B*44:03; ABCB5; ENSG00000004846; TAA
AELMAKRGL

SEQ ID NO: 139 - protein, 10 aa, Homo sapiens
  misc_feature: Table A; Target 139; HLA-B*44:02; ABCB5; ENSG00000004846; TAA
AELMAKRGLY

SEQ ID NO: 140 - protein, 10 aa, Homo sapiens
  misc_feature: Table A; Target 140; HLA-B*44:03; ABCB5; ENSG00000004846; TAA
AELMAKRGLY

SEQ ID NO: 141 - protein, 11 aa, Homo sapiens
  misc_feature: Table A; Target 141; HLA-B*44:02; ABCB5; ENSG00000004846; TAA
AELMAKRGLYY

SEQ ID NO: 142 - protein, 11 aa, Homo sapiens
  misc_feature: Table A; Target 142; HLA-B*44:03; ABCB5; ENSG00000004846; TAA
AELMAKRGLYY

SEQ ID NO: 143 - protein, 8 aa, Homo sapiens
  misc_feature: Table A; Target 143; HLA-A*29:02; ABCB5; ENSG00000004846; TAA
AFSHAFIY

SEQ ID NO: 144 - protein, 9 aa, Homo sapiens
  misc_feature: Table A; Target 144; HLA-A*23:01; ABCB5; ENSG00000004846; TAA
AFSHAFIYF

SEQ ID NO: 145 - protein, 9 aa, Homo sapiens
  misc_feature: Table A; Target 145; HLA-A*24:02; ABCB5; ENSG00000004846; TAA
AFSHAFIYF

SEQ ID NO: 146 - protein, 9 aa, Homo sapiens
  misc_feature: Table A; Target 146; HLA-A*29:02; ABCB5; ENSG00000004846; TAA
AFSHAFIYF

SEQ ID NO: 147 - protein, 11 aa, Homo sapiens
  misc_feature: Table A; Target 147; HLA-A*29:02; ABCB5; ENSG00000004846; TAA
AFSHAFIYFAY

SEQ ID NO: 148 - protein, 9 aa, Homo sapiens
  misc_feature: Table A; Target 148; HLA-B*40:01; ABCB5; ENSG00000004846; TAA
AGAVAEEVL

SEQ ID NO: 149 - protein, 9 aa, Homo sapiens
  misc_feature: Table A; Target 149; HLA-C*01:02; ABCB5; ENSG00000004846; TAA
AGAVAEEVL

SEQ ID NO: 150 - protein, 8 aa, Homo sapiens
  misc_feature: Table A; Target 150; HLA-A*30:02; ABCB5; ENSG00000004846; TAA
AGFRFGAY

SEQ ID NO: 151 - protein, 9 aa, Homo sapiens
  misc_feature: Table A; Target 151; HLA-B*08:01; ABCB5; ENSG00000004846; TAA
AGKIATEAL

SEQ ID NO: 152 - protein, 9 aa, Homo sapiens
  misc_feature: Table A; Target 152; HLA-B*15:01; ABCB5; ENSG00000004846; TAA
AGKIATEAL

SEQ ID NO: 153 - protein, 9 aa, Homo sapiens
  misc_feature: Table A; Target 153; HLA-B*40:02; ABCB5; ENSG00000004846; TAA
AGKIATEAL

SEQ ID NO: 154 - protein, 9 aa, Homo sapiens
  misc_feature: Table A; Target 154; HLA-B*46:01; ABCB5; ENSG00000004846; TAA
AGKIATEAL

SEQ ID NO: 155 - protein, 9 aa, Homo sapiens
  misc_feature: Table A; Target 155; HLA-C*01:02; ABCB5; ENSG00000004846; TAA
AGKIATEAL

SEQ ID NO: 156 - protein, 9 aa, Homo sapiens
  misc_feature: Table A; Target 156; HLA-C*14:02; ABCB5; ENSG00000004846; TAA
AGKIATEAL

SEQ ID NO: 157 - protein, 8 aa, Homo sapiens
  misc_feature: Table A; Target 157; HLA-B*13:02; ABCB5; ENSG00000004846; TAA
AGYKPESI

SEQ ID NO: 158 - protein, 9 aa, Homo sapiens
  misc_feature: Table A; Target 158; HLA-B*27:05; ABCB5; ENSG00000004846; TAA
AHAELMAKR

SEQ ID NO: 159 - protein, 9 aa, Homo sapiens
  misc_feature: Table A; Target 159; HLA-C*07:06; ABCB5; ENSG00000004846; TAA
AHAELMAKR

SEQ ID NO: 160 - protein, 9 aa, Homo sapiens
  misc_feature: Table A; Target 160; HLA-A*03:01; ABCB5; ENSG00000004846; TAA
AIARALLQK

SEQ ID NO: 161 - protein, 9 aa, Homo sapiens
  misc_feature: Table A; Target 161; HLA-A*03:02; ABCB5; ENSG00000004846; TAA
AIARALLQK

SEQ ID NO: 162 - protein, 9 aa, Homo sapiens
  misc_feature: Table A; Target 162; HLA-A*11:01; ABCB5; ENSG00000004846; TAA
AIARALLQK

SEQ ID NO: 163 - protein, 8 aa, Homo sapiens
  misc_feature: Table A; Target 163; HLA-A*32:01; ABCB5; ENSG00000004846; TAA
AIARGAAF

SEQ ID NO: 164 - protein, 8 aa, Homo sapiens
  misc_feature: Table A; Target 164; HLA-B*15:01; ABCB5; ENSG00000004846; TAA
AIARGAAF

SEQ ID NO: 165 - protein, 8 aa, Homo sapiens
  misc_feature: Table A; Target 165; HLA-B*46:01; ABCB5; ENSG00000004846; TAA
AIARGAAF

SEQ ID NO: 166 - protein, 8 aa, Homo sapiens
  misc_feature: Table A; Target 166; HLA-C*01:02; ABCB5; ENSG00000004846; TAA
AIARGAAF

SEQ ID NO: 167 - protein, 8 aa, Homo sapiens
  misc_feature: Table A; Target 167; HLA-C*03:04; ABCB5; ENSG00000004846; TAA
AIARGAAF

SEQ ID NO: 168 - protein, 8 aa, Homo sapiens
  misc_feature: Table A; Target 168; HLA-C*14:02; ABCB5; ENSG00000004846; TAA
AIARGAAF

SEQ ID NO: 169 - protein, 8 aa, Homo sapiens
  misc_feature: Table A; Target 169; HLA-C*16:01; ABCB5; ENSG00000004846; TAA
AIARGAAF

SEQ ID NO: 170 - protein, 9 aa, Homo sapiens
  misc_feature: Table A; Target 170; HLA-B*13:02; ABCB5; ENSG00000004846; TAA
AIAYGAMAI

SEQ ID NO: 171 - protein, 9 aa, Homo sapiens
  misc_feature: Table A; Target 171; HLA-C*01:02; ABCB5; ENSG00000004846; TAA
AIAYGAMAI

SEQ ID NO: 172 - protein, 11 aa, Homo sapiens
  misc_feature: Table A; Target 172; HLA-A*02:04; ABCB5; ENSG00000004846; TAA
AIQNADLIVVL

SEQ ID NO: 173 - protein, 9 aa, Homo sapiens
  misc_feature: Table A; Target 173; HLA-A*02:01; ABCB5; ENSG00000004846; TAA
AIVPQEPVL

SEQ ID NO: 174 - protein, 9 aa, Homo sapiens
  misc_feature: Table A; Target 174; HLA-A*02:04; ABCB5; ENSG00000004846; TAA
AIVPQEPVL

SEQ ID NO: 175 - protein, 9 aa, Homo sapiens
  misc_feature: Table A; Target 175; HLA-A*23:01; ABCB5; ENSG00000004846; TAA
AIVPQEPVL

SEQ ID NO: 176 - protein, 9 aa, Homo sapiens
  misc_feature: Table A; Target 176; HLA-A*30:01; ABCB5; ENSG00000004846; TAA
AIVPQEPVL

SEQ ID NO: 177 - protein, 9 aa, Homo sapiens
  misc_feature: Table A; Target 177; HLA-B*15:01; ABCB5; ENSG00000004846; TAA
AIVPQEPVL

SEQ ID NO: 178 - protein, 9 aa, Homo sapiens
  misc_feature: Table A; Target 178; HLA-B*15:03; ABCB5; ENSG00000004846; TAA
AIVPQEPVL

SEQ ID NO: 179 - protein, 9 aa, Homo sapiens
  misc_feature: Table A; Target 179; HLA-B*35:03; ABCB5; ENSG00000004846; TAA
AIVPQEPVL

SEQ ID NO: 180 - protein, 9 aa, Homo sapiens
  misc_feature: Table A; Target 180; HLA-B*38:01; ABCB5; ENSG00000004846; TAA
AIVPQEPVL

SEQ ID NO: 181 - protein, 9 aa, Homo sapiens
  misc_feature: Table A; Target 181; HLA-B*39:01; ABCB5; ENSG00000004846; TAA
AIVPQEPVL

SEQ ID NO: 182 - protein, 9 aa, Homo sapiens
  misc_feature: Table A; Target 182; HLA-B*40:01; ABCB5; ENSG00000004846; TAA
AIVPQEPVL

SEQ ID NO: 183 - protein, 9 aa, Homo sapiens
  misc_feature: Table A; Target 183; HLA-B*58:01; ABCB5; ENSG00000004846; TAA
AIVPQEPVL

SEQ ID NO: 184 - protein, 9 aa, Homo sapiens
  misc_feature: Table A; Target 184; HLA-C*02:02; ABCB5; ENSG00000004846; TAA
AIVPQEPVL

SEQ ID NO: 185 - protein, 9 aa, Homo sapiens
  misc_feature: Table A; Target 185; HLA-C*03:03; ABCB5; ENSG00000004846; TAA
AIVPQEPVL

SEQ ID NO: 186 - protein, 9 aa, Homo sapiens
  misc_feature: Table A; Target 186; HLA-C*03:04; ABCB5; ENSG00000004846; TAA
AIVPQEPVL

SEQ ID NO: 187 - protein, 9 aa, Homo sapiens
  misc_feature: Table A; Target 187; HLA-C*07:04; ABCB5; ENSG00000004846; TAA
AIVPQEPVL

SEQ ID NO: 188 - protein, 9 aa, Homo sapiens
  misc_feature: Table A; Target 188; HLA-C*16:04; ABCB5; ENSG00000004846; TAA
AIVPQEPVL

SEQ ID NO: 189 - protein, 10 aa, Homo sapiens
  misc_feature: Table A; Target 189; HLA-A*23:01; ABCB5; ENSG00000004846; TAA
AIVPQEPVLF

SEQ ID NO: 190 - protein, 10 aa, Homo sapiens
  misc_feature: Table A; Target 190; HLA-B*58:01; ABCB5; ENSG00000004846; TAA
AIVPQEPVLF

SEQ ID NO: 191 - protein, 9 aa, Homo sapiens
  misc_feature: Table A; Target 191; HLA-B*15:03; ABCB5; ENSG00000004846; TAA
AKSGAAHLF

SEQ ID NO: 192 - protein, 8 aa, Homo sapiens
  misc_feature: Table A; Target 192; HLA-C*05:01; ABCB5; ENSG00000004846; TAA
ALDNDSEK

SEQ ID NO: 193 - protein, 9 aa, Homo sapiens
  misc_feature: Table A; Target 193; HLA-A*02:01; ABCB5; ENSG00000004846; TAA
ALDNDSEKV

SEQ ID NO: 194 - protein, 9 aa, Homo sapiens
  misc_feature: Table A; Target 194; HLA-A*02:07; ABCB5; ENSG00000004846; TAA
ALDNDSEKV

SEQ ID NO: 195 - protein, 9 aa, Homo sapiens
  misc_feature: Table A; Target 195; HLA-B*55:01; ABCB5; ENSG00000004846; TAA
ALDNDSEKV

SEQ ID NO: 196 - protein, 9 aa, Homo sapiens
  misc_feature: Table A; Target 196; HLA-C*05:01; ABCB5; ENSG00000004846; TAA
ALDNDSEKV

SEQ ID NO: 197 - protein, 10 aa, Homo sapiens
  misc_feature: Table A; Target 197; HLA-A*02:01; ABCB5; ENSG00000004846; TAA
ALDNDSEKVV

SEQ ID NO: 198 - protein, 9 aa, Homo sapiens
  misc_feature: Table A; Target 198; HLA-B*55:01; ABCB5; ENSG00000004846; TAA
ALDSESKSA

SEQ ID NO: 199 - protein, 10 aa, Homo sapiens
  misc_feature: Table A; Target 199; HLA-A*01:01; ABCB5; ENSG00000004846; TAA
ALDSESKSAV

SEQ ID NO: 200 - protein, 10 aa, Homo sapiens
  misc_feature: Table A; Target 200; HLA-A*02:01; ABCB5; ENSG00000004846; TAA
ALDSESKSAV

SEQ ID NO: 201 - protein, 10 aa, Homo sapiens
  misc_feature: Table A; Target 201; HLA-B*55:01; ABCB5; ENSG00000004846; TAA
ALDSESKSAV

SEQ ID NO: 202 - protein, 11 aa, Homo sapiens
  misc_feature: Table A; Target 202; HLA-A*01:01; ABCB5; ENSG00000004846; TAA
ALDSESKSAVQ

SEQ ID NO: 203 - protein, 11 aa, Homo sapiens
  misc_feature: Table A; Target 203; HLA-A*02:01; ABCB5; ENSG00000004846; TAA
ALENIRTIVSL

SEQ ID NO: 204 - protein, 11 aa, Homo sapiens
  misc_feature: Table A; Target 204; HLA-A*02:04; ABCB5; ENSG00000004846; TAA
ALENIRTIVSL

SEQ ID NO: 205 - protein, 11 aa, Homo sapiens
  misc_feature: Table A; Target 205; HLA-A*02:07; ABCB5; ENSG00000004846; TAA
ALENIRTIVSL

SEQ ID NO: 206 - protein, 9 aa, Homo sapiens
  misc_feature: Table A; Target 206; HLA-A*02:01; ABCB5; ENSG00000004846; TAA
ALIFGYIQI

SEQ ID NO: 207 - protein, 9 aa, Homo sapiens
  misc_feature: Table A; Target 207; HLA-A*02:04; ABCB5; ENSG00000004846; TAA
ALIFGYIQI

SEQ ID NO: 208 - protein, 9 aa, Homo sapiens
  misc_feature: Table A; Target 208; HLA-A*02:01; ABCB5; ENSG00000004846; TAA
ALLEKKPNI

SEQ ID NO: 209 - protein, 9 aa, Homo sapiens
  misc_feature: Table A; Target 209; HLA-A*02:04; ABCB5; ENSG00000004846; TAA
ALLEKKPNI

SEQ ID NO: 210 - protein, 9 aa, Homo sapiens
  misc_feature: Table A; Target 210; HLA-B*55:01; ABCB5; ENSG00000004846; TAA
ALLEKKPNI

SEQ ID NO: 211 - protein, 11 aa, Homo sapiens
  misc_feature: Table A; Target 211; HLA-A*02:01; ABCB5; ENSG00000004846; TAA
ALLQKPKILLL

SEQ ID NO: 212 - protein, 11 aa, Homo sapiens
  misc_feature: Table A; Target 212; HLA-A*02:03; ABCB5; ENSG00000004846; TAA
ALLQKPKILLL

SEQ ID NO: 213 - protein, 11 aa, Homo sapiens
  misc_feature: Table A; Target 213; HLA-A*02:04; ABCB5; ENSG00000004846; TAA
ALLQKPKILLL

SEQ ID NO: 214 - protein, 10 aa, Homo sapiens
  misc_feature: Table A; Target 214; HLA-A*03:01; ABCB5; ENSG00000004846; TAA
ALVGLNGSGK

SEQ ID NO: 215 - protein, 10 aa, Homo sapiens
  misc_feature: Table A; Target 215; HLA-A*03:02; ABCB5; ENSG00000004846; TAA
ALVGLNGSGK

SEQ ID NO: 216 - protein, 11 aa, Homo sapiens
  misc_feature: Table A; Target 216; HLA-A*02:04; ABCB5; ENSG00000004846; TAA
ALVRNPKILIL

SEQ ID NO: 217 - protein, 8 aa, Homo sapiens
  misc_feature: Table A; Target 217; HLA-B*37:01; ABCB5; ENSG00000004846; TAA
AMAIGETL

SEQ ID NO: 218 - protein, 8 aa, Homo sapiens
  misc_feature: Table A; Target 218; HLA-C*01:02; ABCB5; ENSG00000004846; TAA
AMAIGETL

SEQ ID NO: 219 - protein, 8 aa, Homo sapiens
  misc_feature: Table A; Target 219; HLA-C*14:02; ABCB5; ENSG00000004846; TAA
AMAIGETL

SEQ ID NO: 220 - protein, 9 aa, Homo sapiens
  misc_feature: Table A; Target 220; HLA-A*02:01; ABCB5; ENSG00000004846; TAA
AMAIGETLV

SEQ ID NO: 221 - protein, 9 aa, Homo sapiens
  misc_feature: Table A; Target 221; HLA-A*02:03; ABCB5; ENSG00000004846; TAA
AMAIGETLV

SEQ ID NO: 222 - protein, 9 aa, Homo sapiens
  misc_feature: Table A; Target 222; HLA-B*13:02; ABCB5; ENSG00000004846; TAA
AMAIGETLV

SEQ ID NO: 223 - protein, 8 aa, Homo sapiens
  misc_feature: Table A; Target 223; HLA-A*03:01; ABCB5; ENSG00000004846; TAA
AMTGFANK

SEQ ID NO: 224 - protein, 8 aa, Homo sapiens
  misc_feature: Table A; Target 224; HLA-A*03:02; ABCB5; ENSG00000004846; TAA
AMTGFANK

SEQ ID NO: 225 - protein, 9 aa, Homo sapiens
  misc_feature: Table A; Target 225; HLA-A*24:02; ABCB5; ENSG00000004846; TAA
ANAANIHSF

SEQ ID NO: 226 - protein, 9 aa, Homo sapiens
  misc_feature: Table A; Target 226; HLA-A*25:01; ABCB5; ENSG00000004846; TAA
ANAANIHSF

SEQ ID NO: 227 - protein, 9 aa, Homo sapiens
  misc_feature: Table A; Target 227; HLA-A*26:01; ABCB5; ENSG00000004846; TAA
ANAANIHSF

SEQ ID NO: 228 - protein, 9 aa, Homo sapiens
  misc_feature: Table A; Target 228; HLA-A*30:02; ABCB5; ENSG00000004846; TAA
ANAANIHSF

SEQ ID NO: 229 - protein, 9 aa, Homo sapiens
  misc_feature: Table A; Target 229; HLA-A*32:01; ABCB5; ENSG00000004846; TAA
ANAANIHSF

SEQ ID NO: 230 - protein, 9 aa, Homo sapiens
  misc_feature: Table A; Target 230; HLA-B*15:01; ABCB5; ENSG00000004846; TAA
ANAANIHSF

SEQ ID NO: 231 - protein, 9 aa, Homo sapiens
  misc_feature: Table A; Target 231; HLA-B*15:03; ABCB5; ENSG00000004846; TAA
ANAANIHSF

SEQ ID NO: 232 - protein, 9 aa, Homo sapiens
  misc_feature: Table A; Target 232; HLA-B*37:01; ABCB5; ENSG00000004846; TAA
ANAANIHSF

SEQ ID NO: 233 - protein, 9 aa, Homo sapiens
  misc_feature: Table A; Target 233; HLA-B*44:02; ABCB5; ENSG00000004846; TAA
ANAANIHSF

SEQ ID NO: 234 - protein, 9 aa, Homo sapiens
  misc_feature: Table A; Target 234; HLA-B*44:03; ABCB5; ENSG00000004846; TAA
ANAANIHSF

SEQ ID NO: 235 - protein, 9 aa, Homo sapiens
  misc_feature: Table A; Target 235; HLA-B*46:01; ABCB5; ENSG00000004846; TAA
ANAANIHSF

SEQ ID NO: 236 - protein, 9 aa, Homo sapiens
  misc_feature: Table A; Target 236; HLA-B*57:01; ABCB5; ENSG00000004846; TAA
ANAANIHSF

SEQ ID NO: 237 - protein, 9 aa, Homo sapiens
  misc_feature: Table A; Target 237; HLA-B*58:01; ABCB5; ENSG00000004846; TAA
ANAANIHSF

SEQ ID NO: 238 - protein, 9 aa, Homo sapiens
  misc_feature: Table A; Target 238; HLA-C*02:02; ABCB5; ENSG00000004846; TAA
ANAANIHSF

SEQ ID NO: 239 - protein, 9 aa, Homo sapiens
  misc_feature: Table A; Target 239; HLA-C*14:02; ABCB5; ENSG00000004846; TAA
ANAANIHSF

SEQ ID NO: 240 - protein, 9 aa, Homo sapiens
  misc_feature: Table A; Target 240; HLA-C*16:01; ABCB5; ENSG00000004846; TAA
ANAANIHSF

SEQ ID NO: 241 - protein, 9 aa, Homo sapiens
  misc_feature: Table A; Target 241; HLA-C*16:02; ABCB5; ENSG00000004846; TAA
ANAANIHSF

SEQ ID NO: 242 - protein, 9 aa, Homo sapiens
  misc_feature: Table A; Target 242; HLA-C*16:04; ABCB5; ENSG00000004846; TAA
ANAANIHSF

SEQ ID NO: 243 - protein, 8 aa, Homo sapiens
  misc_feature: Table A; Target 243; HLA-B*08:01; ABCB5; ENSG00000004846; TAA
ANKDKQEL

SEQ ID NO: 244 - protein, 8 aa, Homo sapiens
  misc_feature: Table A; Target 244; HLA-B*56:01; ABCB5; ENSG00000004846; TAA
APVLAVTG

SEQ ID NO: 245 - protein, 9 aa, Homo sapiens
  misc_feature: Table A; Target 245; HLA-B*07:02; ABCB5; ENSG00000004846; TAA
APVLAVTGM

SEQ ID NO: 246 - protein, 9 aa, Homo sapiens
  misc_feature: Table A; Target 246; HLA-B*35:01; ABCB5; ENSG00000004846; TAA
APVLAVTGM

SEQ ID NO: 247 - protein, 9 aa, Homo sapiens
  misc_feature: Table A; Target 247; HLA-B*35:03; ABCB5; ENSG00000004846; TAA
APVLAVTGM

SEQ ID NO: 248 - protein, 9 aa, Homo sapiens
  misc_feature: Table A; Target 248; HLA-B*55:01; ABCB5; ENSG00000004846; TAA
APVLAVTGM

SEQ ID NO: 249 - protein, 9 aa, Homo sapiens
  misc_feature: Table A; Target 249; HLA-B*56:01; ABCB5; ENSG00000004846; TAA
APVLAVTGM

SEQ ID NO: 250 - protein, 9 aa, Homo sapiens
  misc_feature: Table A; Target 250; HLA-C*07:02; ABCB5; ENSG00000004846; TAA
APVLAVTGM

SEQ ID NO: 251 - protein, 9 aa, Homo sapiens
  misc_feature: Table A; Target 251; HLA-A*01:01; ABCB5; ENSG00000004846; TAA
AQEKELQRY

SEQ ID NO: 252 - protein, 9 aa, Homo sapiens
  misc_feature: Table A; Target 252; HLA-A*30:02; ABCB5; ENSG00000004846; TAA
AQEKELQRY

SEQ ID NO: 253 - protein, 9 aa, Homo sapiens
  misc_feature: Table A; Target 253; HLA-A*32:01; ABCB5; ENSG00000004846; TAA
AQEKELQRY

SEQ ID NO: 254 - protein, 9 aa, Homo sapiens
  misc_feature: Table A; Target 254; HLA-B*15:01; ABCB5; ENSG00000004846; TAA
AQEKELQRY

SEQ ID NO: 255 - protein, 9 aa, Homo sapiens
  misc_feature: Table A; Target 255; HLA-B*15:03; ABCB5; ENSG00000004846; TAA
AQEKELQRY

SEQ ID NO: 256 - protein, 9 aa, Homo sapiens
  misc_feature: Table A; Target 256; HLA-B*27:02; ABCB5; ENSG00000004846; TAA
AQEKELQRY

SEQ ID NO: 257 - protein, 9 aa, Homo sapiens
  misc_feature: Table A; Target 257; HLA-B*44:02; ABCB5; ENSG00000004846; TAA
AQEKELQRY

SEQ ID NO: 258 - protein, 9 aa, Homo sapiens
  misc_feature: Table A; Target 258; HLA-B*44:03; ABCB5; ENSG00000004846; TAA
AQEKELQRY

SEQ ID NO: 259 - protein, 9 aa, Homo sapiens
  misc_feature: Table A; Target 259; HLA-B*58:01; ABCB5; ENSG00000004846; TAA
AQEKELQRY

SEQ ID NO: 260 - protein, 9 aa, Homo sapiens
  misc_feature: Table A; Target 260; HLA-C*07:04; ABCB5; ENSG00000004846; TAA
AQEKELQRY

SEQ ID NO: 261 - protein, 9 aa, Homo sapiens
  misc_feature: Table A; Target 261; HLA-C*16:02; ABCB5; ENSG00000004846; TAA
AQEKELQRY

SEQ ID NO: 262 - protein, 8 aa, Homo sapiens
  misc_feature: Table A; Target 262; HLA-A*30:02; ABCB5; ENSG00000004846; TAA
AQIIGSCY

SEQ ID NO: 263 - protein, 8 aa, Homo sapiens
  misc_feature: Table A; Target 263; HLA-B*13:02; ABCB5; ENSG00000004846; TAA
AQIIGSCY

SEQ ID NO: 264 - protein, 8 aa, Homo sapiens
  misc_feature: Table A; Target 264; HLA-B*15:01; ABCB5; ENSG00000004846; TAA
AQIIGSCY

SEQ ID NO: 265 - protein, 8 aa, Homo sapiens
  misc_feature: Table A; Target 265; HLA-B*15:03; ABCB5; ENSG00000004846; TAA
AQIIGSCY

SEQ ID NO: 266 - protein, 8 aa, Homo sapiens
  misc_feature: Table A; Target 266; HLA-B*18:01; ABCB5; ENSG00000004846; TAA
AQIIGSCY

SEQ ID NO: 267 - protein, 8 aa, Homo sapiens
  misc_feature: Table A; Target 267; HLA-B*27:02; ABCB5; ENSG00000004846; TAA
AQIIGSCY

SEQ ID NO: 268 - protein, 8 aa, Homo sapiens
  misc_feature: Table A; Target 268; HLA-B*46:01; ABCB5; ENSG00000004846; TAA
AQIIGSCY

SEQ ID NO: 269 - protein, 8 aa, Homo sapiens
  misc_feature: Table A; Target 269; HLA-C*07:04; ABCB5; ENSG00000004846; TAA
AQIIGSCY

SEQ ID NO: 270 - protein, 8 aa, Homo sapiens
  misc_feature: Table A; Target 270; HLA-C*14:02; ABCB5; ENSG00000004846; TAA
AQIIGSCY

SEQ ID NO: 271 - protein, 8 aa, Homo sapiens
  misc_feature: Table A; Target 271; HLA-C*16:04; ABCB5; ENSG00000004846; TAA
AQIIGSCY

SEQ ID NO: 272 - protein, 9 aa, Homo sapiens
  misc_feature: Table A; Target 272; HLA-B*13:02; ABCB5; ENSG00000004846; TAA
AQIIGSCYA

SEQ ID NO: 273 - protein, 10 aa, Homo sapiens
  misc_feature: Table A; Target 273; HLA-B*15:01; ABCB5; ENSG00000004846; TAA
AQIIGSCYAF

SEQ ID NO: 274 - protein, 10 aa, Homo sapiens
  misc_feature: Table A; Target 274; HLA-B*15:03; ABCB5; ENSG00000004846; TAA
AQIIGSCYAF

SEQ ID NO: 275 - protein, 11 aa, Homo sapiens
  misc_feature: Table A; Target 275; HLA-B*13:02; ABCB5; ENSG00000004846; TAA
AQIQGATGSRI

SEQ ID NO: 276 - protein, 11 aa, Homo sapiens
  misc_feature: Table A; Target 276; HLA-B*13:02; ABCB5; ENSG00000004846; TAA
AQMSGGQKQRI

SEQ ID NO: 277 - protein, 11 aa, Homo sapiens
  misc_feature: Table A; Target 277; HLA-B*38:01; ABCB5; ENSG00000004846; TAA
AQMSGGQKQRI

SEQ ID NO: 278 - protein, 9 aa, Homo sapiens
  misc_feature: Table A; Target 278; HLA-B*27:05; ABCB5; ENSG00000004846; TAA
ARALLQKPK

SEQ ID NO: 279 - protein, 9 aa, Homo sapiens
  misc_feature: Table A; Target 279; HLA-B*27:05; ABCB5; ENSG00000004846; TAA
ARALVRNPK

SEQ ID NO: 280 - protein, 9 aa, Homo sapiens
  misc_feature: Table A; Target 280; HLA-B*27:02; ABCB5; ENSG00000004846; TAA
AREANAYDF

SEQ ID NO: 281 - protein, 9 aa, Homo sapiens
  misc_feature: Table A; Target 281; HLA-B*27:05; ABCB5; ENSG00000004846; TAA
AREANAYDF

SEQ ID NO: 282 - protein, 9 aa, Homo sapiens
  misc_feature: Table A; Target 282; HLA-C*16:04; ABCB5; ENSG00000004846; TAA
AREANAYDF

SEQ ID NO: 283 - protein, 9 aa, Homo sapiens
  misc_feature: Table A; Target 283; HLA-C*12:03; ABCB5; ENSG00000004846; TAA
ASKGRTTIV

SEQ ID NO: 284 - protein, 10 aa, Homo sapiens
  misc_feature: Table A; Target 284; HLA-A*30:02; ABCB5; ENSG00000004846; TAA
ASKVSLGAVY

SEQ ID NO: 285 - protein, 10 aa, Homo sapiens
  misc_feature: Table A; Target 285; HLA-A*32:01; ABCB5; ENSG00000004846; TAA
ASKVSLGAVY

SEQ ID NO: 286 - protein, 10 aa, Homo sapiens
  misc_feature: Table A; Target 286; HLA-B*15:01; ABCB5; ENSG00000004846; TAA
ASKVSLGAVY

SEQ ID NO: 287 - protein, 10 aa, Homo sapiens
  misc_feature: Table A; Target 287; HLA-B*15:03; ABCB5; ENSG00000004846; TAA
ASKVSLGAVY

SEQ ID NO: 288 - protein, 10 aa, Homo sapiens
  misc_feature: Table A; Target 288; HLA-B*46:01; ABCB5; ENSG00000004846; TAA
ASKVSLGAVY

SEQ ID NO: 289 - protein, 11 aa, Homo sapiens
  misc_feature: Table A; Target 289; HLA-B*57:01; ABCB5; ENSG00000004846; TAA
ASKVSLGAVYF

SEQ ID NO: 290 - protein, 9 aa, Homo sapiens
  misc_feature: Table A; Target 290; HLA-C*12:03; ABCB5; ENSG00000004846; TAA
ATGSRIGVL

SEQ ID NO: 291 - protein, 11 aa, Homo sapiens
  misc_feature: Table A; Target 291; HLA-A*11:01; ABCB5; ENSG00000004846; TAA
ATSALDNDSEK

SEQ ID NO: 292 - protein, 10 aa, Homo sapiens
  misc_feature: Table A; Target 292; HLA-A*03:02; ABCB5; ENSG00000004846; TAA
ATSALDSESK

SEQ ID NO: 293 - protein, 10 aa, Homo sapiens
  misc_feature: Table A; Target 293; HLA-A*11:01; ABCB5; ENSG00000004846; TAA
ATSALDSESK

SEQ ID NO: 294 - protein, 10 aa, Homo sapiens
  misc_feature: Table A; Target 294; HLA-B*27:02; ABCB5; ENSG00000004846; TAA
ATSALDSESK

SEQ ID NO: 295 - protein, 10 aa, Homo sapiens
  misc_feature: Table A; Target 295; HLA-A*02:01; ABCB5; ENSG00000004846; TAA
AVAEEVLSSI

SEQ ID NO: 296 - protein, 10 aa, Homo sapiens
  misc_feature: Table A; Target 296; HLA-A*02:03; ABCB5; ENSG00000004846; TAA
AVAEEVLSSI

SEQ ID NO: 297 - protein, 10 aa, Homo sapiens
  misc_feature: Table A; Target 297; HLA-A*03:01; ABCB5; ENSG00000004846; TAA
AVAEEVLSSI

SEQ ID NO: 298 - protein, 10 aa, Homo sapiens
  misc_feature: Table A; Target 298; HLA-A*25:01; ABCB5; ENSG00000004846; TAA
AVAEEVLSSI

SEQ ID NO: 299 - protein, 10 aa, Homo sapiens
  misc_feature: Table A; Target 299; HLA-A*26:01; ABCB5; ENSG00000004846; TAA
AVAEEVLSSI

SEQ ID NO: 300 - protein, 10 aa, Homo sapiens
  misc_feature: Table A; Target 300; HLA-B*13:02; ABCB5; ENSG00000004846; TAA
AVAEEVLSSI

SEQ ID NO: 301 - protein, 10 aa, Homo sapiens
  misc_feature: Table A; Target 301; HLA-C*07:06; ABCB5; ENSG00000004846; TAA
AVAEEVLSSI

SEQ ID NO: 302 - protein, 11 aa, Homo sapiens
  misc_feature: Table A; Target 302; HLA-A*11:01; ABCB5; ENSG00000004846; TAA
AVAEEVLSSIR

SEQ ID NO: 303 - protein, 11 aa, Homo sapiens
  misc_feature: Table A; Target 303; HLA-A*33:03; ABCB5; ENSG00000004846; TAA
AVAEEVLSSIR

SEQ ID NO: 304 - protein, 11 aa, Homo sapiens
  misc_feature: Table A; Target 304; HLA-A*68:01; ABCB5; ENSG00000004846; TAA
AVAEEVLSSIR

SEQ ID NO: 305 - protein, 11 aa, Homo sapiens
  misc_feature: Table A; Target 305; HLA-C*07:06; ABCB5; ENSG00000004846; TAA
AVAEEVLSSIR

SEQ ID NO: 306 - protein, 11 aa, Homo sapiens
  misc_feature: Table A; Target 306; HLA-A*29:02; ABCB5; ENSG00000004846; TAA
AVFFSVIHSSY

SEQ ID NO: 307 - protein, 11 aa, Homo sapiens
  misc_feature: Table A; Target 307; HLA-A*30:02; ABCB5; ENSG00000004846; TAA
AVFFSVIHSSY

SEQ ID NO: 308 - protein, 9 aa, Homo sapiens
  misc_feature: Table A; Target 308; HLA-A*11:01; ABCB5; ENSG00000004846; TAA
AVGSIEIFR

SEQ ID NO: 309 - protein, 9 aa, Homo sapiens
  misc_feature: Table A; Target 309; HLA-A*31:01; ABCB5; ENSG00000004846; TAA
AVGSIEIFR

SEQ ID NO: 310 - protein, 9 aa, Homo sapiens
  misc_feature: Table A; Target 310; HLA-A*33:03; ABCB5; ENSG00000004846; TAA
AVGSIEIFR

SEQ ID NO: 311 - protein, 9 aa, Homo sapiens
  misc_feature: Table A; Target 311; HLA-A*68:01; ABCB5; ENSG00000004846; TAA
AVGSIEIFR

SEQ ID NO: 312 - protein, 9 aa, Homo sapiens
  misc_feature: Table A; Target 312; HLA-C*07:06; ABCB5; ENSG00000004846; TAA
AVGSIEIFR

SEQ ID NO: 313 - protein, 10 aa, Homo sapiens
  misc_feature: Table A; Target 313; HLA-A*02:04; ABCB5; ENSG00000004846; TAA
AVGSIEIFRF

SEQ ID NO: 314 - protein, 10 aa, Homo sapiens
  misc_feature: Table A; Target 314; HLA-A*29:02; ABCB5; ENSG00000004846; TAA
AVGSIEIFRF

SEQ ID NO: 315 - protein, 10 aa, Homo sapiens
  misc_feature: Table A; Target 315; HLA-A*02:07; ABCB5; ENSG00000004846; TAA
AVPHFETFAI

SEQ ID NO: 316 - protein, 8 aa, Homo sapiens
  misc_feature: Table A; Target 316; HLA-A*03:02; ABCB5; ENSG00000004846; TAA
AVQAALEK

SEQ ID NO: 317 - protein, 8 aa, Homo sapiens
  misc_feature: Table A; Target 317; HLA-A*11:01; ABCB5; ENSG00000004846; TAA
AVQAALEK

SEQ ID NO: 318 - protein, 8 aa, Homo sapiens
  misc_feature: Table A; Target 318; HLA-B*27:02; ABCB5; ENSG00000004846; TAA
AVQAALEK

SEQ ID NO: 319 - protein, 9 aa, Homo sapiens
  misc_feature: Table A; Target 319; HLA-B*56:01; ABCB5; ENSG00000004846; TAA
AVQAALEKA

SEQ ID NO: 320 - protein, 11 aa, Homo sapiens
  misc_feature: Table A; Target 320; HLA-A*03:02; ABCB5; ENSG00000004846; TAA
AVQAALEKASK

SEQ ID NO: 321 - protein, 11 aa, Homo sapiens
  misc_feature: Table A; Target 321; HLA-A*11:01; ABCB5; ENSG00000004846; TAA
AVQAALEKASK

SEQ ID NO: 322 - protein, 9 aa, Homo sapiens
  misc_feature: Table A; Target 322; HLA-A*02:03; ABCB5; ENSG00000004846; TAA
AVTGMIETA

SEQ ID NO: 323 - protein, 9 aa, Homo sapiens
  misc_feature: Table A; Target 323; HLA-B*55:01; ABCB5; ENSG00000004846; TAA
AVTGMIETA

SEQ ID NO: 324 - protein, 9 aa, Homo sapiens
  misc_feature: Table A; Target 324; HLA-B*56:01; ABCB5; ENSG00000004846; TAA
AVTGMIETA

SEQ ID NO: 325 - protein, 10 aa, Homo sapiens
  misc_feature: Table A; Target 325; HLA-A*29:02; ABCB5; ENSG00000004846; TAA
AVYFFMNGTY

SEQ ID NO: 326 - protein, 10 aa, Homo sapiens
  misc_feature: Table A; Target 326; HLA-A*30:02; ABCB5; ENSG00000004846; TAA
AVYFFMNGTY

SEQ ID NO: 327 - protein, 8 aa, Homo sapiens
  misc_feature: Table A; Target 327; HLA-A*23:01; ABCB5; ENSG00000004846; TAA
AYAAGFRF

SEQ ID NO: 328 - protein, 8 aa, Homo sapiens
  misc_feature: Table A; Target 328; HLA-A*24:02; ABCB5; ENSG00000004846; TAA
AYAAGFRF

SEQ ID NO: 329 - protein, 8 aa, Homo sapiens
  misc_feature: Table A; Target 329; HLA-B*35:01; ABCB5; ENSG00000004846; TAA
AYDFIMEF

SEQ ID NO: 330 - protein, 8 aa, Homo sapiens
  misc_feature: Table A; Target 330; HLA-C*04:01; ABCB5; ENSG00000004846; TAA
AYDFIMEF

SEQ ID NO: 331 - protein, 11 aa, Homo sapiens
  misc_feature: Table A; Target 331; HLA-A*23:01; ABCB5; ENSG00000004846; TAA
AYGAMAIGETL

SEQ ID NO: 332 - protein, 11 aa, Homo sapiens
  misc_feature: Table A; Target 332; HLA-A*24:02; ABCB5; ENSG00000004846; TAA
AYGAMAIGETL

SEQ ID NO: 333 - protein, 9 aa, Homo sapiens
  misc_feature: Table A; Target 333; HLA-C*14:02; ABCB5; ENSG00000004846; TAA
AYGDNSRVV

SEQ ID NO: 334 - protein, 9 aa, Homo sapiens
  misc_feature: Table A; Target 334; HLA-C*16:01; ABCB5; ENSG00000004846; TAA
AYGDNSRVV

SEQ ID NO: 335 - protein, 9 aa, Homo sapiens
  misc_feature: Table A; Target 335; HLA-C*16:02; ABCB5; ENSG00000004846; TAA
AYGDNSRVV

SEQ ID NO: 336 - protein, 9 aa, Homo sapiens
  misc_feature: Table A; Target 336; HLA-A*23:01; ABCB5; ENSG00000004846; TAA
AYLIQAGRM

SEQ ID NO: 337 - protein, 9 aa, Homo sapiens
  misc_feature: Table A; Target 337; HLA-A*24:02; ABCB5; ENSG00000004846; TAA
AYLIQAGRM

SEQ ID NO: 338 - protein, 9 aa, Homo sapiens
  misc_feature: Table A; Target 338; HLA-C*14:02; ABCB5; ENSG00000004846; TAA
AYLIQAGRM

SEQ ID NO: 339 - protein, 8 aa, Homo sapiens
  misc_feature: Table A; Target 339; HLA-C*14:02; ABCB5; ENSG00000004846; TAA
AYSKAGAV

SEQ ID NO: 340 - protein, 9 aa, Homo sapiens
  misc_feature: Table A; Target 340; HLA-C*14:02; ABCB5; ENSG00000004846; TAA
AYSKAGAVA

SEQ ID NO: 341 - protein, 9 aa, Homo sapiens
  misc_feature: Table A; Target 341; HLA-A*24:02; ABCB5; ENSG00000004846; TAA
CLPLMPLVL

SEQ ID NO: 342 - protein, 10 aa, Homo sapiens
  misc_feature: Table A; Target 342; HLA-A*29:02; ABCB5; ENSG00000004846; TAA
CLVQTNTTNY

SEQ ID NO: 343 - protein, 10 aa, Homo sapiens
  misc_feature: Table A; Target 343; HLA-A*30:02; ABCB5; ENSG00000004846; TAA
CLVQTNTTNY

SEQ ID NO: 344 - protein, 10 aa, Homo sapiens
  misc_feature: Table A; Target 344; HLA-B*15:01; ABCB5; ENSG00000004846; TAA
CLVQTNTTNY

SEQ ID NO: 345 - protein, 10 aa, Homo sapiens
  misc_feature: Table A; Target 345; HLA-B*15:03; ABCB5; ENSG00000004846; TAA
CLVQTNTTNY

SEQ ID NO: 346 - protein, 10 aa, Homo sapiens
  misc_feature: Table A; Target 346; HLA-B*46:01; ABCB5; ENSG00000004846; TAA
CLVQTNTTNY

SEQ ID NO: 347 - protein, 10 aa, Homo sapiens
  misc_feature: Table A; Target 347; HLA-C*07:04; ABCB5; ENSG00000004846; TAA
CLVQTNTTNY

SEQ ID NO: 348 - protein, 9 aa, Homo sapiens
  misc_feature: Table A; Target 348; HLA-A*01:01; ABCB5; ENSG00000004846; TAA
CSIAENIAY

SEQ ID NO: 349 - protein, 9 aa, Homo sapiens
  misc_feature: Table A; Target 349; HLA-A*29:02; ABCB5; ENSG00000004846; TAA
CSIAENIAY

SEQ ID NO: 350 - protein, 9 aa, Homo sapiens
  misc_feature: Table A; Target 350; HLA-A*30:02; ABCB5; ENSG00000004846; TAA
CSIAENIAY

SEQ ID NO: 351 - protein, 9 aa, Homo sapiens
  misc_feature: Table A; Target 351; HLA-B*15:01; ABCB5; ENSG00000004846; TAA
CSIAENIAY

SEQ ID NO: 352 - protein, 9 aa, Homo sapiens
  misc_feature: Table A; Target 352; HLA-B*15:03; ABCB5; ENSG00000004846; TAA
CSIAENIAY

SEQ ID NO: 353 - protein, 9 aa, Homo sapiens
  misc_feature: Table A; Target 353; HLA-B*27:05; ABCB5; ENSG00000004846; TAA
CSIAENIAY

SEQ ID NO: 354 - protein, 9 aa, Homo sapiens
  misc_feature: Table A; Target 354; HLA-B*35:01; ABCB5; ENSG00000004846; TAA
CSIAENIAY

SEQ ID NO: 355 - protein, 9 aa, Homo sapiens
  misc_feature: Table A; Target 355; HLA-B*46:01; ABCB5; ENSG00000004846; TAA
CSIAENIAY

SEQ ID NO: 356 - protein, 9 aa, Homo sapiens
  misc_feature: Table A; Target 356; HLA-B*58:01; ABCB5; ENSG00000004846; TAA
CSIAENIAY

SEQ ID NO: 357 - protein, 9 aa, Homo sapiens
  misc_feature: Table A; Target 357; HLA-C*02:02; ABCB5; ENSG00000004846; TAA
CSIAENIAY

SEQ ID NO: 358 - protein, 9 aa, Homo sapiens
  misc_feature: Table A; Target 358; HLA-C*07:04; ABCB5; ENSG00000004846; TAA
CSIAENIAY

SEQ ID NO: 359 - protein, 9 aa, Homo sapiens
  misc_feature: Table A; Target 359; HLA-C*12:03; ABCB5; ENSG00000004846; TAA
CSIAENIAY

SEQ ID NO: 360 - protein, 9 aa, Homo sapiens
  misc_feature: Table A; Target 360; HLA-C*16:01; ABCB5; ENSG00000004846; TAA
CSIAENIAY

SEQ ID NO: 361 - protein, 9 aa, Homo sapiens
  misc_feature: Table A; Target 361; HLA-C*16:04; ABCB5; ENSG00000004846; TAA
CSIAENIAY

SEQ ID NO: 362 - protein, 11 aa, Homo sapiens
  misc_feature: Table A; Target 362; HLA-A*24:02; ABCB5; ENSG00000004846; TAA
CYAFSHAFIYF

SEQ ID NO: 363 - protein, 8 aa, Homo sapiens
  misc_feature: Table A; Target 363; HLA-B*51:01; ABCB5; ENSG00000004846; TAA
DAEIYSMI

SEQ ID NO: 364 - protein, 9 aa, Homo sapiens
  misc_feature: Table A; Target 364; HLA-B*35:01; ABCB5; ENSG00000004846; TAA
DAEIYSMIF

SEQ ID NO: 365 - protein, 9 aa, Homo sapiens
  misc_feature: Table A; Target 365; HLA-B*35:03; ABCB5; ENSG00000004846; TAA
DAEIYSMIF

SEQ ID NO: 366 - protein, 9 aa, Homo sapiens
  misc_feature: Table A; Target 366; HLA-A*26:01; ABCB5; ENSG00000004846; TAA
DAKDFGIKR

SEQ ID NO: 367 - protein, 9 aa, Homo sapiens
  misc_feature: Table A; Target 367; HLA-A*31:01; ABCB5; ENSG00000004846; TAA
DAKDFGIKR

SEQ ID NO: 368 - protein, 9 aa, Homo sapiens
  misc_feature: Table A; Target 368; HLA-A*33:01; ABCB5; ENSG00000004846; TAA
DAKDFGIKR

SEQ ID NO: 369 - protein, 9 aa, Homo sapiens
  misc_feature: Table A; Target 369; HLA-A*33:03; ABCB5; ENSG00000004846; TAA
DAKDFGIKR

SEQ ID NO: 370 - protein, 9 aa, Homo sapiens
  misc_feature: Table A; Target 370; HLA-A*68:01; ABCB5; ENSG00000004846; TAA
DAKDFGIKR

SEQ ID NO: 371 - protein, 9 aa, Homo sapiens
  misc_feature: Table A; Target 371; HLA-A*68:02; ABCB5; ENSG00000004846; TAA
DAKDFGIKR

SEQ ID NO: 372 - protein, 9 aa, Homo sapiens
  misc_feature: Table A; Target 372; HLA-C*07:06; ABCB5; ENSG00000004846; TAA
DAKDFGIKR

SEQ ID NO: 373 - protein, 9 aa, Homo sapiens
  misc_feature: Table A; Target 373; HLA-A*25:01; ABCB5; ENSG00000004846; TAA
DAKELNVQW

SEQ ID NO: 374 - protein, 9 aa, Homo sapiens
  misc_feature: Table A; Target 374; HLA-A*26:01; ABCB5; ENSG00000004846; TAA
DAKELNVQW

SEQ ID NO: 375 - protein, 9 aa, Homo sapiens
  misc_feature: Table A; Target 375; HLA-A*33:01; ABCB5; ENSG00000004846; TAA
DAKELNVQW

SEQ ID NO: 376 - protein, 9 aa, Homo sapiens
  misc_feature: Table A; Target 376; HLA-A*33:03; ABCB5; ENSG00000004846; TAA
DAKELNVQW

SEQ ID NO: 377 - protein, 9 aa, Homo sapiens
  misc_feature: Table A; Target 377; HLA-B*57:01; ABCB5; ENSG00000004846; TAA
DAKELNVQW

SEQ ID NO: 378 - protein, 9 aa, Homo sapiens
  misc_feature: Table A; Target 378; HLA-C*07:06; ABCB5; ENSG00000004846; TAA
DAKELNVQW

SEQ ID NO: 379 - protein, 11 aa, Homo sapiens
  misc_feature: Table A; Target 379; HLA-A*33:01; ABCB5; ENSG00000004846; TAA
DAKELNVQWLR

SEQ ID NO: 380 - protein, 10 aa, Homo sapiens
  misc_feature: Table A; Target 380; HLA-A*68:01; ABCB5; ENSG00000004846; TAA
DDVTDEEMER

SEQ ID NO: 381 - protein, 9 aa, Homo sapiens
  misc_feature: Table A; Target 381; HLA-B*18:01; ABCB5; ENSG00000004846; TAA
DEIKEAANA

SEQ ID NO: 382 - protein, 10 aa, Homo sapiens
  misc_feature: Table A; Target 382; HLA-B*18:01; ABCB5; ENSG00000004846; TAA
DEIKEAANAA

SEQ ID NO: 383 - protein, 8 aa, Homo sapiens
  misc_feature: Table A; Target 383; HLA-B*18:01; ABCB5; ENSG00000004846; TAA
DENDIRAL

SEQ ID NO: 384 - protein, 8 aa, Homo sapiens
  misc_feature: Table A; Target 384; HLA-B*44:02; ABCB5; ENSG00000004846; TAA
DENDIRAL

SEQ ID NO: 385 - protein, 10 aa, Homo sapiens
  misc_feature: Table A; Target 385; HLA-A*30:01; ABCB5; ENSG00000004846; TAA
DENDIRALNV

SEQ ID NO: 386 - protein, 10 aa, Homo sapiens
  misc_feature: Table A; Target 386; HLA-B*18:01; ABCB5; ENSG00000004846; TAA
DENDIRALNV

SEQ ID NO: 387 - protein, 10 aa, Homo sapiens
  misc_feature: Table A; Target 387; HLA-B*44:02; ABCB5; ENSG00000004846; TAA
DENDIRALNV

SEQ ID NO: 388 - protein, 10 aa, Homo sapiens
  misc_feature: Table A; Target 388; HLA-B*44:03; ABCB5; ENSG00000004846; TAA
DENDIRALNV

SEQ ID NO: 389 - protein, 10 aa, Homo sapiens
  misc_feature: Table A; Target 389; HLA-B*49:01; ABCB5; ENSG00000004846; TAA
DENDIRALNV

SEQ ID NO: 390 - protein, 10 aa, Homo sapiens
  misc_feature: Table A; Target 390; HLA-B*51:01; ABCB5; ENSG00000004846; TAA
DENDIRALNV

SEQ ID NO: 391 - protein, 11 aa, Homo sapiens
  misc_feature: Table A; Target 391; HLA-B*18:01; ABCB5; ENSG00000004846; TAA
DENDIRALNVR

SEQ ID NO: 392 - protein, 9 aa, Homo sapiens
  misc_feature: Table A; Target 392; HLA-A*25:01; ABCB5; ENSG00000004846; TAA
DEQMESMTY

SEQ ID NO: 393 - protein, 9 aa, Homo sapiens
  misc_feature: Table A; Target 393; HLA-B*15:03; ABCB5; ENSG00000004846; TAA
DEQMESMTY

SEQ ID NO: 394 - protein, 9 aa, Homo sapiens
  misc_feature: Table A; Target 394; HLA-B*18:01; ABCB5; ENSG00000004846; TAA
DEQMESMTY

SEQ ID NO: 395 - protein, 9 aa, Homo sapiens
  misc_feature: Table A; Target 395; HLA-B*27:02; ABCB5; ENSG00000004846; TAA
DEQMESMTY

SEQ ID NO: 396 - protein, 9 aa, Homo sapiens
  misc_feature: Table A; Target 396; HLA-B*39:01; ABCB5; ENSG00000004846; TAA
DEQMESMTY

SEQ ID NO: 397 - protein, 9 aa, Homo sapiens
  misc_feature: Table A; Target 397; HLA-B*44:02; ABCB5; ENSG00000004846; TAA
DEQMESMTY

SEQ ID NO: 398 - protein, 9 aa, Homo sapiens
  misc_feature: Table A; Target 398; HLA-B*44:03; ABCB5; ENSG00000004846; TAA
DEQMESMTY

SEQ ID NO: 399 - protein, 9 aa, Homo sapiens
  misc_feature: Table A; Target 399; HLA-C*07:01; ABCB5; ENSG00000004846; TAA
DEQMESMTY

SEQ ID NO: 400 - protein, 9 aa, Homo sapiens
  misc_feature: Table A; Target 400; HLA-C*07:04; ABCB5; ENSG00000004846; TAA
DEQMESMTY

SEQ ID NO: 401 - protein, 9 aa, Homo sapiens
  misc_feature: Table A; Target 401; HLA-C*16:04; ABCB5; ENSG00000004846; TAA
DEQMESMTY

SEQ ID NO: 402 - protein, 8 aa, Homo sapiens
  misc_feature: Table A; Target 402; HLA-B*08:01; ABCB5; ENSG00000004846; TAA
DFGIKRTI

SEQ ID NO: 403 - protein, 9 aa, Homo sapiens
  misc_feature: Table A; Target 403; HLA-A*33:01; ABCB5; ENSG00000004846; TAA
DFIMEFPNK

SEQ ID NO: 404 - protein, 9 aa, Homo sapiens
  misc_feature: Table A; Target 404; HLA-B*35:03; ABCB5; ENSG00000004846; TAA
DGIGDKIAL

SEQ ID NO: 405 - protein, 8 aa, Homo sapiens
  misc_feature: Table A; Target 405; HLA-B*51:01; ABCB5; ENSG00000004846; TAA
DGLDITLM

SEQ ID NO: 406 - protein, 9 aa, Homo sapiens
  misc_feature: Table A; Target 406; HLA-B*51:01; ABCB5; ENSG00000004846; TAA
DGLDITLMI

SEQ ID NO: 407 - protein, 8 aa, Homo sapiens
  misc_feature: Table A; Target 407; HLA-B*51:01; ABCB5; ENSG00000004846; TAA
DGVDAKEL

SEQ ID NO: 408 - protein, 10 aa, Homo sapiens
  misc_feature: Table A; Target 408; HLA-A*25:01; ABCB5; ENSG00000004846; TAA
DIAQIQGATG

SEQ ID NO: 409 - protein, 10 aa, Homo sapiens
  misc_feature: Table A; Target 409; HLA-A*26:01; ABCB5; ENSG00000004846; TAA
DIAQIQGATG

SEQ ID NO: 410 - protein, 10 aa, Homo sapiens
  misc_feature: Table A; Target 410; HLA-A*68:01; ABCB5; ENSG00000004846; TAA
DIAQIQGATG

SEQ ID NO: 411 - protein, 8 aa, Homo sapiens
  misc_feature: Table A; Target 411; HLA-A*33:01; ABCB5; ENSG00000004846; TAA
DIGELNTR

SEQ ID NO: 412 - protein, 8 aa, Homo sapiens
  misc_feature: Table A; Target 412; HLA-A*33:03; ABCB5; ENSG00000004846; TAA
DIGELNTR

SEQ ID NO: 413 - protein, 9 aa, Homo sapiens
  misc_feature: Table A; Target 413; HLA-A*26:01; ABCB5; ENSG00000004846; TAA
DIGELNTRM

SEQ ID NO: 414 - protein, 9 aa, Homo sapiens
  misc_feature: Table A; Target 414; HLA-B*08:01; ABCB5; ENSG00000004846; TAA
DIKKADEQM

SEQ ID NO: 415 - protein, 8 aa, Homo sapiens
  misc_feature: Table A; Target 415; HLA-A*33:01; ABCB5; ENSG00000004846; TAA
DIRALNVR

SEQ ID NO: 416 - protein, 11 aa, Homo sapiens
  misc_feature: Table A; Target 416; HLA-A*33:01; ABCB5; ENSG00000004846; TAA
DIRALNVRHYR

SEQ ID NO: 417 - protein, 9 aa, Homo sapiens
  misc_feature: Table A; Target 417; HLA-A*68:02; ABCB5; ENSG00000004846; TAA
DIYFKLVNA

SEQ ID NO: 418 - protein, 9 aa, Homo sapiens
  misc_feature: Table A; Target 418; HLA-B*08:01; ABCB5; ENSG00000004846; TAA
DIYFKLVNA

SEQ ID NO: 419 - protein, 9 aa, Homo sapiens
  misc_feature: Table A; Target 419; HLA-B*54:01; ABCB5; ENSG00000004846; TAA
DIYFKLVNA

SEQ ID NO: 420 - protein, 11 aa, Homo sapiens
  misc_feature: Table A; Target 420; HLA-B*38:01; ABCB5; ENSG00000004846; TAA
DKISDGIGDKI

SEQ ID NO: 421 - protein, 8 aa, Homo sapiens
  misc_feature: Table A; Target 421; HLA-B*18:01; ABCB5; ENSG00000004846; TAA
DMTLLTLY

SEQ ID NO: 422 - protein, 9 aa, Homo sapiens
  misc_feature: Table A; Target 422; HLA-A*01:01; ABCB5; ENSG00000004846; TAA
DMTLLTLYY

SEQ ID NO: 423 - protein, 9 aa, Homo sapiens
  misc_feature: Table A; Target 423; HLA-A*26:01; ABCB5; ENSG00000004846; TAA
DMTLLTLYY

SEQ ID NO: 424 - protein, 9 aa, Homo sapiens
  misc_feature: Table A; Target 424; HLA-A*29:02; ABCB5; ENSG00000004846; TAA
DMTLLTLYY

SEQ ID NO: 425 - protein, 8 aa, Homo sapiens
  misc_feature: Table A; Target 425; HLA-A*26:01; ABCB5; ENSG00000004846; TAA
DNFSTAGY

SEQ ID NO: 426 - protein, 8 aa, Homo sapiens
  misc_feature: Table A; Target 426; HLA-B*18:01; ABCB5; ENSG00000004846; TAA
DNFSTAGY

SEQ ID NO: 427 - protein, 8 aa, Homo sapiens
  misc_feature: Table A; Target 427; HLA-B*35:03; ABCB5; ENSG00000004846; TAA
DPDDGFIM

SEQ ID NO: 428 - protein, 8 aa, Homo sapiens
  misc_feature: Table A; Target 428; HLA-B*55:01; ABCB5; ENSG00000004846; TAA
DPDDGFIM

SEQ ID NO: 429 - protein, 9 aa, Homo sapiens
  misc_feature: Table A; Target 429; HLA-B*35:03; ABCB5; ENSG00000004846; TAA
DPDDGFIMV

SEQ ID NO: 430 - protein, 9 aa, Homo sapiens
  misc_feature: Table A; Target 430; HLA-B*38:01; ABCB5; ENSG00000004846; TAA
DPDDGFIMV

SEQ ID NO: 431 - protein, 9 aa, Homo sapiens
  misc_feature: Table A; Target 431; HLA-B*39:01; ABCB5; ENSG00000004846; TAA
DPDDGFIMV

SEQ ID NO: 432 - protein, 9 aa, Homo sapiens
  misc_feature: Table A; Target 432; HLA-B*51:01; ABCB5; ENSG00000004846; TAA
DPDDGFIMV

SEQ ID NO: 433 - protein, 9 aa, Homo sapiens
  misc_feature: Table A; Target 433; HLA-B*54:01; ABCB5; ENSG00000004846; TAA
DPDDGFIMV

SEQ ID NO: 434 - protein, 9 aa, Homo sapiens
  misc_feature: Table A; Target 434; HLA-B*55:01; ABCB5; ENSG00000004846; TAA
DPDDGFIMV

SEQ ID NO: 435 - protein, 9 aa, Homo sapiens
  misc_feature: Table A; Target 435; HLA-C*05:01; ABCB5; ENSG00000004846; TAA
DPDDGFIMV

SEQ ID NO: 436 - protein, 8 aa, Homo sapiens
  misc_feature: Table A; Target 436; HLA-B*08:01; ABCB5; ENSG00000004846; TAA
DPVQGQVL

SEQ ID NO: 437 - protein, 8 aa, Homo sapiens
  misc_feature: Table A; Target 437; HLA-B*35:01; ABCB5; ENSG00000004846; TAA
DPVQGQVL

SEQ ID NO: 438 - protein, 8 aa, Homo sapiens
  misc_feature: Table A; Target 438; HLA-B*35:03; ABCB5; ENSG00000004846; TAA
DPVQGQVL

SEQ ID NO: 439 - protein, 8 aa, Homo sapiens
  misc_feature: Table A; Target 439; HLA-B*51:01; ABCB5; ENSG00000004846; TAA
DPVQGQVL

SEQ ID NO: 440 - protein, 9 aa, Homo sapiens
  misc_feature: Table A; Target 440; HLA-B*18:01; ABCB5; ENSG00000004846; TAA
DPVQGQVLF

SEQ ID NO: 441 - protein, 9 aa, Homo sapiens
  misc_feature: Table A; Target 441; HLA-B*35:01; ABCB5; ENSG00000004846; TAA
DPVQGQVLF

SEQ ID NO: 442 - protein, 9 aa, Homo sapiens
  misc_feature: Table A; Target 442; HLA-B*35:03; ABCB5; ENSG00000004846; TAA
DPVQGQVLF

SEQ ID NO: 443 - protein, 11 aa, Homo sapiens
  misc_feature: Table A; Target 443; HLA-A*33:01; ABCB5; ENSG00000004846; TAA
DSCDIGELNTR

SEQ ID NO: 444 - protein, 11 aa, Homo sapiens
  misc_feature: Table A; Target 444; HLA-A*33:03; ABCB5; ENSG00000004846; TAA
DSCDIGELNTR

SEQ ID NO: 445 - protein, 11 aa, Homo sapiens
  misc_feature: Table A; Target 445; HLA-A*68:01; ABCB5; ENSG00000004846; TAA
DSCDIGELNTR

SEQ ID NO: 446 - protein, 9 aa, Homo sapiens
  misc_feature: Table A; Target 446; HLA-A*25:01; ABCB5; ENSG00000004846; TAA
DTCEGNLEF

SEQ ID NO: 447 - protein, 9 aa, Homo sapiens
  misc_feature: Table A; Target 447; HLA-A*26:01; ABCB5; ENSG00000004846; TAA
DTCEGNLEF

SEQ ID NO: 448 - protein, 10 aa, Homo sapiens
  misc_feature: Table A; Target 448; HLA-A*33:01; ABCB5; ENSG00000004846; TAA
DTCEGNLEFR

SEQ ID NO: 449 - protein, 10 aa, Homo sapiens
  misc_feature: Table A; Target 449; HLA-A*68:02; ABCB5; ENSG00000004846; TAA
DVFILRGLSL

SEQ ID NO: 450 - protein, 10 aa, Homo sapiens
  misc_feature: Table A; Target 450; HLA-B*08:01; ABCB5; ENSG00000004846; TAA
DVFILRGLSL

SEQ ID NO: 451 - protein, 9 aa, Homo sapiens
  misc_feature: Table A; Target 451; HLA-A*26:01; ABCB5; ENSG00000004846; TAA
DVTDEEMER

SEQ ID NO: 452 - protein, 9 aa, Homo sapiens
  misc_feature: Table A; Target 452; HLA-A*33:01; ABCB5; ENSG00000004846; TAA
DVTDEEMER

SEQ ID NO: 453 - protein, 9 aa, Homo sapiens
  misc_feature: Table A; Target 453; HLA-A*33:03; ABCB5; ENSG00000004846; TAA
DVTDEEMER

SEQ ID NO: 454 - protein, 9 aa, Homo sapiens
  misc_feature: Table A; Target 454; HLA-A*68:01; ABCB5; ENSG00000004846; TAA
DVTDEEMER

SEQ ID NO: 455 - protein, 9 aa, Homo sapiens
  misc_feature: Table A; Target 455; HLA-C*07:06; ABCB5; ENSG00000004846; TAA
DVTDEEMER

SEQ ID NO: 456 - protein, 8 aa, Homo sapiens
  misc_feature: Table A; Target 456; HLA-B*51:01; ABCB5; ENSG00000004846; TAA
EAANAANI

SEQ ID NO: 457 - protein, 11 aa, Homo sapiens
  misc_feature: Table A; Target 457; HLA-A*25:01; ABCB5; ENSG00000004846; TAA
EAANAANIHSF

SEQ ID NO: 458 - protein, 11 aa, Homo sapiens
  misc_feature: Table A; Target 458; HLA-A*26:01; ABCB5; ENSG00000004846; TAA
EAANAANIHSF

SEQ ID NO: 459 - protein, 11 aa, Homo sapiens
  misc_feature: Table A; Target 459; HLA-A*33:01; ABCB5; ENSG00000004846; TAA
EAANAANIHSF

SEQ ID NO: 460 - protein, 11 aa, Homo sapiens
  misc_feature: Table A; Target 460; HLA-A*33:03; ABCB5; ENSG00000004846; TAA
EAANAANIHSF

SEQ ID NO: 461 - protein, 11 aa, Homo sapiens
  misc_feature: Table A; Target 461; HLA-A*68:01; ABCB5; ENSG00000004846; TAA
EAANAANIHSF

SEQ ID NO: 462 - protein, 11 aa, Homo sapiens
  misc_feature: Table A; Target 462; HLA-A*68:02; ABCB5; ENSG00000004846; TAA
EAANAANIHSF

SEQ ID NO: 463 - protein, 11 aa, Homo sapiens
  misc_feature: Table A; Target 463; HLA-B*27:02; ABCB5; ENSG00000004846; TAA
EAANAANIHSF

SEQ ID NO: 464 - protein, 11 aa, Homo sapiens
  misc_feature: Table A; Target 464; HLA-B*35:01; ABCB5; ENSG00000004846; TAA
EAANAANIHSF

SEQ ID NO: 465 - protein, 11 aa, Homo sapiens
  misc_feature: Table A; Target 465; HLA-B*44:03; ABCB5; ENSG00000004846; TAA
EAANAANIHSF

SEQ ID NO: 466 - protein, 11 aa, Homo sapiens
  misc_feature: Table A; Target 466; HLA-C*07:06; ABCB5; ENSG00000004846; TAA
EAANAANIHSF

SEQ ID NO: 467 - protein, 11 aa, Homo sapiens
  misc_feature: Table A; Target 467; HLA-C*16:04; ABCB5; ENSG00000004846; TAA
EAANAANIHSF

SEQ ID NO: 468 - protein, 9 aa, Homo sapiens
  misc_feature: Table A; Target 468; HLA-A*23:01; ABCB5; ENSG00000004846; TAA
EALENIRTI

SEQ ID NO: 469 - protein, 9 aa, Homo sapiens
  misc_feature: Table A; Target 469; HLA-A*25:01; ABCB5; ENSG00000004846; TAA
EALENIRTI

SEQ ID NO: 470 - protein, 9 aa, Homo sapiens
  misc_feature: Table A; Target 470; HLA-A*26:01; ABCB5; ENSG00000004846; TAA
EALENIRTI

SEQ ID NO: 471 - protein, 9 aa, Homo sapiens
  misc_feature: Table A; Target 471; HLA-A*33:01; ABCB5; ENSG00000004846; TAA
EALENIRTI

SEQ ID NO: 472 - protein, 9 aa, Homo sapiens
  misc_feature: Table A; Target 472; HLA-B*51:01; ABCB5; ENSG00000004846; TAA
EALENIRTI

SEQ ID NO: 473 - protein, 9 aa, Homo sapiens
  misc_feature: Table A; Target 473; HLA-C*03:04; ABCB5; ENSG00000004846; TAA
EALENIRTI

SEQ ID NO: 474 - protein, 9 aa, Homo sapiens
  misc_feature: Table A; Target 474; HLA-C*12:03; ABCB5; ENSG00000004846; TAA
EALENIRTI

SEQ ID NO: 475 - protein, 9 aa, Homo sapiens
  misc_feature: Table A; Target 475; HLA-C*16:02; ABCB5; ENSG00000004846; TAA
EALENIRTI

SEQ ID NO: 476 - protein, 10 aa, Homo sapiens
  misc_feature: Table A; Target 476; HLA-B*51:01; ABCB5; ENSG00000004846; TAA
EALENIRTIV

SEQ ID NO: 477 - protein, 9 aa, Homo sapiens
  misc_feature: Table A; Target 477; HLA-B*35:01; ABCB5; ENSG00000004846; TAA
EANAYDFIM

SEQ ID NO: 478 - protein, 9 aa, Homo sapiens
  misc_feature: Table A; Target 478; HLA-B*35:03; ABCB5; ENSG00000004846; TAA
EANAYDFIM

SEQ ID NO: 479 - protein, 9 aa, Homo sapiens
  misc_feature: Table A; Target 479; HLA-B*55:01; ABCB5; ENSG00000004846; TAA
EANAYDFIM

SEQ ID NO: 480 - protein, 11 aa, Homo sapiens
  misc_feature: Table A; Target 480; HLA-A*68:01; ABCB5; ENSG00000004846; TAA
EATSALDSESK

SEQ ID NO: 481 - protein, 11 aa, Homo sapiens
  misc_feature: Table A; Target 481; HLA-B*27:02; ABCB5; ENSG00000004846; TAA
EATSALDSESK

SEQ ID NO: 482 - protein, 8 aa, Homo sapiens
  misc_feature: Table A; Target 482; HLA-B*51:01; ABCB5; ENSG00000004846; TAA
EAVGSIEI

SEQ ID NO: 483 - protein, 9 aa, Homo sapiens
  misc_feature: Table A; Target 483; HLA-A*25:01; ABCB5; ENSG00000004846; TAA
EAVGSIEIF

SEQ ID NO: 484 - protein, 9 aa, Homo sapiens
  misc_feature: Table A; Target 484; HLA-A*26:01; ABCB5; ENSG00000004846; TAA
EAVGSIEIF

SEQ ID NO: 485 - protein, 9 aa, Homo sapiens
  misc_feature: Table A; Target 485; HLA-A*68:01; ABCB5; ENSG00000004846; TAA
EAVGSIEIF

SEQ ID NO: 486 - protein, 9 aa, Homo sapiens
  misc_feature: Table A; Target 486; HLA-B*35:01; ABCB5; ENSG00000004846; TAA
EAVGSIEIF

SEQ ID NO: 487 - protein, 9 aa, Homo sapiens
  misc_feature: Table A; Target 487; HLA-B*35:03; ABCB5; ENSG00000004846; TAA
EAVGSIEIF

SEQ ID NO: 488 - protein, 9 aa, Homo sapiens
  misc_feature: Table A; Target 488; HLA-C*07:06; ABCB5; ENSG00000004846; TAA
EAVGSIEIF

SEQ ID NO: 489 - protein, 9 aa, Homo sapiens
  misc_feature: Table A; Target 489; HLA-C*12:03; ABCB5; ENSG00000004846; TAA
EAVGSIEIF

SEQ ID NO: 490 - protein, 10 aa, Homo sapiens
  misc_feature: Table A; Target 490; HLA-A*33:01; ABCB5; ENSG00000004846; TAA
EAVGSIEIFR

SEQ ID NO: 491 - protein, 10 aa, Homo sapiens
  misc_feature: Table A; Target 491; HLA-A*33:03; ABCB5; ENSG00000004846; TAA
EAVGSIEIFR

SEQ ID NO: 492 - protein, 10 aa, Homo sapiens
  misc_feature: Table A; Target 492; HLA-A*68:01; ABCB5; ENSG00000004846; TAA
EAVGSIEIFR

SEQ ID NO: 493 - protein, 10 aa, Homo sapiens
  misc_feature: Table A; Target 493; HLA-A*68:02; ABCB5; ENSG00000004846; TAA
EAVGSIEIFR

SEQ ID NO: 494 - protein, 10 aa, Homo sapiens
  misc_feature: Table A; Target 494; HLA-B*27:02; ABCB5; ENSG00000004846; TAA
EAVGSIEIFR

SEQ ID NO: 495 - protein, 10 aa, Homo sapiens
  misc_feature: Table A; Target 495; HLA-C*07:06; ABCB5; ENSG00000004846; TAA
EAVGSIEIFR

SEQ ID NO: 496 - protein, 11 aa, Homo sapiens
  misc_feature: Table A; Target 496; HLA-A*26:01; ABCB5; ENSG00000004846; TAA
EAVGSIEIFRF

SEQ ID NO: 497 - protein, 9 aa, Homo sapiens
  misc_feature: Table A; Target 497; HLA-A*26:01; ABCB5; ENSG00000004846; TAA
EDMTLLTLY

SEQ ID NO: 498 - protein, 9 aa, Homo sapiens
  misc_feature: Table A; Target 498; HLA-A*29:02; ABCB5; ENSG00000004846; TAA
EDMTLLTLY

SEQ ID NO: 499 - protein, 9 aa, Homo sapiens
  misc_feature: Table A; Target 499; HLA-B*18:01; ABCB5; ENSG00000004846; TAA
EDMTLLTLY

SEQ ID NO: 500 - protein, 9 aa, Homo sapiens
  misc_feature: Table A; Target 500; HLA-B*44:02; ABCB5; ENSG00000004846; TAA
EDMTLLTLY

SEQ ID NO: 501 - protein, 9 aa, Homo sapiens
  misc_feature: Table A; Target 501; HLA-B*44:03; ABCB5; ENSG00000004846; TAA
EDMTLLTLY

SEQ ID NO: 502 - protein, 10 aa, Homo sapiens
  misc_feature: Table A; Target 502; HLA-B*44:02; ABCB5; ENSG00000004846; TAA
EDMTLLTLYY

SEQ ID NO: 503 - protein, 8 aa, Homo sapiens
  misc_feature: Table A; Target 503; HLA-B*18:01; ABCB5; ENSG00000004846; TAA
EEMLQTQH

SEQ ID NO: 504 - protein, 9 aa, Homo sapiens
  misc_feature: Table A; Target 504; HLA-A*33:03; ABCB5; ENSG00000004846; TAA
EEMLQTQHR

SEQ ID NO: 505 - protein, 9 aa, Homo sapiens
  misc_feature: Table A; Target 505; HLA-B*44:02; ABCB5; ENSG00000004846; TAA
EEMLQTQHR

SEQ ID NO: 506 - protein, 9 aa, Homo sapiens
  misc_feature: Table A; Target 506; HLA-B*44:03; ABCB5; ENSG00000004846; TAA
EEMLQTQHR

SEQ ID NO: 507 - protein, 9 aa, Homo sapiens
  misc_feature: Table A; Target 507; HLA-A*33:03; ABCB5; ENSG00000004846; TAA
EEMQENYQR

SEQ ID NO: 508 - protein, 9 aa, Homo sapiens
  misc_feature: Table A; Target 508; HLA-B*44:02; ABCB5; ENSG00000004846; TAA
EEMQENYQR

SEQ ID NO: 509 - protein, 9 aa, Homo sapiens
  misc_feature: Table A; Target 509; HLA-B*44:03; ABCB5; ENSG00000004846; TAA
EEMQENYQR

SEQ ID NO: 510 - protein, 10 aa, Homo sapiens
  misc_feature: Table A; Target 510; HLA-B*44:02; ABCB5; ENSG00000004846; TAA
EEMQENYQRN

SEQ ID NO: 511 - protein, 9 aa, Homo sapiens
  misc_feature: Table A; Target 511; HLA-B*44:02; ABCB5; ENSG00000004846; TAA
EESTQSKEI

SEQ ID NO: 512 - protein, 9 aa, Homo sapiens
  misc_feature: Table A; Target 512; HLA-B*44:03; ABCB5; ENSG00000004846; TAA
EESTQSKEI

SEQ ID NO: 513 - protein, 9 aa, Homo sapiens
  misc_feature: Table A; Target 513; HLA-B*49:01; ABCB5; ENSG00000004846; TAA
EESTQSKEI

SEQ ID NO: 514 - protein, 9 aa, Homo sapiens
  misc_feature: Table A; Target 514; HLA-C*16:04; ABCB5; ENSG00000004846; TAA
EESTQSKEI

SEQ ID NO: 515 - protein, 11 aa, Homo sapiens
  misc_feature: Table A; Target 515; HLA-A*30:01; ABCB5; ENSG00000004846; TAA
EESTQSKEISL

SEQ ID NO: 516 - protein, 11 aa, Homo sapiens
  misc_feature: Table A; Target 516; HLA-B*40:01; ABCB5; ENSG00000004846; TAA
EESTQSKEISL

SEQ ID NO: 517 - protein, 9 aa, Homo sapiens
  misc_feature: Table A; Target 517; HLA-B*44:03; ABCB5; ENSG00000004846; TAA
EEVLSSIRT

SEQ ID NO: 518 - protein, 10 aa, Homo sapiens
  misc_feature: Table A; Target 518; HLA-B*49:01; ABCB5; ENSG00000004846; TAA
EEVLSSIRTV

SEQ ID NO: 519 - protein, 11 aa, Homo sapiens
  misc_feature: Table A; Target 519; HLA-B*44:02; ABCB5; ENSG00000004846; TAA
EEVLSSIRTVI

SEQ ID NO: 520 - protein, 11 aa, Homo sapiens
  misc_feature: Table A; Target 520; HLA-B*44:03; ABCB5; ENSG00000004846; TAA
EEVLSSIRTVI

SEQ ID NO: 521 - protein, 9 aa, Homo sapiens
  misc_feature: Table A; Target 521; HLA-A*23:01; ABCB5; ENSG00000004846; TAA
EFKNVSFNY

SEQ ID NO: 522 - protein, 9 aa, Homo sapiens
  misc_feature: Table A; Target 522; HLA-A*29:02; ABCB5; ENSG00000004846; TAA
EFKNVSFNY

SEQ ID NO: 523 - protein, 9 aa, Homo sapiens
  misc_feature: Table A; Target 523; HLA-A*30:02; ABCB5; ENSG00000004846; TAA
EFKNVSFNY

SEQ ID NO: 524 - protein, 9 aa, Homo sapiens
  misc_feature: Table A; Target 524; HLA-A*33:03; ABCB5; ENSG00000004846; TAA
EFKNVSFNY

SEQ ID NO: 525 - protein, 9 aa, Homo sapiens
  misc_feature: Table A; Target 525; HLA-A*23:01; ABCB5; ENSG00000004846; TAA
EFPNKFNTL

SEQ ID NO: 526 - protein, 9 aa, Homo sapiens
  misc_feature: Table A; Target 526; HLA-A*24:02; ABCB5; ENSG00000004846; TAA
EFPNKFNTL

SEQ ID NO: 527 - protein, 9 aa, Homo sapiens
  misc_feature: Table A; Target 527; HLA-A*25:01; ABCB5; ENSG00000004846; TAA
EFPNKFNTL

SEQ ID NO: 528 - protein, 9 aa, Homo sapiens
  misc_feature: Table A; Target 528; HLA-A*33:03; ABCB5; ENSG00000004846; TAA
EFPNKFNTL

SEQ ID NO: 529 - protein, 9 aa, Homo sapiens
  misc_feature: Table A; Target 529; HLA-B*08:01; ABCB5; ENSG00000004846; TAA
EFPNKFNTL

SEQ ID NO: 530 - protein, 9 aa, Homo sapiens
  misc_feature: Table A; Target 530; HLA-C*01:02; ABCB5; ENSG00000004846; TAA
EFPNKFNTL

SEQ ID NO: 531 - protein, 9 aa, Homo sapiens
  misc_feature: Table A; Target 531; HLA-C*14:02; ABCB5; ENSG00000004846; TAA
EFPNKFNTL

SEQ ID NO: 532 - protein, 9 aa, Homo sapiens
  misc_feature: Table A; Target 532; HLA-A*29:02; ABCB5; ENSG00000004846; TAA
EFREVSFFY

SEQ ID NO: 533 - protein, 9 aa, Homo sapiens
  misc_feature: Table A; Target 533; HLA-B*51:01; ABCB5; ENSG00000004846; TAA
EGNLEFREV

SEQ ID NO: 534 - protein, 9 aa, Homo sapiens
  misc_feature: Table A; Target 534; HLA-A*68:02; ABCB5; ENSG00000004846; TAA
EIFRFADGL

SEQ ID NO: 535 - protein, 9 aa, Homo sapiens
  misc_feature: Table A; Target 535; HLA-B*35:03; ABCB5; ENSG00000004846; TAA
EISLPEVSL

SEQ ID NO: 536 - protein, 9 aa, Homo sapiens
  misc_feature: Table A; Target 536; HLA-B*38:01; ABCB5; ENSG00000004846; TAA
EISLPEVSL

SEQ ID NO: 537 - protein, 9 aa, Homo sapiens
  misc_feature: Table A; Target 537; HLA-B*39:01; ABCB5; ENSG00000004846; TAA
EISLPEVSL

SEQ ID NO: 538 - protein, 9 aa, Homo sapiens
  misc_feature: Table A; Target 538; HLA-A*68:02; ABCB5; ENSG00000004846; TAA
EIYSMIFVI

SEQ ID NO: 539 - protein, 10 aa, Homo sapiens
  misc_feature: Table A; Target 539; HLA-A*68:02; ABCB5; ENSG00000004846; TAA
EIYSMIFVIL

SEQ ID NO: 540 - protein, 9 aa, Homo sapiens
  misc_feature: Table A; Target 540; HLA-C*07:01; ABCB5; ENSG00000004846; TAA
EKGAHAELM

SEQ ID NO: 541 - protein, 9 aa, Homo sapiens
  misc_feature: Table A; Target 541; HLA-A*33:01; ABCB5; ENSG00000004846; TAA
EKKPNIDSR

SEQ ID NO: 542 - protein, 9 aa, Homo sapiens
  misc_feature: Table A; Target 542; HLA-A*33:03; ABCB5; ENSG00000004846; TAA
EKKPNIDSR

SEQ ID NO: 543 - protein, 9 aa, Homo sapiens
  misc_feature: Table A; Target 543; HLA-B*15:03; ABCB5; ENSG00000004846; TAA
EKYNTQVGL

SEQ ID NO: 544 - protein, 8 aa, Homo sapiens
  misc_feature: Table A; Target 544; HLA-B*08:01; ABCB5; ENSG00000004846; TAA
ELMAKRGL

SEQ ID NO: 545 - protein, 9 aa, Homo sapiens
  misc_feature: Table A; Target 545; HLA-A*26:01; ABCB5; ENSG00000004846; TAA
ELMAKRGLY

SEQ ID NO: 546 - protein, 10 aa, Homo sapiens
  misc_feature: Table A; Target 546; HLA-A*33:01; ABCB5; ENSG00000004846; TAA
ELMAKRGLYY

SEQ ID NO: 547 - protein, 9 aa, Homo sapiens
  misc_feature: Table A; Target 547; HLA-A*02:04; ABCB5; ENSG00000004846; TAA
ELQRYTQNL

SEQ ID NO: 548 - protein, 9 aa, Homo sapiens
  misc_feature: Table A; Target 548; HLA-B*08:01; ABCB5; ENSG00000004846; TAA
ELQRYTQNL

SEQ ID NO: 549 - protein, 8 aa, Homo sapiens
  misc_feature: Table A; Target 549; HLA-A*33:01; ABCB5; ENSG00000004846; TAA
EMLQTQHR

SEQ ID NO: 550 - protein, 8 aa, Homo sapiens
  misc_feature: Table A; Target 550; HLA-A*33:03; ABCB5; ENSG00000004846; TAA
EMLQTQHR

SEQ ID NO: 551 - protein, 8 aa, Homo sapiens
  misc_feature: Table A; Target 551; HLA-A*33:01; ABCB5; ENSG00000004846; TAA
EMQENYQR

SEQ ID NO: 552 - protein, 8 aa, Homo sapiens
  misc_feature: Table A; Target 552; HLA-A*33:03; ABCB5; ENSG00000004846; TAA
EMQENYQR

SEQ ID NO: 553 - protein, 9 aa, Homo sapiens
  misc_feature: Table A; Target 553; HLA-A*68:02; ABCB5; ENSG00000004846; TAA
EMTFLILSI

SEQ ID NO: 554 - protein, 9 aa, Homo sapiens
  misc_feature: Table A; Target 554; HLA-B*13:02; ABCB5; ENSG00000004846; TAA
EMTFLILSI

SEQ ID NO: 555 - protein, 10 aa, Homo sapiens
  misc_feature: Table A; Target 555; HLA-A*33:03; ABCB5; ENSG00000004846; TAA
ENIAYGDNSR

SEQ ID NO: 556 - protein, 10 aa, Homo sapiens
  misc_feature: Table A; Target 556; HLA-A*68:01; ABCB5; ENSG00000004846; TAA
ENIAYGDNSR

SEQ ID NO: 557 - protein, 9 aa, Homo sapiens
  misc_feature: Table A; Target 557; HLA-A*23:01; ABCB5; ENSG00000004846; TAA
ENIRTIVSL

SEQ ID NO: 558 - protein, 9 aa, Homo sapiens
  misc_feature: Table A; Target 558; HLA-A*25:01; ABCB5; ENSG00000004846; TAA
ENIRTIVSL

SEQ ID NO: 559 - protein, 9 aa, Homo sapiens
  misc_feature: Table A; Target 559; HLA-A*26:01; ABCB5; ENSG00000004846; TAA
ENIRTIVSL

SEQ ID NO: 560 - protein, 9 aa, Homo sapiens
  misc_feature: Table A; Target 560; HLA-A*33:01; ABCB5; ENSG00000004846; TAA
ENIRTIVSL

SEQ ID NO: 561 - protein, 9 aa, Homo sapiens
  misc_feature: Table A; Target 561; HLA-A*33:03; ABCB5; ENSG00000004846; TAA
ENIRTIVSL

SEQ ID NO: 562 - protein, 9 aa, Homo sapiens
  misc_feature: Table A; Target 562; HLA-A*68:01; ABCB5; ENSG00000004846; TAA
ENIRTIVSL

SEQ ID NO: 563 - protein, 9 aa, Homo sapiens
  misc_feature: Table A; Target 563; HLA-A*68:02; ABCB5; ENSG00000004846; TAA
ENIRTIVSL

SEQ ID NO: 564 - protein, 9 aa, Homo sapiens
  misc_feature: Table A; Target 564; HLA-B*08:01; ABCB5; ENSG00000004846; TAA
ENIRTIVSL

SEQ ID NO: 565 - protein, 9 aa, Homo sapiens
  misc_feature: Table A; Target 565; HLA-B*40:02; ABCB5; ENSG00000004846; TAA
ENIRTIVSL

SEQ ID NO: 566 - protein, 10 aa, Homo sapiens
  misc_feature: Table A; Target 566; HLA-A*68:01; ABCB5; ENSG00000004846; TAA
EPGYTIGTVL

SEQ ID NO: 567 - protein, 10 aa, Homo sapiens
  misc_feature: Table A; Target 567; HLA-B*35:03; ABCB5; ENSG00000004846; TAA
EPGYTIGTVL

SEQ ID NO: 568 - protein, 9 aa, Homo sapiens
  misc_feature: Table A; Target 568; HLA-A*25:01; ABCB5; ENSG00000004846; TAA
EPVLFGTTI

SEQ ID NO: 569 - protein, 9 aa, Homo sapiens
  misc_feature: Table A; Target 569; HLA-A*26:01; ABCB5; ENSG00000004846; TAA
EPVLFGTTI

SEQ ID NO: 570 - protein, 9 aa, Homo sapiens
  misc_feature: Table A; Target 570; HLA-A*68:02; ABCB5; ENSG00000004846; TAA
EPVLFGTTI

SEQ ID NO: 571 - protein, 9 aa, Homo sapiens
  misc_feature: Table A; Target 571; HLA-B*07:02; ABCB5; ENSG00000004846; TAA
EPVLFGTTI

SEQ ID NO: 572 - protein, 9 aa, Homo sapiens
  misc_feature: Table A; Target 572; HLA-B*08:01; ABCB5; ENSG00000004846; TAA
EPVLFGTTI

SEQ ID NO: 573 - protein, 9 aa, Homo sapiens
  misc_feature: Table A; Target 573; HLA-B*35:01; ABCB5; ENSG00000004846; TAA
EPVLFGTTI

SEQ ID NO: 574 - protein, 9 aa, Homo sapiens
  misc_feature: Table A; Target 574; HLA-B*35:03; ABCB5; ENSG00000004846; TAA
EPVLFGTTI

SEQ ID NO: 575 - protein, 9 aa, Homo sapiens
  misc_feature: Table A; Target 575; HLA-B*49:01; ABCB5; ENSG00000004846; TAA
EPVLFGTTI

SEQ ID NO: 576 - protein, 9 aa, Homo sapiens
  misc_feature: Table A; Target 576; HLA-B*51:01; ABCB5; ENSG00000004846; TAA
EPVLFGTTI

SEQ ID NO: 577 - protein, 9 aa, Homo sapiens
  misc_feature: Table A; Target 577; HLA-B*54:01; ABCB5; ENSG00000004846; TAA
EPVLFGTTI

SEQ ID NO: 578 - protein, 9 aa, Homo sapiens
  misc_feature: Table A; Target 578; HLA-B*56:01; ABCB5; ENSG00000004846; TAA
EPVLFGTTI

SEQ ID NO: 579 - protein, 9 aa, Homo sapiens
  misc_feature: Table A; Target 579; HLA-C*07:02; ABCB5; ENSG00000004846; TAA
EPVLFGTTI

SEQ ID NO: 580 - protein, 9 aa, Homo sapiens
  misc_feature: Table A; Target 580; HLA-B*51:01; ABCB5; ENSG00000004846; TAA
EPVLFNCSI

SEQ ID NO: 581 - protein, 9 aa, Homo sapiens
  misc_feature: Table A; Target 581; HLA-B*38:01; ABCB5; ENSG00000004846; TAA
EQGTHQELL

SEQ ID NO: 582 - protein, 8 aa, Homo sapiens
  misc_feature: Table A; Target 582; HLA-A*25:01; ABCB5; ENSG00000004846; TAA
EQMESMTY

SEQ ID NO: 583 - protein, 8 aa, Homo sapiens
  misc_feature: Table A; Target 583; HLA-A*26:01; ABCB5; ENSG00000004846; TAA
EQMESMTY

SEQ ID NO: 584 - protein, 8 aa, Homo sapiens
  misc_feature: Table A; Target 584; HLA-A*30:02; ABCB5; ENSG00000004846; TAA
EQMESMTY

SEQ ID NO: 585 - protein, 8 aa, Homo sapiens
  misc_feature: Table A; Target 585; HLA-B*15:01; ABCB5; ENSG00000004846; TAA
EQMESMTY

SEQ ID NO: 586 - protein, 8 aa, Homo sapiens
  misc_feature: Table A; Target 586; HLA-B*15:03; ABCB5; ENSG00000004846; TAA
EQMESMTY

SEQ ID NO: 587 - protein, 8 aa, Homo sapiens
  misc_feature: Table A; Target 587; HLA-B*18:01; ABCB5; ENSG00000004846; TAA
EQMESMTY

SEQ ID NO: 588 - protein, 8 aa, Homo sapiens
  misc_feature: Table A; Target 588; HLA-B*27:02; ABCB5; ENSG00000004846; TAA
EQMESMTY

SEQ ID NO: 589 - protein, 8 aa, Homo sapiens
  misc_feature: Table A; Target 589; HLA-B*35:01; ABCB5; ENSG00000004846; TAA
EQMESMTY

SEQ ID NO: 590 - protein, 8 aa, Homo sapiens
  misc_feature: Table A; Target 590; HLA-B*39:01; ABCB5; ENSG00000004846; TAA
EQMESMTY

SEQ ID NO: 591 - protein, 8 aa, Homo sapiens
  misc_feature: Table A; Target 591; HLA-B*46:01; ABCB5; ENSG00000004846; TAA
EQMESMTY

SEQ ID NO: 592 - protein, 8 aa, Homo sapiens
  misc_feature: Table A; Target 592; HLA-C*07:01; ABCB5; ENSG00000004846; TAA
EQMESMTY

SEQ ID NO: 593 - protein, 8 aa, Homo sapiens
  misc_feature: Table A; Target 593; HLA-C*07:04; ABCB5; ENSG00000004846; TAA
EQMESMTY

SEQ ID NO: 594 - protein, 8 aa, Homo sapiens
  misc_feature: Table A; Target 594; HLA-C*14:02; ABCB5; ENSG00000004846; TAA
EQMESMTY

SEQ ID NO: 595 - protein, 8 aa, Homo sapiens
  misc_feature: Table A; Target 595; HLA-C*16:04; ABCB5; ENSG00000004846; TAA
EQMESMTY

SEQ ID NO: 596 - protein, 10 aa, Homo sapiens
  misc_feature: Table A; Target 596; HLA-B*27:02; ABCB5; ENSG00000004846; TAA
ERAEEMQENY

SEQ ID NO: 597 - protein, 9 aa, Homo sapiens
  misc_feature: Table A; Target 597; HLA-A*23:01; ABCB5; ENSG00000004846; TAA
ESIEGTVEF

SEQ ID NO: 598 - protein, 9 aa, Homo sapiens
  misc_feature: Table A; Target 598; HLA-A*25:01; ABCB5; ENSG00000004846; TAA
ESIEGTVEF

SEQ ID NO: 599 - protein, 9 aa, Homo sapiens
  misc_feature: Table A; Target 599; HLA-A*26:01; ABCB5; ENSG00000004846; TAA
ESIEGTVEF

SEQ ID NO: 600 - protein, 9 aa, Homo sapiens
  misc_feature: Table A; Target 600; HLA-A*32:01; ABCB5; ENSG00000004846; TAA
ESIEGTVEF

SEQ ID NO: 601 - protein, 9 aa, Homo sapiens
  misc_feature: Table A; Target 601; HLA-A*33:03; ABCB5; ENSG00000004846; TAA
ESIEGTVEF

SEQ ID NO: 602 - protein, 9 aa, Homo sapiens
  misc_feature: Table A; Target 602; HLA-A*68:01; ABCB5; ENSG00000004846; TAA
ESIEGTVEF

SEQ ID NO: 603 - protein, 9 aa, Homo sapiens
  misc_feature: Table A; Target 603; HLA-B*15:01; ABCB5; ENSG00000004846; TAA
ESIEGTVEF

SEQ ID NO: 604 - protein, 9 aa, Homo sapiens
  misc_feature: Table A; Target 604; HLA-B*18:01; ABCB5; ENSG00000004846; TAA
ESIEGTVEF

SEQ ID NO: 605 - protein, 9 aa, Homo sapiens
  misc_feature: Table A; Target 605; HLA-B*35:01; ABCB5; ENSG00000004846; TAA
ESIEGTVEF

SEQ ID NO: 606 - protein, 9 aa, Homo sapiens
  misc_feature: Table A; Target 606; HLA-B*35:03; ABCB5; ENSG00000004846; TAA
ESIEGTVEF

SEQ ID NO: 607 - protein, 9 aa, Homo sapiens
  misc_feature: Table A; Target 607; HLA-B*46:01; ABCB5; ENSG00000004846; TAA
ESIEGTVEF

SEQ ID NO: 608 - protein, 9 aa, Homo sapiens
  misc_feature: Table A; Target 608; HLA-B*58:01; ABCB5; ENSG00000004846; TAA
ESIEGTVEF

SEQ ID NO: 609 - protein, 9 aa, Homo sapiens
  misc_feature: Table A; Target 609; HLA-C*02:02; ABCB5; ENSG00000004846; TAA
ESIEGTVEF

SEQ ID NO: 610 - protein, 9 aa, Homo sapiens
  misc_feature: Table A; Target 610; HLA-C*03:03; ABCB5; ENSG00000004846; TAA
ESIEGTVEF

SEQ ID NO: 611 - protein, 9 aa, Homo sapiens
  misc_feature: Table A; Target 611; HLA-C*05:01; ABCB5; ENSG00000004846; TAA
ESIEGTVEF

SEQ ID NO: 612 - protein, 9 aa, Homo sapiens
  misc_feature: Table A; Target 612; HLA-C*07:06; ABCB5; ENSG00000004846; TAA
ESIEGTVEF

SEQ ID NO: 613 - protein, 10 aa, Homo sapiens
  misc_feature: Table A; Target 613; HLA-A*68:01; ABCB5; ENSG00000004846; TAA
ESIEGTVEFK

SEQ ID NO: 614 - protein, 10 aa, Homo sapiens
  misc_feature: Table A; Target 614; HLA-A*25:01; ABCB5; ENSG00000004846; TAA
ESKSAVQAAL

SEQ ID NO: 615 - protein, 10 aa, Homo sapiens
  misc_feature: Table A; Target 615; HLA-A*33:03; ABCB5; ENSG00000004846; TAA
ESKSAVQAAL

SEQ ID NO: 616 - protein, 9 aa, Homo sapiens
  misc_feature: Table A; Target 616; HLA-A*26:01; ABCB5; ENSG00000004846; TAA
ESMTYSTER

SEQ ID NO: 617 - protein, 9 aa, Homo sapiens
  misc_feature: Table A; Target 617; HLA-A*33:01; ABCB5; ENSG00000004846; TAA
ESMTYSTER

SEQ ID NO: 618 - protein, 9 aa, Homo sapiens
  misc_feature: Table A; Target 618; HLA-A*33:03; ABCB5; ENSG00000004846; TAA
ESMTYSTER

SEQ ID NO: 619 - protein, 9 aa, Homo sapiens
  misc_feature: Table A; Target 619; HLA-A*68:01; ABCB5; ENSG00000004846; TAA
ESMTYSTER

SEQ ID NO: 620 - protein, 9 aa, Homo sapiens
  misc_feature: Table A; Target 620; HLA-C*07:06; ABCB5; ENSG00000004846; TAA
ESMTYSTER

SEQ ID NO: 621 - protein, 10 aa, Homo sapiens
  misc_feature: Table A; Target 621; HLA-A*68:01; ABCB5; ENSG00000004846; TAA
ESMTYSTERK

SEQ ID NO: 622 - protein, 10 aa, Homo sapiens
  misc_feature: Table A; Target 622; HLA-C*07:06; ABCB5; ENSG00000004846; TAA
ESMTYSTERK

SEQ ID NO: 623 - protein, 8 aa, Homo sapiens
  misc_feature: Table A; Target 623; HLA-A*25:01; ABCB5; ENSG00000004846; TAA
ETAAMTGF

SEQ ID NO: 624 - protein, 8 aa, Homo sapiens
  misc_feature: Table A; Target 624; HLA-A*26:01; ABCB5; ENSG00000004846; TAA
ETAAMTGF

SEQ ID NO: 625 - protein, 11 aa, Homo sapiens
  misc_feature: Table A; Target 625; HLA-A*03:02; ABCB5; ENSG00000004846; TAA
ETAAMTGFANK

SEQ ID NO: 626 - protein, 11 aa, Homo sapiens
  misc_feature: Table A; Target 626; HLA-A*11:01; ABCB5; ENSG00000004846; TAA
ETAAMTGFANK

SEQ ID NO: 627 - protein, 11 aa, Homo sapiens
  misc_feature: Table A; Target 627; HLA-A*26:01; ABCB5; ENSG00000004846; TAA
ETAAMTGFANK

SEQ ID NO: 628 - protein, 11 aa, Homo sapiens
  misc_feature: Table A; Target 628; HLA-A*33:01; ABCB5; ENSG00000004846; TAA
ETAAMTGFANK

SEQ ID NO: 629 - protein, 11 aa, Homo sapiens
  misc_feature: Table A; Target 629; HLA-A*33:03; ABCB5; ENSG00000004846; TAA
ETAAMTGFANK

SEQ ID NO: 630 - protein, 11 aa, Homo sapiens
  misc_feature: Table A; Target 630; HLA-A*68:01; ABCB5; ENSG00000004846; TAA
ETAAMTGFANK

SEQ ID NO: 631 - protein, 11 aa, Homo sapiens
  misc_feature: Table A; Target 631; HLA-C*07:06; ABCB5; ENSG00000004846; TAA
ETAAMTGFANK

SEQ ID NO: 632 - protein, 9 aa, Homo sapiens
  misc_feature: Table A; Target 632; HLA-A*26:01; ABCB5; ENSG00000004846; TAA
ETFAIARGA

SEQ ID NO: 633 - protein, 9 aa, Homo sapiens
  misc_feature: Table A; Target 633; HLA-A*68:02; ABCB5; ENSG00000004846; TAA
ETFAIARGA

SEQ ID NO: 634 - protein, 11 aa, Homo sapiens
  misc_feature: Table A; Target 634; HLA-A*25:01; ABCB5; ENSG00000004846; TAA
ETFAIARGAAF

SEQ ID NO: 635 - protein, 11 aa, Homo sapiens
  misc_feature: Table A; Target 635; HLA-A*26:01; ABCB5; ENSG00000004846; TAA
ETFAIARGAAF

SEQ ID NO: 636 - protein, 11 aa, Homo sapiens
  misc_feature: Table A; Target 636; HLA-A*68:02; ABCB5; ENSG00000004846; TAA
ETFAIARGAAF

SEQ ID NO: 637 - protein, 9 aa, Homo sapiens
  misc_feature: Table A; Target 637; HLA-A*01:01; ABCB5; ENSG00000004846; TAA
ETLVLAPEY

SEQ ID NO: 638 - protein, 9 aa, Homo sapiens
  misc_feature: Table A; Target 638; HLA-A*25:01; ABCB5; ENSG00000004846; TAA
ETLVLAPEY

SEQ ID NO: 639 - protein, 9 aa, Homo sapiens
  misc_feature: Table A; Target 639; HLA-A*26:01; ABCB5; ENSG00000004846; TAA
ETLVLAPEY

SEQ ID NO: 640 - protein, 9 aa, Homo sapiens
  misc_feature: Table A; Target 640; HLA-A*29:02; ABCB5; ENSG00000004846; TAA
ETLVLAPEY

SEQ ID NO: 641 - protein, 9 aa, Homo sapiens
  misc_feature: Table A; Target 641; HLA-A*30:02; ABCB5; ENSG00000004846; TAA
ETLVLAPEY

SEQ ID NO: 642 - protein, 9 aa, Homo sapiens
  misc_feature: Table A; Target 642; HLA-A*33:01; ABCB5; ENSG00000004846; TAA
ETLVLAPEY

SEQ ID NO: 643 - protein, 9 aa, Homo sapiens
  misc_feature: Table A; Target 643; HLA-A*33:03; ABCB5; ENSG00000004846; TAA
ETLVLAPEY

SEQ ID NO: 644 - protein, 9 aa, Homo sapiens
  misc_feature: Table A; Target 644; HLA-B*18:01; ABCB5; ENSG00000004846; TAA
ETLVLAPEY

SEQ ID NO: 645 - protein, 9 aa, Homo sapiens
  misc_feature: Table A; Target 645; HLA-B*35:01; ABCB5; ENSG00000004846; TAA
ETLVLAPEY

SEQ ID NO: 646 - protein, 9 aa, Homo sapiens
  misc_feature: Table A; Target 646; HLA-B*44:03; ABCB5; ENSG00000004846; TAA
ETLVLAPEY

SEQ ID NO: 647 - protein, 9 aa, Homo sapiens
  misc_feature: Table A; Target 647; HLA-B*57:01; ABCB5; ENSG00000004846; TAA
ETLVLAPEY

SEQ ID NO: 648 - protein, 9 aa, Homo sapiens
  misc_feature: Table A; Target 648; HLA-C*07:01; ABCB5; ENSG00000004846; TAA
ETLVLAPEY

SEQ ID NO: 649 - protein, 9 aa, Homo sapiens
  misc_feature: Table A; Target 649; HLA-C*07:06; ABCB5; ENSG00000004846; TAA
ETLVLAPEY

SEQ ID NO: 650 - protein, 9 aa, Homo sapiens
  misc_feature: Table A; Target 650; HLA-A*26:01; ABCB5; ENSG00000004846; TAA
ETVALVGLN

SEQ ID NO: 651 - protein, 10 aa, Homo sapiens
  misc_feature: Table A; Target 651; HLA-A*26:01; ABCB5; ENSG00000004846; TAA
ETVALVGLNG

SEQ ID NO: 652 - protein, 10 aa, Homo sapiens
  misc_feature: Table A; Target 652; HLA-A*68:01; ABCB5; ENSG00000004846; TAA
ETVALVGLNG

SEQ ID NO: 653 - protein, 10 aa, Homo sapiens
  misc_feature: Table A; Target 653; HLA-A*68:02; ABCB5; ENSG00000004846; TAA
ETVALVGLNG

SEQ ID NO: 654 - protein, 9 aa, Homo sapiens
  misc_feature: Table A; Target 654; HLA-A*02:03; ABCB5; ENSG00000004846; TAA
EVLSSIRTV

SEQ ID NO: 655 - protein, 9 aa, Homo sapiens
  misc_feature: Table A; Target 655; HLA-A*25:01; ABCB5; ENSG00000004846; TAA
EVLSSIRTV

SEQ ID NO: 656 - protein, 9 aa, Homo sapiens
  misc_feature: Table A; Target 656; HLA-A*26:01; ABCB5; ENSG00000004846; TAA
EVLSSIRTV

SEQ ID NO: 657 - protein, 9 aa, Homo sapiens
  misc_feature: Table A; Target 657; HLA-A*68:02; ABCB5; ENSG00000004846; TAA
EVLSSIRTV

SEQ ID NO: 658 - protein, 9 aa, Homo sapiens
  misc_feature: Table A; Target 658; HLA-B*08:01; ABCB5; ENSG00000004846; TAA
EVLSSIRTV

SEQ ID NO: 659 - protein, 9 aa, Homo sapiens
  misc_feature: Table A; Target 659; HLA-B*51:01; ABCB5; ENSG00000004846; TAA
EVLSSIRTV

SEQ ID NO: 660 - protein, 10 aa, Homo sapiens
  misc_feature: Table A; Target 660; HLA-A*25:01; ABCB5; ENSG00000004846; TAA
EVLSSIRTVI

SEQ ID NO: 661 - protein, 10 aa, Homo sapiens
  misc_feature: Table A; Target 661; HLA-A*26:01; ABCB5; ENSG00000004846; TAA
EVLSSIRTVI

SEQ ID NO: 662 - protein, 10 aa, Homo sapiens
  misc_feature: Table A; Target 662; HLA-A*33:03; ABCB5; ENSG00000004846; TAA
EVLSSIRTVI

SEQ ID NO: 663 - protein, 10 aa, Homo sapiens
  misc_feature: Table A; Target 663; HLA-A*68:02; ABCB5; ENSG00000004846; TAA
EVLSSIRTVI

SEQ ID NO: 664 - protein, 9 aa, Homo sapiens
  misc_feature: Table A; Target 664; HLA-A*33:03; ABCB5; ENSG00000004846; TAA
EVSLLKILK

SEQ ID NO: 665 - protein, 9 aa, Homo sapiens
  misc_feature: Table A; Target 665; HLA-A*02:07; ABCB5; ENSG00000004846; TAA
FADGLDITL

SEQ ID NO: 666 - protein, 9 aa, Homo sapiens
  misc_feature: Table A; Target 666; HLA-A*68:02; ABCB5; ENSG00000004846; TAA
FADGLDITL

SEQ ID NO: 667 - protein, 9 aa, Homo sapiens
  misc_feature: Table A; Target 667; HLA-B*35:01; ABCB5; ENSG00000004846; TAA
FADGLDITL

SEQ ID NO: 668 - protein, 9 aa, Homo sapiens
  misc_feature: Table A; Target 668; HLA-B*35:03; ABCB5; ENSG00000004846; TAA
FADGLDITL

SEQ ID NO: 669 - protein, 9 aa, Homo sapiens
  misc_feature: Table A; Target 669; HLA-B*38:01; ABCB5; ENSG00000004846; TAA
FADGLDITL

SEQ ID NO: 670 - protein, 9 aa, Homo sapiens
  misc_feature: Table A; Target 670; HLA-B*39:01; ABCB5; ENSG00000004846; TAA
FADGLDITL

SEQ ID NO: 671 - protein, 9 aa, Homo sapiens
  misc_feature: Table A; Target 671; HLA-B*40:01; ABCB5; ENSG00000004846; TAA
FADGLDITL

SEQ ID NO: 672 - protein, 9 aa, Homo sapiens
  misc_feature: Table A; Target 672; HLA-B*55:01; ABCB5; ENSG00000004846; TAA
FADGLDITL

SEQ ID NO: 673 - protein, 9 aa, Homo sapiens
  misc_feature: Table A; Target 673; HLA-C*02:02; ABCB5; ENSG00000004846; TAA
FADGLDITL

SEQ ID NO: 674 - protein, 9 aa, Homo sapiens
  misc_feature: Table A; Target 674; HLA-C*03:03; ABCB5; ENSG00000004846; TAA
FADGLDITL

SEQ ID NO: 675 - protein, 9 aa, Homo sapiens
  misc_feature: Table A; Target 675; HLA-C*03:04; ABCB5; ENSG00000004846; TAA
FADGLDITL

SEQ ID NO: 676 - protein, 9 aa, Homo sapiens
  misc_feature: Table A; Target 676; HLA-C*04:01; ABCB5; ENSG00000004846; TAA
FADGLDITL

SEQ ID NO: 677 - protein, 9 aa, Homo sapiens
  misc_feature: Table A; Target 677; HLA-C*05:01; ABCB5; ENSG00000004846; TAA
FADGLDITL

SEQ ID NO: 678 - protein, 9 aa, Homo sapiens
  misc_feature: Table A; Target 678; HLA-C*07:04; ABCB5; ENSG00000004846; TAA
FADGLDITL

SEQ ID NO: 679 - protein, 10 aa, Homo sapiens
  misc_feature: Table A; Target 679; HLA-A*01:01; ABCB5; ENSG00000004846; TAA
FADGLDITLM

SEQ ID NO: 680 - protein, 10 aa, Homo sapiens
  misc_feature: Table A; Target 680; HLA-B*35:01; ABCB5; ENSG00000004846; TAA
FADGLDITLM

SEQ ID NO: 681 - protein, 10 aa, Homo sapiens
  misc_feature: Table A; Target 681; HLA-B*35:03; ABCB5; ENSG00000004846; TAA
FADGLDITLM

SEQ ID NO: 682 - protein, 10 aa, Homo sapiens
  misc_feature: Table A; Target 682; HLA-B*55:01; ABCB5; ENSG00000004846; TAA
FADGLDITLM

SEQ ID NO: 683 - protein, 10 aa, Homo sapiens
  misc_feature: Table A; Target 683; HLA-C*05:01; ABCB5; ENSG00000004846; TAA
FADGLDITLM

SEQ ID NO: 684 - protein, 10 aa, Homo sapiens
  misc_feature: Table A; Target 684; HLA-C*07:04; ABCB5; ENSG00000004846; TAA
FADGLDITLM

SEQ ID NO: 685 - protein, 9 aa, Homo sapiens
  misc_feature: Table A; Target 685; HLA-A*23:01; ABCB5; ENSG00000004846; TAA
FAIARGAAF

SEQ ID NO: 686 - protein, 9 aa, Homo sapiens
  misc_feature: Table A; Target 686; HLA-A*25:01; ABCB5; ENSG00000004846; TAA
FAIARGAAF

SEQ ID NO: 687 - protein, 9 aa, Homo sapiens
  misc_feature: Table A; Target 687; HLA-A*26:01; ABCB5; ENSG00000004846; TAA
FAIARGAAF

SEQ ID NO: 688 - protein, 9 aa, Homo sapiens
  misc_feature: Table A; Target 688; HLA-A*32:01; ABCB5; ENSG00000004846; TAA
FAIARGAAF

SEQ ID NO: 689 - protein, 9 aa, Homo sapiens
  misc_feature: Table A; Target 689; HLA-B*07:02; ABCB5; ENSG00000004846; TAA
FAIARGAAF

SEQ ID NO: 690 - protein, 9 aa, Homo sapiens
  misc_feature: Table A; Target 690; HLA-B*08:01; ABCB5; ENSG00000004846; TAA
FAIARGAAF

SEQ ID NO: 691 - protein, 9 aa, Homo sapiens
  misc_feature: Table A; Target 691; HLA-B*15:01; ABCB5; ENSG00000004846; TAA
FAIARGAAF

SEQ ID NO: 692 - protein, 9 aa, Homo sapiens
  misc_feature: Table A; Target 692; HLA-B*15:03; ABCB5; ENSG00000004846; TAA
FAIARGAAF

SEQ ID NO: 693 - protein, 9 aa, Homo sapiens
  misc_feature: Table A; Target 693; HLA-B*35:01; ABCB5; ENSG00000004846; TAA
FAIARGAAF

SEQ ID NO: 694 - protein, 9 aa, Homo sapiens
  misc_feature: Table A; Target 694; HLA-B*35:03; ABCB5; ENSG00000004846; TAA
FAIARGAAF

SEQ ID NO: 695 - protein, 9 aa, Homo sapiens
  misc_feature: Table A; Target 695; HLA-B*37:01; ABCB5; ENSG00000004846; TAA
FAIARGAAF

SEQ ID NO: 696 - protein, 9 aa, Homo sapiens
  misc_feature: Table A; Target 696; HLA-B*46:01; ABCB5; ENSG00000004846; TAA
FAIARGAAF

SEQ ID NO: 697 - protein, 9 aa, Homo sapiens
  misc_feature: Table A; Target 697; HLA-B*54:01; ABCB5; ENSG00000004846; TAA
FAIARGAAF

SEQ ID NO: 698 - protein, 9 aa, Homo sapiens
  misc_feature: Table A; Target 698; HLA-B*58:01; ABCB5; ENSG00000004846; TAA
FAIARGAAF

SEQ ID NO: 699 - protein, 9 aa, Homo sapiens
  misc_feature: Table A; Target 699; HLA-C*01:02; ABCB5; ENSG00000004846; TAA
FAIARGAAF

SEQ ID NO: 700 - protein, 9 aa, Homo sapiens
  misc_feature: Table A; Target 700; HLA-C*02:02; ABCB5; ENSG00000004846; TAA
FAIARGAAF

SEQ ID NO: 701 - protein, 9 aa, Homo sapiens
  misc_feature: Table A; Target 701; HLA-C*03:03; ABCB5; ENSG00000004846; TAA
FAIARGAAF

SEQ ID NO: 702 - protein, 9 aa, Homo sapiens
  misc_feature: Table A; Target 702; HLA-C*03:04; ABCB5; ENSG00000004846; TAA
FAIARGAAF

SEQ ID NO: 703 - protein, 9 aa, Homo sapiens
  misc_feature: Table A; Target 703; HLA-C*05:01; ABCB5; ENSG00000004846; TAA
FAIARGAAF

SEQ ID NO: 704 - protein, 9 aa, Homo sapiens
  misc_feature: Table A; Target 704; HLA-C*07:02; ABCB5; ENSG00000004846; TAA
FAIARGAAF

SEQ ID NO: 705 - protein, 9 aa, Homo sapiens
  misc_feature: Table A; Target 705; HLA-C*07:04; ABCB5; ENSG00000004846; TAA
FAIARGAAF

SEQ ID NO: 706 - protein, 9 aa, Homo sapiens
  misc_feature: Table A; Target 706; HLA-C*12:03; ABCB5; ENSG00000004846; TAA
FAIARGAAF

SEQ ID NO: 707 - protein, 9 aa, Homo sapiens
  misc_feature: Table A; Target 707; HLA-C*14:02; ABCB5; ENSG00000004846; TAA
FAIARGAAF

SEQ ID NO: 708 - protein, 9 aa, Homo sapiens
  misc_feature: Table A; Target 708; HLA-C*16:01; ABCB5; ENSG00000004846; TAA
FAIARGAAF

SEQ ID NO: 709 - protein, 9 aa, Homo sapiens
  misc_feature: Table A; Target 709; HLA-C*16:02; ABCB5; ENSG00000004846; TAA
FAIARGAAF

SEQ ID NO: 710 - protein, 9 aa, Homo sapiens
  misc_feature: Table A; Target 710; HLA-C*16:04; ABCB5; ENSG00000004846; TAA
FAIARGAAF

SEQ ID NO: 711 - protein, 8 aa, Homo sapiens
  misc_feature: Table A; Target 711; HLA-B*08:01; ABCB5; ENSG00000004846; TAA
FAKIITMF

SEQ ID NO: 712 - protein, 8 aa, Homo sapiens
  misc_feature: Table A; Target 712; HLA-B*46:01; ABCB5; ENSG00000004846; TAA
FAKIITMF

SEQ ID NO: 713 - protein, 8 aa, Homo sapiens
  misc_feature: Table A; Target 713; HLA-C*02:02; ABCB5; ENSG00000004846; TAA
FAKIITMF

SEQ ID NO: 714 - protein, 9 aa, Homo sapiens
  misc_feature: Table A; Target 714; HLA-B*07:02; ABCB5; ENSG00000004846; TAA
FANKDKQEL

SEQ ID NO: 715 - protein, 9 aa, Homo sapiens
  misc_feature: Table A; Target 715; HLA-B*08:01; ABCB5; ENSG00000004846; TAA
FANKDKQEL

SEQ ID NO: 716 - protein, 9 aa, Homo sapiens
  misc_feature: Table A; Target 716; HLA-B*35:01; ABCB5; ENSG00000004846; TAA
FANKDKQEL

SEQ ID NO: 717 - protein, 9 aa, Homo sapiens
  misc_feature: Table A; Target 717; HLA-B*35:03; ABCB5; ENSG00000004846; TAA
FANKDKQEL

SEQ ID NO: 718 - protein, 9 aa, Homo sapiens
  misc_feature: Table A; Target 718; HLA-B*38:01; ABCB5; ENSG00000004846; TAA
FANKDKQEL

SEQ ID NO: 719 - protein, 9 aa, Homo sapiens
  misc_feature: Table A; Target 719; HLA-B*40:01; ABCB5; ENSG00000004846; TAA
FANKDKQEL

SEQ ID NO: 720 - protein, 9 aa, Homo sapiens
  misc_feature: Table A; Target 720; HLA-B*46:01; ABCB5; ENSG00000004846; TAA
FANKDKQEL

SEQ ID NO: 721 - protein, 9 aa, Homo sapiens
  misc_feature: Table A; Target 721; HLA-B*54:01; ABCB5; ENSG00000004846; TAA
FANKDKQEL

SEQ ID NO: 722 - protein, 9 aa, Homo sapiens
  misc_feature: Table A; Target 722; HLA-B*55:01; ABCB5; ENSG00000004846; TAA
FANKDKQEL

SEQ ID NO: 723 - protein, 9 aa, Homo sapiens
  misc_feature: Table A; Target 723; HLA-B*58:01; ABCB5; ENSG00000004846; TAA
FANKDKQEL

SEQ ID NO: 724 - protein, 9 aa, Homo sapiens
  misc_feature: Table A; Target 724; HLA-C*01:02; ABCB5; ENSG00000004846; TAA
FANKDKQEL

SEQ ID NO: 725 - protein, 9 aa, Homo sapiens
  misc_feature: Table A; Target 725; HLA-C*02:02; ABCB5; ENSG00000004846; TAA
FANKDKQEL

SEQ ID NO: 726 - protein, 9 aa, Homo sapiens
  misc_feature: Table A; Target 726; HLA-C*03:03; ABCB5; ENSG00000004846; TAA
FANKDKQEL

SEQ ID NO: 727 - protein, 9 aa, Homo sapiens
  misc_feature: Table A; Target 727; HLA-C*03:04; ABCB5; ENSG00000004846; TAA
FANKDKQEL

SEQ ID NO: 728 - protein, 9 aa, Homo sapiens
  misc_feature: Table A; Target 728; HLA-C*05:01; ABCB5; ENSG00000004846; TAA
FANKDKQEL

SEQ ID NO: 729 - protein, 9 aa, Homo sapiens
  misc_feature: Table A; Target 729; HLA-C*07:02; ABCB5; ENSG00000004846; TAA
FANKDKQEL

SEQ ID NO: 730 - protein, 9 aa, Homo sapiens
  misc_feature: Table A; Target 730; HLA-C*07:04; ABCB5; ENSG00000004846; TAA
FANKDKQEL

SEQ ID NO: 731 - protein, 9 aa, Homo sapiens
  misc_feature: Table A; Target 731; HLA-C*12:03; ABCB5; ENSG00000004846; TAA
FANKDKQEL

SEQ ID NO: 732 - protein, 9 aa, Homo sapiens
  misc_feature: Table A; Target 732; HLA-C*14:02; ABCB5; ENSG00000004846; TAA
FANKDKQEL

SEQ ID NO: 733 - protein, 9 aa, Homo sapiens
  misc_feature: Table A; Target 733; HLA-C*16:01; ABCB5; ENSG00000004846; TAA
FANKDKQEL

SEQ ID NO: 734 - protein, 9 aa, Homo sapiens
  misc_feature: Table A; Target 734; HLA-C*16:02; ABCB5; ENSG00000004846; TAA
FANKDKQEL

SEQ ID NO: 735 - protein, 9 aa, Homo sapiens
  misc_feature: Table A; Target 735; HLA-A*29:02; ABCB5; ENSG00000004846; TAA
FAYAAGFRF

SEQ ID NO: 736 - protein, 9 aa, Homo sapiens
  misc_feature: Table A; Target 736; HLA-C*02:02; ABCB5; ENSG00000004846; TAA
FAYAAGFRF

SEQ ID NO: 737 - protein, 8 aa, Homo sapiens
  misc_feature: Table A; Target 737; HLA-B*18:01; ABCB5; ENSG00000004846; TAA
FEQMYEEM

SEQ ID NO: 738 - protein, 9 aa, Homo sapiens
  misc_feature: Table A; Target 738; HLA-A*30:01; ABCB5; ENSG00000004846; TAA
FEQMYEEML

SEQ ID NO: 739 - protein, 9 aa, Homo sapiens
  misc_feature: Table A; Target 739; HLA-B*40:01; ABCB5; ENSG00000004846; TAA
FEQMYEEML

SEQ ID NO: 740 - protein, 9 aa, Homo sapiens
  misc_feature: Table A; Target 740; HLA-B*40:02; ABCB5; ENSG00000004846; TAA
FEQMYEEML

SEQ ID NO: 741 - protein, 9 aa, Homo sapiens
  misc_feature: Table A; Target 741; HLA-A*23:01; ABCB5; ENSG00000004846; TAA
FFMNGTYGL

SEQ ID NO: 742 - protein, 9 aa, Homo sapiens
  misc_feature: Table A; Target 742; HLA-A*24:02; ABCB5; ENSG00000004846; TAA
FFMNGTYGL

SEQ ID NO: 743 - protein, 9 aa, Homo sapiens
  misc_feature: Table A; Target 743; HLA-A*29:02; ABCB5; ENSG00000004846; TAA
FFMNGTYGL

SEQ ID NO: 744 - protein, 9 aa, Homo sapiens
  misc_feature: Table A; Target 744; HLA-C*14:02; ABCB5; ENSG00000004846; TAA
FFMNGTYGL

SEQ ID NO: 745 - protein, 11 aa, Homo sapiens
  misc_feature: Table A; Target 745; HLA-A*23:01; ABCB5; ENSG00000004846; TAA
FFMNGTYGLAF

SEQ ID NO: 746 - protein, 11 aa, Homo sapiens
  misc_feature: Table A; Target 746; HLA-A*29:02; ABCB5; ENSG00000004846; TAA
FFMNGTYGLAF

SEQ ID NO: 747 - protein, 9 aa, Homo sapiens
  misc_feature: Table A; Target 747; HLA-A*23:01; ABCB5; ENSG00000004846; TAA
FFSVIHSSY

SEQ ID NO: 748 - protein, 9 aa, Homo sapiens
  misc_feature: Table A; Target 748; HLA-A*24:02; ABCB5; ENSG00000004846; TAA
FFSVIHSSY

SEQ ID NO: 749 - protein, 9 aa, Homo sapiens
  misc_feature: Table A; Target 749; HLA-A*29:02; ABCB5; ENSG00000004846; TAA
FFSVIHSSY

SEQ ID NO: 750 - protein, 9 aa, Homo sapiens
  misc_feature: Table A; Target 750; HLA-A*30:02; ABCB5; ENSG00000004846; TAA
FFSVIHSSY

SEQ ID NO: 751 - protein, 9 aa, Homo sapiens
  misc_feature: Table A; Target 751; HLA-B*15:03; ABCB5; ENSG00000004846; TAA
FFSVIHSSY

SEQ ID NO: 752 - protein, 9 aa, Homo sapiens
  misc_feature: Table A; Target 752; HLA-B*35:01; ABCB5; ENSG00000004846; TAA
FFSVIHSSY

SEQ ID NO: 753 - protein, 9 aa, Homo sapiens
  misc_feature: Table A; Target 753; HLA-B*46:01; ABCB5; ENSG00000004846; TAA
FFSVIHSSY

SEQ ID NO: 754 - protein, 9 aa, Homo sapiens
  misc_feature: Table A; Target 754; HLA-C*01:02; ABCB5; ENSG00000004846; TAA
FFSVIHSSY

SEQ ID NO: 755 - protein, 9 aa, Homo sapiens
  misc_feature: Table A; Target 755; HLA-C*02:02; ABCB5; ENSG00000004846; TAA
FFSVIHSSY

SEQ ID NO: 756 - protein, 9 aa, Homo sapiens
  misc_feature: Table A; Target 756; HLA-C*14:02; ABCB5; ENSG00000004846; TAA
FFSVIHSSY

SEQ ID NO: 757 - protein, 9 aa, Homo sapiens
  misc_feature: Table A; Target 757; HLA-C*16:01; ABCB5; ENSG00000004846; TAA
FFSVIHSSY

SEQ ID NO: 758 - protein, 9 aa, Homo sapiens
  misc_feature: Table A; Target 758; HLA-A*23:01; ABCB5; ENSG00000004846; TAA
FGNNDKTTL

SEQ ID NO: 759 - protein, 9 aa, Homo sapiens
  misc_feature: Table A; Target 759; HLA-B*07:02; ABCB5; ENSG00000004846; TAA
FGNNDKTTL

SEQ ID NO: 760 - protein, 9 aa, Homo sapiens
  misc_feature: Table A; Target 760; HLA-B*08:01; ABCB5; ENSG00000004846; TAA
FGNNDKTTL

SEQ ID NO: 761 - protein, 9 aa, Homo sapiens
  misc_feature: Table A; Target 761; HLA-B*27:05; ABCB5; ENSG00000004846; TAA
FGNNDKTTL

SEQ ID NO: 762 - protein, 9 aa, Homo sapiens
  misc_feature: Table A; Target 762; HLA-B*35:03; ABCB5; ENSG00000004846; TAA
FGNNDKTTL

SEQ ID NO: 763 - protein, 9 aa, Homo sapiens
  misc_feature: Table A; Target 763; HLA-B*38:01; ABCB5; ENSG00000004846; TAA
FGNNDKTTL

SEQ ID NO: 764 - protein, 9 aa, Homo sapiens
  misc_feature: Table A; Target 764; HLA-B*39:01; ABCB5; ENSG00000004846; TAA
FGNNDKTTL

SEQ ID NO: 765 - protein, 9 aa, Homo sapiens
  misc_feature: Table A; Target 765; HLA-B*40:01; ABCB5; ENSG00000004846; TAA
FGNNDKTTL

SEQ ID NO: 766 - protein, 9 aa, Homo sapiens
  misc_feature: Table A; Target 766; HLA-B*46:01; ABCB5; ENSG00000004846; TAA
FGNNDKTTL

SEQ ID NO: 767 - protein, 9 aa, Homo sapiens
  misc_feature: Table A; Target 767; HLA-B*55:01; ABCB5; ENSG00000004846; TAA
FGNNDKTTL

SEQ ID NO: 768 - protein, 9 aa, Homo sapiens
  misc_feature: Table A; Target 768; HLA-B*58:01; ABCB5; ENSG00000004846; TAA
FGNNDKTTL

SEQ ID NO: 769 - protein, 9 aa, Homo sapiens
  misc_feature: Table A; Target 769; HLA-C*01:02; ABCB5; ENSG00000004846; TAA
FGNNDKTTL

SEQ ID NO: 770 - protein, 9 aa, Homo sapiens
  misc_feature: Table A; Target 770; HLA-C*02:02; ABCB5; ENSG00000004846; TAA
FGNNDKTTL

SEQ ID NO: 771 - protein, 9 aa, Homo sapiens
  misc_feature: Table A; Target 771; HLA-C*03:03; ABCB5; ENSG00000004846; TAA
FGNNDKTTL

SEQ ID NO: 772 - protein, 9 aa, Homo sapiens
  misc_feature: Table A; Target 772; HLA-C*03:04; ABCB5; ENSG00000004846; TAA
FGNNDKTTL

SEQ ID NO: 773 - protein, 9 aa, Homo sapiens
  misc_feature: Table A; Target 773; HLA-C*05:01; ABCB5; ENSG00000004846; TAA
FGNNDKTTL

SEQ ID NO: 774 - protein, 9 aa, Homo sapiens
  misc_feature: Table A; Target 774; HLA-C*07:04; ABCB5; ENSG00000004846; TAA
FGNNDKTTL

SEQ ID NO: 775 - protein, 9 aa, Homo sapiens
  misc_feature: Table A; Target 775; HLA-C*12:03; ABCB5; ENSG00000004846; TAA
FGNNDKTTL

SEQ ID NO: 776 - protein, 9 aa, Homo sapiens
  misc_feature: Table A; Target 776; HLA-C*14:02; ABCB5; ENSG00000004846; TAA
FGNNDKTTL

SEQ ID NO: 777 - protein, 9 aa, Homo sapiens
  misc_feature: Table A; Target 777; HLA-C*16:01; ABCB5; ENSG00000004846; TAA
FGNNDKTTL

SEQ ID NO: 778 - protein, 9 aa, Homo sapiens
  misc_feature: Table A; Target 778; HLA-C*16:02; ABCB5; ENSG00000004846; TAA
FGNNDKTTL

SEQ ID NO: 779 - protein, 10 aa, Homo sapiens
  misc_feature: Table A; Target 779; HLA-A*03:02; ABCB5; ENSG00000004846; TAA
FGNNDKTTLK

SEQ ID NO: 780 - protein, 9 aa, Homo sapiens
  misc_feature: Table A; Target 780; HLA-A*32:01; ABCB5; ENSG00000004846; TAA
FGTTISNNI

SEQ ID NO: 781 - protein, 9 aa, Homo sapiens
  misc_feature: Table A; Target 781; HLA-B*13:02; ABCB5; ENSG00000004846; TAA
FGTTISNNI

SEQ ID NO: 782 - protein, 9 aa, Homo sapiens
  misc_feature: Table A; Target 782; HLA-C*12:03; ABCB5; ENSG00000004846; TAA
FGTTISNNI

SEQ ID NO: 783 - protein, 9 aa, Homo sapiens
  misc_feature: Table A; Target 783; HLA-C*16:02; ABCB5; ENSG00000004846; TAA
FGTTISNNI

SEQ ID NO: 784 - protein, 9 aa, Homo sapiens
  misc_feature: Table A; Target 784; HLA-B*38:01; ABCB5; ENSG00000004846; TAA
FHSVLAQDI

SEQ ID NO: 785 - protein, 9 aa, Homo sapiens
  misc_feature: Table A; Target 785; HLA-B*39:01; ABCB5; ENSG00000004846; TAA
FHSVLAQDI

SEQ ID NO: 786 - protein, 9 aa, Homo sapiens
  misc_feature: Table A; Target 786; HLA-A*01:01; ABCB5; ENSG00000004846; TAA
FIEGLPEKY

SEQ ID NO: 787 - protein, 9 aa, Homo sapiens
  misc_feature: Table A; Target 787; HLA-A*29:02; ABCB5; ENSG00000004846; TAA
FIEGLPEKY

SEQ ID NO: 788 - protein, 9 aa, Homo sapiens
  misc_feature: Table A; Target 788; HLA-A*30:02; ABCB5; ENSG00000004846; TAA
FIEGLPEKY

SEQ ID NO: 789 - protein, 9 aa, Homo sapiens
  misc_feature: Table A; Target 789; HLA-B*15:03; ABCB5; ENSG00000004846; TAA
FIEGLPEKY

SEQ ID NO: 790 - protein, 9 aa, Homo sapiens
  misc_feature: Table A; Target 790; HLA-B*18:01; ABCB5; ENSG00000004846; TAA
FIEGLPEKY

SEQ ID NO: 791 - protein, 9 aa, Homo sapiens
  misc_feature: Table A; Target 791; HLA-B*35:01; ABCB5; ENSG00000004846; TAA
FIEGLPEKY

SEQ ID NO: 792 - protein, 9 aa, Homo sapiens
  misc_feature: Table A; Target 792; HLA-C*02:02; ABCB5; ENSG00000004846; TAA
FIEGLPEKY

SEQ ID NO: 793 - protein, 9 aa, Homo sapiens
  misc_feature: Table A; Target 793; HLA-C*05:01; ABCB5; ENSG00000004846; TAA
FIEGLPEKY

SEQ ID NO: 794 - protein, 9 aa, Homo sapiens
  misc_feature: Table A; Target 794; HLA-C*07:04; ABCB5; ENSG00000004846; TAA
FIEGLPEKY

SEQ ID NO: 795 - protein, 9 aa, Homo sapiens
  misc_feature: Table A; Target 795; HLA-C*12:03; ABCB5; ENSG00000004846; TAA
FIEGLPEKY

SEQ ID NO: 796 - protein, 8 aa, Homo sapiens
  misc_feature: Table A; Target 796; HLA-C*03:04; ABCB5; ENSG00000004846; TAA
FILRGLSL

SEQ ID NO: 797 - protein, 9 aa, Homo sapiens
  misc_feature: Table A; Target 797; HLA-A*02:07; ABCB5; ENSG00000004846; TAA
FIMEFPNKF

SEQ ID NO: 798 - protein, 9 aa, Homo sapiens
  misc_feature: Table A; Target 798; HLA-A*25:01; ABCB5; ENSG00000004846; TAA
FIMEFPNKF

SEQ ID NO: 799 - protein, 9 aa, Homo sapiens
  misc_feature: Table A; Target 799; HLA-A*26:01; ABCB5; ENSG00000004846; TAA
FIMEFPNKF

SEQ ID NO: 800 - protein, 9 aa, Homo sapiens
  misc_feature: Table A; Target 800; HLA-C*02:02; ABCB5; ENSG00000004846; TAA
FIMEFPNKF

SEQ ID NO: 801 - protein, 9 aa, Homo sapiens
  misc_feature: Table A; Target 801; HLA-A*29:02; ABCB5; ENSG00000004846; TAA
FIVFTAIAY

SEQ ID NO: 802 - protein, 9 aa, Homo sapiens
  misc_feature: Table A; Target 802; HLA-B*35:01; ABCB5; ENSG00000004846; TAA
FIVFTAIAY

SEQ ID NO: 803 - protein, 9 aa, Homo sapiens
  misc_feature: Table A; Target 803; HLA-B*46:01; ABCB5; ENSG00000004846; TAA
FIVFTAIAY

SEQ ID NO: 804 - protein, 9 aa, Homo sapiens
  misc_feature: Table A; Target 804; HLA-C*02:02; ABCB5; ENSG00000004846; TAA
FIVFTAIAY

SEQ ID NO: 805 - protein, 9 aa, Homo sapiens
  misc_feature: Table A; Target 805; HLA-C*07:04; ABCB5; ENSG00000004846; TAA
FIVFTAIAY

SEQ ID NO: 806 - protein, 9 aa, Homo sapiens
  misc_feature: Table A; Target 806; HLA-B*15:03; ABCB5; ENSG00000004846; TAA
FKLVNAQSV

SEQ ID NO: 807 - protein, 10 aa, Homo sapiens
  misc_feature: Table A; Target 807; HLA-A*02:04; ABCB5; ENSG00000004846; TAA
FLILSIAPVL

SEQ ID NO: 808 - protein, 8 aa, Homo sapiens
  misc_feature: Table A; Target 808; HLA-C*07:02; ABCB5; ENSG00000004846; TAA
FMNGTYGL

SEQ ID NO: 809 - protein, 10 aa, Homo sapiens
  misc_feature: Table A; Target 809; HLA-A*29:02; ABCB5; ENSG00000004846; TAA
FMNGTYGLAF

SEQ ID NO: 810 - protein, 9 aa, Homo sapiens
  misc_feature: Table A; Target 810; HLA-A*31:01; ABCB5; ENSG00000004846; TAA
FMQGLFYGR

SEQ ID NO: 811 - protein, 9 aa, Homo sapiens
  misc_feature: Table A; Target 811; HLA-A*33:01; ABCB5; ENSG00000004846; TAA
FMQGLFYGR

SEQ ID NO: 812 - protein, 9 aa, Homo sapiens
  misc_feature: Table A; Target 812; HLA-A*23:01; ABCB5; ENSG00000004846; TAA
FNYPSRPSI

SEQ ID NO: 813 - protein, 9 aa, Homo sapiens
  misc_feature: Table A; Target 813; HLA-A*24:02; ABCB5; ENSG00000004846; TAA
FNYPSRPSI

SEQ ID NO: 814 - protein, 9 aa, Homo sapiens
  misc_feature: Table A; Target 814; HLA-B*51:01; ABCB5; ENSG00000004846; TAA
FNYPSRPSI

SEQ ID NO: 815 - protein, 9 aa, Homo sapiens
  misc_feature: Table A; Target 815; HLA-B*54:01; ABCB5; ENSG00000004846; TAA
FNYPSRPSI

SEQ ID NO: 816 - protein, 9 aa, Homo sapiens
  misc_feature: Table A; Target 816; HLA-C*03:03; ABCB5; ENSG00000004846; TAA
FNYPSRPSI

SEQ ID NO: 817 - protein, 9 aa, Homo sapiens
  misc_feature: Table A; Target 817; HLA-C*03:04; ABCB5; ENSG00000004846; TAA
FNYPSRPSI

SEQ ID NO: 818 - protein, 9 aa, Homo sapiens
  misc_feature: Table A; Target 818; HLA-C*16:01; ABCB5; ENSG00000004846; TAA
FNYPSRPSI

SEQ ID NO: 819 - protein, 8 aa, Homo sapiens
  misc_feature: Table A; Target 819; HLA-B*07:02; ABCB5; ENSG00000004846; TAA
FPNKFNTL

SEQ ID NO: 820 - protein, 8 aa, Homo sapiens
  misc_feature: Table A; Target 820; HLA-B*08:01; ABCB5; ENSG00000004846; TAA
FPNKFNTL

SEQ ID NO: 821 - protein, 8 aa, Homo sapiens
  misc_feature: Table A; Target 821; HLA-B*35:01; ABCB5; ENSG00000004846; TAA
FPNKFNTL

SEQ ID NO: 822 - protein, 8 aa, Homo sapiens
  misc_feature: Table A; Target 822; HLA-B*35:03; ABCB5; ENSG00000004846; TAA
FPNKFNTL

SEQ ID NO: 823 - protein, 8 aa, Homo sapiens
  misc_feature: Table A; Target 823; HLA-B*51:01; ABCB5; ENSG00000004846; TAA
FPNKFNTL

SEQ ID NO: 824 - protein, 8 aa, Homo sapiens
  misc_feature: Table A; Target 824; HLA-B*54:01; ABCB5; ENSG00000004846; TAA
FPNKFNTL

SEQ ID NO: 825 - protein, 8 aa, Homo sapiens
  misc_feature: Table A; Target 825; HLA-B*56:01; ABCB5; ENSG00000004846; TAA
FPNKFNTL

SEQ ID NO: 826 - protein, 8 aa, Homo sapiens
  misc_feature: Table A; Target 826; HLA-C*03:03; ABCB5; ENSG00000004846; TAA
FPNKFNTL

SEQ ID NO: 827 - protein, 8 aa, Homo sapiens
  misc_feature: Table A; Target 827; HLA-C*03:04; ABCB5; ENSG00000004846; TAA
FPNKFNTL

SEQ ID NO: 828 - protein, 8 aa, Homo sapiens
  misc_feature: Table A; Target 828; HLA-C*07:02; ABCB5; ENSG00000004846; TAA
FPNKFNTL

SEQ ID NO: 829 - protein, 8 aa, Homo sapiens
  misc_feature: Table A; Target 829; HLA-C*16:01; ABCB5; ENSG00000004846; TAA
FPNKFNTL

SEQ ID NO: 830 - protein, 9 aa, Homo sapiens
  misc_feature: Table A; Target 830; HLA-B*51:01; ABCB5; ENSG00000004846; TAA
FPNKFNTLV

SEQ ID NO: 831 - protein, 9 aa, Homo sapiens
  misc_feature: Table A; Target 831; HLA-B*54:01; ABCB5; ENSG00000004846; TAA
FPNKFNTLV

SEQ ID NO: 832 - protein, 9 aa, Homo sapiens
  misc_feature: Table A; Target 832; HLA-B*55:01; ABCB5; ENSG00000004846; TAA
FPNKFNTLV

SEQ ID NO: 833 - protein, 9 aa, Homo sapiens
  misc_feature: Table A; Target 833; HLA-B*56:01; ABCB5; ENSG00000004846; TAA
FPNKFNTLV

SEQ ID NO: 834 - protein, 10 aa, Homo sapiens
  misc_feature: Table A; Target 834; HLA-B*54:01; ABCB5; ENSG00000004846; TAA
FPNKFNTLVG

SEQ ID NO: 835 - protein, 9 aa, Homo sapiens
  misc_feature: Table A; Target 835; HLA-B*13:02; ABCB5; ENSG00000004846; TAA
FQNMSTFSI

SEQ ID NO: 836 - protein, 9 aa, Homo sapiens
  misc_feature: Table A; Target 836; HLA-B*54:01; ABCB5; ENSG00000004846; TAA
FSHAFIYFA

SEQ ID NO: 837 - protein, 10 aa, Homo sapiens
  misc_feature: Table A; Target 837; HLA-A*29:02; ABCB5; ENSG00000004846; TAA
FSHAFIYFAY

SEQ ID NO: 838 - protein, 9 aa, Homo sapiens
  misc_feature: Table A; Target 838; HLA-A*02:07; ABCB5; ENSG00000004846; TAA
FSIGLAVGL

SEQ ID NO: 839 - protein, 9 aa, Homo sapiens
  misc_feature: Table A; Target 839; HLA-A*68:02; ABCB5; ENSG00000004846; TAA
FSIGLAVGL

SEQ ID NO: 840 - protein, 9 aa, Homo sapiens
  misc_feature: Table A; Target 840; HLA-C*02:02; ABCB5; ENSG00000004846; TAA
FSIGLAVGL

SEQ ID NO: 841 - protein, 9 aa, Homo sapiens
  misc_feature: Table A; Target 841; HLA-C*03:03; ABCB5; ENSG00000004846; TAA
FSIGLAVGL

SEQ ID NO: 842 - protein, 9 aa, Homo sapiens
  misc_feature: Table A; Target 842; HLA-C*03:04; ABCB5; ENSG00000004846; TAA
FSIGLAVGL

SEQ ID NO: 843 - protein, 9 aa, Homo sapiens
  misc_feature: Table A; Target 843; HLA-C*12:03; ABCB5; ENSG00000004846; TAA
FSIGLAVGL

SEQ ID NO: 844 - protein, 8 aa, Homo sapiens
  misc_feature: Table A; Target 844; HLA-A*32:01; ABCB5; ENSG00000004846; TAA
FSVIHSSY

SEQ ID NO: 845 - protein, 8 aa, Homo sapiens
  misc_feature: Table A; Target 845; HLA-B*08:01; ABCB5; ENSG00000004846; TAA
FSVIHSSY

SEQ ID NO: 846 - protein, 8 aa, Homo sapiens
  misc_feature: Table A; Target 846; HLA-B*15:01; ABCB5; ENSG00000004846; TAA
FSVIHSSY

SEQ ID NO: 847 - protein, 8 aa, Homo sapiens
  misc_feature: Table A; Target 847; HLA-B*15:03; ABCB5; ENSG00000004846; TAA
FSVIHSSY

SEQ ID NO: 848 - protein, 8 aa, Homo sapiens
  misc_feature: Table A; Target 848; HLA-B*46:01; ABCB5; ENSG00000004846; TAA
FSVIHSSY

SEQ ID NO: 849 - protein, 8 aa, Homo sapiens
  misc_feature: Table A; Target 849; HLA-C*01:02; ABCB5; ENSG00000004846; TAA
FSVIHSSY

SEQ ID NO: 850 - protein, 8 aa, Homo sapiens
  misc_feature: Table A; Target 850; HLA-C*02:02; ABCB5; ENSG00000004846; TAA
FSVIHSSY

SEQ ID NO: 851 - protein, 8 aa, Homo sapiens
  misc_feature: Table A; Target 851; HLA-C*07:01; ABCB5; ENSG00000004846; TAA
FSVIHSSY

SEQ ID NO: 852 - protein, 8 aa, Homo sapiens
  misc_feature: Table A; Target 852; HLA-C*07:04; ABCB5; ENSG00000004846; TAA
FSVIHSSY

SEQ ID NO: 853 - protein, 8 aa, Homo sapiens
  misc_feature: Table A; Target 853; HLA-C*12:03; ABCB5; ENSG00000004846; TAA
FSVIHSSY

SEQ ID NO: 854 - protein, 8 aa, Homo sapiens
  misc_feature: Table A; Target 854; HLA-C*14:02; ABCB5; ENSG00000004846; TAA
FSVIHSSY

SEQ ID NO: 855 - protein, 8 aa, Homo sapiens
  misc_feature: Table A; Target 855; HLA-C*16:01; ABCB5; ENSG00000004846; TAA
FSVIHSSY

SEQ ID NO: 856 - protein, 9 aa, Homo sapiens
  misc_feature: Table A; Target 856; HLA-A*25:01; ABCB5; ENSG00000004846; TAA
FTAIAYGAM

SEQ ID NO: 857 - protein, 9 aa, Homo sapiens
  misc_feature: Table A; Target 857; HLA-A*26:01; ABCB5; ENSG00000004846; TAA
FTAIAYGAM

SEQ ID NO: 858 - protein, 9 aa, Homo sapiens
  misc_feature: Table A; Target 858; HLA-B*46:01; ABCB5; ENSG00000004846; TAA
FTAIAYGAM

SEQ ID NO: 859 - protein, 9 aa, Homo sapiens
  misc_feature: Table A; Target 859; HLA-C*01:02; ABCB5; ENSG00000004846; TAA
FTAIAYGAM

SEQ ID NO: 860 - protein, 9 aa, Homo sapiens
  misc_feature: Table A; Target 860; HLA-C*02:02; ABCB5; ENSG00000004846; TAA
FTAIAYGAM

SEQ ID NO: 861 - protein, 9 aa, Homo sapiens
  misc_feature: Table A; Target 861; HLA-C*03:03; ABCB5; ENSG00000004846; TAA
FTAIAYGAM

SEQ ID NO: 862 - protein, 9 aa, Homo sapiens
  misc_feature: Table A; Target 862; HLA-C*03:04; ABCB5; ENSG00000004846; TAA
FTAIAYGAM

SEQ ID NO: 863 - protein, 8 aa, Homo sapiens
  misc_feature: Table A; Target 863; HLA-C*12:03; ABCB5; ENSG00000004846; TAA
FVGSSGCG

SEQ ID NO: 864 - protein, 9 aa, Homo sapiens
  misc_feature: Table A; Target 864; HLA-A*03:01; ABCB5; ENSG00000004846; TAA
FVGSSGCGK

SEQ ID NO: 865 - protein, 9 aa, Homo sapiens
  misc_feature: Table A; Target 865; HLA-A*03:02; ABCB5; ENSG00000004846; TAA
FVGSSGCGK

SEQ ID NO: 866 - protein, 9 aa, Homo sapiens
  misc_feature: Table A; Target 866; HLA-A*11:01; ABCB5; ENSG00000004846; TAA
FVGSSGCGK

SEQ ID NO: 867 - protein, 9 aa, Homo sapiens
  misc_feature: Table A; Target 867; HLA-A*25:01; ABCB5; ENSG00000004846; TAA
FVILGVICF

SEQ ID NO: 868 - protein, 9 aa, Homo sapiens
  misc_feature: Table A; Target 868; HLA-A*26:01; ABCB5; ENSG00000004846; TAA
FVILGVICF

SEQ ID NO: 869 - protein, 9 aa, Homo sapiens
  misc_feature: Table A; Target 869; HLA-C*02:02; ABCB5; ENSG00000004846; TAA
FVILGVICF

SEQ ID NO: 870 - protein, 9 aa, Homo sapiens
  misc_feature: Table A; Target 870; HLA-A*68:02; ABCB5; ENSG00000004846; TAA
FVSYFMQGL

SEQ ID NO: 871 - protein, 8 aa, Homo sapiens
  misc_feature: Table A; Target 871; HLA-C*14:02; ABCB5; ENSG00000004846; TAA
FYGRAGEI

SEQ ID NO: 872 - protein, 9 aa, Homo sapiens
  misc_feature: Table A; Target 872; HLA-A*24:02; ABCB5; ENSG00000004846; TAA
FYGRAGEIL

SEQ ID NO: 873 - protein, 11 aa, Homo sapiens
  misc_feature: Table A; Target 873; HLA-A*24:02; ABCB5; ENSG00000004846; TAA
FYGRAGEILTM

SEQ ID NO: 874 - protein, 9 aa, Homo sapiens
  misc_feature: Table A; Target 874; HLA-A*24:02; ABCB5; ENSG00000004846; TAA
FYPCRPDVF

SEQ ID NO: 875 - protein, 11 aa, Homo sapiens
  misc_feature: Table A; Target 875; HLA-A*24:02; ABCB5; ENSG00000004846; TAA
FYPCRPDVFIL

SEQ ID NO: 876 - protein, 9 aa, Homo sapiens
  misc_feature: Table A; Target 876; HLA-A*02:01; ABCB5; ENSG00000004846; TAA
GAAFHIFQV

SEQ ID NO: 877 - protein, 9 aa, Homo sapiens
  misc_feature: Table A; Target 877; HLA-A*02:03; ABCB5; ENSG00000004846; TAA
GAAFHIFQV

SEQ ID NO: 878 - protein, 9 aa, Homo sapiens
  misc_feature: Table A; Target 878; HLA-A*02:04; ABCB5; ENSG00000004846; TAA
GAAFHIFQV

SEQ ID NO: 879 - protein, 9 aa, Homo sapiens
  misc_feature: Table A; Target 879; HLA-A*68:02; ABCB5; ENSG00000004846; TAA
GAAFHIFQV

SEQ ID NO: 880 - protein, 9 aa, Homo sapiens
  misc_feature: Table A; Target 880; HLA-B*13:02; ABCB5; ENSG00000004846; TAA
GAAFHIFQV

SEQ ID NO: 881 - protein, 9 aa, Homo sapiens
  misc_feature: Table A; Target 881; HLA-C*02:02; ABCB5; ENSG00000004846; TAA
GAAFHIFQV

SEQ ID NO: 882 - protein, 9 aa, Homo sapiens
  misc_feature: Table A; Target 882; HLA-C*12:03; ABCB5; ENSG00000004846; TAA
GAAFHIFQV

SEQ ID NO: 883 - protein, 9 aa, Homo sapiens
  misc_feature: Table A; Target 883; HLA-C*16:02; ABCB5; ENSG00000004846; TAA
GAAFHIFQV

SEQ ID NO: 884 - protein, 9 aa, Homo sapiens
  misc_feature: Table A; Target 884; HLA-C*16:04; ABCB5; ENSG00000004846; TAA
GAAFHIFQV

SEQ ID NO: 885 - protein, 9 aa, Homo sapiens
  misc_feature: Table A; Target 885; HLA-C*02:02; ABCB5; ENSG00000004846; TAA
GAAHLFALL

SEQ ID NO: 886 - protein, 9 aa, Homo sapiens
  misc_feature: Table A; Target 886; HLA-C*16:01; ABCB5; ENSG00000004846; TAA
GAAVPHFET

SEQ ID NO: 887 - protein, 10 aa, Homo sapiens
  misc_feature: Table A; Target 887; HLA-A*25:01; ABCB5; ENSG00000004846; TAA
GAAVPHFETF

SEQ ID NO: 888 - protein, 10 aa, Homo sapiens
  misc_feature: Table A; Target 888; HLA-B*15:03; ABCB5; ENSG00000004846; TAA
GAAVPHFETF

SEQ ID NO: 889 - protein, 10 aa, Homo sapiens
  misc_feature: Table A; Target 889; HLA-B*38:01; ABCB5; ENSG00000004846; TAA
GAAVPHFETF

SEQ ID NO: 890 - protein, 10 aa, Homo sapiens
  misc_feature: Table A; Target 890; HLA-B*46:01; ABCB5; ENSG00000004846; TAA
GAAVPHFETF

SEQ ID NO: 891 - protein, 10 aa, Homo sapiens
  misc_feature: Table A; Target 891; HLA-B*57:01; ABCB5; ENSG00000004846; TAA
GAAVPHFETF

SEQ ID NO: 892 - protein, 10 aa, Homo sapiens
  misc_feature: Table A; Target 892; HLA-B*58:01; ABCB5; ENSG00000004846; TAA
GAAVPHFETF

SEQ ID NO: 893 - protein, 10 aa, Homo sapiens
  misc_feature: Table A; Target 893; HLA-C*02:02; ABCB5; ENSG00000004846; TAA
GAAVPHFETF

SEQ ID NO: 894 - protein, 10 aa, Homo sapiens
  misc_feature: Table A; Target 894; HLA-C*16:04; ABCB5; ENSG00000004846; TAA
GAAVPHFETF

SEQ ID NO: 895 - protein, 9 aa, Homo sapiens
  misc_feature: Table A; Target 895; HLA-A*03:01; ABCB5; ENSG00000004846; TAA
GAHAELMAK

SEQ ID NO: 896 - protein, 9 aa, Homo sapiens
  misc_feature: Table A; Target 896; HLA-A*03:02; ABCB5; ENSG00000004846; TAA
GAHAELMAK

SEQ ID NO: 897 - protein, 9 aa, Homo sapiens
  misc_feature: Table A; Target 897; HLA-A*11:01; ABCB5; ENSG00000004846; TAA
GAHAELMAK

SEQ ID NO: 898 - protein, 9 aa, Homo sapiens
  misc_feature: Table A; Target 898; HLA-B*27:05; ABCB5; ENSG00000004846; TAA
GAHAELMAK

SEQ ID NO: 899 - protein, 10 aa, Homo sapiens
  misc_feature: Table A; Target 899; HLA-C*07:06; ABCB5; ENSG00000004846; TAA
GAHAELMAKR

SEQ ID NO: 900 - protein, 9 aa, Homo sapiens
  misc_feature: Table A; Target 900; HLA-A*23:01; ABCB5; ENSG00000004846; TAA
GAMAIGETL

SEQ ID NO: 901 - protein, 9 aa, Homo sapiens
  misc_feature: Table A; Target 901; HLA-A*25:01; ABCB5; ENSG00000004846; TAA
GAMAIGETL

SEQ ID NO: 902 - protein, 9 aa, Homo sapiens
  misc_feature: Table A; Target 902; HLA-A*30:01; ABCB5; ENSG00000004846; TAA
GAMAIGETL

SEQ ID NO: 903 - protein, 9 aa, Homo sapiens
  misc_feature: Table A; Target 903; HLA-A*32:01; ABCB5; ENSG00000004846; TAA
GAMAIGETL

SEQ ID NO: 904 - protein, 9 aa, Homo sapiens
  misc_feature: Table A; Target 904; HLA-B*07:02; ABCB5; ENSG00000004846; TAA
GAMAIGETL

SEQ ID NO: 905 - protein, 9 aa, Homo sapiens
  misc_feature: Table A; Target 905; HLA-B*13:02; ABCB5; ENSG00000004846; TAA
GAMAIGETL

SEQ ID NO: 906 - protein, 9 aa, Homo sapiens
  misc_feature: Table A; Target 906; HLA-B*15:01; ABCB5; ENSG00000004846; TAA
GAMAIGETL

SEQ ID NO: 907 - protein, 9 aa, Homo sapiens
  misc_feature: Table A; Target 907; HLA-B*15:03; ABCB5; ENSG00000004846; TAA
GAMAIGETL

SEQ ID NO: 908 - protein, 9 aa, Homo sapiens
  misc_feature: Table A; Target 908; HLA-B*27:05; ABCB5; ENSG00000004846; TAA
GAMAIGETL

SEQ ID NO: 909 - protein, 9 aa, Homo sapiens
  misc_feature: Table A; Target 909; HLA-B*35:01; ABCB5; ENSG00000004846; TAA
GAMAIGETL

SEQ ID NO: 910 - protein, 9 aa, Homo sapiens
  misc_feature: Table A; Target 910; HLA-B*35:03; ABCB5; ENSG00000004846; TAA
GAMAIGETL

SEQ ID NO: 911 - protein, 9 aa, Homo sapiens
  misc_feature: Table A; Target 911; HLA-B*38:01; ABCB5; ENSG00000004846; TAA
GAMAIGETL

SEQ ID NO: 912 - protein, 9 aa, Homo sapiens
  misc_feature: Table A; Target 912; HLA-B*39:01; ABCB5; ENSG00000004846; TAA
GAMAIGETL

SEQ ID NO: 913 - protein, 9 aa, Homo sapiens
  misc_feature: Table A; Target 913; HLA-B*40:01; ABCB5; ENSG00000004846; TAA
GAMAIGETL

SEQ ID NO: 914 - protein, 9 aa, Homo sapiens
  misc_feature: Table A; Target 914; HLA-B*46:01; ABCB5; ENSG00000004846; TAA
GAMAIGETL

SEQ ID NO: 915 - protein, 9 aa, Homo sapiens
  misc_feature: Table A; Target 915; HLA-B*55:01; ABCB5; ENSG00000004846; TAA
GAMAIGETL

SEQ ID NO: 916 - protein, 9 aa, Homo sapiens
  misc_feature: Table A; Target 916; HLA-B*58:01; ABCB5; ENSG00000004846; TAA
GAMAIGETL

SEQ ID NO: 917 - protein, 9 aa, Homo sapiens
  misc_feature: Table A; Target 917; HLA-C*01:02; ABCB5; ENSG00000004846; TAA
GAMAIGETL

SEQ ID NO: 918 - protein, 9 aa, Homo sapiens
  misc_feature: Table A; Target 918; HLA-C*02:02; ABCB5; ENSG00000004846; TAA
GAMAIGETL

SEQ ID NO: 919 - protein, 9 aa, Homo sapiens
  misc_feature: Table A; Target 919; HLA-C*03:03; ABCB5; ENSG00000004846; TAA
GAMAIGETL

SEQ ID NO: 920 - protein, 9 aa, Homo sapiens
  misc_feature: Table A; Target 920; HLA-C*03:04; ABCB5; ENSG00000004846; TAA
GAMAIGETL

SEQ ID NO: 921 - protein, 9 aa, Homo sapiens
  misc_feature: Table A; Target 921; HLA-C*05:01; ABCB5; ENSG00000004846; TAA
GAMAIGETL

SEQ ID NO: 922 - protein, 9 aa, Homo sapiens
  misc_feature: Table A; Target 922; HLA-C*07:02; ABCB5; ENSG00000004846; TAA
GAMAIGETL

SEQ ID NO: 923 - protein, 9 aa, Homo sapiens
  misc_feature: Table A; Target 923; HLA-C*07:06; ABCB5; ENSG00000004846; TAA
GAMAIGETL

SEQ ID NO: 924 - protein, 9 aa, Homo sapiens
  misc_feature: Table A; Target 924; HLA-C*14:02; ABCB5; ENSG00000004846; TAA
GAMAIGETL

SEQ ID NO: 925 - protein, 9 aa, Homo sapiens
  misc_feature: Table A; Target 925; HLA-C*16:02; ABCB5; ENSG00000004846; TAA
GAMAIGETL

SEQ ID NO: 926 - protein, 9 aa, Homo sapiens
  misc_feature: Table A; Target 926; HLA-C*16:04; ABCB5; ENSG00000004846; TAA
GAMAIGETL

SEQ ID NO: 927 - protein, 9 aa, Homo sapiens
  misc_feature: Table A; Target 927; HLA-C*16:01; ABCB5; ENSG00000004846; TAA
GATGSRIGV

SEQ ID NO: 928 - protein, 9 aa, Homo sapiens
  misc_feature: Table A; Target 928; HLA-C*16:02; ABCB5; ENSG00000004846; TAA
GATGSRIGV

SEQ ID NO: 929 - protein, 9 aa, Homo sapiens
  misc_feature: Table A; Target 929; HLA-A*31:01; ABCB5; ENSG00000004846; TAA
GAYLIQAGR

SEQ ID NO: 930 - protein, 9 aa, Homo sapiens
  misc_feature: Table A; Target 930; HLA-A*33:03; ABCB5; ENSG00000004846; TAA
GAYLIQAGR

SEQ ID NO: 931 - protein, 9 aa, Homo sapiens
  misc_feature: Table A; Target 931; HLA-A*68:01; ABCB5; ENSG00000004846; TAA
GAYLIQAGR

SEQ ID NO: 932 - protein, 9 aa, Homo sapiens
  misc_feature: Table A; Target 932; HLA-C*07:06; ABCB5; ENSG00000004846; TAA
GAYLIQAGR

SEQ ID NO: 933 - protein, 11 aa, Homo sapiens
  misc_feature: Table A; Target 933; HLA-A*30:02; ABCB5; ENSG00000004846; TAA
GCLVQTNTTNY

SEQ ID NO: 934 - protein, 11 aa, Homo sapiens
  misc_feature: Table A; Target 934; HLA-B*15:01; ABCB5; ENSG00000004846; TAA
GCLVQTNTTNY

SEQ ID NO: 935 - protein, 11 aa, Homo sapiens
  misc_feature: Table A; Target 935; HLA-B*15:03; ABCB5; ENSG00000004846; TAA
GCLVQTNTTNY

SEQ ID NO: 936 - protein, 11 aa, Homo sapiens
  misc_feature: Table A; Target 936; HLA-C*07:01; ABCB5; ENSG00000004846; TAA
GCLVQTNTTNY

SEQ ID NO: 937 - protein, 8 aa, Homo sapiens
  misc_feature: Table A; Target 937; HLA-B*37:01; ABCB5; ENSG00000004846; TAA
GDKIALLF

SEQ ID NO: 938 - protein, 9 aa, Homo sapiens
  misc_feature: Table A; Target 938; HLA-B*37:01; ABCB5; ENSG00000004846; TAA
GDNSRVVPL

SEQ ID NO: 939 - protein, 8 aa, Homo sapiens
  misc_feature: Table A; Target 939; HLA-A*30:01; ABCB5; ENSG00000004846; TAA
GEILTMRL

SEQ ID NO: 940 - protein, 8 aa, Homo sapiens
  misc_feature: Table A; Target 940; HLA-B*37:01; ABCB5; ENSG00000004846; TAA
GEILTMRL

SEQ ID NO: 941 - protein, 8 aa, Homo sapiens
  misc_feature: Table A; Target 941; HLA-B*40:01; ABCB5; ENSG00000004846; TAA
GEILTMRL

SEQ ID NO: 942 - protein, 8 aa, Homo sapiens
  misc_feature: Table A; Target 942; HLA-B*44:02; ABCB5; ENSG00000004846; TAA
GEILTMRL

SEQ ID NO: 943 - protein, 8 aa, Homo sapiens
  misc_feature: Table A; Target 943; HLA-B*44:03; ABCB5; ENSG00000004846; TAA
GEILTMRL

SEQ ID NO: 944 - protein, 8 aa, Homo sapiens
  misc_feature: Table A; Target 944; HLA-B*49:01; ABCB5; ENSG00000004846; TAA
GEILTMRL

SEQ ID NO: 945 - protein, 8 aa, Homo sapiens
  misc_feature: Table A; Target 945; HLA-B*49:01; ABCB5; ENSG00000004846; TAA
GEMSDNLI

SEQ ID NO: 946 - protein, 10 aa, Homo sapiens
  misc_feature: Table A; Target 946; HLA-B*40:01; ABCB5; ENSG00000004846; TAA
GEMSDNLISG

SEQ ID NO: 947 - protein, 10 aa, Homo sapiens
  misc_feature: Table A; Target 947; HLA-B*49:01; ABCB5; ENSG00000004846; TAA
GEMSDNLISG

SEQ ID NO: 948 - protein, 11 aa, Homo sapiens
  misc_feature: Table A; Target 948; HLA-B*49:01; ABCB5; ENSG00000004846; TAA
GEMSDNLISGC

SEQ ID NO: 949 - protein, 9 aa, Homo sapiens
  misc_feature: Table A; Target 949; HLA-B*40:01; ABCB5; ENSG00000004846; TAA
GEPGYTIGT

SEQ ID NO: 950 - protein, 10 aa, Homo sapiens
  misc_feature: Table A; Target 950; HLA-A*30:01; ABCB5; ENSG00000004846; TAA
GEPGYTIGTV

SEQ ID NO: 951 - protein, 10 aa, Homo sapiens
  misc_feature: Table A; Target 951; HLA-B*40:01; ABCB5; ENSG00000004846; TAA
GEPGYTIGTV

SEQ ID NO: 952 - protein, 10 aa, Homo sapiens
  misc_feature: Table A; Target 952; HLA-B*40:02; ABCB5; ENSG00000004846; TAA
GEPGYTIGTV

SEQ ID NO: 953 - protein, 10 aa, Homo sapiens
  misc_feature: Table A; Target 953; HLA-B*49:01; ABCB5; ENSG00000004846; TAA
GEPGYTIGTV

SEQ ID NO: 954 - protein, 11 aa, Homo sapiens
  misc_feature: Table A; Target 954; HLA-A*30:01; ABCB5; ENSG00000004846; TAA
GEPGYTIGTVL

SEQ ID NO: 955 - protein, 11 aa, Homo sapiens
  misc_feature: Table A; Target 955; HLA-B*40:01; ABCB5; ENSG00000004846; TAA
GEPGYTIGTVL

SEQ ID NO: 956 - protein, 11 aa, Homo sapiens
  misc_feature: Table A; Target 956; HLA-B*40:02; ABCB5; ENSG00000004846; TAA
GEPGYTIGTVL

SEQ ID NO: 957 - protein, 11 aa, Homo sapiens
  misc_feature: Table A; Target 957; HLA-B*49:01; ABCB5; ENSG00000004846; TAA
GEPGYTIGTVL

SEQ ID NO: 958 - protein, 10 aa, Homo sapiens
  misc_feature: Table A; Target 958; HLA-A*30:02; ABCB5; ENSG00000004846; TAA
GETLVLAPEY

SEQ ID NO: 959 - protein, 10 aa, Homo sapiens
  misc_feature: Table A; Target 959; HLA-B*18:01; ABCB5; ENSG00000004846; TAA
GETLVLAPEY

SEQ ID NO: 960 - protein, 10 aa, Homo sapiens
  misc_feature: Table A; Target 960; HLA-B*27:02; ABCB5; ENSG00000004846; TAA
GETLVLAPEY

SEQ ID NO: 961 - protein, 10 aa, Homo sapiens
  misc_feature: Table A; Target 961; HLA-B*27:05; ABCB5; ENSG00000004846; TAA
GETLVLAPEY

SEQ ID NO: 962 - protein, 10 aa, Homo sapiens
  misc_feature: Table A; Target 962; HLA-B*40:01; ABCB5; ENSG00000004846; TAA
GETLVLAPEY

SEQ ID NO: 963 - protein, 10 aa, Homo sapiens
  misc_feature: Table A; Target 963; HLA-B*44:02; ABCB5; ENSG00000004846; TAA
GETLVLAPEY

SEQ ID NO: 964 - protein, 10 aa, Homo sapiens
  misc_feature: Table A; Target 964; HLA-B*44:03; ABCB5; ENSG00000004846; TAA
GETLVLAPEY

SEQ ID NO: 965 - protein, 10 aa, Homo sapiens
  misc_feature: Table A; Target 965; HLA-C*16:04; ABCB5; ENSG00000004846; TAA
GETLVLAPEY

SEQ ID NO: 966 - protein, 8 aa, Homo sapiens
  misc_feature: Table A; Target 966; HLA-B*49:01; ABCB5; ENSG00000004846; TAA
GETVALVG

SEQ ID NO: 967 - protein, 9 aa, Homo sapiens
  misc_feature: Table A; Target 967; HLA-A*30:01; ABCB5; ENSG00000004846; TAA
GETVALVGL

SEQ ID NO: 968 - protein, 9 aa, Homo sapiens
  misc_feature: Table A; Target 968; HLA-B*18:01; ABCB5; ENSG00000004846; TAA
GETVALVGL

SEQ ID NO: 969 - protein, 9 aa, Homo sapiens
  misc_feature: Table A; Target 969; HLA-B*27:05; ABCB5; ENSG00000004846; TAA
GETVALVGL

SEQ ID NO: 970 - protein, 9 aa, Homo sapiens
  misc_feature: Table A; Target 970; HLA-B*37:01; ABCB5; ENSG00000004846; TAA
GETVALVGL

SEQ ID NO: 971 - protein, 9 aa, Homo sapiens
  misc_feature: Table A; Target 971; HLA-B*40:01; ABCB5; ENSG00000004846; TAA
GETVALVGL

SEQ ID NO: 972 - protein, 9 aa, Homo sapiens
  misc_feature: Table A; Target 972; HLA-B*40:02; ABCB5; ENSG00000004846; TAA
GETVALVGL

SEQ ID NO: 973 - protein, 9 aa, Homo sapiens
  misc_feature: Table A; Target 973; HLA-B*44:02; ABCB5; ENSG00000004846; TAA
GETVALVGL

SEQ ID NO: 974 - protein, 9 aa, Homo sapiens
  misc_feature: Table A; Target 974; HLA-B*44:03; ABCB5; ENSG00000004846; TAA
GETVALVGL

SEQ ID NO: 975 - protein, 9 aa, Homo sapiens
  misc_feature: Table A; Target 975; HLA-B*49:01; ABCB5; ENSG00000004846; TAA
GETVALVGL

SEQ ID NO: 976 - protein, 9 aa, Homo sapiens
  misc_feature: Table A; Target 976; HLA-B*13:02; ABCB5; ENSG00000004846; TAA
GGLTTILAI

SEQ ID NO: 977 - protein, 9 aa, Homo sapiens
  misc_feature: Table A; Target 977; HLA-A*02:04; ABCB5; ENSG00000004846; TAA
GIGDKIALL

SEQ ID NO: 978 - protein, 10 aa, Homo sapiens
  misc_feature: Table A; Target 978; HLA-A*29:02; ABCB5; ENSG00000004846; TAA
GIGDKIALLF

SEQ ID NO: 979 - protein, 9 aa, Homo sapiens
  misc_feature: Table A; Target 979; HLA-A*03:01; ABCB5; ENSG00000004846; TAA
GIKRTIASK

SEQ ID NO: 980 - protein, 8 aa, Homo sapiens
  misc_feature: Table A; Target 980; HLA-B*15:03; ABCB5; ENSG00000004846; TAA
GKIATEAL

SEQ ID NO: 981 - protein, 9 aa, Homo sapiens
  misc_feature: Table A; Target 981; HLA-B*15:03; ABCB5; ENSG00000004846; TAA
GKSTVVQLL

SEQ ID NO: 982 - protein, 10 aa, Homo sapiens
  misc_feature: Table A; Target 982; HLA-A*02:04; ABCB5; ENSG00000004846; TAA
GLAFWYGTSL

SEQ ID NO: 983 - protein, 8 aa, Homo sapiens
  misc_feature: Table A; Target 983; HLA-A*03:01; ABCB5; ENSG00000004846; TAA
GLAVGLVK

SEQ ID NO: 984 - protein, 10 aa, Homo sapiens
  misc_feature: Table A; Target 984; HLA-A*25:01; ABCB5; ENSG00000004846; TAA
GLAVGLVKGW

SEQ ID NO: 985 - protein, 9 aa, Homo sapiens
  misc_feature: Table A; Target 985; HLA-A*02:07; ABCB5; ENSG00000004846; TAA
GLDITLMIL

SEQ ID NO: 986 - protein, 10 aa, Homo sapiens
  misc_feature: Table A; Target 986; HLA-A*02:03; ABCB5; ENSG00000004846; TAA
GLFYGRAGEI

SEQ ID NO: 987 - protein, 10 aa, Homo sapiens
  misc_feature: Table A; Target 987; HLA-A*02:03; ABCB5; ENSG00000004846; TAA
GLNGSGKSTV

SEQ ID NO: 988 - protein, 11 aa, Homo sapiens
  misc_feature: Table A; Target 988; HLA-A*02:03; ABCB5; ENSG00000004846; TAA
GLNGSGKSTVV

SEQ ID NO: 989 - protein, 11 aa, Homo sapiens
  misc_feature: Table A; Target 989; HLA-B*55:01; ABCB5; ENSG00000004846; TAA
GLNGSGKSTVV

SEQ ID NO: 990 - protein, 10 aa, Homo sapiens
  misc_feature: Table A; Target 990; HLA-A*02:01; ABCB5; ENSG00000004846; TAA
GLPEKYNTQV

SEQ ID NO: 991 - protein, 10 aa, Homo sapiens
  misc_feature: Table A; Target 991; HLA-A*02:03; ABCB5; ENSG00000004846; TAA
GLPEKYNTQV

SEQ ID NO: 992 - protein, 10 aa, Homo sapiens
  misc_feature: Table A; Target 992; HLA-A*02:07; ABCB5; ENSG00000004846; TAA
GLPEKYNTQV

SEQ ID NO: 993 - protein, 10 aa, Homo sapiens
  misc_feature: Table A; Target 993; HLA-A*03:01; ABCB5; ENSG00000004846; TAA
GLSLSIERGK

SEQ ID NO: 994 - protein, 10 aa, Homo sapiens
  misc_feature: Table A; Target 994; HLA-A*03:02; ABCB5; ENSG00000004846; TAA
GLSLSIERGK

SEQ ID NO: 995 - protein, 8 aa, Homo sapiens
  misc_feature: Table A; Target 995; HLA-B*37:01; ABCB5; ENSG00000004846; TAA
GLSVIISF

SEQ ID NO: 996 - protein, 9 aa, Homo sapiens
  misc_feature: Table A; Target 996; HLA-A*02:01; ABCB5; ENSG00000004846; TAA
GLSVIISFI

SEQ ID NO: 997 - protein, 9 aa, Homo sapiens
  misc_feature: Table A; Target 997; HLA-A*02:03; ABCB5; ENSG00000004846; TAA
GLSVIISFI

SEQ ID NO: 998 - protein, 9 aa, Homo sapiens
  misc_feature: Table A; Target 998; HLA-A*02:04; ABCB5; ENSG00000004846; TAA
GLSVIISFI

SEQ ID NO: 999 - protein, 9 aa, Homo sapiens
  misc_feature: Table A; Target 999; HLA-A*30:01; ABCB5; ENSG00000004846; TAA
GLSVIISFI

SEQ ID NO: 1000 - protein, 9 aa, Homo sapiens
  misc_feature: Table A; Target 1000; HLA-B*13:02; ABCB5; ENSG00000004846; TAA
GLSVIISFI

SEQ ID NO: 1001 - protein, 10 aa, Homo sapiens
  misc_feature: Table A; Target 1001; HLA-A*29:02; ABCB5; ENSG00000004846; TAA
GLSVIISFIY

SEQ ID NO: 1002 - protein, 8 aa, Homo sapiens
  misc_feature: Table A; Target 1002; HLA-B*13:02; ABCB5; ENSG00000004846; TAA
GLTTILAI

SEQ ID NO: 1003 - protein, 10 aa, Homo sapiens
  misc_feature: Table A; Target 1003; HLA-A*02:04; ABCB5; ENSG00000004846; TAA
GLVKGWKLTL

SEQ ID NO: 1004 - protein, 9 aa, Homo sapiens
  misc_feature: Table A; Target 1004; HLA-A*02:03; ABCB5; ENSG00000004846; TAA
GMFIVFTAI

SEQ ID NO: 1005 - protein, 9 aa, Homo sapiens
  misc_feature: Table A; Target 1005; HLA-A*02:07; ABCB5; ENSG00000004846; TAA
GMFIVFTAI

SEQ ID NO: 1006 - protein, 9 aa, Homo sapiens
  misc_feature: Table A; Target 1006; HLA-B*13:02; ABCB5; ENSG00000004846; TAA
GMFIVFTAI

SEQ ID NO: 1007 - protein, 8 aa, Homo sapiens
  misc_feature: Table A; Target 1007; HLA-B*15:01; ABCB5; ENSG00000004846; TAA
GMIETAAM

SEQ ID NO: 1008 - protein, 8 aa, Homo sapiens
  misc_feature: Table A; Target 1008; HLA-B*46:01; ABCB5; ENSG00000004846; TAA
GMIETAAM

SEQ ID NO: 1009 - protein, 8 aa, Homo sapiens
  misc_feature: Table A; Target 1009; HLA-C*14:02; ABCB5; ENSG00000004846; TAA
GMIETAAM

SEQ ID NO: 1010 - protein, 11 aa, Homo sapiens
  misc_feature: Table A; Target 1010; HLA-A*23:01; ABCB5; ENSG00000004846; TAA
GMIETAAMTGF

SEQ ID NO: 1011 - protein, 11 aa, Homo sapiens
  misc_feature: Table A; Target 1011; HLA-A*26:01; ABCB5; ENSG00000004846; TAA
GMIETAAMTGF

SEQ ID NO: 1012 - protein, 11 aa, Homo sapiens
  misc_feature: Table A; Target 1012; HLA-A*29:02; ABCB5; ENSG00000004846; TAA
GMIETAAMTGF

SEQ ID NO: 1013 - protein, 11 aa, Homo sapiens
  misc_feature: Table A; Target 1013; HLA-B*15:01; ABCB5; ENSG00000004846; TAA
GMIETAAMTGF

SEQ ID NO: 1014 - protein, 11 aa, Homo sapiens
  misc_feature: Table A; Target 1014; HLA-B*15:03; ABCB5; ENSG00000004846; TAA
GMIETAAMTGF

SEQ ID NO: 1015 - protein, 11 aa, Homo sapiens
  misc_feature: Table A; Target 1015; HLA-B*46:01; ABCB5; ENSG00000004846; TAA
GMIETAAMTGF

SEQ ID NO: 1016 - protein, 11 aa, Homo sapiens
  misc_feature: Table A; Target 1016; HLA-B*58:01; ABCB5; ENSG00000004846; TAA
GMIETAAMTGF

SEQ ID NO: 1017 - protein, 11 aa, Homo sapiens
  misc_feature: Table A; Target 1017; HLA-C*14:02; ABCB5; ENSG00000004846; TAA
GMIETAAMTGF

SEQ ID NO: 1018 - protein, 11 aa, Homo sapiens
  misc_feature: Table A; Target 1018; HLA-C*16:04; ABCB5; ENSG00000004846; TAA
GMIETAAMTGF

SEQ ID NO: 1019 - protein, 8 aa, Homo sapiens
  misc_feature: Table A; Target 1019; HLA-B*08:01; ABCB5; ENSG00000004846; TAA
GNNDKTTL

SEQ ID NO: 1020 - protein, 9 aa, Homo sapiens
  misc_feature: Table A; Target 1020; HLA-A*03:01; ABCB5; ENSG00000004846; TAA
GNNDKTTLK

SEQ ID NO: 1021 - protein, 9 aa, Homo sapiens
  misc_feature: Table A; Target 1021; HLA-A*03:02; ABCB5; ENSG00000004846; TAA
GNNDKTTLK

SEQ ID NO: 1022 - protein, 9 aa, Homo sapiens
  misc_feature: Table A; Target 1022; HLA-A*11:01; ABCB5; ENSG00000004846; TAA
GNNDKTTLK

SEQ ID NO: 1023 - protein, 8 aa, Homo sapiens
  misc_feature: Table A; Target 1023; HLA-B*08:01; ABCB5; ENSG00000004846; TAA
GQKQRIAI

SEQ ID NO: 1024 - protein, 9 aa, Homo sapiens
  misc_feature: Table A; Target 1024; HLA-B*08:01; ABCB5; ENSG00000004846; TAA
GQKQRIAIA

SEQ ID NO: 1025 - protein, 10 aa, Homo sapiens
  misc_feature: Table A; Target 1025; HLA-A*31:01; ABCB5; ENSG00000004846; TAA
GQKQRIAIAR

SEQ ID NO: 1026 - protein, 10 aa, Homo sapiens
  misc_feature: Table A; Target 1026; HLA-A*31:01; ABCB5; ENSG00000004846; TAA
GQKQRLAIAR

SEQ ID NO: 1027 - protein, 8 aa, Homo sapiens
  misc_feature: Table A; Target 1027; HLA-B*13:02; ABCB5; ENSG00000004846; TAA
GQVLFDGV

SEQ ID NO: 1028 - protein, 9 aa, Homo sapiens
  misc_feature: Table A; Target 1028; HLA-B*27:02; ABCB5; ENSG00000004846; TAA
GRAGEILTM

SEQ ID NO: 1029 - protein, 9 aa, Homo sapiens
  misc_feature: Table A; Target 1029; HLA-B*27:05; ABCB5; ENSG00000004846; TAA
GRAGEILTM

SEQ ID NO: 1030 - protein, 9 aa, Homo sapiens
  misc_feature: Table A; Target 1030; HLA-B*38:01; ABCB5; ENSG00000004846; TAA
GRAGEILTM

SEQ ID NO: 1031 - protein, 9 aa, Homo sapiens
  misc_feature: Table A; Target 1031; HLA-B*39:01; ABCB5; ENSG00000004846; TAA
GRAGEILTM

SEQ ID NO: 1032 - protein, 9 aa, Homo sapiens
  misc_feature: Table A; Target 1032; HLA-C*06:02; ABCB5; ENSG00000004846; TAA
GRAGEILTM

SEQ ID NO: 1033 - protein, 9 aa, Homo sapiens
  misc_feature: Table A; Target 1033; HLA-C*16:04; ABCB5; ENSG00000004846; TAA
GRAGEILTM

SEQ ID NO: 1034 - protein, 10 aa, Homo sapiens
  misc_feature: Table A; Target 1034; HLA-B*27:05; ABCB5; ENSG00000004846; TAA
GRAGEILTMR

SEQ ID NO: 1035 - protein, 9 aa, Homo sapiens
  misc_feature: Table A; Target 1035; HLA-C*16:04; ABCB5; ENSG00000004846; TAA
GRMTPEGMF

SEQ ID NO: 1036 - protein, 9 aa, Homo sapiens
  misc_feature: Table A; Target 1036; HLA-B*27:05; ABCB5; ENSG00000004846; TAA
GRTCLVVTH

SEQ ID NO: 1037 - protein, 9 aa, Homo sapiens
  misc_feature: Table A; Target 1037; HLA-B*27:02; ABCB5; ENSG00000004846; TAA
GRTTIVVAH

SEQ ID NO: 1038 - protein, 9 aa, Homo sapiens
  misc_feature: Table A; Target 1038; HLA-B*27:05; ABCB5; ENSG00000004846; TAA
GRTTIVVAH

SEQ ID NO: 1039 - protein, 9 aa, Homo sapiens
  misc_feature: Table A; Target 1039; HLA-C*16:04; ABCB5; ENSG00000004846; TAA
GRTTIVVAH

SEQ ID NO: 1040 - protein, 10 aa, Homo sapiens
  misc_feature: Table A; Target 1040; HLA-B*27:05; ABCB5; ENSG00000004846; TAA
GRTTIVVAHR

SEQ ID NO: 1041 - protein, 8 aa, Homo sapiens
  misc_feature: Table A; Target 1041; HLA-B*57:01; ABCB5; ENSG00000004846; TAA
GSIEIFRF

SEQ ID NO: 1042 - protein, 9 aa, Homo sapiens
  misc_feature: Table A; Target 1042; HLA-A*02:01; ABCB5; ENSG00000004846; TAA
GTAEEQPKL

SEQ ID NO: 1043 - protein, 9 aa, Homo sapiens
  misc_feature: Table A; Target 1043; HLA-A*02:04; ABCB5; ENSG00000004846; TAA
GTAEEQPKL

SEQ ID NO: 1044 - protein, 9 aa, Homo sapiens
  misc_feature: Table A; Target 1044; HLA-A*11:01; ABCB5; ENSG00000004846; TAA
GTAEEQPKL

SEQ ID NO: 1045 - protein, 9 aa, Homo sapiens
  misc_feature: Table A; Target 1045; HLA-A*26:01; ABCB5; ENSG00000004846; TAA
GTAEEQPKL

SEQ ID NO: 1046 - protein, 9 aa, Homo sapiens
  misc_feature: Table A; Target 1046; HLA-A*30:01; ABCB5; ENSG00000004846; TAA
GTAEEQPKL

SEQ ID NO: 1047 - protein, 9 aa, Homo sapiens
  misc_feature: Table A; Target 1047; HLA-A*68:02; ABCB5; ENSG00000004846; TAA
GTAEEQPKL

SEQ ID NO: 1048 - protein, 9 aa, Homo sapiens
  misc_feature: Table A; Target 1048; HLA-B*13:02; ABCB5; ENSG00000004846; TAA
GTAEEQPKL

SEQ ID NO: 1049 - protein, 9 aa, Homo sapiens
  misc_feature: Table A; Target 1049; HLA-B*27:05; ABCB5; ENSG00000004846; TAA
GTAEEQPKL

SEQ ID NO: 1050 - protein, 9 aa, Homo sapiens
  misc_feature: Table A; Target 1050; HLA-B*38:01; ABCB5; ENSG00000004846; TAA
GTAEEQPKL

SEQ ID NO: 1051 - protein, 9 aa, Homo sapiens
  misc_feature: Table A; Target 1051; HLA-B*39:01; ABCB5; ENSG00000004846; TAA
GTAEEQPKL

SEQ ID NO: 1052 - protein, 9 aa, Homo sapiens
  misc_feature: Table A; Target 1052; HLA-B*40:01; ABCB5; ENSG00000004846; TAA
GTAEEQPKL

SEQ ID NO: 1053 - protein, 9 aa, Homo sapiens
  misc_feature: Table A; Target 1053; HLA-B*55:01; ABCB5; ENSG00000004846; TAA
GTAEEQPKL

SEQ ID NO: 1054 - protein, 9 aa, Homo sapiens
  misc_feature: Table A; Target 1054; HLA-B*58:01; ABCB5; ENSG00000004846; TAA
GTAEEQPKL

SEQ ID NO: 1055 - protein, 9 aa, Homo sapiens
  misc_feature: Table A; Target 1055; HLA-C*02:02; ABCB5; ENSG00000004846; TAA
GTAEEQPKL

SEQ ID NO: 1056 - protein, 9 aa, Homo sapiens
  misc_feature: Table A; Target 1056; HLA-C*03:03; ABCB5; ENSG00000004846; TAA
GTAEEQPKL

SEQ ID NO: 1057 - protein, 9 aa, Homo sapiens
  misc_feature: Table A; Target 1057; HLA-C*03:04; ABCB5; ENSG00000004846; TAA
GTAEEQPKL

SEQ ID NO: 1058 - protein, 9 aa, Homo sapiens
  misc_feature: Table A; Target 1058; HLA-C*16:01; ABCB5; ENSG00000004846; TAA
GTAEEQPKL

SEQ ID NO: 1059 - protein, 9 aa, Homo sapiens
  misc_feature: Table A; Target 1059; HLA-C*16:02; ABCB5; ENSG00000004846; TAA
GTAEEQPKL

SEQ ID NO: 1060 - protein, 9 aa, Homo sapiens
  misc_feature: Table A; Target 1060; HLA-C*16:04; ABCB5; ENSG00000004846; TAA
GTAEEQPKL

SEQ ID NO: 1061 - protein, 10 aa, Homo sapiens
  misc_feature: Table A; Target 1061; HLA-A*11:01; ABCB5; ENSG00000004846; TAA
GTAEEQPKLR

SEQ ID NO: 1062 - protein, 10 aa, Homo sapiens
  misc_feature: Table A; Target 1062; HLA-A*31:01; ABCB5; ENSG00000004846; TAA
GTAEEQPKLR

SEQ ID NO: 1063 - protein, 10 aa, Homo sapiens
  misc_feature: Table A; Target 1063; HLA-A*33:03; ABCB5; ENSG00000004846; TAA
GTAEEQPKLR

SEQ ID NO: 1064 - protein, 10 aa, Homo sapiens
  misc_feature: Table A; Target 1064; HLA-A*68:01; ABCB5; ENSG00000004846; TAA
GTAEEQPKLR

SEQ ID NO: 1065 - protein, 10 aa, Homo sapiens
  misc_feature: Table A; Target 1065; HLA-C*07:06; ABCB5; ENSG00000004846; TAA
GTAEEQPKLR

SEQ ID NO: 1066 - protein, 11 aa, Homo sapiens
  misc_feature: Table A; Target 1066; HLA-A*03:02; ABCB5; ENSG00000004846; TAA
GTAEEQPKLRK

SEQ ID NO: 1067 - protein, 11 aa, Homo sapiens
  misc_feature: Table A; Target 1067; HLA-A*11:01; ABCB5; ENSG00000004846; TAA
GTAEEQPKLRK

SEQ ID NO: 1068 - protein, 10 aa, Homo sapiens
  misc_feature: Table A; Target 1068; HLA-A*31:01; ABCB5; ENSG00000004846; TAA
GTHQELLRNR

SEQ ID NO: 1069 - protein, 9 aa, Homo sapiens
  misc_feature: Table A; Target 1069; HLA-A*03:02; ABCB5; ENSG00000004846; TAA
GTTISNNIK

SEQ ID NO: 1070 - protein, 9 aa, Homo sapiens
  misc_feature: Table A; Target 1070; HLA-A*11:01; ABCB5; ENSG00000004846; TAA
GTTISNNIK

SEQ ID NO: 1071 - protein, 10 aa, Homo sapiens
  misc_feature: Table A; Target 1071; HLA-A*01:01; ABCB5; ENSG00000004846; TAA
GTTISNNIKY

SEQ ID NO: 1072 - protein, 10 aa, Homo sapiens
  misc_feature: Table A; Target 1072; HLA-A*29:02; ABCB5; ENSG00000004846; TAA
GTTISNNIKY

SEQ ID NO: 1073 - protein, 10 aa, Homo sapiens
  misc_feature: Table A; Target 1073; HLA-A*30:02; ABCB5; ENSG00000004846; TAA
GTTISNNIKY

SEQ ID NO: 1074 - protein, 10 aa, Homo sapiens
  misc_feature: Table A; Target 1074; HLA-B*58:01; ABCB5; ENSG00000004846; TAA
GTTISNNIKY

SEQ ID NO: 1075 - protein, 10 aa, Homo sapiens
  misc_feature: Table A; Target 1075; HLA-A*25:01; ABCB5; ENSG00000004846; TAA
GTVEFKNVSF

SEQ ID NO: 1076 - protein, 10 aa, Homo sapiens
  misc_feature: Table A; Target 1076; HLA-A*26:01; ABCB5; ENSG00000004846; TAA
GTVEFKNVSF

SEQ ID NO: 1077 - protein, 10 aa, Homo sapiens
  misc_feature: Table A; Target 1077; HLA-A*32:01; ABCB5; ENSG00000004846; TAA
GTVEFKNVSF

SEQ ID NO: 1078 - protein, 10 aa, Homo sapiens
  misc_feature: Table A; Target 1078; HLA-B*15:01; ABCB5; ENSG00000004846; TAA
GTVEFKNVSF

SEQ ID NO: 1079 - protein, 10 aa, Homo sapiens
  misc_feature: Table A; Target 1079; HLA-B*46:01; ABCB5; ENSG00000004846; TAA
GTVEFKNVSF

SEQ ID NO: 1080 - protein, 10 aa, Homo sapiens
  misc_feature: Table A; Target 1080; HLA-B*57:01; ABCB5; ENSG00000004846; TAA
GTVEFKNVSF

SEQ ID NO: 1081 - protein, 10 aa, Homo sapiens
  misc_feature: Table A; Target 1081; HLA-B*58:01; ABCB5; ENSG00000004846; TAA
GTVEFKNVSF

SEQ ID NO: 1082 - protein, 10 aa, Homo sapiens
  misc_feature: Table A; Target 1082; HLA-C*02:02; ABCB5; ENSG00000004846; TAA
GTVEFKNVSF

SEQ ID NO: 1083 - protein, 9 aa, Homo sapiens
  misc_feature: Table A; Target 1083; HLA-A*68:02; ABCB5; ENSG00000004846; TAA
GTVHPVFSI

SEQ ID NO: 1084 - protein, 9 aa, Homo sapiens
  misc_feature: Table A; Target 1084; HLA-B*57:01; ABCB5; ENSG00000004846; TAA
GTVHPVFSI

SEQ ID NO: 1085 - protein, 9 aa, Homo sapiens
  misc_feature: Table A; Target 1085; HLA-A*29:02; ABCB5; ENSG00000004846; TAA
GTYGLAFWY

SEQ ID NO: 1086 - protein, 9 aa, Homo sapiens
  misc_feature: Table A; Target 1086; HLA-A*30:02; ABCB5; ENSG00000004846; TAA
GTYGLAFWY

SEQ ID NO: 1087 - protein, 9 aa, Homo sapiens
  misc_feature: Table A; Target 1087; HLA-A*25:01; ABCB5; ENSG00000004846; TAA
GVAALIFGY

SEQ ID NO: 1088 - protein, 9 aa, Homo sapiens
  misc_feature: Table A; Target 1088; HLA-A*26:01; ABCB5; ENSG00000004846; TAA
GVAALIFGY

SEQ ID NO: 1089 - protein, 9 aa, Homo sapiens
  misc_feature: Table A; Target 1089; HLA-A*29:02; ABCB5; ENSG00000004846; TAA
GVAALIFGY

SEQ ID NO: 1090 - protein, 9 aa, Homo sapiens
  misc_feature: Table A; Target 1090; HLA-A*30:02; ABCB5; ENSG00000004846; TAA
GVAALIFGY

SEQ ID NO: 1091 - protein, 9 aa, Homo sapiens
  misc_feature: Table A; Target 1091; HLA-B*15:01; ABCB5; ENSG00000004846; TAA
GVAALIFGY

SEQ ID NO: 1092 - protein, 9 aa, Homo sapiens
  misc_feature: Table A; Target 1092; HLA-C*02:02; ABCB5; ENSG00000004846; TAA
GVAALIFGY

SEQ ID NO: 1093 - protein, 10 aa, Homo sapiens
  misc_feature: Table A; Target 1093; HLA-A*68:02; ABCB5; ENSG00000004846; TAA
GVAALIFGYI

SEQ ID NO: 1094 - protein, 9 aa, Homo sapiens
  misc_feature: Table A; Target 1094; HLA-A*02:01; ABCB5; ENSG00000004846; TAA
GVDAKELNV

SEQ ID NO: 1095 - protein, 9 aa, Homo sapiens
  misc_feature: Table A; Target 1095; HLA-A*02:07; ABCB5; ENSG00000004846; TAA
GVDAKELNV

SEQ ID NO: 1096 - protein, 9 aa, Homo sapiens
  misc_feature: Table A; Target 1096; HLA-B*13:02; ABCB5; ENSG00000004846; TAA
GVDAKELNV

SEQ ID NO: 1097 - protein, 9 aa, Homo sapiens
  misc_feature: Table A; Target 1097; HLA-C*05:01; ABCB5; ENSG00000004846; TAA
GVDAKELNV

SEQ ID NO: 1098 - protein, 9 aa, Homo sapiens
  misc_feature: Table A; Target 1098; HLA-A*30:01; ABCB5; ENSG00000004846; TAA
GVVSQEPVL

SEQ ID NO: 1099 - protein, 9 aa, Homo sapiens
  misc_feature: Table A; Target 1099; HLA-B*15:01; ABCB5; ENSG00000004846; TAA
GVVSQEPVL

SEQ ID NO: 1100 - protein, 9 aa, Homo sapiens
  misc_feature: Table A; Target 1100; HLA-B*35:03; ABCB5; ENSG00000004846; TAA
GVVSQEPVL

SEQ ID NO: 1101 - protein, 9 aa, Homo sapiens
  misc_feature: Table A; Target 1101; HLA-B*40:01; ABCB5; ENSG00000004846; TAA
GVVSQEPVL

SEQ ID NO: 1102 - protein, 9 aa, Homo sapiens
  misc_feature: Table A; Target 1102; HLA-C*03:03; ABCB5; ENSG00000004846; TAA
GVVSQEPVL

SEQ ID NO: 1103 - protein, 9 aa, Homo sapiens
  misc_feature: Table A; Target 1103; HLA-C*03:04; ABCB5; ENSG00000004846; TAA
GVVSQEPVL

SEQ ID NO: 1104 - protein, 8 aa, Homo sapiens
  misc_feature: Table A; Target 1104; HLA-C*14:02; ABCB5; ENSG00000004846; TAA
GYTIGTVL

SEQ ID NO: 1105 - protein, 11 aa, Homo sapiens
  misc_feature: Table A; Target 1105; HLA-A*23:01; ABCB5; ENSG00000004846; TAA
GYTIGTVLAVF

SEQ ID NO: 1106 - protein, 11 aa, Homo sapiens
  misc_feature: Table A; Target 1106; HLA-A*24:02; ABCB5; ENSG00000004846; TAA
GYTIGTVLAVF

SEQ ID NO: 1107 - protein, 8 aa, Homo sapiens
  misc_feature: Table A; Target 1107; HLA-A*29:02; ABCB5; ENSG00000004846; TAA
HAFIYFAY

SEQ ID NO: 1108 - protein, 9 aa, Homo sapiens
  misc_feature: Table A; Target 1108; HLA-A*68:02; ABCB5; ENSG00000004846; TAA
HAFIYFAYA

SEQ ID NO: 1109 - protein, 9 aa, Homo sapiens
  misc_feature: Table A; Target 1109; HLA-B*54:01; ABCB5; ENSG00000004846; TAA
HAFIYFAYA

SEQ ID NO: 1110 - protein, 10 aa, Homo sapiens
  misc_feature: Table A; Target 1110; HLA-B*54:01; ABCB5; ENSG00000004846; TAA
HAFIYFAYAA

SEQ ID NO: 1111 - protein, 9 aa, Homo sapiens
  misc_feature: Table A; Target 1111; HLA-B*54:01; ABCB5; ENSG00000004846; TAA
HAGKIATEA

SEQ ID NO: 1112 - protein, 9 aa, Homo sapiens
  misc_feature: Table A; Target 1112; HLA-B*56:01; ABCB5; ENSG00000004846; TAA
HAGKIATEA

SEQ ID NO: 1113 - protein, 10 aa, Homo sapiens
  misc_feature: Table A; Target 1113; HLA-B*35:03; ABCB5; ENSG00000004846; TAA
HAGKIATEAL

SEQ ID NO: 1114 - protein, 8 aa, Homo sapiens
  misc_feature: Table A; Target 1114; HLA-A*30:01; ABCB5; ENSG00000004846; TAA
HDAEIYSM

SEQ ID NO: 1115 - protein, 8 aa, Homo sapiens
  misc_feature: Table A; Target 1115; HLA-B*18:01; ABCB5; ENSG00000004846; TAA
HDAEIYSM

SEQ ID NO: 1116 - protein, 8 aa, Homo sapiens
  misc_feature: Table A; Target 1116; HLA-B*37:01; ABCB5; ENSG00000004846; TAA
HDAEIYSM

SEQ ID NO: 1117 - protein, 9 aa, Homo sapiens
  misc_feature: Table A; Target 1117; HLA-A*68:02; ABCB5; ENSG00000004846; TAA
HDAEIYSMI

SEQ ID NO: 1118 - protein, 9 aa, Homo sapiens
  misc_feature: Table A; Target 1118; HLA-B*49:01; ABCB5; ENSG00000004846; TAA
HDAEIYSMI

SEQ ID NO: 1119 - protein, 9 aa, Homo sapiens
  misc_feature: Table A; Target 1119; HLA-A*33:01; ABCB5; ENSG00000004846; TAA
HFETFAIAR

SEQ ID NO: 1120 - protein, 9 aa, Homo sapiens
  misc_feature: Table A; Target 1120; HLA-A*33:03; ABCB5; ENSG00000004846; TAA
HFETFAIAR

SEQ ID NO: 1121 - protein, 8 aa, Homo sapiens
  misc_feature: Table A; Target 1121; HLA-B*27:02; ABCB5; ENSG00000004846; TAA
HIFQVIDK

SEQ ID NO: 1122 - protein, 8 aa, Homo sapiens
  misc_feature: Table A; Target 1122; HLA-B*08:01; ABCB5; ENSG00000004846; TAA
HLAFKAML

SEQ ID NO: 1123 - protein, 9 aa, Homo sapiens
  misc_feature: Table A; Target 1123; HLA-A*01:01; ABCB5; ENSG00000004846; TAA
HLAFKAMLY

SEQ ID NO: 1124 - protein, 9 aa, Homo sapiens
  misc_feature: Table A; Target 1124; HLA-A*03:01; ABCB5; ENSG00000004846; TAA
HLAFKAMLY

SEQ ID NO: 1125 - protein, 9 aa, Homo sapiens
  misc_feature: Table A; Target 1125; HLA-A*29:02; ABCB5; ENSG00000004846; TAA
HLAFKAMLY

SEQ ID NO: 1126 - protein, 8 aa, Homo sapiens
  misc_feature: Table A; Target 1126; HLA-A*03:01; ABCB5; ENSG00000004846; TAA
HLFALLEK

SEQ ID NO: 1127 - protein, 8 aa, Homo sapiens
  misc_feature: Table A; Target 1127; HLA-B*35:01; ABCB5; ENSG00000004846; TAA
HPVFSIIF

SEQ ID NO: 1128 - protein, 9 aa, Homo sapiens
  misc_feature: Table A; Target 1128; HLA-B*54:01; ABCB5; ENSG00000004846; TAA
HPVFSIIFA

SEQ ID NO: 1129 - protein, 9 aa, Homo sapiens
  misc_feature: Table A; Target 1129; HLA-B*56:01; ABCB5; ENSG00000004846; TAA
HPVFSIIFA

SEQ ID NO: 1130 - protein, 9 aa, Homo sapiens
  misc_feature: Table A; Target 1130; HLA-B*54:01; ABCB5; ENSG00000004846; TAA
HRLSTIRSA

SEQ ID NO: 1131 - protein, 10 aa, Homo sapiens
  misc_feature: Table A; Target 1131; HLA-A*01:01; ABCB5; ENSG00000004846; TAA
HSFIEGLPEK

SEQ ID NO: 1132 - protein, 10 aa, Homo sapiens
  misc_feature: Table A; Target 1132; HLA-A*11:01; ABCB5; ENSG00000004846; TAA
HSFIEGLPEK

SEQ ID NO: 1133 - protein, 11 aa, Homo sapiens
  misc_feature: Table A; Target 1133; HLA-A*01:01; ABCB5; ENSG00000004846; TAA
HSFIEGLPEKY

SEQ ID NO: 1134 - protein, 11 aa, Homo sapiens
  misc_feature: Table A; Target 1134; HLA-A*29:02; ABCB5; ENSG00000004846; TAA
HSFIEGLPEKY

SEQ ID NO: 1135 - protein, 11 aa, Homo sapiens
  misc_feature: Table A; Target 1135; HLA-B*57:01; ABCB5; ENSG00000004846; TAA
HSFIEGLPEKY

SEQ ID NO: 1136 - protein, 10 aa, Homo sapiens
  misc_feature: Table A; Target 1136; HLA-B*57:01; ABCB5; ENSG00000004846; TAA
HSVLAQDIGW

SEQ ID NO: 1137 - protein, 10 aa, Homo sapiens
  misc_feature: Table A; Target 1137; HLA-B*58:01; ABCB5; ENSG00000004846; TAA
HSVLAQDIGW

SEQ ID NO: 1138 - protein, 8 aa, Homo sapiens
  misc_feature: Table A; Target 1138; HLA-B*51:01; ABCB5; ENSG00000004846; TAA
IAFRAQEK

SEQ ID NO: 1139 - protein, 8 aa, Homo sapiens
  misc_feature: Table A; Target 1139; HLA-B*08:01; ABCB5; ENSG00000004846; TAA
IAIARALV

SEQ ID NO: 1140 - protein, 8 aa, Homo sapiens
  misc_feature: Table A; Target 1140; HLA-B*51:01; ABCB5; ENSG00000004846; TAA
IAIARALV

SEQ ID NO: 1141 - protein, 9 aa, Homo sapiens
  misc_feature: Table A; Target 1141; HLA-B*57:01; ABCB5; ENSG00000004846; TAA
IAIARALVR

SEQ ID NO: 1142 - protein, 9 aa, Homo sapiens
  misc_feature: Table A; Target 1142; HLA-C*02:02; ABCB5; ENSG00000004846; TAA
IAIARALVR

SEQ ID NO: 1143 - protein, 9 aa, Homo sapiens
  misc_feature: Table A; Target 1143; HLA-C*07:06; ABCB5; ENSG00000004846; TAA
IAIARALVR

SEQ ID NO: 1144 - protein, 9 aa, Homo sapiens
  misc_feature: Table A; Target 1144; HLA-C*12:03; ABCB5; ENSG00000004846; TAA
IAIARALVR

SEQ ID NO: 1145 - protein, 9 aa, Homo sapiens
  misc_feature: Table A; Target 1145; HLA-C*16:02; ABCB5; ENSG00000004846; TAA
IAIARALVR

SEQ ID NO: 1146 - protein, 9 aa, Homo sapiens
  misc_feature: Table A; Target 1146; HLA-B*46:01; ABCB5; ENSG00000004846; TAA
IAIVPQEPV

SEQ ID NO: 1147 - protein, 9 aa, Homo sapiens
  misc_feature: Table A; Target 1147; HLA-B*51:01; ABCB5; ENSG00000004846; TAA
IAIVPQEPV

SEQ ID NO: 1148 - protein, 9 aa, Homo sapiens
  misc_feature: Table A; Target 1148; HLA-B*54:01; ABCB5; ENSG00000004846; TAA
IAIVPQEPV

SEQ ID NO: 1149 - protein, 9 aa, Homo sapiens
  misc_feature: Table A; Target 1149; HLA-B*56:01; ABCB5; ENSG00000004846; TAA
IAIVPQEPV

SEQ ID NO: 1150 - protein, 9 aa, Homo sapiens
  misc_feature: Table A; Target 1150; HLA-C*01:02; ABCB5; ENSG00000004846; TAA
IAIVPQEPV

SEQ ID NO: 1151 - protein, 9 aa, Homo sapiens
  misc_feature: Table A; Target 1151; HLA-C*03:03; ABCB5; ENSG00000004846; TAA
IAIVPQEPV

SEQ ID NO: 1152 - protein, 9 aa, Homo sapiens
  misc_feature: Table A; Target 1152; HLA-C*03:04; ABCB5; ENSG00000004846; TAA
IAIVPQEPV

SEQ ID NO: 1153 - protein, 9 aa, Homo sapiens
  misc_feature: Table A; Target 1153; HLA-C*16:04; ABCB5; ENSG00000004846; TAA
IAIVPQEPV

SEQ ID NO: 1154 - protein, 10 aa, Homo sapiens
  misc_feature: Table A; Target 1154; HLA-A*23:01; ABCB5; ENSG00000004846; TAA
IAIVPQEPVL

SEQ ID NO: 1155 - protein, 10 aa, Homo sapiens
  misc_feature: Table A; Target 1155; HLA-B*35:03; ABCB5; ENSG00000004846; TAA
IAIVPQEPVL

SEQ ID NO: 1156 - protein, 10 aa, Homo sapiens
  misc_feature: Table A; Target 1156; HLA-B*58:01; ABCB5; ENSG00000004846; TAA
IAIVPQEPVL

SEQ ID NO: 1157 - protein, 10 aa, Homo sapiens
  misc_feature: Table A; Target 1157; HLA-C*02:02; ABCB5; ENSG00000004846; TAA
IAIVPQEPVL

SEQ ID NO: 1158 - protein, 10 aa, Homo sapiens
  misc_feature: Table A; Target 1158; HLA-C*03:03; ABCB5; ENSG00000004846; TAA
IAIVPQEPVL

SEQ ID NO: 1159 - protein, 10 aa, Homo sapiens
  misc_feature: Table A; Target 1159; HLA-C*03:04; ABCB5; ENSG00000004846; TAA
IAIVPQEPVL

SEQ ID NO: 1160 - protein, 10 aa, Homo sapiens
  misc_feature: Table A; Target 1160; HLA-C*05:01; ABCB5; ENSG00000004846; TAA
IAIVPQEPVL

SEQ ID NO: 1161 - protein, 11 aa, Homo sapiens
  misc_feature: Table A; Target 1161; HLA-A*23:01; ABCB5; ENSG00000004846; TAA
IAIVPQEPVLF

SEQ ID NO: 1162 - protein, 11 aa, Homo sapiens
  misc_feature: Table A; Target 1162; HLA-A*24:02; ABCB5; ENSG00000004846; TAA
IAIVPQEPVLF

SEQ ID NO: 1163 - protein, 11 aa, Homo sapiens
  misc_feature: Table A; Target 1163; HLA-B*57:01; ABCB5; ENSG00000004846; TAA
IAIVPQEPVLF

SEQ ID NO: 1164 - protein, 11 aa, Homo sapiens
  misc_feature: Table A; Target 1164; HLA-C*02:02; ABCB5; ENSG00000004846; TAA
IAIVPQEPVLF

SEQ ID NO: 1165 - protein, 9 aa, Homo sapiens
  misc_feature: Table A; Target 1165; HLA-C*01:02; ABCB5; ENSG00000004846; TAA
IAPVLAVTG

SEQ ID NO: 1166 - protein, 10 aa, Homo sapiens
  misc_feature: Table A; Target 1166; HLA-B*57:01; ABCB5; ENSG00000004846; TAA
IARGAAFHIF

SEQ ID NO: 1167 - protein, 9 aa, Homo sapiens
  misc_feature: Table A; Target 1167; HLA-B*13:02; ABCB5; ENSG00000004846; TAA
IASKVSLGA

SEQ ID NO: 1168 - protein, 9 aa, Homo sapiens
  misc_feature: Table A; Target 1168; HLA-B*54:01; ABCB5; ENSG00000004846; TAA
IASKVSLGA

SEQ ID NO: 1169 - protein, 9 aa, Homo sapiens
  misc_feature: Table A; Target 1169; HLA-B*56:01; ABCB5; ENSG00000004846; TAA
IASKVSLGA

SEQ ID NO: 1170 - protein, 11 aa, Homo sapiens
  misc_feature: Table A; Target 1170; HLA-A*01:01; ABCB5; ENSG00000004846; TAA
IASKVSLGAVY

SEQ ID NO: 1171 - protein, 11 aa, Homo sapiens
  misc_feature: Table A; Target 1171; HLA-A*30:02; ABCB5; ENSG00000004846; TAA
IASKVSLGAVY

SEQ ID NO: 1172 - protein, 11 aa, Homo sapiens
  misc_feature: Table A; Target 1172; HLA-B*35:01; ABCB5; ENSG00000004846; TAA
IASKVSLGAVY

SEQ ID NO: 1173 - protein, 11 aa, Homo sapiens
  misc_feature: Table A; Target 1173; HLA-C*03:03; ABCB5; ENSG00000004846; TAA
IASKVSLGAVY

SEQ ID NO: 1174 - protein, 9 aa, Homo sapiens
  misc_feature: Table A; Target 1174; HLA-A*23:01; ABCB5; ENSG00000004846; TAA
IATEALENI

SEQ ID NO: 1175 - protein, 9 aa, Homo sapiens
  misc_feature: Table A; Target 1175; HLA-B*51:01; ABCB5; ENSG00000004846; TAA
IATEALENI

SEQ ID NO: 1176 - protein, 9 aa, Homo sapiens
  misc_feature: Table A; Target 1176; HLA-B*58:01; ABCB5; ENSG00000004846; TAA
IATEALENI

SEQ ID NO: 1177 - protein, 9 aa, Homo sapiens
  misc_feature: Table A; Target 1177; HLA-C*05:01; ABCB5; ENSG00000004846; TAA
IATEALENI

SEQ ID NO: 1178 - protein, 9 aa, Homo sapiens
  misc_feature: Table A; Target 1178; HLA-C*16:02; ABCB5; ENSG00000004846; TAA
IATEALENI

SEQ ID NO: 1179 - protein, 10 aa, Homo sapiens
  misc_feature: Table A; Target 1179; HLA-B*27:02; ABCB5; ENSG00000004846; TAA
IATEALENIR

SEQ ID NO: 1180 - protein, 10 aa, Homo sapiens
  misc_feature: Table A; Target 1180; HLA-C*07:06; ABCB5; ENSG00000004846; TAA
IATEALENIR

SEQ ID NO: 1181 - protein, 8 aa, Homo sapiens
  misc_feature: Table A; Target 1181; HLA-A*23:01; ABCB5; ENSG00000004846; TAA
IAYGAMAI

SEQ ID NO: 1182 - protein, 8 aa, Homo sapiens
  misc_feature: Table A; Target 1182; HLA-B*13:02; ABCB5; ENSG00000004846; TAA
IAYGAMAI

SEQ ID NO: 1183 - protein, 8 aa, Homo sapiens
  misc_feature: Table A; Target 1183; HLA-B*15:03; ABCB5; ENSG00000004846; TAA
IAYGAMAI

SEQ ID NO: 1184 - protein, 8 aa, Homo sapiens
  misc_feature: Table A; Target 1184; HLA-B*40:02; ABCB5; ENSG00000004846; TAA
IAYGAMAI

SEQ ID NO: 1185 - protein, 8 aa, Homo sapiens
  misc_feature: Table A; Target 1185; HLA-B*46:01; ABCB5; ENSG00000004846; TAA
IAYGAMAI

SEQ ID NO: 1186 - protein, 8 aa, Homo sapiens
  misc_feature: Table A; Target 1186; HLA-B*49:01; ABCB5; ENSG00000004846; TAA
IAYGAMAI

SEQ ID NO: 1187 - protein, 8 aa, Homo sapiens
  misc_feature: Table A; Target 1187; HLA-B*51:01; ABCB5; ENSG00000004846; TAA
IAYGAMAI

SEQ ID NO: 1188 - protein, 8 aa, Homo sapiens
  misc_feature: Table A; Target 1188; HLA-B*58:01; ABCB5; ENSG00000004846; TAA
IAYGAMAI

SEQ ID NO: 1189 - protein, 8 aa, Homo sapiens
  misc_feature: Table A; Target 1189; HLA-C*02:02; ABCB5; ENSG00000004846; TAA
IAYGAMAI

SEQ ID NO: 1190 - protein, 8 aa, Homo sapiens
  misc_feature: Table A; Target 1190; HLA-C*03:03; ABCB5; ENSG00000004846; TAA
IAYGAMAI

SEQ ID NO: 1191 - protein, 8 aa, Homo sapiens
  misc_feature: Table A; Target 1191; HLA-C*03:04; ABCB5; ENSG00000004846; TAA
IAYGAMAI

SEQ ID NO: 1192 - protein, 8 aa, Homo sapiens
  misc_feature: Table A; Target 1192; HLA-C*05:01; ABCB5; ENSG00000004846; TAA
IAYGAMAI

SEQ ID NO: 1193 - protein, 8 aa, Homo sapiens
  misc_feature: Table A; Target 1193; HLA-C*06:02; ABCB5; ENSG00000004846; TAA
IAYGAMAI

SEQ ID NO: 1194 - protein, 8 aa, Homo sapiens
  misc_feature: Table A; Target 1194; HLA-C*12:03; ABCB5; ENSG00000004846; TAA
IAYGAMAI

SEQ ID NO: 1195 - protein, 8 aa, Homo sapiens
  misc_feature: Table A; Target 1195; HLA-C*16:02; ABCB5; ENSG00000004846; TAA
IAYGAMAI

SEQ ID NO: 1196 - protein, 8 aa, Homo sapiens
  misc_feature: Table A; Target 1196; HLA-C*16:04; ABCB5; ENSG00000004846; TAA
IAYGAMAI

SEQ ID NO: 1197 - protein, 9 aa, Homo sapiens
  misc_feature: Table A; Target 1197; HLA-B*51:01; ABCB5; ENSG00000004846; TAA
IAYGDNSRV

SEQ ID NO: 1198 - protein, 9 aa, Homo sapiens
  misc_feature: Table A; Target 1198; HLA-C*02:02; ABCB5; ENSG00000004846; TAA
IAYGDNSRV

SEQ ID NO: 1199 - protein, 9 aa, Homo sapiens
  misc_feature: Table A; Target 1199; HLA-C*05:01; ABCB5; ENSG00000004846; TAA
IAYGDNSRV

SEQ ID NO: 1200 - protein, 9 aa, Homo sapiens
  misc_feature: Table A; Target 1200; HLA-C*16:02; ABCB5; ENSG00000004846; TAA
IAYGDNSRV

SEQ ID NO: 1201 - protein, 10 aa, Homo sapiens
  misc_feature: Table A; Target 1201; HLA-B*51:01; ABCB5; ENSG00000004846; TAA
IAYGDNSRVV

SEQ ID NO: 1202 - protein, 10 aa, Homo sapiens
  misc_feature: Table A; Target 1202; HLA-C*02:02; ABCB5; ENSG00000004846; TAA
IAYGDNSRVV

SEQ ID NO: 1203 - protein, 10 aa, Homo sapiens
  misc_feature: Table A; Target 1203; HLA-C*03:03; ABCB5; ENSG00000004846; TAA
IAYGDNSRVV

SEQ ID NO: 1204 - protein, 10 aa, Homo sapiens
  misc_feature: Table A; Target 1204; HLA-C*03:04; ABCB5; ENSG00000004846; TAA
IAYGDNSRVV

SEQ ID NO: 1205 - protein, 10 aa, Homo sapiens
  misc_feature: Table A; Target 1205; HLA-C*12:03; ABCB5; ENSG00000004846; TAA
IAYGDNSRVV

SEQ ID NO: 1206 - protein, 10 aa, Homo sapiens
  misc_feature: Table A; Target 1206; HLA-C*16:02; ABCB5; ENSG00000004846; TAA
IAYGDNSRVV

SEQ ID NO: 1207 - protein, 10 aa, Homo sapiens
  misc_feature: Table A; Target 1207; HLA-C*16:04; ABCB5; ENSG00000004846; TAA
IAYGDNSRVV

SEQ ID NO: 1208 - protein, 9 aa, Homo sapiens
  misc_feature: Table A; Target 1208; HLA-A*30:01; ABCB5; ENSG00000004846; TAA
IDIAQIQGA

SEQ ID NO: 1209 - protein, 9 aa, Homo sapiens
  misc_feature: Table A; Target 1209; HLA-B*37:01; ABCB5; ENSG00000004846; TAA
IDIAQIQGA

SEQ ID NO: 1210 - protein, 11 aa, Homo sapiens
  misc_feature: Table A; Target 1210; HLA-C*04:01; ABCB5; ENSG00000004846; TAA
IDIAQIQGATG

SEQ ID NO: 1211 - protein, 11 aa, Homo sapiens
  misc_feature: Table A; Target 1211; HLA-B*27:02; ABCB5; ENSG00000004846; TAA
IDKAEESTQSK

SEQ ID NO: 1212 - protein, 8 aa, Homo sapiens
  misc_feature: Table A; Target 1212; HLA-B*37:01; ABCB5; ENSG00000004846; TAA
IDKISDGI

SEQ ID NO: 1213 - protein, 8 aa, Homo sapiens
  misc_feature: Table A; Target 1213; HLA-C*07:04; ABCB5; ENSG00000004846; TAA
IDKISDGI

SEQ ID NO: 1214 - protein, 9 aa, Homo sapiens
  misc_feature: Table A; Target 1214; HLA-A*30:02; ABCB5; ENSG00000004846; TAA
IDNFSTAGY

SEQ ID NO: 1215 - protein, 9 aa, Homo sapiens
  misc_feature: Table A; Target 1215; HLA-B*15:03; ABCB5; ENSG00000004846; TAA
IDNFSTAGY

SEQ ID NO: 1216 - protein, 9 aa, Homo sapiens
  misc_feature: Table A; Target 1216; HLA-B*37:01; ABCB5; ENSG00000004846; TAA
IDNFSTAGY

SEQ ID NO: 1217 - protein, 8 aa, Homo sapiens
  misc_feature: Table A; Target 1217; HLA-A*01:01; ABCB5; ENSG00000004846; TAA
IEGLPEKY

SEQ ID NO: 1218 - protein, 8 aa, Homo sapiens
  misc_feature: Table A; Target 1218; HLA-B*15:03; ABCB5; ENSG00000004846; TAA
IEGLPEKY

SEQ ID NO: 1219 - protein, 8 aa, Homo sapiens
  misc_feature: Table A; Target 1219; HLA-B*18:01; ABCB5; ENSG00000004846; TAA
IEGLPEKY

SEQ ID NO: 1220 - protein, 8 aa, Homo sapiens
  misc_feature: Table A; Target 1220; HLA-B*37:01; ABCB5; ENSG00000004846; TAA
IEGLPEKY

SEQ ID NO: 1221 - protein, 8 aa, Homo sapiens
  misc_feature: Table A; Target 1221; HLA-B*44:02; ABCB5; ENSG00000004846; TAA
IEGLPEKY

SEQ ID NO: 1222 - protein, 8 aa, Homo sapiens
  misc_feature: Table A; Target 1222; HLA-B*44:03; ABCB5; ENSG00000004846; TAA
IEGLPEKY

SEQ ID NO: 1223 - protein, 8 aa, Homo sapiens
  misc_feature: Table A; Target 1223; HLA-C*07:01; ABCB5; ENSG00000004846; TAA
IEGLPEKY

SEQ ID NO: 1224 - protein, 8 aa, Homo sapiens
  misc_feature: Table A; Target 1224; HLA-C*12:03; ABCB5; ENSG00000004846; TAA
IEGLPEKY

SEQ ID NO: 1225 - protein, 8 aa, Homo sapiens
  misc_feature: Table A; Target 1225; HLA-C*16:01; ABCB5; ENSG00000004846; TAA
IEGLPEKY

SEQ ID NO: 1226 - protein, 8 aa, Homo sapiens
  misc_feature: Table A; Target 1226; HLA-C*16:04; ABCB5; ENSG00000004846; TAA
IEGLPEKY

SEQ ID NO: 1227 - protein, 8 aa, Homo sapiens
  misc_feature: Table A; Target 1227; HLA-B*27:02; ABCB5; ENSG00000004846; TAA
IEGTVEFK

SEQ ID NO: 1228 - protein, 10 aa, Homo sapiens
  misc_feature: Table A; Target 1228; HLA-B*44:03; ABCB5; ENSG00000004846; TAA
IEGTVEFKNV

SEQ ID NO: 1229 - protein, 10 aa, Homo sapiens
  misc_feature: Table A; Target 1229; HLA-B*49:01; ABCB5; ENSG00000004846; TAA
IEGTVEFKNV

SEQ ID NO: 1230 - protein, 9 aa, Homo sapiens
  misc_feature: Table A; Target 1230; HLA-A*30:01; ABCB5; ENSG00000004846; TAA
IERGKTVAF

SEQ ID NO: 1231 - protein, 9 aa, Homo sapiens
  misc_feature: Table A; Target 1231; HLA-B*08:01; ABCB5; ENSG00000004846; TAA
IERGKTVAF

SEQ ID NO: 1232 - protein, 9 aa, Homo sapiens
  misc_feature: Table A; Target 1232; HLA-B*15:03; ABCB5; ENSG00000004846; TAA
IERGKTVAF

SEQ ID NO: 1233 - protein, 9 aa, Homo sapiens
  misc_feature: Table A; Target 1233; HLA-B*18:01; ABCB5; ENSG00000004846; TAA
IERGKTVAF

SEQ ID NO: 1234 - protein, 9 aa, Homo sapiens
  misc_feature: Table A; Target 1234; HLA-B*37:01; ABCB5; ENSG00000004846; TAA
IERGKTVAF

SEQ ID NO: 1235 - protein, 9 aa, Homo sapiens
  misc_feature: Table A; Target 1235; HLA-B*40:02; ABCB5; ENSG00000004846; TAA
IERGKTVAF

SEQ ID NO: 1236 - protein, 9 aa, Homo sapiens
  misc_feature: Table A; Target 1236; HLA-B*44:02; ABCB5; ENSG00000004846; TAA
IERGKTVAF

SEQ ID NO: 1237 - protein, 9 aa, Homo sapiens
  misc_feature: Table A; Target 1237; HLA-B*46:01; ABCB5; ENSG00000004846; TAA
IERGKTVAF

SEQ ID NO: 1238 - protein, 9 aa, Homo sapiens
  misc_feature: Table A; Target 1238; HLA-B*57:01; ABCB5; ENSG00000004846; TAA
IERGKTVAF

SEQ ID NO: 1239 - protein, 8 aa, Homo sapiens
  misc_feature: Table A; Target 1239; HLA-C*07:04; ABCB5; ENSG00000004846; TAA
IETAAMTG

SEQ ID NO: 1240 - protein, 9 aa, Homo sapiens
  misc_feature: Table A; Target 1240; HLA-A*23:01; ABCB5; ENSG00000004846; TAA
IETAAMTGF

SEQ ID NO: 1241 - protein, 9 aa, Homo sapiens
  misc_feature: Table A; Target 1241; HLA-A*24:02; ABCB5; ENSG00000004846; TAA
IETAAMTGF

SEQ ID NO: 1242 - protein, 9 aa, Homo sapiens
  misc_feature: Table A; Target 1242; HLA-A*25:01; ABCB5; ENSG00000004846; TAA
IETAAMTGF

SEQ ID NO: 1243 - protein, 9 aa, Homo sapiens
  misc_feature: Table A; Target 1243; HLA-A*30:01; ABCB5; ENSG00000004846; TAA
IETAAMTGF

SEQ ID NO: 1244 - protein, 9 aa, Homo sapiens
  misc_feature: Table A; Target 1244; HLA-B*15:01; ABCB5; ENSG00000004846; TAA
IETAAMTGF

SEQ ID NO: 1245 - protein, 9 aa, Homo sapiens
  misc_feature: Table A; Target 1245; HLA-B*15:03; ABCB5; ENSG00000004846; TAA
IETAAMTGF

SEQ ID NO: 1246 - protein, 9 aa, Homo sapiens
  misc_feature: Table A; Target 1246; HLA-B*18:01; ABCB5; ENSG00000004846; TAA
IETAAMTGF

SEQ ID NO: 1247 - protein, 9 aa, Homo sapiens
  misc_feature: Table A; Target 1247; HLA-B*27:02; ABCB5; ENSG00000004846; TAA
IETAAMTGF

SEQ ID NO: 1248 - protein, 9 aa, Homo sapiens
  misc_feature: Table A; Target 1248; HLA-B*37:01; ABCB5; ENSG00000004846; TAA
IETAAMTGF

SEQ ID NO: 1249 - protein, 9 aa, Homo sapiens
  misc_feature: Table A; Target 1249; HLA-B*40:01; ABCB5; ENSG00000004846; TAA
IETAAMTGF

SEQ ID NO: 1250 - protein, 9 aa, Homo sapiens
  misc_feature: Table A; Target 1250; HLA-B*40:02; ABCB5; ENSG00000004846; TAA
IETAAMTGF

SEQ ID NO: 1251 - protein, 9 aa, Homo sapiens
  misc_feature: Table A; Target 1251; HLA-B*44:02; ABCB5; ENSG00000004846; TAA
IETAAMTGF

SEQ ID NO: 1252 - protein, 9 aa, Homo sapiens
  misc_feature: Table A; Target 1252; HLA-B*44:03; ABCB5; ENSG00000004846; TAA
IETAAMTGF

SEQ ID NO: 1253 - protein, 9 aa, Homo sapiens
  misc_feature: Table A; Target 1253; HLA-B*49:01; ABCB5; ENSG00000004846; TAA
IETAAMTGF

SEQ ID NO: 1254 - protein, 9 aa, Homo sapiens
  misc_feature: Table A; Target 1254; HLA-C*02:02; ABCB5; ENSG00000004846; TAA
IETAAMTGF

SEQ ID NO: 1255 - protein, 9 aa, Homo sapiens
  misc_feature: Table A; Target 1255; HLA-C*07:04; ABCB5; ENSG00000004846; TAA
IETAAMTGF

SEQ ID NO: 1256 - protein, 9 aa, Homo sapiens
  misc_feature: Table A; Target 1256; HLA-C*14:02; ABCB5; ENSG00000004846; TAA
IETAAMTGF

SEQ ID NO: 1257 - protein, 9 aa, Homo sapiens
  misc_feature: Table A; Target 1257; HLA-C*16:04; ABCB5; ENSG00000004846; TAA
IETAAMTGF

SEQ ID NO: 1258 - protein, 8 aa, Homo sapiens
  misc_feature: Table A; Target 1258; HLA-A*23:01; ABCB5; ENSG00000004846; TAA
IFAKIITM

SEQ ID NO: 1259 - protein, 8 aa, Homo sapiens
  misc_feature: Table A; Target 1259; HLA-B*18:01; ABCB5; ENSG00000004846; TAA
IFAKIITM

SEQ ID NO: 1260 - protein, 9 aa, Homo sapiens
  misc_feature: Table A; Target 1260; HLA-A*23:01; ABCB5; ENSG00000004846; TAA
IFAKIITMF

SEQ ID NO: 1261 - protein, 9 aa, Homo sapiens
  misc_feature: Table A; Target 1261; HLA-A*24:02; ABCB5; ENSG00000004846; TAA
IFAKIITMF

SEQ ID NO: 1262 - protein, 9 aa, Homo sapiens
  misc_feature: Table A; Target 1262; HLA-A*29:02; ABCB5; ENSG00000004846; TAA
IFAKIITMF

SEQ ID NO: 1263 - protein, 9 aa, Homo sapiens
  misc_feature: Table A; Target 1263; HLA-A*23:01; ABCB5; ENSG00000004846; TAA
IFGYIQISL

SEQ ID NO: 1264 - protein, 9 aa, Homo sapiens
  misc_feature: Table A; Target 1264; HLA-C*01:02; ABCB5; ENSG00000004846; TAA
IFGYIQISL

SEQ ID NO: 1265 - protein, 9 aa, Homo sapiens
  misc_feature: Table A; Target 1265; HLA-C*14:02; ABCB5; ENSG00000004846; TAA
IFGYIQISL

SEQ ID NO: 1266 - protein, 11 aa, Homo sapiens
  misc_feature: Table A; Target 1266; HLA-A*23:01; ABCB5; ENSG00000004846; TAA
IGAAVPHFETF

SEQ ID NO: 1267 - protein, 11 aa, Homo sapiens
  misc_feature: Table A; Target 1267; HLA-A*24:02; ABCB5; ENSG00000004846; TAA
IGAAVPHFETF

SEQ ID NO: 1268 - protein, 11 aa, Homo sapiens
  misc_feature: Table A; Target 1268; HLA-B*57:01; ABCB5; ENSG00000004846; TAA
IGAAVPHFETF

SEQ ID NO: 1269 - protein, 8 aa, Homo sapiens
  misc_feature: Table A; Target 1269; HLA-C*05:01; ABCB5; ENSG00000004846; TAA
IGDKIALL

SEQ ID NO: 1270 - protein, 9 aa, Homo sapiens
  misc_feature: Table A; Target 1270; HLA-A*02:07; ABCB5; ENSG00000004846; TAA
IGDKIALLF

SEQ ID NO: 1271 - protein, 8 aa, Homo sapiens
  misc_feature: Table A; Target 1271; HLA-C*05:01; ABCB5; ENSG00000004846; TAA
IGELNTRM

SEQ ID NO: 1272 - protein, 9 aa, Homo sapiens
  misc_feature: Table A; Target 1272; HLA-A*11:01; ABCB5; ENSG00000004846; TAA
IGLAVGLVK

SEQ ID NO: 1273 - protein, 11 aa, Homo sapiens
  misc_feature: Table A; Target 1273; HLA-B*57:01; ABCB5; ENSG00000004846; TAA
IGLAVGLVKGW

SEQ ID NO: 1274 - protein, 8 aa, Homo sapiens
  misc_feature: Table A; Target 1274; HLA-B*46:01; ABCB5; ENSG00000004846; TAA
IGTVLAVF

SEQ ID NO: 1275 - protein, 10 aa, Homo sapiens
  misc_feature: Table A; Target 1275; HLA-C*04:01; ABCB5; ENSG00000004846; TAA
IGVLTQNATN

SEQ ID NO: 1276 - protein, 9 aa, Homo sapiens
  misc_feature: Table A; Target 1276; HLA-A*02:03; ABCB5; ENSG00000004846; TAA
IIFAKIITM

SEQ ID NO: 1277 - protein, 9 aa, Homo sapiens
  misc_feature: Table A; Target 1277; HLA-A*02:04; ABCB5; ENSG00000004846; TAA
IIFAKIITM

SEQ ID NO: 1278 - protein, 9 aa, Homo sapiens
  misc_feature: Table A; Target 1278; HLA-A*02:07; ABCB5; ENSG00000004846; TAA
IIFAKIITM

SEQ ID NO: 1279 - protein, 9 aa, Homo sapiens
  misc_feature: Table A; Target 1279; HLA-A*03:01; ABCB5; ENSG00000004846; TAA
IIFAKIITM

SEQ ID NO: 1280 - protein, 9 aa, Homo sapiens
  misc_feature: Table A; Target 1280; HLA-A*32:01; ABCB5; ENSG00000004846; TAA
IIFAKIITM

SEQ ID NO: 1281 - protein, 9 aa, Homo sapiens
  misc_feature: Table A; Target 1281; HLA-B*08:01; ABCB5; ENSG00000004846; TAA
IIFAKIITM

SEQ ID NO: 1282 - protein, 9 aa, Homo sapiens
  misc_feature: Table A; Target 1282; HLA-B*35:01; ABCB5; ENSG00000004846; TAA
IIFAKIITM

SEQ ID NO: 1283 - protein, 9 aa, Homo sapiens
  misc_feature: Table A; Target 1283; HLA-B*46:01; ABCB5; ENSG00000004846; TAA
IIFAKIITM

SEQ ID NO: 1284 - protein, 9 aa, Homo sapiens
  misc_feature: Table A; Target 1284; HLA-B*51:01; ABCB5; ENSG00000004846; TAA
IIFAKIITM

SEQ ID NO: 1285 - protein, 9 aa, Homo sapiens
  misc_feature: Table A; Target 1285; HLA-C*02:02; ABCB5; ENSG00000004846; TAA
IIFAKIITM

SEQ ID NO: 1286 - protein, 9 aa, Homo sapiens
  misc_feature: Table A; Target 1286; HLA-C*03:04; ABCB5; ENSG00000004846; TAA
IIFAKIITM

SEQ ID NO: 1287 - protein, 9 aa, Homo sapiens
  misc_feature: Table A; Target 1287; HLA-C*07:04; ABCB5; ENSG00000004846; TAA
IIFAKIITM

SEQ ID NO: 1288 - protein, 9 aa, Homo sapiens
  misc_feature: Table A; Target 1288; HLA-C*07:06; ABCB5; ENSG00000004846; TAA
IIFAKIITM

SEQ ID NO: 1289 - protein, 9 aa, Homo sapiens
  misc_feature: Table A; Target 1289; HLA-C*12:03; ABCB5; ENSG00000004846; TAA
IIFAKIITM

SEQ ID NO: 1290 - protein, 9 aa, Homo sapiens
  misc_feature: Table A; Target 1290; HLA-C*16:01; ABCB5; ENSG00000004846; TAA
IIFAKIITM

SEQ ID NO: 1291 - protein, 8 aa, Homo sapiens
  misc_feature: Table A; Target 1291; HLA-C*07:01; ABCB5; ENSG00000004846; TAA
IIGSCYAF

SEQ ID NO: 1292 - protein, 9 aa, Homo sapiens
  misc_feature: Table A; Target 1292; HLA-A*32:01; ABCB5; ENSG00000004846; TAA
IITAARQTK

SEQ ID NO: 1293 - protein, 9 aa, Homo sapiens
  misc_feature: Table A; Target 1293; HLA-C*16:01; ABCB5; ENSG00000004846; TAA
IITAARQTK

SEQ ID NO: 1294 - protein, 10 aa, Homo sapiens
  misc_feature: Table A; Target 1294; HLA-B*38:01; ABCB5; ENSG00000004846; TAA
IKEQGTHQEL

SEQ ID NO: 1295 - protein, 9 aa, Homo sapiens
  misc_feature: Table A; Target 1295; HLA-B*15:03; ABCB5; ENSG00000004846; TAA
IKSGETVAL

SEQ ID NO: 1296 - protein, 9 aa, Homo sapiens
  misc_feature: Table A; Target 1296; HLA-B*38:01; ABCB5; ENSG00000004846; TAA
IKSGETVAL

SEQ ID NO: 1297 - protein, 9 aa, Homo sapiens
  misc_feature: Table A; Target 1297; HLA-B*39:01; ABCB5; ENSG00000004846; TAA
IKSGETVAL

SEQ ID NO: 1298 - protein, 9 aa, Homo sapiens
  misc_feature: Table A; Target 1298; HLA-A*02:01; ABCB5; ENSG00000004846; TAA
ILAIDIAQI

SEQ ID NO: 1299 - protein, 9 aa, Homo sapiens
  misc_feature: Table A; Target 1299; HLA-A*02:03; ABCB5; ENSG00000004846; TAA
ILAIDIAQI

SEQ ID NO: 1300 - protein, 9 aa, Homo sapiens
  misc_feature: Table A; Target 1300; HLA-A*02:04; ABCB5; ENSG00000004846; TAA
ILAIDIAQI

SEQ ID NO: 1301 - protein, 9 aa, Homo sapiens
  misc_feature: Table A; Target 1301; HLA-B*13:02; ABCB5; ENSG00000004846; TAA
ILAIDIAQI

SEQ ID NO: 1302 - protein, 9 aa, Homo sapiens
  misc_feature: Table A; Target 1302; HLA-B*38:01; ABCB5; ENSG00000004846; TAA
ILAIDIAQI

SEQ ID NO: 1303 - protein, 9 aa, Homo sapiens
  misc_feature: Table A; Target 1303; HLA-B*55:01; ABCB5; ENSG00000004846; TAA
ILAIDIAQI

SEQ ID NO: 1304 - protein, 9 aa, Homo sapiens
  misc_feature: Table A; Target 1304; HLA-A*02:01; ABCB5; ENSG00000004846; TAA
ILASLVNGA

SEQ ID NO: 1305 - protein, 9 aa, Homo sapiens
  misc_feature: Table A; Target 1305; HLA-A*02:03; ABCB5; ENSG00000004846; TAA
ILASLVNGA

SEQ ID NO: 1306 - protein, 9 aa, Homo sapiens
  misc_feature: Table A; Target 1306; HLA-A*02:04; ABCB5; ENSG00000004846; TAA
ILASLVNGA

SEQ ID NO: 1307 - protein, 9 aa, Homo sapiens
  misc_feature: Table A; Target 1307; HLA-B*13:02; ABCB5; ENSG00000004846; TAA
ILASLVNGA

SEQ ID NO: 1308 - protein, 9 aa, Homo sapiens
  misc_feature: Table A; Target 1308; HLA-B*55:01; ABCB5; ENSG00000004846; TAA
ILASLVNGA

SEQ ID NO: 1309 - protein, 8 aa, Homo sapiens
  misc_feature: Table A; Target 1309; HLA-C*05:01; ABCB5; ENSG00000004846; TAA
ILDEATSA

SEQ ID NO: 1310 - protein, 9 aa, Homo sapiens
  misc_feature: Table A; Target 1310; HLA-A*01:01; ABCB5; ENSG00000004846; TAA
ILDEATSAL

SEQ ID NO: 1311 - protein, 9 aa, Homo sapiens
  misc_feature: Table A; Target 1311; HLA-A*02:01; ABCB5; ENSG00000004846; TAA
ILDEATSAL

SEQ ID NO: 1312 - protein, 9 aa, Homo sapiens
  misc_feature: Table A; Target 1312; HLA-A*02:03; ABCB5; ENSG00000004846; TAA
ILDEATSAL

SEQ ID NO: 1313 - protein, 9 aa, Homo sapiens
  misc_feature: Table A; Target 1313; HLA-A*02:04; ABCB5; ENSG00000004846; TAA
ILDEATSAL

SEQ ID NO: 1314 - protein, 9 aa, Homo sapiens
  misc_feature: Table A; Target 1314; HLA-A*02:07; ABCB5; ENSG00000004846; TAA
ILDEATSAL

SEQ ID NO: 1315 - protein, 9 aa, Homo sapiens
  misc_feature: Table A; Target 1315; HLA-A*32:01; ABCB5; ENSG00000004846; TAA
ILDEATSAL

SEQ ID NO: 1316 - protein, 9 aa, Homo sapiens
  misc_feature: Table A; Target 1316; HLA-B*07:02; ABCB5; ENSG00000004846; TAA
ILDEATSAL

SEQ ID NO: 1317 - protein, 9 aa, Homo sapiens
  misc_feature: Table A; Target 1317; HLA-B*15:01; ABCB5; ENSG00000004846; TAA
ILDEATSAL

SEQ ID NO: 1318 - protein, 9 aa, Homo sapiens
  misc_feature: Table A; Target 1318; HLA-B*35:03; ABCB5; ENSG00000004846; TAA
ILDEATSAL

SEQ ID NO: 1319 - protein, 9 aa, Homo sapiens
  misc_feature: Table A; Target 1319; HLA-B*38:01; ABCB5; ENSG00000004846; TAA
ILDEATSAL

SEQ ID NO: 1320 - protein, 9 aa, Homo sapiens
  misc_feature: Table A; Target 1320; HLA-B*39:01; ABCB5; ENSG00000004846; TAA
ILDEATSAL

SEQ ID NO: 1321 - protein, 9 aa, Homo sapiens
  misc_feature: Table A; Target 1321; HLA-B*46:01; ABCB5; ENSG00000004846; TAA
ILDEATSAL

SEQ ID NO: 1322 - protein, 9 aa, Homo sapiens
  misc_feature: Table A; Target 1322; HLA-B*55:01; ABCB5; ENSG00000004846; TAA
ILDEATSAL

SEQ ID NO: 1323 - protein, 9 aa, Homo sapiens
  misc_feature: Table A; Target 1323; HLA-C*01:02; ABCB5; ENSG00000004846; TAA
ILDEATSAL

SEQ ID NO: 1324 - protein, 9 aa, Homo sapiens
  misc_feature: Table A; Target 1324; HLA-C*03:03; ABCB5; ENSG00000004846; TAA
ILDEATSAL

SEQ ID NO: 1325 - protein, 9 aa, Homo sapiens
  misc_feature: Table A; Target 1325; HLA-C*03:04; ABCB5; ENSG00000004846; TAA
ILDEATSAL

SEQ ID NO: 1326 - protein, 9 aa, Homo sapiens
  misc_feature: Table A; Target 1326; HLA-C*04:01; ABCB5; ENSG00000004846; TAA
ILDEATSAL

SEQ ID NO: 1327 - protein, 9 aa, Homo sapiens
  misc_feature: Table A; Target 1327; HLA-C*05:01; ABCB5; ENSG00000004846; TAA
ILDEATSAL

SEQ ID NO: 1328 - protein, 9 aa, Homo sapiens
  misc_feature: Table A; Target 1328; HLA-C*07:02; ABCB5; ENSG00000004846; TAA
ILDEATSAL

SEQ ID NO: 1329 - protein, 9 aa, Homo sapiens
  misc_feature: Table A; Target 1329; HLA-C*07:04; ABCB5; ENSG00000004846; TAA
ILDEATSAL

SEQ ID NO: 1330 - protein, 9 aa, Homo sapiens
  misc_feature: Table A; Target 1330; HLA-C*14:02; ABCB5; ENSG00000004846; TAA
ILDEATSAL

SEQ ID NO: 1331 - protein, 9 aa, Homo sapiens
  misc_feature: Table A; Target 1331; HLA-A*02:03; ABCB5; ENSG00000004846; TAA
ILKGLNLRI

SEQ ID NO: 1332 - protein, 8 aa, Homo sapiens
  misc_feature: Table A; Target 1332; HLA-A*30:02; ABCB5; ENSG00000004846; TAA
ILNGEPGY

SEQ ID NO: 1333 - protein, 8 aa, Homo sapiens
  misc_feature: Table A; Target 1333; HLA-B*15:03; ABCB5; ENSG00000004846; TAA
ILNGEPGY

SEQ ID NO: 1334 - protein, 8 aa, Homo sapiens
  misc_feature: Table A; Target 1334; HLA-B*39:01; ABCB5; ENSG00000004846; TAA
ILNGEPGY

SEQ ID NO: 1335 - protein, 10 aa, Homo sapiens
  misc_feature: Table A; Target 1335; HLA-A*02:01; ABCB5; ENSG00000004846; TAA
ILNGEPGYTI

SEQ ID NO: 1336 - protein, 10 aa, Homo sapiens
  misc_feature: Table A; Target 1336; HLA-A*02:03; ABCB5; ENSG00000004846; TAA
ILNGEPGYTI

SEQ ID NO: 1337 - protein, 10 aa, Homo sapiens
  misc_feature: Table A; Target 1337; HLA-A*02:04; ABCB5; ENSG00000004846; TAA
ILNGEPGYTI

SEQ ID NO: 1338 - protein, 10 aa, Homo sapiens
  misc_feature: Table A; Target 1338; HLA-A*23:01; ABCB5; ENSG00000004846; TAA
ILNGEPGYTI

SEQ ID NO: 1339 - protein, 10 aa, Homo sapiens
  misc_feature: Table A; Target 1339; HLA-B*13:02; ABCB5; ENSG00000004846; TAA
ILNGEPGYTI

SEQ ID NO: 1340 - protein, 10 aa, Homo sapiens
  misc_feature: Table A; Target 1340; HLA-B*15:01; ABCB5; ENSG00000004846; TAA
ILNGEPGYTI

SEQ ID NO: 1341 - protein, 10 aa, Homo sapiens
  misc_feature: Table A; Target 1341; HLA-B*38:01; ABCB5; ENSG00000004846; TAA
ILNGEPGYTI

SEQ ID NO: 1342 - protein, 11 aa, Homo sapiens
  misc_feature: Table A; Target 1342; HLA-A*31:01; ABCB5; ENSG00000004846; TAA
ILRGLSLSIER

SEQ ID NO: 1343 - protein, 8 aa, Homo sapiens
  misc_feature: Table A; Target 1343; HLA-B*13:02; ABCB5; ENSG00000004846; TAA
ILSIAPVL

SEQ ID NO: 1344 - protein, 8 aa, Homo sapiens
  misc_feature: Table A; Target 1344; HLA-B*37:01; ABCB5; ENSG00000004846; TAA
ILSIAPVL

SEQ ID NO: 1345 - protein, 8 aa, Homo sapiens
  misc_feature: Table A; Target 1345; HLA-C*03:03; ABCB5; ENSG00000004846; TAA
ILSIAPVL

SEQ ID NO: 1346 - protein, 8 aa, Homo sapiens
  misc_feature: Table A; Target 1346; HLA-C*03:04; ABCB5; ENSG00000004846; TAA
ILSIAPVL

SEQ ID NO: 1347 - protein, 8 aa, Homo sapiens
  misc_feature: Table A; Target 1347; HLA-C*16:01; ABCB5; ENSG00000004846; TAA
ILSIAPVL

SEQ ID NO: 1348 - protein, 9 aa, Homo sapiens
  misc_feature: Table A; Target 1348; HLA-A*02:01; ABCB5; ENSG00000004846; TAA
ILSIAPVLA

SEQ ID NO: 1349 - protein, 10 aa, Homo sapiens
  misc_feature: Table A; Target 1349; HLA-A*02:03; ABCB5; ENSG00000004846; TAA
ILSIAPVLAV

SEQ ID NO: 1350 - protein, 8 aa, Homo sapiens
  misc_feature: Table A; Target 1350; HLA-C*05:01; ABCB5; ENSG00000004846; TAA
IMEFPNKF

SEQ ID NO: 1351 - protein, 11 aa, Homo sapiens
  misc_feature: Table A; Target 1351; HLA-A*02:01; ABCB5; ENSG00000004846; TAA
IMVDENDIRAL

SEQ ID NO: 1352 - protein, 11 aa, Homo sapiens
  misc_feature: Table A; Target 1352; HLA-A*02:03; ABCB5; ENSG00000004846; TAA
IMVDENDIRAL

SEQ ID NO: 1353 - protein, 11 aa, Homo sapiens
  misc_feature: Table A; Target 1353; HLA-A*02:04; ABCB5; ENSG00000004846; TAA
IMVDENDIRAL

SEQ ID NO: 1354 - protein, 11 aa, Homo sapiens
  misc_feature: Table A; Target 1354; HLA-A*02:07; ABCB5; ENSG00000004846; TAA
IMVDENDIRAL

SEQ ID NO: 1355 - protein, 11 aa, Homo sapiens
  misc_feature: Table A; Target 1355; HLA-B*46:01; ABCB5; ENSG00000004846; TAA
IMVDENDIRAL

SEQ ID NO: 1356 - protein, 11 aa, Homo sapiens
  misc_feature: Table A; Target 1356; HLA-B*55:01; ABCB5; ENSG00000004846; TAA
IMVDENDIRAL

SEQ ID NO: 1357 - protein, 9 aa, Homo sapiens
  misc_feature: Table A; Target 1357; HLA-B*13:02; ABCB5; ENSG00000004846; TAA
IQGATGSRI

SEQ ID NO: 1358 - protein, 9 aa, Homo sapiens
  misc_feature: Table A; Target 1358; HLA-B*38:01; ABCB5; ENSG00000004846; TAA
IQGATGSRI

SEQ ID NO: 1359 - protein, 9 aa, Homo sapiens
  misc_feature: Table A; Target 1359; HLA-A*02:01; ABCB5; ENSG00000004846; TAA
IQNADLIVV

SEQ ID NO: 1360 - protein, 9 aa, Homo sapiens
  misc_feature: Table A; Target 1360; HLA-A*02:04; ABCB5; ENSG00000004846; TAA
IQNADLIVV

SEQ ID NO: 1361 - protein, 9 aa, Homo sapiens
  misc_feature: Table A; Target 1361; HLA-A*30:01; ABCB5; ENSG00000004846; TAA
IQNADLIVV

SEQ ID NO: 1362 - protein, 9 aa, Homo sapiens
  misc_feature: Table A; Target 1362; HLA-B*13:02; ABCB5; ENSG00000004846; TAA
IQNADLIVV

SEQ ID NO: 1363 - protein, 9 aa, Homo sapiens
  misc_feature: Table A; Target 1363; HLA-B*38:01; ABCB5; ENSG00000004846; TAA
IQNADLIVV

SEQ ID NO: 1364 - protein, 9 aa, Homo sapiens
  misc_feature: Table A; Target 1364; HLA-B*39:01; ABCB5; ENSG00000004846; TAA
IQNADLIVV

SEQ ID NO: 1365 - protein, 10 aa, Homo sapiens
  misc_feature: Table A; Target 1365; HLA-B*38:01; ABCB5; ENSG00000004846; TAA
IQNADLIVVL

SEQ ID NO: 1366 - protein, 9 aa, Homo sapiens
  misc_feature: Table A; Target 1366; HLA-C*06:02; ABCB5; ENSG00000004846; TAA
IRALNVRHY

SEQ ID NO: 1367 - protein, 9 aa, Homo sapiens
  misc_feature: Table A; Target 1367; HLA-C*07:01; ABCB5; ENSG00000004846; TAA
IRALNVRHY

SEQ ID NO: 1368 - protein, 9 aa, Homo sapiens
  misc_feature: Table A; Target 1368; HLA-C*16:04; ABCB5; ENSG00000004846; TAA
IRALNVRHY

SEQ ID NO: 1369 - protein, 10 aa, Homo sapiens
  misc_feature: Table A; Target 1369; HLA-B*38:01; ABCB5; ENSG00000004846; TAA
IRSADLIVTL

SEQ ID NO: 1370 - protein, 9 aa, Homo sapiens
  misc_feature: Table A; Target 1370; HLA-B*27:05; ABCB5; ENSG00000004846; TAA
IRTIVSLTR

SEQ ID NO: 1371 - protein, 9 aa, Homo sapiens
  misc_feature: Table A; Target 1371; HLA-A*01:01; ABCB5; ENSG00000004846; TAA
ISDGIGDKI

SEQ ID NO: 1372 - protein, 9 aa, Homo sapiens
  misc_feature: Table A; Target 1372; HLA-A*02:07; ABCB5; ENSG00000004846; TAA
ISDGIGDKI

SEQ ID NO: 1373 - protein, 9 aa, Homo sapiens
  misc_feature: Table A; Target 1373; HLA-B*38:01; ABCB5; ENSG00000004846; TAA
ISDGIGDKI

SEQ ID NO: 1374 - protein, 9 aa, Homo sapiens
  misc_feature: Table A; Target 1374; HLA-C*05:01; ABCB5; ENSG00000004846; TAA
ISDGIGDKI

SEQ ID NO: 1375 - protein, 11 aa, Homo sapiens
  misc_feature: Table A; Target 1375; HLA-C*05:01; ABCB5; ENSG00000004846; TAA
ISDGIGDKIAL

SEQ ID NO: 1376 - protein, 9 aa, Homo sapiens
  misc_feature: Table A; Target 1376; HLA-A*02:04; ABCB5; ENSG00000004846; TAA
ISLPEVSLL

SEQ ID NO: 1377 - protein, 9 aa, Homo sapiens
  misc_feature: Table A; Target 1377; HLA-A*23:01; ABCB5; ENSG00000004846; TAA
ISLPEVSLL

SEQ ID NO: 1378 - protein, 9 aa, Homo sapiens
  misc_feature: Table A; Target 1378; HLA-A*24:02; ABCB5; ENSG00000004846; TAA
ISLPEVSLL

SEQ ID NO: 1379 - protein, 9 aa, Homo sapiens
  misc_feature: Table A; Target 1379; HLA-B*57:01; ABCB5; ENSG00000004846; TAA
ISLPEVSLL

SEQ ID NO: 1380 - protein, 9 aa, Homo sapiens
  misc_feature: Table A; Target 1380; HLA-B*58:01; ABCB5; ENSG00000004846; TAA
ISLPEVSLL

SEQ ID NO: 1381 - protein, 9 aa, Homo sapiens
  misc_feature: Table A; Target 1381; HLA-C*03:04; ABCB5; ENSG00000004846; TAA
ISLPEVSLL

SEQ ID NO: 1382 - protein, 9 aa, Homo sapiens
  misc_feature: Table A; Target 1382; HLA-C*05:01; ABCB5; ENSG00000004846; TAA
ISLPEVSLL

SEQ ID NO: 1383 - protein, 10 aa, Homo sapiens
  misc_feature: Table A; Target 1383; HLA-A*11:01; ABCB5; ENSG00000004846; TAA
ISLPEVSLLK

SEQ ID NO: 1384 - protein, 8 aa, Homo sapiens
  misc_feature: Table A; Target 1384; HLA-B*58:01; ABCB5; ENSG00000004846; TAA
ISLTSKEL

SEQ ID NO: 1385 - protein, 8 aa, Homo sapiens
  misc_feature: Table A; Target 1385; HLA-C*01:02; ABCB5; ENSG00000004846; TAA
ISLTSKEL

SEQ ID NO: 1386 - protein, 8 aa, Homo sapiens
  misc_feature: Table A; Target 1386; HLA-C*03:03; ABCB5; ENSG00000004846; TAA
ISLTSKEL

SEQ ID NO: 1387 - protein, 8 aa, Homo sapiens
  misc_feature: Table A; Target 1387; HLA-C*03:04; ABCB5; ENSG00000004846; TAA
ISLTSKEL

SEQ ID NO: 1388 - protein, 8 aa, Homo sapiens
  misc_feature: Table A; Target 1388; HLA-C*16:01; ABCB5; ENSG00000004846; TAA
ISLTSKEL

SEQ ID NO: 1389 - protein, 11 aa, Homo sapiens
  misc_feature: Table A; Target 1389; HLA-A*01:01; ABCB5; ENSG00000004846; TAA
ISLTSKELSAY

SEQ ID NO: 1390 - protein, 11 aa, Homo sapiens
  misc_feature: Table A; Target 1390; HLA-A*30:02; ABCB5; ENSG00000004846; TAA
ISLTSKELSAY

SEQ ID NO: 1391 - protein, 11 aa, Homo sapiens
  misc_feature: Table A; Target 1391; HLA-B*15:01; ABCB5; ENSG00000004846; TAA
ISLTSKELSAY

SEQ ID NO: 1392 - protein, 11 aa, Homo sapiens
  misc_feature: Table A; Target 1392; HLA-B*46:01; ABCB5; ENSG00000004846; TAA
ISLTSKELSAY

SEQ ID NO: 1393 - protein, 11 aa, Homo sapiens
  misc_feature: Table A; Target 1393; HLA-B*57:01; ABCB5; ENSG00000004846; TAA
ISLTSKELSAY

SEQ ID NO: 1394 - protein, 11 aa, Homo sapiens
  misc_feature: Table A; Target 1394; HLA-B*58:01; ABCB5; ENSG00000004846; TAA
ISLTSKELSAY

SEQ ID NO: 1395 - protein, 11 aa, Homo sapiens
  misc_feature: Table A; Target 1395; HLA-C*16:02; ABCB5; ENSG00000004846; TAA
ISLTSKELSAY

SEQ ID NO: 1396 - protein, 9 aa, Homo sapiens
  misc_feature: Table A; Target 1396; HLA-B*54:01; ABCB5; ENSG00000004846; TAA
ISLWIITAA

SEQ ID NO: 1397 - protein, 9 aa, Homo sapiens
  misc_feature: Table A; Target 1397; HLA-A*31:01; ABCB5; ENSG00000004846; TAA
ISNNIKYGR

SEQ ID NO: 1398 - protein, 9 aa, Homo sapiens
  misc_feature: Table A; Target 1398; HLA-A*33:01; ABCB5; ENSG00000004846; TAA
ISNNIKYGR

SEQ ID NO: 1399 - protein, 9 aa, Homo sapiens
  misc_feature: Table A; Target 1399; HLA-A*33:03; ABCB5; ENSG00000004846; TAA
ISNNIKYGR

SEQ ID NO: 1400 - protein, 9 aa, Homo sapiens
  misc_feature: Table A; Target 1400; HLA-B*57:01; ABCB5; ENSG00000004846; TAA
ISNNIKYGR

SEQ ID NO: 1401 - protein, 8 aa, Homo sapiens
  misc_feature: Table A; Target 1401; HLA-C*16:01; ABCB5; ENSG00000004846; TAA
ITAARQTK

SEQ ID NO: 1402 - protein, 9 aa, Homo sapiens
  misc_feature: Table A; Target 1402; HLA-A*03:02; ABCB5; ENSG00000004846; TAA
ITMFGNNDK

SEQ ID NO: 1403 - protein, 9 aa, Homo sapiens
  misc_feature: Table A; Target 1403; HLA-A*11:01; ABCB5; ENSG00000004846; TAA
ITMFGNNDK

SEQ ID NO: 1404 - protein, 8 aa, Homo sapiens
  misc_feature: Table A; Target 1404; HLA-A*29:02; ABCB5; ENSG00000004846; TAA
IVFTAIAY

SEQ ID NO: 1405 - protein, 8 aa, Homo sapiens
  misc_feature: Table A; Target 1405; HLA-A*30:02; ABCB5; ENSG00000004846; TAA
IVFTAIAY

SEQ ID NO: 1406 - protein, 8 aa, Homo sapiens
  misc_feature: Table A; Target 1406; HLA-A*32:01; ABCB5; ENSG00000004846; TAA
IVFTAIAY

SEQ ID NO: 1407 - protein, 8 aa, Homo sapiens
  misc_feature: Table A; Target 1407; HLA-B*15:01; ABCB5; ENSG00000004846; TAA
IVFTAIAY

SEQ ID NO: 1408 - protein, 8 aa, Homo sapiens
  misc_feature: Table A; Target 1408; HLA-B*15:03; ABCB5; ENSG00000004846; TAA
IVFTAIAY

SEQ ID NO: 1409 - protein, 8 aa, Homo sapiens
  misc_feature: Table A; Target 1409; HLA-B*18:01; ABCB5; ENSG00000004846; TAA
IVFTAIAY

SEQ ID NO: 1410 - protein, 8 aa, Homo sapiens
  misc_feature: Table A; Target 1410; HLA-B*35:01; ABCB5; ENSG00000004846; TAA
IVFTAIAY

SEQ ID NO: 1411 - protein, 8 aa, Homo sapiens
  misc_feature: Table A; Target 1411; HLA-B*46:01; ABCB5; ENSG00000004846; TAA
IVFTAIAY

SEQ ID NO: 1412 - protein, 8 aa, Homo sapiens
  misc_feature: Table A; Target 1412; HLA-B*58:01; ABCB5; ENSG00000004846; TAA
IVFTAIAY

SEQ ID NO: 1413 - protein, 8 aa, Homo sapiens
  misc_feature: Table A; Target 1413; HLA-C*01:02; ABCB5; ENSG00000004846; TAA
IVFTAIAY

SEQ ID NO: 1414 - protein, 8 aa, Homo sapiens
  misc_feature: Table A; Target 1414; HLA-C*02:02; ABCB5; ENSG00000004846; TAA
IVFTAIAY

SEQ ID NO: 1415 - protein, 8 aa, Homo sapiens
  misc_feature: Table A; Target 1415; HLA-C*03:03; ABCB5; ENSG00000004846; TAA
IVFTAIAY

SEQ ID NO: 1416 - protein, 8 aa, Homo sapiens
  misc_feature: Table A; Target 1416; HLA-C*07:04; ABCB5; ENSG00000004846; TAA
IVFTAIAY

SEQ ID NO: 1417 - protein, 8 aa, Homo sapiens
  misc_feature: Table A; Target 1417; HLA-C*12:03; ABCB5; ENSG00000004846; TAA
IVFTAIAY

SEQ ID NO: 1418 - protein, 8 aa, Homo sapiens
  misc_feature: Table A; Target 1418; HLA-C*14:02; ABCB5; ENSG00000004846; TAA
IVFTAIAY

SEQ ID NO: 1419 - protein, 8 aa, Homo sapiens
  misc_feature: Table A; Target 1419; HLA-C*16:01; ABCB5; ENSG00000004846; TAA
IVFTAIAY

SEQ ID NO: 1420 - protein, 9 aa, Homo sapiens
  misc_feature: Table A; Target 1420; HLA-A*02:07; ABCB5; ENSG00000004846; TAA
IVPQEPVLF

SEQ ID NO: 1421 - protein, 9 aa, Homo sapiens
  misc_feature: Table A; Target 1421; HLA-A*23:01; ABCB5; ENSG00000004846; TAA
IVPQEPVLF

SEQ ID NO: 1422 - protein, 9 aa, Homo sapiens
  misc_feature: Table A; Target 1422; HLA-A*24:02; ABCB5; ENSG00000004846; TAA
IVPQEPVLF

SEQ ID NO: 1423 - protein, 8 aa, Homo sapiens
  misc_feature: Table A; Target 1423; HLA-B*08:01; ABCB5; ENSG00000004846; TAA
IVTLKDGM

SEQ ID NO: 1424 - protein, 9 aa, Homo sapiens
  misc_feature: Table A; Target 1424; HLA-A*23:01; ABCB5; ENSG00000004846; TAA
IYFAYAAGF

SEQ ID NO: 1425 - protein, 9 aa, Homo sapiens
  misc_feature: Table A; Target 1425; HLA-A*24:02; ABCB5; ENSG00000004846; TAA
IYFAYAAGF

SEQ ID NO: 1426 - protein, 9 aa, Homo sapiens
  misc_feature: Table A; Target 1426; HLA-A*29:02; ABCB5; ENSG00000004846; TAA
IYFAYAAGF

SEQ ID NO: 1427 - protein, 9 aa, Homo sapiens
  misc_feature: Table A; Target 1427; HLA-C*14:02; ABCB5; ENSG00000004846; TAA
IYFAYAAGF

SEQ ID NO: 1428 - protein, 11 aa, Homo sapiens
  misc_feature: Table A; Target 1428; HLA-A*24:02; ABCB5; ENSG00000004846; TAA
IYFAYAAGFRF

SEQ ID NO: 1429 - protein, 8 aa, Homo sapiens
  misc_feature: Table A; Target 1429; HLA-A*24:02; ABCB5; ENSG00000004846; TAA
IYGWEMTF

SEQ ID NO: 1430 - protein, 9 aa, Homo sapiens
  misc_feature: Table A; Target 1430; HLA-A*24:02; ABCB5; ENSG00000004846; TAA
IYGWEMTFL

SEQ ID NO: 1431 - protein, 8 aa, Homo sapiens
  misc_feature: Table A; Target 1431; HLA-A*24:02; ABCB5; ENSG00000004846; TAA
IYSMIFVI

SEQ ID NO: 1432 - protein, 9 aa, Homo sapiens
  misc_feature: Table A; Target 1432; HLA-A*23:01; ABCB5; ENSG00000004846; TAA
IYSMIFVIL

SEQ ID NO: 1433 - protein, 9 aa, Homo sapiens
  misc_feature: Table A; Target 1433; HLA-A*24:02; ABCB5; ENSG00000004846; TAA
IYSMIFVIL

SEQ ID NO: 1434 - protein, 9 aa, Homo sapiens
  misc_feature: Table A; Target 1434; HLA-B*55:01; ABCB5; ENSG00000004846; TAA
KADEQMESM

SEQ ID NO: 1435 - protein, 9 aa, Homo sapiens
  misc_feature: Table A; Target 1435; HLA-B*58:01; ABCB5; ENSG00000004846; TAA
KADEQMESM

SEQ ID NO: 1436 - protein, 9 aa, Homo sapiens
  misc_feature: Table A; Target 1436; HLA-C*03:04; ABCB5; ENSG00000004846; TAA
KADEQMESM

SEQ ID NO: 1437 - protein, 9 aa, Homo sapiens
  misc_feature: Table A; Target 1437; HLA-C*05:01; ABCB5; ENSG00000004846; TAA
KADEQMESM

SEQ ID NO: 1438 - protein, 11 aa, Homo sapiens
  misc_feature: Table A; Target 1438; HLA-A*01:01; ABCB5; ENSG00000004846; TAA
KADEQMESMTY

SEQ ID NO: 1439 - protein, 11 aa, Homo sapiens
  misc_feature: Table A; Target 1439; HLA-A*30:02; ABCB5; ENSG00000004846; TAA
KADEQMESMTY

SEQ ID NO: 1440 - protein, 11 aa, Homo sapiens
  misc_feature: Table A; Target 1440; HLA-B*15:01; ABCB5; ENSG00000004846; TAA
KADEQMESMTY

SEQ ID NO: 1441 - protein, 11 aa, Homo sapiens
  misc_feature: Table A; Target 1441; HLA-B*55:01; ABCB5; ENSG00000004846; TAA
KADEQMESMTY

SEQ ID NO: 1442 - protein, 11 aa, Homo sapiens
  misc_feature: Table A; Target 1442; HLA-B*58:01; ABCB5; ENSG00000004846; TAA
KADEQMESMTY

SEQ ID NO: 1443 - protein, 10 aa, Homo sapiens
  misc_feature: Table A; Target 1443; HLA-C*16:04; ABCB5; ENSG00000004846; TAA
KAFEQMYEEM

SEQ ID NO: 1444 - protein, 9 aa, Homo sapiens
  misc_feature: Table A; Target 1444; HLA-B*46:01; ABCB5; ENSG00000004846; TAA
KAGAVAEEV

SEQ ID NO: 1445 - protein, 9 aa, Homo sapiens
  misc_feature: Table A; Target 1445; HLA-B*58:01; ABCB5; ENSG00000004846; TAA
KAGAVAEEV

SEQ ID NO: 1446 - protein, 9 aa, Homo sapiens
  misc_feature: Table A; Target 1446; HLA-C*16:02; ABCB5; ENSG00000004846; TAA
KAGAVAEEV

SEQ ID NO: 1447 - protein, 9 aa, Homo sapiens
  misc_feature: Table A; Target 1447; HLA-C*16:04; ABCB5; ENSG00000004846; TAA
KAGAVAEEV

SEQ ID NO: 1448 - protein, 10 aa, Homo sapiens
  misc_feature: Table A; Target 1448; HLA-A*30:02; ABCB5; ENSG00000004846; TAA
KAKSGAAHLF

SEQ ID NO: 1449 - protein, 10 aa, Homo sapiens
  misc_feature: Table A; Target 1449; HLA-B*57:01; ABCB5; ENSG00000004846; TAA
KAKSGAAHLF

SEQ ID NO: 1450 - protein, 10 aa, Homo sapiens
  misc_feature: Table A; Target 1450; HLA-B*57:01; ABCB5; ENSG00000004846; TAA
KAMLYQDIAW

SEQ ID NO: 1451 - protein, 9 aa, Homo sapiens
  misc_feature: Table A; Target 1451; HLA-A*26:01; ABCB5; ENSG00000004846; TAA
KAQIIGSCY

SEQ ID NO: 1452 - protein, 9 aa, Homo sapiens
  misc_feature: Table A; Target 1452; HLA-A*30:02; ABCB5; ENSG00000004846; TAA
KAQIIGSCY

SEQ ID NO: 1453 - protein, 9 aa, Homo sapiens
  misc_feature: Table A; Target 1453; HLA-A*32:01; ABCB5; ENSG00000004846; TAA
KAQIIGSCY

SEQ ID NO: 1454 - protein, 9 aa, Homo sapiens
  misc_feature: Table A; Target 1454; HLA-B*15:01; ABCB5; ENSG00000004846; TAA
KAQIIGSCY

SEQ ID NO: 1455 - protein, 9 aa, Homo sapiens
  misc_feature: Table A; Target 1455; HLA-B*15:03; ABCB5; ENSG00000004846; TAA
KAQIIGSCY

SEQ ID NO: 1456 - protein, 9 aa, Homo sapiens
  misc_feature: Table A; Target 1456; HLA-B*27:05; ABCB5; ENSG00000004846; TAA
KAQIIGSCY

SEQ ID NO: 1457 - protein, 9 aa, Homo sapiens
  misc_feature: Table A; Target 1457; HLA-B*39:01; ABCB5; ENSG00000004846; TAA
KAQIIGSCY

SEQ ID NO: 1458 - protein, 9 aa, Homo sapiens
  misc_feature: Table A; Target 1458; HLA-B*46:01; ABCB5; ENSG00000004846; TAA
KAQIIGSCY

SEQ ID NO: 1459 - protein, 9 aa, Homo sapiens
  misc_feature: Table A; Target 1459; HLA-B*58:01; ABCB5; ENSG00000004846; TAA
KAQIIGSCY

SEQ ID NO: 1460 - protein, 9 aa, Homo sapiens
  misc_feature: Table A; Target 1460; HLA-C*01:02; ABCB5; ENSG00000004846; TAA
KAQIIGSCY

SEQ ID NO: 1461 - protein, 9 aa, Homo sapiens
  misc_feature: Table A; Target 1461; HLA-C*02:02; ABCB5; ENSG00000004846; TAA
KAQIIGSCY

SEQ ID NO: 1462 - protein, 9 aa, Homo sapiens
  misc_feature: Table A; Target 1462; HLA-C*03:03; ABCB5; ENSG00000004846; TAA
KAQIIGSCY

SEQ ID NO: 1463 - protein, 9 aa, Homo sapiens
  misc_feature: Table A; Target 1463; HLA-C*07:04; ABCB5; ENSG00000004846; TAA
KAQIIGSCY

SEQ ID NO: 1464 - protein, 9 aa, Homo sapiens
  misc_feature: Table A; Target 1464; HLA-C*12:03; ABCB5; ENSG00000004846; TAA
KAQIIGSCY

SEQ ID NO: 1465 - protein, 9 aa, Homo sapiens
  misc_feature: Table A; Target 1465; HLA-C*14:02; ABCB5; ENSG00000004846; TAA
KAQIIGSCY

SEQ ID NO: 1466 - protein, 9 aa, Homo sapiens
  misc_feature: Table A; Target 1466; HLA-C*16:01; ABCB5; ENSG00000004846; TAA
KAQIIGSCY

SEQ ID NO: 1467 - protein, 9 aa, Homo sapiens
  misc_feature: Table A; Target 1467; HLA-C*16:02; ABCB5; ENSG00000004846; TAA
KAQIIGSCY

SEQ ID NO: 1468 - protein, 9 aa, Homo sapiens
  misc_feature: Table A; Target 1468; HLA-C*16:04; ABCB5; ENSG00000004846; TAA
KAQIIGSCY

SEQ ID NO: 1469 - protein, 9 aa, Homo sapiens
  misc_feature: Table A; Target 1469; HLA-B*58:01; ABCB5; ENSG00000004846; TAA
KASKGRTTI

SEQ ID NO: 1470 - protein, 8 aa, Homo sapiens
  misc_feature: Table A; Target 1470; HLA-A*03:02; ABCB5; ENSG00000004846; TAA
KDGMLAEK

SEQ ID NO: 1471 - protein, 8 aa, Homo sapiens
  misc_feature: Table A; Target 1471; HLA-B*27:02; ABCB5; ENSG00000004846; TAA
KDGMLAEK

SEQ ID NO: 1472 - protein, 9 aa, Homo sapiens
  misc_feature: Table A; Target 1472; HLA-A*30:01; ABCB5; ENSG00000004846; TAA
KEAANAANI

SEQ ID NO: 1473 - protein, 9 aa, Homo sapiens
  misc_feature: Table A; Target 1473; HLA-B*37:01; ABCB5; ENSG00000004846; TAA
KEAANAANI

SEQ ID NO: 1474 - protein, 9 aa, Homo sapiens
  misc_feature: Table A; Target 1474; HLA-B*40:01; ABCB5; ENSG00000004846; TAA
KEAANAANI

SEQ ID NO: 1475 - protein, 9 aa, Homo sapiens
  misc_feature: Table A; Target 1475; HLA-B*44:03; ABCB5; ENSG00000004846; TAA
KEAANAANI

SEQ ID NO: 1476 - protein, 9 aa, Homo sapiens
  misc_feature: Table A; Target 1476; HLA-B*49:01; ABCB5; ENSG00000004846; TAA
KEAANAANI

SEQ ID NO: 1477 - protein, 9 aa, Homo sapiens
  misc_feature: Table A; Target 1477; HLA-A*30:01; ABCB5; ENSG00000004846; TAA
KEAVGSIEI

SEQ ID NO: 1478 - protein, 9 aa, Homo sapiens
  misc_feature: Table A; Target 1478; HLA-B*13:02; ABCB5; ENSG00000004846; TAA
KEAVGSIEI

SEQ ID NO: 1479 - protein, 9 aa, Homo sapiens
  misc_feature: Table A; Target 1479; HLA-B*37:01; ABCB5; ENSG00000004846; TAA
KEAVGSIEI

SEQ ID NO: 1480 - protein, 9 aa, Homo sapiens
  misc_feature: Table A; Target 1480; HLA-B*40:01; ABCB5; ENSG00000004846; TAA
KEAVGSIEI

SEQ ID NO: 1481 - protein, 9 aa, Homo sapiens
  misc_feature: Table A; Target 1481; HLA-B*44:02; ABCB5; ENSG00000004846; TAA
KEAVGSIEI

SEQ ID NO: 1482 - protein, 9 aa, Homo sapiens
  misc_feature: Table A; Target 1482; HLA-B*44:03; ABCB5; ENSG00000004846; TAA
KEAVGSIEI

SEQ ID NO: 1483 - protein, 9 aa, Homo sapiens
  misc_feature: Table A; Target 1483; HLA-B*49:01; ABCB5; ENSG00000004846; TAA
KEAVGSIEI

SEQ ID NO: 1484 - protein, 10 aa, Homo sapiens
  misc_feature: Table A; Target 1484; HLA-A*30:01; ABCB5; ENSG00000004846; TAA
KEAVGSIEIF

SEQ ID NO: 1485 - protein, 10 aa, Homo sapiens
  misc_feature: Table A; Target 1485; HLA-B*40:01; ABCB5; ENSG00000004846; TAA
KEAVGSIEIF

SEQ ID NO: 1486 - protein, 10 aa, Homo sapiens
  misc_feature: Table A; Target 1486; HLA-B*44:02; ABCB5; ENSG00000004846; TAA
KEAVGSIEIF

SEQ ID NO: 1487 - protein, 10 aa, Homo sapiens
  misc_feature: Table A; Target 1487; HLA-B*44:03; ABCB5; ENSG00000004846; TAA
KEAVGSIEIF

SEQ ID NO: 1488 - protein, 8 aa, Homo sapiens
  misc_feature: Table A; Target 1488; HLA-A*30:01; ABCB5; ENSG00000004846; TAA
KEISLPEV

SEQ ID NO: 1489 - protein, 8 aa, Homo sapiens
  misc_feature: Table A; Target 1489; HLA-B*18:01; ABCB5; ENSG00000004846; TAA
KEISLPEV

SEQ ID NO: 1490 - protein, 8 aa, Homo sapiens
  misc_feature: Table A; Target 1490; HLA-B*37:01; ABCB5; ENSG00000004846; TAA
KEISLPEV

SEQ ID NO: 1491 - protein, 8 aa, Homo sapiens
  misc_feature: Table A; Target 1491; HLA-B*40:02; ABCB5; ENSG00000004846; TAA
KEISLPEV

SEQ ID NO: 1492 - protein, 8 aa, Homo sapiens
  misc_feature: Table A; Target 1492; HLA-B*49:01; ABCB5; ENSG00000004846; TAA
KEISLPEV

SEQ ID NO: 1493 - protein, 10 aa, Homo sapiens
  misc_feature: Table A; Target 1493; HLA-A*30:01; ABCB5; ENSG00000004846; TAA
KEISLPEVSL

SEQ ID NO: 1494 - protein, 10 aa, Homo sapiens
  misc_feature: Table A; Target 1494; HLA-B*37:01; ABCB5; ENSG00000004846; TAA
KEISLPEVSL

SEQ ID NO: 1495 - protein, 10 aa, Homo sapiens
  misc_feature: Table A; Target 1495; HLA-B*40:01; ABCB5; ENSG00000004846; TAA
KEISLPEVSL

SEQ ID NO: 1496 - protein, 10 aa, Homo sapiens
  misc_feature: Table A; Target 1496; HLA-B*40:02; ABCB5; ENSG00000004846; TAA
KEISLPEVSL

SEQ ID NO: 1497 - protein, 10 aa, Homo sapiens
  misc_feature: Table A; Target 1497; HLA-B*44:02; ABCB5; ENSG00000004846; TAA
KEISLPEVSL

SEQ ID NO: 1498 - protein, 10 aa, Homo sapiens
  misc_feature: Table A; Target 1498; HLA-B*44:03; ABCB5; ENSG00000004846; TAA
KEISLPEVSL

SEQ ID NO: 1499 - protein, 10 aa, Homo sapiens
  misc_feature: Table A; Target 1499; HLA-B*49:01; ABCB5; ENSG00000004846; TAA
KEISLPEVSL

SEQ ID NO: 1500 - protein, 11 aa, Homo sapiens
  misc_feature: Table A; Target 1500; HLA-A*30:01; ABCB5; ENSG00000004846; TAA
KEISLPEVSLL

SEQ ID NO: 1501 - protein, 11 aa, Homo sapiens
  misc_feature: Table A; Target 1501; HLA-B*40:01; ABCB5; ENSG00000004846; TAA
KEISLPEVSLL

SEQ ID NO: 1502 - protein, 11 aa, Homo sapiens
  misc_feature: Table A; Target 1502; HLA-B*44:02; ABCB5; ENSG00000004846; TAA
KEISLPEVSLL

SEQ ID NO: 1503 - protein, 10 aa, Homo sapiens
  misc_feature: Table A; Target 1503; HLA-B*40:01; ABCB5; ENSG00000004846; TAA
KELQRYTQNL

SEQ ID NO: 1504 - protein, 10 aa, Homo sapiens
  misc_feature: Table A; Target 1504; HLA-B*40:02; ABCB5; ENSG00000004846; TAA
KELQRYTQNL

SEQ ID NO: 1505 - protein, 10 aa, Homo sapiens
  misc_feature: Table A; Target 1505; HLA-B*40:01; ABCB5; ENSG00000004846; TAA
KENSTGGLTT

SEQ ID NO: 1506 - protein, 10 aa, Homo sapiens
  misc_feature: Table A; Target 1506; HLA-B*49:01; ABCB5; ENSG00000004846; TAA
KENSTGGLTT

SEQ ID NO: 1507 - protein, 11 aa, Homo sapiens
  misc_feature: Table A; Target 1507; HLA-A*30:01; ABCB5; ENSG00000004846; TAA
KENSTGGLTTI

SEQ ID NO: 1508 - protein, 11 aa, Homo sapiens
  misc_feature: Table A; Target 1508; HLA-B*40:01; ABCB5; ENSG00000004846; TAA
KENSTGGLTTI

SEQ ID NO: 1509 - protein, 11 aa, Homo sapiens
  misc_feature: Table A; Target 1509; HLA-B*40:02; ABCB5; ENSG00000004846; TAA
KENSTGGLTTI

SEQ ID NO: 1510 - protein, 11 aa, Homo sapiens
  misc_feature: Table A; Target 1510; HLA-B*44:02; ABCB5; ENSG00000004846; TAA
KENSTGGLTTI

SEQ ID NO: 1511 - protein, 11 aa, Homo sapiens
  misc_feature: Table A; Target 1511; HLA-B*44:03; ABCB5; ENSG00000004846; TAA
KENSTGGLTTI

SEQ ID NO: 1512 - protein, 11 aa, Homo sapiens
  misc_feature: Table A; Target 1512; HLA-B*49:01; ABCB5; ENSG00000004846; TAA
KENSTGGLTTI

SEQ ID NO: 1513 - protein, 9 aa, Homo sapiens
  misc_feature: Table A; Target 1513; HLA-A*30:01; ABCB5; ENSG00000004846; TAA
KEQGTHQEL

SEQ ID NO: 1514 - protein, 9 aa, Homo sapiens
  misc_feature: Table A; Target 1514; HLA-B*37:01; ABCB5; ENSG00000004846; TAA
KEQGTHQEL

SEQ ID NO: 1515 - protein, 9 aa, Homo sapiens
  misc_feature: Table A; Target 1515; HLA-B*40:01; ABCB5; ENSG00000004846; TAA
KEQGTHQEL

SEQ ID NO: 1516 - protein, 9 aa, Homo sapiens
  misc_feature: Table A; Target 1516; HLA-B*40:02; ABCB5; ENSG00000004846; TAA
KEQGTHQEL

SEQ ID NO: 1517 - protein, 9 aa, Homo sapiens
  misc_feature: Table A; Target 1517; HLA-B*44:02; ABCB5; ENSG00000004846; TAA
KEQGTHQEL

SEQ ID NO: 1518 - protein, 9 aa, Homo sapiens
  misc_feature: Table A; Target 1518; HLA-B*44:03; ABCB5; ENSG00000004846; TAA
KEQGTHQEL

SEQ ID NO: 1519 - protein, 10 aa, Homo sapiens
  misc_feature: Table A; Target 1519; HLA-A*30:01; ABCB5; ENSG00000004846; TAA
KEQGTHQELL

SEQ ID NO: 1520 - protein, 10 aa, Homo sapiens
  misc_feature: Table A; Target 1520; HLA-B*37:01; ABCB5; ENSG00000004846; TAA
KEQGTHQELL

SEQ ID NO: 1521 - protein, 10 aa, Homo sapiens
  misc_feature: Table A; Target 1521; HLA-B*40:01; ABCB5; ENSG00000004846; TAA
KEQGTHQELL

SEQ ID NO: 1522 - protein, 10 aa, Homo sapiens
  misc_feature: Table A; Target 1522; HLA-B*40:02; ABCB5; ENSG00000004846; TAA
KEQGTHQELL

SEQ ID NO: 1523 - protein, 10 aa, Homo sapiens
  misc_feature: Table A; Target 1523; HLA-A*03:02; ABCB5; ENSG00000004846; TAA
KGAQLSGGQK

SEQ ID NO: 1524 - protein, 10 aa, Homo sapiens
  misc_feature: Table A; Target 1524; HLA-C*04:01; ABCB5; ENSG00000004846; TAA
KGAQLSGGQK

SEQ ID NO: 1525 - protein, 10 aa, Homo sapiens
  misc_feature: Table A; Target 1525; HLA-C*07:02; ABCB5; ENSG00000004846; TAA
KGAQLSGGQK

SEQ ID NO: 1526 - protein, 11 aa, Homo sapiens
  misc_feature: Table A; Target 1526; HLA-A*31:01; ABCB5; ENSG00000004846; TAA
KGRTTIVVAHR

SEQ ID NO: 1527 - protein, 9 aa, Homo sapiens
  misc_feature: Table A; Target 1527; HLA-B*38:01; ABCB5; ENSG00000004846; TAA
KHDAEIYSM

SEQ ID NO: 1528 - protein, 9 aa, Homo sapiens
  misc_feature: Table A; Target 1528; HLA-B*39:01; ABCB5; ENSG00000004846; TAA
KHDAEIYSM

SEQ ID NO: 1529 - protein, 9 aa, Homo sapiens
  misc_feature: Table A; Target 1529; HLA-A*03:02; ABCB5; ENSG00000004846; TAA
KISDGIGDK

SEQ ID NO: 1530 - protein, 10 aa, Homo sapiens
  misc_feature: Table A; Target 1530; HLA-B*15:03; ABCB5; ENSG00000004846; TAA
KKAQIIGSCY

SEQ ID NO: 1531 - protein, 9 aa, Homo sapiens
  misc_feature: Table A; Target 1531; HLA-A*02:01; ABCB5; ENSG00000004846; TAA
KLNEDMTLL

SEQ ID NO: 1532 - protein, 9 aa, Homo sapiens
  misc_feature: Table A; Target 1532; HLA-A*02:03; ABCB5; ENSG00000004846; TAA
KLNEDMTLL

SEQ ID NO: 1533 - protein, 9 aa, Homo sapiens
  misc_feature: Table A; Target 1533; HLA-A*02:04; ABCB5; ENSG00000004846; TAA
KLNEDMTLL

SEQ ID NO: 1534 - protein, 9 aa, Homo sapiens
  misc_feature: Table A; Target 1534; HLA-A*02:07; ABCB5; ENSG00000004846; TAA
KLNEDMTLL

SEQ ID NO: 1535 - protein, 9 aa, Homo sapiens
  misc_feature: Table A; Target 1535; HLA-A*03:02; ABCB5; ENSG00000004846; TAA
KLNEDMTLL

SEQ ID NO: 1536 - protein, 9 aa, Homo sapiens
  misc_feature: Table A; Target 1536; HLA-B*15:01; ABCB5; ENSG00000004846; TAA
KLNEDMTLL

SEQ ID NO: 1537 - protein, 9 aa, Homo sapiens
  misc_feature: Table A; Target 1537; HLA-B*55:01; ABCB5; ENSG00000004846; TAA
KLNEDMTLL

SEQ ID NO: 1538 - protein, 11 aa, Homo sapiens
  misc_feature: Table A; Target 1538; HLA-A*02:04; ABCB5; ENSG00000004846; TAA
KLNEDMTLLTL

SEQ ID NO: 1539 - protein, 11 aa, Homo sapiens
  misc_feature: Table A; Target 1539; HLA-A*02:07; ABCB5; ENSG00000004846; TAA
KLNEDMTLLTL

SEQ ID NO: 1540 - protein, 8 aa, Homo sapiens
  misc_feature: Table A; Target 1540; HLA-B*13:02; ABCB5; ENSG00000004846; TAA
KLVNAQSV

SEQ ID NO: 1541 - protein, 9 aa, Homo sapiens
  misc_feature: Table A; Target 1541; HLA-B*07:02; ABCB5; ENSG00000004846; TAA
KLVNAQSVQ

SEQ ID NO: 1542 - protein, 9 aa, Homo sapiens
  misc_feature: Table A; Target 1542; HLA-C*04:01; ABCB5; ENSG00000004846; TAA
KLVNAQSVQ

SEQ ID NO: 1543 - protein, 9 aa, Homo sapiens
  misc_feature: Table A; Target 1543; HLA-C*06:02; ABCB5; ENSG00000004846; TAA
KLVNAQSVQ

SEQ ID NO: 1544 - protein, 9 aa, Homo sapiens
  misc_feature: Table A; Target 1544; HLA-C*07:01; ABCB5; ENSG00000004846; TAA
KLVNAQSVQ

SEQ ID NO: 1545 - protein, 11 aa, Homo sapiens
  misc_feature: Table A; Target 1545; HLA-B*07:02; ABCB5; ENSG00000004846; TAA
KPESIEGTVEF

SEQ ID NO: 1546 - protein, 11 aa, Homo sapiens
  misc_feature: Table A; Target 1546; HLA-B*35:01; ABCB5; ENSG00000004846; TAA
KPESIEGTVEF

SEQ ID NO: 1547 - protein, 11 aa, Homo sapiens
  misc_feature: Table A; Target 1547; HLA-B*35:03; ABCB5; ENSG00000004846; TAA
KPESIEGTVEF

SEQ ID NO: 1548 - protein, 11 aa, Homo sapiens
  misc_feature: Table A; Target 1548; HLA-B*55:01; ABCB5; ENSG00000004846; TAA
KPESIEGTVEF

SEQ ID NO: 1549 - protein, 11 aa, Homo sapiens
  misc_feature: Table A; Target 1549; HLA-C*05:01; ABCB5; ENSG00000004846; TAA
KPESIEGTVEF

SEQ ID NO: 1550 - protein, 11 aa, Homo sapiens
  misc_feature: Table A; Target 1550; HLA-C*07:02; ABCB5; ENSG00000004846; TAA
KPESIEGTVEF

SEQ ID NO: 1551 - protein, 10 aa, Homo sapiens
  misc_feature: Table A; Target 1551; HLA-B*56:01; ABCB5; ENSG00000004846; TAA
KPKILLLDEA

SEQ ID NO: 1552 - protein, 10 aa, Homo sapiens
  misc_feature: Table A; Target 1552; HLA-B*07:02; ABCB5; ENSG00000004846; TAA
KPSIDNFSTA

SEQ ID NO: 1553 - protein, 10 aa, Homo sapiens
  misc_feature: Table A; Target 1553; HLA-B*56:01; ABCB5; ENSG00000004846; TAA
KPSIDNFSTA

SEQ ID NO: 1554 - protein, 8 aa, Homo sapiens
  misc_feature: Table A; Target 1554; HLA-B*58:01; ABCB5; ENSG00000004846; TAA
KSAVQAAL

SEQ ID NO: 1555 - protein, 8 aa, Homo sapiens
  misc_feature: Table A; Target 1555; HLA-C*03:04; ABCB5; ENSG00000004846; TAA
KSAVQAAL

SEQ ID NO: 1556 - protein, 8 aa, Homo sapiens
  misc_feature: Table A; Target 1556; HLA-C*16:01; ABCB5; ENSG00000004846; TAA
KSAVQAAL

SEQ ID NO: 1557 - protein, 10 aa, Homo sapiens
  misc_feature: Table A; Target 1557; HLA-A*03:01; ABCB5; ENSG00000004846; TAA
KSAVQAALEK

SEQ ID NO: 1558 - protein, 10 aa, Homo sapiens
  misc_feature: Table A; Target 1558; HLA-A*03:02; ABCB5; ENSG00000004846; TAA
KSAVQAALEK

SEQ ID NO: 1559 - protein, 10 aa, Homo sapiens
  misc_feature: Table A; Target 1559; HLA-A*11:01; ABCB5; ENSG00000004846; TAA
KSAVQAALEK

SEQ ID NO: 1560 - protein, 11 aa, Homo sapiens
  misc_feature: Table A; Target 1560; HLA-C*06:02; ABCB5; ENSG00000004846; TAA
KSAVQAALEKA

SEQ ID NO: 1561 - protein, 8 aa, Homo sapiens
  misc_feature: Table A; Target 1561; HLA-A*32:01; ABCB5; ENSG00000004846; TAA
KSGAAHLF

SEQ ID NO: 1562 - protein, 8 aa, Homo sapiens
  misc_feature: Table A; Target 1562; HLA-B*57:01; ABCB5; ENSG00000004846; TAA
KSGAAHLF

SEQ ID NO: 1563 - protein, 8 aa, Homo sapiens
  misc_feature: Table A; Target 1563; HLA-B*58:01; ABCB5; ENSG00000004846; TAA
KSGAAHLF

SEQ ID NO: 1564 - protein, 8 aa, Homo sapiens
  misc_feature: Table A; Target 1564; HLA-B*58:01; ABCB5; ENSG00000004846; TAA
KSGETVAL

SEQ ID NO: 1565 - protein, 8 aa, Homo sapiens
  misc_feature: Table A; Target 1565; HLA-C*16:01; ABCB5; ENSG00000004846; TAA
KSGETVAL

SEQ ID NO: 1566 - protein, 10 aa, Homo sapiens
  misc_feature: Table A; Target 1566; HLA-A*11:01; ABCB5; ENSG00000004846; TAA
KSIKSDFIDK

SEQ ID NO: 1567 - protein, 8 aa, Homo sapiens
  misc_feature: Table A; Target 1567; HLA-B*58:01; ABCB5; ENSG00000004846; TAA
KSTSVQLL

SEQ ID NO: 1568 - protein, 10 aa, Homo sapiens
  misc_feature: Table A; Target 1568; HLA-A*31:01; ABCB5; ENSG00000004846; TAA
KSTSVQLLQR

SEQ ID NO: 1569 - protein, 8 aa, Homo sapiens
  misc_feature: Table A; Target 1569; HLA-B*58:01; ABCB5; ENSG00000004846; TAA
KSTVVQLL

SEQ ID NO: 1570 - protein, 10 aa, Homo sapiens
  misc_feature: Table A; Target 1570; HLA-A*02:03; ABCB5; ENSG00000004846; TAA
KTNSLPLHSV

SEQ ID NO: 1571 - protein, 10 aa, Homo sapiens
  misc_feature: Table A; Target 1571; HLA-A*31:01; ABCB5; ENSG00000004846; TAA
KTNSLPLHSV

SEQ ID NO: 1572 - protein, 10 aa, Homo sapiens
  misc_feature: Table A; Target 1572; HLA-A*32:01; ABCB5; ENSG00000004846; TAA
KTNSLPLHSV

SEQ ID NO: 1573 - protein, 10 aa, Homo sapiens
  misc_feature: Table A; Target 1573; HLA-B*56:01; ABCB5; ENSG00000004846; TAA
KTNSLPLHSV

SEQ ID NO: 1574 - protein, 11 aa, Homo sapiens
  misc_feature: Table A; Target 1574; HLA-A*03:01; ABCB5; ENSG00000004846; TAA
KTNSLPLHSVK

SEQ ID NO: 1575 - protein, 11 aa, Homo sapiens
  misc_feature: Table A; Target 1575; HLA-A*03:02; ABCB5; ENSG00000004846; TAA
KTNSLPLHSVK

SEQ ID NO: 1576 - protein, 11 aa, Homo sapiens
  misc_feature: Table A; Target 1576; HLA-A*31:01; ABCB5; ENSG00000004846; TAA
KTNSLPLHSVK

SEQ ID NO: 1577 - protein, 10 aa, Homo sapiens
  misc_feature: Table A; Target 1577; HLA-B*40:02; ABCB5; ENSG00000004846; TAA
KTVAFVGSSG

SEQ ID NO: 1578 - protein, 8 aa, Homo sapiens
  misc_feature: Table A; Target 1578; HLA-A*30:02; ABCB5; ENSG00000004846; TAA
KVSLGAVY

SEQ ID NO: 1579 - protein, 8 aa, Homo sapiens
  misc_feature: Table A; Target 1579; HLA-B*15:01; ABCB5; ENSG00000004846; TAA
KVSLGAVY

SEQ ID NO: 1580 - protein, 8 aa, Homo sapiens
  misc_feature: Table A; Target 1580; HLA-C*16:01; ABCB5; ENSG00000004846; TAA
KVSLGAVY

SEQ ID NO: 1581 - protein, 9 aa, Homo sapiens
  misc_feature: Table A; Target 1581; HLA-A*03:01; ABCB5; ENSG00000004846; TAA
KVVQHALDK

SEQ ID NO: 1582 - protein, 9 aa, Homo sapiens
  misc_feature: Table A; Target 1582; HLA-A*03:02; ABCB5; ENSG00000004846; TAA
KVVQHALDK

SEQ ID NO: 1583 - protein, 9 aa, Homo sapiens
  misc_feature: Table A; Target 1583; HLA-A*11:01; ABCB5; ENSG00000004846; TAA
KVVQHALDK

SEQ ID NO: 1584 - protein, 8 aa, Homo sapiens
  misc_feature: Table A; Target 1584; HLA-A*23:01; ABCB5; ENSG00000004846; TAA
KYNTQVGL

SEQ ID NO: 1585 - protein, 8 aa, Homo sapiens
  misc_feature: Table A; Target 1585; HLA-C*14:02; ABCB5; ENSG00000004846; TAA
KYNTQVGL

SEQ ID NO: 1586 - protein, 10 aa, Homo sapiens
  misc_feature: Table A; Target 1586; HLA-A*24:02; ABCB5; ENSG00000004846; TAA
KYNTQVGLKG

SEQ ID NO: 1587 - protein, 10 aa, Homo sapiens
  misc_feature: Table A; Target 1587; HLA-B*35:03; ABCB5; ENSG00000004846; TAA
LAEKGAHAEL

SEQ ID NO: 1588 - protein, 10 aa, Homo sapiens
  misc_feature: Table A; Target 1588; HLA-B*40:01; ABCB5; ENSG00000004846; TAA
LAEKGAHAEL

SEQ ID NO: 1589 - protein, 10 aa, Homo sapiens
  misc_feature: Table A; Target 1589; HLA-C*03:04; ABCB5; ENSG00000004846; TAA
LAEKGAHAEL

SEQ ID NO: 1590 - protein, 10 aa, Homo sapiens
  misc_feature: Table A; Target 1590; HLA-C*05:01; ABCB5; ENSG00000004846; TAA
LAEKGAHAEL

SEQ ID NO: 1591 - protein, 8 aa, Homo sapiens
  misc_feature: Table A; Target 1591; HLA-B*15:03; ABCB5; ENSG00000004846; TAA
LAFKAMLY

SEQ ID NO: 1592 - protein, 8 aa, Homo sapiens
  misc_feature: Table A; Target 1592; HLA-B*35:01; ABCB5; ENSG00000004846; TAA
LAFKAMLY

SEQ ID NO: 1593 - protein, 8 aa, Homo sapiens
  misc_feature: Table A; Target 1593; HLA-B*46:01; ABCB5; ENSG00000004846; TAA
LAFKAMLY

SEQ ID NO: 1594 - protein, 8 aa, Homo sapiens
  misc_feature: Table A; Target 1594; HLA-C*02:02; ABCB5; ENSG00000004846; TAA
LAFKAMLY

SEQ ID NO: 1595 - protein, 8 aa, Homo sapiens
  misc_feature: Table A; Target 1595; HLA-C*07:01; ABCB5; ENSG00000004846; TAA
LAFKAMLY

SEQ ID NO: 1596 - protein, 8 aa, Homo sapiens
  misc_feature: Table A; Target 1596; HLA-C*12:03; ABCB5; ENSG00000004846; TAA
LAFKAMLY

SEQ ID NO: 1597 - protein, 9 aa, Homo sapiens
  misc_feature: Table A; Target 1597; HLA-B*46:01; ABCB5; ENSG00000004846; TAA
LAFWYGTSL

SEQ ID NO: 1598 - protein, 9 aa, Homo sapiens
  misc_feature: Table A; Target 1598; HLA-B*54:01; ABCB5; ENSG00000004846; TAA
LAFWYGTSL

SEQ ID NO: 1599 - protein, 9 aa, Homo sapiens
  misc_feature: Table A; Target 1599; HLA-C*02:02; ABCB5; ENSG00000004846; TAA
LAFWYGTSL

SEQ ID NO: 1600 - protein, 9 aa, Homo sapiens
  misc_feature: Table A; Target 1600; HLA-C*03:03; ABCB5; ENSG00000004846; TAA
LAFWYGTSL

SEQ ID NO: 1601 - protein, 9 aa, Homo sapiens
  misc_feature: Table A; Target 1601; HLA-C*03:04; ABCB5; ENSG00000004846; TAA
LAFWYGTSL

SEQ ID NO: 1602 - protein, 8 aa, Homo sapiens
  misc_feature: Table A; Target 1602; HLA-B*08:01; ABCB5; ENSG00000004846; TAA
LAIARALL

SEQ ID NO: 1603 - protein, 8 aa, Homo sapiens
  misc_feature: Table A; Target 1603; HLA-A*23:01; ABCB5; ENSG00000004846; TAA
LAIDIAQI

SEQ ID NO: 1604 - protein, 8 aa, Homo sapiens
  misc_feature: Table A; Target 1604; HLA-B*51:01; ABCB5; ENSG00000004846; TAA
LAIDIAQI

SEQ ID NO: 1605 - protein, 9 aa, Homo sapiens
  misc_feature: Table A; Target 1605; HLA-C*02:02; ABCB5; ENSG00000004846; TAA
LAIDIAQIQ

SEQ ID NO: 1606 - protein, 9 aa, Homo sapiens
  misc_feature: Table A; Target 1606; HLA-C*12:03; ABCB5; ENSG00000004846; TAA
LAIDIAQIQ

SEQ ID NO: 1607 - protein, 11 aa, Homo sapiens
  misc_feature: Table A; Target 1607; HLA-B*54:01; ABCB5; ENSG00000004846; TAA
LAIDIAQIQGA

SEQ ID NO: 1608 - protein, 9 aa, Homo sapiens
  misc_feature: Table A; Target 1608; HLA-C*01:02; ABCB5; ENSG00000004846; TAA
LAPEYSKAK

SEQ ID NO: 1609 - protein, 8 aa, Homo sapiens
  misc_feature: Table A; Target 1609; HLA-B*51:01; ABCB5; ENSG00000004846; TAA
LAVFFSVI

SEQ ID NO: 1610 - protein, 9 aa, Homo sapiens
  misc_feature: Table A; Target 1610; HLA-A*25:01; ABCB5; ENSG00000004846; TAA
LAVGLVKGW

SEQ ID NO: 1611 - protein, 9 aa, Homo sapiens
  misc_feature: Table A; Target 1611; HLA-B*44:02; ABCB5; ENSG00000004846; TAA
LAVGLVKGW

SEQ ID NO: 1612 - protein, 9 aa, Homo sapiens
  misc_feature: Table A; Target 1612; HLA-B*57:01; ABCB5; ENSG00000004846; TAA
LAVGLVKGW

SEQ ID NO: 1613 - protein, 9 aa, Homo sapiens
  misc_feature: Table A; Target 1613; HLA-C*12:03; ABCB5; ENSG00000004846; TAA
LAVGLVKGW

SEQ ID NO: 1614 - protein, 10 aa, Homo sapiens
  misc_feature: Table A; Target 1614; HLA-B*54:01; ABCB5; ENSG00000004846; TAA
LAVTGMIETA

SEQ ID NO: 1615 - protein, 9 aa, Homo sapiens
  misc_feature: Table A; Target 1615; HLA-B*37:01; ABCB5; ENSG00000004846; TAA
LDSESKSAV

SEQ ID NO: 1616 - protein, 8 aa, Homo sapiens
  misc_feature: Table A; Target 1616; HLA-B*18:01; ABCB5; ENSG00000004846; TAA
LEFREVSF

SEQ ID NO: 1617 - protein, 9 aa, Homo sapiens
  misc_feature: Table A; Target 1617; HLA-B*44:02; ABCB5; ENSG00000004846; TAA
LEFREVSFF

SEQ ID NO: 1618 - protein, 10 aa, Homo sapiens
  misc_feature: Table A; Target 1618; HLA-A*30:01; ABCB5; ENSG00000004846; TAA
LENIRTIVSL

SEQ ID NO: 1619 - protein, 10 aa, Homo sapiens
  misc_feature: Table A; Target 1619; HLA-B*40:02; ABCB5; ENSG00000004846; TAA
LENIRTIVSL

SEQ ID NO: 1620 - protein, 10 aa, Homo sapiens
  misc_feature: Table A; Target 1620; HLA-C*04:01; ABCB5; ENSG00000004846; TAA
LFDGVDAKEL

SEQ ID NO: 1621 - protein, 8 aa, Homo sapiens
  misc_feature: Table A; Target 1621; HLA-A*23:01; ABCB5; ENSG00000004846; TAA
LFQNMSTF

SEQ ID NO: 1622 - protein, 8 aa, Homo sapiens
  misc_feature: Table A; Target 1622; HLA-A*24:02; ABCB5; ENSG00000004846; TAA
LFQNMSTF

SEQ ID NO: 1623 - protein, 8 aa, Homo sapiens
  misc_feature: Table A; Target 1623; HLA-C*04:01; ABCB5; ENSG00000004846; TAA
LFQNMSTF

SEQ ID NO: 1624 - protein, 8 aa, Homo sapiens
  misc_feature: Table A; Target 1624; HLA-C*14:02; ABCB5; ENSG00000004846; TAA
LFQNMSTF

SEQ ID NO: 1625 - protein, 8 aa, Homo sapiens
  misc_feature: Table A; Target 1625; HLA-C*03:04; ABCB5; ENSG00000004846; TAA
LGTLASVL

SEQ ID NO: 1626 - protein, 9 aa, Homo sapiens
  misc_feature: Table A; Target 1626; HLA-A*02:01; ABCB5; ENSG00000004846; TAA
LILDEATSA

SEQ ID NO: 1627 - protein, 10 aa, Homo sapiens
  misc_feature: Table A; Target 1627; HLA-C*01:02; ABCB5; ENSG00000004846; TAA
LILDEATSAL

SEQ ID NO: 1628 - protein, 9 aa, Homo sapiens
  misc_feature: Table A; Target 1628; HLA-A*29:02; ABCB5; ENSG00000004846; TAA
LILNGEPGY

SEQ ID NO: 1629 - protein, 9 aa, Homo sapiens
  misc_feature: Table A; Target 1629; HLA-A*30:02; ABCB5; ENSG00000004846; TAA
LILNGEPGY

SEQ ID NO: 1630 - protein, 9 aa, Homo sapiens
  misc_feature: Table A; Target 1630; HLA-B*39:01; ABCB5; ENSG00000004846; TAA
LILNGEPGY

SEQ ID NO: 1631 - protein, 9 aa, Homo sapiens
  misc_feature: Table A; Target 1631; HLA-A*02:01; ABCB5; ENSG00000004846; TAA
LILSIAPVL

SEQ ID NO: 1632 - protein, 9 aa, Homo sapiens
  misc_feature: Table A; Target 1632; HLA-A*02:04; ABCB5; ENSG00000004846; TAA
LILSIAPVL

SEQ ID NO: 1633 - protein, 9 aa, Homo sapiens
  misc_feature: Table A; Target 1633; HLA-A*02:07; ABCB5; ENSG00000004846; TAA
LILSIAPVL

SEQ ID NO: 1634 - protein, 9 aa, Homo sapiens
  misc_feature: Table A; Target 1634; HLA-A*23:01; ABCB5; ENSG00000004846; TAA
LILSIAPVL

SEQ ID NO: 1635 - protein, 8 aa, Homo sapiens
  misc_feature: Table A; Target 1635; HLA-C*05:01; ABCB5; ENSG00000004846; TAA
LLDEATSA

SEQ ID NO: 1636 - protein, 9 aa, Homo sapiens
  misc_feature: Table A; Target 1636; HLA-A*01:01; ABCB5; ENSG00000004846; TAA
LLDEATSAL

SEQ ID NO: 1637 - protein, 9 aa, Homo sapiens
  misc_feature: Table A; Target 1637; HLA-A*02:01; ABCB5; ENSG00000004846; TAA
LLDEATSAL

SEQ ID NO: 1638 - protein, 9 aa, Homo sapiens
  misc_feature: Table A; Target 1638; HLA-A*02:03; ABCB5; ENSG00000004846; TAA
LLDEATSAL

SEQ ID NO: 1639 - protein, 9 aa, Homo sapiens
  misc_feature: Table A; Target 1639; HLA-A*02:07; ABCB5; ENSG00000004846; TAA
LLDEATSAL

SEQ ID NO: 1640 - protein, 9 aa, Homo sapiens
  misc_feature: Table A; Target 1640; HLA-A*32:01; ABCB5; ENSG00000004846; TAA
LLDEATSAL

SEQ ID NO: 1641 - protein, 9 aa, Homo sapiens
  misc_feature: Table A; Target 1641; HLA-B*35:03; ABCB5; ENSG00000004846; TAA
LLDEATSAL

SEQ ID NO: 1642 - protein, 9 aa, Homo sapiens
  misc_feature: Table A; Target 1642; HLA-B*38:01; ABCB5; ENSG00000004846; TAA
LLDEATSAL

SEQ ID NO: 1643 - protein, 9 aa, Homo sapiens
  misc_feature: Table A; Target 1643; HLA-B*39:01; ABCB5; ENSG00000004846; TAA
LLDEATSAL

SEQ ID NO: 1644 - protein, 9 aa, Homo sapiens
  misc_feature: Table A; Target 1644; HLA-B*55:01; ABCB5; ENSG00000004846; TAA
LLDEATSAL

SEQ ID NO: 1645 - protein, 9 aa, Homo sapiens
  misc_feature: Table A; Target 1645; HLA-C*01:02; ABCB5; ENSG00000004846; TAA
LLDEATSAL

SEQ ID NO: 1646 - protein, 9 aa, Homo sapiens
  misc_feature: Table A; Target 1646; HLA-C*03:03; ABCB5; ENSG00000004846; TAA
LLDEATSAL

SEQ ID NO: 1647 - protein, 9 aa, Homo sapiens
  misc_feature: Table A; Target 1647; HLA-C*03:04; ABCB5; ENSG00000004846; TAA
LLDEATSAL

SEQ ID NO: 1648 - protein, 9 aa, Homo sapiens
  misc_feature: Table A; Target 1648; HLA-C*04:01; ABCB5; ENSG00000004846; TAA
LLDEATSAL

SEQ ID NO: 1649 - protein, 9 aa, Homo sapiens
  misc_feature: Table A; Target 1649; HLA-C*05:01; ABCB5; ENSG00000004846; TAA
LLDEATSAL

SEQ ID NO: 1650 - protein, 9 aa, Homo sapiens
  misc_feature: Table A; Target 1650; HLA-C*07:04; ABCB5; ENSG00000004846; TAA
LLDEATSAL

SEQ ID NO: 1651 - protein, 9 aa, Homo sapiens
  misc_feature: Table A; Target 1651; HLA-C*14:02; ABCB5; ENSG00000004846; TAA
LLDEATSAL

SEQ ID NO: 1652 - protein, 9 aa, Homo sapiens
  misc_feature: Table A; Target 1652; HLA-A*25:01; ABCB5; ENSG00000004846; TAA
LLFQNMSTF

SEQ ID NO: 1653 - protein, 9 aa, Homo sapiens
  misc_feature: Table A; Target 1653; HLA-B*15:01; ABCB5; ENSG00000004846; TAA
LLFQNMSTF

SEQ ID NO: 1654 - protein, 9 aa, Homo sapiens
  misc_feature: Table A; Target 1654; HLA-B*15:03; ABCB5; ENSG00000004846; TAA
LLFQNMSTF

SEQ ID NO: 1655 - protein, 9 aa, Homo sapiens
  misc_feature: Table A; Target 1655; HLA-B*46:01; ABCB5; ENSG00000004846; TAA
LLFQNMSTF

SEQ ID NO: 1656 - protein, 9 aa, Homo sapiens
  misc_feature: Table A; Target 1656; HLA-C*02:02; ABCB5; ENSG00000004846; TAA
LLFQNMSTF

SEQ ID NO: 1657 - protein, 9 aa, Homo sapiens
  misc_feature: Table A; Target 1657; HLA-A*02:01; ABCB5; ENSG00000004846; TAA
LLLDEATSA

SEQ ID NO: 1658 - protein, 10 aa, Homo sapiens
  misc_feature: Table A; Target 1658; HLA-A*02:01; ABCB5; ENSG00000004846; TAA
LLLDEATSAL

SEQ ID NO: 1659 - protein, 10 aa, Homo sapiens
  misc_feature: Table A; Target 1659; HLA-A*02:03; ABCB5; ENSG00000004846; TAA
LLLDEATSAL

SEQ ID NO: 1660 - protein, 10 aa, Homo sapiens
  misc_feature: Table A; Target 1660; HLA-A*02:04; ABCB5; ENSG00000004846; TAA
LLLDEATSAL

SEQ ID NO: 1661 - protein, 10 aa, Homo sapiens
  misc_feature: Table A; Target 1661; HLA-C*01:02; ABCB5; ENSG00000004846; TAA
LLLDEATSAL

SEQ ID NO: 1662 - protein, 10 aa, Homo sapiens
  misc_feature: Table A; Target 1662; HLA-C*14:02; ABCB5; ENSG00000004846; TAA
LLLDEATSAL

SEQ ID NO: 1663 - protein, 9 aa, Homo sapiens
  misc_feature: Table A; Target 1663; HLA-A*02:04; ABCB5; ENSG00000004846; TAA
LLQKPKILL

SEQ ID NO: 1664 - protein, 10 aa, Homo sapiens
  misc_feature: Table A; Target 1664; HLA-A*02:04; ABCB5; ENSG00000004846; TAA
LLQKPKILLL

SEQ ID NO: 1665 - protein, 9 aa, Homo sapiens
  misc_feature: Table A; Target 1665; HLA-A*01:01; ABCB5; ENSG00000004846; TAA
LMAKRGLYY

SEQ ID NO: 1666 - protein, 9 aa, Homo sapiens
  misc_feature: Table A; Target 1666; HLA-A*03:01; ABCB5; ENSG00000004846; TAA
LMAKRGLYY

SEQ ID NO: 1667 - protein, 9 aa, Homo sapiens
  misc_feature: Table A; Target 1667; HLA-A*29:02; ABCB5; ENSG00000004846; TAA
LMAKRGLYY

SEQ ID NO: 1668 - protein, 9 aa, Homo sapiens
  misc_feature: Table A; Target 1668; HLA-A*02:07; ABCB5; ENSG00000004846; TAA
LMPLVLGEM

SEQ ID NO: 1669 - protein, 11 aa, Homo sapiens
  misc_feature: Table A; Target 1669; HLA-A*01:01; ABCB5; ENSG00000004846; TAA
LNEDMTLLTLY

SEQ ID NO: 1670 - protein, 11 aa, Homo sapiens
  misc_feature: Table A; Target 1670; HLA-A*29:02; ABCB5; ENSG00000004846; TAA
LNEDMTLLTLY

SEQ ID NO: 1671 - protein, 9 aa, Homo sapiens
  misc_feature: Table A; Target 1671; HLA-A*23:01; ABCB5; ENSG00000004846; TAA
LNGTVHPVF

SEQ ID NO: 1672 - protein, 9 aa, Homo sapiens
  misc_feature: Table A; Target 1672; HLA-B*35:03; ABCB5; ENSG00000004846; TAA
LPEKYNTQV

SEQ ID NO: 1673 - protein, 9 aa, Homo sapiens
  misc_feature: Table A; Target 1673; HLA-B*51:01; ABCB5; ENSG00000004846; TAA
LPEKYNTQV

SEQ ID NO: 1674 - protein, 9 aa, Homo sapiens
  misc_feature: Table A; Target 1674; HLA-B*55:01; ABCB5; ENSG00000004846; TAA
LPEKYNTQV

SEQ ID NO: 1675 - protein, 11 aa, Homo sapiens
  misc_feature: Table A; Target 1675; HLA-B*35:03; ABCB5; ENSG00000004846; TAA
LPEKYNTQVGL

SEQ ID NO: 1676 - protein, 9 aa, Homo sapiens
  misc_feature: Table A; Target 1676; HLA-B*51:01; ABCB5; ENSG00000004846; TAA
LPEVSLLKI

SEQ ID NO: 1677 - protein, 9 aa, Homo sapiens
  misc_feature: Table A; Target 1677; HLA-B*08:01; ABCB5; ENSG00000004846; TAA
LPLHSVKSI

SEQ ID NO: 1678 - protein, 9 aa, Homo sapiens
  misc_feature: Table A; Target 1678; HLA-B*51:01; ABCB5; ENSG00000004846; TAA
LPLHSVKSI

SEQ ID NO: 1679 - protein, 9 aa, Homo sapiens
  misc_feature: Table A; Target 1679; HLA-B*54:01; ABCB5; ENSG00000004846; TAA
LPLHSVKSI

SEQ ID NO: 1680 - protein, 9 aa, Homo sapiens
  misc_feature: Table A; Target 1680; HLA-B*56:01; ABCB5; ENSG00000004846; TAA
LPLHSVKSI

SEQ ID NO: 1681 - protein, 8 aa, Homo sapiens
  misc_feature: Table A; Target 1681; HLA-B*35:01; ABCB5; ENSG00000004846; TAA
LPLMPLVL

SEQ ID NO: 1682 - protein, 8 aa, Homo sapiens
  misc_feature: Table A; Target 1682; HLA-B*35:03; ABCB5; ENSG00000004846; TAA
LPLMPLVL

SEQ ID NO: 1683 - protein, 8 aa, Homo sapiens
  misc_feature: Table A; Target 1683; HLA-B*51:01; ABCB5; ENSG00000004846; TAA
LPLMPLVL

SEQ ID NO: 1684 - protein, 8 aa, Homo sapiens
  misc_feature: Table A; Target 1684; HLA-B*08:01; ABCB5; ENSG00000004846; TAA
LQKPKILL

SEQ ID NO: 1685 - protein, 9 aa, Homo sapiens
  misc_feature: Table A; Target 1685; HLA-A*02:03; ABCB5; ENSG00000004846; TAA
LQKPKILLL

SEQ ID NO: 1686 - protein, 9 aa, Homo sapiens
  misc_feature: Table A; Target 1686; HLA-A*02:04; ABCB5; ENSG00000004846; TAA
LQKPKILLL

SEQ ID NO: 1687 - protein, 9 aa, Homo sapiens
  misc_feature: Table A; Target 1687; HLA-B*08:01; ABCB5; ENSG00000004846; TAA
LQKPKILLL

SEQ ID NO: 1688 - protein, 11 aa, Homo sapiens
  misc_feature: Table A; Target 1688; HLA-B*27:05; ABCB5; ENSG00000004846; TAA
LRIKSGETVAL

SEQ ID NO: 1689 - protein, 9 aa, Homo sapiens
  misc_feature: Table A; Target 1689; HLA-A*02:03; ABCB5; ENSG00000004846; TAA
LSIAPVLAV

SEQ ID NO: 1690 - protein, 9 aa, Homo sapiens
  misc_feature: Table A; Target 1690; HLA-A*02:07; ABCB5; ENSG00000004846; TAA
LSIAPVLAV

SEQ ID NO: 1691 - protein, 9 aa, Homo sapiens
  misc_feature: Table A; Target 1691; HLA-A*68:02; ABCB5; ENSG00000004846; TAA
LSIAPVLAV

SEQ ID NO: 1692 - protein, 9 aa, Homo sapiens
  misc_feature: Table A; Target 1692; HLA-B*13:02; ABCB5; ENSG00000004846; TAA
LSIAPVLAV

SEQ ID NO: 1693 - protein, 9 aa, Homo sapiens
  misc_feature: Table A; Target 1693; HLA-B*46:01; ABCB5; ENSG00000004846; TAA
LSIAPVLAV

SEQ ID NO: 1694 - protein, 9 aa, Homo sapiens
  misc_feature: Table A; Target 1694; HLA-B*51:01; ABCB5; ENSG00000004846; TAA
LSIAPVLAV

SEQ ID NO: 1695 - protein, 9 aa, Homo sapiens
  misc_feature: Table A; Target 1695; HLA-B*54:01; ABCB5; ENSG00000004846; TAA
LSIAPVLAV

SEQ ID NO: 1696 - protein, 9 aa, Homo sapiens
  misc_feature: Table A; Target 1696; HLA-B*56:01; ABCB5; ENSG00000004846; TAA
LSIAPVLAV

SEQ ID NO: 1697 - protein, 9 aa, Homo sapiens
  misc_feature: Table A; Target 1697; HLA-C*02:02; ABCB5; ENSG00000004846; TAA
LSIAPVLAV

SEQ ID NO: 1698 - protein, 9 aa, Homo sapiens
  misc_feature: Table A; Target 1698; HLA-C*03:03; ABCB5; ENSG00000004846; TAA
LSIAPVLAV

SEQ ID NO: 1699 - protein, 9 aa, Homo sapiens
  misc_feature: Table A; Target 1699; HLA-C*03:04; ABCB5; ENSG00000004846; TAA
LSIAPVLAV

SEQ ID NO: 1700 - protein, 9 aa, Homo sapiens
  misc_feature: Table A; Target 1700; HLA-B*51:01; ABCB5; ENSG00000004846; TAA
LSIERGKTV

SEQ ID NO: 1701 - protein, 9 aa, Homo sapiens
  misc_feature: Table A; Target 1701; HLA-C*03:04; ABCB5; ENSG00000004846; TAA
LSIERGKTV

SEQ ID NO: 1702 - protein, 9 aa, Homo sapiens
  misc_feature: Table A; Target 1702; HLA-C*16:02; ABCB5; ENSG00000004846; TAA
LSIERGKTV

SEQ ID NO: 1703 - protein, 9 aa, Homo sapiens
  misc_feature: Table A; Target 1703; HLA-C*16:01; ABCB5; ENSG00000004846; TAA
LSTIRSADL

SEQ ID NO: 1704 - protein, 9 aa, Homo sapiens
  misc_feature: Table A; Target 1704; HLA-B*54:01; ABCB5; ENSG00000004846; TAA
LSTSPLIMA

SEQ ID NO: 1705 - protein, 10 aa, Homo sapiens
  misc_feature: Table A; Target 1705; HLA-A*68:02; ABCB5; ENSG00000004846; TAA
LTLYYVGIGV

SEQ ID NO: 1706 - protein, 9 aa, Homo sapiens
  misc_feature: Table A; Target 1706; HLA-A*01:01; ABCB5; ENSG00000004846; TAA
LTSKELSAY

SEQ ID NO: 1707 - protein, 9 aa, Homo sapiens
  misc_feature: Table A; Target 1707; HLA-A*25:01; ABCB5; ENSG00000004846; TAA
LTSKELSAY

SEQ ID NO: 1708 - protein, 9 aa, Homo sapiens
  misc_feature: Table A; Target 1708; HLA-A*26:01; ABCB5; ENSG00000004846; TAA
LTSKELSAY

SEQ ID NO: 1709 - protein, 9 aa, Homo sapiens
  misc_feature: Table A; Target 1709; HLA-A*29:02; ABCB5; ENSG00000004846; TAA
LTSKELSAY

SEQ ID NO: 1710 - protein, 9 aa, Homo sapiens
  misc_feature: Table A; Target 1710; HLA-A*30:02; ABCB5; ENSG00000004846; TAA
LTSKELSAY

SEQ ID NO: 1711 - protein, 9 aa, Homo sapiens
  misc_feature: Table A; Target 1711; HLA-A*32:01; ABCB5; ENSG00000004846; TAA
LTSKELSAY

SEQ ID NO: 1712 - protein, 9 aa, Homo sapiens
  misc_feature: Table A; Target 1712; HLA-B*15:01; ABCB5; ENSG00000004846; TAA
LTSKELSAY

SEQ ID NO: 1713 - protein, 9 aa, Homo sapiens
  misc_feature: Table A; Target 1713; HLA-B*46:01; ABCB5; ENSG00000004846; TAA
LTSKELSAY

SEQ ID NO: 1714 - protein, 9 aa, Homo sapiens
  misc_feature: Table A; Target 1714; HLA-B*58:01; ABCB5; ENSG00000004846; TAA
LTSKELSAY

SEQ ID NO: 1715 - protein, 9 aa, Homo sapiens
  misc_feature: Table A; Target 1715; HLA-C*02:02; ABCB5; ENSG00000004846; TAA
LTSKELSAY

SEQ ID NO: 1716 - protein, 9 aa, Homo sapiens
  misc_feature: Table A; Target 1716; HLA-C*07:01; ABCB5; ENSG00000004846; TAA
LTSKELSAY

SEQ ID NO: 1717 - protein, 9 aa, Homo sapiens
  misc_feature: Table A; Target 1717; HLA-C*07:04; ABCB5; ENSG00000004846; TAA
LTSKELSAY

SEQ ID NO: 1718 - protein, 9 aa, Homo sapiens
  misc_feature: Table A; Target 1718; HLA-C*16:01; ABCB5; ENSG00000004846; TAA
LTSKELSAY

SEQ ID NO: 1719 - protein, 9 aa, Homo sapiens
  misc_feature: Table A; Target 1719; HLA-C*16:02; ABCB5; ENSG00000004846; TAA
LTSKELSAY

SEQ ID NO: 1720 - protein, 11 aa, Homo sapiens
  misc_feature: Table A; Target 1720; HLA-A*03:02; ABCB5; ENSG00000004846; TAA
LTSKELSAYSK

SEQ ID NO: 1721 - protein, 11 aa, Homo sapiens
  misc_feature: Table A; Target 1721; HLA-A*11:01; ABCB5; ENSG00000004846; TAA
LTSKELSAYSK

SEQ ID NO: 1722 - protein, 9 aa, Homo sapiens
  misc_feature: Table A; Target 1722; HLA-A*26:01; ABCB5; ENSG00000004846; TAA
LVGEKGAQM

SEQ ID NO: 1723 - protein, 9 aa, Homo sapiens
  misc_feature: Table A; Target 1723; HLA-B*08:01; ABCB5; ENSG00000004846; TAA
LVGEKGAQM

SEQ ID NO: 1724 - protein, 9 aa, Homo sapiens
  misc_feature: Table A; Target 1724; HLA-B*46:01; ABCB5; ENSG00000004846; TAA
LVGEKGAQM

SEQ ID NO: 1725 - protein, 9 aa, Homo sapiens
  misc_feature: Table A; Target 1725; HLA-C*05:01; ABCB5; ENSG00000004846; TAA
LVGEKGAQM

SEQ ID NO: 1726 - protein, 9 aa, Homo sapiens
  misc_feature: Table A; Target 1726; HLA-C*07:04; ABCB5; ENSG00000004846; TAA
LVGEKGAQM

SEQ ID NO: 1727 - protein, 9 aa, Homo sapiens
  misc_feature: Table A; Target 1727; HLA-C*14:02; ABCB5; ENSG00000004846; TAA
LVGEKGAQM

SEQ ID NO: 1728 - protein, 9 aa, Homo sapiens
  misc_feature: Table A; Target 1728; HLA-A*03:02; ABCB5; ENSG00000004846; TAA
LVGLNGSGK

SEQ ID NO: 1729 - protein, 9 aa, Homo sapiens
  misc_feature: Table A; Target 1729; HLA-A*11:01; ABCB5; ENSG00000004846; TAA
LVLAPEYSK

SEQ ID NO: 1730 - protein, 9 aa, Homo sapiens
  misc_feature: Table A; Target 1730; HLA-A*03:01; ABCB5; ENSG00000004846; TAA
LVMSQDIKK

SEQ ID NO: 1731 - protein, 9 aa, Homo sapiens
  misc_feature: Table A; Target 1731; HLA-A*03:02; ABCB5; ENSG00000004846; TAA
LVMSQDIKK

SEQ ID NO: 1732 - protein, 9 aa, Homo sapiens
  misc_feature: Table A; Target 1732; HLA-A*11:01; ABCB5; ENSG00000004846; TAA
LVMSQDIKK

SEQ ID NO: 1733 - protein, 9 aa, Homo sapiens
  misc_feature: Table A; Target 1733; HLA-A*01:01; ABCB5; ENSG00000004846; TAA
LVQTNTTNY

SEQ ID NO: 1734 - protein, 9 aa, Homo sapiens
  misc_feature: Table A; Target 1734; HLA-A*25:01; ABCB5; ENSG00000004846; TAA
LVQTNTTNY

SEQ ID NO: 1735 - protein, 9 aa, Homo sapiens
  misc_feature: Table A; Target 1735; HLA-A*26:01; ABCB5; ENSG00000004846; TAA
LVQTNTTNY

SEQ ID NO: 1736 - protein, 9 aa, Homo sapiens
  misc_feature: Table A; Target 1736; HLA-A*29:02; ABCB5; ENSG00000004846; TAA
LVQTNTTNY

SEQ ID NO: 1737 - protein, 9 aa, Homo sapiens
  misc_feature: Table A; Target 1737; HLA-A*30:02; ABCB5; ENSG00000004846; TAA
LVQTNTTNY

SEQ ID NO: 1738 - protein, 9 aa, Homo sapiens
  misc_feature: Table A; Target 1738; HLA-A*32:01; ABCB5; ENSG00000004846; TAA
LVQTNTTNY

SEQ ID NO: 1739 - protein, 9 aa, Homo sapiens
  misc_feature: Table A; Target 1739; HLA-B*15:01; ABCB5; ENSG00000004846; TAA
LVQTNTTNY

SEQ ID NO: 1740 - protein, 9 aa, Homo sapiens
  misc_feature: Table A; Target 1740; HLA-B*15:03; ABCB5; ENSG00000004846; TAA
LVQTNTTNY

SEQ ID NO: 1741 - protein, 9 aa, Homo sapiens
  misc_feature: Table A; Target 1741; HLA-B*46:01; ABCB5; ENSG00000004846; TAA
LVQTNTTNY

SEQ ID NO: 1742 - protein, 9 aa, Homo sapiens
  misc_feature: Table A; Target 1742; HLA-B*58:01; ABCB5; ENSG00000004846; TAA
LVQTNTTNY

SEQ ID NO: 1743 - protein, 9 aa, Homo sapiens
  misc_feature: Table A; Target 1743; HLA-C*01:02; ABCB5; ENSG00000004846; TAA
LVQTNTTNY

SEQ ID NO: 1744 - protein, 9 aa, Homo sapiens
  misc_feature: Table A; Target 1744; HLA-C*02:02; ABCB5; ENSG00000004846; TAA
LVQTNTTNY

SEQ ID NO: 1745 - protein, 9 aa, Homo sapiens
  misc_feature: Table A; Target 1745; HLA-C*03:03; ABCB5; ENSG00000004846; TAA
LVQTNTTNY

SEQ ID NO: 1746 - protein, 9 aa, Homo sapiens
  misc_feature: Table A; Target 1746; HLA-C*07:04; ABCB5; ENSG00000004846; TAA
LVQTNTTNY

SEQ ID NO: 1747 - protein, 9 aa, Homo sapiens
  misc_feature: Table A; Target 1747; HLA-C*14:02; ABCB5; ENSG00000004846; TAA
LVQTNTTNY

SEQ ID NO: 1748 - protein, 9 aa, Homo sapiens
  misc_feature: Table A; Target 1748; HLA-C*16:01; ABCB5; ENSG00000004846; TAA
LVQTNTTNY

SEQ ID NO: 1749 - protein, 9 aa, Homo sapiens
  misc_feature: Table A; Target 1749; HLA-C*16:02; ABCB5; ENSG00000004846; TAA
LVQTNTTNY

SEQ ID NO: 1750 - protein, 9 aa, Homo sapiens
  misc_feature: Table A; Target 1750; HLA-C*03:03; ABCB5; ENSG00000004846; TAA
LVTLSTSPL

SEQ ID NO: 1751 - protein, 9 aa, Homo sapiens
  misc_feature: Table A; Target 1751; HLA-C*03:04; ABCB5; ENSG00000004846; TAA
LVTLSTSPL

SEQ ID NO: 1752 - protein, 8 aa, Homo sapiens
  misc_feature: Table A; Target 1752; HLA-C*04:01; ABCB5; ENSG00000004846; TAA
LYDPDDGF

SEQ ID NO: 1753 - protein, 8 aa, Homo sapiens
  misc_feature: Table A; Target 1753; HLA-C*05:01; ABCB5; ENSG00000004846; TAA
LYDPDDGF

SEQ ID NO: 1754 - protein, 10 aa, Homo sapiens
  misc_feature: Table A; Target 1754; HLA-B*35:03; ABCB5; ENSG00000004846; TAA
LYDPDDGFIM

SEQ ID NO: 1755 - protein, 9 aa, Homo sapiens
  misc_feature: Table A; Target 1755; HLA-A*01:01; ABCB5; ENSG00000004846; TAA
LYDPVQGQV

SEQ ID NO: 1756 - protein, 9 aa, Homo sapiens
  misc_feature: Table A; Target 1756; HLA-A*02:07; ABCB5; ENSG00000004846; TAA
LYDPVQGQV

SEQ ID NO: 1757 - protein, 9 aa, Homo sapiens
  misc_feature: Table A; Target 1757; HLA-A*23:01; ABCB5; ENSG00000004846; TAA
LYDPVQGQV

SEQ ID NO: 1758 - protein, 9 aa, Homo sapiens
  misc_feature: Table A; Target 1758; HLA-A*24:02; ABCB5; ENSG00000004846; TAA
LYDPVQGQV

SEQ ID NO: 1759 - protein, 9 aa, Homo sapiens
  misc_feature: Table A; Target 1759; HLA-B*35:03; ABCB5; ENSG00000004846; TAA
LYDPVQGQV

SEQ ID NO: 1760 - protein, 9 aa, Homo sapiens
  misc_feature: Table A; Target 1760; HLA-C*04:01; ABCB5; ENSG00000004846; TAA
LYDPVQGQV

SEQ ID NO: 1761 - protein, 9 aa, Homo sapiens
  misc_feature: Table A; Target 1761; HLA-C*05:01; ABCB5; ENSG00000004846; TAA
LYDPVQGQV

SEQ ID NO: 1762 - protein, 10 aa, Homo sapiens
  misc_feature: Table A; Target 1762; HLA-A*02:07; ABCB5; ENSG00000004846; TAA
LYDPVQGQVL

SEQ ID NO: 1763 - protein, 10 aa, Homo sapiens
  misc_feature: Table A; Target 1763; HLA-A*23:01; ABCB5; ENSG00000004846; TAA
LYDPVQGQVL

SEQ ID NO: 1764 - protein, 10 aa, Homo sapiens
  misc_feature: Table A; Target 1764; HLA-A*24:02; ABCB5; ENSG00000004846; TAA
LYDPVQGQVL

SEQ ID NO: 1765 - protein, 10 aa, Homo sapiens
  misc_feature: Table A; Target 1765; HLA-A*32:01; ABCB5; ENSG00000004846; TAA
LYDPVQGQVL

SEQ ID NO: 1766 - protein, 10 aa, Homo sapiens
  misc_feature: Table A; Target 1766; HLA-B*35:01; ABCB5; ENSG00000004846; TAA
LYDPVQGQVL

SEQ ID NO: 1767 - protein, 10 aa, Homo sapiens
  misc_feature: Table A; Target 1767; HLA-B*35:03; ABCB5; ENSG00000004846; TAA
LYDPVQGQVL

SEQ ID NO: 1768 - protein, 10 aa, Homo sapiens
  misc_feature: Table A; Target 1768; HLA-B*38:01; ABCB5; ENSG00000004846; TAA
LYDPVQGQVL

SEQ ID NO: 1769 - protein, 10 aa, Homo sapiens
  misc_feature: Table A; Target 1769; HLA-B*39:01; ABCB5; ENSG00000004846; TAA
LYDPVQGQVL

SEQ ID NO: 1770 - protein, 10 aa, Homo sapiens
  misc_feature: Table A; Target 1770; HLA-B*40:01; ABCB5; ENSG00000004846; TAA
LYDPVQGQVL

SEQ ID NO: 1771 - protein, 10 aa, Homo sapiens
  misc_feature: Table A; Target 1771; HLA-C*03:03; ABCB5; ENSG00000004846; TAA
LYDPVQGQVL

SEQ ID NO: 1772 - protein, 10 aa, Homo sapiens
  misc_feature: Table A; Target 1772; HLA-C*03:04; ABCB5; ENSG00000004846; TAA
LYDPVQGQVL

SEQ ID NO: 1773 - protein, 10 aa, Homo sapiens
  misc_feature: Table A; Target 1773; HLA-C*04:01; ABCB5; ENSG00000004846; TAA
LYDPVQGQVL

SEQ ID NO: 1774 - protein, 10 aa, Homo sapiens
  misc_feature: Table A; Target 1774; HLA-C*05:01; ABCB5; ENSG00000004846; TAA
LYDPVQGQVL

SEQ ID NO: 1775 - protein, 10 aa, Homo sapiens
  misc_feature: Table A; Target 1775; HLA-C*07:04; ABCB5; ENSG00000004846; TAA
LYDPVQGQVL

SEQ ID NO: 1776 - protein, 10 aa, Homo sapiens
  misc_feature: Table A; Target 1776; HLA-C*14:02; ABCB5; ENSG00000004846; TAA
LYDPVQGQVL

SEQ ID NO: 1777 - protein, 11 aa, Homo sapiens
  misc_feature: Table A; Target 1777; HLA-A*23:01; ABCB5; ENSG00000004846; TAA
LYDPVQGQVLF

SEQ ID NO: 1778 - protein, 11 aa, Homo sapiens
  misc_feature: Table A; Target 1778; HLA-A*24:02; ABCB5; ENSG00000004846; TAA
LYDPVQGQVLF

SEQ ID NO: 1779 - protein, 11 aa, Homo sapiens
  misc_feature: Table A; Target 1779; HLA-A*29:02; ABCB5; ENSG00000004846; TAA
LYDPVQGQVLF

SEQ ID NO: 1780 - protein, 11 aa, Homo sapiens
  misc_feature: Table A; Target 1780; HLA-B*38:01; ABCB5; ENSG00000004846; TAA
LYDPVQGQVLF

SEQ ID NO: 1781 - protein, 11 aa, Homo sapiens
  misc_feature: Table A; Target 1781; HLA-C*04:01; ABCB5; ENSG00000004846; TAA
LYDPVQGQVLF

SEQ ID NO: 1782 - protein, 8 aa, Homo sapiens
  misc_feature: Table A; Target 1782; HLA-C*14:02; ABCB5; ENSG00000004846; TAA
LYYVGIGV

SEQ ID NO: 1783 - protein, 9 aa, Homo sapiens
  misc_feature: Table A; Target 1783; HLA-C*14:02; ABCB5; ENSG00000004846; TAA
LYYVGIGVA

SEQ ID NO: 1784 - protein, 10 aa, Homo sapiens
  misc_feature: Table A; Target 1784; HLA-B*54:01; ABCB5; ENSG00000004846; TAA
LYYVGIGVAA

SEQ ID NO: 1785 - protein, 10 aa, Homo sapiens
  misc_feature: Table A; Target 1785; HLA-C*14:02; ABCB5; ENSG00000004846; TAA
LYYVGIGVAA

SEQ ID NO: 1786 - protein, 9 aa, Homo sapiens
  misc_feature: Table A; Target 1786; HLA-A*23:01; ABCB5; ENSG00000004846; TAA
MAIGETLVL

SEQ ID NO: 1787 - protein, 9 aa, Homo sapiens
  misc_feature: Table A; Target 1787; HLA-A*25:01; ABCB5; ENSG00000004846; TAA
MAIGETLVL

SEQ ID NO: 1788 - protein, 9 aa, Homo sapiens
  misc_feature: Table A; Target 1788; HLA-A*30:01; ABCB5; ENSG00000004846; TAA
MAIGETLVL

SEQ ID NO: 1789 - protein, 9 aa, Homo sapiens
  misc_feature: Table A; Target 1789; HLA-B*15:01; ABCB5; ENSG00000004846; TAA
MAIGETLVL

SEQ ID NO: 1790 - protein, 9 aa, Homo sapiens
  misc_feature: Table A; Target 1790; HLA-B*35:01; ABCB5; ENSG00000004846; TAA
MAIGETLVL

SEQ ID NO: 1791 - protein, 9 aa, Homo sapiens
  misc_feature: Table A; Target 1791; HLA-B*35:03; ABCB5; ENSG00000004846; TAA
MAIGETLVL

SEQ ID NO: 1792 - protein, 9 aa, Homo sapiens
  misc_feature: Table A; Target 1792; HLA-B*38:01; ABCB5; ENSG00000004846; TAA
MAIGETLVL

SEQ ID NO: 1793 - protein, 9 aa, Homo sapiens
  misc_feature: Table A; Target 1793; HLA-B*39:01; ABCB5; ENSG00000004846; TAA
MAIGETLVL

SEQ ID NO: 1794 - protein, 9 aa, Homo sapiens
  misc_feature: Table A; Target 1794; HLA-B*40:01; ABCB5; ENSG00000004846; TAA
MAIGETLVL

SEQ ID NO: 1795 - protein, 9 aa, Homo sapiens
  misc_feature: Table A; Target 1795; HLA-B*46:01; ABCB5; ENSG00000004846; TAA
MAIGETLVL

SEQ ID NO: 1796 - protein, 9 aa, Homo sapiens
  misc_feature: Table A; Target 1796; HLA-B*51:01; ABCB5; ENSG00000004846; TAA
MAIGETLVL

SEQ ID NO: 1797 - protein, 9 aa, Homo sapiens
  misc_feature: Table A; Target 1797; HLA-B*54:01; ABCB5; ENSG00000004846; TAA
MAIGETLVL

SEQ ID NO: 1798 - protein, 9 aa, Homo sapiens
  misc_feature: Table A; Target 1798; HLA-B*55:01; ABCB5; ENSG00000004846; TAA
MAIGETLVL

SEQ ID NO: 1799 - protein, 9 aa, Homo sapiens
  misc_feature: Table A; Target 1799; HLA-B*58:01; ABCB5; ENSG00000004846; TAA
MAIGETLVL

SEQ ID NO: 1800 - protein, 9 aa, Homo sapiens
  misc_feature: Table A; Target 1800; HLA-C*02:02; ABCB5; ENSG00000004846; TAA
MAIGETLVL

SEQ ID NO: 1801 - protein, 9 aa, Homo sapiens
  misc_feature: Table A; Target 1801; HLA-C*03:03; ABCB5; ENSG00000004846; TAA
MAIGETLVL

SEQ ID NO: 1802 - protein, 9 aa, Homo sapiens
  misc_feature: Table A; Target 1802; HLA-C*03:04; ABCB5; ENSG00000004846; TAA
MAIGETLVL

SEQ ID NO: 1803 - protein, 9 aa, Homo sapiens
  misc_feature: Table A; Target 1803; HLA-C*05:01; ABCB5; ENSG00000004846; TAA
MAIGETLVL

SEQ ID NO: 1804 - protein, 9 aa, Homo sapiens
  misc_feature: Table A; Target 1804; HLA-C*07:04; ABCB5; ENSG00000004846; TAA
MAIGETLVL

SEQ ID NO: 1805 - protein, 9 aa, Homo sapiens
  misc_feature: Table A; Target 1805; HLA-C*07:06; ABCB5; ENSG00000004846; TAA
MAIGETLVL

SEQ ID NO: 1806 - protein, 9 aa, Homo sapiens
  misc_feature: Table A; Target 1806; HLA-C*12:03; ABCB5; ENSG00000004846; TAA
MAIGETLVL

SEQ ID NO: 1807 - protein, 9 aa, Homo sapiens
  misc_feature: Table A; Target 1807; HLA-C*14:02; ABCB5; ENSG00000004846; TAA
MAIGETLVL

SEQ ID NO: 1808 - protein, 9 aa, Homo sapiens
  misc_feature: Table A; Target 1808; HLA-C*16:04; ABCB5; ENSG00000004846; TAA
MAIGETLVL

SEQ ID NO: 1809 - protein, 10 aa, Homo sapiens
  misc_feature: Table A; Target 1809; HLA-B*54:01; ABCB5; ENSG00000004846; TAA
MAIGETLVLA

SEQ ID NO: 1810 - protein, 10 aa, Homo sapiens
  misc_feature: Table A; Target 1810; HLA-B*56:01; ABCB5; ENSG00000004846; TAA
MAIGETLVLA

SEQ ID NO: 1811 - protein, 9 aa, Homo sapiens
  misc_feature: Table A; Target 1811; HLA-A*33:03; ABCB5; ENSG00000004846; TAA
MASAAACSR

SEQ ID NO: 1812 - protein, 9 aa, Homo sapiens
  misc_feature: Table A; Target 1812; HLA-A*68:01; ABCB5; ENSG00000004846; TAA
MASAAACSR

SEQ ID NO: 1813 - protein, 9 aa, Homo sapiens
  misc_feature: Table A; Target 1813; HLA-C*07:06; ABCB5; ENSG00000004846; TAA
MASAAACSR

SEQ ID NO: 1814 - protein, 10 aa, Homo sapiens
  misc_feature: Table A; Target 1814; HLA-A*25:01; ABCB5; ENSG00000004846; TAA
MEFPNKFNTL

SEQ ID NO: 1815 - protein, 10 aa, Homo sapiens
  misc_feature: Table A; Target 1815; HLA-A*30:01; ABCB5; ENSG00000004846; TAA
MEFPNKFNTL

SEQ ID NO: 1816 - protein, 10 aa, Homo sapiens
  misc_feature: Table A; Target 1816; HLA-A*68:02; ABCB5; ENSG00000004846; TAA
MEFPNKFNTL

SEQ ID NO: 1817 - protein, 10 aa, Homo sapiens
  misc_feature: Table A; Target 1817; HLA-B*18:01; ABCB5; ENSG00000004846; TAA
MEFPNKFNTL

SEQ ID NO: 1818 - protein, 10 aa, Homo sapiens
  misc_feature: Table A; Target 1818; HLA-B*37:01; ABCB5; ENSG00000004846; TAA
MEFPNKFNTL

SEQ ID NO: 1819 - protein, 10 aa, Homo sapiens
  misc_feature: Table A; Target 1819; HLA-B*40:01; ABCB5; ENSG00000004846; TAA
MEFPNKFNTL

SEQ ID NO: 1820 - protein, 10 aa, Homo sapiens
  misc_feature: Table A; Target 1820; HLA-B*40:02; ABCB5; ENSG00000004846; TAA
MEFPNKFNTL

SEQ ID NO: 1821 - protein, 10 aa, Homo sapiens
  misc_feature: Table A; Target 1821; HLA-B*44:02; ABCB5; ENSG00000004846; TAA
MEFPNKFNTL

SEQ ID NO: 1822 - protein, 10 aa, Homo sapiens
  misc_feature: Table A; Target 1822; HLA-B*44:03; ABCB5; ENSG00000004846; TAA
MEFPNKFNTL

SEQ ID NO: 1823 - protein, 10 aa, Homo sapiens
  misc_feature: Table A; Target 1823; HLA-B*49:01; ABCB5; ENSG00000004846; TAA
MEFPNKFNTL

SEQ ID NO: 1824 - protein, 10 aa, Homo sapiens
  misc_feature: Table A; Target 1824; HLA-C*02:02; ABCB5; ENSG00000004846; TAA
MEFPNKFNTL

SEQ ID NO: 1825 - protein, 10 aa, Homo sapiens
  misc_feature: Table A; Target 1825; HLA-C*16:04; ABCB5; ENSG00000004846; TAA
MEFPNKFNTL

SEQ ID NO: 1826 - protein, 11 aa, Homo sapiens
  misc_feature: Table A; Target 1826; HLA-B*49:01; ABCB5; ENSG00000004846; TAA
MEFPNKFNTLV

SEQ ID NO: 1827 - protein, 10 aa, Homo sapiens
  misc_feature: Table A; Target 1827; HLA-B*40:01; ABCB5; ENSG00000004846; TAA
MENSERAEEM

SEQ ID NO: 1828 - protein, 8 aa, Homo sapiens
  misc_feature: Table A; Target 1828; HLA-B*18:01; ABCB5; ENSG00000004846; TAA
MESMTYST

SEQ ID NO: 1829 - protein, 8 aa, Homo sapiens
  misc_feature: Table A; Target 1829; HLA-B*37:01; ABCB5; ENSG00000004846; TAA
MESMTYST

SEQ ID NO: 1830 - protein, 8 aa, Homo sapiens
  misc_feature: Table A; Target 1830; HLA-C*07:04; ABCB5; ENSG00000004846; TAA
MESMTYST

SEQ ID NO: 1831 - protein, 10 aa, Homo sapiens
  misc_feature: Table A; Target 1831; HLA-A*29:02; ABCB5; ENSG00000004846; TAA
MFIVFTAIAY

SEQ ID NO: 1832 - protein, 10 aa, Homo sapiens
  misc_feature: Table A; Target 1832; HLA-A*25:01; ABCB5; ENSG00000004846; TAA
MIETAAMTGF

SEQ ID NO: 1833 - protein, 10 aa, Homo sapiens
  misc_feature: Table A; Target 1833; HLA-A*26:01; ABCB5; ENSG00000004846; TAA
MIETAAMTGF

SEQ ID NO: 1834 - protein, 9 aa, Homo sapiens
  misc_feature: Table A; Target 1834; HLA-A*02:01; ABCB5; ENSG00000004846; TAA
MILGILASL

SEQ ID NO: 1835 - protein, 9 aa, Homo sapiens
  misc_feature: Table A; Target 1835; HLA-A*02:04; ABCB5; ENSG00000004846; TAA
MILGILASL

SEQ ID NO: 1836 - protein, 9 aa, Homo sapiens
  misc_feature: Table A; Target 1836; HLA-A*02:07; ABCB5; ENSG00000004846; TAA
MILGILASL

SEQ ID NO: 1837 - protein, 9 aa, Homo sapiens
  misc_feature: Table A; Target 1837; HLA-A*23:01; ABCB5; ENSG00000004846; TAA
MILGILASL

SEQ ID NO: 1838 - protein, 9 aa, Homo sapiens
  misc_feature: Table A; Target 1838; HLA-A*02:03; ABCB5; ENSG00000004846; TAA
MLAEKGAHA

SEQ ID NO: 1839 - protein, 11 aa, Homo sapiens
  misc_feature: Table A; Target 1839; HLA-A*02:01; ABCB5; ENSG00000004846; TAA
MLAEKGAHAEL

SEQ ID NO: 1840 - protein, 11 aa, Homo sapiens
  misc_feature: Table A; Target 1840; HLA-A*02:03; ABCB5; ENSG00000004846; TAA
MLAEKGAHAEL

SEQ ID NO: 1841 - protein, 11 aa, Homo sapiens
  misc_feature: Table A; Target 1841; HLA-A*02:04; ABCB5; ENSG00000004846; TAA
MLAEKGAHAEL

SEQ ID NO: 1842 - protein, 8 aa, Homo sapiens
  misc_feature: Table A; Target 1842; HLA-B*08:01; ABCB5; ENSG00000004846; TAA
MPLVLGEM

SEQ ID NO: 1843 - protein, 8 aa, Homo sapiens
  misc_feature: Table A; Target 1843; HLA-B*35:01; ABCB5; ENSG00000004846; TAA
MPLVLGEM

SEQ ID NO: 1844 - protein, 8 aa, Homo sapiens
  misc_feature: Table A; Target 1844; HLA-B*35:03; ABCB5; ENSG00000004846; TAA
MPLVLGEM

SEQ ID NO: 1845 - protein, 8 aa, Homo sapiens
  misc_feature: Table A; Target 1845; HLA-B*51:01; ABCB5; ENSG00000004846; TAA
MPLVLGEM

SEQ ID NO: 1846 - protein, 8 aa, Homo sapiens
  misc_feature: Table A; Target 1846; HLA-B*54:01; ABCB5; ENSG00000004846; TAA
MPLVLGEM

SEQ ID NO: 1847 - protein, 8 aa, Homo sapiens
  misc_feature: Table A; Target 1847; HLA-B*55:01; ABCB5; ENSG00000004846; TAA
MPLVLGEM

SEQ ID NO: 1848 - protein, 8 aa, Homo sapiens
  misc_feature: Table A; Target 1848; HLA-B*56:01; ABCB5; ENSG00000004846; TAA
MPLVLGEM

SEQ ID NO: 1849 - protein, 11 aa, Homo sapiens
  misc_feature: Table A; Target 1849; HLA-A*01:01; ABCB5; ENSG00000004846; TAA
MSDNLISGCLV

SEQ ID NO: 1850 - protein, 8 aa, Homo sapiens
  misc_feature: Table A; Target 1850; HLA-C*07:04; ABCB5; ENSG00000004846; TAA
MSTFSIGL

SEQ ID NO: 1851 - protein, 10 aa, Homo sapiens
  misc_feature: Table A; Target 1851; HLA-A*68:02; ABCB5; ENSG00000004846; TAA
MSTFSIGLAV

SEQ ID NO: 1852 - protein, 8 aa, Homo sapiens
  misc_feature: Table A; Target 1852; HLA-A*01:01; ABCB5; ENSG00000004846; TAA
MTDDIDKI

SEQ ID NO: 1853 - protein, 8 aa, Homo sapiens
  misc_feature: Table A; Target 1853; HLA-B*38:01; ABCB5; ENSG00000004846; TAA
MTDDIDKI

SEQ ID NO: 1854 - protein, 8 aa, Homo sapiens
  misc_feature: Table A; Target 1854; HLA-C*05:01; ABCB5; ENSG00000004846; TAA
MTDDIDKI

SEQ ID NO: 1855 - protein, 8 aa, Homo sapiens
  misc_feature: Table A; Target 1855; HLA-A*01:01; ABCB5; ENSG00000004846; TAA
MTLLTLYY

SEQ ID NO: 1856 - protein, 8 aa, Homo sapiens
  misc_feature: Table A; Target 1856; HLA-A*29:02; ABCB5; ENSG00000004846; TAA
MTLLTLYY

SEQ ID NO: 1857 - protein, 8 aa, Homo sapiens
  misc_feature: Table A; Target 1857; HLA-C*07:01; ABCB5; ENSG00000004846; TAA
MTLLTLYY

SEQ ID NO: 1858 - protein, 8 aa, Homo sapiens
  misc_feature: Table A; Target 1858; HLA-B*51:01; ABCB5; ENSG00000004846; TAA
MTPEGMFI

SEQ ID NO: 1859 - protein, 9 aa, Homo sapiens
  misc_feature: Table A; Target 1859; HLA-A*02:07; ABCB5; ENSG00000004846; TAA
MTPEGMFIV

SEQ ID NO: 1860 - protein, 10 aa, Homo sapiens
  misc_feature: Table A; Target 1860; HLA-A*02:07; ABCB5; ENSG00000004846; TAA
MTPEGMFIVF

SEQ ID NO: 1861 - protein, 10 aa, Homo sapiens
  misc_feature: Table A; Target 1861; HLA-A*24:02; ABCB5; ENSG00000004846; TAA
MTPEGMFIVF

SEQ ID NO: 1862 - protein, 10 aa, Homo sapiens
  misc_feature: Table A; Target 1862; HLA-A*25:01; ABCB5; ENSG00000004846; TAA
MTPEGMFIVF

SEQ ID NO: 1863 - protein, 10 aa, Homo sapiens
  misc_feature: Table A; Target 1863; HLA-A*68:02; ABCB5; ENSG00000004846; TAA
MTPEGMFIVF

SEQ ID NO: 1864 - protein, 10 aa, Homo sapiens
  misc_feature: Table A; Target 1864; HLA-A*02:07; ABCB5; ENSG00000004846; TAA
MVDENDIRAL

SEQ ID NO: 1865 - protein, 10 aa, Homo sapiens
  misc_feature: Table A; Target 1865; HLA-A*25:01; ABCB5; ENSG00000004846; TAA
MVDENDIRAL

SEQ ID NO: 1866 - protein, 10 aa, Homo sapiens
  misc_feature: Table A; Target 1866; HLA-B*07:02; ABCB5; ENSG00000004846; TAA
MVDENDIRAL

SEQ ID NO: 1867 - protein, 10 aa, Homo sapiens
  misc_feature: Table A; Target 1867; HLA-B*35:01; ABCB5; ENSG00000004846; TAA
MVDENDIRAL

SEQ ID NO: 1868 - protein, 10 aa, Homo sapiens
  misc_feature: Table A; Target 1868; HLA-B*35:03; ABCB5; ENSG00000004846; TAA
MVDENDIRAL

SEQ ID NO: 1869 - protein, 10 aa, Homo sapiens
  misc_feature: Table A; Target 1869; HLA-B*38:01; ABCB5; ENSG00000004846; TAA
MVDENDIRAL

SEQ ID NO: 1870 - protein, 10 aa, Homo sapiens
  misc_feature: Table A; Target 1870; HLA-B*39:01; ABCB5; ENSG00000004846; TAA
MVDENDIRAL

SEQ ID NO: 1871 - protein, 10 aa, Homo sapiens
  misc_feature: Table A; Target 1871; HLA-B*40:01; ABCB5; ENSG00000004846; TAA
MVDENDIRAL

SEQ ID NO: 1872 - protein, 10 aa, Homo sapiens
  misc_feature: Table A; Target 1872; HLA-B*55:01; ABCB5; ENSG00000004846; TAA
MVDENDIRAL

SEQ ID NO: 1873 - protein, 10 aa, Homo sapiens
  misc_feature: Table A; Target 1873; HLA-C*01:02; ABCB5; ENSG00000004846; TAA
MVDENDIRAL

SEQ ID NO: 1874 - protein, 10 aa, Homo sapiens
  misc_feature: Table A; Target 1874; HLA-C*03:03; ABCB5; ENSG00000004846; TAA
MVDENDIRAL

SEQ ID NO: 1875 - protein, 10 aa, Homo sapiens
  misc_feature: Table A; Target 1875; HLA-C*03:04; ABCB5; ENSG00000004846; TAA
MVDENDIRAL

SEQ ID NO: 1876 - protein, 10 aa, Homo sapiens
  misc_feature: Table A; Target 1876; HLA-C*05:01; ABCB5; ENSG00000004846; TAA
MVDENDIRAL

SEQ ID NO: 1877 - protein, 8 aa, Homo sapiens
  misc_feature: Table A; Target 1877; HLA-A*11:01; ABCB5; ENSG00000004846; TAA
MVISLTSK

SEQ ID NO: 1878 - protein, 10 aa, Homo sapiens
  misc_feature: Table A; Target 1878; HLA-A*25:01; ABCB5; ENSG00000004846; TAA
MVISLTSKEL

SEQ ID NO: 1879 - protein, 10 aa, Homo sapiens
  misc_feature: Table A; Target 1879; HLA-A*26:01; ABCB5; ENSG00000004846; TAA
MVISLTSKEL

SEQ ID NO: 1880 - protein, 10 aa, Homo sapiens
  misc_feature: Table A; Target 1880; HLA-B*35:03; ABCB5; ENSG00000004846; TAA
MVISLTSKEL

SEQ ID NO: 1881 - protein, 10 aa, Homo sapiens
  misc_feature: Table A; Target 1881; HLA-C*03:03; ABCB5; ENSG00000004846; TAA
MVISLTSKEL

SEQ ID NO: 1882 - protein, 10 aa, Homo sapiens
  misc_feature: Table A; Target 1882; HLA-C*03:04; ABCB5; ENSG00000004846; TAA
MVISLTSKEL

SEQ ID NO: 1883 - protein, 10 aa, Homo sapiens
  misc_feature: Table A; Target 1883; HLA-C*07:06; ABCB5; ENSG00000004846; TAA
MVISLTSKEL

SEQ ID NO: 1884 - protein, 11 aa, Homo sapiens
  misc_feature: Table A; Target 1884; HLA-A*33:03; ABCB5; ENSG00000004846; TAA
MYEEMLQTQHR

SEQ ID NO: 1885 - protein, 8 aa, Homo sapiens
  misc_feature: Table A; Target 1885; HLA-A*25:01; ABCB5; ENSG00000004846; TAA
NAANIHSF

SEQ ID NO: 1886 - protein, 8 aa, Homo sapiens
  misc_feature: Table A; Target 1886; HLA-A*32:01; ABCB5; ENSG00000004846; TAA
NAANIHSF

SEQ ID NO: 1887 - protein, 8 aa, Homo sapiens
  misc_feature: Table A; Target 1887; HLA-B*35:01; ABCB5; ENSG00000004846; TAA
NAANIHSF

SEQ ID NO: 1888 - protein, 8 aa, Homo sapiens
  misc_feature: Table A; Target 1888; HLA-B*46:01; ABCB5; ENSG00000004846; TAA
NAANIHSF

SEQ ID NO: 1889 - protein, 8 aa, Homo sapiens
  misc_feature: Table A; Target 1889; HLA-B*58:01; ABCB5; ENSG00000004846; TAA
NAANIHSF

SEQ ID NO: 1890 - protein, 8 aa, Homo sapiens
  misc_feature: Table A; Target 1890; HLA-C*02:02; ABCB5; ENSG00000004846; TAA
NAANIHSF

SEQ ID NO: 1891 - protein, 8 aa, Homo sapiens
  misc_feature: Table A; Target 1891; HLA-C*03:03; ABCB5; ENSG00000004846; TAA
NAANIHSF

SEQ ID NO: 1892 - protein, 8 aa, Homo sapiens
  misc_feature: Table A; Target 1892; HLA-C*03:04; ABCB5; ENSG00000004846; TAA
NAANIHSF

SEQ ID NO: 1893 - protein, 8 aa, Homo sapiens
  misc_feature: Table A; Target 1893; HLA-C*16:01; ABCB5; ENSG00000004846; TAA
NAANIHSF

SEQ ID NO: 1894 - protein, 8 aa, Homo sapiens
  misc_feature: Table A; Target 1894; HLA-C*16:02; ABCB5; ENSG00000004846; TAA
NAANIHSF

SEQ ID NO: 1895 - protein, 9 aa, Homo sapiens
  misc_feature: Table A; Target 1895; HLA-A*68:01; ABCB5; ENSG00000004846; TAA
NAANIHSFI

SEQ ID NO: 1896 - protein, 9 aa, Homo sapiens
  misc_feature: Table A; Target 1896; HLA-A*68:02; ABCB5; ENSG00000004846; TAA
NAANIHSFI

SEQ ID NO: 1897 - protein, 9 aa, Homo sapiens
  misc_feature: Table A; Target 1897; HLA-B*13:02; ABCB5; ENSG00000004846; TAA
NAANIHSFI

SEQ ID NO: 1898 - protein, 9 aa, Homo sapiens
  misc_feature: Table A; Target 1898; HLA-B*38:01; ABCB5; ENSG00000004846; TAA
NAANIHSFI

SEQ ID NO: 1899 - protein, 9 aa, Homo sapiens
  misc_feature: Table A; Target 1899; HLA-B*51:01; ABCB5; ENSG00000004846; TAA
NAANIHSFI

SEQ ID NO: 1900 - protein, 9 aa, Homo sapiens
  misc_feature: Table A; Target 1900; HLA-C*02:02; ABCB5; ENSG00000004846; TAA
NAANIHSFI

SEQ ID NO: 1901 - protein, 9 aa, Homo sapiens
  misc_feature: Table A; Target 1901; HLA-C*12:03; ABCB5; ENSG00000004846; TAA
NAANIHSFI

SEQ ID NO: 1902 - protein, 9 aa, Homo sapiens
  misc_feature: Table A; Target 1902; HLA-C*16:02; ABCB5; ENSG00000004846; TAA
NAANIHSFI

SEQ ID NO: 1903 - protein, 8 aa, Homo sapiens
  misc_feature: Table A; Target 1903; HLA-B*35:01; ABCB5; ENSG00000004846; TAA
NADLIVVL

SEQ ID NO: 1904 - protein, 8 aa, Homo sapiens
  misc_feature: Table A; Target 1904; HLA-B*35:03; ABCB5; ENSG00000004846; TAA
NADLIVVL

SEQ ID NO: 1905 - protein, 8 aa, Homo sapiens
  misc_feature: Table A; Target 1905; HLA-B*38:01; ABCB5; ENSG00000004846; TAA
NADLIVVL

SEQ ID NO: 1906 - protein, 8 aa, Homo sapiens
  misc_feature: Table A; Target 1906; HLA-B*55:01; ABCB5; ENSG00000004846; TAA
NADLIVVL

SEQ ID NO: 1907 - protein, 8 aa, Homo sapiens
  misc_feature: Table A; Target 1907; HLA-C*03:03; ABCB5; ENSG00000004846; TAA
NADLIVVL

SEQ ID NO: 1908 - protein, 8 aa, Homo sapiens
  misc_feature: Table A; Target 1908; HLA-C*03:04; ABCB5; ENSG00000004846; TAA
NADLIVVL

SEQ ID NO: 1909 - protein, 8 aa, Homo sapiens
  misc_feature: Table A; Target 1909; HLA-C*04:01; ABCB5; ENSG00000004846; TAA
NADLIVVL

SEQ ID NO: 1910 - protein, 8 aa, Homo sapiens
  misc_feature: Table A; Target 1910; HLA-C*05:01; ABCB5; ENSG00000004846; TAA
NADLIVVL

SEQ ID NO: 1911 - protein, 8 aa, Homo sapiens
  misc_feature: Table A; Target 1911; HLA-C*07:04; ABCB5; ENSG00000004846; TAA
NADLIVVL

SEQ ID NO: 1912 - protein, 8 aa, Homo sapiens
  misc_feature: Table A; Target 1912; HLA-C*12:03; ABCB5; ENSG00000004846; TAA
NADLIVVL

SEQ ID NO: 1913 - protein, 9 aa, Homo sapiens
  misc_feature: Table A; Target 1913; HLA-A*01:01; ABCB5; ENSG00000004846; TAA
NADLIVVLH

SEQ ID NO: 1914 - protein, 9 aa, Homo sapiens
  misc_feature: Table A; Target 1914; HLA-A*33:01; ABCB5; ENSG00000004846; TAA
NADLIVVLH

SEQ ID NO: 1915 - protein, 9 aa, Homo sapiens
  misc_feature: Table A; Target 1915; HLA-B*35:01; ABCB5; ENSG00000004846; TAA
NADLIVVLH

SEQ ID NO: 1916 - protein, 9 aa, Homo sapiens
  misc_feature: Table A; Target 1916; HLA-C*05:01; ABCB5; ENSG00000004846; TAA
NADLIVVLH

SEQ ID NO: 1917 - protein, 9 aa, Homo sapiens
  misc_feature: Table A; Target 1917; HLA-C*07:06; ABCB5; ENSG00000004846; TAA
NADLIVVLH

SEQ ID NO: 1918 - protein, 9 aa, Homo sapiens
  misc_feature: Table A; Target 1918; HLA-B*13:02; ABCB5; ENSG00000004846; TAA
NATNMGLSV

SEQ ID NO: 1919 - protein, 9 aa, Homo sapiens
  misc_feature: Table A; Target 1919; HLA-B*39:01; ABCB5; ENSG00000004846; TAA
NATNMGLSV

SEQ ID NO: 1920 - protein, 9 aa, Homo sapiens
  misc_feature: Table A; Target 1920; HLA-B*51:01; ABCB5; ENSG00000004846; TAA
NATNMGLSV

SEQ ID NO: 1921 - protein, 9 aa, Homo sapiens
  misc_feature: Table A; Target 1921; HLA-B*54:01; ABCB5; ENSG00000004846; TAA
NATNMGLSV

SEQ ID NO: 1922 - protein, 9 aa, Homo sapiens
  misc_feature: Table A; Target 1922; HLA-C*01:02; ABCB5; ENSG00000004846; TAA
NATNMGLSV

SEQ ID NO: 1923 - protein, 9 aa, Homo sapiens
  misc_feature: Table A; Target 1923; HLA-C*02:02; ABCB5; ENSG00000004846; TAA
NATNMGLSV

SEQ ID NO: 1924 - protein, 9 aa, Homo sapiens
  misc_feature: Table A; Target 1924; HLA-C*03:03; ABCB5; ENSG00000004846; TAA
NATNMGLSV

SEQ ID NO: 1925 - protein, 9 aa, Homo sapiens
  misc_feature: Table A; Target 1925; HLA-C*03:04; ABCB5; ENSG00000004846; TAA
NATNMGLSV

SEQ ID NO: 1926 - protein, 9 aa, Homo sapiens
  misc_feature: Table A; Target 1926; HLA-C*05:01; ABCB5; ENSG00000004846; TAA
NATNMGLSV

SEQ ID NO: 1927 - protein, 9 aa, Homo sapiens
  misc_feature: Table A; Target 1927; HLA-C*16:01; ABCB5; ENSG00000004846; TAA
NATNMGLSV

SEQ ID NO: 1928 - protein, 9 aa, Homo sapiens
  misc_feature: Table A; Target 1928; HLA-C*16:02; ABCB5; ENSG00000004846; TAA
NATNMGLSV

SEQ ID NO: 1929 - protein, 9 aa, Homo sapiens
  misc_feature: Table A; Target 1929; HLA-C*16:04; ABCB5; ENSG00000004846; TAA
NATNMGLSV

SEQ ID NO: 1930 - protein, 9 aa, Homo sapiens
  misc_feature: Table A; Target 1930; HLA-A*02:04; ABCB5; ENSG00000004846; TAA
NAYDFIMEF

SEQ ID NO: 1931 - protein, 9 aa, Homo sapiens
  misc_feature: Table A; Target 1931; HLA-A*02:07; ABCB5; ENSG00000004846; TAA
NAYDFIMEF

SEQ ID NO: 1932 - protein, 9 aa, Homo sapiens
  misc_feature: Table A; Target 1932; HLA-A*25:01; ABCB5; ENSG00000004846; TAA
NAYDFIMEF

SEQ ID NO: 1933 - protein, 9 aa, Homo sapiens
  misc_feature: Table A; Target 1933; HLA-A*26:01; ABCB5; ENSG00000004846; TAA
NAYDFIMEF

SEQ ID NO: 1934 - protein, 9 aa, Homo sapiens
  misc_feature: Table A; Target 1934; HLA-A*29:02; ABCB5; ENSG00000004846; TAA
NAYDFIMEF

SEQ ID NO: 1935 - protein, 9 aa, Homo sapiens
  misc_feature: Table A; Target 1935; HLA-A*33:01; ABCB5; ENSG00000004846; TAA
NAYDFIMEF

SEQ ID NO: 1936 - protein, 9 aa, Homo sapiens
  misc_feature: Table A; Target 1936; HLA-A*68:02; ABCB5; ENSG00000004846; TAA
NAYDFIMEF

SEQ ID NO: 1937 - protein, 9 aa, Homo sapiens
  misc_feature: Table A; Target 1937; HLA-B*18:01; ABCB5; ENSG00000004846; TAA
NAYDFIMEF

SEQ ID NO: 1938 - protein, 9 aa, Homo sapiens
  misc_feature: Table A; Target 1938; HLA-B*27:02; ABCB5; ENSG00000004846; TAA
NAYDFIMEF

SEQ ID NO: 1939 - protein, 9 aa, Homo sapiens
  misc_feature: Table A; Target 1939; HLA-B*35:01; ABCB5; ENSG00000004846; TAA
NAYDFIMEF

SEQ ID NO: 1940 - protein, 9 aa, Homo sapiens
  misc_feature: Table A; Target 1940; HLA-B*35:03; ABCB5; ENSG00000004846; TAA
NAYDFIMEF

SEQ ID NO: 1941 - protein, 9 aa, Homo sapiens
  misc_feature: Table A; Target 1941; HLA-B*46:01; ABCB5; ENSG00000004846; TAA
NAYDFIMEF

SEQ ID NO: 1942 - protein, 9 aa, Homo sapiens
  misc_feature: Table A; Target 1942; HLA-B*51:01; ABCB5; ENSG00000004846; TAA
NAYDFIMEF

SEQ ID NO: 1943 - protein, 9 aa, Homo sapiens
  misc_feature: Table A; Target 1943; HLA-B*54:01; ABCB5; ENSG00000004846; TAA
NAYDFIMEF

SEQ ID NO: 1944 - protein, 9 aa, Homo sapiens
  misc_feature: Table A; Target 1944; HLA-B*57:01; ABCB5; ENSG00000004846; TAA
NAYDFIMEF

SEQ ID NO: 1945 - protein, 9 aa, Homo sapiens
  misc_feature: Table A; Target 1945; HLA-C*02:02; ABCB5; ENSG00000004846; TAA
NAYDFIMEF

SEQ ID NO: 1946 - protein, 9 aa, Homo sapiens
  misc_feature: Table A; Target 1946; HLA-C*03:03; ABCB5; ENSG00000004846; TAA
NAYDFIMEF

SEQ ID NO: 1947 - protein, 9 aa, Homo sapiens
  misc_feature: Table A; Target 1947; HLA-C*07:06; ABCB5; ENSG00000004846; TAA
NAYDFIMEF

SEQ ID NO: 1948 - protein, 9 aa, Homo sapiens
  misc_feature: Table A; Target 1948; HLA-C*12:03; ABCB5; ENSG00000004846; TAA
NAYDFIMEF

SEQ ID NO: 1949 - protein, 9 aa, Homo sapiens
  misc_feature: Table A; Target 1949; HLA-C*16:04; ABCB5; ENSG00000004846; TAA
NAYDFIMEF

SEQ ID NO: 1950 - protein, 10 aa, Homo sapiens
  misc_feature: Table A; Target 1950; HLA-C*03:03; ABCB5; ENSG00000004846; TAA
NCSIAENIAY

SEQ ID NO: 1951 - protein, 10 aa, Homo sapiens
  misc_feature: Table A; Target 1951; HLA-C*07:01; ABCB5; ENSG00000004846; TAA
NCSIAENIAY

SEQ ID NO: 1952 - protein, 8 aa, Homo sapiens
  misc_feature: Table A; Target 1952; HLA-B*37:01; ABCB5; ENSG00000004846; TAA
NDIRALNV

SEQ ID NO: 1953 - protein, 8 aa, Homo sapiens
  misc_feature: Table A; Target 1953; HLA-B*40:02; ABCB5; ENSG00000004846; TAA
NDIRALNV

SEQ ID NO: 1954 - protein, 8 aa, Homo sapiens
  misc_feature: Table A; Target 1954; HLA-B*49:01; ABCB5; ENSG00000004846; TAA
NDIRALNV

SEQ ID NO: 1955 - protein, 8 aa, Homo sapiens
  misc_feature: Table A; Target 1955; HLA-B*51:01; ABCB5; ENSG00000004846; TAA
NDIRALNV

SEQ ID NO: 1956 - protein, 8 aa, Homo sapiens
  misc_feature: Table A; Target 1956; HLA-C*06:02; ABCB5; ENSG00000004846; TAA
NDIRALNV

SEQ ID NO: 1957 - protein, 9 aa, Homo sapiens
  misc_feature: Table A; Target 1957; HLA-B*37:01; ABCB5; ENSG00000004846; TAA
NDSEKVVQH

SEQ ID NO: 1958 - protein, 9 aa, Homo sapiens
  misc_feature: Table A; Target 1958; HLA-C*12:03; ABCB5; ENSG00000004846; TAA
NDSEKVVQH

SEQ ID NO: 1959 - protein, 9 aa, Homo sapiens
  misc_feature: Table A; Target 1959; HLA-C*16:02; ABCB5; ENSG00000004846; TAA
NDSEKVVQH

SEQ ID NO: 1960 - protein, 9 aa, Homo sapiens
  misc_feature: Table A; Target 1960; HLA-A*30:01; ABCB5; ENSG00000004846; TAA
NEDMTLLTL

SEQ ID NO: 1961 - protein, 9 aa, Homo sapiens
  misc_feature: Table A; Target 1961; HLA-B*18:01; ABCB5; ENSG00000004846; TAA
NEDMTLLTL

SEQ ID NO: 1962 - protein, 9 aa, Homo sapiens
  misc_feature: Table A; Target 1962; HLA-B*38:01; ABCB5; ENSG00000004846; TAA
NEDMTLLTL

SEQ ID NO: 1963 - protein, 9 aa, Homo sapiens
  misc_feature: Table A; Target 1963; HLA-B*39:01; ABCB5; ENSG00000004846; TAA
NEDMTLLTL

SEQ ID NO: 1964 - protein, 9 aa, Homo sapiens
  misc_feature: Table A; Target 1964; HLA-B*40:01; ABCB5; ENSG00000004846; TAA
NEDMTLLTL

SEQ ID NO: 1965 - protein, 9 aa, Homo sapiens
  misc_feature: Table A; Target 1965; HLA-B*44:02; ABCB5; ENSG00000004846; TAA
NEDMTLLTL

SEQ ID NO: 1966 - protein, 9 aa, Homo sapiens
  misc_feature: Table A; Target 1966; HLA-B*44:03; ABCB5; ENSG00000004846; TAA
NEDMTLLTL

SEQ ID NO: 1967 - protein, 9 aa, Homo sapiens
  misc_feature: Table A; Target 1967; HLA-B*49:01; ABCB5; ENSG00000004846; TAA
NEDMTLLTL

SEQ ID NO: 1968 - protein, 10 aa, Homo sapiens
  misc_feature: Table A; Target 1968; HLA-A*01:01; ABCB5; ENSG00000004846; TAA
NEDMTLLTLY

SEQ ID NO: 1969 - protein, 10 aa, Homo sapiens
  misc_feature: Table A; Target 1969; HLA-B*18:01; ABCB5; ENSG00000004846; TAA
NEDMTLLTLY

SEQ ID NO: 1970 - protein, 10 aa, Homo sapiens
  misc_feature: Table A; Target 1970; HLA-B*44:02; ABCB5; ENSG00000004846; TAA
NEDMTLLTLY

SEQ ID NO: 1971 - protein, 10 aa, Homo sapiens
  misc_feature: Table A; Target 1971; HLA-B*44:03; ABCB5; ENSG00000004846; TAA
NEDMTLLTLY

SEQ ID NO: 1972 - protein, 9 aa, Homo sapiens
  misc_feature: Table A; Target 1972; HLA-B*39:01; ABCB5; ENSG00000004846; TAA
NGSGKSTVV

SEQ ID NO: 1973 - protein, 8 aa, Homo sapiens
  misc_feature: Table A; Target 1973; HLA-B*08:01; ABCB5; ENSG00000004846; TAA
NGTVHPVF

SEQ ID NO: 1974 - protein, 8 aa, Homo sapiens
  misc_feature: Table A; Target 1974; HLA-B*15:03; ABCB5; ENSG00000004846; TAA
NGTVHPVF

SEQ ID NO: 1975 - protein, 8 aa, Homo sapiens
  misc_feature: Table A; Target 1975; HLA-B*18:01; ABCB5; ENSG00000004846; TAA
NGTVHPVF

SEQ ID NO: 1976 - protein, 8 aa, Homo sapiens
  misc_feature: Table A; Target 1976; HLA-C*03:03; ABCB5; ENSG00000004846; TAA
NGTVHPVF

SEQ ID NO: 1977 - protein, 8 aa, Homo sapiens
  misc_feature: Table A; Target 1977; HLA-C*03:04; ABCB5; ENSG00000004846; TAA
NGTVHPVF

SEQ ID NO: 1978 - protein, 8 aa, Homo sapiens
  misc_feature: Table A; Target 1978; HLA-C*07:01; ABCB5; ENSG00000004846; TAA
NGTVHPVF

SEQ ID NO: 1979 - protein, 8 aa, Homo sapiens
  misc_feature: Table A; Target 1979; HLA-C*07:04; ABCB5; ENSG00000004846; TAA
NGTVHPVF

SEQ ID NO: 1980 - protein, 8 aa, Homo sapiens
  misc_feature: Table A; Target 1980; HLA-C*12:03; ABCB5; ENSG00000004846; TAA
NGTVHPVF

SEQ ID NO: 1981 - protein, 8 aa, Homo sapiens
  misc_feature: Table A; Target 1981; HLA-C*16:01; ABCB5; ENSG00000004846; TAA
NGTVHPVF

SEQ ID NO: 1982 - protein, 9 aa, Homo sapiens
  misc_feature: Table A; Target 1982; HLA-A*02:04; ABCB5; ENSG00000004846; TAA
NIHSFIEGL

SEQ ID NO: 1983 - protein, 9 aa, Homo sapiens
  misc_feature: Table A; Target 1983; HLA-A*02:07; ABCB5; ENSG00000004846; TAA
NIHSFIEGL

SEQ ID NO: 1984 - protein, 9 aa, Homo sapiens
  misc_feature: Table A; Target 1984; HLA-A*68:02; ABCB5; ENSG00000004846; TAA
NIHSFIEGL

SEQ ID NO: 1985 - protein, 8 aa, Homo sapiens
  misc_feature: Table A; Target 1985; HLA-B*08:01; ABCB5; ENSG00000004846; TAA
NIRTIVSL

SEQ ID NO: 1986 - protein, 8 aa, Homo sapiens
  misc_feature: Table A; Target 1986; HLA-C*07:02; ABCB5; ENSG00000004846; TAA
NIRTIVSL

SEQ ID NO: 1987 - protein, 10 aa, Homo sapiens
  misc_feature: Table A; Target 1987; HLA-A*33:01; ABCB5; ENSG00000004846; TAA
NIRTIVSLTR

SEQ ID NO: 1988 - protein, 9 aa, Homo sapiens
  misc_feature: Table A; Target 1988; HLA-A*02:01; ABCB5; ENSG00000004846; TAA
NMSTFSIGL

SEQ ID NO: 1989 - protein, 9 aa, Homo sapiens
  misc_feature: Table A; Target 1989; HLA-A*02:04; ABCB5; ENSG00000004846; TAA
NMSTFSIGL

SEQ ID NO: 1990 - protein, 9 aa, Homo sapiens
  misc_feature: Table A; Target 1990; HLA-A*02:07; ABCB5; ENSG00000004846; TAA
NMSTFSIGL

SEQ ID NO: 1991 - protein, 9 aa, Homo sapiens
  misc_feature: Table A; Target 1991; HLA-A*68:02; ABCB5; ENSG00000004846; TAA
NMSTFSIGL

SEQ ID NO: 1992 - protein, 9 aa, Homo sapiens
  misc_feature: Table A; Target 1992; HLA-B*55:01; ABCB5; ENSG00000004846; TAA
NMSTFSIGL

SEQ ID NO: 1993 - protein, 9 aa, Homo sapiens
  misc_feature: Table A; Target 1993; HLA-A*68:01; ABCB5; ENSG00000004846; TAA
NVSFNYPSR

SEQ ID NO: 1994 - protein, 10 aa, Homo sapiens
  misc_feature: Table A; Target 1994; HLA-A*24:02; ABCB5; ENSG00000004846; TAA
NYPSRPSIKI

SEQ ID NO: 1995 - protein, 10 aa, Homo sapiens
  misc_feature: Table A; Target 1995; HLA-A*31:01; ABCB5; ENSG00000004846; TAA
PCRPDVFILR

SEQ ID NO: 1996 - protein, 11 aa, Homo sapiens
  misc_feature: Table A; Target 1996; HLA-B*27:02; ABCB5; ENSG00000004846; TAA
PESIEGTVEFK

SEQ ID NO: 1997 - protein, 9 aa, Homo sapiens
  misc_feature: Table A; Target 1997; HLA-C*07:02; ABCB5; ENSG00000004846; TAA
PSRPSIKIL

SEQ ID NO: 1998 - protein, 8 aa, Homo sapiens
  misc_feature: Table A; Target 1998; HLA-B*18:01; ABCB5; ENSG00000004846; TAA
QEKELQRY

SEQ ID NO: 1999 - protein, 10 aa, Homo sapiens
  misc_feature: Table A; Target 1999; HLA-A*30:01; ABCB5; ENSG00000004846; TAA
QEKLNEDMTL

SEQ ID NO: 2000 - protein, 10 aa, Homo sapiens
  misc_feature: Table A; Target 2000; HLA-B*40:01; ABCB5; ENSG00000004846; TAA
QEKLNEDMTL

SEQ ID NO: 2001 - protein, 10 aa, Homo sapiens
  misc_feature: Table A; Target 2001; HLA-B*40:02; ABCB5; ENSG00000004846; TAA
QEKLNEDMTL

SEQ ID NO: 2002 - protein, 11 aa, Homo sapiens
  misc_feature: Table A; Target 2002; HLA-A*30:01; ABCB5; ENSG00000004846; TAA
QEKLNEDMTLL

SEQ ID NO: 2003 - protein, 11 aa, Homo sapiens
  misc_feature: Table A; Target 2003; HLA-B*40:01; ABCB5; ENSG00000004846; TAA
QEKLNEDMTLL

SEQ ID NO: 2004 - protein, 9 aa, Homo sapiens
  misc_feature: Table A; Target 2004; HLA-B*49:01; ABCB5; ENSG00000004846; TAA
QEPVLFGTT

SEQ ID NO: 2005 - protein, 10 aa, Homo sapiens
  misc_feature: Table A; Target 2005; HLA-A*30:01; ABCB5; ENSG00000004846; TAA
QEPVLFGTTI

SEQ ID NO: 2006 - protein, 10 aa, Homo sapiens
  misc_feature: Table A; Target 2006; HLA-B*40:01; ABCB5; ENSG00000004846; TAA
QEPVLFGTTI

SEQ ID NO: 2007 - protein, 10 aa, Homo sapiens
  misc_feature: Table A; Target 2007; HLA-B*44:02; ABCB5; ENSG00000004846; TAA
QEPVLFGTTI

SEQ ID NO: 2008 - protein, 10 aa, Homo sapiens
  misc_feature: Table A; Target 2008; HLA-B*44:03; ABCB5; ENSG00000004846; TAA
QEPVLFGTTI

SEQ ID NO: 2009 - protein, 10 aa, Homo sapiens
  misc_feature: Table A; Target 2009; HLA-B*49:01; ABCB5; ENSG00000004846; TAA
QEPVLFGTTI

SEQ ID NO: 2010 - protein, 9 aa, Homo sapiens
  misc_feature: Table A; Target 2010; HLA-A*23:01; ABCB5; ENSG00000004846; TAA
QIIGSCYAF

SEQ ID NO: 2011 - protein, 9 aa, Homo sapiens
  misc_feature: Table A; Target 2011; HLA-A*26:01; ABCB5; ENSG00000004846; TAA
QIIGSCYAF

SEQ ID NO: 2012 - protein, 9 aa, Homo sapiens
  misc_feature: Table A; Target 2012; HLA-B*15:01; ABCB5; ENSG00000004846; TAA
QIIGSCYAF

SEQ ID NO: 2013 - protein, 9 aa, Homo sapiens
  misc_feature: Table A; Target 2013; HLA-A*02:04; ABCB5; ENSG00000004846; TAA
QISLWIITA

SEQ ID NO: 2014 - protein, 9 aa, Homo sapiens
  misc_feature: Table A; Target 2014; HLA-A*68:02; ABCB5; ENSG00000004846; TAA
QNADLIVVL

SEQ ID NO: 2015 - protein, 9 aa, Homo sapiens
  misc_feature: Table A; Target 2015; HLA-B*35:03; ABCB5; ENSG00000004846; TAA
QNADLIVVL

SEQ ID NO: 2016 - protein, 9 aa, Homo sapiens
  misc_feature: Table A; Target 2016; HLA-B*38:01; ABCB5; ENSG00000004846; TAA
QNADLIVVL

SEQ ID NO: 2017 - protein, 9 aa, Homo sapiens
  misc_feature: Table A; Target 2017; HLA-C*12:03; ABCB5; ENSG00000004846; TAA
QNADLIVVL

SEQ ID NO: 2018 - protein, 10 aa, Homo sapiens
  misc_feature: Table A; Target 2018; HLA-C*07:02; ABCB5; ENSG00000004846; TAA
QNCTQSQEKL

SEQ ID NO: 2019 - protein, 9 aa, Homo sapiens
  misc_feature: Table A; Target 2019; HLA-B*08:01; ABCB5; ENSG00000004846; TAA
QPKLRKEAV

SEQ ID NO: 2020 - protein, 9 aa, Homo sapiens
  misc_feature: Table A; Target 2020; HLA-B*07:02; ABCB5; ENSG00000004846; TAA
QRIAIARAL

SEQ ID NO: 2021 - protein, 9 aa, Homo sapiens
  misc_feature: Table A; Target 2021; HLA-B*27:02; ABCB5; ENSG00000004846; TAA
QRIAIARAL

SEQ ID NO: 2022 - protein, 9 aa, Homo sapiens
  misc_feature: Table A; Target 2022; HLA-B*27:05; ABCB5; ENSG00000004846; TAA
QRIAIARAL

SEQ ID NO: 2023 - protein, 9 aa, Homo sapiens
  misc_feature: Table A; Target 2023; HLA-C*06:02; ABCB5; ENSG00000004846; TAA
QRIAIARAL

SEQ ID NO: 2024 - protein, 9 aa, Homo sapiens
  misc_feature: Table A; Target 2024; HLA-C*07:02; ABCB5; ENSG00000004846; TAA
QRIAIARAL

SEQ ID NO: 2025 - protein, 9 aa, Homo sapiens
  misc_feature: Table A; Target 2025; HLA-C*16:04; ABCB5; ENSG00000004846; TAA
QRIAIARAL

SEQ ID NO: 2026 - protein, 9 aa, Homo sapiens
  misc_feature: Table A; Target 2026; HLA-B*27:05; ABCB5; ENSG00000004846; TAA
QRLAIARAL

SEQ ID NO: 2027 - protein, 9 aa, Homo sapiens
  misc_feature: Table A; Target 2027; HLA-C*06:02; ABCB5; ENSG00000004846; TAA
QRLAIARAL

SEQ ID NO: 2028 - protein, 10 aa, Homo sapiens
  misc_feature: Table A; Target 2028; HLA-B*27:02; ABCB5; ENSG00000004846; TAA
QRLYDPDDGF

SEQ ID NO: 2029 - protein, 9 aa, Homo sapiens
  misc_feature: Table A; Target 2029; HLA-B*07:02; ABCB5; ENSG00000004846; TAA
QVGLKGAQL

SEQ ID NO: 2030 - protein, 9 aa, Homo sapiens
  misc_feature: Table A; Target 2030; HLA-B*08:01; ABCB5; ENSG00000004846; TAA
QVGLKGAQL

SEQ ID NO: 2031 - protein, 9 aa, Homo sapiens
  misc_feature: Table A; Target 2031; HLA-A*24:02; ABCB5; ENSG00000004846; TAA
QVIDKKPSI

SEQ ID NO: 2032 - protein, 9 aa, Homo sapiens
  misc_feature: Table A; Target 2032; HLA-A*25:01; ABCB5; ENSG00000004846; TAA
QVIDKKPSI

SEQ ID NO: 2033 - protein, 9 aa, Homo sapiens
  misc_feature: Table A; Target 2033; HLA-A*26:01; ABCB5; ENSG00000004846; TAA
QVIDKKPSI

SEQ ID NO: 2034 - protein, 9 aa, Homo sapiens
  misc_feature: Table A; Target 2034; HLA-A*32:01; ABCB5; ENSG00000004846; TAA
QVIDKKPSI

SEQ ID NO: 2035 - protein, 9 aa, Homo sapiens
  misc_feature: Table A; Target 2035; HLA-B*08:01; ABCB5; ENSG00000004846; TAA
QVIDKKPSI

SEQ ID NO: 2036 - protein, 10 aa, Homo sapiens
  misc_feature: Table A; Target 2036; HLA-A*03:02; ABCB5; ENSG00000004846; TAA
QVLFDGVDAK

SEQ ID NO: 2037 - protein, 10 aa, Homo sapiens
  misc_feature: Table A; Target 2037; HLA-A*11:01; ABCB5; ENSG00000004846; TAA
QVLFDGVDAK

SEQ ID NO: 2038 - protein, 10 aa, Homo sapiens
  misc_feature: Table A; Target 2038; HLA-B*27:02; ABCB5; ENSG00000004846; TAA
QVLFDGVDAK

SEQ ID NO: 2039 - protein, 9 aa, Homo sapiens
  misc_feature: Table A; Target 2039; HLA-A*30:02; ABCB5; ENSG00000004846; TAA
RAAREANAY

SEQ ID NO: 2040 - protein, 9 aa, Homo sapiens
  misc_feature: Table A; Target 2040; HLA-B*15:01; ABCB5; ENSG00000004846; TAA
RAAREANAY

SEQ ID NO: 2041 - protein, 9 aa, Homo sapiens
  misc_feature: Table A; Target 2041; HLA-B*15:03; ABCB5; ENSG00000004846; TAA
RAAREANAY

SEQ ID NO: 2042 - protein, 9 aa, Homo sapiens
  misc_feature: Table A; Target 2042; HLA-B*46:01; ABCB5; ENSG00000004846; TAA
RAAREANAY

SEQ ID NO: 2043 - protein, 9 aa, Homo sapiens
  misc_feature: Table A; Target 2043; HLA-B*58:01; ABCB5; ENSG00000004846; TAA
RAAREANAY

SEQ ID NO: 2044 - protein, 9 aa, Homo sapiens
  misc_feature: Table A; Target 2044; HLA-C*16:01; ABCB5; ENSG00000004846; TAA
RAAREANAY

SEQ ID NO: 2045 - protein, 9 aa, Homo sapiens
  misc_feature: Table A; Target 2045; HLA-C*16:02; ABCB5; ENSG00000004846; TAA
RAAREANAY

SEQ ID NO: 2046 - protein, 9 aa, Homo sapiens
  misc_feature: Table A; Target 2046; HLA-A*01:01; ABCB5; ENSG00000004846; TAA
RAEEMQENY

SEQ ID NO: 2047 - protein, 9 aa, Homo sapiens
  misc_feature: Table A; Target 2047; HLA-A*30:02; ABCB5; ENSG00000004846; TAA
RAEEMQENY

SEQ ID NO: 2048 - protein, 9 aa, Homo sapiens
  misc_feature: Table A; Target 2048; HLA-B*35:01; ABCB5; ENSG00000004846; TAA
RAEEMQENY

SEQ ID NO: 2049 - protein, 9 aa, Homo sapiens
  misc_feature: Table A; Target 2049; HLA-B*55:01; ABCB5; ENSG00000004846; TAA
RAEEMQENY

SEQ ID NO: 2050 - protein, 9 aa, Homo sapiens
  misc_feature: Table A; Target 2050; HLA-B*58:01; ABCB5; ENSG00000004846; TAA
RAEEMQENY

SEQ ID NO: 2051 - protein, 9 aa, Homo sapiens
  misc_feature: Table A; Target 2051; HLA-C*05:01; ABCB5; ENSG00000004846; TAA
RAEEMQENY

SEQ ID NO: 2052 - protein, 8 aa, Homo sapiens
  misc_feature: Table A; Target 2052; HLA-B*58:01; ABCB5; ENSG00000004846; TAA
RAGEILTM

SEQ ID NO: 2053 - protein, 8 aa, Homo sapiens
  misc_feature: Table A; Target 2053; HLA-C*12:03; ABCB5; ENSG00000004846; TAA
RAGEILTM

SEQ ID NO: 2054 - protein, 9 aa, Homo sapiens
  misc_feature: Table A; Target 2054; HLA-A*31:01; ABCB5; ENSG00000004846; TAA
RAGEILTMR

SEQ ID NO: 2055 - protein, 9 aa, Homo sapiens
  misc_feature: Table A; Target 2055; HLA-A*33:01; ABCB5; ENSG00000004846; TAA
RAGEILTMR

SEQ ID NO: 2056 - protein, 9 aa, Homo sapiens
  misc_feature: Table A; Target 2056; HLA-A*33:03; ABCB5; ENSG00000004846; TAA
RAGEILTMR

SEQ ID NO: 2057 - protein, 9 aa, Homo sapiens
  misc_feature: Table A; Target 2057; HLA-A*68:01; ABCB5; ENSG00000004846; TAA
RAGEILTMR

SEQ ID NO: 2058 - protein, 9 aa, Homo sapiens
  misc_feature: Table A; Target 2058; HLA-C*07:06; ABCB5; ENSG00000004846; TAA
RAGEILTMR

SEQ ID NO: 2059 - protein, 8 aa, Homo sapiens
  misc_feature: Table A; Target 2059; HLA-B*57:01; ABCB5; ENSG00000004846; TAA
RALNVRHY

SEQ ID NO: 2060 - protein, 9 aa, Homo sapiens
  misc_feature: Table A; Target 2060; HLA-A*31:01; ABCB5; ENSG00000004846; TAA
RALNVRHYR

SEQ ID NO: 2061 - protein, 9 aa, Homo sapiens
  misc_feature: Table A; Target 2061; HLA-A*31:01; ABCB5; ENSG00000004846; TAA
RAQEKELQR

SEQ ID NO: 2062 - protein, 10 aa, Homo sapiens
  misc_feature: Table A; Target 2062; HLA-A*30:02; ABCB5; ENSG00000004846; TAA
RAQEKELQRY

SEQ ID NO: 2063 - protein, 8 aa, Homo sapiens
  misc_feature: Table A; Target 2063; HLA-B*18:01; ABCB5; ENSG00000004846; TAA
REANAYDF

SEQ ID NO: 2064 - protein, 8 aa, Homo sapiens
  misc_feature: Table A; Target 2064; HLA-B*37:01; ABCB5; ENSG00000004846; TAA
REANAYDF

SEQ ID NO: 2065 - protein, 9 aa, Homo sapiens
  misc_feature: Table A; Target 2065; HLA-B*49:01; ABCB5; ENSG00000004846; TAA
REANAYDFI

SEQ ID NO: 2066 - protein, 8 aa, Homo sapiens
  misc_feature: Table A; Target 2066; HLA-B*37:01; ABCB5; ENSG00000004846; TAA
REKAFEQM

SEQ ID NO: 2067 - protein, 9 aa, Homo sapiens
  misc_feature: Table A; Target 2067; HLA-B*44:02; ABCB5; ENSG00000004846; TAA
REKAFEQMY

SEQ ID NO: 2068 - protein, 9 aa, Homo sapiens
  misc_feature: Table A; Target 2068; HLA-B*44:03; ABCB5; ENSG00000004846; TAA
REKAFEQMY

SEQ ID NO: 2069 - protein, 10 aa, Homo sapiens
  misc_feature: Table A; Target 2069; HLA-A*23:01; ABCB5; ENSG00000004846; TAA
RFADGLDITL

SEQ ID NO: 2070 - protein, 9 aa, Homo sapiens
  misc_feature: Table A; Target 2070; HLA-A*31:01; ABCB5; ENSG00000004846; TAA
RGLSLSIER

SEQ ID NO: 2071 - protein, 11 aa, Homo sapiens
  misc_feature: Table A; Target 2071; HLA-A*03:01; ABCB5; ENSG00000004846; TAA
RLAIARALLQK

SEQ ID NO: 2072 - protein, 11 aa, Homo sapiens
  misc_feature: Table A; Target 2072; HLA-A*02:04; ABCB5; ENSG00000004846; TAA
RLYDPDDGFIM

SEQ ID NO: 2073 - protein, 11 aa, Homo sapiens
  misc_feature: Table A; Target 2073; HLA-A*02:07; ABCB5; ENSG00000004846; TAA
RLYDPDDGFIM

SEQ ID NO: 2074 - protein, 9 aa, Homo sapiens
  misc_feature: Table A; Target 2074; HLA-A*03:01; ABCB5; ENSG00000004846; TAA
RLYDPVQGQ

SEQ ID NO: 2075 - protein, 10 aa, Homo sapiens
  misc_feature: Table A; Target 2075; HLA-A*02:01; ABCB5; ENSG00000004846; TAA
RLYDPVQGQV

SEQ ID NO: 2076 - protein, 10 aa, Homo sapiens
  misc_feature: Table A; Target 2076; HLA-A*02:03; ABCB5; ENSG00000004846; TAA
RLYDPVQGQV

SEQ ID NO: 2077 - protein, 10 aa, Homo sapiens
  misc_feature: Table A; Target 2077; HLA-A*02:04; ABCB5; ENSG00000004846; TAA
RLYDPVQGQV

SEQ ID NO: 2078 - protein, 10 aa, Homo sapiens
  misc_feature: Table A; Target 2078; HLA-A*02:07; ABCB5; ENSG00000004846; TAA
RLYDPVQGQV

SEQ ID NO: 2079 - protein, 10 aa, Homo sapiens
  misc_feature: Table A; Target 2079; HLA-A*03:01; ABCB5; ENSG00000004846; TAA
RLYDPVQGQV

SEQ ID NO: 2080 - protein, 10 aa, Homo sapiens
  misc_feature: Table A; Target 2080; HLA-B*13:02; ABCB5; ENSG00000004846; TAA
RLYDPVQGQV

SEQ ID NO: 2081 - protein, 10 aa, Homo sapiens
  misc_feature: Table A; Target 2081; HLA-B*55:01; ABCB5; ENSG00000004846; TAA
RLYDPVQGQV

SEQ ID NO: 2082 - protein, 11 aa, Homo sapiens
  misc_feature: Table A; Target 2082; HLA-A*02:01; ABCB5; ENSG00000004846; TAA
RLYDPVQGQVL

SEQ ID NO: 2083 - protein, 11 aa, Homo sapiens
  misc_feature: Table A; Target 2083; HLA-A*02:03; ABCB5; ENSG00000004846; TAA
RLYDPVQGQVL

SEQ ID NO: 2084 - protein, 11 aa, Homo sapiens
  misc_feature: Table A; Target 2084; HLA-A*02:04; ABCB5; ENSG00000004846; TAA
RLYDPVQGQVL

SEQ ID NO: 2085 - protein, 11 aa, Homo sapiens
  misc_feature: Table A; Target 2085; HLA-A*02:07; ABCB5; ENSG00000004846; TAA
RLYDPVQGQVL

SEQ ID NO: 2086 - protein, 11 aa, Homo sapiens
  misc_feature: Table A; Target 2086; HLA-A*03:01; ABCB5; ENSG00000004846; TAA
RLYDPVQGQVL

SEQ ID NO: 2087 - protein, 11 aa, Homo sapiens
  misc_feature: Table A; Target 2087; HLA-A*03:02; ABCB5; ENSG00000004846; TAA
RLYDPVQGQVL

SEQ ID NO: 2088 - protein, 11 aa, Homo sapiens
  misc_feature: Table A; Target 2088; HLA-A*23:01; ABCB5; ENSG00000004846; TAA
RLYDPVQGQVL

SEQ ID NO: 2089 - protein, 11 aa, Homo sapiens
  misc_feature: Table A; Target 2089; HLA-A*31:01; ABCB5; ENSG00000004846; TAA
RLYDPVQGQVL

SEQ ID NO: 2090 - protein, 11 aa, Homo sapiens
  misc_feature: Table A; Target 2090; HLA-A*32:01; ABCB5; ENSG00000004846; TAA
RLYDPVQGQVL

SEQ ID NO: 2091 - protein, 11 aa, Homo sapiens
  misc_feature: Table A; Target 2091; HLA-B*13:02; ABCB5; ENSG00000004846; TAA
RLYDPVQGQVL

SEQ ID NO: 2092 - protein, 11 aa, Homo sapiens
  misc_feature: Table A; Target 2092; HLA-B*15:01; ABCB5; ENSG00000004846; TAA
RLYDPVQGQVL

SEQ ID NO: 2093 - protein, 11 aa, Homo sapiens
  misc_feature: Table A; Target 2093; HLA-B*15:03; ABCB5; ENSG00000004846; TAA
RLYDPVQGQVL

SEQ ID NO: 2094 - protein, 11 aa, Homo sapiens
  misc_feature: Table A; Target 2094; HLA-C*03:04; ABCB5; ENSG00000004846; TAA
RLYDPVQGQVL

SEQ ID NO: 2095 - protein, 11 aa, Homo sapiens
  misc_feature: Table A; Target 2095; HLA-C*16:02; ABCB5; ENSG00000004846; TAA
RLYDPVQGQVL

SEQ ID NO: 2096 - protein, 9 aa, Homo sapiens
  misc_feature: Table A; Target 2096; HLA-A*02:01; ABCB5; ENSG00000004846; TAA
RMTDDIDKI

SEQ ID NO: 2097 - protein, 9 aa, Homo sapiens
  misc_feature: Table A; Target 2097; HLA-B*13:02; ABCB5; ENSG00000004846; TAA
RMTDDIDKI

SEQ ID NO: 2098 - protein, 9 aa, Homo sapiens
  misc_feature: Table A; Target 2098; HLA-B*55:01; ABCB5; ENSG00000004846; TAA
RMTDDIDKI

SEQ ID NO: 2099 - protein, 11 aa, Homo sapiens
  misc_feature: Table A; Target 2099; HLA-A*24:02; ABCB5; ENSG00000004846; TAA
RMTPEGMFIVF

SEQ ID NO: 2100 - protein, 11 aa, Homo sapiens
  misc_feature: Table A; Target 2100; HLA-B*57:01; ABCB5; ENSG00000004846; TAA
RMTPEGMFIVF

SEQ ID NO: 2101 - protein, 9 aa, Homo sapiens
  misc_feature: Table A; Target 2101; HLA-A*03:01; ABCB5; ENSG00000004846; TAA
RMVISLTSK

SEQ ID NO: 2102 - protein, 9 aa, Homo sapiens
  misc_feature: Table A; Target 2102; HLA-A*03:02; ABCB5; ENSG00000004846; TAA
RMVISLTSK

SEQ ID NO: 2103 - protein, 9 aa, Homo sapiens
  misc_feature: Table A; Target 2103; HLA-A*02:04; ABCB5; ENSG00000004846; TAA
RSADLIVTL

SEQ ID NO: 2104 - protein, 9 aa, Homo sapiens
  misc_feature: Table A; Target 2104; HLA-A*23:01; ABCB5; ENSG00000004846; TAA
RSADLIVTL

SEQ ID NO: 2105 - protein, 9 aa, Homo sapiens
  misc_feature: Table A; Target 2105; HLA-A*32:01; ABCB5; ENSG00000004846; TAA
RSADLIVTL

SEQ ID NO: 2106 - protein, 9 aa, Homo sapiens
  misc_feature: Table A; Target 2106; HLA-A*68:02; ABCB5; ENSG00000004846; TAA
RSADLIVTL

SEQ ID NO: 2107 - protein, 9 aa, Homo sapiens
  misc_feature: Table A; Target 2107; HLA-B*27:05; ABCB5; ENSG00000004846; TAA
RSADLIVTL

SEQ ID NO: 2108 - protein, 9 aa, Homo sapiens
  misc_feature: Table A; Target 2108; HLA-B*57:01; ABCB5; ENSG00000004846; TAA
RSADLIVTL

SEQ ID NO: 2109 - protein, 9 aa, Homo sapiens
  misc_feature: Table A; Target 2109; HLA-B*58:01; ABCB5; ENSG00000004846; TAA
RSADLIVTL

SEQ ID NO: 2110 - protein, 9 aa, Homo sapiens
  misc_feature: Table A; Target 2110; HLA-C*02:02; ABCB5; ENSG00000004846; TAA
RSADLIVTL

SEQ ID NO: 2111 - protein, 9 aa, Homo sapiens
  misc_feature: Table A; Target 2111; HLA-C*12:03; ABCB5; ENSG00000004846; TAA
RSADLIVTL

SEQ ID NO: 2112 - protein, 10 aa, Homo sapiens
  misc_feature: Table A; Target 2112; HLA-A*03:01; ABCB5; ENSG00000004846; TAA
RSADLIVTLK

SEQ ID NO: 2113 - protein, 10 aa, Homo sapiens
  misc_feature: Table A; Target 2113; HLA-A*03:02; ABCB5; ENSG00000004846; TAA
RSADLIVTLK

SEQ ID NO: 2114 - protein, 10 aa, Homo sapiens
  misc_feature: Table A; Target 2114; HLA-A*11:01; ABCB5; ENSG00000004846; TAA
RSADLIVTLK

SEQ ID NO: 2115 - protein, 10 aa, Homo sapiens
  misc_feature: Table A; Target 2115; HLA-B*27:02; ABCB5; ENSG00000004846; TAA
RSADLIVTLK

SEQ ID NO: 2116 - protein, 10 aa, Homo sapiens
  misc_feature: Table A; Target 2116; HLA-B*57:01; ABCB5; ENSG00000004846; TAA
RSADLIVTLK

SEQ ID NO: 2117 - protein, 9 aa, Homo sapiens
  misc_feature: Table A; Target 2117; HLA-A*03:01; ABCB5; ENSG00000004846; TAA
RTCLVVTHR

SEQ ID NO: 2118 - protein, 9 aa, Homo sapiens
  misc_feature: Table A; Target 2118; HLA-A*31:01; ABCB5; ENSG00000004846; TAA
RTCLVVTHR

SEQ ID NO: 2119 - protein, 9 aa, Homo sapiens
  misc_feature: Table A; Target 2119; HLA-A*32:01; ABCB5; ENSG00000004846; TAA
RTIASKVSL

SEQ ID NO: 2120 - protein, 9 aa, Homo sapiens
  misc_feature: Table A; Target 2120; HLA-B*58:01; ABCB5; ENSG00000004846; TAA
RTIASKVSL

SEQ ID NO: 2121 - protein, 9 aa, Homo sapiens
  misc_feature: Table A; Target 2121; HLA-C*03:04; ABCB5; ENSG00000004846; TAA
RTIASKVSL

SEQ ID NO: 2122 - protein, 10 aa, Homo sapiens
  misc_feature: Table A; Target 2122; HLA-A*03:01; ABCB5; ENSG00000004846; TAA
RTIVSLTREK

SEQ ID NO: 2123 - protein, 10 aa, Homo sapiens
  misc_feature: Table A; Target 2123; HLA-A*11:01; ABCB5; ENSG00000004846; TAA
RTIVSLTREK

SEQ ID NO: 2124 - protein, 9 aa, Homo sapiens
  misc_feature: Table A; Target 2124; HLA-A*03:01; ABCB5; ENSG00000004846; TAA
RTTIVVAHR

SEQ ID NO: 2125 - protein, 9 aa, Homo sapiens
  misc_feature: Table A; Target 2125; HLA-A*03:02; ABCB5; ENSG00000004846; TAA
RTTIVVAHR

SEQ ID NO: 2126 - protein, 9 aa, Homo sapiens
  misc_feature: Table A; Target 2126; HLA-A*11:01; ABCB5; ENSG00000004846; TAA
RTTIVVAHR

SEQ ID NO: 2127 - protein, 9 aa, Homo sapiens
  misc_feature: Table A; Target 2127; HLA-A*31:01; ABCB5; ENSG00000004846; TAA
RTTIVVAHR

SEQ ID NO: 2128 - protein, 9 aa, Homo sapiens
  misc_feature: Table A; Target 2128; HLA-A*33:01; ABCB5; ENSG00000004846; TAA
RTTIVVAHR

SEQ ID NO: 2129 - protein, 9 aa, Homo sapiens
  misc_feature: Table A; Target 2129; HLA-A*33:03; ABCB5; ENSG00000004846; TAA
RTTIVVAHR

SEQ ID NO: 2130 - protein, 9 aa, Homo sapiens
  misc_feature: Table A; Target 2130; HLA-A*68:01; ABCB5; ENSG00000004846; TAA
RTTIVVAHR

SEQ ID NO: 2131 - protein, 9 aa, Homo sapiens
  misc_feature: Table A; Target 2131; HLA-B*57:01; ABCB5; ENSG00000004846; TAA
RTTIVVAHR

SEQ ID NO: 2132 - protein, 9 aa, Homo sapiens
  misc_feature: Table A; Target 2132; HLA-C*07:06; ABCB5; ENSG00000004846; TAA
RTTIVVAHR

SEQ ID NO: 2133 - protein, 9 aa, Homo sapiens
  misc_feature: Table A; Target 2133; HLA-C*06:02; ABCB5; ENSG00000004846; TAA
SAAACSRMV

SEQ ID NO: 2134 - protein, 9 aa, Homo sapiens
  misc_feature: Table A; Target 2134; HLA-C*16:02; ABCB5; ENSG00000004846; TAA
SAAACSRMV

SEQ ID NO: 2135 - protein, 8 aa, Homo sapiens
  misc_feature: Table A; Target 2135; HLA-B*35:03; ABCB5; ENSG00000004846; TAA
SADLIVTL

SEQ ID NO: 2136 - protein, 8 aa, Homo sapiens
  misc_feature: Table A; Target 2136; HLA-B*38:01; ABCB5; ENSG00000004846; TAA
SADLIVTL

SEQ ID NO: 2137 - protein, 8 aa, Homo sapiens
  misc_feature: Table A; Target 2137; HLA-C*03:04; ABCB5; ENSG00000004846; TAA
SADLIVTL

SEQ ID NO: 2138 - protein, 8 aa, Homo sapiens
  misc_feature: Table A; Target 2138; HLA-C*04:01; ABCB5; ENSG00000004846; TAA
SADLIVTL

SEQ ID NO: 2139 - protein, 8 aa, Homo sapiens
  misc_feature: Table A; Target 2139; HLA-C*05:01; ABCB5; ENSG00000004846; TAA
SADLIVTL

SEQ ID NO: 2140 - protein, 8 aa, Homo sapiens
  misc_feature: Table A; Target 2140; HLA-C*07:04; ABCB5; ENSG00000004846; TAA
SADLIVTL

SEQ ID NO: 2141 - protein, 9 aa, Homo sapiens
  misc_feature: Table A; Target 2141; HLA-A*01:01; ABCB5; ENSG00000004846; TAA
SADLIVTLK

SEQ ID NO: 2142 - protein, 9 aa, Homo sapiens
  misc_feature: Table A; Target 2142; HLA-A*03:02; ABCB5; ENSG00000004846; TAA
SADLIVTLK

SEQ ID NO: 2143 - protein, 9 aa, Homo sapiens
  misc_feature: Table A; Target 2143; HLA-A*11:01; ABCB5; ENSG00000004846; TAA
SADLIVTLK

SEQ ID NO: 2144 - protein, 9 aa, Homo sapiens
  misc_feature: Table A; Target 2144; HLA-C*05:01; ABCB5; ENSG00000004846; TAA
SADLIVTLK

SEQ ID NO: 2145 - protein, 9 aa, Homo sapiens
  misc_feature: Table A; Target 2145; HLA-C*07:06; ABCB5; ENSG00000004846; TAA
SADLIVTLK

SEQ ID NO: 2146 - protein, 11 aa, Homo sapiens
  misc_feature: Table A; Target 2146; HLA-C*01:02; ABCB5; ENSG00000004846; TAA
SALDSESKSAV

SEQ ID NO: 2147 - protein, 11 aa, Homo sapiens
  misc_feature: Table A; Target 2147; HLA-C*03:03; ABCB5; ENSG00000004846; TAA
SALDSESKSAV

SEQ ID NO: 2148 - protein, 11 aa, Homo sapiens
  misc_feature: Table A; Target 2148; HLA-C*03:04; ABCB5; ENSG00000004846; TAA
SALDSESKSAV

SEQ ID NO: 2149 - protein, 11 aa, Homo sapiens
  misc_feature: Table A; Target 2149; HLA-C*16:02; ABCB5; ENSG00000004846; TAA
SALDSESKSAV

SEQ ID NO: 2150 - protein, 11 aa, Homo sapiens
  misc_feature: Table A; Target 2150; HLA-C*16:04; ABCB5; ENSG00000004846; TAA
SALDSESKSAV

SEQ ID NO: 2151 - protein, 9 aa, Homo sapiens
  misc_feature: Table A; Target 2151; HLA-A*03:01; ABCB5; ENSG00000004846; TAA
SAVQAALEK

SEQ ID NO: 2152 - protein, 9 aa, Homo sapiens
  misc_feature: Table A; Target 2152; HLA-A*03:02; ABCB5; ENSG00000004846; TAA
SAVQAALEK

SEQ ID NO: 2153 - protein, 9 aa, Homo sapiens
  misc_feature: Table A; Target 2153; HLA-A*11:01; ABCB5; ENSG00000004846; TAA
SAVQAALEK

SEQ ID NO: 2154 - protein, 9 aa, Homo sapiens
  misc_feature: Table A; Target 2154; HLA-A*68:01; ABCB5; ENSG00000004846; TAA
SAVQAALEK

SEQ ID NO: 2155 - protein, 9 aa, Homo sapiens
  misc_feature: Table A; Target 2155; HLA-C*03:03; ABCB5; ENSG00000004846; TAA
SAVQAALEK

SEQ ID NO: 2156 - protein, 9 aa, Homo sapiens
  misc_feature: Table A; Target 2156; HLA-C*07:06; ABCB5; ENSG00000004846; TAA
SAVQAALEK

SEQ ID NO: 2157 - protein, 8 aa, Homo sapiens
  misc_feature: Table A; Target 2157; HLA-B*08:01; ABCB5; ENSG00000004846; TAA
SAYSKAGA

SEQ ID NO: 2158 - protein, 9 aa, Homo sapiens
  misc_feature: Table A; Target 2158; HLA-A*02:03; ABCB5; ENSG00000004846; TAA
SAYSKAGAV

SEQ ID NO: 2159 - protein, 9 aa, Homo sapiens
  misc_feature: Table A; Target 2159; HLA-B*08:01; ABCB5; ENSG00000004846; TAA
SAYSKAGAV

SEQ ID NO: 2160 - protein, 9 aa, Homo sapiens
  misc_feature: Table A; Target 2160; HLA-B*13:02; ABCB5; ENSG00000004846; TAA
SAYSKAGAV

SEQ ID NO: 2161 - protein, 9 aa, Homo sapiens
  misc_feature: Table A; Target 2161; HLA-B*51:01; ABCB5; ENSG00000004846; TAA
SAYSKAGAV

SEQ ID NO: 2162 - protein, 9 aa, Homo sapiens
  misc_feature: Table A; Target 2162; HLA-B*56:01; ABCB5; ENSG00000004846; TAA
SAYSKAGAV

SEQ ID NO: 2163 - protein, 9 aa, Homo sapiens
  misc_feature: Table A; Target 2163; HLA-C*02:02; ABCB5; ENSG00000004846; TAA
SAYSKAGAV

SEQ ID NO: 2164 - protein, 9 aa, Homo sapiens
  misc_feature: Table A; Target 2164; HLA-C*03:03; ABCB5; ENSG00000004846; TAA
SAYSKAGAV

SEQ ID NO: 2165 - protein, 9 aa, Homo sapiens
  misc_feature: Table A; Target 2165; HLA-C*03:04; ABCB5; ENSG00000004846; TAA
SAYSKAGAV

SEQ ID NO: 2166 - protein, 9 aa, Homo sapiens
  misc_feature: Table A; Target 2166; HLA-C*12:03; ABCB5; ENSG00000004846; TAA
SAYSKAGAV

SEQ ID NO: 2167 - protein, 9 aa, Homo sapiens
  misc_feature: Table A; Target 2167; HLA-C*16:02; ABCB5; ENSG00000004846; TAA
SAYSKAGAV

SEQ ID NO: 2168 - protein, 10 aa, Homo sapiens
  misc_feature: Table A; Target 2168; HLA-B*56:01; ABCB5; ENSG00000004846; TAA
SAYSKAGAVA

SEQ ID NO: 2169 - protein, 8 aa, Homo sapiens
  misc_feature: Table A; Target 2169; HLA-B*37:01; ABCB5; ENSG00000004846; TAA
SDNLISGC

SEQ ID NO: 2170 - protein, 9 aa, Homo sapiens
  misc_feature: Table A; Target 2170; HLA-A*30:01; ABCB5; ENSG00000004846; TAA
SDNLISGCL

SEQ ID NO: 2171 - protein, 9 aa, Homo sapiens
  misc_feature: Table A; Target 2171; HLA-B*37:01; ABCB5; ENSG00000004846; TAA
SDNLISGCL

SEQ ID NO: 2172 - protein, 8 aa, Homo sapiens
  misc_feature: Table A; Target 2172; HLA-B*37:01; ABCB5; ENSG00000004846; TAA
SEKVVQHA

SEQ ID NO: 2173 - protein, 9 aa, Homo sapiens
  misc_feature: Table A; Target 2173; HLA-A*30:01; ABCB5; ENSG00000004846; TAA
SEKVVQHAL

SEQ ID NO: 2174 - protein, 9 aa, Homo sapiens
  misc_feature: Table A; Target 2174; HLA-B*07:02; ABCB5; ENSG00000004846; TAA
SEKVVQHAL

SEQ ID NO: 2175 - protein, 9 aa, Homo sapiens
  misc_feature: Table A; Target 2175; HLA-B*08:01; ABCB5; ENSG00000004846; TAA
SEKVVQHAL

SEQ ID NO: 2176 - protein, 9 aa, Homo sapiens
  misc_feature: Table A; Target 2176; HLA-B*18:01; ABCB5; ENSG00000004846; TAA
SEKVVQHAL

SEQ ID NO: 2177 - protein, 9 aa, Homo sapiens
  misc_feature: Table A; Target 2177; HLA-B*27:02; ABCB5; ENSG00000004846; TAA
SEKVVQHAL

SEQ ID NO: 2178 - protein, 9 aa, Homo sapiens
  misc_feature: Table A; Target 2178; HLA-B*37:01; ABCB5; ENSG00000004846; TAA
SEKVVQHAL

SEQ ID NO: 2179 - protein, 9 aa, Homo sapiens
  misc_feature: Table A; Target 2179; HLA-B*40:01; ABCB5; ENSG00000004846; TAA
SEKVVQHAL

SEQ ID NO: 2180 - protein, 9 aa, Homo sapiens
  misc_feature: Table A; Target 2180; HLA-B*40:02; ABCB5; ENSG00000004846; TAA
SEKVVQHAL

SEQ ID NO: 2181 - protein, 9 aa, Homo sapiens
  misc_feature: Table A; Target 2181; HLA-B*44:02; ABCB5; ENSG00000004846; TAA
SEKVVQHAL

SEQ ID NO: 2182 - protein, 9 aa, Homo sapiens
  misc_feature: Table A; Target 2182; HLA-B*44:03; ABCB5; ENSG00000004846; TAA
SEKVVQHAL

SEQ ID NO: 2183 - protein, 9 aa, Homo sapiens
  misc_feature: Table A; Target 2183; HLA-B*49:01; ABCB5; ENSG00000004846; TAA
SEKVVQHAL

SEQ ID NO: 2184 - protein, 9 aa, Homo sapiens
  misc_feature: Table A; Target 2184; HLA-C*16:04; ABCB5; ENSG00000004846; TAA
SEKVVQHAL

SEQ ID NO: 2185 - protein, 11 aa, Homo sapiens
  misc_feature: Table A; Target 2185; HLA-A*30:02; ABCB5; ENSG00000004846; TAA
SERAEEMQENY

SEQ ID NO: 2186 - protein, 9 aa, Homo sapiens
  misc_feature: Table A; Target 2186; HLA-A*30:01; ABCB5; ENSG00000004846; TAA
SESKSAVQA

SEQ ID NO: 2187 - protein, 9 aa, Homo sapiens
  misc_feature: Table A; Target 2187; HLA-B*40:01; ABCB5; ENSG00000004846; TAA
SESKSAVQA

SEQ ID NO: 2188 - protein, 9 aa, Homo sapiens
  misc_feature: Table A; Target 2188; HLA-B*49:01; ABCB5; ENSG00000004846; TAA
SESKSAVQA

SEQ ID NO: 2189 - protein, 11 aa, Homo sapiens
  misc_feature: Table A; Target 2189; HLA-A*30:01; ABCB5; ENSG00000004846; TAA
SESKSAVQAAL

SEQ ID NO: 2190 - protein, 11 aa, Homo sapiens
  misc_feature: Table A; Target 2190; HLA-B*40:01; ABCB5; ENSG00000004846; TAA
SESKSAVQAAL

SEQ ID NO: 2191 - protein, 11 aa, Homo sapiens
  misc_feature: Table A; Target 2191; HLA-B*44:03; ABCB5; ENSG00000004846; TAA
SESKSAVQAAL

SEQ ID NO: 2192 - protein, 10 aa, Homo sapiens
  misc_feature: Table A; Target 2192; HLA-A*23:01; ABCB5; ENSG00000004846; TAA
SFIEGLPEKY

SEQ ID NO: 2193 - protein, 10 aa, Homo sapiens
  misc_feature: Table A; Target 2193; HLA-A*29:02; ABCB5; ENSG00000004846; TAA
SFIEGLPEKY

SEQ ID NO: 2194 - protein, 10 aa, Homo sapiens
  misc_feature: Table A; Target 2194; HLA-A*30:02; ABCB5; ENSG00000004846; TAA
SFIEGLPEKY

SEQ ID NO: 2195 - protein, 9 aa, Homo sapiens
  misc_feature: Table A; Target 2195; HLA-A*02:04; ABCB5; ENSG00000004846; TAA
SGAAHLFAL

SEQ ID NO: 2196 - protein, 9 aa, Homo sapiens
  misc_feature: Table A; Target 2196; HLA-C*16:01; ABCB5; ENSG00000004846; TAA
SGAAHLFAL

SEQ ID NO: 2197 - protein, 9 aa, Homo sapiens
  misc_feature: Table A; Target 2197; HLA-B*08:01; ABCB5; ENSG00000004846; TAA
SGCGKSTSV

SEQ ID NO: 2198 - protein, 9 aa, Homo sapiens
  misc_feature: Table A; Target 2198; HLA-A*29:02; ABCB5; ENSG00000004846; TAA
SHAFIYFAY

SEQ ID NO: 2199 - protein, 8 aa, Homo sapiens
  misc_feature: Table A; Target 2199; HLA-A*30:02; ABCB5; ENSG00000004846; TAA
SIAENIAY

SEQ ID NO: 2200 - protein, 8 aa, Homo sapiens
  misc_feature: Table A; Target 2200; HLA-B*15:01; ABCB5; ENSG00000004846; TAA
SIAENIAY

SEQ ID NO: 2201 - protein, 8 aa, Homo sapiens
  misc_feature: Table A; Target 2201; HLA-B*39:01; ABCB5; ENSG00000004846; TAA
SIAENIAY

SEQ ID NO: 2202 - protein, 8 aa, Homo sapiens
  misc_feature: Table A; Target 2202; HLA-B*46:01; ABCB5; ENSG00000004846; TAA
SIAENIAY

SEQ ID NO: 2203 - protein, 8 aa, Homo sapiens
  misc_feature: Table A; Target 2203; HLA-C*01:02; ABCB5; ENSG00000004846; TAA
SIAENIAY

SEQ ID NO: 2204 - protein, 8 aa, Homo sapiens
  misc_feature: Table A; Target 2204; HLA-C*03:03; ABCB5; ENSG00000004846; TAA
SIAENIAY

SEQ ID NO: 2205 - protein, 8 aa, Homo sapiens
  misc_feature: Table A; Target 2205; HLA-C*07:04; ABCB5; ENSG00000004846; TAA
SIAENIAY

SEQ ID NO: 2206 - protein, 8 aa, Homo sapiens
  misc_feature: Table A; Target 2206; HLA-C*14:02; ABCB5; ENSG00000004846; TAA
SIAENIAY

SEQ ID NO: 2207 - protein, 8 aa, Homo sapiens
  misc_feature: Table A; Target 2207; HLA-C*16:01; ABCB5; ENSG00000004846; TAA
SIAENIAY

SEQ ID NO: 2208 - protein, 9 aa, Homo sapiens
  misc_feature: Table A; Target 2208; HLA-A*26:01; ABCB5; ENSG00000004846; TAA
SIAENIAYG

SEQ ID NO: 2209 - protein, 8 aa, Homo sapiens
  misc_feature: Table A; Target 2209; HLA-A*02:03; ABCB5; ENSG00000004846; TAA
SIAPVLAV

SEQ ID NO: 2210 - protein, 8 aa, Homo sapiens
  misc_feature: Table A; Target 2210; HLA-B*13:02; ABCB5; ENSG00000004846; TAA
SIAPVLAV

SEQ ID NO: 2211 - protein, 9 aa, Homo sapiens
  misc_feature: Table A; Target 2211; HLA-B*46:01; ABCB5; ENSG00000004846; TAA
SIAPVLAVT

SEQ ID NO: 2212 - protein, 11 aa, Homo sapiens
  misc_feature: Table A; Target 2212; HLA-A*26:01; ABCB5; ENSG00000004846; TAA
SIAPVLAVTGM

SEQ ID NO: 2213 - protein, 8 aa, Homo sapiens
  misc_feature: Table A; Target 2213; HLA-C*05:01; ABCB5; ENSG00000004846; TAA
SIDNFSTA

SEQ ID NO: 2214 - protein, 10 aa, Homo sapiens
  misc_feature: Table A; Target 2214; HLA-A*01:01; ABCB5; ENSG00000004846; TAA
SIDNFSTAGY

SEQ ID NO: 2215 - protein, 10 aa, Homo sapiens
  misc_feature: Table A; Target 2215; HLA-A*25:01; ABCB5; ENSG00000004846; TAA
SIDNFSTAGY

SEQ ID NO: 2216 - protein, 10 aa, Homo sapiens
  misc_feature: Table A; Target 2216; HLA-A*26:01; ABCB5; ENSG00000004846; TAA
SIDNFSTAGY

SEQ ID NO: 2217 - protein, 10 aa, Homo sapiens
  misc_feature: Table A; Target 2217; HLA-A*29:02; ABCB5; ENSG00000004846; TAA
SIDNFSTAGY

SEQ ID NO: 2218 - protein, 10 aa, Homo sapiens
  misc_feature: Table A; Target 2218; HLA-A*30:02; ABCB5; ENSG00000004846; TAA
SIDNFSTAGY

SEQ ID NO: 2219 - protein, 10 aa, Homo sapiens
  misc_feature: Table A; Target 2219; HLA-A*32:01; ABCB5; ENSG00000004846; TAA
SIDNFSTAGY

SEQ ID NO: 2220 - protein, 10 aa, Homo sapiens
  misc_feature: Table A; Target 2220; HLA-B*15:01; ABCB5; ENSG00000004846; TAA
SIDNFSTAGY

SEQ ID NO: 2221 - protein, 10 aa, Homo sapiens
  misc_feature: Table A; Target 2221; HLA-B*46:01; ABCB5; ENSG00000004846; TAA
SIDNFSTAGY

SEQ ID NO: 2222 - protein, 10 aa, Homo sapiens
  misc_feature: Table A; Target 2222; HLA-C*07:04; ABCB5; ENSG00000004846; TAA
SIDNFSTAGY

SEQ ID NO: 2223 - protein, 11 aa, Homo sapiens
  misc_feature: Table A; Target 2223; HLA-A*03:01; ABCB5; ENSG00000004846; TAA
SIDNFSTAGYK

SEQ ID NO: 2224 - protein, 11 aa, Homo sapiens
  misc_feature: Table A; Target 2224; HLA-A*03:02; ABCB5; ENSG00000004846; TAA
SIDNFSTAGYK

SEQ ID NO: 2225 - protein, 11 aa, Homo sapiens
  misc_feature: Table A; Target 2225; HLA-A*11:01; ABCB5; ENSG00000004846; TAA
SIDNFSTAGYK

SEQ ID NO: 2226 - protein, 8 aa, Homo sapiens
  misc_feature: Table A; Target 2226; HLA-C*05:01; ABCB5; ENSG00000004846; TAA
SIEGTVEF

SEQ ID NO: 2227 - protein, 9 aa, Homo sapiens
  misc_feature: Table A; Target 2227; HLA-A*03:02; ABCB5; ENSG00000004846; TAA
SIEGTVEFK

SEQ ID NO: 2228 - protein, 9 aa, Homo sapiens
  misc_feature: Table A; Target 2228; HLA-A*11:01; ABCB5; ENSG00000004846; TAA
SIEGTVEFK

SEQ ID NO: 2229 - protein, 8 aa, Homo sapiens
  misc_feature: Table A; Target 2229; HLA-C*01:02; ABCB5; ENSG00000004846; TAA
SIGLAVGL

SEQ ID NO: 2230 - protein, 10 aa, Homo sapiens
  misc_feature: Table A; Target 2230; HLA-A*03:01; ABCB5; ENSG00000004846; TAA
SIGLAVGLVK

SEQ ID NO: 2231 - protein, 10 aa, Homo sapiens
  misc_feature: Table A; Target 2231; HLA-A*03:02; ABCB5; ENSG00000004846; TAA
SIGLAVGLVK

SEQ ID NO: 2232 - protein, 10 aa, Homo sapiens
  misc_feature: Table A; Target 2232; HLA-A*11:01; ABCB5; ENSG00000004846; TAA
SIGLAVGLVK

SEQ ID NO: 2233 - protein, 10 aa, Homo sapiens
  misc_feature: Table A; Target 2233; HLA-B*27:02; ABCB5; ENSG00000004846; TAA
SIGLAVGLVK

SEQ ID NO: 2234 - protein, 9 aa, Homo sapiens
  misc_feature: Table A; Target 2234; HLA-A*03:01; ABCB5; ENSG00000004846; TAA
SIKSDFIDK

SEQ ID NO: 2235 - protein, 9 aa, Homo sapiens
  misc_feature: Table A; Target 2235; HLA-A*03:02; ABCB5; ENSG00000004846; TAA
SIKSDFIDK

SEQ ID NO: 2236 - protein, 9 aa, Homo sapiens
  misc_feature: Table A; Target 2236; HLA-A*11:01; ABCB5; ENSG00000004846; TAA
SIKSDFIDK

SEQ ID NO: 2237 - protein, 9 aa, Homo sapiens
  misc_feature: Table A; Target 2237; HLA-A*31:01; ABCB5; ENSG00000004846; TAA
SIKSDFIDK

SEQ ID NO: 2238 - protein, 9 aa, Homo sapiens
  misc_feature: Table A; Target 2238; HLA-A*33:01; ABCB5; ENSG00000004846; TAA
SIKSDFIDK

SEQ ID NO: 2239 - protein, 9 aa, Homo sapiens
  misc_feature: Table A; Target 2239; HLA-A*68:01; ABCB5; ENSG00000004846; TAA
SIKSDFIDK

SEQ ID NO: 2240 - protein, 9 aa, Homo sapiens
  misc_feature: Table A; Target 2240; HLA-B*27:02; ABCB5; ENSG00000004846; TAA
SIKSDFIDK

SEQ ID NO: 2241 - protein, 8 aa, Homo sapiens
  misc_feature: Table A; Target 2241; HLA-B*08:01; ABCB5; ENSG00000004846; TAA
SIRTVIAF

SEQ ID NO: 2242 - protein, 8 aa, Homo sapiens
  misc_feature: Table A; Target 2242; HLA-B*15:01; ABCB5; ENSG00000004846; TAA
SIRTVIAF

SEQ ID NO: 2243 - protein, 8 aa, Homo sapiens
  misc_feature: Table A; Target 2243; HLA-B*37:01; ABCB5; ENSG00000004846; TAA
SIRTVIAF

SEQ ID NO: 2244 - protein, 9 aa, Homo sapiens
  misc_feature: Table A; Target 2244; HLA-A*03:01; ABCB5; ENSG00000004846; TAA
SIRTVIAFR

SEQ ID NO: 2245 - protein, 9 aa, Homo sapiens
  misc_feature: Table A; Target 2245; HLA-A*31:01; ABCB5; ENSG00000004846; TAA
SIRTVIAFR

SEQ ID NO: 2246 - protein, 9 aa, Homo sapiens
  misc_feature: Table A; Target 2246; HLA-A*33:01; ABCB5; ENSG00000004846; TAA
SIRTVIAFR

SEQ ID NO: 2247 - protein, 9 aa, Homo sapiens
  misc_feature: Table A; Target 2247; HLA-A*33:03; ABCB5; ENSG00000004846; TAA
SIRTVIAFR

SEQ ID NO: 2248 - protein, 11 aa, Homo sapiens
  misc_feature: Table A; Target 2248; HLA-B*38:01; ABCB5; ENSG00000004846; TAA
SKAGAVAEEVL

SEQ ID NO: 2249 - protein, 9 aa, Homo sapiens
  misc_feature: Table A; Target 2249; HLA-B*15:03; ABCB5; ENSG00000004846; TAA
SKSAVQAAL

SEQ ID NO: 2250 - protein, 9 aa, Homo sapiens
  misc_feature: Table A; Target 2250; HLA-B*38:01; ABCB5; ENSG00000004846; TAA
SKSAVQAAL

SEQ ID NO: 2251 - protein, 9 aa, Homo sapiens
  misc_feature: Table A; Target 2251; HLA-B*39:01; ABCB5; ENSG00000004846; TAA
SKSAVQAAL

SEQ ID NO: 2252 - protein, 9 aa, Homo sapiens
  misc_feature: Table A; Target 2252; HLA-C*01:02; ABCB5; ENSG00000004846; TAA
SKSAVQAAL

SEQ ID NO: 2253 - protein, 9 aa, Homo sapiens
  misc_feature: Table A; Target 2253; HLA-B*15:03; ABCB5; ENSG00000004846; TAA
SKVSLGAVY

SEQ ID NO: 2254 - protein, 10 aa, Homo sapiens
  misc_feature: Table A; Target 2254; HLA-B*15:03; ABCB5; ENSG00000004846; TAA
SKVSLGAVYF

SEQ ID NO: 2255 - protein, 9 aa, Homo sapiens
  misc_feature: Table A; Target 2255; HLA-A*02:04; ABCB5; ENSG00000004846; TAA
SLGAVYFFM

SEQ ID NO: 2256 - protein, 9 aa, Homo sapiens
  misc_feature: Table A; Target 2256; HLA-A*02:07; ABCB5; ENSG00000004846; TAA
SLGAVYFFM

SEQ ID NO: 2257 - protein, 10 aa, Homo sapiens
  misc_feature: Table A; Target 2257; HLA-A*30:02; ABCB5; ENSG00000004846; TAA
SLILNGEPGY

SEQ ID NO: 2258 - protein, 10 aa, Homo sapiens
  misc_feature: Table A; Target 2258; HLA-B*15:01; ABCB5; ENSG00000004846; TAA
SLILNGEPGY

SEQ ID NO: 2259 - protein, 8 aa, Homo sapiens
  misc_feature: Table A; Target 2259; HLA-A*02:04; ABCB5; ENSG00000004846; TAA
SLLKILKL

SEQ ID NO: 2260 - protein, 8 aa, Homo sapiens
  misc_feature: Table A; Target 2260; HLA-A*02:07; ABCB5; ENSG00000004846; TAA
SLPEVSLL

SEQ ID NO: 2261 - protein, 9 aa, Homo sapiens
  misc_feature: Table A; Target 2261; HLA-A*03:01; ABCB5; ENSG00000004846; TAA
SLPEVSLLK

SEQ ID NO: 2262 - protein, 9 aa, Homo sapiens
  misc_feature: Table A; Target 2262; HLA-A*03:02; ABCB5; ENSG00000004846; TAA
SLPEVSLLK

SEQ ID NO: 2263 - protein, 9 aa, Homo sapiens
  misc_feature: Table A; Target 2263; HLA-A*11:01; ABCB5; ENSG00000004846; TAA
SLPEVSLLK

SEQ ID NO: 2264 - protein, 10 aa, Homo sapiens
  misc_feature: Table A; Target 2264; HLA-A*02:03; ABCB5; ENSG00000004846; TAA
SLPEVSLLKI

SEQ ID NO: 2265 - protein, 10 aa, Homo sapiens
  misc_feature: Table A; Target 2265; HLA-A*02:07; ABCB5; ENSG00000004846; TAA
SLPEVSLLKI

SEQ ID NO: 2266 - protein, 11 aa, Homo sapiens
  misc_feature: Table A; Target 2266; HLA-A*02:04; ABCB5; ENSG00000004846; TAA
SLPEVSLLKIL

SEQ ID NO: 2267 - protein, 11 aa, Homo sapiens
  misc_feature: Table A; Target 2267; HLA-A*02:07; ABCB5; ENSG00000004846; TAA
SLPEVSLLKIL

SEQ ID NO: 2268 - protein, 8 aa, Homo sapiens
  misc_feature: Table A; Target 2268; HLA-C*07:01; ABCB5; ENSG00000004846; TAA
SLPLHSVK

SEQ ID NO: 2269 - protein, 10 aa, Homo sapiens
  misc_feature: Table A; Target 2269; HLA-A*01:01; ABCB5; ENSG00000004846; TAA
SLTSKELSAY

SEQ ID NO: 2270 - protein, 10 aa, Homo sapiens
  misc_feature: Table A; Target 2270; HLA-A*25:01; ABCB5; ENSG00000004846; TAA
SLTSKELSAY

SEQ ID NO: 2271 - protein, 10 aa, Homo sapiens
  misc_feature: Table A; Target 2271; HLA-A*30:02; ABCB5; ENSG00000004846; TAA
SLTSKELSAY

SEQ ID NO: 2272 - protein, 10 aa, Homo sapiens
  misc_feature: Table A; Target 2272; HLA-B*15:01; ABCB5; ENSG00000004846; TAA
SLTSKELSAY

SEQ ID NO: 2273 - protein, 10 aa, Homo sapiens
  misc_feature: Table A; Target 2273; HLA-B*15:03; ABCB5; ENSG00000004846; TAA
SLTSKELSAY

SEQ ID NO: 2274 - protein, 10 aa, Homo sapiens
  misc_feature: Table A; Target 2274; HLA-B*46:01; ABCB5; ENSG00000004846; TAA
SLTSKELSAY

SEQ ID NO: 2275 - protein, 9 aa, Homo sapiens
  misc_feature: Table A; Target 2275; HLA-A*31:01; ABCB5; ENSG00000004846; TAA
SLWIITAAR

SEQ ID NO: 2276 - protein, 9 aa, Homo sapiens
  misc_feature: Table A; Target 2276; HLA-A*02:01; ABCB5; ENSG00000004846; TAA
SMIFVILGV

SEQ ID NO: 2277 - protein, 9 aa, Homo sapiens
  misc_feature: Table A; Target 2277; HLA-A*02:03; ABCB5; ENSG00000004846; TAA
SMIFVILGV

SEQ ID NO: 2278 - protein, 9 aa, Homo sapiens
  misc_feature: Table A; Target 2278; HLA-A*02:04; ABCB5; ENSG00000004846; TAA
SMIFVILGV

SEQ ID NO: 2279 - protein, 9 aa, Homo sapiens
  misc_feature: Table A; Target 2279; HLA-A*02:07; ABCB5; ENSG00000004846; TAA
SMIFVILGV

SEQ ID NO: 2280 - protein, 9 aa, Homo sapiens
  misc_feature: Table A; Target 2280; HLA-B*13:02; ABCB5; ENSG00000004846; TAA
SMIFVILGV

SEQ ID NO: 2281 - protein, 9 aa, Homo sapiens
  misc_feature: Table A; Target 2281; HLA-A*03:02; ABCB5; ENSG00000004846; TAA
SMTYSTERK

SEQ ID NO: 2282 - protein, 8 aa, Homo sapiens
  misc_feature: Table A; Target 2282; HLA-B*54:01; ABCB5; ENSG00000004846; TAA
SPLIMASA

SEQ ID NO: 2283 - protein, 8 aa, Homo sapiens
  misc_feature: Table A; Target 2283; HLA-B*55:01; ABCB5; ENSG00000004846; TAA
SPLIMASA

SEQ ID NO: 2284 - protein, 8 aa, Homo sapiens
  misc_feature: Table A; Target 2284; HLA-B*56:01; ABCB5; ENSG00000004846; TAA
SPLIMASA

SEQ ID NO: 2285 - protein, 9 aa, Homo sapiens
  misc_feature: Table A; Target 2285; HLA-B*54:01; ABCB5; ENSG00000004846; TAA
SPLIMASAA

SEQ ID NO: 2286 - protein, 9 aa, Homo sapiens
  misc_feature: Table A; Target 2286; HLA-B*55:01; ABCB5; ENSG00000004846; TAA
SPLIMASAA

SEQ ID NO: 2287 - protein, 9 aa, Homo sapiens
  misc_feature: Table A; Target 2287; HLA-B*56:01; ABCB5; ENSG00000004846; TAA
SPLIMASAA

SEQ ID NO: 2288 - protein, 10 aa, Homo sapiens
  misc_feature: Table A; Target 2288; HLA-B*56:01; ABCB5; ENSG00000004846; TAA
SPLIMASAAA

SEQ ID NO: 2289 - protein, 11 aa, Homo sapiens
  misc_feature: Table A; Target 2289; HLA-B*38:01; ABCB5; ENSG00000004846; TAA
SQEKLNEDMTL

SEQ ID NO: 2290 - protein, 11 aa, Homo sapiens
  misc_feature: Table A; Target 2290; HLA-B*38:01; ABCB5; ENSG00000004846; TAA
SQEPVLFGTTI

SEQ ID NO: 2291 - protein, 9 aa, Homo sapiens
  misc_feature: Table A; Target 2291; HLA-B*27:05; ABCB5; ENSG00000004846; TAA
SRIGVLTQN

SEQ ID NO: 2292 - protein, 10 aa, Homo sapiens
  misc_feature: Table A; Target 2292; HLA-B*27:05; ABCB5; ENSG00000004846; TAA
SRIGVLTQNA

SEQ ID NO: 2293 - protein, 10 aa, Homo sapiens
  misc_feature: Table A; Target 2293; HLA-B*27:05; ABCB5; ENSG00000004846; TAA
SRMVISLTSK

SEQ ID NO: 2294 - protein, 9 aa, Homo sapiens
  misc_feature: Table A; Target 2294; HLA-C*16:04; ABCB5; ENSG00000004846; TAA
SRVVPLDEI

SEQ ID NO: 2295 - protein, 9 aa, Homo sapiens
  misc_feature: Table A; Target 2295; HLA-A*23:01; ABCB5; ENSG00000004846; TAA
SSIRTVIAF

SEQ ID NO: 2296 - protein, 9 aa, Homo sapiens
  misc_feature: Table A; Target 2296; HLA-A*25:01; ABCB5; ENSG00000004846; TAA
SSIRTVIAF

SEQ ID NO: 2297 - protein, 9 aa, Homo sapiens
  misc_feature: Table A; Target 2297; HLA-A*26:01; ABCB5; ENSG00000004846; TAA
SSIRTVIAF

SEQ ID NO: 2298 - protein, 9 aa, Homo sapiens
  misc_feature: Table A; Target 2298; HLA-A*32:01; ABCB5; ENSG00000004846; TAA
SSIRTVIAF

SEQ ID NO: 2299 - protein, 9 aa, Homo sapiens
  misc_feature: Table A; Target 2299; HLA-B*15:01; ABCB5; ENSG00000004846; TAA
SSIRTVIAF

SEQ ID NO: 2300 - protein, 9 aa, Homo sapiens
  misc_feature: Table A; Target 2300; HLA-B*15:03; ABCB5; ENSG00000004846; TAA
SSIRTVIAF

SEQ ID NO: 2301 - protein, 9 aa, Homo sapiens
  misc_feature: Table A; Target 2301; HLA-B*44:02; ABCB5; ENSG00000004846; TAA
SSIRTVIAF

SEQ ID NO: 2302 - protein, 9 aa, Homo sapiens
  misc_feature: Table A; Target 2302; HLA-B*44:03; ABCB5; ENSG00000004846; TAA
SSIRTVIAF

SEQ ID NO: 2303 - protein, 9 aa, Homo sapiens
  misc_feature: Table A; Target 2303; HLA-B*46:01; ABCB5; ENSG00000004846; TAA
SSIRTVIAF

SEQ ID NO: 2304 - protein, 9 aa, Homo sapiens
  misc_feature: Table A; Target 2304; HLA-B*57:01; ABCB5; ENSG00000004846; TAA
SSIRTVIAF

SEQ ID NO: 2305 - protein, 9 aa, Homo sapiens
  misc_feature: Table A; Target 2305; HLA-B*58:01; ABCB5; ENSG00000004846; TAA
SSIRTVIAF

SEQ ID NO: 2306 - protein, 9 aa, Homo sapiens
  misc_feature: Table A; Target 2306; HLA-C*01:02; ABCB5; ENSG00000004846; TAA
SSIRTVIAF

SEQ ID NO: 2307 - protein, 9 aa, Homo sapiens
  misc_feature: Table A; Target 2307; HLA-C*02:02; ABCB5; ENSG00000004846; TAA
SSIRTVIAF

SEQ ID NO: 2308 - protein, 9 aa, Homo sapiens
  misc_feature: Table A; Target 2308; HLA-C*03:04; ABCB5; ENSG00000004846; TAA
SSIRTVIAF

SEQ ID NO: 2309 - protein, 9 aa, Homo sapiens
  misc_feature: Table A; Target 2309; HLA-C*12:03; ABCB5; ENSG00000004846; TAA
SSIRTVIAF

SEQ ID NO: 2310 - protein, 9 aa, Homo sapiens
  misc_feature: Table A; Target 2310; HLA-C*16:01; ABCB5; ENSG00000004846; TAA
SSIRTVIAF

SEQ ID NO: 2311 - protein, 10 aa, Homo sapiens
  misc_feature: Table A; Target 2311; HLA-A*31:01; ABCB5; ENSG00000004846; TAA
SSIRTVIAFR

SEQ ID NO: 2312 - protein, 9 aa, Homo sapiens
  misc_feature: Table A; Target 2312; HLA-A*02:03; ABCB5; ENSG00000004846; TAA
STFSIGLAV

SEQ ID NO: 2313 - protein, 9 aa, Homo sapiens
  misc_feature: Table A; Target 2313; HLA-A*03:01; ABCB5; ENSG00000004846; TAA
STFSIGLAV

SEQ ID NO: 2314 - protein, 9 aa, Homo sapiens
  misc_feature: Table A; Target 2314; HLA-A*11:01; ABCB5; ENSG00000004846; TAA
STFSIGLAV

SEQ ID NO: 2315 - protein, 9 aa, Homo sapiens
  misc_feature: Table A; Target 2315; HLA-A*26:01; ABCB5; ENSG00000004846; TAA
STFSIGLAV

SEQ ID NO: 2316 - protein, 9 aa, Homo sapiens
  misc_feature: Table A; Target 2316; HLA-A*68:02; ABCB5; ENSG00000004846; TAA
STFSIGLAV

SEQ ID NO: 2317 - protein, 9 aa, Homo sapiens
  misc_feature: Table A; Target 2317; HLA-B*13:02; ABCB5; ENSG00000004846; TAA
STFSIGLAV

SEQ ID NO: 2318 - protein, 9 aa, Homo sapiens
  misc_feature: Table A; Target 2318; HLA-B*54:01; ABCB5; ENSG00000004846; TAA
STFSIGLAV

SEQ ID NO: 2319 - protein, 9 aa, Homo sapiens
  misc_feature: Table A; Target 2319; HLA-B*56:01; ABCB5; ENSG00000004846; TAA
STFSIGLAV

SEQ ID NO: 2320 - protein, 9 aa, Homo sapiens
  misc_feature: Table A; Target 2320; HLA-C*02:02; ABCB5; ENSG00000004846; TAA
STFSIGLAV

SEQ ID NO: 2321 - protein, 9 aa, Homo sapiens
  misc_feature: Table A; Target 2321; HLA-C*03:03; ABCB5; ENSG00000004846; TAA
STFSIGLAV

SEQ ID NO: 2322 - protein, 9 aa, Homo sapiens
  misc_feature: Table A; Target 2322; HLA-C*03:04; ABCB5; ENSG00000004846; TAA
STFSIGLAV

SEQ ID NO: 2323 - protein, 9 aa, Homo sapiens
  misc_feature: Table A; Target 2323; HLA-C*12:03; ABCB5; ENSG00000004846; TAA
STFSIGLAV

SEQ ID NO: 2324 - protein, 9 aa, Homo sapiens
  misc_feature: Table A; Target 2324; HLA-C*16:04; ABCB5; ENSG00000004846; TAA
STFSIGLAV

SEQ ID NO: 2325 - protein, 11 aa, Homo sapiens
  misc_feature: Table A; Target 2325; HLA-A*02:04; ABCB5; ENSG00000004846; TAA
STFSIGLAVGL

SEQ ID NO: 2326 - protein, 11 aa, Homo sapiens
  misc_feature: Table A; Target 2326; HLA-A*68:02; ABCB5; ENSG00000004846; TAA
STFSIGLAVGL

SEQ ID NO: 2327 - protein, 9 aa, Homo sapiens
  misc_feature: Table A; Target 2327; HLA-C*07:04; ABCB5; ENSG00000004846; TAA
STGGLTTIL

SEQ ID NO: 2328 - protein, 8 aa, Homo sapiens
  misc_feature: Table A; Target 2328; HLA-C*03:03; ABCB5; ENSG00000004846; TAA
STIRSADL

SEQ ID NO: 2329 - protein, 9 aa, Homo sapiens
  misc_feature: Table A; Target 2329; HLA-B*58:01; ABCB5; ENSG00000004846; TAA
STIRSADLI

SEQ ID NO: 2330 - protein, 9 aa, Homo sapiens
  misc_feature: Table A; Target 2330; HLA-A*11:01; ABCB5; ENSG00000004846; TAA
STSPLIMAS

SEQ ID NO: 2331 - protein, 10 aa, Homo sapiens
  misc_feature: Table A; Target 2331; HLA-A*68:02; ABCB5; ENSG00000004846; TAA
STSPLIMASA

SEQ ID NO: 2332 - protein, 10 aa, Homo sapiens
  misc_feature: Table A; Target 2332; HLA-B*56:01; ABCB5; ENSG00000004846; TAA
STSPLIMASA

SEQ ID NO: 2333 - protein, 9 aa, Homo sapiens
  misc_feature: Table A; Target 2333; HLA-A*03:01; ABCB5; ENSG00000004846; TAA
STSVQLLQR

SEQ ID NO: 2334 - protein, 9 aa, Homo sapiens
  misc_feature: Table A; Target 2334; HLA-A*11:01; ABCB5; ENSG00000004846; TAA
STSVQLLQR

SEQ ID NO: 2335 - protein, 9 aa, Homo sapiens
  misc_feature: Table A; Target 2335; HLA-A*31:01; ABCB5; ENSG00000004846; TAA
STSVQLLQR

SEQ ID NO: 2336 - protein, 9 aa, Homo sapiens
  misc_feature: Table A; Target 2336; HLA-A*33:01; ABCB5; ENSG00000004846; TAA
STSVQLLQR

SEQ ID NO: 2337 - protein, 9 aa, Homo sapiens
  misc_feature: Table A; Target 2337; HLA-A*33:03; ABCB5; ENSG00000004846; TAA
STSVQLLQR

SEQ ID NO: 2338 - protein, 9 aa, Homo sapiens
  misc_feature: Table A; Target 2338; HLA-A*68:01; ABCB5; ENSG00000004846; TAA
STSVQLLQR

SEQ ID NO: 2339 - protein, 9 aa, Homo sapiens
  misc_feature: Table A; Target 2339; HLA-C*07:06; ABCB5; ENSG00000004846; TAA
STSVQLLQR

SEQ ID NO: 2340 - protein, 9 aa, Homo sapiens
  misc_feature: Table A; Target 2340; HLA-A*11:01; ABCB5; ENSG00000004846; TAA
STVVQLLQR

SEQ ID NO: 2341 - protein, 9 aa, Homo sapiens
  misc_feature: Table A; Target 2341; HLA-A*31:01; ABCB5; ENSG00000004846; TAA
STVVQLLQR

SEQ ID NO: 2342 - protein, 9 aa, Homo sapiens
  misc_feature: Table A; Target 2342; HLA-A*33:01; ABCB5; ENSG00000004846; TAA
STVVQLLQR

SEQ ID NO: 2343 - protein, 9 aa, Homo sapiens
  misc_feature: Table A; Target 2343; HLA-A*33:03; ABCB5; ENSG00000004846; TAA
STVVQLLQR

SEQ ID NO: 2344 - protein, 9 aa, Homo sapiens
  misc_feature: Table A; Target 2344; HLA-A*68:01; ABCB5; ENSG00000004846; TAA
STVVQLLQR

SEQ ID NO: 2345 - protein, 9 aa, Homo sapiens
  misc_feature: Table A; Target 2345; HLA-C*07:06; ABCB5; ENSG00000004846; TAA
STVVQLLQR

SEQ ID NO: 2346 - protein, 9 aa, Homo sapiens
  misc_feature: Table A; Target 2346; HLA-B*13:02; ABCB5; ENSG00000004846; TAA
SVIHSSYCI

SEQ ID NO: 2347 - protein, 9 aa, Homo sapiens
  misc_feature: Table A; Target 2347; HLA-A*30:02; ABCB5; ENSG00000004846; TAA
SVKSIKSDF

SEQ ID NO: 2348 - protein, 9 aa, Homo sapiens
  misc_feature: Table A; Target 2348; HLA-A*32:01; ABCB5; ENSG00000004846; TAA
SVKSIKSDF

SEQ ID NO: 2349 - protein, 9 aa, Homo sapiens
  misc_feature: Table A; Target 2349; HLA-B*46:01; ABCB5; ENSG00000004846; TAA
SVKSIKSDF

SEQ ID NO: 2350 - protein, 9 aa, Homo sapiens
  misc_feature: Table A; Target 2350; HLA-B*57:01; ABCB5; ENSG00000004846; TAA
SVLAQDIGW

SEQ ID NO: 2351 - protein, 9 aa, Homo sapiens
  misc_feature: Table A; Target 2351; HLA-B*58:01; ABCB5; ENSG00000004846; TAA
SVLAQDIGW

SEQ ID NO: 2352 - protein, 10 aa, Homo sapiens
  misc_feature: Table A; Target 2352; HLA-A*02:01; ABCB5; ENSG00000004846; TAA
SVLNGTVHPV

SEQ ID NO: 2353 - protein, 11 aa, Homo sapiens
  misc_feature: Table A; Target 2353; HLA-A*23:01; ABCB5; ENSG00000004846; TAA
SVLNGTVHPVF

SEQ ID NO: 2354 - protein, 11 aa, Homo sapiens
  misc_feature: Table A; Target 2354; HLA-A*25:01; ABCB5; ENSG00000004846; TAA
SVLNGTVHPVF

SEQ ID NO: 2355 - protein, 11 aa, Homo sapiens
  misc_feature: Table A; Target 2355; HLA-A*29:02; ABCB5; ENSG00000004846; TAA
SVLNGTVHPVF

SEQ ID NO: 2356 - protein, 11 aa, Homo sapiens
  misc_feature: Table A; Target 2356; HLA-A*30:02; ABCB5; ENSG00000004846; TAA
SVLNGTVHPVF

SEQ ID NO: 2357 - protein, 11 aa, Homo sapiens
  misc_feature: Table A; Target 2357; HLA-A*32:01; ABCB5; ENSG00000004846; TAA
SVLNGTVHPVF

SEQ ID NO: 2358 - protein, 11 aa, Homo sapiens
  misc_feature: Table A; Target 2358; HLA-B*57:01; ABCB5; ENSG00000004846; TAA
SVLNGTVHPVF

SEQ ID NO: 2359 - protein, 11 aa, Homo sapiens
  misc_feature: Table A; Target 2359; HLA-B*58:01; ABCB5; ENSG00000004846; TAA
SVLNGTVHPVF

SEQ ID NO: 2360 - protein, 9 aa, Homo sapiens
  misc_feature: Table A; Target 2360; HLA-A*29:02; ABCB5; ENSG00000004846; TAA
SVQLLQRLY

SEQ ID NO: 2361 - protein, 9 aa, Homo sapiens
  misc_feature: Table A; Target 2361; HLA-A*30:02; ABCB5; ENSG00000004846; TAA
SVQLLQRLY

SEQ ID NO: 2362 - protein, 8 aa, Homo sapiens
  misc_feature: Table A; Target 2362; HLA-C*14:02; ABCB5; ENSG00000004846; TAA
SYCIGAAV

SEQ ID NO: 2363 - protein, 9 aa, Homo sapiens
  misc_feature: Table A; Target 2363; HLA-A*24:02; ABCB5; ENSG00000004846; TAA
SYFMQGLFY

SEQ ID NO: 2364 - protein, 9 aa, Homo sapiens
  misc_feature: Table A; Target 2364; HLA-A*29:02; ABCB5; ENSG00000004846; TAA
SYFMQGLFY

SEQ ID NO: 2365 - protein, 9 aa, Homo sapiens
  misc_feature: Table A; Target 2365; HLA-A*30:02; ABCB5; ENSG00000004846; TAA
SYFMQGLFY

SEQ ID NO: 2366 - protein, 11 aa, Homo sapiens
  misc_feature: Table A; Target 2366; HLA-A*31:01; ABCB5; ENSG00000004846; TAA
SYFMQGLFYGR

SEQ ID NO: 2367 - protein, 10 aa, Homo sapiens
  misc_feature: Table A; Target 2367; HLA-A*03:02; ABCB5; ENSG00000004846; TAA
TAAMTGFANK

SEQ ID NO: 2368 - protein, 10 aa, Homo sapiens
  misc_feature: Table A; Target 2368; HLA-A*11:01; ABCB5; ENSG00000004846; TAA
TAAMTGFANK

SEQ ID NO: 2369 - protein, 10 aa, Homo sapiens
  misc_feature: Table A; Target 2369; HLA-A*68:01; ABCB5; ENSG00000004846; TAA
TAAMTGFANK

SEQ ID NO: 2370 - protein, 9 aa, Homo sapiens
  misc_feature: Table A; Target 2370; HLA-B*51:01; ABCB5; ENSG00000004846; TAA
TAARQTKRI

SEQ ID NO: 2371 - protein, 8 aa, Homo sapiens
  misc_feature: Table A; Target 2371; HLA-B*35:03; ABCB5; ENSG00000004846; TAA
TAEEQPKL

SEQ ID NO: 2372 - protein, 8 aa, Homo sapiens
  misc_feature: Table A; Target 2372; HLA-B*51:01; ABCB5; ENSG00000004846; TAA
TAEEQPKL

SEQ ID NO: 2373 - protein, 8 aa, Homo sapiens
  misc_feature: Table A; Target 2373; HLA-C*03:03; ABCB5; ENSG00000004846; TAA
TAEEQPKL

SEQ ID NO: 2374 - protein, 8 aa, Homo sapiens
  misc_feature: Table A; Target 2374; HLA-C*03:04; ABCB5; ENSG00000004846; TAA
TAEEQPKL

SEQ ID NO: 2375 - protein, 8 aa, Homo sapiens
  misc_feature: Table A; Target 2375; HLA-C*05:01; ABCB5; ENSG00000004846; TAA
TAEEQPKL

SEQ ID NO: 2376 - protein, 8 aa, Homo sapiens
  misc_feature: Table A; Target 2376; HLA-C*16:02; ABCB5; ENSG00000004846; TAA
TAEEQPKL

SEQ ID NO: 2377 - protein, 9 aa, Homo sapiens
  misc_feature: Table A; Target 2377; HLA-A*33:01; ABCB5; ENSG00000004846; TAA
TAEEQPKLR

SEQ ID NO: 2378 - protein, 9 aa, Homo sapiens
  misc_feature: Table A; Target 2378; HLA-A*33:03; ABCB5; ENSG00000004846; TAA
TAEEQPKLR

SEQ ID NO: 2379 - protein, 9 aa, Homo sapiens
  misc_feature: Table A; Target 2379; HLA-A*68:01; ABCB5; ENSG00000004846; TAA
TAEEQPKLR

SEQ ID NO: 2380 - protein, 9 aa, Homo sapiens
  misc_feature: Table A; Target 2380; HLA-C*05:01; ABCB5; ENSG00000004846; TAA
TAEEQPKLR

SEQ ID NO: 2381 - protein, 9 aa, Homo sapiens
  misc_feature: Table A; Target 2381; HLA-C*07:06; ABCB5; ENSG00000004846; TAA
TAEEQPKLR

SEQ ID NO: 2382 - protein, 9 aa, Homo sapiens
  misc_feature: Table A; Target 2382; HLA-C*16:02; ABCB5; ENSG00000004846; TAA
TAEEQPKLR

SEQ ID NO: 2383 - protein, 9 aa, Homo sapiens
  misc_feature: Table A; Target 2383; HLA-B*51:01; ABCB5; ENSG00000004846; TAA
TAGYKPESI

SEQ ID NO: 2384 - protein, 8 aa, Homo sapiens
  misc_feature: Table A; Target 2384; HLA-B*39:01; ABCB5; ENSG00000004846; TAA
TAIAYGAM

SEQ ID NO: 2385 - protein, 8 aa, Homo sapiens
  misc_feature: Table A; Target 2385; HLA-B*46:01; ABCB5; ENSG00000004846; TAA
TAIAYGAM

SEQ ID NO: 2386 - protein, 8 aa, Homo sapiens
  misc_feature: Table A; Target 2386; HLA-C*03:04; ABCB5; ENSG00000004846; TAA
TAIAYGAM

SEQ ID NO: 2387 - protein, 9 aa, Homo sapiens
  misc_feature: Table A; Target 2387; HLA-B*35:03; ABCB5; ENSG00000004846; TAA
TAIAYGAMA

SEQ ID NO: 2388 - protein, 9 aa, Homo sapiens
  misc_feature: Table A; Target 2388; HLA-B*54:01; ABCB5; ENSG00000004846; TAA
TAIAYGAMA

SEQ ID NO: 2389 - protein, 9 aa, Homo sapiens
  misc_feature: Table A; Target 2389; HLA-B*56:01; ABCB5; ENSG00000004846; TAA
TAIAYGAMA

SEQ ID NO: 2390 - protein, 9 aa, Homo sapiens
  misc_feature: Table A; Target 2390; HLA-C*03:03; ABCB5; ENSG00000004846; TAA
TAIAYGAMA

SEQ ID NO: 2391 - protein, 9 aa, Homo sapiens
  misc_feature: Table A; Target 2391; HLA-C*03:04; ABCB5; ENSG00000004846; TAA
TAIAYGAMA

SEQ ID NO: 2392 - protein, 10 aa, Homo sapiens
  misc_feature: Table A; Target 2392; HLA-B*07:02; ABCB5; ENSG00000004846; TAA
TAIAYGAMAI

SEQ ID NO: 2393 - protein, 10 aa, Homo sapiens
  misc_feature: Table A; Target 2393; HLA-B*49:01; ABCB5; ENSG00000004846; TAA
TAIAYGAMAI

SEQ ID NO: 2394 - protein, 10 aa, Homo sapiens
  misc_feature: Table A; Target 2394; HLA-B*51:01; ABCB5; ENSG00000004846; TAA
TAIAYGAMAI

SEQ ID NO: 2395 - protein, 10 aa, Homo sapiens
  misc_feature: Table A; Target 2395; HLA-C*03:03; ABCB5; ENSG00000004846; TAA
TAIAYGAMAI

SEQ ID NO: 2396 - protein, 10 aa, Homo sapiens
  misc_feature: Table A; Target 2396; HLA-C*03:04; ABCB5; ENSG00000004846; TAA
TAIAYGAMAI

SEQ ID NO: 2397 - protein, 10 aa, Homo sapiens
  misc_feature: Table A; Target 2397; HLA-C*06:02; ABCB5; ENSG00000004846; TAA
TAIAYGAMAI

SEQ ID NO: 2398 - protein, 10 aa, Homo sapiens
  misc_feature: Table A; Target 2398; HLA-C*12:03; ABCB5; ENSG00000004846; TAA
TAIAYGAMAI

SEQ ID NO: 2399 - protein, 10 aa, Homo sapiens
  misc_feature: Table A; Target 2399; HLA-C*16:02; ABCB5; ENSG00000004846; TAA
TAIAYGAMAI

SEQ ID NO: 2400 - protein, 10 aa, Homo sapiens
  misc_feature: Table A; Target 2400; HLA-A*30:01; ABCB5; ENSG00000004846; TAA
TEALENIRTI

SEQ ID NO: 2401 - protein, 10 aa, Homo sapiens
  misc_feature: Table A; Target 2401; HLA-B*44:02; ABCB5; ENSG00000004846; TAA
TEALENIRTI

SEQ ID NO: 2402 - protein, 10 aa, Homo sapiens
  misc_feature: Table A; Target 2402; HLA-B*49:01; ABCB5; ENSG00000004846; TAA
TEALENIRTI

SEQ ID NO: 2403 - protein, 8 aa, Homo sapiens
  misc_feature: Table A; Target 2403; HLA-B*37:01; ABCB5; ENSG00000004846; TAA
TERKTNSL

SEQ ID NO: 2404 - protein, 8 aa, Homo sapiens
  misc_feature: Table A; Target 2404; HLA-B*40:02; ABCB5; ENSG00000004846; TAA
TERKTNSL

SEQ ID NO: 2405 - protein, 9 aa, Homo sapiens
  misc_feature: Table A; Target 2405; HLA-B*08:01; ABCB5; ENSG00000004846; TAA
TGMIETAAM

SEQ ID NO: 2406 - protein, 9 aa, Homo sapiens
  misc_feature: Table A; Target 2406; HLA-B*15:01; ABCB5; ENSG00000004846; TAA
TGMIETAAM

SEQ ID NO: 2407 - protein, 9 aa, Homo sapiens
  misc_feature: Table A; Target 2407; HLA-B*15:03; ABCB5; ENSG00000004846; TAA
TGMIETAAM

SEQ ID NO: 2408 - protein, 9 aa, Homo sapiens
  misc_feature: Table A; Target 2408; HLA-B*18:01; ABCB5; ENSG00000004846; TAA
TGMIETAAM

SEQ ID NO: 2409 - protein, 9 aa, Homo sapiens
  misc_feature: Table A; Target 2409; HLA-B*35:01; ABCB5; ENSG00000004846; TAA
TGMIETAAM

SEQ ID NO: 2410 - protein, 9 aa, Homo sapiens
  misc_feature: Table A; Target 2410; HLA-B*35:03; ABCB5; ENSG00000004846; TAA
TGMIETAAM

SEQ ID NO: 2411 - protein, 9 aa, Homo sapiens
  misc_feature: Table A; Target 2411; HLA-B*37:01; ABCB5; ENSG00000004846; TAA
TGMIETAAM

SEQ ID NO: 2412 - protein, 9 aa, Homo sapiens
  misc_feature: Table A; Target 2412; HLA-B*39:01; ABCB5; ENSG00000004846; TAA
TGMIETAAM

SEQ ID NO: 2413 - protein, 9 aa, Homo sapiens
  misc_feature: Table A; Target 2413; HLA-B*46:01; ABCB5; ENSG00000004846; TAA
TGMIETAAM

SEQ ID NO: 2414 - protein, 9 aa, Homo sapiens
  misc_feature: Table A; Target 2414; HLA-B*55:01; ABCB5; ENSG00000004846; TAA
TGMIETAAM

SEQ ID NO: 2415 - protein, 9 aa, Homo sapiens
  misc_feature: Table A; Target 2415; HLA-C*01:02; ABCB5; ENSG00000004846; TAA
TGMIETAAM

SEQ ID NO: 2416 - protein, 9 aa, Homo sapiens
  misc_feature: Table A; Target 2416; HLA-C*03:03; ABCB5; ENSG00000004846; TAA
TGMIETAAM

SEQ ID NO: 2417 - protein, 9 aa, Homo sapiens
  misc_feature: Table A; Target 2417; HLA-C*03:04; ABCB5; ENSG00000004846; TAA
TGMIETAAM

SEQ ID NO: 2418 - protein, 9 aa, Homo sapiens
  misc_feature: Table A; Target 2418; HLA-C*07:04; ABCB5; ENSG00000004846; TAA
TGMIETAAM

SEQ ID NO: 2419 - protein, 9 aa, Homo sapiens
  misc_feature: Table A; Target 2419; HLA-C*14:02; ABCB5; ENSG00000004846; TAA
TGMIETAAM

SEQ ID NO: 2420 - protein, 9 aa, Homo sapiens
  misc_feature: Table A; Target 2420; HLA-C*16:04; ABCB5; ENSG00000004846; TAA
TGMIETAAM

SEQ ID NO: 2421 - protein, 9 aa, Homo sapiens
  misc_feature: Table A; Target 2421; HLA-A*31:01; ABCB5; ENSG00000004846; TAA
THQELLRNR

SEQ ID NO: 2422 - protein, 9 aa, Homo sapiens
  misc_feature: Table A; Target 2422; HLA-A*33:03; ABCB5; ENSG00000004846; TAA
THQELLRNR

SEQ ID NO: 2423 - protein, 8 aa, Homo sapiens
  misc_feature: Table A; Target 2423; HLA-B*07:02; ABCB5; ENSG00000004846; TAA
TIASKVSL

SEQ ID NO: 2424 - protein, 8 aa, Homo sapiens
  misc_feature: Table A; Target 2424; HLA-B*08:01; ABCB5; ENSG00000004846; TAA
TIASKVSL

SEQ ID NO: 2425 - protein, 8 aa, Homo sapiens
  misc_feature: Table A; Target 2425; HLA-C*16:01; ABCB5; ENSG00000004846; TAA
TIASKVSL

SEQ ID NO: 2426 - protein, 9 aa, Homo sapiens
  misc_feature: Table A; Target 2426; HLA-A*23:01; ABCB5; ENSG00000004846; TAA
TIGTVLAVF

SEQ ID NO: 2427 - protein, 9 aa, Homo sapiens
  misc_feature: Table A; Target 2427; HLA-B*46:01; ABCB5; ENSG00000004846; TAA
TIGTVLAVF

SEQ ID NO: 2428 - protein, 9 aa, Homo sapiens
  misc_feature: Table A; Target 2428; HLA-C*07:04; ABCB5; ENSG00000004846; TAA
TIGTVLAVF

SEQ ID NO: 2429 - protein, 10 aa, Homo sapiens
  misc_feature: Table A; Target 2429; HLA-A*02:04; ABCB5; ENSG00000004846; TAA
TILAIDIAQI

SEQ ID NO: 2430 - protein, 11 aa, Homo sapiens
  misc_feature: Table A; Target 2430; HLA-A*31:01; ABCB5; ENSG00000004846; TAA
TIRSADLIVTL

SEQ ID NO: 2431 - protein, 8 aa, Homo sapiens
  misc_feature: Table A; Target 2431; HLA-A*30:02; ABCB5; ENSG00000004846; TAA
TISNNIKY

SEQ ID NO: 2432 - protein, 8 aa, Homo sapiens
  misc_feature: Table A; Target 2432; HLA-C*16:01; ABCB5; ENSG00000004846; TAA
TISNNIKY

SEQ ID NO: 2433 - protein, 10 aa, Homo sapiens
  misc_feature: Table A; Target 2433; HLA-A*68:01; ABCB5; ENSG00000004846; TAA
TISNNIKYGR

SEQ ID NO: 2434 - protein, 9 aa, Homo sapiens
  misc_feature: Table A; Target 2434; HLA-A*03:01; ABCB5; ENSG00000004846; TAA
TIVSLTREK

SEQ ID NO: 2435 - protein, 9 aa, Homo sapiens
  misc_feature: Table A; Target 2435; HLA-A*03:02; ABCB5; ENSG00000004846; TAA
TIVSLTREK

SEQ ID NO: 2436 - protein, 9 aa, Homo sapiens
  misc_feature: Table A; Target 2436; HLA-C*16:01; ABCB5; ENSG00000004846; TAA
TIVSLTREK

SEQ ID NO: 2437 - protein, 9 aa, Homo sapiens
  misc_feature: Table A; Target 2437; HLA-A*02:03; ABCB5; ENSG00000004846; TAA
TLASVLNGT

SEQ ID NO: 2438 - protein, 10 aa, Homo sapiens
  misc_feature: Table A; Target 2438; HLA-A*02:03; ABCB5; ENSG00000004846; TAA
TLASVLNGTV

SEQ ID NO: 2439 - protein, 10 aa, Homo sapiens
  misc_feature: Table A; Target 2439; HLA-A*03:01; ABCB5; ENSG00000004846; TAA
TLKDGMLAEK

SEQ ID NO: 2440 - protein, 9 aa, Homo sapiens
  misc_feature: Table A; Target 2440; HLA-B*15:01; ABCB5; ENSG00000004846; TAA
TLKHDAEIY

SEQ ID NO: 2441 - protein, 8 aa, Homo sapiens
  misc_feature: Table A; Target 2441; HLA-A*02:01; ABCB5; ENSG00000004846; TAA
TLLTLYYV

SEQ ID NO: 2442 - protein, 8 aa, Homo sapiens
  misc_feature: Table A; Target 2442; HLA-A*02:04; ABCB5; ENSG00000004846; TAA
TLLTLYYV

SEQ ID NO: 2443 - protein, 8 aa, Homo sapiens
  misc_feature: Table A; Target 2443; HLA-B*13:02; ABCB5; ENSG00000004846; TAA
TLSTSPLI

SEQ ID NO: 2444 - protein, 9 aa, Homo sapiens
  misc_feature: Table A; Target 2444; HLA-B*13:02; ABCB5; ENSG00000004846; TAA
TLSTSPLIM

SEQ ID NO: 2445 - protein, 9 aa, Homo sapiens
  misc_feature: Table A; Target 2445; HLA-B*35:01; ABCB5; ENSG00000004846; TAA
TLSTSPLIM

SEQ ID NO: 2446 - protein, 9 aa, Homo sapiens
  misc_feature: Table A; Target 2446; HLA-B*35:03; ABCB5; ENSG00000004846; TAA
TLSTSPLIM

SEQ ID NO: 2447 - protein, 9 aa, Homo sapiens
  misc_feature: Table A; Target 2447; HLA-B*39:01; ABCB5; ENSG00000004846; TAA
TLSTSPLIM

SEQ ID NO: 2448 - protein, 9 aa, Homo sapiens
  misc_feature: Table A; Target 2448; HLA-C*03:04; ABCB5; ENSG00000004846; TAA
TLSTSPLIM

SEQ ID NO: 2449 - protein, 9 aa, Homo sapiens
  misc_feature: Table A; Target 2449; HLA-C*07:04; ABCB5; ENSG00000004846; TAA
TLSTSPLIM

SEQ ID NO: 2450 - protein, 9 aa, Homo sapiens
  misc_feature: Table A; Target 2450; HLA-C*12:03; ABCB5; ENSG00000004846; TAA
TLSTSPLIM

SEQ ID NO: 2451 - protein, 9 aa, Homo sapiens
  misc_feature: Table A; Target 2451; HLA-C*16:01; ABCB5; ENSG00000004846; TAA
TLSTSPLIM

SEQ ID NO: 2452 - protein, 10 aa, Homo sapiens
  misc_feature: Table A; Target 2452; HLA-A*02:01; ABCB5; ENSG00000004846; TAA
TLSTSPLIMA

SEQ ID NO: 2453 - protein, 10 aa, Homo sapiens
  misc_feature: Table A; Target 2453; HLA-A*02:03; ABCB5; ENSG00000004846; TAA
TLSTSPLIMA

SEQ ID NO: 2454 - protein, 10 aa, Homo sapiens
  misc_feature: Table A; Target 2454; HLA-A*26:01; ABCB5; ENSG00000004846; TAA
TLVGEKGAQM

SEQ ID NO: 2455 - protein, 10 aa, Homo sapiens
  misc_feature: Table A; Target 2455; HLA-B*15:01; ABCB5; ENSG00000004846; TAA
TLVGEKGAQM

SEQ ID NO: 2456 - protein, 10 aa, Homo sapiens
  misc_feature: Table A; Target 2456; HLA-C*07:04; ABCB5; ENSG00000004846; TAA
TLVGEKGAQM

SEQ ID NO: 2457 - protein, 8 aa, Homo sapiens
  misc_feature: Table A; Target 2457; HLA-B*15:01; ABCB5; ENSG00000004846; TAA
TLVLAPEY

SEQ ID NO: 2458 - protein, 8 aa, Homo sapiens
  misc_feature: Table A; Target 2458; HLA-B*15:03; ABCB5; ENSG00000004846; TAA
TLVLAPEY

SEQ ID NO: 2459 - protein, 8 aa, Homo sapiens
  misc_feature: Table A; Target 2459; HLA-B*18:01; ABCB5; ENSG00000004846; TAA
TLVLAPEY

SEQ ID NO: 2460 - protein, 8 aa, Homo sapiens
  misc_feature: Table A; Target 2460; HLA-B*35:01; ABCB5; ENSG00000004846; TAA
TLVLAPEY

SEQ ID NO: 2461 - protein, 8 aa, Homo sapiens
  misc_feature: Table A; Target 2461; HLA-B*39:01; ABCB5; ENSG00000004846; TAA
TLVLAPEY

SEQ ID NO: 2462 - protein, 8 aa, Homo sapiens
  misc_feature: Table A; Target 2462; HLA-B*46:01; ABCB5; ENSG00000004846; TAA
TLVLAPEY

SEQ ID NO: 2463 - protein, 8 aa, Homo sapiens
  misc_feature: Table A; Target 2463; HLA-C*07:04; ABCB5; ENSG00000004846; TAA
TLVLAPEY

SEQ ID NO: 2464 - protein, 8 aa, Homo sapiens
  misc_feature: Table A; Target 2464; HLA-C*16:01; ABCB5; ENSG00000004846; TAA
TLVLAPEY

SEQ ID NO: 2465 - protein, 10 aa, Homo sapiens
  misc_feature: Table A; Target 2465; HLA-B*27:02; ABCB5; ENSG00000004846; TAA
TLVLAPEYSK

SEQ ID NO: 2466 - protein, 9 aa, Homo sapiens
  misc_feature: Table A; Target 2466; HLA-A*02:01; ABCB5; ENSG00000004846; TAA
TLYYVGIGV

SEQ ID NO: 2467 - protein, 9 aa, Homo sapiens
  misc_feature: Table A; Target 2467; HLA-A*02:03; ABCB5; ENSG00000004846; TAA
TLYYVGIGV

SEQ ID NO: 2468 - protein, 9 aa, Homo sapiens
  misc_feature: Table A; Target 2468; HLA-A*02:04; ABCB5; ENSG00000004846; TAA
TLYYVGIGV

SEQ ID NO: 2469 - protein, 9 aa, Homo sapiens
  misc_feature: Table A; Target 2469; HLA-A*02:07; ABCB5; ENSG00000004846; TAA
TLYYVGIGV

SEQ ID NO: 2470 - protein, 9 aa, Homo sapiens
  misc_feature: Table A; Target 2470; HLA-A*30:01; ABCB5; ENSG00000004846; TAA
TLYYVGIGV

SEQ ID NO: 2471 - protein, 9 aa, Homo sapiens
  misc_feature: Table A; Target 2471; HLA-A*68:02; ABCB5; ENSG00000004846; TAA
TLYYVGIGV

SEQ ID NO: 2472 - protein, 9 aa, Homo sapiens
  misc_feature: Table A; Target 2472; HLA-B*13:02; ABCB5; ENSG00000004846; TAA
TLYYVGIGV

SEQ ID NO: 2473 - protein, 9 aa, Homo sapiens
  misc_feature: Table A; Target 2473; HLA-B*55:01; ABCB5; ENSG00000004846; TAA
TLYYVGIGV

SEQ ID NO: 2474 - protein, 9 aa, Homo sapiens
  misc_feature: Table A; Target 2474; HLA-C*04:01; ABCB5; ENSG00000004846; TAA
TLYYVGIGV

SEQ ID NO: 2475 - protein, 10 aa, Homo sapiens
  misc_feature: Table A; Target 2475; HLA-A*02:03; ABCB5; ENSG00000004846; TAA
TLYYVGIGVA

SEQ ID NO: 2476 - protein, 11 aa, Homo sapiens
  misc_feature: Table A; Target 2476; HLA-B*54:01; ABCB5; ENSG00000004846; TAA
TLYYVGIGVAA

SEQ ID NO: 2477 - protein, 11 aa, Homo sapiens
  misc_feature: Table A; Target 2477; HLA-B*56:01; ABCB5; ENSG00000004846; TAA
TLYYVGIGVAA

SEQ ID NO: 2478 - protein, 11 aa, Homo sapiens
  misc_feature: Table A; Target 2478; HLA-A*02:01; ABCB5; ENSG00000004846; TAA
TMFGNNDKTTL

SEQ ID NO: 2479 - protein, 11 aa, Homo sapiens
  misc_feature: Table A; Target 2479; HLA-A*02:03; ABCB5; ENSG00000004846; TAA
TMFGNNDKTTL

SEQ ID NO: 2480 - protein, 11 aa, Homo sapiens
  misc_feature: Table A; Target 2480; HLA-B*15:01; ABCB5; ENSG00000004846; TAA
TMFGNNDKTTL

SEQ ID NO: 2481 - protein, 11 aa, Homo sapiens
  misc_feature: Table A; Target 2481; HLA-B*38:01; ABCB5; ENSG00000004846; TAA
TMFGNNDKTTL

SEQ ID NO: 2482 - protein, 11 aa, Homo sapiens
  misc_feature: Table A; Target 2482; HLA-B*55:01; ABCB5; ENSG00000004846; TAA
TMFGNNDKTTL

SEQ ID NO: 2483 - protein, 9 aa, Homo sapiens
  misc_feature: Table A; Target 2483; HLA-A*33:01; ABCB5; ENSG00000004846; TAA
TNSLPLHSV

SEQ ID NO: 2484 - protein, 9 aa, Homo sapiens
  misc_feature: Table A; Target 2484; HLA-A*68:02; ABCB5; ENSG00000004846; TAA
TNSLPLHSV

SEQ ID NO: 2485 - protein, 9 aa, Homo sapiens
  misc_feature: Table A; Target 2485; HLA-B*13:02; ABCB5; ENSG00000004846; TAA
TNSLPLHSV

SEQ ID NO: 2486 - protein, 9 aa, Homo sapiens
  misc_feature: Table A; Target 2486; HLA-B*37:01; ABCB5; ENSG00000004846; TAA
TNSLPLHSV

SEQ ID NO: 2487 - protein, 9 aa, Homo sapiens
  misc_feature: Table A; Target 2487; HLA-B*38:01; ABCB5; ENSG00000004846; TAA
TNSLPLHSV

SEQ ID NO: 2488 - protein, 9 aa, Homo sapiens
  misc_feature: Table A; Target 2488; HLA-B*54:01; ABCB5; ENSG00000004846; TAA
TNSLPLHSV

SEQ ID NO: 2489 - protein, 9 aa, Homo sapiens
  misc_feature: Table A; Target 2489; HLA-B*55:01; ABCB5; ENSG00000004846; TAA
TNSLPLHSV

SEQ ID NO: 2490 - protein, 9 aa, Homo sapiens
  misc_feature: Table A; Target 2490; HLA-B*56:01; ABCB5; ENSG00000004846; TAA
TNSLPLHSV

SEQ ID NO: 2491 - protein, 9 aa, Homo sapiens
  misc_feature: Table A; Target 2491; HLA-C*06:02; ABCB5; ENSG00000004846; TAA
TNSLPLHSV

SEQ ID NO: 2492 - protein, 9 aa, Homo sapiens
  misc_feature: Table A; Target 2492; HLA-C*16:01; ABCB5; ENSG00000004846; TAA
TNSLPLHSV

SEQ ID NO: 2493 - protein, 9 aa, Homo sapiens
  misc_feature: Table A; Target 2493; HLA-C*16:02; ABCB5; ENSG00000004846; TAA
TNSLPLHSV

SEQ ID NO: 2494 - protein, 9 aa, Homo sapiens
  misc_feature: Table A; Target 2494; HLA-B*35:01; ABCB5; ENSG00000004846; TAA
TPEGMFIVF

SEQ ID NO: 2495 - protein, 9 aa, Homo sapiens
  misc_feature: Table A; Target 2495; HLA-B*35:03; ABCB5; ENSG00000004846; TAA
TPEGMFIVF

SEQ ID NO: 2496 - protein, 9 aa, Homo sapiens
  misc_feature: Table A; Target 2496; HLA-B*55:01; ABCB5; ENSG00000004846; TAA
TPEGMFIVF

SEQ ID NO: 2497 - protein, 9 aa, Homo sapiens
  misc_feature: Table A; Target 2497; HLA-C*03:03; ABCB5; ENSG00000004846; TAA
TPEGMFIVF

SEQ ID NO: 2498 - protein, 9 aa, Homo sapiens
  misc_feature: Table A; Target 2498; HLA-A*32:01; ABCB5; ENSG00000004846; TAA
TQNATNMGL

SEQ ID NO: 2499 - protein, 9 aa, Homo sapiens
  misc_feature: Table A; Target 2499; HLA-B*13:02; ABCB5; ENSG00000004846; TAA
TQNATNMGL

SEQ ID NO: 2500 - protein, 9 aa, Homo sapiens
  misc_feature: Table A; Target 2500; HLA-B*15:01; ABCB5; ENSG00000004846; TAA
TQNATNMGL

SEQ ID NO: 2501 - protein, 9 aa, Homo sapiens
  misc_feature: Table A; Target 2501; HLA-B*15:03; ABCB5; ENSG00000004846; TAA
TQNATNMGL

SEQ ID NO: 2502 - protein, 9 aa, Homo sapiens
  misc_feature: Table A; Target 2502; HLA-B*27:05; ABCB5; ENSG00000004846; TAA
TQNATNMGL

SEQ ID NO: 2503 - protein, 9 aa, Homo sapiens
  misc_feature: Table A; Target 2503; HLA-B*38:01; ABCB5; ENSG00000004846; TAA
TQNATNMGL

SEQ ID NO: 2504 - protein, 9 aa, Homo sapiens
  misc_feature: Table A; Target 2504; HLA-B*39:01; ABCB5; ENSG00000004846; TAA
TQNATNMGL

SEQ ID NO: 2505 - protein, 9 aa, Homo sapiens
  misc_feature: Table A; Target 2505; HLA-C*07:04; ABCB5; ENSG00000004846; TAA
TQNATNMGL

SEQ ID NO: 2506 - protein, 10 aa, Homo sapiens
  misc_feature: Table A; Target 2506; HLA-A*30:01; ABCB5; ENSG00000004846; TAA
TQVGLKGAQL

SEQ ID NO: 2507 - protein, 10 aa, Homo sapiens
  misc_feature: Table A; Target 2507; HLA-B*27:05; ABCB5; ENSG00000004846; TAA
TQVGLKGAQL

SEQ ID NO: 2508 - protein, 10 aa, Homo sapiens
  misc_feature: Table A; Target 2508; HLA-B*38:01; ABCB5; ENSG00000004846; TAA
TQVGLKGAQL

SEQ ID NO: 2509 - protein, 10 aa, Homo sapiens
  misc_feature: Table A; Target 2509; HLA-B*39:01; ABCB5; ENSG00000004846; TAA
TQVGLKGAQL

SEQ ID NO: 2510 - protein, 10 aa, Homo sapiens
  misc_feature: Table A; Target 2510; HLA-B*40:01; ABCB5; ENSG00000004846; TAA
TQVGLKGAQL

SEQ ID NO: 2511 - protein, 10 aa, Homo sapiens
  misc_feature: Table A; Target 2511; HLA-B*40:02; ABCB5; ENSG00000004846; TAA
TQVGLKGAQL

SEQ ID NO: 2512 - protein, 10 aa, Homo sapiens
  misc_feature: Table A; Target 2512; HLA-C*07:04; ABCB5; ENSG00000004846; TAA
TQVGLKGAQL

SEQ ID NO: 2513 - protein, 10 aa, Homo sapiens
  misc_feature: Table A; Target 2513; HLA-B*38:01; ABCB5; ENSG00000004846; TAA
TRMTDDIDKI

SEQ ID NO: 2514 - protein, 8 aa, Homo sapiens
  misc_feature: Table A; Target 2514; HLA-A*30:02; ABCB5; ENSG00000004846; TAA
TSKELSAY

SEQ ID NO: 2515 - protein, 8 aa, Homo sapiens
  misc_feature: Table A; Target 2515; HLA-A*32:01; ABCB5; ENSG00000004846; TAA
TSKELSAY

SEQ ID NO: 2516 - protein, 8 aa, Homo sapiens
  misc_feature: Table A; Target 2516; HLA-B*08:01; ABCB5; ENSG00000004846; TAA
TSKELSAY

SEQ ID NO: 2517 - protein, 8 aa, Homo sapiens
  misc_feature: Table A; Target 2517; HLA-B*15:01; ABCB5; ENSG00000004846; TAA
TSKELSAY

SEQ ID NO: 2518 - protein, 8 aa, Homo sapiens
  misc_feature: Table A; Target 2518; HLA-B*15:03; ABCB5; ENSG00000004846; TAA
TSKELSAY

SEQ ID NO: 2519 - protein, 8 aa, Homo sapiens
  misc_feature: Table A; Target 2519; HLA-B*18:01; ABCB5; ENSG00000004846; TAA
TSKELSAY

SEQ ID NO: 2520 - protein, 8 aa, Homo sapiens
  misc_feature: Table A; Target 2520; HLA-B*46:01; ABCB5; ENSG00000004846; TAA
TSKELSAY

SEQ ID NO: 2521 - protein, 8 aa, Homo sapiens
  misc_feature: Table A; Target 2521; HLA-C*07:01; ABCB5; ENSG00000004846; TAA
TSKELSAY

SEQ ID NO: 2522 - protein, 8 aa, Homo sapiens
  misc_feature: Table A; Target 2522; HLA-C*07:04; ABCB5; ENSG00000004846; TAA
TSKELSAY

SEQ ID NO: 2523 - protein, 8 aa, Homo sapiens
  misc_feature: Table A; Target 2523; HLA-C*12:03; ABCB5; ENSG00000004846; TAA
TSKELSAY

SEQ ID NO: 2524 - protein, 8 aa, Homo sapiens
  misc_feature: Table A; Target 2524; HLA-C*14:02; ABCB5; ENSG00000004846; TAA
TSKELSAY

SEQ ID NO: 2525 - protein, 8 aa, Homo sapiens
  misc_feature: Table A; Target 2525; HLA-C*16:01; ABCB5; ENSG00000004846; TAA
TSKELSAY

SEQ ID NO: 2526 - protein, 8 aa, Homo sapiens
  misc_feature: Table A; Target 2526; HLA-C*16:02; ABCB5; ENSG00000004846; TAA
TSKELSAY

SEQ ID NO: 2527 - protein, 10 aa, Homo sapiens
  misc_feature: Table A; Target 2527; HLA-A*03:02; ABCB5; ENSG00000004846; TAA
TSKELSAYSK

SEQ ID NO: 2528 - protein, 10 aa, Homo sapiens
  misc_feature: Table A; Target 2528; HLA-A*11:01; ABCB5; ENSG00000004846; TAA
TSKELSAYSK

SEQ ID NO: 2529 - protein, 10 aa, Homo sapiens
  misc_feature: Table A; Target 2529; HLA-A*31:01; ABCB5; ENSG00000004846; TAA
TSKELSAYSK

SEQ ID NO: 2530 - protein, 10 aa, Homo sapiens
  misc_feature: Table A; Target 2530; HLA-A*68:01; ABCB5; ENSG00000004846; TAA
TSKELSAYSK

SEQ ID NO: 2531 - protein, 10 aa, Homo sapiens
  misc_feature: Table A; Target 2531; HLA-B*27:02; ABCB5; ENSG00000004846; TAA
TSKELSAYSK

SEQ ID NO: 2532 - protein, 10 aa, Homo sapiens
  misc_feature: Table A; Target 2532; HLA-C*07:02; ABCB5; ENSG00000004846; TAA
TSKELSAYSK

SEQ ID NO: 2533 - protein, 11 aa, Homo sapiens
  misc_feature: Table A; Target 2533; HLA-A*30:02; ABCB5; ENSG00000004846; TAA
TSLILNGEPGY

SEQ ID NO: 2534 - protein, 9 aa, Homo sapiens
  misc_feature: Table A; Target 2534; HLA-B*54:01; ABCB5; ENSG00000004846; TAA
TSPLIMASA

SEQ ID NO: 2535 - protein, 9 aa, Homo sapiens
  misc_feature: Table A; Target 2535; HLA-B*56:01; ABCB5; ENSG00000004846; TAA
TSPLIMASA

SEQ ID NO: 2536 - protein, 10 aa, Homo sapiens
  misc_feature: Table A; Target 2536; HLA-B*57:01; ABCB5; ENSG00000004846; TAA
TSVQLLQRLY

SEQ ID NO: 2537 - protein, 11 aa, Homo sapiens
  misc_feature: Table A; Target 2537; HLA-A*68:02; ABCB5; ENSG00000004846; TAA
TTILAIDIAQI

SEQ ID NO: 2538 - protein, 9 aa, Homo sapiens
  misc_feature: Table A; Target 2538; HLA-A*01:01; ABCB5; ENSG00000004846; TAA
TTISNNIKY

SEQ ID NO: 2539 - protein, 9 aa, Homo sapiens
  misc_feature: Table A; Target 2539; HLA-A*11:01; ABCB5; ENSG00000004846; TAA
TTISNNIKY

SEQ ID NO: 2540 - protein, 9 aa, Homo sapiens
  misc_feature: Table A; Target 2540; HLA-A*23:01; ABCB5; ENSG00000004846; TAA
TTISNNIKY

SEQ ID NO: 2541 - protein, 9 aa, Homo sapiens
  misc_feature: Table A; Target 2541; HLA-A*25:01; ABCB5; ENSG00000004846; TAA
TTISNNIKY

SEQ ID NO: 2542 - protein, 9 aa, Homo sapiens
  misc_feature: Table A; Target 2542; HLA-A*26:01; ABCB5; ENSG00000004846; TAA
TTISNNIKY

SEQ ID NO: 2543 - protein, 9 aa, Homo sapiens
  misc_feature: Table A; Target 2543; HLA-A*29:02; ABCB5; ENSG00000004846; TAA
TTISNNIKY

SEQ ID NO: 2544 - protein, 9 aa, Homo sapiens
  misc_feature: Table A; Target 2544; HLA-A*30:02; ABCB5; ENSG00000004846; TAA
TTISNNIKY

SEQ ID NO: 2545 - protein, 9 aa, Homo sapiens
  misc_feature: Table A; Target 2545; HLA-A*32:01; ABCB5; ENSG00000004846; TAA
TTISNNIKY

SEQ ID NO: 2546 - protein, 9 aa, Homo sapiens
  misc_feature: Table A; Target 2546; HLA-A*33:03; ABCB5; ENSG00000004846; TAA
TTISNNIKY

SEQ ID NO: 2547 - protein, 9 aa, Homo sapiens
  misc_feature: Table A; Target 2547; HLA-A*68:01; ABCB5; ENSG00000004846; TAA
TTISNNIKY

SEQ ID NO: 2548 - protein, 9 aa, Homo sapiens
  misc_feature: Table A; Target 2548; HLA-B*15:01; ABCB5; ENSG00000004846; TAA
TTISNNIKY

SEQ ID NO: 2549 - protein, 9 aa, Homo sapiens
  misc_feature: Table A; Target 2549; HLA-B*35:01; ABCB5; ENSG00000004846; TAA
TTISNNIKY

SEQ ID NO: 2550 - protein, 9 aa, Homo sapiens
  misc_feature: Table A; Target 2550; HLA-B*44:03; ABCB5; ENSG00000004846; TAA
TTISNNIKY

SEQ ID NO: 2551 - protein, 9 aa, Homo sapiens
  misc_feature: Table A; Target 2551; HLA-B*46:01; ABCB5; ENSG00000004846; TAA
TTISNNIKY

SEQ ID NO: 2552 - protein, 9 aa, Homo sapiens
  misc_feature: Table A; Target 2552; HLA-B*57:01; ABCB5; ENSG00000004846; TAA
TTISNNIKY

SEQ ID NO: 2553 - protein, 9 aa, Homo sapiens
  misc_feature: Table A; Target 2553; HLA-B*58:01; ABCB5; ENSG00000004846; TAA
TTISNNIKY

SEQ ID NO: 2554 - protein, 9 aa, Homo sapiens
  misc_feature: Table A; Target 2554; HLA-C*02:02; ABCB5; ENSG00000004846; TAA
TTISNNIKY

SEQ ID NO: 2555 - protein, 9 aa, Homo sapiens
  misc_feature: Table A; Target 2555; HLA-C*07:04; ABCB5; ENSG00000004846; TAA
TTISNNIKY

SEQ ID NO: 2556 - protein, 9 aa, Homo sapiens
  misc_feature: Table A; Target 2556; HLA-C*07:06; ABCB5; ENSG00000004846; TAA
TTISNNIKY

SEQ ID NO: 2557 - protein, 9 aa, Homo sapiens
  misc_feature: Table A; Target 2557; HLA-C*12:03; ABCB5; ENSG00000004846; TAA
TTISNNIKY

SEQ ID NO: 2558 - protein, 9 aa, Homo sapiens
  misc_feature: Table A; Target 2558; HLA-C*16:01; ABCB5; ENSG00000004846; TAA
TTISNNIKY

SEQ ID NO: 2559 - protein, 9 aa, Homo sapiens
  misc_feature: Table A; Target 2559; HLA-C*16:02; ABCB5; ENSG00000004846; TAA
TTISNNIKY

SEQ ID NO: 2560 - protein, 9 aa, Homo sapiens
  misc_feature: Table A; Target 2560; HLA-C*16:04; ABCB5; ENSG00000004846; TAA
TTISNNIKY

SEQ ID NO: 2561 - protein, 10 aa, Homo sapiens
  misc_feature: Table A; Target 2561; HLA-C*12:03; ABCB5; ENSG00000004846; TAA
TTISNNIKYG

SEQ ID NO: 2562 - protein, 11 aa, Homo sapiens
  misc_feature: Table A; Target 2562; HLA-A*31:01; ABCB5; ENSG00000004846; TAA
TTISNNIKYGR

SEQ ID NO: 2563 - protein, 11 aa, Homo sapiens
  misc_feature: Table A; Target 2563; HLA-A*33:01; ABCB5; ENSG00000004846; TAA
TTISNNIKYGR

SEQ ID NO: 2564 - protein, 11 aa, Homo sapiens
  misc_feature: Table A; Target 2564; HLA-A*33:03; ABCB5; ENSG00000004846; TAA
TTISNNIKYGR

SEQ ID NO: 2565 - protein, 11 aa, Homo sapiens
  misc_feature: Table A; Target 2565; HLA-A*68:01; ABCB5; ENSG00000004846; TAA
TTISNNIKYGR

SEQ ID NO: 2566 - protein, 8 aa, Homo sapiens
  misc_feature: Table A; Target 2566; HLA-A*31:01; ABCB5; ENSG00000004846; TAA
TTIVVAHR

SEQ ID NO: 2567 - protein, 8 aa, Homo sapiens
  misc_feature: Table A; Target 2567; HLA-A*33:01; ABCB5; ENSG00000004846; TAA
TTIVVAHR

SEQ ID NO: 2568 - protein, 8 aa, Homo sapiens
  misc_feature: Table A; Target 2568; HLA-A*33:03; ABCB5; ENSG00000004846; TAA
TTIVVAHR

SEQ ID NO: 2569 - protein, 8 aa, Homo sapiens
  misc_feature: Table A; Target 2569; HLA-A*68:01; ABCB5; ENSG00000004846; TAA
TTIVVAHR

SEQ ID NO: 2570 - protein, 8 aa, Homo sapiens
  misc_feature: Table A; Target 2570; HLA-C*07:06; ABCB5; ENSG00000004846; TAA
TTIVVAHR

SEQ ID NO: 2571 - protein, 9 aa, Homo sapiens
  misc_feature: Table A; Target 2571; HLA-A*02:07; ABCB5; ENSG00000004846; TAA
TTIVVAHRL

SEQ ID NO: 2572 - protein, 9 aa, Homo sapiens
  misc_feature: Table A; Target 2572; HLA-A*23:01; ABCB5; ENSG00000004846; TAA
TTIVVAHRL

SEQ ID NO: 2573 - protein, 9 aa, Homo sapiens
  misc_feature: Table A; Target 2573; HLA-A*24:02; ABCB5; ENSG00000004846; TAA
TTIVVAHRL

SEQ ID NO: 2574 - protein, 9 aa, Homo sapiens
  misc_feature: Table A; Target 2574; HLA-A*31:01; ABCB5; ENSG00000004846; TAA
TTIVVAHRL

SEQ ID NO: 2575 - protein, 9 aa, Homo sapiens
  misc_feature: Table A; Target 2575; HLA-A*33:03; ABCB5; ENSG00000004846; TAA
TTIVVAHRL

SEQ ID NO: 2576 - protein, 9 aa, Homo sapiens
  misc_feature: Table A; Target 2576; HLA-A*68:01; ABCB5; ENSG00000004846; TAA
TTIVVAHRL

SEQ ID NO: 2577 - protein, 9 aa, Homo sapiens
  misc_feature: Table A; Target 2577; HLA-A*68:02; ABCB5; ENSG00000004846; TAA
TTIVVAHRL

SEQ ID NO: 2578 - protein, 9 aa, Homo sapiens
  misc_feature: Table A; Target 2578; HLA-B*57:01; ABCB5; ENSG00000004846; TAA
TTIVVAHRL

SEQ ID NO: 2579 - protein, 9 aa, Homo sapiens
  misc_feature: Table A; Target 2579; HLA-B*58:01; ABCB5; ENSG00000004846; TAA
TTIVVAHRL

SEQ ID NO: 2580 - protein, 9 aa, Homo sapiens
  misc_feature: Table A; Target 2580; HLA-C*03:03; ABCB5; ENSG00000004846; TAA
TTIVVAHRL

SEQ ID NO: 2581 - protein, 9 aa, Homo sapiens
  misc_feature: Table A; Target 2581; HLA-C*03:04; ABCB5; ENSG00000004846; TAA
TTIVVAHRL

SEQ ID NO: 2582 - protein, 9 aa, Homo sapiens
  misc_feature: Table A; Target 2582; HLA-C*07:06; ABCB5; ENSG00000004846; TAA
TTIVVAHRL

SEQ ID NO: 2583 - protein, 9 aa, Homo sapiens
  misc_feature: Table A; Target 2583; HLA-C*16:02; ABCB5; ENSG00000004846; TAA
TTIVVAHRL

SEQ ID NO: 2584 - protein, 11 aa, Homo sapiens
  misc_feature: Table A; Target 2584; HLA-B*27:05; ABCB5; ENSG00000004846; TAA
TVAFVGSSGCG

SEQ ID NO: 2585 - protein, 11 aa, Homo sapiens
  misc_feature: Table A; Target 2585; HLA-C*04:01; ABCB5; ENSG00000004846; TAA
TVAFVGSSGCG

SEQ ID NO: 2586 - protein, 11 aa, Homo sapiens
  misc_feature: Table A; Target 2586; HLA-C*06:02; ABCB5; ENSG00000004846; TAA
TVAFVGSSGCG

SEQ ID NO: 2587 - protein, 11 aa, Homo sapiens
  misc_feature: Table A; Target 2587; HLA-C*06:02; ABCB5; ENSG00000004846; TAA
TVALVGLNGSG

SEQ ID NO: 2588 - protein, 9 aa, Homo sapiens
  misc_feature: Table A; Target 2588; HLA-C*05:01; ABCB5; ENSG00000004846; TAA
TVEFKNVSF

SEQ ID NO: 2589 - protein, 9 aa, Homo sapiens
  misc_feature: Table A; Target 2589; HLA-C*07:04; ABCB5; ENSG00000004846; TAA
TVEFKNVSF

SEQ ID NO: 2590 - protein, 9 aa, Homo sapiens
  misc_feature: Table A; Target 2590; HLA-A*24:02; ABCB5; ENSG00000004846; TAA
TVHPVFSII

SEQ ID NO: 2591 - protein, 9 aa, Homo sapiens
  misc_feature: Table A; Target 2591; HLA-A*25:01; ABCB5; ENSG00000004846; TAA
TVHPVFSII

SEQ ID NO: 2592 - protein, 9 aa, Homo sapiens
  misc_feature: Table A; Target 2592; HLA-A*68:02; ABCB5; ENSG00000004846; TAA
TVHPVFSII

SEQ ID NO: 2593 - protein, 10 aa, Homo sapiens
  misc_feature: Table A; Target 2593; HLA-A*03:01; ABCB5; ENSG00000004846; TAA
TVIAFRAQEK

SEQ ID NO: 2594 - protein, 10 aa, Homo sapiens
  misc_feature: Table A; Target 2594; HLA-A*11:01; ABCB5; ENSG00000004846; TAA
TVIAFRAQEK

SEQ ID NO: 2595 - protein, 10 aa, Homo sapiens
  misc_feature: Table A; Target 2595; HLA-A*68:01; ABCB5; ENSG00000004846; TAA
TVIAFRAQEK

SEQ ID NO: 2596 - protein, 9 aa, Homo sapiens
  misc_feature: Table A; Target 2596; HLA-A*02:01; ABCB5; ENSG00000004846; TAA
TVLAVFFSV

SEQ ID NO: 2597 - protein, 9 aa, Homo sapiens
  misc_feature: Table A; Target 2597; HLA-A*02:04; ABCB5; ENSG00000004846; TAA
TVLAVFFSV

SEQ ID NO: 2598 - protein, 9 aa, Homo sapiens
  misc_feature: Table A; Target 2598; HLA-A*02:07; ABCB5; ENSG00000004846; TAA
TVLAVFFSV

SEQ ID NO: 2599 - protein, 9 aa, Homo sapiens
  misc_feature: Table A; Target 2599; HLA-A*68:02; ABCB5; ENSG00000004846; TAA
TVLAVFFSV

SEQ ID NO: 2600 - protein, 9 aa, Homo sapiens
  misc_feature: Table A; Target 2600; HLA-A*68:02; ABCB5; ENSG00000004846; TAA
TVVQLLQRL

SEQ ID NO: 2601 - protein, 10 aa, Homo sapiens
  misc_feature: Table A; Target 2601; HLA-A*29:02; ABCB5; ENSG00000004846; TAA
TVVQLLQRLY

SEQ ID NO: 2602 - protein, 11 aa, Homo sapiens
  misc_feature: Table A; Target 2602; HLA-C*14:02; ABCB5; ENSG00000004846; TAA
TYSTERKTNSL

SEQ ID NO: 2603 - protein, 9 aa, Homo sapiens
  misc_feature: Table A; Target 2603; HLA-B*51:01; ABCB5; ENSG00000004846; TAA
VAALIFGYI

SEQ ID NO: 2604 - protein, 9 aa, Homo sapiens
  misc_feature: Table A; Target 2604; HLA-A*23:01; ABCB5; ENSG00000004846; TAA
VAEEVLSSI

SEQ ID NO: 2605 - protein, 9 aa, Homo sapiens
  misc_feature: Table A; Target 2605; HLA-B*46:01; ABCB5; ENSG00000004846; TAA
VAEEVLSSI

SEQ ID NO: 2606 - protein, 9 aa, Homo sapiens
  misc_feature: Table A; Target 2606; HLA-B*51:01; ABCB5; ENSG00000004846; TAA
VAEEVLSSI

SEQ ID NO: 2607 - protein, 9 aa, Homo sapiens
  misc_feature: Table A; Target 2607; HLA-C*01:02; ABCB5; ENSG00000004846; TAA
VAEEVLSSI

SEQ ID NO: 2608 - protein, 9 aa, Homo sapiens
  misc_feature: Table A; Target 2608; HLA-C*03:03; ABCB5; ENSG00000004846; TAA
VAEEVLSSI

SEQ ID NO: 2609 - protein, 9 aa, Homo sapiens
  misc_feature: Table A; Target 2609; HLA-C*03:04; ABCB5; ENSG00000004846; TAA
VAEEVLSSI

SEQ ID NO: 2610 - protein, 9 aa, Homo sapiens
  misc_feature: Table A; Target 2610; HLA-C*05:01; ABCB5; ENSG00000004846; TAA
VAEEVLSSI

SEQ ID NO: 2611 - protein, 9 aa, Homo sapiens
  misc_feature: Table A; Target 2611; HLA-C*16:02; ABCB5; ENSG00000004846; TAA
VAEEVLSSI

SEQ ID NO: 2612 - protein, 9 aa, Homo sapiens
  misc_feature: Table A; Target 2612; HLA-C*16:04; ABCB5; ENSG00000004846; TAA
VAEEVLSSI

SEQ ID NO: 2613 - protein, 10 aa, Homo sapiens
  misc_feature: Table A; Target 2613; HLA-B*27:02; ABCB5; ENSG00000004846; TAA
VAEEVLSSIR

SEQ ID NO: 2614 - protein, 8 aa, Homo sapiens
  misc_feature: Table A; Target 2614; HLA-B*39:01; ABCB5; ENSG00000004846; TAA
VAFVGSSG

SEQ ID NO: 2615 - protein, 8 aa, Homo sapiens
  misc_feature: Table A; Target 2615; HLA-B*46:01; ABCB5; ENSG00000004846; TAA
VAFVGSSG

SEQ ID NO: 2616 - protein, 8 aa, Homo sapiens
  misc_feature: Table A; Target 2616; HLA-C*01:02; ABCB5; ENSG00000004846; TAA
VAFVGSSG

SEQ ID NO: 2617 - protein, 8 aa, Homo sapiens
  misc_feature: Table A; Target 2617; HLA-C*03:03; ABCB5; ENSG00000004846; TAA
VAFVGSSG

SEQ ID NO: 2618 - protein, 8 aa, Homo sapiens
  misc_feature: Table A; Target 2618; HLA-C*03:04; ABCB5; ENSG00000004846; TAA
VAFVGSSG

SEQ ID NO: 2619 - protein, 8 aa, Homo sapiens
  misc_feature: Table A; Target 2619; HLA-C*14:02; ABCB5; ENSG00000004846; TAA
VAFVGSSG

SEQ ID NO: 2620 - protein, 9 aa, Homo sapiens
  misc_feature: Table A; Target 2620; HLA-B*46:01; ABCB5; ENSG00000004846; TAA
VAFVGSSGC

SEQ ID NO: 2621 - protein, 9 aa, Homo sapiens
  misc_feature: Table A; Target 2621; HLA-C*03:04; ABCB5; ENSG00000004846; TAA
VAFVGSSGC

SEQ ID NO: 2622 - protein, 9 aa, Homo sapiens
  misc_feature: Table A; Target 2622; HLA-C*12:03; ABCB5; ENSG00000004846; TAA
VAFVGSSGC

SEQ ID NO: 2623 - protein, 10 aa, Homo sapiens
  misc_feature: Table A; Target 2623; HLA-C*04:01; ABCB5; ENSG00000004846; TAA
VAFVGSSGCG

SEQ ID NO: 2624 - protein, 10 aa, Homo sapiens
  misc_feature: Table A; Target 2624; HLA-C*07:01; ABCB5; ENSG00000004846; TAA
VAFVGSSGCG

SEQ ID NO: 2625 - protein, 10 aa, Homo sapiens
  misc_feature: Table A; Target 2625; HLA-C*16:04; ABCB5; ENSG00000004846; TAA
VAFVGSSGCG

SEQ ID NO: 2626 - protein, 11 aa, Homo sapiens
  misc_feature: Table A; Target 2626; HLA-A*03:01; ABCB5; ENSG00000004846; TAA
VAFVGSSGCGK

SEQ ID NO: 2627 - protein, 11 aa, Homo sapiens
  misc_feature: Table A; Target 2627; HLA-A*03:02; ABCB5; ENSG00000004846; TAA
VAFVGSSGCGK

SEQ ID NO: 2628 - protein, 11 aa, Homo sapiens
  misc_feature: Table A; Target 2628; HLA-A*11:01; ABCB5; ENSG00000004846; TAA
VAFVGSSGCGK

SEQ ID NO: 2629 - protein, 11 aa, Homo sapiens
  misc_feature: Table A; Target 2629; HLA-B*27:02; ABCB5; ENSG00000004846; TAA
VAFVGSSGCGK

SEQ ID NO: 2630 - protein, 8 aa, Homo sapiens
  misc_feature: Table A; Target 2630; HLA-B*51:01; ABCB5; ENSG00000004846; TAA
VAHRLSTI

SEQ ID NO: 2631 - protein, 10 aa, Homo sapiens
  misc_feature: Table A; Target 2631; HLA-B*44:02; ABCB5; ENSG00000004846; TAA
VDAKELNVQW

SEQ ID NO: 2632 - protein, 10 aa, Homo sapiens
  misc_feature: Table A; Target 2632; HLA-B*44:03; ABCB5; ENSG00000004846; TAA
VDAKELNVQW

SEQ ID NO: 2633 - protein, 10 aa, Homo sapiens
  misc_feature: Table A; Target 2633; HLA-B*57:01; ABCB5; ENSG00000004846; TAA
VDAKELNVQW

SEQ ID NO: 2634 - protein, 9 aa, Homo sapiens
  misc_feature: Table A; Target 2634; HLA-A*30:01; ABCB5; ENSG00000004846; TAA
VDENDIRAL

SEQ ID NO: 2635 - protein, 9 aa, Homo sapiens
  misc_feature: Table A; Target 2635; HLA-B*40:01; ABCB5; ENSG00000004846; TAA
VDENDIRAL

SEQ ID NO: 2636 - protein, 9 aa, Homo sapiens
  misc_feature: Table A; Target 2636; HLA-B*40:02; ABCB5; ENSG00000004846; TAA
VDENDIRAL

SEQ ID NO: 2637 - protein, 9 aa, Homo sapiens
  misc_feature: Table A; Target 2637; HLA-C*03:04; ABCB5; ENSG00000004846; TAA
VDENDIRAL

SEQ ID NO: 2638 - protein, 8 aa, Homo sapiens
  misc_feature: Table A; Target 2638; HLA-A*30:01; ABCB5; ENSG00000004846; TAA
VEFKNVSF

SEQ ID NO: 2639 - protein, 8 aa, Homo sapiens
  misc_feature: Table A; Target 2639; HLA-B*15:03; ABCB5; ENSG00000004846; TAA
VEFKNVSF

SEQ ID NO: 2640 - protein, 8 aa, Homo sapiens
  misc_feature: Table A; Target 2640; HLA-B*18:01; ABCB5; ENSG00000004846; TAA
VEFKNVSF

SEQ ID NO: 2641 - protein, 8 aa, Homo sapiens
  misc_feature: Table A; Target 2641; HLA-B*37:01; ABCB5; ENSG00000004846; TAA
VEFKNVSF

SEQ ID NO: 2642 - protein, 8 aa, Homo sapiens
  misc_feature: Table A; Target 2642; HLA-B*40:01; ABCB5; ENSG00000004846; TAA
VEFKNVSF

SEQ ID NO: 2643 - protein, 8 aa, Homo sapiens
  misc_feature: Table A; Target 2643; HLA-B*40:02; ABCB5; ENSG00000004846; TAA
VEFKNVSF

SEQ ID NO: 2644 - protein, 8 aa, Homo sapiens
  misc_feature: Table A; Target 2644; HLA-B*44:03; ABCB5; ENSG00000004846; TAA
VEFKNVSF

SEQ ID NO: 2645 - protein, 8 aa, Homo sapiens
  misc_feature: Table A; Target 2645; HLA-B*49:01; ABCB5; ENSG00000004846; TAA
VEFKNVSF

SEQ ID NO: 2646 - protein, 10 aa, Homo sapiens
  misc_feature: Table A; Target 2646; HLA-B*44:02; ABCB5; ENSG00000004846; TAA
VEFKNVSFNY

SEQ ID NO: 2647 - protein, 10 aa, Homo sapiens
  misc_feature: Table A; Target 2647; HLA-B*44:03; ABCB5; ENSG00000004846; TAA
VEFKNVSFNY

SEQ ID NO: 2648 - protein, 10 aa, Homo sapiens
  misc_feature: Table A; Target 2648; HLA-A*23:01; ABCB5; ENSG00000004846; TAA
VFFSVIHSSY

SEQ ID NO: 2649 - protein, 10 aa, Homo sapiens
  misc_feature: Table A; Target 2649; HLA-A*24:02; ABCB5; ENSG00000004846; TAA
VFFSVIHSSY

SEQ ID NO: 2650 - protein, 10 aa, Homo sapiens
  misc_feature: Table A; Target 2650; HLA-A*29:02; ABCB5; ENSG00000004846; TAA
VFFSVIHSSY

SEQ ID NO: 2651 - protein, 10 aa, Homo sapiens
  misc_feature: Table A; Target 2651; HLA-A*30:02; ABCB5; ENSG00000004846; TAA
VFFSVIHSSY

SEQ ID NO: 2652 - protein, 10 aa, Homo sapiens
  misc_feature: Table A; Target 2652; HLA-C*14:02; ABCB5; ENSG00000004846; TAA
VFFSVIHSSY

SEQ ID NO: 2653 - protein, 9 aa, Homo sapiens
  misc_feature: Table A; Target 2653; HLA-A*23:01; ABCB5; ENSG00000004846; TAA
VFILRGLSL

SEQ ID NO: 2654 - protein, 9 aa, Homo sapiens
  misc_feature: Table A; Target 2654; HLA-A*24:02; ABCB5; ENSG00000004846; TAA
VFILRGLSL

SEQ ID NO: 2655 - protein, 9 aa, Homo sapiens
  misc_feature: Table A; Target 2655; HLA-B*08:01; ABCB5; ENSG00000004846; TAA
VFILRGLSL

SEQ ID NO: 2656 - protein, 9 aa, Homo sapiens
  misc_feature: Table A; Target 2656; HLA-C*14:02; ABCB5; ENSG00000004846; TAA
VFILRGLSL

SEQ ID NO: 2657 - protein, 9 aa, Homo sapiens
  misc_feature: Table A; Target 2657; HLA-A*23:01; ABCB5; ENSG00000004846; TAA
VFSIIFAKI

SEQ ID NO: 2658 - protein, 9 aa, Homo sapiens
  misc_feature: Table A; Target 2658; HLA-A*24:02; ABCB5; ENSG00000004846; TAA
VFSIIFAKI

SEQ ID NO: 2659 - protein, 8 aa, Homo sapiens
  misc_feature: Table A; Target 2659; HLA-C*03:04; ABCB5; ENSG00000004846; TAA
VGEKGAQM

SEQ ID NO: 2660 - protein, 8 aa, Homo sapiens
  misc_feature: Table A; Target 2660; HLA-C*05:01; ABCB5; ENSG00000004846; TAA
VGEKGAQM

SEQ ID NO: 2661 - protein, 8 aa, Homo sapiens
  misc_feature: Table A; Target 2661; HLA-C*03:04; ABCB5; ENSG00000004846; TAA
VGIGVAAL

SEQ ID NO: 2662 - protein, 9 aa, Homo sapiens
  misc_feature: Table A; Target 2662; HLA-A*23:01; ABCB5; ENSG00000004846; TAA
VGIGVAALI

SEQ ID NO: 2663 - protein, 9 aa, Homo sapiens
  misc_feature: Table A; Target 2663; HLA-B*13:02; ABCB5; ENSG00000004846; TAA
VGIGVAALI

SEQ ID NO: 2664 - protein, 9 aa, Homo sapiens
  misc_feature: Table A; Target 2664; HLA-B*51:01; ABCB5; ENSG00000004846; TAA
VGIGVAALI

SEQ ID NO: 2665 - protein, 8 aa, Homo sapiens
  misc_feature: Table A; Target 2665; HLA-B*08:01; ABCB5; ENSG00000004846; TAA
VGLKGAQL

SEQ ID NO: 2666 - protein, 8 aa, Homo sapiens
  misc_feature: Table A; Target 2666; HLA-C*01:02; ABCB5; ENSG00000004846; TAA
VGLKGAQL

SEQ ID NO: 2667 - protein, 8 aa, Homo sapiens
  misc_feature: Table A; Target 2667; HLA-C*03:03; ABCB5; ENSG00000004846; TAA
VGLKGAQL

SEQ ID NO: 2668 - protein, 8 aa, Homo sapiens
  misc_feature: Table A; Target 2668; HLA-C*03:04; ABCB5; ENSG00000004846; TAA
VGLKGAQL

SEQ ID NO: 2669 - protein, 8 aa, Homo sapiens
  misc_feature: Table A; Target 2669; HLA-C*14:02; ABCB5; ENSG00000004846; TAA
VGLKGAQL

SEQ ID NO: 2670 - protein, 9 aa, Homo sapiens
  misc_feature: Table A; Target 2670; HLA-A*03:01; ABCB5; ENSG00000004846; TAA
VIAFRAQEK

SEQ ID NO: 2671 - protein, 9 aa, Homo sapiens
  misc_feature: Table A; Target 2671; HLA-A*03:02; ABCB5; ENSG00000004846; TAA
VIAFRAQEK

SEQ ID NO: 2672 - protein, 9 aa, Homo sapiens
  misc_feature: Table A; Target 2672; HLA-A*02:01; ABCB5; ENSG00000004846; TAA
VILGVICFV

SEQ ID NO: 2673 - protein, 9 aa, Homo sapiens
  misc_feature: Table A; Target 2673; HLA-A*02:03; ABCB5; ENSG00000004846; TAA
VILGVICFV

SEQ ID NO: 2674 - protein, 9 aa, Homo sapiens
  misc_feature: Table A; Target 2674; HLA-A*02:04; ABCB5; ENSG00000004846; TAA
VILGVICFV

SEQ ID NO: 2675 - protein, 9 aa, Homo sapiens
  misc_feature: Table A; Target 2675; HLA-A*02:07; ABCB5; ENSG00000004846; TAA
VILGVICFV

SEQ ID NO: 2676 - protein, 9 aa, Homo sapiens
  misc_feature: Table A; Target 2676; HLA-C*01:02; ABCB5; ENSG00000004846; TAA
VISLTSKEL

SEQ ID NO: 2677 - protein, 9 aa, Homo sapiens
  misc_feature: Table A; Target 2677; HLA-C*03:03; ABCB5; ENSG00000004846; TAA
VISLTSKEL

SEQ ID NO: 2678 - protein, 9 aa, Homo sapiens
  misc_feature: Table A; Target 2678; HLA-C*03:04; ABCB5; ENSG00000004846; TAA
VISLTSKEL

SEQ ID NO: 2679 - protein, 9 aa, Homo sapiens
  misc_feature: Table A; Target 2679; HLA-C*16:01; ABCB5; ENSG00000004846; TAA
VISLTSKEL

SEQ ID NO: 2680 - protein, 8 aa, Homo sapiens
  misc_feature: Table A; Target 2680; HLA-A*03:02; ABCB5; ENSG00000004846; TAA
VLAPEYSK

SEQ ID NO: 2681 - protein, 9 aa, Homo sapiens
  misc_feature: Table A; Target 2681; HLA-A*02:01; ABCB5; ENSG00000004846; TAA
VLAPEYSKA

SEQ ID NO: 2682 - protein, 9 aa, Homo sapiens
  misc_feature: Table A; Target 2682; HLA-A*02:03; ABCB5; ENSG00000004846; TAA
VLAPEYSKA

SEQ ID NO: 2683 - protein, 9 aa, Homo sapiens
  misc_feature: Table A; Target 2683; HLA-A*02:04; ABCB5; ENSG00000004846; TAA
VLAPEYSKA

SEQ ID NO: 2684 - protein, 9 aa, Homo sapiens
  misc_feature: Table A; Target 2684; HLA-B*55:01; ABCB5; ENSG00000004846; TAA
VLAPEYSKA

SEQ ID NO: 2685 - protein, 9 aa, Homo sapiens
  misc_feature: Table A; Target 2685; HLA-B*56:01; ABCB5; ENSG00000004846; TAA
VLAPEYSKA

SEQ ID NO: 2686 - protein, 10 aa, Homo sapiens
  misc_feature: Table A; Target 2686; HLA-A*03:01; ABCB5; ENSG00000004846; TAA
VLAPEYSKAK

SEQ ID NO: 2687 - protein, 10 aa, Homo sapiens
  misc_feature: Table A; Target 2687; HLA-A*03:02; ABCB5; ENSG00000004846; TAA
VLAPEYSKAK

SEQ ID NO: 2688 - protein, 9 aa, Homo sapiens
  misc_feature: Table A; Target 2688; HLA-A*03:01; ABCB5; ENSG00000004846; TAA
VLFDGVDAK

SEQ ID NO: 2689 - protein, 9 aa, Homo sapiens
  misc_feature: Table A; Target 2689; HLA-A*03:02; ABCB5; ENSG00000004846; TAA
VLFDGVDAK

SEQ ID NO: 2690 - protein, 9 aa, Homo sapiens
  misc_feature: Table A; Target 2690; HLA-A*11:01; ABCB5; ENSG00000004846; TAA
VLFDGVDAK

SEQ ID NO: 2691 - protein, 9 aa, Homo sapiens
  misc_feature: Table A; Target 2691; HLA-B*27:05; ABCB5; ENSG00000004846; TAA
VLFDGVDAK

SEQ ID NO: 2692 - protein, 9 aa, Homo sapiens
  misc_feature: Table A; Target 2692; HLA-C*01:02; ABCB5; ENSG00000004846; TAA
VLFDGVDAK

SEQ ID NO: 2693 - protein, 11 aa, Homo sapiens
  misc_feature: Table A; Target 2693; HLA-A*02:01; ABCB5; ENSG00000004846; TAA
VLFDGVDAKEL

SEQ ID NO: 2694 - protein, 11 aa, Homo sapiens
  misc_feature: Table A; Target 2694; HLA-A*02:03; ABCB5; ENSG00000004846; TAA
VLFDGVDAKEL

SEQ ID NO: 2695 - protein, 11 aa, Homo sapiens
  misc_feature: Table A; Target 2695; HLA-A*02:04; ABCB5; ENSG00000004846; TAA
VLFDGVDAKEL

SEQ ID NO: 2696 - protein, 11 aa, Homo sapiens
  misc_feature: Table A; Target 2696; HLA-A*02:07; ABCB5; ENSG00000004846; TAA
VLFDGVDAKEL

SEQ ID NO: 2697 - protein, 11 aa, Homo sapiens
  misc_feature: Table A; Target 2697; HLA-C*01:02; ABCB5; ENSG00000004846; TAA
VLFDGVDAKEL

SEQ ID NO: 2698 - protein, 11 aa, Homo sapiens
  misc_feature: Table A; Target 2698; HLA-C*16:02; ABCB5; ENSG00000004846; TAA
VLFDGVDAKEL

SEQ ID NO: 2699 - protein, 8 aa, Homo sapiens
  misc_feature: Table A; Target 2699; HLA-A*02:01; ABCB5; ENSG00000004846; TAA
VLGTLASV

SEQ ID NO: 2700 - protein, 8 aa, Homo sapiens
  misc_feature: Table A; Target 2700; HLA-A*02:03; ABCB5; ENSG00000004846; TAA
VLGTLASV

SEQ ID NO: 2701 - protein, 8 aa, Homo sapiens
  misc_feature: Table A; Target 2701; HLA-B*55:01; ABCB5; ENSG00000004846; TAA
VLGTLASV

SEQ ID NO: 2702 - protein, 9 aa, Homo sapiens
  misc_feature: Table A; Target 2702; HLA-C*01:02; ABCB5; ENSG00000004846; TAA
VLGTLASVL

SEQ ID NO: 2703 - protein, 9 aa, Homo sapiens
  misc_feature: Table A; Target 2703; HLA-A*02:01; ABCB5; ENSG00000004846; TAA
VLNGTVHPV

SEQ ID NO: 2704 - protein, 9 aa, Homo sapiens
  misc_feature: Table A; Target 2704; HLA-A*02:03; ABCB5; ENSG00000004846; TAA
VLNGTVHPV

SEQ ID NO: 2705 - protein, 9 aa, Homo sapiens
  misc_feature: Table A; Target 2705; HLA-A*02:04; ABCB5; ENSG00000004846; TAA
VLNGTVHPV

SEQ ID NO: 2706 - protein, 9 aa, Homo sapiens
  misc_feature: Table A; Target 2706; HLA-A*02:07; ABCB5; ENSG00000004846; TAA
VLNGTVHPV

SEQ ID NO: 2707 - protein, 9 aa, Homo sapiens
  misc_feature: Table A; Target 2707; HLA-A*32:01; ABCB5; ENSG00000004846; TAA
VLNGTVHPV

SEQ ID NO: 2708 - protein, 9 aa, Homo sapiens
  misc_feature: Table A; Target 2708; HLA-B*13:02; ABCB5; ENSG00000004846; TAA
VLNGTVHPV

SEQ ID NO: 2709 - protein, 9 aa, Homo sapiens
  misc_feature: Table A; Target 2709; HLA-B*37:01; ABCB5; ENSG00000004846; TAA
VLNGTVHPV

SEQ ID NO: 2710 - protein, 9 aa, Homo sapiens
  misc_feature: Table A; Target 2710; HLA-B*46:01; ABCB5; ENSG00000004846; TAA
VLNGTVHPV

SEQ ID NO: 2711 - protein, 9 aa, Homo sapiens
  misc_feature: Table A; Target 2711; HLA-B*55:01; ABCB5; ENSG00000004846; TAA
VLNGTVHPV

SEQ ID NO: 2712 - protein, 9 aa, Homo sapiens
  misc_feature: Table A; Target 2712; HLA-C*01:02; ABCB5; ENSG00000004846; TAA
VLNGTVHPV

SEQ ID NO: 2713 - protein, 9 aa, Homo sapiens
  misc_feature: Table A; Target 2713; HLA-C*02:02; ABCB5; ENSG00000004846; TAA
VLNGTVHPV

SEQ ID NO: 2714 - protein, 9 aa, Homo sapiens
  misc_feature: Table A; Target 2714; HLA-C*06:02; ABCB5; ENSG00000004846; TAA
VLNGTVHPV

SEQ ID NO: 2715 - protein, 9 aa, Homo sapiens
  misc_feature: Table A; Target 2715; HLA-C*14:02; ABCB5; ENSG00000004846; TAA
VLNGTVHPV

SEQ ID NO: 2716 - protein, 9 aa, Homo sapiens
  misc_feature: Table A; Target 2716; HLA-C*16:02; ABCB5; ENSG00000004846; TAA
VLNGTVHPV

SEQ ID NO: 2717 - protein, 10 aa, Homo sapiens
  misc_feature: Table A; Target 2717; HLA-A*03:02; ABCB5; ENSG00000004846; TAA
VLNGTVHPVF

SEQ ID NO: 2718 - protein, 10 aa, Homo sapiens
  misc_feature: Table A; Target 2718; HLA-A*23:01; ABCB5; ENSG00000004846; TAA
VLNGTVHPVF

SEQ ID NO: 2719 - protein, 10 aa, Homo sapiens
  misc_feature: Table A; Target 2719; HLA-A*24:02; ABCB5; ENSG00000004846; TAA
VLNGTVHPVF

SEQ ID NO: 2720 - protein, 10 aa, Homo sapiens
  misc_feature: Table A; Target 2720; HLA-A*30:02; ABCB5; ENSG00000004846; TAA
VLNGTVHPVF

SEQ ID NO: 2721 - protein, 10 aa, Homo sapiens
  misc_feature: Table A; Target 2721; HLA-A*32:01; ABCB5; ENSG00000004846; TAA
VLNGTVHPVF

SEQ ID NO: 2722 - protein, 10 aa, Homo sapiens
  misc_feature: Table A; Target 2722; HLA-B*15:01; ABCB5; ENSG00000004846; TAA
VLNGTVHPVF

SEQ ID NO: 2723 - protein, 10 aa, Homo sapiens
  misc_feature: Table A; Target 2723; HLA-C*02:02; ABCB5; ENSG00000004846; TAA
VLNGTVHPVF

SEQ ID NO: 2724 - protein, 8 aa, Homo sapiens
  misc_feature: Table A; Target 2724; HLA-A*02:03; ABCB5; ENSG00000004846; TAA
VLSSIRTV

SEQ ID NO: 2725 - protein, 9 aa, Homo sapiens
  misc_feature: Table A; Target 2725; HLA-A*02:01; ABCB5; ENSG00000004846; TAA
VLSSIRTVI

SEQ ID NO: 2726 - protein, 9 aa, Homo sapiens
  misc_feature: Table A; Target 2726; HLA-A*02:03; ABCB5; ENSG00000004846; TAA
VLSSIRTVI

SEQ ID NO: 2727 - protein, 9 aa, Homo sapiens
  misc_feature: Table A; Target 2727; HLA-A*02:04; ABCB5; ENSG00000004846; TAA
VLSSIRTVI

SEQ ID NO: 2728 - protein, 9 aa, Homo sapiens
  misc_feature: Table A; Target 2728; HLA-A*23:01; ABCB5; ENSG00000004846; TAA
VLSSIRTVI

SEQ ID NO: 2729 - protein, 9 aa, Homo sapiens
  misc_feature: Table A; Target 2729; HLA-A*24:02; ABCB5; ENSG00000004846; TAA
VLSSIRTVI

SEQ ID NO: 2730 - protein, 9 aa, Homo sapiens
  misc_feature: Table A; Target 2730; HLA-A*32:01; ABCB5; ENSG00000004846; TAA
VLSSIRTVI

SEQ ID NO: 2731 - protein, 9 aa, Homo sapiens
  misc_feature: Table A; Target 2731; HLA-B*13:02; ABCB5; ENSG00000004846; TAA
VLSSIRTVI

SEQ ID NO: 2732 - protein, 9 aa, Homo sapiens
  misc_feature: Table A; Target 2732; HLA-C*02:02; ABCB5; ENSG00000004846; TAA
VLSSIRTVI

SEQ ID NO: 2733 - protein, 9 aa, Homo sapiens
  misc_feature: Table A; Target 2733; HLA-C*12:03; ABCB5; ENSG00000004846; TAA
VLSSIRTVI

SEQ ID NO: 2734 - protein, 11 aa, Homo sapiens
  misc_feature: Table A; Target 2734; HLA-A*03:01; ABCB5; ENSG00000004846; TAA
VLSSIRTVIAF

SEQ ID NO: 2735 - protein, 9 aa, Homo sapiens
  misc_feature: Table A; Target 2735; HLA-C*01:02; ABCB5; ENSG00000004846; TAA
VLTQNATNM

SEQ ID NO: 2736 - protein, 9 aa, Homo sapiens
  misc_feature: Table A; Target 2736; HLA-C*14:02; ABCB5; ENSG00000004846; TAA
VLTQNATNM

SEQ ID NO: 2737 - protein, 9 aa, Homo sapiens
  misc_feature: Table A; Target 2737; HLA-C*16:02; ABCB5; ENSG00000004846; TAA
VLTQNATNM

SEQ ID NO: 2738 - protein, 9 aa, Homo sapiens
  misc_feature: Table A; Target 2738; HLA-A*02:03; ABCB5; ENSG00000004846; TAA
VMSQDIKKA

SEQ ID NO: 2739 - protein, 9 aa, Homo sapiens
  misc_feature: Table A; Target 2739; HLA-B*55:01; ABCB5; ENSG00000004846; TAA
VMSQDIKKA

SEQ ID NO: 2740 - protein, 9 aa, Homo sapiens
  misc_feature: Table A; Target 2740; HLA-B*51:01; ABCB5; ENSG00000004846; TAA
VPHFETFAI

SEQ ID NO: 2741 - protein, 9 aa, Homo sapiens
  misc_feature: Table A; Target 2741; HLA-B*54:01; ABCB5; ENSG00000004846; TAA
VPHFETFAI

SEQ ID NO: 2742 - protein, 10 aa, Homo sapiens
  misc_feature: Table A; Target 2742; HLA-B*54:01; ABCB5; ENSG00000004846; TAA
VPHFETFAIA

SEQ ID NO: 2743 - protein, 10 aa, Homo sapiens
  misc_feature: Table A; Target 2743; HLA-B*56:01; ABCB5; ENSG00000004846; TAA
VPHFETFAIA

SEQ ID NO: 2744 - protein, 9 aa, Homo sapiens
  misc_feature: Table A; Target 2744; HLA-B*54:01; ABCB5; ENSG00000004846; TAA
VPLDEIKEA

SEQ ID NO: 2745 - protein, 9 aa, Homo sapiens
  misc_feature: Table A; Target 2745; HLA-B*55:01; ABCB5; ENSG00000004846; TAA
VPLDEIKEA

SEQ ID NO: 2746 - protein, 9 aa, Homo sapiens
  misc_feature: Table A; Target 2746; HLA-B*56:01; ABCB5; ENSG00000004846; TAA
VPLDEIKEA

SEQ ID NO: 2747 - protein, 10 aa, Homo sapiens
  misc_feature: Table A; Target 2747; HLA-B*35:03; ABCB5; ENSG00000004846; TAA
VPLDEIKEAA

SEQ ID NO: 2748 - protein, 10 aa, Homo sapiens
  misc_feature: Table A; Target 2748; HLA-B*54:01; ABCB5; ENSG00000004846; TAA
VPLDEIKEAA

SEQ ID NO: 2749 - protein, 10 aa, Homo sapiens
  misc_feature: Table A; Target 2749; HLA-B*55:01; ABCB5; ENSG00000004846; TAA
VPLDEIKEAA

SEQ ID NO: 2750 - protein, 10 aa, Homo sapiens
  misc_feature: Table A; Target 2750; HLA-B*56:01; ABCB5; ENSG00000004846; TAA
VPLDEIKEAA

SEQ ID NO: 2751 - protein, 8 aa, Homo sapiens
  misc_feature: Table A; Target 2751; HLA-B*35:01; ABCB5; ENSG00000004846; TAA
VPQEPVLF

SEQ ID NO: 2752 - protein, 8 aa, Homo sapiens
  misc_feature: Table A; Target 2752; HLA-C*05:01; ABCB5; ENSG00000004846; TAA
VPQEPVLF

SEQ ID NO: 2753 - protein, 10 aa, Homo sapiens
  misc_feature: Table A; Target 2753; HLA-B*56:01; ABCB5; ENSG00000004846; TAA
VPQEPVLFNC

SEQ ID NO: 2754 - protein, 10 aa, Homo sapiens
  misc_feature: Table A; Target 2754; HLA-A*03:02; ABCB5; ENSG00000004846; TAA
VQAALEKASK

SEQ ID NO: 2755 - protein, 8 aa, Homo sapiens
  misc_feature: Table A; Target 2755; HLA-A*30:02; ABCB5; ENSG00000004846; TAA
VQTNTTNY

SEQ ID NO: 2756 - protein, 8 aa, Homo sapiens
  misc_feature: Table A; Target 2756; HLA-A*32:01; ABCB5; ENSG00000004846; TAA
VQTNTTNY

SEQ ID NO: 2757 - protein, 8 aa, Homo sapiens
  misc_feature: Table A; Target 2757; HLA-B*15:01; ABCB5; ENSG00000004846; TAA
VQTNTTNY

SEQ ID NO: 2758 - protein, 8 aa, Homo sapiens
  misc_feature: Table A; Target 2758; HLA-B*15:03; ABCB5; ENSG00000004846; TAA
VQTNTTNY

SEQ ID NO: 2759 - protein, 8 aa, Homo sapiens
  misc_feature: Table A; Target 2759; HLA-B*39:01; ABCB5; ENSG00000004846; TAA
VQTNTTNY

SEQ ID NO: 2760 - protein, 8 aa, Homo sapiens
  misc_feature: Table A; Target 2760; HLA-B*46:01; ABCB5; ENSG00000004846; TAA
VQTNTTNY

SEQ ID NO: 2761 - protein, 8 aa, Homo sapiens
  misc_feature: Table A; Target 2761; HLA-C*01:02; ABCB5; ENSG00000004846; TAA
VQTNTTNY

SEQ ID NO: 2762 - protein, 8 aa, Homo sapiens
  misc_feature: Table A; Target 2762; HLA-C*07:04; ABCB5; ENSG00000004846; TAA
VQTNTTNY

SEQ ID NO: 2763 - protein, 8 aa, Homo sapiens
  misc_feature: Table A; Target 2763; HLA-C*14:02; ABCB5; ENSG00000004846; TAA
VQTNTTNY

SEQ ID NO: 2764 - protein, 9 aa, Homo sapiens
  misc_feature: Table A; Target 2764; HLA-C*06:02; ABCB5; ENSG00000004846; TAA
VRNPKILIL

SEQ ID NO: 2765 - protein, 9 aa, Homo sapiens
  misc_feature: Table A; Target 2765; HLA-C*12:03; ABCB5; ENSG00000004846; TAA
VRNPKILIL

SEQ ID NO: 2766 - protein, 8 aa, Homo sapiens
  misc_feature: Table A; Target 2766; HLA-A*23:01; ABCB5; ENSG00000004846; TAA
VSLGAVYF

SEQ ID NO: 2767 - protein, 9 aa, Homo sapiens
  misc_feature: Table A; Target 2767; HLA-B*57:01; ABCB5; ENSG00000004846; TAA
VSLGAVYFF

SEQ ID NO: 2768 - protein, 9 aa, Homo sapiens
  misc_feature: Table A; Target 2768; HLA-A*32:01; ABCB5; ENSG00000004846; TAA
VSLTREKAF

SEQ ID NO: 2769 - protein, 9 aa, Homo sapiens
  misc_feature: Table A; Target 2769; HLA-B*57:01; ABCB5; ENSG00000004846; TAA
VSLTREKAF

SEQ ID NO: 2770 - protein, 9 aa, Homo sapiens
  misc_feature: Table A; Target 2770; HLA-C*16:01; ABCB5; ENSG00000004846; TAA
VSLTREKAF

SEQ ID NO: 2771 - protein, 8 aa, Homo sapiens
  misc_feature: Table A; Target 2771; HLA-B*58:01; ABCB5; ENSG00000004846; TAA
VSQEPVLF

SEQ ID NO: 2772 - protein, 10 aa, Homo sapiens
  misc_feature: Table A; Target 2772; HLA-A*01:01; ABCB5; ENSG00000004846; TAA
VSYFMQGLFY

SEQ ID NO: 2773 - protein, 8 aa, Homo sapiens
  misc_feature: Table A; Target 2773; HLA-C*05:01; ABCB5; ENSG00000004846; TAA
VTDEEMER

SEQ ID NO: 2774 - protein, 9 aa, Homo sapiens
  misc_feature: Table A; Target 2774; HLA-C*05:01; ABCB5; ENSG00000004846; TAA
VTDEEMERA

SEQ ID NO: 2775 - protein, 11 aa, Homo sapiens
  misc_feature: Table A; Target 2775; HLA-A*03:01; ABCB5; ENSG00000004846; TAA
VTLKDGMLAEK

SEQ ID NO: 2776 - protein, 11 aa, Homo sapiens
  misc_feature: Table A; Target 2776; HLA-A*03:02; ABCB5; ENSG00000004846; TAA
VTLKDGMLAEK

SEQ ID NO: 2777 - protein, 11 aa, Homo sapiens
  misc_feature: Table A; Target 2777; HLA-A*11:01; ABCB5; ENSG00000004846; TAA
VTLKDGMLAEK

SEQ ID NO: 2778 - protein, 11 aa, Homo sapiens
  misc_feature: Table A; Target 2778; HLA-A*33:01; ABCB5; ENSG00000004846; TAA
VTLKDGMLAEK

SEQ ID NO: 2779 - protein, 8 aa, Homo sapiens
  misc_feature: Table A; Target 2779; HLA-C*03:03; ABCB5; ENSG00000004846; TAA
VTLSTSPL

SEQ ID NO: 2780 - protein, 9 aa, Homo sapiens
  misc_feature: Table A; Target 2780; HLA-A*23:01; ABCB5; ENSG00000004846; TAA
VTLSTSPLI

SEQ ID NO: 2781 - protein, 9 aa, Homo sapiens
  misc_feature: Table A; Target 2781; HLA-A*24:02; ABCB5; ENSG00000004846; TAA
VTLSTSPLI

SEQ ID NO: 2782 - protein, 9 aa, Homo sapiens
  misc_feature: Table A; Target 2782; HLA-B*13:02; ABCB5; ENSG00000004846; TAA
VTLSTSPLI

SEQ ID NO: 2783 - protein, 10 aa, Homo sapiens
  misc_feature: Table A; Target 2783; HLA-C*12:03; ABCB5; ENSG00000004846; TAA
VTLSTSPLIM

SEQ ID NO: 2784 - protein, 11 aa, Homo sapiens
  misc_feature: Table A; Target 2784; HLA-A*02:04; ABCB5; ENSG00000004846; TAA
VTLSTSPLIMA

SEQ ID NO: 2785 - protein, 9 aa, Homo sapiens
  misc_feature: Table A; Target 2785; HLA-A*02:03; ABCB5; ENSG00000004846; TAA
VVAHRLSTI

SEQ ID NO: 2786 - protein, 9 aa, Homo sapiens
  misc_feature: Table A; Target 2786; HLA-A*25:01; ABCB5; ENSG00000004846; TAA
VVAHRLSTI

SEQ ID NO: 2787 - protein, 9 aa, Homo sapiens
  misc_feature: Table A; Target 2787; HLA-B*08:01; ABCB5; ENSG00000004846; TAA
VVAHRLSTI

SEQ ID NO: 2788 - protein, 9 aa, Homo sapiens
  misc_feature: Table A; Target 2788; HLA-B*51:01; ABCB5; ENSG00000004846; TAA
VVAHRLSTI

SEQ ID NO: 2789 - protein, 9 aa, Homo sapiens
  misc_feature: Table A; Target 2789; HLA-C*16:02; ABCB5; ENSG00000004846; TAA
VVAHRLSTI

SEQ ID NO: 2790 - protein, 9 aa, Homo sapiens
  misc_feature: Table A; Target 2790; HLA-A*02:01; ABCB5; ENSG00000004846; TAA
VVLGTLASV

SEQ ID NO: 2791 - protein, 9 aa, Homo sapiens
  misc_feature: Table A; Target 2791; HLA-A*02:03; ABCB5; ENSG00000004846; TAA
VVLGTLASV

SEQ ID NO: 2792 - protein, 9 aa, Homo sapiens
  misc_feature: Table A; Target 2792; HLA-A*02:04; ABCB5; ENSG00000004846; TAA
VVLGTLASV

SEQ ID NO: 2793 - protein, 9 aa, Homo sapiens
  misc_feature: Table A; Target 2793; HLA-A*02:07; ABCB5; ENSG00000004846; TAA
VVLGTLASV

SEQ ID NO: 2794 - protein, 9 aa, Homo sapiens
  misc_feature: Table A; Target 2794; HLA-B*13:02; ABCB5; ENSG00000004846; TAA
VVLGTLASV

SEQ ID NO: 2795 - protein, 9 aa, Homo sapiens
  misc_feature: Table A; Target 2795; HLA-B*46:01; ABCB5; ENSG00000004846; TAA
VVLGTLASV

SEQ ID NO: 2796 - protein, 9 aa, Homo sapiens
  misc_feature: Table A; Target 2796; HLA-B*55:01; ABCB5; ENSG00000004846; TAA
VVLGTLASV

SEQ ID NO: 2797 - protein, 9 aa, Homo sapiens
  misc_feature: Table A; Target 2797; HLA-B*56:01; ABCB5; ENSG00000004846; TAA
VVLGTLASV

SEQ ID NO: 2798 - protein, 9 aa, Homo sapiens
  misc_feature: Table A; Target 2798; HLA-A*29:02; ABCB5; ENSG00000004846; TAA
VVQLLQRLY

SEQ ID NO: 2799 - protein, 9 aa, Homo sapiens
  misc_feature: Table A; Target 2799; HLA-A*30:02; ABCB5; ENSG00000004846; TAA
VVQLLQRLY

SEQ ID NO: 2800 - protein, 8 aa, Homo sapiens
  misc_feature: Table A; Target 2800; HLA-C*05:01; ABCB5; ENSG00000004846; TAA
VVSQEPVL

SEQ ID NO: 2801 - protein, 9 aa, Homo sapiens
  misc_feature: Table A; Target 2801; HLA-A*23:01; ABCB5; ENSG00000004846; TAA
VVSQEPVLF

SEQ ID NO: 2802 - protein, 9 aa, Homo sapiens
  misc_feature: Table A; Target 2802; HLA-C*05:01; ABCB5; ENSG00000004846; TAA
VVSQEPVLF

SEQ ID NO: 2803 - protein, 9 aa, Homo sapiens
  misc_feature: Table A; Target 2803; HLA-C*07:04; ABCB5; ENSG00000004846; TAA
VVSQEPVLF

SEQ ID NO: 2804 - protein, 9 aa, Homo sapiens
  misc_feature: Table A; Target 2804; HLA-A*02:03; ABCB5; ENSG00000004846; TAA
VVTHRLSAI

SEQ ID NO: 2805 - protein, 9 aa, Homo sapiens
  misc_feature: Table A; Target 2805; HLA-B*08:01; ABCB5; ENSG00000004846; TAA
VVTHRLSAI

SEQ ID NO: 2806 - protein, 9 aa, Homo sapiens
  misc_feature: Table A; Target 2806; HLA-A*29:02; ABCB5; ENSG00000004846; TAA
VYFFMNGTY

SEQ ID NO: 2807 - protein, 9 aa, Homo sapiens
  misc_feature: Table A; Target 2807; HLA-A*30:02; ABCB5; ENSG00000004846; TAA
VYFFMNGTY

SEQ ID NO: 2808 - protein, 9 aa, Homo sapiens
  misc_feature: Table A; Target 2808; HLA-C*14:02; ABCB5; ENSG00000004846; TAA
VYFFMNGTY

SEQ ID NO: 2809 - protein, 9 aa, Homo sapiens
  misc_feature: Table A; Target 2809; HLA-B*54:01; ABCB5; ENSG00000004846; TAA
YAAGFRFGA

SEQ ID NO: 2810 - protein, 10 aa, Homo sapiens
  misc_feature: Table A; Target 2810; HLA-A*01:01; ABCB5; ENSG00000004846; TAA
YAAGFRFGAY

SEQ ID NO: 2811 - protein, 10 aa, Homo sapiens
  misc_feature: Table A; Target 2811; HLA-A*25:01; ABCB5; ENSG00000004846; TAA
YAAGFRFGAY

SEQ ID NO: 2812 - protein, 10 aa, Homo sapiens
  misc_feature: Table A; Target 2812; HLA-A*26:01; ABCB5; ENSG00000004846; TAA
YAAGFRFGAY

SEQ ID NO: 2813 - protein, 10 aa, Homo sapiens
  misc_feature: Table A; Target 2813; HLA-A*29:02; ABCB5; ENSG00000004846; TAA
YAAGFRFGAY

SEQ ID NO: 2814 - protein, 10 aa, Homo sapiens
  misc_feature: Table A; Target 2814; HLA-A*30:02; ABCB5; ENSG00000004846; TAA
YAAGFRFGAY

SEQ ID NO: 2815 - protein, 10 aa, Homo sapiens
  misc_feature: Table A; Target 2815; HLA-B*46:01; ABCB5; ENSG00000004846; TAA
YAAGFRFGAY

SEQ ID NO: 2816 - protein, 10 aa, Homo sapiens
  misc_feature: Table A; Target 2816; HLA-C*02:02; ABCB5; ENSG00000004846; TAA
YAAGFRFGAY

SEQ ID NO: 2817 - protein, 8 aa, Homo sapiens
  misc_feature: Table A; Target 2817; HLA-B*51:01; ABCB5; ENSG00000004846; TAA
YAFSHAFI

SEQ ID NO: 2818 - protein, 9 aa, Homo sapiens
  misc_feature: Table A; Target 2818; HLA-A*01:01; ABCB5; ENSG00000004846; TAA
YAFSHAFIY

SEQ ID NO: 2819 - protein, 9 aa, Homo sapiens
  misc_feature: Table A; Target 2819; HLA-A*29:02; ABCB5; ENSG00000004846; TAA
YAFSHAFIY

SEQ ID NO: 2820 - protein, 9 aa, Homo sapiens
  misc_feature: Table A; Target 2820; HLA-B*35:01; ABCB5; ENSG00000004846; TAA
YAFSHAFIY

SEQ ID NO: 2821 - protein, 9 aa, Homo sapiens
  misc_feature: Table A; Target 2821; HLA-B*46:01; ABCB5; ENSG00000004846; TAA
YAFSHAFIY

SEQ ID NO: 2822 - protein, 9 aa, Homo sapiens
  misc_feature: Table A; Target 2822; HLA-B*54:01; ABCB5; ENSG00000004846; TAA
YAFSHAFIY

SEQ ID NO: 2823 - protein, 9 aa, Homo sapiens
  misc_feature: Table A; Target 2823; HLA-C*02:02; ABCB5; ENSG00000004846; TAA
YAFSHAFIY

SEQ ID NO: 2824 - protein, 9 aa, Homo sapiens
  misc_feature: Table A; Target 2824; HLA-C*12:03; ABCB5; ENSG00000004846; TAA
YAFSHAFIY

SEQ ID NO: 2825 - protein, 9 aa, Homo sapiens
  misc_feature: Table A; Target 2825; HLA-C*16:04; ABCB5; ENSG00000004846; TAA
YAFSHAFIY

SEQ ID NO: 2826 - protein, 10 aa, Homo sapiens
  misc_feature: Table A; Target 2826; HLA-A*29:02; ABCB5; ENSG00000004846; TAA
YAFSHAFIYF

SEQ ID NO: 2827 - protein, 10 aa, Homo sapiens
  misc_feature: Table A; Target 2827; HLA-A*68:02; ABCB5; ENSG00000004846; TAA
YAFSHAFIYF

SEQ ID NO: 2828 - protein, 10 aa, Homo sapiens
  misc_feature: Table A; Target 2828; HLA-B*57:01; ABCB5; ENSG00000004846; TAA
YAFSHAFIYF

SEQ ID NO: 2829 - protein, 10 aa, Homo sapiens
  misc_feature: Table A; Target 2829; HLA-C*02:02; ABCB5; ENSG00000004846; TAA
YAFSHAFIYF

SEQ ID NO: 2830 - protein, 10 aa, Homo sapiens
  misc_feature: Table A; Target 2830; HLA-A*26:01; ABCB5; ENSG00000004846; TAA
YCIGAAVPHF

SEQ ID NO: 2831 - protein, 10 aa, Homo sapiens
  misc_feature: Table A; Target 2831; HLA-B*58:01; ABCB5; ENSG00000004846; TAA
YCIGAAVPHF

SEQ ID NO: 2832 - protein, 10 aa, Homo sapiens
  misc_feature: Table A; Target 2832; HLA-A*02:07; ABCB5; ENSG00000004846; TAA
YDPDDGFIMV

SEQ ID NO: 2833 - protein, 10 aa, Homo sapiens
  misc_feature: Table A; Target 2833; HLA-A*68:02; ABCB5; ENSG00000004846; TAA
YDPDDGFIMV

SEQ ID NO: 2834 - protein, 9 aa, Homo sapiens
  misc_feature: Table A; Target 2834; HLA-A*30:01; ABCB5; ENSG00000004846; TAA
YDPVQGQVL

SEQ ID NO: 2835 - protein, 9 aa, Homo sapiens
  misc_feature: Table A; Target 2835; HLA-B*37:01; ABCB5; ENSG00000004846; TAA
YDPVQGQVL

SEQ ID NO: 2836 - protein, 9 aa, Homo sapiens
  misc_feature: Table A; Target 2836; HLA-B*40:01; ABCB5; ENSG00000004846; TAA
YDPVQGQVL

SEQ ID NO: 2837 - protein, 9 aa, Homo sapiens
  misc_feature: Table A; Target 2837; HLA-B*40:02; ABCB5; ENSG00000004846; TAA
YDPVQGQVL

SEQ ID NO: 2838 - protein, 9 aa, Homo sapiens
  misc_feature: Table A; Target 2838; HLA-C*01:02; ABCB5; ENSG00000004846; TAA
YDPVQGQVL

SEQ ID NO: 2839 - protein, 9 aa, Homo sapiens
  misc_feature: Table A; Target 2839; HLA-C*07:04; ABCB5; ENSG00000004846; TAA
YDPVQGQVL

SEQ ID NO: 2840 - protein, 9 aa, Homo sapiens
  misc_feature: Table A; Target 2840; HLA-C*14:02; ABCB5; ENSG00000004846; TAA
YDPVQGQVL

SEQ ID NO: 2841 - protein, 10 aa, Homo sapiens
  misc_feature: Table A; Target 2841; HLA-C*04:01; ABCB5; ENSG00000004846; TAA
YDPVQGQVLF

SEQ ID NO: 2842 - protein, 8 aa, Homo sapiens
  misc_feature: Table A; Target 2842; HLA-C*07:04; ABCB5; ENSG00000004846; TAA
YEEMLQTQ

SEQ ID NO: 2843 - protein, 9 aa, Homo sapiens
  misc_feature: Table A; Target 2843; HLA-B*15:03; ABCB5; ENSG00000004846; TAA
YEEMLQTQH

SEQ ID NO: 2844 - protein, 9 aa, Homo sapiens
  misc_feature: Table A; Target 2844; HLA-B*18:01; ABCB5; ENSG00000004846; TAA
YEEMLQTQH

SEQ ID NO: 2845 - protein, 9 aa, Homo sapiens
  misc_feature: Table A; Target 2845; HLA-B*40:01; ABCB5; ENSG00000004846; TAA
YEEMLQTQH

SEQ ID NO: 2846 - protein, 9 aa, Homo sapiens
  misc_feature: Table A; Target 2846; HLA-B*49:01; ABCB5; ENSG00000004846; TAA
YEEMLQTQH

SEQ ID NO: 2847 - protein, 9 aa, Homo sapiens
  misc_feature: Table A; Target 2847; HLA-C*07:04; ABCB5; ENSG00000004846; TAA
YEEMLQTQH

SEQ ID NO: 2848 - protein, 8 aa, Homo sapiens
  misc_feature: Table A; Target 2848; HLA-C*14:02; ABCB5; ENSG00000004846; TAA
YFAYAAGF

SEQ ID NO: 2849 - protein, 10 aa, Homo sapiens
  misc_feature: Table A; Target 2849; HLA-A*24:02; ABCB5; ENSG00000004846; TAA
YFAYAAGFRF

SEQ ID NO: 2850 - protein, 10 aa, Homo sapiens
  misc_feature: Table A; Target 2850; HLA-A*29:02; ABCB5; ENSG00000004846; TAA
YFAYAAGFRF

SEQ ID NO: 2851 - protein, 8 aa, Homo sapiens
  misc_feature: Table A; Target 2851; HLA-A*29:02; ABCB5; ENSG00000004846; TAA
YFFMNGTY

SEQ ID NO: 2852 - protein, 8 aa, Homo sapiens
  misc_feature: Table A; Target 2852; HLA-B*15:03; ABCB5; ENSG00000004846; TAA
YFFMNGTY

SEQ ID NO: 2853 - protein, 8 aa, Homo sapiens
  misc_feature: Table A; Target 2853; HLA-C*14:02; ABCB5; ENSG00000004846; TAA
YFFMNGTY

SEQ ID NO: 2854 - protein, 8 aa, Homo sapiens
  misc_feature: Table A; Target 2854; HLA-A*29:02; ABCB5; ENSG00000004846; TAA
YFMQGLFY

SEQ ID NO: 2855 - protein, 10 aa, Homo sapiens
  misc_feature: Table A; Target 2855; HLA-A*29:02; ABCB5; ENSG00000004846; TAA
YFMQGLFYGR

SEQ ID NO: 2856 - protein, 10 aa, Homo sapiens
  misc_feature: Table A; Target 2856; HLA-A*30:01; ABCB5; ENSG00000004846; TAA
YGAMAIGETL

SEQ ID NO: 2857 - protein, 10 aa, Homo sapiens
  misc_feature: Table A; Target 2857; HLA-B*35:03; ABCB5; ENSG00000004846; TAA
YGAMAIGETL

SEQ ID NO: 2858 - protein, 10 aa, Homo sapiens
  misc_feature: Table A; Target 2858; HLA-B*38:01; ABCB5; ENSG00000004846; TAA
YGAMAIGETL

SEQ ID NO: 2859 - protein, 10 aa, Homo sapiens
  misc_feature: Table A; Target 2859; HLA-B*39:01; ABCB5; ENSG00000004846; TAA
YGAMAIGETL

SEQ ID NO: 2860 - protein, 10 aa, Homo sapiens
  misc_feature: Table A; Target 2860; HLA-B*40:01; ABCB5; ENSG00000004846; TAA
YGAMAIGETL

SEQ ID NO: 2861 - protein, 10 aa, Homo sapiens
  misc_feature: Table A; Target 2861; HLA-C*03:03; ABCB5; ENSG00000004846; TAA
YGAMAIGETL

SEQ ID NO: 2862 - protein, 10 aa, Homo sapiens
  misc_feature: Table A; Target 2862; HLA-C*03:04; ABCB5; ENSG00000004846; TAA
YGAMAIGETL

SEQ ID NO: 2863 - protein, 8 aa, Homo sapiens
  misc_feature: Table A; Target 2863; HLA-B*51:01; ABCB5; ENSG00000004846; TAA
YGDNSRVV

SEQ ID NO: 2864 - protein, 8 aa, Homo sapiens
  misc_feature: Table A; Target 2864; HLA-C*03:03; ABCB5; ENSG00000004846; TAA
YGDNSRVV

SEQ ID NO: 2865 - protein, 8 aa, Homo sapiens
  misc_feature: Table A; Target 2865; HLA-C*03:04; ABCB5; ENSG00000004846; TAA
YGDNSRVV

SEQ ID NO: 2866 - protein, 8 aa, Homo sapiens
  misc_feature: Table A; Target 2866; HLA-C*05:01; ABCB5; ENSG00000004846; TAA
YGDNSRVV

SEQ ID NO: 2867 - protein, 8 aa, Homo sapiens
  misc_feature: Table A; Target 2867; HLA-C*16:01; ABCB5; ENSG00000004846; TAA
YGDNSRVV

SEQ ID NO: 2868 - protein, 8 aa, Homo sapiens
  misc_feature: Table A; Target 2868; HLA-C*16:02; ABCB5; ENSG00000004846; TAA
YGDNSRVV

SEQ ID NO: 2869 - protein, 10 aa, Homo sapiens
  misc_feature: Table A; Target 2869; HLA-C*03:04; ABCB5; ENSG00000004846; TAA
YGDNSRVVPL

SEQ ID NO: 2870 - protein, 11 aa, Homo sapiens
  misc_feature: Table A; Target 2870; HLA-A*31:01; ABCB5; ENSG00000004846; TAA
YGRAGEILTMR

SEQ ID NO: 2871 - protein, 11 aa, Homo sapiens
  misc_feature: Table A; Target 2871; HLA-A*33:01; ABCB5; ENSG00000004846; TAA
YGRAGEILTMR

SEQ ID NO: 2872 - protein, 11 aa, Homo sapiens
  misc_feature: Table A; Target 2872; HLA-B*35:01; ABCB5; ENSG00000004846; TAA
YGRDDVTDEEM

SEQ ID NO: 2873 - protein, 8 aa, Homo sapiens
  misc_feature: Table A; Target 2873; HLA-B*27:02; ABCB5; ENSG00000004846; TAA
YNTQVGLK

SEQ ID NO: 2874 - protein, 9 aa, Homo sapiens
  misc_feature: Table A; Target 2874; HLA-B*07:02; ABCB5; ENSG00000004846; TAA
YPSRPSIKI

SEQ ID NO: 2875 - protein, 9 aa, Homo sapiens
  misc_feature: Table A; Target 2875; HLA-B*51:01; ABCB5; ENSG00000004846; TAA
YPSRPSIKI

SEQ ID NO: 2876 - protein, 9 aa, Homo sapiens
  misc_feature: Table A; Target 2876; HLA-B*54:01; ABCB5; ENSG00000004846; TAA
YPSRPSIKI

SEQ ID NO: 2877 - protein, 9 aa, Homo sapiens
  misc_feature: Table A; Target 2877; HLA-B*56:01; ABCB5; ENSG00000004846; TAA
YPSRPSIKI

SEQ ID NO: 2878 - protein, 9 aa, Homo sapiens
  misc_feature: Table A; Target 2878; HLA-C*07:02; ABCB5; ENSG00000004846; TAA
YPSRPSIKI

SEQ ID NO: 2879 - protein, 10 aa, Homo sapiens
  misc_feature: Table A; Target 2879; HLA-B*07:02; ABCB5; ENSG00000004846; TAA
YPSRPSIKIL

SEQ ID NO: 2880 - protein, 10 aa, Homo sapiens
  misc_feature: Table A; Target 2880; HLA-C*07:02; ABCB5; ENSG00000004846; TAA
YPSRPSIKIL

SEQ ID NO: 2881 - protein, 8 aa, Homo sapiens
  misc_feature: Table A; Target 2881; HLA-B*46:01; ABCB5; ENSG00000004846; TAA
YSKAGAVA

SEQ ID NO: 2882 - protein, 9 aa, Homo sapiens
  misc_feature: Table A; Target 2882; HLA-C*16:01; ABCB5; ENSG00000004846; TAA
YSTERKTNS

SEQ ID NO: 2883 - protein, 9 aa, Homo sapiens
  misc_feature: Table A; Target 2883; HLA-A*02:01; ABCB5; ENSG00000004846; TAA
YTIGTVLAV

SEQ ID NO: 2884 - protein, 9 aa, Homo sapiens
  misc_feature: Table A; Target 2884; HLA-A*02:03; ABCB5; ENSG00000004846; TAA
YTIGTVLAV

SEQ ID NO: 2885 - protein, 9 aa, Homo sapiens
  misc_feature: Table A; Target 2885; HLA-A*25:01; ABCB5; ENSG00000004846; TAA
YTIGTVLAV

SEQ ID NO: 2886 - protein, 9 aa, Homo sapiens
  misc_feature: Table A; Target 2886; HLA-A*26:01; ABCB5; ENSG00000004846; TAA
YTIGTVLAV

SEQ ID NO: 2887 - protein, 9 aa, Homo sapiens
  misc_feature: Table A; Target 2887; HLA-A*68:02; ABCB5; ENSG00000004846; TAA
YTIGTVLAV

SEQ ID NO: 2888 - protein, 9 aa, Homo sapiens
  misc_feature: Table A; Target 2888; HLA-B*13:02; ABCB5; ENSG00000004846; TAA
YTIGTVLAV

SEQ ID NO: 2889 - protein, 9 aa, Homo sapiens
  misc_feature: Table A; Target 2889; HLA-B*46:01; ABCB5; ENSG00000004846; TAA
YTIGTVLAV

SEQ ID NO: 2890 - protein, 9 aa, Homo sapiens
  misc_feature: Table A; Target 2890; HLA-C*02:02; ABCB5; ENSG00000004846; TAA
YTIGTVLAV

SEQ ID NO: 2891 - protein, 9 aa, Homo sapiens
  misc_feature: Table A; Target 2891; HLA-C*03:03; ABCB5; ENSG00000004846; TAA
YTIGTVLAV

SEQ ID NO: 2892 - protein, 9 aa, Homo sapiens
  misc_feature: Table A; Target 2892; HLA-C*03:04; ABCB5; ENSG00000004846; TAA
YTIGTVLAV

SEQ ID NO: 2893 - protein, 10 aa, Homo sapiens
  misc_feature: Table A; Target 2893; HLA-A*23:01; ABCB5; ENSG00000004846; TAA
YTIGTVLAVF

SEQ ID NO: 2894 - protein, 10 aa, Homo sapiens
  misc_feature: Table A; Target 2894; HLA-A*25:01; ABCB5; ENSG00000004846; TAA
YTIGTVLAVF

SEQ ID NO: 2895 - protein, 10 aa, Homo sapiens
  misc_feature: Table A; Target 2895; HLA-A*26:01; ABCB5; ENSG00000004846; TAA
YTIGTVLAVF

SEQ ID NO: 2896 - protein, 9 aa, Homo sapiens
  misc_feature: Table A; Target 2896; HLA-A*01:01; ABCB5; ENSG00000004846; TAA
YTQNLKDAK

SEQ ID NO: 2897 - protein, 8 aa, Homo sapiens
  misc_feature: Table A; Target 2897; HLA-B*54:01; ABCB5; ENSG00000004846; TAA
YVGIGVAA

SEQ ID NO: 2898 - protein, 8 aa, Homo sapiens
  misc_feature: Table A; Target 2898; HLA-B*56:01; ABCB5; ENSG00000004846; TAA
YVGIGVAA

SEQ ID NO: 2899 - protein, 8 aa, Homo sapiens
  misc_feature: Table A; Target 2899; HLA-C*03:03; ABCB5; ENSG00000004846; TAA
YVGIGVAA

SEQ ID NO: 2900 - protein, 8 aa, Homo sapiens
  misc_feature: Table A; Target 2900; HLA-C*14:02; ABCB5; ENSG00000004846; TAA
YVGIGVAA

SEQ ID NO: 2901 - protein, 9 aa, Homo sapiens
  misc_feature: Table A; Target 2901; HLA-B*08:01; ABCB5; ENSG00000004846; TAA
YVGIGVAAL

SEQ ID NO: 2902 - protein, 9 aa, Homo sapiens
  misc_feature: Table A; Target 2902; HLA-B*35:03; ABCB5; ENSG00000004846; TAA
YVGIGVAAL

SEQ ID NO: 2903 - protein, 9 aa, Homo sapiens
  misc_feature: Table A; Target 2903; HLA-B*39:01; ABCB5; ENSG00000004846; TAA
YVGIGVAAL

SEQ ID NO: 2904 - protein, 9 aa, Homo sapiens
  misc_feature: Table A; Target 2904; HLA-B*40:01; ABCB5; ENSG00000004846; TAA
YVGIGVAAL

SEQ ID NO: 2905 - protein, 9 aa, Homo sapiens
  misc_feature: Table A; Target 2905; HLA-B*46:01; ABCB5; ENSG00000004846; TAA
YVGIGVAAL

SEQ ID NO: 2906 - protein, 9 aa, Homo sapiens
  misc_feature: Table A; Target 2906; HLA-C*01:02; ABCB5; ENSG00000004846; TAA
YVGIGVAAL

SEQ ID NO: 2907 - protein, 9 aa, Homo sapiens
  misc_feature: Table A; Target 2907; HLA-C*03:04; ABCB5; ENSG00000004846; TAA
YVGIGVAAL

SEQ ID NO: 2908 - protein, 9 aa, Homo sapiens
  misc_feature: Table A; Target 2908; HLA-C*07:04; ABCB5; ENSG00000004846; TAA
YVGIGVAAL

SEQ ID NO: 2909 - protein, 9 aa, Homo sapiens
  misc_feature: Table A; Target 2909; HLA-C*14:02; ABCB5; ENSG00000004846; TAA
YVGIGVAAL

SEQ ID NO: 2910 - protein, 8 aa, Homo sapiens
  misc_feature: Table A; Target 2910; HLA-C*12:03; ABCB5; ENSG00000004846; TAA
YYVGIGVA

SEQ ID NO: 2911 - protein, 9 aa, Homo sapiens
  misc_feature: Table A; Target 2911; HLA-A*23:01; ABCB5; ENSG00000004846; TAA
YYVGIGVAA

SEQ ID NO: 2912 - protein, 9 aa, Homo sapiens
  misc_feature: Table A; Target 2912; HLA-B*54:01; ABCB5; ENSG00000004846; TAA
YYVGIGVAA

SEQ ID NO: 2913 - protein, 9 aa, Homo sapiens
  misc_feature: Table A; Target 2913; HLA-B*56:01; ABCB5; ENSG00000004846; TAA
YYVGIGVAA

SEQ ID NO: 2914 - protein, 9 aa, Homo sapiens
  misc_feature: Table A; Target 2914; HLA-C*02:02; ABCB5; ENSG00000004846; TAA
YYVGIGVAA

SEQ ID NO: 2915 - protein, 9 aa, Homo sapiens
  misc_feature: Table A; Target 2915; HLA-C*14:02; ABCB5; ENSG00000004846; TAA
YYVGIGVAA

SEQ ID NO: 2916 - protein, 10 aa, Homo sapiens
  misc_feature: Table A; Target 2916; HLA-A*23:01; ABCB5; ENSG00000004846; TAA
YYVGIGVAAL

SEQ ID NO: 2917 - protein, 10 aa, Homo sapiens
  misc_feature: Table A; Target 2917; HLA-A*24:02; ABCB5; ENSG00000004846; TAA
YYVGIGVAAL

SEQ ID NO: 2918 - protein, 10 aa, Homo sapiens
  misc_feature: Table A; Target 2918; HLA-C*14:02; ABCB5; ENSG00000004846; TAA
YYVGIGVAAL

SEQ ID NO: 2919 - protein, 11 aa, Homo sapiens
  misc_feature: Table A; Target 2919; HLA-A*23:01; ABCB5; ENSG00000004846; TAA
YYVGIGVAALI

SEQ ID NO: 2920 - protein, 11 aa, Homo sapiens
  misc_feature: Table A; Target 2920; HLA-A*24:02; ABCB5; ENSG00000004846; TAA
YYVGIGVAALI

SEQ ID NO: 2921 - protein, 8 aa, Homo sapiens
  misc_feature: Table A; Target 2921; HLA-B*37:01; ACTL8; ENSG00000117148; CTA
ADQLQMSL

SEQ ID NO: 2922 - protein, 9 aa, Homo sapiens
  misc_feature: Table A; Target 2922; HLA-A*30:02; ACTL8; ENSG00000117148; CTA
ADQLQMSLY

SEQ ID NO: 2923 - protein, 9 aa, Homo sapiens
  misc_feature: Table A; Target 2923; HLA-B*15:01; ACTL8; ENSG00000117148; CTA
ADQLQMSLY

SEQ ID NO: 2924 - protein, 9 aa, Homo sapiens
  misc_feature: Table A; Target 2924; HLA-B*27:02; ACTL8; ENSG00000117148; CTA
ADQLQMSLY

SEQ ID NO: 2925 - protein, 9 aa, Homo sapiens
  misc_feature: Table A; Target 2925; HLA-B*37:01; ACTL8; ENSG00000117148; CTA
ADQLQMSLY

SEQ ID NO: 2926 - protein, 9 aa, Homo sapiens
  misc_feature: Table A; Target 2926; HLA-B*44:02; ACTL8; ENSG00000117148; CTA
ADQLQMSLY

SEQ ID NO: 2927 - protein, 9 aa, Homo sapiens
  misc_feature: Table A; Target 2927; HLA-B*44:03; ACTL8; ENSG00000117148; CTA
ADQLQMSLY

SEQ ID NO: 2928 - protein, 9 aa, Homo sapiens
  misc_feature: Table A; Target 2928; HLA-C*04:01; ACTL8; ENSG00000117148; CTA
ADQLQMSLY

SEQ ID NO: 2929 - protein, 9 aa, Homo sapiens
  misc_feature: Table A; Target 2929; HLA-C*07:01; ACTL8; ENSG00000117148; CTA
ADQLQMSLY

SEQ ID NO: 2930 - protein, 9 aa, Homo sapiens
  misc_feature: Table A; Target 2930; HLA-C*07:04; ACTL8; ENSG00000117148; CTA
ADQLQMSLY

SEQ ID NO: 2931 - protein, 9 aa, Homo sapiens
  misc_feature: Table A; Target 2931; HLA-C*12:03; ACTL8; ENSG00000117148; CTA
ADQLQMSLY

SEQ ID NO: 2932 - protein, 9 aa, Homo sapiens
  misc_feature: Table A; Target 2932; HLA-C*16:02; ACTL8; ENSG00000117148; CTA
ADQLQMSLY

SEQ ID NO: 2933 - protein, 9 aa, Homo sapiens
  misc_feature: Table A; Target 2933; HLA-C*16:04; ACTL8; ENSG00000117148; CTA
ADQLQMSLY

SEQ ID NO: 2934 - protein, 8 aa, Homo sapiens
  misc_feature: Table A; Target 2934; HLA-A*30:02; ACTL8; ENSG00000117148; CTA
AGQDLSAY

SEQ ID NO: 2935 - protein, 8 aa, Homo sapiens
  misc_feature: Table A; Target 2935; HLA-A*32:01; ACTL8; ENSG00000117148; CTA
AGQDLSAY

SEQ ID NO: 2936 - protein, 8 aa, Homo sapiens
  misc_feature: Table A; Target 2936; HLA-B*15:01; ACTL8; ENSG00000117148; CTA
AGQDLSAY

SEQ ID NO: 2937 - protein, 8 aa, Homo sapiens
  misc_feature: Table A; Target 2937; HLA-B*46:01; ACTL8; ENSG00000117148; CTA
AGQDLSAY

SEQ ID NO: 2938 - protein, 8 aa, Homo sapiens
  misc_feature: Table A; Target 2938; HLA-C*14:02; ACTL8; ENSG00000117148; CTA
AGQDLSAY

SEQ ID NO: 2939 - protein, 11 aa, Homo sapiens
  misc_feature: Table A; Target 2939; HLA-A*03:01; ACTL8; ENSG00000117148; CTA
AGQDLSAYLLK

SEQ ID NO: 2940 - protein, 11 aa, Homo sapiens
  misc_feature: Table A; Target 2940; HLA-A*03:02; ACTL8; ENSG00000117148; CTA
AGQDLSAYLLK

SEQ ID NO: 2941 - protein, 11 aa, Homo sapiens
  misc_feature: Table A; Target 2941; HLA-A*31:01; ACTL8; ENSG00000117148; CTA
AGQDLSAYLLK

SEQ ID NO: 2942 - protein, 11 aa, Homo sapiens
  misc_feature: Table A; Target 2942; HLA-B*27:02; ACTL8; ENSG00000117148; CTA
AGQDLSAYLLK

SEQ ID NO: 2943 - protein, 10 aa, Homo sapiens
  misc_feature: Table A; Target 2943; HLA-B*27:02; ACTL8; ENSG00000117148; CTA
AHLSTYQSEW

SEQ ID NO: 2944 - protein, 10 aa, Homo sapiens
  misc_feature: Table A; Target 2944; HLA-B*38:01; ACTL8; ENSG00000117148; CTA
AHLSTYQSEW

SEQ ID NO: 2945 - protein, 10 aa, Homo sapiens
  misc_feature: Table A; Target 2945; HLA-B*44:02; ACTL8; ENSG00000117148; CTA
AHLSTYQSEW

SEQ ID NO: 2946 - protein, 9 aa, Homo sapiens
  misc_feature: Table A; Target 2946; HLA-A*02:01; ACTL8; ENSG00000117148; CTA
AIVESVESC

SEQ ID NO: 2947 - protein, 9 aa, Homo sapiens
  misc_feature: Table A; Target 2947; HLA-B*55:01; ACTL8; ENSG00000117148; CTA
AIVESVESC

SEQ ID NO: 2948 - protein, 8 aa, Homo sapiens
  misc_feature: Table A; Target 2948; HLA-A*01:01; ACTL8; ENSG00000117148; CTA
ALDESNTY

SEQ ID NO: 2949 - protein, 8 aa, Homo sapiens
  misc_feature: Table A; Target 2949; HLA-A*32:01; ACTL8; ENSG00000117148; CTA
ALDESNTY

SEQ ID NO: 2950 - protein, 8 aa, Homo sapiens
  misc_feature: Table A; Target 2950; HLA-B*15:01; ACTL8; ENSG00000117148; CTA
ALDESNTY

SEQ ID NO: 2951 - protein, 8 aa, Homo sapiens
  misc_feature: Table A; Target 2951; HLA-B*39:01; ACTL8; ENSG00000117148; CTA
ALDESNTY

SEQ ID NO: 2952 - protein, 8 aa, Homo sapiens
  misc_feature: Table A; Target 2952; HLA-C*05:01; ACTL8; ENSG00000117148; CTA
ALDESNTY

SEQ ID NO: 2953 - protein, 9 aa, Homo sapiens
  misc_feature: Table A; Target 2953; HLA-A*01:01; ACTL8; ENSG00000117148; CTA
ALDESNTYQ

SEQ ID NO: 2954 - protein, 10 aa, Homo sapiens
  misc_feature: Table A; Target 2954; HLA-A*02:04; ACTL8; ENSG00000117148; CTA
ALDESNTYQL

SEQ ID NO: 2955 - protein, 10 aa, Homo sapiens
  misc_feature: Table A; Target 2955; HLA-A*02:07; ACTL8; ENSG00000117148; CTA
ALDESNTYQL

SEQ ID NO: 2956 - protein, 10 aa, Homo sapiens
  misc_feature: Table A; Target 2956; HLA-B*38:01; ACTL8; ENSG00000117148; CTA
ALDESNTYQL

SEQ ID NO: 2957 - protein, 10 aa, Homo sapiens
  misc_feature: Table A; Target 2957; HLA-B*39:01; ACTL8; ENSG00000117148; CTA
ALDESNTYQL

SEQ ID NO: 2958 - protein, 10 aa, Homo sapiens
  misc_feature: Table A; Target 2958; HLA-B*40:01; ACTL8; ENSG00000117148; CTA
ALDESNTYQL

SEQ ID NO: 2959 - protein, 10 aa, Homo sapiens
  misc_feature: Table A; Target 2959; HLA-B*55:01; ACTL8; ENSG00000117148; CTA
ALDESNTYQL

SEQ ID NO: 2960 - protein, 10 aa, Homo sapiens
  misc_feature: Table A; Target 2960; HLA-C*05:01; ACTL8; ENSG00000117148; CTA
ALDESNTYQL

SEQ ID NO: 2961 - protein, 11 aa, Homo sapiens
  misc_feature: Table A; Target 2961; HLA-A*01:01; ACTL8; ENSG00000117148; CTA
ALDESNTYQLP

SEQ ID NO: 2962 - protein, 8 aa, Homo sapiens
  misc_feature: Table A; Target 2962; HLA-B*58:01; ACTL8; ENSG00000117148; CTA
ASGKTLEF

SEQ ID NO: 2963 - protein, 8 aa, Homo sapiens
  misc_feature: Table A; Target 2963; HLA-C*16:01; ACTL8; ENSG00000117148; CTA
ASGKTLEF

SEQ ID NO: 2964 - protein, 9 aa, Homo sapiens
  misc_feature: Table A; Target 2964; HLA-A*01:01; ACTL8; ENSG00000117148; CTA
ASGLLTGVV

SEQ ID NO: 2965 - protein, 10 aa, Homo sapiens
  misc_feature: Table A; Target 2965; HLA-B*40:02; ACTL8; ENSG00000117148; CTA
ASGLLTGVVV

SEQ ID NO: 2966 - protein, 9 aa, Homo sapiens
  misc_feature: Table A; Target 2966; HLA-B*58:01; ACTL8; ENSG00000117148; CTA
ASVVAHLST

SEQ ID NO: 2967 - protein, 10 aa, Homo sapiens
  misc_feature: Table A; Target 2967; HLA-A*01:01; ACTL8; ENSG00000117148; CTA
ASVVAHLSTY

SEQ ID NO: 2968 - protein, 10 aa, Homo sapiens
  misc_feature: Table A; Target 2968; HLA-A*25:01; ACTL8; ENSG00000117148; CTA
ASVVAHLSTY

SEQ ID NO: 2969 - protein, 10 aa, Homo sapiens
  misc_feature: Table A; Target 2969; HLA-A*26:01; ACTL8; ENSG00000117148; CTA
ASVVAHLSTY

SEQ ID NO: 2970 - protein, 10 aa, Homo sapiens
  misc_feature: Table A; Target 2970; HLA-A*30:02; ACTL8; ENSG00000117148; CTA
ASVVAHLSTY

SEQ ID NO: 2971 - protein, 10 aa, Homo sapiens
  misc_feature: Table A; Target 2971; HLA-B*15:01; ACTL8; ENSG00000117148; CTA
ASVVAHLSTY

SEQ ID NO: 2972 - protein, 10 aa, Homo sapiens
  misc_feature: Table A; Target 2972; HLA-B*15:03; ACTL8; ENSG00000117148; CTA
ASVVAHLSTY

SEQ ID NO: 2973 - protein, 10 aa, Homo sapiens
  misc_feature: Table A; Target 2973; HLA-B*44:03; ACTL8; ENSG00000117148; CTA
ASVVAHLSTY

SEQ ID NO: 2974 - protein, 10 aa, Homo sapiens
  misc_feature: Table A; Target 2974; HLA-B*46:01; ACTL8; ENSG00000117148; CTA
ASVVAHLSTY

SEQ ID NO: 2975 - protein, 10 aa, Homo sapiens
  misc_feature: Table A; Target 2975; HLA-B*58:01; ACTL8; ENSG00000117148; CTA
ASVVAHLSTY

SEQ ID NO: 2976 - protein, 10 aa, Homo sapiens
  misc_feature: Table A; Target 2976; HLA-C*02:02; ACTL8; ENSG00000117148; CTA
ASVVAHLSTY

SEQ ID NO: 2977 - protein, 10 aa, Homo sapiens
  misc_feature: Table A; Target 2977; HLA-C*16:04; ACTL8; ENSG00000117148; CTA
ASVVAHLSTY

SEQ ID NO: 2978 - protein, 9 aa, Homo sapiens
  misc_feature: Table A; Target 2978; HLA-A*11:01; ACTL8; ENSG00000117148; CTA
ATVWEGSNR

SEQ ID NO: 2979 - protein, 9 aa, Homo sapiens
  misc_feature: Table A; Target 2979; HLA-A*31:01; ACTL8; ENSG00000117148; CTA
ATVWEGSNR

SEQ ID NO: 2980 - protein, 9 aa, Homo sapiens
  misc_feature: Table A; Target 2980; HLA-A*68:01; ACTL8; ENSG00000117148; CTA
ATVWEGSNR

SEQ ID NO: 2981 - protein, 9 aa, Homo sapiens
  misc_feature: Table A; Target 2981; HLA-C*07:06; ACTL8; ENSG00000117148; CTA
ATVWEGSNR

SEQ ID NO: 2982 - protein, 11 aa, Homo sapiens
  misc_feature: Table A; Target 2982; HLA-B*57:01; ACTL8; ENSG00000117148; CTA
ATVWEGSNRNF

SEQ ID NO: 2983 - protein, 11 aa, Homo sapiens
  misc_feature: Table A; Target 2983; HLA-B*58:01; ACTL8; ENSG00000117148; CTA
ATVWEGSNRNF

SEQ ID NO: 2984 - protein, 9 aa, Homo sapiens
  misc_feature: Table A; Target 2984; HLA-A*30:02; ACTL8; ENSG00000117148; CTA
AVTQMNKCY

SEQ ID NO: 2985 - protein, 9 aa, Homo sapiens
  misc_feature: Table A; Target 2985; HLA-C*16:01; ACTL8; ENSG00000117148; CTA
AVTQMNKCY

SEQ ID NO: 2986 - protein, 8 aa, Homo sapiens
  misc_feature: Table A; Target 2986; HLA-A*23:01; ACTL8; ENSG00000117148; CTA
AYLLKSLF

SEQ ID NO: 2987 - protein, 8 aa, Homo sapiens
  misc_feature: Table A; Target 2987; HLA-A*24:02; ACTL8; ENSG00000117148; CTA
AYLLKSLF

SEQ ID NO: 2988 - protein, 9 aa, Homo sapiens
  misc_feature: Table A; Target 2988; HLA-A*30:01; ACTL8; ENSG00000117148; CTA
CEISLRPLL

SEQ ID NO: 2989 - protein, 9 aa, Homo sapiens
  misc_feature: Table A; Target 2989; HLA-B*18:01; ACTL8; ENSG00000117148; CTA
CEISLRPLL

SEQ ID NO: 2990 - protein, 9 aa, Homo sapiens
  misc_feature: Table A; Target 2990; HLA-B*40:01; ACTL8; ENSG00000117148; CTA
CEISLRPLL

SEQ ID NO: 2991 - protein, 9 aa, Homo sapiens
  misc_feature: Table A; Target 2991; HLA-B*40:02; ACTL8; ENSG00000117148; CTA
CEISLRPLL

SEQ ID NO: 2992 - protein, 9 aa, Homo sapiens
  misc_feature: Table A; Target 2992; HLA-B*44:02; ACTL8; ENSG00000117148; CTA
CEISLRPLL

SEQ ID NO: 2993 - protein, 9 aa, Homo sapiens
  misc_feature: Table A; Target 2993; HLA-B*44:03; ACTL8; ENSG00000117148; CTA
CEISLRPLL

SEQ ID NO: 2994 - protein, 9 aa, Homo sapiens
  misc_feature: Table A; Target 2994; HLA-B*49:01; ACTL8; ENSG00000117148; CTA
CEISLRPLL

SEQ ID NO: 2995 - protein, 10 aa, Homo sapiens
  misc_feature: Table A; Target 2995; HLA-B*49:01; ACTL8; ENSG00000117148; CTA
CEISLRPLLV

SEQ ID NO: 2996 - protein, 9 aa, Homo sapiens
  misc_feature: Table A; Target 2996; HLA-B*15:03; ACTL8; ENSG00000117148; CTA
CKENPGPSY

SEQ ID NO: 2997 - protein, 9 aa, Homo sapiens
  misc_feature: Table A; Target 2997; HLA-B*39:01; ACTL8; ENSG00000117148; CTA
CKENPGPSY

SEQ ID NO: 2998 - protein, 8 aa, Homo sapiens
  misc_feature: Table A; Target 2998; HLA-A*02:01; ACTL8; ENSG00000117148; CTA
CLFQLETV

SEQ ID NO: 2999 - protein, 8 aa, Homo sapiens
  misc_feature: Table A; Target 2999; HLA-A*02:03; ACTL8; ENSG00000117148; CTA
CLFQLETV

SEQ ID NO: 3000 - protein, 10 aa, Homo sapiens
  misc_feature: Table A; Target 3000; HLA-A*02:01; ACTL8; ENSG00000117148; CTA
CLFQLETVAV

SEQ ID NO: 3001 - protein, 10 aa, Homo sapiens
  misc_feature: Table A; Target 3001; HLA-A*02:03; ACTL8; ENSG00000117148; CTA
CLFQLETVAV

SEQ ID NO: 3002 - protein, 10 aa, Homo sapiens
  misc_feature: Table A; Target 3002; HLA-A*02:04; ACTL8; ENSG00000117148; CTA
CLFQLETVAV

SEQ ID NO: 3003 - protein, 8 aa, Homo sapiens
  misc_feature: Table A; Target 3003; HLA-A*30:01; ACTL8; ENSG00000117148; CTA
DESNTYQL

SEQ ID NO: 3004 - protein, 8 aa, Homo sapiens
  misc_feature: Table A; Target 3004; HLA-B*18:01; ACTL8; ENSG00000117148; CTA
DESNTYQL

SEQ ID NO: 3005 - protein, 8 aa, Homo sapiens
  misc_feature: Table A; Target 3005; HLA-B*27:05; ACTL8; ENSG00000117148; CTA
DESNTYQL

SEQ ID NO: 3006 - protein, 8 aa, Homo sapiens
  misc_feature: Table A; Target 3006; HLA-B*37:01; ACTL8; ENSG00000117148; CTA
DESNTYQL

SEQ ID NO: 3007 - protein, 8 aa, Homo sapiens
  misc_feature: Table A; Target 3007; HLA-B*40:01; ACTL8; ENSG00000117148; CTA
DESNTYQL

SEQ ID NO: 3008 - protein, 8 aa, Homo sapiens
  misc_feature: Table A; Target 3008; HLA-A*33:01; ACTL8; ENSG00000117148; CTA
DHGSGFLK

SEQ ID NO: 3009 - protein, 8 aa, Homo sapiens
  misc_feature: Table A; Target 3009; HLA-A*33:03; ACTL8; ENSG00000117148; CTA
DHGSGFLK

SEQ ID NO: 3010 - protein, 10 aa, Homo sapiens
  misc_feature: Table A; Target 3010; HLA-B*38:01; ACTL8; ENSG00000117148; CTA
DHVSSTKATV

SEQ ID NO: 3011 - protein, 10 aa, Homo sapiens
  misc_feature: Table A; Target 3011; HLA-B*39:01; ACTL8; ENSG00000117148; CTA
DHVSSTKATV

SEQ ID NO: 3012 - protein, 11 aa, Homo sapiens
  misc_feature: Table A; Target 3012; HLA-A*25:01; ACTL8; ENSG00000117148; CTA
DHVSSTKATVW

SEQ ID NO: 3013 - protein, 11 aa, Homo sapiens
  misc_feature: Table A; Target 3013; HLA-A*33:01; ACTL8; ENSG00000117148; CTA
DHVSSTKATVW

SEQ ID NO: 3014 - protein, 11 aa, Homo sapiens
  misc_feature: Table A; Target 3014; HLA-B*38:01; ACTL8; ENSG00000117148; CTA
DHVSSTKATVW

SEQ ID NO: 3015 - protein, 11 aa, Homo sapiens
  misc_feature: Table A; Target 3015; HLA-B*39:01; ACTL8; ENSG00000117148; CTA
DHVSSTKATVW

SEQ ID NO: 3016 - protein, 11 aa, Homo sapiens
  misc_feature: Table A; Target 3016; HLA-C*07:01; ACTL8; ENSG00000117148; CTA
DHVSSTKATVW

SEQ ID NO: 3017 - protein, 10 aa, Homo sapiens
  misc_feature: Table A; Target 3017; HLA-A*01:01; ACTL8; ENSG00000117148; CTA
DICHPDTFSY

SEQ ID NO: 3018 - protein, 10 aa, Homo sapiens
  misc_feature: Table A; Target 3018; HLA-A*26:01; ACTL8; ENSG00000117148; CTA
DICHPDTFSY

SEQ ID NO: 3019 - protein, 8 aa, Homo sapiens
  misc_feature: Table A; Target 3019; HLA-B*15:01; ACTL8; ENSG00000117148; CTA
DQLQMSLY

SEQ ID NO: 3020 - protein, 8 aa, Homo sapiens
  misc_feature: Table A; Target 3020; HLA-B*15:03; ACTL8; ENSG00000117148; CTA
DQLQMSLY

SEQ ID NO: 3021 - protein, 8 aa, Homo sapiens
  misc_feature: Table A; Target 3021; HLA-B*18:01; ACTL8; ENSG00000117148; CTA
DQLQMSLY

SEQ ID NO: 3022 - protein, 8 aa, Homo sapiens
  misc_feature: Table A; Target 3022; HLA-C*04:01; ACTL8; ENSG00000117148; CTA
DQLQMSLY

SEQ ID NO: 3023 - protein, 8 aa, Homo sapiens
  misc_feature: Table A; Target 3023; HLA-C*07:01; ACTL8; ENSG00000117148; CTA
DQLQMSLY

SEQ ID NO: 3024 - protein, 8 aa, Homo sapiens
  misc_feature: Table A; Target 3024; HLA-C*07:04; ACTL8; ENSG00000117148; CTA
DQLQMSLY

SEQ ID NO: 3025 - protein, 8 aa, Homo sapiens
  misc_feature: Table A; Target 3025; HLA-A*33:01; ACTL8; ENSG00000117148; CTA
DSGYGLTR

SEQ ID NO: 3026 - protein, 8 aa, Homo sapiens
  misc_feature: Table A; Target 3026; HLA-A*33:03; ACTL8; ENSG00000117148; CTA
DSGYGLTR

SEQ ID NO: 3027 - protein, 8 aa, Homo sapiens
  misc_feature: Table A; Target 3027; HLA-A*68:01; ACTL8; ENSG00000117148; CTA
DSGYGLTR

SEQ ID NO: 3028 - protein, 8 aa, Homo sapiens
  misc_feature: Table A; Target 3028; HLA-C*07:06; ACTL8; ENSG00000117148; CTA
DSGYGLTR

SEQ ID NO: 3029 - protein, 9 aa, Homo sapiens
  misc_feature: Table A; Target 3029; HLA-B*51:01; ACTL8; ENSG00000117148; CTA
DSGYGLTRV

SEQ ID NO: 3030 - protein, 9 aa, Homo sapiens
  misc_feature: Table A; Target 3030; HLA-A*11:01; ACTL8; ENSG00000117148; CTA
DTFSYPIER

SEQ ID NO: 3031 - protein, 9 aa, Homo sapiens
  misc_feature: Table A; Target 3031; HLA-A*26:01; ACTL8; ENSG00000117148; CTA
DTFSYPIER

SEQ ID NO: 3032 - protein, 9 aa, Homo sapiens
  misc_feature: Table A; Target 3032; HLA-A*31:01; ACTL8; ENSG00000117148; CTA
DTFSYPIER

SEQ ID NO: 3033 - protein, 9 aa, Homo sapiens
  misc_feature: Table A; Target 3033; HLA-A*33:03; ACTL8; ENSG00000117148; CTA
DTFSYPIER

SEQ ID NO: 3034 - protein, 9 aa, Homo sapiens
  misc_feature: Table A; Target 3034; HLA-A*68:02; ACTL8; ENSG00000117148; CTA
DTFSYPIER

SEQ ID NO: 3035 - protein, 9 aa, Homo sapiens
  misc_feature: Table A; Target 3035; HLA-B*27:02; ACTL8; ENSG00000117148; CTA
DTFSYPIER

SEQ ID NO: 3036 - protein, 9 aa, Homo sapiens
  misc_feature: Table A; Target 3036; HLA-B*35:01; ACTL8; ENSG00000117148; CTA
DTFSYPIER

SEQ ID NO: 3037 - protein, 9 aa, Homo sapiens
  misc_feature: Table A; Target 3037; HLA-C*07:06; ACTL8; ENSG00000117148; CTA
DTFSYPIER

SEQ ID NO: 3038 - protein, 10 aa, Homo sapiens
  misc_feature: Table A; Target 3038; HLA-A*68:02; ACTL8; ENSG00000117148; CTA
DTFSYPIERG

SEQ ID NO: 3039 - protein, 11 aa, Homo sapiens
  misc_feature: Table A; Target 3039; HLA-A*33:01; ACTL8; ENSG00000117148; CTA
DTFSYPIERGR

SEQ ID NO: 3040 - protein, 8 aa, Homo sapiens
  misc_feature: Table A; Target 3040; HLA-A*33:01; ACTL8; ENSG00000117148; CTA
EALDFRER

SEQ ID NO: 3041 - protein, 8 aa, Homo sapiens
  misc_feature: Table A; Target 3041; HLA-A*33:03; ACTL8; ENSG00000117148; CTA
EALDFRER

SEQ ID NO: 3042 - protein, 9 aa, Homo sapiens
  misc_feature: Table A; Target 3042; HLA-A*30:01; ACTL8; ENSG00000117148; CTA
EEYGEHMRM

SEQ ID NO: 3043 - protein, 9 aa, Homo sapiens
  misc_feature: Table A; Target 3043; HLA-B*18:01; ACTL8; ENSG00000117148; CTA
EEYGEHMRM

SEQ ID NO: 3044 - protein, 9 aa, Homo sapiens
  misc_feature: Table A; Target 3044; HLA-B*37:01; ACTL8; ENSG00000117148; CTA
EEYGEHMRM

SEQ ID NO: 3045 - protein, 9 aa, Homo sapiens
  misc_feature: Table A; Target 3045; HLA-B*38:01; ACTL8; ENSG00000117148; CTA
EEYGEHMRM

SEQ ID NO: 3046 - protein, 9 aa, Homo sapiens
  misc_feature: Table A; Target 3046; HLA-B*40:01; ACTL8; ENSG00000117148; CTA
EEYGEHMRM

SEQ ID NO: 3047 - protein, 9 aa, Homo sapiens
  misc_feature: Table A; Target 3047; HLA-B*40:02; ACTL8; ENSG00000117148; CTA
EEYGEHMRM

SEQ ID NO: 3048 - protein, 9 aa, Homo sapiens
  misc_feature: Table A; Target 3048; HLA-B*44:02; ACTL8; ENSG00000117148; CTA
EEYGEHMRM

SEQ ID NO: 3049 - protein, 9 aa, Homo sapiens
  misc_feature: Table A; Target 3049; HLA-B*44:03; ACTL8; ENSG00000117148; CTA
EEYGEHMRM

SEQ ID NO: 3050 - protein, 9 aa, Homo sapiens
  misc_feature: Table A; Target 3050; HLA-B*49:01; ACTL8; ENSG00000117148; CTA
EEYGEHMRM

SEQ ID NO: 3051 - protein, 9 aa, Homo sapiens
  misc_feature: Table A; Target 3051; HLA-C*16:04; ACTL8; ENSG00000117148; CTA
EEYGEHMRM

SEQ ID NO: 3052 - protein, 10 aa, Homo sapiens
  misc_feature: Table A; Target 3052; HLA-A*25:01; ACTL8; ENSG00000117148; CTA
EFAGQDLSAY

SEQ ID NO: 3053 - protein, 10 aa, Homo sapiens
  misc_feature: Table A; Target 3053; HLA-A*26:01; ACTL8; ENSG00000117148; CTA
EFAGQDLSAY

SEQ ID NO: 3054 - protein, 10 aa, Homo sapiens
  misc_feature: Table A; Target 3054; HLA-A*29:02; ACTL8; ENSG00000117148; CTA
EFAGQDLSAY

SEQ ID NO: 3055 - protein, 10 aa, Homo sapiens
  misc_feature: Table A; Target 3055; HLA-A*30:02; ACTL8; ENSG00000117148; CTA
EFAGQDLSAY

SEQ ID NO: 3056 - protein, 10 aa, Homo sapiens
  misc_feature: Table A; Target 3056; HLA-B*27:02; ACTL8; ENSG00000117148; CTA
EFAGQDLSAY

SEQ ID NO: 3057 - protein, 10 aa, Homo sapiens
  misc_feature: Table A; Target 3057; HLA-C*14:02; ACTL8; ENSG00000117148; CTA
EFAGQDLSAY

SEQ ID NO: 3058 - protein, 9 aa, Homo sapiens
  misc_feature: Table A; Target 3058; HLA-B*08:01; ACTL8; ENSG00000117148; CTA
EGSNRNFSV

SEQ ID NO: 3059 - protein, 10 aa, Homo sapiens
  misc_feature: Table A; Target 3059; HLA-A*25:01; ACTL8; ENSG00000117148; CTA
EGSNRNFSVW

SEQ ID NO: 3060 - protein, 9 aa, Homo sapiens
  misc_feature: Table A; Target 3060; HLA-A*68:02; ACTL8; ENSG00000117148; CTA
EILFELLHV

SEQ ID NO: 3061 - protein, 8 aa, Homo sapiens
  misc_feature: Table A; Target 3061; HLA-B*08:01; ACTL8; ENSG00000117148; CTA
EISLRPLL

SEQ ID NO: 3062 - protein, 9 aa, Homo sapiens
  misc_feature: Table A; Target 3062; HLA-A*68:02; ACTL8; ENSG00000117148; CTA
EISLRPLLV

SEQ ID NO: 3063 - protein, 9 aa, Homo sapiens
  misc_feature: Table A; Target 3063; HLA-B*08:01; ACTL8; ENSG00000117148; CTA
EISLRPLLV

SEQ ID NO: 3064 - protein, 10 aa, Homo sapiens
  misc_feature: Table A; Target 3064; HLA-A*25:01; ACTL8; ENSG00000117148; CTA
ELMGDHVSST

SEQ ID NO: 3065 - protein, 10 aa, Homo sapiens
  misc_feature: Table A; Target 3065; HLA-A*26:01; ACTL8; ENSG00000117148; CTA
ELMGDHVSST

SEQ ID NO: 3066 - protein, 11 aa, Homo sapiens
  misc_feature: Table A; Target 3066; HLA-A*03:02; ACTL8; ENSG00000117148; CTA
ELMGDHVSSTK

SEQ ID NO: 3067 - protein, 11 aa, Homo sapiens
  misc_feature: Table A; Target 3067; HLA-A*26:01; ACTL8; ENSG00000117148; CTA
ELMGDHVSSTK

SEQ ID NO: 3068 - protein, 11 aa, Homo sapiens
  misc_feature: Table A; Target 3068; HLA-A*33:03; ACTL8; ENSG00000117148; CTA
ELMGDHVSSTK

SEQ ID NO: 3069 - protein, 11 aa, Homo sapiens
  misc_feature: Table A; Target 3069; HLA-A*68:01; ACTL8; ENSG00000117148; CTA
ELMGDHVSSTK

SEQ ID NO: 3070 - protein, 11 aa, Homo sapiens
  misc_feature: Table A; Target 3070; HLA-C*07:06; ACTL8; ENSG00000117148; CTA
ELMGDHVSSTK

SEQ ID NO: 3071 - protein, 8 aa, Homo sapiens
  misc_feature: Table A; Target 3071; HLA-B*51:01; ACTL8; ENSG00000117148; CTA
EMFFSPQV

SEQ ID NO: 3072 - protein, 9 aa, Homo sapiens
  misc_feature: Table A; Target 3072; HLA-A*33:01; ACTL8; ENSG00000117148; CTA
ENPGPSYAR

SEQ ID NO: 3073 - protein, 9 aa, Homo sapiens
  misc_feature: Table A; Target 3073; HLA-A*33:03; ACTL8; ENSG00000117148; CTA
ENPGPSYAR

SEQ ID NO: 3074 - protein, 9 aa, Homo sapiens
  misc_feature: Table A; Target 3074; HLA-A*68:01; ACTL8; ENSG00000117148; CTA
ENPGPSYAR

SEQ ID NO: 3075 - protein, 9 aa, Homo sapiens
  misc_feature: Table A; Target 3075; HLA-C*07:06; ACTL8; ENSG00000117148; CTA
ENPGPSYAR

SEQ ID NO: 3076 - protein, 9 aa, Homo sapiens
  misc_feature: Table A; Target 3076; HLA-B*08:01; ACTL8; ENSG00000117148; CTA
EPADRKKML

SEQ ID NO: 3077 - protein, 9 aa, Homo sapiens
  misc_feature: Table A; Target 3077; HLA-B*51:01; ACTL8; ENSG00000117148; CTA
EPQMVFPNI

SEQ ID NO: 3078 - protein, 8 aa, Homo sapiens
  misc_feature: Table A; Target 3078; HLA-B*13:02; ACTL8; ENSG00000117148; CTA
EQEVPPVI

SEQ ID NO: 3079 - protein, 8 aa, Homo sapiens
  misc_feature: Table A; Target 3079; HLA-B*39:01; ACTL8; ENSG00000117148; CTA
EQEVPPVI

SEQ ID NO: 3080 - protein, 9 aa, Homo sapiens
  misc_feature: Table A; Target 3080; HLA-B*38:01; ACTL8; ENSG00000117148; CTA
EQEVPPVII

SEQ ID NO: 3081 - protein, 9 aa, Homo sapiens
  misc_feature: Table A; Target 3081; HLA-B*39:01; ACTL8; ENSG00000117148; CTA
EQEVPPVII

SEQ ID NO: 3082 - protein, 9 aa, Homo sapiens
  misc_feature: Table A; Target 3082; HLA-C*05:01; ACTL8; ENSG00000117148; CTA
EQEVPPVII

SEQ ID NO: 3083 - protein, 9 aa, Homo sapiens
  misc_feature: Table A; Target 3083; HLA-A*33:01; ACTL8; ENSG00000117148; CTA
EQPGPSIPR

SEQ ID NO: 3084 - protein, 9 aa, Homo sapiens
  misc_feature: Table A; Target 3084; HLA-A*33:03; ACTL8; ENSG00000117148; CTA
EQPGPSIPR

SEQ ID NO: 3085 - protein, 9 aa, Homo sapiens
  misc_feature: Table A; Target 3085; HLA-A*68:01; ACTL8; ENSG00000117148; CTA
EQPGPSIPR

SEQ ID NO: 3086 - protein, 9 aa, Homo sapiens
  misc_feature: Table A; Target 3086; HLA-C*07:06; ACTL8; ENSG00000117148; CTA
EQPGPSIPR

SEQ ID NO: 3087 - protein, 8 aa, Homo sapiens
  misc_feature: Table A; Target 3087; HLA-A*33:03; ACTL8; ENSG00000117148; CTA
ESCEISLR

SEQ ID NO: 3088 - protein, 8 aa, Homo sapiens
  misc_feature: Table A; Target 3088; HLA-A*25:01; ACTL8; ENSG00000117148; CTA
ETVAVTQM

SEQ ID NO: 3089 - protein, 8 aa, Homo sapiens
  misc_feature: Table A; Target 3089; HLA-A*26:01; ACTL8; ENSG00000117148; CTA
ETVAVTQM

SEQ ID NO: 3090 - protein, 8 aa, Homo sapiens
  misc_feature: Table A; Target 3090; HLA-A*33:03; ACTL8; ENSG00000117148; CTA
ETVAVTQM

SEQ ID NO: 3091 - protein, 8 aa, Homo sapiens
  misc_feature: Table A; Target 3091; HLA-B*18:01; ACTL8; ENSG00000117148; CTA
ETVAVTQM

SEQ ID NO: 3092 - protein, 8 aa, Homo sapiens
  misc_feature: Table A; Target 3092; HLA-B*40:02; ACTL8; ENSG00000117148; CTA
ETVAVTQM

SEQ ID NO: 3093 - protein, 8 aa, Homo sapiens
  misc_feature: Table A; Target 3093; HLA-C*04:01; ACTL8; ENSG00000117148; CTA
ETVAVTQM

SEQ ID NO: 3094 - protein, 8 aa, Homo sapiens
  misc_feature: Table A; Target 3094; HLA-C*07:01; ACTL8; ENSG00000117148; CTA
ETVAVTQM

SEQ ID NO: 3095 - protein, 8 aa, Homo sapiens
  misc_feature: Table A; Target 3095; HLA-C*12:03; ACTL8; ENSG00000117148; CTA
ETVAVTQM

SEQ ID NO: 3096 - protein, 9 aa, Homo sapiens
  misc_feature: Table A; Target 3096; HLA-A*68:02; ACTL8; ENSG00000117148; CTA
ETVAVTQMN

SEQ ID NO: 3097 - protein, 10 aa, Homo sapiens
  misc_feature: Table A; Target 3097; HLA-A*01:01; ACTL8; ENSG00000117148; CTA
ETVAVTQMNK

SEQ ID NO: 3098 - protein, 10 aa, Homo sapiens
  misc_feature: Table A; Target 3098; HLA-A*03:02; ACTL8; ENSG00000117148; CTA
ETVAVTQMNK

SEQ ID NO: 3099 - protein, 10 aa, Homo sapiens
  misc_feature: Table A; Target 3099; HLA-A*11:01; ACTL8; ENSG00000117148; CTA
ETVAVTQMNK

SEQ ID NO: 3100 - protein, 10 aa, Homo sapiens
  misc_feature: Table A; Target 3100; HLA-A*33:01; ACTL8; ENSG00000117148; CTA
ETVAVTQMNK

SEQ ID NO: 3101 - protein, 10 aa, Homo sapiens
  misc_feature: Table A; Target 3101; HLA-A*33:03; ACTL8; ENSG00000117148; CTA
ETVAVTQMNK

SEQ ID NO: 3102 - protein, 10 aa, Homo sapiens
  misc_feature: Table A; Target 3102; HLA-A*68:02; ACTL8; ENSG00000117148; CTA
ETVAVTQMNK

SEQ ID NO: 3103 - protein, 10 aa, Homo sapiens
  misc_feature: Table A; Target 3103; HLA-B*27:02; ACTL8; ENSG00000117148; CTA
ETVAVTQMNK

SEQ ID NO: 3104 - protein, 10 aa, Homo sapiens
  misc_feature: Table A; Target 3104; HLA-C*06:02; ACTL8; ENSG00000117148; CTA
ETVAVTQMNK

SEQ ID NO: 3105 - protein, 10 aa, Homo sapiens
  misc_feature: Table A; Target 3105; HLA-C*07:01; ACTL8; ENSG00000117148; CTA
ETVAVTQMNK

SEQ ID NO: 3106 - protein, 10 aa, Homo sapiens
  misc_feature: Table A; Target 3106; HLA-C*07:06; ACTL8; ENSG00000117148; CTA
ETVAVTQMNK

SEQ ID NO: 3107 - protein, 9 aa, Homo sapiens
  misc_feature: Table A; Target 3107; HLA-A*26:01; ACTL8; ENSG00000117148; CTA
EVPPVIITE

SEQ ID NO: 3108 - protein, 10 aa, Homo sapiens
  misc_feature: Table A; Target 3108; HLA-A*25:01; ACTL8; ENSG00000117148; CTA
EVPPVIITET

SEQ ID NO: 3109 - protein, 10 aa, Homo sapiens
  misc_feature: Table A; Target 3109; HLA-A*26:01; ACTL8; ENSG00000117148; CTA
EVPPVIITET

SEQ ID NO: 3110 - protein, 10 aa, Homo sapiens
  misc_feature: Table A; Target 3110; HLA-A*68:01; ACTL8; ENSG00000117148; CTA
EVPPVIITET

SEQ ID NO: 3111 - protein, 10 aa, Homo sapiens
  misc_feature: Table A; Target 3111; HLA-A*68:02; ACTL8; ENSG00000117148; CTA
EVPPVIITET

SEQ ID NO: 3112 - protein, 8 aa, Homo sapiens
  misc_feature: Table A; Target 3112; HLA-A*24:02; ACTL8; ENSG00000117148; CTA
EYGEHMRM

SEQ ID NO: 3113 - protein, 8 aa, Homo sapiens
  misc_feature: Table A; Target 3113; HLA-C*07:01; ACTL8; ENSG00000117148; CTA
EYGEHMRM

SEQ ID NO: 3114 - protein, 9 aa, Homo sapiens
  misc_feature: Table A; Target 3114; HLA-A*01:01; ACTL8; ENSG00000117148; CTA
FAGQDLSAY

SEQ ID NO: 3115 - protein, 9 aa, Homo sapiens
  misc_feature: Table A; Target 3115; HLA-A*25:01; ACTL8; ENSG00000117148; CTA
FAGQDLSAY

SEQ ID NO: 3116 - protein, 9 aa, Homo sapiens
  misc_feature: Table A; Target 3116; HLA-A*26:01; ACTL8; ENSG00000117148; CTA
FAGQDLSAY

SEQ ID NO: 3117 - protein, 9 aa, Homo sapiens
  misc_feature: Table A; Target 3117; HLA-A*29:02; ACTL8; ENSG00000117148; CTA
FAGQDLSAY

SEQ ID NO: 3118 - protein, 9 aa, Homo sapiens
  misc_feature: Table A; Target 3118; HLA-A*30:02; ACTL8; ENSG00000117148; CTA
FAGQDLSAY

SEQ ID NO: 3119 - protein, 9 aa, Homo sapiens
  misc_feature: Table A; Target 3119; HLA-B*15:01; ACTL8; ENSG00000117148; CTA
FAGQDLSAY

SEQ ID NO: 3120 - protein, 9 aa, Homo sapiens
  misc_feature: Table A; Target 3120; HLA-B*15:03; ACTL8; ENSG00000117148; CTA
FAGQDLSAY

SEQ ID NO: 3121 - protein, 9 aa, Homo sapiens
  misc_feature: Table A; Target 3121; HLA-B*18:01; ACTL8; ENSG00000117148; CTA
FAGQDLSAY

SEQ ID NO: 3122 - protein, 9 aa, Homo sapiens
  misc_feature: Table A; Target 3122; HLA-B*35:01; ACTL8; ENSG00000117148; CTA
FAGQDLSAY

SEQ ID NO: 3123 - protein, 9 aa, Homo sapiens
  misc_feature: Table A; Target 3123; HLA-B*39:01; ACTL8; ENSG00000117148; CTA
FAGQDLSAY

SEQ ID NO: 3124 - protein, 9 aa, Homo sapiens
  misc_feature: Table A; Target 3124; HLA-B*46:01; ACTL8; ENSG00000117148; CTA
FAGQDLSAY

SEQ ID NO: 3125 - protein, 9 aa, Homo sapiens
  misc_feature: Table A; Target 3125; HLA-B*55:01; ACTL8; ENSG00000117148; CTA
FAGQDLSAY

SEQ ID NO: 3126 - protein, 9 aa, Homo sapiens
  misc_feature: Table A; Target 3126; HLA-C*01:02; ACTL8; ENSG00000117148; CTA
FAGQDLSAY

SEQ ID NO: 3127 - protein, 9 aa, Homo sapiens
  misc_feature: Table A; Target 3127; HLA-C*02:02; ACTL8; ENSG00000117148; CTA
FAGQDLSAY

SEQ ID NO: 3128 - protein, 9 aa, Homo sapiens
  misc_feature: Table A; Target 3128; HLA-C*03:03; ACTL8; ENSG00000117148; CTA
FAGQDLSAY

SEQ ID NO: 3129 - protein, 9 aa, Homo sapiens
  misc_feature: Table A; Target 3129; HLA-C*03:04; ACTL8; ENSG00000117148; CTA
FAGQDLSAY

SEQ ID NO: 3130 - protein, 9 aa, Homo sapiens
  misc_feature: Table A; Target 3130; HLA-C*07:04; ACTL8; ENSG00000117148; CTA
FAGQDLSAY

SEQ ID NO: 3131 - protein, 9 aa, Homo sapiens
  misc_feature: Table A; Target 3131; HLA-C*07:06; ACTL8; ENSG00000117148; CTA
FAGQDLSAY

SEQ ID NO: 3132 - protein, 9 aa, Homo sapiens
  misc_feature: Table A; Target 3132; HLA-C*12:03; ACTL8; ENSG00000117148; CTA
FAGQDLSAY

SEQ ID NO: 3133 - protein, 9 aa, Homo sapiens
  misc_feature: Table A; Target 3133; HLA-C*14:02; ACTL8; ENSG00000117148; CTA
FAGQDLSAY

SEQ ID NO: 3134 - protein, 9 aa, Homo sapiens
  misc_feature: Table A; Target 3134; HLA-C*16:02; ACTL8; ENSG00000117148; CTA
FAGQDLSAY

SEQ ID NO: 3135 - protein, 9 aa, Homo sapiens
  misc_feature: Table A; Target 3135; HLA-C*16:04; ACTL8; ENSG00000117148; CTA
FAGQDLSAY

SEQ ID NO: 3136 - protein, 9 aa, Homo sapiens
  misc_feature: Table A; Target 3136; HLA-A*02:01; ACTL8; ENSG00000117148; CTA
FELLHVPSV

SEQ ID NO: 3137 - protein, 9 aa, Homo sapiens
  misc_feature: Table A; Target 3137; HLA-A*02:03; ACTL8; ENSG00000117148; CTA
FELLHVPSV

SEQ ID NO: 3138 - protein, 9 aa, Homo sapiens
  misc_feature: Table A; Target 3138; HLA-A*02:04; ACTL8; ENSG00000117148; CTA
FELLHVPSV

SEQ ID NO: 3139 - protein, 9 aa, Homo sapiens
  misc_feature: Table A; Target 3139; HLA-A*02:07; ACTL8; ENSG00000117148; CTA
FELLHVPSV

SEQ ID NO: 3140 - protein, 9 aa, Homo sapiens
  misc_feature: Table A; Target 3140; HLA-A*30:01; ACTL8; ENSG00000117148; CTA
FELLHVPSV

SEQ ID NO: 3141 - protein, 9 aa, Homo sapiens
  misc_feature: Table A; Target 3141; HLA-B*13:02; ACTL8; ENSG00000117148; CTA
FELLHVPSV

SEQ ID NO: 3142 - protein, 9 aa, Homo sapiens
  misc_feature: Table A; Target 3142; HLA-B*18:01; ACTL8; ENSG00000117148; CTA
FELLHVPSV

SEQ ID NO: 3143 - protein, 9 aa, Homo sapiens
  misc_feature: Table A; Target 3143; HLA-B*37:01; ACTL8; ENSG00000117148; CTA
FELLHVPSV

SEQ ID NO: 3144 - protein, 9 aa, Homo sapiens
  misc_feature: Table A; Target 3144; HLA-B*40:01; ACTL8; ENSG00000117148; CTA
FELLHVPSV

SEQ ID NO: 3145 - protein, 9 aa, Homo sapiens
  misc_feature: Table A; Target 3145; HLA-B*40:02; ACTL8; ENSG00000117148; CTA
FELLHVPSV

SEQ ID NO: 3146 - protein, 9 aa, Homo sapiens
  misc_feature: Table A; Target 3146; HLA-B*51:01; ACTL8; ENSG00000117148; CTA
FELLHVPSV

SEQ ID NO: 3147 - protein, 9 aa, Homo sapiens
  misc_feature: Table A; Target 3147; HLA-B*54:01; ACTL8; ENSG00000117148; CTA
FELLHVPSV

SEQ ID NO: 3148 - protein, 10 aa, Homo sapiens
  misc_feature: Table A; Target 3148; HLA-A*30:01; ACTL8; ENSG00000117148; CTA
FELLHVPSVL

SEQ ID NO: 3149 - protein, 10 aa, Homo sapiens
  misc_feature: Table A; Target 3149; HLA-B*40:01; ACTL8; ENSG00000117148; CTA
FELLHVPSVL

SEQ ID NO: 3150 - protein, 8 aa, Homo sapiens
  misc_feature: Table A; Target 3150; HLA-A*30:01; ACTL8; ENSG00000117148; CTA
FEQPGPSI

SEQ ID NO: 3151 - protein, 8 aa, Homo sapiens
  misc_feature: Table A; Target 3151; HLA-B*18:01; ACTL8; ENSG00000117148; CTA
FEQPGPSI

SEQ ID NO: 3152 - protein, 8 aa, Homo sapiens
  misc_feature: Table A; Target 3152; HLA-B*40:01; ACTL8; ENSG00000117148; CTA
FEQPGPSI

SEQ ID NO: 3153 - protein, 8 aa, Homo sapiens
  misc_feature: Table A; Target 3153; HLA-B*40:02; ACTL8; ENSG00000117148; CTA
FEQPGPSI

SEQ ID NO: 3154 - protein, 8 aa, Homo sapiens
  misc_feature: Table A; Target 3154; HLA-B*49:01; ACTL8; ENSG00000117148; CTA
FEQPGPSI

SEQ ID NO: 3155 - protein, 9 aa, Homo sapiens
  misc_feature: Table A; Target 3155; HLA-B*49:01; ACTL8; ENSG00000117148; CTA
FEQPGPSIP

SEQ ID NO: 3156 - protein, 10 aa, Homo sapiens
  misc_feature: Table A; Target 3156; HLA-A*11:01; ACTL8; ENSG00000117148; CTA
FEQPGPSIPR

SEQ ID NO: 3157 - protein, 10 aa, Homo sapiens
  misc_feature: Table A; Target 3157; HLA-A*31:01; ACTL8; ENSG00000117148; CTA
FEQPGPSIPR

SEQ ID NO: 3158 - protein, 10 aa, Homo sapiens
  misc_feature: Table A; Target 3158; HLA-A*33:01; ACTL8; ENSG00000117148; CTA
FEQPGPSIPR

SEQ ID NO: 3159 - protein, 10 aa, Homo sapiens
  misc_feature: Table A; Target 3159; HLA-A*33:03; ACTL8; ENSG00000117148; CTA
FEQPGPSIPR

SEQ ID NO: 3160 - protein, 10 aa, Homo sapiens
  misc_feature: Table A; Target 3160; HLA-A*68:01; ACTL8; ENSG00000117148; CTA
FEQPGPSIPR

SEQ ID NO: 3161 - protein, 10 aa, Homo sapiens
  misc_feature: Table A; Target 3161; HLA-B*27:02; ACTL8; ENSG00000117148; CTA
FEQPGPSIPR

SEQ ID NO: 3162 - protein, 10 aa, Homo sapiens
  misc_feature: Table A; Target 3162; HLA-B*27:05; ACTL8; ENSG00000117148; CTA
FEQPGPSIPR

SEQ ID NO: 3163 - protein, 10 aa, Homo sapiens
  misc_feature: Table A; Target 3163; HLA-C*06:02; ACTL8; ENSG00000117148; CTA
FEQPGPSIPR

SEQ ID NO: 3164 - protein, 10 aa, Homo sapiens
  misc_feature: Table A; Target 3164; HLA-C*07:06; ACTL8; ENSG00000117148; CTA
FEQPGPSIPR

SEQ ID NO: 3165 - protein, 9 aa, Homo sapiens
  misc_feature: Table A; Target 3165; HLA-A*25:01; ACTL8; ENSG00000117148; CTA
FLKAGTAGW

SEQ ID NO: 3166 - protein, 9 aa, Homo sapiens
  misc_feature: Table A; Target 3166; HLA-A*32:01; ACTL8; ENSG00000117148; CTA
FLKAGTAGW

SEQ ID NO: 3167 - protein, 9 aa, Homo sapiens
  misc_feature: Table A; Target 3167; HLA-B*46:01; ACTL8; ENSG00000117148; CTA
FLKAGTAGW

SEQ ID NO: 3168 - protein, 8 aa, Homo sapiens
  misc_feature: Table A; Target 3168; HLA-B*35:01; ACTL8; ENSG00000117148; CTA
FPNIVNYL

SEQ ID NO: 3169 - protein, 8 aa, Homo sapiens
  misc_feature: Table A; Target 3169; HLA-B*51:01; ACTL8; ENSG00000117148; CTA
FPNIVNYL

SEQ ID NO: 3170 - protein, 8 aa, Homo sapiens
  misc_feature: Table A; Target 3170; HLA-B*54:01; ACTL8; ENSG00000117148; CTA
FPNIVNYL

SEQ ID NO: 3171 - protein, 9 aa, Homo sapiens
  misc_feature: Table A; Target 3171; HLA-B*54:01; ACTL8; ENSG00000117148; CTA
FPNIVNYLP

SEQ ID NO: 3172 - protein, 8 aa, Homo sapiens
  misc_feature: Table A; Target 3172; HLA-A*02:01; ACTL8; ENSG00000117148; CTA
FQLETVAV

SEQ ID NO: 3173 - protein, 8 aa, Homo sapiens
  misc_feature: Table A; Target 3173; HLA-A*30:01; ACTL8; ENSG00000117148; CTA
FQLETVAV

SEQ ID NO: 3174 - protein, 8 aa, Homo sapiens
  misc_feature: Table A; Target 3174; HLA-B*13:02; ACTL8; ENSG00000117148; CTA
FQLETVAV

SEQ ID NO: 3175 - protein, 8 aa, Homo sapiens
  misc_feature: Table A; Target 3175; HLA-C*03:04; ACTL8; ENSG00000117148; CTA
FQLETVAV

SEQ ID NO: 3176 - protein, 9 aa, Homo sapiens
  misc_feature: Table A; Target 3176; HLA-A*02:01; ACTL8; ENSG00000117148; CTA
FQLETVAVT

SEQ ID NO: 3177 - protein, 9 aa, Homo sapiens
  misc_feature: Table A; Target 3177; HLA-B*13:02; ACTL8; ENSG00000117148; CTA
FQLETVAVT

SEQ ID NO: 3178 - protein, 9 aa, Homo sapiens
  misc_feature: Table A; Target 3178; HLA-B*27:05; ACTL8; ENSG00000117148; CTA
FQLETVAVT

SEQ ID NO: 3179 - protein, 9 aa, Homo sapiens
  misc_feature: Table A; Target 3179; HLA-C*07:04; ACTL8; ENSG00000117148; CTA
FQLETVAVT

SEQ ID NO: 3180 - protein, 10 aa, Homo sapiens
  misc_feature: Table A; Target 3180; HLA-B*27:05; ACTL8; ENSG00000117148; CTA
FQLETVAVTQ

SEQ ID NO: 3181 - protein, 11 aa, Homo sapiens
  misc_feature: Table A; Target 3181; HLA-A*02:01; ACTL8; ENSG00000117148; CTA
FQLETVAVTQM

SEQ ID NO: 3182 - protein, 11 aa, Homo sapiens
  misc_feature: Table A; Target 3182; HLA-A*02:04; ACTL8; ENSG00000117148; CTA
FQLETVAVTQM

SEQ ID NO: 3183 - protein, 11 aa, Homo sapiens
  misc_feature: Table A; Target 3183; HLA-B*13:02; ACTL8; ENSG00000117148; CTA
FQLETVAVTQM

SEQ ID NO: 3184 - protein, 11 aa, Homo sapiens
  misc_feature: Table A; Target 3184; HLA-B*39:01; ACTL8; ENSG00000117148; CTA
FQLETVAVTQM

SEQ ID NO: 3185 - protein, 11 aa, Homo sapiens
  misc_feature: Table A; Target 3185; HLA-C*07:04; ACTL8; ENSG00000117148; CTA
FQLETVAVTQM

SEQ ID NO: 3186 - protein, 9 aa, Homo sapiens
  misc_feature: Table A; Target 3186; HLA-A*68:02; ACTL8; ENSG00000117148; CTA
FSVWLGASV

SEQ ID NO: 3187 - protein, 9 aa, Homo sapiens
  misc_feature: Table A; Target 3187; HLA-B*54:01; ACTL8; ENSG00000117148; CTA
FSVWLGASV

SEQ ID NO: 3188 - protein, 9 aa, Homo sapiens
  misc_feature: Table A; Target 3188; HLA-C*02:02; ACTL8; ENSG00000117148; CTA
FSVWLGASV

SEQ ID NO: 3189 - protein, 11 aa, Homo sapiens
  misc_feature: Table A; Target 3189; HLA-B*54:01; ACTL8; ENSG00000117148; CTA
FSVWLGASVVA

SEQ ID NO: 3190 - protein, 9 aa, Homo sapiens
  misc_feature: Table A; Target 3190; HLA-A*31:01; ACTL8; ENSG00000117148; CTA
FSYPIERGR

SEQ ID NO: 3191 - protein, 8 aa, Homo sapiens
  misc_feature: Table A; Target 3191; HLA-B*37:01; ACTL8; ENSG00000117148; CTA
GASVVAHL

SEQ ID NO: 3192 - protein, 8 aa, Homo sapiens
  misc_feature: Table A; Target 3192; HLA-C*03:04; ACTL8; ENSG00000117148; CTA
GASVVAHL

SEQ ID NO: 3193 - protein, 8 aa, Homo sapiens
  misc_feature: Table A; Target 3193; HLA-C*16:02; ACTL8; ENSG00000117148; CTA
GASVVAHL

SEQ ID NO: 3194 - protein, 11 aa, Homo sapiens
  misc_feature: Table A; Target 3194; HLA-A*30:02; ACTL8; ENSG00000117148; CTA
GASVVAHLSTY

SEQ ID NO: 3195 - protein, 11 aa, Homo sapiens
  misc_feature: Table A; Target 3195; HLA-B*15:01; ACTL8; ENSG00000117148; CTA
GASVVAHLSTY

SEQ ID NO: 3196 - protein, 11 aa, Homo sapiens
  misc_feature: Table A; Target 3196; HLA-B*15:03; ACTL8; ENSG00000117148; CTA
GASVVAHLSTY

SEQ ID NO: 3197 - protein, 11 aa, Homo sapiens
  misc_feature: Table A; Target 3197; HLA-B*46:01; ACTL8; ENSG00000117148; CTA
GASVVAHLSTY

SEQ ID NO: 3198 - protein, 11 aa, Homo sapiens
  misc_feature: Table A; Target 3198; HLA-C*02:02; ACTL8; ENSG00000117148; CTA
GASVVAHLSTY

SEQ ID NO: 3199 - protein, 11 aa, Homo sapiens
  misc_feature: Table A; Target 3199; HLA-C*03:03; ACTL8; ENSG00000117148; CTA
GASVVAHLSTY

SEQ ID NO: 3200 - protein, 11 aa, Homo sapiens
  misc_feature: Table A; Target 3200; HLA-C*04:01; ACTL8; ENSG00000117148; CTA
GASVVAHLSTY

SEQ ID NO: 3201 - protein, 11 aa, Homo sapiens
  misc_feature: Table A; Target 3201; HLA-C*16:04; ACTL8; ENSG00000117148; CTA
GASVVAHLSTY

SEQ ID NO: 3202 - protein, 8 aa, Homo sapiens
  misc_feature: Table A; Target 3202; HLA-B*27:05; ACTL8; ENSG00000117148; CTA
GDHVSSTK

SEQ ID NO: 3203 - protein, 8 aa, Homo sapiens
  misc_feature: Table A; Target 3203; HLA-B*37:01; ACTL8; ENSG00000117148; CTA
GDHVSSTK

SEQ ID NO: 3204 - protein, 8 aa, Homo sapiens
  misc_feature: Table A; Target 3204; HLA-C*06:02; ACTL8; ENSG00000117148; CTA
GDHVSSTK

SEQ ID NO: 3205 - protein, 11 aa, Homo sapiens
  misc_feature: Table A; Target 3205; HLA-A*03:02; ACTL8; ENSG00000117148; CTA
GGNTLYPGFTK

SEQ ID NO: 3206 - protein, 11 aa, Homo sapiens
  misc_feature: Table A; Target 3206; HLA-A*11:01; ACTL8; ENSG00000117148; CTA
GGNTLYPGFTK

SEQ ID NO: 3207 - protein, 8 aa, Homo sapiens
  misc_feature: Table A; Target 3207; HLA-A*02:01; ACTL8; ENSG00000117148; CTA
GLLTGVVV

SEQ ID NO: 3208 - protein, 8 aa, Homo sapiens
  misc_feature: Table A; Target 3208; HLA-A*02:04; ACTL8; ENSG00000117148; CTA
GLLTGVVV

SEQ ID NO: 3209 - protein, 8 aa, Homo sapiens
  misc_feature: Table A; Target 3209; HLA-B*13:02; ACTL8; ENSG00000117148; CTA
GLLTGVVV

SEQ ID NO: 3210 - protein, 10 aa, Homo sapiens
  misc_feature: Table A; Target 3210; HLA-A*02:01; ACTL8; ENSG00000117148; CTA
GLLTGVVVDS

SEQ ID NO: 3211 - protein, 8 aa, Homo sapiens
  misc_feature: Table A; Target 3211; HLA-B*37:01; ACTL8; ENSG00000117148; CTA
GLTRVQPF

SEQ ID NO: 3212 - protein, 10 aa, Homo sapiens
  misc_feature: Table A; Target 3212; HLA-B*27:02; ACTL8; ENSG00000117148; CTA
GNTLYPGFTK

SEQ ID NO: 3213 - protein, 10 aa, Homo sapiens
  misc_feature: Table A; Target 3213; HLA-B*27:05; ACTL8; ENSG00000117148; CTA
GNTLYPGFTK

SEQ ID NO: 3214 - protein, 9 aa, Homo sapiens
  misc_feature: Table A; Target 3214; HLA-B*07:02; ACTL8; ENSG00000117148; CTA
GPSIPRAIV

SEQ ID NO: 3215 - protein, 9 aa, Homo sapiens
  misc_feature: Table A; Target 3215; HLA-C*07:02; ACTL8; ENSG00000117148; CTA
GPSIPRAIV

SEQ ID NO: 3216 - protein, 11 aa, Homo sapiens
  misc_feature: Table A; Target 3216; HLA-B*07:02; ACTL8; ENSG00000117148; CTA
GPSYARRRVSL

SEQ ID NO: 3217 - protein, 8 aa, Homo sapiens
  misc_feature: Table A; Target 3217; HLA-B*38:01; ACTL8; ENSG00000117148; CTA
GQDLSAYL

SEQ ID NO: 3218 - protein, 8 aa, Homo sapiens
  misc_feature: Table A; Target 3218; HLA-C*05:01; ACTL8; ENSG00000117148; CTA
GQDLSAYL

SEQ ID NO: 3219 - protein, 9 aa, Homo sapiens
  misc_feature: Table A; Target 3219; HLA-A*02:07; ACTL8; ENSG00000117148; CTA
GQDLSAYLL

SEQ ID NO: 3220 - protein, 9 aa, Homo sapiens
  misc_feature: Table A; Target 3220; HLA-B*13:02; ACTL8; ENSG00000117148; CTA
GQDLSAYLL

SEQ ID NO: 3221 - protein, 9 aa, Homo sapiens
  misc_feature: Table A; Target 3221; HLA-B*15:01; ACTL8; ENSG00000117148; CTA
GQDLSAYLL

SEQ ID NO: 3222 - protein, 9 aa, Homo sapiens
  misc_feature: Table A; Target 3222; HLA-B*27:05; ACTL8; ENSG00000117148; CTA
GQDLSAYLL

SEQ ID NO: 3223 - protein, 9 aa, Homo sapiens
  misc_feature: Table A; Target 3223; HLA-B*38:01; ACTL8; ENSG00000117148; CTA
GQDLSAYLL

SEQ ID NO: 3224 - protein, 9 aa, Homo sapiens
  misc_feature: Table A; Target 3224; HLA-B*39:01; ACTL8; ENSG00000117148; CTA
GQDLSAYLL

SEQ ID NO: 3225 - protein, 9 aa, Homo sapiens
  misc_feature: Table A; Target 3225; HLA-B*40:01; ACTL8; ENSG00000117148; CTA
GQDLSAYLL

SEQ ID NO: 3226 - protein, 9 aa, Homo sapiens
  misc_feature: Table A; Target 3226; HLA-B*40:02; ACTL8; ENSG00000117148; CTA
GQDLSAYLL

SEQ ID NO: 3227 - protein, 9 aa, Homo sapiens
  misc_feature: Table A; Target 3227; HLA-C*04:01; ACTL8; ENSG00000117148; CTA
GQDLSAYLL

SEQ ID NO: 3228 - protein, 9 aa, Homo sapiens
  misc_feature: Table A; Target 3228; HLA-C*05:01; ACTL8; ENSG00000117148; CTA
GQDLSAYLL

SEQ ID NO: 3229 - protein, 9 aa, Homo sapiens
  misc_feature: Table A; Target 3229; HLA-C*07:04; ACTL8; ENSG00000117148; CTA
GQDLSAYLL

SEQ ID NO: 3230 - protein, 10 aa, Homo sapiens
  misc_feature: Table A; Target 3230; HLA-A*11:01; ACTL8; ENSG00000117148; CTA
GQDLSAYLLK

SEQ ID NO: 3231 - protein, 10 aa, Homo sapiens
  misc_feature: Table A; Target 3231; HLA-B*27:02; ACTL8; ENSG00000117148; CTA
GQDLSAYLLK

SEQ ID NO: 3232 - protein, 11 aa, Homo sapiens
  misc_feature: Table A; Target 3232; HLA-C*16:04; ACTL8; ENSG00000117148; CTA
GRILNWEGVQY

SEQ ID NO: 3233 - protein, 9 aa, Homo sapiens
  misc_feature: Table A; Target 3233; HLA-B*27:05; ACTL8; ENSG00000117148; CTA
GRPLPASGK

SEQ ID NO: 3234 - protein, 11 aa, Homo sapiens
  misc_feature: Table A; Target 3234; HLA-B*27:05; ACTL8; ENSG00000117148; CTA
GRPLPASGKTL

SEQ ID NO: 3235 - protein, 9 aa, Homo sapiens
  misc_feature: Table A; Target 3235; HLA-A*25:01; ACTL8; ENSG00000117148; CTA
GSNRNFSVW

SEQ ID NO: 3236 - protein, 9 aa, Homo sapiens
  misc_feature: Table A; Target 3236; HLA-A*32:01; ACTL8; ENSG00000117148; CTA
GSNRNFSVW

SEQ ID NO: 3237 - protein, 9 aa, Homo sapiens
  misc_feature: Table A; Target 3237; HLA-B*57:01; ACTL8; ENSG00000117148; CTA
GSNRNFSVW

SEQ ID NO: 3238 - protein, 9 aa, Homo sapiens
  misc_feature: Table A; Target 3238; HLA-B*58:01; ACTL8; ENSG00000117148; CTA
GSNRNFSVW

SEQ ID NO: 3239 - protein, 9 aa, Homo sapiens
  misc_feature: Table A; Target 3239; HLA-B*46:01; ACTL8; ENSG00000117148; CTA
GSRVELTPM

SEQ ID NO: 3240 - protein, 11 aa, Homo sapiens
  misc_feature: Table A; Target 3240; HLA-A*31:01; ACTL8; ENSG00000117148; CTA
GSRVELTPMQR

SEQ ID NO: 3241 - protein, 8 aa, Homo sapiens
  misc_feature: Table A; Target 3241; HLA-B*15:01; ACTL8; ENSG00000117148; CTA
GVVVDSGY

SEQ ID NO: 3242 - protein, 9 aa, Homo sapiens
  misc_feature: Table A; Target 3242; HLA-A*24:02; ACTL8; ENSG00000117148; CTA
GWNEPQMVF

SEQ ID NO: 3243 - protein, 10 aa, Homo sapiens
  misc_feature: Table A; Target 3243; HLA-A*24:02; ACTL8; ENSG00000117148; CTA
GYGLTRVQPF

SEQ ID NO: 3244 - protein, 9 aa, Homo sapiens
  misc_feature: Table A; Target 3244; HLA-A*25:01; ACTL8; ENSG00000117148; CTA
HLSTYQSEW

SEQ ID NO: 3245 - protein, 9 aa, Homo sapiens
  misc_feature: Table A; Target 3245; HLA-A*32:01; ACTL8; ENSG00000117148; CTA
HLSTYQSEW

SEQ ID NO: 3246 - protein, 9 aa, Homo sapiens
  misc_feature: Table A; Target 3246; HLA-B*57:01; ACTL8; ENSG00000117148; CTA
HLSTYQSEW

SEQ ID NO: 3247 - protein, 9 aa, Homo sapiens
  misc_feature: Table A; Target 3247; HLA-B*58:01; ACTL8; ENSG00000117148; CTA
HLSTYQSEW

SEQ ID NO: 3248 - protein, 10 aa, Homo sapiens
  misc_feature: Table A; Target 3248; HLA-B*35:03; ACTL8; ENSG00000117148; CTA
HVMACGGNTL

SEQ ID NO: 3249 - protein, 11 aa, Homo sapiens
  misc_feature: Table A; Target 3249; HLA-A*29:02; ACTL8; ENSG00000117148; CTA
HVMACGGNTLY

SEQ ID NO: 3250 - protein, 11 aa, Homo sapiens
  misc_feature: Table A; Target 3250; HLA-B*15:01; ACTL8; ENSG00000117148; CTA
HVMACGGNTLY

SEQ ID NO: 3251 - protein, 11 aa, Homo sapiens
  misc_feature: Table A; Target 3251; HLA-A*02:07; ACTL8; ENSG00000117148; CTA
HVPSVLLADQL

SEQ ID NO: 3252 - protein, 11 aa, Homo sapiens
  misc_feature: Table A; Target 3252; HLA-A*68:02; ACTL8; ENSG00000117148; CTA
HVPSVLLADQL

SEQ ID NO: 3253 - protein, 9 aa, Homo sapiens
  misc_feature: Table A; Target 3253; HLA-A*02:03; ACTL8; ENSG00000117148; CTA
HVSSTKATV

SEQ ID NO: 3254 - protein, 9 aa, Homo sapiens
  misc_feature: Table A; Target 3254; HLA-A*32:01; ACTL8; ENSG00000117148; CTA
HVSSTKATV

SEQ ID NO: 3255 - protein, 9 aa, Homo sapiens
  misc_feature: Table A; Target 3255; HLA-A*68:02; ACTL8; ENSG00000117148; CTA
HVSSTKATV

SEQ ID NO: 3256 - protein, 9 aa, Homo sapiens
  misc_feature: Table A; Target 3256; HLA-B*13:02; ACTL8; ENSG00000117148; CTA
HVSSTKATV

SEQ ID NO: 3257 - protein, 9 aa, Homo sapiens
  misc_feature: Table A; Target 3257; HLA-B*51:01; ACTL8; ENSG00000117148; CTA
HVSSTKATV

SEQ ID NO: 3258 - protein, 10 aa, Homo sapiens
  misc_feature: Table A; Target 3258; HLA-A*25:01; ACTL8; ENSG00000117148; CTA
HVSSTKATVW

SEQ ID NO: 3259 - protein, 10 aa, Homo sapiens
  misc_feature: Table A; Target 3259; HLA-A*32:01; ACTL8; ENSG00000117148; CTA
HVSSTKATVW

SEQ ID NO: 3260 - protein, 10 aa, Homo sapiens
  misc_feature: Table A; Target 3260; HLA-A*68:01; ACTL8; ENSG00000117148; CTA
HVSSTKATVW

SEQ ID NO: 3261 - protein, 10 aa, Homo sapiens
  misc_feature: Table A; Target 3261; HLA-B*44:03; ACTL8; ENSG00000117148; CTA
HVSSTKATVW

SEQ ID NO: 3262 - protein, 10 aa, Homo sapiens
  misc_feature: Table A; Target 3262; HLA-B*57:01; ACTL8; ENSG00000117148; CTA
HVSSTKATVW

SEQ ID NO: 3263 - protein, 10 aa, Homo sapiens
  misc_feature: Table A; Target 3263; HLA-B*58:01; ACTL8; ENSG00000117148; CTA
HVSSTKATVW

SEQ ID NO: 3264 - protein, 9 aa, Homo sapiens
  misc_feature: Table A; Target 3264; HLA-A*29:02; ACTL8; ENSG00000117148; CTA
ICHPDTFSY

SEQ ID NO: 3265 - protein, 9 aa, Homo sapiens
  misc_feature: Table A; Target 3265; HLA-A*30:02; ACTL8; ENSG00000117148; CTA
ICHPDTFSY

SEQ ID NO: 3266 - protein, 9 aa, Homo sapiens
  misc_feature: Table A; Target 3266; HLA-A*32:01; ACTL8; ENSG00000117148; CTA
ICHPDTFSY

SEQ ID NO: 3267 - protein, 9 aa, Homo sapiens
  misc_feature: Table A; Target 3267; HLA-B*15:01; ACTL8; ENSG00000117148; CTA
ICHPDTFSY

SEQ ID NO: 3268 - protein, 9 aa, Homo sapiens
  misc_feature: Table A; Target 3268; HLA-B*46:01; ACTL8; ENSG00000117148; CTA
ICHPDTFSY

SEQ ID NO: 3269 - protein, 8 aa, Homo sapiens
  misc_feature: Table A; Target 3269; HLA-B*40:02; ACTL8; ENSG00000117148; CTA
IDHGSGFL

SEQ ID NO: 3270 - protein, 8 aa, Homo sapiens
  misc_feature: Table A; Target 3270; HLA-C*06:02; ACTL8; ENSG00000117148; CTA
IDHGSGFL

SEQ ID NO: 3271 - protein, 8 aa, Homo sapiens
  misc_feature: Table A; Target 3271; HLA-C*07:01; ACTL8; ENSG00000117148; CTA
IDHGSGFL

SEQ ID NO: 3272 - protein, 8 aa, Homo sapiens
  misc_feature: Table A; Target 3272; HLA-C*07:04; ACTL8; ENSG00000117148; CTA
IDHGSGFL

SEQ ID NO: 3273 - protein, 9 aa, Homo sapiens
  misc_feature: Table A; Target 3273; HLA-A*03:01; ACTL8; ENSG00000117148; CTA
IDHGSGFLK

SEQ ID NO: 3274 - protein, 9 aa, Homo sapiens
  misc_feature: Table A; Target 3274; HLA-A*03:02; ACTL8; ENSG00000117148; CTA
IDHGSGFLK

SEQ ID NO: 3275 - protein, 9 aa, Homo sapiens
  misc_feature: Table A; Target 3275; HLA-A*11:01; ACTL8; ENSG00000117148; CTA
IDHGSGFLK

SEQ ID NO: 3276 - protein, 9 aa, Homo sapiens
  misc_feature: Table A; Target 3276; HLA-A*33:01; ACTL8; ENSG00000117148; CTA
IDHGSGFLK

SEQ ID NO: 3277 - protein, 9 aa, Homo sapiens
  misc_feature: Table A; Target 3277; HLA-B*27:02; ACTL8; ENSG00000117148; CTA
IDHGSGFLK

SEQ ID NO: 3278 - protein, 9 aa, Homo sapiens
  misc_feature: Table A; Target 3278; HLA-C*06:02; ACTL8; ENSG00000117148; CTA
IDHGSGFLK

SEQ ID NO: 3279 - protein, 9 aa, Homo sapiens
  misc_feature: Table A; Target 3279; HLA-C*07:01; ACTL8; ENSG00000117148; CTA
IDHGSGFLK

SEQ ID NO: 3280 - protein, 9 aa, Homo sapiens
  misc_feature: Table A; Target 3280; HLA-C*07:04; ACTL8; ENSG00000117148; CTA
IDHGSGFLK

SEQ ID NO: 3281 - protein, 9 aa, Homo sapiens
  misc_feature: Table A; Target 3281; HLA-A*24:02; ACTL8; ENSG00000117148; CTA
IDICHPDTF

SEQ ID NO: 3282 - protein, 9 aa, Homo sapiens
  misc_feature: Table A; Target 3282; HLA-B*37:01; ACTL8; ENSG00000117148; CTA
IDICHPDTF

SEQ ID NO: 3283 - protein, 9 aa, Homo sapiens
  misc_feature: Table A; Target 3283; HLA-B*44:02; ACTL8; ENSG00000117148; CTA
IERGRILNW

SEQ ID NO: 3284 - protein, 8 aa, Homo sapiens
  misc_feature: Table A; Target 3284; HLA-C*03:04; ACTL8; ENSG00000117148; CTA
IIDHGSGF

SEQ ID NO: 3285 - protein, 8 aa, Homo sapiens
  misc_feature: Table A; Target 3285; HLA-C*04:01; ACTL8; ENSG00000117148; CTA
IIDHGSGF

SEQ ID NO: 3286 - protein, 8 aa, Homo sapiens
  misc_feature: Table A; Target 3286; HLA-C*05:01; ACTL8; ENSG00000117148; CTA
IIDHGSGF

SEQ ID NO: 3287 - protein, 9 aa, Homo sapiens
  misc_feature: Table A; Target 3287; HLA-A*01:01; ACTL8; ENSG00000117148; CTA
IIDHGSGFL

SEQ ID NO: 3288 - protein, 9 aa, Homo sapiens
  misc_feature: Table A; Target 3288; HLA-A*02:07; ACTL8; ENSG00000117148; CTA
IIDHGSGFL

SEQ ID NO: 3289 - protein, 9 aa, Homo sapiens
  misc_feature: Table A; Target 3289; HLA-C*05:01; ACTL8; ENSG00000117148; CTA
IIDHGSGFL

SEQ ID NO: 3290 - protein, 10 aa, Homo sapiens
  misc_feature: Table A; Target 3290; HLA-A*01:01; ACTL8; ENSG00000117148; CTA
IIDHGSGFLK

SEQ ID NO: 3291 - protein, 10 aa, Homo sapiens
  misc_feature: Table A; Target 3291; HLA-A*03:01; ACTL8; ENSG00000117148; CTA
IIDHGSGFLK

SEQ ID NO: 3292 - protein, 10 aa, Homo sapiens
  misc_feature: Table A; Target 3292; HLA-A*03:02; ACTL8; ENSG00000117148; CTA
IIDHGSGFLK

SEQ ID NO: 3293 - protein, 10 aa, Homo sapiens
  misc_feature: Table A; Target 3293; HLA-A*11:01; ACTL8; ENSG00000117148; CTA
IIDHGSGFLK

SEQ ID NO: 3294 - protein, 11 aa, Homo sapiens
  misc_feature: Table A; Target 3294; HLA-A*02:07; ACTL8; ENSG00000117148; CTA
IIDHGSGFLKA

SEQ ID NO: 3295 - protein, 8 aa, Homo sapiens
  misc_feature: Table A; Target 3295; HLA-A*02:04; ACTL8; ENSG00000117148; CTA
ILFELLHV

SEQ ID NO: 3296 - protein, 11 aa, Homo sapiens
  misc_feature: Table A; Target 3296; HLA-A*02:01; ACTL8; ENSG00000117148; CTA
ILFELLHVPSV

SEQ ID NO: 3297 - protein, 11 aa, Homo sapiens
  misc_feature: Table A; Target 3297; HLA-A*02:03; ACTL8; ENSG00000117148; CTA
ILFELLHVPSV

SEQ ID NO: 3298 - protein, 11 aa, Homo sapiens
  misc_feature: Table A; Target 3298; HLA-A*02:04; ACTL8; ENSG00000117148; CTA
ILFELLHVPSV

SEQ ID NO: 3299 - protein, 9 aa, Homo sapiens
  misc_feature: Table A; Target 3299; HLA-A*01:01; ACTL8; ENSG00000117148; CTA
ILNWEGVQY

SEQ ID NO: 3300 - protein, 9 aa, Homo sapiens
  misc_feature: Table A; Target 3300; HLA-A*03:01; ACTL8; ENSG00000117148; CTA
ILNWEGVQY

SEQ ID NO: 3301 - protein, 9 aa, Homo sapiens
  misc_feature: Table A; Target 3301; HLA-A*03:02; ACTL8; ENSG00000117148; CTA
ILNWEGVQY

SEQ ID NO: 3302 - protein, 9 aa, Homo sapiens
  misc_feature: Table A; Target 3302; HLA-A*29:02; ACTL8; ENSG00000117148; CTA
ILNWEGVQY

SEQ ID NO: 3303 - protein, 9 aa, Homo sapiens
  misc_feature: Table A; Target 3303; HLA-A*30:02; ACTL8; ENSG00000117148; CTA
ILNWEGVQY

SEQ ID NO: 3304 - protein, 9 aa, Homo sapiens
  misc_feature: Table A; Target 3304; HLA-A*32:01; ACTL8; ENSG00000117148; CTA
ILNWEGVQY

SEQ ID NO: 3305 - protein, 9 aa, Homo sapiens
  misc_feature: Table A; Target 3305; HLA-B*15:01; ACTL8; ENSG00000117148; CTA
ILNWEGVQY

SEQ ID NO: 3306 - protein, 9 aa, Homo sapiens
  misc_feature: Table A; Target 3306; HLA-B*15:03; ACTL8; ENSG00000117148; CTA
ILNWEGVQY

SEQ ID NO: 3307 - protein, 9 aa, Homo sapiens
  misc_feature: Table A; Target 3307; HLA-B*46:01; ACTL8; ENSG00000117148; CTA
ILNWEGVQY

SEQ ID NO: 3308 - protein, 9 aa, Homo sapiens
  misc_feature: Table A; Target 3308; HLA-C*07:04; ACTL8; ENSG00000117148; CTA
ILNWEGVQY

SEQ ID NO: 3309 - protein, 10 aa, Homo sapiens
  misc_feature: Table A; Target 3309; HLA-A*02:03; ACTL8; ENSG00000117148; CTA
ILNWEGVQYL

SEQ ID NO: 3310 - protein, 10 aa, Homo sapiens
  misc_feature: Table A; Target 3310; HLA-A*02:04; ACTL8; ENSG00000117148; CTA
ILNWEGVQYL

SEQ ID NO: 3311 - protein, 9 aa, Homo sapiens
  misc_feature: Table A; Target 3311; HLA-B*07:02; ACTL8; ENSG00000117148; CTA
IPRAIVESV

SEQ ID NO: 3312 - protein, 9 aa, Homo sapiens
  misc_feature: Table A; Target 3312; HLA-B*08:01; ACTL8; ENSG00000117148; CTA
IPRAIVESV

SEQ ID NO: 3313 - protein, 9 aa, Homo sapiens
  misc_feature: Table A; Target 3313; HLA-B*51:01; ACTL8; ENSG00000117148; CTA
IPRAIVESV

SEQ ID NO: 3314 - protein, 9 aa, Homo sapiens
  misc_feature: Table A; Target 3314; HLA-B*54:01; ACTL8; ENSG00000117148; CTA
IPRAIVESV

SEQ ID NO: 3315 - protein, 9 aa, Homo sapiens
  misc_feature: Table A; Target 3315; HLA-B*55:01; ACTL8; ENSG00000117148; CTA
IPRAIVESV

SEQ ID NO: 3316 - protein, 9 aa, Homo sapiens
  misc_feature: Table A; Target 3316; HLA-B*56:01; ACTL8; ENSG00000117148; CTA
IPRAIVESV

SEQ ID NO: 3317 - protein, 9 aa, Homo sapiens
  misc_feature: Table A; Target 3317; HLA-C*07:02; ACTL8; ENSG00000117148; CTA
IPRAIVESV

SEQ ID NO: 3318 - protein, 8 aa, Homo sapiens
  misc_feature: Table A; Target 3318; HLA-B*51:01; ACTL8; ENSG00000117148; CTA
ISLRPLLV

SEQ ID NO: 3319 - protein, 10 aa, Homo sapiens
  misc_feature: Table A; Target 3319; HLA-C*05:01; ACTL8; ENSG00000117148; CTA
IVESVESCEI

SEQ ID NO: 3320 - protein, 8 aa, Homo sapiens
  misc_feature: Table A; Target 3320; HLA-A*30:02; ACTL8; ENSG00000117148; CTA
KENPGPSY

SEQ ID NO: 3321 - protein, 8 aa, Homo sapiens
  misc_feature: Table A; Target 3321; HLA-A*32:01; ACTL8; ENSG00000117148; CTA
KENPGPSY

SEQ ID NO: 3322 - protein, 8 aa, Homo sapiens
  misc_feature: Table A; Target 3322; HLA-B*15:03; ACTL8; ENSG00000117148; CTA
KENPGPSY

SEQ ID NO: 3323 - protein, 8 aa, Homo sapiens
  misc_feature: Table A; Target 3323; HLA-B*18:01; ACTL8; ENSG00000117148; CTA
KENPGPSY

SEQ ID NO: 3324 - protein, 8 aa, Homo sapiens
  misc_feature: Table A; Target 3324; HLA-B*27:02; ACTL8; ENSG00000117148; CTA
KENPGPSY

SEQ ID NO: 3325 - protein, 8 aa, Homo sapiens
  misc_feature: Table A; Target 3325; HLA-B*37:01; ACTL8; ENSG00000117148; CTA
KENPGPSY

SEQ ID NO: 3326 - protein, 8 aa, Homo sapiens
  misc_feature: Table A; Target 3326; HLA-B*39:01; ACTL8; ENSG00000117148; CTA
KENPGPSY

SEQ ID NO: 3327 - protein, 8 aa, Homo sapiens
  misc_feature: Table A; Target 3327; HLA-B*44:02; ACTL8; ENSG00000117148; CTA
KENPGPSY

SEQ ID NO: 3328 - protein, 8 aa, Homo sapiens
  misc_feature: Table A; Target 3328; HLA-B*44:03; ACTL8; ENSG00000117148; CTA
KENPGPSY

SEQ ID NO: 3329 - protein, 8 aa, Homo sapiens
  misc_feature: Table A; Target 3329; HLA-C*02:02; ACTL8; ENSG00000117148; CTA
KENPGPSY

SEQ ID NO: 3330 - protein, 8 aa, Homo sapiens
  misc_feature: Table A; Target 3330; HLA-C*14:02; ACTL8; ENSG00000117148; CTA
KENPGPSY

SEQ ID NO: 3331 - protein, 8 aa, Homo sapiens
  misc_feature: Table A; Target 3331; HLA-C*16:01; ACTL8; ENSG00000117148; CTA
KENPGPSY

SEQ ID NO: 3332 - protein, 8 aa, Homo sapiens
  misc_feature: Table A; Target 3332; HLA-C*16:02; ACTL8; ENSG00000117148; CTA
KENPGPSY

SEQ ID NO: 3333 - protein, 8 aa, Homo sapiens
  misc_feature: Table A; Target 3333; HLA-C*16:04; ACTL8; ENSG00000117148; CTA
KENPGPSY

SEQ ID NO: 3334 - protein, 9 aa, Homo sapiens
  misc_feature: Table A; Target 3334; HLA-B*37:01; ACTL8; ENSG00000117148; CTA
KENPGPSYA

SEQ ID NO: 3335 - protein, 9 aa, Homo sapiens
  misc_feature: Table A; Target 3335; HLA-B*40:01; ACTL8; ENSG00000117148; CTA
KENPGPSYA

SEQ ID NO: 3336 - protein, 9 aa, Homo sapiens
  misc_feature: Table A; Target 3336; HLA-B*40:02; ACTL8; ENSG00000117148; CTA
KENPGPSYA

SEQ ID NO: 3337 - protein, 9 aa, Homo sapiens
  misc_feature: Table A; Target 3337; HLA-B*49:01; ACTL8; ENSG00000117148; CTA
KENPGPSYA

SEQ ID NO: 3338 - protein, 10 aa, Homo sapiens
  misc_feature: Table A; Target 3338; HLA-A*03:02; ACTL8; ENSG00000117148; CTA
KENPGPSYAR

SEQ ID NO: 3339 - protein, 10 aa, Homo sapiens
  misc_feature: Table A; Target 3339; HLA-A*31:01; ACTL8; ENSG00000117148; CTA
KENPGPSYAR

SEQ ID NO: 3340 - protein, 10 aa, Homo sapiens
  misc_feature: Table A; Target 3340; HLA-B*27:05; ACTL8; ENSG00000117148; CTA
KENPGPSYAR

SEQ ID NO: 3341 - protein, 10 aa, Homo sapiens
  misc_feature: Table A; Target 3341; HLA-B*37:01; ACTL8; ENSG00000117148; CTA
KENPGPSYAR

SEQ ID NO: 3342 - protein, 10 aa, Homo sapiens
  misc_feature: Table A; Target 3342; HLA-B*40:01; ACTL8; ENSG00000117148; CTA
KENPGPSYAR

SEQ ID NO: 3343 - protein, 10 aa, Homo sapiens
  misc_feature: Table A; Target 3343; HLA-B*44:02; ACTL8; ENSG00000117148; CTA
KENPGPSYAR

SEQ ID NO: 3344 - protein, 10 aa, Homo sapiens
  misc_feature: Table A; Target 3344; HLA-B*44:03; ACTL8; ENSG00000117148; CTA
KENPGPSYAR

SEQ ID NO: 3345 - protein, 10 aa, Homo sapiens
  misc_feature: Table A; Target 3345; HLA-B*57:01; ACTL8; ENSG00000117148; CTA
KENPGPSYAR

SEQ ID NO: 3346 - protein, 10 aa, Homo sapiens
  misc_feature: Table A; Target 3346; HLA-C*16:04; ACTL8; ENSG00000117148; CTA
KENPGPSYAR

SEQ ID NO: 3347 - protein, 11 aa, Homo sapiens
  misc_feature: Table A; Target 3347; HLA-A*31:01; ACTL8; ENSG00000117148; CTA
KENPGPSYARR

SEQ ID NO: 3348 - protein, 9 aa, Homo sapiens
  misc_feature: Table A; Target 3348; HLA-A*02:01; ACTL8; ENSG00000117148; CTA
KMLEILFEL

SEQ ID NO: 3349 - protein, 9 aa, Homo sapiens
  misc_feature: Table A; Target 3349; HLA-A*02:04; ACTL8; ENSG00000117148; CTA
KMLEILFEL

SEQ ID NO: 3350 - protein, 9 aa, Homo sapiens
  misc_feature: Table A; Target 3350; HLA-A*02:07; ACTL8; ENSG00000117148; CTA
KMLEILFEL

SEQ ID NO: 3351 - protein, 9 aa, Homo sapiens
  misc_feature: Table A; Target 3351; HLA-A*31:01; ACTL8; ENSG00000117148; CTA
KMLEILFEL

SEQ ID NO: 3352 - protein, 10 aa, Homo sapiens
  misc_feature: Table A; Target 3352; HLA-A*02:01; ACTL8; ENSG00000117148; CTA
KMLEILFELL

SEQ ID NO: 3353 - protein, 10 aa, Homo sapiens
  misc_feature: Table A; Target 3353; HLA-A*02:04; ACTL8; ENSG00000117148; CTA
KMLEILFELL

SEQ ID NO: 3354 - protein, 10 aa, Homo sapiens
  misc_feature: Table A; Target 3354; HLA-A*02:07; ACTL8; ENSG00000117148; CTA
KMLEILFELL

SEQ ID NO: 3355 - protein, 10 aa, Homo sapiens
  misc_feature: Table A; Target 3355; HLA-A*32:01; ACTL8; ENSG00000117148; CTA
KTLEFAGQDL

SEQ ID NO: 3356 - protein, 10 aa, Homo sapiens
  misc_feature: Table A; Target 3356; HLA-B*40:02; ACTL8; ENSG00000117148; CTA
KTLEFAGQDL

SEQ ID NO: 3357 - protein, 10 aa, Homo sapiens
  misc_feature: Table A; Target 3357; HLA-B*57:01; ACTL8; ENSG00000117148; CTA
KTLEFAGQDL

SEQ ID NO: 3358 - protein, 10 aa, Homo sapiens
  misc_feature: Table A; Target 3358; HLA-B*58:01; ACTL8; ENSG00000117148; CTA
KTLEFAGQDL

SEQ ID NO: 3359 - protein, 10 aa, Homo sapiens
  misc_feature: Table A; Target 3359; HLA-C*01:02; ACTL8; ENSG00000117148; CTA
KTLEFAGQDL

SEQ ID NO: 3360 - protein, 10 aa, Homo sapiens
  misc_feature: Table A; Target 3360; HLA-C*03:04; ACTL8; ENSG00000117148; CTA
KTLEFAGQDL

SEQ ID NO: 3361 - protein, 10 aa, Homo sapiens
  misc_feature: Table A; Target 3361; HLA-C*06:02; ACTL8; ENSG00000117148; CTA
KTLEFAGQDL

SEQ ID NO: 3362 - protein, 9 aa, Homo sapiens
  misc_feature: Table A; Target 3362; HLA-A*01:01; ACTL8; ENSG00000117148; CTA
LADQLQMSL

SEQ ID NO: 3363 - protein, 9 aa, Homo sapiens
  misc_feature: Table A; Target 3363; HLA-A*02:07; ACTL8; ENSG00000117148; CTA
LADQLQMSL

SEQ ID NO: 3364 - protein, 9 aa, Homo sapiens
  misc_feature: Table A; Target 3364; HLA-B*35:01; ACTL8; ENSG00000117148; CTA
LADQLQMSL

SEQ ID NO: 3365 - protein, 9 aa, Homo sapiens
  misc_feature: Table A; Target 3365; HLA-B*35:03; ACTL8; ENSG00000117148; CTA
LADQLQMSL

SEQ ID NO: 3366 - protein, 9 aa, Homo sapiens
  misc_feature: Table A; Target 3366; HLA-B*38:01; ACTL8; ENSG00000117148; CTA
LADQLQMSL

SEQ ID NO: 3367 - protein, 9 aa, Homo sapiens
  misc_feature: Table A; Target 3367; HLA-B*39:01; ACTL8; ENSG00000117148; CTA
LADQLQMSL

SEQ ID NO: 3368 - protein, 9 aa, Homo sapiens
  misc_feature: Table A; Target 3368; HLA-C*02:02; ACTL8; ENSG00000117148; CTA
LADQLQMSL

SEQ ID NO: 3369 - protein, 9 aa, Homo sapiens
  misc_feature: Table A; Target 3369; HLA-C*03:03; ACTL8; ENSG00000117148; CTA
LADQLQMSL

SEQ ID NO: 3370 - protein, 9 aa, Homo sapiens
  misc_feature: Table A; Target 3370; HLA-C*03:04; ACTL8; ENSG00000117148; CTA
LADQLQMSL

SEQ ID NO: 3371 - protein, 9 aa, Homo sapiens
  misc_feature: Table A; Target 3371; HLA-C*05:01; ACTL8; ENSG00000117148; CTA
LADQLQMSL

SEQ ID NO: 3372 - protein, 10 aa, Homo sapiens
  misc_feature: Table A; Target 3372; HLA-A*01:01; ACTL8; ENSG00000117148; CTA
LADQLQMSLY

SEQ ID NO: 3373 - protein, 10 aa, Homo sapiens
  misc_feature: Table A; Target 3373; HLA-B*27:02; ACTL8; ENSG00000117148; CTA
LADQLQMSLY

SEQ ID NO: 3374 - protein, 10 aa, Homo sapiens
  misc_feature: Table A; Target 3374; HLA-C*05:01; ACTL8; ENSG00000117148; CTA
LADQLQMSLY

SEQ ID NO: 3375 - protein, 10 aa, Homo sapiens
  misc_feature: Table A; Target 3375; HLA-C*07:01; ACTL8; ENSG00000117148; CTA
LADQLQMSLY

SEQ ID NO: 3376 - protein, 9 aa, Homo sapiens
  misc_feature: Table A; Target 3376; HLA-B*38:01; ACTL8; ENSG00000117148; CTA
LDESNTYQL

SEQ ID NO: 3377 - protein, 9 aa, Homo sapiens
  misc_feature: Table A; Target 3377; HLA-B*40:01; ACTL8; ENSG00000117148; CTA
LDESNTYQL

SEQ ID NO: 3378 - protein, 8 aa, Homo sapiens
  misc_feature: Table A; Target 3378; HLA-A*30:01; ACTL8; ENSG00000117148; CTA
LEFAGQDL

SEQ ID NO: 3379 - protein, 8 aa, Homo sapiens
  misc_feature: Table A; Target 3379; HLA-B*18:01; ACTL8; ENSG00000117148; CTA
LEFAGQDL

SEQ ID NO: 3380 - protein, 8 aa, Homo sapiens
  misc_feature: Table A; Target 3380; HLA-B*37:01; ACTL8; ENSG00000117148; CTA
LEFAGQDL

SEQ ID NO: 3381 - protein, 8 aa, Homo sapiens
  misc_feature: Table A; Target 3381; HLA-B*40:01; ACTL8; ENSG00000117148; CTA
LEFAGQDL

SEQ ID NO: 3382 - protein, 8 aa, Homo sapiens
  misc_feature: Table A; Target 3382; HLA-B*40:02; ACTL8; ENSG00000117148; CTA
LEFAGQDL

SEQ ID NO: 3383 - protein, 8 aa, Homo sapiens
  misc_feature: Table A; Target 3383; HLA-B*49:01; ACTL8; ENSG00000117148; CTA
LEFAGQDL

SEQ ID NO: 3384 - protein, 10 aa, Homo sapiens
  misc_feature: Table A; Target 3384; HLA-A*30:01; ACTL8; ENSG00000117148; CTA
LEFAGQDLSA

SEQ ID NO: 3385 - protein, 10 aa, Homo sapiens
  misc_feature: Table A; Target 3385; HLA-B*40:01; ACTL8; ENSG00000117148; CTA
LEFAGQDLSA

SEQ ID NO: 3386 - protein, 10 aa, Homo sapiens
  misc_feature: Table A; Target 3386; HLA-B*40:02; ACTL8; ENSG00000117148; CTA
LEFAGQDLSA

SEQ ID NO: 3387 - protein, 10 aa, Homo sapiens
  misc_feature: Table A; Target 3387; HLA-B*49:01; ACTL8; ENSG00000117148; CTA
LEFAGQDLSA

SEQ ID NO: 3388 - protein, 10 aa, Homo sapiens
  misc_feature: Table A; Target 3388; HLA-B*54:01; ACTL8; ENSG00000117148; CTA
LEFAGQDLSA

SEQ ID NO: 3389 - protein, 11 aa, Homo sapiens
  misc_feature: Table A; Target 3389; HLA-A*30:02; ACTL8; ENSG00000117148; CTA
LEFAGQDLSAY

SEQ ID NO: 3390 - protein, 11 aa, Homo sapiens
  misc_feature: Table A; Target 3390; HLA-B*15:01; ACTL8; ENSG00000117148; CTA
LEFAGQDLSAY

SEQ ID NO: 3391 - protein, 11 aa, Homo sapiens
  misc_feature: Table A; Target 3391; HLA-B*15:03; ACTL8; ENSG00000117148; CTA
LEFAGQDLSAY

SEQ ID NO: 3392 - protein, 11 aa, Homo sapiens
  misc_feature: Table A; Target 3392; HLA-B*18:01; ACTL8; ENSG00000117148; CTA
LEFAGQDLSAY

SEQ ID NO: 3393 - protein, 11 aa, Homo sapiens
  misc_feature: Table A; Target 3393; HLA-B*27:02; ACTL8; ENSG00000117148; CTA
LEFAGQDLSAY

SEQ ID NO: 3394 - protein, 11 aa, Homo sapiens
  misc_feature: Table A; Target 3394; HLA-B*40:01; ACTL8; ENSG00000117148; CTA
LEFAGQDLSAY

SEQ ID NO: 3395 - protein, 11 aa, Homo sapiens
  misc_feature: Table A; Target 3395; HLA-B*44:02; ACTL8; ENSG00000117148; CTA
LEFAGQDLSAY

SEQ ID NO: 3396 - protein, 11 aa, Homo sapiens
  misc_feature: Table A; Target 3396; HLA-B*44:03; ACTL8; ENSG00000117148; CTA
LEFAGQDLSAY

SEQ ID NO: 3397 - protein, 11 aa, Homo sapiens
  misc_feature: Table A; Target 3397; HLA-B*46:01; ACTL8; ENSG00000117148; CTA
LEFAGQDLSAY

SEQ ID NO: 3398 - protein, 11 aa, Homo sapiens
  misc_feature: Table A; Target 3398; HLA-B*49:01; ACTL8; ENSG00000117148; CTA
LEFAGQDLSAY

SEQ ID NO: 3399 - protein, 11 aa, Homo sapiens
  misc_feature: Table A; Target 3399; HLA-C*02:02; ACTL8; ENSG00000117148; CTA
LEFAGQDLSAY

SEQ ID NO: 3400 - protein, 11 aa, Homo sapiens
  misc_feature: Table A; Target 3400; HLA-C*12:03; ACTL8; ENSG00000117148; CTA
LEFAGQDLSAY

SEQ ID NO: 3401 - protein, 11 aa, Homo sapiens
  misc_feature: Table A; Target 3401; HLA-C*16:04; ACTL8; ENSG00000117148; CTA
LEFAGQDLSAY

SEQ ID NO: 3402 - protein, 8 aa, Homo sapiens
  misc_feature: Table A; Target 3402; HLA-B*18:01; ACTL8; ENSG00000117148; CTA
LEILFELL

SEQ ID NO: 3403 - protein, 8 aa, Homo sapiens
  misc_feature: Table A; Target 3403; HLA-B*49:01; ACTL8; ENSG00000117148; CTA
LEILFELL

SEQ ID NO: 3404 - protein, 8 aa, Homo sapiens
  misc_feature: Table A; Target 3404; HLA-B*18:01; ACTL8; ENSG00000117148; CTA
LETVAVTQ

SEQ ID NO: 3405 - protein, 8 aa, Homo sapiens
  misc_feature: Table A; Target 3405; HLA-B*49:01; ACTL8; ENSG00000117148; CTA
LETVAVTQ

SEQ ID NO: 3406 - protein, 8 aa, Homo sapiens
  misc_feature: Table A; Target 3406; HLA-C*07:04; ACTL8; ENSG00000117148; CTA
LETVAVTQ

SEQ ID NO: 3407 - protein, 9 aa, Homo sapiens
  misc_feature: Table A; Target 3407; HLA-A*30:01; ACTL8; ENSG00000117148; CTA
LETVAVTQM

SEQ ID NO: 3408 - protein, 9 aa, Homo sapiens
  misc_feature: Table A; Target 3408; HLA-B*18:01; ACTL8; ENSG00000117148; CTA
LETVAVTQM

SEQ ID NO: 3409 - protein, 9 aa, Homo sapiens
  misc_feature: Table A; Target 3409; HLA-B*37:01; ACTL8; ENSG00000117148; CTA
LETVAVTQM

SEQ ID NO: 3410 - protein, 9 aa, Homo sapiens
  misc_feature: Table A; Target 3410; HLA-B*40:01; ACTL8; ENSG00000117148; CTA
LETVAVTQM

SEQ ID NO: 3411 - protein, 9 aa, Homo sapiens
  misc_feature: Table A; Target 3411; HLA-B*40:02; ACTL8; ENSG00000117148; CTA
LETVAVTQM

SEQ ID NO: 3412 - protein, 9 aa, Homo sapiens
  misc_feature: Table A; Target 3412; HLA-B*44:02; ACTL8; ENSG00000117148; CTA
LETVAVTQM

SEQ ID NO: 3413 - protein, 9 aa, Homo sapiens
  misc_feature: Table A; Target 3413; HLA-B*44:03; ACTL8; ENSG00000117148; CTA
LETVAVTQM

SEQ ID NO: 3414 - protein, 9 aa, Homo sapiens
  misc_feature: Table A; Target 3414; HLA-B*49:01; ACTL8; ENSG00000117148; CTA
LETVAVTQM

SEQ ID NO: 3415 - protein, 9 aa, Homo sapiens
  misc_feature: Table A; Target 3415; HLA-C*02:02; ACTL8; ENSG00000117148; CTA
LETVAVTQM

SEQ ID NO: 3416 - protein, 9 aa, Homo sapiens
  misc_feature: Table A; Target 3416; HLA-C*04:01; ACTL8; ENSG00000117148; CTA
LETVAVTQM

SEQ ID NO: 3417 - protein, 9 aa, Homo sapiens
  misc_feature: Table A; Target 3417; HLA-C*07:04; ACTL8; ENSG00000117148; CTA
LETVAVTQM

SEQ ID NO: 3418 - protein, 9 aa, Homo sapiens
  misc_feature: Table A; Target 3418; HLA-C*16:02; ACTL8; ENSG00000117148; CTA
LETVAVTQM

SEQ ID NO: 3419 - protein, 11 aa, Homo sapiens
  misc_feature: Table A; Target 3419; HLA-B*27:02; ACTL8; ENSG00000117148; CTA
LETVAVTQMNK

SEQ ID NO: 3420 - protein, 9 aa, Homo sapiens
  misc_feature: Table A; Target 3420; HLA-C*04:01; ACTL8; ENSG00000117148; CTA
LFQLETVAV

SEQ ID NO: 3421 - protein, 9 aa, Homo sapiens
  misc_feature: Table A; Target 3421; HLA-C*14:02; ACTL8; ENSG00000117148; CTA
LFQLETVAV

SEQ ID NO: 3422 - protein, 9 aa, Homo sapiens
  misc_feature: Table A; Target 3422; HLA-A*02:03; ACTL8; ENSG00000117148; CTA
LGASVVAHL

SEQ ID NO: 3423 - protein, 9 aa, Homo sapiens
  misc_feature: Table A; Target 3423; HLA-A*02:04; ACTL8; ENSG00000117148; CTA
LGASVVAHL

SEQ ID NO: 3424 - protein, 9 aa, Homo sapiens
  misc_feature: Table A; Target 3424; HLA-A*23:01; ACTL8; ENSG00000117148; CTA
LGASVVAHL

SEQ ID NO: 3425 - protein, 9 aa, Homo sapiens
  misc_feature: Table A; Target 3425; HLA-A*30:01; ACTL8; ENSG00000117148; CTA
LGASVVAHL

SEQ ID NO: 3426 - protein, 9 aa, Homo sapiens
  misc_feature: Table A; Target 3426; HLA-A*32:01; ACTL8; ENSG00000117148; CTA
LGASVVAHL

SEQ ID NO: 3427 - protein, 9 aa, Homo sapiens
  misc_feature: Table A; Target 3427; HLA-A*68:02; ACTL8; ENSG00000117148; CTA
LGASVVAHL

SEQ ID NO: 3428 - protein, 9 aa, Homo sapiens
  misc_feature: Table A; Target 3428; HLA-B*07:02; ACTL8; ENSG00000117148; CTA
LGASVVAHL

SEQ ID NO: 3429 - protein, 9 aa, Homo sapiens
  misc_feature: Table A; Target 3429; HLA-B*27:05; ACTL8; ENSG00000117148; CTA
LGASVVAHL

SEQ ID NO: 3430 - protein, 9 aa, Homo sapiens
  misc_feature: Table A; Target 3430; HLA-B*35:03; ACTL8; ENSG00000117148; CTA
LGASVVAHL

SEQ ID NO: 3431 - protein, 9 aa, Homo sapiens
  misc_feature: Table A; Target 3431; HLA-B*40:01; ACTL8; ENSG00000117148; CTA
LGASVVAHL

SEQ ID NO: 3432 - protein, 9 aa, Homo sapiens
  misc_feature: Table A; Target 3432; HLA-B*58:01; ACTL8; ENSG00000117148; CTA
LGASVVAHL

SEQ ID NO: 3433 - protein, 9 aa, Homo sapiens
  misc_feature: Table A; Target 3433; HLA-C*01:02; ACTL8; ENSG00000117148; CTA
LGASVVAHL

SEQ ID NO: 3434 - protein, 9 aa, Homo sapiens
  misc_feature: Table A; Target 3434; HLA-C*02:02; ACTL8; ENSG00000117148; CTA
LGASVVAHL

SEQ ID NO: 3435 - protein, 9 aa, Homo sapiens
  misc_feature: Table A; Target 3435; HLA-C*03:03; ACTL8; ENSG00000117148; CTA
LGASVVAHL

SEQ ID NO: 3436 - protein, 9 aa, Homo sapiens
  misc_feature: Table A; Target 3436; HLA-C*03:04; ACTL8; ENSG00000117148; CTA
LGASVVAHL

SEQ ID NO: 3437 - protein, 9 aa, Homo sapiens
  misc_feature: Table A; Target 3437; HLA-C*06:02; ACTL8; ENSG00000117148; CTA
LGASVVAHL

SEQ ID NO: 3438 - protein, 9 aa, Homo sapiens
  misc_feature: Table A; Target 3438; HLA-C*07:02; ACTL8; ENSG00000117148; CTA
LGASVVAHL

SEQ ID NO: 3439 - protein, 9 aa, Homo sapiens
  misc_feature: Table A; Target 3439; HLA-C*07:04; ACTL8; ENSG00000117148; CTA
LGASVVAHL

SEQ ID NO: 3440 - protein, 9 aa, Homo sapiens
  misc_feature: Table A; Target 3440; HLA-C*12:03; ACTL8; ENSG00000117148; CTA
LGASVVAHL

SEQ ID NO: 3441 - protein, 9 aa, Homo sapiens
  misc_feature: Table A; Target 3441; HLA-C*14:02; ACTL8; ENSG00000117148; CTA
LGASVVAHL

SEQ ID NO: 3442 - protein, 9 aa, Homo sapiens
  misc_feature: Table A; Target 3442; HLA-C*16:01; ACTL8; ENSG00000117148; CTA
LGASVVAHL

SEQ ID NO: 3443 - protein, 9 aa, Homo sapiens
  misc_feature: Table A; Target 3443; HLA-C*16:02; ACTL8; ENSG00000117148; CTA
LGASVVAHL

SEQ ID NO: 3444 - protein, 10 aa, Homo sapiens
  misc_feature: Table A; Target 3444; HLA-A*02:01; ACTL8; ENSG00000117148; CTA
LLADQLQMSL

SEQ ID NO: 3445 - protein, 10 aa, Homo sapiens
  misc_feature: Table A; Target 3445; HLA-A*02:03; ACTL8; ENSG00000117148; CTA
LLADQLQMSL

SEQ ID NO: 3446 - protein, 10 aa, Homo sapiens
  misc_feature: Table A; Target 3446; HLA-A*02:04; ACTL8; ENSG00000117148; CTA
LLADQLQMSL

SEQ ID NO: 3447 - protein, 11 aa, Homo sapiens
  misc_feature: Table A; Target 3447; HLA-A*01:01; ACTL8; ENSG00000117148; CTA
LLADQLQMSLY

SEQ ID NO: 3448 - protein, 11 aa, Homo sapiens
  misc_feature: Table A; Target 3448; HLA-A*29:02; ACTL8; ENSG00000117148; CTA
LLADQLQMSLY

SEQ ID NO: 3449 - protein, 11 aa, Homo sapiens
  misc_feature: Table A; Target 3449; HLA-A*30:02; ACTL8; ENSG00000117148; CTA
LLADQLQMSLY

SEQ ID NO: 3450 - protein, 11 aa, Homo sapiens
  misc_feature: Table A; Target 3450; HLA-B*15:01; ACTL8; ENSG00000117148; CTA
LLADQLQMSLY

SEQ ID NO: 3451 - protein, 8 aa, Homo sapiens
  misc_feature: Table A; Target 3451; HLA-B*08:01; ACTL8; ENSG00000117148; CTA
LLHVPSVL

SEQ ID NO: 3452 - protein, 8 aa, Homo sapiens
  misc_feature: Table A; Target 3452; HLA-C*03:03; ACTL8; ENSG00000117148; CTA
LLHVPSVL

SEQ ID NO: 3453 - protein, 8 aa, Homo sapiens
  misc_feature: Table A; Target 3453; HLA-C*03:04; ACTL8; ENSG00000117148; CTA
LLHVPSVL

SEQ ID NO: 3454 - protein, 9 aa, Homo sapiens
  misc_feature: Table A; Target 3454; HLA-A*02:01; ACTL8; ENSG00000117148; CTA
LLHVPSVLL

SEQ ID NO: 3455 - protein, 9 aa, Homo sapiens
  misc_feature: Table A; Target 3455; HLA-A*02:04; ACTL8; ENSG00000117148; CTA
LLHVPSVLL

SEQ ID NO: 3456 - protein, 9 aa, Homo sapiens
  misc_feature: Table A; Target 3456; HLA-A*02:07; ACTL8; ENSG00000117148; CTA
LLHVPSVLL

SEQ ID NO: 3457 - protein, 11 aa, Homo sapiens
  misc_feature: Table A; Target 3457; HLA-A*01:01; ACTL8; ENSG00000117148; CTA
LLTGVVVDSGY

SEQ ID NO: 3458 - protein, 11 aa, Homo sapiens
  misc_feature: Table A; Target 3458; HLA-A*30:02; ACTL8; ENSG00000117148; CTA
LLTGVVVDSGY

SEQ ID NO: 3459 - protein, 11 aa, Homo sapiens
  misc_feature: Table A; Target 3459; HLA-C*04:01; ACTL8; ENSG00000117148; CTA
LLTGVVVDSGY

SEQ ID NO: 3460 - protein, 11 aa, Homo sapiens
  misc_feature: Table A; Target 3460; HLA-C*07:01; ACTL8; ENSG00000117148; CTA
LLTGVVVDSGY

SEQ ID NO: 3461 - protein, 9 aa, Homo sapiens
  misc_feature: Table A; Target 3461; HLA-A*02:01; ACTL8; ENSG00000117148; CTA
LLVSHVMAC

SEQ ID NO: 3462 - protein, 9 aa, Homo sapiens
  misc_feature: Table A; Target 3462; HLA-A*02:03; ACTL8; ENSG00000117148; CTA
LLVSHVMAC

SEQ ID NO: 3463 - protein, 9 aa, Homo sapiens
  misc_feature: Table A; Target 3463; HLA-A*02:01; ACTL8; ENSG00000117148; CTA
LMGDHVSST

SEQ ID NO: 3464 - protein, 9 aa, Homo sapiens
  misc_feature: Table A; Target 3464; HLA-A*02:03; ACTL8; ENSG00000117148; CTA
LMGDHVSST

SEQ ID NO: 3465 - protein, 9 aa, Homo sapiens
  misc_feature: Table A; Target 3465; HLA-A*32:01; ACTL8; ENSG00000117148; CTA
LMGDHVSST

SEQ ID NO: 3466 - protein, 10 aa, Homo sapiens
  misc_feature: Table A; Target 3466; HLA-A*03:01; ACTL8; ENSG00000117148; CTA
LMGDHVSSTK

SEQ ID NO: 3467 - protein, 10 aa, Homo sapiens
  misc_feature: Table A; Target 3467; HLA-A*03:02; ACTL8; ENSG00000117148; CTA
LMGDHVSSTK

SEQ ID NO: 3468 - protein, 8 aa, Homo sapiens
  misc_feature: Table A; Target 3468; HLA-B*07:02; ACTL8; ENSG00000117148; CTA
LPASGKTL

SEQ ID NO: 3469 - protein, 8 aa, Homo sapiens
  misc_feature: Table A; Target 3469; HLA-B*08:01; ACTL8; ENSG00000117148; CTA
LPASGKTL

SEQ ID NO: 3470 - protein, 8 aa, Homo sapiens
  misc_feature: Table A; Target 3470; HLA-B*35:03; ACTL8; ENSG00000117148; CTA
LPASGKTL

SEQ ID NO: 3471 - protein, 8 aa, Homo sapiens
  misc_feature: Table A; Target 3471; HLA-B*51:01; ACTL8; ENSG00000117148; CTA
LPASGKTL

SEQ ID NO: 3472 - protein, 8 aa, Homo sapiens
  misc_feature: Table A; Target 3472; HLA-C*07:02; ACTL8; ENSG00000117148; CTA
LPASGKTL

SEQ ID NO: 3473 - protein, 10 aa, Homo sapiens
  misc_feature: Table A; Target 3473; HLA-B*07:02; ACTL8; ENSG00000117148; CTA
LPASGKTLEF

SEQ ID NO: 3474 - protein, 10 aa, Homo sapiens
  misc_feature: Table A; Target 3474; HLA-B*35:01; ACTL8; ENSG00000117148; CTA
LPASGKTLEF

SEQ ID NO: 3475 - protein, 10 aa, Homo sapiens
  misc_feature: Table A; Target 3475; HLA-B*35:03; ACTL8; ENSG00000117148; CTA
LPASGKTLEF

SEQ ID NO: 3476 - protein, 10 aa, Homo sapiens
  misc_feature: Table A; Target 3476; HLA-B*56:01; ACTL8; ENSG00000117148; CTA
LPASGKTLEF

SEQ ID NO: 3477 - protein, 10 aa, Homo sapiens
  misc_feature: Table A; Target 3477; HLA-C*07:02; ACTL8; ENSG00000117148; CTA
LPASGKTLEF

SEQ ID NO: 3478 - protein, 11 aa, Homo sapiens
  misc_feature: Table A; Target 3478; HLA-B*56:01; ACTL8; ENSG00000117148; CTA
LPASGKTLEFA

SEQ ID NO: 3479 - protein, 11 aa, Homo sapiens
  misc_feature: Table A; Target 3479; HLA-B*35:01; ACTL8; ENSG00000117148; CTA
LPCKENPGPSY

SEQ ID NO: 3480 - protein, 11 aa, Homo sapiens
  misc_feature: Table A; Target 3480; HLA-B*55:01; ACTL8; ENSG00000117148; CTA
LPCKENPGPSY

SEQ ID NO: 3481 - protein, 11 aa, Homo sapiens
  misc_feature: Table A; Target 3481; HLA-C*03:03; ACTL8; ENSG00000117148; CTA
LPCKENPGPSY

SEQ ID NO: 3482 - protein, 9 aa, Homo sapiens
  misc_feature: Table A; Target 3482; HLA-B*08:01; ACTL8; ENSG00000117148; CTA
LPDGSRVEL

SEQ ID NO: 3483 - protein, 9 aa, Homo sapiens
  misc_feature: Table A; Target 3483; HLA-B*35:01; ACTL8; ENSG00000117148; CTA
LPDGSRVEL

SEQ ID NO: 3484 - protein, 9 aa, Homo sapiens
  misc_feature: Table A; Target 3484; HLA-B*38:01; ACTL8; ENSG00000117148; CTA
LPDGSRVEL

SEQ ID NO: 3485 - protein, 9 aa, Homo sapiens
  misc_feature: Table A; Target 3485; HLA-B*39:01; ACTL8; ENSG00000117148; CTA
LPDGSRVEL

SEQ ID NO: 3486 - protein, 9 aa, Homo sapiens
  misc_feature: Table A; Target 3486; HLA-B*40:01; ACTL8; ENSG00000117148; CTA
LPDGSRVEL

SEQ ID NO: 3487 - protein, 9 aa, Homo sapiens
  misc_feature: Table A; Target 3487; HLA-B*51:01; ACTL8; ENSG00000117148; CTA
LPDGSRVEL

SEQ ID NO: 3488 - protein, 9 aa, Homo sapiens
  misc_feature: Table A; Target 3488; HLA-B*55:01; ACTL8; ENSG00000117148; CTA
LPDGSRVEL

SEQ ID NO: 3489 - protein, 9 aa, Homo sapiens
  misc_feature: Table A; Target 3489; HLA-B*56:01; ACTL8; ENSG00000117148; CTA
LPDGSRVEL

SEQ ID NO: 3490 - protein, 9 aa, Homo sapiens
  misc_feature: Table A; Target 3490; HLA-C*01:02; ACTL8; ENSG00000117148; CTA
LPDGSRVEL

SEQ ID NO: 3491 - protein, 9 aa, Homo sapiens
  misc_feature: Table A; Target 3491; HLA-C*03:03; ACTL8; ENSG00000117148; CTA
LPDGSRVEL

SEQ ID NO: 3492 - protein, 9 aa, Homo sapiens
  misc_feature: Table A; Target 3492; HLA-C*03:04; ACTL8; ENSG00000117148; CTA
LPDGSRVEL

SEQ ID NO: 3493 - protein, 9 aa, Homo sapiens
  misc_feature: Table A; Target 3493; HLA-C*04:01; ACTL8; ENSG00000117148; CTA
LPDGSRVEL

SEQ ID NO: 3494 - protein, 9 aa, Homo sapiens
  misc_feature: Table A; Target 3494; HLA-C*05:01; ACTL8; ENSG00000117148; CTA
LPDGSRVEL

SEQ ID NO: 3495 - protein, 9 aa, Homo sapiens
  misc_feature: Table A; Target 3495; HLA-C*07:02; ACTL8; ENSG00000117148; CTA
LPDGSRVEL

SEQ ID NO: 3496 - protein, 9 aa, Homo sapiens
  misc_feature: Table A; Target 3496; HLA-C*07:04; ACTL8; ENSG00000117148; CTA
LPDGSRVEL

SEQ ID NO: 3497 - protein, 9 aa, Homo sapiens
  misc_feature: Table A; Target 3497; HLA-C*06:02; ACTL8; ENSG00000117148; CTA
LRPLLVSHV

SEQ ID NO: 3498 - protein, 8 aa, Homo sapiens
  misc_feature: Table A; Target 3498; HLA-B*57:01; ACTL8; ENSG00000117148; CTA
LSTYQSEW

SEQ ID NO: 3499 - protein, 8 aa, Homo sapiens
  misc_feature: Table A; Target 3499; HLA-B*58:01; ACTL8; ENSG00000117148; CTA
LSTYQSEW

SEQ ID NO: 3500 - protein, 10 aa, Homo sapiens
  misc_feature: Table A; Target 3500; HLA-A*01:01; ACTL8; ENSG00000117148; CTA
LTGVVVDSGY

SEQ ID NO: 3501 - protein, 10 aa, Homo sapiens
  misc_feature: Table A; Target 3501; HLA-C*04:01; ACTL8; ENSG00000117148; CTA
LTGVVVDSGY

SEQ ID NO: 3502 - protein, 10 aa, Homo sapiens
  misc_feature: Table A; Target 3502; HLA-C*07:01; ACTL8; ENSG00000117148; CTA
LTGVVVDSGY

SEQ ID NO: 3503 - protein, 9 aa, Homo sapiens
  misc_feature: Table A; Target 3503; HLA-C*14:02; ACTL8; ENSG00000117148; CTA
LYASGLLTG

SEQ ID NO: 3504 - protein, 10 aa, Homo sapiens
  misc_feature: Table A; Target 3504; HLA-C*06:02; ACTL8; ENSG00000117148; CTA
LYASGLLTGV

SEQ ID NO: 3505 - protein, 10 aa, Homo sapiens
  misc_feature: Table A; Target 3505; HLA-C*07:02; ACTL8; ENSG00000117148; CTA
LYASGLLTGV

SEQ ID NO: 3506 - protein, 9 aa, Homo sapiens
  misc_feature: Table A; Target 3506; HLA-A*24:02; ACTL8; ENSG00000117148; CTA
LYPGFTKRL

SEQ ID NO: 3507 - protein, 10 aa, Homo sapiens
  misc_feature: Table A; Target 3507; HLA-A*24:02; ACTL8; ENSG00000117148; CTA
LYPGFTKRLF

SEQ ID NO: 3508 - protein, 8 aa, Homo sapiens
  misc_feature: Table A; Target 3508; HLA-C*01:02; ACTL8; ENSG00000117148; CTA
MACGGNTL

SEQ ID NO: 3509 - protein, 8 aa, Homo sapiens
  misc_feature: Table A; Target 3509; HLA-C*03:03; ACTL8; ENSG00000117148; CTA
MACGGNTL

SEQ ID NO: 3510 - protein, 8 aa, Homo sapiens
  misc_feature: Table A; Target 3510; HLA-C*03:04; ACTL8; ENSG00000117148; CTA
MACGGNTL

SEQ ID NO: 3511 - protein, 9 aa, Homo sapiens
  misc_feature: Table A; Target 3511; HLA-A*01:01; ACTL8; ENSG00000117148; CTA
MACGGNTLY

SEQ ID NO: 3512 - protein, 9 aa, Homo sapiens
  misc_feature: Table A; Target 3512; HLA-A*26:01; ACTL8; ENSG00000117148; CTA
MACGGNTLY

SEQ ID NO: 3513 - protein, 9 aa, Homo sapiens
  misc_feature: Table A; Target 3513; HLA-A*29:02; ACTL8; ENSG00000117148; CTA
MACGGNTLY

SEQ ID NO: 3514 - protein, 9 aa, Homo sapiens
  misc_feature: Table A; Target 3514; HLA-A*30:02; ACTL8; ENSG00000117148; CTA
MACGGNTLY

SEQ ID NO: 3515 - protein, 9 aa, Homo sapiens
  misc_feature: Table A; Target 3515; HLA-B*15:01; ACTL8; ENSG00000117148; CTA
MACGGNTLY

SEQ ID NO: 3516 - protein, 9 aa, Homo sapiens
  misc_feature: Table A; Target 3516; HLA-B*15:03; ACTL8; ENSG00000117148; CTA
MACGGNTLY

SEQ ID NO: 3517 - protein, 9 aa, Homo sapiens
  misc_feature: Table A; Target 3517; HLA-B*35:01; ACTL8; ENSG00000117148; CTA
MACGGNTLY

SEQ ID NO: 3518 - protein, 9 aa, Homo sapiens
  misc_feature: Table A; Target 3518; HLA-B*39:01; ACTL8; ENSG00000117148; CTA
MACGGNTLY

SEQ ID NO: 3519 - protein, 9 aa, Homo sapiens
  misc_feature: Table A; Target 3519; HLA-B*46:01; ACTL8; ENSG00000117148; CTA
MACGGNTLY

SEQ ID NO: 3520 - protein, 9 aa, Homo sapiens
  misc_feature: Table A; Target 3520; HLA-B*55:01; ACTL8; ENSG00000117148; CTA
MACGGNTLY

SEQ ID NO: 3521 - protein, 9 aa, Homo sapiens
  misc_feature: Table A; Target 3521; HLA-C*02:02; ACTL8; ENSG00000117148; CTA
MACGGNTLY

SEQ ID NO: 3522 - protein, 9 aa, Homo sapiens
  misc_feature: Table A; Target 3522; HLA-C*03:03; ACTL8; ENSG00000117148; CTA
MACGGNTLY

SEQ ID NO: 3523 - protein, 9 aa, Homo sapiens
  misc_feature: Table A; Target 3523; HLA-C*04:01; ACTL8; ENSG00000117148; CTA
MACGGNTLY

SEQ ID NO: 3524 - protein, 9 aa, Homo sapiens
  misc_feature: Table A; Target 3524; HLA-C*07:01; ACTL8; ENSG00000117148; CTA
MACGGNTLY

SEQ ID NO: 3525 - protein, 9 aa, Homo sapiens
  misc_feature: Table A; Target 3525; HLA-C*07:04; ACTL8; ENSG00000117148; CTA
MACGGNTLY

SEQ ID NO: 3526 - protein, 9 aa, Homo sapiens
  misc_feature: Table A; Target 3526; HLA-C*07:06; ACTL8; ENSG00000117148; CTA
MACGGNTLY

SEQ ID NO: 3527 - protein, 9 aa, Homo sapiens
  misc_feature: Table A; Target 3527; HLA-C*12:03; ACTL8; ENSG00000117148; CTA
MACGGNTLY

SEQ ID NO: 3528 - protein, 9 aa, Homo sapiens
  misc_feature: Table A; Target 3528; HLA-C*16:02; ACTL8; ENSG00000117148; CTA
MACGGNTLY

SEQ ID NO: 3529 - protein, 8 aa, Homo sapiens
  misc_feature: Table A; Target 3529; HLA-A*23:01; ACTL8; ENSG00000117148; CTA
MFFSPQVF

SEQ ID NO: 3530 - protein, 9 aa, Homo sapiens
  misc_feature: Table A; Target 3530; HLA-A*02:07; ACTL8; ENSG00000117148; CTA
MLEILFELL

SEQ ID NO: 3531 - protein, 8 aa, Homo sapiens
  misc_feature: Table A; Target 3531; HLA-B*08:01; ACTL8; ENSG00000117148; CTA
MQRVAPEM

SEQ ID NO: 3532 - protein, 8 aa, Homo sapiens
  misc_feature: Table A; Target 3532; HLA-B*15:01; ACTL8; ENSG00000117148; CTA
MQRVAPEM

SEQ ID NO: 3533 - protein, 8 aa, Homo sapiens
  misc_feature: Table A; Target 3533; HLA-B*15:03; ACTL8; ENSG00000117148; CTA
MQRVAPEM

SEQ ID NO: 3534 - protein, 8 aa, Homo sapiens
  misc_feature: Table A; Target 3534; HLA-B*18:01; ACTL8; ENSG00000117148; CTA
MQRVAPEM

SEQ ID NO: 3535 - protein, 8 aa, Homo sapiens
  misc_feature: Table A; Target 3535; HLA-B*37:01; ACTL8; ENSG00000117148; CTA
MQRVAPEM

SEQ ID NO: 3536 - protein, 8 aa, Homo sapiens
  misc_feature: Table A; Target 3536; HLA-B*46:01; ACTL8; ENSG00000117148; CTA
MQRVAPEM

SEQ ID NO: 3537 - protein, 8 aa, Homo sapiens
  misc_feature: Table A; Target 3537; HLA-C*16:01; ACTL8; ENSG00000117148; CTA
MQRVAPEM

SEQ ID NO: 3538 - protein, 9 aa, Homo sapiens
  misc_feature: Table A; Target 3538; HLA-B*15:01; ACTL8; ENSG00000117148; CTA
MQRVAPEMF

SEQ ID NO: 3539 - protein, 9 aa, Homo sapiens
  misc_feature: Table A; Target 3539; HLA-B*15:03; ACTL8; ENSG00000117148; CTA
MQRVAPEMF

SEQ ID NO: 3540 - protein, 10 aa, Homo sapiens
  misc_feature: Table A; Target 3540; HLA-C*04:01; ACTL8; ENSG00000117148; CTA
MSREEYGEHM

SEQ ID NO: 3541 - protein, 9 aa, Homo sapiens
  misc_feature: Table A; Target 3541; HLA-A*03:01; ACTL8; ENSG00000117148; CTA
MVFPNIVNY

SEQ ID NO: 3542 - protein, 9 aa, Homo sapiens
  misc_feature: Table A; Target 3542; HLA-A*11:01; ACTL8; ENSG00000117148; CTA
MVFPNIVNY

SEQ ID NO: 3543 - protein, 9 aa, Homo sapiens
  misc_feature: Table A; Target 3543; HLA-A*25:01; ACTL8; ENSG00000117148; CTA
MVFPNIVNY

SEQ ID NO: 3544 - protein, 9 aa, Homo sapiens
  misc_feature: Table A; Target 3544; HLA-A*26:01; ACTL8; ENSG00000117148; CTA
MVFPNIVNY

SEQ ID NO: 3545 - protein, 9 aa, Homo sapiens
  misc_feature: Table A; Target 3545; HLA-A*29:02; ACTL8; ENSG00000117148; CTA
MVFPNIVNY

SEQ ID NO: 3546 - protein, 9 aa, Homo sapiens
  misc_feature: Table A; Target 3546; HLA-A*30:02; ACTL8; ENSG00000117148; CTA
MVFPNIVNY

SEQ ID NO: 3547 - protein, 9 aa, Homo sapiens
  misc_feature: Table A; Target 3547; HLA-A*32:01; ACTL8; ENSG00000117148; CTA
MVFPNIVNY

SEQ ID NO: 3548 - protein, 9 aa, Homo sapiens
  misc_feature: Table A; Target 3548; HLA-A*33:03; ACTL8; ENSG00000117148; CTA
MVFPNIVNY

SEQ ID NO: 3549 - protein, 9 aa, Homo sapiens
  misc_feature: Table A; Target 3549; HLA-A*68:01; ACTL8; ENSG00000117148; CTA
MVFPNIVNY

SEQ ID NO: 3550 - protein, 9 aa, Homo sapiens
  misc_feature: Table A; Target 3550; HLA-B*15:01; ACTL8; ENSG00000117148; CTA
MVFPNIVNY

SEQ ID NO: 3551 - protein, 9 aa, Homo sapiens
  misc_feature: Table A; Target 3551; HLA-B*15:03; ACTL8; ENSG00000117148; CTA
MVFPNIVNY

SEQ ID NO: 3552 - protein, 9 aa, Homo sapiens
  misc_feature: Table A; Target 3552; HLA-B*18:01; ACTL8; ENSG00000117148; CTA
MVFPNIVNY

SEQ ID NO: 3553 - protein, 9 aa, Homo sapiens
  misc_feature: Table A; Target 3553; HLA-B*35:01; ACTL8; ENSG00000117148; CTA
MVFPNIVNY

SEQ ID NO: 3554 - protein, 9 aa, Homo sapiens
  misc_feature: Table A; Target 3554; HLA-B*44:03; ACTL8; ENSG00000117148; CTA
MVFPNIVNY

SEQ ID NO: 3555 - protein, 9 aa, Homo sapiens
  misc_feature: Table A; Target 3555; HLA-B*46:01; ACTL8; ENSG00000117148; CTA
MVFPNIVNY

SEQ ID NO: 3556 - protein, 9 aa, Homo sapiens
  misc_feature: Table A; Target 3556; HLA-B*57:01; ACTL8; ENSG00000117148; CTA
MVFPNIVNY

SEQ ID NO: 3557 - protein, 9 aa, Homo sapiens
  misc_feature: Table A; Target 3557; HLA-B*58:01; ACTL8; ENSG00000117148; CTA
MVFPNIVNY

SEQ ID NO: 3558 - protein, 9 aa, Homo sapiens
  misc_feature: Table A; Target 3558; HLA-C*02:02; ACTL8; ENSG00000117148; CTA
MVFPNIVNY

SEQ ID NO: 3559 - protein, 9 aa, Homo sapiens
  misc_feature: Table A; Target 3559; HLA-C*07:04; ACTL8; ENSG00000117148; CTA
MVFPNIVNY

SEQ ID NO: 3560 - protein, 9 aa, Homo sapiens
  misc_feature: Table A; Target 3560; HLA-C*07:06; ACTL8; ENSG00000117148; CTA
MVFPNIVNY

SEQ ID NO: 3561 - protein, 9 aa, Homo sapiens
  misc_feature: Table A; Target 3561; HLA-C*12:03; ACTL8; ENSG00000117148; CTA
MVFPNIVNY

SEQ ID NO: 3562 - protein, 9 aa, Homo sapiens
  misc_feature: Table A; Target 3562; HLA-C*16:01; ACTL8; ENSG00000117148; CTA
MVFPNIVNY

SEQ ID NO: 3563 - protein, 9 aa, Homo sapiens
  misc_feature: Table A; Target 3563; HLA-C*16:04; ACTL8; ENSG00000117148; CTA
MVFPNIVNY

SEQ ID NO: 3564 - protein, 10 aa, Homo sapiens
  misc_feature: Table A; Target 3564; HLA-A*25:01; ACTL8; ENSG00000117148; CTA
MVFPNIVNYL

SEQ ID NO: 3565 - protein, 10 aa, Homo sapiens
  misc_feature: Table A; Target 3565; HLA-A*26:01; ACTL8; ENSG00000117148; CTA
MVFPNIVNYL

SEQ ID NO: 3566 - protein, 10 aa, Homo sapiens
  misc_feature: Table A; Target 3566; HLA-A*68:02; ACTL8; ENSG00000117148; CTA
MVFPNIVNYL

SEQ ID NO: 3567 - protein, 8 aa, Homo sapiens
  misc_feature: Table A; Target 3567; HLA-A*33:03; ACTL8; ENSG00000117148; CTA
NPGPSYAR

SEQ ID NO: 3568 - protein, 8 aa, Homo sapiens
  misc_feature: Table A; Target 3568; HLA-B*35:01; ACTL8; ENSG00000117148; CTA
NPGPSYAR

SEQ ID NO: 3569 - protein, 9 aa, Homo sapiens
  misc_feature: Table A; Target 3569; HLA-A*03:01; ACTL8; ENSG00000117148; CTA
NTLYPGFTK

SEQ ID NO: 3570 - protein, 9 aa, Homo sapiens
  misc_feature: Table A; Target 3570; HLA-A*03:02; ACTL8; ENSG00000117148; CTA
NTLYPGFTK

SEQ ID NO: 3571 - protein, 9 aa, Homo sapiens
  misc_feature: Table A; Target 3571; HLA-A*11:01; ACTL8; ENSG00000117148; CTA
NTLYPGFTK

SEQ ID NO: 3572 - protein, 9 aa, Homo sapiens
  misc_feature: Table A; Target 3572; HLA-A*31:01; ACTL8; ENSG00000117148; CTA
NTLYPGFTK

SEQ ID NO: 3573 - protein, 9 aa, Homo sapiens
  misc_feature: Table A; Target 3573; HLA-A*33:01; ACTL8; ENSG00000117148; CTA
NTLYPGFTK

SEQ ID NO: 3574 - protein, 9 aa, Homo sapiens
  misc_feature: Table A; Target 3574; HLA-A*33:03; ACTL8; ENSG00000117148; CTA
NTLYPGFTK

SEQ ID NO: 3575 - protein, 9 aa, Homo sapiens
  misc_feature: Table A; Target 3575; HLA-A*68:01; ACTL8; ENSG00000117148; CTA
NTLYPGFTK

SEQ ID NO: 3576 - protein, 9 aa, Homo sapiens
  misc_feature: Table A; Target 3576; HLA-C*07:06; ACTL8; ENSG00000117148; CTA
NTLYPGFTK

SEQ ID NO: 3577 - protein, 10 aa, Homo sapiens
  misc_feature: Table A; Target 3577; HLA-A*33:01; ACTL8; ENSG00000117148; CTA
NTLYPGFTKR

SEQ ID NO: 3578 - protein, 10 aa, Homo sapiens
  misc_feature: Table A; Target 3578; HLA-A*33:03; ACTL8; ENSG00000117148; CTA
NTLYPGFTKR

SEQ ID NO: 3579 - protein, 10 aa, Homo sapiens
  misc_feature: Table A; Target 3579; HLA-A*68:01; ACTL8; ENSG00000117148; CTA
NTLYPGFTKR

SEQ ID NO: 3580 - protein, 10 aa, Homo sapiens
  misc_feature: Table A; Target 3580; HLA-A*11:01; ACTL8; ENSG00000117148; CTA
NTYQLPDGSR

SEQ ID NO: 3581 - protein, 10 aa, Homo sapiens
  misc_feature: Table A; Target 3581; HLA-A*33:01; ACTL8; ENSG00000117148; CTA
NTYQLPDGSR

SEQ ID NO: 3582 - protein, 10 aa, Homo sapiens
  misc_feature: Table A; Target 3582; HLA-A*33:03; ACTL8; ENSG00000117148; CTA
NTYQLPDGSR

SEQ ID NO: 3583 - protein, 10 aa, Homo sapiens
  misc_feature: Table A; Target 3583; HLA-A*68:01; ACTL8; ENSG00000117148; CTA
NTYQLPDGSR

SEQ ID NO: 3584 - protein, 10 aa, Homo sapiens
  misc_feature: Table A; Target 3584; HLA-C*07:06; ACTL8; ENSG00000117148; CTA
NTYQLPDGSR

SEQ ID NO: 3585 - protein, 11 aa, Homo sapiens
  misc_feature: Table A; Target 3585; HLA-A*68:02; ACTL8; ENSG00000117148; CTA
NTYQLPDGSRV

SEQ ID NO: 3586 - protein, 9 aa, Homo sapiens
  misc_feature: Table A; Target 3586; HLA-C*12:03; ACTL8; ENSG00000117148; CTA
PASGKTLEF

SEQ ID NO: 3587 - protein, 9 aa, Homo sapiens
  misc_feature: Table A; Target 3587; HLA-C*16:02; ACTL8; ENSG00000117148; CTA
PASGKTLEF

SEQ ID NO: 3588 - protein, 10 aa, Homo sapiens
  misc_feature: Table A; Target 3588; HLA-A*30:02; ACTL8; ENSG00000117148; CTA
PCKENPGPSY

SEQ ID NO: 3589 - protein, 8 aa, Homo sapiens
  misc_feature: Table A; Target 3589; HLA-B*07:02; ACTL8; ENSG00000117148; CTA
PDGSRVEL

SEQ ID NO: 3590 - protein, 9 aa, Homo sapiens
  misc_feature: Table A; Target 3590; HLA-B*49:01; ACTL8; ENSG00000117148; CTA
PEMFFSPQV

SEQ ID NO: 3591 - protein, 9 aa, Homo sapiens
  misc_feature: Table A; Target 3591; HLA-C*07:02; ACTL8; ENSG00000117148; CTA
PGPSIPRAI

SEQ ID NO: 3592 - protein, 8 aa, Homo sapiens
  misc_feature: Table A; Target 3592; HLA-C*04:01; ACTL8; ENSG00000117148; CTA
PLLVSHVM

SEQ ID NO: 3593 - protein, 8 aa, Homo sapiens
  misc_feature: Table A; Target 3593; HLA-C*07:01; ACTL8; ENSG00000117148; CTA
PLLVSHVM

SEQ ID NO: 3594 - protein, 9 aa, Homo sapiens
  misc_feature: Table A; Target 3594; HLA-C*01:02; ACTL8; ENSG00000117148; CTA
PLPASGKTL

SEQ ID NO: 3595 - protein, 11 aa, Homo sapiens
  misc_feature: Table A; Target 3595; HLA-A*24:02; ACTL8; ENSG00000117148; CTA
PLPASGKTLEF

SEQ ID NO: 3596 - protein, 11 aa, Homo sapiens
  misc_feature: Table A; Target 3596; HLA-B*07:02; ACTL8; ENSG00000117148; CTA
PLPASGKTLEF

SEQ ID NO: 3597 - protein, 8 aa, Homo sapiens
  misc_feature: Table A; Target 3597; HLA-A*30:01; ACTL8; ENSG00000117148; CTA
QDLSAYLL

SEQ ID NO: 3598 - protein, 8 aa, Homo sapiens
  misc_feature: Table A; Target 3598; HLA-B*37:01; ACTL8; ENSG00000117148; CTA
QDLSAYLL

SEQ ID NO: 3599 - protein, 8 aa, Homo sapiens
  misc_feature: Table A; Target 3599; HLA-B*40:02; ACTL8; ENSG00000117148; CTA
QDLSAYLL

SEQ ID NO: 3600 - protein, 8 aa, Homo sapiens
  misc_feature: Table A; Target 3600; HLA-C*07:04; ACTL8; ENSG00000117148; CTA
QDLSAYLL

SEQ ID NO: 3601 - protein, 9 aa, Homo sapiens
  misc_feature: Table A; Target 3601; HLA-A*11:01; ACTL8; ENSG00000117148; CTA
QDLSAYLLK

SEQ ID NO: 3602 - protein, 9 aa, Homo sapiens
  misc_feature: Table A; Target 3602; HLA-B*27:02; ACTL8; ENSG00000117148; CTA
QDLSAYLLK

SEQ ID NO: 3603 - protein, 8 aa, Homo sapiens
  misc_feature: Table A; Target 3603; HLA-A*30:01; ACTL8; ENSG00000117148; CTA
QEVPPVII

SEQ ID NO: 3604 - protein, 8 aa, Homo sapiens
  misc_feature: Table A; Target 3604; HLA-B*18:01; ACTL8; ENSG00000117148; CTA
QEVPPVII

SEQ ID NO: 3605 - protein, 8 aa, Homo sapiens
  misc_feature: Table A; Target 3605; HLA-B*40:01; ACTL8; ENSG00000117148; CTA
QEVPPVII

SEQ ID NO: 3606 - protein, 8 aa, Homo sapiens
  misc_feature: Table A; Target 3606; HLA-B*49:01; ACTL8; ENSG00000117148; CTA
QEVPPVII

SEQ ID NO: 3607 - protein, 9 aa, Homo sapiens
  misc_feature: Table A; Target 3607; HLA-B*44:03; ACTL8; ENSG00000117148; CTA
QEVPPVIIT

SEQ ID NO: 3608 - protein, 9 aa, Homo sapiens
  misc_feature: Table A; Target 3608; HLA-B*49:01; ACTL8; ENSG00000117148; CTA
QEVPPVIIT

SEQ ID NO: 3609 - protein, 10 aa, Homo sapiens
  misc_feature: Table A; Target 3609; HLA-A*31:01; ACTL8; ENSG00000117148; CTA
QGRPLPASGK

SEQ ID NO: 3610 - protein, 9 aa, Homo sapiens
  misc_feature: Table A; Target 3610; HLA-A*03:02; ACTL8; ENSG00000117148; CTA
QLETVAVTQ

SEQ ID NO: 3611 - protein, 10 aa, Homo sapiens
  misc_feature: Table A; Target 3611; HLA-B*55:01; ACTL8; ENSG00000117148; CTA
QLETVAVTQM

SEQ ID NO: 3612 - protein, 10 aa, Homo sapiens
  misc_feature: Table A; Target 3612; HLA-A*02:01; ACTL8; ENSG00000117148; CTA
QLPDGSRVEL

SEQ ID NO: 3613 - protein, 10 aa, Homo sapiens
  misc_feature: Table A; Target 3613; HLA-A*02:07; ACTL8; ENSG00000117148; CTA
QLPDGSRVEL

SEQ ID NO: 3614 - protein, 10 aa, Homo sapiens
  misc_feature: Table A; Target 3614; HLA-B*07:02; ACTL8; ENSG00000117148; CTA
QLPDGSRVEL

SEQ ID NO: 3615 - protein, 10 aa, Homo sapiens
  misc_feature: Table A; Target 3615; HLA-C*01:02; ACTL8; ENSG00000117148; CTA
QLPDGSRVEL

SEQ ID NO: 3616 - protein, 10 aa, Homo sapiens
  misc_feature: Table A; Target 3616; HLA-A*30:02; ACTL8; ENSG00000117148; CTA
QMVFPNIVNY

SEQ ID NO: 3617 - protein, 9 aa, Homo sapiens
  misc_feature: Table A; Target 3617; HLA-B*07:02; ACTL8; ENSG00000117148; CTA
QPFHQGRPL

SEQ ID NO: 3618 - protein, 9 aa, Homo sapiens
  misc_feature: Table A; Target 3618; HLA-C*07:02; ACTL8; ENSG00000117148; CTA
QPFHQGRPL

SEQ ID NO: 3619 - protein, 11 aa, Homo sapiens
  misc_feature: Table A; Target 3619; HLA-B*07:02; ACTL8; ENSG00000117148; CTA
QPFHQGRPLPA

SEQ ID NO: 3620 - protein, 11 aa, Homo sapiens
  misc_feature: Table A; Target 3620; HLA-B*54:01; ACTL8; ENSG00000117148; CTA
QPFHQGRPLPA

SEQ ID NO: 3621 - protein, 11 aa, Homo sapiens
  misc_feature: Table A; Target 3621; HLA-B*56:01; ACTL8; ENSG00000117148; CTA
QPFHQGRPLPA

SEQ ID NO: 3622 - protein, 9 aa, Homo sapiens
  misc_feature: Table A; Target 3622; HLA-B*54:01; ACTL8; ENSG00000117148; CTA
QPGPSIPRA

SEQ ID NO: 3623 - protein, 9 aa, Homo sapiens
  misc_feature: Table A; Target 3623; HLA-B*55:01; ACTL8; ENSG00000117148; CTA
QPGPSIPRA

SEQ ID NO: 3624 - protein, 9 aa, Homo sapiens
  misc_feature: Table A; Target 3624; HLA-B*56:01; ACTL8; ENSG00000117148; CTA
QPGPSIPRA

SEQ ID NO: 3625 - protein, 10 aa, Homo sapiens
  misc_feature: Table A; Target 3625; HLA-B*07:02; ACTL8; ENSG00000117148; CTA
QPGPSIPRAI

SEQ ID NO: 3626 - protein, 10 aa, Homo sapiens
  misc_feature: Table A; Target 3626; HLA-B*56:01; ACTL8; ENSG00000117148; CTA
QPGPSIPRAI

SEQ ID NO: 3627 - protein, 11 aa, Homo sapiens
  misc_feature: Table A; Target 3627; HLA-A*30:02; ACTL8; ENSG00000117148; CTA
QQSALDESNTY

SEQ ID NO: 3628 - protein, 11 aa, Homo sapiens
  misc_feature: Table A; Target 3628; HLA-A*32:01; ACTL8; ENSG00000117148; CTA
QQSALDESNTY

SEQ ID NO: 3629 - protein, 11 aa, Homo sapiens
  misc_feature: Table A; Target 3629; HLA-B*15:03; ACTL8; ENSG00000117148; CTA
QQSALDESNTY

SEQ ID NO: 3630 - protein, 11 aa, Homo sapiens
  misc_feature: Table A; Target 3630; HLA-B*27:02; ACTL8; ENSG00000117148; CTA
QQSALDESNTY

SEQ ID NO: 3631 - protein, 11 aa, Homo sapiens
  misc_feature: Table A; Target 3631; HLA-B*27:05; ACTL8; ENSG00000117148; CTA
QQSALDESNTY

SEQ ID NO: 3632 - protein, 11 aa, Homo sapiens
  misc_feature: Table A; Target 3632; HLA-B*38:01; ACTL8; ENSG00000117148; CTA
QQSALDESNTY

SEQ ID NO: 3633 - protein, 11 aa, Homo sapiens
  misc_feature: Table A; Target 3633; HLA-B*39:01; ACTL8; ENSG00000117148; CTA
QQSALDESNTY

SEQ ID NO: 3634 - protein, 11 aa, Homo sapiens
  misc_feature: Table A; Target 3634; HLA-C*07:04; ACTL8; ENSG00000117148; CTA
QQSALDESNTY

SEQ ID NO: 3635 - protein, 11 aa, Homo sapiens
  misc_feature: Table A; Target 3635; HLA-C*16:04; ACTL8; ENSG00000117148; CTA
QQSALDESNTY

SEQ ID NO: 3636 - protein, 10 aa, Homo sapiens
  misc_feature: Table A; Target 3636; HLA-A*01:01; ACTL8; ENSG00000117148; CTA
QSALDESNTY

SEQ ID NO: 3637 - protein, 10 aa, Homo sapiens
  misc_feature: Table A; Target 3637; HLA-A*30:02; ACTL8; ENSG00000117148; CTA
QSALDESNTY

SEQ ID NO: 3638 - protein, 10 aa, Homo sapiens
  misc_feature: Table A; Target 3638; HLA-B*15:01; ACTL8; ENSG00000117148; CTA
QSALDESNTY

SEQ ID NO: 3639 - protein, 10 aa, Homo sapiens
  misc_feature: Table A; Target 3639; HLA-B*58:01; ACTL8; ENSG00000117148; CTA
QSALDESNTY

SEQ ID NO: 3640 - protein, 10 aa, Homo sapiens
  misc_feature: Table A; Target 3640; HLA-A*01:01; ACTL8; ENSG00000117148; CTA
QSEWMSREEY

SEQ ID NO: 3641 - protein, 10 aa, Homo sapiens
  misc_feature: Table A; Target 3641; HLA-A*25:01; ACTL8; ENSG00000117148; CTA
QVFEQPGPSI

SEQ ID NO: 3642 - protein, 10 aa, Homo sapiens
  misc_feature: Table A; Target 3642; HLA-A*26:01; ACTL8; ENSG00000117148; CTA
QVFEQPGPSI

SEQ ID NO: 3643 - protein, 10 aa, Homo sapiens
  misc_feature: Table A; Target 3643; HLA-B*13:02; ACTL8; ENSG00000117148; CTA
QVFEQPGPSI

SEQ ID NO: 3644 - protein, 10 aa, Homo sapiens
  misc_feature: Table A; Target 3644; HLA-B*51:01; ACTL8; ENSG00000117148; CTA
QVFEQPGPSI

SEQ ID NO: 3645 - protein, 10 aa, Homo sapiens
  misc_feature: Table A; Target 3645; HLA-B*56:01; ACTL8; ENSG00000117148; CTA
QVFEQPGPSI

SEQ ID NO: 3646 - protein, 8 aa, Homo sapiens
  misc_feature: Table A; Target 3646; HLA-B*37:01; ACTL8; ENSG00000117148; CTA
REEYGEHM

SEQ ID NO: 3647 - protein, 8 aa, Homo sapiens
  misc_feature: Table A; Target 3647; HLA-B*37:01; ACTL8; ENSG00000117148; CTA
RELMGDHV

SEQ ID NO: 3648 - protein, 8 aa, Homo sapiens
  misc_feature: Table A; Target 3648; HLA-B*18:01; ACTL8; ENSG00000117148; CTA
REQEVPPV

SEQ ID NO: 3649 - protein, 8 aa, Homo sapiens
  misc_feature: Table A; Target 3649; HLA-B*37:01; ACTL8; ENSG00000117148; CTA
REQEVPPV

SEQ ID NO: 3650 - protein, 9 aa, Homo sapiens
  misc_feature: Table A; Target 3650; HLA-A*30:01; ACTL8; ENSG00000117148; CTA
REQEVPPVI

SEQ ID NO: 3651 - protein, 9 aa, Homo sapiens
  misc_feature: Table A; Target 3651; HLA-B*13:02; ACTL8; ENSG00000117148; CTA
REQEVPPVI

SEQ ID NO: 3652 - protein, 9 aa, Homo sapiens
  misc_feature: Table A; Target 3652; HLA-B*18:01; ACTL8; ENSG00000117148; CTA
REQEVPPVI

SEQ ID NO: 3653 - protein, 9 aa, Homo sapiens
  misc_feature: Table A; Target 3653; HLA-B*27:02; ACTL8; ENSG00000117148; CTA
REQEVPPVI

SEQ ID NO: 3654 - protein, 9 aa, Homo sapiens
  misc_feature: Table A; Target 3654; HLA-B*37:01; ACTL8; ENSG00000117148; CTA
REQEVPPVI

SEQ ID NO: 3655 - protein, 9 aa, Homo sapiens
  misc_feature: Table A; Target 3655; HLA-B*38:01; ACTL8; ENSG00000117148; CTA
REQEVPPVI

SEQ ID NO: 3656 - protein, 9 aa, Homo sapiens
  misc_feature: Table A; Target 3656; HLA-B*40:01; ACTL8; ENSG00000117148; CTA
REQEVPPVI

SEQ ID NO: 3657 - protein, 9 aa, Homo sapiens
  misc_feature: Table A; Target 3657; HLA-B*40:02; ACTL8; ENSG00000117148; CTA
REQEVPPVI

SEQ ID NO: 3658 - protein, 9 aa, Homo sapiens
  misc_feature: Table A; Target 3658; HLA-B*44:02; ACTL8; ENSG00000117148; CTA
REQEVPPVI

SEQ ID NO: 3659 - protein, 9 aa, Homo sapiens
  misc_feature: Table A; Target 3659; HLA-B*44:03; ACTL8; ENSG00000117148; CTA
REQEVPPVI

SEQ ID NO: 3660 - protein, 9 aa, Homo sapiens
  misc_feature: Table A; Target 3660; HLA-B*49:01; ACTL8; ENSG00000117148; CTA
REQEVPPVI

SEQ ID NO: 3661 - protein, 9 aa, Homo sapiens
  misc_feature: Table A; Target 3661; HLA-C*16:04; ACTL8; ENSG00000117148; CTA
REQEVPPVI

SEQ ID NO: 3662 - protein, 10 aa, Homo sapiens
  misc_feature: Table A; Target 3662; HLA-A*30:01; ACTL8; ENSG00000117148; CTA
REQEVPPVII

SEQ ID NO: 3663 - protein, 10 aa, Homo sapiens
  misc_feature: Table A; Target 3663; HLA-B*40:01; ACTL8; ENSG00000117148; CTA
REQEVPPVII

SEQ ID NO: 3664 - protein, 10 aa, Homo sapiens
  misc_feature: Table A; Target 3664; HLA-B*40:02; ACTL8; ENSG00000117148; CTA
REQEVPPVII

SEQ ID NO: 3665 - protein, 10 aa, Homo sapiens
  misc_feature: Table A; Target 3665; HLA-B*44:02; ACTL8; ENSG00000117148; CTA
REQEVPPVII

SEQ ID NO: 3666 - protein, 10 aa, Homo sapiens
  misc_feature: Table A; Target 3666; HLA-B*49:01; ACTL8; ENSG00000117148; CTA
REQEVPPVII

SEQ ID NO: 3667 - protein, 10 aa, Homo sapiens
  misc_feature: Table A; Target 3667; HLA-A*29:02; ACTL8; ENSG00000117148; CTA
RILNWEGVQY

SEQ ID NO: 3668 - protein, 11 aa, Homo sapiens
  misc_feature: Table A; Target 3668; HLA-A*02:04; ACTL8; ENSG00000117148; CTA
RILNWEGVQYL

SEQ ID NO: 3669 - protein, 8 aa, Homo sapiens
  misc_feature: Table A; Target 3669; HLA-B*07:02; ACTL8; ENSG00000117148; CTA
RPLLVSHV

SEQ ID NO: 3670 - protein, 8 aa, Homo sapiens
  misc_feature: Table A; Target 3670; HLA-B*08:01; ACTL8; ENSG00000117148; CTA
RPLLVSHV

SEQ ID NO: 3671 - protein, 8 aa, Homo sapiens
  misc_feature: Table A; Target 3671; HLA-B*51:01; ACTL8; ENSG00000117148; CTA
RPLLVSHV

SEQ ID NO: 3672 - protein, 9 aa, Homo sapiens
  misc_feature: Table A; Target 3672; HLA-B*07:02; ACTL8; ENSG00000117148; CTA
RPLLVSHVM

SEQ ID NO: 3673 - protein, 9 aa, Homo sapiens
  misc_feature: Table A; Target 3673; HLA-B*08:01; ACTL8; ENSG00000117148; CTA
RPLLVSHVM

SEQ ID NO: 3674 - protein, 9 aa, Homo sapiens
  misc_feature: Table A; Target 3674; HLA-B*35:01; ACTL8; ENSG00000117148; CTA
RPLLVSHVM

SEQ ID NO: 3675 - protein, 9 aa, Homo sapiens
  misc_feature: Table A; Target 3675; HLA-B*35:03; ACTL8; ENSG00000117148; CTA
RPLLVSHVM

SEQ ID NO: 3676 - protein, 9 aa, Homo sapiens
  misc_feature: Table A; Target 3676; HLA-B*40:02; ACTL8; ENSG00000117148; CTA
RPLLVSHVM

SEQ ID NO: 3677 - protein, 9 aa, Homo sapiens
  misc_feature: Table A; Target 3677; HLA-B*54:01; ACTL8; ENSG00000117148; CTA
RPLLVSHVM

SEQ ID NO: 3678 - protein, 9 aa, Homo sapiens
  misc_feature: Table A; Target 3678; HLA-B*55:01; ACTL8; ENSG00000117148; CTA
RPLLVSHVM

SEQ ID NO: 3679 - protein, 9 aa, Homo sapiens
  misc_feature: Table A; Target 3679; HLA-B*56:01; ACTL8; ENSG00000117148; CTA
RPLLVSHVM

SEQ ID NO: 3680 - protein, 9 aa, Homo sapiens
  misc_feature: Table A; Target 3680; HLA-C*03:03; ACTL8; ENSG00000117148; CTA
RPLLVSHVM

SEQ ID NO: 3681 - protein, 9 aa, Homo sapiens
  misc_feature: Table A; Target 3681; HLA-C*07:02; ACTL8; ENSG00000117148; CTA
RPLLVSHVM

SEQ ID NO: 3682 - protein, 10 aa, Homo sapiens
  misc_feature: Table A; Target 3682; HLA-B*54:01; ACTL8; ENSG00000117148; CTA
RPLLVSHVMA

SEQ ID NO: 3683 - protein, 10 aa, Homo sapiens
  misc_feature: Table A; Target 3683; HLA-B*56:01; ACTL8; ENSG00000117148; CTA
RPLLVSHVMA

SEQ ID NO: 3684 - protein, 10 aa, Homo sapiens
  misc_feature: Table A; Target 3684; HLA-B*07:02; ACTL8; ENSG00000117148; CTA
RPLPASGKTL

SEQ ID NO: 3685 - protein, 10 aa, Homo sapiens
  misc_feature: Table A; Target 3685; HLA-C*07:02; ACTL8; ENSG00000117148; CTA
RPLPASGKTL

SEQ ID NO: 3686 - protein, 11 aa, Homo sapiens
  misc_feature: Table A; Target 3686; HLA-B*57:01; ACTL8; ENSG00000117148; CTA
RTVIIDHGSGF

SEQ ID NO: 3687 - protein, 9 aa, Homo sapiens
  misc_feature: Table A; Target 3687; HLA-A*03:01; ACTL8; ENSG00000117148; CTA
RVELTPMQR

SEQ ID NO: 3688 - protein, 9 aa, Homo sapiens
  misc_feature: Table A; Target 3688; HLA-A*03:02; ACTL8; ENSG00000117148; CTA
RVELTPMQR

SEQ ID NO: 3689 - protein, 9 aa, Homo sapiens
  misc_feature: Table A; Target 3689; HLA-A*11:01; ACTL8; ENSG00000117148; CTA
RVELTPMQR

SEQ ID NO: 3690 - protein, 9 aa, Homo sapiens
  misc_feature: Table A; Target 3690; HLA-A*31:01; ACTL8; ENSG00000117148; CTA
RVELTPMQR

SEQ ID NO: 3691 - protein, 9 aa, Homo sapiens
  misc_feature: Table A; Target 3691; HLA-A*03:02; ACTL8; ENSG00000117148; CTA
RVQPFHQGR

SEQ ID NO: 3692 - protein, 9 aa, Homo sapiens
  misc_feature: Table A; Target 3692; HLA-A*11:01; ACTL8; ENSG00000117148; CTA
RVQPFHQGR

SEQ ID NO: 3693 - protein, 9 aa, Homo sapiens
  misc_feature: Table A; Target 3693; HLA-A*31:01; ACTL8; ENSG00000117148; CTA
RVQPFHQGR

SEQ ID NO: 3694 - protein, 9 aa, Homo sapiens
  misc_feature: Table A; Target 3694; HLA-A*23:01; ACTL8; ENSG00000117148; CTA
SALDESNTY

SEQ ID NO: 3695 - protein, 9 aa, Homo sapiens
  misc_feature: Table A; Target 3695; HLA-A*25:01; ACTL8; ENSG00000117148; CTA
SALDESNTY

SEQ ID NO: 3696 - protein, 9 aa, Homo sapiens
  misc_feature: Table A; Target 3696; HLA-A*26:01; ACTL8; ENSG00000117148; CTA
SALDESNTY

SEQ ID NO: 3697 - protein, 9 aa, Homo sapiens
  misc_feature: Table A; Target 3697; HLA-A*29:02; ACTL8; ENSG00000117148; CTA
SALDESNTY

SEQ ID NO: 3698 - protein, 9 aa, Homo sapiens
  misc_feature: Table A; Target 3698; HLA-A*30:02; ACTL8; ENSG00000117148; CTA
SALDESNTY

SEQ ID NO: 3699 - protein, 9 aa, Homo sapiens
  misc_feature: Table A; Target 3699; HLA-A*32:01; ACTL8; ENSG00000117148; CTA
SALDESNTY

SEQ ID NO: 3700 - protein, 9 aa, Homo sapiens
  misc_feature: Table A; Target 3700; HLA-B*15:01; ACTL8; ENSG00000117148; CTA
SALDESNTY

SEQ ID NO: 3701 - protein, 9 aa, Homo sapiens
  misc_feature: Table A; Target 3701; HLA-B*15:03; ACTL8; ENSG00000117148; CTA
SALDESNTY

SEQ ID NO: 3702 - protein, 9 aa, Homo sapiens
  misc_feature: Table A; Target 3702; HLA-B*18:01; ACTL8; ENSG00000117148; CTA
SALDESNTY

SEQ ID NO: 3703 - protein, 9 aa, Homo sapiens
  misc_feature: Table A; Target 3703; HLA-B*27:02; ACTL8; ENSG00000117148; CTA
SALDESNTY

SEQ ID NO: 3704 - protein, 9 aa, Homo sapiens
  misc_feature: Table A; Target 3704; HLA-B*27:05; ACTL8; ENSG00000117148; CTA
SALDESNTY

SEQ ID NO: 3705 - protein, 9 aa, Homo sapiens
  misc_feature: Table A; Target 3705; HLA-B*35:03; ACTL8; ENSG00000117148; CTA
SALDESNTY

SEQ ID NO: 3706 - protein, 9 aa, Homo sapiens
  misc_feature: Table A; Target 3706; HLA-B*38:01; ACTL8; ENSG00000117148; CTA
SALDESNTY

SEQ ID NO: 3707 - protein, 9 aa, Homo sapiens
  misc_feature: Table A; Target 3707; HLA-B*39:01; ACTL8; ENSG00000117148; CTA
SALDESNTY

SEQ ID NO: 3708 - protein, 9 aa, Homo sapiens
  misc_feature: Table A; Target 3708; HLA-B*46:01; ACTL8; ENSG00000117148; CTA
SALDESNTY

SEQ ID NO: 3709 - protein, 9 aa, Homo sapiens
  misc_feature: Table A; Target 3709; HLA-B*55:01; ACTL8; ENSG00000117148; CTA
SALDESNTY

SEQ ID NO: 3710 - protein, 9 aa, Homo sapiens
  misc_feature: Table A; Target 3710; HLA-B*58:01; ACTL8; ENSG00000117148; CTA
SALDESNTY

SEQ ID NO: 3711 - protein, 9 aa, Homo sapiens
  misc_feature: Table A; Target 3711; HLA-C*01:02; ACTL8; ENSG00000117148; CTA
SALDESNTY

SEQ ID NO: 3712 - protein, 9 aa, Homo sapiens
  misc_feature: Table A; Target 3712; HLA-C*02:02; ACTL8; ENSG00000117148; CTA
SALDESNTY

SEQ ID NO: 3713 - protein, 9 aa, Homo sapiens
  misc_feature: Table A; Target 3713; HLA-C*03:03; ACTL8; ENSG00000117148; CTA
SALDESNTY

SEQ ID NO: 3714 - protein, 9 aa, Homo sapiens
  misc_feature: Table A; Target 3714; HLA-C*03:04; ACTL8; ENSG00000117148; CTA
SALDESNTY

SEQ ID NO: 3715 - protein, 9 aa, Homo sapiens
  misc_feature: Table A; Target 3715; HLA-C*05:01; ACTL8; ENSG00000117148; CTA
SALDESNTY

SEQ ID NO: 3716 - protein, 9 aa, Homo sapiens
  misc_feature: Table A; Target 3716; HLA-C*07:04; ACTL8; ENSG00000117148; CTA
SALDESNTY

SEQ ID NO: 3717 - protein, 9 aa, Homo sapiens
  misc_feature: Table A; Target 3717; HLA-C*07:06; ACTL8; ENSG00000117148; CTA
SALDESNTY

SEQ ID NO: 3718 - protein, 9 aa, Homo sapiens
  misc_feature: Table A; Target 3718; HLA-C*12:03; ACTL8; ENSG00000117148; CTA
SALDESNTY

SEQ ID NO: 3719 - protein, 9 aa, Homo sapiens
  misc_feature: Table A; Target 3719; HLA-C*14:02; ACTL8; ENSG00000117148; CTA
SALDESNTY

SEQ ID NO: 3720 - protein, 9 aa, Homo sapiens
  misc_feature: Table A; Target 3720; HLA-C*16:01; ACTL8; ENSG00000117148; CTA
SALDESNTY

SEQ ID NO: 3721 - protein, 9 aa, Homo sapiens
  misc_feature: Table A; Target 3721; HLA-C*16:02; ACTL8; ENSG00000117148; CTA
SALDESNTY

SEQ ID NO: 3722 - protein, 9 aa, Homo sapiens
  misc_feature: Table A; Target 3722; HLA-C*16:04; ACTL8; ENSG00000117148; CTA
SALDESNTY

SEQ ID NO: 3723 - protein, 11 aa, Homo sapiens
  misc_feature: Table A; Target 3723; HLA-A*02:01; ACTL8; ENSG00000117148; CTA
SALDESNTYQL

SEQ ID NO: 3724 - protein, 11 aa, Homo sapiens
  misc_feature: Table A; Target 3724; HLA-A*02:04; ACTL8; ENSG00000117148; CTA
SALDESNTYQL

SEQ ID NO: 3725 - protein, 11 aa, Homo sapiens
  misc_feature: Table A; Target 3725; HLA-A*11:01; ACTL8; ENSG00000117148; CTA
SALDESNTYQL

SEQ ID NO: 3726 - protein, 11 aa, Homo sapiens
  misc_feature: Table A; Target 3726; HLA-B*35:03; ACTL8; ENSG00000117148; CTA
SALDESNTYQL

SEQ ID NO: 3727 - protein, 8 aa, Homo sapiens
  misc_feature: Table A; Target 3727; HLA-B*08:01; ACTL8; ENSG00000117148; CTA
SAYLLKSL

SEQ ID NO: 3728 - protein, 8 aa, Homo sapiens
  misc_feature: Table A; Target 3728; HLA-B*46:01; ACTL8; ENSG00000117148; CTA
SAYLLKSL

SEQ ID NO: 3729 - protein, 8 aa, Homo sapiens
  misc_feature: Table A; Target 3729; HLA-B*51:01; ACTL8; ENSG00000117148; CTA
SAYLLKSL

SEQ ID NO: 3730 - protein, 8 aa, Homo sapiens
  misc_feature: Table A; Target 3730; HLA-C*02:02; ACTL8; ENSG00000117148; CTA
SAYLLKSL

SEQ ID NO: 3731 - protein, 8 aa, Homo sapiens
  misc_feature: Table A; Target 3731; HLA-C*03:04; ACTL8; ENSG00000117148; CTA
SAYLLKSL

SEQ ID NO: 3732 - protein, 8 aa, Homo sapiens
  misc_feature: Table A; Target 3732; HLA-C*16:02; ACTL8; ENSG00000117148; CTA
SAYLLKSL

SEQ ID NO: 3733 - protein, 9 aa, Homo sapiens
  misc_feature: Table A; Target 3733; HLA-B*08:01; ACTL8; ENSG00000117148; CTA
SAYLLKSLF

SEQ ID NO: 3734 - protein, 9 aa, Homo sapiens
  misc_feature: Table A; Target 3734; HLA-B*44:02; ACTL8; ENSG00000117148; CTA
SAYLLKSLF

SEQ ID NO: 3735 - protein, 9 aa, Homo sapiens
  misc_feature: Table A; Target 3735; HLA-B*51:01; ACTL8; ENSG00000117148; CTA
SAYLLKSLF

SEQ ID NO: 3736 - protein, 9 aa, Homo sapiens
  misc_feature: Table A; Target 3736; HLA-B*57:01; ACTL8; ENSG00000117148; CTA
SAYLLKSLF

SEQ ID NO: 3737 - protein, 9 aa, Homo sapiens
  misc_feature: Table A; Target 3737; HLA-C*02:02; ACTL8; ENSG00000117148; CTA
SAYLLKSLF

SEQ ID NO: 3738 - protein, 9 aa, Homo sapiens
  misc_feature: Table A; Target 3738; HLA-C*12:03; ACTL8; ENSG00000117148; CTA
SAYLLKSLF

SEQ ID NO: 3739 - protein, 10 aa, Homo sapiens
  misc_feature: Table A; Target 3739; HLA-A*03:01; ACTL8; ENSG00000117148; CTA
SAYLLKSLFK

SEQ ID NO: 3740 - protein, 9 aa, Homo sapiens
  misc_feature: Table A; Target 3740; HLA-A*30:02; ACTL8; ENSG00000117148; CTA
SEWMSREEY

SEQ ID NO: 3741 - protein, 9 aa, Homo sapiens
  misc_feature: Table A; Target 3741; HLA-B*15:01; ACTL8; ENSG00000117148; CTA
SEWMSREEY

SEQ ID NO: 3742 - protein, 9 aa, Homo sapiens
  misc_feature: Table A; Target 3742; HLA-B*15:03; ACTL8; ENSG00000117148; CTA
SEWMSREEY

SEQ ID NO: 3743 - protein, 9 aa, Homo sapiens
  misc_feature: Table A; Target 3743; HLA-B*27:02; ACTL8; ENSG00000117148; CTA
SEWMSREEY

SEQ ID NO: 3744 - protein, 9 aa, Homo sapiens
  misc_feature: Table A; Target 3744; HLA-B*40:01; ACTL8; ENSG00000117148; CTA
SEWMSREEY

SEQ ID NO: 3745 - protein, 9 aa, Homo sapiens
  misc_feature: Table A; Target 3745; HLA-B*44:02; ACTL8; ENSG00000117148; CTA
SEWMSREEY

SEQ ID NO: 3746 - protein, 9 aa, Homo sapiens
  misc_feature: Table A; Target 3746; HLA-C*02:02; ACTL8; ENSG00000117148; CTA
SEWMSREEY

SEQ ID NO: 3747 - protein, 9 aa, Homo sapiens
  misc_feature: Table A; Target 3747; HLA-C*16:04; ACTL8; ENSG00000117148; CTA
SEWMSREEY

SEQ ID NO: 3748 - protein, 9 aa, Homo sapiens
  misc_feature: Table A; Target 3748; HLA-B*13:02; ACTL8; ENSG00000117148; CTA
SGLLTGVVV

SEQ ID NO: 3749 - protein, 9 aa, Homo sapiens
  misc_feature: Table A; Target 3749; HLA-B*46:01; ACTL8; ENSG00000117148; CTA
SGLLTGVVV

SEQ ID NO: 3750 - protein, 9 aa, Homo sapiens
  misc_feature: Table A; Target 3750; HLA-C*03:03; ACTL8; ENSG00000117148; CTA
SGLLTGVVV

SEQ ID NO: 3751 - protein, 9 aa, Homo sapiens
  misc_feature: Table A; Target 3751; HLA-C*03:04; ACTL8; ENSG00000117148; CTA
SGLLTGVVV

SEQ ID NO: 3752 - protein, 9 aa, Homo sapiens
  misc_feature: Table A; Target 3752; HLA-C*07:04; ACTL8; ENSG00000117148; CTA
SGLLTGVVV

SEQ ID NO: 3753 - protein, 8 aa, Homo sapiens
  misc_feature: Table A; Target 3753; HLA-B*08:01; ACTL8; ENSG00000117148; CTA
SGYGLTRV

SEQ ID NO: 3754 - protein, 8 aa, Homo sapiens
  misc_feature: Table A; Target 3754; HLA-B*51:01; ACTL8; ENSG00000117148; CTA
SGYGLTRV

SEQ ID NO: 3755 - protein, 8 aa, Homo sapiens
  misc_feature: Table A; Target 3755; HLA-C*06:02; ACTL8; ENSG00000117148; CTA
SGYGLTRV

SEQ ID NO: 3756 - protein, 9 aa, Homo sapiens
  misc_feature: Table A; Target 3756; HLA-C*06:02; ACTL8; ENSG00000117148; CTA
SGYGLTRVQ

SEQ ID NO: 3757 - protein, 9 aa, Homo sapiens
  misc_feature: Table A; Target 3757; HLA-C*12:03; ACTL8; ENSG00000117148; CTA
SGYGLTRVQ

SEQ ID NO: 3758 - protein, 11 aa, Homo sapiens
  misc_feature: Table A; Target 3758; HLA-B*38:01; ACTL8; ENSG00000117148; CTA
SHVMACGGNTL

SEQ ID NO: 3759 - protein, 9 aa, Homo sapiens
  misc_feature: Table A; Target 3759; HLA-A*31:01; ACTL8; ENSG00000117148; CTA
SLRPLLVSH

SEQ ID NO: 3760 - protein, 10 aa, Homo sapiens
  misc_feature: Table A; Target 3760; HLA-A*02:03; ACTL8; ENSG00000117148; CTA
SLRPLLVSHV

SEQ ID NO: 3761 - protein, 9 aa, Homo sapiens
  misc_feature: Table A; Target 3761; HLA-A*03:01; ACTL8; ENSG00000117148; CTA
SLYASGLLT

SEQ ID NO: 3762 - protein, 9 aa, Homo sapiens
  misc_feature: Table A; Target 3762; HLA-B*13:02; ACTL8; ENSG00000117148; CTA
SLYASGLLT

SEQ ID NO: 3763 - protein, 10 aa, Homo sapiens
  misc_feature: Table A; Target 3763; HLA-A*02:01; ACTL8; ENSG00000117148; CTA
SLYASGLLTG

SEQ ID NO: 3764 - protein, 10 aa, Homo sapiens
  misc_feature: Table A; Target 3764; HLA-A*02:03; ACTL8; ENSG00000117148; CTA
SLYASGLLTG

SEQ ID NO: 3765 - protein, 10 aa, Homo sapiens
  misc_feature: Table A; Target 3765; HLA-B*13:02; ACTL8; ENSG00000117148; CTA
SLYASGLLTG

SEQ ID NO: 3766 - protein, 11 aa, Homo sapiens
  misc_feature: Table A; Target 3766; HLA-A*02:03; ACTL8; ENSG00000117148; CTA
SLYASGLLTGV

SEQ ID NO: 3767 - protein, 11 aa, Homo sapiens
  misc_feature: Table A; Target 3767; HLA-A*02:04; ACTL8; ENSG00000117148; CTA
SLYASGLLTGV

SEQ ID NO: 3768 - protein, 11 aa, Homo sapiens
  misc_feature: Table A; Target 3768; HLA-A*02:07; ACTL8; ENSG00000117148; CTA
SLYASGLLTGV

SEQ ID NO: 3769 - protein, 11 aa, Homo sapiens
  misc_feature: Table A; Target 3769; HLA-B*13:02; ACTL8; ENSG00000117148; CTA
SLYASGLLTGV

SEQ ID NO: 3770 - protein, 11 aa, Homo sapiens
  misc_feature: Table A; Target 3770; HLA-B*55:01; ACTL8; ENSG00000117148; CTA
SLYASGLLTGV

SEQ ID NO: 3771 - protein, 10 aa, Homo sapiens
  misc_feature: Table A; Target 3771; HLA-B*27:05; ACTL8; ENSG00000117148; CTA
SRVELTPMQR

SEQ ID NO: 3772 - protein, 8 aa, Homo sapiens
  misc_feature: Table A; Target 3772; HLA-A*32:01; ACTL8; ENSG00000117148; CTA
SSTKATVW

SEQ ID NO: 3773 - protein, 8 aa, Homo sapiens
  misc_feature: Table A; Target 3773; HLA-B*57:01; ACTL8; ENSG00000117148; CTA
SSTKATVW

SEQ ID NO: 3774 - protein, 8 aa, Homo sapiens
  misc_feature: Table A; Target 3774; HLA-B*58:01; ACTL8; ENSG00000117148; CTA
SSTKATVW

SEQ ID NO: 3775 - protein, 8 aa, Homo sapiens
  misc_feature: Table A; Target 3775; HLA-C*16:01; ACTL8; ENSG00000117148; CTA
SSTKATVW

SEQ ID NO: 3776 - protein, 10 aa, Homo sapiens
  misc_feature: Table A; Target 3776; HLA-A*03:01; ACTL8; ENSG00000117148; CTA
STYQSEWMSR

SEQ ID NO: 3777 - protein, 10 aa, Homo sapiens
  misc_feature: Table A; Target 3777; HLA-A*11:01; ACTL8; ENSG00000117148; CTA
STYQSEWMSR

SEQ ID NO: 3778 - protein, 10 aa, Homo sapiens
  misc_feature: Table A; Target 3778; HLA-A*31:01; ACTL8; ENSG00000117148; CTA
STYQSEWMSR

SEQ ID NO: 3779 - protein, 10 aa, Homo sapiens
  misc_feature: Table A; Target 3779; HLA-A*33:01; ACTL8; ENSG00000117148; CTA
STYQSEWMSR

SEQ ID NO: 3780 - protein, 10 aa, Homo sapiens
  misc_feature: Table A; Target 3780; HLA-A*33:03; ACTL8; ENSG00000117148; CTA
STYQSEWMSR

SEQ ID NO: 3781 - protein, 10 aa, Homo sapiens
  misc_feature: Table A; Target 3781; HLA-A*68:01; ACTL8; ENSG00000117148; CTA
STYQSEWMSR

SEQ ID NO: 3782 - protein, 10 aa, Homo sapiens
  misc_feature: Table A; Target 3782; HLA-C*07:06; ACTL8; ENSG00000117148; CTA
STYQSEWMSR

SEQ ID NO: 3783 - protein, 9 aa, Homo sapiens
  misc_feature: Table A; Target 3783; HLA-C*05:01; ACTL8; ENSG00000117148; CTA
SVESCEISL

SEQ ID NO: 3784 - protein, 9 aa, Homo sapiens
  misc_feature: Table A; Target 3784; HLA-A*01:01; ACTL8; ENSG00000117148; CTA
SVVAHLSTY

SEQ ID NO: 3785 - protein, 9 aa, Homo sapiens
  misc_feature: Table A; Target 3785; HLA-A*02:03; ACTL8; ENSG00000117148; CTA
SVVAHLSTY

SEQ ID NO: 3786 - protein, 9 aa, Homo sapiens
  misc_feature: Table A; Target 3786; HLA-A*03:01; ACTL8; ENSG00000117148; CTA
SVVAHLSTY

SEQ ID NO: 3787 - protein, 9 aa, Homo sapiens
  misc_feature: Table A; Target 3787; HLA-A*03:02; ACTL8; ENSG00000117148; CTA
SVVAHLSTY

SEQ ID NO: 3788 - protein, 9 aa, Homo sapiens
  misc_feature: Table A; Target 3788; HLA-A*11:01; ACTL8; ENSG00000117148; CTA
SVVAHLSTY

SEQ ID NO: 3789 - protein, 9 aa, Homo sapiens
  misc_feature: Table A; Target 3789; HLA-A*23:01; ACTL8; ENSG00000117148; CTA
SVVAHLSTY

SEQ ID NO: 3790 - protein, 9 aa, Homo sapiens
  misc_feature: Table A; Target 3790; HLA-A*24:02; ACTL8; ENSG00000117148; CTA
SVVAHLSTY

SEQ ID NO: 3791 - protein, 9 aa, Homo sapiens
  misc_feature: Table A; Target 3791; HLA-A*25:01; ACTL8; ENSG00000117148; CTA
SVVAHLSTY

SEQ ID NO: 3792 - protein, 9 aa, Homo sapiens
  misc_feature: Table A; Target 3792; HLA-A*29:02; ACTL8; ENSG00000117148; CTA
SVVAHLSTY

SEQ ID NO: 3793 - protein, 9 aa, Homo sapiens
  misc_feature: Table A; Target 3793; HLA-A*32:01; ACTL8; ENSG00000117148; CTA
SVVAHLSTY

SEQ ID NO: 3794 - protein, 9 aa, Homo sapiens
  misc_feature: Table A; Target 3794; HLA-A*68:01; ACTL8; ENSG00000117148; CTA
SVVAHLSTY

SEQ ID NO: 3795 - protein, 9 aa, Homo sapiens
  misc_feature: Table A; Target 3795; HLA-B*15:03; ACTL8; ENSG00000117148; CTA
SVVAHLSTY

SEQ ID NO: 3796 - protein, 9 aa, Homo sapiens
  misc_feature: Table A; Target 3796; HLA-B*18:01; ACTL8; ENSG00000117148; CTA
SVVAHLSTY

SEQ ID NO: 3797 - protein, 9 aa, Homo sapiens
  misc_feature: Table A; Target 3797; HLA-B*27:02; ACTL8; ENSG00000117148; CTA
SVVAHLSTY

SEQ ID NO: 3798 - protein, 9 aa, Homo sapiens
  misc_feature: Table A; Target 3798; HLA-B*27:05; ACTL8; ENSG00000117148; CTA
SVVAHLSTY

SEQ ID NO: 3799 - protein, 9 aa, Homo sapiens
  misc_feature: Table A; Target 3799; HLA-B*39:01; ACTL8; ENSG00000117148; CTA
SVVAHLSTY

SEQ ID NO: 3800 - protein, 9 aa, Homo sapiens
  misc_feature: Table A; Target 3800; HLA-B*44:02; ACTL8; ENSG00000117148; CTA
SVVAHLSTY

SEQ ID NO: 3801 - protein, 9 aa, Homo sapiens
  misc_feature: Table A; Target 3801; HLA-B*44:03; ACTL8; ENSG00000117148; CTA
SVVAHLSTY

SEQ ID NO: 3802 - protein, 9 aa, Homo sapiens
  misc_feature: Table A; Target 3802; HLA-B*55:01; ACTL8; ENSG00000117148; CTA
SVVAHLSTY

SEQ ID NO: 3803 - protein, 9 aa, Homo sapiens
  misc_feature: Table A; Target 3803; HLA-B*57:01; ACTL8; ENSG00000117148; CTA
SVVAHLSTY

SEQ ID NO: 3804 - protein, 9 aa, Homo sapiens
  misc_feature: Table A; Target 3804; HLA-B*58:01; ACTL8; ENSG00000117148; CTA
SVVAHLSTY

SEQ ID NO: 3805 - protein, 9 aa, Homo sapiens
  misc_feature: Table A; Target 3805; HLA-C*01:02; ACTL8; ENSG00000117148; CTA
SVVAHLSTY

SEQ ID NO: 3806 - protein, 9 aa, Homo sapiens
  misc_feature: Table A; Target 3806; HLA-C*02:02; ACTL8; ENSG00000117148; CTA
SVVAHLSTY

SEQ ID NO: 3807 - protein, 9 aa, Homo sapiens
  misc_feature: Table A; Target 3807; HLA-C*03:03; ACTL8; ENSG00000117148; CTA
SVVAHLSTY

SEQ ID NO: 3808 - protein, 9 aa, Homo sapiens
  misc_feature: Table A; Target 3808; HLA-C*03:04; ACTL8; ENSG00000117148; CTA
SVVAHLSTY

SEQ ID NO: 3809 - protein, 9 aa, Homo sapiens
  misc_feature: Table A; Target 3809; HLA-C*04:01; ACTL8; ENSG00000117148; CTA
SVVAHLSTY

SEQ ID NO: 3810 - protein, 9 aa, Homo sapiens
  misc_feature: Table A; Target 3810; HLA-C*05:01; ACTL8; ENSG00000117148; CTA
SVVAHLSTY

SEQ ID NO: 3811 - protein, 9 aa, Homo sapiens
  misc_feature: Table A; Target 3811; HLA-C*07:04; ACTL8; ENSG00000117148; CTA
SVVAHLSTY

SEQ ID NO: 3812 - protein, 9 aa, Homo sapiens
  misc_feature: Table A; Target 3812; HLA-C*07:06; ACTL8; ENSG00000117148; CTA
SVVAHLSTY

SEQ ID NO: 3813 - protein, 9 aa, Homo sapiens
  misc_feature: Table A; Target 3813; HLA-C*12:03; ACTL8; ENSG00000117148; CTA
SVVAHLSTY

SEQ ID NO: 3814 - protein, 9 aa, Homo sapiens
  misc_feature: Table A; Target 3814; HLA-C*14:02; ACTL8; ENSG00000117148; CTA
SVVAHLSTY

SEQ ID NO: 3815 - protein, 9 aa, Homo sapiens
  misc_feature: Table A; Target 3815; HLA-C*16:01; ACTL8; ENSG00000117148; CTA
SVVAHLSTY

SEQ ID NO: 3816 - protein, 9 aa, Homo sapiens
  misc_feature: Table A; Target 3816; HLA-C*16:02; ACTL8; ENSG00000117148; CTA
SVVAHLSTY

SEQ ID NO: 3817 - protein, 9 aa, Homo sapiens
  misc_feature: Table A; Target 3817; HLA-C*16:04; ACTL8; ENSG00000117148; CTA
SVVAHLSTY

SEQ ID NO: 3818 - protein, 8 aa, Homo sapiens
  misc_feature: Table A; Target 3818; HLA-B*56:01; ACTL8; ENSG00000117148; CTA
SVWLGASV

SEQ ID NO: 3819 - protein, 9 aa, Homo sapiens
  misc_feature: Table A; Target 3819; HLA-A*02:01; ACTL8; ENSG00000117148; CTA
SVWLGASVV

SEQ ID NO: 3820 - protein, 9 aa, Homo sapiens
  misc_feature: Table A; Target 3820; HLA-A*02:03; ACTL8; ENSG00000117148; CTA
SVWLGASVV

SEQ ID NO: 3821 - protein, 9 aa, Homo sapiens
  misc_feature: Table A; Target 3821; HLA-A*68:02; ACTL8; ENSG00000117148; CTA
SVWLGASVV

SEQ ID NO: 3822 - protein, 9 aa, Homo sapiens
  misc_feature: Table A; Target 3822; HLA-B*13:02; ACTL8; ENSG00000117148; CTA
SVWLGASVV

SEQ ID NO: 3823 - protein, 9 aa, Homo sapiens
  misc_feature: Table A; Target 3823; HLA-B*51:01; ACTL8; ENSG00000117148; CTA
SVWLGASVV

SEQ ID NO: 3824 - protein, 9 aa, Homo sapiens
  misc_feature: Table A; Target 3824; HLA-B*54:01; ACTL8; ENSG00000117148; CTA
SVWLGASVV

SEQ ID NO: 3825 - protein, 9 aa, Homo sapiens
  misc_feature: Table A; Target 3825; HLA-B*55:01; ACTL8; ENSG00000117148; CTA
SVWLGASVV

SEQ ID NO: 3826 - protein, 9 aa, Homo sapiens
  misc_feature: Table A; Target 3826; HLA-B*56:01; ACTL8; ENSG00000117148; CTA
SVWLGASVV

SEQ ID NO: 3827 - protein, 9 aa, Homo sapiens
  misc_feature: Table A; Target 3827; HLA-C*06:02; ACTL8; ENSG00000117148; CTA
SVWLGASVV

SEQ ID NO: 3828 - protein, 10 aa, Homo sapiens
  misc_feature: Table A; Target 3828; HLA-B*54:01; ACTL8; ENSG00000117148; CTA
SVWLGASVVA

SEQ ID NO: 3829 - protein, 10 aa, Homo sapiens
  misc_feature: Table A; Target 3829; HLA-B*56:01; ACTL8; ENSG00000117148; CTA
SVWLGASVVA

SEQ ID NO: 3830 - protein, 9 aa, Homo sapiens
  misc_feature: Table A; Target 3830; HLA-B*35:01; ACTL8; ENSG00000117148; CTA
TAGWNEPQM

SEQ ID NO: 3831 - protein, 9 aa, Homo sapiens
  misc_feature: Table A; Target 3831; HLA-B*35:03; ACTL8; ENSG00000117148; CTA
TAGWNEPQM

SEQ ID NO: 3832 - protein, 9 aa, Homo sapiens
  misc_feature: Table A; Target 3832; HLA-B*55:01; ACTL8; ENSG00000117148; CTA
TAGWNEPQM

SEQ ID NO: 3833 - protein, 9 aa, Homo sapiens
  misc_feature: Table A; Target 3833; HLA-B*18:01; ACTL8; ENSG00000117148; CTA
TETPLREPA

SEQ ID NO: 3834 - protein, 9 aa, Homo sapiens
  misc_feature: Table A; Target 3834; HLA-A*01:01; ACTL8; ENSG00000117148; CTA
TGVVVDSGY

SEQ ID NO: 3835 - protein, 9 aa, Homo sapiens
  misc_feature: Table A; Target 3835; HLA-A*30:02; ACTL8; ENSG00000117148; CTA
TGVVVDSGY

SEQ ID NO: 3836 - protein, 9 aa, Homo sapiens
  misc_feature: Table A; Target 3836; HLA-B*15:01; ACTL8; ENSG00000117148; CTA
TGVVVDSGY

SEQ ID NO: 3837 - protein, 9 aa, Homo sapiens
  misc_feature: Table A; Target 3837; HLA-B*15:03; ACTL8; ENSG00000117148; CTA
TGVVVDSGY

SEQ ID NO: 3838 - protein, 9 aa, Homo sapiens
  misc_feature: Table A; Target 3838; HLA-B*35:01; ACTL8; ENSG00000117148; CTA
TGVVVDSGY

SEQ ID NO: 3839 - protein, 9 aa, Homo sapiens
  misc_feature: Table A; Target 3839; HLA-B*46:01; ACTL8; ENSG00000117148; CTA
TGVVVDSGY

SEQ ID NO: 3840 - protein, 9 aa, Homo sapiens
  misc_feature: Table A; Target 3840; HLA-C*04:01; ACTL8; ENSG00000117148; CTA
TGVVVDSGY

SEQ ID NO: 3841 - protein, 9 aa, Homo sapiens
  misc_feature: Table A; Target 3841; HLA-C*16:04; ACTL8; ENSG00000117148; CTA
TGVVVDSGY

SEQ ID NO: 3842 - protein, 9 aa, Homo sapiens
  misc_feature: Table A; Target 3842; HLA-B*39:01; ACTL8; ENSG00000117148; CTA
TLEFAGQDL

SEQ ID NO: 3843 - protein, 9 aa, Homo sapiens
  misc_feature: Table A; Target 3843; HLA-C*01:02; ACTL8; ENSG00000117148; CTA
TLEFAGQDL

SEQ ID NO: 3844 - protein, 8 aa, Homo sapiens
  misc_feature: Table A; Target 3844; HLA-A*03:01; ACTL8; ENSG00000117148; CTA
TLYPGFTK

SEQ ID NO: 3845 - protein, 8 aa, Homo sapiens
  misc_feature: Table A; Target 3845; HLA-A*03:02; ACTL8; ENSG00000117148; CTA
TLYPGFTK

SEQ ID NO: 3846 - protein, 8 aa, Homo sapiens
  misc_feature: Table A; Target 3846; HLA-A*11:01; ACTL8; ENSG00000117148; CTA
TLYPGFTK

SEQ ID NO: 3847 - protein, 8 aa, Homo sapiens
  misc_feature: Table A; Target 3847; HLA-B*27:05; ACTL8; ENSG00000117148; CTA
TLYPGFTK

SEQ ID NO: 3848 - protein, 8 aa, Homo sapiens
  misc_feature: Table A; Target 3848; HLA-C*06:02; ACTL8; ENSG00000117148; CTA
TLYPGFTK

SEQ ID NO: 3849 - protein, 9 aa, Homo sapiens
  misc_feature: Table A; Target 3849; HLA-A*03:01; ACTL8; ENSG00000117148; CTA
TLYPGFTKR

SEQ ID NO: 3850 - protein, 9 aa, Homo sapiens
  misc_feature: Table A; Target 3850; HLA-A*03:02; ACTL8; ENSG00000117148; CTA
TLYPGFTKR

SEQ ID NO: 3851 - protein, 9 aa, Homo sapiens
  misc_feature: Table A; Target 3851; HLA-A*11:01; ACTL8; ENSG00000117148; CTA
TLYPGFTKR

SEQ ID NO: 3852 - protein, 9 aa, Homo sapiens
  misc_feature: Table A; Target 3852; HLA-A*31:01; ACTL8; ENSG00000117148; CTA
TLYPGFTKR

SEQ ID NO: 3853 - protein, 9 aa, Homo sapiens
  misc_feature: Table A; Target 3853; HLA-A*33:01; ACTL8; ENSG00000117148; CTA
TLYPGFTKR

SEQ ID NO: 3854 - protein, 9 aa, Homo sapiens
  misc_feature: Table A; Target 3854; HLA-A*33:03; ACTL8; ENSG00000117148; CTA
TLYPGFTKR

SEQ ID NO: 3855 - protein, 9 aa, Homo sapiens
  misc_feature: Table A; Target 3855; HLA-A*68:01; ACTL8; ENSG00000117148; CTA
TLYPGFTKR

SEQ ID NO: 3856 - protein, 9 aa, Homo sapiens
  misc_feature: Table A; Target 3856; HLA-C*07:06; ACTL8; ENSG00000117148; CTA
TLYPGFTKR

SEQ ID NO: 3857 - protein, 10 aa, Homo sapiens
  misc_feature: Table A; Target 3857; HLA-A*02:03; ACTL8; ENSG00000117148; CTA
TLYPGFTKRL

SEQ ID NO: 3858 - protein, 10 aa, Homo sapiens
  misc_feature: Table A; Target 3858; HLA-A*02:04; ACTL8; ENSG00000117148; CTA
TLYPGFTKRL

SEQ ID NO: 3859 - protein, 10 aa, Homo sapiens
  misc_feature: Table A; Target 3859; HLA-A*03:01; ACTL8; ENSG00000117148; CTA
TLYPGFTKRL

SEQ ID NO: 3860 - protein, 8 aa, Homo sapiens
  misc_feature: Table A; Target 3860; HLA-B*08:01; ACTL8; ENSG00000117148; CTA
TPMQRVAP

SEQ ID NO: 3861 - protein, 8 aa, Homo sapiens
  misc_feature: Table A; Target 3861; HLA-B*56:01; ACTL8; ENSG00000117148; CTA
TPMQRVAP

SEQ ID NO: 3862 - protein, 10 aa, Homo sapiens
  misc_feature: Table A; Target 3862; HLA-B*07:02; ACTL8; ENSG00000117148; CTA
TPMQRVAPEM

SEQ ID NO: 3863 - protein, 10 aa, Homo sapiens
  misc_feature: Table A; Target 3863; HLA-B*35:01; ACTL8; ENSG00000117148; CTA
TPMQRVAPEM

SEQ ID NO: 3864 - protein, 10 aa, Homo sapiens
  misc_feature: Table A; Target 3864; HLA-B*35:03; ACTL8; ENSG00000117148; CTA
TPMQRVAPEM

SEQ ID NO: 3865 - protein, 10 aa, Homo sapiens
  misc_feature: Table A; Target 3865; HLA-B*55:01; ACTL8; ENSG00000117148; CTA
TPMQRVAPEM

SEQ ID NO: 3866 - protein, 10 aa, Homo sapiens
  misc_feature: Table A; Target 3866; HLA-C*07:02; ACTL8; ENSG00000117148; CTA
TPMQRVAPEM

SEQ ID NO: 3867 - protein, 9 aa, Homo sapiens
  misc_feature: Table A; Target 3867; HLA-A*03:02; ACTL8; ENSG00000117148; CTA
TVAVTQMNK

SEQ ID NO: 3868 - protein, 9 aa, Homo sapiens
  misc_feature: Table A; Target 3868; HLA-A*31:01; ACTL8; ENSG00000117148; CTA
TVAVTQMNK

SEQ ID NO: 3869 - protein, 9 aa, Homo sapiens
  misc_feature: Table A; Target 3869; HLA-A*33:03; ACTL8; ENSG00000117148; CTA
TVAVTQMNK

SEQ ID NO: 3870 - protein, 9 aa, Homo sapiens
  misc_feature: Table A; Target 3870; HLA-A*68:01; ACTL8; ENSG00000117148; CTA
TVAVTQMNK

SEQ ID NO: 3871 - protein, 9 aa, Homo sapiens
  misc_feature: Table A; Target 3871; HLA-C*06:02; ACTL8; ENSG00000117148; CTA
TVAVTQMNK

SEQ ID NO: 3872 - protein, 9 aa, Homo sapiens
  misc_feature: Table A; Target 3872; HLA-C*07:06; ACTL8; ENSG00000117148; CTA
TVAVTQMNK

SEQ ID NO: 3873 - protein, 10 aa, Homo sapiens
  misc_feature: Table A; Target 3873; HLA-A*25:01; ACTL8; ENSG00000117148; CTA
TVIIDHGSGF

SEQ ID NO: 3874 - protein, 10 aa, Homo sapiens
  misc_feature: Table A; Target 3874; HLA-A*26:01; ACTL8; ENSG00000117148; CTA
TVIIDHGSGF

SEQ ID NO: 3875 - protein, 10 aa, Homo sapiens
  misc_feature: Table A; Target 3875; HLA-A*32:01; ACTL8; ENSG00000117148; CTA
TVIIDHGSGF

SEQ ID NO: 3876 - protein, 10 aa, Homo sapiens
  misc_feature: Table A; Target 3876; HLA-B*15:01; ACTL8; ENSG00000117148; CTA
TVIIDHGSGF

SEQ ID NO: 3877 - protein, 10 aa, Homo sapiens
  misc_feature: Table A; Target 3877; HLA-B*35:01; ACTL8; ENSG00000117148; CTA
TVIIDHGSGF

SEQ ID NO: 3878 - protein, 8 aa, Homo sapiens
  misc_feature: Table A; Target 3878; HLA-A*31:01; ACTL8; ENSG00000117148; CTA
TVWEGSNR

SEQ ID NO: 3879 - protein, 8 aa, Homo sapiens
  misc_feature: Table A; Target 3879; HLA-A*33:03; ACTL8; ENSG00000117148; CTA
TVWEGSNR

SEQ ID NO: 3880 - protein, 8 aa, Homo sapiens
  misc_feature: Table A; Target 3880; HLA-C*07:06; ACTL8; ENSG00000117148; CTA
TVWEGSNR

SEQ ID NO: 3881 - protein, 10 aa, Homo sapiens
  misc_feature: Table A; Target 3881; HLA-A*25:01; ACTL8; ENSG00000117148; CTA
TVWEGSNRNF

SEQ ID NO: 3882 - protein, 10 aa, Homo sapiens
  misc_feature: Table A; Target 3882; HLA-A*30:02; ACTL8; ENSG00000117148; CTA
TVWEGSNRNF

SEQ ID NO: 3883 - protein, 10 aa, Homo sapiens
  misc_feature: Table A; Target 3883; HLA-B*57:01; ACTL8; ENSG00000117148; CTA
TVWEGSNRNF

SEQ ID NO: 3884 - protein, 10 aa, Homo sapiens
  misc_feature: Table A; Target 3884; HLA-B*58:01; ACTL8; ENSG00000117148; CTA
TVWEGSNRNF

SEQ ID NO: 3885 - protein, 9 aa, Homo sapiens
  misc_feature: Table A; Target 3885; HLA-A*33:01; ACTL8; ENSG00000117148; CTA
TYQLPDGSR

SEQ ID NO: 3886 - protein, 9 aa, Homo sapiens
  misc_feature: Table A; Target 3886; HLA-A*33:03; ACTL8; ENSG00000117148; CTA
TYQLPDGSR

SEQ ID NO: 3887 - protein, 9 aa, Homo sapiens
  misc_feature: Table A; Target 3887; HLA-A*31:01; ACTL8; ENSG00000117148; CTA
TYQSEWMSR

SEQ ID NO: 3888 - protein, 9 aa, Homo sapiens
  misc_feature: Table A; Target 3888; HLA-A*33:01; ACTL8; ENSG00000117148; CTA
TYQSEWMSR

SEQ ID NO: 3889 - protein, 9 aa, Homo sapiens
  misc_feature: Table A; Target 3889; HLA-A*33:03; ACTL8; ENSG00000117148; CTA
TYQSEWMSR

SEQ ID NO: 3890 - protein, 8 aa, Homo sapiens
  misc_feature: Table A; Target 3890; HLA-C*07:01; ACTL8; ENSG00000117148; CTA
VAHLSTYQ

SEQ ID NO: 3891 - protein, 11 aa, Homo sapiens
  misc_feature: Table A; Target 3891; HLA-B*57:01; ACTL8; ENSG00000117148; CTA
VAHLSTYQSEW

SEQ ID NO: 3892 - protein, 8 aa, Homo sapiens
  misc_feature: Table A; Target 3892; HLA-A*11:01; ACTL8; ENSG00000117148; CTA
VAVTQMNK

SEQ ID NO: 3893 - protein, 8 aa, Homo sapiens
  misc_feature: Table A; Target 3893; HLA-B*27:02; ACTL8; ENSG00000117148; CTA
VAVTQMNK

SEQ ID NO: 3894 - protein, 8 aa, Homo sapiens
  misc_feature: Table A; Target 3894; HLA-B*58:01; ACTL8; ENSG00000117148; CTA
VAVTQMNK

SEQ ID NO: 3895 - protein, 9 aa, Homo sapiens
  misc_feature: Table A; Target 3895; HLA-C*12:03; ACTL8; ENSG00000117148; CTA
VAVTQMNKC

SEQ ID NO: 3896 - protein, 10 aa, Homo sapiens
  misc_feature: Table A; Target 3896; HLA-B*58:01; ACTL8; ENSG00000117148; CTA
VAVTQMNKCY

SEQ ID NO: 3897 - protein, 10 aa, Homo sapiens
  misc_feature: Table A; Target 3897; HLA-C*12:03; ACTL8; ENSG00000117148; CTA
VAVTQMNKCY

SEQ ID NO: 3898 - protein, 10 aa, Homo sapiens
  misc_feature: Table A; Target 3898; HLA-C*16:02; ACTL8; ENSG00000117148; CTA
VAVTQMNKCY

SEQ ID NO: 3899 - protein, 9 aa, Homo sapiens
  misc_feature: Table A; Target 3899; HLA-A*68:01; ACTL8; ENSG00000117148; CTA
VDSGYGLTR

SEQ ID NO: 3900 - protein, 9 aa, Homo sapiens
  misc_feature: Table A; Target 3900; HLA-B*27:02; ACTL8; ENSG00000117148; CTA
VDSGYGLTR

SEQ ID NO: 3901 - protein, 9 aa, Homo sapiens
  misc_feature: Table A; Target 3901; HLA-A*30:01; ACTL8; ENSG00000117148; CTA
VELTPMQRV

SEQ ID NO: 3902 - protein, 9 aa, Homo sapiens
  misc_feature: Table A; Target 3902; HLA-B*44:02; ACTL8; ENSG00000117148; CTA
VELTPMQRV

SEQ ID NO: 3903 - protein, 9 aa, Homo sapiens
  misc_feature: Table A; Target 3903; HLA-B*44:03; ACTL8; ENSG00000117148; CTA
VELTPMQRV

SEQ ID NO: 3904 - protein, 9 aa, Homo sapiens
  misc_feature: Table A; Target 3904; HLA-B*49:01; ACTL8; ENSG00000117148; CTA
VELTPMQRV

SEQ ID NO: 3905 - protein, 9 aa, Homo sapiens
  misc_feature: Table A; Target 3905; HLA-A*30:01; ACTL8; ENSG00000117148; CTA
VESVESCEI

SEQ ID NO: 3906 - protein, 9 aa, Homo sapiens
  misc_feature: Table A; Target 3906; HLA-B*13:02; ACTL8; ENSG00000117148; CTA
VESVESCEI

SEQ ID NO: 3907 - protein, 9 aa, Homo sapiens
  misc_feature: Table A; Target 3907; HLA-B*39:01; ACTL8; ENSG00000117148; CTA
VESVESCEI

SEQ ID NO: 3908 - protein, 9 aa, Homo sapiens
  misc_feature: Table A; Target 3908; HLA-B*40:01; ACTL8; ENSG00000117148; CTA
VESVESCEI

SEQ ID NO: 3909 - protein, 9 aa, Homo sapiens
  misc_feature: Table A; Target 3909; HLA-B*49:01; ACTL8; ENSG00000117148; CTA
VESVESCEI

SEQ ID NO: 3910 - protein, 11 aa, Homo sapiens
  misc_feature: Table A; Target 3910; HLA-B*40:01; ACTL8; ENSG00000117148; CTA
VESVESCEISL

SEQ ID NO: 3911 - protein, 9 aa, Homo sapiens
  misc_feature: Table A; Target 3911; HLA-A*23:01; ACTL8; ENSG00000117148; CTA
VFEQPGPSI

SEQ ID NO: 3912 - protein, 9 aa, Homo sapiens
  misc_feature: Table A; Target 3912; HLA-A*24:02; ACTL8; ENSG00000117148; CTA
VFEQPGPSI

SEQ ID NO: 3913 - protein, 9 aa, Homo sapiens
  misc_feature: Table A; Target 3913; HLA-B*38:01; ACTL8; ENSG00000117148; CTA
VFEQPGPSI

SEQ ID NO: 3914 - protein, 9 aa, Homo sapiens
  misc_feature: Table A; Target 3914; HLA-C*01:02; ACTL8; ENSG00000117148; CTA
VFEQPGPSI

SEQ ID NO: 3915 - protein, 9 aa, Homo sapiens
  misc_feature: Table A; Target 3915; HLA-C*03:04; ACTL8; ENSG00000117148; CTA
VFEQPGPSI

SEQ ID NO: 3916 - protein, 9 aa, Homo sapiens
  misc_feature: Table A; Target 3916; HLA-C*04:01; ACTL8; ENSG00000117148; CTA
VFEQPGPSI

SEQ ID NO: 3917 - protein, 9 aa, Homo sapiens
  misc_feature: Table A; Target 3917; HLA-C*05:01; ACTL8; ENSG00000117148; CTA
VFEQPGPSI

SEQ ID NO: 3918 - protein, 9 aa, Homo sapiens
  misc_feature: Table A; Target 3918; HLA-C*14:02; ACTL8; ENSG00000117148; CTA
VFEQPGPSI

SEQ ID NO: 3919 - protein, 8 aa, Homo sapiens
  misc_feature: Table A; Target 3919; HLA-A*23:01; ACTL8; ENSG00000117148; CTA
VFPNIVNY

SEQ ID NO: 3920 - protein, 8 aa, Homo sapiens
  misc_feature: Table A; Target 3920; HLA-A*29:02; ACTL8; ENSG00000117148; CTA
VFPNIVNY

SEQ ID NO: 3921 - protein, 8 aa, Homo sapiens
  misc_feature: Table A; Target 3921; HLA-C*14:02; ACTL8; ENSG00000117148; CTA
VFPNIVNY

SEQ ID NO: 3922 - protein, 9 aa, Homo sapiens
  misc_feature: Table A; Target 3922; HLA-A*23:01; ACTL8; ENSG00000117148; CTA
VFPNIVNYL

SEQ ID NO: 3923 - protein, 9 aa, Homo sapiens
  misc_feature: Table A; Target 3923; HLA-A*24:02; ACTL8; ENSG00000117148; CTA
VFPNIVNYL

SEQ ID NO: 3924 - protein, 9 aa, Homo sapiens
  misc_feature: Table A; Target 3924; HLA-C*01:02; ACTL8; ENSG00000117148; CTA
VFPNIVNYL

SEQ ID NO: 3925 - protein, 9 aa, Homo sapiens
  misc_feature: Table A; Target 3925; HLA-C*14:02; ACTL8; ENSG00000117148; CTA
VFPNIVNYL

SEQ ID NO: 3926 - protein, 9 aa, Homo sapiens
  misc_feature: Table A; Target 3926; HLA-A*02:07; ACTL8; ENSG00000117148; CTA
VIIDHGSGF

SEQ ID NO: 3927 - protein, 9 aa, Homo sapiens
  misc_feature: Table A; Target 3927; HLA-A*23:01; ACTL8; ENSG00000117148; CTA
VIIDHGSGF

SEQ ID NO: 3928 - protein, 9 aa, Homo sapiens
  misc_feature: Table A; Target 3928; HLA-A*24:02; ACTL8; ENSG00000117148; CTA
VIIDHGSGF

SEQ ID NO: 3929 - protein, 9 aa, Homo sapiens
  misc_feature: Table A; Target 3929; HLA-A*25:01; ACTL8; ENSG00000117148; CTA
VIIDHGSGF

SEQ ID NO: 3930 - protein, 9 aa, Homo sapiens
  misc_feature: Table A; Target 3930; HLA-A*26:01; ACTL8; ENSG00000117148; CTA
VIIDHGSGF

SEQ ID NO: 3931 - protein, 9 aa, Homo sapiens
  misc_feature: Table A; Target 3931; HLA-A*29:02; ACTL8; ENSG00000117148; CTA
VIIDHGSGF

SEQ ID NO: 3932 - protein, 9 aa, Homo sapiens
  misc_feature: Table A; Target 3932; HLA-A*30:02; ACTL8; ENSG00000117148; CTA
VIIDHGSGF

SEQ ID NO: 3933 - protein, 9 aa, Homo sapiens
  misc_feature: Table A; Target 3933; HLA-A*32:01; ACTL8; ENSG00000117148; CTA
VIIDHGSGF

SEQ ID NO: 3934 - protein, 9 aa, Homo sapiens
  misc_feature: Table A; Target 3934; HLA-B*07:02; ACTL8; ENSG00000117148; CTA
VIIDHGSGF

SEQ ID NO: 3935 - protein, 9 aa, Homo sapiens
  misc_feature: Table A; Target 3935; HLA-B*15:03; ACTL8; ENSG00000117148; CTA
VIIDHGSGF

SEQ ID NO: 3936 - protein, 9 aa, Homo sapiens
  misc_feature: Table A; Target 3936; HLA-B*37:01; ACTL8; ENSG00000117148; CTA
VIIDHGSGF

SEQ ID NO: 3937 - protein, 9 aa, Homo sapiens
  misc_feature: Table A; Target 3937; HLA-B*44:02; ACTL8; ENSG00000117148; CTA
VIIDHGSGF

SEQ ID NO: 3938 - protein, 9 aa, Homo sapiens
  misc_feature: Table A; Target 3938; HLA-B*44:03; ACTL8; ENSG00000117148; CTA
VIIDHGSGF

SEQ ID NO: 3939 - protein, 9 aa, Homo sapiens
  misc_feature: Table A; Target 3939; HLA-B*46:01; ACTL8; ENSG00000117148; CTA
VIIDHGSGF

SEQ ID NO: 3940 - protein, 9 aa, Homo sapiens
  misc_feature: Table A; Target 3940; HLA-B*58:01; ACTL8; ENSG00000117148; CTA
VIIDHGSGF

SEQ ID NO: 3941 - protein, 9 aa, Homo sapiens
  misc_feature: Table A; Target 3941; HLA-C*01:02; ACTL8; ENSG00000117148; CTA
VIIDHGSGF

SEQ ID NO: 3942 - protein, 9 aa, Homo sapiens
  misc_feature: Table A; Target 3942; HLA-C*02:02; ACTL8; ENSG00000117148; CTA
VIIDHGSGF

SEQ ID NO: 3943 - protein, 9 aa, Homo sapiens
  misc_feature: Table A; Target 3943; HLA-C*03:03; ACTL8; ENSG00000117148; CTA
VIIDHGSGF

SEQ ID NO: 3944 - protein, 9 aa, Homo sapiens
  misc_feature: Table A; Target 3944; HLA-C*03:04; ACTL8; ENSG00000117148; CTA
VIIDHGSGF

SEQ ID NO: 3945 - protein, 9 aa, Homo sapiens
  misc_feature: Table A; Target 3945; HLA-C*05:01; ACTL8; ENSG00000117148; CTA
VIIDHGSGF

SEQ ID NO: 3946 - protein, 9 aa, Homo sapiens
  misc_feature: Table A; Target 3946; HLA-C*07:04; ACTL8; ENSG00000117148; CTA
VIIDHGSGF

SEQ ID NO: 3947 - protein, 9 aa, Homo sapiens
  misc_feature: Table A; Target 3947; HLA-C*12:03; ACTL8; ENSG00000117148; CTA
VIIDHGSGF

SEQ ID NO: 3948 - protein, 9 aa, Homo sapiens
  misc_feature: Table A; Target 3948; HLA-C*14:02; ACTL8; ENSG00000117148; CTA
VIIDHGSGF

SEQ ID NO: 3949 - protein, 9 aa, Homo sapiens
  misc_feature: Table A; Target 3949; HLA-C*16:01; ACTL8; ENSG00000117148; CTA
VIIDHGSGF

SEQ ID NO: 3950 - protein, 9 aa, Homo sapiens
  misc_feature: Table A; Target 3950; HLA-C*16:04; ACTL8; ENSG00000117148; CTA
VIIDHGSGF

SEQ ID NO: 3951 - protein, 10 aa, Homo sapiens
  misc_feature: Table A; Target 3951; HLA-A*02:03; ACTL8; ENSG00000117148; CTA
VIIDHGSGFL

SEQ ID NO: 3952 - protein, 10 aa, Homo sapiens
  misc_feature: Table A; Target 3952; HLA-A*03:01; ACTL8; ENSG00000117148; CTA
VIIDHGSGFL

SEQ ID NO: 3953 - protein, 11 aa, Homo sapiens
  misc_feature: Table A; Target 3953; HLA-A*03:02; ACTL8; ENSG00000117148; CTA
VIIDHGSGFLK

SEQ ID NO: 3954 - protein, 11 aa, Homo sapiens
  misc_feature: Table A; Target 3954; HLA-A*31:01; ACTL8; ENSG00000117148; CTA
VIIDHGSGFLK

SEQ ID NO: 3955 - protein, 9 aa, Homo sapiens
  misc_feature: Table A; Target 3955; HLA-A*11:01; ACTL8; ENSG00000117148; CTA
VIITETPLR

SEQ ID NO: 3956 - protein, 9 aa, Homo sapiens
  misc_feature: Table A; Target 3956; HLA-A*02:01; ACTL8; ENSG00000117148; CTA
VLLADQLQM

SEQ ID NO: 3957 - protein, 9 aa, Homo sapiens
  misc_feature: Table A; Target 3957; HLA-A*23:01; ACTL8; ENSG00000117148; CTA
VLLADQLQM

SEQ ID NO: 3958 - protein, 9 aa, Homo sapiens
  misc_feature: Table A; Target 3958; HLA-B*13:02; ACTL8; ENSG00000117148; CTA
VLLADQLQM

SEQ ID NO: 3959 - protein, 11 aa, Homo sapiens
  misc_feature: Table A; Target 3959; HLA-A*02:01; ACTL8; ENSG00000117148; CTA
VLLADQLQMSL

SEQ ID NO: 3960 - protein, 9 aa, Homo sapiens
  misc_feature: Table A; Target 3960; HLA-C*01:02; ACTL8; ENSG00000117148; CTA
VMACGGNTL

SEQ ID NO: 3961 - protein, 9 aa, Homo sapiens
  misc_feature: Table A; Target 3961; HLA-C*14:02; ACTL8; ENSG00000117148; CTA
VMACGGNTL

SEQ ID NO: 3962 - protein, 10 aa, Homo sapiens
  misc_feature: Table A; Target 3962; HLA-A*01:01; ACTL8; ENSG00000117148; CTA
VMACGGNTLY

SEQ ID NO: 3963 - protein, 10 aa, Homo sapiens
  misc_feature: Table A; Target 3963; HLA-A*29:02; ACTL8; ENSG00000117148; CTA
VMACGGNTLY

SEQ ID NO: 3964 - protein, 10 aa, Homo sapiens
  misc_feature: Table A; Target 3964; HLA-A*30:02; ACTL8; ENSG00000117148; CTA
VMACGGNTLY

SEQ ID NO: 3965 - protein, 10 aa, Homo sapiens
  misc_feature: Table A; Target 3965; HLA-B*15:01; ACTL8; ENSG00000117148; CTA
VMACGGNTLY

SEQ ID NO: 3966 - protein, 10 aa, Homo sapiens
  misc_feature: Table A; Target 3966; HLA-B*46:01; ACTL8; ENSG00000117148; CTA
VMACGGNTLY

SEQ ID NO: 3967 - protein, 10 aa, Homo sapiens
  misc_feature: Table A; Target 3967; HLA-C*07:01; ACTL8; ENSG00000117148; CTA
VMACGGNTLY

SEQ ID NO: 3968 - protein, 10 aa, Homo sapiens
  misc_feature: Table A; Target 3968; HLA-C*07:04; ACTL8; ENSG00000117148; CTA
VMACGGNTLY

SEQ ID NO: 3969 - protein, 9 aa, Homo sapiens
  misc_feature: Table A; Target 3969; HLA-B*51:01; ACTL8; ENSG00000117148; CTA
VPPVIITET

SEQ ID NO: 3970 - protein, 9 aa, Homo sapiens
  misc_feature: Table A; Target 3970; HLA-B*56:01; ACTL8; ENSG00000117148; CTA
VPPVIITET

SEQ ID NO: 3971 - protein, 8 aa, Homo sapiens
  misc_feature: Table A; Target 3971; HLA-B*56:01; ACTL8; ENSG00000117148; CTA
VPQNLGEA

SEQ ID NO: 3972 - protein, 9 aa, Homo sapiens
  misc_feature: Table A; Target 3972; HLA-B*07:02; ACTL8; ENSG00000117148; CTA
VPQNLGEAL

SEQ ID NO: 3973 - protein, 9 aa, Homo sapiens
  misc_feature: Table A; Target 3973; HLA-B*35:01; ACTL8; ENSG00000117148; CTA
VPQNLGEAL

SEQ ID NO: 3974 - protein, 9 aa, Homo sapiens
  misc_feature: Table A; Target 3974; HLA-B*35:03; ACTL8; ENSG00000117148; CTA
VPQNLGEAL

SEQ ID NO: 3975 - protein, 9 aa, Homo sapiens
  misc_feature: Table A; Target 3975; HLA-B*39:01; ACTL8; ENSG00000117148; CTA
VPQNLGEAL

SEQ ID NO: 3976 - protein, 9 aa, Homo sapiens
  misc_feature: Table A; Target 3976; HLA-B*56:01; ACTL8; ENSG00000117148; CTA
VPQNLGEAL

SEQ ID NO: 3977 - protein, 9 aa, Homo sapiens
  misc_feature: Table A; Target 3977; HLA-C*01:02; ACTL8; ENSG00000117148; CTA
VPQNLGEAL

SEQ ID NO: 3978 - protein, 9 aa, Homo sapiens
  misc_feature: Table A; Target 3978; HLA-C*03:03; ACTL8; ENSG00000117148; CTA
VPQNLGEAL

SEQ ID NO: 3979 - protein, 9 aa, Homo sapiens
  misc_feature: Table A; Target 3979; HLA-C*07:02; ACTL8; ENSG00000117148; CTA
VPQNLGEAL

SEQ ID NO: 3980 - protein, 9 aa, Homo sapiens
  misc_feature: Table A; Target 3980; HLA-C*14:02; ACTL8; ENSG00000117148; CTA
VPQNLGEAL

SEQ ID NO: 3981 - protein, 11 aa, Homo sapiens
  misc_feature: Table A; Target 3981; HLA-B*27:02; ACTL8; ENSG00000117148; CTA
VPQNLGEALDF

SEQ ID NO: 3982 - protein, 11 aa, Homo sapiens
  misc_feature: Table A; Target 3982; HLA-B*35:01; ACTL8; ENSG00000117148; CTA
VPQNLGEALDF

SEQ ID NO: 3983 - protein, 10 aa, Homo sapiens
  misc_feature: Table A; Target 3983; HLA-B*35:03; ACTL8; ENSG00000117148; CTA
VPSVLLADQL

SEQ ID NO: 3984 - protein, 10 aa, Homo sapiens
  misc_feature: Table A; Target 3984; HLA-A*03:01; ACTL8; ENSG00000117148; CTA
VQPFHQGRPL

SEQ ID NO: 3985 - protein, 8 aa, Homo sapiens
  misc_feature: Table A; Target 3985; HLA-C*16:01; ACTL8; ENSG00000117148; CTA
VSSTKATV

SEQ ID NO: 3986 - protein, 9 aa, Homo sapiens
  misc_feature: Table A; Target 3986; HLA-A*25:01; ACTL8; ENSG00000117148; CTA
VSSTKATVW

SEQ ID NO: 3987 - protein, 9 aa, Homo sapiens
  misc_feature: Table A; Target 3987; HLA-A*32:01; ACTL8; ENSG00000117148; CTA
VSSTKATVW

SEQ ID NO: 3988 - protein, 9 aa, Homo sapiens
  misc_feature: Table A; Target 3988; HLA-B*57:01; ACTL8; ENSG00000117148; CTA
VSSTKATVW

SEQ ID NO: 3989 - protein, 9 aa, Homo sapiens
  misc_feature: Table A; Target 3989; HLA-C*12:03; ACTL8; ENSG00000117148; CTA
VSSTKATVW

SEQ ID NO: 3990 - protein, 9 aa, Homo sapiens
  misc_feature: Table A; Target 3990; HLA-C*16:01; ACTL8; ENSG00000117148; CTA
VSSTKATVW

SEQ ID NO: 3991 - protein, 9 aa, Homo sapiens
  misc_feature: Table A; Target 3991; HLA-C*16:02; ACTL8; ENSG00000117148; CTA
VSSTKATVW

SEQ ID NO: 3992 - protein, 9 aa, Homo sapiens
  misc_feature: Table A; Target 3992; HLA-C*16:04; ACTL8; ENSG00000117148; CTA
VSSTKATVW

SEQ ID NO: 3993 - protein, 8 aa, Homo sapiens
  misc_feature: Table A; Target 3993; HLA-A*25:01; ACTL8; ENSG00000117148; CTA
VVAHLSTY

SEQ ID NO: 3994 - protein, 8 aa, Homo sapiens
  misc_feature: Table A; Target 3994; HLA-A*30:02; ACTL8; ENSG00000117148; CTA
VVAHLSTY

SEQ ID NO: 3995 - protein, 8 aa, Homo sapiens
  misc_feature: Table A; Target 3995; HLA-A*32:01; ACTL8; ENSG00000117148; CTA
VVAHLSTY

SEQ ID NO: 3996 - protein, 8 aa, Homo sapiens
  misc_feature: Table A; Target 3996; HLA-B*15:01; ACTL8; ENSG00000117148; CTA
VVAHLSTY

SEQ ID NO: 3997 - protein, 8 aa, Homo sapiens
  misc_feature: Table A; Target 3997; HLA-B*15:03; ACTL8; ENSG00000117148; CTA
VVAHLSTY

SEQ ID NO: 3998 - protein, 8 aa, Homo sapiens
  misc_feature: Table A; Target 3998; HLA-B*39:01; ACTL8; ENSG00000117148; CTA
VVAHLSTY

SEQ ID NO: 3999 - protein, 8 aa, Homo sapiens
  misc_feature: Table A; Target 3999; HLA-B*46:01; ACTL8; ENSG00000117148; CTA
VVAHLSTY

SEQ ID NO: 4000 - protein, 8 aa, Homo sapiens
  misc_feature: Table A; Target 4000; HLA-B*58:01; ACTL8; ENSG00000117148; CTA
VVAHLSTY

SEQ ID NO: 4001 - protein, 8 aa, Homo sapiens
  misc_feature: Table A; Target 4001; HLA-C*01:02; ACTL8; ENSG00000117148; CTA
VVAHLSTY

SEQ ID NO: 4002 - protein, 8 aa, Homo sapiens
  misc_feature: Table A; Target 4002; HLA-C*02:02; ACTL8; ENSG00000117148; CTA
VVAHLSTY

SEQ ID NO: 4003 - protein, 8 aa, Homo sapiens
  misc_feature: Table A; Target 4003; HLA-C*07:01; ACTL8; ENSG00000117148; CTA
VVAHLSTY

SEQ ID NO: 4004 - protein, 8 aa, Homo sapiens
  misc_feature: Table A; Target 4004; HLA-C*07:04; ACTL8; ENSG00000117148; CTA
VVAHLSTY

SEQ ID NO: 4005 - protein, 8 aa, Homo sapiens
  misc_feature: Table A; Target 4005; HLA-C*12:03; ACTL8; ENSG00000117148; CTA
VVAHLSTY

SEQ ID NO: 4006 - protein, 8 aa, Homo sapiens
  misc_feature: Table A; Target 4006; HLA-C*14:02; ACTL8; ENSG00000117148; CTA
VVAHLSTY

SEQ ID NO: 4007 - protein, 8 aa, Homo sapiens
  misc_feature: Table A; Target 4007; HLA-C*16:01; ACTL8; ENSG00000117148; CTA
VVAHLSTY

SEQ ID NO: 4008 - protein, 8 aa, Homo sapiens
  misc_feature: Table A; Target 4008; HLA-C*16:02; ACTL8; ENSG00000117148; CTA
VVAHLSTY

SEQ ID NO: 4009 - protein, 8 aa, Homo sapiens
  misc_feature: Table A; Target 4009; HLA-A*02:07; ACTL8; ENSG00000117148; CTA
VVDSGYGL

SEQ ID NO: 4010 - protein, 8 aa, Homo sapiens
  misc_feature: Table A; Target 4010; HLA-B*38:01; ACTL8; ENSG00000117148; CTA
VVDSGYGL

SEQ ID NO: 4011 - protein, 8 aa, Homo sapiens
  misc_feature: Table A; Target 4011; HLA-B*39:01; ACTL8; ENSG00000117148; CTA
VVDSGYGL

SEQ ID NO: 4012 - protein, 8 aa, Homo sapiens
  misc_feature: Table A; Target 4012; HLA-C*01:02; ACTL8; ENSG00000117148; CTA
VVDSGYGL

SEQ ID NO: 4013 - protein, 8 aa, Homo sapiens
  misc_feature: Table A; Target 4013; HLA-C*03:04; ACTL8; ENSG00000117148; CTA
VVDSGYGL

SEQ ID NO: 4014 - protein, 8 aa, Homo sapiens
  misc_feature: Table A; Target 4014; HLA-C*04:01; ACTL8; ENSG00000117148; CTA
VVDSGYGL

SEQ ID NO: 4015 - protein, 8 aa, Homo sapiens
  misc_feature: Table A; Target 4015; HLA-C*05:01; ACTL8; ENSG00000117148; CTA
VVDSGYGL

SEQ ID NO: 4016 - protein, 8 aa, Homo sapiens
  misc_feature: Table A; Target 4016; HLA-C*07:04; ACTL8; ENSG00000117148; CTA
VVDSGYGL

SEQ ID NO: 4017 - protein, 9 aa, Homo sapiens
  misc_feature: Table A; Target 4017; HLA-A*01:01; ACTL8; ENSG00000117148; CTA
VVDSGYGLT

SEQ ID NO: 4018 - protein, 9 aa, Homo sapiens
  misc_feature: Table A; Target 4018; HLA-C*05:01; ACTL8; ENSG00000117148; CTA
VVDSGYGLT

SEQ ID NO: 4019 - protein, 10 aa, Homo sapiens
  misc_feature: Table A; Target 4019; HLA-A*01:01; ACTL8; ENSG00000117148; CTA
VVDSGYGLTR

SEQ ID NO: 4020 - protein, 10 aa, Homo sapiens
  misc_feature: Table A; Target 4020; HLA-A*03:01; ACTL8; ENSG00000117148; CTA
VVDSGYGLTR

SEQ ID NO: 4021 - protein, 10 aa, Homo sapiens
  misc_feature: Table A; Target 4021; HLA-A*03:02; ACTL8; ENSG00000117148; CTA
VVDSGYGLTR

SEQ ID NO: 4022 - protein, 10 aa, Homo sapiens
  misc_feature: Table A; Target 4022; HLA-A*11:01; ACTL8; ENSG00000117148; CTA
VVDSGYGLTR

SEQ ID NO: 4023 - protein, 10 aa, Homo sapiens
  misc_feature: Table A; Target 4023; HLA-A*68:01; ACTL8; ENSG00000117148; CTA
VVDSGYGLTR

SEQ ID NO: 4024 - protein, 10 aa, Homo sapiens
  misc_feature: Table A; Target 4024; HLA-C*07:06; ACTL8; ENSG00000117148; CTA
VVDSGYGLTR

SEQ ID NO: 4025 - protein, 11 aa, Homo sapiens
  misc_feature: Table A; Target 4025; HLA-A*01:01; ACTL8; ENSG00000117148; CTA
VVDSGYGLTRV

SEQ ID NO: 4026 - protein, 11 aa, Homo sapiens
  misc_feature: Table A; Target 4026; HLA-A*02:01; ACTL8; ENSG00000117148; CTA
VVDSGYGLTRV

SEQ ID NO: 4027 - protein, 11 aa, Homo sapiens
  misc_feature: Table A; Target 4027; HLA-A*02:07; ACTL8; ENSG00000117148; CTA
VVDSGYGLTRV

SEQ ID NO: 4028 - protein, 11 aa, Homo sapiens
  misc_feature: Table A; Target 4028; HLA-C*05:01; ACTL8; ENSG00000117148; CTA
VVDSGYGLTRV

SEQ ID NO: 4029 - protein, 8 aa, Homo sapiens
  misc_feature: Table A; Target 4029; HLA-B*39:01; ACTL8; ENSG00000117148; CTA
VVVDSGYG

SEQ ID NO: 4030 - protein, 9 aa, Homo sapiens
  misc_feature: Table A; Target 4030; HLA-A*02:01; ACTL8; ENSG00000117148; CTA
VVVDSGYGL

SEQ ID NO: 4031 - protein, 9 aa, Homo sapiens
  misc_feature: Table A; Target 4031; HLA-A*02:04; ACTL8; ENSG00000117148; CTA
VVVDSGYGL

SEQ ID NO: 4032 - protein, 9 aa, Homo sapiens
  misc_feature: Table A; Target 4032; HLA-A*02:07; ACTL8; ENSG00000117148; CTA
VVVDSGYGL

SEQ ID NO: 4033 - protein, 9 aa, Homo sapiens
  misc_feature: Table A; Target 4033; HLA-A*23:01; ACTL8; ENSG00000117148; CTA
VVVDSGYGL

SEQ ID NO: 4034 - protein, 9 aa, Homo sapiens
  misc_feature: Table A; Target 4034; HLA-A*25:01; ACTL8; ENSG00000117148; CTA
VVVDSGYGL

SEQ ID NO: 4035 - protein, 9 aa, Homo sapiens
  misc_feature: Table A; Target 4035; HLA-A*26:01; ACTL8; ENSG00000117148; CTA
VVVDSGYGL

SEQ ID NO: 4036 - protein, 9 aa, Homo sapiens
  misc_feature: Table A; Target 4036; HLA-A*30:01; ACTL8; ENSG00000117148; CTA
VVVDSGYGL

SEQ ID NO: 4037 - protein, 9 aa, Homo sapiens
  misc_feature: Table A; Target 4037; HLA-A*32:01; ACTL8; ENSG00000117148; CTA
VVVDSGYGL

SEQ ID NO: 4038 - protein, 9 aa, Homo sapiens
  misc_feature: Table A; Target 4038; HLA-A*68:02; ACTL8; ENSG00000117148; CTA
VVVDSGYGL

SEQ ID NO: 4039 - protein, 9 aa, Homo sapiens
  misc_feature: Table A; Target 4039; HLA-B*13:02; ACTL8; ENSG00000117148; CTA
VVVDSGYGL

SEQ ID NO: 4040 - protein, 9 aa, Homo sapiens
  misc_feature: Table A; Target 4040; HLA-B*15:01; ACTL8; ENSG00000117148; CTA
VVVDSGYGL

SEQ ID NO: 4041 - protein, 9 aa, Homo sapiens
  misc_feature: Table A; Target 4041; HLA-B*15:03; ACTL8; ENSG00000117148; CTA
VVVDSGYGL

SEQ ID NO: 4042 - protein, 9 aa, Homo sapiens
  misc_feature: Table A; Target 4042; HLA-B*27:05; ACTL8; ENSG00000117148; CTA
VVVDSGYGL

SEQ ID NO: 4043 - protein, 9 aa, Homo sapiens
  misc_feature: Table A; Target 4043; HLA-B*35:03; ACTL8; ENSG00000117148; CTA
VVVDSGYGL

SEQ ID NO: 4044 - protein, 9 aa, Homo sapiens
  misc_feature: Table A; Target 4044; HLA-B*38:01; ACTL8; ENSG00000117148; CTA
VVVDSGYGL

SEQ ID NO: 4045 - protein, 9 aa, Homo sapiens
  misc_feature: Table A; Target 4045; HLA-B*39:01; ACTL8; ENSG00000117148; CTA
VVVDSGYGL

SEQ ID NO: 4046 - protein, 9 aa, Homo sapiens
  misc_feature: Table A; Target 4046; HLA-B*40:01; ACTL8; ENSG00000117148; CTA
VVVDSGYGL

SEQ ID NO: 4047 - protein, 9 aa, Homo sapiens
  misc_feature: Table A; Target 4047; HLA-B*46:01; ACTL8; ENSG00000117148; CTA
VVVDSGYGL

SEQ ID NO: 4048 - protein, 9 aa, Homo sapiens
  misc_feature: Table A; Target 4048; HLA-B*55:01; ACTL8; ENSG00000117148; CTA
VVVDSGYGL

SEQ ID NO: 4049 - protein, 9 aa, Homo sapiens
  misc_feature: Table A; Target 4049; HLA-B*58:01; ACTL8; ENSG00000117148; CTA
VVVDSGYGL

SEQ ID NO: 4050 - protein, 9 aa, Homo sapiens
  misc_feature: Table A; Target 4050; HLA-C*01:02; ACTL8; ENSG00000117148; CTA
VVVDSGYGL

SEQ ID NO: 4051 - protein, 9 aa, Homo sapiens
  misc_feature: Table A; Target 4051; HLA-C*02:02; ACTL8; ENSG00000117148; CTA
VVVDSGYGL

SEQ ID NO: 4052 - protein, 9 aa, Homo sapiens
  misc_feature: Table A; Target 4052; HLA-C*03:03; ACTL8; ENSG00000117148; CTA
VVVDSGYGL

SEQ ID NO: 4053 - protein, 9 aa, Homo sapiens
  misc_feature: Table A; Target 4053; HLA-C*03:04; ACTL8; ENSG00000117148; CTA
VVVDSGYGL

SEQ ID NO: 4054 - protein, 9 aa, Homo sapiens
  misc_feature: Table A; Target 4054; HLA-C*05:01; ACTL8; ENSG00000117148; CTA
VVVDSGYGL

SEQ ID NO: 4055 - protein, 9 aa, Homo sapiens
  misc_feature: Table A; Target 4055; HLA-C*07:04; ACTL8; ENSG00000117148; CTA
VVVDSGYGL

SEQ ID NO: 4056 - protein, 9 aa, Homo sapiens
  misc_feature: Table A; Target 4056; HLA-C*14:02; ACTL8; ENSG00000117148; CTA
VVVDSGYGL

SEQ ID NO: 4057 - protein, 9 aa, Homo sapiens
  misc_feature: Table A; Target 4057; HLA-C*16:04; ACTL8; ENSG00000117148; CTA
VVVDSGYGL

SEQ ID NO: 4058 - protein, 11 aa, Homo sapiens
  misc_feature: Table A; Target 4058; HLA-A*03:01; ACTL8; ENSG00000117148; CTA
VVVDSGYGLTR

SEQ ID NO: 4059 - protein, 11 aa, Homo sapiens
  misc_feature: Table A; Target 4059; HLA-A*03:02; ACTL8; ENSG00000117148; CTA
VVVDSGYGLTR

SEQ ID NO: 4060 - protein, 11 aa, Homo sapiens
  misc_feature: Table A; Target 4060; HLA-A*11:01; ACTL8; ENSG00000117148; CTA
VVVDSGYGLTR

SEQ ID NO: 4061 - protein, 11 aa, Homo sapiens
  misc_feature: Table A; Target 4061; HLA-A*31:01; ACTL8; ENSG00000117148; CTA
VVVDSGYGLTR

SEQ ID NO: 4062 - protein, 11 aa, Homo sapiens
  misc_feature: Table A; Target 4062; HLA-A*33:01; ACTL8; ENSG00000117148; CTA
VVVDSGYGLTR

SEQ ID NO: 4063 - protein, 11 aa, Homo sapiens
  misc_feature: Table A; Target 4063; HLA-A*33:03; ACTL8; ENSG00000117148; CTA
VVVDSGYGLTR

SEQ ID NO: 4064 - protein, 11 aa, Homo sapiens
  misc_feature: Table A; Target 4064; HLA-A*68:01; ACTL8; ENSG00000117148; CTA
VVVDSGYGLTR

SEQ ID NO: 4065 - protein, 11 aa, Homo sapiens
  misc_feature: Table A; Target 4065; HLA-B*27:02; ACTL8; ENSG00000117148; CTA
VVVDSGYGLTR

SEQ ID NO: 4066 - protein, 11 aa, Homo sapiens
  misc_feature: Table A; Target 4066; HLA-C*07:06; ACTL8; ENSG00000117148; CTA
VVVDSGYGLTR

SEQ ID NO: 4067 - protein, 11 aa, Homo sapiens
  misc_feature: Table A; Target 4067; HLA-A*23:01; ACTL8; ENSG00000117148; CTA
VWLGASVVAHL

SEQ ID NO: 4068 - protein, 8 aa, Homo sapiens
  misc_feature: Table A; Target 4068; HLA-B*08:01; ACTL8; ENSG00000117148; CTA
YARRRVSL

SEQ ID NO: 4069 - protein, 9 aa, Homo sapiens
  misc_feature: Table A; Target 4069; HLA-A*02:01; ACTL8; ENSG00000117148; CTA
YASGLLTGV

SEQ ID NO: 4070 - protein, 9 aa, Homo sapiens
  misc_feature: Table A; Target 4070; HLA-A*02:03; ACTL8; ENSG00000117148; CTA
YASGLLTGV

SEQ ID NO: 4071 - protein, 9 aa, Homo sapiens
  misc_feature: Table A; Target 4071; HLA-A*02:04; ACTL8; ENSG00000117148; CTA
YASGLLTGV

SEQ ID NO: 4072 - protein, 9 aa, Homo sapiens
  misc_feature: Table A; Target 4072; HLA-A*02:07; ACTL8; ENSG00000117148; CTA
YASGLLTGV

SEQ ID NO: 4073 - protein, 9 aa, Homo sapiens
  misc_feature: Table A; Target 4073; HLA-A*26:01; ACTL8; ENSG00000117148; CTA
YASGLLTGV

SEQ ID NO: 4074 - protein, 9 aa, Homo sapiens
  misc_feature: Table A; Target 4074; HLA-A*30:01; ACTL8; ENSG00000117148; CTA
YASGLLTGV

SEQ ID NO: 4075 - protein, 9 aa, Homo sapiens
  misc_feature: Table A; Target 4075; HLA-A*32:01; ACTL8; ENSG00000117148; CTA
YASGLLTGV

SEQ ID NO: 4076 - protein, 9 aa, Homo sapiens
  misc_feature: Table A; Target 4076; HLA-A*68:02; ACTL8; ENSG00000117148; CTA
YASGLLTGV

SEQ ID NO: 4077 - protein, 9 aa, Homo sapiens
  misc_feature: Table A; Target 4077; HLA-B*13:02; ACTL8; ENSG00000117148; CTA
YASGLLTGV

SEQ ID NO: 4078 - protein, 9 aa, Homo sapiens
  misc_feature: Table A; Target 4078; HLA-B*27:05; ACTL8; ENSG00000117148; CTA
YASGLLTGV

SEQ ID NO: 4079 - protein, 9 aa, Homo sapiens
  misc_feature: Table A; Target 4079; HLA-B*39:01; ACTL8; ENSG00000117148; CTA
YASGLLTGV

SEQ ID NO: 4080 - protein, 9 aa, Homo sapiens
  misc_feature: Table A; Target 4080; HLA-B*40:02; ACTL8; ENSG00000117148; CTA
YASGLLTGV

SEQ ID NO: 4081 - protein, 9 aa, Homo sapiens
  misc_feature: Table A; Target 4081; HLA-B*46:01; ACTL8; ENSG00000117148; CTA
YASGLLTGV

SEQ ID NO: 4082 - protein, 9 aa, Homo sapiens
  misc_feature: Table A; Target 4082; HLA-B*49:01; ACTL8; ENSG00000117148; CTA
YASGLLTGV

SEQ ID NO: 4083 - protein, 9 aa, Homo sapiens
  misc_feature: Table A; Target 4083; HLA-B*51:01; ACTL8; ENSG00000117148; CTA
YASGLLTGV

SEQ ID NO: 4084 - protein, 9 aa, Homo sapiens
  misc_feature: Table A; Target 4084; HLA-B*54:01; ACTL8; ENSG00000117148; CTA
YASGLLTGV

SEQ ID NO: 4085 - protein, 9 aa, Homo sapiens
  misc_feature: Table A; Target 4085; HLA-B*55:01; ACTL8; ENSG00000117148; CTA
YASGLLTGV

SEQ ID NO: 4086 - protein, 9 aa, Homo sapiens
  misc_feature: Table A; Target 4086; HLA-B*56:01; ACTL8; ENSG00000117148; CTA
YASGLLTGV

SEQ ID NO: 4087 - protein, 9 aa, Homo sapiens
  misc_feature: Table A; Target 4087; HLA-C*01:02; ACTL8; ENSG00000117148; CTA
YASGLLTGV

SEQ ID NO: 4088 - protein, 9 aa, Homo sapiens
  misc_feature: Table A; Target 4088; HLA-C*02:02; ACTL8; ENSG00000117148; CTA
YASGLLTGV

SEQ ID NO: 4089 - protein, 9 aa, Homo sapiens
  misc_feature: Table A; Target 4089; HLA-C*03:03; ACTL8; ENSG00000117148; CTA
YASGLLTGV

SEQ ID NO: 4090 - protein, 9 aa, Homo sapiens
  misc_feature: Table A; Target 4090; HLA-C*03:04; ACTL8; ENSG00000117148; CTA
YASGLLTGV

SEQ ID NO: 4091 - protein, 9 aa, Homo sapiens
  misc_feature: Table A; Target 4091; HLA-C*04:01; ACTL8; ENSG00000117148; CTA
YASGLLTGV

SEQ ID NO: 4092 - protein, 9 aa, Homo sapiens
  misc_feature: Table A; Target 4092; HLA-C*06:02; ACTL8; ENSG00000117148; CTA
YASGLLTGV

SEQ ID NO: 4093 - protein, 9 aa, Homo sapiens
  misc_feature: Table A; Target 4093; HLA-C*12:03; ACTL8; ENSG00000117148; CTA
YASGLLTGV

SEQ ID NO: 4094 - protein, 9 aa, Homo sapiens
  misc_feature: Table A; Target 4094; HLA-C*16:02; ACTL8; ENSG00000117148; CTA
YASGLLTGV

SEQ ID NO: 4095 - protein, 9 aa, Homo sapiens
  misc_feature: Table A; Target 4095; HLA-C*16:04; ACTL8; ENSG00000117148; CTA
YASGLLTGV

SEQ ID NO: 4096 - protein, 10 aa, Homo sapiens
  misc_feature: Table A; Target 4096; HLA-C*12:03; ACTL8; ENSG00000117148; CTA
YASGLLTGVV

SEQ ID NO: 4097 - protein, 11 aa, Homo sapiens
  misc_feature: Table A; Target 4097; HLA-A*68:02; ACTL8; ENSG00000117148; CTA
YASGLLTGVVV

SEQ ID NO: 4098 - protein, 11 aa, Homo sapiens
  misc_feature: Table A; Target 4098; HLA-B*35:03; ACTL8; ENSG00000117148; CTA
YASGLLTGVVV

SEQ ID NO: 4099 - protein, 11 aa, Homo sapiens
  misc_feature: Table A; Target 4099; HLA-B*39:01; ACTL8; ENSG00000117148; CTA
YASGLLTGVVV

SEQ ID NO: 4100 - protein, 11 aa, Homo sapiens
  misc_feature: Table A; Target 4100; HLA-B*54:01; ACTL8; ENSG00000117148; CTA
YASGLLTGVVV

SEQ ID NO: 4101 - protein, 11 aa, Homo sapiens
  misc_feature: Table A; Target 4101; HLA-C*02:02; ACTL8; ENSG00000117148; CTA
YASGLLTGVVV

SEQ ID NO: 4102 - protein, 11 aa, Homo sapiens
  misc_feature: Table A; Target 4102; HLA-C*12:03; ACTL8; ENSG00000117148; CTA
YASGLLTGVVV

SEQ ID NO: 4103 - protein, 9 aa, Homo sapiens
  misc_feature: Table A; Target 4103; HLA-A*02:04; ACTL8; ENSG00000117148; CTA
YGLTRVQPF

SEQ ID NO: 4104 - protein, 9 aa, Homo sapiens
  misc_feature: Table A; Target 4104; HLA-A*23:01; ACTL8; ENSG00000117148; CTA
YGLTRVQPF

SEQ ID NO: 4105 - protein, 9 aa, Homo sapiens
  misc_feature: Table A; Target 4105; HLA-A*24:02; ACTL8; ENSG00000117148; CTA
YGLTRVQPF

SEQ ID NO: 4106 - protein, 9 aa, Homo sapiens
  misc_feature: Table A; Target 4106; HLA-A*31:01; ACTL8; ENSG00000117148; CTA
YGLTRVQPF

SEQ ID NO: 4107 - protein, 9 aa, Homo sapiens
  misc_feature: Table A; Target 4107; HLA-A*33:01; ACTL8; ENSG00000117148; CTA
YGLTRVQPF

SEQ ID NO: 4108 - protein, 9 aa, Homo sapiens
  misc_feature: Table A; Target 4108; HLA-B*07:02; ACTL8; ENSG00000117148; CTA
YGLTRVQPF

SEQ ID NO: 4109 - protein, 9 aa, Homo sapiens
  misc_feature: Table A; Target 4109; HLA-B*08:01; ACTL8; ENSG00000117148; CTA
YGLTRVQPF

SEQ ID NO: 4110 - protein, 9 aa, Homo sapiens
  misc_feature: Table A; Target 4110; HLA-B*37:01; ACTL8; ENSG00000117148; CTA
YGLTRVQPF

SEQ ID NO: 4111 - protein, 9 aa, Homo sapiens
  misc_feature: Table A; Target 4111; HLA-B*40:02; ACTL8; ENSG00000117148; CTA
YGLTRVQPF

SEQ ID NO: 4112 - protein, 9 aa, Homo sapiens
  misc_feature: Table A; Target 4112; HLA-B*46:01; ACTL8; ENSG00000117148; CTA
YGLTRVQPF

SEQ ID NO: 4113 - protein, 9 aa, Homo sapiens
  misc_feature: Table A; Target 4113; HLA-B*57:01; ACTL8; ENSG00000117148; CTA
YGLTRVQPF

SEQ ID NO: 4114 - protein, 9 aa, Homo sapiens
  misc_feature: Table A; Target 4114; HLA-C*01:02; ACTL8; ENSG00000117148; CTA
YGLTRVQPF

SEQ ID NO: 4115 - protein, 9 aa, Homo sapiens
  misc_feature: Table A; Target 4115; HLA-C*02:02; ACTL8; ENSG00000117148; CTA
YGLTRVQPF

SEQ ID NO: 4116 - protein, 9 aa, Homo sapiens
  misc_feature: Table A; Target 4116; HLA-C*03:03; ACTL8; ENSG00000117148; CTA
YGLTRVQPF

SEQ ID NO: 4117 - protein, 9 aa, Homo sapiens
  misc_feature: Table A; Target 4117; HLA-C*03:04; ACTL8; ENSG00000117148; CTA
YGLTRVQPF

SEQ ID NO: 4118 - protein, 9 aa, Homo sapiens
  misc_feature: Table A; Target 4118; HLA-C*07:01; ACTL8; ENSG00000117148; CTA
YGLTRVQPF

SEQ ID NO: 4119 - protein, 9 aa, Homo sapiens
  misc_feature: Table A; Target 4119; HLA-C*07:02; ACTL8; ENSG00000117148; CTA
YGLTRVQPF

SEQ ID NO: 4120 - protein, 9 aa, Homo sapiens
  misc_feature: Table A; Target 4120; HLA-C*07:04; ACTL8; ENSG00000117148; CTA
YGLTRVQPF

SEQ ID NO: 4121 - protein, 9 aa, Homo sapiens
  misc_feature: Table A; Target 4121; HLA-C*12:03; ACTL8; ENSG00000117148; CTA
YGLTRVQPF

SEQ ID NO: 4122 - protein, 9 aa, Homo sapiens
  misc_feature: Table A; Target 4122; HLA-C*14:02; ACTL8; ENSG00000117148; CTA
YGLTRVQPF

SEQ ID NO: 4123 - protein, 9 aa, Homo sapiens
  misc_feature: Table A; Target 4123; HLA-C*16:01; ACTL8; ENSG00000117148; CTA
YGLTRVQPF

SEQ ID NO: 4124 - protein, 9 aa, Homo sapiens
  misc_feature: Table A; Target 4124; HLA-A*02:07; ACTL8; ENSG00000117148; CTA
YLWSFVLEN

SEQ ID NO: 4125 - protein, 8 aa, Homo sapiens
  misc_feature: Table A; Target 4125; HLA-B*51:01; ACTL8; ENSG00000117148; CTA
YPIERGRI

SEQ ID NO: 4126 - protein, 9 aa, Homo sapiens
  misc_feature: Table A; Target 4126; HLA-B*07:02; ACTL8; ENSG00000117148; CTA
YPIERGRIL

SEQ ID NO: 4127 - protein, 9 aa, Homo sapiens
  misc_feature: Table A; Target 4127; HLA-B*08:01; ACTL8; ENSG00000117148; CTA
YPIERGRIL

SEQ ID NO: 4128 - protein, 9 aa, Homo sapiens
  misc_feature: Table A; Target 4128; HLA-B*35:01; ACTL8; ENSG00000117148; CTA
YPIERGRIL

SEQ ID NO: 4129 - protein, 9 aa, Homo sapiens
  misc_feature: Table A; Target 4129; HLA-B*35:03; ACTL8; ENSG00000117148; CTA
YPIERGRIL

SEQ ID NO: 4130 - protein, 9 aa, Homo sapiens
  misc_feature: Table A; Target 4130; HLA-B*51:01; ACTL8; ENSG00000117148; CTA
YPIERGRIL

SEQ ID NO: 4131 - protein, 9 aa, Homo sapiens
  misc_feature: Table A; Target 4131; HLA-B*54:01; ACTL8; ENSG00000117148; CTA
YPIERGRIL

SEQ ID NO: 4132 - protein, 9 aa, Homo sapiens
  misc_feature: Table A; Target 4132; HLA-C*03:03; ACTL8; ENSG00000117148; CTA
YPIERGRIL

SEQ ID NO: 4133 - protein, 9 aa, Homo sapiens
  misc_feature: Table A; Target 4133; HLA-C*03:04; ACTL8; ENSG00000117148; CTA
YPIERGRIL

SEQ ID NO: 4134 - protein, 9 aa, Homo sapiens
  misc_feature: Table A; Target 4134; HLA-C*07:02; ACTL8; ENSG00000117148; CTA
YPIERGRIL

SEQ ID NO: 4135 - protein, 9 aa, Homo sapiens
  misc_feature: Table A; Target 4135; HLA-A*02:01; ACTL8; ENSG00000117148; CTA
YQLPDGSRV

SEQ ID NO: 4136 - protein, 9 aa, Homo sapiens
  misc_feature: Table A; Target 4136; HLA-A*02:04; ACTL8; ENSG00000117148; CTA
YQLPDGSRV

SEQ ID NO: 4137 - protein, 9 aa, Homo sapiens
  misc_feature: Table A; Target 4137; HLA-B*13:02; ACTL8; ENSG00000117148; CTA
YQLPDGSRV

SEQ ID NO: 4138 - protein, 9 aa, Homo sapiens
  misc_feature: Table A; Target 4138; HLA-B*27:05; ACTL8; ENSG00000117148; CTA
YQLPDGSRV

SEQ ID NO: 4139 - protein, 9 aa, Homo sapiens
  misc_feature: Table A; Target 4139; HLA-B*37:01; ACTL8; ENSG00000117148; CTA
YQLPDGSRV

SEQ ID NO: 4140 - protein, 9 aa, Homo sapiens
  misc_feature: Table A; Target 4140; HLA-B*38:01; ACTL8; ENSG00000117148; CTA
YQLPDGSRV

SEQ ID NO: 4141 - protein, 9 aa, Homo sapiens
  misc_feature: Table A; Target 4141; HLA-B*39:01; ACTL8; ENSG00000117148; CTA
YQLPDGSRV

SEQ ID NO: 4142 - protein, 9 aa, Homo sapiens
  misc_feature: Table A; Target 4142; HLA-B*49:01; ACTL8; ENSG00000117148; CTA
YQLPDGSRV

SEQ ID NO: 4143 - protein, 11 aa, Homo sapiens
  misc_feature: Table A; Target 4143; HLA-A*02:01; ACTL8; ENSG00000117148; CTA
YQLPDGSRVEL

SEQ ID NO: 4144 - protein, 11 aa, Homo sapiens
  misc_feature: Table A; Target 4144; HLA-A*02:04; ACTL8; ENSG00000117148; CTA
YQLPDGSRVEL

SEQ ID NO: 4145 - protein, 11 aa, Homo sapiens
  misc_feature: Table A; Target 4145; HLA-A*24:02; ACTL8; ENSG00000117148; CTA
YQLPDGSRVEL

SEQ ID NO: 4146 - protein, 11 aa, Homo sapiens
  misc_feature: Table A; Target 4146; HLA-A*30:01; ACTL8; ENSG00000117148; CTA
YQLPDGSRVEL

SEQ ID NO: 4147 - protein, 11 aa, Homo sapiens
  misc_feature: Table A; Target 4147; HLA-B*15:01; ACTL8; ENSG00000117148; CTA
YQLPDGSRVEL

SEQ ID NO: 4148 - protein, 11 aa, Homo sapiens
  misc_feature: Table A; Target 4148; HLA-B*38:01; ACTL8; ENSG00000117148; CTA
YQLPDGSRVEL

SEQ ID NO: 4149 - protein, 11 aa, Homo sapiens
  misc_feature: Table A; Target 4149; HLA-B*39:01; ACTL8; ENSG00000117148; CTA
YQLPDGSRVEL

SEQ ID NO: 4150 - protein, 11 aa, Homo sapiens
  misc_feature: Table A; Target 4150; HLA-B*15:01; ACTL8; ENSG00000117148; CTA
YQSEWMSREEY

SEQ ID NO: 4151 - protein, 9 aa, Homo sapiens
  misc_feature: Table A; Target 4151; HLA-A*02:07; ACTL8; ENSG00000117148; CTA
YVPQNLGEA

SEQ ID NO: 4152 - protein, 9 aa, Homo sapiens
  misc_feature: Table A; Target 4152; HLA-A*26:01; ACTL8; ENSG00000117148; CTA
YVPQNLGEA

SEQ ID NO: 4153 - protein, 10 aa, Homo sapiens
  misc_feature: Table A; Target 4153; HLA-A*02:07; ACTL8; ENSG00000117148; CTA
YVPQNLGEAL

SEQ ID NO: 4154 - protein, 10 aa, Homo sapiens
  misc_feature: Table A; Target 4154; HLA-A*25:01; ACTL8; ENSG00000117148; CTA
YVPQNLGEAL

SEQ ID NO: 4155 - protein, 10 aa, Homo sapiens
  misc_feature: Table A; Target 4155; HLA-C*01:02; ACTL8; ENSG00000117148; CTA
YVPQNLGEAL

SEQ ID NO: 4156 - protein, 10 aa, Homo sapiens
  misc_feature: Table A; Target 4156; HLA-C*07:04; ACTL8; ENSG00000117148; CTA
YVPQNLGEAL

SEQ ID NO: 4157 - protein, 10 aa, Homo sapiens
  misc_feature: Table A; Target 4157; HLA-C*14:02; ACTL8; ENSG00000117148; CTA
YVPQNLGEAL

SEQ ID NO: 4158 - protein, 9 aa, Homo sapiens
  misc_feature: Table A; Target 4158; HLA-B*37:01; ADAM2; ENSG00000104755; CTA
ADNLQCGKL

SEQ ID NO: 4159 - protein, 9 aa, Homo sapiens
  misc_feature: Table A; Target 4159; HLA-A*11:01; ADAM2; ENSG00000104755; CTA
ADVSLYNEK

SEQ ID NO: 4160 - protein, 9 aa, Homo sapiens
  misc_feature: Table A; Target 4160; HLA-B*27:02; ADAM2; ENSG00000104755; CTA
ADVSLYNEK

SEQ ID NO: 4161 - protein, 9 aa, Homo sapiens
  misc_feature: Table A; Target 4161; HLA-A*03:02; ADAM2; ENSG00000104755; CTA
AGGVVLHPR

SEQ ID NO: 4162 - protein, 9 aa, Homo sapiens
  misc_feature: Table A; Target 4162; HLA-A*11:01; ADAM2; ENSG00000104755; CTA
AGGVVLHPR

SEQ ID NO: 4163 - protein, 9 aa, Homo sapiens
  misc_feature: Table A; Target 4163; HLA-A*31:01; ADAM2; ENSG00000104755; CTA
AGGVVLHPR

SEQ ID NO: 4164 - protein, 9 aa, Homo sapiens
  misc_feature: Table A; Target 4164; HLA-A*33:01; ADAM2; ENSG00000104755; CTA
AGGVVLHPR

SEQ ID NO: 4165 - protein, 9 aa, Homo sapiens
  misc_feature: Table A; Target 4165; HLA-A*33:03; ADAM2; ENSG00000104755; CTA
AGGVVLHPR

SEQ ID NO: 4166 - protein, 9 aa, Homo sapiens
  misc_feature: Table A; Target 4166; HLA-A*68:01; ADAM2; ENSG00000104755; CTA
AGGVVLHPR

SEQ ID NO: 4167 - protein, 9 aa, Homo sapiens
  misc_feature: Table A; Target 4167; HLA-C*04:01; ADAM2; ENSG00000104755; CTA
AGGVVLHPR

SEQ ID NO: 4168 - protein, 9 aa, Homo sapiens
  misc_feature: Table A; Target 4168; HLA-C*06:02; ADAM2; ENSG00000104755; CTA
AGGVVLHPR

SEQ ID NO: 4169 - protein, 9 aa, Homo sapiens
  misc_feature: Table A; Target 4169; HLA-C*07:06; ADAM2; ENSG00000104755; CTA
AGGVVLHPR

SEQ ID NO: 4170 - protein, 8 aa, Homo sapiens
  misc_feature: Table A; Target 4170; HLA-B*13:02; ADAM2; ENSG00000104755; CTA
AIFVSFNI

SEQ ID NO: 4171 - protein, 8 aa, Homo sapiens
  misc_feature: Table A; Target 4171; HLA-B*08:01; ADAM2; ENSG00000104755; CTA
AIMVKVNF

SEQ ID NO: 4172 - protein, 8 aa, Homo sapiens
  misc_feature: Table A; Target 4172; HLA-B*37:01; ADAM2; ENSG00000104755; CTA
AIMVKVNF

SEQ ID NO: 4173 - protein, 10 aa, Homo sapiens
  misc_feature: Table A; Target 4173; HLA-A*31:01; ADAM2; ENSG00000104755; CTA
AIMVKVNFQR

SEQ ID NO: 4174 - protein, 9 aa, Homo sapiens
  misc_feature: Table A; Target 4174; HLA-B*15:03; ADAM2; ENSG00000104755; CTA
AKYIEMHVI

SEQ ID NO: 4175 - protein, 8 aa, Homo sapiens
  misc_feature: Table A; Target 4175; HLA-B*37:01; ADAM2; ENSG00000104755; CTA
ANELLHTF

SEQ ID NO: 4176 - protein, 9 aa, Homo sapiens
  misc_feature: Table A; Target 4176; HLA-A*23:01; ADAM2; ENSG00000104755; CTA
ANYAGGVVL

SEQ ID NO: 4177 - protein, 9 aa, Homo sapiens
  misc_feature: Table A; Target 4177; HLA-A*30:01; ADAM2; ENSG00000104755; CTA
ANYAGGVVL

SEQ ID NO: 4178 - protein, 9 aa, Homo sapiens
  misc_feature: Table A; Target 4178; HLA-A*32:01; ADAM2; ENSG00000104755; CTA
ANYAGGVVL

SEQ ID NO: 4179 - protein, 9 aa, Homo sapiens
  misc_feature: Table A; Target 4179; HLA-B*08:01; ADAM2; ENSG00000104755; CTA
ANYAGGVVL

SEQ ID NO: 4180 - protein, 9 aa, Homo sapiens
  misc_feature: Table A; Target 4180; HLA-B*13:02; ADAM2; ENSG00000104755; CTA
ANYAGGVVL

SEQ ID NO: 4181 - protein, 9 aa, Homo sapiens
  misc_feature: Table A; Target 4181; HLA-B*15:01; ADAM2; ENSG00000104755; CTA
ANYAGGVVL

SEQ ID NO: 4182 - protein, 9 aa, Homo sapiens
  misc_feature: Table A; Target 4182; HLA-B*15:03; ADAM2; ENSG00000104755; CTA
ANYAGGVVL

SEQ ID NO: 4183 - protein, 9 aa, Homo sapiens
  misc_feature: Table A; Target 4183; HLA-B*27:05; ADAM2; ENSG00000104755; CTA
ANYAGGVVL

SEQ ID NO: 4184 - protein, 9 aa, Homo sapiens
  misc_feature: Table A; Target 4184; HLA-B*35:03; ADAM2; ENSG00000104755; CTA
ANYAGGVVL

SEQ ID NO: 4185 - protein, 9 aa, Homo sapiens
  misc_feature: Table A; Target 4185; HLA-B*37:01; ADAM2; ENSG00000104755; CTA
ANYAGGVVL

SEQ ID NO: 4186 - protein, 9 aa, Homo sapiens
  misc_feature: Table A; Target 4186; HLA-B*38:01; ADAM2; ENSG00000104755; CTA
ANYAGGVVL

SEQ ID NO: 4187 - protein, 9 aa, Homo sapiens
  misc_feature: Table A; Target 4187; HLA-B*39:01; ADAM2; ENSG00000104755; CTA
ANYAGGVVL

SEQ ID NO: 4188 - protein, 9 aa, Homo sapiens
  misc_feature: Table A; Target 4188; HLA-B*40:01; ADAM2; ENSG00000104755; CTA
ANYAGGVVL

SEQ ID NO: 4189 - protein, 9 aa, Homo sapiens
  misc_feature: Table A; Target 4189; HLA-B*40:02; ADAM2; ENSG00000104755; CTA
ANYAGGVVL

SEQ ID NO: 4190 - protein, 9 aa, Homo sapiens
  misc_feature: Table A; Target 4190; HLA-B*46:01; ADAM2; ENSG00000104755; CTA
ANYAGGVVL

SEQ ID NO: 4191 - protein, 9 aa, Homo sapiens
  misc_feature: Table A; Target 4191; HLA-C*01:02; ADAM2; ENSG00000104755; CTA
ANYAGGVVL

SEQ ID NO: 4192 - protein, 9 aa, Homo sapiens
  misc_feature: Table A; Target 4192; HLA-C*02:02; ADAM2; ENSG00000104755; CTA
ANYAGGVVL

SEQ ID NO: 4193 - protein, 9 aa, Homo sapiens
  misc_feature: Table A; Target 4193; HLA-C*03:03; ADAM2; ENSG00000104755; CTA
ANYAGGVVL

SEQ ID NO: 4194 - protein, 9 aa, Homo sapiens
  misc_feature: Table A; Target 4194; HLA-C*03:04; ADAM2; ENSG00000104755; CTA
ANYAGGVVL

SEQ ID NO: 4195 - protein, 9 aa, Homo sapiens
  misc_feature: Table A; Target 4195; HLA-C*05:01; ADAM2; ENSG00000104755; CTA
ANYAGGVVL

SEQ ID NO: 4196 - protein, 9 aa, Homo sapiens
  misc_feature: Table A; Target 4196; HLA-C*07:04; ADAM2; ENSG00000104755; CTA
ANYAGGVVL

SEQ ID NO: 4197 - protein, 9 aa, Homo sapiens
  misc_feature: Table A; Target 4197; HLA-C*12:03; ADAM2; ENSG00000104755; CTA
ANYAGGVVL

SEQ ID NO: 4198 - protein, 9 aa, Homo sapiens
  misc_feature: Table A; Target 4198; HLA-C*14:02; ADAM2; ENSG00000104755; CTA
ANYAGGVVL

SEQ ID NO: 4199 - protein, 9 aa, Homo sapiens
  misc_feature: Table A; Target 4199; HLA-C*16:01; ADAM2; ENSG00000104755; CTA
ANYAGGVVL

SEQ ID NO: 4200 - protein, 9 aa, Homo sapiens
  misc_feature: Table A; Target 4200; HLA-C*16:02; ADAM2; ENSG00000104755; CTA
ANYAGGVVL

SEQ ID NO: 4201 - protein, 9 aa, Homo sapiens
  misc_feature: Table A; Target 4201; HLA-C*16:04; ADAM2; ENSG00000104755; CTA
ANYAGGVVL

SEQ ID NO: 4202 - protein, 10 aa, Homo sapiens
  misc_feature: Table A; Target 4202; HLA-A*03:02; ADAM2; ENSG00000104755; CTA
ANYAGGVVLH

SEQ ID NO: 4203 - protein, 8 aa, Homo sapiens
  misc_feature: Table A; Target 4203; HLA-B*13:02; ADAM2; ENSG00000104755; CTA
AQKVFQLI

SEQ ID NO: 4204 - protein, 8 aa, Homo sapiens
  misc_feature: Table A; Target 4204; HLA-B*15:01; ADAM2; ENSG00000104755; CTA
AQLLSLSM

SEQ ID NO: 4205 - protein, 10 aa, Homo sapiens
  misc_feature: Table A; Target 4205; HLA-B*13:02; ADAM2; ENSG00000104755; CTA
AQLLSLSMGI

SEQ ID NO: 4206 - protein, 11 aa, Homo sapiens
  misc_feature: Table A; Target 4206; HLA-B*57:01; ADAM2; ENSG00000104755; CTA
ASDHADSQKMW

SEQ ID NO: 4207 - protein, 11 aa, Homo sapiens
  misc_feature: Table A; Target 4207; HLA-B*58:01; ADAM2; ENSG00000104755; CTA
ASDHADSQKMW

SEQ ID NO: 4208 - protein, 9 aa, Homo sapiens
  misc_feature: Table A; Target 4208; HLA-A*31:01; ADAM2; ENSG00000104755; CTA
ASYKIVIEG

SEQ ID NO: 4209 - protein, 9 aa, Homo sapiens
  misc_feature: Table A; Target 4209; HLA-C*12:03; ADAM2; ENSG00000104755; CTA
ASYKIVIEG

SEQ ID NO: 4210 - protein, 10 aa, Homo sapiens
  misc_feature: Table A; Target 4210; HLA-A*03:01; ADAM2; ENSG00000104755; CTA
ASYKIVIEGK

SEQ ID NO: 4211 - protein, 10 aa, Homo sapiens
  misc_feature: Table A; Target 4211; HLA-A*03:02; ADAM2; ENSG00000104755; CTA
ASYKIVIEGK

SEQ ID NO: 4212 - protein, 10 aa, Homo sapiens
  misc_feature: Table A; Target 4212; HLA-A*11:01; ADAM2; ENSG00000104755; CTA
ASYKIVIEGK

SEQ ID NO: 4213 - protein, 9 aa, Homo sapiens
  misc_feature: Table A; Target 4213; HLA-C*03:03; ADAM2; ENSG00000104755; CTA
ATTGEANEL

SEQ ID NO: 4214 - protein, 9 aa, Homo sapiens
  misc_feature: Table A; Target 4214; HLA-C*03:04; ADAM2; ENSG00000104755; CTA
ATTGEANEL

SEQ ID NO: 4215 - protein, 9 aa, Homo sapiens
  misc_feature: Table A; Target 4215; HLA-C*16:02; ADAM2; ENSG00000104755; CTA
ATTGEANEL

SEQ ID NO: 4216 - protein, 11 aa, Homo sapiens
  misc_feature: Table A; Target 4216; HLA-A*11:01; ADAM2; ENSG00000104755; CTA
ATTGEANELLH

SEQ ID NO: 4217 - protein, 8 aa, Homo sapiens
  misc_feature: Table A; Target 4217; HLA-A*23:01; ADAM2; ENSG00000104755; CTA
AVILAQLL

SEQ ID NO: 4218 - protein, 8 aa, Homo sapiens
  misc_feature: Table A; Target 4218; HLA-B*37:01; ADAM2; ENSG00000104755; CTA
AVILAQLL

SEQ ID NO: 4219 - protein, 10 aa, Homo sapiens
  misc_feature: Table A; Target 4219; HLA-A*25:01; ADAM2; ENSG00000104755; CTA
AVILAQLLSL

SEQ ID NO: 4220 - protein, 8 aa, Homo sapiens
  misc_feature: Table A; Target 4220; HLA-B*37:01; ADAM2; ENSG00000104755; CTA
CDIATCRF

SEQ ID NO: 4221 - protein, 10 aa, Homo sapiens
  misc_feature: Table A; Target 4221; HLA-A*03:02; ADAM2; ENSG00000104755; CTA
CIMNPEAIHF

SEQ ID NO: 4222 - protein, 10 aa, Homo sapiens
  misc_feature: Table A; Target 4222; HLA-B*57:01; ADAM2; ENSG00000104755; CTA
CIMNPEAIHF

SEQ ID NO: 4223 - protein, 9 aa, Homo sapiens
  misc_feature: Table A; Target 4223; HLA-B*13:02; ADAM2; ENSG00000104755; CTA
CQCSGAVCI

SEQ ID NO: 4224 - protein, 9 aa, Homo sapiens
  misc_feature: Table A; Target 4224; HLA-B*57:01; ADAM2; ENSG00000104755; CTA
CSFEDFAHF

SEQ ID NO: 4225 - protein, 9 aa, Homo sapiens
  misc_feature: Table A; Target 4225; HLA-A*03:01; ADAM2; ENSG00000104755; CTA
CVLIAIMVK

SEQ ID NO: 4226 - protein, 9 aa, Homo sapiens
  misc_feature: Table A; Target 4226; HLA-A*11:01; ADAM2; ENSG00000104755; CTA
CVLIAIMVK

SEQ ID NO: 4227 - protein, 9 aa, Homo sapiens
  misc_feature: Table A; Target 4227; HLA-A*01:01; ADAM2; ENSG00000104755; CTA
CVSSSYLGY

SEQ ID NO: 4228 - protein, 9 aa, Homo sapiens
  misc_feature: Table A; Target 4228; HLA-A*03:01; ADAM2; ENSG00000104755; CTA
CVSSSYLGY

SEQ ID NO: 4229 - protein, 9 aa, Homo sapiens
  misc_feature: Table A; Target 4229; HLA-A*03:02; ADAM2; ENSG00000104755; CTA
CVSSSYLGY

SEQ ID NO: 4230 - protein, 9 aa, Homo sapiens
  misc_feature: Table A; Target 4230; HLA-A*11:01; ADAM2; ENSG00000104755; CTA
CVSSSYLGY

SEQ ID NO: 4231 - protein, 9 aa, Homo sapiens
  misc_feature: Table A; Target 4231; HLA-A*25:01; ADAM2; ENSG00000104755; CTA
CVSSSYLGY

SEQ ID NO: 4232 - protein, 9 aa, Homo sapiens
  misc_feature: Table A; Target 4232; HLA-A*26:01; ADAM2; ENSG00000104755; CTA
CVSSSYLGY

SEQ ID NO: 4233 - protein, 9 aa, Homo sapiens
  misc_feature: Table A; Target 4233; HLA-A*30:02; ADAM2; ENSG00000104755; CTA
CVSSSYLGY

SEQ ID NO: 4234 - protein, 9 aa, Homo sapiens
  misc_feature: Table A; Target 4234; HLA-A*32:01; ADAM2; ENSG00000104755; CTA
CVSSSYLGY

SEQ ID NO: 4235 - protein, 9 aa, Homo sapiens
  misc_feature: Table A; Target 4235; HLA-B*15:01; ADAM2; ENSG00000104755; CTA
CVSSSYLGY

SEQ ID NO: 4236 - protein, 9 aa, Homo sapiens
  misc_feature: Table A; Target 4236; HLA-C*02:02; ADAM2; ENSG00000104755; CTA
CVSSSYLGY

SEQ ID NO: 4237 - protein, 9 aa, Homo sapiens
  misc_feature: Table A; Target 4237; HLA-C*07:04; ADAM2; ENSG00000104755; CTA
CVSSSYLGY

SEQ ID NO: 4238 - protein, 9 aa, Homo sapiens
  misc_feature: Table A; Target 4238; HLA-C*14:02; ADAM2; ENSG00000104755; CTA
CVSSSYLGY

SEQ ID NO: 4239 - protein, 9 aa, Homo sapiens
  misc_feature: Table A; Target 4239; HLA-C*16:04; ADAM2; ENSG00000104755; CTA
CVSSSYLGY

SEQ ID NO: 4240 - protein, 8 aa, Homo sapiens
  misc_feature: Table A; Target 4240; HLA-B*51:01; ADAM2; ENSG00000104755; CTA
DANYAGGV

SEQ ID NO: 4241 - protein, 9 aa, Homo sapiens
  misc_feature: Table A; Target 4241; HLA-A*33:01; ADAM2; ENSG00000104755; CTA
DANYAGGVV

SEQ ID NO: 4242 - protein, 9 aa, Homo sapiens
  misc_feature: Table A; Target 4242; HLA-B*35:03; ADAM2; ENSG00000104755; CTA
DANYAGGVV

SEQ ID NO: 4243 - protein, 9 aa, Homo sapiens
  misc_feature: Table A; Target 4243; HLA-B*51:01; ADAM2; ENSG00000104755; CTA
DANYAGGVV

SEQ ID NO: 4244 - protein, 9 aa, Homo sapiens
  misc_feature: Table A; Target 4244; HLA-C*01:02; ADAM2; ENSG00000104755; CTA
DANYAGGVV

SEQ ID NO: 4245 - protein, 9 aa, Homo sapiens
  misc_feature: Table A; Target 4245; HLA-C*03:04; ADAM2; ENSG00000104755; CTA
DANYAGGVV

SEQ ID NO: 4246 - protein, 9 aa, Homo sapiens
  misc_feature: Table A; Target 4246; HLA-C*12:03; ADAM2; ENSG00000104755; CTA
DANYAGGVV

SEQ ID NO: 4247 - protein, 10 aa, Homo sapiens
  misc_feature: Table A; Target 4247; HLA-A*33:01; ADAM2; ENSG00000104755; CTA
DANYAGGVVL

SEQ ID NO: 4248 - protein, 10 aa, Homo sapiens
  misc_feature: Table A; Target 4248; HLA-A*68:01; ADAM2; ENSG00000104755; CTA
DANYAGGVVL

SEQ ID NO: 4249 - protein, 10 aa, Homo sapiens
  misc_feature: Table A; Target 4249; HLA-B*35:01; ADAM2; ENSG00000104755; CTA
DANYAGGVVL

SEQ ID NO: 4250 - protein, 10 aa, Homo sapiens
  misc_feature: Table A; Target 4250; HLA-B*35:03; ADAM2; ENSG00000104755; CTA
DANYAGGVVL

SEQ ID NO: 4251 - protein, 10 aa, Homo sapiens
  misc_feature: Table A; Target 4251; HLA-B*38:01; ADAM2; ENSG00000104755; CTA
DANYAGGVVL

SEQ ID NO: 4252 - protein, 10 aa, Homo sapiens
  misc_feature: Table A; Target 4252; HLA-B*39:01; ADAM2; ENSG00000104755; CTA
DANYAGGVVL

SEQ ID NO: 4253 - protein, 10 aa, Homo sapiens
  misc_feature: Table A; Target 4253; HLA-B*51:01; ADAM2; ENSG00000104755; CTA
DANYAGGVVL

SEQ ID NO: 4254 - protein, 10 aa, Homo sapiens
  misc_feature: Table A; Target 4254; HLA-C*01:02; ADAM2; ENSG00000104755; CTA
DANYAGGVVL

SEQ ID NO: 4255 - protein, 10 aa, Homo sapiens
  misc_feature: Table A; Target 4255; HLA-C*03:03; ADAM2; ENSG00000104755; CTA
DANYAGGVVL

SEQ ID NO: 4256 - protein, 10 aa, Homo sapiens
  misc_feature: Table A; Target 4256; HLA-C*03:04; ADAM2; ENSG00000104755; CTA
DANYAGGVVL

SEQ ID NO: 4257 - protein, 10 aa, Homo sapiens
  misc_feature: Table A; Target 4257; HLA-C*07:06; ADAM2; ENSG00000104755; CTA
DANYAGGVVL

SEQ ID NO: 4258 - protein, 11 aa, Homo sapiens
  misc_feature: Table A; Target 4258; HLA-A*33:01; ADAM2; ENSG00000104755; CTA
DANYAGGVVLH

SEQ ID NO: 4259 - protein, 11 aa, Homo sapiens
  misc_feature: Table A; Target 4259; HLA-A*33:03; ADAM2; ENSG00000104755; CTA
DANYAGGVVLH

SEQ ID NO: 4260 - protein, 11 aa, Homo sapiens
  misc_feature: Table A; Target 4260; HLA-A*68:01; ADAM2; ENSG00000104755; CTA
DANYAGGVVLH

SEQ ID NO: 4261 - protein, 11 aa, Homo sapiens
  misc_feature: Table A; Target 4261; HLA-C*07:06; ADAM2; ENSG00000104755; CTA
DANYAGGVVLH

SEQ ID NO: 4262 - protein, 8 aa, Homo sapiens
  misc_feature: Table A; Target 4262; HLA-B*18:01; ADAM2; ENSG00000104755; CTA
DENKIATT

SEQ ID NO: 4263 - protein, 9 aa, Homo sapiens
  misc_feature: Table A; Target 4263; HLA-B*18:01; ADAM2; ENSG00000104755; CTA
DENKIATTG

SEQ ID NO: 4264 - protein, 11 aa, Homo sapiens
  misc_feature: Table A; Target 4264; HLA-A*33:01; ADAM2; ENSG00000104755; CTA
DEQPESESEPK

SEQ ID NO: 4265 - protein, 11 aa, Homo sapiens
  misc_feature: Table A; Target 4265; HLA-B*27:02; ADAM2; ENSG00000104755; CTA
DEQPESESEPK

SEQ ID NO: 4266 - protein, 8 aa, Homo sapiens
  misc_feature: Table A; Target 4266; HLA-A*33:01; ADAM2; ENSG00000104755; CTA
DFAHFISK

SEQ ID NO: 4267 - protein, 8 aa, Homo sapiens
  misc_feature: Table A; Target 4267; HLA-A*33:03; ADAM2; ENSG00000104755; CTA
DFAHFISK

SEQ ID NO: 4268 - protein, 10 aa, Homo sapiens
  misc_feature: Table A; Target 4268; HLA-A*33:01; ADAM2; ENSG00000104755; CTA
DFAHFISKQK

SEQ ID NO: 4269 - protein, 8 aa, Homo sapiens
  misc_feature: Table A; Target 4269; HLA-B*38:01; ADAM2; ENSG00000104755; CTA
DHADSQKM

SEQ ID NO: 4270 - protein, 8 aa, Homo sapiens
  misc_feature: Table A; Target 4270; HLA-B*39:01; ADAM2; ENSG00000104755; CTA
DHADSQKM

SEQ ID NO: 4271 - protein, 9 aa, Homo sapiens
  misc_feature: Table A; Target 4271; HLA-B*38:01; ADAM2; ENSG00000104755; CTA
DHADSQKMW

SEQ ID NO: 4272 - protein, 10 aa, Homo sapiens
  misc_feature: Table A; Target 4272; HLA-B*38:01; ADAM2; ENSG00000104755; CTA
DHADSQKMWI

SEQ ID NO: 4273 - protein, 9 aa, Homo sapiens
  misc_feature: Table A; Target 4273; HLA-A*01:01; ADAM2; ENSG00000104755; CTA
DIESRDLSF

SEQ ID NO: 4274 - protein, 9 aa, Homo sapiens
  misc_feature: Table A; Target 4274; HLA-A*25:01; ADAM2; ENSG00000104755; CTA
DIESRDLSF

SEQ ID NO: 4275 - protein, 9 aa, Homo sapiens
  misc_feature: Table A; Target 4275; HLA-A*26:01; ADAM2; ENSG00000104755; CTA
DIESRDLSF

SEQ ID NO: 4276 - protein, 9 aa, Homo sapiens
  misc_feature: Table A; Target 4276; HLA-B*08:01; ADAM2; ENSG00000104755; CTA
DIESRDLSF

SEQ ID NO: 4277 - protein, 9 aa, Homo sapiens
  misc_feature: Table A; Target 4277; HLA-A*02:03; ADAM2; ENSG00000104755; CTA
DLSFKLQSV

SEQ ID NO: 4278 - protein, 9 aa, Homo sapiens
  misc_feature: Table A; Target 4278; HLA-A*68:02; ADAM2; ENSG00000104755; CTA
DLSFKLQSV

SEQ ID NO: 4279 - protein, 9 aa, Homo sapiens
  misc_feature: Table A; Target 4279; HLA-B*08:01; ADAM2; ENSG00000104755; CTA
DLSFKLQSV

SEQ ID NO: 4280 - protein, 9 aa, Homo sapiens
  misc_feature: Table A; Target 4280; HLA-B*51:01; ADAM2; ENSG00000104755; CTA
DLSFKLQSV

SEQ ID NO: 4281 - protein, 8 aa, Homo sapiens
  misc_feature: Table A; Target 4281; HLA-B*08:01; ADAM2; ENSG00000104755; CTA
DPFFKQQA

SEQ ID NO: 4282 - protein, 8 aa, Homo sapiens
  misc_feature: Table A; Target 4282; HLA-B*54:01; ADAM2; ENSG00000104755; CTA
DPFFKQQA

SEQ ID NO: 4283 - protein, 9 aa, Homo sapiens
  misc_feature: Table A; Target 4283; HLA-A*33:01; ADAM2; ENSG00000104755; CTA
DPFFKQQAV

SEQ ID NO: 4284 - protein, 9 aa, Homo sapiens
  misc_feature: Table A; Target 4284; HLA-A*68:01; ADAM2; ENSG00000104755; CTA
DPFFKQQAV

SEQ ID NO: 4285 - protein, 9 aa, Homo sapiens
  misc_feature: Table A; Target 4285; HLA-A*68:02; ADAM2; ENSG00000104755; CTA
DPFFKQQAV

SEQ ID NO: 4286 - protein, 9 aa, Homo sapiens
  misc_feature: Table A; Target 4286; HLA-B*07:02; ADAM2; ENSG00000104755; CTA
DPFFKQQAV

SEQ ID NO: 4287 - protein, 9 aa, Homo sapiens
  misc_feature: Table A; Target 4287; HLA-B*08:01; ADAM2; ENSG00000104755; CTA
DPFFKQQAV

SEQ ID NO: 4288 - protein, 9 aa, Homo sapiens
  misc_feature: Table A; Target 4288; HLA-B*35:01; ADAM2; ENSG00000104755; CTA
DPFFKQQAV

SEQ ID NO: 4289 - protein, 9 aa, Homo sapiens
  misc_feature: Table A; Target 4289; HLA-B*35:03; ADAM2; ENSG00000104755; CTA
DPFFKQQAV

SEQ ID NO: 4290 - protein, 9 aa, Homo sapiens
  misc_feature: Table A; Target 4290; HLA-B*54:01; ADAM2; ENSG00000104755; CTA
DPFFKQQAV

SEQ ID NO: 4291 - protein, 9 aa, Homo sapiens
  misc_feature: Table A; Target 4291; HLA-B*55:01; ADAM2; ENSG00000104755; CTA
DPFFKQQAV

SEQ ID NO: 4292 - protein, 9 aa, Homo sapiens
  misc_feature: Table A; Target 4292; HLA-B*56:01; ADAM2; ENSG00000104755; CTA
DPFFKQQAV

SEQ ID NO: 4293 - protein, 10 aa, Homo sapiens
  misc_feature: Table A; Target 4293; HLA-A*01:01; ADAM2; ENSG00000104755; CTA
DQDFQNFCHY

SEQ ID NO: 4294 - protein, 10 aa, Homo sapiens
  misc_feature: Table A; Target 4294; HLA-C*07:01; ADAM2; ENSG00000104755; CTA
DQDFQNFCHY

SEQ ID NO: 4295 - protein, 9 aa, Homo sapiens
  misc_feature: Table A; Target 4295; HLA-A*23:01; ADAM2; ENSG00000104755; CTA
DSLPVQITV

SEQ ID NO: 4296 - protein, 9 aa, Homo sapiens
  misc_feature: Table A; Target 4296; HLA-A*33:01; ADAM2; ENSG00000104755; CTA
DSLPVQITV

SEQ ID NO: 4297 - protein, 9 aa, Homo sapiens
  misc_feature: Table A; Target 4297; HLA-A*68:01; ADAM2; ENSG00000104755; CTA
DSLPVQITV

SEQ ID NO: 4298 - protein, 9 aa, Homo sapiens
  misc_feature: Table A; Target 4298; HLA-A*68:02; ADAM2; ENSG00000104755; CTA
DSLPVQITV

SEQ ID NO: 4299 - protein, 9 aa, Homo sapiens
  misc_feature: Table A; Target 4299; HLA-B*13:02; ADAM2; ENSG00000104755; CTA
DSLPVQITV

SEQ ID NO: 4300 - protein, 9 aa, Homo sapiens
  misc_feature: Table A; Target 4300; HLA-B*18:01; ADAM2; ENSG00000104755; CTA
DSLPVQITV

SEQ ID NO: 4301 - protein, 9 aa, Homo sapiens
  misc_feature: Table A; Target 4301; HLA-B*35:03; ADAM2; ENSG00000104755; CTA
DSLPVQITV

SEQ ID NO: 4302 - protein, 9 aa, Homo sapiens
  misc_feature: Table A; Target 4302; HLA-B*49:01; ADAM2; ENSG00000104755; CTA
DSLPVQITV

SEQ ID NO: 4303 - protein, 9 aa, Homo sapiens
  misc_feature: Table A; Target 4303; HLA-B*51:01; ADAM2; ENSG00000104755; CTA
DSLPVQITV

SEQ ID NO: 4304 - protein, 9 aa, Homo sapiens
  misc_feature: Table A; Target 4304; HLA-B*54:01; ADAM2; ENSG00000104755; CTA
DSLPVQITV

SEQ ID NO: 4305 - protein, 9 aa, Homo sapiens
  misc_feature: Table A; Target 4305; HLA-C*03:04; ADAM2; ENSG00000104755; CTA
DSLPVQITV

SEQ ID NO: 4306 - protein, 9 aa, Homo sapiens
  misc_feature: Table A; Target 4306; HLA-C*12:03; ADAM2; ENSG00000104755; CTA
DSLPVQITV

SEQ ID NO: 4307 - protein, 9 aa, Homo sapiens
  misc_feature: Table A; Target 4307; HLA-C*16:02; ADAM2; ENSG00000104755; CTA
DSLPVQITV

SEQ ID NO: 4308 - protein, 9 aa, Homo sapiens
  misc_feature: Table A; Target 4308; HLA-A*25:01; ADAM2; ENSG00000104755; CTA
DTFGKEVEF

SEQ ID NO: 4309 - protein, 9 aa, Homo sapiens
  misc_feature: Table A; Target 4309; HLA-A*26:01; ADAM2; ENSG00000104755; CTA
DTFGKEVEF

SEQ ID NO: 4310 - protein, 9 aa, Homo sapiens
  misc_feature: Table A; Target 4310; HLA-A*33:01; ADAM2; ENSG00000104755; CTA
DTFGKEVEF

SEQ ID NO: 4311 - protein, 9 aa, Homo sapiens
  misc_feature: Table A; Target 4311; HLA-A*33:03; ADAM2; ENSG00000104755; CTA
DTFGKEVEF

SEQ ID NO: 4312 - protein, 9 aa, Homo sapiens
  misc_feature: Table A; Target 4312; HLA-A*68:01; ADAM2; ENSG00000104755; CTA
DTFGKEVEF

SEQ ID NO: 4313 - protein, 9 aa, Homo sapiens
  misc_feature: Table A; Target 4313; HLA-A*68:02; ADAM2; ENSG00000104755; CTA
DTFGKEVEF

SEQ ID NO: 4314 - protein, 9 aa, Homo sapiens
  misc_feature: Table A; Target 4314; HLA-B*08:01; ADAM2; ENSG00000104755; CTA
DTFGKEVEF

SEQ ID NO: 4315 - protein, 9 aa, Homo sapiens
  misc_feature: Table A; Target 4315; HLA-B*18:01; ADAM2; ENSG00000104755; CTA
DTFGKEVEF

SEQ ID NO: 4316 - protein, 9 aa, Homo sapiens
  misc_feature: Table A; Target 4316; HLA-B*35:01; ADAM2; ENSG00000104755; CTA
DTFGKEVEF

SEQ ID NO: 4317 - protein, 9 aa, Homo sapiens
  misc_feature: Table A; Target 4317; HLA-B*35:03; ADAM2; ENSG00000104755; CTA
DTFGKEVEF

SEQ ID NO: 4318 - protein, 9 aa, Homo sapiens
  misc_feature: Table A; Target 4318; HLA-C*07:04; ADAM2; ENSG00000104755; CTA
DTFGKEVEF

SEQ ID NO: 4319 - protein, 9 aa, Homo sapiens
  misc_feature: Table A; Target 4319; HLA-C*07:06; ADAM2; ENSG00000104755; CTA
DTFGKEVEF

SEQ ID NO: 4320 - protein, 9 aa, Homo sapiens
  misc_feature: Table A; Target 4320; HLA-C*12:03; ADAM2; ENSG00000104755; CTA
DTFGKEVEF

SEQ ID NO: 4321 - protein, 8 aa, Homo sapiens
  misc_feature: Table A; Target 4321; HLA-A*03:02; ADAM2; ENSG00000104755; CTA
DTTVVAQK

SEQ ID NO: 4322 - protein, 8 aa, Homo sapiens
  misc_feature: Table A; Target 4322; HLA-A*33:01; ADAM2; ENSG00000104755; CTA
DTTVVAQK

SEQ ID NO: 4323 - protein, 8 aa, Homo sapiens
  misc_feature: Table A; Target 4323; HLA-A*33:03; ADAM2; ENSG00000104755; CTA
DTTVVAQK

SEQ ID NO: 4324 - protein, 8 aa, Homo sapiens
  misc_feature: Table A; Target 4324; HLA-A*68:01; ADAM2; ENSG00000104755; CTA
DTTVVAQK

SEQ ID NO: 4325 - protein, 8 aa, Homo sapiens
  misc_feature: Table A; Target 4325; HLA-B*27:02; ADAM2; ENSG00000104755; CTA
DTTVVAQK

SEQ ID NO: 4326 - protein, 9 aa, Homo sapiens
  misc_feature: Table A; Target 4326; HLA-A*25:01; ADAM2; ENSG00000104755; CTA
DTTVVAQKV

SEQ ID NO: 4327 - protein, 9 aa, Homo sapiens
  misc_feature: Table A; Target 4327; HLA-A*26:01; ADAM2; ENSG00000104755; CTA
DTTVVAQKV

SEQ ID NO: 4328 - protein, 9 aa, Homo sapiens
  misc_feature: Table A; Target 4328; HLA-A*33:01; ADAM2; ENSG00000104755; CTA
DTTVVAQKV

SEQ ID NO: 4329 - protein, 9 aa, Homo sapiens
  misc_feature: Table A; Target 4329; HLA-A*33:03; ADAM2; ENSG00000104755; CTA
DTTVVAQKV

SEQ ID NO: 4330 - protein, 9 aa, Homo sapiens
  misc_feature: Table A; Target 4330; HLA-A*68:01; ADAM2; ENSG00000104755; CTA
DTTVVAQKV

SEQ ID NO: 4331 - protein, 9 aa, Homo sapiens
  misc_feature: Table A; Target 4331; HLA-A*68:02; ADAM2; ENSG00000104755; CTA
DTTVVAQKV

SEQ ID NO: 4332 - protein, 9 aa, Homo sapiens
  misc_feature: Table A; Target 4332; HLA-B*13:02; ADAM2; ENSG00000104755; CTA
DTTVVAQKV

SEQ ID NO: 4333 - protein, 9 aa, Homo sapiens
  misc_feature: Table A; Target 4333; HLA-B*51:01; ADAM2; ENSG00000104755; CTA
DTTVVAQKV

SEQ ID NO: 4334 - protein, 9 aa, Homo sapiens
  misc_feature: Table A; Target 4334; HLA-C*07:06; ADAM2; ENSG00000104755; CTA
DTTVVAQKV

SEQ ID NO: 4335 - protein, 9 aa, Homo sapiens
  misc_feature: Table A; Target 4335; HLA-C*12:03; ADAM2; ENSG00000104755; CTA
DTTVVAQKV

SEQ ID NO: 4336 - protein, 9 aa, Homo sapiens
  misc_feature: Table A; Target 4336; HLA-C*16:02; ADAM2; ENSG00000104755; CTA
DTTVVAQKV

SEQ ID NO: 4337 - protein, 10 aa, Homo sapiens
  misc_feature: Table A; Target 4337; HLA-A*25:01; ADAM2; ENSG00000104755; CTA
DTTVVAQKVF

SEQ ID NO: 4338 - protein, 10 aa, Homo sapiens
  misc_feature: Table A; Target 4338; HLA-A*26:01; ADAM2; ENSG00000104755; CTA
DTTVVAQKVF

SEQ ID NO: 4339 - protein, 8 aa, Homo sapiens
  misc_feature: Table A; Target 4339; HLA-A*25:01; ADAM2; ENSG00000104755; CTA
DVAFLLVY

SEQ ID NO: 4340 - protein, 8 aa, Homo sapiens
  misc_feature: Table A; Target 4340; HLA-A*26:01; ADAM2; ENSG00000104755; CTA
DVAFLLVY

SEQ ID NO: 4341 - protein, 8 aa, Homo sapiens
  misc_feature: Table A; Target 4341; HLA-B*18:01; ADAM2; ENSG00000104755; CTA
DVAFLLVY

SEQ ID NO: 4342 - protein, 8 aa, Homo sapiens
  misc_feature: Table A; Target 4342; HLA-B*35:01; ADAM2; ENSG00000104755; CTA
DVAFLLVY

SEQ ID NO: 4343 - protein, 8 aa, Homo sapiens
  misc_feature: Table A; Target 4343; HLA-C*07:01; ADAM2; ENSG00000104755; CTA
DVAFLLVY

SEQ ID NO: 4344 - protein, 9 aa, Homo sapiens
  misc_feature: Table A; Target 4344; HLA-A*33:01; ADAM2; ENSG00000104755; CTA
DVAFLLVYR

SEQ ID NO: 4345 - protein, 9 aa, Homo sapiens
  misc_feature: Table A; Target 4345; HLA-A*33:03; ADAM2; ENSG00000104755; CTA
DVAFLLVYR

SEQ ID NO: 4346 - protein, 9 aa, Homo sapiens
  misc_feature: Table A; Target 4346; HLA-A*68:01; ADAM2; ENSG00000104755; CTA
DVAFLLVYR

SEQ ID NO: 4347 - protein, 9 aa, Homo sapiens
  misc_feature: Table A; Target 4347; HLA-A*68:02; ADAM2; ENSG00000104755; CTA
DVAFLLVYR

SEQ ID NO: 4348 - protein, 9 aa, Homo sapiens
  misc_feature: Table A; Target 4348; HLA-C*07:06; ADAM2; ENSG00000104755; CTA
DVAFLLVYR

SEQ ID NO: 4349 - protein, 8 aa, Homo sapiens
  misc_feature: Table A; Target 4349; HLA-B*51:01; ADAM2; ENSG00000104755; CTA
EAIHFSGV

SEQ ID NO: 4350 - protein, 10 aa, Homo sapiens
  misc_feature: Table A; Target 4350; HLA-A*25:01; ADAM2; ENSG00000104755; CTA
EAIHFSGVKI

SEQ ID NO: 4351 - protein, 10 aa, Homo sapiens
  misc_feature: Table A; Target 4351; HLA-A*68:01; ADAM2; ENSG00000104755; CTA
EAIHFSGVKI

SEQ ID NO: 4352 - protein, 10 aa, Homo sapiens
  misc_feature: Table A; Target 4352; HLA-A*68:02; ADAM2; ENSG00000104755; CTA
EAIHFSGVKI

SEQ ID NO: 4353 - protein, 9 aa, Homo sapiens
  misc_feature: Table A; Target 4353; HLA-A*23:01; ADAM2; ENSG00000104755; CTA
EANELLHTF

SEQ ID NO: 4354 - protein, 9 aa, Homo sapiens
  misc_feature: Table A; Target 4354; HLA-A*24:02; ADAM2; ENSG00000104755; CTA
EANELLHTF

SEQ ID NO: 4355 - protein, 9 aa, Homo sapiens
  misc_feature: Table A; Target 4355; HLA-A*25:01; ADAM2; ENSG00000104755; CTA
EANELLHTF

SEQ ID NO: 4356 - protein, 9 aa, Homo sapiens
  misc_feature: Table A; Target 4356; HLA-A*26:01; ADAM2; ENSG00000104755; CTA
EANELLHTF

SEQ ID NO: 4357 - protein, 9 aa, Homo sapiens
  misc_feature: Table A; Target 4357; HLA-A*30:02; ADAM2; ENSG00000104755; CTA
EANELLHTF

SEQ ID NO: 4358 - protein, 9 aa, Homo sapiens
  misc_feature: Table A; Target 4358; HLA-A*32:01; ADAM2; ENSG00000104755; CTA
EANELLHTF

SEQ ID NO: 4359 - protein, 9 aa, Homo sapiens
  misc_feature: Table A; Target 4359; HLA-A*33:01; ADAM2; ENSG00000104755; CTA
EANELLHTF

SEQ ID NO: 4360 - protein, 9 aa, Homo sapiens
  misc_feature: Table A; Target 4360; HLA-A*33:03; ADAM2; ENSG00000104755; CTA
EANELLHTF

SEQ ID NO: 4361 - protein, 9 aa, Homo sapiens
  misc_feature: Table A; Target 4361; HLA-A*68:01; ADAM2; ENSG00000104755; CTA
EANELLHTF

SEQ ID NO: 4362 - protein, 9 aa, Homo sapiens
  misc_feature: Table A; Target 4362; HLA-A*68:02; ADAM2; ENSG00000104755; CTA
EANELLHTF

SEQ ID NO: 4363 - protein, 9 aa, Homo sapiens
  misc_feature: Table A; Target 4363; HLA-B*18:01; ADAM2; ENSG00000104755; CTA
EANELLHTF

SEQ ID NO: 4364 - protein, 9 aa, Homo sapiens
  misc_feature: Table A; Target 4364; HLA-B*27:02; ADAM2; ENSG00000104755; CTA
EANELLHTF

SEQ ID NO: 4365 - protein, 9 aa, Homo sapiens
  misc_feature: Table A; Target 4365; HLA-B*35:03; ADAM2; ENSG00000104755; CTA
EANELLHTF

SEQ ID NO: 4366 - protein, 9 aa, Homo sapiens
  misc_feature: Table A; Target 4366; HLA-B*38:01; ADAM2; ENSG00000104755; CTA
EANELLHTF

SEQ ID NO: 4367 - protein, 9 aa, Homo sapiens
  misc_feature: Table A; Target 4367; HLA-B*44:02; ADAM2; ENSG00000104755; CTA
EANELLHTF

SEQ ID NO: 4368 - protein, 9 aa, Homo sapiens
  misc_feature: Table A; Target 4368; HLA-B*44:03; ADAM2; ENSG00000104755; CTA
EANELLHTF

SEQ ID NO: 4369 - protein, 9 aa, Homo sapiens
  misc_feature: Table A; Target 4369; HLA-B*46:01; ADAM2; ENSG00000104755; CTA
EANELLHTF

SEQ ID NO: 4370 - protein, 9 aa, Homo sapiens
  misc_feature: Table A; Target 4370; HLA-B*51:01; ADAM2; ENSG00000104755; CTA
EANELLHTF

SEQ ID NO: 4371 - protein, 9 aa, Homo sapiens
  misc_feature: Table A; Target 4371; HLA-B*55:01; ADAM2; ENSG00000104755; CTA
EANELLHTF

SEQ ID NO: 4372 - protein, 9 aa, Homo sapiens
  misc_feature: Table A; Target 4372; HLA-B*57:01; ADAM2; ENSG00000104755; CTA
EANELLHTF

SEQ ID NO: 4373 - protein, 9 aa, Homo sapiens
  misc_feature: Table A; Target 4373; HLA-B*58:01; ADAM2; ENSG00000104755; CTA
EANELLHTF

SEQ ID NO: 4374 - protein, 9 aa, Homo sapiens
  misc_feature: Table A; Target 4374; HLA-C*02:02; ADAM2; ENSG00000104755; CTA
EANELLHTF

SEQ ID NO: 4375 - protein, 9 aa, Homo sapiens
  misc_feature: Table A; Target 4375; HLA-C*03:03; ADAM2; ENSG00000104755; CTA
EANELLHTF

SEQ ID NO: 4376 - protein, 9 aa, Homo sapiens
  misc_feature: Table A; Target 4376; HLA-C*05:01; ADAM2; ENSG00000104755; CTA
EANELLHTF

SEQ ID NO: 4377 - protein, 9 aa, Homo sapiens
  misc_feature: Table A; Target 4377; HLA-C*07:06; ADAM2; ENSG00000104755; CTA
EANELLHTF

SEQ ID NO: 4378 - protein, 9 aa, Homo sapiens
  misc_feature: Table A; Target 4378; HLA-C*12:03; ADAM2; ENSG00000104755; CTA
EANELLHTF

SEQ ID NO: 4379 - protein, 9 aa, Homo sapiens
  misc_feature: Table A; Target 4379; HLA-C*16:01; ADAM2; ENSG00000104755; CTA
EANELLHTF

SEQ ID NO: 4380 - protein, 9 aa, Homo sapiens
  misc_feature: Table A; Target 4380; HLA-C*16:02; ADAM2; ENSG00000104755; CTA
EANELLHTF

SEQ ID NO: 4381 - protein, 9 aa, Homo sapiens
  misc_feature: Table A; Target 4381; HLA-C*16:04; ADAM2; ENSG00000104755; CTA
EANELLHTF

SEQ ID NO: 4382 - protein, 10 aa, Homo sapiens
  misc_feature: Table A; Target 4382; HLA-A*33:01; ADAM2; ENSG00000104755; CTA
EANELLHTFL

SEQ ID NO: 4383 - protein, 10 aa, Homo sapiens
  misc_feature: Table A; Target 4383; HLA-A*33:03; ADAM2; ENSG00000104755; CTA
EANELLHTFL

SEQ ID NO: 4384 - protein, 10 aa, Homo sapiens
  misc_feature: Table A; Target 4384; HLA-A*68:01; ADAM2; ENSG00000104755; CTA
EANELLHTFL

SEQ ID NO: 4385 - protein, 10 aa, Homo sapiens
  misc_feature: Table A; Target 4385; HLA-A*68:02; ADAM2; ENSG00000104755; CTA
EANELLHTFL

SEQ ID NO: 4386 - protein, 11 aa, Homo sapiens
  misc_feature: Table A; Target 4386; HLA-A*33:01; ADAM2; ENSG00000104755; CTA
EANELLHTFLR

SEQ ID NO: 4387 - protein, 9 aa, Homo sapiens
  misc_feature: Table A; Target 4387; HLA-A*33:01; ADAM2; ENSG00000104755; CTA
ECYSHLNSK

SEQ ID NO: 4388 - protein, 9 aa, Homo sapiens
  misc_feature: Table A; Target 4388; HLA-A*03:01; ADAM2; ENSG00000104755; CTA
EDFAHFISK

SEQ ID NO: 4389 - protein, 9 aa, Homo sapiens
  misc_feature: Table A; Target 4389; HLA-A*11:01; ADAM2; ENSG00000104755; CTA
EDFAHFISK

SEQ ID NO: 4390 - protein, 9 aa, Homo sapiens
  misc_feature: Table A; Target 4390; HLA-A*33:01; ADAM2; ENSG00000104755; CTA
EDFAHFISK

SEQ ID NO: 4391 - protein, 9 aa, Homo sapiens
  misc_feature: Table A; Target 4391; HLA-A*33:03; ADAM2; ENSG00000104755; CTA
EDFAHFISK

SEQ ID NO: 4392 - protein, 9 aa, Homo sapiens
  misc_feature: Table A; Target 4392; HLA-A*68:01; ADAM2; ENSG00000104755; CTA
EDFAHFISK

SEQ ID NO: 4393 - protein, 9 aa, Homo sapiens
  misc_feature: Table A; Target 4393; HLA-A*68:02; ADAM2; ENSG00000104755; CTA
EDFAHFISK

SEQ ID NO: 4394 - protein, 9 aa, Homo sapiens
  misc_feature: Table A; Target 4394; HLA-B*18:01; ADAM2; ENSG00000104755; CTA
EDFAHFISK

SEQ ID NO: 4395 - protein, 9 aa, Homo sapiens
  misc_feature: Table A; Target 4395; HLA-B*37:01; ADAM2; ENSG00000104755; CTA
EDFAHFISK

SEQ ID NO: 4396 - protein, 9 aa, Homo sapiens
  misc_feature: Table A; Target 4396; HLA-C*07:01; ADAM2; ENSG00000104755; CTA
EDFAHFISK

SEQ ID NO: 4397 - protein, 8 aa, Homo sapiens
  misc_feature: Table A; Target 4397; HLA-B*18:01; ADAM2; ENSG00000104755; CTA
EECDLPEY

SEQ ID NO: 4398 - protein, 9 aa, Homo sapiens
  misc_feature: Table A; Target 4398; HLA-A*25:01; ADAM2; ENSG00000104755; CTA
EGIESQASY

SEQ ID NO: 4399 - protein, 9 aa, Homo sapiens
  misc_feature: Table A; Target 4399; HLA-A*26:01; ADAM2; ENSG00000104755; CTA
EGIESQASY

SEQ ID NO: 4400 - protein, 9 aa, Homo sapiens
  misc_feature: Table A; Target 4400; HLA-A*30:02; ADAM2; ENSG00000104755; CTA
EGIESQASY

SEQ ID NO: 4401 - protein, 9 aa, Homo sapiens
  misc_feature: Table A; Target 4401; HLA-A*32:01; ADAM2; ENSG00000104755; CTA
EGIESQASY

SEQ ID NO: 4402 - protein, 9 aa, Homo sapiens
  misc_feature: Table A; Target 4402; HLA-B*15:01; ADAM2; ENSG00000104755; CTA
EGIESQASY

SEQ ID NO: 4403 - protein, 9 aa, Homo sapiens
  misc_feature: Table A; Target 4403; HLA-B*15:03; ADAM2; ENSG00000104755; CTA
EGIESQASY

SEQ ID NO: 4404 - protein, 9 aa, Homo sapiens
  misc_feature: Table A; Target 4404; HLA-B*18:01; ADAM2; ENSG00000104755; CTA
EGIESQASY

SEQ ID NO: 4405 - protein, 9 aa, Homo sapiens
  misc_feature: Table A; Target 4405; HLA-B*35:01; ADAM2; ENSG00000104755; CTA
EGIESQASY

SEQ ID NO: 4406 - protein, 9 aa, Homo sapiens
  misc_feature: Table A; Target 4406; HLA-B*39:01; ADAM2; ENSG00000104755; CTA
EGIESQASY

SEQ ID NO: 4407 - protein, 9 aa, Homo sapiens
  misc_feature: Table A; Target 4407; HLA-B*44:02; ADAM2; ENSG00000104755; CTA
EGIESQASY

SEQ ID NO: 4408 - protein, 9 aa, Homo sapiens
  misc_feature: Table A; Target 4408; HLA-B*44:03; ADAM2; ENSG00000104755; CTA
EGIESQASY

SEQ ID NO: 4409 - protein, 9 aa, Homo sapiens
  misc_feature: Table A; Target 4409; HLA-B*46:01; ADAM2; ENSG00000104755; CTA
EGIESQASY

SEQ ID NO: 4410 - protein, 9 aa, Homo sapiens
  misc_feature: Table A; Target 4410; HLA-C*01:02; ADAM2; ENSG00000104755; CTA
EGIESQASY

SEQ ID NO: 4411 - protein, 9 aa, Homo sapiens
  misc_feature: Table A; Target 4411; HLA-C*07:06; ADAM2; ENSG00000104755; CTA
EGIESQASY

SEQ ID NO: 4412 - protein, 9 aa, Homo sapiens
  misc_feature: Table A; Target 4412; HLA-C*14:02; ADAM2; ENSG00000104755; CTA
EGIESQASY

SEQ ID NO: 4413 - protein, 9 aa, Homo sapiens
  misc_feature: Table A; Target 4413; HLA-C*16:04; ADAM2; ENSG00000104755; CTA
EGIESQASY

SEQ ID NO: 4414 - protein, 10 aa, Homo sapiens
  misc_feature: Table A; Target 4414; HLA-A*68:01; ADAM2; ENSG00000104755; CTA
EGIESQASYK

SEQ ID NO: 4415 - protein, 9 aa, Homo sapiens
  misc_feature: Table A; Target 4415; HLA-A*33:03; ADAM2; ENSG00000104755; CTA
EGKPYTVNL

SEQ ID NO: 4416 - protein, 9 aa, Homo sapiens
  misc_feature: Table A; Target 4416; HLA-B*08:01; ADAM2; ENSG00000104755; CTA
EGKPYTVNL

SEQ ID NO: 4417 - protein, 8 aa, Homo sapiens
  misc_feature: Table A; Target 4417; HLA-B*08:01; ADAM2; ENSG00000104755; CTA
EGYPKSVV

SEQ ID NO: 4418 - protein, 8 aa, Homo sapiens
  misc_feature: Table A; Target 4418; HLA-B*51:01; ADAM2; ENSG00000104755; CTA
EGYPKSVV

SEQ ID NO: 4419 - protein, 8 aa, Homo sapiens
  misc_feature: Table A; Target 4419; HLA-C*07:01; ADAM2; ENSG00000104755; CTA
EGYPKSVV

SEQ ID NO: 4420 - protein, 8 aa, Homo sapiens
  misc_feature: Table A; Target 4420; HLA-C*12:03; ADAM2; ENSG00000104755; CTA
EGYPKSVV

SEQ ID NO: 4421 - protein, 9 aa, Homo sapiens
  misc_feature: Table A; Target 4421; HLA-A*25:01; ADAM2; ENSG00000104755; CTA
EGYPKSVVM

SEQ ID NO: 4422 - protein, 9 aa, Homo sapiens
  misc_feature: Table A; Target 4422; HLA-A*26:01; ADAM2; ENSG00000104755; CTA
EGYPKSVVM

SEQ ID NO: 4423 - protein, 9 aa, Homo sapiens
  misc_feature: Table A; Target 4423; HLA-A*30:01; ADAM2; ENSG00000104755; CTA
EGYPKSVVM

SEQ ID NO: 4424 - protein, 9 aa, Homo sapiens
  misc_feature: Table A; Target 4424; HLA-B*08:01; ADAM2; ENSG00000104755; CTA
EGYPKSVVM

SEQ ID NO: 4425 - protein, 9 aa, Homo sapiens
  misc_feature: Table A; Target 4425; HLA-B*15:01; ADAM2; ENSG00000104755; CTA
EGYPKSVVM

SEQ ID NO: 4426 - protein, 9 aa, Homo sapiens
  misc_feature: Table A; Target 4426; HLA-B*15:03; ADAM2; ENSG00000104755; CTA
EGYPKSVVM

SEQ ID NO: 4427 - protein, 9 aa, Homo sapiens
  misc_feature: Table A; Target 4427; HLA-B*18:01; ADAM2; ENSG00000104755; CTA
EGYPKSVVM

SEQ ID NO: 4428 - protein, 9 aa, Homo sapiens
  misc_feature: Table A; Target 4428; HLA-B*35:01; ADAM2; ENSG00000104755; CTA
EGYPKSVVM

SEQ ID NO: 4429 - protein, 9 aa, Homo sapiens
  misc_feature: Table A; Target 4429; HLA-B*35:03; ADAM2; ENSG00000104755; CTA
EGYPKSVVM

SEQ ID NO: 4430 - protein, 9 aa, Homo sapiens
  misc_feature: Table A; Target 4430; HLA-B*37:01; ADAM2; ENSG00000104755; CTA
EGYPKSVVM

SEQ ID NO: 4431 - protein, 9 aa, Homo sapiens
  misc_feature: Table A; Target 4431; HLA-B*38:01; ADAM2; ENSG00000104755; CTA
EGYPKSVVM

SEQ ID NO: 4432 - protein, 9 aa, Homo sapiens
  misc_feature: Table A; Target 4432; HLA-B*39:01; ADAM2; ENSG00000104755; CTA
EGYPKSVVM

SEQ ID NO: 4433 - protein, 9 aa, Homo sapiens
  misc_feature: Table A; Target 4433; HLA-B*40:01; ADAM2; ENSG00000104755; CTA
EGYPKSVVM

SEQ ID NO: 4434 - protein, 9 aa, Homo sapiens
  misc_feature: Table A; Target 4434; HLA-B*40:02; ADAM2; ENSG00000104755; CTA
EGYPKSVVM

SEQ ID NO: 4435 - protein, 9 aa, Homo sapiens
  misc_feature: Table A; Target 4435; HLA-B*46:01; ADAM2; ENSG00000104755; CTA
EGYPKSVVM

SEQ ID NO: 4436 - protein, 9 aa, Homo sapiens
  misc_feature: Table A; Target 4436; HLA-B*51:01; ADAM2; ENSG00000104755; CTA
EGYPKSVVM

SEQ ID NO: 4437 - protein, 9 aa, Homo sapiens
  misc_feature: Table A; Target 4437; HLA-B*55:01; ADAM2; ENSG00000104755; CTA
EGYPKSVVM

SEQ ID NO: 4438 - protein, 9 aa, Homo sapiens
  misc_feature: Table A; Target 4438; HLA-C*02:02; ADAM2; ENSG00000104755; CTA
EGYPKSVVM

SEQ ID NO: 4439 - protein, 9 aa, Homo sapiens
  misc_feature: Table A; Target 4439; HLA-C*03:03; ADAM2; ENSG00000104755; CTA
EGYPKSVVM

SEQ ID NO: 4440 - protein, 9 aa, Homo sapiens
  misc_feature: Table A; Target 4440; HLA-C*03:04; ADAM2; ENSG00000104755; CTA
EGYPKSVVM

SEQ ID NO: 4441 - protein, 9 aa, Homo sapiens
  misc_feature: Table A; Target 4441; HLA-C*05:01; ADAM2; ENSG00000104755; CTA
EGYPKSVVM

SEQ ID NO: 4442 - protein, 9 aa, Homo sapiens
  misc_feature: Table A; Target 4442; HLA-C*07:01; ADAM2; ENSG00000104755; CTA
EGYPKSVVM

SEQ ID NO: 4443 - protein, 9 aa, Homo sapiens
  misc_feature: Table A; Target 4443; HLA-C*07:04; ADAM2; ENSG00000104755; CTA
EGYPKSVVM

SEQ ID NO: 4444 - protein, 9 aa, Homo sapiens
  misc_feature: Table A; Target 4444; HLA-C*07:06; ADAM2; ENSG00000104755; CTA
EGYPKSVVM

SEQ ID NO: 4445 - protein, 9 aa, Homo sapiens
  misc_feature: Table A; Target 4445; HLA-C*12:03; ADAM2; ENSG00000104755; CTA
EGYPKSVVM

SEQ ID NO: 4446 - protein, 9 aa, Homo sapiens
  misc_feature: Table A; Target 4446; HLA-C*14:02; ADAM2; ENSG00000104755; CTA
EGYPKSVVM

SEQ ID NO: 4447 - protein, 9 aa, Homo sapiens
  misc_feature: Table A; Target 4447; HLA-C*16:01; ADAM2; ENSG00000104755; CTA
EGYPKSVVM

SEQ ID NO: 4448 - protein, 10 aa, Homo sapiens
  misc_feature: Table A; Target 4448; HLA-A*68:02; ADAM2; ENSG00000104755; CTA
EGYPKSVVMV

SEQ ID NO: 4449 - protein, 10 aa, Homo sapiens
  misc_feature: Table A; Target 4449; HLA-B*51:01; ADAM2; ENSG00000104755; CTA
EGYPKSVVMV

SEQ ID NO: 4450 - protein, 8 aa, Homo sapiens
  misc_feature: Table A; Target 4450; HLA-C*07:01; ADAM2; ENSG00000104755; CTA
EHVIYQVK

SEQ ID NO: 4451 - protein, 10 aa, Homo sapiens
  misc_feature: Table A; Target 4451; HLA-B*15:03; ADAM2; ENSG00000104755; CTA
EKSNYVGATF

SEQ ID NO: 4452 - protein, 10 aa, Homo sapiens
  misc_feature: Table A; Target 4452; HLA-B*38:01; ADAM2; ENSG00000104755; CTA
EKSNYVGATF

SEQ ID NO: 4453 - protein, 8 aa, Homo sapiens
  misc_feature: Table A; Target 4453; HLA-A*33:01; ADAM2; ENSG00000104755; CTA
EMHVIVEK

SEQ ID NO: 4454 - protein, 8 aa, Homo sapiens
  misc_feature: Table A; Target 4454; HLA-A*33:03; ADAM2; ENSG00000104755; CTA
EMHVIVEK

SEQ ID NO: 4455 - protein, 8 aa, Homo sapiens
  misc_feature: Table A; Target 4455; HLA-C*04:01; ADAM2; ENSG00000104755; CTA
EMHVIVEK

SEQ ID NO: 4456 - protein, 8 aa, Homo sapiens
  misc_feature: Table A; Target 4456; HLA-C*07:01; ADAM2; ENSG00000104755; CTA
EMHVIVEK

SEQ ID NO: 4457 - protein, 11 aa, Homo sapiens
  misc_feature: Table A; Target 4457; HLA-A*01:01; ADAM2; ENSG00000104755; CTA
EMHVIVEKQLY

SEQ ID NO: 4458 - protein, 10 aa, Homo sapiens
  misc_feature: Table A; Target 4458; HLA-A*33:01; ADAM2; ENSG00000104755; CTA
ENVSYGIEPL

SEQ ID NO: 4459 - protein, 9 aa, Homo sapiens
  misc_feature: Table A; Target 4459; HLA-A*23:01; ADAM2; ENSG00000104755; CTA
EPLESSVGF

SEQ ID NO: 4460 - protein, 9 aa, Homo sapiens
  misc_feature: Table A; Target 4460; HLA-A*25:01; ADAM2; ENSG00000104755; CTA
EPLESSVGF

SEQ ID NO: 4461 - protein, 9 aa, Homo sapiens
  misc_feature: Table A; Target 4461; HLA-A*26:01; ADAM2; ENSG00000104755; CTA
EPLESSVGF

SEQ ID NO: 4462 - protein, 9 aa, Homo sapiens
  misc_feature: Table A; Target 4462; HLA-A*33:03; ADAM2; ENSG00000104755; CTA
EPLESSVGF

SEQ ID NO: 4463 - protein, 9 aa, Homo sapiens
  misc_feature: Table A; Target 4463; HLA-B*18:01; ADAM2; ENSG00000104755; CTA
EPLESSVGF

SEQ ID NO: 4464 - protein, 9 aa, Homo sapiens
  misc_feature: Table A; Target 4464; HLA-B*35:01; ADAM2; ENSG00000104755; CTA
EPLESSVGF

SEQ ID NO: 4465 - protein, 9 aa, Homo sapiens
  misc_feature: Table A; Target 4465; HLA-B*35:03; ADAM2; ENSG00000104755; CTA
EPLESSVGF

SEQ ID NO: 4466 - protein, 9 aa, Homo sapiens
  misc_feature: Table A; Target 4466; HLA-B*55:01; ADAM2; ENSG00000104755; CTA
EPLESSVGF

SEQ ID NO: 4467 - protein, 9 aa, Homo sapiens
  misc_feature: Table A; Target 4467; HLA-C*03:03; ADAM2; ENSG00000104755; CTA
EPLESSVGF

SEQ ID NO: 4468 - protein, 9 aa, Homo sapiens
  misc_feature: Table A; Target 4468; HLA-C*07:06; ADAM2; ENSG00000104755; CTA
EPLESSVGF

SEQ ID NO: 4469 - protein, 11 aa, Homo sapiens
  misc_feature: Table A; Target 4469; HLA-A*33:03; ADAM2; ENSG00000104755; CTA
EPLESSVGFEH

SEQ ID NO: 4470 - protein, 11 aa, Homo sapiens
  misc_feature: Table A; Target 4470; HLA-B*35:01; ADAM2; ENSG00000104755; CTA
EPLESSVGFEH

SEQ ID NO: 4471 - protein, 9 aa, Homo sapiens
  misc_feature: Table A; Target 4471; HLA-A*25:01; ADAM2; ENSG00000104755; CTA
EPQQDFAKY

SEQ ID NO: 4472 - protein, 9 aa, Homo sapiens
  misc_feature: Table A; Target 4472; HLA-A*26:01; ADAM2; ENSG00000104755; CTA
EPQQDFAKY

SEQ ID NO: 4473 - protein, 9 aa, Homo sapiens
  misc_feature: Table A; Target 4473; HLA-A*30:02; ADAM2; ENSG00000104755; CTA
EPQQDFAKY

SEQ ID NO: 4474 - protein, 9 aa, Homo sapiens
  misc_feature: Table A; Target 4474; HLA-A*33:03; ADAM2; ENSG00000104755; CTA
EPQQDFAKY

SEQ ID NO: 4475 - protein, 9 aa, Homo sapiens
  misc_feature: Table A; Target 4475; HLA-B*35:01; ADAM2; ENSG00000104755; CTA
EPQQDFAKY

SEQ ID NO: 4476 - protein, 9 aa, Homo sapiens
  misc_feature: Table A; Target 4476; HLA-B*55:01; ADAM2; ENSG00000104755; CTA
EPQQDFAKY

SEQ ID NO: 4477 - protein, 9 aa, Homo sapiens
  misc_feature: Table A; Target 4477; HLA-C*03:03; ADAM2; ENSG00000104755; CTA
EPQQDFAKY

SEQ ID NO: 4478 - protein, 9 aa, Homo sapiens
  misc_feature: Table A; Target 4478; HLA-A*33:03; ADAM2; ENSG00000104755; CTA
ESLAVILAQ

SEQ ID NO: 4479 - protein, 9 aa, Homo sapiens
  misc_feature: Table A; Target 4479; HLA-C*07:06; ADAM2; ENSG00000104755; CTA
ESLAVILAQ

SEQ ID NO: 4480 - protein, 10 aa, Homo sapiens
  misc_feature: Table A; Target 4480; HLA-A*33:03; ADAM2; ENSG00000104755; CTA
ESLAVILAQL

SEQ ID NO: 4481 - protein, 10 aa, Homo sapiens
  misc_feature: Table A; Target 4481; HLA-A*68:02; ADAM2; ENSG00000104755; CTA
ESLAVILAQL

SEQ ID NO: 4482 - protein, 9 aa, Homo sapiens
  misc_feature: Table A; Target 4482; HLA-A*33:03; ADAM2; ENSG00000104755; CTA
ESRDLSFKL

SEQ ID NO: 4483 - protein, 9 aa, Homo sapiens
  misc_feature: Table A; Target 4483; HLA-A*68:02; ADAM2; ENSG00000104755; CTA
ESSVGFEHV

SEQ ID NO: 4484 - protein, 10 aa, Homo sapiens
  misc_feature: Table A; Target 4484; HLA-A*33:03; ADAM2; ENSG00000104755; CTA
ETCCDIATCR

SEQ ID NO: 4485 - protein, 10 aa, Homo sapiens
  misc_feature: Table A; Target 4485; HLA-A*68:01; ADAM2; ENSG00000104755; CTA
ETCCDIATCR

SEQ ID NO: 4486 - protein, 10 aa, Homo sapiens
  misc_feature: Table A; Target 4486; HLA-A*01:01; ADAM2; ENSG00000104755; CTA
EVEFGPSECY

SEQ ID NO: 4487 - protein, 10 aa, Homo sapiens
  misc_feature: Table A; Target 4487; HLA-A*25:01; ADAM2; ENSG00000104755; CTA
EVEFGPSECY

SEQ ID NO: 4488 - protein, 10 aa, Homo sapiens
  misc_feature: Table A; Target 4488; HLA-A*26:01; ADAM2; ENSG00000104755; CTA
EVEFGPSECY

SEQ ID NO: 4489 - protein, 10 aa, Homo sapiens
  misc_feature: Table A; Target 4489; HLA-A*30:02; ADAM2; ENSG00000104755; CTA
EVEFGPSECY

SEQ ID NO: 4490 - protein, 10 aa, Homo sapiens
  misc_feature: Table A; Target 4490; HLA-B*15:01; ADAM2; ENSG00000104755; CTA
EVEFGPSECY

SEQ ID NO: 4491 - protein, 9 aa, Homo sapiens
  misc_feature: Table A; Target 4491; HLA-A*33:01; ADAM2; ENSG00000104755; CTA
FAHFISKQK

SEQ ID NO: 4492 - protein, 9 aa, Homo sapiens
  misc_feature: Table A; Target 4492; HLA-A*68:02; ADAM2; ENSG00000104755; CTA
FAKYIEMHV

SEQ ID NO: 4493 - protein, 11 aa, Homo sapiens
  misc_feature: Table A; Target 4493; HLA-B*35:01; ADAM2; ENSG00000104755; CTA
FASDHADSQKM

SEQ ID NO: 4494 - protein, 8 aa, Homo sapiens
  misc_feature: Table A; Target 4494; HLA-B*37:01; ADAM2; ENSG00000104755; CTA
FDSLPVQI

SEQ ID NO: 4495 - protein, 8 aa, Homo sapiens
  misc_feature: Table A; Target 4495; HLA-B*38:01; ADAM2; ENSG00000104755; CTA
FDSLPVQI

SEQ ID NO: 4496 - protein, 8 aa, Homo sapiens
  misc_feature: Table A; Target 4496; HLA-B*49:01; ADAM2; ENSG00000104755; CTA
FDSLPVQI

SEQ ID NO: 4497 - protein, 8 aa, Homo sapiens
  misc_feature: Table A; Target 4497; HLA-C*07:04; ADAM2; ENSG00000104755; CTA
FDSLPVQI

SEQ ID NO: 4498 - protein, 10 aa, Homo sapiens
  misc_feature: Table A; Target 4498; HLA-A*68:02; ADAM2; ENSG00000104755; CTA
FDSLPVQITV

SEQ ID NO: 4499 - protein, 8 aa, Homo sapiens
  misc_feature: Table A; Target 4499; HLA-B*44:02; ADAM2; ENSG00000104755; CTA
FEDFAHFI

SEQ ID NO: 4500 - protein, 8 aa, Homo sapiens
  misc_feature: Table A; Target 4500; HLA-B*49:01; ADAM2; ENSG00000104755; CTA
FEDFAHFI

SEQ ID NO: 4501 - protein, 9 aa, Homo sapiens
  misc_feature: Table A; Target 4501; HLA-A*01:01; ADAM2; ENSG00000104755; CTA
FEECDLPEY

SEQ ID NO: 4502 - protein, 9 aa, Homo sapiens
  misc_feature: Table A; Target 4502; HLA-B*18:01; ADAM2; ENSG00000104755; CTA
FEECDLPEY

SEQ ID NO: 4503 - protein, 8 aa, Homo sapiens
  misc_feature: Table A; Target 4503; HLA-A*30:01; ADAM2; ENSG00000104755; CTA
FEHVIYQV

SEQ ID NO: 4504 - protein, 8 aa, Homo sapiens
  misc_feature: Table A; Target 4504; HLA-B*13:02; ADAM2; ENSG00000104755; CTA
FEHVIYQV

SEQ ID NO: 4505 - protein, 8 aa, Homo sapiens
  misc_feature: Table A; Target 4505; HLA-B*18:01; ADAM2; ENSG00000104755; CTA
FEHVIYQV

SEQ ID NO: 4506 - protein, 8 aa, Homo sapiens
  misc_feature: Table A; Target 4506; HLA-B*37:01; ADAM2; ENSG00000104755; CTA
FEHVIYQV

SEQ ID NO: 4507 - protein, 8 aa, Homo sapiens
  misc_feature: Table A; Target 4507; HLA-B*40:02; ADAM2; ENSG00000104755; CTA
FEHVIYQV

SEQ ID NO: 4508 - protein, 8 aa, Homo sapiens
  misc_feature: Table A; Target 4508; HLA-B*49:01; ADAM2; ENSG00000104755; CTA
FEHVIYQV

SEQ ID NO: 4509 - protein, 9 aa, Homo sapiens
  misc_feature: Table A; Target 4509; HLA-B*18:01; ADAM2; ENSG00000104755; CTA
FEHVIYQVK

SEQ ID NO: 4510 - protein, 9 aa, Homo sapiens
  misc_feature: Table A; Target 4510; HLA-B*27:02; ADAM2; ENSG00000104755; CTA
FEHVIYQVK

SEQ ID NO: 4511 - protein, 9 aa, Homo sapiens
  misc_feature: Table A; Target 4511; HLA-B*40:02; ADAM2; ENSG00000104755; CTA
FEHVIYQVK

SEQ ID NO: 4512 - protein, 9 aa, Homo sapiens
  misc_feature: Table A; Target 4512; HLA-B*44:02; ADAM2; ENSG00000104755; CTA
FEHVIYQVK

SEQ ID NO: 4513 - protein, 9 aa, Homo sapiens
  misc_feature: Table A; Target 4513; HLA-B*49:01; ADAM2; ENSG00000104755; CTA
FEHVIYQVK

SEQ ID NO: 4514 - protein, 8 aa, Homo sapiens
  misc_feature: Table A; Target 4514; HLA-B*18:01; ADAM2; ENSG00000104755; CTA
FENVSYGI

SEQ ID NO: 4515 - protein, 8 aa, Homo sapiens
  misc_feature: Table A; Target 4515; HLA-B*37:01; ADAM2; ENSG00000104755; CTA
FENVSYGI

SEQ ID NO: 4516 - protein, 8 aa, Homo sapiens
  misc_feature: Table A; Target 4516; HLA-B*49:01; ADAM2; ENSG00000104755; CTA
FENVSYGI

SEQ ID NO: 4517 - protein, 10 aa, Homo sapiens
  misc_feature: Table A; Target 4517; HLA-C*07:02; ADAM2; ENSG00000104755; CTA
FGPSECYSHL

SEQ ID NO: 4518 - protein, 8 aa, Homo sapiens
  misc_feature: Table A; Target 4518; HLA-A*02:04; ADAM2; ENSG00000104755; CTA
FLLQIPRA

SEQ ID NO: 4519 - protein, 10 aa, Homo sapiens
  misc_feature: Table A; Target 4519; HLA-A*02:03; ADAM2; ENSG00000104755; CTA
FLLQIPRATI

SEQ ID NO: 4520 - protein, 10 aa, Homo sapiens
  misc_feature: Table A; Target 4520; HLA-A*02:04; ADAM2; ENSG00000104755; CTA
FLLQIPRATI

SEQ ID NO: 4521 - protein, 11 aa, Homo sapiens
  misc_feature: Table A; Target 4521; HLA-A*02:04; ADAM2; ENSG00000104755; CTA
FLLQIPRATII

SEQ ID NO: 4522 - protein, 9 aa, Homo sapiens
  misc_feature: Table A; Target 4522; HLA-A*02:01; ADAM2; ENSG00000104755; CTA
FLLSGLGGL

SEQ ID NO: 4523 - protein, 9 aa, Homo sapiens
  misc_feature: Table A; Target 4523; HLA-A*02:03; ADAM2; ENSG00000104755; CTA
FLLSGLGGL

SEQ ID NO: 4524 - protein, 9 aa, Homo sapiens
  misc_feature: Table A; Target 4524; HLA-A*02:04; ADAM2; ENSG00000104755; CTA
FLLSGLGGL

SEQ ID NO: 4525 - protein, 9 aa, Homo sapiens
  misc_feature: Table A; Target 4525; HLA-A*02:07; ADAM2; ENSG00000104755; CTA
FLLSGLGGL

SEQ ID NO: 4526 - protein, 11 aa, Homo sapiens
  misc_feature: Table A; Target 4526; HLA-A*02:04; ADAM2; ENSG00000104755; CTA
FLLSGLGGLRM

SEQ ID NO: 4527 - protein, 11 aa, Homo sapiens
  misc_feature: Table A; Target 4527; HLA-A*29:02; ADAM2; ENSG00000104755; CTA
FLLSGLGGLRM

SEQ ID NO: 4528 - protein, 8 aa, Homo sapiens
  misc_feature: Table A; Target 4528; HLA-A*02:07; ADAM2; ENSG00000104755; CTA
FLPHNFRV

SEQ ID NO: 4529 - protein, 9 aa, Homo sapiens
  misc_feature: Table A; Target 4529; HLA-A*02:07; ADAM2; ENSG00000104755; CTA
FLPHNFRVY

SEQ ID NO: 4530 - protein, 9 aa, Homo sapiens
  misc_feature: Table A; Target 4530; HLA-A*24:02; ADAM2; ENSG00000104755; CTA
FLPHNFRVY

SEQ ID NO: 4531 - protein, 9 aa, Homo sapiens
  misc_feature: Table A; Target 4531; HLA-A*29:02; ADAM2; ENSG00000104755; CTA
FLPHNFRVY

SEQ ID NO: 4532 - protein, 11 aa, Homo sapiens
  misc_feature: Table A; Target 4532; HLA-A*29:02; ADAM2; ENSG00000104755; CTA
FLPHNFRVYSY

SEQ ID NO: 4533 - protein, 9 aa, Homo sapiens
  misc_feature: Table A; Target 4533; HLA-A*02:03; ADAM2; ENSG00000104755; CTA
FLRWKTSYL

SEQ ID NO: 4534 - protein, 9 aa, Homo sapiens
  misc_feature: Table A; Target 4534; HLA-A*02:04; ADAM2; ENSG00000104755; CTA
FLRWKTSYL

SEQ ID NO: 4535 - protein, 8 aa, Homo sapiens
  misc_feature: Table A; Target 4535; HLA-B*54:01; ADAM2; ENSG00000104755; CTA
FPPVAIPA

SEQ ID NO: 4536 - protein, 9 aa, Homo sapiens
  misc_feature: Table A; Target 4536; HLA-B*35:01; ADAM2; ENSG00000104755; CTA
FPPVAIPAR

SEQ ID NO: 4537 - protein, 9 aa, Homo sapiens
  misc_feature: Table A; Target 4537; HLA-B*54:01; ADAM2; ENSG00000104755; CTA
FPPVAIPAR

SEQ ID NO: 4538 - protein, 10 aa, Homo sapiens
  misc_feature: Table A; Target 4538; HLA-C*07:01; ADAM2; ENSG00000104755; CTA
FQGKMCDANY

SEQ ID NO: 4539 - protein, 9 aa, Homo sapiens
  misc_feature: Table A; Target 4539; HLA-A*02:03; ADAM2; ENSG00000104755; CTA
FVSFNITII

SEQ ID NO: 4540 - protein, 9 aa, Homo sapiens
  misc_feature: Table A; Target 4540; HLA-A*68:02; ADAM2; ENSG00000104755; CTA
FVSFNITII

SEQ ID NO: 4541 - protein, 8 aa, Homo sapiens
  misc_feature: Table A; Target 4541; HLA-C*16:02; ADAM2; ENSG00000104755; CTA
GATFQGKM

SEQ ID NO: 4542 - protein, 9 aa, Homo sapiens
  misc_feature: Table A; Target 4542; HLA-B*49:01; ADAM2; ENSG00000104755; CTA
GEANELLHT

SEQ ID NO: 4543 - protein, 10 aa, Homo sapiens
  misc_feature: Table A; Target 4543; HLA-A*25:01; ADAM2; ENSG00000104755; CTA
GEANELLHTF

SEQ ID NO: 4544 - protein, 10 aa, Homo sapiens
  misc_feature: Table A; Target 4544; HLA-A*30:01; ADAM2; ENSG00000104755; CTA
GEANELLHTF

SEQ ID NO: 4545 - protein, 10 aa, Homo sapiens
  misc_feature: Table A; Target 4545; HLA-A*30:02; ADAM2; ENSG00000104755; CTA
GEANELLHTF

SEQ ID NO: 4546 - protein, 10 aa, Homo sapiens
  misc_feature: Table A; Target 4546; HLA-B*15:01; ADAM2; ENSG00000104755; CTA
GEANELLHTF

SEQ ID NO: 4547 - protein, 10 aa, Homo sapiens
  misc_feature: Table A; Target 4547; HLA-B*15:03; ADAM2; ENSG00000104755; CTA
GEANELLHTF

SEQ ID NO: 4548 - protein, 10 aa, Homo sapiens
  misc_feature: Table A; Target 4548; HLA-B*18:01; ADAM2; ENSG00000104755; CTA
GEANELLHTF

SEQ ID NO: 4549 - protein, 10 aa, Homo sapiens
  misc_feature: Table A; Target 4549; HLA-B*27:02; ADAM2; ENSG00000104755; CTA
GEANELLHTF

SEQ ID NO: 4550 - protein, 10 aa, Homo sapiens
  misc_feature: Table A; Target 4550; HLA-B*27:05; ADAM2; ENSG00000104755; CTA
GEANELLHTF

SEQ ID NO: 4551 - protein, 10 aa, Homo sapiens
  misc_feature: Table A; Target 4551; HLA-B*37:01; ADAM2; ENSG00000104755; CTA
GEANELLHTF

SEQ ID NO: 4552 - protein, 10 aa, Homo sapiens
  misc_feature: Table A; Target 4552; HLA-B*38:01; ADAM2; ENSG00000104755; CTA
GEANELLHTF

SEQ ID NO: 4553 - protein, 10 aa, Homo sapiens
  misc_feature: Table A; Target 4553; HLA-B*40:01; ADAM2; ENSG00000104755; CTA
GEANELLHTF

SEQ ID NO: 4554 - protein, 10 aa, Homo sapiens
  misc_feature: Table A; Target 4554; HLA-B*40:02; ADAM2; ENSG00000104755; CTA
GEANELLHTF

SEQ ID NO: 4555 - protein, 10 aa, Homo sapiens
  misc_feature: Table A; Target 4555; HLA-B*49:01; ADAM2; ENSG00000104755; CTA
GEANELLHTF

SEQ ID NO: 4556 - protein, 10 aa, Homo sapiens
  misc_feature: Table A; Target 4556; HLA-B*57:01; ADAM2; ENSG00000104755; CTA
GEANELLHTF

SEQ ID NO: 4557 - protein, 10 aa, Homo sapiens
  misc_feature: Table A; Target 4557; HLA-C*02:02; ADAM2; ENSG00000104755; CTA
GEANELLHTF

SEQ ID NO: 4558 - protein, 10 aa, Homo sapiens
  misc_feature: Table A; Target 4558; HLA-C*16:04; ADAM2; ENSG00000104755; CTA
GEANELLHTF

SEQ ID NO: 4559 - protein, 11 aa, Homo sapiens
  misc_feature: Table A; Target 4559; HLA-A*30:01; ADAM2; ENSG00000104755; CTA
GEANELLHTFL

SEQ ID NO: 4560 - protein, 11 aa, Homo sapiens
  misc_feature: Table A; Target 4560; HLA-B*40:01; ADAM2; ENSG00000104755; CTA
GEANELLHTFL

SEQ ID NO: 4561 - protein, 11 aa, Homo sapiens
  misc_feature: Table A; Target 4561; HLA-B*44:02; ADAM2; ENSG00000104755; CTA
GEANELLHTFL

SEQ ID NO: 4562 - protein, 11 aa, Homo sapiens
  misc_feature: Table A; Target 4562; HLA-B*49:01; ADAM2; ENSG00000104755; CTA
GEANELLHTFL

SEQ ID NO: 4563 - protein, 9 aa, Homo sapiens
  misc_feature: Table A; Target 4563; HLA-B*15:03; ADAM2; ENSG00000104755; CTA
GHLCIAVEF

SEQ ID NO: 4564 - protein, 9 aa, Homo sapiens
  misc_feature: Table A; Target 4564; HLA-C*05:01; ADAM2; ENSG00000104755; CTA
GIEPLESSV

SEQ ID NO: 4565 - protein, 8 aa, Homo sapiens
  misc_feature: Table A; Target 4565; HLA-B*39:01; ADAM2; ENSG00000104755; CTA
GIESQASY

SEQ ID NO: 4566 - protein, 9 aa, Homo sapiens
  misc_feature: Table A; Target 4566; HLA-A*03:01; ADAM2; ENSG00000104755; CTA
GIESQASYK

SEQ ID NO: 4567 - protein, 9 aa, Homo sapiens
  misc_feature: Table A; Target 4567; HLA-A*03:02; ADAM2; ENSG00000104755; CTA
GIESQASYK

SEQ ID NO: 4568 - protein, 9 aa, Homo sapiens
  misc_feature: Table A; Target 4568; HLA-A*11:01; ADAM2; ENSG00000104755; CTA
GIESQASYK

SEQ ID NO: 4569 - protein, 9 aa, Homo sapiens
  misc_feature: Table A; Target 4569; HLA-A*03:02; ADAM2; ENSG00000104755; CTA
GITYDDINK

SEQ ID NO: 4570 - protein, 9 aa, Homo sapiens
  misc_feature: Table A; Target 4570; HLA-A*11:01; ADAM2; ENSG00000104755; CTA
GITYDDINK

SEQ ID NO: 4571 - protein, 9 aa, Homo sapiens
  misc_feature: Table A; Target 4571; HLA-B*27:02; ADAM2; ENSG00000104755; CTA
GITYDDINK

SEQ ID NO: 4572 - protein, 9 aa, Homo sapiens
  misc_feature: Table A; Target 4572; HLA-B*15:03; ADAM2; ENSG00000104755; CTA
GKPYTVNLM

SEQ ID NO: 4573 - protein, 8 aa, Homo sapiens
  misc_feature: Table A; Target 4573; HLA-B*13:02; ADAM2; ENSG00000104755; CTA
GLTNAIFV

SEQ ID NO: 4574 - protein, 10 aa, Homo sapiens
  misc_feature: Table A; Target 4574; HLA-A*02:04; ADAM2; ENSG00000104755; CTA
GLTNAIFVSF

SEQ ID NO: 4575 - protein, 10 aa, Homo sapiens
  misc_feature: Table A; Target 4575; HLA-A*23:01; ADAM2; ENSG00000104755; CTA
GLTNAIFVSF

SEQ ID NO: 4576 - protein, 10 aa, Homo sapiens
  misc_feature: Table A; Target 4576; HLA-A*24:02; ADAM2; ENSG00000104755; CTA
GLTNAIFVSF

SEQ ID NO: 4577 - protein, 10 aa, Homo sapiens
  misc_feature: Table A; Target 4577; HLA-A*25:01; ADAM2; ENSG00000104755; CTA
GLTNAIFVSF

SEQ ID NO: 4578 - protein, 10 aa, Homo sapiens
  misc_feature: Table A; Target 4578; HLA-A*29:02; ADAM2; ENSG00000104755; CTA
GLTNAIFVSF

SEQ ID NO: 4579 - protein, 10 aa, Homo sapiens
  misc_feature: Table A; Target 4579; HLA-B*15:01; ADAM2; ENSG00000104755; CTA
GLTNAIFVSF

SEQ ID NO: 4580 - protein, 10 aa, Homo sapiens
  misc_feature: Table A; Target 4580; HLA-B*15:03; ADAM2; ENSG00000104755; CTA
GLTNAIFVSF

SEQ ID NO: 4581 - protein, 10 aa, Homo sapiens
  misc_feature: Table A; Target 4581; HLA-C*07:01; ADAM2; ENSG00000104755; CTA
GNCGISDSGY

SEQ ID NO: 4582 - protein, 8 aa, Homo sapiens
  misc_feature: Table A; Target 4582; HLA-B*13:02; ADAM2; ENSG00000104755; CTA
GNFPPVAI

SEQ ID NO: 4583 - protein, 9 aa, Homo sapiens
  misc_feature: Table A; Target 4583; HLA-B*07:02; ADAM2; ENSG00000104755; CTA
GPSECYSHL

SEQ ID NO: 4584 - protein, 9 aa, Homo sapiens
  misc_feature: Table A; Target 4584; HLA-C*07:02; ADAM2; ENSG00000104755; CTA
GPSECYSHL

SEQ ID NO: 4585 - protein, 8 aa, Homo sapiens
  misc_feature: Table A; Target 4585; HLA-C*05:01; ADAM2; ENSG00000104755; CTA
GSDTTVVA

SEQ ID NO: 4586 - protein, 10 aa, Homo sapiens
  misc_feature: Table A; Target 4586; HLA-A*01:01; ADAM2; ENSG00000104755; CTA
GSDTTVVAQK

SEQ ID NO: 4587 - protein, 10 aa, Homo sapiens
  misc_feature: Table A; Target 4587; HLA-A*03:01; ADAM2; ENSG00000104755; CTA
GSDTTVVAQK

SEQ ID NO: 4588 - protein, 10 aa, Homo sapiens
  misc_feature: Table A; Target 4588; HLA-A*03:02; ADAM2; ENSG00000104755; CTA
GSDTTVVAQK

SEQ ID NO: 4589 - protein, 10 aa, Homo sapiens
  misc_feature: Table A; Target 4589; HLA-A*11:01; ADAM2; ENSG00000104755; CTA
GSDTTVVAQK

SEQ ID NO: 4590 - protein, 10 aa, Homo sapiens
  misc_feature: Table A; Target 4590; HLA-A*68:01; ADAM2; ENSG00000104755; CTA
GSDTTVVAQK

SEQ ID NO: 4591 - protein, 10 aa, Homo sapiens
  misc_feature: Table A; Target 4591; HLA-B*27:02; ADAM2; ENSG00000104755; CTA
GSDTTVVAQK

SEQ ID NO: 4592 - protein, 10 aa, Homo sapiens
  misc_feature: Table A; Target 4592; HLA-C*07:06; ADAM2; ENSG00000104755; CTA
GSDTTVVAQK

SEQ ID NO: 4593 - protein, 11 aa, Homo sapiens
  misc_feature: Table A; Target 4593; HLA-A*01:01; ADAM2; ENSG00000104755; CTA
GSDTTVVAQKV

SEQ ID NO: 4594 - protein, 11 aa, Homo sapiens
  misc_feature: Table A; Target 4594; HLA-C*06:02; ADAM2; ENSG00000104755; CTA
GSDTTVVAQKV

SEQ ID NO: 4595 - protein, 11 aa, Homo sapiens
  misc_feature: Table A; Target 4595; HLA-C*16:02; ADAM2; ENSG00000104755; CTA
GSDTTVVAQKV

SEQ ID NO: 4596 - protein, 10 aa, Homo sapiens
  misc_feature: Table A; Target 4596; HLA-A*11:01; ADAM2; ENSG00000104755; CTA
GSIDSGNFPP

SEQ ID NO: 4597 - protein, 11 aa, Homo sapiens
  misc_feature: Table A; Target 4597; HLA-A*11:01; ADAM2; ENSG00000104755; CTA
GSIDSGNFPPV

SEQ ID NO: 4598 - protein, 10 aa, Homo sapiens
  misc_feature: Table A; Target 4598; HLA-A*25:01; ADAM2; ENSG00000104755; CTA
GVLQFENVSY

SEQ ID NO: 4599 - protein, 10 aa, Homo sapiens
  misc_feature: Table A; Target 4599; HLA-A*26:01; ADAM2; ENSG00000104755; CTA
GVLQFENVSY

SEQ ID NO: 4600 - protein, 10 aa, Homo sapiens
  misc_feature: Table A; Target 4600; HLA-A*29:02; ADAM2; ENSG00000104755; CTA
GVLQFENVSY

SEQ ID NO: 4601 - protein, 10 aa, Homo sapiens
  misc_feature: Table A; Target 4601; HLA-A*30:02; ADAM2; ENSG00000104755; CTA
GVLQFENVSY

SEQ ID NO: 4602 - protein, 10 aa, Homo sapiens
  misc_feature: Table A; Target 4602; HLA-A*32:01; ADAM2; ENSG00000104755; CTA
GVLQFENVSY

SEQ ID NO: 4603 - protein, 10 aa, Homo sapiens
  misc_feature: Table A; Target 4603; HLA-B*15:01; ADAM2; ENSG00000104755; CTA
GVLQFENVSY

SEQ ID NO: 4604 - protein, 10 aa, Homo sapiens
  misc_feature: Table A; Target 4604; HLA-B*15:03; ADAM2; ENSG00000104755; CTA
GVLQFENVSY

SEQ ID NO: 4605 - protein, 10 aa, Homo sapiens
  misc_feature: Table A; Target 4605; HLA-B*27:02; ADAM2; ENSG00000104755; CTA
GVLQFENVSY

SEQ ID NO: 4606 - protein, 10 aa, Homo sapiens
  misc_feature: Table A; Target 4606; HLA-B*35:01; ADAM2; ENSG00000104755; CTA
GVLQFENVSY

SEQ ID NO: 4607 - protein, 10 aa, Homo sapiens
  misc_feature: Table A; Target 4607; HLA-B*39:01; ADAM2; ENSG00000104755; CTA
GVLQFENVSY

SEQ ID NO: 4608 - protein, 10 aa, Homo sapiens
  misc_feature: Table A; Target 4608; HLA-B*44:02; ADAM2; ENSG00000104755; CTA
GVLQFENVSY

SEQ ID NO: 4609 - protein, 10 aa, Homo sapiens
  misc_feature: Table A; Target 4609; HLA-B*44:03; ADAM2; ENSG00000104755; CTA
GVLQFENVSY

SEQ ID NO: 4610 - protein, 10 aa, Homo sapiens
  misc_feature: Table A; Target 4610; HLA-B*46:01; ADAM2; ENSG00000104755; CTA
GVLQFENVSY

SEQ ID NO: 4611 - protein, 10 aa, Homo sapiens
  misc_feature: Table A; Target 4611; HLA-B*57:01; ADAM2; ENSG00000104755; CTA
GVLQFENVSY

SEQ ID NO: 4612 - protein, 10 aa, Homo sapiens
  misc_feature: Table A; Target 4612; HLA-C*02:02; ADAM2; ENSG00000104755; CTA
GVLQFENVSY

SEQ ID NO: 4613 - protein, 10 aa, Homo sapiens
  misc_feature: Table A; Target 4613; HLA-C*04:01; ADAM2; ENSG00000104755; CTA
GVLQFENVSY

SEQ ID NO: 4614 - protein, 10 aa, Homo sapiens
  misc_feature: Table A; Target 4614; HLA-C*07:01; ADAM2; ENSG00000104755; CTA
GVLQFENVSY

SEQ ID NO: 4615 - protein, 10 aa, Homo sapiens
  misc_feature: Table A; Target 4615; HLA-C*07:04; ADAM2; ENSG00000104755; CTA
GVLQFENVSY

SEQ ID NO: 4616 - protein, 10 aa, Homo sapiens
  misc_feature: Table A; Target 4616; HLA-C*16:04; ADAM2; ENSG00000104755; CTA
GVLQFENVSY

SEQ ID NO: 4617 - protein, 9 aa, Homo sapiens
  misc_feature: Table A; Target 4617; HLA-A*02:03; ADAM2; ENSG00000104755; CTA
GVVLHPRTI

SEQ ID NO: 4618 - protein, 9 aa, Homo sapiens
  misc_feature: Table A; Target 4618; HLA-B*13:02; ADAM2; ENSG00000104755; CTA
GVVLHPRTI

SEQ ID NO: 4619 - protein, 8 aa, Homo sapiens
  misc_feature: Table A; Target 4619; HLA-A*33:03; ADAM2; ENSG00000104755; CTA
GYIEGYPK

SEQ ID NO: 4620 - protein, 10 aa, Homo sapiens
  misc_feature: Table A; Target 4620; HLA-C*14:02; ADAM2; ENSG00000104755; CTA
GYIEGYPKSV

SEQ ID NO: 4621 - protein, 9 aa, Homo sapiens
  misc_feature: Table A; Target 4621; HLA-A*24:02; ADAM2; ENSG00000104755; CTA
GYPKSVVMV

SEQ ID NO: 4622 - protein, 9 aa, Homo sapiens
  misc_feature: Table A; Target 4622; HLA-B*51:01; ADAM2; ENSG00000104755; CTA
HADSQKMWI

SEQ ID NO: 4623 - protein, 9 aa, Homo sapiens
  misc_feature: Table A; Target 4623; HLA-A*29:02; ADAM2; ENSG00000104755; CTA
HDVAFLLVY

SEQ ID NO: 4624 - protein, 9 aa, Homo sapiens
  misc_feature: Table A; Target 4624; HLA-B*44:03; ADAM2; ENSG00000104755; CTA
HDVAFLLVY

SEQ ID NO: 4625 - protein, 9 aa, Homo sapiens
  misc_feature: Table A; Target 4625; HLA-B*15:03; ADAM2; ENSG00000104755; CTA
HKKADVSLY

SEQ ID NO: 4626 - protein, 9 aa, Homo sapiens
  misc_feature: Table A; Target 4626; HLA-C*07:01; ADAM2; ENSG00000104755; CTA
HKKADVSLY

SEQ ID NO: 4627 - protein, 8 aa, Homo sapiens
  misc_feature: Table A; Target 4627; HLA-C*07:01; ADAM2; ENSG00000104755; CTA
HLCIAVEF

SEQ ID NO: 4628 - protein, 8 aa, Homo sapiens
  misc_feature: Table A; Target 4628; HLA-B*08:01; ADAM2; ENSG00000104755; CTA
HLNSKTDV

SEQ ID NO: 4629 - protein, 9 aa, Homo sapiens
  misc_feature: Table A; Target 4629; HLA-A*02:01; ADAM2; ENSG00000104755; CTA
HMGSDTTVV

SEQ ID NO: 4630 - protein, 9 aa, Homo sapiens
  misc_feature: Table A; Target 4630; HLA-A*02:03; ADAM2; ENSG00000104755; CTA
HMGSDTTVV

SEQ ID NO: 4631 - protein, 9 aa, Homo sapiens
  misc_feature: Table A; Target 4631; HLA-B*13:02; ADAM2; ENSG00000104755; CTA
HMGSDTTVV

SEQ ID NO: 4632 - protein, 9 aa, Homo sapiens
  misc_feature: Table A; Target 4632; HLA-B*35:03; ADAM2; ENSG00000104755; CTA
HMGSDTTVV

SEQ ID NO: 4633 - protein, 9 aa, Homo sapiens
  misc_feature: Table A; Target 4633; HLA-B*55:01; ADAM2; ENSG00000104755; CTA
HMGSDTTVV

SEQ ID NO: 4634 - protein, 9 aa, Homo sapiens
  misc_feature: Table A; Target 4634; HLA-A*33:01; ADAM2; ENSG00000104755; CTA
HNQPRLDPF

SEQ ID NO: 4635 - protein, 10 aa, Homo sapiens
  misc_feature: Table A; Target 4635; HLA-B*07:02; ADAM2; ENSG00000104755; CTA
HPRTISLESL

SEQ ID NO: 4636 - protein, 10 aa, Homo sapiens
  misc_feature: Table A; Target 4636; HLA-C*07:02; ADAM2; ENSG00000104755; CTA
HPRTISLESL

SEQ ID NO: 4637 - protein, 8 aa, Homo sapiens
  misc_feature: Table A; Target 4637; HLA-B*08:01; ADAM2; ENSG00000104755; CTA
HVIVEKQL

SEQ ID NO: 4638 - protein, 9 aa, Homo sapiens
  misc_feature: Table A; Target 4638; HLA-A*01:01; ADAM2; ENSG00000104755; CTA
HVIVEKQLY

SEQ ID NO: 4639 - protein, 9 aa, Homo sapiens
  misc_feature: Table A; Target 4639; HLA-A*25:01; ADAM2; ENSG00000104755; CTA
HVIVEKQLY

SEQ ID NO: 4640 - protein, 9 aa, Homo sapiens
  misc_feature: Table A; Target 4640; HLA-A*26:01; ADAM2; ENSG00000104755; CTA
HVIVEKQLY

SEQ ID NO: 4641 - protein, 9 aa, Homo sapiens
  misc_feature: Table A; Target 4641; HLA-A*29:02; ADAM2; ENSG00000104755; CTA
HVIVEKQLY

SEQ ID NO: 4642 - protein, 9 aa, Homo sapiens
  misc_feature: Table A; Target 4642; HLA-A*30:02; ADAM2; ENSG00000104755; CTA
HVIVEKQLY

SEQ ID NO: 4643 - protein, 9 aa, Homo sapiens
  misc_feature: Table A; Target 4643; HLA-A*32:01; ADAM2; ENSG00000104755; CTA
HVIVEKQLY

SEQ ID NO: 4644 - protein, 9 aa, Homo sapiens
  misc_feature: Table A; Target 4644; HLA-B*15:01; ADAM2; ENSG00000104755; CTA
HVIVEKQLY

SEQ ID NO: 4645 - protein, 9 aa, Homo sapiens
  misc_feature: Table A; Target 4645; HLA-B*15:03; ADAM2; ENSG00000104755; CTA
HVIVEKQLY

SEQ ID NO: 4646 - protein, 9 aa, Homo sapiens
  misc_feature: Table A; Target 4646; HLA-B*18:01; ADAM2; ENSG00000104755; CTA
HVIVEKQLY

SEQ ID NO: 4647 - protein, 9 aa, Homo sapiens
  misc_feature: Table A; Target 4647; HLA-B*35:01; ADAM2; ENSG00000104755; CTA
HVIVEKQLY

SEQ ID NO: 4648 - protein, 9 aa, Homo sapiens
  misc_feature: Table A; Target 4648; HLA-B*44:02; ADAM2; ENSG00000104755; CTA
HVIVEKQLY

SEQ ID NO: 4649 - protein, 9 aa, Homo sapiens
  misc_feature: Table A; Target 4649; HLA-B*44:03; ADAM2; ENSG00000104755; CTA
HVIVEKQLY

SEQ ID NO: 4650 - protein, 9 aa, Homo sapiens
  misc_feature: Table A; Target 4650; HLA-B*46:01; ADAM2; ENSG00000104755; CTA
HVIVEKQLY

SEQ ID NO: 4651 - protein, 9 aa, Homo sapiens
  misc_feature: Table A; Target 4651; HLA-B*55:01; ADAM2; ENSG00000104755; CTA
HVIVEKQLY

SEQ ID NO: 4652 - protein, 9 aa, Homo sapiens
  misc_feature: Table A; Target 4652; HLA-B*57:01; ADAM2; ENSG00000104755; CTA
HVIVEKQLY

SEQ ID NO: 4653 - protein, 9 aa, Homo sapiens
  misc_feature: Table A; Target 4653; HLA-B*58:01; ADAM2; ENSG00000104755; CTA
HVIVEKQLY

SEQ ID NO: 4654 - protein, 9 aa, Homo sapiens
  misc_feature: Table A; Target 4654; HLA-C*02:02; ADAM2; ENSG00000104755; CTA
HVIVEKQLY

SEQ ID NO: 4655 - protein, 9 aa, Homo sapiens
  misc_feature: Table A; Target 4655; HLA-C*03:03; ADAM2; ENSG00000104755; CTA
HVIVEKQLY

SEQ ID NO: 4656 - protein, 9 aa, Homo sapiens
  misc_feature: Table A; Target 4656; HLA-C*07:04; ADAM2; ENSG00000104755; CTA
HVIVEKQLY

SEQ ID NO: 4657 - protein, 9 aa, Homo sapiens
  misc_feature: Table A; Target 4657; HLA-A*03:01; ADAM2; ENSG00000104755; CTA
HVIYQVKHK

SEQ ID NO: 4658 - protein, 9 aa, Homo sapiens
  misc_feature: Table A; Target 4658; HLA-A*03:02; ADAM2; ENSG00000104755; CTA
HVIYQVKHK

SEQ ID NO: 4659 - protein, 9 aa, Homo sapiens
  misc_feature: Table A; Target 4659; HLA-A*11:01; ADAM2; ENSG00000104755; CTA
HVIYQVKHK

SEQ ID NO: 4660 - protein, 9 aa, Homo sapiens
  misc_feature: Table A; Target 4660; HLA-A*68:01; ADAM2; ENSG00000104755; CTA
HVIYQVKHK

SEQ ID NO: 4661 - protein, 9 aa, Homo sapiens
  misc_feature: Table A; Target 4661; HLA-A*29:02; ADAM2; ENSG00000104755; CTA
HYQGYIEGY

SEQ ID NO: 4662 - protein, 9 aa, Homo sapiens
  misc_feature: Table A; Target 4662; HLA-A*30:02; ADAM2; ENSG00000104755; CTA
HYQGYIEGY

SEQ ID NO: 4663 - protein, 9 aa, Homo sapiens
  misc_feature: Table A; Target 4663; HLA-C*07:04; ADAM2; ENSG00000104755; CTA
HYQGYIEGY

SEQ ID NO: 4664 - protein, 9 aa, Homo sapiens
  misc_feature: Table A; Target 4664; HLA-C*14:02; ADAM2; ENSG00000104755; CTA
HYQGYIEGY

SEQ ID NO: 4665 - protein, 9 aa, Homo sapiens
  misc_feature: Table A; Target 4665; HLA-A*23:01; ADAM2; ENSG00000104755; CTA
IAIMVKVNF

SEQ ID NO: 4666 - protein, 9 aa, Homo sapiens
  misc_feature: Table A; Target 4666; HLA-A*24:02; ADAM2; ENSG00000104755; CTA
IAIMVKVNF

SEQ ID NO: 4667 - protein, 9 aa, Homo sapiens
  misc_feature: Table A; Target 4667; HLA-A*32:01; ADAM2; ENSG00000104755; CTA
IAIMVKVNF

SEQ ID NO: 4668 - protein, 9 aa, Homo sapiens
  misc_feature: Table A; Target 4668; HLA-B*15:01; ADAM2; ENSG00000104755; CTA
IAIMVKVNF

SEQ ID NO: 4669 - protein, 9 aa, Homo sapiens
  misc_feature: Table A; Target 4669; HLA-B*15:03; ADAM2; ENSG00000104755; CTA
IAIMVKVNF

SEQ ID NO: 4670 - protein, 9 aa, Homo sapiens
  misc_feature: Table A; Target 4670; HLA-B*35:01; ADAM2; ENSG00000104755; CTA
IAIMVKVNF

SEQ ID NO: 4671 - protein, 9 aa, Homo sapiens
  misc_feature: Table A; Target 4671; HLA-B*38:01; ADAM2; ENSG00000104755; CTA
IAIMVKVNF

SEQ ID NO: 4672 - protein, 9 aa, Homo sapiens
  misc_feature: Table A; Target 4672; HLA-B*46:01; ADAM2; ENSG00000104755; CTA
IAIMVKVNF

SEQ ID NO: 4673 - protein, 9 aa, Homo sapiens
  misc_feature: Table A; Target 4673; HLA-B*57:01; ADAM2; ENSG00000104755; CTA
IAIMVKVNF

SEQ ID NO: 4674 - protein, 9 aa, Homo sapiens
  misc_feature: Table A; Target 4674; HLA-B*58:01; ADAM2; ENSG00000104755; CTA
IAIMVKVNF

SEQ ID NO: 4675 - protein, 9 aa, Homo sapiens
  misc_feature: Table A; Target 4675; HLA-C*02:02; ADAM2; ENSG00000104755; CTA
IAIMVKVNF

SEQ ID NO: 4676 - protein, 9 aa, Homo sapiens
  misc_feature: Table A; Target 4676; HLA-C*03:03; ADAM2; ENSG00000104755; CTA
IAIMVKVNF

SEQ ID NO: 4677 - protein, 9 aa, Homo sapiens
  misc_feature: Table A; Target 4677; HLA-C*03:04; ADAM2; ENSG00000104755; CTA
IAIMVKVNF

SEQ ID NO: 4678 - protein, 9 aa, Homo sapiens
  misc_feature: Table A; Target 4678; HLA-C*07:06; ADAM2; ENSG00000104755; CTA
IAIMVKVNF

SEQ ID NO: 4679 - protein, 9 aa, Homo sapiens
  misc_feature: Table A; Target 4679; HLA-C*12:03; ADAM2; ENSG00000104755; CTA
IAIMVKVNF

SEQ ID NO: 4680 - protein, 9 aa, Homo sapiens
  misc_feature: Table A; Target 4680; HLA-C*16:01; ADAM2; ENSG00000104755; CTA
IAIMVKVNF

SEQ ID NO: 4681 - protein, 9 aa, Homo sapiens
  misc_feature: Table A; Target 4681; HLA-C*16:02; ADAM2; ENSG00000104755; CTA
IAIMVKVNF

SEQ ID NO: 4682 - protein, 9 aa, Homo sapiens
  misc_feature: Table A; Target 4682; HLA-C*16:04; ADAM2; ENSG00000104755; CTA
IAIMVKVNF

SEQ ID NO: 4683 - protein, 10 aa, Homo sapiens
  misc_feature: Table A; Target 4683; HLA-B*35:03; ADAM2; ENSG00000104755; CTA
IATTGEANEL

SEQ ID NO: 4684 - protein, 10 aa, Homo sapiens
  misc_feature: Table A; Target 4684; HLA-B*38:01; ADAM2; ENSG00000104755; CTA
IATTGEANEL

SEQ ID NO: 4685 - protein, 10 aa, Homo sapiens
  misc_feature: Table A; Target 4685; HLA-B*39:01; ADAM2; ENSG00000104755; CTA
IATTGEANEL

SEQ ID NO: 4686 - protein, 10 aa, Homo sapiens
  misc_feature: Table A; Target 4686; HLA-B*40:01; ADAM2; ENSG00000104755; CTA
IATTGEANEL

SEQ ID NO: 4687 - protein, 10 aa, Homo sapiens
  misc_feature: Table A; Target 4687; HLA-C*03:03; ADAM2; ENSG00000104755; CTA
IATTGEANEL

SEQ ID NO: 4688 - protein, 10 aa, Homo sapiens
  misc_feature: Table A; Target 4688; HLA-C*03:04; ADAM2; ENSG00000104755; CTA
IATTGEANEL

SEQ ID NO: 4689 - protein, 10 aa, Homo sapiens
  misc_feature: Table A; Target 4689; HLA-C*16:01; ADAM2; ENSG00000104755; CTA
IATTGEANEL

SEQ ID NO: 4690 - protein, 10 aa, Homo sapiens
  misc_feature: Table A; Target 4690; HLA-C*16:02; ADAM2; ENSG00000104755; CTA
IATTGEANEL

SEQ ID NO: 4691 - protein, 8 aa, Homo sapiens
  misc_feature: Table A; Target 4691; HLA-C*07:04; ADAM2; ENSG00000104755; CTA
IDENKIAT

SEQ ID NO: 4692 - protein, 9 aa, Homo sapiens
  misc_feature: Table A; Target 4692; HLA-B*37:01; ADAM2; ENSG00000104755; CTA
IDSGNFPPV

SEQ ID NO: 4693 - protein, 9 aa, Homo sapiens
  misc_feature: Table A; Target 4693; HLA-C*04:01; ADAM2; ENSG00000104755; CTA
IDSGNFPPV

SEQ ID NO: 4694 - protein, 8 aa, Homo sapiens
  misc_feature: Table A; Target 4694; HLA-A*30:01; ADAM2; ENSG00000104755; CTA
IEGKPYTV

SEQ ID NO: 4695 - protein, 8 aa, Homo sapiens
  misc_feature: Table A; Target 4695; HLA-B*13:02; ADAM2; ENSG00000104755; CTA
IEGKPYTV

SEQ ID NO: 4696 - protein, 8 aa, Homo sapiens
  misc_feature: Table A; Target 4696; HLA-B*18:01; ADAM2; ENSG00000104755; CTA
IEGKPYTV

SEQ ID NO: 4697 - protein, 8 aa, Homo sapiens
  misc_feature: Table A; Target 4697; HLA-B*37:01; ADAM2; ENSG00000104755; CTA
IEGKPYTV

SEQ ID NO: 4698 - protein, 8 aa, Homo sapiens
  misc_feature: Table A; Target 4698; HLA-B*40:01; ADAM2; ENSG00000104755; CTA
IEGKPYTV

SEQ ID NO: 4699 - protein, 8 aa, Homo sapiens
  misc_feature: Table A; Target 4699; HLA-B*40:02; ADAM2; ENSG00000104755; CTA
IEGKPYTV

SEQ ID NO: 4700 - protein, 8 aa, Homo sapiens
  misc_feature: Table A; Target 4700; HLA-B*49:01; ADAM2; ENSG00000104755; CTA
IEGKPYTV

SEQ ID NO: 4701 - protein, 8 aa, Homo sapiens
  misc_feature: Table A; Target 4701; HLA-C*06:02; ADAM2; ENSG00000104755; CTA
IEGKPYTV

SEQ ID NO: 4702 - protein, 8 aa, Homo sapiens
  misc_feature: Table A; Target 4702; HLA-C*16:04; ADAM2; ENSG00000104755; CTA
IEGKPYTV

SEQ ID NO: 4703 - protein, 10 aa, Homo sapiens
  misc_feature: Table A; Target 4703; HLA-A*30:01; ADAM2; ENSG00000104755; CTA
IEGKPYTVNL

SEQ ID NO: 4704 - protein, 10 aa, Homo sapiens
  misc_feature: Table A; Target 4704; HLA-B*40:01; ADAM2; ENSG00000104755; CTA
IEGKPYTVNL

SEQ ID NO: 4705 - protein, 8 aa, Homo sapiens
  misc_feature: Table A; Target 4705; HLA-A*30:01; ADAM2; ENSG00000104755; CTA
IEGYPKSV

SEQ ID NO: 4706 - protein, 8 aa, Homo sapiens
  misc_feature: Table A; Target 4706; HLA-B*18:01; ADAM2; ENSG00000104755; CTA
IEGYPKSV

SEQ ID NO: 4707 - protein, 8 aa, Homo sapiens
  misc_feature: Table A; Target 4707; HLA-B*49:01; ADAM2; ENSG00000104755; CTA
IEGYPKSV

SEQ ID NO: 4708 - protein, 8 aa, Homo sapiens
  misc_feature: Table A; Target 4708; HLA-C*12:03; ADAM2; ENSG00000104755; CTA
IEGYPKSV

SEQ ID NO: 4709 - protein, 8 aa, Homo sapiens
  misc_feature: Table A; Target 4709; HLA-C*16:02; ADAM2; ENSG00000104755; CTA
IEGYPKSV

SEQ ID NO: 4710 - protein, 9 aa, Homo sapiens
  misc_feature: Table A; Target 4710; HLA-A*30:01; ADAM2; ENSG00000104755; CTA
IEGYPKSVV

SEQ ID NO: 4711 - protein, 9 aa, Homo sapiens
  misc_feature: Table A; Target 4711; HLA-B*18:01; ADAM2; ENSG00000104755; CTA
IEGYPKSVV

SEQ ID NO: 4712 - protein, 9 aa, Homo sapiens
  misc_feature: Table A; Target 4712; HLA-B*40:01; ADAM2; ENSG00000104755; CTA
IEGYPKSVV

SEQ ID NO: 4713 - protein, 9 aa, Homo sapiens
  misc_feature: Table A; Target 4713; HLA-B*40:02; ADAM2; ENSG00000104755; CTA
IEGYPKSVV

SEQ ID NO: 4714 - protein, 9 aa, Homo sapiens
  misc_feature: Table A; Target 4714; HLA-B*44:02; ADAM2; ENSG00000104755; CTA
IEGYPKSVV

SEQ ID NO: 4715 - protein, 9 aa, Homo sapiens
  misc_feature: Table A; Target 4715; HLA-B*44:03; ADAM2; ENSG00000104755; CTA
IEGYPKSVV

SEQ ID NO: 4716 - protein, 9 aa, Homo sapiens
  misc_feature: Table A; Target 4716; HLA-B*49:01; ADAM2; ENSG00000104755; CTA
IEGYPKSVV

SEQ ID NO: 4717 - protein, 10 aa, Homo sapiens
  misc_feature: Table A; Target 4717; HLA-A*30:01; ADAM2; ENSG00000104755; CTA
IEGYPKSVVM

SEQ ID NO: 4718 - protein, 10 aa, Homo sapiens
  misc_feature: Table A; Target 4718; HLA-B*40:01; ADAM2; ENSG00000104755; CTA
IEGYPKSVVM

SEQ ID NO: 4719 - protein, 9 aa, Homo sapiens
  misc_feature: Table A; Target 4719; HLA-A*03:02; ADAM2; ENSG00000104755; CTA
IEMHVIVEK

SEQ ID NO: 4720 - protein, 9 aa, Homo sapiens
  misc_feature: Table A; Target 4720; HLA-A*11:01; ADAM2; ENSG00000104755; CTA
IEMHVIVEK

SEQ ID NO: 4721 - protein, 9 aa, Homo sapiens
  misc_feature: Table A; Target 4721; HLA-B*18:01; ADAM2; ENSG00000104755; CTA
IEMHVIVEK

SEQ ID NO: 4722 - protein, 9 aa, Homo sapiens
  misc_feature: Table A; Target 4722; HLA-B*57:01; ADAM2; ENSG00000104755; CTA
IEMHVIVEK

SEQ ID NO: 4723 - protein, 11 aa, Homo sapiens
  misc_feature: Table A; Target 4723; HLA-B*44:02; ADAM2; ENSG00000104755; CTA
IEMHVIVEKQL

SEQ ID NO: 4724 - protein, 11 aa, Homo sapiens
  misc_feature: Table A; Target 4724; HLA-B*44:03; ADAM2; ENSG00000104755; CTA
IEMHVIVEKQL

SEQ ID NO: 4725 - protein, 8 aa, Homo sapiens
  misc_feature: Table A; Target 4725; HLA-B*18:01; ADAM2; ENSG00000104755; CTA
IENIYHSK

SEQ ID NO: 4726 - protein, 8 aa, Homo sapiens
  misc_feature: Table A; Target 4726; HLA-B*37:01; ADAM2; ENSG00000104755; CTA
IENIYHSK

SEQ ID NO: 4727 - protein, 8 aa, Homo sapiens
  misc_feature: Table A; Target 4727; HLA-B*49:01; ADAM2; ENSG00000104755; CTA
IEPLESSV

SEQ ID NO: 4728 - protein, 10 aa, Homo sapiens
  misc_feature: Table A; Target 4728; HLA-A*30:01; ADAM2; ENSG00000104755; CTA
IEPLESSVGF

SEQ ID NO: 4729 - protein, 10 aa, Homo sapiens
  misc_feature: Table A; Target 4729; HLA-B*18:01; ADAM2; ENSG00000104755; CTA
IEPLESSVGF

SEQ ID NO: 4730 - protein, 10 aa, Homo sapiens
  misc_feature: Table A; Target 4730; HLA-B*37:01; ADAM2; ENSG00000104755; CTA
IEPLESSVGF

SEQ ID NO: 4731 - protein, 10 aa, Homo sapiens
  misc_feature: Table A; Target 4731; HLA-B*40:01; ADAM2; ENSG00000104755; CTA
IEPLESSVGF

SEQ ID NO: 4732 - protein, 10 aa, Homo sapiens
  misc_feature: Table A; Target 4732; HLA-B*44:02; ADAM2; ENSG00000104755; CTA
IEPLESSVGF

SEQ ID NO: 4733 - protein, 10 aa, Homo sapiens
  misc_feature: Table A; Target 4733; HLA-B*44:03; ADAM2; ENSG00000104755; CTA
IEPLESSVGF

SEQ ID NO: 4734 - protein, 9 aa, Homo sapiens
  misc_feature: Table A; Target 4734; HLA-A*30:01; ADAM2; ENSG00000104755; CTA
IESQASYKI

SEQ ID NO: 4735 - protein, 9 aa, Homo sapiens
  misc_feature: Table A; Target 4735; HLA-B*13:02; ADAM2; ENSG00000104755; CTA
IESQASYKI

SEQ ID NO: 4736 - protein, 9 aa, Homo sapiens
  misc_feature: Table A; Target 4736; HLA-B*37:01; ADAM2; ENSG00000104755; CTA
IESQASYKI

SEQ ID NO: 4737 - protein, 9 aa, Homo sapiens
  misc_feature: Table A; Target 4737; HLA-B*38:01; ADAM2; ENSG00000104755; CTA
IESQASYKI

SEQ ID NO: 4738 - protein, 9 aa, Homo sapiens
  misc_feature: Table A; Target 4738; HLA-B*40:01; ADAM2; ENSG00000104755; CTA
IESQASYKI

SEQ ID NO: 4739 - protein, 9 aa, Homo sapiens
  misc_feature: Table A; Target 4739; HLA-B*40:02; ADAM2; ENSG00000104755; CTA
IESQASYKI

SEQ ID NO: 4740 - protein, 9 aa, Homo sapiens
  misc_feature: Table A; Target 4740; HLA-B*44:02; ADAM2; ENSG00000104755; CTA
IESQASYKI

SEQ ID NO: 4741 - protein, 9 aa, Homo sapiens
  misc_feature: Table A; Target 4741; HLA-B*44:03; ADAM2; ENSG00000104755; CTA
IESQASYKI

SEQ ID NO: 4742 - protein, 9 aa, Homo sapiens
  misc_feature: Table A; Target 4742; HLA-C*16:04; ADAM2; ENSG00000104755; CTA
IESQASYKI

SEQ ID NO: 4743 - protein, 10 aa, Homo sapiens
  misc_feature: Table A; Target 4743; HLA-B*49:01; ADAM2; ENSG00000104755; CTA
IESQASYKIV

SEQ ID NO: 4744 - protein, 11 aa, Homo sapiens
  misc_feature: Table A; Target 4744; HLA-B*49:01; ADAM2; ENSG00000104755; CTA
IESQASYKIVI

SEQ ID NO: 4745 - protein, 8 aa, Homo sapiens
  misc_feature: Table A; Target 4745; HLA-B*18:01; ADAM2; ENSG00000104755; CTA
IESRDLSF

SEQ ID NO: 4746 - protein, 8 aa, Homo sapiens
  misc_feature: Table A; Target 4746; HLA-B*37:01; ADAM2; ENSG00000104755; CTA
IESRDLSF

SEQ ID NO: 4747 - protein, 10 aa, Homo sapiens
  misc_feature: Table A; Target 4747; HLA-B*40:01; ADAM2; ENSG00000104755; CTA
IESRDLSFKL

SEQ ID NO: 4748 - protein, 9 aa, Homo sapiens
  misc_feature: Table A; Target 4748; HLA-A*23:01; ADAM2; ENSG00000104755; CTA
IFVSFNITI

SEQ ID NO: 4749 - protein, 9 aa, Homo sapiens
  misc_feature: Table A; Target 4749; HLA-A*24:02; ADAM2; ENSG00000104755; CTA
IFVSFNITI

SEQ ID NO: 4750 - protein, 11 aa, Homo sapiens
  misc_feature: Table A; Target 4750; HLA-A*23:01; ADAM2; ENSG00000104755; CTA
IGLTNAIFVSF

SEQ ID NO: 4751 - protein, 11 aa, Homo sapiens
  misc_feature: Table A; Target 4751; HLA-A*24:02; ADAM2; ENSG00000104755; CTA
IGLTNAIFVSF

SEQ ID NO: 4752 - protein, 11 aa, Homo sapiens
  misc_feature: Table A; Target 4752; HLA-B*57:01; ADAM2; ENSG00000104755; CTA
IGLTNAIFVSF

SEQ ID NO: 4753 - protein, 8 aa, Homo sapiens
  misc_feature: Table A; Target 4753; HLA-B*38:01; ADAM2; ENSG00000104755; CTA
IHFSGVKI

SEQ ID NO: 4754 - protein, 9 aa, Homo sapiens
  misc_feature: Table A; Target 4754; HLA-B*46:01; ADAM2; ENSG00000104755; CTA
IIKEGIESQ

SEQ ID NO: 4755 - protein, 9 aa, Homo sapiens
  misc_feature: Table A; Target 4755; HLA-C*01:02; ADAM2; ENSG00000104755; CTA
IIKEGIESQ

SEQ ID NO: 4756 - protein, 10 aa, Homo sapiens
  misc_feature: Table A; Target 4756; HLA-A*02:03; ADAM2; ENSG00000104755; CTA
IIKEGIESQA

SEQ ID NO: 4757 - protein, 9 aa, Homo sapiens
  misc_feature: Table A; Target 4757; HLA-B*57:01; ADAM2; ENSG00000104755; CTA
IILSSLELW

SEQ ID NO: 4758 - protein, 9 aa, Homo sapiens
  misc_feature: Table A; Target 4758; HLA-A*03:01; ADAM2; ENSG00000104755; CTA
IIYANISGH

SEQ ID NO: 4759 - protein, 11 aa, Homo sapiens
  misc_feature: Table A; Target 4759; HLA-B*15:03; ADAM2; ENSG00000104755; CTA
IKEGIESQASY

SEQ ID NO: 4760 - protein, 8 aa, Homo sapiens
  misc_feature: Table A; Target 4760; HLA-A*23:01; ADAM2; ENSG00000104755; CTA
ILAQLLSL

SEQ ID NO: 4761 - protein, 9 aa, Homo sapiens
  misc_feature: Table A; Target 4761; HLA-A*23:01; ADAM2; ENSG00000104755; CTA
IMKPLDQDF

SEQ ID NO: 4762 - protein, 9 aa, Homo sapiens
  misc_feature: Table A; Target 4762; HLA-A*29:02; ADAM2; ENSG00000104755; CTA
IMKPLDQDF

SEQ ID NO: 4763 - protein, 9 aa, Homo sapiens
  misc_feature: Table A; Target 4763; HLA-A*30:02; ADAM2; ENSG00000104755; CTA
IMKPLDQDF

SEQ ID NO: 4764 - protein, 9 aa, Homo sapiens
  misc_feature: Table A; Target 4764; HLA-A*32:01; ADAM2; ENSG00000104755; CTA
IMKPLDQDF

SEQ ID NO: 4765 - protein, 9 aa, Homo sapiens
  misc_feature: Table A; Target 4765; HLA-B*15:01; ADAM2; ENSG00000104755; CTA
IMKPLDQDF

SEQ ID NO: 4766 - protein, 9 aa, Homo sapiens
  misc_feature: Table A; Target 4766; HLA-B*15:03; ADAM2; ENSG00000104755; CTA
IMKPLDQDF

SEQ ID NO: 4767 - protein, 9 aa, Homo sapiens
  misc_feature: Table A; Target 4767; HLA-B*46:01; ADAM2; ENSG00000104755; CTA
IMKPLDQDF

SEQ ID NO: 4768 - protein, 9 aa, Homo sapiens
  misc_feature: Table A; Target 4768; HLA-B*57:01; ADAM2; ENSG00000104755; CTA
IMKPLDQDF

SEQ ID NO: 4769 - protein, 9 aa, Homo sapiens
  misc_feature: Table A; Target 4769; HLA-B*58:01; ADAM2; ENSG00000104755; CTA
IMKPLDQDF

SEQ ID NO: 4770 - protein, 9 aa, Homo sapiens
  misc_feature: Table A; Target 4770; HLA-C*07:04; ADAM2; ENSG00000104755; CTA
IMKPLDQDF

SEQ ID NO: 4771 - protein, 9 aa, Homo sapiens
  misc_feature: Table A; Target 4771; HLA-A*02:04; ADAM2; ENSG00000104755; CTA
IMNPEAIHF

SEQ ID NO: 4772 - protein, 9 aa, Homo sapiens
  misc_feature: Table A; Target 4772; HLA-A*02:07; ADAM2; ENSG00000104755; CTA
IMNPEAIHF

SEQ ID NO: 4773 - protein, 9 aa, Homo sapiens
  misc_feature: Table A; Target 4773; HLA-A*03:01; ADAM2; ENSG00000104755; CTA
IMNPEAIHF

SEQ ID NO: 4774 - protein, 9 aa, Homo sapiens
  misc_feature: Table A; Target 4774; HLA-A*03:02; ADAM2; ENSG00000104755; CTA
IMNPEAIHF

SEQ ID NO: 4775 - protein, 9 aa, Homo sapiens
  misc_feature: Table A; Target 4775; HLA-A*23:01; ADAM2; ENSG00000104755; CTA
IMNPEAIHF

SEQ ID NO: 4776 - protein, 9 aa, Homo sapiens
  misc_feature: Table A; Target 4776; HLA-A*24:02; ADAM2; ENSG00000104755; CTA
IMNPEAIHF

SEQ ID NO: 4777 - protein, 9 aa, Homo sapiens
  misc_feature: Table A; Target 4777; HLA-A*29:02; ADAM2; ENSG00000104755; CTA
IMNPEAIHF

SEQ ID NO: 4778 - protein, 9 aa, Homo sapiens
  misc_feature: Table A; Target 4778; HLA-A*30:02; ADAM2; ENSG00000104755; CTA
IMNPEAIHF

SEQ ID NO: 4779 - protein, 9 aa, Homo sapiens
  misc_feature: Table A; Target 4779; HLA-A*31:01; ADAM2; ENSG00000104755; CTA
IMNPEAIHF

SEQ ID NO: 4780 - protein, 9 aa, Homo sapiens
  misc_feature: Table A; Target 4780; HLA-A*32:01; ADAM2; ENSG00000104755; CTA
IMNPEAIHF

SEQ ID NO: 4781 - protein, 9 aa, Homo sapiens
  misc_feature: Table A; Target 4781; HLA-A*33:01; ADAM2; ENSG00000104755; CTA
IMNPEAIHF

SEQ ID NO: 4782 - protein, 9 aa, Homo sapiens
  misc_feature: Table A; Target 4782; HLA-B*15:01; ADAM2; ENSG00000104755; CTA
IMNPEAIHF

SEQ ID NO: 4783 - protein, 9 aa, Homo sapiens
  misc_feature: Table A; Target 4783; HLA-B*15:03; ADAM2; ENSG00000104755; CTA
IMNPEAIHF

SEQ ID NO: 4784 - protein, 9 aa, Homo sapiens
  misc_feature: Table A; Target 4784; HLA-B*27:05; ADAM2; ENSG00000104755; CTA
IMNPEAIHF

SEQ ID NO: 4785 - protein, 9 aa, Homo sapiens
  misc_feature: Table A; Target 4785; HLA-B*35:01; ADAM2; ENSG00000104755; CTA
IMNPEAIHF

SEQ ID NO: 4786 - protein, 9 aa, Homo sapiens
  misc_feature: Table A; Target 4786; HLA-B*37:01; ADAM2; ENSG00000104755; CTA
IMNPEAIHF

SEQ ID NO: 4787 - protein, 9 aa, Homo sapiens
  misc_feature: Table A; Target 4787; HLA-B*38:01; ADAM2; ENSG00000104755; CTA
IMNPEAIHF

SEQ ID NO: 4788 - protein, 9 aa, Homo sapiens
  misc_feature: Table A; Target 4788; HLA-B*46:01; ADAM2; ENSG00000104755; CTA
IMNPEAIHF

SEQ ID NO: 4789 - protein, 9 aa, Homo sapiens
  misc_feature: Table A; Target 4789; HLA-B*55:01; ADAM2; ENSG00000104755; CTA
IMNPEAIHF

SEQ ID NO: 4790 - protein, 9 aa, Homo sapiens
  misc_feature: Table A; Target 4790; HLA-B*57:01; ADAM2; ENSG00000104755; CTA
IMNPEAIHF

SEQ ID NO: 4791 - protein, 9 aa, Homo sapiens
  misc_feature: Table A; Target 4791; HLA-B*58:01; ADAM2; ENSG00000104755; CTA
IMNPEAIHF

SEQ ID NO: 4792 - protein, 9 aa, Homo sapiens
  misc_feature: Table A; Target 4792; HLA-C*01:02; ADAM2; ENSG00000104755; CTA
IMNPEAIHF

SEQ ID NO: 4793 - protein, 9 aa, Homo sapiens
  misc_feature: Table A; Target 4793; HLA-C*02:02; ADAM2; ENSG00000104755; CTA
IMNPEAIHF

SEQ ID NO: 4794 - protein, 9 aa, Homo sapiens
  misc_feature: Table A; Target 4794; HLA-C*03:03; ADAM2; ENSG00000104755; CTA
IMNPEAIHF

SEQ ID NO: 4795 - protein, 9 aa, Homo sapiens
  misc_feature: Table A; Target 4795; HLA-C*03:04; ADAM2; ENSG00000104755; CTA
IMNPEAIHF

SEQ ID NO: 4796 - protein, 9 aa, Homo sapiens
  misc_feature: Table A; Target 4796; HLA-C*04:01; ADAM2; ENSG00000104755; CTA
IMNPEAIHF

SEQ ID NO: 4797 - protein, 9 aa, Homo sapiens
  misc_feature: Table A; Target 4797; HLA-C*05:01; ADAM2; ENSG00000104755; CTA
IMNPEAIHF

SEQ ID NO: 4798 - protein, 9 aa, Homo sapiens
  misc_feature: Table A; Target 4798; HLA-C*07:04; ADAM2; ENSG00000104755; CTA
IMNPEAIHF

SEQ ID NO: 4799 - protein, 9 aa, Homo sapiens
  misc_feature: Table A; Target 4799; HLA-C*12:03; ADAM2; ENSG00000104755; CTA
IMNPEAIHF

SEQ ID NO: 4800 - protein, 9 aa, Homo sapiens
  misc_feature: Table A; Target 4800; HLA-C*14:02; ADAM2; ENSG00000104755; CTA
IMNPEAIHF

SEQ ID NO: 4801 - protein, 9 aa, Homo sapiens
  misc_feature: Table A; Target 4801; HLA-C*16:01; ADAM2; ENSG00000104755; CTA
IMNPEAIHF

SEQ ID NO: 4802 - protein, 9 aa, Homo sapiens
  misc_feature: Table A; Target 4802; HLA-C*16:02; ADAM2; ENSG00000104755; CTA
IMNPEAIHF

SEQ ID NO: 4803 - protein, 9 aa, Homo sapiens
  misc_feature: Table A; Target 4803; HLA-C*16:04; ADAM2; ENSG00000104755; CTA
IMNPEAIHF

SEQ ID NO: 4804 - protein, 9 aa, Homo sapiens
  misc_feature: Table A; Target 4804; HLA-A*31:01; ADAM2; ENSG00000104755; CTA
IMVKVNFQR

SEQ ID NO: 4805 - protein, 9 aa, Homo sapiens
  misc_feature: Table A; Target 4805; HLA-B*54:01; ADAM2; ENSG00000104755; CTA
IPFFIIFCV

SEQ ID NO: 4806 - protein, 8 aa, Homo sapiens
  misc_feature: Table A; Target 4806; HLA-B*35:01; ADAM2; ENSG00000104755; CTA
IPRATIIY

SEQ ID NO: 4807 - protein, 9 aa, Homo sapiens
  misc_feature: Table A; Target 4807; HLA-B*07:02; ADAM2; ENSG00000104755; CTA
IPRATIIYA

SEQ ID NO: 4808 - protein, 9 aa, Homo sapiens
  misc_feature: Table A; Target 4808; HLA-B*51:01; ADAM2; ENSG00000104755; CTA
IPRATIIYA

SEQ ID NO: 4809 - protein, 9 aa, Homo sapiens
  misc_feature: Table A; Target 4809; HLA-B*54:01; ADAM2; ENSG00000104755; CTA
IPRATIIYA

SEQ ID NO: 4810 - protein, 9 aa, Homo sapiens
  misc_feature: Table A; Target 4810; HLA-B*55:01; ADAM2; ENSG00000104755; CTA
IPRATIIYA

SEQ ID NO: 4811 - protein, 9 aa, Homo sapiens
  misc_feature: Table A; Target 4811; HLA-B*56:01; ADAM2; ENSG00000104755; CTA
IPRATIIYA

SEQ ID NO: 4812 - protein, 9 aa, Homo sapiens
  misc_feature: Table A; Target 4812; HLA-C*07:02; ADAM2; ENSG00000104755; CTA
IPRATIIYA

SEQ ID NO: 4813 - protein, 8 aa, Homo sapiens
  misc_feature: Table A; Target 4813; HLA-C*05:01; ADAM2; ENSG00000104755; CTA
ISDSGYTQ

SEQ ID NO: 4814 - protein, 9 aa, Homo sapiens
  misc_feature: Table A; Target 4814; HLA-C*05:01; ADAM2; ENSG00000104755; CTA
ISDSGYTQC

SEQ ID NO: 4815 - protein, 9 aa, Homo sapiens
  misc_feature: Table A; Target 4815; HLA-B*08:01; ADAM2; ENSG00000104755; CTA
ISKQKSQCL

SEQ ID NO: 4816 - protein, 8 aa, Homo sapiens
  misc_feature: Table A; Target 4816; HLA-B*08:01; ADAM2; ENSG00000104755; CTA
ITIILSSL

SEQ ID NO: 4817 - protein, 8 aa, Homo sapiens
  misc_feature: Table A; Target 4817; HLA-B*40:02; ADAM2; ENSG00000104755; CTA
ITIILSSL

SEQ ID NO: 4818 - protein, 8 aa, Homo sapiens
  misc_feature: Table A; Target 4818; HLA-B*46:01; ADAM2; ENSG00000104755; CTA
ITIILSSL

SEQ ID NO: 4819 - protein, 8 aa, Homo sapiens
  misc_feature: Table A; Target 4819; HLA-B*58:01; ADAM2; ENSG00000104755; CTA
ITIILSSL

SEQ ID NO: 4820 - protein, 8 aa, Homo sapiens
  misc_feature: Table A; Target 4820; HLA-C*01:02; ADAM2; ENSG00000104755; CTA
ITIILSSL

SEQ ID NO: 4821 - protein, 8 aa, Homo sapiens
  misc_feature: Table A; Target 4821; HLA-C*03:03; ADAM2; ENSG00000104755; CTA
ITIILSSL

SEQ ID NO: 4822 - protein, 8 aa, Homo sapiens
  misc_feature: Table A; Target 4822; HLA-C*03:04; ADAM2; ENSG00000104755; CTA
ITIILSSL

SEQ ID NO: 4823 - protein, 8 aa, Homo sapiens
  misc_feature: Table A; Target 4823; HLA-C*14:02; ADAM2; ENSG00000104755; CTA
ITIILSSL

SEQ ID NO: 4824 - protein, 11 aa, Homo sapiens
  misc_feature: Table A; Target 4824; HLA-B*57:01; ADAM2; ENSG00000104755; CTA
ITIILSSLELW

SEQ ID NO: 4825 - protein, 10 aa, Homo sapiens
  misc_feature: Table A; Target 4825; HLA-A*25:01; ADAM2; ENSG00000104755; CTA
ITVPEKIRSI

SEQ ID NO: 4826 - protein, 10 aa, Homo sapiens
  misc_feature: Table A; Target 4826; HLA-B*57:01; ADAM2; ENSG00000104755; CTA
ITVPEKIRSI

SEQ ID NO: 4827 - protein, 8 aa, Homo sapiens
  misc_feature: Table A; Target 4827; HLA-A*03:01; ADAM2; ENSG00000104755; CTA
ITYDDINK

SEQ ID NO: 4828 - protein, 8 aa, Homo sapiens
  misc_feature: Table A; Target 4828; HLA-A*03:02; ADAM2; ENSG00000104755; CTA
ITYDDINK

SEQ ID NO: 4829 - protein, 8 aa, Homo sapiens
  misc_feature: Table A; Target 4829; HLA-A*11:01; ADAM2; ENSG00000104755; CTA
ITYDDINK

SEQ ID NO: 4830 - protein, 9 aa, Homo sapiens
  misc_feature: Table A; Target 4830; HLA-A*02:03; ADAM2; ENSG00000104755; CTA
ITYDDINKC

SEQ ID NO: 4831 - protein, 9 aa, Homo sapiens
  misc_feature: Table A; Target 4831; HLA-A*68:02; ADAM2; ENSG00000104755; CTA
ITYDDINKC

SEQ ID NO: 4832 - protein, 9 aa, Homo sapiens
  misc_feature: Table A; Target 4832; HLA-C*12:03; ADAM2; ENSG00000104755; CTA
ITYDDINKC

SEQ ID NO: 4833 - protein, 9 aa, Homo sapiens
  misc_feature: Table A; Target 4833; HLA-A*03:02; ADAM2; ENSG00000104755; CTA
IVEKQLYNH

SEQ ID NO: 4834 - protein, 8 aa, Homo sapiens
  misc_feature: Table A; Target 4834; HLA-A*25:01; ADAM2; ENSG00000104755; CTA
IVIEGKPY

SEQ ID NO: 4835 - protein, 8 aa, Homo sapiens
  misc_feature: Table A; Target 4835; HLA-B*15:01; ADAM2; ENSG00000104755; CTA
IVIEGKPY

SEQ ID NO: 4836 - protein, 8 aa, Homo sapiens
  misc_feature: Table A; Target 4836; HLA-B*15:03; ADAM2; ENSG00000104755; CTA
IVIEGKPY

SEQ ID NO: 4837 - protein, 8 aa, Homo sapiens
  misc_feature: Table A; Target 4837; HLA-B*18:01; ADAM2; ENSG00000104755; CTA
IVIEGKPY

SEQ ID NO: 4838 - protein, 8 aa, Homo sapiens
  misc_feature: Table A; Target 4838; HLA-B*46:01; ADAM2; ENSG00000104755; CTA
IVIEGKPY

SEQ ID NO: 4839 - protein, 8 aa, Homo sapiens
  misc_feature: Table A; Target 4839; HLA-C*01:02; ADAM2; ENSG00000104755; CTA
IVIEGKPY

SEQ ID NO: 4840 - protein, 8 aa, Homo sapiens
  misc_feature: Table A; Target 4840; HLA-C*03:03; ADAM2; ENSG00000104755; CTA
IVIEGKPY

SEQ ID NO: 4841 - protein, 8 aa, Homo sapiens
  misc_feature: Table A; Target 4841; HLA-C*03:04; ADAM2; ENSG00000104755; CTA
IVIEGKPY

SEQ ID NO: 4842 - protein, 8 aa, Homo sapiens
  misc_feature: Table A; Target 4842; HLA-C*07:04; ADAM2; ENSG00000104755; CTA
IVIEGKPY

SEQ ID NO: 4843 - protein, 8 aa, Homo sapiens
  misc_feature: Table A; Target 4843; HLA-C*14:02; ADAM2; ENSG00000104755; CTA
IVIEGKPY

SEQ ID NO: 4844 - protein, 8 aa, Homo sapiens
  misc_feature: Table A; Target 4844; HLA-C*16:01; ADAM2; ENSG00000104755; CTA
IVIEGKPY

SEQ ID NO: 4845 - protein, 10 aa, Homo sapiens
  misc_feature: Table A; Target 4845; HLA-A*02:01; ADAM2; ENSG00000104755; CTA
IVIEGKPYTV

SEQ ID NO: 4846 - protein, 10 aa, Homo sapiens
  misc_feature: Table A; Target 4846; HLA-A*02:03; ADAM2; ENSG00000104755; CTA
IVIEGKPYTV

SEQ ID NO: 4847 - protein, 10 aa, Homo sapiens
  misc_feature: Table A; Target 4847; HLA-A*02:04; ADAM2; ENSG00000104755; CTA
IVIEGKPYTV

SEQ ID NO: 4848 - protein, 10 aa, Homo sapiens
  misc_feature: Table A; Target 4848; HLA-A*02:07; ADAM2; ENSG00000104755; CTA
IVIEGKPYTV

SEQ ID NO: 4849 - protein, 10 aa, Homo sapiens
  misc_feature: Table A; Target 4849; HLA-A*03:01; ADAM2; ENSG00000104755; CTA
IVIEGKPYTV

SEQ ID NO: 4850 - protein, 10 aa, Homo sapiens
  misc_feature: Table A; Target 4850; HLA-A*11:01; ADAM2; ENSG00000104755; CTA
IVIEGKPYTV

SEQ ID NO: 4851 - protein, 10 aa, Homo sapiens
  misc_feature: Table A; Target 4851; HLA-A*23:01; ADAM2; ENSG00000104755; CTA
IVIEGKPYTV

SEQ ID NO: 4852 - protein, 10 aa, Homo sapiens
  misc_feature: Table A; Target 4852; HLA-A*24:02; ADAM2; ENSG00000104755; CTA
IVIEGKPYTV

SEQ ID NO: 4853 - protein, 10 aa, Homo sapiens
  misc_feature: Table A; Target 4853; HLA-A*25:01; ADAM2; ENSG00000104755; CTA
IVIEGKPYTV

SEQ ID NO: 4854 - protein, 10 aa, Homo sapiens
  misc_feature: Table A; Target 4854; HLA-A*26:01; ADAM2; ENSG00000104755; CTA
IVIEGKPYTV

SEQ ID NO: 4855 - protein, 10 aa, Homo sapiens
  misc_feature: Table A; Target 4855; HLA-A*32:01; ADAM2; ENSG00000104755; CTA
IVIEGKPYTV

SEQ ID NO: 4856 - protein, 10 aa, Homo sapiens
  misc_feature: Table A; Target 4856; HLA-A*68:02; ADAM2; ENSG00000104755; CTA
IVIEGKPYTV

SEQ ID NO: 4857 - protein, 10 aa, Homo sapiens
  misc_feature: Table A; Target 4857; HLA-B*13:02; ADAM2; ENSG00000104755; CTA
IVIEGKPYTV

SEQ ID NO: 4858 - protein, 10 aa, Homo sapiens
  misc_feature: Table A; Target 4858; HLA-B*46:01; ADAM2; ENSG00000104755; CTA
IVIEGKPYTV

SEQ ID NO: 4859 - protein, 10 aa, Homo sapiens
  misc_feature: Table A; Target 4859; HLA-B*49:01; ADAM2; ENSG00000104755; CTA
IVIEGKPYTV

SEQ ID NO: 4860 - protein, 10 aa, Homo sapiens
  misc_feature: Table A; Target 4860; HLA-B*51:01; ADAM2; ENSG00000104755; CTA
IVIEGKPYTV

SEQ ID NO: 4861 - protein, 10 aa, Homo sapiens
  misc_feature: Table A; Target 4861; HLA-B*55:01; ADAM2; ENSG00000104755; CTA
IVIEGKPYTV

SEQ ID NO: 4862 - protein, 10 aa, Homo sapiens
  misc_feature: Table A; Target 4862; HLA-B*56:01; ADAM2; ENSG00000104755; CTA
IVIEGKPYTV

SEQ ID NO: 4863 - protein, 10 aa, Homo sapiens
  misc_feature: Table A; Target 4863; HLA-C*02:02; ADAM2; ENSG00000104755; CTA
IVIEGKPYTV

SEQ ID NO: 4864 - protein, 10 aa, Homo sapiens
  misc_feature: Table A; Target 4864; HLA-C*12:03; ADAM2; ENSG00000104755; CTA
IVIEGKPYTV

SEQ ID NO: 4865 - protein, 10 aa, Homo sapiens
  misc_feature: Table A; Target 4865; HLA-C*16:02; ADAM2; ENSG00000104755; CTA
IVIEGKPYTV

SEQ ID NO: 4866 - protein, 9 aa, Homo sapiens
  misc_feature: Table A; Target 4866; HLA-A*23:01; ADAM2; ENSG00000104755; CTA
IYANISGHL

SEQ ID NO: 4867 - protein, 9 aa, Homo sapiens
  misc_feature: Table A; Target 4867; HLA-A*29:02; ADAM2; ENSG00000104755; CTA
IYANISGHL

SEQ ID NO: 4868 - protein, 9 aa, Homo sapiens
  misc_feature: Table A; Target 4868; HLA-A*32:01; ADAM2; ENSG00000104755; CTA
IYANISGHL

SEQ ID NO: 4869 - protein, 9 aa, Homo sapiens
  misc_feature: Table A; Target 4869; HLA-B*27:05; ADAM2; ENSG00000104755; CTA
IYANISGHL

SEQ ID NO: 4870 - protein, 9 aa, Homo sapiens
  misc_feature: Table A; Target 4870; HLA-B*46:01; ADAM2; ENSG00000104755; CTA
IYANISGHL

SEQ ID NO: 4871 - protein, 9 aa, Homo sapiens
  misc_feature: Table A; Target 4871; HLA-B*58:01; ADAM2; ENSG00000104755; CTA
IYANISGHL

SEQ ID NO: 4872 - protein, 9 aa, Homo sapiens
  misc_feature: Table A; Target 4872; HLA-C*01:02; ADAM2; ENSG00000104755; CTA
IYANISGHL

SEQ ID NO: 4873 - protein, 9 aa, Homo sapiens
  misc_feature: Table A; Target 4873; HLA-C*02:02; ADAM2; ENSG00000104755; CTA
IYANISGHL

SEQ ID NO: 4874 - protein, 9 aa, Homo sapiens
  misc_feature: Table A; Target 4874; HLA-C*04:01; ADAM2; ENSG00000104755; CTA
IYANISGHL

SEQ ID NO: 4875 - protein, 9 aa, Homo sapiens
  misc_feature: Table A; Target 4875; HLA-C*06:02; ADAM2; ENSG00000104755; CTA
IYANISGHL

SEQ ID NO: 4876 - protein, 9 aa, Homo sapiens
  misc_feature: Table A; Target 4876; HLA-C*12:03; ADAM2; ENSG00000104755; CTA
IYANISGHL

SEQ ID NO: 4877 - protein, 9 aa, Homo sapiens
  misc_feature: Table A; Target 4877; HLA-C*14:02; ADAM2; ENSG00000104755; CTA
IYANISGHL

SEQ ID NO: 4878 - protein, 9 aa, Homo sapiens
  misc_feature: Table A; Target 4878; HLA-C*16:01; ADAM2; ENSG00000104755; CTA
IYANISGHL

SEQ ID NO: 4879 - protein, 9 aa, Homo sapiens
  misc_feature: Table A; Target 4879; HLA-C*16:02; ADAM2; ENSG00000104755; CTA
IYANISGHL

SEQ ID NO: 4880 - protein, 10 aa, Homo sapiens
  misc_feature: Table A; Target 4880; HLA-A*23:01; ADAM2; ENSG00000104755; CTA
IYANISGHLC

SEQ ID NO: 4881 - protein, 10 aa, Homo sapiens
  misc_feature: Table A; Target 4881; HLA-A*24:02; ADAM2; ENSG00000104755; CTA
IYANISGHLC

SEQ ID NO: 4882 - protein, 11 aa, Homo sapiens
  misc_feature: Table A; Target 4882; HLA-A*23:01; ADAM2; ENSG00000104755; CTA
IYANISGHLCI

SEQ ID NO: 4883 - protein, 11 aa, Homo sapiens
  misc_feature: Table A; Target 4883; HLA-A*24:02; ADAM2; ENSG00000104755; CTA
IYANISGHLCI

SEQ ID NO: 4884 - protein, 9 aa, Homo sapiens
  misc_feature: Table A; Target 4884; HLA-A*24:02; ADAM2; ENSG00000104755; CTA
IYHSKPMRW

SEQ ID NO: 4885 - protein, 10 aa, Homo sapiens
  misc_feature: Table A; Target 4885; HLA-A*03:02; ADAM2; ENSG00000104755; CTA
KADVSLYNEK

SEQ ID NO: 4886 - protein, 10 aa, Homo sapiens
  misc_feature: Table A; Target 4886; HLA-A*11:01; ADAM2; ENSG00000104755; CTA
KADVSLYNEK

SEQ ID NO: 4887 - protein, 10 aa, Homo sapiens
  misc_feature: Table A; Target 4887; HLA-B*27:02; ADAM2; ENSG00000104755; CTA
KADVSLYNEK

SEQ ID NO: 4888 - protein, 8 aa, Homo sapiens
  misc_feature: Table A; Target 4888; HLA-B*37:01; ADAM2; ENSG00000104755; CTA
KDIESRDL

SEQ ID NO: 4889 - protein, 10 aa, Homo sapiens
  misc_feature: Table A; Target 4889; HLA-A*24:02; ADAM2; ENSG00000104755; CTA
KDIESRDLSF

SEQ ID NO: 4890 - protein, 10 aa, Homo sapiens
  misc_feature: Table A; Target 4890; HLA-A*30:01; ADAM2; ENSG00000104755; CTA
KDIESRDLSF

SEQ ID NO: 4891 - protein, 10 aa, Homo sapiens
  misc_feature: Table A; Target 4891; HLA-A*32:01; ADAM2; ENSG00000104755; CTA
KDIESRDLSF

SEQ ID NO: 4892 - protein, 10 aa, Homo sapiens
  misc_feature: Table A; Target 4892; HLA-B*37:01; ADAM2; ENSG00000104755; CTA
KDIESRDLSF

SEQ ID NO: 4893 - protein, 10 aa, Homo sapiens
  misc_feature: Table A; Target 4893; HLA-B*40:02; ADAM2; ENSG00000104755; CTA
KDIESRDLSF

SEQ ID NO: 4894 - protein, 10 aa, Homo sapiens
  misc_feature: Table A; Target 4894; HLA-B*44:02; ADAM2; ENSG00000104755; CTA
KDIESRDLSF

SEQ ID NO: 4895 - protein, 10 aa, Homo sapiens
  misc_feature: Table A; Target 4895; HLA-B*44:03; ADAM2; ENSG00000104755; CTA
KDIESRDLSF

SEQ ID NO: 4896 - protein, 10 aa, Homo sapiens
  misc_feature: Table A; Target 4896; HLA-B*57:01; ADAM2; ENSG00000104755; CTA
KDIESRDLSF

SEQ ID NO: 4897 - protein, 10 aa, Homo sapiens
  misc_feature: Table A; Target 4897; HLA-C*16:01; ADAM2; ENSG00000104755; CTA
KDIESRDLSF

SEQ ID NO: 4898 - protein, 10 aa, Homo sapiens
  misc_feature: Table A; Target 4898; HLA-C*16:02; ADAM2; ENSG00000104755; CTA
KDIESRDLSF

SEQ ID NO: 4899 - protein, 10 aa, Homo sapiens
  misc_feature: Table A; Target 4899; HLA-C*16:04; ADAM2; ENSG00000104755; CTA
KDIESRDLSF

SEQ ID NO: 4900 - protein, 10 aa, Homo sapiens
  misc_feature: Table A; Target 4900; HLA-A*30:02; ADAM2; ENSG00000104755; CTA
KEGIESQASY

SEQ ID NO: 4901 - protein, 10 aa, Homo sapiens
  misc_feature: Table A; Target 4901; HLA-B*27:02; ADAM2; ENSG00000104755; CTA
KEGIESQASY

SEQ ID NO: 4902 - protein, 10 aa, Homo sapiens
  misc_feature: Table A; Target 4902; HLA-B*40:01; ADAM2; ENSG00000104755; CTA
KEGIESQASY

SEQ ID NO: 4903 - protein, 10 aa, Homo sapiens
  misc_feature: Table A; Target 4903; HLA-B*44:02; ADAM2; ENSG00000104755; CTA
KEGIESQASY

SEQ ID NO: 4904 - protein, 10 aa, Homo sapiens
  misc_feature: Table A; Target 4904; HLA-B*44:03; ADAM2; ENSG00000104755; CTA
KEGIESQASY

SEQ ID NO: 4905 - protein, 10 aa, Homo sapiens
  misc_feature: Table A; Target 4905; HLA-C*16:04; ADAM2; ENSG00000104755; CTA
KEGIESQASY

SEQ ID NO: 4906 - protein, 11 aa, Homo sapiens
  misc_feature: Table A; Target 4906; HLA-A*03:02; ADAM2; ENSG00000104755; CTA
KEGIESQASYK

SEQ ID NO: 4907 - protein, 10 aa, Homo sapiens
  misc_feature: Table A; Target 4907; HLA-A*30:01; ADAM2; ENSG00000104755; CTA
KEVEFGPSEC

SEQ ID NO: 4908 - protein, 10 aa, Homo sapiens
  misc_feature: Table A; Target 4908; HLA-B*40:01; ADAM2; ENSG00000104755; CTA
KEVEFGPSEC

SEQ ID NO: 4909 - protein, 10 aa, Homo sapiens
  misc_feature: Table A; Target 4909; HLA-B*40:02; ADAM2; ENSG00000104755; CTA
KEVEFGPSEC

SEQ ID NO: 4910 - protein, 10 aa, Homo sapiens
  misc_feature: Table A; Target 4910; HLA-B*49:01; ADAM2; ENSG00000104755; CTA
KEVEFGPSEC

SEQ ID NO: 4911 - protein, 11 aa, Homo sapiens
  misc_feature: Table A; Target 4911; HLA-A*30:01; ADAM2; ENSG00000104755; CTA
KEVEFGPSECY

SEQ ID NO: 4912 - protein, 11 aa, Homo sapiens
  misc_feature: Table A; Target 4912; HLA-A*30:02; ADAM2; ENSG00000104755; CTA
KEVEFGPSECY

SEQ ID NO: 4913 - protein, 11 aa, Homo sapiens
  misc_feature: Table A; Target 4913; HLA-B*15:01; ADAM2; ENSG00000104755; CTA
KEVEFGPSECY

SEQ ID NO: 4914 - protein, 11 aa, Homo sapiens
  misc_feature: Table A; Target 4914; HLA-B*15:03; ADAM2; ENSG00000104755; CTA
KEVEFGPSECY

SEQ ID NO: 4915 - protein, 11 aa, Homo sapiens
  misc_feature: Table A; Target 4915; HLA-B*18:01; ADAM2; ENSG00000104755; CTA
KEVEFGPSECY

SEQ ID NO: 4916 - protein, 11 aa, Homo sapiens
  misc_feature: Table A; Target 4916; HLA-B*27:02; ADAM2; ENSG00000104755; CTA
KEVEFGPSECY

SEQ ID NO: 4917 - protein, 11 aa, Homo sapiens
  misc_feature: Table A; Target 4917; HLA-B*40:01; ADAM2; ENSG00000104755; CTA
KEVEFGPSECY

SEQ ID NO: 4918 - protein, 11 aa, Homo sapiens
  misc_feature: Table A; Target 4918; HLA-B*40:02; ADAM2; ENSG00000104755; CTA
KEVEFGPSECY

SEQ ID NO: 4919 - protein, 11 aa, Homo sapiens
  misc_feature: Table A; Target 4919; HLA-B*44:02; ADAM2; ENSG00000104755; CTA
KEVEFGPSECY

SEQ ID NO: 4920 - protein, 11 aa, Homo sapiens
  misc_feature: Table A; Target 4920; HLA-B*44:03; ADAM2; ENSG00000104755; CTA
KEVEFGPSECY

SEQ ID NO: 4921 - protein, 11 aa, Homo sapiens
  misc_feature: Table A; Target 4921; HLA-C*16:04; ADAM2; ENSG00000104755; CTA
KEVEFGPSECY

SEQ ID NO: 4922 - protein, 11 aa, Homo sapiens
  misc_feature: Table A; Target 4922; HLA-B*27:05; ADAM2; ENSG00000104755; CTA
KIATTGEANEL

SEQ ID NO: 4923 - protein, 11 aa, Homo sapiens
  misc_feature: Table A; Target 4923; HLA-B*40:01; ADAM2; ENSG00000104755; CTA
KIATTGEANEL

SEQ ID NO: 4924 - protein, 11 aa, Homo sapiens
  misc_feature: Table A; Target 4924; HLA-B*58:01; ADAM2; ENSG00000104755; CTA
KIATTGEANEL

SEQ ID NO: 4925 - protein, 11 aa, Homo sapiens
  misc_feature: Table A; Target 4925; HLA-C*01:02; ADAM2; ENSG00000104755; CTA
KIATTGEANEL

SEQ ID NO: 4926 - protein, 11 aa, Homo sapiens
  misc_feature: Table A; Target 4926; HLA-A*02:01; ADAM2; ENSG00000104755; CTA
KIVIEGKPYTV

SEQ ID NO: 4927 - protein, 8 aa, Homo sapiens
  misc_feature: Table A; Target 4927; HLA-B*15:03; ADAM2; ENSG00000104755; CTA
KKADVSLY

SEQ ID NO: 4928 - protein, 11 aa, Homo sapiens
  misc_feature: Table A; Target 4928; HLA-A*03:02; ADAM2; ENSG00000104755; CTA
KLQSVEPQQDF

SEQ ID NO: 4929 - protein, 11 aa, Homo sapiens
  misc_feature: Table A; Target 4929; HLA-A*32:01; ADAM2; ENSG00000104755; CTA
KLQSVEPQQDF

SEQ ID NO: 4930 - protein, 11 aa, Homo sapiens
  misc_feature: Table A; Target 4930; HLA-B*15:01; ADAM2; ENSG00000104755; CTA
KLQSVEPQQDF

SEQ ID NO: 4931 - protein, 8 aa, Homo sapiens
  misc_feature: Table A; Target 4931; HLA-B*57:01; ADAM2; ENSG00000104755; CTA
KNFLPHNF

SEQ ID NO: 4932 - protein, 10 aa, Homo sapiens
  misc_feature: Table A; Target 4932; HLA-A*23:01; ADAM2; ENSG00000104755; CTA
KPLDQDFQNF

SEQ ID NO: 4933 - protein, 10 aa, Homo sapiens
  misc_feature: Table A; Target 4933; HLA-A*24:02; ADAM2; ENSG00000104755; CTA
KPLDQDFQNF

SEQ ID NO: 4934 - protein, 10 aa, Homo sapiens
  misc_feature: Table A; Target 4934; HLA-A*30:02; ADAM2; ENSG00000104755; CTA
KPLDQDFQNF

SEQ ID NO: 4935 - protein, 10 aa, Homo sapiens
  misc_feature: Table A; Target 4935; HLA-B*35:01; ADAM2; ENSG00000104755; CTA
KPLDQDFQNF

SEQ ID NO: 4936 - protein, 10 aa, Homo sapiens
  misc_feature: Table A; Target 4936; HLA-B*57:01; ADAM2; ENSG00000104755; CTA
KPLDQDFQNF

SEQ ID NO: 4937 - protein, 8 aa, Homo sapiens
  misc_feature: Table A; Target 4937; HLA-B*07:02; ADAM2; ENSG00000104755; CTA
KPYTVNLM

SEQ ID NO: 4938 - protein, 8 aa, Homo sapiens
  misc_feature: Table A; Target 4938; HLA-B*08:01; ADAM2; ENSG00000104755; CTA
KPYTVNLM

SEQ ID NO: 4939 - protein, 8 aa, Homo sapiens
  misc_feature: Table A; Target 4939; HLA-B*37:01; ADAM2; ENSG00000104755; CTA
KPYTVNLM

SEQ ID NO: 4940 - protein, 8 aa, Homo sapiens
  misc_feature: Table A; Target 4940; HLA-B*51:01; ADAM2; ENSG00000104755; CTA
KPYTVNLM

SEQ ID NO: 4941 - protein, 8 aa, Homo sapiens
  misc_feature: Table A; Target 4941; HLA-B*55:01; ADAM2; ENSG00000104755; CTA
KPYTVNLM

SEQ ID NO: 4942 - protein, 8 aa, Homo sapiens
  misc_feature: Table A; Target 4942; HLA-B*56:01; ADAM2; ENSG00000104755; CTA
KPYTVNLM

SEQ ID NO: 4943 - protein, 8 aa, Homo sapiens
  misc_feature: Table A; Target 4943; HLA-C*07:02; ADAM2; ENSG00000104755; CTA
KPYTVNLM

SEQ ID NO: 4944 - protein, 8 aa, Homo sapiens
  misc_feature: Table A; Target 4944; HLA-C*12:03; ADAM2; ENSG00000104755; CTA
KPYTVNLM

SEQ ID NO: 4945 - protein, 10 aa, Homo sapiens
  misc_feature: Table A; Target 4945; HLA-A*03:01; ADAM2; ENSG00000104755; CTA
KPYTVNLMQK

SEQ ID NO: 4946 - protein, 10 aa, Homo sapiens
  misc_feature: Table A; Target 4946; HLA-A*03:02; ADAM2; ENSG00000104755; CTA
KQQAVCGNAK

SEQ ID NO: 4947 - protein, 9 aa, Homo sapiens
  misc_feature: Table A; Target 4947; HLA-A*03:02; ADAM2; ENSG00000104755; CTA
KSNYVGATF

SEQ ID NO: 4948 - protein, 9 aa, Homo sapiens
  misc_feature: Table A; Target 4948; HLA-A*23:01; ADAM2; ENSG00000104755; CTA
KSNYVGATF

SEQ ID NO: 4949 - protein, 9 aa, Homo sapiens
  misc_feature: Table A; Target 4949; HLA-A*24:02; ADAM2; ENSG00000104755; CTA
KSNYVGATF

SEQ ID NO: 4950 - protein, 9 aa, Homo sapiens
  misc_feature: Table A; Target 4950; HLA-A*29:02; ADAM2; ENSG00000104755; CTA
KSNYVGATF

SEQ ID NO: 4951 - protein, 9 aa, Homo sapiens
  misc_feature: Table A; Target 4951; HLA-A*30:02; ADAM2; ENSG00000104755; CTA
KSNYVGATF

SEQ ID NO: 4952 - protein, 9 aa, Homo sapiens
  misc_feature: Table A; Target 4952; HLA-A*31:01; ADAM2; ENSG00000104755; CTA
KSNYVGATF

SEQ ID NO: 4953 - protein, 9 aa, Homo sapiens
  misc_feature: Table A; Target 4953; HLA-A*32:01; ADAM2; ENSG00000104755; CTA
KSNYVGATF

SEQ ID NO: 4954 - protein, 9 aa, Homo sapiens
  misc_feature: Table A; Target 4954; HLA-A*33:01; ADAM2; ENSG00000104755; CTA
KSNYVGATF

SEQ ID NO: 4955 - protein, 9 aa, Homo sapiens
  misc_feature: Table A; Target 4955; HLA-B*15:01; ADAM2; ENSG00000104755; CTA
KSNYVGATF

SEQ ID NO: 4956 - protein, 9 aa, Homo sapiens
  misc_feature: Table A; Target 4956; HLA-B*15:03; ADAM2; ENSG00000104755; CTA
KSNYVGATF

SEQ ID NO: 4957 - protein, 9 aa, Homo sapiens
  misc_feature: Table A; Target 4957; HLA-B*27:02; ADAM2; ENSG00000104755; CTA
KSNYVGATF

SEQ ID NO: 4958 - protein, 9 aa, Homo sapiens
  misc_feature: Table A; Target 4958; HLA-B*37:01; ADAM2; ENSG00000104755; CTA
KSNYVGATF

SEQ ID NO: 4959 - protein, 9 aa, Homo sapiens
  misc_feature: Table A; Target 4959; HLA-B*40:02; ADAM2; ENSG00000104755; CTA
KSNYVGATF

SEQ ID NO: 4960 - protein, 9 aa, Homo sapiens
  misc_feature: Table A; Target 4960; HLA-B*46:01; ADAM2; ENSG00000104755; CTA
KSNYVGATF

SEQ ID NO: 4961 - protein, 9 aa, Homo sapiens
  misc_feature: Table A; Target 4961; HLA-B*58:01; ADAM2; ENSG00000104755; CTA
KSNYVGATF

SEQ ID NO: 4962 - protein, 9 aa, Homo sapiens
  misc_feature: Table A; Target 4962; HLA-C*01:02; ADAM2; ENSG00000104755; CTA
KSNYVGATF

SEQ ID NO: 4963 - protein, 9 aa, Homo sapiens
  misc_feature: Table A; Target 4963; HLA-C*02:02; ADAM2; ENSG00000104755; CTA
KSNYVGATF

SEQ ID NO: 4964 - protein, 9 aa, Homo sapiens
  misc_feature: Table A; Target 4964; HLA-C*03:03; ADAM2; ENSG00000104755; CTA
KSNYVGATF

SEQ ID NO: 4965 - protein, 9 aa, Homo sapiens
  misc_feature: Table A; Target 4965; HLA-C*03:04; ADAM2; ENSG00000104755; CTA
KSNYVGATF

SEQ ID NO: 4966 - protein, 9 aa, Homo sapiens
  misc_feature: Table A; Target 4966; HLA-C*04:01; ADAM2; ENSG00000104755; CTA
KSNYVGATF

SEQ ID NO: 4967 - protein, 9 aa, Homo sapiens
  misc_feature: Table A; Target 4967; HLA-C*07:02; ADAM2; ENSG00000104755; CTA
KSNYVGATF

SEQ ID NO: 4968 - protein, 9 aa, Homo sapiens
  misc_feature: Table A; Target 4968; HLA-C*07:04; ADAM2; ENSG00000104755; CTA
KSNYVGATF

SEQ ID NO: 4969 - protein, 9 aa, Homo sapiens
  misc_feature: Table A; Target 4969; HLA-C*14:02; ADAM2; ENSG00000104755; CTA
KSNYVGATF

SEQ ID NO: 4970 - protein, 9 aa, Homo sapiens
  misc_feature: Table A; Target 4970; HLA-C*16:01; ADAM2; ENSG00000104755; CTA
KSNYVGATF

SEQ ID NO: 4971 - protein, 9 aa, Homo sapiens
  misc_feature: Table A; Target 4971; HLA-C*16:02; ADAM2; ENSG00000104755; CTA
KSNYVGATF

SEQ ID NO: 4972 - protein, 9 aa, Homo sapiens
  misc_feature: Table A; Target 4972; HLA-C*16:04; ADAM2; ENSG00000104755; CTA
KSNYVGATF

SEQ ID NO: 4973 - protein, 11 aa, Homo sapiens
  misc_feature: Table A; Target 4973; HLA-C*06:02; ADAM2; ENSG00000104755; CTA
KSNYVGATFQG

SEQ ID NO: 4974 - protein, 9 aa, Homo sapiens
  misc_feature: Table A; Target 4974; HLA-B*58:01; ADAM2; ENSG00000104755; CTA
KSVVMVSTC

SEQ ID NO: 4975 - protein, 8 aa, Homo sapiens
  misc_feature: Table A; Target 4975; HLA-A*31:01; ADAM2; ENSG00000104755; CTA
KTSYLVLR

SEQ ID NO: 4976 - protein, 8 aa, Homo sapiens
  misc_feature: Table A; Target 4976; HLA-A*02:04; ADAM2; ENSG00000104755; CTA
KVFQLIGL

SEQ ID NO: 4977 - protein, 8 aa, Homo sapiens
  misc_feature: Table A; Target 4977; HLA-A*23:01; ADAM2; ENSG00000104755; CTA
KYIEMHVI

SEQ ID NO: 4978 - protein, 8 aa, Homo sapiens
  misc_feature: Table A; Target 4978; HLA-A*24:02; ADAM2; ENSG00000104755; CTA
KYIEMHVI

SEQ ID NO: 4979 - protein, 9 aa, Homo sapiens
  misc_feature: Table A; Target 4979; HLA-A*24:02; ADAM2; ENSG00000104755; CTA
KYIEMHVIV

SEQ ID NO: 4980 - protein, 9 aa, Homo sapiens
  misc_feature: Table A; Target 4980; HLA-C*12:03; ADAM2; ENSG00000104755; CTA
KYIEMHVIV

SEQ ID NO: 4981 - protein, 11 aa, Homo sapiens
  misc_feature: Table A; Target 4981; HLA-A*31:01; ADAM2; ENSG00000104755; CTA
KYIEMHVIVEK

SEQ ID NO: 4982 - protein, 9 aa, Homo sapiens
  misc_feature: Table A; Target 4982; HLA-B*35:01; ADAM2; ENSG00000104755; CTA
LAQLLSLSM

SEQ ID NO: 4983 - protein, 9 aa, Homo sapiens
  misc_feature: Table A; Target 4983; HLA-C*03:03; ADAM2; ENSG00000104755; CTA
LAQLLSLSM

SEQ ID NO: 4984 - protein, 9 aa, Homo sapiens
  misc_feature: Table A; Target 4984; HLA-C*03:04; ADAM2; ENSG00000104755; CTA
LAQLLSLSM

SEQ ID NO: 4985 - protein, 8 aa, Homo sapiens
  misc_feature: Table A; Target 4985; HLA-B*51:01; ADAM2; ENSG00000104755; CTA
LAVILAQL

SEQ ID NO: 4986 - protein, 9 aa, Homo sapiens
  misc_feature: Table A; Target 4986; HLA-B*51:01; ADAM2; ENSG00000104755; CTA
LAVILAQLL

SEQ ID NO: 4987 - protein, 9 aa, Homo sapiens
  misc_feature: Table A; Target 4987; HLA-B*57:01; ADAM2; ENSG00000104755; CTA
LAVILAQLL

SEQ ID NO: 4988 - protein, 9 aa, Homo sapiens
  misc_feature: Table A; Target 4988; HLA-C*02:02; ADAM2; ENSG00000104755; CTA
LAVILAQLL

SEQ ID NO: 4989 - protein, 9 aa, Homo sapiens
  misc_feature: Table A; Target 4989; HLA-C*06:02; ADAM2; ENSG00000104755; CTA
LAVILAQLL

SEQ ID NO: 4990 - protein, 9 aa, Homo sapiens
  misc_feature: Table A; Target 4990; HLA-C*07:01; ADAM2; ENSG00000104755; CTA
LAVILAQLL

SEQ ID NO: 4991 - protein, 9 aa, Homo sapiens
  misc_feature: Table A; Target 4991; HLA-C*12:03; ADAM2; ENSG00000104755; CTA
LAVILAQLL

SEQ ID NO: 4992 - protein, 8 aa, Homo sapiens
  misc_feature: Table A; Target 4992; HLA-B*18:01; ADAM2; ENSG00000104755; CTA
LDQDFQNF

SEQ ID NO: 4993 - protein, 8 aa, Homo sapiens
  misc_feature: Table A; Target 4993; HLA-B*37:01; ADAM2; ENSG00000104755; CTA
LDQDFQNF

SEQ ID NO: 4994 - protein, 8 aa, Homo sapiens
  misc_feature: Table A; Target 4994; HLA-A*30:01; ADAM2; ENSG00000104755; CTA
LESLAVIL

SEQ ID NO: 4995 - protein, 8 aa, Homo sapiens
  misc_feature: Table A; Target 4995; HLA-B*18:01; ADAM2; ENSG00000104755; CTA
LESLAVIL

SEQ ID NO: 4996 - protein, 8 aa, Homo sapiens
  misc_feature: Table A; Target 4996; HLA-B*37:01; ADAM2; ENSG00000104755; CTA
LESLAVIL

SEQ ID NO: 4997 - protein, 8 aa, Homo sapiens
  misc_feature: Table A; Target 4997; HLA-B*40:01; ADAM2; ENSG00000104755; CTA
LESLAVIL

SEQ ID NO: 4998 - protein, 8 aa, Homo sapiens
  misc_feature: Table A; Target 4998; HLA-B*49:01; ADAM2; ENSG00000104755; CTA
LESLAVIL

SEQ ID NO: 4999 - protein, 9 aa, Homo sapiens
  misc_feature: Table A; Target 4999; HLA-B*49:01; ADAM2; ENSG00000104755; CTA
LESLAVILA

SEQ ID NO: 5000 - protein, 9 aa, Homo sapiens
  misc_feature: Table A; Target 5000; HLA-B*18:01; ADAM2; ENSG00000104755; CTA
LESSVGFEH

SEQ ID NO: 5001 - protein, 10 aa, Homo sapiens
  misc_feature: Table A; Target 5001; HLA-B*49:01; ADAM2; ENSG00000104755; CTA
LESSVGFEHV

SEQ ID NO: 5002 - protein, 11 aa, Homo sapiens
  misc_feature: Table A; Target 5002; HLA-B*49:01; ADAM2; ENSG00000104755; CTA
LESSVGFEHVI

SEQ ID NO: 5003 - protein, 9 aa, Homo sapiens
  misc_feature: Table A; Target 5003; HLA-A*24:02; ADAM2; ENSG00000104755; CTA
LFIPFFIIF

SEQ ID NO: 5004 - protein, 9 aa, Homo sapiens
  misc_feature: Table A; Target 5004; HLA-A*29:02; ADAM2; ENSG00000104755; CTA
LFIPFFIIF

SEQ ID NO: 5005 - protein, 8 aa, Homo sapiens
  misc_feature: Table A; Target 5005; HLA-B*08:01; ADAM2; ENSG00000104755; CTA
LFMSKERM

SEQ ID NO: 5006 - protein, 9 aa, Homo sapiens
  misc_feature: Table A; Target 5006; HLA-A*11:01; ADAM2; ENSG00000104755; CTA
LGYDCTTDK

SEQ ID NO: 5007 - protein, 10 aa, Homo sapiens
  misc_feature: Table A; Target 5007; HLA-A*01:01; ADAM2; ENSG00000104755; CTA
LLSLSMGITY

SEQ ID NO: 5008 - protein, 10 aa, Homo sapiens
  misc_feature: Table A; Target 5008; HLA-A*30:02; ADAM2; ENSG00000104755; CTA
LLSLSMGITY

SEQ ID NO: 5009 - protein, 10 aa, Homo sapiens
  misc_feature: Table A; Target 5009; HLA-B*15:01; ADAM2; ENSG00000104755; CTA
LLSLSMGITY

SEQ ID NO: 5010 - protein, 10 aa, Homo sapiens
  misc_feature: Table A; Target 5010; HLA-C*07:01; ADAM2; ENSG00000104755; CTA
LLSLSMGITY

SEQ ID NO: 5011 - protein, 8 aa, Homo sapiens
  misc_feature: Table A; Target 5011; HLA-B*35:01; ADAM2; ENSG00000104755; CTA
LPHNFRVY

SEQ ID NO: 5012 - protein, 8 aa, Homo sapiens
  misc_feature: Table A; Target 5012; HLA-B*51:01; ADAM2; ENSG00000104755; CTA
LPHNFRVY

SEQ ID NO: 5013 - protein, 8 aa, Homo sapiens
  misc_feature: Table A; Target 5013; HLA-B*54:01; ADAM2; ENSG00000104755; CTA
LPHNFRVY

SEQ ID NO: 5014 - protein, 9 aa, Homo sapiens
  misc_feature: Table A; Target 5014; HLA-B*54:01; ADAM2; ENSG00000104755; CTA
LPHNFRVYS

SEQ ID NO: 5015 - protein, 10 aa, Homo sapiens
  misc_feature: Table A; Target 5015; HLA-A*29:02; ADAM2; ENSG00000104755; CTA
LPHNFRVYSY

SEQ ID NO: 5016 - protein, 10 aa, Homo sapiens
  misc_feature: Table A; Target 5016; HLA-B*35:01; ADAM2; ENSG00000104755; CTA
LPHNFRVYSY

SEQ ID NO: 5017 - protein, 10 aa, Homo sapiens
  misc_feature: Table A; Target 5017; HLA-B*54:01; ADAM2; ENSG00000104755; CTA
LPHNFRVYSY

SEQ ID NO: 5018 - protein, 8 aa, Homo sapiens
  misc_feature: Table A; Target 5018; HLA-B*54:01; ADAM2; ENSG00000104755; CTA
LPVQITVP

SEQ ID NO: 5019 - protein, 8 aa, Homo sapiens
  misc_feature: Table A; Target 5019; HLA-B*56:01; ADAM2; ENSG00000104755; CTA
LPVQITVP

SEQ ID NO: 5020 - protein, 10 aa, Homo sapiens
  misc_feature: Table A; Target 5020; HLA-B*27:02; ADAM2; ENSG00000104755; CTA
LPVQITVPEK

SEQ ID NO: 5021 - protein, 10 aa, Homo sapiens
  misc_feature: Table A; Target 5021; HLA-B*35:01; ADAM2; ENSG00000104755; CTA
LPVQITVPEK

SEQ ID NO: 5022 - protein, 11 aa, Homo sapiens
  misc_feature: Table A; Target 5022; HLA-B*51:01; ADAM2; ENSG00000104755; CTA
LPVQITVPEKI

SEQ ID NO: 5023 - protein, 8 aa, Homo sapiens
  misc_feature: Table A; Target 5023; HLA-A*30:02; ADAM2; ENSG00000104755; CTA
LQFENVSY

SEQ ID NO: 5024 - protein, 8 aa, Homo sapiens
  misc_feature: Table A; Target 5024; HLA-A*32:01; ADAM2; ENSG00000104755; CTA
LQFENVSY

SEQ ID NO: 5025 - protein, 8 aa, Homo sapiens
  misc_feature: Table A; Target 5025; HLA-B*15:01; ADAM2; ENSG00000104755; CTA
LQFENVSY

SEQ ID NO: 5026 - protein, 8 aa, Homo sapiens
  misc_feature: Table A; Target 5026; HLA-B*15:03; ADAM2; ENSG00000104755; CTA
LQFENVSY

SEQ ID NO: 5027 - protein, 8 aa, Homo sapiens
  misc_feature: Table A; Target 5027; HLA-B*18:01; ADAM2; ENSG00000104755; CTA
LQFENVSY

SEQ ID NO: 5028 - protein, 8 aa, Homo sapiens
  misc_feature: Table A; Target 5028; HLA-B*39:01; ADAM2; ENSG00000104755; CTA
LQFENVSY

SEQ ID NO: 5029 - protein, 8 aa, Homo sapiens
  misc_feature: Table A; Target 5029; HLA-B*46:01; ADAM2; ENSG00000104755; CTA
LQFENVSY

SEQ ID NO: 5030 - protein, 8 aa, Homo sapiens
  misc_feature: Table A; Target 5030; HLA-C*02:02; ADAM2; ENSG00000104755; CTA
LQFENVSY

SEQ ID NO: 5031 - protein, 8 aa, Homo sapiens
  misc_feature: Table A; Target 5031; HLA-C*07:04; ADAM2; ENSG00000104755; CTA
LQFENVSY

SEQ ID NO: 5032 - protein, 8 aa, Homo sapiens
  misc_feature: Table A; Target 5032; HLA-C*12:03; ADAM2; ENSG00000104755; CTA
LQFENVSY

SEQ ID NO: 5033 - protein, 8 aa, Homo sapiens
  misc_feature: Table A; Target 5033; HLA-C*14:02; ADAM2; ENSG00000104755; CTA
LQFENVSY

SEQ ID NO: 5034 - protein, 8 aa, Homo sapiens
  misc_feature: Table A; Target 5034; HLA-C*16:04; ADAM2; ENSG00000104755; CTA
LQFENVSY

SEQ ID NO: 5035 - protein, 9 aa, Homo sapiens
  misc_feature: Table A; Target 5035; HLA-A*24:02; ADAM2; ENSG00000104755; CTA
LQIPRATII

SEQ ID NO: 5036 - protein, 9 aa, Homo sapiens
  misc_feature: Table A; Target 5036; HLA-B*13:02; ADAM2; ENSG00000104755; CTA
LQIPRATII

SEQ ID NO: 5037 - protein, 10 aa, Homo sapiens
  misc_feature: Table A; Target 5037; HLA-B*15:01; ADAM2; ENSG00000104755; CTA
LQIPRATIIY

SEQ ID NO: 5038 - protein, 10 aa, Homo sapiens
  misc_feature: Table A; Target 5038; HLA-B*15:03; ADAM2; ENSG00000104755; CTA
LQIPRATIIY

SEQ ID NO: 5039 - protein, 10 aa, Homo sapiens
  misc_feature: Table A; Target 5039; HLA-C*07:04; ADAM2; ENSG00000104755; CTA
LQIPRATIIY

SEQ ID NO: 5040 - protein, 10 aa, Homo sapiens
  misc_feature: Table A; Target 5040; HLA-B*15:01; ADAM2; ENSG00000104755; CTA
LQSVEPQQDF

SEQ ID NO: 5041 - protein, 10 aa, Homo sapiens
  misc_feature: Table A; Target 5041; HLA-B*39:01; ADAM2; ENSG00000104755; CTA
LQSVEPQQDF

SEQ ID NO: 5042 - protein, 10 aa, Homo sapiens
  misc_feature: Table A; Target 5042; HLA-B*27:02; ADAM2; ENSG00000104755; CTA
LRMDSNFDSL

SEQ ID NO: 5043 - protein, 10 aa, Homo sapiens
  misc_feature: Table A; Target 5043; HLA-B*39:01; ADAM2; ENSG00000104755; CTA
LRMDSNFDSL

SEQ ID NO: 5044 - protein, 9 aa, Homo sapiens
  misc_feature: Table A; Target 5044; HLA-A*01:01; ADAM2; ENSG00000104755; CTA
LSGLGGLRM

SEQ ID NO: 5045 - protein, 9 aa, Homo sapiens
  misc_feature: Table A; Target 5045; HLA-A*01:01; ADAM2; ENSG00000104755; CTA
LSLSMGITY

SEQ ID NO: 5046 - protein, 9 aa, Homo sapiens
  misc_feature: Table A; Target 5046; HLA-A*03:01; ADAM2; ENSG00000104755; CTA
LSLSMGITY

SEQ ID NO: 5047 - protein, 9 aa, Homo sapiens
  misc_feature: Table A; Target 5047; HLA-A*29:02; ADAM2; ENSG00000104755; CTA
LSLSMGITY

SEQ ID NO: 5048 - protein, 9 aa, Homo sapiens
  misc_feature: Table A; Target 5048; HLA-A*30:02; ADAM2; ENSG00000104755; CTA
LSLSMGITY

SEQ ID NO: 5049 - protein, 9 aa, Homo sapiens
  misc_feature: Table A; Target 5049; HLA-A*32:01; ADAM2; ENSG00000104755; CTA
LSLSMGITY

SEQ ID NO: 5050 - protein, 9 aa, Homo sapiens
  misc_feature: Table A; Target 5050; HLA-B*15:01; ADAM2; ENSG00000104755; CTA
LSLSMGITY

SEQ ID NO: 5051 - protein, 9 aa, Homo sapiens
  misc_feature: Table A; Target 5051; HLA-B*15:03; ADAM2; ENSG00000104755; CTA
LSLSMGITY

SEQ ID NO: 5052 - protein, 9 aa, Homo sapiens
  misc_feature: Table A; Target 5052; HLA-B*18:01; ADAM2; ENSG00000104755; CTA
LSLSMGITY

SEQ ID NO: 5053 - protein, 9 aa, Homo sapiens
  misc_feature: Table A; Target 5053; HLA-B*35:01; ADAM2; ENSG00000104755; CTA
LSLSMGITY

SEQ ID NO: 5054 - protein, 9 aa, Homo sapiens
  misc_feature: Table A; Target 5054; HLA-B*46:01; ADAM2; ENSG00000104755; CTA
LSLSMGITY

SEQ ID NO: 5055 - protein, 9 aa, Homo sapiens
  misc_feature: Table A; Target 5055; HLA-B*57:01; ADAM2; ENSG00000104755; CTA
LSLSMGITY

SEQ ID NO: 5056 - protein, 9 aa, Homo sapiens
  misc_feature: Table A; Target 5056; HLA-B*58:01; ADAM2; ENSG00000104755; CTA
LSLSMGITY

SEQ ID NO: 5057 - protein, 9 aa, Homo sapiens
  misc_feature: Table A; Target 5057; HLA-C*01:02; ADAM2; ENSG00000104755; CTA
LSLSMGITY

SEQ ID NO: 5058 - protein, 9 aa, Homo sapiens
  misc_feature: Table A; Target 5058; HLA-C*02:02; ADAM2; ENSG00000104755; CTA
LSLSMGITY

SEQ ID NO: 5059 - protein, 9 aa, Homo sapiens
  misc_feature: Table A; Target 5059; HLA-C*03:03; ADAM2; ENSG00000104755; CTA
LSLSMGITY

SEQ ID NO: 5060 - protein, 9 aa, Homo sapiens
  misc_feature: Table A; Target 5060; HLA-C*03:04; ADAM2; ENSG00000104755; CTA
LSLSMGITY

SEQ ID NO: 5061 - protein, 9 aa, Homo sapiens
  misc_feature: Table A; Target 5061; HLA-C*04:01; ADAM2; ENSG00000104755; CTA
LSLSMGITY

SEQ ID NO: 5062 - protein, 9 aa, Homo sapiens
  misc_feature: Table A; Target 5062; HLA-C*07:01; ADAM2; ENSG00000104755; CTA
LSLSMGITY

SEQ ID NO: 5063 - protein, 9 aa, Homo sapiens
  misc_feature: Table A; Target 5063; HLA-C*07:04; ADAM2; ENSG00000104755; CTA
LSLSMGITY

SEQ ID NO: 5064 - protein, 9 aa, Homo sapiens
  misc_feature: Table A; Target 5064; HLA-C*12:03; ADAM2; ENSG00000104755; CTA
LSLSMGITY

SEQ ID NO: 5065 - protein, 9 aa, Homo sapiens
  misc_feature: Table A; Target 5065; HLA-C*14:02; ADAM2; ENSG00000104755; CTA
LSLSMGITY

SEQ ID NO: 5066 - protein, 9 aa, Homo sapiens
  misc_feature: Table A; Target 5066; HLA-C*16:01; ADAM2; ENSG00000104755; CTA
LSLSMGITY

SEQ ID NO: 5067 - protein, 9 aa, Homo sapiens
  misc_feature: Table A; Target 5067; HLA-C*16:04; ADAM2; ENSG00000104755; CTA
LSLSMGITY

SEQ ID NO: 5068 - protein, 9 aa, Homo sapiens
  misc_feature: Table A; Target 5068; HLA-A*02:07; ADAM2; ENSG00000104755; CTA
LTNAIFVSF

SEQ ID NO: 5069 - protein, 9 aa, Homo sapiens
  misc_feature: Table A; Target 5069; HLA-A*11:01; ADAM2; ENSG00000104755; CTA
LTNAIFVSF

SEQ ID NO: 5070 - protein, 9 aa, Homo sapiens
  misc_feature: Table A; Target 5070; HLA-A*23:01; ADAM2; ENSG00000104755; CTA
LTNAIFVSF

SEQ ID NO: 5071 - protein, 9 aa, Homo sapiens
  misc_feature: Table A; Target 5071; HLA-A*24:02; ADAM2; ENSG00000104755; CTA
LTNAIFVSF

SEQ ID NO: 5072 - protein, 9 aa, Homo sapiens
  misc_feature: Table A; Target 5072; HLA-A*25:01; ADAM2; ENSG00000104755; CTA
LTNAIFVSF

SEQ ID NO: 5073 - protein, 9 aa, Homo sapiens
  misc_feature: Table A; Target 5073; HLA-A*26:01; ADAM2; ENSG00000104755; CTA
LTNAIFVSF

SEQ ID NO: 5074 - protein, 9 aa, Homo sapiens
  misc_feature: Table A; Target 5074; HLA-A*29:02; ADAM2; ENSG00000104755; CTA
LTNAIFVSF

SEQ ID NO: 5075 - protein, 9 aa, Homo sapiens
  misc_feature: Table A; Target 5075; HLA-A*30:02; ADAM2; ENSG00000104755; CTA
LTNAIFVSF

SEQ ID NO: 5076 - protein, 9 aa, Homo sapiens
  misc_feature: Table A; Target 5076; HLA-A*31:01; ADAM2; ENSG00000104755; CTA
LTNAIFVSF

SEQ ID NO: 5077 - protein, 9 aa, Homo sapiens
  misc_feature: Table A; Target 5077; HLA-A*32:01; ADAM2; ENSG00000104755; CTA
LTNAIFVSF

SEQ ID NO: 5078 - protein, 9 aa, Homo sapiens
  misc_feature: Table A; Target 5078; HLA-A*33:01; ADAM2; ENSG00000104755; CTA
LTNAIFVSF

SEQ ID NO: 5079 - protein, 9 aa, Homo sapiens
  misc_feature: Table A; Target 5079; HLA-A*33:03; ADAM2; ENSG00000104755; CTA
LTNAIFVSF

SEQ ID NO: 5080 - protein, 9 aa, Homo sapiens
  misc_feature: Table A; Target 5080; HLA-A*68:02; ADAM2; ENSG00000104755; CTA
LTNAIFVSF

SEQ ID NO: 5081 - protein, 9 aa, Homo sapiens
  misc_feature: Table A; Target 5081; HLA-B*15:01; ADAM2; ENSG00000104755; CTA
LTNAIFVSF

SEQ ID NO: 5082 - protein, 9 aa, Homo sapiens
  misc_feature: Table A; Target 5082; HLA-B*15:03; ADAM2; ENSG00000104755; CTA
LTNAIFVSF

SEQ ID NO: 5083 - protein, 9 aa, Homo sapiens
  misc_feature: Table A; Target 5083; HLA-B*27:02; ADAM2; ENSG00000104755; CTA
LTNAIFVSF

SEQ ID NO: 5084 - protein, 9 aa, Homo sapiens
  misc_feature: Table A; Target 5084; HLA-B*35:01; ADAM2; ENSG00000104755; CTA
LTNAIFVSF

SEQ ID NO: 5085 - protein, 9 aa, Homo sapiens
  misc_feature: Table A; Target 5085; HLA-B*46:01; ADAM2; ENSG00000104755; CTA
LTNAIFVSF

SEQ ID NO: 5086 - protein, 9 aa, Homo sapiens
  misc_feature: Table A; Target 5086; HLA-B*57:01; ADAM2; ENSG00000104755; CTA
LTNAIFVSF

SEQ ID NO: 5087 - protein, 9 aa, Homo sapiens
  misc_feature: Table A; Target 5087; HLA-B*58:01; ADAM2; ENSG00000104755; CTA
LTNAIFVSF

SEQ ID NO: 5088 - protein, 9 aa, Homo sapiens
  misc_feature: Table A; Target 5088; HLA-C*01:02; ADAM2; ENSG00000104755; CTA
LTNAIFVSF

SEQ ID NO: 5089 - protein, 9 aa, Homo sapiens
  misc_feature: Table A; Target 5089; HLA-C*02:02; ADAM2; ENSG00000104755; CTA
LTNAIFVSF

SEQ ID NO: 5090 - protein, 9 aa, Homo sapiens
  misc_feature: Table A; Target 5090; HLA-C*03:03; ADAM2; ENSG00000104755; CTA
LTNAIFVSF

SEQ ID NO: 5091 - protein, 9 aa, Homo sapiens
  misc_feature: Table A; Target 5091; HLA-C*03:04; ADAM2; ENSG00000104755; CTA
LTNAIFVSF

SEQ ID NO: 5092 - protein, 9 aa, Homo sapiens
  misc_feature: Table A; Target 5092; HLA-C*07:04; ADAM2; ENSG00000104755; CTA
LTNAIFVSF

SEQ ID NO: 5093 - protein, 9 aa, Homo sapiens
  misc_feature: Table A; Target 5093; HLA-C*12:03; ADAM2; ENSG00000104755; CTA
LTNAIFVSF

SEQ ID NO: 5094 - protein, 9 aa, Homo sapiens
  misc_feature: Table A; Target 5094; HLA-C*14:02; ADAM2; ENSG00000104755; CTA
LTNAIFVSF

SEQ ID NO: 5095 - protein, 9 aa, Homo sapiens
  misc_feature: Table A; Target 5095; HLA-C*16:01; ADAM2; ENSG00000104755; CTA
LTNAIFVSF

SEQ ID NO: 5096 - protein, 9 aa, Homo sapiens
  misc_feature: Table A; Target 5096; HLA-C*16:04; ADAM2; ENSG00000104755; CTA
LTNAIFVSF

SEQ ID NO: 5097 - protein, 10 aa, Homo sapiens
  misc_feature: Table A; Target 5097; HLA-B*57:01; ADAM2; ENSG00000104755; CTA
LVLRPHDVAF

SEQ ID NO: 5098 - protein, 9 aa, Homo sapiens
  misc_feature: Table A; Target 5098; HLA-A*03:01; ADAM2; ENSG00000104755; CTA
LVYREKSNY

SEQ ID NO: 5099 - protein, 9 aa, Homo sapiens
  misc_feature: Table A; Target 5099; HLA-A*26:01; ADAM2; ENSG00000104755; CTA
LVYREKSNY

SEQ ID NO: 5100 - protein, 9 aa, Homo sapiens
  misc_feature: Table A; Target 5100; HLA-A*29:02; ADAM2; ENSG00000104755; CTA
LVYREKSNY

SEQ ID NO: 5101 - protein, 9 aa, Homo sapiens
  misc_feature: Table A; Target 5101; HLA-A*30:02; ADAM2; ENSG00000104755; CTA
LVYREKSNY

SEQ ID NO: 5102 - protein, 9 aa, Homo sapiens
  misc_feature: Table A; Target 5102; HLA-B*15:01; ADAM2; ENSG00000104755; CTA
LVYREKSNY

SEQ ID NO: 5103 - protein, 9 aa, Homo sapiens
  misc_feature: Table A; Target 5103; HLA-C*02:02; ADAM2; ENSG00000104755; CTA
LVYREKSNY

SEQ ID NO: 5104 - protein, 10 aa, Homo sapiens
  misc_feature: Table A; Target 5104; HLA-A*31:01; ADAM2; ENSG00000104755; CTA
LYNEKDIESR

SEQ ID NO: 5105 - protein, 10 aa, Homo sapiens
  misc_feature: Table A; Target 5105; HLA-A*33:01; ADAM2; ENSG00000104755; CTA
LYNEKDIESR

SEQ ID NO: 5106 - protein, 10 aa, Homo sapiens
  misc_feature: Table A; Target 5106; HLA-A*33:03; ADAM2; ENSG00000104755; CTA
LYNEKDIESR

SEQ ID NO: 5107 - protein, 8 aa, Homo sapiens
  misc_feature: Table A; Target 5107; HLA-B*37:01; ADAM2; ENSG00000104755; CTA
MDSNFDSL

SEQ ID NO: 5108 - protein, 10 aa, Homo sapiens
  misc_feature: Table A; Target 5108; HLA-C*04:01; ADAM2; ENSG00000104755; CTA
MDSNFDSLPV

SEQ ID NO: 5109 - protein, 10 aa, Homo sapiens
  misc_feature: Table A; Target 5109; HLA-A*11:01; ADAM2; ENSG00000104755; CTA
MGITYDDINK

SEQ ID NO: 5110 - protein, 10 aa, Homo sapiens
  misc_feature: Table A; Target 5110; HLA-B*27:02; ADAM2; ENSG00000104755; CTA
MGITYDDINK

SEQ ID NO: 5111 - protein, 9 aa, Homo sapiens
  misc_feature: Table A; Target 5111; HLA-B*35:03; ADAM2; ENSG00000104755; CTA
MGSDTTVVA

SEQ ID NO: 5112 - protein, 9 aa, Homo sapiens
  misc_feature: Table A; Target 5112; HLA-B*54:01; ADAM2; ENSG00000104755; CTA
MGSDTTVVA

SEQ ID NO: 5113 - protein, 9 aa, Homo sapiens
  misc_feature: Table A; Target 5113; HLA-C*07:04; ADAM2; ENSG00000104755; CTA
MGSDTTVVA

SEQ ID NO: 5114 - protein, 10 aa, Homo sapiens
  misc_feature: Table A; Target 5114; HLA-B*07:02; ADAM2; ENSG00000104755; CTA
MGSDTTVVAQ

SEQ ID NO: 5115 - protein, 10 aa, Homo sapiens
  misc_feature: Table A; Target 5115; HLA-C*04:01; ADAM2; ENSG00000104755; CTA
MGSDTTVVAQ

SEQ ID NO: 5116 - protein, 10 aa, Homo sapiens
  misc_feature: Table A; Target 5116; HLA-C*07:06; ADAM2; ENSG00000104755; CTA
MGSDTTVVAQ

SEQ ID NO: 5117 - protein, 11 aa, Homo sapiens
  misc_feature: Table A; Target 5117; HLA-A*03:01; ADAM2; ENSG00000104755; CTA
MGSDTTVVAQK

SEQ ID NO: 5118 - protein, 11 aa, Homo sapiens
  misc_feature: Table A; Target 5118; HLA-A*03:02; ADAM2; ENSG00000104755; CTA
MGSDTTVVAQK

SEQ ID NO: 5119 - protein, 11 aa, Homo sapiens
  misc_feature: Table A; Target 5119; HLA-A*31:01; ADAM2; ENSG00000104755; CTA
MGSDTTVVAQK

SEQ ID NO: 5120 - protein, 11 aa, Homo sapiens
  misc_feature: Table A; Target 5120; HLA-A*33:01; ADAM2; ENSG00000104755; CTA
MGSDTTVVAQK

SEQ ID NO: 5121 - protein, 11 aa, Homo sapiens
  misc_feature: Table A; Target 5121; HLA-A*33:03; ADAM2; ENSG00000104755; CTA
MGSDTTVVAQK

SEQ ID NO: 5122 - protein, 11 aa, Homo sapiens
  misc_feature: Table A; Target 5122; HLA-A*68:01; ADAM2; ENSG00000104755; CTA
MGSDTTVVAQK

SEQ ID NO: 5123 - protein, 11 aa, Homo sapiens
  misc_feature: Table A; Target 5123; HLA-A*68:02; ADAM2; ENSG00000104755; CTA
MGSDTTVVAQK

SEQ ID NO: 5124 - protein, 11 aa, Homo sapiens
  misc_feature: Table A; Target 5124; HLA-B*27:02; ADAM2; ENSG00000104755; CTA
MGSDTTVVAQK

SEQ ID NO: 5125 - protein, 11 aa, Homo sapiens
  misc_feature: Table A; Target 5125; HLA-B*27:05; ADAM2; ENSG00000104755; CTA
MGSDTTVVAQK

SEQ ID NO: 5126 - protein, 11 aa, Homo sapiens
  misc_feature: Table A; Target 5126; HLA-C*07:02; ADAM2; ENSG00000104755; CTA
MGSDTTVVAQK

SEQ ID NO: 5127 - protein, 11 aa, Homo sapiens
  misc_feature: Table A; Target 5127; HLA-C*07:06; ADAM2; ENSG00000104755; CTA
MGSDTTVVAQK

SEQ ID NO: 5128 - protein, 9 aa, Homo sapiens
  misc_feature: Table A; Target 5128; HLA-B*38:01; ADAM2; ENSG00000104755; CTA
MHVIVEKQL

SEQ ID NO: 5129 - protein, 8 aa, Homo sapiens
  misc_feature: Table A; Target 5129; HLA-C*04:01; ADAM2; ENSG00000104755; CTA
MNPEAIHF

SEQ ID NO: 5130 - protein, 8 aa, Homo sapiens
  misc_feature: Table A; Target 5130; HLA-C*07:01; ADAM2; ENSG00000104755; CTA
MNPEAIHF

SEQ ID NO: 5131 - protein, 8 aa, Homo sapiens
  misc_feature: Table A; Target 5131; HLA-A*31:01; ADAM2; ENSG00000104755; CTA
MVKVNFQR

SEQ ID NO: 5132 - protein, 8 aa, Homo sapiens
  misc_feature: Table A; Target 5132; HLA-A*33:01; ADAM2; ENSG00000104755; CTA
MVKVNFQR

SEQ ID NO: 5133 - protein, 8 aa, Homo sapiens
  misc_feature: Table A; Target 5133; HLA-A*33:03; ADAM2; ENSG00000104755; CTA
MVKVNFQR

SEQ ID NO: 5134 - protein, 9 aa, Homo sapiens
  misc_feature: Table A; Target 5134; HLA-A*68:02; ADAM2; ENSG00000104755; CTA
NAIFVSFNI

SEQ ID NO: 5135 - protein, 9 aa, Homo sapiens
  misc_feature: Table A; Target 5135; HLA-B*51:01; ADAM2; ENSG00000104755; CTA
NAIFVSFNI

SEQ ID NO: 5136 - protein, 10 aa, Homo sapiens
  misc_feature: Table A; Target 5136; HLA-A*30:01; ADAM2; ENSG00000104755; CTA
NEKDIESRDL

SEQ ID NO: 5137 - protein, 10 aa, Homo sapiens
  misc_feature: Table A; Target 5137; HLA-B*40:01; ADAM2; ENSG00000104755; CTA
NEKDIESRDL

SEQ ID NO: 5138 - protein, 10 aa, Homo sapiens
  misc_feature: Table A; Target 5138; HLA-B*44:02; ADAM2; ENSG00000104755; CTA
NEKDIESRDL

SEQ ID NO: 5139 - protein, 8 aa, Homo sapiens
  misc_feature: Table A; Target 5139; HLA-B*18:01; ADAM2; ENSG00000104755; CTA
NELLHTFL

SEQ ID NO: 5140 - protein, 8 aa, Homo sapiens
  misc_feature: Table A; Target 5140; HLA-B*37:01; ADAM2; ENSG00000104755; CTA
NELLHTFL

SEQ ID NO: 5141 - protein, 10 aa, Homo sapiens
  misc_feature: Table A; Target 5141; HLA-B*44:02; ADAM2; ENSG00000104755; CTA
NELLHTFLRW

SEQ ID NO: 5142 - protein, 10 aa, Homo sapiens
  misc_feature: Table A; Target 5142; HLA-B*44:03; ADAM2; ENSG00000104755; CTA
NELLHTFLRW

SEQ ID NO: 5143 - protein, 9 aa, Homo sapiens
  misc_feature: Table A; Target 5143; HLA-A*02:07; ADAM2; ENSG00000104755; CTA
NFDSLPVQI

SEQ ID NO: 5144 - protein, 9 aa, Homo sapiens
  misc_feature: Table A; Target 5144; HLA-A*23:01; ADAM2; ENSG00000104755; CTA
NFDSLPVQI

SEQ ID NO: 5145 - protein, 9 aa, Homo sapiens
  misc_feature: Table A; Target 5145; HLA-A*24:02; ADAM2; ENSG00000104755; CTA
NFDSLPVQI

SEQ ID NO: 5146 - protein, 9 aa, Homo sapiens
  misc_feature: Table A; Target 5146; HLA-A*32:01; ADAM2; ENSG00000104755; CTA
NFDSLPVQI

SEQ ID NO: 5147 - protein, 9 aa, Homo sapiens
  misc_feature: Table A; Target 5147; HLA-B*35:01; ADAM2; ENSG00000104755; CTA
NFDSLPVQI

SEQ ID NO: 5148 - protein, 9 aa, Homo sapiens
  misc_feature: Table A; Target 5148; HLA-B*35:03; ADAM2; ENSG00000104755; CTA
NFDSLPVQI

SEQ ID NO: 5149 - protein, 9 aa, Homo sapiens
  misc_feature: Table A; Target 5149; HLA-B*38:01; ADAM2; ENSG00000104755; CTA
NFDSLPVQI

SEQ ID NO: 5150 - protein, 9 aa, Homo sapiens
  misc_feature: Table A; Target 5150; HLA-B*55:01; ADAM2; ENSG00000104755; CTA
NFDSLPVQI

SEQ ID NO: 5151 - protein, 9 aa, Homo sapiens
  misc_feature: Table A; Target 5151; HLA-C*05:01; ADAM2; ENSG00000104755; CTA
NFDSLPVQI

SEQ ID NO: 5152 - protein, 9 aa, Homo sapiens
  misc_feature: Table A; Target 5152; HLA-C*07:04; ADAM2; ENSG00000104755; CTA
NFDSLPVQI

SEQ ID NO: 5153 - protein, 9 aa, Homo sapiens
  misc_feature: Table A; Target 5153; HLA-C*14:02; ADAM2; ENSG00000104755; CTA
NFDSLPVQI

SEQ ID NO: 5154 - protein, 10 aa, Homo sapiens
  misc_feature: Table A; Target 5154; HLA-A*29:02; ADAM2; ENSG00000104755; CTA
NFLPHNFRVY

SEQ ID NO: 5155 - protein, 9 aa, Homo sapiens
  misc_feature: Table A; Target 5155; HLA-A*29:02; ADAM2; ENSG00000104755; CTA
NFPPVAIPA

SEQ ID NO: 5156 - protein, 9 aa, Homo sapiens
  misc_feature: Table A; Target 5156; HLA-C*14:02; ADAM2; ENSG00000104755; CTA
NFPPVAIPA

SEQ ID NO: 5157 - protein, 8 aa, Homo sapiens
  misc_feature: Table A; Target 5157; HLA-B*39:01; ADAM2; ENSG00000104755; CTA
NHMGSDTT

SEQ ID NO: 5158 - protein, 9 aa, Homo sapiens
  misc_feature: Table A; Target 5158; HLA-B*27:05; ADAM2; ENSG00000104755; CTA
NHMGSDTTV

SEQ ID NO: 5159 - protein, 9 aa, Homo sapiens
  misc_feature: Table A; Target 5159; HLA-B*38:01; ADAM2; ENSG00000104755; CTA
NHMGSDTTV

SEQ ID NO: 5160 - protein, 9 aa, Homo sapiens
  misc_feature: Table A; Target 5160; HLA-B*39:01; ADAM2; ENSG00000104755; CTA
NHMGSDTTV

SEQ ID NO: 5161 - protein, 10 aa, Homo sapiens
  misc_feature: Table A; Target 5161; HLA-B*38:01; ADAM2; ENSG00000104755; CTA
NHMGSDTTVV

SEQ ID NO: 5162 - protein, 10 aa, Homo sapiens
  misc_feature: Table A; Target 5162; HLA-B*39:01; ADAM2; ENSG00000104755; CTA
NHMGSDTTVV

SEQ ID NO: 5163 - protein, 11 aa, Homo sapiens
  misc_feature: Table A; Target 5163; HLA-B*38:01; ADAM2; ENSG00000104755; CTA
NHMGSDTTVVA

SEQ ID NO: 5164 - protein, 11 aa, Homo sapiens
  misc_feature: Table A; Target 5164; HLA-B*39:01; ADAM2; ENSG00000104755; CTA
NHMGSDTTVVA

SEQ ID NO: 5165 - protein, 9 aa, Homo sapiens
  misc_feature: Table A; Target 5165; HLA-A*68:02; ADAM2; ENSG00000104755; CTA
NITIILSSL

SEQ ID NO: 5166 - protein, 9 aa, Homo sapiens
  misc_feature: Table A; Target 5166; HLA-B*27:05; ADAM2; ENSG00000104755; CTA
NITIILSSL

SEQ ID NO: 5167 - protein, 9 aa, Homo sapiens
  misc_feature: Table A; Target 5167; HLA-C*01:02; ADAM2; ENSG00000104755; CTA
NITIILSSL

SEQ ID NO: 5168 - protein, 9 aa, Homo sapiens
  misc_feature: Table A; Target 5168; HLA-C*14:02; ADAM2; ENSG00000104755; CTA
NITIILSSL

SEQ ID NO: 5169 - protein, 8 aa, Homo sapiens
  misc_feature: Table A; Target 5169; HLA-B*08:01; ADAM2; ENSG00000104755; CTA
NLMQKNFL

SEQ ID NO: 5170 - protein, 9 aa, Homo sapiens
  misc_feature: Table A; Target 5170; HLA-A*24:02; ADAM2; ENSG00000104755; CTA
NQPRLDPFF

SEQ ID NO: 5171 - protein, 9 aa, Homo sapiens
  misc_feature: Table A; Target 5171; HLA-A*30:02; ADAM2; ENSG00000104755; CTA
NQRCVSSSY

SEQ ID NO: 5172 - protein, 9 aa, Homo sapiens
  misc_feature: Table A; Target 5172; HLA-A*32:01; ADAM2; ENSG00000104755; CTA
NQRCVSSSY

SEQ ID NO: 5173 - protein, 9 aa, Homo sapiens
  misc_feature: Table A; Target 5173; HLA-B*15:01; ADAM2; ENSG00000104755; CTA
NQRCVSSSY

SEQ ID NO: 5174 - protein, 9 aa, Homo sapiens
  misc_feature: Table A; Target 5174; HLA-B*15:03; ADAM2; ENSG00000104755; CTA
NQRCVSSSY

SEQ ID NO: 5175 - protein, 9 aa, Homo sapiens
  misc_feature: Table A; Target 5175; HLA-B*46:01; ADAM2; ENSG00000104755; CTA
NQRCVSSSY

SEQ ID NO: 5176 - protein, 9 aa, Homo sapiens
  misc_feature: Table A; Target 5176; HLA-C*07:04; ADAM2; ENSG00000104755; CTA
NQRCVSSSY

SEQ ID NO: 5177 - protein, 9 aa, Homo sapiens
  misc_feature: Table A; Target 5177; HLA-C*14:02; ADAM2; ENSG00000104755; CTA
NQRCVSSSY

SEQ ID NO: 5178 - protein, 9 aa, Homo sapiens
  misc_feature: Table A; Target 5178; HLA-A*68:02; ADAM2; ENSG00000104755; CTA
NVSYGIEPL

SEQ ID NO: 5179 - protein, 9 aa, Homo sapiens
  misc_feature: Table A; Target 5179; HLA-B*35:03; ADAM2; ENSG00000104755; CTA
NVSYGIEPL

SEQ ID NO: 5180 - protein, 9 aa, Homo sapiens
  misc_feature: Table A; Target 5180; HLA-C*01:02; ADAM2; ENSG00000104755; CTA
NVSYGIEPL

SEQ ID NO: 5181 - protein, 9 aa, Homo sapiens
  misc_feature: Table A; Target 5181; HLA-C*07:04; ADAM2; ENSG00000104755; CTA
NVSYGIEPL

SEQ ID NO: 5182 - protein, 8 aa, Homo sapiens
  misc_feature: Table A; Target 5182; HLA-A*23:01; ADAM2; ENSG00000104755; CTA
NYAGGVVL

SEQ ID NO: 5183 - protein, 8 aa, Homo sapiens
  misc_feature: Table A; Target 5183; HLA-B*35:03; ADAM2; ENSG00000104755; CTA
NYAGGVVL

SEQ ID NO: 5184 - protein, 8 aa, Homo sapiens
  misc_feature: Table A; Target 5184; HLA-B*39:01; ADAM2; ENSG00000104755; CTA
NYAGGVVL

SEQ ID NO: 5185 - protein, 8 aa, Homo sapiens
  misc_feature: Table A; Target 5185; HLA-C*01:02; ADAM2; ENSG00000104755; CTA
NYAGGVVL

SEQ ID NO: 5186 - protein, 8 aa, Homo sapiens
  misc_feature: Table A; Target 5186; HLA-C*03:04; ADAM2; ENSG00000104755; CTA
NYAGGVVL

SEQ ID NO: 5187 - protein, 8 aa, Homo sapiens
  misc_feature: Table A; Target 5187; HLA-C*04:01; ADAM2; ENSG00000104755; CTA
NYAGGVVL

SEQ ID NO: 5188 - protein, 8 aa, Homo sapiens
  misc_feature: Table A; Target 5188; HLA-C*14:02; ADAM2; ENSG00000104755; CTA
NYAGGVVL

SEQ ID NO: 5189 - protein, 9 aa, Homo sapiens
  misc_feature: Table A; Target 5189; HLA-A*24:02; ADAM2; ENSG00000104755; CTA
NYAGGVVLH

SEQ ID NO: 5190 - protein, 9 aa, Homo sapiens
  misc_feature: Table A; Target 5190; HLA-A*29:02; ADAM2; ENSG00000104755; CTA
NYAGGVVLH

SEQ ID NO: 5191 - protein, 9 aa, Homo sapiens
  misc_feature: Table A; Target 5191; HLA-A*33:03; ADAM2; ENSG00000104755; CTA
NYAGGVVLH

SEQ ID NO: 5192 - protein, 9 aa, Homo sapiens
  misc_feature: Table A; Target 5192; HLA-C*07:04; ADAM2; ENSG00000104755; CTA
NYAGGVVLH

SEQ ID NO: 5193 - protein, 10 aa, Homo sapiens
  misc_feature: Table A; Target 5193; HLA-C*06:02; ADAM2; ENSG00000104755; CTA
NYAGGVVLHP

SEQ ID NO: 5194 - protein, 10 aa, Homo sapiens
  misc_feature: Table A; Target 5194; HLA-C*07:02; ADAM2; ENSG00000104755; CTA
NYAGGVVLHP

SEQ ID NO: 5195 - protein, 11 aa, Homo sapiens
  misc_feature: Table A; Target 5195; HLA-A*31:01; ADAM2; ENSG00000104755; CTA
NYAGGVVLHPR

SEQ ID NO: 5196 - protein, 11 aa, Homo sapiens
  misc_feature: Table A; Target 5196; HLA-A*33:01; ADAM2; ENSG00000104755; CTA
NYAGGVVLHPR

SEQ ID NO: 5197 - protein, 11 aa, Homo sapiens
  misc_feature: Table A; Target 5197; HLA-A*33:03; ADAM2; ENSG00000104755; CTA
NYAGGVVLHPR

SEQ ID NO: 5198 - protein, 11 aa, Homo sapiens
  misc_feature: Table A; Target 5198; HLA-A*68:01; ADAM2; ENSG00000104755; CTA
NYAGGVVLHPR

SEQ ID NO: 5199 - protein, 8 aa, Homo sapiens
  misc_feature: Table A; Target 5199; HLA-C*07:01; ADAM2; ENSG00000104755; CTA
NYVGATFQ

SEQ ID NO: 5200 - protein, 8 aa, Homo sapiens
  misc_feature: Table A; Target 5200; HLA-C*07:02; ADAM2; ENSG00000104755; CTA
NYVGATFQ

SEQ ID NO: 5201 - protein, 9 aa, Homo sapiens
  misc_feature: Table A; Target 5201; HLA-A*24:02; ADAM2; ENSG00000104755; CTA
NYVGATFQG

SEQ ID NO: 5202 - protein, 9 aa, Homo sapiens
  misc_feature: Table A; Target 5202; HLA-C*07:01; ADAM2; ENSG00000104755; CTA
NYVGATFQG

SEQ ID NO: 5203 - protein, 10 aa, Homo sapiens
  misc_feature: Table A; Target 5203; HLA-A*33:03; ADAM2; ENSG00000104755; CTA
NYVGATFQGK

SEQ ID NO: 5204 - protein, 9 aa, Homo sapiens
  misc_feature: Table A; Target 5204; HLA-B*49:01; ADAM2; ENSG00000104755; CTA
PEAIHFSGV

SEQ ID NO: 5205 - protein, 9 aa, Homo sapiens
  misc_feature: Table A; Target 5205; HLA-A*02:07; ADAM2; ENSG00000104755; CTA
PLDQDFQNF

SEQ ID NO: 5206 - protein, 9 aa, Homo sapiens
  misc_feature: Table A; Target 5206; HLA-A*24:02; ADAM2; ENSG00000104755; CTA
PLDQDFQNF

SEQ ID NO: 5207 - protein, 8 aa, Homo sapiens
  misc_feature: Table A; Target 5207; HLA-A*30:02; ADAM2; ENSG00000104755; CTA
PQQDFAKY

SEQ ID NO: 5208 - protein, 9 aa, Homo sapiens
  misc_feature: Table A; Target 5208; HLA-C*07:02; ADAM2; ENSG00000104755; CTA
PRTISLESL

SEQ ID NO: 5209 - protein, 9 aa, Homo sapiens
  misc_feature: Table A; Target 5209; HLA-A*03:02; ADAM2; ENSG00000104755; CTA
PVQITVPEK

SEQ ID NO: 5210 - protein, 9 aa, Homo sapiens
  misc_feature: Table A; Target 5210; HLA-A*11:01; ADAM2; ENSG00000104755; CTA
PVQITVPEK

SEQ ID NO: 5211 - protein, 9 aa, Homo sapiens
  misc_feature: Table A; Target 5211; HLA-B*27:02; ADAM2; ENSG00000104755; CTA
PVQITVPEK

SEQ ID NO: 5212 - protein, 8 aa, Homo sapiens
  misc_feature: Table A; Target 5212; HLA-B*08:01; ADAM2; ENSG00000104755; CTA
QASYKIVI

SEQ ID NO: 5213 - protein, 8 aa, Homo sapiens
  misc_feature: Table A; Target 5213; HLA-C*07:04; ADAM2; ENSG00000104755; CTA
QASYKIVI

SEQ ID NO: 5214 - protein, 8 aa, Homo sapiens
  misc_feature: Table A; Target 5214; HLA-C*16:01; ADAM2; ENSG00000104755; CTA
QASYKIVI

SEQ ID NO: 5215 - protein, 9 aa, Homo sapiens
  misc_feature: Table A; Target 5215; HLA-C*07:01; ADAM2; ENSG00000104755; CTA
QCGKLICKY

SEQ ID NO: 5216 - protein, 9 aa, Homo sapiens
  misc_feature: Table A; Target 5216; HLA-C*04:01; ADAM2; ENSG00000104755; CTA
QCSGAVCIM

SEQ ID NO: 5217 - protein, 9 aa, Homo sapiens
  misc_feature: Table A; Target 5217; HLA-C*07:01; ADAM2; ENSG00000104755; CTA
QCSGAVCIM

SEQ ID NO: 5218 - protein, 9 aa, Homo sapiens
  misc_feature: Table A; Target 5218; HLA-A*30:01; ADAM2; ENSG00000104755; CTA
QDFAKYIEM

SEQ ID NO: 5219 - protein, 9 aa, Homo sapiens
  misc_feature: Table A; Target 5219; HLA-B*37:01; ADAM2; ENSG00000104755; CTA
QDFAKYIEM

SEQ ID NO: 5220 - protein, 9 aa, Homo sapiens
  misc_feature: Table A; Target 5220; HLA-B*18:01; ADAM2; ENSG00000104755; CTA
QDFQNFCHY

SEQ ID NO: 5221 - protein, 9 aa, Homo sapiens
  misc_feature: Table A; Target 5221; HLA-B*37:01; ADAM2; ENSG00000104755; CTA
QDFQNFCHY

SEQ ID NO: 5222 - protein, 9 aa, Homo sapiens
  misc_feature: Table A; Target 5222; HLA-B*44:02; ADAM2; ENSG00000104755; CTA
QDFQNFCHY

SEQ ID NO: 5223 - protein, 9 aa, Homo sapiens
  misc_feature: Table A; Target 5223; HLA-B*44:03; ADAM2; ENSG00000104755; CTA
QDFQNFCHY

SEQ ID NO: 5224 - protein, 9 aa, Homo sapiens
  misc_feature: Table A; Target 5224; HLA-C*07:01; ADAM2; ENSG00000104755; CTA
QDFQNFCHY

SEQ ID NO: 5225 - protein, 9 aa, Homo sapiens
  misc_feature: Table A; Target 5225; HLA-A*03:01; ADAM2; ENSG00000104755; CTA
QGYIEGYPK

SEQ ID NO: 5226 - protein, 9 aa, Homo sapiens
  misc_feature: Table A; Target 5226; HLA-A*03:02; ADAM2; ENSG00000104755; CTA
QGYIEGYPK

SEQ ID NO: 5227 - protein, 9 aa, Homo sapiens
  misc_feature: Table A; Target 5227; HLA-A*11:01; ADAM2; ENSG00000104755; CTA
QGYIEGYPK

SEQ ID NO: 5228 - protein, 9 aa, Homo sapiens
  misc_feature: Table A; Target 5228; HLA-A*31:01; ADAM2; ENSG00000104755; CTA
QGYIEGYPK

SEQ ID NO: 5229 - protein, 9 aa, Homo sapiens
  misc_feature: Table A; Target 5229; HLA-A*33:01; ADAM2; ENSG00000104755; CTA
QGYIEGYPK

SEQ ID NO: 5230 - protein, 9 aa, Homo sapiens
  misc_feature: Table A; Target 5230; HLA-B*27:02; ADAM2; ENSG00000104755; CTA
QGYIEGYPK

SEQ ID NO: 5231 - protein, 9 aa, Homo sapiens
  misc_feature: Table A; Target 5231; HLA-B*27:05; ADAM2; ENSG00000104755; CTA
QGYIEGYPK

SEQ ID NO: 5232 - protein, 9 aa, Homo sapiens
  misc_feature: Table A; Target 5232; HLA-C*06:02; ADAM2; ENSG00000104755; CTA
QGYIEGYPK

SEQ ID NO: 5233 - protein, 9 aa, Homo sapiens
  misc_feature: Table A; Target 5233; HLA-C*07:06; ADAM2; ENSG00000104755; CTA
QGYIEGYPK

SEQ ID NO: 5234 - protein, 11 aa, Homo sapiens
  misc_feature: Table A; Target 5234; HLA-C*07:01; ADAM2; ENSG00000104755; CTA
QGYIEGYPKSV

SEQ ID NO: 5235 - protein, 9 aa, Homo sapiens
  misc_feature: Table A; Target 5235; HLA-B*15:01; ADAM2; ENSG00000104755; CTA
QIPRATIIY

SEQ ID NO: 5236 - protein, 9 aa, Homo sapiens
  misc_feature: Table A; Target 5236; HLA-B*15:03; ADAM2; ENSG00000104755; CTA
QIPRATIIY

SEQ ID NO: 5237 - protein, 9 aa, Homo sapiens
  misc_feature: Table A; Target 5237; HLA-C*07:04; ADAM2; ENSG00000104755; CTA
QIPRATIIY

SEQ ID NO: 5238 - protein, 9 aa, Homo sapiens
  misc_feature: Table A; Target 5238; HLA-A*02:01; ADAM2; ENSG00000104755; CTA
QLIGLTNAI

SEQ ID NO: 5239 - protein, 9 aa, Homo sapiens
  misc_feature: Table A; Target 5239; HLA-A*02:03; ADAM2; ENSG00000104755; CTA
QLIGLTNAI

SEQ ID NO: 5240 - protein, 9 aa, Homo sapiens
  misc_feature: Table A; Target 5240; HLA-A*02:04; ADAM2; ENSG00000104755; CTA
QLIGLTNAI

SEQ ID NO: 5241 - protein, 9 aa, Homo sapiens
  misc_feature: Table A; Target 5241; HLA-A*02:07; ADAM2; ENSG00000104755; CTA
QLIGLTNAI

SEQ ID NO: 5242 - protein, 9 aa, Homo sapiens
  misc_feature: Table A; Target 5242; HLA-A*23:01; ADAM2; ENSG00000104755; CTA
QLIGLTNAI

SEQ ID NO: 5243 - protein, 9 aa, Homo sapiens
  misc_feature: Table A; Target 5243; HLA-A*25:01; ADAM2; ENSG00000104755; CTA
QLIGLTNAI

SEQ ID NO: 5244 - protein, 9 aa, Homo sapiens
  misc_feature: Table A; Target 5244; HLA-A*26:01; ADAM2; ENSG00000104755; CTA
QLIGLTNAI

SEQ ID NO: 5245 - protein, 9 aa, Homo sapiens
  misc_feature: Table A; Target 5245; HLA-A*32:01; ADAM2; ENSG00000104755; CTA
QLIGLTNAI

SEQ ID NO: 5246 - protein, 9 aa, Homo sapiens
  misc_feature: Table A; Target 5246; HLA-B*13:02; ADAM2; ENSG00000104755; CTA
QLIGLTNAI

SEQ ID NO: 5247 - protein, 9 aa, Homo sapiens
  misc_feature: Table A; Target 5247; HLA-B*15:01; ADAM2; ENSG00000104755; CTA
QLIGLTNAI

SEQ ID NO: 5248 - protein, 9 aa, Homo sapiens
  misc_feature: Table A; Target 5248; HLA-B*38:01; ADAM2; ENSG00000104755; CTA
QLIGLTNAI

SEQ ID NO: 5249 - protein, 9 aa, Homo sapiens
  misc_feature: Table A; Target 5249; HLA-B*46:01; ADAM2; ENSG00000104755; CTA
QLIGLTNAI

SEQ ID NO: 5250 - protein, 9 aa, Homo sapiens
  misc_feature: Table A; Target 5250; HLA-B*55:01; ADAM2; ENSG00000104755; CTA
QLIGLTNAI

SEQ ID NO: 5251 - protein, 9 aa, Homo sapiens
  misc_feature: Table A; Target 5251; HLA-C*01:02; ADAM2; ENSG00000104755; CTA
QLIGLTNAI

SEQ ID NO: 5252 - protein, 10 aa, Homo sapiens
  misc_feature: Table A; Target 5252; HLA-A*23:01; ADAM2; ENSG00000104755; CTA
QLIGLTNAIF

SEQ ID NO: 5253 - protein, 9 aa, Homo sapiens
  misc_feature: Table A; Target 5253; HLA-B*13:02; ADAM2; ENSG00000104755; CTA
QLLSLSMGI

SEQ ID NO: 5254 - protein, 11 aa, Homo sapiens
  misc_feature: Table A; Target 5254; HLA-A*29:02; ADAM2; ENSG00000104755; CTA
QLLSLSMGITY

SEQ ID NO: 5255 - protein, 11 aa, Homo sapiens
  misc_feature: Table A; Target 5255; HLA-A*30:02; ADAM2; ENSG00000104755; CTA
QLLSLSMGITY

SEQ ID NO: 5256 - protein, 8 aa, Homo sapiens
  misc_feature: Table A; Target 5256; HLA-C*07:01; ADAM2; ENSG00000104755; CTA
QRCVSSSY

SEQ ID NO: 5257 - protein, 9 aa, Homo sapiens
  misc_feature: Table A; Target 5257; HLA-C*07:01; ADAM2; ENSG00000104755; CTA
QRCVSSSYL

SEQ ID NO: 5258 - protein, 9 aa, Homo sapiens
  misc_feature: Table A; Target 5258; HLA-A*01:01; ADAM2; ENSG00000104755; CTA
QSVEPQQDF

SEQ ID NO: 5259 - protein, 9 aa, Homo sapiens
  misc_feature: Table A; Target 5259; HLA-B*15:01; ADAM2; ENSG00000104755; CTA
QSVEPQQDF

SEQ ID NO: 5260 - protein, 9 aa, Homo sapiens
  misc_feature: Table A; Target 5260; HLA-B*15:03; ADAM2; ENSG00000104755; CTA
QSVEPQQDF

SEQ ID NO: 5261 - protein, 9 aa, Homo sapiens
  misc_feature: Table A; Target 5261; HLA-B*35:01; ADAM2; ENSG00000104755; CTA
QSVEPQQDF

SEQ ID NO: 5262 - protein, 9 aa, Homo sapiens
  misc_feature: Table A; Target 5262; HLA-B*39:01; ADAM2; ENSG00000104755; CTA
QSVEPQQDF

SEQ ID NO: 5263 - protein, 9 aa, Homo sapiens
  misc_feature: Table A; Target 5263; HLA-B*46:01; ADAM2; ENSG00000104755; CTA
QSVEPQQDF

SEQ ID NO: 5264 - protein, 9 aa, Homo sapiens
  misc_feature: Table A; Target 5264; HLA-B*57:01; ADAM2; ENSG00000104755; CTA
QSVEPQQDF

SEQ ID NO: 5265 - protein, 9 aa, Homo sapiens
  misc_feature: Table A; Target 5265; HLA-B*58:01; ADAM2; ENSG00000104755; CTA
QSVEPQQDF

SEQ ID NO: 5266 - protein, 9 aa, Homo sapiens
  misc_feature: Table A; Target 5266; HLA-C*02:02; ADAM2; ENSG00000104755; CTA
QSVEPQQDF

SEQ ID NO: 5267 - protein, 9 aa, Homo sapiens
  misc_feature: Table A; Target 5267; HLA-C*03:03; ADAM2; ENSG00000104755; CTA
QSVEPQQDF

SEQ ID NO: 5268 - protein, 9 aa, Homo sapiens
  misc_feature: Table A; Target 5268; HLA-C*05:01; ADAM2; ENSG00000104755; CTA
QSVEPQQDF

SEQ ID NO: 5269 - protein, 9 aa, Homo sapiens
  misc_feature: Table A; Target 5269; HLA-C*16:04; ADAM2; ENSG00000104755; CTA
QSVEPQQDF

SEQ ID NO: 5270 - protein, 11 aa, Homo sapiens
  misc_feature: Table A; Target 5270; HLA-A*03:02; ADAM2; ENSG00000104755; CTA
QSVEPQQDFAK

SEQ ID NO: 5271 - protein, 11 aa, Homo sapiens
  misc_feature: Table A; Target 5271; HLA-A*11:01; ADAM2; ENSG00000104755; CTA
QSVEPQQDFAK

SEQ ID NO: 5272 - protein, 11 aa, Homo sapiens
  misc_feature: Table A; Target 5272; HLA-B*27:02; ADAM2; ENSG00000104755; CTA
QSVEPQQDFAK

SEQ ID NO: 5273 - protein, 11 aa, Homo sapiens
  misc_feature: Table A; Target 5273; HLA-C*07:06; ADAM2; ENSG00000104755; CTA
QSVEPQQDFAK

SEQ ID NO: 5274 - protein, 9 aa, Homo sapiens
  misc_feature: Table A; Target 5274; HLA-A*24:02; ADAM2; ENSG00000104755; CTA
RATIIYANI

SEQ ID NO: 5275 - protein, 9 aa, Homo sapiens
  misc_feature: Table A; Target 5275; HLA-B*57:01; ADAM2; ENSG00000104755; CTA
RATIIYANI

SEQ ID NO: 5276 - protein, 9 aa, Homo sapiens
  misc_feature: Table A; Target 5276; HLA-B*58:01; ADAM2; ENSG00000104755; CTA
RATIIYANI

SEQ ID NO: 5277 - protein, 9 aa, Homo sapiens
  misc_feature: Table A; Target 5277; HLA-C*02:02; ADAM2; ENSG00000104755; CTA
RATIIYANI

SEQ ID NO: 5278 - protein, 9 aa, Homo sapiens
  misc_feature: Table A; Target 5278; HLA-B*40:02; ADAM2; ENSG00000104755; CTA
REKSNYVGA

SEQ ID NO: 5279 - protein, 11 aa, Homo sapiens
  misc_feature: Table A; Target 5279; HLA-B*40:02; ADAM2; ENSG00000104755; CTA
REKSNYVGATF

SEQ ID NO: 5280 - protein, 11 aa, Homo sapiens
  misc_feature: Table A; Target 5280; HLA-B*44:02; ADAM2; ENSG00000104755; CTA
REKSNYVGATF

SEQ ID NO: 5281 - protein, 11 aa, Homo sapiens
  misc_feature: Table A; Target 5281; HLA-B*44:03; ADAM2; ENSG00000104755; CTA
REKSNYVGATF

SEQ ID NO: 5282 - protein, 11 aa, Homo sapiens
  misc_feature: Table A; Target 5282; HLA-B*57:01; ADAM2; ENSG00000104755; CTA
REKSNYVGATF

SEQ ID NO: 5283 - protein, 11 aa, Homo sapiens
  misc_feature: Table A; Target 5283; HLA-B*15:01; ADAM2; ENSG00000104755; CTA
RGVLQFENVSY

SEQ ID NO: 5284 - protein, 11 aa, Homo sapiens
  misc_feature: Table A; Target 5284; HLA-A*02:07; ADAM2; ENSG00000104755; CTA
RLDPFFKQQAV

SEQ ID NO: 5285 - protein, 11 aa, Homo sapiens
  misc_feature: Table A; Target 5285; HLA-A*02:07; ADAM2; ENSG00000104755; CTA
RLPERRYIENI

SEQ ID NO: 5286 - protein, 9 aa, Homo sapiens
  misc_feature: Table A; Target 5286; HLA-A*02:07; ADAM2; ENSG00000104755; CTA
RMDSNFDSL

SEQ ID NO: 5287 - protein, 9 aa, Homo sapiens
  misc_feature: Table A; Target 5287; HLA-C*05:01; ADAM2; ENSG00000104755; CTA
RMDSNFDSL

SEQ ID NO: 5288 - protein, 10 aa, Homo sapiens
  misc_feature: Table A; Target 5288; HLA-B*56:01; ADAM2; ENSG00000104755; CTA
RPHDVAFLLV

SEQ ID NO: 5289 - protein, 11 aa, Homo sapiens
  misc_feature: Table A; Target 5289; HLA-A*29:02; ADAM2; ENSG00000104755; CTA
RPHDVAFLLVY

SEQ ID NO: 5290 - protein, 11 aa, Homo sapiens
  misc_feature: Table A; Target 5290; HLA-B*35:01; ADAM2; ENSG00000104755; CTA
RPHDVAFLLVY

SEQ ID NO: 5291 - protein, 9 aa, Homo sapiens
  misc_feature: Table A; Target 5291; HLA-A*02:04; ADAM2; ENSG00000104755; CTA
RVLFLLSGL

SEQ ID NO: 5292 - protein, 10 aa, Homo sapiens
  misc_feature: Table A; Target 5292; HLA-A*02:03; ADAM2; ENSG00000104755; CTA
RVYSYSGTGI

SEQ ID NO: 5293 - protein, 10 aa, Homo sapiens
  misc_feature: Table A; Target 5293; HLA-A*03:01; ADAM2; ENSG00000104755; CTA
RVYSYSGTGI

SEQ ID NO: 5294 - protein, 10 aa, Homo sapiens
  misc_feature: Table A; Target 5294; HLA-A*24:02; ADAM2; ENSG00000104755; CTA
RYIENIYHSK

SEQ ID NO: 5295 - protein, 10 aa, Homo sapiens
  misc_feature: Table A; Target 5295; HLA-A*30:02; ADAM2; ENSG00000104755; CTA
RYIENIYHSK

SEQ ID NO: 5296 - protein, 10 aa, Homo sapiens
  misc_feature: Table A; Target 5296; HLA-A*31:01; ADAM2; ENSG00000104755; CTA
RYIENIYHSK

SEQ ID NO: 5297 - protein, 10 aa, Homo sapiens
  misc_feature: Table A; Target 5297; HLA-B*57:01; ADAM2; ENSG00000104755; CTA
RYIENIYHSK

SEQ ID NO: 5298 - protein, 9 aa, Homo sapiens
  misc_feature: Table A; Target 5298; HLA-A*30:02; ADAM2; ENSG00000104755; CTA
SASCPENHY

SEQ ID NO: 5299 - protein, 9 aa, Homo sapiens
  misc_feature: Table A; Target 5299; HLA-C*16:01; ADAM2; ENSG00000104755; CTA
SASCPENHY

SEQ ID NO: 5300 - protein, 9 aa, Homo sapiens
  misc_feature: Table A; Target 5300; HLA-C*16:02; ADAM2; ENSG00000104755; CTA
SASCPENHY

SEQ ID NO: 5301 - protein, 10 aa, Homo sapiens
  misc_feature: Table A; Target 5301; HLA-B*27:05; ADAM2; ENSG00000104755; CTA
SASCPENHYV

SEQ ID NO: 5302 - protein, 9 aa, Homo sapiens
  misc_feature: Table A; Target 5302; HLA-B*37:01; ADAM2; ENSG00000104755; CTA
SDHADSQKM

SEQ ID NO: 5303 - protein, 10 aa, Homo sapiens
  misc_feature: Table A; Target 5303; HLA-B*44:02; ADAM2; ENSG00000104755; CTA
SDHADSQKMW

SEQ ID NO: 5304 - protein, 10 aa, Homo sapiens
  misc_feature: Table A; Target 5304; HLA-B*44:03; ADAM2; ENSG00000104755; CTA
SDHADSQKMW

SEQ ID NO: 5305 - protein, 9 aa, Homo sapiens
  misc_feature: Table A; Target 5305; HLA-B*37:01; ADAM2; ENSG00000104755; CTA
SDLWPGGSI

SEQ ID NO: 5306 - protein, 8 aa, Homo sapiens
  misc_feature: Table A; Target 5306; HLA-B*37:01; ADAM2; ENSG00000104755; CTA
SDTTVVAQ

SEQ ID NO: 5307 - protein, 8 aa, Homo sapiens
  misc_feature: Table A; Target 5307; HLA-C*04:01; ADAM2; ENSG00000104755; CTA
SDTTVVAQ

SEQ ID NO: 5308 - protein, 9 aa, Homo sapiens
  misc_feature: Table A; Target 5308; HLA-A*03:01; ADAM2; ENSG00000104755; CTA
SDTTVVAQK

SEQ ID NO: 5309 - protein, 9 aa, Homo sapiens
  misc_feature: Table A; Target 5309; HLA-A*03:02; ADAM2; ENSG00000104755; CTA
SDTTVVAQK

SEQ ID NO: 5310 - protein, 9 aa, Homo sapiens
  misc_feature: Table A; Target 5310; HLA-A*11:01; ADAM2; ENSG00000104755; CTA
SDTTVVAQK

SEQ ID NO: 5311 - protein, 9 aa, Homo sapiens
  misc_feature: Table A; Target 5311; HLA-A*68:01; ADAM2; ENSG00000104755; CTA
SDTTVVAQK

SEQ ID NO: 5312 - protein, 9 aa, Homo sapiens
  misc_feature: Table A; Target 5312; HLA-B*27:02; ADAM2; ENSG00000104755; CTA
SDTTVVAQK

SEQ ID NO: 5313 - protein, 9 aa, Homo sapiens
  misc_feature: Table A; Target 5313; HLA-B*27:05; ADAM2; ENSG00000104755; CTA
SDTTVVAQK

SEQ ID NO: 5314 - protein, 9 aa, Homo sapiens
  misc_feature: Table A; Target 5314; HLA-C*04:01; ADAM2; ENSG00000104755; CTA
SDTTVVAQK

SEQ ID NO: 5315 - protein, 9 aa, Homo sapiens
  misc_feature: Table A; Target 5315; HLA-C*06:02; ADAM2; ENSG00000104755; CTA
SDTTVVAQK

SEQ ID NO: 5316 - protein, 9 aa, Homo sapiens
  misc_feature: Table A; Target 5316; HLA-C*07:06; ADAM2; ENSG00000104755; CTA
SDTTVVAQK

SEQ ID NO: 5317 - protein, 9 aa, Homo sapiens
  misc_feature: Table A; Target 5317; HLA-C*16:02; ADAM2; ENSG00000104755; CTA
SDTTVVAQK

SEQ ID NO: 5318 - protein, 10 aa, Homo sapiens
  misc_feature: Table A; Target 5318; HLA-A*68:02; ADAM2; ENSG00000104755; CTA
SDTTVVAQKV

SEQ ID NO: 5319 - protein, 10 aa, Homo sapiens
  misc_feature: Table A; Target 5319; HLA-C*06:02; ADAM2; ENSG00000104755; CTA
SDTTVVAQKV

SEQ ID NO: 5320 - protein, 9 aa, Homo sapiens
  misc_feature: Table A; Target 5320; HLA-A*24:02; ADAM2; ENSG00000104755; CTA
SFEDFAHFI

SEQ ID NO: 5321 - protein, 11 aa, Homo sapiens
  misc_feature: Table A; Target 5321; HLA-A*31:01; ADAM2; ENSG00000104755; CTA
SFEDFAHFISK

SEQ ID NO: 5322 - protein, 11 aa, Homo sapiens
  misc_feature: Table A; Target 5322; HLA-A*30:02; ADAM2; ENSG00000104755; CTA
SGNCGISDSGY

SEQ ID NO: 5323 - protein, 8 aa, Homo sapiens
  misc_feature: Table A; Target 5323; HLA-C*06:02; ADAM2; ENSG00000104755; CTA
SGTGIMKP

SEQ ID NO: 5324 - protein, 9 aa, Homo sapiens
  misc_feature: Table A; Target 5324; HLA-B*27:05; ADAM2; ENSG00000104755; CTA
SGTGIMKPL

SEQ ID NO: 5325 - protein, 9 aa, Homo sapiens
  misc_feature: Table A; Target 5325; HLA-C*03:04; ADAM2; ENSG00000104755; CTA
SGTGIMKPL

SEQ ID NO: 5326 - protein, 9 aa, Homo sapiens
  misc_feature: Table A; Target 5326; HLA-C*16:01; ADAM2; ENSG00000104755; CTA
SGTGIMKPL

SEQ ID NO: 5327 - protein, 9 aa, Homo sapiens
  misc_feature: Table A; Target 5327; HLA-C*16:02; ADAM2; ENSG00000104755; CTA
SGTGIMKPL

SEQ ID NO: 5328 - protein, 9 aa, Homo sapiens
  misc_feature: Table A; Target 5328; HLA-B*39:01; ADAM2; ENSG00000104755; CTA
SHLNSKTDV

SEQ ID NO: 5329 - protein, 10 aa, Homo sapiens
  misc_feature: Table A; Target 5329; HLA-A*01:01; ADAM2; ENSG00000104755; CTA
SIDSGNFPPV

SEQ ID NO: 5330 - protein, 10 aa, Homo sapiens
  misc_feature: Table A; Target 5330; HLA-A*02:01; ADAM2; ENSG00000104755; CTA
SIDSGNFPPV

SEQ ID NO: 5331 - protein, 10 aa, Homo sapiens
  misc_feature: Table A; Target 5331; HLA-A*02:07; ADAM2; ENSG00000104755; CTA
SIDSGNFPPV

SEQ ID NO: 5332 - protein, 9 aa, Homo sapiens
  misc_feature: Table A; Target 5332; HLA-A*02:01; ADAM2; ENSG00000104755; CTA
SLAVILAQL

SEQ ID NO: 5333 - protein, 9 aa, Homo sapiens
  misc_feature: Table A; Target 5333; HLA-A*02:03; ADAM2; ENSG00000104755; CTA
SLAVILAQL

SEQ ID NO: 5334 - protein, 9 aa, Homo sapiens
  misc_feature: Table A; Target 5334; HLA-A*02:04; ADAM2; ENSG00000104755; CTA
SLAVILAQL

SEQ ID NO: 5335 - protein, 9 aa, Homo sapiens
  misc_feature: Table A; Target 5335; HLA-A*02:07; ADAM2; ENSG00000104755; CTA
SLAVILAQL

SEQ ID NO: 5336 - protein, 9 aa, Homo sapiens
  misc_feature: Table A; Target 5336; HLA-A*68:02; ADAM2; ENSG00000104755; CTA
SLAVILAQL

SEQ ID NO: 5337 - protein, 9 aa, Homo sapiens
  misc_feature: Table A; Target 5337; HLA-B*55:01; ADAM2; ENSG00000104755; CTA
SLAVILAQL

SEQ ID NO: 5338 - protein, 9 aa, Homo sapiens
  misc_feature: Table A; Target 5338; HLA-A*02:04; ADAM2; ENSG00000104755; CTA
SLESLAVIL

SEQ ID NO: 5339 - protein, 9 aa, Homo sapiens
  misc_feature: Table A; Target 5339; HLA-A*02:07; ADAM2; ENSG00000104755; CTA
SLESLAVIL

SEQ ID NO: 5340 - protein, 9 aa, Homo sapiens
  misc_feature: Table A; Target 5340; HLA-B*35:03; ADAM2; ENSG00000104755; CTA
SLESLAVIL

SEQ ID NO: 5341 - protein, 9 aa, Homo sapiens
  misc_feature: Table A; Target 5341; HLA-C*07:04; ADAM2; ENSG00000104755; CTA
SLESLAVIL

SEQ ID NO: 5342 - protein, 8 aa, Homo sapiens
  misc_feature: Table A; Target 5342; HLA-A*30:02; ADAM2; ENSG00000104755; CTA
SLSMGITY

SEQ ID NO: 5343 - protein, 8 aa, Homo sapiens
  misc_feature: Table A; Target 5343; HLA-B*15:01; ADAM2; ENSG00000104755; CTA
SLSMGITY

SEQ ID NO: 5344 - protein, 8 aa, Homo sapiens
  misc_feature: Table A; Target 5344; HLA-B*15:03; ADAM2; ENSG00000104755; CTA
SLSMGITY

SEQ ID NO: 5345 - protein, 8 aa, Homo sapiens
  misc_feature: Table A; Target 5345; HLA-B*18:01; ADAM2; ENSG00000104755; CTA
SLSMGITY

SEQ ID NO: 5346 - protein, 8 aa, Homo sapiens
  misc_feature: Table A; Target 5346; HLA-B*37:01; ADAM2; ENSG00000104755; CTA
SLSMGITY

SEQ ID NO: 5347 - protein, 8 aa, Homo sapiens
  misc_feature: Table A; Target 5347; HLA-C*01:02; ADAM2; ENSG00000104755; CTA
SLSMGITY

SEQ ID NO: 5348 - protein, 8 aa, Homo sapiens
  misc_feature: Table A; Target 5348; HLA-C*07:04; ADAM2; ENSG00000104755; CTA
SLSMGITY

SEQ ID NO: 5349 - protein, 8 aa, Homo sapiens
  misc_feature: Table A; Target 5349; HLA-C*14:02; ADAM2; ENSG00000104755; CTA
SLSMGITY

SEQ ID NO: 5350 - protein, 8 aa, Homo sapiens
  misc_feature: Table A; Target 5350; HLA-C*16:01; ADAM2; ENSG00000104755; CTA
SLSMGITY

SEQ ID NO: 5351 - protein, 11 aa, Homo sapiens
  misc_feature: Table A; Target 5351; HLA-A*03:02; ADAM2; ENSG00000104755; CTA
SLYNEKDIESR

SEQ ID NO: 5352 - protein, 11 aa, Homo sapiens
  misc_feature: Table A; Target 5352; HLA-A*31:01; ADAM2; ENSG00000104755; CTA
SLYNEKDIESR

SEQ ID NO: 5353 - protein, 11 aa, Homo sapiens
  misc_feature: Table A; Target 5353; HLA-A*68:01; ADAM2; ENSG00000104755; CTA
SLYNEKDIESR

SEQ ID NO: 5354 - protein, 10 aa, Homo sapiens
  misc_feature: Table A; Target 5354; HLA-A*68:02; ADAM2; ENSG00000104755; CTA
SNFDSLPVQI

SEQ ID NO: 5355 - protein, 10 aa, Homo sapiens
  misc_feature: Table A; Target 5355; HLA-B*13:02; ADAM2; ENSG00000104755; CTA
SNFDSLPVQI

SEQ ID NO: 5356 - protein, 8 aa, Homo sapiens
  misc_feature: Table A; Target 5356; HLA-A*23:01; ADAM2; ENSG00000104755; CTA
SNYVGATF

SEQ ID NO: 5357 - protein, 8 aa, Homo sapiens
  misc_feature: Table A; Target 5357; HLA-A*25:01; ADAM2; ENSG00000104755; CTA
SNYVGATF

SEQ ID NO: 5358 - protein, 8 aa, Homo sapiens
  misc_feature: Table A; Target 5358; HLA-A*32:01; ADAM2; ENSG00000104755; CTA
SNYVGATF

SEQ ID NO: 5359 - protein, 8 aa, Homo sapiens
  misc_feature: Table A; Target 5359; HLA-B*08:01; ADAM2; ENSG00000104755; CTA
SNYVGATF

SEQ ID NO: 5360 - protein, 8 aa, Homo sapiens
  misc_feature: Table A; Target 5360; HLA-B*15:01; ADAM2; ENSG00000104755; CTA
SNYVGATF

SEQ ID NO: 5361 - protein, 8 aa, Homo sapiens
  misc_feature: Table A; Target 5361; HLA-B*15:03; ADAM2; ENSG00000104755; CTA
SNYVGATF

SEQ ID NO: 5362 - protein, 8 aa, Homo sapiens
  misc_feature: Table A; Target 5362; HLA-B*18:01; ADAM2; ENSG00000104755; CTA
SNYVGATF

SEQ ID NO: 5363 - protein, 8 aa, Homo sapiens
  misc_feature: Table A; Target 5363; HLA-B*37:01; ADAM2; ENSG00000104755; CTA
SNYVGATF

SEQ ID NO: 5364 - protein, 8 aa, Homo sapiens
  misc_feature: Table A; Target 5364; HLA-B*40:02; ADAM2; ENSG00000104755; CTA
SNYVGATF

SEQ ID NO: 5365 - protein, 8 aa, Homo sapiens
  misc_feature: Table A; Target 5365; HLA-B*46:01; ADAM2; ENSG00000104755; CTA
SNYVGATF

SEQ ID NO: 5366 - protein, 8 aa, Homo sapiens
  misc_feature: Table A; Target 5366; HLA-C*01:02; ADAM2; ENSG00000104755; CTA
SNYVGATF

SEQ ID NO: 5367 - protein, 8 aa, Homo sapiens
  misc_feature: Table A; Target 5367; HLA-C*02:02; ADAM2; ENSG00000104755; CTA
SNYVGATF

SEQ ID NO: 5368 - protein, 8 aa, Homo sapiens
  misc_feature: Table A; Target 5368; HLA-C*03:03; ADAM2; ENSG00000104755; CTA
SNYVGATF

SEQ ID NO: 5369 - protein, 8 aa, Homo sapiens
  misc_feature: Table A; Target 5369; HLA-C*03:04; ADAM2; ENSG00000104755; CTA
SNYVGATF

SEQ ID NO: 5370 - protein, 8 aa, Homo sapiens
  misc_feature: Table A; Target 5370; HLA-C*04:01; ADAM2; ENSG00000104755; CTA
SNYVGATF

SEQ ID NO: 5371 - protein, 8 aa, Homo sapiens
  misc_feature: Table A; Target 5371; HLA-C*05:01; ADAM2; ENSG00000104755; CTA
SNYVGATF

SEQ ID NO: 5372 - protein, 8 aa, Homo sapiens
  misc_feature: Table A; Target 5372; HLA-C*14:02; ADAM2; ENSG00000104755; CTA
SNYVGATF

SEQ ID NO: 5373 - protein, 8 aa, Homo sapiens
  misc_feature: Table A; Target 5373; HLA-C*16:01; ADAM2; ENSG00000104755; CTA
SNYVGATF

SEQ ID NO: 5374 - protein, 8 aa, Homo sapiens
  misc_feature: Table A; Target 5374; HLA-C*16:04; ADAM2; ENSG00000104755; CTA
SNYVGATF

SEQ ID NO: 5375 - protein, 11 aa, Homo sapiens
  misc_feature: Table A; Target 5375; HLA-A*11:01; ADAM2; ENSG00000104755; CTA
SNYVGATFQGK

SEQ ID NO: 5376 - protein, 9 aa, Homo sapiens
  misc_feature: Table A; Target 5376; HLA-A*30:01; ADAM2; ENSG00000104755; CTA
SQASYKIVI

SEQ ID NO: 5377 - protein, 9 aa, Homo sapiens
  misc_feature: Table A; Target 5377; HLA-A*32:01; ADAM2; ENSG00000104755; CTA
SQASYKIVI

SEQ ID NO: 5378 - protein, 9 aa, Homo sapiens
  misc_feature: Table A; Target 5378; HLA-B*08:01; ADAM2; ENSG00000104755; CTA
SQASYKIVI

SEQ ID NO: 5379 - protein, 9 aa, Homo sapiens
  misc_feature: Table A; Target 5379; HLA-B*13:02; ADAM2; ENSG00000104755; CTA
SQASYKIVI

SEQ ID NO: 5380 - protein, 9 aa, Homo sapiens
  misc_feature: Table A; Target 5380; HLA-B*38:01; ADAM2; ENSG00000104755; CTA
SQASYKIVI

SEQ ID NO: 5381 - protein, 9 aa, Homo sapiens
  misc_feature: Table A; Target 5381; HLA-B*39:01; ADAM2; ENSG00000104755; CTA
SQASYKIVI

SEQ ID NO: 5382 - protein, 9 aa, Homo sapiens
  misc_feature: Table A; Target 5382; HLA-B*40:02; ADAM2; ENSG00000104755; CTA
SQASYKIVI

SEQ ID NO: 5383 - protein, 9 aa, Homo sapiens
  misc_feature: Table A; Target 5383; HLA-C*02:02; ADAM2; ENSG00000104755; CTA
SQASYKIVI

SEQ ID NO: 5384 - protein, 9 aa, Homo sapiens
  misc_feature: Table A; Target 5384; HLA-C*06:02; ADAM2; ENSG00000104755; CTA
SQASYKIVI

SEQ ID NO: 5385 - protein, 9 aa, Homo sapiens
  misc_feature: Table A; Target 5385; HLA-C*07:04; ADAM2; ENSG00000104755; CTA
SQASYKIVI

SEQ ID NO: 5386 - protein, 9 aa, Homo sapiens
  misc_feature: Table A; Target 5386; HLA-C*12:03; ADAM2; ENSG00000104755; CTA
SQASYKIVI

SEQ ID NO: 5387 - protein, 9 aa, Homo sapiens
  misc_feature: Table A; Target 5387; HLA-C*16:01; ADAM2; ENSG00000104755; CTA
SQASYKIVI

SEQ ID NO: 5388 - protein, 10 aa, Homo sapiens
  misc_feature: Table A; Target 5388; HLA-A*01:01; ADAM2; ENSG00000104755; CTA
SSASCPENHY

SEQ ID NO: 5389 - protein, 10 aa, Homo sapiens
  misc_feature: Table A; Target 5389; HLA-A*30:02; ADAM2; ENSG00000104755; CTA
SSASCPENHY

SEQ ID NO: 5390 - protein, 9 aa, Homo sapiens
  misc_feature: Table A; Target 5390; HLA-A*68:02; ADAM2; ENSG00000104755; CTA
SSVGFEHVI

SEQ ID NO: 5391 - protein, 9 aa, Homo sapiens
  misc_feature: Table A; Target 5391; HLA-B*13:02; ADAM2; ENSG00000104755; CTA
SSVGFEHVI

SEQ ID NO: 5392 - protein, 9 aa, Homo sapiens
  misc_feature: Table A; Target 5392; HLA-B*58:01; ADAM2; ENSG00000104755; CTA
SSVGFEHVI

SEQ ID NO: 5393 - protein, 10 aa, Homo sapiens
  misc_feature: Table A; Target 5393; HLA-C*02:02; ADAM2; ENSG00000104755; CTA
SSVGFEHVIY

SEQ ID NO: 5394 - protein, 10 aa, Homo sapiens
  misc_feature: Table A; Target 5394; HLA-C*12:03; ADAM2; ENSG00000104755; CTA
SSVGFEHVIY

SEQ ID NO: 5395 - protein, 10 aa, Homo sapiens
  misc_feature: Table A; Target 5395; HLA-C*06:02; ADAM2; ENSG00000104755; CTA
SSYLGYDCTT

SEQ ID NO: 5396 - protein, 8 aa, Homo sapiens
  misc_feature: Table A; Target 5396; HLA-C*05:01; ADAM2; ENSG00000104755; CTA
SVEPQQDF

SEQ ID NO: 5397 - protein, 10 aa, Homo sapiens
  misc_feature: Table A; Target 5397; HLA-A*03:02; ADAM2; ENSG00000104755; CTA
SVEPQQDFAK

SEQ ID NO: 5398 - protein, 10 aa, Homo sapiens
  misc_feature: Table A; Target 5398; HLA-A*11:01; ADAM2; ENSG00000104755; CTA
SVEPQQDFAK

SEQ ID NO: 5399 - protein, 10 aa, Homo sapiens
  misc_feature: Table A; Target 5399; HLA-B*27:02; ADAM2; ENSG00000104755; CTA
SVEPQQDFAK

SEQ ID NO: 5400 - protein, 10 aa, Homo sapiens
  misc_feature: Table A; Target 5400; HLA-C*07:06; ADAM2; ENSG00000104755; CTA
SVEPQQDFAK

SEQ ID NO: 5401 - protein, 11 aa, Homo sapiens
  misc_feature: Table A; Target 5401; HLA-A*01:01; ADAM2; ENSG00000104755; CTA
SVEPQQDFAKY

SEQ ID NO: 5402 - protein, 11 aa, Homo sapiens
  misc_feature: Table A; Target 5402; HLA-A*25:01; ADAM2; ENSG00000104755; CTA
SVEPQQDFAKY

SEQ ID NO: 5403 - protein, 11 aa, Homo sapiens
  misc_feature: Table A; Target 5403; HLA-A*26:01; ADAM2; ENSG00000104755; CTA
SVEPQQDFAKY

SEQ ID NO: 5404 - protein, 11 aa, Homo sapiens
  misc_feature: Table A; Target 5404; HLA-A*29:02; ADAM2; ENSG00000104755; CTA
SVEPQQDFAKY

SEQ ID NO: 5405 - protein, 11 aa, Homo sapiens
  misc_feature: Table A; Target 5405; HLA-A*30:02; ADAM2; ENSG00000104755; CTA
SVEPQQDFAKY

SEQ ID NO: 5406 - protein, 9 aa, Homo sapiens
  misc_feature: Table A; Target 5406; HLA-A*29:02; ADAM2; ENSG00000104755; CTA
SVGFEHVIY

SEQ ID NO: 5407 - protein, 9 aa, Homo sapiens
  misc_feature: Table A; Target 5407; HLA-B*15:01; ADAM2; ENSG00000104755; CTA
SVGFEHVIY

SEQ ID NO: 5408 - protein, 9 aa, Homo sapiens
  misc_feature: Table A; Target 5408; HLA-C*07:04; ADAM2; ENSG00000104755; CTA
SVGFEHVIY

SEQ ID NO: 5409 - protein, 11 aa, Homo sapiens
  misc_feature: Table A; Target 5409; HLA-A*68:02; ADAM2; ENSG00000104755; CTA
SVGFEHVIYQV

SEQ ID NO: 5410 - protein, 10 aa, Homo sapiens
  misc_feature: Table A; Target 5410; HLA-C*04:01; ADAM2; ENSG00000104755; CTA
SVVMVSTCTG

SEQ ID NO: 5411 - protein, 10 aa, Homo sapiens
  misc_feature: Table A; Target 5411; HLA-C*06:02; ADAM2; ENSG00000104755; CTA
SVVMVSTCTG

SEQ ID NO: 5412 - protein, 9 aa, Homo sapiens
  misc_feature: Table A; Target 5412; HLA-A*31:01; ADAM2; ENSG00000104755; CTA
SYKIVIEGK

SEQ ID NO: 5413 - protein, 9 aa, Homo sapiens
  misc_feature: Table A; Target 5413; HLA-A*33:01; ADAM2; ENSG00000104755; CTA
SYKIVIEGK

SEQ ID NO: 5414 - protein, 9 aa, Homo sapiens
  misc_feature: Table A; Target 5414; HLA-A*33:03; ADAM2; ENSG00000104755; CTA
SYKIVIEGK

SEQ ID NO: 5415 - protein, 9 aa, Homo sapiens
  misc_feature: Table A; Target 5415; HLA-C*06:02; ADAM2; ENSG00000104755; CTA
SYKIVIEGK

SEQ ID NO: 5416 - protein, 9 aa, Homo sapiens
  misc_feature: Table A; Target 5416; HLA-C*07:02; ADAM2; ENSG00000104755; CTA
SYKIVIEGK

SEQ ID NO: 5417 - protein, 9 aa, Homo sapiens
  misc_feature: Table A; Target 5417; HLA-C*04:01; ADAM2; ENSG00000104755; CTA
SYLGYDCTT

SEQ ID NO: 5418 - protein, 9 aa, Homo sapiens
  misc_feature: Table A; Target 5418; HLA-A*23:01; ADAM2; ENSG00000104755; CTA
SYLPPDCSV

SEQ ID NO: 5419 - protein, 9 aa, Homo sapiens
  misc_feature: Table A; Target 5419; HLA-C*04:01; ADAM2; ENSG00000104755; CTA
SYLPPDCSV

SEQ ID NO: 5420 - protein, 9 aa, Homo sapiens
  misc_feature: Table A; Target 5420; HLA-C*14:02; ADAM2; ENSG00000104755; CTA
SYLPPDCSV

SEQ ID NO: 5421 - protein, 8 aa, Homo sapiens
  misc_feature: Table A; Target 5421; HLA-C*04:01; ADAM2; ENSG00000104755; CTA
SYSGTGIM

SEQ ID NO: 5422 - protein, 8 aa, Homo sapiens
  misc_feature: Table A; Target 5422; HLA-C*14:02; ADAM2; ENSG00000104755; CTA
SYSGTGIM

SEQ ID NO: 5423 - protein, 9 aa, Homo sapiens
  misc_feature: Table A; Target 5423; HLA-A*03:01; ADAM2; ENSG00000104755; CTA
SYSGTGIMK

SEQ ID NO: 5424 - protein, 9 aa, Homo sapiens
  misc_feature: Table A; Target 5424; HLA-A*03:02; ADAM2; ENSG00000104755; CTA
SYSGTGIMK

SEQ ID NO: 5425 - protein, 9 aa, Homo sapiens
  misc_feature: Table A; Target 5425; HLA-A*11:01; ADAM2; ENSG00000104755; CTA
SYSGTGIMK

SEQ ID NO: 5426 - protein, 9 aa, Homo sapiens
  misc_feature: Table A; Target 5426; HLA-A*31:01; ADAM2; ENSG00000104755; CTA
SYSGTGIMK

SEQ ID NO: 5427 - protein, 9 aa, Homo sapiens
  misc_feature: Table A; Target 5427; HLA-A*33:03; ADAM2; ENSG00000104755; CTA
SYSGTGIMK

SEQ ID NO: 5428 - protein, 9 aa, Homo sapiens
  misc_feature: Table A; Target 5428; HLA-A*68:01; ADAM2; ENSG00000104755; CTA
SYSGTGIMK

SEQ ID NO: 5429 - protein, 9 aa, Homo sapiens
  misc_feature: Table A; Target 5429; HLA-C*07:06; ADAM2; ENSG00000104755; CTA
SYSGTGIMK

SEQ ID NO: 5430 - protein, 10 aa, Homo sapiens
  misc_feature: Table A; Target 5430; HLA-B*07:02; ADAM2; ENSG00000104755; CTA
SYSGTGIMKP

SEQ ID NO: 5431 - protein, 10 aa, Homo sapiens
  misc_feature: Table A; Target 5431; HLA-C*06:02; ADAM2; ENSG00000104755; CTA
SYSGTGIMKP

SEQ ID NO: 5432 - protein, 10 aa, Homo sapiens
  misc_feature: Table A; Target 5432; HLA-C*07:02; ADAM2; ENSG00000104755; CTA
SYSGTGIMKP

SEQ ID NO: 5433 - protein, 10 aa, Homo sapiens
  misc_feature: Table A; Target 5433; HLA-C*16:02; ADAM2; ENSG00000104755; CTA
SYSGTGIMKP

SEQ ID NO: 5434 - protein, 9 aa, Homo sapiens
  misc_feature: Table A; Target 5434; HLA-C*07:01; ADAM2; ENSG00000104755; CTA
TCTGLRGVL

SEQ ID NO: 5435 - protein, 9 aa, Homo sapiens
  misc_feature: Table A; Target 5435; HLA-C*16:01; ADAM2; ENSG00000104755; CTA
TCTGLRGVL

SEQ ID NO: 5436 - protein, 8 aa, Homo sapiens
  misc_feature: Table A; Target 5436; HLA-B*37:01; ADAM2; ENSG00000104755; CTA
TDTFGKEV

SEQ ID NO: 5437 - protein, 8 aa, Homo sapiens
  misc_feature: Table A; Target 5437; HLA-C*16:02; ADAM2; ENSG00000104755; CTA
TDTFGKEV

SEQ ID NO: 5438 - protein, 10 aa, Homo sapiens
  misc_feature: Table A; Target 5438; HLA-C*07:01; ADAM2; ENSG00000104755; CTA
TDTFGKEVEF

SEQ ID NO: 5439 - protein, 9 aa, Homo sapiens
  misc_feature: Table A; Target 5439; HLA-C*04:01; ADAM2; ENSG00000104755; CTA
TDVSGNCGI

SEQ ID NO: 5440 - protein, 9 aa, Homo sapiens
  misc_feature: Table A; Target 5440; HLA-C*06:02; ADAM2; ENSG00000104755; CTA
TDVSGNCGI

SEQ ID NO: 5441 - protein, 9 aa, Homo sapiens
  misc_feature: Table A; Target 5441; HLA-A*29:02; ADAM2; ENSG00000104755; CTA
TFLRWKTSY

SEQ ID NO: 5442 - protein, 9 aa, Homo sapiens
  misc_feature: Table A; Target 5442; HLA-A*23:01; ADAM2; ENSG00000104755; CTA
TGLRGVLQF

SEQ ID NO: 5443 - protein, 9 aa, Homo sapiens
  misc_feature: Table A; Target 5443; HLA-B*35:03; ADAM2; ENSG00000104755; CTA
TIILSSLEL

SEQ ID NO: 5444 - protein, 9 aa, Homo sapiens
  misc_feature: Table A; Target 5444; HLA-C*01:02; ADAM2; ENSG00000104755; CTA
TIILSSLEL

SEQ ID NO: 5445 - protein, 9 aa, Homo sapiens
  misc_feature: Table A; Target 5445; HLA-C*03:03; ADAM2; ENSG00000104755; CTA
TIILSSLEL

SEQ ID NO: 5446 - protein, 9 aa, Homo sapiens
  misc_feature: Table A; Target 5446; HLA-C*03:04; ADAM2; ENSG00000104755; CTA
TIILSSLEL

SEQ ID NO: 5447 - protein, 9 aa, Homo sapiens
  misc_feature: Table A; Target 5447; HLA-B*13:02; ADAM2; ENSG00000104755; CTA
TISLESLAV

SEQ ID NO: 5448 - protein, 8 aa, Homo sapiens
  misc_feature: Table A; Target 5448; HLA-B*18:01; ADAM2; ENSG00000104755; CTA
TNAIFVSF

SEQ ID NO: 5449 - protein, 8 aa, Homo sapiens
  misc_feature: Table A; Target 5449; HLA-B*35:03; ADAM2; ENSG00000104755; CTA
TTGEANEL

SEQ ID NO: 5450 - protein, 8 aa, Homo sapiens
  misc_feature: Table A; Target 5450; HLA-C*01:02; ADAM2; ENSG00000104755; CTA
TTGEANEL

SEQ ID NO: 5451 - protein, 8 aa, Homo sapiens
  misc_feature: Table A; Target 5451; HLA-C*05:01; ADAM2; ENSG00000104755; CTA
TTGEANEL

SEQ ID NO: 5452 - protein, 8 aa, Homo sapiens
  misc_feature: Table A; Target 5452; HLA-C*14:02; ADAM2; ENSG00000104755; CTA
TTGEANEL

SEQ ID NO: 5453 - protein, 9 aa, Homo sapiens
  misc_feature: Table A; Target 5453; HLA-A*23:01; ADAM2; ENSG00000104755; CTA
TTVVAQKVF

SEQ ID NO: 5454 - protein, 9 aa, Homo sapiens
  misc_feature: Table A; Target 5454; HLA-A*25:01; ADAM2; ENSG00000104755; CTA
TTVVAQKVF

SEQ ID NO: 5455 - protein, 9 aa, Homo sapiens
  misc_feature: Table A; Target 5455; HLA-A*32:01; ADAM2; ENSG00000104755; CTA
TTVVAQKVF

SEQ ID NO: 5456 - protein, 9 aa, Homo sapiens
  misc_feature: Table A; Target 5456; HLA-B*15:03; ADAM2; ENSG00000104755; CTA
TTVVAQKVF

SEQ ID NO: 5457 - protein, 9 aa, Homo sapiens
  misc_feature: Table A; Target 5457; HLA-B*44:03; ADAM2; ENSG00000104755; CTA
TTVVAQKVF

SEQ ID NO: 5458 - protein, 9 aa, Homo sapiens
  misc_feature: Table A; Target 5458; HLA-B*57:01; ADAM2; ENSG00000104755; CTA
TTVVAQKVF

SEQ ID NO: 5459 - protein, 9 aa, Homo sapiens
  misc_feature: Table A; Target 5459; HLA-B*58:01; ADAM2; ENSG00000104755; CTA
TTVVAQKVF

SEQ ID NO: 5460 - protein, 9 aa, Homo sapiens
  misc_feature: Table A; Target 5460; HLA-C*02:02; ADAM2; ENSG00000104755; CTA
TTVVAQKVF

SEQ ID NO: 5461 - protein, 9 aa, Homo sapiens
  misc_feature: Table A; Target 5461; HLA-C*03:03; ADAM2; ENSG00000104755; CTA
TTVVAQKVF

SEQ ID NO: 5462 - protein, 9 aa, Homo sapiens
  misc_feature: Table A; Target 5462; HLA-C*03:04; ADAM2; ENSG00000104755; CTA
TTVVAQKVF

SEQ ID NO: 5463 - protein, 9 aa, Homo sapiens
  misc_feature: Table A; Target 5463; HLA-C*04:01; ADAM2; ENSG00000104755; CTA
TTVVAQKVF

SEQ ID NO: 5464 - protein, 9 aa, Homo sapiens
  misc_feature: Table A; Target 5464; HLA-C*12:03; ADAM2; ENSG00000104755; CTA
TTVVAQKVF

SEQ ID NO: 5465 - protein, 9 aa, Homo sapiens
  misc_feature: Table A; Target 5465; HLA-C*16:01; ADAM2; ENSG00000104755; CTA
TTVVAQKVF

SEQ ID NO: 5466 - protein, 11 aa, Homo sapiens
  misc_feature: Table A; Target 5466; HLA-A*68:02; ADAM2; ENSG00000104755; CTA
TTVVAQKVFQL

SEQ ID NO: 5467 - protein, 9 aa, Homo sapiens
  misc_feature: Table A; Target 5467; HLA-A*02:03; ADAM2; ENSG00000104755; CTA
TVPEKIRSI

SEQ ID NO: 5468 - protein, 9 aa, Homo sapiens
  misc_feature: Table A; Target 5468; HLA-A*02:07; ADAM2; ENSG00000104755; CTA
TVPEKIRSI

SEQ ID NO: 5469 - protein, 9 aa, Homo sapiens
  misc_feature: Table A; Target 5469; HLA-A*25:01; ADAM2; ENSG00000104755; CTA
TVPEKIRSI

SEQ ID NO: 5470 - protein, 9 aa, Homo sapiens
  misc_feature: Table A; Target 5470; HLA-A*26:01; ADAM2; ENSG00000104755; CTA
TVPEKIRSI

SEQ ID NO: 5471 - protein, 9 aa, Homo sapiens
  misc_feature: Table A; Target 5471; HLA-B*08:01; ADAM2; ENSG00000104755; CTA
TVPEKIRSI

SEQ ID NO: 5472 - protein, 9 aa, Homo sapiens
  misc_feature: Table A; Target 5472; HLA-B*51:01; ADAM2; ENSG00000104755; CTA
TVPEKIRSI

SEQ ID NO: 5473 - protein, 9 aa, Homo sapiens
  misc_feature: Table A; Target 5473; HLA-C*01:02; ADAM2; ENSG00000104755; CTA
TVPEKIRSI

SEQ ID NO: 5474 - protein, 8 aa, Homo sapiens
  misc_feature: Table A; Target 5474; HLA-A*31:01; ADAM2; ENSG00000104755; CTA
VAFLLVYR

SEQ ID NO: 5475 - protein, 8 aa, Homo sapiens
  misc_feature: Table A; Target 5475; HLA-A*33:01; ADAM2; ENSG00000104755; CTA
VAFLLVYR

SEQ ID NO: 5476 - protein, 8 aa, Homo sapiens
  misc_feature: Table A; Target 5476; HLA-B*37:01; ADAM2; ENSG00000104755; CTA
VAQKVFQL

SEQ ID NO: 5477 - protein, 8 aa, Homo sapiens
  misc_feature: Table A; Target 5477; HLA-C*16:02; ADAM2; ENSG00000104755; CTA
VAQKVFQL

SEQ ID NO: 5478 - protein, 9 aa, Homo sapiens
  misc_feature: Table A; Target 5478; HLA-A*23:01; ADAM2; ENSG00000104755; CTA
VAQKVFQLI

SEQ ID NO: 5479 - protein, 9 aa, Homo sapiens
  misc_feature: Table A; Target 5479; HLA-A*24:02; ADAM2; ENSG00000104755; CTA
VAQKVFQLI

SEQ ID NO: 5480 - protein, 9 aa, Homo sapiens
  misc_feature: Table A; Target 5480; HLA-B*13:02; ADAM2; ENSG00000104755; CTA
VAQKVFQLI

SEQ ID NO: 5481 - protein, 9 aa, Homo sapiens
  misc_feature: Table A; Target 5481; HLA-B*51:01; ADAM2; ENSG00000104755; CTA
VAQKVFQLI

SEQ ID NO: 5482 - protein, 9 aa, Homo sapiens
  misc_feature: Table A; Target 5482; HLA-B*58:01; ADAM2; ENSG00000104755; CTA
VAQKVFQLI

SEQ ID NO: 5483 - protein, 11 aa, Homo sapiens
  misc_feature: Table A; Target 5483; HLA-A*24:02; ADAM2; ENSG00000104755; CTA
VCIMNPEAIHF

SEQ ID NO: 5484 - protein, 8 aa, Homo sapiens
  misc_feature: Table A; Target 5484; HLA-B*40:02; ADAM2; ENSG00000104755; CTA
VEFASDHA

SEQ ID NO: 5485 - protein, 8 aa, Homo sapiens
  misc_feature: Table A; Target 5485; HLA-B*49:01; ADAM2; ENSG00000104755; CTA
VEFASDHA

SEQ ID NO: 5486 - protein, 8 aa, Homo sapiens
  misc_feature: Table A; Target 5486; HLA-B*18:01; ADAM2; ENSG00000104755; CTA
VEFGPSEC

SEQ ID NO: 5487 - protein, 8 aa, Homo sapiens
  misc_feature: Table A; Target 5487; HLA-B*49:01; ADAM2; ENSG00000104755; CTA
VEFGPSEC

SEQ ID NO: 5488 - protein, 8 aa, Homo sapiens
  misc_feature: Table A; Target 5488; HLA-C*12:03; ADAM2; ENSG00000104755; CTA
VEFGPSEC

SEQ ID NO: 5489 - protein, 9 aa, Homo sapiens
  misc_feature: Table A; Target 5489; HLA-A*26:01; ADAM2; ENSG00000104755; CTA
VEFGPSECY

SEQ ID NO: 5490 - protein, 9 aa, Homo sapiens
  misc_feature: Table A; Target 5490; HLA-A*29:02; ADAM2; ENSG00000104755; CTA
VEFGPSECY

SEQ ID NO: 5491 - protein, 9 aa, Homo sapiens
  misc_feature: Table A; Target 5491; HLA-A*30:01; ADAM2; ENSG00000104755; CTA
VEFGPSECY

SEQ ID NO: 5492 - protein, 9 aa, Homo sapiens
  misc_feature: Table A; Target 5492; HLA-A*30:02; ADAM2; ENSG00000104755; CTA
VEFGPSECY

SEQ ID NO: 5493 - protein, 9 aa, Homo sapiens
  misc_feature: Table A; Target 5493; HLA-A*32:01; ADAM2; ENSG00000104755; CTA
VEFGPSECY

SEQ ID NO: 5494 - protein, 9 aa, Homo sapiens
  misc_feature: Table A; Target 5494; HLA-B*15:01; ADAM2; ENSG00000104755; CTA
VEFGPSECY

SEQ ID NO: 5495 - protein, 9 aa, Homo sapiens
  misc_feature: Table A; Target 5495; HLA-B*15:03; ADAM2; ENSG00000104755; CTA
VEFGPSECY

SEQ ID NO: 5496 - protein, 9 aa, Homo sapiens
  misc_feature: Table A; Target 5496; HLA-B*27:02; ADAM2; ENSG00000104755; CTA
VEFGPSECY

SEQ ID NO: 5497 - protein, 9 aa, Homo sapiens
  misc_feature: Table A; Target 5497; HLA-B*35:01; ADAM2; ENSG00000104755; CTA
VEFGPSECY

SEQ ID NO: 5498 - protein, 9 aa, Homo sapiens
  misc_feature: Table A; Target 5498; HLA-B*37:01; ADAM2; ENSG00000104755; CTA
VEFGPSECY

SEQ ID NO: 5499 - protein, 9 aa, Homo sapiens
  misc_feature: Table A; Target 5499; HLA-B*39:01; ADAM2; ENSG00000104755; CTA
VEFGPSECY

SEQ ID NO: 5500 - protein, 9 aa, Homo sapiens
  misc_feature: Table A; Target 5500; HLA-B*40:01; ADAM2; ENSG00000104755; CTA
VEFGPSECY

SEQ ID NO: 5501 - protein, 9 aa, Homo sapiens
  misc_feature: Table A; Target 5501; HLA-B*40:02; ADAM2; ENSG00000104755; CTA
VEFGPSECY

SEQ ID NO: 5502 - protein, 9 aa, Homo sapiens
  misc_feature: Table A; Target 5502; HLA-B*44:02; ADAM2; ENSG00000104755; CTA
VEFGPSECY

SEQ ID NO: 5503 - protein, 9 aa, Homo sapiens
  misc_feature: Table A; Target 5503; HLA-B*44:03; ADAM2; ENSG00000104755; CTA
VEFGPSECY

SEQ ID NO: 5504 - protein, 9 aa, Homo sapiens
  misc_feature: Table A; Target 5504; HLA-B*46:01; ADAM2; ENSG00000104755; CTA
VEFGPSECY

SEQ ID NO: 5505 - protein, 9 aa, Homo sapiens
  misc_feature: Table A; Target 5505; HLA-B*49:01; ADAM2; ENSG00000104755; CTA
VEFGPSECY

SEQ ID NO: 5506 - protein, 9 aa, Homo sapiens
  misc_feature: Table A; Target 5506; HLA-C*02:02; ADAM2; ENSG00000104755; CTA
VEFGPSECY

SEQ ID NO: 5507 - protein, 9 aa, Homo sapiens
  misc_feature: Table A; Target 5507; HLA-C*07:01; ADAM2; ENSG00000104755; CTA
VEFGPSECY

SEQ ID NO: 5508 - protein, 9 aa, Homo sapiens
  misc_feature: Table A; Target 5508; HLA-C*07:04; ADAM2; ENSG00000104755; CTA
VEFGPSECY

SEQ ID NO: 5509 - protein, 9 aa, Homo sapiens
  misc_feature: Table A; Target 5509; HLA-C*12:03; ADAM2; ENSG00000104755; CTA
VEFGPSECY

SEQ ID NO: 5510 - protein, 9 aa, Homo sapiens
  misc_feature: Table A; Target 5510; HLA-C*14:02; ADAM2; ENSG00000104755; CTA
VEFGPSECY

SEQ ID NO: 5511 - protein, 9 aa, Homo sapiens
  misc_feature: Table A; Target 5511; HLA-C*16:04; ADAM2; ENSG00000104755; CTA
VEFGPSECY

SEQ ID NO: 5512 - protein, 9 aa, Homo sapiens
  misc_feature: Table A; Target 5512; HLA-A*30:01; ADAM2; ENSG00000104755; CTA
VEKQLYNHM

SEQ ID NO: 5513 - protein, 9 aa, Homo sapiens
  misc_feature: Table A; Target 5513; HLA-B*18:01; ADAM2; ENSG00000104755; CTA
VEKQLYNHM

SEQ ID NO: 5514 - protein, 9 aa, Homo sapiens
  misc_feature: Table A; Target 5514; HLA-B*37:01; ADAM2; ENSG00000104755; CTA
VEKQLYNHM

SEQ ID NO: 5515 - protein, 9 aa, Homo sapiens
  misc_feature: Table A; Target 5515; HLA-B*40:02; ADAM2; ENSG00000104755; CTA
VEKQLYNHM

SEQ ID NO: 5516 - protein, 9 aa, Homo sapiens
  misc_feature: Table A; Target 5516; HLA-B*44:02; ADAM2; ENSG00000104755; CTA
VEKQLYNHM

SEQ ID NO: 5517 - protein, 9 aa, Homo sapiens
  misc_feature: Table A; Target 5517; HLA-B*49:01; ADAM2; ENSG00000104755; CTA
VEKQLYNHM

SEQ ID NO: 5518 - protein, 9 aa, Homo sapiens
  misc_feature: Table A; Target 5518; HLA-B*27:02; ADAM2; ENSG00000104755; CTA
VEPQQDFAK

SEQ ID NO: 5519 - protein, 10 aa, Homo sapiens
  misc_feature: Table A; Target 5519; HLA-A*26:01; ADAM2; ENSG00000104755; CTA
VEPQQDFAKY

SEQ ID NO: 5520 - protein, 10 aa, Homo sapiens
  misc_feature: Table A; Target 5520; HLA-A*29:02; ADAM2; ENSG00000104755; CTA
VEPQQDFAKY

SEQ ID NO: 5521 - protein, 10 aa, Homo sapiens
  misc_feature: Table A; Target 5521; HLA-A*30:02; ADAM2; ENSG00000104755; CTA
VEPQQDFAKY

SEQ ID NO: 5522 - protein, 10 aa, Homo sapiens
  misc_feature: Table A; Target 5522; HLA-B*18:01; ADAM2; ENSG00000104755; CTA
VEPQQDFAKY

SEQ ID NO: 5523 - protein, 10 aa, Homo sapiens
  misc_feature: Table A; Target 5523; HLA-B*44:02; ADAM2; ENSG00000104755; CTA
VEPQQDFAKY

SEQ ID NO: 5524 - protein, 10 aa, Homo sapiens
  misc_feature: Table A; Target 5524; HLA-B*44:03; ADAM2; ENSG00000104755; CTA
VEPQQDFAKY

SEQ ID NO: 5525 - protein, 10 aa, Homo sapiens
  misc_feature: Table A; Target 5525; HLA-C*16:04; ADAM2; ENSG00000104755; CTA
VEPQQDFAKY

SEQ ID NO: 5526 - protein, 11 aa, Homo sapiens
  misc_feature: Table A; Target 5526; HLA-B*44:02; ADAM2; ENSG00000104755; CTA
VEPQQDFAKYI

SEQ ID NO: 5527 - protein, 11 aa, Homo sapiens
  misc_feature: Table A; Target 5527; HLA-B*49:01; ADAM2; ENSG00000104755; CTA
VEPQQDFAKYI

SEQ ID NO: 5528 - protein, 9 aa, Homo sapiens
  misc_feature: Table A; Target 5528; HLA-C*06:02; ADAM2; ENSG00000104755; CTA
VGATFQGKM

SEQ ID NO: 5529 - protein, 9 aa, Homo sapiens
  misc_feature: Table A; Target 5529; HLA-C*07:02; ADAM2; ENSG00000104755; CTA
VGATFQGKM

SEQ ID NO: 5530 - protein, 9 aa, Homo sapiens
  misc_feature: Table A; Target 5530; HLA-C*12:03; ADAM2; ENSG00000104755; CTA
VGATFQGKM

SEQ ID NO: 5531 - protein, 9 aa, Homo sapiens
  misc_feature: Table A; Target 5531; HLA-C*16:01; ADAM2; ENSG00000104755; CTA
VGATFQGKM

SEQ ID NO: 5532 - protein, 9 aa, Homo sapiens
  misc_feature: Table A; Target 5532; HLA-C*16:02; ADAM2; ENSG00000104755; CTA
VGATFQGKM

SEQ ID NO: 5533 - protein, 8 aa, Homo sapiens
  misc_feature: Table A; Target 5533; HLA-B*08:01; ADAM2; ENSG00000104755; CTA
VGFEHVIY

SEQ ID NO: 5534 - protein, 8 aa, Homo sapiens
  misc_feature: Table A; Target 5534; HLA-B*15:01; ADAM2; ENSG00000104755; CTA
VGFEHVIY

SEQ ID NO: 5535 - protein, 8 aa, Homo sapiens
  misc_feature: Table A; Target 5535; HLA-B*15:03; ADAM2; ENSG00000104755; CTA
VGFEHVIY

SEQ ID NO: 5536 - protein, 8 aa, Homo sapiens
  misc_feature: Table A; Target 5536; HLA-B*18:01; ADAM2; ENSG00000104755; CTA
VGFEHVIY

SEQ ID NO: 5537 - protein, 8 aa, Homo sapiens
  misc_feature: Table A; Target 5537; HLA-B*35:01; ADAM2; ENSG00000104755; CTA
VGFEHVIY

SEQ ID NO: 5538 - protein, 8 aa, Homo sapiens
  misc_feature: Table A; Target 5538; HLA-B*46:01; ADAM2; ENSG00000104755; CTA
VGFEHVIY

SEQ ID NO: 5539 - protein, 8 aa, Homo sapiens
  misc_feature: Table A; Target 5539; HLA-C*07:01; ADAM2; ENSG00000104755; CTA
VGFEHVIY

SEQ ID NO: 5540 - protein, 8 aa, Homo sapiens
  misc_feature: Table A; Target 5540; HLA-C*07:04; ADAM2; ENSG00000104755; CTA
VGFEHVIY

SEQ ID NO: 5541 - protein, 8 aa, Homo sapiens
  misc_feature: Table A; Target 5541; HLA-C*12:03; ADAM2; ENSG00000104755; CTA
VGFEHVIY

SEQ ID NO: 5542 - protein, 8 aa, Homo sapiens
  misc_feature: Table A; Target 5542; HLA-C*16:01; ADAM2; ENSG00000104755; CTA
VGFEHVIY

SEQ ID NO: 5543 - protein, 10 aa, Homo sapiens
  misc_feature: Table A; Target 5543; HLA-A*02:01; ADAM2; ENSG00000104755; CTA
VGFEHVIYQV

SEQ ID NO: 5544 - protein, 10 aa, Homo sapiens
  misc_feature: Table A; Target 5544; HLA-A*02:03; ADAM2; ENSG00000104755; CTA
VGFEHVIYQV

SEQ ID NO: 5545 - protein, 10 aa, Homo sapiens
  misc_feature: Table A; Target 5545; HLA-A*02:04; ADAM2; ENSG00000104755; CTA
VGFEHVIYQV

SEQ ID NO: 5546 - protein, 10 aa, Homo sapiens
  misc_feature: Table A; Target 5546; HLA-A*02:07; ADAM2; ENSG00000104755; CTA
VGFEHVIYQV

SEQ ID NO: 5547 - protein, 10 aa, Homo sapiens
  misc_feature: Table A; Target 5547; HLA-A*68:02; ADAM2; ENSG00000104755; CTA
VGFEHVIYQV

SEQ ID NO: 5548 - protein, 10 aa, Homo sapiens
  misc_feature: Table A; Target 5548; HLA-A*31:01; ADAM2; ENSG00000104755; CTA
VGKFLLQIPR

SEQ ID NO: 5549 - protein, 9 aa, Homo sapiens
  misc_feature: Table A; Target 5549; HLA-A*02:01; ADAM2; ENSG00000104755; CTA
VIEGKPYTV

SEQ ID NO: 5550 - protein, 9 aa, Homo sapiens
  misc_feature: Table A; Target 5550; HLA-A*02:03; ADAM2; ENSG00000104755; CTA
VIEGKPYTV

SEQ ID NO: 5551 - protein, 9 aa, Homo sapiens
  misc_feature: Table A; Target 5551; HLA-A*02:04; ADAM2; ENSG00000104755; CTA
VIEGKPYTV

SEQ ID NO: 5552 - protein, 9 aa, Homo sapiens
  misc_feature: Table A; Target 5552; HLA-A*02:07; ADAM2; ENSG00000104755; CTA
VIEGKPYTV

SEQ ID NO: 5553 - protein, 9 aa, Homo sapiens
  misc_feature: Table A; Target 5553; HLA-B*08:01; ADAM2; ENSG00000104755; CTA
VIEGKPYTV

SEQ ID NO: 5554 - protein, 9 aa, Homo sapiens
  misc_feature: Table A; Target 5554; HLA-B*13:02; ADAM2; ENSG00000104755; CTA
VIEGKPYTV

SEQ ID NO: 5555 - protein, 9 aa, Homo sapiens
  misc_feature: Table A; Target 5555; HLA-B*38:01; ADAM2; ENSG00000104755; CTA
VIEGKPYTV

SEQ ID NO: 5556 - protein, 9 aa, Homo sapiens
  misc_feature: Table A; Target 5556; HLA-B*39:01; ADAM2; ENSG00000104755; CTA
VIEGKPYTV

SEQ ID NO: 5557 - protein, 9 aa, Homo sapiens
  misc_feature: Table A; Target 5557; HLA-B*40:02; ADAM2; ENSG00000104755; CTA
VIEGKPYTV

SEQ ID NO: 5558 - protein, 9 aa, Homo sapiens
  misc_feature: Table A; Target 5558; HLA-B*55:01; ADAM2; ENSG00000104755; CTA
VIEGKPYTV

SEQ ID NO: 5559 - protein, 9 aa, Homo sapiens
  misc_feature: Table A; Target 5559; HLA-C*01:02; ADAM2; ENSG00000104755; CTA
VIEGKPYTV

SEQ ID NO: 5560 - protein, 9 aa, Homo sapiens
  misc_feature: Table A; Target 5560; HLA-C*02:02; ADAM2; ENSG00000104755; CTA
VIEGKPYTV

SEQ ID NO: 5561 - protein, 9 aa, Homo sapiens
  misc_feature: Table A; Target 5561; HLA-C*05:01; ADAM2; ENSG00000104755; CTA
VIEGKPYTV

SEQ ID NO: 5562 - protein, 9 aa, Homo sapiens
  misc_feature: Table A; Target 5562; HLA-C*06:02; ADAM2; ENSG00000104755; CTA
VIEGKPYTV

SEQ ID NO: 5563 - protein, 9 aa, Homo sapiens
  misc_feature: Table A; Target 5563; HLA-C*07:01; ADAM2; ENSG00000104755; CTA
VIEGKPYTV

SEQ ID NO: 5564 - protein, 9 aa, Homo sapiens
  misc_feature: Table A; Target 5564; HLA-C*12:03; ADAM2; ENSG00000104755; CTA
VIEGKPYTV

SEQ ID NO: 5565 - protein, 9 aa, Homo sapiens
  misc_feature: Table A; Target 5565; HLA-C*16:02; ADAM2; ENSG00000104755; CTA
VIEGKPYTV

SEQ ID NO: 5566 - protein, 9 aa, Homo sapiens
  misc_feature: Table A; Target 5566; HLA-A*02:01; ADAM2; ENSG00000104755; CTA
VILAQLLSL

SEQ ID NO: 5567 - protein, 9 aa, Homo sapiens
  misc_feature: Table A; Target 5567; HLA-A*02:04; ADAM2; ENSG00000104755; CTA
VILAQLLSL

SEQ ID NO: 5568 - protein, 9 aa, Homo sapiens
  misc_feature: Table A; Target 5568; HLA-A*02:07; ADAM2; ENSG00000104755; CTA
VILAQLLSL

SEQ ID NO: 5569 - protein, 9 aa, Homo sapiens
  misc_feature: Table A; Target 5569; HLA-A*03:01; ADAM2; ENSG00000104755; CTA
VILAQLLSL

SEQ ID NO: 5570 - protein, 9 aa, Homo sapiens
  misc_feature: Table A; Target 5570; HLA-A*23:01; ADAM2; ENSG00000104755; CTA
VILAQLLSL

SEQ ID NO: 5571 - protein, 9 aa, Homo sapiens
  misc_feature: Table A; Target 5571; HLA-A*24:02; ADAM2; ENSG00000104755; CTA
VILAQLLSL

SEQ ID NO: 5572 - protein, 8 aa, Homo sapiens
  misc_feature: Table A; Target 5572; HLA-A*32:01; ADAM2; ENSG00000104755; CTA
VIVEKQLY

SEQ ID NO: 5573 - protein, 8 aa, Homo sapiens
  misc_feature: Table A; Target 5573; HLA-B*08:01; ADAM2; ENSG00000104755; CTA
VIVEKQLY

SEQ ID NO: 5574 - protein, 8 aa, Homo sapiens
  misc_feature: Table A; Target 5574; HLA-B*15:01; ADAM2; ENSG00000104755; CTA
VIVEKQLY

SEQ ID NO: 5575 - protein, 8 aa, Homo sapiens
  misc_feature: Table A; Target 5575; HLA-B*15:03; ADAM2; ENSG00000104755; CTA
VIVEKQLY

SEQ ID NO: 5576 - protein, 8 aa, Homo sapiens
  misc_feature: Table A; Target 5576; HLA-B*39:01; ADAM2; ENSG00000104755; CTA
VIVEKQLY

SEQ ID NO: 5577 - protein, 8 aa, Homo sapiens
  misc_feature: Table A; Target 5577; HLA-C*07:01; ADAM2; ENSG00000104755; CTA
VIVEKQLY

SEQ ID NO: 5578 - protein, 8 aa, Homo sapiens
  misc_feature: Table A; Target 5578; HLA-C*16:01; ADAM2; ENSG00000104755; CTA
VIVEKQLY

SEQ ID NO: 5579 - protein, 8 aa, Homo sapiens
  misc_feature: Table A; Target 5579; HLA-A*03:01; ADAM2; ENSG00000104755; CTA
VIYQVKHK

SEQ ID NO: 5580 - protein, 9 aa, Homo sapiens
  misc_feature: Table A; Target 5580; HLA-A*03:01; ADAM2; ENSG00000104755; CTA
VIYQVKHKK

SEQ ID NO: 5581 - protein, 9 aa, Homo sapiens
  misc_feature: Table A; Target 5581; HLA-B*15:03; ADAM2; ENSG00000104755; CTA
VKIFSNCSF

SEQ ID NO: 5582 - protein, 11 aa, Homo sapiens
  misc_feature: Table A; Target 5582; HLA-A*02:03; ADAM2; ENSG00000104755; CTA
VLFLLSGLGGL

SEQ ID NO: 5583 - protein, 11 aa, Homo sapiens
  misc_feature: Table A; Target 5583; HLA-A*02:04; ADAM2; ENSG00000104755; CTA
VLFLLSGLGGL

SEQ ID NO: 5584 - protein, 9 aa, Homo sapiens
  misc_feature: Table A; Target 5584; HLA-A*02:01; ADAM2; ENSG00000104755; CTA
VLHPRTISL

SEQ ID NO: 5585 - protein, 9 aa, Homo sapiens
  misc_feature: Table A; Target 5585; HLA-A*02:03; ADAM2; ENSG00000104755; CTA
VLHPRTISL

SEQ ID NO: 5586 - protein, 9 aa, Homo sapiens
  misc_feature: Table A; Target 5586; HLA-A*02:04; ADAM2; ENSG00000104755; CTA
VLHPRTISL

SEQ ID NO: 5587 - protein, 9 aa, Homo sapiens
  misc_feature: Table A; Target 5587; HLA-A*02:07; ADAM2; ENSG00000104755; CTA
VLHPRTISL

SEQ ID NO: 5588 - protein, 9 aa, Homo sapiens
  misc_feature: Table A; Target 5588; HLA-A*03:01; ADAM2; ENSG00000104755; CTA
VLHPRTISL

SEQ ID NO: 5589 - protein, 9 aa, Homo sapiens
  misc_feature: Table A; Target 5589; HLA-A*24:02; ADAM2; ENSG00000104755; CTA
VLHPRTISL

SEQ ID NO: 5590 - protein, 9 aa, Homo sapiens
  misc_feature: Table A; Target 5590; HLA-A*32:01; ADAM2; ENSG00000104755; CTA
VLHPRTISL

SEQ ID NO: 5591 - protein, 9 aa, Homo sapiens
  misc_feature: Table A; Target 5591; HLA-B*07:02; ADAM2; ENSG00000104755; CTA
VLHPRTISL

SEQ ID NO: 5592 - protein, 9 aa, Homo sapiens
  misc_feature: Table A; Target 5592; HLA-B*37:01; ADAM2; ENSG00000104755; CTA
VLHPRTISL

SEQ ID NO: 5593 - protein, 9 aa, Homo sapiens
  misc_feature: Table A; Target 5593; HLA-B*40:02; ADAM2; ENSG00000104755; CTA
VLHPRTISL

SEQ ID NO: 5594 - protein, 9 aa, Homo sapiens
  misc_feature: Table A; Target 5594; HLA-B*46:01; ADAM2; ENSG00000104755; CTA
VLHPRTISL

SEQ ID NO: 5595 - protein, 9 aa, Homo sapiens
  misc_feature: Table A; Target 5595; HLA-C*01:02; ADAM2; ENSG00000104755; CTA
VLHPRTISL

SEQ ID NO: 5596 - protein, 9 aa, Homo sapiens
  misc_feature: Table A; Target 5596; HLA-C*02:02; ADAM2; ENSG00000104755; CTA
VLHPRTISL

SEQ ID NO: 5597 - protein, 9 aa, Homo sapiens
  misc_feature: Table A; Target 5597; HLA-C*03:04; ADAM2; ENSG00000104755; CTA
VLHPRTISL

SEQ ID NO: 5598 - protein, 9 aa, Homo sapiens
  misc_feature: Table A; Target 5598; HLA-C*16:01; ADAM2; ENSG00000104755; CTA
VLHPRTISL

SEQ ID NO: 5599 - protein, 9 aa, Homo sapiens
  misc_feature: Table A; Target 5599; HLA-A*02:01; ADAM2; ENSG00000104755; CTA
VLIAIMVKV

SEQ ID NO: 5600 - protein, 9 aa, Homo sapiens
  misc_feature: Table A; Target 5600; HLA-A*02:03; ADAM2; ENSG00000104755; CTA
VLIAIMVKV

SEQ ID NO: 5601 - protein, 9 aa, Homo sapiens
  misc_feature: Table A; Target 5601; HLA-A*02:04; ADAM2; ENSG00000104755; CTA
VLIAIMVKV

SEQ ID NO: 5602 - protein, 9 aa, Homo sapiens
  misc_feature: Table A; Target 5602; HLA-A*02:07; ADAM2; ENSG00000104755; CTA
VLIAIMVKV

SEQ ID NO: 5603 - protein, 9 aa, Homo sapiens
  misc_feature: Table A; Target 5603; HLA-A*68:02; ADAM2; ENSG00000104755; CTA
VLIAIMVKV

SEQ ID NO: 5604 - protein, 9 aa, Homo sapiens
  misc_feature: Table A; Target 5604; HLA-B*13:02; ADAM2; ENSG00000104755; CTA
VLIAIMVKV

SEQ ID NO: 5605 - protein, 9 aa, Homo sapiens
  misc_feature: Table A; Target 5605; HLA-B*49:01; ADAM2; ENSG00000104755; CTA
VLIAIMVKV

SEQ ID NO: 5606 - protein, 9 aa, Homo sapiens
  misc_feature: Table A; Target 5606; HLA-B*55:01; ADAM2; ENSG00000104755; CTA
VLIAIMVKV

SEQ ID NO: 5607 - protein, 9 aa, Homo sapiens
  misc_feature: Table A; Target 5607; HLA-C*02:02; ADAM2; ENSG00000104755; CTA
VLIAIMVKV

SEQ ID NO: 5608 - protein, 9 aa, Homo sapiens
  misc_feature: Table A; Target 5608; HLA-A*01:01; ADAM2; ENSG00000104755; CTA
VLQFENVSY

SEQ ID NO: 5609 - protein, 9 aa, Homo sapiens
  misc_feature: Table A; Target 5609; HLA-A*03:02; ADAM2; ENSG00000104755; CTA
VLQFENVSY

SEQ ID NO: 5610 - protein, 9 aa, Homo sapiens
  misc_feature: Table A; Target 5610; HLA-A*29:02; ADAM2; ENSG00000104755; CTA
VLQFENVSY

SEQ ID NO: 5611 - protein, 9 aa, Homo sapiens
  misc_feature: Table A; Target 5611; HLA-A*30:02; ADAM2; ENSG00000104755; CTA
VLQFENVSY

SEQ ID NO: 5612 - protein, 9 aa, Homo sapiens
  misc_feature: Table A; Target 5612; HLA-A*32:01; ADAM2; ENSG00000104755; CTA
VLQFENVSY

SEQ ID NO: 5613 - protein, 9 aa, Homo sapiens
  misc_feature: Table A; Target 5613; HLA-B*15:03; ADAM2; ENSG00000104755; CTA
VLQFENVSY

SEQ ID NO: 5614 - protein, 9 aa, Homo sapiens
  misc_feature: Table A; Target 5614; HLA-B*39:01; ADAM2; ENSG00000104755; CTA
VLQFENVSY

SEQ ID NO: 5615 - protein, 9 aa, Homo sapiens
  misc_feature: Table A; Target 5615; HLA-B*46:01; ADAM2; ENSG00000104755; CTA
VLQFENVSY

SEQ ID NO: 5616 - protein, 9 aa, Homo sapiens
  misc_feature: Table A; Target 5616; HLA-B*58:01; ADAM2; ENSG00000104755; CTA
VLQFENVSY

SEQ ID NO: 5617 - protein, 9 aa, Homo sapiens
  misc_feature: Table A; Target 5617; HLA-C*01:02; ADAM2; ENSG00000104755; CTA
VLQFENVSY

SEQ ID NO: 5618 - protein, 9 aa, Homo sapiens
  misc_feature: Table A; Target 5618; HLA-C*02:02; ADAM2; ENSG00000104755; CTA
VLQFENVSY

SEQ ID NO: 5619 - protein, 9 aa, Homo sapiens
  misc_feature: Table A; Target 5619; HLA-C*03:03; ADAM2; ENSG00000104755; CTA
VLQFENVSY

SEQ ID NO: 5620 - protein, 9 aa, Homo sapiens
  misc_feature: Table A; Target 5620; HLA-C*07:01; ADAM2; ENSG00000104755; CTA
VLQFENVSY

SEQ ID NO: 5621 - protein, 9 aa, Homo sapiens
  misc_feature: Table A; Target 5621; HLA-C*07:04; ADAM2; ENSG00000104755; CTA
VLQFENVSY

SEQ ID NO: 5622 - protein, 9 aa, Homo sapiens
  misc_feature: Table A; Target 5622; HLA-C*14:02; ADAM2; ENSG00000104755; CTA
VLQFENVSY

SEQ ID NO: 5623 - protein, 9 aa, Homo sapiens
  misc_feature: Table A; Target 5623; HLA-C*16:01; ADAM2; ENSG00000104755; CTA
VLQFENVSY

SEQ ID NO: 5624 - protein, 9 aa, Homo sapiens
  misc_feature: Table A; Target 5624; HLA-C*16:02; ADAM2; ENSG00000104755; CTA
VLQFENVSY

SEQ ID NO: 5625 - protein, 9 aa, Homo sapiens
  misc_feature: Table A; Target 5625; HLA-C*16:04; ADAM2; ENSG00000104755; CTA
VLQFENVSY

SEQ ID NO: 5626 - protein, 9 aa, Homo sapiens
  misc_feature: Table A; Target 5626; HLA-A*23:01; ADAM2; ENSG00000104755; CTA
VLRPHDVAF

SEQ ID NO: 5627 - protein, 9 aa, Homo sapiens
  misc_feature: Table A; Target 5627; HLA-A*24:02; ADAM2; ENSG00000104755; CTA
VLRPHDVAF

SEQ ID NO: 5628 - protein, 9 aa, Homo sapiens
  misc_feature: Table A; Target 5628; HLA-A*31:01; ADAM2; ENSG00000104755; CTA
VLRPHDVAF

SEQ ID NO: 5629 - protein, 9 aa, Homo sapiens
  misc_feature: Table A; Target 5629; HLA-A*32:01; ADAM2; ENSG00000104755; CTA
VLRPHDVAF

SEQ ID NO: 5630 - protein, 9 aa, Homo sapiens
  misc_feature: Table A; Target 5630; HLA-B*07:02; ADAM2; ENSG00000104755; CTA
VLRPHDVAF

SEQ ID NO: 5631 - protein, 9 aa, Homo sapiens
  misc_feature: Table A; Target 5631; HLA-B*08:01; ADAM2; ENSG00000104755; CTA
VLRPHDVAF

SEQ ID NO: 5632 - protein, 9 aa, Homo sapiens
  misc_feature: Table A; Target 5632; HLA-B*15:01; ADAM2; ENSG00000104755; CTA
VLRPHDVAF

SEQ ID NO: 5633 - protein, 9 aa, Homo sapiens
  misc_feature: Table A; Target 5633; HLA-B*15:03; ADAM2; ENSG00000104755; CTA
VLRPHDVAF

SEQ ID NO: 5634 - protein, 9 aa, Homo sapiens
  misc_feature: Table A; Target 5634; HLA-B*37:01; ADAM2; ENSG00000104755; CTA
VLRPHDVAF

SEQ ID NO: 5635 - protein, 9 aa, Homo sapiens
  misc_feature: Table A; Target 5635; HLA-B*40:02; ADAM2; ENSG00000104755; CTA
VLRPHDVAF

SEQ ID NO: 5636 - protein, 9 aa, Homo sapiens
  misc_feature: Table A; Target 5636; HLA-B*46:01; ADAM2; ENSG00000104755; CTA
VLRPHDVAF

SEQ ID NO: 5637 - protein, 9 aa, Homo sapiens
  misc_feature: Table A; Target 5637; HLA-B*57:01; ADAM2; ENSG00000104755; CTA
VLRPHDVAF

SEQ ID NO: 5638 - protein, 9 aa, Homo sapiens
  misc_feature: Table A; Target 5638; HLA-C*07:04; ADAM2; ENSG00000104755; CTA
VLRPHDVAF

SEQ ID NO: 5639 - protein, 9 aa, Homo sapiens
  misc_feature: Table A; Target 5639; HLA-C*16:01; ADAM2; ENSG00000104755; CTA
VLRPHDVAF

SEQ ID NO: 5640 - protein, 10 aa, Homo sapiens
  misc_feature: Table A; Target 5640; HLA-A*02:03; ADAM2; ENSG00000104755; CTA
VLRPHDVAFL

SEQ ID NO: 5641 - protein, 10 aa, Homo sapiens
  misc_feature: Table A; Target 5641; HLA-A*02:04; ADAM2; ENSG00000104755; CTA
VLRPHDVAFL

SEQ ID NO: 5642 - protein, 10 aa, Homo sapiens
  misc_feature: Table A; Target 5642; HLA-A*03:01; ADAM2; ENSG00000104755; CTA
VLRPHDVAFL

SEQ ID NO: 5643 - protein, 11 aa, Homo sapiens
  misc_feature: Table A; Target 5643; HLA-A*02:04; ADAM2; ENSG00000104755; CTA
VLRPHDVAFLL

SEQ ID NO: 5644 - protein, 11 aa, Homo sapiens
  misc_feature: Table A; Target 5644; HLA-A*03:01; ADAM2; ENSG00000104755; CTA
VLRPHDVAFLL

SEQ ID NO: 5645 - protein, 9 aa, Homo sapiens
  misc_feature: Table A; Target 5645; HLA-A*02:03; ADAM2; ENSG00000104755; CTA
VMVSTCTGL

SEQ ID NO: 5646 - protein, 9 aa, Homo sapiens
  misc_feature: Table A; Target 5646; HLA-B*13:02; ADAM2; ENSG00000104755; CTA
VMVSTCTGL

SEQ ID NO: 5647 - protein, 9 aa, Homo sapiens
  misc_feature: Table A; Target 5647; HLA-B*15:03; ADAM2; ENSG00000104755; CTA
VMVSTCTGL

SEQ ID NO: 5648 - protein, 9 aa, Homo sapiens
  misc_feature: Table A; Target 5648; HLA-B*46:01; ADAM2; ENSG00000104755; CTA
VMVSTCTGL

SEQ ID NO: 5649 - protein, 9 aa, Homo sapiens
  misc_feature: Table A; Target 5649; HLA-B*55:01; ADAM2; ENSG00000104755; CTA
VMVSTCTGL

SEQ ID NO: 5650 - protein, 9 aa, Homo sapiens
  misc_feature: Table A; Target 5650; HLA-C*01:02; ADAM2; ENSG00000104755; CTA
VMVSTCTGL

SEQ ID NO: 5651 - protein, 9 aa, Homo sapiens
  misc_feature: Table A; Target 5651; HLA-C*07:01; ADAM2; ENSG00000104755; CTA
VMVSTCTGL

SEQ ID NO: 5652 - protein, 9 aa, Homo sapiens
  misc_feature: Table A; Target 5652; HLA-C*14:02; ADAM2; ENSG00000104755; CTA
VMVSTCTGL

SEQ ID NO: 5653 - protein, 8 aa, Homo sapiens
  misc_feature: Table A; Target 5653; HLA-B*51:01; ADAM2; ENSG00000104755; CTA
VPEKIRSI

SEQ ID NO: 5654 - protein, 9 aa, Homo sapiens
  misc_feature: Table A; Target 5654; HLA-B*07:02; ADAM2; ENSG00000104755; CTA
VPEKIRSII

SEQ ID NO: 5655 - protein, 9 aa, Homo sapiens
  misc_feature: Table A; Target 5655; HLA-B*51:01; ADAM2; ENSG00000104755; CTA
VPEKIRSII

SEQ ID NO: 5656 - protein, 9 aa, Homo sapiens
  misc_feature: Table A; Target 5656; HLA-A*02:03; ADAM2; ENSG00000104755; CTA
VQITVPEKI

SEQ ID NO: 5657 - protein, 9 aa, Homo sapiens
  misc_feature: Table A; Target 5657; HLA-A*23:01; ADAM2; ENSG00000104755; CTA
VQITVPEKI

SEQ ID NO: 5658 - protein, 9 aa, Homo sapiens
  misc_feature: Table A; Target 5658; HLA-A*24:02; ADAM2; ENSG00000104755; CTA
VQITVPEKI

SEQ ID NO: 5659 - protein, 9 aa, Homo sapiens
  misc_feature: Table A; Target 5659; HLA-A*30:01; ADAM2; ENSG00000104755; CTA
VQITVPEKI

SEQ ID NO: 5660 - protein, 9 aa, Homo sapiens
  misc_feature: Table A; Target 5660; HLA-A*32:01; ADAM2; ENSG00000104755; CTA
VQITVPEKI

SEQ ID NO: 5661 - protein, 9 aa, Homo sapiens
  misc_feature: Table A; Target 5661; HLA-B*13:02; ADAM2; ENSG00000104755; CTA
VQITVPEKI

SEQ ID NO: 5662 - protein, 9 aa, Homo sapiens
  misc_feature: Table A; Target 5662; HLA-B*38:01; ADAM2; ENSG00000104755; CTA
VQITVPEKI

SEQ ID NO: 5663 - protein, 9 aa, Homo sapiens
  misc_feature: Table A; Target 5663; HLA-B*49:01; ADAM2; ENSG00000104755; CTA
VQITVPEKI

SEQ ID NO: 5664 - protein, 9 aa, Homo sapiens
  misc_feature: Table A; Target 5664; HLA-B*58:01; ADAM2; ENSG00000104755; CTA
VQITVPEKI

SEQ ID NO: 5665 - protein, 9 aa, Homo sapiens
  misc_feature: Table A; Target 5665; HLA-C*02:02; ADAM2; ENSG00000104755; CTA
VQITVPEKI

SEQ ID NO: 5666 - protein, 9 aa, Homo sapiens
  misc_feature: Table A; Target 5666; HLA-C*06:02; ADAM2; ENSG00000104755; CTA
VQITVPEKI

SEQ ID NO: 5667 - protein, 9 aa, Homo sapiens
  misc_feature: Table A; Target 5667; HLA-C*16:04; ADAM2; ENSG00000104755; CTA
VQITVPEKI

SEQ ID NO: 5668 - protein, 9 aa, Homo sapiens
  misc_feature: Table A; Target 5668; HLA-A*02:03; ADAM2; ENSG00000104755; CTA
VQTGHPCGL

SEQ ID NO: 5669 - protein, 9 aa, Homo sapiens
  misc_feature: Table A; Target 5669; HLA-B*13:02; ADAM2; ENSG00000104755; CTA
VQTGHPCGL

SEQ ID NO: 5670 - protein, 9 aa, Homo sapiens
  misc_feature: Table A; Target 5670; HLA-B*15:03; ADAM2; ENSG00000104755; CTA
VQTGHPCGL

SEQ ID NO: 5671 - protein, 9 aa, Homo sapiens
  misc_feature: Table A; Target 5671; HLA-B*27:05; ADAM2; ENSG00000104755; CTA
VQTGHPCGL

SEQ ID NO: 5672 - protein, 9 aa, Homo sapiens
  misc_feature: Table A; Target 5672; HLA-C*06:02; ADAM2; ENSG00000104755; CTA
VQTGHPCGL

SEQ ID NO: 5673 - protein, 9 aa, Homo sapiens
  misc_feature: Table A; Target 5673; HLA-C*16:02; ADAM2; ENSG00000104755; CTA
VQTGHPCGL

SEQ ID NO: 5674 - protein, 9 aa, Homo sapiens
  misc_feature: Table A; Target 5674; HLA-A*23:01; ADAM2; ENSG00000104755; CTA
VSFNITIIL

SEQ ID NO: 5675 - protein, 9 aa, Homo sapiens
  misc_feature: Table A; Target 5675; HLA-A*68:02; ADAM2; ENSG00000104755; CTA
VSFNITIIL

SEQ ID NO: 5676 - protein, 9 aa, Homo sapiens
  misc_feature: Table A; Target 5676; HLA-B*57:01; ADAM2; ENSG00000104755; CTA
VSFNITIIL

SEQ ID NO: 5677 - protein, 9 aa, Homo sapiens
  misc_feature: Table A; Target 5677; HLA-C*02:02; ADAM2; ENSG00000104755; CTA
VSFNITIIL

SEQ ID NO: 5678 - protein, 9 aa, Homo sapiens
  misc_feature: Table A; Target 5678; HLA-C*12:03; ADAM2; ENSG00000104755; CTA
VSFNITIIL

SEQ ID NO: 5679 - protein, 8 aa, Homo sapiens
  misc_feature: Table A; Target 5679; HLA-A*01:01; ADAM2; ENSG00000104755; CTA
VSSSYLGY

SEQ ID NO: 5680 - protein, 8 aa, Homo sapiens
  misc_feature: Table A; Target 5680; HLA-A*30:02; ADAM2; ENSG00000104755; CTA
VSSSYLGY

SEQ ID NO: 5681 - protein, 9 aa, Homo sapiens
  misc_feature: Table A; Target 5681; HLA-B*27:05; ADAM2; ENSG00000104755; CTA
VSYGIEPLE

SEQ ID NO: 5682 - protein, 9 aa, Homo sapiens
  misc_feature: Table A; Target 5682; HLA-C*12:03; ADAM2; ENSG00000104755; CTA
VSYGIEPLE

SEQ ID NO: 5683 - protein, 9 aa, Homo sapiens
  misc_feature: Table A; Target 5683; HLA-A*02:01; ADAM2; ENSG00000104755; CTA
VVAQKVFQL

SEQ ID NO: 5684 - protein, 9 aa, Homo sapiens
  misc_feature: Table A; Target 5684; HLA-A*02:03; ADAM2; ENSG00000104755; CTA
VVAQKVFQL

SEQ ID NO: 5685 - protein, 9 aa, Homo sapiens
  misc_feature: Table A; Target 5685; HLA-A*02:04; ADAM2; ENSG00000104755; CTA
VVAQKVFQL

SEQ ID NO: 5686 - protein, 9 aa, Homo sapiens
  misc_feature: Table A; Target 5686; HLA-A*02:07; ADAM2; ENSG00000104755; CTA
VVAQKVFQL

SEQ ID NO: 5687 - protein, 9 aa, Homo sapiens
  misc_feature: Table A; Target 5687; HLA-A*03:01; ADAM2; ENSG00000104755; CTA
VVAQKVFQL

SEQ ID NO: 5688 - protein, 9 aa, Homo sapiens
  misc_feature: Table A; Target 5688; HLA-A*68:02; ADAM2; ENSG00000104755; CTA
VVAQKVFQL

SEQ ID NO: 5689 - protein, 9 aa, Homo sapiens
  misc_feature: Table A; Target 5689; HLA-B*08:01; ADAM2; ENSG00000104755; CTA
VVAQKVFQL

SEQ ID NO: 5690 - protein, 9 aa, Homo sapiens
  misc_feature: Table A; Target 5690; HLA-C*16:02; ADAM2; ENSG00000104755; CTA
VVAQKVFQL

SEQ ID NO: 5691 - protein, 10 aa, Homo sapiens
  misc_feature: Table A; Target 5691; HLA-A*68:02; ADAM2; ENSG00000104755; CTA
VVAQKVFQLI

SEQ ID NO: 5692 - protein, 10 aa, Homo sapiens
  misc_feature: Table A; Target 5692; HLA-B*08:01; ADAM2; ENSG00000104755; CTA
VVLHPRTISL

SEQ ID NO: 5693 - protein, 10 aa, Homo sapiens
  misc_feature: Table A; Target 5693; HLA-C*03:04; ADAM2; ENSG00000104755; CTA
VVLHPRTISL

SEQ ID NO: 5694 - protein, 9 aa, Homo sapiens
  misc_feature: Table A; Target 5694; HLA-C*01:02; ADAM2; ENSG00000104755; CTA
VVMVSTCTG

SEQ ID NO: 5695 - protein, 9 aa, Homo sapiens
  misc_feature: Table A; Target 5695; HLA-C*14:02; ADAM2; ENSG00000104755; CTA
VVMVSTCTG

SEQ ID NO: 5696 - protein, 8 aa, Homo sapiens
  misc_feature: Table A; Target 5696; HLA-C*14:02; ADAM2; ENSG00000104755; CTA
VYREKSNY

SEQ ID NO: 5697 - protein, 9 aa, Homo sapiens
  misc_feature: Table A; Target 5697; HLA-A*24:02; ADAM2; ENSG00000104755; CTA
VYREKSNYV

SEQ ID NO: 5698 - protein, 9 aa, Homo sapiens
  misc_feature: Table A; Target 5698; HLA-A*23:01; ADAM2; ENSG00000104755; CTA
VYSYSGTGI

SEQ ID NO: 5699 - protein, 9 aa, Homo sapiens
  misc_feature: Table A; Target 5699; HLA-A*24:02; ADAM2; ENSG00000104755; CTA
VYSYSGTGI

SEQ ID NO: 5700 - protein, 9 aa, Homo sapiens
  misc_feature: Table A; Target 5700; HLA-C*01:02; ADAM2; ENSG00000104755; CTA
VYSYSGTGI

SEQ ID NO: 5701 - protein, 9 aa, Homo sapiens
  misc_feature: Table A; Target 5701; HLA-C*04:01; ADAM2; ENSG00000104755; CTA
VYSYSGTGI

SEQ ID NO: 5702 - protein, 9 aa, Homo sapiens
  misc_feature: Table A; Target 5702; HLA-C*07:04; ADAM2; ENSG00000104755; CTA
VYSYSGTGI

SEQ ID NO: 5703 - protein, 9 aa, Homo sapiens
  misc_feature: Table A; Target 5703; HLA-C*14:02; ADAM2; ENSG00000104755; CTA
VYSYSGTGI

SEQ ID NO: 5704 - protein, 10 aa, Homo sapiens
  misc_feature: Table A; Target 5704; HLA-C*07:02; ADAM2; ENSG00000104755; CTA
VYSYSGTGIM

SEQ ID NO: 5705 - protein, 10 aa, Homo sapiens
  misc_feature: Table A; Target 5705; HLA-C*14:02; ADAM2; ENSG00000104755; CTA
VYSYSGTGIM

SEQ ID NO: 5706 - protein, 11 aa, Homo sapiens
  misc_feature: Table A; Target 5706; HLA-A*03:02; ADAM2; ENSG00000104755; CTA
VYSYSGTGIMK

SEQ ID NO: 5707 - protein, 8 aa, Homo sapiens
  misc_feature: Table A; Target 5707; HLA-C*07:01; ADAM2; ENSG00000104755; CTA
YAGGVVLH

SEQ ID NO: 5708 - protein, 8 aa, Homo sapiens
  misc_feature: Table A; Target 5708; HLA-C*07:04; ADAM2; ENSG00000104755; CTA
YAGGVVLH

SEQ ID NO: 5709 - protein, 8 aa, Homo sapiens
  misc_feature: Table A; Target 5709; HLA-C*12:03; ADAM2; ENSG00000104755; CTA
YAGGVVLH

SEQ ID NO: 5710 - protein, 9 aa, Homo sapiens
  misc_feature: Table A; Target 5710; HLA-A*68:02; ADAM2; ENSG00000104755; CTA
YAGGVVLHP

SEQ ID NO: 5711 - protein, 9 aa, Homo sapiens
  misc_feature: Table A; Target 5711; HLA-B*54:01; ADAM2; ENSG00000104755; CTA
YAGGVVLHP

SEQ ID NO: 5712 - protein, 9 aa, Homo sapiens
  misc_feature: Table A; Target 5712; HLA-C*02:02; ADAM2; ENSG00000104755; CTA
YAGGVVLHP

SEQ ID NO: 5713 - protein, 9 aa, Homo sapiens
  misc_feature: Table A; Target 5713; HLA-C*06:02; ADAM2; ENSG00000104755; CTA
YAGGVVLHP

SEQ ID NO: 5714 - protein, 9 aa, Homo sapiens
  misc_feature: Table A; Target 5714; HLA-C*07:01; ADAM2; ENSG00000104755; CTA
YAGGVVLHP

SEQ ID NO: 5715 - protein, 9 aa, Homo sapiens
  misc_feature: Table A; Target 5715; HLA-C*12:03; ADAM2; ENSG00000104755; CTA
YAGGVVLHP

SEQ ID NO: 5716 - protein, 9 aa, Homo sapiens
  misc_feature: Table A; Target 5716; HLA-C*16:02; ADAM2; ENSG00000104755; CTA
YAGGVVLHP

SEQ ID NO: 5717 - protein, 9 aa, Homo sapiens
  misc_feature: Table A; Target 5717; HLA-C*16:04; ADAM2; ENSG00000104755; CTA
YAGGVVLHP

SEQ ID NO: 5718 - protein, 10 aa, Homo sapiens
  misc_feature: Table A; Target 5718; HLA-A*31:01; ADAM2; ENSG00000104755; CTA
YAGGVVLHPR

SEQ ID NO: 5719 - protein, 10 aa, Homo sapiens
  misc_feature: Table A; Target 5719; HLA-A*33:01; ADAM2; ENSG00000104755; CTA
YAGGVVLHPR

SEQ ID NO: 5720 - protein, 10 aa, Homo sapiens
  misc_feature: Table A; Target 5720; HLA-A*33:03; ADAM2; ENSG00000104755; CTA
YAGGVVLHPR

SEQ ID NO: 5721 - protein, 10 aa, Homo sapiens
  misc_feature: Table A; Target 5721; HLA-A*68:01; ADAM2; ENSG00000104755; CTA
YAGGVVLHPR

SEQ ID NO: 5722 - protein, 10 aa, Homo sapiens
  misc_feature: Table A; Target 5722; HLA-A*68:02; ADAM2; ENSG00000104755; CTA
YAGGVVLHPR

SEQ ID NO: 5723 - protein, 10 aa, Homo sapiens
  misc_feature: Table A; Target 5723; HLA-C*07:06; ADAM2; ENSG00000104755; CTA
YAGGVVLHPR

SEQ ID NO: 5724 - protein, 8 aa, Homo sapiens
  misc_feature: Table A; Target 5724; HLA-B*07:02; ADAM2; ENSG00000104755; CTA
YANISGHL

SEQ ID NO: 5725 - protein, 8 aa, Homo sapiens
  misc_feature: Table A; Target 5725; HLA-B*08:01; ADAM2; ENSG00000104755; CTA
YANISGHL

SEQ ID NO: 5726 - protein, 8 aa, Homo sapiens
  misc_feature: Table A; Target 5726; HLA-B*35:03; ADAM2; ENSG00000104755; CTA
YANISGHL

SEQ ID NO: 5727 - protein, 8 aa, Homo sapiens
  misc_feature: Table A; Target 5727; HLA-B*40:02; ADAM2; ENSG00000104755; CTA
YANISGHL

SEQ ID NO: 5728 - protein, 8 aa, Homo sapiens
  misc_feature: Table A; Target 5728; HLA-B*46:01; ADAM2; ENSG00000104755; CTA
YANISGHL

SEQ ID NO: 5729 - protein, 8 aa, Homo sapiens
  misc_feature: Table A; Target 5729; HLA-B*51:01; ADAM2; ENSG00000104755; CTA
YANISGHL

SEQ ID NO: 5730 - protein, 8 aa, Homo sapiens
  misc_feature: Table A; Target 5730; HLA-C*01:02; ADAM2; ENSG00000104755; CTA
YANISGHL

SEQ ID NO: 5731 - protein, 8 aa, Homo sapiens
  misc_feature: Table A; Target 5731; HLA-C*02:02; ADAM2; ENSG00000104755; CTA
YANISGHL

SEQ ID NO: 5732 - protein, 8 aa, Homo sapiens
  misc_feature: Table A; Target 5732; HLA-C*03:03; ADAM2; ENSG00000104755; CTA
YANISGHL

SEQ ID NO: 5733 - protein, 8 aa, Homo sapiens
  misc_feature: Table A; Target 5733; HLA-C*03:04; ADAM2; ENSG00000104755; CTA
YANISGHL

SEQ ID NO: 5734 - protein, 8 aa, Homo sapiens
  misc_feature: Table A; Target 5734; HLA-C*04:01; ADAM2; ENSG00000104755; CTA
YANISGHL

SEQ ID NO: 5735 - protein, 8 aa, Homo sapiens
  misc_feature: Table A; Target 5735; HLA-C*05:01; ADAM2; ENSG00000104755; CTA
YANISGHL

SEQ ID NO: 5736 - protein, 8 aa, Homo sapiens
  misc_feature: Table A; Target 5736; HLA-C*07:01; ADAM2; ENSG00000104755; CTA
YANISGHL

SEQ ID NO: 5737 - protein, 8 aa, Homo sapiens
  misc_feature: Table A; Target 5737; HLA-C*07:02; ADAM2; ENSG00000104755; CTA
YANISGHL

SEQ ID NO: 5738 - protein, 8 aa, Homo sapiens
  misc_feature: Table A; Target 5738; HLA-C*07:04; ADAM2; ENSG00000104755; CTA
YANISGHL

SEQ ID NO: 5739 - protein, 8 aa, Homo sapiens
  misc_feature: Table A; Target 5739; HLA-C*12:03; ADAM2; ENSG00000104755; CTA
YANISGHL

SEQ ID NO: 5740 - protein, 8 aa, Homo sapiens
  misc_feature: Table A; Target 5740; HLA-C*14:02; ADAM2; ENSG00000104755; CTA
YANISGHL

SEQ ID NO: 5741 - protein, 8 aa, Homo sapiens
  misc_feature: Table A; Target 5741; HLA-C*16:01; ADAM2; ENSG00000104755; CTA
YANISGHL

SEQ ID NO: 5742 - protein, 8 aa, Homo sapiens
  misc_feature: Table A; Target 5742; HLA-C*16:02; ADAM2; ENSG00000104755; CTA
YANISGHL

SEQ ID NO: 5743 - protein, 8 aa, Homo sapiens
  misc_feature: Table A; Target 5743; HLA-C*16:04; ADAM2; ENSG00000104755; CTA
YANISGHL

SEQ ID NO: 5744 - protein, 9 aa, Homo sapiens
  misc_feature: Table A; Target 5744; HLA-B*46:01; ADAM2; ENSG00000104755; CTA
YANISGHLC

SEQ ID NO: 5745 - protein, 9 aa, Homo sapiens
  misc_feature: Table A; Target 5745; HLA-C*02:02; ADAM2; ENSG00000104755; CTA
YANISGHLC

SEQ ID NO: 5746 - protein, 9 aa, Homo sapiens
  misc_feature: Table A; Target 5746; HLA-C*03:03; ADAM2; ENSG00000104755; CTA
YANISGHLC

SEQ ID NO: 5747 - protein, 9 aa, Homo sapiens
  misc_feature: Table A; Target 5747; HLA-C*03:04; ADAM2; ENSG00000104755; CTA
YANISGHLC

SEQ ID NO: 5748 - protein, 9 aa, Homo sapiens
  misc_feature: Table A; Target 5748; HLA-C*16:02; ADAM2; ENSG00000104755; CTA
YANISGHLC

SEQ ID NO: 5749 - protein, 10 aa, Homo sapiens
  misc_feature: Table A; Target 5749; HLA-B*51:01; ADAM2; ENSG00000104755; CTA
YANISGHLCI

SEQ ID NO: 5750 - protein, 10 aa, Homo sapiens
  misc_feature: Table A; Target 5750; HLA-A*68:02; ADAM2; ENSG00000104755; CTA
YGIEPLESSV

SEQ ID NO: 5751 - protein, 10 aa, Homo sapiens
  misc_feature: Table A; Target 5751; HLA-B*49:01; ADAM2; ENSG00000104755; CTA
YGIEPLESSV

SEQ ID NO: 5752 - protein, 10 aa, Homo sapiens
  misc_feature: Table A; Target 5752; HLA-B*54:01; ADAM2; ENSG00000104755; CTA
YGIEPLESSV

SEQ ID NO: 5753 - protein, 9 aa, Homo sapiens
  misc_feature: Table A; Target 5753; HLA-A*01:01; ADAM2; ENSG00000104755; CTA
YIEGYPKSV

SEQ ID NO: 5754 - protein, 9 aa, Homo sapiens
  misc_feature: Table A; Target 5754; HLA-A*02:01; ADAM2; ENSG00000104755; CTA
YIEGYPKSV

SEQ ID NO: 5755 - protein, 9 aa, Homo sapiens
  misc_feature: Table A; Target 5755; HLA-A*02:03; ADAM2; ENSG00000104755; CTA
YIEGYPKSV

SEQ ID NO: 5756 - protein, 9 aa, Homo sapiens
  misc_feature: Table A; Target 5756; HLA-A*02:04; ADAM2; ENSG00000104755; CTA
YIEGYPKSV

SEQ ID NO: 5757 - protein, 9 aa, Homo sapiens
  misc_feature: Table A; Target 5757; HLA-A*02:07; ADAM2; ENSG00000104755; CTA
YIEGYPKSV

SEQ ID NO: 5758 - protein, 9 aa, Homo sapiens
  misc_feature: Table A; Target 5758; HLA-A*68:02; ADAM2; ENSG00000104755; CTA
YIEGYPKSV

SEQ ID NO: 5759 - protein, 9 aa, Homo sapiens
  misc_feature: Table A; Target 5759; HLA-B*08:01; ADAM2; ENSG00000104755; CTA
YIEGYPKSV

SEQ ID NO: 5760 - protein, 9 aa, Homo sapiens
  misc_feature: Table A; Target 5760; HLA-B*13:02; ADAM2; ENSG00000104755; CTA
YIEGYPKSV

SEQ ID NO: 5761 - protein, 9 aa, Homo sapiens
  misc_feature: Table A; Target 5761; HLA-B*40:02; ADAM2; ENSG00000104755; CTA
YIEGYPKSV

SEQ ID NO: 5762 - protein, 9 aa, Homo sapiens
  misc_feature: Table A; Target 5762; HLA-B*49:01; ADAM2; ENSG00000104755; CTA
YIEGYPKSV

SEQ ID NO: 5763 - protein, 9 aa, Homo sapiens
  misc_feature: Table A; Target 5763; HLA-B*51:01; ADAM2; ENSG00000104755; CTA
YIEGYPKSV

SEQ ID NO: 5764 - protein, 9 aa, Homo sapiens
  misc_feature: Table A; Target 5764; HLA-B*55:01; ADAM2; ENSG00000104755; CTA
YIEGYPKSV

SEQ ID NO: 5765 - protein, 9 aa, Homo sapiens
  misc_feature: Table A; Target 5765; HLA-C*01:02; ADAM2; ENSG00000104755; CTA
YIEGYPKSV

SEQ ID NO: 5766 - protein, 9 aa, Homo sapiens
  misc_feature: Table A; Target 5766; HLA-C*02:02; ADAM2; ENSG00000104755; CTA
YIEGYPKSV

SEQ ID NO: 5767 - protein, 9 aa, Homo sapiens
  misc_feature: Table A; Target 5767; HLA-C*03:03; ADAM2; ENSG00000104755; CTA
YIEGYPKSV

SEQ ID NO: 5768 - protein, 9 aa, Homo sapiens
  misc_feature: Table A; Target 5768; HLA-C*03:04; ADAM2; ENSG00000104755; CTA
YIEGYPKSV

SEQ ID NO: 5769 - protein, 9 aa, Homo sapiens
  misc_feature: Table A; Target 5769; HLA-C*04:01; ADAM2; ENSG00000104755; CTA
YIEGYPKSV

SEQ ID NO: 5770 - protein, 9 aa, Homo sapiens
  misc_feature: Table A; Target 5770; HLA-C*05:01; ADAM2; ENSG00000104755; CTA
YIEGYPKSV

SEQ ID NO: 5771 - protein, 9 aa, Homo sapiens
  misc_feature: Table A; Target 5771; HLA-C*06:02; ADAM2; ENSG00000104755; CTA
YIEGYPKSV

SEQ ID NO: 5772 - protein, 9 aa, Homo sapiens
  misc_feature: Table A; Target 5772; HLA-C*12:03; ADAM2; ENSG00000104755; CTA
YIEGYPKSV

SEQ ID NO: 5773 - protein, 9 aa, Homo sapiens
  misc_feature: Table A; Target 5773; HLA-C*16:02; ADAM2; ENSG00000104755; CTA
YIEGYPKSV

SEQ ID NO: 5774 - protein, 11 aa, Homo sapiens
  misc_feature: Table A; Target 5774; HLA-C*07:04; ADAM2; ENSG00000104755; CTA
YIEGYPKSVVM

SEQ ID NO: 5775 - protein, 9 aa, Homo sapiens
  misc_feature: Table A; Target 5775; HLA-A*01:01; ADAM2; ENSG00000104755; CTA
YIENIYHSK

SEQ ID NO: 5776 - protein, 9 aa, Homo sapiens
  misc_feature: Table A; Target 5776; HLA-A*02:07; ADAM2; ENSG00000104755; CTA
YIENIYHSK

SEQ ID NO: 5777 - protein, 9 aa, Homo sapiens
  misc_feature: Table A; Target 5777; HLA-A*03:02; ADAM2; ENSG00000104755; CTA
YIENIYHSK

SEQ ID NO: 5778 - protein, 9 aa, Homo sapiens
  misc_feature: Table A; Target 5778; HLA-A*11:01; ADAM2; ENSG00000104755; CTA
YIENIYHSK

SEQ ID NO: 5779 - protein, 9 aa, Homo sapiens
  misc_feature: Table A; Target 5779; HLA-A*68:01; ADAM2; ENSG00000104755; CTA
YIENIYHSK

SEQ ID NO: 5780 - protein, 9 aa, Homo sapiens
  misc_feature: Table A; Target 5780; HLA-B*27:02; ADAM2; ENSG00000104755; CTA
YIENIYHSK

SEQ ID NO: 5781 - protein, 10 aa, Homo sapiens
  misc_feature: Table A; Target 5781; HLA-B*15:03; ADAM2; ENSG00000104755; CTA
YKIVIEGKPY

SEQ ID NO: 5782 - protein, 9 aa, Homo sapiens
  misc_feature: Table A; Target 5782; HLA-A*02:03; ADAM2; ENSG00000104755; CTA
YLVLRPHDV

SEQ ID NO: 5783 - protein, 9 aa, Homo sapiens
  misc_feature: Table A; Target 5783; HLA-A*02:04; ADAM2; ENSG00000104755; CTA
YLVLRPHDV

SEQ ID NO: 5784 - protein, 8 aa, Homo sapiens
  misc_feature: Table A; Target 5784; HLA-B*08:01; ADAM2; ENSG00000104755; CTA
YPKSVVMV

SEQ ID NO: 5785 - protein, 8 aa, Homo sapiens
  misc_feature: Table A; Target 5785; HLA-B*51:01; ADAM2; ENSG00000104755; CTA
YPKSVVMV

SEQ ID NO: 5786 - protein, 8 aa, Homo sapiens
  misc_feature: Table A; Target 5786; HLA-B*54:01; ADAM2; ENSG00000104755; CTA
YPKSVVMV

SEQ ID NO: 5787 - protein, 8 aa, Homo sapiens
  misc_feature: Table A; Target 5787; HLA-B*55:01; ADAM2; ENSG00000104755; CTA
YPKSVVMV

SEQ ID NO: 5788 - protein, 8 aa, Homo sapiens
  misc_feature: Table A; Target 5788; HLA-B*56:01; ADAM2; ENSG00000104755; CTA
YPKSVVMV

SEQ ID NO: 5789 - protein, 9 aa, Homo sapiens
  misc_feature: Table A; Target 5789; HLA-B*54:01; ADAM2; ENSG00000104755; CTA
YPKSVVMVS

SEQ ID NO: 5790 - protein, 10 aa, Homo sapiens
  misc_feature: Table A; Target 5790; HLA-B*54:01; ADAM2; ENSG00000104755; CTA
YPKSVVMVST

SEQ ID NO: 5791 - protein, 10 aa, Homo sapiens
  misc_feature: Table A; Target 5791; HLA-B*56:01; ADAM2; ENSG00000104755; CTA
YPKSVVMVST

SEQ ID NO: 5792 - protein, 8 aa, Homo sapiens
  misc_feature: Table A; Target 5792; HLA-A*01:01; ADAM2; ENSG00000104755; CTA
YQGYIEGY

SEQ ID NO: 5793 - protein, 8 aa, Homo sapiens
  misc_feature: Table A; Target 5793; HLA-A*30:02; ADAM2; ENSG00000104755; CTA
YQGYIEGY

SEQ ID NO: 5794 - protein, 8 aa, Homo sapiens
  misc_feature: Table A; Target 5794; HLA-B*15:01; ADAM2; ENSG00000104755; CTA
YQGYIEGY

SEQ ID NO: 5795 - protein, 8 aa, Homo sapiens
  misc_feature: Table A; Target 5795; HLA-B*15:03; ADAM2; ENSG00000104755; CTA
YQGYIEGY

SEQ ID NO: 5796 - protein, 8 aa, Homo sapiens
  misc_feature: Table A; Target 5796; HLA-B*18:01; ADAM2; ENSG00000104755; CTA
YQGYIEGY

SEQ ID NO: 5797 - protein, 8 aa, Homo sapiens
  misc_feature: Table A; Target 5797; HLA-C*07:01; ADAM2; ENSG00000104755; CTA
YQGYIEGY

SEQ ID NO: 5798 - protein, 8 aa, Homo sapiens
  misc_feature: Table A; Target 5798; HLA-C*07:04; ADAM2; ENSG00000104755; CTA
YQGYIEGY

SEQ ID NO: 5799 - protein, 8 aa, Homo sapiens
  misc_feature: Table A; Target 5799; HLA-C*16:04; ADAM2; ENSG00000104755; CTA
YQGYIEGY

SEQ ID NO: 5800 - protein, 10 aa, Homo sapiens
  misc_feature: Table A; Target 5800; HLA-B*27:02; ADAM2; ENSG00000104755; CTA
YQGYIEGYPK

SEQ ID NO: 5801 - protein, 8 aa, Homo sapiens
  misc_feature: Table A; Target 5801; HLA-A*01:01; ADAM2; ENSG00000104755; CTA
YSGTGIMK

SEQ ID NO: 5802 - protein, 8 aa, Homo sapiens
  misc_feature: Table A; Target 5802; HLA-A*03:01; ADAM2; ENSG00000104755; CTA
YSGTGIMK

SEQ ID NO: 5803 - protein, 8 aa, Homo sapiens
  misc_feature: Table A; Target 5803; HLA-A*03:02; ADAM2; ENSG00000104755; CTA
YSGTGIMK

SEQ ID NO: 5804 - protein, 8 aa, Homo sapiens
  misc_feature: Table A; Target 5804; HLA-A*11:01; ADAM2; ENSG00000104755; CTA
YSGTGIMK

SEQ ID NO: 5805 - protein, 8 aa, Homo sapiens
  misc_feature: Table A; Target 5805; HLA-C*16:01; ADAM2; ENSG00000104755; CTA
YSGTGIMK

SEQ ID NO: 5806 - protein, 8 aa, Homo sapiens
  misc_feature: Table A; Target 5806; HLA-B*13:02; ADAM2; ENSG00000104755; CTA
YSYSGTGI

SEQ ID NO: 5807 - protein, 8 aa, Homo sapiens
  misc_feature: Table A; Target 5807; HLA-B*49:01; ADAM2; ENSG00000104755; CTA
YSYSGTGI

SEQ ID NO: 5808 - protein, 8 aa, Homo sapiens
  misc_feature: Table A; Target 5808; HLA-B*51:01; ADAM2; ENSG00000104755; CTA
YSYSGTGI

SEQ ID NO: 5809 - protein, 8 aa, Homo sapiens
  misc_feature: Table A; Target 5809; HLA-C*03:03; ADAM2; ENSG00000104755; CTA
YSYSGTGI

SEQ ID NO: 5810 - protein, 8 aa, Homo sapiens
  misc_feature: Table A; Target 5810; HLA-C*03:04; ADAM2; ENSG00000104755; CTA
YSYSGTGI

SEQ ID NO: 5811 - protein, 8 aa, Homo sapiens
  misc_feature: Table A; Target 5811; HLA-C*05:01; ADAM2; ENSG00000104755; CTA
YSYSGTGI

SEQ ID NO: 5812 - protein, 9 aa, Homo sapiens
  misc_feature: Table A; Target 5812; HLA-A*01:01; ADAM2; ENSG00000104755; CTA
YSYSGTGIM

SEQ ID NO: 5813 - protein, 9 aa, Homo sapiens
  misc_feature: Table A; Target 5813; HLA-B*15:03; ADAM2; ENSG00000104755; CTA
YSYSGTGIM

SEQ ID NO: 5814 - protein, 9 aa, Homo sapiens
  misc_feature: Table A; Target 5814; HLA-B*39:01; ADAM2; ENSG00000104755; CTA
YSYSGTGIM

SEQ ID NO: 5815 - protein, 9 aa, Homo sapiens
  misc_feature: Table A; Target 5815; HLA-B*40:01; ADAM2; ENSG00000104755; CTA
YSYSGTGIM

SEQ ID NO: 5816 - protein, 9 aa, Homo sapiens
  misc_feature: Table A; Target 5816; HLA-B*40:02; ADAM2; ENSG00000104755; CTA
YSYSGTGIM

SEQ ID NO: 5817 - protein, 9 aa, Homo sapiens
  misc_feature: Table A; Target 5817; HLA-B*46:01; ADAM2; ENSG00000104755; CTA
YSYSGTGIM

SEQ ID NO: 5818 - protein, 9 aa, Homo sapiens
  misc_feature: Table A; Target 5818; HLA-C*01:02; ADAM2; ENSG00000104755; CTA
YSYSGTGIM

SEQ ID NO: 5819 - protein, 9 aa, Homo sapiens
  misc_feature: Table A; Target 5819; HLA-C*02:02; ADAM2; ENSG00000104755; CTA
YSYSGTGIM

SEQ ID NO: 5820 - protein, 9 aa, Homo sapiens
  misc_feature: Table A; Target 5820; HLA-C*03:03; ADAM2; ENSG00000104755; CTA
YSYSGTGIM

SEQ ID NO: 5821 - protein, 9 aa, Homo sapiens
  misc_feature: Table A; Target 5821; HLA-C*03:04; ADAM2; ENSG00000104755; CTA
YSYSGTGIM

SEQ ID NO: 5822 - protein, 9 aa, Homo sapiens
  misc_feature: Table A; Target 5822; HLA-C*05:01; ADAM2; ENSG00000104755; CTA
YSYSGTGIM

SEQ ID NO: 5823 - protein, 9 aa, Homo sapiens
  misc_feature: Table A; Target 5823; HLA-C*07:04; ADAM2; ENSG00000104755; CTA
YSYSGTGIM

SEQ ID NO: 5824 - protein, 9 aa, Homo sapiens
  misc_feature: Table A; Target 5824; HLA-C*12:03; ADAM2; ENSG00000104755; CTA
YSYSGTGIM

SEQ ID NO: 5825 - protein, 9 aa, Homo sapiens
  misc_feature: Table A; Target 5825; HLA-C*14:02; ADAM2; ENSG00000104755; CTA
YSYSGTGIM

SEQ ID NO: 5826 - protein, 9 aa, Homo sapiens
  misc_feature: Table A; Target 5826; HLA-C*16:01; ADAM2; ENSG00000104755; CTA
YSYSGTGIM

SEQ ID NO: 5827 - protein, 9 aa, Homo sapiens
  misc_feature: Table A; Target 5827; HLA-C*16:02; ADAM2; ENSG00000104755; CTA
YSYSGTGIM

SEQ ID NO: 5828 - protein, 10 aa, Homo sapiens
  misc_feature: Table A; Target 5828; HLA-A*01:01; ADAM2; ENSG00000104755; CTA
YSYSGTGIMK

SEQ ID NO: 5829 - protein, 10 aa, Homo sapiens
  misc_feature: Table A; Target 5829; HLA-A*03:01; ADAM2; ENSG00000104755; CTA
YSYSGTGIMK

SEQ ID NO: 5830 - protein, 10 aa, Homo sapiens
  misc_feature: Table A; Target 5830; HLA-A*03:02; ADAM2; ENSG00000104755; CTA
YSYSGTGIMK

SEQ ID NO: 5831 - protein, 10 aa, Homo sapiens
  misc_feature: Table A; Target 5831; HLA-A*11:01; ADAM2; ENSG00000104755; CTA
YSYSGTGIMK

SEQ ID NO: 5832 - protein, 10 aa, Homo sapiens
  misc_feature: Table A; Target 5832; HLA-A*68:01; ADAM2; ENSG00000104755; CTA
YSYSGTGIMK

SEQ ID NO: 5833 - protein, 10 aa, Homo sapiens
  misc_feature: Table A; Target 5833; HLA-B*27:02; ADAM2; ENSG00000104755; CTA
YSYSGTGIMK

SEQ ID NO: 5834 - protein, 10 aa, Homo sapiens
  misc_feature: Table A; Target 5834; HLA-C*02:02; ADAM2; ENSG00000104755; CTA
YSYSGTGIMK

SEQ ID NO: 5835 - protein, 10 aa, Homo sapiens
  misc_feature: Table A; Target 5835; HLA-C*03:03; ADAM2; ENSG00000104755; CTA
YSYSGTGIMK

SEQ ID NO: 5836 - protein, 10 aa, Homo sapiens
  misc_feature: Table A; Target 5836; HLA-C*03:04; ADAM2; ENSG00000104755; CTA
YSYSGTGIMK

SEQ ID NO: 5837 - protein, 10 aa, Homo sapiens
  misc_feature: Table A; Target 5837; HLA-C*07:06; ADAM2; ENSG00000104755; CTA
YSYSGTGIMK

SEQ ID NO: 5838 - protein, 10 aa, Homo sapiens
  misc_feature: Table A; Target 5838; HLA-C*12:03; ADAM2; ENSG00000104755; CTA
YSYSGTGIMK

SEQ ID NO: 5839 - protein, 11 aa, Homo sapiens
  misc_feature: Table A; Target 5839; HLA-C*06:02; ADAM2; ENSG00000104755; CTA
YSYSGTGIMKP

SEQ ID NO: 5840 - protein, 8 aa, Homo sapiens
  misc_feature: Table A; Target 5840; HLA-A*11:01; ADAM2; ENSG00000104755; CTA
YTVNLMQK

SEQ ID NO: 5841 - protein, 8 aa, Homo sapiens
  misc_feature: Table A; Target 5841; HLA-C*07:01; ADAM2; ENSG00000104755; CTA
YVGATFQG

SEQ ID NO: 5842 - protein, 9 aa, Homo sapiens
  misc_feature: Table A; Target 5842; HLA-A*01:01; ADAM2; ENSG00000104755; CTA
YVGATFQGK

SEQ ID NO: 5843 - protein, 9 aa, Homo sapiens
  misc_feature: Table A; Target 5843; HLA-A*03:01; ADAM2; ENSG00000104755; CTA
YVGATFQGK

SEQ ID NO: 5844 - protein, 9 aa, Homo sapiens
  misc_feature: Table A; Target 5844; HLA-A*03:02; ADAM2; ENSG00000104755; CTA
YVGATFQGK

SEQ ID NO: 5845 - protein, 9 aa, Homo sapiens
  misc_feature: Table A; Target 5845; HLA-A*11:01; ADAM2; ENSG00000104755; CTA
YVGATFQGK

SEQ ID NO: 5846 - protein, 9 aa, Homo sapiens
  misc_feature: Table A; Target 5846; HLA-A*33:03; ADAM2; ENSG00000104755; CTA
YVGATFQGK

SEQ ID NO: 5847 - protein, 9 aa, Homo sapiens
  misc_feature: Table A; Target 5847; HLA-A*68:01; ADAM2; ENSG00000104755; CTA
YVGATFQGK

SEQ ID NO: 5848 - protein, 9 aa, Homo sapiens
  misc_feature: Table A; Target 5848; HLA-C*07:04; ADAM2; ENSG00000104755; CTA
YVGATFQGK

SEQ ID NO: 5849 - protein, 10 aa, Homo sapiens
  misc_feature: Table A; Target 5849; HLA-A*26:01; ADAM2; ENSG00000104755; CTA
YVGATFQGKM

SEQ ID NO: 5850 - protein, 10 aa, Homo sapiens
  misc_feature: Table A; Target 5850; HLA-A*29:02; ADAM2; ENSG00000104755; CTA
YVGATFQGKM

SEQ ID NO: 5851 - protein, 10 aa, Homo sapiens
  misc_feature: Table A; Target 5851; HLA-C*04:01; ADAM2; ENSG00000104755; CTA
YVGATFQGKM

SEQ ID NO: 5852 - protein, 10 aa, Homo sapiens
  misc_feature: Table A; Target 5852; HLA-C*07:01; ADAM2; ENSG00000104755; CTA
YVGATFQGKM

SEQ ID NO: 5853 - protein, 9 aa, Homo sapiens
  misc_feature: Table A; Target 5853; HLA-A*02:03; ADAM2; ENSG00000104755; CTA
YVGKFLLQI

SEQ ID NO: 5854 - protein, 9 aa, Homo sapiens
  misc_feature: Table A; Target 5854; HLA-A*68:02; ADAM2; ENSG00000104755; CTA
YVGKFLLQI

SEQ ID NO: 5855 - protein, 9 aa, Homo sapiens
  misc_feature: Table A; Target 5855; HLA-B*13:02; ADAM2; ENSG00000104755; CTA
YVGKFLLQI

SEQ ID NO: 5856 - protein, 8 aa, Homo sapiens
  misc_feature: Table A; Target 5856; HLA-C*03:03; ADAM2; ENSG00000104755; CTA
YVQTGHPC

SEQ ID NO: 5857 - protein, 8 aa, Homo sapiens
  misc_feature: Table A; Target 5857; HLA-C*03:04; ADAM2; ENSG00000104755; CTA
YVQTGHPC

SEQ ID NO: 5858 - protein, 10 aa, Homo sapiens
  misc_feature: Table A; Target 5858; HLA-A*02:03; ADAM2; ENSG00000104755; CTA
YVQTGHPCGL

SEQ ID NO: 5859 - protein, 8 aa, Homo sapiens
  misc_feature: Table A; Target 5859; HLA-A*11:01; ADAM7; ENSG00000069206; CTA
ADDTVYRR

SEQ ID NO: 5860 - protein, 8 aa, Homo sapiens
  misc_feature: Table A; Target 5860; HLA-B*37:01; ADAM7; ENSG00000069206; CTA
ADDTVYRR

SEQ ID NO: 5861 - protein, 8 aa, Homo sapiens
  misc_feature: Table A; Target 5861; HLA-C*01:02; ADAM7; ENSG00000069206; CTA
ADPNQSAK

SEQ ID NO: 5862 - protein, 8 aa, Homo sapiens
  misc_feature: Table A; Target 5862; HLA-B*38:01; ADAM7; ENSG00000069206; CTA
AHQLGHNL

SEQ ID NO: 5863 - protein, 10 aa, Homo sapiens
  misc_feature: Table A; Target 5863; HLA-C*04:01; ADAM7; ENSG00000069206; CTA
AHQLGHNLGM

SEQ ID NO: 5864 - protein, 9 aa, Homo sapiens
  misc_feature: Table A; Target 5864; HLA-A*01:01; ADAM7; ENSG00000069206; CTA
AIESHDICY

SEQ ID NO: 5865 - protein, 9 aa, Homo sapiens
  misc_feature: Table A; Target 5865; HLA-A*30:02; ADAM7; ENSG00000069206; CTA
AIESHDICY

SEQ ID NO: 5866 - protein, 9 aa, Homo sapiens
  misc_feature: Table A; Target 5866; HLA-B*15:01; ADAM7; ENSG00000069206; CTA
AIESHDICY

SEQ ID NO: 5867 - protein, 9 aa, Homo sapiens
  misc_feature: Table A; Target 5867; HLA-B*15:03; ADAM7; ENSG00000069206; CTA
AIESHDICY

SEQ ID NO: 5868 - protein, 9 aa, Homo sapiens
  misc_feature: Table A; Target 5868; HLA-C*07:04; ADAM7; ENSG00000069206; CTA
AIESHDICY

SEQ ID NO: 5869 - protein, 10 aa, Homo sapiens
  misc_feature: Table A; Target 5869; HLA-A*03:01; ADAM7; ENSG00000069206; CTA
AIESHDICYK

SEQ ID NO: 5870 - protein, 10 aa, Homo sapiens
  misc_feature: Table A; Target 5870; HLA-A*03:02; ADAM7; ENSG00000069206; CTA
AIESHDICYK

SEQ ID NO: 5871 - protein, 10 aa, Homo sapiens
  misc_feature: Table A; Target 5871; HLA-A*11:01; ADAM7; ENSG00000069206; CTA
AIESHDICYK

SEQ ID NO: 5872 - protein, 9 aa, Homo sapiens
  misc_feature: Table A; Target 5872; HLA-B*07:02; ADAM7; ENSG00000069206; CTA
APVACEETL

SEQ ID NO: 5873 - protein, 9 aa, Homo sapiens
  misc_feature: Table A; Target 5873; HLA-B*35:01; ADAM7; ENSG00000069206; CTA
APVACEETL

SEQ ID NO: 5874 - protein, 9 aa, Homo sapiens
  misc_feature: Table A; Target 5874; HLA-B*35:03; ADAM7; ENSG00000069206; CTA
APVACEETL

SEQ ID NO: 5875 - protein, 9 aa, Homo sapiens
  misc_feature: Table A; Target 5875; HLA-B*55:01; ADAM7; ENSG00000069206; CTA
APVACEETL

SEQ ID NO: 5876 - protein, 9 aa, Homo sapiens
  misc_feature: Table A; Target 5876; HLA-C*03:03; ADAM7; ENSG00000069206; CTA
APVACEETL

SEQ ID NO: 5877 - protein, 9 aa, Homo sapiens
  misc_feature: Table A; Target 5877; HLA-C*07:02; ADAM7; ENSG00000069206; CTA
APVACEETL

SEQ ID NO: 5878 - protein, 9 aa, Homo sapiens
  misc_feature: Table A; Target 5878; HLA-B*58:01; ADAM7; ENSG00000069206; CTA
ASISTCNGL

SEQ ID NO: 5879 - protein, 9 aa, Homo sapiens
  misc_feature: Table A; Target 5879; HLA-B*49:01; ADAM7; ENSG00000069206; CTA
CEEGQAPVA

SEQ ID NO: 5880 - protein, 10 aa, Homo sapiens
  misc_feature: Table A; Target 5880; HLA-B*40:01; ADAM7; ENSG00000069206; CTA
CEEGQAPVAC

SEQ ID NO: 5881 - protein, 10 aa, Homo sapiens
  misc_feature: Table A; Target 5881; HLA-B*49:01; ADAM7; ENSG00000069206; CTA
CEETLHVTNI

SEQ ID NO: 5882 - protein, 11 aa, Homo sapiens
  misc_feature: Table A; Target 5882; HLA-A*29:02; ADAM7; ENSG00000069206; CTA
CFYQGSIVHEY

SEQ ID NO: 5883 - protein, 11 aa, Homo sapiens
  misc_feature: Table A; Target 5883; HLA-A*30:02; ADAM7; ENSG00000069206; CTA
CFYQGSIVHEY

SEQ ID NO: 5884 - protein, 9 aa, Homo sapiens
  misc_feature: Table A; Target 5884; HLA-C*01:02; ADAM7; ENSG00000069206; CTA
CLPYYSTSI

SEQ ID NO: 5885 - protein, 9 aa, Homo sapiens
  misc_feature: Table A; Target 5885; HLA-A*29:02; ADAM7; ENSG00000069206; CTA
CMLNIPFPY

SEQ ID NO: 5886 - protein, 8 aa, Homo sapiens
  misc_feature: Table A; Target 5886; HLA-B*08:01; ADAM7; ENSG00000069206; CTA
CPSGKCVM

SEQ ID NO: 5887 - protein, 9 aa, Homo sapiens
  misc_feature: Table A; Target 5887; HLA-B*08:01; ADAM7; ENSG00000069206; CTA
CQIKKAGSI

SEQ ID NO: 5888 - protein, 9 aa, Homo sapiens
  misc_feature: Table A; Target 5888; HLA-B*13:02; ADAM7; ENSG00000069206; CTA
CQIKKAGSI

SEQ ID NO: 5889 - protein, 9 aa, Homo sapiens
  misc_feature: Table A; Target 5889; HLA-A*01:01; ADAM7; ENSG00000069206; CTA
CSQNQYHQY

SEQ ID NO: 5890 - protein, 9 aa, Homo sapiens
  misc_feature: Table A; Target 5890; HLA-A*29:02; ADAM7; ENSG00000069206; CTA
CSQNQYHQY

SEQ ID NO: 5891 - protein, 9 aa, Homo sapiens
  misc_feature: Table A; Target 5891; HLA-A*30:02; ADAM7; ENSG00000069206; CTA
CSQNQYHQY

SEQ ID NO: 5892 - protein, 9 aa, Homo sapiens
  misc_feature: Table A; Target 5892; HLA-A*32:01; ADAM7; ENSG00000069206; CTA
CSQNQYHQY

SEQ ID NO: 5893 - protein, 9 aa, Homo sapiens
  misc_feature: Table A; Target 5893; HLA-A*33:01; ADAM7; ENSG00000069206; CTA
CSQNQYHQY

SEQ ID NO: 5894 - protein, 9 aa, Homo sapiens
  misc_feature: Table A; Target 5894; HLA-B*15:01; ADAM7; ENSG00000069206; CTA
CSQNQYHQY

SEQ ID NO: 5895 - protein, 9 aa, Homo sapiens
  misc_feature: Table A; Target 5895; HLA-B*39:01; ADAM7; ENSG00000069206; CTA
CSQNQYHQY

SEQ ID NO: 5896 - protein, 9 aa, Homo sapiens
  misc_feature: Table A; Target 5896; HLA-B*58:01; ADAM7; ENSG00000069206; CTA
CSQNQYHQY

SEQ ID NO: 5897 - protein, 9 aa, Homo sapiens
  misc_feature: Table A; Target 5897; HLA-C*01:02; ADAM7; ENSG00000069206; CTA
CSQNQYHQY

SEQ ID NO: 5898 - protein, 9 aa, Homo sapiens
  misc_feature: Table A; Target 5898; HLA-C*12:03; ADAM7; ENSG00000069206; CTA
CSQNQYHQY

SEQ ID NO: 5899 - protein, 9 aa, Homo sapiens
  misc_feature: Table A; Target 5899; HLA-C*16:01; ADAM7; ENSG00000069206; CTA
CSQNQYHQY

SEQ ID NO: 5900 - protein, 9 aa, Homo sapiens
  misc_feature: Table A; Target 5900; HLA-C*16:02; ADAM7; ENSG00000069206; CTA
CSQNQYHQY

SEQ ID NO: 5901 - protein, 9 aa, Homo sapiens
  misc_feature: Table A; Target 5901; HLA-C*16:04; ADAM7; ENSG00000069206; CTA
CSQNQYHQY

SEQ ID NO: 5902 - protein, 10 aa, Homo sapiens
  misc_feature: Table A; Target 5902; HLA-C*06:02; ADAM7; ENSG00000069206; CTA
CSQNQYHQYL

SEQ ID NO: 5903 - protein, 9 aa, Homo sapiens
  misc_feature: Table A; Target 5903; HLA-A*01:01; ADAM7; ENSG00000069206; CTA
CTELNFTRK

SEQ ID NO: 5904 - protein, 9 aa, Homo sapiens
  misc_feature: Table A; Target 5904; HLA-A*03:02; ADAM7; ENSG00000069206; CTA
CTELNFTRK

SEQ ID NO: 5905 - protein, 9 aa, Homo sapiens
  misc_feature: Table A; Target 5905; HLA-A*11:01; ADAM7; ENSG00000069206; CTA
CTELNFTRK

SEQ ID NO: 5906 - protein, 8 aa, Homo sapiens
  misc_feature: Table A; Target 5906; HLA-A*33:01; ADAM7; ENSG00000069206; CTA
DAHTCVLK

SEQ ID NO: 5907 - protein, 8 aa, Homo sapiens
  misc_feature: Table A; Target 5907; HLA-B*18:01; ADAM7; ENSG00000069206; CTA
DDDILKTY

SEQ ID NO: 5908 - protein, 9 aa, Homo sapiens
  misc_feature: Table A; Target 5908; HLA-B*18:01; ADAM7; ENSG00000069206; CTA
DEAIESHDI

SEQ ID NO: 5909 - protein, 9 aa, Homo sapiens
  misc_feature: Table A; Target 5909; HLA-B*38:01; ADAM7; ENSG00000069206; CTA
DEAIESHDI

SEQ ID NO: 5910 - protein, 9 aa, Homo sapiens
  misc_feature: Table A; Target 5910; HLA-B*49:01; ADAM7; ENSG00000069206; CTA
DEAIESHDI

SEQ ID NO: 5911 - protein, 11 aa, Homo sapiens
  misc_feature: Table A; Target 5911; HLA-B*18:01; ADAM7; ENSG00000069206; CTA
DEAIESHDICY

SEQ ID NO: 5912 - protein, 11 aa, Homo sapiens
  misc_feature: Table A; Target 5912; HLA-B*44:03; ADAM7; ENSG00000069206; CTA
DEAIESHDICY

SEQ ID NO: 5913 - protein, 8 aa, Homo sapiens
  misc_feature: Table A; Target 5913; HLA-B*18:01; ADAM7; ENSG00000069206; CTA
DECDFPEM

SEQ ID NO: 5914 - protein, 8 aa, Homo sapiens
  misc_feature: Table A; Target 5914; HLA-B*18:01; ADAM7; ENSG00000069206; CTA
DEGEHLVF

SEQ ID NO: 5915 - protein, 8 aa, Homo sapiens
  misc_feature: Table A; Target 5915; HLA-B*37:01; ADAM7; ENSG00000069206; CTA
DEGEHLVF

SEQ ID NO: 5916 - protein, 8 aa, Homo sapiens
  misc_feature: Table A; Target 5916; HLA-B*44:02; ADAM7; ENSG00000069206; CTA
DEGEHLVF

SEQ ID NO: 5917 - protein, 8 aa, Homo sapiens
  misc_feature: Table A; Target 5917; HLA-B*44:03; ADAM7; ENSG00000069206; CTA
DEGEHLVF

SEQ ID NO: 5918 - protein, 10 aa, Homo sapiens
  misc_feature: Table A; Target 5918; HLA-B*18:01; ADAM7; ENSG00000069206; CTA
DEGEHLVFKY

SEQ ID NO: 5919 - protein, 10 aa, Homo sapiens
  misc_feature: Table A; Target 5919; HLA-B*44:02; ADAM7; ENSG00000069206; CTA
DEGEHLVFKY

SEQ ID NO: 5920 - protein, 10 aa, Homo sapiens
  misc_feature: Table A; Target 5920; HLA-B*44:03; ADAM7; ENSG00000069206; CTA
DEGEHLVFKY

SEQ ID NO: 5921 - protein, 8 aa, Homo sapiens
  misc_feature: Table A; Target 5921; HLA-B*18:01; ADAM7; ENSG00000069206; CTA
DEKYVELF

SEQ ID NO: 5922 - protein, 9 aa, Homo sapiens
  misc_feature: Table A; Target 5922; HLA-B*18:01; ADAM7; ENSG00000069206; CTA
DEQQIRTEP

SEQ ID NO: 5923 - protein, 10 aa, Homo sapiens
  misc_feature: Table A; Target 5923; HLA-B*18:01; ADAM7; ENSG00000069206; CTA
DEQQIRTEPI

SEQ ID NO: 5924 - protein, 8 aa, Homo sapiens
  misc_feature: Table A; Target 5924; HLA-B*35:01; ADAM7; ENSG00000069206; CTA
DFDHVVLL

SEQ ID NO: 5925 - protein, 8 aa, Homo sapiens
  misc_feature: Table A; Target 5925; HLA-B*35:03; ADAM7; ENSG00000069206; CTA
DFDHVVLL

SEQ ID NO: 5926 - protein, 8 aa, Homo sapiens
  misc_feature: Table A; Target 5926; HLA-C*04:01; ADAM7; ENSG00000069206; CTA
DFDHVVLL

SEQ ID NO: 5927 - protein, 9 aa, Homo sapiens
  misc_feature: Table A; Target 5927; HLA-A*25:01; ADAM7; ENSG00000069206; CTA
DGSIPALKF

SEQ ID NO: 5928 - protein, 9 aa, Homo sapiens
  misc_feature: Table A; Target 5928; HLA-A*33:01; ADAM7; ENSG00000069206; CTA
DGSIPALKF

SEQ ID NO: 5929 - protein, 9 aa, Homo sapiens
  misc_feature: Table A; Target 5929; HLA-A*68:01; ADAM7; ENSG00000069206; CTA
DGSIPALKF

SEQ ID NO: 5930 - protein, 9 aa, Homo sapiens
  misc_feature: Table A; Target 5930; HLA-B*18:01; ADAM7; ENSG00000069206; CTA
DGSIPALKF

SEQ ID NO: 5931 - protein, 9 aa, Homo sapiens
  misc_feature: Table A; Target 5931; HLA-B*35:01; ADAM7; ENSG00000069206; CTA
DGSIPALKF

SEQ ID NO: 5932 - protein, 9 aa, Homo sapiens
  misc_feature: Table A; Target 5932; HLA-B*38:01; ADAM7; ENSG00000069206; CTA
DGSIPALKF

SEQ ID NO: 5933 - protein, 9 aa, Homo sapiens
  misc_feature: Table A; Target 5933; HLA-B*44:02; ADAM7; ENSG00000069206; CTA
DGSIPALKF

SEQ ID NO: 5934 - protein, 9 aa, Homo sapiens
  misc_feature: Table A; Target 5934; HLA-B*44:03; ADAM7; ENSG00000069206; CTA
DGSIPALKF

SEQ ID NO: 5935 - protein, 9 aa, Homo sapiens
  misc_feature: Table A; Target 5935; HLA-B*51:01; ADAM7; ENSG00000069206; CTA
DGSIPALKF

SEQ ID NO: 5936 - protein, 9 aa, Homo sapiens
  misc_feature: Table A; Target 5936; HLA-C*04:01; ADAM7; ENSG00000069206; CTA
DGSIPALKF

SEQ ID NO: 5937 - protein, 9 aa, Homo sapiens
  misc_feature: Table A; Target 5937; HLA-C*06:02; ADAM7; ENSG00000069206; CTA
DGSIPALKF

SEQ ID NO: 5938 - protein, 9 aa, Homo sapiens
  misc_feature: Table A; Target 5938; HLA-C*07:01; ADAM7; ENSG00000069206; CTA
DGSIPALKF

SEQ ID NO: 5939 - protein, 9 aa, Homo sapiens
  misc_feature: Table A; Target 5939; HLA-C*07:02; ADAM7; ENSG00000069206; CTA
DGSIPALKF

SEQ ID NO: 5940 - protein, 9 aa, Homo sapiens
  misc_feature: Table A; Target 5940; HLA-C*12:03; ADAM7; ENSG00000069206; CTA
DGSIPALKF

SEQ ID NO: 5941 - protein, 9 aa, Homo sapiens
  misc_feature: Table A; Target 5941; HLA-B*38:01; ADAM7; ENSG00000069206; CTA
DLLPDTNII

SEQ ID NO: 5942 - protein, 11 aa, Homo sapiens
  misc_feature: Table A; Target 5942; HLA-A*33:01; ADAM7; ENSG00000069206; CTA
DLLPDTNIIAN

SEQ ID NO: 5943 - protein, 8 aa, Homo sapiens
  misc_feature: Table A; Target 5943; HLA-B*08:01; ADAM7; ENSG00000069206; CTA
DPQKNATV

SEQ ID NO: 5944 - protein, 8 aa, Homo sapiens
  misc_feature: Table A; Target 5944; HLA-B*51:01; ADAM7; ENSG00000069206; CTA
DPQKNATV

SEQ ID NO: 5945 - protein, 8 aa, Homo sapiens
  misc_feature: Table A; Target 5945; HLA-B*18:01; ADAM7; ENSG00000069206; CTA
DQFRVNGF

SEQ ID NO: 5946 - protein, 9 aa, Homo sapiens
  misc_feature: Table A; Target 5946; HLA-B*51:01; ADAM7; ENSG00000069206; CTA
DSAASISTC

SEQ ID NO: 5947 - protein, 9 aa, Homo sapiens
  misc_feature: Table A; Target 5947; HLA-C*12:03; ADAM7; ENSG00000069206; CTA
DSAASISTC

SEQ ID NO: 5948 - protein, 9 aa, Homo sapiens
  misc_feature: Table A; Target 5948; HLA-A*01:01; ADAM7; ENSG00000069206; CTA
DSDGSIPAL

SEQ ID NO: 5949 - protein, 9 aa, Homo sapiens
  misc_feature: Table A; Target 5949; HLA-A*25:01; ADAM7; ENSG00000069206; CTA
DSDGSIPAL

SEQ ID NO: 5950 - protein, 9 aa, Homo sapiens
  misc_feature: Table A; Target 5950; HLA-B*35:03; ADAM7; ENSG00000069206; CTA
DSDGSIPAL

SEQ ID NO: 5951 - protein, 9 aa, Homo sapiens
  misc_feature: Table A; Target 5951; HLA-B*38:01; ADAM7; ENSG00000069206; CTA
DSDGSIPAL

SEQ ID NO: 5952 - protein, 9 aa, Homo sapiens
  misc_feature: Table A; Target 5952; HLA-B*39:01; ADAM7; ENSG00000069206; CTA
DSDGSIPAL

SEQ ID NO: 5953 - protein, 9 aa, Homo sapiens
  misc_feature: Table A; Target 5953; HLA-C*03:03; ADAM7; ENSG00000069206; CTA
DSDGSIPAL

SEQ ID NO: 5954 - protein, 9 aa, Homo sapiens
  misc_feature: Table A; Target 5954; HLA-C*03:04; ADAM7; ENSG00000069206; CTA
DSDGSIPAL

SEQ ID NO: 5955 - protein, 9 aa, Homo sapiens
  misc_feature: Table A; Target 5955; HLA-C*05:01; ADAM7; ENSG00000069206; CTA
DSDGSIPAL

SEQ ID NO: 5956 - protein, 10 aa, Homo sapiens
  misc_feature: Table A; Target 5956; HLA-A*01:01; ADAM7; ENSG00000069206; CTA
DSDGSIPALK

SEQ ID NO: 5957 - protein, 10 aa, Homo sapiens
  misc_feature: Table A; Target 5957; HLA-A*68:01; ADAM7; ENSG00000069206; CTA
DSDGSIPALK

SEQ ID NO: 5958 - protein, 10 aa, Homo sapiens
  misc_feature: Table A; Target 5958; HLA-B*27:02; ADAM7; ENSG00000069206; CTA
DSDGSIPALK

SEQ ID NO: 5959 - protein, 11 aa, Homo sapiens
  misc_feature: Table A; Target 5959; HLA-A*01:01; ADAM7; ENSG00000069206; CTA
DSDGSIPALKF

SEQ ID NO: 5960 - protein, 11 aa, Homo sapiens
  misc_feature: Table A; Target 5960; HLA-A*33:01; ADAM7; ENSG00000069206; CTA
DSDGSIPALKF

SEQ ID NO: 5961 - protein, 11 aa, Homo sapiens
  misc_feature: Table A; Target 5961; HLA-A*33:01; ADAM7; ENSG00000069206; CTA
DSKIKGIHDEK

SEQ ID NO: 5962 - protein, 9 aa, Homo sapiens
  misc_feature: Table A; Target 5962; HLA-A*01:01; ADAM7; ENSG00000069206; CTA
DSTDIGLVA

SEQ ID NO: 5963 - protein, 9 aa, Homo sapiens
  misc_feature: Table A; Target 5963; HLA-A*26:01; ADAM7; ENSG00000069206; CTA
DSTDIGLVA

SEQ ID NO: 5964 - protein, 9 aa, Homo sapiens
  misc_feature: Table A; Target 5964; HLA-A*33:01; ADAM7; ENSG00000069206; CTA
DSTDIGLVA

SEQ ID NO: 5965 - protein, 9 aa, Homo sapiens
  misc_feature: Table A; Target 5965; HLA-A*68:01; ADAM7; ENSG00000069206; CTA
DSTDIGLVA

SEQ ID NO: 5966 - protein, 9 aa, Homo sapiens
  misc_feature: Table A; Target 5966; HLA-A*68:02; ADAM7; ENSG00000069206; CTA
DSTDIGLVA

SEQ ID NO: 5967 - protein, 9 aa, Homo sapiens
  misc_feature: Table A; Target 5967; HLA-B*39:01; ADAM7; ENSG00000069206; CTA
DSTDIGLVA

SEQ ID NO: 5968 - protein, 9 aa, Homo sapiens
  misc_feature: Table A; Target 5968; HLA-B*54:01; ADAM7; ENSG00000069206; CTA
DSTDIGLVA

SEQ ID NO: 5969 - protein, 9 aa, Homo sapiens
  misc_feature: Table A; Target 5969; HLA-C*07:06; ADAM7; ENSG00000069206; CTA
DSTDIGLVA

SEQ ID NO: 5970 - protein, 9 aa, Homo sapiens
  misc_feature: Table A; Target 5970; HLA-C*12:03; ADAM7; ENSG00000069206; CTA
DSTDIGLVA

SEQ ID NO: 5971 - protein, 8 aa, Homo sapiens
  misc_feature: Table A; Target 5971; HLA-A*33:01; ADAM7; ENSG00000069206; CTA
DTNIIANR

SEQ ID NO: 5972 - protein, 8 aa, Homo sapiens
  misc_feature: Table A; Target 5972; HLA-A*33:03; ADAM7; ENSG00000069206; CTA
DTNIIANR

SEQ ID NO: 5973 - protein, 8 aa, Homo sapiens
  misc_feature: Table A; Target 5973; HLA-A*68:01; ADAM7; ENSG00000069206; CTA
DTNIIANR

SEQ ID NO: 5974 - protein, 8 aa, Homo sapiens
  misc_feature: Table A; Target 5974; HLA-C*07:06; ADAM7; ENSG00000069206; CTA
DTNIIANR

SEQ ID NO: 5975 - protein, 9 aa, Homo sapiens
  misc_feature: Table A; Target 5975; HLA-A*26:01; ADAM7; ENSG00000069206; CTA
DTNIIANRM

SEQ ID NO: 5976 - protein, 9 aa, Homo sapiens
  misc_feature: Table A; Target 5976; HLA-A*33:01; ADAM7; ENSG00000069206; CTA
DTNIIANRM

SEQ ID NO: 5977 - protein, 9 aa, Homo sapiens
  misc_feature: Table A; Target 5977; HLA-A*33:03; ADAM7; ENSG00000069206; CTA
DTNIIANRM

SEQ ID NO: 5978 - protein, 9 aa, Homo sapiens
  misc_feature: Table A; Target 5978; HLA-A*68:01; ADAM7; ENSG00000069206; CTA
DTNIIANRM

SEQ ID NO: 5979 - protein, 9 aa, Homo sapiens
  misc_feature: Table A; Target 5979; HLA-C*07:06; ADAM7; ENSG00000069206; CTA
DTNIIANRM

SEQ ID NO: 5980 - protein, 9 aa, Homo sapiens
  misc_feature: Table A; Target 5980; HLA-A*68:02; ADAM7; ENSG00000069206; CTA
EAFTRHPQI

SEQ ID NO: 5981 - protein, 9 aa, Homo sapiens
  misc_feature: Table A; Target 5981; HLA-B*51:01; ADAM7; ENSG00000069206; CTA
EAFTRHPQI

SEQ ID NO: 5982 - protein, 8 aa, Homo sapiens
  misc_feature: Table A; Target 5982; HLA-B*51:01; ADAM7; ENSG00000069206; CTA
EAIESHDI

SEQ ID NO: 5983 - protein, 9 aa, Homo sapiens
  misc_feature: Table A; Target 5983; HLA-B*35:03; ADAM7; ENSG00000069206; CTA
EAIESHDIC

SEQ ID NO: 5984 - protein, 9 aa, Homo sapiens
  misc_feature: Table A; Target 5984; HLA-C*12:03; ADAM7; ENSG00000069206; CTA
EAIESHDIC

SEQ ID NO: 5985 - protein, 10 aa, Homo sapiens
  misc_feature: Table A; Target 5985; HLA-A*01:01; ADAM7; ENSG00000069206; CTA
EAIESHDICY

SEQ ID NO: 5986 - protein, 10 aa, Homo sapiens
  misc_feature: Table A; Target 5986; HLA-A*25:01; ADAM7; ENSG00000069206; CTA
EAIESHDICY

SEQ ID NO: 5987 - protein, 10 aa, Homo sapiens
  misc_feature: Table A; Target 5987; HLA-A*26:01; ADAM7; ENSG00000069206; CTA
EAIESHDICY

SEQ ID NO: 5988 - protein, 10 aa, Homo sapiens
  misc_feature: Table A; Target 5988; HLA-A*29:02; ADAM7; ENSG00000069206; CTA
EAIESHDICY

SEQ ID NO: 5989 - protein, 10 aa, Homo sapiens
  misc_feature: Table A; Target 5989; HLA-A*33:01; ADAM7; ENSG00000069206; CTA
EAIESHDICY

SEQ ID NO: 5990 - protein, 10 aa, Homo sapiens
  misc_feature: Table A; Target 5990; HLA-A*33:03; ADAM7; ENSG00000069206; CTA
EAIESHDICY

SEQ ID NO: 5991 - protein, 10 aa, Homo sapiens
  misc_feature: Table A; Target 5991; HLA-A*68:01; ADAM7; ENSG00000069206; CTA
EAIESHDICY

SEQ ID NO: 5992 - protein, 10 aa, Homo sapiens
  misc_feature: Table A; Target 5992; HLA-B*15:01; ADAM7; ENSG00000069206; CTA
EAIESHDICY

SEQ ID NO: 5993 - protein, 10 aa, Homo sapiens
  misc_feature: Table A; Target 5993; HLA-B*18:01; ADAM7; ENSG00000069206; CTA
EAIESHDICY

SEQ ID NO: 5994 - protein, 10 aa, Homo sapiens
  misc_feature: Table A; Target 5994; HLA-B*27:02; ADAM7; ENSG00000069206; CTA
EAIESHDICY

SEQ ID NO: 5995 - protein, 10 aa, Homo sapiens
  misc_feature: Table A; Target 5995; HLA-B*35:01; ADAM7; ENSG00000069206; CTA
EAIESHDICY

SEQ ID NO: 5996 - protein, 10 aa, Homo sapiens
  misc_feature: Table A; Target 5996; HLA-B*35:03; ADAM7; ENSG00000069206; CTA
EAIESHDICY

SEQ ID NO: 5997 - protein, 10 aa, Homo sapiens
  misc_feature: Table A; Target 5997; HLA-B*44:03; ADAM7; ENSG00000069206; CTA
EAIESHDICY

SEQ ID NO: 5998 - protein, 10 aa, Homo sapiens
  misc_feature: Table A; Target 5998; HLA-B*46:01; ADAM7; ENSG00000069206; CTA
EAIESHDICY

SEQ ID NO: 5999 - protein, 10 aa, Homo sapiens
  misc_feature: Table A; Target 5999; HLA-B*55:01; ADAM7; ENSG00000069206; CTA
EAIESHDICY

SEQ ID NO: 6000 - protein, 10 aa, Homo sapiens
  misc_feature: Table A; Target 6000; HLA-B*58:01; ADAM7; ENSG00000069206; CTA
EAIESHDICY

SEQ ID NO: 6001 - protein, 10 aa, Homo sapiens
  misc_feature: Table A; Target 6001; HLA-C*02:02; ADAM7; ENSG00000069206; CTA
EAIESHDICY

SEQ ID NO: 6002 - protein, 10 aa, Homo sapiens
  misc_feature: Table A; Target 6002; HLA-C*03:03; ADAM7; ENSG00000069206; CTA
EAIESHDICY

SEQ ID NO: 6003 - protein, 10 aa, Homo sapiens
  misc_feature: Table A; Target 6003; HLA-C*07:06; ADAM7; ENSG00000069206; CTA
EAIESHDICY

SEQ ID NO: 6004 - protein, 10 aa, Homo sapiens
  misc_feature: Table A; Target 6004; HLA-C*12:03; ADAM7; ENSG00000069206; CTA
EAIESHDICY

SEQ ID NO: 6005 - protein, 10 aa, Homo sapiens
  misc_feature: Table A; Target 6005; HLA-C*16:04; ADAM7; ENSG00000069206; CTA
EAIESHDICY

SEQ ID NO: 6006 - protein, 11 aa, Homo sapiens
  misc_feature: Table A; Target 6006; HLA-A*33:01; ADAM7; ENSG00000069206; CTA
EAIESHDICYK

SEQ ID NO: 6007 - protein, 11 aa, Homo sapiens
  misc_feature: Table A; Target 6007; HLA-A*33:03; ADAM7; ENSG00000069206; CTA
EAIESHDICYK

SEQ ID NO: 6008 - protein, 11 aa, Homo sapiens
  misc_feature: Table A; Target 6008; HLA-A*68:01; ADAM7; ENSG00000069206; CTA
EAIESHDICYK

SEQ ID NO: 6009 - protein, 8 aa, Homo sapiens
  misc_feature: Table A; Target 6009; HLA-B*37:01; ADAM7; ENSG00000069206; CTA
EDSKIKGI

SEQ ID NO: 6010 - protein, 9 aa, Homo sapiens
  misc_feature: Table A; Target 6010; HLA-B*44:02; ADAM7; ENSG00000069206; CTA
EEDSKIKGI

SEQ ID NO: 6011 - protein, 9 aa, Homo sapiens
  misc_feature: Table A; Target 6011; HLA-B*44:03; ADAM7; ENSG00000069206; CTA
EEDSKIKGI

SEQ ID NO: 6012 - protein, 9 aa, Homo sapiens
  misc_feature: Table A; Target 6012; HLA-B*49:01; ADAM7; ENSG00000069206; CTA
EEDSKIKGI

SEQ ID NO: 6013 - protein, 8 aa, Homo sapiens
  misc_feature: Table A; Target 6013; HLA-B*18:01; ADAM7; ENSG00000069206; CTA
EEELLYEI

SEQ ID NO: 6014 - protein, 8 aa, Homo sapiens
  misc_feature: Table A; Target 6014; HLA-B*49:01; ADAM7; ENSG00000069206; CTA
EEELLYEI

SEQ ID NO: 6015 - protein, 10 aa, Homo sapiens
  misc_feature: Table A; Target 6015; HLA-B*40:01; ADAM7; ENSG00000069206; CTA
EEELLYEIKL

SEQ ID NO: 6016 - protein, 10 aa, Homo sapiens
  misc_feature: Table A; Target 6016; HLA-B*44:02; ADAM7; ENSG00000069206; CTA
EEELLYEIKL

SEQ ID NO: 6017 - protein, 10 aa, Homo sapiens
  misc_feature: Table A; Target 6017; HLA-B*44:03; ADAM7; ENSG00000069206; CTA
EEELLYEIKL

SEQ ID NO: 6018 - protein, 8 aa, Homo sapiens
  misc_feature: Table A; Target 6018; HLA-B*18:01; ADAM7; ENSG00000069206; CTA
EEGQAPVA

SEQ ID NO: 6019 - protein, 9 aa, Homo sapiens
  misc_feature: Table A; Target 6019; HLA-A*30:01; ADAM7; ENSG00000069206; CTA
EEGQAPVAC

SEQ ID NO: 6020 - protein, 9 aa, Homo sapiens
  misc_feature: Table A; Target 6020; HLA-B*18:01; ADAM7; ENSG00000069206; CTA
EEGQAPVAC

SEQ ID NO: 6021 - protein, 9 aa, Homo sapiens
  misc_feature: Table A; Target 6021; HLA-B*44:03; ADAM7; ENSG00000069206; CTA
EEGQAPVAC

SEQ ID NO: 6022 - protein, 9 aa, Homo sapiens
  misc_feature: Table A; Target 6022; HLA-A*30:01; ADAM7; ENSG00000069206; CTA
EELLYEIKL

SEQ ID NO: 6023 - protein, 9 aa, Homo sapiens
  misc_feature: Table A; Target 6023; HLA-B*18:01; ADAM7; ENSG00000069206; CTA
EELLYEIKL

SEQ ID NO: 6024 - protein, 9 aa, Homo sapiens
  misc_feature: Table A; Target 6024; HLA-B*40:01; ADAM7; ENSG00000069206; CTA
EELLYEIKL

SEQ ID NO: 6025 - protein, 9 aa, Homo sapiens
  misc_feature: Table A; Target 6025; HLA-B*40:02; ADAM7; ENSG00000069206; CTA
EELLYEIKL

SEQ ID NO: 6026 - protein, 9 aa, Homo sapiens
  misc_feature: Table A; Target 6026; HLA-B*44:02; ADAM7; ENSG00000069206; CTA
EELLYEIKL

SEQ ID NO: 6027 - protein, 9 aa, Homo sapiens
  misc_feature: Table A; Target 6027; HLA-B*44:03; ADAM7; ENSG00000069206; CTA
EELLYEIKL

SEQ ID NO: 6028 - protein, 9 aa, Homo sapiens
  misc_feature: Table A; Target 6028; HLA-A*30:01; ADAM7; ENSG00000069206; CTA
EETLHVTNI

SEQ ID NO: 6029 - protein, 9 aa, Homo sapiens
  misc_feature: Table A; Target 6029; HLA-A*68:02; ADAM7; ENSG00000069206; CTA
EETLHVTNI

SEQ ID NO: 6030 - protein, 9 aa, Homo sapiens
  misc_feature: Table A; Target 6030; HLA-B*18:01; ADAM7; ENSG00000069206; CTA
EETLHVTNI

SEQ ID NO: 6031 - protein, 9 aa, Homo sapiens
  misc_feature: Table A; Target 6031; HLA-B*37:01; ADAM7; ENSG00000069206; CTA
EETLHVTNI

SEQ ID NO: 6032 - protein, 9 aa, Homo sapiens
  misc_feature: Table A; Target 6032; HLA-B*38:01; ADAM7; ENSG00000069206; CTA
EETLHVTNI

SEQ ID NO: 6033 - protein, 9 aa, Homo sapiens
  misc_feature: Table A; Target 6033; HLA-B*40:01; ADAM7; ENSG00000069206; CTA
EETLHVTNI

SEQ ID NO: 6034 - protein, 9 aa, Homo sapiens
  misc_feature: Table A; Target 6034; HLA-B*40:02; ADAM7; ENSG00000069206; CTA
EETLHVTNI

SEQ ID NO: 6035 - protein, 9 aa, Homo sapiens
  misc_feature: Table A; Target 6035; HLA-B*44:02; ADAM7; ENSG00000069206; CTA
EETLHVTNI

SEQ ID NO: 6036 - protein, 9 aa, Homo sapiens
  misc_feature: Table A; Target 6036; HLA-B*44:03; ADAM7; ENSG00000069206; CTA
EETLHVTNI

SEQ ID NO: 6037 - protein, 9 aa, Homo sapiens
  misc_feature: Table A; Target 6037; HLA-B*49:01; ADAM7; ENSG00000069206; CTA
EETLHVTNI

SEQ ID NO: 6038 - protein, 9 aa, Homo sapiens
  misc_feature: Table A; Target 6038; HLA-C*16:04; ADAM7; ENSG00000069206; CTA
EETLHVTNI

SEQ ID NO: 6039 - protein, 11 aa, Homo sapiens
  misc_feature: Table A; Target 6039; HLA-B*44:02; ADAM7; ENSG00000069206; CTA
EETLHVTNITI

SEQ ID NO: 6040 - protein, 11 aa, Homo sapiens
  misc_feature: Table A; Target 6040; HLA-A*23:01; ADAM7; ENSG00000069206; CTA
EFLGSNYSETF

SEQ ID NO: 6041 - protein, 11 aa, Homo sapiens
  misc_feature: Table A; Target 6041; HLA-A*24:02; ADAM7; ENSG00000069206; CTA
EFLGSNYSETF

SEQ ID NO: 6042 - protein, 9 aa, Homo sapiens
  misc_feature: Table A; Target 6042; HLA-A*01:01; ADAM7; ENSG00000069206; CTA
EGEHLVFKY

SEQ ID NO: 6043 - protein, 9 aa, Homo sapiens
  misc_feature: Table A; Target 6043; HLA-A*29:02; ADAM7; ENSG00000069206; CTA
EGEHLVFKY

SEQ ID NO: 6044 - protein, 9 aa, Homo sapiens
  misc_feature: Table A; Target 6044; HLA-A*33:01; ADAM7; ENSG00000069206; CTA
EGEHLVFKY

SEQ ID NO: 6045 - protein, 9 aa, Homo sapiens
  misc_feature: Table A; Target 6045; HLA-A*33:01; ADAM7; ENSG00000069206; CTA
EGQQLVRPK

SEQ ID NO: 6046 - protein, 9 aa, Homo sapiens
  misc_feature: Table A; Target 6046; HLA-A*33:03; ADAM7; ENSG00000069206; CTA
EGQQLVRPK

SEQ ID NO: 6047 - protein, 9 aa, Homo sapiens
  misc_feature: Table A; Target 6047; HLA-C*06:02; ADAM7; ENSG00000069206; CTA
EGQQLVRPK

SEQ ID NO: 6048 - protein, 9 aa, Homo sapiens
  misc_feature: Table A; Target 6048; HLA-C*07:02; ADAM7; ENSG00000069206; CTA
EGQQLVRPK

SEQ ID NO: 6049 - protein, 9 aa, Homo sapiens
  misc_feature: Table A; Target 6049; HLA-C*07:06; ADAM7; ENSG00000069206; CTA
EGQQLVRPK

SEQ ID NO: 6050 - protein, 9 aa, Homo sapiens
  misc_feature: Table A; Target 6050; HLA-B*08:01; ADAM7; ENSG00000069206; CTA
EIKLNRKTL

SEQ ID NO: 6051 - protein, 11 aa, Homo sapiens
  misc_feature: Table A; Target 6051; HLA-A*26:01; ADAM7; ENSG00000069206; CTA
ELFDDEAIESH

SEQ ID NO: 6052 - protein, 11 aa, Homo sapiens
  misc_feature: Table A; Target 6052; HLA-A*01:01; ADAM7; ENSG00000069206; CTA
ELFIVADDTVY

SEQ ID NO: 6053 - protein, 11 aa, Homo sapiens
  misc_feature: Table A; Target 6053; HLA-A*26:01; ADAM7; ENSG00000069206; CTA
ELFIVADDTVY

SEQ ID NO: 6054 - protein, 11 aa, Homo sapiens
  misc_feature: Table A; Target 6054; HLA-C*07:01; ADAM7; ENSG00000069206; CTA
ELFIVADDTVY

SEQ ID NO: 6055 - protein, 10 aa, Homo sapiens
  misc_feature: Table A; Target 6055; HLA-A*33:01; ADAM7; ENSG00000069206; CTA
ELLYEIKLNR

SEQ ID NO: 6056 - protein, 10 aa, Homo sapiens
  misc_feature: Table A; Target 6056; HLA-A*33:03; ADAM7; ENSG00000069206; CTA
ELLYEIKLNR

SEQ ID NO: 6057 - protein, 10 aa, Homo sapiens
  misc_feature: Table A; Target 6057; HLA-B*27:02; ADAM7; ENSG00000069206; CTA
ELSSLLGEDK

SEQ ID NO: 6058 - protein, 10 aa, Homo sapiens
  misc_feature: Table A; Target 6058; HLA-A*02:03; ADAM7; ENSG00000069206; CTA
ELYSNIETTL

SEQ ID NO: 6059 - protein, 10 aa, Homo sapiens
  misc_feature: Table A; Target 6059; HLA-A*23:01; ADAM7; ENSG00000069206; CTA
ELYSNIETTL

SEQ ID NO: 6060 - protein, 10 aa, Homo sapiens
  misc_feature: Table A; Target 6060; HLA-A*25:01; ADAM7; ENSG00000069206; CTA
ELYSNIETTL

SEQ ID NO: 6061 - protein, 10 aa, Homo sapiens
  misc_feature: Table A; Target 6061; HLA-A*26:01; ADAM7; ENSG00000069206; CTA
ELYSNIETTL

SEQ ID NO: 6062 - protein, 10 aa, Homo sapiens
  misc_feature: Table A; Target 6062; HLA-A*68:02; ADAM7; ENSG00000069206; CTA
ELYSNIETTL

SEQ ID NO: 6063 - protein, 11 aa, Homo sapiens
  misc_feature: Table A; Target 6063; HLA-A*02:03; ADAM7; ENSG00000069206; CTA
ELYSNIETTLL

SEQ ID NO: 6064 - protein, 9 aa, Homo sapiens
  misc_feature: Table A; Target 6064; HLA-B*35:01; ADAM7; ENSG00000069206; CTA
EPILPEIHF

SEQ ID NO: 6065 - protein, 9 aa, Homo sapiens
  misc_feature: Table A; Target 6065; HLA-B*35:03; ADAM7; ENSG00000069206; CTA
EPILPEIHF

SEQ ID NO: 6066 - protein, 9 aa, Homo sapiens
  misc_feature: Table A; Target 6066; HLA-B*51:01; ADAM7; ENSG00000069206; CTA
EPILPEIHF

SEQ ID NO: 6067 - protein, 9 aa, Homo sapiens
  misc_feature: Table A; Target 6067; HLA-B*55:01; ADAM7; ENSG00000069206; CTA
EPILPEIHF

SEQ ID NO: 6068 - protein, 9 aa, Homo sapiens
  misc_feature: Table A; Target 6068; HLA-A*26:01; ADAM7; ENSG00000069206; CTA
ESHDICYKM

SEQ ID NO: 6069 - protein, 8 aa, Homo sapiens
  misc_feature: Table A; Target 6069; HLA-C*07:01; ADAM7; ENSG00000069206; CTA
ETFYSMKG

SEQ ID NO: 6070 - protein, 10 aa, Homo sapiens
  misc_feature: Table A; Target 6070; HLA-A*68:02; ADAM7; ENSG00000069206; CTA
ETFYSMKGEA

SEQ ID NO: 6071 - protein, 11 aa, Homo sapiens
  misc_feature: Table A; Target 6071; HLA-A*25:01; ADAM7; ENSG00000069206; CTA
ETFYSMKGEAF

SEQ ID NO: 6072 - protein, 11 aa, Homo sapiens
  misc_feature: Table A; Target 6072; HLA-A*26:01; ADAM7; ENSG00000069206; CTA
ETFYSMKGEAF

SEQ ID NO: 6073 - protein, 10 aa, Homo sapiens
  misc_feature: Table A; Target 6073; HLA-A*25:01; ADAM7; ENSG00000069206; CTA
ETLGVENKGY

SEQ ID NO: 6074 - protein, 10 aa, Homo sapiens
  misc_feature: Table A; Target 6074; HLA-A*26:01; ADAM7; ENSG00000069206; CTA
ETLGVENKGY

SEQ ID NO: 6075 - protein, 10 aa, Homo sapiens
  misc_feature: Table A; Target 6075; HLA-B*44:02; ADAM7; ENSG00000069206; CTA
ETLGVENKGY

SEQ ID NO: 6076 - protein, 10 aa, Homo sapiens
  misc_feature: Table A; Target 6076; HLA-B*44:03; ADAM7; ENSG00000069206; CTA
ETLGVENKGY

SEQ ID NO: 6077 - protein, 11 aa, Homo sapiens
  misc_feature: Table A; Target 6077; HLA-A*26:01; ADAM7; ENSG00000069206; CTA
ETLGVENKGYF

SEQ ID NO: 6078 - protein, 11 aa, Homo sapiens
  misc_feature: Table A; Target 6078; HLA-A*33:01; ADAM7; ENSG00000069206; CTA
ETLGVENKGYF

SEQ ID NO: 6079 - protein, 10 aa, Homo sapiens
  misc_feature: Table A; Target 6079; HLA-A*68:02; ADAM7; ENSG00000069206; CTA
ETLHVTNITI

SEQ ID NO: 6080 - protein, 9 aa, Homo sapiens
  misc_feature: Table A; Target 6080; HLA-A*25:01; ADAM7; ENSG00000069206; CTA
ETTLLRFSF

SEQ ID NO: 6081 - protein, 9 aa, Homo sapiens
  misc_feature: Table A; Target 6081; HLA-B*57:01; ADAM7; ENSG00000069206; CTA
ETTLLRFSF

SEQ ID NO: 6082 - protein, 8 aa, Homo sapiens
  misc_feature: Table A; Target 6082; HLA-C*04:01; ADAM7; ENSG00000069206; CTA
EYDSAASI

SEQ ID NO: 6083 - protein, 9 aa, Homo sapiens
  misc_feature: Table A; Target 6083; HLA-A*29:02; ADAM7; ENSG00000069206; CTA
FFRINDQRY

SEQ ID NO: 6084 - protein, 10 aa, Homo sapiens
  misc_feature: Table A; Target 6084; HLA-A*02:01; ADAM7; ENSG00000069206; CTA
FILGVEGQQL

SEQ ID NO: 6085 - protein, 10 aa, Homo sapiens
  misc_feature: Table A; Target 6085; HLA-A*02:03; ADAM7; ENSG00000069206; CTA
FILGVEGQQL

SEQ ID NO: 6086 - protein, 10 aa, Homo sapiens
  misc_feature: Table A; Target 6086; HLA-A*02:04; ADAM7; ENSG00000069206; CTA
FILGVEGQQL

SEQ ID NO: 6087 - protein, 10 aa, Homo sapiens
  misc_feature: Table A; Target 6087; HLA-A*02:07; ADAM7; ENSG00000069206; CTA
FILGVEGQQL

SEQ ID NO: 6088 - protein, 10 aa, Homo sapiens
  misc_feature: Table A; Target 6088; HLA-A*23:01; ADAM7; ENSG00000069206; CTA
FILGVEGQQL

SEQ ID NO: 6089 - protein, 10 aa, Homo sapiens
  misc_feature: Table A; Target 6089; HLA-A*30:01; ADAM7; ENSG00000069206; CTA
FILGVEGQQL

SEQ ID NO: 6090 - protein, 10 aa, Homo sapiens
  misc_feature: Table A; Target 6090; HLA-A*68:02; ADAM7; ENSG00000069206; CTA
FILGVEGQQL

SEQ ID NO: 6091 - protein, 10 aa, Homo sapiens
  misc_feature: Table A; Target 6091; HLA-B*27:05; ADAM7; ENSG00000069206; CTA
FILGVEGQQL

SEQ ID NO: 6092 - protein, 10 aa, Homo sapiens
  misc_feature: Table A; Target 6092; HLA-B*35:03; ADAM7; ENSG00000069206; CTA
FILGVEGQQL

SEQ ID NO: 6093 - protein, 10 aa, Homo sapiens
  misc_feature: Table A; Target 6093; HLA-B*38:01; ADAM7; ENSG00000069206; CTA
FILGVEGQQL

SEQ ID NO: 6094 - protein, 10 aa, Homo sapiens
  misc_feature: Table A; Target 6094; HLA-B*40:01; ADAM7; ENSG00000069206; CTA
FILGVEGQQL

SEQ ID NO: 6095 - protein, 10 aa, Homo sapiens
  misc_feature: Table A; Target 6095; HLA-B*40:02; ADAM7; ENSG00000069206; CTA
FILGVEGQQL

SEQ ID NO: 6096 - protein, 10 aa, Homo sapiens
  misc_feature: Table A; Target 6096; HLA-B*55:01; ADAM7; ENSG00000069206; CTA
FILGVEGQQL

SEQ ID NO: 6097 - protein, 10 aa, Homo sapiens
  misc_feature: Table A; Target 6097; HLA-C*01:02; ADAM7; ENSG00000069206; CTA
FILGVEGQQL

SEQ ID NO: 6098 - protein, 10 aa, Homo sapiens
  misc_feature: Table A; Target 6098; HLA-C*02:02; ADAM7; ENSG00000069206; CTA
FILGVEGQQL

SEQ ID NO: 6099 - protein, 10 aa, Homo sapiens
  misc_feature: Table A; Target 6099; HLA-C*03:03; ADAM7; ENSG00000069206; CTA
FILGVEGQQL

SEQ ID NO: 6100 - protein, 10 aa, Homo sapiens
  misc_feature: Table A; Target 6100; HLA-C*03:04; ADAM7; ENSG00000069206; CTA
FILGVEGQQL

SEQ ID NO: 6101 - protein, 10 aa, Homo sapiens
  misc_feature: Table A; Target 6101; HLA-C*04:01; ADAM7; ENSG00000069206; CTA
FILGVEGQQL

SEQ ID NO: 6102 - protein, 10 aa, Homo sapiens
  misc_feature: Table A; Target 6102; HLA-C*07:04; ADAM7; ENSG00000069206; CTA
FILGVEGQQL

SEQ ID NO: 6103 - protein, 11 aa, Homo sapiens
  misc_feature: Table A; Target 6103; HLA-A*68:02; ADAM7; ENSG00000069206; CTA
FILGVEGQQLV

SEQ ID NO: 6104 - protein, 11 aa, Homo sapiens
  misc_feature: Table A; Target 6104; HLA-B*13:02; ADAM7; ENSG00000069206; CTA
FILGVEGQQLV

SEQ ID NO: 6105 - protein, 9 aa, Homo sapiens
  misc_feature: Table A; Target 6105; HLA-A*01:01; ADAM7; ENSG00000069206; CTA
FIVADDTVY

SEQ ID NO: 6106 - protein, 9 aa, Homo sapiens
  misc_feature: Table A; Target 6106; HLA-A*26:01; ADAM7; ENSG00000069206; CTA
FIVADDTVY

SEQ ID NO: 6107 - protein, 9 aa, Homo sapiens
  misc_feature: Table A; Target 6107; HLA-B*15:01; ADAM7; ENSG00000069206; CTA
FIVADDTVY

SEQ ID NO: 6108 - protein, 9 aa, Homo sapiens
  misc_feature: Table A; Target 6108; HLA-B*15:03; ADAM7; ENSG00000069206; CTA
FIVADDTVY

SEQ ID NO: 6109 - protein, 9 aa, Homo sapiens
  misc_feature: Table A; Target 6109; HLA-B*35:01; ADAM7; ENSG00000069206; CTA
FIVADDTVY

SEQ ID NO: 6110 - protein, 9 aa, Homo sapiens
  misc_feature: Table A; Target 6110; HLA-B*35:03; ADAM7; ENSG00000069206; CTA
FIVADDTVY

SEQ ID NO: 6111 - protein, 9 aa, Homo sapiens
  misc_feature: Table A; Target 6111; HLA-B*39:01; ADAM7; ENSG00000069206; CTA
FIVADDTVY

SEQ ID NO: 6112 - protein, 9 aa, Homo sapiens
  misc_feature: Table A; Target 6112; HLA-B*46:01; ADAM7; ENSG00000069206; CTA
FIVADDTVY

SEQ ID NO: 6113 - protein, 9 aa, Homo sapiens
  misc_feature: Table A; Target 6113; HLA-B*55:01; ADAM7; ENSG00000069206; CTA
FIVADDTVY

SEQ ID NO: 6114 - protein, 9 aa, Homo sapiens
  misc_feature: Table A; Target 6114; HLA-B*58:01; ADAM7; ENSG00000069206; CTA
FIVADDTVY

SEQ ID NO: 6115 - protein, 9 aa, Homo sapiens
  misc_feature: Table A; Target 6115; HLA-C*02:02; ADAM7; ENSG00000069206; CTA
FIVADDTVY

SEQ ID NO: 6116 - protein, 9 aa, Homo sapiens
  misc_feature: Table A; Target 6116; HLA-C*03:03; ADAM7; ENSG00000069206; CTA
FIVADDTVY

SEQ ID NO: 6117 - protein, 9 aa, Homo sapiens
  misc_feature: Table A; Target 6117; HLA-C*07:04; ADAM7; ENSG00000069206; CTA
FIVADDTVY

SEQ ID NO: 6118 - protein, 10 aa, Homo sapiens
  misc_feature: Table A; Target 6118; HLA-A*33:03; ADAM7; ENSG00000069206; CTA
FIVADDTVYR

SEQ ID NO: 6119 - protein, 10 aa, Homo sapiens
  misc_feature: Table A; Target 6119; HLA-A*68:01; ADAM7; ENSG00000069206; CTA
FIVADDTVYR

SEQ ID NO: 6120 - protein, 10 aa, Homo sapiens
  misc_feature: Table A; Target 6120; HLA-A*68:02; ADAM7; ENSG00000069206; CTA
FIVADDTVYR

SEQ ID NO: 6121 - protein, 10 aa, Homo sapiens
  misc_feature: Table A; Target 6121; HLA-B*27:02; ADAM7; ENSG00000069206; CTA
FIVADDTVYR

SEQ ID NO: 6122 - protein, 10 aa, Homo sapiens
  misc_feature: Table A; Target 6122; HLA-C*07:06; ADAM7; ENSG00000069206; CTA
FIVADDTVYR

SEQ ID NO: 6123 - protein, 9 aa, Homo sapiens
  misc_feature: Table A; Target 6123; HLA-B*15:03; ADAM7; ENSG00000069206; CTA
FKYNLRVPY

SEQ ID NO: 6124 - protein, 10 aa, Homo sapiens
  misc_feature: Table A; Target 6124; HLA-C*07:04; ADAM7; ENSG00000069206; CTA
FLGSNYSETF

SEQ ID NO: 6125 - protein, 11 aa, Homo sapiens
  misc_feature: Table A; Target 6125; HLA-A*01:01; ADAM7; ENSG00000069206; CTA
FLGSNYSETFY

SEQ ID NO: 6126 - protein, 11 aa, Homo sapiens
  misc_feature: Table A; Target 6126; HLA-A*29:02; ADAM7; ENSG00000069206; CTA
FLGSNYSETFY

SEQ ID NO: 6127 - protein, 11 aa, Homo sapiens
  misc_feature: Table A; Target 6127; HLA-A*33:01; ADAM7; ENSG00000069206; CTA
FLNKPASKDSR

SEQ ID NO: 6128 - protein, 9 aa, Homo sapiens
  misc_feature: Table A; Target 6128; HLA-A*02:01; ADAM7; ENSG00000069206; CTA
FLYHDSTDI

SEQ ID NO: 6129 - protein, 9 aa, Homo sapiens
  misc_feature: Table A; Target 6129; HLA-A*02:03; ADAM7; ENSG00000069206; CTA
FLYHDSTDI

SEQ ID NO: 6130 - protein, 9 aa, Homo sapiens
  misc_feature: Table A; Target 6130; HLA-A*02:04; ADAM7; ENSG00000069206; CTA
FLYHDSTDI

SEQ ID NO: 6131 - protein, 9 aa, Homo sapiens
  misc_feature: Table A; Target 6131; HLA-B*13:02; ADAM7; ENSG00000069206; CTA
FLYHDSTDI

SEQ ID NO: 6132 - protein, 9 aa, Homo sapiens
  misc_feature: Table A; Target 6132; HLA-B*15:03; ADAM7; ENSG00000069206; CTA
FLYHDSTDI

SEQ ID NO: 6133 - protein, 11 aa, Homo sapiens
  misc_feature: Table A; Target 6133; HLA-A*02:01; ADAM7; ENSG00000069206; CTA
FLYHDSTDIGL

SEQ ID NO: 6134 - protein, 11 aa, Homo sapiens
  misc_feature: Table A; Target 6134; HLA-A*02:03; ADAM7; ENSG00000069206; CTA
FLYHDSTDIGL

SEQ ID NO: 6135 - protein, 11 aa, Homo sapiens
  misc_feature: Table A; Target 6135; HLA-A*02:04; ADAM7; ENSG00000069206; CTA
FLYHDSTDIGL

SEQ ID NO: 6136 - protein, 11 aa, Homo sapiens
  misc_feature: Table A; Target 6136; HLA-A*02:07; ADAM7; ENSG00000069206; CTA
FLYHDSTDIGL

SEQ ID NO: 6137 - protein, 9 aa, Homo sapiens
  misc_feature: Table A; Target 6137; HLA-B*15:03; ADAM7; ENSG00000069206; CTA
FPCKNSEGY

SEQ ID NO: 6138 - protein, 9 aa, Homo sapiens
  misc_feature: Table A; Target 6138; HLA-B*35:01; ADAM7; ENSG00000069206; CTA
FPCKNSEGY

SEQ ID NO: 6139 - protein, 9 aa, Homo sapiens
  misc_feature: Table A; Target 6139; HLA-B*55:01; ADAM7; ENSG00000069206; CTA
FPCKNSEGY

SEQ ID NO: 6140 - protein, 9 aa, Homo sapiens
  misc_feature: Table A; Target 6140; HLA-C*07:01; ADAM7; ENSG00000069206; CTA
FPCKNSEGY

SEQ ID NO: 6141 - protein, 8 aa, Homo sapiens
  misc_feature: Table A; Target 6141; HLA-B*51:01; ADAM7; ENSG00000069206; CTA
FPYNFHDF

SEQ ID NO: 6142 - protein, 8 aa, Homo sapiens
  misc_feature: Table A; Target 6142; HLA-B*54:01; ADAM7; ENSG00000069206; CTA
FPYNFHDF

SEQ ID NO: 6143 - protein, 10 aa, Homo sapiens
  misc_feature: Table A; Target 6143; HLA-B*35:01; ADAM7; ENSG00000069206; CTA
FPYNFHDFQF

SEQ ID NO: 6144 - protein, 10 aa, Homo sapiens
  misc_feature: Table A; Target 6144; HLA-B*54:01; ADAM7; ENSG00000069206; CTA
FPYNFHDFQF

SEQ ID NO: 6145 - protein, 9 aa, Homo sapiens
  misc_feature: Table A; Target 6145; HLA-A*30:02; ADAM7; ENSG00000069206; CTA
FSKCSQNQY

SEQ ID NO: 6146 - protein, 9 aa, Homo sapiens
  misc_feature: Table A; Target 6146; HLA-B*15:03; ADAM7; ENSG00000069206; CTA
FSKCSQNQY

SEQ ID NO: 6147 - protein, 9 aa, Homo sapiens
  misc_feature: Table A; Target 6147; HLA-B*46:01; ADAM7; ENSG00000069206; CTA
FSKCSQNQY

SEQ ID NO: 6148 - protein, 9 aa, Homo sapiens
  misc_feature: Table A; Target 6148; HLA-C*07:04; ADAM7; ENSG00000069206; CTA
FSKCSQNQY

SEQ ID NO: 6149 - protein, 9 aa, Homo sapiens
  misc_feature: Table A; Target 6149; HLA-A*02:07; ADAM7; ENSG00000069206; CTA
FVNMIYKTL

SEQ ID NO: 6150 - protein, 9 aa, Homo sapiens
  misc_feature: Table A; Target 6150; HLA-A*25:01; ADAM7; ENSG00000069206; CTA
FVNMIYKTL

SEQ ID NO: 6151 - protein, 9 aa, Homo sapiens
  misc_feature: Table A; Target 6151; HLA-C*03:04; ADAM7; ENSG00000069206; CTA
FVNMIYKTL

SEQ ID NO: 6152 - protein, 10 aa, Homo sapiens
  misc_feature: Table A; Target 6152; HLA-A*23:01; ADAM7; ENSG00000069206; CTA
FYQGSIVHEY

SEQ ID NO: 6153 - protein, 10 aa, Homo sapiens
  misc_feature: Table A; Target 6153; HLA-A*24:02; ADAM7; ENSG00000069206; CTA
FYQGSIVHEY

SEQ ID NO: 6154 - protein, 10 aa, Homo sapiens
  misc_feature: Table A; Target 6154; HLA-A*26:01; ADAM7; ENSG00000069206; CTA
FYQGSIVHEY

SEQ ID NO: 6155 - protein, 10 aa, Homo sapiens
  misc_feature: Table A; Target 6155; HLA-A*29:02; ADAM7; ENSG00000069206; CTA
FYQGSIVHEY

SEQ ID NO: 6156 - protein, 10 aa, Homo sapiens
  misc_feature: Table A; Target 6156; HLA-A*30:02; ADAM7; ENSG00000069206; CTA
FYQGSIVHEY

SEQ ID NO: 6157 - protein, 10 aa, Homo sapiens
  misc_feature: Table A; Target 6157; HLA-A*33:01; ADAM7; ENSG00000069206; CTA
FYQGSIVHEY

SEQ ID NO: 6158 - protein, 10 aa, Homo sapiens
  misc_feature: Table A; Target 6158; HLA-A*33:03; ADAM7; ENSG00000069206; CTA
FYQGSIVHEY

SEQ ID NO: 6159 - protein, 10 aa, Homo sapiens
  misc_feature: Table A; Target 6159; HLA-B*44:02; ADAM7; ENSG00000069206; CTA
FYQGSIVHEY

SEQ ID NO: 6160 - protein, 10 aa, Homo sapiens
  misc_feature: Table A; Target 6160; HLA-B*46:01; ADAM7; ENSG00000069206; CTA
FYQGSIVHEY

SEQ ID NO: 6161 - protein, 10 aa, Homo sapiens
  misc_feature: Table A; Target 6161; HLA-C*01:02; ADAM7; ENSG00000069206; CTA
FYQGSIVHEY

SEQ ID NO: 6162 - protein, 10 aa, Homo sapiens
  misc_feature: Table A; Target 6162; HLA-C*02:02; ADAM7; ENSG00000069206; CTA
FYQGSIVHEY

SEQ ID NO: 6163 - protein, 10 aa, Homo sapiens
  misc_feature: Table A; Target 6163; HLA-C*14:02; ADAM7; ENSG00000069206; CTA
FYQGSIVHEY

SEQ ID NO: 6164 - protein, 10 aa, Homo sapiens
  misc_feature: Table A; Target 6164; HLA-C*16:04; ADAM7; ENSG00000069206; CTA
FYQGSIVHEY

SEQ ID NO: 6165 - protein, 9 aa, Homo sapiens
  misc_feature: Table A; Target 6165; HLA-A*23:01; ADAM7; ENSG00000069206; CTA
FYSMKGEAF

SEQ ID NO: 6166 - protein, 9 aa, Homo sapiens
  misc_feature: Table A; Target 6166; HLA-A*24:02; ADAM7; ENSG00000069206; CTA
FYSMKGEAF

SEQ ID NO: 6167 - protein, 9 aa, Homo sapiens
  misc_feature: Table A; Target 6167; HLA-C*14:02; ADAM7; ENSG00000069206; CTA
FYSMKGEAF

SEQ ID NO: 6168 - protein, 9 aa, Homo sapiens
  misc_feature: Table A; Target 6168; HLA-C*01:02; ADAM7; ENSG00000069206; CTA
GANYSCTEL

SEQ ID NO: 6169 - protein, 9 aa, Homo sapiens
  misc_feature: Table A; Target 6169; HLA-C*03:04; ADAM7; ENSG00000069206; CTA
GANYSCTEL

SEQ ID NO: 6170 - protein, 9 aa, Homo sapiens
  misc_feature: Table A; Target 6170; HLA-C*16:04; ADAM7; ENSG00000069206; CTA
GANYSCTEL

SEQ ID NO: 6171 - protein, 10 aa, Homo sapiens
  misc_feature: Table A; Target 6171; HLA-B*27:02; ADAM7; ENSG00000069206; CTA
GDNESEEDSK

SEQ ID NO: 6172 - protein, 10 aa, Homo sapiens
  misc_feature: Table A; Target 6172; HLA-B*49:01; ADAM7; ENSG00000069206; CTA
GEAFTRHPQI

SEQ ID NO: 6173 - protein, 9 aa, Homo sapiens
  misc_feature: Table A; Target 6173; HLA-A*30:01; ADAM7; ENSG00000069206; CTA
GECLNMEKV

SEQ ID NO: 6174 - protein, 9 aa, Homo sapiens
  misc_feature: Table A; Target 6174; HLA-B*40:01; ADAM7; ENSG00000069206; CTA
GECLNMEKV

SEQ ID NO: 6175 - protein, 9 aa, Homo sapiens
  misc_feature: Table A; Target 6175; HLA-B*40:02; ADAM7; ENSG00000069206; CTA
GECLNMEKV

SEQ ID NO: 6176 - protein, 9 aa, Homo sapiens
  misc_feature: Table A; Target 6176; HLA-B*49:01; ADAM7; ENSG00000069206; CTA
GECLNMEKV

SEQ ID NO: 6177 - protein, 10 aa, Homo sapiens
  misc_feature: Table A; Target 6177; HLA-B*44:02; ADAM7; ENSG00000069206; CTA
GECLNMEKVY

SEQ ID NO: 6178 - protein, 10 aa, Homo sapiens
  misc_feature: Table A; Target 6178; HLA-B*44:03; ADAM7; ENSG00000069206; CTA
GECLNMEKVY

SEQ ID NO: 6179 - protein, 10 aa, Homo sapiens
  misc_feature: Table A; Target 6179; HLA-C*16:04; ADAM7; ENSG00000069206; CTA
GECLNMEKVY

SEQ ID NO: 6180 - protein, 8 aa, Homo sapiens
  misc_feature: Table A; Target 6180; HLA-A*30:01; ADAM7; ENSG00000069206; CTA
GEDKTYHL

SEQ ID NO: 6181 - protein, 8 aa, Homo sapiens
  misc_feature: Table A; Target 6181; HLA-B*37:01; ADAM7; ENSG00000069206; CTA
GEDKTYHL

SEQ ID NO: 6182 - protein, 8 aa, Homo sapiens
  misc_feature: Table A; Target 6182; HLA-B*38:01; ADAM7; ENSG00000069206; CTA
GEDKTYHL

SEQ ID NO: 6183 - protein, 8 aa, Homo sapiens
  misc_feature: Table A; Target 6183; HLA-B*40:01; ADAM7; ENSG00000069206; CTA
GEDKTYHL

SEQ ID NO: 6184 - protein, 8 aa, Homo sapiens
  misc_feature: Table A; Target 6184; HLA-B*40:02; ADAM7; ENSG00000069206; CTA
GEDKTYHL

SEQ ID NO: 6185 - protein, 8 aa, Homo sapiens
  misc_feature: Table A; Target 6185; HLA-B*44:03; ADAM7; ENSG00000069206; CTA
GEDKTYHL

SEQ ID NO: 6186 - protein, 8 aa, Homo sapiens
  misc_feature: Table A; Target 6186; HLA-B*49:01; ADAM7; ENSG00000069206; CTA
GEDKTYHL

SEQ ID NO: 6187 - protein, 8 aa, Homo sapiens
  misc_feature: Table A; Target 6187; HLA-A*30:01; ADAM7; ENSG00000069206; CTA
GEHLVFKY

SEQ ID NO: 6188 - protein, 8 aa, Homo sapiens
  misc_feature: Table A; Target 6188; HLA-B*18:01; ADAM7; ENSG00000069206; CTA
GEHLVFKY

SEQ ID NO: 6189 - protein, 8 aa, Homo sapiens
  misc_feature: Table A; Target 6189; HLA-B*27:02; ADAM7; ENSG00000069206; CTA
GEHLVFKY

SEQ ID NO: 6190 - protein, 8 aa, Homo sapiens
  misc_feature: Table A; Target 6190; HLA-B*37:01; ADAM7; ENSG00000069206; CTA
GEHLVFKY

SEQ ID NO: 6191 - protein, 8 aa, Homo sapiens
  misc_feature: Table A; Target 6191; HLA-B*40:02; ADAM7; ENSG00000069206; CTA
GEHLVFKY

SEQ ID NO: 6192 - protein, 8 aa, Homo sapiens
  misc_feature: Table A; Target 6192; HLA-B*44:02; ADAM7; ENSG00000069206; CTA
GEHLVFKY

SEQ ID NO: 6193 - protein, 8 aa, Homo sapiens
  misc_feature: Table A; Target 6193; HLA-B*44:03; ADAM7; ENSG00000069206; CTA
GEHLVFKY

SEQ ID NO: 6194 - protein, 8 aa, Homo sapiens
  misc_feature: Table A; Target 6194; HLA-C*07:01; ADAM7; ENSG00000069206; CTA
GEHLVFKY

SEQ ID NO: 6195 - protein, 8 aa, Homo sapiens
  misc_feature: Table A; Target 6195; HLA-C*16:04; ADAM7; ENSG00000069206; CTA
GEHLVFKY

SEQ ID NO: 6196 - protein, 10 aa, Homo sapiens
  misc_feature: Table A; Target 6196; HLA-A*29:02; ADAM7; ENSG00000069206; CTA
GFFRINDQRY

SEQ ID NO: 6197 - protein, 9 aa, Homo sapiens
  misc_feature: Table A; Target 6197; HLA-B*38:01; ADAM7; ENSG00000069206; CTA
GHTHDDDIL

SEQ ID NO: 6198 - protein, 9 aa, Homo sapiens
  misc_feature: Table A; Target 6198; HLA-A*32:01; ADAM7; ENSG00000069206; CTA
GIADPNQSA

SEQ ID NO: 6199 - protein, 10 aa, Homo sapiens
  misc_feature: Table A; Target 6199; HLA-A*03:02; ADAM7; ENSG00000069206; CTA
GIADPNQSAK

SEQ ID NO: 6200 - protein, 10 aa, Homo sapiens
  misc_feature: Table A; Target 6200; HLA-A*11:01; ADAM7; ENSG00000069206; CTA
GIADPNQSAK

SEQ ID NO: 6201 - protein, 10 aa, Homo sapiens
  misc_feature: Table A; Target 6201; HLA-A*26:01; ADAM7; ENSG00000069206; CTA
GIADPNQSAK

SEQ ID NO: 6202 - protein, 10 aa, Homo sapiens
  misc_feature: Table A; Target 6202; HLA-A*68:01; ADAM7; ENSG00000069206; CTA
GIADPNQSAK

SEQ ID NO: 6203 - protein, 10 aa, Homo sapiens
  misc_feature: Table A; Target 6203; HLA-B*27:02; ADAM7; ENSG00000069206; CTA
GIADPNQSAK

SEQ ID NO: 6204 - protein, 10 aa, Homo sapiens
  misc_feature: Table A; Target 6204; HLA-B*27:05; ADAM7; ENSG00000069206; CTA
GIADPNQSAK

SEQ ID NO: 6205 - protein, 10 aa, Homo sapiens
  misc_feature: Table A; Target 6205; HLA-B*39:01; ADAM7; ENSG00000069206; CTA
GIADPNQSAK

SEQ ID NO: 6206 - protein, 10 aa, Homo sapiens
  misc_feature: Table A; Target 6206; HLA-C*01:02; ADAM7; ENSG00000069206; CTA
GIADPNQSAK

SEQ ID NO: 6207 - protein, 10 aa, Homo sapiens
  misc_feature: Table A; Target 6207; HLA-C*02:02; ADAM7; ENSG00000069206; CTA
GIADPNQSAK

SEQ ID NO: 6208 - protein, 10 aa, Homo sapiens
  misc_feature: Table A; Target 6208; HLA-C*03:03; ADAM7; ENSG00000069206; CTA
GIADPNQSAK

SEQ ID NO: 6209 - protein, 10 aa, Homo sapiens
  misc_feature: Table A; Target 6209; HLA-C*06:02; ADAM7; ENSG00000069206; CTA
GIADPNQSAK

SEQ ID NO: 6210 - protein, 10 aa, Homo sapiens
  misc_feature: Table A; Target 6210; HLA-C*07:06; ADAM7; ENSG00000069206; CTA
GIADPNQSAK

SEQ ID NO: 6211 - protein, 9 aa, Homo sapiens
  misc_feature: Table A; Target 6211; HLA-B*13:02; ADAM7; ENSG00000069206; CTA
GIGVLILLV

SEQ ID NO: 6212 - protein, 9 aa, Homo sapiens
  misc_feature: Table A; Target 6212; HLA-A*02:01; ADAM7; ENSG00000069206; CTA
GMVNFVNMI

SEQ ID NO: 6213 - protein, 9 aa, Homo sapiens
  misc_feature: Table A; Target 6213; HLA-A*02:03; ADAM7; ENSG00000069206; CTA
GMVNFVNMI

SEQ ID NO: 6214 - protein, 9 aa, Homo sapiens
  misc_feature: Table A; Target 6214; HLA-B*13:02; ADAM7; ENSG00000069206; CTA
GMVNFVNMI

SEQ ID NO: 6215 - protein, 10 aa, Homo sapiens
  misc_feature: Table A; Target 6215; HLA-A*29:02; ADAM7; ENSG00000069206; CTA
GMVNFVNMIY

SEQ ID NO: 6216 - protein, 10 aa, Homo sapiens
  misc_feature: Table A; Target 6216; HLA-A*30:02; ADAM7; ENSG00000069206; CTA
GMVNFVNMIY

SEQ ID NO: 6217 - protein, 10 aa, Homo sapiens
  misc_feature: Table A; Target 6217; HLA-B*15:01; ADAM7; ENSG00000069206; CTA
GMVNFVNMIY

SEQ ID NO: 6218 - protein, 11 aa, Homo sapiens
  misc_feature: Table A; Target 6218; HLA-A*03:01; ADAM7; ENSG00000069206; CTA
GMVNFVNMIYK

SEQ ID NO: 6219 - protein, 9 aa, Homo sapiens
  misc_feature: Table A; Target 6219; HLA-B*27:05; ADAM7; ENSG00000069206; CTA
GQAPVACEE

SEQ ID NO: 6220 - protein, 11 aa, Homo sapiens
  misc_feature: Table A; Target 6220; HLA-B*13:02; ADAM7; ENSG00000069206; CTA
GQAPVACEETL

SEQ ID NO: 6221 - protein, 11 aa, Homo sapiens
  misc_feature: Table A; Target 6221; HLA-B*27:05; ADAM7; ENSG00000069206; CTA
GQAPVACEETL

SEQ ID NO: 6222 - protein, 11 aa, Homo sapiens
  misc_feature: Table A; Target 6222; HLA-B*38:01; ADAM7; ENSG00000069206; CTA
GQAPVACEETL

SEQ ID NO: 6223 - protein, 8 aa, Homo sapiens
  misc_feature: Table A; Target 6223; HLA-A*03:02; ADAM7; ENSG00000069206; CTA
GQQLVRPK

SEQ ID NO: 6224 - protein, 8 aa, Homo sapiens
  misc_feature: Table A; Target 6224; HLA-A*11:01; ADAM7; ENSG00000069206; CTA
GQQLVRPK

SEQ ID NO: 6225 - protein, 8 aa, Homo sapiens
  misc_feature: Table A; Target 6225; HLA-B*57:01; ADAM7; ENSG00000069206; CTA
GSIPALKF

SEQ ID NO: 6226 - protein, 8 aa, Homo sapiens
  misc_feature: Table A; Target 6226; HLA-B*58:01; ADAM7; ENSG00000069206; CTA
GSIPALKF

SEQ ID NO: 6227 - protein, 10 aa, Homo sapiens
  misc_feature: Table A; Target 6227; HLA-A*11:01; ADAM7; ENSG00000069206; CTA
GSIPALKFSK

SEQ ID NO: 6228 - protein, 10 aa, Homo sapiens
  misc_feature: Table A; Target 6228; HLA-A*31:01; ADAM7; ENSG00000069206; CTA
GSIPALKFSK

SEQ ID NO: 6229 - protein, 10 aa, Homo sapiens
  misc_feature: Table A; Target 6229; HLA-B*57:01; ADAM7; ENSG00000069206; CTA
GSIPALKFSK

SEQ ID NO: 6230 - protein, 9 aa, Homo sapiens
  misc_feature: Table A; Target 6230; HLA-A*01:01; ADAM7; ENSG00000069206; CTA
GSNYSETFY

SEQ ID NO: 6231 - protein, 9 aa, Homo sapiens
  misc_feature: Table A; Target 6231; HLA-A*29:02; ADAM7; ENSG00000069206; CTA
GSNYSETFY

SEQ ID NO: 6232 - protein, 9 aa, Homo sapiens
  misc_feature: Table A; Target 6232; HLA-A*30:02; ADAM7; ENSG00000069206; CTA
GSNYSETFY

SEQ ID NO: 6233 - protein, 9 aa, Homo sapiens
  misc_feature: Table A; Target 6233; HLA-B*15:01; ADAM7; ENSG00000069206; CTA
GSNYSETFY

SEQ ID NO: 6234 - protein, 9 aa, Homo sapiens
  misc_feature: Table A; Target 6234; HLA-B*15:03; ADAM7; ENSG00000069206; CTA
GSNYSETFY

SEQ ID NO: 6235 - protein, 9 aa, Homo sapiens
  misc_feature: Table A; Target 6235; HLA-B*46:01; ADAM7; ENSG00000069206; CTA
GSNYSETFY

SEQ ID NO: 6236 - protein, 9 aa, Homo sapiens
  misc_feature: Table A; Target 6236; HLA-B*58:01; ADAM7; ENSG00000069206; CTA
GSNYSETFY

SEQ ID NO: 6237 - protein, 9 aa, Homo sapiens
  misc_feature: Table A; Target 6237; HLA-C*07:04; ADAM7; ENSG00000069206; CTA
GSNYSETFY

SEQ ID NO: 6238 - protein, 9 aa, Homo sapiens
  misc_feature: Table A; Target 6238; HLA-C*16:04; ADAM7; ENSG00000069206; CTA
GSNYSETFY

SEQ ID NO: 6239 - protein, 9 aa, Homo sapiens
  misc_feature: Table A; Target 6239; HLA-A*68:01; ADAM7; ENSG00000069206; CTA
GVEGQQLVR

SEQ ID NO: 6240 - protein, 9 aa, Homo sapiens
  misc_feature: Table A; Target 6240; HLA-C*07:06; ADAM7; ENSG00000069206; CTA
GVEGQQLVR

SEQ ID NO: 6241 - protein, 11 aa, Homo sapiens
  misc_feature: Table A; Target 6241; HLA-A*03:01; ADAM7; ENSG00000069206; CTA
GVEGQQLVRPK

SEQ ID NO: 6242 - protein, 11 aa, Homo sapiens
  misc_feature: Table A; Target 6242; HLA-A*03:02; ADAM7; ENSG00000069206; CTA
GVEGQQLVRPK

SEQ ID NO: 6243 - protein, 11 aa, Homo sapiens
  misc_feature: Table A; Target 6243; HLA-A*11:01; ADAM7; ENSG00000069206; CTA
GVEGQQLVRPK

SEQ ID NO: 6244 - protein, 11 aa, Homo sapiens
  misc_feature: Table A; Target 6244; HLA-A*31:01; ADAM7; ENSG00000069206; CTA
GVEGQQLVRPK

SEQ ID NO: 6245 - protein, 11 aa, Homo sapiens
  misc_feature: Table A; Target 6245; HLA-B*27:02; ADAM7; ENSG00000069206; CTA
GVEGQQLVRPK

SEQ ID NO: 6246 - protein, 11 aa, Homo sapiens
  misc_feature: Table A; Target 6246; HLA-C*06:02; ADAM7; ENSG00000069206; CTA
GVEGQQLVRPK

SEQ ID NO: 6247 - protein, 9 aa, Homo sapiens
  misc_feature: Table A; Target 6247; HLA-A*29:02; ADAM7; ENSG00000069206; CTA
GVLILLVRY

SEQ ID NO: 6248 - protein, 9 aa, Homo sapiens
  misc_feature: Table A; Target 6248; HLA-A*30:02; ADAM7; ENSG00000069206; CTA
GVLILLVRY

SEQ ID NO: 6249 - protein, 9 aa, Homo sapiens
  misc_feature: Table A; Target 6249; HLA-B*57:01; ADAM7; ENSG00000069206; CTA
GVLILLVRY

SEQ ID NO: 6250 - protein, 9 aa, Homo sapiens
  misc_feature: Table A; Target 6250; HLA-A*23:01; ADAM7; ENSG00000069206; CTA
GYFGDEQQI

SEQ ID NO: 6251 - protein, 9 aa, Homo sapiens
  misc_feature: Table A; Target 6251; HLA-A*24:02; ADAM7; ENSG00000069206; CTA
GYFGDEQQI

SEQ ID NO: 6252 - protein, 9 aa, Homo sapiens
  misc_feature: Table A; Target 6252; HLA-B*13:02; ADAM7; ENSG00000069206; CTA
GYFGDEQQI

SEQ ID NO: 6253 - protein, 9 aa, Homo sapiens
  misc_feature: Table A; Target 6253; HLA-B*38:01; ADAM7; ENSG00000069206; CTA
GYFGDEQQI

SEQ ID NO: 6254 - protein, 9 aa, Homo sapiens
  misc_feature: Table A; Target 6254; HLA-B*18:01; ADAM7; ENSG00000069206; CTA
HDDDILKTY

SEQ ID NO: 6255 - protein, 9 aa, Homo sapiens
  misc_feature: Table A; Target 6255; HLA-B*44:02; ADAM7; ENSG00000069206; CTA
HDDDILKTY

SEQ ID NO: 6256 - protein, 9 aa, Homo sapiens
  misc_feature: Table A; Target 6256; HLA-B*44:03; ADAM7; ENSG00000069206; CTA
HDDDILKTY

SEQ ID NO: 6257 - protein, 9 aa, Homo sapiens
  misc_feature: Table A; Target 6257; HLA-C*16:02; ADAM7; ENSG00000069206; CTA
HDDDILKTY

SEQ ID NO: 6258 - protein, 8 aa, Homo sapiens
  misc_feature: Table A; Target 6258; HLA-B*37:01; ADAM7; ENSG00000069206; CTA
HDSTDIGL

SEQ ID NO: 6259 - protein, 8 aa, Homo sapiens
  misc_feature: Table A; Target 6259; HLA-B*38:01; ADAM7; ENSG00000069206; CTA
HDSTDIGL

SEQ ID NO: 6260 - protein, 8 aa, Homo sapiens
  misc_feature: Table A; Target 6260; HLA-C*07:04; ADAM7; ENSG00000069206; CTA
HDSTDIGL

SEQ ID NO: 6261 - protein, 9 aa, Homo sapiens
  misc_feature: Table A; Target 6261; HLA-A*68:02; ADAM7; ENSG00000069206; CTA
HDSTDIGLV

SEQ ID NO: 6262 - protein, 8 aa, Homo sapiens
  misc_feature: Table A; Target 6262; HLA-A*01:01; ADAM7; ENSG00000069206; CTA
HEDKIELY

SEQ ID NO: 6263 - protein, 8 aa, Homo sapiens
  misc_feature: Table A; Target 6263; HLA-B*18:01; ADAM7; ENSG00000069206; CTA
HEDKIELY

SEQ ID NO: 6264 - protein, 8 aa, Homo sapiens
  misc_feature: Table A; Target 6264; HLA-B*44:02; ADAM7; ENSG00000069206; CTA
HEDKIELY

SEQ ID NO: 6265 - protein, 8 aa, Homo sapiens
  misc_feature: Table A; Target 6265; HLA-B*44:03; ADAM7; ENSG00000069206; CTA
HEDKIELY

SEQ ID NO: 6266 - protein, 9 aa, Homo sapiens
  misc_feature: Table A; Target 6266; HLA-A*23:01; ADAM7; ENSG00000069206; CTA
HEYDSAASI

SEQ ID NO: 6267 - protein, 9 aa, Homo sapiens
  misc_feature: Table A; Target 6267; HLA-A*30:01; ADAM7; ENSG00000069206; CTA
HEYDSAASI

SEQ ID NO: 6268 - protein, 9 aa, Homo sapiens
  misc_feature: Table A; Target 6268; HLA-A*68:02; ADAM7; ENSG00000069206; CTA
HEYDSAASI

SEQ ID NO: 6269 - protein, 9 aa, Homo sapiens
  misc_feature: Table A; Target 6269; HLA-B*13:02; ADAM7; ENSG00000069206; CTA
HEYDSAASI

SEQ ID NO: 6270 - protein, 9 aa, Homo sapiens
  misc_feature: Table A; Target 6270; HLA-B*15:03; ADAM7; ENSG00000069206; CTA
HEYDSAASI

SEQ ID NO: 6271 - protein, 9 aa, Homo sapiens
  misc_feature: Table A; Target 6271; HLA-B*18:01; ADAM7; ENSG00000069206; CTA
HEYDSAASI

SEQ ID NO: 6272 - protein, 9 aa, Homo sapiens
  misc_feature: Table A; Target 6272; HLA-B*27:02; ADAM7; ENSG00000069206; CTA
HEYDSAASI

SEQ ID NO: 6273 - protein, 9 aa, Homo sapiens
  misc_feature: Table A; Target 6273; HLA-B*27:05; ADAM7; ENSG00000069206; CTA
HEYDSAASI

SEQ ID NO: 6274 - protein, 9 aa, Homo sapiens
  misc_feature: Table A; Target 6274; HLA-B*37:01; ADAM7; ENSG00000069206; CTA
HEYDSAASI

SEQ ID NO: 6275 - protein, 9 aa, Homo sapiens
  misc_feature: Table A; Target 6275; HLA-B*38:01; ADAM7; ENSG00000069206; CTA
HEYDSAASI

SEQ ID NO: 6276 - protein, 9 aa, Homo sapiens
  misc_feature: Table A; Target 6276; HLA-B*39:01; ADAM7; ENSG00000069206; CTA
HEYDSAASI

SEQ ID NO: 6277 - protein, 9 aa, Homo sapiens
  misc_feature: Table A; Target 6277; HLA-B*40:01; ADAM7; ENSG00000069206; CTA
HEYDSAASI

SEQ ID NO: 6278 - protein, 9 aa, Homo sapiens
  misc_feature: Table A; Target 6278; HLA-B*40:02; ADAM7; ENSG00000069206; CTA
HEYDSAASI

SEQ ID NO: 6279 - protein, 9 aa, Homo sapiens
  misc_feature: Table A; Target 6279; HLA-B*44:02; ADAM7; ENSG00000069206; CTA
HEYDSAASI

SEQ ID NO: 6280 - protein, 9 aa, Homo sapiens
  misc_feature: Table A; Target 6280; HLA-B*44:03; ADAM7; ENSG00000069206; CTA
HEYDSAASI

SEQ ID NO: 6281 - protein, 9 aa, Homo sapiens
  misc_feature: Table A; Target 6281; HLA-B*49:01; ADAM7; ENSG00000069206; CTA
HEYDSAASI

SEQ ID NO: 6282 - protein, 9 aa, Homo sapiens
  misc_feature: Table A; Target 6282; HLA-B*51:01; ADAM7; ENSG00000069206; CTA
HEYDSAASI

SEQ ID NO: 6283 - protein, 9 aa, Homo sapiens
  misc_feature: Table A; Target 6283; HLA-C*02:02; ADAM7; ENSG00000069206; CTA
HEYDSAASI

SEQ ID NO: 6284 - protein, 9 aa, Homo sapiens
  misc_feature: Table A; Target 6284; HLA-C*03:03; ADAM7; ENSG00000069206; CTA
HEYDSAASI

SEQ ID NO: 6285 - protein, 9 aa, Homo sapiens
  misc_feature: Table A; Target 6285; HLA-C*07:04; ADAM7; ENSG00000069206; CTA
HEYDSAASI

SEQ ID NO: 6286 - protein, 9 aa, Homo sapiens
  misc_feature: Table A; Target 6286; HLA-C*12:03; ADAM7; ENSG00000069206; CTA
HEYDSAASI

SEQ ID NO: 6287 - protein, 9 aa, Homo sapiens
  misc_feature: Table A; Target 6287; HLA-C*16:04; ADAM7; ENSG00000069206; CTA
HEYDSAASI

SEQ ID NO: 6288 - protein, 11 aa, Homo sapiens
  misc_feature: Table A; Target 6288; HLA-A*30:01; ADAM7; ENSG00000069206; CTA
HEYDSAASIST

SEQ ID NO: 6289 - protein, 11 aa, Homo sapiens
  misc_feature: Table A; Target 6289; HLA-B*18:01; ADAM7; ENSG00000069206; CTA
HEYDSAASIST

SEQ ID NO: 6290 - protein, 11 aa, Homo sapiens
  misc_feature: Table A; Target 6290; HLA-B*40:01; ADAM7; ENSG00000069206; CTA
HEYDSAASIST

SEQ ID NO: 6291 - protein, 11 aa, Homo sapiens
  misc_feature: Table A; Target 6291; HLA-B*40:02; ADAM7; ENSG00000069206; CTA
HEYDSAASIST

SEQ ID NO: 6292 - protein, 11 aa, Homo sapiens
  misc_feature: Table A; Target 6292; HLA-B*49:01; ADAM7; ENSG00000069206; CTA
HEYDSAASIST

SEQ ID NO: 6293 - protein, 9 aa, Homo sapiens
  misc_feature: Table A; Target 6293; HLA-A*33:03; ADAM7; ENSG00000069206; CTA
HFLNKPASK

SEQ ID NO: 6294 - protein, 9 aa, Homo sapiens
  misc_feature: Table A; Target 6294; HLA-A*02:03; ADAM7; ENSG00000069206; CTA
HLKDPQKNA

SEQ ID NO: 6295 - protein, 9 aa, Homo sapiens
  misc_feature: Table A; Target 6295; HLA-B*08:01; ADAM7; ENSG00000069206; CTA
HLKDPQKNA

SEQ ID NO: 6296 - protein, 9 aa, Homo sapiens
  misc_feature: Table A; Target 6296; HLA-B*55:01; ADAM7; ENSG00000069206; CTA
HLKDPQKNA

SEQ ID NO: 6297 - protein, 11 aa, Homo sapiens
  misc_feature: Table A; Target 6297; HLA-A*02:03; ADAM7; ENSG00000069206; CTA
HLKDPQKNATV

SEQ ID NO: 6298 - protein, 9 aa, Homo sapiens
  misc_feature: Table A; Target 6298; HLA-B*35:01; ADAM7; ENSG00000069206; CTA
HPQIMDHCF

SEQ ID NO: 6299 - protein, 9 aa, Homo sapiens
  misc_feature: Table A; Target 6299; HLA-B*35:03; ADAM7; ENSG00000069206; CTA
HPQIMDHCF

SEQ ID NO: 6300 - protein, 9 aa, Homo sapiens
  misc_feature: Table A; Target 6300; HLA-C*03:03; ADAM7; ENSG00000069206; CTA
HPQIMDHCF

SEQ ID NO: 6301 - protein, 9 aa, Homo sapiens
  misc_feature: Table A; Target 6301; HLA-A*30:01; ADAM7; ENSG00000069206; CTA
HQLGHNLGM

SEQ ID NO: 6302 - protein, 9 aa, Homo sapiens
  misc_feature: Table A; Target 6302; HLA-B*13:02; ADAM7; ENSG00000069206; CTA
HQLGHNLGM

SEQ ID NO: 6303 - protein, 9 aa, Homo sapiens
  misc_feature: Table A; Target 6303; HLA-B*15:01; ADAM7; ENSG00000069206; CTA
HQLGHNLGM

SEQ ID NO: 6304 - protein, 9 aa, Homo sapiens
  misc_feature: Table A; Target 6304; HLA-B*15:03; ADAM7; ENSG00000069206; CTA
HQLGHNLGM

SEQ ID NO: 6305 - protein, 9 aa, Homo sapiens
  misc_feature: Table A; Target 6305; HLA-B*37:01; ADAM7; ENSG00000069206; CTA
HQLGHNLGM

SEQ ID NO: 6306 - protein, 9 aa, Homo sapiens
  misc_feature: Table A; Target 6306; HLA-C*07:04; ADAM7; ENSG00000069206; CTA
HQLGHNLGM

SEQ ID NO: 6307 - protein, 9 aa, Homo sapiens
  misc_feature: Table A; Target 6307; HLA-A*03:02; ADAM7; ENSG00000069206; CTA
HTHDDDILK

SEQ ID NO: 6308 - protein, 9 aa, Homo sapiens
  misc_feature: Table A; Target 6308; HLA-A*11:01; ADAM7; ENSG00000069206; CTA
HTHDDDILK

SEQ ID NO: 6309 - protein, 9 aa, Homo sapiens
  misc_feature: Table A; Target 6309; HLA-A*68:01; ADAM7; ENSG00000069206; CTA
HTHDDDILK

SEQ ID NO: 6310 - protein, 9 aa, Homo sapiens
  misc_feature: Table A; Target 6310; HLA-C*07:06; ADAM7; ENSG00000069206; CTA
HTHDDDILK

SEQ ID NO: 6311 - protein, 11 aa, Homo sapiens
  misc_feature: Table A; Target 6311; HLA-A*01:01; ADAM7; ENSG00000069206; CTA
HTHDDDILKTY

SEQ ID NO: 6312 - protein, 11 aa, Homo sapiens
  misc_feature: Table A; Target 6312; HLA-A*25:01; ADAM7; ENSG00000069206; CTA
HTHDDDILKTY

SEQ ID NO: 6313 - protein, 11 aa, Homo sapiens
  misc_feature: Table A; Target 6313; HLA-A*26:01; ADAM7; ENSG00000069206; CTA
HTHDDDILKTY

SEQ ID NO: 6314 - protein, 11 aa, Homo sapiens
  misc_feature: Table A; Target 6314; HLA-A*30:02; ADAM7; ENSG00000069206; CTA
HTHDDDILKTY

SEQ ID NO: 6315 - protein, 11 aa, Homo sapiens
  misc_feature: Table A; Target 6315; HLA-B*57:01; ADAM7; ENSG00000069206; CTA
HTHDDDILKTY

SEQ ID NO: 6316 - protein, 9 aa, Homo sapiens
  misc_feature: Table A; Target 6316; HLA-A*33:01; ADAM7; ENSG00000069206; CTA
HVQGISYPG

SEQ ID NO: 6317 - protein, 9 aa, Homo sapiens
  misc_feature: Table A; Target 6317; HLA-C*07:01; ADAM7; ENSG00000069206; CTA
HVQGISYPG

SEQ ID NO: 6318 - protein, 9 aa, Homo sapiens
  misc_feature: Table A; Target 6318; HLA-A*68:02; ADAM7; ENSG00000069206; CTA
HVTLVGIEI

SEQ ID NO: 6319 - protein, 9 aa, Homo sapiens
  misc_feature: Table A; Target 6319; HLA-B*13:02; ADAM7; ENSG00000069206; CTA
HVTLVGIEI

SEQ ID NO: 6320 - protein, 9 aa, Homo sapiens
  misc_feature: Table A; Target 6320; HLA-B*35:03; ADAM7; ENSG00000069206; CTA
HVTLVGIEI

SEQ ID NO: 6321 - protein, 10 aa, Homo sapiens
  misc_feature: Table A; Target 6321; HLA-B*57:01; ADAM7; ENSG00000069206; CTA
HVTLVGIEIW

SEQ ID NO: 6322 - protein, 8 aa, Homo sapiens
  misc_feature: Table A; Target 6322; HLA-B*35:03; ADAM7; ENSG00000069206; CTA
HVTNITIL

SEQ ID NO: 6323 - protein, 9 aa, Homo sapiens
  misc_feature: Table A; Target 6323; HLA-A*02:03; ADAM7; ENSG00000069206; CTA
HVTNITILV

SEQ ID NO: 6324 - protein, 9 aa, Homo sapiens
  misc_feature: Table A; Target 6324; HLA-A*26:01; ADAM7; ENSG00000069206; CTA
HVTNITILV

SEQ ID NO: 6325 - protein, 9 aa, Homo sapiens
  misc_feature: Table A; Target 6325; HLA-A*68:01; ADAM7; ENSG00000069206; CTA
HVTNITILV

SEQ ID NO: 6326 - protein, 9 aa, Homo sapiens
  misc_feature: Table A; Target 6326; HLA-A*68:02; ADAM7; ENSG00000069206; CTA
HVTNITILV

SEQ ID NO: 6327 - protein, 9 aa, Homo sapiens
  misc_feature: Table A; Target 6327; HLA-B*13:02; ADAM7; ENSG00000069206; CTA
HVTNITILV

SEQ ID NO: 6328 - protein, 9 aa, Homo sapiens
  misc_feature: Table A; Target 6328; HLA-C*02:02; ADAM7; ENSG00000069206; CTA
HVTNITILV

SEQ ID NO: 6329 - protein, 10 aa, Homo sapiens
  misc_feature: Table A; Target 6329; HLA-A*68:02; ADAM7; ENSG00000069206; CTA
HVTNITILVV

SEQ ID NO: 6330 - protein, 10 aa, Homo sapiens
  misc_feature: Table A; Target 6330; HLA-B*13:02; ADAM7; ENSG00000069206; CTA
HVTNITILVV

SEQ ID NO: 6331 - protein, 10 aa, Homo sapiens
  misc_feature: Table A; Target 6331; HLA-B*54:01; ADAM7; ENSG00000069206; CTA
HVTNITILVV

SEQ ID NO: 6332 - protein, 11 aa, Homo sapiens
  misc_feature: Table A; Target 6332; HLA-A*68:02; ADAM7; ENSG00000069206; CTA
HVTNITILVVV

SEQ ID NO: 6333 - protein, 9 aa, Homo sapiens
  misc_feature: Table A; Target 6333; HLA-B*57:01; ADAM7; ENSG00000069206; CTA
HVVLLSGKW

SEQ ID NO: 6334 - protein, 8 aa, Homo sapiens
  misc_feature: Table A; Target 6334; HLA-C*05:01; ADAM7; ENSG00000069206; CTA
IADPNQSA

SEQ ID NO: 6335 - protein, 9 aa, Homo sapiens
  misc_feature: Table A; Target 6335; HLA-A*01:01; ADAM7; ENSG00000069206; CTA
IADPNQSAK

SEQ ID NO: 6336 - protein, 9 aa, Homo sapiens
  misc_feature: Table A; Target 6336; HLA-A*03:01; ADAM7; ENSG00000069206; CTA
IADPNQSAK

SEQ ID NO: 6337 - protein, 9 aa, Homo sapiens
  misc_feature: Table A; Target 6337; HLA-A*03:02; ADAM7; ENSG00000069206; CTA
IADPNQSAK

SEQ ID NO: 6338 - protein, 9 aa, Homo sapiens
  misc_feature: Table A; Target 6338; HLA-A*11:01; ADAM7; ENSG00000069206; CTA
IADPNQSAK

SEQ ID NO: 6339 - protein, 9 aa, Homo sapiens
  misc_feature: Table A; Target 6339; HLA-A*31:01; ADAM7; ENSG00000069206; CTA
IADPNQSAK

SEQ ID NO: 6340 - protein, 9 aa, Homo sapiens
  misc_feature: Table A; Target 6340; HLA-A*33:01; ADAM7; ENSG00000069206; CTA
IADPNQSAK

SEQ ID NO: 6341 - protein, 9 aa, Homo sapiens
  misc_feature: Table A; Target 6341; HLA-A*33:03; ADAM7; ENSG00000069206; CTA
IADPNQSAK

SEQ ID NO: 6342 - protein, 9 aa, Homo sapiens
  misc_feature: Table A; Target 6342; HLA-A*68:01; ADAM7; ENSG00000069206; CTA
IADPNQSAK

SEQ ID NO: 6343 - protein, 9 aa, Homo sapiens
  misc_feature: Table A; Target 6343; HLA-B*27:02; ADAM7; ENSG00000069206; CTA
IADPNQSAK

SEQ ID NO: 6344 - protein, 9 aa, Homo sapiens
  misc_feature: Table A; Target 6344; HLA-B*27:05; ADAM7; ENSG00000069206; CTA
IADPNQSAK

SEQ ID NO: 6345 - protein, 9 aa, Homo sapiens
  misc_feature: Table A; Target 6345; HLA-B*35:01; ADAM7; ENSG00000069206; CTA
IADPNQSAK

SEQ ID NO: 6346 - protein, 9 aa, Homo sapiens
  misc_feature: Table A; Target 6346; HLA-B*35:03; ADAM7; ENSG00000069206; CTA
IADPNQSAK

SEQ ID NO: 6347 - protein, 9 aa, Homo sapiens
  misc_feature: Table A; Target 6347; HLA-B*39:01; ADAM7; ENSG00000069206; CTA
IADPNQSAK

SEQ ID NO: 6348 - protein, 9 aa, Homo sapiens
  misc_feature: Table A; Target 6348; HLA-B*46:01; ADAM7; ENSG00000069206; CTA
IADPNQSAK

SEQ ID NO: 6349 - protein, 9 aa, Homo sapiens
  misc_feature: Table A; Target 6349; HLA-B*51:01; ADAM7; ENSG00000069206; CTA
IADPNQSAK

SEQ ID NO: 6350 - protein, 9 aa, Homo sapiens
  misc_feature: Table A; Target 6350; HLA-B*57:01; ADAM7; ENSG00000069206; CTA
IADPNQSAK

SEQ ID NO: 6351 - protein, 9 aa, Homo sapiens
  misc_feature: Table A; Target 6351; HLA-B*58:01; ADAM7; ENSG00000069206; CTA
IADPNQSAK

SEQ ID NO: 6352 - protein, 9 aa, Homo sapiens
  misc_feature: Table A; Target 6352; HLA-C*02:02; ADAM7; ENSG00000069206; CTA
IADPNQSAK

SEQ ID NO: 6353 - protein, 9 aa, Homo sapiens
  misc_feature: Table A; Target 6353; HLA-C*03:03; ADAM7; ENSG00000069206; CTA
IADPNQSAK

SEQ ID NO: 6354 - protein, 9 aa, Homo sapiens
  misc_feature: Table A; Target 6354; HLA-C*03:04; ADAM7; ENSG00000069206; CTA
IADPNQSAK

SEQ ID NO: 6355 - protein, 9 aa, Homo sapiens
  misc_feature: Table A; Target 6355; HLA-C*04:01; ADAM7; ENSG00000069206; CTA
IADPNQSAK

SEQ ID NO: 6356 - protein, 9 aa, Homo sapiens
  misc_feature: Table A; Target 6356; HLA-C*05:01; ADAM7; ENSG00000069206; CTA
IADPNQSAK

SEQ ID NO: 6357 - protein, 9 aa, Homo sapiens
  misc_feature: Table A; Target 6357; HLA-C*07:06; ADAM7; ENSG00000069206; CTA
IADPNQSAK

SEQ ID NO: 6358 - protein, 9 aa, Homo sapiens
  misc_feature: Table A; Target 6358; HLA-C*12:03; ADAM7; ENSG00000069206; CTA
IADPNQSAK

SEQ ID NO: 6359 - protein, 9 aa, Homo sapiens
  misc_feature: Table A; Target 6359; HLA-C*16:02; ADAM7; ENSG00000069206; CTA
IADPNQSAK

SEQ ID NO: 6360 - protein, 9 aa, Homo sapiens
  misc_feature: Table A; Target 6360; HLA-A*23:01; ADAM7; ENSG00000069206; CTA
IANRMAHQL

SEQ ID NO: 6361 - protein, 9 aa, Homo sapiens
  misc_feature: Table A; Target 6361; HLA-A*24:02; ADAM7; ENSG00000069206; CTA
IANRMAHQL

SEQ ID NO: 6362 - protein, 9 aa, Homo sapiens
  misc_feature: Table A; Target 6362; HLA-B*58:01; ADAM7; ENSG00000069206; CTA
IANRMAHQL

SEQ ID NO: 6363 - protein, 9 aa, Homo sapiens
  misc_feature: Table A; Target 6363; HLA-C*03:03; ADAM7; ENSG00000069206; CTA
IANRMAHQL

SEQ ID NO: 6364 - protein, 9 aa, Homo sapiens
  misc_feature: Table A; Target 6364; HLA-C*03:04; ADAM7; ENSG00000069206; CTA
IANRMAHQL

SEQ ID NO: 6365 - protein, 9 aa, Homo sapiens
  misc_feature: Table A; Target 6365; HLA-C*07:06; ADAM7; ENSG00000069206; CTA
IANRMAHQL

SEQ ID NO: 6366 - protein, 9 aa, Homo sapiens
  misc_feature: Table A; Target 6366; HLA-C*16:01; ADAM7; ENSG00000069206; CTA
IANRMAHQL

SEQ ID NO: 6367 - protein, 9 aa, Homo sapiens
  misc_feature: Table A; Target 6367; HLA-C*16:02; ADAM7; ENSG00000069206; CTA
IANRMAHQL

SEQ ID NO: 6368 - protein, 10 aa, Homo sapiens
  misc_feature: Table A; Target 6368; HLA-B*49:01; ADAM7; ENSG00000069206; CTA
IEIWTHEDKI

SEQ ID NO: 6369 - protein, 11 aa, Homo sapiens
  misc_feature: Table A; Target 6369; HLA-A*30:01; ADAM7; ENSG00000069206; CTA
IELYSNIETTL

SEQ ID NO: 6370 - protein, 11 aa, Homo sapiens
  misc_feature: Table A; Target 6370; HLA-B*40:01; ADAM7; ENSG00000069206; CTA
IELYSNIETTL

SEQ ID NO: 6371 - protein, 11 aa, Homo sapiens
  misc_feature: Table A; Target 6371; HLA-B*40:02; ADAM7; ENSG00000069206; CTA
IELYSNIETTL

SEQ ID NO: 6372 - protein, 11 aa, Homo sapiens
  misc_feature: Table A; Target 6372; HLA-B*49:01; ADAM7; ENSG00000069206; CTA
IELYSNIETTL

SEQ ID NO: 6373 - protein, 8 aa, Homo sapiens
  misc_feature: Table A; Target 6373; HLA-B*18:01; ADAM7; ENSG00000069206; CTA
IESHDICY

SEQ ID NO: 6374 - protein, 8 aa, Homo sapiens
  misc_feature: Table A; Target 6374; HLA-C*07:01; ADAM7; ENSG00000069206; CTA
IESHDICY

SEQ ID NO: 6375 - protein, 8 aa, Homo sapiens
  misc_feature: Table A; Target 6375; HLA-B*18:01; ADAM7; ENSG00000069206; CTA
IETTLLRF

SEQ ID NO: 6376 - protein, 8 aa, Homo sapiens
  misc_feature: Table A; Target 6376; HLA-B*37:01; ADAM7; ENSG00000069206; CTA
IETTLLRF

SEQ ID NO: 6377 - protein, 8 aa, Homo sapiens
  misc_feature: Table A; Target 6377; HLA-B*44:02; ADAM7; ENSG00000069206; CTA
IETTLLRF

SEQ ID NO: 6378 - protein, 8 aa, Homo sapiens
  misc_feature: Table A; Target 6378; HLA-B*44:03; ADAM7; ENSG00000069206; CTA
IETTLLRF

SEQ ID NO: 6379 - protein, 10 aa, Homo sapiens
  misc_feature: Table A; Target 6379; HLA-B*44:02; ADAM7; ENSG00000069206; CTA
IETTLLRFSF

SEQ ID NO: 6380 - protein, 8 aa, Homo sapiens
  misc_feature: Table A; Target 6380; HLA-A*23:01; ADAM7; ENSG00000069206; CTA
IFLMILLI

SEQ ID NO: 6381 - protein, 8 aa, Homo sapiens
  misc_feature: Table A; Target 6381; HLA-B*51:01; ADAM7; ENSG00000069206; CTA
IGVLILLV

SEQ ID NO: 6382 - protein, 9 aa, Homo sapiens
  misc_feature: Table A; Target 6382; HLA-A*02:07; ADAM7; ENSG00000069206; CTA
IHDEKYVEL

SEQ ID NO: 6383 - protein, 9 aa, Homo sapiens
  misc_feature: Table A; Target 6383; HLA-B*27:05; ADAM7; ENSG00000069206; CTA
IHDEKYVEL

SEQ ID NO: 6384 - protein, 9 aa, Homo sapiens
  misc_feature: Table A; Target 6384; HLA-B*38:01; ADAM7; ENSG00000069206; CTA
IHDEKYVEL

SEQ ID NO: 6385 - protein, 9 aa, Homo sapiens
  misc_feature: Table A; Target 6385; HLA-B*39:01; ADAM7; ENSG00000069206; CTA
IHDEKYVEL

SEQ ID NO: 6386 - protein, 9 aa, Homo sapiens
  misc_feature: Table A; Target 6386; HLA-B*40:01; ADAM7; ENSG00000069206; CTA
IHDEKYVEL

SEQ ID NO: 6387 - protein, 9 aa, Homo sapiens
  misc_feature: Table A; Target 6387; HLA-C*05:01; ADAM7; ENSG00000069206; CTA
IHDEKYVEL

SEQ ID NO: 6388 - protein, 10 aa, Homo sapiens
  misc_feature: Table A; Target 6388; HLA-B*38:01; ADAM7; ENSG00000069206; CTA
IHDEKYVELF

SEQ ID NO: 6389 - protein, 10 aa, Homo sapiens
  misc_feature: Table A; Target 6389; HLA-B*38:01; ADAM7; ENSG00000069206; CTA
IHVTLVGIEI

SEQ ID NO: 6390 - protein, 9 aa, Homo sapiens
  misc_feature: Table A; Target 6390; HLA-B*38:01; ADAM7; ENSG00000069206; CTA
ILGVEGQQL

SEQ ID NO: 6391 - protein, 9 aa, Homo sapiens
  misc_feature: Table A; Target 6391; HLA-B*55:01; ADAM7; ENSG00000069206; CTA
ILGVEGQQL

SEQ ID NO: 6392 - protein, 9 aa, Homo sapiens
  misc_feature: Table A; Target 6392; HLA-C*01:02; ADAM7; ENSG00000069206; CTA
ILGVEGQQL

SEQ ID NO: 6393 - protein, 9 aa, Homo sapiens
  misc_feature: Table A; Target 6393; HLA-A*02:03; ADAM7; ENSG00000069206; CTA
ILKTYEEEL

SEQ ID NO: 6394 - protein, 9 aa, Homo sapiens
  misc_feature: Table A; Target 6394; HLA-A*02:04; ADAM7; ENSG00000069206; CTA
ILKTYEEEL

SEQ ID NO: 6395 - protein, 9 aa, Homo sapiens
  misc_feature: Table A; Target 6395; HLA-B*15:01; ADAM7; ENSG00000069206; CTA
ILKTYEEEL

SEQ ID NO: 6396 - protein, 9 aa, Homo sapiens
  misc_feature: Table A; Target 6396; HLA-B*46:01; ADAM7; ENSG00000069206; CTA
ILKTYEEEL

SEQ ID NO: 6397 - protein, 9 aa, Homo sapiens
  misc_feature: Table A; Target 6397; HLA-C*01:02; ADAM7; ENSG00000069206; CTA
ILKTYEEEL

SEQ ID NO: 6398 - protein, 9 aa, Homo sapiens
  misc_feature: Table A; Target 6398; HLA-C*16:02; ADAM7; ENSG00000069206; CTA
ILKTYEEEL

SEQ ID NO: 6399 - protein, 11 aa, Homo sapiens
  misc_feature: Table A; Target 6399; HLA-A*29:02; ADAM7; ENSG00000069206; CTA
ILKTYEEELLY

SEQ ID NO: 6400 - protein, 10 aa, Homo sapiens
  misc_feature: Table A; Target 6400; HLA-A*03:02; ADAM7; ENSG00000069206; CTA
ILLIPQVKEK

SEQ ID NO: 6401 - protein, 8 aa, Homo sapiens
  misc_feature: Table A; Target 6401; HLA-A*02:04; ADAM7; ENSG00000069206; CTA
ILPEIHFL

SEQ ID NO: 6402 - protein, 8 aa, Homo sapiens
  misc_feature: Table A; Target 6402; HLA-A*02:07; ADAM7; ENSG00000069206; CTA
ILPEIHFL

SEQ ID NO: 6403 - protein, 10 aa, Homo sapiens
  misc_feature: Table A; Target 6403; HLA-A*02:07; ADAM7; ENSG00000069206; CTA
ILPEIHFLNK

SEQ ID NO: 6404 - protein, 10 aa, Homo sapiens
  misc_feature: Table A; Target 6404; HLA-A*03:01; ADAM7; ENSG00000069206; CTA
ILPEIHFLNK

SEQ ID NO: 6405 - protein, 9 aa, Homo sapiens
  misc_feature: Table A; Target 6405; HLA-A*02:07; ADAM7; ENSG00000069206; CTA
ILVVVLVLV

SEQ ID NO: 6406 - protein, 9 aa, Homo sapiens
  misc_feature: Table A; Target 6406; HLA-B*54:01; ADAM7; ENSG00000069206; CTA
IPALKFSKC

SEQ ID NO: 6407 - protein, 10 aa, Homo sapiens
  misc_feature: Table A; Target 6407; HLA-B*35:01; ADAM7; ENSG00000069206; CTA
IPFPYNFHDF

SEQ ID NO: 6408 - protein, 10 aa, Homo sapiens
  misc_feature: Table A; Target 6408; HLA-B*54:01; ADAM7; ENSG00000069206; CTA
IPFPYNFHDF

SEQ ID NO: 6409 - protein, 10 aa, Homo sapiens
  misc_feature: Table A; Target 6409; HLA-B*57:01; ADAM7; ENSG00000069206; CTA
IPFPYNFHDF

SEQ ID NO: 6410 - protein, 8 aa, Homo sapiens
  misc_feature: Table A; Target 6410; HLA-B*07:02; ADAM7; ENSG00000069206; CTA
IPQVKEKF

SEQ ID NO: 6411 - protein, 8 aa, Homo sapiens
  misc_feature: Table A; Target 6411; HLA-B*08:01; ADAM7; ENSG00000069206; CTA
IPQVKEKF

SEQ ID NO: 6412 - protein, 9 aa, Homo sapiens
  misc_feature: Table A; Target 6412; HLA-A*03:01; ADAM7; ENSG00000069206; CTA
ISYPGGMCL

SEQ ID NO: 6413 - protein, 9 aa, Homo sapiens
  misc_feature: Table A; Target 6413; HLA-A*23:01; ADAM7; ENSG00000069206; CTA
ISYPGGMCL

SEQ ID NO: 6414 - protein, 9 aa, Homo sapiens
  misc_feature: Table A; Target 6414; HLA-A*32:01; ADAM7; ENSG00000069206; CTA
ISYPGGMCL

SEQ ID NO: 6415 - protein, 9 aa, Homo sapiens
  misc_feature: Table A; Target 6415; HLA-B*07:02; ADAM7; ENSG00000069206; CTA
ISYPGGMCL

SEQ ID NO: 6416 - protein, 9 aa, Homo sapiens
  misc_feature: Table A; Target 6416; HLA-B*15:01; ADAM7; ENSG00000069206; CTA
ISYPGGMCL

SEQ ID NO: 6417 - protein, 9 aa, Homo sapiens
  misc_feature: Table A; Target 6417; HLA-B*15:03; ADAM7; ENSG00000069206; CTA
ISYPGGMCL

SEQ ID NO: 6418 - protein, 9 aa, Homo sapiens
  misc_feature: Table A; Target 6418; HLA-B*40:02; ADAM7; ENSG00000069206; CTA
ISYPGGMCL

SEQ ID NO: 6419 - protein, 9 aa, Homo sapiens
  misc_feature: Table A; Target 6419; HLA-B*46:01; ADAM7; ENSG00000069206; CTA
ISYPGGMCL

SEQ ID NO: 6420 - protein, 9 aa, Homo sapiens
  misc_feature: Table A; Target 6420; HLA-B*51:01; ADAM7; ENSG00000069206; CTA
ISYPGGMCL

SEQ ID NO: 6421 - protein, 9 aa, Homo sapiens
  misc_feature: Table A; Target 6421; HLA-B*58:01; ADAM7; ENSG00000069206; CTA
ISYPGGMCL

SEQ ID NO: 6422 - protein, 9 aa, Homo sapiens
  misc_feature: Table A; Target 6422; HLA-C*01:02; ADAM7; ENSG00000069206; CTA
ISYPGGMCL

SEQ ID NO: 6423 - protein, 9 aa, Homo sapiens
  misc_feature: Table A; Target 6423; HLA-C*02:02; ADAM7; ENSG00000069206; CTA
ISYPGGMCL

SEQ ID NO: 6424 - protein, 9 aa, Homo sapiens
  misc_feature: Table A; Target 6424; HLA-C*03:03; ADAM7; ENSG00000069206; CTA
ISYPGGMCL

SEQ ID NO: 6425 - protein, 9 aa, Homo sapiens
  misc_feature: Table A; Target 6425; HLA-C*03:04; ADAM7; ENSG00000069206; CTA
ISYPGGMCL

SEQ ID NO: 6426 - protein, 9 aa, Homo sapiens
  misc_feature: Table A; Target 6426; HLA-C*05:01; ADAM7; ENSG00000069206; CTA
ISYPGGMCL

SEQ ID NO: 6427 - protein, 9 aa, Homo sapiens
  misc_feature: Table A; Target 6427; HLA-C*07:02; ADAM7; ENSG00000069206; CTA
ISYPGGMCL

SEQ ID NO: 6428 - protein, 9 aa, Homo sapiens
  misc_feature: Table A; Target 6428; HLA-C*07:04; ADAM7; ENSG00000069206; CTA
ISYPGGMCL

SEQ ID NO: 6429 - protein, 9 aa, Homo sapiens
  misc_feature: Table A; Target 6429; HLA-C*12:03; ADAM7; ENSG00000069206; CTA
ISYPGGMCL

SEQ ID NO: 6430 - protein, 9 aa, Homo sapiens
  misc_feature: Table A; Target 6430; HLA-C*14:02; ADAM7; ENSG00000069206; CTA
ISYPGGMCL

SEQ ID NO: 6431 - protein, 9 aa, Homo sapiens
  misc_feature: Table A; Target 6431; HLA-C*16:01; ADAM7; ENSG00000069206; CTA
ISYPGGMCL

SEQ ID NO: 6432 - protein, 9 aa, Homo sapiens
  misc_feature: Table A; Target 6432; HLA-C*16:02; ADAM7; ENSG00000069206; CTA
ISYPGGMCL

SEQ ID NO: 6433 - protein, 9 aa, Homo sapiens
  misc_feature: Table A; Target 6433; HLA-C*16:04; ADAM7; ENSG00000069206; CTA
ISYPGGMCL

SEQ ID NO: 6434 - protein, 8 aa, Homo sapiens
  misc_feature: Table A; Target 6434; HLA-B*18:01; ADAM7; ENSG00000069206; CTA
ITILVVVL

SEQ ID NO: 6435 - protein, 9 aa, Homo sapiens
  misc_feature: Table A; Target 6435; HLA-A*68:02; ADAM7; ENSG00000069206; CTA
ITILVVVLV

SEQ ID NO: 6436 - protein, 8 aa, Homo sapiens
  misc_feature: Table A; Target 6436; HLA-B*15:01; ADAM7; ENSG00000069206; CTA
IVADDTVY

SEQ ID NO: 6437 - protein, 8 aa, Homo sapiens
  misc_feature: Table A; Target 6437; HLA-B*15:03; ADAM7; ENSG00000069206; CTA
IVADDTVY

SEQ ID NO: 6438 - protein, 8 aa, Homo sapiens
  misc_feature: Table A; Target 6438; HLA-B*35:01; ADAM7; ENSG00000069206; CTA
IVADDTVY

SEQ ID NO: 6439 - protein, 8 aa, Homo sapiens
  misc_feature: Table A; Target 6439; HLA-B*39:01; ADAM7; ENSG00000069206; CTA
IVADDTVY

SEQ ID NO: 6440 - protein, 8 aa, Homo sapiens
  misc_feature: Table A; Target 6440; HLA-B*46:01; ADAM7; ENSG00000069206; CTA
IVADDTVY

SEQ ID NO: 6441 - protein, 8 aa, Homo sapiens
  misc_feature: Table A; Target 6441; HLA-C*05:01; ADAM7; ENSG00000069206; CTA
IVADDTVY

SEQ ID NO: 6442 - protein, 9 aa, Homo sapiens
  misc_feature: Table A; Target 6442; HLA-A*03:01; ADAM7; ENSG00000069206; CTA
IVADDTVYR

SEQ ID NO: 6443 - protein, 9 aa, Homo sapiens
  misc_feature: Table A; Target 6443; HLA-A*03:02; ADAM7; ENSG00000069206; CTA
IVADDTVYR

SEQ ID NO: 6444 - protein, 9 aa, Homo sapiens
  misc_feature: Table A; Target 6444; HLA-A*11:01; ADAM7; ENSG00000069206; CTA
IVADDTVYR

SEQ ID NO: 6445 - protein, 9 aa, Homo sapiens
  misc_feature: Table A; Target 6445; HLA-A*26:01; ADAM7; ENSG00000069206; CTA
IVADDTVYR

SEQ ID NO: 6446 - protein, 9 aa, Homo sapiens
  misc_feature: Table A; Target 6446; HLA-A*31:01; ADAM7; ENSG00000069206; CTA
IVADDTVYR

SEQ ID NO: 6447 - protein, 9 aa, Homo sapiens
  misc_feature: Table A; Target 6447; HLA-A*33:01; ADAM7; ENSG00000069206; CTA
IVADDTVYR

SEQ ID NO: 6448 - protein, 9 aa, Homo sapiens
  misc_feature: Table A; Target 6448; HLA-A*33:03; ADAM7; ENSG00000069206; CTA
IVADDTVYR

SEQ ID NO: 6449 - protein, 9 aa, Homo sapiens
  misc_feature: Table A; Target 6449; HLA-A*68:01; ADAM7; ENSG00000069206; CTA
IVADDTVYR

SEQ ID NO: 6450 - protein, 9 aa, Homo sapiens
  misc_feature: Table A; Target 6450; HLA-A*68:02; ADAM7; ENSG00000069206; CTA
IVADDTVYR

SEQ ID NO: 6451 - protein, 9 aa, Homo sapiens
  misc_feature: Table A; Target 6451; HLA-B*27:02; ADAM7; ENSG00000069206; CTA
IVADDTVYR

SEQ ID NO: 6452 - protein, 9 aa, Homo sapiens
  misc_feature: Table A; Target 6452; HLA-B*27:05; ADAM7; ENSG00000069206; CTA
IVADDTVYR

SEQ ID NO: 6453 - protein, 9 aa, Homo sapiens
  misc_feature: Table A; Target 6453; HLA-B*38:01; ADAM7; ENSG00000069206; CTA
IVADDTVYR

SEQ ID NO: 6454 - protein, 9 aa, Homo sapiens
  misc_feature: Table A; Target 6454; HLA-B*57:01; ADAM7; ENSG00000069206; CTA
IVADDTVYR

SEQ ID NO: 6455 - protein, 9 aa, Homo sapiens
  misc_feature: Table A; Target 6455; HLA-C*02:02; ADAM7; ENSG00000069206; CTA
IVADDTVYR

SEQ ID NO: 6456 - protein, 9 aa, Homo sapiens
  misc_feature: Table A; Target 6456; HLA-C*07:06; ADAM7; ENSG00000069206; CTA
IVADDTVYR

SEQ ID NO: 6457 - protein, 10 aa, Homo sapiens
  misc_feature: Table A; Target 6457; HLA-A*03:02; ADAM7; ENSG00000069206; CTA
IVADDTVYRR

SEQ ID NO: 6458 - protein, 10 aa, Homo sapiens
  misc_feature: Table A; Target 6458; HLA-A*11:01; ADAM7; ENSG00000069206; CTA
IVADDTVYRR

SEQ ID NO: 6459 - protein, 10 aa, Homo sapiens
  misc_feature: Table A; Target 6459; HLA-A*31:01; ADAM7; ENSG00000069206; CTA
IVADDTVYRR

SEQ ID NO: 6460 - protein, 10 aa, Homo sapiens
  misc_feature: Table A; Target 6460; HLA-A*33:03; ADAM7; ENSG00000069206; CTA
IVADDTVYRR

SEQ ID NO: 6461 - protein, 10 aa, Homo sapiens
  misc_feature: Table A; Target 6461; HLA-A*68:01; ADAM7; ENSG00000069206; CTA
IVADDTVYRR

SEQ ID NO: 6462 - protein, 10 aa, Homo sapiens
  misc_feature: Table A; Target 6462; HLA-A*68:02; ADAM7; ENSG00000069206; CTA
IVADDTVYRR

SEQ ID NO: 6463 - protein, 10 aa, Homo sapiens
  misc_feature: Table A; Target 6463; HLA-C*07:06; ADAM7; ENSG00000069206; CTA
IVADDTVYRR

SEQ ID NO: 6464 - protein, 9 aa, Homo sapiens
  misc_feature: Table A; Target 6464; HLA-B*54:01; ADAM7; ENSG00000069206; CTA
IVHEYDSAA

SEQ ID NO: 6465 - protein, 8 aa, Homo sapiens
  misc_feature: Table A; Target 6465; HLA-B*35:03; ADAM7; ENSG00000069206; CTA
IYCTGGEL

SEQ ID NO: 6466 - protein, 8 aa, Homo sapiens
  misc_feature: Table A; Target 6466; HLA-C*01:02; ADAM7; ENSG00000069206; CTA
IYCTGGEL

SEQ ID NO: 6467 - protein, 8 aa, Homo sapiens
  misc_feature: Table A; Target 6467; HLA-C*03:03; ADAM7; ENSG00000069206; CTA
IYCTGGEL

SEQ ID NO: 6468 - protein, 8 aa, Homo sapiens
  misc_feature: Table A; Target 6468; HLA-C*03:04; ADAM7; ENSG00000069206; CTA
IYCTGGEL

SEQ ID NO: 6469 - protein, 8 aa, Homo sapiens
  misc_feature: Table A; Target 6469; HLA-C*04:01; ADAM7; ENSG00000069206; CTA
IYCTGGEL

SEQ ID NO: 6470 - protein, 8 aa, Homo sapiens
  misc_feature: Table A; Target 6470; HLA-C*14:02; ADAM7; ENSG00000069206; CTA
IYCTGGEL

SEQ ID NO: 6471 - protein, 11 aa, Homo sapiens
  misc_feature: Table A; Target 6471; HLA-A*23:01; ADAM7; ENSG00000069206; CTA
IYCTGGELSSL

SEQ ID NO: 6472 - protein, 11 aa, Homo sapiens
  misc_feature: Table A; Target 6472; HLA-A*24:02; ADAM7; ENSG00000069206; CTA
IYCTGGELSSL

SEQ ID NO: 6473 - protein, 11 aa, Homo sapiens
  misc_feature: Table A; Target 6473; HLA-C*01:02; ADAM7; ENSG00000069206; CTA
IYCTGGELSSL

SEQ ID NO: 6474 - protein, 11 aa, Homo sapiens
  misc_feature: Table A; Target 6474; HLA-C*14:02; ADAM7; ENSG00000069206; CTA
IYCTGGELSSL

SEQ ID NO: 6475 - protein, 9 aa, Homo sapiens
  misc_feature: Table A; Target 6475; HLA-A*23:01; ADAM7; ENSG00000069206; CTA
IYKTLNIHV

SEQ ID NO: 6476 - protein, 9 aa, Homo sapiens
  misc_feature: Table A; Target 6476; HLA-A*24:02; ADAM7; ENSG00000069206; CTA
IYKTLNIHV

SEQ ID NO: 6477 - protein, 11 aa, Homo sapiens
  misc_feature: Table A; Target 6477; HLA-A*23:01; ADAM7; ENSG00000069206; CTA
IYKTLNIHVTL

SEQ ID NO: 6478 - protein, 11 aa, Homo sapiens
  misc_feature: Table A; Target 6478; HLA-A*24:02; ADAM7; ENSG00000069206; CTA
IYKTLNIHVTL

SEQ ID NO: 6479 - protein, 9 aa, Homo sapiens
  misc_feature: Table A; Target 6479; HLA-C*06:02; ADAM7; ENSG00000069206; CTA
KAGSICRPA

SEQ ID NO: 6480 - protein, 10 aa, Homo sapiens
  misc_feature: Table A; Target 6480; HLA-A*30:02; ADAM7; ENSG00000069206; CTA
KCSQNQYHQY

SEQ ID NO: 6481 - protein, 10 aa, Homo sapiens
  misc_feature: Table A; Target 6481; HLA-C*16:02; ADAM7; ENSG00000069206; CTA
KCSQNQYHQY

SEQ ID NO: 6482 - protein, 8 aa, Homo sapiens
  misc_feature: Table A; Target 6482; HLA-B*37:01; ADAM7; ENSG00000069206; CTA
KDFDHVVL

SEQ ID NO: 6483 - protein, 8 aa, Homo sapiens
  misc_feature: Table A; Target 6483; HLA-B*40:01; ADAM7; ENSG00000069206; CTA
KDFDHVVL

SEQ ID NO: 6484 - protein, 8 aa, Homo sapiens
  misc_feature: Table A; Target 6484; HLA-B*40:02; ADAM7; ENSG00000069206; CTA
KDFDHVVL

SEQ ID NO: 6485 - protein, 9 aa, Homo sapiens
  misc_feature: Table A; Target 6485; HLA-A*02:01; ADAM7; ENSG00000069206; CTA
KDFDHVVLL

SEQ ID NO: 6486 - protein, 9 aa, Homo sapiens
  misc_feature: Table A; Target 6486; HLA-A*02:04; ADAM7; ENSG00000069206; CTA
KDFDHVVLL

SEQ ID NO: 6487 - protein, 9 aa, Homo sapiens
  misc_feature: Table A; Target 6487; HLA-A*02:07; ADAM7; ENSG00000069206; CTA
KDFDHVVLL

SEQ ID NO: 6488 - protein, 9 aa, Homo sapiens
  misc_feature: Table A; Target 6488; HLA-A*30:01; ADAM7; ENSG00000069206; CTA
KDFDHVVLL

SEQ ID NO: 6489 - protein, 9 aa, Homo sapiens
  misc_feature: Table A; Target 6489; HLA-A*68:02; ADAM7; ENSG00000069206; CTA
KDFDHVVLL

SEQ ID NO: 6490 - protein, 9 aa, Homo sapiens
  misc_feature: Table A; Target 6490; HLA-B*37:01; ADAM7; ENSG00000069206; CTA
KDFDHVVLL

SEQ ID NO: 6491 - protein, 9 aa, Homo sapiens
  misc_feature: Table A; Target 6491; HLA-B*40:01; ADAM7; ENSG00000069206; CTA
KDFDHVVLL

SEQ ID NO: 6492 - protein, 9 aa, Homo sapiens
  misc_feature: Table A; Target 6492; HLA-B*40:02; ADAM7; ENSG00000069206; CTA
KDFDHVVLL

SEQ ID NO: 6493 - protein, 9 aa, Homo sapiens
  misc_feature: Table A; Target 6493; HLA-B*44:03; ADAM7; ENSG00000069206; CTA
KDFDHVVLL

SEQ ID NO: 6494 - protein, 9 aa, Homo sapiens
  misc_feature: Table A; Target 6494; HLA-C*06:02; ADAM7; ENSG00000069206; CTA
KDFDHVVLL

SEQ ID NO: 6495 - protein, 9 aa, Homo sapiens
  misc_feature: Table A; Target 6495; HLA-C*07:04; ADAM7; ENSG00000069206; CTA
KDFDHVVLL

SEQ ID NO: 6496 - protein, 9 aa, Homo sapiens
  misc_feature: Table A; Target 6496; HLA-C*12:03; ADAM7; ENSG00000069206; CTA
KDFDHVVLL

SEQ ID NO: 6497 - protein, 9 aa, Homo sapiens
  misc_feature: Table A; Target 6497; HLA-B*37:01; ADAM7; ENSG00000069206; CTA
KDLLPDTNI

SEQ ID NO: 6498 - protein, 9 aa, Homo sapiens
  misc_feature: Table A; Target 6498; HLA-B*37:01; ADAM7; ENSG00000069206; CTA
KDPQKNATV

SEQ ID NO: 6499 - protein, 10 aa, Homo sapiens
  misc_feature: Table A; Target 6499; HLA-C*04:01; ADAM7; ENSG00000069206; CTA
KDPQKNATVK

SEQ ID NO: 6500 - protein, 9 aa, Homo sapiens
  misc_feature: Table A; Target 6500; HLA-B*37:01; ADAM7; ENSG00000069206; CTA
KDQFRVNGF

SEQ ID NO: 6501 - protein, 8 aa, Homo sapiens
  misc_feature: Table A; Target 6501; HLA-B*37:01; ADAM7; ENSG00000069206; CTA
KDYKPTCM

SEQ ID NO: 6502 - protein, 8 aa, Homo sapiens
  misc_feature: Table A; Target 6502; HLA-B*40:02; ADAM7; ENSG00000069206; CTA
KDYKPTCM

SEQ ID NO: 6503 - protein, 9 aa, Homo sapiens
  misc_feature: Table A; Target 6503; HLA-B*37:01; ADAM7; ENSG00000069206; CTA
KDYKPTCML

SEQ ID NO: 6504 - protein, 9 aa, Homo sapiens
  misc_feature: Table A; Target 6504; HLA-C*06:02; ADAM7; ENSG00000069206; CTA
KDYKPTCML

SEQ ID NO: 6505 - protein, 11 aa, Homo sapiens
  misc_feature: Table A; Target 6505; HLA-A*23:01; ADAM7; ENSG00000069206; CTA
KFILGVEGQQL

SEQ ID NO: 6506 - protein, 10 aa, Homo sapiens
  misc_feature: Table A; Target 6506; HLA-B*13:02; ADAM7; ENSG00000069206; CTA
KGYFGDEQQI

SEQ ID NO: 6507 - protein, 10 aa, Homo sapiens
  misc_feature: Table A; Target 6507; HLA-B*40:02; ADAM7; ENSG00000069206; CTA
KGYFGDEQQI

SEQ ID NO: 6508 - protein, 10 aa, Homo sapiens
  misc_feature: Table A; Target 6508; HLA-B*49:01; ADAM7; ENSG00000069206; CTA
KGYFGDEQQI

SEQ ID NO: 6509 - protein, 10 aa, Homo sapiens
  misc_feature: Table A; Target 6509; HLA-B*58:01; ADAM7; ENSG00000069206; CTA
KGYFGDEQQI

SEQ ID NO: 6510 - protein, 10 aa, Homo sapiens
  misc_feature: Table A; Target 6510; HLA-C*06:02; ADAM7; ENSG00000069206; CTA
KGYFGDEQQI

SEQ ID NO: 6511 - protein, 10 aa, Homo sapiens
  misc_feature: Table A; Target 6511; HLA-C*07:01; ADAM7; ENSG00000069206; CTA
KGYFGDEQQI

SEQ ID NO: 6512 - protein, 10 aa, Homo sapiens
  misc_feature: Table A; Target 6512; HLA-C*07:04; ADAM7; ENSG00000069206; CTA
KGYFGDEQQI

SEQ ID NO: 6513 - protein, 11 aa, Homo sapiens
  misc_feature: Table A; Target 6513; HLA-A*31:01; ADAM7; ENSG00000069206; CTA
KGYFGDEQQIR

SEQ ID NO: 6514 - protein, 11 aa, Homo sapiens
  misc_feature: Table A; Target 6514; HLA-B*57:01; ADAM7; ENSG00000069206; CTA
KGYFGDEQQIR

SEQ ID NO: 6515 - protein, 8 aa, Homo sapiens
  misc_feature: Table A; Target 6515; HLA-C*05:01; ADAM7; ENSG00000069206; CTA
KLDEGEEC

SEQ ID NO: 6516 - protein, 9 aa, Homo sapiens
  misc_feature: Table A; Target 6516; HLA-A*02:03; ADAM7; ENSG00000069206; CTA
KLNRKTLVL

SEQ ID NO: 6517 - protein, 9 aa, Homo sapiens
  misc_feature: Table A; Target 6517; HLA-A*03:01; ADAM7; ENSG00000069206; CTA
KLNRKTLVL

SEQ ID NO: 6518 - protein, 9 aa, Homo sapiens
  misc_feature: Table A; Target 6518; HLA-B*08:01; ADAM7; ENSG00000069206; CTA
KLNRKTLVL

SEQ ID NO: 6519 - protein, 11 aa, Homo sapiens
  misc_feature: Table A; Target 6519; HLA-A*30:01; ADAM7; ENSG00000069206; CTA
KQVQSPPTETL

SEQ ID NO: 6520 - protein, 11 aa, Homo sapiens
  misc_feature: Table A; Target 6520; HLA-A*32:01; ADAM7; ENSG00000069206; CTA
KQVQSPPTETL

SEQ ID NO: 6521 - protein, 11 aa, Homo sapiens
  misc_feature: Table A; Target 6521; HLA-B*13:02; ADAM7; ENSG00000069206; CTA
KQVQSPPTETL

SEQ ID NO: 6522 - protein, 11 aa, Homo sapiens
  misc_feature: Table A; Target 6522; HLA-B*15:01; ADAM7; ENSG00000069206; CTA
KQVQSPPTETL

SEQ ID NO: 6523 - protein, 11 aa, Homo sapiens
  misc_feature: Table A; Target 6523; HLA-B*15:03; ADAM7; ENSG00000069206; CTA
KQVQSPPTETL

SEQ ID NO: 6524 - protein, 11 aa, Homo sapiens
  misc_feature: Table A; Target 6524; HLA-B*27:05; ADAM7; ENSG00000069206; CTA
KQVQSPPTETL

SEQ ID NO: 6525 - protein, 11 aa, Homo sapiens
  misc_feature: Table A; Target 6525; HLA-B*38:01; ADAM7; ENSG00000069206; CTA
KQVQSPPTETL

SEQ ID NO: 6526 - protein, 11 aa, Homo sapiens
  misc_feature: Table A; Target 6526; HLA-B*39:01; ADAM7; ENSG00000069206; CTA
KQVQSPPTETL

SEQ ID NO: 6527 - protein, 11 aa, Homo sapiens
  misc_feature: Table A; Target 6527; HLA-B*40:01; ADAM7; ENSG00000069206; CTA
KQVQSPPTETL

SEQ ID NO: 6528 - protein, 11 aa, Homo sapiens
  misc_feature: Table A; Target 6528; HLA-B*40:02; ADAM7; ENSG00000069206; CTA
KQVQSPPTETL

SEQ ID NO: 6529 - protein, 11 aa, Homo sapiens
  misc_feature: Table A; Target 6529; HLA-B*58:01; ADAM7; ENSG00000069206; CTA
KQVQSPPTETL

SEQ ID NO: 6530 - protein, 11 aa, Homo sapiens
  misc_feature: Table A; Target 6530; HLA-C*07:04; ADAM7; ENSG00000069206; CTA
KQVQSPPTETL

SEQ ID NO: 6531 - protein, 11 aa, Homo sapiens
  misc_feature: Table A; Target 6531; HLA-C*16:04; ADAM7; ENSG00000069206; CTA
KQVQSPPTETL

SEQ ID NO: 6532 - protein, 9 aa, Homo sapiens
  misc_feature: Table A; Target 6532; HLA-A*02:01; ADAM7; ENSG00000069206; CTA
KTLNIHVTL

SEQ ID NO: 6533 - protein, 9 aa, Homo sapiens
  misc_feature: Table A; Target 6533; HLA-A*02:04; ADAM7; ENSG00000069206; CTA
KTLNIHVTL

SEQ ID NO: 6534 - protein, 9 aa, Homo sapiens
  misc_feature: Table A; Target 6534; HLA-A*02:07; ADAM7; ENSG00000069206; CTA
KTLNIHVTL

SEQ ID NO: 6535 - protein, 9 aa, Homo sapiens
  misc_feature: Table A; Target 6535; HLA-A*23:01; ADAM7; ENSG00000069206; CTA
KTLNIHVTL

SEQ ID NO: 6536 - protein, 9 aa, Homo sapiens
  misc_feature: Table A; Target 6536; HLA-A*24:02; ADAM7; ENSG00000069206; CTA
KTLNIHVTL

SEQ ID NO: 6537 - protein, 9 aa, Homo sapiens
  misc_feature: Table A; Target 6537; HLA-A*31:01; ADAM7; ENSG00000069206; CTA
KTLNIHVTL

SEQ ID NO: 6538 - protein, 9 aa, Homo sapiens
  misc_feature: Table A; Target 6538; HLA-A*32:01; ADAM7; ENSG00000069206; CTA
KTLNIHVTL

SEQ ID NO: 6539 - protein, 9 aa, Homo sapiens
  misc_feature: Table A; Target 6539; HLA-A*68:02; ADAM7; ENSG00000069206; CTA
KTLNIHVTL

SEQ ID NO: 6540 - protein, 9 aa, Homo sapiens
  misc_feature: Table A; Target 6540; HLA-B*40:02; ADAM7; ENSG00000069206; CTA
KTLNIHVTL

SEQ ID NO: 6541 - protein, 9 aa, Homo sapiens
  misc_feature: Table A; Target 6541; HLA-B*57:01; ADAM7; ENSG00000069206; CTA
KTLNIHVTL

SEQ ID NO: 6542 - protein, 9 aa, Homo sapiens
  misc_feature: Table A; Target 6542; HLA-B*58:01; ADAM7; ENSG00000069206; CTA
KTLNIHVTL

SEQ ID NO: 6543 - protein, 9 aa, Homo sapiens
  misc_feature: Table A; Target 6543; HLA-C*02:02; ADAM7; ENSG00000069206; CTA
KTLNIHVTL

SEQ ID NO: 6544 - protein, 9 aa, Homo sapiens
  misc_feature: Table A; Target 6544; HLA-C*03:03; ADAM7; ENSG00000069206; CTA
KTLNIHVTL

SEQ ID NO: 6545 - protein, 9 aa, Homo sapiens
  misc_feature: Table A; Target 6545; HLA-C*03:04; ADAM7; ENSG00000069206; CTA
KTLNIHVTL

SEQ ID NO: 6546 - protein, 9 aa, Homo sapiens
  misc_feature: Table A; Target 6546; HLA-C*07:04; ADAM7; ENSG00000069206; CTA
KTLNIHVTL

SEQ ID NO: 6547 - protein, 9 aa, Homo sapiens
  misc_feature: Table A; Target 6547; HLA-C*12:03; ADAM7; ENSG00000069206; CTA
KTLNIHVTL

SEQ ID NO: 6548 - protein, 9 aa, Homo sapiens
  misc_feature: Table A; Target 6548; HLA-C*16:01; ADAM7; ENSG00000069206; CTA
KTLNIHVTL

SEQ ID NO: 6549 - protein, 9 aa, Homo sapiens
  misc_feature: Table A; Target 6549; HLA-C*16:02; ADAM7; ENSG00000069206; CTA
KTLNIHVTL

SEQ ID NO: 6550 - protein, 9 aa, Homo sapiens
  misc_feature: Table A; Target 6550; HLA-C*16:04; ADAM7; ENSG00000069206; CTA
KTLNIHVTL

SEQ ID NO: 6551 - protein, 8 aa, Homo sapiens
  misc_feature: Table A; Target 6551; HLA-B*57:01; ADAM7; ENSG00000069206; CTA
KTLVLHLL

SEQ ID NO: 6552 - protein, 9 aa, Homo sapiens
  misc_feature: Table A; Target 6552; HLA-A*03:01; ADAM7; ENSG00000069206; CTA
KTLVLHLLR

SEQ ID NO: 6553 - protein, 9 aa, Homo sapiens
  misc_feature: Table A; Target 6553; HLA-A*31:01; ADAM7; ENSG00000069206; CTA
KTLVLHLLR

SEQ ID NO: 6554 - protein, 9 aa, Homo sapiens
  misc_feature: Table A; Target 6554; HLA-B*57:01; ADAM7; ENSG00000069206; CTA
KTLVLHLLR

SEQ ID NO: 6555 - protein, 9 aa, Homo sapiens
  misc_feature: Table A; Target 6555; HLA-A*01:01; ADAM7; ENSG00000069206; CTA
KTYEEELLY

SEQ ID NO: 6556 - protein, 9 aa, Homo sapiens
  misc_feature: Table A; Target 6556; HLA-A*03:01; ADAM7; ENSG00000069206; CTA
KTYEEELLY

SEQ ID NO: 6557 - protein, 9 aa, Homo sapiens
  misc_feature: Table A; Target 6557; HLA-A*11:01; ADAM7; ENSG00000069206; CTA
KTYEEELLY

SEQ ID NO: 6558 - protein, 9 aa, Homo sapiens
  misc_feature: Table A; Target 6558; HLA-A*26:01; ADAM7; ENSG00000069206; CTA
KTYEEELLY

SEQ ID NO: 6559 - protein, 9 aa, Homo sapiens
  misc_feature: Table A; Target 6559; HLA-A*29:02; ADAM7; ENSG00000069206; CTA
KTYEEELLY

SEQ ID NO: 6560 - protein, 9 aa, Homo sapiens
  misc_feature: Table A; Target 6560; HLA-A*30:02; ADAM7; ENSG00000069206; CTA
KTYEEELLY

SEQ ID NO: 6561 - protein, 9 aa, Homo sapiens
  misc_feature: Table A; Target 6561; HLA-B*15:01; ADAM7; ENSG00000069206; CTA
KTYEEELLY

SEQ ID NO: 6562 - protein, 9 aa, Homo sapiens
  misc_feature: Table A; Target 6562; HLA-B*15:03; ADAM7; ENSG00000069206; CTA
KTYEEELLY

SEQ ID NO: 6563 - protein, 9 aa, Homo sapiens
  misc_feature: Table A; Target 6563; HLA-B*57:01; ADAM7; ENSG00000069206; CTA
KTYEEELLY

SEQ ID NO: 6564 - protein, 9 aa, Homo sapiens
  misc_feature: Table A; Target 6564; HLA-B*58:01; ADAM7; ENSG00000069206; CTA
KTYEEELLY

SEQ ID NO: 6565 - protein, 9 aa, Homo sapiens
  misc_feature: Table A; Target 6565; HLA-C*02:02; ADAM7; ENSG00000069206; CTA
KTYEEELLY

SEQ ID NO: 6566 - protein, 9 aa, Homo sapiens
  misc_feature: Table A; Target 6566; HLA-C*12:03; ADAM7; ENSG00000069206; CTA
KTYEEELLY

SEQ ID NO: 6567 - protein, 11 aa, Homo sapiens
  misc_feature: Table A; Target 6567; HLA-A*02:01; ADAM7; ENSG00000069206; CTA
KTYEEELLYEI

SEQ ID NO: 6568 - protein, 11 aa, Homo sapiens
  misc_feature: Table A; Target 6568; HLA-A*68:02; ADAM7; ENSG00000069206; CTA
KTYEEELLYEI

SEQ ID NO: 6569 - protein, 10 aa, Homo sapiens
  misc_feature: Table A; Target 6569; HLA-A*03:01; ADAM7; ENSG00000069206; CTA
KTYHLKDPQK

SEQ ID NO: 6570 - protein, 10 aa, Homo sapiens
  misc_feature: Table A; Target 6570; HLA-A*03:02; ADAM7; ENSG00000069206; CTA
KTYHLKDPQK

SEQ ID NO: 6571 - protein, 10 aa, Homo sapiens
  misc_feature: Table A; Target 6571; HLA-A*11:01; ADAM7; ENSG00000069206; CTA
KTYHLKDPQK

SEQ ID NO: 6572 - protein, 10 aa, Homo sapiens
  misc_feature: Table A; Target 6572; HLA-C*06:02; ADAM7; ENSG00000069206; CTA
KVYISTNCPS

SEQ ID NO: 6573 - protein, 11 aa, Homo sapiens
  misc_feature: Table A; Target 6573; HLA-A*23:01; ADAM7; ENSG00000069206; CTA
KYSDEGEHLVF

SEQ ID NO: 6574 - protein, 11 aa, Homo sapiens
  misc_feature: Table A; Target 6574; HLA-A*24:02; ADAM7; ENSG00000069206; CTA
KYSDEGEHLVF

SEQ ID NO: 6575 - protein, 11 aa, Homo sapiens
  misc_feature: Table A; Target 6575; HLA-A*29:02; ADAM7; ENSG00000069206; CTA
KYSDEGEHLVF

SEQ ID NO: 6576 - protein, 9 aa, Homo sapiens
  misc_feature: Table A; Target 6576; HLA-C*04:01; ADAM7; ENSG00000069206; CTA
LFDDEAIES

SEQ ID NO: 6577 - protein, 10 aa, Homo sapiens
  misc_feature: Table A; Target 6577; HLA-A*29:02; ADAM7; ENSG00000069206; CTA
LFIVADDTVY

SEQ ID NO: 6578 - protein, 10 aa, Homo sapiens
  misc_feature: Table A; Target 6578; HLA-B*15:01; ADAM7; ENSG00000069206; CTA
LFIVADDTVY

SEQ ID NO: 6579 - protein, 10 aa, Homo sapiens
  misc_feature: Table A; Target 6579; HLA-C*14:02; ADAM7; ENSG00000069206; CTA
LFIVADDTVY

SEQ ID NO: 6580 - protein, 8 aa, Homo sapiens
  misc_feature: Table A; Target 6580; HLA-B*08:01; ADAM7; ENSG00000069206; CTA
LGMQHDEF

SEQ ID NO: 6581 - protein, 9 aa, Homo sapiens
  misc_feature: Table A; Target 6581; HLA-B*27:05; ADAM7; ENSG00000069206; CTA
LGSNYSETF

SEQ ID NO: 6582 - protein, 9 aa, Homo sapiens
  misc_feature: Table A; Target 6582; HLA-C*02:02; ADAM7; ENSG00000069206; CTA
LGSNYSETF

SEQ ID NO: 6583 - protein, 9 aa, Homo sapiens
  misc_feature: Table A; Target 6583; HLA-C*07:04; ADAM7; ENSG00000069206; CTA
LGSNYSETF

SEQ ID NO: 6584 - protein, 10 aa, Homo sapiens
  misc_feature: Table A; Target 6584; HLA-B*27:02; ADAM7; ENSG00000069206; CTA
LGSNYSETFY

SEQ ID NO: 6585 - protein, 10 aa, Homo sapiens
  misc_feature: Table A; Target 6585; HLA-B*39:01; ADAM7; ENSG00000069206; CTA
LGSNYSETFY

SEQ ID NO: 6586 - protein, 10 aa, Homo sapiens
  misc_feature: Table A; Target 6586; HLA-C*04:01; ADAM7; ENSG00000069206; CTA
LGSNYSETFY

SEQ ID NO: 6587 - protein, 10 aa, Homo sapiens
  misc_feature: Table A; Target 6587; HLA-C*07:01; ADAM7; ENSG00000069206; CTA
LGSNYSETFY

SEQ ID NO: 6588 - protein, 10 aa, Homo sapiens
  misc_feature: Table A; Target 6588; HLA-C*07:04; ADAM7; ENSG00000069206; CTA
LGSNYSETFY

SEQ ID NO: 6589 - protein, 8 aa, Homo sapiens
  misc_feature: Table A; Target 6589; HLA-C*03:03; ADAM7; ENSG00000069206; CTA
LGVEGQQL

SEQ ID NO: 6590 - protein, 8 aa, Homo sapiens
  misc_feature: Table A; Target 6590; HLA-C*03:04; ADAM7; ENSG00000069206; CTA
LGVEGQQL

SEQ ID NO: 6591 - protein, 8 aa, Homo sapiens
  misc_feature: Table A; Target 6591; HLA-C*05:01; ADAM7; ENSG00000069206; CTA
LGVEGQQL

SEQ ID NO: 6592 - protein, 8 aa, Homo sapiens
  misc_feature: Table A; Target 6592; HLA-C*16:01; ADAM7; ENSG00000069206; CTA
LGVEGQQL

SEQ ID NO: 6593 - protein, 9 aa, Homo sapiens
  misc_feature: Table A; Target 6593; HLA-C*02:02; ADAM7; ENSG00000069206; CTA
LGVENKGYF

SEQ ID NO: 6594 - protein, 9 aa, Homo sapiens
  misc_feature: Table A; Target 6594; HLA-B*38:01; ADAM7; ENSG00000069206; CTA
LHVTNITIL

SEQ ID NO: 6595 - protein, 9 aa, Homo sapiens
  misc_feature: Table A; Target 6595; HLA-A*24:02; ADAM7; ENSG00000069206; CTA
LIPQVKEKF

SEQ ID NO: 6596 - protein, 8 aa, Homo sapiens
  misc_feature: Table A; Target 6596; HLA-C*03:03; ADAM7; ENSG00000069206; CTA
LLGEDKTY

SEQ ID NO: 6597 - protein, 10 aa, Homo sapiens
  misc_feature: Table A; Target 6597; HLA-A*02:03; ADAM7; ENSG00000069206; CTA
LLGEDKTYHL

SEQ ID NO: 6598 - protein, 10 aa, Homo sapiens
  misc_feature: Table A; Target 6598; HLA-A*02:04; ADAM7; ENSG00000069206; CTA
LLGEDKTYHL

SEQ ID NO: 6599 - protein, 10 aa, Homo sapiens
  misc_feature: Table A; Target 6599; HLA-A*02:07; ADAM7; ENSG00000069206; CTA
LLGEDKTYHL

SEQ ID NO: 6600 - protein, 9 aa, Homo sapiens
  misc_feature: Table A; Target 6600; HLA-A*03:01; ADAM7; ENSG00000069206; CTA
LLIPQVKEK

SEQ ID NO: 6601 - protein, 9 aa, Homo sapiens
  misc_feature: Table A; Target 6601; HLA-A*03:02; ADAM7; ENSG00000069206; CTA
LLIPQVKEK

SEQ ID NO: 6602 - protein, 9 aa, Homo sapiens
  misc_feature: Table A; Target 6602; HLA-A*02:07; ADAM7; ENSG00000069206; CTA
LLPDTNIIA

SEQ ID NO: 6603 - protein, 10 aa, Homo sapiens
  misc_feature: Table A; Target 6603; HLA-A*02:07; ADAM7; ENSG00000069206; CTA
LLPDTNIIAN

SEQ ID NO: 6604 - protein, 10 aa, Homo sapiens
  misc_feature: Table A; Target 6604; HLA-C*04:01; ADAM7; ENSG00000069206; CTA
LLPDTNIIAN

SEQ ID NO: 6605 - protein, 10 aa, Homo sapiens
  misc_feature: Table A; Target 6605; HLA-C*07:01; ADAM7; ENSG00000069206; CTA
LLPDTNIIAN

SEQ ID NO: 6606 - protein, 11 aa, Homo sapiens
  misc_feature: Table A; Target 6606; HLA-A*02:07; ADAM7; ENSG00000069206; CTA
LLPDTNIIANR

SEQ ID NO: 6607 - protein, 11 aa, Homo sapiens
  misc_feature: Table A; Target 6607; HLA-A*03:01; ADAM7; ENSG00000069206; CTA
LLPDTNIIANR

SEQ ID NO: 6608 - protein, 11 aa, Homo sapiens
  misc_feature: Table A; Target 6608; HLA-A*31:01; ADAM7; ENSG00000069206; CTA
LLPDTNIIANR

SEQ ID NO: 6609 - protein, 11 aa, Homo sapiens
  misc_feature: Table A; Target 6609; HLA-A*33:03; ADAM7; ENSG00000069206; CTA
LLPDTNIIANR

SEQ ID NO: 6610 - protein, 11 aa, Homo sapiens
  misc_feature: Table A; Target 6610; HLA-A*68:01; ADAM7; ENSG00000069206; CTA
LLPDTNIIANR

SEQ ID NO: 6611 - protein, 11 aa, Homo sapiens
  misc_feature: Table A; Target 6611; HLA-A*68:02; ADAM7; ENSG00000069206; CTA
LLPDTNIIANR

SEQ ID NO: 6612 - protein, 9 aa, Homo sapiens
  misc_feature: Table A; Target 6612; HLA-A*03:01; ADAM7; ENSG00000069206; CTA
LLYEIKLNR

SEQ ID NO: 6613 - protein, 9 aa, Homo sapiens
  misc_feature: Table A; Target 6613; HLA-A*29:02; ADAM7; ENSG00000069206; CTA
LLYEIKLNR

SEQ ID NO: 6614 - protein, 9 aa, Homo sapiens
  misc_feature: Table A; Target 6614; HLA-A*31:01; ADAM7; ENSG00000069206; CTA
LLYEIKLNR

SEQ ID NO: 6615 - protein, 10 aa, Homo sapiens
  misc_feature: Table A; Target 6615; HLA-A*03:01; ADAM7; ENSG00000069206; CTA
LLYEIKLNRK

SEQ ID NO: 6616 - protein, 9 aa, Homo sapiens
  misc_feature: Table A; Target 6616; HLA-A*02:01; ADAM7; ENSG00000069206; CTA
LMILLIPQV

SEQ ID NO: 6617 - protein, 9 aa, Homo sapiens
  misc_feature: Table A; Target 6617; HLA-A*02:03; ADAM7; ENSG00000069206; CTA
LMILLIPQV

SEQ ID NO: 6618 - protein, 9 aa, Homo sapiens
  misc_feature: Table A; Target 6618; HLA-A*02:04; ADAM7; ENSG00000069206; CTA
LMILLIPQV

SEQ ID NO: 6619 - protein, 9 aa, Homo sapiens
  misc_feature: Table A; Target 6619; HLA-A*02:07; ADAM7; ENSG00000069206; CTA
LMILLIPQV

SEQ ID NO: 6620 - protein, 9 aa, Homo sapiens
  misc_feature: Table A; Target 6620; HLA-A*23:01; ADAM7; ENSG00000069206; CTA
LNIPFPYNF

SEQ ID NO: 6621 - protein, 9 aa, Homo sapiens
  misc_feature: Table A; Target 6621; HLA-A*24:02; ADAM7; ENSG00000069206; CTA
LNIPFPYNF

SEQ ID NO: 6622 - protein, 9 aa, Homo sapiens
  misc_feature: Table A; Target 6622; HLA-A*29:02; ADAM7; ENSG00000069206; CTA
LNIPFPYNF

SEQ ID NO: 6623 - protein, 9 aa, Homo sapiens
  misc_feature: Table A; Target 6623; HLA-B*57:01; ADAM7; ENSG00000069206; CTA
LNIPFPYNF

SEQ ID NO: 6624 - protein, 8 aa, Homo sapiens
  misc_feature: Table A; Target 6624; HLA-B*08:01; ADAM7; ENSG00000069206; CTA
LNMEKVYI

SEQ ID NO: 6625 - protein, 8 aa, Homo sapiens
  misc_feature: Table A; Target 6625; HLA-B*55:01; ADAM7; ENSG00000069206; CTA
LPDTNIIA

SEQ ID NO: 6626 - protein, 8 aa, Homo sapiens
  misc_feature: Table A; Target 6626; HLA-B*56:01; ADAM7; ENSG00000069206; CTA
LPDTNIIA

SEQ ID NO: 6627 - protein, 9 aa, Homo sapiens
  misc_feature: Table A; Target 6627; HLA-B*35:01; ADAM7; ENSG00000069206; CTA
LPDTNIIAN

SEQ ID NO: 6628 - protein, 9 aa, Homo sapiens
  misc_feature: Table A; Target 6628; HLA-B*35:03; ADAM7; ENSG00000069206; CTA
LPDTNIIAN

SEQ ID NO: 6629 - protein, 9 aa, Homo sapiens
  misc_feature: Table A; Target 6629; HLA-B*55:01; ADAM7; ENSG00000069206; CTA
LPDTNIIAN

SEQ ID NO: 6630 - protein, 10 aa, Homo sapiens
  misc_feature: Table A; Target 6630; HLA-A*33:03; ADAM7; ENSG00000069206; CTA
LPDTNIIANR

SEQ ID NO: 6631 - protein, 10 aa, Homo sapiens
  misc_feature: Table A; Target 6631; HLA-A*68:01; ADAM7; ENSG00000069206; CTA
LPDTNIIANR

SEQ ID NO: 6632 - protein, 10 aa, Homo sapiens
  misc_feature: Table A; Target 6632; HLA-B*27:02; ADAM7; ENSG00000069206; CTA
LPDTNIIANR

SEQ ID NO: 6633 - protein, 10 aa, Homo sapiens
  misc_feature: Table A; Target 6633; HLA-C*07:06; ADAM7; ENSG00000069206; CTA
LPDTNIIANR

SEQ ID NO: 6634 - protein, 11 aa, Homo sapiens
  misc_feature: Table A; Target 6634; HLA-B*35:01; ADAM7; ENSG00000069206; CTA
LPDTNIIANRM

SEQ ID NO: 6635 - protein, 11 aa, Homo sapiens
  misc_feature: Table A; Target 6635; HLA-B*35:03; ADAM7; ENSG00000069206; CTA
LPDTNIIANRM

SEQ ID NO: 6636 - protein, 11 aa, Homo sapiens
  misc_feature: Table A; Target 6636; HLA-B*55:01; ADAM7; ENSG00000069206; CTA
LPDTNIIANRM

SEQ ID NO: 6637 - protein, 9 aa, Homo sapiens
  misc_feature: Table A; Target 6637; HLA-B*51:01; ADAM7; ENSG00000069206; CTA
LPGCIFLMI

SEQ ID NO: 6638 - protein, 8 aa, Homo sapiens
  misc_feature: Table A; Target 6638; HLA-B*08:01; ADAM7; ENSG00000069206; CTA
LPYYSTSI

SEQ ID NO: 6639 - protein, 8 aa, Homo sapiens
  misc_feature: Table A; Target 6639; HLA-B*35:01; ADAM7; ENSG00000069206; CTA
LPYYSTSI

SEQ ID NO: 6640 - protein, 8 aa, Homo sapiens
  misc_feature: Table A; Target 6640; HLA-B*35:03; ADAM7; ENSG00000069206; CTA
LPYYSTSI

SEQ ID NO: 6641 - protein, 8 aa, Homo sapiens
  misc_feature: Table A; Target 6641; HLA-B*54:01; ADAM7; ENSG00000069206; CTA
LPYYSTSI

SEQ ID NO: 6642 - protein, 8 aa, Homo sapiens
  misc_feature: Table A; Target 6642; HLA-B*56:01; ADAM7; ENSG00000069206; CTA
LPYYSTSI

SEQ ID NO: 6643 - protein, 9 aa, Homo sapiens
  misc_feature: Table A; Target 6643; HLA-B*35:03; ADAM7; ENSG00000069206; CTA
LPYYSTSII

SEQ ID NO: 6644 - protein, 9 aa, Homo sapiens
  misc_feature: Table A; Target 6644; HLA-B*54:01; ADAM7; ENSG00000069206; CTA
LPYYSTSII

SEQ ID NO: 6645 - protein, 9 aa, Homo sapiens
  misc_feature: Table A; Target 6645; HLA-B*56:01; ADAM7; ENSG00000069206; CTA
LPYYSTSII

SEQ ID NO: 6646 - protein, 10 aa, Homo sapiens
  misc_feature: Table A; Target 6646; HLA-B*51:01; ADAM7; ENSG00000069206; CTA
LPYYSTSIIK

SEQ ID NO: 6647 - protein, 9 aa, Homo sapiens
  misc_feature: Table A; Target 6647; HLA-A*29:02; ADAM7; ENSG00000069206; CTA
LRVPYGANY

SEQ ID NO: 6648 - protein, 9 aa, Homo sapiens
  misc_feature: Table A; Target 6648; HLA-A*30:02; ADAM7; ENSG00000069206; CTA
LRVPYGANY

SEQ ID NO: 6649 - protein, 9 aa, Homo sapiens
  misc_feature: Table A; Target 6649; HLA-B*27:02; ADAM7; ENSG00000069206; CTA
LRVPYGANY

SEQ ID NO: 6650 - protein, 9 aa, Homo sapiens
  misc_feature: Table A; Target 6650; HLA-B*27:05; ADAM7; ENSG00000069206; CTA
LRVPYGANY

SEQ ID NO: 6651 - protein, 9 aa, Homo sapiens
  misc_feature: Table A; Target 6651; HLA-B*39:01; ADAM7; ENSG00000069206; CTA
LRVPYGANY

SEQ ID NO: 6652 - protein, 9 aa, Homo sapiens
  misc_feature: Table A; Target 6652; HLA-C*02:02; ADAM7; ENSG00000069206; CTA
LRVPYGANY

SEQ ID NO: 6653 - protein, 9 aa, Homo sapiens
  misc_feature: Table A; Target 6653; HLA-C*06:02; ADAM7; ENSG00000069206; CTA
LRVPYGANY

SEQ ID NO: 6654 - protein, 9 aa, Homo sapiens
  misc_feature: Table A; Target 6654; HLA-C*07:01; ADAM7; ENSG00000069206; CTA
LRVPYGANY

SEQ ID NO: 6655 - protein, 9 aa, Homo sapiens
  misc_feature: Table A; Target 6655; HLA-C*16:04; ADAM7; ENSG00000069206; CTA
LRVPYGANY

SEQ ID NO: 6656 - protein, 11 aa, Homo sapiens
  misc_feature: Table A; Target 6656; HLA-A*01:01; ADAM7; ENSG00000069206; CTA
LSSLLGEDKTY

SEQ ID NO: 6657 - protein, 11 aa, Homo sapiens
  misc_feature: Table A; Target 6657; HLA-C*07:01; ADAM7; ENSG00000069206; CTA
LSSLLGEDKTY

SEQ ID NO: 6658 - protein, 11 aa, Homo sapiens
  misc_feature: Table A; Target 6658; HLA-C*12:03; ADAM7; ENSG00000069206; CTA
LSSLLGEDKTY

SEQ ID NO: 6659 - protein, 11 aa, Homo sapiens
  misc_feature: Table A; Target 6659; HLA-C*16:02; ADAM7; ENSG00000069206; CTA
LSSLLGEDKTY

SEQ ID NO: 6660 - protein, 9 aa, Homo sapiens
  misc_feature: Table A; Target 6660; HLA-A*25:01; ADAM7; ENSG00000069206; CTA
LVIVGIGVL

SEQ ID NO: 6661 - protein, 9 aa, Homo sapiens
  misc_feature: Table A; Target 6661; HLA-C*03:03; ADAM7; ENSG00000069206; CTA
LVIVGIGVL

SEQ ID NO: 6662 - protein, 9 aa, Homo sapiens
  misc_feature: Table A; Target 6662; HLA-C*03:04; ADAM7; ENSG00000069206; CTA
LVIVGIGVL

SEQ ID NO: 6663 - protein, 8 aa, Homo sapiens
  misc_feature: Table A; Target 6663; HLA-C*14:02; ADAM7; ENSG00000069206; CTA
LYHDSTDI

SEQ ID NO: 6664 - protein, 10 aa, Homo sapiens
  misc_feature: Table A; Target 6664; HLA-C*14:02; ADAM7; ENSG00000069206; CTA
LYHDSTDIGL

SEQ ID NO: 6665 - protein, 10 aa, Homo sapiens
  misc_feature: Table A; Target 6665; HLA-A*23:01; ADAM7; ENSG00000069206; CTA
LYSHVQGISY

SEQ ID NO: 6666 - protein, 10 aa, Homo sapiens
  misc_feature: Table A; Target 6666; HLA-A*24:02; ADAM7; ENSG00000069206; CTA
LYSHVQGISY

SEQ ID NO: 6667 - protein, 10 aa, Homo sapiens
  misc_feature: Table A; Target 6667; HLA-A*29:02; ADAM7; ENSG00000069206; CTA
LYSHVQGISY

SEQ ID NO: 6668 - protein, 10 aa, Homo sapiens
  misc_feature: Table A; Target 6668; HLA-A*30:02; ADAM7; ENSG00000069206; CTA
LYSHVQGISY

SEQ ID NO: 6669 - protein, 10 aa, Homo sapiens
  misc_feature: Table A; Target 6669; HLA-B*46:01; ADAM7; ENSG00000069206; CTA
LYSHVQGISY

SEQ ID NO: 6670 - protein, 10 aa, Homo sapiens
  misc_feature: Table A; Target 6670; HLA-B*58:01; ADAM7; ENSG00000069206; CTA
LYSHVQGISY

SEQ ID NO: 6671 - protein, 10 aa, Homo sapiens
  misc_feature: Table A; Target 6671; HLA-C*01:02; ADAM7; ENSG00000069206; CTA
LYSHVQGISY

SEQ ID NO: 6672 - protein, 10 aa, Homo sapiens
  misc_feature: Table A; Target 6672; HLA-C*04:01; ADAM7; ENSG00000069206; CTA
LYSHVQGISY

SEQ ID NO: 6673 - protein, 10 aa, Homo sapiens
  misc_feature: Table A; Target 6673; HLA-C*07:01; ADAM7; ENSG00000069206; CTA
LYSHVQGISY

SEQ ID NO: 6674 - protein, 10 aa, Homo sapiens
  misc_feature: Table A; Target 6674; HLA-C*07:02; ADAM7; ENSG00000069206; CTA
LYSHVQGISY

SEQ ID NO: 6675 - protein, 10 aa, Homo sapiens
  misc_feature: Table A; Target 6675; HLA-C*14:02; ADAM7; ENSG00000069206; CTA
LYSHVQGISY

SEQ ID NO: 6676 - protein, 9 aa, Homo sapiens
  misc_feature: Table A; Target 6676; HLA-A*23:01; ADAM7; ENSG00000069206; CTA
LYSNIETTL

SEQ ID NO: 6677 - protein, 9 aa, Homo sapiens
  misc_feature: Table A; Target 6677; HLA-A*24:02; ADAM7; ENSG00000069206; CTA
LYSNIETTL

SEQ ID NO: 6678 - protein, 9 aa, Homo sapiens
  misc_feature: Table A; Target 6678; HLA-A*32:01; ADAM7; ENSG00000069206; CTA
LYSNIETTL

SEQ ID NO: 6679 - protein, 9 aa, Homo sapiens
  misc_feature: Table A; Target 6679; HLA-B*35:03; ADAM7; ENSG00000069206; CTA
LYSNIETTL

SEQ ID NO: 6680 - protein, 9 aa, Homo sapiens
  misc_feature: Table A; Target 6680; HLA-B*38:01; ADAM7; ENSG00000069206; CTA
LYSNIETTL

SEQ ID NO: 6681 - protein, 9 aa, Homo sapiens
  misc_feature: Table A; Target 6681; HLA-B*58:01; ADAM7; ENSG00000069206; CTA
LYSNIETTL

SEQ ID NO: 6682 - protein, 9 aa, Homo sapiens
  misc_feature: Table A; Target 6682; HLA-C*02:02; ADAM7; ENSG00000069206; CTA
LYSNIETTL

SEQ ID NO: 6683 - protein, 9 aa, Homo sapiens
  misc_feature: Table A; Target 6683; HLA-C*04:01; ADAM7; ENSG00000069206; CTA
LYSNIETTL

SEQ ID NO: 6684 - protein, 9 aa, Homo sapiens
  misc_feature: Table A; Target 6684; HLA-C*07:04; ADAM7; ENSG00000069206; CTA
LYSNIETTL

SEQ ID NO: 6685 - protein, 9 aa, Homo sapiens
  misc_feature: Table A; Target 6685; HLA-C*14:02; ADAM7; ENSG00000069206; CTA
LYSNIETTL

SEQ ID NO: 6686 - protein, 9 aa, Homo sapiens
  misc_feature: Table A; Target 6686; HLA-C*16:01; ADAM7; ENSG00000069206; CTA
LYSNIETTL

SEQ ID NO: 6687 - protein, 9 aa, Homo sapiens
  misc_feature: Table A; Target 6687; HLA-C*16:02; ADAM7; ENSG00000069206; CTA
LYSNIETTL

SEQ ID NO: 6688 - protein, 10 aa, Homo sapiens
  misc_feature: Table A; Target 6688; HLA-A*23:01; ADAM7; ENSG00000069206; CTA
LYSNIETTLL

SEQ ID NO: 6689 - protein, 10 aa, Homo sapiens
  misc_feature: Table A; Target 6689; HLA-A*24:02; ADAM7; ENSG00000069206; CTA
LYSNIETTLL

SEQ ID NO: 6690 - protein, 9 aa, Homo sapiens
  misc_feature: Table A; Target 6690; HLA-A*33:03; ADAM7; ENSG00000069206; CTA
MAHQLGHNL

SEQ ID NO: 6691 - protein, 9 aa, Homo sapiens
  misc_feature: Table A; Target 6691; HLA-A*68:02; ADAM7; ENSG00000069206; CTA
MAHQLGHNL

SEQ ID NO: 6692 - protein, 9 aa, Homo sapiens
  misc_feature: Table A; Target 6692; HLA-B*08:01; ADAM7; ENSG00000069206; CTA
MAHQLGHNL

SEQ ID NO: 6693 - protein, 9 aa, Homo sapiens
  misc_feature: Table A; Target 6693; HLA-B*35:01; ADAM7; ENSG00000069206; CTA
MAHQLGHNL

SEQ ID NO: 6694 - protein, 9 aa, Homo sapiens
  misc_feature: Table A; Target 6694; HLA-B*35:03; ADAM7; ENSG00000069206; CTA
MAHQLGHNL

SEQ ID NO: 6695 - protein, 9 aa, Homo sapiens
  misc_feature: Table A; Target 6695; HLA-B*38:01; ADAM7; ENSG00000069206; CTA
MAHQLGHNL

SEQ ID NO: 6696 - protein, 9 aa, Homo sapiens
  misc_feature: Table A; Target 6696; HLA-B*54:01; ADAM7; ENSG00000069206; CTA
MAHQLGHNL

SEQ ID NO: 6697 - protein, 9 aa, Homo sapiens
  misc_feature: Table A; Target 6697; HLA-C*02:02; ADAM7; ENSG00000069206; CTA
MAHQLGHNL

SEQ ID NO: 6698 - protein, 9 aa, Homo sapiens
  misc_feature: Table A; Target 6698; HLA-C*03:03; ADAM7; ENSG00000069206; CTA
MAHQLGHNL

SEQ ID NO: 6699 - protein, 9 aa, Homo sapiens
  misc_feature: Table A; Target 6699; HLA-C*03:04; ADAM7; ENSG00000069206; CTA
MAHQLGHNL

SEQ ID NO: 6700 - protein, 9 aa, Homo sapiens
  misc_feature: Table A; Target 6700; HLA-C*04:01; ADAM7; ENSG00000069206; CTA
MAHQLGHNL

SEQ ID NO: 6701 - protein, 9 aa, Homo sapiens
  misc_feature: Table A; Target 6701; HLA-C*06:02; ADAM7; ENSG00000069206; CTA
MAHQLGHNL

SEQ ID NO: 6702 - protein, 9 aa, Homo sapiens
  misc_feature: Table A; Target 6702; HLA-C*07:04; ADAM7; ENSG00000069206; CTA
MAHQLGHNL

SEQ ID NO: 6703 - protein, 9 aa, Homo sapiens
  misc_feature: Table A; Target 6703; HLA-C*16:01; ADAM7; ENSG00000069206; CTA
MAHQLGHNL

SEQ ID NO: 6704 - protein, 9 aa, Homo sapiens
  misc_feature: Table A; Target 6704; HLA-C*16:02; ADAM7; ENSG00000069206; CTA
MAHQLGHNL

SEQ ID NO: 6705 - protein, 10 aa, Homo sapiens
  misc_feature: Table A; Target 6705; HLA-A*25:01; ADAM7; ENSG00000069206; CTA
MDSDGSIPAL

SEQ ID NO: 6706 - protein, 10 aa, Homo sapiens
  misc_feature: Table A; Target 6706; HLA-A*30:01; ADAM7; ENSG00000069206; CTA
MDSDGSIPAL

SEQ ID NO: 6707 - protein, 10 aa, Homo sapiens
  misc_feature: Table A; Target 6707; HLA-A*68:02; ADAM7; ENSG00000069206; CTA
MDSDGSIPAL

SEQ ID NO: 6708 - protein, 10 aa, Homo sapiens
  misc_feature: Table A; Target 6708; HLA-B*35:03; ADAM7; ENSG00000069206; CTA
MDSDGSIPAL

SEQ ID NO: 6709 - protein, 10 aa, Homo sapiens
  misc_feature: Table A; Target 6709; HLA-B*38:01; ADAM7; ENSG00000069206; CTA
MDSDGSIPAL

SEQ ID NO: 6710 - protein, 10 aa, Homo sapiens
  misc_feature: Table A; Target 6710; HLA-B*39:01; ADAM7; ENSG00000069206; CTA
MDSDGSIPAL

SEQ ID NO: 6711 - protein, 10 aa, Homo sapiens
  misc_feature: Table A; Target 6711; HLA-B*40:01; ADAM7; ENSG00000069206; CTA
MDSDGSIPAL

SEQ ID NO: 6712 - protein, 8 aa, Homo sapiens
  misc_feature: Table A; Target 6712; HLA-A*02:04; ADAM7; ENSG00000069206; CTA
MILLIPQV

SEQ ID NO: 6713 - protein, 8 aa, Homo sapiens
  misc_feature: Table A; Target 6713; HLA-B*51:01; ADAM7; ENSG00000069206; CTA
MILLIPQV

SEQ ID NO: 6714 - protein, 8 aa, Homo sapiens
  misc_feature: Table A; Target 6714; HLA-B*54:01; ADAM7; ENSG00000069206; CTA
MILLIPQV

SEQ ID NO: 6715 - protein, 8 aa, Homo sapiens
  misc_feature: Table A; Target 6715; HLA-B*51:01; ADAM7; ENSG00000069206; CTA
MIYKTLNI

SEQ ID NO: 6716 - protein, 10 aa, Homo sapiens
  misc_feature: Table A; Target 6716; HLA-A*68:02; ADAM7; ENSG00000069206; CTA
MIYKTLNIHV

SEQ ID NO: 6717 - protein, 8 aa, Homo sapiens
  misc_feature: Table A; Target 6717; HLA-B*51:01; ADAM7; ENSG00000069206; CTA
MVNFVNMI

SEQ ID NO: 6718 - protein, 9 aa, Homo sapiens
  misc_feature: Table A; Target 6718; HLA-A*01:01; ADAM7; ENSG00000069206; CTA
MVNFVNMIY

SEQ ID NO: 6719 - protein, 9 aa, Homo sapiens
  misc_feature: Table A; Target 6719; HLA-A*29:02; ADAM7; ENSG00000069206; CTA
MVNFVNMIY

SEQ ID NO: 6720 - protein, 9 aa, Homo sapiens
  misc_feature: Table A; Target 6720; HLA-A*30:02; ADAM7; ENSG00000069206; CTA
MVNFVNMIY

SEQ ID NO: 6721 - protein, 9 aa, Homo sapiens
  misc_feature: Table A; Target 6721; HLA-B*35:01; ADAM7; ENSG00000069206; CTA
MVNFVNMIY

SEQ ID NO: 6722 - protein, 10 aa, Homo sapiens
  misc_feature: Table A; Target 6722; HLA-A*03:01; ADAM7; ENSG00000069206; CTA
MVNFVNMIYK

SEQ ID NO: 6723 - protein, 10 aa, Homo sapiens
  misc_feature: Table A; Target 6723; HLA-A*03:02; ADAM7; ENSG00000069206; CTA
MVNFVNMIYK

SEQ ID NO: 6724 - protein, 10 aa, Homo sapiens
  misc_feature: Table A; Target 6724; HLA-A*11:01; ADAM7; ENSG00000069206; CTA
MVNFVNMIYK

SEQ ID NO: 6725 - protein, 10 aa, Homo sapiens
  misc_feature: Table A; Target 6725; HLA-B*27:02; ADAM7; ENSG00000069206; CTA
MVNFVNMIYK

SEQ ID NO: 6726 - protein, 9 aa, Homo sapiens
  misc_feature: Table A; Target 6726; HLA-C*16:02; ADAM7; ENSG00000069206; CTA
NATVKCKTI

SEQ ID NO: 6727 - protein, 8 aa, Homo sapiens
  misc_feature: Table A; Target 6727; HLA-B*18:01; ADAM7; ENSG00000069206; CTA
NENPVDGH

SEQ ID NO: 6728 - protein, 10 aa, Homo sapiens
  misc_feature: Table A; Target 6728; HLA-A*30:01; ADAM7; ENSG00000069206; CTA
NENPVDGHGL

SEQ ID NO: 6729 - protein, 10 aa, Homo sapiens
  misc_feature: Table A; Target 6729; HLA-B*18:01; ADAM7; ENSG00000069206; CTA
NENPVDGHGL

SEQ ID NO: 6730 - protein, 10 aa, Homo sapiens
  misc_feature: Table A; Target 6730; HLA-B*27:02; ADAM7; ENSG00000069206; CTA
NENPVDGHGL

SEQ ID NO: 6731 - protein, 10 aa, Homo sapiens
  misc_feature: Table A; Target 6731; HLA-B*27:05; ADAM7; ENSG00000069206; CTA
NENPVDGHGL

SEQ ID NO: 6732 - protein, 10 aa, Homo sapiens
  misc_feature: Table A; Target 6732; HLA-B*37:01; ADAM7; ENSG00000069206; CTA
NENPVDGHGL

SEQ ID NO: 6733 - protein, 10 aa, Homo sapiens
  misc_feature: Table A; Target 6733; HLA-B*38:01; ADAM7; ENSG00000069206; CTA
NENPVDGHGL

SEQ ID NO: 6734 - protein, 10 aa, Homo sapiens
  misc_feature: Table A; Target 6734; HLA-B*39:01; ADAM7; ENSG00000069206; CTA
NENPVDGHGL

SEQ ID NO: 6735 - protein, 10 aa, Homo sapiens
  misc_feature: Table A; Target 6735; HLA-B*40:01; ADAM7; ENSG00000069206; CTA
NENPVDGHGL

SEQ ID NO: 6736 - protein, 10 aa, Homo sapiens
  misc_feature: Table A; Target 6736; HLA-B*40:02; ADAM7; ENSG00000069206; CTA
NENPVDGHGL

SEQ ID NO: 6737 - protein, 10 aa, Homo sapiens
  misc_feature: Table A; Target 6737; HLA-B*44:02; ADAM7; ENSG00000069206; CTA
NENPVDGHGL

SEQ ID NO: 6738 - protein, 10 aa, Homo sapiens
  misc_feature: Table A; Target 6738; HLA-B*44:03; ADAM7; ENSG00000069206; CTA
NENPVDGHGL

SEQ ID NO: 6739 - protein, 10 aa, Homo sapiens
  misc_feature: Table A; Target 6739; HLA-B*49:01; ADAM7; ENSG00000069206; CTA
NENPVDGHGL

SEQ ID NO: 6740 - protein, 10 aa, Homo sapiens
  misc_feature: Table A; Target 6740; HLA-C*16:04; ADAM7; ENSG00000069206; CTA
NENPVDGHGL

SEQ ID NO: 6741 - protein, 9 aa, Homo sapiens
  misc_feature: Table A; Target 6741; HLA-B*49:01; ADAM7; ENSG00000069206; CTA
NESEEDSKI

SEQ ID NO: 6742 - protein, 10 aa, Homo sapiens
  misc_feature: Table A; Target 6742; HLA-A*23:01; ADAM7; ENSG00000069206; CTA
NFVNMIYKTL

SEQ ID NO: 6743 - protein, 8 aa, Homo sapiens
  misc_feature: Table A; Target 6743; HLA-B*08:01; ADAM7; ENSG00000069206; CTA
NGHPHNKL

SEQ ID NO: 6744 - protein, 9 aa, Homo sapiens
  misc_feature: Table A; Target 6744; HLA-A*01:01; ADAM7; ENSG00000069206; CTA
NIETTLLRF

SEQ ID NO: 6745 - protein, 10 aa, Homo sapiens
  misc_feature: Table A; Target 6745; HLA-A*29:02; ADAM7; ENSG00000069206; CTA
NLRVPYGANY

SEQ ID NO: 6746 - protein, 10 aa, Homo sapiens
  misc_feature: Table A; Target 6746; HLA-A*30:02; ADAM7; ENSG00000069206; CTA
NLRVPYGANY

SEQ ID NO: 6747 - protein, 9 aa, Homo sapiens
  misc_feature: Table A; Target 6747; HLA-A*24:02; ADAM7; ENSG00000069206; CTA
NMIYKTLNI

SEQ ID NO: 6748 - protein, 8 aa, Homo sapiens
  misc_feature: Table A; Target 6748; HLA-B*07:02; ADAM7; ENSG00000069206; CTA
NPVDGHGL

SEQ ID NO: 6749 - protein, 8 aa, Homo sapiens
  misc_feature: Table A; Target 6749; HLA-B*08:01; ADAM7; ENSG00000069206; CTA
NPVDGHGL

SEQ ID NO: 6750 - protein, 8 aa, Homo sapiens
  misc_feature: Table A; Target 6750; HLA-B*35:01; ADAM7; ENSG00000069206; CTA
NPVDGHGL

SEQ ID NO: 6751 - protein, 8 aa, Homo sapiens
  misc_feature: Table A; Target 6751; HLA-B*35:03; ADAM7; ENSG00000069206; CTA
NPVDGHGL

SEQ ID NO: 6752 - protein, 8 aa, Homo sapiens
  misc_feature: Table A; Target 6752; HLA-C*01:02; ADAM7; ENSG00000069206; CTA
NPVDGHGL

SEQ ID NO: 6753 - protein, 8 aa, Homo sapiens
  misc_feature: Table A; Target 6753; HLA-C*05:01; ADAM7; ENSG00000069206; CTA
NPVDGHGL

SEQ ID NO: 6754 - protein, 8 aa, Homo sapiens
  misc_feature: Table A; Target 6754; HLA-C*07:02; ADAM7; ENSG00000069206; CTA
NPVDGHGL

SEQ ID NO: 6755 - protein, 10 aa, Homo sapiens
  misc_feature: Table A; Target 6755; HLA-B*07:02; ADAM7; ENSG00000069206; CTA
NPVDGHGLQC

SEQ ID NO: 6756 - protein, 10 aa, Homo sapiens
  misc_feature: Table A; Target 6756; HLA-B*35:01; ADAM7; ENSG00000069206; CTA
NPVDGHGLQC

SEQ ID NO: 6757 - protein, 10 aa, Homo sapiens
  misc_feature: Table A; Target 6757; HLA-B*35:03; ADAM7; ENSG00000069206; CTA
NPVDGHGLQC

SEQ ID NO: 6758 - protein, 10 aa, Homo sapiens
  misc_feature: Table A; Target 6758; HLA-B*54:01; ADAM7; ENSG00000069206; CTA
NPVDGHGLQC

SEQ ID NO: 6759 - protein, 10 aa, Homo sapiens
  misc_feature: Table A; Target 6759; HLA-B*56:01; ADAM7; ENSG00000069206; CTA
NPVDGHGLQC

SEQ ID NO: 6760 - protein, 9 aa, Homo sapiens
  misc_feature: Table A; Target 6760; HLA-A*26:01; ADAM7; ENSG00000069206; CTA
NTKGNKFGY

SEQ ID NO: 6761 - protein, 9 aa, Homo sapiens
  misc_feature: Table A; Target 6761; HLA-A*29:02; ADAM7; ENSG00000069206; CTA
NTKGNKFGY

SEQ ID NO: 6762 - protein, 9 aa, Homo sapiens
  misc_feature: Table A; Target 6762; HLA-A*30:02; ADAM7; ENSG00000069206; CTA
NTKGNKFGY

SEQ ID NO: 6763 - protein, 9 aa, Homo sapiens
  misc_feature: Table A; Target 6763; HLA-A*32:01; ADAM7; ENSG00000069206; CTA
NTKGNKFGY

SEQ ID NO: 6764 - protein, 9 aa, Homo sapiens
  misc_feature: Table A; Target 6764; HLA-A*33:01; ADAM7; ENSG00000069206; CTA
NTKGNKFGY

SEQ ID NO: 6765 - protein, 9 aa, Homo sapiens
  misc_feature: Table A; Target 6765; HLA-A*33:03; ADAM7; ENSG00000069206; CTA
NTKGNKFGY

SEQ ID NO: 6766 - protein, 9 aa, Homo sapiens
  misc_feature: Table A; Target 6766; HLA-A*23:01; ADAM7; ENSG00000069206; CTA
NYSCTELNF

SEQ ID NO: 6767 - protein, 9 aa, Homo sapiens
  misc_feature: Table A; Target 6767; HLA-A*24:02; ADAM7; ENSG00000069206; CTA
NYSCTELNF

SEQ ID NO: 6768 - protein, 9 aa, Homo sapiens
  misc_feature: Table A; Target 6768; HLA-C*14:02; ADAM7; ENSG00000069206; CTA
NYSCTELNF

SEQ ID NO: 6769 - protein, 9 aa, Homo sapiens
  misc_feature: Table A; Target 6769; HLA-A*23:01; ADAM7; ENSG00000069206; CTA
NYSETFYSM

SEQ ID NO: 6770 - protein, 9 aa, Homo sapiens
  misc_feature: Table A; Target 6770; HLA-A*24:02; ADAM7; ENSG00000069206; CTA
NYSETFYSM

SEQ ID NO: 6771 - protein, 9 aa, Homo sapiens
  misc_feature: Table A; Target 6771; HLA-A*29:02; ADAM7; ENSG00000069206; CTA
NYSETFYSM

SEQ ID NO: 6772 - protein, 9 aa, Homo sapiens
  misc_feature: Table A; Target 6772; HLA-A*33:03; ADAM7; ENSG00000069206; CTA
NYSETFYSM

SEQ ID NO: 6773 - protein, 9 aa, Homo sapiens
  misc_feature: Table A; Target 6773; HLA-B*35:01; ADAM7; ENSG00000069206; CTA
NYSETFYSM

SEQ ID NO: 6774 - protein, 9 aa, Homo sapiens
  misc_feature: Table A; Target 6774; HLA-B*35:03; ADAM7; ENSG00000069206; CTA
NYSETFYSM

SEQ ID NO: 6775 - protein, 9 aa, Homo sapiens
  misc_feature: Table A; Target 6775; HLA-C*01:02; ADAM7; ENSG00000069206; CTA
NYSETFYSM

SEQ ID NO: 6776 - protein, 9 aa, Homo sapiens
  misc_feature: Table A; Target 6776; HLA-C*04:01; ADAM7; ENSG00000069206; CTA
NYSETFYSM

SEQ ID NO: 6777 - protein, 9 aa, Homo sapiens
  misc_feature: Table A; Target 6777; HLA-C*14:02; ADAM7; ENSG00000069206; CTA
NYSETFYSM

SEQ ID NO: 6778 - protein, 9 aa, Homo sapiens
  misc_feature: Table A; Target 6778; HLA-A*33:01; ADAM7; ENSG00000069206; CTA
PDTNIIANR

SEQ ID NO: 6779 - protein, 9 aa, Homo sapiens
  misc_feature: Table A; Target 6779; HLA-A*33:03; ADAM7; ENSG00000069206; CTA
PDTNIIANR

SEQ ID NO: 6780 - protein, 9 aa, Homo sapiens
  misc_feature: Table A; Target 6780; HLA-A*68:01; ADAM7; ENSG00000069206; CTA
PDTNIIANR

SEQ ID NO: 6781 - protein, 9 aa, Homo sapiens
  misc_feature: Table A; Target 6781; HLA-A*68:02; ADAM7; ENSG00000069206; CTA
PDTNIIANR

SEQ ID NO: 6782 - protein, 9 aa, Homo sapiens
  misc_feature: Table A; Target 6782; HLA-B*27:02; ADAM7; ENSG00000069206; CTA
PDTNIIANR

SEQ ID NO: 6783 - protein, 9 aa, Homo sapiens
  misc_feature: Table A; Target 6783; HLA-C*07:06; ADAM7; ENSG00000069206; CTA
PDTNIIANR

SEQ ID NO: 6784 - protein, 9 aa, Homo sapiens
  misc_feature: Table A; Target 6784; HLA-A*24:02; ADAM7; ENSG00000069206; CTA
PFPYNFHDF

SEQ ID NO: 6785 - protein, 9 aa, Homo sapiens
  misc_feature: Table A; Target 6785; HLA-A*02:04; ADAM7; ENSG00000069206; CTA
PILPEIHFL

SEQ ID NO: 6786 - protein, 11 aa, Homo sapiens
  misc_feature: Table A; Target 6786; HLA-B*27:02; ADAM7; ENSG00000069206; CTA
PPTETLGVENK

SEQ ID NO: 6787 - protein, 8 aa, Homo sapiens
  misc_feature: Table A; Target 6787; HLA-C*07:02; ADAM7; ENSG00000069206; CTA
PQKNATVK

SEQ ID NO: 6788 - protein, 9 aa, Homo sapiens
  misc_feature: Table A; Target 6788; HLA-A*24:02; ADAM7; ENSG00000069206; CTA
PYNFHDFQF

SEQ ID NO: 6789 - protein, 8 aa, Homo sapiens
  misc_feature: Table A; Target 6789; HLA-A*30:02; ADAM7; ENSG00000069206; CTA
QGSIVHEY

SEQ ID NO: 6790 - protein, 8 aa, Homo sapiens
  misc_feature: Table A; Target 6790; HLA-A*32:01; ADAM7; ENSG00000069206; CTA
QGSIVHEY

SEQ ID NO: 6791 - protein, 8 aa, Homo sapiens
  misc_feature: Table A; Target 6791; HLA-B*15:01; ADAM7; ENSG00000069206; CTA
QGSIVHEY

SEQ ID NO: 6792 - protein, 8 aa, Homo sapiens
  misc_feature: Table A; Target 6792; HLA-B*15:03; ADAM7; ENSG00000069206; CTA
QGSIVHEY

SEQ ID NO: 6793 - protein, 8 aa, Homo sapiens
  misc_feature: Table A; Target 6793; HLA-B*18:01; ADAM7; ENSG00000069206; CTA
QGSIVHEY

SEQ ID NO: 6794 - protein, 8 aa, Homo sapiens
  misc_feature: Table A; Target 6794; HLA-B*35:01; ADAM7; ENSG00000069206; CTA
QGSIVHEY

SEQ ID NO: 6795 - protein, 8 aa, Homo sapiens
  misc_feature: Table A; Target 6795; HLA-B*37:01; ADAM7; ENSG00000069206; CTA
QGSIVHEY

SEQ ID NO: 6796 - protein, 8 aa, Homo sapiens
  misc_feature: Table A; Target 6796; HLA-B*46:01; ADAM7; ENSG00000069206; CTA
QGSIVHEY

SEQ ID NO: 6797 - protein, 8 aa, Homo sapiens
  misc_feature: Table A; Target 6797; HLA-C*07:01; ADAM7; ENSG00000069206; CTA
QGSIVHEY

SEQ ID NO: 6798 - protein, 8 aa, Homo sapiens
  misc_feature: Table A; Target 6798; HLA-C*07:04; ADAM7; ENSG00000069206; CTA
QGSIVHEY

SEQ ID NO: 6799 - protein, 8 aa, Homo sapiens
  misc_feature: Table A; Target 6799; HLA-C*12:03; ADAM7; ENSG00000069206; CTA
QGSIVHEY

SEQ ID NO: 6800 - protein, 8 aa, Homo sapiens
  misc_feature: Table A; Target 6800; HLA-C*16:01; ADAM7; ENSG00000069206; CTA
QGSIVHEY

SEQ ID NO: 6801 - protein, 8 aa, Homo sapiens
  misc_feature: Table A; Target 6801; HLA-C*16:02; ADAM7; ENSG00000069206; CTA
QGSIVHEY

SEQ ID NO: 6802 - protein, 8 aa, Homo sapiens
  misc_feature: Table A; Target 6802; HLA-C*16:04; ADAM7; ENSG00000069206; CTA
QGSIVHEY

SEQ ID NO: 6803 - protein, 8 aa, Homo sapiens
  misc_feature: Table A; Target 6803; HLA-B*08:01; ADAM7; ENSG00000069206; CTA
QIKKAGSI

SEQ ID NO: 6804 - protein, 8 aa, Homo sapiens
  misc_feature: Table A; Target 6804; HLA-C*07:01; ADAM7; ENSG00000069206; CTA
QNQYHQYL

SEQ ID NO: 6805 - protein, 9 aa, Homo sapiens
  misc_feature: Table A; Target 6805; HLA-B*38:01; ADAM7; ENSG00000069206; CTA
QQIRTEPIL

SEQ ID NO: 6806 - protein, 9 aa, Homo sapiens
  misc_feature: Table A; Target 6806; HLA-B*27:02; ADAM7; ENSG00000069206; CTA
QRYLIEPVK

SEQ ID NO: 6807 - protein, 9 aa, Homo sapiens
  misc_feature: Table A; Target 6807; HLA-B*27:05; ADAM7; ENSG00000069206; CTA
QRYLIEPVK

SEQ ID NO: 6808 - protein, 10 aa, Homo sapiens
  misc_feature: Table A; Target 6808; HLA-B*27:02; ADAM7; ENSG00000069206; CTA
QRYLIEPVKY

SEQ ID NO: 6809 - protein, 10 aa, Homo sapiens
  misc_feature: Table A; Target 6809; HLA-B*27:05; ADAM7; ENSG00000069206; CTA
QRYLIEPVKY

SEQ ID NO: 6810 - protein, 10 aa, Homo sapiens
  misc_feature: Table A; Target 6810; HLA-B*44:02; ADAM7; ENSG00000069206; CTA
QRYLIEPVKY

SEQ ID NO: 6811 - protein, 10 aa, Homo sapiens
  misc_feature: Table A; Target 6811; HLA-B*44:03; ADAM7; ENSG00000069206; CTA
QRYLIEPVKY

SEQ ID NO: 6812 - protein, 10 aa, Homo sapiens
  misc_feature: Table A; Target 6812; HLA-C*07:01; ADAM7; ENSG00000069206; CTA
QRYLIEPVKY

SEQ ID NO: 6813 - protein, 10 aa, Homo sapiens
  misc_feature: Table A; Target 6813; HLA-C*16:04; ADAM7; ENSG00000069206; CTA
QRYLIEPVKY

SEQ ID NO: 6814 - protein, 8 aa, Homo sapiens
  misc_feature: Table A; Target 6814; HLA-C*01:02; ADAM7; ENSG00000069206; CTA
QSPPTETL

SEQ ID NO: 6815 - protein, 8 aa, Homo sapiens
  misc_feature: Table A; Target 6815; HLA-B*08:01; ADAM7; ENSG00000069206; CTA
QVKEKFIL

SEQ ID NO: 6816 - protein, 10 aa, Homo sapiens
  misc_feature: Table A; Target 6816; HLA-A*25:01; ADAM7; ENSG00000069206; CTA
QVQSPPTETL

SEQ ID NO: 6817 - protein, 10 aa, Homo sapiens
  misc_feature: Table A; Target 6817; HLA-B*07:02; ADAM7; ENSG00000069206; CTA
QVQSPPTETL

SEQ ID NO: 6818 - protein, 10 aa, Homo sapiens
  misc_feature: Table A; Target 6818; HLA-B*27:05; ADAM7; ENSG00000069206; CTA
QVQSPPTETL

SEQ ID NO: 6819 - protein, 10 aa, Homo sapiens
  misc_feature: Table A; Target 6819; HLA-B*38:01; ADAM7; ENSG00000069206; CTA
QVQSPPTETL

SEQ ID NO: 6820 - protein, 10 aa, Homo sapiens
  misc_feature: Table A; Target 6820; HLA-B*39:01; ADAM7; ENSG00000069206; CTA
QVQSPPTETL

SEQ ID NO: 6821 - protein, 10 aa, Homo sapiens
  misc_feature: Table A; Target 6821; HLA-C*01:02; ADAM7; ENSG00000069206; CTA
QVQSPPTETL

SEQ ID NO: 6822 - protein, 10 aa, Homo sapiens
  misc_feature: Table A; Target 6822; HLA-C*05:01; ADAM7; ENSG00000069206; CTA
QVQSPPTETL

SEQ ID NO: 6823 - protein, 8 aa, Homo sapiens
  misc_feature: Table A; Target 6823; HLA-B*15:01; ADAM7; ENSG00000069206; CTA
REFLGSNY

SEQ ID NO: 6824 - protein, 8 aa, Homo sapiens
  misc_feature: Table A; Target 6824; HLA-B*15:03; ADAM7; ENSG00000069206; CTA
REFLGSNY

SEQ ID NO: 6825 - protein, 8 aa, Homo sapiens
  misc_feature: Table A; Target 6825; HLA-B*18:01; ADAM7; ENSG00000069206; CTA
REFLGSNY

SEQ ID NO: 6826 - protein, 8 aa, Homo sapiens
  misc_feature: Table A; Target 6826; HLA-B*37:01; ADAM7; ENSG00000069206; CTA
REFLGSNY

SEQ ID NO: 6827 - protein, 8 aa, Homo sapiens
  misc_feature: Table A; Target 6827; HLA-B*44:02; ADAM7; ENSG00000069206; CTA
REFLGSNY

SEQ ID NO: 6828 - protein, 8 aa, Homo sapiens
  misc_feature: Table A; Target 6828; HLA-B*44:03; ADAM7; ENSG00000069206; CTA
REFLGSNY

SEQ ID NO: 6829 - protein, 8 aa, Homo sapiens
  misc_feature: Table A; Target 6829; HLA-B*49:01; ADAM7; ENSG00000069206; CTA
REFLGSNY

SEQ ID NO: 6830 - protein, 8 aa, Homo sapiens
  misc_feature: Table A; Target 6830; HLA-C*16:04; ADAM7; ENSG00000069206; CTA
REFLGSNY

SEQ ID NO: 6831 - protein, 10 aa, Homo sapiens
  misc_feature: Table A; Target 6831; HLA-A*31:01; ADAM7; ENSG00000069206; CTA
RGFFRINDQR

SEQ ID NO: 6832 - protein, 11 aa, Homo sapiens
  misc_feature: Table A; Target 6832; HLA-A*03:02; ADAM7; ENSG00000069206; CTA
RGIADPNQSAK

SEQ ID NO: 6833 - protein, 11 aa, Homo sapiens
  misc_feature: Table A; Target 6833; HLA-A*11:01; ADAM7; ENSG00000069206; CTA
RGIADPNQSAK

SEQ ID NO: 6834 - protein, 9 aa, Homo sapiens
  misc_feature: Table A; Target 6834; HLA-A*02:04; ADAM7; ENSG00000069206; CTA
RINDQRYLI

SEQ ID NO: 6835 - protein, 9 aa, Homo sapiens
  misc_feature: Table A; Target 6835; HLA-A*24:02; ADAM7; ENSG00000069206; CTA
RINDQRYLI

SEQ ID NO: 6836 - protein, 9 aa, Homo sapiens
  misc_feature: Table A; Target 6836; HLA-A*02:01; ADAM7; ENSG00000069206; CTA
RIWGMVNFV

SEQ ID NO: 6837 - protein, 9 aa, Homo sapiens
  misc_feature: Table A; Target 6837; HLA-A*02:03; ADAM7; ENSG00000069206; CTA
RIWGMVNFV

SEQ ID NO: 6838 - protein, 9 aa, Homo sapiens
  misc_feature: Table A; Target 6838; HLA-A*02:04; ADAM7; ENSG00000069206; CTA
RIWGMVNFV

SEQ ID NO: 6839 - protein, 9 aa, Homo sapiens
  misc_feature: Table A; Target 6839; HLA-A*02:07; ADAM7; ENSG00000069206; CTA
RIWGMVNFV

SEQ ID NO: 6840 - protein, 10 aa, Homo sapiens
  misc_feature: Table A; Target 6840; HLA-A*30:02; ADAM7; ENSG00000069206; CTA
RSREFLGSNY

SEQ ID NO: 6841 - protein, 10 aa, Homo sapiens
  misc_feature: Table A; Target 6841; HLA-B*57:01; ADAM7; ENSG00000069206; CTA
RSREFLGSNY

SEQ ID NO: 6842 - protein, 9 aa, Homo sapiens
  misc_feature: Table A; Target 6842; HLA-A*02:01; ADAM7; ENSG00000069206; CTA
RTEPILPEI

SEQ ID NO: 6843 - protein, 9 aa, Homo sapiens
  misc_feature: Table A; Target 6843; HLA-A*02:04; ADAM7; ENSG00000069206; CTA
RTEPILPEI

SEQ ID NO: 6844 - protein, 9 aa, Homo sapiens
  misc_feature: Table A; Target 6844; HLA-A*02:07; ADAM7; ENSG00000069206; CTA
RTEPILPEI

SEQ ID NO: 6845 - protein, 9 aa, Homo sapiens
  misc_feature: Table A; Target 6845; HLA-A*24:02; ADAM7; ENSG00000069206; CTA
RTEPILPEI

SEQ ID NO: 6846 - protein, 9 aa, Homo sapiens
  misc_feature: Table A; Target 6846; HLA-A*68:02; ADAM7; ENSG00000069206; CTA
RTEPILPEI

SEQ ID NO: 6847 - protein, 9 aa, Homo sapiens
  misc_feature: Table A; Target 6847; HLA-B*57:01; ADAM7; ENSG00000069206; CTA
RTEPILPEI

SEQ ID NO: 6848 - protein, 9 aa, Homo sapiens
  misc_feature: Table A; Target 6848; HLA-B*58:01; ADAM7; ENSG00000069206; CTA
RTEPILPEI

SEQ ID NO: 6849 - protein, 11 aa, Homo sapiens
  misc_feature: Table A; Target 6849; HLA-B*57:01; ADAM7; ENSG00000069206; CTA
RTEPILPEIHF

SEQ ID NO: 6850 - protein, 8 aa, Homo sapiens
  misc_feature: Table A; Target 6850; HLA-C*01:02; ADAM7; ENSG00000069206; CTA
RVPYGANY

SEQ ID NO: 6851 - protein, 9 aa, Homo sapiens
  misc_feature: Table A; Target 6851; HLA-A*23:01; ADAM7; ENSG00000069206; CTA
RYLIEPVKY

SEQ ID NO: 6852 - protein, 9 aa, Homo sapiens
  misc_feature: Table A; Target 6852; HLA-A*24:02; ADAM7; ENSG00000069206; CTA
RYLIEPVKY

SEQ ID NO: 6853 - protein, 9 aa, Homo sapiens
  misc_feature: Table A; Target 6853; HLA-A*29:02; ADAM7; ENSG00000069206; CTA
RYLIEPVKY

SEQ ID NO: 6854 - protein, 9 aa, Homo sapiens
  misc_feature: Table A; Target 6854; HLA-A*30:02; ADAM7; ENSG00000069206; CTA
RYLIEPVKY

SEQ ID NO: 6855 - protein, 9 aa, Homo sapiens
  misc_feature: Table A; Target 6855; HLA-A*31:01; ADAM7; ENSG00000069206; CTA
RYLIEPVKY

SEQ ID NO: 6856 - protein, 9 aa, Homo sapiens
  misc_feature: Table A; Target 6856; HLA-B*15:03; ADAM7; ENSG00000069206; CTA
RYLIEPVKY

SEQ ID NO: 6857 - protein, 9 aa, Homo sapiens
  misc_feature: Table A; Target 6857; HLA-B*57:01; ADAM7; ENSG00000069206; CTA
RYLIEPVKY

SEQ ID NO: 6858 - protein, 8 aa, Homo sapiens
  misc_feature: Table A; Target 6858; HLA-C*12:03; ADAM7; ENSG00000069206; CTA
SAASISTC

SEQ ID NO: 6859 - protein, 9 aa, Homo sapiens
  misc_feature: Table A; Target 6859; HLA-B*27:05; ADAM7; ENSG00000069206; CTA
SAASISTCN

SEQ ID NO: 6860 - protein, 9 aa, Homo sapiens
  misc_feature: Table A; Target 6860; HLA-A*31:01; ADAM7; ENSG00000069206; CTA
SCTELNFTR

SEQ ID NO: 6861 - protein, 9 aa, Homo sapiens
  misc_feature: Table A; Target 6861; HLA-A*33:03; ADAM7; ENSG00000069206; CTA
SCTELNFTR

SEQ ID NO: 6862 - protein, 9 aa, Homo sapiens
  misc_feature: Table A; Target 6862; HLA-A*68:01; ADAM7; ENSG00000069206; CTA
SCTELNFTR

SEQ ID NO: 6863 - protein, 9 aa, Homo sapiens
  misc_feature: Table A; Target 6863; HLA-C*07:06; ADAM7; ENSG00000069206; CTA
SCTELNFTR

SEQ ID NO: 6864 - protein, 10 aa, Homo sapiens
  misc_feature: Table A; Target 6864; HLA-A*11:01; ADAM7; ENSG00000069206; CTA
SCTELNFTRK

SEQ ID NO: 6865 - protein, 9 aa, Homo sapiens
  misc_feature: Table A; Target 6865; HLA-B*37:01; ADAM7; ENSG00000069206; CTA
SDEGEHLVF

SEQ ID NO: 6866 - protein, 9 aa, Homo sapiens
  misc_feature: Table A; Target 6866; HLA-B*38:01; ADAM7; ENSG00000069206; CTA
SDEGEHLVF

SEQ ID NO: 6867 - protein, 10 aa, Homo sapiens
  misc_feature: Table A; Target 6867; HLA-A*11:01; ADAM7; ENSG00000069206; CTA
SDEGEHLVFK

SEQ ID NO: 6868 - protein, 8 aa, Homo sapiens
  misc_feature: Table A; Target 6868; HLA-A*30:01; ADAM7; ENSG00000069206; CTA
SDGSIPAL

SEQ ID NO: 6869 - protein, 8 aa, Homo sapiens
  misc_feature: Table A; Target 6869; HLA-B*18:01; ADAM7; ENSG00000069206; CTA
SDGSIPAL

SEQ ID NO: 6870 - protein, 8 aa, Homo sapiens
  misc_feature: Table A; Target 6870; HLA-B*37:01; ADAM7; ENSG00000069206; CTA
SDGSIPAL

SEQ ID NO: 6871 - protein, 8 aa, Homo sapiens
  misc_feature: Table A; Target 6871; HLA-B*40:02; ADAM7; ENSG00000069206; CTA
SDGSIPAL

SEQ ID NO: 6872 - protein, 8 aa, Homo sapiens
  misc_feature: Table A; Target 6872; HLA-C*12:03; ADAM7; ENSG00000069206; CTA
SDGSIPAL

SEQ ID NO: 6873 - protein, 9 aa, Homo sapiens
  misc_feature: Table A; Target 6873; HLA-A*03:02; ADAM7; ENSG00000069206; CTA
SDGSIPALK

SEQ ID NO: 6874 - protein, 9 aa, Homo sapiens
  misc_feature: Table A; Target 6874; HLA-A*11:01; ADAM7; ENSG00000069206; CTA
SDGSIPALK

SEQ ID NO: 6875 - protein, 9 aa, Homo sapiens
  misc_feature: Table A; Target 6875; HLA-B*27:02; ADAM7; ENSG00000069206; CTA
SDGSIPALK

SEQ ID NO: 6876 - protein, 10 aa, Homo sapiens
  misc_feature: Table A; Target 6876; HLA-A*23:01; ADAM7; ENSG00000069206; CTA
SDGSIPALKF

SEQ ID NO: 6877 - protein, 10 aa, Homo sapiens
  misc_feature: Table A; Target 6877; HLA-A*24:02; ADAM7; ENSG00000069206; CTA
SDGSIPALKF

SEQ ID NO: 6878 - protein, 10 aa, Homo sapiens
  misc_feature: Table A; Target 6878; HLA-B*18:01; ADAM7; ENSG00000069206; CTA
SDGSIPALKF

SEQ ID NO: 6879 - protein, 10 aa, Homo sapiens
  misc_feature: Table A; Target 6879; HLA-B*37:01; ADAM7; ENSG00000069206; CTA
SDGSIPALKF

SEQ ID NO: 6880 - protein, 10 aa, Homo sapiens
  misc_feature: Table A; Target 6880; HLA-B*44:02; ADAM7; ENSG00000069206; CTA
SDGSIPALKF

SEQ ID NO: 6881 - protein, 10 aa, Homo sapiens
  misc_feature: Table A; Target 6881; HLA-B*44:03; ADAM7; ENSG00000069206; CTA
SDGSIPALKF

SEQ ID NO: 6882 - protein, 10 aa, Homo sapiens
  misc_feature: Table A; Target 6882; HLA-C*07:01; ADAM7; ENSG00000069206; CTA
SDGSIPALKF

SEQ ID NO: 6883 - protein, 10 aa, Homo sapiens
  misc_feature: Table A; Target 6883; HLA-C*16:04; ADAM7; ENSG00000069206; CTA
SDGSIPALKF

SEQ ID NO: 6884 - protein, 10 aa, Homo sapiens
  misc_feature: Table A; Target 6884; HLA-B*44:02; ADAM7; ENSG00000069206; CTA
SEEDSKIKGI

SEQ ID NO: 6885 - protein, 10 aa, Homo sapiens
  misc_feature: Table A; Target 6885; HLA-B*44:03; ADAM7; ENSG00000069206; CTA
SEEDSKIKGI

SEQ ID NO: 6886 - protein, 10 aa, Homo sapiens
  misc_feature: Table A; Target 6886; HLA-B*49:01; ADAM7; ENSG00000069206; CTA
SEEDSKIKGI

SEQ ID NO: 6887 - protein, 9 aa, Homo sapiens
  misc_feature: Table A; Target 6887; HLA-B*40:01; ADAM7; ENSG00000069206; CTA
SELFDDEAI

SEQ ID NO: 6888 - protein, 9 aa, Homo sapiens
  misc_feature: Table A; Target 6888; HLA-B*49:01; ADAM7; ENSG00000069206; CTA
SELFDDEAI

SEQ ID NO: 6889 - protein, 11 aa, Homo sapiens
  misc_feature: Table A; Target 6889; HLA-A*31:01; ADAM7; ENSG00000069206; CTA
SFWQEKILKTR

SEQ ID NO: 6890 - protein, 8 aa, Homo sapiens
  misc_feature: Table A; Target 6890; HLA-B*15:03; ADAM7; ENSG00000069206; CTA
SHVQGISY

SEQ ID NO: 6891 - protein, 8 aa, Homo sapiens
  misc_feature: Table A; Target 6891; HLA-B*39:01; ADAM7; ENSG00000069206; CTA
SHVQGISY

SEQ ID NO: 6892 - protein, 9 aa, Homo sapiens
  misc_feature: Table A; Target 6892; HLA-B*39:01; ADAM7; ENSG00000069206; CTA
SHVQGISYP

SEQ ID NO: 6893 - protein, 9 aa, Homo sapiens
  misc_feature: Table A; Target 6893; HLA-A*30:02; ADAM7; ENSG00000069206; CTA
SLLGEDKTY

SEQ ID NO: 6894 - protein, 9 aa, Homo sapiens
  misc_feature: Table A; Target 6894; HLA-B*15:01; ADAM7; ENSG00000069206; CTA
SLLGEDKTY

SEQ ID NO: 6895 - protein, 9 aa, Homo sapiens
  misc_feature: Table A; Target 6895; HLA-B*15:03; ADAM7; ENSG00000069206; CTA
SLLGEDKTY

SEQ ID NO: 6896 - protein, 9 aa, Homo sapiens
  misc_feature: Table A; Target 6896; HLA-C*03:03; ADAM7; ENSG00000069206; CTA
SLLGEDKTY

SEQ ID NO: 6897 - protein, 11 aa, Homo sapiens
  misc_feature: Table A; Target 6897; HLA-A*02:01; ADAM7; ENSG00000069206; CTA
SLLGEDKTYHL

SEQ ID NO: 6898 - protein, 11 aa, Homo sapiens
  misc_feature: Table A; Target 6898; HLA-A*02:04; ADAM7; ENSG00000069206; CTA
SLLGEDKTYHL

SEQ ID NO: 6899 - protein, 11 aa, Homo sapiens
  misc_feature: Table A; Target 6899; HLA-A*02:07; ADAM7; ENSG00000069206; CTA
SLLGEDKTYHL

SEQ ID NO: 6900 - protein, 9 aa, Homo sapiens
  misc_feature: Table A; Target 6900; HLA-A*31:01; ADAM7; ENSG00000069206; CTA
SMKGEAFTR

SEQ ID NO: 6901 - protein, 9 aa, Homo sapiens
  misc_feature: Table A; Target 6901; HLA-A*33:01; ADAM7; ENSG00000069206; CTA
SMKGEAFTR

SEQ ID NO: 6902 - protein, 9 aa, Homo sapiens
  misc_feature: Table A; Target 6902; HLA-A*33:03; ADAM7; ENSG00000069206; CTA
SMKGEAFTR

SEQ ID NO: 6903 - protein, 9 aa, Homo sapiens
  misc_feature: Table A; Target 6903; HLA-C*07:06; ADAM7; ENSG00000069206; CTA
SMKGEAFTR

SEQ ID NO: 6904 - protein, 9 aa, Homo sapiens
  misc_feature: Table A; Target 6904; HLA-A*33:01; ADAM7; ENSG00000069206; CTA
SNIETTLLR

SEQ ID NO: 6905 - protein, 9 aa, Homo sapiens
  misc_feature: Table A; Target 6905; HLA-A*33:03; ADAM7; ENSG00000069206; CTA
SNIETTLLR

SEQ ID NO: 6906 - protein, 9 aa, Homo sapiens
  misc_feature: Table A; Target 6906; HLA-A*68:01; ADAM7; ENSG00000069206; CTA
SNIETTLLR

SEQ ID NO: 6907 - protein, 9 aa, Homo sapiens
  misc_feature: Table A; Target 6907; HLA-C*07:06; ADAM7; ENSG00000069206; CTA
SNIETTLLR

SEQ ID NO: 6908 - protein, 10 aa, Homo sapiens
  misc_feature: Table A; Target 6908; HLA-A*26:01; ADAM7; ENSG00000069206; CTA
SNIETTLLRF

SEQ ID NO: 6909 - protein, 10 aa, Homo sapiens
  misc_feature: Table A; Target 6909; HLA-A*29:02; ADAM7; ENSG00000069206; CTA
SNIETTLLRF

SEQ ID NO: 6910 - protein, 9 aa, Homo sapiens
  misc_feature: Table A; Target 6910; HLA-B*07:02; ADAM7; ENSG00000069206; CTA
SPACPKDQF

SEQ ID NO: 6911 - protein, 9 aa, Homo sapiens
  misc_feature: Table A; Target 6911; HLA-B*35:01; ADAM7; ENSG00000069206; CTA
SPACPKDQF

SEQ ID NO: 6912 - protein, 9 aa, Homo sapiens
  misc_feature: Table A; Target 6912; HLA-B*55:01; ADAM7; ENSG00000069206; CTA
SPACPKDQF

SEQ ID NO: 6913 - protein, 9 aa, Homo sapiens
  misc_feature: Table A; Target 6913; HLA-C*07:02; ADAM7; ENSG00000069206; CTA
SPACPKDQF

SEQ ID NO: 6914 - protein, 9 aa, Homo sapiens
  misc_feature: Table A; Target 6914; HLA-C*16:01; ADAM7; ENSG00000069206; CTA
SPACPKDQF

SEQ ID NO: 6915 - protein, 9 aa, Homo sapiens
  misc_feature: Table A; Target 6915; HLA-B*51:01; ADAM7; ENSG00000069206; CTA
SPPTETLGV

SEQ ID NO: 6916 - protein, 9 aa, Homo sapiens
  misc_feature: Table A; Target 6916; HLA-B*56:01; ADAM7; ENSG00000069206; CTA
SPPTETLGV

SEQ ID NO: 6917 - protein, 8 aa, Homo sapiens
  misc_feature: Table A; Target 6917; HLA-A*30:02; ADAM7; ENSG00000069206; CTA
SQNQYHQY

SEQ ID NO: 6918 - protein, 8 aa, Homo sapiens
  misc_feature: Table A; Target 6918; HLA-A*32:01; ADAM7; ENSG00000069206; CTA
SQNQYHQY

SEQ ID NO: 6919 - protein, 8 aa, Homo sapiens
  misc_feature: Table A; Target 6919; HLA-B*15:01; ADAM7; ENSG00000069206; CTA
SQNQYHQY

SEQ ID NO: 6920 - protein, 8 aa, Homo sapiens
  misc_feature: Table A; Target 6920; HLA-B*15:03; ADAM7; ENSG00000069206; CTA
SQNQYHQY

SEQ ID NO: 6921 - protein, 8 aa, Homo sapiens
  misc_feature: Table A; Target 6921; HLA-B*44:02; ADAM7; ENSG00000069206; CTA
SQNQYHQY

SEQ ID NO: 6922 - protein, 8 aa, Homo sapiens
  misc_feature: Table A; Target 6922; HLA-C*16:02; ADAM7; ENSG00000069206; CTA
SQNQYHQY

SEQ ID NO: 6923 - protein, 8 aa, Homo sapiens
  misc_feature: Table A; Target 6923; HLA-C*16:04; ADAM7; ENSG00000069206; CTA
SQNQYHQY

SEQ ID NO: 6924 - protein, 9 aa, Homo sapiens
  misc_feature: Table A; Target 6924; HLA-A*02:04; ADAM7; ENSG00000069206; CTA
SQNQYHQYL

SEQ ID NO: 6925 - protein, 9 aa, Homo sapiens
  misc_feature: Table A; Target 6925; HLA-A*24:02; ADAM7; ENSG00000069206; CTA
SQNQYHQYL

SEQ ID NO: 6926 - protein, 9 aa, Homo sapiens
  misc_feature: Table A; Target 6926; HLA-A*31:01; ADAM7; ENSG00000069206; CTA
SQNQYHQYL

SEQ ID NO: 6927 - protein, 9 aa, Homo sapiens
  misc_feature: Table A; Target 6927; HLA-A*32:01; ADAM7; ENSG00000069206; CTA
SQNQYHQYL

SEQ ID NO: 6928 - protein, 9 aa, Homo sapiens
  misc_feature: Table A; Target 6928; HLA-B*13:02; ADAM7; ENSG00000069206; CTA
SQNQYHQYL

SEQ ID NO: 6929 - protein, 9 aa, Homo sapiens
  misc_feature: Table A; Target 6929; HLA-B*15:01; ADAM7; ENSG00000069206; CTA
SQNQYHQYL

SEQ ID NO: 6930 - protein, 9 aa, Homo sapiens
  misc_feature: Table A; Target 6930; HLA-B*27:05; ADAM7; ENSG00000069206; CTA
SQNQYHQYL

SEQ ID NO: 6931 - protein, 9 aa, Homo sapiens
  misc_feature: Table A; Target 6931; HLA-B*37:01; ADAM7; ENSG00000069206; CTA
SQNQYHQYL

SEQ ID NO: 6932 - protein, 9 aa, Homo sapiens
  misc_feature: Table A; Target 6932; HLA-B*38:01; ADAM7; ENSG00000069206; CTA
SQNQYHQYL

SEQ ID NO: 6933 - protein, 9 aa, Homo sapiens
  misc_feature: Table A; Target 6933; HLA-B*39:01; ADAM7; ENSG00000069206; CTA
SQNQYHQYL

SEQ ID NO: 6934 - protein, 9 aa, Homo sapiens
  misc_feature: Table A; Target 6934; HLA-B*44:02; ADAM7; ENSG00000069206; CTA
SQNQYHQYL

SEQ ID NO: 6935 - protein, 9 aa, Homo sapiens
  misc_feature: Table A; Target 6935; HLA-C*02:02; ADAM7; ENSG00000069206; CTA
SQNQYHQYL

SEQ ID NO: 6936 - protein, 9 aa, Homo sapiens
  misc_feature: Table A; Target 6936; HLA-C*04:01; ADAM7; ENSG00000069206; CTA
SQNQYHQYL

SEQ ID NO: 6937 - protein, 9 aa, Homo sapiens
  misc_feature: Table A; Target 6937; HLA-C*07:04; ADAM7; ENSG00000069206; CTA
SQNQYHQYL

SEQ ID NO: 6938 - protein, 9 aa, Homo sapiens
  misc_feature: Table A; Target 6938; HLA-C*12:03; ADAM7; ENSG00000069206; CTA
SQNQYHQYL

SEQ ID NO: 6939 - protein, 9 aa, Homo sapiens
  misc_feature: Table A; Target 6939; HLA-C*16:02; ADAM7; ENSG00000069206; CTA
SQNQYHQYL

SEQ ID NO: 6940 - protein, 9 aa, Homo sapiens
  misc_feature: Table A; Target 6940; HLA-C*16:04; ADAM7; ENSG00000069206; CTA
SQNQYHQYL

SEQ ID NO: 6941 - protein, 10 aa, Homo sapiens
  misc_feature: Table A; Target 6941; HLA-A*03:02; ADAM7; ENSG00000069206; CTA
SQNQYHQYLK

SEQ ID NO: 6942 - protein, 10 aa, Homo sapiens
  misc_feature: Table A; Target 6942; HLA-A*11:01; ADAM7; ENSG00000069206; CTA
SQNQYHQYLK

SEQ ID NO: 6943 - protein, 9 aa, Homo sapiens
  misc_feature: Table A; Target 6943; HLA-B*27:02; ADAM7; ENSG00000069206; CTA
SREFLGSNY

SEQ ID NO: 6944 - protein, 9 aa, Homo sapiens
  misc_feature: Table A; Target 6944; HLA-B*27:05; ADAM7; ENSG00000069206; CTA
SREFLGSNY

SEQ ID NO: 6945 - protein, 9 aa, Homo sapiens
  misc_feature: Table A; Target 6945; HLA-C*16:04; ADAM7; ENSG00000069206; CTA
SREFLGSNY

SEQ ID NO: 6946 - protein, 10 aa, Homo sapiens
  misc_feature: Table A; Target 6946; HLA-A*30:02; ADAM7; ENSG00000069206; CTA
SSLLGEDKTY

SEQ ID NO: 6947 - protein, 10 aa, Homo sapiens
  misc_feature: Table A; Target 6947; HLA-B*57:01; ADAM7; ENSG00000069206; CTA
SSLLGEDKTY

SEQ ID NO: 6948 - protein, 10 aa, Homo sapiens
  misc_feature: Table A; Target 6948; HLA-B*58:01; ADAM7; ENSG00000069206; CTA
SSLLGEDKTY

SEQ ID NO: 6949 - protein, 10 aa, Homo sapiens
  misc_feature: Table A; Target 6949; HLA-C*16:02; ADAM7; ENSG00000069206; CTA
SSLLGEDKTY

SEQ ID NO: 6950 - protein, 8 aa, Homo sapiens
  misc_feature: Table A; Target 6950; HLA-C*03:03; ADAM7; ENSG00000069206; CTA
STDIGLVA

SEQ ID NO: 6951 - protein, 8 aa, Homo sapiens
  misc_feature: Table A; Target 6951; HLA-C*05:01; ADAM7; ENSG00000069206; CTA
STDIGLVA

SEQ ID NO: 6952 - protein, 9 aa, Homo sapiens
  misc_feature: Table A; Target 6952; HLA-A*68:02; ADAM7; ENSG00000069206; CTA
STSIIKDLL

SEQ ID NO: 6953 - protein, 9 aa, Homo sapiens
  misc_feature: Table A; Target 6953; HLA-B*27:05; ADAM7; ENSG00000069206; CTA
STSIIKDLL

SEQ ID NO: 6954 - protein, 8 aa, Homo sapiens
  misc_feature: Table A; Target 6954; HLA-C*14:02; ADAM7; ENSG00000069206; CTA
SYPGGMCL

SEQ ID NO: 6955 - protein, 10 aa, Homo sapiens
  misc_feature: Table A; Target 6955; HLA-A*29:02; ADAM7; ENSG00000069206; CTA
SYPGGMCLPY

SEQ ID NO: 6956 - protein, 9 aa, Homo sapiens
  misc_feature: Table A; Target 6956; HLA-B*40:02; ADAM7; ENSG00000069206; CTA
TDIGLVASG

SEQ ID NO: 6957 - protein, 11 aa, Homo sapiens
  misc_feature: Table A; Target 6957; HLA-A*11:01; ADAM7; ENSG00000069206; CTA
TDIGLVASGTK

SEQ ID NO: 6958 - protein, 11 aa, Homo sapiens
  misc_feature: Table A; Target 6958; HLA-B*27:02; ADAM7; ENSG00000069206; CTA
TDIGLVASGTK

SEQ ID NO: 6959 - protein, 11 aa, Homo sapiens
  misc_feature: Table A; Target 6959; HLA-C*04:01; ADAM7; ENSG00000069206; CTA
TDIGLVASGTK

SEQ ID NO: 6960 - protein, 11 aa, Homo sapiens
  misc_feature: Table A; Target 6960; HLA-C*07:01; ADAM7; ENSG00000069206; CTA
TDIGLVASGTK

SEQ ID NO: 6961 - protein, 10 aa, Homo sapiens
  misc_feature: Table A; Target 6961; HLA-B*49:01; ADAM7; ENSG00000069206; CTA
TELNFTRKTV

SEQ ID NO: 6962 - protein, 8 aa, Homo sapiens
  misc_feature: Table A; Target 6962; HLA-A*30:01; ADAM7; ENSG00000069206; CTA
TEPILPEI

SEQ ID NO: 6963 - protein, 8 aa, Homo sapiens
  misc_feature: Table A; Target 6963; HLA-B*13:02; ADAM7; ENSG00000069206; CTA
TEPILPEI

SEQ ID NO: 6964 - protein, 8 aa, Homo sapiens
  misc_feature: Table A; Target 6964; HLA-B*18:01; ADAM7; ENSG00000069206; CTA
TEPILPEI

SEQ ID NO: 6965 - protein, 8 aa, Homo sapiens
  misc_feature: Table A; Target 6965; HLA-B*49:01; ADAM7; ENSG00000069206; CTA
TEPILPEI

SEQ ID NO: 6966 - protein, 8 aa, Homo sapiens
  misc_feature: Table A; Target 6966; HLA-B*51:01; ADAM7; ENSG00000069206; CTA
TEPILPEI

SEQ ID NO: 6967 - protein, 10 aa, Homo sapiens
  misc_feature: Table A; Target 6967; HLA-B*44:02; ADAM7; ENSG00000069206; CTA
TEPILPEIHF

SEQ ID NO: 6968 - protein, 10 aa, Homo sapiens
  misc_feature: Table A; Target 6968; HLA-B*44:03; ADAM7; ENSG00000069206; CTA
TEPILPEIHF

SEQ ID NO: 6969 - protein, 11 aa, Homo sapiens
  misc_feature: Table A; Target 6969; HLA-B*44:02; ADAM7; ENSG00000069206; CTA
TEPILPEIHFL

SEQ ID NO: 6970 - protein, 11 aa, Homo sapiens
  misc_feature: Table A; Target 6970; HLA-B*44:02; ADAM7; ENSG00000069206; CTA
TETLGVENKGY

SEQ ID NO: 6971 - protein, 11 aa, Homo sapiens
  misc_feature: Table A; Target 6971; HLA-B*44:03; ADAM7; ENSG00000069206; CTA
TETLGVENKGY

SEQ ID NO: 6972 - protein, 11 aa, Homo sapiens
  misc_feature: Table A; Target 6972; HLA-C*16:04; ADAM7; ENSG00000069206; CTA
TETLGVENKGY

SEQ ID NO: 6973 - protein, 10 aa, Homo sapiens
  misc_feature: Table A; Target 6973; HLA-A*23:01; ADAM7; ENSG00000069206; CTA
TFYSMKGEAF

SEQ ID NO: 6974 - protein, 10 aa, Homo sapiens
  misc_feature: Table A; Target 6974; HLA-A*24:02; ADAM7; ENSG00000069206; CTA
TFYSMKGEAF

SEQ ID NO: 6975 - protein, 10 aa, Homo sapiens
  misc_feature: Table A; Target 6975; HLA-C*14:02; ADAM7; ENSG00000069206; CTA
TFYSMKGEAF

SEQ ID NO: 6976 - protein, 9 aa, Homo sapiens
  misc_feature: Table A; Target 6976; HLA-A*03:01; ADAM7; ENSG00000069206; CTA
TGHSPACPK

SEQ ID NO: 6977 - protein, 9 aa, Homo sapiens
  misc_feature: Table A; Target 6977; HLA-A*03:02; ADAM7; ENSG00000069206; CTA
TGHSPACPK

SEQ ID NO: 6978 - protein, 9 aa, Homo sapiens
  misc_feature: Table A; Target 6978; HLA-A*11:01; ADAM7; ENSG00000069206; CTA
TGHSPACPK

SEQ ID NO: 6979 - protein, 9 aa, Homo sapiens
  misc_feature: Table A; Target 6979; HLA-C*04:01; ADAM7; ENSG00000069206; CTA
TGHSPACPK

SEQ ID NO: 6980 - protein, 9 aa, Homo sapiens
  misc_feature: Table A; Target 6980; HLA-C*06:02; ADAM7; ENSG00000069206; CTA
TGHSPACPK

SEQ ID NO: 6981 - protein, 9 aa, Homo sapiens
  misc_feature: Table A; Target 6981; HLA-C*07:06; ADAM7; ENSG00000069206; CTA
TGHSPACPK

SEQ ID NO: 6982 - protein, 9 aa, Homo sapiens
  misc_feature: Table A; Target 6982; HLA-B*38:01; ADAM7; ENSG00000069206; CTA
THDDDILKT

SEQ ID NO: 6983 - protein, 10 aa, Homo sapiens
  misc_feature: Table A; Target 6983; HLA-A*01:01; ADAM7; ENSG00000069206; CTA
THDDDILKTY

SEQ ID NO: 6984 - protein, 10 aa, Homo sapiens
  misc_feature: Table A; Target 6984; HLA-B*38:01; ADAM7; ENSG00000069206; CTA
THDDDILKTY

SEQ ID NO: 6985 - protein, 10 aa, Homo sapiens
  misc_feature: Table A; Target 6985; HLA-B*39:01; ADAM7; ENSG00000069206; CTA
THDDDILKTY

SEQ ID NO: 6986 - protein, 10 aa, Homo sapiens
  misc_feature: Table A; Target 6986; HLA-B*44:02; ADAM7; ENSG00000069206; CTA
THDDDILKTY

SEQ ID NO: 6987 - protein, 8 aa, Homo sapiens
  misc_feature: Table A; Target 6987; HLA-B*38:01; ADAM7; ENSG00000069206; CTA
THEDKIEL

SEQ ID NO: 6988 - protein, 8 aa, Homo sapiens
  misc_feature: Table A; Target 6988; HLA-B*39:01; ADAM7; ENSG00000069206; CTA
THEDKIEL

SEQ ID NO: 6989 - protein, 9 aa, Homo sapiens
  misc_feature: Table A; Target 6989; HLA-A*01:01; ADAM7; ENSG00000069206; CTA
THEDKIELY

SEQ ID NO: 6990 - protein, 9 aa, Homo sapiens
  misc_feature: Table A; Target 6990; HLA-B*38:01; ADAM7; ENSG00000069206; CTA
THEDKIELY

SEQ ID NO: 6991 - protein, 9 aa, Homo sapiens
  misc_feature: Table A; Target 6991; HLA-B*39:01; ADAM7; ENSG00000069206; CTA
THEDKIELY

SEQ ID NO: 6992 - protein, 9 aa, Homo sapiens
  misc_feature: Table A; Target 6992; HLA-C*07:01; ADAM7; ENSG00000069206; CTA
THEDKIELY

SEQ ID NO: 6993 - protein, 9 aa, Homo sapiens
  misc_feature: Table A; Target 6993; HLA-C*12:03; ADAM7; ENSG00000069206; CTA
THEDKIELY

SEQ ID NO: 6994 - protein, 9 aa, Homo sapiens
  misc_feature: Table A; Target 6994; HLA-C*16:02; ADAM7; ENSG00000069206; CTA
THEDKIELY

SEQ ID NO: 6995 - protein, 9 aa, Homo sapiens
  misc_feature: Table A; Target 6995; HLA-A*02:04; ADAM7; ENSG00000069206; CTA
TILVVVLVL

SEQ ID NO: 6996 - protein, 9 aa, Homo sapiens
  misc_feature: Table A; Target 6996; HLA-A*23:01; ADAM7; ENSG00000069206; CTA
TILVVVLVL

SEQ ID NO: 6997 - protein, 9 aa, Homo sapiens
  misc_feature: Table A; Target 6997; HLA-B*08:01; ADAM7; ENSG00000069206; CTA
TLHVTNITI

SEQ ID NO: 6998 - protein, 9 aa, Homo sapiens
  misc_feature: Table A; Target 6998; HLA-B*13:02; ADAM7; ENSG00000069206; CTA
TLHVTNITI

SEQ ID NO: 6999 - protein, 8 aa, Homo sapiens
  misc_feature: Table A; Target 6999; HLA-A*32:01; ADAM7; ENSG00000069206; CTA
TLNIHVTL

SEQ ID NO: 7000 - protein, 8 aa, Homo sapiens
  misc_feature: Table A; Target 7000; HLA-B*08:01; ADAM7; ENSG00000069206; CTA
TLNIHVTL

SEQ ID NO: 7001 - protein, 8 aa, Homo sapiens
  misc_feature: Table A; Target 7001; HLA-B*37:01; ADAM7; ENSG00000069206; CTA
TLNIHVTL

SEQ ID NO: 7002 - protein, 8 aa, Homo sapiens
  misc_feature: Table A; Target 7002; HLA-C*07:04; ADAM7; ENSG00000069206; CTA
TLNIHVTL

SEQ ID NO: 7003 - protein, 9 aa, Homo sapiens
  misc_feature: Table A; Target 7003; HLA-A*02:01; ADAM7; ENSG00000069206; CTA
TLNIHVTLV

SEQ ID NO: 7004 - protein, 9 aa, Homo sapiens
  misc_feature: Table A; Target 7004; HLA-A*02:03; ADAM7; ENSG00000069206; CTA
TLNIHVTLV

SEQ ID NO: 7005 - protein, 9 aa, Homo sapiens
  misc_feature: Table A; Target 7005; HLA-A*02:04; ADAM7; ENSG00000069206; CTA
TLNIHVTLV

SEQ ID NO: 7006 - protein, 9 aa, Homo sapiens
  misc_feature: Table A; Target 7006; HLA-A*02:07; ADAM7; ENSG00000069206; CTA
TLNIHVTLV

SEQ ID NO: 7007 - protein, 9 aa, Homo sapiens
  misc_feature: Table A; Target 7007; HLA-B*08:01; ADAM7; ENSG00000069206; CTA
TLNIHVTLV

SEQ ID NO: 7008 - protein, 9 aa, Homo sapiens
  misc_feature: Table A; Target 7008; HLA-B*13:02; ADAM7; ENSG00000069206; CTA
TLNIHVTLV

SEQ ID NO: 7009 - protein, 9 aa, Homo sapiens
  misc_feature: Table A; Target 7009; HLA-B*37:01; ADAM7; ENSG00000069206; CTA
TLNIHVTLV

SEQ ID NO: 7010 - protein, 9 aa, Homo sapiens
  misc_feature: Table A; Target 7010; HLA-B*55:01; ADAM7; ENSG00000069206; CTA
TLNIHVTLV

SEQ ID NO: 7011 - protein, 8 aa, Homo sapiens
  misc_feature: Table A; Target 7011; HLA-B*08:01; ADAM7; ENSG00000069206; CTA
TSIIKDLL

SEQ ID NO: 7012 - protein, 9 aa, Homo sapiens
  misc_feature: Table A; Target 7012; HLA-B*57:01; ADAM7; ENSG00000069206; CTA
TTLLRFSFW

SEQ ID NO: 7013 - protein, 8 aa, Homo sapiens
  misc_feature: Table A; Target 7013; HLA-B*08:01; ADAM7; ENSG00000069206; CTA
TVKCKTIF

SEQ ID NO: 7014 - protein, 9 aa, Homo sapiens
  misc_feature: Table A; Target 7014; HLA-A*33:03; ADAM7; ENSG00000069206; CTA
TYHLKDPQK

SEQ ID NO: 7015 - protein, 9 aa, Homo sapiens
  misc_feature: Table A; Target 7015; HLA-C*04:01; ADAM7; ENSG00000069206; CTA
TYHLKDPQK

SEQ ID NO: 7016 - protein, 9 aa, Homo sapiens
  misc_feature: Table A; Target 7016; HLA-C*06:02; ADAM7; ENSG00000069206; CTA
TYHLKDPQK

SEQ ID NO: 7017 - protein, 9 aa, Homo sapiens
  misc_feature: Table A; Target 7017; HLA-B*51:01; ADAM7; ENSG00000069206; CTA
VACEETLHV

SEQ ID NO: 7018 - protein, 8 aa, Homo sapiens
  misc_feature: Table A; Target 7018; HLA-A*11:01; ADAM7; ENSG00000069206; CTA
VADDTVYR

SEQ ID NO: 7019 - protein, 8 aa, Homo sapiens
  misc_feature: Table A; Target 7019; HLA-A*33:01; ADAM7; ENSG00000069206; CTA
VADDTVYR

SEQ ID NO: 7020 - protein, 8 aa, Homo sapiens
  misc_feature: Table A; Target 7020; HLA-A*33:03; ADAM7; ENSG00000069206; CTA
VADDTVYR

SEQ ID NO: 7021 - protein, 8 aa, Homo sapiens
  misc_feature: Table A; Target 7021; HLA-A*68:01; ADAM7; ENSG00000069206; CTA
VADDTVYR

SEQ ID NO: 7022 - protein, 8 aa, Homo sapiens
  misc_feature: Table A; Target 7022; HLA-C*04:01; ADAM7; ENSG00000069206; CTA
VADDTVYR

SEQ ID NO: 7023 - protein, 8 aa, Homo sapiens
  misc_feature: Table A; Target 7023; HLA-C*05:01; ADAM7; ENSG00000069206; CTA
VADDTVYR

SEQ ID NO: 7024 - protein, 8 aa, Homo sapiens
  misc_feature: Table A; Target 7024; HLA-C*07:06; ADAM7; ENSG00000069206; CTA
VADDTVYR

SEQ ID NO: 7025 - protein, 9 aa, Homo sapiens
  misc_feature: Table A; Target 7025; HLA-A*01:01; ADAM7; ENSG00000069206; CTA
VADDTVYRR

SEQ ID NO: 7026 - protein, 9 aa, Homo sapiens
  misc_feature: Table A; Target 7026; HLA-A*02:07; ADAM7; ENSG00000069206; CTA
VADDTVYRR

SEQ ID NO: 7027 - protein, 9 aa, Homo sapiens
  misc_feature: Table A; Target 7027; HLA-A*03:02; ADAM7; ENSG00000069206; CTA
VADDTVYRR

SEQ ID NO: 7028 - protein, 9 aa, Homo sapiens
  misc_feature: Table A; Target 7028; HLA-A*11:01; ADAM7; ENSG00000069206; CTA
VADDTVYRR

SEQ ID NO: 7029 - protein, 9 aa, Homo sapiens
  misc_feature: Table A; Target 7029; HLA-A*31:01; ADAM7; ENSG00000069206; CTA
VADDTVYRR

SEQ ID NO: 7030 - protein, 9 aa, Homo sapiens
  misc_feature: Table A; Target 7030; HLA-A*33:01; ADAM7; ENSG00000069206; CTA
VADDTVYRR

SEQ ID NO: 7031 - protein, 9 aa, Homo sapiens
  misc_feature: Table A; Target 7031; HLA-A*33:03; ADAM7; ENSG00000069206; CTA
VADDTVYRR

SEQ ID NO: 7032 - protein, 9 aa, Homo sapiens
  misc_feature: Table A; Target 7032; HLA-A*68:01; ADAM7; ENSG00000069206; CTA
VADDTVYRR

SEQ ID NO: 7033 - protein, 9 aa, Homo sapiens
  misc_feature: Table A; Target 7033; HLA-A*68:02; ADAM7; ENSG00000069206; CTA
VADDTVYRR

SEQ ID NO: 7034 - protein, 9 aa, Homo sapiens
  misc_feature: Table A; Target 7034; HLA-B*27:02; ADAM7; ENSG00000069206; CTA
VADDTVYRR

SEQ ID NO: 7035 - protein, 9 aa, Homo sapiens
  misc_feature: Table A; Target 7035; HLA-B*35:01; ADAM7; ENSG00000069206; CTA
VADDTVYRR

SEQ ID NO: 7036 - protein, 9 aa, Homo sapiens
  misc_feature: Table A; Target 7036; HLA-B*38:01; ADAM7; ENSG00000069206; CTA
VADDTVYRR

SEQ ID NO: 7037 - protein, 9 aa, Homo sapiens
  misc_feature: Table A; Target 7037; HLA-B*57:01; ADAM7; ENSG00000069206; CTA
VADDTVYRR

SEQ ID NO: 7038 - protein, 9 aa, Homo sapiens
  misc_feature: Table A; Target 7038; HLA-C*05:01; ADAM7; ENSG00000069206; CTA
VADDTVYRR

SEQ ID NO: 7039 - protein, 9 aa, Homo sapiens
  misc_feature: Table A; Target 7039; HLA-C*07:06; ADAM7; ENSG00000069206; CTA
VADDTVYRR

SEQ ID NO: 7040 - protein, 9 aa, Homo sapiens
  misc_feature: Table A; Target 7040; HLA-C*16:01; ADAM7; ENSG00000069206; CTA
VADDTVYRR

SEQ ID NO: 7041 - protein, 9 aa, Homo sapiens
  misc_feature: Table A; Target 7041; HLA-C*16:02; ADAM7; ENSG00000069206; CTA
VADDTVYRR

SEQ ID NO: 7042 - protein, 9 aa, Homo sapiens
  misc_feature: Table A; Target 7042; HLA-B*49:01; ADAM7; ENSG00000069206; CTA
VEGQQLVRP

SEQ ID NO: 7043 - protein, 10 aa, Homo sapiens
  misc_feature: Table A; Target 7043; HLA-B*27:02; ADAM7; ENSG00000069206; CTA
VEGQQLVRPK

SEQ ID NO: 7044 - protein, 9 aa, Homo sapiens
  misc_feature: Table A; Target 7044; HLA-A*23:01; ADAM7; ENSG00000069206; CTA
VGIGVLILL

SEQ ID NO: 7045 - protein, 10 aa, Homo sapiens
  misc_feature: Table A; Target 7045; HLA-B*38:01; ADAM7; ENSG00000069206; CTA
VHEYDSAASI

SEQ ID NO: 7046 - protein, 10 aa, Homo sapiens
  misc_feature: Table A; Target 7046; HLA-B*39:01; ADAM7; ENSG00000069206; CTA
VHEYDSAASI

SEQ ID NO: 7047 - protein, 9 aa, Homo sapiens
  misc_feature: Table A; Target 7047; HLA-A*23:01; ADAM7; ENSG00000069206; CTA
VIVGIGVLI

SEQ ID NO: 7048 - protein, 9 aa, Homo sapiens
  misc_feature: Table A; Target 7048; HLA-A*68:02; ADAM7; ENSG00000069206; CTA
VIVGIGVLI

SEQ ID NO: 7049 - protein, 9 aa, Homo sapiens
  misc_feature: Table A; Target 7049; HLA-B*13:02; ADAM7; ENSG00000069206; CTA
VIVGIGVLI

SEQ ID NO: 7050 - protein, 11 aa, Homo sapiens
  misc_feature: Table A; Target 7050; HLA-A*02:04; ADAM7; ENSG00000069206; CTA
VIVGIGVLILL

SEQ ID NO: 7051 - protein, 11 aa, Homo sapiens
  misc_feature: Table A; Target 7051; HLA-A*23:01; ADAM7; ENSG00000069206; CTA
VIVGIGVLILL

SEQ ID NO: 7052 - protein, 9 aa, Homo sapiens
  misc_feature: Table A; Target 7052; HLA-A*31:01; ADAM7; ENSG00000069206; CTA
VLILLVRYR

SEQ ID NO: 7053 - protein, 9 aa, Homo sapiens
  misc_feature: Table A; Target 7053; HLA-A*02:03; ADAM7; ENSG00000069206; CTA
VLKPGFTCA

SEQ ID NO: 7054 - protein, 9 aa, Homo sapiens
  misc_feature: Table A; Target 7054; HLA-B*46:01; ADAM7; ENSG00000069206; CTA
VLKPGFTCA

SEQ ID NO: 7055 - protein, 9 aa, Homo sapiens
  misc_feature: Table A; Target 7055; HLA-A*29:02; ADAM7; ENSG00000069206; CTA
VLLSGKWLY

SEQ ID NO: 7056 - protein, 9 aa, Homo sapiens
  misc_feature: Table A; Target 7056; HLA-A*02:01; ADAM7; ENSG00000069206; CTA
VLVIVGIGV

SEQ ID NO: 7057 - protein, 9 aa, Homo sapiens
  misc_feature: Table A; Target 7057; HLA-A*02:03; ADAM7; ENSG00000069206; CTA
VLVIVGIGV

SEQ ID NO: 7058 - protein, 9 aa, Homo sapiens
  misc_feature: Table A; Target 7058; HLA-A*02:04; ADAM7; ENSG00000069206; CTA
VLVIVGIGV

SEQ ID NO: 7059 - protein, 9 aa, Homo sapiens
  misc_feature: Table A; Target 7059; HLA-A*02:07; ADAM7; ENSG00000069206; CTA
VLVIVGIGV

SEQ ID NO: 7060 - protein, 9 aa, Homo sapiens
  misc_feature: Table A; Target 7060; HLA-B*13:02; ADAM7; ENSG00000069206; CTA
VLVIVGIGV

SEQ ID NO: 7061 - protein, 9 aa, Homo sapiens
  misc_feature: Table A; Target 7061; HLA-B*55:01; ADAM7; ENSG00000069206; CTA
VLVIVGIGV

SEQ ID NO: 7062 - protein, 9 aa, Homo sapiens
  misc_feature: Table A; Target 7062; HLA-A*02:01; ADAM7; ENSG00000069206; CTA
VLVLVIVGI

SEQ ID NO: 7063 - protein, 9 aa, Homo sapiens
  misc_feature: Table A; Target 7063; HLA-A*02:04; ADAM7; ENSG00000069206; CTA
VLVLVIVGI

SEQ ID NO: 7064 - protein, 9 aa, Homo sapiens
  misc_feature: Table A; Target 7064; HLA-A*02:07; ADAM7; ENSG00000069206; CTA
VLVLVIVGI

SEQ ID NO: 7065 - protein, 9 aa, Homo sapiens
  misc_feature: Table A; Target 7065; HLA-A*23:01; ADAM7; ENSG00000069206; CTA
VLVLVIVGI

SEQ ID NO: 7066 - protein, 9 aa, Homo sapiens
  misc_feature: Table A; Target 7066; HLA-B*13:02; ADAM7; ENSG00000069206; CTA
VLVLVIVGI

SEQ ID NO: 7067 - protein, 8 aa, Homo sapiens
  misc_feature: Table A; Target 7067; HLA-C*05:01; ADAM7; ENSG00000069206; CTA
VMDSDGSI

SEQ ID NO: 7068 - protein, 10 aa, Homo sapiens
  misc_feature: Table A; Target 7068; HLA-A*02:01; ADAM7; ENSG00000069206; CTA
VMDSDGSIPA

SEQ ID NO: 7069 - protein, 11 aa, Homo sapiens
  misc_feature: Table A; Target 7069; HLA-A*02:01; ADAM7; ENSG00000069206; CTA
VMDSDGSIPAL

SEQ ID NO: 7070 - protein, 11 aa, Homo sapiens
  misc_feature: Table A; Target 7070; HLA-A*02:07; ADAM7; ENSG00000069206; CTA
VMDSDGSIPAL

SEQ ID NO: 7071 - protein, 11 aa, Homo sapiens
  misc_feature: Table A; Target 7071; HLA-B*38:01; ADAM7; ENSG00000069206; CTA
VMDSDGSIPAL

SEQ ID NO: 7072 - protein, 11 aa, Homo sapiens
  misc_feature: Table A; Target 7072; HLA-B*39:01; ADAM7; ENSG00000069206; CTA
VMDSDGSIPAL

SEQ ID NO: 7073 - protein, 11 aa, Homo sapiens
  misc_feature: Table A; Target 7073; HLA-C*05:01; ADAM7; ENSG00000069206; CTA
VMDSDGSIPAL

SEQ ID NO: 7074 - protein, 9 aa, Homo sapiens
  misc_feature: Table A; Target 7074; HLA-A*11:01; ADAM7; ENSG00000069206; CTA
VNFVNMIYK

SEQ ID NO: 7075 - protein, 8 aa, Homo sapiens
  misc_feature: Table A; Target 7075; HLA-B*08:01; ADAM7; ENSG00000069206; CTA
VNMIYKTL

SEQ ID NO: 7076 - protein, 9 aa, Homo sapiens
  misc_feature: Table A; Target 7076; HLA-B*07:02; ADAM7; ENSG00000069206; CTA
VPYGANYSC

SEQ ID NO: 7077 - protein, 9 aa, Homo sapiens
  misc_feature: Table A; Target 7077; HLA-B*35:03; ADAM7; ENSG00000069206; CTA
VPYGANYSC

SEQ ID NO: 7078 - protein, 9 aa, Homo sapiens
  misc_feature: Table A; Target 7078; HLA-B*51:01; ADAM7; ENSG00000069206; CTA
VPYGANYSC

SEQ ID NO: 7079 - protein, 9 aa, Homo sapiens
  misc_feature: Table A; Target 7079; HLA-B*54:01; ADAM7; ENSG00000069206; CTA
VPYGANYSC

SEQ ID NO: 7080 - protein, 9 aa, Homo sapiens
  misc_feature: Table A; Target 7080; HLA-B*55:01; ADAM7; ENSG00000069206; CTA
VPYGANYSC

SEQ ID NO: 7081 - protein, 9 aa, Homo sapiens
  misc_feature: Table A; Target 7081; HLA-B*56:01; ADAM7; ENSG00000069206; CTA
VPYGANYSC

SEQ ID NO: 7082 - protein, 8 aa, Homo sapiens
  misc_feature: Table A; Target 7082; HLA-C*12:03; ADAM7; ENSG00000069206; CTA
VQGISYPG

SEQ ID NO: 7083 - protein, 9 aa, Homo sapiens
  misc_feature: Table A; Target 7083; HLA-A*02:01; ADAM7; ENSG00000069206; CTA
VQSPPTETL

SEQ ID NO: 7084 - protein, 9 aa, Homo sapiens
  misc_feature: Table A; Target 7084; HLA-A*02:03; ADAM7; ENSG00000069206; CTA
VQSPPTETL

SEQ ID NO: 7085 - protein, 9 aa, Homo sapiens
  misc_feature: Table A; Target 7085; HLA-A*23:01; ADAM7; ENSG00000069206; CTA
VQSPPTETL

SEQ ID NO: 7086 - protein, 9 aa, Homo sapiens
  misc_feature: Table A; Target 7086; HLA-A*24:02; ADAM7; ENSG00000069206; CTA
VQSPPTETL

SEQ ID NO: 7087 - protein, 9 aa, Homo sapiens
  misc_feature: Table A; Target 7087; HLA-A*25:01; ADAM7; ENSG00000069206; CTA
VQSPPTETL

SEQ ID NO: 7088 - protein, 9 aa, Homo sapiens
  misc_feature: Table A; Target 7088; HLA-A*30:01; ADAM7; ENSG00000069206; CTA
VQSPPTETL

SEQ ID NO: 7089 - protein, 9 aa, Homo sapiens
  misc_feature: Table A; Target 7089; HLA-A*32:01; ADAM7; ENSG00000069206; CTA
VQSPPTETL

SEQ ID NO: 7090 - protein, 9 aa, Homo sapiens
  misc_feature: Table A; Target 7090; HLA-B*13:02; ADAM7; ENSG00000069206; CTA
VQSPPTETL

SEQ ID NO: 7091 - protein, 9 aa, Homo sapiens
  misc_feature: Table A; Target 7091; HLA-B*15:03; ADAM7; ENSG00000069206; CTA
VQSPPTETL

SEQ ID NO: 7092 - protein, 9 aa, Homo sapiens
  misc_feature: Table A; Target 7092; HLA-B*27:05; ADAM7; ENSG00000069206; CTA
VQSPPTETL

SEQ ID NO: 7093 - protein, 9 aa, Homo sapiens
  misc_feature: Table A; Target 7093; HLA-B*35:03; ADAM7; ENSG00000069206; CTA
VQSPPTETL

SEQ ID NO: 7094 - protein, 9 aa, Homo sapiens
  misc_feature: Table A; Target 7094; HLA-B*37:01; ADAM7; ENSG00000069206; CTA
VQSPPTETL

SEQ ID NO: 7095 - protein, 9 aa, Homo sapiens
  misc_feature: Table A; Target 7095; HLA-B*38:01; ADAM7; ENSG00000069206; CTA
VQSPPTETL

SEQ ID NO: 7096 - protein, 9 aa, Homo sapiens
  misc_feature: Table A; Target 7096; HLA-B*39:01; ADAM7; ENSG00000069206; CTA
VQSPPTETL

SEQ ID NO: 7097 - protein, 9 aa, Homo sapiens
  misc_feature: Table A; Target 7097; HLA-B*40:01; ADAM7; ENSG00000069206; CTA
VQSPPTETL

SEQ ID NO: 7098 - protein, 9 aa, Homo sapiens
  misc_feature: Table A; Target 7098; HLA-B*40:02; ADAM7; ENSG00000069206; CTA
VQSPPTETL

SEQ ID NO: 7099 - protein, 9 aa, Homo sapiens
  misc_feature: Table A; Target 7099; HLA-B*46:01; ADAM7; ENSG00000069206; CTA
VQSPPTETL

SEQ ID NO: 7100 - protein, 9 aa, Homo sapiens
  misc_feature: Table A; Target 7100; HLA-B*49:01; ADAM7; ENSG00000069206; CTA
VQSPPTETL

SEQ ID NO: 7101 - protein, 9 aa, Homo sapiens
  misc_feature: Table A; Target 7101; HLA-B*58:01; ADAM7; ENSG00000069206; CTA
VQSPPTETL

SEQ ID NO: 7102 - protein, 9 aa, Homo sapiens
  misc_feature: Table A; Target 7102; HLA-C*01:02; ADAM7; ENSG00000069206; CTA
VQSPPTETL

SEQ ID NO: 7103 - protein, 9 aa, Homo sapiens
  misc_feature: Table A; Target 7103; HLA-C*02:02; ADAM7; ENSG00000069206; CTA
VQSPPTETL

SEQ ID NO: 7104 - protein, 9 aa, Homo sapiens
  misc_feature: Table A; Target 7104; HLA-C*03:03; ADAM7; ENSG00000069206; CTA
VQSPPTETL

SEQ ID NO: 7105 - protein, 9 aa, Homo sapiens
  misc_feature: Table A; Target 7105; HLA-C*03:04; ADAM7; ENSG00000069206; CTA
VQSPPTETL

SEQ ID NO: 7106 - protein, 9 aa, Homo sapiens
  misc_feature: Table A; Target 7106; HLA-C*05:01; ADAM7; ENSG00000069206; CTA
VQSPPTETL

SEQ ID NO: 7107 - protein, 9 aa, Homo sapiens
  misc_feature: Table A; Target 7107; HLA-C*06:02; ADAM7; ENSG00000069206; CTA
VQSPPTETL

SEQ ID NO: 7108 - protein, 9 aa, Homo sapiens
  misc_feature: Table A; Target 7108; HLA-C*07:02; ADAM7; ENSG00000069206; CTA
VQSPPTETL

SEQ ID NO: 7109 - protein, 9 aa, Homo sapiens
  misc_feature: Table A; Target 7109; HLA-C*07:04; ADAM7; ENSG00000069206; CTA
VQSPPTETL

SEQ ID NO: 7110 - protein, 9 aa, Homo sapiens
  misc_feature: Table A; Target 7110; HLA-C*12:03; ADAM7; ENSG00000069206; CTA
VQSPPTETL

SEQ ID NO: 7111 - protein, 9 aa, Homo sapiens
  misc_feature: Table A; Target 7111; HLA-C*14:02; ADAM7; ENSG00000069206; CTA
VQSPPTETL

SEQ ID NO: 7112 - protein, 9 aa, Homo sapiens
  misc_feature: Table A; Target 7112; HLA-C*16:04; ADAM7; ENSG00000069206; CTA
VQSPPTETL

SEQ ID NO: 7113 - protein, 11 aa, Homo sapiens
  misc_feature: Table A; Target 7113; HLA-A*02:01; ADAM7; ENSG00000069206; CTA
VQSPPTETLGV

SEQ ID NO: 7114 - protein, 11 aa, Homo sapiens
  misc_feature: Table A; Target 7114; HLA-A*30:01; ADAM7; ENSG00000069206; CTA
VQSPPTETLGV

SEQ ID NO: 7115 - protein, 11 aa, Homo sapiens
  misc_feature: Table A; Target 7115; HLA-B*13:02; ADAM7; ENSG00000069206; CTA
VQSPPTETLGV

SEQ ID NO: 7116 - protein, 11 aa, Homo sapiens
  misc_feature: Table A; Target 7116; HLA-B*38:01; ADAM7; ENSG00000069206; CTA
VQSPPTETLGV

SEQ ID NO: 7117 - protein, 11 aa, Homo sapiens
  misc_feature: Table A; Target 7117; HLA-B*39:01; ADAM7; ENSG00000069206; CTA
VQSPPTETLGV

SEQ ID NO: 7118 - protein, 11 aa, Homo sapiens
  misc_feature: Table A; Target 7118; HLA-C*06:02; ADAM7; ENSG00000069206; CTA
VQSPPTETLGV

SEQ ID NO: 7119 - protein, 9 aa, Homo sapiens
  misc_feature: Table A; Target 7119; HLA-A*24:02; ADAM7; ENSG00000069206; CTA
VRPKKLPLI

SEQ ID NO: 7120 - protein, 8 aa, Homo sapiens
  misc_feature: Table A; Target 7120; HLA-C*03:04; ADAM7; ENSG00000069206; CTA
VTLVGIEI

SEQ ID NO: 7121 - protein, 9 aa, Homo sapiens
  misc_feature: Table A; Target 7121; HLA-B*57:01; ADAM7; ENSG00000069206; CTA
VTLVGIEIW

SEQ ID NO: 7122 - protein, 9 aa, Homo sapiens
  misc_feature: Table A; Target 7122; HLA-B*58:01; ADAM7; ENSG00000069206; CTA
VTLVGIEIW

SEQ ID NO: 7123 - protein, 9 aa, Homo sapiens
  misc_feature: Table A; Target 7123; HLA-A*01:01; ADAM7; ENSG00000069206; CTA
VTNITILVV

SEQ ID NO: 7124 - protein, 9 aa, Homo sapiens
  misc_feature: Table A; Target 7124; HLA-B*13:02; ADAM7; ENSG00000069206; CTA
VTNITILVV

SEQ ID NO: 7125 - protein, 9 aa, Homo sapiens
  misc_feature: Table A; Target 7125; HLA-C*06:02; ADAM7; ENSG00000069206; CTA
VTNITILVV

SEQ ID NO: 7126 - protein, 9 aa, Homo sapiens
  misc_feature: Table A; Target 7126; HLA-C*12:03; ADAM7; ENSG00000069206; CTA
VTNITILVV

SEQ ID NO: 7127 - protein, 9 aa, Homo sapiens
  misc_feature: Table A; Target 7127; HLA-C*16:02; ADAM7; ENSG00000069206; CTA
VTNITILVV

SEQ ID NO: 7128 - protein, 10 aa, Homo sapiens
  misc_feature: Table A; Target 7128; HLA-A*29:02; ADAM7; ENSG00000069206; CTA
VVLLSGKWLY

SEQ ID NO: 7129 - protein, 8 aa, Homo sapiens
  misc_feature: Table A; Target 7129; HLA-B*51:01; ADAM7; ENSG00000069206; CTA
VVVLVLVI

SEQ ID NO: 7130 - protein, 10 aa, Homo sapiens
  misc_feature: Table A; Target 7130; HLA-C*07:01; ADAM7; ENSG00000069206; CTA
VYISTNCPSQ

SEQ ID NO: 7131 - protein, 9 aa, Homo sapiens
  misc_feature: Table A; Target 7131; HLA-A*02:01; ADAM7; ENSG00000069206; CTA
WLYSHVQGI

SEQ ID NO: 7132 - protein, 9 aa, Homo sapiens
  misc_feature: Table A; Target 7132; HLA-A*02:03; ADAM7; ENSG00000069206; CTA
WLYSHVQGI

SEQ ID NO: 7133 - protein, 9 aa, Homo sapiens
  misc_feature: Table A; Target 7133; HLA-A*02:04; ADAM7; ENSG00000069206; CTA
WLYSHVQGI

SEQ ID NO: 7134 - protein, 9 aa, Homo sapiens
  misc_feature: Table A; Target 7134; HLA-A*02:07; ADAM7; ENSG00000069206; CTA
WLYSHVQGI

SEQ ID NO: 7135 - protein, 9 aa, Homo sapiens
  misc_feature: Table A; Target 7135; HLA-B*13:02; ADAM7; ENSG00000069206; CTA
WLYSHVQGI

SEQ ID NO: 7136 - protein, 10 aa, Homo sapiens
  misc_feature: Table A; Target 7136; HLA-A*01:01; ADAM7; ENSG00000069206; CTA
WTHEDKIELY

SEQ ID NO: 7137 - protein, 10 aa, Homo sapiens
  misc_feature: Table A; Target 7137; HLA-C*03:03; ADAM7; ENSG00000069206; CTA
YCTGGELSSL

SEQ ID NO: 7138 - protein, 10 aa, Homo sapiens
  misc_feature: Table A; Target 7138; HLA-C*03:04; ADAM7; ENSG00000069206; CTA
YCTGGELSSL

SEQ ID NO: 7139 - protein, 9 aa, Homo sapiens
  misc_feature: Table A; Target 7139; HLA-B*40:02; ADAM7; ENSG00000069206; CTA
YDSAASIST

SEQ ID NO: 7140 - protein, 9 aa, Homo sapiens
  misc_feature: Table A; Target 7140; HLA-C*07:04; ADAM7; ENSG00000069206; CTA
YDSAASIST

SEQ ID NO: 7141 - protein, 10 aa, Homo sapiens
  misc_feature: Table A; Target 7141; HLA-B*40:02; ADAM7; ENSG00000069206; CTA
YDSAASISTC

SEQ ID NO: 7142 - protein, 10 aa, Homo sapiens
  misc_feature: Table A; Target 7142; HLA-C*12:03; ADAM7; ENSG00000069206; CTA
YDSAASISTC

SEQ ID NO: 7143 - protein, 9 aa, Homo sapiens
  misc_feature: Table A; Target 7143; HLA-A*30:01; ADAM7; ENSG00000069206; CTA
YEEELLYEI

SEQ ID NO: 7144 - protein, 9 aa, Homo sapiens
  misc_feature: Table A; Target 7144; HLA-B*13:02; ADAM7; ENSG00000069206; CTA
YEEELLYEI

SEQ ID NO: 7145 - protein, 9 aa, Homo sapiens
  misc_feature: Table A; Target 7145; HLA-B*18:01; ADAM7; ENSG00000069206; CTA
YEEELLYEI

SEQ ID NO: 7146 - protein, 9 aa, Homo sapiens
  misc_feature: Table A; Target 7146; HLA-B*38:01; ADAM7; ENSG00000069206; CTA
YEEELLYEI

SEQ ID NO: 7147 - protein, 9 aa, Homo sapiens
  misc_feature: Table A; Target 7147; HLA-B*40:01; ADAM7; ENSG00000069206; CTA
YEEELLYEI

SEQ ID NO: 7148 - protein, 9 aa, Homo sapiens
  misc_feature: Table A; Target 7148; HLA-B*49:01; ADAM7; ENSG00000069206; CTA
YEEELLYEI

SEQ ID NO: 7149 - protein, 11 aa, Homo sapiens
  misc_feature: Table A; Target 7149; HLA-A*30:01; ADAM7; ENSG00000069206; CTA
YEEELLYEIKL

SEQ ID NO: 7150 - protein, 11 aa, Homo sapiens
  misc_feature: Table A; Target 7150; HLA-B*40:01; ADAM7; ENSG00000069206; CTA
YEEELLYEIKL

SEQ ID NO: 7151 - protein, 10 aa, Homo sapiens
  misc_feature: Table A; Target 7151; HLA-B*40:02; ADAM7; ENSG00000069206; CTA
YEIKLNRKTL

SEQ ID NO: 7152 - protein, 10 aa, Homo sapiens
  misc_feature: Table A; Target 7152; HLA-C*03:04; ADAM7; ENSG00000069206; CTA
YGANYSCTEL

SEQ ID NO: 7153 - protein, 9 aa, Homo sapiens
  misc_feature: Table A; Target 7153; HLA-A*02:07; ADAM7; ENSG00000069206; CTA
YHDSTDIGL

SEQ ID NO: 7154 - protein, 9 aa, Homo sapiens
  misc_feature: Table A; Target 7154; HLA-B*27:05; ADAM7; ENSG00000069206; CTA
YHDSTDIGL

SEQ ID NO: 7155 - protein, 9 aa, Homo sapiens
  misc_feature: Table A; Target 7155; HLA-B*35:03; ADAM7; ENSG00000069206; CTA
YHDSTDIGL

SEQ ID NO: 7156 - protein, 9 aa, Homo sapiens
  misc_feature: Table A; Target 7156; HLA-B*38:01; ADAM7; ENSG00000069206; CTA
YHDSTDIGL

SEQ ID NO: 7157 - protein, 9 aa, Homo sapiens
  misc_feature: Table A; Target 7157; HLA-B*39:01; ADAM7; ENSG00000069206; CTA
YHDSTDIGL

SEQ ID NO: 7158 - protein, 9 aa, Homo sapiens
  misc_feature: Table A; Target 7158; HLA-B*40:01; ADAM7; ENSG00000069206; CTA
YHDSTDIGL

SEQ ID NO: 7159 - protein, 9 aa, Homo sapiens
  misc_feature: Table A; Target 7159; HLA-B*55:01; ADAM7; ENSG00000069206; CTA
YHDSTDIGL

SEQ ID NO: 7160 - protein, 9 aa, Homo sapiens
  misc_feature: Table A; Target 7160; HLA-C*05:01; ADAM7; ENSG00000069206; CTA
YHDSTDIGL

SEQ ID NO: 7161 - protein, 9 aa, Homo sapiens
  misc_feature: Table A; Target 7161; HLA-C*07:04; ADAM7; ENSG00000069206; CTA
YHDSTDIGL

SEQ ID NO: 7162 - protein, 10 aa, Homo sapiens
  misc_feature: Table A; Target 7162; HLA-B*38:01; ADAM7; ENSG00000069206; CTA
YHDSTDIGLV

SEQ ID NO: 7163 - protein, 10 aa, Homo sapiens
  misc_feature: Table A; Target 7163; HLA-B*39:01; ADAM7; ENSG00000069206; CTA
YHDSTDIGLV

SEQ ID NO: 7164 - protein, 11 aa, Homo sapiens
  misc_feature: Table A; Target 7164; HLA-B*38:01; ADAM7; ENSG00000069206; CTA
YHDSTDIGLVA

SEQ ID NO: 7165 - protein, 8 aa, Homo sapiens
  misc_feature: Table A; Target 7165; HLA-A*01:01; ADAM7; ENSG00000069206; CTA
YLIEPVKY

SEQ ID NO: 7166 - protein, 8 aa, Homo sapiens
  misc_feature: Table A; Target 7166; HLA-A*25:01; ADAM7; ENSG00000069206; CTA
YLIEPVKY

SEQ ID NO: 7167 - protein, 8 aa, Homo sapiens
  misc_feature: Table A; Target 7167; HLA-A*26:01; ADAM7; ENSG00000069206; CTA
YLIEPVKY

SEQ ID NO: 7168 - protein, 8 aa, Homo sapiens
  misc_feature: Table A; Target 7168; HLA-A*29:02; ADAM7; ENSG00000069206; CTA
YLIEPVKY

SEQ ID NO: 7169 - protein, 8 aa, Homo sapiens
  misc_feature: Table A; Target 7169; HLA-A*30:02; ADAM7; ENSG00000069206; CTA
YLIEPVKY

SEQ ID NO: 7170 - protein, 8 aa, Homo sapiens
  misc_feature: Table A; Target 7170; HLA-A*32:01; ADAM7; ENSG00000069206; CTA
YLIEPVKY

SEQ ID NO: 7171 - protein, 8 aa, Homo sapiens
  misc_feature: Table A; Target 7171; HLA-B*08:01; ADAM7; ENSG00000069206; CTA
YLIEPVKY

SEQ ID NO: 7172 - protein, 8 aa, Homo sapiens
  misc_feature: Table A; Target 7172; HLA-B*13:02; ADAM7; ENSG00000069206; CTA
YLIEPVKY

SEQ ID NO: 7173 - protein, 8 aa, Homo sapiens
  misc_feature: Table A; Target 7173; HLA-B*15:01; ADAM7; ENSG00000069206; CTA
YLIEPVKY

SEQ ID NO: 7174 - protein, 8 aa, Homo sapiens
  misc_feature: Table A; Target 7174; HLA-B*15:03; ADAM7; ENSG00000069206; CTA
YLIEPVKY

SEQ ID NO: 7175 - protein, 8 aa, Homo sapiens
  misc_feature: Table A; Target 7175; HLA-B*18:01; ADAM7; ENSG00000069206; CTA
YLIEPVKY

SEQ ID NO: 7176 - protein, 8 aa, Homo sapiens
  misc_feature: Table A; Target 7176; HLA-B*37:01; ADAM7; ENSG00000069206; CTA
YLIEPVKY

SEQ ID NO: 7177 - protein, 8 aa, Homo sapiens
  misc_feature: Table A; Target 7177; HLA-B*39:01; ADAM7; ENSG00000069206; CTA
YLIEPVKY

SEQ ID NO: 7178 - protein, 8 aa, Homo sapiens
  misc_feature: Table A; Target 7178; HLA-B*46:01; ADAM7; ENSG00000069206; CTA
YLIEPVKY

SEQ ID NO: 7179 - protein, 8 aa, Homo sapiens
  misc_feature: Table A; Target 7179; HLA-B*58:01; ADAM7; ENSG00000069206; CTA
YLIEPVKY

SEQ ID NO: 7180 - protein, 8 aa, Homo sapiens
  misc_feature: Table A; Target 7180; HLA-C*02:02; ADAM7; ENSG00000069206; CTA
YLIEPVKY

SEQ ID NO: 7181 - protein, 8 aa, Homo sapiens
  misc_feature: Table A; Target 7181; HLA-C*03:03; ADAM7; ENSG00000069206; CTA
YLIEPVKY

SEQ ID NO: 7182 - protein, 8 aa, Homo sapiens
  misc_feature: Table A; Target 7182; HLA-C*04:01; ADAM7; ENSG00000069206; CTA
YLIEPVKY

SEQ ID NO: 7183 - protein, 8 aa, Homo sapiens
  misc_feature: Table A; Target 7183; HLA-C*05:01; ADAM7; ENSG00000069206; CTA
YLIEPVKY

SEQ ID NO: 7184 - protein, 8 aa, Homo sapiens
  misc_feature: Table A; Target 7184; HLA-C*07:01; ADAM7; ENSG00000069206; CTA
YLIEPVKY

SEQ ID NO: 7185 - protein, 8 aa, Homo sapiens
  misc_feature: Table A; Target 7185; HLA-C*07:04; ADAM7; ENSG00000069206; CTA
YLIEPVKY

SEQ ID NO: 7186 - protein, 8 aa, Homo sapiens
  misc_feature: Table A; Target 7186; HLA-C*12:03; ADAM7; ENSG00000069206; CTA
YLIEPVKY

SEQ ID NO: 7187 - protein, 8 aa, Homo sapiens
  misc_feature: Table A; Target 7187; HLA-C*14:02; ADAM7; ENSG00000069206; CTA
YLIEPVKY

SEQ ID NO: 7188 - protein, 8 aa, Homo sapiens
  misc_feature: Table A; Target 7188; HLA-C*16:01; ADAM7; ENSG00000069206; CTA
YLIEPVKY

SEQ ID NO: 7189 - protein, 8 aa, Homo sapiens
  misc_feature: Table A; Target 7189; HLA-C*16:02; ADAM7; ENSG00000069206; CTA
YLIEPVKY

SEQ ID NO: 7190 - protein, 9 aa, Homo sapiens
  misc_feature: Table A; Target 7190; HLA-B*08:01; ADAM7; ENSG00000069206; CTA
YLKDYKPTC

SEQ ID NO: 7191 - protein, 11 aa, Homo sapiens
  misc_feature: Table A; Target 7191; HLA-A*29:02; ADAM7; ENSG00000069206; CTA
YNLRVPYGANY

SEQ ID NO: 7192 - protein, 9 aa, Homo sapiens
  misc_feature: Table A; Target 7192; HLA-A*01:01; ADAM7; ENSG00000069206; CTA
YQGSIVHEY

SEQ ID NO: 7193 - protein, 9 aa, Homo sapiens
  misc_feature: Table A; Target 7193; HLA-A*03:02; ADAM7; ENSG00000069206; CTA
YQGSIVHEY

SEQ ID NO: 7194 - protein, 9 aa, Homo sapiens
  misc_feature: Table A; Target 7194; HLA-A*23:01; ADAM7; ENSG00000069206; CTA
YQGSIVHEY

SEQ ID NO: 7195 - protein, 9 aa, Homo sapiens
  misc_feature: Table A; Target 7195; HLA-A*24:02; ADAM7; ENSG00000069206; CTA
YQGSIVHEY

SEQ ID NO: 7196 - protein, 9 aa, Homo sapiens
  misc_feature: Table A; Target 7196; HLA-A*25:01; ADAM7; ENSG00000069206; CTA
YQGSIVHEY

SEQ ID NO: 7197 - protein, 9 aa, Homo sapiens
  misc_feature: Table A; Target 7197; HLA-A*26:01; ADAM7; ENSG00000069206; CTA
YQGSIVHEY

SEQ ID NO: 7198 - protein, 9 aa, Homo sapiens
  misc_feature: Table A; Target 7198; HLA-A*29:02; ADAM7; ENSG00000069206; CTA
YQGSIVHEY

SEQ ID NO: 7199 - protein, 9 aa, Homo sapiens
  misc_feature: Table A; Target 7199; HLA-A*30:01; ADAM7; ENSG00000069206; CTA
YQGSIVHEY

SEQ ID NO: 7200 - protein, 9 aa, Homo sapiens
  misc_feature: Table A; Target 7200; HLA-A*30:02; ADAM7; ENSG00000069206; CTA
YQGSIVHEY

SEQ ID NO: 7201 - protein, 9 aa, Homo sapiens
  misc_feature: Table A; Target 7201; HLA-A*32:01; ADAM7; ENSG00000069206; CTA
YQGSIVHEY

SEQ ID NO: 7202 - protein, 9 aa, Homo sapiens
  misc_feature: Table A; Target 7202; HLA-A*33:03; ADAM7; ENSG00000069206; CTA
YQGSIVHEY

SEQ ID NO: 7203 - protein, 9 aa, Homo sapiens
  misc_feature: Table A; Target 7203; HLA-A*68:01; ADAM7; ENSG00000069206; CTA
YQGSIVHEY

SEQ ID NO: 7204 - protein, 9 aa, Homo sapiens
  misc_feature: Table A; Target 7204; HLA-A*68:02; ADAM7; ENSG00000069206; CTA
YQGSIVHEY

SEQ ID NO: 7205 - protein, 9 aa, Homo sapiens
  misc_feature: Table A; Target 7205; HLA-B*13:02; ADAM7; ENSG00000069206; CTA
YQGSIVHEY

SEQ ID NO: 7206 - protein, 9 aa, Homo sapiens
  misc_feature: Table A; Target 7206; HLA-B*15:03; ADAM7; ENSG00000069206; CTA
YQGSIVHEY

SEQ ID NO: 7207 - protein, 9 aa, Homo sapiens
  misc_feature: Table A; Target 7207; HLA-B*18:01; ADAM7; ENSG00000069206; CTA
YQGSIVHEY

SEQ ID NO: 7208 - protein, 9 aa, Homo sapiens
  misc_feature: Table A; Target 7208; HLA-B*27:02; ADAM7; ENSG00000069206; CTA
YQGSIVHEY

SEQ ID NO: 7209 - protein, 9 aa, Homo sapiens
  misc_feature: Table A; Target 7209; HLA-B*27:05; ADAM7; ENSG00000069206; CTA
YQGSIVHEY

SEQ ID NO: 7210 - protein, 9 aa, Homo sapiens
  misc_feature: Table A; Target 7210; HLA-B*35:01; ADAM7; ENSG00000069206; CTA
YQGSIVHEY

SEQ ID NO: 7211 - protein, 9 aa, Homo sapiens
  misc_feature: Table A; Target 7211; HLA-B*37:01; ADAM7; ENSG00000069206; CTA
YQGSIVHEY

SEQ ID NO: 7212 - protein, 9 aa, Homo sapiens
  misc_feature: Table A; Target 7212; HLA-B*38:01; ADAM7; ENSG00000069206; CTA
YQGSIVHEY

SEQ ID NO: 7213 - protein, 9 aa, Homo sapiens
  misc_feature: Table A; Target 7213; HLA-B*39:01; ADAM7; ENSG00000069206; CTA
YQGSIVHEY

SEQ ID NO: 7214 - protein, 9 aa, Homo sapiens
  misc_feature: Table A; Target 7214; HLA-B*40:01; ADAM7; ENSG00000069206; CTA
YQGSIVHEY

SEQ ID NO: 7215 - protein, 9 aa, Homo sapiens
  misc_feature: Table A; Target 7215; HLA-B*44:02; ADAM7; ENSG00000069206; CTA
YQGSIVHEY

SEQ ID NO: 7216 - protein, 9 aa, Homo sapiens
  misc_feature: Table A; Target 7216; HLA-B*44:03; ADAM7; ENSG00000069206; CTA
YQGSIVHEY

SEQ ID NO: 7217 - protein, 9 aa, Homo sapiens
  misc_feature: Table A; Target 7217; HLA-B*46:01; ADAM7; ENSG00000069206; CTA
YQGSIVHEY

SEQ ID NO: 7218 - protein, 9 aa, Homo sapiens
  misc_feature: Table A; Target 7218; HLA-B*57:01; ADAM7; ENSG00000069206; CTA
YQGSIVHEY

SEQ ID NO: 7219 - protein, 9 aa, Homo sapiens
  misc_feature: Table A; Target 7219; HLA-B*58:01; ADAM7; ENSG00000069206; CTA
YQGSIVHEY

SEQ ID NO: 7220 - protein, 9 aa, Homo sapiens
  misc_feature: Table A; Target 7220; HLA-C*01:02; ADAM7; ENSG00000069206; CTA
YQGSIVHEY

SEQ ID NO: 7221 - protein, 9 aa, Homo sapiens
  misc_feature: Table A; Target 7221; HLA-C*02:02; ADAM7; ENSG00000069206; CTA
YQGSIVHEY

SEQ ID NO: 7222 - protein, 9 aa, Homo sapiens
  misc_feature: Table A; Target 7222; HLA-C*03:03; ADAM7; ENSG00000069206; CTA
YQGSIVHEY

SEQ ID NO: 7223 - protein, 9 aa, Homo sapiens
  misc_feature: Table A; Target 7223; HLA-C*03:04; ADAM7; ENSG00000069206; CTA
YQGSIVHEY

SEQ ID NO: 7224 - protein, 9 aa, Homo sapiens
  misc_feature: Table A; Target 7224; HLA-C*04:01; ADAM7; ENSG00000069206; CTA
YQGSIVHEY

SEQ ID NO: 7225 - protein, 9 aa, Homo sapiens
  misc_feature: Table A; Target 7225; HLA-C*06:02; ADAM7; ENSG00000069206; CTA
YQGSIVHEY

SEQ ID NO: 7226 - protein, 9 aa, Homo sapiens
  misc_feature: Table A; Target 7226; HLA-C*07:01; ADAM7; ENSG00000069206; CTA
YQGSIVHEY

SEQ ID NO: 7227 - protein, 9 aa, Homo sapiens
  misc_feature: Table A; Target 7227; HLA-C*07:02; ADAM7; ENSG00000069206; CTA
YQGSIVHEY

SEQ ID NO: 7228 - protein, 9 aa, Homo sapiens
  misc_feature: Table A; Target 7228; HLA-C*07:04; ADAM7; ENSG00000069206; CTA
YQGSIVHEY

SEQ ID NO: 7229 - protein, 9 aa, Homo sapiens
  misc_feature: Table A; Target 7229; HLA-C*07:06; ADAM7; ENSG00000069206; CTA
YQGSIVHEY

SEQ ID NO: 7230 - protein, 9 aa, Homo sapiens
  misc_feature: Table A; Target 7230; HLA-C*12:03; ADAM7; ENSG00000069206; CTA
YQGSIVHEY

SEQ ID NO: 7231 - protein, 9 aa, Homo sapiens
  misc_feature: Table A; Target 7231; HLA-C*14:02; ADAM7; ENSG00000069206; CTA
YQGSIVHEY

SEQ ID NO: 7232 - protein, 9 aa, Homo sapiens
  misc_feature: Table A; Target 7232; HLA-C*16:01; ADAM7; ENSG00000069206; CTA
YQGSIVHEY

SEQ ID NO: 7233 - protein, 9 aa, Homo sapiens
  misc_feature: Table A; Target 7233; HLA-C*16:02; ADAM7; ENSG00000069206; CTA
YQGSIVHEY

SEQ ID NO: 7234 - protein, 9 aa, Homo sapiens
  misc_feature: Table A; Target 7234; HLA-C*16:04; ADAM7; ENSG00000069206; CTA
YQGSIVHEY

SEQ ID NO: 7235 - protein, 10 aa, Homo sapiens
  misc_feature: Table A; Target 7235; HLA-B*27:02; ADAM7; ENSG00000069206; CTA
YSCTELNFTR

SEQ ID NO: 7236 - protein, 8 aa, Homo sapiens
  misc_feature: Table A; Target 7236; HLA-A*01:01; ADAM7; ENSG00000069206; CTA
YSDEGEHL

SEQ ID NO: 7237 - protein, 8 aa, Homo sapiens
  misc_feature: Table A; Target 7237; HLA-C*03:03; ADAM7; ENSG00000069206; CTA
YSDEGEHL

SEQ ID NO: 7238 - protein, 8 aa, Homo sapiens
  misc_feature: Table A; Target 7238; HLA-C*03:04; ADAM7; ENSG00000069206; CTA
YSDEGEHL

SEQ ID NO: 7239 - protein, 8 aa, Homo sapiens
  misc_feature: Table A; Target 7239; HLA-C*05:01; ADAM7; ENSG00000069206; CTA
YSDEGEHL

SEQ ID NO: 7240 - protein, 9 aa, Homo sapiens
  misc_feature: Table A; Target 7240; HLA-A*01:01; ADAM7; ENSG00000069206; CTA
YSDEGEHLV

SEQ ID NO: 7241 - protein, 9 aa, Homo sapiens
  misc_feature: Table A; Target 7241; HLA-A*02:01; ADAM7; ENSG00000069206; CTA
YSDEGEHLV

SEQ ID NO: 7242 - protein, 9 aa, Homo sapiens
  misc_feature: Table A; Target 7242; HLA-A*02:07; ADAM7; ENSG00000069206; CTA
YSDEGEHLV

SEQ ID NO: 7243 - protein, 9 aa, Homo sapiens
  misc_feature: Table A; Target 7243; HLA-B*38:01; ADAM7; ENSG00000069206; CTA
YSDEGEHLV

SEQ ID NO: 7244 - protein, 9 aa, Homo sapiens
  misc_feature: Table A; Target 7244; HLA-B*55:01; ADAM7; ENSG00000069206; CTA
YSDEGEHLV

SEQ ID NO: 7245 - protein, 9 aa, Homo sapiens
  misc_feature: Table A; Target 7245; HLA-C*03:03; ADAM7; ENSG00000069206; CTA
YSDEGEHLV

SEQ ID NO: 7246 - protein, 9 aa, Homo sapiens
  misc_feature: Table A; Target 7246; HLA-C*05:01; ADAM7; ENSG00000069206; CTA
YSDEGEHLV

SEQ ID NO: 7247 - protein, 9 aa, Homo sapiens
  misc_feature: Table A; Target 7247; HLA-C*16:02; ADAM7; ENSG00000069206; CTA
YSDEGEHLV

SEQ ID NO: 7248 - protein, 10 aa, Homo sapiens
  misc_feature: Table A; Target 7248; HLA-A*01:01; ADAM7; ENSG00000069206; CTA
YSDEGEHLVF

SEQ ID NO: 7249 - protein, 10 aa, Homo sapiens
  misc_feature: Table A; Target 7249; HLA-A*02:07; ADAM7; ENSG00000069206; CTA
YSDEGEHLVF

SEQ ID NO: 7250 - protein, 10 aa, Homo sapiens
  misc_feature: Table A; Target 7250; HLA-B*27:02; ADAM7; ENSG00000069206; CTA
YSDEGEHLVF

SEQ ID NO: 7251 - protein, 10 aa, Homo sapiens
  misc_feature: Table A; Target 7251; HLA-B*35:01; ADAM7; ENSG00000069206; CTA
YSDEGEHLVF

SEQ ID NO: 7252 - protein, 10 aa, Homo sapiens
  misc_feature: Table A; Target 7252; HLA-B*38:01; ADAM7; ENSG00000069206; CTA
YSDEGEHLVF

SEQ ID NO: 7253 - protein, 10 aa, Homo sapiens
  misc_feature: Table A; Target 7253; HLA-B*57:01; ADAM7; ENSG00000069206; CTA
YSDEGEHLVF

SEQ ID NO: 7254 - protein, 10 aa, Homo sapiens
  misc_feature: Table A; Target 7254; HLA-B*58:01; ADAM7; ENSG00000069206; CTA
YSDEGEHLVF

SEQ ID NO: 7255 - protein, 10 aa, Homo sapiens
  misc_feature: Table A; Target 7255; HLA-C*02:02; ADAM7; ENSG00000069206; CTA
YSDEGEHLVF

SEQ ID NO: 7256 - protein, 10 aa, Homo sapiens
  misc_feature: Table A; Target 7256; HLA-C*03:03; ADAM7; ENSG00000069206; CTA
YSDEGEHLVF

SEQ ID NO: 7257 - protein, 10 aa, Homo sapiens
  misc_feature: Table A; Target 7257; HLA-C*03:04; ADAM7; ENSG00000069206; CTA
YSDEGEHLVF

SEQ ID NO: 7258 - protein, 10 aa, Homo sapiens
  misc_feature: Table A; Target 7258; HLA-C*05:01; ADAM7; ENSG00000069206; CTA
YSDEGEHLVF

SEQ ID NO: 7259 - protein, 10 aa, Homo sapiens
  misc_feature: Table A; Target 7259; HLA-C*16:04; ADAM7; ENSG00000069206; CTA
YSDEGEHLVF

SEQ ID NO: 7260 - protein, 11 aa, Homo sapiens
  misc_feature: Table A; Target 7260; HLA-A*01:01; ADAM7; ENSG00000069206; CTA
YSDEGEHLVFK

SEQ ID NO: 7261 - protein, 11 aa, Homo sapiens
  misc_feature: Table A; Target 7261; HLA-A*11:01; ADAM7; ENSG00000069206; CTA
YSDEGEHLVFK

SEQ ID NO: 7262 - protein, 9 aa, Homo sapiens
  misc_feature: Table A; Target 7262; HLA-A*01:01; ADAM7; ENSG00000069206; CTA
YSETFYSMK

SEQ ID NO: 7263 - protein, 9 aa, Homo sapiens
  misc_feature: Table A; Target 7263; HLA-A*01:01; ADAM7; ENSG00000069206; CTA
YSHVQGISY

SEQ ID NO: 7264 - protein, 9 aa, Homo sapiens
  misc_feature: Table A; Target 7264; HLA-A*25:01; ADAM7; ENSG00000069206; CTA
YSHVQGISY

SEQ ID NO: 7265 - protein, 9 aa, Homo sapiens
  misc_feature: Table A; Target 7265; HLA-A*26:01; ADAM7; ENSG00000069206; CTA
YSHVQGISY

SEQ ID NO: 7266 - protein, 9 aa, Homo sapiens
  misc_feature: Table A; Target 7266; HLA-A*29:02; ADAM7; ENSG00000069206; CTA
YSHVQGISY

SEQ ID NO: 7267 - protein, 9 aa, Homo sapiens
  misc_feature: Table A; Target 7267; HLA-A*30:02; ADAM7; ENSG00000069206; CTA
YSHVQGISY

SEQ ID NO: 7268 - protein, 9 aa, Homo sapiens
  misc_feature: Table A; Target 7268; HLA-A*32:01; ADAM7; ENSG00000069206; CTA
YSHVQGISY

SEQ ID NO: 7269 - protein, 9 aa, Homo sapiens
  misc_feature: Table A; Target 7269; HLA-B*15:01; ADAM7; ENSG00000069206; CTA
YSHVQGISY

SEQ ID NO: 7270 - protein, 9 aa, Homo sapiens
  misc_feature: Table A; Target 7270; HLA-B*15:03; ADAM7; ENSG00000069206; CTA
YSHVQGISY

SEQ ID NO: 7271 - protein, 9 aa, Homo sapiens
  misc_feature: Table A; Target 7271; HLA-B*18:01; ADAM7; ENSG00000069206; CTA
YSHVQGISY

SEQ ID NO: 7272 - protein, 9 aa, Homo sapiens
  misc_feature: Table A; Target 7272; HLA-B*35:01; ADAM7; ENSG00000069206; CTA
YSHVQGISY

SEQ ID NO: 7273 - protein, 9 aa, Homo sapiens
  misc_feature: Table A; Target 7273; HLA-B*46:01; ADAM7; ENSG00000069206; CTA
YSHVQGISY

SEQ ID NO: 7274 - protein, 9 aa, Homo sapiens
  misc_feature: Table A; Target 7274; HLA-B*57:01; ADAM7; ENSG00000069206; CTA
YSHVQGISY

SEQ ID NO: 7275 - protein, 9 aa, Homo sapiens
  misc_feature: Table A; Target 7275; HLA-B*58:01; ADAM7; ENSG00000069206; CTA
YSHVQGISY

SEQ ID NO: 7276 - protein, 9 aa, Homo sapiens
  misc_feature: Table A; Target 7276; HLA-C*01:02; ADAM7; ENSG00000069206; CTA
YSHVQGISY

SEQ ID NO: 7277 - protein, 9 aa, Homo sapiens
  misc_feature: Table A; Target 7277; HLA-C*02:02; ADAM7; ENSG00000069206; CTA
YSHVQGISY

SEQ ID NO: 7278 - protein, 9 aa, Homo sapiens
  misc_feature: Table A; Target 7278; HLA-C*03:03; ADAM7; ENSG00000069206; CTA
YSHVQGISY

SEQ ID NO: 7279 - protein, 9 aa, Homo sapiens
  misc_feature: Table A; Target 7279; HLA-C*03:04; ADAM7; ENSG00000069206; CTA
YSHVQGISY

SEQ ID NO: 7280 - protein, 9 aa, Homo sapiens
  misc_feature: Table A; Target 7280; HLA-C*07:04; ADAM7; ENSG00000069206; CTA
YSHVQGISY

SEQ ID NO: 7281 - protein, 9 aa, Homo sapiens
  misc_feature: Table A; Target 7281; HLA-C*12:03; ADAM7; ENSG00000069206; CTA
YSHVQGISY

SEQ ID NO: 7282 - protein, 9 aa, Homo sapiens
  misc_feature: Table A; Target 7282; HLA-C*14:02; ADAM7; ENSG00000069206; CTA
YSHVQGISY

SEQ ID NO: 7283 - protein, 9 aa, Homo sapiens
  misc_feature: Table A; Target 7283; HLA-C*16:01; ADAM7; ENSG00000069206; CTA
YSHVQGISY

SEQ ID NO: 7284 - protein, 9 aa, Homo sapiens
  misc_feature: Table A; Target 7284; HLA-C*16:02; ADAM7; ENSG00000069206; CTA
YSHVQGISY

SEQ ID NO: 7285 - protein, 9 aa, Homo sapiens
  misc_feature: Table A; Target 7285; HLA-C*16:04; ADAM7; ENSG00000069206; CTA
YSHVQGISY

SEQ ID NO: 7286 - protein, 8 aa, Homo sapiens
  misc_feature: Table A; Target 7286; HLA-A*32:01; ADAM7; ENSG00000069206; CTA
YSMKGEAF

SEQ ID NO: 7287 - protein, 8 aa, Homo sapiens
  misc_feature: Table A; Target 7287; HLA-B*08:01; ADAM7; ENSG00000069206; CTA
YSMKGEAF

SEQ ID NO: 7288 - protein, 8 aa, Homo sapiens
  misc_feature: Table A; Target 7288; HLA-B*15:01; ADAM7; ENSG00000069206; CTA
YSMKGEAF

SEQ ID NO: 7289 - protein, 8 aa, Homo sapiens
  misc_feature: Table A; Target 7289; HLA-B*15:03; ADAM7; ENSG00000069206; CTA
YSMKGEAF

SEQ ID NO: 7290 - protein, 8 aa, Homo sapiens
  misc_feature: Table A; Target 7290; HLA-B*18:01; ADAM7; ENSG00000069206; CTA
YSMKGEAF

SEQ ID NO: 7291 - protein, 8 aa, Homo sapiens
  misc_feature: Table A; Target 7291; HLA-B*37:01; ADAM7; ENSG00000069206; CTA
YSMKGEAF

SEQ ID NO: 7292 - protein, 8 aa, Homo sapiens
  misc_feature: Table A; Target 7292; HLA-B*39:01; ADAM7; ENSG00000069206; CTA
YSMKGEAF

SEQ ID NO: 7293 - protein, 8 aa, Homo sapiens
  misc_feature: Table A; Target 7293; HLA-B*40:02; ADAM7; ENSG00000069206; CTA
YSMKGEAF

SEQ ID NO: 7294 - protein, 8 aa, Homo sapiens
  misc_feature: Table A; Target 7294; HLA-B*46:01; ADAM7; ENSG00000069206; CTA
YSMKGEAF

SEQ ID NO: 7295 - protein, 8 aa, Homo sapiens
  misc_feature: Table A; Target 7295; HLA-B*57:01; ADAM7; ENSG00000069206; CTA
YSMKGEAF

SEQ ID NO: 7296 - protein, 8 aa, Homo sapiens
  misc_feature: Table A; Target 7296; HLA-B*58:01; ADAM7; ENSG00000069206; CTA
YSMKGEAF

SEQ ID NO: 7297 - protein, 8 aa, Homo sapiens
  misc_feature: Table A; Target 7297; HLA-C*03:03; ADAM7; ENSG00000069206; CTA
YSMKGEAF

SEQ ID NO: 7298 - protein, 8 aa, Homo sapiens
  misc_feature: Table A; Target 7298; HLA-C*03:04; ADAM7; ENSG00000069206; CTA
YSMKGEAF

SEQ ID NO: 7299 - protein, 8 aa, Homo sapiens
  misc_feature: Table A; Target 7299; HLA-C*05:01; ADAM7; ENSG00000069206; CTA
YSMKGEAF

SEQ ID NO: 7300 - protein, 8 aa, Homo sapiens
  misc_feature: Table A; Target 7300; HLA-C*14:02; ADAM7; ENSG00000069206; CTA
YSMKGEAF

SEQ ID NO: 7301 - protein, 8 aa, Homo sapiens
  misc_feature: Table A; Target 7301; HLA-C*16:01; ADAM7; ENSG00000069206; CTA
YSMKGEAF

SEQ ID NO: 7302 - protein, 10 aa, Homo sapiens
  misc_feature: Table A; Target 7302; HLA-A*11:01; ADAM7; ENSG00000069206; CTA
YSMKGEAFTR

SEQ ID NO: 7303 - protein, 10 aa, Homo sapiens
  misc_feature: Table A; Target 7303; HLA-A*31:01; ADAM7; ENSG00000069206; CTA
YSMKGEAFTR

SEQ ID NO: 7304 - protein, 10 aa, Homo sapiens
  misc_feature: Table A; Target 7304; HLA-A*33:01; ADAM7; ENSG00000069206; CTA
YSMKGEAFTR

SEQ ID NO: 7305 - protein, 10 aa, Homo sapiens
  misc_feature: Table A; Target 7305; HLA-A*33:03; ADAM7; ENSG00000069206; CTA
YSMKGEAFTR

SEQ ID NO: 7306 - protein, 10 aa, Homo sapiens
  misc_feature: Table A; Target 7306; HLA-A*68:01; ADAM7; ENSG00000069206; CTA
YSMKGEAFTR

SEQ ID NO: 7307 - protein, 10 aa, Homo sapiens
  misc_feature: Table A; Target 7307; HLA-B*27:02; ADAM7; ENSG00000069206; CTA
YSMKGEAFTR

SEQ ID NO: 7308 - protein, 10 aa, Homo sapiens
  misc_feature: Table A; Target 7308; HLA-B*57:01; ADAM7; ENSG00000069206; CTA
YSMKGEAFTR

SEQ ID NO: 7309 - protein, 10 aa, Homo sapiens
  misc_feature: Table A; Target 7309; HLA-C*07:06; ADAM7; ENSG00000069206; CTA
YSMKGEAFTR

SEQ ID NO: 7310 - protein, 8 aa, Homo sapiens
  misc_feature: Table A; Target 7310; HLA-A*23:01; ADAM7; ENSG00000069206; CTA
YSNIETTL

SEQ ID NO: 7311 - protein, 8 aa, Homo sapiens
  misc_feature: Table A; Target 7311; HLA-B*08:01; ADAM7; ENSG00000069206; CTA
YSNIETTL

SEQ ID NO: 7312 - protein, 8 aa, Homo sapiens
  misc_feature: Table A; Target 7312; HLA-B*46:01; ADAM7; ENSG00000069206; CTA
YSNIETTL

SEQ ID NO: 7313 - protein, 8 aa, Homo sapiens
  misc_feature: Table A; Target 7313; HLA-B*58:01; ADAM7; ENSG00000069206; CTA
YSNIETTL

SEQ ID NO: 7314 - protein, 8 aa, Homo sapiens
  misc_feature: Table A; Target 7314; HLA-C*01:02; ADAM7; ENSG00000069206; CTA
YSNIETTL

SEQ ID NO: 7315 - protein, 8 aa, Homo sapiens
  misc_feature: Table A; Target 7315; HLA-C*03:03; ADAM7; ENSG00000069206; CTA
YSNIETTL

SEQ ID NO: 7316 - protein, 8 aa, Homo sapiens
  misc_feature: Table A; Target 7316; HLA-C*03:04; ADAM7; ENSG00000069206; CTA
YSNIETTL

SEQ ID NO: 7317 - protein, 8 aa, Homo sapiens
  misc_feature: Table A; Target 7317; HLA-C*05:01; ADAM7; ENSG00000069206; CTA
YSNIETTL

SEQ ID NO: 7318 - protein, 8 aa, Homo sapiens
  misc_feature: Table A; Target 7318; HLA-C*07:04; ADAM7; ENSG00000069206; CTA
YSNIETTL

SEQ ID NO: 7319 - protein, 8 aa, Homo sapiens
  misc_feature: Table A; Target 7319; HLA-C*14:02; ADAM7; ENSG00000069206; CTA
YSNIETTL

SEQ ID NO: 7320 - protein, 8 aa, Homo sapiens
  misc_feature: Table A; Target 7320; HLA-C*16:01; ADAM7; ENSG00000069206; CTA
YSNIETTL

SEQ ID NO: 7321 - protein, 9 aa, Homo sapiens
  misc_feature: Table A; Target 7321; HLA-A*01:01; ADAM7; ENSG00000069206; CTA
YSNIETTLL

SEQ ID NO: 7322 - protein, 9 aa, Homo sapiens
  misc_feature: Table A; Target 7322; HLA-B*38:01; ADAM7; ENSG00000069206; CTA
YSNIETTLL

SEQ ID NO: 7323 - protein, 9 aa, Homo sapiens
  misc_feature: Table A; Target 7323; HLA-B*46:01; ADAM7; ENSG00000069206; CTA
YSNIETTLL

SEQ ID NO: 7324 - protein, 9 aa, Homo sapiens
  misc_feature: Table A; Target 7324; HLA-B*58:01; ADAM7; ENSG00000069206; CTA
YSNIETTLL

SEQ ID NO: 7325 - protein, 9 aa, Homo sapiens
  misc_feature: Table A; Target 7325; HLA-C*02:02; ADAM7; ENSG00000069206; CTA
YSNIETTLL

SEQ ID NO: 7326 - protein, 9 aa, Homo sapiens
  misc_feature: Table A; Target 7326; HLA-C*03:03; ADAM7; ENSG00000069206; CTA
YSNIETTLL

SEQ ID NO: 7327 - protein, 9 aa, Homo sapiens
  misc_feature: Table A; Target 7327; HLA-C*03:04; ADAM7; ENSG00000069206; CTA
YSNIETTLL

SEQ ID NO: 7328 - protein, 9 aa, Homo sapiens
  misc_feature: Table A; Target 7328; HLA-C*05:01; ADAM7; ENSG00000069206; CTA
YSNIETTLL

SEQ ID NO: 7329 - protein, 9 aa, Homo sapiens
  misc_feature: Table A; Target 7329; HLA-C*07:04; ADAM7; ENSG00000069206; CTA
YSNIETTLL

SEQ ID NO: 7330 - protein, 10 aa, Homo sapiens
  misc_feature: Table A; Target 7330; HLA-B*27:02; ADAM7; ENSG00000069206; CTA
YSNIETTLLR

SEQ ID NO: 7331 - protein, 11 aa, Homo sapiens
  misc_feature: Table A; Target 7331; HLA-A*01:01; ADAM7; ENSG00000069206; CTA
YSNIETTLLRF

SEQ ID NO: 7332 - protein, 11 aa, Homo sapiens
  misc_feature: Table A; Target 7332; HLA-B*57:01; ADAM7; ENSG00000069206; CTA
YSNIETTLLRF

SEQ ID NO: 7333 - protein, 9 aa, Homo sapiens
  misc_feature: Table A; Target 7333; HLA-A*68:02; ADAM7; ENSG00000069206; CTA
YSTSIIKDL

SEQ ID NO: 7334 - protein, 9 aa, Homo sapiens
  misc_feature: Table A; Target 7334; HLA-B*07:02; ADAM7; ENSG00000069206; CTA
YSTSIIKDL

SEQ ID NO: 7335 - protein, 9 aa, Homo sapiens
  misc_feature: Table A; Target 7335; HLA-B*27:02; ADAM7; ENSG00000069206; CTA
YSTSIIKDL

SEQ ID NO: 7336 - protein, 9 aa, Homo sapiens
  misc_feature: Table A; Target 7336; HLA-B*58:01; ADAM7; ENSG00000069206; CTA
YSTSIIKDL

SEQ ID NO: 7337 - protein, 9 aa, Homo sapiens
  misc_feature: Table A; Target 7337; HLA-C*02:02; ADAM7; ENSG00000069206; CTA
YSTSIIKDL

SEQ ID NO: 7338 - protein, 9 aa, Homo sapiens
  misc_feature: Table A; Target 7338; HLA-C*03:03; ADAM7; ENSG00000069206; CTA
YSTSIIKDL

SEQ ID NO: 7339 - protein, 9 aa, Homo sapiens
  misc_feature: Table A; Target 7339; HLA-C*03:04; ADAM7; ENSG00000069206; CTA
YSTSIIKDL

SEQ ID NO: 7340 - protein, 9 aa, Homo sapiens
  misc_feature: Table A; Target 7340; HLA-C*06:02; ADAM7; ENSG00000069206; CTA
YSTSIIKDL

SEQ ID NO: 7341 - protein, 9 aa, Homo sapiens
  misc_feature: Table A; Target 7341; HLA-C*07:04; ADAM7; ENSG00000069206; CTA
YSTSIIKDL

SEQ ID NO: 7342 - protein, 9 aa, Homo sapiens
  misc_feature: Table A; Target 7342; HLA-C*12:03; ADAM7; ENSG00000069206; CTA
YSTSIIKDL

SEQ ID NO: 7343 - protein, 9 aa, Homo sapiens
  misc_feature: Table A; Target 7343; HLA-C*16:01; ADAM7; ENSG00000069206; CTA
YSTSIIKDL

SEQ ID NO: 7344 - protein, 9 aa, Homo sapiens
  misc_feature: Table A; Target 7344; HLA-C*16:02; ADAM7; ENSG00000069206; CTA
YSTSIIKDL

SEQ ID NO: 7345 - protein, 9 aa, Homo sapiens
  misc_feature: Table A; Target 7345; HLA-C*16:04; ADAM7; ENSG00000069206; CTA
YSTSIIKDL

SEQ ID NO: 7346 - protein, 10 aa, Homo sapiens
  misc_feature: Table A; Target 7346; HLA-A*68:02; ADAM7; ENSG00000069206; CTA
YSTSIIKDLL

SEQ ID NO: 7347 - protein, 10 aa, Homo sapiens
  misc_feature: Table A; Target 7347; HLA-A*23:01; ADAM7; ENSG00000069206; CTA
YYSTSIIKDL

SEQ ID NO: 7348 - protein, 10 aa, Homo sapiens
  misc_feature: Table A; Target 7348; HLA-A*24:02; ADAM7; ENSG00000069206; CTA
YYSTSIIKDL

SEQ ID NO: 7349 - protein, 11 aa, Homo sapiens
  misc_feature: Table A; Target 7349; HLA-A*24:02; ADAM7; ENSG00000069206; CTA
YYSTSIIKDLL

SEQ ID NO: 7350 - protein, 9 aa, Homo sapiens
  misc_feature: Table A; Target 7350; HLA-A*01:01; AFP; ENSG00000081051; TAA
AADIIIGHL

SEQ ID NO: 7351 - protein, 9 aa, Homo sapiens
  misc_feature: Table A; Target 7351; HLA-A*11:01; AFP; ENSG00000081051; TAA
AADIIIGHL

SEQ ID NO: 7352 - protein, 9 aa, Homo sapiens
  misc_feature: Table A; Target 7352; HLA-A*31:01; AFP; ENSG00000081051; TAA
AADIIIGHL

SEQ ID NO: 7353 - protein, 9 aa, Homo sapiens
  misc_feature: Table A; Target 7353; HLA-B*27:05; AFP; ENSG00000081051; TAA
AADIIIGHL

SEQ ID NO: 7354 - protein, 9 aa, Homo sapiens
  misc_feature: Table A; Target 7354; HLA-B*58:01; AFP; ENSG00000081051; TAA
AADIIIGHL

SEQ ID NO: 7355 - protein, 9 aa, Homo sapiens
  misc_feature: Table A; Target 7355; HLA-C*03:04; AFP; ENSG00000081051; TAA
AADIIIGHL

SEQ ID NO: 7356 - protein, 9 aa, Homo sapiens
  misc_feature: Table A; Target 7356; HLA-C*04:01; AFP; ENSG00000081051; TAA
AADIIIGHL

SEQ ID NO: 7357 - protein, 9 aa, Homo sapiens
  misc_feature: Table A; Target 7357; HLA-C*07:06; AFP; ENSG00000081051; TAA
AADIIIGHL

SEQ ID NO: 7358 - protein, 9 aa, Homo sapiens
  misc_feature: Table A; Target 7358; HLA-C*16:02; AFP; ENSG00000081051; TAA
AADIIIGHL

SEQ ID NO: 7359 - protein, 9 aa, Homo sapiens
  misc_feature: Table A; Target 7359; HLA-C*16:04; AFP; ENSG00000081051; TAA
AADIIIGHL

SEQ ID NO: 7360 - protein, 8 aa, Homo sapiens
  misc_feature: Table A; Target 7360; HLA-B*07:02; AFP; ENSG00000081051; TAA
AATVTKEL

SEQ ID NO: 7361 - protein, 8 aa, Homo sapiens
  misc_feature: Table A; Target 7361; HLA-B*15:01; AFP; ENSG00000081051; TAA
AATVTKEL

SEQ ID NO: 7362 - protein, 8 aa, Homo sapiens
  misc_feature: Table A; Target 7362; HLA-B*15:03; AFP; ENSG00000081051; TAA
AATVTKEL

SEQ ID NO: 7363 - protein, 8 aa, Homo sapiens
  misc_feature: Table A; Target 7363; HLA-B*40:02; AFP; ENSG00000081051; TAA
AATVTKEL

SEQ ID NO: 7364 - protein, 8 aa, Homo sapiens
  misc_feature: Table A; Target 7364; HLA-C*02:02; AFP; ENSG00000081051; TAA
AATVTKEL

SEQ ID NO: 7365 - protein, 8 aa, Homo sapiens
  misc_feature: Table A; Target 7365; HLA-C*04:01; AFP; ENSG00000081051; TAA
AATVTKEL

SEQ ID NO: 7366 - protein, 8 aa, Homo sapiens
  misc_feature: Table A; Target 7366; HLA-C*06:02; AFP; ENSG00000081051; TAA
AATVTKEL

SEQ ID NO: 7367 - protein, 8 aa, Homo sapiens
  misc_feature: Table A; Target 7367; HLA-C*07:01; AFP; ENSG00000081051; TAA
AATVTKEL

SEQ ID NO: 7368 - protein, 8 aa, Homo sapiens
  misc_feature: Table A; Target 7368; HLA-C*07:02; AFP; ENSG00000081051; TAA
AATVTKEL

SEQ ID NO: 7369 - protein, 9 aa, Homo sapiens
  misc_feature: Table A; Target 7369; HLA-A*31:01; AFP; ENSG00000081051; TAA
AATVTKELR

SEQ ID NO: 7370 - protein, 9 aa, Homo sapiens
  misc_feature: Table A; Target 7370; HLA-A*33:01; AFP; ENSG00000081051; TAA
AATVTKELR

SEQ ID NO: 7371 - protein, 9 aa, Homo sapiens
  misc_feature: Table A; Target 7371; HLA-A*33:03; AFP; ENSG00000081051; TAA
AATVTKELR

SEQ ID NO: 7372 - protein, 9 aa, Homo sapiens
  misc_feature: Table A; Target 7372; HLA-B*57:01; AFP; ENSG00000081051; TAA
AATVTKELR

SEQ ID NO: 7373 - protein, 9 aa, Homo sapiens
  misc_feature: Table A; Target 7373; HLA-C*16:01; AFP; ENSG00000081051; TAA
AATVTKELR

SEQ ID NO: 7374 - protein, 9 aa, Homo sapiens
  misc_feature: Table A; Target 7374; HLA-C*16:02; AFP; ENSG00000081051; TAA
AATVTKELR

SEQ ID NO: 7375 - protein, 9 aa, Homo sapiens
  misc_feature: Table A; Target 7375; HLA-A*31:01; AFP; ENSG00000081051; TAA
ADFSGLLEK

SEQ ID NO: 7376 - protein, 9 aa, Homo sapiens
  misc_feature: Table A; Target 7376; HLA-A*33:01; AFP; ENSG00000081051; TAA
ADFSGLLEK

SEQ ID NO: 7377 - protein, 9 aa, Homo sapiens
  misc_feature: Table A; Target 7377; HLA-A*68:01; AFP; ENSG00000081051; TAA
ADFSGLLEK

SEQ ID NO: 7378 - protein, 9 aa, Homo sapiens
  misc_feature: Table A; Target 7378; HLA-B*37:01; AFP; ENSG00000081051; TAA
ADFSGLLEK

SEQ ID NO: 7379 - protein, 9 aa, Homo sapiens
  misc_feature: Table A; Target 7379; HLA-B*40:02; AFP; ENSG00000081051; TAA
ADFSGLLEK

SEQ ID NO: 7380 - protein, 9 aa, Homo sapiens
  misc_feature: Table A; Target 7380; HLA-C*04:01; AFP; ENSG00000081051; TAA
ADFSGLLEK

SEQ ID NO: 7381 - protein, 9 aa, Homo sapiens
  misc_feature: Table A; Target 7381; HLA-C*06:02; AFP; ENSG00000081051; TAA
ADFSGLLEK

SEQ ID NO: 7382 - protein, 9 aa, Homo sapiens
  misc_feature: Table A; Target 7382; HLA-C*07:01; AFP; ENSG00000081051; TAA
ADFSGLLEK

SEQ ID NO: 7383 - protein, 9 aa, Homo sapiens
  misc_feature: Table A; Target 7383; HLA-C*07:02; AFP; ENSG00000081051; TAA
ADFSGLLEK

SEQ ID NO: 7384 - protein, 9 aa, Homo sapiens
  misc_feature: Table A; Target 7384; HLA-C*07:06; AFP; ENSG00000081051; TAA
ADFSGLLEK

SEQ ID NO: 7385 - protein, 9 aa, Homo sapiens
  misc_feature: Table A; Target 7385; HLA-C*12:03; AFP; ENSG00000081051; TAA
ADFSGLLEK

SEQ ID NO: 7386 - protein, 9 aa, Homo sapiens
  misc_feature: Table A; Target 7386; HLA-C*16:02; AFP; ENSG00000081051; TAA
ADFSGLLEK

SEQ ID NO: 7387 - protein, 8 aa, Homo sapiens
  misc_feature: Table A; Target 7387; HLA-B*27:05; AFP; ENSG00000081051; TAA
ADIIIGHL

SEQ ID NO: 7388 - protein, 8 aa, Homo sapiens
  misc_feature: Table A; Target 7388; HLA-B*40:01; AFP; ENSG00000081051; TAA
ADIIIGHL

SEQ ID NO: 7389 - protein, 8 aa, Homo sapiens
  misc_feature: Table A; Target 7389; HLA-B*44:03; AFP; ENSG00000081051; TAA
ADIIIGHL

SEQ ID NO: 7390 - protein, 8 aa, Homo sapiens
  misc_feature: Table A; Target 7390; HLA-C*04:01; AFP; ENSG00000081051; TAA
ADIIIGHL

SEQ ID NO: 7391 - protein, 8 aa, Homo sapiens
  misc_feature: Table A; Target 7391; HLA-C*06:02; AFP; ENSG00000081051; TAA
ADIIIGHL

SEQ ID NO: 7392 - protein, 9 aa, Homo sapiens
  misc_feature: Table A; Target 7392; HLA-B*37:01; AFP; ENSG00000081051; TAA
ADIIIGHLC

SEQ ID NO: 7393 - protein, 8 aa, Homo sapiens
  misc_feature: Table A; Target 7393; HLA-B*44:02; AFP; ENSG00000081051; TAA
ADLATIFF

SEQ ID NO: 7394 - protein, 10 aa, Homo sapiens
  misc_feature: Table A; Target 7394; HLA-A*03:02; AFP; ENSG00000081051; TAA
AEEGQKLISK

SEQ ID NO: 7395 - protein, 10 aa, Homo sapiens
  misc_feature: Table A; Target 7395; HLA-A*11:01; AFP; ENSG00000081051; TAA
AEEGQKLISK

SEQ ID NO: 7396 - protein, 10 aa, Homo sapiens
  misc_feature: Table A; Target 7396; HLA-B*27:02; AFP; ENSG00000081051; TAA
AEEGQKLISK

SEQ ID NO: 7397 - protein, 10 aa, Homo sapiens
  misc_feature: Table A; Target 7397; HLA-B*40:01; AFP; ENSG00000081051; TAA
AEEGQKLISK

SEQ ID NO: 7398 - protein, 10 aa, Homo sapiens
  misc_feature: Table A; Target 7398; HLA-B*40:02; AFP; ENSG00000081051; TAA
AEEGQKLISK

SEQ ID NO: 7399 - protein, 10 aa, Homo sapiens
  misc_feature: Table A; Target 7399; HLA-B*44:02; AFP; ENSG00000081051; TAA
AEEGQKLISK

SEQ ID NO: 7400 - protein, 10 aa, Homo sapiens
  misc_feature: Table A; Target 7400; HLA-B*44:03; AFP; ENSG00000081051; TAA
AEEGQKLISK

SEQ ID NO: 7401 - protein, 10 aa, Homo sapiens
  misc_feature: Table A; Target 7401; HLA-B*49:01; AFP; ENSG00000081051; TAA
AEEGQKLISK

SEQ ID NO: 7402 - protein, 8 aa, Homo sapiens
  misc_feature: Table A; Target 7402; HLA-B*18:01; AFP; ENSG00000081051; TAA
AEISLADL

SEQ ID NO: 7403 - protein, 8 aa, Homo sapiens
  misc_feature: Table A; Target 7403; HLA-B*40:02; AFP; ENSG00000081051; TAA
AEISLADL

SEQ ID NO: 7404 - protein, 8 aa, Homo sapiens
  misc_feature: Table A; Target 7404; HLA-B*44:02; AFP; ENSG00000081051; TAA
AEISLADL

SEQ ID NO: 7405 - protein, 9 aa, Homo sapiens
  misc_feature: Table A; Target 7405; HLA-B*44:03; AFP; ENSG00000081051; TAA
AEISLADLA

SEQ ID NO: 7406 - protein, 11 aa, Homo sapiens
  misc_feature: Table A; Target 7406; HLA-B*27:02; AFP; ENSG00000081051; TAA
AEISLADLATI

SEQ ID NO: 7407 - protein, 11 aa, Homo sapiens
  misc_feature: Table A; Target 7407; HLA-B*40:02; AFP; ENSG00000081051; TAA
AEISLADLATI

SEQ ID NO: 7408 - protein, 11 aa, Homo sapiens
  misc_feature: Table A; Target 7408; HLA-C*16:04; AFP; ENSG00000081051; TAA
AEISLADLATI

SEQ ID NO: 7409 - protein, 8 aa, Homo sapiens
  misc_feature: Table A; Target 7409; HLA-B*40:01; AFP; ENSG00000081051; TAA
AENAVECF

SEQ ID NO: 7410 - protein, 8 aa, Homo sapiens
  misc_feature: Table A; Target 7410; HLA-B*40:02; AFP; ENSG00000081051; TAA
AENAVECF

SEQ ID NO: 7411 - protein, 8 aa, Homo sapiens
  misc_feature: Table A; Target 7411; HLA-B*49:01; AFP; ENSG00000081051; TAA
AENAVECF

SEQ ID NO: 7412 - protein, 9 aa, Homo sapiens
  misc_feature: Table A; Target 7412; HLA-B*44:02; AFP; ENSG00000081051; TAA
AENAVECFQ

SEQ ID NO: 7413 - protein, 9 aa, Homo sapiens
  misc_feature: Table A; Target 7413; HLA-C*16:04; AFP; ENSG00000081051; TAA
AENAVECFQ

SEQ ID NO: 7414 - protein, 11 aa, Homo sapiens
  misc_feature: Table A; Target 7414; HLA-B*49:01; AFP; ENSG00000081051; TAA
AENAVECFQTK

SEQ ID NO: 7415 - protein, 10 aa, Homo sapiens
  misc_feature: Table A; Target 7415; HLA-B*40:02; AFP; ENSG00000081051; TAA
AENDEKPEGL

SEQ ID NO: 7416 - protein, 8 aa, Homo sapiens
  misc_feature: Table A; Target 7416; HLA-A*23:01; AFP; ENSG00000081051; TAA
AFLVAYTK

SEQ ID NO: 7417 - protein, 9 aa, Homo sapiens
  misc_feature: Table A; Target 7417; HLA-A*24:02; AFP; ENSG00000081051; TAA
AFSDDKFIF

SEQ ID NO: 7418 - protein, 10 aa, Homo sapiens
  misc_feature: Table A; Target 7418; HLA-A*03:01; AFP; ENSG00000081051; TAA
AITVTKLSQK

SEQ ID NO: 7419 - protein, 10 aa, Homo sapiens
  misc_feature: Table A; Target 7419; HLA-A*03:02; AFP; ENSG00000081051; TAA
AITVTKLSQK

SEQ ID NO: 7420 - protein, 10 aa, Homo sapiens
  misc_feature: Table A; Target 7420; HLA-A*11:01; AFP; ENSG00000081051; TAA
AITVTKLSQK

SEQ ID NO: 7421 - protein, 9 aa, Homo sapiens
  misc_feature: Table A; Target 7421; HLA-B*08:01; AFP; ENSG00000081051; TAA
ALAKRSCGL

SEQ ID NO: 7422 - protein, 9 aa, Homo sapiens
  misc_feature: Table A; Target 7422; HLA-A*23:01; AFP; ENSG00000081051; TAA
ALQTMKQEF

SEQ ID NO: 7423 - protein, 9 aa, Homo sapiens
  misc_feature: Table A; Target 7423; HLA-A*24:02; AFP; ENSG00000081051; TAA
ALQTMKQEF

SEQ ID NO: 7424 - protein, 9 aa, Homo sapiens
  misc_feature: Table A; Target 7424; HLA-A*30:02; AFP; ENSG00000081051; TAA
ALQTMKQEF

SEQ ID NO: 7425 - protein, 9 aa, Homo sapiens
  misc_feature: Table A; Target 7425; HLA-B*46:01; AFP; ENSG00000081051; TAA
ALQTMKQEF

SEQ ID NO: 7426 - protein, 9 aa, Homo sapiens
  misc_feature: Table A; Target 7426; HLA-B*58:01; AFP; ENSG00000081051; TAA
ALQTMKQEF

SEQ ID NO: 7427 - protein, 9 aa, Homo sapiens
  misc_feature: Table A; Target 7427; HLA-C*01:02; AFP; ENSG00000081051; TAA
ALQTMKQEF

SEQ ID NO: 7428 - protein, 9 aa, Homo sapiens
  misc_feature: Table A; Target 7428; HLA-C*07:04; AFP; ENSG00000081051; TAA
ALQTMKQEF

SEQ ID NO: 7429 - protein, 9 aa, Homo sapiens
  misc_feature: Table A; Target 7429; HLA-C*06:02; AFP; ENSG00000081051; TAA
ALTAIEKPT

SEQ ID NO: 7430 - protein, 9 aa, Homo sapiens
  misc_feature: Table A; Target 7430; HLA-B*08:01; AFP; ENSG00000081051; TAA
APQLTSSEL

SEQ ID NO: 7431 - protein, 9 aa, Homo sapiens
  misc_feature: Table A; Target 7431; HLA-C*03:03; AFP; ENSG00000081051; TAA
APQLTSSEL

SEQ ID NO: 7432 - protein, 9 aa, Homo sapiens
  misc_feature: Table A; Target 7432; HLA-C*03:04; AFP; ENSG00000081051; TAA
APQLTSSEL

SEQ ID NO: 7433 - protein, 9 aa, Homo sapiens
  misc_feature: Table A; Target 7433; HLA-C*04:01; AFP; ENSG00000081051; TAA
APQLTSSEL

SEQ ID NO: 7434 - protein, 9 aa, Homo sapiens
  misc_feature: Table A; Target 7434; HLA-C*05:01; AFP; ENSG00000081051; TAA
APQLTSSEL

SEQ ID NO: 7435 - protein, 10 aa, Homo sapiens
  misc_feature: Table A; Target 7435; HLA-B*56:01; AFP; ENSG00000081051; TAA
APQLTSSELM

SEQ ID NO: 7436 - protein, 10 aa, Homo sapiens
  misc_feature: Table A; Target 7436; HLA-C*04:01; AFP; ENSG00000081051; TAA
APQLTSSELM

SEQ ID NO: 7437 - protein, 10 aa, Homo sapiens
  misc_feature: Table A; Target 7437; HLA-C*07:02; AFP; ENSG00000081051; TAA
APQLTSSELM

SEQ ID NO: 7438 - protein, 9 aa, Homo sapiens
  misc_feature: Table A; Target 7438; HLA-A*23:01; AFP; ENSG00000081051; TAA
AQFVQEATY

SEQ ID NO: 7439 - protein, 9 aa, Homo sapiens
  misc_feature: Table A; Target 7439; HLA-B*38:01; AFP; ENSG00000081051; TAA
AQFVQEATY

SEQ ID NO: 7440 - protein, 9 aa, Homo sapiens
  misc_feature: Table A; Target 7440; HLA-B*40:01; AFP; ENSG00000081051; TAA
AQFVQEATY

SEQ ID NO: 7441 - protein, 9 aa, Homo sapiens
  misc_feature: Table A; Target 7441; HLA-C*01:02; AFP; ENSG00000081051; TAA
AQFVQEATY

SEQ ID NO: 7442 - protein, 9 aa, Homo sapiens
  misc_feature: Table A; Target 7442; HLA-C*03:03; AFP; ENSG00000081051; TAA
AQFVQEATY

SEQ ID NO: 7443 - protein, 9 aa, Homo sapiens
  misc_feature: Table A; Target 7443; HLA-C*04:01; AFP; ENSG00000081051; TAA
AQFVQEATY

SEQ ID NO: 7444 - protein, 9 aa, Homo sapiens
  misc_feature: Table A; Target 7444; HLA-C*06:02; AFP; ENSG00000081051; TAA
AQFVQEATY

SEQ ID NO: 7445 - protein, 9 aa, Homo sapiens
  misc_feature: Table A; Target 7445; HLA-C*07:01; AFP; ENSG00000081051; TAA
AQFVQEATY

SEQ ID NO: 7446 - protein, 10 aa, Homo sapiens
  misc_feature: Table A; Target 7446; HLA-A*31:01; AFP; ENSG00000081051; TAA
AQFVQEATYK

SEQ ID NO: 7447 - protein, 9 aa, Homo sapiens
  misc_feature: Table A; Target 7447; HLA-A*32:01; AFP; ENSG00000081051; TAA
AQGVALQTM

SEQ ID NO: 7448 - protein, 9 aa, Homo sapiens
  misc_feature: Table A; Target 7448; HLA-B*38:01; AFP; ENSG00000081051; TAA
AQGVALQTM

SEQ ID NO: 7449 - protein, 9 aa, Homo sapiens
  misc_feature: Table A; Target 7449; HLA-B*39:01; AFP; ENSG00000081051; TAA
AQGVALQTM

SEQ ID NO: 7450 - protein, 9 aa, Homo sapiens
  misc_feature: Table A; Target 7450; HLA-B*40:02; AFP; ENSG00000081051; TAA
AQGVALQTM

SEQ ID NO: 7451 - protein, 9 aa, Homo sapiens
  misc_feature: Table A; Target 7451; HLA-B*44:02; AFP; ENSG00000081051; TAA
AQGVALQTM

SEQ ID NO: 7452 - protein, 9 aa, Homo sapiens
  misc_feature: Table A; Target 7452; HLA-B*46:01; AFP; ENSG00000081051; TAA
AQGVALQTM

SEQ ID NO: 7453 - protein, 9 aa, Homo sapiens
  misc_feature: Table A; Target 7453; HLA-C*04:01; AFP; ENSG00000081051; TAA
AQGVALQTM

SEQ ID NO: 7454 - protein, 9 aa, Homo sapiens
  misc_feature: Table A; Target 7454; HLA-C*16:04; AFP; ENSG00000081051; TAA
AQGVALQTM

SEQ ID NO: 7455 - protein, 10 aa, Homo sapiens
  misc_feature: Table A; Target 7455; HLA-A*03:01; AFP; ENSG00000081051; TAA
AQGVALQTMK

SEQ ID NO: 7456 - protein, 10 aa, Homo sapiens
  misc_feature: Table A; Target 7456; HLA-A*03:02; AFP; ENSG00000081051; TAA
AQGVALQTMK

SEQ ID NO: 7457 - protein, 10 aa, Homo sapiens
  misc_feature: Table A; Target 7457; HLA-A*11:01; AFP; ENSG00000081051; TAA
AQGVALQTMK

SEQ ID NO: 7458 - protein, 10 aa, Homo sapiens
  misc_feature: Table A; Target 7458; HLA-B*27:02; AFP; ENSG00000081051; TAA
AQGVALQTMK

SEQ ID NO: 7459 - protein, 9 aa, Homo sapiens
  misc_feature: Table A; Target 7459; HLA-C*06:02; AFP; ENSG00000081051; TAA
ARYDKIIPS

SEQ ID NO: 7460 - protein, 9 aa, Homo sapiens
  misc_feature: Table A; Target 7460; HLA-A*33:01; AFP; ENSG00000081051; TAA
ASFVHEYSR

SEQ ID NO: 7461 - protein, 9 aa, Homo sapiens
  misc_feature: Table A; Target 7461; HLA-A*33:03; AFP; ENSG00000081051; TAA
ASFVHEYSR

SEQ ID NO: 7462 - protein, 9 aa, Homo sapiens
  misc_feature: Table A; Target 7462; HLA-A*68:01; AFP; ENSG00000081051; TAA
ASFVHEYSR

SEQ ID NO: 7463 - protein, 9 aa, Homo sapiens
  misc_feature: Table A; Target 7463; HLA-B*58:01; AFP; ENSG00000081051; TAA
ASILDSYQC

SEQ ID NO: 7464 - protein, 9 aa, Homo sapiens
  misc_feature: Table A; Target 7464; HLA-C*01:02; AFP; ENSG00000081051; TAA
ATAATCCQL

SEQ ID NO: 7465 - protein, 9 aa, Homo sapiens
  misc_feature: Table A; Target 7465; HLA-C*06:02; AFP; ENSG00000081051; TAA
ATAATCCQL

SEQ ID NO: 7466 - protein, 8 aa, Homo sapiens
  misc_feature: Table A; Target 7466; HLA-B*57:01; AFP; ENSG00000081051; TAA
ATIFFAQF

SEQ ID NO: 7467 - protein, 9 aa, Homo sapiens
  misc_feature: Table A; Target 7467; HLA-A*02:04; AFP; ENSG00000081051; TAA
ATIFFAQFV

SEQ ID NO: 7468 - protein, 9 aa, Homo sapiens
  misc_feature: Table A; Target 7468; HLA-B*13:02; AFP; ENSG00000081051; TAA
ATIFFAQFV

SEQ ID NO: 7469 - protein, 8 aa, Homo sapiens
  misc_feature: Table A; Target 7469; HLA-A*03:01; AFP; ENSG00000081051; TAA
ATYKEVSK

SEQ ID NO: 7470 - protein, 8 aa, Homo sapiens
  misc_feature: Table A; Target 7470; HLA-A*03:02; AFP; ENSG00000081051; TAA
ATYKEVSK

SEQ ID NO: 7471 - protein, 8 aa, Homo sapiens
  misc_feature: Table A; Target 7471; HLA-B*27:05; AFP; ENSG00000081051; TAA
ATYKEVSK

SEQ ID NO: 7472 - protein, 9 aa, Homo sapiens
  misc_feature: Table A; Target 7472; HLA-A*01:01; AFP; ENSG00000081051; TAA
ATYKEVSKM

SEQ ID NO: 7473 - protein, 9 aa, Homo sapiens
  misc_feature: Table A; Target 7473; HLA-A*02:03; AFP; ENSG00000081051; TAA
ATYKEVSKM

SEQ ID NO: 7474 - protein, 9 aa, Homo sapiens
  misc_feature: Table A; Target 7474; HLA-A*30:02; AFP; ENSG00000081051; TAA
ATYKEVSKM

SEQ ID NO: 7475 - protein, 9 aa, Homo sapiens
  misc_feature: Table A; Target 7475; HLA-A*68:01; AFP; ENSG00000081051; TAA
ATYKEVSKM

SEQ ID NO: 7476 - protein, 9 aa, Homo sapiens
  misc_feature: Table A; Target 7476; HLA-B*13:02; AFP; ENSG00000081051; TAA
ATYKEVSKM

SEQ ID NO: 7477 - protein, 9 aa, Homo sapiens
  misc_feature: Table A; Target 7477; HLA-B*15:03; AFP; ENSG00000081051; TAA
ATYKEVSKM

SEQ ID NO: 7478 - protein, 9 aa, Homo sapiens
  misc_feature: Table A; Target 7478; HLA-B*27:05; AFP; ENSG00000081051; TAA
ATYKEVSKM

SEQ ID NO: 7479 - protein, 9 aa, Homo sapiens
  misc_feature: Table A; Target 7479; HLA-B*37:01; AFP; ENSG00000081051; TAA
ATYKEVSKM

SEQ ID NO: 7480 - protein, 9 aa, Homo sapiens
  misc_feature: Table A; Target 7480; HLA-B*44:03; AFP; ENSG00000081051; TAA
ATYKEVSKM

SEQ ID NO: 7481 - protein, 9 aa, Homo sapiens
  misc_feature: Table A; Target 7481; HLA-B*46:01; AFP; ENSG00000081051; TAA
ATYKEVSKM

SEQ ID NO: 7482 - protein, 9 aa, Homo sapiens
  misc_feature: Table A; Target 7482; HLA-B*57:01; AFP; ENSG00000081051; TAA
ATYKEVSKM

SEQ ID NO: 7483 - protein, 9 aa, Homo sapiens
  misc_feature: Table A; Target 7483; HLA-C*03:03; AFP; ENSG00000081051; TAA
ATYKEVSKM

SEQ ID NO: 7484 - protein, 9 aa, Homo sapiens
  misc_feature: Table A; Target 7484; HLA-C*03:04; AFP; ENSG00000081051; TAA
ATYKEVSKM

SEQ ID NO: 7485 - protein, 9 aa, Homo sapiens
  misc_feature: Table A; Target 7485; HLA-C*05:01; AFP; ENSG00000081051; TAA
ATYKEVSKM

SEQ ID NO: 7486 - protein, 9 aa, Homo sapiens
  misc_feature: Table A; Target 7486; HLA-C*06:02; AFP; ENSG00000081051; TAA
ATYKEVSKM

SEQ ID NO: 7487 - protein, 9 aa, Homo sapiens
  misc_feature: Table A; Target 7487; HLA-C*07:01; AFP; ENSG00000081051; TAA
ATYKEVSKM

SEQ ID NO: 7488 - protein, 9 aa, Homo sapiens
  misc_feature: Table A; Target 7488; HLA-C*07:06; AFP; ENSG00000081051; TAA
ATYKEVSKM

SEQ ID NO: 7489 - protein, 9 aa, Homo sapiens
  misc_feature: Table A; Target 7489; HLA-C*16:01; AFP; ENSG00000081051; TAA
ATYKEVSKM

SEQ ID NO: 7490 - protein, 9 aa, Homo sapiens
  misc_feature: Table A; Target 7490; HLA-C*16:04; AFP; ENSG00000081051; TAA
ATYKEVSKM

SEQ ID NO: 7491 - protein, 10 aa, Homo sapiens
  misc_feature: Table A; Target 7491; HLA-A*02:03; AFP; ENSG00000081051; TAA
ATYKEVSKMV

SEQ ID NO: 7492 - protein, 10 aa, Homo sapiens
  misc_feature: Table A; Target 7492; HLA-B*13:02; AFP; ENSG00000081051; TAA
ATYKEVSKMV

SEQ ID NO: 7493 - protein, 11 aa, Homo sapiens
  misc_feature: Table A; Target 7493; HLA-A*01:01; AFP; ENSG00000081051; TAA
ATYKEVSKMVK

SEQ ID NO: 7494 - protein, 11 aa, Homo sapiens
  misc_feature: Table A; Target 7494; HLA-A*33:03; AFP; ENSG00000081051; TAA
ATYKEVSKMVK

SEQ ID NO: 7495 - protein, 11 aa, Homo sapiens
  misc_feature: Table A; Target 7495; HLA-A*68:01; AFP; ENSG00000081051; TAA
ATYKEVSKMVK

SEQ ID NO: 7496 - protein, 11 aa, Homo sapiens
  misc_feature: Table A; Target 7496; HLA-C*06:02; AFP; ENSG00000081051; TAA
ATYKEVSKMVK

SEQ ID NO: 7497 - protein, 9 aa, Homo sapiens
  misc_feature: Table A; Target 7497; HLA-A*02:01; AFP; ENSG00000081051; TAA
AVIADFSGL

SEQ ID NO: 7498 - protein, 9 aa, Homo sapiens
  misc_feature: Table A; Target 7498; HLA-A*02:03; AFP; ENSG00000081051; TAA
AVIADFSGL

SEQ ID NO: 7499 - protein, 9 aa, Homo sapiens
  misc_feature: Table A; Target 7499; HLA-A*02:04; AFP; ENSG00000081051; TAA
AVIADFSGL

SEQ ID NO: 7500 - protein, 9 aa, Homo sapiens
  misc_feature: Table A; Target 7500; HLA-A*30:01; AFP; ENSG00000081051; TAA
AVIADFSGL

SEQ ID NO: 7501 - protein, 9 aa, Homo sapiens
  misc_feature: Table A; Target 7501; HLA-A*32:01; AFP; ENSG00000081051; TAA
AVIADFSGL

SEQ ID NO: 7502 - protein, 9 aa, Homo sapiens
  misc_feature: Table A; Target 7502; HLA-A*68:02; AFP; ENSG00000081051; TAA
AVIADFSGL

SEQ ID NO: 7503 - protein, 9 aa, Homo sapiens
  misc_feature: Table A; Target 7503; HLA-B*13:02; AFP; ENSG00000081051; TAA
AVIADFSGL

SEQ ID NO: 7504 - protein, 9 aa, Homo sapiens
  misc_feature: Table A; Target 7504; HLA-B*15:03; AFP; ENSG00000081051; TAA
AVIADFSGL

SEQ ID NO: 7505 - protein, 9 aa, Homo sapiens
  misc_feature: Table A; Target 7505; HLA-B*27:05; AFP; ENSG00000081051; TAA
AVIADFSGL

SEQ ID NO: 7506 - protein, 9 aa, Homo sapiens
  misc_feature: Table A; Target 7506; HLA-B*40:02; AFP; ENSG00000081051; TAA
AVIADFSGL

SEQ ID NO: 7507 - protein, 9 aa, Homo sapiens
  misc_feature: Table A; Target 7507; HLA-C*02:02; AFP; ENSG00000081051; TAA
AVIADFSGL

SEQ ID NO: 7508 - protein, 9 aa, Homo sapiens
  misc_feature: Table A; Target 7508; HLA-C*05:01; AFP; ENSG00000081051; TAA
AVIADFSGL

SEQ ID NO: 7509 - protein, 9 aa, Homo sapiens
  misc_feature: Table A; Target 7509; HLA-C*14:02; AFP; ENSG00000081051; TAA
AVIADFSGL

SEQ ID NO: 7510 - protein, 9 aa, Homo sapiens
  misc_feature: Table A; Target 7510; HLA-A*25:01; AFP; ENSG00000081051; TAA
AVMKNFGTR

SEQ ID NO: 7511 - protein, 9 aa, Homo sapiens
  misc_feature: Table A; Target 7511; HLA-A*32:01; AFP; ENSG00000081051; TAA
AVMKNFGTR

SEQ ID NO: 7512 - protein, 9 aa, Homo sapiens
  misc_feature: Table A; Target 7512; HLA-A*33:01; AFP; ENSG00000081051; TAA
AVMKNFGTR

SEQ ID NO: 7513 - protein, 9 aa, Homo sapiens
  misc_feature: Table A; Target 7513; HLA-B*57:01; AFP; ENSG00000081051; TAA
AVMKNFGTR

SEQ ID NO: 7514 - protein, 11 aa, Homo sapiens
  misc_feature: Table A; Target 7514; HLA-B*57:01; AFP; ENSG00000081051; TAA
AVMKNFGTRTF

SEQ ID NO: 7515 - protein, 8 aa, Homo sapiens
  misc_feature: Table A; Target 7515; HLA-A*02:04; AFP; ENSG00000081051; TAA
AVSVILRV

SEQ ID NO: 7516 - protein, 8 aa, Homo sapiens
  misc_feature: Table A; Target 7516; HLA-B*56:01; AFP; ENSG00000081051; TAA
AVSVILRV

SEQ ID NO: 7517 - protein, 8 aa, Homo sapiens
  misc_feature: Table A; Target 7517; HLA-C*06:02; AFP; ENSG00000081051; TAA
AVSVILRV

SEQ ID NO: 7518 - protein, 8 aa, Homo sapiens
  misc_feature: Table A; Target 7518; HLA-C*12:03; AFP; ENSG00000081051; TAA
AVSVILRV

SEQ ID NO: 7519 - protein, 8 aa, Homo sapiens
  misc_feature: Table A; Target 7519; HLA-C*16:02; AFP; ENSG00000081051; TAA
AVSVILRV

SEQ ID NO: 7520 - protein, 9 aa, Homo sapiens
  misc_feature: Table A; Target 7520; HLA-A*02:03; AFP; ENSG00000081051; TAA
AVSVILRVA

SEQ ID NO: 7521 - protein, 9 aa, Homo sapiens
  misc_feature: Table A; Target 7521; HLA-A*03:01; AFP; ENSG00000081051; TAA
AVSVILRVA

SEQ ID NO: 7522 - protein, 9 aa, Homo sapiens
  misc_feature: Table A; Target 7522; HLA-B*54:01; AFP; ENSG00000081051; TAA
AVSVILRVA

SEQ ID NO: 7523 - protein, 9 aa, Homo sapiens
  misc_feature: Table A; Target 7523; HLA-B*55:01; AFP; ENSG00000081051; TAA
AVSVILRVA

SEQ ID NO: 7524 - protein, 9 aa, Homo sapiens
  misc_feature: Table A; Target 7524; HLA-C*06:02; AFP; ENSG00000081051; TAA
AVSVILRVA

SEQ ID NO: 7525 - protein, 9 aa, Homo sapiens
  misc_feature: Table A; Target 7525; HLA-C*12:03; AFP; ENSG00000081051; TAA
AVSVILRVA

SEQ ID NO: 7526 - protein, 9 aa, Homo sapiens
  misc_feature: Table A; Target 7526; HLA-C*16:01; AFP; ENSG00000081051; TAA
AVSVILRVA

SEQ ID NO: 7527 - protein, 9 aa, Homo sapiens
  misc_feature: Table A; Target 7527; HLA-C*16:02; AFP; ENSG00000081051; TAA
AVSVILRVA

SEQ ID NO: 7528 - protein, 10 aa, Homo sapiens
  misc_feature: Table A; Target 7528; HLA-A*31:01; AFP; ENSG00000081051; TAA
AVSVILRVAK

SEQ ID NO: 7529 - protein, 10 aa, Homo sapiens
  misc_feature: Table A; Target 7529; HLA-C*07:06; AFP; ENSG00000081051; TAA
AVSVILRVAK

SEQ ID NO: 7530 - protein, 9 aa, Homo sapiens
  misc_feature: Table A; Target 7530; HLA-A*32:01; AFP; ENSG00000081051; TAA
AYEEDRETF

SEQ ID NO: 7531 - protein, 9 aa, Homo sapiens
  misc_feature: Table A; Target 7531; HLA-B*15:03; AFP; ENSG00000081051; TAA
AYEEDRETF

SEQ ID NO: 7532 - protein, 9 aa, Homo sapiens
  misc_feature: Table A; Target 7532; HLA-B*35:01; AFP; ENSG00000081051; TAA
AYEEDRETF

SEQ ID NO: 7533 - protein, 9 aa, Homo sapiens
  misc_feature: Table A; Target 7533; HLA-B*35:03; AFP; ENSG00000081051; TAA
AYEEDRETF

SEQ ID NO: 7534 - protein, 9 aa, Homo sapiens
  misc_feature: Table A; Target 7534; HLA-B*58:01; AFP; ENSG00000081051; TAA
AYEEDRETF

SEQ ID NO: 7535 - protein, 9 aa, Homo sapiens
  misc_feature: Table A; Target 7535; HLA-C*01:02; AFP; ENSG00000081051; TAA
AYEEDRETF

SEQ ID NO: 7536 - protein, 9 aa, Homo sapiens
  misc_feature: Table A; Target 7536; HLA-C*05:01; AFP; ENSG00000081051; TAA
AYEEDRETF

SEQ ID NO: 7537 - protein, 9 aa, Homo sapiens
  misc_feature: Table A; Target 7537; HLA-C*07:04; AFP; ENSG00000081051; TAA
AYEEDRETF

SEQ ID NO: 7538 - protein, 9 aa, Homo sapiens
  misc_feature: Table A; Target 7538; HLA-C*16:01; AFP; ENSG00000081051; TAA
AYEEDRETF

SEQ ID NO: 7539 - protein, 10 aa, Homo sapiens
  misc_feature: Table A; Target 7539; HLA-C*07:01; AFP; ENSG00000081051; TAA
AYEEDRETFM

SEQ ID NO: 7540 - protein, 9 aa, Homo sapiens
  misc_feature: Table A; Target 7540; HLA-C*16:02; AFP; ENSG00000081051; TAA
AYTKKAPQL

SEQ ID NO: 7541 - protein, 9 aa, Homo sapiens
  misc_feature: Table A; Target 7541; HLA-C*14:02; AFP; ENSG00000081051; TAA
CFAEEGQKL

SEQ ID NO: 7542 - protein, 10 aa, Homo sapiens
  misc_feature: Table A; Target 7542; HLA-A*30:02; AFP; ENSG00000081051; TAA
CGLFQKLGEY

SEQ ID NO: 7543 - protein, 11 aa, Homo sapiens
  misc_feature: Table A; Target 7543; HLA-A*11:01; AFP; ENSG00000081051; TAA
CLQDGEKIMSY

SEQ ID NO: 7544 - protein, 11 aa, Homo sapiens
  misc_feature: Table A; Target 7544; HLA-A*29:02; AFP; ENSG00000081051; TAA
CLQDGEKIMSY

SEQ ID NO: 7545 - protein, 11 aa, Homo sapiens
  misc_feature: Table A; Target 7545; HLA-B*46:01; AFP; ENSG00000081051; TAA
CLQDGEKIMSY

SEQ ID NO: 7546 - protein, 11 aa, Homo sapiens
  misc_feature: Table A; Target 7546; HLA-C*01:02; AFP; ENSG00000081051; TAA
CLQDGEKIMSY

SEQ ID NO: 7547 - protein, 11 aa, Homo sapiens
  misc_feature: Table A; Target 7547; HLA-C*12:03; AFP; ENSG00000081051; TAA
CLQDGEKIMSY

SEQ ID NO: 7548 - protein, 11 aa, Homo sapiens
  misc_feature: Table A; Target 7548; HLA-C*14:02; AFP; ENSG00000081051; TAA
CLQDGEKIMSY

SEQ ID NO: 7549 - protein, 11 aa, Homo sapiens
  misc_feature: Table A; Target 7549; HLA-C*16:02; AFP; ENSG00000081051; TAA
CLQDGEKIMSY

SEQ ID NO: 7550 - protein, 8 aa, Homo sapiens
  misc_feature: Table A; Target 7550; HLA-B*15:03; AFP; ENSG00000081051; TAA
CQAQGVAL

SEQ ID NO: 7551 - protein, 8 aa, Homo sapiens
  misc_feature: Table A; Target 7551; HLA-B*37:01; AFP; ENSG00000081051; TAA
CQAQGVAL

SEQ ID NO: 7552 - protein, 8 aa, Homo sapiens
  misc_feature: Table A; Target 7552; HLA-C*03:03; AFP; ENSG00000081051; TAA
CQAQGVAL

SEQ ID NO: 7553 - protein, 11 aa, Homo sapiens
  misc_feature: Table A; Target 7553; HLA-B*15:01; AFP; ENSG00000081051; TAA
CQAQGVALQTM

SEQ ID NO: 7554 - protein, 11 aa, Homo sapiens
  misc_feature: Table A; Target 7554; HLA-B*27:05; AFP; ENSG00000081051; TAA
CQAQGVALQTM

SEQ ID NO: 7555 - protein, 9 aa, Homo sapiens
  misc_feature: Table A; Target 7555; HLA-C*05:01; AFP; ENSG00000081051; TAA
CQDKGEEEL

SEQ ID NO: 7556 - protein, 10 aa, Homo sapiens
  misc_feature: Table A; Target 7556; HLA-B*15:01; AFP; ENSG00000081051; TAA
CQGQEQEVCF

SEQ ID NO: 7557 - protein, 10 aa, Homo sapiens
  misc_feature: Table A; Target 7557; HLA-B*38:01; AFP; ENSG00000081051; TAA
CQGQEQEVCF

SEQ ID NO: 7558 - protein, 10 aa, Homo sapiens
  misc_feature: Table A; Target 7558; HLA-C*07:04; AFP; ENSG00000081051; TAA
CQGQEQEVCF

SEQ ID NO: 7559 - protein, 8 aa, Homo sapiens
  misc_feature: Table A; Target 7559; HLA-A*33:03; AFP; ENSG00000081051; TAA
DALTAIEK

SEQ ID NO: 7560 - protein, 8 aa, Homo sapiens
  misc_feature: Table A; Target 7560; HLA-B*27:02; AFP; ENSG00000081051; TAA
DALTAIEK

SEQ ID NO: 7561 - protein, 8 aa, Homo sapiens
  misc_feature: Table A; Target 7561; HLA-B*35:01; AFP; ENSG00000081051; TAA
DALTAIEK

SEQ ID NO: 7562 - protein, 8 aa, Homo sapiens
  misc_feature: Table A; Target 7562; HLA-C*07:06; AFP; ENSG00000081051; TAA
DALTAIEK

SEQ ID NO: 7563 - protein, 9 aa, Homo sapiens
  misc_feature: Table A; Target 7563; HLA-B*51:01; AFP; ENSG00000081051; TAA
DALTAIEKP

SEQ ID NO: 7564 - protein, 11 aa, Homo sapiens
  misc_feature: Table A; Target 7564; HLA-A*30:01; AFP; ENSG00000081051; TAA
DEKPEGLSPNL

SEQ ID NO: 7565 - protein, 11 aa, Homo sapiens
  misc_feature: Table A; Target 7565; HLA-B*18:01; AFP; ENSG00000081051; TAA
DEKPEGLSPNL

SEQ ID NO: 7566 - protein, 11 aa, Homo sapiens
  misc_feature: Table A; Target 7566; HLA-B*39:01; AFP; ENSG00000081051; TAA
DEKPEGLSPNL

SEQ ID NO: 7567 - protein, 11 aa, Homo sapiens
  misc_feature: Table A; Target 7567; HLA-B*40:02; AFP; ENSG00000081051; TAA
DEKPEGLSPNL

SEQ ID NO: 7568 - protein, 11 aa, Homo sapiens
  misc_feature: Table A; Target 7568; HLA-B*44:02; AFP; ENSG00000081051; TAA
DEKPEGLSPNL

SEQ ID NO: 7569 - protein, 8 aa, Homo sapiens
  misc_feature: Table A; Target 7569; HLA-B*18:01; AFP; ENSG00000081051; TAA
DEQSSGCL

SEQ ID NO: 7570 - protein, 9 aa, Homo sapiens
  misc_feature: Table A; Target 7570; HLA-A*26:01; AFP; ENSG00000081051; TAA
DETYVPPAF

SEQ ID NO: 7571 - protein, 9 aa, Homo sapiens
  misc_feature: Table A; Target 7571; HLA-A*32:01; AFP; ENSG00000081051; TAA
DETYVPPAF

SEQ ID NO: 7572 - protein, 9 aa, Homo sapiens
  misc_feature: Table A; Target 7572; HLA-A*33:03; AFP; ENSG00000081051; TAA
DETYVPPAF

SEQ ID NO: 7573 - protein, 9 aa, Homo sapiens
  misc_feature: Table A; Target 7573; HLA-A*68:01; AFP; ENSG00000081051; TAA
DETYVPPAF

SEQ ID NO: 7574 - protein, 9 aa, Homo sapiens
  misc_feature: Table A; Target 7574; HLA-A*68:02; AFP; ENSG00000081051; TAA
DETYVPPAF

SEQ ID NO: 7575 - protein, 9 aa, Homo sapiens
  misc_feature: Table A; Target 7575; HLA-B*35:03; AFP; ENSG00000081051; TAA
DETYVPPAF

SEQ ID NO: 7576 - protein, 9 aa, Homo sapiens
  misc_feature: Table A; Target 7576; HLA-B*38:01; AFP; ENSG00000081051; TAA
DETYVPPAF

SEQ ID NO: 7577 - protein, 9 aa, Homo sapiens
  misc_feature: Table A; Target 7577; HLA-B*39:01; AFP; ENSG00000081051; TAA
DETYVPPAF

SEQ ID NO: 7578 - protein, 9 aa, Homo sapiens
  misc_feature: Table A; Target 7578; HLA-B*40:02; AFP; ENSG00000081051; TAA
DETYVPPAF

SEQ ID NO: 7579 - protein, 9 aa, Homo sapiens
  misc_feature: Table A; Target 7579; HLA-B*49:01; AFP; ENSG00000081051; TAA
DETYVPPAF

SEQ ID NO: 7580 - protein, 9 aa, Homo sapiens
  misc_feature: Table A; Target 7580; HLA-B*51:01; AFP; ENSG00000081051; TAA
DETYVPPAF

SEQ ID NO: 7581 - protein, 9 aa, Homo sapiens
  misc_feature: Table A; Target 7581; HLA-C*04:01; AFP; ENSG00000081051; TAA
DETYVPPAF

SEQ ID NO: 7582 - protein, 10 aa, Homo sapiens
  misc_feature: Table A; Target 7582; HLA-A*33:03; AFP; ENSG00000081051; TAA
DFNQFSSGEK

SEQ ID NO: 7583 - protein, 8 aa, Homo sapiens
  misc_feature: Table A; Target 7583; HLA-A*33:03; AFP; ENSG00000081051; TAA
DFSGLLEK

SEQ ID NO: 7584 - protein, 8 aa, Homo sapiens
  misc_feature: Table A; Target 7584; HLA-B*27:02; AFP; ENSG00000081051; TAA
DFSGLLEK

SEQ ID NO: 7585 - protein, 8 aa, Homo sapiens
  misc_feature: Table A; Target 7585; HLA-B*35:01; AFP; ENSG00000081051; TAA
DGEKIMSY

SEQ ID NO: 7586 - protein, 9 aa, Homo sapiens
  misc_feature: Table A; Target 7586; HLA-B*51:01; AFP; ENSG00000081051; TAA
DIIIGHLCI

SEQ ID NO: 7587 - protein, 9 aa, Homo sapiens
  misc_feature: Table A; Target 7587; HLA-A*33:01; AFP; ENSG00000081051; TAA
DLATIFFAQ

SEQ ID NO: 7588 - protein, 9 aa, Homo sapiens
  misc_feature: Table A; Target 7588; HLA-A*68:02; AFP; ENSG00000081051; TAA
DLATIFFAQ

SEQ ID NO: 7589 - protein, 10 aa, Homo sapiens
  misc_feature: Table A; Target 7589; HLA-B*38:01; AFP; ENSG00000081051; TAA
DLCQAQGVAL

SEQ ID NO: 7590 - protein, 10 aa, Homo sapiens
  misc_feature: Table A; Target 7590; HLA-C*04:01; AFP; ENSG00000081051; TAA
DLCQAQGVAL

SEQ ID NO: 7591 - protein, 10 aa, Homo sapiens
  misc_feature: Table A; Target 7591; HLA-C*07:01; AFP; ENSG00000081051; TAA
DLCQAQGVAL

SEQ ID NO: 7592 - protein, 9 aa, Homo sapiens
  misc_feature: Table A; Target 7592; HLA-A*25:01; AFP; ENSG00000081051; TAA
DSYQCTAEI

SEQ ID NO: 7593 - protein, 8 aa, Homo sapiens
  misc_feature: Table A; Target 7593; HLA-A*33:01; AFP; ENSG00000081051; TAA
DVAHVHEH

SEQ ID NO: 7594 - protein, 8 aa, Homo sapiens
  misc_feature: Table A; Target 7594; HLA-A*68:01; AFP; ENSG00000081051; TAA
DVAHVHEH

SEQ ID NO: 7595 - protein, 9 aa, Homo sapiens
  misc_feature: Table A; Target 7595; HLA-A*68:02; AFP; ENSG00000081051; TAA
DVAHVHEHC

SEQ ID NO: 7596 - protein, 9 aa, Homo sapiens
  misc_feature: Table A; Target 7596; HLA-B*35:01; AFP; ENSG00000081051; TAA
EATYKEVSK

SEQ ID NO: 7597 - protein, 9 aa, Homo sapiens
  misc_feature: Table A; Target 7597; HLA-B*54:01; AFP; ENSG00000081051; TAA
EATYKEVSK

SEQ ID NO: 7598 - protein, 10 aa, Homo sapiens
  misc_feature: Table A; Target 7598; HLA-A*26:01; AFP; ENSG00000081051; TAA
EATYKEVSKM

SEQ ID NO: 7599 - protein, 10 aa, Homo sapiens
  misc_feature: Table A; Target 7599; HLA-A*68:01; AFP; ENSG00000081051; TAA
EATYKEVSKM

SEQ ID NO: 7600 - protein, 10 aa, Homo sapiens
  misc_feature: Table A; Target 7600; HLA-A*68:02; AFP; ENSG00000081051; TAA
EAVIADFSGL

SEQ ID NO: 7601 - protein, 10 aa, Homo sapiens
  misc_feature: Table A; Target 7601; HLA-A*29:02; AFP; ENSG00000081051; TAA
EAYEEDRETF

SEQ ID NO: 7602 - protein, 10 aa, Homo sapiens
  misc_feature: Table A; Target 7602; HLA-A*33:01; AFP; ENSG00000081051; TAA
EAYEEDRETF

SEQ ID NO: 7603 - protein, 10 aa, Homo sapiens
  misc_feature: Table A; Target 7603; HLA-A*68:01; AFP; ENSG00000081051; TAA
EAYEEDRETF

SEQ ID NO: 7604 - protein, 10 aa, Homo sapiens
  misc_feature: Table A; Target 7604; HLA-B*18:01; AFP; ENSG00000081051; TAA
EAYEEDRETF

SEQ ID NO: 7605 - protein, 10 aa, Homo sapiens
  misc_feature: Table A; Target 7605; HLA-B*39:01; AFP; ENSG00000081051; TAA
EAYEEDRETF

SEQ ID NO: 7606 - protein, 10 aa, Homo sapiens
  misc_feature: Table A; Target 7606; HLA-C*12:03; AFP; ENSG00000081051; TAA
EAYEEDRETF

SEQ ID NO: 7607 - protein, 10 aa, Homo sapiens
  misc_feature: Table A; Target 7607; HLA-C*16:01; AFP; ENSG00000081051; TAA
EAYEEDRETF

SEQ ID NO: 7608 - protein, 11 aa, Homo sapiens
  misc_feature: Table A; Target 7608; HLA-B*35:01; AFP; ENSG00000081051; TAA
EAYEEDRETFM

SEQ ID NO: 7609 - protein, 10 aa, Homo sapiens
  misc_feature: Table A; Target 7609; HLA-A*68:02; AFP; ENSG00000081051; TAA
ECFQTKAATV

SEQ ID NO: 7610 - protein, 10 aa, Homo sapiens
  misc_feature: Table A; Target 7610; HLA-B*51:01; AFP; ENSG00000081051; TAA
ECFQTKAATV

SEQ ID NO: 7611 - protein, 9 aa, Homo sapiens
  misc_feature: Table A; Target 7611; HLA-A*33:01; AFP; ENSG00000081051; TAA
EDRETFMNK

SEQ ID NO: 7612 - protein, 9 aa, Homo sapiens
  misc_feature: Table A; Target 7612; HLA-A*33:03; AFP; ENSG00000081051; TAA
EDRETFMNK

SEQ ID NO: 7613 - protein, 10 aa, Homo sapiens
  misc_feature: Table A; Target 7613; HLA-B*27:02; AFP; ENSG00000081051; TAA
EEDRETFMNK

SEQ ID NO: 7614 - protein, 8 aa, Homo sapiens
  misc_feature: Table A; Target 7614; HLA-B*44:02; AFP; ENSG00000081051; TAA
EEELQKYI

SEQ ID NO: 7615 - protein, 8 aa, Homo sapiens
  misc_feature: Table A; Target 7615; HLA-B*49:01; AFP; ENSG00000081051; TAA
EEELQKYI

SEQ ID NO: 7616 - protein, 9 aa, Homo sapiens
  misc_feature: Table A; Target 7616; HLA-A*33:03; AFP; ENSG00000081051; TAA
EEGQKLISK

SEQ ID NO: 7617 - protein, 9 aa, Homo sapiens
  misc_feature: Table A; Target 7617; HLA-A*68:01; AFP; ENSG00000081051; TAA
EEGQKLISK

SEQ ID NO: 7618 - protein, 11 aa, Homo sapiens
  misc_feature: Table A; Target 7618; HLA-B*44:03; AFP; ENSG00000081051; TAA
EEGQKLISKTR

SEQ ID NO: 7619 - protein, 8 aa, Homo sapiens
  misc_feature: Table A; Target 7619; HLA-B*18:01; AFP; ENSG00000081051; TAA
EEQLEAVI

SEQ ID NO: 7620 - protein, 11 aa, Homo sapiens
  misc_feature: Table A; Target 7620; HLA-B*27:02; AFP; ENSG00000081051; TAA
EEQLEAVIADF

SEQ ID NO: 7621 - protein, 10 aa, Homo sapiens
  misc_feature: Table A; Target 7621; HLA-A*33:03; AFP; ENSG00000081051; TAA
EFLINLVKQK

SEQ ID NO: 7622 - protein, 11 aa, Homo sapiens
  misc_feature: Table A; Target 7622; HLA-A*68:01; AFP; ENSG00000081051; TAA
EGAADIIIGHL

SEQ ID NO: 7623 - protein, 10 aa, Homo sapiens
  misc_feature: Table A; Target 7623; HLA-A*23:01; AFP; ENSG00000081051; TAA
EGLSPNLNRF

SEQ ID NO: 7624 - protein, 10 aa, Homo sapiens
  misc_feature: Table A; Target 7624; HLA-A*24:02; AFP; ENSG00000081051; TAA
EGLSPNLNRF

SEQ ID NO: 7625 - protein, 10 aa, Homo sapiens
  misc_feature: Table A; Target 7625; HLA-A*25:01; AFP; ENSG00000081051; TAA
EGLSPNLNRF

SEQ ID NO: 7626 - protein, 10 aa, Homo sapiens
  misc_feature: Table A; Target 7626; HLA-A*26:01; AFP; ENSG00000081051; TAA
EGLSPNLNRF

SEQ ID NO: 7627 - protein, 10 aa, Homo sapiens
  misc_feature: Table A; Target 7627; HLA-A*33:03; AFP; ENSG00000081051; TAA
EGLSPNLNRF

SEQ ID NO: 7628 - protein, 10 aa, Homo sapiens
  misc_feature: Table A; Target 7628; HLA-A*33:01; AFP; ENSG00000081051; TAA
EGQKLISKTR

SEQ ID NO: 7629 - protein, 9 aa, Homo sapiens
  misc_feature: Table A; Target 7629; HLA-B*13:02; AFP; ENSG00000081051; TAA
EIQKLVLDV

SEQ ID NO: 7630 - protein, 9 aa, Homo sapiens
  misc_feature: Table A; Target 7630; HLA-C*06:02; AFP; ENSG00000081051; TAA
EIQKLVLDV

SEQ ID NO: 7631 - protein, 10 aa, Homo sapiens
  misc_feature: Table A; Target 7631; HLA-A*25:01; AFP; ENSG00000081051; TAA
EISLADLATI

SEQ ID NO: 7632 - protein, 10 aa, Homo sapiens
  misc_feature: Table A; Target 7632; HLA-C*07:01; AFP; ENSG00000081051; TAA
EKCFQTENPL

SEQ ID NO: 7633 - protein, 8 aa, Homo sapiens
  misc_feature: Table A; Target 7633; HLA-C*07:01; AFP; ENSG00000081051; TAA
EKEILEKY

SEQ ID NO: 7634 - protein, 8 aa, Homo sapiens
  misc_feature: Table A; Target 7634; HLA-B*08:01; AFP; ENSG00000081051; TAA
ELMAITRK

SEQ ID NO: 7635 - protein, 9 aa, Homo sapiens
  misc_feature: Table A; Target 7635; HLA-A*24:02; AFP; ENSG00000081051; TAA
ELMAITRKM

SEQ ID NO: 7636 - protein, 9 aa, Homo sapiens
  misc_feature: Table A; Target 7636; HLA-A*33:01; AFP; ENSG00000081051; TAA
ELMAITRKM

SEQ ID NO: 7637 - protein, 9 aa, Homo sapiens
  misc_feature: Table A; Target 7637; HLA-A*68:02; AFP; ENSG00000081051; TAA
ELMAITRKM

SEQ ID NO: 7638 - protein, 9 aa, Homo sapiens
  misc_feature: Table A; Target 7638; HLA-C*07:01; AFP; ENSG00000081051; TAA
ELMAITRKM

SEQ ID NO: 7639 - protein, 11 aa, Homo sapiens
  misc_feature: Table A; Target 7639; HLA-B*54:01; AFP; ENSG00000081051; TAA
ELMAITRKMAA

SEQ ID NO: 7640 - protein, 8 aa, Homo sapiens
  misc_feature: Table A; Target 7640; HLA-B*08:01; AFP; ENSG00000081051; TAA
ELRESSLL

SEQ ID NO: 7641 - protein, 9 aa, Homo sapiens
  misc_feature: Table A; Target 7641; HLA-A*02:04; AFP; ENSG00000081051; TAA
EMTPVNPGV

SEQ ID NO: 7642 - protein, 9 aa, Homo sapiens
  misc_feature: Table A; Target 7642; HLA-A*32:01; AFP; ENSG00000081051; TAA
EMTPVNPGV

SEQ ID NO: 7643 - protein, 9 aa, Homo sapiens
  misc_feature: Table A; Target 7643; HLA-B*38:01; AFP; ENSG00000081051; TAA
EMTPVNPGV

SEQ ID NO: 7644 - protein, 9 aa, Homo sapiens
  misc_feature: Table A; Target 7644; HLA-B*39:01; AFP; ENSG00000081051; TAA
EMTPVNPGV

SEQ ID NO: 7645 - protein, 9 aa, Homo sapiens
  misc_feature: Table A; Target 7645; HLA-B*51:01; AFP; ENSG00000081051; TAA
EMTPVNPGV

SEQ ID NO: 7646 - protein, 9 aa, Homo sapiens
  misc_feature: Table A; Target 7646; HLA-C*02:02; AFP; ENSG00000081051; TAA
EMTPVNPGV

SEQ ID NO: 7647 - protein, 9 aa, Homo sapiens
  misc_feature: Table A; Target 7647; HLA-C*16:01; AFP; ENSG00000081051; TAA
EMTPVNPGV

SEQ ID NO: 7648 - protein, 10 aa, Homo sapiens
  misc_feature: Table A; Target 7648; HLA-A*33:03; AFP; ENSG00000081051; TAA
ENAVECFQTK

SEQ ID NO: 7649 - protein, 10 aa, Homo sapiens
  misc_feature: Table A; Target 7649; HLA-A*68:01; AFP; ENSG00000081051; TAA
ENAVECFQTK

SEQ ID NO: 7650 - protein, 10 aa, Homo sapiens
  misc_feature: Table A; Target 7650; HLA-B*27:02; AFP; ENSG00000081051; TAA
ENAVECFQTK

SEQ ID NO: 7651 - protein, 10 aa, Homo sapiens
  misc_feature: Table A; Target 7651; HLA-C*07:01; AFP; ENSG00000081051; TAA
ENAVECFQTK

SEQ ID NO: 7652 - protein, 9 aa, Homo sapiens
  misc_feature: Table A; Target 7652; HLA-B*18:01; AFP; ENSG00000081051; TAA
EPVTSCEAY

SEQ ID NO: 7653 - protein, 9 aa, Homo sapiens
  misc_feature: Table A; Target 7653; HLA-C*03:03; AFP; ENSG00000081051; TAA
EPVTSCEAY

SEQ ID NO: 7654 - protein, 9 aa, Homo sapiens
  misc_feature: Table A; Target 7654; HLA-A*29:02; AFP; ENSG00000081051; TAA
ETFMNKFIY

SEQ ID NO: 7655 - protein, 9 aa, Homo sapiens
  misc_feature: Table A; Target 7655; HLA-C*07:01; AFP; ENSG00000081051; TAA
ETFMNKFIY

SEQ ID NO: 7656 - protein, 8 aa, Homo sapiens
  misc_feature: Table A; Target 7656; HLA-A*23:01; AFP; ENSG00000081051; TAA
ETYVPPAF

SEQ ID NO: 7657 - protein, 8 aa, Homo sapiens
  misc_feature: Table A; Target 7657; HLA-A*32:01; AFP; ENSG00000081051; TAA
ETYVPPAF

SEQ ID NO: 7658 - protein, 8 aa, Homo sapiens
  misc_feature: Table A; Target 7658; HLA-A*33:01; AFP; ENSG00000081051; TAA
ETYVPPAF

SEQ ID NO: 7659 - protein, 8 aa, Homo sapiens
  misc_feature: Table A; Target 7659; HLA-A*33:03; AFP; ENSG00000081051; TAA
ETYVPPAF

SEQ ID NO: 7660 - protein, 8 aa, Homo sapiens
  misc_feature: Table A; Target 7660; HLA-A*68:01; AFP; ENSG00000081051; TAA
ETYVPPAF

SEQ ID NO: 7661 - protein, 8 aa, Homo sapiens
  misc_feature: Table A; Target 7661; HLA-B*08:01; AFP; ENSG00000081051; TAA
ETYVPPAF

SEQ ID NO: 7662 - protein, 8 aa, Homo sapiens
  misc_feature: Table A; Target 7662; HLA-B*35:01; AFP; ENSG00000081051; TAA
ETYVPPAF

SEQ ID NO: 7663 - protein, 8 aa, Homo sapiens
  misc_feature: Table A; Target 7663; HLA-B*46:01; AFP; ENSG00000081051; TAA
ETYVPPAF

SEQ ID NO: 7664 - protein, 8 aa, Homo sapiens
  misc_feature: Table A; Target 7664; HLA-B*51:01; AFP; ENSG00000081051; TAA
ETYVPPAF

SEQ ID NO: 7665 - protein, 8 aa, Homo sapiens
  misc_feature: Table A; Target 7665; HLA-B*58:01; AFP; ENSG00000081051; TAA
ETYVPPAF

SEQ ID NO: 7666 - protein, 8 aa, Homo sapiens
  misc_feature: Table A; Target 7666; HLA-C*03:03; AFP; ENSG00000081051; TAA
ETYVPPAF

SEQ ID NO: 7667 - protein, 8 aa, Homo sapiens
  misc_feature: Table A; Target 7667; HLA-C*03:04; AFP; ENSG00000081051; TAA
ETYVPPAF

SEQ ID NO: 7668 - protein, 8 aa, Homo sapiens
  misc_feature: Table A; Target 7668; HLA-C*07:01; AFP; ENSG00000081051; TAA
ETYVPPAF

SEQ ID NO: 7669 - protein, 8 aa, Homo sapiens
  misc_feature: Table A; Target 7669; HLA-C*07:02; AFP; ENSG00000081051; TAA
ETYVPPAF

SEQ ID NO: 7670 - protein, 8 aa, Homo sapiens
  misc_feature: Table A; Target 7670; HLA-C*12:03; AFP; ENSG00000081051; TAA
ETYVPPAF

SEQ ID NO: 7671 - protein, 8 aa, Homo sapiens
  misc_feature: Table A; Target 7671; HLA-C*16:04; AFP; ENSG00000081051; TAA
ETYVPPAF

SEQ ID NO: 7672 - protein, 9 aa, Homo sapiens
  misc_feature: Table A; Target 7672; HLA-A*68:02; AFP; ENSG00000081051; TAA
ETYVPPAFS

SEQ ID NO: 7673 - protein, 10 aa, Homo sapiens
  misc_feature: Table A; Target 7673; HLA-A*33:03; AFP; ENSG00000081051; TAA
EVSKMVKDAL

SEQ ID NO: 7674 - protein, 10 aa, Homo sapiens
  misc_feature: Table A; Target 7674; HLA-C*06:02; AFP; ENSG00000081051; TAA
EVSKMVKDAL

SEQ ID NO: 7675 - protein, 10 aa, Homo sapiens
  misc_feature: Table A; Target 7675; HLA-C*07:02; AFP; ENSG00000081051; TAA
EVSKMVKDAL

SEQ ID NO: 7676 - protein, 8 aa, Homo sapiens
  misc_feature: Table A; Target 7676; HLA-A*24:02; AFP; ENSG00000081051; TAA
EYGIASIL

SEQ ID NO: 7677 - protein, 8 aa, Homo sapiens
  misc_feature: Table A; Target 7677; HLA-B*35:03; AFP; ENSG00000081051; TAA
EYGIASIL

SEQ ID NO: 7678 - protein, 8 aa, Homo sapiens
  misc_feature: Table A; Target 7678; HLA-C*07:01; AFP; ENSG00000081051; TAA
EYGIASIL

SEQ ID NO: 7679 - protein, 11 aa, Homo sapiens
  misc_feature: Table A; Target 7679; HLA-A*24:02; AFP; ENSG00000081051; TAA
EYGIASILDSY

SEQ ID NO: 7680 - protein, 11 aa, Homo sapiens
  misc_feature: Table A; Target 7680; HLA-A*33:03; AFP; ENSG00000081051; TAA
EYGIASILDSY

SEQ ID NO: 7681 - protein, 11 aa, Homo sapiens
  misc_feature: Table A; Target 7681; HLA-C*07:01; AFP; ENSG00000081051; TAA
EYGIASILDSY

SEQ ID NO: 7682 - protein, 8 aa, Homo sapiens
  misc_feature: Table A; Target 7682; HLA-A*23:01; AFP; ENSG00000081051; TAA
EYYLQNAF

SEQ ID NO: 7683 - protein, 8 aa, Homo sapiens
  misc_feature: Table A; Target 7683; HLA-A*24:02; AFP; ENSG00000081051; TAA
EYYLQNAF

SEQ ID NO: 7684 - protein, 8 aa, Homo sapiens
  misc_feature: Table A; Target 7684; HLA-A*33:03; AFP; ENSG00000081051; TAA
EYYLQNAF

SEQ ID NO: 7685 - protein, 8 aa, Homo sapiens
  misc_feature: Table A; Target 7685; HLA-B*08:01; AFP; ENSG00000081051; TAA
EYYLQNAF

SEQ ID NO: 7686 - protein, 9 aa, Homo sapiens
  misc_feature: Table A; Target 7686; HLA-A*33:03; AFP; ENSG00000081051; TAA
EYYLQNAFL

SEQ ID NO: 7687 - protein, 9 aa, Homo sapiens
  misc_feature: Table A; Target 7687; HLA-C*07:01; AFP; ENSG00000081051; TAA
EYYLQNAFL

SEQ ID NO: 7688 - protein, 10 aa, Homo sapiens
  misc_feature: Table A; Target 7688; HLA-C*06:02; AFP; ENSG00000081051; TAA
EYYLQNAFLV

SEQ ID NO: 7689 - protein, 10 aa, Homo sapiens
  misc_feature: Table A; Target 7689; HLA-C*07:01; AFP; ENSG00000081051; TAA
EYYLQNAFLV

SEQ ID NO: 7690 - protein, 8 aa, Homo sapiens
  misc_feature: Table A; Target 7690; HLA-B*38:01; AFP; ENSG00000081051; TAA
FAEEGQKL

SEQ ID NO: 7691 - protein, 8 aa, Homo sapiens
  misc_feature: Table A; Target 7691; HLA-B*40:01; AFP; ENSG00000081051; TAA
FAEEGQKL

SEQ ID NO: 7692 - protein, 8 aa, Homo sapiens
  misc_feature: Table A; Target 7692; HLA-C*04:01; AFP; ENSG00000081051; TAA
FAEEGQKL

SEQ ID NO: 7693 - protein, 8 aa, Homo sapiens
  misc_feature: Table A; Target 7693; HLA-C*07:04; AFP; ENSG00000081051; TAA
FAEEGQKL

SEQ ID NO: 7694 - protein, 8 aa, Homo sapiens
  misc_feature: Table A; Target 7694; HLA-C*16:01; AFP; ENSG00000081051; TAA
FAEEGQKL

SEQ ID NO: 7695 - protein, 8 aa, Homo sapiens
  misc_feature: Table A; Target 7695; HLA-C*16:02; AFP; ENSG00000081051; TAA
FAEEGQKL

SEQ ID NO: 7696 - protein, 9 aa, Homo sapiens
  misc_feature: Table A; Target 7696; HLA-B*35:03; AFP; ENSG00000081051; TAA
FAEEGQKLI

SEQ ID NO: 7697 - protein, 9 aa, Homo sapiens
  misc_feature: Table A; Target 7697; HLA-B*39:01; AFP; ENSG00000081051; TAA
FAEEGQKLI

SEQ ID NO: 7698 - protein, 9 aa, Homo sapiens
  misc_feature: Table A; Target 7698; HLA-C*02:02; AFP; ENSG00000081051; TAA
FAEEGQKLI

SEQ ID NO: 7699 - protein, 9 aa, Homo sapiens
  misc_feature: Table A; Target 7699; HLA-C*04:01; AFP; ENSG00000081051; TAA
FAEEGQKLI

SEQ ID NO: 7700 - protein, 9 aa, Homo sapiens
  misc_feature: Table A; Target 7700; HLA-C*12:03; AFP; ENSG00000081051; TAA
FAEEGQKLI

SEQ ID NO: 7701 - protein, 11 aa, Homo sapiens
  misc_feature: Table A; Target 7701; HLA-A*03:01; AFP; ENSG00000081051; TAA
FAEEGQKLISK

SEQ ID NO: 7702 - protein, 11 aa, Homo sapiens
  misc_feature: Table A; Target 7702; HLA-A*03:02; AFP; ENSG00000081051; TAA
FAEEGQKLISK

SEQ ID NO: 7703 - protein, 11 aa, Homo sapiens
  misc_feature: Table A; Target 7703; HLA-A*11:01; AFP; ENSG00000081051; TAA
FAEEGQKLISK

SEQ ID NO: 7704 - protein, 11 aa, Homo sapiens
  misc_feature: Table A; Target 7704; HLA-A*33:01; AFP; ENSG00000081051; TAA
FAEEGQKLISK

SEQ ID NO: 7705 - protein, 11 aa, Homo sapiens
  misc_feature: Table A; Target 7705; HLA-A*68:01; AFP; ENSG00000081051; TAA
FAEEGQKLISK

SEQ ID NO: 7706 - protein, 11 aa, Homo sapiens
  misc_feature: Table A; Target 7706; HLA-B*54:01; AFP; ENSG00000081051; TAA
FAEEGQKLISK

SEQ ID NO: 7707 - protein, 11 aa, Homo sapiens
  misc_feature: Table A; Target 7707; HLA-C*05:01; AFP; ENSG00000081051; TAA
FAEEGQKLISK

SEQ ID NO: 7708 - protein, 11 aa, Homo sapiens
  misc_feature: Table A; Target 7708; HLA-C*07:06; AFP; ENSG00000081051; TAA
FAEEGQKLISK

SEQ ID NO: 7709 - protein, 8 aa, Homo sapiens
  misc_feature: Table A; Target 7709; HLA-B*56:01; AFP; ENSG00000081051; TAA
FAQFVQEA

SEQ ID NO: 7710 - protein, 8 aa, Homo sapiens
  misc_feature: Table A; Target 7710; HLA-C*12:03; AFP; ENSG00000081051; TAA
FAQFVQEA

SEQ ID NO: 7711 - protein, 9 aa, Homo sapiens
  misc_feature: Table A; Target 7711; HLA-B*54:01; AFP; ENSG00000081051; TAA
FAQFVQEAT

SEQ ID NO: 7712 - protein, 10 aa, Homo sapiens
  misc_feature: Table A; Target 7712; HLA-A*26:01; AFP; ENSG00000081051; TAA
FAQFVQEATY

SEQ ID NO: 7713 - protein, 10 aa, Homo sapiens
  misc_feature: Table A; Target 7713; HLA-B*15:01; AFP; ENSG00000081051; TAA
FAQFVQEATY

SEQ ID NO: 7714 - protein, 10 aa, Homo sapiens
  misc_feature: Table A; Target 7714; HLA-B*15:03; AFP; ENSG00000081051; TAA
FAQFVQEATY

SEQ ID NO: 7715 - protein, 10 aa, Homo sapiens
  misc_feature: Table A; Target 7715; HLA-B*18:01; AFP; ENSG00000081051; TAA
FAQFVQEATY

SEQ ID NO: 7716 - protein, 10 aa, Homo sapiens
  misc_feature: Table A; Target 7716; HLA-B*27:02; AFP; ENSG00000081051; TAA
FAQFVQEATY

SEQ ID NO: 7717 - protein, 10 aa, Homo sapiens
  misc_feature: Table A; Target 7717; HLA-B*58:01; AFP; ENSG00000081051; TAA
FAQFVQEATY

SEQ ID NO: 7718 - protein, 10 aa, Homo sapiens
  misc_feature: Table A; Target 7718; HLA-C*01:02; AFP; ENSG00000081051; TAA
FAQFVQEATY

SEQ ID NO: 7719 - protein, 10 aa, Homo sapiens
  misc_feature: Table A; Target 7719; HLA-C*03:04; AFP; ENSG00000081051; TAA
FAQFVQEATY

SEQ ID NO: 7720 - protein, 10 aa, Homo sapiens
  misc_feature: Table A; Target 7720; HLA-C*06:02; AFP; ENSG00000081051; TAA
FAQFVQEATY

SEQ ID NO: 7721 - protein, 10 aa, Homo sapiens
  misc_feature: Table A; Target 7721; HLA-C*07:02; AFP; ENSG00000081051; TAA
FAQFVQEATY

SEQ ID NO: 7722 - protein, 10 aa, Homo sapiens
  misc_feature: Table A; Target 7722; HLA-C*07:04; AFP; ENSG00000081051; TAA
FAQFVQEATY

SEQ ID NO: 7723 - protein, 11 aa, Homo sapiens
  misc_feature: Table A; Target 7723; HLA-A*03:02; AFP; ENSG00000081051; TAA
FAQFVQEATYK

SEQ ID NO: 7724 - protein, 11 aa, Homo sapiens
  misc_feature: Table A; Target 7724; HLA-A*11:01; AFP; ENSG00000081051; TAA
FAQFVQEATYK

SEQ ID NO: 7725 - protein, 9 aa, Homo sapiens
  misc_feature: Table A; Target 7725; HLA-B*54:01; AFP; ENSG00000081051; TAA
FFAQFVQEA

SEQ ID NO: 7726 - protein, 11 aa, Homo sapiens
  misc_feature: Table A; Target 7726; HLA-A*30:02; AFP; ENSG00000081051; TAA
FFAQFVQEATY

SEQ ID NO: 7727 - protein, 8 aa, Homo sapiens
  misc_feature: Table A; Target 7727; HLA-B*54:01; AFP; ENSG00000081051; TAA
FGTRTFQA

SEQ ID NO: 7728 - protein, 9 aa, Homo sapiens
  misc_feature: Table A; Target 7728; HLA-A*24:02; AFP; ENSG00000081051; TAA
FGTRTFQAI

SEQ ID NO: 7729 - protein, 9 aa, Homo sapiens
  misc_feature: Table A; Target 7729; HLA-A*03:02; AFP; ENSG00000081051; TAA
FLASFVHEY

SEQ ID NO: 7730 - protein, 9 aa, Homo sapiens
  misc_feature: Table A; Target 7730; HLA-A*23:01; AFP; ENSG00000081051; TAA
FLASFVHEY

SEQ ID NO: 7731 - protein, 9 aa, Homo sapiens
  misc_feature: Table A; Target 7731; HLA-A*24:02; AFP; ENSG00000081051; TAA
FLASFVHEY

SEQ ID NO: 7732 - protein, 9 aa, Homo sapiens
  misc_feature: Table A; Target 7732; HLA-A*31:01; AFP; ENSG00000081051; TAA
FLASFVHEY

SEQ ID NO: 7733 - protein, 9 aa, Homo sapiens
  misc_feature: Table A; Target 7733; HLA-A*33:03; AFP; ENSG00000081051; TAA
FLASFVHEY

SEQ ID NO: 7734 - protein, 9 aa, Homo sapiens
  misc_feature: Table A; Target 7734; HLA-A*68:01; AFP; ENSG00000081051; TAA
FLASFVHEY

SEQ ID NO: 7735 - protein, 9 aa, Homo sapiens
  misc_feature: Table A; Target 7735; HLA-B*13:02; AFP; ENSG00000081051; TAA
FLASFVHEY

SEQ ID NO: 7736 - protein, 9 aa, Homo sapiens
  misc_feature: Table A; Target 7736; HLA-B*27:02; AFP; ENSG00000081051; TAA
FLASFVHEY

SEQ ID NO: 7737 - protein, 9 aa, Homo sapiens
  misc_feature: Table A; Target 7737; HLA-B*39:01; AFP; ENSG00000081051; TAA
FLASFVHEY

SEQ ID NO: 7738 - protein, 9 aa, Homo sapiens
  misc_feature: Table A; Target 7738; HLA-B*51:01; AFP; ENSG00000081051; TAA
FLASFVHEY

SEQ ID NO: 7739 - protein, 9 aa, Homo sapiens
  misc_feature: Table A; Target 7739; HLA-B*55:01; AFP; ENSG00000081051; TAA
FLASFVHEY

SEQ ID NO: 7740 - protein, 9 aa, Homo sapiens
  misc_feature: Table A; Target 7740; HLA-B*58:01; AFP; ENSG00000081051; TAA
FLASFVHEY

SEQ ID NO: 7741 - protein, 9 aa, Homo sapiens
  misc_feature: Table A; Target 7741; HLA-C*01:02; AFP; ENSG00000081051; TAA
FLASFVHEY

SEQ ID NO: 7742 - protein, 9 aa, Homo sapiens
  misc_feature: Table A; Target 7742; HLA-C*03:03; AFP; ENSG00000081051; TAA
FLASFVHEY

SEQ ID NO: 7743 - protein, 9 aa, Homo sapiens
  misc_feature: Table A; Target 7743; HLA-C*07:01; AFP; ENSG00000081051; TAA
FLASFVHEY

SEQ ID NO: 7744 - protein, 9 aa, Homo sapiens
  misc_feature: Table A; Target 7744; HLA-C*07:06; AFP; ENSG00000081051; TAA
FLASFVHEY

SEQ ID NO: 7745 - protein, 9 aa, Homo sapiens
  misc_feature: Table A; Target 7745; HLA-C*14:02; AFP; ENSG00000081051; TAA
FLASFVHEY

SEQ ID NO: 7746 - protein, 10 aa, Homo sapiens
  misc_feature: Table A; Target 7746; HLA-A*02:03; AFP; ENSG00000081051; TAA
FLGDRDFNQF

SEQ ID NO: 7747 - protein, 10 aa, Homo sapiens
  misc_feature: Table A; Target 7747; HLA-A*02:04; AFP; ENSG00000081051; TAA
FLGDRDFNQF

SEQ ID NO: 7748 - protein, 10 aa, Homo sapiens
  misc_feature: Table A; Target 7748; HLA-A*02:07; AFP; ENSG00000081051; TAA
FLGDRDFNQF

SEQ ID NO: 7749 - protein, 9 aa, Homo sapiens
  misc_feature: Table A; Target 7749; HLA-A*02:03; AFP; ENSG00000081051; TAA
FLINLVKQK

SEQ ID NO: 7750 - protein, 9 aa, Homo sapiens
  misc_feature: Table A; Target 7750; HLA-A*03:01; AFP; ENSG00000081051; TAA
FLINLVKQK

SEQ ID NO: 7751 - protein, 9 aa, Homo sapiens
  misc_feature: Table A; Target 7751; HLA-A*03:02; AFP; ENSG00000081051; TAA
FLINLVKQK

SEQ ID NO: 7752 - protein, 9 aa, Homo sapiens
  misc_feature: Table A; Target 7752; HLA-A*11:01; AFP; ENSG00000081051; TAA
FLINLVKQK

SEQ ID NO: 7753 - protein, 9 aa, Homo sapiens
  misc_feature: Table A; Target 7753; HLA-A*02:07; AFP; ENSG00000081051; TAA
FLLNFTESR

SEQ ID NO: 7754 - protein, 9 aa, Homo sapiens
  misc_feature: Table A; Target 7754; HLA-A*29:02; AFP; ENSG00000081051; TAA
FLLNFTESR

SEQ ID NO: 7755 - protein, 9 aa, Homo sapiens
  misc_feature: Table A; Target 7755; HLA-A*31:01; AFP; ENSG00000081051; TAA
FLLNFTESR

SEQ ID NO: 7756 - protein, 11 aa, Homo sapiens
  misc_feature: Table A; Target 7756; HLA-A*02:07; AFP; ENSG00000081051; TAA
FLLNFTESRTL

SEQ ID NO: 7757 - protein, 9 aa, Homo sapiens
  misc_feature: Table A; Target 7757; HLA-C*02:02; AFP; ENSG00000081051; TAA
FLVAYTKKA

SEQ ID NO: 7758 - protein, 9 aa, Homo sapiens
  misc_feature: Table A; Target 7758; HLA-A*03:01; AFP; ENSG00000081051; TAA
FLYAPTILL

SEQ ID NO: 7759 - protein, 9 aa, Homo sapiens
  misc_feature: Table A; Target 7759; HLA-A*68:02; AFP; ENSG00000081051; TAA
FLYAPTILL

SEQ ID NO: 7760 - protein, 9 aa, Homo sapiens
  misc_feature: Table A; Target 7760; HLA-C*02:02; AFP; ENSG00000081051; TAA
FLYAPTILL

SEQ ID NO: 7761 - protein, 10 aa, Homo sapiens
  misc_feature: Table A; Target 7761; HLA-A*02:03; AFP; ENSG00000081051; TAA
FLYAPTILLW

SEQ ID NO: 7762 - protein, 10 aa, Homo sapiens
  misc_feature: Table A; Target 7762; HLA-A*02:04; AFP; ENSG00000081051; TAA
FLYAPTILLW

SEQ ID NO: 7763 - protein, 10 aa, Homo sapiens
  misc_feature: Table A; Target 7763; HLA-A*24:02; AFP; ENSG00000081051; TAA
FLYAPTILLW

SEQ ID NO: 7764 - protein, 10 aa, Homo sapiens
  misc_feature: Table A; Target 7764; HLA-B*57:01; AFP; ENSG00000081051; TAA
FLYAPTILLW

SEQ ID NO: 7765 - protein, 9 aa, Homo sapiens
  misc_feature: Table A; Target 7765; HLA-A*24:02; AFP; ENSG00000081051; TAA
FMNKFIYEI

SEQ ID NO: 7766 - protein, 9 aa, Homo sapiens
  misc_feature: Table A; Target 7766; HLA-A*68:02; AFP; ENSG00000081051; TAA
FMNKFIYEI

SEQ ID NO: 7767 - protein, 9 aa, Homo sapiens
  misc_feature: Table A; Target 7767; HLA-B*13:02; AFP; ENSG00000081051; TAA
FMNKFIYEI

SEQ ID NO: 7768 - protein, 9 aa, Homo sapiens
  misc_feature: Table A; Target 7768; HLA-B*54:01; AFP; ENSG00000081051; TAA
FMNKFIYEI

SEQ ID NO: 7769 - protein, 8 aa, Homo sapiens
  misc_feature: Table A; Target 7769; HLA-B*27:05; AFP; ENSG00000081051; TAA
FQAITVTK

SEQ ID NO: 7770 - protein, 9 aa, Homo sapiens
  misc_feature: Table A; Target 7770; HLA-A*02:07; AFP; ENSG00000081051; TAA
FQAITVTKL

SEQ ID NO: 7771 - protein, 9 aa, Homo sapiens
  misc_feature: Table A; Target 7771; HLA-A*23:01; AFP; ENSG00000081051; TAA
FQAITVTKL

SEQ ID NO: 7772 - protein, 9 aa, Homo sapiens
  misc_feature: Table A; Target 7772; HLA-A*26:01; AFP; ENSG00000081051; TAA
FQAITVTKL

SEQ ID NO: 7773 - protein, 9 aa, Homo sapiens
  misc_feature: Table A; Target 7773; HLA-B*35:03; AFP; ENSG00000081051; TAA
FQAITVTKL

SEQ ID NO: 7774 - protein, 9 aa, Homo sapiens
  misc_feature: Table A; Target 7774; HLA-B*46:01; AFP; ENSG00000081051; TAA
FQAITVTKL

SEQ ID NO: 7775 - protein, 9 aa, Homo sapiens
  misc_feature: Table A; Target 7775; HLA-B*55:01; AFP; ENSG00000081051; TAA
FQAITVTKL

SEQ ID NO: 7776 - protein, 9 aa, Homo sapiens
  misc_feature: Table A; Target 7776; HLA-C*03:03; AFP; ENSG00000081051; TAA
FQAITVTKL

SEQ ID NO: 7777 - protein, 9 aa, Homo sapiens
  misc_feature: Table A; Target 7777; HLA-C*05:01; AFP; ENSG00000081051; TAA
FQAITVTKL

SEQ ID NO: 7778 - protein, 9 aa, Homo sapiens
  misc_feature: Table A; Target 7778; HLA-C*14:02; AFP; ENSG00000081051; TAA
FQAITVTKL

SEQ ID NO: 7779 - protein, 9 aa, Homo sapiens
  misc_feature: Table A; Target 7779; HLA-C*16:02; AFP; ENSG00000081051; TAA
FQAITVTKL

SEQ ID NO: 7780 - protein, 9 aa, Homo sapiens
  misc_feature: Table A; Target 7780; HLA-C*16:04; AFP; ENSG00000081051; TAA
FQAITVTKL

SEQ ID NO: 7781 - protein, 10 aa, Homo sapiens
  misc_feature: Table A; Target 7781; HLA-B*07:02; AFP; ENSG00000081051; TAA
FQAITVTKLS

SEQ ID NO: 7782 - protein, 10 aa, Homo sapiens
  misc_feature: Table A; Target 7782; HLA-C*04:01; AFP; ENSG00000081051; TAA
FQAITVTKLS

SEQ ID NO: 7783 - protein, 8 aa, Homo sapiens
  misc_feature: Table A; Target 7783; HLA-C*07:01; AFP; ENSG00000081051; TAA
FQKLGEYY

SEQ ID NO: 7784 - protein, 8 aa, Homo sapiens
  misc_feature: Table A; Target 7784; HLA-C*12:03; AFP; ENSG00000081051; TAA
FQKLGEYY

SEQ ID NO: 7785 - protein, 8 aa, Homo sapiens
  misc_feature: Table A; Target 7785; HLA-C*16:04; AFP; ENSG00000081051; TAA
FQKLGEYY

SEQ ID NO: 7786 - protein, 9 aa, Homo sapiens
  misc_feature: Table A; Target 7786; HLA-A*02:04; AFP; ENSG00000081051; TAA
FQKLGEYYL

SEQ ID NO: 7787 - protein, 9 aa, Homo sapiens
  misc_feature: Table A; Target 7787; HLA-C*02:02; AFP; ENSG00000081051; TAA
FQKLGEYYL

SEQ ID NO: 7788 - protein, 9 aa, Homo sapiens
  misc_feature: Table A; Target 7788; HLA-A*02:03; AFP; ENSG00000081051; TAA
FQTENPLEC

SEQ ID NO: 7789 - protein, 9 aa, Homo sapiens
  misc_feature: Table A; Target 7789; HLA-B*27:05; AFP; ENSG00000081051; TAA
FQTENPLEC

SEQ ID NO: 7790 - protein, 9 aa, Homo sapiens
  misc_feature: Table A; Target 7790; HLA-B*54:01; AFP; ENSG00000081051; TAA
FQTENPLEC

SEQ ID NO: 7791 - protein, 9 aa, Homo sapiens
  misc_feature: Table A; Target 7791; HLA-C*06:02; AFP; ENSG00000081051; TAA
FQTENPLEC

SEQ ID NO: 7792 - protein, 8 aa, Homo sapiens
  misc_feature: Table A; Target 7792; HLA-A*02:01; AFP; ENSG00000081051; TAA
FQTKAATV

SEQ ID NO: 7793 - protein, 8 aa, Homo sapiens
  misc_feature: Table A; Target 7793; HLA-A*02:03; AFP; ENSG00000081051; TAA
FQTKAATV

SEQ ID NO: 7794 - protein, 8 aa, Homo sapiens
  misc_feature: Table A; Target 7794; HLA-A*30:01; AFP; ENSG00000081051; TAA
FQTKAATV

SEQ ID NO: 7795 - protein, 8 aa, Homo sapiens
  misc_feature: Table A; Target 7795; HLA-B*39:01; AFP; ENSG00000081051; TAA
FQTKAATV

SEQ ID NO: 7796 - protein, 8 aa, Homo sapiens
  misc_feature: Table A; Target 7796; HLA-B*40:02; AFP; ENSG00000081051; TAA
FQTKAATV

SEQ ID NO: 7797 - protein, 8 aa, Homo sapiens
  misc_feature: Table A; Target 7797; HLA-B*49:01; AFP; ENSG00000081051; TAA
FQTKAATV

SEQ ID NO: 7798 - protein, 8 aa, Homo sapiens
  misc_feature: Table A; Target 7798; HLA-B*51:01; AFP; ENSG00000081051; TAA
FQTKAATV

SEQ ID NO: 7799 - protein, 8 aa, Homo sapiens
  misc_feature: Table A; Target 7799; HLA-C*03:04; AFP; ENSG00000081051; TAA
FQTKAATV

SEQ ID NO: 7800 - protein, 8 aa, Homo sapiens
  misc_feature: Table A; Target 7800; HLA-C*04:01; AFP; ENSG00000081051; TAA
FQTKAATV

SEQ ID NO: 7801 - protein, 8 aa, Homo sapiens
  misc_feature: Table A; Target 7801; HLA-C*06:02; AFP; ENSG00000081051; TAA
FQTKAATV

SEQ ID NO: 7802 - protein, 8 aa, Homo sapiens
  misc_feature: Table A; Target 7802; HLA-C*07:04; AFP; ENSG00000081051; TAA
FQTKAATV

SEQ ID NO: 7803 - protein, 8 aa, Homo sapiens
  misc_feature: Table A; Target 7803; HLA-C*16:02; AFP; ENSG00000081051; TAA
FQTKAATV

SEQ ID NO: 7804 - protein, 9 aa, Homo sapiens
  misc_feature: Table A; Target 7804; HLA-B*39:01; AFP; ENSG00000081051; TAA
FQTKAATVT

SEQ ID NO: 7805 - protein, 9 aa, Homo sapiens
  misc_feature: Table A; Target 7805; HLA-C*07:04; AFP; ENSG00000081051; TAA
FQTKAATVT

SEQ ID NO: 7806 - protein, 10 aa, Homo sapiens
  misc_feature: Table A; Target 7806; HLA-A*03:01; AFP; ENSG00000081051; TAA
FQTKAATVTK

SEQ ID NO: 7807 - protein, 10 aa, Homo sapiens
  misc_feature: Table A; Target 7807; HLA-A*03:02; AFP; ENSG00000081051; TAA
FQTKAATVTK

SEQ ID NO: 7808 - protein, 10 aa, Homo sapiens
  misc_feature: Table A; Target 7808; HLA-A*11:01; AFP; ENSG00000081051; TAA
FQTKAATVTK

SEQ ID NO: 7809 - protein, 10 aa, Homo sapiens
  misc_feature: Table A; Target 7809; HLA-B*07:02; AFP; ENSG00000081051; TAA
FQTKAATVTK

SEQ ID NO: 7810 - protein, 10 aa, Homo sapiens
  misc_feature: Table A; Target 7810; HLA-B*13:02; AFP; ENSG00000081051; TAA
FQTKAATVTK

SEQ ID NO: 7811 - protein, 10 aa, Homo sapiens
  misc_feature: Table A; Target 7811; HLA-B*27:02; AFP; ENSG00000081051; TAA
FQTKAATVTK

SEQ ID NO: 7812 - protein, 10 aa, Homo sapiens
  misc_feature: Table A; Target 7812; HLA-C*02:02; AFP; ENSG00000081051; TAA
FQTKAATVTK

SEQ ID NO: 7813 - protein, 10 aa, Homo sapiens
  misc_feature: Table A; Target 7813; HLA-C*04:01; AFP; ENSG00000081051; TAA
FQTKAATVTK

SEQ ID NO: 7814 - protein, 10 aa, Homo sapiens
  misc_feature: Table A; Target 7814; HLA-C*06:02; AFP; ENSG00000081051; TAA
FQTKAATVTK

SEQ ID NO: 7815 - protein, 10 aa, Homo sapiens
  misc_feature: Table A; Target 7815; HLA-C*07:02; AFP; ENSG00000081051; TAA
FQTKAATVTK

SEQ ID NO: 7816 - protein, 10 aa, Homo sapiens
  misc_feature: Table A; Target 7816; HLA-C*07:06; AFP; ENSG00000081051; TAA
FQTKAATVTK

SEQ ID NO: 7817 - protein, 8 aa, Homo sapiens
  misc_feature: Table A; Target 7817; HLA-B*13:02; AFP; ENSG00000081051; TAA
FQVPEPVT

SEQ ID NO: 7818 - protein, 9 aa, Homo sapiens
  misc_feature: Table A; Target 7818; HLA-A*02:01; AFP; ENSG00000081051; TAA
FQVPEPVTS

SEQ ID NO: 7819 - protein, 9 aa, Homo sapiens
  misc_feature: Table A; Target 7819; HLA-B*39:01; AFP; ENSG00000081051; TAA
FQVPEPVTS

SEQ ID NO: 7820 - protein, 10 aa, Homo sapiens
  misc_feature: Table A; Target 7820; HLA-A*02:01; AFP; ENSG00000081051; TAA
FQVPEPVTSC

SEQ ID NO: 7821 - protein, 10 aa, Homo sapiens
  misc_feature: Table A; Target 7821; HLA-A*02:03; AFP; ENSG00000081051; TAA
FQVPEPVTSC

SEQ ID NO: 7822 - protein, 10 aa, Homo sapiens
  misc_feature: Table A; Target 7822; HLA-B*39:01; AFP; ENSG00000081051; TAA
FQVPEPVTSC

SEQ ID NO: 7823 - protein, 9 aa, Homo sapiens
  misc_feature: Table A; Target 7823; HLA-A*32:01; AFP; ENSG00000081051; TAA
FSSGEKNIF

SEQ ID NO: 7824 - protein, 9 aa, Homo sapiens
  misc_feature: Table A; Target 7824; HLA-B*58:01; AFP; ENSG00000081051; TAA
FSSGEKNIF

SEQ ID NO: 7825 - protein, 9 aa, Homo sapiens
  misc_feature: Table A; Target 7825; HLA-C*02:02; AFP; ENSG00000081051; TAA
FSSGEKNIF

SEQ ID NO: 7826 - protein, 10 aa, Homo sapiens
  misc_feature: Table A; Target 7826; HLA-A*68:02; AFP; ENSG00000081051; TAA
FSSGEKNIFL

SEQ ID NO: 7827 - protein, 10 aa, Homo sapiens
  misc_feature: Table A; Target 7827; HLA-C*07:04; AFP; ENSG00000081051; TAA
FSSGEKNIFL

SEQ ID NO: 7828 - protein, 10 aa, Homo sapiens
  misc_feature: Table A; Target 7828; HLA-A*30:02; AFP; ENSG00000081051; TAA
FSSLVVDETY

SEQ ID NO: 7829 - protein, 10 aa, Homo sapiens
  misc_feature: Table A; Target 7829; HLA-B*27:02; AFP; ENSG00000081051; TAA
FSSLVVDETY

SEQ ID NO: 7830 - protein, 10 aa, Homo sapiens
  misc_feature: Table A; Target 7830; HLA-B*35:01; AFP; ENSG00000081051; TAA
FSSLVVDETY

SEQ ID NO: 7831 - protein, 9 aa, Homo sapiens
  misc_feature: Table A; Target 7831; HLA-C*05:01; AFP; ENSG00000081051; TAA
FTEIQKLVL

SEQ ID NO: 7832 - protein, 9 aa, Homo sapiens
  misc_feature: Table A; Target 7832; HLA-C*16:02; AFP; ENSG00000081051; TAA
FTEIQKLVL

SEQ ID NO: 7833 - protein, 9 aa, Homo sapiens
  misc_feature: Table A; Target 7833; HLA-A*03:01; AFP; ENSG00000081051; TAA
FTESRTLHR

SEQ ID NO: 7834 - protein, 9 aa, Homo sapiens
  misc_feature: Table A; Target 7834; HLA-A*26:01; AFP; ENSG00000081051; TAA
FTKVNFTEI

SEQ ID NO: 7835 - protein, 9 aa, Homo sapiens
  misc_feature: Table A; Target 7835; HLA-A*31:01; AFP; ENSG00000081051; TAA
FTKVNFTEI

SEQ ID NO: 7836 - protein, 9 aa, Homo sapiens
  misc_feature: Table A; Target 7836; HLA-B*08:01; AFP; ENSG00000081051; TAA
FTKVNFTEI

SEQ ID NO: 7837 - protein, 9 aa, Homo sapiens
  misc_feature: Table A; Target 7837; HLA-B*49:01; AFP; ENSG00000081051; TAA
FTKVNFTEI

SEQ ID NO: 7838 - protein, 9 aa, Homo sapiens
  misc_feature: Table A; Target 7838; HLA-B*51:01; AFP; ENSG00000081051; TAA
FTKVNFTEI

SEQ ID NO: 7839 - protein, 9 aa, Homo sapiens
  misc_feature: Table A; Target 7839; HLA-B*54:01; AFP; ENSG00000081051; TAA
FTKVNFTEI

SEQ ID NO: 7840 - protein, 9 aa, Homo sapiens
  misc_feature: Table A; Target 7840; HLA-B*57:01; AFP; ENSG00000081051; TAA
FTKVNFTEI

SEQ ID NO: 7841 - protein, 9 aa, Homo sapiens
  misc_feature: Table A; Target 7841; HLA-C*01:02; AFP; ENSG00000081051; TAA
FTKVNFTEI

SEQ ID NO: 7842 - protein, 9 aa, Homo sapiens
  misc_feature: Table A; Target 7842; HLA-C*12:03; AFP; ENSG00000081051; TAA
FTKVNFTEI

SEQ ID NO: 7843 - protein, 11 aa, Homo sapiens
  misc_feature: Table A; Target 7843; HLA-B*27:02; AFP; ENSG00000081051; TAA
FTKVNFTEIQK

SEQ ID NO: 7844 - protein, 8 aa, Homo sapiens
  misc_feature: Table A; Target 7844; HLA-A*33:03; AFP; ENSG00000081051; TAA
FVQEATYK

SEQ ID NO: 7845 - protein, 8 aa, Homo sapiens
  misc_feature: Table A; Target 7845; HLA-B*27:05; AFP; ENSG00000081051; TAA
FVQEATYK

SEQ ID NO: 7846 - protein, 8 aa, Homo sapiens
  misc_feature: Table A; Target 7846; HLA-C*06:02; AFP; ENSG00000081051; TAA
FVQEATYK

SEQ ID NO: 7847 - protein, 8 aa, Homo sapiens
  misc_feature: Table A; Target 7847; HLA-C*12:03; AFP; ENSG00000081051; TAA
FVQEATYK

SEQ ID NO: 7848 - protein, 8 aa, Homo sapiens
  misc_feature: Table A; Target 7848; HLA-C*14:02; AFP; ENSG00000081051; TAA
FVQEATYK

SEQ ID NO: 7849 - protein, 8 aa, Homo sapiens
  misc_feature: Table A; Target 7849; HLA-C*16:01; AFP; ENSG00000081051; TAA
FVQEATYK

SEQ ID NO: 7850 - protein, 8 aa, Homo sapiens
  misc_feature: Table A; Target 7850; HLA-C*16:02; AFP; ENSG00000081051; TAA
FVQEATYK

SEQ ID NO: 7851 - protein, 10 aa, Homo sapiens
  misc_feature: Table A; Target 7851; HLA-A*02:01; AFP; ENSG00000081051; TAA
FVQEATYKEV

SEQ ID NO: 7852 - protein, 10 aa, Homo sapiens
  misc_feature: Table A; Target 7852; HLA-A*02:04; AFP; ENSG00000081051; TAA
FVQEATYKEV

SEQ ID NO: 7853 - protein, 10 aa, Homo sapiens
  misc_feature: Table A; Target 7853; HLA-A*32:01; AFP; ENSG00000081051; TAA
FVQEATYKEV

SEQ ID NO: 7854 - protein, 10 aa, Homo sapiens
  misc_feature: Table A; Target 7854; HLA-B*46:01; AFP; ENSG00000081051; TAA
FVQEATYKEV

SEQ ID NO: 7855 - protein, 10 aa, Homo sapiens
  misc_feature: Table A; Target 7855; HLA-B*51:01; AFP; ENSG00000081051; TAA
FVQEATYKEV

SEQ ID NO: 7856 - protein, 10 aa, Homo sapiens
  misc_feature: Table A; Target 7856; HLA-C*01:02; AFP; ENSG00000081051; TAA
FVQEATYKEV

SEQ ID NO: 7857 - protein, 10 aa, Homo sapiens
  misc_feature: Table A; Target 7857; HLA-C*03:03; AFP; ENSG00000081051; TAA
FVQEATYKEV

SEQ ID NO: 7858 - protein, 10 aa, Homo sapiens
  misc_feature: Table A; Target 7858; HLA-C*04:01; AFP; ENSG00000081051; TAA
FVQEATYKEV

SEQ ID NO: 7859 - protein, 10 aa, Homo sapiens
  misc_feature: Table A; Target 7859; HLA-C*06:02; AFP; ENSG00000081051; TAA
FVQEATYKEV

SEQ ID NO: 7860 - protein, 10 aa, Homo sapiens
  misc_feature: Table A; Target 7860; HLA-C*12:03; AFP; ENSG00000081051; TAA
FVQEATYKEV

SEQ ID NO: 7861 - protein, 10 aa, Homo sapiens
  misc_feature: Table A; Target 7861; HLA-C*16:02; AFP; ENSG00000081051; TAA
FVQEATYKEV

SEQ ID NO: 7862 - protein, 10 aa, Homo sapiens
  misc_feature: Table A; Target 7862; HLA-C*16:04; AFP; ENSG00000081051; TAA
FVQEATYKEV

SEQ ID NO: 7863 - protein, 11 aa, Homo sapiens
  misc_feature: Table A; Target 7863; HLA-A*33:01; AFP; ENSG00000081051; TAA
FVQEATYKEVS

SEQ ID NO: 7864 - protein, 9 aa, Homo sapiens
  misc_feature: Table A; Target 7864; HLA-A*29:02; AFP; ENSG00000081051; TAA
GAADIIIGH

SEQ ID NO: 7865 - protein, 9 aa, Homo sapiens
  misc_feature: Table A; Target 7865; HLA-A*30:02; AFP; ENSG00000081051; TAA
GAADIIIGH

SEQ ID NO: 7866 - protein, 9 aa, Homo sapiens
  misc_feature: Table A; Target 7866; HLA-A*68:02; AFP; ENSG00000081051; TAA
GAADIIIGH

SEQ ID NO: 7867 - protein, 9 aa, Homo sapiens
  misc_feature: Table A; Target 7867; HLA-B*15:01; AFP; ENSG00000081051; TAA
GAADIIIGH

SEQ ID NO: 7868 - protein, 9 aa, Homo sapiens
  misc_feature: Table A; Target 7868; HLA-B*15:03; AFP; ENSG00000081051; TAA
GAADIIIGH

SEQ ID NO: 7869 - protein, 9 aa, Homo sapiens
  misc_feature: Table A; Target 7869; HLA-B*27:02; AFP; ENSG00000081051; TAA
GAADIIIGH

SEQ ID NO: 7870 - protein, 9 aa, Homo sapiens
  misc_feature: Table A; Target 7870; HLA-B*35:01; AFP; ENSG00000081051; TAA
GAADIIIGH

SEQ ID NO: 7871 - protein, 9 aa, Homo sapiens
  misc_feature: Table A; Target 7871; HLA-B*55:01; AFP; ENSG00000081051; TAA
GAADIIIGH

SEQ ID NO: 7872 - protein, 9 aa, Homo sapiens
  misc_feature: Table A; Target 7872; HLA-B*58:01; AFP; ENSG00000081051; TAA
GAADIIIGH

SEQ ID NO: 7873 - protein, 9 aa, Homo sapiens
  misc_feature: Table A; Target 7873; HLA-C*16:02; AFP; ENSG00000081051; TAA
GAADIIIGH

SEQ ID NO: 7874 - protein, 10 aa, Homo sapiens
  misc_feature: Table A; Target 7874; HLA-A*02:07; AFP; ENSG00000081051; TAA
GAADIIIGHL

SEQ ID NO: 7875 - protein, 10 aa, Homo sapiens
  misc_feature: Table A; Target 7875; HLA-A*03:01; AFP; ENSG00000081051; TAA
GAADIIIGHL

SEQ ID NO: 7876 - protein, 10 aa, Homo sapiens
  misc_feature: Table A; Target 7876; HLA-A*11:01; AFP; ENSG00000081051; TAA
GAADIIIGHL

SEQ ID NO: 7877 - protein, 10 aa, Homo sapiens
  misc_feature: Table A; Target 7877; HLA-A*68:01; AFP; ENSG00000081051; TAA
GAADIIIGHL

SEQ ID NO: 7878 - protein, 10 aa, Homo sapiens
  misc_feature: Table A; Target 7878; HLA-B*38:01; AFP; ENSG00000081051; TAA
GAADIIIGHL

SEQ ID NO: 7879 - protein, 10 aa, Homo sapiens
  misc_feature: Table A; Target 7879; HLA-B*40:01; AFP; ENSG00000081051; TAA
GAADIIIGHL

SEQ ID NO: 7880 - protein, 10 aa, Homo sapiens
  misc_feature: Table A; Target 7880; HLA-B*40:02; AFP; ENSG00000081051; TAA
GAADIIIGHL

SEQ ID NO: 7881 - protein, 10 aa, Homo sapiens
  misc_feature: Table A; Target 7881; HLA-C*02:02; AFP; ENSG00000081051; TAA
GAADIIIGHL

SEQ ID NO: 7882 - protein, 10 aa, Homo sapiens
  misc_feature: Table A; Target 7882; HLA-C*12:03; AFP; ENSG00000081051; TAA
GAADIIIGHL

SEQ ID NO: 7883 - protein, 10 aa, Homo sapiens
  misc_feature: Table A; Target 7883; HLA-C*16:02; AFP; ENSG00000081051; TAA
GAADIIIGHL

SEQ ID NO: 7884 - protein, 10 aa, Homo sapiens
  misc_feature: Table A; Target 7884; HLA-C*16:04; AFP; ENSG00000081051; TAA
GAADIIIGHL

SEQ ID NO: 7885 - protein, 9 aa, Homo sapiens
  misc_feature: Table A; Target 7885; HLA-B*40:01; AFP; ENSG00000081051; TAA
GDEQSSGCL

SEQ ID NO: 7886 - protein, 9 aa, Homo sapiens
  misc_feature: Table A; Target 7886; HLA-B*40:02; AFP; ENSG00000081051; TAA
GDEQSSGCL

SEQ ID NO: 7887 - protein, 8 aa, Homo sapiens
  misc_feature: Table A; Target 7887; HLA-B*40:02; AFP; ENSG00000081051; TAA
GDRDFNQF

SEQ ID NO: 7888 - protein, 8 aa, Homo sapiens
  misc_feature: Table A; Target 7888; HLA-C*07:01; AFP; ENSG00000081051; TAA
GDRDFNQF

SEQ ID NO: 7889 - protein, 8 aa, Homo sapiens
  misc_feature: Table A; Target 7889; HLA-B*15:03; AFP; ENSG00000081051; TAA
GEEELQKY

SEQ ID NO: 7890 - protein, 8 aa, Homo sapiens
  misc_feature: Table A; Target 7890; HLA-B*44:03; AFP; ENSG00000081051; TAA
GEEELQKY

SEQ ID NO: 7891 - protein, 9 aa, Homo sapiens
  misc_feature: Table A; Target 7891; HLA-A*30:01; AFP; ENSG00000081051; TAA
GEEELQKYI

SEQ ID NO: 7892 - protein, 9 aa, Homo sapiens
  misc_feature: Table A; Target 7892; HLA-B*40:02; AFP; ENSG00000081051; TAA
GEEELQKYI

SEQ ID NO: 7893 - protein, 9 aa, Homo sapiens
  misc_feature: Table A; Target 7893; HLA-C*16:04; AFP; ENSG00000081051; TAA
GEEELQKYI

SEQ ID NO: 7894 - protein, 8 aa, Homo sapiens
  misc_feature: Table A; Target 7894; HLA-B*49:01; AFP; ENSG00000081051; TAA
GEGAADII

SEQ ID NO: 7895 - protein, 9 aa, Homo sapiens
  misc_feature: Table A; Target 7895; HLA-A*30:01; AFP; ENSG00000081051; TAA
GEGAADIII

SEQ ID NO: 7896 - protein, 9 aa, Homo sapiens
  misc_feature: Table A; Target 7896; HLA-B*44:03; AFP; ENSG00000081051; TAA
GEGAADIII

SEQ ID NO: 7897 - protein, 8 aa, Homo sapiens
  misc_feature: Table A; Target 7897; HLA-B*40:02; AFP; ENSG00000081051; TAA
GEKIMSYI

SEQ ID NO: 7898 - protein, 9 aa, Homo sapiens
  misc_feature: Table A; Target 7898; HLA-B*40:02; AFP; ENSG00000081051; TAA
GEKNIFLAS

SEQ ID NO: 7899 - protein, 9 aa, Homo sapiens
  misc_feature: Table A; Target 7899; HLA-B*49:01; AFP; ENSG00000081051; TAA
GEKNIFLAS

SEQ ID NO: 7900 - protein, 10 aa, Homo sapiens
  misc_feature: Table A; Target 7900; HLA-B*44:03; AFP; ENSG00000081051; TAA
GEKNIFLASF

SEQ ID NO: 7901 - protein, 8 aa, Homo sapiens
  misc_feature: Table A; Target 7901; HLA-B*40:02; AFP; ENSG00000081051; TAA
GEYYLQNA

SEQ ID NO: 7902 - protein, 9 aa, Homo sapiens
  misc_feature: Table A; Target 7902; HLA-B*27:05; AFP; ENSG00000081051; TAA
GEYYLQNAF

SEQ ID NO: 7903 - protein, 9 aa, Homo sapiens
  misc_feature: Table A; Target 7903; HLA-B*40:02; AFP; ENSG00000081051; TAA
GEYYLQNAF

SEQ ID NO: 7904 - protein, 9 aa, Homo sapiens
  misc_feature: Table A; Target 7904; HLA-C*02:02; AFP; ENSG00000081051; TAA
GEYYLQNAF

SEQ ID NO: 7905 - protein, 9 aa, Homo sapiens
  misc_feature: Table A; Target 7905; HLA-C*07:04; AFP; ENSG00000081051; TAA
GEYYLQNAF

SEQ ID NO: 7906 - protein, 10 aa, Homo sapiens
  misc_feature: Table A; Target 7906; HLA-A*30:01; AFP; ENSG00000081051; TAA
GEYYLQNAFL

SEQ ID NO: 7907 - protein, 10 aa, Homo sapiens
  misc_feature: Table A; Target 7907; HLA-B*40:02; AFP; ENSG00000081051; TAA
GEYYLQNAFL

SEQ ID NO: 7908 - protein, 10 aa, Homo sapiens
  misc_feature: Table A; Target 7908; HLA-B*44:02; AFP; ENSG00000081051; TAA
GEYYLQNAFL

SEQ ID NO: 7909 - protein, 10 aa, Homo sapiens
  misc_feature: Table A; Target 7909; HLA-B*44:03; AFP; ENSG00000081051; TAA
GEYYLQNAFL

SEQ ID NO: 7910 - protein, 11 aa, Homo sapiens
  misc_feature: Table A; Target 7910; HLA-B*49:01; AFP; ENSG00000081051; TAA
GEYYLQNAFLV

SEQ ID NO: 7911 - protein, 9 aa, Homo sapiens
  misc_feature: Table A; Target 7911; HLA-A*03:01; AFP; ENSG00000081051; TAA
GIASILDSY

SEQ ID NO: 7912 - protein, 9 aa, Homo sapiens
  misc_feature: Table A; Target 7912; HLA-A*03:02; AFP; ENSG00000081051; TAA
GIASILDSY

SEQ ID NO: 7913 - protein, 9 aa, Homo sapiens
  misc_feature: Table A; Target 7913; HLA-B*13:02; AFP; ENSG00000081051; TAA
GIASILDSY

SEQ ID NO: 7914 - protein, 9 aa, Homo sapiens
  misc_feature: Table A; Target 7914; HLA-B*18:01; AFP; ENSG00000081051; TAA
GIASILDSY

SEQ ID NO: 7915 - protein, 9 aa, Homo sapiens
  misc_feature: Table A; Target 7915; HLA-B*27:02; AFP; ENSG00000081051; TAA
GIASILDSY

SEQ ID NO: 7916 - protein, 9 aa, Homo sapiens
  misc_feature: Table A; Target 7916; HLA-B*39:01; AFP; ENSG00000081051; TAA
GIASILDSY

SEQ ID NO: 7917 - protein, 9 aa, Homo sapiens
  misc_feature: Table A; Target 7917; HLA-C*01:02; AFP; ENSG00000081051; TAA
GIASILDSY

SEQ ID NO: 7918 - protein, 9 aa, Homo sapiens
  misc_feature: Table A; Target 7918; HLA-C*07:01; AFP; ENSG00000081051; TAA
GIASILDSY

SEQ ID NO: 7919 - protein, 9 aa, Homo sapiens
  misc_feature: Table A; Target 7919; HLA-C*07:06; AFP; ENSG00000081051; TAA
GIASILDSY

SEQ ID NO: 7920 - protein, 9 aa, Homo sapiens
  misc_feature: Table A; Target 7920; HLA-C*12:03; AFP; ENSG00000081051; TAA
GIASILDSY

SEQ ID NO: 7921 - protein, 9 aa, Homo sapiens
  misc_feature: Table A; Target 7921; HLA-C*14:02; AFP; ENSG00000081051; TAA
GIASILDSY

SEQ ID NO: 7922 - protein, 9 aa, Homo sapiens
  misc_feature: Table A; Target 7922; HLA-C*16:01; AFP; ENSG00000081051; TAA
GIASILDSY

SEQ ID NO: 7923 - protein, 9 aa, Homo sapiens
  misc_feature: Table A; Target 7923; HLA-C*16:02; AFP; ENSG00000081051; TAA
GIASILDSY

SEQ ID NO: 7924 - protein, 9 aa, Homo sapiens
  misc_feature: Table A; Target 7924; HLA-A*01:01; AFP; ENSG00000081051; TAA
GLFQKLGEY

SEQ ID NO: 7925 - protein, 9 aa, Homo sapiens
  misc_feature: Table A; Target 7925; HLA-A*02:03; AFP; ENSG00000081051; TAA
GLFQKLGEY

SEQ ID NO: 7926 - protein, 9 aa, Homo sapiens
  misc_feature: Table A; Target 7926; HLA-A*26:01; AFP; ENSG00000081051; TAA
GLFQKLGEY

SEQ ID NO: 7927 - protein, 9 aa, Homo sapiens
  misc_feature: Table A; Target 7927; HLA-A*32:01; AFP; ENSG00000081051; TAA
GLFQKLGEY

SEQ ID NO: 7928 - protein, 9 aa, Homo sapiens
  misc_feature: Table A; Target 7928; HLA-C*02:02; AFP; ENSG00000081051; TAA
GLFQKLGEY

SEQ ID NO: 7929 - protein, 9 aa, Homo sapiens
  misc_feature: Table A; Target 7929; HLA-C*07:04; AFP; ENSG00000081051; TAA
GLFQKLGEY

SEQ ID NO: 7930 - protein, 10 aa, Homo sapiens
  misc_feature: Table A; Target 7930; HLA-A*01:01; AFP; ENSG00000081051; TAA
GLFQKLGEYY

SEQ ID NO: 7931 - protein, 10 aa, Homo sapiens
  misc_feature: Table A; Target 7931; HLA-B*15:01; AFP; ENSG00000081051; TAA
GLFQKLGEYY

SEQ ID NO: 7932 - protein, 10 aa, Homo sapiens
  misc_feature: Table A; Target 7932; HLA-B*44:02; AFP; ENSG00000081051; TAA
GLFQKLGEYY

SEQ ID NO: 7933 - protein, 9 aa, Homo sapiens
  misc_feature: Table A; Target 7933; HLA-A*02:04; AFP; ENSG00000081051; TAA
GLSPNLNRF

SEQ ID NO: 7934 - protein, 9 aa, Homo sapiens
  misc_feature: Table A; Target 7934; HLA-A*29:02; AFP; ENSG00000081051; TAA
GLSPNLNRF

SEQ ID NO: 7935 - protein, 9 aa, Homo sapiens
  misc_feature: Table A; Target 7935; HLA-A*32:01; AFP; ENSG00000081051; TAA
GLSPNLNRF

SEQ ID NO: 7936 - protein, 9 aa, Homo sapiens
  misc_feature: Table A; Target 7936; HLA-B*15:03; AFP; ENSG00000081051; TAA
GLSPNLNRF

SEQ ID NO: 7937 - protein, 9 aa, Homo sapiens
  misc_feature: Table A; Target 7937; HLA-B*58:01; AFP; ENSG00000081051; TAA
GLSPNLNRF

SEQ ID NO: 7938 - protein, 10 aa, Homo sapiens
  misc_feature: Table A; Target 7938; HLA-A*02:01; AFP; ENSG00000081051; TAA
GLSPNLNRFL

SEQ ID NO: 7939 - protein, 8 aa, Homo sapiens
  misc_feature: Table A; Target 7939; HLA-B*15:01; AFP; ENSG00000081051; TAA
GQCCTSSY

SEQ ID NO: 7940 - protein, 8 aa, Homo sapiens
  misc_feature: Table A; Target 7940; HLA-C*07:01; AFP; ENSG00000081051; TAA
GQCCTSSY

SEQ ID NO: 7941 - protein, 8 aa, Homo sapiens
  misc_feature: Table A; Target 7941; HLA-C*05:01; AFP; ENSG00000081051; TAA
GQEQEVCF

SEQ ID NO: 7942 - protein, 9 aa, Homo sapiens
  misc_feature: Table A; Target 7942; HLA-A*33:03; AFP; ENSG00000081051; TAA
GQKLISKTR

SEQ ID NO: 7943 - protein, 10 aa, Homo sapiens
  misc_feature: Table A; Target 7943; HLA-A*03:01; AFP; ENSG00000081051; TAA
GTRTFQAITV

SEQ ID NO: 7944 - protein, 10 aa, Homo sapiens
  misc_feature: Table A; Target 7944; HLA-A*31:01; AFP; ENSG00000081051; TAA
GTRTFQAITV

SEQ ID NO: 7945 - protein, 10 aa, Homo sapiens
  misc_feature: Table A; Target 7945; HLA-B*40:02; AFP; ENSG00000081051; TAA
GTRTFQAITV

SEQ ID NO: 7946 - protein, 10 aa, Homo sapiens
  misc_feature: Table A; Target 7946; HLA-B*57:01; AFP; ENSG00000081051; TAA
GTRTFQAITV

SEQ ID NO: 7947 - protein, 10 aa, Homo sapiens
  misc_feature: Table A; Target 7947; HLA-C*07:02; AFP; ENSG00000081051; TAA
GTRTFQAITV

SEQ ID NO: 7948 - protein, 8 aa, Homo sapiens
  misc_feature: Table A; Target 7948; HLA-B*27:02; AFP; ENSG00000081051; TAA
GYQELLEK

SEQ ID NO: 7949 - protein, 8 aa, Homo sapiens
  misc_feature: Table A; Target 7949; HLA-C*07:01; AFP; ENSG00000081051; TAA
HACAVMKN

SEQ ID NO: 7950 - protein, 9 aa, Homo sapiens
  misc_feature: Table A; Target 7950; HLA-A*33:01; AFP; ENSG00000081051; TAA
HACAVMKNF

SEQ ID NO: 7951 - protein, 9 aa, Homo sapiens
  misc_feature: Table A; Target 7951; HLA-B*57:01; AFP; ENSG00000081051; TAA
HACAVMKNF

SEQ ID NO: 7952 - protein, 8 aa, Homo sapiens
  misc_feature: Table A; Target 7952; HLA-B*18:01; AFP; ENSG00000081051; TAA
HEKEILEK

SEQ ID NO: 7953 - protein, 8 aa, Homo sapiens
  misc_feature: Table A; Target 7953; HLA-B*40:02; AFP; ENSG00000081051; TAA
HEKEILEK

SEQ ID NO: 7954 - protein, 8 aa, Homo sapiens
  misc_feature: Table A; Target 7954; HLA-C*07:01; AFP; ENSG00000081051; TAA
HEKEILEK

SEQ ID NO: 7955 - protein, 9 aa, Homo sapiens
  misc_feature: Table A; Target 7955; HLA-A*26:01; AFP; ENSG00000081051; TAA
HEKEILEKY

SEQ ID NO: 7956 - protein, 9 aa, Homo sapiens
  misc_feature: Table A; Target 7956; HLA-A*33:01; AFP; ENSG00000081051; TAA
HEKEILEKY

SEQ ID NO: 7957 - protein, 9 aa, Homo sapiens
  misc_feature: Table A; Target 7957; HLA-B*08:01; AFP; ENSG00000081051; TAA
HEKEILEKY

SEQ ID NO: 7958 - protein, 9 aa, Homo sapiens
  misc_feature: Table A; Target 7958; HLA-B*15:01; AFP; ENSG00000081051; TAA
HEKEILEKY

SEQ ID NO: 7959 - protein, 9 aa, Homo sapiens
  misc_feature: Table A; Target 7959; HLA-B*35:01; AFP; ENSG00000081051; TAA
HEKEILEKY

SEQ ID NO: 7960 - protein, 9 aa, Homo sapiens
  misc_feature: Table A; Target 7960; HLA-B*37:01; AFP; ENSG00000081051; TAA
HEKEILEKY

SEQ ID NO: 7961 - protein, 9 aa, Homo sapiens
  misc_feature: Table A; Target 7961; HLA-B*40:01; AFP; ENSG00000081051; TAA
HEKEILEKY

SEQ ID NO: 7962 - protein, 9 aa, Homo sapiens
  misc_feature: Table A; Target 7962; HLA-B*40:02; AFP; ENSG00000081051; TAA
HEKEILEKY

SEQ ID NO: 7963 - protein, 9 aa, Homo sapiens
  misc_feature: Table A; Target 7963; HLA-B*49:01; AFP; ENSG00000081051; TAA
HEKEILEKY

SEQ ID NO: 7964 - protein, 9 aa, Homo sapiens
  misc_feature: Table A; Target 7964; HLA-C*07:01; AFP; ENSG00000081051; TAA
HEKEILEKY

SEQ ID NO: 7965 - protein, 9 aa, Homo sapiens
  misc_feature: Table A; Target 7965; HLA-C*12:03; AFP; ENSG00000081051; TAA
HEKEILEKY

SEQ ID NO: 7966 - protein, 8 aa, Homo sapiens
  misc_feature: Table A; Target 7966; HLA-B*18:01; AFP; ENSG00000081051; TAA
HEMTPVNP

SEQ ID NO: 7967 - protein, 8 aa, Homo sapiens
  misc_feature: Table A; Target 7967; HLA-B*49:01; AFP; ENSG00000081051; TAA
HEMTPVNP

SEQ ID NO: 7968 - protein, 8 aa, Homo sapiens
  misc_feature: Table A; Target 7968; HLA-C*07:04; AFP; ENSG00000081051; TAA
HEMTPVNP

SEQ ID NO: 7969 - protein, 9 aa, Homo sapiens
  misc_feature: Table A; Target 7969; HLA-B*40:02; AFP; ENSG00000081051; TAA
HEMTPVNPG

SEQ ID NO: 7970 - protein, 9 aa, Homo sapiens
  misc_feature: Table A; Target 7970; HLA-B*49:01; AFP; ENSG00000081051; TAA
HEMTPVNPG

SEQ ID NO: 7971 - protein, 9 aa, Homo sapiens
  misc_feature: Table A; Target 7971; HLA-C*06:02; AFP; ENSG00000081051; TAA
HEMTPVNPG

SEQ ID NO: 7972 - protein, 10 aa, Homo sapiens
  misc_feature: Table A; Target 7972; HLA-B*13:02; AFP; ENSG00000081051; TAA
HEMTPVNPGV

SEQ ID NO: 7973 - protein, 10 aa, Homo sapiens
  misc_feature: Table A; Target 7973; HLA-B*27:05; AFP; ENSG00000081051; TAA
HEMTPVNPGV

SEQ ID NO: 7974 - protein, 10 aa, Homo sapiens
  misc_feature: Table A; Target 7974; HLA-B*40:02; AFP; ENSG00000081051; TAA
HEMTPVNPGV

SEQ ID NO: 7975 - protein, 10 aa, Homo sapiens
  misc_feature: Table A; Target 7975; HLA-B*44:02; AFP; ENSG00000081051; TAA
HEMTPVNPGV

SEQ ID NO: 7976 - protein, 10 aa, Homo sapiens
  misc_feature: Table A; Target 7976; HLA-B*44:03; AFP; ENSG00000081051; TAA
HEMTPVNPGV

SEQ ID NO: 7977 - protein, 11 aa, Homo sapiens
  misc_feature: Table A; Target 7977; HLA-C*07:01; AFP; ENSG00000081051; TAA
HEMTPVNPGVG

SEQ ID NO: 7978 - protein, 9 aa, Homo sapiens
  misc_feature: Table A; Target 7978; HLA-A*02:04; AFP; ENSG00000081051; TAA
HPFLYAPTI

SEQ ID NO: 7979 - protein, 9 aa, Homo sapiens
  misc_feature: Table A; Target 7979; HLA-A*68:02; AFP; ENSG00000081051; TAA
HPFLYAPTI

SEQ ID NO: 7980 - protein, 9 aa, Homo sapiens
  misc_feature: Table A; Target 7980; HLA-B*13:02; AFP; ENSG00000081051; TAA
HPFLYAPTI

SEQ ID NO: 7981 - protein, 9 aa, Homo sapiens
  misc_feature: Table A; Target 7981; HLA-B*49:01; AFP; ENSG00000081051; TAA
HPFLYAPTI

SEQ ID NO: 7982 - protein, 9 aa, Homo sapiens
  misc_feature: Table A; Target 7982; HLA-B*57:01; AFP; ENSG00000081051; TAA
HPFLYAPTI

SEQ ID NO: 7983 - protein, 10 aa, Homo sapiens
  misc_feature: Table A; Target 7983; HLA-B*07:02; AFP; ENSG00000081051; TAA
HPFLYAPTIL

SEQ ID NO: 7984 - protein, 10 aa, Homo sapiens
  misc_feature: Table A; Target 7984; HLA-B*35:03; AFP; ENSG00000081051; TAA
HPFLYAPTIL

SEQ ID NO: 7985 - protein, 10 aa, Homo sapiens
  misc_feature: Table A; Target 7985; HLA-B*54:01; AFP; ENSG00000081051; TAA
HPFLYAPTIL

SEQ ID NO: 7986 - protein, 8 aa, Homo sapiens
  misc_feature: Table A; Target 7986; HLA-B*35:03; AFP; ENSG00000081051; TAA
HPQLAVSV

SEQ ID NO: 7987 - protein, 8 aa, Homo sapiens
  misc_feature: Table A; Target 7987; HLA-B*55:01; AFP; ENSG00000081051; TAA
HPQLAVSV

SEQ ID NO: 7988 - protein, 9 aa, Homo sapiens
  misc_feature: Table A; Target 7988; HLA-B*08:01; AFP; ENSG00000081051; TAA
HPQLAVSVI

SEQ ID NO: 7989 - protein, 10 aa, Homo sapiens
  misc_feature: Table A; Target 7989; HLA-B*07:02; AFP; ENSG00000081051; TAA
HPQLAVSVIL

SEQ ID NO: 7990 - protein, 10 aa, Homo sapiens
  misc_feature: Table A; Target 7990; HLA-B*35:01; AFP; ENSG00000081051; TAA
HPQLAVSVIL

SEQ ID NO: 7991 - protein, 10 aa, Homo sapiens
  misc_feature: Table A; Target 7991; HLA-C*07:02; AFP; ENSG00000081051; TAA
HPQLAVSVIL

SEQ ID NO: 7992 - protein, 11 aa, Homo sapiens
  misc_feature: Table A; Target 7992; HLA-A*33:03; AFP; ENSG00000081051; TAA
HPQLAVSVILR

SEQ ID NO: 7993 - protein, 11 aa, Homo sapiens
  misc_feature: Table A; Target 7993; HLA-A*68:01; AFP; ENSG00000081051; TAA
HPQLAVSVILR

SEQ ID NO: 7994 - protein, 10 aa, Homo sapiens
  misc_feature: Table A; Target 7994; HLA-B*38:01; AFP; ENSG00000081051; TAA
HRNEYGIASI

SEQ ID NO: 7995 - protein, 8 aa, Homo sapiens
  misc_feature: Table A; Target 7995; HLA-C*03:04; AFP; ENSG00000081051; TAA
IADFSGLL

SEQ ID NO: 7996 - protein, 8 aa, Homo sapiens
  misc_feature: Table A; Target 7996; HLA-C*04:01; AFP; ENSG00000081051; TAA
IADFSGLL

SEQ ID NO: 7997 - protein, 8 aa, Homo sapiens
  misc_feature: Table A; Target 7997; HLA-C*07:04; AFP; ENSG00000081051; TAA
IADFSGLL

SEQ ID NO: 7998 - protein, 10 aa, Homo sapiens
  misc_feature: Table A; Target 7998; HLA-A*68:01; AFP; ENSG00000081051; TAA
IADFSGLLEK

SEQ ID NO: 7999 - protein, 10 aa, Homo sapiens
  misc_feature: Table A; Target 7999; HLA-B*27:05; AFP; ENSG00000081051; TAA
IADFSGLLEK

SEQ ID NO: 8000 - protein, 10 aa, Homo sapiens
  misc_feature: Table A; Target 8000; HLA-C*07:06; AFP; ENSG00000081051; TAA
IADFSGLLEK

SEQ ID NO: 8001 - protein, 9 aa, Homo sapiens
  misc_feature: Table A; Target 8001; HLA-B*57:01; AFP; ENSG00000081051; TAA
IARRHPFLY

SEQ ID NO: 8002 - protein, 8 aa, Homo sapiens
  misc_feature: Table A; Target 8002; HLA-A*01:01; AFP; ENSG00000081051; TAA
IASILDSY

SEQ ID NO: 8003 - protein, 8 aa, Homo sapiens
  misc_feature: Table A; Target 8003; HLA-B*18:01; AFP; ENSG00000081051; TAA
IASILDSY

SEQ ID NO: 8004 - protein, 8 aa, Homo sapiens
  misc_feature: Table A; Target 8004; HLA-B*27:05; AFP; ENSG00000081051; TAA
IASILDSY

SEQ ID NO: 8005 - protein, 8 aa, Homo sapiens
  misc_feature: Table A; Target 8005; HLA-B*55:01; AFP; ENSG00000081051; TAA
IASILDSY

SEQ ID NO: 8006 - protein, 8 aa, Homo sapiens
  misc_feature: Table A; Target 8006; HLA-B*58:01; AFP; ENSG00000081051; TAA
IASILDSY

SEQ ID NO: 8007 - protein, 8 aa, Homo sapiens
  misc_feature: Table A; Target 8007; HLA-C*01:02; AFP; ENSG00000081051; TAA
IASILDSY

SEQ ID NO: 8008 - protein, 8 aa, Homo sapiens
  misc_feature: Table A; Target 8008; HLA-C*02:02; AFP; ENSG00000081051; TAA
IASILDSY

SEQ ID NO: 8009 - protein, 8 aa, Homo sapiens
  misc_feature: Table A; Target 8009; HLA-C*03:03; AFP; ENSG00000081051; TAA
IASILDSY

SEQ ID NO: 8010 - protein, 8 aa, Homo sapiens
  misc_feature: Table A; Target 8010; HLA-C*04:01; AFP; ENSG00000081051; TAA
IASILDSY

SEQ ID NO: 8011 - protein, 8 aa, Homo sapiens
  misc_feature: Table A; Target 8011; HLA-C*12:03; AFP; ENSG00000081051; TAA
IASILDSY

SEQ ID NO: 8012 - protein, 8 aa, Homo sapiens
  misc_feature: Table A; Target 8012; HLA-C*14:02; AFP; ENSG00000081051; TAA
IASILDSY

SEQ ID NO: 8013 - protein, 8 aa, Homo sapiens
  misc_feature: Table A; Target 8013; HLA-C*16:04; AFP; ENSG00000081051; TAA
IASILDSY

SEQ ID NO: 8014 - protein, 9 aa, Homo sapiens
  misc_feature: Table A; Target 8014; HLA-C*04:01; AFP; ENSG00000081051; TAA
IASILDSYQ

SEQ ID NO: 8015 - protein, 10 aa, Homo sapiens
  misc_feature: Table A; Target 8015; HLA-B*40:02; AFP; ENSG00000081051; TAA
IEKPTGDEQS

SEQ ID NO: 8016 - protein, 11 aa, Homo sapiens
  misc_feature: Table A; Target 8016; HLA-A*30:01; AFP; ENSG00000081051; TAA
IEKPTGDEQSS

SEQ ID NO: 8017 - protein, 11 aa, Homo sapiens
  misc_feature: Table A; Target 8017; HLA-B*40:02; AFP; ENSG00000081051; TAA
IEKPTGDEQSS

SEQ ID NO: 8018 - protein, 11 aa, Homo sapiens
  misc_feature: Table A; Target 8018; HLA-C*04:01; AFP; ENSG00000081051; TAA
IEKPTGDEQSS

SEQ ID NO: 8019 - protein, 11 aa, Homo sapiens
  misc_feature: Table A; Target 8019; HLA-C*16:04; AFP; ENSG00000081051; TAA
IEKPTGDEQSS

SEQ ID NO: 8020 - protein, 10 aa, Homo sapiens
  misc_feature: Table A; Target 8020; HLA-A*24:02; AFP; ENSG00000081051; TAA
IFLASFVHEY

SEQ ID NO: 8021 - protein, 10 aa, Homo sapiens
  misc_feature: Table A; Target 8021; HLA-C*07:01; AFP; ENSG00000081051; TAA
IFLASFVHEY

SEQ ID NO: 8022 - protein, 9 aa, Homo sapiens
  misc_feature: Table A; Target 8022; HLA-B*57:01; AFP; ENSG00000081051; TAA
IFLIFLLNF

SEQ ID NO: 8023 - protein, 9 aa, Homo sapiens
  misc_feature: Table A; Target 8023; HLA-A*31:01; AFP; ENSG00000081051; TAA
IIIGHLCIR

SEQ ID NO: 8024 - protein, 9 aa, Homo sapiens
  misc_feature: Table A; Target 8024; HLA-B*55:01; AFP; ENSG00000081051; TAA
ILDSYQCTA

SEQ ID NO: 8025 - protein, 9 aa, Homo sapiens
  misc_feature: Table A; Target 8025; HLA-B*55:01; AFP; ENSG00000081051; TAA
IPLFQVPEP

SEQ ID NO: 8026 - protein, 9 aa, Homo sapiens
  misc_feature: Table A; Target 8026; HLA-B*56:01; AFP; ENSG00000081051; TAA
IPLFQVPEP

SEQ ID NO: 8027 - protein, 10 aa, Homo sapiens
  misc_feature: Table A; Target 8027; HLA-B*56:01; AFP; ENSG00000081051; TAA
IPLFQVPEPV

SEQ ID NO: 8028 - protein, 9 aa, Homo sapiens
  misc_feature: Table A; Target 8028; HLA-A*01:01; AFP; ENSG00000081051; TAA
IQESQALAK

SEQ ID NO: 8029 - protein, 9 aa, Homo sapiens
  misc_feature: Table A; Target 8029; HLA-B*27:02; AFP; ENSG00000081051; TAA
IQESQALAK

SEQ ID NO: 8030 - protein, 9 aa, Homo sapiens
  misc_feature: Table A; Target 8030; HLA-C*07:06; AFP; ENSG00000081051; TAA
IQESQALAK

SEQ ID NO: 8031 - protein, 10 aa, Homo sapiens
  misc_feature: Table A; Target 8031; HLA-A*03:02; AFP; ENSG00000081051; TAA
IQESQALAKR

SEQ ID NO: 8032 - protein, 10 aa, Homo sapiens
  misc_feature: Table A; Target 8032; HLA-A*31:01; AFP; ENSG00000081051; TAA
IQESQALAKR

SEQ ID NO: 8033 - protein, 10 aa, Homo sapiens
  misc_feature: Table A; Target 8033; HLA-A*33:03; AFP; ENSG00000081051; TAA
IQESQALAKR

SEQ ID NO: 8034 - protein, 10 aa, Homo sapiens
  misc_feature: Table A; Target 8034; HLA-A*68:01; AFP; ENSG00000081051; TAA
IQESQALAKR

SEQ ID NO: 8035 - protein, 10 aa, Homo sapiens
  misc_feature: Table A; Target 8035; HLA-B*27:02; AFP; ENSG00000081051; TAA
IQESQALAKR

SEQ ID NO: 8036 - protein, 10 aa, Homo sapiens
  misc_feature: Table A; Target 8036; HLA-B*27:05; AFP; ENSG00000081051; TAA
IQESQALAKR

SEQ ID NO: 8037 - protein, 10 aa, Homo sapiens
  misc_feature: Table A; Target 8037; HLA-C*04:01; AFP; ENSG00000081051; TAA
IQESQALAKR

SEQ ID NO: 8038 - protein, 8 aa, Homo sapiens
  misc_feature: Table A; Target 8038; HLA-C*07:04; AFP; ENSG00000081051; TAA
IQKLVLDV

SEQ ID NO: 8039 - protein, 8 aa, Homo sapiens
  misc_feature: Table A; Target 8039; HLA-B*07:02; AFP; ENSG00000081051; TAA
ISKTRAAL

SEQ ID NO: 8040 - protein, 8 aa, Homo sapiens
  misc_feature: Table A; Target 8040; HLA-C*03:04; AFP; ENSG00000081051; TAA
ISKTRAAL

SEQ ID NO: 8041 - protein, 8 aa, Homo sapiens
  misc_feature: Table A; Target 8041; HLA-C*07:02; AFP; ENSG00000081051; TAA
ISKTRAAL

SEQ ID NO: 8042 - protein, 9 aa, Homo sapiens
  misc_feature: Table A; Target 8042; HLA-A*02:01; AFP; ENSG00000081051; TAA
ISLADLATI

SEQ ID NO: 8043 - protein, 9 aa, Homo sapiens
  misc_feature: Table A; Target 8043; HLA-A*24:02; AFP; ENSG00000081051; TAA
ISLADLATI

SEQ ID NO: 8044 - protein, 9 aa, Homo sapiens
  misc_feature: Table A; Target 8044; HLA-B*51:01; AFP; ENSG00000081051; TAA
ISLADLATI

SEQ ID NO: 8045 - protein, 9 aa, Homo sapiens
  misc_feature: Table A; Target 8045; HLA-B*57:01; AFP; ENSG00000081051; TAA
ISLADLATI

SEQ ID NO: 8046 - protein, 10 aa, Homo sapiens
  misc_feature: Table A; Target 8046; HLA-A*23:01; AFP; ENSG00000081051; TAA
ISLADLATIF

SEQ ID NO: 8047 - protein, 10 aa, Homo sapiens
  misc_feature: Table A; Target 8047; HLA-B*27:02; AFP; ENSG00000081051; TAA
ISLADLATIF

SEQ ID NO: 8048 - protein, 10 aa, Homo sapiens
  misc_feature: Table A; Target 8048; HLA-B*58:01; AFP; ENSG00000081051; TAA
ISLADLATIF

SEQ ID NO: 8049 - protein, 10 aa, Homo sapiens
  misc_feature: Table A; Target 8049; HLA-C*07:01; AFP; ENSG00000081051; TAA
ISLADLATIF

SEQ ID NO: 8050 - protein, 11 aa, Homo sapiens
  misc_feature: Table A; Target 8050; HLA-B*57:01; AFP; ENSG00000081051; TAA
ISLADLATIFF

SEQ ID NO: 8051 - protein, 9 aa, Homo sapiens
  misc_feature: Table A; Target 8051; HLA-B*40:02; AFP; ENSG00000081051; TAA
ITRKMAATA

SEQ ID NO: 8052 - protein, 9 aa, Homo sapiens
  misc_feature: Table A; Target 8052; HLA-C*06:02; AFP; ENSG00000081051; TAA
ITRKMAATA

SEQ ID NO: 8053 - protein, 8 aa, Homo sapiens
  misc_feature: Table A; Target 8053; HLA-C*16:01; AFP; ENSG00000081051; TAA
ITVTKLSQ

SEQ ID NO: 8054 - protein, 9 aa, Homo sapiens
  misc_feature: Table A; Target 8054; HLA-A*31:01; AFP; ENSG00000081051; TAA
ITVTKLSQK

SEQ ID NO: 8055 - protein, 9 aa, Homo sapiens
  misc_feature: Table A; Target 8055; HLA-A*33:03; AFP; ENSG00000081051; TAA
ITVTKLSQK

SEQ ID NO: 8056 - protein, 9 aa, Homo sapiens
  misc_feature: Table A; Target 8056; HLA-B*57:01; AFP; ENSG00000081051; TAA
ITVTKLSQK

SEQ ID NO: 8057 - protein, 10 aa, Homo sapiens
  misc_feature: Table A; Target 8057; HLA-A*32:01; AFP; ENSG00000081051; TAA
ITVTKLSQKF

SEQ ID NO: 8058 - protein, 9 aa, Homo sapiens
  misc_feature: Table A; Target 8058; HLA-A*02:03; AFP; ENSG00000081051; TAA
KAATVTKEL

SEQ ID NO: 8059 - protein, 9 aa, Homo sapiens
  misc_feature: Table A; Target 8059; HLA-A*02:07; AFP; ENSG00000081051; TAA
KAATVTKEL

SEQ ID NO: 8060 - protein, 9 aa, Homo sapiens
  misc_feature: Table A; Target 8060; HLA-A*03:02; AFP; ENSG00000081051; TAA
KAATVTKEL

SEQ ID NO: 8061 - protein, 9 aa, Homo sapiens
  misc_feature: Table A; Target 8061; HLA-A*25:01; AFP; ENSG00000081051; TAA
KAATVTKEL

SEQ ID NO: 8062 - protein, 9 aa, Homo sapiens
  misc_feature: Table A; Target 8062; HLA-A*30:01; AFP; ENSG00000081051; TAA
KAATVTKEL

SEQ ID NO: 8063 - protein, 9 aa, Homo sapiens
  misc_feature: Table A; Target 8063; HLA-A*31:01; AFP; ENSG00000081051; TAA
KAATVTKEL

SEQ ID NO: 8064 - protein, 9 aa, Homo sapiens
  misc_feature: Table A; Target 8064; HLA-B*08:01; AFP; ENSG00000081051; TAA
KAATVTKEL

SEQ ID NO: 8065 - protein, 9 aa, Homo sapiens
  misc_feature: Table A; Target 8065; HLA-B*13:02; AFP; ENSG00000081051; TAA
KAATVTKEL

SEQ ID NO: 8066 - protein, 9 aa, Homo sapiens
  misc_feature: Table A; Target 8066; HLA-B*27:05; AFP; ENSG00000081051; TAA
KAATVTKEL

SEQ ID NO: 8067 - protein, 9 aa, Homo sapiens
  misc_feature: Table A; Target 8067; HLA-B*35:03; AFP; ENSG00000081051; TAA
KAATVTKEL

SEQ ID NO: 8068 - protein, 9 aa, Homo sapiens
  misc_feature: Table A; Target 8068; HLA-B*44:03; AFP; ENSG00000081051; TAA
KAATVTKEL

SEQ ID NO: 8069 - protein, 9 aa, Homo sapiens
  misc_feature: Table A; Target 8069; HLA-B*55:01; AFP; ENSG00000081051; TAA
KAATVTKEL

SEQ ID NO: 8070 - protein, 9 aa, Homo sapiens
  misc_feature: Table A; Target 8070; HLA-C*04:01; AFP; ENSG00000081051; TAA
KAATVTKEL

SEQ ID NO: 8071 - protein, 9 aa, Homo sapiens
  misc_feature: Table A; Target 8071; HLA-C*05:01; AFP; ENSG00000081051; TAA
KAATVTKEL

SEQ ID NO: 8072 - protein, 9 aa, Homo sapiens
  misc_feature: Table A; Target 8072; HLA-C*07:04; AFP; ENSG00000081051; TAA
KAATVTKEL

SEQ ID NO: 8073 - protein, 10 aa, Homo sapiens
  misc_feature: Table A; Target 8073; HLA-A*31:01; AFP; ENSG00000081051; TAA
KAATVTKELR

SEQ ID NO: 8074 - protein, 10 aa, Homo sapiens
  misc_feature: Table A; Target 8074; HLA-A*68:01; AFP; ENSG00000081051; TAA
KAATVTKELR

SEQ ID NO: 8075 - protein, 10 aa, Homo sapiens
  misc_feature: Table A; Target 8075; HLA-B*57:01; AFP; ENSG00000081051; TAA
KAATVTKELR

SEQ ID NO: 8076 - protein, 10 aa, Homo sapiens
  misc_feature: Table A; Target 8076; HLA-C*07:06; AFP; ENSG00000081051; TAA
KAATVTKELR

SEQ ID NO: 8077 - protein, 9 aa, Homo sapiens
  misc_feature: Table A; Target 8077; HLA-A*32:01; AFP; ENSG00000081051; TAA
KAENAVECF

SEQ ID NO: 8078 - protein, 9 aa, Homo sapiens
  misc_feature: Table A; Target 8078; HLA-B*15:03; AFP; ENSG00000081051; TAA
KAENAVECF

SEQ ID NO: 8079 - protein, 9 aa, Homo sapiens
  misc_feature: Table A; Target 8079; HLA-B*38:01; AFP; ENSG00000081051; TAA
KAENAVECF

SEQ ID NO: 8080 - protein, 9 aa, Homo sapiens
  misc_feature: Table A; Target 8080; HLA-B*55:01; AFP; ENSG00000081051; TAA
KAENAVECF

SEQ ID NO: 8081 - protein, 9 aa, Homo sapiens
  misc_feature: Table A; Target 8081; HLA-C*16:04; AFP; ENSG00000081051; TAA
KAENAVECF

SEQ ID NO: 8082 - protein, 10 aa, Homo sapiens
  misc_feature: Table A; Target 8082; HLA-B*40:02; AFP; ENSG00000081051; TAA
KAPQLTSSEL

SEQ ID NO: 8083 - protein, 10 aa, Homo sapiens
  misc_feature: Table A; Target 8083; HLA-B*46:01; AFP; ENSG00000081051; TAA
KAPQLTSSEL

SEQ ID NO: 8084 - protein, 10 aa, Homo sapiens
  misc_feature: Table A; Target 8084; HLA-C*04:01; AFP; ENSG00000081051; TAA
KAPQLTSSEL

SEQ ID NO: 8085 - protein, 10 aa, Homo sapiens
  misc_feature: Table A; Target 8085; HLA-C*06:02; AFP; ENSG00000081051; TAA
KAPQLTSSEL

SEQ ID NO: 8086 - protein, 10 aa, Homo sapiens
  misc_feature: Table A; Target 8086; HLA-C*07:01; AFP; ENSG00000081051; TAA
KAPQLTSSEL

SEQ ID NO: 8087 - protein, 10 aa, Homo sapiens
  misc_feature: Table A; Target 8087; HLA-C*07:02; AFP; ENSG00000081051; TAA
KAPQLTSSEL

SEQ ID NO: 8088 - protein, 10 aa, Homo sapiens
  misc_feature: Table A; Target 8088; HLA-C*14:02; AFP; ENSG00000081051; TAA
KAPQLTSSEL

SEQ ID NO: 8089 - protein, 10 aa, Homo sapiens
  misc_feature: Table A; Target 8089; HLA-C*16:04; AFP; ENSG00000081051; TAA
KAPQLTSSEL

SEQ ID NO: 8090 - protein, 11 aa, Homo sapiens
  misc_feature: Table A; Target 8090; HLA-C*01:02; AFP; ENSG00000081051; TAA
KAPQLTSSELM

SEQ ID NO: 8091 - protein, 11 aa, Homo sapiens
  misc_feature: Table A; Target 8091; HLA-C*07:01; AFP; ENSG00000081051; TAA
KAPQLTSSELM

SEQ ID NO: 8092 - protein, 9 aa, Homo sapiens
  misc_feature: Table A; Target 8092; HLA-A*03:01; AFP; ENSG00000081051; TAA
KDALTAIEK

SEQ ID NO: 8093 - protein, 9 aa, Homo sapiens
  misc_feature: Table A; Target 8093; HLA-A*11:01; AFP; ENSG00000081051; TAA
KDALTAIEK

SEQ ID NO: 8094 - protein, 9 aa, Homo sapiens
  misc_feature: Table A; Target 8094; HLA-B*27:02; AFP; ENSG00000081051; TAA
KDALTAIEK

SEQ ID NO: 8095 - protein, 8 aa, Homo sapiens
  misc_feature: Table A; Target 8095; HLA-B*40:02; AFP; ENSG00000081051; TAA
KELRESSL

SEQ ID NO: 8096 - protein, 9 aa, Homo sapiens
  misc_feature: Table A; Target 8096; HLA-A*30:01; AFP; ENSG00000081051; TAA
KELRESSLL

SEQ ID NO: 8097 - protein, 9 aa, Homo sapiens
  misc_feature: Table A; Target 8097; HLA-B*49:01; AFP; ENSG00000081051; TAA
KELRESSLL

SEQ ID NO: 8098 - protein, 11 aa, Homo sapiens
  misc_feature: Table A; Target 8098; HLA-B*40:01; AFP; ENSG00000081051; TAA
KEVSKMVKDAL

SEQ ID NO: 8099 - protein, 10 aa, Homo sapiens
  misc_feature: Table A; Target 8099; HLA-A*24:02; AFP; ENSG00000081051; TAA
KFTKVNFTEI

SEQ ID NO: 8100 - protein, 9 aa, Homo sapiens
  misc_feature: Table A; Target 8100; HLA-B*58:01; AFP; ENSG00000081051; TAA
KGEEELQKY

SEQ ID NO: 8101 - protein, 9 aa, Homo sapiens
  misc_feature: Table A; Target 8101; HLA-C*16:02; AFP; ENSG00000081051; TAA
KGEEELQKY

SEQ ID NO: 8102 - protein, 9 aa, Homo sapiens
  misc_feature: Table A; Target 8102; HLA-A*31:01; AFP; ENSG00000081051; TAA
KGYQELLEK

SEQ ID NO: 8103 - protein, 9 aa, Homo sapiens
  misc_feature: Table A; Target 8103; HLA-B*27:02; AFP; ENSG00000081051; TAA
KGYQELLEK

SEQ ID NO: 8104 - protein, 9 aa, Homo sapiens
  misc_feature: Table A; Target 8104; HLA-B*27:05; AFP; ENSG00000081051; TAA
KGYQELLEK

SEQ ID NO: 8105 - protein, 9 aa, Homo sapiens
  misc_feature: Table A; Target 8105; HLA-B*57:01; AFP; ENSG00000081051; TAA
KGYQELLEK

SEQ ID NO: 8106 - protein, 11 aa, Homo sapiens
  misc_feature: Table A; Target 8106; HLA-C*06:02; AFP; ENSG00000081051; TAA
KKAPQLTSSEL

SEQ ID NO: 8107 - protein, 10 aa, Homo sapiens
  misc_feature: Table A; Target 8107; HLA-A*02:01; AFP; ENSG00000081051; TAA
KLGEYYLQNA

SEQ ID NO: 8108 - protein, 10 aa, Homo sapiens
  misc_feature: Table A; Target 8108; HLA-A*02:03; AFP; ENSG00000081051; TAA
KLGEYYLQNA

SEQ ID NO: 8109 - protein, 9 aa, Homo sapiens
  misc_feature: Table A; Target 8109; HLA-A*02:03; AFP; ENSG00000081051; TAA
KLISKTRAA

SEQ ID NO: 8110 - protein, 9 aa, Homo sapiens
  misc_feature: Table A; Target 8110; HLA-B*08:01; AFP; ENSG00000081051; TAA
KLISKTRAA

SEQ ID NO: 8111 - protein, 9 aa, Homo sapiens
  misc_feature: Table A; Target 8111; HLA-A*02:04; AFP; ENSG00000081051; TAA
KLSQKFTKV

SEQ ID NO: 8112 - protein, 9 aa, Homo sapiens
  misc_feature: Table A; Target 8112; HLA-A*02:07; AFP; ENSG00000081051; TAA
KLSQKFTKV

SEQ ID NO: 8113 - protein, 9 aa, Homo sapiens
  misc_feature: Table A; Target 8113; HLA-B*55:01; AFP; ENSG00000081051; TAA
KLVLDVAHV

SEQ ID NO: 8114 - protein, 9 aa, Homo sapiens
  misc_feature: Table A; Target 8114; HLA-A*02:03; AFP; ENSG00000081051; TAA
KMAATAATC

SEQ ID NO: 8115 - protein, 9 aa, Homo sapiens
  misc_feature: Table A; Target 8115; HLA-A*32:01; AFP; ENSG00000081051; TAA
KMAATAATC

SEQ ID NO: 8116 - protein, 10 aa, Homo sapiens
  misc_feature: Table A; Target 8116; HLA-A*02:01; AFP; ENSG00000081051; TAA
KMVKDALTAI

SEQ ID NO: 8117 - protein, 10 aa, Homo sapiens
  misc_feature: Table A; Target 8117; HLA-A*02:07; AFP; ENSG00000081051; TAA
KMVKDALTAI

SEQ ID NO: 8118 - protein, 10 aa, Homo sapiens
  misc_feature: Table A; Target 8118; HLA-B*40:02; AFP; ENSG00000081051; TAA
KMVKDALTAI

SEQ ID NO: 8119 - protein, 10 aa, Homo sapiens
  misc_feature: Table A; Target 8119; HLA-B*55:01; AFP; ENSG00000081051; TAA
KMVKDALTAI

SEQ ID NO: 8120 - protein, 8 aa, Homo sapiens
  misc_feature: Table A; Target 8120; HLA-B*57:01; AFP; ENSG00000081051; TAA
KNFGTRTF

SEQ ID NO: 8121 - protein, 8 aa, Homo sapiens
  misc_feature: Table A; Target 8121; HLA-C*06:02; AFP; ENSG00000081051; TAA
KNFGTRTF

SEQ ID NO: 8122 - protein, 8 aa, Homo sapiens
  misc_feature: Table A; Target 8122; HLA-C*12:03; AFP; ENSG00000081051; TAA
KNFGTRTF

SEQ ID NO: 8123 - protein, 10 aa, Homo sapiens
  misc_feature: Table A; Target 8123; HLA-C*06:02; AFP; ENSG00000081051; TAA
KNFGTRTFQA

SEQ ID NO: 8124 - protein, 9 aa, Homo sapiens
  misc_feature: Table A; Target 8124; HLA-B*35:01; AFP; ENSG00000081051; TAA
KPEGLSPNL

SEQ ID NO: 8125 - protein, 9 aa, Homo sapiens
  misc_feature: Table A; Target 8125; HLA-B*55:01; AFP; ENSG00000081051; TAA
KPEGLSPNL

SEQ ID NO: 8126 - protein, 11 aa, Homo sapiens
  misc_feature: Table A; Target 8126; HLA-A*31:01; AFP; ENSG00000081051; TAA
KPEGLSPNLNR

SEQ ID NO: 8127 - protein, 9 aa, Homo sapiens
  misc_feature: Table A; Target 8127; HLA-B*55:01; AFP; ENSG00000081051; TAA
KPQITEEQL

SEQ ID NO: 8128 - protein, 9 aa, Homo sapiens
  misc_feature: Table A; Target 8128; HLA-B*35:01; AFP; ENSG00000081051; TAA
KPTPASIPL

SEQ ID NO: 8129 - protein, 9 aa, Homo sapiens
  misc_feature: Table A; Target 8129; HLA-B*55:01; AFP; ENSG00000081051; TAA
KPTPASIPL

SEQ ID NO: 8130 - protein, 9 aa, Homo sapiens
  misc_feature: Table A; Target 8130; HLA-B*56:01; AFP; ENSG00000081051; TAA
KPTPASIPL

SEQ ID NO: 8131 - protein, 9 aa, Homo sapiens
  misc_feature: Table A; Target 8131; HLA-C*04:01; AFP; ENSG00000081051; TAA
KPTPASIPL

SEQ ID NO: 8132 - protein, 9 aa, Homo sapiens
  misc_feature: Table A; Target 8132; HLA-C*16:01; AFP; ENSG00000081051; TAA
KPTPASIPL

SEQ ID NO: 8133 - protein, 10 aa, Homo sapiens
  misc_feature: Table A; Target 8133; HLA-B*07:02; AFP; ENSG00000081051; TAA
KPTPASIPLF

SEQ ID NO: 8134 - protein, 10 aa, Homo sapiens
  misc_feature: Table A; Target 8134; HLA-B*57:01; AFP; ENSG00000081051; TAA
KPTPASIPLF

SEQ ID NO: 8135 - protein, 10 aa, Homo sapiens
  misc_feature: Table A; Target 8135; HLA-B*58:01; AFP; ENSG00000081051; TAA
KPTPASIPLF

SEQ ID NO: 8136 - protein, 9 aa, Homo sapiens
  misc_feature: Table A; Target 8136; HLA-A*02:07; AFP; ENSG00000081051; TAA
KQEFLINLV

SEQ ID NO: 8137 - protein, 9 aa, Homo sapiens
  misc_feature: Table A; Target 8137; HLA-B*13:02; AFP; ENSG00000081051; TAA
KQEFLINLV

SEQ ID NO: 8138 - protein, 11 aa, Homo sapiens
  misc_feature: Table A; Target 8138; HLA-B*15:01; AFP; ENSG00000081051; TAA
KQKPQITEEQL

SEQ ID NO: 8139 - protein, 11 aa, Homo sapiens
  misc_feature: Table A; Target 8139; HLA-B*40:02; AFP; ENSG00000081051; TAA
KQKPQITEEQL

SEQ ID NO: 8140 - protein, 8 aa, Homo sapiens
  misc_feature: Table A; Target 8140; HLA-B*40:02; AFP; ENSG00000081051; TAA
KTRAALGV

SEQ ID NO: 8141 - protein, 9 aa, Homo sapiens
  misc_feature: Table A; Target 8141; HLA-A*31:01; AFP; ENSG00000081051; TAA
KVNFTEIQK

SEQ ID NO: 8142 - protein, 9 aa, Homo sapiens
  misc_feature: Table A; Target 8142; HLA-A*32:01; AFP; ENSG00000081051; TAA
KVNFTEIQK

SEQ ID NO: 8143 - protein, 10 aa, Homo sapiens
  misc_feature: Table A; Target 8143; HLA-A*02:04; AFP; ENSG00000081051; TAA
KVNFTEIQKL

SEQ ID NO: 8144 - protein, 10 aa, Homo sapiens
  misc_feature: Table A; Target 8144; HLA-A*03:02; AFP; ENSG00000081051; TAA
KVNFTEIQKL

SEQ ID NO: 8145 - protein, 9 aa, Homo sapiens
  misc_feature: Table A; Target 8145; HLA-A*33:03; AFP; ENSG00000081051; TAA
KYIQESQAL

SEQ ID NO: 8146 - protein, 9 aa, Homo sapiens
  misc_feature: Table A; Target 8146; HLA-B*07:02; AFP; ENSG00000081051; TAA
KYIQESQAL

SEQ ID NO: 8147 - protein, 9 aa, Homo sapiens
  misc_feature: Table A; Target 8147; HLA-B*08:01; AFP; ENSG00000081051; TAA
KYIQESQAL

SEQ ID NO: 8148 - protein, 9 aa, Homo sapiens
  misc_feature: Table A; Target 8148; HLA-B*13:02; AFP; ENSG00000081051; TAA
KYIQESQAL

SEQ ID NO: 8149 - protein, 9 aa, Homo sapiens
  misc_feature: Table A; Target 8149; HLA-B*27:02; AFP; ENSG00000081051; TAA
KYIQESQAL

SEQ ID NO: 8150 - protein, 9 aa, Homo sapiens
  misc_feature: Table A; Target 8150; HLA-B*39:01; AFP; ENSG00000081051; TAA
KYIQESQAL

SEQ ID NO: 8151 - protein, 9 aa, Homo sapiens
  misc_feature: Table A; Target 8151; HLA-B*44:02; AFP; ENSG00000081051; TAA
KYIQESQAL

SEQ ID NO: 8152 - protein, 9 aa, Homo sapiens
  misc_feature: Table A; Target 8152; HLA-B*44:03; AFP; ENSG00000081051; TAA
KYIQESQAL

SEQ ID NO: 8153 - protein, 9 aa, Homo sapiens
  misc_feature: Table A; Target 8153; HLA-B*55:01; AFP; ENSG00000081051; TAA
KYIQESQAL

SEQ ID NO: 8154 - protein, 9 aa, Homo sapiens
  misc_feature: Table A; Target 8154; HLA-B*57:01; AFP; ENSG00000081051; TAA
KYIQESQAL

SEQ ID NO: 8155 - protein, 9 aa, Homo sapiens
  misc_feature: Table A; Target 8155; HLA-C*07:04; AFP; ENSG00000081051; TAA
KYIQESQAL

SEQ ID NO: 8156 - protein, 9 aa, Homo sapiens
  misc_feature: Table A; Target 8156; HLA-C*12:03; AFP; ENSG00000081051; TAA
KYIQESQAL

SEQ ID NO: 8157 - protein, 10 aa, Homo sapiens
  misc_feature: Table A; Target 8157; HLA-A*24:02; AFP; ENSG00000081051; TAA
KYIQESQALA

SEQ ID NO: 8158 - protein, 10 aa, Homo sapiens
  misc_feature: Table A; Target 8158; HLA-C*06:02; AFP; ENSG00000081051; TAA
KYIQESQALA

SEQ ID NO: 8159 - protein, 10 aa, Homo sapiens
  misc_feature: Table A; Target 8159; HLA-C*07:02; AFP; ENSG00000081051; TAA
KYIQESQALA

SEQ ID NO: 8160 - protein, 10 aa, Homo sapiens
  misc_feature: Table A; Target 8160; HLA-C*14:02; AFP; ENSG00000081051; TAA
KYIQESQALA

SEQ ID NO: 8161 - protein, 11 aa, Homo sapiens
  misc_feature: Table A; Target 8161; HLA-A*23:01; AFP; ENSG00000081051; TAA
KYIQESQALAK

SEQ ID NO: 8162 - protein, 11 aa, Homo sapiens
  misc_feature: Table A; Target 8162; HLA-A*24:02; AFP; ENSG00000081051; TAA
KYIQESQALAK

SEQ ID NO: 8163 - protein, 11 aa, Homo sapiens
  misc_feature: Table A; Target 8163; HLA-A*29:02; AFP; ENSG00000081051; TAA
KYIQESQALAK

SEQ ID NO: 8164 - protein, 11 aa, Homo sapiens
  misc_feature: Table A; Target 8164; HLA-A*30:02; AFP; ENSG00000081051; TAA
KYIQESQALAK

SEQ ID NO: 8165 - protein, 11 aa, Homo sapiens
  misc_feature: Table A; Target 8165; HLA-A*33:01; AFP; ENSG00000081051; TAA
KYIQESQALAK

SEQ ID NO: 8166 - protein, 11 aa, Homo sapiens
  misc_feature: Table A; Target 8166; HLA-B*27:02; AFP; ENSG00000081051; TAA
KYIQESQALAK

SEQ ID NO: 8167 - protein, 11 aa, Homo sapiens
  misc_feature: Table A; Target 8167; HLA-B*27:05; AFP; ENSG00000081051; TAA
KYIQESQALAK

SEQ ID NO: 8168 - protein, 11 aa, Homo sapiens
  misc_feature: Table A; Target 8168; HLA-B*57:01; AFP; ENSG00000081051; TAA
KYIQESQALAK

SEQ ID NO: 8169 - protein, 11 aa, Homo sapiens
  misc_feature: Table A; Target 8169; HLA-C*06:02; AFP; ENSG00000081051; TAA
KYIQESQALAK

SEQ ID NO: 8170 - protein, 11 aa, Homo sapiens
  misc_feature: Table A; Target 8170; HLA-C*16:02; AFP; ENSG00000081051; TAA
KYIQESQALAK

SEQ ID NO: 8171 - protein, 8 aa, Homo sapiens
  misc_feature: Table A; Target 8171; HLA-B*18:01; AFP; ENSG00000081051; TAA
LADLATIF

SEQ ID NO: 8172 - protein, 8 aa, Homo sapiens
  misc_feature: Table A; Target 8172; HLA-B*35:03; AFP; ENSG00000081051; TAA
LADLATIF

SEQ ID NO: 8173 - protein, 8 aa, Homo sapiens
  misc_feature: Table A; Target 8173; HLA-C*04:01; AFP; ENSG00000081051; TAA
LADLATIF

SEQ ID NO: 8174 - protein, 8 aa, Homo sapiens
  misc_feature: Table A; Target 8174; HLA-C*07:04; AFP; ENSG00000081051; TAA
LADLATIF

SEQ ID NO: 8175 - protein, 9 aa, Homo sapiens
  misc_feature: Table A; Target 8175; HLA-B*35:03; AFP; ENSG00000081051; TAA
LADLATIFF

SEQ ID NO: 8176 - protein, 9 aa, Homo sapiens
  misc_feature: Table A; Target 8176; HLA-B*55:01; AFP; ENSG00000081051; TAA
LADLATIFF

SEQ ID NO: 8177 - protein, 9 aa, Homo sapiens
  misc_feature: Table A; Target 8177; HLA-B*57:01; AFP; ENSG00000081051; TAA
LADLATIFF

SEQ ID NO: 8178 - protein, 9 aa, Homo sapiens
  misc_feature: Table A; Target 8178; HLA-C*03:04; AFP; ENSG00000081051; TAA
LADLATIFF

SEQ ID NO: 8179 - protein, 9 aa, Homo sapiens
  misc_feature: Table A; Target 8179; HLA-B*08:01; AFP; ENSG00000081051; TAA
LAHKKPTPA

SEQ ID NO: 8180 - protein, 8 aa, Homo sapiens
  misc_feature: Table A; Target 8180; HLA-B*08:01; AFP; ENSG00000081051; TAA
LAKRSCGL

SEQ ID NO: 8181 - protein, 8 aa, Homo sapiens
  misc_feature: Table A; Target 8181; HLA-B*27:02; AFP; ENSG00000081051; TAA
LASFVHEY

SEQ ID NO: 8182 - protein, 8 aa, Homo sapiens
  misc_feature: Table A; Target 8182; HLA-B*27:05; AFP; ENSG00000081051; TAA
LASFVHEY

SEQ ID NO: 8183 - protein, 8 aa, Homo sapiens
  misc_feature: Table A; Target 8183; HLA-B*37:01; AFP; ENSG00000081051; TAA
LASFVHEY

SEQ ID NO: 8184 - protein, 8 aa, Homo sapiens
  misc_feature: Table A; Target 8184; HLA-B*54:01; AFP; ENSG00000081051; TAA
LASFVHEY

SEQ ID NO: 8185 - protein, 8 aa, Homo sapiens
  misc_feature: Table A; Target 8185; HLA-B*55:01; AFP; ENSG00000081051; TAA
LASFVHEY

SEQ ID NO: 8186 - protein, 8 aa, Homo sapiens
  misc_feature: Table A; Target 8186; HLA-B*57:01; AFP; ENSG00000081051; TAA
LASFVHEY

SEQ ID NO: 8187 - protein, 8 aa, Homo sapiens
  misc_feature: Table A; Target 8187; HLA-C*04:01; AFP; ENSG00000081051; TAA
LASFVHEY

SEQ ID NO: 8188 - protein, 8 aa, Homo sapiens
  misc_feature: Table A; Target 8188; HLA-C*06:02; AFP; ENSG00000081051; TAA
LASFVHEY

SEQ ID NO: 8189 - protein, 8 aa, Homo sapiens
  misc_feature: Table A; Target 8189; HLA-C*14:02; AFP; ENSG00000081051; TAA
LASFVHEY

SEQ ID NO: 8190 - protein, 9 aa, Homo sapiens
  misc_feature: Table A; Target 8190; HLA-A*24:02; AFP; ENSG00000081051; TAA
LATIFFAQF

SEQ ID NO: 8191 - protein, 9 aa, Homo sapiens
  misc_feature: Table A; Target 8191; HLA-B*35:01; AFP; ENSG00000081051; TAA
LATIFFAQF

SEQ ID NO: 8192 - protein, 9 aa, Homo sapiens
  misc_feature: Table A; Target 8192; HLA-C*16:04; AFP; ENSG00000081051; TAA
LATIFFAQF

SEQ ID NO: 8193 - protein, 9 aa, Homo sapiens
  misc_feature: Table A; Target 8193; HLA-A*02:01; AFP; ENSG00000081051; TAA
LAVSVILRV

SEQ ID NO: 8194 - protein, 9 aa, Homo sapiens
  misc_feature: Table A; Target 8194; HLA-A*02:03; AFP; ENSG00000081051; TAA
LAVSVILRV

SEQ ID NO: 8195 - protein, 9 aa, Homo sapiens
  misc_feature: Table A; Target 8195; HLA-C*16:02; AFP; ENSG00000081051; TAA
LAVSVILRV

SEQ ID NO: 8196 - protein, 10 aa, Homo sapiens
  misc_feature: Table A; Target 8196; HLA-B*56:01; AFP; ENSG00000081051; TAA
LAVSVILRVA

SEQ ID NO: 8197 - protein, 10 aa, Homo sapiens
  misc_feature: Table A; Target 8197; HLA-C*06:02; AFP; ENSG00000081051; TAA
LAVSVILRVA

SEQ ID NO: 8198 - protein, 9 aa, Homo sapiens
  misc_feature: Table A; Target 8198; HLA-B*07:02; AFP; ENSG00000081051; TAA
LCQAQGVAL

SEQ ID NO: 8199 - protein, 9 aa, Homo sapiens
  misc_feature: Table A; Target 8199; HLA-B*35:03; AFP; ENSG00000081051; TAA
LCQAQGVAL

SEQ ID NO: 8200 - protein, 9 aa, Homo sapiens
  misc_feature: Table A; Target 8200; HLA-B*39:01; AFP; ENSG00000081051; TAA
LCQAQGVAL

SEQ ID NO: 8201 - protein, 9 aa, Homo sapiens
  misc_feature: Table A; Target 8201; HLA-B*40:02; AFP; ENSG00000081051; TAA
LCQAQGVAL

SEQ ID NO: 8202 - protein, 9 aa, Homo sapiens
  misc_feature: Table A; Target 8202; HLA-B*46:01; AFP; ENSG00000081051; TAA
LCQAQGVAL

SEQ ID NO: 8203 - protein, 9 aa, Homo sapiens
  misc_feature: Table A; Target 8203; HLA-C*07:02; AFP; ENSG00000081051; TAA
LCQAQGVAL

SEQ ID NO: 8204 - protein, 9 aa, Homo sapiens
  misc_feature: Table A; Target 8204; HLA-C*07:04; AFP; ENSG00000081051; TAA
LCQAQGVAL

SEQ ID NO: 8205 - protein, 9 aa, Homo sapiens
  misc_feature: Table A; Target 8205; HLA-C*16:01; AFP; ENSG00000081051; TAA
LCQAQGVAL

SEQ ID NO: 8206 - protein, 10 aa, Homo sapiens
  misc_feature: Table A; Target 8206; HLA-C*07:01; AFP; ENSG00000081051; TAA
LCQAQGVALQ

SEQ ID NO: 8207 - protein, 8 aa, Homo sapiens
  misc_feature: Table A; Target 8207; HLA-C*07:01; AFP; ENSG00000081051; TAA
LDVAHVHE

SEQ ID NO: 8208 - protein, 9 aa, Homo sapiens
  misc_feature: Table A; Target 8208; HLA-B*37:01; AFP; ENSG00000081051; TAA
LDVAHVHEH

SEQ ID NO: 8209 - protein, 8 aa, Homo sapiens
  misc_feature: Table A; Target 8209; HLA-A*30:01; AFP; ENSG00000081051; TAA
LEAVIADF

SEQ ID NO: 8210 - protein, 8 aa, Homo sapiens
  misc_feature: Table A; Target 8210; HLA-B*40:01; AFP; ENSG00000081051; TAA
LEAVIADF

SEQ ID NO: 8211 - protein, 8 aa, Homo sapiens
  misc_feature: Table A; Target 8211; HLA-B*44:02; AFP; ENSG00000081051; TAA
LEAVIADF

SEQ ID NO: 8212 - protein, 8 aa, Homo sapiens
  misc_feature: Table A; Target 8212; HLA-B*49:01; AFP; ENSG00000081051; TAA
LEAVIADF

SEQ ID NO: 8213 - protein, 11 aa, Homo sapiens
  misc_feature: Table A; Target 8213; HLA-B*40:01; AFP; ENSG00000081051; TAA
LEAVIADFSGL

SEQ ID NO: 8214 - protein, 8 aa, Homo sapiens
  misc_feature: Table A; Target 8214; HLA-B*40:02; AFP; ENSG00000081051; TAA
LENQLPAF

SEQ ID NO: 8215 - protein, 8 aa, Homo sapiens
  misc_feature: Table A; Target 8215; HLA-B*44:02; AFP; ENSG00000081051; TAA
LENQLPAF

SEQ ID NO: 8216 - protein, 9 aa, Homo sapiens
  misc_feature: Table A; Target 8216; HLA-A*30:01; AFP; ENSG00000081051; TAA
LENQLPAFL

SEQ ID NO: 8217 - protein, 9 aa, Homo sapiens
  misc_feature: Table A; Target 8217; HLA-B*40:02; AFP; ENSG00000081051; TAA
LENQLPAFL

SEQ ID NO: 8218 - protein, 8 aa, Homo sapiens
  misc_feature: Table A; Target 8218; HLA-A*29:02; AFP; ENSG00000081051; TAA
LFQKLGEY

SEQ ID NO: 8219 - protein, 8 aa, Homo sapiens
  misc_feature: Table A; Target 8219; HLA-B*46:01; AFP; ENSG00000081051; TAA
LFQKLGEY

SEQ ID NO: 8220 - protein, 8 aa, Homo sapiens
  misc_feature: Table A; Target 8220; HLA-C*04:01; AFP; ENSG00000081051; TAA
LFQKLGEY

SEQ ID NO: 8221 - protein, 8 aa, Homo sapiens
  misc_feature: Table A; Target 8221; HLA-C*07:01; AFP; ENSG00000081051; TAA
LFQKLGEY

SEQ ID NO: 8222 - protein, 9 aa, Homo sapiens
  misc_feature: Table A; Target 8222; HLA-A*02:07; AFP; ENSG00000081051; TAA
LGDRDFNQF

SEQ ID NO: 8223 - protein, 9 aa, Homo sapiens
  misc_feature: Table A; Target 8223; HLA-A*24:02; AFP; ENSG00000081051; TAA
LGDRDFNQF

SEQ ID NO: 8224 - protein, 9 aa, Homo sapiens
  misc_feature: Table A; Target 8224; HLA-B*35:01; AFP; ENSG00000081051; TAA
LGDRDFNQF

SEQ ID NO: 8225 - protein, 9 aa, Homo sapiens
  misc_feature: Table A; Target 8225; HLA-B*55:01; AFP; ENSG00000081051; TAA
LGDRDFNQF

SEQ ID NO: 8226 - protein, 9 aa, Homo sapiens
  misc_feature: Table A; Target 8226; HLA-B*57:01; AFP; ENSG00000081051; TAA
LGDRDFNQF

SEQ ID NO: 8227 - protein, 9 aa, Homo sapiens
  misc_feature: Table A; Target 8227; HLA-C*03:03; AFP; ENSG00000081051; TAA
LGDRDFNQF

SEQ ID NO: 8228 - protein, 8 aa, Homo sapiens
  misc_feature: Table A; Target 8228; HLA-A*03:02; AFP; ENSG00000081051; TAA
LINLVKQK

SEQ ID NO: 8229 - protein, 9 aa, Homo sapiens
  misc_feature: Table A; Target 8229; HLA-B*08:01; AFP; ENSG00000081051; TAA
LISKTRAAL

SEQ ID NO: 8230 - protein, 9 aa, Homo sapiens
  misc_feature: Table A; Target 8230; HLA-A*02:04; AFP; ENSG00000081051; TAA
LLNQHACAV

SEQ ID NO: 8231 - protein, 9 aa, Homo sapiens
  misc_feature: Table A; Target 8231; HLA-B*08:01; AFP; ENSG00000081051; TAA
LLNQHACAV

SEQ ID NO: 8232 - protein, 9 aa, Homo sapiens
  misc_feature: Table A; Target 8232; HLA-B*13:02; AFP; ENSG00000081051; TAA
LLNQHACAV

SEQ ID NO: 8233 - protein, 9 aa, Homo sapiens
  misc_feature: Table A; Target 8233; HLA-B*37:01; AFP; ENSG00000081051; TAA
LLNQHACAV

SEQ ID NO: 8234 - protein, 9 aa, Homo sapiens
  misc_feature: Table A; Target 8234; HLA-B*27:05; AFP; ENSG00000081051; TAA
LNFTESRTL

SEQ ID NO: 8235 - protein, 9 aa, Homo sapiens
  misc_feature: Table A; Target 8235; HLA-B*39:01; AFP; ENSG00000081051; TAA
LNFTESRTL

SEQ ID NO: 8236 - protein, 9 aa, Homo sapiens
  misc_feature: Table A; Target 8236; HLA-C*02:02; AFP; ENSG00000081051; TAA
LNFTESRTL

SEQ ID NO: 8237 - protein, 9 aa, Homo sapiens
  misc_feature: Table A; Target 8237; HLA-C*06:02; AFP; ENSG00000081051; TAA
LNFTESRTL

SEQ ID NO: 8238 - protein, 9 aa, Homo sapiens
  misc_feature: Table A; Target 8238; HLA-C*07:01; AFP; ENSG00000081051; TAA
LNFTESRTL

SEQ ID NO: 8239 - protein, 9 aa, Homo sapiens
  misc_feature: Table A; Target 8239; HLA-C*12:03; AFP; ENSG00000081051; TAA
LNFTESRTL

SEQ ID NO: 8240 - protein, 9 aa, Homo sapiens
  misc_feature: Table A; Target 8240; HLA-C*07:01; AFP; ENSG00000081051; TAA
LNQHACAVM

SEQ ID NO: 8241 - protein, 8 aa, Homo sapiens
  misc_feature: Table A; Target 8241; HLA-B*07:02; AFP; ENSG00000081051; TAA
LPAFLEEL

SEQ ID NO: 8242 - protein, 8 aa, Homo sapiens
  misc_feature: Table A; Target 8242; HLA-B*54:01; AFP; ENSG00000081051; TAA
LPAFLEEL

SEQ ID NO: 8243 - protein, 8 aa, Homo sapiens
  misc_feature: Table A; Target 8243; HLA-B*55:01; AFP; ENSG00000081051; TAA
LPAFLEEL

SEQ ID NO: 8244 - protein, 10 aa, Homo sapiens
  misc_feature: Table A; Target 8244; HLA-A*26:01; AFP; ENSG00000081051; TAA
LQDGEKIMSY

SEQ ID NO: 8245 - protein, 10 aa, Homo sapiens
  misc_feature: Table A; Target 8245; HLA-A*29:02; AFP; ENSG00000081051; TAA
LQDGEKIMSY

SEQ ID NO: 8246 - protein, 10 aa, Homo sapiens
  misc_feature: Table A; Target 8246; HLA-A*32:01; AFP; ENSG00000081051; TAA
LQDGEKIMSY

SEQ ID NO: 8247 - protein, 10 aa, Homo sapiens
  misc_feature: Table A; Target 8247; HLA-B*15:03; AFP; ENSG00000081051; TAA
LQDGEKIMSY

SEQ ID NO: 8248 - protein, 10 aa, Homo sapiens
  misc_feature: Table A; Target 8248; HLA-B*18:01; AFP; ENSG00000081051; TAA
LQDGEKIMSY

SEQ ID NO: 8249 - protein, 10 aa, Homo sapiens
  misc_feature: Table A; Target 8249; HLA-B*35:01; AFP; ENSG00000081051; TAA
LQDGEKIMSY

SEQ ID NO: 8250 - protein, 10 aa, Homo sapiens
  misc_feature: Table A; Target 8250; HLA-B*39:01; AFP; ENSG00000081051; TAA
LQDGEKIMSY

SEQ ID NO: 8251 - protein, 10 aa, Homo sapiens
  misc_feature: Table A; Target 8251; HLA-C*02:02; AFP; ENSG00000081051; TAA
LQDGEKIMSY

SEQ ID NO: 8252 - protein, 10 aa, Homo sapiens
  misc_feature: Table A; Target 8252; HLA-C*05:01; AFP; ENSG00000081051; TAA
LQDGEKIMSY

SEQ ID NO: 8253 - protein, 9 aa, Homo sapiens
  misc_feature: Table A; Target 8253; HLA-A*03:02; AFP; ENSG00000081051; TAA
LQNAFLVAY

SEQ ID NO: 8254 - protein, 9 aa, Homo sapiens
  misc_feature: Table A; Target 8254; HLA-A*11:01; AFP; ENSG00000081051; TAA
LQNAFLVAY

SEQ ID NO: 8255 - protein, 9 aa, Homo sapiens
  misc_feature: Table A; Target 8255; HLA-A*23:01; AFP; ENSG00000081051; TAA
LQNAFLVAY

SEQ ID NO: 8256 - protein, 9 aa, Homo sapiens
  misc_feature: Table A; Target 8256; HLA-A*25:01; AFP; ENSG00000081051; TAA
LQNAFLVAY

SEQ ID NO: 8257 - protein, 9 aa, Homo sapiens
  misc_feature: Table A; Target 8257; HLA-B*07:02; AFP; ENSG00000081051; TAA
LQNAFLVAY

SEQ ID NO: 8258 - protein, 9 aa, Homo sapiens
  misc_feature: Table A; Target 8258; HLA-B*13:02; AFP; ENSG00000081051; TAA
LQNAFLVAY

SEQ ID NO: 8259 - protein, 9 aa, Homo sapiens
  misc_feature: Table A; Target 8259; HLA-B*37:01; AFP; ENSG00000081051; TAA
LQNAFLVAY

SEQ ID NO: 8260 - protein, 9 aa, Homo sapiens
  misc_feature: Table A; Target 8260; HLA-B*54:01; AFP; ENSG00000081051; TAA
LQNAFLVAY

SEQ ID NO: 8261 - protein, 9 aa, Homo sapiens
  misc_feature: Table A; Target 8261; HLA-B*57:01; AFP; ENSG00000081051; TAA
LQNAFLVAY

SEQ ID NO: 8262 - protein, 9 aa, Homo sapiens
  misc_feature: Table A; Target 8262; HLA-B*58:01; AFP; ENSG00000081051; TAA
LQNAFLVAY

SEQ ID NO: 8263 - protein, 9 aa, Homo sapiens
  misc_feature: Table A; Target 8263; HLA-C*03:04; AFP; ENSG00000081051; TAA
LQNAFLVAY

SEQ ID NO: 8264 - protein, 9 aa, Homo sapiens
  misc_feature: Table A; Target 8264; HLA-C*04:01; AFP; ENSG00000081051; TAA
LQNAFLVAY

SEQ ID NO: 8265 - protein, 9 aa, Homo sapiens
  misc_feature: Table A; Target 8265; HLA-C*06:02; AFP; ENSG00000081051; TAA
LQNAFLVAY

SEQ ID NO: 8266 - protein, 11 aa, Homo sapiens
  misc_feature: Table A; Target 8266; HLA-B*27:02; AFP; ENSG00000081051; TAA
LQNAFLVAYTK

SEQ ID NO: 8267 - protein, 8 aa, Homo sapiens
  misc_feature: Table A; Target 8267; HLA-B*08:01; AFP; ENSG00000081051; TAA
LQTMKQEF

SEQ ID NO: 8268 - protein, 8 aa, Homo sapiens
  misc_feature: Table A; Target 8268; HLA-B*15:03; AFP; ENSG00000081051; TAA
LQTMKQEF

SEQ ID NO: 8269 - protein, 8 aa, Homo sapiens
  misc_feature: Table A; Target 8269; HLA-C*07:04; AFP; ENSG00000081051; TAA
LQTMKQEF

SEQ ID NO: 8270 - protein, 8 aa, Homo sapiens
  misc_feature: Table A; Target 8270; HLA-C*16:01; AFP; ENSG00000081051; TAA
LQTMKQEF

SEQ ID NO: 8271 - protein, 10 aa, Homo sapiens
  misc_feature: Table A; Target 8271; HLA-C*06:02; AFP; ENSG00000081051; TAA
LSEDKLLACG

SEQ ID NO: 8272 - protein, 9 aa, Homo sapiens
  misc_feature: Table A; Target 8272; HLA-C*03:03; AFP; ENSG00000081051; TAA
LTSSELMAI

SEQ ID NO: 8273 - protein, 9 aa, Homo sapiens
  misc_feature: Table A; Target 8273; HLA-C*06:02; AFP; ENSG00000081051; TAA
LTSSELMAI

SEQ ID NO: 8274 - protein, 11 aa, Homo sapiens
  misc_feature: Table A; Target 8274; HLA-A*11:01; AFP; ENSG00000081051; TAA
LTSSELMAITR

SEQ ID NO: 8275 - protein, 11 aa, Homo sapiens
  misc_feature: Table A; Target 8275; HLA-A*31:01; AFP; ENSG00000081051; TAA
LTSSELMAITR

SEQ ID NO: 8276 - protein, 11 aa, Homo sapiens
  misc_feature: Table A; Target 8276; HLA-A*68:02; AFP; ENSG00000081051; TAA
LTSSELMAITR

SEQ ID NO: 8277 - protein, 11 aa, Homo sapiens
  misc_feature: Table A; Target 8277; HLA-B*57:01; AFP; ENSG00000081051; TAA
LTSSELMAITR

SEQ ID NO: 8278 - protein, 8 aa, Homo sapiens
  misc_feature: Table A; Target 8278; HLA-A*02:01; AFP; ENSG00000081051; TAA
LVLDVAHV

SEQ ID NO: 8279 - protein, 8 aa, Homo sapiens
  misc_feature: Table A; Target 8279; HLA-A*02:04; AFP; ENSG00000081051; TAA
LVLDVAHV

SEQ ID NO: 8280 - protein, 8 aa, Homo sapiens
  misc_feature: Table A; Target 8280; HLA-A*02:07; AFP; ENSG00000081051; TAA
LVLDVAHV

SEQ ID NO: 8281 - protein, 8 aa, Homo sapiens
  misc_feature: Table A; Target 8281; HLA-A*68:02; AFP; ENSG00000081051; TAA
LVLDVAHV

SEQ ID NO: 8282 - protein, 9 aa, Homo sapiens
  misc_feature: Table A; Target 8282; HLA-A*03:02; AFP; ENSG00000081051; TAA
LVLDVAHVH

SEQ ID NO: 8283 - protein, 9 aa, Homo sapiens
  misc_feature: Table A; Target 8283; HLA-A*11:01; AFP; ENSG00000081051; TAA
LVLDVAHVH

SEQ ID NO: 8284 - protein, 11 aa, Homo sapiens
  misc_feature: Table A; Target 8284; HLA-B*54:01; AFP; ENSG00000081051; TAA
LVVDETYVPPA

SEQ ID NO: 8285 - protein, 9 aa, Homo sapiens
  misc_feature: Table A; Target 8285; HLA-B*44:02; AFP; ENSG00000081051; TAA
LYAPTILLW

SEQ ID NO: 8286 - protein, 8 aa, Homo sapiens
  misc_feature: Table A; Target 8286; HLA-B*54:01; AFP; ENSG00000081051; TAA
MAATAATC

SEQ ID NO: 8287 - protein, 8 aa, Homo sapiens
  misc_feature: Table A; Target 8287; HLA-C*03:03; AFP; ENSG00000081051; TAA
MAATAATC

SEQ ID NO: 8288 - protein, 8 aa, Homo sapiens
  misc_feature: Table A; Target 8288; HLA-C*12:03; AFP; ENSG00000081051; TAA
MAATAATC

SEQ ID NO: 8289 - protein, 9 aa, Homo sapiens
  misc_feature: Table A; Target 8289; HLA-B*35:03; AFP; ENSG00000081051; TAA
MAATAATCC

SEQ ID NO: 8290 - protein, 9 aa, Homo sapiens
  misc_feature: Table A; Target 8290; HLA-C*12:03; AFP; ENSG00000081051; TAA
MAATAATCC

SEQ ID NO: 8291 - protein, 9 aa, Homo sapiens
  misc_feature: Table A; Target 8291; HLA-C*16:02; AFP; ENSG00000081051; TAA
MAATAATCC

SEQ ID NO: 8292 - protein, 8 aa, Homo sapiens
  misc_feature: Table A; Target 8292; HLA-B*08:01; AFP; ENSG00000081051; TAA
MAITRKMA

SEQ ID NO: 8293 - protein, 8 aa, Homo sapiens
  misc_feature: Table A; Target 8293; HLA-B*54:01; AFP; ENSG00000081051; TAA
MAITRKMA

SEQ ID NO: 8294 - protein, 9 aa, Homo sapiens
  misc_feature: Table A; Target 8294; HLA-B*15:03; AFP; ENSG00000081051; TAA
MKNFGTRTF

SEQ ID NO: 8295 - protein, 9 aa, Homo sapiens
  misc_feature: Table A; Target 8295; HLA-A*02:04; AFP; ENSG00000081051; TAA
MKQEFLINL

SEQ ID NO: 8296 - protein, 8 aa, Homo sapiens
  misc_feature: Table A; Target 8296; HLA-B*08:01; AFP; ENSG00000081051; TAA
MNKFIYEI

SEQ ID NO: 8297 - protein, 8 aa, Homo sapiens
  misc_feature: Table A; Target 8297; HLA-C*07:01; AFP; ENSG00000081051; TAA
MNKFIYEI

SEQ ID NO: 8298 - protein, 8 aa, Homo sapiens
  misc_feature: Table A; Target 8298; HLA-B*51:01; AFP; ENSG00000081051; TAA
MTPVNPGV

SEQ ID NO: 8299 - protein, 8 aa, Homo sapiens
  misc_feature: Table A; Target 8299; HLA-C*06:02; AFP; ENSG00000081051; TAA
MTPVNPGV

SEQ ID NO: 8300 - protein, 9 aa, Homo sapiens
  misc_feature: Table A; Target 8300; HLA-C*04:01; AFP; ENSG00000081051; TAA
MTPVNPGVG

SEQ ID NO: 8301 - protein, 10 aa, Homo sapiens
  misc_feature: Table A; Target 8301; HLA-C*04:01; AFP; ENSG00000081051; TAA
MTPVNPGVGQ

SEQ ID NO: 8302 - protein, 10 aa, Homo sapiens
  misc_feature: Table A; Target 8302; HLA-C*07:01; AFP; ENSG00000081051; TAA
MTPVNPGVGQ

SEQ ID NO: 8303 - protein, 10 aa, Homo sapiens
  misc_feature: Table A; Target 8303; HLA-C*07:02; AFP; ENSG00000081051; TAA
MTPVNPGVGQ

SEQ ID NO: 8304 - protein, 8 aa, Homo sapiens
  misc_feature: Table A; Target 8304; HLA-B*54:01; AFP; ENSG00000081051; TAA
MVKDALTA

SEQ ID NO: 8305 - protein, 9 aa, Homo sapiens
  misc_feature: Table A; Target 8305; HLA-A*02:04; AFP; ENSG00000081051; TAA
MVKDALTAI

SEQ ID NO: 8306 - protein, 9 aa, Homo sapiens
  misc_feature: Table A; Target 8306; HLA-A*02:07; AFP; ENSG00000081051; TAA
MVKDALTAI

SEQ ID NO: 8307 - protein, 9 aa, Homo sapiens
  misc_feature: Table A; Target 8307; HLA-A*24:02; AFP; ENSG00000081051; TAA
MVKDALTAI

SEQ ID NO: 8308 - protein, 9 aa, Homo sapiens
  misc_feature: Table A; Target 8308; HLA-A*31:01; AFP; ENSG00000081051; TAA
MVKDALTAI

SEQ ID NO: 8309 - protein, 9 aa, Homo sapiens
  misc_feature: Table A; Target 8309; HLA-A*33:01; AFP; ENSG00000081051; TAA
MVKDALTAI

SEQ ID NO: 8310 - protein, 9 aa, Homo sapiens
  misc_feature: Table A; Target 8310; HLA-B*07:02; AFP; ENSG00000081051; TAA
MVKDALTAI

SEQ ID NO: 8311 - protein, 9 aa, Homo sapiens
  misc_feature: Table A; Target 8311; HLA-B*13:02; AFP; ENSG00000081051; TAA
MVKDALTAI

SEQ ID NO: 8312 - protein, 9 aa, Homo sapiens
  misc_feature: Table A; Target 8312; HLA-B*15:01; AFP; ENSG00000081051; TAA
MVKDALTAI

SEQ ID NO: 8313 - protein, 9 aa, Homo sapiens
  misc_feature: Table A; Target 8313; HLA-B*55:01; AFP; ENSG00000081051; TAA
MVKDALTAI

SEQ ID NO: 8314 - protein, 9 aa, Homo sapiens
  misc_feature: Table A; Target 8314; HLA-B*56:01; AFP; ENSG00000081051; TAA
MVKDALTAI

SEQ ID NO: 8315 - protein, 9 aa, Homo sapiens
  misc_feature: Table A; Target 8315; HLA-C*04:01; AFP; ENSG00000081051; TAA
MVKDALTAI

SEQ ID NO: 8316 - protein, 9 aa, Homo sapiens
  misc_feature: Table A; Target 8316; HLA-C*06:02; AFP; ENSG00000081051; TAA
MVKDALTAI

SEQ ID NO: 8317 - protein, 9 aa, Homo sapiens
  misc_feature: Table A; Target 8317; HLA-C*07:02; AFP; ENSG00000081051; TAA
MVKDALTAI

SEQ ID NO: 8318 - protein, 11 aa, Homo sapiens
  misc_feature: Table A; Target 8318; HLA-B*07:02; AFP; ENSG00000081051; TAA
MVKDALTAIEK

SEQ ID NO: 8319 - protein, 11 aa, Homo sapiens
  misc_feature: Table A; Target 8319; HLA-B*27:02; AFP; ENSG00000081051; TAA
MVKDALTAIEK

SEQ ID NO: 8320 - protein, 11 aa, Homo sapiens
  misc_feature: Table A; Target 8320; HLA-B*57:01; AFP; ENSG00000081051; TAA
MVKDALTAIEK

SEQ ID NO: 8321 - protein, 11 aa, Homo sapiens
  misc_feature: Table A; Target 8321; HLA-C*07:06; AFP; ENSG00000081051; TAA
MVKDALTAIEK

SEQ ID NO: 8322 - protein, 8 aa, Homo sapiens
  misc_feature: Table A; Target 8322; HLA-B*51:01; AFP; ENSG00000081051; TAA
NAFLVAYT

SEQ ID NO: 8323 - protein, 8 aa, Homo sapiens
  misc_feature: Table A; Target 8323; HLA-C*07:01; AFP; ENSG00000081051; TAA
NAFLVAYT

SEQ ID NO: 8324 - protein, 9 aa, Homo sapiens
  misc_feature: Table A; Target 8324; HLA-A*03:02; AFP; ENSG00000081051; TAA
NAFLVAYTK

SEQ ID NO: 8325 - protein, 9 aa, Homo sapiens
  misc_feature: Table A; Target 8325; HLA-A*33:01; AFP; ENSG00000081051; TAA
NAFLVAYTK

SEQ ID NO: 8326 - protein, 9 aa, Homo sapiens
  misc_feature: Table A; Target 8326; HLA-A*68:02; AFP; ENSG00000081051; TAA
NAFLVAYTK

SEQ ID NO: 8327 - protein, 9 aa, Homo sapiens
  misc_feature: Table A; Target 8327; HLA-B*27:02; AFP; ENSG00000081051; TAA
NAFLVAYTK

SEQ ID NO: 8328 - protein, 9 aa, Homo sapiens
  misc_feature: Table A; Target 8328; HLA-B*51:01; AFP; ENSG00000081051; TAA
NAFLVAYTK

SEQ ID NO: 8329 - protein, 9 aa, Homo sapiens
  misc_feature: Table A; Target 8329; HLA-B*54:01; AFP; ENSG00000081051; TAA
NAFLVAYTK

SEQ ID NO: 8330 - protein, 10 aa, Homo sapiens
  misc_feature: Table A; Target 8330; HLA-A*68:01; AFP; ENSG00000081051; TAA
NAFLVAYTKK

SEQ ID NO: 8331 - protein, 10 aa, Homo sapiens
  misc_feature: Table A; Target 8331; HLA-B*27:02; AFP; ENSG00000081051; TAA
NAFLVAYTKK

SEQ ID NO: 8332 - protein, 9 aa, Homo sapiens
  misc_feature: Table A; Target 8332; HLA-A*11:01; AFP; ENSG00000081051; TAA
NAVECFQTK

SEQ ID NO: 8333 - protein, 9 aa, Homo sapiens
  misc_feature: Table A; Target 8333; HLA-A*33:03; AFP; ENSG00000081051; TAA
NAVECFQTK

SEQ ID NO: 8334 - protein, 9 aa, Homo sapiens
  misc_feature: Table A; Target 8334; HLA-B*27:02; AFP; ENSG00000081051; TAA
NAVECFQTK

SEQ ID NO: 8335 - protein, 9 aa, Homo sapiens
  misc_feature: Table A; Target 8335; HLA-B*35:01; AFP; ENSG00000081051; TAA
NAVECFQTK

SEQ ID NO: 8336 - protein, 9 aa, Homo sapiens
  misc_feature: Table A; Target 8336; HLA-B*51:01; AFP; ENSG00000081051; TAA
NAVECFQTK

SEQ ID NO: 8337 - protein, 9 aa, Homo sapiens
  misc_feature: Table A; Target 8337; HLA-B*54:01; AFP; ENSG00000081051; TAA
NAVECFQTK

SEQ ID NO: 8338 - protein, 9 aa, Homo sapiens
  misc_feature: Table A; Target 8338; HLA-C*04:01; AFP; ENSG00000081051; TAA
NAVECFQTK

SEQ ID NO: 8339 - protein, 9 aa, Homo sapiens
  misc_feature: Table A; Target 8339; HLA-C*07:01; AFP; ENSG00000081051; TAA
NAVECFQTK

SEQ ID NO: 8340 - protein, 9 aa, Homo sapiens
  misc_feature: Table A; Target 8340; HLA-C*12:03; AFP; ENSG00000081051; TAA
NAVECFQTK

SEQ ID NO: 8341 - protein, 8 aa, Homo sapiens
  misc_feature: Table A; Target 8341; HLA-B*13:02; AFP; ENSG00000081051; TAA
NEYGIASI

SEQ ID NO: 8342 - protein, 8 aa, Homo sapiens
  misc_feature: Table A; Target 8342; HLA-B*40:01; AFP; ENSG00000081051; TAA
NEYGIASI

SEQ ID NO: 8343 - protein, 8 aa, Homo sapiens
  misc_feature: Table A; Target 8343; HLA-B*40:02; AFP; ENSG00000081051; TAA
NEYGIASI

SEQ ID NO: 8344 - protein, 8 aa, Homo sapiens
  misc_feature: Table A; Target 8344; HLA-B*44:02; AFP; ENSG00000081051; TAA
NEYGIASI

SEQ ID NO: 8345 - protein, 8 aa, Homo sapiens
  misc_feature: Table A; Target 8345; HLA-B*44:03; AFP; ENSG00000081051; TAA
NEYGIASI

SEQ ID NO: 8346 - protein, 8 aa, Homo sapiens
  misc_feature: Table A; Target 8346; HLA-B*51:01; AFP; ENSG00000081051; TAA
NEYGIASI

SEQ ID NO: 8347 - protein, 8 aa, Homo sapiens
  misc_feature: Table A; Target 8347; HLA-C*12:03; AFP; ENSG00000081051; TAA
NEYGIASI

SEQ ID NO: 8348 - protein, 8 aa, Homo sapiens
  misc_feature: Table A; Target 8348; HLA-C*16:04; AFP; ENSG00000081051; TAA
NEYGIASI

SEQ ID NO: 8349 - protein, 9 aa, Homo sapiens
  misc_feature: Table A; Target 8349; HLA-A*68:02; AFP; ENSG00000081051; TAA
NEYGIASIL

SEQ ID NO: 8350 - protein, 9 aa, Homo sapiens
  misc_feature: Table A; Target 8350; HLA-B*15:03; AFP; ENSG00000081051; TAA
NEYGIASIL

SEQ ID NO: 8351 - protein, 9 aa, Homo sapiens
  misc_feature: Table A; Target 8351; HLA-B*27:05; AFP; ENSG00000081051; TAA
NEYGIASIL

SEQ ID NO: 8352 - protein, 9 aa, Homo sapiens
  misc_feature: Table A; Target 8352; HLA-B*38:01; AFP; ENSG00000081051; TAA
NEYGIASIL

SEQ ID NO: 8353 - protein, 9 aa, Homo sapiens
  misc_feature: Table A; Target 8353; HLA-B*46:01; AFP; ENSG00000081051; TAA
NEYGIASIL

SEQ ID NO: 8354 - protein, 9 aa, Homo sapiens
  misc_feature: Table A; Target 8354; HLA-C*01:02; AFP; ENSG00000081051; TAA
NEYGIASIL

SEQ ID NO: 8355 - protein, 9 aa, Homo sapiens
  misc_feature: Table A; Target 8355; HLA-C*03:03; AFP; ENSG00000081051; TAA
NEYGIASIL

SEQ ID NO: 8356 - protein, 9 aa, Homo sapiens
  misc_feature: Table A; Target 8356; HLA-C*03:04; AFP; ENSG00000081051; TAA
NEYGIASIL

SEQ ID NO: 8357 - protein, 9 aa, Homo sapiens
  misc_feature: Table A; Target 8357; HLA-C*06:02; AFP; ENSG00000081051; TAA
NEYGIASIL

SEQ ID NO: 8358 - protein, 9 aa, Homo sapiens
  misc_feature: Table A; Target 8358; HLA-C*07:04; AFP; ENSG00000081051; TAA
NEYGIASIL

SEQ ID NO: 8359 - protein, 9 aa, Homo sapiens
  misc_feature: Table A; Target 8359; HLA-C*16:02; AFP; ENSG00000081051; TAA
NEYGIASIL

SEQ ID NO: 8360 - protein, 10 aa, Homo sapiens
  misc_feature: Table A; Target 8360; HLA-A*23:01; AFP; ENSG00000081051; TAA
NFTEIQKLVL

SEQ ID NO: 8361 - protein, 10 aa, Homo sapiens
  misc_feature: Table A; Target 8361; HLA-A*24:02; AFP; ENSG00000081051; TAA
NFTEIQKLVL

SEQ ID NO: 8362 - protein, 8 aa, Homo sapiens
  misc_feature: Table A; Target 8362; HLA-C*16:02; AFP; ENSG00000081051; TAA
NFTESRTL

SEQ ID NO: 8363 - protein, 11 aa, Homo sapiens
  misc_feature: Table A; Target 8363; HLA-A*30:02; AFP; ENSG00000081051; TAA
NIFLASFVHEY

SEQ ID NO: 8364 - protein, 10 aa, Homo sapiens
  misc_feature: Table A; Target 8364; HLA-B*38:01; AFP; ENSG00000081051; TAA
NQFSSGEKNI

SEQ ID NO: 8365 - protein, 11 aa, Homo sapiens
  misc_feature: Table A; Target 8365; HLA-A*32:01; AFP; ENSG00000081051; TAA
NQFSSGEKNIF

SEQ ID NO: 8366 - protein, 11 aa, Homo sapiens
  misc_feature: Table A; Target 8366; HLA-B*15:01; AFP; ENSG00000081051; TAA
NQFSSGEKNIF

SEQ ID NO: 8367 - protein, 11 aa, Homo sapiens
  misc_feature: Table A; Target 8367; HLA-B*15:03; AFP; ENSG00000081051; TAA
NQFSSGEKNIF

SEQ ID NO: 8368 - protein, 11 aa, Homo sapiens
  misc_feature: Table A; Target 8368; HLA-B*27:05; AFP; ENSG00000081051; TAA
NQFSSGEKNIF

SEQ ID NO: 8369 - protein, 11 aa, Homo sapiens
  misc_feature: Table A; Target 8369; HLA-B*35:01; AFP; ENSG00000081051; TAA
NQFSSGEKNIF

SEQ ID NO: 8370 - protein, 11 aa, Homo sapiens
  misc_feature: Table A; Target 8370; HLA-B*39:01; AFP; ENSG00000081051; TAA
NQFSSGEKNIF

SEQ ID NO: 8371 - protein, 11 aa, Homo sapiens
  misc_feature: Table A; Target 8371; HLA-C*07:04; AFP; ENSG00000081051; TAA
NQFSSGEKNIF

SEQ ID NO: 8372 - protein, 10 aa, Homo sapiens
  misc_feature: Table A; Target 8372; HLA-A*02:04; AFP; ENSG00000081051; TAA
NQLPAFLEEL

SEQ ID NO: 8373 - protein, 10 aa, Homo sapiens
  misc_feature: Table A; Target 8373; HLA-C*04:01; AFP; ENSG00000081051; TAA
PEPVTSCEAY

SEQ ID NO: 8374 - protein, 8 aa, Homo sapiens
  misc_feature: Table A; Target 8374; HLA-A*24:02; AFP; ENSG00000081051; TAA
PFLYAPTI

SEQ ID NO: 8375 - protein, 9 aa, Homo sapiens
  misc_feature: Table A; Target 8375; HLA-A*23:01; AFP; ENSG00000081051; TAA
PFLYAPTIL

SEQ ID NO: 8376 - protein, 9 aa, Homo sapiens
  misc_feature: Table A; Target 8376; HLA-A*24:02; AFP; ENSG00000081051; TAA
PFLYAPTIL

SEQ ID NO: 8377 - protein, 9 aa, Homo sapiens
  misc_feature: Table A; Target 8377; HLA-A*02:03; AFP; ENSG00000081051; TAA
PLFQVPEPV

SEQ ID NO: 8378 - protein, 8 aa, Homo sapiens
  misc_feature: Table A; Target 8378; HLA-B*13:02; AFP; ENSG00000081051; TAA
PQLAVSVI

SEQ ID NO: 8379 - protein, 9 aa, Homo sapiens
  misc_feature: Table A; Target 8379; HLA-A*24:02; AFP; ENSG00000081051; TAA
PQLAVSVIL

SEQ ID NO: 8380 - protein, 10 aa, Homo sapiens
  misc_feature: Table A; Target 8380; HLA-B*27:02; AFP; ENSG00000081051; TAA
PQLAVSVILR

SEQ ID NO: 8381 - protein, 8 aa, Homo sapiens
  misc_feature: Table A; Target 8381; HLA-C*04:01; AFP; ENSG00000081051; TAA
PQLTSSEL

SEQ ID NO: 8382 - protein, 9 aa, Homo sapiens
  misc_feature: Table A; Target 8382; HLA-C*04:01; AFP; ENSG00000081051; TAA
PQLTSSELM

SEQ ID NO: 8383 - protein, 9 aa, Homo sapiens
  misc_feature: Table A; Target 8383; HLA-C*07:02; AFP; ENSG00000081051; TAA
PQLTSSELM

SEQ ID NO: 8384 - protein, 11 aa, Homo sapiens
  misc_feature: Table A; Target 8384; HLA-C*04:01; AFP; ENSG00000081051; TAA
PQLTSSELMAI

SEQ ID NO: 8385 - protein, 8 aa, Homo sapiens
  misc_feature: Table A; Target 8385; HLA-C*04:01; AFP; ENSG00000081051; TAA
PTPASIPL

SEQ ID NO: 8386 - protein, 8 aa, Homo sapiens
  misc_feature: Table A; Target 8386; HLA-C*07:02; AFP; ENSG00000081051; TAA
PTPASIPL

SEQ ID NO: 8387 - protein, 8 aa, Homo sapiens
  misc_feature: Table A; Target 8387; HLA-A*25:01; AFP; ENSG00000081051; TAA
QAITVTKL

SEQ ID NO: 8388 - protein, 8 aa, Homo sapiens
  misc_feature: Table A; Target 8388; HLA-B*07:02; AFP; ENSG00000081051; TAA
QAITVTKL

SEQ ID NO: 8389 - protein, 8 aa, Homo sapiens
  misc_feature: Table A; Target 8389; HLA-B*13:02; AFP; ENSG00000081051; TAA
QAITVTKL

SEQ ID NO: 8390 - protein, 8 aa, Homo sapiens
  misc_feature: Table A; Target 8390; HLA-B*35:01; AFP; ENSG00000081051; TAA
QAITVTKL

SEQ ID NO: 8391 - protein, 8 aa, Homo sapiens
  misc_feature: Table A; Target 8391; HLA-B*37:01; AFP; ENSG00000081051; TAA
QAITVTKL

SEQ ID NO: 8392 - protein, 8 aa, Homo sapiens
  misc_feature: Table A; Target 8392; HLA-B*39:01; AFP; ENSG00000081051; TAA
QAITVTKL

SEQ ID NO: 8393 - protein, 8 aa, Homo sapiens
  misc_feature: Table A; Target 8393; HLA-B*49:01; AFP; ENSG00000081051; TAA
QAITVTKL

SEQ ID NO: 8394 - protein, 8 aa, Homo sapiens
  misc_feature: Table A; Target 8394; HLA-B*55:01; AFP; ENSG00000081051; TAA
QAITVTKL

SEQ ID NO: 8395 - protein, 8 aa, Homo sapiens
  misc_feature: Table A; Target 8395; HLA-C*04:01; AFP; ENSG00000081051; TAA
QAITVTKL

SEQ ID NO: 8396 - protein, 8 aa, Homo sapiens
  misc_feature: Table A; Target 8396; HLA-C*07:04; AFP; ENSG00000081051; TAA
QAITVTKL

SEQ ID NO: 8397 - protein, 8 aa, Homo sapiens
  misc_feature: Table A; Target 8397; HLA-C*14:02; AFP; ENSG00000081051; TAA
QAITVTKL

SEQ ID NO: 8398 - protein, 8 aa, Homo sapiens
  misc_feature: Table A; Target 8398; HLA-C*16:04; AFP; ENSG00000081051; TAA
QAITVTKL

SEQ ID NO: 8399 - protein, 11 aa, Homo sapiens
  misc_feature: Table A; Target 8399; HLA-A*33:01; AFP; ENSG00000081051; TAA
QAITVTKLSQK

SEQ ID NO: 8400 - protein, 11 aa, Homo sapiens
  misc_feature: Table A; Target 8400; HLA-B*27:02; AFP; ENSG00000081051; TAA
QAITVTKLSQK

SEQ ID NO: 8401 - protein, 9 aa, Homo sapiens
  misc_feature: Table A; Target 8401; HLA-C*16:02; AFP; ENSG00000081051; TAA
QAQGVALQT

SEQ ID NO: 8402 - protein, 10 aa, Homo sapiens
  misc_feature: Table A; Target 8402; HLA-A*26:01; AFP; ENSG00000081051; TAA
QAQGVALQTM

SEQ ID NO: 8403 - protein, 10 aa, Homo sapiens
  misc_feature: Table A; Target 8403; HLA-A*68:01; AFP; ENSG00000081051; TAA
QAQGVALQTM

SEQ ID NO: 8404 - protein, 10 aa, Homo sapiens
  misc_feature: Table A; Target 8404; HLA-B*15:01; AFP; ENSG00000081051; TAA
QAQGVALQTM

SEQ ID NO: 8405 - protein, 10 aa, Homo sapiens
  misc_feature: Table A; Target 8405; HLA-B*38:01; AFP; ENSG00000081051; TAA
QAQGVALQTM

SEQ ID NO: 8406 - protein, 10 aa, Homo sapiens
  misc_feature: Table A; Target 8406; HLA-B*39:01; AFP; ENSG00000081051; TAA
QAQGVALQTM

SEQ ID NO: 8407 - protein, 10 aa, Homo sapiens
  misc_feature: Table A; Target 8407; HLA-B*40:02; AFP; ENSG00000081051; TAA
QAQGVALQTM

SEQ ID NO: 8408 - protein, 10 aa, Homo sapiens
  misc_feature: Table A; Target 8408; HLA-B*46:01; AFP; ENSG00000081051; TAA
QAQGVALQTM

SEQ ID NO: 8409 - protein, 10 aa, Homo sapiens
  misc_feature: Table A; Target 8409; HLA-B*55:01; AFP; ENSG00000081051; TAA
QAQGVALQTM

SEQ ID NO: 8410 - protein, 10 aa, Homo sapiens
  misc_feature: Table A; Target 8410; HLA-B*56:01; AFP; ENSG00000081051; TAA
QAQGVALQTM

SEQ ID NO: 8411 - protein, 10 aa, Homo sapiens
  misc_feature: Table A; Target 8411; HLA-C*01:02; AFP; ENSG00000081051; TAA
QAQGVALQTM

SEQ ID NO: 8412 - protein, 10 aa, Homo sapiens
  misc_feature: Table A; Target 8412; HLA-C*05:01; AFP; ENSG00000081051; TAA
QAQGVALQTM

SEQ ID NO: 8413 - protein, 10 aa, Homo sapiens
  misc_feature: Table A; Target 8413; HLA-C*07:01; AFP; ENSG00000081051; TAA
QAQGVALQTM

SEQ ID NO: 8414 - protein, 10 aa, Homo sapiens
  misc_feature: Table A; Target 8414; HLA-C*07:04; AFP; ENSG00000081051; TAA
QAQGVALQTM

SEQ ID NO: 8415 - protein, 10 aa, Homo sapiens
  misc_feature: Table A; Target 8415; HLA-C*12:03; AFP; ENSG00000081051; TAA
QAQGVALQTM

SEQ ID NO: 8416 - protein, 10 aa, Homo sapiens
  misc_feature: Table A; Target 8416; HLA-C*14:02; AFP; ENSG00000081051; TAA
QAQGVALQTM

SEQ ID NO: 8417 - protein, 10 aa, Homo sapiens
  misc_feature: Table A; Target 8417; HLA-C*16:04; AFP; ENSG00000081051; TAA
QAQGVALQTM

SEQ ID NO: 8418 - protein, 11 aa, Homo sapiens
  misc_feature: Table A; Target 8418; HLA-C*07:06; AFP; ENSG00000081051; TAA
QAQGVALQTMK

SEQ ID NO: 8419 - protein, 9 aa, Homo sapiens
  misc_feature: Table A; Target 8419; HLA-C*07:01; AFP; ENSG00000081051; TAA
QDGEKIMSY

SEQ ID NO: 8420 - protein, 9 aa, Homo sapiens
  misc_feature: Table A; Target 8420; HLA-C*16:02; AFP; ENSG00000081051; TAA
QDGEKIMSY

SEQ ID NO: 8421 - protein, 9 aa, Homo sapiens
  misc_feature: Table A; Target 8421; HLA-C*16:04; AFP; ENSG00000081051; TAA
QDGEKIMSY

SEQ ID NO: 8422 - protein, 10 aa, Homo sapiens
  misc_feature: Table A; Target 8422; HLA-B*27:02; AFP; ENSG00000081051; TAA
QDKGEEELQK

SEQ ID NO: 8423 - protein, 11 aa, Homo sapiens
  misc_feature: Table A; Target 8423; HLA-A*30:02; AFP; ENSG00000081051; TAA
QDKGEEELQKY

SEQ ID NO: 8424 - protein, 8 aa, Homo sapiens
  misc_feature: Table A; Target 8424; HLA-B*40:02; AFP; ENSG00000081051; TAA
QDTLSNKI

SEQ ID NO: 8425 - protein, 8 aa, Homo sapiens
  misc_feature: Table A; Target 8425; HLA-C*06:02; AFP; ENSG00000081051; TAA
QDTLSNKI

SEQ ID NO: 8426 - protein, 8 aa, Homo sapiens
  misc_feature: Table A; Target 8426; HLA-C*07:01; AFP; ENSG00000081051; TAA
QDTLSNKI

SEQ ID NO: 8427 - protein, 8 aa, Homo sapiens
  misc_feature: Table A; Target 8427; HLA-C*07:04; AFP; ENSG00000081051; TAA
QDTLSNKI

SEQ ID NO: 8428 - protein, 8 aa, Homo sapiens
  misc_feature: Table A; Target 8428; HLA-C*16:02; AFP; ENSG00000081051; TAA
QEATYKEV

SEQ ID NO: 8429 - protein, 10 aa, Homo sapiens
  misc_feature: Table A; Target 8429; HLA-B*27:02; AFP; ENSG00000081051; TAA
QEATYKEVSK

SEQ ID NO: 8430 - protein, 10 aa, Homo sapiens
  misc_feature: Table A; Target 8430; HLA-C*06:02; AFP; ENSG00000081051; TAA
QEATYKEVSK

SEQ ID NO: 8431 - protein, 11 aa, Homo sapiens
  misc_feature: Table A; Target 8431; HLA-B*40:01; AFP; ENSG00000081051; TAA
QEATYKEVSKM

SEQ ID NO: 8432 - protein, 8 aa, Homo sapiens
  misc_feature: Table A; Target 8432; HLA-B*13:02; AFP; ENSG00000081051; TAA
QEFLINLV

SEQ ID NO: 8433 - protein, 8 aa, Homo sapiens
  misc_feature: Table A; Target 8433; HLA-B*40:02; AFP; ENSG00000081051; TAA
QEFLINLV

SEQ ID NO: 8434 - protein, 8 aa, Homo sapiens
  misc_feature: Table A; Target 8434; HLA-B*44:02; AFP; ENSG00000081051; TAA
QEFLINLV

SEQ ID NO: 8435 - protein, 8 aa, Homo sapiens
  misc_feature: Table A; Target 8435; HLA-B*51:01; AFP; ENSG00000081051; TAA
QEFLINLV

SEQ ID NO: 8436 - protein, 9 aa, Homo sapiens
  misc_feature: Table A; Target 8436; HLA-B*18:01; AFP; ENSG00000081051; TAA
QEFLINLVK

SEQ ID NO: 8437 - protein, 9 aa, Homo sapiens
  misc_feature: Table A; Target 8437; HLA-B*44:02; AFP; ENSG00000081051; TAA
QEFLINLVK

SEQ ID NO: 8438 - protein, 9 aa, Homo sapiens
  misc_feature: Table A; Target 8438; HLA-B*44:03; AFP; ENSG00000081051; TAA
QEFLINLVK

SEQ ID NO: 8439 - protein, 9 aa, Homo sapiens
  misc_feature: Table A; Target 8439; HLA-B*49:01; AFP; ENSG00000081051; TAA
QEFLINLVK

SEQ ID NO: 8440 - protein, 10 aa, Homo sapiens
  misc_feature: Table A; Target 8440; HLA-B*44:02; AFP; ENSG00000081051; TAA
QEFLINLVKQ

SEQ ID NO: 8441 - protein, 10 aa, Homo sapiens
  misc_feature: Table A; Target 8441; HLA-B*44:03; AFP; ENSG00000081051; TAA
QEFLINLVKQ

SEQ ID NO: 8442 - protein, 11 aa, Homo sapiens
  misc_feature: Table A; Target 8442; HLA-B*44:02; AFP; ENSG00000081051; TAA
QEFLINLVKQK

SEQ ID NO: 8443 - protein, 11 aa, Homo sapiens
  misc_feature: Table A; Target 8443; HLA-B*44:03; AFP; ENSG00000081051; TAA
QEFLINLVKQK

SEQ ID NO: 8444 - protein, 8 aa, Homo sapiens
  misc_feature: Table A; Target 8444; HLA-B*18:01; AFP; ENSG00000081051; TAA
QELLEKCF

SEQ ID NO: 8445 - protein, 8 aa, Homo sapiens
  misc_feature: Table A; Target 8445; HLA-B*44:03; AFP; ENSG00000081051; TAA
QELLEKCF

SEQ ID NO: 8446 - protein, 8 aa, Homo sapiens
  misc_feature: Table A; Target 8446; HLA-B*27:02; AFP; ENSG00000081051; TAA
QESQALAK

SEQ ID NO: 8447 - protein, 9 aa, Homo sapiens
  misc_feature: Table A; Target 8447; HLA-A*31:01; AFP; ENSG00000081051; TAA
QESQALAKR

SEQ ID NO: 8448 - protein, 9 aa, Homo sapiens
  misc_feature: Table A; Target 8448; HLA-A*68:01; AFP; ENSG00000081051; TAA
QESQALAKR

SEQ ID NO: 8449 - protein, 9 aa, Homo sapiens
  misc_feature: Table A; Target 8449; HLA-B*27:02; AFP; ENSG00000081051; TAA
QESQALAKR

SEQ ID NO: 8450 - protein, 9 aa, Homo sapiens
  misc_feature: Table A; Target 8450; HLA-B*49:01; AFP; ENSG00000081051; TAA
QESQALAKR

SEQ ID NO: 8451 - protein, 9 aa, Homo sapiens
  misc_feature: Table A; Target 8451; HLA-B*15:01; AFP; ENSG00000081051; TAA
QGQEQEVCF

SEQ ID NO: 8452 - protein, 9 aa, Homo sapiens
  misc_feature: Table A; Target 8452; HLA-B*35:01; AFP; ENSG00000081051; TAA
QGQEQEVCF

SEQ ID NO: 8453 - protein, 9 aa, Homo sapiens
  misc_feature: Table A; Target 8453; HLA-B*38:01; AFP; ENSG00000081051; TAA
QGQEQEVCF

SEQ ID NO: 8454 - protein, 9 aa, Homo sapiens
  misc_feature: Table A; Target 8454; HLA-B*55:01; AFP; ENSG00000081051; TAA
QGQEQEVCF

SEQ ID NO: 8455 - protein, 9 aa, Homo sapiens
  misc_feature: Table A; Target 8455; HLA-C*04:01; AFP; ENSG00000081051; TAA
QGQEQEVCF

SEQ ID NO: 8456 - protein, 9 aa, Homo sapiens
  misc_feature: Table A; Target 8456; HLA-C*07:04; AFP; ENSG00000081051; TAA
QGQEQEVCF

SEQ ID NO: 8457 - protein, 8 aa, Homo sapiens
  misc_feature: Table A; Target 8457; HLA-B*08:01; AFP; ENSG00000081051; TAA
QGVALQTM

SEQ ID NO: 8458 - protein, 8 aa, Homo sapiens
  misc_feature: Table A; Target 8458; HLA-B*18:01; AFP; ENSG00000081051; TAA
QGVALQTM

SEQ ID NO: 8459 - protein, 8 aa, Homo sapiens
  misc_feature: Table A; Target 8459; HLA-B*40:02; AFP; ENSG00000081051; TAA
QGVALQTM

SEQ ID NO: 8460 - protein, 8 aa, Homo sapiens
  misc_feature: Table A; Target 8460; HLA-C*04:01; AFP; ENSG00000081051; TAA
QGVALQTM

SEQ ID NO: 8461 - protein, 8 aa, Homo sapiens
  misc_feature: Table A; Target 8461; HLA-C*07:01; AFP; ENSG00000081051; TAA
QGVALQTM

SEQ ID NO: 8462 - protein, 9 aa, Homo sapiens
  misc_feature: Table A; Target 8462; HLA-A*11:01; AFP; ENSG00000081051; TAA
QGVALQTMK

SEQ ID NO: 8463 - protein, 9 aa, Homo sapiens
  misc_feature: Table A; Target 8463; HLA-C*06:02; AFP; ENSG00000081051; TAA
QGVALQTMK

SEQ ID NO: 8464 - protein, 9 aa, Homo sapiens
  misc_feature: Table A; Target 8464; HLA-C*07:02; AFP; ENSG00000081051; TAA
QGVALQTMK

SEQ ID NO: 8465 - protein, 10 aa, Homo sapiens
  misc_feature: Table A; Target 8465; HLA-C*07:01; AFP; ENSG00000081051; TAA
QGVALQTMKQ

SEQ ID NO: 8466 - protein, 10 aa, Homo sapiens
  misc_feature: Table A; Target 8466; HLA-C*07:02; AFP; ENSG00000081051; TAA
QGVALQTMKQ

SEQ ID NO: 8467 - protein, 8 aa, Homo sapiens
  misc_feature: Table A; Target 8467; HLA-C*04:01; AFP; ENSG00000081051; TAA
QKFTKVNF

SEQ ID NO: 8468 - protein, 8 aa, Homo sapiens
  misc_feature: Table A; Target 8468; HLA-C*07:01; AFP; ENSG00000081051; TAA
QKFTKVNF

SEQ ID NO: 8469 - protein, 10 aa, Homo sapiens
  misc_feature: Table A; Target 8469; HLA-B*38:01; AFP; ENSG00000081051; TAA
QKYIQESQAL

SEQ ID NO: 8470 - protein, 10 aa, Homo sapiens
  misc_feature: Table A; Target 8470; HLA-C*06:02; AFP; ENSG00000081051; TAA
QKYIQESQAL

SEQ ID NO: 8471 - protein, 10 aa, Homo sapiens
  misc_feature: Table A; Target 8471; HLA-C*07:01; AFP; ENSG00000081051; TAA
QKYIQESQAL

SEQ ID NO: 8472 - protein, 9 aa, Homo sapiens
  misc_feature: Table A; Target 8472; HLA-A*03:01; AFP; ENSG00000081051; TAA
QLAVSVILR

SEQ ID NO: 8473 - protein, 9 aa, Homo sapiens
  misc_feature: Table A; Target 8473; HLA-A*31:01; AFP; ENSG00000081051; TAA
QLAVSVILR

SEQ ID NO: 8474 - protein, 9 aa, Homo sapiens
  misc_feature: Table A; Target 8474; HLA-A*33:01; AFP; ENSG00000081051; TAA
QLAVSVILR

SEQ ID NO: 8475 - protein, 9 aa, Homo sapiens
  misc_feature: Table A; Target 8475; HLA-A*33:03; AFP; ENSG00000081051; TAA
QLAVSVILR

SEQ ID NO: 8476 - protein, 10 aa, Homo sapiens
  misc_feature: Table A; Target 8476; HLA-A*02:04; AFP; ENSG00000081051; TAA
QLAVSVILRV

SEQ ID NO: 8477 - protein, 9 aa, Homo sapiens
  misc_feature: Table A; Target 8477; HLA-A*02:07; AFP; ENSG00000081051; TAA
QLEAVIADF

SEQ ID NO: 8478 - protein, 9 aa, Homo sapiens
  misc_feature: Table A; Target 8478; HLA-B*15:01; AFP; ENSG00000081051; TAA
QLEAVIADF

SEQ ID NO: 8479 - protein, 9 aa, Homo sapiens
  misc_feature: Table A; Target 8479; HLA-B*18:01; AFP; ENSG00000081051; TAA
QLEAVIADF

SEQ ID NO: 8480 - protein, 9 aa, Homo sapiens
  misc_feature: Table A; Target 8480; HLA-B*35:01; AFP; ENSG00000081051; TAA
QLEAVIADF

SEQ ID NO: 8481 - protein, 9 aa, Homo sapiens
  misc_feature: Table A; Target 8481; HLA-C*04:01; AFP; ENSG00000081051; TAA
QLEAVIADF

SEQ ID NO: 8482 - protein, 9 aa, Homo sapiens
  misc_feature: Table A; Target 8482; HLA-C*07:04; AFP; ENSG00000081051; TAA
QLEAVIADF

SEQ ID NO: 8483 - protein, 9 aa, Homo sapiens
  misc_feature: Table A; Target 8483; HLA-C*12:03; AFP; ENSG00000081051; TAA
QLEAVIADF

SEQ ID NO: 8484 - protein, 9 aa, Homo sapiens
  misc_feature: Table A; Target 8484; HLA-A*68:02; AFP; ENSG00000081051; TAA
QLPAFLEEL

SEQ ID NO: 8485 - protein, 9 aa, Homo sapiens
  misc_feature: Table A; Target 8485; HLA-B*13:02; AFP; ENSG00000081051; TAA
QLPAFLEEL

SEQ ID NO: 8486 - protein, 9 aa, Homo sapiens
  misc_feature: Table A; Target 8486; HLA-B*46:01; AFP; ENSG00000081051; TAA
QLPAFLEEL

SEQ ID NO: 8487 - protein, 9 aa, Homo sapiens
  misc_feature: Table A; Target 8487; HLA-B*55:01; AFP; ENSG00000081051; TAA
QLPAFLEEL

SEQ ID NO: 8488 - protein, 9 aa, Homo sapiens
  misc_feature: Table A; Target 8488; HLA-B*55:01; AFP; ENSG00000081051; TAA
QLSEDKLLA

SEQ ID NO: 8489 - protein, 10 aa, Homo sapiens
  misc_feature: Table A; Target 8489; HLA-A*02:03; AFP; ENSG00000081051; TAA
QLSEDKLLAC

SEQ ID NO: 8490 - protein, 10 aa, Homo sapiens
  misc_feature: Table A; Target 8490; HLA-A*02:01; AFP; ENSG00000081051; TAA
QLTSSELMAI

SEQ ID NO: 8491 - protein, 10 aa, Homo sapiens
  misc_feature: Table A; Target 8491; HLA-A*02:03; AFP; ENSG00000081051; TAA
QLTSSELMAI

SEQ ID NO: 8492 - protein, 8 aa, Homo sapiens
  misc_feature: Table A; Target 8492; HLA-B*18:01; AFP; ENSG00000081051; TAA
QNAFLVAY

SEQ ID NO: 8493 - protein, 8 aa, Homo sapiens
  misc_feature: Table A; Target 8493; HLA-C*07:01; AFP; ENSG00000081051; TAA
QNAFLVAY

SEQ ID NO: 8494 - protein, 10 aa, Homo sapiens
  misc_feature: Table A; Target 8494; HLA-A*03:02; AFP; ENSG00000081051; TAA
QNAFLVAYTK

SEQ ID NO: 8495 - protein, 9 aa, Homo sapiens
  misc_feature: Table A; Target 8495; HLA-B*27:05; AFP; ENSG00000081051; TAA
QQDTLSNKI

SEQ ID NO: 8496 - protein, 9 aa, Homo sapiens
  misc_feature: Table A; Target 8496; HLA-A*32:01; AFP; ENSG00000081051; TAA
QTKAATVTK

SEQ ID NO: 8497 - protein, 9 aa, Homo sapiens
  misc_feature: Table A; Target 8497; HLA-B*07:02; AFP; ENSG00000081051; TAA
QTKAATVTK

SEQ ID NO: 8498 - protein, 9 aa, Homo sapiens
  misc_feature: Table A; Target 8498; HLA-B*40:02; AFP; ENSG00000081051; TAA
QTKAATVTK

SEQ ID NO: 8499 - protein, 9 aa, Homo sapiens
  misc_feature: Table A; Target 8499; HLA-B*46:01; AFP; ENSG00000081051; TAA
QTKAATVTK

SEQ ID NO: 8500 - protein, 9 aa, Homo sapiens
  misc_feature: Table A; Target 8500; HLA-B*57:01; AFP; ENSG00000081051; TAA
QTKAATVTK

SEQ ID NO: 8501 - protein, 9 aa, Homo sapiens
  misc_feature: Table A; Target 8501; HLA-C*02:02; AFP; ENSG00000081051; TAA
QTKAATVTK

SEQ ID NO: 8502 - protein, 9 aa, Homo sapiens
  misc_feature: Table A; Target 8502; HLA-C*04:01; AFP; ENSG00000081051; TAA
QTKAATVTK

SEQ ID NO: 8503 - protein, 9 aa, Homo sapiens
  misc_feature: Table A; Target 8503; HLA-C*06:02; AFP; ENSG00000081051; TAA
QTKAATVTK

SEQ ID NO: 8504 - protein, 9 aa, Homo sapiens
  misc_feature: Table A; Target 8504; HLA-C*07:01; AFP; ENSG00000081051; TAA
QTKAATVTK

SEQ ID NO: 8505 - protein, 9 aa, Homo sapiens
  misc_feature: Table A; Target 8505; HLA-C*12:03; AFP; ENSG00000081051; TAA
QTKAATVTK

SEQ ID NO: 8506 - protein, 11 aa, Homo sapiens
  misc_feature: Table A; Target 8506; HLA-A*31:01; AFP; ENSG00000081051; TAA
QTKAATVTKEL

SEQ ID NO: 8507 - protein, 11 aa, Homo sapiens
  misc_feature: Table A; Target 8507; HLA-B*40:02; AFP; ENSG00000081051; TAA
QTKAATVTKEL

SEQ ID NO: 8508 - protein, 11 aa, Homo sapiens
  misc_feature: Table A; Target 8508; HLA-C*06:02; AFP; ENSG00000081051; TAA
QTKAATVTKEL

SEQ ID NO: 8509 - protein, 11 aa, Homo sapiens
  misc_feature: Table A; Target 8509; HLA-C*07:02; AFP; ENSG00000081051; TAA
QTKAATVTKEL

SEQ ID NO: 8510 - protein, 9 aa, Homo sapiens
  misc_feature: Table A; Target 8510; HLA-A*68:02; AFP; ENSG00000081051; TAA
QTMKQEFLI

SEQ ID NO: 8511 - protein, 9 aa, Homo sapiens
  misc_feature: Table A; Target 8511; HLA-B*13:02; AFP; ENSG00000081051; TAA
QTMKQEFLI

SEQ ID NO: 8512 - protein, 11 aa, Homo sapiens
  misc_feature: Table A; Target 8512; HLA-A*68:02; AFP; ENSG00000081051; TAA
QTMKQEFLINL

SEQ ID NO: 8513 - protein, 9 aa, Homo sapiens
  misc_feature: Table A; Target 8513; HLA-A*02:03; AFP; ENSG00000081051; TAA
QVPEPVTSC

SEQ ID NO: 8514 - protein, 9 aa, Homo sapiens
  misc_feature: Table A; Target 8514; HLA-A*26:01; AFP; ENSG00000081051; TAA
QVPEPVTSC

SEQ ID NO: 8515 - protein, 9 aa, Homo sapiens
  misc_feature: Table A; Target 8515; HLA-B*46:01; AFP; ENSG00000081051; TAA
QVPEPVTSC

SEQ ID NO: 8516 - protein, 9 aa, Homo sapiens
  misc_feature: Table A; Target 8516; HLA-B*51:01; AFP; ENSG00000081051; TAA
QVPEPVTSC

SEQ ID NO: 8517 - protein, 9 aa, Homo sapiens
  misc_feature: Table A; Target 8517; HLA-B*55:01; AFP; ENSG00000081051; TAA
QVPEPVTSC

SEQ ID NO: 8518 - protein, 9 aa, Homo sapiens
  misc_feature: Table A; Target 8518; HLA-B*56:01; AFP; ENSG00000081051; TAA
QVPEPVTSC

SEQ ID NO: 8519 - protein, 10 aa, Homo sapiens
  misc_feature: Table A; Target 8519; HLA-B*40:02; AFP; ENSG00000081051; TAA
RESSLLNQHA

SEQ ID NO: 8520 - protein, 9 aa, Homo sapiens
  misc_feature: Table A; Target 8520; HLA-B*44:02; AFP; ENSG00000081051; TAA
RETFMNKFI

SEQ ID NO: 8521 - protein, 9 aa, Homo sapiens
  misc_feature: Table A; Target 8521; HLA-B*44:03; AFP; ENSG00000081051; TAA
RETFMNKFI

SEQ ID NO: 8522 - protein, 11 aa, Homo sapiens
  misc_feature: Table A; Target 8522; HLA-A*23:01; AFP; ENSG00000081051; TAA
RFLGDRDFNQF

SEQ ID NO: 8523 - protein, 9 aa, Homo sapiens
  misc_feature: Table A; Target 8523; HLA-A*02:07; AFP; ENSG00000081051; TAA
RHPQLAVSV

SEQ ID NO: 8524 - protein, 9 aa, Homo sapiens
  misc_feature: Table A; Target 8524; HLA-C*01:02; AFP; ENSG00000081051; TAA
RHPQLAVSV

SEQ ID NO: 8525 - protein, 9 aa, Homo sapiens
  misc_feature: Table A; Target 8525; HLA-A*31:01; AFP; ENSG00000081051; TAA
RSCGLFQKL

SEQ ID NO: 8526 - protein, 9 aa, Homo sapiens
  misc_feature: Table A; Target 8526; HLA-B*57:01; AFP; ENSG00000081051; TAA
RSCGLFQKL

SEQ ID NO: 8527 - protein, 9 aa, Homo sapiens
  misc_feature: Table A; Target 8527; HLA-C*06:02; AFP; ENSG00000081051; TAA
RSCGLFQKL

SEQ ID NO: 8528 - protein, 8 aa, Homo sapiens
  misc_feature: Table A; Target 8528; HLA-B*40:02; AFP; ENSG00000081051; TAA
RTFQAITV

SEQ ID NO: 8529 - protein, 8 aa, Homo sapiens
  misc_feature: Table A; Target 8529; HLA-B*58:01; AFP; ENSG00000081051; TAA
RTFQAITV

SEQ ID NO: 8530 - protein, 9 aa, Homo sapiens
  misc_feature: Table A; Target 8530; HLA-B*57:01; AFP; ENSG00000081051; TAA
RTFQAITVT

SEQ ID NO: 8531 - protein, 10 aa, Homo sapiens
  misc_feature: Table A; Target 8531; HLA-A*68:01; AFP; ENSG00000081051; TAA
RTFQAITVTK

SEQ ID NO: 8532 - protein, 10 aa, Homo sapiens
  misc_feature: Table A; Target 8532; HLA-A*68:02; AFP; ENSG00000081051; TAA
RTFQAITVTK

SEQ ID NO: 8533 - protein, 10 aa, Homo sapiens
  misc_feature: Table A; Target 8533; HLA-B*58:01; AFP; ENSG00000081051; TAA
RTFQAITVTK

SEQ ID NO: 8534 - protein, 10 aa, Homo sapiens
  misc_feature: Table A; Target 8534; HLA-C*07:06; AFP; ENSG00000081051; TAA
RTFQAITVTK

SEQ ID NO: 8535 - protein, 11 aa, Homo sapiens
  misc_feature: Table A; Target 8535; HLA-A*02:04; AFP; ENSG00000081051; TAA
RTFQAITVTKL

SEQ ID NO: 8536 - protein, 11 aa, Homo sapiens
  misc_feature: Table A; Target 8536; HLA-A*31:01; AFP; ENSG00000081051; TAA
RTFQAITVTKL

SEQ ID NO: 8537 - protein, 11 aa, Homo sapiens
  misc_feature: Table A; Target 8537; HLA-A*68:02; AFP; ENSG00000081051; TAA
RTFQAITVTKL

SEQ ID NO: 8538 - protein, 8 aa, Homo sapiens
  misc_feature: Table A; Target 8538; HLA-A*32:01; AFP; ENSG00000081051; TAA
RTLHRNEY

SEQ ID NO: 8539 - protein, 8 aa, Homo sapiens
  misc_feature: Table A; Target 8539; HLA-C*16:01; AFP; ENSG00000081051; TAA
RTLHRNEY

SEQ ID NO: 8540 - protein, 9 aa, Homo sapiens
  misc_feature: Table A; Target 8540; HLA-B*58:01; AFP; ENSG00000081051; TAA
RVAKGYQEL

SEQ ID NO: 8541 - protein, 9 aa, Homo sapiens
  misc_feature: Table A; Target 8541; HLA-A*24:02; AFP; ENSG00000081051; TAA
RYDKIIPSC

SEQ ID NO: 8542 - protein, 8 aa, Homo sapiens
  misc_feature: Table A; Target 8542; HLA-B*49:01; AFP; ENSG00000081051; TAA
SEDKLLAC

SEQ ID NO: 8543 - protein, 9 aa, Homo sapiens
  misc_feature: Table A; Target 8543; HLA-B*40:02; AFP; ENSG00000081051; TAA
SEDKLLACG

SEQ ID NO: 8544 - protein, 9 aa, Homo sapiens
  misc_feature: Table A; Target 8544; HLA-B*49:01; AFP; ENSG00000081051; TAA
SEDKLLACG

SEQ ID NO: 8545 - protein, 9 aa, Homo sapiens
  misc_feature: Table A; Target 8545; HLA-B*44:02; AFP; ENSG00000081051; TAA
SEEGRHNCF

SEQ ID NO: 8546 - protein, 9 aa, Homo sapiens
  misc_feature: Table A; Target 8546; HLA-B*44:03; AFP; ENSG00000081051; TAA
SEEGRHNCF

SEQ ID NO: 8547 - protein, 8 aa, Homo sapiens
  misc_feature: Table A; Target 8547; HLA-B*27:02; AFP; ENSG00000081051; TAA
SELMAITR

SEQ ID NO: 8548 - protein, 8 aa, Homo sapiens
  misc_feature: Table A; Target 8548; HLA-B*27:05; AFP; ENSG00000081051; TAA
SELMAITR

SEQ ID NO: 8549 - protein, 8 aa, Homo sapiens
  misc_feature: Table A; Target 8549; HLA-B*40:02; AFP; ENSG00000081051; TAA
SELMAITR

SEQ ID NO: 8550 - protein, 8 aa, Homo sapiens
  misc_feature: Table A; Target 8550; HLA-C*07:04; AFP; ENSG00000081051; TAA
SELMAITR

SEQ ID NO: 8551 - protein, 9 aa, Homo sapiens
  misc_feature: Table A; Target 8551; HLA-A*11:01; AFP; ENSG00000081051; TAA
SELMAITRK

SEQ ID NO: 8552 - protein, 9 aa, Homo sapiens
  misc_feature: Table A; Target 8552; HLA-B*27:05; AFP; ENSG00000081051; TAA
SELMAITRK

SEQ ID NO: 8553 - protein, 9 aa, Homo sapiens
  misc_feature: Table A; Target 8553; HLA-B*37:01; AFP; ENSG00000081051; TAA
SELMAITRK

SEQ ID NO: 8554 - protein, 9 aa, Homo sapiens
  misc_feature: Table A; Target 8554; HLA-B*40:01; AFP; ENSG00000081051; TAA
SELMAITRK

SEQ ID NO: 8555 - protein, 9 aa, Homo sapiens
  misc_feature: Table A; Target 8555; HLA-B*40:02; AFP; ENSG00000081051; TAA
SELMAITRK

SEQ ID NO: 8556 - protein, 9 aa, Homo sapiens
  misc_feature: Table A; Target 8556; HLA-B*44:02; AFP; ENSG00000081051; TAA
SELMAITRK

SEQ ID NO: 8557 - protein, 9 aa, Homo sapiens
  misc_feature: Table A; Target 8557; HLA-B*44:03; AFP; ENSG00000081051; TAA
SELMAITRK

SEQ ID NO: 8558 - protein, 9 aa, Homo sapiens
  misc_feature: Table A; Target 8558; HLA-B*49:01; AFP; ENSG00000081051; TAA
SELMAITRK

SEQ ID NO: 8559 - protein, 9 aa, Homo sapiens
  misc_feature: Table A; Target 8559; HLA-C*04:01; AFP; ENSG00000081051; TAA
SELMAITRK

SEQ ID NO: 8560 - protein, 10 aa, Homo sapiens
  misc_feature: Table A; Target 8560; HLA-A*30:01; AFP; ENSG00000081051; TAA
SELMAITRKM

SEQ ID NO: 8561 - protein, 9 aa, Homo sapiens
  misc_feature: Table A; Target 8561; HLA-B*13:02; AFP; ENSG00000081051; TAA
SKTRAALGV

SEQ ID NO: 8562 - protein, 8 aa, Homo sapiens
  misc_feature: Table A; Target 8562; HLA-A*02:03; AFP; ENSG00000081051; TAA
SLADLATI

SEQ ID NO: 8563 - protein, 9 aa, Homo sapiens
  misc_feature: Table A; Target 8563; HLA-A*02:03; AFP; ENSG00000081051; TAA
SLADLATIF

SEQ ID NO: 8564 - protein, 9 aa, Homo sapiens
  misc_feature: Table A; Target 8564; HLA-A*02:04; AFP; ENSG00000081051; TAA
SLADLATIF

SEQ ID NO: 8565 - protein, 9 aa, Homo sapiens
  misc_feature: Table A; Target 8565; HLA-A*30:01; AFP; ENSG00000081051; TAA
SLADLATIF

SEQ ID NO: 8566 - protein, 9 aa, Homo sapiens
  misc_feature: Table A; Target 8566; HLA-A*30:02; AFP; ENSG00000081051; TAA
SLADLATIF

SEQ ID NO: 8567 - protein, 9 aa, Homo sapiens
  misc_feature: Table A; Target 8567; HLA-B*18:01; AFP; ENSG00000081051; TAA
SLADLATIF

SEQ ID NO: 8568 - protein, 9 aa, Homo sapiens
  misc_feature: Table A; Target 8568; HLA-B*27:02; AFP; ENSG00000081051; TAA
SLADLATIF

SEQ ID NO: 8569 - protein, 9 aa, Homo sapiens
  misc_feature: Table A; Target 8569; HLA-B*35:03; AFP; ENSG00000081051; TAA
SLADLATIF

SEQ ID NO: 8570 - protein, 9 aa, Homo sapiens
  misc_feature: Table A; Target 8570; HLA-B*37:01; AFP; ENSG00000081051; TAA
SLADLATIF

SEQ ID NO: 8571 - protein, 9 aa, Homo sapiens
  misc_feature: Table A; Target 8571; HLA-B*38:01; AFP; ENSG00000081051; TAA
SLADLATIF

SEQ ID NO: 8572 - protein, 9 aa, Homo sapiens
  misc_feature: Table A; Target 8572; HLA-B*58:01; AFP; ENSG00000081051; TAA
SLADLATIF

SEQ ID NO: 8573 - protein, 9 aa, Homo sapiens
  misc_feature: Table A; Target 8573; HLA-C*14:02; AFP; ENSG00000081051; TAA
SLADLATIF

SEQ ID NO: 8574 - protein, 9 aa, Homo sapiens
  misc_feature: Table A; Target 8574; HLA-C*16:01; AFP; ENSG00000081051; TAA
SLADLATIF

SEQ ID NO: 8575 - protein, 9 aa, Homo sapiens
  misc_feature: Table A; Target 8575; HLA-C*16:04; AFP; ENSG00000081051; TAA
SLADLATIF

SEQ ID NO: 8576 - protein, 10 aa, Homo sapiens
  misc_feature: Table A; Target 8576; HLA-A*02:03; AFP; ENSG00000081051; TAA
SLADLATIFF

SEQ ID NO: 8577 - protein, 10 aa, Homo sapiens
  misc_feature: Table A; Target 8577; HLA-A*02:07; AFP; ENSG00000081051; TAA
SLADLATIFF

SEQ ID NO: 8578 - protein, 10 aa, Homo sapiens
  misc_feature: Table A; Target 8578; HLA-A*25:01; AFP; ENSG00000081051; TAA
SLADLATIFF

SEQ ID NO: 8579 - protein, 10 aa, Homo sapiens
  misc_feature: Table A; Target 8579; HLA-A*26:01; AFP; ENSG00000081051; TAA
SLADLATIFF

SEQ ID NO: 8580 - protein, 10 aa, Homo sapiens
  misc_feature: Table A; Target 8580; HLA-A*29:02; AFP; ENSG00000081051; TAA
SLADLATIFF

SEQ ID NO: 8581 - protein, 10 aa, Homo sapiens
  misc_feature: Table A; Target 8581; HLA-A*68:02; AFP; ENSG00000081051; TAA
SLADLATIFF

SEQ ID NO: 8582 - protein, 11 aa, Homo sapiens
  misc_feature: Table A; Target 8582; HLA-A*02:03; AFP; ENSG00000081051; TAA
SLADLATIFFA

SEQ ID NO: 8583 - protein, 11 aa, Homo sapiens
  misc_feature: Table A; Target 8583; HLA-B*13:02; AFP; ENSG00000081051; TAA
SLADLATIFFA

SEQ ID NO: 8584 - protein, 9 aa, Homo sapiens
  misc_feature: Table A; Target 8584; HLA-A*02:01; AFP; ENSG00000081051; TAA
SLLNQHACA

SEQ ID NO: 8585 - protein, 10 aa, Homo sapiens
  misc_feature: Table A; Target 8585; HLA-B*55:01; AFP; ENSG00000081051; TAA
SLLNQHACAV

SEQ ID NO: 8586 - protein, 10 aa, Homo sapiens
  misc_feature: Table A; Target 8586; HLA-C*06:02; AFP; ENSG00000081051; TAA
SLLNQHACAV

SEQ ID NO: 8587 - protein, 8 aa, Homo sapiens
  misc_feature: Table A; Target 8587; HLA-B*39:01; AFP; ENSG00000081051; TAA
SLVVDETY

SEQ ID NO: 8588 - protein, 9 aa, Homo sapiens
  misc_feature: Table A; Target 8588; HLA-A*02:03; AFP; ENSG00000081051; TAA
SLVVDETYV

SEQ ID NO: 8589 - protein, 9 aa, Homo sapiens
  misc_feature: Table A; Target 8589; HLA-A*02:04; AFP; ENSG00000081051; TAA
SLVVDETYV

SEQ ID NO: 8590 - protein, 9 aa, Homo sapiens
  misc_feature: Table A; Target 8590; HLA-B*13:02; AFP; ENSG00000081051; TAA
SLVVDETYV

SEQ ID NO: 8591 - protein, 9 aa, Homo sapiens
  misc_feature: Table A; Target 8591; HLA-B*55:01; AFP; ENSG00000081051; TAA
SLVVDETYV

SEQ ID NO: 8592 - protein, 8 aa, Homo sapiens
  misc_feature: Table A; Target 8592; HLA-C*07:02; AFP; ENSG00000081051; TAA
SPNLNRFL

SEQ ID NO: 8593 - protein, 9 aa, Homo sapiens
  misc_feature: Table A; Target 8593; HLA-A*31:01; AFP; ENSG00000081051; TAA
SQKFTKVNF

SEQ ID NO: 8594 - protein, 9 aa, Homo sapiens
  misc_feature: Table A; Target 8594; HLA-B*08:01; AFP; ENSG00000081051; TAA
SQKFTKVNF

SEQ ID NO: 8595 - protein, 9 aa, Homo sapiens
  misc_feature: Table A; Target 8595; HLA-A*03:01; AFP; ENSG00000081051; TAA
SQQDTLSNK

SEQ ID NO: 8596 - protein, 10 aa, Homo sapiens
  misc_feature: Table A; Target 8596; HLA-B*39:01; AFP; ENSG00000081051; TAA
SQQDTLSNKI

SEQ ID NO: 8597 - protein, 11 aa, Homo sapiens
  misc_feature: Table A; Target 8597; HLA-B*15:01; AFP; ENSG00000081051; TAA
SQSEEGRHNCF

SEQ ID NO: 8598 - protein, 9 aa, Homo sapiens
  misc_feature: Table A; Target 8598; HLA-C*16:01; AFP; ENSG00000081051; TAA
SRTLHRNEY

SEQ ID NO: 8599 - protein, 9 aa, Homo sapiens
  misc_feature: Table A; Target 8599; HLA-A*01:01; AFP; ENSG00000081051; TAA
SSELMAITR

SEQ ID NO: 8600 - protein, 9 aa, Homo sapiens
  misc_feature: Table A; Target 8600; HLA-A*03:02; AFP; ENSG00000081051; TAA
SSELMAITR

SEQ ID NO: 8601 - protein, 9 aa, Homo sapiens
  misc_feature: Table A; Target 8601; HLA-A*31:01; AFP; ENSG00000081051; TAA
SSELMAITR

SEQ ID NO: 8602 - protein, 9 aa, Homo sapiens
  misc_feature: Table A; Target 8602; HLA-A*33:03; AFP; ENSG00000081051; TAA
SSELMAITR

SEQ ID NO: 8603 - protein, 9 aa, Homo sapiens
  misc_feature: Table A; Target 8603; HLA-B*27:02; AFP; ENSG00000081051; TAA
SSELMAITR

SEQ ID NO: 8604 - protein, 9 aa, Homo sapiens
  misc_feature: Table A; Target 8604; HLA-B*57:01; AFP; ENSG00000081051; TAA
SSELMAITR

SEQ ID NO: 8605 - protein, 8 aa, Homo sapiens
  misc_feature: Table A; Target 8605; HLA-C*12:03; AFP; ENSG00000081051; TAA
SSGEKNIF

SEQ ID NO: 8606 - protein, 9 aa, Homo sapiens
  misc_feature: Table A; Target 8606; HLA-A*29:02; AFP; ENSG00000081051; TAA
SSLVVDETY

SEQ ID NO: 8607 - protein, 9 aa, Homo sapiens
  misc_feature: Table A; Target 8607; HLA-A*32:01; AFP; ENSG00000081051; TAA
SSLVVDETY

SEQ ID NO: 8608 - protein, 9 aa, Homo sapiens
  misc_feature: Table A; Target 8608; HLA-B*18:01; AFP; ENSG00000081051; TAA
SSLVVDETY

SEQ ID NO: 8609 - protein, 9 aa, Homo sapiens
  misc_feature: Table A; Target 8609; HLA-B*55:01; AFP; ENSG00000081051; TAA
SSLVVDETY

SEQ ID NO: 8610 - protein, 9 aa, Homo sapiens
  misc_feature: Table A; Target 8610; HLA-C*02:02; AFP; ENSG00000081051; TAA
SSLVVDETY

SEQ ID NO: 8611 - protein, 9 aa, Homo sapiens
  misc_feature: Table A; Target 8611; HLA-C*03:03; AFP; ENSG00000081051; TAA
SSLVVDETY

SEQ ID NO: 8612 - protein, 9 aa, Homo sapiens
  misc_feature: Table A; Target 8612; HLA-C*04:01; AFP; ENSG00000081051; TAA
SSLVVDETY

SEQ ID NO: 8613 - protein, 9 aa, Homo sapiens
  misc_feature: Table A; Target 8613; HLA-C*07:06; AFP; ENSG00000081051; TAA
SSLVVDETY

SEQ ID NO: 8614 - protein, 9 aa, Homo sapiens
  misc_feature: Table A; Target 8614; HLA-C*16:01; AFP; ENSG00000081051; TAA
SSLVVDETY

SEQ ID NO: 8615 - protein, 9 aa, Homo sapiens
  misc_feature: Table A; Target 8615; HLA-C*16:02; AFP; ENSG00000081051; TAA
SSLVVDETY

SEQ ID NO: 8616 - protein, 8 aa, Homo sapiens
  misc_feature: Table A; Target 8616; HLA-B*08:01; AFP; ENSG00000081051; TAA
SVILRVAK

SEQ ID NO: 8617 - protein, 10 aa, Homo sapiens
  misc_feature: Table A; Target 8617; HLA-A*25:01; AFP; ENSG00000081051; TAA
SVILRVAKGY

SEQ ID NO: 8618 - protein, 10 aa, Homo sapiens
  misc_feature: Table A; Target 8618; HLA-A*26:01; AFP; ENSG00000081051; TAA
SVILRVAKGY

SEQ ID NO: 8619 - protein, 9 aa, Homo sapiens
  misc_feature: Table A; Target 8619; HLA-C*16:01; AFP; ENSG00000081051; TAA
SYANRRPCF

SEQ ID NO: 8620 - protein, 10 aa, Homo sapiens
  misc_feature: Table A; Target 8620; HLA-C*01:02; AFP; ENSG00000081051; TAA
SYICSQQDTL

SEQ ID NO: 8621 - protein, 8 aa, Homo sapiens
  misc_feature: Table A; Target 8621; HLA-C*06:02; AFP; ENSG00000081051; TAA
SYQCTAEI

SEQ ID NO: 8622 - protein, 10 aa, Homo sapiens
  misc_feature: Table A; Target 8622; HLA-C*01:02; AFP; ENSG00000081051; TAA
SYQCTAEISL

SEQ ID NO: 8623 - protein, 8 aa, Homo sapiens
  misc_feature: Table A; Target 8623; HLA-B*08:01; AFP; ENSG00000081051; TAA
TAATCCQL

SEQ ID NO: 8624 - protein, 9 aa, Homo sapiens
  misc_feature: Table A; Target 8624; HLA-B*35:03; AFP; ENSG00000081051; TAA
TAEISLADL

SEQ ID NO: 8625 - protein, 9 aa, Homo sapiens
  misc_feature: Table A; Target 8625; HLA-B*39:01; AFP; ENSG00000081051; TAA
TAEISLADL

SEQ ID NO: 8626 - protein, 9 aa, Homo sapiens
  misc_feature: Table A; Target 8626; HLA-C*03:03; AFP; ENSG00000081051; TAA
TAEISLADL

SEQ ID NO: 8627 - protein, 9 aa, Homo sapiens
  misc_feature: Table A; Target 8627; HLA-A*30:01; AFP; ENSG00000081051; TAA
TECCKLTTL

SEQ ID NO: 8628 - protein, 9 aa, Homo sapiens
  misc_feature: Table A; Target 8628; HLA-A*30:01; AFP; ENSG00000081051; TAA
TEEQLEAVI

SEQ ID NO: 8629 - protein, 9 aa, Homo sapiens
  misc_feature: Table A; Target 8629; HLA-B*18:01; AFP; ENSG00000081051; TAA
TEEQLEAVI

SEQ ID NO: 8630 - protein, 9 aa, Homo sapiens
  misc_feature: Table A; Target 8630; HLA-B*38:01; AFP; ENSG00000081051; TAA
TEEQLEAVI

SEQ ID NO: 8631 - protein, 9 aa, Homo sapiens
  misc_feature: Table A; Target 8631; HLA-B*44:02; AFP; ENSG00000081051; TAA
TEEQLEAVI

SEQ ID NO: 8632 - protein, 9 aa, Homo sapiens
  misc_feature: Table A; Target 8632; HLA-B*44:03; AFP; ENSG00000081051; TAA
TEEQLEAVI

SEQ ID NO: 8633 - protein, 8 aa, Homo sapiens
  misc_feature: Table A; Target 8633; HLA-B*44:02; AFP; ENSG00000081051; TAA
TEIQKLVL

SEQ ID NO: 8634 - protein, 8 aa, Homo sapiens
  misc_feature: Table A; Target 8634; HLA-B*44:03; AFP; ENSG00000081051; TAA
TEIQKLVL

SEQ ID NO: 8635 - protein, 10 aa, Homo sapiens
  misc_feature: Table A; Target 8635; HLA-B*40:02; AFP; ENSG00000081051; TAA
TEIQKLVLDV

SEQ ID NO: 8636 - protein, 10 aa, Homo sapiens
  misc_feature: Table A; Target 8636; HLA-B*27:05; AFP; ENSG00000081051; TAA
TENPLECQDK

SEQ ID NO: 8637 - protein, 9 aa, Homo sapiens
  misc_feature: Table A; Target 8637; HLA-A*24:02; AFP; ENSG00000081051; TAA
TFQAITVTK

SEQ ID NO: 8638 - protein, 9 aa, Homo sapiens
  misc_feature: Table A; Target 8638; HLA-A*31:01; AFP; ENSG00000081051; TAA
TFQAITVTK

SEQ ID NO: 8639 - protein, 9 aa, Homo sapiens
  misc_feature: Table A; Target 8639; HLA-B*27:02; AFP; ENSG00000081051; TAA
TFQAITVTK

SEQ ID NO: 8640 - protein, 9 aa, Homo sapiens
  misc_feature: Table A; Target 8640; HLA-B*35:01; AFP; ENSG00000081051; TAA
TFQAITVTK

SEQ ID NO: 8641 - protein, 9 aa, Homo sapiens
  misc_feature: Table A; Target 8641; HLA-B*35:03; AFP; ENSG00000081051; TAA
TFQAITVTK

SEQ ID NO: 8642 - protein, 9 aa, Homo sapiens
  misc_feature: Table A; Target 8642; HLA-C*01:02; AFP; ENSG00000081051; TAA
TFQAITVTK

SEQ ID NO: 8643 - protein, 9 aa, Homo sapiens
  misc_feature: Table A; Target 8643; HLA-C*04:01; AFP; ENSG00000081051; TAA
TFQAITVTK

SEQ ID NO: 8644 - protein, 9 aa, Homo sapiens
  misc_feature: Table A; Target 8644; HLA-C*07:06; AFP; ENSG00000081051; TAA
TFQAITVTK

SEQ ID NO: 8645 - protein, 10 aa, Homo sapiens
  misc_feature: Table A; Target 8645; HLA-A*24:02; AFP; ENSG00000081051; TAA
TFQAITVTKL

SEQ ID NO: 8646 - protein, 8 aa, Homo sapiens
  misc_feature: Table A; Target 8646; HLA-C*05:01; AFP; ENSG00000081051; TAA
TGDEQSSG

SEQ ID NO: 8647 - protein, 8 aa, Homo sapiens
  misc_feature: Table A; Target 8647; HLA-A*68:02; AFP; ENSG00000081051; TAA
TIFFAQFV

SEQ ID NO: 8648 - protein, 11 aa, Homo sapiens
  misc_feature: Table A; Target 8648; HLA-A*68:02; AFP; ENSG00000081051; TAA
TIFFAQFVQEA

SEQ ID NO: 8649 - protein, 10 aa, Homo sapiens
  misc_feature: Table A; Target 8649; HLA-B*07:02; AFP; ENSG00000081051; TAA
TKAATVTKEL

SEQ ID NO: 8650 - protein, 10 aa, Homo sapiens
  misc_feature: Table A; Target 8650; HLA-B*38:01; AFP; ENSG00000081051; TAA
TKAATVTKEL

SEQ ID NO: 8651 - protein, 10 aa, Homo sapiens
  misc_feature: Table A; Target 8651; HLA-B*27:02; AFP; ENSG00000081051; TAA
TKVNFTEIQK

SEQ ID NO: 8652 - protein, 11 aa, Homo sapiens
  misc_feature: Table A; Target 8652; HLA-B*38:01; AFP; ENSG00000081051; TAA
TKVNFTEIQKL

SEQ ID NO: 8653 - protein, 10 aa, Homo sapiens
  misc_feature: Table A; Target 8653; HLA-A*02:04; AFP; ENSG00000081051; TAA
TMKQEFLINL

SEQ ID NO: 8654 - protein, 10 aa, Homo sapiens
  misc_feature: Table A; Target 8654; HLA-A*31:01; AFP; ENSG00000081051; TAA
TMKQEFLINL

SEQ ID NO: 8655 - protein, 8 aa, Homo sapiens
  misc_feature: Table A; Target 8655; HLA-B*35:01; AFP; ENSG00000081051; TAA
TPASIPLF

SEQ ID NO: 8656 - protein, 10 aa, Homo sapiens
  misc_feature: Table A; Target 8656; HLA-A*68:02; AFP; ENSG00000081051; TAA
TPASIPLFQV

SEQ ID NO: 8657 - protein, 10 aa, Homo sapiens
  misc_feature: Table A; Target 8657; HLA-B*54:01; AFP; ENSG00000081051; TAA
TPASIPLFQV

SEQ ID NO: 8658 - protein, 9 aa, Homo sapiens
  misc_feature: Table A; Target 8658; HLA-B*35:03; AFP; ENSG00000081051; TAA
TPVNPGVGQ

SEQ ID NO: 8659 - protein, 9 aa, Homo sapiens
  misc_feature: Table A; Target 8659; HLA-B*54:01; AFP; ENSG00000081051; TAA
TPVNPGVGQ

SEQ ID NO: 8660 - protein, 9 aa, Homo sapiens
  misc_feature: Table A; Target 8660; HLA-B*55:01; AFP; ENSG00000081051; TAA
TPVNPGVGQ

SEQ ID NO: 8661 - protein, 9 aa, Homo sapiens
  misc_feature: Table A; Target 8661; HLA-C*04:01; AFP; ENSG00000081051; TAA
TPVNPGVGQ

SEQ ID NO: 8662 - protein, 9 aa, Homo sapiens
  misc_feature: Table A; Target 8662; HLA-C*07:06; AFP; ENSG00000081051; TAA
TPVNPGVGQ

SEQ ID NO: 8663 - protein, 11 aa, Homo sapiens
  misc_feature: Table A; Target 8663; HLA-B*56:01; AFP; ENSG00000081051; TAA
TPVNPGVGQCC

SEQ ID NO: 8664 - protein, 9 aa, Homo sapiens
  misc_feature: Table A; Target 8664; HLA-C*06:02; AFP; ENSG00000081051; TAA
TRKMAATAA

SEQ ID NO: 8665 - protein, 9 aa, Homo sapiens
  misc_feature: Table A; Target 8665; HLA-A*68:02; AFP; ENSG00000081051; TAA
TRTFQAITV

SEQ ID NO: 8666 - protein, 9 aa, Homo sapiens
  misc_feature: Table A; Target 8666; HLA-B*13:02; AFP; ENSG00000081051; TAA
TRTFQAITV

SEQ ID NO: 8667 - protein, 9 aa, Homo sapiens
  misc_feature: Table A; Target 8667; HLA-C*02:02; AFP; ENSG00000081051; TAA
TRTFQAITV

SEQ ID NO: 8668 - protein, 9 aa, Homo sapiens
  misc_feature: Table A; Target 8668; HLA-C*07:04; AFP; ENSG00000081051; TAA
TRTFQAITV

SEQ ID NO: 8669 - protein, 9 aa, Homo sapiens
  misc_feature: Table A; Target 8669; HLA-C*16:04; AFP; ENSG00000081051; TAA
TRTFQAITV

SEQ ID NO: 8670 - protein, 11 aa, Homo sapiens
  misc_feature: Table A; Target 8670; HLA-B*27:02; AFP; ENSG00000081051; TAA
TRTFQAITVTK

SEQ ID NO: 8671 - protein, 10 aa, Homo sapiens
  misc_feature: Table A; Target 8671; HLA-A*03:02; AFP; ENSG00000081051; TAA
TSSELMAITR

SEQ ID NO: 8672 - protein, 10 aa, Homo sapiens
  misc_feature: Table A; Target 8672; HLA-B*07:02; AFP; ENSG00000081051; TAA
TSSELMAITR

SEQ ID NO: 8673 - protein, 10 aa, Homo sapiens
  misc_feature: Table A; Target 8673; HLA-B*27:05; AFP; ENSG00000081051; TAA
TSSELMAITR

SEQ ID NO: 8674 - protein, 10 aa, Homo sapiens
  misc_feature: Table A; Target 8674; HLA-C*06:02; AFP; ENSG00000081051; TAA
TSSELMAITR

SEQ ID NO: 8675 - protein, 10 aa, Homo sapiens
  misc_feature: Table A; Target 8675; HLA-C*16:02; AFP; ENSG00000081051; TAA
TSSELMAITR

SEQ ID NO: 8676 - protein, 11 aa, Homo sapiens
  misc_feature: Table A; Target 8676; HLA-A*03:02; AFP; ENSG00000081051; TAA
TSSELMAITRK

SEQ ID NO: 8677 - protein, 11 aa, Homo sapiens
  misc_feature: Table A; Target 8677; HLA-A*68:01; AFP; ENSG00000081051; TAA
TSSELMAITRK

SEQ ID NO: 8678 - protein, 9 aa, Homo sapiens
  misc_feature: Table A; Target 8678; HLA-C*06:02; AFP; ENSG00000081051; TAA
TSSYANRRP

SEQ ID NO: 8679 - protein, 9 aa, Homo sapiens
  misc_feature: Table A; Target 8679; HLA-B*08:01; AFP; ENSG00000081051; TAA
TTLERGQCI

SEQ ID NO: 8680 - protein, 10 aa, Homo sapiens
  misc_feature: Table A; Target 8680; HLA-C*07:01; AFP; ENSG00000081051; TAA
TTLERGQCII

SEQ ID NO: 8681 - protein, 11 aa, Homo sapiens
  misc_feature: Table A; Target 8681; HLA-B*07:02; AFP; ENSG00000081051; TAA
TVTKELRESSL

SEQ ID NO: 8682 - protein, 8 aa, Homo sapiens
  misc_feature: Table A; Target 8682; HLA-A*03:01; AFP; ENSG00000081051; TAA
TVTKLSQK

SEQ ID NO: 8683 - protein, 8 aa, Homo sapiens
  misc_feature: Table A; Target 8683; HLA-A*11:01; AFP; ENSG00000081051; TAA
TVTKLSQK

SEQ ID NO: 8684 - protein, 9 aa, Homo sapiens
  misc_feature: Table A; Target 8684; HLA-A*23:01; AFP; ENSG00000081051; TAA
TVTKLSQKF

SEQ ID NO: 8685 - protein, 9 aa, Homo sapiens
  misc_feature: Table A; Target 8685; HLA-A*24:02; AFP; ENSG00000081051; TAA
TVTKLSQKF

SEQ ID NO: 8686 - protein, 9 aa, Homo sapiens
  misc_feature: Table A; Target 8686; HLA-A*29:02; AFP; ENSG00000081051; TAA
TVTKLSQKF

SEQ ID NO: 8687 - protein, 9 aa, Homo sapiens
  misc_feature: Table A; Target 8687; HLA-B*27:02; AFP; ENSG00000081051; TAA
TVTKLSQKF

SEQ ID NO: 8688 - protein, 9 aa, Homo sapiens
  misc_feature: Table A; Target 8688; HLA-B*57:01; AFP; ENSG00000081051; TAA
TVTKLSQKF

SEQ ID NO: 8689 - protein, 9 aa, Homo sapiens
  misc_feature: Table A; Target 8689; HLA-C*07:01; AFP; ENSG00000081051; TAA
TVTKLSQKF

SEQ ID NO: 8690 - protein, 9 aa, Homo sapiens
  misc_feature: Table A; Target 8690; HLA-C*07:04; AFP; ENSG00000081051; TAA
TVTKLSQKF

SEQ ID NO: 8691 - protein, 9 aa, Homo sapiens
  misc_feature: Table A; Target 8691; HLA-C*07:06; AFP; ENSG00000081051; TAA
TVTKLSQKF

SEQ ID NO: 8692 - protein, 8 aa, Homo sapiens
  misc_feature: Table A; Target 8692; HLA-A*23:01; AFP; ENSG00000081051; TAA
TYKEVSKM

SEQ ID NO: 8693 - protein, 8 aa, Homo sapiens
  misc_feature: Table A; Target 8693; HLA-A*24:02; AFP; ENSG00000081051; TAA
TYKEVSKM

SEQ ID NO: 8694 - protein, 8 aa, Homo sapiens
  misc_feature: Table A; Target 8694; HLA-B*40:02; AFP; ENSG00000081051; TAA
TYKEVSKM

SEQ ID NO: 8695 - protein, 8 aa, Homo sapiens
  misc_feature: Table A; Target 8695; HLA-B*46:01; AFP; ENSG00000081051; TAA
TYKEVSKM

SEQ ID NO: 8696 - protein, 8 aa, Homo sapiens
  misc_feature: Table A; Target 8696; HLA-C*01:02; AFP; ENSG00000081051; TAA
TYKEVSKM

SEQ ID NO: 8697 - protein, 8 aa, Homo sapiens
  misc_feature: Table A; Target 8697; HLA-C*04:01; AFP; ENSG00000081051; TAA
TYKEVSKM

SEQ ID NO: 8698 - protein, 8 aa, Homo sapiens
  misc_feature: Table A; Target 8698; HLA-C*06:02; AFP; ENSG00000081051; TAA
TYKEVSKM

SEQ ID NO: 8699 - protein, 8 aa, Homo sapiens
  misc_feature: Table A; Target 8699; HLA-C*07:01; AFP; ENSG00000081051; TAA
TYKEVSKM

SEQ ID NO: 8700 - protein, 8 aa, Homo sapiens
  misc_feature: Table A; Target 8700; HLA-C*07:02; AFP; ENSG00000081051; TAA
TYKEVSKM

SEQ ID NO: 8701 - protein, 8 aa, Homo sapiens
  misc_feature: Table A; Target 8701; HLA-C*12:03; AFP; ENSG00000081051; TAA
TYKEVSKM

SEQ ID NO: 8702 - protein, 8 aa, Homo sapiens
  misc_feature: Table A; Target 8702; HLA-C*16:02; AFP; ENSG00000081051; TAA
TYKEVSKM

SEQ ID NO: 8703 - protein, 9 aa, Homo sapiens
  misc_feature: Table A; Target 8703; HLA-A*31:01; AFP; ENSG00000081051; TAA
TYKEVSKMV

SEQ ID NO: 8704 - protein, 9 aa, Homo sapiens
  misc_feature: Table A; Target 8704; HLA-C*04:01; AFP; ENSG00000081051; TAA
TYKEVSKMV

SEQ ID NO: 8705 - protein, 9 aa, Homo sapiens
  misc_feature: Table A; Target 8705; HLA-C*07:02; AFP; ENSG00000081051; TAA
TYKEVSKMV

SEQ ID NO: 8706 - protein, 10 aa, Homo sapiens
  misc_feature: Table A; Target 8706; HLA-B*40:02; AFP; ENSG00000081051; TAA
TYKEVSKMVK

SEQ ID NO: 8707 - protein, 10 aa, Homo sapiens
  misc_feature: Table A; Target 8707; HLA-C*07:01; AFP; ENSG00000081051; TAA
TYKEVSKMVK

SEQ ID NO: 8708 - protein, 10 aa, Homo sapiens
  misc_feature: Table A; Target 8708; HLA-C*07:02; AFP; ENSG00000081051; TAA
TYKEVSKMVK

SEQ ID NO: 8709 - protein, 11 aa, Homo sapiens
  misc_feature: Table A; Target 8709; HLA-B*27:02; AFP; ENSG00000081051; TAA
TYVPPAFSDDK

SEQ ID NO: 8710 - protein, 8 aa, Homo sapiens
  misc_feature: Table A; Target 8710; HLA-B*07:02; AFP; ENSG00000081051; TAA
VAKGYQEL

SEQ ID NO: 8711 - protein, 8 aa, Homo sapiens
  misc_feature: Table A; Target 8711; HLA-C*03:03; AFP; ENSG00000081051; TAA
VAKGYQEL

SEQ ID NO: 8712 - protein, 8 aa, Homo sapiens
  misc_feature: Table A; Target 8712; HLA-C*07:02; AFP; ENSG00000081051; TAA
VAKGYQEL

SEQ ID NO: 8713 - protein, 8 aa, Homo sapiens
  misc_feature: Table A; Target 8713; HLA-C*12:03; AFP; ENSG00000081051; TAA
VAKGYQEL

SEQ ID NO: 8714 - protein, 8 aa, Homo sapiens
  misc_feature: Table A; Target 8714; HLA-C*16:02; AFP; ENSG00000081051; TAA
VAKGYQEL

SEQ ID NO: 8715 - protein, 9 aa, Homo sapiens
  misc_feature: Table A; Target 8715; HLA-A*24:02; AFP; ENSG00000081051; TAA
VAKGYQELL

SEQ ID NO: 8716 - protein, 9 aa, Homo sapiens
  misc_feature: Table A; Target 8716; HLA-A*31:01; AFP; ENSG00000081051; TAA
VAKGYQELL

SEQ ID NO: 8717 - protein, 9 aa, Homo sapiens
  misc_feature: Table A; Target 8717; HLA-A*32:01; AFP; ENSG00000081051; TAA
VAKGYQELL

SEQ ID NO: 8718 - protein, 9 aa, Homo sapiens
  misc_feature: Table A; Target 8718; HLA-B*08:01; AFP; ENSG00000081051; TAA
VAKGYQELL

SEQ ID NO: 8719 - protein, 9 aa, Homo sapiens
  misc_feature: Table A; Target 8719; HLA-B*40:02; AFP; ENSG00000081051; TAA
VAKGYQELL

SEQ ID NO: 8720 - protein, 9 aa, Homo sapiens
  misc_feature: Table A; Target 8720; HLA-B*57:01; AFP; ENSG00000081051; TAA
VAKGYQELL

SEQ ID NO: 8721 - protein, 9 aa, Homo sapiens
  misc_feature: Table A; Target 8721; HLA-B*58:01; AFP; ENSG00000081051; TAA
VAKGYQELL

SEQ ID NO: 8722 - protein, 9 aa, Homo sapiens
  misc_feature: Table A; Target 8722; HLA-C*01:02; AFP; ENSG00000081051; TAA
VAKGYQELL

SEQ ID NO: 8723 - protein, 9 aa, Homo sapiens
  misc_feature: Table A; Target 8723; HLA-C*03:04; AFP; ENSG00000081051; TAA
VAKGYQELL

SEQ ID NO: 8724 - protein, 9 aa, Homo sapiens
  misc_feature: Table A; Target 8724; HLA-C*06:02; AFP; ENSG00000081051; TAA
VAKGYQELL

SEQ ID NO: 8725 - protein, 9 aa, Homo sapiens
  misc_feature: Table A; Target 8725; HLA-C*07:01; AFP; ENSG00000081051; TAA
VAKGYQELL

SEQ ID NO: 8726 - protein, 9 aa, Homo sapiens
  misc_feature: Table A; Target 8726; HLA-C*07:02; AFP; ENSG00000081051; TAA
VAKGYQELL

SEQ ID NO: 8727 - protein, 9 aa, Homo sapiens
  misc_feature: Table A; Target 8727; HLA-C*16:01; AFP; ENSG00000081051; TAA
VAKGYQELL

SEQ ID NO: 8728 - protein, 9 aa, Homo sapiens
  misc_feature: Table A; Target 8728; HLA-C*16:04; AFP; ENSG00000081051; TAA
VAKGYQELL

SEQ ID NO: 8729 - protein, 8 aa, Homo sapiens
  misc_feature: Table A; Target 8729; HLA-C*06:02; AFP; ENSG00000081051; TAA
VALQTMKQ

SEQ ID NO: 8730 - protein, 10 aa, Homo sapiens
  misc_feature: Table A; Target 8730; HLA-A*23:01; AFP; ENSG00000081051; TAA
VALQTMKQEF

SEQ ID NO: 8731 - protein, 10 aa, Homo sapiens
  misc_feature: Table A; Target 8731; HLA-A*24:02; AFP; ENSG00000081051; TAA
VALQTMKQEF

SEQ ID NO: 8732 - protein, 10 aa, Homo sapiens
  misc_feature: Table A; Target 8732; HLA-B*57:01; AFP; ENSG00000081051; TAA
VALQTMKQEF

SEQ ID NO: 8733 - protein, 10 aa, Homo sapiens
  misc_feature: Table A; Target 8733; HLA-B*58:01; AFP; ENSG00000081051; TAA
VALQTMKQEF

SEQ ID NO: 8734 - protein, 10 aa, Homo sapiens
  misc_feature: Table A; Target 8734; HLA-C*04:01; AFP; ENSG00000081051; TAA
VALQTMKQEF

SEQ ID NO: 8735 - protein, 8 aa, Homo sapiens
  misc_feature: Table A; Target 8735; HLA-B*08:01; AFP; ENSG00000081051; TAA
VAYTKKAP

SEQ ID NO: 8736 - protein, 10 aa, Homo sapiens
  misc_feature: Table A; Target 8736; HLA-B*15:03; AFP; ENSG00000081051; TAA
VCFAEEGQKL

SEQ ID NO: 8737 - protein, 10 aa, Homo sapiens
  misc_feature: Table A; Target 8737; HLA-B*38:01; AFP; ENSG00000081051; TAA
VCFAEEGQKL

SEQ ID NO: 8738 - protein, 10 aa, Homo sapiens
  misc_feature: Table A; Target 8738; HLA-B*18:01; AFP; ENSG00000081051; TAA
VDETYVPPAF

SEQ ID NO: 8739 - protein, 10 aa, Homo sapiens
  misc_feature: Table A; Target 8739; HLA-C*07:01; AFP; ENSG00000081051; TAA
VECFQTKAAT

SEQ ID NO: 8740 - protein, 9 aa, Homo sapiens
  misc_feature: Table A; Target 8740; HLA-B*44:02; AFP; ENSG00000081051; TAA
VESIFLIFL

SEQ ID NO: 8741 - protein, 9 aa, Homo sapiens
  misc_feature: Table A; Target 8741; HLA-B*49:01; AFP; ENSG00000081051; TAA
VESIFLIFL

SEQ ID NO: 8742 - protein, 9 aa, Homo sapiens
  misc_feature: Table A; Target 8742; HLA-A*30:02; AFP; ENSG00000081051; TAA
VGQCCTSSY

SEQ ID NO: 8743 - protein, 9 aa, Homo sapiens
  misc_feature: Table A; Target 8743; HLA-C*04:01; AFP; ENSG00000081051; TAA
VGQCCTSSY

SEQ ID NO: 8744 - protein, 9 aa, Homo sapiens
  misc_feature: Table A; Target 8744; HLA-C*07:01; AFP; ENSG00000081051; TAA
VGQCCTSSY

SEQ ID NO: 8745 - protein, 8 aa, Homo sapiens
  misc_feature: Table A; Target 8745; HLA-C*03:04; AFP; ENSG00000081051; TAA
VIADFSGL

SEQ ID NO: 8746 - protein, 8 aa, Homo sapiens
  misc_feature: Table A; Target 8746; HLA-C*14:02; AFP; ENSG00000081051; TAA
VIADFSGL

SEQ ID NO: 8747 - protein, 9 aa, Homo sapiens
  misc_feature: Table A; Target 8747; HLA-A*01:01; AFP; ENSG00000081051; TAA
VIADFSGLL

SEQ ID NO: 8748 - protein, 9 aa, Homo sapiens
  misc_feature: Table A; Target 8748; HLA-A*02:01; AFP; ENSG00000081051; TAA
VIADFSGLL

SEQ ID NO: 8749 - protein, 9 aa, Homo sapiens
  misc_feature: Table A; Target 8749; HLA-A*02:04; AFP; ENSG00000081051; TAA
VIADFSGLL

SEQ ID NO: 8750 - protein, 9 aa, Homo sapiens
  misc_feature: Table A; Target 8750; HLA-A*02:07; AFP; ENSG00000081051; TAA
VIADFSGLL

SEQ ID NO: 8751 - protein, 9 aa, Homo sapiens
  misc_feature: Table A; Target 8751; HLA-A*03:02; AFP; ENSG00000081051; TAA
VIADFSGLL

SEQ ID NO: 8752 - protein, 9 aa, Homo sapiens
  misc_feature: Table A; Target 8752; HLA-A*25:01; AFP; ENSG00000081051; TAA
VIADFSGLL

SEQ ID NO: 8753 - protein, 9 aa, Homo sapiens
  misc_feature: Table A; Target 8753; HLA-A*32:01; AFP; ENSG00000081051; TAA
VIADFSGLL

SEQ ID NO: 8754 - protein, 9 aa, Homo sapiens
  misc_feature: Table A; Target 8754; HLA-B*07:02; AFP; ENSG00000081051; TAA
VIADFSGLL

SEQ ID NO: 8755 - protein, 9 aa, Homo sapiens
  misc_feature: Table A; Target 8755; HLA-B*15:01; AFP; ENSG00000081051; TAA
VIADFSGLL

SEQ ID NO: 8756 - protein, 9 aa, Homo sapiens
  misc_feature: Table A; Target 8756; HLA-B*39:01; AFP; ENSG00000081051; TAA
VIADFSGLL

SEQ ID NO: 8757 - protein, 9 aa, Homo sapiens
  misc_feature: Table A; Target 8757; HLA-B*40:01; AFP; ENSG00000081051; TAA
VIADFSGLL

SEQ ID NO: 8758 - protein, 9 aa, Homo sapiens
  misc_feature: Table A; Target 8758; HLA-B*40:02; AFP; ENSG00000081051; TAA
VIADFSGLL

SEQ ID NO: 8759 - protein, 9 aa, Homo sapiens
  misc_feature: Table A; Target 8759; HLA-B*46:01; AFP; ENSG00000081051; TAA
VIADFSGLL

SEQ ID NO: 8760 - protein, 9 aa, Homo sapiens
  misc_feature: Table A; Target 8760; HLA-B*58:01; AFP; ENSG00000081051; TAA
VIADFSGLL

SEQ ID NO: 8761 - protein, 9 aa, Homo sapiens
  misc_feature: Table A; Target 8761; HLA-C*01:02; AFP; ENSG00000081051; TAA
VIADFSGLL

SEQ ID NO: 8762 - protein, 9 aa, Homo sapiens
  misc_feature: Table A; Target 8762; HLA-C*02:02; AFP; ENSG00000081051; TAA
VIADFSGLL

SEQ ID NO: 8763 - protein, 9 aa, Homo sapiens
  misc_feature: Table A; Target 8763; HLA-C*05:01; AFP; ENSG00000081051; TAA
VIADFSGLL

SEQ ID NO: 8764 - protein, 9 aa, Homo sapiens
  misc_feature: Table A; Target 8764; HLA-C*06:02; AFP; ENSG00000081051; TAA
VIADFSGLL

SEQ ID NO: 8765 - protein, 9 aa, Homo sapiens
  misc_feature: Table A; Target 8765; HLA-C*07:01; AFP; ENSG00000081051; TAA
VIADFSGLL

SEQ ID NO: 8766 - protein, 9 aa, Homo sapiens
  misc_feature: Table A; Target 8766; HLA-C*07:02; AFP; ENSG00000081051; TAA
VIADFSGLL

SEQ ID NO: 8767 - protein, 9 aa, Homo sapiens
  misc_feature: Table A; Target 8767; HLA-C*12:03; AFP; ENSG00000081051; TAA
VIADFSGLL

SEQ ID NO: 8768 - protein, 9 aa, Homo sapiens
  misc_feature: Table A; Target 8768; HLA-C*14:02; AFP; ENSG00000081051; TAA
VIADFSGLL

SEQ ID NO: 8769 - protein, 9 aa, Homo sapiens
  misc_feature: Table A; Target 8769; HLA-C*16:02; AFP; ENSG00000081051; TAA
VIADFSGLL

SEQ ID NO: 8770 - protein, 9 aa, Homo sapiens
  misc_feature: Table A; Target 8770; HLA-C*16:04; AFP; ENSG00000081051; TAA
VIADFSGLL

SEQ ID NO: 8771 - protein, 11 aa, Homo sapiens
  misc_feature: Table A; Target 8771; HLA-A*01:01; AFP; ENSG00000081051; TAA
VIADFSGLLEK

SEQ ID NO: 8772 - protein, 11 aa, Homo sapiens
  misc_feature: Table A; Target 8772; HLA-A*02:01; AFP; ENSG00000081051; TAA
VIADFSGLLEK

SEQ ID NO: 8773 - protein, 11 aa, Homo sapiens
  misc_feature: Table A; Target 8773; HLA-A*02:03; AFP; ENSG00000081051; TAA
VIADFSGLLEK

SEQ ID NO: 8774 - protein, 11 aa, Homo sapiens
  misc_feature: Table A; Target 8774; HLA-A*33:03; AFP; ENSG00000081051; TAA
VIADFSGLLEK

SEQ ID NO: 8775 - protein, 11 aa, Homo sapiens
  misc_feature: Table A; Target 8775; HLA-A*68:01; AFP; ENSG00000081051; TAA
VIADFSGLLEK

SEQ ID NO: 8776 - protein, 11 aa, Homo sapiens
  misc_feature: Table A; Target 8776; HLA-B*57:01; AFP; ENSG00000081051; TAA
VIADFSGLLEK

SEQ ID NO: 8777 - protein, 11 aa, Homo sapiens
  misc_feature: Table A; Target 8777; HLA-C*01:02; AFP; ENSG00000081051; TAA
VIADFSGLLEK

SEQ ID NO: 8778 - protein, 11 aa, Homo sapiens
  misc_feature: Table A; Target 8778; HLA-C*07:06; AFP; ENSG00000081051; TAA
VIADFSGLLEK

SEQ ID NO: 8779 - protein, 9 aa, Homo sapiens
  misc_feature: Table A; Target 8779; HLA-A*03:01; AFP; ENSG00000081051; TAA
VILRVAKGY

SEQ ID NO: 8780 - protein, 9 aa, Homo sapiens
  misc_feature: Table A; Target 8780; HLA-A*30:02; AFP; ENSG00000081051; TAA
VILRVAKGY

SEQ ID NO: 8781 - protein, 9 aa, Homo sapiens
  misc_feature: Table A; Target 8781; HLA-B*57:01; AFP; ENSG00000081051; TAA
VILRVAKGY

SEQ ID NO: 8782 - protein, 10 aa, Homo sapiens
  misc_feature: Table A; Target 8782; HLA-B*27:02; AFP; ENSG00000081051; TAA
VKDALTAIEK

SEQ ID NO: 8783 - protein, 8 aa, Homo sapiens
  misc_feature: Table A; Target 8783; HLA-A*03:02; AFP; ENSG00000081051; TAA
VLDVAHVH

SEQ ID NO: 8784 - protein, 8 aa, Homo sapiens
  misc_feature: Table A; Target 8784; HLA-C*05:01; AFP; ENSG00000081051; TAA
VLDVAHVH

SEQ ID NO: 8785 - protein, 10 aa, Homo sapiens
  misc_feature: Table A; Target 8785; HLA-A*02:07; AFP; ENSG00000081051; TAA
VLDVAHVHEH

SEQ ID NO: 8786 - protein, 8 aa, Homo sapiens
  misc_feature: Table A; Target 8786; HLA-A*33:03; AFP; ENSG00000081051; TAA
VMKNFGTR

SEQ ID NO: 8787 - protein, 10 aa, Homo sapiens
  misc_feature: Table A; Target 8787; HLA-A*02:03; AFP; ENSG00000081051; TAA
VMKNFGTRTF

SEQ ID NO: 8788 - protein, 10 aa, Homo sapiens
  misc_feature: Table A; Target 8788; HLA-A*23:01; AFP; ENSG00000081051; TAA
VMKNFGTRTF

SEQ ID NO: 8789 - protein, 10 aa, Homo sapiens
  misc_feature: Table A; Target 8789; HLA-A*31:01; AFP; ENSG00000081051; TAA
VMKNFGTRTF

SEQ ID NO: 8790 - protein, 10 aa, Homo sapiens
  misc_feature: Table A; Target 8790; HLA-B*15:01; AFP; ENSG00000081051; TAA
VMKNFGTRTF

SEQ ID NO: 8791 - protein, 8 aa, Homo sapiens
  misc_feature: Table A; Target 8791; HLA-B*27:02; AFP; ENSG00000081051; TAA
VNFTEIQK

SEQ ID NO: 8792 - protein, 9 aa, Homo sapiens
  misc_feature: Table A; Target 8792; HLA-A*24:02; AFP; ENSG00000081051; TAA
VNFTEIQKL

SEQ ID NO: 8793 - protein, 9 aa, Homo sapiens
  misc_feature: Table A; Target 8793; HLA-A*30:01; AFP; ENSG00000081051; TAA
VNFTEIQKL

SEQ ID NO: 8794 - protein, 9 aa, Homo sapiens
  misc_feature: Table A; Target 8794; HLA-A*33:01; AFP; ENSG00000081051; TAA
VNFTEIQKL

SEQ ID NO: 8795 - protein, 9 aa, Homo sapiens
  misc_feature: Table A; Target 8795; HLA-A*33:03; AFP; ENSG00000081051; TAA
VNFTEIQKL

SEQ ID NO: 8796 - protein, 9 aa, Homo sapiens
  misc_feature: Table A; Target 8796; HLA-A*68:02; AFP; ENSG00000081051; TAA
VNFTEIQKL

SEQ ID NO: 8797 - protein, 9 aa, Homo sapiens
  misc_feature: Table A; Target 8797; HLA-B*27:05; AFP; ENSG00000081051; TAA
VNFTEIQKL

SEQ ID NO: 8798 - protein, 9 aa, Homo sapiens
  misc_feature: Table A; Target 8798; HLA-B*38:01; AFP; ENSG00000081051; TAA
VNFTEIQKL

SEQ ID NO: 8799 - protein, 9 aa, Homo sapiens
  misc_feature: Table A; Target 8799; HLA-B*40:02; AFP; ENSG00000081051; TAA
VNFTEIQKL

SEQ ID NO: 8800 - protein, 9 aa, Homo sapiens
  misc_feature: Table A; Target 8800; HLA-B*44:02; AFP; ENSG00000081051; TAA
VNFTEIQKL

SEQ ID NO: 8801 - protein, 9 aa, Homo sapiens
  misc_feature: Table A; Target 8801; HLA-B*44:03; AFP; ENSG00000081051; TAA
VNFTEIQKL

SEQ ID NO: 8802 - protein, 9 aa, Homo sapiens
  misc_feature: Table A; Target 8802; HLA-B*57:01; AFP; ENSG00000081051; TAA
VNFTEIQKL

SEQ ID NO: 8803 - protein, 9 aa, Homo sapiens
  misc_feature: Table A; Target 8803; HLA-C*02:02; AFP; ENSG00000081051; TAA
VNFTEIQKL

SEQ ID NO: 8804 - protein, 9 aa, Homo sapiens
  misc_feature: Table A; Target 8804; HLA-C*06:02; AFP; ENSG00000081051; TAA
VNFTEIQKL

SEQ ID NO: 8805 - protein, 9 aa, Homo sapiens
  misc_feature: Table A; Target 8805; HLA-C*16:02; AFP; ENSG00000081051; TAA
VNFTEIQKL

SEQ ID NO: 8806 - protein, 9 aa, Homo sapiens
  misc_feature: Table A; Target 8806; HLA-C*16:04; AFP; ENSG00000081051; TAA
VNFTEIQKL

SEQ ID NO: 8807 - protein, 8 aa, Homo sapiens
  misc_feature: Table A; Target 8807; HLA-B*55:01; AFP; ENSG00000081051; TAA
VPEPVTSC

SEQ ID NO: 8808 - protein, 10 aa, Homo sapiens
  misc_feature: Table A; Target 8808; HLA-B*54:01; AFP; ENSG00000081051; TAA
VPEPVTSCEA

SEQ ID NO: 8809 - protein, 10 aa, Homo sapiens
  misc_feature: Table A; Target 8809; HLA-B*55:01; AFP; ENSG00000081051; TAA
VPEPVTSCEA

SEQ ID NO: 8810 - protein, 11 aa, Homo sapiens
  misc_feature: Table A; Target 8810; HLA-A*30:02; AFP; ENSG00000081051; TAA
VPEPVTSCEAY

SEQ ID NO: 8811 - protein, 11 aa, Homo sapiens
  misc_feature: Table A; Target 8811; HLA-C*04:01; AFP; ENSG00000081051; TAA
VPEPVTSCEAY

SEQ ID NO: 8812 - protein, 9 aa, Homo sapiens
  misc_feature: Table A; Target 8812; HLA-A*02:03; AFP; ENSG00000081051; TAA
VQEATYKEV

SEQ ID NO: 8813 - protein, 9 aa, Homo sapiens
  misc_feature: Table A; Target 8813; HLA-A*02:07; AFP; ENSG00000081051; TAA
VQEATYKEV

SEQ ID NO: 8814 - protein, 9 aa, Homo sapiens
  misc_feature: Table A; Target 8814; HLA-A*30:01; AFP; ENSG00000081051; TAA
VQEATYKEV

SEQ ID NO: 8815 - protein, 9 aa, Homo sapiens
  misc_feature: Table A; Target 8815; HLA-B*27:05; AFP; ENSG00000081051; TAA
VQEATYKEV

SEQ ID NO: 8816 - protein, 9 aa, Homo sapiens
  misc_feature: Table A; Target 8816; HLA-B*38:01; AFP; ENSG00000081051; TAA
VQEATYKEV

SEQ ID NO: 8817 - protein, 9 aa, Homo sapiens
  misc_feature: Table A; Target 8817; HLA-B*39:01; AFP; ENSG00000081051; TAA
VQEATYKEV

SEQ ID NO: 8818 - protein, 9 aa, Homo sapiens
  misc_feature: Table A; Target 8818; HLA-B*49:01; AFP; ENSG00000081051; TAA
VQEATYKEV

SEQ ID NO: 8819 - protein, 9 aa, Homo sapiens
  misc_feature: Table A; Target 8819; HLA-B*55:01; AFP; ENSG00000081051; TAA
VQEATYKEV

SEQ ID NO: 8820 - protein, 9 aa, Homo sapiens
  misc_feature: Table A; Target 8820; HLA-C*03:04; AFP; ENSG00000081051; TAA
VQEATYKEV

SEQ ID NO: 8821 - protein, 9 aa, Homo sapiens
  misc_feature: Table A; Target 8821; HLA-C*04:01; AFP; ENSG00000081051; TAA
VQEATYKEV

SEQ ID NO: 8822 - protein, 9 aa, Homo sapiens
  misc_feature: Table A; Target 8822; HLA-C*07:01; AFP; ENSG00000081051; TAA
VQEATYKEV

SEQ ID NO: 8823 - protein, 9 aa, Homo sapiens
  misc_feature: Table A; Target 8823; HLA-C*12:03; AFP; ENSG00000081051; TAA
VQEATYKEV

SEQ ID NO: 8824 - protein, 9 aa, Homo sapiens
  misc_feature: Table A; Target 8824; HLA-C*16:04; AFP; ENSG00000081051; TAA
VQEATYKEV

SEQ ID NO: 8825 - protein, 11 aa, Homo sapiens
  misc_feature: Table A; Target 8825; HLA-A*11:01; AFP; ENSG00000081051; TAA
VQEATYKEVSK

SEQ ID NO: 8826 - protein, 9 aa, Homo sapiens
  misc_feature: Table A; Target 8826; HLA-B*08:01; AFP; ENSG00000081051; TAA
VSKMVKDAL

SEQ ID NO: 8827 - protein, 9 aa, Homo sapiens
  misc_feature: Table A; Target 8827; HLA-B*40:02; AFP; ENSG00000081051; TAA
VSKMVKDAL

SEQ ID NO: 8828 - protein, 9 aa, Homo sapiens
  misc_feature: Table A; Target 8828; HLA-C*06:02; AFP; ENSG00000081051; TAA
VSKMVKDAL

SEQ ID NO: 8829 - protein, 9 aa, Homo sapiens
  misc_feature: Table A; Target 8829; HLA-C*07:02; AFP; ENSG00000081051; TAA
VSKMVKDAL

SEQ ID NO: 8830 - protein, 9 aa, Homo sapiens
  misc_feature: Table A; Target 8830; HLA-C*16:01; AFP; ENSG00000081051; TAA
VSKMVKDAL

SEQ ID NO: 8831 - protein, 8 aa, Homo sapiens
  misc_feature: Table A; Target 8831; HLA-B*54:01; AFP; ENSG00000081051; TAA
VSVILRVA

SEQ ID NO: 8832 - protein, 8 aa, Homo sapiens
  misc_feature: Table A; Target 8832; HLA-C*06:02; AFP; ENSG00000081051; TAA
VSVILRVA

SEQ ID NO: 8833 - protein, 8 aa, Homo sapiens
  misc_feature: Table A; Target 8833; HLA-C*16:01; AFP; ENSG00000081051; TAA
VSVILRVA

SEQ ID NO: 8834 - protein, 9 aa, Homo sapiens
  misc_feature: Table A; Target 8834; HLA-A*11:01; AFP; ENSG00000081051; TAA
VSVILRVAK

SEQ ID NO: 8835 - protein, 9 aa, Homo sapiens
  misc_feature: Table A; Target 8835; HLA-B*07:02; AFP; ENSG00000081051; TAA
VSVILRVAK

SEQ ID NO: 8836 - protein, 9 aa, Homo sapiens
  misc_feature: Table A; Target 8836; HLA-B*57:01; AFP; ENSG00000081051; TAA
VSVILRVAK

SEQ ID NO: 8837 - protein, 11 aa, Homo sapiens
  misc_feature: Table A; Target 8837; HLA-C*07:01; AFP; ENSG00000081051; TAA
VSVILRVAKGY

SEQ ID NO: 8838 - protein, 10 aa, Homo sapiens
  misc_feature: Table A; Target 8838; HLA-A*02:03; AFP; ENSG00000081051; TAA
VTKELRESSL

SEQ ID NO: 8839 - protein, 10 aa, Homo sapiens
  misc_feature: Table A; Target 8839; HLA-B*07:02; AFP; ENSG00000081051; TAA
VTKELRESSL

SEQ ID NO: 8840 - protein, 10 aa, Homo sapiens
  misc_feature: Table A; Target 8840; HLA-B*40:02; AFP; ENSG00000081051; TAA
VTKELRESSL

SEQ ID NO: 8841 - protein, 10 aa, Homo sapiens
  misc_feature: Table A; Target 8841; HLA-B*46:01; AFP; ENSG00000081051; TAA
VTKELRESSL

SEQ ID NO: 8842 - protein, 8 aa, Homo sapiens
  misc_feature: Table A; Target 8842; HLA-A*24:02; AFP; ENSG00000081051; TAA
VTKLSQKF

SEQ ID NO: 8843 - protein, 8 aa, Homo sapiens
  misc_feature: Table A; Target 8843; HLA-A*32:01; AFP; ENSG00000081051; TAA
VTKLSQKF

SEQ ID NO: 8844 - protein, 8 aa, Homo sapiens
  misc_feature: Table A; Target 8844; HLA-B*08:01; AFP; ENSG00000081051; TAA
VTKLSQKF

SEQ ID NO: 8845 - protein, 8 aa, Homo sapiens
  misc_feature: Table A; Target 8845; HLA-B*46:01; AFP; ENSG00000081051; TAA
VTKLSQKF

SEQ ID NO: 8846 - protein, 8 aa, Homo sapiens
  misc_feature: Table A; Target 8846; HLA-C*07:02; AFP; ENSG00000081051; TAA
VTKLSQKF

SEQ ID NO: 8847 - protein, 8 aa, Homo sapiens
  misc_feature: Table A; Target 8847; HLA-C*16:01; AFP; ENSG00000081051; TAA
VTKLSQKF

SEQ ID NO: 8848 - protein, 8 aa, Homo sapiens
  misc_feature: Table A; Target 8848; HLA-C*05:01; AFP; ENSG00000081051; TAA
VVDETYVP

SEQ ID NO: 8849 - protein, 9 aa, Homo sapiens
  misc_feature: Table A; Target 8849; HLA-A*02:07; AFP; ENSG00000081051; TAA
VVDETYVPP

SEQ ID NO: 8850 - protein, 10 aa, Homo sapiens
  misc_feature: Table A; Target 8850; HLA-A*02:01; AFP; ENSG00000081051; TAA
VVDETYVPPA

SEQ ID NO: 8851 - protein, 11 aa, Homo sapiens
  misc_feature: Table A; Target 8851; HLA-A*01:01; AFP; ENSG00000081051; TAA
VVDETYVPPAF

SEQ ID NO: 8852 - protein, 11 aa, Homo sapiens
  misc_feature: Table A; Target 8852; HLA-A*02:01; AFP; ENSG00000081051; TAA
VVDETYVPPAF

SEQ ID NO: 8853 - protein, 11 aa, Homo sapiens
  misc_feature: Table A; Target 8853; HLA-A*03:01; AFP; ENSG00000081051; TAA
VVDETYVPPAF

SEQ ID NO: 8854 - protein, 11 aa, Homo sapiens
  misc_feature: Table A; Target 8854; HLA-A*03:02; AFP; ENSG00000081051; TAA
VVDETYVPPAF

SEQ ID NO: 8855 - protein, 11 aa, Homo sapiens
  misc_feature: Table A; Target 8855; HLA-A*68:01; AFP; ENSG00000081051; TAA
VVDETYVPPAF

SEQ ID NO: 8856 - protein, 11 aa, Homo sapiens
  misc_feature: Table A; Target 8856; HLA-B*27:05; AFP; ENSG00000081051; TAA
VVDETYVPPAF

SEQ ID NO: 8857 - protein, 11 aa, Homo sapiens
  misc_feature: Table A; Target 8857; HLA-B*55:01; AFP; ENSG00000081051; TAA
VVDETYVPPAF

SEQ ID NO: 8858 - protein, 9 aa, Homo sapiens
  misc_feature: Table A; Target 8858; HLA-A*02:07; AFP; ENSG00000081051; TAA
WVESIFLIF

SEQ ID NO: 8859 - protein, 9 aa, Homo sapiens
  misc_feature: Table A; Target 8859; HLA-A*29:02; AFP; ENSG00000081051; TAA
WVESIFLIF

SEQ ID NO: 8860 - protein, 8 aa, Homo sapiens
  misc_feature: Table A; Target 8860; HLA-A*24:02; AFP; ENSG00000081051; TAA
YAPTILLW

SEQ ID NO: 8861 - protein, 8 aa, Homo sapiens
  misc_feature: Table A; Target 8861; HLA-B*57:01; AFP; ENSG00000081051; TAA
YAPTILLW

SEQ ID NO: 8862 - protein, 9 aa, Homo sapiens
  misc_feature: Table A; Target 8862; HLA-A*02:07; AFP; ENSG00000081051; TAA
YAPTILLWA

SEQ ID NO: 8863 - protein, 10 aa, Homo sapiens
  misc_feature: Table A; Target 8863; HLA-A*02:07; AFP; ENSG00000081051; TAA
YAPTILLWAA

SEQ ID NO: 8864 - protein, 10 aa, Homo sapiens
  misc_feature: Table A; Target 8864; HLA-B*54:01; AFP; ENSG00000081051; TAA
YAPTILLWAA

SEQ ID NO: 8865 - protein, 8 aa, Homo sapiens
  misc_feature: Table A; Target 8865; HLA-B*37:01; AFP; ENSG00000081051; TAA
YDKIIPSC

SEQ ID NO: 8866 - protein, 8 aa, Homo sapiens
  misc_feature: Table A; Target 8866; HLA-B*40:02; AFP; ENSG00000081051; TAA
YDKIIPSC

SEQ ID NO: 8867 - protein, 8 aa, Homo sapiens
  misc_feature: Table A; Target 8867; HLA-C*06:02; AFP; ENSG00000081051; TAA
YDKIIPSC

SEQ ID NO: 8868 - protein, 8 aa, Homo sapiens
  misc_feature: Table A; Target 8868; HLA-C*07:01; AFP; ENSG00000081051; TAA
YDKIIPSC

SEQ ID NO: 8869 - protein, 8 aa, Homo sapiens
  misc_feature: Table A; Target 8869; HLA-C*12:03; AFP; ENSG00000081051; TAA
YDKIIPSC

SEQ ID NO: 8870 - protein, 9 aa, Homo sapiens
  misc_feature: Table A; Target 8870; HLA-B*40:02; AFP; ENSG00000081051; TAA
YDKIIPSCC

SEQ ID NO: 8871 - protein, 8 aa, Homo sapiens
  misc_feature: Table A; Target 8871; HLA-B*40:01; AFP; ENSG00000081051; TAA
YEEDRETF

SEQ ID NO: 8872 - protein, 8 aa, Homo sapiens
  misc_feature: Table A; Target 8872; HLA-B*44:02; AFP; ENSG00000081051; TAA
YEEDRETF

SEQ ID NO: 8873 - protein, 8 aa, Homo sapiens
  misc_feature: Table A; Target 8873; HLA-B*44:03; AFP; ENSG00000081051; TAA
YEEDRETF

SEQ ID NO: 8874 - protein, 8 aa, Homo sapiens
  misc_feature: Table A; Target 8874; HLA-B*49:01; AFP; ENSG00000081051; TAA
YEEDRETF

SEQ ID NO: 8875 - protein, 9 aa, Homo sapiens
  misc_feature: Table A; Target 8875; HLA-A*02:07; AFP; ENSG00000081051; TAA
YEEDRETFM

SEQ ID NO: 8876 - protein, 9 aa, Homo sapiens
  misc_feature: Table A; Target 8876; HLA-B*18:01; AFP; ENSG00000081051; TAA
YEEDRETFM

SEQ ID NO: 8877 - protein, 9 aa, Homo sapiens
  misc_feature: Table A; Target 8877; HLA-B*38:01; AFP; ENSG00000081051; TAA
YEEDRETFM

SEQ ID NO: 8878 - protein, 9 aa, Homo sapiens
  misc_feature: Table A; Target 8878; HLA-B*44:03; AFP; ENSG00000081051; TAA
YEEDRETFM

SEQ ID NO: 8879 - protein, 9 aa, Homo sapiens
  misc_feature: Table A; Target 8879; HLA-C*02:02; AFP; ENSG00000081051; TAA
YEEDRETFM

SEQ ID NO: 8880 - protein, 9 aa, Homo sapiens
  misc_feature: Table A; Target 8880; HLA-C*03:03; AFP; ENSG00000081051; TAA
YEEDRETFM

SEQ ID NO: 8881 - protein, 9 aa, Homo sapiens
  misc_feature: Table A; Target 8881; HLA-C*03:04; AFP; ENSG00000081051; TAA
YEEDRETFM

SEQ ID NO: 8882 - protein, 9 aa, Homo sapiens
  misc_feature: Table A; Target 8882; HLA-C*07:01; AFP; ENSG00000081051; TAA
YEEDRETFM

SEQ ID NO: 8883 - protein, 9 aa, Homo sapiens
  misc_feature: Table A; Target 8883; HLA-C*07:04; AFP; ENSG00000081051; TAA
YEEDRETFM

SEQ ID NO: 8884 - protein, 9 aa, Homo sapiens
  misc_feature: Table A; Target 8884; HLA-C*12:03; AFP; ENSG00000081051; TAA
YEEDRETFM

SEQ ID NO: 8885 - protein, 9 aa, Homo sapiens
  misc_feature: Table A; Target 8885; HLA-B*37:01; AFP; ENSG00000081051; TAA
YEIARRHPF

SEQ ID NO: 8886 - protein, 10 aa, Homo sapiens
  misc_feature: Table A; Target 8886; HLA-A*25:01; AFP; ENSG00000081051; TAA
YGIASILDSY

SEQ ID NO: 8887 - protein, 10 aa, Homo sapiens
  misc_feature: Table A; Target 8887; HLA-B*07:02; AFP; ENSG00000081051; TAA
YGIASILDSY

SEQ ID NO: 8888 - protein, 10 aa, Homo sapiens
  misc_feature: Table A; Target 8888; HLA-B*15:03; AFP; ENSG00000081051; TAA
YGIASILDSY

SEQ ID NO: 8889 - protein, 10 aa, Homo sapiens
  misc_feature: Table A; Target 8889; HLA-B*18:01; AFP; ENSG00000081051; TAA
YGIASILDSY

SEQ ID NO: 8890 - protein, 10 aa, Homo sapiens
  misc_feature: Table A; Target 8890; HLA-B*55:01; AFP; ENSG00000081051; TAA
YGIASILDSY

SEQ ID NO: 8891 - protein, 10 aa, Homo sapiens
  misc_feature: Table A; Target 8891; HLA-B*58:01; AFP; ENSG00000081051; TAA
YGIASILDSY

SEQ ID NO: 8892 - protein, 10 aa, Homo sapiens
  misc_feature: Table A; Target 8892; HLA-C*04:01; AFP; ENSG00000081051; TAA
YGIASILDSY

SEQ ID NO: 8893 - protein, 10 aa, Homo sapiens
  misc_feature: Table A; Target 8893; HLA-C*07:01; AFP; ENSG00000081051; TAA
YGIASILDSY

SEQ ID NO: 8894 - protein, 10 aa, Homo sapiens
  misc_feature: Table A; Target 8894; HLA-C*14:02; AFP; ENSG00000081051; TAA
YGIASILDSY

SEQ ID NO: 8895 - protein, 9 aa, Homo sapiens
  misc_feature: Table A; Target 8895; HLA-A*02:07; AFP; ENSG00000081051; TAA
YICSQQDTL

SEQ ID NO: 8896 - protein, 9 aa, Homo sapiens
  misc_feature: Table A; Target 8896; HLA-A*30:01; AFP; ENSG00000081051; TAA
YICSQQDTL

SEQ ID NO: 8897 - protein, 9 aa, Homo sapiens
  misc_feature: Table A; Target 8897; HLA-A*68:02; AFP; ENSG00000081051; TAA
YICSQQDTL

SEQ ID NO: 8898 - protein, 9 aa, Homo sapiens
  misc_feature: Table A; Target 8898; HLA-B*27:05; AFP; ENSG00000081051; TAA
YICSQQDTL

SEQ ID NO: 8899 - protein, 9 aa, Homo sapiens
  misc_feature: Table A; Target 8899; HLA-B*40:02; AFP; ENSG00000081051; TAA
YICSQQDTL

SEQ ID NO: 8900 - protein, 9 aa, Homo sapiens
  misc_feature: Table A; Target 8900; HLA-B*58:01; AFP; ENSG00000081051; TAA
YICSQQDTL

SEQ ID NO: 8901 - protein, 9 aa, Homo sapiens
  misc_feature: Table A; Target 8901; HLA-C*01:02; AFP; ENSG00000081051; TAA
YICSQQDTL

SEQ ID NO: 8902 - protein, 9 aa, Homo sapiens
  misc_feature: Table A; Target 8902; HLA-C*05:01; AFP; ENSG00000081051; TAA
YICSQQDTL

SEQ ID NO: 8903 - protein, 9 aa, Homo sapiens
  misc_feature: Table A; Target 8903; HLA-C*06:02; AFP; ENSG00000081051; TAA
YICSQQDTL

SEQ ID NO: 8904 - protein, 9 aa, Homo sapiens
  misc_feature: Table A; Target 8904; HLA-C*07:01; AFP; ENSG00000081051; TAA
YICSQQDTL

SEQ ID NO: 8905 - protein, 9 aa, Homo sapiens
  misc_feature: Table A; Target 8905; HLA-C*07:02; AFP; ENSG00000081051; TAA
YICSQQDTL

SEQ ID NO: 8906 - protein, 9 aa, Homo sapiens
  misc_feature: Table A; Target 8906; HLA-C*12:03; AFP; ENSG00000081051; TAA
YICSQQDTL

SEQ ID NO: 8907 - protein, 9 aa, Homo sapiens
  misc_feature: Table A; Target 8907; HLA-C*14:02; AFP; ENSG00000081051; TAA
YICSQQDTL

SEQ ID NO: 8908 - protein, 9 aa, Homo sapiens
  misc_feature: Table A; Target 8908; HLA-C*16:02; AFP; ENSG00000081051; TAA
YICSQQDTL

SEQ ID NO: 8909 - protein, 8 aa, Homo sapiens
  misc_feature: Table A; Target 8909; HLA-A*02:07; AFP; ENSG00000081051; TAA
YIQESQAL

SEQ ID NO: 8910 - protein, 8 aa, Homo sapiens
  misc_feature: Table A; Target 8910; HLA-A*23:01; AFP; ENSG00000081051; TAA
YIQESQAL

SEQ ID NO: 8911 - protein, 8 aa, Homo sapiens
  misc_feature: Table A; Target 8911; HLA-A*32:01; AFP; ENSG00000081051; TAA
YIQESQAL

SEQ ID NO: 8912 - protein, 8 aa, Homo sapiens
  misc_feature: Table A; Target 8912; HLA-B*07:02; AFP; ENSG00000081051; TAA
YIQESQAL

SEQ ID NO: 8913 - protein, 8 aa, Homo sapiens
  misc_feature: Table A; Target 8913; HLA-B*13:02; AFP; ENSG00000081051; TAA
YIQESQAL

SEQ ID NO: 8914 - protein, 8 aa, Homo sapiens
  misc_feature: Table A; Target 8914; HLA-B*38:01; AFP; ENSG00000081051; TAA
YIQESQAL

SEQ ID NO: 8915 - protein, 8 aa, Homo sapiens
  misc_feature: Table A; Target 8915; HLA-B*58:01; AFP; ENSG00000081051; TAA
YIQESQAL

SEQ ID NO: 8916 - protein, 8 aa, Homo sapiens
  misc_feature: Table A; Target 8916; HLA-C*02:02; AFP; ENSG00000081051; TAA
YIQESQAL

SEQ ID NO: 8917 - protein, 8 aa, Homo sapiens
  misc_feature: Table A; Target 8917; HLA-C*04:01; AFP; ENSG00000081051; TAA
YIQESQAL

SEQ ID NO: 8918 - protein, 8 aa, Homo sapiens
  misc_feature: Table A; Target 8918; HLA-C*06:02; AFP; ENSG00000081051; TAA
YIQESQAL

SEQ ID NO: 8919 - protein, 8 aa, Homo sapiens
  misc_feature: Table A; Target 8919; HLA-C*07:02; AFP; ENSG00000081051; TAA
YIQESQAL

SEQ ID NO: 8920 - protein, 8 aa, Homo sapiens
  misc_feature: Table A; Target 8920; HLA-C*12:03; AFP; ENSG00000081051; TAA
YIQESQAL

SEQ ID NO: 8921 - protein, 9 aa, Homo sapiens
  misc_feature: Table A; Target 8921; HLA-A*02:03; AFP; ENSG00000081051; TAA
YIQESQALA

SEQ ID NO: 8922 - protein, 9 aa, Homo sapiens
  misc_feature: Table A; Target 8922; HLA-B*13:02; AFP; ENSG00000081051; TAA
YIQESQALA

SEQ ID NO: 8923 - protein, 9 aa, Homo sapiens
  misc_feature: Table A; Target 8923; HLA-B*39:01; AFP; ENSG00000081051; TAA
YIQESQALA

SEQ ID NO: 8924 - protein, 9 aa, Homo sapiens
  misc_feature: Table A; Target 8924; HLA-B*54:01; AFP; ENSG00000081051; TAA
YIQESQALA

SEQ ID NO: 8925 - protein, 9 aa, Homo sapiens
  misc_feature: Table A; Target 8925; HLA-B*56:01; AFP; ENSG00000081051; TAA
YIQESQALA

SEQ ID NO: 8926 - protein, 9 aa, Homo sapiens
  misc_feature: Table A; Target 8926; HLA-C*03:03; AFP; ENSG00000081051; TAA
YIQESQALA

SEQ ID NO: 8927 - protein, 10 aa, Homo sapiens
  misc_feature: Table A; Target 8927; HLA-A*26:01; AFP; ENSG00000081051; TAA
YIQESQALAK

SEQ ID NO: 8928 - protein, 10 aa, Homo sapiens
  misc_feature: Table A; Target 8928; HLA-A*33:03; AFP; ENSG00000081051; TAA
YIQESQALAK

SEQ ID NO: 8929 - protein, 10 aa, Homo sapiens
  misc_feature: Table A; Target 8929; HLA-B*27:05; AFP; ENSG00000081051; TAA
YIQESQALAK

SEQ ID NO: 8930 - protein, 10 aa, Homo sapiens
  misc_feature: Table A; Target 8930; HLA-C*06:02; AFP; ENSG00000081051; TAA
YIQESQALAK

SEQ ID NO: 8931 - protein, 11 aa, Homo sapiens
  misc_feature: Table A; Target 8931; HLA-A*02:07; AFP; ENSG00000081051; TAA
YIQESQALAKR

SEQ ID NO: 8932 - protein, 11 aa, Homo sapiens
  misc_feature: Table A; Target 8932; HLA-A*03:01; AFP; ENSG00000081051; TAA
YIQESQALAKR

SEQ ID NO: 8933 - protein, 11 aa, Homo sapiens
  misc_feature: Table A; Target 8933; HLA-A*68:02; AFP; ENSG00000081051; TAA
YIQESQALAKR

SEQ ID NO: 8934 - protein, 11 aa, Homo sapiens
  misc_feature: Table A; Target 8934; HLA-C*04:01; AFP; ENSG00000081051; TAA
YIQESQALAKR

SEQ ID NO: 8935 - protein, 8 aa, Homo sapiens
  misc_feature: Table A; Target 8935; HLA-A*02:01; AFP; ENSG00000081051; TAA
YLQNAFLV

SEQ ID NO: 8936 - protein, 8 aa, Homo sapiens
  misc_feature: Table A; Target 8936; HLA-A*02:07; AFP; ENSG00000081051; TAA
YLQNAFLV

SEQ ID NO: 8937 - protein, 9 aa, Homo sapiens
  misc_feature: Table A; Target 8937; HLA-A*02:03; AFP; ENSG00000081051; TAA
YLQNAFLVA

SEQ ID NO: 8938 - protein, 9 aa, Homo sapiens
  misc_feature: Table A; Target 8938; HLA-A*02:07; AFP; ENSG00000081051; TAA
YLQNAFLVA

SEQ ID NO: 8939 - protein, 9 aa, Homo sapiens
  misc_feature: Table A; Target 8939; HLA-B*13:02; AFP; ENSG00000081051; TAA
YLQNAFLVA

SEQ ID NO: 8940 - protein, 10 aa, Homo sapiens
  misc_feature: Table A; Target 8940; HLA-A*02:03; AFP; ENSG00000081051; TAA
YLQNAFLVAY

SEQ ID NO: 8941 - protein, 10 aa, Homo sapiens
  misc_feature: Table A; Target 8941; HLA-A*02:04; AFP; ENSG00000081051; TAA
YLQNAFLVAY

SEQ ID NO: 8942 - protein, 10 aa, Homo sapiens
  misc_feature: Table A; Target 8942; HLA-A*02:07; AFP; ENSG00000081051; TAA
YLQNAFLVAY

SEQ ID NO: 8943 - protein, 10 aa, Homo sapiens
  misc_feature: Table A; Target 8943; HLA-A*25:01; AFP; ENSG00000081051; TAA
YLQNAFLVAY

SEQ ID NO: 8944 - protein, 10 aa, Homo sapiens
  misc_feature: Table A; Target 8944; HLA-A*26:01; AFP; ENSG00000081051; TAA
YLQNAFLVAY

SEQ ID NO: 8945 - protein, 10 aa, Homo sapiens
  misc_feature: Table A; Target 8945; HLA-B*15:03; AFP; ENSG00000081051; TAA
YLQNAFLVAY

SEQ ID NO: 8946 - protein, 10 aa, Homo sapiens
  misc_feature: Table A; Target 8946; HLA-B*44:02; AFP; ENSG00000081051; TAA
YLQNAFLVAY

SEQ ID NO: 8947 - protein, 10 aa, Homo sapiens
  misc_feature: Table A; Target 8947; HLA-C*02:02; AFP; ENSG00000081051; TAA
YLQNAFLVAY

SEQ ID NO: 8948 - protein, 10 aa, Homo sapiens
  misc_feature: Table A; Target 8948; HLA-C*03:03; AFP; ENSG00000081051; TAA
YLQNAFLVAY

SEQ ID NO: 8949 - protein, 10 aa, Homo sapiens
  misc_feature: Table A; Target 8949; HLA-C*04:01; AFP; ENSG00000081051; TAA
YLQNAFLVAY

SEQ ID NO: 8950 - protein, 10 aa, Homo sapiens
  misc_feature: Table A; Target 8950; HLA-C*07:01; AFP; ENSG00000081051; TAA
YLQNAFLVAY

SEQ ID NO: 8951 - protein, 10 aa, Homo sapiens
  misc_feature: Table A; Target 8951; HLA-C*07:04; AFP; ENSG00000081051; TAA
YLQNAFLVAY

SEQ ID NO: 8952 - protein, 9 aa, Homo sapiens
  misc_feature: Table A; Target 8952; HLA-A*02:01; AFP; ENSG00000081051; TAA
YQCTAEISL

SEQ ID NO: 8953 - protein, 9 aa, Homo sapiens
  misc_feature: Table A; Target 8953; HLA-A*30:01; AFP; ENSG00000081051; TAA
YQCTAEISL

SEQ ID NO: 8954 - protein, 9 aa, Homo sapiens
  misc_feature: Table A; Target 8954; HLA-B*15:01; AFP; ENSG00000081051; TAA
YQCTAEISL

SEQ ID NO: 8955 - protein, 9 aa, Homo sapiens
  misc_feature: Table A; Target 8955; HLA-B*15:03; AFP; ENSG00000081051; TAA
YQCTAEISL

SEQ ID NO: 8956 - protein, 9 aa, Homo sapiens
  misc_feature: Table A; Target 8956; HLA-B*35:03; AFP; ENSG00000081051; TAA
YQCTAEISL

SEQ ID NO: 8957 - protein, 9 aa, Homo sapiens
  misc_feature: Table A; Target 8957; HLA-B*40:02; AFP; ENSG00000081051; TAA
YQCTAEISL

SEQ ID NO: 8958 - protein, 9 aa, Homo sapiens
  misc_feature: Table A; Target 8958; HLA-C*03:04; AFP; ENSG00000081051; TAA
YQCTAEISL

SEQ ID NO: 8959 - protein, 9 aa, Homo sapiens
  misc_feature: Table A; Target 8959; HLA-C*04:01; AFP; ENSG00000081051; TAA
YQCTAEISL

SEQ ID NO: 8960 - protein, 9 aa, Homo sapiens
  misc_feature: Table A; Target 8960; HLA-C*05:01; AFP; ENSG00000081051; TAA
YQCTAEISL

SEQ ID NO: 8961 - protein, 9 aa, Homo sapiens
  misc_feature: Table A; Target 8961; HLA-C*06:02; AFP; ENSG00000081051; TAA
YQCTAEISL

SEQ ID NO: 8962 - protein, 9 aa, Homo sapiens
  misc_feature: Table A; Target 8962; HLA-C*07:02; AFP; ENSG00000081051; TAA
YQCTAEISL

SEQ ID NO: 8963 - protein, 9 aa, Homo sapiens
  misc_feature: Table A; Target 8963; HLA-B*38:01; AFP; ENSG00000081051; TAA
YQELLEKCF

SEQ ID NO: 8964 - protein, 9 aa, Homo sapiens
  misc_feature: Table A; Target 8964; HLA-B*44:02; AFP; ENSG00000081051; TAA
YQELLEKCF

SEQ ID NO: 8965 - protein, 9 aa, Homo sapiens
  misc_feature: Table A; Target 8965; HLA-B*44:03; AFP; ENSG00000081051; TAA
YQELLEKCF

SEQ ID NO: 8966 - protein, 8 aa, Homo sapiens
  misc_feature: Table A; Target 8966; HLA-A*23:01; AFP; ENSG00000081051; TAA
YTKKAPQL

SEQ ID NO: 8967 - protein, 8 aa, Homo sapiens
  misc_feature: Table A; Target 8967; HLA-A*32:01; AFP; ENSG00000081051; TAA
YTKKAPQL

SEQ ID NO: 8968 - protein, 8 aa, Homo sapiens
  misc_feature: Table A; Target 8968; HLA-B*46:01; AFP; ENSG00000081051; TAA
YTKKAPQL

SEQ ID NO: 8969 - protein, 8 aa, Homo sapiens
  misc_feature: Table A; Target 8969; HLA-C*04:01; AFP; ENSG00000081051; TAA
YTKKAPQL

SEQ ID NO: 8970 - protein, 8 aa, Homo sapiens
  misc_feature: Table A; Target 8970; HLA-C*07:02; AFP; ENSG00000081051; TAA
YTKKAPQL

SEQ ID NO: 8971 - protein, 8 aa, Homo sapiens
  misc_feature: Table A; Target 8971; HLA-C*07:04; AFP; ENSG00000081051; TAA
YTKKAPQL

SEQ ID NO: 8972 - protein, 10 aa, Homo sapiens
  misc_feature: Table A; Target 8972; HLA-B*27:02; AFP; ENSG00000081051; TAA
YVPPAFSDDK

SEQ ID NO: 8973 - protein, 11 aa, Homo sapiens
  misc_feature: Table A; Target 8973; HLA-A*02:07; AFP; ENSG00000081051; TAA
YVPPAFSDDKF

SEQ ID NO: 8974 - protein, 8 aa, Homo sapiens
  misc_feature: Table A; Target 8974; HLA-A*24:02; AFP; ENSG00000081051; TAA
YYLQNAFL

SEQ ID NO: 8975 - protein, 9 aa, Homo sapiens
  misc_feature: Table A; Target 8975; HLA-C*07:01; AFP; ENSG00000081051; TAA
YYLQNAFLV

SEQ ID NO: 8976 - protein, 10 aa, Homo sapiens
  misc_feature: Table A; Target 8976; HLA-A*24:02; AFP; ENSG00000081051; TAA
YYLQNAFLVA

SEQ ID NO: 8977 - protein, 9 aa, Homo sapiens
  misc_feature: Table A; Target 8977; HLA-B*40:02; AMELX; ENSG00000125363; CTA
AAFAMPLPP

SEQ ID NO: 8978 - protein, 9 aa, Homo sapiens
  misc_feature: Table A; Target 8978; HLA-B*54:01; AMELX; ENSG00000125363; CTA
AAFAMPLPP

SEQ ID NO: 8979 - protein, 9 aa, Homo sapiens
  misc_feature: Table A; Target 8979; HLA-B*56:01; AMELX; ENSG00000125363; CTA
AAFAMPLPP

SEQ ID NO: 8980 - protein, 9 aa, Homo sapiens
  misc_feature: Table A; Target 8980; HLA-C*04:01; AMELX; ENSG00000125363; CTA
AAFAMPLPP

SEQ ID NO: 8981 - protein, 9 aa, Homo sapiens
  misc_feature: Table A; Target 8981; HLA-C*06:02; AMELX; ENSG00000125363; CTA
AAFAMPLPP

SEQ ID NO: 8982 - protein, 9 aa, Homo sapiens
  misc_feature: Table A; Target 8982; HLA-C*07:01; AMELX; ENSG00000125363; CTA
AAFAMPLPP

SEQ ID NO: 8983 - protein, 9 aa, Homo sapiens
  misc_feature: Table A; Target 8983; HLA-C*07:02; AMELX; ENSG00000125363; CTA
AAFAMPLPP

SEQ ID NO: 8984 - protein, 9 aa, Homo sapiens
  misc_feature: Table A; Target 8984; HLA-C*12:03; AMELX; ENSG00000125363; CTA
AAFAMPLPP

SEQ ID NO: 8985 - protein, 9 aa, Homo sapiens
  misc_feature: Table A; Target 8985; HLA-C*16:04; AMELX; ENSG00000125363; CTA
AAFAMPLPP

SEQ ID NO: 8986 - protein, 10 aa, Homo sapiens
  misc_feature: Table A; Target 8986; HLA-A*11:01; AMELX; ENSG00000125363; CTA
AAFAMPLPPH

SEQ ID NO: 8987 - protein, 8 aa, Homo sapiens
  misc_feature: Table A; Target 8987; HLA-C*04:01; AMELX; ENSG00000125363; CTA
AMPLPPHP

SEQ ID NO: 8988 - protein, 8 aa, Homo sapiens
  misc_feature: Table A; Target 8988; HLA-C*06:02; AMELX; ENSG00000125363; CTA
AMPLPPHP

SEQ ID NO: 8989 - protein, 9 aa, Homo sapiens
  misc_feature: Table A; Target 8989; HLA-A*31:01; AMELX; ENSG00000125363; CTA
AMPLPPHPG

SEQ ID NO: 8990 - protein, 9 aa, Homo sapiens
  misc_feature: Table A; Target 8990; HLA-C*06:02; AMELX; ENSG00000125363; CTA
AMPLPPHPG

SEQ ID NO: 8991 - protein, 9 aa, Homo sapiens
  misc_feature: Table A; Target 8991; HLA-A*32:01; AMELX; ENSG00000125363; CTA
AQQPVIPQQ

SEQ ID NO: 8992 - protein, 9 aa, Homo sapiens
  misc_feature: Table A; Target 8992; HLA-B*13:02; AMELX; ENSG00000125363; CTA
AQQPVIPQQ

SEQ ID NO: 8993 - protein, 9 aa, Homo sapiens
  misc_feature: Table A; Target 8993; HLA-B*15:01; AMELX; ENSG00000125363; CTA
AQQPVIPQQ

SEQ ID NO: 8994 - protein, 9 aa, Homo sapiens
  misc_feature: Table A; Target 8994; HLA-B*39:01; AMELX; ENSG00000125363; CTA
AQQPVIPQQ

SEQ ID NO: 8995 - protein, 11 aa, Homo sapiens
  misc_feature: Table A; Target 8995; HLA-A*30:02; AMELX; ENSG00000125363; CTA
AQQPVIPQQPM

SEQ ID NO: 8996 - protein, 10 aa, Homo sapiens
  misc_feature: Table A; Target 8996; HLA-A*02:03; AMELX; ENSG00000125363; CTA
AQQPYQPQPV

SEQ ID NO: 8997 - protein, 10 aa, Homo sapiens
  misc_feature: Table A; Target 8997; HLA-B*13:02; AMELX; ENSG00000125363; CTA
AQQPYQPQPV

SEQ ID NO: 8998 - protein, 10 aa, Homo sapiens
  misc_feature: Table A; Target 8998; HLA-B*27:05; AMELX; ENSG00000125363; CTA
AQQPYQPQPV

SEQ ID NO: 8999 - protein, 10 aa, Homo sapiens
  misc_feature: Table A; Target 8999; HLA-B*39:01; AMELX; ENSG00000125363; CTA
AQQPYQPQPV

SEQ ID NO: 9000 - protein, 10 aa, Homo sapiens
  misc_feature: Table A; Target 9000; HLA-C*06:02; AMELX; ENSG00000125363; CTA
AQQPYQPQPV

SEQ ID NO: 9001 - protein, 9 aa, Homo sapiens
  misc_feature: Table A; Target 9001; HLA-A*02:04; AMELX; ENSG00000125363; CTA
CLLGAAFAM

SEQ ID NO: 9002 - protein, 9 aa, Homo sapiens
  misc_feature: Table A; Target 9002; HLA-A*29:02; AMELX; ENSG00000125363; CTA
CLLGAAFAM

SEQ ID NO: 9003 - protein, 9 aa, Homo sapiens
  misc_feature: Table A; Target 9003; HLA-C*01:02; AMELX; ENSG00000125363; CTA
CLLGAAFAM

SEQ ID NO: 9004 - protein, 9 aa, Homo sapiens
  misc_feature: Table A; Target 9004; HLA-C*14:02; AMELX; ENSG00000125363; CTA
CLLGAAFAM

SEQ ID NO: 9005 - protein, 10 aa, Homo sapiens
  misc_feature: Table A; Target 9005; HLA-A*68:01; AMELX; ENSG00000125363; CTA
EAWPSTDKTK

SEQ ID NO: 9006 - protein, 11 aa, Homo sapiens
  misc_feature: Table A; Target 9006; HLA-A*33:01; AMELX; ENSG00000125363; CTA
EAWPSTDKTKR

SEQ ID NO: 9007 - protein, 11 aa, Homo sapiens
  misc_feature: Table A; Target 9007; HLA-A*33:03; AMELX; ENSG00000125363; CTA
EAWPSTDKTKR

SEQ ID NO: 9008 - protein, 11 aa, Homo sapiens
  misc_feature: Table A; Target 9008; HLA-A*68:01; AMELX; ENSG00000125363; CTA
EAWPSTDKTKR

SEQ ID NO: 9009 - protein, 11 aa, Homo sapiens
  misc_feature: Table A; Target 9009; HLA-B*35:01; AMELX; ENSG00000125363; CTA
EAWPSTDKTKR

SEQ ID NO: 9010 - protein, 8 aa, Homo sapiens
  misc_feature: Table A; Target 9010; HLA-A*25:01; AMELX; ENSG00000125363; CTA
EVLTPLKW

SEQ ID NO: 9011 - protein, 8 aa, Homo sapiens
  misc_feature: Table A; Target 9011; HLA-B*57:01; AMELX; ENSG00000125363; CTA
EVLTPLKW

SEQ ID NO: 9012 - protein, 9 aa, Homo sapiens
  misc_feature: Table A; Target 9012; HLA-B*27:02; AMELX; ENSG00000125363; CTA
FACLLGAAF

SEQ ID NO: 9013 - protein, 9 aa, Homo sapiens
  misc_feature: Table A; Target 9013; HLA-B*35:01; AMELX; ENSG00000125363; CTA
FACLLGAAF

SEQ ID NO: 9014 - protein, 9 aa, Homo sapiens
  misc_feature: Table A; Target 9014; HLA-B*46:01; AMELX; ENSG00000125363; CTA
FACLLGAAF

SEQ ID NO: 9015 - protein, 9 aa, Homo sapiens
  misc_feature: Table A; Target 9015; HLA-C*02:02; AMELX; ENSG00000125363; CTA
FACLLGAAF

SEQ ID NO: 9016 - protein, 9 aa, Homo sapiens
  misc_feature: Table A; Target 9016; HLA-C*03:03; AMELX; ENSG00000125363; CTA
FACLLGAAF

SEQ ID NO: 9017 - protein, 9 aa, Homo sapiens
  misc_feature: Table A; Target 9017; HLA-C*03:04; AMELX; ENSG00000125363; CTA
FACLLGAAF

SEQ ID NO: 9018 - protein, 8 aa, Homo sapiens
  misc_feature: Table A; Target 9018; HLA-B*54:01; AMELX; ENSG00000125363; CTA
FAMPLPPH

SEQ ID NO: 9019 - protein, 9 aa, Homo sapiens
  misc_feature: Table A; Target 9019; HLA-B*54:01; AMELX; ENSG00000125363; CTA
FAMPLPPHP

SEQ ID NO: 9020 - protein, 10 aa, Homo sapiens
  misc_feature: Table A; Target 9020; HLA-A*31:01; AMELX; ENSG00000125363; CTA
FAMPLPPHPG

SEQ ID NO: 9021 - protein, 10 aa, Homo sapiens
  misc_feature: Table A; Target 9021; HLA-B*54:01; AMELX; ENSG00000125363; CTA
FAMPLPPHPG

SEQ ID NO: 9022 - protein, 10 aa, Homo sapiens
  misc_feature: Table A; Target 9022; HLA-C*12:03; AMELX; ENSG00000125363; CTA
FAMPLPPHPG

SEQ ID NO: 9023 - protein, 8 aa, Homo sapiens
  misc_feature: Table A; Target 9023; HLA-B*54:01; AMELX; ENSG00000125363; CTA
FPMQPLPP

SEQ ID NO: 9024 - protein, 9 aa, Homo sapiens
  misc_feature: Table A; Target 9024; HLA-B*07:02; AMELX; ENSG00000125363; CTA
FPMQPLPPM

SEQ ID NO: 9025 - protein, 9 aa, Homo sapiens
  misc_feature: Table A; Target 9025; HLA-B*35:01; AMELX; ENSG00000125363; CTA
FPMQPLPPM

SEQ ID NO: 9026 - protein, 9 aa, Homo sapiens
  misc_feature: Table A; Target 9026; HLA-B*35:03; AMELX; ENSG00000125363; CTA
FPMQPLPPM

SEQ ID NO: 9027 - protein, 9 aa, Homo sapiens
  misc_feature: Table A; Target 9027; HLA-B*51:01; AMELX; ENSG00000125363; CTA
FPMQPLPPM

SEQ ID NO: 9028 - protein, 9 aa, Homo sapiens
  misc_feature: Table A; Target 9028; HLA-B*54:01; AMELX; ENSG00000125363; CTA
FPMQPLPPM

SEQ ID NO: 9029 - protein, 9 aa, Homo sapiens
  misc_feature: Table A; Target 9029; HLA-B*55:01; AMELX; ENSG00000125363; CTA
FPMQPLPPM

SEQ ID NO: 9030 - protein, 9 aa, Homo sapiens
  misc_feature: Table A; Target 9030; HLA-B*56:01; AMELX; ENSG00000125363; CTA
FPMQPLPPM

SEQ ID NO: 9031 - protein, 10 aa, Homo sapiens
  misc_feature: Table A; Target 9031; HLA-B*35:03; AMELX; ENSG00000125363; CTA
FPMQPLPPML

SEQ ID NO: 9032 - protein, 10 aa, Homo sapiens
  misc_feature: Table A; Target 9032; HLA-B*54:01; AMELX; ENSG00000125363; CTA
FPMQPLPPML

SEQ ID NO: 9033 - protein, 10 aa, Homo sapiens
  misc_feature: Table A; Target 9033; HLA-B*56:01; AMELX; ENSG00000125363; CTA
FPMQPLPPML

SEQ ID NO: 9034 - protein, 9 aa, Homo sapiens
  misc_feature: Table A; Target 9034; HLA-A*02:01; AMELX; ENSG00000125363; CTA
FSYEVLTPL

SEQ ID NO: 9035 - protein, 9 aa, Homo sapiens
  misc_feature: Table A; Target 9035; HLA-A*02:07; AMELX; ENSG00000125363; CTA
FSYEVLTPL

SEQ ID NO: 9036 - protein, 9 aa, Homo sapiens
  misc_feature: Table A; Target 9036; HLA-A*68:02; AMELX; ENSG00000125363; CTA
FSYEVLTPL

SEQ ID NO: 9037 - protein, 9 aa, Homo sapiens
  misc_feature: Table A; Target 9037; HLA-B*46:01; AMELX; ENSG00000125363; CTA
FSYEVLTPL

SEQ ID NO: 9038 - protein, 9 aa, Homo sapiens
  misc_feature: Table A; Target 9038; HLA-B*54:01; AMELX; ENSG00000125363; CTA
FSYEVLTPL

SEQ ID NO: 9039 - protein, 9 aa, Homo sapiens
  misc_feature: Table A; Target 9039; HLA-C*02:02; AMELX; ENSG00000125363; CTA
FSYEVLTPL

SEQ ID NO: 9040 - protein, 9 aa, Homo sapiens
  misc_feature: Table A; Target 9040; HLA-C*03:03; AMELX; ENSG00000125363; CTA
FSYEVLTPL

SEQ ID NO: 9041 - protein, 9 aa, Homo sapiens
  misc_feature: Table A; Target 9041; HLA-C*03:04; AMELX; ENSG00000125363; CTA
FSYEVLTPL

SEQ ID NO: 9042 - protein, 9 aa, Homo sapiens
  misc_feature: Table A; Target 9042; HLA-C*16:04; AMELX; ENSG00000125363; CTA
FSYEVLTPL

SEQ ID NO: 9043 - protein, 11 aa, Homo sapiens
  misc_feature: Table A; Target 9043; HLA-B*57:01; AMELX; ENSG00000125363; CTA
FSYEVLTPLKW

SEQ ID NO: 9044 - protein, 8 aa, Homo sapiens
  misc_feature: Table A; Target 9044; HLA-C*03:04; AMELX; ENSG00000125363; CTA
GAAFAMPL

SEQ ID NO: 9045 - protein, 10 aa, Homo sapiens
  misc_feature: Table A; Target 9045; HLA-C*06:02; AMELX; ENSG00000125363; CTA
GAAFAMPLPP

SEQ ID NO: 9046 - protein, 10 aa, Homo sapiens
  misc_feature: Table A; Target 9046; HLA-C*07:02; AMELX; ENSG00000125363; CTA
GAAFAMPLPP

SEQ ID NO: 9047 - protein, 10 aa, Homo sapiens
  misc_feature: Table A; Target 9047; HLA-A*29:02; AMELX; ENSG00000125363; CTA
GHPGYINFSY

SEQ ID NO: 9048 - protein, 8 aa, Homo sapiens
  misc_feature: Table A; Target 9048; HLA-B*13:02; AMELX; ENSG00000125363; CTA
GQHSMTPI

SEQ ID NO: 9049 - protein, 9 aa, Homo sapiens
  misc_feature: Table A; Target 9049; HLA-A*23:01; AMELX; ENSG00000125363; CTA
GYINFSYEV

SEQ ID NO: 9050 - protein, 9 aa, Homo sapiens
  misc_feature: Table A; Target 9050; HLA-A*24:02; AMELX; ENSG00000125363; CTA
GYINFSYEV

SEQ ID NO: 9051 - protein, 9 aa, Homo sapiens
  misc_feature: Table A; Target 9051; HLA-A*29:02; AMELX; ENSG00000125363; CTA
GYINFSYEV

SEQ ID NO: 9052 - protein, 9 aa, Homo sapiens
  misc_feature: Table A; Target 9052; HLA-C*14:02; AMELX; ENSG00000125363; CTA
GYINFSYEV

SEQ ID NO: 9053 - protein, 9 aa, Homo sapiens
  misc_feature: Table A; Target 9053; HLA-B*54:01; AMELX; ENSG00000125363; CTA
HHHIPVVPA

SEQ ID NO: 9054 - protein, 8 aa, Homo sapiens
  misc_feature: Table A; Target 9054; HLA-B*38:01; AMELX; ENSG00000125363; CTA
HHQIIPVL

SEQ ID NO: 9055 - protein, 8 aa, Homo sapiens
  misc_feature: Table A; Target 9055; HLA-B*39:01; AMELX; ENSG00000125363; CTA
HHQIIPVL

SEQ ID NO: 9056 - protein, 8 aa, Homo sapiens
  misc_feature: Table A; Target 9056; HLA-C*07:04; AMELX; ENSG00000125363; CTA
HHQIIPVL

SEQ ID NO: 9057 - protein, 9 aa, Homo sapiens
  misc_feature: Table A; Target 9057; HLA-A*29:02; AMELX; ENSG00000125363; CTA
HPGYINFSY

SEQ ID NO: 9058 - protein, 9 aa, Homo sapiens
  misc_feature: Table A; Target 9058; HLA-B*35:01; AMELX; ENSG00000125363; CTA
HPGYINFSY

SEQ ID NO: 9059 - protein, 9 aa, Homo sapiens
  misc_feature: Table A; Target 9059; HLA-B*55:01; AMELX; ENSG00000125363; CTA
HPGYINFSY

SEQ ID NO: 9060 - protein, 10 aa, Homo sapiens
  misc_feature: Table A; Target 9060; HLA-B*54:01; AMELX; ENSG00000125363; CTA
HPMQPLPPQP

SEQ ID NO: 9061 - protein, 9 aa, Homo sapiens
  misc_feature: Table A; Target 9061; HLA-B*54:01; AMELX; ENSG00000125363; CTA
HPPTHTLQP

SEQ ID NO: 9062 - protein, 9 aa, Homo sapiens
  misc_feature: Table A; Target 9062; HLA-B*13:02; AMELX; ENSG00000125363; CTA
HQIIPVLSQ

SEQ ID NO: 9063 - protein, 9 aa, Homo sapiens
  misc_feature: Table A; Target 9063; HLA-B*27:05; AMELX; ENSG00000125363; CTA
HQIIPVLSQ

SEQ ID NO: 9064 - protein, 9 aa, Homo sapiens
  misc_feature: Table A; Target 9064; HLA-B*54:01; AMELX; ENSG00000125363; CTA
HQPNLPPPA

SEQ ID NO: 9065 - protein, 8 aa, Homo sapiens
  misc_feature: Table A; Target 9065; HLA-A*11:01; AMELX; ENSG00000125363; CTA
HSMTPIQH

SEQ ID NO: 9066 - protein, 9 aa, Homo sapiens
  misc_feature: Table A; Target 9066; HLA-A*31:01; AMELX; ENSG00000125363; CTA
HSMTPIQHH

SEQ ID NO: 9067 - protein, 9 aa, Homo sapiens
  misc_feature: Table A; Target 9067; HLA-A*33:01; AMELX; ENSG00000125363; CTA
HSMTPIQHH

SEQ ID NO: 9068 - protein, 9 aa, Homo sapiens
  misc_feature: Table A; Target 9068; HLA-A*33:03; AMELX; ENSG00000125363; CTA
HSMTPIQHH

SEQ ID NO: 9069 - protein, 9 aa, Homo sapiens
  misc_feature: Table A; Target 9069; HLA-A*02:03; AMELX; ENSG00000125363; CTA
ILFACLLGA

SEQ ID NO: 9070 - protein, 9 aa, Homo sapiens
  misc_feature: Table A; Target 9070; HLA-B*07:02; AMELX; ENSG00000125363; CTA
IPQQPMMPV

SEQ ID NO: 9071 - protein, 9 aa, Homo sapiens
  misc_feature: Table A; Target 9071; HLA-B*51:01; AMELX; ENSG00000125363; CTA
IPQQPMMPV

SEQ ID NO: 9072 - protein, 9 aa, Homo sapiens
  misc_feature: Table A; Target 9072; HLA-B*54:01; AMELX; ENSG00000125363; CTA
IPQQPMMPV

SEQ ID NO: 9073 - protein, 9 aa, Homo sapiens
  misc_feature: Table A; Target 9073; HLA-B*56:01; AMELX; ENSG00000125363; CTA
IPQQPMMPV

SEQ ID NO: 9074 - protein, 9 aa, Homo sapiens
  misc_feature: Table A; Target 9074; HLA-C*07:02; AMELX; ENSG00000125363; CTA
IPQQPMMPV

SEQ ID NO: 9075 - protein, 10 aa, Homo sapiens
  misc_feature: Table A; Target 9075; HLA-B*56:01; AMELX; ENSG00000125363; CTA
IPQQPMMPVP

SEQ ID NO: 9076 - protein, 10 aa, Homo sapiens
  misc_feature: Table A; Target 9076; HLA-B*54:01; AMELX; ENSG00000125363; CTA
IPVLSQQHPP

SEQ ID NO: 9077 - protein, 10 aa, Homo sapiens
  misc_feature: Table A; Target 9077; HLA-B*56:01; AMELX; ENSG00000125363; CTA
IPVLSQQHPP

SEQ ID NO: 9078 - protein, 9 aa, Homo sapiens
  misc_feature: Table A; Target 9078; HLA-B*54:01; AMELX; ENSG00000125363; CTA
IPVVPAQQP

SEQ ID NO: 9079 - protein, 9 aa, Homo sapiens
  misc_feature: Table A; Target 9079; HLA-B*55:01; AMELX; ENSG00000125363; CTA
IPVVPAQQP

SEQ ID NO: 9080 - protein, 9 aa, Homo sapiens
  misc_feature: Table A; Target 9080; HLA-B*56:01; AMELX; ENSG00000125363; CTA
IPVVPAQQP

SEQ ID NO: 9081 - protein, 10 aa, Homo sapiens
  misc_feature: Table A; Target 9081; HLA-B*56:01; AMELX; ENSG00000125363; CTA
IPVVPAQQPV

SEQ ID NO: 9082 - protein, 11 aa, Homo sapiens
  misc_feature: Table A; Target 9082; HLA-B*51:01; AMELX; ENSG00000125363; CTA
IPVVPAQQPVI

SEQ ID NO: 9083 - protein, 11 aa, Homo sapiens
  misc_feature: Table A; Target 9083; HLA-B*54:01; AMELX; ENSG00000125363; CTA
IPVVPAQQPVI

SEQ ID NO: 9084 - protein, 11 aa, Homo sapiens
  misc_feature: Table A; Target 9084; HLA-B*56:01; AMELX; ENSG00000125363; CTA
IPVVPAQQPVI

SEQ ID NO: 9085 - protein, 8 aa, Homo sapiens
  misc_feature: Table A; Target 9085; HLA-B*15:03; AMELX; ENSG00000125363; CTA
IQHHQPNL

SEQ ID NO: 9086 - protein, 8 aa, Homo sapiens
  misc_feature: Table A; Target 9086; HLA-C*06:02; AMELX; ENSG00000125363; CTA
IRPPYPSY

SEQ ID NO: 9087 - protein, 8 aa, Homo sapiens
  misc_feature: Table A; Target 9087; HLA-C*07:01; AMELX; ENSG00000125363; CTA
IRPPYPSY

SEQ ID NO: 9088 - protein, 8 aa, Homo sapiens
  misc_feature: Table A; Target 9088; HLA-C*07:02; AMELX; ENSG00000125363; CTA
IRPPYPSY

SEQ ID NO: 9089 - protein, 10 aa, Homo sapiens
  misc_feature: Table A; Target 9089; HLA-A*29:02; AMELX; ENSG00000125363; CTA
IRPPYPSYGY

SEQ ID NO: 9090 - protein, 10 aa, Homo sapiens
  misc_feature: Table A; Target 9090; HLA-C*07:01; AMELX; ENSG00000125363; CTA
IRPPYPSYGY

SEQ ID NO: 9091 - protein, 10 aa, Homo sapiens
  misc_feature: Table A; Target 9091; HLA-C*07:02; AMELX; ENSG00000125363; CTA
IRPPYPSYGY

SEQ ID NO: 9092 - protein, 9 aa, Homo sapiens
  misc_feature: Table A; Target 9092; HLA-C*03:04; AMELX; ENSG00000125363; CTA
LGAAFAMPL

SEQ ID NO: 9093 - protein, 9 aa, Homo sapiens
  misc_feature: Table A; Target 9093; HLA-C*06:02; AMELX; ENSG00000125363; CTA
LGAAFAMPL

SEQ ID NO: 9094 - protein, 9 aa, Homo sapiens
  misc_feature: Table A; Target 9094; HLA-C*07:01; AMELX; ENSG00000125363; CTA
LGAAFAMPL

SEQ ID NO: 9095 - protein, 9 aa, Homo sapiens
  misc_feature: Table A; Target 9095; HLA-C*07:02; AMELX; ENSG00000125363; CTA
LGAAFAMPL

SEQ ID NO: 9096 - protein, 9 aa, Homo sapiens
  misc_feature: Table A; Target 9096; HLA-C*07:04; AMELX; ENSG00000125363; CTA
LGAAFAMPL

SEQ ID NO: 9097 - protein, 9 aa, Homo sapiens
  misc_feature: Table A; Target 9097; HLA-C*12:03; AMELX; ENSG00000125363; CTA
LGAAFAMPL

SEQ ID NO: 9098 - protein, 9 aa, Homo sapiens
  misc_feature: Table A; Target 9098; HLA-A*02:04; AMELX; ENSG00000125363; CTA
LHHQIIPVL

SEQ ID NO: 9099 - protein, 9 aa, Homo sapiens
  misc_feature: Table A; Target 9099; HLA-A*24:02; AMELX; ENSG00000125363; CTA
LHHQIIPVL

SEQ ID NO: 9100 - protein, 9 aa, Homo sapiens
  misc_feature: Table A; Target 9100; HLA-A*68:02; AMELX; ENSG00000125363; CTA
LHHQIIPVL

SEQ ID NO: 9101 - protein, 9 aa, Homo sapiens
  misc_feature: Table A; Target 9101; HLA-B*38:01; AMELX; ENSG00000125363; CTA
LHHQIIPVL

SEQ ID NO: 9102 - protein, 9 aa, Homo sapiens
  misc_feature: Table A; Target 9102; HLA-B*39:01; AMELX; ENSG00000125363; CTA
LHHQIIPVL

SEQ ID NO: 9103 - protein, 9 aa, Homo sapiens
  misc_feature: Table A; Target 9103; HLA-C*06:02; AMELX; ENSG00000125363; CTA
LHHQIIPVL

SEQ ID NO: 9104 - protein, 8 aa, Homo sapiens
  misc_feature: Table A; Target 9104; HLA-C*07:01; AMELX; ENSG00000125363; CTA
LLGAAFAM

SEQ ID NO: 9105 - protein, 8 aa, Homo sapiens
  misc_feature: Table A; Target 9105; HLA-C*07:02; AMELX; ENSG00000125363; CTA
LLGAAFAM

SEQ ID NO: 9106 - protein, 8 aa, Homo sapiens
  misc_feature: Table A; Target 9106; HLA-C*07:04; AMELX; ENSG00000125363; CTA
LLGAAFAM

SEQ ID NO: 9107 - protein, 8 aa, Homo sapiens
  misc_feature: Table A; Target 9107; HLA-C*14:02; AMELX; ENSG00000125363; CTA
LLGAAFAM

SEQ ID NO: 9108 - protein, 8 aa, Homo sapiens
  misc_feature: Table A; Target 9108; HLA-B*54:01; AMELX; ENSG00000125363; CTA
LPDLTLEA

SEQ ID NO: 9109 - protein, 9 aa, Homo sapiens
  misc_feature: Table A; Target 9109; HLA-B*35:01; AMELX; ENSG00000125363; CTA
LPDLTLEAW

SEQ ID NO: 9110 - protein, 9 aa, Homo sapiens
  misc_feature: Table A; Target 9110; HLA-B*55:01; AMELX; ENSG00000125363; CTA
LPDLTLEAW

SEQ ID NO: 9111 - protein, 8 aa, Homo sapiens
  misc_feature: Table A; Target 9111; HLA-B*51:01; AMELX; ENSG00000125363; CTA
LPPMLPDL

SEQ ID NO: 9112 - protein, 10 aa, Homo sapiens
  misc_feature: Table A; Target 9112; HLA-B*35:03; AMELX; ENSG00000125363; CTA
LPPMLPDLTL

SEQ ID NO: 9113 - protein, 10 aa, Homo sapiens
  misc_feature: Table A; Target 9113; HLA-B*51:01; AMELX; ENSG00000125363; CTA
LPPMLPDLTL

SEQ ID NO: 9114 - protein, 8 aa, Homo sapiens
  misc_feature: Table A; Target 9114; HLA-B*51:01; AMELX; ENSG00000125363; CTA
LPPPAQQP

SEQ ID NO: 9115 - protein, 9 aa, Homo sapiens
  misc_feature: Table A; Target 9115; HLA-A*26:01; AMELX; ENSG00000125363; CTA
LPPPAQQPY

SEQ ID NO: 9116 - protein, 9 aa, Homo sapiens
  misc_feature: Table A; Target 9116; HLA-A*29:02; AMELX; ENSG00000125363; CTA
LPPPAQQPY

SEQ ID NO: 9117 - protein, 9 aa, Homo sapiens
  misc_feature: Table A; Target 9117; HLA-B*07:02; AMELX; ENSG00000125363; CTA
LPPPAQQPY

SEQ ID NO: 9118 - protein, 9 aa, Homo sapiens
  misc_feature: Table A; Target 9118; HLA-B*35:01; AMELX; ENSG00000125363; CTA
LPPPAQQPY

SEQ ID NO: 9119 - protein, 9 aa, Homo sapiens
  misc_feature: Table A; Target 9119; HLA-B*35:03; AMELX; ENSG00000125363; CTA
LPPPAQQPY

SEQ ID NO: 9120 - protein, 9 aa, Homo sapiens
  misc_feature: Table A; Target 9120; HLA-B*51:01; AMELX; ENSG00000125363; CTA
LPPPAQQPY

SEQ ID NO: 9121 - protein, 9 aa, Homo sapiens
  misc_feature: Table A; Target 9121; HLA-B*55:01; AMELX; ENSG00000125363; CTA
LPPPAQQPY

SEQ ID NO: 9122 - protein, 9 aa, Homo sapiens
  misc_feature: Table A; Target 9122; HLA-B*56:01; AMELX; ENSG00000125363; CTA
LPPPAQQPY

SEQ ID NO: 9123 - protein, 9 aa, Homo sapiens
  misc_feature: Table A; Target 9123; HLA-C*01:02; AMELX; ENSG00000125363; CTA
LPPPAQQPY

SEQ ID NO: 9124 - protein, 9 aa, Homo sapiens
  misc_feature: Table A; Target 9124; HLA-C*03:03; AMELX; ENSG00000125363; CTA
LPPPAQQPY

SEQ ID NO: 9125 - protein, 9 aa, Homo sapiens
  misc_feature: Table A; Target 9125; HLA-C*04:01; AMELX; ENSG00000125363; CTA
LPPPAQQPY

SEQ ID NO: 9126 - protein, 9 aa, Homo sapiens
  misc_feature: Table A; Target 9126; HLA-C*07:02; AMELX; ENSG00000125363; CTA
LPPPAQQPY

SEQ ID NO: 9127 - protein, 9 aa, Homo sapiens
  misc_feature: Table A; Target 9127; HLA-C*14:02; AMELX; ENSG00000125363; CTA
LPPPAQQPY

SEQ ID NO: 9128 - protein, 9 aa, Homo sapiens
  misc_feature: Table A; Target 9128; HLA-B*51:01; AMELX; ENSG00000125363; CTA
LPPQPPLPP

SEQ ID NO: 9129 - protein, 9 aa, Homo sapiens
  misc_feature: Table A; Target 9129; HLA-B*54:01; AMELX; ENSG00000125363; CTA
LPPQPPLPP

SEQ ID NO: 9130 - protein, 9 aa, Homo sapiens
  misc_feature: Table A; Target 9130; HLA-B*56:01; AMELX; ENSG00000125363; CTA
LPPQPPLPP

SEQ ID NO: 9131 - protein, 10 aa, Homo sapiens
  misc_feature: Table A; Target 9131; HLA-B*35:01; AMELX; ENSG00000125363; CTA
LPPQPPLPPM

SEQ ID NO: 9132 - protein, 10 aa, Homo sapiens
  misc_feature: Table A; Target 9132; HLA-B*35:03; AMELX; ENSG00000125363; CTA
LPPQPPLPPM

SEQ ID NO: 9133 - protein, 10 aa, Homo sapiens
  misc_feature: Table A; Target 9133; HLA-B*51:01; AMELX; ENSG00000125363; CTA
LPPQPPLPPM

SEQ ID NO: 9134 - protein, 10 aa, Homo sapiens
  misc_feature: Table A; Target 9134; HLA-B*54:01; AMELX; ENSG00000125363; CTA
LPPQPPLPPM

SEQ ID NO: 9135 - protein, 10 aa, Homo sapiens
  misc_feature: Table A; Target 9135; HLA-B*56:01; AMELX; ENSG00000125363; CTA
LPPQPPLPPM

SEQ ID NO: 9136 - protein, 9 aa, Homo sapiens
  misc_feature: Table A; Target 9136; HLA-A*02:07; AMELX; ENSG00000125363; CTA
MLPDLTLEA

SEQ ID NO: 9137 - protein, 10 aa, Homo sapiens
  misc_feature: Table A; Target 9137; HLA-A*02:07; AMELX; ENSG00000125363; CTA
MLPDLTLEAW

SEQ ID NO: 9138 - protein, 10 aa, Homo sapiens
  misc_feature: Table A; Target 9138; HLA-A*25:01; AMELX; ENSG00000125363; CTA
MLPDLTLEAW

SEQ ID NO: 9139 - protein, 10 aa, Homo sapiens
  misc_feature: Table A; Target 9139; HLA-A*02:07; AMELX; ENSG00000125363; CTA
MMPVPGQHSM

SEQ ID NO: 9140 - protein, 10 aa, Homo sapiens
  misc_feature: Table A; Target 9140; HLA-C*01:02; AMELX; ENSG00000125363; CTA
MMPVPGQHSM

SEQ ID NO: 9141 - protein, 10 aa, Homo sapiens
  misc_feature: Table A; Target 9141; HLA-C*04:01; AMELX; ENSG00000125363; CTA
MMPVPGQHSM

SEQ ID NO: 9142 - protein, 8 aa, Homo sapiens
  misc_feature: Table A; Target 9142; HLA-B*54:01; AMELX; ENSG00000125363; CTA
MPLPPHPG

SEQ ID NO: 9143 - protein, 8 aa, Homo sapiens
  misc_feature: Table A; Target 9143; HLA-C*04:01; AMELX; ENSG00000125363; CTA
MPLPPHPG

SEQ ID NO: 9144 - protein, 8 aa, Homo sapiens
  misc_feature: Table A; Target 9144; HLA-C*07:01; AMELX; ENSG00000125363; CTA
MPLPPHPG

SEQ ID NO: 9145 - protein, 9 aa, Homo sapiens
  misc_feature: Table A; Target 9145; HLA-B*07:02; AMELX; ENSG00000125363; CTA
MPLPPHPGH

SEQ ID NO: 9146 - protein, 9 aa, Homo sapiens
  misc_feature: Table A; Target 9146; HLA-B*35:01; AMELX; ENSG00000125363; CTA
MPLPPHPGH

SEQ ID NO: 9147 - protein, 9 aa, Homo sapiens
  misc_feature: Table A; Target 9147; HLA-B*35:03; AMELX; ENSG00000125363; CTA
MPLPPHPGH

SEQ ID NO: 9148 - protein, 9 aa, Homo sapiens
  misc_feature: Table A; Target 9148; HLA-B*51:01; AMELX; ENSG00000125363; CTA
MPLPPHPGH

SEQ ID NO: 9149 - protein, 9 aa, Homo sapiens
  misc_feature: Table A; Target 9149; HLA-B*54:01; AMELX; ENSG00000125363; CTA
MPLPPHPGH

SEQ ID NO: 9150 - protein, 9 aa, Homo sapiens
  misc_feature: Table A; Target 9150; HLA-B*55:01; AMELX; ENSG00000125363; CTA
MPLPPHPGH

SEQ ID NO: 9151 - protein, 10 aa, Homo sapiens
  misc_feature: Table A; Target 9151; HLA-B*54:01; AMELX; ENSG00000125363; CTA
MPLPPHPGHP

SEQ ID NO: 9152 - protein, 11 aa, Homo sapiens
  misc_feature: Table A; Target 9152; HLA-B*54:01; AMELX; ENSG00000125363; CTA
MPLPPHPGHPG

SEQ ID NO: 9153 - protein, 9 aa, Homo sapiens
  misc_feature: Table A; Target 9153; HLA-A*25:01; AMELX; ENSG00000125363; CTA
MPVPGQHSM

SEQ ID NO: 9154 - protein, 9 aa, Homo sapiens
  misc_feature: Table A; Target 9154; HLA-A*30:01; AMELX; ENSG00000125363; CTA
MPVPGQHSM

SEQ ID NO: 9155 - protein, 9 aa, Homo sapiens
  misc_feature: Table A; Target 9155; HLA-B*07:02; AMELX; ENSG00000125363; CTA
MPVPGQHSM

SEQ ID NO: 9156 - protein, 9 aa, Homo sapiens
  misc_feature: Table A; Target 9156; HLA-B*08:01; AMELX; ENSG00000125363; CTA
MPVPGQHSM

SEQ ID NO: 9157 - protein, 9 aa, Homo sapiens
  misc_feature: Table A; Target 9157; HLA-B*35:03; AMELX; ENSG00000125363; CTA
MPVPGQHSM

SEQ ID NO: 9158 - protein, 9 aa, Homo sapiens
  misc_feature: Table A; Target 9158; HLA-B*38:01; AMELX; ENSG00000125363; CTA
MPVPGQHSM

SEQ ID NO: 9159 - protein, 9 aa, Homo sapiens
  misc_feature: Table A; Target 9159; HLA-B*39:01; AMELX; ENSG00000125363; CTA
MPVPGQHSM

SEQ ID NO: 9160 - protein, 9 aa, Homo sapiens
  misc_feature: Table A; Target 9160; HLA-B*46:01; AMELX; ENSG00000125363; CTA
MPVPGQHSM

SEQ ID NO: 9161 - protein, 9 aa, Homo sapiens
  misc_feature: Table A; Target 9161; HLA-B*51:01; AMELX; ENSG00000125363; CTA
MPVPGQHSM

SEQ ID NO: 9162 - protein, 9 aa, Homo sapiens
  misc_feature: Table A; Target 9162; HLA-B*54:01; AMELX; ENSG00000125363; CTA
MPVPGQHSM

SEQ ID NO: 9163 - protein, 9 aa, Homo sapiens
  misc_feature: Table A; Target 9163; HLA-B*55:01; AMELX; ENSG00000125363; CTA
MPVPGQHSM

SEQ ID NO: 9164 - protein, 9 aa, Homo sapiens
  misc_feature: Table A; Target 9164; HLA-B*56:01; AMELX; ENSG00000125363; CTA
MPVPGQHSM

SEQ ID NO: 9165 - protein, 9 aa, Homo sapiens
  misc_feature: Table A; Target 9165; HLA-B*58:01; AMELX; ENSG00000125363; CTA
MPVPGQHSM

SEQ ID NO: 9166 - protein, 9 aa, Homo sapiens
  misc_feature: Table A; Target 9166; HLA-C*03:03; AMELX; ENSG00000125363; CTA
MPVPGQHSM

SEQ ID NO: 9167 - protein, 9 aa, Homo sapiens
  misc_feature: Table A; Target 9167; HLA-C*03:04; AMELX; ENSG00000125363; CTA
MPVPGQHSM

SEQ ID NO: 9168 - protein, 9 aa, Homo sapiens
  misc_feature: Table A; Target 9168; HLA-C*04:01; AMELX; ENSG00000125363; CTA
MPVPGQHSM

SEQ ID NO: 9169 - protein, 9 aa, Homo sapiens
  misc_feature: Table A; Target 9169; HLA-C*07:02; AMELX; ENSG00000125363; CTA
MPVPGQHSM

SEQ ID NO: 9170 - protein, 9 aa, Homo sapiens
  misc_feature: Table A; Target 9170; HLA-C*14:02; AMELX; ENSG00000125363; CTA
MPVPGQHSM

SEQ ID NO: 9171 - protein, 9 aa, Homo sapiens
  misc_feature: Table A; Target 9171; HLA-C*16:01; AMELX; ENSG00000125363; CTA
MPVPGQHSM

SEQ ID NO: 9172 - protein, 9 aa, Homo sapiens
  misc_feature: Table A; Target 9172; HLA-C*16:02; AMELX; ENSG00000125363; CTA
MPVPGQHSM

SEQ ID NO: 9173 - protein, 10 aa, Homo sapiens
  misc_feature: Table A; Target 9173; HLA-B*54:01; AMELX; ENSG00000125363; CTA
MPVPGQHSMT

SEQ ID NO: 9174 - protein, 11 aa, Homo sapiens
  misc_feature: Table A; Target 9174; HLA-B*54:01; AMELX; ENSG00000125363; CTA
MPVPGQHSMTP

SEQ ID NO: 9175 - protein, 11 aa, Homo sapiens
  misc_feature: Table A; Target 9175; HLA-B*55:01; AMELX; ENSG00000125363; CTA
MPVPGQHSMTP

SEQ ID NO: 9176 - protein, 11 aa, Homo sapiens
  misc_feature: Table A; Target 9176; HLA-B*56:01; AMELX; ENSG00000125363; CTA
MPVPGQHSMTP

SEQ ID NO: 9177 - protein, 8 aa, Homo sapiens
  misc_feature: Table A; Target 9177; HLA-B*13:02; AMELX; ENSG00000125363; CTA
MQPLPPML

SEQ ID NO: 9178 - protein, 10 aa, Homo sapiens
  misc_feature: Table A; Target 9178; HLA-A*02:07; AMELX; ENSG00000125363; CTA
MQPQPPVHPM

SEQ ID NO: 9179 - protein, 10 aa, Homo sapiens
  misc_feature: Table A; Target 9179; HLA-C*04:01; AMELX; ENSG00000125363; CTA
MQPQPPVHPM

SEQ ID NO: 9180 - protein, 10 aa, Homo sapiens
  misc_feature: Table A; Target 9180; HLA-C*06:02; AMELX; ENSG00000125363; CTA
MQPQPPVHPM

SEQ ID NO: 9181 - protein, 10 aa, Homo sapiens
  misc_feature: Table A; Target 9181; HLA-C*07:04; AMELX; ENSG00000125363; CTA
MQPQPPVHPM

SEQ ID NO: 9182 - protein, 9 aa, Homo sapiens
  misc_feature: Table A; Target 9182; HLA-C*01:02; AMELX; ENSG00000125363; CTA
NLPPPAQQP

SEQ ID NO: 9183 - protein, 10 aa, Homo sapiens
  misc_feature: Table A; Target 9183; HLA-A*01:01; AMELX; ENSG00000125363; CTA
NLPPPAQQPY

SEQ ID NO: 9184 - protein, 10 aa, Homo sapiens
  misc_feature: Table A; Target 9184; HLA-A*29:02; AMELX; ENSG00000125363; CTA
NLPPPAQQPY

SEQ ID NO: 9185 - protein, 10 aa, Homo sapiens
  misc_feature: Table A; Target 9185; HLA-A*30:02; AMELX; ENSG00000125363; CTA
NLPPPAQQPY

SEQ ID NO: 9186 - protein, 10 aa, Homo sapiens
  misc_feature: Table A; Target 9186; HLA-B*15:01; AMELX; ENSG00000125363; CTA
NLPPPAQQPY

SEQ ID NO: 9187 - protein, 10 aa, Homo sapiens
  misc_feature: Table A; Target 9187; HLA-B*46:01; AMELX; ENSG00000125363; CTA
NLPPPAQQPY

SEQ ID NO: 9188 - protein, 10 aa, Homo sapiens
  misc_feature: Table A; Target 9188; HLA-C*01:02; AMELX; ENSG00000125363; CTA
NLPPPAQQPY

SEQ ID NO: 9189 - protein, 10 aa, Homo sapiens
  misc_feature: Table A; Target 9189; HLA-C*14:02; AMELX; ENSG00000125363; CTA
NLPPPAQQPY

SEQ ID NO: 9190 - protein, 10 aa, Homo sapiens
  misc_feature: Table A; Target 9190; HLA-C*16:01; AMELX; ENSG00000125363; CTA
NLPPPAQQPY

SEQ ID NO: 9191 - protein, 9 aa, Homo sapiens
  misc_feature: Table A; Target 9191; HLA-A*02:07; AMELX; ENSG00000125363; CTA
PLPPMLPDL

SEQ ID NO: 9192 - protein, 11 aa, Homo sapiens
  misc_feature: Table A; Target 9192; HLA-A*24:02; AMELX; ENSG00000125363; CTA
PMMPVPGQHSM

SEQ ID NO: 9193 - protein, 11 aa, Homo sapiens
  misc_feature: Table A; Target 9193; HLA-A*29:02; AMELX; ENSG00000125363; CTA
PNLPPPAQQPY

SEQ ID NO: 9194 - protein, 11 aa, Homo sapiens
  misc_feature: Table A; Target 9194; HLA-A*30:02; AMELX; ENSG00000125363; CTA
PNLPPPAQQPY

SEQ ID NO: 9195 - protein, 11 aa, Homo sapiens
  misc_feature: Table A; Target 9195; HLA-B*07:02; AMELX; ENSG00000125363; CTA
PNLPPPAQQPY

SEQ ID NO: 9196 - protein, 11 aa, Homo sapiens
  misc_feature: Table A; Target 9196; HLA-C*04:01; AMELX; ENSG00000125363; CTA
PNLPPPAQQPY

SEQ ID NO: 9197 - protein, 11 aa, Homo sapiens
  misc_feature: Table A; Target 9197; HLA-C*07:02; AMELX; ENSG00000125363; CTA
PNLPPPAQQPY

SEQ ID NO: 9198 - protein, 9 aa, Homo sapiens
  misc_feature: Table A; Target 9198; HLA-B*07:02; AMELX; ENSG00000125363; CTA
PPMLPDLTL

SEQ ID NO: 9199 - protein, 9 aa, Homo sapiens
  misc_feature: Table A; Target 9199; HLA-B*35:03; AMELX; ENSG00000125363; CTA
PPMLPDLTL

SEQ ID NO: 9200 - protein, 9 aa, Homo sapiens
  misc_feature: Table A; Target 9200; HLA-C*04:01; AMELX; ENSG00000125363; CTA
PPQPPLPPM

SEQ ID NO: 9201 - protein, 9 aa, Homo sapiens
  misc_feature: Table A; Target 9201; HLA-A*24:02; AMELX; ENSG00000125363; CTA
PQPPLPPMF

SEQ ID NO: 9202 - protein, 9 aa, Homo sapiens
  misc_feature: Table A; Target 9202; HLA-A*23:01; AMELX; ENSG00000125363; CTA
PVIPQQPMM

SEQ ID NO: 9203 - protein, 8 aa, Homo sapiens
  misc_feature: Table A; Target 9203; HLA-B*07:02; AMELX; ENSG00000125363; CTA
PVPGQHSM

SEQ ID NO: 9204 - protein, 10 aa, Homo sapiens
  misc_feature: Table A; Target 9204; HLA-C*07:02; AMELX; ENSG00000125363; CTA
PVPGQHSMTP

SEQ ID NO: 9205 - protein, 8 aa, Homo sapiens
  misc_feature: Table A; Target 9205; HLA-B*38:01; AMELX; ENSG00000125363; CTA
QHPPTHTL

SEQ ID NO: 9206 - protein, 9 aa, Homo sapiens
  misc_feature: Table A; Target 9206; HLA-B*38:01; AMELX; ENSG00000125363; CTA
QHSMTPIQH

SEQ ID NO: 9207 - protein, 9 aa, Homo sapiens
  misc_feature: Table A; Target 9207; HLA-A*26:01; AMELX; ENSG00000125363; CTA
QIIPVLSQQ

SEQ ID NO: 9208 - protein, 9 aa, Homo sapiens
  misc_feature: Table A; Target 9208; HLA-A*31:01; AMELX; ENSG00000125363; CTA
QIIPVLSQQ

SEQ ID NO: 9209 - protein, 8 aa, Homo sapiens
  misc_feature: Table A; Target 9209; HLA-B*08:01; AMELX; ENSG00000125363; CTA
QPHHHIPV

SEQ ID NO: 9210 - protein, 9 aa, Homo sapiens
  misc_feature: Table A; Target 9210; HLA-B*07:02; AMELX; ENSG00000125363; CTA
QPHHHIPVV

SEQ ID NO: 9211 - protein, 9 aa, Homo sapiens
  misc_feature: Table A; Target 9211; HLA-B*51:01; AMELX; ENSG00000125363; CTA
QPHHHIPVV

SEQ ID NO: 9212 - protein, 9 aa, Homo sapiens
  misc_feature: Table A; Target 9212; HLA-B*54:01; AMELX; ENSG00000125363; CTA
QPHHHIPVV

SEQ ID NO: 9213 - protein, 9 aa, Homo sapiens
  misc_feature: Table A; Target 9213; HLA-B*55:01; AMELX; ENSG00000125363; CTA
QPHHHIPVV

SEQ ID NO: 9214 - protein, 9 aa, Homo sapiens
  misc_feature: Table A; Target 9214; HLA-B*56:01; AMELX; ENSG00000125363; CTA
QPHHHIPVV

SEQ ID NO: 9215 - protein, 11 aa, Homo sapiens
  misc_feature: Table A; Target 9215; HLA-B*54:01; AMELX; ENSG00000125363; CTA
QPHHHIPVVPA

SEQ ID NO: 9216 - protein, 9 aa, Homo sapiens
  misc_feature: Table A; Target 9216; HLA-A*23:01; AMELX; ENSG00000125363; CTA
QPLPPQPPL

SEQ ID NO: 9217 - protein, 9 aa, Homo sapiens
  misc_feature: Table A; Target 9217; HLA-B*07:02; AMELX; ENSG00000125363; CTA
QPLPPQPPL

SEQ ID NO: 9218 - protein, 9 aa, Homo sapiens
  misc_feature: Table A; Target 9218; HLA-B*35:01; AMELX; ENSG00000125363; CTA
QPLPPQPPL

SEQ ID NO: 9219 - protein, 9 aa, Homo sapiens
  misc_feature: Table A; Target 9219; HLA-B*35:03; AMELX; ENSG00000125363; CTA
QPLPPQPPL

SEQ ID NO: 9220 - protein, 9 aa, Homo sapiens
  misc_feature: Table A; Target 9220; HLA-B*51:01; AMELX; ENSG00000125363; CTA
QPLPPQPPL

SEQ ID NO: 9221 - protein, 9 aa, Homo sapiens
  misc_feature: Table A; Target 9221; HLA-B*54:01; AMELX; ENSG00000125363; CTA
QPLPPQPPL

SEQ ID NO: 9222 - protein, 9 aa, Homo sapiens
  misc_feature: Table A; Target 9222; HLA-B*55:01; AMELX; ENSG00000125363; CTA
QPLPPQPPL

SEQ ID NO: 9223 - protein, 9 aa, Homo sapiens
  misc_feature: Table A; Target 9223; HLA-B*56:01; AMELX; ENSG00000125363; CTA
QPLPPQPPL

SEQ ID NO: 9224 - protein, 9 aa, Homo sapiens
  misc_feature: Table A; Target 9224; HLA-B*58:01; AMELX; ENSG00000125363; CTA
QPLPPQPPL

SEQ ID NO: 9225 - protein, 9 aa, Homo sapiens
  misc_feature: Table A; Target 9225; HLA-C*03:03; AMELX; ENSG00000125363; CTA
QPLPPQPPL

SEQ ID NO: 9226 - protein, 9 aa, Homo sapiens
  misc_feature: Table A; Target 9226; HLA-C*03:04; AMELX; ENSG00000125363; CTA
QPLPPQPPL

SEQ ID NO: 9227 - protein, 9 aa, Homo sapiens
  misc_feature: Table A; Target 9227; HLA-C*04:01; AMELX; ENSG00000125363; CTA
QPLPPQPPL

SEQ ID NO: 9228 - protein, 9 aa, Homo sapiens
  misc_feature: Table A; Target 9228; HLA-C*07:02; AMELX; ENSG00000125363; CTA
QPLPPQPPL

SEQ ID NO: 9229 - protein, 9 aa, Homo sapiens
  misc_feature: Table A; Target 9229; HLA-B*07:02; AMELX; ENSG00000125363; CTA
QPMQPQPPV

SEQ ID NO: 9230 - protein, 9 aa, Homo sapiens
  misc_feature: Table A; Target 9230; HLA-B*35:01; AMELX; ENSG00000125363; CTA
QPMQPQPPV

SEQ ID NO: 9231 - protein, 9 aa, Homo sapiens
  misc_feature: Table A; Target 9231; HLA-B*35:03; AMELX; ENSG00000125363; CTA
QPMQPQPPV

SEQ ID NO: 9232 - protein, 9 aa, Homo sapiens
  misc_feature: Table A; Target 9232; HLA-B*51:01; AMELX; ENSG00000125363; CTA
QPMQPQPPV

SEQ ID NO: 9233 - protein, 9 aa, Homo sapiens
  misc_feature: Table A; Target 9233; HLA-B*54:01; AMELX; ENSG00000125363; CTA
QPMQPQPPV

SEQ ID NO: 9234 - protein, 9 aa, Homo sapiens
  misc_feature: Table A; Target 9234; HLA-B*55:01; AMELX; ENSG00000125363; CTA
QPMQPQPPV

SEQ ID NO: 9235 - protein, 9 aa, Homo sapiens
  misc_feature: Table A; Target 9235; HLA-B*56:01; AMELX; ENSG00000125363; CTA
QPMQPQPPV

SEQ ID NO: 9236 - protein, 9 aa, Homo sapiens
  misc_feature: Table A; Target 9236; HLA-C*04:01; AMELX; ENSG00000125363; CTA
QPMQPQPPV

SEQ ID NO: 9237 - protein, 9 aa, Homo sapiens
  misc_feature: Table A; Target 9237; HLA-C*07:02; AMELX; ENSG00000125363; CTA
QPMQPQPPV

SEQ ID NO: 9238 - protein, 10 aa, Homo sapiens
  misc_feature: Table A; Target 9238; HLA-B*56:01; AMELX; ENSG00000125363; CTA
QPMQPQPPVH

SEQ ID NO: 9239 - protein, 8 aa, Homo sapiens
  misc_feature: Table A; Target 9239; HLA-B*54:01; AMELX; ENSG00000125363; CTA
QPNLPPPA

SEQ ID NO: 9240 - protein, 8 aa, Homo sapiens
  misc_feature: Table A; Target 9240; HLA-B*55:01; AMELX; ENSG00000125363; CTA
QPNLPPPA

SEQ ID NO: 9241 - protein, 8 aa, Homo sapiens
  misc_feature: Table A; Target 9241; HLA-B*56:01; AMELX; ENSG00000125363; CTA
QPNLPPPA

SEQ ID NO: 9242 - protein, 9 aa, Homo sapiens
  misc_feature: Table A; Target 9242; HLA-B*07:02; AMELX; ENSG00000125363; CTA
QPNLPPPAQ

SEQ ID NO: 9243 - protein, 9 aa, Homo sapiens
  misc_feature: Table A; Target 9243; HLA-B*35:01; AMELX; ENSG00000125363; CTA
QPNLPPPAQ

SEQ ID NO: 9244 - protein, 9 aa, Homo sapiens
  misc_feature: Table A; Target 9244; HLA-B*54:01; AMELX; ENSG00000125363; CTA
QPNLPPPAQ

SEQ ID NO: 9245 - protein, 9 aa, Homo sapiens
  misc_feature: Table A; Target 9245; HLA-B*55:01; AMELX; ENSG00000125363; CTA
QPNLPPPAQ

SEQ ID NO: 9246 - protein, 9 aa, Homo sapiens
  misc_feature: Table A; Target 9246; HLA-B*56:01; AMELX; ENSG00000125363; CTA
QPNLPPPAQ

SEQ ID NO: 9247 - protein, 8 aa, Homo sapiens
  misc_feature: Table A; Target 9247; HLA-B*07:02; AMELX; ENSG00000125363; CTA
QPQPHQPM

SEQ ID NO: 9248 - protein, 8 aa, Homo sapiens
  misc_feature: Table A; Target 9248; HLA-B*08:01; AMELX; ENSG00000125363; CTA
QPQPHQPM

SEQ ID NO: 9249 - protein, 9 aa, Homo sapiens
  misc_feature: Table A; Target 9249; HLA-A*30:02; AMELX; ENSG00000125363; CTA
QPQPPVHPM

SEQ ID NO: 9250 - protein, 9 aa, Homo sapiens
  misc_feature: Table A; Target 9250; HLA-A*31:01; AMELX; ENSG00000125363; CTA
QPQPPVHPM

SEQ ID NO: 9251 - protein, 9 aa, Homo sapiens
  misc_feature: Table A; Target 9251; HLA-A*33:03; AMELX; ENSG00000125363; CTA
QPQPPVHPM

SEQ ID NO: 9252 - protein, 9 aa, Homo sapiens
  misc_feature: Table A; Target 9252; HLA-B*07:02; AMELX; ENSG00000125363; CTA
QPQPPVHPM

SEQ ID NO: 9253 - protein, 9 aa, Homo sapiens
  misc_feature: Table A; Target 9253; HLA-B*08:01; AMELX; ENSG00000125363; CTA
QPQPPVHPM

SEQ ID NO: 9254 - protein, 9 aa, Homo sapiens
  misc_feature: Table A; Target 9254; HLA-B*35:01; AMELX; ENSG00000125363; CTA
QPQPPVHPM

SEQ ID NO: 9255 - protein, 9 aa, Homo sapiens
  misc_feature: Table A; Target 9255; HLA-B*35:03; AMELX; ENSG00000125363; CTA
QPQPPVHPM

SEQ ID NO: 9256 - protein, 9 aa, Homo sapiens
  misc_feature: Table A; Target 9256; HLA-B*37:01; AMELX; ENSG00000125363; CTA
QPQPPVHPM

SEQ ID NO: 9257 - protein, 9 aa, Homo sapiens
  misc_feature: Table A; Target 9257; HLA-B*54:01; AMELX; ENSG00000125363; CTA
QPQPPVHPM

SEQ ID NO: 9258 - protein, 9 aa, Homo sapiens
  misc_feature: Table A; Target 9258; HLA-B*55:01; AMELX; ENSG00000125363; CTA
QPQPPVHPM

SEQ ID NO: 9259 - protein, 9 aa, Homo sapiens
  misc_feature: Table A; Target 9259; HLA-B*56:01; AMELX; ENSG00000125363; CTA
QPQPPVHPM

SEQ ID NO: 9260 - protein, 9 aa, Homo sapiens
  misc_feature: Table A; Target 9260; HLA-C*01:02; AMELX; ENSG00000125363; CTA
QPQPPVHPM

SEQ ID NO: 9261 - protein, 9 aa, Homo sapiens
  misc_feature: Table A; Target 9261; HLA-C*03:03; AMELX; ENSG00000125363; CTA
QPQPPVHPM

SEQ ID NO: 9262 - protein, 9 aa, Homo sapiens
  misc_feature: Table A; Target 9262; HLA-C*03:04; AMELX; ENSG00000125363; CTA
QPQPPVHPM

SEQ ID NO: 9263 - protein, 9 aa, Homo sapiens
  misc_feature: Table A; Target 9263; HLA-C*04:01; AMELX; ENSG00000125363; CTA
QPQPPVHPM

SEQ ID NO: 9264 - protein, 9 aa, Homo sapiens
  misc_feature: Table A; Target 9264; HLA-C*07:02; AMELX; ENSG00000125363; CTA
QPQPPVHPM

SEQ ID NO: 9265 - protein, 9 aa, Homo sapiens
  misc_feature: Table A; Target 9265; HLA-C*14:02; AMELX; ENSG00000125363; CTA
QPQPPVHPM

SEQ ID NO: 9266 - protein, 9 aa, Homo sapiens
  misc_feature: Table A; Target 9266; HLA-C*16:01; AMELX; ENSG00000125363; CTA
QPQPPVHPM

SEQ ID NO: 9267 - protein, 9 aa, Homo sapiens
  misc_feature: Table A; Target 9267; HLA-C*16:02; AMELX; ENSG00000125363; CTA
QPQPPVHPM

SEQ ID NO: 9268 - protein, 9 aa, Homo sapiens
  misc_feature: Table A; Target 9268; HLA-B*54:01; AMELX; ENSG00000125363; CTA
QPQPVQPQP

SEQ ID NO: 9269 - protein, 9 aa, Homo sapiens
  misc_feature: Table A; Target 9269; HLA-B*55:01; AMELX; ENSG00000125363; CTA
QPQPVQPQP

SEQ ID NO: 9270 - protein, 9 aa, Homo sapiens
  misc_feature: Table A; Target 9270; HLA-B*56:01; AMELX; ENSG00000125363; CTA
QPQPVQPQP

SEQ ID NO: 9271 - protein, 9 aa, Homo sapiens
  misc_feature: Table A; Target 9271; HLA-C*16:02; AMELX; ENSG00000125363; CTA
QPQPVQPQP

SEQ ID NO: 9272 - protein, 10 aa, Homo sapiens
  misc_feature: Table A; Target 9272; HLA-C*04:01; AMELX; ENSG00000125363; CTA
QPQPVQPQPH

SEQ ID NO: 9273 - protein, 9 aa, Homo sapiens
  misc_feature: Table A; Target 9273; HLA-B*07:02; AMELX; ENSG00000125363; CTA
QPVIPQQPM

SEQ ID NO: 9274 - protein, 9 aa, Homo sapiens
  misc_feature: Table A; Target 9274; HLA-B*35:01; AMELX; ENSG00000125363; CTA
QPVIPQQPM

SEQ ID NO: 9275 - protein, 9 aa, Homo sapiens
  misc_feature: Table A; Target 9275; HLA-B*35:03; AMELX; ENSG00000125363; CTA
QPVIPQQPM

SEQ ID NO: 9276 - protein, 9 aa, Homo sapiens
  misc_feature: Table A; Target 9276; HLA-B*54:01; AMELX; ENSG00000125363; CTA
QPVIPQQPM

SEQ ID NO: 9277 - protein, 9 aa, Homo sapiens
  misc_feature: Table A; Target 9277; HLA-B*55:01; AMELX; ENSG00000125363; CTA
QPVIPQQPM

SEQ ID NO: 9278 - protein, 9 aa, Homo sapiens
  misc_feature: Table A; Target 9278; HLA-B*56:01; AMELX; ENSG00000125363; CTA
QPVIPQQPM

SEQ ID NO: 9279 - protein, 9 aa, Homo sapiens
  misc_feature: Table A; Target 9279; HLA-C*01:02; AMELX; ENSG00000125363; CTA
QPVIPQQPM

SEQ ID NO: 9280 - protein, 9 aa, Homo sapiens
  misc_feature: Table A; Target 9280; HLA-C*03:03; AMELX; ENSG00000125363; CTA
QPVIPQQPM

SEQ ID NO: 9281 - protein, 9 aa, Homo sapiens
  misc_feature: Table A; Target 9281; HLA-C*03:04; AMELX; ENSG00000125363; CTA
QPVIPQQPM

SEQ ID NO: 9282 - protein, 9 aa, Homo sapiens
  misc_feature: Table A; Target 9282; HLA-C*07:01; AMELX; ENSG00000125363; CTA
QPVIPQQPM

SEQ ID NO: 9283 - protein, 9 aa, Homo sapiens
  misc_feature: Table A; Target 9283; HLA-C*07:02; AMELX; ENSG00000125363; CTA
QPVIPQQPM

SEQ ID NO: 9284 - protein, 9 aa, Homo sapiens
  misc_feature: Table A; Target 9284; HLA-C*07:04; AMELX; ENSG00000125363; CTA
QPVIPQQPM

SEQ ID NO: 9285 - protein, 9 aa, Homo sapiens
  misc_feature: Table A; Target 9285; HLA-C*16:01; AMELX; ENSG00000125363; CTA
QPVIPQQPM

SEQ ID NO: 9286 - protein, 10 aa, Homo sapiens
  misc_feature: Table A; Target 9286; HLA-B*35:03; AMELX; ENSG00000125363; CTA
QPVIPQQPMM

SEQ ID NO: 9287 - protein, 10 aa, Homo sapiens
  misc_feature: Table A; Target 9287; HLA-B*56:01; AMELX; ENSG00000125363; CTA
QPVQPQPHQP

SEQ ID NO: 9288 - protein, 11 aa, Homo sapiens
  misc_feature: Table A; Target 9288; HLA-B*35:01; AMELX; ENSG00000125363; CTA
QPVQPQPHQPM

SEQ ID NO: 9289 - protein, 11 aa, Homo sapiens
  misc_feature: Table A; Target 9289; HLA-B*35:03; AMELX; ENSG00000125363; CTA
QPVQPQPHQPM

SEQ ID NO: 9290 - protein, 11 aa, Homo sapiens
  misc_feature: Table A; Target 9290; HLA-B*55:01; AMELX; ENSG00000125363; CTA
QPVQPQPHQPM

SEQ ID NO: 9291 - protein, 8 aa, Homo sapiens
  misc_feature: Table A; Target 9291; HLA-B*51:01; AMELX; ENSG00000125363; CTA
QPYQPQPV

SEQ ID NO: 9292 - protein, 8 aa, Homo sapiens
  misc_feature: Table A; Target 9292; HLA-B*56:01; AMELX; ENSG00000125363; CTA
QPYQPQPV

SEQ ID NO: 9293 - protein, 9 aa, Homo sapiens
  misc_feature: Table A; Target 9293; HLA-B*35:01; AMELX; ENSG00000125363; CTA
QPYQPQPVQ

SEQ ID NO: 9294 - protein, 9 aa, Homo sapiens
  misc_feature: Table A; Target 9294; HLA-B*51:01; AMELX; ENSG00000125363; CTA
QPYQPQPVQ

SEQ ID NO: 9295 - protein, 9 aa, Homo sapiens
  misc_feature: Table A; Target 9295; HLA-B*54:01; AMELX; ENSG00000125363; CTA
QPYQPQPVQ

SEQ ID NO: 9296 - protein, 9 aa, Homo sapiens
  misc_feature: Table A; Target 9296; HLA-B*55:01; AMELX; ENSG00000125363; CTA
QPYQPQPVQ

SEQ ID NO: 9297 - protein, 9 aa, Homo sapiens
  misc_feature: Table A; Target 9297; HLA-B*56:01; AMELX; ENSG00000125363; CTA
QPYQPQPVQ

SEQ ID NO: 9298 - protein, 10 aa, Homo sapiens
  misc_feature: Table A; Target 9298; HLA-B*56:01; AMELX; ENSG00000125363; CTA
QPYQPQPVQP

SEQ ID NO: 9299 - protein, 9 aa, Homo sapiens
  misc_feature: Table A; Target 9299; HLA-A*02:01; AMELX; ENSG00000125363; CTA
QQHPPTHTL

SEQ ID NO: 9300 - protein, 9 aa, Homo sapiens
  misc_feature: Table A; Target 9300; HLA-A*02:03; AMELX; ENSG00000125363; CTA
QQHPPTHTL

SEQ ID NO: 9301 - protein, 9 aa, Homo sapiens
  misc_feature: Table A; Target 9301; HLA-A*02:04; AMELX; ENSG00000125363; CTA
QQHPPTHTL

SEQ ID NO: 9302 - protein, 9 aa, Homo sapiens
  misc_feature: Table A; Target 9302; HLA-A*02:07; AMELX; ENSG00000125363; CTA
QQHPPTHTL

SEQ ID NO: 9303 - protein, 9 aa, Homo sapiens
  misc_feature: Table A; Target 9303; HLA-A*23:01; AMELX; ENSG00000125363; CTA
QQHPPTHTL

SEQ ID NO: 9304 - protein, 9 aa, Homo sapiens
  misc_feature: Table A; Target 9304; HLA-A*24:02; AMELX; ENSG00000125363; CTA
QQHPPTHTL

SEQ ID NO: 9305 - protein, 9 aa, Homo sapiens
  misc_feature: Table A; Target 9305; HLA-A*25:01; AMELX; ENSG00000125363; CTA
QQHPPTHTL

SEQ ID NO: 9306 - protein, 9 aa, Homo sapiens
  misc_feature: Table A; Target 9306; HLA-A*30:01; AMELX; ENSG00000125363; CTA
QQHPPTHTL

SEQ ID NO: 9307 - protein, 9 aa, Homo sapiens
  misc_feature: Table A; Target 9307; HLA-A*30:02; AMELX; ENSG00000125363; CTA
QQHPPTHTL

SEQ ID NO: 9308 - protein, 9 aa, Homo sapiens
  misc_feature: Table A; Target 9308; HLA-A*31:01; AMELX; ENSG00000125363; CTA
QQHPPTHTL

SEQ ID NO: 9309 - protein, 9 aa, Homo sapiens
  misc_feature: Table A; Target 9309; HLA-A*32:01; AMELX; ENSG00000125363; CTA
QQHPPTHTL

SEQ ID NO: 9310 - protein, 9 aa, Homo sapiens
  misc_feature: Table A; Target 9310; HLA-A*68:02; AMELX; ENSG00000125363; CTA
QQHPPTHTL

SEQ ID NO: 9311 - protein, 9 aa, Homo sapiens
  misc_feature: Table A; Target 9311; HLA-B*07:02; AMELX; ENSG00000125363; CTA
QQHPPTHTL

SEQ ID NO: 9312 - protein, 9 aa, Homo sapiens
  misc_feature: Table A; Target 9312; HLA-B*08:01; AMELX; ENSG00000125363; CTA
QQHPPTHTL

SEQ ID NO: 9313 - protein, 9 aa, Homo sapiens
  misc_feature: Table A; Target 9313; HLA-B*13:02; AMELX; ENSG00000125363; CTA
QQHPPTHTL

SEQ ID NO: 9314 - protein, 9 aa, Homo sapiens
  misc_feature: Table A; Target 9314; HLA-B*15:01; AMELX; ENSG00000125363; CTA
QQHPPTHTL

SEQ ID NO: 9315 - protein, 9 aa, Homo sapiens
  misc_feature: Table A; Target 9315; HLA-B*15:03; AMELX; ENSG00000125363; CTA
QQHPPTHTL

SEQ ID NO: 9316 - protein, 9 aa, Homo sapiens
  misc_feature: Table A; Target 9316; HLA-B*18:01; AMELX; ENSG00000125363; CTA
QQHPPTHTL

SEQ ID NO: 9317 - protein, 9 aa, Homo sapiens
  misc_feature: Table A; Target 9317; HLA-B*27:05; AMELX; ENSG00000125363; CTA
QQHPPTHTL

SEQ ID NO: 9318 - protein, 9 aa, Homo sapiens
  misc_feature: Table A; Target 9318; HLA-B*35:01; AMELX; ENSG00000125363; CTA
QQHPPTHTL

SEQ ID NO: 9319 - protein, 9 aa, Homo sapiens
  misc_feature: Table A; Target 9319; HLA-B*35:03; AMELX; ENSG00000125363; CTA
QQHPPTHTL

SEQ ID NO: 9320 - protein, 9 aa, Homo sapiens
  misc_feature: Table A; Target 9320; HLA-B*37:01; AMELX; ENSG00000125363; CTA
QQHPPTHTL

SEQ ID NO: 9321 - protein, 9 aa, Homo sapiens
  misc_feature: Table A; Target 9321; HLA-B*38:01; AMELX; ENSG00000125363; CTA
QQHPPTHTL

SEQ ID NO: 9322 - protein, 9 aa, Homo sapiens
  misc_feature: Table A; Target 9322; HLA-B*39:01; AMELX; ENSG00000125363; CTA
QQHPPTHTL

SEQ ID NO: 9323 - protein, 9 aa, Homo sapiens
  misc_feature: Table A; Target 9323; HLA-B*40:01; AMELX; ENSG00000125363; CTA
QQHPPTHTL

SEQ ID NO: 9324 - protein, 9 aa, Homo sapiens
  misc_feature: Table A; Target 9324; HLA-B*40:02; AMELX; ENSG00000125363; CTA
QQHPPTHTL

SEQ ID NO: 9325 - protein, 9 aa, Homo sapiens
  misc_feature: Table A; Target 9325; HLA-B*44:02; AMELX; ENSG00000125363; CTA
QQHPPTHTL

SEQ ID NO: 9326 - protein, 9 aa, Homo sapiens
  misc_feature: Table A; Target 9326; HLA-B*44:03; AMELX; ENSG00000125363; CTA
QQHPPTHTL

SEQ ID NO: 9327 - protein, 9 aa, Homo sapiens
  misc_feature: Table A; Target 9327; HLA-B*46:01; AMELX; ENSG00000125363; CTA
QQHPPTHTL

SEQ ID NO: 9328 - protein, 9 aa, Homo sapiens
  misc_feature: Table A; Target 9328; HLA-B*49:01; AMELX; ENSG00000125363; CTA
QQHPPTHTL

SEQ ID NO: 9329 - protein, 9 aa, Homo sapiens
  misc_feature: Table A; Target 9329; HLA-B*51:01; AMELX; ENSG00000125363; CTA
QQHPPTHTL

SEQ ID NO: 9330 - protein, 9 aa, Homo sapiens
  misc_feature: Table A; Target 9330; HLA-B*55:01; AMELX; ENSG00000125363; CTA
QQHPPTHTL

SEQ ID NO: 9331 - protein, 9 aa, Homo sapiens
  misc_feature: Table A; Target 9331; HLA-B*57:01; AMELX; ENSG00000125363; CTA
QQHPPTHTL

SEQ ID NO: 9332 - protein, 9 aa, Homo sapiens
  misc_feature: Table A; Target 9332; HLA-B*58:01; AMELX; ENSG00000125363; CTA
QQHPPTHTL

SEQ ID NO: 9333 - protein, 9 aa, Homo sapiens
  misc_feature: Table A; Target 9333; HLA-C*01:02; AMELX; ENSG00000125363; CTA
QQHPPTHTL

SEQ ID NO: 9334 - protein, 9 aa, Homo sapiens
  misc_feature: Table A; Target 9334; HLA-C*02:02; AMELX; ENSG00000125363; CTA
QQHPPTHTL

SEQ ID NO: 9335 - protein, 9 aa, Homo sapiens
  misc_feature: Table A; Target 9335; HLA-C*03:03; AMELX; ENSG00000125363; CTA
QQHPPTHTL

SEQ ID NO: 9336 - protein, 9 aa, Homo sapiens
  misc_feature: Table A; Target 9336; HLA-C*03:04; AMELX; ENSG00000125363; CTA
QQHPPTHTL

SEQ ID NO: 9337 - protein, 9 aa, Homo sapiens
  misc_feature: Table A; Target 9337; HLA-C*04:01; AMELX; ENSG00000125363; CTA
QQHPPTHTL

SEQ ID NO: 9338 - protein, 9 aa, Homo sapiens
  misc_feature: Table A; Target 9338; HLA-C*05:01; AMELX; ENSG00000125363; CTA
QQHPPTHTL

SEQ ID NO: 9339 - protein, 9 aa, Homo sapiens
  misc_feature: Table A; Target 9339; HLA-C*06:02; AMELX; ENSG00000125363; CTA
QQHPPTHTL

SEQ ID NO: 9340 - protein, 9 aa, Homo sapiens
  misc_feature: Table A; Target 9340; HLA-C*07:02; AMELX; ENSG00000125363; CTA
QQHPPTHTL

SEQ ID NO: 9341 - protein, 9 aa, Homo sapiens
  misc_feature: Table A; Target 9341; HLA-C*07:04; AMELX; ENSG00000125363; CTA
QQHPPTHTL

SEQ ID NO: 9342 - protein, 9 aa, Homo sapiens
  misc_feature: Table A; Target 9342; HLA-C*12:03; AMELX; ENSG00000125363; CTA
QQHPPTHTL

SEQ ID NO: 9343 - protein, 9 aa, Homo sapiens
  misc_feature: Table A; Target 9343; HLA-C*14:02; AMELX; ENSG00000125363; CTA
QQHPPTHTL

SEQ ID NO: 9344 - protein, 9 aa, Homo sapiens
  misc_feature: Table A; Target 9344; HLA-C*16:01; AMELX; ENSG00000125363; CTA
QQHPPTHTL

SEQ ID NO: 9345 - protein, 9 aa, Homo sapiens
  misc_feature: Table A; Target 9345; HLA-C*16:02; AMELX; ENSG00000125363; CTA
QQHPPTHTL

SEQ ID NO: 9346 - protein, 9 aa, Homo sapiens
  misc_feature: Table A; Target 9346; HLA-C*16:04; AMELX; ENSG00000125363; CTA
QQHPPTHTL

SEQ ID NO: 9347 - protein, 9 aa, Homo sapiens
  misc_feature: Table A; Target 9347; HLA-B*13:02; AMELX; ENSG00000125363; CTA
QQPVIPQQP

SEQ ID NO: 9348 - protein, 10 aa, Homo sapiens
  misc_feature: Table A; Target 9348; HLA-B*15:01; AMELX; ENSG00000125363; CTA
QQPVIPQQPM

SEQ ID NO: 9349 - protein, 10 aa, Homo sapiens
  misc_feature: Table A; Target 9349; HLA-B*15:03; AMELX; ENSG00000125363; CTA
QQPVIPQQPM

SEQ ID NO: 9350 - protein, 10 aa, Homo sapiens
  misc_feature: Table A; Target 9350; HLA-C*07:04; AMELX; ENSG00000125363; CTA
QQPVIPQQPM

SEQ ID NO: 9351 - protein, 9 aa, Homo sapiens
  misc_feature: Table A; Target 9351; HLA-B*13:02; AMELX; ENSG00000125363; CTA
QQPYQPQPV

SEQ ID NO: 9352 - protein, 10 aa, Homo sapiens
  misc_feature: Table A; Target 9352; HLA-A*01:01; AMELX; ENSG00000125363; CTA
QSIRPPYPSY

SEQ ID NO: 9353 - protein, 10 aa, Homo sapiens
  misc_feature: Table A; Target 9353; HLA-A*25:01; AMELX; ENSG00000125363; CTA
QSIRPPYPSY

SEQ ID NO: 9354 - protein, 10 aa, Homo sapiens
  misc_feature: Table A; Target 9354; HLA-A*26:01; AMELX; ENSG00000125363; CTA
QSIRPPYPSY

SEQ ID NO: 9355 - protein, 10 aa, Homo sapiens
  misc_feature: Table A; Target 9355; HLA-A*29:02; AMELX; ENSG00000125363; CTA
QSIRPPYPSY

SEQ ID NO: 9356 - protein, 10 aa, Homo sapiens
  misc_feature: Table A; Target 9356; HLA-A*30:02; AMELX; ENSG00000125363; CTA
QSIRPPYPSY

SEQ ID NO: 9357 - protein, 10 aa, Homo sapiens
  misc_feature: Table A; Target 9357; HLA-B*57:01; AMELX; ENSG00000125363; CTA
QSIRPPYPSY

SEQ ID NO: 9358 - protein, 10 aa, Homo sapiens
  misc_feature: Table A; Target 9358; HLA-B*58:01; AMELX; ENSG00000125363; CTA
QSIRPPYPSY

SEQ ID NO: 9359 - protein, 10 aa, Homo sapiens
  misc_feature: Table A; Target 9359; HLA-C*06:02; AMELX; ENSG00000125363; CTA
QSIRPPYPSY

SEQ ID NO: 9360 - protein, 10 aa, Homo sapiens
  misc_feature: Table A; Target 9360; HLA-C*16:01; AMELX; ENSG00000125363; CTA
QSIRPPYPSY

SEQ ID NO: 9361 - protein, 10 aa, Homo sapiens
  misc_feature: Table A; Target 9361; HLA-C*16:02; AMELX; ENSG00000125363; CTA
QSIRPPYPSY

SEQ ID NO: 9362 - protein, 9 aa, Homo sapiens
  misc_feature: Table A; Target 9362; HLA-A*29:02; AMELX; ENSG00000125363; CTA
RPPYPSYGY

SEQ ID NO: 9363 - protein, 9 aa, Homo sapiens
  misc_feature: Table A; Target 9363; HLA-B*35:01; AMELX; ENSG00000125363; CTA
RPPYPSYGY

SEQ ID NO: 9364 - protein, 9 aa, Homo sapiens
  misc_feature: Table A; Target 9364; HLA-B*55:01; AMELX; ENSG00000125363; CTA
RPPYPSYGY

SEQ ID NO: 9365 - protein, 9 aa, Homo sapiens
  misc_feature: Table A; Target 9365; HLA-A*03:01; AMELX; ENSG00000125363; CTA
SIRPPYPSY

SEQ ID NO: 9366 - protein, 9 aa, Homo sapiens
  misc_feature: Table A; Target 9366; HLA-A*23:01; AMELX; ENSG00000125363; CTA
SIRPPYPSY

SEQ ID NO: 9367 - protein, 9 aa, Homo sapiens
  misc_feature: Table A; Target 9367; HLA-A*25:01; AMELX; ENSG00000125363; CTA
SIRPPYPSY

SEQ ID NO: 9368 - protein, 9 aa, Homo sapiens
  misc_feature: Table A; Target 9368; HLA-A*26:01; AMELX; ENSG00000125363; CTA
SIRPPYPSY

SEQ ID NO: 9369 - protein, 9 aa, Homo sapiens
  misc_feature: Table A; Target 9369; HLA-A*29:02; AMELX; ENSG00000125363; CTA
SIRPPYPSY

SEQ ID NO: 9370 - protein, 9 aa, Homo sapiens
  misc_feature: Table A; Target 9370; HLA-A*30:02; AMELX; ENSG00000125363; CTA
SIRPPYPSY

SEQ ID NO: 9371 - protein, 9 aa, Homo sapiens
  misc_feature: Table A; Target 9371; HLA-A*31:01; AMELX; ENSG00000125363; CTA
SIRPPYPSY

SEQ ID NO: 9372 - protein, 9 aa, Homo sapiens
  misc_feature: Table A; Target 9372; HLA-A*32:01; AMELX; ENSG00000125363; CTA
SIRPPYPSY

SEQ ID NO: 9373 - protein, 9 aa, Homo sapiens
  misc_feature: Table A; Target 9373; HLA-A*33:01; AMELX; ENSG00000125363; CTA
SIRPPYPSY

SEQ ID NO: 9374 - protein, 9 aa, Homo sapiens
  misc_feature: Table A; Target 9374; HLA-B*07:02; AMELX; ENSG00000125363; CTA
SIRPPYPSY

SEQ ID NO: 9375 - protein, 9 aa, Homo sapiens
  misc_feature: Table A; Target 9375; HLA-B*08:01; AMELX; ENSG00000125363; CTA
SIRPPYPSY

SEQ ID NO: 9376 - protein, 9 aa, Homo sapiens
  misc_feature: Table A; Target 9376; HLA-B*15:01; AMELX; ENSG00000125363; CTA
SIRPPYPSY

SEQ ID NO: 9377 - protein, 9 aa, Homo sapiens
  misc_feature: Table A; Target 9377; HLA-B*15:03; AMELX; ENSG00000125363; CTA
SIRPPYPSY

SEQ ID NO: 9378 - protein, 9 aa, Homo sapiens
  misc_feature: Table A; Target 9378; HLA-B*35:01; AMELX; ENSG00000125363; CTA
SIRPPYPSY

SEQ ID NO: 9379 - protein, 9 aa, Homo sapiens
  misc_feature: Table A; Target 9379; HLA-B*44:02; AMELX; ENSG00000125363; CTA
SIRPPYPSY

SEQ ID NO: 9380 - protein, 9 aa, Homo sapiens
  misc_feature: Table A; Target 9380; HLA-B*44:03; AMELX; ENSG00000125363; CTA
SIRPPYPSY

SEQ ID NO: 9381 - protein, 9 aa, Homo sapiens
  misc_feature: Table A; Target 9381; HLA-B*46:01; AMELX; ENSG00000125363; CTA
SIRPPYPSY

SEQ ID NO: 9382 - protein, 9 aa, Homo sapiens
  misc_feature: Table A; Target 9382; HLA-B*54:01; AMELX; ENSG00000125363; CTA
SIRPPYPSY

SEQ ID NO: 9383 - protein, 9 aa, Homo sapiens
  misc_feature: Table A; Target 9383; HLA-B*57:01; AMELX; ENSG00000125363; CTA
SIRPPYPSY

SEQ ID NO: 9384 - protein, 9 aa, Homo sapiens
  misc_feature: Table A; Target 9384; HLA-B*58:01; AMELX; ENSG00000125363; CTA
SIRPPYPSY

SEQ ID NO: 9385 - protein, 9 aa, Homo sapiens
  misc_feature: Table A; Target 9385; HLA-C*01:02; AMELX; ENSG00000125363; CTA
SIRPPYPSY

SEQ ID NO: 9386 - protein, 9 aa, Homo sapiens
  misc_feature: Table A; Target 9386; HLA-C*02:02; AMELX; ENSG00000125363; CTA
SIRPPYPSY

SEQ ID NO: 9387 - protein, 9 aa, Homo sapiens
  misc_feature: Table A; Target 9387; HLA-C*06:02; AMELX; ENSG00000125363; CTA
SIRPPYPSY

SEQ ID NO: 9388 - protein, 9 aa, Homo sapiens
  misc_feature: Table A; Target 9388; HLA-C*07:02; AMELX; ENSG00000125363; CTA
SIRPPYPSY

SEQ ID NO: 9389 - protein, 9 aa, Homo sapiens
  misc_feature: Table A; Target 9389; HLA-C*07:04; AMELX; ENSG00000125363; CTA
SIRPPYPSY

SEQ ID NO: 9390 - protein, 9 aa, Homo sapiens
  misc_feature: Table A; Target 9390; HLA-C*16:01; AMELX; ENSG00000125363; CTA
SIRPPYPSY

SEQ ID NO: 9391 - protein, 10 aa, Homo sapiens
  misc_feature: Table A; Target 9391; HLA-A*31:01; AMELX; ENSG00000125363; CTA
SIRPPYPSYG

SEQ ID NO: 9392 - protein, 11 aa, Homo sapiens
  misc_feature: Table A; Target 9392; HLA-A*29:02; AMELX; ENSG00000125363; CTA
SIRPPYPSYGY

SEQ ID NO: 9393 - protein, 11 aa, Homo sapiens
  misc_feature: Table A; Target 9393; HLA-A*30:02; AMELX; ENSG00000125363; CTA
SIRPPYPSYGY

SEQ ID NO: 9394 - protein, 11 aa, Homo sapiens
  misc_feature: Table A; Target 9394; HLA-A*31:01; AMELX; ENSG00000125363; CTA
SIRPPYPSYGY

SEQ ID NO: 9395 - protein, 10 aa, Homo sapiens
  misc_feature: Table A; Target 9395; HLA-B*15:01; AMELX; ENSG00000125363; CTA
SQQHPPTHTL

SEQ ID NO: 9396 - protein, 10 aa, Homo sapiens
  misc_feature: Table A; Target 9396; HLA-B*38:01; AMELX; ENSG00000125363; CTA
SQQHPPTHTL

SEQ ID NO: 9397 - protein, 10 aa, Homo sapiens
  misc_feature: Table A; Target 9397; HLA-B*39:01; AMELX; ENSG00000125363; CTA
SQQHPPTHTL

SEQ ID NO: 9398 - protein, 8 aa, Homo sapiens
  misc_feature: Table A; Target 9398; HLA-C*04:01; AMELX; ENSG00000125363; CTA
SYEVLTPL

SEQ ID NO: 9399 - protein, 8 aa, Homo sapiens
  misc_feature: Table A; Target 9399; HLA-C*14:02; AMELX; ENSG00000125363; CTA
SYEVLTPL

SEQ ID NO: 9400 - protein, 9 aa, Homo sapiens
  misc_feature: Table A; Target 9400; HLA-B*27:02; AMELX; ENSG00000125363; CTA
SYEVLTPLK

SEQ ID NO: 9401 - protein, 10 aa, Homo sapiens
  misc_feature: Table A; Target 9401; HLA-A*23:01; AMELX; ENSG00000125363; CTA
SYEVLTPLKW

SEQ ID NO: 9402 - protein, 10 aa, Homo sapiens
  misc_feature: Table A; Target 9402; HLA-A*24:02; AMELX; ENSG00000125363; CTA
SYEVLTPLKW

SEQ ID NO: 9403 - protein, 10 aa, Homo sapiens
  misc_feature: Table A; Target 9403; HLA-A*29:02; AMELX; ENSG00000125363; CTA
SYEVLTPLKW

SEQ ID NO: 9404 - protein, 10 aa, Homo sapiens
  misc_feature: Table A; Target 9404; HLA-B*44:02; AMELX; ENSG00000125363; CTA
SYEVLTPLKW

SEQ ID NO: 9405 - protein, 10 aa, Homo sapiens
  misc_feature: Table A; Target 9405; HLA-B*44:03; AMELX; ENSG00000125363; CTA
SYEVLTPLKW

SEQ ID NO: 9406 - protein, 10 aa, Homo sapiens
  misc_feature: Table A; Target 9406; HLA-B*57:01; AMELX; ENSG00000125363; CTA
SYEVLTPLKW

SEQ ID NO: 9407 - protein, 10 aa, Homo sapiens
  misc_feature: Table A; Target 9407; HLA-C*16:04; AMELX; ENSG00000125363; CTA
SYEVLTPLKW

SEQ ID NO: 9408 - protein, 10 aa, Homo sapiens
  misc_feature: Table A; Target 9408; HLA-A*03:02; AMELX; ENSG00000125363; CTA
TLEAWPSTDK

SEQ ID NO: 9409 - protein, 11 aa, Homo sapiens
  misc_feature: Table A; Target 9409; HLA-A*02:04; AMELX; ENSG00000125363; CTA
TLQPHHHIPVV

SEQ ID NO: 9410 - protein, 8 aa, Homo sapiens
  misc_feature: Table A; Target 9410; HLA-B*08:01; AMELX; ENSG00000125363; CTA
TPIQHHQP

SEQ ID NO: 9411 - protein, 10 aa, Homo sapiens
  misc_feature: Table A; Target 9411; HLA-B*07:02; AMELX; ENSG00000125363; CTA
TPIQHHQPNL

SEQ ID NO: 9412 - protein, 10 aa, Homo sapiens
  misc_feature: Table A; Target 9412; HLA-B*35:01; AMELX; ENSG00000125363; CTA
TPIQHHQPNL

SEQ ID NO: 9413 - protein, 10 aa, Homo sapiens
  misc_feature: Table A; Target 9413; HLA-B*35:03; AMELX; ENSG00000125363; CTA
TPIQHHQPNL

SEQ ID NO: 9414 - protein, 10 aa, Homo sapiens
  misc_feature: Table A; Target 9414; HLA-C*07:02; AMELX; ENSG00000125363; CTA
TPIQHHQPNL

SEQ ID NO: 9415 - protein, 9 aa, Homo sapiens
  misc_feature: Table A; Target 9415; HLA-B*08:01; AMELX; ENSG00000125363; CTA
TPLKWYQSI

SEQ ID NO: 9416 - protein, 9 aa, Homo sapiens
  misc_feature: Table A; Target 9416; HLA-B*51:01; AMELX; ENSG00000125363; CTA
TPLKWYQSI

SEQ ID NO: 9417 - protein, 9 aa, Homo sapiens
  misc_feature: Table A; Target 9417; HLA-B*54:01; AMELX; ENSG00000125363; CTA
TPLKWYQSI

SEQ ID NO: 9418 - protein, 8 aa, Homo sapiens
  misc_feature: Table A; Target 9418; HLA-B*07:02; AMELX; ENSG00000125363; CTA
VPAQQPVI

SEQ ID NO: 9419 - protein, 8 aa, Homo sapiens
  misc_feature: Table A; Target 9419; HLA-B*08:01; AMELX; ENSG00000125363; CTA
VPAQQPVI

SEQ ID NO: 9420 - protein, 8 aa, Homo sapiens
  misc_feature: Table A; Target 9420; HLA-B*35:03; AMELX; ENSG00000125363; CTA
VPAQQPVI

SEQ ID NO: 9421 - protein, 8 aa, Homo sapiens
  misc_feature: Table A; Target 9421; HLA-B*51:01; AMELX; ENSG00000125363; CTA
VPAQQPVI

SEQ ID NO: 9422 - protein, 8 aa, Homo sapiens
  misc_feature: Table A; Target 9422; HLA-B*55:01; AMELX; ENSG00000125363; CTA
VPAQQPVI

SEQ ID NO: 9423 - protein, 8 aa, Homo sapiens
  misc_feature: Table A; Target 9423; HLA-B*56:01; AMELX; ENSG00000125363; CTA
VPAQQPVI

SEQ ID NO: 9424 - protein, 9 aa, Homo sapiens
  misc_feature: Table A; Target 9424; HLA-B*56:01; AMELX; ENSG00000125363; CTA
VPAQQPVIP

SEQ ID NO: 9425 - protein, 9 aa, Homo sapiens
  misc_feature: Table A; Target 9425; HLA-A*32:01; AMELX; ENSG00000125363; CTA
VQPQPHQPM

SEQ ID NO: 9426 - protein, 9 aa, Homo sapiens
  misc_feature: Table A; Target 9426; HLA-B*07:02; AMELX; ENSG00000125363; CTA
VQPQPHQPM

SEQ ID NO: 9427 - protein, 9 aa, Homo sapiens
  misc_feature: Table A; Target 9427; HLA-B*08:01; AMELX; ENSG00000125363; CTA
VQPQPHQPM

SEQ ID NO: 9428 - protein, 9 aa, Homo sapiens
  misc_feature: Table A; Target 9428; HLA-B*15:01; AMELX; ENSG00000125363; CTA
VQPQPHQPM

SEQ ID NO: 9429 - protein, 9 aa, Homo sapiens
  misc_feature: Table A; Target 9429; HLA-B*15:03; AMELX; ENSG00000125363; CTA
VQPQPHQPM

SEQ ID NO: 9430 - protein, 9 aa, Homo sapiens
  misc_feature: Table A; Target 9430; HLA-B*37:01; AMELX; ENSG00000125363; CTA
VQPQPHQPM

SEQ ID NO: 9431 - protein, 9 aa, Homo sapiens
  misc_feature: Table A; Target 9431; HLA-B*46:01; AMELX; ENSG00000125363; CTA
VQPQPHQPM

SEQ ID NO: 9432 - protein, 9 aa, Homo sapiens
  misc_feature: Table A; Target 9432; HLA-C*01:02; AMELX; ENSG00000125363; CTA
VQPQPHQPM

SEQ ID NO: 9433 - protein, 9 aa, Homo sapiens
  misc_feature: Table A; Target 9433; HLA-C*03:04; AMELX; ENSG00000125363; CTA
VQPQPHQPM

SEQ ID NO: 9434 - protein, 9 aa, Homo sapiens
  misc_feature: Table A; Target 9434; HLA-C*07:04; AMELX; ENSG00000125363; CTA
VQPQPHQPM

SEQ ID NO: 9435 - protein, 9 aa, Homo sapiens
  misc_feature: Table A; Target 9435; HLA-C*14:02; AMELX; ENSG00000125363; CTA
VQPQPHQPM

SEQ ID NO: 9436 - protein, 9 aa, Homo sapiens
  misc_feature: Table A; Target 9436; HLA-C*16:01; AMELX; ENSG00000125363; CTA
VQPQPHQPM

SEQ ID NO: 9437 - protein, 9 aa, Homo sapiens
  misc_feature: Table A; Target 9437; HLA-A*02:07; AMELX; ENSG00000125363; CTA
VVPAQQPVI

SEQ ID NO: 9438 - protein, 9 aa, Homo sapiens
  misc_feature: Table A; Target 9438; HLA-A*23:01; AMELX; ENSG00000125363; CTA
VVPAQQPVI

SEQ ID NO: 9439 - protein, 9 aa, Homo sapiens
  misc_feature: Table A; Target 9439; HLA-A*24:02; AMELX; ENSG00000125363; CTA
VVPAQQPVI

SEQ ID NO: 9440 - protein, 9 aa, Homo sapiens
  misc_feature: Table A; Target 9440; HLA-B*13:02; AMELX; ENSG00000125363; CTA
VVPAQQPVI

SEQ ID NO: 9441 - protein, 9 aa, Homo sapiens
  misc_feature: Table A; Target 9441; HLA-B*51:01; AMELX; ENSG00000125363; CTA
VVPAQQPVI

SEQ ID NO: 9442 - protein, 9 aa, Homo sapiens
  misc_feature: Table A; Target 9442; HLA-A*29:02; AMELX; ENSG00000125363; CTA
WYQSIRPPY

SEQ ID NO: 9443 - protein, 9 aa, Homo sapiens
  misc_feature: Table A; Target 9443; HLA-A*30:02; AMELX; ENSG00000125363; CTA
WYQSIRPPY

SEQ ID NO: 9444 - protein, 8 aa, Homo sapiens
  misc_feature: Table A; Target 9444; HLA-B*18:01; AMELX; ENSG00000125363; CTA
YEVLTPLK

SEQ ID NO: 9445 - protein, 8 aa, Homo sapiens
  misc_feature: Table A; Target 9445; HLA-B*49:01; AMELX; ENSG00000125363; CTA
YEVLTPLK

SEQ ID NO: 9446 - protein, 9 aa, Homo sapiens
  misc_feature: Table A; Target 9446; HLA-A*24:02; AMELX; ENSG00000125363; CTA
YEVLTPLKW

SEQ ID NO: 9447 - protein, 9 aa, Homo sapiens
  misc_feature: Table A; Target 9447; HLA-A*30:01; AMELX; ENSG00000125363; CTA
YEVLTPLKW

SEQ ID NO: 9448 - protein, 9 aa, Homo sapiens
  misc_feature: Table A; Target 9448; HLA-B*18:01; AMELX; ENSG00000125363; CTA
YEVLTPLKW

SEQ ID NO: 9449 - protein, 9 aa, Homo sapiens
  misc_feature: Table A; Target 9449; HLA-B*40:02; AMELX; ENSG00000125363; CTA
YEVLTPLKW

SEQ ID NO: 9450 - protein, 9 aa, Homo sapiens
  misc_feature: Table A; Target 9450; HLA-B*44:02; AMELX; ENSG00000125363; CTA
YEVLTPLKW

SEQ ID NO: 9451 - protein, 9 aa, Homo sapiens
  misc_feature: Table A; Target 9451; HLA-B*44:03; AMELX; ENSG00000125363; CTA
YEVLTPLKW

SEQ ID NO: 9452 - protein, 9 aa, Homo sapiens
  misc_feature: Table A; Target 9452; HLA-B*49:01; AMELX; ENSG00000125363; CTA
YEVLTPLKW

SEQ ID NO: 9453 - protein, 9 aa, Homo sapiens
  misc_feature: Table A; Target 9453; HLA-B*57:01; AMELX; ENSG00000125363; CTA
YEVLTPLKW

SEQ ID NO: 9454 - protein, 9 aa, Homo sapiens
  misc_feature: Table A; Target 9454; HLA-C*16:04; AMELX; ENSG00000125363; CTA
YEVLTPLKW

SEQ ID NO: 9455 - protein, 10 aa, Homo sapiens
  misc_feature: Table A; Target 9455; HLA-B*44:02; AMELX; ENSG00000125363; CTA
YEVLTPLKWY

SEQ ID NO: 9456 - protein, 10 aa, Homo sapiens
  misc_feature: Table A; Target 9456; HLA-B*44:03; AMELX; ENSG00000125363; CTA
YEVLTPLKWY

SEQ ID NO: 9457 - protein, 10 aa, Homo sapiens
  misc_feature: Table A; Target 9457; HLA-C*07:01; AMELX; ENSG00000125363; CTA
YEVLTPLKWY

SEQ ID NO: 9458 - protein, 9 aa, Homo sapiens
  misc_feature: Table A; Target 9458; HLA-A*25:01; AMELX; ENSG00000125363; CTA
YGYEPMGGW

SEQ ID NO: 9459 - protein, 8 aa, Homo sapiens
  misc_feature: Table A; Target 9459; HLA-B*54:01; AMELX; ENSG00000125363; CTA
YPSYGYEP

SEQ ID NO: 9460 - protein, 9 aa, Homo sapiens
  misc_feature: Table A; Target 9460; HLA-B*27:02; AMELX; ENSG00000125363; CTA
YPSYGYEPM

SEQ ID NO: 9461 - protein, 9 aa, Homo sapiens
  misc_feature: Table A; Target 9461; HLA-B*35:01; AMELX; ENSG00000125363; CTA
YPSYGYEPM

SEQ ID NO: 9462 - protein, 9 aa, Homo sapiens
  misc_feature: Table A; Target 9462; HLA-B*35:03; AMELX; ENSG00000125363; CTA
YPSYGYEPM

SEQ ID NO: 9463 - protein, 9 aa, Homo sapiens
  misc_feature: Table A; Target 9463; HLA-B*54:01; AMELX; ENSG00000125363; CTA
YPSYGYEPM

SEQ ID NO: 9464 - protein, 9 aa, Homo sapiens
  misc_feature: Table A; Target 9464; HLA-B*55:01; AMELX; ENSG00000125363; CTA
YPSYGYEPM

SEQ ID NO: 9465 - protein, 8 aa, Homo sapiens
  misc_feature: Table A; Target 9465; HLA-A*32:01; AMELX; ENSG00000125363; CTA
YQSIRPPY

SEQ ID NO: 9466 - protein, 8 aa, Homo sapiens
  misc_feature: Table A; Target 9466; HLA-B*15:01; AMELX; ENSG00000125363; CTA
YQSIRPPY

SEQ ID NO: 9467 - protein, 8 aa, Homo sapiens
  misc_feature: Table A; Target 9467; HLA-B*15:03; AMELX; ENSG00000125363; CTA
YQSIRPPY

SEQ ID NO: 9468 - protein, 8 aa, Homo sapiens
  misc_feature: Table A; Target 9468; HLA-B*37:01; AMELX; ENSG00000125363; CTA
YQSIRPPY

SEQ ID NO: 9469 - protein, 8 aa, Homo sapiens
  misc_feature: Table A; Target 9469; HLA-C*07:04; AMELX; ENSG00000125363; CTA
YQSIRPPY

SEQ ID NO: 9470 - protein, 8 aa, Homo sapiens
  misc_feature: Table A; Target 9470; HLA-C*16:01; AMELX; ENSG00000125363; CTA
YQSIRPPY

SEQ ID NO: 9471 - protein, 8 aa, Homo sapiens
  misc_feature: Table A; Target 9471; HLA-C*16:02; AMELX; ENSG00000125363; CTA
YQSIRPPY

SEQ ID NO: 9472 - protein, 8 aa, Homo sapiens
  misc_feature: Table A; Target 9472; HLA-B*37:01; BPIFA2; ENSG00000131050; CTA
AEKLLNNV

SEQ ID NO: 9473 - protein, 8 aa, Homo sapiens
  misc_feature: Table A; Target 9473; HLA-B*40:02; BPIFA2; ENSG00000131050; CTA
AEKLLNNV

SEQ ID NO: 9474 - protein, 8 aa, Homo sapiens
  misc_feature: Table A; Target 9474; HLA-B*49:01; BPIFA2; ENSG00000131050; CTA
AEKLLNNV

SEQ ID NO: 9475 - protein, 9 aa, Homo sapiens
  misc_feature: Table A; Target 9475; HLA-A*30:01; BPIFA2; ENSG00000131050; CTA
AEKLLNNVI

SEQ ID NO: 9476 - protein, 9 aa, Homo sapiens
  misc_feature: Table A; Target 9476; HLA-B*13:02; BPIFA2; ENSG00000131050; CTA
AEKLLNNVI

SEQ ID NO: 9477 - protein, 9 aa, Homo sapiens
  misc_feature: Table A; Target 9477; HLA-B*18:01; BPIFA2; ENSG00000131050; CTA
AEKLLNNVI

SEQ ID NO: 9478 - protein, 9 aa, Homo sapiens
  misc_feature: Table A; Target 9478; HLA-B*27:02; BPIFA2; ENSG00000131050; CTA
AEKLLNNVI

SEQ ID NO: 9479 - protein, 9 aa, Homo sapiens
  misc_feature: Table A; Target 9479; HLA-B*37:01; BPIFA2; ENSG00000131050; CTA
AEKLLNNVI

SEQ ID NO: 9480 - protein, 9 aa, Homo sapiens
  misc_feature: Table A; Target 9480; HLA-B*40:01; BPIFA2; ENSG00000131050; CTA
AEKLLNNVI

SEQ ID NO: 9481 - protein, 9 aa, Homo sapiens
  misc_feature: Table A; Target 9481; HLA-B*40:02; BPIFA2; ENSG00000131050; CTA
AEKLLNNVI

SEQ ID NO: 9482 - protein, 9 aa, Homo sapiens
  misc_feature: Table A; Target 9482; HLA-B*44:02; BPIFA2; ENSG00000131050; CTA
AEKLLNNVI

SEQ ID NO: 9483 - protein, 9 aa, Homo sapiens
  misc_feature: Table A; Target 9483; HLA-B*44:03; BPIFA2; ENSG00000131050; CTA
AEKLLNNVI

SEQ ID NO: 9484 - protein, 9 aa, Homo sapiens
  misc_feature: Table A; Target 9484; HLA-B*49:01; BPIFA2; ENSG00000131050; CTA
AEKLLNNVI

SEQ ID NO: 9485 - protein, 9 aa, Homo sapiens
  misc_feature: Table A; Target 9485; HLA-C*06:02; BPIFA2; ENSG00000131050; CTA
AEKLLNNVI

SEQ ID NO: 9486 - protein, 9 aa, Homo sapiens
  misc_feature: Table A; Target 9486; HLA-C*07:01; BPIFA2; ENSG00000131050; CTA
AEKLLNNVI

SEQ ID NO: 9487 - protein, 9 aa, Homo sapiens
  misc_feature: Table A; Target 9487; HLA-C*07:02; BPIFA2; ENSG00000131050; CTA
AEKLLNNVI

SEQ ID NO: 9488 - protein, 9 aa, Homo sapiens
  misc_feature: Table A; Target 9488; HLA-C*12:03; BPIFA2; ENSG00000131050; CTA
AEKLLNNVI

SEQ ID NO: 9489 - protein, 9 aa, Homo sapiens
  misc_feature: Table A; Target 9489; HLA-C*16:04; BPIFA2; ENSG00000131050; CTA
AEKLLNNVI

SEQ ID NO: 9490 - protein, 10 aa, Homo sapiens
  misc_feature: Table A; Target 9490; HLA-B*40:02; BPIFA2; ENSG00000131050; CTA
AEKLLNNVIS

SEQ ID NO: 9491 - protein, 11 aa, Homo sapiens
  misc_feature: Table A; Target 9491; HLA-B*40:02; BPIFA2; ENSG00000131050; CTA
AEKLLNNVISK

SEQ ID NO: 9492 - protein, 11 aa, Homo sapiens
  misc_feature: Table A; Target 9492; HLA-B*44:02; BPIFA2; ENSG00000131050; CTA
AEKLLNNVISK

SEQ ID NO: 9493 - protein, 10 aa, Homo sapiens
  misc_feature: Table A; Target 9493; HLA-A*30:01; BPIFA2; ENSG00000131050; CTA
AEPIDDGKGL

SEQ ID NO: 9494 - protein, 10 aa, Homo sapiens
  misc_feature: Table A; Target 9494; HLA-B*27:02; BPIFA2; ENSG00000131050; CTA
AEPIDDGKGL

SEQ ID NO: 9495 - protein, 10 aa, Homo sapiens
  misc_feature: Table A; Target 9495; HLA-B*37:01; BPIFA2; ENSG00000131050; CTA
AEPIDDGKGL

SEQ ID NO: 9496 - protein, 10 aa, Homo sapiens
  misc_feature: Table A; Target 9496; HLA-B*40:01; BPIFA2; ENSG00000131050; CTA
AEPIDDGKGL

SEQ ID NO: 9497 - protein, 10 aa, Homo sapiens
  misc_feature: Table A; Target 9497; HLA-B*40:02; BPIFA2; ENSG00000131050; CTA
AEPIDDGKGL

SEQ ID NO: 9498 - protein, 10 aa, Homo sapiens
  misc_feature: Table A; Target 9498; HLA-B*44:02; BPIFA2; ENSG00000131050; CTA
AEPIDDGKGL

SEQ ID NO: 9499 - protein, 10 aa, Homo sapiens
  misc_feature: Table A; Target 9499; HLA-B*44:03; BPIFA2; ENSG00000131050; CTA
AEPIDDGKGL

SEQ ID NO: 9500 - protein, 10 aa, Homo sapiens
  misc_feature: Table A; Target 9500; HLA-B*49:01; BPIFA2; ENSG00000131050; CTA
AEPIDDGKGL

SEQ ID NO: 9501 - protein, 10 aa, Homo sapiens
  misc_feature: Table A; Target 9501; HLA-C*04:01; BPIFA2; ENSG00000131050; CTA
AEPIDDGKGL

SEQ ID NO: 9502 - protein, 10 aa, Homo sapiens
  misc_feature: Table A; Target 9502; HLA-C*16:04; BPIFA2; ENSG00000131050; CTA
AEPIDDGKGL

SEQ ID NO: 9503 - protein, 8 aa, Homo sapiens
  misc_feature: Table A; Target 9503; HLA-B*07:02; BPIFA2; ENSG00000131050; CTA
AGPIIGQI

SEQ ID NO: 9504 - protein, 8 aa, Homo sapiens
  misc_feature: Table A; Target 9504; HLA-B*51:01; BPIFA2; ENSG00000131050; CTA
AGPIIGQI

SEQ ID NO: 9505 - protein, 8 aa, Homo sapiens
  misc_feature: Table A; Target 9505; HLA-C*07:02; BPIFA2; ENSG00000131050; CTA
AGPIIGQI

SEQ ID NO: 9506 - protein, 9 aa, Homo sapiens
  misc_feature: Table A; Target 9506; HLA-B*13:02; BPIFA2; ENSG00000131050; CTA
AGPIIGQII

SEQ ID NO: 9507 - protein, 9 aa, Homo sapiens
  misc_feature: Table A; Target 9507; HLA-B*51:01; BPIFA2; ENSG00000131050; CTA
AGPIIGQII

SEQ ID NO: 9508 - protein, 9 aa, Homo sapiens
  misc_feature: Table A; Target 9508; HLA-C*01:02; BPIFA2; ENSG00000131050; CTA
AGPIIGQII

SEQ ID NO: 9509 - protein, 9 aa, Homo sapiens
  misc_feature: Table A; Target 9509; HLA-C*04:01; BPIFA2; ENSG00000131050; CTA
AGPIIGQII

SEQ ID NO: 9510 - protein, 9 aa, Homo sapiens
  misc_feature: Table A; Target 9510; HLA-C*06:02; BPIFA2; ENSG00000131050; CTA
AGPIIGQII

SEQ ID NO: 9511 - protein, 9 aa, Homo sapiens
  misc_feature: Table A; Target 9511; HLA-C*07:01; BPIFA2; ENSG00000131050; CTA
AGPIIGQII

SEQ ID NO: 9512 - protein, 9 aa, Homo sapiens
  misc_feature: Table A; Target 9512; HLA-C*07:02; BPIFA2; ENSG00000131050; CTA
AGPIIGQII

SEQ ID NO: 9513 - protein, 9 aa, Homo sapiens
  misc_feature: Table A; Target 9513; HLA-C*12:03; BPIFA2; ENSG00000131050; CTA
AGPIIGQII

SEQ ID NO: 9514 - protein, 11 aa, Homo sapiens
  misc_feature: Table A; Target 9514; HLA-A*02:04; BPIFA2; ENSG00000131050; CTA
AGPIIGQIINL

SEQ ID NO: 9515 - protein, 11 aa, Homo sapiens
  misc_feature: Table A; Target 9515; HLA-B*38:01; BPIFA2; ENSG00000131050; CTA
AKQKAQEAEKL

SEQ ID NO: 9516 - protein, 8 aa, Homo sapiens
  misc_feature: Table A; Target 9516; HLA-C*05:01; BPIFA2; ENSG00000131050; CTA
AQEAEKLL

SEQ ID NO: 9517 - protein, 9 aa, Homo sapiens
  misc_feature: Table A; Target 9517; HLA-A*01:01; BPIFA2; ENSG00000131050; CTA
ASDPTSISL

SEQ ID NO: 9518 - protein, 9 aa, Homo sapiens
  misc_feature: Table A; Target 9518; HLA-A*02:01; BPIFA2; ENSG00000131050; CTA
ASDPTSISL

SEQ ID NO: 9519 - protein, 9 aa, Homo sapiens
  misc_feature: Table A; Target 9519; HLA-A*02:07; BPIFA2; ENSG00000131050; CTA
ASDPTSISL

SEQ ID NO: 9520 - protein, 9 aa, Homo sapiens
  misc_feature: Table A; Target 9520; HLA-A*03:01; BPIFA2; ENSG00000131050; CTA
ASDPTSISL

SEQ ID NO: 9521 - protein, 9 aa, Homo sapiens
  misc_feature: Table A; Target 9521; HLA-A*03:02; BPIFA2; ENSG00000131050; CTA
ASDPTSISL

SEQ ID NO: 9522 - protein, 9 aa, Homo sapiens
  misc_feature: Table A; Target 9522; HLA-A*11:01; BPIFA2; ENSG00000131050; CTA
ASDPTSISL

SEQ ID NO: 9523 - protein, 9 aa, Homo sapiens
  misc_feature: Table A; Target 9523; HLA-A*25:01; BPIFA2; ENSG00000131050; CTA
ASDPTSISL

SEQ ID NO: 9524 - protein, 9 aa, Homo sapiens
  misc_feature: Table A; Target 9524; HLA-A*30:01; BPIFA2; ENSG00000131050; CTA
ASDPTSISL

SEQ ID NO: 9525 - protein, 9 aa, Homo sapiens
  misc_feature: Table A; Target 9525; HLA-A*31:01; BPIFA2; ENSG00000131050; CTA
ASDPTSISL

SEQ ID NO: 9526 - protein, 9 aa, Homo sapiens
  misc_feature: Table A; Target 9526; HLA-A*32:01; BPIFA2; ENSG00000131050; CTA
ASDPTSISL

SEQ ID NO: 9527 - protein, 9 aa, Homo sapiens
  misc_feature: Table A; Target 9527; HLA-A*68:01; BPIFA2; ENSG00000131050; CTA
ASDPTSISL

SEQ ID NO: 9528 - protein, 9 aa, Homo sapiens
  misc_feature: Table A; Target 9528; HLA-A*68:02; BPIFA2; ENSG00000131050; CTA
ASDPTSISL

SEQ ID NO: 9529 - protein, 9 aa, Homo sapiens
  misc_feature: Table A; Target 9529; HLA-B*07:02; BPIFA2; ENSG00000131050; CTA
ASDPTSISL

SEQ ID NO: 9530 - protein, 9 aa, Homo sapiens
  misc_feature: Table A; Target 9530; HLA-B*13:02; BPIFA2; ENSG00000131050; CTA
ASDPTSISL

SEQ ID NO: 9531 - protein, 9 aa, Homo sapiens
  misc_feature: Table A; Target 9531; HLA-B*15:01; BPIFA2; ENSG00000131050; CTA
ASDPTSISL

SEQ ID NO: 9532 - protein, 9 aa, Homo sapiens
  misc_feature: Table A; Target 9532; HLA-B*15:03; BPIFA2; ENSG00000131050; CTA
ASDPTSISL

SEQ ID NO: 9533 - protein, 9 aa, Homo sapiens
  misc_feature: Table A; Target 9533; HLA-B*27:02; BPIFA2; ENSG00000131050; CTA
ASDPTSISL

SEQ ID NO: 9534 - protein, 9 aa, Homo sapiens
  misc_feature: Table A; Target 9534; HLA-B*27:05; BPIFA2; ENSG00000131050; CTA
ASDPTSISL

SEQ ID NO: 9535 - protein, 9 aa, Homo sapiens
  misc_feature: Table A; Target 9535; HLA-B*35:01; BPIFA2; ENSG00000131050; CTA
ASDPTSISL

SEQ ID NO: 9536 - protein, 9 aa, Homo sapiens
  misc_feature: Table A; Target 9536; HLA-B*35:03; BPIFA2; ENSG00000131050; CTA
ASDPTSISL

SEQ ID NO: 9537 - protein, 9 aa, Homo sapiens
  misc_feature: Table A; Target 9537; HLA-B*38:01; BPIFA2; ENSG00000131050; CTA
ASDPTSISL

SEQ ID NO: 9538 - protein, 9 aa, Homo sapiens
  misc_feature: Table A; Target 9538; HLA-B*39:01; BPIFA2; ENSG00000131050; CTA
ASDPTSISL

SEQ ID NO: 9539 - protein, 9 aa, Homo sapiens
  misc_feature: Table A; Target 9539; HLA-B*40:01; BPIFA2; ENSG00000131050; CTA
ASDPTSISL

SEQ ID NO: 9540 - protein, 9 aa, Homo sapiens
  misc_feature: Table A; Target 9540; HLA-B*40:02; BPIFA2; ENSG00000131050; CTA
ASDPTSISL

SEQ ID NO: 9541 - protein, 9 aa, Homo sapiens
  misc_feature: Table A; Target 9541; HLA-B*44:02; BPIFA2; ENSG00000131050; CTA
ASDPTSISL

SEQ ID NO: 9542 - protein, 9 aa, Homo sapiens
  misc_feature: Table A; Target 9542; HLA-B*44:03; BPIFA2; ENSG00000131050; CTA
ASDPTSISL

SEQ ID NO: 9543 - protein, 9 aa, Homo sapiens
  misc_feature: Table A; Target 9543; HLA-B*46:01; BPIFA2; ENSG00000131050; CTA
ASDPTSISL

SEQ ID NO: 9544 - protein, 9 aa, Homo sapiens
  misc_feature: Table A; Target 9544; HLA-B*55:01; BPIFA2; ENSG00000131050; CTA
ASDPTSISL

SEQ ID NO: 9545 - protein, 9 aa, Homo sapiens
  misc_feature: Table A; Target 9545; HLA-B*57:01; BPIFA2; ENSG00000131050; CTA
ASDPTSISL

SEQ ID NO: 9546 - protein, 9 aa, Homo sapiens
  misc_feature: Table A; Target 9546; HLA-B*58:01; BPIFA2; ENSG00000131050; CTA
ASDPTSISL

SEQ ID NO: 9547 - protein, 9 aa, Homo sapiens
  misc_feature: Table A; Target 9547; HLA-C*01:02; BPIFA2; ENSG00000131050; CTA
ASDPTSISL

SEQ ID NO: 9548 - protein, 9 aa, Homo sapiens
  misc_feature: Table A; Target 9548; HLA-C*02:02; BPIFA2; ENSG00000131050; CTA
ASDPTSISL

SEQ ID NO: 9549 - protein, 9 aa, Homo sapiens
  misc_feature: Table A; Target 9549; HLA-C*03:03; BPIFA2; ENSG00000131050; CTA
ASDPTSISL

SEQ ID NO: 9550 - protein, 9 aa, Homo sapiens
  misc_feature: Table A; Target 9550; HLA-C*03:04; BPIFA2; ENSG00000131050; CTA
ASDPTSISL

SEQ ID NO: 9551 - protein, 9 aa, Homo sapiens
  misc_feature: Table A; Target 9551; HLA-C*04:01; BPIFA2; ENSG00000131050; CTA
ASDPTSISL

SEQ ID NO: 9552 - protein, 9 aa, Homo sapiens
  misc_feature: Table A; Target 9552; HLA-C*05:01; BPIFA2; ENSG00000131050; CTA
ASDPTSISL

SEQ ID NO: 9553 - protein, 9 aa, Homo sapiens
  misc_feature: Table A; Target 9553; HLA-C*06:02; BPIFA2; ENSG00000131050; CTA
ASDPTSISL

SEQ ID NO: 9554 - protein, 9 aa, Homo sapiens
  misc_feature: Table A; Target 9554; HLA-C*07:02; BPIFA2; ENSG00000131050; CTA
ASDPTSISL

SEQ ID NO: 9555 - protein, 9 aa, Homo sapiens
  misc_feature: Table A; Target 9555; HLA-C*07:04; BPIFA2; ENSG00000131050; CTA
ASDPTSISL

SEQ ID NO: 9556 - protein, 9 aa, Homo sapiens
  misc_feature: Table A; Target 9556; HLA-C*07:06; BPIFA2; ENSG00000131050; CTA
ASDPTSISL

SEQ ID NO: 9557 - protein, 9 aa, Homo sapiens
  misc_feature: Table A; Target 9557; HLA-C*12:03; BPIFA2; ENSG00000131050; CTA
ASDPTSISL

SEQ ID NO: 9558 - protein, 9 aa, Homo sapiens
  misc_feature: Table A; Target 9558; HLA-C*14:02; BPIFA2; ENSG00000131050; CTA
ASDPTSISL

SEQ ID NO: 9559 - protein, 9 aa, Homo sapiens
  misc_feature: Table A; Target 9559; HLA-C*16:01; BPIFA2; ENSG00000131050; CTA
ASDPTSISL

SEQ ID NO: 9560 - protein, 9 aa, Homo sapiens
  misc_feature: Table A; Target 9560; HLA-C*16:02; BPIFA2; ENSG00000131050; CTA
ASDPTSISL

SEQ ID NO: 9561 - protein, 9 aa, Homo sapiens
  misc_feature: Table A; Target 9561; HLA-C*16:04; BPIFA2; ENSG00000131050; CTA
ASDPTSISL

SEQ ID NO: 9562 - protein, 10 aa, Homo sapiens
  misc_feature: Table A; Target 9562; HLA-A*01:01; BPIFA2; ENSG00000131050; CTA
ASDPTSISLS

SEQ ID NO: 9563 - protein, 11 aa, Homo sapiens
  misc_feature: Table A; Target 9563; HLA-A*01:01; BPIFA2; ENSG00000131050; CTA
ASDPTSISLSL

SEQ ID NO: 9564 - protein, 11 aa, Homo sapiens
  misc_feature: Table A; Target 9564; HLA-A*02:07; BPIFA2; ENSG00000131050; CTA
ASDPTSISLSL

SEQ ID NO: 9565 - protein, 11 aa, Homo sapiens
  misc_feature: Table A; Target 9565; HLA-A*03:01; BPIFA2; ENSG00000131050; CTA
ASDPTSISLSL

SEQ ID NO: 9566 - protein, 11 aa, Homo sapiens
  misc_feature: Table A; Target 9566; HLA-A*03:02; BPIFA2; ENSG00000131050; CTA
ASDPTSISLSL

SEQ ID NO: 9567 - protein, 11 aa, Homo sapiens
  misc_feature: Table A; Target 9567; HLA-A*11:01; BPIFA2; ENSG00000131050; CTA
ASDPTSISLSL

SEQ ID NO: 9568 - protein, 11 aa, Homo sapiens
  misc_feature: Table A; Target 9568; HLA-A*68:01; BPIFA2; ENSG00000131050; CTA
ASDPTSISLSL

SEQ ID NO: 9569 - protein, 11 aa, Homo sapiens
  misc_feature: Table A; Target 9569; HLA-B*38:01; BPIFA2; ENSG00000131050; CTA
ASDPTSISLSL

SEQ ID NO: 9570 - protein, 11 aa, Homo sapiens
  misc_feature: Table A; Target 9570; HLA-B*40:01; BPIFA2; ENSG00000131050; CTA
ASDPTSISLSL

SEQ ID NO: 9571 - protein, 11 aa, Homo sapiens
  misc_feature: Table A; Target 9571; HLA-B*58:01; BPIFA2; ENSG00000131050; CTA
ASDPTSISLSL

SEQ ID NO: 9572 - protein, 11 aa, Homo sapiens
  misc_feature: Table A; Target 9572; HLA-C*03:03; BPIFA2; ENSG00000131050; CTA
ASDPTSISLSL

SEQ ID NO: 9573 - protein, 11 aa, Homo sapiens
  misc_feature: Table A; Target 9573; HLA-C*03:04; BPIFA2; ENSG00000131050; CTA
ASDPTSISLSL

SEQ ID NO: 9574 - protein, 11 aa, Homo sapiens
  misc_feature: Table A; Target 9574; HLA-C*05:01; BPIFA2; ENSG00000131050; CTA
ASDPTSISLSL

SEQ ID NO: 9575 - protein, 11 aa, Homo sapiens
  misc_feature: Table A; Target 9575; HLA-C*07:02; BPIFA2; ENSG00000131050; CTA
ASDPTSISLSL

SEQ ID NO: 9576 - protein, 11 aa, Homo sapiens
  misc_feature: Table A; Target 9576; HLA-C*12:03; BPIFA2; ENSG00000131050; CTA
ASDPTSISLSL

SEQ ID NO: 9577 - protein, 11 aa, Homo sapiens
  misc_feature: Table A; Target 9577; HLA-C*16:04; BPIFA2; ENSG00000131050; CTA
ASDPTSISLSL

SEQ ID NO: 9578 - protein, 9 aa, Homo sapiens
  misc_feature: Table A; Target 9578; HLA-A*01:01; BPIFA2; ENSG00000131050; CTA
ASLDLLTAV

SEQ ID NO: 9579 - protein, 9 aa, Homo sapiens
  misc_feature: Table A; Target 9579; HLA-A*02:01; BPIFA2; ENSG00000131050; CTA
ASLDLLTAV

SEQ ID NO: 9580 - protein, 9 aa, Homo sapiens
  misc_feature: Table A; Target 9580; HLA-A*02:03; BPIFA2; ENSG00000131050; CTA
ASLDLLTAV

SEQ ID NO: 9581 - protein, 9 aa, Homo sapiens
  misc_feature: Table A; Target 9581; HLA-A*02:04; BPIFA2; ENSG00000131050; CTA
ASLDLLTAV

SEQ ID NO: 9582 - protein, 9 aa, Homo sapiens
  misc_feature: Table A; Target 9582; HLA-A*02:07; BPIFA2; ENSG00000131050; CTA
ASLDLLTAV

SEQ ID NO: 9583 - protein, 9 aa, Homo sapiens
  misc_feature: Table A; Target 9583; HLA-A*03:01; BPIFA2; ENSG00000131050; CTA
ASLDLLTAV

SEQ ID NO: 9584 - protein, 9 aa, Homo sapiens
  misc_feature: Table A; Target 9584; HLA-A*03:02; BPIFA2; ENSG00000131050; CTA
ASLDLLTAV

SEQ ID NO: 9585 - protein, 9 aa, Homo sapiens
  misc_feature: Table A; Target 9585; HLA-A*11:01; BPIFA2; ENSG00000131050; CTA
ASLDLLTAV

SEQ ID NO: 9586 - protein, 9 aa, Homo sapiens
  misc_feature: Table A; Target 9586; HLA-A*23:01; BPIFA2; ENSG00000131050; CTA
ASLDLLTAV

SEQ ID NO: 9587 - protein, 9 aa, Homo sapiens
  misc_feature: Table A; Target 9587; HLA-A*30:01; BPIFA2; ENSG00000131050; CTA
ASLDLLTAV

SEQ ID NO: 9588 - protein, 9 aa, Homo sapiens
  misc_feature: Table A; Target 9588; HLA-A*31:01; BPIFA2; ENSG00000131050; CTA
ASLDLLTAV

SEQ ID NO: 9589 - protein, 9 aa, Homo sapiens
  misc_feature: Table A; Target 9589; HLA-A*32:01; BPIFA2; ENSG00000131050; CTA
ASLDLLTAV

SEQ ID NO: 9590 - protein, 9 aa, Homo sapiens
  misc_feature: Table A; Target 9590; HLA-A*68:02; BPIFA2; ENSG00000131050; CTA
ASLDLLTAV

SEQ ID NO: 9591 - protein, 9 aa, Homo sapiens
  misc_feature: Table A; Target 9591; HLA-B*13:02; BPIFA2; ENSG00000131050; CTA
ASLDLLTAV

SEQ ID NO: 9592 - protein, 9 aa, Homo sapiens
  misc_feature: Table A; Target 9592; HLA-B*15:01; BPIFA2; ENSG00000131050; CTA
ASLDLLTAV

SEQ ID NO: 9593 - protein, 9 aa, Homo sapiens
  misc_feature: Table A; Target 9593; HLA-B*15:03; BPIFA2; ENSG00000131050; CTA
ASLDLLTAV

SEQ ID NO: 9594 - protein, 9 aa, Homo sapiens
  misc_feature: Table A; Target 9594; HLA-B*27:05; BPIFA2; ENSG00000131050; CTA
ASLDLLTAV

SEQ ID NO: 9595 - protein, 9 aa, Homo sapiens
  misc_feature: Table A; Target 9595; HLA-B*39:01; BPIFA2; ENSG00000131050; CTA
ASLDLLTAV

SEQ ID NO: 9596 - protein, 9 aa, Homo sapiens
  misc_feature: Table A; Target 9596; HLA-B*40:01; BPIFA2; ENSG00000131050; CTA
ASLDLLTAV

SEQ ID NO: 9597 - protein, 9 aa, Homo sapiens
  misc_feature: Table A; Target 9597; HLA-B*40:02; BPIFA2; ENSG00000131050; CTA
ASLDLLTAV

SEQ ID NO: 9598 - protein, 9 aa, Homo sapiens
  misc_feature: Table A; Target 9598; HLA-B*46:01; BPIFA2; ENSG00000131050; CTA
ASLDLLTAV

SEQ ID NO: 9599 - protein, 9 aa, Homo sapiens
  misc_feature: Table A; Target 9599; HLA-B*49:01; BPIFA2; ENSG00000131050; CTA
ASLDLLTAV

SEQ ID NO: 9600 - protein, 9 aa, Homo sapiens
  misc_feature: Table A; Target 9600; HLA-B*54:01; BPIFA2; ENSG00000131050; CTA
ASLDLLTAV

SEQ ID NO: 9601 - protein, 9 aa, Homo sapiens
  misc_feature: Table A; Target 9601; HLA-B*55:01; BPIFA2; ENSG00000131050; CTA
ASLDLLTAV

SEQ ID NO: 9602 - protein, 9 aa, Homo sapiens
  misc_feature: Table A; Target 9602; HLA-B*56:01; BPIFA2; ENSG00000131050; CTA
ASLDLLTAV

SEQ ID NO: 9603 - protein, 9 aa, Homo sapiens
  misc_feature: Table A; Target 9603; HLA-B*58:01; BPIFA2; ENSG00000131050; CTA
ASLDLLTAV

SEQ ID NO: 9604 - protein, 9 aa, Homo sapiens
  misc_feature: Table A; Target 9604; HLA-C*01:02; BPIFA2; ENSG00000131050; CTA
ASLDLLTAV

SEQ ID NO: 9605 - protein, 9 aa, Homo sapiens
  misc_feature: Table A; Target 9605; HLA-C*02:02; BPIFA2; ENSG00000131050; CTA
ASLDLLTAV

SEQ ID NO: 9606 - protein, 9 aa, Homo sapiens
  misc_feature: Table A; Target 9606; HLA-C*03:03; BPIFA2; ENSG00000131050; CTA
ASLDLLTAV

SEQ ID NO: 9607 - protein, 9 aa, Homo sapiens
  misc_feature: Table A; Target 9607; HLA-C*03:04; BPIFA2; ENSG00000131050; CTA
ASLDLLTAV

SEQ ID NO: 9608 - protein, 9 aa, Homo sapiens
  misc_feature: Table A; Target 9608; HLA-C*04:01; BPIFA2; ENSG00000131050; CTA
ASLDLLTAV

SEQ ID NO: 9609 - protein, 9 aa, Homo sapiens
  misc_feature: Table A; Target 9609; HLA-C*06:02; BPIFA2; ENSG00000131050; CTA
ASLDLLTAV

SEQ ID NO: 9610 - protein, 9 aa, Homo sapiens
  misc_feature: Table A; Target 9610; HLA-C*07:01; BPIFA2; ENSG00000131050; CTA
ASLDLLTAV

SEQ ID NO: 9611 - protein, 9 aa, Homo sapiens
  misc_feature: Table A; Target 9611; HLA-C*07:02; BPIFA2; ENSG00000131050; CTA
ASLDLLTAV

SEQ ID NO: 9612 - protein, 9 aa, Homo sapiens
  misc_feature: Table A; Target 9612; HLA-C*12:03; BPIFA2; ENSG00000131050; CTA
ASLDLLTAV

SEQ ID NO: 9613 - protein, 9 aa, Homo sapiens
  misc_feature: Table A; Target 9613; HLA-C*14:02; BPIFA2; ENSG00000131050; CTA
ASLDLLTAV

SEQ ID NO: 9614 - protein, 9 aa, Homo sapiens
  misc_feature: Table A; Target 9614; HLA-C*16:02; BPIFA2; ENSG00000131050; CTA
ASLDLLTAV

SEQ ID NO: 9615 - protein, 9 aa, Homo sapiens
  misc_feature: Table A; Target 9615; HLA-C*16:04; BPIFA2; ENSG00000131050; CTA
ASLDLLTAV

SEQ ID NO: 9616 - protein, 11 aa, Homo sapiens
  misc_feature: Table A; Target 9616; HLA-A*23:01; BPIFA2; ENSG00000131050; CTA
ASLDLLTAVTI

SEQ ID NO: 9617 - protein, 11 aa, Homo sapiens
  misc_feature: Table A; Target 9617; HLA-B*13:02; BPIFA2; ENSG00000131050; CTA
ASLDLLTAVTI

SEQ ID NO: 9618 - protein, 11 aa, Homo sapiens
  misc_feature: Table A; Target 9618; HLA-B*57:01; BPIFA2; ENSG00000131050; CTA
ASLDLLTAVTI

SEQ ID NO: 9619 - protein, 11 aa, Homo sapiens
  misc_feature: Table A; Target 9619; HLA-B*58:01; BPIFA2; ENSG00000131050; CTA
ASLDLLTAVTI

SEQ ID NO: 9620 - protein, 11 aa, Homo sapiens
  misc_feature: Table A; Target 9620; HLA-C*04:01; BPIFA2; ENSG00000131050; CTA
ASLDLLTAVTI

SEQ ID NO: 9621 - protein, 11 aa, Homo sapiens
  misc_feature: Table A; Target 9621; HLA-C*12:03; BPIFA2; ENSG00000131050; CTA
ASLDLLTAVTI

SEQ ID NO: 9622 - protein, 8 aa, Homo sapiens
  misc_feature: Table A; Target 9622; HLA-C*04:01; BPIFA2; ENSG00000131050; CTA
AWQLAKQK

SEQ ID NO: 9623 - protein, 8 aa, Homo sapiens
  misc_feature: Table A; Target 9623; HLA-C*06:02; BPIFA2; ENSG00000131050; CTA
AWQLAKQK

SEQ ID NO: 9624 - protein, 8 aa, Homo sapiens
  misc_feature: Table A; Target 9624; HLA-B*51:01; BPIFA2; ENSG00000131050; CTA
CASDPTSI

SEQ ID NO: 9625 - protein, 8 aa, Homo sapiens
  misc_feature: Table A; Target 9625; HLA-C*05:01; BPIFA2; ENSG00000131050; CTA
CASDPTSI

SEQ ID NO: 9626 - protein, 8 aa, Homo sapiens
  misc_feature: Table A; Target 9626; HLA-C*12:03; BPIFA2; ENSG00000131050; CTA
CASDPTSI

SEQ ID NO: 9627 - protein, 10 aa, Homo sapiens
  misc_feature: Table A; Target 9627; HLA-A*03:01; BPIFA2; ENSG00000131050; CTA
CASDPTSISL

SEQ ID NO: 9628 - protein, 10 aa, Homo sapiens
  misc_feature: Table A; Target 9628; HLA-A*03:02; BPIFA2; ENSG00000131050; CTA
CASDPTSISL

SEQ ID NO: 9629 - protein, 10 aa, Homo sapiens
  misc_feature: Table A; Target 9629; HLA-A*11:01; BPIFA2; ENSG00000131050; CTA
CASDPTSISL

SEQ ID NO: 9630 - protein, 10 aa, Homo sapiens
  misc_feature: Table A; Target 9630; HLA-A*30:01; BPIFA2; ENSG00000131050; CTA
CASDPTSISL

SEQ ID NO: 9631 - protein, 10 aa, Homo sapiens
  misc_feature: Table A; Target 9631; HLA-A*68:01; BPIFA2; ENSG00000131050; CTA
CASDPTSISL

SEQ ID NO: 9632 - protein, 10 aa, Homo sapiens
  misc_feature: Table A; Target 9632; HLA-A*68:02; BPIFA2; ENSG00000131050; CTA
CASDPTSISL

SEQ ID NO: 9633 - protein, 10 aa, Homo sapiens
  misc_feature: Table A; Target 9633; HLA-B*07:02; BPIFA2; ENSG00000131050; CTA
CASDPTSISL

SEQ ID NO: 9634 - protein, 10 aa, Homo sapiens
  misc_feature: Table A; Target 9634; HLA-B*27:05; BPIFA2; ENSG00000131050; CTA
CASDPTSISL

SEQ ID NO: 9635 - protein, 10 aa, Homo sapiens
  misc_feature: Table A; Target 9635; HLA-B*35:03; BPIFA2; ENSG00000131050; CTA
CASDPTSISL

SEQ ID NO: 9636 - protein, 10 aa, Homo sapiens
  misc_feature: Table A; Target 9636; HLA-B*38:01; BPIFA2; ENSG00000131050; CTA
CASDPTSISL

SEQ ID NO: 9637 - protein, 10 aa, Homo sapiens
  misc_feature: Table A; Target 9637; HLA-B*39:01; BPIFA2; ENSG00000131050; CTA
CASDPTSISL

SEQ ID NO: 9638 - protein, 10 aa, Homo sapiens
  misc_feature: Table A; Target 9638; HLA-B*40:01; BPIFA2; ENSG00000131050; CTA
CASDPTSISL

SEQ ID NO: 9639 - protein, 10 aa, Homo sapiens
  misc_feature: Table A; Target 9639; HLA-B*55:01; BPIFA2; ENSG00000131050; CTA
CASDPTSISL

SEQ ID NO: 9640 - protein, 10 aa, Homo sapiens
  misc_feature: Table A; Target 9640; HLA-B*58:01; BPIFA2; ENSG00000131050; CTA
CASDPTSISL

SEQ ID NO: 9641 - protein, 10 aa, Homo sapiens
  misc_feature: Table A; Target 9641; HLA-C*01:02; BPIFA2; ENSG00000131050; CTA
CASDPTSISL

SEQ ID NO: 9642 - protein, 10 aa, Homo sapiens
  misc_feature: Table A; Target 9642; HLA-C*02:02; BPIFA2; ENSG00000131050; CTA
CASDPTSISL

SEQ ID NO: 9643 - protein, 10 aa, Homo sapiens
  misc_feature: Table A; Target 9643; HLA-C*03:03; BPIFA2; ENSG00000131050; CTA
CASDPTSISL

SEQ ID NO: 9644 - protein, 10 aa, Homo sapiens
  misc_feature: Table A; Target 9644; HLA-C*03:04; BPIFA2; ENSG00000131050; CTA
CASDPTSISL

SEQ ID NO: 9645 - protein, 10 aa, Homo sapiens
  misc_feature: Table A; Target 9645; HLA-C*05:01; BPIFA2; ENSG00000131050; CTA
CASDPTSISL

SEQ ID NO: 9646 - protein, 10 aa, Homo sapiens
  misc_feature: Table A; Target 9646; HLA-C*07:02; BPIFA2; ENSG00000131050; CTA
CASDPTSISL

SEQ ID NO: 9647 - protein, 10 aa, Homo sapiens
  misc_feature: Table A; Target 9647; HLA-C*07:04; BPIFA2; ENSG00000131050; CTA
CASDPTSISL

SEQ ID NO: 9648 - protein, 10 aa, Homo sapiens
  misc_feature: Table A; Target 9648; HLA-C*07:06; BPIFA2; ENSG00000131050; CTA
CASDPTSISL

SEQ ID NO: 9649 - protein, 10 aa, Homo sapiens
  misc_feature: Table A; Target 9649; HLA-C*12:03; BPIFA2; ENSG00000131050; CTA
CASDPTSISL

SEQ ID NO: 9650 - protein, 10 aa, Homo sapiens
  misc_feature: Table A; Target 9650; HLA-C*14:02; BPIFA2; ENSG00000131050; CTA
CASDPTSISL

SEQ ID NO: 9651 - protein, 10 aa, Homo sapiens
  misc_feature: Table A; Target 9651; HLA-C*16:02; BPIFA2; ENSG00000131050; CTA
CASDPTSISL

SEQ ID NO: 9652 - protein, 10 aa, Homo sapiens
  misc_feature: Table A; Target 9652; HLA-C*16:04; BPIFA2; ENSG00000131050; CTA
CASDPTSISL

SEQ ID NO: 9653 - protein, 11 aa, Homo sapiens
  misc_feature: Table A; Target 9653; HLA-C*07:01; BPIFA2; ENSG00000131050; CTA
CGVLTGTSESL

SEQ ID NO: 9654 - protein, 8 aa, Homo sapiens
  misc_feature: Table A; Target 9654; HLA-B*40:02; BPIFA2; ENSG00000131050; CTA
DDGKGLNL

SEQ ID NO: 9655 - protein, 8 aa, Homo sapiens
  misc_feature: Table A; Target 9655; HLA-C*07:01; BPIFA2; ENSG00000131050; CTA
DDGKGLNL

SEQ ID NO: 9656 - protein, 10 aa, Homo sapiens
  misc_feature: Table A; Target 9656; HLA-B*18:01; BPIFA2; ENSG00000131050; CTA
DDGKGLNLSF

SEQ ID NO: 9657 - protein, 10 aa, Homo sapiens
  misc_feature: Table A; Target 9657; HLA-B*44:03; BPIFA2; ENSG00000131050; CTA
DDGKGLNLSF

SEQ ID NO: 9658 - protein, 9 aa, Homo sapiens
  misc_feature: Table A; Target 9658; HLA-A*25:01; BPIFA2; ENSG00000131050; CTA
DGKGLNLSF

SEQ ID NO: 9659 - protein, 9 aa, Homo sapiens
  misc_feature: Table A; Target 9659; HLA-A*26:01; BPIFA2; ENSG00000131050; CTA
DGKGLNLSF

SEQ ID NO: 9660 - protein, 9 aa, Homo sapiens
  misc_feature: Table A; Target 9660; HLA-A*33:01; BPIFA2; ENSG00000131050; CTA
DGKGLNLSF

SEQ ID NO: 9661 - protein, 9 aa, Homo sapiens
  misc_feature: Table A; Target 9661; HLA-B*08:01; BPIFA2; ENSG00000131050; CTA
DGKGLNLSF

SEQ ID NO: 9662 - protein, 9 aa, Homo sapiens
  misc_feature: Table A; Target 9662; HLA-B*18:01; BPIFA2; ENSG00000131050; CTA
DGKGLNLSF

SEQ ID NO: 9663 - protein, 9 aa, Homo sapiens
  misc_feature: Table A; Target 9663; HLA-C*07:02; BPIFA2; ENSG00000131050; CTA
DGKGLNLSF

SEQ ID NO: 9664 - protein, 10 aa, Homo sapiens
  misc_feature: Table A; Target 9664; HLA-A*33:01; BPIFA2; ENSG00000131050; CTA
DIFGLKISNS

SEQ ID NO: 9665 - protein, 9 aa, Homo sapiens
  misc_feature: Table A; Target 9665; HLA-A*33:01; BPIFA2; ENSG00000131050; CTA
DKHSQIINK

SEQ ID NO: 9666 - protein, 11 aa, Homo sapiens
  misc_feature: Table A; Target 9666; HLA-A*25:01; BPIFA2; ENSG00000131050; CTA
DLGVLQKSSAW

SEQ ID NO: 9667 - protein, 11 aa, Homo sapiens
  misc_feature: Table A; Target 9667; HLA-C*07:01; BPIFA2; ENSG00000131050; CTA
DLGVLQKSSAW

SEQ ID NO: 9668 - protein, 8 aa, Homo sapiens
  misc_feature: Table A; Target 9668; HLA-A*23:01; BPIFA2; ENSG00000131050; CTA
DLLTAVTI

SEQ ID NO: 9669 - protein, 8 aa, Homo sapiens
  misc_feature: Table A; Target 9669; HLA-A*33:01; BPIFA2; ENSG00000131050; CTA
DLLTAVTI

SEQ ID NO: 9670 - protein, 8 aa, Homo sapiens
  misc_feature: Table A; Target 9670; HLA-B*08:01; BPIFA2; ENSG00000131050; CTA
DLLTAVTI

SEQ ID NO: 9671 - protein, 8 aa, Homo sapiens
  misc_feature: Table A; Target 9671; HLA-B*18:01; BPIFA2; ENSG00000131050; CTA
DLLTAVTI

SEQ ID NO: 9672 - protein, 8 aa, Homo sapiens
  misc_feature: Table A; Target 9672; HLA-B*35:03; BPIFA2; ENSG00000131050; CTA
DLLTAVTI

SEQ ID NO: 9673 - protein, 8 aa, Homo sapiens
  misc_feature: Table A; Target 9673; HLA-B*38:01; BPIFA2; ENSG00000131050; CTA
DLLTAVTI

SEQ ID NO: 9674 - protein, 8 aa, Homo sapiens
  misc_feature: Table A; Target 9674; HLA-B*51:01; BPIFA2; ENSG00000131050; CTA
DLLTAVTI

SEQ ID NO: 9675 - protein, 8 aa, Homo sapiens
  misc_feature: Table A; Target 9675; HLA-C*04:01; BPIFA2; ENSG00000131050; CTA
DLLTAVTI

SEQ ID NO: 9676 - protein, 8 aa, Homo sapiens
  misc_feature: Table A; Target 9676; HLA-C*07:01; BPIFA2; ENSG00000131050; CTA
DLLTAVTI

SEQ ID NO: 9677 - protein, 8 aa, Homo sapiens
  misc_feature: Table A; Target 9677; HLA-C*07:04; BPIFA2; ENSG00000131050; CTA
DLLTAVTI

SEQ ID NO: 9678 - protein, 10 aa, Homo sapiens
  misc_feature: Table A; Target 9678; HLA-C*07:01; BPIFA2; ENSG00000131050; CTA
DLLTAVTIET

SEQ ID NO: 9679 - protein, 8 aa, Homo sapiens
  misc_feature: Table A; Target 9679; HLA-B*27:02; BPIFA2; ENSG00000131050; CTA
DLSNVVDK

SEQ ID NO: 9680 - protein, 9 aa, Homo sapiens
  misc_feature: Table A; Target 9680; HLA-A*02:03; BPIFA2; ENSG00000131050; CTA
DLSNVVDKL

SEQ ID NO: 9681 - protein, 9 aa, Homo sapiens
  misc_feature: Table A; Target 9681; HLA-A*02:04; BPIFA2; ENSG00000131050; CTA
DLSNVVDKL

SEQ ID NO: 9682 - protein, 9 aa, Homo sapiens
  misc_feature: Table A; Target 9682; HLA-A*02:07; BPIFA2; ENSG00000131050; CTA
DLSNVVDKL

SEQ ID NO: 9683 - protein, 9 aa, Homo sapiens
  misc_feature: Table A; Target 9683; HLA-A*25:01; BPIFA2; ENSG00000131050; CTA
DLSNVVDKL

SEQ ID NO: 9684 - protein, 9 aa, Homo sapiens
  misc_feature: Table A; Target 9684; HLA-A*26:01; BPIFA2; ENSG00000131050; CTA
DLSNVVDKL

SEQ ID NO: 9685 - protein, 9 aa, Homo sapiens
  misc_feature: Table A; Target 9685; HLA-A*33:01; BPIFA2; ENSG00000131050; CTA
DLSNVVDKL

SEQ ID NO: 9686 - protein, 9 aa, Homo sapiens
  misc_feature: Table A; Target 9686; HLA-A*68:01; BPIFA2; ENSG00000131050; CTA
DLSNVVDKL

SEQ ID NO: 9687 - protein, 9 aa, Homo sapiens
  misc_feature: Table A; Target 9687; HLA-A*68:02; BPIFA2; ENSG00000131050; CTA
DLSNVVDKL

SEQ ID NO: 9688 - protein, 9 aa, Homo sapiens
  misc_feature: Table A; Target 9688; HLA-B*27:05; BPIFA2; ENSG00000131050; CTA
DLSNVVDKL

SEQ ID NO: 9689 - protein, 9 aa, Homo sapiens
  misc_feature: Table A; Target 9689; HLA-B*35:03; BPIFA2; ENSG00000131050; CTA
DLSNVVDKL

SEQ ID NO: 9690 - protein, 9 aa, Homo sapiens
  misc_feature: Table A; Target 9690; HLA-B*38:01; BPIFA2; ENSG00000131050; CTA
DLSNVVDKL

SEQ ID NO: 9691 - protein, 9 aa, Homo sapiens
  misc_feature: Table A; Target 9691; HLA-B*39:01; BPIFA2; ENSG00000131050; CTA
DLSNVVDKL

SEQ ID NO: 9692 - protein, 9 aa, Homo sapiens
  misc_feature: Table A; Target 9692; HLA-B*55:01; BPIFA2; ENSG00000131050; CTA
DLSNVVDKL

SEQ ID NO: 9693 - protein, 9 aa, Homo sapiens
  misc_feature: Table A; Target 9693; HLA-C*06:02; BPIFA2; ENSG00000131050; CTA
DLSNVVDKL

SEQ ID NO: 9694 - protein, 9 aa, Homo sapiens
  misc_feature: Table A; Target 9694; HLA-C*07:01; BPIFA2; ENSG00000131050; CTA
DNLGNDLSN

SEQ ID NO: 9695 - protein, 10 aa, Homo sapiens
  misc_feature: Table A; Target 9695; HLA-A*33:01; BPIFA2; ENSG00000131050; CTA
DNLGNDLSNV

SEQ ID NO: 9696 - protein, 10 aa, Homo sapiens
  misc_feature: Table A; Target 9696; HLA-C*07:01; BPIFA2; ENSG00000131050; CTA
DNLGNDLSNV

SEQ ID NO: 9697 - protein, 11 aa, Homo sapiens
  misc_feature: Table A; Target 9697; HLA-C*07:01; BPIFA2; ENSG00000131050; CTA
DNLGNDLSNVV

SEQ ID NO: 9698 - protein, 9 aa, Homo sapiens
  misc_feature: Table A; Target 9698; HLA-A*33:01; BPIFA2; ENSG00000131050; CTA
DNPQHKTQL

SEQ ID NO: 9699 - protein, 9 aa, Homo sapiens
  misc_feature: Table A; Target 9699; HLA-B*08:01; BPIFA2; ENSG00000131050; CTA
DNPQHKTQL

SEQ ID NO: 9700 - protein, 8 aa, Homo sapiens
  misc_feature: Table A; Target 9700; HLA-B*08:01; BPIFA2; ENSG00000131050; CTA
DNTLKGIL

SEQ ID NO: 9701 - protein, 10 aa, Homo sapiens
  misc_feature: Table A; Target 9701; HLA-A*33:01; BPIFA2; ENSG00000131050; CTA
DNTLKGILEK

SEQ ID NO: 9702 - protein, 8 aa, Homo sapiens
  misc_feature: Table A; Target 9702; HLA-B*08:01; BPIFA2; ENSG00000131050; CTA
DPQTHQPV

SEQ ID NO: 9703 - protein, 8 aa, Homo sapiens
  misc_feature: Table A; Target 9703; HLA-B*51:01; BPIFA2; ENSG00000131050; CTA
DPQTHQPV

SEQ ID NO: 9704 - protein, 8 aa, Homo sapiens
  misc_feature: Table A; Target 9704; HLA-C*07:01; BPIFA2; ENSG00000131050; CTA
DPQTHQPV

SEQ ID NO: 9705 - protein, 9 aa, Homo sapiens
  misc_feature: Table A; Target 9705; HLA-B*35:01; BPIFA2; ENSG00000131050; CTA
DPQTHQPVA

SEQ ID NO: 9706 - protein, 9 aa, Homo sapiens
  misc_feature: Table A; Target 9706; HLA-B*35:03; BPIFA2; ENSG00000131050; CTA
DPQTHQPVA

SEQ ID NO: 9707 - protein, 9 aa, Homo sapiens
  misc_feature: Table A; Target 9707; HLA-B*51:01; BPIFA2; ENSG00000131050; CTA
DPQTHQPVA

SEQ ID NO: 9708 - protein, 9 aa, Homo sapiens
  misc_feature: Table A; Target 9708; HLA-B*54:01; BPIFA2; ENSG00000131050; CTA
DPQTHQPVA

SEQ ID NO: 9709 - protein, 9 aa, Homo sapiens
  misc_feature: Table A; Target 9709; HLA-B*55:01; BPIFA2; ENSG00000131050; CTA
DPQTHQPVA

SEQ ID NO: 9710 - protein, 9 aa, Homo sapiens
  misc_feature: Table A; Target 9710; HLA-B*56:01; BPIFA2; ENSG00000131050; CTA
DPQTHQPVA

SEQ ID NO: 9711 - protein, 9 aa, Homo sapiens
  misc_feature: Table A; Target 9711; HLA-C*03:03; BPIFA2; ENSG00000131050; CTA
DPQTHQPVA

SEQ ID NO: 9712 - protein, 9 aa, Homo sapiens
  misc_feature: Table A; Target 9712; HLA-C*12:03; BPIFA2; ENSG00000131050; CTA
DPQTHQPVA

SEQ ID NO: 9713 - protein, 10 aa, Homo sapiens
  misc_feature: Table A; Target 9713; HLA-B*07:02; BPIFA2; ENSG00000131050; CTA
DPQTHQPVAV

SEQ ID NO: 9714 - protein, 10 aa, Homo sapiens
  misc_feature: Table A; Target 9714; HLA-B*35:03; BPIFA2; ENSG00000131050; CTA
DPQTHQPVAV

SEQ ID NO: 9715 - protein, 10 aa, Homo sapiens
  misc_feature: Table A; Target 9715; HLA-B*51:01; BPIFA2; ENSG00000131050; CTA
DPQTHQPVAV

SEQ ID NO: 9716 - protein, 10 aa, Homo sapiens
  misc_feature: Table A; Target 9716; HLA-B*54:01; BPIFA2; ENSG00000131050; CTA
DPQTHQPVAV

SEQ ID NO: 9717 - protein, 10 aa, Homo sapiens
  misc_feature: Table A; Target 9717; HLA-B*56:01; BPIFA2; ENSG00000131050; CTA
DPQTHQPVAV

SEQ ID NO: 9718 - protein, 10 aa, Homo sapiens
  misc_feature: Table A; Target 9718; HLA-C*07:02; BPIFA2; ENSG00000131050; CTA
DPQTHQPVAV

SEQ ID NO: 9719 - protein, 11 aa, Homo sapiens
  misc_feature: Table A; Target 9719; HLA-B*35:03; BPIFA2; ENSG00000131050; CTA
DPQTHQPVAVL

SEQ ID NO: 9720 - protein, 9 aa, Homo sapiens
  misc_feature: Table A; Target 9720; HLA-A*23:01; BPIFA2; ENSG00000131050; CTA
DPTSISLSL

SEQ ID NO: 9721 - protein, 9 aa, Homo sapiens
  misc_feature: Table A; Target 9721; HLA-A*25:01; BPIFA2; ENSG00000131050; CTA
DPTSISLSL

SEQ ID NO: 9722 - protein, 9 aa, Homo sapiens
  misc_feature: Table A; Target 9722; HLA-A*26:01; BPIFA2; ENSG00000131050; CTA
DPTSISLSL

SEQ ID NO: 9723 - protein, 9 aa, Homo sapiens
  misc_feature: Table A; Target 9723; HLA-A*33:03; BPIFA2; ENSG00000131050; CTA
DPTSISLSL

SEQ ID NO: 9724 - protein, 9 aa, Homo sapiens
  misc_feature: Table A; Target 9724; HLA-A*68:01; BPIFA2; ENSG00000131050; CTA
DPTSISLSL

SEQ ID NO: 9725 - protein, 9 aa, Homo sapiens
  misc_feature: Table A; Target 9725; HLA-A*68:02; BPIFA2; ENSG00000131050; CTA
DPTSISLSL

SEQ ID NO: 9726 - protein, 9 aa, Homo sapiens
  misc_feature: Table A; Target 9726; HLA-B*07:02; BPIFA2; ENSG00000131050; CTA
DPTSISLSL

SEQ ID NO: 9727 - protein, 9 aa, Homo sapiens
  misc_feature: Table A; Target 9727; HLA-B*08:01; BPIFA2; ENSG00000131050; CTA
DPTSISLSL

SEQ ID NO: 9728 - protein, 9 aa, Homo sapiens
  misc_feature: Table A; Target 9728; HLA-B*18:01; BPIFA2; ENSG00000131050; CTA
DPTSISLSL

SEQ ID NO: 9729 - protein, 9 aa, Homo sapiens
  misc_feature: Table A; Target 9729; HLA-B*35:01; BPIFA2; ENSG00000131050; CTA
DPTSISLSL

SEQ ID NO: 9730 - protein, 9 aa, Homo sapiens
  misc_feature: Table A; Target 9730; HLA-B*35:03; BPIFA2; ENSG00000131050; CTA
DPTSISLSL

SEQ ID NO: 9731 - protein, 9 aa, Homo sapiens
  misc_feature: Table A; Target 9731; HLA-B*38:01; BPIFA2; ENSG00000131050; CTA
DPTSISLSL

SEQ ID NO: 9732 - protein, 9 aa, Homo sapiens
  misc_feature: Table A; Target 9732; HLA-B*39:01; BPIFA2; ENSG00000131050; CTA
DPTSISLSL

SEQ ID NO: 9733 - protein, 9 aa, Homo sapiens
  misc_feature: Table A; Target 9733; HLA-B*51:01; BPIFA2; ENSG00000131050; CTA
DPTSISLSL

SEQ ID NO: 9734 - protein, 9 aa, Homo sapiens
  misc_feature: Table A; Target 9734; HLA-B*54:01; BPIFA2; ENSG00000131050; CTA
DPTSISLSL

SEQ ID NO: 9735 - protein, 9 aa, Homo sapiens
  misc_feature: Table A; Target 9735; HLA-B*55:01; BPIFA2; ENSG00000131050; CTA
DPTSISLSL

SEQ ID NO: 9736 - protein, 9 aa, Homo sapiens
  misc_feature: Table A; Target 9736; HLA-B*56:01; BPIFA2; ENSG00000131050; CTA
DPTSISLSL

SEQ ID NO: 9737 - protein, 9 aa, Homo sapiens
  misc_feature: Table A; Target 9737; HLA-C*07:02; BPIFA2; ENSG00000131050; CTA
DPTSISLSL

SEQ ID NO: 9738 - protein, 9 aa, Homo sapiens
  misc_feature: Table A; Target 9738; HLA-C*07:06; BPIFA2; ENSG00000131050; CTA
DPTSISLSL

SEQ ID NO: 9739 - protein, 10 aa, Homo sapiens
  misc_feature: Table A; Target 9739; HLA-A*25:01; BPIFA2; ENSG00000131050; CTA
DPTSISLSLL

SEQ ID NO: 9740 - protein, 10 aa, Homo sapiens
  misc_feature: Table A; Target 9740; HLA-B*35:01; BPIFA2; ENSG00000131050; CTA
DPTSISLSLL

SEQ ID NO: 9741 - protein, 10 aa, Homo sapiens
  misc_feature: Table A; Target 9741; HLA-B*35:03; BPIFA2; ENSG00000131050; CTA
DPTSISLSLL

SEQ ID NO: 9742 - protein, 10 aa, Homo sapiens
  misc_feature: Table A; Target 9742; HLA-C*07:01; BPIFA2; ENSG00000131050; CTA
DPTSISLSLL

SEQ ID NO: 9743 - protein, 11 aa, Homo sapiens
  misc_feature: Table A; Target 9743; HLA-A*33:01; BPIFA2; ENSG00000131050; CTA
DVKAEPIDDGK

SEQ ID NO: 9744 - protein, 11 aa, Homo sapiens
  misc_feature: Table A; Target 9744; HLA-A*33:03; BPIFA2; ENSG00000131050; CTA
DVKAEPIDDGK

SEQ ID NO: 9745 - protein, 11 aa, Homo sapiens
  misc_feature: Table A; Target 9745; HLA-A*68:01; BPIFA2; ENSG00000131050; CTA
DVKAEPIDDGK

SEQ ID NO: 9746 - protein, 8 aa, Homo sapiens
  misc_feature: Table A; Target 9746; HLA-A*25:01; BPIFA2; ENSG00000131050; CTA
DVNVIQQV

SEQ ID NO: 9747 - protein, 8 aa, Homo sapiens
  misc_feature: Table A; Target 9747; HLA-A*26:01; BPIFA2; ENSG00000131050; CTA
DVNVIQQV

SEQ ID NO: 9748 - protein, 8 aa, Homo sapiens
  misc_feature: Table A; Target 9748; HLA-A*33:01; BPIFA2; ENSG00000131050; CTA
DVNVIQQV

SEQ ID NO: 9749 - protein, 8 aa, Homo sapiens
  misc_feature: Table A; Target 9749; HLA-A*68:02; BPIFA2; ENSG00000131050; CTA
DVNVIQQV

SEQ ID NO: 9750 - protein, 8 aa, Homo sapiens
  misc_feature: Table A; Target 9750; HLA-B*08:01; BPIFA2; ENSG00000131050; CTA
DVNVIQQV

SEQ ID NO: 9751 - protein, 8 aa, Homo sapiens
  misc_feature: Table A; Target 9751; HLA-B*18:01; BPIFA2; ENSG00000131050; CTA
DVNVIQQV

SEQ ID NO: 9752 - protein, 8 aa, Homo sapiens
  misc_feature: Table A; Target 9752; HLA-B*40:02; BPIFA2; ENSG00000131050; CTA
DVNVIQQV

SEQ ID NO: 9753 - protein, 8 aa, Homo sapiens
  misc_feature: Table A; Target 9753; HLA-B*51:01; BPIFA2; ENSG00000131050; CTA
DVNVIQQV

SEQ ID NO: 9754 - protein, 8 aa, Homo sapiens
  misc_feature: Table A; Target 9754; HLA-C*04:01; BPIFA2; ENSG00000131050; CTA
DVNVIQQV

SEQ ID NO: 9755 - protein, 8 aa, Homo sapiens
  misc_feature: Table A; Target 9755; HLA-C*06:02; BPIFA2; ENSG00000131050; CTA
DVNVIQQV

SEQ ID NO: 9756 - protein, 8 aa, Homo sapiens
  misc_feature: Table A; Target 9756; HLA-C*07:01; BPIFA2; ENSG00000131050; CTA
DVNVIQQV

SEQ ID NO: 9757 - protein, 8 aa, Homo sapiens
  misc_feature: Table A; Target 9757; HLA-C*07:06; BPIFA2; ENSG00000131050; CTA
DVNVIQQV

SEQ ID NO: 9758 - protein, 8 aa, Homo sapiens
  misc_feature: Table A; Target 9758; HLA-C*12:03; BPIFA2; ENSG00000131050; CTA
DVNVIQQV

SEQ ID NO: 9759 - protein, 9 aa, Homo sapiens
  misc_feature: Table A; Target 9759; HLA-A*25:01; BPIFA2; ENSG00000131050; CTA
DVNVIQQVV

SEQ ID NO: 9760 - protein, 9 aa, Homo sapiens
  misc_feature: Table A; Target 9760; HLA-A*26:01; BPIFA2; ENSG00000131050; CTA
DVNVIQQVV

SEQ ID NO: 9761 - protein, 9 aa, Homo sapiens
  misc_feature: Table A; Target 9761; HLA-A*32:01; BPIFA2; ENSG00000131050; CTA
DVNVIQQVV

SEQ ID NO: 9762 - protein, 9 aa, Homo sapiens
  misc_feature: Table A; Target 9762; HLA-A*33:01; BPIFA2; ENSG00000131050; CTA
DVNVIQQVV

SEQ ID NO: 9763 - protein, 9 aa, Homo sapiens
  misc_feature: Table A; Target 9763; HLA-A*33:03; BPIFA2; ENSG00000131050; CTA
DVNVIQQVV

SEQ ID NO: 9764 - protein, 9 aa, Homo sapiens
  misc_feature: Table A; Target 9764; HLA-A*68:01; BPIFA2; ENSG00000131050; CTA
DVNVIQQVV

SEQ ID NO: 9765 - protein, 9 aa, Homo sapiens
  misc_feature: Table A; Target 9765; HLA-A*68:02; BPIFA2; ENSG00000131050; CTA
DVNVIQQVV

SEQ ID NO: 9766 - protein, 9 aa, Homo sapiens
  misc_feature: Table A; Target 9766; HLA-B*08:01; BPIFA2; ENSG00000131050; CTA
DVNVIQQVV

SEQ ID NO: 9767 - protein, 9 aa, Homo sapiens
  misc_feature: Table A; Target 9767; HLA-B*13:02; BPIFA2; ENSG00000131050; CTA
DVNVIQQVV

SEQ ID NO: 9768 - protein, 9 aa, Homo sapiens
  misc_feature: Table A; Target 9768; HLA-B*18:01; BPIFA2; ENSG00000131050; CTA
DVNVIQQVV

SEQ ID NO: 9769 - protein, 9 aa, Homo sapiens
  misc_feature: Table A; Target 9769; HLA-B*27:05; BPIFA2; ENSG00000131050; CTA
DVNVIQQVV

SEQ ID NO: 9770 - protein, 9 aa, Homo sapiens
  misc_feature: Table A; Target 9770; HLA-B*35:01; BPIFA2; ENSG00000131050; CTA
DVNVIQQVV

SEQ ID NO: 9771 - protein, 9 aa, Homo sapiens
  misc_feature: Table A; Target 9771; HLA-B*35:03; BPIFA2; ENSG00000131050; CTA
DVNVIQQVV

SEQ ID NO: 9772 - protein, 9 aa, Homo sapiens
  misc_feature: Table A; Target 9772; HLA-B*38:01; BPIFA2; ENSG00000131050; CTA
DVNVIQQVV

SEQ ID NO: 9773 - protein, 9 aa, Homo sapiens
  misc_feature: Table A; Target 9773; HLA-B*39:01; BPIFA2; ENSG00000131050; CTA
DVNVIQQVV

SEQ ID NO: 9774 - protein, 9 aa, Homo sapiens
  misc_feature: Table A; Target 9774; HLA-B*44:02; BPIFA2; ENSG00000131050; CTA
DVNVIQQVV

SEQ ID NO: 9775 - protein, 9 aa, Homo sapiens
  misc_feature: Table A; Target 9775; HLA-B*51:01; BPIFA2; ENSG00000131050; CTA
DVNVIQQVV

SEQ ID NO: 9776 - protein, 9 aa, Homo sapiens
  misc_feature: Table A; Target 9776; HLA-B*54:01; BPIFA2; ENSG00000131050; CTA
DVNVIQQVV

SEQ ID NO: 9777 - protein, 9 aa, Homo sapiens
  misc_feature: Table A; Target 9777; HLA-C*01:02; BPIFA2; ENSG00000131050; CTA
DVNVIQQVV

SEQ ID NO: 9778 - protein, 9 aa, Homo sapiens
  misc_feature: Table A; Target 9778; HLA-C*02:02; BPIFA2; ENSG00000131050; CTA
DVNVIQQVV

SEQ ID NO: 9779 - protein, 9 aa, Homo sapiens
  misc_feature: Table A; Target 9779; HLA-C*03:03; BPIFA2; ENSG00000131050; CTA
DVNVIQQVV

SEQ ID NO: 9780 - protein, 9 aa, Homo sapiens
  misc_feature: Table A; Target 9780; HLA-C*04:01; BPIFA2; ENSG00000131050; CTA
DVNVIQQVV

SEQ ID NO: 9781 - protein, 9 aa, Homo sapiens
  misc_feature: Table A; Target 9781; HLA-C*06:02; BPIFA2; ENSG00000131050; CTA
DVNVIQQVV

SEQ ID NO: 9782 - protein, 9 aa, Homo sapiens
  misc_feature: Table A; Target 9782; HLA-C*07:01; BPIFA2; ENSG00000131050; CTA
DVNVIQQVV

SEQ ID NO: 9783 - protein, 9 aa, Homo sapiens
  misc_feature: Table A; Target 9783; HLA-C*07:02; BPIFA2; ENSG00000131050; CTA
DVNVIQQVV

SEQ ID NO: 9784 - protein, 9 aa, Homo sapiens
  misc_feature: Table A; Target 9784; HLA-C*07:04; BPIFA2; ENSG00000131050; CTA
DVNVIQQVV

SEQ ID NO: 9785 - protein, 9 aa, Homo sapiens
  misc_feature: Table A; Target 9785; HLA-C*07:06; BPIFA2; ENSG00000131050; CTA
DVNVIQQVV

SEQ ID NO: 9786 - protein, 9 aa, Homo sapiens
  misc_feature: Table A; Target 9786; HLA-C*12:03; BPIFA2; ENSG00000131050; CTA
DVNVIQQVV

SEQ ID NO: 9787 - protein, 9 aa, Homo sapiens
  misc_feature: Table A; Target 9787; HLA-C*16:04; BPIFA2; ENSG00000131050; CTA
DVNVIQQVV

SEQ ID NO: 9788 - protein, 9 aa, Homo sapiens
  misc_feature: Table A; Target 9788; HLA-A*33:03; BPIFA2; ENSG00000131050; CTA
EAEKLLNNV

SEQ ID NO: 9789 - protein, 9 aa, Homo sapiens
  misc_feature: Table A; Target 9789; HLA-A*68:02; BPIFA2; ENSG00000131050; CTA
EAEKLLNNV

SEQ ID NO: 9790 - protein, 9 aa, Homo sapiens
  misc_feature: Table A; Target 9790; HLA-B*51:01; BPIFA2; ENSG00000131050; CTA
EAEKLLNNV

SEQ ID NO: 9791 - protein, 10 aa, Homo sapiens
  misc_feature: Table A; Target 9791; HLA-B*38:01; BPIFA2; ENSG00000131050; CTA
EAEKLLNNVI

SEQ ID NO: 9792 - protein, 10 aa, Homo sapiens
  misc_feature: Table A; Target 9792; HLA-C*07:01; BPIFA2; ENSG00000131050; CTA
EAEKLLNNVI

SEQ ID NO: 9793 - protein, 9 aa, Homo sapiens
  misc_feature: Table A; Target 9793; HLA-B*38:01; BPIFA2; ENSG00000131050; CTA
ECASDPTSI

SEQ ID NO: 9794 - protein, 9 aa, Homo sapiens
  misc_feature: Table A; Target 9794; HLA-B*39:01; BPIFA2; ENSG00000131050; CTA
ECASDPTSI

SEQ ID NO: 9795 - protein, 9 aa, Homo sapiens
  misc_feature: Table A; Target 9795; HLA-C*07:01; BPIFA2; ENSG00000131050; CTA
ECASDPTSI

SEQ ID NO: 9796 - protein, 11 aa, Homo sapiens
  misc_feature: Table A; Target 9796; HLA-A*68:01; BPIFA2; ENSG00000131050; CTA
ECASDPTSISL

SEQ ID NO: 9797 - protein, 11 aa, Homo sapiens
  misc_feature: Table A; Target 9797; HLA-A*68:02; BPIFA2; ENSG00000131050; CTA
ECASDPTSISL

SEQ ID NO: 9798 - protein, 11 aa, Homo sapiens
  misc_feature: Table A; Target 9798; HLA-B*35:03; BPIFA2; ENSG00000131050; CTA
ECASDPTSISL

SEQ ID NO: 9799 - protein, 11 aa, Homo sapiens
  misc_feature: Table A; Target 9799; HLA-C*07:01; BPIFA2; ENSG00000131050; CTA
ECASDPTSISL

SEQ ID NO: 9800 - protein, 10 aa, Homo sapiens
  misc_feature: Table A; Target 9800; HLA-B*27:05; BPIFA2; ENSG00000131050; CTA
EGLETVDNTL

SEQ ID NO: 9801 - protein, 10 aa, Homo sapiens
  misc_feature: Table A; Target 9801; HLA-B*35:03; BPIFA2; ENSG00000131050; CTA
EGLETVDNTL

SEQ ID NO: 9802 - protein, 10 aa, Homo sapiens
  misc_feature: Table A; Target 9802; HLA-B*38:01; BPIFA2; ENSG00000131050; CTA
EGLETVDNTL

SEQ ID NO: 9803 - protein, 10 aa, Homo sapiens
  misc_feature: Table A; Target 9803; HLA-C*07:06; BPIFA2; ENSG00000131050; CTA
EGLETVDNTL

SEQ ID NO: 9804 - protein, 11 aa, Homo sapiens
  misc_feature: Table A; Target 9804; HLA-A*03:02; BPIFA2; ENSG00000131050; CTA
EGLETVDNTLK

SEQ ID NO: 9805 - protein, 11 aa, Homo sapiens
  misc_feature: Table A; Target 9805; HLA-A*11:01; BPIFA2; ENSG00000131050; CTA
EGLETVDNTLK

SEQ ID NO: 9806 - protein, 11 aa, Homo sapiens
  misc_feature: Table A; Target 9806; HLA-A*33:01; BPIFA2; ENSG00000131050; CTA
EGLETVDNTLK

SEQ ID NO: 9807 - protein, 11 aa, Homo sapiens
  misc_feature: Table A; Target 9807; HLA-A*33:03; BPIFA2; ENSG00000131050; CTA
EGLETVDNTLK

SEQ ID NO: 9808 - protein, 11 aa, Homo sapiens
  misc_feature: Table A; Target 9808; HLA-A*68:01; BPIFA2; ENSG00000131050; CTA
EGLETVDNTLK

SEQ ID NO: 9809 - protein, 11 aa, Homo sapiens
  misc_feature: Table A; Target 9809; HLA-B*27:02; BPIFA2; ENSG00000131050; CTA
EGLETVDNTLK

SEQ ID NO: 9810 - protein, 11 aa, Homo sapiens
  misc_feature: Table A; Target 9810; HLA-B*27:05; BPIFA2; ENSG00000131050; CTA
EGLETVDNTLK

SEQ ID NO: 9811 - protein, 11 aa, Homo sapiens
  misc_feature: Table A; Target 9811; HLA-C*04:01; BPIFA2; ENSG00000131050; CTA
EGLETVDNTLK

SEQ ID NO: 9812 - protein, 11 aa, Homo sapiens
  misc_feature: Table A; Target 9812; HLA-C*07:01; BPIFA2; ENSG00000131050; CTA
EGLETVDNTLK

SEQ ID NO: 9813 - protein, 11 aa, Homo sapiens
  misc_feature: Table A; Target 9813; HLA-C*07:06; BPIFA2; ENSG00000131050; CTA
EGLETVDNTLK

SEQ ID NO: 9814 - protein, 10 aa, Homo sapiens
  misc_feature: Table A; Target 9814; HLA-A*68:02; BPIFA2; ENSG00000131050; CTA
EICPLIRIFI

SEQ ID NO: 9815 - protein, 9 aa, Homo sapiens
  misc_feature: Table A; Target 9815; HLA-A*25:01; BPIFA2; ENSG00000131050; CTA
EPIDDGKGL

SEQ ID NO: 9816 - protein, 9 aa, Homo sapiens
  misc_feature: Table A; Target 9816; HLA-A*26:01; BPIFA2; ENSG00000131050; CTA
EPIDDGKGL

SEQ ID NO: 9817 - protein, 9 aa, Homo sapiens
  misc_feature: Table A; Target 9817; HLA-A*33:03; BPIFA2; ENSG00000131050; CTA
EPIDDGKGL

SEQ ID NO: 9818 - protein, 9 aa, Homo sapiens
  misc_feature: Table A; Target 9818; HLA-A*68:01; BPIFA2; ENSG00000131050; CTA
EPIDDGKGL

SEQ ID NO: 9819 - protein, 9 aa, Homo sapiens
  misc_feature: Table A; Target 9819; HLA-B*07:02; BPIFA2; ENSG00000131050; CTA
EPIDDGKGL

SEQ ID NO: 9820 - protein, 9 aa, Homo sapiens
  misc_feature: Table A; Target 9820; HLA-B*08:01; BPIFA2; ENSG00000131050; CTA
EPIDDGKGL

SEQ ID NO: 9821 - protein, 9 aa, Homo sapiens
  misc_feature: Table A; Target 9821; HLA-B*18:01; BPIFA2; ENSG00000131050; CTA
EPIDDGKGL

SEQ ID NO: 9822 - protein, 9 aa, Homo sapiens
  misc_feature: Table A; Target 9822; HLA-B*35:01; BPIFA2; ENSG00000131050; CTA
EPIDDGKGL

SEQ ID NO: 9823 - protein, 9 aa, Homo sapiens
  misc_feature: Table A; Target 9823; HLA-B*35:03; BPIFA2; ENSG00000131050; CTA
EPIDDGKGL

SEQ ID NO: 9824 - protein, 9 aa, Homo sapiens
  misc_feature: Table A; Target 9824; HLA-B*38:01; BPIFA2; ENSG00000131050; CTA
EPIDDGKGL

SEQ ID NO: 9825 - protein, 9 aa, Homo sapiens
  misc_feature: Table A; Target 9825; HLA-B*39:01; BPIFA2; ENSG00000131050; CTA
EPIDDGKGL

SEQ ID NO: 9826 - protein, 9 aa, Homo sapiens
  misc_feature: Table A; Target 9826; HLA-B*44:02; BPIFA2; ENSG00000131050; CTA
EPIDDGKGL

SEQ ID NO: 9827 - protein, 9 aa, Homo sapiens
  misc_feature: Table A; Target 9827; HLA-B*44:03; BPIFA2; ENSG00000131050; CTA
EPIDDGKGL

SEQ ID NO: 9828 - protein, 9 aa, Homo sapiens
  misc_feature: Table A; Target 9828; HLA-B*55:01; BPIFA2; ENSG00000131050; CTA
EPIDDGKGL

SEQ ID NO: 9829 - protein, 9 aa, Homo sapiens
  misc_feature: Table A; Target 9829; HLA-C*01:02; BPIFA2; ENSG00000131050; CTA
EPIDDGKGL

SEQ ID NO: 9830 - protein, 9 aa, Homo sapiens
  misc_feature: Table A; Target 9830; HLA-C*03:03; BPIFA2; ENSG00000131050; CTA
EPIDDGKGL

SEQ ID NO: 9831 - protein, 9 aa, Homo sapiens
  misc_feature: Table A; Target 9831; HLA-C*07:02; BPIFA2; ENSG00000131050; CTA
EPIDDGKGL

SEQ ID NO: 9832 - protein, 9 aa, Homo sapiens
  misc_feature: Table A; Target 9832; HLA-C*07:06; BPIFA2; ENSG00000131050; CTA
EPIDDGKGL

SEQ ID NO: 9833 - protein, 11 aa, Homo sapiens
  misc_feature: Table A; Target 9833; HLA-A*23:01; BPIFA2; ENSG00000131050; CTA
EPIDDGKGLNL

SEQ ID NO: 9834 - protein, 11 aa, Homo sapiens
  misc_feature: Table A; Target 9834; HLA-A*24:02; BPIFA2; ENSG00000131050; CTA
EPIDDGKGLNL

SEQ ID NO: 9835 - protein, 11 aa, Homo sapiens
  misc_feature: Table A; Target 9835; HLA-A*25:01; BPIFA2; ENSG00000131050; CTA
EPIDDGKGLNL

SEQ ID NO: 9836 - protein, 11 aa, Homo sapiens
  misc_feature: Table A; Target 9836; HLA-A*26:01; BPIFA2; ENSG00000131050; CTA
EPIDDGKGLNL

SEQ ID NO: 9837 - protein, 11 aa, Homo sapiens
  misc_feature: Table A; Target 9837; HLA-A*33:03; BPIFA2; ENSG00000131050; CTA
EPIDDGKGLNL

SEQ ID NO: 9838 - protein, 11 aa, Homo sapiens
  misc_feature: Table A; Target 9838; HLA-A*68:01; BPIFA2; ENSG00000131050; CTA
EPIDDGKGLNL

SEQ ID NO: 9839 - protein, 11 aa, Homo sapiens
  misc_feature: Table A; Target 9839; HLA-A*68:02; BPIFA2; ENSG00000131050; CTA
EPIDDGKGLNL

SEQ ID NO: 9840 - protein, 11 aa, Homo sapiens
  misc_feature: Table A; Target 9840; HLA-B*07:02; BPIFA2; ENSG00000131050; CTA
EPIDDGKGLNL

SEQ ID NO: 9841 - protein, 11 aa, Homo sapiens
  misc_feature: Table A; Target 9841; HLA-B*27:05; BPIFA2; ENSG00000131050; CTA
EPIDDGKGLNL

SEQ ID NO: 9842 - protein, 11 aa, Homo sapiens
  misc_feature: Table A; Target 9842; HLA-B*35:01; BPIFA2; ENSG00000131050; CTA
EPIDDGKGLNL

SEQ ID NO: 9843 - protein, 11 aa, Homo sapiens
  misc_feature: Table A; Target 9843; HLA-B*35:03; BPIFA2; ENSG00000131050; CTA
EPIDDGKGLNL

SEQ ID NO: 9844 - protein, 11 aa, Homo sapiens
  misc_feature: Table A; Target 9844; HLA-B*38:01; BPIFA2; ENSG00000131050; CTA
EPIDDGKGLNL

SEQ ID NO: 9845 - protein, 11 aa, Homo sapiens
  misc_feature: Table A; Target 9845; HLA-B*39:01; BPIFA2; ENSG00000131050; CTA
EPIDDGKGLNL

SEQ ID NO: 9846 - protein, 11 aa, Homo sapiens
  misc_feature: Table A; Target 9846; HLA-B*40:02; BPIFA2; ENSG00000131050; CTA
EPIDDGKGLNL

SEQ ID NO: 9847 - protein, 11 aa, Homo sapiens
  misc_feature: Table A; Target 9847; HLA-B*44:02; BPIFA2; ENSG00000131050; CTA
EPIDDGKGLNL

SEQ ID NO: 9848 - protein, 11 aa, Homo sapiens
  misc_feature: Table A; Target 9848; HLA-B*44:03; BPIFA2; ENSG00000131050; CTA
EPIDDGKGLNL

SEQ ID NO: 9849 - protein, 11 aa, Homo sapiens
  misc_feature: Table A; Target 9849; HLA-B*54:01; BPIFA2; ENSG00000131050; CTA
EPIDDGKGLNL

SEQ ID NO: 9850 - protein, 11 aa, Homo sapiens
  misc_feature: Table A; Target 9850; HLA-B*55:01; BPIFA2; ENSG00000131050; CTA
EPIDDGKGLNL

SEQ ID NO: 9851 - protein, 11 aa, Homo sapiens
  misc_feature: Table A; Target 9851; HLA-C*04:01; BPIFA2; ENSG00000131050; CTA
EPIDDGKGLNL

SEQ ID NO: 9852 - protein, 11 aa, Homo sapiens
  misc_feature: Table A; Target 9852; HLA-C*07:02; BPIFA2; ENSG00000131050; CTA
EPIDDGKGLNL

SEQ ID NO: 9853 - protein, 11 aa, Homo sapiens
  misc_feature: Table A; Target 9853; HLA-C*07:06; BPIFA2; ENSG00000131050; CTA
EPIDDGKGLNL

SEQ ID NO: 9854 - protein, 11 aa, Homo sapiens
  misc_feature: Table A; Target 9854; HLA-C*12:03; BPIFA2; ENSG00000131050; CTA
EPIDDGKGLNL

SEQ ID NO: 9855 - protein, 8 aa, Homo sapiens
  misc_feature: Table A; Target 9855; HLA-B*07:02; BPIFA2; ENSG00000131050; CTA
EPVLHEGL

SEQ ID NO: 9856 - protein, 8 aa, Homo sapiens
  misc_feature: Table A; Target 9856; HLA-B*08:01; BPIFA2; ENSG00000131050; CTA
EPVLHEGL

SEQ ID NO: 9857 - protein, 8 aa, Homo sapiens
  misc_feature: Table A; Target 9857; HLA-B*35:01; BPIFA2; ENSG00000131050; CTA
EPVLHEGL

SEQ ID NO: 9858 - protein, 8 aa, Homo sapiens
  misc_feature: Table A; Target 9858; HLA-B*35:03; BPIFA2; ENSG00000131050; CTA
EPVLHEGL

SEQ ID NO: 9859 - protein, 8 aa, Homo sapiens
  misc_feature: Table A; Target 9859; HLA-C*07:01; BPIFA2; ENSG00000131050; CTA
EPVLHEGL

SEQ ID NO: 9860 - protein, 11 aa, Homo sapiens
  misc_feature: Table A; Target 9860; HLA-A*68:02; BPIFA2; ENSG00000131050; CTA
EPVLHEGLETV

SEQ ID NO: 9861 - protein, 11 aa, Homo sapiens
  misc_feature: Table A; Target 9861; HLA-B*54:01; BPIFA2; ENSG00000131050; CTA
EPVLHEGLETV

SEQ ID NO: 9862 - protein, 11 aa, Homo sapiens
  misc_feature: Table A; Target 9862; HLA-B*56:01; BPIFA2; ENSG00000131050; CTA
EPVLHEGLETV

SEQ ID NO: 9863 - protein, 9 aa, Homo sapiens
  misc_feature: Table A; Target 9863; HLA-A*01:01; BPIFA2; ENSG00000131050; CTA
ETDPQTHQP

SEQ ID NO: 9864 - protein, 10 aa, Homo sapiens
  misc_feature: Table A; Target 9864; HLA-A*01:01; BPIFA2; ENSG00000131050; CTA
ETDPQTHQPV

SEQ ID NO: 9865 - protein, 10 aa, Homo sapiens
  misc_feature: Table A; Target 9865; HLA-A*11:01; BPIFA2; ENSG00000131050; CTA
ETDPQTHQPV

SEQ ID NO: 9866 - protein, 10 aa, Homo sapiens
  misc_feature: Table A; Target 9866; HLA-A*25:01; BPIFA2; ENSG00000131050; CTA
ETDPQTHQPV

SEQ ID NO: 9867 - protein, 10 aa, Homo sapiens
  misc_feature: Table A; Target 9867; HLA-A*26:01; BPIFA2; ENSG00000131050; CTA
ETDPQTHQPV

SEQ ID NO: 9868 - protein, 10 aa, Homo sapiens
  misc_feature: Table A; Target 9868; HLA-A*33:01; BPIFA2; ENSG00000131050; CTA
ETDPQTHQPV

SEQ ID NO: 9869 - protein, 10 aa, Homo sapiens
  misc_feature: Table A; Target 9869; HLA-A*33:03; BPIFA2; ENSG00000131050; CTA
ETDPQTHQPV

SEQ ID NO: 9870 - protein, 10 aa, Homo sapiens
  misc_feature: Table A; Target 9870; HLA-A*68:01; BPIFA2; ENSG00000131050; CTA
ETDPQTHQPV

SEQ ID NO: 9871 - protein, 10 aa, Homo sapiens
  misc_feature: Table A; Target 9871; HLA-A*68:02; BPIFA2; ENSG00000131050; CTA
ETDPQTHQPV

SEQ ID NO: 9872 - protein, 10 aa, Homo sapiens
  misc_feature: Table A; Target 9872; HLA-B*27:05; BPIFA2; ENSG00000131050; CTA
ETDPQTHQPV

SEQ ID NO: 9873 - protein, 10 aa, Homo sapiens
  misc_feature: Table A; Target 9873; HLA-B*38:01; BPIFA2; ENSG00000131050; CTA
ETDPQTHQPV

SEQ ID NO: 9874 - protein, 10 aa, Homo sapiens
  misc_feature: Table A; Target 9874; HLA-B*39:01; BPIFA2; ENSG00000131050; CTA
ETDPQTHQPV

SEQ ID NO: 9875 - protein, 10 aa, Homo sapiens
  misc_feature: Table A; Target 9875; HLA-B*40:02; BPIFA2; ENSG00000131050; CTA
ETDPQTHQPV

SEQ ID NO: 9876 - protein, 10 aa, Homo sapiens
  misc_feature: Table A; Target 9876; HLA-C*04:01; BPIFA2; ENSG00000131050; CTA
ETDPQTHQPV

SEQ ID NO: 9877 - protein, 10 aa, Homo sapiens
  misc_feature: Table A; Target 9877; HLA-C*05:01; BPIFA2; ENSG00000131050; CTA
ETDPQTHQPV

SEQ ID NO: 9878 - protein, 10 aa, Homo sapiens
  misc_feature: Table A; Target 9878; HLA-C*06:02; BPIFA2; ENSG00000131050; CTA
ETDPQTHQPV

SEQ ID NO: 9879 - protein, 10 aa, Homo sapiens
  misc_feature: Table A; Target 9879; HLA-C*07:01; BPIFA2; ENSG00000131050; CTA
ETDPQTHQPV

SEQ ID NO: 9880 - protein, 10 aa, Homo sapiens
  misc_feature: Table A; Target 9880; HLA-C*07:02; BPIFA2; ENSG00000131050; CTA
ETDPQTHQPV

SEQ ID NO: 9881 - protein, 10 aa, Homo sapiens
  misc_feature: Table A; Target 9881; HLA-C*07:04; BPIFA2; ENSG00000131050; CTA
ETDPQTHQPV

SEQ ID NO: 9882 - protein, 10 aa, Homo sapiens
  misc_feature: Table A; Target 9882; HLA-C*07:06; BPIFA2; ENSG00000131050; CTA
ETDPQTHQPV

SEQ ID NO: 9883 - protein, 10 aa, Homo sapiens
  misc_feature: Table A; Target 9883; HLA-C*12:03; BPIFA2; ENSG00000131050; CTA
ETDPQTHQPV

SEQ ID NO: 9884 - protein, 10 aa, Homo sapiens
  misc_feature: Table A; Target 9884; HLA-C*16:02; BPIFA2; ENSG00000131050; CTA
ETDPQTHQPV

SEQ ID NO: 9885 - protein, 11 aa, Homo sapiens
  misc_feature: Table A; Target 9885; HLA-A*01:01; BPIFA2; ENSG00000131050; CTA
ETDPQTHQPVA

SEQ ID NO: 9886 - protein, 8 aa, Homo sapiens
  misc_feature: Table A; Target 9886; HLA-A*11:01; BPIFA2; ENSG00000131050; CTA
ETVDNTLK

SEQ ID NO: 9887 - protein, 8 aa, Homo sapiens
  misc_feature: Table A; Target 9887; HLA-A*33:01; BPIFA2; ENSG00000131050; CTA
ETVDNTLK

SEQ ID NO: 9888 - protein, 8 aa, Homo sapiens
  misc_feature: Table A; Target 9888; HLA-A*33:03; BPIFA2; ENSG00000131050; CTA
ETVDNTLK

SEQ ID NO: 9889 - protein, 8 aa, Homo sapiens
  misc_feature: Table A; Target 9889; HLA-A*68:01; BPIFA2; ENSG00000131050; CTA
ETVDNTLK

SEQ ID NO: 9890 - protein, 9 aa, Homo sapiens
  misc_feature: Table A; Target 9890; HLA-A*01:01; BPIFA2; ENSG00000131050; CTA
ETVDNTLKG

SEQ ID NO: 9891 - protein, 9 aa, Homo sapiens
  misc_feature: Table A; Target 9891; HLA-A*25:01; BPIFA2; ENSG00000131050; CTA
ETVDNTLKG

SEQ ID NO: 9892 - protein, 9 aa, Homo sapiens
  misc_feature: Table A; Target 9892; HLA-A*26:01; BPIFA2; ENSG00000131050; CTA
ETVDNTLKG

SEQ ID NO: 9893 - protein, 9 aa, Homo sapiens
  misc_feature: Table A; Target 9893; HLA-A*68:01; BPIFA2; ENSG00000131050; CTA
ETVDNTLKG

SEQ ID NO: 9894 - protein, 10 aa, Homo sapiens
  misc_feature: Table A; Target 9894; HLA-A*25:01; BPIFA2; ENSG00000131050; CTA
ETVDNTLKGI

SEQ ID NO: 9895 - protein, 10 aa, Homo sapiens
  misc_feature: Table A; Target 9895; HLA-A*26:01; BPIFA2; ENSG00000131050; CTA
ETVDNTLKGI

SEQ ID NO: 9896 - protein, 10 aa, Homo sapiens
  misc_feature: Table A; Target 9896; HLA-A*33:03; BPIFA2; ENSG00000131050; CTA
ETVDNTLKGI

SEQ ID NO: 9897 - protein, 10 aa, Homo sapiens
  misc_feature: Table A; Target 9897; HLA-A*68:01; BPIFA2; ENSG00000131050; CTA
ETVDNTLKGI

SEQ ID NO: 9898 - protein, 10 aa, Homo sapiens
  misc_feature: Table A; Target 9898; HLA-A*68:02; BPIFA2; ENSG00000131050; CTA
ETVDNTLKGI

SEQ ID NO: 9899 - protein, 11 aa, Homo sapiens
  misc_feature: Table A; Target 9899; HLA-A*25:01; BPIFA2; ENSG00000131050; CTA
ETVDNTLKGIL

SEQ ID NO: 9900 - protein, 11 aa, Homo sapiens
  misc_feature: Table A; Target 9900; HLA-A*26:01; BPIFA2; ENSG00000131050; CTA
ETVDNTLKGIL

SEQ ID NO: 9901 - protein, 11 aa, Homo sapiens
  misc_feature: Table A; Target 9901; HLA-A*68:01; BPIFA2; ENSG00000131050; CTA
ETVDNTLKGIL

SEQ ID NO: 9902 - protein, 11 aa, Homo sapiens
  misc_feature: Table A; Target 9902; HLA-A*68:02; BPIFA2; ENSG00000131050; CTA
ETVDNTLKGIL

SEQ ID NO: 9903 - protein, 11 aa, Homo sapiens
  misc_feature: Table A; Target 9903; HLA-B*40:02; BPIFA2; ENSG00000131050; CTA
ETVDNTLKGIL

SEQ ID NO: 9904 - protein, 11 aa, Homo sapiens
  misc_feature: Table A; Target 9904; HLA-C*06:02; BPIFA2; ENSG00000131050; CTA
ETVDNTLKGIL

SEQ ID NO: 9905 - protein, 11 aa, Homo sapiens
  misc_feature: Table A; Target 9905; HLA-C*07:01; BPIFA2; ENSG00000131050; CTA
ETVDNTLKGIL

SEQ ID NO: 9906 - protein, 11 aa, Homo sapiens
  misc_feature: Table A; Target 9906; HLA-C*12:03; BPIFA2; ENSG00000131050; CTA
ETVDNTLKGIL

SEQ ID NO: 9907 - protein, 9 aa, Homo sapiens
  misc_feature: Table A; Target 9907; HLA-A*02:01; BPIFA2; ENSG00000131050; CTA
FGLKISNSL

SEQ ID NO: 9908 - protein, 9 aa, Homo sapiens
  misc_feature: Table A; Target 9908; HLA-A*02:04; BPIFA2; ENSG00000131050; CTA
FGLKISNSL

SEQ ID NO: 9909 - protein, 9 aa, Homo sapiens
  misc_feature: Table A; Target 9909; HLA-A*23:01; BPIFA2; ENSG00000131050; CTA
FGLKISNSL

SEQ ID NO: 9910 - protein, 9 aa, Homo sapiens
  misc_feature: Table A; Target 9910; HLA-A*24:02; BPIFA2; ENSG00000131050; CTA
FGLKISNSL

SEQ ID NO: 9911 - protein, 9 aa, Homo sapiens
  misc_feature: Table A; Target 9911; HLA-A*30:01; BPIFA2; ENSG00000131050; CTA
FGLKISNSL

SEQ ID NO: 9912 - protein, 9 aa, Homo sapiens
  misc_feature: Table A; Target 9912; HLA-A*32:01; BPIFA2; ENSG00000131050; CTA
FGLKISNSL

SEQ ID NO: 9913 - protein, 9 aa, Homo sapiens
  misc_feature: Table A; Target 9913; HLA-B*07:02; BPIFA2; ENSG00000131050; CTA
FGLKISNSL

SEQ ID NO: 9914 - protein, 9 aa, Homo sapiens
  misc_feature: Table A; Target 9914; HLA-B*08:01; BPIFA2; ENSG00000131050; CTA
FGLKISNSL

SEQ ID NO: 9915 - protein, 9 aa, Homo sapiens
  misc_feature: Table A; Target 9915; HLA-B*15:03; BPIFA2; ENSG00000131050; CTA
FGLKISNSL

SEQ ID NO: 9916 - protein, 9 aa, Homo sapiens
  misc_feature: Table A; Target 9916; HLA-B*27:05; BPIFA2; ENSG00000131050; CTA
FGLKISNSL

SEQ ID NO: 9917 - protein, 9 aa, Homo sapiens
  misc_feature: Table A; Target 9917; HLA-B*35:03; BPIFA2; ENSG00000131050; CTA
FGLKISNSL

SEQ ID NO: 9918 - protein, 9 aa, Homo sapiens
  misc_feature: Table A; Target 9918; HLA-B*38:01; BPIFA2; ENSG00000131050; CTA
FGLKISNSL

SEQ ID NO: 9919 - protein, 9 aa, Homo sapiens
  misc_feature: Table A; Target 9919; HLA-B*39:01; BPIFA2; ENSG00000131050; CTA
FGLKISNSL

SEQ ID NO: 9920 - protein, 9 aa, Homo sapiens
  misc_feature: Table A; Target 9920; HLA-B*40:01; BPIFA2; ENSG00000131050; CTA
FGLKISNSL

SEQ ID NO: 9921 - protein, 9 aa, Homo sapiens
  misc_feature: Table A; Target 9921; HLA-B*40:02; BPIFA2; ENSG00000131050; CTA
FGLKISNSL

SEQ ID NO: 9922 - protein, 9 aa, Homo sapiens
  misc_feature: Table A; Target 9922; HLA-B*46:01; BPIFA2; ENSG00000131050; CTA
FGLKISNSL

SEQ ID NO: 9923 - protein, 9 aa, Homo sapiens
  misc_feature: Table A; Target 9923; HLA-B*58:01; BPIFA2; ENSG00000131050; CTA
FGLKISNSL

SEQ ID NO: 9924 - protein, 9 aa, Homo sapiens
  misc_feature: Table A; Target 9924; HLA-C*01:02; BPIFA2; ENSG00000131050; CTA
FGLKISNSL

SEQ ID NO: 9925 - protein, 9 aa, Homo sapiens
  misc_feature: Table A; Target 9925; HLA-C*02:02; BPIFA2; ENSG00000131050; CTA
FGLKISNSL

SEQ ID NO: 9926 - protein, 9 aa, Homo sapiens
  misc_feature: Table A; Target 9926; HLA-C*03:03; BPIFA2; ENSG00000131050; CTA
FGLKISNSL

SEQ ID NO: 9927 - protein, 9 aa, Homo sapiens
  misc_feature: Table A; Target 9927; HLA-C*03:04; BPIFA2; ENSG00000131050; CTA
FGLKISNSL

SEQ ID NO: 9928 - protein, 9 aa, Homo sapiens
  misc_feature: Table A; Target 9928; HLA-C*06:02; BPIFA2; ENSG00000131050; CTA
FGLKISNSL

SEQ ID NO: 9929 - protein, 9 aa, Homo sapiens
  misc_feature: Table A; Target 9929; HLA-C*07:02; BPIFA2; ENSG00000131050; CTA
FGLKISNSL

SEQ ID NO: 9930 - protein, 9 aa, Homo sapiens
  misc_feature: Table A; Target 9930; HLA-C*12:03; BPIFA2; ENSG00000131050; CTA
FGLKISNSL

SEQ ID NO: 9931 - protein, 9 aa, Homo sapiens
  misc_feature: Table A; Target 9931; HLA-C*14:02; BPIFA2; ENSG00000131050; CTA
FGLKISNSL

SEQ ID NO: 9932 - protein, 9 aa, Homo sapiens
  misc_feature: Table A; Target 9932; HLA-C*16:01; BPIFA2; ENSG00000131050; CTA
FGLKISNSL

SEQ ID NO: 9933 - protein, 9 aa, Homo sapiens
  misc_feature: Table A; Target 9933; HLA-C*16:04; BPIFA2; ENSG00000131050; CTA
FGLKISNSL

SEQ ID NO: 9934 - protein, 9 aa, Homo sapiens
  misc_feature: Table A; Target 9934; HLA-A*02:01; BPIFA2; ENSG00000131050; CTA
FIHSLDVNV

SEQ ID NO: 9935 - protein, 9 aa, Homo sapiens
  misc_feature: Table A; Target 9935; HLA-A*02:03; BPIFA2; ENSG00000131050; CTA
FIHSLDVNV

SEQ ID NO: 9936 - protein, 9 aa, Homo sapiens
  misc_feature: Table A; Target 9936; HLA-A*02:04; BPIFA2; ENSG00000131050; CTA
FIHSLDVNV

SEQ ID NO: 9937 - protein, 9 aa, Homo sapiens
  misc_feature: Table A; Target 9937; HLA-A*02:07; BPIFA2; ENSG00000131050; CTA
FIHSLDVNV

SEQ ID NO: 9938 - protein, 9 aa, Homo sapiens
  misc_feature: Table A; Target 9938; HLA-A*68:02; BPIFA2; ENSG00000131050; CTA
FIHSLDVNV

SEQ ID NO: 9939 - protein, 9 aa, Homo sapiens
  misc_feature: Table A; Target 9939; HLA-B*13:02; BPIFA2; ENSG00000131050; CTA
FIHSLDVNV

SEQ ID NO: 9940 - protein, 10 aa, Homo sapiens
  misc_feature: Table A; Target 9940; HLA-A*02:03; BPIFA2; ENSG00000131050; CTA
FIHSLDVNVI

SEQ ID NO: 9941 - protein, 10 aa, Homo sapiens
  misc_feature: Table A; Target 9941; HLA-A*68:02; BPIFA2; ENSG00000131050; CTA
FIHSLDVNVI

SEQ ID NO: 9942 - protein, 8 aa, Homo sapiens
  misc_feature: Table A; Target 9942; HLA-B*07:02; BPIFA2; ENSG00000131050; CTA
FPVTANVT

SEQ ID NO: 9943 - protein, 8 aa, Homo sapiens
  misc_feature: Table A; Target 9943; HLA-B*08:01; BPIFA2; ENSG00000131050; CTA
FPVTANVT

SEQ ID NO: 9944 - protein, 8 aa, Homo sapiens
  misc_feature: Table A; Target 9944; HLA-B*35:01; BPIFA2; ENSG00000131050; CTA
FPVTANVT

SEQ ID NO: 9945 - protein, 8 aa, Homo sapiens
  misc_feature: Table A; Target 9945; HLA-B*35:03; BPIFA2; ENSG00000131050; CTA
FPVTANVT

SEQ ID NO: 9946 - protein, 8 aa, Homo sapiens
  misc_feature: Table A; Target 9946; HLA-B*51:01; BPIFA2; ENSG00000131050; CTA
FPVTANVT

SEQ ID NO: 9947 - protein, 8 aa, Homo sapiens
  misc_feature: Table A; Target 9947; HLA-B*54:01; BPIFA2; ENSG00000131050; CTA
FPVTANVT

SEQ ID NO: 9948 - protein, 8 aa, Homo sapiens
  misc_feature: Table A; Target 9948; HLA-B*55:01; BPIFA2; ENSG00000131050; CTA
FPVTANVT

SEQ ID NO: 9949 - protein, 8 aa, Homo sapiens
  misc_feature: Table A; Target 9949; HLA-B*56:01; BPIFA2; ENSG00000131050; CTA
FPVTANVT

SEQ ID NO: 9950 - protein, 8 aa, Homo sapiens
  misc_feature: Table A; Target 9950; HLA-C*03:03; BPIFA2; ENSG00000131050; CTA
FPVTANVT

SEQ ID NO: 9951 - protein, 8 aa, Homo sapiens
  misc_feature: Table A; Target 9951; HLA-C*04:01; BPIFA2; ENSG00000131050; CTA
FPVTANVT

SEQ ID NO: 9952 - protein, 8 aa, Homo sapiens
  misc_feature: Table A; Target 9952; HLA-C*07:01; BPIFA2; ENSG00000131050; CTA
FPVTANVT

SEQ ID NO: 9953 - protein, 8 aa, Homo sapiens
  misc_feature: Table A; Target 9953; HLA-C*07:02; BPIFA2; ENSG00000131050; CTA
FPVTANVT

SEQ ID NO: 9954 - protein, 8 aa, Homo sapiens
  misc_feature: Table A; Target 9954; HLA-C*07:04; BPIFA2; ENSG00000131050; CTA
FPVTANVT

SEQ ID NO: 9955 - protein, 8 aa, Homo sapiens
  misc_feature: Table A; Target 9955; HLA-C*12:03; BPIFA2; ENSG00000131050; CTA
FPVTANVT

SEQ ID NO: 9956 - protein, 8 aa, Homo sapiens
  misc_feature: Table A; Target 9956; HLA-C*14:02; BPIFA2; ENSG00000131050; CTA
FPVTANVT

SEQ ID NO: 9957 - protein, 8 aa, Homo sapiens
  misc_feature: Table A; Target 9957; HLA-C*16:01; BPIFA2; ENSG00000131050; CTA
FPVTANVT

SEQ ID NO: 9958 - protein, 8 aa, Homo sapiens
  misc_feature: Table A; Target 9958; HLA-C*16:02; BPIFA2; ENSG00000131050; CTA
FPVTANVT

SEQ ID NO: 9959 - protein, 9 aa, Homo sapiens
  misc_feature: Table A; Target 9959; HLA-A*02:01; BPIFA2; ENSG00000131050; CTA
FPVTANVTV

SEQ ID NO: 9960 - protein, 9 aa, Homo sapiens
  misc_feature: Table A; Target 9960; HLA-A*02:03; BPIFA2; ENSG00000131050; CTA
FPVTANVTV

SEQ ID NO: 9961 - protein, 9 aa, Homo sapiens
  misc_feature: Table A; Target 9961; HLA-A*02:07; BPIFA2; ENSG00000131050; CTA
FPVTANVTV

SEQ ID NO: 9962 - protein, 9 aa, Homo sapiens
  misc_feature: Table A; Target 9962; HLA-A*23:01; BPIFA2; ENSG00000131050; CTA
FPVTANVTV

SEQ ID NO: 9963 - protein, 9 aa, Homo sapiens
  misc_feature: Table A; Target 9963; HLA-A*26:01; BPIFA2; ENSG00000131050; CTA
FPVTANVTV

SEQ ID NO: 9964 - protein, 9 aa, Homo sapiens
  misc_feature: Table A; Target 9964; HLA-A*30:01; BPIFA2; ENSG00000131050; CTA
FPVTANVTV

SEQ ID NO: 9965 - protein, 9 aa, Homo sapiens
  misc_feature: Table A; Target 9965; HLA-A*33:03; BPIFA2; ENSG00000131050; CTA
FPVTANVTV

SEQ ID NO: 9966 - protein, 9 aa, Homo sapiens
  misc_feature: Table A; Target 9966; HLA-A*68:01; BPIFA2; ENSG00000131050; CTA
FPVTANVTV

SEQ ID NO: 9967 - protein, 9 aa, Homo sapiens
  misc_feature: Table A; Target 9967; HLA-A*68:02; BPIFA2; ENSG00000131050; CTA
FPVTANVTV

SEQ ID NO: 9968 - protein, 9 aa, Homo sapiens
  misc_feature: Table A; Target 9968; HLA-B*07:02; BPIFA2; ENSG00000131050; CTA
FPVTANVTV

SEQ ID NO: 9969 - protein, 9 aa, Homo sapiens
  misc_feature: Table A; Target 9969; HLA-B*08:01; BPIFA2; ENSG00000131050; CTA
FPVTANVTV

SEQ ID NO: 9970 - protein, 9 aa, Homo sapiens
  misc_feature: Table A; Target 9970; HLA-B*13:02; BPIFA2; ENSG00000131050; CTA
FPVTANVTV

SEQ ID NO: 9971 - protein, 9 aa, Homo sapiens
  misc_feature: Table A; Target 9971; HLA-B*18:01; BPIFA2; ENSG00000131050; CTA
FPVTANVTV

SEQ ID NO: 9972 - protein, 9 aa, Homo sapiens
  misc_feature: Table A; Target 9972; HLA-B*27:02; BPIFA2; ENSG00000131050; CTA
FPVTANVTV

SEQ ID NO: 9973 - protein, 9 aa, Homo sapiens
  misc_feature: Table A; Target 9973; HLA-B*27:05; BPIFA2; ENSG00000131050; CTA
FPVTANVTV

SEQ ID NO: 9974 - protein, 9 aa, Homo sapiens
  misc_feature: Table A; Target 9974; HLA-B*35:01; BPIFA2; ENSG00000131050; CTA
FPVTANVTV

SEQ ID NO: 9975 - protein, 9 aa, Homo sapiens
  misc_feature: Table A; Target 9975; HLA-B*35:03; BPIFA2; ENSG00000131050; CTA
FPVTANVTV

SEQ ID NO: 9976 - protein, 9 aa, Homo sapiens
  misc_feature: Table A; Target 9976; HLA-B*38:01; BPIFA2; ENSG00000131050; CTA
FPVTANVTV

SEQ ID NO: 9977 - protein, 9 aa, Homo sapiens
  misc_feature: Table A; Target 9977; HLA-B*39:01; BPIFA2; ENSG00000131050; CTA
FPVTANVTV

SEQ ID NO: 9978 - protein, 9 aa, Homo sapiens
  misc_feature: Table A; Target 9978; HLA-B*40:02; BPIFA2; ENSG00000131050; CTA
FPVTANVTV

SEQ ID NO: 9979 - protein, 9 aa, Homo sapiens
  misc_feature: Table A; Target 9979; HLA-B*46:01; BPIFA2; ENSG00000131050; CTA
FPVTANVTV

SEQ ID NO: 9980 - protein, 9 aa, Homo sapiens
  misc_feature: Table A; Target 9980; HLA-B*49:01; BPIFA2; ENSG00000131050; CTA
FPVTANVTV

SEQ ID NO: 9981 - protein, 9 aa, Homo sapiens
  misc_feature: Table A; Target 9981; HLA-B*51:01; BPIFA2; ENSG00000131050; CTA
FPVTANVTV

SEQ ID NO: 9982 - protein, 9 aa, Homo sapiens
  misc_feature: Table A; Target 9982; HLA-B*54:01; BPIFA2; ENSG00000131050; CTA
FPVTANVTV

SEQ ID NO: 9983 - protein, 9 aa, Homo sapiens
  misc_feature: Table A; Target 9983; HLA-B*55:01; BPIFA2; ENSG00000131050; CTA
FPVTANVTV

SEQ ID NO: 9984 - protein, 9 aa, Homo sapiens
  misc_feature: Table A; Target 9984; HLA-B*56:01; BPIFA2; ENSG00000131050; CTA
FPVTANVTV

SEQ ID NO: 9985 - protein, 9 aa, Homo sapiens
  misc_feature: Table A; Target 9985; HLA-B*58:01; BPIFA2; ENSG00000131050; CTA
FPVTANVTV

SEQ ID NO: 9986 - protein, 9 aa, Homo sapiens
  misc_feature: Table A; Target 9986; HLA-C*01:02; BPIFA2; ENSG00000131050; CTA
FPVTANVTV

SEQ ID NO: 9987 - protein, 9 aa, Homo sapiens
  misc_feature: Table A; Target 9987; HLA-C*02:02; BPIFA2; ENSG00000131050; CTA
FPVTANVTV

SEQ ID NO: 9988 - protein, 9 aa, Homo sapiens
  misc_feature: Table A; Target 9988; HLA-C*03:03; BPIFA2; ENSG00000131050; CTA
FPVTANVTV

SEQ ID NO: 9989 - protein, 9 aa, Homo sapiens
  misc_feature: Table A; Target 9989; HLA-C*03:04; BPIFA2; ENSG00000131050; CTA
FPVTANVTV

SEQ ID NO: 9990 - protein, 9 aa, Homo sapiens
  misc_feature: Table A; Target 9990; HLA-C*04:01; BPIFA2; ENSG00000131050; CTA
FPVTANVTV

SEQ ID NO: 9991 - protein, 9 aa, Homo sapiens
  misc_feature: Table A; Target 9991; HLA-C*05:01; BPIFA2; ENSG00000131050; CTA
FPVTANVTV

SEQ ID NO: 9992 - protein, 9 aa, Homo sapiens
  misc_feature: Table A; Target 9992; HLA-C*06:02; BPIFA2; ENSG00000131050; CTA
FPVTANVTV

SEQ ID NO: 9993 - protein, 9 aa, Homo sapiens
  misc_feature: Table A; Target 9993; HLA-C*07:01; BPIFA2; ENSG00000131050; CTA
FPVTANVTV

SEQ ID NO: 9994 - protein, 9 aa, Homo sapiens
  misc_feature: Table A; Target 9994; HLA-C*07:02; BPIFA2; ENSG00000131050; CTA
FPVTANVTV

SEQ ID NO: 9995 - protein, 9 aa, Homo sapiens
  misc_feature: Table A; Target 9995; HLA-C*07:04; BPIFA2; ENSG00000131050; CTA
FPVTANVTV

SEQ ID NO: 9996 - protein, 9 aa, Homo sapiens
  misc_feature: Table A; Target 9996; HLA-C*07:06; BPIFA2; ENSG00000131050; CTA
FPVTANVTV

SEQ ID NO: 9997 - protein, 9 aa, Homo sapiens
  misc_feature: Table A; Target 9997; HLA-C*12:03; BPIFA2; ENSG00000131050; CTA
FPVTANVTV

SEQ ID NO: 9998 - protein, 9 aa, Homo sapiens
  misc_feature: Table A; Target 9998; HLA-C*14:02; BPIFA2; ENSG00000131050; CTA
FPVTANVTV

SEQ ID NO: 9999 - protein, 9 aa, Homo sapiens
  misc_feature: Table A; Target 9999; HLA-C*16:01; BPIFA2; ENSG00000131050; CTA
FPVTANVTV

SEQ ID NO: 10000 - protein, 9 aa, Homo sapiens
  misc_feature: Table A; Target 10000; HLA-C*16:02; BPIFA2; ENSG00000131050; CTA
FPVTANVTV

SEQ ID NO: 10001 - protein, 9 aa, Homo sapiens
  misc_feature: Table A; Target 10001; HLA-C*16:04; BPIFA2; ENSG00000131050; CTA
FPVTANVTV

SEQ ID NO: 10002 - protein, 10 aa, Homo sapiens
  misc_feature: Table A; Target 10002; HLA-B*35:01; BPIFA2; ENSG00000131050; CTA
FPVTANVTVA

SEQ ID NO: 10003 - protein, 10 aa, Homo sapiens
  misc_feature: Table A; Target 10003; HLA-B*35:03; BPIFA2; ENSG00000131050; CTA
FPVTANVTVA

SEQ ID NO: 10004 - protein, 10 aa, Homo sapiens
  misc_feature: Table A; Target 10004; HLA-B*51:01; BPIFA2; ENSG00000131050; CTA
FPVTANVTVA

SEQ ID NO: 10005 - protein, 10 aa, Homo sapiens
  misc_feature: Table A; Target 10005; HLA-B*54:01; BPIFA2; ENSG00000131050; CTA
FPVTANVTVA

SEQ ID NO: 10006 - protein, 10 aa, Homo sapiens
  misc_feature: Table A; Target 10006; HLA-B*55:01; BPIFA2; ENSG00000131050; CTA
FPVTANVTVA

SEQ ID NO: 10007 - protein, 10 aa, Homo sapiens
  misc_feature: Table A; Target 10007; HLA-B*56:01; BPIFA2; ENSG00000131050; CTA
FPVTANVTVA

SEQ ID NO: 10008 - protein, 10 aa, Homo sapiens
  misc_feature: Table A; Target 10008; HLA-C*12:03; BPIFA2; ENSG00000131050; CTA
FPVTANVTVA

SEQ ID NO: 10009 - protein, 11 aa, Homo sapiens
  misc_feature: Table A; Target 10009; HLA-A*68:02; BPIFA2; ENSG00000131050; CTA
FPVTANVTVAG

SEQ ID NO: 10010 - protein, 11 aa, Homo sapiens
  misc_feature: Table A; Target 10010; HLA-B*27:02; BPIFA2; ENSG00000131050; CTA
FPVTANVTVAG

SEQ ID NO: 10011 - protein, 11 aa, Homo sapiens
  misc_feature: Table A; Target 10011; HLA-B*35:01; BPIFA2; ENSG00000131050; CTA
FPVTANVTVAG

SEQ ID NO: 10012 - protein, 11 aa, Homo sapiens
  misc_feature: Table A; Target 10012; HLA-B*35:03; BPIFA2; ENSG00000131050; CTA
FPVTANVTVAG

SEQ ID NO: 10013 - protein, 11 aa, Homo sapiens
  misc_feature: Table A; Target 10013; HLA-B*54:01; BPIFA2; ENSG00000131050; CTA
FPVTANVTVAG

SEQ ID NO: 10014 - protein, 11 aa, Homo sapiens
  misc_feature: Table A; Target 10014; HLA-B*55:01; BPIFA2; ENSG00000131050; CTA
FPVTANVTVAG

SEQ ID NO: 10015 - protein, 11 aa, Homo sapiens
  misc_feature: Table A; Target 10015; HLA-B*56:01; BPIFA2; ENSG00000131050; CTA
FPVTANVTVAG

SEQ ID NO: 10016 - protein, 11 aa, Homo sapiens
  misc_feature: Table A; Target 10016; HLA-C*07:02; BPIFA2; ENSG00000131050; CTA
FPVTANVTVAG

SEQ ID NO: 10017 - protein, 8 aa, Homo sapiens
  misc_feature: Table A; Target 10017; HLA-C*07:04; BPIFA2; ENSG00000131050; CTA
FVNSVINT

SEQ ID NO: 10018 - protein, 9 aa, Homo sapiens
  misc_feature: Table A; Target 10018; HLA-A*01:01; BPIFA2; ENSG00000131050; CTA
FVNSVINTL

SEQ ID NO: 10019 - protein, 9 aa, Homo sapiens
  misc_feature: Table A; Target 10019; HLA-A*02:01; BPIFA2; ENSG00000131050; CTA
FVNSVINTL

SEQ ID NO: 10020 - protein, 9 aa, Homo sapiens
  misc_feature: Table A; Target 10020; HLA-A*02:03; BPIFA2; ENSG00000131050; CTA
FVNSVINTL

SEQ ID NO: 10021 - protein, 9 aa, Homo sapiens
  misc_feature: Table A; Target 10021; HLA-A*02:04; BPIFA2; ENSG00000131050; CTA
FVNSVINTL

SEQ ID NO: 10022 - protein, 9 aa, Homo sapiens
  misc_feature: Table A; Target 10022; HLA-A*02:07; BPIFA2; ENSG00000131050; CTA
FVNSVINTL

SEQ ID NO: 10023 - protein, 9 aa, Homo sapiens
  misc_feature: Table A; Target 10023; HLA-A*03:01; BPIFA2; ENSG00000131050; CTA
FVNSVINTL

SEQ ID NO: 10024 - protein, 9 aa, Homo sapiens
  misc_feature: Table A; Target 10024; HLA-A*03:02; BPIFA2; ENSG00000131050; CTA
FVNSVINTL

SEQ ID NO: 10025 - protein, 9 aa, Homo sapiens
  misc_feature: Table A; Target 10025; HLA-A*11:01; BPIFA2; ENSG00000131050; CTA
FVNSVINTL

SEQ ID NO: 10026 - protein, 9 aa, Homo sapiens
  misc_feature: Table A; Target 10026; HLA-A*23:01; BPIFA2; ENSG00000131050; CTA
FVNSVINTL

SEQ ID NO: 10027 - protein, 9 aa, Homo sapiens
  misc_feature: Table A; Target 10027; HLA-A*24:02; BPIFA2; ENSG00000131050; CTA
FVNSVINTL

SEQ ID NO: 10028 - protein, 9 aa, Homo sapiens
  misc_feature: Table A; Target 10028; HLA-A*25:01; BPIFA2; ENSG00000131050; CTA
FVNSVINTL

SEQ ID NO: 10029 - protein, 9 aa, Homo sapiens
  misc_feature: Table A; Target 10029; HLA-A*26:01; BPIFA2; ENSG00000131050; CTA
FVNSVINTL

SEQ ID NO: 10030 - protein, 9 aa, Homo sapiens
  misc_feature: Table A; Target 10030; HLA-A*29:02; BPIFA2; ENSG00000131050; CTA
FVNSVINTL

SEQ ID NO: 10031 - protein, 9 aa, Homo sapiens
  misc_feature: Table A; Target 10031; HLA-A*30:01; BPIFA2; ENSG00000131050; CTA
FVNSVINTL

SEQ ID NO: 10032 - protein, 9 aa, Homo sapiens
  misc_feature: Table A; Target 10032; HLA-A*30:02; BPIFA2; ENSG00000131050; CTA
FVNSVINTL

SEQ ID NO: 10033 - protein, 9 aa, Homo sapiens
  misc_feature: Table A; Target 10033; HLA-A*31:01; BPIFA2; ENSG00000131050; CTA
FVNSVINTL

SEQ ID NO: 10034 - protein, 9 aa, Homo sapiens
  misc_feature: Table A; Target 10034; HLA-A*32:01; BPIFA2; ENSG00000131050; CTA
FVNSVINTL

SEQ ID NO: 10035 - protein, 9 aa, Homo sapiens
  misc_feature: Table A; Target 10035; HLA-A*33:01; BPIFA2; ENSG00000131050; CTA
FVNSVINTL

SEQ ID NO: 10036 - protein, 9 aa, Homo sapiens
  misc_feature: Table A; Target 10036; HLA-A*33:03; BPIFA2; ENSG00000131050; CTA
FVNSVINTL

SEQ ID NO: 10037 - protein, 9 aa, Homo sapiens
  misc_feature: Table A; Target 10037; HLA-A*68:01; BPIFA2; ENSG00000131050; CTA
FVNSVINTL

SEQ ID NO: 10038 - protein, 9 aa, Homo sapiens
  misc_feature: Table A; Target 10038; HLA-A*68:02; BPIFA2; ENSG00000131050; CTA
FVNSVINTL

SEQ ID NO: 10039 - protein, 9 aa, Homo sapiens
  misc_feature: Table A; Target 10039; HLA-B*07:02; BPIFA2; ENSG00000131050; CTA
FVNSVINTL

SEQ ID NO: 10040 - protein, 9 aa, Homo sapiens
  misc_feature: Table A; Target 10040; HLA-B*08:01; BPIFA2; ENSG00000131050; CTA
FVNSVINTL

SEQ ID NO: 10041 - protein, 9 aa, Homo sapiens
  misc_feature: Table A; Target 10041; HLA-B*13:02; BPIFA2; ENSG00000131050; CTA
FVNSVINTL

SEQ ID NO: 10042 - protein, 9 aa, Homo sapiens
  misc_feature: Table A; Target 10042; HLA-B*15:01; BPIFA2; ENSG00000131050; CTA
FVNSVINTL

SEQ ID NO: 10043 - protein, 9 aa, Homo sapiens
  misc_feature: Table A; Target 10043; HLA-B*15:03; BPIFA2; ENSG00000131050; CTA
FVNSVINTL

SEQ ID NO: 10044 - protein, 9 aa, Homo sapiens
  misc_feature: Table A; Target 10044; HLA-B*18:01; BPIFA2; ENSG00000131050; CTA
FVNSVINTL

SEQ ID NO: 10045 - protein, 9 aa, Homo sapiens
  misc_feature: Table A; Target 10045; HLA-B*27:02; BPIFA2; ENSG00000131050; CTA
FVNSVINTL

SEQ ID NO: 10046 - protein, 9 aa, Homo sapiens
  misc_feature: Table A; Target 10046; HLA-B*27:05; BPIFA2; ENSG00000131050; CTA
FVNSVINTL

SEQ ID NO: 10047 - protein, 9 aa, Homo sapiens
  misc_feature: Table A; Target 10047; HLA-B*35:01; BPIFA2; ENSG00000131050; CTA
FVNSVINTL

SEQ ID NO: 10048 - protein, 9 aa, Homo sapiens
  misc_feature: Table A; Target 10048; HLA-B*35:03; BPIFA2; ENSG00000131050; CTA
FVNSVINTL

SEQ ID NO: 10049 - protein, 9 aa, Homo sapiens
  misc_feature: Table A; Target 10049; HLA-B*37:01; BPIFA2; ENSG00000131050; CTA
FVNSVINTL

SEQ ID NO: 10050 - protein, 9 aa, Homo sapiens
  misc_feature: Table A; Target 10050; HLA-B*38:01; BPIFA2; ENSG00000131050; CTA
FVNSVINTL

SEQ ID NO: 10051 - protein, 9 aa, Homo sapiens
  misc_feature: Table A; Target 10051; HLA-B*39:01; BPIFA2; ENSG00000131050; CTA
FVNSVINTL

SEQ ID NO: 10052 - protein, 9 aa, Homo sapiens
  misc_feature: Table A; Target 10052; HLA-B*40:01; BPIFA2; ENSG00000131050; CTA
FVNSVINTL

SEQ ID NO: 10053 - protein, 9 aa, Homo sapiens
  misc_feature: Table A; Target 10053; HLA-B*40:02; BPIFA2; ENSG00000131050; CTA
FVNSVINTL

SEQ ID NO: 10054 - protein, 9 aa, Homo sapiens
  misc_feature: Table A; Target 10054; HLA-B*44:02; BPIFA2; ENSG00000131050; CTA
FVNSVINTL

SEQ ID NO: 10055 - protein, 9 aa, Homo sapiens
  misc_feature: Table A; Target 10055; HLA-B*44:03; BPIFA2; ENSG00000131050; CTA
FVNSVINTL

SEQ ID NO: 10056 - protein, 9 aa, Homo sapiens
  misc_feature: Table A; Target 10056; HLA-B*46:01; BPIFA2; ENSG00000131050; CTA
FVNSVINTL

SEQ ID NO: 10057 - protein, 9 aa, Homo sapiens
  misc_feature: Table A; Target 10057; HLA-B*49:01; BPIFA2; ENSG00000131050; CTA
FVNSVINTL

SEQ ID NO: 10058 - protein, 9 aa, Homo sapiens
  misc_feature: Table A; Target 10058; HLA-B*51:01; BPIFA2; ENSG00000131050; CTA
FVNSVINTL

SEQ ID NO: 10059 - protein, 9 aa, Homo sapiens
  misc_feature: Table A; Target 10059; HLA-B*54:01; BPIFA2; ENSG00000131050; CTA
FVNSVINTL

SEQ ID NO: 10060 - protein, 9 aa, Homo sapiens
  misc_feature: Table A; Target 10060; HLA-B*55:01; BPIFA2; ENSG00000131050; CTA
FVNSVINTL

SEQ ID NO: 10061 - protein, 9 aa, Homo sapiens
  misc_feature: Table A; Target 10061; HLA-B*56:01; BPIFA2; ENSG00000131050; CTA
FVNSVINTL

SEQ ID NO: 10062 - protein, 9 aa, Homo sapiens
  misc_feature: Table A; Target 10062; HLA-B*57:01; BPIFA2; ENSG00000131050; CTA
FVNSVINTL

SEQ ID NO: 10063 - protein, 9 aa, Homo sapiens
  misc_feature: Table A; Target 10063; HLA-B*58:01; BPIFA2; ENSG00000131050; CTA
FVNSVINTL

SEQ ID NO: 10064 - protein, 9 aa, Homo sapiens
  misc_feature: Table A; Target 10064; HLA-C*01:02; BPIFA2; ENSG00000131050; CTA
FVNSVINTL

SEQ ID NO: 10065 - protein, 9 aa, Homo sapiens
  misc_feature: Table A; Target 10065; HLA-C*02:02; BPIFA2; ENSG00000131050; CTA
FVNSVINTL

SEQ ID NO: 10066 - protein, 9 aa, Homo sapiens
  misc_feature: Table A; Target 10066; HLA-C*03:03; BPIFA2; ENSG00000131050; CTA
FVNSVINTL

SEQ ID NO: 10067 - protein, 9 aa, Homo sapiens
  misc_feature: Table A; Target 10067; HLA-C*03:04; BPIFA2; ENSG00000131050; CTA
FVNSVINTL

SEQ ID NO: 10068 - protein, 9 aa, Homo sapiens
  misc_feature: Table A; Target 10068; HLA-C*04:01; BPIFA2; ENSG00000131050; CTA
FVNSVINTL

SEQ ID NO: 10069 - protein, 9 aa, Homo sapiens
  misc_feature: Table A; Target 10069; HLA-C*05:01; BPIFA2; ENSG00000131050; CTA
FVNSVINTL

SEQ ID NO: 10070 - protein, 9 aa, Homo sapiens
  misc_feature: Table A; Target 10070; HLA-C*06:02; BPIFA2; ENSG00000131050; CTA
FVNSVINTL

SEQ ID NO: 10071 - protein, 9 aa, Homo sapiens
  misc_feature: Table A; Target 10071; HLA-C*07:02; BPIFA2; ENSG00000131050; CTA
FVNSVINTL

SEQ ID NO: 10072 - protein, 9 aa, Homo sapiens
  misc_feature: Table A; Target 10072; HLA-C*07:04; BPIFA2; ENSG00000131050; CTA
FVNSVINTL

SEQ ID NO: 10073 - protein, 9 aa, Homo sapiens
  misc_feature: Table A; Target 10073; HLA-C*07:06; BPIFA2; ENSG00000131050; CTA
FVNSVINTL

SEQ ID NO: 10074 - protein, 9 aa, Homo sapiens
  misc_feature: Table A; Target 10074; HLA-C*12:03; BPIFA2; ENSG00000131050; CTA
FVNSVINTL

SEQ ID NO: 10075 - protein, 9 aa, Homo sapiens
  misc_feature: Table A; Target 10075; HLA-C*14:02; BPIFA2; ENSG00000131050; CTA
FVNSVINTL

SEQ ID NO: 10076 - protein, 9 aa, Homo sapiens
  misc_feature: Table A; Target 10076; HLA-C*16:01; BPIFA2; ENSG00000131050; CTA
FVNSVINTL

SEQ ID NO: 10077 - protein, 9 aa, Homo sapiens
  misc_feature: Table A; Target 10077; HLA-C*16:02; BPIFA2; ENSG00000131050; CTA
FVNSVINTL

SEQ ID NO: 10078 - protein, 9 aa, Homo sapiens
  misc_feature: Table A; Target 10078; HLA-C*16:04; BPIFA2; ENSG00000131050; CTA
FVNSVINTL

SEQ ID NO: 10079 - protein, 10 aa, Homo sapiens
  misc_feature: Table A; Target 10079; HLA-A*01:01; BPIFA2; ENSG00000131050; CTA
FVNSVINTLK

SEQ ID NO: 10080 - protein, 10 aa, Homo sapiens
  misc_feature: Table A; Target 10080; HLA-A*03:01; BPIFA2; ENSG00000131050; CTA
FVNSVINTLK

SEQ ID NO: 10081 - protein, 10 aa, Homo sapiens
  misc_feature: Table A; Target 10081; HLA-A*03:02; BPIFA2; ENSG00000131050; CTA
FVNSVINTLK

SEQ ID NO: 10082 - protein, 10 aa, Homo sapiens
  misc_feature: Table A; Target 10082; HLA-A*11:01; BPIFA2; ENSG00000131050; CTA
FVNSVINTLK

SEQ ID NO: 10083 - protein, 10 aa, Homo sapiens
  misc_feature: Table A; Target 10083; HLA-A*26:01; BPIFA2; ENSG00000131050; CTA
FVNSVINTLK

SEQ ID NO: 10084 - protein, 10 aa, Homo sapiens
  misc_feature: Table A; Target 10084; HLA-A*29:02; BPIFA2; ENSG00000131050; CTA
FVNSVINTLK

SEQ ID NO: 10085 - protein, 10 aa, Homo sapiens
  misc_feature: Table A; Target 10085; HLA-A*31:01; BPIFA2; ENSG00000131050; CTA
FVNSVINTLK

SEQ ID NO: 10086 - protein, 10 aa, Homo sapiens
  misc_feature: Table A; Target 10086; HLA-A*32:01; BPIFA2; ENSG00000131050; CTA
FVNSVINTLK

SEQ ID NO: 10087 - protein, 10 aa, Homo sapiens
  misc_feature: Table A; Target 10087; HLA-A*33:01; BPIFA2; ENSG00000131050; CTA
FVNSVINTLK

SEQ ID NO: 10088 - protein, 10 aa, Homo sapiens
  misc_feature: Table A; Target 10088; HLA-A*33:03; BPIFA2; ENSG00000131050; CTA
FVNSVINTLK

SEQ ID NO: 10089 - protein, 10 aa, Homo sapiens
  misc_feature: Table A; Target 10089; HLA-A*68:01; BPIFA2; ENSG00000131050; CTA
FVNSVINTLK

SEQ ID NO: 10090 - protein, 10 aa, Homo sapiens
  misc_feature: Table A; Target 10090; HLA-A*68:02; BPIFA2; ENSG00000131050; CTA
FVNSVINTLK

SEQ ID NO: 10091 - protein, 10 aa, Homo sapiens
  misc_feature: Table A; Target 10091; HLA-B*27:02; BPIFA2; ENSG00000131050; CTA
FVNSVINTLK

SEQ ID NO: 10092 - protein, 10 aa, Homo sapiens
  misc_feature: Table A; Target 10092; HLA-B*27:05; BPIFA2; ENSG00000131050; CTA
FVNSVINTLK

SEQ ID NO: 10093 - protein, 10 aa, Homo sapiens
  misc_feature: Table A; Target 10093; HLA-B*57:01; BPIFA2; ENSG00000131050; CTA
FVNSVINTLK

SEQ ID NO: 10094 - protein, 10 aa, Homo sapiens
  misc_feature: Table A; Target 10094; HLA-C*02:02; BPIFA2; ENSG00000131050; CTA
FVNSVINTLK

SEQ ID NO: 10095 - protein, 10 aa, Homo sapiens
  misc_feature: Table A; Target 10095; HLA-C*04:01; BPIFA2; ENSG00000131050; CTA
FVNSVINTLK

SEQ ID NO: 10096 - protein, 10 aa, Homo sapiens
  misc_feature: Table A; Target 10096; HLA-C*06:02; BPIFA2; ENSG00000131050; CTA
FVNSVINTLK

SEQ ID NO: 10097 - protein, 10 aa, Homo sapiens
  misc_feature: Table A; Target 10097; HLA-C*07:01; BPIFA2; ENSG00000131050; CTA
FVNSVINTLK

SEQ ID NO: 10098 - protein, 10 aa, Homo sapiens
  misc_feature: Table A; Target 10098; HLA-C*07:02; BPIFA2; ENSG00000131050; CTA
FVNSVINTLK

SEQ ID NO: 10099 - protein, 10 aa, Homo sapiens
  misc_feature: Table A; Target 10099; HLA-C*07:06; BPIFA2; ENSG00000131050; CTA
FVNSVINTLK

SEQ ID NO: 10100 - protein, 10 aa, Homo sapiens
  misc_feature: Table A; Target 10100; HLA-A*30:01; BPIFA2; ENSG00000131050; CTA
GECASDPTSI

SEQ ID NO: 10101 - protein, 10 aa, Homo sapiens
  misc_feature: Table A; Target 10101; HLA-B*40:01; BPIFA2; ENSG00000131050; CTA
GECASDPTSI

SEQ ID NO: 10102 - protein, 10 aa, Homo sapiens
  misc_feature: Table A; Target 10102; HLA-B*40:02; BPIFA2; ENSG00000131050; CTA
GECASDPTSI

SEQ ID NO: 10103 - protein, 10 aa, Homo sapiens
  misc_feature: Table A; Target 10103; HLA-B*49:01; BPIFA2; ENSG00000131050; CTA
GECASDPTSI

SEQ ID NO: 10104 - protein, 10 aa, Homo sapiens
  misc_feature: Table A; Target 10104; HLA-C*07:01; BPIFA2; ENSG00000131050; CTA
GECASDPTSI

SEQ ID NO: 10105 - protein, 10 aa, Homo sapiens
  misc_feature: Table A; Target 10105; HLA-C*07:02; BPIFA2; ENSG00000131050; CTA
GECASDPTSI

SEQ ID NO: 10106 - protein, 10 aa, Homo sapiens
  misc_feature: Table A; Target 10106; HLA-C*16:04; BPIFA2; ENSG00000131050; CTA
GECASDPTSI

SEQ ID NO: 10107 - protein, 9 aa, Homo sapiens
  misc_feature: Table A; Target 10107; HLA-A*02:01; BPIFA2; ENSG00000131050; CTA
GLETVDNTL

SEQ ID NO: 10108 - protein, 9 aa, Homo sapiens
  misc_feature: Table A; Target 10108; HLA-A*02:04; BPIFA2; ENSG00000131050; CTA
GLETVDNTL

SEQ ID NO: 10109 - protein, 9 aa, Homo sapiens
  misc_feature: Table A; Target 10109; HLA-A*02:07; BPIFA2; ENSG00000131050; CTA
GLETVDNTL

SEQ ID NO: 10110 - protein, 9 aa, Homo sapiens
  misc_feature: Table A; Target 10110; HLA-B*13:02; BPIFA2; ENSG00000131050; CTA
GLETVDNTL

SEQ ID NO: 10111 - protein, 9 aa, Homo sapiens
  misc_feature: Table A; Target 10111; HLA-B*27:05; BPIFA2; ENSG00000131050; CTA
GLETVDNTL

SEQ ID NO: 10112 - protein, 9 aa, Homo sapiens
  misc_feature: Table A; Target 10112; HLA-B*35:03; BPIFA2; ENSG00000131050; CTA
GLETVDNTL

SEQ ID NO: 10113 - protein, 9 aa, Homo sapiens
  misc_feature: Table A; Target 10113; HLA-B*38:01; BPIFA2; ENSG00000131050; CTA
GLETVDNTL

SEQ ID NO: 10114 - protein, 9 aa, Homo sapiens
  misc_feature: Table A; Target 10114; HLA-B*39:01; BPIFA2; ENSG00000131050; CTA
GLETVDNTL

SEQ ID NO: 10115 - protein, 9 aa, Homo sapiens
  misc_feature: Table A; Target 10115; HLA-B*40:01; BPIFA2; ENSG00000131050; CTA
GLETVDNTL

SEQ ID NO: 10116 - protein, 9 aa, Homo sapiens
  misc_feature: Table A; Target 10116; HLA-B*40:02; BPIFA2; ENSG00000131050; CTA
GLETVDNTL

SEQ ID NO: 10117 - protein, 9 aa, Homo sapiens
  misc_feature: Table A; Target 10117; HLA-B*55:01; BPIFA2; ENSG00000131050; CTA
GLETVDNTL

SEQ ID NO: 10118 - protein, 9 aa, Homo sapiens
  misc_feature: Table A; Target 10118; HLA-C*05:01; BPIFA2; ENSG00000131050; CTA
GLETVDNTL

SEQ ID NO: 10119 - protein, 10 aa, Homo sapiens
  misc_feature: Table A; Target 10119; HLA-A*01:01; BPIFA2; ENSG00000131050; CTA
GLETVDNTLK

SEQ ID NO: 10120 - protein, 10 aa, Homo sapiens
  misc_feature: Table A; Target 10120; HLA-A*03:01; BPIFA2; ENSG00000131050; CTA
GLETVDNTLK

SEQ ID NO: 10121 - protein, 10 aa, Homo sapiens
  misc_feature: Table A; Target 10121; HLA-A*03:02; BPIFA2; ENSG00000131050; CTA
GLETVDNTLK

SEQ ID NO: 10122 - protein, 10 aa, Homo sapiens
  misc_feature: Table A; Target 10122; HLA-A*11:01; BPIFA2; ENSG00000131050; CTA
GLETVDNTLK

SEQ ID NO: 10123 - protein, 10 aa, Homo sapiens
  misc_feature: Table A; Target 10123; HLA-B*27:02; BPIFA2; ENSG00000131050; CTA
GLETVDNTLK

SEQ ID NO: 10124 - protein, 10 aa, Homo sapiens
  misc_feature: Table A; Target 10124; HLA-B*27:05; BPIFA2; ENSG00000131050; CTA
GLETVDNTLK

SEQ ID NO: 10125 - protein, 8 aa, Homo sapiens
  misc_feature: Table A; Target 10125; HLA-B*08:01; BPIFA2; ENSG00000131050; CTA
GLKISNSL

SEQ ID NO: 10126 - protein, 9 aa, Homo sapiens
  misc_feature: Table A; Target 10126; HLA-A*02:03; BPIFA2; ENSG00000131050; CTA
GLKISNSLI

SEQ ID NO: 10127 - protein, 10 aa, Homo sapiens
  misc_feature: Table A; Target 10127; HLA-A*02:01; BPIFA2; ENSG00000131050; CTA
GLNLSFPVTA

SEQ ID NO: 10128 - protein, 10 aa, Homo sapiens
  misc_feature: Table A; Target 10128; HLA-A*02:03; BPIFA2; ENSG00000131050; CTA
GLNLSFPVTA

SEQ ID NO: 10129 - protein, 10 aa, Homo sapiens
  misc_feature: Table A; Target 10129; HLA-A*02:04; BPIFA2; ENSG00000131050; CTA
GLNLSFPVTA

SEQ ID NO: 10130 - protein, 10 aa, Homo sapiens
  misc_feature: Table A; Target 10130; HLA-B*55:01; BPIFA2; ENSG00000131050; CTA
GLNLSFPVTA

SEQ ID NO: 10131 - protein, 10 aa, Homo sapiens
  misc_feature: Table A; Target 10131; HLA-B*56:01; BPIFA2; ENSG00000131050; CTA
GLNLSFPVTA

SEQ ID NO: 10132 - protein, 10 aa, Homo sapiens
  misc_feature: Table A; Target 10132; HLA-B*27:02; BPIFA2; ENSG00000131050; CTA
GNDLSNVVDK

SEQ ID NO: 10133 - protein, 8 aa, Homo sapiens
  misc_feature: Table A; Target 10133; HLA-B*07:02; BPIFA2; ENSG00000131050; CTA
GPIIGQII

SEQ ID NO: 10134 - protein, 8 aa, Homo sapiens
  misc_feature: Table A; Target 10134; HLA-B*35:03; BPIFA2; ENSG00000131050; CTA
GPIIGQII

SEQ ID NO: 10135 - protein, 8 aa, Homo sapiens
  misc_feature: Table A; Target 10135; HLA-B*51:01; BPIFA2; ENSG00000131050; CTA
GPIIGQII

SEQ ID NO: 10136 - protein, 8 aa, Homo sapiens
  misc_feature: Table A; Target 10136; HLA-B*56:01; BPIFA2; ENSG00000131050; CTA
GPIIGQII

SEQ ID NO: 10137 - protein, 10 aa, Homo sapiens
  misc_feature: Table A; Target 10137; HLA-A*02:04; BPIFA2; ENSG00000131050; CTA
GPIIGQIINL

SEQ ID NO: 10138 - protein, 10 aa, Homo sapiens
  misc_feature: Table A; Target 10138; HLA-B*07:02; BPIFA2; ENSG00000131050; CTA
GPIIGQIINL

SEQ ID NO: 10139 - protein, 10 aa, Homo sapiens
  misc_feature: Table A; Target 10139; HLA-B*35:03; BPIFA2; ENSG00000131050; CTA
GPIIGQIINL

SEQ ID NO: 10140 - protein, 10 aa, Homo sapiens
  misc_feature: Table A; Target 10140; HLA-B*40:01; BPIFA2; ENSG00000131050; CTA
GPIIGQIINL

SEQ ID NO: 10141 - protein, 10 aa, Homo sapiens
  misc_feature: Table A; Target 10141; HLA-B*56:01; BPIFA2; ENSG00000131050; CTA
GPIIGQIINL

SEQ ID NO: 10142 - protein, 10 aa, Homo sapiens
  misc_feature: Table A; Target 10142; HLA-C*07:02; BPIFA2; ENSG00000131050; CTA
GPIIGQIINL

SEQ ID NO: 10143 - protein, 11 aa, Homo sapiens
  misc_feature: Table A; Target 10143; HLA-A*11:01; BPIFA2; ENSG00000131050; CTA
GPIIGQIINLK

SEQ ID NO: 10144 - protein, 8 aa, Homo sapiens
  misc_feature: Table A; Target 10144; HLA-B*13:02; BPIFA2; ENSG00000131050; CTA
GQIINLKA

SEQ ID NO: 10145 - protein, 10 aa, Homo sapiens
  misc_feature: Table A; Target 10145; HLA-B*13:02; BPIFA2; ENSG00000131050; CTA
GQIINLKASL

SEQ ID NO: 10146 - protein, 10 aa, Homo sapiens
  misc_feature: Table A; Target 10146; HLA-B*15:01; BPIFA2; ENSG00000131050; CTA
GQIINLKASL

SEQ ID NO: 10147 - protein, 10 aa, Homo sapiens
  misc_feature: Table A; Target 10147; HLA-B*15:03; BPIFA2; ENSG00000131050; CTA
GQIINLKASL

SEQ ID NO: 10148 - protein, 10 aa, Homo sapiens
  misc_feature: Table A; Target 10148; HLA-A*68:02; BPIFA2; ENSG00000131050; CTA
GTSESLLDNL

SEQ ID NO: 10149 - protein, 10 aa, Homo sapiens
  misc_feature: Table A; Target 10149; HLA-B*27:05; BPIFA2; ENSG00000131050; CTA
GTSESLLDNL

SEQ ID NO: 10150 - protein, 10 aa, Homo sapiens
  misc_feature: Table A; Target 10150; HLA-B*39:01; BPIFA2; ENSG00000131050; CTA
GTSESLLDNL

SEQ ID NO: 10151 - protein, 9 aa, Homo sapiens
  misc_feature: Table A; Target 10151; HLA-A*03:01; BPIFA2; ENSG00000131050; CTA
GVLQKSSAW

SEQ ID NO: 10152 - protein, 9 aa, Homo sapiens
  misc_feature: Table A; Target 10152; HLA-A*24:02; BPIFA2; ENSG00000131050; CTA
GVLQKSSAW

SEQ ID NO: 10153 - protein, 9 aa, Homo sapiens
  misc_feature: Table A; Target 10153; HLA-A*25:01; BPIFA2; ENSG00000131050; CTA
GVLQKSSAW

SEQ ID NO: 10154 - protein, 9 aa, Homo sapiens
  misc_feature: Table A; Target 10154; HLA-A*26:01; BPIFA2; ENSG00000131050; CTA
GVLQKSSAW

SEQ ID NO: 10155 - protein, 9 aa, Homo sapiens
  misc_feature: Table A; Target 10155; HLA-A*29:02; BPIFA2; ENSG00000131050; CTA
GVLQKSSAW

SEQ ID NO: 10156 - protein, 9 aa, Homo sapiens
  misc_feature: Table A; Target 10156; HLA-A*30:02; BPIFA2; ENSG00000131050; CTA
GVLQKSSAW

SEQ ID NO: 10157 - protein, 9 aa, Homo sapiens
  misc_feature: Table A; Target 10157; HLA-A*31:01; BPIFA2; ENSG00000131050; CTA
GVLQKSSAW

SEQ ID NO: 10158 - protein, 9 aa, Homo sapiens
  misc_feature: Table A; Target 10158; HLA-A*32:01; BPIFA2; ENSG00000131050; CTA
GVLQKSSAW

SEQ ID NO: 10159 - protein, 9 aa, Homo sapiens
  misc_feature: Table A; Target 10159; HLA-A*33:03; BPIFA2; ENSG00000131050; CTA
GVLQKSSAW

SEQ ID NO: 10160 - protein, 9 aa, Homo sapiens
  misc_feature: Table A; Target 10160; HLA-B*08:01; BPIFA2; ENSG00000131050; CTA
GVLQKSSAW

SEQ ID NO: 10161 - protein, 9 aa, Homo sapiens
  misc_feature: Table A; Target 10161; HLA-B*15:01; BPIFA2; ENSG00000131050; CTA
GVLQKSSAW

SEQ ID NO: 10162 - protein, 9 aa, Homo sapiens
  misc_feature: Table A; Target 10162; HLA-B*27:02; BPIFA2; ENSG00000131050; CTA
GVLQKSSAW

SEQ ID NO: 10163 - protein, 9 aa, Homo sapiens
  misc_feature: Table A; Target 10163; HLA-B*44:02; BPIFA2; ENSG00000131050; CTA
GVLQKSSAW

SEQ ID NO: 10164 - protein, 9 aa, Homo sapiens
  misc_feature: Table A; Target 10164; HLA-B*44:03; BPIFA2; ENSG00000131050; CTA
GVLQKSSAW

SEQ ID NO: 10165 - protein, 9 aa, Homo sapiens
  misc_feature: Table A; Target 10165; HLA-B*46:01; BPIFA2; ENSG00000131050; CTA
GVLQKSSAW

SEQ ID NO: 10166 - protein, 9 aa, Homo sapiens
  misc_feature: Table A; Target 10166; HLA-B*57:01; BPIFA2; ENSG00000131050; CTA
GVLQKSSAW

SEQ ID NO: 10167 - protein, 9 aa, Homo sapiens
  misc_feature: Table A; Target 10167; HLA-B*58:01; BPIFA2; ENSG00000131050; CTA
GVLQKSSAW

SEQ ID NO: 10168 - protein, 9 aa, Homo sapiens
  misc_feature: Table A; Target 10168; HLA-C*02:02; BPIFA2; ENSG00000131050; CTA
GVLQKSSAW

SEQ ID NO: 10169 - protein, 9 aa, Homo sapiens
  misc_feature: Table A; Target 10169; HLA-C*07:04; BPIFA2; ENSG00000131050; CTA
GVLQKSSAW

SEQ ID NO: 10170 - protein, 9 aa, Homo sapiens
  misc_feature: Table A; Target 10170; HLA-C*16:01; BPIFA2; ENSG00000131050; CTA
GVLQKSSAW

SEQ ID NO: 10171 - protein, 9 aa, Homo sapiens
  misc_feature: Table A; Target 10171; HLA-C*16:04; BPIFA2; ENSG00000131050; CTA
GVLQKSSAW

SEQ ID NO: 10172 - protein, 11 aa, Homo sapiens
  misc_feature: Table A; Target 10172; HLA-A*02:04; BPIFA2; ENSG00000131050; CTA
GVLQKSSAWQL

SEQ ID NO: 10173 - protein, 11 aa, Homo sapiens
  misc_feature: Table A; Target 10173; HLA-A*31:01; BPIFA2; ENSG00000131050; CTA
GVLQKSSAWQL

SEQ ID NO: 10174 - protein, 9 aa, Homo sapiens
  misc_feature: Table A; Target 10174; HLA-B*27:05; BPIFA2; ENSG00000131050; CTA
GVLTGTSES

SEQ ID NO: 10175 - protein, 10 aa, Homo sapiens
  misc_feature: Table A; Target 10175; HLA-A*03:01; BPIFA2; ENSG00000131050; CTA
GVLTGTSESL

SEQ ID NO: 10176 - protein, 10 aa, Homo sapiens
  misc_feature: Table A; Target 10176; HLA-A*25:01; BPIFA2; ENSG00000131050; CTA
GVLTGTSESL

SEQ ID NO: 10177 - protein, 10 aa, Homo sapiens
  misc_feature: Table A; Target 10177; HLA-A*30:01; BPIFA2; ENSG00000131050; CTA
GVLTGTSESL

SEQ ID NO: 10178 - protein, 10 aa, Homo sapiens
  misc_feature: Table A; Target 10178; HLA-A*32:01; BPIFA2; ENSG00000131050; CTA
GVLTGTSESL

SEQ ID NO: 10179 - protein, 10 aa, Homo sapiens
  misc_feature: Table A; Target 10179; HLA-B*15:01; BPIFA2; ENSG00000131050; CTA
GVLTGTSESL

SEQ ID NO: 10180 - protein, 10 aa, Homo sapiens
  misc_feature: Table A; Target 10180; HLA-B*27:05; BPIFA2; ENSG00000131050; CTA
GVLTGTSESL

SEQ ID NO: 10181 - protein, 10 aa, Homo sapiens
  misc_feature: Table A; Target 10181; HLA-B*40:01; BPIFA2; ENSG00000131050; CTA
GVLTGTSESL

SEQ ID NO: 10182 - protein, 10 aa, Homo sapiens
  misc_feature: Table A; Target 10182; HLA-B*40:02; BPIFA2; ENSG00000131050; CTA
GVLTGTSESL

SEQ ID NO: 10183 - protein, 10 aa, Homo sapiens
  misc_feature: Table A; Target 10183; HLA-B*55:01; BPIFA2; ENSG00000131050; CTA
GVLTGTSESL

SEQ ID NO: 10184 - protein, 10 aa, Homo sapiens
  misc_feature: Table A; Target 10184; HLA-B*58:01; BPIFA2; ENSG00000131050; CTA
GVLTGTSESL

SEQ ID NO: 10185 - protein, 10 aa, Homo sapiens
  misc_feature: Table A; Target 10185; HLA-C*01:02; BPIFA2; ENSG00000131050; CTA
GVLTGTSESL

SEQ ID NO: 10186 - protein, 10 aa, Homo sapiens
  misc_feature: Table A; Target 10186; HLA-C*07:02; BPIFA2; ENSG00000131050; CTA
GVLTGTSESL

SEQ ID NO: 10187 - protein, 10 aa, Homo sapiens
  misc_feature: Table A; Target 10187; HLA-C*07:04; BPIFA2; ENSG00000131050; CTA
GVLTGTSESL

SEQ ID NO: 10188 - protein, 10 aa, Homo sapiens
  misc_feature: Table A; Target 10188; HLA-C*14:02; BPIFA2; ENSG00000131050; CTA
GVLTGTSESL

SEQ ID NO: 10189 - protein, 11 aa, Homo sapiens
  misc_feature: Table A; Target 10189; HLA-A*02:01; BPIFA2; ENSG00000131050; CTA
GVLTGTSESLL

SEQ ID NO: 10190 - protein, 11 aa, Homo sapiens
  misc_feature: Table A; Target 10190; HLA-A*03:01; BPIFA2; ENSG00000131050; CTA
GVLTGTSESLL

SEQ ID NO: 10191 - protein, 11 aa, Homo sapiens
  misc_feature: Table A; Target 10191; HLA-A*03:02; BPIFA2; ENSG00000131050; CTA
GVLTGTSESLL

SEQ ID NO: 10192 - protein, 11 aa, Homo sapiens
  misc_feature: Table A; Target 10192; HLA-A*11:01; BPIFA2; ENSG00000131050; CTA
GVLTGTSESLL

SEQ ID NO: 10193 - protein, 11 aa, Homo sapiens
  misc_feature: Table A; Target 10193; HLA-A*23:01; BPIFA2; ENSG00000131050; CTA
GVLTGTSESLL

SEQ ID NO: 10194 - protein, 11 aa, Homo sapiens
  misc_feature: Table A; Target 10194; HLA-A*31:01; BPIFA2; ENSG00000131050; CTA
GVLTGTSESLL

SEQ ID NO: 10195 - protein, 11 aa, Homo sapiens
  misc_feature: Table A; Target 10195; HLA-B*13:02; BPIFA2; ENSG00000131050; CTA
GVLTGTSESLL

SEQ ID NO: 10196 - protein, 11 aa, Homo sapiens
  misc_feature: Table A; Target 10196; HLA-B*27:05; BPIFA2; ENSG00000131050; CTA
GVLTGTSESLL

SEQ ID NO: 10197 - protein, 11 aa, Homo sapiens
  misc_feature: Table A; Target 10197; HLA-B*39:01; BPIFA2; ENSG00000131050; CTA
GVLTGTSESLL

SEQ ID NO: 10198 - protein, 11 aa, Homo sapiens
  misc_feature: Table A; Target 10198; HLA-B*40:01; BPIFA2; ENSG00000131050; CTA
GVLTGTSESLL

SEQ ID NO: 10199 - protein, 11 aa, Homo sapiens
  misc_feature: Table A; Target 10199; HLA-B*58:01; BPIFA2; ENSG00000131050; CTA
GVLTGTSESLL

SEQ ID NO: 10200 - protein, 11 aa, Homo sapiens
  misc_feature: Table A; Target 10200; HLA-C*04:01; BPIFA2; ENSG00000131050; CTA
GVLTGTSESLL

SEQ ID NO: 10201 - protein, 11 aa, Homo sapiens
  misc_feature: Table A; Target 10201; HLA-C*07:01; BPIFA2; ENSG00000131050; CTA
GVLTGTSESLL

SEQ ID NO: 10202 - protein, 11 aa, Homo sapiens
  misc_feature: Table A; Target 10202; HLA-C*07:02; BPIFA2; ENSG00000131050; CTA
GVLTGTSESLL

SEQ ID NO: 10203 - protein, 11 aa, Homo sapiens
  misc_feature: Table A; Target 10203; HLA-C*07:04; BPIFA2; ENSG00000131050; CTA
GVLTGTSESLL

SEQ ID NO: 10204 - protein, 11 aa, Homo sapiens
  misc_feature: Table A; Target 10204; HLA-A*30:01; BPIFA2; ENSG00000131050; CTA
HEGLETVDNTL

SEQ ID NO: 10205 - protein, 11 aa, Homo sapiens
  misc_feature: Table A; Target 10205; HLA-B*27:02; BPIFA2; ENSG00000131050; CTA
HEGLETVDNTL

SEQ ID NO: 10206 - protein, 11 aa, Homo sapiens
  misc_feature: Table A; Target 10206; HLA-B*27:05; BPIFA2; ENSG00000131050; CTA
HEGLETVDNTL

SEQ ID NO: 10207 - protein, 11 aa, Homo sapiens
  misc_feature: Table A; Target 10207; HLA-B*35:03; BPIFA2; ENSG00000131050; CTA
HEGLETVDNTL

SEQ ID NO: 10208 - protein, 11 aa, Homo sapiens
  misc_feature: Table A; Target 10208; HLA-B*38:01; BPIFA2; ENSG00000131050; CTA
HEGLETVDNTL

SEQ ID NO: 10209 - protein, 11 aa, Homo sapiens
  misc_feature: Table A; Target 10209; HLA-B*39:01; BPIFA2; ENSG00000131050; CTA
HEGLETVDNTL

SEQ ID NO: 10210 - protein, 11 aa, Homo sapiens
  misc_feature: Table A; Target 10210; HLA-B*40:01; BPIFA2; ENSG00000131050; CTA
HEGLETVDNTL

SEQ ID NO: 10211 - protein, 11 aa, Homo sapiens
  misc_feature: Table A; Target 10211; HLA-B*40:02; BPIFA2; ENSG00000131050; CTA
HEGLETVDNTL

SEQ ID NO: 10212 - protein, 11 aa, Homo sapiens
  misc_feature: Table A; Target 10212; HLA-B*44:02; BPIFA2; ENSG00000131050; CTA
HEGLETVDNTL

SEQ ID NO: 10213 - protein, 11 aa, Homo sapiens
  misc_feature: Table A; Target 10213; HLA-B*44:03; BPIFA2; ENSG00000131050; CTA
HEGLETVDNTL

SEQ ID NO: 10214 - protein, 11 aa, Homo sapiens
  misc_feature: Table A; Target 10214; HLA-B*49:01; BPIFA2; ENSG00000131050; CTA
HEGLETVDNTL

SEQ ID NO: 10215 - protein, 11 aa, Homo sapiens
  misc_feature: Table A; Target 10215; HLA-C*07:01; BPIFA2; ENSG00000131050; CTA
HEGLETVDNTL

SEQ ID NO: 10216 - protein, 11 aa, Homo sapiens
  misc_feature: Table A; Target 10216; HLA-C*07:04; BPIFA2; ENSG00000131050; CTA
HEGLETVDNTL

SEQ ID NO: 10217 - protein, 9 aa, Homo sapiens
  misc_feature: Table A; Target 10217; HLA-B*13:02; BPIFA2; ENSG00000131050; CTA
HKTQLQTLI

SEQ ID NO: 10218 - protein, 8 aa, Homo sapiens
  misc_feature: Table A; Target 10218; HLA-B*13:02; BPIFA2; ENSG00000131050; CTA
HSLDVNVI

SEQ ID NO: 10219 - protein, 8 aa, Homo sapiens
  misc_feature: Table A; Target 10219; HLA-B*51:01; BPIFA2; ENSG00000131050; CTA
HSLDVNVI

SEQ ID NO: 10220 - protein, 8 aa, Homo sapiens
  misc_feature: Table A; Target 10220; HLA-C*07:01; BPIFA2; ENSG00000131050; CTA
HSLDVNVI

SEQ ID NO: 10221 - protein, 8 aa, Homo sapiens
  misc_feature: Table A; Target 10221; HLA-C*07:04; BPIFA2; ENSG00000131050; CTA
HSLDVNVI

SEQ ID NO: 10222 - protein, 8 aa, Homo sapiens
  misc_feature: Table A; Target 10222; HLA-C*12:03; BPIFA2; ENSG00000131050; CTA
HSLDVNVI

SEQ ID NO: 10223 - protein, 9 aa, Homo sapiens
  misc_feature: Table A; Target 10223; HLA-C*07:01; BPIFA2; ENSG00000131050; CTA
HSLDVNVIQ

SEQ ID NO: 10224 - protein, 9 aa, Homo sapiens
  misc_feature: Table A; Target 10224; HLA-C*12:03; BPIFA2; ENSG00000131050; CTA
HSLDVNVIQ

SEQ ID NO: 10225 - protein, 10 aa, Homo sapiens
  misc_feature: Table A; Target 10225; HLA-A*68:01; BPIFA2; ENSG00000131050; CTA
HSLDVNVIQQ

SEQ ID NO: 10226 - protein, 10 aa, Homo sapiens
  misc_feature: Table A; Target 10226; HLA-C*07:01; BPIFA2; ENSG00000131050; CTA
HSLDVNVIQQ

SEQ ID NO: 10227 - protein, 11 aa, Homo sapiens
  misc_feature: Table A; Target 10227; HLA-A*02:01; BPIFA2; ENSG00000131050; CTA
HSLDVNVIQQV

SEQ ID NO: 10228 - protein, 11 aa, Homo sapiens
  misc_feature: Table A; Target 10228; HLA-A*02:07; BPIFA2; ENSG00000131050; CTA
HSLDVNVIQQV

SEQ ID NO: 10229 - protein, 11 aa, Homo sapiens
  misc_feature: Table A; Target 10229; HLA-A*68:01; BPIFA2; ENSG00000131050; CTA
HSLDVNVIQQV

SEQ ID NO: 10230 - protein, 11 aa, Homo sapiens
  misc_feature: Table A; Target 10230; HLA-A*68:02; BPIFA2; ENSG00000131050; CTA
HSLDVNVIQQV

SEQ ID NO: 10231 - protein, 11 aa, Homo sapiens
  misc_feature: Table A; Target 10231; HLA-B*13:02; BPIFA2; ENSG00000131050; CTA
HSLDVNVIQQV

SEQ ID NO: 10232 - protein, 8 aa, Homo sapiens
  misc_feature: Table A; Target 10232; HLA-B*08:01; BPIFA2; ENSG00000131050; CTA
HSQIINKF

SEQ ID NO: 10233 - protein, 8 aa, Homo sapiens
  misc_feature: Table A; Target 10233; HLA-B*18:01; BPIFA2; ENSG00000131050; CTA
HSQIINKF

SEQ ID NO: 10234 - protein, 8 aa, Homo sapiens
  misc_feature: Table A; Target 10234; HLA-B*37:01; BPIFA2; ENSG00000131050; CTA
HSQIINKF

SEQ ID NO: 10235 - protein, 8 aa, Homo sapiens
  misc_feature: Table A; Target 10235; HLA-B*40:02; BPIFA2; ENSG00000131050; CTA
HSQIINKF

SEQ ID NO: 10236 - protein, 8 aa, Homo sapiens
  misc_feature: Table A; Target 10236; HLA-B*57:01; BPIFA2; ENSG00000131050; CTA
HSQIINKF

SEQ ID NO: 10237 - protein, 8 aa, Homo sapiens
  misc_feature: Table A; Target 10237; HLA-B*58:01; BPIFA2; ENSG00000131050; CTA
HSQIINKF

SEQ ID NO: 10238 - protein, 8 aa, Homo sapiens
  misc_feature: Table A; Target 10238; HLA-C*06:02; BPIFA2; ENSG00000131050; CTA
HSQIINKF

SEQ ID NO: 10239 - protein, 8 aa, Homo sapiens
  misc_feature: Table A; Target 10239; HLA-C*07:01; BPIFA2; ENSG00000131050; CTA
HSQIINKF

SEQ ID NO: 10240 - protein, 8 aa, Homo sapiens
  misc_feature: Table A; Target 10240; HLA-C*07:04; BPIFA2; ENSG00000131050; CTA
HSQIINKF

SEQ ID NO: 10241 - protein, 8 aa, Homo sapiens
  misc_feature: Table A; Target 10241; HLA-C*12:03; BPIFA2; ENSG00000131050; CTA
HSQIINKF

SEQ ID NO: 10242 - protein, 9 aa, Homo sapiens
  misc_feature: Table A; Target 10242; HLA-A*68:02; BPIFA2; ENSG00000131050; CTA
HSQIINKFV

SEQ ID NO: 10243 - protein, 9 aa, Homo sapiens
  misc_feature: Table A; Target 10243; HLA-C*06:02; BPIFA2; ENSG00000131050; CTA
HSQIINKFV

SEQ ID NO: 10244 - protein, 9 aa, Homo sapiens
  misc_feature: Table A; Target 10244; HLA-C*07:01; BPIFA2; ENSG00000131050; CTA
HSQIINKFV

SEQ ID NO: 10245 - protein, 10 aa, Homo sapiens
  misc_feature: Table A; Target 10245; HLA-C*07:01; BPIFA2; ENSG00000131050; CTA
HSQIINKFVN

SEQ ID NO: 10246 - protein, 9 aa, Homo sapiens
  misc_feature: Table A; Target 10246; HLA-A*02:07; BPIFA2; ENSG00000131050; CTA
IDDGKGLNL

SEQ ID NO: 10247 - protein, 9 aa, Homo sapiens
  misc_feature: Table A; Target 10247; HLA-A*30:01; BPIFA2; ENSG00000131050; CTA
IDDGKGLNL

SEQ ID NO: 10248 - protein, 9 aa, Homo sapiens
  misc_feature: Table A; Target 10248; HLA-B*37:01; BPIFA2; ENSG00000131050; CTA
IDDGKGLNL

SEQ ID NO: 10249 - protein, 9 aa, Homo sapiens
  misc_feature: Table A; Target 10249; HLA-B*38:01; BPIFA2; ENSG00000131050; CTA
IDDGKGLNL

SEQ ID NO: 10250 - protein, 9 aa, Homo sapiens
  misc_feature: Table A; Target 10250; HLA-B*39:01; BPIFA2; ENSG00000131050; CTA
IDDGKGLNL

SEQ ID NO: 10251 - protein, 9 aa, Homo sapiens
  misc_feature: Table A; Target 10251; HLA-B*40:01; BPIFA2; ENSG00000131050; CTA
IDDGKGLNL

SEQ ID NO: 10252 - protein, 9 aa, Homo sapiens
  misc_feature: Table A; Target 10252; HLA-B*40:02; BPIFA2; ENSG00000131050; CTA
IDDGKGLNL

SEQ ID NO: 10253 - protein, 9 aa, Homo sapiens
  misc_feature: Table A; Target 10253; HLA-C*03:04; BPIFA2; ENSG00000131050; CTA
IDDGKGLNL

SEQ ID NO: 10254 - protein, 9 aa, Homo sapiens
  misc_feature: Table A; Target 10254; HLA-C*05:01; BPIFA2; ENSG00000131050; CTA
IDDGKGLNL

SEQ ID NO: 10255 - protein, 8 aa, Homo sapiens
  misc_feature: Table A; Target 10255; HLA-B*18:01; BPIFA2; ENSG00000131050; CTA
IETDPQTH

SEQ ID NO: 10256 - protein, 8 aa, Homo sapiens
  misc_feature: Table A; Target 10256; HLA-C*07:01; BPIFA2; ENSG00000131050; CTA
IETDPQTH

SEQ ID NO: 10257 - protein, 8 aa, Homo sapiens
  misc_feature: Table A; Target 10257; HLA-C*16:02; BPIFA2; ENSG00000131050; CTA
IETDPQTH

SEQ ID NO: 10258 - protein, 9 aa, Homo sapiens
  misc_feature: Table A; Target 10258; HLA-B*27:05; BPIFA2; ENSG00000131050; CTA
IETDPQTHQ

SEQ ID NO: 10259 - protein, 9 aa, Homo sapiens
  misc_feature: Table A; Target 10259; HLA-B*44:02; BPIFA2; ENSG00000131050; CTA
IETDPQTHQ

SEQ ID NO: 10260 - protein, 9 aa, Homo sapiens
  misc_feature: Table A; Target 10260; HLA-B*49:01; BPIFA2; ENSG00000131050; CTA
IETDPQTHQ

SEQ ID NO: 10261 - protein, 10 aa, Homo sapiens
  misc_feature: Table A; Target 10261; HLA-A*30:01; BPIFA2; ENSG00000131050; CTA
IETDPQTHQP

SEQ ID NO: 10262 - protein, 10 aa, Homo sapiens
  misc_feature: Table A; Target 10262; HLA-B*44:02; BPIFA2; ENSG00000131050; CTA
IETDPQTHQP

SEQ ID NO: 10263 - protein, 10 aa, Homo sapiens
  misc_feature: Table A; Target 10263; HLA-B*44:03; BPIFA2; ENSG00000131050; CTA
IETDPQTHQP

SEQ ID NO: 10264 - protein, 10 aa, Homo sapiens
  misc_feature: Table A; Target 10264; HLA-B*49:01; BPIFA2; ENSG00000131050; CTA
IETDPQTHQP

SEQ ID NO: 10265 - protein, 10 aa, Homo sapiens
  misc_feature: Table A; Target 10265; HLA-C*16:02; BPIFA2; ENSG00000131050; CTA
IETDPQTHQP

SEQ ID NO: 10266 - protein, 11 aa, Homo sapiens
  misc_feature: Table A; Target 10266; HLA-A*30:01; BPIFA2; ENSG00000131050; CTA
IETDPQTHQPV

SEQ ID NO: 10267 - protein, 11 aa, Homo sapiens
  misc_feature: Table A; Target 10267; HLA-A*68:02; BPIFA2; ENSG00000131050; CTA
IETDPQTHQPV

SEQ ID NO: 10268 - protein, 11 aa, Homo sapiens
  misc_feature: Table A; Target 10268; HLA-B*13:02; BPIFA2; ENSG00000131050; CTA
IETDPQTHQPV

SEQ ID NO: 10269 - protein, 11 aa, Homo sapiens
  misc_feature: Table A; Target 10269; HLA-B*18:01; BPIFA2; ENSG00000131050; CTA
IETDPQTHQPV

SEQ ID NO: 10270 - protein, 11 aa, Homo sapiens
  misc_feature: Table A; Target 10270; HLA-B*27:05; BPIFA2; ENSG00000131050; CTA
IETDPQTHQPV

SEQ ID NO: 10271 - protein, 11 aa, Homo sapiens
  misc_feature: Table A; Target 10271; HLA-B*39:01; BPIFA2; ENSG00000131050; CTA
IETDPQTHQPV

SEQ ID NO: 10272 - protein, 11 aa, Homo sapiens
  misc_feature: Table A; Target 10272; HLA-B*40:01; BPIFA2; ENSG00000131050; CTA
IETDPQTHQPV

SEQ ID NO: 10273 - protein, 11 aa, Homo sapiens
  misc_feature: Table A; Target 10273; HLA-B*40:02; BPIFA2; ENSG00000131050; CTA
IETDPQTHQPV

SEQ ID NO: 10274 - protein, 11 aa, Homo sapiens
  misc_feature: Table A; Target 10274; HLA-B*49:01; BPIFA2; ENSG00000131050; CTA
IETDPQTHQPV

SEQ ID NO: 10275 - protein, 11 aa, Homo sapiens
  misc_feature: Table A; Target 10275; HLA-C*04:01; BPIFA2; ENSG00000131050; CTA
IETDPQTHQPV

SEQ ID NO: 10276 - protein, 11 aa, Homo sapiens
  misc_feature: Table A; Target 10276; HLA-C*06:02; BPIFA2; ENSG00000131050; CTA
IETDPQTHQPV

SEQ ID NO: 10277 - protein, 11 aa, Homo sapiens
  misc_feature: Table A; Target 10277; HLA-C*07:01; BPIFA2; ENSG00000131050; CTA
IETDPQTHQPV

SEQ ID NO: 10278 - protein, 11 aa, Homo sapiens
  misc_feature: Table A; Target 10278; HLA-C*07:02; BPIFA2; ENSG00000131050; CTA
IETDPQTHQPV

SEQ ID NO: 10279 - protein, 11 aa, Homo sapiens
  misc_feature: Table A; Target 10279; HLA-C*12:03; BPIFA2; ENSG00000131050; CTA
IETDPQTHQPV

SEQ ID NO: 10280 - protein, 11 aa, Homo sapiens
  misc_feature: Table A; Target 10280; HLA-C*16:01; BPIFA2; ENSG00000131050; CTA
IETDPQTHQPV

SEQ ID NO: 10281 - protein, 11 aa, Homo sapiens
  misc_feature: Table A; Target 10281; HLA-C*16:02; BPIFA2; ENSG00000131050; CTA
IETDPQTHQPV

SEQ ID NO: 10282 - protein, 9 aa, Homo sapiens
  misc_feature: Table A; Target 10282; HLA-C*07:01; BPIFA2; ENSG00000131050; CTA
IFIHSLDVN

SEQ ID NO: 10283 - protein, 11 aa, Homo sapiens
  misc_feature: Table A; Target 10283; HLA-A*24:02; BPIFA2; ENSG00000131050; CTA
IFIHSLDVNVI

SEQ ID NO: 10284 - protein, 8 aa, Homo sapiens
  misc_feature: Table A; Target 10284; HLA-A*03:02; BPIFA2; ENSG00000131050; CTA
IGQIINLK

SEQ ID NO: 10285 - protein, 8 aa, Homo sapiens
  misc_feature: Table A; Target 10285; HLA-A*11:01; BPIFA2; ENSG00000131050; CTA
IGQIINLK

SEQ ID NO: 10286 - protein, 9 aa, Homo sapiens
  misc_feature: Table A; Target 10286; HLA-C*06:02; BPIFA2; ENSG00000131050; CTA
IGQIINLKA

SEQ ID NO: 10287 - protein, 8 aa, Homo sapiens
  misc_feature: Table A; Target 10287; HLA-B*38:01; BPIFA2; ENSG00000131050; CTA
IHSLDVNV

SEQ ID NO: 10288 - protein, 9 aa, Homo sapiens
  misc_feature: Table A; Target 10288; HLA-B*27:05; BPIFA2; ENSG00000131050; CTA
IHSLDVNVI

SEQ ID NO: 10289 - protein, 9 aa, Homo sapiens
  misc_feature: Table A; Target 10289; HLA-B*38:01; BPIFA2; ENSG00000131050; CTA
IHSLDVNVI

SEQ ID NO: 10290 - protein, 9 aa, Homo sapiens
  misc_feature: Table A; Target 10290; HLA-B*39:01; BPIFA2; ENSG00000131050; CTA
IHSLDVNVI

SEQ ID NO: 10291 - protein, 9 aa, Homo sapiens
  misc_feature: Table A; Target 10291; HLA-C*07:04; BPIFA2; ENSG00000131050; CTA
IHSLDVNVI

SEQ ID NO: 10292 - protein, 8 aa, Homo sapiens
  misc_feature: Table A; Target 10292; HLA-A*02:03; BPIFA2; ENSG00000131050; CTA
IIGQIINL

SEQ ID NO: 10293 - protein, 8 aa, Homo sapiens
  misc_feature: Table A; Target 10293; HLA-A*02:04; BPIFA2; ENSG00000131050; CTA
IIGQIINL

SEQ ID NO: 10294 - protein, 8 aa, Homo sapiens
  misc_feature: Table A; Target 10294; HLA-A*23:01; BPIFA2; ENSG00000131050; CTA
IIGQIINL

SEQ ID NO: 10295 - protein, 8 aa, Homo sapiens
  misc_feature: Table A; Target 10295; HLA-B*27:05; BPIFA2; ENSG00000131050; CTA
IIGQIINL

SEQ ID NO: 10296 - protein, 8 aa, Homo sapiens
  misc_feature: Table A; Target 10296; HLA-C*01:02; BPIFA2; ENSG00000131050; CTA
IIGQIINL

SEQ ID NO: 10297 - protein, 8 aa, Homo sapiens
  misc_feature: Table A; Target 10297; HLA-C*06:02; BPIFA2; ENSG00000131050; CTA
IIGQIINL

SEQ ID NO: 10298 - protein, 8 aa, Homo sapiens
  misc_feature: Table A; Target 10298; HLA-C*07:04; BPIFA2; ENSG00000131050; CTA
IIGQIINL

SEQ ID NO: 10299 - protein, 9 aa, Homo sapiens
  misc_feature: Table A; Target 10299; HLA-A*03:01; BPIFA2; ENSG00000131050; CTA
IIGQIINLK

SEQ ID NO: 10300 - protein, 9 aa, Homo sapiens
  misc_feature: Table A; Target 10300; HLA-A*03:02; BPIFA2; ENSG00000131050; CTA
IIGQIINLK

SEQ ID NO: 10301 - protein, 9 aa, Homo sapiens
  misc_feature: Table A; Target 10301; HLA-A*11:01; BPIFA2; ENSG00000131050; CTA
IIGQIINLK

SEQ ID NO: 10302 - protein, 9 aa, Homo sapiens
  misc_feature: Table A; Target 10302; HLA-A*33:03; BPIFA2; ENSG00000131050; CTA
IIGQIINLK

SEQ ID NO: 10303 - protein, 9 aa, Homo sapiens
  misc_feature: Table A; Target 10303; HLA-A*68:01; BPIFA2; ENSG00000131050; CTA
IIGQIINLK

SEQ ID NO: 10304 - protein, 9 aa, Homo sapiens
  misc_feature: Table A; Target 10304; HLA-B*27:02; BPIFA2; ENSG00000131050; CTA
IIGQIINLK

SEQ ID NO: 10305 - protein, 9 aa, Homo sapiens
  misc_feature: Table A; Target 10305; HLA-C*07:06; BPIFA2; ENSG00000131050; CTA
IIGQIINLK

SEQ ID NO: 10306 - protein, 9 aa, Homo sapiens
  misc_feature: Table A; Target 10306; HLA-A*02:01; BPIFA2; ENSG00000131050; CTA
IINKFVNSV

SEQ ID NO: 10307 - protein, 9 aa, Homo sapiens
  misc_feature: Table A; Target 10307; HLA-A*02:03; BPIFA2; ENSG00000131050; CTA
IINKFVNSV

SEQ ID NO: 10308 - protein, 9 aa, Homo sapiens
  misc_feature: Table A; Target 10308; HLA-A*02:04; BPIFA2; ENSG00000131050; CTA
IINKFVNSV

SEQ ID NO: 10309 - protein, 9 aa, Homo sapiens
  misc_feature: Table A; Target 10309; HLA-A*02:07; BPIFA2; ENSG00000131050; CTA
IINKFVNSV

SEQ ID NO: 10310 - protein, 9 aa, Homo sapiens
  misc_feature: Table A; Target 10310; HLA-A*30:01; BPIFA2; ENSG00000131050; CTA
IINKFVNSV

SEQ ID NO: 10311 - protein, 9 aa, Homo sapiens
  misc_feature: Table A; Target 10311; HLA-A*31:01; BPIFA2; ENSG00000131050; CTA
IINKFVNSV

SEQ ID NO: 10312 - protein, 9 aa, Homo sapiens
  misc_feature: Table A; Target 10312; HLA-A*32:01; BPIFA2; ENSG00000131050; CTA
IINKFVNSV

SEQ ID NO: 10313 - protein, 9 aa, Homo sapiens
  misc_feature: Table A; Target 10313; HLA-A*68:02; BPIFA2; ENSG00000131050; CTA
IINKFVNSV

SEQ ID NO: 10314 - protein, 9 aa, Homo sapiens
  misc_feature: Table A; Target 10314; HLA-B*08:01; BPIFA2; ENSG00000131050; CTA
IINKFVNSV

SEQ ID NO: 10315 - protein, 9 aa, Homo sapiens
  misc_feature: Table A; Target 10315; HLA-B*13:02; BPIFA2; ENSG00000131050; CTA
IINKFVNSV

SEQ ID NO: 10316 - protein, 9 aa, Homo sapiens
  misc_feature: Table A; Target 10316; HLA-B*37:01; BPIFA2; ENSG00000131050; CTA
IINKFVNSV

SEQ ID NO: 10317 - protein, 9 aa, Homo sapiens
  misc_feature: Table A; Target 10317; HLA-B*40:02; BPIFA2; ENSG00000131050; CTA
IINKFVNSV

SEQ ID NO: 10318 - protein, 9 aa, Homo sapiens
  misc_feature: Table A; Target 10318; HLA-B*46:01; BPIFA2; ENSG00000131050; CTA
IINKFVNSV

SEQ ID NO: 10319 - protein, 9 aa, Homo sapiens
  misc_feature: Table A; Target 10319; HLA-B*49:01; BPIFA2; ENSG00000131050; CTA
IINKFVNSV

SEQ ID NO: 10320 - protein, 9 aa, Homo sapiens
  misc_feature: Table A; Target 10320; HLA-B*51:01; BPIFA2; ENSG00000131050; CTA
IINKFVNSV

SEQ ID NO: 10321 - protein, 9 aa, Homo sapiens
  misc_feature: Table A; Target 10321; HLA-B*54:01; BPIFA2; ENSG00000131050; CTA
IINKFVNSV

SEQ ID NO: 10322 - protein, 9 aa, Homo sapiens
  misc_feature: Table A; Target 10322; HLA-B*55:01; BPIFA2; ENSG00000131050; CTA
IINKFVNSV

SEQ ID NO: 10323 - protein, 9 aa, Homo sapiens
  misc_feature: Table A; Target 10323; HLA-B*58:01; BPIFA2; ENSG00000131050; CTA
IINKFVNSV

SEQ ID NO: 10324 - protein, 9 aa, Homo sapiens
  misc_feature: Table A; Target 10324; HLA-C*01:02; BPIFA2; ENSG00000131050; CTA
IINKFVNSV

SEQ ID NO: 10325 - protein, 9 aa, Homo sapiens
  misc_feature: Table A; Target 10325; HLA-C*02:02; BPIFA2; ENSG00000131050; CTA
IINKFVNSV

SEQ ID NO: 10326 - protein, 9 aa, Homo sapiens
  misc_feature: Table A; Target 10326; HLA-C*06:02; BPIFA2; ENSG00000131050; CTA
IINKFVNSV

SEQ ID NO: 10327 - protein, 9 aa, Homo sapiens
  misc_feature: Table A; Target 10327; HLA-C*12:03; BPIFA2; ENSG00000131050; CTA
IINKFVNSV

SEQ ID NO: 10328 - protein, 9 aa, Homo sapiens
  misc_feature: Table A; Target 10328; HLA-C*16:02; BPIFA2; ENSG00000131050; CTA
IINKFVNSV

SEQ ID NO: 10329 - protein, 8 aa, Homo sapiens
  misc_feature: Table A; Target 10329; HLA-A*32:01; BPIFA2; ENSG00000131050; CTA
IINLKASL

SEQ ID NO: 10330 - protein, 8 aa, Homo sapiens
  misc_feature: Table A; Target 10330; HLA-B*07:02; BPIFA2; ENSG00000131050; CTA
IINLKASL

SEQ ID NO: 10331 - protein, 8 aa, Homo sapiens
  misc_feature: Table A; Target 10331; HLA-B*08:01; BPIFA2; ENSG00000131050; CTA
IINLKASL

SEQ ID NO: 10332 - protein, 8 aa, Homo sapiens
  misc_feature: Table A; Target 10332; HLA-C*01:02; BPIFA2; ENSG00000131050; CTA
IINLKASL

SEQ ID NO: 10333 - protein, 8 aa, Homo sapiens
  misc_feature: Table A; Target 10333; HLA-C*07:02; BPIFA2; ENSG00000131050; CTA
IINLKASL

SEQ ID NO: 10334 - protein, 8 aa, Homo sapiens
  misc_feature: Table A; Target 10334; HLA-C*14:02; BPIFA2; ENSG00000131050; CTA
IINLKASL

SEQ ID NO: 10335 - protein, 8 aa, Homo sapiens
  misc_feature: Table A; Target 10335; HLA-C*16:01; BPIFA2; ENSG00000131050; CTA
IINLKASL

SEQ ID NO: 10336 - protein, 9 aa, Homo sapiens
  misc_feature: Table A; Target 10336; HLA-A*01:01; BPIFA2; ENSG00000131050; CTA
ILDVKAEPI

SEQ ID NO: 10337 - protein, 9 aa, Homo sapiens
  misc_feature: Table A; Target 10337; HLA-A*02:01; BPIFA2; ENSG00000131050; CTA
ILDVKAEPI

SEQ ID NO: 10338 - protein, 9 aa, Homo sapiens
  misc_feature: Table A; Target 10338; HLA-A*02:07; BPIFA2; ENSG00000131050; CTA
ILDVKAEPI

SEQ ID NO: 10339 - protein, 9 aa, Homo sapiens
  misc_feature: Table A; Target 10339; HLA-A*24:02; BPIFA2; ENSG00000131050; CTA
ILDVKAEPI

SEQ ID NO: 10340 - protein, 9 aa, Homo sapiens
  misc_feature: Table A; Target 10340; HLA-B*08:01; BPIFA2; ENSG00000131050; CTA
ILDVKAEPI

SEQ ID NO: 10341 - protein, 9 aa, Homo sapiens
  misc_feature: Table A; Target 10341; HLA-B*13:02; BPIFA2; ENSG00000131050; CTA
ILDVKAEPI

SEQ ID NO: 10342 - protein, 9 aa, Homo sapiens
  misc_feature: Table A; Target 10342; HLA-B*35:03; BPIFA2; ENSG00000131050; CTA
ILDVKAEPI

SEQ ID NO: 10343 - protein, 9 aa, Homo sapiens
  misc_feature: Table A; Target 10343; HLA-B*38:01; BPIFA2; ENSG00000131050; CTA
ILDVKAEPI

SEQ ID NO: 10344 - protein, 9 aa, Homo sapiens
  misc_feature: Table A; Target 10344; HLA-B*55:01; BPIFA2; ENSG00000131050; CTA
ILDVKAEPI

SEQ ID NO: 10345 - protein, 9 aa, Homo sapiens
  misc_feature: Table A; Target 10345; HLA-C*04:01; BPIFA2; ENSG00000131050; CTA
ILDVKAEPI

SEQ ID NO: 10346 - protein, 9 aa, Homo sapiens
  misc_feature: Table A; Target 10346; HLA-C*05:01; BPIFA2; ENSG00000131050; CTA
ILDVKAEPI

SEQ ID NO: 10347 - protein, 9 aa, Homo sapiens
  misc_feature: Table A; Target 10347; HLA-C*06:02; BPIFA2; ENSG00000131050; CTA
ILDVKAEPI

SEQ ID NO: 10348 - protein, 9 aa, Homo sapiens
  misc_feature: Table A; Target 10348; HLA-C*07:01; BPIFA2; ENSG00000131050; CTA
ILDVKAEPI

SEQ ID NO: 10349 - protein, 9 aa, Homo sapiens
  misc_feature: Table A; Target 10349; HLA-C*07:04; BPIFA2; ENSG00000131050; CTA
ILDVKAEPI

SEQ ID NO: 10350 - protein, 9 aa, Homo sapiens
  misc_feature: Table A; Target 10350; HLA-A*02:07; BPIFA2; ENSG00000131050; CTA
ILEKLKVDL

SEQ ID NO: 10351 - protein, 9 aa, Homo sapiens
  misc_feature: Table A; Target 10351; HLA-C*07:04; BPIFA2; ENSG00000131050; CTA
ILEKLKVDL

SEQ ID NO: 10352 - protein, 8 aa, Homo sapiens
  misc_feature: Table A; Target 10352; HLA-B*08:01; BPIFA2; ENSG00000131050; CTA
INKFVNSV

SEQ ID NO: 10353 - protein, 8 aa, Homo sapiens
  misc_feature: Table A; Target 10353; HLA-C*06:02; BPIFA2; ENSG00000131050; CTA
INKFVNSV

SEQ ID NO: 10354 - protein, 8 aa, Homo sapiens
  misc_feature: Table A; Target 10354; HLA-C*07:01; BPIFA2; ENSG00000131050; CTA
INKFVNSV

SEQ ID NO: 10355 - protein, 8 aa, Homo sapiens
  misc_feature: Table A; Target 10355; HLA-C*16:02; BPIFA2; ENSG00000131050; CTA
INKFVNSV

SEQ ID NO: 10356 - protein, 9 aa, Homo sapiens
  misc_feature: Table A; Target 10356; HLA-C*07:01; BPIFA2; ENSG00000131050; CTA
INKFVNSVI

SEQ ID NO: 10357 - protein, 9 aa, Homo sapiens
  misc_feature: Table A; Target 10357; HLA-C*07:02; BPIFA2; ENSG00000131050; CTA
INKFVNSVI

SEQ ID NO: 10358 - protein, 10 aa, Homo sapiens
  misc_feature: Table A; Target 10358; HLA-C*07:01; BPIFA2; ENSG00000131050; CTA
INKFVNSVIN

SEQ ID NO: 10359 - protein, 8 aa, Homo sapiens
  misc_feature: Table A; Target 10359; HLA-B*08:01; BPIFA2; ENSG00000131050; CTA
INTLKSTV

SEQ ID NO: 10360 - protein, 8 aa, Homo sapiens
  misc_feature: Table A; Target 10360; HLA-C*07:01; BPIFA2; ENSG00000131050; CTA
INTLKSTV

SEQ ID NO: 10361 - protein, 8 aa, Homo sapiens
  misc_feature: Table A; Target 10361; HLA-C*07:02; BPIFA2; ENSG00000131050; CTA
INTLKSTV

SEQ ID NO: 10362 - protein, 8 aa, Homo sapiens
  misc_feature: Table A; Target 10362; HLA-C*16:01; BPIFA2; ENSG00000131050; CTA
INTLKSTV

SEQ ID NO: 10363 - protein, 8 aa, Homo sapiens
  misc_feature: Table A; Target 10363; HLA-C*16:02; BPIFA2; ENSG00000131050; CTA
INTLKSTV

SEQ ID NO: 10364 - protein, 9 aa, Homo sapiens
  misc_feature: Table A; Target 10364; HLA-C*04:01; BPIFA2; ENSG00000131050; CTA
IQQVVDNPQ

SEQ ID NO: 10365 - protein, 10 aa, Homo sapiens
  misc_feature: Table A; Target 10365; HLA-C*04:01; BPIFA2; ENSG00000131050; CTA
IQQVVDNPQH

SEQ ID NO: 10366 - protein, 11 aa, Homo sapiens
  misc_feature: Table A; Target 10366; HLA-A*03:02; BPIFA2; ENSG00000131050; CTA
IQQVVDNPQHK

SEQ ID NO: 10367 - protein, 11 aa, Homo sapiens
  misc_feature: Table A; Target 10367; HLA-A*11:01; BPIFA2; ENSG00000131050; CTA
IQQVVDNPQHK

SEQ ID NO: 10368 - protein, 11 aa, Homo sapiens
  misc_feature: Table A; Target 10368; HLA-A*31:01; BPIFA2; ENSG00000131050; CTA
IQQVVDNPQHK

SEQ ID NO: 10369 - protein, 11 aa, Homo sapiens
  misc_feature: Table A; Target 10369; HLA-C*04:01; BPIFA2; ENSG00000131050; CTA
IQQVVDNPQHK

SEQ ID NO: 10370 - protein, 8 aa, Homo sapiens
  misc_feature: Table A; Target 10370; HLA-C*06:02; BPIFA2; ENSG00000131050; CTA
IRIFIHSL

SEQ ID NO: 10371 - protein, 8 aa, Homo sapiens
  misc_feature: Table A; Target 10371; HLA-C*06:02; BPIFA2; ENSG00000131050; CTA
ISKLLPTN

SEQ ID NO: 10372 - protein, 8 aa, Homo sapiens
  misc_feature: Table A; Target 10372; HLA-C*07:01; BPIFA2; ENSG00000131050; CTA
ISKLLPTN

SEQ ID NO: 10373 - protein, 9 aa, Homo sapiens
  misc_feature: Table A; Target 10373; HLA-C*06:02; BPIFA2; ENSG00000131050; CTA
ISKLLPTNT

SEQ ID NO: 10374 - protein, 8 aa, Homo sapiens
  misc_feature: Table A; Target 10374; HLA-A*11:01; BPIFA2; ENSG00000131050; CTA
ISLSLLDK

SEQ ID NO: 10375 - protein, 9 aa, Homo sapiens
  misc_feature: Table A; Target 10375; HLA-A*01:01; BPIFA2; ENSG00000131050; CTA
ISNSLILDV

SEQ ID NO: 10376 - protein, 9 aa, Homo sapiens
  misc_feature: Table A; Target 10376; HLA-A*02:01; BPIFA2; ENSG00000131050; CTA
ISNSLILDV

SEQ ID NO: 10377 - protein, 9 aa, Homo sapiens
  misc_feature: Table A; Target 10377; HLA-A*02:03; BPIFA2; ENSG00000131050; CTA
ISNSLILDV

SEQ ID NO: 10378 - protein, 9 aa, Homo sapiens
  misc_feature: Table A; Target 10378; HLA-A*02:04; BPIFA2; ENSG00000131050; CTA
ISNSLILDV

SEQ ID NO: 10379 - protein, 9 aa, Homo sapiens
  misc_feature: Table A; Target 10379; HLA-A*02:07; BPIFA2; ENSG00000131050; CTA
ISNSLILDV

SEQ ID NO: 10380 - protein, 9 aa, Homo sapiens
  misc_feature: Table A; Target 10380; HLA-A*03:01; BPIFA2; ENSG00000131050; CTA
ISNSLILDV

SEQ ID NO: 10381 - protein, 9 aa, Homo sapiens
  misc_feature: Table A; Target 10381; HLA-A*11:01; BPIFA2; ENSG00000131050; CTA
ISNSLILDV

SEQ ID NO: 10382 - protein, 9 aa, Homo sapiens
  misc_feature: Table A; Target 10382; HLA-A*30:01; BPIFA2; ENSG00000131050; CTA
ISNSLILDV

SEQ ID NO: 10383 - protein, 9 aa, Homo sapiens
  misc_feature: Table A; Target 10383; HLA-A*68:02; BPIFA2; ENSG00000131050; CTA
ISNSLILDV

SEQ ID NO: 10384 - protein, 9 aa, Homo sapiens
  misc_feature: Table A; Target 10384; HLA-B*13:02; BPIFA2; ENSG00000131050; CTA
ISNSLILDV

SEQ ID NO: 10385 - protein, 9 aa, Homo sapiens
  misc_feature: Table A; Target 10385; HLA-B*27:02; BPIFA2; ENSG00000131050; CTA
ISNSLILDV

SEQ ID NO: 10386 - protein, 9 aa, Homo sapiens
  misc_feature: Table A; Target 10386; HLA-B*40:02; BPIFA2; ENSG00000131050; CTA
ISNSLILDV

SEQ ID NO: 10387 - protein, 9 aa, Homo sapiens
  misc_feature: Table A; Target 10387; HLA-B*49:01; BPIFA2; ENSG00000131050; CTA
ISNSLILDV

SEQ ID NO: 10388 - protein, 9 aa, Homo sapiens
  misc_feature: Table A; Target 10388; HLA-B*51:01; BPIFA2; ENSG00000131050; CTA
ISNSLILDV

SEQ ID NO: 10389 - protein, 9 aa, Homo sapiens
  misc_feature: Table A; Target 10389; HLA-B*54:01; BPIFA2; ENSG00000131050; CTA
ISNSLILDV

SEQ ID NO: 10390 - protein, 9 aa, Homo sapiens
  misc_feature: Table A; Target 10390; HLA-B*56:01; BPIFA2; ENSG00000131050; CTA
ISNSLILDV

SEQ ID NO: 10391 - protein, 9 aa, Homo sapiens
  misc_feature: Table A; Target 10391; HLA-B*57:01; BPIFA2; ENSG00000131050; CTA
ISNSLILDV

SEQ ID NO: 10392 - protein, 9 aa, Homo sapiens
  misc_feature: Table A; Target 10392; HLA-B*58:01; BPIFA2; ENSG00000131050; CTA
ISNSLILDV

SEQ ID NO: 10393 - protein, 9 aa, Homo sapiens
  misc_feature: Table A; Target 10393; HLA-C*02:02; BPIFA2; ENSG00000131050; CTA
ISNSLILDV

SEQ ID NO: 10394 - protein, 9 aa, Homo sapiens
  misc_feature: Table A; Target 10394; HLA-C*04:01; BPIFA2; ENSG00000131050; CTA
ISNSLILDV

SEQ ID NO: 10395 - protein, 9 aa, Homo sapiens
  misc_feature: Table A; Target 10395; HLA-C*06:02; BPIFA2; ENSG00000131050; CTA
ISNSLILDV

SEQ ID NO: 10396 - protein, 9 aa, Homo sapiens
  misc_feature: Table A; Target 10396; HLA-C*07:01; BPIFA2; ENSG00000131050; CTA
ISNSLILDV

SEQ ID NO: 10397 - protein, 9 aa, Homo sapiens
  misc_feature: Table A; Target 10397; HLA-C*07:02; BPIFA2; ENSG00000131050; CTA
ISNSLILDV

SEQ ID NO: 10398 - protein, 9 aa, Homo sapiens
  misc_feature: Table A; Target 10398; HLA-C*12:03; BPIFA2; ENSG00000131050; CTA
ISNSLILDV

SEQ ID NO: 10399 - protein, 9 aa, Homo sapiens
  misc_feature: Table A; Target 10399; HLA-C*16:02; BPIFA2; ENSG00000131050; CTA
ISNSLILDV

SEQ ID NO: 10400 - protein, 9 aa, Homo sapiens
  misc_feature: Table A; Target 10400; HLA-C*16:04; BPIFA2; ENSG00000131050; CTA
ISNSLILDV

SEQ ID NO: 10401 - protein, 10 aa, Homo sapiens
  misc_feature: Table A; Target 10401; HLA-A*01:01; BPIFA2; ENSG00000131050; CTA
ISNSLILDVK

SEQ ID NO: 10402 - protein, 10 aa, Homo sapiens
  misc_feature: Table A; Target 10402; HLA-A*03:01; BPIFA2; ENSG00000131050; CTA
ISNSLILDVK

SEQ ID NO: 10403 - protein, 10 aa, Homo sapiens
  misc_feature: Table A; Target 10403; HLA-A*03:02; BPIFA2; ENSG00000131050; CTA
ISNSLILDVK

SEQ ID NO: 10404 - protein, 10 aa, Homo sapiens
  misc_feature: Table A; Target 10404; HLA-A*11:01; BPIFA2; ENSG00000131050; CTA
ISNSLILDVK

SEQ ID NO: 10405 - protein, 10 aa, Homo sapiens
  misc_feature: Table A; Target 10405; HLA-B*27:02; BPIFA2; ENSG00000131050; CTA
ISNSLILDVK

SEQ ID NO: 10406 - protein, 10 aa, Homo sapiens
  misc_feature: Table A; Target 10406; HLA-B*57:01; BPIFA2; ENSG00000131050; CTA
ISNSLILDVK

SEQ ID NO: 10407 - protein, 11 aa, Homo sapiens
  misc_feature: Table A; Target 10407; HLA-C*04:01; BPIFA2; ENSG00000131050; CTA
KAEPIDDGKGL

SEQ ID NO: 10408 - protein, 8 aa, Homo sapiens
  misc_feature: Table A; Target 10408; HLA-A*32:01; BPIFA2; ENSG00000131050; CTA
KAQEAEKL

SEQ ID NO: 10409 - protein, 8 aa, Homo sapiens
  misc_feature: Table A; Target 10409; HLA-B*58:01; BPIFA2; ENSG00000131050; CTA
KAQEAEKL

SEQ ID NO: 10410 - protein, 8 aa, Homo sapiens
  misc_feature: Table A; Target 10410; HLA-C*01:02; BPIFA2; ENSG00000131050; CTA
KAQEAEKL

SEQ ID NO: 10411 - protein, 8 aa, Homo sapiens
  misc_feature: Table A; Target 10411; HLA-C*03:04; BPIFA2; ENSG00000131050; CTA
KAQEAEKL

SEQ ID NO: 10412 - protein, 8 aa, Homo sapiens
  misc_feature: Table A; Target 10412; HLA-C*05:01; BPIFA2; ENSG00000131050; CTA
KAQEAEKL

SEQ ID NO: 10413 - protein, 8 aa, Homo sapiens
  misc_feature: Table A; Target 10413; HLA-C*06:02; BPIFA2; ENSG00000131050; CTA
KAQEAEKL

SEQ ID NO: 10414 - protein, 8 aa, Homo sapiens
  misc_feature: Table A; Target 10414; HLA-C*07:02; BPIFA2; ENSG00000131050; CTA
KAQEAEKL

SEQ ID NO: 10415 - protein, 8 aa, Homo sapiens
  misc_feature: Table A; Target 10415; HLA-C*16:01; BPIFA2; ENSG00000131050; CTA
KAQEAEKL

SEQ ID NO: 10416 - protein, 8 aa, Homo sapiens
  misc_feature: Table A; Target 10416; HLA-C*16:02; BPIFA2; ENSG00000131050; CTA
KAQEAEKL

SEQ ID NO: 10417 - protein, 9 aa, Homo sapiens
  misc_feature: Table A; Target 10417; HLA-A*31:01; BPIFA2; ENSG00000131050; CTA
KAQEAEKLL

SEQ ID NO: 10418 - protein, 9 aa, Homo sapiens
  misc_feature: Table A; Target 10418; HLA-A*32:01; BPIFA2; ENSG00000131050; CTA
KAQEAEKLL

SEQ ID NO: 10419 - protein, 9 aa, Homo sapiens
  misc_feature: Table A; Target 10419; HLA-B*07:02; BPIFA2; ENSG00000131050; CTA
KAQEAEKLL

SEQ ID NO: 10420 - protein, 9 aa, Homo sapiens
  misc_feature: Table A; Target 10420; HLA-B*15:01; BPIFA2; ENSG00000131050; CTA
KAQEAEKLL

SEQ ID NO: 10421 - protein, 9 aa, Homo sapiens
  misc_feature: Table A; Target 10421; HLA-B*38:01; BPIFA2; ENSG00000131050; CTA
KAQEAEKLL

SEQ ID NO: 10422 - protein, 9 aa, Homo sapiens
  misc_feature: Table A; Target 10422; HLA-B*40:01; BPIFA2; ENSG00000131050; CTA
KAQEAEKLL

SEQ ID NO: 10423 - protein, 9 aa, Homo sapiens
  misc_feature: Table A; Target 10423; HLA-B*40:02; BPIFA2; ENSG00000131050; CTA
KAQEAEKLL

SEQ ID NO: 10424 - protein, 9 aa, Homo sapiens
  misc_feature: Table A; Target 10424; HLA-B*57:01; BPIFA2; ENSG00000131050; CTA
KAQEAEKLL

SEQ ID NO: 10425 - protein, 9 aa, Homo sapiens
  misc_feature: Table A; Target 10425; HLA-B*58:01; BPIFA2; ENSG00000131050; CTA
KAQEAEKLL

SEQ ID NO: 10426 - protein, 9 aa, Homo sapiens
  misc_feature: Table A; Target 10426; HLA-C*01:02; BPIFA2; ENSG00000131050; CTA
KAQEAEKLL

SEQ ID NO: 10427 - protein, 9 aa, Homo sapiens
  misc_feature: Table A; Target 10427; HLA-C*03:03; BPIFA2; ENSG00000131050; CTA
KAQEAEKLL

SEQ ID NO: 10428 - protein, 9 aa, Homo sapiens
  misc_feature: Table A; Target 10428; HLA-C*03:04; BPIFA2; ENSG00000131050; CTA
KAQEAEKLL

SEQ ID NO: 10429 - protein, 9 aa, Homo sapiens
  misc_feature: Table A; Target 10429; HLA-C*04:01; BPIFA2; ENSG00000131050; CTA
KAQEAEKLL

SEQ ID NO: 10430 - protein, 9 aa, Homo sapiens
  misc_feature: Table A; Target 10430; HLA-C*05:01; BPIFA2; ENSG00000131050; CTA
KAQEAEKLL

SEQ ID NO: 10431 - protein, 9 aa, Homo sapiens
  misc_feature: Table A; Target 10431; HLA-C*06:02; BPIFA2; ENSG00000131050; CTA
KAQEAEKLL

SEQ ID NO: 10432 - protein, 9 aa, Homo sapiens
  misc_feature: Table A; Target 10432; HLA-C*07:01; BPIFA2; ENSG00000131050; CTA
KAQEAEKLL

SEQ ID NO: 10433 - protein, 9 aa, Homo sapiens
  misc_feature: Table A; Target 10433; HLA-C*07:04; BPIFA2; ENSG00000131050; CTA
KAQEAEKLL

SEQ ID NO: 10434 - protein, 9 aa, Homo sapiens
  misc_feature: Table A; Target 10434; HLA-C*12:03; BPIFA2; ENSG00000131050; CTA
KAQEAEKLL

SEQ ID NO: 10435 - protein, 9 aa, Homo sapiens
  misc_feature: Table A; Target 10435; HLA-C*16:01; BPIFA2; ENSG00000131050; CTA
KAQEAEKLL

SEQ ID NO: 10436 - protein, 9 aa, Homo sapiens
  misc_feature: Table A; Target 10436; HLA-C*16:02; BPIFA2; ENSG00000131050; CTA
KAQEAEKLL

SEQ ID NO: 10437 - protein, 9 aa, Homo sapiens
  misc_feature: Table A; Target 10437; HLA-C*16:04; BPIFA2; ENSG00000131050; CTA
KAQEAEKLL

SEQ ID NO: 10438 - protein, 10 aa, Homo sapiens
  misc_feature: Table A; Target 10438; HLA-C*06:02; BPIFA2; ENSG00000131050; CTA
KAQEAEKLLN

SEQ ID NO: 10439 - protein, 10 aa, Homo sapiens
  misc_feature: Table A; Target 10439; HLA-C*07:01; BPIFA2; ENSG00000131050; CTA
KAQEAEKLLN

SEQ ID NO: 10440 - protein, 10 aa, Homo sapiens
  misc_feature: Table A; Target 10440; HLA-C*16:02; BPIFA2; ENSG00000131050; CTA
KAQEAEKLLN

SEQ ID NO: 10441 - protein, 11 aa, Homo sapiens
  misc_feature: Table A; Target 10441; HLA-A*31:01; BPIFA2; ENSG00000131050; CTA
KAQEAEKLLNN

SEQ ID NO: 10442 - protein, 11 aa, Homo sapiens
  misc_feature: Table A; Target 10442; HLA-C*06:02; BPIFA2; ENSG00000131050; CTA
KAQEAEKLLNN

SEQ ID NO: 10443 - protein, 9 aa, Homo sapiens
  misc_feature: Table A; Target 10443; HLA-B*54:01; BPIFA2; ENSG00000131050; CTA
KASLDLLTA

SEQ ID NO: 10444 - protein, 9 aa, Homo sapiens
  misc_feature: Table A; Target 10444; HLA-B*56:01; BPIFA2; ENSG00000131050; CTA
KASLDLLTA

SEQ ID NO: 10445 - protein, 9 aa, Homo sapiens
  misc_feature: Table A; Target 10445; HLA-B*58:01; BPIFA2; ENSG00000131050; CTA
KASLDLLTA

SEQ ID NO: 10446 - protein, 9 aa, Homo sapiens
  misc_feature: Table A; Target 10446; HLA-C*03:04; BPIFA2; ENSG00000131050; CTA
KASLDLLTA

SEQ ID NO: 10447 - protein, 9 aa, Homo sapiens
  misc_feature: Table A; Target 10447; HLA-C*06:02; BPIFA2; ENSG00000131050; CTA
KASLDLLTA

SEQ ID NO: 10448 - protein, 9 aa, Homo sapiens
  misc_feature: Table A; Target 10448; HLA-C*16:02; BPIFA2; ENSG00000131050; CTA
KASLDLLTA

SEQ ID NO: 10449 - protein, 10 aa, Homo sapiens
  misc_feature: Table A; Target 10449; HLA-B*07:02; BPIFA2; ENSG00000131050; CTA
KASLDLLTAV

SEQ ID NO: 10450 - protein, 10 aa, Homo sapiens
  misc_feature: Table A; Target 10450; HLA-B*40:02; BPIFA2; ENSG00000131050; CTA
KASLDLLTAV

SEQ ID NO: 10451 - protein, 10 aa, Homo sapiens
  misc_feature: Table A; Target 10451; HLA-B*56:01; BPIFA2; ENSG00000131050; CTA
KASLDLLTAV

SEQ ID NO: 10452 - protein, 10 aa, Homo sapiens
  misc_feature: Table A; Target 10452; HLA-C*06:02; BPIFA2; ENSG00000131050; CTA
KASLDLLTAV

SEQ ID NO: 10453 - protein, 10 aa, Homo sapiens
  misc_feature: Table A; Target 10453; HLA-C*07:02; BPIFA2; ENSG00000131050; CTA
KASLDLLTAV

SEQ ID NO: 10454 - protein, 10 aa, Homo sapiens
  misc_feature: Table A; Target 10454; HLA-C*16:02; BPIFA2; ENSG00000131050; CTA
KASLDLLTAV

SEQ ID NO: 10455 - protein, 10 aa, Homo sapiens
  misc_feature: Table A; Target 10455; HLA-C*16:04; BPIFA2; ENSG00000131050; CTA
KASLDLLTAV

SEQ ID NO: 10456 - protein, 9 aa, Homo sapiens
  misc_feature: Table A; Target 10456; HLA-B*44:02; BPIFA2; ENSG00000131050; CTA
KEICPLIRI

SEQ ID NO: 10457 - protein, 9 aa, Homo sapiens
  misc_feature: Table A; Target 10457; HLA-B*44:03; BPIFA2; ENSG00000131050; CTA
KEICPLIRI

SEQ ID NO: 10458 - protein, 9 aa, Homo sapiens
  misc_feature: Table A; Target 10458; HLA-B*49:01; BPIFA2; ENSG00000131050; CTA
KEICPLIRI

SEQ ID NO: 10459 - protein, 10 aa, Homo sapiens
  misc_feature: Table A; Target 10459; HLA-B*44:02; BPIFA2; ENSG00000131050; CTA
KEICPLIRIF

SEQ ID NO: 10460 - protein, 10 aa, Homo sapiens
  misc_feature: Table A; Target 10460; HLA-A*23:01; BPIFA2; ENSG00000131050; CTA
KFVNSVINTL

SEQ ID NO: 10461 - protein, 10 aa, Homo sapiens
  misc_feature: Table A; Target 10461; HLA-A*24:02; BPIFA2; ENSG00000131050; CTA
KFVNSVINTL

SEQ ID NO: 10462 - protein, 10 aa, Homo sapiens
  misc_feature: Table A; Target 10462; HLA-A*30:01; BPIFA2; ENSG00000131050; CTA
KFVNSVINTL

SEQ ID NO: 10463 - protein, 10 aa, Homo sapiens
  misc_feature: Table A; Target 10463; HLA-B*07:02; BPIFA2; ENSG00000131050; CTA
KFVNSVINTL

SEQ ID NO: 10464 - protein, 10 aa, Homo sapiens
  misc_feature: Table A; Target 10464; HLA-B*15:03; BPIFA2; ENSG00000131050; CTA
KFVNSVINTL

SEQ ID NO: 10465 - protein, 10 aa, Homo sapiens
  misc_feature: Table A; Target 10465; HLA-B*40:01; BPIFA2; ENSG00000131050; CTA
KFVNSVINTL

SEQ ID NO: 10466 - protein, 10 aa, Homo sapiens
  misc_feature: Table A; Target 10466; HLA-B*40:02; BPIFA2; ENSG00000131050; CTA
KFVNSVINTL

SEQ ID NO: 10467 - protein, 10 aa, Homo sapiens
  misc_feature: Table A; Target 10467; HLA-B*58:01; BPIFA2; ENSG00000131050; CTA
KFVNSVINTL

SEQ ID NO: 10468 - protein, 10 aa, Homo sapiens
  misc_feature: Table A; Target 10468; HLA-C*01:02; BPIFA2; ENSG00000131050; CTA
KFVNSVINTL

SEQ ID NO: 10469 - protein, 10 aa, Homo sapiens
  misc_feature: Table A; Target 10469; HLA-C*04:01; BPIFA2; ENSG00000131050; CTA
KFVNSVINTL

SEQ ID NO: 10470 - protein, 10 aa, Homo sapiens
  misc_feature: Table A; Target 10470; HLA-C*06:02; BPIFA2; ENSG00000131050; CTA
KFVNSVINTL

SEQ ID NO: 10471 - protein, 10 aa, Homo sapiens
  misc_feature: Table A; Target 10471; HLA-C*07:02; BPIFA2; ENSG00000131050; CTA
KFVNSVINTL

SEQ ID NO: 10472 - protein, 10 aa, Homo sapiens
  misc_feature: Table A; Target 10472; HLA-C*07:04; BPIFA2; ENSG00000131050; CTA
KFVNSVINTL

SEQ ID NO: 10473 - protein, 10 aa, Homo sapiens
  misc_feature: Table A; Target 10473; HLA-C*12:03; BPIFA2; ENSG00000131050; CTA
KFVNSVINTL

SEQ ID NO: 10474 - protein, 10 aa, Homo sapiens
  misc_feature: Table A; Target 10474; HLA-C*14:02; BPIFA2; ENSG00000131050; CTA
KFVNSVINTL

SEQ ID NO: 10475 - protein, 10 aa, Homo sapiens
  misc_feature: Table A; Target 10475; HLA-C*16:01; BPIFA2; ENSG00000131050; CTA
KFVNSVINTL

SEQ ID NO: 10476 - protein, 10 aa, Homo sapiens
  misc_feature: Table A; Target 10476; HLA-C*16:02; BPIFA2; ENSG00000131050; CTA
KFVNSVINTL

SEQ ID NO: 10477 - protein, 11 aa, Homo sapiens
  misc_feature: Table A; Target 10477; HLA-A*23:01; BPIFA2; ENSG00000131050; CTA
KFVNSVINTLK

SEQ ID NO: 10478 - protein, 11 aa, Homo sapiens
  misc_feature: Table A; Target 10478; HLA-A*31:01; BPIFA2; ENSG00000131050; CTA
KFVNSVINTLK

SEQ ID NO: 10479 - protein, 11 aa, Homo sapiens
  misc_feature: Table A; Target 10479; HLA-C*04:01; BPIFA2; ENSG00000131050; CTA
KFVNSVINTLK

SEQ ID NO: 10480 - protein, 11 aa, Homo sapiens
  misc_feature: Table A; Target 10480; HLA-C*06:02; BPIFA2; ENSG00000131050; CTA
KFVNSVINTLK

SEQ ID NO: 10481 - protein, 11 aa, Homo sapiens
  misc_feature: Table A; Target 10481; HLA-C*07:01; BPIFA2; ENSG00000131050; CTA
KFVNSVINTLK

SEQ ID NO: 10482 - protein, 8 aa, Homo sapiens
  misc_feature: Table A; Target 10482; HLA-A*03:01; BPIFA2; ENSG00000131050; CTA
KHSQIINK

SEQ ID NO: 10483 - protein, 8 aa, Homo sapiens
  misc_feature: Table A; Target 10483; HLA-A*03:02; BPIFA2; ENSG00000131050; CTA
KHSQIINK

SEQ ID NO: 10484 - protein, 8 aa, Homo sapiens
  misc_feature: Table A; Target 10484; HLA-A*31:01; BPIFA2; ENSG00000131050; CTA
KHSQIINK

SEQ ID NO: 10485 - protein, 9 aa, Homo sapiens
  misc_feature: Table A; Target 10485; HLA-A*23:01; BPIFA2; ENSG00000131050; CTA
KHSQIINKF

SEQ ID NO: 10486 - protein, 9 aa, Homo sapiens
  misc_feature: Table A; Target 10486; HLA-A*24:02; BPIFA2; ENSG00000131050; CTA
KHSQIINKF

SEQ ID NO: 10487 - protein, 9 aa, Homo sapiens
  misc_feature: Table A; Target 10487; HLA-A*31:01; BPIFA2; ENSG00000131050; CTA
KHSQIINKF

SEQ ID NO: 10488 - protein, 9 aa, Homo sapiens
  misc_feature: Table A; Target 10488; HLA-A*32:01; BPIFA2; ENSG00000131050; CTA
KHSQIINKF

SEQ ID NO: 10489 - protein, 9 aa, Homo sapiens
  misc_feature: Table A; Target 10489; HLA-B*15:03; BPIFA2; ENSG00000131050; CTA
KHSQIINKF

SEQ ID NO: 10490 - protein, 9 aa, Homo sapiens
  misc_feature: Table A; Target 10490; HLA-B*27:05; BPIFA2; ENSG00000131050; CTA
KHSQIINKF

SEQ ID NO: 10491 - protein, 9 aa, Homo sapiens
  misc_feature: Table A; Target 10491; HLA-B*38:01; BPIFA2; ENSG00000131050; CTA
KHSQIINKF

SEQ ID NO: 10492 - protein, 9 aa, Homo sapiens
  misc_feature: Table A; Target 10492; HLA-B*44:02; BPIFA2; ENSG00000131050; CTA
KHSQIINKF

SEQ ID NO: 10493 - protein, 9 aa, Homo sapiens
  misc_feature: Table A; Target 10493; HLA-B*44:03; BPIFA2; ENSG00000131050; CTA
KHSQIINKF

SEQ ID NO: 10494 - protein, 9 aa, Homo sapiens
  misc_feature: Table A; Target 10494; HLA-B*57:01; BPIFA2; ENSG00000131050; CTA
KHSQIINKF

SEQ ID NO: 10495 - protein, 9 aa, Homo sapiens
  misc_feature: Table A; Target 10495; HLA-B*58:01; BPIFA2; ENSG00000131050; CTA
KHSQIINKF

SEQ ID NO: 10496 - protein, 9 aa, Homo sapiens
  misc_feature: Table A; Target 10496; HLA-C*02:02; BPIFA2; ENSG00000131050; CTA
KHSQIINKF

SEQ ID NO: 10497 - protein, 9 aa, Homo sapiens
  misc_feature: Table A; Target 10497; HLA-C*04:01; BPIFA2; ENSG00000131050; CTA
KHSQIINKF

SEQ ID NO: 10498 - protein, 9 aa, Homo sapiens
  misc_feature: Table A; Target 10498; HLA-C*06:02; BPIFA2; ENSG00000131050; CTA
KHSQIINKF

SEQ ID NO: 10499 - protein, 9 aa, Homo sapiens
  misc_feature: Table A; Target 10499; HLA-C*07:04; BPIFA2; ENSG00000131050; CTA
KHSQIINKF

SEQ ID NO: 10500 - protein, 9 aa, Homo sapiens
  misc_feature: Table A; Target 10500; HLA-C*12:03; BPIFA2; ENSG00000131050; CTA
KHSQIINKF

SEQ ID NO: 10501 - protein, 9 aa, Homo sapiens
  misc_feature: Table A; Target 10501; HLA-C*16:04; BPIFA2; ENSG00000131050; CTA
KHSQIINKF

SEQ ID NO: 10502 - protein, 10 aa, Homo sapiens
  misc_feature: Table A; Target 10502; HLA-A*02:03; BPIFA2; ENSG00000131050; CTA
KISNSLILDV

SEQ ID NO: 10503 - protein, 10 aa, Homo sapiens
  misc_feature: Table A; Target 10503; HLA-B*13:02; BPIFA2; ENSG00000131050; CTA
KISNSLILDV

SEQ ID NO: 10504 - protein, 10 aa, Homo sapiens
  misc_feature: Table A; Target 10504; HLA-C*06:02; BPIFA2; ENSG00000131050; CTA
KISNSLILDV

SEQ ID NO: 10505 - protein, 11 aa, Homo sapiens
  misc_feature: Table A; Target 10505; HLA-A*03:01; BPIFA2; ENSG00000131050; CTA
KISNSLILDVK

SEQ ID NO: 10506 - protein, 11 aa, Homo sapiens
  misc_feature: Table A; Target 10506; HLA-A*03:02; BPIFA2; ENSG00000131050; CTA
KISNSLILDVK

SEQ ID NO: 10507 - protein, 11 aa, Homo sapiens
  misc_feature: Table A; Target 10507; HLA-A*11:01; BPIFA2; ENSG00000131050; CTA
KISNSLILDVK

SEQ ID NO: 10508 - protein, 9 aa, Homo sapiens
  misc_feature: Table A; Target 10508; HLA-A*02:07; BPIFA2; ENSG00000131050; CTA
KLEPVLHEG

SEQ ID NO: 10509 - protein, 10 aa, Homo sapiens
  misc_feature: Table A; Target 10509; HLA-A*02:07; BPIFA2; ENSG00000131050; CTA
KLEPVLHEGL

SEQ ID NO: 10510 - protein, 9 aa, Homo sapiens
  misc_feature: Table A; Target 10510; HLA-A*02:03; BPIFA2; ENSG00000131050; CTA
KLKVDLGVL

SEQ ID NO: 10511 - protein, 9 aa, Homo sapiens
  misc_feature: Table A; Target 10511; HLA-A*02:04; BPIFA2; ENSG00000131050; CTA
KLKVDLGVL

SEQ ID NO: 10512 - protein, 9 aa, Homo sapiens
  misc_feature: Table A; Target 10512; HLA-A*03:01; BPIFA2; ENSG00000131050; CTA
KLKVDLGVL

SEQ ID NO: 10513 - protein, 9 aa, Homo sapiens
  misc_feature: Table A; Target 10513; HLA-B*40:02; BPIFA2; ENSG00000131050; CTA
KLKVDLGVL

SEQ ID NO: 10514 - protein, 9 aa, Homo sapiens
  misc_feature: Table A; Target 10514; HLA-C*04:01; BPIFA2; ENSG00000131050; CTA
KLKVDLGVL

SEQ ID NO: 10515 - protein, 11 aa, Homo sapiens
  misc_feature: Table A; Target 10515; HLA-A*03:01; BPIFA2; ENSG00000131050; CTA
KLKVDLGVLQK

SEQ ID NO: 10516 - protein, 11 aa, Homo sapiens
  misc_feature: Table A; Target 10516; HLA-A*03:02; BPIFA2; ENSG00000131050; CTA
KLKVDLGVLQK

SEQ ID NO: 10517 - protein, 11 aa, Homo sapiens
  misc_feature: Table A; Target 10517; HLA-A*31:01; BPIFA2; ENSG00000131050; CTA
KLKVDLGVLQK

SEQ ID NO: 10518 - protein, 9 aa, Homo sapiens
  misc_feature: Table A; Target 10518; HLA-A*02:01; BPIFA2; ENSG00000131050; CTA
KLLNNVISK

SEQ ID NO: 10519 - protein, 9 aa, Homo sapiens
  misc_feature: Table A; Target 10519; HLA-A*02:03; BPIFA2; ENSG00000131050; CTA
KLLNNVISK

SEQ ID NO: 10520 - protein, 9 aa, Homo sapiens
  misc_feature: Table A; Target 10520; HLA-A*02:04; BPIFA2; ENSG00000131050; CTA
KLLNNVISK

SEQ ID NO: 10521 - protein, 9 aa, Homo sapiens
  misc_feature: Table A; Target 10521; HLA-A*02:07; BPIFA2; ENSG00000131050; CTA
KLLNNVISK

SEQ ID NO: 10522 - protein, 9 aa, Homo sapiens
  misc_feature: Table A; Target 10522; HLA-A*03:01; BPIFA2; ENSG00000131050; CTA
KLLNNVISK

SEQ ID NO: 10523 - protein, 9 aa, Homo sapiens
  misc_feature: Table A; Target 10523; HLA-A*03:02; BPIFA2; ENSG00000131050; CTA
KLLNNVISK

SEQ ID NO: 10524 - protein, 9 aa, Homo sapiens
  misc_feature: Table A; Target 10524; HLA-A*11:01; BPIFA2; ENSG00000131050; CTA
KLLNNVISK

SEQ ID NO: 10525 - protein, 9 aa, Homo sapiens
  misc_feature: Table A; Target 10525; HLA-A*31:01; BPIFA2; ENSG00000131050; CTA
KLLNNVISK

SEQ ID NO: 10526 - protein, 9 aa, Homo sapiens
  misc_feature: Table A; Target 10526; HLA-A*32:01; BPIFA2; ENSG00000131050; CTA
KLLNNVISK

SEQ ID NO: 10527 - protein, 9 aa, Homo sapiens
  misc_feature: Table A; Target 10527; HLA-A*33:01; BPIFA2; ENSG00000131050; CTA
KLLNNVISK

SEQ ID NO: 10528 - protein, 9 aa, Homo sapiens
  misc_feature: Table A; Target 10528; HLA-B*13:02; BPIFA2; ENSG00000131050; CTA
KLLNNVISK

SEQ ID NO: 10529 - protein, 9 aa, Homo sapiens
  misc_feature: Table A; Target 10529; HLA-B*27:02; BPIFA2; ENSG00000131050; CTA
KLLNNVISK

SEQ ID NO: 10530 - protein, 9 aa, Homo sapiens
  misc_feature: Table A; Target 10530; HLA-B*27:05; BPIFA2; ENSG00000131050; CTA
KLLNNVISK

SEQ ID NO: 10531 - protein, 9 aa, Homo sapiens
  misc_feature: Table A; Target 10531; HLA-B*55:01; BPIFA2; ENSG00000131050; CTA
KLLNNVISK

SEQ ID NO: 10532 - protein, 9 aa, Homo sapiens
  misc_feature: Table A; Target 10532; HLA-B*57:01; BPIFA2; ENSG00000131050; CTA
KLLNNVISK

SEQ ID NO: 10533 - protein, 9 aa, Homo sapiens
  misc_feature: Table A; Target 10533; HLA-C*06:02; BPIFA2; ENSG00000131050; CTA
KLLNNVISK

SEQ ID NO: 10534 - protein, 9 aa, Homo sapiens
  misc_feature: Table A; Target 10534; HLA-C*07:01; BPIFA2; ENSG00000131050; CTA
KLLNNVISK

SEQ ID NO: 10535 - protein, 9 aa, Homo sapiens
  misc_feature: Table A; Target 10535; HLA-C*16:01; BPIFA2; ENSG00000131050; CTA
KLLNNVISK

SEQ ID NO: 10536 - protein, 10 aa, Homo sapiens
  misc_feature: Table A; Target 10536; HLA-A*02:01; BPIFA2; ENSG00000131050; CTA
KLLNNVISKL

SEQ ID NO: 10537 - protein, 10 aa, Homo sapiens
  misc_feature: Table A; Target 10537; HLA-A*02:03; BPIFA2; ENSG00000131050; CTA
KLLNNVISKL

SEQ ID NO: 10538 - protein, 10 aa, Homo sapiens
  misc_feature: Table A; Target 10538; HLA-A*02:04; BPIFA2; ENSG00000131050; CTA
KLLNNVISKL

SEQ ID NO: 10539 - protein, 10 aa, Homo sapiens
  misc_feature: Table A; Target 10539; HLA-A*02:07; BPIFA2; ENSG00000131050; CTA
KLLNNVISKL

SEQ ID NO: 10540 - protein, 10 aa, Homo sapiens
  misc_feature: Table A; Target 10540; HLA-A*03:01; BPIFA2; ENSG00000131050; CTA
KLLNNVISKL

SEQ ID NO: 10541 - protein, 10 aa, Homo sapiens
  misc_feature: Table A; Target 10541; HLA-A*03:02; BPIFA2; ENSG00000131050; CTA
KLLNNVISKL

SEQ ID NO: 10542 - protein, 10 aa, Homo sapiens
  misc_feature: Table A; Target 10542; HLA-A*31:01; BPIFA2; ENSG00000131050; CTA
KLLNNVISKL

SEQ ID NO: 10543 - protein, 11 aa, Homo sapiens
  misc_feature: Table A; Target 10543; HLA-A*02:01; BPIFA2; ENSG00000131050; CTA
KLLNNVISKLL

SEQ ID NO: 10544 - protein, 9 aa, Homo sapiens
  misc_feature: Table A; Target 10544; HLA-A*02:01; BPIFA2; ENSG00000131050; CTA
KLLPTNTDI

SEQ ID NO: 10545 - protein, 9 aa, Homo sapiens
  misc_feature: Table A; Target 10545; HLA-A*02:03; BPIFA2; ENSG00000131050; CTA
KLLPTNTDI

SEQ ID NO: 10546 - protein, 9 aa, Homo sapiens
  misc_feature: Table A; Target 10546; HLA-A*02:04; BPIFA2; ENSG00000131050; CTA
KLLPTNTDI

SEQ ID NO: 10547 - protein, 9 aa, Homo sapiens
  misc_feature: Table A; Target 10547; HLA-A*02:07; BPIFA2; ENSG00000131050; CTA
KLLPTNTDI

SEQ ID NO: 10548 - protein, 9 aa, Homo sapiens
  misc_feature: Table A; Target 10548; HLA-A*23:01; BPIFA2; ENSG00000131050; CTA
KLLPTNTDI

SEQ ID NO: 10549 - protein, 9 aa, Homo sapiens
  misc_feature: Table A; Target 10549; HLA-A*30:01; BPIFA2; ENSG00000131050; CTA
KLLPTNTDI

SEQ ID NO: 10550 - protein, 9 aa, Homo sapiens
  misc_feature: Table A; Target 10550; HLA-A*32:01; BPIFA2; ENSG00000131050; CTA
KLLPTNTDI

SEQ ID NO: 10551 - protein, 9 aa, Homo sapiens
  misc_feature: Table A; Target 10551; HLA-B*13:02; BPIFA2; ENSG00000131050; CTA
KLLPTNTDI

SEQ ID NO: 10552 - protein, 9 aa, Homo sapiens
  misc_feature: Table A; Target 10552; HLA-B*55:01; BPIFA2; ENSG00000131050; CTA
KLLPTNTDI

SEQ ID NO: 10553 - protein, 9 aa, Homo sapiens
  misc_feature: Table A; Target 10553; HLA-B*58:01; BPIFA2; ENSG00000131050; CTA
KLLPTNTDI

SEQ ID NO: 10554 - protein, 10 aa, Homo sapiens
  misc_feature: Table A; Target 10554; HLA-A*02:04; BPIFA2; ENSG00000131050; CTA
KLLPTNTDIF

SEQ ID NO: 10555 - protein, 10 aa, Homo sapiens
  misc_feature: Table A; Target 10555; HLA-A*23:01; BPIFA2; ENSG00000131050; CTA
KLLPTNTDIF

SEQ ID NO: 10556 - protein, 10 aa, Homo sapiens
  misc_feature: Table A; Target 10556; HLA-A*24:02; BPIFA2; ENSG00000131050; CTA
KLLPTNTDIF

SEQ ID NO: 10557 - protein, 10 aa, Homo sapiens
  misc_feature: Table A; Target 10557; HLA-A*30:02; BPIFA2; ENSG00000131050; CTA
KLLPTNTDIF

SEQ ID NO: 10558 - protein, 10 aa, Homo sapiens
  misc_feature: Table A; Target 10558; HLA-A*32:01; BPIFA2; ENSG00000131050; CTA
KLLPTNTDIF

SEQ ID NO: 10559 - protein, 10 aa, Homo sapiens
  misc_feature: Table A; Target 10559; HLA-B*15:01; BPIFA2; ENSG00000131050; CTA
KLLPTNTDIF

SEQ ID NO: 10560 - protein, 10 aa, Homo sapiens
  misc_feature: Table A; Target 10560; HLA-B*15:03; BPIFA2; ENSG00000131050; CTA
KLLPTNTDIF

SEQ ID NO: 10561 - protein, 10 aa, Homo sapiens
  misc_feature: Table A; Target 10561; HLA-B*57:01; BPIFA2; ENSG00000131050; CTA
KLLPTNTDIF

SEQ ID NO: 10562 - protein, 10 aa, Homo sapiens
  misc_feature: Table A; Target 10562; HLA-B*58:01; BPIFA2; ENSG00000131050; CTA
KLLPTNTDIF

SEQ ID NO: 10563 - protein, 10 aa, Homo sapiens
  misc_feature: Table A; Target 10563; HLA-C*07:01; BPIFA2; ENSG00000131050; CTA
KLLPTNTDIF

SEQ ID NO: 10564 - protein, 10 aa, Homo sapiens
  misc_feature: Table A; Target 10564; HLA-C*07:02; BPIFA2; ENSG00000131050; CTA
KLLPTNTDIF

SEQ ID NO: 10565 - protein, 10 aa, Homo sapiens
  misc_feature: Table A; Target 10565; HLA-C*12:03; BPIFA2; ENSG00000131050; CTA
KLLPTNTDIF

SEQ ID NO: 10566 - protein, 11 aa, Homo sapiens
  misc_feature: Table A; Target 10566; HLA-A*02:01; BPIFA2; ENSG00000131050; CTA
KLLPTNTDIFG

SEQ ID NO: 10567 - protein, 11 aa, Homo sapiens
  misc_feature: Table A; Target 10567; HLA-C*04:01; BPIFA2; ENSG00000131050; CTA
KLLPTNTDIFG

SEQ ID NO: 10568 - protein, 11 aa, Homo sapiens
  misc_feature: Table A; Target 10568; HLA-C*07:01; BPIFA2; ENSG00000131050; CTA
KLLPTNTDIFG

SEQ ID NO: 10569 - protein, 9 aa, Homo sapiens
  misc_feature: Table A; Target 10569; HLA-C*06:02; BPIFA2; ENSG00000131050; CTA
KLVLLCGVL

SEQ ID NO: 10570 - protein, 9 aa, Homo sapiens
  misc_feature: Table A; Target 10570; HLA-C*07:01; BPIFA2; ENSG00000131050; CTA
KLVLLCGVL

SEQ ID NO: 10571 - protein, 10 aa, Homo sapiens
  misc_feature: Table A; Target 10571; HLA-B*40:01; BPIFA2; ENSG00000131050; CTA
KQKAQEAEKL

SEQ ID NO: 10572 - protein, 10 aa, Homo sapiens
  misc_feature: Table A; Target 10572; HLA-B*40:02; BPIFA2; ENSG00000131050; CTA
KQKAQEAEKL

SEQ ID NO: 10573 - protein, 11 aa, Homo sapiens
  misc_feature: Table A; Target 10573; HLA-A*31:01; BPIFA2; ENSG00000131050; CTA
KQKAQEAEKLL

SEQ ID NO: 10574 - protein, 11 aa, Homo sapiens
  misc_feature: Table A; Target 10574; HLA-C*04:01; BPIFA2; ENSG00000131050; CTA
KQKAQEAEKLL

SEQ ID NO: 10575 - protein, 11 aa, Homo sapiens
  misc_feature: Table A; Target 10575; HLA-C*07:02; BPIFA2; ENSG00000131050; CTA
KQKAQEAEKLL

SEQ ID NO: 10576 - protein, 9 aa, Homo sapiens
  misc_feature: Table A; Target 10576; HLA-A*03:01; BPIFA2; ENSG00000131050; CTA
KSSAWQLAK

SEQ ID NO: 10577 - protein, 9 aa, Homo sapiens
  misc_feature: Table A; Target 10577; HLA-A*03:02; BPIFA2; ENSG00000131050; CTA
KSSAWQLAK

SEQ ID NO: 10578 - protein, 9 aa, Homo sapiens
  misc_feature: Table A; Target 10578; HLA-A*11:01; BPIFA2; ENSG00000131050; CTA
KSSAWQLAK

SEQ ID NO: 10579 - protein, 9 aa, Homo sapiens
  misc_feature: Table A; Target 10579; HLA-A*31:01; BPIFA2; ENSG00000131050; CTA
KSSAWQLAK

SEQ ID NO: 10580 - protein, 9 aa, Homo sapiens
  misc_feature: Table A; Target 10580; HLA-B*27:02; BPIFA2; ENSG00000131050; CTA
KSSAWQLAK

SEQ ID NO: 10581 - protein, 9 aa, Homo sapiens
  misc_feature: Table A; Target 10581; HLA-B*57:01; BPIFA2; ENSG00000131050; CTA
KSSAWQLAK

SEQ ID NO: 10582 - protein, 9 aa, Homo sapiens
  misc_feature: Table A; Target 10582; HLA-C*06:02; BPIFA2; ENSG00000131050; CTA
KSSAWQLAK

SEQ ID NO: 10583 - protein, 9 aa, Homo sapiens
  misc_feature: Table A; Target 10583; HLA-C*07:01; BPIFA2; ENSG00000131050; CTA
KSSAWQLAK

SEQ ID NO: 10584 - protein, 10 aa, Homo sapiens
  misc_feature: Table A; Target 10584; HLA-C*07:01; BPIFA2; ENSG00000131050; CTA
KSSAWQLAKQ

SEQ ID NO: 10585 - protein, 11 aa, Homo sapiens
  misc_feature: Table A; Target 10585; HLA-A*03:02; BPIFA2; ENSG00000131050; CTA
KSSAWQLAKQK

SEQ ID NO: 10586 - protein, 11 aa, Homo sapiens
  misc_feature: Table A; Target 10586; HLA-C*04:01; BPIFA2; ENSG00000131050; CTA
KSSAWQLAKQK

SEQ ID NO: 10587 - protein, 11 aa, Homo sapiens
  misc_feature: Table A; Target 10587; HLA-C*06:02; BPIFA2; ENSG00000131050; CTA
KSSAWQLAKQK

SEQ ID NO: 10588 - protein, 8 aa, Homo sapiens
  misc_feature: Table A; Target 10588; HLA-A*32:01; BPIFA2; ENSG00000131050; CTA
KSTVSSLL

SEQ ID NO: 10589 - protein, 8 aa, Homo sapiens
  misc_feature: Table A; Target 10589; HLA-B*07:02; BPIFA2; ENSG00000131050; CTA
KSTVSSLL

SEQ ID NO: 10590 - protein, 8 aa, Homo sapiens
  misc_feature: Table A; Target 10590; HLA-B*40:02; BPIFA2; ENSG00000131050; CTA
KSTVSSLL

SEQ ID NO: 10591 - protein, 8 aa, Homo sapiens
  misc_feature: Table A; Target 10591; HLA-B*57:01; BPIFA2; ENSG00000131050; CTA
KSTVSSLL

SEQ ID NO: 10592 - protein, 8 aa, Homo sapiens
  misc_feature: Table A; Target 10592; HLA-B*58:01; BPIFA2; ENSG00000131050; CTA
KSTVSSLL

SEQ ID NO: 10593 - protein, 8 aa, Homo sapiens
  misc_feature: Table A; Target 10593; HLA-C*03:03; BPIFA2; ENSG00000131050; CTA
KSTVSSLL

SEQ ID NO: 10594 - protein, 8 aa, Homo sapiens
  misc_feature: Table A; Target 10594; HLA-C*03:04; BPIFA2; ENSG00000131050; CTA
KSTVSSLL

SEQ ID NO: 10595 - protein, 8 aa, Homo sapiens
  misc_feature: Table A; Target 10595; HLA-C*04:01; BPIFA2; ENSG00000131050; CTA
KSTVSSLL

SEQ ID NO: 10596 - protein, 8 aa, Homo sapiens
  misc_feature: Table A; Target 10596; HLA-C*06:02; BPIFA2; ENSG00000131050; CTA
KSTVSSLL

SEQ ID NO: 10597 - protein, 8 aa, Homo sapiens
  misc_feature: Table A; Target 10597; HLA-C*07:01; BPIFA2; ENSG00000131050; CTA
KSTVSSLL

SEQ ID NO: 10598 - protein, 8 aa, Homo sapiens
  misc_feature: Table A; Target 10598; HLA-C*07:02; BPIFA2; ENSG00000131050; CTA
KSTVSSLL

SEQ ID NO: 10599 - protein, 8 aa, Homo sapiens
  misc_feature: Table A; Target 10599; HLA-C*07:04; BPIFA2; ENSG00000131050; CTA
KSTVSSLL

SEQ ID NO: 10600 - protein, 8 aa, Homo sapiens
  misc_feature: Table A; Target 10600; HLA-C*16:01; BPIFA2; ENSG00000131050; CTA
KSTVSSLL

SEQ ID NO: 10601 - protein, 8 aa, Homo sapiens
  misc_feature: Table A; Target 10601; HLA-C*16:02; BPIFA2; ENSG00000131050; CTA
KSTVSSLL

SEQ ID NO: 10602 - protein, 9 aa, Homo sapiens
  misc_feature: Table A; Target 10602; HLA-C*06:02; BPIFA2; ENSG00000131050; CTA
KSTVSSLLQ

SEQ ID NO: 10603 - protein, 9 aa, Homo sapiens
  misc_feature: Table A; Target 10603; HLA-C*07:01; BPIFA2; ENSG00000131050; CTA
KSTVSSLLQ

SEQ ID NO: 10604 - protein, 10 aa, Homo sapiens
  misc_feature: Table A; Target 10604; HLA-A*03:01; BPIFA2; ENSG00000131050; CTA
KSTVSSLLQK

SEQ ID NO: 10605 - protein, 10 aa, Homo sapiens
  misc_feature: Table A; Target 10605; HLA-A*03:02; BPIFA2; ENSG00000131050; CTA
KSTVSSLLQK

SEQ ID NO: 10606 - protein, 10 aa, Homo sapiens
  misc_feature: Table A; Target 10606; HLA-A*11:01; BPIFA2; ENSG00000131050; CTA
KSTVSSLLQK

SEQ ID NO: 10607 - protein, 10 aa, Homo sapiens
  misc_feature: Table A; Target 10607; HLA-C*07:02; BPIFA2; ENSG00000131050; CTA
KSTVSSLLQK

SEQ ID NO: 10608 - protein, 8 aa, Homo sapiens
  misc_feature: Table A; Target 10608; HLA-C*04:01; BPIFA2; ENSG00000131050; CTA
KVDLGVLQ

SEQ ID NO: 10609 - protein, 9 aa, Homo sapiens
  misc_feature: Table A; Target 10609; HLA-A*01:01; BPIFA2; ENSG00000131050; CTA
KVDLGVLQK

SEQ ID NO: 10610 - protein, 9 aa, Homo sapiens
  misc_feature: Table A; Target 10610; HLA-A*02:07; BPIFA2; ENSG00000131050; CTA
KVDLGVLQK

SEQ ID NO: 10611 - protein, 9 aa, Homo sapiens
  misc_feature: Table A; Target 10611; HLA-A*03:01; BPIFA2; ENSG00000131050; CTA
KVDLGVLQK

SEQ ID NO: 10612 - protein, 9 aa, Homo sapiens
  misc_feature: Table A; Target 10612; HLA-A*03:02; BPIFA2; ENSG00000131050; CTA
KVDLGVLQK

SEQ ID NO: 10613 - protein, 9 aa, Homo sapiens
  misc_feature: Table A; Target 10613; HLA-A*11:01; BPIFA2; ENSG00000131050; CTA
KVDLGVLQK

SEQ ID NO: 10614 - protein, 9 aa, Homo sapiens
  misc_feature: Table A; Target 10614; HLA-A*31:01; BPIFA2; ENSG00000131050; CTA
KVDLGVLQK

SEQ ID NO: 10615 - protein, 9 aa, Homo sapiens
  misc_feature: Table A; Target 10615; HLA-A*32:01; BPIFA2; ENSG00000131050; CTA
KVDLGVLQK

SEQ ID NO: 10616 - protein, 9 aa, Homo sapiens
  misc_feature: Table A; Target 10616; HLA-A*33:03; BPIFA2; ENSG00000131050; CTA
KVDLGVLQK

SEQ ID NO: 10617 - protein, 9 aa, Homo sapiens
  misc_feature: Table A; Target 10617; HLA-A*68:01; BPIFA2; ENSG00000131050; CTA
KVDLGVLQK

SEQ ID NO: 10618 - protein, 9 aa, Homo sapiens
  misc_feature: Table A; Target 10618; HLA-B*07:02; BPIFA2; ENSG00000131050; CTA
KVDLGVLQK

SEQ ID NO: 10619 - protein, 9 aa, Homo sapiens
  misc_feature: Table A; Target 10619; HLA-B*13:02; BPIFA2; ENSG00000131050; CTA
KVDLGVLQK

SEQ ID NO: 10620 - protein, 9 aa, Homo sapiens
  misc_feature: Table A; Target 10620; HLA-B*27:02; BPIFA2; ENSG00000131050; CTA
KVDLGVLQK

SEQ ID NO: 10621 - protein, 9 aa, Homo sapiens
  misc_feature: Table A; Target 10621; HLA-B*27:05; BPIFA2; ENSG00000131050; CTA
KVDLGVLQK

SEQ ID NO: 10622 - protein, 9 aa, Homo sapiens
  misc_feature: Table A; Target 10622; HLA-B*40:02; BPIFA2; ENSG00000131050; CTA
KVDLGVLQK

SEQ ID NO: 10623 - protein, 9 aa, Homo sapiens
  misc_feature: Table A; Target 10623; HLA-B*57:01; BPIFA2; ENSG00000131050; CTA
KVDLGVLQK

SEQ ID NO: 10624 - protein, 9 aa, Homo sapiens
  misc_feature: Table A; Target 10624; HLA-B*58:01; BPIFA2; ENSG00000131050; CTA
KVDLGVLQK

SEQ ID NO: 10625 - protein, 9 aa, Homo sapiens
  misc_feature: Table A; Target 10625; HLA-C*01:02; BPIFA2; ENSG00000131050; CTA
KVDLGVLQK

SEQ ID NO: 10626 - protein, 9 aa, Homo sapiens
  misc_feature: Table A; Target 10626; HLA-C*04:01; BPIFA2; ENSG00000131050; CTA
KVDLGVLQK

SEQ ID NO: 10627 - protein, 9 aa, Homo sapiens
  misc_feature: Table A; Target 10627; HLA-C*05:01; BPIFA2; ENSG00000131050; CTA
KVDLGVLQK

SEQ ID NO: 10628 - protein, 9 aa, Homo sapiens
  misc_feature: Table A; Target 10628; HLA-C*06:02; BPIFA2; ENSG00000131050; CTA
KVDLGVLQK

SEQ ID NO: 10629 - protein, 9 aa, Homo sapiens
  misc_feature: Table A; Target 10629; HLA-C*07:01; BPIFA2; ENSG00000131050; CTA
KVDLGVLQK

SEQ ID NO: 10630 - protein, 9 aa, Homo sapiens
  misc_feature: Table A; Target 10630; HLA-C*07:04; BPIFA2; ENSG00000131050; CTA
KVDLGVLQK

SEQ ID NO: 10631 - protein, 9 aa, Homo sapiens
  misc_feature: Table A; Target 10631; HLA-C*07:06; BPIFA2; ENSG00000131050; CTA
KVDLGVLQK

SEQ ID NO: 10632 - protein, 9 aa, Homo sapiens
  misc_feature: Table A; Target 10632; HLA-C*12:03; BPIFA2; ENSG00000131050; CTA
KVDLGVLQK

SEQ ID NO: 10633 - protein, 9 aa, Homo sapiens
  misc_feature: Table A; Target 10633; HLA-C*16:02; BPIFA2; ENSG00000131050; CTA
KVDLGVLQK

SEQ ID NO: 10634 - protein, 10 aa, Homo sapiens
  misc_feature: Table A; Target 10634; HLA-C*04:01; BPIFA2; ENSG00000131050; CTA
KVDLGVLQKS

SEQ ID NO: 10635 - protein, 10 aa, Homo sapiens
  misc_feature: Table A; Target 10635; HLA-C*06:02; BPIFA2; ENSG00000131050; CTA
KVDLGVLQKS

SEQ ID NO: 10636 - protein, 10 aa, Homo sapiens
  misc_feature: Table A; Target 10636; HLA-C*07:02; BPIFA2; ENSG00000131050; CTA
KVDLGVLQKS

SEQ ID NO: 10637 - protein, 11 aa, Homo sapiens
  misc_feature: Table A; Target 10637; HLA-C*04:01; BPIFA2; ENSG00000131050; CTA
KVDLGVLQKSS

SEQ ID NO: 10638 - protein, 9 aa, Homo sapiens
  misc_feature: Table A; Target 10638; HLA-B*08:01; BPIFA2; ENSG00000131050; CTA
LAKQKAQEA

SEQ ID NO: 10639 - protein, 9 aa, Homo sapiens
  misc_feature: Table A; Target 10639; HLA-B*46:01; BPIFA2; ENSG00000131050; CTA
LAKQKAQEA

SEQ ID NO: 10640 - protein, 9 aa, Homo sapiens
  misc_feature: Table A; Target 10640; HLA-B*54:01; BPIFA2; ENSG00000131050; CTA
LAKQKAQEA

SEQ ID NO: 10641 - protein, 8 aa, Homo sapiens
  misc_feature: Table A; Target 10641; HLA-C*07:01; BPIFA2; ENSG00000131050; CTA
LDKHSQII

SEQ ID NO: 10642 - protein, 8 aa, Homo sapiens
  misc_feature: Table A; Target 10642; HLA-C*12:03; BPIFA2; ENSG00000131050; CTA
LDKHSQII

SEQ ID NO: 10643 - protein, 10 aa, Homo sapiens
  misc_feature: Table A; Target 10643; HLA-C*04:01; BPIFA2; ENSG00000131050; CTA
LDKHSQIINK

SEQ ID NO: 10644 - protein, 9 aa, Homo sapiens
  misc_feature: Table A; Target 10644; HLA-A*23:01; BPIFA2; ENSG00000131050; CTA
LDLLTAVTI

SEQ ID NO: 10645 - protein, 9 aa, Homo sapiens
  misc_feature: Table A; Target 10645; HLA-A*30:01; BPIFA2; ENSG00000131050; CTA
LDLLTAVTI

SEQ ID NO: 10646 - protein, 9 aa, Homo sapiens
  misc_feature: Table A; Target 10646; HLA-B*13:02; BPIFA2; ENSG00000131050; CTA
LDLLTAVTI

SEQ ID NO: 10647 - protein, 9 aa, Homo sapiens
  misc_feature: Table A; Target 10647; HLA-B*37:01; BPIFA2; ENSG00000131050; CTA
LDLLTAVTI

SEQ ID NO: 10648 - protein, 9 aa, Homo sapiens
  misc_feature: Table A; Target 10648; HLA-B*40:02; BPIFA2; ENSG00000131050; CTA
LDLLTAVTI

SEQ ID NO: 10649 - protein, 9 aa, Homo sapiens
  misc_feature: Table A; Target 10649; HLA-B*49:01; BPIFA2; ENSG00000131050; CTA
LDLLTAVTI

SEQ ID NO: 10650 - protein, 9 aa, Homo sapiens
  misc_feature: Table A; Target 10650; HLA-B*51:01; BPIFA2; ENSG00000131050; CTA
LDLLTAVTI

SEQ ID NO: 10651 - protein, 9 aa, Homo sapiens
  misc_feature: Table A; Target 10651; HLA-C*04:01; BPIFA2; ENSG00000131050; CTA
LDLLTAVTI

SEQ ID NO: 10652 - protein, 9 aa, Homo sapiens
  misc_feature: Table A; Target 10652; HLA-C*07:01; BPIFA2; ENSG00000131050; CTA
LDLLTAVTI

SEQ ID NO: 10653 - protein, 9 aa, Homo sapiens
  misc_feature: Table A; Target 10653; HLA-C*07:04; BPIFA2; ENSG00000131050; CTA
LDLLTAVTI

SEQ ID NO: 10654 - protein, 8 aa, Homo sapiens
  misc_feature: Table A; Target 10654; HLA-B*37:01; BPIFA2; ENSG00000131050; CTA
LDNLGNDL

SEQ ID NO: 10655 - protein, 8 aa, Homo sapiens
  misc_feature: Table A; Target 10655; HLA-B*40:02; BPIFA2; ENSG00000131050; CTA
LDNLGNDL

SEQ ID NO: 10656 - protein, 8 aa, Homo sapiens
  misc_feature: Table A; Target 10656; HLA-C*01:02; BPIFA2; ENSG00000131050; CTA
LDNLGNDL

SEQ ID NO: 10657 - protein, 8 aa, Homo sapiens
  misc_feature: Table A; Target 10657; HLA-C*03:04; BPIFA2; ENSG00000131050; CTA
LDNLGNDL

SEQ ID NO: 10658 - protein, 8 aa, Homo sapiens
  misc_feature: Table A; Target 10658; HLA-C*06:02; BPIFA2; ENSG00000131050; CTA
LDNLGNDL

SEQ ID NO: 10659 - protein, 8 aa, Homo sapiens
  misc_feature: Table A; Target 10659; HLA-C*07:01; BPIFA2; ENSG00000131050; CTA
LDNLGNDL

SEQ ID NO: 10660 - protein, 8 aa, Homo sapiens
  misc_feature: Table A; Target 10660; HLA-C*07:04; BPIFA2; ENSG00000131050; CTA
LDNLGNDL

SEQ ID NO: 10661 - protein, 10 aa, Homo sapiens
  misc_feature: Table A; Target 10661; HLA-C*04:01; BPIFA2; ENSG00000131050; CTA
LDNLGNDLSN

SEQ ID NO: 10662 - protein, 10 aa, Homo sapiens
  misc_feature: Table A; Target 10662; HLA-C*07:01; BPIFA2; ENSG00000131050; CTA
LDNLGNDLSN

SEQ ID NO: 10663 - protein, 8 aa, Homo sapiens
  misc_feature: Table A; Target 10663; HLA-B*18:01; BPIFA2; ENSG00000131050; CTA
LDVKAEPI

SEQ ID NO: 10664 - protein, 8 aa, Homo sapiens
  misc_feature: Table A; Target 10664; HLA-B*37:01; BPIFA2; ENSG00000131050; CTA
LDVKAEPI

SEQ ID NO: 10665 - protein, 8 aa, Homo sapiens
  misc_feature: Table A; Target 10665; HLA-B*40:02; BPIFA2; ENSG00000131050; CTA
LDVKAEPI

SEQ ID NO: 10666 - protein, 8 aa, Homo sapiens
  misc_feature: Table A; Target 10666; HLA-C*04:01; BPIFA2; ENSG00000131050; CTA
LDVKAEPI

SEQ ID NO: 10667 - protein, 8 aa, Homo sapiens
  misc_feature: Table A; Target 10667; HLA-C*06:02; BPIFA2; ENSG00000131050; CTA
LDVKAEPI

SEQ ID NO: 10668 - protein, 8 aa, Homo sapiens
  misc_feature: Table A; Target 10668; HLA-C*07:01; BPIFA2; ENSG00000131050; CTA
LDVKAEPI

SEQ ID NO: 10669 - protein, 8 aa, Homo sapiens
  misc_feature: Table A; Target 10669; HLA-C*07:04; BPIFA2; ENSG00000131050; CTA
LDVKAEPI

SEQ ID NO: 10670 - protein, 8 aa, Homo sapiens
  misc_feature: Table A; Target 10670; HLA-B*40:02; BPIFA2; ENSG00000131050; CTA
LDVNVIQQ

SEQ ID NO: 10671 - protein, 8 aa, Homo sapiens
  misc_feature: Table A; Target 10671; HLA-C*04:01; BPIFA2; ENSG00000131050; CTA
LDVNVIQQ

SEQ ID NO: 10672 - protein, 8 aa, Homo sapiens
  misc_feature: Table A; Target 10672; HLA-C*06:02; BPIFA2; ENSG00000131050; CTA
LDVNVIQQ

SEQ ID NO: 10673 - protein, 8 aa, Homo sapiens
  misc_feature: Table A; Target 10673; HLA-C*07:01; BPIFA2; ENSG00000131050; CTA
LDVNVIQQ

SEQ ID NO: 10674 - protein, 8 aa, Homo sapiens
  misc_feature: Table A; Target 10674; HLA-C*07:04; BPIFA2; ENSG00000131050; CTA
LDVNVIQQ

SEQ ID NO: 10675 - protein, 8 aa, Homo sapiens
  misc_feature: Table A; Target 10675; HLA-C*12:03; BPIFA2; ENSG00000131050; CTA
LDVNVIQQ

SEQ ID NO: 10676 - protein, 9 aa, Homo sapiens
  misc_feature: Table A; Target 10676; HLA-A*02:01; BPIFA2; ENSG00000131050; CTA
LDVNVIQQV

SEQ ID NO: 10677 - protein, 9 aa, Homo sapiens
  misc_feature: Table A; Target 10677; HLA-A*02:03; BPIFA2; ENSG00000131050; CTA
LDVNVIQQV

SEQ ID NO: 10678 - protein, 9 aa, Homo sapiens
  misc_feature: Table A; Target 10678; HLA-A*02:04; BPIFA2; ENSG00000131050; CTA
LDVNVIQQV

SEQ ID NO: 10679 - protein, 9 aa, Homo sapiens
  misc_feature: Table A; Target 10679; HLA-A*02:07; BPIFA2; ENSG00000131050; CTA
LDVNVIQQV

SEQ ID NO: 10680 - protein, 9 aa, Homo sapiens
  misc_feature: Table A; Target 10680; HLA-A*23:01; BPIFA2; ENSG00000131050; CTA
LDVNVIQQV

SEQ ID NO: 10681 - protein, 9 aa, Homo sapiens
  misc_feature: Table A; Target 10681; HLA-A*30:01; BPIFA2; ENSG00000131050; CTA
LDVNVIQQV

SEQ ID NO: 10682 - protein, 9 aa, Homo sapiens
  misc_feature: Table A; Target 10682; HLA-A*68:01; BPIFA2; ENSG00000131050; CTA
LDVNVIQQV

SEQ ID NO: 10683 - protein, 9 aa, Homo sapiens
  misc_feature: Table A; Target 10683; HLA-A*68:02; BPIFA2; ENSG00000131050; CTA
LDVNVIQQV

SEQ ID NO: 10684 - protein, 9 aa, Homo sapiens
  misc_feature: Table A; Target 10684; HLA-B*07:02; BPIFA2; ENSG00000131050; CTA
LDVNVIQQV

SEQ ID NO: 10685 - protein, 9 aa, Homo sapiens
  misc_feature: Table A; Target 10685; HLA-B*13:02; BPIFA2; ENSG00000131050; CTA
LDVNVIQQV

SEQ ID NO: 10686 - protein, 9 aa, Homo sapiens
  misc_feature: Table A; Target 10686; HLA-B*27:02; BPIFA2; ENSG00000131050; CTA
LDVNVIQQV

SEQ ID NO: 10687 - protein, 9 aa, Homo sapiens
  misc_feature: Table A; Target 10687; HLA-B*37:01; BPIFA2; ENSG00000131050; CTA
LDVNVIQQV

SEQ ID NO: 10688 - protein, 9 aa, Homo sapiens
  misc_feature: Table A; Target 10688; HLA-B*38:01; BPIFA2; ENSG00000131050; CTA
LDVNVIQQV

SEQ ID NO: 10689 - protein, 9 aa, Homo sapiens
  misc_feature: Table A; Target 10689; HLA-B*40:02; BPIFA2; ENSG00000131050; CTA
LDVNVIQQV

SEQ ID NO: 10690 - protein, 9 aa, Homo sapiens
  misc_feature: Table A; Target 10690; HLA-B*44:02; BPIFA2; ENSG00000131050; CTA
LDVNVIQQV

SEQ ID NO: 10691 - protein, 9 aa, Homo sapiens
  misc_feature: Table A; Target 10691; HLA-B*44:03; BPIFA2; ENSG00000131050; CTA
LDVNVIQQV

SEQ ID NO: 10692 - protein, 9 aa, Homo sapiens
  misc_feature: Table A; Target 10692; HLA-B*49:01; BPIFA2; ENSG00000131050; CTA
LDVNVIQQV

SEQ ID NO: 10693 - protein, 9 aa, Homo sapiens
  misc_feature: Table A; Target 10693; HLA-B*51:01; BPIFA2; ENSG00000131050; CTA
LDVNVIQQV

SEQ ID NO: 10694 - protein, 9 aa, Homo sapiens
  misc_feature: Table A; Target 10694; HLA-B*55:01; BPIFA2; ENSG00000131050; CTA
LDVNVIQQV

SEQ ID NO: 10695 - protein, 9 aa, Homo sapiens
  misc_feature: Table A; Target 10695; HLA-B*56:01; BPIFA2; ENSG00000131050; CTA
LDVNVIQQV

SEQ ID NO: 10696 - protein, 9 aa, Homo sapiens
  misc_feature: Table A; Target 10696; HLA-C*02:02; BPIFA2; ENSG00000131050; CTA
LDVNVIQQV

SEQ ID NO: 10697 - protein, 9 aa, Homo sapiens
  misc_feature: Table A; Target 10697; HLA-C*04:01; BPIFA2; ENSG00000131050; CTA
LDVNVIQQV

SEQ ID NO: 10698 - protein, 9 aa, Homo sapiens
  misc_feature: Table A; Target 10698; HLA-C*06:02; BPIFA2; ENSG00000131050; CTA
LDVNVIQQV

SEQ ID NO: 10699 - protein, 9 aa, Homo sapiens
  misc_feature: Table A; Target 10699; HLA-C*07:01; BPIFA2; ENSG00000131050; CTA
LDVNVIQQV

SEQ ID NO: 10700 - protein, 9 aa, Homo sapiens
  misc_feature: Table A; Target 10700; HLA-C*07:02; BPIFA2; ENSG00000131050; CTA
LDVNVIQQV

SEQ ID NO: 10701 - protein, 9 aa, Homo sapiens
  misc_feature: Table A; Target 10701; HLA-C*07:04; BPIFA2; ENSG00000131050; CTA
LDVNVIQQV

SEQ ID NO: 10702 - protein, 9 aa, Homo sapiens
  misc_feature: Table A; Target 10702; HLA-C*12:03; BPIFA2; ENSG00000131050; CTA
LDVNVIQQV

SEQ ID NO: 10703 - protein, 9 aa, Homo sapiens
  misc_feature: Table A; Target 10703; HLA-C*16:02; BPIFA2; ENSG00000131050; CTA
LDVNVIQQV

SEQ ID NO: 10704 - protein, 9 aa, Homo sapiens
  misc_feature: Table A; Target 10704; HLA-C*16:04; BPIFA2; ENSG00000131050; CTA
LDVNVIQQV

SEQ ID NO: 10705 - protein, 10 aa, Homo sapiens
  misc_feature: Table A; Target 10705; HLA-A*68:02; BPIFA2; ENSG00000131050; CTA
LDVNVIQQVV

SEQ ID NO: 10706 - protein, 10 aa, Homo sapiens
  misc_feature: Table A; Target 10706; HLA-C*06:02; BPIFA2; ENSG00000131050; CTA
LDVNVIQQVV

SEQ ID NO: 10707 - protein, 10 aa, Homo sapiens
  misc_feature: Table A; Target 10707; HLA-C*07:01; BPIFA2; ENSG00000131050; CTA
LDVNVIQQVV

SEQ ID NO: 10708 - protein, 8 aa, Homo sapiens
  misc_feature: Table A; Target 10708; HLA-B*08:01; BPIFA2; ENSG00000131050; CTA
LEKLKVDL

SEQ ID NO: 10709 - protein, 8 aa, Homo sapiens
  misc_feature: Table A; Target 10709; HLA-B*37:01; BPIFA2; ENSG00000131050; CTA
LEKLKVDL

SEQ ID NO: 10710 - protein, 8 aa, Homo sapiens
  misc_feature: Table A; Target 10710; HLA-B*40:02; BPIFA2; ENSG00000131050; CTA
LEKLKVDL

SEQ ID NO: 10711 - protein, 11 aa, Homo sapiens
  misc_feature: Table A; Target 10711; HLA-B*40:02; BPIFA2; ENSG00000131050; CTA
LEKLKVDLGVL

SEQ ID NO: 10712 - protein, 9 aa, Homo sapiens
  misc_feature: Table A; Target 10712; HLA-A*02:07; BPIFA2; ENSG00000131050; CTA
LEPVLHEGL

SEQ ID NO: 10713 - protein, 9 aa, Homo sapiens
  misc_feature: Table A; Target 10713; HLA-A*30:01; BPIFA2; ENSG00000131050; CTA
LEPVLHEGL

SEQ ID NO: 10714 - protein, 9 aa, Homo sapiens
  misc_feature: Table A; Target 10714; HLA-B*18:01; BPIFA2; ENSG00000131050; CTA
LEPVLHEGL

SEQ ID NO: 10715 - protein, 9 aa, Homo sapiens
  misc_feature: Table A; Target 10715; HLA-B*37:01; BPIFA2; ENSG00000131050; CTA
LEPVLHEGL

SEQ ID NO: 10716 - protein, 9 aa, Homo sapiens
  misc_feature: Table A; Target 10716; HLA-B*40:01; BPIFA2; ENSG00000131050; CTA
LEPVLHEGL

SEQ ID NO: 10717 - protein, 9 aa, Homo sapiens
  misc_feature: Table A; Target 10717; HLA-B*40:02; BPIFA2; ENSG00000131050; CTA
LEPVLHEGL

SEQ ID NO: 10718 - protein, 9 aa, Homo sapiens
  misc_feature: Table A; Target 10718; HLA-B*44:02; BPIFA2; ENSG00000131050; CTA
LEPVLHEGL

SEQ ID NO: 10719 - protein, 9 aa, Homo sapiens
  misc_feature: Table A; Target 10719; HLA-B*44:03; BPIFA2; ENSG00000131050; CTA
LEPVLHEGL

SEQ ID NO: 10720 - protein, 9 aa, Homo sapiens
  misc_feature: Table A; Target 10720; HLA-B*49:01; BPIFA2; ENSG00000131050; CTA
LEPVLHEGL

SEQ ID NO: 10721 - protein, 9 aa, Homo sapiens
  misc_feature: Table A; Target 10721; HLA-C*07:01; BPIFA2; ENSG00000131050; CTA
LEPVLHEGL

SEQ ID NO: 10722 - protein, 9 aa, Homo sapiens
  misc_feature: Table A; Target 10722; HLA-C*07:04; BPIFA2; ENSG00000131050; CTA
LEPVLHEGL

SEQ ID NO: 10723 - protein, 8 aa, Homo sapiens
  misc_feature: Table A; Target 10723; HLA-A*30:01; BPIFA2; ENSG00000131050; CTA
LETVDNTL

SEQ ID NO: 10724 - protein, 8 aa, Homo sapiens
  misc_feature: Table A; Target 10724; HLA-B*18:01; BPIFA2; ENSG00000131050; CTA
LETVDNTL

SEQ ID NO: 10725 - protein, 8 aa, Homo sapiens
  misc_feature: Table A; Target 10725; HLA-B*27:05; BPIFA2; ENSG00000131050; CTA
LETVDNTL

SEQ ID NO: 10726 - protein, 8 aa, Homo sapiens
  misc_feature: Table A; Target 10726; HLA-B*35:03; BPIFA2; ENSG00000131050; CTA
LETVDNTL

SEQ ID NO: 10727 - protein, 8 aa, Homo sapiens
  misc_feature: Table A; Target 10727; HLA-B*37:01; BPIFA2; ENSG00000131050; CTA
LETVDNTL

SEQ ID NO: 10728 - protein, 8 aa, Homo sapiens
  misc_feature: Table A; Target 10728; HLA-B*39:01; BPIFA2; ENSG00000131050; CTA
LETVDNTL

SEQ ID NO: 10729 - protein, 8 aa, Homo sapiens
  misc_feature: Table A; Target 10729; HLA-B*40:01; BPIFA2; ENSG00000131050; CTA
LETVDNTL

SEQ ID NO: 10730 - protein, 8 aa, Homo sapiens
  misc_feature: Table A; Target 10730; HLA-B*40:02; BPIFA2; ENSG00000131050; CTA
LETVDNTL

SEQ ID NO: 10731 - protein, 8 aa, Homo sapiens
  misc_feature: Table A; Target 10731; HLA-B*49:01; BPIFA2; ENSG00000131050; CTA
LETVDNTL

SEQ ID NO: 10732 - protein, 8 aa, Homo sapiens
  misc_feature: Table A; Target 10732; HLA-C*07:04; BPIFA2; ENSG00000131050; CTA
LETVDNTL

SEQ ID NO: 10733 - protein, 9 aa, Homo sapiens
  misc_feature: Table A; Target 10733; HLA-B*27:02; BPIFA2; ENSG00000131050; CTA
LETVDNTLK

SEQ ID NO: 10734 - protein, 9 aa, Homo sapiens
  misc_feature: Table A; Target 10734; HLA-B*27:05; BPIFA2; ENSG00000131050; CTA
LETVDNTLK

SEQ ID NO: 10735 - protein, 9 aa, Homo sapiens
  misc_feature: Table A; Target 10735; HLA-B*40:01; BPIFA2; ENSG00000131050; CTA
LETVDNTLK

SEQ ID NO: 10736 - protein, 9 aa, Homo sapiens
  misc_feature: Table A; Target 10736; HLA-B*49:01; BPIFA2; ENSG00000131050; CTA
LETVDNTLK

SEQ ID NO: 10737 - protein, 9 aa, Homo sapiens
  misc_feature: Table A; Target 10737; HLA-C*04:01; BPIFA2; ENSG00000131050; CTA
LETVDNTLK

SEQ ID NO: 10738 - protein, 9 aa, Homo sapiens
  misc_feature: Table A; Target 10738; HLA-C*07:01; BPIFA2; ENSG00000131050; CTA
LETVDNTLK

SEQ ID NO: 10739 - protein, 9 aa, Homo sapiens
  misc_feature: Table A; Target 10739; HLA-B*13:02; BPIFA2; ENSG00000131050; CTA
LGNDLSNVV

SEQ ID NO: 10740 - protein, 9 aa, Homo sapiens
  misc_feature: Table A; Target 10740; HLA-B*27:05; BPIFA2; ENSG00000131050; CTA
LGNDLSNVV

SEQ ID NO: 10741 - protein, 9 aa, Homo sapiens
  misc_feature: Table A; Target 10741; HLA-B*39:01; BPIFA2; ENSG00000131050; CTA
LGNDLSNVV

SEQ ID NO: 10742 - protein, 9 aa, Homo sapiens
  misc_feature: Table A; Target 10742; HLA-B*51:01; BPIFA2; ENSG00000131050; CTA
LGNDLSNVV

SEQ ID NO: 10743 - protein, 9 aa, Homo sapiens
  misc_feature: Table A; Target 10743; HLA-C*06:02; BPIFA2; ENSG00000131050; CTA
LGNDLSNVV

SEQ ID NO: 10744 - protein, 9 aa, Homo sapiens
  misc_feature: Table A; Target 10744; HLA-C*07:01; BPIFA2; ENSG00000131050; CTA
LGNDLSNVV

SEQ ID NO: 10745 - protein, 9 aa, Homo sapiens
  misc_feature: Table A; Target 10745; HLA-C*12:03; BPIFA2; ENSG00000131050; CTA
LGNDLSNVV

SEQ ID NO: 10746 - protein, 9 aa, Homo sapiens
  misc_feature: Table A; Target 10746; HLA-C*16:02; BPIFA2; ENSG00000131050; CTA
LGNDLSNVV

SEQ ID NO: 10747 - protein, 11 aa, Homo sapiens
  misc_feature: Table A; Target 10747; HLA-A*03:02; BPIFA2; ENSG00000131050; CTA
LGNDLSNVVDK

SEQ ID NO: 10748 - protein, 11 aa, Homo sapiens
  misc_feature: Table A; Target 10748; HLA-A*11:01; BPIFA2; ENSG00000131050; CTA
LGNDLSNVVDK

SEQ ID NO: 10749 - protein, 11 aa, Homo sapiens
  misc_feature: Table A; Target 10749; HLA-B*27:02; BPIFA2; ENSG00000131050; CTA
LGNDLSNVVDK

SEQ ID NO: 10750 - protein, 9 aa, Homo sapiens
  misc_feature: Table A; Target 10750; HLA-B*54:01; BPIFA2; ENSG00000131050; CTA
LGVLQKSSA

SEQ ID NO: 10751 - protein, 10 aa, Homo sapiens
  misc_feature: Table A; Target 10751; HLA-B*57:01; BPIFA2; ENSG00000131050; CTA
LGVLQKSSAW

SEQ ID NO: 10752 - protein, 10 aa, Homo sapiens
  misc_feature: Table A; Target 10752; HLA-B*58:01; BPIFA2; ENSG00000131050; CTA
LGVLQKSSAW

SEQ ID NO: 10753 - protein, 10 aa, Homo sapiens
  misc_feature: Table A; Target 10753; HLA-C*07:01; BPIFA2; ENSG00000131050; CTA
LGVLQKSSAW

SEQ ID NO: 10754 - protein, 10 aa, Homo sapiens
  misc_feature: Table A; Target 10754; HLA-A*02:01; BPIFA2; ENSG00000131050; CTA
LILDVKAEPI

SEQ ID NO: 10755 - protein, 10 aa, Homo sapiens
  misc_feature: Table A; Target 10755; HLA-A*02:03; BPIFA2; ENSG00000131050; CTA
LILDVKAEPI

SEQ ID NO: 10756 - protein, 10 aa, Homo sapiens
  misc_feature: Table A; Target 10756; HLA-A*02:04; BPIFA2; ENSG00000131050; CTA
LILDVKAEPI

SEQ ID NO: 10757 - protein, 10 aa, Homo sapiens
  misc_feature: Table A; Target 10757; HLA-A*02:07; BPIFA2; ENSG00000131050; CTA
LILDVKAEPI

SEQ ID NO: 10758 - protein, 10 aa, Homo sapiens
  misc_feature: Table A; Target 10758; HLA-A*24:02; BPIFA2; ENSG00000131050; CTA
LILDVKAEPI

SEQ ID NO: 10759 - protein, 10 aa, Homo sapiens
  misc_feature: Table A; Target 10759; HLA-A*68:02; BPIFA2; ENSG00000131050; CTA
LILDVKAEPI

SEQ ID NO: 10760 - protein, 10 aa, Homo sapiens
  misc_feature: Table A; Target 10760; HLA-B*07:02; BPIFA2; ENSG00000131050; CTA
LILDVKAEPI

SEQ ID NO: 10761 - protein, 10 aa, Homo sapiens
  misc_feature: Table A; Target 10761; HLA-B*27:02; BPIFA2; ENSG00000131050; CTA
LILDVKAEPI

SEQ ID NO: 10762 - protein, 10 aa, Homo sapiens
  misc_feature: Table A; Target 10762; HLA-B*40:02; BPIFA2; ENSG00000131050; CTA
LILDVKAEPI

SEQ ID NO: 10763 - protein, 10 aa, Homo sapiens
  misc_feature: Table A; Target 10763; HLA-B*57:01; BPIFA2; ENSG00000131050; CTA
LILDVKAEPI

SEQ ID NO: 10764 - protein, 10 aa, Homo sapiens
  misc_feature: Table A; Target 10764; HLA-C*02:02; BPIFA2; ENSG00000131050; CTA
LILDVKAEPI

SEQ ID NO: 10765 - protein, 10 aa, Homo sapiens
  misc_feature: Table A; Target 10765; HLA-C*04:01; BPIFA2; ENSG00000131050; CTA
LILDVKAEPI

SEQ ID NO: 10766 - protein, 10 aa, Homo sapiens
  misc_feature: Table A; Target 10766; HLA-C*06:02; BPIFA2; ENSG00000131050; CTA
LILDVKAEPI

SEQ ID NO: 10767 - protein, 10 aa, Homo sapiens
  misc_feature: Table A; Target 10767; HLA-C*07:01; BPIFA2; ENSG00000131050; CTA
LILDVKAEPI

SEQ ID NO: 10768 - protein, 10 aa, Homo sapiens
  misc_feature: Table A; Target 10768; HLA-C*07:02; BPIFA2; ENSG00000131050; CTA
LILDVKAEPI

SEQ ID NO: 10769 - protein, 10 aa, Homo sapiens
  misc_feature: Table A; Target 10769; HLA-C*07:04; BPIFA2; ENSG00000131050; CTA
LILDVKAEPI

SEQ ID NO: 10770 - protein, 9 aa, Homo sapiens
  misc_feature: Table A; Target 10770; HLA-A*02:03; BPIFA2; ENSG00000131050; CTA
LIRIFIHSL

SEQ ID NO: 10771 - protein, 9 aa, Homo sapiens
  misc_feature: Table A; Target 10771; HLA-A*02:04; BPIFA2; ENSG00000131050; CTA
LIRIFIHSL

SEQ ID NO: 10772 - protein, 8 aa, Homo sapiens
  misc_feature: Table A; Target 10772; HLA-B*15:03; BPIFA2; ENSG00000131050; CTA
LKSTVSSL

SEQ ID NO: 10773 - protein, 9 aa, Homo sapiens
  misc_feature: Table A; Target 10773; HLA-B*15:03; BPIFA2; ENSG00000131050; CTA
LKSTVSSLL

SEQ ID NO: 10774 - protein, 9 aa, Homo sapiens
  misc_feature: Table A; Target 10774; HLA-B*38:01; BPIFA2; ENSG00000131050; CTA
LKSTVSSLL

SEQ ID NO: 10775 - protein, 9 aa, Homo sapiens
  misc_feature: Table A; Target 10775; HLA-C*06:02; BPIFA2; ENSG00000131050; CTA
LKSTVSSLL

SEQ ID NO: 10776 - protein, 10 aa, Homo sapiens
  misc_feature: Table A; Target 10776; HLA-B*27:02; BPIFA2; ENSG00000131050; CTA
LKVDLGVLQK

SEQ ID NO: 10777 - protein, 10 aa, Homo sapiens
  misc_feature: Table A; Target 10777; HLA-C*07:01; BPIFA2; ENSG00000131050; CTA
LKVDLGVLQK

SEQ ID NO: 10778 - protein, 9 aa, Homo sapiens
  misc_feature: Table A; Target 10778; HLA-A*02:01; BPIFA2; ENSG00000131050; CTA
LLCGVLTGT

SEQ ID NO: 10779 - protein, 9 aa, Homo sapiens
  misc_feature: Table A; Target 10779; HLA-A*02:03; BPIFA2; ENSG00000131050; CTA
LLCGVLTGT

SEQ ID NO: 10780 - protein, 8 aa, Homo sapiens
  misc_feature: Table A; Target 10780; HLA-C*05:01; BPIFA2; ENSG00000131050; CTA
LLDKHSQI

SEQ ID NO: 10781 - protein, 9 aa, Homo sapiens
  misc_feature: Table A; Target 10781; HLA-A*01:01; BPIFA2; ENSG00000131050; CTA
LLDKHSQII

SEQ ID NO: 10782 - protein, 9 aa, Homo sapiens
  misc_feature: Table A; Target 10782; HLA-A*02:01; BPIFA2; ENSG00000131050; CTA
LLDKHSQII

SEQ ID NO: 10783 - protein, 9 aa, Homo sapiens
  misc_feature: Table A; Target 10783; HLA-A*02:07; BPIFA2; ENSG00000131050; CTA
LLDKHSQII

SEQ ID NO: 10784 - protein, 9 aa, Homo sapiens
  misc_feature: Table A; Target 10784; HLA-B*13:02; BPIFA2; ENSG00000131050; CTA
LLDKHSQII

SEQ ID NO: 10785 - protein, 9 aa, Homo sapiens
  misc_feature: Table A; Target 10785; HLA-B*38:01; BPIFA2; ENSG00000131050; CTA
LLDKHSQII

SEQ ID NO: 10786 - protein, 9 aa, Homo sapiens
  misc_feature: Table A; Target 10786; HLA-B*55:01; BPIFA2; ENSG00000131050; CTA
LLDKHSQII

SEQ ID NO: 10787 - protein, 9 aa, Homo sapiens
  misc_feature: Table A; Target 10787; HLA-C*07:01; BPIFA2; ENSG00000131050; CTA
LLDKHSQII

SEQ ID NO: 10788 - protein, 11 aa, Homo sapiens
  misc_feature: Table A; Target 10788; HLA-A*03:01; BPIFA2; ENSG00000131050; CTA
LLDKHSQIINK

SEQ ID NO: 10789 - protein, 11 aa, Homo sapiens
  misc_feature: Table A; Target 10789; HLA-A*03:02; BPIFA2; ENSG00000131050; CTA
LLDKHSQIINK

SEQ ID NO: 10790 - protein, 9 aa, Homo sapiens
  misc_feature: Table A; Target 10790; HLA-A*01:01; BPIFA2; ENSG00000131050; CTA
LLDNLGNDL

SEQ ID NO: 10791 - protein, 9 aa, Homo sapiens
  misc_feature: Table A; Target 10791; HLA-A*02:01; BPIFA2; ENSG00000131050; CTA
LLDNLGNDL

SEQ ID NO: 10792 - protein, 9 aa, Homo sapiens
  misc_feature: Table A; Target 10792; HLA-A*02:07; BPIFA2; ENSG00000131050; CTA
LLDNLGNDL

SEQ ID NO: 10793 - protein, 9 aa, Homo sapiens
  misc_feature: Table A; Target 10793; HLA-B*27:05; BPIFA2; ENSG00000131050; CTA
LLDNLGNDL

SEQ ID NO: 10794 - protein, 9 aa, Homo sapiens
  misc_feature: Table A; Target 10794; HLA-B*35:03; BPIFA2; ENSG00000131050; CTA
LLDNLGNDL

SEQ ID NO: 10795 - protein, 9 aa, Homo sapiens
  misc_feature: Table A; Target 10795; HLA-B*38:01; BPIFA2; ENSG00000131050; CTA
LLDNLGNDL

SEQ ID NO: 10796 - protein, 9 aa, Homo sapiens
  misc_feature: Table A; Target 10796; HLA-B*39:01; BPIFA2; ENSG00000131050; CTA
LLDNLGNDL

SEQ ID NO: 10797 - protein, 9 aa, Homo sapiens
  misc_feature: Table A; Target 10797; HLA-B*55:01; BPIFA2; ENSG00000131050; CTA
LLDNLGNDL

SEQ ID NO: 10798 - protein, 9 aa, Homo sapiens
  misc_feature: Table A; Target 10798; HLA-C*04:01; BPIFA2; ENSG00000131050; CTA
LLDNLGNDL

SEQ ID NO: 10799 - protein, 9 aa, Homo sapiens
  misc_feature: Table A; Target 10799; HLA-C*05:01; BPIFA2; ENSG00000131050; CTA
LLDNLGNDL

SEQ ID NO: 10800 - protein, 9 aa, Homo sapiens
  misc_feature: Table A; Target 10800; HLA-C*07:04; BPIFA2; ENSG00000131050; CTA
LLDNLGNDL

SEQ ID NO: 10801 - protein, 10 aa, Homo sapiens
  misc_feature: Table A; Target 10801; HLA-A*02:01; BPIFA2; ENSG00000131050; CTA
LLDNLGNDLS

SEQ ID NO: 10802 - protein, 8 aa, Homo sapiens
  misc_feature: Table A; Target 10802; HLA-A*03:01; BPIFA2; ENSG00000131050; CTA
LLNNVISK

SEQ ID NO: 10803 - protein, 8 aa, Homo sapiens
  misc_feature: Table A; Target 10803; HLA-A*03:02; BPIFA2; ENSG00000131050; CTA
LLNNVISK

SEQ ID NO: 10804 - protein, 8 aa, Homo sapiens
  misc_feature: Table A; Target 10804; HLA-A*11:01; BPIFA2; ENSG00000131050; CTA
LLNNVISK

SEQ ID NO: 10805 - protein, 8 aa, Homo sapiens
  misc_feature: Table A; Target 10805; HLA-B*27:02; BPIFA2; ENSG00000131050; CTA
LLNNVISK

SEQ ID NO: 10806 - protein, 8 aa, Homo sapiens
  misc_feature: Table A; Target 10806; HLA-B*27:05; BPIFA2; ENSG00000131050; CTA
LLNNVISK

SEQ ID NO: 10807 - protein, 8 aa, Homo sapiens
  misc_feature: Table A; Target 10807; HLA-C*01:02; BPIFA2; ENSG00000131050; CTA
LLNNVISK

SEQ ID NO: 10808 - protein, 9 aa, Homo sapiens
  misc_feature: Table A; Target 10808; HLA-A*02:01; BPIFA2; ENSG00000131050; CTA
LLNNVISKL

SEQ ID NO: 10809 - protein, 9 aa, Homo sapiens
  misc_feature: Table A; Target 10809; HLA-A*02:03; BPIFA2; ENSG00000131050; CTA
LLNNVISKL

SEQ ID NO: 10810 - protein, 9 aa, Homo sapiens
  misc_feature: Table A; Target 10810; HLA-A*02:04; BPIFA2; ENSG00000131050; CTA
LLNNVISKL

SEQ ID NO: 10811 - protein, 9 aa, Homo sapiens
  misc_feature: Table A; Target 10811; HLA-A*02:07; BPIFA2; ENSG00000131050; CTA
LLNNVISKL

SEQ ID NO: 10812 - protein, 9 aa, Homo sapiens
  misc_feature: Table A; Target 10812; HLA-A*03:01; BPIFA2; ENSG00000131050; CTA
LLNNVISKL

SEQ ID NO: 10813 - protein, 9 aa, Homo sapiens
  misc_feature: Table A; Target 10813; HLA-A*03:02; BPIFA2; ENSG00000131050; CTA
LLNNVISKL

SEQ ID NO: 10814 - protein, 9 aa, Homo sapiens
  misc_feature: Table A; Target 10814; HLA-A*23:01; BPIFA2; ENSG00000131050; CTA
LLNNVISKL

SEQ ID NO: 10815 - protein, 9 aa, Homo sapiens
  misc_feature: Table A; Target 10815; HLA-A*24:02; BPIFA2; ENSG00000131050; CTA
LLNNVISKL

SEQ ID NO: 10816 - protein, 9 aa, Homo sapiens
  misc_feature: Table A; Target 10816; HLA-A*25:01; BPIFA2; ENSG00000131050; CTA
LLNNVISKL

SEQ ID NO: 10817 - protein, 9 aa, Homo sapiens
  misc_feature: Table A; Target 10817; HLA-A*29:02; BPIFA2; ENSG00000131050; CTA
LLNNVISKL

SEQ ID NO: 10818 - protein, 9 aa, Homo sapiens
  misc_feature: Table A; Target 10818; HLA-A*30:01; BPIFA2; ENSG00000131050; CTA
LLNNVISKL

SEQ ID NO: 10819 - protein, 9 aa, Homo sapiens
  misc_feature: Table A; Target 10819; HLA-A*31:01; BPIFA2; ENSG00000131050; CTA
LLNNVISKL

SEQ ID NO: 10820 - protein, 9 aa, Homo sapiens
  misc_feature: Table A; Target 10820; HLA-A*32:01; BPIFA2; ENSG00000131050; CTA
LLNNVISKL

SEQ ID NO: 10821 - protein, 9 aa, Homo sapiens
  misc_feature: Table A; Target 10821; HLA-A*68:02; BPIFA2; ENSG00000131050; CTA
LLNNVISKL

SEQ ID NO: 10822 - protein, 9 aa, Homo sapiens
  misc_feature: Table A; Target 10822; HLA-B*08:01; BPIFA2; ENSG00000131050; CTA
LLNNVISKL

SEQ ID NO: 10823 - protein, 9 aa, Homo sapiens
  misc_feature: Table A; Target 10823; HLA-B*13:02; BPIFA2; ENSG00000131050; CTA
LLNNVISKL

SEQ ID NO: 10824 - protein, 9 aa, Homo sapiens
  misc_feature: Table A; Target 10824; HLA-B*15:01; BPIFA2; ENSG00000131050; CTA
LLNNVISKL

SEQ ID NO: 10825 - protein, 9 aa, Homo sapiens
  misc_feature: Table A; Target 10825; HLA-B*27:05; BPIFA2; ENSG00000131050; CTA
LLNNVISKL

SEQ ID NO: 10826 - protein, 9 aa, Homo sapiens
  misc_feature: Table A; Target 10826; HLA-B*38:01; BPIFA2; ENSG00000131050; CTA
LLNNVISKL

SEQ ID NO: 10827 - protein, 9 aa, Homo sapiens
  misc_feature: Table A; Target 10827; HLA-B*40:01; BPIFA2; ENSG00000131050; CTA
LLNNVISKL

SEQ ID NO: 10828 - protein, 9 aa, Homo sapiens
  misc_feature: Table A; Target 10828; HLA-B*40:02; BPIFA2; ENSG00000131050; CTA
LLNNVISKL

SEQ ID NO: 10829 - protein, 9 aa, Homo sapiens
  misc_feature: Table A; Target 10829; HLA-B*44:02; BPIFA2; ENSG00000131050; CTA
LLNNVISKL

SEQ ID NO: 10830 - protein, 9 aa, Homo sapiens
  misc_feature: Table A; Target 10830; HLA-B*46:01; BPIFA2; ENSG00000131050; CTA
LLNNVISKL

SEQ ID NO: 10831 - protein, 9 aa, Homo sapiens
  misc_feature: Table A; Target 10831; HLA-B*55:01; BPIFA2; ENSG00000131050; CTA
LLNNVISKL

SEQ ID NO: 10832 - protein, 9 aa, Homo sapiens
  misc_feature: Table A; Target 10832; HLA-B*58:01; BPIFA2; ENSG00000131050; CTA
LLNNVISKL

SEQ ID NO: 10833 - protein, 9 aa, Homo sapiens
  misc_feature: Table A; Target 10833; HLA-C*01:02; BPIFA2; ENSG00000131050; CTA
LLNNVISKL

SEQ ID NO: 10834 - protein, 9 aa, Homo sapiens
  misc_feature: Table A; Target 10834; HLA-C*02:02; BPIFA2; ENSG00000131050; CTA
LLNNVISKL

SEQ ID NO: 10835 - protein, 9 aa, Homo sapiens
  misc_feature: Table A; Target 10835; HLA-C*03:04; BPIFA2; ENSG00000131050; CTA
LLNNVISKL

SEQ ID NO: 10836 - protein, 9 aa, Homo sapiens
  misc_feature: Table A; Target 10836; HLA-C*06:02; BPIFA2; ENSG00000131050; CTA
LLNNVISKL

SEQ ID NO: 10837 - protein, 9 aa, Homo sapiens
  misc_feature: Table A; Target 10837; HLA-C*07:04; BPIFA2; ENSG00000131050; CTA
LLNNVISKL

SEQ ID NO: 10838 - protein, 9 aa, Homo sapiens
  misc_feature: Table A; Target 10838; HLA-C*12:03; BPIFA2; ENSG00000131050; CTA
LLNNVISKL

SEQ ID NO: 10839 - protein, 9 aa, Homo sapiens
  misc_feature: Table A; Target 10839; HLA-C*14:02; BPIFA2; ENSG00000131050; CTA
LLNNVISKL

SEQ ID NO: 10840 - protein, 9 aa, Homo sapiens
  misc_feature: Table A; Target 10840; HLA-C*16:02; BPIFA2; ENSG00000131050; CTA
LLNNVISKL

SEQ ID NO: 10841 - protein, 10 aa, Homo sapiens
  misc_feature: Table A; Target 10841; HLA-A*02:04; BPIFA2; ENSG00000131050; CTA
LLNNVISKLL

SEQ ID NO: 10842 - protein, 9 aa, Homo sapiens
  misc_feature: Table A; Target 10842; HLA-A*02:07; BPIFA2; ENSG00000131050; CTA
LLPTNTDIF

SEQ ID NO: 10843 - protein, 9 aa, Homo sapiens
  misc_feature: Table A; Target 10843; HLA-A*23:01; BPIFA2; ENSG00000131050; CTA
LLPTNTDIF

SEQ ID NO: 10844 - protein, 9 aa, Homo sapiens
  misc_feature: Table A; Target 10844; HLA-A*24:02; BPIFA2; ENSG00000131050; CTA
LLPTNTDIF

SEQ ID NO: 10845 - protein, 9 aa, Homo sapiens
  misc_feature: Table A; Target 10845; HLA-A*29:02; BPIFA2; ENSG00000131050; CTA
LLPTNTDIF

SEQ ID NO: 10846 - protein, 9 aa, Homo sapiens
  misc_feature: Table A; Target 10846; HLA-B*15:01; BPIFA2; ENSG00000131050; CTA
LLPTNTDIF

SEQ ID NO: 10847 - protein, 9 aa, Homo sapiens
  misc_feature: Table A; Target 10847; HLA-B*46:01; BPIFA2; ENSG00000131050; CTA
LLPTNTDIF

SEQ ID NO: 10848 - protein, 9 aa, Homo sapiens
  misc_feature: Table A; Target 10848; HLA-C*01:02; BPIFA2; ENSG00000131050; CTA
LLPTNTDIF

SEQ ID NO: 10849 - protein, 9 aa, Homo sapiens
  misc_feature: Table A; Target 10849; HLA-C*07:01; BPIFA2; ENSG00000131050; CTA
LLPTNTDIF

SEQ ID NO: 10850 - protein, 9 aa, Homo sapiens
  misc_feature: Table A; Target 10850; HLA-C*07:04; BPIFA2; ENSG00000131050; CTA
LLPTNTDIF

SEQ ID NO: 10851 - protein, 9 aa, Homo sapiens
  misc_feature: Table A; Target 10851; HLA-C*12:03; BPIFA2; ENSG00000131050; CTA
LLPTNTDIF

SEQ ID NO: 10852 - protein, 11 aa, Homo sapiens
  misc_feature: Table A; Target 10852; HLA-A*02:01; BPIFA2; ENSG00000131050; CTA
LLPTNTDIFGL

SEQ ID NO: 10853 - protein, 11 aa, Homo sapiens
  misc_feature: Table A; Target 10853; HLA-A*02:03; BPIFA2; ENSG00000131050; CTA
LLPTNTDIFGL

SEQ ID NO: 10854 - protein, 11 aa, Homo sapiens
  misc_feature: Table A; Target 10854; HLA-A*02:04; BPIFA2; ENSG00000131050; CTA
LLPTNTDIFGL

SEQ ID NO: 10855 - protein, 11 aa, Homo sapiens
  misc_feature: Table A; Target 10855; HLA-A*02:07; BPIFA2; ENSG00000131050; CTA
LLPTNTDIFGL

SEQ ID NO: 10856 - protein, 11 aa, Homo sapiens
  misc_feature: Table A; Target 10856; HLA-A*03:01; BPIFA2; ENSG00000131050; CTA
LLPTNTDIFGL

SEQ ID NO: 10857 - protein, 11 aa, Homo sapiens
  misc_feature: Table A; Target 10857; HLA-A*24:02; BPIFA2; ENSG00000131050; CTA
LLPTNTDIFGL

SEQ ID NO: 10858 - protein, 11 aa, Homo sapiens
  misc_feature: Table A; Target 10858; HLA-C*06:02; BPIFA2; ENSG00000131050; CTA
LLPTNTDIFGL

SEQ ID NO: 10859 - protein, 11 aa, Homo sapiens
  misc_feature: Table A; Target 10859; HLA-C*07:01; BPIFA2; ENSG00000131050; CTA
LLPTNTDIFGL

SEQ ID NO: 10860 - protein, 11 aa, Homo sapiens
  misc_feature: Table A; Target 10860; HLA-C*07:02; BPIFA2; ENSG00000131050; CTA
LLPTNTDIFGL

SEQ ID NO: 10861 - protein, 9 aa, Homo sapiens
  misc_feature: Table A; Target 10861; HLA-A*02:01; BPIFA2; ENSG00000131050; CTA
LLQKEICPL

SEQ ID NO: 10862 - protein, 9 aa, Homo sapiens
  misc_feature: Table A; Target 10862; HLA-A*02:03; BPIFA2; ENSG00000131050; CTA
LLQKEICPL

SEQ ID NO: 10863 - protein, 9 aa, Homo sapiens
  misc_feature: Table A; Target 10863; HLA-A*02:04; BPIFA2; ENSG00000131050; CTA
LLQKEICPL

SEQ ID NO: 10864 - protein, 9 aa, Homo sapiens
  misc_feature: Table A; Target 10864; HLA-B*40:02; BPIFA2; ENSG00000131050; CTA
LLQKEICPL

SEQ ID NO: 10865 - protein, 9 aa, Homo sapiens
  misc_feature: Table A; Target 10865; HLA-B*55:01; BPIFA2; ENSG00000131050; CTA
LLQKEICPL

SEQ ID NO: 10866 - protein, 9 aa, Homo sapiens
  misc_feature: Table A; Target 10866; HLA-C*04:01; BPIFA2; ENSG00000131050; CTA
LLQKEICPL

SEQ ID NO: 10867 - protein, 9 aa, Homo sapiens
  misc_feature: Table A; Target 10867; HLA-C*06:02; BPIFA2; ENSG00000131050; CTA
LLQKEICPL

SEQ ID NO: 10868 - protein, 9 aa, Homo sapiens
  misc_feature: Table A; Target 10868; HLA-C*07:01; BPIFA2; ENSG00000131050; CTA
LLQKEICPL

SEQ ID NO: 10869 - protein, 9 aa, Homo sapiens
  misc_feature: Table A; Target 10869; HLA-C*07:04; BPIFA2; ENSG00000131050; CTA
LLQKEICPL

SEQ ID NO: 10870 - protein, 9 aa, Homo sapiens
  misc_feature: Table A; Target 10870; HLA-A*02:01; BPIFA2; ENSG00000131050; CTA
LLTAVTIET

SEQ ID NO: 10871 - protein, 9 aa, Homo sapiens
  misc_feature: Table A; Target 10871; HLA-A*02:03; BPIFA2; ENSG00000131050; CTA
LLTAVTIET

SEQ ID NO: 10872 - protein, 9 aa, Homo sapiens
  misc_feature: Table A; Target 10872; HLA-A*02:04; BPIFA2; ENSG00000131050; CTA
LLTAVTIET

SEQ ID NO: 10873 - protein, 9 aa, Homo sapiens
  misc_feature: Table A; Target 10873; HLA-A*68:02; BPIFA2; ENSG00000131050; CTA
LLTAVTIET

SEQ ID NO: 10874 - protein, 9 aa, Homo sapiens
  misc_feature: Table A; Target 10874; HLA-B*13:02; BPIFA2; ENSG00000131050; CTA
LLTAVTIET

SEQ ID NO: 10875 - protein, 9 aa, Homo sapiens
  misc_feature: Table A; Target 10875; HLA-B*27:05; BPIFA2; ENSG00000131050; CTA
LLTAVTIET

SEQ ID NO: 10876 - protein, 9 aa, Homo sapiens
  misc_feature: Table A; Target 10876; HLA-B*46:01; BPIFA2; ENSG00000131050; CTA
LLTAVTIET

SEQ ID NO: 10877 - protein, 9 aa, Homo sapiens
  misc_feature: Table A; Target 10877; HLA-B*55:01; BPIFA2; ENSG00000131050; CTA
LLTAVTIET

SEQ ID NO: 10878 - protein, 9 aa, Homo sapiens
  misc_feature: Table A; Target 10878; HLA-C*06:02; BPIFA2; ENSG00000131050; CTA
LLTAVTIET

SEQ ID NO: 10879 - protein, 9 aa, Homo sapiens
  misc_feature: Table A; Target 10879; HLA-C*07:01; BPIFA2; ENSG00000131050; CTA
LLTAVTIET

SEQ ID NO: 10880 - protein, 9 aa, Homo sapiens
  misc_feature: Table A; Target 10880; HLA-C*07:02; BPIFA2; ENSG00000131050; CTA
LLTAVTIET

SEQ ID NO: 10881 - protein, 9 aa, Homo sapiens
  misc_feature: Table A; Target 10881; HLA-C*07:04; BPIFA2; ENSG00000131050; CTA
LLTAVTIET

SEQ ID NO: 10882 - protein, 9 aa, Homo sapiens
  misc_feature: Table A; Target 10882; HLA-C*16:02; BPIFA2; ENSG00000131050; CTA
LLTAVTIET

SEQ ID NO: 10883 - protein, 9 aa, Homo sapiens
  misc_feature: Table A; Target 10883; HLA-B*54:01; BPIFA2; ENSG00000131050; CTA
LNLSFPVTA

SEQ ID NO: 10884 - protein, 8 aa, Homo sapiens
  misc_feature: Table A; Target 10884; HLA-B*08:01; BPIFA2; ENSG00000131050; CTA
LNNVISKL

SEQ ID NO: 10885 - protein, 8 aa, Homo sapiens
  misc_feature: Table A; Target 10885; HLA-B*27:05; BPIFA2; ENSG00000131050; CTA
LNNVISKL

SEQ ID NO: 10886 - protein, 8 aa, Homo sapiens
  misc_feature: Table A; Target 10886; HLA-C*04:01; BPIFA2; ENSG00000131050; CTA
LNNVISKL

SEQ ID NO: 10887 - protein, 8 aa, Homo sapiens
  misc_feature: Table A; Target 10887; HLA-C*06:02; BPIFA2; ENSG00000131050; CTA
LNNVISKL

SEQ ID NO: 10888 - protein, 8 aa, Homo sapiens
  misc_feature: Table A; Target 10888; HLA-C*07:01; BPIFA2; ENSG00000131050; CTA
LNNVISKL

SEQ ID NO: 10889 - protein, 8 aa, Homo sapiens
  misc_feature: Table A; Target 10889; HLA-C*07:02; BPIFA2; ENSG00000131050; CTA
LNNVISKL

SEQ ID NO: 10890 - protein, 8 aa, Homo sapiens
  misc_feature: Table A; Target 10890; HLA-C*07:04; BPIFA2; ENSG00000131050; CTA
LNNVISKL

SEQ ID NO: 10891 - protein, 8 aa, Homo sapiens
  misc_feature: Table A; Target 10891; HLA-C*12:03; BPIFA2; ENSG00000131050; CTA
LNNVISKL

SEQ ID NO: 10892 - protein, 8 aa, Homo sapiens
  misc_feature: Table A; Target 10892; HLA-B*27:02; BPIFA2; ENSG00000131050; CTA
LPTNTDIF

SEQ ID NO: 10893 - protein, 8 aa, Homo sapiens
  misc_feature: Table A; Target 10893; HLA-B*35:01; BPIFA2; ENSG00000131050; CTA
LPTNTDIF

SEQ ID NO: 10894 - protein, 8 aa, Homo sapiens
  misc_feature: Table A; Target 10894; HLA-B*35:03; BPIFA2; ENSG00000131050; CTA
LPTNTDIF

SEQ ID NO: 10895 - protein, 8 aa, Homo sapiens
  misc_feature: Table A; Target 10895; HLA-B*51:01; BPIFA2; ENSG00000131050; CTA
LPTNTDIF

SEQ ID NO: 10896 - protein, 8 aa, Homo sapiens
  misc_feature: Table A; Target 10896; HLA-B*54:01; BPIFA2; ENSG00000131050; CTA
LPTNTDIF

SEQ ID NO: 10897 - protein, 8 aa, Homo sapiens
  misc_feature: Table A; Target 10897; HLA-B*55:01; BPIFA2; ENSG00000131050; CTA
LPTNTDIF

SEQ ID NO: 10898 - protein, 8 aa, Homo sapiens
  misc_feature: Table A; Target 10898; HLA-C*03:03; BPIFA2; ENSG00000131050; CTA
LPTNTDIF

SEQ ID NO: 10899 - protein, 8 aa, Homo sapiens
  misc_feature: Table A; Target 10899; HLA-C*04:01; BPIFA2; ENSG00000131050; CTA
LPTNTDIF

SEQ ID NO: 10900 - protein, 8 aa, Homo sapiens
  misc_feature: Table A; Target 10900; HLA-C*07:01; BPIFA2; ENSG00000131050; CTA
LPTNTDIF

SEQ ID NO: 10901 - protein, 8 aa, Homo sapiens
  misc_feature: Table A; Target 10901; HLA-C*07:02; BPIFA2; ENSG00000131050; CTA
LPTNTDIF

SEQ ID NO: 10902 - protein, 10 aa, Homo sapiens
  misc_feature: Table A; Target 10902; HLA-A*68:01; BPIFA2; ENSG00000131050; CTA
LPTNTDIFGL

SEQ ID NO: 10903 - protein, 10 aa, Homo sapiens
  misc_feature: Table A; Target 10903; HLA-A*68:02; BPIFA2; ENSG00000131050; CTA
LPTNTDIFGL

SEQ ID NO: 10904 - protein, 10 aa, Homo sapiens
  misc_feature: Table A; Target 10904; HLA-B*07:02; BPIFA2; ENSG00000131050; CTA
LPTNTDIFGL

SEQ ID NO: 10905 - protein, 10 aa, Homo sapiens
  misc_feature: Table A; Target 10905; HLA-B*27:02; BPIFA2; ENSG00000131050; CTA
LPTNTDIFGL

SEQ ID NO: 10906 - protein, 10 aa, Homo sapiens
  misc_feature: Table A; Target 10906; HLA-B*35:01; BPIFA2; ENSG00000131050; CTA
LPTNTDIFGL

SEQ ID NO: 10907 - protein, 10 aa, Homo sapiens
  misc_feature: Table A; Target 10907; HLA-B*35:03; BPIFA2; ENSG00000131050; CTA
LPTNTDIFGL

SEQ ID NO: 10908 - protein, 10 aa, Homo sapiens
  misc_feature: Table A; Target 10908; HLA-B*54:01; BPIFA2; ENSG00000131050; CTA
LPTNTDIFGL

SEQ ID NO: 10909 - protein, 10 aa, Homo sapiens
  misc_feature: Table A; Target 10909; HLA-B*55:01; BPIFA2; ENSG00000131050; CTA
LPTNTDIFGL

SEQ ID NO: 10910 - protein, 10 aa, Homo sapiens
  misc_feature: Table A; Target 10910; HLA-C*04:01; BPIFA2; ENSG00000131050; CTA
LPTNTDIFGL

SEQ ID NO: 10911 - protein, 10 aa, Homo sapiens
  misc_feature: Table A; Target 10911; HLA-C*07:01; BPIFA2; ENSG00000131050; CTA
LPTNTDIFGL

SEQ ID NO: 10912 - protein, 10 aa, Homo sapiens
  misc_feature: Table A; Target 10912; HLA-C*07:02; BPIFA2; ENSG00000131050; CTA
LPTNTDIFGL

SEQ ID NO: 10913 - protein, 10 aa, Homo sapiens
  misc_feature: Table A; Target 10913; HLA-C*07:06; BPIFA2; ENSG00000131050; CTA
LPTNTDIFGL

SEQ ID NO: 10914 - protein, 11 aa, Homo sapiens
  misc_feature: Table A; Target 10914; HLA-B*27:02; BPIFA2; ENSG00000131050; CTA
LPTNTDIFGLK

SEQ ID NO: 10915 - protein, 8 aa, Homo sapiens
  misc_feature: Table A; Target 10915; HLA-B*08:01; BPIFA2; ENSG00000131050; CTA
LQKEICPL

SEQ ID NO: 10916 - protein, 9 aa, Homo sapiens
  misc_feature: Table A; Target 10916; HLA-A*24:02; BPIFA2; ENSG00000131050; CTA
LQKEICPLI

SEQ ID NO: 10917 - protein, 9 aa, Homo sapiens
  misc_feature: Table A; Target 10917; HLA-B*13:02; BPIFA2; ENSG00000131050; CTA
LQKEICPLI

SEQ ID NO: 10918 - protein, 9 aa, Homo sapiens
  misc_feature: Table A; Target 10918; HLA-B*40:02; BPIFA2; ENSG00000131050; CTA
LQKEICPLI

SEQ ID NO: 10919 - protein, 9 aa, Homo sapiens
  misc_feature: Table A; Target 10919; HLA-C*06:02; BPIFA2; ENSG00000131050; CTA
LQKEICPLI

SEQ ID NO: 10920 - protein, 9 aa, Homo sapiens
  misc_feature: Table A; Target 10920; HLA-C*07:01; BPIFA2; ENSG00000131050; CTA
LQKEICPLI

SEQ ID NO: 10921 - protein, 9 aa, Homo sapiens
  misc_feature: Table A; Target 10921; HLA-A*02:03; BPIFA2; ENSG00000131050; CTA
LQKSSAWQL

SEQ ID NO: 10922 - protein, 9 aa, Homo sapiens
  misc_feature: Table A; Target 10922; HLA-A*02:04; BPIFA2; ENSG00000131050; CTA
LQKSSAWQL

SEQ ID NO: 10923 - protein, 9 aa, Homo sapiens
  misc_feature: Table A; Target 10923; HLA-A*24:02; BPIFA2; ENSG00000131050; CTA
LQKSSAWQL

SEQ ID NO: 10924 - protein, 9 aa, Homo sapiens
  misc_feature: Table A; Target 10924; HLA-A*31:01; BPIFA2; ENSG00000131050; CTA
LQKSSAWQL

SEQ ID NO: 10925 - protein, 9 aa, Homo sapiens
  misc_feature: Table A; Target 10925; HLA-B*13:02; BPIFA2; ENSG00000131050; CTA
LQKSSAWQL

SEQ ID NO: 10926 - protein, 9 aa, Homo sapiens
  misc_feature: Table A; Target 10926; HLA-B*40:02; BPIFA2; ENSG00000131050; CTA
LQKSSAWQL

SEQ ID NO: 10927 - protein, 9 aa, Homo sapiens
  misc_feature: Table A; Target 10927; HLA-C*07:04; BPIFA2; ENSG00000131050; CTA
LQKSSAWQL

SEQ ID NO: 10928 - protein, 9 aa, Homo sapiens
  misc_feature: Table A; Target 10928; HLA-C*14:02; BPIFA2; ENSG00000131050; CTA
LQKSSAWQL

SEQ ID NO: 10929 - protein, 9 aa, Homo sapiens
  misc_feature: Table A; Target 10929; HLA-A*02:01; BPIFA2; ENSG00000131050; CTA
LQLWKLVLL

SEQ ID NO: 10930 - protein, 9 aa, Homo sapiens
  misc_feature: Table A; Target 10930; HLA-A*02:04; BPIFA2; ENSG00000131050; CTA
LQLWKLVLL

SEQ ID NO: 10931 - protein, 9 aa, Homo sapiens
  misc_feature: Table A; Target 10931; HLA-A*02:07; BPIFA2; ENSG00000131050; CTA
LQLWKLVLL

SEQ ID NO: 10932 - protein, 9 aa, Homo sapiens
  misc_feature: Table A; Target 10932; HLA-A*24:02; BPIFA2; ENSG00000131050; CTA
LQLWKLVLL

SEQ ID NO: 10933 - protein, 8 aa, Homo sapiens
  misc_feature: Table A; Target 10933; HLA-C*06:02; BPIFA2; ENSG00000131050; CTA
LSFPVTAN

SEQ ID NO: 10934 - protein, 8 aa, Homo sapiens
  misc_feature: Table A; Target 10934; HLA-C*07:01; BPIFA2; ENSG00000131050; CTA
LSFPVTAN

SEQ ID NO: 10935 - protein, 8 aa, Homo sapiens
  misc_feature: Table A; Target 10935; HLA-C*12:03; BPIFA2; ENSG00000131050; CTA
LSFPVTAN

SEQ ID NO: 10936 - protein, 9 aa, Homo sapiens
  misc_feature: Table A; Target 10936; HLA-A*01:01; BPIFA2; ENSG00000131050; CTA
LSFPVTANV

SEQ ID NO: 10937 - protein, 9 aa, Homo sapiens
  misc_feature: Table A; Target 10937; HLA-A*02:01; BPIFA2; ENSG00000131050; CTA
LSFPVTANV

SEQ ID NO: 10938 - protein, 9 aa, Homo sapiens
  misc_feature: Table A; Target 10938; HLA-A*02:03; BPIFA2; ENSG00000131050; CTA
LSFPVTANV

SEQ ID NO: 10939 - protein, 9 aa, Homo sapiens
  misc_feature: Table A; Target 10939; HLA-A*02:04; BPIFA2; ENSG00000131050; CTA
LSFPVTANV

SEQ ID NO: 10940 - protein, 9 aa, Homo sapiens
  misc_feature: Table A; Target 10940; HLA-A*02:07; BPIFA2; ENSG00000131050; CTA
LSFPVTANV

SEQ ID NO: 10941 - protein, 9 aa, Homo sapiens
  misc_feature: Table A; Target 10941; HLA-A*23:01; BPIFA2; ENSG00000131050; CTA
LSFPVTANV

SEQ ID NO: 10942 - protein, 9 aa, Homo sapiens
  misc_feature: Table A; Target 10942; HLA-A*26:01; BPIFA2; ENSG00000131050; CTA
LSFPVTANV

SEQ ID NO: 10943 - protein, 9 aa, Homo sapiens
  misc_feature: Table A; Target 10943; HLA-A*30:01; BPIFA2; ENSG00000131050; CTA
LSFPVTANV

SEQ ID NO: 10944 - protein, 9 aa, Homo sapiens
  misc_feature: Table A; Target 10944; HLA-A*31:01; BPIFA2; ENSG00000131050; CTA
LSFPVTANV

SEQ ID NO: 10945 - protein, 9 aa, Homo sapiens
  misc_feature: Table A; Target 10945; HLA-A*32:01; BPIFA2; ENSG00000131050; CTA
LSFPVTANV

SEQ ID NO: 10946 - protein, 9 aa, Homo sapiens
  misc_feature: Table A; Target 10946; HLA-A*68:02; BPIFA2; ENSG00000131050; CTA
LSFPVTANV

SEQ ID NO: 10947 - protein, 9 aa, Homo sapiens
  misc_feature: Table A; Target 10947; HLA-B*13:02; BPIFA2; ENSG00000131050; CTA
LSFPVTANV

SEQ ID NO: 10948 - protein, 9 aa, Homo sapiens
  misc_feature: Table A; Target 10948; HLA-B*27:05; BPIFA2; ENSG00000131050; CTA
LSFPVTANV

SEQ ID NO: 10949 - protein, 9 aa, Homo sapiens
  misc_feature: Table A; Target 10949; HLA-B*40:02; BPIFA2; ENSG00000131050; CTA
LSFPVTANV

SEQ ID NO: 10950 - protein, 9 aa, Homo sapiens
  misc_feature: Table A; Target 10950; HLA-B*46:01; BPIFA2; ENSG00000131050; CTA
LSFPVTANV

SEQ ID NO: 10951 - protein, 9 aa, Homo sapiens
  misc_feature: Table A; Target 10951; HLA-B*49:01; BPIFA2; ENSG00000131050; CTA
LSFPVTANV

SEQ ID NO: 10952 - protein, 9 aa, Homo sapiens
  misc_feature: Table A; Target 10952; HLA-B*51:01; BPIFA2; ENSG00000131050; CTA
LSFPVTANV

SEQ ID NO: 10953 - protein, 9 aa, Homo sapiens
  misc_feature: Table A; Target 10953; HLA-B*54:01; BPIFA2; ENSG00000131050; CTA
LSFPVTANV

SEQ ID NO: 10954 - protein, 9 aa, Homo sapiens
  misc_feature: Table A; Target 10954; HLA-B*56:01; BPIFA2; ENSG00000131050; CTA
LSFPVTANV

SEQ ID NO: 10955 - protein, 9 aa, Homo sapiens
  misc_feature: Table A; Target 10955; HLA-B*57:01; BPIFA2; ENSG00000131050; CTA
LSFPVTANV

SEQ ID NO: 10956 - protein, 9 aa, Homo sapiens
  misc_feature: Table A; Target 10956; HLA-B*58:01; BPIFA2; ENSG00000131050; CTA
LSFPVTANV

SEQ ID NO: 10957 - protein, 9 aa, Homo sapiens
  misc_feature: Table A; Target 10957; HLA-C*01:02; BPIFA2; ENSG00000131050; CTA
LSFPVTANV

SEQ ID NO: 10958 - protein, 9 aa, Homo sapiens
  misc_feature: Table A; Target 10958; HLA-C*02:02; BPIFA2; ENSG00000131050; CTA
LSFPVTANV

SEQ ID NO: 10959 - protein, 9 aa, Homo sapiens
  misc_feature: Table A; Target 10959; HLA-C*03:03; BPIFA2; ENSG00000131050; CTA
LSFPVTANV

SEQ ID NO: 10960 - protein, 9 aa, Homo sapiens
  misc_feature: Table A; Target 10960; HLA-C*03:04; BPIFA2; ENSG00000131050; CTA
LSFPVTANV

SEQ ID NO: 10961 - protein, 9 aa, Homo sapiens
  misc_feature: Table A; Target 10961; HLA-C*05:01; BPIFA2; ENSG00000131050; CTA
LSFPVTANV

SEQ ID NO: 10962 - protein, 9 aa, Homo sapiens
  misc_feature: Table A; Target 10962; HLA-C*06:02; BPIFA2; ENSG00000131050; CTA
LSFPVTANV

SEQ ID NO: 10963 - protein, 9 aa, Homo sapiens
  misc_feature: Table A; Target 10963; HLA-C*07:01; BPIFA2; ENSG00000131050; CTA
LSFPVTANV

SEQ ID NO: 10964 - protein, 9 aa, Homo sapiens
  misc_feature: Table A; Target 10964; HLA-C*07:02; BPIFA2; ENSG00000131050; CTA
LSFPVTANV

SEQ ID NO: 10965 - protein, 9 aa, Homo sapiens
  misc_feature: Table A; Target 10965; HLA-C*07:06; BPIFA2; ENSG00000131050; CTA
LSFPVTANV

SEQ ID NO: 10966 - protein, 9 aa, Homo sapiens
  misc_feature: Table A; Target 10966; HLA-C*12:03; BPIFA2; ENSG00000131050; CTA
LSFPVTANV

SEQ ID NO: 10967 - protein, 9 aa, Homo sapiens
  misc_feature: Table A; Target 10967; HLA-C*16:01; BPIFA2; ENSG00000131050; CTA
LSFPVTANV

SEQ ID NO: 10968 - protein, 9 aa, Homo sapiens
  misc_feature: Table A; Target 10968; HLA-C*16:02; BPIFA2; ENSG00000131050; CTA
LSFPVTANV

SEQ ID NO: 10969 - protein, 9 aa, Homo sapiens
  misc_feature: Table A; Target 10969; HLA-C*16:04; BPIFA2; ENSG00000131050; CTA
LSFPVTANV

SEQ ID NO: 10970 - protein, 10 aa, Homo sapiens
  misc_feature: Table A; Target 10970; HLA-C*04:01; BPIFA2; ENSG00000131050; CTA
LSFPVTANVT

SEQ ID NO: 10971 - protein, 10 aa, Homo sapiens
  misc_feature: Table A; Target 10971; HLA-C*06:02; BPIFA2; ENSG00000131050; CTA
LSFPVTANVT

SEQ ID NO: 10972 - protein, 10 aa, Homo sapiens
  misc_feature: Table A; Target 10972; HLA-C*07:01; BPIFA2; ENSG00000131050; CTA
LSFPVTANVT

SEQ ID NO: 10973 - protein, 10 aa, Homo sapiens
  misc_feature: Table A; Target 10973; HLA-C*07:02; BPIFA2; ENSG00000131050; CTA
LSFPVTANVT

SEQ ID NO: 10974 - protein, 11 aa, Homo sapiens
  misc_feature: Table A; Target 10974; HLA-A*01:01; BPIFA2; ENSG00000131050; CTA
LSFPVTANVTV

SEQ ID NO: 10975 - protein, 11 aa, Homo sapiens
  misc_feature: Table A; Target 10975; HLA-A*02:01; BPIFA2; ENSG00000131050; CTA
LSFPVTANVTV

SEQ ID NO: 10976 - protein, 11 aa, Homo sapiens
  misc_feature: Table A; Target 10976; HLA-A*02:03; BPIFA2; ENSG00000131050; CTA
LSFPVTANVTV

SEQ ID NO: 10977 - protein, 11 aa, Homo sapiens
  misc_feature: Table A; Target 10977; HLA-A*02:04; BPIFA2; ENSG00000131050; CTA
LSFPVTANVTV

SEQ ID NO: 10978 - protein, 11 aa, Homo sapiens
  misc_feature: Table A; Target 10978; HLA-A*02:07; BPIFA2; ENSG00000131050; CTA
LSFPVTANVTV

SEQ ID NO: 10979 - protein, 11 aa, Homo sapiens
  misc_feature: Table A; Target 10979; HLA-A*30:01; BPIFA2; ENSG00000131050; CTA
LSFPVTANVTV

SEQ ID NO: 10980 - protein, 11 aa, Homo sapiens
  misc_feature: Table A; Target 10980; HLA-A*68:01; BPIFA2; ENSG00000131050; CTA
LSFPVTANVTV

SEQ ID NO: 10981 - protein, 11 aa, Homo sapiens
  misc_feature: Table A; Target 10981; HLA-A*68:02; BPIFA2; ENSG00000131050; CTA
LSFPVTANVTV

SEQ ID NO: 10982 - protein, 11 aa, Homo sapiens
  misc_feature: Table A; Target 10982; HLA-B*13:02; BPIFA2; ENSG00000131050; CTA
LSFPVTANVTV

SEQ ID NO: 10983 - protein, 11 aa, Homo sapiens
  misc_feature: Table A; Target 10983; HLA-B*27:02; BPIFA2; ENSG00000131050; CTA
LSFPVTANVTV

SEQ ID NO: 10984 - protein, 11 aa, Homo sapiens
  misc_feature: Table A; Target 10984; HLA-B*27:05; BPIFA2; ENSG00000131050; CTA
LSFPVTANVTV

SEQ ID NO: 10985 - protein, 11 aa, Homo sapiens
  misc_feature: Table A; Target 10985; HLA-B*40:02; BPIFA2; ENSG00000131050; CTA
LSFPVTANVTV

SEQ ID NO: 10986 - protein, 11 aa, Homo sapiens
  misc_feature: Table A; Target 10986; HLA-B*46:01; BPIFA2; ENSG00000131050; CTA
LSFPVTANVTV

SEQ ID NO: 10987 - protein, 11 aa, Homo sapiens
  misc_feature: Table A; Target 10987; HLA-B*51:01; BPIFA2; ENSG00000131050; CTA
LSFPVTANVTV

SEQ ID NO: 10988 - protein, 11 aa, Homo sapiens
  misc_feature: Table A; Target 10988; HLA-B*54:01; BPIFA2; ENSG00000131050; CTA
LSFPVTANVTV

SEQ ID NO: 10989 - protein, 11 aa, Homo sapiens
  misc_feature: Table A; Target 10989; HLA-B*56:01; BPIFA2; ENSG00000131050; CTA
LSFPVTANVTV

SEQ ID NO: 10990 - protein, 11 aa, Homo sapiens
  misc_feature: Table A; Target 10990; HLA-B*57:01; BPIFA2; ENSG00000131050; CTA
LSFPVTANVTV

SEQ ID NO: 10991 - protein, 11 aa, Homo sapiens
  misc_feature: Table A; Target 10991; HLA-B*58:01; BPIFA2; ENSG00000131050; CTA
LSFPVTANVTV

SEQ ID NO: 10992 - protein, 11 aa, Homo sapiens
  misc_feature: Table A; Target 10992; HLA-C*02:02; BPIFA2; ENSG00000131050; CTA
LSFPVTANVTV

SEQ ID NO: 10993 - protein, 11 aa, Homo sapiens
  misc_feature: Table A; Target 10993; HLA-C*04:01; BPIFA2; ENSG00000131050; CTA
LSFPVTANVTV

SEQ ID NO: 10994 - protein, 11 aa, Homo sapiens
  misc_feature: Table A; Target 10994; HLA-C*06:02; BPIFA2; ENSG00000131050; CTA
LSFPVTANVTV

SEQ ID NO: 10995 - protein, 11 aa, Homo sapiens
  misc_feature: Table A; Target 10995; HLA-C*07:01; BPIFA2; ENSG00000131050; CTA
LSFPVTANVTV

SEQ ID NO: 10996 - protein, 11 aa, Homo sapiens
  misc_feature: Table A; Target 10996; HLA-C*12:03; BPIFA2; ENSG00000131050; CTA
LSFPVTANVTV

SEQ ID NO: 10997 - protein, 11 aa, Homo sapiens
  misc_feature: Table A; Target 10997; HLA-C*16:02; BPIFA2; ENSG00000131050; CTA
LSFPVTANVTV

SEQ ID NO: 10998 - protein, 11 aa, Homo sapiens
  misc_feature: Table A; Target 10998; HLA-C*16:04; BPIFA2; ENSG00000131050; CTA
LSFPVTANVTV

SEQ ID NO: 10999 - protein, 8 aa, Homo sapiens
  misc_feature: Table A; Target 10999; HLA-B*58:01; BPIFA2; ENSG00000131050; CTA
LSNVVDKL

SEQ ID NO: 11000 - protein, 8 aa, Homo sapiens
  misc_feature: Table A; Target 11000; HLA-C*01:02; BPIFA2; ENSG00000131050; CTA
LSNVVDKL

SEQ ID NO: 11001 - protein, 8 aa, Homo sapiens
  misc_feature: Table A; Target 11001; HLA-C*03:04; BPIFA2; ENSG00000131050; CTA
LSNVVDKL

SEQ ID NO: 11002 - protein, 8 aa, Homo sapiens
  misc_feature: Table A; Target 11002; HLA-C*06:02; BPIFA2; ENSG00000131050; CTA
LSNVVDKL

SEQ ID NO: 11003 - protein, 8 aa, Homo sapiens
  misc_feature: Table A; Target 11003; HLA-C*07:04; BPIFA2; ENSG00000131050; CTA
LSNVVDKL

SEQ ID NO: 11004 - protein, 8 aa, Homo sapiens
  misc_feature: Table A; Target 11004; HLA-C*12:03; BPIFA2; ENSG00000131050; CTA
LSNVVDKL

SEQ ID NO: 11005 - protein, 8 aa, Homo sapiens
  misc_feature: Table A; Target 11005; HLA-C*16:01; BPIFA2; ENSG00000131050; CTA
LSNVVDKL

SEQ ID NO: 11006 - protein, 8 aa, Homo sapiens
  misc_feature: Table A; Target 11006; HLA-C*16:02; BPIFA2; ENSG00000131050; CTA
LSNVVDKL

SEQ ID NO: 11007 - protein, 8 aa, Homo sapiens
  misc_feature: Table A; Target 11007; HLA-C*01:02; BPIFA2; ENSG00000131050; CTA
LTGTSESL

SEQ ID NO: 11008 - protein, 8 aa, Homo sapiens
  misc_feature: Table A; Target 11008; HLA-C*03:03; BPIFA2; ENSG00000131050; CTA
LTGTSESL

SEQ ID NO: 11009 - protein, 8 aa, Homo sapiens
  misc_feature: Table A; Target 11009; HLA-C*03:04; BPIFA2; ENSG00000131050; CTA
LTGTSESL

SEQ ID NO: 11010 - protein, 8 aa, Homo sapiens
  misc_feature: Table A; Target 11010; HLA-C*05:01; BPIFA2; ENSG00000131050; CTA
LTGTSESL

SEQ ID NO: 11011 - protein, 8 aa, Homo sapiens
  misc_feature: Table A; Target 11011; HLA-C*14:02; BPIFA2; ENSG00000131050; CTA
LTGTSESL

SEQ ID NO: 11012 - protein, 9 aa, Homo sapiens
  misc_feature: Table A; Target 11012; HLA-A*02:04; BPIFA2; ENSG00000131050; CTA
MLQLWKLVL

SEQ ID NO: 11013 - protein, 10 aa, Homo sapiens
  misc_feature: Table A; Target 11013; HLA-A*02:04; BPIFA2; ENSG00000131050; CTA
MLQLWKLVLL

SEQ ID NO: 11014 - protein, 9 aa, Homo sapiens
  misc_feature: Table A; Target 11014; HLA-A*03:02; BPIFA2; ENSG00000131050; CTA
NDLSNVVDK

SEQ ID NO: 11015 - protein, 9 aa, Homo sapiens
  misc_feature: Table A; Target 11015; HLA-A*11:01; BPIFA2; ENSG00000131050; CTA
NDLSNVVDK

SEQ ID NO: 11016 - protein, 9 aa, Homo sapiens
  misc_feature: Table A; Target 11016; HLA-B*27:02; BPIFA2; ENSG00000131050; CTA
NDLSNVVDK

SEQ ID NO: 11017 - protein, 9 aa, Homo sapiens
  misc_feature: Table A; Target 11017; HLA-C*04:01; BPIFA2; ENSG00000131050; CTA
NDLSNVVDK

SEQ ID NO: 11018 - protein, 9 aa, Homo sapiens
  misc_feature: Table A; Target 11018; HLA-C*07:01; BPIFA2; ENSG00000131050; CTA
NDLSNVVDK

SEQ ID NO: 11019 - protein, 9 aa, Homo sapiens
  misc_feature: Table A; Target 11019; HLA-C*12:03; BPIFA2; ENSG00000131050; CTA
NDLSNVVDK

SEQ ID NO: 11020 - protein, 10 aa, Homo sapiens
  misc_feature: Table A; Target 11020; HLA-C*07:02; BPIFA2; ENSG00000131050; CTA
NDLSNVVDKL

SEQ ID NO: 11021 - protein, 11 aa, Homo sapiens
  misc_feature: Table A; Target 11021; HLA-B*38:01; BPIFA2; ENSG00000131050; CTA
NKFVNSVINTL

SEQ ID NO: 11022 - protein, 9 aa, Homo sapiens
  misc_feature: Table A; Target 11022; HLA-A*02:01; BPIFA2; ENSG00000131050; CTA
NLGNDLSNV

SEQ ID NO: 11023 - protein, 9 aa, Homo sapiens
  misc_feature: Table A; Target 11023; HLA-A*02:03; BPIFA2; ENSG00000131050; CTA
NLGNDLSNV

SEQ ID NO: 11024 - protein, 9 aa, Homo sapiens
  misc_feature: Table A; Target 11024; HLA-A*02:07; BPIFA2; ENSG00000131050; CTA
NLGNDLSNV

SEQ ID NO: 11025 - protein, 9 aa, Homo sapiens
  misc_feature: Table A; Target 11025; HLA-B*55:01; BPIFA2; ENSG00000131050; CTA
NLGNDLSNV

SEQ ID NO: 11026 - protein, 8 aa, Homo sapiens
  misc_feature: Table A; Target 11026; HLA-B*08:01; BPIFA2; ENSG00000131050; CTA
NLKASLDL

SEQ ID NO: 11027 - protein, 9 aa, Homo sapiens
  misc_feature: Table A; Target 11027; HLA-A*02:03; BPIFA2; ENSG00000131050; CTA
NLKASLDLL

SEQ ID NO: 11028 - protein, 9 aa, Homo sapiens
  misc_feature: Table A; Target 11028; HLA-A*02:04; BPIFA2; ENSG00000131050; CTA
NLKASLDLL

SEQ ID NO: 11029 - protein, 9 aa, Homo sapiens
  misc_feature: Table A; Target 11029; HLA-A*02:07; BPIFA2; ENSG00000131050; CTA
NLKASLDLL

SEQ ID NO: 11030 - protein, 9 aa, Homo sapiens
  misc_feature: Table A; Target 11030; HLA-C*07:02; BPIFA2; ENSG00000131050; CTA
NLKASLDLL

SEQ ID NO: 11031 - protein, 11 aa, Homo sapiens
  misc_feature: Table A; Target 11031; HLA-A*02:03; BPIFA2; ENSG00000131050; CTA
NLKASLDLLTA

SEQ ID NO: 11032 - protein, 9 aa, Homo sapiens
  misc_feature: Table A; Target 11032; HLA-C*06:02; BPIFA2; ENSG00000131050; CTA
NLSFPVTAN

SEQ ID NO: 11033 - protein, 9 aa, Homo sapiens
  misc_feature: Table A; Target 11033; HLA-C*07:04; BPIFA2; ENSG00000131050; CTA
NLSFPVTAN

SEQ ID NO: 11034 - protein, 10 aa, Homo sapiens
  misc_feature: Table A; Target 11034; HLA-A*02:03; BPIFA2; ENSG00000131050; CTA
NLSFPVTANV

SEQ ID NO: 11035 - protein, 10 aa, Homo sapiens
  misc_feature: Table A; Target 11035; HLA-A*68:02; BPIFA2; ENSG00000131050; CTA
NLSFPVTANV

SEQ ID NO: 11036 - protein, 11 aa, Homo sapiens
  misc_feature: Table A; Target 11036; HLA-C*06:02; BPIFA2; ENSG00000131050; CTA
NLSFPVTANVT

SEQ ID NO: 11037 - protein, 8 aa, Homo sapiens
  misc_feature: Table A; Target 11037; HLA-C*07:01; BPIFA2; ENSG00000131050; CTA
NNVISKLL

SEQ ID NO: 11038 - protein, 8 aa, Homo sapiens
  misc_feature: Table A; Target 11038; HLA-B*07:02; BPIFA2; ENSG00000131050; CTA
NPQHKTQL

SEQ ID NO: 11039 - protein, 8 aa, Homo sapiens
  misc_feature: Table A; Target 11039; HLA-B*08:01; BPIFA2; ENSG00000131050; CTA
NPQHKTQL

SEQ ID NO: 11040 - protein, 8 aa, Homo sapiens
  misc_feature: Table A; Target 11040; HLA-C*07:02; BPIFA2; ENSG00000131050; CTA
NPQHKTQL

SEQ ID NO: 11041 - protein, 11 aa, Homo sapiens
  misc_feature: Table A; Target 11041; HLA-B*07:02; BPIFA2; ENSG00000131050; CTA
NPQHKTQLQTL

SEQ ID NO: 11042 - protein, 11 aa, Homo sapiens
  misc_feature: Table A; Target 11042; HLA-C*07:02; BPIFA2; ENSG00000131050; CTA
NPQHKTQLQTL

SEQ ID NO: 11043 - protein, 8 aa, Homo sapiens
  misc_feature: Table A; Target 11043; HLA-B*27:02; BPIFA2; ENSG00000131050; CTA
NSLILDVK

SEQ ID NO: 11044 - protein, 8 aa, Homo sapiens
  misc_feature: Table A; Target 11044; HLA-C*07:02; BPIFA2; ENSG00000131050; CTA
NSLILDVK

SEQ ID NO: 11045 - protein, 9 aa, Homo sapiens
  misc_feature: Table A; Target 11045; HLA-B*54:01; BPIFA2; ENSG00000131050; CTA
NSLILDVKA

SEQ ID NO: 11046 - protein, 8 aa, Homo sapiens
  misc_feature: Table A; Target 11046; HLA-A*11:01; BPIFA2; ENSG00000131050; CTA
NSVINTLK

SEQ ID NO: 11047 - protein, 8 aa, Homo sapiens
  misc_feature: Table A; Target 11047; HLA-A*33:01; BPIFA2; ENSG00000131050; CTA
NSVINTLK

SEQ ID NO: 11048 - protein, 8 aa, Homo sapiens
  misc_feature: Table A; Target 11048; HLA-C*06:02; BPIFA2; ENSG00000131050; CTA
NSVINTLK

SEQ ID NO: 11049 - protein, 8 aa, Homo sapiens
  misc_feature: Table A; Target 11049; HLA-C*07:01; BPIFA2; ENSG00000131050; CTA
NSVINTLK

SEQ ID NO: 11050 - protein, 10 aa, Homo sapiens
  misc_feature: Table A; Target 11050; HLA-C*07:01; BPIFA2; ENSG00000131050; CTA
NSVINTLKST

SEQ ID NO: 11051 - protein, 11 aa, Homo sapiens
  misc_feature: Table A; Target 11051; HLA-C*06:02; BPIFA2; ENSG00000131050; CTA
NSVINTLKSTV

SEQ ID NO: 11052 - protein, 11 aa, Homo sapiens
  misc_feature: Table A; Target 11052; HLA-C*07:01; BPIFA2; ENSG00000131050; CTA
NSVINTLKSTV

SEQ ID NO: 11053 - protein, 8 aa, Homo sapiens
  misc_feature: Table A; Target 11053; HLA-A*01:01; BPIFA2; ENSG00000131050; CTA
NTDIFGLK

SEQ ID NO: 11054 - protein, 8 aa, Homo sapiens
  misc_feature: Table A; Target 11054; HLA-A*11:01; BPIFA2; ENSG00000131050; CTA
NTDIFGLK

SEQ ID NO: 11055 - protein, 9 aa, Homo sapiens
  misc_feature: Table A; Target 11055; HLA-A*01:01; BPIFA2; ENSG00000131050; CTA
NTDIFGLKI

SEQ ID NO: 11056 - protein, 9 aa, Homo sapiens
  misc_feature: Table A; Target 11056; HLA-A*02:07; BPIFA2; ENSG00000131050; CTA
NTDIFGLKI

SEQ ID NO: 11057 - protein, 9 aa, Homo sapiens
  misc_feature: Table A; Target 11057; HLA-A*68:02; BPIFA2; ENSG00000131050; CTA
NTDIFGLKI

SEQ ID NO: 11058 - protein, 9 aa, Homo sapiens
  misc_feature: Table A; Target 11058; HLA-B*38:01; BPIFA2; ENSG00000131050; CTA
NTDIFGLKI

SEQ ID NO: 11059 - protein, 9 aa, Homo sapiens
  misc_feature: Table A; Target 11059; HLA-C*05:01; BPIFA2; ENSG00000131050; CTA
NTDIFGLKI

SEQ ID NO: 11060 - protein, 8 aa, Homo sapiens
  misc_feature: Table A; Target 11060; HLA-C*04:01; BPIFA2; ENSG00000131050; CTA
NTLKGILE

SEQ ID NO: 11061 - protein, 9 aa, Homo sapiens
  misc_feature: Table A; Target 11061; HLA-A*01:01; BPIFA2; ENSG00000131050; CTA
NTLKGILEK

SEQ ID NO: 11062 - protein, 9 aa, Homo sapiens
  misc_feature: Table A; Target 11062; HLA-A*03:01; BPIFA2; ENSG00000131050; CTA
NTLKGILEK

SEQ ID NO: 11063 - protein, 9 aa, Homo sapiens
  misc_feature: Table A; Target 11063; HLA-A*03:02; BPIFA2; ENSG00000131050; CTA
NTLKGILEK

SEQ ID NO: 11064 - protein, 9 aa, Homo sapiens
  misc_feature: Table A; Target 11064; HLA-A*11:01; BPIFA2; ENSG00000131050; CTA
NTLKGILEK

SEQ ID NO: 11065 - protein, 9 aa, Homo sapiens
  misc_feature: Table A; Target 11065; HLA-A*33:01; BPIFA2; ENSG00000131050; CTA
NTLKGILEK

SEQ ID NO: 11066 - protein, 9 aa, Homo sapiens
  misc_feature: Table A; Target 11066; HLA-A*33:03; BPIFA2; ENSG00000131050; CTA
NTLKGILEK

SEQ ID NO: 11067 - protein, 9 aa, Homo sapiens
  misc_feature: Table A; Target 11067; HLA-A*68:01; BPIFA2; ENSG00000131050; CTA
NTLKGILEK

SEQ ID NO: 11068 - protein, 9 aa, Homo sapiens
  misc_feature: Table A; Target 11068; HLA-B*40:02; BPIFA2; ENSG00000131050; CTA
NTLKGILEK

SEQ ID NO: 11069 - protein, 9 aa, Homo sapiens
  misc_feature: Table A; Target 11069; HLA-C*07:06; BPIFA2; ENSG00000131050; CTA
NTLKGILEK

SEQ ID NO: 11070 - protein, 10 aa, Homo sapiens
  misc_feature: Table A; Target 11070; HLA-A*02:04; BPIFA2; ENSG00000131050; CTA
NTLKGILEKL

SEQ ID NO: 11071 - protein, 10 aa, Homo sapiens
  misc_feature: Table A; Target 11071; HLA-A*33:01; BPIFA2; ENSG00000131050; CTA
NTLKGILEKL

SEQ ID NO: 11072 - protein, 10 aa, Homo sapiens
  misc_feature: Table A; Target 11072; HLA-A*33:03; BPIFA2; ENSG00000131050; CTA
NTLKGILEKL

SEQ ID NO: 11073 - protein, 10 aa, Homo sapiens
  misc_feature: Table A; Target 11073; HLA-A*68:01; BPIFA2; ENSG00000131050; CTA
NTLKGILEKL

SEQ ID NO: 11074 - protein, 10 aa, Homo sapiens
  misc_feature: Table A; Target 11074; HLA-A*68:02; BPIFA2; ENSG00000131050; CTA
NTLKGILEKL

SEQ ID NO: 11075 - protein, 10 aa, Homo sapiens
  misc_feature: Table A; Target 11075; HLA-C*01:02; BPIFA2; ENSG00000131050; CTA
NTLKSTVSSL

SEQ ID NO: 11076 - protein, 11 aa, Homo sapiens
  misc_feature: Table A; Target 11076; HLA-C*04:01; BPIFA2; ENSG00000131050; CTA
NVIQQVVDNPQ

SEQ ID NO: 11077 - protein, 9 aa, Homo sapiens
  misc_feature: Table A; Target 11077; HLA-A*02:01; BPIFA2; ENSG00000131050; CTA
NVISKLLPT

SEQ ID NO: 11078 - protein, 9 aa, Homo sapiens
  misc_feature: Table A; Target 11078; HLA-A*02:03; BPIFA2; ENSG00000131050; CTA
NVISKLLPT

SEQ ID NO: 11079 - protein, 9 aa, Homo sapiens
  misc_feature: Table A; Target 11079; HLA-A*26:01; BPIFA2; ENSG00000131050; CTA
NVISKLLPT

SEQ ID NO: 11080 - protein, 9 aa, Homo sapiens
  misc_feature: Table A; Target 11080; HLA-B*54:01; BPIFA2; ENSG00000131050; CTA
NVISKLLPT

SEQ ID NO: 11081 - protein, 9 aa, Homo sapiens
  misc_feature: Table A; Target 11081; HLA-C*06:02; BPIFA2; ENSG00000131050; CTA
NVISKLLPT

SEQ ID NO: 11082 - protein, 8 aa, Homo sapiens
  misc_feature: Table A; Target 11082; HLA-B*07:02; BPIFA2; ENSG00000131050; CTA
NVTVAGPI

SEQ ID NO: 11083 - protein, 8 aa, Homo sapiens
  misc_feature: Table A; Target 11083; HLA-C*01:02; BPIFA2; ENSG00000131050; CTA
NVTVAGPI

SEQ ID NO: 11084 - protein, 8 aa, Homo sapiens
  misc_feature: Table A; Target 11084; HLA-C*04:01; BPIFA2; ENSG00000131050; CTA
NVTVAGPI

SEQ ID NO: 11085 - protein, 8 aa, Homo sapiens
  misc_feature: Table A; Target 11085; HLA-C*07:01; BPIFA2; ENSG00000131050; CTA
NVTVAGPI

SEQ ID NO: 11086 - protein, 8 aa, Homo sapiens
  misc_feature: Table A; Target 11086; HLA-C*14:02; BPIFA2; ENSG00000131050; CTA
NVTVAGPI

SEQ ID NO: 11087 - protein, 9 aa, Homo sapiens
  misc_feature: Table A; Target 11087; HLA-A*23:01; BPIFA2; ENSG00000131050; CTA
NVTVAGPII

SEQ ID NO: 11088 - protein, 9 aa, Homo sapiens
  misc_feature: Table A; Target 11088; HLA-A*24:02; BPIFA2; ENSG00000131050; CTA
NVTVAGPII

SEQ ID NO: 11089 - protein, 9 aa, Homo sapiens
  misc_feature: Table A; Target 11089; HLA-A*25:01; BPIFA2; ENSG00000131050; CTA
NVTVAGPII

SEQ ID NO: 11090 - protein, 9 aa, Homo sapiens
  misc_feature: Table A; Target 11090; HLA-B*07:02; BPIFA2; ENSG00000131050; CTA
NVTVAGPII

SEQ ID NO: 11091 - protein, 9 aa, Homo sapiens
  misc_feature: Table A; Target 11091; HLA-B*13:02; BPIFA2; ENSG00000131050; CTA
NVTVAGPII

SEQ ID NO: 11092 - protein, 9 aa, Homo sapiens
  misc_feature: Table A; Target 11092; HLA-B*35:01; BPIFA2; ENSG00000131050; CTA
NVTVAGPII

SEQ ID NO: 11093 - protein, 9 aa, Homo sapiens
  misc_feature: Table A; Target 11093; HLA-B*35:03; BPIFA2; ENSG00000131050; CTA
NVTVAGPII

SEQ ID NO: 11094 - protein, 9 aa, Homo sapiens
  misc_feature: Table A; Target 11094; HLA-B*38:01; BPIFA2; ENSG00000131050; CTA
NVTVAGPII

SEQ ID NO: 11095 - protein, 9 aa, Homo sapiens
  misc_feature: Table A; Target 11095; HLA-B*39:01; BPIFA2; ENSG00000131050; CTA
NVTVAGPII

SEQ ID NO: 11096 - protein, 9 aa, Homo sapiens
  misc_feature: Table A; Target 11096; HLA-B*51:01; BPIFA2; ENSG00000131050; CTA
NVTVAGPII

SEQ ID NO: 11097 - protein, 9 aa, Homo sapiens
  misc_feature: Table A; Target 11097; HLA-B*55:01; BPIFA2; ENSG00000131050; CTA
NVTVAGPII

SEQ ID NO: 11098 - protein, 9 aa, Homo sapiens
  misc_feature: Table A; Target 11098; HLA-C*01:02; BPIFA2; ENSG00000131050; CTA
NVTVAGPII

SEQ ID NO: 11099 - protein, 9 aa, Homo sapiens
  misc_feature: Table A; Target 11099; HLA-C*03:03; BPIFA2; ENSG00000131050; CTA
NVTVAGPII

SEQ ID NO: 11100 - protein, 9 aa, Homo sapiens
  misc_feature: Table A; Target 11100; HLA-C*03:04; BPIFA2; ENSG00000131050; CTA
NVTVAGPII

SEQ ID NO: 11101 - protein, 9 aa, Homo sapiens
  misc_feature: Table A; Target 11101; HLA-C*04:01; BPIFA2; ENSG00000131050; CTA
NVTVAGPII

SEQ ID NO: 11102 - protein, 9 aa, Homo sapiens
  misc_feature: Table A; Target 11102; HLA-C*06:02; BPIFA2; ENSG00000131050; CTA
NVTVAGPII

SEQ ID NO: 11103 - protein, 9 aa, Homo sapiens
  misc_feature: Table A; Target 11103; HLA-C*07:01; BPIFA2; ENSG00000131050; CTA
NVTVAGPII

SEQ ID NO: 11104 - protein, 9 aa, Homo sapiens
  misc_feature: Table A; Target 11104; HLA-C*07:04; BPIFA2; ENSG00000131050; CTA
NVTVAGPII

SEQ ID NO: 11105 - protein, 9 aa, Homo sapiens
  misc_feature: Table A; Target 11105; HLA-C*12:03; BPIFA2; ENSG00000131050; CTA
NVTVAGPII

SEQ ID NO: 11106 - protein, 9 aa, Homo sapiens
  misc_feature: Table A; Target 11106; HLA-C*14:02; BPIFA2; ENSG00000131050; CTA
NVTVAGPII

SEQ ID NO: 11107 - protein, 9 aa, Homo sapiens
  misc_feature: Table A; Target 11107; HLA-C*16:01; BPIFA2; ENSG00000131050; CTA
NVTVAGPII

SEQ ID NO: 11108 - protein, 10 aa, Homo sapiens
  misc_feature: Table A; Target 11108; HLA-C*07:01; BPIFA2; ENSG00000131050; CTA
NVTVAGPIIG

SEQ ID NO: 11109 - protein, 9 aa, Homo sapiens
  misc_feature: Table A; Target 11109; HLA-A*02:01; BPIFA2; ENSG00000131050; CTA
NVVDKLEPV

SEQ ID NO: 11110 - protein, 9 aa, Homo sapiens
  misc_feature: Table A; Target 11110; HLA-A*02:03; BPIFA2; ENSG00000131050; CTA
NVVDKLEPV

SEQ ID NO: 11111 - protein, 9 aa, Homo sapiens
  misc_feature: Table A; Target 11111; HLA-A*02:04; BPIFA2; ENSG00000131050; CTA
NVVDKLEPV

SEQ ID NO: 11112 - protein, 9 aa, Homo sapiens
  misc_feature: Table A; Target 11112; HLA-A*02:07; BPIFA2; ENSG00000131050; CTA
NVVDKLEPV

SEQ ID NO: 11113 - protein, 9 aa, Homo sapiens
  misc_feature: Table A; Target 11113; HLA-A*25:01; BPIFA2; ENSG00000131050; CTA
NVVDKLEPV

SEQ ID NO: 11114 - protein, 9 aa, Homo sapiens
  misc_feature: Table A; Target 11114; HLA-A*26:01; BPIFA2; ENSG00000131050; CTA
NVVDKLEPV

SEQ ID NO: 11115 - protein, 9 aa, Homo sapiens
  misc_feature: Table A; Target 11115; HLA-A*68:01; BPIFA2; ENSG00000131050; CTA
NVVDKLEPV

SEQ ID NO: 11116 - protein, 9 aa, Homo sapiens
  misc_feature: Table A; Target 11116; HLA-A*68:02; BPIFA2; ENSG00000131050; CTA
NVVDKLEPV

SEQ ID NO: 11117 - protein, 9 aa, Homo sapiens
  misc_feature: Table A; Target 11117; HLA-B*08:01; BPIFA2; ENSG00000131050; CTA
NVVDKLEPV

SEQ ID NO: 11118 - protein, 9 aa, Homo sapiens
  misc_feature: Table A; Target 11118; HLA-B*46:01; BPIFA2; ENSG00000131050; CTA
NVVDKLEPV

SEQ ID NO: 11119 - protein, 9 aa, Homo sapiens
  misc_feature: Table A; Target 11119; HLA-B*54:01; BPIFA2; ENSG00000131050; CTA
NVVDKLEPV

SEQ ID NO: 11120 - protein, 9 aa, Homo sapiens
  misc_feature: Table A; Target 11120; HLA-B*55:01; BPIFA2; ENSG00000131050; CTA
NVVDKLEPV

SEQ ID NO: 11121 - protein, 9 aa, Homo sapiens
  misc_feature: Table A; Target 11121; HLA-B*56:01; BPIFA2; ENSG00000131050; CTA
NVVDKLEPV

SEQ ID NO: 11122 - protein, 9 aa, Homo sapiens
  misc_feature: Table A; Target 11122; HLA-C*01:02; BPIFA2; ENSG00000131050; CTA
NVVDKLEPV

SEQ ID NO: 11123 - protein, 9 aa, Homo sapiens
  misc_feature: Table A; Target 11123; HLA-C*02:02; BPIFA2; ENSG00000131050; CTA
NVVDKLEPV

SEQ ID NO: 11124 - protein, 9 aa, Homo sapiens
  misc_feature: Table A; Target 11124; HLA-C*03:04; BPIFA2; ENSG00000131050; CTA
NVVDKLEPV

SEQ ID NO: 11125 - protein, 9 aa, Homo sapiens
  misc_feature: Table A; Target 11125; HLA-C*06:02; BPIFA2; ENSG00000131050; CTA
NVVDKLEPV

SEQ ID NO: 11126 - protein, 9 aa, Homo sapiens
  misc_feature: Table A; Target 11126; HLA-C*07:06; BPIFA2; ENSG00000131050; CTA
NVVDKLEPV

SEQ ID NO: 11127 - protein, 10 aa, Homo sapiens
  misc_feature: Table A; Target 11127; HLA-A*02:01; BPIFA2; ENSG00000131050; CTA
NVVDKLEPVL

SEQ ID NO: 11128 - protein, 10 aa, Homo sapiens
  misc_feature: Table A; Target 11128; HLA-A*02:04; BPIFA2; ENSG00000131050; CTA
NVVDKLEPVL

SEQ ID NO: 11129 - protein, 10 aa, Homo sapiens
  misc_feature: Table A; Target 11129; HLA-A*02:07; BPIFA2; ENSG00000131050; CTA
NVVDKLEPVL

SEQ ID NO: 11130 - protein, 10 aa, Homo sapiens
  misc_feature: Table A; Target 11130; HLA-A*25:01; BPIFA2; ENSG00000131050; CTA
NVVDKLEPVL

SEQ ID NO: 11131 - protein, 10 aa, Homo sapiens
  misc_feature: Table A; Target 11131; HLA-A*26:01; BPIFA2; ENSG00000131050; CTA
NVVDKLEPVL

SEQ ID NO: 11132 - protein, 10 aa, Homo sapiens
  misc_feature: Table A; Target 11132; HLA-A*68:01; BPIFA2; ENSG00000131050; CTA
NVVDKLEPVL

SEQ ID NO: 11133 - protein, 10 aa, Homo sapiens
  misc_feature: Table A; Target 11133; HLA-A*68:02; BPIFA2; ENSG00000131050; CTA
NVVDKLEPVL

SEQ ID NO: 11134 - protein, 10 aa, Homo sapiens
  misc_feature: Table A; Target 11134; HLA-B*35:01; BPIFA2; ENSG00000131050; CTA
NVVDKLEPVL

SEQ ID NO: 11135 - protein, 10 aa, Homo sapiens
  misc_feature: Table A; Target 11135; HLA-B*35:03; BPIFA2; ENSG00000131050; CTA
NVVDKLEPVL

SEQ ID NO: 11136 - protein, 10 aa, Homo sapiens
  misc_feature: Table A; Target 11136; HLA-B*38:01; BPIFA2; ENSG00000131050; CTA
NVVDKLEPVL

SEQ ID NO: 11137 - protein, 10 aa, Homo sapiens
  misc_feature: Table A; Target 11137; HLA-B*55:01; BPIFA2; ENSG00000131050; CTA
NVVDKLEPVL

SEQ ID NO: 11138 - protein, 10 aa, Homo sapiens
  misc_feature: Table A; Target 11138; HLA-C*06:02; BPIFA2; ENSG00000131050; CTA
NVVDKLEPVL

SEQ ID NO: 11139 - protein, 10 aa, Homo sapiens
  misc_feature: Table A; Target 11139; HLA-C*07:01; BPIFA2; ENSG00000131050; CTA
NVVDKLEPVL

SEQ ID NO: 11140 - protein, 8 aa, Homo sapiens
  misc_feature: Table A; Target 11140; HLA-C*05:01; BPIFA2; ENSG00000131050; CTA
PIDDGKGL

SEQ ID NO: 11141 - protein, 10 aa, Homo sapiens
  misc_feature: Table A; Target 11141; HLA-A*01:01; BPIFA2; ENSG00000131050; CTA
PIDDGKGLNL

SEQ ID NO: 11142 - protein, 10 aa, Homo sapiens
  misc_feature: Table A; Target 11142; HLA-A*02:07; BPIFA2; ENSG00000131050; CTA
PIDDGKGLNL

SEQ ID NO: 11143 - protein, 10 aa, Homo sapiens
  misc_feature: Table A; Target 11143; HLA-C*05:01; BPIFA2; ENSG00000131050; CTA
PIDDGKGLNL

SEQ ID NO: 11144 - protein, 9 aa, Homo sapiens
  misc_feature: Table A; Target 11144; HLA-A*02:03; BPIFA2; ENSG00000131050; CTA
PIIGQIINL

SEQ ID NO: 11145 - protein, 9 aa, Homo sapiens
  misc_feature: Table A; Target 11145; HLA-A*02:04; BPIFA2; ENSG00000131050; CTA
PIIGQIINL

SEQ ID NO: 11146 - protein, 9 aa, Homo sapiens
  misc_feature: Table A; Target 11146; HLA-A*02:07; BPIFA2; ENSG00000131050; CTA
PIIGQIINL

SEQ ID NO: 11147 - protein, 9 aa, Homo sapiens
  misc_feature: Table A; Target 11147; HLA-A*23:01; BPIFA2; ENSG00000131050; CTA
PIIGQIINL

SEQ ID NO: 11148 - protein, 9 aa, Homo sapiens
  misc_feature: Table A; Target 11148; HLA-A*24:02; BPIFA2; ENSG00000131050; CTA
PIIGQIINL

SEQ ID NO: 11149 - protein, 9 aa, Homo sapiens
  misc_feature: Table A; Target 11149; HLA-A*68:02; BPIFA2; ENSG00000131050; CTA
PIIGQIINL

SEQ ID NO: 11150 - protein, 9 aa, Homo sapiens
  misc_feature: Table A; Target 11150; HLA-C*07:04; BPIFA2; ENSG00000131050; CTA
PIIGQIINL

SEQ ID NO: 11151 - protein, 10 aa, Homo sapiens
  misc_feature: Table A; Target 11151; HLA-A*03:01; BPIFA2; ENSG00000131050; CTA
PIIGQIINLK

SEQ ID NO: 11152 - protein, 10 aa, Homo sapiens
  misc_feature: Table A; Target 11152; HLA-A*11:01; BPIFA2; ENSG00000131050; CTA
PIIGQIINLK

SEQ ID NO: 11153 - protein, 10 aa, Homo sapiens
  misc_feature: Table A; Target 11153; HLA-C*06:02; BPIFA2; ENSG00000131050; CTA
PIIGQIINLK

SEQ ID NO: 11154 - protein, 10 aa, Homo sapiens
  misc_feature: Table A; Target 11154; HLA-C*07:02; BPIFA2; ENSG00000131050; CTA
PQHKTQLQTL

SEQ ID NO: 11155 - protein, 9 aa, Homo sapiens
  misc_feature: Table A; Target 11155; HLA-A*02:03; BPIFA2; ENSG00000131050; CTA
PQTHQPVAV

SEQ ID NO: 11156 - protein, 9 aa, Homo sapiens
  misc_feature: Table A; Target 11156; HLA-B*07:02; BPIFA2; ENSG00000131050; CTA
PQTHQPVAV

SEQ ID NO: 11157 - protein, 9 aa, Homo sapiens
  misc_feature: Table A; Target 11157; HLA-B*13:02; BPIFA2; ENSG00000131050; CTA
PQTHQPVAV

SEQ ID NO: 11158 - protein, 9 aa, Homo sapiens
  misc_feature: Table A; Target 11158; HLA-C*06:02; BPIFA2; ENSG00000131050; CTA
PQTHQPVAV

SEQ ID NO: 11159 - protein, 9 aa, Homo sapiens
  misc_feature: Table A; Target 11159; HLA-C*07:02; BPIFA2; ENSG00000131050; CTA
PQTHQPVAV

SEQ ID NO: 11160 - protein, 10 aa, Homo sapiens
  misc_feature: Table A; Target 11160; HLA-C*07:02; BPIFA2; ENSG00000131050; CTA
PQTHQPVAVL

SEQ ID NO: 11161 - protein, 9 aa, Homo sapiens
  misc_feature: Table A; Target 11161; HLA-C*07:01; BPIFA2; ENSG00000131050; CTA
PTNTDIFGL

SEQ ID NO: 11162 - protein, 10 aa, Homo sapiens
  misc_feature: Table A; Target 11162; HLA-A*03:01; BPIFA2; ENSG00000131050; CTA
PTNTDIFGLK

SEQ ID NO: 11163 - protein, 10 aa, Homo sapiens
  misc_feature: Table A; Target 11163; HLA-A*11:01; BPIFA2; ENSG00000131050; CTA
PTNTDIFGLK

SEQ ID NO: 11164 - protein, 8 aa, Homo sapiens
  misc_feature: Table A; Target 11164; HLA-C*07:01; BPIFA2; ENSG00000131050; CTA
PTSISLSL

SEQ ID NO: 11165 - protein, 8 aa, Homo sapiens
  misc_feature: Table A; Target 11165; HLA-C*07:02; BPIFA2; ENSG00000131050; CTA
PTSISLSL

SEQ ID NO: 11166 - protein, 9 aa, Homo sapiens
  misc_feature: Table A; Target 11166; HLA-A*01:01; BPIFA2; ENSG00000131050; CTA
PTSISLSLL

SEQ ID NO: 11167 - protein, 9 aa, Homo sapiens
  misc_feature: Table A; Target 11167; HLA-B*07:02; BPIFA2; ENSG00000131050; CTA
PTSISLSLL

SEQ ID NO: 11168 - protein, 9 aa, Homo sapiens
  misc_feature: Table A; Target 11168; HLA-C*04:01; BPIFA2; ENSG00000131050; CTA
PTSISLSLL

SEQ ID NO: 11169 - protein, 9 aa, Homo sapiens
  misc_feature: Table A; Target 11169; HLA-C*07:02; BPIFA2; ENSG00000131050; CTA
PTSISLSLL

SEQ ID NO: 11170 - protein, 11 aa, Homo sapiens
  misc_feature: Table A; Target 11170; HLA-B*27:02; BPIFA2; ENSG00000131050; CTA
PTSISLSLLDK

SEQ ID NO: 11171 - protein, 8 aa, Homo sapiens
  misc_feature: Table A; Target 11171; HLA-B*27:05; BPIFA2; ENSG00000131050; CTA
PVTANVTV

SEQ ID NO: 11172 - protein, 8 aa, Homo sapiens
  misc_feature: Table A; Target 11172; HLA-C*04:01; BPIFA2; ENSG00000131050; CTA
PVTANVTV

SEQ ID NO: 11173 - protein, 8 aa, Homo sapiens
  misc_feature: Table A; Target 11173; HLA-C*06:02; BPIFA2; ENSG00000131050; CTA
PVTANVTV

SEQ ID NO: 11174 - protein, 8 aa, Homo sapiens
  misc_feature: Table A; Target 11174; HLA-C*07:01; BPIFA2; ENSG00000131050; CTA
PVTANVTV

SEQ ID NO: 11175 - protein, 8 aa, Homo sapiens
  misc_feature: Table A; Target 11175; HLA-C*07:02; BPIFA2; ENSG00000131050; CTA
PVTANVTV

SEQ ID NO: 11176 - protein, 8 aa, Homo sapiens
  misc_feature: Table A; Target 11176; HLA-C*16:02; BPIFA2; ENSG00000131050; CTA
PVTANVTV

SEQ ID NO: 11177 - protein, 10 aa, Homo sapiens
  misc_feature: Table A; Target 11177; HLA-B*07:02; BPIFA2; ENSG00000131050; CTA
PVTANVTVAG

SEQ ID NO: 11178 - protein, 10 aa, Homo sapiens
  misc_feature: Table A; Target 11178; HLA-C*07:01; BPIFA2; ENSG00000131050; CTA
PVTANVTVAG

SEQ ID NO: 11179 - protein, 10 aa, Homo sapiens
  misc_feature: Table A; Target 11179; HLA-C*07:02; BPIFA2; ENSG00000131050; CTA
PVTANVTVAG

SEQ ID NO: 11180 - protein, 10 aa, Homo sapiens
  misc_feature: Table A; Target 11180; HLA-A*30:01; BPIFA2; ENSG00000131050; CTA
QEAEKLLNNV

SEQ ID NO: 11181 - protein, 10 aa, Homo sapiens
  misc_feature: Table A; Target 11181; HLA-A*68:02; BPIFA2; ENSG00000131050; CTA
QEAEKLLNNV

SEQ ID NO: 11182 - protein, 10 aa, Homo sapiens
  misc_feature: Table A; Target 11182; HLA-B*40:02; BPIFA2; ENSG00000131050; CTA
QEAEKLLNNV

SEQ ID NO: 11183 - protein, 10 aa, Homo sapiens
  misc_feature: Table A; Target 11183; HLA-B*49:01; BPIFA2; ENSG00000131050; CTA
QEAEKLLNNV

SEQ ID NO: 11184 - protein, 11 aa, Homo sapiens
  misc_feature: Table A; Target 11184; HLA-A*30:01; BPIFA2; ENSG00000131050; CTA
QEAEKLLNNVI

SEQ ID NO: 11185 - protein, 11 aa, Homo sapiens
  misc_feature: Table A; Target 11185; HLA-B*27:05; BPIFA2; ENSG00000131050; CTA
QEAEKLLNNVI

SEQ ID NO: 11186 - protein, 11 aa, Homo sapiens
  misc_feature: Table A; Target 11186; HLA-B*38:01; BPIFA2; ENSG00000131050; CTA
QEAEKLLNNVI

SEQ ID NO: 11187 - protein, 11 aa, Homo sapiens
  misc_feature: Table A; Target 11187; HLA-B*40:01; BPIFA2; ENSG00000131050; CTA
QEAEKLLNNVI

SEQ ID NO: 11188 - protein, 11 aa, Homo sapiens
  misc_feature: Table A; Target 11188; HLA-B*40:02; BPIFA2; ENSG00000131050; CTA
QEAEKLLNNVI

SEQ ID NO: 11189 - protein, 11 aa, Homo sapiens
  misc_feature: Table A; Target 11189; HLA-B*44:02; BPIFA2; ENSG00000131050; CTA
QEAEKLLNNVI

SEQ ID NO: 11190 - protein, 11 aa, Homo sapiens
  misc_feature: Table A; Target 11190; HLA-B*44:03; BPIFA2; ENSG00000131050; CTA
QEAEKLLNNVI

SEQ ID NO: 11191 - protein, 11 aa, Homo sapiens
  misc_feature: Table A; Target 11191; HLA-B*49:01; BPIFA2; ENSG00000131050; CTA
QEAEKLLNNVI

SEQ ID NO: 11192 - protein, 11 aa, Homo sapiens
  misc_feature: Table A; Target 11192; HLA-C*06:02; BPIFA2; ENSG00000131050; CTA
QEAEKLLNNVI

SEQ ID NO: 11193 - protein, 11 aa, Homo sapiens
  misc_feature: Table A; Target 11193; HLA-C*07:01; BPIFA2; ENSG00000131050; CTA
QEAEKLLNNVI

SEQ ID NO: 11194 - protein, 11 aa, Homo sapiens
  misc_feature: Table A; Target 11194; HLA-C*12:03; BPIFA2; ENSG00000131050; CTA
QEAEKLLNNVI

SEQ ID NO: 11195 - protein, 9 aa, Homo sapiens
  misc_feature: Table A; Target 11195; HLA-B*38:01; BPIFA2; ENSG00000131050; CTA
QHKTQLQTL

SEQ ID NO: 11196 - protein, 9 aa, Homo sapiens
  misc_feature: Table A; Target 11196; HLA-B*39:01; BPIFA2; ENSG00000131050; CTA
QHKTQLQTL

SEQ ID NO: 11197 - protein, 10 aa, Homo sapiens
  misc_feature: Table A; Target 11197; HLA-A*02:01; BPIFA2; ENSG00000131050; CTA
QIINKFVNSV

SEQ ID NO: 11198 - protein, 10 aa, Homo sapiens
  misc_feature: Table A; Target 11198; HLA-A*02:03; BPIFA2; ENSG00000131050; CTA
QIINKFVNSV

SEQ ID NO: 11199 - protein, 10 aa, Homo sapiens
  misc_feature: Table A; Target 11199; HLA-A*02:04; BPIFA2; ENSG00000131050; CTA
QIINKFVNSV

SEQ ID NO: 11200 - protein, 10 aa, Homo sapiens
  misc_feature: Table A; Target 11200; HLA-A*68:02; BPIFA2; ENSG00000131050; CTA
QIINKFVNSV

SEQ ID NO: 11201 - protein, 9 aa, Homo sapiens
  misc_feature: Table A; Target 11201; HLA-A*02:04; BPIFA2; ENSG00000131050; CTA
QIINLKASL

SEQ ID NO: 11202 - protein, 9 aa, Homo sapiens
  misc_feature: Table A; Target 11202; HLA-A*23:01; BPIFA2; ENSG00000131050; CTA
QIINLKASL

SEQ ID NO: 11203 - protein, 9 aa, Homo sapiens
  misc_feature: Table A; Target 11203; HLA-A*25:01; BPIFA2; ENSG00000131050; CTA
QIINLKASL

SEQ ID NO: 11204 - protein, 9 aa, Homo sapiens
  misc_feature: Table A; Target 11204; HLA-A*32:01; BPIFA2; ENSG00000131050; CTA
QIINLKASL

SEQ ID NO: 11205 - protein, 9 aa, Homo sapiens
  misc_feature: Table A; Target 11205; HLA-B*07:02; BPIFA2; ENSG00000131050; CTA
QIINLKASL

SEQ ID NO: 11206 - protein, 9 aa, Homo sapiens
  misc_feature: Table A; Target 11206; HLA-B*08:01; BPIFA2; ENSG00000131050; CTA
QIINLKASL

SEQ ID NO: 11207 - protein, 9 aa, Homo sapiens
  misc_feature: Table A; Target 11207; HLA-B*15:01; BPIFA2; ENSG00000131050; CTA
QIINLKASL

SEQ ID NO: 11208 - protein, 9 aa, Homo sapiens
  misc_feature: Table A; Target 11208; HLA-B*27:05; BPIFA2; ENSG00000131050; CTA
QIINLKASL

SEQ ID NO: 11209 - protein, 9 aa, Homo sapiens
  misc_feature: Table A; Target 11209; HLA-B*44:03; BPIFA2; ENSG00000131050; CTA
QIINLKASL

SEQ ID NO: 11210 - protein, 9 aa, Homo sapiens
  misc_feature: Table A; Target 11210; HLA-B*46:01; BPIFA2; ENSG00000131050; CTA
QIINLKASL

SEQ ID NO: 11211 - protein, 9 aa, Homo sapiens
  misc_feature: Table A; Target 11211; HLA-B*58:01; BPIFA2; ENSG00000131050; CTA
QIINLKASL

SEQ ID NO: 11212 - protein, 9 aa, Homo sapiens
  misc_feature: Table A; Target 11212; HLA-C*01:02; BPIFA2; ENSG00000131050; CTA
QIINLKASL

SEQ ID NO: 11213 - protein, 9 aa, Homo sapiens
  misc_feature: Table A; Target 11213; HLA-C*03:03; BPIFA2; ENSG00000131050; CTA
QIINLKASL

SEQ ID NO: 11214 - protein, 9 aa, Homo sapiens
  misc_feature: Table A; Target 11214; HLA-C*03:04; BPIFA2; ENSG00000131050; CTA
QIINLKASL

SEQ ID NO: 11215 - protein, 9 aa, Homo sapiens
  misc_feature: Table A; Target 11215; HLA-C*07:02; BPIFA2; ENSG00000131050; CTA
QIINLKASL

SEQ ID NO: 11216 - protein, 9 aa, Homo sapiens
  misc_feature: Table A; Target 11216; HLA-C*07:04; BPIFA2; ENSG00000131050; CTA
QIINLKASL

SEQ ID NO: 11217 - protein, 9 aa, Homo sapiens
  misc_feature: Table A; Target 11217; HLA-C*14:02; BPIFA2; ENSG00000131050; CTA
QIINLKASL

SEQ ID NO: 11218 - protein, 9 aa, Homo sapiens
  misc_feature: Table A; Target 11218; HLA-B*15:03; BPIFA2; ENSG00000131050; CTA
QKAQEAEKL

SEQ ID NO: 11219 - protein, 9 aa, Homo sapiens
  misc_feature: Table A; Target 11219; HLA-B*38:01; BPIFA2; ENSG00000131050; CTA
QKAQEAEKL

SEQ ID NO: 11220 - protein, 9 aa, Homo sapiens
  misc_feature: Table A; Target 11220; HLA-B*39:01; BPIFA2; ENSG00000131050; CTA
QKAQEAEKL

SEQ ID NO: 11221 - protein, 8 aa, Homo sapiens
  misc_feature: Table A; Target 11221; HLA-A*02:01; BPIFA2; ENSG00000131050; CTA
QLWKLVLL

SEQ ID NO: 11222 - protein, 8 aa, Homo sapiens
  misc_feature: Table A; Target 11222; HLA-A*02:04; BPIFA2; ENSG00000131050; CTA
QLWKLVLL

SEQ ID NO: 11223 - protein, 8 aa, Homo sapiens
  misc_feature: Table A; Target 11223; HLA-A*02:07; BPIFA2; ENSG00000131050; CTA
QLWKLVLL

SEQ ID NO: 11224 - protein, 9 aa, Homo sapiens
  misc_feature: Table A; Target 11224; HLA-A*02:01; BPIFA2; ENSG00000131050; CTA
QLWKLVLLC

SEQ ID NO: 11225 - protein, 9 aa, Homo sapiens
  misc_feature: Table A; Target 11225; HLA-B*07:02; BPIFA2; ENSG00000131050; CTA
QPVAVLGEC

SEQ ID NO: 11226 - protein, 9 aa, Homo sapiens
  misc_feature: Table A; Target 11226; HLA-B*35:01; BPIFA2; ENSG00000131050; CTA
QPVAVLGEC

SEQ ID NO: 11227 - protein, 9 aa, Homo sapiens
  misc_feature: Table A; Target 11227; HLA-B*35:03; BPIFA2; ENSG00000131050; CTA
QPVAVLGEC

SEQ ID NO: 11228 - protein, 9 aa, Homo sapiens
  misc_feature: Table A; Target 11228; HLA-B*54:01; BPIFA2; ENSG00000131050; CTA
QPVAVLGEC

SEQ ID NO: 11229 - protein, 9 aa, Homo sapiens
  misc_feature: Table A; Target 11229; HLA-B*55:01; BPIFA2; ENSG00000131050; CTA
QPVAVLGEC

SEQ ID NO: 11230 - protein, 9 aa, Homo sapiens
  misc_feature: Table A; Target 11230; HLA-B*56:01; BPIFA2; ENSG00000131050; CTA
QPVAVLGEC

SEQ ID NO: 11231 - protein, 10 aa, Homo sapiens
  misc_feature: Table A; Target 11231; HLA-B*35:01; BPIFA2; ENSG00000131050; CTA
QPVAVLGECA

SEQ ID NO: 11232 - protein, 10 aa, Homo sapiens
  misc_feature: Table A; Target 11232; HLA-B*35:03; BPIFA2; ENSG00000131050; CTA
QPVAVLGECA

SEQ ID NO: 11233 - protein, 10 aa, Homo sapiens
  misc_feature: Table A; Target 11233; HLA-B*54:01; BPIFA2; ENSG00000131050; CTA
QPVAVLGECA

SEQ ID NO: 11234 - protein, 10 aa, Homo sapiens
  misc_feature: Table A; Target 11234; HLA-B*55:01; BPIFA2; ENSG00000131050; CTA
QPVAVLGECA

SEQ ID NO: 11235 - protein, 10 aa, Homo sapiens
  misc_feature: Table A; Target 11235; HLA-B*56:01; BPIFA2; ENSG00000131050; CTA
QPVAVLGECA

SEQ ID NO: 11236 - protein, 10 aa, Homo sapiens
  misc_feature: Table A; Target 11236; HLA-C*04:01; BPIFA2; ENSG00000131050; CTA
QPVAVLGECA

SEQ ID NO: 11237 - protein, 10 aa, Homo sapiens
  misc_feature: Table A; Target 11237; HLA-C*06:02; BPIFA2; ENSG00000131050; CTA
QPVAVLGECA

SEQ ID NO: 11238 - protein, 9 aa, Homo sapiens
  misc_feature: Table A; Target 11238; HLA-B*15:01; BPIFA2; ENSG00000131050; CTA
QQVVDNPQH

SEQ ID NO: 11239 - protein, 9 aa, Homo sapiens
  misc_feature: Table A; Target 11239; HLA-B*27:05; BPIFA2; ENSG00000131050; CTA
QQVVDNPQH

SEQ ID NO: 11240 - protein, 9 aa, Homo sapiens
  misc_feature: Table A; Target 11240; HLA-B*39:01; BPIFA2; ENSG00000131050; CTA
QQVVDNPQH

SEQ ID NO: 11241 - protein, 9 aa, Homo sapiens
  misc_feature: Table A; Target 11241; HLA-C*07:01; BPIFA2; ENSG00000131050; CTA
QQVVDNPQH

SEQ ID NO: 11242 - protein, 8 aa, Homo sapiens
  misc_feature: Table A; Target 11242; HLA-B*08:01; BPIFA2; ENSG00000131050; CTA
QTHQPVAV

SEQ ID NO: 11243 - protein, 8 aa, Homo sapiens
  misc_feature: Table A; Target 11243; HLA-B*13:02; BPIFA2; ENSG00000131050; CTA
QTHQPVAV

SEQ ID NO: 11244 - protein, 8 aa, Homo sapiens
  misc_feature: Table A; Target 11244; HLA-C*06:02; BPIFA2; ENSG00000131050; CTA
QTHQPVAV

SEQ ID NO: 11245 - protein, 9 aa, Homo sapiens
  misc_feature: Table A; Target 11245; HLA-A*25:01; BPIFA2; ENSG00000131050; CTA
QTHQPVAVL

SEQ ID NO: 11246 - protein, 9 aa, Homo sapiens
  misc_feature: Table A; Target 11246; HLA-A*31:01; BPIFA2; ENSG00000131050; CTA
QTHQPVAVL

SEQ ID NO: 11247 - protein, 9 aa, Homo sapiens
  misc_feature: Table A; Target 11247; HLA-A*32:01; BPIFA2; ENSG00000131050; CTA
QTHQPVAVL

SEQ ID NO: 11248 - protein, 9 aa, Homo sapiens
  misc_feature: Table A; Target 11248; HLA-A*33:01; BPIFA2; ENSG00000131050; CTA
QTHQPVAVL

SEQ ID NO: 11249 - protein, 9 aa, Homo sapiens
  misc_feature: Table A; Target 11249; HLA-A*33:03; BPIFA2; ENSG00000131050; CTA
QTHQPVAVL

SEQ ID NO: 11250 - protein, 9 aa, Homo sapiens
  misc_feature: Table A; Target 11250; HLA-A*68:01; BPIFA2; ENSG00000131050; CTA
QTHQPVAVL

SEQ ID NO: 11251 - protein, 9 aa, Homo sapiens
  misc_feature: Table A; Target 11251; HLA-A*68:02; BPIFA2; ENSG00000131050; CTA
QTHQPVAVL

SEQ ID NO: 11252 - protein, 9 aa, Homo sapiens
  misc_feature: Table A; Target 11252; HLA-B*35:03; BPIFA2; ENSG00000131050; CTA
QTHQPVAVL

SEQ ID NO: 11253 - protein, 9 aa, Homo sapiens
  misc_feature: Table A; Target 11253; HLA-B*38:01; BPIFA2; ENSG00000131050; CTA
QTHQPVAVL

SEQ ID NO: 11254 - protein, 9 aa, Homo sapiens
  misc_feature: Table A; Target 11254; HLA-B*39:01; BPIFA2; ENSG00000131050; CTA
QTHQPVAVL

SEQ ID NO: 11255 - protein, 9 aa, Homo sapiens
  misc_feature: Table A; Target 11255; HLA-B*40:02; BPIFA2; ENSG00000131050; CTA
QTHQPVAVL

SEQ ID NO: 11256 - protein, 9 aa, Homo sapiens
  misc_feature: Table A; Target 11256; HLA-B*46:01; BPIFA2; ENSG00000131050; CTA
QTHQPVAVL

SEQ ID NO: 11257 - protein, 9 aa, Homo sapiens
  misc_feature: Table A; Target 11257; HLA-B*57:01; BPIFA2; ENSG00000131050; CTA
QTHQPVAVL

SEQ ID NO: 11258 - protein, 9 aa, Homo sapiens
  misc_feature: Table A; Target 11258; HLA-B*58:01; BPIFA2; ENSG00000131050; CTA
QTHQPVAVL

SEQ ID NO: 11259 - protein, 9 aa, Homo sapiens
  misc_feature: Table A; Target 11259; HLA-C*01:02; BPIFA2; ENSG00000131050; CTA
QTHQPVAVL

SEQ ID NO: 11260 - protein, 9 aa, Homo sapiens
  misc_feature: Table A; Target 11260; HLA-C*02:02; BPIFA2; ENSG00000131050; CTA
QTHQPVAVL

SEQ ID NO: 11261 - protein, 9 aa, Homo sapiens
  misc_feature: Table A; Target 11261; HLA-C*03:03; BPIFA2; ENSG00000131050; CTA
QTHQPVAVL

SEQ ID NO: 11262 - protein, 9 aa, Homo sapiens
  misc_feature: Table A; Target 11262; HLA-C*03:04; BPIFA2; ENSG00000131050; CTA
QTHQPVAVL

SEQ ID NO: 11263 - protein, 9 aa, Homo sapiens
  misc_feature: Table A; Target 11263; HLA-C*05:01; BPIFA2; ENSG00000131050; CTA
QTHQPVAVL

SEQ ID NO: 11264 - protein, 9 aa, Homo sapiens
  misc_feature: Table A; Target 11264; HLA-C*06:02; BPIFA2; ENSG00000131050; CTA
QTHQPVAVL

SEQ ID NO: 11265 - protein, 9 aa, Homo sapiens
  misc_feature: Table A; Target 11265; HLA-C*07:01; BPIFA2; ENSG00000131050; CTA
QTHQPVAVL

SEQ ID NO: 11266 - protein, 9 aa, Homo sapiens
  misc_feature: Table A; Target 11266; HLA-C*07:02; BPIFA2; ENSG00000131050; CTA
QTHQPVAVL

SEQ ID NO: 11267 - protein, 9 aa, Homo sapiens
  misc_feature: Table A; Target 11267; HLA-C*07:04; BPIFA2; ENSG00000131050; CTA
QTHQPVAVL

SEQ ID NO: 11268 - protein, 9 aa, Homo sapiens
  misc_feature: Table A; Target 11268; HLA-C*12:03; BPIFA2; ENSG00000131050; CTA
QTHQPVAVL

SEQ ID NO: 11269 - protein, 9 aa, Homo sapiens
  misc_feature: Table A; Target 11269; HLA-A*01:01; BPIFA2; ENSG00000131050; CTA
QVVDNPQHK

SEQ ID NO: 11270 - protein, 9 aa, Homo sapiens
  misc_feature: Table A; Target 11270; HLA-A*03:01; BPIFA2; ENSG00000131050; CTA
QVVDNPQHK

SEQ ID NO: 11271 - protein, 9 aa, Homo sapiens
  misc_feature: Table A; Target 11271; HLA-A*03:02; BPIFA2; ENSG00000131050; CTA
QVVDNPQHK

SEQ ID NO: 11272 - protein, 9 aa, Homo sapiens
  misc_feature: Table A; Target 11272; HLA-A*11:01; BPIFA2; ENSG00000131050; CTA
QVVDNPQHK

SEQ ID NO: 11273 - protein, 9 aa, Homo sapiens
  misc_feature: Table A; Target 11273; HLA-A*25:01; BPIFA2; ENSG00000131050; CTA
QVVDNPQHK

SEQ ID NO: 11274 - protein, 9 aa, Homo sapiens
  misc_feature: Table A; Target 11274; HLA-A*26:01; BPIFA2; ENSG00000131050; CTA
QVVDNPQHK

SEQ ID NO: 11275 - protein, 9 aa, Homo sapiens
  misc_feature: Table A; Target 11275; HLA-A*31:01; BPIFA2; ENSG00000131050; CTA
QVVDNPQHK

SEQ ID NO: 11276 - protein, 9 aa, Homo sapiens
  misc_feature: Table A; Target 11276; HLA-A*33:03; BPIFA2; ENSG00000131050; CTA
QVVDNPQHK

SEQ ID NO: 11277 - protein, 9 aa, Homo sapiens
  misc_feature: Table A; Target 11277; HLA-A*68:01; BPIFA2; ENSG00000131050; CTA
QVVDNPQHK

SEQ ID NO: 11278 - protein, 9 aa, Homo sapiens
  misc_feature: Table A; Target 11278; HLA-C*07:06; BPIFA2; ENSG00000131050; CTA
QVVDNPQHK

SEQ ID NO: 11279 - protein, 10 aa, Homo sapiens
  misc_feature: Table A; Target 11279; HLA-A*32:01; BPIFA2; ENSG00000131050; CTA
QVVDNPQHKT

SEQ ID NO: 11280 - protein, 10 aa, Homo sapiens
  misc_feature: Table A; Target 11280; HLA-B*58:01; BPIFA2; ENSG00000131050; CTA
QVVDNPQHKT

SEQ ID NO: 11281 - protein, 10 aa, Homo sapiens
  misc_feature: Table A; Target 11281; HLA-C*06:02; BPIFA2; ENSG00000131050; CTA
QVVDNPQHKT

SEQ ID NO: 11282 - protein, 10 aa, Homo sapiens
  misc_feature: Table A; Target 11282; HLA-C*07:01; BPIFA2; ENSG00000131050; CTA
QVVDNPQHKT

SEQ ID NO: 11283 - protein, 10 aa, Homo sapiens
  misc_feature: Table A; Target 11283; HLA-C*07:02; BPIFA2; ENSG00000131050; CTA
QVVDNPQHKT

SEQ ID NO: 11284 - protein, 9 aa, Homo sapiens
  misc_feature: Table A; Target 11284; HLA-A*02:03; BPIFA2; ENSG00000131050; CTA
RIFIHSLDV

SEQ ID NO: 11285 - protein, 9 aa, Homo sapiens
  misc_feature: Table A; Target 11285; HLA-A*03:01; BPIFA2; ENSG00000131050; CTA
SAWQLAKQK

SEQ ID NO: 11286 - protein, 9 aa, Homo sapiens
  misc_feature: Table A; Target 11286; HLA-A*03:02; BPIFA2; ENSG00000131050; CTA
SAWQLAKQK

SEQ ID NO: 11287 - protein, 9 aa, Homo sapiens
  misc_feature: Table A; Target 11287; HLA-A*11:01; BPIFA2; ENSG00000131050; CTA
SAWQLAKQK

SEQ ID NO: 11288 - protein, 9 aa, Homo sapiens
  misc_feature: Table A; Target 11288; HLA-A*31:01; BPIFA2; ENSG00000131050; CTA
SAWQLAKQK

SEQ ID NO: 11289 - protein, 9 aa, Homo sapiens
  misc_feature: Table A; Target 11289; HLA-A*33:01; BPIFA2; ENSG00000131050; CTA
SAWQLAKQK

SEQ ID NO: 11290 - protein, 9 aa, Homo sapiens
  misc_feature: Table A; Target 11290; HLA-B*27:02; BPIFA2; ENSG00000131050; CTA
SAWQLAKQK

SEQ ID NO: 11291 - protein, 9 aa, Homo sapiens
  misc_feature: Table A; Target 11291; HLA-B*57:01; BPIFA2; ENSG00000131050; CTA
SAWQLAKQK

SEQ ID NO: 11292 - protein, 9 aa, Homo sapiens
  misc_feature: Table A; Target 11292; HLA-C*06:02; BPIFA2; ENSG00000131050; CTA
SAWQLAKQK

SEQ ID NO: 11293 - protein, 9 aa, Homo sapiens
  misc_feature: Table A; Target 11293; HLA-C*07:06; BPIFA2; ENSG00000131050; CTA
SAWQLAKQK

SEQ ID NO: 11294 - protein, 9 aa, Homo sapiens
  misc_feature: Table A; Target 11294; HLA-C*12:03; BPIFA2; ENSG00000131050; CTA
SAWQLAKQK

SEQ ID NO: 11295 - protein, 9 aa, Homo sapiens
  misc_feature: Table A; Target 11295; HLA-C*16:02; BPIFA2; ENSG00000131050; CTA
SAWQLAKQK

SEQ ID NO: 11296 - protein, 10 aa, Homo sapiens
  misc_feature: Table A; Target 11296; HLA-B*54:01; BPIFA2; ENSG00000131050; CTA
SAWQLAKQKA

SEQ ID NO: 11297 - protein, 8 aa, Homo sapiens
  misc_feature: Table A; Target 11297; HLA-A*30:01; BPIFA2; ENSG00000131050; CTA
SDPTSISL

SEQ ID NO: 11298 - protein, 8 aa, Homo sapiens
  misc_feature: Table A; Target 11298; HLA-B*07:02; BPIFA2; ENSG00000131050; CTA
SDPTSISL

SEQ ID NO: 11299 - protein, 8 aa, Homo sapiens
  misc_feature: Table A; Target 11299; HLA-B*37:01; BPIFA2; ENSG00000131050; CTA
SDPTSISL

SEQ ID NO: 11300 - protein, 8 aa, Homo sapiens
  misc_feature: Table A; Target 11300; HLA-B*40:01; BPIFA2; ENSG00000131050; CTA
SDPTSISL

SEQ ID NO: 11301 - protein, 8 aa, Homo sapiens
  misc_feature: Table A; Target 11301; HLA-B*40:02; BPIFA2; ENSG00000131050; CTA
SDPTSISL

SEQ ID NO: 11302 - protein, 8 aa, Homo sapiens
  misc_feature: Table A; Target 11302; HLA-C*01:02; BPIFA2; ENSG00000131050; CTA
SDPTSISL

SEQ ID NO: 11303 - protein, 8 aa, Homo sapiens
  misc_feature: Table A; Target 11303; HLA-C*04:01; BPIFA2; ENSG00000131050; CTA
SDPTSISL

SEQ ID NO: 11304 - protein, 8 aa, Homo sapiens
  misc_feature: Table A; Target 11304; HLA-C*06:02; BPIFA2; ENSG00000131050; CTA
SDPTSISL

SEQ ID NO: 11305 - protein, 8 aa, Homo sapiens
  misc_feature: Table A; Target 11305; HLA-C*07:01; BPIFA2; ENSG00000131050; CTA
SDPTSISL

SEQ ID NO: 11306 - protein, 8 aa, Homo sapiens
  misc_feature: Table A; Target 11306; HLA-C*07:02; BPIFA2; ENSG00000131050; CTA
SDPTSISL

SEQ ID NO: 11307 - protein, 10 aa, Homo sapiens
  misc_feature: Table A; Target 11307; HLA-A*30:01; BPIFA2; ENSG00000131050; CTA
SDPTSISLSL

SEQ ID NO: 11308 - protein, 10 aa, Homo sapiens
  misc_feature: Table A; Target 11308; HLA-B*07:02; BPIFA2; ENSG00000131050; CTA
SDPTSISLSL

SEQ ID NO: 11309 - protein, 10 aa, Homo sapiens
  misc_feature: Table A; Target 11309; HLA-B*40:01; BPIFA2; ENSG00000131050; CTA
SDPTSISLSL

SEQ ID NO: 11310 - protein, 10 aa, Homo sapiens
  misc_feature: Table A; Target 11310; HLA-B*40:02; BPIFA2; ENSG00000131050; CTA
SDPTSISLSL

SEQ ID NO: 11311 - protein, 10 aa, Homo sapiens
  misc_feature: Table A; Target 11311; HLA-C*07:02; BPIFA2; ENSG00000131050; CTA
SDPTSISLSL

SEQ ID NO: 11312 - protein, 8 aa, Homo sapiens
  misc_feature: Table A; Target 11312; HLA-A*30:01; BPIFA2; ENSG00000131050; CTA
SESLLDNL

SEQ ID NO: 11313 - protein, 8 aa, Homo sapiens
  misc_feature: Table A; Target 11313; HLA-B*18:01; BPIFA2; ENSG00000131050; CTA
SESLLDNL

SEQ ID NO: 11314 - protein, 8 aa, Homo sapiens
  misc_feature: Table A; Target 11314; HLA-B*37:01; BPIFA2; ENSG00000131050; CTA
SESLLDNL

SEQ ID NO: 11315 - protein, 8 aa, Homo sapiens
  misc_feature: Table A; Target 11315; HLA-B*40:01; BPIFA2; ENSG00000131050; CTA
SESLLDNL

SEQ ID NO: 11316 - protein, 8 aa, Homo sapiens
  misc_feature: Table A; Target 11316; HLA-B*40:02; BPIFA2; ENSG00000131050; CTA
SESLLDNL

SEQ ID NO: 11317 - protein, 8 aa, Homo sapiens
  misc_feature: Table A; Target 11317; HLA-B*49:01; BPIFA2; ENSG00000131050; CTA
SESLLDNL

SEQ ID NO: 11318 - protein, 8 aa, Homo sapiens
  misc_feature: Table A; Target 11318; HLA-C*01:02; BPIFA2; ENSG00000131050; CTA
SFPVTANV

SEQ ID NO: 11319 - protein, 8 aa, Homo sapiens
  misc_feature: Table A; Target 11319; HLA-C*04:01; BPIFA2; ENSG00000131050; CTA
SFPVTANV

SEQ ID NO: 11320 - protein, 8 aa, Homo sapiens
  misc_feature: Table A; Target 11320; HLA-C*14:02; BPIFA2; ENSG00000131050; CTA
SFPVTANV

SEQ ID NO: 11321 - protein, 9 aa, Homo sapiens
  misc_feature: Table A; Target 11321; HLA-C*01:02; BPIFA2; ENSG00000131050; CTA
SFPVTANVT

SEQ ID NO: 11322 - protein, 9 aa, Homo sapiens
  misc_feature: Table A; Target 11322; HLA-C*14:02; BPIFA2; ENSG00000131050; CTA
SFPVTANVT

SEQ ID NO: 11323 - protein, 10 aa, Homo sapiens
  misc_feature: Table A; Target 11323; HLA-C*01:02; BPIFA2; ENSG00000131050; CTA
SFPVTANVTV

SEQ ID NO: 11324 - protein, 10 aa, Homo sapiens
  misc_feature: Table A; Target 11324; HLA-C*04:01; BPIFA2; ENSG00000131050; CTA
SFPVTANVTV

SEQ ID NO: 11325 - protein, 10 aa, Homo sapiens
  misc_feature: Table A; Target 11325; HLA-C*14:02; BPIFA2; ENSG00000131050; CTA
SFPVTANVTV

SEQ ID NO: 11326 - protein, 9 aa, Homo sapiens
  misc_feature: Table A; Target 11326; HLA-A*03:01; BPIFA2; ENSG00000131050; CTA
SISLSLLDK

SEQ ID NO: 11327 - protein, 9 aa, Homo sapiens
  misc_feature: Table A; Target 11327; HLA-A*03:02; BPIFA2; ENSG00000131050; CTA
SISLSLLDK

SEQ ID NO: 11328 - protein, 9 aa, Homo sapiens
  misc_feature: Table A; Target 11328; HLA-A*11:01; BPIFA2; ENSG00000131050; CTA
SISLSLLDK

SEQ ID NO: 11329 - protein, 8 aa, Homo sapiens
  misc_feature: Table A; Target 11329; HLA-A*02:01; BPIFA2; ENSG00000131050; CTA
SLDLLTAV

SEQ ID NO: 11330 - protein, 8 aa, Homo sapiens
  misc_feature: Table A; Target 11330; HLA-A*02:04; BPIFA2; ENSG00000131050; CTA
SLDLLTAV

SEQ ID NO: 11331 - protein, 8 aa, Homo sapiens
  misc_feature: Table A; Target 11331; HLA-A*02:07; BPIFA2; ENSG00000131050; CTA
SLDLLTAV

SEQ ID NO: 11332 - protein, 8 aa, Homo sapiens
  misc_feature: Table A; Target 11332; HLA-B*13:02; BPIFA2; ENSG00000131050; CTA
SLDLLTAV

SEQ ID NO: 11333 - protein, 8 aa, Homo sapiens
  misc_feature: Table A; Target 11333; HLA-B*55:01; BPIFA2; ENSG00000131050; CTA
SLDLLTAV

SEQ ID NO: 11334 - protein, 8 aa, Homo sapiens
  misc_feature: Table A; Target 11334; HLA-C*04:01; BPIFA2; ENSG00000131050; CTA
SLDLLTAV

SEQ ID NO: 11335 - protein, 8 aa, Homo sapiens
  misc_feature: Table A; Target 11335; HLA-C*05:01; BPIFA2; ENSG00000131050; CTA
SLDLLTAV

SEQ ID NO: 11336 - protein, 9 aa, Homo sapiens
  misc_feature: Table A; Target 11336; HLA-B*27:05; BPIFA2; ENSG00000131050; CTA
SLDLLTAVT

SEQ ID NO: 11337 - protein, 10 aa, Homo sapiens
  misc_feature: Table A; Target 11337; HLA-A*02:01; BPIFA2; ENSG00000131050; CTA
SLDLLTAVTI

SEQ ID NO: 11338 - protein, 10 aa, Homo sapiens
  misc_feature: Table A; Target 11338; HLA-A*02:03; BPIFA2; ENSG00000131050; CTA
SLDLLTAVTI

SEQ ID NO: 11339 - protein, 10 aa, Homo sapiens
  misc_feature: Table A; Target 11339; HLA-A*02:04; BPIFA2; ENSG00000131050; CTA
SLDLLTAVTI

SEQ ID NO: 11340 - protein, 10 aa, Homo sapiens
  misc_feature: Table A; Target 11340; HLA-A*02:07; BPIFA2; ENSG00000131050; CTA
SLDLLTAVTI

SEQ ID NO: 11341 - protein, 10 aa, Homo sapiens
  misc_feature: Table A; Target 11341; HLA-B*13:02; BPIFA2; ENSG00000131050; CTA
SLDLLTAVTI

SEQ ID NO: 11342 - protein, 10 aa, Homo sapiens
  misc_feature: Table A; Target 11342; HLA-B*38:01; BPIFA2; ENSG00000131050; CTA
SLDLLTAVTI

SEQ ID NO: 11343 - protein, 10 aa, Homo sapiens
  misc_feature: Table A; Target 11343; HLA-B*40:01; BPIFA2; ENSG00000131050; CTA
SLDLLTAVTI

SEQ ID NO: 11344 - protein, 10 aa, Homo sapiens
  misc_feature: Table A; Target 11344; HLA-B*49:01; BPIFA2; ENSG00000131050; CTA
SLDLLTAVTI

SEQ ID NO: 11345 - protein, 10 aa, Homo sapiens
  misc_feature: Table A; Target 11345; HLA-B*55:01; BPIFA2; ENSG00000131050; CTA
SLDLLTAVTI

SEQ ID NO: 11346 - protein, 10 aa, Homo sapiens
  misc_feature: Table A; Target 11346; HLA-C*04:01; BPIFA2; ENSG00000131050; CTA
SLDLLTAVTI

SEQ ID NO: 11347 - protein, 10 aa, Homo sapiens
  misc_feature: Table A; Target 11347; HLA-C*05:01; BPIFA2; ENSG00000131050; CTA
SLDLLTAVTI

SEQ ID NO: 11348 - protein, 10 aa, Homo sapiens
  misc_feature: Table A; Target 11348; HLA-C*07:04; BPIFA2; ENSG00000131050; CTA
SLDLLTAVTI

SEQ ID NO: 11349 - protein, 9 aa, Homo sapiens
  misc_feature: Table A; Target 11349; HLA-A*02:07; BPIFA2; ENSG00000131050; CTA
SLDVNVIQQ

SEQ ID NO: 11350 - protein, 9 aa, Homo sapiens
  misc_feature: Table A; Target 11350; HLA-C*04:01; BPIFA2; ENSG00000131050; CTA
SLDVNVIQQ

SEQ ID NO: 11351 - protein, 10 aa, Homo sapiens
  misc_feature: Table A; Target 11351; HLA-A*01:01; BPIFA2; ENSG00000131050; CTA
SLDVNVIQQV

SEQ ID NO: 11352 - protein, 10 aa, Homo sapiens
  misc_feature: Table A; Target 11352; HLA-A*02:01; BPIFA2; ENSG00000131050; CTA
SLDVNVIQQV

SEQ ID NO: 11353 - protein, 10 aa, Homo sapiens
  misc_feature: Table A; Target 11353; HLA-A*02:03; BPIFA2; ENSG00000131050; CTA
SLDVNVIQQV

SEQ ID NO: 11354 - protein, 10 aa, Homo sapiens
  misc_feature: Table A; Target 11354; HLA-A*02:04; BPIFA2; ENSG00000131050; CTA
SLDVNVIQQV

SEQ ID NO: 11355 - protein, 10 aa, Homo sapiens
  misc_feature: Table A; Target 11355; HLA-A*02:07; BPIFA2; ENSG00000131050; CTA
SLDVNVIQQV

SEQ ID NO: 11356 - protein, 10 aa, Homo sapiens
  misc_feature: Table A; Target 11356; HLA-A*68:02; BPIFA2; ENSG00000131050; CTA
SLDVNVIQQV

SEQ ID NO: 11357 - protein, 10 aa, Homo sapiens
  misc_feature: Table A; Target 11357; HLA-B*13:02; BPIFA2; ENSG00000131050; CTA
SLDVNVIQQV

SEQ ID NO: 11358 - protein, 10 aa, Homo sapiens
  misc_feature: Table A; Target 11358; HLA-B*38:01; BPIFA2; ENSG00000131050; CTA
SLDVNVIQQV

SEQ ID NO: 11359 - protein, 10 aa, Homo sapiens
  misc_feature: Table A; Target 11359; HLA-B*55:01; BPIFA2; ENSG00000131050; CTA
SLDVNVIQQV

SEQ ID NO: 11360 - protein, 10 aa, Homo sapiens
  misc_feature: Table A; Target 11360; HLA-C*04:01; BPIFA2; ENSG00000131050; CTA
SLDVNVIQQV

SEQ ID NO: 11361 - protein, 10 aa, Homo sapiens
  misc_feature: Table A; Target 11361; HLA-C*05:01; BPIFA2; ENSG00000131050; CTA
SLDVNVIQQV

SEQ ID NO: 11362 - protein, 11 aa, Homo sapiens
  misc_feature: Table A; Target 11362; HLA-A*02:01; BPIFA2; ENSG00000131050; CTA
SLDVNVIQQVV

SEQ ID NO: 11363 - protein, 11 aa, Homo sapiens
  misc_feature: Table A; Target 11363; HLA-A*02:07; BPIFA2; ENSG00000131050; CTA
SLDVNVIQQVV

SEQ ID NO: 11364 - protein, 11 aa, Homo sapiens
  misc_feature: Table A; Target 11364; HLA-A*02:01; BPIFA2; ENSG00000131050; CTA
SLILDVKAEPI

SEQ ID NO: 11365 - protein, 11 aa, Homo sapiens
  misc_feature: Table A; Target 11365; HLA-A*02:03; BPIFA2; ENSG00000131050; CTA
SLILDVKAEPI

SEQ ID NO: 11366 - protein, 11 aa, Homo sapiens
  misc_feature: Table A; Target 11366; HLA-C*06:02; BPIFA2; ENSG00000131050; CTA
SLILDVKAEPI

SEQ ID NO: 11367 - protein, 9 aa, Homo sapiens
  misc_feature: Table A; Target 11367; HLA-A*02:01; BPIFA2; ENSG00000131050; CTA
SLLDKHSQI

SEQ ID NO: 11368 - protein, 9 aa, Homo sapiens
  misc_feature: Table A; Target 11368; HLA-A*02:03; BPIFA2; ENSG00000131050; CTA
SLLDKHSQI

SEQ ID NO: 11369 - protein, 9 aa, Homo sapiens
  misc_feature: Table A; Target 11369; HLA-A*02:04; BPIFA2; ENSG00000131050; CTA
SLLDKHSQI

SEQ ID NO: 11370 - protein, 9 aa, Homo sapiens
  misc_feature: Table A; Target 11370; HLA-A*02:07; BPIFA2; ENSG00000131050; CTA
SLLDKHSQI

SEQ ID NO: 11371 - protein, 9 aa, Homo sapiens
  misc_feature: Table A; Target 11371; HLA-A*23:01; BPIFA2; ENSG00000131050; CTA
SLLDKHSQI

SEQ ID NO: 11372 - protein, 9 aa, Homo sapiens
  misc_feature: Table A; Target 11372; HLA-A*24:02; BPIFA2; ENSG00000131050; CTA
SLLDKHSQI

SEQ ID NO: 11373 - protein, 9 aa, Homo sapiens
  misc_feature: Table A; Target 11373; HLA-A*31:01; BPIFA2; ENSG00000131050; CTA
SLLDKHSQI

SEQ ID NO: 11374 - protein, 9 aa, Homo sapiens
  misc_feature: Table A; Target 11374; HLA-B*08:01; BPIFA2; ENSG00000131050; CTA
SLLDKHSQI

SEQ ID NO: 11375 - protein, 9 aa, Homo sapiens
  misc_feature: Table A; Target 11375; HLA-B*13:02; BPIFA2; ENSG00000131050; CTA
SLLDKHSQI

SEQ ID NO: 11376 - protein, 9 aa, Homo sapiens
  misc_feature: Table A; Target 11376; HLA-B*55:01; BPIFA2; ENSG00000131050; CTA
SLLDKHSQI

SEQ ID NO: 11377 - protein, 10 aa, Homo sapiens
  misc_feature: Table A; Target 11377; HLA-A*02:01; BPIFA2; ENSG00000131050; CTA
SLLDKHSQII

SEQ ID NO: 11378 - protein, 10 aa, Homo sapiens
  misc_feature: Table A; Target 11378; HLA-A*02:03; BPIFA2; ENSG00000131050; CTA
SLLDKHSQII

SEQ ID NO: 11379 - protein, 10 aa, Homo sapiens
  misc_feature: Table A; Target 11379; HLA-A*02:01; BPIFA2; ENSG00000131050; CTA
SLLDNLGNDL

SEQ ID NO: 11380 - protein, 10 aa, Homo sapiens
  misc_feature: Table A; Target 11380; HLA-A*02:03; BPIFA2; ENSG00000131050; CTA
SLLDNLGNDL

SEQ ID NO: 11381 - protein, 10 aa, Homo sapiens
  misc_feature: Table A; Target 11381; HLA-A*02:04; BPIFA2; ENSG00000131050; CTA
SLLDNLGNDL

SEQ ID NO: 11382 - protein, 10 aa, Homo sapiens
  misc_feature: Table A; Target 11382; HLA-C*01:02; BPIFA2; ENSG00000131050; CTA
SLLDNLGNDL

SEQ ID NO: 11383 - protein, 10 aa, Homo sapiens
  misc_feature: Table A; Target 11383; HLA-A*02:04; BPIFA2; ENSG00000131050; CTA
SLLQKEICPL

SEQ ID NO: 11384 - protein, 8 aa, Homo sapiens
  misc_feature: Table A; Target 11384; HLA-C*06:02; BPIFA2; ENSG00000131050; CTA
SNSLILDV

SEQ ID NO: 11385 - protein, 9 aa, Homo sapiens
  misc_feature: Table A; Target 11385; HLA-A*03:02; BPIFA2; ENSG00000131050; CTA
SNSLILDVK

SEQ ID NO: 11386 - protein, 9 aa, Homo sapiens
  misc_feature: Table A; Target 11386; HLA-A*11:01; BPIFA2; ENSG00000131050; CTA
SNSLILDVK

SEQ ID NO: 11387 - protein, 9 aa, Homo sapiens
  misc_feature: Table A; Target 11387; HLA-B*27:02; BPIFA2; ENSG00000131050; CTA
SNSLILDVK

SEQ ID NO: 11388 - protein, 9 aa, Homo sapiens
  misc_feature: Table A; Target 11388; HLA-B*27:05; BPIFA2; ENSG00000131050; CTA
SNSLILDVK

SEQ ID NO: 11389 - protein, 8 aa, Homo sapiens
  misc_feature: Table A; Target 11389; HLA-B*13:02; BPIFA2; ENSG00000131050; CTA
SQIINKFV

SEQ ID NO: 11390 - protein, 8 aa, Homo sapiens
  misc_feature: Table A; Target 11390; HLA-C*06:02; BPIFA2; ENSG00000131050; CTA
SQIINKFV

SEQ ID NO: 11391 - protein, 11 aa, Homo sapiens
  misc_feature: Table A; Target 11391; HLA-A*02:03; BPIFA2; ENSG00000131050; CTA
SQIINKFVNSV

SEQ ID NO: 11392 - protein, 8 aa, Homo sapiens
  misc_feature: Table A; Target 11392; HLA-A*11:01; BPIFA2; ENSG00000131050; CTA
SSAWQLAK

SEQ ID NO: 11393 - protein, 10 aa, Homo sapiens
  misc_feature: Table A; Target 11393; HLA-A*03:01; BPIFA2; ENSG00000131050; CTA
SSAWQLAKQK

SEQ ID NO: 11394 - protein, 10 aa, Homo sapiens
  misc_feature: Table A; Target 11394; HLA-A*03:02; BPIFA2; ENSG00000131050; CTA
SSAWQLAKQK

SEQ ID NO: 11395 - protein, 10 aa, Homo sapiens
  misc_feature: Table A; Target 11395; HLA-A*11:01; BPIFA2; ENSG00000131050; CTA
SSAWQLAKQK

SEQ ID NO: 11396 - protein, 10 aa, Homo sapiens
  misc_feature: Table A; Target 11396; HLA-C*06:02; BPIFA2; ENSG00000131050; CTA
SSAWQLAKQK

SEQ ID NO: 11397 - protein, 10 aa, Homo sapiens
  misc_feature: Table A; Target 11397; HLA-C*07:06; BPIFA2; ENSG00000131050; CTA
SSAWQLAKQK

SEQ ID NO: 11398 - protein, 8 aa, Homo sapiens
  misc_feature: Table A; Target 11398; HLA-B*58:01; BPIFA2; ENSG00000131050; CTA
SSLLQKEI

SEQ ID NO: 11399 - protein, 8 aa, Homo sapiens
  misc_feature: Table A; Target 11399; HLA-C*06:02; BPIFA2; ENSG00000131050; CTA
STVSSLLQ

SEQ ID NO: 11400 - protein, 8 aa, Homo sapiens
  misc_feature: Table A; Target 11400; HLA-C*07:01; BPIFA2; ENSG00000131050; CTA
STVSSLLQ

SEQ ID NO: 11401 - protein, 9 aa, Homo sapiens
  misc_feature: Table A; Target 11401; HLA-A*01:01; BPIFA2; ENSG00000131050; CTA
STVSSLLQK

SEQ ID NO: 11402 - protein, 9 aa, Homo sapiens
  misc_feature: Table A; Target 11402; HLA-A*03:01; BPIFA2; ENSG00000131050; CTA
STVSSLLQK

SEQ ID NO: 11403 - protein, 9 aa, Homo sapiens
  misc_feature: Table A; Target 11403; HLA-A*03:02; BPIFA2; ENSG00000131050; CTA
STVSSLLQK

SEQ ID NO: 11404 - protein, 9 aa, Homo sapiens
  misc_feature: Table A; Target 11404; HLA-A*11:01; BPIFA2; ENSG00000131050; CTA
STVSSLLQK

SEQ ID NO: 11405 - protein, 9 aa, Homo sapiens
  misc_feature: Table A; Target 11405; HLA-A*26:01; BPIFA2; ENSG00000131050; CTA
STVSSLLQK

SEQ ID NO: 11406 - protein, 9 aa, Homo sapiens
  misc_feature: Table A; Target 11406; HLA-A*31:01; BPIFA2; ENSG00000131050; CTA
STVSSLLQK

SEQ ID NO: 11407 - protein, 9 aa, Homo sapiens
  misc_feature: Table A; Target 11407; HLA-A*33:01; BPIFA2; ENSG00000131050; CTA
STVSSLLQK

SEQ ID NO: 11408 - protein, 9 aa, Homo sapiens
  misc_feature: Table A; Target 11408; HLA-A*33:03; BPIFA2; ENSG00000131050; CTA
STVSSLLQK

SEQ ID NO: 11409 - protein, 9 aa, Homo sapiens
  misc_feature: Table A; Target 11409; HLA-A*68:01; BPIFA2; ENSG00000131050; CTA
STVSSLLQK

SEQ ID NO: 11410 - protein, 9 aa, Homo sapiens
  misc_feature: Table A; Target 11410; HLA-A*68:02; BPIFA2; ENSG00000131050; CTA
STVSSLLQK

SEQ ID NO: 11411 - protein, 9 aa, Homo sapiens
  misc_feature: Table A; Target 11411; HLA-B*13:02; BPIFA2; ENSG00000131050; CTA
STVSSLLQK

SEQ ID NO: 11412 - protein, 9 aa, Homo sapiens
  misc_feature: Table A; Target 11412; HLA-B*27:02; BPIFA2; ENSG00000131050; CTA
STVSSLLQK

SEQ ID NO: 11413 - protein, 9 aa, Homo sapiens
  misc_feature: Table A; Target 11413; HLA-B*27:05; BPIFA2; ENSG00000131050; CTA
STVSSLLQK

SEQ ID NO: 11414 - protein, 9 aa, Homo sapiens
  misc_feature: Table A; Target 11414; HLA-B*57:01; BPIFA2; ENSG00000131050; CTA
STVSSLLQK

SEQ ID NO: 11415 - protein, 9 aa, Homo sapiens
  misc_feature: Table A; Target 11415; HLA-C*06:02; BPIFA2; ENSG00000131050; CTA
STVSSLLQK

SEQ ID NO: 11416 - protein, 9 aa, Homo sapiens
  misc_feature: Table A; Target 11416; HLA-C*07:06; BPIFA2; ENSG00000131050; CTA
STVSSLLQK

SEQ ID NO: 11417 - protein, 10 aa, Homo sapiens
  misc_feature: Table A; Target 11417; HLA-C*06:02; BPIFA2; ENSG00000131050; CTA
STVSSLLQKE

SEQ ID NO: 11418 - protein, 11 aa, Homo sapiens
  misc_feature: Table A; Target 11418; HLA-C*06:02; BPIFA2; ENSG00000131050; CTA
STVSSLLQKEI

SEQ ID NO: 11419 - protein, 9 aa, Homo sapiens
  misc_feature: Table A; Target 11419; HLA-C*16:02; BPIFA2; ENSG00000131050; CTA
SVINTLKST

SEQ ID NO: 11420 - protein, 10 aa, Homo sapiens
  misc_feature: Table A; Target 11420; HLA-A*02:03; BPIFA2; ENSG00000131050; CTA
SVINTLKSTV

SEQ ID NO: 11421 - protein, 10 aa, Homo sapiens
  misc_feature: Table A; Target 11421; HLA-A*02:07; BPIFA2; ENSG00000131050; CTA
SVINTLKSTV

SEQ ID NO: 11422 - protein, 10 aa, Homo sapiens
  misc_feature: Table A; Target 11422; HLA-A*03:01; BPIFA2; ENSG00000131050; CTA
SVINTLKSTV

SEQ ID NO: 11423 - protein, 10 aa, Homo sapiens
  misc_feature: Table A; Target 11423; HLA-A*11:01; BPIFA2; ENSG00000131050; CTA
SVINTLKSTV

SEQ ID NO: 11424 - protein, 10 aa, Homo sapiens
  misc_feature: Table A; Target 11424; HLA-A*25:01; BPIFA2; ENSG00000131050; CTA
SVINTLKSTV

SEQ ID NO: 11425 - protein, 10 aa, Homo sapiens
  misc_feature: Table A; Target 11425; HLA-A*26:01; BPIFA2; ENSG00000131050; CTA
SVINTLKSTV

SEQ ID NO: 11426 - protein, 10 aa, Homo sapiens
  misc_feature: Table A; Target 11426; HLA-A*31:01; BPIFA2; ENSG00000131050; CTA
SVINTLKSTV

SEQ ID NO: 11427 - protein, 10 aa, Homo sapiens
  misc_feature: Table A; Target 11427; HLA-A*32:01; BPIFA2; ENSG00000131050; CTA
SVINTLKSTV

SEQ ID NO: 11428 - protein, 10 aa, Homo sapiens
  misc_feature: Table A; Target 11428; HLA-A*68:01; BPIFA2; ENSG00000131050; CTA
SVINTLKSTV

SEQ ID NO: 11429 - protein, 10 aa, Homo sapiens
  misc_feature: Table A; Target 11429; HLA-A*68:02; BPIFA2; ENSG00000131050; CTA
SVINTLKSTV

SEQ ID NO: 11430 - protein, 10 aa, Homo sapiens
  misc_feature: Table A; Target 11430; HLA-B*07:02; BPIFA2; ENSG00000131050; CTA
SVINTLKSTV

SEQ ID NO: 11431 - protein, 10 aa, Homo sapiens
  misc_feature: Table A; Target 11431; HLA-B*13:02; BPIFA2; ENSG00000131050; CTA
SVINTLKSTV

SEQ ID NO: 11432 - protein, 10 aa, Homo sapiens
  misc_feature: Table A; Target 11432; HLA-B*40:02; BPIFA2; ENSG00000131050; CTA
SVINTLKSTV

SEQ ID NO: 11433 - protein, 10 aa, Homo sapiens
  misc_feature: Table A; Target 11433; HLA-B*51:01; BPIFA2; ENSG00000131050; CTA
SVINTLKSTV

SEQ ID NO: 11434 - protein, 10 aa, Homo sapiens
  misc_feature: Table A; Target 11434; HLA-B*55:01; BPIFA2; ENSG00000131050; CTA
SVINTLKSTV

SEQ ID NO: 11435 - protein, 10 aa, Homo sapiens
  misc_feature: Table A; Target 11435; HLA-B*56:01; BPIFA2; ENSG00000131050; CTA
SVINTLKSTV

SEQ ID NO: 11436 - protein, 10 aa, Homo sapiens
  misc_feature: Table A; Target 11436; HLA-C*01:02; BPIFA2; ENSG00000131050; CTA
SVINTLKSTV

SEQ ID NO: 11437 - protein, 10 aa, Homo sapiens
  misc_feature: Table A; Target 11437; HLA-C*02:02; BPIFA2; ENSG00000131050; CTA
SVINTLKSTV

SEQ ID NO: 11438 - protein, 10 aa, Homo sapiens
  misc_feature: Table A; Target 11438; HLA-C*06:02; BPIFA2; ENSG00000131050; CTA
SVINTLKSTV

SEQ ID NO: 11439 - protein, 10 aa, Homo sapiens
  misc_feature: Table A; Target 11439; HLA-C*07:02; BPIFA2; ENSG00000131050; CTA
SVINTLKSTV

SEQ ID NO: 11440 - protein, 10 aa, Homo sapiens
  misc_feature: Table A; Target 11440; HLA-C*07:06; BPIFA2; ENSG00000131050; CTA
SVINTLKSTV

SEQ ID NO: 11441 - protein, 10 aa, Homo sapiens
  misc_feature: Table A; Target 11441; HLA-C*12:03; BPIFA2; ENSG00000131050; CTA
SVINTLKSTV

SEQ ID NO: 11442 - protein, 10 aa, Homo sapiens
  misc_feature: Table A; Target 11442; HLA-C*16:02; BPIFA2; ENSG00000131050; CTA
SVINTLKSTV

SEQ ID NO: 11443 - protein, 10 aa, Homo sapiens
  misc_feature: Table A; Target 11443; HLA-C*16:04; BPIFA2; ENSG00000131050; CTA
SVINTLKSTV

SEQ ID NO: 11444 - protein, 10 aa, Homo sapiens
  misc_feature: Table A; Target 11444; HLA-B*27:02; BPIFA2; ENSG00000131050; CTA
TAVTIETDPQ

SEQ ID NO: 11445 - protein, 10 aa, Homo sapiens
  misc_feature: Table A; Target 11445; HLA-C*07:01; BPIFA2; ENSG00000131050; CTA
TAVTIETDPQ

SEQ ID NO: 11446 - protein, 11 aa, Homo sapiens
  misc_feature: Table A; Target 11446; HLA-C*04:01; BPIFA2; ENSG00000131050; CTA
TAVTIETDPQT

SEQ ID NO: 11447 - protein, 8 aa, Homo sapiens
  misc_feature: Table A; Target 11447; HLA-A*30:01; BPIFA2; ENSG00000131050; CTA
TDIFGLKI

SEQ ID NO: 11448 - protein, 8 aa, Homo sapiens
  misc_feature: Table A; Target 11448; HLA-B*40:02; BPIFA2; ENSG00000131050; CTA
TDIFGLKI

SEQ ID NO: 11449 - protein, 8 aa, Homo sapiens
  misc_feature: Table A; Target 11449; HLA-B*44:02; BPIFA2; ENSG00000131050; CTA
TDIFGLKI

SEQ ID NO: 11450 - protein, 8 aa, Homo sapiens
  misc_feature: Table A; Target 11450; HLA-B*44:03; BPIFA2; ENSG00000131050; CTA
TDIFGLKI

SEQ ID NO: 11451 - protein, 8 aa, Homo sapiens
  misc_feature: Table A; Target 11451; HLA-B*49:01; BPIFA2; ENSG00000131050; CTA
TDIFGLKI

SEQ ID NO: 11452 - protein, 8 aa, Homo sapiens
  misc_feature: Table A; Target 11452; HLA-B*51:01; BPIFA2; ENSG00000131050; CTA
TDIFGLKI

SEQ ID NO: 11453 - protein, 8 aa, Homo sapiens
  misc_feature: Table A; Target 11453; HLA-C*06:02; BPIFA2; ENSG00000131050; CTA
TDIFGLKI

SEQ ID NO: 11454 - protein, 8 aa, Homo sapiens
  misc_feature: Table A; Target 11454; HLA-C*07:01; BPIFA2; ENSG00000131050; CTA
TDIFGLKI

SEQ ID NO: 11455 - protein, 10 aa, Homo sapiens
  misc_feature: Table A; Target 11455; HLA-C*04:01; BPIFA2; ENSG00000131050; CTA
TDIFGLKISN

SEQ ID NO: 11456 - protein, 9 aa, Homo sapiens
  misc_feature: Table A; Target 11456; HLA-B*37:01; BPIFA2; ENSG00000131050; CTA
TDPQTHQPV

SEQ ID NO: 11457 - protein, 9 aa, Homo sapiens
  misc_feature: Table A; Target 11457; HLA-C*04:01; BPIFA2; ENSG00000131050; CTA
TDPQTHQPV

SEQ ID NO: 11458 - protein, 9 aa, Homo sapiens
  misc_feature: Table A; Target 11458; HLA-C*06:02; BPIFA2; ENSG00000131050; CTA
TDPQTHQPV

SEQ ID NO: 11459 - protein, 9 aa, Homo sapiens
  misc_feature: Table A; Target 11459; HLA-C*07:01; BPIFA2; ENSG00000131050; CTA
TDPQTHQPV

SEQ ID NO: 11460 - protein, 9 aa, Homo sapiens
  misc_feature: Table A; Target 11460; HLA-C*07:02; BPIFA2; ENSG00000131050; CTA
TDPQTHQPV

SEQ ID NO: 11461 - protein, 10 aa, Homo sapiens
  misc_feature: Table A; Target 11461; HLA-C*04:01; BPIFA2; ENSG00000131050; CTA
TDPQTHQPVA

SEQ ID NO: 11462 - protein, 10 aa, Homo sapiens
  misc_feature: Table A; Target 11462; HLA-C*06:02; BPIFA2; ENSG00000131050; CTA
TDPQTHQPVA

SEQ ID NO: 11463 - protein, 10 aa, Homo sapiens
  misc_feature: Table A; Target 11463; HLA-C*07:02; BPIFA2; ENSG00000131050; CTA
TDPQTHQPVA

SEQ ID NO: 11464 - protein, 11 aa, Homo sapiens
  misc_feature: Table A; Target 11464; HLA-C*04:01; BPIFA2; ENSG00000131050; CTA
TDPQTHQPVAV

SEQ ID NO: 11465 - protein, 10 aa, Homo sapiens
  misc_feature: Table A; Target 11465; HLA-C*07:01; BPIFA2; ENSG00000131050; CTA
TGTSESLLDN

SEQ ID NO: 11466 - protein, 11 aa, Homo sapiens
  misc_feature: Table A; Target 11466; HLA-B*27:05; BPIFA2; ENSG00000131050; CTA
TGTSESLLDNL

SEQ ID NO: 11467 - protein, 11 aa, Homo sapiens
  misc_feature: Table A; Target 11467; HLA-B*38:01; BPIFA2; ENSG00000131050; CTA
TGTSESLLDNL

SEQ ID NO: 11468 - protein, 11 aa, Homo sapiens
  misc_feature: Table A; Target 11468; HLA-B*39:01; BPIFA2; ENSG00000131050; CTA
TGTSESLLDNL

SEQ ID NO: 11469 - protein, 8 aa, Homo sapiens
  misc_feature: Table A; Target 11469; HLA-B*27:05; BPIFA2; ENSG00000131050; CTA
THQPVAVL

SEQ ID NO: 11470 - protein, 8 aa, Homo sapiens
  misc_feature: Table A; Target 11470; HLA-B*38:01; BPIFA2; ENSG00000131050; CTA
THQPVAVL

SEQ ID NO: 11471 - protein, 8 aa, Homo sapiens
  misc_feature: Table A; Target 11471; HLA-B*39:01; BPIFA2; ENSG00000131050; CTA
THQPVAVL

SEQ ID NO: 11472 - protein, 9 aa, Homo sapiens
  misc_feature: Table A; Target 11472; HLA-B*38:01; BPIFA2; ENSG00000131050; CTA
THQPVAVLG

SEQ ID NO: 11473 - protein, 9 aa, Homo sapiens
  misc_feature: Table A; Target 11473; HLA-B*39:01; BPIFA2; ENSG00000131050; CTA
THQPVAVLG

SEQ ID NO: 11474 - protein, 8 aa, Homo sapiens
  misc_feature: Table A; Target 11474; HLA-A*03:01; BPIFA2; ENSG00000131050; CTA
TLKGILEK

SEQ ID NO: 11475 - protein, 8 aa, Homo sapiens
  misc_feature: Table A; Target 11475; HLA-C*06:02; BPIFA2; ENSG00000131050; CTA
TLKGILEK

SEQ ID NO: 11476 - protein, 9 aa, Homo sapiens
  misc_feature: Table A; Target 11476; HLA-A*02:01; BPIFA2; ENSG00000131050; CTA
TLKGILEKL

SEQ ID NO: 11477 - protein, 9 aa, Homo sapiens
  misc_feature: Table A; Target 11477; HLA-A*02:03; BPIFA2; ENSG00000131050; CTA
TLKGILEKL

SEQ ID NO: 11478 - protein, 9 aa, Homo sapiens
  misc_feature: Table A; Target 11478; HLA-A*02:04; BPIFA2; ENSG00000131050; CTA
TLKGILEKL

SEQ ID NO: 11479 - protein, 9 aa, Homo sapiens
  misc_feature: Table A; Target 11479; HLA-A*02:07; BPIFA2; ENSG00000131050; CTA
TLKGILEKL

SEQ ID NO: 11480 - protein, 9 aa, Homo sapiens
  misc_feature: Table A; Target 11480; HLA-A*03:01; BPIFA2; ENSG00000131050; CTA
TLKGILEKL

SEQ ID NO: 11481 - protein, 9 aa, Homo sapiens
  misc_feature: Table A; Target 11481; HLA-A*31:01; BPIFA2; ENSG00000131050; CTA
TLKGILEKL

SEQ ID NO: 11482 - protein, 9 aa, Homo sapiens
  misc_feature: Table A; Target 11482; HLA-A*33:03; BPIFA2; ENSG00000131050; CTA
TLKGILEKL

SEQ ID NO: 11483 - protein, 9 aa, Homo sapiens
  misc_feature: Table A; Target 11483; HLA-A*68:02; BPIFA2; ENSG00000131050; CTA
TLKGILEKL

SEQ ID NO: 11484 - protein, 9 aa, Homo sapiens
  misc_feature: Table A; Target 11484; HLA-B*08:01; BPIFA2; ENSG00000131050; CTA
TLKGILEKL

SEQ ID NO: 11485 - protein, 9 aa, Homo sapiens
  misc_feature: Table A; Target 11485; HLA-B*27:05; BPIFA2; ENSG00000131050; CTA
TLKGILEKL

SEQ ID NO: 11486 - protein, 9 aa, Homo sapiens
  misc_feature: Table A; Target 11486; HLA-B*40:02; BPIFA2; ENSG00000131050; CTA
TLKGILEKL

SEQ ID NO: 11487 - protein, 9 aa, Homo sapiens
  misc_feature: Table A; Target 11487; HLA-B*46:01; BPIFA2; ENSG00000131050; CTA
TLKGILEKL

SEQ ID NO: 11488 - protein, 9 aa, Homo sapiens
  misc_feature: Table A; Target 11488; HLA-B*55:01; BPIFA2; ENSG00000131050; CTA
TLKGILEKL

SEQ ID NO: 11489 - protein, 9 aa, Homo sapiens
  misc_feature: Table A; Target 11489; HLA-C*01:02; BPIFA2; ENSG00000131050; CTA
TLKGILEKL

SEQ ID NO: 11490 - protein, 9 aa, Homo sapiens
  misc_feature: Table A; Target 11490; HLA-C*04:01; BPIFA2; ENSG00000131050; CTA
TLKGILEKL

SEQ ID NO: 11491 - protein, 9 aa, Homo sapiens
  misc_feature: Table A; Target 11491; HLA-C*06:02; BPIFA2; ENSG00000131050; CTA
TLKGILEKL

SEQ ID NO: 11492 - protein, 9 aa, Homo sapiens
  misc_feature: Table A; Target 11492; HLA-C*07:02; BPIFA2; ENSG00000131050; CTA
TLKGILEKL

SEQ ID NO: 11493 - protein, 9 aa, Homo sapiens
  misc_feature: Table A; Target 11493; HLA-A*02:03; BPIFA2; ENSG00000131050; CTA
TLKSTVSSL

SEQ ID NO: 11494 - protein, 9 aa, Homo sapiens
  misc_feature: Table A; Target 11494; HLA-A*02:04; BPIFA2; ENSG00000131050; CTA
TLKSTVSSL

SEQ ID NO: 11495 - protein, 9 aa, Homo sapiens
  misc_feature: Table A; Target 11495; HLA-A*03:01; BPIFA2; ENSG00000131050; CTA
TLKSTVSSL

SEQ ID NO: 11496 - protein, 9 aa, Homo sapiens
  misc_feature: Table A; Target 11496; HLA-A*25:01; BPIFA2; ENSG00000131050; CTA
TLKSTVSSL

SEQ ID NO: 11497 - protein, 9 aa, Homo sapiens
  misc_feature: Table A; Target 11497; HLA-A*26:01; BPIFA2; ENSG00000131050; CTA
TLKSTVSSL

SEQ ID NO: 11498 - protein, 9 aa, Homo sapiens
  misc_feature: Table A; Target 11498; HLA-A*30:01; BPIFA2; ENSG00000131050; CTA
TLKSTVSSL

SEQ ID NO: 11499 - protein, 9 aa, Homo sapiens
  misc_feature: Table A; Target 11499; HLA-A*31:01; BPIFA2; ENSG00000131050; CTA
TLKSTVSSL

SEQ ID NO: 11500 - protein, 9 aa, Homo sapiens
  misc_feature: Table A; Target 11500; HLA-A*32:01; BPIFA2; ENSG00000131050; CTA
TLKSTVSSL

SEQ ID NO: 11501 - protein, 9 aa, Homo sapiens
  misc_feature: Table A; Target 11501; HLA-B*07:02; BPIFA2; ENSG00000131050; CTA
TLKSTVSSL

SEQ ID NO: 11502 - protein, 9 aa, Homo sapiens
  misc_feature: Table A; Target 11502; HLA-B*08:01; BPIFA2; ENSG00000131050; CTA
TLKSTVSSL

SEQ ID NO: 11503 - protein, 9 aa, Homo sapiens
  misc_feature: Table A; Target 11503; HLA-B*15:01; BPIFA2; ENSG00000131050; CTA
TLKSTVSSL

SEQ ID NO: 11504 - protein, 9 aa, Homo sapiens
  misc_feature: Table A; Target 11504; HLA-B*15:03; BPIFA2; ENSG00000131050; CTA
TLKSTVSSL

SEQ ID NO: 11505 - protein, 9 aa, Homo sapiens
  misc_feature: Table A; Target 11505; HLA-B*37:01; BPIFA2; ENSG00000131050; CTA
TLKSTVSSL

SEQ ID NO: 11506 - protein, 9 aa, Homo sapiens
  misc_feature: Table A; Target 11506; HLA-B*40:02; BPIFA2; ENSG00000131050; CTA
TLKSTVSSL

SEQ ID NO: 11507 - protein, 9 aa, Homo sapiens
  misc_feature: Table A; Target 11507; HLA-B*46:01; BPIFA2; ENSG00000131050; CTA
TLKSTVSSL

SEQ ID NO: 11508 - protein, 9 aa, Homo sapiens
  misc_feature: Table A; Target 11508; HLA-B*55:01; BPIFA2; ENSG00000131050; CTA
TLKSTVSSL

SEQ ID NO: 11509 - protein, 9 aa, Homo sapiens
  misc_feature: Table A; Target 11509; HLA-C*01:02; BPIFA2; ENSG00000131050; CTA
TLKSTVSSL

SEQ ID NO: 11510 - protein, 9 aa, Homo sapiens
  misc_feature: Table A; Target 11510; HLA-C*02:02; BPIFA2; ENSG00000131050; CTA
TLKSTVSSL

SEQ ID NO: 11511 - protein, 9 aa, Homo sapiens
  misc_feature: Table A; Target 11511; HLA-C*06:02; BPIFA2; ENSG00000131050; CTA
TLKSTVSSL

SEQ ID NO: 11512 - protein, 9 aa, Homo sapiens
  misc_feature: Table A; Target 11512; HLA-C*07:02; BPIFA2; ENSG00000131050; CTA
TLKSTVSSL

SEQ ID NO: 11513 - protein, 9 aa, Homo sapiens
  misc_feature: Table A; Target 11513; HLA-C*07:04; BPIFA2; ENSG00000131050; CTA
TLKSTVSSL

SEQ ID NO: 11514 - protein, 9 aa, Homo sapiens
  misc_feature: Table A; Target 11514; HLA-C*12:03; BPIFA2; ENSG00000131050; CTA
TLKSTVSSL

SEQ ID NO: 11515 - protein, 9 aa, Homo sapiens
  misc_feature: Table A; Target 11515; HLA-C*14:02; BPIFA2; ENSG00000131050; CTA
TLKSTVSSL

SEQ ID NO: 11516 - protein, 9 aa, Homo sapiens
  misc_feature: Table A; Target 11516; HLA-C*16:02; BPIFA2; ENSG00000131050; CTA
TLKSTVSSL

SEQ ID NO: 11517 - protein, 10 aa, Homo sapiens
  misc_feature: Table A; Target 11517; HLA-A*02:03; BPIFA2; ENSG00000131050; CTA
TLKSTVSSLL

SEQ ID NO: 11518 - protein, 10 aa, Homo sapiens
  misc_feature: Table A; Target 11518; HLA-A*03:01; BPIFA2; ENSG00000131050; CTA
TLKSTVSSLL

SEQ ID NO: 11519 - protein, 10 aa, Homo sapiens
  misc_feature: Table A; Target 11519; HLA-A*31:01; BPIFA2; ENSG00000131050; CTA
TLKSTVSSLL

SEQ ID NO: 11520 - protein, 10 aa, Homo sapiens
  misc_feature: Table A; Target 11520; HLA-B*07:02; BPIFA2; ENSG00000131050; CTA
TLKSTVSSLL

SEQ ID NO: 11521 - protein, 10 aa, Homo sapiens
  misc_feature: Table A; Target 11521; HLA-C*06:02; BPIFA2; ENSG00000131050; CTA
TLKSTVSSLL

SEQ ID NO: 11522 - protein, 10 aa, Homo sapiens
  misc_feature: Table A; Target 11522; HLA-C*07:01; BPIFA2; ENSG00000131050; CTA
TLKSTVSSLL

SEQ ID NO: 11523 - protein, 10 aa, Homo sapiens
  misc_feature: Table A; Target 11523; HLA-C*07:02; BPIFA2; ENSG00000131050; CTA
TLKSTVSSLL

SEQ ID NO: 11524 - protein, 10 aa, Homo sapiens
  misc_feature: Table A; Target 11524; HLA-C*07:04; BPIFA2; ENSG00000131050; CTA
TLKSTVSSLL

SEQ ID NO: 11525 - protein, 11 aa, Homo sapiens
  misc_feature: Table A; Target 11525; HLA-C*04:01; BPIFA2; ENSG00000131050; CTA
TLKSTVSSLLQ

SEQ ID NO: 11526 - protein, 11 aa, Homo sapiens
  misc_feature: Table A; Target 11526; HLA-C*06:02; BPIFA2; ENSG00000131050; CTA
TLKSTVSSLLQ

SEQ ID NO: 11527 - protein, 11 aa, Homo sapiens
  misc_feature: Table A; Target 11527; HLA-C*07:01; BPIFA2; ENSG00000131050; CTA
TLKSTVSSLLQ

SEQ ID NO: 11528 - protein, 9 aa, Homo sapiens
  misc_feature: Table A; Target 11528; HLA-A*11:01; BPIFA2; ENSG00000131050; CTA
TNTDIFGLK

SEQ ID NO: 11529 - protein, 9 aa, Homo sapiens
  misc_feature: Table A; Target 11529; HLA-A*29:02; BPIFA2; ENSG00000131050; CTA
TNTDIFGLK

SEQ ID NO: 11530 - protein, 9 aa, Homo sapiens
  misc_feature: Table A; Target 11530; HLA-A*33:01; BPIFA2; ENSG00000131050; CTA
TNTDIFGLK

SEQ ID NO: 11531 - protein, 9 aa, Homo sapiens
  misc_feature: Table A; Target 11531; HLA-A*33:03; BPIFA2; ENSG00000131050; CTA
TNTDIFGLK

SEQ ID NO: 11532 - protein, 9 aa, Homo sapiens
  misc_feature: Table A; Target 11532; HLA-A*68:01; BPIFA2; ENSG00000131050; CTA
TNTDIFGLK

SEQ ID NO: 11533 - protein, 9 aa, Homo sapiens
  misc_feature: Table A; Target 11533; HLA-A*68:02; BPIFA2; ENSG00000131050; CTA
TNTDIFGLK

SEQ ID NO: 11534 - protein, 9 aa, Homo sapiens
  misc_feature: Table A; Target 11534; HLA-B*27:02; BPIFA2; ENSG00000131050; CTA
TNTDIFGLK

SEQ ID NO: 11535 - protein, 9 aa, Homo sapiens
  misc_feature: Table A; Target 11535; HLA-B*27:05; BPIFA2; ENSG00000131050; CTA
TNTDIFGLK

SEQ ID NO: 11536 - protein, 9 aa, Homo sapiens
  misc_feature: Table A; Target 11536; HLA-C*07:06; BPIFA2; ENSG00000131050; CTA
TNTDIFGLK

SEQ ID NO: 11537 - protein, 10 aa, Homo sapiens
  misc_feature: Table A; Target 11537; HLA-A*68:02; BPIFA2; ENSG00000131050; CTA
TNTDIFGLKI

SEQ ID NO: 11538 - protein, 9 aa, Homo sapiens
  misc_feature: Table A; Target 11538; HLA-B*27:05; BPIFA2; ENSG00000131050; CTA
TSESLLDNL

SEQ ID NO: 11539 - protein, 9 aa, Homo sapiens
  misc_feature: Table A; Target 11539; HLA-B*39:01; BPIFA2; ENSG00000131050; CTA
TSESLLDNL

SEQ ID NO: 11540 - protein, 9 aa, Homo sapiens
  misc_feature: Table A; Target 11540; HLA-C*05:01; BPIFA2; ENSG00000131050; CTA
TSESLLDNL

SEQ ID NO: 11541 - protein, 11 aa, Homo sapiens
  misc_feature: Table A; Target 11541; HLA-C*07:01; BPIFA2; ENSG00000131050; CTA
TSESLLDNLGN

SEQ ID NO: 11542 - protein, 10 aa, Homo sapiens
  misc_feature: Table A; Target 11542; HLA-A*11:01; BPIFA2; ENSG00000131050; CTA
TSISLSLLDK

SEQ ID NO: 11543 - protein, 10 aa, Homo sapiens
  misc_feature: Table A; Target 11543; HLA-A*68:01; BPIFA2; ENSG00000131050; CTA
TSISLSLLDK

SEQ ID NO: 11544 - protein, 10 aa, Homo sapiens
  misc_feature: Table A; Target 11544; HLA-B*27:02; BPIFA2; ENSG00000131050; CTA
TSISLSLLDK

SEQ ID NO: 11545 - protein, 9 aa, Homo sapiens
  misc_feature: Table A; Target 11545; HLA-A*03:01; BPIFA2; ENSG00000131050; CTA
TVAGPIIGQ

SEQ ID NO: 11546 - protein, 9 aa, Homo sapiens
  misc_feature: Table A; Target 11546; HLA-A*03:02; BPIFA2; ENSG00000131050; CTA
TVAGPIIGQ

SEQ ID NO: 11547 - protein, 9 aa, Homo sapiens
  misc_feature: Table A; Target 11547; HLA-A*11:01; BPIFA2; ENSG00000131050; CTA
TVAGPIIGQ

SEQ ID NO: 11548 - protein, 9 aa, Homo sapiens
  misc_feature: Table A; Target 11548; HLA-A*26:01; BPIFA2; ENSG00000131050; CTA
TVAGPIIGQ

SEQ ID NO: 11549 - protein, 9 aa, Homo sapiens
  misc_feature: Table A; Target 11549; HLA-A*31:01; BPIFA2; ENSG00000131050; CTA
TVAGPIIGQ

SEQ ID NO: 11550 - protein, 9 aa, Homo sapiens
  misc_feature: Table A; Target 11550; HLA-A*33:01; BPIFA2; ENSG00000131050; CTA
TVAGPIIGQ

SEQ ID NO: 11551 - protein, 9 aa, Homo sapiens
  misc_feature: Table A; Target 11551; HLA-A*33:03; BPIFA2; ENSG00000131050; CTA
TVAGPIIGQ

SEQ ID NO: 11552 - protein, 9 aa, Homo sapiens
  misc_feature: Table A; Target 11552; HLA-A*68:01; BPIFA2; ENSG00000131050; CTA
TVAGPIIGQ

SEQ ID NO: 11553 - protein, 9 aa, Homo sapiens
  misc_feature: Table A; Target 11553; HLA-A*68:02; BPIFA2; ENSG00000131050; CTA
TVAGPIIGQ

SEQ ID NO: 11554 - protein, 9 aa, Homo sapiens
  misc_feature: Table A; Target 11554; HLA-B*27:05; BPIFA2; ENSG00000131050; CTA
TVAGPIIGQ

SEQ ID NO: 11555 - protein, 9 aa, Homo sapiens
  misc_feature: Table A; Target 11555; HLA-C*04:01; BPIFA2; ENSG00000131050; CTA
TVAGPIIGQ

SEQ ID NO: 11556 - protein, 9 aa, Homo sapiens
  misc_feature: Table A; Target 11556; HLA-C*06:02; BPIFA2; ENSG00000131050; CTA
TVAGPIIGQ

SEQ ID NO: 11557 - protein, 9 aa, Homo sapiens
  misc_feature: Table A; Target 11557; HLA-C*07:01; BPIFA2; ENSG00000131050; CTA
TVAGPIIGQ

SEQ ID NO: 11558 - protein, 9 aa, Homo sapiens
  misc_feature: Table A; Target 11558; HLA-C*07:04; BPIFA2; ENSG00000131050; CTA
TVAGPIIGQ

SEQ ID NO: 11559 - protein, 9 aa, Homo sapiens
  misc_feature: Table A; Target 11559; HLA-C*07:06; BPIFA2; ENSG00000131050; CTA
TVAGPIIGQ

SEQ ID NO: 11560 - protein, 9 aa, Homo sapiens
  misc_feature: Table A; Target 11560; HLA-C*12:03; BPIFA2; ENSG00000131050; CTA
TVAGPIIGQ

SEQ ID NO: 11561 - protein, 10 aa, Homo sapiens
  misc_feature: Table A; Target 11561; HLA-A*02:03; BPIFA2; ENSG00000131050; CTA
TVAGPIIGQI

SEQ ID NO: 11562 - protein, 10 aa, Homo sapiens
  misc_feature: Table A; Target 11562; HLA-A*25:01; BPIFA2; ENSG00000131050; CTA
TVAGPIIGQI

SEQ ID NO: 11563 - protein, 10 aa, Homo sapiens
  misc_feature: Table A; Target 11563; HLA-A*26:01; BPIFA2; ENSG00000131050; CTA
TVAGPIIGQI

SEQ ID NO: 11564 - protein, 10 aa, Homo sapiens
  misc_feature: Table A; Target 11564; HLA-A*30:01; BPIFA2; ENSG00000131050; CTA
TVAGPIIGQI

SEQ ID NO: 11565 - protein, 10 aa, Homo sapiens
  misc_feature: Table A; Target 11565; HLA-A*33:03; BPIFA2; ENSG00000131050; CTA
TVAGPIIGQI

SEQ ID NO: 11566 - protein, 10 aa, Homo sapiens
  misc_feature: Table A; Target 11566; HLA-A*68:01; BPIFA2; ENSG00000131050; CTA
TVAGPIIGQI

SEQ ID NO: 11567 - protein, 10 aa, Homo sapiens
  misc_feature: Table A; Target 11567; HLA-A*68:02; BPIFA2; ENSG00000131050; CTA
TVAGPIIGQI

SEQ ID NO: 11568 - protein, 10 aa, Homo sapiens
  misc_feature: Table A; Target 11568; HLA-B*13:02; BPIFA2; ENSG00000131050; CTA
TVAGPIIGQI

SEQ ID NO: 11569 - protein, 10 aa, Homo sapiens
  misc_feature: Table A; Target 11569; HLA-B*27:05; BPIFA2; ENSG00000131050; CTA
TVAGPIIGQI

SEQ ID NO: 11570 - protein, 10 aa, Homo sapiens
  misc_feature: Table A; Target 11570; HLA-B*38:01; BPIFA2; ENSG00000131050; CTA
TVAGPIIGQI

SEQ ID NO: 11571 - protein, 10 aa, Homo sapiens
  misc_feature: Table A; Target 11571; HLA-C*06:02; BPIFA2; ENSG00000131050; CTA
TVAGPIIGQI

SEQ ID NO: 11572 - protein, 10 aa, Homo sapiens
  misc_feature: Table A; Target 11572; HLA-C*07:06; BPIFA2; ENSG00000131050; CTA
TVAGPIIGQI

SEQ ID NO: 11573 - protein, 10 aa, Homo sapiens
  misc_feature: Table A; Target 11573; HLA-C*12:03; BPIFA2; ENSG00000131050; CTA
TVAGPIIGQI

SEQ ID NO: 11574 - protein, 11 aa, Homo sapiens
  misc_feature: Table A; Target 11574; HLA-A*02:07; BPIFA2; ENSG00000131050; CTA
TVAGPIIGQII

SEQ ID NO: 11575 - protein, 11 aa, Homo sapiens
  misc_feature: Table A; Target 11575; HLA-A*30:01; BPIFA2; ENSG00000131050; CTA
TVAGPIIGQII

SEQ ID NO: 11576 - protein, 11 aa, Homo sapiens
  misc_feature: Table A; Target 11576; HLA-A*68:01; BPIFA2; ENSG00000131050; CTA
TVAGPIIGQII

SEQ ID NO: 11577 - protein, 11 aa, Homo sapiens
  misc_feature: Table A; Target 11577; HLA-A*68:02; BPIFA2; ENSG00000131050; CTA
TVAGPIIGQII

SEQ ID NO: 11578 - protein, 11 aa, Homo sapiens
  misc_feature: Table A; Target 11578; HLA-B*13:02; BPIFA2; ENSG00000131050; CTA
TVAGPIIGQII

SEQ ID NO: 11579 - protein, 11 aa, Homo sapiens
  misc_feature: Table A; Target 11579; HLA-B*27:05; BPIFA2; ENSG00000131050; CTA
TVAGPIIGQII

SEQ ID NO: 11580 - protein, 11 aa, Homo sapiens
  misc_feature: Table A; Target 11580; HLA-B*35:03; BPIFA2; ENSG00000131050; CTA
TVAGPIIGQII

SEQ ID NO: 11581 - protein, 11 aa, Homo sapiens
  misc_feature: Table A; Target 11581; HLA-B*38:01; BPIFA2; ENSG00000131050; CTA
TVAGPIIGQII

SEQ ID NO: 11582 - protein, 11 aa, Homo sapiens
  misc_feature: Table A; Target 11582; HLA-C*04:01; BPIFA2; ENSG00000131050; CTA
TVAGPIIGQII

SEQ ID NO: 11583 - protein, 11 aa, Homo sapiens
  misc_feature: Table A; Target 11583; HLA-C*06:02; BPIFA2; ENSG00000131050; CTA
TVAGPIIGQII

SEQ ID NO: 11584 - protein, 11 aa, Homo sapiens
  misc_feature: Table A; Target 11584; HLA-C*07:06; BPIFA2; ENSG00000131050; CTA
TVAGPIIGQII

SEQ ID NO: 11585 - protein, 11 aa, Homo sapiens
  misc_feature: Table A; Target 11585; HLA-C*16:04; BPIFA2; ENSG00000131050; CTA
TVAGPIIGQII

SEQ ID NO: 11586 - protein, 9 aa, Homo sapiens
  misc_feature: Table A; Target 11586; HLA-A*02:07; BPIFA2; ENSG00000131050; CTA
TVDNTLKGI

SEQ ID NO: 11587 - protein, 9 aa, Homo sapiens
  misc_feature: Table A; Target 11587; HLA-B*38:01; BPIFA2; ENSG00000131050; CTA
TVDNTLKGI

SEQ ID NO: 11588 - protein, 9 aa, Homo sapiens
  misc_feature: Table A; Target 11588; HLA-C*04:01; BPIFA2; ENSG00000131050; CTA
TVDNTLKGI

SEQ ID NO: 11589 - protein, 9 aa, Homo sapiens
  misc_feature: Table A; Target 11589; HLA-C*05:01; BPIFA2; ENSG00000131050; CTA
TVDNTLKGI

SEQ ID NO: 11590 - protein, 10 aa, Homo sapiens
  misc_feature: Table A; Target 11590; HLA-A*02:07; BPIFA2; ENSG00000131050; CTA
TVDNTLKGIL

SEQ ID NO: 11591 - protein, 10 aa, Homo sapiens
  misc_feature: Table A; Target 11591; HLA-B*07:02; BPIFA2; ENSG00000131050; CTA
TVDNTLKGIL

SEQ ID NO: 11592 - protein, 10 aa, Homo sapiens
  misc_feature: Table A; Target 11592; HLA-B*35:03; BPIFA2; ENSG00000131050; CTA
TVDNTLKGIL

SEQ ID NO: 11593 - protein, 10 aa, Homo sapiens
  misc_feature: Table A; Target 11593; HLA-B*38:01; BPIFA2; ENSG00000131050; CTA
TVDNTLKGIL

SEQ ID NO: 11594 - protein, 10 aa, Homo sapiens
  misc_feature: Table A; Target 11594; HLA-C*04:01; BPIFA2; ENSG00000131050; CTA
TVDNTLKGIL

SEQ ID NO: 11595 - protein, 10 aa, Homo sapiens
  misc_feature: Table A; Target 11595; HLA-C*05:01; BPIFA2; ENSG00000131050; CTA
TVDNTLKGIL

SEQ ID NO: 11596 - protein, 10 aa, Homo sapiens
  misc_feature: Table A; Target 11596; HLA-C*07:01; BPIFA2; ENSG00000131050; CTA
TVDNTLKGIL

SEQ ID NO: 11597 - protein, 10 aa, Homo sapiens
  misc_feature: Table A; Target 11597; HLA-C*07:02; BPIFA2; ENSG00000131050; CTA
TVDNTLKGIL

SEQ ID NO: 11598 - protein, 8 aa, Homo sapiens
  misc_feature: Table A; Target 11598; HLA-A*03:01; BPIFA2; ENSG00000131050; CTA
TVSSLLQK

SEQ ID NO: 11599 - protein, 8 aa, Homo sapiens
  misc_feature: Table A; Target 11599; HLA-A*03:02; BPIFA2; ENSG00000131050; CTA
TVSSLLQK

SEQ ID NO: 11600 - protein, 8 aa, Homo sapiens
  misc_feature: Table A; Target 11600; HLA-A*11:01; BPIFA2; ENSG00000131050; CTA
TVSSLLQK

SEQ ID NO: 11601 - protein, 8 aa, Homo sapiens
  misc_feature: Table A; Target 11601; HLA-A*33:03; BPIFA2; ENSG00000131050; CTA
TVSSLLQK

SEQ ID NO: 11602 - protein, 8 aa, Homo sapiens
  misc_feature: Table A; Target 11602; HLA-A*68:01; BPIFA2; ENSG00000131050; CTA
TVSSLLQK

SEQ ID NO: 11603 - protein, 8 aa, Homo sapiens
  misc_feature: Table A; Target 11603; HLA-B*27:02; BPIFA2; ENSG00000131050; CTA
TVSSLLQK

SEQ ID NO: 11604 - protein, 8 aa, Homo sapiens
  misc_feature: Table A; Target 11604; HLA-B*27:05; BPIFA2; ENSG00000131050; CTA
TVSSLLQK

SEQ ID NO: 11605 - protein, 8 aa, Homo sapiens
  misc_feature: Table A; Target 11605; HLA-C*06:02; BPIFA2; ENSG00000131050; CTA
TVSSLLQK

SEQ ID NO: 11606 - protein, 9 aa, Homo sapiens
  misc_feature: Table A; Target 11606; HLA-C*06:02; BPIFA2; ENSG00000131050; CTA
TVSSLLQKE

SEQ ID NO: 11607 - protein, 10 aa, Homo sapiens
  misc_feature: Table A; Target 11607; HLA-A*68:02; BPIFA2; ENSG00000131050; CTA
TVSSLLQKEI

SEQ ID NO: 11608 - protein, 10 aa, Homo sapiens
  misc_feature: Table A; Target 11608; HLA-B*13:02; BPIFA2; ENSG00000131050; CTA
TVSSLLQKEI

SEQ ID NO: 11609 - protein, 10 aa, Homo sapiens
  misc_feature: Table A; Target 11609; HLA-C*06:02; BPIFA2; ENSG00000131050; CTA
TVSSLLQKEI

SEQ ID NO: 11610 - protein, 10 aa, Homo sapiens
  misc_feature: Table A; Target 11610; HLA-C*07:01; BPIFA2; ENSG00000131050; CTA
TVSSLLQKEI

SEQ ID NO: 11611 - protein, 10 aa, Homo sapiens
  misc_feature: Table A; Target 11611; HLA-C*16:02; BPIFA2; ENSG00000131050; CTA
TVSSLLQKEI

SEQ ID NO: 11612 - protein, 8 aa, Homo sapiens
  misc_feature: Table A; Target 11612; HLA-A*11:01; BPIFA2; ENSG00000131050; CTA
VAGPIIGQ

SEQ ID NO: 11613 - protein, 8 aa, Homo sapiens
  misc_feature: Table A; Target 11613; HLA-C*06:02; BPIFA2; ENSG00000131050; CTA
VAGPIIGQ

SEQ ID NO: 11614 - protein, 8 aa, Homo sapiens
  misc_feature: Table A; Target 11614; HLA-C*07:01; BPIFA2; ENSG00000131050; CTA
VAGPIIGQ

SEQ ID NO: 11615 - protein, 8 aa, Homo sapiens
  misc_feature: Table A; Target 11615; HLA-C*12:03; BPIFA2; ENSG00000131050; CTA
VAGPIIGQ

SEQ ID NO: 11616 - protein, 9 aa, Homo sapiens
  misc_feature: Table A; Target 11616; HLA-A*02:03; BPIFA2; ENSG00000131050; CTA
VAGPIIGQI

SEQ ID NO: 11617 - protein, 9 aa, Homo sapiens
  misc_feature: Table A; Target 11617; HLA-A*02:04; BPIFA2; ENSG00000131050; CTA
VAGPIIGQI

SEQ ID NO: 11618 - protein, 9 aa, Homo sapiens
  misc_feature: Table A; Target 11618; HLA-A*02:07; BPIFA2; ENSG00000131050; CTA
VAGPIIGQI

SEQ ID NO: 11619 - protein, 9 aa, Homo sapiens
  misc_feature: Table A; Target 11619; HLA-A*23:01; BPIFA2; ENSG00000131050; CTA
VAGPIIGQI

SEQ ID NO: 11620 - protein, 9 aa, Homo sapiens
  misc_feature: Table A; Target 11620; HLA-A*24:02; BPIFA2; ENSG00000131050; CTA
VAGPIIGQI

SEQ ID NO: 11621 - protein, 9 aa, Homo sapiens
  misc_feature: Table A; Target 11621; HLA-A*25:01; BPIFA2; ENSG00000131050; CTA
VAGPIIGQI

SEQ ID NO: 11622 - protein, 9 aa, Homo sapiens
  misc_feature: Table A; Target 11622; HLA-A*26:01; BPIFA2; ENSG00000131050; CTA
VAGPIIGQI

SEQ ID NO: 11623 - protein, 9 aa, Homo sapiens
  misc_feature: Table A; Target 11623; HLA-A*30:01; BPIFA2; ENSG00000131050; CTA
VAGPIIGQI

SEQ ID NO: 11624 - protein, 9 aa, Homo sapiens
  misc_feature: Table A; Target 11624; HLA-A*31:01; BPIFA2; ENSG00000131050; CTA
VAGPIIGQI

SEQ ID NO: 11625 - protein, 9 aa, Homo sapiens
  misc_feature: Table A; Target 11625; HLA-A*32:01; BPIFA2; ENSG00000131050; CTA
VAGPIIGQI

SEQ ID NO: 11626 - protein, 9 aa, Homo sapiens
  misc_feature: Table A; Target 11626; HLA-A*33:03; BPIFA2; ENSG00000131050; CTA
VAGPIIGQI

SEQ ID NO: 11627 - protein, 9 aa, Homo sapiens
  misc_feature: Table A; Target 11627; HLA-A*68:01; BPIFA2; ENSG00000131050; CTA
VAGPIIGQI

SEQ ID NO: 11628 - protein, 9 aa, Homo sapiens
  misc_feature: Table A; Target 11628; HLA-A*68:02; BPIFA2; ENSG00000131050; CTA
VAGPIIGQI

SEQ ID NO: 11629 - protein, 9 aa, Homo sapiens
  misc_feature: Table A; Target 11629; HLA-B*07:02; BPIFA2; ENSG00000131050; CTA
VAGPIIGQI

SEQ ID NO: 11630 - protein, 9 aa, Homo sapiens
  misc_feature: Table A; Target 11630; HLA-B*13:02; BPIFA2; ENSG00000131050; CTA
VAGPIIGQI

SEQ ID NO: 11631 - protein, 9 aa, Homo sapiens
  misc_feature: Table A; Target 11631; HLA-B*15:03; BPIFA2; ENSG00000131050; CTA
VAGPIIGQI

SEQ ID NO: 11632 - protein, 9 aa, Homo sapiens
  misc_feature: Table A; Target 11632; HLA-B*27:02; BPIFA2; ENSG00000131050; CTA
VAGPIIGQI

SEQ ID NO: 11633 - protein, 9 aa, Homo sapiens
  misc_feature: Table A; Target 11633; HLA-B*27:05; BPIFA2; ENSG00000131050; CTA
VAGPIIGQI

SEQ ID NO: 11634 - protein, 9 aa, Homo sapiens
  misc_feature: Table A; Target 11634; HLA-B*35:03; BPIFA2; ENSG00000131050; CTA
VAGPIIGQI

SEQ ID NO: 11635 - protein, 9 aa, Homo sapiens
  misc_feature: Table A; Target 11635; HLA-B*38:01; BPIFA2; ENSG00000131050; CTA
VAGPIIGQI

SEQ ID NO: 11636 - protein, 9 aa, Homo sapiens
  misc_feature: Table A; Target 11636; HLA-B*39:01; BPIFA2; ENSG00000131050; CTA
VAGPIIGQI

SEQ ID NO: 11637 - protein, 9 aa, Homo sapiens
  misc_feature: Table A; Target 11637; HLA-B*40:01; BPIFA2; ENSG00000131050; CTA
VAGPIIGQI

SEQ ID NO: 11638 - protein, 9 aa, Homo sapiens
  misc_feature: Table A; Target 11638; HLA-B*40:02; BPIFA2; ENSG00000131050; CTA
VAGPIIGQI

SEQ ID NO: 11639 - protein, 9 aa, Homo sapiens
  misc_feature: Table A; Target 11639; HLA-B*44:03; BPIFA2; ENSG00000131050; CTA
VAGPIIGQI

SEQ ID NO: 11640 - protein, 9 aa, Homo sapiens
  misc_feature: Table A; Target 11640; HLA-B*46:01; BPIFA2; ENSG00000131050; CTA
VAGPIIGQI

SEQ ID NO: 11641 - protein, 9 aa, Homo sapiens
  misc_feature: Table A; Target 11641; HLA-B*49:01; BPIFA2; ENSG00000131050; CTA
VAGPIIGQI

SEQ ID NO: 11642 - protein, 9 aa, Homo sapiens
  misc_feature: Table A; Target 11642; HLA-B*51:01; BPIFA2; ENSG00000131050; CTA
VAGPIIGQI

SEQ ID NO: 11643 - protein, 9 aa, Homo sapiens
  misc_feature: Table A; Target 11643; HLA-B*57:01; BPIFA2; ENSG00000131050; CTA
VAGPIIGQI

SEQ ID NO: 11644 - protein, 9 aa, Homo sapiens
  misc_feature: Table A; Target 11644; HLA-B*58:01; BPIFA2; ENSG00000131050; CTA
VAGPIIGQI

SEQ ID NO: 11645 - protein, 9 aa, Homo sapiens
  misc_feature: Table A; Target 11645; HLA-C*02:02; BPIFA2; ENSG00000131050; CTA
VAGPIIGQI

SEQ ID NO: 11646 - protein, 9 aa, Homo sapiens
  misc_feature: Table A; Target 11646; HLA-C*03:03; BPIFA2; ENSG00000131050; CTA
VAGPIIGQI

SEQ ID NO: 11647 - protein, 9 aa, Homo sapiens
  misc_feature: Table A; Target 11647; HLA-C*03:04; BPIFA2; ENSG00000131050; CTA
VAGPIIGQI

SEQ ID NO: 11648 - protein, 9 aa, Homo sapiens
  misc_feature: Table A; Target 11648; HLA-C*04:01; BPIFA2; ENSG00000131050; CTA
VAGPIIGQI

SEQ ID NO: 11649 - protein, 9 aa, Homo sapiens
  misc_feature: Table A; Target 11649; HLA-C*05:01; BPIFA2; ENSG00000131050; CTA
VAGPIIGQI

SEQ ID NO: 11650 - protein, 9 aa, Homo sapiens
  misc_feature: Table A; Target 11650; HLA-C*06:02; BPIFA2; ENSG00000131050; CTA
VAGPIIGQI

SEQ ID NO: 11651 - protein, 9 aa, Homo sapiens
  misc_feature: Table A; Target 11651; HLA-C*07:01; BPIFA2; ENSG00000131050; CTA
VAGPIIGQI

SEQ ID NO: 11652 - protein, 9 aa, Homo sapiens
  misc_feature: Table A; Target 11652; HLA-C*07:02; BPIFA2; ENSG00000131050; CTA
VAGPIIGQI

SEQ ID NO: 11653 - protein, 9 aa, Homo sapiens
  misc_feature: Table A; Target 11653; HLA-C*07:04; BPIFA2; ENSG00000131050; CTA
VAGPIIGQI

SEQ ID NO: 11654 - protein, 9 aa, Homo sapiens
  misc_feature: Table A; Target 11654; HLA-C*07:06; BPIFA2; ENSG00000131050; CTA
VAGPIIGQI

SEQ ID NO: 11655 - protein, 9 aa, Homo sapiens
  misc_feature: Table A; Target 11655; HLA-C*12:03; BPIFA2; ENSG00000131050; CTA
VAGPIIGQI

SEQ ID NO: 11656 - protein, 9 aa, Homo sapiens
  misc_feature: Table A; Target 11656; HLA-C*16:02; BPIFA2; ENSG00000131050; CTA
VAGPIIGQI

SEQ ID NO: 11657 - protein, 9 aa, Homo sapiens
  misc_feature: Table A; Target 11657; HLA-C*16:04; BPIFA2; ENSG00000131050; CTA
VAGPIIGQI

SEQ ID NO: 11658 - protein, 10 aa, Homo sapiens
  misc_feature: Table A; Target 11658; HLA-A*23:01; BPIFA2; ENSG00000131050; CTA
VAGPIIGQII

SEQ ID NO: 11659 - protein, 10 aa, Homo sapiens
  misc_feature: Table A; Target 11659; HLA-A*24:02; BPIFA2; ENSG00000131050; CTA
VAGPIIGQII

SEQ ID NO: 11660 - protein, 10 aa, Homo sapiens
  misc_feature: Table A; Target 11660; HLA-A*30:01; BPIFA2; ENSG00000131050; CTA
VAGPIIGQII

SEQ ID NO: 11661 - protein, 10 aa, Homo sapiens
  misc_feature: Table A; Target 11661; HLA-A*68:02; BPIFA2; ENSG00000131050; CTA
VAGPIIGQII

SEQ ID NO: 11662 - protein, 10 aa, Homo sapiens
  misc_feature: Table A; Target 11662; HLA-B*35:03; BPIFA2; ENSG00000131050; CTA
VAGPIIGQII

SEQ ID NO: 11663 - protein, 10 aa, Homo sapiens
  misc_feature: Table A; Target 11663; HLA-B*38:01; BPIFA2; ENSG00000131050; CTA
VAGPIIGQII

SEQ ID NO: 11664 - protein, 10 aa, Homo sapiens
  misc_feature: Table A; Target 11664; HLA-B*44:02; BPIFA2; ENSG00000131050; CTA
VAGPIIGQII

SEQ ID NO: 11665 - protein, 10 aa, Homo sapiens
  misc_feature: Table A; Target 11665; HLA-B*51:01; BPIFA2; ENSG00000131050; CTA
VAGPIIGQII

SEQ ID NO: 11666 - protein, 10 aa, Homo sapiens
  misc_feature: Table A; Target 11666; HLA-B*57:01; BPIFA2; ENSG00000131050; CTA
VAGPIIGQII

SEQ ID NO: 11667 - protein, 10 aa, Homo sapiens
  misc_feature: Table A; Target 11667; HLA-B*58:01; BPIFA2; ENSG00000131050; CTA
VAGPIIGQII

SEQ ID NO: 11668 - protein, 10 aa, Homo sapiens
  misc_feature: Table A; Target 11668; HLA-C*02:02; BPIFA2; ENSG00000131050; CTA
VAGPIIGQII

SEQ ID NO: 11669 - protein, 10 aa, Homo sapiens
  misc_feature: Table A; Target 11669; HLA-C*03:03; BPIFA2; ENSG00000131050; CTA
VAGPIIGQII

SEQ ID NO: 11670 - protein, 10 aa, Homo sapiens
  misc_feature: Table A; Target 11670; HLA-C*04:01; BPIFA2; ENSG00000131050; CTA
VAGPIIGQII

SEQ ID NO: 11671 - protein, 10 aa, Homo sapiens
  misc_feature: Table A; Target 11671; HLA-C*07:01; BPIFA2; ENSG00000131050; CTA
VAGPIIGQII

SEQ ID NO: 11672 - protein, 10 aa, Homo sapiens
  misc_feature: Table A; Target 11672; HLA-C*12:03; BPIFA2; ENSG00000131050; CTA
VAGPIIGQII

SEQ ID NO: 11673 - protein, 10 aa, Homo sapiens
  misc_feature: Table A; Target 11673; HLA-C*16:02; BPIFA2; ENSG00000131050; CTA
VAGPIIGQII

SEQ ID NO: 11674 - protein, 10 aa, Homo sapiens
  misc_feature: Table A; Target 11674; HLA-C*16:04; BPIFA2; ENSG00000131050; CTA
VAGPIIGQII

SEQ ID NO: 11675 - protein, 8 aa, Homo sapiens
  misc_feature: Table A; Target 11675; HLA-B*54:01; BPIFA2; ENSG00000131050; CTA
VAVLGECA

SEQ ID NO: 11676 - protein, 8 aa, Homo sapiens
  misc_feature: Table A; Target 11676; HLA-A*30:01; BPIFA2; ENSG00000131050; CTA
VDKLEPVL

SEQ ID NO: 11677 - protein, 8 aa, Homo sapiens
  misc_feature: Table A; Target 11677; HLA-B*07:02; BPIFA2; ENSG00000131050; CTA
VDKLEPVL

SEQ ID NO: 11678 - protein, 8 aa, Homo sapiens
  misc_feature: Table A; Target 11678; HLA-B*08:01; BPIFA2; ENSG00000131050; CTA
VDKLEPVL

SEQ ID NO: 11679 - protein, 8 aa, Homo sapiens
  misc_feature: Table A; Target 11679; HLA-B*15:03; BPIFA2; ENSG00000131050; CTA
VDKLEPVL

SEQ ID NO: 11680 - protein, 8 aa, Homo sapiens
  misc_feature: Table A; Target 11680; HLA-B*18:01; BPIFA2; ENSG00000131050; CTA
VDKLEPVL

SEQ ID NO: 11681 - protein, 8 aa, Homo sapiens
  misc_feature: Table A; Target 11681; HLA-B*37:01; BPIFA2; ENSG00000131050; CTA
VDKLEPVL

SEQ ID NO: 11682 - protein, 8 aa, Homo sapiens
  misc_feature: Table A; Target 11682; HLA-B*40:01; BPIFA2; ENSG00000131050; CTA
VDKLEPVL

SEQ ID NO: 11683 - protein, 8 aa, Homo sapiens
  misc_feature: Table A; Target 11683; HLA-B*40:02; BPIFA2; ENSG00000131050; CTA
VDKLEPVL

SEQ ID NO: 11684 - protein, 8 aa, Homo sapiens
  misc_feature: Table A; Target 11684; HLA-C*04:01; BPIFA2; ENSG00000131050; CTA
VDKLEPVL

SEQ ID NO: 11685 - protein, 8 aa, Homo sapiens
  misc_feature: Table A; Target 11685; HLA-C*06:02; BPIFA2; ENSG00000131050; CTA
VDKLEPVL

SEQ ID NO: 11686 - protein, 8 aa, Homo sapiens
  misc_feature: Table A; Target 11686; HLA-C*07:01; BPIFA2; ENSG00000131050; CTA
VDKLEPVL

SEQ ID NO: 11687 - protein, 8 aa, Homo sapiens
  misc_feature: Table A; Target 11687; HLA-C*07:02; BPIFA2; ENSG00000131050; CTA
VDKLEPVL

SEQ ID NO: 11688 - protein, 8 aa, Homo sapiens
  misc_feature: Table A; Target 11688; HLA-C*07:04; BPIFA2; ENSG00000131050; CTA
VDKLEPVL

SEQ ID NO: 11689 - protein, 8 aa, Homo sapiens
  misc_feature: Table A; Target 11689; HLA-C*12:03; BPIFA2; ENSG00000131050; CTA
VDKLEPVL

SEQ ID NO: 11690 - protein, 8 aa, Homo sapiens
  misc_feature: Table A; Target 11690; HLA-C*16:01; BPIFA2; ENSG00000131050; CTA
VDKLEPVL

SEQ ID NO: 11691 - protein, 8 aa, Homo sapiens
  misc_feature: Table A; Target 11691; HLA-C*16:02; BPIFA2; ENSG00000131050; CTA
VDKLEPVL

SEQ ID NO: 11692 - protein, 9 aa, Homo sapiens
  misc_feature: Table A; Target 11692; HLA-C*07:01; BPIFA2; ENSG00000131050; CTA
VDKLEPVLH

SEQ ID NO: 11693 - protein, 9 aa, Homo sapiens
  misc_feature: Table A; Target 11693; HLA-C*12:03; BPIFA2; ENSG00000131050; CTA
VDKLEPVLH

SEQ ID NO: 11694 - protein, 8 aa, Homo sapiens
  misc_feature: Table A; Target 11694; HLA-A*03:01; BPIFA2; ENSG00000131050; CTA
VDLGVLQK

SEQ ID NO: 11695 - protein, 8 aa, Homo sapiens
  misc_feature: Table A; Target 11695; HLA-A*03:02; BPIFA2; ENSG00000131050; CTA
VDLGVLQK

SEQ ID NO: 11696 - protein, 8 aa, Homo sapiens
  misc_feature: Table A; Target 11696; HLA-A*11:01; BPIFA2; ENSG00000131050; CTA
VDLGVLQK

SEQ ID NO: 11697 - protein, 8 aa, Homo sapiens
  misc_feature: Table A; Target 11697; HLA-B*07:02; BPIFA2; ENSG00000131050; CTA
VDLGVLQK

SEQ ID NO: 11698 - protein, 8 aa, Homo sapiens
  misc_feature: Table A; Target 11698; HLA-B*27:02; BPIFA2; ENSG00000131050; CTA
VDLGVLQK

SEQ ID NO: 11699 - protein, 8 aa, Homo sapiens
  misc_feature: Table A; Target 11699; HLA-B*27:05; BPIFA2; ENSG00000131050; CTA
VDLGVLQK

SEQ ID NO: 11700 - protein, 8 aa, Homo sapiens
  misc_feature: Table A; Target 11700; HLA-B*37:01; BPIFA2; ENSG00000131050; CTA
VDLGVLQK

SEQ ID NO: 11701 - protein, 8 aa, Homo sapiens
  misc_feature: Table A; Target 11701; HLA-B*40:02; BPIFA2; ENSG00000131050; CTA
VDLGVLQK

SEQ ID NO: 11702 - protein, 8 aa, Homo sapiens
  misc_feature: Table A; Target 11702; HLA-C*04:01; BPIFA2; ENSG00000131050; CTA
VDLGVLQK

SEQ ID NO: 11703 - protein, 8 aa, Homo sapiens
  misc_feature: Table A; Target 11703; HLA-C*06:02; BPIFA2; ENSG00000131050; CTA
VDLGVLQK

SEQ ID NO: 11704 - protein, 8 aa, Homo sapiens
  misc_feature: Table A; Target 11704; HLA-C*07:01; BPIFA2; ENSG00000131050; CTA
VDLGVLQK

SEQ ID NO: 11705 - protein, 8 aa, Homo sapiens
  misc_feature: Table A; Target 11705; HLA-C*07:02; BPIFA2; ENSG00000131050; CTA
VDLGVLQK

SEQ ID NO: 11706 - protein, 8 aa, Homo sapiens
  misc_feature: Table A; Target 11706; HLA-C*07:04; BPIFA2; ENSG00000131050; CTA
VDLGVLQK

SEQ ID NO: 11707 - protein, 8 aa, Homo sapiens
  misc_feature: Table A; Target 11707; HLA-C*12:03; BPIFA2; ENSG00000131050; CTA
VDLGVLQK

SEQ ID NO: 11708 - protein, 9 aa, Homo sapiens
  misc_feature: Table A; Target 11708; HLA-B*40:02; BPIFA2; ENSG00000131050; CTA
VDLGVLQKS

SEQ ID NO: 11709 - protein, 9 aa, Homo sapiens
  misc_feature: Table A; Target 11709; HLA-C*04:01; BPIFA2; ENSG00000131050; CTA
VDLGVLQKS

SEQ ID NO: 11710 - protein, 9 aa, Homo sapiens
  misc_feature: Table A; Target 11710; HLA-C*06:02; BPIFA2; ENSG00000131050; CTA
VDLGVLQKS

SEQ ID NO: 11711 - protein, 9 aa, Homo sapiens
  misc_feature: Table A; Target 11711; HLA-C*07:01; BPIFA2; ENSG00000131050; CTA
VDLGVLQKS

SEQ ID NO: 11712 - protein, 9 aa, Homo sapiens
  misc_feature: Table A; Target 11712; HLA-C*07:02; BPIFA2; ENSG00000131050; CTA
VDLGVLQKS

SEQ ID NO: 11713 - protein, 9 aa, Homo sapiens
  misc_feature: Table A; Target 11713; HLA-C*12:03; BPIFA2; ENSG00000131050; CTA
VDLGVLQKS

SEQ ID NO: 11714 - protein, 10 aa, Homo sapiens
  misc_feature: Table A; Target 11714; HLA-C*07:01; BPIFA2; ENSG00000131050; CTA
VDLGVLQKSS

SEQ ID NO: 11715 - protein, 11 aa, Homo sapiens
  misc_feature: Table A; Target 11715; HLA-C*04:01; BPIFA2; ENSG00000131050; CTA
VDLGVLQKSSA

SEQ ID NO: 11716 - protein, 11 aa, Homo sapiens
  misc_feature: Table A; Target 11716; HLA-C*06:02; BPIFA2; ENSG00000131050; CTA
VDLGVLQKSSA

SEQ ID NO: 11717 - protein, 8 aa, Homo sapiens
  misc_feature: Table A; Target 11717; HLA-A*32:01; BPIFA2; ENSG00000131050; CTA
VDNPQHKT

SEQ ID NO: 11718 - protein, 8 aa, Homo sapiens
  misc_feature: Table A; Target 11718; HLA-B*07:02; BPIFA2; ENSG00000131050; CTA
VDNPQHKT

SEQ ID NO: 11719 - protein, 8 aa, Homo sapiens
  misc_feature: Table A; Target 11719; HLA-B*37:01; BPIFA2; ENSG00000131050; CTA
VDNPQHKT

SEQ ID NO: 11720 - protein, 8 aa, Homo sapiens
  misc_feature: Table A; Target 11720; HLA-B*40:02; BPIFA2; ENSG00000131050; CTA
VDNPQHKT

SEQ ID NO: 11721 - protein, 8 aa, Homo sapiens
  misc_feature: Table A; Target 11721; HLA-C*04:01; BPIFA2; ENSG00000131050; CTA
VDNPQHKT

SEQ ID NO: 11722 - protein, 8 aa, Homo sapiens
  misc_feature: Table A; Target 11722; HLA-C*06:02; BPIFA2; ENSG00000131050; CTA
VDNPQHKT

SEQ ID NO: 11723 - protein, 8 aa, Homo sapiens
  misc_feature: Table A; Target 11723; HLA-C*07:01; BPIFA2; ENSG00000131050; CTA
VDNPQHKT

SEQ ID NO: 11724 - protein, 8 aa, Homo sapiens
  misc_feature: Table A; Target 11724; HLA-C*07:04; BPIFA2; ENSG00000131050; CTA
VDNPQHKT

SEQ ID NO: 11725 - protein, 8 aa, Homo sapiens
  misc_feature: Table A; Target 11725; HLA-C*16:02; BPIFA2; ENSG00000131050; CTA
VDNPQHKT

SEQ ID NO: 11726 - protein, 9 aa, Homo sapiens
  misc_feature: Table A; Target 11726; HLA-C*04:01; BPIFA2; ENSG00000131050; CTA
VDNPQHKTQ

SEQ ID NO: 11727 - protein, 9 aa, Homo sapiens
  misc_feature: Table A; Target 11727; HLA-C*06:02; BPIFA2; ENSG00000131050; CTA
VDNPQHKTQ

SEQ ID NO: 11728 - protein, 9 aa, Homo sapiens
  misc_feature: Table A; Target 11728; HLA-C*07:01; BPIFA2; ENSG00000131050; CTA
VDNPQHKTQ

SEQ ID NO: 11729 - protein, 9 aa, Homo sapiens
  misc_feature: Table A; Target 11729; HLA-C*12:03; BPIFA2; ENSG00000131050; CTA
VDNPQHKTQ

SEQ ID NO: 11730 - protein, 9 aa, Homo sapiens
  misc_feature: Table A; Target 11730; HLA-C*16:02; BPIFA2; ENSG00000131050; CTA
VDNPQHKTQ

SEQ ID NO: 11731 - protein, 10 aa, Homo sapiens
  misc_feature: Table A; Target 11731; HLA-A*03:01; BPIFA2; ENSG00000131050; CTA
VDNPQHKTQL

SEQ ID NO: 11732 - protein, 10 aa, Homo sapiens
  misc_feature: Table A; Target 11732; HLA-A*30:01; BPIFA2; ENSG00000131050; CTA
VDNPQHKTQL

SEQ ID NO: 11733 - protein, 10 aa, Homo sapiens
  misc_feature: Table A; Target 11733; HLA-A*31:01; BPIFA2; ENSG00000131050; CTA
VDNPQHKTQL

SEQ ID NO: 11734 - protein, 10 aa, Homo sapiens
  misc_feature: Table A; Target 11734; HLA-B*07:02; BPIFA2; ENSG00000131050; CTA
VDNPQHKTQL

SEQ ID NO: 11735 - protein, 10 aa, Homo sapiens
  misc_feature: Table A; Target 11735; HLA-B*37:01; BPIFA2; ENSG00000131050; CTA
VDNPQHKTQL

SEQ ID NO: 11736 - protein, 10 aa, Homo sapiens
  misc_feature: Table A; Target 11736; HLA-B*40:01; BPIFA2; ENSG00000131050; CTA
VDNPQHKTQL

SEQ ID NO: 11737 - protein, 10 aa, Homo sapiens
  misc_feature: Table A; Target 11737; HLA-B*40:02; BPIFA2; ENSG00000131050; CTA
VDNPQHKTQL

SEQ ID NO: 11738 - protein, 10 aa, Homo sapiens
  misc_feature: Table A; Target 11738; HLA-C*04:01; BPIFA2; ENSG00000131050; CTA
VDNPQHKTQL

SEQ ID NO: 11739 - protein, 10 aa, Homo sapiens
  misc_feature: Table A; Target 11739; HLA-C*06:02; BPIFA2; ENSG00000131050; CTA
VDNPQHKTQL

SEQ ID NO: 11740 - protein, 10 aa, Homo sapiens
  misc_feature: Table A; Target 11740; HLA-C*07:01; BPIFA2; ENSG00000131050; CTA
VDNPQHKTQL

SEQ ID NO: 11741 - protein, 10 aa, Homo sapiens
  misc_feature: Table A; Target 11741; HLA-C*07:02; BPIFA2; ENSG00000131050; CTA
VDNPQHKTQL

SEQ ID NO: 11742 - protein, 10 aa, Homo sapiens
  misc_feature: Table A; Target 11742; HLA-C*12:03; BPIFA2; ENSG00000131050; CTA
VDNPQHKTQL

SEQ ID NO: 11743 - protein, 10 aa, Homo sapiens
  misc_feature: Table A; Target 11743; HLA-C*16:02; BPIFA2; ENSG00000131050; CTA
VDNPQHKTQL

SEQ ID NO: 11744 - protein, 9 aa, Homo sapiens
  misc_feature: Table A; Target 11744; HLA-B*40:02; BPIFA2; ENSG00000131050; CTA
VDNTLKGIL

SEQ ID NO: 11745 - protein, 11 aa, Homo sapiens
  misc_feature: Table A; Target 11745; HLA-A*11:01; BPIFA2; ENSG00000131050; CTA
VDNTLKGILEK

SEQ ID NO: 11746 - protein, 11 aa, Homo sapiens
  misc_feature: Table A; Target 11746; HLA-B*27:02; BPIFA2; ENSG00000131050; CTA
VDNTLKGILEK

SEQ ID NO: 11747 - protein, 9 aa, Homo sapiens
  misc_feature: Table A; Target 11747; HLA-A*02:01; BPIFA2; ENSG00000131050; CTA
VINTLKSTV

SEQ ID NO: 11748 - protein, 9 aa, Homo sapiens
  misc_feature: Table A; Target 11748; HLA-A*02:03; BPIFA2; ENSG00000131050; CTA
VINTLKSTV

SEQ ID NO: 11749 - protein, 9 aa, Homo sapiens
  misc_feature: Table A; Target 11749; HLA-A*02:04; BPIFA2; ENSG00000131050; CTA
VINTLKSTV

SEQ ID NO: 11750 - protein, 9 aa, Homo sapiens
  misc_feature: Table A; Target 11750; HLA-A*02:07; BPIFA2; ENSG00000131050; CTA
VINTLKSTV

SEQ ID NO: 11751 - protein, 9 aa, Homo sapiens
  misc_feature: Table A; Target 11751; HLA-A*23:01; BPIFA2; ENSG00000131050; CTA
VINTLKSTV

SEQ ID NO: 11752 - protein, 9 aa, Homo sapiens
  misc_feature: Table A; Target 11752; HLA-A*24:02; BPIFA2; ENSG00000131050; CTA
VINTLKSTV

SEQ ID NO: 11753 - protein, 9 aa, Homo sapiens
  misc_feature: Table A; Target 11753; HLA-A*31:01; BPIFA2; ENSG00000131050; CTA
VINTLKSTV

SEQ ID NO: 11754 - protein, 9 aa, Homo sapiens
  misc_feature: Table A; Target 11754; HLA-A*32:01; BPIFA2; ENSG00000131050; CTA
VINTLKSTV

SEQ ID NO: 11755 - protein, 9 aa, Homo sapiens
  misc_feature: Table A; Target 11755; HLA-A*68:02; BPIFA2; ENSG00000131050; CTA
VINTLKSTV

SEQ ID NO: 11756 - protein, 9 aa, Homo sapiens
  misc_feature: Table A; Target 11756; HLA-B*07:02; BPIFA2; ENSG00000131050; CTA
VINTLKSTV

SEQ ID NO: 11757 - protein, 9 aa, Homo sapiens
  misc_feature: Table A; Target 11757; HLA-B*08:01; BPIFA2; ENSG00000131050; CTA
VINTLKSTV

SEQ ID NO: 11758 - protein, 9 aa, Homo sapiens
  misc_feature: Table A; Target 11758; HLA-B*13:02; BPIFA2; ENSG00000131050; CTA
VINTLKSTV

SEQ ID NO: 11759 - protein, 9 aa, Homo sapiens
  misc_feature: Table A; Target 11759; HLA-B*15:01; BPIFA2; ENSG00000131050; CTA
VINTLKSTV

SEQ ID NO: 11760 - protein, 9 aa, Homo sapiens
  misc_feature: Table A; Target 11760; HLA-B*27:05; BPIFA2; ENSG00000131050; CTA
VINTLKSTV

SEQ ID NO: 11761 - protein, 9 aa, Homo sapiens
  misc_feature: Table A; Target 11761; HLA-B*40:02; BPIFA2; ENSG00000131050; CTA
VINTLKSTV

SEQ ID NO: 11762 - protein, 9 aa, Homo sapiens
  misc_feature: Table A; Target 11762; HLA-B*46:01; BPIFA2; ENSG00000131050; CTA
VINTLKSTV

SEQ ID NO: 11763 - protein, 9 aa, Homo sapiens
  misc_feature: Table A; Target 11763; HLA-B*51:01; BPIFA2; ENSG00000131050; CTA
VINTLKSTV

SEQ ID NO: 11764 - protein, 9 aa, Homo sapiens
  misc_feature: Table A; Target 11764; HLA-B*55:01; BPIFA2; ENSG00000131050; CTA
VINTLKSTV

SEQ ID NO: 11765 - protein, 9 aa, Homo sapiens
  misc_feature: Table A; Target 11765; HLA-B*56:01; BPIFA2; ENSG00000131050; CTA
VINTLKSTV

SEQ ID NO: 11766 - protein, 9 aa, Homo sapiens
  misc_feature: Table A; Target 11766; HLA-B*58:01; BPIFA2; ENSG00000131050; CTA
VINTLKSTV

SEQ ID NO: 11767 - protein, 9 aa, Homo sapiens
  misc_feature: Table A; Target 11767; HLA-C*01:02; BPIFA2; ENSG00000131050; CTA
VINTLKSTV

SEQ ID NO: 11768 - protein, 9 aa, Homo sapiens
  misc_feature: Table A; Target 11768; HLA-C*02:02; BPIFA2; ENSG00000131050; CTA
VINTLKSTV

SEQ ID NO: 11769 - protein, 9 aa, Homo sapiens
  misc_feature: Table A; Target 11769; HLA-C*04:01; BPIFA2; ENSG00000131050; CTA
VINTLKSTV

SEQ ID NO: 11770 - protein, 9 aa, Homo sapiens
  misc_feature: Table A; Target 11770; HLA-C*05:01; BPIFA2; ENSG00000131050; CTA
VINTLKSTV

SEQ ID NO: 11771 - protein, 9 aa, Homo sapiens
  misc_feature: Table A; Target 11771; HLA-C*06:02; BPIFA2; ENSG00000131050; CTA
VINTLKSTV

SEQ ID NO: 11772 - protein, 9 aa, Homo sapiens
  misc_feature: Table A; Target 11772; HLA-C*07:01; BPIFA2; ENSG00000131050; CTA
VINTLKSTV

SEQ ID NO: 11773 - protein, 9 aa, Homo sapiens
  misc_feature: Table A; Target 11773; HLA-C*07:02; BPIFA2; ENSG00000131050; CTA
VINTLKSTV

SEQ ID NO: 11774 - protein, 9 aa, Homo sapiens
  misc_feature: Table A; Target 11774; HLA-C*07:04; BPIFA2; ENSG00000131050; CTA
VINTLKSTV

SEQ ID NO: 11775 - protein, 9 aa, Homo sapiens
  misc_feature: Table A; Target 11775; HLA-C*12:03; BPIFA2; ENSG00000131050; CTA
VINTLKSTV

SEQ ID NO: 11776 - protein, 9 aa, Homo sapiens
  misc_feature: Table A; Target 11776; HLA-C*14:02; BPIFA2; ENSG00000131050; CTA
VINTLKSTV

SEQ ID NO: 11777 - protein, 9 aa, Homo sapiens
  misc_feature: Table A; Target 11777; HLA-C*16:01; BPIFA2; ENSG00000131050; CTA
VINTLKSTV

SEQ ID NO: 11778 - protein, 9 aa, Homo sapiens
  misc_feature: Table A; Target 11778; HLA-C*16:02; BPIFA2; ENSG00000131050; CTA
VINTLKSTV

SEQ ID NO: 11779 - protein, 9 aa, Homo sapiens
  misc_feature: Table A; Target 11779; HLA-C*16:04; BPIFA2; ENSG00000131050; CTA
VINTLKSTV

SEQ ID NO: 11780 - protein, 10 aa, Homo sapiens
  misc_feature: Table A; Target 11780; HLA-A*31:01; BPIFA2; ENSG00000131050; CTA
VINTLKSTVS

SEQ ID NO: 11781 - protein, 10 aa, Homo sapiens
  misc_feature: Table A; Target 11781; HLA-C*07:04; BPIFA2; ENSG00000131050; CTA
VINTLKSTVS

SEQ ID NO: 11782 - protein, 10 aa, Homo sapiens
  misc_feature: Table A; Target 11782; HLA-A*03:02; BPIFA2; ENSG00000131050; CTA
VIQQVVDNPQ

SEQ ID NO: 11783 - protein, 10 aa, Homo sapiens
  misc_feature: Table A; Target 11783; HLA-C*06:02; BPIFA2; ENSG00000131050; CTA
VIQQVVDNPQ

SEQ ID NO: 11784 - protein, 10 aa, Homo sapiens
  misc_feature: Table A; Target 11784; HLA-B*27:02; BPIFA2; ENSG00000131050; CTA
VKAEPIDDGK

SEQ ID NO: 11785 - protein, 9 aa, Homo sapiens
  misc_feature: Table A; Target 11785; HLA-A*02:01; BPIFA2; ENSG00000131050; CTA
VLHEGLETV

SEQ ID NO: 11786 - protein, 9 aa, Homo sapiens
  misc_feature: Table A; Target 11786; HLA-A*02:03; BPIFA2; ENSG00000131050; CTA
VLHEGLETV

SEQ ID NO: 11787 - protein, 9 aa, Homo sapiens
  misc_feature: Table A; Target 11787; HLA-A*02:04; BPIFA2; ENSG00000131050; CTA
VLHEGLETV

SEQ ID NO: 11788 - protein, 9 aa, Homo sapiens
  misc_feature: Table A; Target 11788; HLA-A*02:07; BPIFA2; ENSG00000131050; CTA
VLHEGLETV

SEQ ID NO: 11789 - protein, 9 aa, Homo sapiens
  misc_feature: Table A; Target 11789; HLA-A*30:01; BPIFA2; ENSG00000131050; CTA
VLHEGLETV

SEQ ID NO: 11790 - protein, 9 aa, Homo sapiens
  misc_feature: Table A; Target 11790; HLA-A*32:01; BPIFA2; ENSG00000131050; CTA
VLHEGLETV

SEQ ID NO: 11791 - protein, 9 aa, Homo sapiens
  misc_feature: Table A; Target 11791; HLA-A*68:02; BPIFA2; ENSG00000131050; CTA
VLHEGLETV

SEQ ID NO: 11792 - protein, 9 aa, Homo sapiens
  misc_feature: Table A; Target 11792; HLA-B*08:01; BPIFA2; ENSG00000131050; CTA
VLHEGLETV

SEQ ID NO: 11793 - protein, 9 aa, Homo sapiens
  misc_feature: Table A; Target 11793; HLA-B*13:02; BPIFA2; ENSG00000131050; CTA
VLHEGLETV

SEQ ID NO: 11794 - protein, 9 aa, Homo sapiens
  misc_feature: Table A; Target 11794; HLA-B*15:01; BPIFA2; ENSG00000131050; CTA
VLHEGLETV

SEQ ID NO: 11795 - protein, 9 aa, Homo sapiens
  misc_feature: Table A; Target 11795; HLA-B*15:03; BPIFA2; ENSG00000131050; CTA
VLHEGLETV

SEQ ID NO: 11796 - protein, 9 aa, Homo sapiens
  misc_feature: Table A; Target 11796; HLA-B*37:01; BPIFA2; ENSG00000131050; CTA
VLHEGLETV

SEQ ID NO: 11797 - protein, 9 aa, Homo sapiens
  misc_feature: Table A; Target 11797; HLA-B*40:02; BPIFA2; ENSG00000131050; CTA
VLHEGLETV

SEQ ID NO: 11798 - protein, 9 aa, Homo sapiens
  misc_feature: Table A; Target 11798; HLA-B*46:01; BPIFA2; ENSG00000131050; CTA
VLHEGLETV

SEQ ID NO: 11799 - protein, 9 aa, Homo sapiens
  misc_feature: Table A; Target 11799; HLA-B*49:01; BPIFA2; ENSG00000131050; CTA
VLHEGLETV

SEQ ID NO: 11800 - protein, 9 aa, Homo sapiens
  misc_feature: Table A; Target 11800; HLA-B*51:01; BPIFA2; ENSG00000131050; CTA
VLHEGLETV

SEQ ID NO: 11801 - protein, 9 aa, Homo sapiens
  misc_feature: Table A; Target 11801; HLA-B*55:01; BPIFA2; ENSG00000131050; CTA
VLHEGLETV

SEQ ID NO: 11802 - protein, 9 aa, Homo sapiens
  misc_feature: Table A; Target 11802; HLA-B*56:01; BPIFA2; ENSG00000131050; CTA
VLHEGLETV

SEQ ID NO: 11803 - protein, 9 aa, Homo sapiens
  misc_feature: Table A; Target 11803; HLA-C*01:02; BPIFA2; ENSG00000131050; CTA
VLHEGLETV

SEQ ID NO: 11804 - protein, 9 aa, Homo sapiens
  misc_feature: Table A; Target 11804; HLA-C*02:02; BPIFA2; ENSG00000131050; CTA
VLHEGLETV

SEQ ID NO: 11805 - protein, 9 aa, Homo sapiens
  misc_feature: Table A; Target 11805; HLA-C*03:04; BPIFA2; ENSG00000131050; CTA
VLHEGLETV

SEQ ID NO: 11806 - protein, 9 aa, Homo sapiens
  misc_feature: Table A; Target 11806; HLA-C*05:01; BPIFA2; ENSG00000131050; CTA
VLHEGLETV

SEQ ID NO: 11807 - protein, 9 aa, Homo sapiens
  misc_feature: Table A; Target 11807; HLA-C*06:02; BPIFA2; ENSG00000131050; CTA
VLHEGLETV

SEQ ID NO: 11808 - protein, 9 aa, Homo sapiens
  misc_feature: Table A; Target 11808; HLA-C*14:02; BPIFA2; ENSG00000131050; CTA
VLHEGLETV

SEQ ID NO: 11809 - protein, 9 aa, Homo sapiens
  misc_feature: Table A; Target 11809; HLA-C*16:02; BPIFA2; ENSG00000131050; CTA
VLHEGLETV

SEQ ID NO: 11810 - protein, 10 aa, Homo sapiens
  misc_feature: Table A; Target 11810; HLA-A*02:01; BPIFA2; ENSG00000131050; CTA
VLLCGVLTGT

SEQ ID NO: 11811 - protein, 10 aa, Homo sapiens
  misc_feature: Table A; Target 11811; HLA-A*02:03; BPIFA2; ENSG00000131050; CTA
VLLCGVLTGT

SEQ ID NO: 11812 - protein, 10 aa, Homo sapiens
  misc_feature: Table A; Target 11812; HLA-C*06:02; BPIFA2; ENSG00000131050; CTA
VLLCGVLTGT

SEQ ID NO: 11813 - protein, 10 aa, Homo sapiens
  misc_feature: Table A; Target 11813; HLA-C*07:02; BPIFA2; ENSG00000131050; CTA
VLLCGVLTGT

SEQ ID NO: 11814 - protein, 8 aa, Homo sapiens
  misc_feature: Table A; Target 11814; HLA-A*32:01; BPIFA2; ENSG00000131050; CTA
VLQKSSAW

SEQ ID NO: 11815 - protein, 8 aa, Homo sapiens
  misc_feature: Table A; Target 11815; HLA-B*08:01; BPIFA2; ENSG00000131050; CTA
VLQKSSAW

SEQ ID NO: 11816 - protein, 8 aa, Homo sapiens
  misc_feature: Table A; Target 11816; HLA-B*15:01; BPIFA2; ENSG00000131050; CTA
VLQKSSAW

SEQ ID NO: 11817 - protein, 8 aa, Homo sapiens
  misc_feature: Table A; Target 11817; HLA-B*58:01; BPIFA2; ENSG00000131050; CTA
VLQKSSAW

SEQ ID NO: 11818 - protein, 8 aa, Homo sapiens
  misc_feature: Table A; Target 11818; HLA-C*04:01; BPIFA2; ENSG00000131050; CTA
VLQKSSAW

SEQ ID NO: 11819 - protein, 8 aa, Homo sapiens
  misc_feature: Table A; Target 11819; HLA-C*07:01; BPIFA2; ENSG00000131050; CTA
VLQKSSAW

SEQ ID NO: 11820 - protein, 8 aa, Homo sapiens
  misc_feature: Table A; Target 11820; HLA-C*07:04; BPIFA2; ENSG00000131050; CTA
VLQKSSAW

SEQ ID NO: 11821 - protein, 10 aa, Homo sapiens
  misc_feature: Table A; Target 11821; HLA-A*02:04; BPIFA2; ENSG00000131050; CTA
VLQKSSAWQL

SEQ ID NO: 11822 - protein, 9 aa, Homo sapiens
  misc_feature: Table A; Target 11822; HLA-A*02:01; BPIFA2; ENSG00000131050; CTA
VLTGTSESL

SEQ ID NO: 11823 - protein, 9 aa, Homo sapiens
  misc_feature: Table A; Target 11823; HLA-A*02:03; BPIFA2; ENSG00000131050; CTA
VLTGTSESL

SEQ ID NO: 11824 - protein, 9 aa, Homo sapiens
  misc_feature: Table A; Target 11824; HLA-A*02:04; BPIFA2; ENSG00000131050; CTA
VLTGTSESL

SEQ ID NO: 11825 - protein, 9 aa, Homo sapiens
  misc_feature: Table A; Target 11825; HLA-A*02:07; BPIFA2; ENSG00000131050; CTA
VLTGTSESL

SEQ ID NO: 11826 - protein, 9 aa, Homo sapiens
  misc_feature: Table A; Target 11826; HLA-A*23:01; BPIFA2; ENSG00000131050; CTA
VLTGTSESL

SEQ ID NO: 11827 - protein, 9 aa, Homo sapiens
  misc_feature: Table A; Target 11827; HLA-A*24:02; BPIFA2; ENSG00000131050; CTA
VLTGTSESL

SEQ ID NO: 11828 - protein, 9 aa, Homo sapiens
  misc_feature: Table A; Target 11828; HLA-A*30:01; BPIFA2; ENSG00000131050; CTA
VLTGTSESL

SEQ ID NO: 11829 - protein, 9 aa, Homo sapiens
  misc_feature: Table A; Target 11829; HLA-A*32:01; BPIFA2; ENSG00000131050; CTA
VLTGTSESL

SEQ ID NO: 11830 - protein, 9 aa, Homo sapiens
  misc_feature: Table A; Target 11830; HLA-B*07:02; BPIFA2; ENSG00000131050; CTA
VLTGTSESL

SEQ ID NO: 11831 - protein, 9 aa, Homo sapiens
  misc_feature: Table A; Target 11831; HLA-B*08:01; BPIFA2; ENSG00000131050; CTA
VLTGTSESL

SEQ ID NO: 11832 - protein, 9 aa, Homo sapiens
  misc_feature: Table A; Target 11832; HLA-B*13:02; BPIFA2; ENSG00000131050; CTA
VLTGTSESL

SEQ ID NO: 11833 - protein, 9 aa, Homo sapiens
  misc_feature: Table A; Target 11833; HLA-B*15:01; BPIFA2; ENSG00000131050; CTA
VLTGTSESL

SEQ ID NO: 11834 - protein, 9 aa, Homo sapiens
  misc_feature: Table A; Target 11834; HLA-B*15:03; BPIFA2; ENSG00000131050; CTA
VLTGTSESL

SEQ ID NO: 11835 - protein, 9 aa, Homo sapiens
  misc_feature: Table A; Target 11835; HLA-B*27:05; BPIFA2; ENSG00000131050; CTA
VLTGTSESL

SEQ ID NO: 11836 - protein, 9 aa, Homo sapiens
  misc_feature: Table A; Target 11836; HLA-B*35:03; BPIFA2; ENSG00000131050; CTA
VLTGTSESL

SEQ ID NO: 11837 - protein, 9 aa, Homo sapiens
  misc_feature: Table A; Target 11837; HLA-B*38:01; BPIFA2; ENSG00000131050; CTA
VLTGTSESL

SEQ ID NO: 11838 - protein, 9 aa, Homo sapiens
  misc_feature: Table A; Target 11838; HLA-B*39:01; BPIFA2; ENSG00000131050; CTA
VLTGTSESL

SEQ ID NO: 11839 - protein, 9 aa, Homo sapiens
  misc_feature: Table A; Target 11839; HLA-B*40:01; BPIFA2; ENSG00000131050; CTA
VLTGTSESL

SEQ ID NO: 11840 - protein, 9 aa, Homo sapiens
  misc_feature: Table A; Target 11840; HLA-B*40:02; BPIFA2; ENSG00000131050; CTA
VLTGTSESL

SEQ ID NO: 11841 - protein, 9 aa, Homo sapiens
  misc_feature: Table A; Target 11841; HLA-B*46:01; BPIFA2; ENSG00000131050; CTA
VLTGTSESL

SEQ ID NO: 11842 - protein, 9 aa, Homo sapiens
  misc_feature: Table A; Target 11842; HLA-B*55:01; BPIFA2; ENSG00000131050; CTA
VLTGTSESL

SEQ ID NO: 11843 - protein, 9 aa, Homo sapiens
  misc_feature: Table A; Target 11843; HLA-B*58:01; BPIFA2; ENSG00000131050; CTA
VLTGTSESL

SEQ ID NO: 11844 - protein, 9 aa, Homo sapiens
  misc_feature: Table A; Target 11844; HLA-C*01:02; BPIFA2; ENSG00000131050; CTA
VLTGTSESL

SEQ ID NO: 11845 - protein, 9 aa, Homo sapiens
  misc_feature: Table A; Target 11845; HLA-C*02:02; BPIFA2; ENSG00000131050; CTA
VLTGTSESL

SEQ ID NO: 11846 - protein, 9 aa, Homo sapiens
  misc_feature: Table A; Target 11846; HLA-C*03:03; BPIFA2; ENSG00000131050; CTA
VLTGTSESL

SEQ ID NO: 11847 - protein, 9 aa, Homo sapiens
  misc_feature: Table A; Target 11847; HLA-C*03:04; BPIFA2; ENSG00000131050; CTA
VLTGTSESL

SEQ ID NO: 11848 - protein, 9 aa, Homo sapiens
  misc_feature: Table A; Target 11848; HLA-C*04:01; BPIFA2; ENSG00000131050; CTA
VLTGTSESL

SEQ ID NO: 11849 - protein, 9 aa, Homo sapiens
  misc_feature: Table A; Target 11849; HLA-C*05:01; BPIFA2; ENSG00000131050; CTA
VLTGTSESL

SEQ ID NO: 11850 - protein, 9 aa, Homo sapiens
  misc_feature: Table A; Target 11850; HLA-C*06:02; BPIFA2; ENSG00000131050; CTA
VLTGTSESL

SEQ ID NO: 11851 - protein, 9 aa, Homo sapiens
  misc_feature: Table A; Target 11851; HLA-C*07:02; BPIFA2; ENSG00000131050; CTA
VLTGTSESL

SEQ ID NO: 11852 - protein, 9 aa, Homo sapiens
  misc_feature: Table A; Target 11852; HLA-C*07:04; BPIFA2; ENSG00000131050; CTA
VLTGTSESL

SEQ ID NO: 11853 - protein, 9 aa, Homo sapiens
  misc_feature: Table A; Target 11853; HLA-C*14:02; BPIFA2; ENSG00000131050; CTA
VLTGTSESL

SEQ ID NO: 11854 - protein, 9 aa, Homo sapiens
  misc_feature: Table A; Target 11854; HLA-C*16:01; BPIFA2; ENSG00000131050; CTA
VLTGTSESL

SEQ ID NO: 11855 - protein, 9 aa, Homo sapiens
  misc_feature: Table A; Target 11855; HLA-C*16:02; BPIFA2; ENSG00000131050; CTA
VLTGTSESL

SEQ ID NO: 11856 - protein, 10 aa, Homo sapiens
  misc_feature: Table A; Target 11856; HLA-A*02:01; BPIFA2; ENSG00000131050; CTA
VLTGTSESLL

SEQ ID NO: 11857 - protein, 10 aa, Homo sapiens
  misc_feature: Table A; Target 11857; HLA-A*02:03; BPIFA2; ENSG00000131050; CTA
VLTGTSESLL

SEQ ID NO: 11858 - protein, 10 aa, Homo sapiens
  misc_feature: Table A; Target 11858; HLA-B*55:01; BPIFA2; ENSG00000131050; CTA
VLTGTSESLL

SEQ ID NO: 11859 - protein, 10 aa, Homo sapiens
  misc_feature: Table A; Target 11859; HLA-C*07:02; BPIFA2; ENSG00000131050; CTA
VLTGTSESLL

SEQ ID NO: 11860 - protein, 10 aa, Homo sapiens
  misc_feature: Table A; Target 11860; HLA-C*07:04; BPIFA2; ENSG00000131050; CTA
VLTGTSESLL

SEQ ID NO: 11861 - protein, 8 aa, Homo sapiens
  misc_feature: Table A; Target 11861; HLA-A*23:01; BPIFA2; ENSG00000131050; CTA
VNSVINTL

SEQ ID NO: 11862 - protein, 8 aa, Homo sapiens
  misc_feature: Table A; Target 11862; HLA-A*24:02; BPIFA2; ENSG00000131050; CTA
VNSVINTL

SEQ ID NO: 11863 - protein, 8 aa, Homo sapiens
  misc_feature: Table A; Target 11863; HLA-A*32:01; BPIFA2; ENSG00000131050; CTA
VNSVINTL

SEQ ID NO: 11864 - protein, 8 aa, Homo sapiens
  misc_feature: Table A; Target 11864; HLA-B*07:02; BPIFA2; ENSG00000131050; CTA
VNSVINTL

SEQ ID NO: 11865 - protein, 8 aa, Homo sapiens
  misc_feature: Table A; Target 11865; HLA-B*08:01; BPIFA2; ENSG00000131050; CTA
VNSVINTL

SEQ ID NO: 11866 - protein, 8 aa, Homo sapiens
  misc_feature: Table A; Target 11866; HLA-B*15:01; BPIFA2; ENSG00000131050; CTA
VNSVINTL

SEQ ID NO: 11867 - protein, 8 aa, Homo sapiens
  misc_feature: Table A; Target 11867; HLA-B*18:01; BPIFA2; ENSG00000131050; CTA
VNSVINTL

SEQ ID NO: 11868 - protein, 8 aa, Homo sapiens
  misc_feature: Table A; Target 11868; HLA-B*27:05; BPIFA2; ENSG00000131050; CTA
VNSVINTL

SEQ ID NO: 11869 - protein, 8 aa, Homo sapiens
  misc_feature: Table A; Target 11869; HLA-B*37:01; BPIFA2; ENSG00000131050; CTA
VNSVINTL

SEQ ID NO: 11870 - protein, 8 aa, Homo sapiens
  misc_feature: Table A; Target 11870; HLA-B*39:01; BPIFA2; ENSG00000131050; CTA
VNSVINTL

SEQ ID NO: 11871 - protein, 8 aa, Homo sapiens
  misc_feature: Table A; Target 11871; HLA-B*40:02; BPIFA2; ENSG00000131050; CTA
VNSVINTL

SEQ ID NO: 11872 - protein, 8 aa, Homo sapiens
  misc_feature: Table A; Target 11872; HLA-C*01:02; BPIFA2; ENSG00000131050; CTA
VNSVINTL

SEQ ID NO: 11873 - protein, 8 aa, Homo sapiens
  misc_feature: Table A; Target 11873; HLA-C*03:03; BPIFA2; ENSG00000131050; CTA
VNSVINTL

SEQ ID NO: 11874 - protein, 8 aa, Homo sapiens
  misc_feature: Table A; Target 11874; HLA-C*03:04; BPIFA2; ENSG00000131050; CTA
VNSVINTL

SEQ ID NO: 11875 - protein, 8 aa, Homo sapiens
  misc_feature: Table A; Target 11875; HLA-C*04:01; BPIFA2; ENSG00000131050; CTA
VNSVINTL

SEQ ID NO: 11876 - protein, 8 aa, Homo sapiens
  misc_feature: Table A; Target 11876; HLA-C*05:01; BPIFA2; ENSG00000131050; CTA
VNSVINTL

SEQ ID NO: 11877 - protein, 8 aa, Homo sapiens
  misc_feature: Table A; Target 11877; HLA-C*06:02; BPIFA2; ENSG00000131050; CTA
VNSVINTL

SEQ ID NO: 11878 - protein, 8 aa, Homo sapiens
  misc_feature: Table A; Target 11878; HLA-C*07:01; BPIFA2; ENSG00000131050; CTA
VNSVINTL

SEQ ID NO: 11879 - protein, 8 aa, Homo sapiens
  misc_feature: Table A; Target 11879; HLA-C*07:02; BPIFA2; ENSG00000131050; CTA
VNSVINTL

SEQ ID NO: 11880 - protein, 8 aa, Homo sapiens
  misc_feature: Table A; Target 11880; HLA-C*07:04; BPIFA2; ENSG00000131050; CTA
VNSVINTL

SEQ ID NO: 11881 - protein, 8 aa, Homo sapiens
  misc_feature: Table A; Target 11881; HLA-C*12:03; BPIFA2; ENSG00000131050; CTA
VNSVINTL

SEQ ID NO: 11882 - protein, 8 aa, Homo sapiens
  misc_feature: Table A; Target 11882; HLA-C*14:02; BPIFA2; ENSG00000131050; CTA
VNSVINTL

SEQ ID NO: 11883 - protein, 8 aa, Homo sapiens
  misc_feature: Table A; Target 11883; HLA-C*16:01; BPIFA2; ENSG00000131050; CTA
VNSVINTL

SEQ ID NO: 11884 - protein, 8 aa, Homo sapiens
  misc_feature: Table A; Target 11884; HLA-C*16:02; BPIFA2; ENSG00000131050; CTA
VNSVINTL

SEQ ID NO: 11885 - protein, 8 aa, Homo sapiens
  misc_feature: Table A; Target 11885; HLA-C*16:04; BPIFA2; ENSG00000131050; CTA
VNSVINTL

SEQ ID NO: 11886 - protein, 9 aa, Homo sapiens
  misc_feature: Table A; Target 11886; HLA-A*01:01; BPIFA2; ENSG00000131050; CTA
VNSVINTLK

SEQ ID NO: 11887 - protein, 9 aa, Homo sapiens
  misc_feature: Table A; Target 11887; HLA-A*03:01; BPIFA2; ENSG00000131050; CTA
VNSVINTLK

SEQ ID NO: 11888 - protein, 9 aa, Homo sapiens
  misc_feature: Table A; Target 11888; HLA-A*03:02; BPIFA2; ENSG00000131050; CTA
VNSVINTLK

SEQ ID NO: 11889 - protein, 9 aa, Homo sapiens
  misc_feature: Table A; Target 11889; HLA-A*11:01; BPIFA2; ENSG00000131050; CTA
VNSVINTLK

SEQ ID NO: 11890 - protein, 9 aa, Homo sapiens
  misc_feature: Table A; Target 11890; HLA-A*33:01; BPIFA2; ENSG00000131050; CTA
VNSVINTLK

SEQ ID NO: 11891 - protein, 9 aa, Homo sapiens
  misc_feature: Table A; Target 11891; HLA-A*33:03; BPIFA2; ENSG00000131050; CTA
VNSVINTLK

SEQ ID NO: 11892 - protein, 9 aa, Homo sapiens
  misc_feature: Table A; Target 11892; HLA-A*68:01; BPIFA2; ENSG00000131050; CTA
VNSVINTLK

SEQ ID NO: 11893 - protein, 9 aa, Homo sapiens
  misc_feature: Table A; Target 11893; HLA-A*68:02; BPIFA2; ENSG00000131050; CTA
VNSVINTLK

SEQ ID NO: 11894 - protein, 9 aa, Homo sapiens
  misc_feature: Table A; Target 11894; HLA-B*27:02; BPIFA2; ENSG00000131050; CTA
VNSVINTLK

SEQ ID NO: 11895 - protein, 9 aa, Homo sapiens
  misc_feature: Table A; Target 11895; HLA-B*27:05; BPIFA2; ENSG00000131050; CTA
VNSVINTLK

SEQ ID NO: 11896 - protein, 9 aa, Homo sapiens
  misc_feature: Table A; Target 11896; HLA-B*57:01; BPIFA2; ENSG00000131050; CTA
VNSVINTLK

SEQ ID NO: 11897 - protein, 9 aa, Homo sapiens
  misc_feature: Table A; Target 11897; HLA-C*04:01; BPIFA2; ENSG00000131050; CTA
VNSVINTLK

SEQ ID NO: 11898 - protein, 9 aa, Homo sapiens
  misc_feature: Table A; Target 11898; HLA-C*06:02; BPIFA2; ENSG00000131050; CTA
VNSVINTLK

SEQ ID NO: 11899 - protein, 9 aa, Homo sapiens
  misc_feature: Table A; Target 11899; HLA-C*07:01; BPIFA2; ENSG00000131050; CTA
VNSVINTLK

SEQ ID NO: 11900 - protein, 9 aa, Homo sapiens
  misc_feature: Table A; Target 11900; HLA-C*07:02; BPIFA2; ENSG00000131050; CTA
VNSVINTLK

SEQ ID NO: 11901 - protein, 9 aa, Homo sapiens
  misc_feature: Table A; Target 11901; HLA-C*07:06; BPIFA2; ENSG00000131050; CTA
VNSVINTLK

SEQ ID NO: 11902 - protein, 9 aa, Homo sapiens
  misc_feature: Table A; Target 11902; HLA-C*12:03; BPIFA2; ENSG00000131050; CTA
VNSVINTLK

SEQ ID NO: 11903 - protein, 8 aa, Homo sapiens
  misc_feature: Table A; Target 11903; HLA-C*04:01; BPIFA2; ENSG00000131050; CTA
VNVIQQVV

SEQ ID NO: 11904 - protein, 8 aa, Homo sapiens
  misc_feature: Table A; Target 11904; HLA-C*06:02; BPIFA2; ENSG00000131050; CTA
VNVIQQVV

SEQ ID NO: 11905 - protein, 8 aa, Homo sapiens
  misc_feature: Table A; Target 11905; HLA-C*07:01; BPIFA2; ENSG00000131050; CTA
VNVIQQVV

SEQ ID NO: 11906 - protein, 8 aa, Homo sapiens
  misc_feature: Table A; Target 11906; HLA-C*07:02; BPIFA2; ENSG00000131050; CTA
VNVIQQVV

SEQ ID NO: 11907 - protein, 8 aa, Homo sapiens
  misc_feature: Table A; Target 11907; HLA-C*12:03; BPIFA2; ENSG00000131050; CTA
VNVIQQVV

SEQ ID NO: 11908 - protein, 10 aa, Homo sapiens
  misc_feature: Table A; Target 11908; HLA-C*04:01; BPIFA2; ENSG00000131050; CTA
VNVIQQVVDN

SEQ ID NO: 11909 - protein, 10 aa, Homo sapiens
  misc_feature: Table A; Target 11909; HLA-C*06:02; BPIFA2; ENSG00000131050; CTA
VNVIQQVVDN

SEQ ID NO: 11910 - protein, 10 aa, Homo sapiens
  misc_feature: Table A; Target 11910; HLA-C*07:01; BPIFA2; ENSG00000131050; CTA
VNVIQQVVDN

SEQ ID NO: 11911 - protein, 9 aa, Homo sapiens
  misc_feature: Table A; Target 11911; HLA-B*07:02; BPIFA2; ENSG00000131050; CTA
VSSLLQKEI

SEQ ID NO: 11912 - protein, 9 aa, Homo sapiens
  misc_feature: Table A; Target 11912; HLA-B*13:02; BPIFA2; ENSG00000131050; CTA
VSSLLQKEI

SEQ ID NO: 11913 - protein, 9 aa, Homo sapiens
  misc_feature: Table A; Target 11913; HLA-B*57:01; BPIFA2; ENSG00000131050; CTA
VSSLLQKEI

SEQ ID NO: 11914 - protein, 9 aa, Homo sapiens
  misc_feature: Table A; Target 11914; HLA-B*58:01; BPIFA2; ENSG00000131050; CTA
VSSLLQKEI

SEQ ID NO: 11915 - protein, 9 aa, Homo sapiens
  misc_feature: Table A; Target 11915; HLA-C*06:02; BPIFA2; ENSG00000131050; CTA
VSSLLQKEI

SEQ ID NO: 11916 - protein, 9 aa, Homo sapiens
  misc_feature: Table A; Target 11916; HLA-C*07:01; BPIFA2; ENSG00000131050; CTA
VSSLLQKEI

SEQ ID NO: 11917 - protein, 9 aa, Homo sapiens
  misc_feature: Table A; Target 11917; HLA-C*07:02; BPIFA2; ENSG00000131050; CTA
VSSLLQKEI

SEQ ID NO: 11918 - protein, 9 aa, Homo sapiens
  misc_feature: Table A; Target 11918; HLA-C*12:03; BPIFA2; ENSG00000131050; CTA
VSSLLQKEI

SEQ ID NO: 11919 - protein, 9 aa, Homo sapiens
  misc_feature: Table A; Target 11919; HLA-C*16:01; BPIFA2; ENSG00000131050; CTA
VSSLLQKEI

SEQ ID NO: 11920 - protein, 9 aa, Homo sapiens
  misc_feature: Table A; Target 11920; HLA-C*16:02; BPIFA2; ENSG00000131050; CTA
VSSLLQKEI

SEQ ID NO: 11921 - protein, 9 aa, Homo sapiens
  misc_feature: Table A; Target 11921; HLA-C*16:04; BPIFA2; ENSG00000131050; CTA
VSSLLQKEI

SEQ ID NO: 11922 - protein, 10 aa, Homo sapiens
  misc_feature: Table A; Target 11922; HLA-C*06:02; BPIFA2; ENSG00000131050; CTA
VTANVTVAGP

SEQ ID NO: 11923 - protein, 11 aa, Homo sapiens
  misc_feature: Table A; Target 11923; HLA-A*01:01; BPIFA2; ENSG00000131050; CTA
VTANVTVAGPI

SEQ ID NO: 11924 - protein, 8 aa, Homo sapiens
  misc_feature: Table A; Target 11924; HLA-C*03:03; BPIFA2; ENSG00000131050; CTA
VTIETDPQ

SEQ ID NO: 11925 - protein, 9 aa, Homo sapiens
  misc_feature: Table A; Target 11925; HLA-A*02:01; BPIFA2; ENSG00000131050; CTA
VTIETDPQT

SEQ ID NO: 11926 - protein, 9 aa, Homo sapiens
  misc_feature: Table A; Target 11926; HLA-B*35:03; BPIFA2; ENSG00000131050; CTA
VTIETDPQT

SEQ ID NO: 11927 - protein, 9 aa, Homo sapiens
  misc_feature: Table A; Target 11927; HLA-B*58:01; BPIFA2; ENSG00000131050; CTA
VTIETDPQT

SEQ ID NO: 11928 - protein, 9 aa, Homo sapiens
  misc_feature: Table A; Target 11928; HLA-C*03:03; BPIFA2; ENSG00000131050; CTA
VTIETDPQT

SEQ ID NO: 11929 - protein, 9 aa, Homo sapiens
  misc_feature: Table A; Target 11929; HLA-C*03:04; BPIFA2; ENSG00000131050; CTA
VTIETDPQT

SEQ ID NO: 11930 - protein, 9 aa, Homo sapiens
  misc_feature: Table A; Target 11930; HLA-C*04:01; BPIFA2; ENSG00000131050; CTA
VTIETDPQT

SEQ ID NO: 11931 - protein, 9 aa, Homo sapiens
  misc_feature: Table A; Target 11931; HLA-C*06:02; BPIFA2; ENSG00000131050; CTA
VTIETDPQT

SEQ ID NO: 11932 - protein, 9 aa, Homo sapiens
  misc_feature: Table A; Target 11932; HLA-C*07:01; BPIFA2; ENSG00000131050; CTA
VTIETDPQT

SEQ ID NO: 11933 - protein, 9 aa, Homo sapiens
  misc_feature: Table A; Target 11933; HLA-C*07:02; BPIFA2; ENSG00000131050; CTA
VTIETDPQT

SEQ ID NO: 11934 - protein, 9 aa, Homo sapiens
  misc_feature: Table A; Target 11934; HLA-C*07:04; BPIFA2; ENSG00000131050; CTA
VTIETDPQT

SEQ ID NO: 11935 - protein, 9 aa, Homo sapiens
  misc_feature: Table A; Target 11935; HLA-C*12:03; BPIFA2; ENSG00000131050; CTA
VTIETDPQT

SEQ ID NO: 11936 - protein, 9 aa, Homo sapiens
  misc_feature: Table A; Target 11936; HLA-C*16:02; BPIFA2; ENSG00000131050; CTA
VTIETDPQT

SEQ ID NO: 11937 - protein, 10 aa, Homo sapiens
  misc_feature: Table A; Target 11937; HLA-A*03:02; BPIFA2; ENSG00000131050; CTA
VTIETDPQTH

SEQ ID NO: 11938 - protein, 10 aa, Homo sapiens
  misc_feature: Table A; Target 11938; HLA-A*11:01; BPIFA2; ENSG00000131050; CTA
VTIETDPQTH

SEQ ID NO: 11939 - protein, 10 aa, Homo sapiens
  misc_feature: Table A; Target 11939; HLA-A*25:01; BPIFA2; ENSG00000131050; CTA
VTIETDPQTH

SEQ ID NO: 11940 - protein, 10 aa, Homo sapiens
  misc_feature: Table A; Target 11940; HLA-A*68:01; BPIFA2; ENSG00000131050; CTA
VTIETDPQTH

SEQ ID NO: 11941 - protein, 10 aa, Homo sapiens
  misc_feature: Table A; Target 11941; HLA-B*27:05; BPIFA2; ENSG00000131050; CTA
VTIETDPQTH

SEQ ID NO: 11942 - protein, 10 aa, Homo sapiens
  misc_feature: Table A; Target 11942; HLA-B*57:01; BPIFA2; ENSG00000131050; CTA
VTIETDPQTH

SEQ ID NO: 11943 - protein, 10 aa, Homo sapiens
  misc_feature: Table A; Target 11943; HLA-B*58:01; BPIFA2; ENSG00000131050; CTA
VTIETDPQTH

SEQ ID NO: 11944 - protein, 10 aa, Homo sapiens
  misc_feature: Table A; Target 11944; HLA-C*06:02; BPIFA2; ENSG00000131050; CTA
VTIETDPQTH

SEQ ID NO: 11945 - protein, 10 aa, Homo sapiens
  misc_feature: Table A; Target 11945; HLA-C*07:01; BPIFA2; ENSG00000131050; CTA
VTIETDPQTH

SEQ ID NO: 11946 - protein, 10 aa, Homo sapiens
  misc_feature: Table A; Target 11946; HLA-C*07:06; BPIFA2; ENSG00000131050; CTA
VTIETDPQTH

SEQ ID NO: 11947 - protein, 10 aa, Homo sapiens
  misc_feature: Table A; Target 11947; HLA-C*12:03; BPIFA2; ENSG00000131050; CTA
VTIETDPQTH

SEQ ID NO: 11948 - protein, 10 aa, Homo sapiens
  misc_feature: Table A; Target 11948; HLA-C*16:02; BPIFA2; ENSG00000131050; CTA
VTIETDPQTH

SEQ ID NO: 11949 - protein, 8 aa, Homo sapiens
  misc_feature: Table A; Target 11949; HLA-A*23:01; BPIFA2; ENSG00000131050; CTA
VTVAGPII

SEQ ID NO: 11950 - protein, 8 aa, Homo sapiens
  misc_feature: Table A; Target 11950; HLA-B*40:02; BPIFA2; ENSG00000131050; CTA
VTVAGPII

SEQ ID NO: 11951 - protein, 8 aa, Homo sapiens
  misc_feature: Table A; Target 11951; HLA-B*51:01; BPIFA2; ENSG00000131050; CTA
VTVAGPII

SEQ ID NO: 11952 - protein, 8 aa, Homo sapiens
  misc_feature: Table A; Target 11952; HLA-B*58:01; BPIFA2; ENSG00000131050; CTA
VTVAGPII

SEQ ID NO: 11953 - protein, 8 aa, Homo sapiens
  misc_feature: Table A; Target 11953; HLA-C*03:03; BPIFA2; ENSG00000131050; CTA
VTVAGPII

SEQ ID NO: 11954 - protein, 8 aa, Homo sapiens
  misc_feature: Table A; Target 11954; HLA-C*03:04; BPIFA2; ENSG00000131050; CTA
VTVAGPII

SEQ ID NO: 11955 - protein, 8 aa, Homo sapiens
  misc_feature: Table A; Target 11955; HLA-C*04:01; BPIFA2; ENSG00000131050; CTA
VTVAGPII

SEQ ID NO: 11956 - protein, 8 aa, Homo sapiens
  misc_feature: Table A; Target 11956; HLA-C*06:02; BPIFA2; ENSG00000131050; CTA
VTVAGPII

SEQ ID NO: 11957 - protein, 8 aa, Homo sapiens
  misc_feature: Table A; Target 11957; HLA-C*07:01; BPIFA2; ENSG00000131050; CTA
VTVAGPII

SEQ ID NO: 11958 - protein, 8 aa, Homo sapiens
  misc_feature: Table A; Target 11958; HLA-C*12:03; BPIFA2; ENSG00000131050; CTA
VTVAGPII

SEQ ID NO: 11959 - protein, 8 aa, Homo sapiens
  misc_feature: Table A; Target 11959; HLA-C*16:01; BPIFA2; ENSG00000131050; CTA
VTVAGPII

SEQ ID NO: 11960 - protein, 10 aa, Homo sapiens
  misc_feature: Table A; Target 11960; HLA-A*11:01; BPIFA2; ENSG00000131050; CTA
VTVAGPIIGQ

SEQ ID NO: 11961 - protein, 10 aa, Homo sapiens
  misc_feature: Table A; Target 11961; HLA-A*26:01; BPIFA2; ENSG00000131050; CTA
VTVAGPIIGQ

SEQ ID NO: 11962 - protein, 10 aa, Homo sapiens
  misc_feature: Table A; Target 11962; HLA-A*31:01; BPIFA2; ENSG00000131050; CTA
VTVAGPIIGQ

SEQ ID NO: 11963 - protein, 10 aa, Homo sapiens
  misc_feature: Table A; Target 11963; HLA-A*68:02; BPIFA2; ENSG00000131050; CTA
VTVAGPIIGQ

SEQ ID NO: 11964 - protein, 10 aa, Homo sapiens
  misc_feature: Table A; Target 11964; HLA-B*07:02; BPIFA2; ENSG00000131050; CTA
VTVAGPIIGQ

SEQ ID NO: 11965 - protein, 10 aa, Homo sapiens
  misc_feature: Table A; Target 11965; HLA-B*27:02; BPIFA2; ENSG00000131050; CTA
VTVAGPIIGQ

SEQ ID NO: 11966 - protein, 10 aa, Homo sapiens
  misc_feature: Table A; Target 11966; HLA-B*57:01; BPIFA2; ENSG00000131050; CTA
VTVAGPIIGQ

SEQ ID NO: 11967 - protein, 10 aa, Homo sapiens
  misc_feature: Table A; Target 11967; HLA-C*04:01; BPIFA2; ENSG00000131050; CTA
VTVAGPIIGQ

SEQ ID NO: 11968 - protein, 10 aa, Homo sapiens
  misc_feature: Table A; Target 11968; HLA-C*06:02; BPIFA2; ENSG00000131050; CTA
VTVAGPIIGQ

SEQ ID NO: 11969 - protein, 10 aa, Homo sapiens
  misc_feature: Table A; Target 11969; HLA-C*07:01; BPIFA2; ENSG00000131050; CTA
VTVAGPIIGQ

SEQ ID NO: 11970 - protein, 10 aa, Homo sapiens
  misc_feature: Table A; Target 11970; HLA-C*07:02; BPIFA2; ENSG00000131050; CTA
VTVAGPIIGQ

SEQ ID NO: 11971 - protein, 10 aa, Homo sapiens
  misc_feature: Table A; Target 11971; HLA-C*12:03; BPIFA2; ENSG00000131050; CTA
VTVAGPIIGQ

SEQ ID NO: 11972 - protein, 11 aa, Homo sapiens
  misc_feature: Table A; Target 11972; HLA-A*02:03; BPIFA2; ENSG00000131050; CTA
VTVAGPIIGQI

SEQ ID NO: 11973 - protein, 11 aa, Homo sapiens
  misc_feature: Table A; Target 11973; HLA-A*26:01; BPIFA2; ENSG00000131050; CTA
VTVAGPIIGQI

SEQ ID NO: 11974 - protein, 11 aa, Homo sapiens
  misc_feature: Table A; Target 11974; HLA-A*68:02; BPIFA2; ENSG00000131050; CTA
VTVAGPIIGQI

SEQ ID NO: 11975 - protein, 11 aa, Homo sapiens
  misc_feature: Table A; Target 11975; HLA-C*06:02; BPIFA2; ENSG00000131050; CTA
VTVAGPIIGQI

SEQ ID NO: 11976 - protein, 8 aa, Homo sapiens
  misc_feature: Table A; Target 11976; HLA-C*05:01; BPIFA2; ENSG00000131050; CTA
VVDKLEPV

SEQ ID NO: 11977 - protein, 9 aa, Homo sapiens
  misc_feature: Table A; Target 11977; HLA-A*01:01; BPIFA2; ENSG00000131050; CTA
VVDKLEPVL

SEQ ID NO: 11978 - protein, 9 aa, Homo sapiens
  misc_feature: Table A; Target 11978; HLA-A*02:01; BPIFA2; ENSG00000131050; CTA
VVDKLEPVL

SEQ ID NO: 11979 - protein, 9 aa, Homo sapiens
  misc_feature: Table A; Target 11979; HLA-A*02:04; BPIFA2; ENSG00000131050; CTA
VVDKLEPVL

SEQ ID NO: 11980 - protein, 9 aa, Homo sapiens
  misc_feature: Table A; Target 11980; HLA-A*02:07; BPIFA2; ENSG00000131050; CTA
VVDKLEPVL

SEQ ID NO: 11981 - protein, 9 aa, Homo sapiens
  misc_feature: Table A; Target 11981; HLA-A*03:02; BPIFA2; ENSG00000131050; CTA
VVDKLEPVL

SEQ ID NO: 11982 - protein, 9 aa, Homo sapiens
  misc_feature: Table A; Target 11982; HLA-A*23:01; BPIFA2; ENSG00000131050; CTA
VVDKLEPVL

SEQ ID NO: 11983 - protein, 9 aa, Homo sapiens
  misc_feature: Table A; Target 11983; HLA-A*24:02; BPIFA2; ENSG00000131050; CTA
VVDKLEPVL

SEQ ID NO: 11984 - protein, 9 aa, Homo sapiens
  misc_feature: Table A; Target 11984; HLA-A*30:01; BPIFA2; ENSG00000131050; CTA
VVDKLEPVL

SEQ ID NO: 11985 - protein, 9 aa, Homo sapiens
  misc_feature: Table A; Target 11985; HLA-A*32:01; BPIFA2; ENSG00000131050; CTA
VVDKLEPVL

SEQ ID NO: 11986 - protein, 9 aa, Homo sapiens
  misc_feature: Table A; Target 11986; HLA-A*68:02; BPIFA2; ENSG00000131050; CTA
VVDKLEPVL

SEQ ID NO: 11987 - protein, 9 aa, Homo sapiens
  misc_feature: Table A; Target 11987; HLA-B*07:02; BPIFA2; ENSG00000131050; CTA
VVDKLEPVL

SEQ ID NO: 11988 - protein, 9 aa, Homo sapiens
  misc_feature: Table A; Target 11988; HLA-B*13:02; BPIFA2; ENSG00000131050; CTA
VVDKLEPVL

SEQ ID NO: 11989 - protein, 9 aa, Homo sapiens
  misc_feature: Table A; Target 11989; HLA-B*27:05; BPIFA2; ENSG00000131050; CTA
VVDKLEPVL

SEQ ID NO: 11990 - protein, 9 aa, Homo sapiens
  misc_feature: Table A; Target 11990; HLA-B*35:01; BPIFA2; ENSG00000131050; CTA
VVDKLEPVL

SEQ ID NO: 11991 - protein, 9 aa, Homo sapiens
  misc_feature: Table A; Target 11991; HLA-B*35:03; BPIFA2; ENSG00000131050; CTA
VVDKLEPVL

SEQ ID NO: 11992 - protein, 9 aa, Homo sapiens
  misc_feature: Table A; Target 11992; HLA-B*38:01; BPIFA2; ENSG00000131050; CTA
VVDKLEPVL

SEQ ID NO: 11993 - protein, 9 aa, Homo sapiens
  misc_feature: Table A; Target 11993; HLA-B*39:01; BPIFA2; ENSG00000131050; CTA
VVDKLEPVL

SEQ ID NO: 11994 - protein, 9 aa, Homo sapiens
  misc_feature: Table A; Target 11994; HLA-B*40:01; BPIFA2; ENSG00000131050; CTA
VVDKLEPVL

SEQ ID NO: 11995 - protein, 9 aa, Homo sapiens
  misc_feature: Table A; Target 11995; HLA-B*40:02; BPIFA2; ENSG00000131050; CTA
VVDKLEPVL

SEQ ID NO: 11996 - protein, 9 aa, Homo sapiens
  misc_feature: Table A; Target 11996; HLA-B*51:01; BPIFA2; ENSG00000131050; CTA
VVDKLEPVL

SEQ ID NO: 11997 - protein, 9 aa, Homo sapiens
  misc_feature: Table A; Target 11997; HLA-B*55:01; BPIFA2; ENSG00000131050; CTA
VVDKLEPVL

SEQ ID NO: 11998 - protein, 9 aa, Homo sapiens
  misc_feature: Table A; Target 11998; HLA-B*57:01; BPIFA2; ENSG00000131050; CTA
VVDKLEPVL

SEQ ID NO: 11999 - protein, 9 aa, Homo sapiens
  misc_feature: Table A; Target 11999; HLA-B*58:01; BPIFA2; ENSG00000131050; CTA
VVDKLEPVL

SEQ ID NO: 12000 - protein, 9 aa, Homo sapiens
  misc_feature: Table A; Target 12000; HLA-C*02:02; BPIFA2; ENSG00000131050; CTA
VVDKLEPVL

SEQ ID NO: 12001 - protein, 9 aa, Homo sapiens
  misc_feature: Table A; Target 12001; HLA-C*03:03; BPIFA2; ENSG00000131050; CTA
VVDKLEPVL

SEQ ID NO: 12002 - protein, 9 aa, Homo sapiens
  misc_feature: Table A; Target 12002; HLA-C*03:04; BPIFA2; ENSG00000131050; CTA
VVDKLEPVL

SEQ ID NO: 12003 - protein, 9 aa, Homo sapiens
  misc_feature: Table A; Target 12003; HLA-C*04:01; BPIFA2; ENSG00000131050; CTA
VVDKLEPVL

SEQ ID NO: 12004 - protein, 9 aa, Homo sapiens
  misc_feature: Table A; Target 12004; HLA-C*05:01; BPIFA2; ENSG00000131050; CTA
VVDKLEPVL

SEQ ID NO: 12005 - protein, 9 aa, Homo sapiens
  misc_feature: Table A; Target 12005; HLA-C*06:02; BPIFA2; ENSG00000131050; CTA
VVDKLEPVL

SEQ ID NO: 12006 - protein, 9 aa, Homo sapiens
  misc_feature: Table A; Target 12006; HLA-C*07:01; BPIFA2; ENSG00000131050; CTA
VVDKLEPVL

SEQ ID NO: 12007 - protein, 9 aa, Homo sapiens
  misc_feature: Table A; Target 12007; HLA-C*07:02; BPIFA2; ENSG00000131050; CTA
VVDKLEPVL

SEQ ID NO: 12008 - protein, 9 aa, Homo sapiens
  misc_feature: Table A; Target 12008; HLA-C*07:04; BPIFA2; ENSG00000131050; CTA
VVDKLEPVL

SEQ ID NO: 12009 - protein, 9 aa, Homo sapiens
  misc_feature: Table A; Target 12009; HLA-C*12:03; BPIFA2; ENSG00000131050; CTA
VVDKLEPVL

SEQ ID NO: 12010 - protein, 9 aa, Homo sapiens
  misc_feature: Table A; Target 12010; HLA-C*16:02; BPIFA2; ENSG00000131050; CTA
VVDKLEPVL

SEQ ID NO: 12011 - protein, 10 aa, Homo sapiens
  misc_feature: Table A; Target 12011; HLA-A*01:01; BPIFA2; ENSG00000131050; CTA
VVDKLEPVLH

SEQ ID NO: 12012 - protein, 8 aa, Homo sapiens
  misc_feature: Table A; Target 12012; HLA-A*01:01; BPIFA2; ENSG00000131050; CTA
VVDNPQHK

SEQ ID NO: 12013 - protein, 8 aa, Homo sapiens
  misc_feature: Table A; Target 12013; HLA-A*03:01; BPIFA2; ENSG00000131050; CTA
VVDNPQHK

SEQ ID NO: 12014 - protein, 8 aa, Homo sapiens
  misc_feature: Table A; Target 12014; HLA-A*03:02; BPIFA2; ENSG00000131050; CTA
VVDNPQHK

SEQ ID NO: 12015 - protein, 8 aa, Homo sapiens
  misc_feature: Table A; Target 12015; HLA-A*11:01; BPIFA2; ENSG00000131050; CTA
VVDNPQHK

SEQ ID NO: 12016 - protein, 8 aa, Homo sapiens
  misc_feature: Table A; Target 12016; HLA-C*04:01; BPIFA2; ENSG00000131050; CTA
VVDNPQHK

SEQ ID NO: 12017 - protein, 8 aa, Homo sapiens
  misc_feature: Table A; Target 12017; HLA-C*05:01; BPIFA2; ENSG00000131050; CTA
VVDNPQHK

SEQ ID NO: 12018 - protein, 9 aa, Homo sapiens
  misc_feature: Table A; Target 12018; HLA-A*01:01; BPIFA2; ENSG00000131050; CTA
VVDNPQHKT

SEQ ID NO: 12019 - protein, 9 aa, Homo sapiens
  misc_feature: Table A; Target 12019; HLA-A*02:07; BPIFA2; ENSG00000131050; CTA
VVDNPQHKT

SEQ ID NO: 12020 - protein, 9 aa, Homo sapiens
  misc_feature: Table A; Target 12020; HLA-A*03:02; BPIFA2; ENSG00000131050; CTA
VVDNPQHKT

SEQ ID NO: 12021 - protein, 9 aa, Homo sapiens
  misc_feature: Table A; Target 12021; HLA-A*32:01; BPIFA2; ENSG00000131050; CTA
VVDNPQHKT

SEQ ID NO: 12022 - protein, 9 aa, Homo sapiens
  misc_feature: Table A; Target 12022; HLA-B*27:05; BPIFA2; ENSG00000131050; CTA
VVDNPQHKT

SEQ ID NO: 12023 - protein, 9 aa, Homo sapiens
  misc_feature: Table A; Target 12023; HLA-B*38:01; BPIFA2; ENSG00000131050; CTA
VVDNPQHKT

SEQ ID NO: 12024 - protein, 9 aa, Homo sapiens
  misc_feature: Table A; Target 12024; HLA-B*55:01; BPIFA2; ENSG00000131050; CTA
VVDNPQHKT

SEQ ID NO: 12025 - protein, 9 aa, Homo sapiens
  misc_feature: Table A; Target 12025; HLA-B*58:01; BPIFA2; ENSG00000131050; CTA
VVDNPQHKT

SEQ ID NO: 12026 - protein, 9 aa, Homo sapiens
  misc_feature: Table A; Target 12026; HLA-C*05:01; BPIFA2; ENSG00000131050; CTA
VVDNPQHKT

SEQ ID NO: 12027 - protein, 9 aa, Homo sapiens
  misc_feature: Table A; Target 12027; HLA-C*06:02; BPIFA2; ENSG00000131050; CTA
VVDNPQHKT

SEQ ID NO: 12028 - protein, 9 aa, Homo sapiens
  misc_feature: Table A; Target 12028; HLA-C*16:02; BPIFA2; ENSG00000131050; CTA
VVDNPQHKT

SEQ ID NO: 12029 - protein, 10 aa, Homo sapiens
  misc_feature: Table A; Target 12029; HLA-C*12:03; BPIFA2; ENSG00000131050; CTA
VVDNPQHKTQ

SEQ ID NO: 12030 - protein, 10 aa, Homo sapiens
  misc_feature: Table A; Target 12030; HLA-C*16:02; BPIFA2; ENSG00000131050; CTA
VVDNPQHKTQ

SEQ ID NO: 12031 - protein, 11 aa, Homo sapiens
  misc_feature: Table A; Target 12031; HLA-A*01:01; BPIFA2; ENSG00000131050; CTA
VVDNPQHKTQL

SEQ ID NO: 12032 - protein, 11 aa, Homo sapiens
  misc_feature: Table A; Target 12032; HLA-A*02:01; BPIFA2; ENSG00000131050; CTA
VVDNPQHKTQL

SEQ ID NO: 12033 - protein, 11 aa, Homo sapiens
  misc_feature: Table A; Target 12033; HLA-A*02:07; BPIFA2; ENSG00000131050; CTA
VVDNPQHKTQL

SEQ ID NO: 12034 - protein, 11 aa, Homo sapiens
  misc_feature: Table A; Target 12034; HLA-A*03:01; BPIFA2; ENSG00000131050; CTA
VVDNPQHKTQL

SEQ ID NO: 12035 - protein, 11 aa, Homo sapiens
  misc_feature: Table A; Target 12035; HLA-A*23:01; BPIFA2; ENSG00000131050; CTA
VVDNPQHKTQL

SEQ ID NO: 12036 - protein, 11 aa, Homo sapiens
  misc_feature: Table A; Target 12036; HLA-A*24:02; BPIFA2; ENSG00000131050; CTA
VVDNPQHKTQL

SEQ ID NO: 12037 - protein, 11 aa, Homo sapiens
  misc_feature: Table A; Target 12037; HLA-A*31:01; BPIFA2; ENSG00000131050; CTA
VVDNPQHKTQL

SEQ ID NO: 12038 - protein, 11 aa, Homo sapiens
  misc_feature: Table A; Target 12038; HLA-A*32:01; BPIFA2; ENSG00000131050; CTA
VVDNPQHKTQL

SEQ ID NO: 12039 - protein, 11 aa, Homo sapiens
  misc_feature: Table A; Target 12039; HLA-A*68:02; BPIFA2; ENSG00000131050; CTA
VVDNPQHKTQL

SEQ ID NO: 12040 - protein, 11 aa, Homo sapiens
  misc_feature: Table A; Target 12040; HLA-B*27:05; BPIFA2; ENSG00000131050; CTA
VVDNPQHKTQL

SEQ ID NO: 12041 - protein, 11 aa, Homo sapiens
  misc_feature: Table A; Target 12041; HLA-B*35:03; BPIFA2; ENSG00000131050; CTA
VVDNPQHKTQL

SEQ ID NO: 12042 - protein, 11 aa, Homo sapiens
  misc_feature: Table A; Target 12042; HLA-B*38:01; BPIFA2; ENSG00000131050; CTA
VVDNPQHKTQL

SEQ ID NO: 12043 - protein, 11 aa, Homo sapiens
  misc_feature: Table A; Target 12043; HLA-B*55:01; BPIFA2; ENSG00000131050; CTA
VVDNPQHKTQL

SEQ ID NO: 12044 - protein, 11 aa, Homo sapiens
  misc_feature: Table A; Target 12044; HLA-C*03:04; BPIFA2; ENSG00000131050; CTA
VVDNPQHKTQL

SEQ ID NO: 12045 - protein, 11 aa, Homo sapiens
  misc_feature: Table A; Target 12045; HLA-C*04:01; BPIFA2; ENSG00000131050; CTA
VVDNPQHKTQL

SEQ ID NO: 12046 - protein, 11 aa, Homo sapiens
  misc_feature: Table A; Target 12046; HLA-C*05:01; BPIFA2; ENSG00000131050; CTA
VVDNPQHKTQL

SEQ ID NO: 12047 - protein, 11 aa, Homo sapiens
  misc_feature: Table A; Target 12047; HLA-C*07:04; BPIFA2; ENSG00000131050; CTA
VVDNPQHKTQL

SEQ ID NO: 12048 - protein, 11 aa, Homo sapiens
  misc_feature: Table A; Target 12048; HLA-C*12:03; BPIFA2; ENSG00000131050; CTA
VVDNPQHKTQL

SEQ ID NO: 12049 - protein, 11 aa, Homo sapiens
  misc_feature: Table A; Target 12049; HLA-C*16:02; BPIFA2; ENSG00000131050; CTA
VVDNPQHKTQL

SEQ ID NO: 12050 - protein, 10 aa, Homo sapiens
  misc_feature: Table A; Target 12050; HLA-A*11:01; BSND; ENSG00000162399; TAA
AAYDQSLPDF

SEQ ID NO: 12051 - protein, 10 aa, Homo sapiens
  misc_feature: Table A; Target 12051; HLA-A*23:01; BSND; ENSG00000162399; TAA
AAYDQSLPDF

SEQ ID NO: 12052 - protein, 10 aa, Homo sapiens
  misc_feature: Table A; Target 12052; HLA-A*25:01; BSND; ENSG00000162399; TAA
AAYDQSLPDF

SEQ ID NO: 12053 - protein, 10 aa, Homo sapiens
  misc_feature: Table A; Target 12053; HLA-A*26:01; BSND; ENSG00000162399; TAA
AAYDQSLPDF

SEQ ID NO: 12054 - protein, 10 aa, Homo sapiens
  misc_feature: Table A; Target 12054; HLA-A*30:02; BSND; ENSG00000162399; TAA
AAYDQSLPDF

SEQ ID NO: 12055 - protein, 10 aa, Homo sapiens
  misc_feature: Table A; Target 12055; HLA-B*46:01; BSND; ENSG00000162399; TAA
AAYDQSLPDF

SEQ ID NO: 12056 - protein, 10 aa, Homo sapiens
  misc_feature: Table A; Target 12056; HLA-B*58:01; BSND; ENSG00000162399; TAA
AAYDQSLPDF

SEQ ID NO: 12057 - protein, 10 aa, Homo sapiens
  misc_feature: Table A; Target 12057; HLA-C*02:02; BSND; ENSG00000162399; TAA
AAYDQSLPDF

SEQ ID NO: 12058 - protein, 10 aa, Homo sapiens
  misc_feature: Table A; Target 12058; HLA-C*16:04; BSND; ENSG00000162399; TAA
AAYDQSLPDF

SEQ ID NO: 12059 - protein, 9 aa, Homo sapiens
  misc_feature: Table A; Target 12059; HLA-C*01:02; BSND; ENSG00000162399; TAA
ACPQGPAPL

SEQ ID NO: 12060 - protein, 8 aa, Homo sapiens
  misc_feature: Table A; Target 12060; HLA-B*37:01; BSND; ENSG00000162399; TAA
ADEKTFRI

SEQ ID NO: 12061 - protein, 8 aa, Homo sapiens
  misc_feature: Table A; Target 12061; HLA-B*37:01; BSND; ENSG00000162399; TAA
ADSDFQGI

SEQ ID NO: 12062 - protein, 9 aa, Homo sapiens
  misc_feature: Table A; Target 12062; HLA-B*37:01; BSND; ENSG00000162399; TAA
ADSDFQGIL

SEQ ID NO: 12063 - protein, 9 aa, Homo sapiens
  misc_feature: Table A; Target 12063; HLA-B*40:01; BSND; ENSG00000162399; TAA
ADSDFQGIL

SEQ ID NO: 12064 - protein, 8 aa, Homo sapiens
  misc_feature: Table A; Target 12064; HLA-B*40:02; BSND; ENSG00000162399; TAA
AEMKSPSP

SEQ ID NO: 12065 - protein, 8 aa, Homo sapiens
  misc_feature: Table A; Target 12065; HLA-B*49:01; BSND; ENSG00000162399; TAA
AEMKSPSP

SEQ ID NO: 12066 - protein, 10 aa, Homo sapiens
  misc_feature: Table A; Target 12066; HLA-B*49:01; BSND; ENSG00000162399; TAA
AEMKSPSPQP

SEQ ID NO: 12067 - protein, 9 aa, Homo sapiens
  misc_feature: Table A; Target 12067; HLA-A*03:01; BSND; ENSG00000162399; TAA
ALGTFLMSH

SEQ ID NO: 12068 - protein, 9 aa, Homo sapiens
  misc_feature: Table A; Target 12068; HLA-A*03:02; BSND; ENSG00000162399; TAA
ALGTFLMSH

SEQ ID NO: 12069 - protein, 8 aa, Homo sapiens
  misc_feature: Table A; Target 12069; HLA-A*02:01; BSND; ENSG00000162399; TAA
ALIDAPTL

SEQ ID NO: 12070 - protein, 8 aa, Homo sapiens
  misc_feature: Table A; Target 12070; HLA-A*02:03; BSND; ENSG00000162399; TAA
ALIDAPTL

SEQ ID NO: 12071 - protein, 8 aa, Homo sapiens
  misc_feature: Table A; Target 12071; HLA-A*02:04; BSND; ENSG00000162399; TAA
ALIDAPTL

SEQ ID NO: 12072 - protein, 8 aa, Homo sapiens
  misc_feature: Table A; Target 12072; HLA-A*02:07; BSND; ENSG00000162399; TAA
ALIDAPTL

SEQ ID NO: 12073 - protein, 8 aa, Homo sapiens
  misc_feature: Table A; Target 12073; HLA-A*23:01; BSND; ENSG00000162399; TAA
ALIDAPTL

SEQ ID NO: 12074 - protein, 8 aa, Homo sapiens
  misc_feature: Table A; Target 12074; HLA-A*30:01; BSND; ENSG00000162399; TAA
ALIDAPTL

SEQ ID NO: 12075 - protein, 8 aa, Homo sapiens
  misc_feature: Table A; Target 12075; HLA-A*32:01; BSND; ENSG00000162399; TAA
ALIDAPTL

SEQ ID NO: 12076 - protein, 8 aa, Homo sapiens
  misc_feature: Table A; Target 12076; HLA-B*13:02; BSND; ENSG00000162399; TAA
ALIDAPTL

SEQ ID NO: 12077 - protein, 8 aa, Homo sapiens
  misc_feature: Table A; Target 12077; HLA-B*15:01; BSND; ENSG00000162399; TAA
ALIDAPTL

SEQ ID NO: 12078 - protein, 8 aa, Homo sapiens
  misc_feature: Table A; Target 12078; HLA-B*27:05; BSND; ENSG00000162399; TAA
ALIDAPTL

SEQ ID NO: 12079 - protein, 8 aa, Homo sapiens
  misc_feature: Table A; Target 12079; HLA-B*37:01; BSND; ENSG00000162399; TAA
ALIDAPTL

SEQ ID NO: 12080 - protein, 8 aa, Homo sapiens
  misc_feature: Table A; Target 12080; HLA-B*39:01; BSND; ENSG00000162399; TAA
ALIDAPTL

SEQ ID NO: 12081 - protein, 8 aa, Homo sapiens
  misc_feature: Table A; Target 12081; HLA-B*40:01; BSND; ENSG00000162399; TAA
ALIDAPTL

SEQ ID NO: 12082 - protein, 8 aa, Homo sapiens
  misc_feature: Table A; Target 12082; HLA-B*40:02; BSND; ENSG00000162399; TAA
ALIDAPTL

SEQ ID NO: 12083 - protein, 8 aa, Homo sapiens
  misc_feature: Table A; Target 12083; HLA-B*46:01; BSND; ENSG00000162399; TAA
ALIDAPTL

SEQ ID NO: 12084 - protein, 8 aa, Homo sapiens
  misc_feature: Table A; Target 12084; HLA-B*55:01; BSND; ENSG00000162399; TAA
ALIDAPTL

SEQ ID NO: 12085 - protein, 8 aa, Homo sapiens
  misc_feature: Table A; Target 12085; HLA-B*58:01; BSND; ENSG00000162399; TAA
ALIDAPTL

SEQ ID NO: 12086 - protein, 8 aa, Homo sapiens
  misc_feature: Table A; Target 12086; HLA-C*01:02; BSND; ENSG00000162399; TAA
ALIDAPTL

SEQ ID NO: 12087 - protein, 8 aa, Homo sapiens
  misc_feature: Table A; Target 12087; HLA-C*02:02; BSND; ENSG00000162399; TAA
ALIDAPTL

SEQ ID NO: 12088 - protein, 8 aa, Homo sapiens
  misc_feature: Table A; Target 12088; HLA-C*03:03; BSND; ENSG00000162399; TAA
ALIDAPTL

SEQ ID NO: 12089 - protein, 8 aa, Homo sapiens
  misc_feature: Table A; Target 12089; HLA-C*03:04; BSND; ENSG00000162399; TAA
ALIDAPTL

SEQ ID NO: 12090 - protein, 8 aa, Homo sapiens
  misc_feature: Table A; Target 12090; HLA-C*14:02; BSND; ENSG00000162399; TAA
ALIDAPTL

SEQ ID NO: 12091 - protein, 8 aa, Homo sapiens
  misc_feature: Table A; Target 12091; HLA-C*16:02; BSND; ENSG00000162399; TAA
ALIDAPTL

SEQ ID NO: 12092 - protein, 9 aa, Homo sapiens
  misc_feature: Table A; Target 12092; HLA-A*29:02; BSND; ENSG00000162399; TAA
ALPNNWQRY

SEQ ID NO: 12093 - protein, 8 aa, Homo sapiens
  misc_feature: Table A; Target 12093; HLA-A*02:01; BSND; ENSG00000162399; TAA
AMGSVMVI

SEQ ID NO: 12094 - protein, 8 aa, Homo sapiens
  misc_feature: Table A; Target 12094; HLA-A*02:03; BSND; ENSG00000162399; TAA
AMGSVMVI

SEQ ID NO: 12095 - protein, 8 aa, Homo sapiens
  misc_feature: Table A; Target 12095; HLA-A*30:01; BSND; ENSG00000162399; TAA
AMGSVMVI

SEQ ID NO: 12096 - protein, 8 aa, Homo sapiens
  misc_feature: Table A; Target 12096; HLA-A*32:01; BSND; ENSG00000162399; TAA
AMGSVMVI

SEQ ID NO: 12097 - protein, 8 aa, Homo sapiens
  misc_feature: Table A; Target 12097; HLA-B*13:02; BSND; ENSG00000162399; TAA
AMGSVMVI

SEQ ID NO: 12098 - protein, 8 aa, Homo sapiens
  misc_feature: Table A; Target 12098; HLA-C*07:01; BSND; ENSG00000162399; TAA
AMGSVMVI

SEQ ID NO: 12099 - protein, 8 aa, Homo sapiens
  misc_feature: Table A; Target 12099; HLA-C*07:04; BSND; ENSG00000162399; TAA
AMGSVMVI

SEQ ID NO: 12100 - protein, 8 aa, Homo sapiens
  misc_feature: Table A; Target 12100; HLA-C*12:03; BSND; ENSG00000162399; TAA
AMGSVMVI

SEQ ID NO: 12101 - protein, 9 aa, Homo sapiens
  misc_feature: Table A; Target 12101; HLA-B*07:02; BSND; ENSG00000162399; TAA
APEMGQPKL

SEQ ID NO: 12102 - protein, 9 aa, Homo sapiens
  misc_feature: Table A; Target 12102; HLA-B*35:01; BSND; ENSG00000162399; TAA
APEMGQPKL

SEQ ID NO: 12103 - protein, 9 aa, Homo sapiens
  misc_feature: Table A; Target 12103; HLA-B*35:03; BSND; ENSG00000162399; TAA
APEMGQPKL

SEQ ID NO: 12104 - protein, 9 aa, Homo sapiens
  misc_feature: Table A; Target 12104; HLA-B*38:01; BSND; ENSG00000162399; TAA
APEMGQPKL

SEQ ID NO: 12105 - protein, 9 aa, Homo sapiens
  misc_feature: Table A; Target 12105; HLA-B*39:01; BSND; ENSG00000162399; TAA
APEMGQPKL

SEQ ID NO: 12106 - protein, 9 aa, Homo sapiens
  misc_feature: Table A; Target 12106; HLA-B*40:01; BSND; ENSG00000162399; TAA
APEMGQPKL

SEQ ID NO: 12107 - protein, 9 aa, Homo sapiens
  misc_feature: Table A; Target 12107; HLA-B*55:01; BSND; ENSG00000162399; TAA
APEMGQPKL

SEQ ID NO: 12108 - protein, 9 aa, Homo sapiens
  misc_feature: Table A; Target 12108; HLA-C*07:02; BSND; ENSG00000162399; TAA
APEMGQPKL

SEQ ID NO: 12109 - protein, 9 aa, Homo sapiens
  misc_feature: Table A; Target 12109; HLA-C*05:01; BSND; ENSG00000162399; TAA
ASDTGGEEP

SEQ ID NO: 12110 - protein, 11 aa, Homo sapiens
  misc_feature: Table A; Target 12110; HLA-A*01:01; BSND; ENSG00000162399; TAA
ASDTGGEEPEK

SEQ ID NO: 12111 - protein, 9 aa, Homo sapiens
  misc_feature: Table A; Target 12111; HLA-A*23:01; BSND; ENSG00000162399; TAA
AWMEAAVVI

SEQ ID NO: 12112 - protein, 9 aa, Homo sapiens
  misc_feature: Table A; Target 12112; HLA-A*24:02; BSND; ENSG00000162399; TAA
AWMEAAVVI

SEQ ID NO: 12113 - protein, 9 aa, Homo sapiens
  misc_feature: Table A; Target 12113; HLA-A*23:01; BSND; ENSG00000162399; TAA
AYDQSLPDF

SEQ ID NO: 12114 - protein, 9 aa, Homo sapiens
  misc_feature: Table A; Target 12114; HLA-A*24:02; BSND; ENSG00000162399; TAA
AYDQSLPDF

SEQ ID NO: 12115 - protein, 9 aa, Homo sapiens
  misc_feature: Table A; Target 12115; HLA-A*32:01; BSND; ENSG00000162399; TAA
AYDQSLPDF

SEQ ID NO: 12116 - protein, 9 aa, Homo sapiens
  misc_feature: Table A; Target 12116; HLA-B*35:01; BSND; ENSG00000162399; TAA
AYDQSLPDF

SEQ ID NO: 12117 - protein, 9 aa, Homo sapiens
  misc_feature: Table A; Target 12117; HLA-B*35:03; BSND; ENSG00000162399; TAA
AYDQSLPDF

SEQ ID NO: 12118 - protein, 9 aa, Homo sapiens
  misc_feature: Table A; Target 12118; HLA-B*55:01; BSND; ENSG00000162399; TAA
AYDQSLPDF

SEQ ID NO: 12119 - protein, 9 aa, Homo sapiens
  misc_feature: Table A; Target 12119; HLA-C*04:01; BSND; ENSG00000162399; TAA
AYDQSLPDF

SEQ ID NO: 12120 - protein, 9 aa, Homo sapiens
  misc_feature: Table A; Target 12120; HLA-C*05:01; BSND; ENSG00000162399; TAA
AYDQSLPDF

SEQ ID NO: 12121 - protein, 9 aa, Homo sapiens
  misc_feature: Table A; Target 12121; HLA-C*07:04; BSND; ENSG00000162399; TAA
AYDQSLPDF

SEQ ID NO: 12122 - protein, 9 aa, Homo sapiens
  misc_feature: Table A; Target 12122; HLA-C*14:02; BSND; ENSG00000162399; TAA
AYDQSLPDF

SEQ ID NO: 12123 - protein, 9 aa, Homo sapiens
  misc_feature: Table A; Target 12123; HLA-B*07:02; BSND; ENSG00000162399; TAA
CPLDRFQDF

SEQ ID NO: 12124 - protein, 9 aa, Homo sapiens
  misc_feature: Table A; Target 12124; HLA-B*54:01; BSND; ENSG00000162399; TAA
CPQGPAPLA

SEQ ID NO: 12125 - protein, 9 aa, Homo sapiens
  misc_feature: Table A; Target 12125; HLA-B*55:01; BSND; ENSG00000162399; TAA
CPQGPAPLA

SEQ ID NO: 12126 - protein, 9 aa, Homo sapiens
  misc_feature: Table A; Target 12126; HLA-B*56:01; BSND; ENSG00000162399; TAA
CPQGPAPLA

SEQ ID NO: 12127 - protein, 9 aa, Homo sapiens
  misc_feature: Table A; Target 12127; HLA-B*18:01; BSND; ENSG00000162399; TAA
DEKTFRIGF

SEQ ID NO: 12128 - protein, 9 aa, Homo sapiens
  misc_feature: Table A; Target 12128; HLA-B*44:02; BSND; ENSG00000162399; TAA
DEKTFRIGF

SEQ ID NO: 12129 - protein, 9 aa, Homo sapiens
  misc_feature: Table A; Target 12129; HLA-B*44:03; BSND; ENSG00000162399; TAA
DEKTFRIGF

SEQ ID NO: 12130 - protein, 9 aa, Homo sapiens
  misc_feature: Table A; Target 12130; HLA-A*25:01; BSND; ENSG00000162399; TAA
DEPQEGQQW

SEQ ID NO: 12131 - protein, 9 aa, Homo sapiens
  misc_feature: Table A; Target 12131; HLA-B*18:01; BSND; ENSG00000162399; TAA
DEPQEGQQW

SEQ ID NO: 12132 - protein, 9 aa, Homo sapiens
  misc_feature: Table A; Target 12132; HLA-B*44:02; BSND; ENSG00000162399; TAA
DEPQEGQQW

SEQ ID NO: 12133 - protein, 9 aa, Homo sapiens
  misc_feature: Table A; Target 12133; HLA-B*44:03; BSND; ENSG00000162399; TAA
DEPQEGQQW

SEQ ID NO: 12134 - protein, 9 aa, Homo sapiens
  misc_feature: Table A; Target 12134; HLA-C*16:04; BSND; ENSG00000162399; TAA
DEPQEGQQW

SEQ ID NO: 12135 - protein, 9 aa, Homo sapiens
  misc_feature: Table A; Target 12135; HLA-B*18:01; BSND; ENSG00000162399; TAA
DESEGERRL

SEQ ID NO: 12136 - protein, 9 aa, Homo sapiens
  misc_feature: Table A; Target 12136; HLA-B*38:01; BSND; ENSG00000162399; TAA
DESEGERRL

SEQ ID NO: 12137 - protein, 9 aa, Homo sapiens
  misc_feature: Table A; Target 12137; HLA-B*40:01; BSND; ENSG00000162399; TAA
DESEGERRL

SEQ ID NO: 12138 - protein, 9 aa, Homo sapiens
  misc_feature: Table A; Target 12138; HLA-B*44:02; BSND; ENSG00000162399; TAA
DESEGERRL

SEQ ID NO: 12139 - protein, 9 aa, Homo sapiens
  misc_feature: Table A; Target 12139; HLA-B*44:03; BSND; ENSG00000162399; TAA
DESEGERRL

SEQ ID NO: 12140 - protein, 9 aa, Homo sapiens
  misc_feature: Table A; Target 12140; HLA-A*33:01; BSND; ENSG00000162399; TAA
DFQGILSPK

SEQ ID NO: 12141 - protein, 9 aa, Homo sapiens
  misc_feature: Table A; Target 12141; HLA-A*33:03; BSND; ENSG00000162399; TAA
DFQGILSPK

SEQ ID NO: 12142 - protein, 9 aa, Homo sapiens
  misc_feature: Table A; Target 12142; HLA-A*68:01; BSND; ENSG00000162399; TAA
DFQGILSPK

SEQ ID NO: 12143 - protein, 9 aa, Homo sapiens
  misc_feature: Table A; Target 12143; HLA-B*27:02; BSND; ENSG00000162399; TAA
DFQGILSPK

SEQ ID NO: 12144 - protein, 9 aa, Homo sapiens
  misc_feature: Table A; Target 12144; HLA-C*07:06; BSND; ENSG00000162399; TAA
DFQGILSPK

SEQ ID NO: 12145 - protein, 9 aa, Homo sapiens
  misc_feature: Table A; Target 12145; HLA-A*68:02; BSND; ENSG00000162399; TAA
DFSHIQMKV

SEQ ID NO: 12146 - protein, 10 aa, Homo sapiens
  misc_feature: Table A; Target 12146; HLA-A*25:01; BSND; ENSG00000162399; TAA
DLLPDKELGF

SEQ ID NO: 12147 - protein, 10 aa, Homo sapiens
  misc_feature: Table A; Target 12147; HLA-B*38:01; BSND; ENSG00000162399; TAA
DQSLPDFSHI

SEQ ID NO: 12148 - protein, 9 aa, Homo sapiens
  misc_feature: Table A; Target 12148; HLA-A*25:01; BSND; ENSG00000162399; TAA
DRPQVYGTF

SEQ ID NO: 12149 - protein, 10 aa, Homo sapiens
  misc_feature: Table A; Target 12149; HLA-B*27:02; BSND; ENSG00000162399; TAA
DRPQVYGTFY

SEQ ID NO: 12150 - protein, 10 aa, Homo sapiens
  misc_feature: Table A; Target 12150; HLA-C*07:01; BSND; ENSG00000162399; TAA
DRPQVYGTFY

SEQ ID NO: 12151 - protein, 8 aa, Homo sapiens
  misc_feature: Table A; Target 12151; HLA-C*05:01; BSND; ENSG00000162399; TAA
DSDFQGIL

SEQ ID NO: 12152 - protein, 9 aa, Homo sapiens
  misc_feature: Table A; Target 12152; HLA-A*01:01; BSND; ENSG00000162399; TAA
DSDFQGILS

SEQ ID NO: 12153 - protein, 11 aa, Homo sapiens
  misc_feature: Table A; Target 12153; HLA-A*01:01; BSND; ENSG00000162399; TAA
DSDFQGILSPK

SEQ ID NO: 12154 - protein, 11 aa, Homo sapiens
  misc_feature: Table A; Target 12154; HLA-A*03:02; BSND; ENSG00000162399; TAA
DSDFQGILSPK

SEQ ID NO: 12155 - protein, 11 aa, Homo sapiens
  misc_feature: Table A; Target 12155; HLA-A*11:01; BSND; ENSG00000162399; TAA
DSDFQGILSPK

SEQ ID NO: 12156 - protein, 11 aa, Homo sapiens
  misc_feature: Table A; Target 12156; HLA-A*33:01; BSND; ENSG00000162399; TAA
DSDFQGILSPK

SEQ ID NO: 12157 - protein, 11 aa, Homo sapiens
  misc_feature: Table A; Target 12157; HLA-A*68:01; BSND; ENSG00000162399; TAA
DSDFQGILSPK

SEQ ID NO: 12158 - protein, 11 aa, Homo sapiens
  misc_feature: Table A; Target 12158; HLA-B*27:02; BSND; ENSG00000162399; TAA
DSDFQGILSPK

SEQ ID NO: 12159 - protein, 8 aa, Homo sapiens
  misc_feature: Table A; Target 12159; HLA-A*03:01; BSND; ENSG00000162399; TAA
EAAVVIHK

SEQ ID NO: 12160 - protein, 8 aa, Homo sapiens
  misc_feature: Table A; Target 12160; HLA-A*03:02; BSND; ENSG00000162399; TAA
EAAVVIHK

SEQ ID NO: 12161 - protein, 8 aa, Homo sapiens
  misc_feature: Table A; Target 12161; HLA-A*11:01; BSND; ENSG00000162399; TAA
EAAVVIHK

SEQ ID NO: 12162 - protein, 8 aa, Homo sapiens
  misc_feature: Table A; Target 12162; HLA-A*33:01; BSND; ENSG00000162399; TAA
EAAVVIHK

SEQ ID NO: 12163 - protein, 8 aa, Homo sapiens
  misc_feature: Table A; Target 12163; HLA-A*33:03; BSND; ENSG00000162399; TAA
EAAVVIHK

SEQ ID NO: 12164 - protein, 8 aa, Homo sapiens
  misc_feature: Table A; Target 12164; HLA-A*68:01; BSND; ENSG00000162399; TAA
EAAVVIHK

SEQ ID NO: 12165 - protein, 8 aa, Homo sapiens
  misc_feature: Table A; Target 12165; HLA-B*27:02; BSND; ENSG00000162399; TAA
EAAVVIHK

SEQ ID NO: 12166 - protein, 8 aa, Homo sapiens
  misc_feature: Table A; Target 12166; HLA-B*51:01; BSND; ENSG00000162399; TAA
EAAVVIHK

SEQ ID NO: 12167 - protein, 8 aa, Homo sapiens
  misc_feature: Table A; Target 12167; HLA-C*07:01; BSND; ENSG00000162399; TAA
EAAVVIHK

SEQ ID NO: 12168 - protein, 8 aa, Homo sapiens
  misc_feature: Table A; Target 12168; HLA-C*07:06; BSND; ENSG00000162399; TAA
EAAVVIHK

SEQ ID NO: 12169 - protein, 9 aa, Homo sapiens
  misc_feature: Table A; Target 12169; HLA-A*26:01; BSND; ENSG00000162399; TAA
EAAVVIHKG

SEQ ID NO: 12170 - protein, 9 aa, Homo sapiens
  misc_feature: Table A; Target 12170; HLA-A*33:01; BSND; ENSG00000162399; TAA
EAAVVIHKG

SEQ ID NO: 12171 - protein, 9 aa, Homo sapiens
  misc_feature: Table A; Target 12171; HLA-A*33:03; BSND; ENSG00000162399; TAA
EAAVVIHKG

SEQ ID NO: 12172 - protein, 9 aa, Homo sapiens
  misc_feature: Table A; Target 12172; HLA-A*68:01; BSND; ENSG00000162399; TAA
EAAVVIHKG

SEQ ID NO: 12173 - protein, 9 aa, Homo sapiens
  misc_feature: Table A; Target 12173; HLA-A*68:02; BSND; ENSG00000162399; TAA
EAAVVIHKG

SEQ ID NO: 12174 - protein, 9 aa, Homo sapiens
  misc_feature: Table A; Target 12174; HLA-B*51:01; BSND; ENSG00000162399; TAA
EAAVVIHKG

SEQ ID NO: 12175 - protein, 8 aa, Homo sapiens
  misc_feature: Table A; Target 12175; HLA-B*35:03; BSND; ENSG00000162399; TAA
EAAYDQSL

SEQ ID NO: 12176 - protein, 11 aa, Homo sapiens
  misc_feature: Table A; Target 12176; HLA-A*26:01; BSND; ENSG00000162399; TAA
EAAYDQSLPDF

SEQ ID NO: 12177 - protein, 10 aa, Homo sapiens
  misc_feature: Table A; Target 12177; HLA-B*27:02; BSND; ENSG00000162399; TAA
EDEPQEGQQW

SEQ ID NO: 12178 - protein, 10 aa, Homo sapiens
  misc_feature: Table A; Target 12178; HLA-B*44:02; BSND; ENSG00000162399; TAA
EDEPQEGQQW

SEQ ID NO: 12179 - protein, 10 aa, Homo sapiens
  misc_feature: Table A; Target 12179; HLA-B*44:03; BSND; ENSG00000162399; TAA
EDEPQEGQQW

SEQ ID NO: 12180 - protein, 9 aa, Homo sapiens
  misc_feature: Table A; Target 12180; HLA-A*25:01; BSND; ENSG00000162399; TAA
EEAAYDQSL

SEQ ID NO: 12181 - protein, 9 aa, Homo sapiens
  misc_feature: Table A; Target 12181; HLA-A*30:01; BSND; ENSG00000162399; TAA
EEAAYDQSL

SEQ ID NO: 12182 - protein, 9 aa, Homo sapiens
  misc_feature: Table A; Target 12182; HLA-B*18:01; BSND; ENSG00000162399; TAA
EEAAYDQSL

SEQ ID NO: 12183 - protein, 9 aa, Homo sapiens
  misc_feature: Table A; Target 12183; HLA-B*35:03; BSND; ENSG00000162399; TAA
EEAAYDQSL

SEQ ID NO: 12184 - protein, 9 aa, Homo sapiens
  misc_feature: Table A; Target 12184; HLA-B*38:01; BSND; ENSG00000162399; TAA
EEAAYDQSL

SEQ ID NO: 12185 - protein, 9 aa, Homo sapiens
  misc_feature: Table A; Target 12185; HLA-B*39:01; BSND; ENSG00000162399; TAA
EEAAYDQSL

SEQ ID NO: 12186 - protein, 9 aa, Homo sapiens
  misc_feature: Table A; Target 12186; HLA-B*40:01; BSND; ENSG00000162399; TAA
EEAAYDQSL

SEQ ID NO: 12187 - protein, 9 aa, Homo sapiens
  misc_feature: Table A; Target 12187; HLA-B*40:02; BSND; ENSG00000162399; TAA
EEAAYDQSL

SEQ ID NO: 12188 - protein, 9 aa, Homo sapiens
  misc_feature: Table A; Target 12188; HLA-B*44:02; BSND; ENSG00000162399; TAA
EEAAYDQSL

SEQ ID NO: 12189 - protein, 9 aa, Homo sapiens
  misc_feature: Table A; Target 12189; HLA-B*44:03; BSND; ENSG00000162399; TAA
EEAAYDQSL

SEQ ID NO: 12190 - protein, 9 aa, Homo sapiens
  misc_feature: Table A; Target 12190; HLA-B*49:01; BSND; ENSG00000162399; TAA
EEAAYDQSL

SEQ ID NO: 12191 - protein, 9 aa, Homo sapiens
  misc_feature: Table A; Target 12191; HLA-C*16:04; BSND; ENSG00000162399; TAA
EEAAYDQSL

SEQ ID NO: 12192 - protein, 8 aa, Homo sapiens
  misc_feature: Table A; Target 12192; HLA-B*18:01; BSND; ENSG00000162399; TAA
EEDLYYGL

SEQ ID NO: 12193 - protein, 9 aa, Homo sapiens
  misc_feature: Table A; Target 12193; HLA-B*18:01; BSND; ENSG00000162399; TAA
EEEDLYYGL

SEQ ID NO: 12194 - protein, 9 aa, Homo sapiens
  misc_feature: Table A; Target 12194; HLA-B*40:01; BSND; ENSG00000162399; TAA
EEEDLYYGL

SEQ ID NO: 12195 - protein, 9 aa, Homo sapiens
  misc_feature: Table A; Target 12195; HLA-B*44:02; BSND; ENSG00000162399; TAA
EEEDLYYGL

SEQ ID NO: 12196 - protein, 9 aa, Homo sapiens
  misc_feature: Table A; Target 12196; HLA-B*44:03; BSND; ENSG00000162399; TAA
EEEDLYYGL

SEQ ID NO: 12197 - protein, 10 aa, Homo sapiens
  misc_feature: Table A; Target 12197; HLA-A*25:01; BSND; ENSG00000162399; TAA
EGGPGDVQAW

SEQ ID NO: 12198 - protein, 10 aa, Homo sapiens
  misc_feature: Table A; Target 12198; HLA-B*44:02; BSND; ENSG00000162399; TAA
EGGPGDVQAW

SEQ ID NO: 12199 - protein, 10 aa, Homo sapiens
  misc_feature: Table A; Target 12199; HLA-B*44:03; BSND; ENSG00000162399; TAA
EGGPGDVQAW

SEQ ID NO: 12200 - protein, 10 aa, Homo sapiens
  misc_feature: Table A; Target 12200; HLA-C*16:04; BSND; ENSG00000162399; TAA
EGGPGDVQAW

SEQ ID NO: 12201 - protein, 10 aa, Homo sapiens
  misc_feature: Table A; Target 12201; HLA-A*33:03; BSND; ENSG00000162399; TAA
EIALPNNWQR

SEQ ID NO: 12202 - protein, 10 aa, Homo sapiens
  misc_feature: Table A; Target 12202; HLA-A*68:01; BSND; ENSG00000162399; TAA
EIALPNNWQR

SEQ ID NO: 12203 - protein, 11 aa, Homo sapiens
  misc_feature: Table A; Target 12203; HLA-A*01:01; BSND; ENSG00000162399; TAA
EIALPNNWQRY

SEQ ID NO: 12204 - protein, 11 aa, Homo sapiens
  misc_feature: Table A; Target 12204; HLA-A*26:01; BSND; ENSG00000162399; TAA
EIALPNNWQRY

SEQ ID NO: 12205 - protein, 11 aa, Homo sapiens
  misc_feature: Table A; Target 12205; HLA-A*30:02; BSND; ENSG00000162399; TAA
EMKSPSPQPPY

SEQ ID NO: 12206 - protein, 10 aa, Homo sapiens
  misc_feature: Table A; Target 12206; HLA-B*55:01; BSND; ENSG00000162399; TAA
EPEKEEEDLY

SEQ ID NO: 12207 - protein, 10 aa, Homo sapiens
  misc_feature: Table A; Target 12207; HLA-C*03:03; BSND; ENSG00000162399; TAA
EPEKEEEDLY

SEQ ID NO: 12208 - protein, 9 aa, Homo sapiens
  misc_feature: Table A; Target 12208; HLA-A*02:01; BSND; ENSG00000162399; TAA
FALIDAPTL

SEQ ID NO: 12209 - protein, 9 aa, Homo sapiens
  misc_feature: Table A; Target 12209; HLA-A*02:04; BSND; ENSG00000162399; TAA
FALIDAPTL

SEQ ID NO: 12210 - protein, 9 aa, Homo sapiens
  misc_feature: Table A; Target 12210; HLA-A*02:07; BSND; ENSG00000162399; TAA
FALIDAPTL

SEQ ID NO: 12211 - protein, 9 aa, Homo sapiens
  misc_feature: Table A; Target 12211; HLA-A*23:01; BSND; ENSG00000162399; TAA
FALIDAPTL

SEQ ID NO: 12212 - protein, 9 aa, Homo sapiens
  misc_feature: Table A; Target 12212; HLA-A*24:02; BSND; ENSG00000162399; TAA
FALIDAPTL

SEQ ID NO: 12213 - protein, 9 aa, Homo sapiens
  misc_feature: Table A; Target 12213; HLA-A*30:01; BSND; ENSG00000162399; TAA
FALIDAPTL

SEQ ID NO: 12214 - protein, 9 aa, Homo sapiens
  misc_feature: Table A; Target 12214; HLA-B*07:02; BSND; ENSG00000162399; TAA
FALIDAPTL

SEQ ID NO: 12215 - protein, 9 aa, Homo sapiens
  misc_feature: Table A; Target 12215; HLA-B*08:01; BSND; ENSG00000162399; TAA
FALIDAPTL

SEQ ID NO: 12216 - protein, 9 aa, Homo sapiens
  misc_feature: Table A; Target 12216; HLA-B*15:03; BSND; ENSG00000162399; TAA
FALIDAPTL

SEQ ID NO: 12217 - protein, 9 aa, Homo sapiens
  misc_feature: Table A; Target 12217; HLA-B*27:02; BSND; ENSG00000162399; TAA
FALIDAPTL

SEQ ID NO: 12218 - protein, 9 aa, Homo sapiens
  misc_feature: Table A; Target 12218; HLA-B*27:05; BSND; ENSG00000162399; TAA
FALIDAPTL

SEQ ID NO: 12219 - protein, 9 aa, Homo sapiens
  misc_feature: Table A; Target 12219; HLA-B*35:01; BSND; ENSG00000162399; TAA
FALIDAPTL

SEQ ID NO: 12220 - protein, 9 aa, Homo sapiens
  misc_feature: Table A; Target 12220; HLA-B*35:03; BSND; ENSG00000162399; TAA
FALIDAPTL

SEQ ID NO: 12221 - protein, 9 aa, Homo sapiens
  misc_feature: Table A; Target 12221; HLA-B*38:01; BSND; ENSG00000162399; TAA
FALIDAPTL

SEQ ID NO: 12222 - protein, 9 aa, Homo sapiens
  misc_feature: Table A; Target 12222; HLA-B*39:01; BSND; ENSG00000162399; TAA
FALIDAPTL

SEQ ID NO: 12223 - protein, 9 aa, Homo sapiens
  misc_feature: Table A; Target 12223; HLA-B*40:01; BSND; ENSG00000162399; TAA
FALIDAPTL

SEQ ID NO: 12224 - protein, 9 aa, Homo sapiens
  misc_feature: Table A; Target 12224; HLA-B*40:02; BSND; ENSG00000162399; TAA
FALIDAPTL

SEQ ID NO: 12225 - protein, 9 aa, Homo sapiens
  misc_feature: Table A; Target 12225; HLA-B*46:01; BSND; ENSG00000162399; TAA
FALIDAPTL

SEQ ID NO: 12226 - protein, 9 aa, Homo sapiens
  misc_feature: Table A; Target 12226; HLA-B*51:01; BSND; ENSG00000162399; TAA
FALIDAPTL

SEQ ID NO: 12227 - protein, 9 aa, Homo sapiens
  misc_feature: Table A; Target 12227; HLA-B*54:01; BSND; ENSG00000162399; TAA
FALIDAPTL

SEQ ID NO: 12228 - protein, 9 aa, Homo sapiens
  misc_feature: Table A; Target 12228; HLA-B*55:01; BSND; ENSG00000162399; TAA
FALIDAPTL

SEQ ID NO: 12229 - protein, 9 aa, Homo sapiens
  misc_feature: Table A; Target 12229; HLA-B*58:01; BSND; ENSG00000162399; TAA
FALIDAPTL

SEQ ID NO: 12230 - protein, 9 aa, Homo sapiens
  misc_feature: Table A; Target 12230; HLA-C*01:02; BSND; ENSG00000162399; TAA
FALIDAPTL

SEQ ID NO: 12231 - protein, 9 aa, Homo sapiens
  misc_feature: Table A; Target 12231; HLA-C*02:02; BSND; ENSG00000162399; TAA
FALIDAPTL

SEQ ID NO: 12232 - protein, 9 aa, Homo sapiens
  misc_feature: Table A; Target 12232; HLA-C*03:03; BSND; ENSG00000162399; TAA
FALIDAPTL

SEQ ID NO: 12233 - protein, 9 aa, Homo sapiens
  misc_feature: Table A; Target 12233; HLA-C*03:04; BSND; ENSG00000162399; TAA
FALIDAPTL

SEQ ID NO: 12234 - protein, 9 aa, Homo sapiens
  misc_feature: Table A; Target 12234; HLA-C*05:01; BSND; ENSG00000162399; TAA
FALIDAPTL

SEQ ID NO: 12235 - protein, 9 aa, Homo sapiens
  misc_feature: Table A; Target 12235; HLA-C*06:02; BSND; ENSG00000162399; TAA
FALIDAPTL

SEQ ID NO: 12236 - protein, 9 aa, Homo sapiens
  misc_feature: Table A; Target 12236; HLA-C*07:01; BSND; ENSG00000162399; TAA
FALIDAPTL

SEQ ID NO: 12237 - protein, 9 aa, Homo sapiens
  misc_feature: Table A; Target 12237; HLA-C*07:04; BSND; ENSG00000162399; TAA
FALIDAPTL

SEQ ID NO: 12238 - protein, 9 aa, Homo sapiens
  misc_feature: Table A; Target 12238; HLA-C*12:03; BSND; ENSG00000162399; TAA
FALIDAPTL

SEQ ID NO: 12239 - protein, 9 aa, Homo sapiens
  misc_feature: Table A; Target 12239; HLA-C*14:02; BSND; ENSG00000162399; TAA
FALIDAPTL

SEQ ID NO: 12240 - protein, 9 aa, Homo sapiens
  misc_feature: Table A; Target 12240; HLA-C*16:01; BSND; ENSG00000162399; TAA
FALIDAPTL

SEQ ID NO: 12241 - protein, 9 aa, Homo sapiens
  misc_feature: Table A; Target 12241; HLA-C*16:02; BSND; ENSG00000162399; TAA
FALIDAPTL

SEQ ID NO: 12242 - protein, 9 aa, Homo sapiens
  misc_feature: Table A; Target 12242; HLA-C*16:04; BSND; ENSG00000162399; TAA
FALIDAPTL

SEQ ID NO: 12243 - protein, 9 aa, Homo sapiens
  misc_feature: Table A; Target 12243; HLA-A*02:04; BSND; ENSG00000162399; TAA
FIVLGLFLL

SEQ ID NO: 12244 - protein, 9 aa, Homo sapiens
  misc_feature: Table A; Target 12244; HLA-A*02:01; BSND; ENSG00000162399; TAA
FLLALGTFL

SEQ ID NO: 12245 - protein, 9 aa, Homo sapiens
  misc_feature: Table A; Target 12245; HLA-A*02:03; BSND; ENSG00000162399; TAA
FLLALGTFL

SEQ ID NO: 12246 - protein, 9 aa, Homo sapiens
  misc_feature: Table A; Target 12246; HLA-A*02:04; BSND; ENSG00000162399; TAA
FLLALGTFL

SEQ ID NO: 12247 - protein, 9 aa, Homo sapiens
  misc_feature: Table A; Target 12247; HLA-A*02:07; BSND; ENSG00000162399; TAA
FLLALGTFL

SEQ ID NO: 12248 - protein, 10 aa, Homo sapiens
  misc_feature: Table A; Target 12248; HLA-A*02:01; BSND; ENSG00000162399; TAA
FLLALGTFLM

SEQ ID NO: 12249 - protein, 10 aa, Homo sapiens
  misc_feature: Table A; Target 12249; HLA-A*02:04; BSND; ENSG00000162399; TAA
FLLALGTFLM

SEQ ID NO: 12250 - protein, 10 aa, Homo sapiens
  misc_feature: Table A; Target 12250; HLA-A*02:01; BSND; ENSG00000162399; TAA
FLMSHDRPQV

SEQ ID NO: 12251 - protein, 10 aa, Homo sapiens
  misc_feature: Table A; Target 12251; HLA-A*02:03; BSND; ENSG00000162399; TAA
FLMSHDRPQV

SEQ ID NO: 12252 - protein, 10 aa, Homo sapiens
  misc_feature: Table A; Target 12252; HLA-A*02:04; BSND; ENSG00000162399; TAA
FLMSHDRPQV

SEQ ID NO: 12253 - protein, 11 aa, Homo sapiens
  misc_feature: Table A; Target 12253; HLA-A*01:01; BSND; ENSG00000162399; TAA
FLMSHDRPQVY

SEQ ID NO: 12254 - protein, 11 aa, Homo sapiens
  misc_feature: Table A; Target 12254; HLA-A*29:02; BSND; ENSG00000162399; TAA
FLMSHDRPQVY

SEQ ID NO: 12255 - protein, 8 aa, Homo sapiens
  misc_feature: Table A; Target 12255; HLA-B*27:02; BSND; ENSG00000162399; TAA
FQGILSPK

SEQ ID NO: 12256 - protein, 9 aa, Homo sapiens
  misc_feature: Table A; Target 12256; HLA-B*27:05; BSND; ENSG00000162399; TAA
FQGILSPKA

SEQ ID NO: 12257 - protein, 11 aa, Homo sapiens
  misc_feature: Table A; Target 12257; HLA-A*02:07; BSND; ENSG00000162399; TAA
FVPADSDFQGI

SEQ ID NO: 12258 - protein, 8 aa, Homo sapiens
  misc_feature: Table A; Target 12258; HLA-B*35:03; BSND; ENSG00000162399; TAA
FYAMGSVM

SEQ ID NO: 12259 - protein, 8 aa, Homo sapiens
  misc_feature: Table A; Target 12259; HLA-B*46:01; BSND; ENSG00000162399; TAA
FYAMGSVM

SEQ ID NO: 12260 - protein, 8 aa, Homo sapiens
  misc_feature: Table A; Target 12260; HLA-C*01:02; BSND; ENSG00000162399; TAA
FYAMGSVM

SEQ ID NO: 12261 - protein, 8 aa, Homo sapiens
  misc_feature: Table A; Target 12261; HLA-C*03:03; BSND; ENSG00000162399; TAA
FYAMGSVM

SEQ ID NO: 12262 - protein, 8 aa, Homo sapiens
  misc_feature: Table A; Target 12262; HLA-C*03:04; BSND; ENSG00000162399; TAA
FYAMGSVM

SEQ ID NO: 12263 - protein, 8 aa, Homo sapiens
  misc_feature: Table A; Target 12263; HLA-C*04:01; BSND; ENSG00000162399; TAA
FYAMGSVM

SEQ ID NO: 12264 - protein, 8 aa, Homo sapiens
  misc_feature: Table A; Target 12264; HLA-C*12:03; BSND; ENSG00000162399; TAA
FYAMGSVM

SEQ ID NO: 12265 - protein, 8 aa, Homo sapiens
  misc_feature: Table A; Target 12265; HLA-C*14:02; BSND; ENSG00000162399; TAA
FYAMGSVM

SEQ ID NO: 12266 - protein, 8 aa, Homo sapiens
  misc_feature: Table A; Target 12266; HLA-C*16:01; BSND; ENSG00000162399; TAA
FYAMGSVM

SEQ ID NO: 12267 - protein, 10 aa, Homo sapiens
  misc_feature: Table A; Target 12267; HLA-A*24:02; BSND; ENSG00000162399; TAA
FYAMGSVMVI

SEQ ID NO: 12268 - protein, 9 aa, Homo sapiens
  misc_feature: Table A; Target 12268; HLA-A*11:01; BSND; ENSG00000162399; TAA
GAGDLLPDK

SEQ ID NO: 12269 - protein, 11 aa, Homo sapiens
  misc_feature: Table A; Target 12269; HLA-B*37:01; BSND; ENSG00000162399; TAA
GDLLPDKELGF

SEQ ID NO: 12270 - protein, 10 aa, Homo sapiens
  misc_feature: Table A; Target 12270; HLA-B*40:01; BSND; ENSG00000162399; TAA
GEGGPGDVQA

SEQ ID NO: 12271 - protein, 11 aa, Homo sapiens
  misc_feature: Table A; Target 12271; HLA-A*30:01; BSND; ENSG00000162399; TAA
GEGGPGDVQAW

SEQ ID NO: 12272 - protein, 11 aa, Homo sapiens
  misc_feature: Table A; Target 12272; HLA-B*27:02; BSND; ENSG00000162399; TAA
GEGGPGDVQAW

SEQ ID NO: 12273 - protein, 11 aa, Homo sapiens
  misc_feature: Table A; Target 12273; HLA-B*40:01; BSND; ENSG00000162399; TAA
GEGGPGDVQAW

SEQ ID NO: 12274 - protein, 11 aa, Homo sapiens
  misc_feature: Table A; Target 12274; HLA-B*44:02; BSND; ENSG00000162399; TAA
GEGGPGDVQAW

SEQ ID NO: 12275 - protein, 11 aa, Homo sapiens
  misc_feature: Table A; Target 12275; HLA-B*44:03; BSND; ENSG00000162399; TAA
GEGGPGDVQAW

SEQ ID NO: 12276 - protein, 11 aa, Homo sapiens
  misc_feature: Table A; Target 12276; HLA-B*49:01; BSND; ENSG00000162399; TAA
GEGGPGDVQAW

SEQ ID NO: 12277 - protein, 11 aa, Homo sapiens
  misc_feature: Table A; Target 12277; HLA-B*57:01; BSND; ENSG00000162399; TAA
GEGGPGDVQAW

SEQ ID NO: 12278 - protein, 11 aa, Homo sapiens
  misc_feature: Table A; Target 12278; HLA-C*12:03; BSND; ENSG00000162399; TAA
GEGGPGDVQAW

SEQ ID NO: 12279 - protein, 11 aa, Homo sapiens
  misc_feature: Table A; Target 12279; HLA-C*16:04; BSND; ENSG00000162399; TAA
GEGGPGDVQAW

SEQ ID NO: 12280 - protein, 9 aa, Homo sapiens
  misc_feature: Table A; Target 12280; HLA-B*44:02; BSND; ENSG00000162399; TAA
GERRLTQSW

SEQ ID NO: 12281 - protein, 9 aa, Homo sapiens
  misc_feature: Table A; Target 12281; HLA-B*44:03; BSND; ENSG00000162399; TAA
GERRLTQSW

SEQ ID NO: 12282 - protein, 11 aa, Homo sapiens
  misc_feature: Table A; Target 12282; HLA-A*02:04; BSND; ENSG00000162399; TAA
GLFLLALGTFL

SEQ ID NO: 12283 - protein, 9 aa, Homo sapiens
  misc_feature: Table A; Target 12283; HLA-A*02:01; BSND; ENSG00000162399; TAA
GLLENGLAA

SEQ ID NO: 12284 - protein, 9 aa, Homo sapiens
  misc_feature: Table A; Target 12284; HLA-A*02:03; BSND; ENSG00000162399; TAA
GLLENGLAA

SEQ ID NO: 12285 - protein, 9 aa, Homo sapiens
  misc_feature: Table A; Target 12285; HLA-A*02:04; BSND; ENSG00000162399; TAA
GLLENGLAA

SEQ ID NO: 12286 - protein, 9 aa, Homo sapiens
  misc_feature: Table A; Target 12286; HLA-B*13:02; BSND; ENSG00000162399; TAA
GLLENGLAA

SEQ ID NO: 12287 - protein, 9 aa, Homo sapiens
  misc_feature: Table A; Target 12287; HLA-B*55:01; BSND; ENSG00000162399; TAA
GLLENGLAA

SEQ ID NO: 12288 - protein, 9 aa, Homo sapiens
  misc_feature: Table A; Target 12288; HLA-C*14:02; BSND; ENSG00000162399; TAA
GLLENGLAA

SEQ ID NO: 12289 - protein, 11 aa, Homo sapiens
  misc_feature: Table A; Target 12289; HLA-A*02:01; BSND; ENSG00000162399; TAA
GLLENGLAAEM

SEQ ID NO: 12290 - protein, 11 aa, Homo sapiens
  misc_feature: Table A; Target 12290; HLA-A*02:04; BSND; ENSG00000162399; TAA
GLLENGLAAEM

SEQ ID NO: 12291 - protein, 11 aa, Homo sapiens
  misc_feature: Table A; Target 12291; HLA-A*29:02; BSND; ENSG00000162399; TAA
GLLENGLAAEM

SEQ ID NO: 12292 - protein, 9 aa, Homo sapiens
  misc_feature: Table A; Target 12292; HLA-C*01:02; BSND; ENSG00000162399; TAA
GLPDGAGDL

SEQ ID NO: 12293 - protein, 10 aa, Homo sapiens
  misc_feature: Table A; Target 12293; HLA-A*02:07; BSND; ENSG00000162399; TAA
GLPDGAGDLL

SEQ ID NO: 12294 - protein, 10 aa, Homo sapiens
  misc_feature: Table A; Target 12294; HLA-B*40:01; BSND; ENSG00000162399; TAA
GLPDGAGDLL

SEQ ID NO: 12295 - protein, 9 aa, Homo sapiens
  misc_feature: Table A; Target 12295; HLA-C*05:01; BSND; ENSG00000162399; TAA
GSDESEGER

SEQ ID NO: 12296 - protein, 11 aa, Homo sapiens
  misc_feature: Table A; Target 12296; HLA-C*05:01; BSND; ENSG00000162399; TAA
GSDESEGERRL

SEQ ID NO: 12297 - protein, 9 aa, Homo sapiens
  misc_feature: Table A; Target 12297; HLA-A*31:01; BSND; ENSG00000162399; TAA
GTFLMSHDR

SEQ ID NO: 12298 - protein, 9 aa, Homo sapiens
  misc_feature: Table A; Target 12298; HLA-B*57:01; BSND; ENSG00000162399; TAA
GTFLMSHDR

SEQ ID NO: 12299 - protein, 10 aa, Homo sapiens
  misc_feature: Table A; Target 12299; HLA-B*37:01; BSND; ENSG00000162399; TAA
HDRPQVYGTF

SEQ ID NO: 12300 - protein, 10 aa, Homo sapiens
  misc_feature: Table A; Target 12300; HLA-B*40:02; BSND; ENSG00000162399; TAA
HDRPQVYGTF

SEQ ID NO: 12301 - protein, 10 aa, Homo sapiens
  misc_feature: Table A; Target 12301; HLA-B*44:02; BSND; ENSG00000162399; TAA
HDRPQVYGTF

SEQ ID NO: 12302 - protein, 10 aa, Homo sapiens
  misc_feature: Table A; Target 12302; HLA-B*57:01; BSND; ENSG00000162399; TAA
HDRPQVYGTF

SEQ ID NO: 12303 - protein, 10 aa, Homo sapiens
  misc_feature: Table A; Target 12303; HLA-C*04:01; BSND; ENSG00000162399; TAA
HDRPQVYGTF

SEQ ID NO: 12304 - protein, 9 aa, Homo sapiens
  misc_feature: Table A; Target 12304; HLA-A*01:01; BSND; ENSG00000162399; TAA
HIQMKVMSY

SEQ ID NO: 12305 - protein, 9 aa, Homo sapiens
  misc_feature: Table A; Target 12305; HLA-A*03:01; BSND; ENSG00000162399; TAA
HIQMKVMSY

SEQ ID NO: 12306 - protein, 9 aa, Homo sapiens
  misc_feature: Table A; Target 12306; HLA-A*25:01; BSND; ENSG00000162399; TAA
HIQMKVMSY

SEQ ID NO: 12307 - protein, 9 aa, Homo sapiens
  misc_feature: Table A; Target 12307; HLA-A*26:01; BSND; ENSG00000162399; TAA
HIQMKVMSY

SEQ ID NO: 12308 - protein, 9 aa, Homo sapiens
  misc_feature: Table A; Target 12308; HLA-A*29:02; BSND; ENSG00000162399; TAA
HIQMKVMSY

SEQ ID NO: 12309 - protein, 9 aa, Homo sapiens
  misc_feature: Table A; Target 12309; HLA-A*30:02; BSND; ENSG00000162399; TAA
HIQMKVMSY

SEQ ID NO: 12310 - protein, 9 aa, Homo sapiens
  misc_feature: Table A; Target 12310; HLA-A*32:01; BSND; ENSG00000162399; TAA
HIQMKVMSY

SEQ ID NO: 12311 - protein, 9 aa, Homo sapiens
  misc_feature: Table A; Target 12311; HLA-B*08:01; BSND; ENSG00000162399; TAA
HIQMKVMSY

SEQ ID NO: 12312 - protein, 9 aa, Homo sapiens
  misc_feature: Table A; Target 12312; HLA-B*15:01; BSND; ENSG00000162399; TAA
HIQMKVMSY

SEQ ID NO: 12313 - protein, 9 aa, Homo sapiens
  misc_feature: Table A; Target 12313; HLA-B*35:01; BSND; ENSG00000162399; TAA
HIQMKVMSY

SEQ ID NO: 12314 - protein, 9 aa, Homo sapiens
  misc_feature: Table A; Target 12314; HLA-B*46:01; BSND; ENSG00000162399; TAA
HIQMKVMSY

SEQ ID NO: 12315 - protein, 9 aa, Homo sapiens
  misc_feature: Table A; Target 12315; HLA-C*03:03; BSND; ENSG00000162399; TAA
HIQMKVMSY

SEQ ID NO: 12316 - protein, 9 aa, Homo sapiens
  misc_feature: Table A; Target 12316; HLA-C*07:01; BSND; ENSG00000162399; TAA
HIQMKVMSY

SEQ ID NO: 12317 - protein, 9 aa, Homo sapiens
  misc_feature: Table A; Target 12317; HLA-C*07:04; BSND; ENSG00000162399; TAA
HIQMKVMSY

SEQ ID NO: 12318 - protein, 9 aa, Homo sapiens
  misc_feature: Table A; Target 12318; HLA-C*12:03; BSND; ENSG00000162399; TAA
HIQMKVMSY

SEQ ID NO: 12319 - protein, 9 aa, Homo sapiens
  misc_feature: Table A; Target 12319; HLA-C*16:01; BSND; ENSG00000162399; TAA
HIQMKVMSY

SEQ ID NO: 12320 - protein, 9 aa, Homo sapiens
  misc_feature: Table A; Target 12320; HLA-C*16:02; BSND; ENSG00000162399; TAA
HIQMKVMSY

SEQ ID NO: 12321 - protein, 9 aa, Homo sapiens
  misc_feature: Table A; Target 12321; HLA-B*27:05; BSND; ENSG00000162399; TAA
HRSLLAPEM

SEQ ID NO: 12322 - protein, 9 aa, Homo sapiens
  misc_feature: Table A; Target 12322; HLA-A*31:01; BSND; ENSG00000162399; TAA
IALPNNWQR

SEQ ID NO: 12323 - protein, 9 aa, Homo sapiens
  misc_feature: Table A; Target 12323; HLA-B*57:01; BSND; ENSG00000162399; TAA
IALPNNWQR

SEQ ID NO: 12324 - protein, 10 aa, Homo sapiens
  misc_feature: Table A; Target 12324; HLA-A*29:02; BSND; ENSG00000162399; TAA
IALPNNWQRY

SEQ ID NO: 12325 - protein, 10 aa, Homo sapiens
  misc_feature: Table A; Target 12325; HLA-A*30:02; BSND; ENSG00000162399; TAA
IALPNNWQRY

SEQ ID NO: 12326 - protein, 10 aa, Homo sapiens
  misc_feature: Table A; Target 12326; HLA-B*57:01; BSND; ENSG00000162399; TAA
IALPNNWQRY

SEQ ID NO: 12327 - protein, 8 aa, Homo sapiens
  misc_feature: Table A; Target 12327; HLA-B*51:01; BSND; ENSG00000162399; TAA
IGFIVLGL

SEQ ID NO: 12328 - protein, 9 aa, Homo sapiens
  misc_feature: Table A; Target 12328; HLA-A*02:01; BSND; ENSG00000162399; TAA
ILSPKAMGL

SEQ ID NO: 12329 - protein, 9 aa, Homo sapiens
  misc_feature: Table A; Target 12329; HLA-A*02:03; BSND; ENSG00000162399; TAA
ILSPKAMGL

SEQ ID NO: 12330 - protein, 9 aa, Homo sapiens
  misc_feature: Table A; Target 12330; HLA-A*02:04; BSND; ENSG00000162399; TAA
ILSPKAMGL

SEQ ID NO: 12331 - protein, 9 aa, Homo sapiens
  misc_feature: Table A; Target 12331; HLA-A*02:07; BSND; ENSG00000162399; TAA
ILSPKAMGL

SEQ ID NO: 12332 - protein, 9 aa, Homo sapiens
  misc_feature: Table A; Target 12332; HLA-A*03:01; BSND; ENSG00000162399; TAA
ILSPKAMGL

SEQ ID NO: 12333 - protein, 9 aa, Homo sapiens
  misc_feature: Table A; Target 12333; HLA-A*32:01; BSND; ENSG00000162399; TAA
ILSPKAMGL

SEQ ID NO: 12334 - protein, 9 aa, Homo sapiens
  misc_feature: Table A; Target 12334; HLA-B*08:01; BSND; ENSG00000162399; TAA
ILSPKAMGL

SEQ ID NO: 12335 - protein, 9 aa, Homo sapiens
  misc_feature: Table A; Target 12335; HLA-B*13:02; BSND; ENSG00000162399; TAA
ILSPKAMGL

SEQ ID NO: 12336 - protein, 9 aa, Homo sapiens
  misc_feature: Table A; Target 12336; HLA-B*37:01; BSND; ENSG00000162399; TAA
ILSPKAMGL

SEQ ID NO: 12337 - protein, 9 aa, Homo sapiens
  misc_feature: Table A; Target 12337; HLA-C*16:02; BSND; ENSG00000162399; TAA
ILSPKAMGL

SEQ ID NO: 12338 - protein, 10 aa, Homo sapiens
  misc_feature: Table A; Target 12338; HLA-A*02:03; BSND; ENSG00000162399; TAA
ILSPKAMGLL

SEQ ID NO: 12339 - protein, 8 aa, Homo sapiens
  misc_feature: Table A; Target 12339; HLA-A*30:02; BSND; ENSG00000162399; TAA
IQMKVMSY

SEQ ID NO: 12340 - protein, 8 aa, Homo sapiens
  misc_feature: Table A; Target 12340; HLA-A*32:01; BSND; ENSG00000162399; TAA
IQMKVMSY

SEQ ID NO: 12341 - protein, 8 aa, Homo sapiens
  misc_feature: Table A; Target 12341; HLA-B*08:01; BSND; ENSG00000162399; TAA
IQMKVMSY

SEQ ID NO: 12342 - protein, 8 aa, Homo sapiens
  misc_feature: Table A; Target 12342; HLA-B*13:02; BSND; ENSG00000162399; TAA
IQMKVMSY

SEQ ID NO: 12343 - protein, 8 aa, Homo sapiens
  misc_feature: Table A; Target 12343; HLA-B*15:01; BSND; ENSG00000162399; TAA
IQMKVMSY

SEQ ID NO: 12344 - protein, 8 aa, Homo sapiens
  misc_feature: Table A; Target 12344; HLA-B*15:03; BSND; ENSG00000162399; TAA
IQMKVMSY

SEQ ID NO: 12345 - protein, 8 aa, Homo sapiens
  misc_feature: Table A; Target 12345; HLA-B*18:01; BSND; ENSG00000162399; TAA
IQMKVMSY

SEQ ID NO: 12346 - protein, 8 aa, Homo sapiens
  misc_feature: Table A; Target 12346; HLA-B*37:01; BSND; ENSG00000162399; TAA
IQMKVMSY

SEQ ID NO: 12347 - protein, 8 aa, Homo sapiens
  misc_feature: Table A; Target 12347; HLA-B*39:01; BSND; ENSG00000162399; TAA
IQMKVMSY

SEQ ID NO: 12348 - protein, 8 aa, Homo sapiens
  misc_feature: Table A; Target 12348; HLA-B*46:01; BSND; ENSG00000162399; TAA
IQMKVMSY

SEQ ID NO: 12349 - protein, 8 aa, Homo sapiens
  misc_feature: Table A; Target 12349; HLA-B*58:01; BSND; ENSG00000162399; TAA
IQMKVMSY

SEQ ID NO: 12350 - protein, 8 aa, Homo sapiens
  misc_feature: Table A; Target 12350; HLA-C*02:02; BSND; ENSG00000162399; TAA
IQMKVMSY

SEQ ID NO: 12351 - protein, 8 aa, Homo sapiens
  misc_feature: Table A; Target 12351; HLA-C*07:01; BSND; ENSG00000162399; TAA
IQMKVMSY

SEQ ID NO: 12352 - protein, 8 aa, Homo sapiens
  misc_feature: Table A; Target 12352; HLA-C*07:04; BSND; ENSG00000162399; TAA
IQMKVMSY

SEQ ID NO: 12353 - protein, 8 aa, Homo sapiens
  misc_feature: Table A; Target 12353; HLA-C*14:02; BSND; ENSG00000162399; TAA
IQMKVMSY

SEQ ID NO: 12354 - protein, 8 aa, Homo sapiens
  misc_feature: Table A; Target 12354; HLA-C*16:01; BSND; ENSG00000162399; TAA
IQMKVMSY

SEQ ID NO: 12355 - protein, 8 aa, Homo sapiens
  misc_feature: Table A; Target 12355; HLA-C*16:02; BSND; ENSG00000162399; TAA
IQMKVMSY

SEQ ID NO: 12356 - protein, 8 aa, Homo sapiens
  misc_feature: Table A; Target 12356; HLA-C*16:04; BSND; ENSG00000162399; TAA
IQMKVMSY

SEQ ID NO: 12357 - protein, 8 aa, Homo sapiens
  misc_feature: Table A; Target 12357; HLA-A*02:04; BSND; ENSG00000162399; TAA
IVLGLFLL

SEQ ID NO: 12358 - protein, 9 aa, Homo sapiens
  misc_feature: Table A; Target 12358; HLA-A*29:02; BSND; ENSG00000162399; TAA
IVLGLFLLA

SEQ ID NO: 12359 - protein, 9 aa, Homo sapiens
  misc_feature: Table A; Target 12359; HLA-B*54:01; BSND; ENSG00000162399; TAA
IVLGLFLLA

SEQ ID NO: 12360 - protein, 10 aa, Homo sapiens
  misc_feature: Table A; Target 12360; HLA-A*32:01; BSND; ENSG00000162399; TAA
KAMGLLENGL

SEQ ID NO: 12361 - protein, 10 aa, Homo sapiens
  misc_feature: Table A; Target 12361; HLA-C*16:04; BSND; ENSG00000162399; TAA
KAMGLLENGL

SEQ ID NO: 12362 - protein, 10 aa, Homo sapiens
  misc_feature: Table A; Target 12362; HLA-B*40:01; BSND; ENSG00000162399; TAA
KEEEDLYYGL

SEQ ID NO: 12363 - protein, 9 aa, Homo sapiens
  misc_feature: Table A; Target 12363; HLA-B*40:02; BSND; ENSG00000162399; TAA
KELGFEPDT

SEQ ID NO: 12364 - protein, 9 aa, Homo sapiens
  misc_feature: Table A; Target 12364; HLA-A*01:01; BSND; ENSG00000162399; TAA
KSPSPQPPY

SEQ ID NO: 12365 - protein, 9 aa, Homo sapiens
  misc_feature: Table A; Target 12365; HLA-A*03:01; BSND; ENSG00000162399; TAA
KSPSPQPPY

SEQ ID NO: 12366 - protein, 9 aa, Homo sapiens
  misc_feature: Table A; Target 12366; HLA-A*03:02; BSND; ENSG00000162399; TAA
KSPSPQPPY

SEQ ID NO: 12367 - protein, 9 aa, Homo sapiens
  misc_feature: Table A; Target 12367; HLA-A*11:01; BSND; ENSG00000162399; TAA
KSPSPQPPY

SEQ ID NO: 12368 - protein, 9 aa, Homo sapiens
  misc_feature: Table A; Target 12368; HLA-A*29:02; BSND; ENSG00000162399; TAA
KSPSPQPPY

SEQ ID NO: 12369 - protein, 9 aa, Homo sapiens
  misc_feature: Table A; Target 12369; HLA-A*30:02; BSND; ENSG00000162399; TAA
KSPSPQPPY

SEQ ID NO: 12370 - protein, 9 aa, Homo sapiens
  misc_feature: Table A; Target 12370; HLA-A*31:01; BSND; ENSG00000162399; TAA
KSPSPQPPY

SEQ ID NO: 12371 - protein, 9 aa, Homo sapiens
  misc_feature: Table A; Target 12371; HLA-A*32:01; BSND; ENSG00000162399; TAA
KSPSPQPPY

SEQ ID NO: 12372 - protein, 9 aa, Homo sapiens
  misc_feature: Table A; Target 12372; HLA-B*07:02; BSND; ENSG00000162399; TAA
KSPSPQPPY

SEQ ID NO: 12373 - protein, 9 aa, Homo sapiens
  misc_feature: Table A; Target 12373; HLA-B*15:01; BSND; ENSG00000162399; TAA
KSPSPQPPY

SEQ ID NO: 12374 - protein, 9 aa, Homo sapiens
  misc_feature: Table A; Target 12374; HLA-B*15:03; BSND; ENSG00000162399; TAA
KSPSPQPPY

SEQ ID NO: 12375 - protein, 9 aa, Homo sapiens
  misc_feature: Table A; Target 12375; HLA-B*46:01; BSND; ENSG00000162399; TAA
KSPSPQPPY

SEQ ID NO: 12376 - protein, 9 aa, Homo sapiens
  misc_feature: Table A; Target 12376; HLA-B*57:01; BSND; ENSG00000162399; TAA
KSPSPQPPY

SEQ ID NO: 12377 - protein, 9 aa, Homo sapiens
  misc_feature: Table A; Target 12377; HLA-B*58:01; BSND; ENSG00000162399; TAA
KSPSPQPPY

SEQ ID NO: 12378 - protein, 9 aa, Homo sapiens
  misc_feature: Table A; Target 12378; HLA-C*01:02; BSND; ENSG00000162399; TAA
KSPSPQPPY

SEQ ID NO: 12379 - protein, 9 aa, Homo sapiens
  misc_feature: Table A; Target 12379; HLA-C*04:01; BSND; ENSG00000162399; TAA
KSPSPQPPY

SEQ ID NO: 12380 - protein, 9 aa, Homo sapiens
  misc_feature: Table A; Target 12380; HLA-C*06:02; BSND; ENSG00000162399; TAA
KSPSPQPPY

SEQ ID NO: 12381 - protein, 9 aa, Homo sapiens
  misc_feature: Table A; Target 12381; HLA-C*07:01; BSND; ENSG00000162399; TAA
KSPSPQPPY

SEQ ID NO: 12382 - protein, 9 aa, Homo sapiens
  misc_feature: Table A; Target 12382; HLA-C*07:02; BSND; ENSG00000162399; TAA
KSPSPQPPY

SEQ ID NO: 12383 - protein, 9 aa, Homo sapiens
  misc_feature: Table A; Target 12383; HLA-C*07:04; BSND; ENSG00000162399; TAA
KSPSPQPPY

SEQ ID NO: 12384 - protein, 9 aa, Homo sapiens
  misc_feature: Table A; Target 12384; HLA-C*16:01; BSND; ENSG00000162399; TAA
KSPSPQPPY

SEQ ID NO: 12385 - protein, 10 aa, Homo sapiens
  misc_feature: Table A; Target 12385; HLA-A*02:01; BSND; ENSG00000162399; TAA
KSPSPQPPYV

SEQ ID NO: 12386 - protein, 10 aa, Homo sapiens
  misc_feature: Table A; Target 12386; HLA-A*02:07; BSND; ENSG00000162399; TAA
KSPSPQPPYV

SEQ ID NO: 12387 - protein, 10 aa, Homo sapiens
  misc_feature: Table A; Target 12387; HLA-B*58:01; BSND; ENSG00000162399; TAA
KSPSPQPPYV

SEQ ID NO: 12388 - protein, 10 aa, Homo sapiens
  misc_feature: Table A; Target 12388; HLA-C*06:02; BSND; ENSG00000162399; TAA
KSPSPQPPYV

SEQ ID NO: 12389 - protein, 10 aa, Homo sapiens
  misc_feature: Table A; Target 12389; HLA-C*07:02; BSND; ENSG00000162399; TAA
KSPSPQPPYV

SEQ ID NO: 12390 - protein, 11 aa, Homo sapiens
  misc_feature: Table A; Target 12390; HLA-A*31:01; BSND; ENSG00000162399; TAA
KSPSPQPPYVR

SEQ ID NO: 12391 - protein, 9 aa, Homo sapiens
  misc_feature: Table A; Target 12391; HLA-A*02:04; BSND; ENSG00000162399; TAA
KTFRIGFIV

SEQ ID NO: 12392 - protein, 9 aa, Homo sapiens
  misc_feature: Table A; Target 12392; HLA-A*68:02; BSND; ENSG00000162399; TAA
KTFRIGFIV

SEQ ID NO: 12393 - protein, 9 aa, Homo sapiens
  misc_feature: Table A; Target 12393; HLA-B*57:01; BSND; ENSG00000162399; TAA
KTFRIGFIV

SEQ ID NO: 12394 - protein, 10 aa, Homo sapiens
  misc_feature: Table A; Target 12394; HLA-A*03:01; BSND; ENSG00000162399; TAA
KTFRIGFIVL

SEQ ID NO: 12395 - protein, 10 aa, Homo sapiens
  misc_feature: Table A; Target 12395; HLA-A*68:02; BSND; ENSG00000162399; TAA
KTFRIGFIVL

SEQ ID NO: 12396 - protein, 10 aa, Homo sapiens
  misc_feature: Table A; Target 12396; HLA-B*57:01; BSND; ENSG00000162399; TAA
KTFRIGFIVL

SEQ ID NO: 12397 - protein, 10 aa, Homo sapiens
  misc_feature: Table A; Target 12397; HLA-A*31:01; BSND; ENSG00000162399; TAA
KVMSYSEDHR

SEQ ID NO: 12398 - protein, 9 aa, Homo sapiens
  misc_feature: Table A; Target 12398; HLA-A*11:01; BSND; ENSG00000162399; TAA
LAPEMGQPK

SEQ ID NO: 12399 - protein, 9 aa, Homo sapiens
  misc_feature: Table A; Target 12399; HLA-C*01:02; BSND; ENSG00000162399; TAA
LAPEMGQPK

SEQ ID NO: 12400 - protein, 9 aa, Homo sapiens
  misc_feature: Table A; Target 12400; HLA-C*04:01; BSND; ENSG00000162399; TAA
LAPEMGQPK

SEQ ID NO: 12401 - protein, 9 aa, Homo sapiens
  misc_feature: Table A; Target 12401; HLA-C*06:02; BSND; ENSG00000162399; TAA
LAPEMGQPK

SEQ ID NO: 12402 - protein, 9 aa, Homo sapiens
  misc_feature: Table A; Target 12402; HLA-C*07:02; BSND; ENSG00000162399; TAA
LAPEMGQPK

SEQ ID NO: 12403 - protein, 9 aa, Homo sapiens
  misc_feature: Table A; Target 12403; HLA-C*07:06; BSND; ENSG00000162399; TAA
LAPEMGQPK

SEQ ID NO: 12404 - protein, 10 aa, Homo sapiens
  misc_feature: Table A; Target 12404; HLA-A*02:07; BSND; ENSG00000162399; TAA
LAPEMGQPKL

SEQ ID NO: 12405 - protein, 11 aa, Homo sapiens
  misc_feature: Table A; Target 12405; HLA-B*27:02; BSND; ENSG00000162399; TAA
LEDEPQEGQQW

SEQ ID NO: 12406 - protein, 11 aa, Homo sapiens
  misc_feature: Table A; Target 12406; HLA-B*38:01; BSND; ENSG00000162399; TAA
LEDEPQEGQQW

SEQ ID NO: 12407 - protein, 11 aa, Homo sapiens
  misc_feature: Table A; Target 12407; HLA-B*40:01; BSND; ENSG00000162399; TAA
LEDEPQEGQQW

SEQ ID NO: 12408 - protein, 11 aa, Homo sapiens
  misc_feature: Table A; Target 12408; HLA-B*44:02; BSND; ENSG00000162399; TAA
LEDEPQEGQQW

SEQ ID NO: 12409 - protein, 11 aa, Homo sapiens
  misc_feature: Table A; Target 12409; HLA-B*44:03; BSND; ENSG00000162399; TAA
LEDEPQEGQQW

SEQ ID NO: 12410 - protein, 11 aa, Homo sapiens
  misc_feature: Table A; Target 12410; HLA-C*16:04; BSND; ENSG00000162399; TAA
LEDEPQEGQQW

SEQ ID NO: 12411 - protein, 9 aa, Homo sapiens
  misc_feature: Table A; Target 12411; HLA-A*30:01; BSND; ENSG00000162399; TAA
LENGLAAEM

SEQ ID NO: 12412 - protein, 9 aa, Homo sapiens
  misc_feature: Table A; Target 12412; HLA-B*15:03; BSND; ENSG00000162399; TAA
LENGLAAEM

SEQ ID NO: 12413 - protein, 9 aa, Homo sapiens
  misc_feature: Table A; Target 12413; HLA-B*18:01; BSND; ENSG00000162399; TAA
LENGLAAEM

SEQ ID NO: 12414 - protein, 9 aa, Homo sapiens
  misc_feature: Table A; Target 12414; HLA-B*27:02; BSND; ENSG00000162399; TAA
LENGLAAEM

SEQ ID NO: 12415 - protein, 9 aa, Homo sapiens
  misc_feature: Table A; Target 12415; HLA-B*27:05; BSND; ENSG00000162399; TAA
LENGLAAEM

SEQ ID NO: 12416 - protein, 9 aa, Homo sapiens
  misc_feature: Table A; Target 12416; HLA-B*35:01; BSND; ENSG00000162399; TAA
LENGLAAEM

SEQ ID NO: 12417 - protein, 9 aa, Homo sapiens
  misc_feature: Table A; Target 12417; HLA-B*37:01; BSND; ENSG00000162399; TAA
LENGLAAEM

SEQ ID NO: 12418 - protein, 9 aa, Homo sapiens
  misc_feature: Table A; Target 12418; HLA-B*39:01; BSND; ENSG00000162399; TAA
LENGLAAEM

SEQ ID NO: 12419 - protein, 9 aa, Homo sapiens
  misc_feature: Table A; Target 12419; HLA-B*40:01; BSND; ENSG00000162399; TAA
LENGLAAEM

SEQ ID NO: 12420 - protein, 9 aa, Homo sapiens
  misc_feature: Table A; Target 12420; HLA-B*40:02; BSND; ENSG00000162399; TAA
LENGLAAEM

SEQ ID NO: 12421 - protein, 9 aa, Homo sapiens
  misc_feature: Table A; Target 12421; HLA-B*44:02; BSND; ENSG00000162399; TAA
LENGLAAEM

SEQ ID NO: 12422 - protein, 9 aa, Homo sapiens
  misc_feature: Table A; Target 12422; HLA-B*44:03; BSND; ENSG00000162399; TAA
LENGLAAEM

SEQ ID NO: 12423 - protein, 9 aa, Homo sapiens
  misc_feature: Table A; Target 12423; HLA-B*49:01; BSND; ENSG00000162399; TAA
LENGLAAEM

SEQ ID NO: 12424 - protein, 9 aa, Homo sapiens
  misc_feature: Table A; Target 12424; HLA-C*01:02; BSND; ENSG00000162399; TAA
LENGLAAEM

SEQ ID NO: 12425 - protein, 9 aa, Homo sapiens
  misc_feature: Table A; Target 12425; HLA-C*02:02; BSND; ENSG00000162399; TAA
LENGLAAEM

SEQ ID NO: 12426 - protein, 9 aa, Homo sapiens
  misc_feature: Table A; Target 12426; HLA-C*04:01; BSND; ENSG00000162399; TAA
LENGLAAEM

SEQ ID NO: 12427 - protein, 9 aa, Homo sapiens
  misc_feature: Table A; Target 12427; HLA-C*06:02; BSND; ENSG00000162399; TAA
LENGLAAEM

SEQ ID NO: 12428 - protein, 9 aa, Homo sapiens
  misc_feature: Table A; Target 12428; HLA-C*07:01; BSND; ENSG00000162399; TAA
LENGLAAEM

SEQ ID NO: 12429 - protein, 9 aa, Homo sapiens
  misc_feature: Table A; Target 12429; HLA-C*07:04; BSND; ENSG00000162399; TAA
LENGLAAEM

SEQ ID NO: 12430 - protein, 9 aa, Homo sapiens
  misc_feature: Table A; Target 12430; HLA-C*12:03; BSND; ENSG00000162399; TAA
LENGLAAEM

SEQ ID NO: 12431 - protein, 9 aa, Homo sapiens
  misc_feature: Table A; Target 12431; HLA-C*14:02; BSND; ENSG00000162399; TAA
LENGLAAEM

SEQ ID NO: 12432 - protein, 9 aa, Homo sapiens
  misc_feature: Table A; Target 12432; HLA-C*16:04; BSND; ENSG00000162399; TAA
LENGLAAEM

SEQ ID NO: 12433 - protein, 10 aa, Homo sapiens
  misc_feature: Table A; Target 12433; HLA-B*27:02; BSND; ENSG00000162399; TAA
LENGLAAEMK

SEQ ID NO: 12434 - protein, 9 aa, Homo sapiens
  misc_feature: Table A; Target 12434; HLA-A*23:01; BSND; ENSG00000162399; TAA
LFLLALGTF

SEQ ID NO: 12435 - protein, 9 aa, Homo sapiens
  misc_feature: Table A; Target 12435; HLA-A*02:04; BSND; ENSG00000162399; TAA
LLALGTFLM

SEQ ID NO: 12436 - protein, 10 aa, Homo sapiens
  misc_feature: Table A; Target 12436; HLA-A*03:01; BSND; ENSG00000162399; TAA
LLAPEMGQPK

SEQ ID NO: 12437 - protein, 10 aa, Homo sapiens
  misc_feature: Table A; Target 12437; HLA-A*03:02; BSND; ENSG00000162399; TAA
LLAPEMGQPK

SEQ ID NO: 12438 - protein, 10 aa, Homo sapiens
  misc_feature: Table A; Target 12438; HLA-A*11:01; BSND; ENSG00000162399; TAA
LLAPEMGQPK

SEQ ID NO: 12439 - protein, 10 aa, Homo sapiens
  misc_feature: Table A; Target 12439; HLA-A*68:01; BSND; ENSG00000162399; TAA
LLAPEMGQPK

SEQ ID NO: 12440 - protein, 10 aa, Homo sapiens
  misc_feature: Table A; Target 12440; HLA-B*27:02; BSND; ENSG00000162399; TAA
LLAPEMGQPK

SEQ ID NO: 12441 - protein, 10 aa, Homo sapiens
  misc_feature: Table A; Target 12441; HLA-B*27:05; BSND; ENSG00000162399; TAA
LLAPEMGQPK

SEQ ID NO: 12442 - protein, 10 aa, Homo sapiens
  misc_feature: Table A; Target 12442; HLA-C*04:01; BSND; ENSG00000162399; TAA
LLAPEMGQPK

SEQ ID NO: 12443 - protein, 10 aa, Homo sapiens
  misc_feature: Table A; Target 12443; HLA-C*06:02; BSND; ENSG00000162399; TAA
LLAPEMGQPK

SEQ ID NO: 12444 - protein, 10 aa, Homo sapiens
  misc_feature: Table A; Target 12444; HLA-C*07:06; BSND; ENSG00000162399; TAA
LLAPEMGQPK

SEQ ID NO: 12445 - protein, 11 aa, Homo sapiens
  misc_feature: Table A; Target 12445; HLA-A*02:01; BSND; ENSG00000162399; TAA
LLAPEMGQPKL

SEQ ID NO: 12446 - protein, 11 aa, Homo sapiens
  misc_feature: Table A; Target 12446; HLA-A*02:04; BSND; ENSG00000162399; TAA
LLAPEMGQPKL

SEQ ID NO: 12447 - protein, 11 aa, Homo sapiens
  misc_feature: Table A; Target 12447; HLA-A*02:07; BSND; ENSG00000162399; TAA
LLAPEMGQPKL

SEQ ID NO: 12448 - protein, 10 aa, Homo sapiens
  misc_feature: Table A; Target 12448; HLA-A*01:01; BSND; ENSG00000162399; TAA
LLENGLAAEM

SEQ ID NO: 12449 - protein, 10 aa, Homo sapiens
  misc_feature: Table A; Target 12449; HLA-C*05:01; BSND; ENSG00000162399; TAA
LLENGLAAEM

SEQ ID NO: 12450 - protein, 10 aa, Homo sapiens
  misc_feature: Table A; Target 12450; HLA-C*07:01; BSND; ENSG00000162399; TAA
LLENGLAAEM

SEQ ID NO: 12451 - protein, 10 aa, Homo sapiens
  misc_feature: Table A; Target 12451; HLA-C*07:02; BSND; ENSG00000162399; TAA
LLENGLAAEM

SEQ ID NO: 12452 - protein, 10 aa, Homo sapiens
  misc_feature: Table A; Target 12452; HLA-C*07:04; BSND; ENSG00000162399; TAA
LLENGLAAEM

SEQ ID NO: 12453 - protein, 9 aa, Homo sapiens
  misc_feature: Table A; Target 12453; HLA-A*02:07; BSND; ENSG00000162399; TAA
LLPDKELGF

SEQ ID NO: 12454 - protein, 9 aa, Homo sapiens
  misc_feature: Table A; Target 12454; HLA-A*24:02; BSND; ENSG00000162399; TAA
LLPDKELGF

SEQ ID NO: 12455 - protein, 9 aa, Homo sapiens
  misc_feature: Table A; Target 12455; HLA-A*29:02; BSND; ENSG00000162399; TAA
LLPDKELGF

SEQ ID NO: 12456 - protein, 10 aa, Homo sapiens
  misc_feature: Table A; Target 12456; HLA-A*01:01; BSND; ENSG00000162399; TAA
LMSHDRPQVY

SEQ ID NO: 12457 - protein, 10 aa, Homo sapiens
  misc_feature: Table A; Target 12457; HLA-A*29:02; BSND; ENSG00000162399; TAA
LMSHDRPQVY

SEQ ID NO: 12458 - protein, 10 aa, Homo sapiens
  misc_feature: Table A; Target 12458; HLA-A*30:02; BSND; ENSG00000162399; TAA
LMSHDRPQVY

SEQ ID NO: 12459 - protein, 9 aa, Homo sapiens
  misc_feature: Table A; Target 12459; HLA-B*07:02; BSND; ENSG00000162399; TAA
LPDFSHIQM

SEQ ID NO: 12460 - protein, 9 aa, Homo sapiens
  misc_feature: Table A; Target 12460; HLA-B*35:01; BSND; ENSG00000162399; TAA
LPDFSHIQM

SEQ ID NO: 12461 - protein, 9 aa, Homo sapiens
  misc_feature: Table A; Target 12461; HLA-B*35:03; BSND; ENSG00000162399; TAA
LPDFSHIQM

SEQ ID NO: 12462 - protein, 9 aa, Homo sapiens
  misc_feature: Table A; Target 12462; HLA-B*38:01; BSND; ENSG00000162399; TAA
LPDFSHIQM

SEQ ID NO: 12463 - protein, 9 aa, Homo sapiens
  misc_feature: Table A; Target 12463; HLA-B*51:01; BSND; ENSG00000162399; TAA
LPDFSHIQM

SEQ ID NO: 12464 - protein, 9 aa, Homo sapiens
  misc_feature: Table A; Target 12464; HLA-B*54:01; BSND; ENSG00000162399; TAA
LPDFSHIQM

SEQ ID NO: 12465 - protein, 9 aa, Homo sapiens
  misc_feature: Table A; Target 12465; HLA-B*55:01; BSND; ENSG00000162399; TAA
LPDFSHIQM

SEQ ID NO: 12466 - protein, 9 aa, Homo sapiens
  misc_feature: Table A; Target 12466; HLA-C*03:03; BSND; ENSG00000162399; TAA
LPDFSHIQM

SEQ ID NO: 12467 - protein, 9 aa, Homo sapiens
  misc_feature: Table A; Target 12467; HLA-C*04:01; BSND; ENSG00000162399; TAA
LPDFSHIQM

SEQ ID NO: 12468 - protein, 9 aa, Homo sapiens
  misc_feature: Table A; Target 12468; HLA-C*05:01; BSND; ENSG00000162399; TAA
LPDFSHIQM

SEQ ID NO: 12469 - protein, 9 aa, Homo sapiens
  misc_feature: Table A; Target 12469; HLA-C*07:02; BSND; ENSG00000162399; TAA
LPDFSHIQM

SEQ ID NO: 12470 - protein, 11 aa, Homo sapiens
  misc_feature: Table A; Target 12470; HLA-B*54:01; BSND; ENSG00000162399; TAA
LPDFSHIQMKV

SEQ ID NO: 12471 - protein, 8 aa, Homo sapiens
  misc_feature: Table A; Target 12471; HLA-B*35:03; BSND; ENSG00000162399; TAA
LPDGAGDL

SEQ ID NO: 12472 - protein, 8 aa, Homo sapiens
  misc_feature: Table A; Target 12472; HLA-C*05:01; BSND; ENSG00000162399; TAA
LPDGAGDL

SEQ ID NO: 12473 - protein, 9 aa, Homo sapiens
  misc_feature: Table A; Target 12473; HLA-B*07:02; BSND; ENSG00000162399; TAA
LPDGAGDLL

SEQ ID NO: 12474 - protein, 9 aa, Homo sapiens
  misc_feature: Table A; Target 12474; HLA-B*35:01; BSND; ENSG00000162399; TAA
LPDGAGDLL

SEQ ID NO: 12475 - protein, 9 aa, Homo sapiens
  misc_feature: Table A; Target 12475; HLA-B*35:03; BSND; ENSG00000162399; TAA
LPDGAGDLL

SEQ ID NO: 12476 - protein, 9 aa, Homo sapiens
  misc_feature: Table A; Target 12476; HLA-B*38:01; BSND; ENSG00000162399; TAA
LPDGAGDLL

SEQ ID NO: 12477 - protein, 9 aa, Homo sapiens
  misc_feature: Table A; Target 12477; HLA-B*39:01; BSND; ENSG00000162399; TAA
LPDGAGDLL

SEQ ID NO: 12478 - protein, 9 aa, Homo sapiens
  misc_feature: Table A; Target 12478; HLA-B*55:01; BSND; ENSG00000162399; TAA
LPDGAGDLL

SEQ ID NO: 12479 - protein, 9 aa, Homo sapiens
  misc_feature: Table A; Target 12479; HLA-C*03:03; BSND; ENSG00000162399; TAA
LPDGAGDLL

SEQ ID NO: 12480 - protein, 9 aa, Homo sapiens
  misc_feature: Table A; Target 12480; HLA-C*04:01; BSND; ENSG00000162399; TAA
LPDGAGDLL

SEQ ID NO: 12481 - protein, 9 aa, Homo sapiens
  misc_feature: Table A; Target 12481; HLA-C*05:01; BSND; ENSG00000162399; TAA
LPDGAGDLL

SEQ ID NO: 12482 - protein, 9 aa, Homo sapiens
  misc_feature: Table A; Target 12482; HLA-C*07:02; BSND; ENSG00000162399; TAA
LPDGAGDLL

SEQ ID NO: 12483 - protein, 9 aa, Homo sapiens
  misc_feature: Table A; Target 12483; HLA-C*07:04; BSND; ENSG00000162399; TAA
LPDGAGDLL

SEQ ID NO: 12484 - protein, 8 aa, Homo sapiens
  misc_feature: Table A; Target 12484; HLA-B*55:01; BSND; ENSG00000162399; TAA
LPDKELGF

SEQ ID NO: 12485 - protein, 8 aa, Homo sapiens
  misc_feature: Table A; Target 12485; HLA-C*05:01; BSND; ENSG00000162399; TAA
LPDKELGF

SEQ ID NO: 12486 - protein, 8 aa, Homo sapiens
  misc_feature: Table A; Target 12486; HLA-C*01:02; BSND; ENSG00000162399; TAA
LSPKAMGL

SEQ ID NO: 12487 - protein, 10 aa, Homo sapiens
  misc_feature: Table A; Target 12487; HLA-C*07:01; BSND; ENSG00000162399; TAA
MDSSEGSSPN

SEQ ID NO: 12488 - protein, 11 aa, Homo sapiens
  misc_feature: Table A; Target 12488; HLA-B*39:01; BSND; ENSG00000162399; TAA
MDSSEGSSPNA

SEQ ID NO: 12489 - protein, 8 aa, Homo sapiens
  misc_feature: Table A; Target 12489; HLA-B*18:01; BSND; ENSG00000162399; TAA
MEAAVVIH

SEQ ID NO: 12490 - protein, 8 aa, Homo sapiens
  misc_feature: Table A; Target 12490; HLA-C*07:04; BSND; ENSG00000162399; TAA
MEAAVVIH

SEQ ID NO: 12491 - protein, 9 aa, Homo sapiens
  misc_feature: Table A; Target 12491; HLA-A*01:01; BSND; ENSG00000162399; TAA
MEAAVVIHK

SEQ ID NO: 12492 - protein, 9 aa, Homo sapiens
  misc_feature: Table A; Target 12492; HLA-A*03:01; BSND; ENSG00000162399; TAA
MEAAVVIHK

SEQ ID NO: 12493 - protein, 9 aa, Homo sapiens
  misc_feature: Table A; Target 12493; HLA-A*03:02; BSND; ENSG00000162399; TAA
MEAAVVIHK

SEQ ID NO: 12494 - protein, 9 aa, Homo sapiens
  misc_feature: Table A; Target 12494; HLA-A*11:01; BSND; ENSG00000162399; TAA
MEAAVVIHK

SEQ ID NO: 12495 - protein, 9 aa, Homo sapiens
  misc_feature: Table A; Target 12495; HLA-A*33:01; BSND; ENSG00000162399; TAA
MEAAVVIHK

SEQ ID NO: 12496 - protein, 9 aa, Homo sapiens
  misc_feature: Table A; Target 12496; HLA-A*33:03; BSND; ENSG00000162399; TAA
MEAAVVIHK

SEQ ID NO: 12497 - protein, 9 aa, Homo sapiens
  misc_feature: Table A; Target 12497; HLA-A*68:01; BSND; ENSG00000162399; TAA
MEAAVVIHK

SEQ ID NO: 12498 - protein, 9 aa, Homo sapiens
  misc_feature: Table A; Target 12498; HLA-A*68:02; BSND; ENSG00000162399; TAA
MEAAVVIHK

SEQ ID NO: 12499 - protein, 9 aa, Homo sapiens
  misc_feature: Table A; Target 12499; HLA-B*07:02; BSND; ENSG00000162399; TAA
MEAAVVIHK

SEQ ID NO: 12500 - protein, 9 aa, Homo sapiens
  misc_feature: Table A; Target 12500; HLA-B*27:02; BSND; ENSG00000162399; TAA
MEAAVVIHK

SEQ ID NO: 12501 - protein, 9 aa, Homo sapiens
  misc_feature: Table A; Target 12501; HLA-B*27:05; BSND; ENSG00000162399; TAA
MEAAVVIHK

SEQ ID NO: 12502 - protein, 9 aa, Homo sapiens
  misc_feature: Table A; Target 12502; HLA-B*40:02; BSND; ENSG00000162399; TAA
MEAAVVIHK

SEQ ID NO: 12503 - protein, 9 aa, Homo sapiens
  misc_feature: Table A; Target 12503; HLA-B*44:02; BSND; ENSG00000162399; TAA
MEAAVVIHK

SEQ ID NO: 12504 - protein, 9 aa, Homo sapiens
  misc_feature: Table A; Target 12504; HLA-B*44:03; BSND; ENSG00000162399; TAA
MEAAVVIHK

SEQ ID NO: 12505 - protein, 9 aa, Homo sapiens
  misc_feature: Table A; Target 12505; HLA-B*49:01; BSND; ENSG00000162399; TAA
MEAAVVIHK

SEQ ID NO: 12506 - protein, 9 aa, Homo sapiens
  misc_feature: Table A; Target 12506; HLA-C*04:01; BSND; ENSG00000162399; TAA
MEAAVVIHK

SEQ ID NO: 12507 - protein, 9 aa, Homo sapiens
  misc_feature: Table A; Target 12507; HLA-C*07:01; BSND; ENSG00000162399; TAA
MEAAVVIHK

SEQ ID NO: 12508 - protein, 9 aa, Homo sapiens
  misc_feature: Table A; Target 12508; HLA-C*07:04; BSND; ENSG00000162399; TAA
MEAAVVIHK

SEQ ID NO: 12509 - protein, 9 aa, Homo sapiens
  misc_feature: Table A; Target 12509; HLA-C*07:06; BSND; ENSG00000162399; TAA
MEAAVVIHK

SEQ ID NO: 12510 - protein, 10 aa, Homo sapiens
  misc_feature: Table A; Target 12510; HLA-B*40:02; BSND; ENSG00000162399; TAA
MEAAVVIHKG

SEQ ID NO: 12511 - protein, 10 aa, Homo sapiens
  misc_feature: Table A; Target 12511; HLA-B*44:02; BSND; ENSG00000162399; TAA
MEAAVVIHKG

SEQ ID NO: 12512 - protein, 10 aa, Homo sapiens
  misc_feature: Table A; Target 12512; HLA-B*44:03; BSND; ENSG00000162399; TAA
MEAAVVIHKG

SEQ ID NO: 12513 - protein, 10 aa, Homo sapiens
  misc_feature: Table A; Target 12513; HLA-B*49:01; BSND; ENSG00000162399; TAA
MEAAVVIHKG

SEQ ID NO: 12514 - protein, 10 aa, Homo sapiens
  misc_feature: Table A; Target 12514; HLA-C*04:01; BSND; ENSG00000162399; TAA
MEAAVVIHKG

SEQ ID NO: 12515 - protein, 10 aa, Homo sapiens
  misc_feature: Table A; Target 12515; HLA-B*54:01; BSND; ENSG00000162399; TAA
MGLLENGLAA

SEQ ID NO: 12516 - protein, 10 aa, Homo sapiens
  misc_feature: Table A; Target 12516; HLA-A*30:02; BSND; ENSG00000162399; TAA
MKSPSPQPPY

SEQ ID NO: 12517 - protein, 10 aa, Homo sapiens
  misc_feature: Table A; Target 12517; HLA-B*15:03; BSND; ENSG00000162399; TAA
MKSPSPQPPY

SEQ ID NO: 12518 - protein, 8 aa, Homo sapiens
  misc_feature: Table A; Target 12518; HLA-C*06:02; BSND; ENSG00000162399; TAA
MSHDRPQV

SEQ ID NO: 12519 - protein, 8 aa, Homo sapiens
  misc_feature: Table A; Target 12519; HLA-C*16:01; BSND; ENSG00000162399; TAA
MSHDRPQV

SEQ ID NO: 12520 - protein, 9 aa, Homo sapiens
  misc_feature: Table A; Target 12520; HLA-A*01:01; BSND; ENSG00000162399; TAA
MSHDRPQVY

SEQ ID NO: 12521 - protein, 9 aa, Homo sapiens
  misc_feature: Table A; Target 12521; HLA-A*25:01; BSND; ENSG00000162399; TAA
MSHDRPQVY

SEQ ID NO: 12522 - protein, 9 aa, Homo sapiens
  misc_feature: Table A; Target 12522; HLA-A*26:01; BSND; ENSG00000162399; TAA
MSHDRPQVY

SEQ ID NO: 12523 - protein, 9 aa, Homo sapiens
  misc_feature: Table A; Target 12523; HLA-A*29:02; BSND; ENSG00000162399; TAA
MSHDRPQVY

SEQ ID NO: 12524 - protein, 9 aa, Homo sapiens
  misc_feature: Table A; Target 12524; HLA-A*30:02; BSND; ENSG00000162399; TAA
MSHDRPQVY

SEQ ID NO: 12525 - protein, 9 aa, Homo sapiens
  misc_feature: Table A; Target 12525; HLA-A*32:01; BSND; ENSG00000162399; TAA
MSHDRPQVY

SEQ ID NO: 12526 - protein, 9 aa, Homo sapiens
  misc_feature: Table A; Target 12526; HLA-B*15:01; BSND; ENSG00000162399; TAA
MSHDRPQVY

SEQ ID NO: 12527 - protein, 9 aa, Homo sapiens
  misc_feature: Table A; Target 12527; HLA-B*15:03; BSND; ENSG00000162399; TAA
MSHDRPQVY

SEQ ID NO: 12528 - protein, 9 aa, Homo sapiens
  misc_feature: Table A; Target 12528; HLA-B*18:01; BSND; ENSG00000162399; TAA
MSHDRPQVY

SEQ ID NO: 12529 - protein, 9 aa, Homo sapiens
  misc_feature: Table A; Target 12529; HLA-B*35:01; BSND; ENSG00000162399; TAA
MSHDRPQVY

SEQ ID NO: 12530 - protein, 9 aa, Homo sapiens
  misc_feature: Table A; Target 12530; HLA-B*44:02; BSND; ENSG00000162399; TAA
MSHDRPQVY

SEQ ID NO: 12531 - protein, 9 aa, Homo sapiens
  misc_feature: Table A; Target 12531; HLA-B*44:03; BSND; ENSG00000162399; TAA
MSHDRPQVY

SEQ ID NO: 12532 - protein, 9 aa, Homo sapiens
  misc_feature: Table A; Target 12532; HLA-B*46:01; BSND; ENSG00000162399; TAA
MSHDRPQVY

SEQ ID NO: 12533 - protein, 9 aa, Homo sapiens
  misc_feature: Table A; Target 12533; HLA-B*55:01; BSND; ENSG00000162399; TAA
MSHDRPQVY

SEQ ID NO: 12534 - protein, 9 aa, Homo sapiens
  misc_feature: Table A; Target 12534; HLA-B*57:01; BSND; ENSG00000162399; TAA
MSHDRPQVY

SEQ ID NO: 12535 - protein, 9 aa, Homo sapiens
  misc_feature: Table A; Target 12535; HLA-B*58:01; BSND; ENSG00000162399; TAA
MSHDRPQVY

SEQ ID NO: 12536 - protein, 9 aa, Homo sapiens
  misc_feature: Table A; Target 12536; HLA-C*02:02; BSND; ENSG00000162399; TAA
MSHDRPQVY

SEQ ID NO: 12537 - protein, 9 aa, Homo sapiens
  misc_feature: Table A; Target 12537; HLA-C*03:04; BSND; ENSG00000162399; TAA
MSHDRPQVY

SEQ ID NO: 12538 - protein, 9 aa, Homo sapiens
  misc_feature: Table A; Target 12538; HLA-C*07:04; BSND; ENSG00000162399; TAA
MSHDRPQVY

SEQ ID NO: 12539 - protein, 9 aa, Homo sapiens
  misc_feature: Table A; Target 12539; HLA-C*12:03; BSND; ENSG00000162399; TAA
MSHDRPQVY

SEQ ID NO: 12540 - protein, 9 aa, Homo sapiens
  misc_feature: Table A; Target 12540; HLA-C*16:01; BSND; ENSG00000162399; TAA
MSHDRPQVY

SEQ ID NO: 12541 - protein, 9 aa, Homo sapiens
  misc_feature: Table A; Target 12541; HLA-C*16:02; BSND; ENSG00000162399; TAA
MSHDRPQVY

SEQ ID NO: 12542 - protein, 9 aa, Homo sapiens
  misc_feature: Table A; Target 12542; HLA-C*16:04; BSND; ENSG00000162399; TAA
MSHDRPQVY

SEQ ID NO: 12543 - protein, 10 aa, Homo sapiens
  misc_feature: Table A; Target 12543; HLA-B*57:01; BSND; ENSG00000162399; TAA
MSYSEDHRSL

SEQ ID NO: 12544 - protein, 10 aa, Homo sapiens
  misc_feature: Table A; Target 12544; HLA-C*03:04; BSND; ENSG00000162399; TAA
MSYSEDHRSL

SEQ ID NO: 12545 - protein, 10 aa, Homo sapiens
  misc_feature: Table A; Target 12545; HLA-A*25:01; BSND; ENSG00000162399; TAA
MVIGGIIWSM

SEQ ID NO: 12546 - protein, 10 aa, Homo sapiens
  misc_feature: Table A; Target 12546; HLA-A*26:01; BSND; ENSG00000162399; TAA
MVIGGIIWSM

SEQ ID NO: 12547 - protein, 10 aa, Homo sapiens
  misc_feature: Table A; Target 12547; HLA-A*68:02; BSND; ENSG00000162399; TAA
MVIGGIIWSM

SEQ ID NO: 12548 - protein, 10 aa, Homo sapiens
  misc_feature: Table A; Target 12548; HLA-B*35:01; BSND; ENSG00000162399; TAA
MVIGGIIWSM

SEQ ID NO: 12549 - protein, 10 aa, Homo sapiens
  misc_feature: Table A; Target 12549; HLA-B*35:03; BSND; ENSG00000162399; TAA
MVIGGIIWSM

SEQ ID NO: 12550 - protein, 10 aa, Homo sapiens
  misc_feature: Table A; Target 12550; HLA-B*54:01; BSND; ENSG00000162399; TAA
MVIGGIIWSM

SEQ ID NO: 12551 - protein, 9 aa, Homo sapiens
  misc_feature: Table A; Target 12551; HLA-C*16:01; BSND; ENSG00000162399; TAA
NASPHDREE

SEQ ID NO: 12552 - protein, 8 aa, Homo sapiens
  misc_feature: Table A; Target 12552; HLA-B*37:01; BSND; ENSG00000162399; TAA
PDFSHIQM

SEQ ID NO: 12553 - protein, 8 aa, Homo sapiens
  misc_feature: Table A; Target 12553; HLA-C*04:01; BSND; ENSG00000162399; TAA
PDFSHIQM

SEQ ID NO: 12554 - protein, 8 aa, Homo sapiens
  misc_feature: Table A; Target 12554; HLA-C*07:01; BSND; ENSG00000162399; TAA
PDFSHIQM

SEQ ID NO: 12555 - protein, 8 aa, Homo sapiens
  misc_feature: Table A; Target 12555; HLA-B*40:02; BSND; ENSG00000162399; TAA
PEMGQPKL

SEQ ID NO: 12556 - protein, 8 aa, Homo sapiens
  misc_feature: Table A; Target 12556; HLA-C*04:01; BSND; ENSG00000162399; TAA
PEMGQPKL

SEQ ID NO: 12557 - protein, 8 aa, Homo sapiens
  misc_feature: Table A; Target 12557; HLA-C*06:02; BSND; ENSG00000162399; TAA
PEMGQPKL

SEQ ID NO: 12558 - protein, 8 aa, Homo sapiens
  misc_feature: Table A; Target 12558; HLA-C*07:02; BSND; ENSG00000162399; TAA
PEMGQPKL

SEQ ID NO: 12559 - protein, 8 aa, Homo sapiens
  misc_feature: Table A; Target 12559; HLA-C*12:03; BSND; ENSG00000162399; TAA
PEMGQPKL

SEQ ID NO: 12560 - protein, 10 aa, Homo sapiens
  misc_feature: Table A; Target 12560; HLA-C*07:02; BSND; ENSG00000162399; TAA
PEMGQPKLGT

SEQ ID NO: 12561 - protein, 10 aa, Homo sapiens
  misc_feature: Table A; Target 12561; HLA-A*23:01; BSND; ENSG00000162399; TAA
PQGPAPLASF

SEQ ID NO: 12562 - protein, 10 aa, Homo sapiens
  misc_feature: Table A; Target 12562; HLA-A*24:02; BSND; ENSG00000162399; TAA
PQGPAPLASF

SEQ ID NO: 12563 - protein, 10 aa, Homo sapiens
  misc_feature: Table A; Target 12563; HLA-A*30:02; BSND; ENSG00000162399; TAA
PQGPAPLASF

SEQ ID NO: 12564 - protein, 10 aa, Homo sapiens
  misc_feature: Table A; Target 12564; HLA-B*07:02; BSND; ENSG00000162399; TAA
PQGPAPLASF

SEQ ID NO: 12565 - protein, 10 aa, Homo sapiens
  misc_feature: Table A; Target 12565; HLA-B*15:01; BSND; ENSG00000162399; TAA
PQGPAPLASF

SEQ ID NO: 12566 - protein, 10 aa, Homo sapiens
  misc_feature: Table A; Target 12566; HLA-B*15:03; BSND; ENSG00000162399; TAA
PQGPAPLASF

SEQ ID NO: 12567 - protein, 10 aa, Homo sapiens
  misc_feature: Table A; Target 12567; HLA-B*38:01; BSND; ENSG00000162399; TAA
PQGPAPLASF

SEQ ID NO: 12568 - protein, 10 aa, Homo sapiens
  misc_feature: Table A; Target 12568; HLA-C*07:04; BSND; ENSG00000162399; TAA
PQGPAPLASF

SEQ ID NO: 12569 - protein, 9 aa, Homo sapiens
  misc_feature: Table A; Target 12569; HLA-A*24:02; BSND; ENSG00000162399; TAA
PQPPYVRLW

SEQ ID NO: 12570 - protein, 8 aa, Homo sapiens
  misc_feature: Table A; Target 12570; HLA-B*15:01; BSND; ENSG00000162399; TAA
PQVYGTFY

SEQ ID NO: 12571 - protein, 8 aa, Homo sapiens
  misc_feature: Table A; Target 12571; HLA-B*15:03; BSND; ENSG00000162399; TAA
PQVYGTFY

SEQ ID NO: 12572 - protein, 8 aa, Homo sapiens
  misc_feature: Table A; Target 12572; HLA-C*07:04; BSND; ENSG00000162399; TAA
PQVYGTFY

SEQ ID NO: 12573 - protein, 9 aa, Homo sapiens
  misc_feature: Table A; Target 12573; HLA-B*51:01; BSND; ENSG00000162399; TAA
QAWMEAAVV

SEQ ID NO: 12574 - protein, 8 aa, Homo sapiens
  misc_feature: Table A; Target 12574; HLA-B*08:01; BSND; ENSG00000162399; TAA
QCYPKITF

SEQ ID NO: 12575 - protein, 9 aa, Homo sapiens
  misc_feature: Table A; Target 12575; HLA-A*02:03; BSND; ENSG00000162399; TAA
QCYPKITFV

SEQ ID NO: 12576 - protein, 9 aa, Homo sapiens
  misc_feature: Table A; Target 12576; HLA-B*13:02; BSND; ENSG00000162399; TAA
QCYPKITFV

SEQ ID NO: 12577 - protein, 10 aa, Homo sapiens
  misc_feature: Table A; Target 12577; HLA-B*40:01; BSND; ENSG00000162399; TAA
QEGQQWEIAL

SEQ ID NO: 12578 - protein, 9 aa, Homo sapiens
  misc_feature: Table A; Target 12578; HLA-A*24:02; BSND; ENSG00000162399; TAA
QGPAPLASF

SEQ ID NO: 12579 - protein, 9 aa, Homo sapiens
  misc_feature: Table A; Target 12579; HLA-A*25:01; BSND; ENSG00000162399; TAA
QGPAPLASF

SEQ ID NO: 12580 - protein, 9 aa, Homo sapiens
  misc_feature: Table A; Target 12580; HLA-B*15:03; BSND; ENSG00000162399; TAA
QGPAPLASF

SEQ ID NO: 12581 - protein, 9 aa, Homo sapiens
  misc_feature: Table A; Target 12581; HLA-B*46:01; BSND; ENSG00000162399; TAA
QGPAPLASF

SEQ ID NO: 12582 - protein, 9 aa, Homo sapiens
  misc_feature: Table A; Target 12582; HLA-B*51:01; BSND; ENSG00000162399; TAA
QGPAPLASF

SEQ ID NO: 12583 - protein, 9 aa, Homo sapiens
  misc_feature: Table A; Target 12583; HLA-C*01:02; BSND; ENSG00000162399; TAA
QGPAPLASF

SEQ ID NO: 12584 - protein, 9 aa, Homo sapiens
  misc_feature: Table A; Target 12584; HLA-C*14:02; BSND; ENSG00000162399; TAA
QGPAPLASF

SEQ ID NO: 12585 - protein, 9 aa, Homo sapiens
  misc_feature: Table A; Target 12585; HLA-A*24:02; BSND; ENSG00000162399; TAA
QSLPDFSHI

SEQ ID NO: 12586 - protein, 9 aa, Homo sapiens
  misc_feature: Table A; Target 12586; HLA-B*57:01; BSND; ENSG00000162399; TAA
QSLPDFSHI

SEQ ID NO: 12587 - protein, 9 aa, Homo sapiens
  misc_feature: Table A; Target 12587; HLA-A*02:01; BSND; ENSG00000162399; TAA
QSWPGPLAC

SEQ ID NO: 12588 - protein, 9 aa, Homo sapiens
  misc_feature: Table A; Target 12588; HLA-B*56:01; BSND; ENSG00000162399; TAA
QSWPGPLAC

SEQ ID NO: 12589 - protein, 9 aa, Homo sapiens
  misc_feature: Table A; Target 12589; HLA-B*35:01; BSND; ENSG00000162399; TAA
QVYGTFYAM

SEQ ID NO: 12590 - protein, 9 aa, Homo sapiens
  misc_feature: Table A; Target 12590; HLA-A*02:04; BSND; ENSG00000162399; TAA
RIGFIVLGL

SEQ ID NO: 12591 - protein, 8 aa, Homo sapiens
  misc_feature: Table A; Target 12591; HLA-B*07:02; BSND; ENSG00000162399; TAA
RPQVYGTF

SEQ ID NO: 12592 - protein, 8 aa, Homo sapiens
  misc_feature: Table A; Target 12592; HLA-C*07:02; BSND; ENSG00000162399; TAA
RPQVYGTF

SEQ ID NO: 12593 - protein, 9 aa, Homo sapiens
  misc_feature: Table A; Target 12593; HLA-A*29:02; BSND; ENSG00000162399; TAA
RPQVYGTFY

SEQ ID NO: 12594 - protein, 9 aa, Homo sapiens
  misc_feature: Table A; Target 12594; HLA-A*30:02; BSND; ENSG00000162399; TAA
RPQVYGTFY

SEQ ID NO: 12595 - protein, 9 aa, Homo sapiens
  misc_feature: Table A; Target 12595; HLA-B*07:02; BSND; ENSG00000162399; TAA
RPQVYGTFY

SEQ ID NO: 12596 - protein, 9 aa, Homo sapiens
  misc_feature: Table A; Target 12596; HLA-B*15:01; BSND; ENSG00000162399; TAA
RPQVYGTFY

SEQ ID NO: 12597 - protein, 9 aa, Homo sapiens
  misc_feature: Table A; Target 12597; HLA-B*35:01; BSND; ENSG00000162399; TAA
RPQVYGTFY

SEQ ID NO: 12598 - protein, 9 aa, Homo sapiens
  misc_feature: Table A; Target 12598; HLA-B*55:01; BSND; ENSG00000162399; TAA
RPQVYGTFY

SEQ ID NO: 12599 - protein, 8 aa, Homo sapiens
  misc_feature: Table A; Target 12599; HLA-B*58:01; BSND; ENSG00000162399; TAA
RSLLAPEM

SEQ ID NO: 12600 - protein, 8 aa, Homo sapiens
  misc_feature: Table A; Target 12600; HLA-C*16:01; BSND; ENSG00000162399; TAA
RSLLAPEM

SEQ ID NO: 12601 - protein, 10 aa, Homo sapiens
  misc_feature: Table A; Target 12601; HLA-A*03:01; BSND; ENSG00000162399; TAA
SDFQGILSPK

SEQ ID NO: 12602 - protein, 10 aa, Homo sapiens
  misc_feature: Table A; Target 12602; HLA-A*03:02; BSND; ENSG00000162399; TAA
SDFQGILSPK

SEQ ID NO: 12603 - protein, 10 aa, Homo sapiens
  misc_feature: Table A; Target 12603; HLA-A*11:01; BSND; ENSG00000162399; TAA
SDFQGILSPK

SEQ ID NO: 12604 - protein, 10 aa, Homo sapiens
  misc_feature: Table A; Target 12604; HLA-B*27:02; BSND; ENSG00000162399; TAA
SDFQGILSPK

SEQ ID NO: 12605 - protein, 8 aa, Homo sapiens
  misc_feature: Table A; Target 12605; HLA-B*37:01; BSND; ENSG00000162399; TAA
SEDHRSLL

SEQ ID NO: 12606 - protein, 8 aa, Homo sapiens
  misc_feature: Table A; Target 12606; HLA-B*40:01; BSND; ENSG00000162399; TAA
SEDHRSLL

SEQ ID NO: 12607 - protein, 9 aa, Homo sapiens
  misc_feature: Table A; Target 12607; HLA-B*49:01; BSND; ENSG00000162399; TAA
SEDHRSLLA

SEQ ID NO: 12608 - protein, 11 aa, Homo sapiens
  misc_feature: Table A; Target 12608; HLA-B*44:02; BSND; ENSG00000162399; TAA
SEGERRLTQSW

SEQ ID NO: 12609 - protein, 11 aa, Homo sapiens
  misc_feature: Table A; Target 12609; HLA-B*44:03; BSND; ENSG00000162399; TAA
SEGERRLTQSW

SEQ ID NO: 12610 - protein, 8 aa, Homo sapiens
  misc_feature: Table A; Target 12610; HLA-B*38:01; BSND; ENSG00000162399; TAA
SHDRPQVY

SEQ ID NO: 12611 - protein, 8 aa, Homo sapiens
  misc_feature: Table A; Target 12611; HLA-B*39:01; BSND; ENSG00000162399; TAA
SHDRPQVY

SEQ ID NO: 12612 - protein, 11 aa, Homo sapiens
  misc_feature: Table A; Target 12612; HLA-B*38:01; BSND; ENSG00000162399; TAA
SHDRPQVYGTF

SEQ ID NO: 12613 - protein, 11 aa, Homo sapiens
  misc_feature: Table A; Target 12613; HLA-A*03:01; BSND; ENSG00000162399; TAA
SLLAPEMGQPK

SEQ ID NO: 12614 - protein, 11 aa, Homo sapiens
  misc_feature: Table A; Target 12614; HLA-A*03:02; BSND; ENSG00000162399; TAA
SLLAPEMGQPK

SEQ ID NO: 12615 - protein, 11 aa, Homo sapiens
  misc_feature: Table A; Target 12615; HLA-A*11:01; BSND; ENSG00000162399; TAA
SLLAPEMGQPK

SEQ ID NO: 12616 - protein, 11 aa, Homo sapiens
  misc_feature: Table A; Target 12616; HLA-A*31:01; BSND; ENSG00000162399; TAA
SLLAPEMGQPK

SEQ ID NO: 12617 - protein, 11 aa, Homo sapiens
  misc_feature: Table A; Target 12617; HLA-B*27:02; BSND; ENSG00000162399; TAA
SLLAPEMGQPK

SEQ ID NO: 12618 - protein, 11 aa, Homo sapiens
  misc_feature: Table A; Target 12618; HLA-B*27:05; BSND; ENSG00000162399; TAA
SLLAPEMGQPK

SEQ ID NO: 12619 - protein, 11 aa, Homo sapiens
  misc_feature: Table A; Target 12619; HLA-C*06:02; BSND; ENSG00000162399; TAA
SLLAPEMGQPK

SEQ ID NO: 12620 - protein, 8 aa, Homo sapiens
  misc_feature: Table A; Target 12620; HLA-A*02:07; BSND; ENSG00000162399; TAA
SLPDFSHI

SEQ ID NO: 12621 - protein, 10 aa, Homo sapiens
  misc_feature: Table A; Target 12621; HLA-A*02:01; BSND; ENSG00000162399; TAA
SLPDFSHIQM

SEQ ID NO: 12622 - protein, 10 aa, Homo sapiens
  misc_feature: Table A; Target 12622; HLA-A*02:03; BSND; ENSG00000162399; TAA
SLPDFSHIQM

SEQ ID NO: 12623 - protein, 10 aa, Homo sapiens
  misc_feature: Table A; Target 12623; HLA-A*02:04; BSND; ENSG00000162399; TAA
SLPDFSHIQM

SEQ ID NO: 12624 - protein, 10 aa, Homo sapiens
  misc_feature: Table A; Target 12624; HLA-A*02:07; BSND; ENSG00000162399; TAA
SLPDFSHIQM

SEQ ID NO: 12625 - protein, 10 aa, Homo sapiens
  misc_feature: Table A; Target 12625; HLA-A*03:01; BSND; ENSG00000162399; TAA
SLPDFSHIQM

SEQ ID NO: 12626 - protein, 10 aa, Homo sapiens
  misc_feature: Table A; Target 12626; HLA-A*26:01; BSND; ENSG00000162399; TAA
SLPDFSHIQM

SEQ ID NO: 12627 - protein, 10 aa, Homo sapiens
  misc_feature: Table A; Target 12627; HLA-A*29:02; BSND; ENSG00000162399; TAA
SLPDFSHIQM

SEQ ID NO: 12628 - protein, 10 aa, Homo sapiens
  misc_feature: Table A; Target 12628; HLA-A*31:01; BSND; ENSG00000162399; TAA
SLPDFSHIQM

SEQ ID NO: 12629 - protein, 10 aa, Homo sapiens
  misc_feature: Table A; Target 12629; HLA-B*46:01; BSND; ENSG00000162399; TAA
SLPDFSHIQM

SEQ ID NO: 12630 - protein, 10 aa, Homo sapiens
  misc_feature: Table A; Target 12630; HLA-C*01:02; BSND; ENSG00000162399; TAA
SLPDFSHIQM

SEQ ID NO: 12631 - protein, 10 aa, Homo sapiens
  misc_feature: Table A; Target 12631; HLA-C*07:04; BSND; ENSG00000162399; TAA
SLPDFSHIQM

SEQ ID NO: 12632 - protein, 11 aa, Homo sapiens
  misc_feature: Table A; Target 12632; HLA-A*02:01; BSND; ENSG00000162399; TAA
SLPDFSHIQMK

SEQ ID NO: 12633 - protein, 11 aa, Homo sapiens
  misc_feature: Table A; Target 12633; HLA-A*02:03; BSND; ENSG00000162399; TAA
SLPDFSHIQMK

SEQ ID NO: 12634 - protein, 11 aa, Homo sapiens
  misc_feature: Table A; Target 12634; HLA-A*02:07; BSND; ENSG00000162399; TAA
SLPDFSHIQMK

SEQ ID NO: 12635 - protein, 11 aa, Homo sapiens
  misc_feature: Table A; Target 12635; HLA-A*03:01; BSND; ENSG00000162399; TAA
SLPDFSHIQMK

SEQ ID NO: 12636 - protein, 11 aa, Homo sapiens
  misc_feature: Table A; Target 12636; HLA-A*03:02; BSND; ENSG00000162399; TAA
SLPDFSHIQMK

SEQ ID NO: 12637 - protein, 11 aa, Homo sapiens
  misc_feature: Table A; Target 12637; HLA-A*11:01; BSND; ENSG00000162399; TAA
SLPDFSHIQMK

SEQ ID NO: 12638 - protein, 11 aa, Homo sapiens
  misc_feature: Table A; Target 12638; HLA-A*31:01; BSND; ENSG00000162399; TAA
SLPDFSHIQMK

SEQ ID NO: 12639 - protein, 8 aa, Homo sapiens
  misc_feature: Table A; Target 12639; HLA-B*07:02; BSND; ENSG00000162399; TAA
SPKAMGLL

SEQ ID NO: 12640 - protein, 8 aa, Homo sapiens
  misc_feature: Table A; Target 12640; HLA-B*08:01; BSND; ENSG00000162399; TAA
SPKAMGLL

SEQ ID NO: 12641 - protein, 8 aa, Homo sapiens
  misc_feature: Table A; Target 12641; HLA-C*07:02; BSND; ENSG00000162399; TAA
SPKAMGLL

SEQ ID NO: 12642 - protein, 9 aa, Homo sapiens
  misc_feature: Table A; Target 12642; HLA-A*33:03; BSND; ENSG00000162399; TAA
SPNASPHDR

SEQ ID NO: 12643 - protein, 9 aa, Homo sapiens
  misc_feature: Table A; Target 12643; HLA-C*07:06; BSND; ENSG00000162399; TAA
SPNASPHDR

SEQ ID NO: 12644 - protein, 8 aa, Homo sapiens
  misc_feature: Table A; Target 12644; HLA-B*56:01; BSND; ENSG00000162399; TAA
SPQPPYVR

SEQ ID NO: 12645 - protein, 9 aa, Homo sapiens
  misc_feature: Table A; Target 12645; HLA-B*07:02; BSND; ENSG00000162399; TAA
SPQPPYVRL

SEQ ID NO: 12646 - protein, 9 aa, Homo sapiens
  misc_feature: Table A; Target 12646; HLA-C*07:02; BSND; ENSG00000162399; TAA
SPQPPYVRL

SEQ ID NO: 12647 - protein, 10 aa, Homo sapiens
  misc_feature: Table A; Target 12647; HLA-B*44:02; BSND; ENSG00000162399; TAA
SPQPPYVRLW

SEQ ID NO: 12648 - protein, 10 aa, Homo sapiens
  misc_feature: Table A; Target 12648; HLA-B*57:01; BSND; ENSG00000162399; TAA
SPQPPYVRLW

SEQ ID NO: 12649 - protein, 9 aa, Homo sapiens
  misc_feature: Table A; Target 12649; HLA-B*56:01; BSND; ENSG00000162399; TAA
SPQQEPQGC

SEQ ID NO: 12650 - protein, 10 aa, Homo sapiens
  misc_feature: Table A; Target 12650; HLA-A*33:03; BSND; ENSG00000162399; TAA
SPQQEPQGCR

SEQ ID NO: 12651 - protein, 8 aa, Homo sapiens
  misc_feature: Table A; Target 12651; HLA-B*35:01; BSND; ENSG00000162399; TAA
SPSPQPPY

SEQ ID NO: 12652 - protein, 9 aa, Homo sapiens
  misc_feature: Table A; Target 12652; HLA-A*02:01; BSND; ENSG00000162399; TAA
SPSPQPPYV

SEQ ID NO: 12653 - protein, 9 aa, Homo sapiens
  misc_feature: Table A; Target 12653; HLA-B*07:02; BSND; ENSG00000162399; TAA
SPSPQPPYV

SEQ ID NO: 12654 - protein, 9 aa, Homo sapiens
  misc_feature: Table A; Target 12654; HLA-B*13:02; BSND; ENSG00000162399; TAA
SPSPQPPYV

SEQ ID NO: 12655 - protein, 9 aa, Homo sapiens
  misc_feature: Table A; Target 12655; HLA-B*35:03; BSND; ENSG00000162399; TAA
SPSPQPPYV

SEQ ID NO: 12656 - protein, 9 aa, Homo sapiens
  misc_feature: Table A; Target 12656; HLA-B*51:01; BSND; ENSG00000162399; TAA
SPSPQPPYV

SEQ ID NO: 12657 - protein, 9 aa, Homo sapiens
  misc_feature: Table A; Target 12657; HLA-B*54:01; BSND; ENSG00000162399; TAA
SPSPQPPYV

SEQ ID NO: 12658 - protein, 9 aa, Homo sapiens
  misc_feature: Table A; Target 12658; HLA-B*55:01; BSND; ENSG00000162399; TAA
SPSPQPPYV

SEQ ID NO: 12659 - protein, 9 aa, Homo sapiens
  misc_feature: Table A; Target 12659; HLA-B*56:01; BSND; ENSG00000162399; TAA
SPSPQPPYV

SEQ ID NO: 12660 - protein, 9 aa, Homo sapiens
  misc_feature: Table A; Target 12660; HLA-C*07:02; BSND; ENSG00000162399; TAA
SPSPQPPYV

SEQ ID NO: 12661 - protein, 9 aa, Homo sapiens
  misc_feature: Table A; Target 12661; HLA-C*12:03; BSND; ENSG00000162399; TAA
SPSPQPPYV

SEQ ID NO: 12662 - protein, 9 aa, Homo sapiens
  misc_feature: Table A; Target 12662; HLA-C*16:02; BSND; ENSG00000162399; TAA
SPSPQPPYV

SEQ ID NO: 12663 - protein, 10 aa, Homo sapiens
  misc_feature: Table A; Target 12663; HLA-A*68:01; BSND; ENSG00000162399; TAA
SPSPQPPYVR

SEQ ID NO: 12664 - protein, 10 aa, Homo sapiens
  misc_feature: Table A; Target 12664; HLA-B*56:01; BSND; ENSG00000162399; TAA
SPSPQPPYVR

SEQ ID NO: 12665 - protein, 10 aa, Homo sapiens
  misc_feature: Table A; Target 12665; HLA-C*07:06; BSND; ENSG00000162399; TAA
SPSPQPPYVR

SEQ ID NO: 12666 - protein, 11 aa, Homo sapiens
  misc_feature: Table A; Target 12666; HLA-C*07:02; BSND; ENSG00000162399; TAA
SPSPQPPYVRL

SEQ ID NO: 12667 - protein, 10 aa, Homo sapiens
  misc_feature: Table A; Target 12667; HLA-A*25:01; BSND; ENSG00000162399; TAA
SVMVIGGIIW

SEQ ID NO: 12668 - protein, 10 aa, Homo sapiens
  misc_feature: Table A; Target 12668; HLA-B*44:02; BSND; ENSG00000162399; TAA
SVMVIGGIIW

SEQ ID NO: 12669 - protein, 10 aa, Homo sapiens
  misc_feature: Table A; Target 12669; HLA-B*57:01; BSND; ENSG00000162399; TAA
SVMVIGGIIW

SEQ ID NO: 12670 - protein, 9 aa, Homo sapiens
  misc_feature: Table A; Target 12670; HLA-A*24:02; BSND; ENSG00000162399; TAA
SYSEDHRSL

SEQ ID NO: 12671 - protein, 9 aa, Homo sapiens
  misc_feature: Table A; Target 12671; HLA-C*01:02; BSND; ENSG00000162399; TAA
SYSEDHRSL

SEQ ID NO: 12672 - protein, 9 aa, Homo sapiens
  misc_feature: Table A; Target 12672; HLA-C*14:02; BSND; ENSG00000162399; TAA
SYSEDHRSL

SEQ ID NO: 12673 - protein, 9 aa, Homo sapiens
  misc_feature: Table A; Target 12673; HLA-C*16:01; BSND; ENSG00000162399; TAA
SYSEDHRSL

SEQ ID NO: 12674 - protein, 9 aa, Homo sapiens
  misc_feature: Table A; Target 12674; HLA-C*16:02; BSND; ENSG00000162399; TAA
SYSEDHRSL

SEQ ID NO: 12675 - protein, 10 aa, Homo sapiens
  misc_feature: Table A; Target 12675; HLA-A*24:02; BSND; ENSG00000162399; TAA
SYSEDHRSLL

SEQ ID NO: 12676 - protein, 9 aa, Homo sapiens
  misc_feature: Table A; Target 12676; HLA-A*23:01; BSND; ENSG00000162399; TAA
TFVPADSDF

SEQ ID NO: 12677 - protein, 9 aa, Homo sapiens
  misc_feature: Table A; Target 12677; HLA-C*04:01; BSND; ENSG00000162399; TAA
TFVPADSDF

SEQ ID NO: 12678 - protein, 9 aa, Homo sapiens
  misc_feature: Table A; Target 12678; HLA-C*14:02; BSND; ENSG00000162399; TAA
TFVPADSDF

SEQ ID NO: 12679 - protein, 9 aa, Homo sapiens
  misc_feature: Table A; Target 12679; HLA-B*15:03; BSND; ENSG00000162399; TAA
TFYAMGSVM

SEQ ID NO: 12680 - protein, 9 aa, Homo sapiens
  misc_feature: Table A; Target 12680; HLA-B*18:01; BSND; ENSG00000162399; TAA
TFYAMGSVM

SEQ ID NO: 12681 - protein, 9 aa, Homo sapiens
  misc_feature: Table A; Target 12681; HLA-B*35:01; BSND; ENSG00000162399; TAA
TFYAMGSVM

SEQ ID NO: 12682 - protein, 9 aa, Homo sapiens
  misc_feature: Table A; Target 12682; HLA-B*35:03; BSND; ENSG00000162399; TAA
TFYAMGSVM

SEQ ID NO: 12683 - protein, 9 aa, Homo sapiens
  misc_feature: Table A; Target 12683; HLA-B*39:01; BSND; ENSG00000162399; TAA
TFYAMGSVM

SEQ ID NO: 12684 - protein, 9 aa, Homo sapiens
  misc_feature: Table A; Target 12684; HLA-B*40:01; BSND; ENSG00000162399; TAA
TFYAMGSVM

SEQ ID NO: 12685 - protein, 9 aa, Homo sapiens
  misc_feature: Table A; Target 12685; HLA-B*46:01; BSND; ENSG00000162399; TAA
TFYAMGSVM

SEQ ID NO: 12686 - protein, 9 aa, Homo sapiens
  misc_feature: Table A; Target 12686; HLA-B*49:01; BSND; ENSG00000162399; TAA
TFYAMGSVM

SEQ ID NO: 12687 - protein, 9 aa, Homo sapiens
  misc_feature: Table A; Target 12687; HLA-C*01:02; BSND; ENSG00000162399; TAA
TFYAMGSVM

SEQ ID NO: 12688 - protein, 9 aa, Homo sapiens
  misc_feature: Table A; Target 12688; HLA-C*04:01; BSND; ENSG00000162399; TAA
TFYAMGSVM

SEQ ID NO: 12689 - protein, 9 aa, Homo sapiens
  misc_feature: Table A; Target 12689; HLA-C*12:03; BSND; ENSG00000162399; TAA
TFYAMGSVM

SEQ ID NO: 12690 - protein, 9 aa, Homo sapiens
  misc_feature: Table A; Target 12690; HLA-C*14:02; BSND; ENSG00000162399; TAA
TFYAMGSVM

SEQ ID NO: 12691 - protein, 10 aa, Homo sapiens
  misc_feature: Table A; Target 12691; HLA-C*04:01; BSND; ENSG00000162399; TAA
TFYAMGSVMV

SEQ ID NO: 12692 - protein, 9 aa, Homo sapiens
  misc_feature: Table A; Target 12692; HLA-B*13:02; BSND; ENSG00000162399; TAA
TQSWPGPLA

SEQ ID NO: 12693 - protein, 9 aa, Homo sapiens
  misc_feature: Table A; Target 12693; HLA-A*02:04; BSND; ENSG00000162399; TAA
VIGGIIWSM

SEQ ID NO: 12694 - protein, 9 aa, Homo sapiens
  misc_feature: Table A; Target 12694; HLA-A*02:07; BSND; ENSG00000162399; TAA
VIGGIIWSM

SEQ ID NO: 12695 - protein, 9 aa, Homo sapiens
  misc_feature: Table A; Target 12695; HLA-A*02:04; BSND; ENSG00000162399; TAA
VLGLFLLAL

SEQ ID NO: 12696 - protein, 9 aa, Homo sapiens
  misc_feature: Table A; Target 12696; HLA-B*57:01; BSND; ENSG00000162399; TAA
VMVIGGIIW

SEQ ID NO: 12697 - protein, 10 aa, Homo sapiens
  misc_feature: Table A; Target 12697; HLA-B*51:01; BSND; ENSG00000162399; TAA
VPADSDFQGI

SEQ ID NO: 12698 - protein, 11 aa, Homo sapiens
  misc_feature: Table A; Target 12698; HLA-B*07:02; BSND; ENSG00000162399; TAA
VPADSDFQGIL

SEQ ID NO: 12699 - protein, 11 aa, Homo sapiens
  misc_feature: Table A; Target 12699; HLA-B*35:01; BSND; ENSG00000162399; TAA
VPADSDFQGIL

SEQ ID NO: 12700 - protein, 11 aa, Homo sapiens
  misc_feature: Table A; Target 12700; HLA-B*35:03; BSND; ENSG00000162399; TAA
VPADSDFQGIL

SEQ ID NO: 12701 - protein, 11 aa, Homo sapiens
  misc_feature: Table A; Target 12701; HLA-C*07:02; BSND; ENSG00000162399; TAA
VPADSDFQGIL

SEQ ID NO: 12702 - protein, 9 aa, Homo sapiens
  misc_feature: Table A; Target 12702; HLA-B*13:02; BSND; ENSG00000162399; TAA
VQAWMEAAV

SEQ ID NO: 12703 - protein, 8 aa, Homo sapiens
  misc_feature: Table A; Target 12703; HLA-A*23:01; BSND; ENSG00000162399; TAA
VYGTFYAM

SEQ ID NO: 12704 - protein, 8 aa, Homo sapiens
  misc_feature: Table A; Target 12704; HLA-A*24:02; BSND; ENSG00000162399; TAA
VYGTFYAM

SEQ ID NO: 12705 - protein, 8 aa, Homo sapiens
  misc_feature: Table A; Target 12705; HLA-C*14:02; BSND; ENSG00000162399; TAA
VYGTFYAM

SEQ ID NO: 12706 - protein, 10 aa, Homo sapiens
  misc_feature: Table A; Target 12706; HLA-A*30:01; BSND; ENSG00000162399; TAA
WEEAAYDQSL

SEQ ID NO: 12707 - protein, 10 aa, Homo sapiens
  misc_feature: Table A; Target 12707; HLA-B*40:01; BSND; ENSG00000162399; TAA
WEEAAYDQSL

SEQ ID NO: 12708 - protein, 10 aa, Homo sapiens
  misc_feature: Table A; Target 12708; HLA-B*40:02; BSND; ENSG00000162399; TAA
WEEAAYDQSL

SEQ ID NO: 12709 - protein, 9 aa, Homo sapiens
  misc_feature: Table A; Target 12709; HLA-B*18:01; BSND; ENSG00000162399; TAA
WEIALPNNW

SEQ ID NO: 12710 - protein, 9 aa, Homo sapiens
  misc_feature: Table A; Target 12710; HLA-B*44:02; BSND; ENSG00000162399; TAA
WEIALPNNW

SEQ ID NO: 12711 - protein, 9 aa, Homo sapiens
  misc_feature: Table A; Target 12711; HLA-B*44:03; BSND; ENSG00000162399; TAA
WEIALPNNW

SEQ ID NO: 12712 - protein, 9 aa, Homo sapiens
  misc_feature: Table A; Target 12712; HLA-C*16:04; BSND; ENSG00000162399; TAA
WEIALPNNW

SEQ ID NO: 12713 - protein, 8 aa, Homo sapiens
  misc_feature: Table A; Target 12713; HLA-C*04:01; BSND; ENSG00000162399; TAA
WMEAAVVI

SEQ ID NO: 12714 - protein, 8 aa, Homo sapiens
  misc_feature: Table A; Target 12714; HLA-B*08:01; BSND; ENSG00000162399; TAA
YAMGSVMV

SEQ ID NO: 12715 - protein, 8 aa, Homo sapiens
  misc_feature: Table A; Target 12715; HLA-B*13:02; BSND; ENSG00000162399; TAA
YAMGSVMV

SEQ ID NO: 12716 - protein, 8 aa, Homo sapiens
  misc_feature: Table A; Target 12716; HLA-B*49:01; BSND; ENSG00000162399; TAA
YAMGSVMV

SEQ ID NO: 12717 - protein, 8 aa, Homo sapiens
  misc_feature: Table A; Target 12717; HLA-B*51:01; BSND; ENSG00000162399; TAA
YAMGSVMV

SEQ ID NO: 12718 - protein, 8 aa, Homo sapiens
  misc_feature: Table A; Target 12718; HLA-B*54:01; BSND; ENSG00000162399; TAA
YAMGSVMV

SEQ ID NO: 12719 - protein, 8 aa, Homo sapiens
  misc_feature: Table A; Target 12719; HLA-B*56:01; BSND; ENSG00000162399; TAA
YAMGSVMV

SEQ ID NO: 12720 - protein, 8 aa, Homo sapiens
  misc_feature: Table A; Target 12720; HLA-C*02:02; BSND; ENSG00000162399; TAA
YAMGSVMV

SEQ ID NO: 12721 - protein, 8 aa, Homo sapiens
  misc_feature: Table A; Target 12721; HLA-C*03:03; BSND; ENSG00000162399; TAA
YAMGSVMV

SEQ ID NO: 12722 - protein, 8 aa, Homo sapiens
  misc_feature: Table A; Target 12722; HLA-C*12:03; BSND; ENSG00000162399; TAA
YAMGSVMV

SEQ ID NO: 12723 - protein, 9 aa, Homo sapiens
  misc_feature: Table A; Target 12723; HLA-A*01:01; BSND; ENSG00000162399; TAA
YAMGSVMVI

SEQ ID NO: 12724 - protein, 9 aa, Homo sapiens
  misc_feature: Table A; Target 12724; HLA-A*02:01; BSND; ENSG00000162399; TAA
YAMGSVMVI

SEQ ID NO: 12725 - protein, 9 aa, Homo sapiens
  misc_feature: Table A; Target 12725; HLA-A*02:03; BSND; ENSG00000162399; TAA
YAMGSVMVI

SEQ ID NO: 12726 - protein, 9 aa, Homo sapiens
  misc_feature: Table A; Target 12726; HLA-A*23:01; BSND; ENSG00000162399; TAA
YAMGSVMVI

SEQ ID NO: 12727 - protein, 9 aa, Homo sapiens
  misc_feature: Table A; Target 12727; HLA-A*24:02; BSND; ENSG00000162399; TAA
YAMGSVMVI

SEQ ID NO: 12728 - protein, 9 aa, Homo sapiens
  misc_feature: Table A; Target 12728; HLA-A*25:01; BSND; ENSG00000162399; TAA
YAMGSVMVI

SEQ ID NO: 12729 - protein, 9 aa, Homo sapiens
  misc_feature: Table A; Target 12729; HLA-A*26:01; BSND; ENSG00000162399; TAA
YAMGSVMVI

SEQ ID NO: 12730 - protein, 9 aa, Homo sapiens
  misc_feature: Table A; Target 12730; HLA-A*30:01; BSND; ENSG00000162399; TAA
YAMGSVMVI

SEQ ID NO: 12731 - protein, 9 aa, Homo sapiens
  misc_feature: Table A; Target 12731; HLA-A*32:01; BSND; ENSG00000162399; TAA
YAMGSVMVI

SEQ ID NO: 12732 - protein, 9 aa, Homo sapiens
  misc_feature: Table A; Target 12732; HLA-A*68:02; BSND; ENSG00000162399; TAA
YAMGSVMVI

SEQ ID NO: 12733 - protein, 9 aa, Homo sapiens
  misc_feature: Table A; Target 12733; HLA-B*07:02; BSND; ENSG00000162399; TAA
YAMGSVMVI

SEQ ID NO: 12734 - protein, 9 aa, Homo sapiens
  misc_feature: Table A; Target 12734; HLA-B*08:01; BSND; ENSG00000162399; TAA
YAMGSVMVI

SEQ ID NO: 12735 - protein, 9 aa, Homo sapiens
  misc_feature: Table A; Target 12735; HLA-B*13:02; BSND; ENSG00000162399; TAA
YAMGSVMVI

SEQ ID NO: 12736 - protein, 9 aa, Homo sapiens
  misc_feature: Table A; Target 12736; HLA-B*15:03; BSND; ENSG00000162399; TAA
YAMGSVMVI

SEQ ID NO: 12737 - protein, 9 aa, Homo sapiens
  misc_feature: Table A; Target 12737; HLA-B*35:01; BSND; ENSG00000162399; TAA
YAMGSVMVI

SEQ ID NO: 12738 - protein, 9 aa, Homo sapiens
  misc_feature: Table A; Target 12738; HLA-B*35:03; BSND; ENSG00000162399; TAA
YAMGSVMVI

SEQ ID NO: 12739 - protein, 9 aa, Homo sapiens
  misc_feature: Table A; Target 12739; HLA-B*38:01; BSND; ENSG00000162399; TAA
YAMGSVMVI

SEQ ID NO: 12740 - protein, 9 aa, Homo sapiens
  misc_feature: Table A; Target 12740; HLA-B*39:01; BSND; ENSG00000162399; TAA
YAMGSVMVI

SEQ ID NO: 12741 - protein, 9 aa, Homo sapiens
  misc_feature: Table A; Target 12741; HLA-B*40:01; BSND; ENSG00000162399; TAA
YAMGSVMVI

SEQ ID NO: 12742 - protein, 9 aa, Homo sapiens
  misc_feature: Table A; Target 12742; HLA-B*40:02; BSND; ENSG00000162399; TAA
YAMGSVMVI

SEQ ID NO: 12743 - protein, 9 aa, Homo sapiens
  misc_feature: Table A; Target 12743; HLA-B*46:01; BSND; ENSG00000162399; TAA
YAMGSVMVI

SEQ ID NO: 12744 - protein, 9 aa, Homo sapiens
  misc_feature: Table A; Target 12744; HLA-B*49:01; BSND; ENSG00000162399; TAA
YAMGSVMVI

SEQ ID NO: 12745 - protein, 9 aa, Homo sapiens
  misc_feature: Table A; Target 12745; HLA-B*51:01; BSND; ENSG00000162399; TAA
YAMGSVMVI

SEQ ID NO: 12746 - protein, 9 aa, Homo sapiens
  misc_feature: Table A; Target 12746; HLA-B*54:01; BSND; ENSG00000162399; TAA
YAMGSVMVI

SEQ ID NO: 12747 - protein, 9 aa, Homo sapiens
  misc_feature: Table A; Target 12747; HLA-B*56:01; BSND; ENSG00000162399; TAA
YAMGSVMVI

SEQ ID NO: 12748 - protein, 9 aa, Homo sapiens
  misc_feature: Table A; Target 12748; HLA-B*57:01; BSND; ENSG00000162399; TAA
YAMGSVMVI

SEQ ID NO: 12749 - protein, 9 aa, Homo sapiens
  misc_feature: Table A; Target 12749; HLA-B*58:01; BSND; ENSG00000162399; TAA
YAMGSVMVI

SEQ ID NO: 12750 - protein, 9 aa, Homo sapiens
  misc_feature: Table A; Target 12750; HLA-C*01:02; BSND; ENSG00000162399; TAA
YAMGSVMVI

SEQ ID NO: 12751 - protein, 9 aa, Homo sapiens
  misc_feature: Table A; Target 12751; HLA-C*02:02; BSND; ENSG00000162399; TAA
YAMGSVMVI

SEQ ID NO: 12752 - protein, 9 aa, Homo sapiens
  misc_feature: Table A; Target 12752; HLA-C*03:03; BSND; ENSG00000162399; TAA
YAMGSVMVI

SEQ ID NO: 12753 - protein, 9 aa, Homo sapiens
  misc_feature: Table A; Target 12753; HLA-C*03:04; BSND; ENSG00000162399; TAA
YAMGSVMVI

SEQ ID NO: 12754 - protein, 9 aa, Homo sapiens
  misc_feature: Table A; Target 12754; HLA-C*04:01; BSND; ENSG00000162399; TAA
YAMGSVMVI

SEQ ID NO: 12755 - protein, 9 aa, Homo sapiens
  misc_feature: Table A; Target 12755; HLA-C*05:01; BSND; ENSG00000162399; TAA
YAMGSVMVI

SEQ ID NO: 12756 - protein, 9 aa, Homo sapiens
  misc_feature: Table A; Target 12756; HLA-C*07:04; BSND; ENSG00000162399; TAA
YAMGSVMVI

SEQ ID NO: 12757 - protein, 9 aa, Homo sapiens
  misc_feature: Table A; Target 12757; HLA-C*07:06; BSND; ENSG00000162399; TAA
YAMGSVMVI

SEQ ID NO: 12758 - protein, 9 aa, Homo sapiens
  misc_feature: Table A; Target 12758; HLA-C*12:03; BSND; ENSG00000162399; TAA
YAMGSVMVI

SEQ ID NO: 12759 - protein, 9 aa, Homo sapiens
  misc_feature: Table A; Target 12759; HLA-C*14:02; BSND; ENSG00000162399; TAA
YAMGSVMVI

SEQ ID NO: 12760 - protein, 9 aa, Homo sapiens
  misc_feature: Table A; Target 12760; HLA-C*16:01; BSND; ENSG00000162399; TAA
YAMGSVMVI

SEQ ID NO: 12761 - protein, 9 aa, Homo sapiens
  misc_feature: Table A; Target 12761; HLA-C*16:02; BSND; ENSG00000162399; TAA
YAMGSVMVI

SEQ ID NO: 12762 - protein, 9 aa, Homo sapiens
  misc_feature: Table A; Target 12762; HLA-C*16:04; BSND; ENSG00000162399; TAA
YAMGSVMVI

SEQ ID NO: 12763 - protein, 8 aa, Homo sapiens
  misc_feature: Table A; Target 12763; HLA-B*37:01; BSND; ENSG00000162399; TAA
YDQSLPDF

SEQ ID NO: 12764 - protein, 8 aa, Homo sapiens
  misc_feature: Table A; Target 12764; HLA-C*07:01; BSND; ENSG00000162399; TAA
YDQSLPDF

SEQ ID NO: 12765 - protein, 11 aa, Homo sapiens
  misc_feature: Table A; Target 12765; HLA-B*38:01; BSND; ENSG00000162399; TAA
YGLPDGAGDLL

SEQ ID NO: 12766 - protein, 11 aa, Homo sapiens
  misc_feature: Table A; Target 12766; HLA-B*39:01; BSND; ENSG00000162399; TAA
YGLPDGAGDLL

SEQ ID NO: 12767 - protein, 8 aa, Homo sapiens
  misc_feature: Table A; Target 12767; HLA-B*54:01; BSND; ENSG00000162399; TAA
YPKITFVP

SEQ ID NO: 12768 - protein, 9 aa, Homo sapiens
  misc_feature: Table A; Target 12768; HLA-B*40:02; BSND; ENSG00000162399; TAA
YPKITFVPA

SEQ ID NO: 12769 - protein, 9 aa, Homo sapiens
  misc_feature: Table A; Target 12769; HLA-B*54:01; BSND; ENSG00000162399; TAA
YPKITFVPA

SEQ ID NO: 12770 - protein, 9 aa, Homo sapiens
  misc_feature: Table A; Target 12770; HLA-B*55:01; BSND; ENSG00000162399; TAA
YPKITFVPA

SEQ ID NO: 12771 - protein, 9 aa, Homo sapiens
  misc_feature: Table A; Target 12771; HLA-B*56:01; BSND; ENSG00000162399; TAA
YPKITFVPA

SEQ ID NO: 12772 - protein, 9 aa, Homo sapiens
  misc_feature: Table A; Target 12772; HLA-B*07:02; BSND; ENSG00000162399; TAA
YPRTKVEEK

SEQ ID NO: 12773 - protein, 11 aa, Homo sapiens
  misc_feature: Table A; Target 12773; HLA-B*54:01; BSND; ENSG00000162399; TAA
YPRTKVEEKEA

SEQ ID NO: 12774 - protein, 8 aa, Homo sapiens
  misc_feature: Table A; Target 12774; HLA-B*08:01; BSND; ENSG00000162399; TAA
YSEDHRSL

SEQ ID NO: 12775 - protein, 8 aa, Homo sapiens
  misc_feature: Table A; Target 12775; HLA-C*01:02; BSND; ENSG00000162399; TAA
YSEDHRSL

SEQ ID NO: 12776 - protein, 8 aa, Homo sapiens
  misc_feature: Table A; Target 12776; HLA-C*03:03; BSND; ENSG00000162399; TAA
YSEDHRSL

SEQ ID NO: 12777 - protein, 8 aa, Homo sapiens
  misc_feature: Table A; Target 12777; HLA-C*03:04; BSND; ENSG00000162399; TAA
YSEDHRSL

SEQ ID NO: 12778 - protein, 8 aa, Homo sapiens
  misc_feature: Table A; Target 12778; HLA-C*05:01; BSND; ENSG00000162399; TAA
YSEDHRSL

SEQ ID NO: 12779 - protein, 8 aa, Homo sapiens
  misc_feature: Table A; Target 12779; HLA-C*12:03; BSND; ENSG00000162399; TAA
YSEDHRSL

SEQ ID NO: 12780 - protein, 8 aa, Homo sapiens
  misc_feature: Table A; Target 12780; HLA-C*16:01; BSND; ENSG00000162399; TAA
YSEDHRSL

SEQ ID NO: 12781 - protein, 8 aa, Homo sapiens
  misc_feature: Table A; Target 12781; HLA-C*16:02; BSND; ENSG00000162399; TAA
YSEDHRSL

SEQ ID NO: 12782 - protein, 9 aa, Homo sapiens
  misc_feature: Table A; Target 12782; HLA-A*01:01; BSND; ENSG00000162399; TAA
YSEDHRSLL

SEQ ID NO: 12783 - protein, 9 aa, Homo sapiens
  misc_feature: Table A; Target 12783; HLA-B*40:01; BSND; ENSG00000162399; TAA
YSEDHRSLL

SEQ ID NO: 12784 - protein, 9 aa, Homo sapiens
  misc_feature: Table A; Target 12784; HLA-C*03:03; BSND; ENSG00000162399; TAA
YSEDHRSLL

SEQ ID NO: 12785 - protein, 9 aa, Homo sapiens
  misc_feature: Table A; Target 12785; HLA-C*03:04; BSND; ENSG00000162399; TAA
YSEDHRSLL

SEQ ID NO: 12786 - protein, 9 aa, Homo sapiens
  misc_feature: Table A; Target 12786; HLA-C*05:01; BSND; ENSG00000162399; TAA
YSEDHRSLL

SEQ ID NO: 12787 - protein, 9 aa, Homo sapiens
  misc_feature: Table A; Target 12787; HLA-C*12:03; BSND; ENSG00000162399; TAA
YSEDHRSLL

SEQ ID NO: 12788 - protein, 9 aa, Homo sapiens
  misc_feature: Table A; Target 12788; HLA-C*16:02; BSND; ENSG00000162399; TAA
YSEDHRSLL

SEQ ID NO: 12789 - protein, 8 aa, Homo sapiens
  misc_feature: Table A; Target 12789; HLA-C*14:02; BSND; ENSG00000162399; TAA
YYGLPDGA

SEQ ID NO: 12790 - protein, 10 aa, Homo sapiens
  misc_feature: Table A; Target 12790; HLA-B*56:01; C6orf222; ENSG00000189325; TAA
AAAALRSGEA

SEQ ID NO: 12791 - protein, 9 aa, Homo sapiens
  misc_feature: Table A; Target 12791; HLA-B*56:01; C6orf222; ENSG00000189325; TAA
AAALRSGEA

SEQ ID NO: 12792 - protein, 9 aa, Homo sapiens
  misc_feature: Table A; Target 12792; HLA-C*16:01; C6orf222; ENSG00000189325; TAA
AAALRSGEA

SEQ ID NO: 12793 - protein, 9 aa, Homo sapiens
  misc_feature: Table A; Target 12793; HLA-C*03:03; C6orf222; ENSG00000189325; TAA
AADVSSPEA

SEQ ID NO: 12794 - protein, 9 aa, Homo sapiens
  misc_feature: Table A; Target 12794; HLA-C*03:04; C6orf222; ENSG00000189325; TAA
AADVSSPEA

SEQ ID NO: 12795 - protein, 9 aa, Homo sapiens
  misc_feature: Table A; Target 12795; HLA-C*05:01; C6orf222; ENSG00000189325; TAA
AADVSSPEA

SEQ ID NO: 12796 - protein, 10 aa, Homo sapiens
  misc_feature: Table A; Target 12796; HLA-B*58:01; C6orf222; ENSG00000189325; TAA
AADVSSPEAW

SEQ ID NO: 12797 - protein, 10 aa, Homo sapiens
  misc_feature: Table A; Target 12797; HLA-C*05:01; C6orf222; ENSG00000189325; TAA
AADVSSPEAW

SEQ ID NO: 12798 - protein, 10 aa, Homo sapiens
  misc_feature: Table A; Target 12798; HLA-C*16:04; C6orf222; ENSG00000189325; TAA
AADVSSPEAW

SEQ ID NO: 12799 - protein, 9 aa, Homo sapiens
  misc_feature: Table A; Target 12799; HLA-B*56:01; C6orf222; ENSG00000189325; TAA
AAGAASPEA

SEQ ID NO: 12800 - protein, 9 aa, Homo sapiens
  misc_feature: Table A; Target 12800; HLA-C*03:03; C6orf222; ENSG00000189325; TAA
AAGAASPEA

SEQ ID NO: 12801 - protein, 9 aa, Homo sapiens
  misc_feature: Table A; Target 12801; HLA-C*03:04; C6orf222; ENSG00000189325; TAA
AAGAASPEA

SEQ ID NO: 12802 - protein, 8 aa, Homo sapiens
  misc_feature: Table A; Target 12802; HLA-A*33:03; C6orf222; ENSG00000189325; TAA
AAGEPALR

SEQ ID NO: 12803 - protein, 8 aa, Homo sapiens
  misc_feature: Table A; Target 12803; HLA-A*68:01; C6orf222; ENSG00000189325; TAA
AAGEPALR

SEQ ID NO: 12804 - protein, 8 aa, Homo sapiens
  misc_feature: Table A; Target 12804; HLA-C*07:06; C6orf222; ENSG00000189325; TAA
AAGEPALR

SEQ ID NO: 12805 - protein, 9 aa, Homo sapiens
  misc_feature: Table A; Target 12805; HLA-A*03:01; C6orf222; ENSG00000189325; TAA
AAGEPALRK

SEQ ID NO: 12806 - protein, 9 aa, Homo sapiens
  misc_feature: Table A; Target 12806; HLA-A*03:02; C6orf222; ENSG00000189325; TAA
AAGEPALRK

SEQ ID NO: 12807 - protein, 9 aa, Homo sapiens
  misc_feature: Table A; Target 12807; HLA-A*11:01; C6orf222; ENSG00000189325; TAA
AAGEPALRK

SEQ ID NO: 12808 - protein, 9 aa, Homo sapiens
  misc_feature: Table A; Target 12808; HLA-C*07:06; C6orf222; ENSG00000189325; TAA
AAGEPALRK

SEQ ID NO: 12809 - protein, 10 aa, Homo sapiens
  misc_feature: Table A; Target 12809; HLA-A*03:01; C6orf222; ENSG00000189325; TAA
AAGEPALRKK

SEQ ID NO: 12810 - protein, 10 aa, Homo sapiens
  misc_feature: Table A; Target 12810; HLA-A*03:02; C6orf222; ENSG00000189325; TAA
AAGEPALRKK

SEQ ID NO: 12811 - protein, 10 aa, Homo sapiens
  misc_feature: Table A; Target 12811; HLA-A*11:01; C6orf222; ENSG00000189325; TAA
AAGEPALRKK

SEQ ID NO: 12812 - protein, 9 aa, Homo sapiens
  misc_feature: Table A; Target 12812; HLA-A*32:01; C6orf222; ENSG00000189325; TAA
AASPEARRP

SEQ ID NO: 12813 - protein, 9 aa, Homo sapiens
  misc_feature: Table A; Target 12813; HLA-C*16:01; C6orf222; ENSG00000189325; TAA
AASPEARRP

SEQ ID NO: 12814 - protein, 9 aa, Homo sapiens
  misc_feature: Table A; Target 12814; HLA-C*16:02; C6orf222; ENSG00000189325; TAA
AASPEARRP

SEQ ID NO: 12815 - protein, 10 aa, Homo sapiens
  misc_feature: Table A; Target 12815; HLA-A*03:02; C6orf222; ENSG00000189325; TAA
AASPEARRPK

SEQ ID NO: 12816 - protein, 10 aa, Homo sapiens
  misc_feature: Table A; Target 12816; HLA-C*16:01; C6orf222; ENSG00000189325; TAA
AASPEARRPK

SEQ ID NO: 12817 - protein, 11 aa, Homo sapiens
  misc_feature: Table A; Target 12817; HLA-A*03:02; C6orf222; ENSG00000189325; TAA
ACESKEIIIQK

SEQ ID NO: 12818 - protein, 11 aa, Homo sapiens
  misc_feature: Table A; Target 12818; HLA-A*11:01; C6orf222; ENSG00000189325; TAA
ACESKEIIIQK

SEQ ID NO: 12819 - protein, 9 aa, Homo sapiens
  misc_feature: Table A; Target 12819; HLA-A*25:01; C6orf222; ENSG00000189325; TAA
ADVSSPEAW

SEQ ID NO: 12820 - protein, 9 aa, Homo sapiens
  misc_feature: Table A; Target 12820; HLA-B*27:02; C6orf222; ENSG00000189325; TAA
ADVSSPEAW

SEQ ID NO: 12821 - protein, 9 aa, Homo sapiens
  misc_feature: Table A; Target 12821; HLA-B*37:01; C6orf222; ENSG00000189325; TAA
ADVSSPEAW

SEQ ID NO: 12822 - protein, 9 aa, Homo sapiens
  misc_feature: Table A; Target 12822; HLA-B*44:02; C6orf222; ENSG00000189325; TAA
ADVSSPEAW

SEQ ID NO: 12823 - protein, 9 aa, Homo sapiens
  misc_feature: Table A; Target 12823; HLA-B*44:03; C6orf222; ENSG00000189325; TAA
ADVSSPEAW

SEQ ID NO: 12824 - protein, 9 aa, Homo sapiens
  misc_feature: Table A; Target 12824; HLA-C*16:04; C6orf222; ENSG00000189325; TAA
ADVSSPEAW

SEQ ID NO: 12825 - protein, 9 aa, Homo sapiens
  misc_feature: Table A; Target 12825; HLA-B*49:01; C6orf222; ENSG00000189325; TAA
AEAHCTTAA

SEQ ID NO: 12826 - protein, 8 aa, Homo sapiens
  misc_feature: Table A; Target 12826; HLA-A*30:01; C6orf222; ENSG00000189325; TAA
AEGEPVVI

SEQ ID NO: 12827 - protein, 8 aa, Homo sapiens
  misc_feature: Table A; Target 12827; HLA-B*40:01; C6orf222; ENSG00000189325; TAA
AEGEPVVI

SEQ ID NO: 12828 - protein, 8 aa, Homo sapiens
  misc_feature: Table A; Target 12828; HLA-B*44:02; C6orf222; ENSG00000189325; TAA
AEGEPVVI

SEQ ID NO: 12829 - protein, 8 aa, Homo sapiens
  misc_feature: Table A; Target 12829; HLA-B*44:03; C6orf222; ENSG00000189325; TAA
AEGEPVVI

SEQ ID NO: 12830 - protein, 8 aa, Homo sapiens
  misc_feature: Table A; Target 12830; HLA-B*49:01; C6orf222; ENSG00000189325; TAA
AEGEPVVI

SEQ ID NO: 12831 - protein, 8 aa, Homo sapiens
  misc_feature: Table A; Target 12831; HLA-C*03:04; C6orf222; ENSG00000189325; TAA
AGAPGPSV

SEQ ID NO: 12832 - protein, 9 aa, Homo sapiens
  misc_feature: Table A; Target 12832; HLA-B*39:01; C6orf222; ENSG00000189325; TAA
AGAPGPSVL

SEQ ID NO: 12833 - protein, 9 aa, Homo sapiens
  misc_feature: Table A; Target 12833; HLA-C*02:02; C6orf222; ENSG00000189325; TAA
AGAPGPSVL

SEQ ID NO: 12834 - protein, 9 aa, Homo sapiens
  misc_feature: Table A; Target 12834; HLA-C*03:03; C6orf222; ENSG00000189325; TAA
AGAPGPSVL

SEQ ID NO: 12835 - protein, 9 aa, Homo sapiens
  misc_feature: Table A; Target 12835; HLA-C*03:04; C6orf222; ENSG00000189325; TAA
AGAPGPSVL

SEQ ID NO: 12836 - protein, 9 aa, Homo sapiens
  misc_feature: Table A; Target 12836; HLA-A*11:01; C6orf222; ENSG00000189325; TAA
AGEPALRKK

SEQ ID NO: 12837 - protein, 8 aa, Homo sapiens
  misc_feature: Table A; Target 12837; HLA-B*37:01; C6orf222; ENSG00000189325; TAA
AGSNSHAM

SEQ ID NO: 12838 - protein, 8 aa, Homo sapiens
  misc_feature: Table A; Target 12838; HLA-C*03:04; C6orf222; ENSG00000189325; TAA
AGSNSHAM

SEQ ID NO: 12839 - protein, 8 aa, Homo sapiens
  misc_feature: Table A; Target 12839; HLA-C*16:01; C6orf222; ENSG00000189325; TAA
AGSNSHAM

SEQ ID NO: 12840 - protein, 9 aa, Homo sapiens
  misc_feature: Table A; Target 12840; HLA-A*02:01; C6orf222; ENSG00000189325; TAA
AIIQMIVEL

SEQ ID NO: 12841 - protein, 9 aa, Homo sapiens
  misc_feature: Table A; Target 12841; HLA-A*02:04; C6orf222; ENSG00000189325; TAA
AIIQMIVEL

SEQ ID NO: 12842 - protein, 9 aa, Homo sapiens
  misc_feature: Table A; Target 12842; HLA-A*02:07; C6orf222; ENSG00000189325; TAA
AIIQMIVEL

SEQ ID NO: 12843 - protein, 9 aa, Homo sapiens
  misc_feature: Table A; Target 12843; HLA-A*30:01; C6orf222; ENSG00000189325; TAA
AIIQMIVEL

SEQ ID NO: 12844 - protein, 9 aa, Homo sapiens
  misc_feature: Table A; Target 12844; HLA-B*15:01; C6orf222; ENSG00000189325; TAA
AIIQMIVEL

SEQ ID NO: 12845 - protein, 9 aa, Homo sapiens
  misc_feature: Table A; Target 12845; HLA-B*35:03; C6orf222; ENSG00000189325; TAA
AIIQMIVEL

SEQ ID NO: 12846 - protein, 9 aa, Homo sapiens
  misc_feature: Table A; Target 12846; HLA-B*40:01; C6orf222; ENSG00000189325; TAA
AIIQMIVEL

SEQ ID NO: 12847 - protein, 9 aa, Homo sapiens
  misc_feature: Table A; Target 12847; HLA-B*58:01; C6orf222; ENSG00000189325; TAA
AIIQMIVEL

SEQ ID NO: 12848 - protein, 9 aa, Homo sapiens
  misc_feature: Table A; Target 12848; HLA-A*02:01; C6orf222; ENSG00000189325; TAA
ALDVSPHAT

SEQ ID NO: 12849 - protein, 9 aa, Homo sapiens
  misc_feature: Table A; Target 12849; HLA-B*55:01; C6orf222; ENSG00000189325; TAA
ALDVSPHAT

SEQ ID NO: 12850 - protein, 9 aa, Homo sapiens
  misc_feature: Table A; Target 12850; HLA-A*02:01; C6orf222; ENSG00000189325; TAA
ALPNPAPAV

SEQ ID NO: 12851 - protein, 9 aa, Homo sapiens
  misc_feature: Table A; Target 12851; HLA-A*02:03; C6orf222; ENSG00000189325; TAA
ALPNPAPAV

SEQ ID NO: 12852 - protein, 9 aa, Homo sapiens
  misc_feature: Table A; Target 12852; HLA-A*02:04; C6orf222; ENSG00000189325; TAA
ALPNPAPAV

SEQ ID NO: 12853 - protein, 9 aa, Homo sapiens
  misc_feature: Table A; Target 12853; HLA-A*02:07; C6orf222; ENSG00000189325; TAA
ALPNPAPAV

SEQ ID NO: 12854 - protein, 9 aa, Homo sapiens
  misc_feature: Table A; Target 12854; HLA-A*24:02; C6orf222; ENSG00000189325; TAA
ALPNPAPAV

SEQ ID NO: 12855 - protein, 9 aa, Homo sapiens
  misc_feature: Table A; Target 12855; HLA-A*32:01; C6orf222; ENSG00000189325; TAA
ALPNPAPAV

SEQ ID NO: 12856 - protein, 9 aa, Homo sapiens
  misc_feature: Table A; Target 12856; HLA-B*13:02; C6orf222; ENSG00000189325; TAA
ALPNPAPAV

SEQ ID NO: 12857 - protein, 9 aa, Homo sapiens
  misc_feature: Table A; Target 12857; HLA-B*37:01; C6orf222; ENSG00000189325; TAA
ALPNPAPAV

SEQ ID NO: 12858 - protein, 9 aa, Homo sapiens
  misc_feature: Table A; Target 12858; HLA-B*40:02; C6orf222; ENSG00000189325; TAA
ALPNPAPAV

SEQ ID NO: 12859 - protein, 9 aa, Homo sapiens
  misc_feature: Table A; Target 12859; HLA-B*46:01; C6orf222; ENSG00000189325; TAA
ALPNPAPAV

SEQ ID NO: 12860 - protein, 9 aa, Homo sapiens
  misc_feature: Table A; Target 12860; HLA-B*55:01; C6orf222; ENSG00000189325; TAA
ALPNPAPAV

SEQ ID NO: 12861 - protein, 9 aa, Homo sapiens
  misc_feature: Table A; Target 12861; HLA-C*01:02; C6orf222; ENSG00000189325; TAA
ALPNPAPAV

SEQ ID NO: 12862 - protein, 9 aa, Homo sapiens
  misc_feature: Table A; Target 12862; HLA-C*06:02; C6orf222; ENSG00000189325; TAA
ALPNPAPAV

SEQ ID NO: 12863 - protein, 9 aa, Homo sapiens
  misc_feature: Table A; Target 12863; HLA-C*14:02; C6orf222; ENSG00000189325; TAA
ALPNPAPAV

SEQ ID NO: 12864 - protein, 9 aa, Homo sapiens
  misc_feature: Table A; Target 12864; HLA-C*16:04; C6orf222; ENSG00000189325; TAA
ALPNPAPAV

SEQ ID NO: 12865 - protein, 10 aa, Homo sapiens
  misc_feature: Table A; Target 12865; HLA-A*03:01; C6orf222; ENSG00000189325; TAA
ALPNPAPAVR

SEQ ID NO: 12866 - protein, 10 aa, Homo sapiens
  misc_feature: Table A; Target 12866; HLA-A*03:02; C6orf222; ENSG00000189325; TAA
ALPNPAPAVR

SEQ ID NO: 12867 - protein, 10 aa, Homo sapiens
  misc_feature: Table A; Target 12867; HLA-A*31:01; C6orf222; ENSG00000189325; TAA
ALPNPAPAVR

SEQ ID NO: 12868 - protein, 11 aa, Homo sapiens
  misc_feature: Table A; Target 12868; HLA-A*03:01; C6orf222; ENSG00000189325; TAA
ALPNPAPAVRK

SEQ ID NO: 12869 - protein, 11 aa, Homo sapiens
  misc_feature: Table A; Target 12869; HLA-A*03:02; C6orf222; ENSG00000189325; TAA
ALPNPAPAVRK

SEQ ID NO: 12870 - protein, 11 aa, Homo sapiens
  misc_feature: Table A; Target 12870; HLA-A*11:01; C6orf222; ENSG00000189325; TAA
ALPNPAPAVRK

SEQ ID NO: 12871 - protein, 9 aa, Homo sapiens
  misc_feature: Table A; Target 12871; HLA-B*07:02; C6orf222; ENSG00000189325; TAA
ALRSGEADL

SEQ ID NO: 12872 - protein, 9 aa, Homo sapiens
  misc_feature: Table A; Target 12872; HLA-B*15:01; C6orf222; ENSG00000189325; TAA
ALRSGEADL

SEQ ID NO: 12873 - protein, 9 aa, Homo sapiens
  misc_feature: Table A; Target 12873; HLA-C*01:02; C6orf222; ENSG00000189325; TAA
ALRSGEADL

SEQ ID NO: 12874 - protein, 9 aa, Homo sapiens
  misc_feature: Table A; Target 12874; HLA-C*07:02; C6orf222; ENSG00000189325; TAA
APGKGSESW

SEQ ID NO: 12875 - protein, 9 aa, Homo sapiens
  misc_feature: Table A; Target 12875; HLA-B*56:01; C6orf222; ENSG00000189325; TAA
APGPSVLPT

SEQ ID NO: 12876 - protein, 10 aa, Homo sapiens
  misc_feature: Table A; Target 12876; HLA-B*56:01; C6orf222; ENSG00000189325; TAA
APGPSVLPTP

SEQ ID NO: 12877 - protein, 11 aa, Homo sapiens
  misc_feature: Table A; Target 12877; HLA-B*56:01; C6orf222; ENSG00000189325; TAA
APGPSVLPTPS

SEQ ID NO: 12878 - protein, 11 aa, Homo sapiens
  misc_feature: Table A; Target 12878; HLA-B*56:01; C6orf222; ENSG00000189325; TAA
APSAEAHCTTA

SEQ ID NO: 12879 - protein, 10 aa, Homo sapiens
  misc_feature: Table A; Target 12879; HLA-B*07:02; C6orf222; ENSG00000189325; TAA
APSQARGHTP

SEQ ID NO: 12880 - protein, 10 aa, Homo sapiens
  misc_feature: Table A; Target 12880; HLA-B*56:01; C6orf222; ENSG00000189325; TAA
APSQARGHTP

SEQ ID NO: 12881 - protein, 10 aa, Homo sapiens
  misc_feature: Table A; Target 12881; HLA-C*07:02; C6orf222; ENSG00000189325; TAA
APSQARGHTP

SEQ ID NO: 12882 - protein, 10 aa, Homo sapiens
  misc_feature: Table A; Target 12882; HLA-A*11:01; C6orf222; ENSG00000189325; TAA
ASEYKEFIQK

SEQ ID NO: 12883 - protein, 9 aa, Homo sapiens
  misc_feature: Table A; Target 12883; HLA-C*16:01; C6orf222; ENSG00000189325; TAA
ASPEARRPK

SEQ ID NO: 12884 - protein, 8 aa, Homo sapiens
  misc_feature: Table A; Target 12884; HLA-C*01:02; C6orf222; ENSG00000189325; TAA
ASQLGVAL

SEQ ID NO: 12885 - protein, 8 aa, Homo sapiens
  misc_feature: Table A; Target 12885; HLA-C*03:03; C6orf222; ENSG00000189325; TAA
ASQLGVAL

SEQ ID NO: 12886 - protein, 8 aa, Homo sapiens
  misc_feature: Table A; Target 12886; HLA-C*03:04; C6orf222; ENSG00000189325; TAA
ASQLGVAL

SEQ ID NO: 12887 - protein, 8 aa, Homo sapiens
  misc_feature: Table A; Target 12887; HLA-C*14:02; C6orf222; ENSG00000189325; TAA
ASQLGVAL

SEQ ID NO: 12888 - protein, 8 aa, Homo sapiens
  misc_feature: Table A; Target 12888; HLA-C*16:01; C6orf222; ENSG00000189325; TAA
ASQLGVAL

SEQ ID NO: 12889 - protein, 9 aa, Homo sapiens
  misc_feature: Table A; Target 12889; HLA-A*03:01; C6orf222; ENSG00000189325; TAA
ATLRSQVAH

SEQ ID NO: 12890 - protein, 9 aa, Homo sapiens
  misc_feature: Table A; Target 12890; HLA-A*11:01; C6orf222; ENSG00000189325; TAA
ATLRSQVAH

SEQ ID NO: 12891 - protein, 11 aa, Homo sapiens
  misc_feature: Table A; Target 12891; HLA-A*30:01; C6orf222; ENSG00000189325; TAA
CESKEIIIQKL

SEQ ID NO: 12892 - protein, 11 aa, Homo sapiens
  misc_feature: Table A; Target 12892; HLA-B*40:01; C6orf222; ENSG00000189325; TAA
CESKEIIIQKL

SEQ ID NO: 12893 - protein, 8 aa, Homo sapiens
  misc_feature: Table A; Target 12893; HLA-B*51:01; C6orf222; ENSG00000189325; TAA
DAIIQMIV

SEQ ID NO: 12894 - protein, 8 aa, Homo sapiens
  misc_feature: Table A; Target 12894; HLA-B*51:01; C6orf222; ENSG00000189325; TAA
DGQLGQQI

SEQ ID NO: 12895 - protein, 10 aa, Homo sapiens
  misc_feature: Table A; Target 12895; HLA-A*33:01; C6orf222; ENSG00000189325; TAA
DGQLGQQIRR

SEQ ID NO: 12896 - protein, 10 aa, Homo sapiens
  misc_feature: Table A; Target 12896; HLA-A*68:01; C6orf222; ENSG00000189325; TAA
DGQLGQQIRR

SEQ ID NO: 12897 - protein, 8 aa, Homo sapiens
  misc_feature: Table A; Target 12897; HLA-B*51:01; C6orf222; ENSG00000189325; TAA
DGTGALDV

SEQ ID NO: 12898 - protein, 9 aa, Homo sapiens
  misc_feature: Table A; Target 12898; HLA-A*33:01; C6orf222; ENSG00000189325; TAA
DHQSFLIKV

SEQ ID NO: 12899 - protein, 9 aa, Homo sapiens
  misc_feature: Table A; Target 12899; HLA-A*68:02; C6orf222; ENSG00000189325; TAA
DHQSFLIKV

SEQ ID NO: 12900 - protein, 9 aa, Homo sapiens
  misc_feature: Table A; Target 12900; HLA-B*38:01; C6orf222; ENSG00000189325; TAA
DHQSFLIKV

SEQ ID NO: 12901 - protein, 9 aa, Homo sapiens
  misc_feature: Table A; Target 12901; HLA-B*51:01; C6orf222; ENSG00000189325; TAA
DHQSFLIKV

SEQ ID NO: 12902 - protein, 9 aa, Homo sapiens
  misc_feature: Table A; Target 12902; HLA-B*13:02; C6orf222; ENSG00000189325; TAA
DQDAIIQMI

SEQ ID NO: 12903 - protein, 9 aa, Homo sapiens
  misc_feature: Table A; Target 12903; HLA-B*38:01; C6orf222; ENSG00000189325; TAA
DQDAIIQMI

SEQ ID NO: 12904 - protein, 9 aa, Homo sapiens
  misc_feature: Table A; Target 12904; HLA-B*51:01; C6orf222; ENSG00000189325; TAA
DQDAIIQMI

SEQ ID NO: 12905 - protein, 9 aa, Homo sapiens
  misc_feature: Table A; Target 12905; HLA-A*68:01; C6orf222; ENSG00000189325; TAA
DQPNITSPK

SEQ ID NO: 12906 - protein, 9 aa, Homo sapiens
  misc_feature: Table A; Target 12906; HLA-B*38:01; C6orf222; ENSG00000189325; TAA
DQWEEEQSL

SEQ ID NO: 12907 - protein, 9 aa, Homo sapiens
  misc_feature: Table A; Target 12907; HLA-B*39:01; C6orf222; ENSG00000189325; TAA
DQWEEEQSL

SEQ ID NO: 12908 - protein, 8 aa, Homo sapiens
  misc_feature: Table A; Target 12908; HLA-C*05:01; C6orf222; ENSG00000189325; TAA
DSDHQSFL

SEQ ID NO: 12909 - protein, 8 aa, Homo sapiens
  misc_feature: Table A; Target 12909; HLA-B*51:01; C6orf222; ENSG00000189325; TAA
DSSLSKLV

SEQ ID NO: 12910 - protein, 9 aa, Homo sapiens
  misc_feature: Table A; Target 12910; HLA-B*54:01; C6orf222; ENSG00000189325; TAA
DSSLSKLVA

SEQ ID NO: 12911 - protein, 8 aa, Homo sapiens
  misc_feature: Table A; Target 12911; HLA-A*33:01; C6orf222; ENSG00000189325; TAA
DTKKGWLK

SEQ ID NO: 12912 - protein, 8 aa, Homo sapiens
  misc_feature: Table A; Target 12912; HLA-A*25:01; C6orf222; ENSG00000189325; TAA
DVSLANKF

SEQ ID NO: 12913 - protein, 8 aa, Homo sapiens
  misc_feature: Table A; Target 12913; HLA-A*33:03; C6orf222; ENSG00000189325; TAA
DVSLANKF

SEQ ID NO: 12914 - protein, 8 aa, Homo sapiens
  misc_feature: Table A; Target 12914; HLA-B*07:02; C6orf222; ENSG00000189325; TAA
DVSLANKF

SEQ ID NO: 12915 - protein, 8 aa, Homo sapiens
  misc_feature: Table A; Target 12915; HLA-B*08:01; C6orf222; ENSG00000189325; TAA
DVSLANKF

SEQ ID NO: 12916 - protein, 8 aa, Homo sapiens
  misc_feature: Table A; Target 12916; HLA-B*18:01; C6orf222; ENSG00000189325; TAA
DVSLANKF

SEQ ID NO: 12917 - protein, 8 aa, Homo sapiens
  misc_feature: Table A; Target 12917; HLA-B*35:01; C6orf222; ENSG00000189325; TAA
DVSLANKF

SEQ ID NO: 12918 - protein, 8 aa, Homo sapiens
  misc_feature: Table A; Target 12918; HLA-C*04:01; C6orf222; ENSG00000189325; TAA
DVSLANKF

SEQ ID NO: 12919 - protein, 8 aa, Homo sapiens
  misc_feature: Table A; Target 12919; HLA-C*07:01; C6orf222; ENSG00000189325; TAA
DVSLANKF

SEQ ID NO: 12920 - protein, 9 aa, Homo sapiens
  misc_feature: Table A; Target 12920; HLA-A*26:01; C6orf222; ENSG00000189325; TAA
DVSPHATGH

SEQ ID NO: 12921 - protein, 9 aa, Homo sapiens
  misc_feature: Table A; Target 12921; HLA-C*07:06; C6orf222; ENSG00000189325; TAA
DVSPHATGH

SEQ ID NO: 12922 - protein, 8 aa, Homo sapiens
  misc_feature: Table A; Target 12922; HLA-A*25:01; C6orf222; ENSG00000189325; TAA
DVSSPEAW

SEQ ID NO: 12923 - protein, 10 aa, Homo sapiens
  misc_feature: Table A; Target 12923; HLA-A*33:01; C6orf222; ENSG00000189325; TAA
DVSSPEAWPP

SEQ ID NO: 12924 - protein, 11 aa, Homo sapiens
  misc_feature: Table A; Target 12924; HLA-A*11:01; C6orf222; ENSG00000189325; TAA
DVSSPEAWPPK

SEQ ID NO: 12925 - protein, 11 aa, Homo sapiens
  misc_feature: Table A; Target 12925; HLA-A*33:01; C6orf222; ENSG00000189325; TAA
DVSSPEAWPPK

SEQ ID NO: 12926 - protein, 11 aa, Homo sapiens
  misc_feature: Table A; Target 12926; HLA-A*68:01; C6orf222; ENSG00000189325; TAA
DVSSPEAWPPK

SEQ ID NO: 12927 - protein, 8 aa, Homo sapiens
  misc_feature: Table A; Target 12927; HLA-B*35:03; C6orf222; ENSG00000189325; TAA
EAAGEPAL

SEQ ID NO: 12928 - protein, 9 aa, Homo sapiens
  misc_feature: Table A; Target 12928; HLA-A*33:01; C6orf222; ENSG00000189325; TAA
EAAGEPALR

SEQ ID NO: 12929 - protein, 9 aa, Homo sapiens
  misc_feature: Table A; Target 12929; HLA-A*33:03; C6orf222; ENSG00000189325; TAA
EAAGEPALR

SEQ ID NO: 12930 - protein, 9 aa, Homo sapiens
  misc_feature: Table A; Target 12930; HLA-A*68:01; C6orf222; ENSG00000189325; TAA
EAAGEPALR

SEQ ID NO: 12931 - protein, 9 aa, Homo sapiens
  misc_feature: Table A; Target 12931; HLA-C*07:06; C6orf222; ENSG00000189325; TAA
EAAGEPALR

SEQ ID NO: 12932 - protein, 10 aa, Homo sapiens
  misc_feature: Table A; Target 12932; HLA-A*33:01; C6orf222; ENSG00000189325; TAA
EAAGEPALRK

SEQ ID NO: 12933 - protein, 10 aa, Homo sapiens
  misc_feature: Table A; Target 12933; HLA-A*33:03; C6orf222; ENSG00000189325; TAA
EAAGEPALRK

SEQ ID NO: 12934 - protein, 10 aa, Homo sapiens
  misc_feature: Table A; Target 12934; HLA-A*68:01; C6orf222; ENSG00000189325; TAA
EAAGEPALRK

SEQ ID NO: 12935 - protein, 10 aa, Homo sapiens
  misc_feature: Table A; Target 12935; HLA-C*07:06; C6orf222; ENSG00000189325; TAA
EAAGEPALRK

SEQ ID NO: 12936 - protein, 11 aa, Homo sapiens
  misc_feature: Table A; Target 12936; HLA-A*33:01; C6orf222; ENSG00000189325; TAA
EAAGEPALRKK

SEQ ID NO: 12937 - protein, 11 aa, Homo sapiens
  misc_feature: Table A; Target 12937; HLA-A*33:03; C6orf222; ENSG00000189325; TAA
EAAGEPALRKK

SEQ ID NO: 12938 - protein, 11 aa, Homo sapiens
  misc_feature: Table A; Target 12938; HLA-A*68:01; C6orf222; ENSG00000189325; TAA
EAAGEPALRKK

SEQ ID NO: 12939 - protein, 11 aa, Homo sapiens
  misc_feature: Table A; Target 12939; HLA-C*07:06; C6orf222; ENSG00000189325; TAA
EAAGEPALRKK

SEQ ID NO: 12940 - protein, 8 aa, Homo sapiens
  misc_feature: Table A; Target 12940; HLA-A*33:03; C6orf222; ENSG00000189325; TAA
EADLGPAR

SEQ ID NO: 12941 - protein, 9 aa, Homo sapiens
  misc_feature: Table A; Target 12941; HLA-A*33:01; C6orf222; ENSG00000189325; TAA
EADLGPARR

SEQ ID NO: 12942 - protein, 9 aa, Homo sapiens
  misc_feature: Table A; Target 12942; HLA-A*33:03; C6orf222; ENSG00000189325; TAA
EADLGPARR

SEQ ID NO: 12943 - protein, 9 aa, Homo sapiens
  misc_feature: Table A; Target 12943; HLA-A*68:01; C6orf222; ENSG00000189325; TAA
EADLGPARR

SEQ ID NO: 12944 - protein, 9 aa, Homo sapiens
  misc_feature: Table A; Target 12944; HLA-C*05:01; C6orf222; ENSG00000189325; TAA
EADLGPARR

SEQ ID NO: 12945 - protein, 9 aa, Homo sapiens
  misc_feature: Table A; Target 12945; HLA-C*07:06; C6orf222; ENSG00000189325; TAA
EADLGPARR

SEQ ID NO: 12946 - protein, 9 aa, Homo sapiens
  misc_feature: Table A; Target 12946; HLA-A*25:01; C6orf222; ENSG00000189325; TAA
EAGAPGPSV

SEQ ID NO: 12947 - protein, 9 aa, Homo sapiens
  misc_feature: Table A; Target 12947; HLA-A*26:01; C6orf222; ENSG00000189325; TAA
EAGAPGPSV

SEQ ID NO: 12948 - protein, 9 aa, Homo sapiens
  misc_feature: Table A; Target 12948; HLA-B*35:03; C6orf222; ENSG00000189325; TAA
EAGAPGPSV

SEQ ID NO: 12949 - protein, 9 aa, Homo sapiens
  misc_feature: Table A; Target 12949; HLA-B*39:01; C6orf222; ENSG00000189325; TAA
EAGAPGPSV

SEQ ID NO: 12950 - protein, 9 aa, Homo sapiens
  misc_feature: Table A; Target 12950; HLA-B*51:01; C6orf222; ENSG00000189325; TAA
EAGAPGPSV

SEQ ID NO: 12951 - protein, 9 aa, Homo sapiens
  misc_feature: Table A; Target 12951; HLA-C*03:03; C6orf222; ENSG00000189325; TAA
EAGAPGPSV

SEQ ID NO: 12952 - protein, 9 aa, Homo sapiens
  misc_feature: Table A; Target 12952; HLA-C*05:01; C6orf222; ENSG00000189325; TAA
EAGAPGPSV

SEQ ID NO: 12953 - protein, 9 aa, Homo sapiens
  misc_feature: Table A; Target 12953; HLA-B*07:02; C6orf222; ENSG00000189325; TAA
EARGREEGL

SEQ ID NO: 12954 - protein, 9 aa, Homo sapiens
  misc_feature: Table A; Target 12954; HLA-B*08:01; C6orf222; ENSG00000189325; TAA
EARGREEGL

SEQ ID NO: 12955 - protein, 11 aa, Homo sapiens
  misc_feature: Table A; Target 12955; HLA-A*33:01; C6orf222; ENSG00000189325; TAA
EARGREEGLSK

SEQ ID NO: 12956 - protein, 10 aa, Homo sapiens
  misc_feature: Table A; Target 12956; HLA-A*25:01; C6orf222; ENSG00000189325; TAA
EAWPPKKSSF

SEQ ID NO: 12957 - protein, 10 aa, Homo sapiens
  misc_feature: Table A; Target 12957; HLA-A*03:01; C6orf222; ENSG00000189325; TAA
EDQPNITSPK

SEQ ID NO: 12958 - protein, 10 aa, Homo sapiens
  misc_feature: Table A; Target 12958; HLA-A*03:02; C6orf222; ENSG00000189325; TAA
EDQPNITSPK

SEQ ID NO: 12959 - protein, 10 aa, Homo sapiens
  misc_feature: Table A; Target 12959; HLA-A*11:01; C6orf222; ENSG00000189325; TAA
EDQPNITSPK

SEQ ID NO: 12960 - protein, 10 aa, Homo sapiens
  misc_feature: Table A; Target 12960; HLA-A*33:01; C6orf222; ENSG00000189325; TAA
EDQPNITSPK

SEQ ID NO: 12961 - protein, 10 aa, Homo sapiens
  misc_feature: Table A; Target 12961; HLA-A*33:03; C6orf222; ENSG00000189325; TAA
EDQPNITSPK

SEQ ID NO: 12962 - protein, 10 aa, Homo sapiens
  misc_feature: Table A; Target 12962; HLA-A*68:01; C6orf222; ENSG00000189325; TAA
EDQPNITSPK

SEQ ID NO: 12963 - protein, 10 aa, Homo sapiens
  misc_feature: Table A; Target 12963; HLA-B*27:02; C6orf222; ENSG00000189325; TAA
EDQPNITSPK

SEQ ID NO: 12964 - protein, 10 aa, Homo sapiens
  misc_feature: Table A; Target 12964; HLA-B*27:05; C6orf222; ENSG00000189325; TAA
EDQPNITSPK

SEQ ID NO: 12965 - protein, 10 aa, Homo sapiens
  misc_feature: Table A; Target 12965; HLA-C*07:06; C6orf222; ENSG00000189325; TAA
EDQPNITSPK

SEQ ID NO: 12966 - protein, 8 aa, Homo sapiens
  misc_feature: Table A; Target 12966; HLA-B*37:01; C6orf222; ENSG00000189325; TAA
EDSDHQSF

SEQ ID NO: 12967 - protein, 9 aa, Homo sapiens
  misc_feature: Table A; Target 12967; HLA-B*37:01; C6orf222; ENSG00000189325; TAA
EDSDHQSFL

SEQ ID NO: 12968 - protein, 10 aa, Homo sapiens
  misc_feature: Table A; Target 12968; HLA-A*30:01; C6orf222; ENSG00000189325; TAA
EEEQSLASQL

SEQ ID NO: 12969 - protein, 10 aa, Homo sapiens
  misc_feature: Table A; Target 12969; HLA-B*40:01; C6orf222; ENSG00000189325; TAA
EEEQSLASQL

SEQ ID NO: 12970 - protein, 11 aa, Homo sapiens
  misc_feature: Table A; Target 12970; HLA-B*40:01; C6orf222; ENSG00000189325; TAA
EEGLSKAAAAL

SEQ ID NO: 12971 - protein, 11 aa, Homo sapiens
  misc_feature: Table A; Target 12971; HLA-A*25:01; C6orf222; ENSG00000189325; TAA
EELPLDRASEY

SEQ ID NO: 12972 - protein, 11 aa, Homo sapiens
  misc_feature: Table A; Target 12972; HLA-A*26:01; C6orf222; ENSG00000189325; TAA
EELPLDRASEY

SEQ ID NO: 12973 - protein, 11 aa, Homo sapiens
  misc_feature: Table A; Target 12973; HLA-A*30:02; C6orf222; ENSG00000189325; TAA
EELPLDRASEY

SEQ ID NO: 12974 - protein, 11 aa, Homo sapiens
  misc_feature: Table A; Target 12974; HLA-B*18:01; C6orf222; ENSG00000189325; TAA
EELPLDRASEY

SEQ ID NO: 12975 - protein, 11 aa, Homo sapiens
  misc_feature: Table A; Target 12975; HLA-B*27:02; C6orf222; ENSG00000189325; TAA
EELPLDRASEY

SEQ ID NO: 12976 - protein, 11 aa, Homo sapiens
  misc_feature: Table A; Target 12976; HLA-B*44:02; C6orf222; ENSG00000189325; TAA
EELPLDRASEY

SEQ ID NO: 12977 - protein, 11 aa, Homo sapiens
  misc_feature: Table A; Target 12977; HLA-B*44:03; C6orf222; ENSG00000189325; TAA
EELPLDRASEY

SEQ ID NO: 12978 - protein, 11 aa, Homo sapiens
  misc_feature: Table A; Target 12978; HLA-C*16:04; C6orf222; ENSG00000189325; TAA
EELPLDRASEY

SEQ ID NO: 12979 - protein, 9 aa, Homo sapiens
  misc_feature: Table A; Target 12979; HLA-A*30:01; C6orf222; ENSG00000189325; TAA
EEQSLASQL

SEQ ID NO: 12980 - protein, 9 aa, Homo sapiens
  misc_feature: Table A; Target 12980; HLA-B*18:01; C6orf222; ENSG00000189325; TAA
EEQSLASQL

SEQ ID NO: 12981 - protein, 9 aa, Homo sapiens
  misc_feature: Table A; Target 12981; HLA-B*40:01; C6orf222; ENSG00000189325; TAA
EEQSLASQL

SEQ ID NO: 12982 - protein, 9 aa, Homo sapiens
  misc_feature: Table A; Target 12982; HLA-B*40:02; C6orf222; ENSG00000189325; TAA
EEQSLASQL

SEQ ID NO: 12983 - protein, 9 aa, Homo sapiens
  misc_feature: Table A; Target 12983; HLA-B*44:02; C6orf222; ENSG00000189325; TAA
EEQSLASQL

SEQ ID NO: 12984 - protein, 9 aa, Homo sapiens
  misc_feature: Table A; Target 12984; HLA-B*44:03; C6orf222; ENSG00000189325; TAA
EEQSLASQL

SEQ ID NO: 12985 - protein, 9 aa, Homo sapiens
  misc_feature: Table A; Target 12985; HLA-B*18:01; C6orf222; ENSG00000189325; TAA
EEVGVENPA

SEQ ID NO: 12986 - protein, 9 aa, Homo sapiens
  misc_feature: Table A; Target 12986; HLA-A*23:01; C6orf222; ENSG00000189325; TAA
EFIQKIISM

SEQ ID NO: 12987 - protein, 9 aa, Homo sapiens
  misc_feature: Table A; Target 12987; HLA-A*25:01; C6orf222; ENSG00000189325; TAA
EFIQKIISM

SEQ ID NO: 12988 - protein, 9 aa, Homo sapiens
  misc_feature: Table A; Target 12988; HLA-A*26:01; C6orf222; ENSG00000189325; TAA
EFIQKIISM

SEQ ID NO: 12989 - protein, 9 aa, Homo sapiens
  misc_feature: Table A; Target 12989; HLA-A*33:03; C6orf222; ENSG00000189325; TAA
EFIQKIISM

SEQ ID NO: 12990 - protein, 9 aa, Homo sapiens
  misc_feature: Table A; Target 12990; HLA-B*08:01; C6orf222; ENSG00000189325; TAA
EFIQKIISM

SEQ ID NO: 12991 - protein, 9 aa, Homo sapiens
  misc_feature: Table A; Target 12991; HLA-C*14:02; C6orf222; ENSG00000189325; TAA
EFIQKIISM

SEQ ID NO: 12992 - protein, 9 aa, Homo sapiens
  misc_feature: Table A; Target 12992; HLA-A*33:03; C6orf222; ENSG00000189325; TAA
EFSDSSLSK

SEQ ID NO: 12993 - protein, 10 aa, Homo sapiens
  misc_feature: Table A; Target 12993; HLA-A*25:01; C6orf222; ENSG00000189325; TAA
EFSDSSLSKL

SEQ ID NO: 12994 - protein, 11 aa, Homo sapiens
  misc_feature: Table A; Target 12994; HLA-A*33:01; C6orf222; ENSG00000189325; TAA
EGLSKAAAALR

SEQ ID NO: 12995 - protein, 11 aa, Homo sapiens
  misc_feature: Table A; Target 12995; HLA-A*33:03; C6orf222; ENSG00000189325; TAA
EGLSKAAAALR

SEQ ID NO: 12996 - protein, 10 aa, Homo sapiens
  misc_feature: Table A; Target 12996; HLA-A*25:01; C6orf222; ENSG00000189325; TAA
EIIIQKLVAL

SEQ ID NO: 12997 - protein, 10 aa, Homo sapiens
  misc_feature: Table A; Target 12997; HLA-B*08:01; C6orf222; ENSG00000189325; TAA
EIIIQKLVAL

SEQ ID NO: 12998 - protein, 10 aa, Homo sapiens
  misc_feature: Table A; Target 12998; HLA-A*01:01; C6orf222; ENSG00000189325; TAA
ELPLDRASEY

SEQ ID NO: 12999 - protein, 10 aa, Homo sapiens
  misc_feature: Table A; Target 12999; HLA-A*25:01; C6orf222; ENSG00000189325; TAA
ELPLDRASEY

SEQ ID NO: 13000 - protein, 10 aa, Homo sapiens
  misc_feature: Table A; Target 13000; HLA-A*26:01; C6orf222; ENSG00000189325; TAA
ELPLDRASEY

SEQ ID NO: 13001 - protein, 8 aa, Homo sapiens
  misc_feature: Table A; Target 13001; HLA-A*33:03; C6orf222; ENSG00000189325; TAA
ENPAPHCR

SEQ ID NO: 13002 - protein, 11 aa, Homo sapiens
  misc_feature: Table A; Target 13002; HLA-B*35:01; C6orf222; ENSG00000189325; TAA
EPLEAAGEPAL

SEQ ID NO: 13003 - protein, 11 aa, Homo sapiens
  misc_feature: Table A; Target 13003; HLA-B*35:03; C6orf222; ENSG00000189325; TAA
EPLEAAGEPAL

SEQ ID NO: 13004 - protein, 11 aa, Homo sapiens
  misc_feature: Table A; Target 13004; HLA-B*39:01; C6orf222; ENSG00000189325; TAA
EPLEAAGEPAL

SEQ ID NO: 13005 - protein, 11 aa, Homo sapiens
  misc_feature: Table A; Target 13005; HLA-B*55:01; C6orf222; ENSG00000189325; TAA
EPLEAAGEPAL

SEQ ID NO: 13006 - protein, 10 aa, Homo sapiens
  misc_feature: Table A; Target 13006; HLA-B*35:03; C6orf222; ENSG00000189325; TAA
EPLPAEGEPV

SEQ ID NO: 13007 - protein, 11 aa, Homo sapiens
  misc_feature: Table A; Target 13007; HLA-B*35:03; C6orf222; ENSG00000189325; TAA
EPLPAEGEPVV

SEQ ID NO: 13008 - protein, 11 aa, Homo sapiens
  misc_feature: Table A; Target 13008; HLA-B*51:01; C6orf222; ENSG00000189325; TAA
EPLPAEGEPVV

SEQ ID NO: 13009 - protein, 8 aa, Homo sapiens
  misc_feature: Table A; Target 13009; HLA-B*54:01; C6orf222; ENSG00000189325; TAA
EPVVISEA

SEQ ID NO: 13010 - protein, 10 aa, Homo sapiens
  misc_feature: Table A; Target 13010; HLA-B*39:01; C6orf222; ENSG00000189325; TAA
EQQGEEQPQV

SEQ ID NO: 13011 - protein, 8 aa, Homo sapiens
  misc_feature: Table A; Target 13011; HLA-B*39:01; C6orf222; ENSG00000189325; TAA
EQSLASQL

SEQ ID NO: 13012 - protein, 10 aa, Homo sapiens
  misc_feature: Table A; Target 13012; HLA-B*13:02; C6orf222; ENSG00000189325; TAA
EQSLASQLGV

SEQ ID NO: 13013 - protein, 9 aa, Homo sapiens
  misc_feature: Table A; Target 13013; HLA-A*33:01; C6orf222; ENSG00000189325; TAA
ESKEIIIQK

SEQ ID NO: 13014 - protein, 9 aa, Homo sapiens
  misc_feature: Table A; Target 13014; HLA-A*33:03; C6orf222; ENSG00000189325; TAA
ESKEIIIQK

SEQ ID NO: 13015 - protein, 9 aa, Homo sapiens
  misc_feature: Table A; Target 13015; HLA-A*68:01; C6orf222; ENSG00000189325; TAA
ESKEIIIQK

SEQ ID NO: 13016 - protein, 9 aa, Homo sapiens
  misc_feature: Table A; Target 13016; HLA-C*07:06; C6orf222; ENSG00000189325; TAA
ESKEIIIQK

SEQ ID NO: 13017 - protein, 10 aa, Homo sapiens
  misc_feature: Table A; Target 13017; HLA-A*25:01; C6orf222; ENSG00000189325; TAA
ESKEIIIQKL

SEQ ID NO: 13018 - protein, 10 aa, Homo sapiens
  misc_feature: Table A; Target 13018; HLA-A*26:01; C6orf222; ENSG00000189325; TAA
ESKEIIIQKL

SEQ ID NO: 13019 - protein, 10 aa, Homo sapiens
  misc_feature: Table A; Target 13019; HLA-A*33:03; C6orf222; ENSG00000189325; TAA
ESKEIIIQKL

SEQ ID NO: 13020 - protein, 10 aa, Homo sapiens
  misc_feature: Table A; Target 13020; HLA-A*68:01; C6orf222; ENSG00000189325; TAA
ESKEIIIQKL

SEQ ID NO: 13021 - protein, 10 aa, Homo sapiens
  misc_feature: Table A; Target 13021; HLA-A*68:02; C6orf222; ENSG00000189325; TAA
ESKEIIIQKL

SEQ ID NO: 13022 - protein, 11 aa, Homo sapiens
  misc_feature: Table A; Target 13022; HLA-A*33:03; C6orf222; ENSG00000189325; TAA
ETGDFLPSEQR

SEQ ID NO: 13023 - protein, 11 aa, Homo sapiens
  misc_feature: Table A; Target 13023; HLA-A*68:01; C6orf222; ENSG00000189325; TAA
ETGDFLPSEQR

SEQ ID NO: 13024 - protein, 10 aa, Homo sapiens
  misc_feature: Table A; Target 13024; HLA-A*25:01; C6orf222; ENSG00000189325; TAA
EVDGQLGQQI

SEQ ID NO: 13025 - protein, 10 aa, Homo sapiens
  misc_feature: Table A; Target 13025; HLA-A*26:01; C6orf222; ENSG00000189325; TAA
EVDGQLGQQI

SEQ ID NO: 13026 - protein, 10 aa, Homo sapiens
  misc_feature: Table A; Target 13026; HLA-A*68:01; C6orf222; ENSG00000189325; TAA
EVDGQLGQQI

SEQ ID NO: 13027 - protein, 10 aa, Homo sapiens
  misc_feature: Table A; Target 13027; HLA-A*68:02; C6orf222; ENSG00000189325; TAA
EVDGQLGQQI

SEQ ID NO: 13028 - protein, 10 aa, Homo sapiens
  misc_feature: Table A; Target 13028; HLA-B*38:01; C6orf222; ENSG00000189325; TAA
EVDGQLGQQI

SEQ ID NO: 13029 - protein, 10 aa, Homo sapiens
  misc_feature: Table A; Target 13029; HLA-C*05:01; C6orf222; ENSG00000189325; TAA
EVDGQLGQQI

SEQ ID NO: 13030 - protein, 11 aa, Homo sapiens
  misc_feature: Table A; Target 13030; HLA-A*33:03; C6orf222; ENSG00000189325; TAA
EVDGQLGQQIR

SEQ ID NO: 13031 - protein, 11 aa, Homo sapiens
  misc_feature: Table A; Target 13031; HLA-A*68:01; C6orf222; ENSG00000189325; TAA
EVDGQLGQQIR

SEQ ID NO: 13032 - protein, 11 aa, Homo sapiens
  misc_feature: Table A; Target 13032; HLA-C*07:06; C6orf222; ENSG00000189325; TAA
EVDGQLGQQIR

SEQ ID NO: 13033 - protein, 8 aa, Homo sapiens
  misc_feature: Table A; Target 13033; HLA-A*33:01; C6orf222; ENSG00000189325; TAA
EYKEFIQK

SEQ ID NO: 13034 - protein, 8 aa, Homo sapiens
  misc_feature: Table A; Target 13034; HLA-A*33:03; C6orf222; ENSG00000189325; TAA
EYKEFIQK

SEQ ID NO: 13035 - protein, 9 aa, Homo sapiens
  misc_feature: Table A; Target 13035; HLA-A*23:01; C6orf222; ENSG00000189325; TAA
EYKEFIQKI

SEQ ID NO: 13036 - protein, 9 aa, Homo sapiens
  misc_feature: Table A; Target 13036; HLA-A*24:02; C6orf222; ENSG00000189325; TAA
EYKEFIQKI

SEQ ID NO: 13037 - protein, 9 aa, Homo sapiens
  misc_feature: Table A; Target 13037; HLA-A*33:03; C6orf222; ENSG00000189325; TAA
EYKEFIQKI

SEQ ID NO: 13038 - protein, 9 aa, Homo sapiens
  misc_feature: Table A; Target 13038; HLA-A*32:01; C6orf222; ENSG00000189325; TAA
FAGSNSHAM

SEQ ID NO: 13039 - protein, 9 aa, Homo sapiens
  misc_feature: Table A; Target 13039; HLA-B*08:01; C6orf222; ENSG00000189325; TAA
FAGSNSHAM

SEQ ID NO: 13040 - protein, 9 aa, Homo sapiens
  misc_feature: Table A; Target 13040; HLA-B*15:01; C6orf222; ENSG00000189325; TAA
FAGSNSHAM

SEQ ID NO: 13041 - protein, 9 aa, Homo sapiens
  misc_feature: Table A; Target 13041; HLA-B*15:03; C6orf222; ENSG00000189325; TAA
FAGSNSHAM

SEQ ID NO: 13042 - protein, 9 aa, Homo sapiens
  misc_feature: Table A; Target 13042; HLA-B*27:05; C6orf222; ENSG00000189325; TAA
FAGSNSHAM

SEQ ID NO: 13043 - protein, 9 aa, Homo sapiens
  misc_feature: Table A; Target 13043; HLA-B*35:01; C6orf222; ENSG00000189325; TAA
FAGSNSHAM

SEQ ID NO: 13044 - protein, 9 aa, Homo sapiens
  misc_feature: Table A; Target 13044; HLA-B*35:03; C6orf222; ENSG00000189325; TAA
FAGSNSHAM

SEQ ID NO: 13045 - protein, 9 aa, Homo sapiens
  misc_feature: Table A; Target 13045; HLA-B*39:01; C6orf222; ENSG00000189325; TAA
FAGSNSHAM

SEQ ID NO: 13046 - protein, 9 aa, Homo sapiens
  misc_feature: Table A; Target 13046; HLA-B*40:01; C6orf222; ENSG00000189325; TAA
FAGSNSHAM

SEQ ID NO: 13047 - protein, 9 aa, Homo sapiens
  misc_feature: Table A; Target 13047; HLA-B*46:01; C6orf222; ENSG00000189325; TAA
FAGSNSHAM

SEQ ID NO: 13048 - protein, 9 aa, Homo sapiens
  misc_feature: Table A; Target 13048; HLA-B*54:01; C6orf222; ENSG00000189325; TAA
FAGSNSHAM

SEQ ID NO: 13049 - protein, 9 aa, Homo sapiens
  misc_feature: Table A; Target 13049; HLA-B*55:01; C6orf222; ENSG00000189325; TAA
FAGSNSHAM

SEQ ID NO: 13050 - protein, 9 aa, Homo sapiens
  misc_feature: Table A; Target 13050; HLA-B*58:01; C6orf222; ENSG00000189325; TAA
FAGSNSHAM

SEQ ID NO: 13051 - protein, 9 aa, Homo sapiens
  misc_feature: Table A; Target 13051; HLA-C*01:02; C6orf222; ENSG00000189325; TAA
FAGSNSHAM

SEQ ID NO: 13052 - protein, 9 aa, Homo sapiens
  misc_feature: Table A; Target 13052; HLA-C*02:02; C6orf222; ENSG00000189325; TAA
FAGSNSHAM

SEQ ID NO: 13053 - protein, 9 aa, Homo sapiens
  misc_feature: Table A; Target 13053; HLA-C*03:03; C6orf222; ENSG00000189325; TAA
FAGSNSHAM

SEQ ID NO: 13054 - protein, 9 aa, Homo sapiens
  misc_feature: Table A; Target 13054; HLA-C*03:04; C6orf222; ENSG00000189325; TAA
FAGSNSHAM

SEQ ID NO: 13055 - protein, 9 aa, Homo sapiens
  misc_feature: Table A; Target 13055; HLA-C*07:02; C6orf222; ENSG00000189325; TAA
FAGSNSHAM

SEQ ID NO: 13056 - protein, 9 aa, Homo sapiens
  misc_feature: Table A; Target 13056; HLA-C*07:04; C6orf222; ENSG00000189325; TAA
FAGSNSHAM

SEQ ID NO: 13057 - protein, 9 aa, Homo sapiens
  misc_feature: Table A; Target 13057; HLA-C*07:06; C6orf222; ENSG00000189325; TAA
FAGSNSHAM

SEQ ID NO: 13058 - protein, 9 aa, Homo sapiens
  misc_feature: Table A; Target 13058; HLA-C*12:03; C6orf222; ENSG00000189325; TAA
FAGSNSHAM

SEQ ID NO: 13059 - protein, 9 aa, Homo sapiens
  misc_feature: Table A; Target 13059; HLA-C*14:02; C6orf222; ENSG00000189325; TAA
FAGSNSHAM

SEQ ID NO: 13060 - protein, 9 aa, Homo sapiens
  misc_feature: Table A; Target 13060; HLA-C*16:01; C6orf222; ENSG00000189325; TAA
FAGSNSHAM

SEQ ID NO: 13061 - protein, 9 aa, Homo sapiens
  misc_feature: Table A; Target 13061; HLA-C*16:02; C6orf222; ENSG00000189325; TAA
FAGSNSHAM

SEQ ID NO: 13062 - protein, 9 aa, Homo sapiens
  misc_feature: Table A; Target 13062; HLA-C*16:04; C6orf222; ENSG00000189325; TAA
FAGSNSHAM

SEQ ID NO: 13063 - protein, 9 aa, Homo sapiens
  misc_feature: Table A; Target 13063; HLA-A*23:01; C6orf222; ENSG00000189325; TAA
FDVSLANKF

SEQ ID NO: 13064 - protein, 9 aa, Homo sapiens
  misc_feature: Table A; Target 13064; HLA-A*24:02; C6orf222; ENSG00000189325; TAA
FDVSLANKF

SEQ ID NO: 13065 - protein, 9 aa, Homo sapiens
  misc_feature: Table A; Target 13065; HLA-A*30:01; C6orf222; ENSG00000189325; TAA
FDVSLANKF

SEQ ID NO: 13066 - protein, 9 aa, Homo sapiens
  misc_feature: Table A; Target 13066; HLA-B*18:01; C6orf222; ENSG00000189325; TAA
FDVSLANKF

SEQ ID NO: 13067 - protein, 9 aa, Homo sapiens
  misc_feature: Table A; Target 13067; HLA-B*37:01; C6orf222; ENSG00000189325; TAA
FDVSLANKF

SEQ ID NO: 13068 - protein, 9 aa, Homo sapiens
  misc_feature: Table A; Target 13068; HLA-B*40:02; C6orf222; ENSG00000189325; TAA
FDVSLANKF

SEQ ID NO: 13069 - protein, 9 aa, Homo sapiens
  misc_feature: Table A; Target 13069; HLA-B*44:02; C6orf222; ENSG00000189325; TAA
FDVSLANKF

SEQ ID NO: 13070 - protein, 9 aa, Homo sapiens
  misc_feature: Table A; Target 13070; HLA-B*44:03; C6orf222; ENSG00000189325; TAA
FDVSLANKF

SEQ ID NO: 13071 - protein, 9 aa, Homo sapiens
  misc_feature: Table A; Target 13071; HLA-C*02:02; C6orf222; ENSG00000189325; TAA
FDVSLANKF

SEQ ID NO: 13072 - protein, 9 aa, Homo sapiens
  misc_feature: Table A; Target 13072; HLA-C*06:02; C6orf222; ENSG00000189325; TAA
FDVSLANKF

SEQ ID NO: 13073 - protein, 9 aa, Homo sapiens
  misc_feature: Table A; Target 13073; HLA-C*07:01; C6orf222; ENSG00000189325; TAA
FDVSLANKF

SEQ ID NO: 13074 - protein, 9 aa, Homo sapiens
  misc_feature: Table A; Target 13074; HLA-C*07:04; C6orf222; ENSG00000189325; TAA
FDVSLANKF

SEQ ID NO: 13075 - protein, 9 aa, Homo sapiens
  misc_feature: Table A; Target 13075; HLA-C*12:03; C6orf222; ENSG00000189325; TAA
FDVSLANKF

SEQ ID NO: 13076 - protein, 9 aa, Homo sapiens
  misc_feature: Table A; Target 13076; HLA-C*16:04; C6orf222; ENSG00000189325; TAA
FDVSLANKF

SEQ ID NO: 13077 - protein, 10 aa, Homo sapiens
  misc_feature: Table A; Target 13077; HLA-C*04:01; C6orf222; ENSG00000189325; TAA
FFYEFSDSSL

SEQ ID NO: 13078 - protein, 10 aa, Homo sapiens
  misc_feature: Table A; Target 13078; HLA-C*14:02; C6orf222; ENSG00000189325; TAA
FFYEFSDSSL

SEQ ID NO: 13079 - protein, 8 aa, Homo sapiens
  misc_feature: Table A; Target 13079; HLA-B*46:01; C6orf222; ENSG00000189325; TAA
FIQKIISM

SEQ ID NO: 13080 - protein, 9 aa, Homo sapiens
  misc_feature: Table A; Target 13080; HLA-A*02:03; C6orf222; ENSG00000189325; TAA
FIQKIISML

SEQ ID NO: 13081 - protein, 9 aa, Homo sapiens
  misc_feature: Table A; Target 13081; HLA-A*02:04; C6orf222; ENSG00000189325; TAA
FIQKIISML

SEQ ID NO: 13082 - protein, 9 aa, Homo sapiens
  misc_feature: Table A; Target 13082; HLA-A*02:07; C6orf222; ENSG00000189325; TAA
FIQKIISML

SEQ ID NO: 13083 - protein, 10 aa, Homo sapiens
  misc_feature: Table A; Target 13083; HLA-A*02:01; C6orf222; ENSG00000189325; TAA
FLIKVDGTGA

SEQ ID NO: 13084 - protein, 10 aa, Homo sapiens
  misc_feature: Table A; Target 13084; HLA-A*02:03; C6orf222; ENSG00000189325; TAA
FLIKVDGTGA

SEQ ID NO: 13085 - protein, 11 aa, Homo sapiens
  misc_feature: Table A; Target 13085; HLA-A*02:01; C6orf222; ENSG00000189325; TAA
FLIKVDGTGAL

SEQ ID NO: 13086 - protein, 11 aa, Homo sapiens
  misc_feature: Table A; Target 13086; HLA-A*02:03; C6orf222; ENSG00000189325; TAA
FLIKVDGTGAL

SEQ ID NO: 13087 - protein, 11 aa, Homo sapiens
  misc_feature: Table A; Target 13087; HLA-A*02:04; C6orf222; ENSG00000189325; TAA
FLIKVDGTGAL

SEQ ID NO: 13088 - protein, 11 aa, Homo sapiens
  misc_feature: Table A; Target 13088; HLA-A*02:07; C6orf222; ENSG00000189325; TAA
FLIKVDGTGAL

SEQ ID NO: 13089 - protein, 11 aa, Homo sapiens
  misc_feature: Table A; Target 13089; HLA-B*46:01; C6orf222; ENSG00000189325; TAA
FLIKVDGTGAL

SEQ ID NO: 13090 - protein, 11 aa, Homo sapiens
  misc_feature: Table A; Target 13090; HLA-C*01:02; C6orf222; ENSG00000189325; TAA
FLIKVDGTGAL

SEQ ID NO: 13091 - protein, 10 aa, Homo sapiens
  misc_feature: Table A; Target 13091; HLA-B*35:03; C6orf222; ENSG00000189325; TAA
FPYREDQPNI

SEQ ID NO: 13092 - protein, 10 aa, Homo sapiens
  misc_feature: Table A; Target 13092; HLA-B*51:01; C6orf222; ENSG00000189325; TAA
FPYREDQPNI

SEQ ID NO: 13093 - protein, 10 aa, Homo sapiens
  misc_feature: Table A; Target 13093; HLA-B*54:01; C6orf222; ENSG00000189325; TAA
FPYREDQPNI

SEQ ID NO: 13094 - protein, 10 aa, Homo sapiens
  misc_feature: Table A; Target 13094; HLA-B*55:01; C6orf222; ENSG00000189325; TAA
FPYREDQPNI

SEQ ID NO: 13095 - protein, 8 aa, Homo sapiens
  misc_feature: Table A; Target 13095; HLA-A*01:01; C6orf222; ENSG00000189325; TAA
FSDSSLSK

SEQ ID NO: 13096 - protein, 9 aa, Homo sapiens
  misc_feature: Table A; Target 13096; HLA-A*01:01; C6orf222; ENSG00000189325; TAA
FSDSSLSKL

SEQ ID NO: 13097 - protein, 9 aa, Homo sapiens
  misc_feature: Table A; Target 13097; HLA-A*02:07; C6orf222; ENSG00000189325; TAA
FSDSSLSKL

SEQ ID NO: 13098 - protein, 9 aa, Homo sapiens
  misc_feature: Table A; Target 13098; HLA-B*38:01; C6orf222; ENSG00000189325; TAA
FSDSSLSKL

SEQ ID NO: 13099 - protein, 9 aa, Homo sapiens
  misc_feature: Table A; Target 13099; HLA-B*39:01; C6orf222; ENSG00000189325; TAA
FSDSSLSKL

SEQ ID NO: 13100 - protein, 9 aa, Homo sapiens
  misc_feature: Table A; Target 13100; HLA-B*40:01; C6orf222; ENSG00000189325; TAA
FSDSSLSKL

SEQ ID NO: 13101 - protein, 9 aa, Homo sapiens
  misc_feature: Table A; Target 13101; HLA-C*03:03; C6orf222; ENSG00000189325; TAA
FSDSSLSKL

SEQ ID NO: 13102 - protein, 9 aa, Homo sapiens
  misc_feature: Table A; Target 13102; HLA-C*03:04; C6orf222; ENSG00000189325; TAA
FSDSSLSKL

SEQ ID NO: 13103 - protein, 9 aa, Homo sapiens
  misc_feature: Table A; Target 13103; HLA-C*04:01; C6orf222; ENSG00000189325; TAA
FSDSSLSKL

SEQ ID NO: 13104 - protein, 9 aa, Homo sapiens
  misc_feature: Table A; Target 13104; HLA-C*05:01; C6orf222; ENSG00000189325; TAA
FSDSSLSKL

SEQ ID NO: 13105 - protein, 9 aa, Homo sapiens
  misc_feature: Table A; Target 13105; HLA-C*07:04; C6orf222; ENSG00000189325; TAA
FSDSSLSKL

SEQ ID NO: 13106 - protein, 10 aa, Homo sapiens
  misc_feature: Table A; Target 13106; HLA-A*01:01; C6orf222; ENSG00000189325; TAA
FSDSSLSKLV

SEQ ID NO: 13107 - protein, 10 aa, Homo sapiens
  misc_feature: Table A; Target 13107; HLA-A*31:01; C6orf222; ENSG00000189325; TAA
FVRTGPEEPR

SEQ ID NO: 13108 - protein, 10 aa, Homo sapiens
  misc_feature: Table A; Target 13108; HLA-A*33:01; C6orf222; ENSG00000189325; TAA
FVRTGPEEPR

SEQ ID NO: 13109 - protein, 10 aa, Homo sapiens
  misc_feature: Table A; Target 13109; HLA-A*33:03; C6orf222; ENSG00000189325; TAA
FVRTGPEEPR

SEQ ID NO: 13110 - protein, 10 aa, Homo sapiens
  misc_feature: Table A; Target 13110; HLA-A*68:01; C6orf222; ENSG00000189325; TAA
FVRTGPEEPR

SEQ ID NO: 13111 - protein, 10 aa, Homo sapiens
  misc_feature: Table A; Target 13111; HLA-B*57:01; C6orf222; ENSG00000189325; TAA
FVRTGPEEPR

SEQ ID NO: 13112 - protein, 10 aa, Homo sapiens
  misc_feature: Table A; Target 13112; HLA-C*07:06; C6orf222; ENSG00000189325; TAA
FVRTGPEEPR

SEQ ID NO: 13113 - protein, 9 aa, Homo sapiens
  misc_feature: Table A; Target 13113; HLA-B*35:03; C6orf222; ENSG00000189325; TAA
FYEFSDSSL

SEQ ID NO: 13114 - protein, 9 aa, Homo sapiens
  misc_feature: Table A; Target 13114; HLA-C*01:02; C6orf222; ENSG00000189325; TAA
FYEFSDSSL

SEQ ID NO: 13115 - protein, 9 aa, Homo sapiens
  misc_feature: Table A; Target 13115; HLA-C*04:01; C6orf222; ENSG00000189325; TAA
FYEFSDSSL

SEQ ID NO: 13116 - protein, 9 aa, Homo sapiens
  misc_feature: Table A; Target 13116; HLA-C*05:01; C6orf222; ENSG00000189325; TAA
FYEFSDSSL

SEQ ID NO: 13117 - protein, 9 aa, Homo sapiens
  misc_feature: Table A; Target 13117; HLA-C*14:02; C6orf222; ENSG00000189325; TAA
FYEFSDSSL

SEQ ID NO: 13118 - protein, 11 aa, Homo sapiens
  misc_feature: Table A; Target 13118; HLA-A*25:01; C6orf222; ENSG00000189325; TAA
GAADVSSPEAW

SEQ ID NO: 13119 - protein, 11 aa, Homo sapiens
  misc_feature: Table A; Target 13119; HLA-B*44:03; C6orf222; ENSG00000189325; TAA
GAADVSSPEAW

SEQ ID NO: 13120 - protein, 11 aa, Homo sapiens
  misc_feature: Table A; Target 13120; HLA-B*57:01; C6orf222; ENSG00000189325; TAA
GAADVSSPEAW

SEQ ID NO: 13121 - protein, 11 aa, Homo sapiens
  misc_feature: Table A; Target 13121; HLA-B*58:01; C6orf222; ENSG00000189325; TAA
GAADVSSPEAW

SEQ ID NO: 13122 - protein, 11 aa, Homo sapiens
  misc_feature: Table A; Target 13122; HLA-C*16:04; C6orf222; ENSG00000189325; TAA
GAADVSSPEAW

SEQ ID NO: 13123 - protein, 10 aa, Homo sapiens
  misc_feature: Table A; Target 13123; HLA-B*39:01; C6orf222; ENSG00000189325; TAA
GAAGAASPEA

SEQ ID NO: 13124 - protein, 9 aa, Homo sapiens
  misc_feature: Table A; Target 13124; HLA-C*07:06; C6orf222; ENSG00000189325; TAA
GAASPEARR

SEQ ID NO: 13125 - protein, 10 aa, Homo sapiens
  misc_feature: Table A; Target 13125; HLA-C*16:01; C6orf222; ENSG00000189325; TAA
GAASPEARRP

SEQ ID NO: 13126 - protein, 10 aa, Homo sapiens
  misc_feature: Table A; Target 13126; HLA-C*16:02; C6orf222; ENSG00000189325; TAA
GAASPEARRP

SEQ ID NO: 13127 - protein, 11 aa, Homo sapiens
  misc_feature: Table A; Target 13127; HLA-C*16:01; C6orf222; ENSG00000189325; TAA
GAASPEARRPK

SEQ ID NO: 13128 - protein, 9 aa, Homo sapiens
  misc_feature: Table A; Target 13128; HLA-B*54:01; C6orf222; ENSG00000189325; TAA
GALDVSPHA

SEQ ID NO: 13129 - protein, 9 aa, Homo sapiens
  misc_feature: Table A; Target 13129; HLA-C*16:04; C6orf222; ENSG00000189325; TAA
GALDVSPHA

SEQ ID NO: 13130 - protein, 9 aa, Homo sapiens
  misc_feature: Table A; Target 13130; HLA-B*27:02; C6orf222; ENSG00000189325; TAA
GEADLGPAR

SEQ ID NO: 13131 - protein, 9 aa, Homo sapiens
  misc_feature: Table A; Target 13131; HLA-B*27:05; C6orf222; ENSG00000189325; TAA
GEADLGPAR

SEQ ID NO: 13132 - protein, 9 aa, Homo sapiens
  misc_feature: Table A; Target 13132; HLA-B*44:02; C6orf222; ENSG00000189325; TAA
GEADLGPAR

SEQ ID NO: 13133 - protein, 9 aa, Homo sapiens
  misc_feature: Table A; Target 13133; HLA-B*44:03; C6orf222; ENSG00000189325; TAA
GEADLGPAR

SEQ ID NO: 13134 - protein, 9 aa, Homo sapiens
  misc_feature: Table A; Target 13134; HLA-C*02:02; C6orf222; ENSG00000189325; TAA
GEADLGPAR

SEQ ID NO: 13135 - protein, 9 aa, Homo sapiens
  misc_feature: Table A; Target 13135; HLA-C*16:04; C6orf222; ENSG00000189325; TAA
GEADLGPAR

SEQ ID NO: 13136 - protein, 10 aa, Homo sapiens
  misc_feature: Table A; Target 13136; HLA-B*44:02; C6orf222; ENSG00000189325; TAA
GEADLGPARR

SEQ ID NO: 13137 - protein, 10 aa, Homo sapiens
  misc_feature: Table A; Target 13137; HLA-B*44:03; C6orf222; ENSG00000189325; TAA
GEADLGPARR

SEQ ID NO: 13138 - protein, 9 aa, Homo sapiens
  misc_feature: Table A; Target 13138; HLA-A*30:01; C6orf222; ENSG00000189325; TAA
GEDSDHQSF

SEQ ID NO: 13139 - protein, 9 aa, Homo sapiens
  misc_feature: Table A; Target 13139; HLA-B*15:03; C6orf222; ENSG00000189325; TAA
GEDSDHQSF

SEQ ID NO: 13140 - protein, 9 aa, Homo sapiens
  misc_feature: Table A; Target 13140; HLA-B*18:01; C6orf222; ENSG00000189325; TAA
GEDSDHQSF

SEQ ID NO: 13141 - protein, 9 aa, Homo sapiens
  misc_feature: Table A; Target 13141; HLA-B*27:02; C6orf222; ENSG00000189325; TAA
GEDSDHQSF

SEQ ID NO: 13142 - protein, 9 aa, Homo sapiens
  misc_feature: Table A; Target 13142; HLA-B*37:01; C6orf222; ENSG00000189325; TAA
GEDSDHQSF

SEQ ID NO: 13143 - protein, 9 aa, Homo sapiens
  misc_feature: Table A; Target 13143; HLA-B*38:01; C6orf222; ENSG00000189325; TAA
GEDSDHQSF

SEQ ID NO: 13144 - protein, 9 aa, Homo sapiens
  misc_feature: Table A; Target 13144; HLA-B*40:01; C6orf222; ENSG00000189325; TAA
GEDSDHQSF

SEQ ID NO: 13145 - protein, 9 aa, Homo sapiens
  misc_feature: Table A; Target 13145; HLA-B*44:02; C6orf222; ENSG00000189325; TAA
GEDSDHQSF

SEQ ID NO: 13146 - protein, 9 aa, Homo sapiens
  misc_feature: Table A; Target 13146; HLA-B*44:03; C6orf222; ENSG00000189325; TAA
GEDSDHQSF

SEQ ID NO: 13147 - protein, 9 aa, Homo sapiens
  misc_feature: Table A; Target 13147; HLA-B*49:01; C6orf222; ENSG00000189325; TAA
GEDSDHQSF

SEQ ID NO: 13148 - protein, 9 aa, Homo sapiens
  misc_feature: Table A; Target 13148; HLA-C*16:04; C6orf222; ENSG00000189325; TAA
GEDSDHQSF

SEQ ID NO: 13149 - protein, 10 aa, Homo sapiens
  misc_feature: Table A; Target 13149; HLA-A*30:01; C6orf222; ENSG00000189325; TAA
GEDSDHQSFL

SEQ ID NO: 13150 - protein, 10 aa, Homo sapiens
  misc_feature: Table A; Target 13150; HLA-B*40:01; C6orf222; ENSG00000189325; TAA
GEDSDHQSFL

SEQ ID NO: 13151 - protein, 10 aa, Homo sapiens
  misc_feature: Table A; Target 13151; HLA-B*49:01; C6orf222; ENSG00000189325; TAA
GEDSDHQSFL

SEQ ID NO: 13152 - protein, 11 aa, Homo sapiens
  misc_feature: Table A; Target 13152; HLA-B*49:01; C6orf222; ENSG00000189325; TAA
GEDSDHQSFLI

SEQ ID NO: 13153 - protein, 9 aa, Homo sapiens
  misc_feature: Table A; Target 13153; HLA-A*30:01; C6orf222; ENSG00000189325; TAA
GEPVVISEA

SEQ ID NO: 13154 - protein, 9 aa, Homo sapiens
  misc_feature: Table A; Target 13154; HLA-B*40:01; C6orf222; ENSG00000189325; TAA
GEPVVISEA

SEQ ID NO: 13155 - protein, 9 aa, Homo sapiens
  misc_feature: Table A; Target 13155; HLA-B*49:01; C6orf222; ENSG00000189325; TAA
GEPVVISEA

SEQ ID NO: 13156 - protein, 10 aa, Homo sapiens
  misc_feature: Table A; Target 13156; HLA-A*30:02; C6orf222; ENSG00000189325; TAA
GHRPSISSSY

SEQ ID NO: 13157 - protein, 10 aa, Homo sapiens
  misc_feature: Table A; Target 13157; HLA-A*32:01; C6orf222; ENSG00000189325; TAA
GHRPSISSSY

SEQ ID NO: 13158 - protein, 10 aa, Homo sapiens
  misc_feature: Table A; Target 13158; HLA-B*15:01; C6orf222; ENSG00000189325; TAA
GHRPSISSSY

SEQ ID NO: 13159 - protein, 10 aa, Homo sapiens
  misc_feature: Table A; Target 13159; HLA-B*15:03; C6orf222; ENSG00000189325; TAA
GHRPSISSSY

SEQ ID NO: 13160 - protein, 10 aa, Homo sapiens
  misc_feature: Table A; Target 13160; HLA-B*27:05; C6orf222; ENSG00000189325; TAA
GHTPEGAPQL

SEQ ID NO: 13161 - protein, 10 aa, Homo sapiens
  misc_feature: Table A; Target 13161; HLA-B*38:01; C6orf222; ENSG00000189325; TAA
GHTPEGAPQL

SEQ ID NO: 13162 - protein, 10 aa, Homo sapiens
  misc_feature: Table A; Target 13162; HLA-B*39:01; C6orf222; ENSG00000189325; TAA
GHTPEGAPQL

SEQ ID NO: 13163 - protein, 9 aa, Homo sapiens
  misc_feature: Table A; Target 13163; HLA-A*02:03; C6orf222; ENSG00000189325; TAA
GLSKAAAAL

SEQ ID NO: 13164 - protein, 9 aa, Homo sapiens
  misc_feature: Table A; Target 13164; HLA-A*03:02; C6orf222; ENSG00000189325; TAA
GLSKAAAAL

SEQ ID NO: 13165 - protein, 9 aa, Homo sapiens
  misc_feature: Table A; Target 13165; HLA-B*07:02; C6orf222; ENSG00000189325; TAA
GLSKAAAAL

SEQ ID NO: 13166 - protein, 9 aa, Homo sapiens
  misc_feature: Table A; Target 13166; HLA-C*01:02; C6orf222; ENSG00000189325; TAA
GLSKAAAAL

SEQ ID NO: 13167 - protein, 10 aa, Homo sapiens
  misc_feature: Table A; Target 13167; HLA-A*03:02; C6orf222; ENSG00000189325; TAA
GLSKAAAALR

SEQ ID NO: 13168 - protein, 9 aa, Homo sapiens
  misc_feature: Table A; Target 13168; HLA-A*31:01; C6orf222; ENSG00000189325; TAA
GQLGQQIRR

SEQ ID NO: 13169 - protein, 9 aa, Homo sapiens
  misc_feature: Table A; Target 13169; HLA-B*13:02; C6orf222; ENSG00000189325; TAA
GSNSHAMCI

SEQ ID NO: 13170 - protein, 9 aa, Homo sapiens
  misc_feature: Table A; Target 13170; HLA-B*27:05; C6orf222; ENSG00000189325; TAA
GVALPNPAP

SEQ ID NO: 13171 - protein, 9 aa, Homo sapiens
  misc_feature: Table A; Target 13171; HLA-C*06:02; C6orf222; ENSG00000189325; TAA
GVALPNPAP

SEQ ID NO: 13172 - protein, 10 aa, Homo sapiens
  misc_feature: Table A; Target 13172; HLA-B*56:01; C6orf222; ENSG00000189325; TAA
GVALPNPAPA

SEQ ID NO: 13173 - protein, 10 aa, Homo sapiens
  misc_feature: Table A; Target 13173; HLA-A*03:02; C6orf222; ENSG00000189325; TAA
GVENPAPHCR

SEQ ID NO: 13174 - protein, 10 aa, Homo sapiens
  misc_feature: Table A; Target 13174; HLA-A*31:01; C6orf222; ENSG00000189325; TAA
GVENPAPHCR

SEQ ID NO: 13175 - protein, 10 aa, Homo sapiens
  misc_feature: Table A; Target 13175; HLA-A*68:01; C6orf222; ENSG00000189325; TAA
GVENPAPHCR

SEQ ID NO: 13176 - protein, 10 aa, Homo sapiens
  misc_feature: Table A; Target 13176; HLA-C*07:06; C6orf222; ENSG00000189325; TAA
GVENPAPHCR

SEQ ID NO: 13177 - protein, 9 aa, Homo sapiens
  misc_feature: Table A; Target 13177; HLA-A*24:02; C6orf222; ENSG00000189325; TAA
GWLKTMLNF

SEQ ID NO: 13178 - protein, 8 aa, Homo sapiens
  misc_feature: Table A; Target 13178; HLA-B*51:01; C6orf222; ENSG00000189325; TAA
HAAEVTKA

SEQ ID NO: 13179 - protein, 8 aa, Homo sapiens
  misc_feature: Table A; Target 13179; HLA-B*54:01; C6orf222; ENSG00000189325; TAA
HAAEVTKA

SEQ ID NO: 13180 - protein, 8 aa, Homo sapiens
  misc_feature: Table A; Target 13180; HLA-B*56:01; C6orf222; ENSG00000189325; TAA
HAAEVTKA

SEQ ID NO: 13181 - protein, 8 aa, Homo sapiens
  misc_feature: Table A; Target 13181; HLA-C*12:03; C6orf222; ENSG00000189325; TAA
HAAEVTKA

SEQ ID NO: 13182 - protein, 9 aa, Homo sapiens
  misc_feature: Table A; Target 13182; HLA-A*32:01; C6orf222; ENSG00000189325; TAA
HAAEVTKAA

SEQ ID NO: 13183 - protein, 9 aa, Homo sapiens
  misc_feature: Table A; Target 13183; HLA-A*68:01; C6orf222; ENSG00000189325; TAA
HAAEVTKAA

SEQ ID NO: 13184 - protein, 9 aa, Homo sapiens
  misc_feature: Table A; Target 13184; HLA-A*68:02; C6orf222; ENSG00000189325; TAA
HAAEVTKAA

SEQ ID NO: 13185 - protein, 9 aa, Homo sapiens
  misc_feature: Table A; Target 13185; HLA-B*35:01; C6orf222; ENSG00000189325; TAA
HAAEVTKAA

SEQ ID NO: 13186 - protein, 9 aa, Homo sapiens
  misc_feature: Table A; Target 13186; HLA-B*35:03; C6orf222; ENSG00000189325; TAA
HAAEVTKAA

SEQ ID NO: 13187 - protein, 9 aa, Homo sapiens
  misc_feature: Table A; Target 13187; HLA-B*46:01; C6orf222; ENSG00000189325; TAA
HAAEVTKAA

SEQ ID NO: 13188 - protein, 9 aa, Homo sapiens
  misc_feature: Table A; Target 13188; HLA-B*51:01; C6orf222; ENSG00000189325; TAA
HAAEVTKAA

SEQ ID NO: 13189 - protein, 9 aa, Homo sapiens
  misc_feature: Table A; Target 13189; HLA-B*54:01; C6orf222; ENSG00000189325; TAA
HAAEVTKAA

SEQ ID NO: 13190 - protein, 9 aa, Homo sapiens
  misc_feature: Table A; Target 13190; HLA-B*55:01; C6orf222; ENSG00000189325; TAA
HAAEVTKAA

SEQ ID NO: 13191 - protein, 9 aa, Homo sapiens
  misc_feature: Table A; Target 13191; HLA-B*56:01; C6orf222; ENSG00000189325; TAA
HAAEVTKAA

SEQ ID NO: 13192 - protein, 9 aa, Homo sapiens
  misc_feature: Table A; Target 13192; HLA-C*02:02; C6orf222; ENSG00000189325; TAA
HAAEVTKAA

SEQ ID NO: 13193 - protein, 9 aa, Homo sapiens
  misc_feature: Table A; Target 13193; HLA-C*03:03; C6orf222; ENSG00000189325; TAA
HAAEVTKAA

SEQ ID NO: 13194 - protein, 9 aa, Homo sapiens
  misc_feature: Table A; Target 13194; HLA-C*03:04; C6orf222; ENSG00000189325; TAA
HAAEVTKAA

SEQ ID NO: 13195 - protein, 9 aa, Homo sapiens
  misc_feature: Table A; Target 13195; HLA-C*07:06; C6orf222; ENSG00000189325; TAA
HAAEVTKAA

SEQ ID NO: 13196 - protein, 9 aa, Homo sapiens
  misc_feature: Table A; Target 13196; HLA-C*12:03; C6orf222; ENSG00000189325; TAA
HAAEVTKAA

SEQ ID NO: 13197 - protein, 9 aa, Homo sapiens
  misc_feature: Table A; Target 13197; HLA-C*16:01; C6orf222; ENSG00000189325; TAA
HAAEVTKAA

SEQ ID NO: 13198 - protein, 9 aa, Homo sapiens
  misc_feature: Table A; Target 13198; HLA-C*16:02; C6orf222; ENSG00000189325; TAA
HAAEVTKAA

SEQ ID NO: 13199 - protein, 9 aa, Homo sapiens
  misc_feature: Table A; Target 13199; HLA-C*16:04; C6orf222; ENSG00000189325; TAA
HAAEVTKAA

SEQ ID NO: 13200 - protein, 8 aa, Homo sapiens
  misc_feature: Table A; Target 13200; HLA-B*13:02; C6orf222; ENSG00000189325; TAA
HQSFLIKV

SEQ ID NO: 13201 - protein, 9 aa, Homo sapiens
  misc_feature: Table A; Target 13201; HLA-A*26:01; C6orf222; ENSG00000189325; TAA
HRPSISSSY

SEQ ID NO: 13202 - protein, 9 aa, Homo sapiens
  misc_feature: Table A; Target 13202; HLA-A*30:02; C6orf222; ENSG00000189325; TAA
HRPSISSSY

SEQ ID NO: 13203 - protein, 9 aa, Homo sapiens
  misc_feature: Table A; Target 13203; HLA-A*32:01; C6orf222; ENSG00000189325; TAA
HRPSISSSY

SEQ ID NO: 13204 - protein, 9 aa, Homo sapiens
  misc_feature: Table A; Target 13204; HLA-B*07:02; C6orf222; ENSG00000189325; TAA
HRPSISSSY

SEQ ID NO: 13205 - protein, 9 aa, Homo sapiens
  misc_feature: Table A; Target 13205; HLA-B*15:01; C6orf222; ENSG00000189325; TAA
HRPSISSSY

SEQ ID NO: 13206 - protein, 9 aa, Homo sapiens
  misc_feature: Table A; Target 13206; HLA-B*15:03; C6orf222; ENSG00000189325; TAA
HRPSISSSY

SEQ ID NO: 13207 - protein, 9 aa, Homo sapiens
  misc_feature: Table A; Target 13207; HLA-B*27:02; C6orf222; ENSG00000189325; TAA
HRPSISSSY

SEQ ID NO: 13208 - protein, 9 aa, Homo sapiens
  misc_feature: Table A; Target 13208; HLA-B*27:05; C6orf222; ENSG00000189325; TAA
HRPSISSSY

SEQ ID NO: 13209 - protein, 9 aa, Homo sapiens
  misc_feature: Table A; Target 13209; HLA-B*39:01; C6orf222; ENSG00000189325; TAA
HRPSISSSY

SEQ ID NO: 13210 - protein, 9 aa, Homo sapiens
  misc_feature: Table A; Target 13210; HLA-B*46:01; C6orf222; ENSG00000189325; TAA
HRPSISSSY

SEQ ID NO: 13211 - protein, 9 aa, Homo sapiens
  misc_feature: Table A; Target 13211; HLA-C*01:02; C6orf222; ENSG00000189325; TAA
HRPSISSSY

SEQ ID NO: 13212 - protein, 9 aa, Homo sapiens
  misc_feature: Table A; Target 13212; HLA-C*02:02; C6orf222; ENSG00000189325; TAA
HRPSISSSY

SEQ ID NO: 13213 - protein, 9 aa, Homo sapiens
  misc_feature: Table A; Target 13213; HLA-C*06:02; C6orf222; ENSG00000189325; TAA
HRPSISSSY

SEQ ID NO: 13214 - protein, 9 aa, Homo sapiens
  misc_feature: Table A; Target 13214; HLA-C*07:01; C6orf222; ENSG00000189325; TAA
HRPSISSSY

SEQ ID NO: 13215 - protein, 9 aa, Homo sapiens
  misc_feature: Table A; Target 13215; HLA-C*07:02; C6orf222; ENSG00000189325; TAA
HRPSISSSY

SEQ ID NO: 13216 - protein, 9 aa, Homo sapiens
  misc_feature: Table A; Target 13216; HLA-C*07:04; C6orf222; ENSG00000189325; TAA
HRPSISSSY

SEQ ID NO: 13217 - protein, 9 aa, Homo sapiens
  misc_feature: Table A; Target 13217; HLA-C*16:04; C6orf222; ENSG00000189325; TAA
HRPSISSSY

SEQ ID NO: 13218 - protein, 9 aa, Homo sapiens
  misc_feature: Table A; Target 13218; HLA-B*07:02; C6orf222; ENSG00000189325; TAA
HRPSTSSSL

SEQ ID NO: 13219 - protein, 9 aa, Homo sapiens
  misc_feature: Table A; Target 13219; HLA-B*27:05; C6orf222; ENSG00000189325; TAA
HRPSTSSSL

SEQ ID NO: 13220 - protein, 9 aa, Homo sapiens
  misc_feature: Table A; Target 13220; HLA-B*39:01; C6orf222; ENSG00000189325; TAA
HRPSTSSSL

SEQ ID NO: 13221 - protein, 9 aa, Homo sapiens
  misc_feature: Table A; Target 13221; HLA-C*01:02; C6orf222; ENSG00000189325; TAA
HRPSTSSSL

SEQ ID NO: 13222 - protein, 9 aa, Homo sapiens
  misc_feature: Table A; Target 13222; HLA-C*06:02; C6orf222; ENSG00000189325; TAA
HRPSTSSSL

SEQ ID NO: 13223 - protein, 9 aa, Homo sapiens
  misc_feature: Table A; Target 13223; HLA-C*07:02; C6orf222; ENSG00000189325; TAA
HRPSTSSSL

SEQ ID NO: 13224 - protein, 9 aa, Homo sapiens
  misc_feature: Table A; Target 13224; HLA-A*01:01; C6orf222; ENSG00000189325; TAA
HSDSPAPSA

SEQ ID NO: 13225 - protein, 9 aa, Homo sapiens
  misc_feature: Table A; Target 13225; HLA-B*54:01; C6orf222; ENSG00000189325; TAA
HSDSPAPSA

SEQ ID NO: 13226 - protein, 9 aa, Homo sapiens
  misc_feature: Table A; Target 13226; HLA-C*03:03; C6orf222; ENSG00000189325; TAA
HSDSPAPSA

SEQ ID NO: 13227 - protein, 9 aa, Homo sapiens
  misc_feature: Table A; Target 13227; HLA-C*05:01; C6orf222; ENSG00000189325; TAA
HSDSPAPSA

SEQ ID NO: 13228 - protein, 9 aa, Homo sapiens
  misc_feature: Table A; Target 13228; HLA-A*02:07; C6orf222; ENSG00000189325; TAA
HTPEGAPQL

SEQ ID NO: 13229 - protein, 9 aa, Homo sapiens
  misc_feature: Table A; Target 13229; HLA-A*24:02; C6orf222; ENSG00000189325; TAA
HTPEGAPQL

SEQ ID NO: 13230 - protein, 9 aa, Homo sapiens
  misc_feature: Table A; Target 13230; HLA-A*25:01; C6orf222; ENSG00000189325; TAA
HTPEGAPQL

SEQ ID NO: 13231 - protein, 9 aa, Homo sapiens
  misc_feature: Table A; Target 13231; HLA-A*26:01; C6orf222; ENSG00000189325; TAA
HTPEGAPQL

SEQ ID NO: 13232 - protein, 9 aa, Homo sapiens
  misc_feature: Table A; Target 13232; HLA-A*68:01; C6orf222; ENSG00000189325; TAA
HTPEGAPQL

SEQ ID NO: 13233 - protein, 9 aa, Homo sapiens
  misc_feature: Table A; Target 13233; HLA-A*68:02; C6orf222; ENSG00000189325; TAA
HTPEGAPQL

SEQ ID NO: 13234 - protein, 9 aa, Homo sapiens
  misc_feature: Table A; Target 13234; HLA-B*35:03; C6orf222; ENSG00000189325; TAA
HTPEGAPQL

SEQ ID NO: 13235 - protein, 9 aa, Homo sapiens
  misc_feature: Table A; Target 13235; HLA-B*38:01; C6orf222; ENSG00000189325; TAA
HTPEGAPQL

SEQ ID NO: 13236 - protein, 9 aa, Homo sapiens
  misc_feature: Table A; Target 13236; HLA-B*39:01; C6orf222; ENSG00000189325; TAA
HTPEGAPQL

SEQ ID NO: 13237 - protein, 9 aa, Homo sapiens
  misc_feature: Table A; Target 13237; HLA-B*58:01; C6orf222; ENSG00000189325; TAA
HTPEGAPQL

SEQ ID NO: 13238 - protein, 9 aa, Homo sapiens
  misc_feature: Table A; Target 13238; HLA-C*01:02; C6orf222; ENSG00000189325; TAA
HTPEGAPQL

SEQ ID NO: 13239 - protein, 9 aa, Homo sapiens
  misc_feature: Table A; Target 13239; HLA-C*03:03; C6orf222; ENSG00000189325; TAA
HTPEGAPQL

SEQ ID NO: 13240 - protein, 9 aa, Homo sapiens
  misc_feature: Table A; Target 13240; HLA-C*03:04; C6orf222; ENSG00000189325; TAA
HTPEGAPQL

SEQ ID NO: 13241 - protein, 9 aa, Homo sapiens
  misc_feature: Table A; Target 13241; HLA-C*05:01; C6orf222; ENSG00000189325; TAA
HTPEGAPQL

SEQ ID NO: 13242 - protein, 9 aa, Homo sapiens
  misc_feature: Table A; Target 13242; HLA-C*07:06; C6orf222; ENSG00000189325; TAA
HTPEGAPQL

SEQ ID NO: 13243 - protein, 9 aa, Homo sapiens
  misc_feature: Table A; Target 13243; HLA-C*16:02; C6orf222; ENSG00000189325; TAA
HTPEGAPQL

SEQ ID NO: 13244 - protein, 9 aa, Homo sapiens
  misc_feature: Table A; Target 13244; HLA-A*29:02; C6orf222; ENSG00000189325; TAA
HYNCTQFPY

SEQ ID NO: 13245 - protein, 9 aa, Homo sapiens
  misc_feature: Table A; Target 13245; HLA-A*02:01; C6orf222; ENSG00000189325; TAA
IIIQKLVAL

SEQ ID NO: 13246 - protein, 9 aa, Homo sapiens
  misc_feature: Table A; Target 13246; HLA-A*02:03; C6orf222; ENSG00000189325; TAA
IIIQKLVAL

SEQ ID NO: 13247 - protein, 9 aa, Homo sapiens
  misc_feature: Table A; Target 13247; HLA-A*02:04; C6orf222; ENSG00000189325; TAA
IIIQKLVAL

SEQ ID NO: 13248 - protein, 9 aa, Homo sapiens
  misc_feature: Table A; Target 13248; HLA-A*02:07; C6orf222; ENSG00000189325; TAA
IIIQKLVAL

SEQ ID NO: 13249 - protein, 9 aa, Homo sapiens
  misc_feature: Table A; Target 13249; HLA-A*23:01; C6orf222; ENSG00000189325; TAA
IIIQKLVAL

SEQ ID NO: 13250 - protein, 9 aa, Homo sapiens
  misc_feature: Table A; Target 13250; HLA-B*08:01; C6orf222; ENSG00000189325; TAA
IIIQKLVAL

SEQ ID NO: 13251 - protein, 9 aa, Homo sapiens
  misc_feature: Table A; Target 13251; HLA-B*46:01; C6orf222; ENSG00000189325; TAA
IIIQKLVAL

SEQ ID NO: 13252 - protein, 9 aa, Homo sapiens
  misc_feature: Table A; Target 13252; HLA-C*01:02; C6orf222; ENSG00000189325; TAA
IIIQKLVAL

SEQ ID NO: 13253 - protein, 9 aa, Homo sapiens
  misc_feature: Table A; Target 13253; HLA-C*03:03; C6orf222; ENSG00000189325; TAA
IIIQKLVAL

SEQ ID NO: 13254 - protein, 9 aa, Homo sapiens
  misc_feature: Table A; Target 13254; HLA-C*03:04; C6orf222; ENSG00000189325; TAA
IIIQKLVAL

SEQ ID NO: 13255 - protein, 9 aa, Homo sapiens
  misc_feature: Table A; Target 13255; HLA-C*14:02; C6orf222; ENSG00000189325; TAA
IIIQKLVAL

SEQ ID NO: 13256 - protein, 9 aa, Homo sapiens
  misc_feature: Table A; Target 13256; HLA-A*02:04; C6orf222; ENSG00000189325; TAA
IIQKLVALL

SEQ ID NO: 13257 - protein, 9 aa, Homo sapiens
  misc_feature: Table A; Target 13257; HLA-A*02:04; C6orf222; ENSG00000189325; TAA
IIQMIVELL

SEQ ID NO: 13258 - protein, 9 aa, Homo sapiens
  misc_feature: Table A; Target 13258; HLA-B*38:01; C6orf222; ENSG00000189325; TAA
IIQMIVELL

SEQ ID NO: 13259 - protein, 10 aa, Homo sapiens
  misc_feature: Table A; Target 13259; HLA-B*27:02; C6orf222; ENSG00000189325; TAA
IIQMIVELLK

SEQ ID NO: 13260 - protein, 9 aa, Homo sapiens
  misc_feature: Table A; Target 13260; HLA-B*15:03; C6orf222; ENSG00000189325; TAA
IKVDGTGAL

SEQ ID NO: 13261 - protein, 9 aa, Homo sapiens
  misc_feature: Table A; Target 13261; HLA-B*39:01; C6orf222; ENSG00000189325; TAA
IKVDGTGAL

SEQ ID NO: 13262 - protein, 9 aa, Homo sapiens
  misc_feature: Table A; Target 13262; HLA-C*03:03; C6orf222; ENSG00000189325; TAA
IKVDGTGAL

SEQ ID NO: 13263 - protein, 9 aa, Homo sapiens
  misc_feature: Table A; Target 13263; HLA-A*01:01; C6orf222; ENSG00000189325; TAA
ILMGLRDHY

SEQ ID NO: 13264 - protein, 9 aa, Homo sapiens
  misc_feature: Table A; Target 13264; HLA-A*29:02; C6orf222; ENSG00000189325; TAA
ILMGLRDHY

SEQ ID NO: 13265 - protein, 9 aa, Homo sapiens
  misc_feature: Table A; Target 13265; HLA-A*30:02; C6orf222; ENSG00000189325; TAA
ILMGLRDHY

SEQ ID NO: 13266 - protein, 8 aa, Homo sapiens
  misc_feature: Table A; Target 13266; HLA-B*08:01; C6orf222; ENSG00000189325; TAA
IQKIISML

SEQ ID NO: 13267 - protein, 8 aa, Homo sapiens
  misc_feature: Table A; Target 13267; HLA-B*15:01; C6orf222; ENSG00000189325; TAA
IQKIISML

SEQ ID NO: 13268 - protein, 8 aa, Homo sapiens
  misc_feature: Table A; Target 13268; HLA-B*15:03; C6orf222; ENSG00000189325; TAA
IQKIISML

SEQ ID NO: 13269 - protein, 8 aa, Homo sapiens
  misc_feature: Table A; Target 13269; HLA-B*40:02; C6orf222; ENSG00000189325; TAA
IQKIISML

SEQ ID NO: 13270 - protein, 8 aa, Homo sapiens
  misc_feature: Table A; Target 13270; HLA-C*07:04; C6orf222; ENSG00000189325; TAA
IQKIISML

SEQ ID NO: 13271 - protein, 8 aa, Homo sapiens
  misc_feature: Table A; Target 13271; HLA-B*15:01; C6orf222; ENSG00000189325; TAA
IQKLVALL

SEQ ID NO: 13272 - protein, 8 aa, Homo sapiens
  misc_feature: Table A; Target 13272; HLA-B*13:02; C6orf222; ENSG00000189325; TAA
IQMIVELL

SEQ ID NO: 13273 - protein, 8 aa, Homo sapiens
  misc_feature: Table A; Target 13273; HLA-B*15:01; C6orf222; ENSG00000189325; TAA
IQMIVELL

SEQ ID NO: 13274 - protein, 8 aa, Homo sapiens
  misc_feature: Table A; Target 13274; HLA-B*15:03; C6orf222; ENSG00000189325; TAA
IQMIVELL

SEQ ID NO: 13275 - protein, 8 aa, Homo sapiens
  misc_feature: Table A; Target 13275; HLA-B*37:01; C6orf222; ENSG00000189325; TAA
IQMIVELL

SEQ ID NO: 13276 - protein, 8 aa, Homo sapiens
  misc_feature: Table A; Target 13276; HLA-C*05:01; C6orf222; ENSG00000189325; TAA
ISEAPSQA

SEQ ID NO: 13277 - protein, 9 aa, Homo sapiens
  misc_feature: Table A; Target 13277; HLA-A*01:01; C6orf222; ENSG00000189325; TAA
ISEAPSQAR

SEQ ID NO: 13278 - protein, 9 aa, Homo sapiens
  misc_feature: Table A; Target 13278; HLA-A*68:01; C6orf222; ENSG00000189325; TAA
ISEAPSQAR

SEQ ID NO: 13279 - protein, 9 aa, Homo sapiens
  misc_feature: Table A; Target 13279; HLA-C*07:06; C6orf222; ENSG00000189325; TAA
ISEAPSQAR

SEQ ID NO: 13280 - protein, 11 aa, Homo sapiens
  misc_feature: Table A; Target 13280; HLA-A*03:02; C6orf222; ENSG00000189325; TAA
ISSSYGLEEPK

SEQ ID NO: 13281 - protein, 11 aa, Homo sapiens
  misc_feature: Table A; Target 13281; HLA-A*11:01; C6orf222; ENSG00000189325; TAA
ISSSYGLEEPK

SEQ ID NO: 13282 - protein, 11 aa, Homo sapiens
  misc_feature: Table A; Target 13282; HLA-B*27:02; C6orf222; ENSG00000189325; TAA
ISSSYGLEEPK

SEQ ID NO: 13283 - protein, 9 aa, Homo sapiens
  misc_feature: Table A; Target 13283; HLA-C*16:01; C6orf222; ENSG00000189325; TAA
KAAAALRSG

SEQ ID NO: 13284 - protein, 9 aa, Homo sapiens
  misc_feature: Table A; Target 13284; HLA-C*16:02; C6orf222; ENSG00000189325; TAA
KAAAALRSG

SEQ ID NO: 13285 - protein, 10 aa, Homo sapiens
  misc_feature: Table A; Target 13285; HLA-B*57:01; C6orf222; ENSG00000189325; TAA
KALHWTTSDW

SEQ ID NO: 13286 - protein, 10 aa, Homo sapiens
  misc_feature: Table A; Target 13286; HLA-A*30:01; C6orf222; ENSG00000189325; TAA
KEFIQKIISM

SEQ ID NO: 13287 - protein, 10 aa, Homo sapiens
  misc_feature: Table A; Target 13287; HLA-B*37:01; C6orf222; ENSG00000189325; TAA
KEFIQKIISM

SEQ ID NO: 13288 - protein, 10 aa, Homo sapiens
  misc_feature: Table A; Target 13288; HLA-B*40:01; C6orf222; ENSG00000189325; TAA
KEFIQKIISM

SEQ ID NO: 13289 - protein, 10 aa, Homo sapiens
  misc_feature: Table A; Target 13289; HLA-B*40:02; C6orf222; ENSG00000189325; TAA
KEFIQKIISM

SEQ ID NO: 13290 - protein, 11 aa, Homo sapiens
  misc_feature: Table A; Target 13290; HLA-B*40:01; C6orf222; ENSG00000189325; TAA
KEGISQHPEPL

SEQ ID NO: 13291 - protein, 8 aa, Homo sapiens
  misc_feature: Table A; Target 13291; HLA-A*30:01; C6orf222; ENSG00000189325; TAA
KEIIIQKL

SEQ ID NO: 13292 - protein, 8 aa, Homo sapiens
  misc_feature: Table A; Target 13292; HLA-B*18:01; C6orf222; ENSG00000189325; TAA
KEIIIQKL

SEQ ID NO: 13293 - protein, 8 aa, Homo sapiens
  misc_feature: Table A; Target 13293; HLA-B*37:01; C6orf222; ENSG00000189325; TAA
KEIIIQKL

SEQ ID NO: 13294 - protein, 8 aa, Homo sapiens
  misc_feature: Table A; Target 13294; HLA-B*40:01; C6orf222; ENSG00000189325; TAA
KEIIIQKL

SEQ ID NO: 13295 - protein, 8 aa, Homo sapiens
  misc_feature: Table A; Target 13295; HLA-B*40:02; C6orf222; ENSG00000189325; TAA
KEIIIQKL

SEQ ID NO: 13296 - protein, 8 aa, Homo sapiens
  misc_feature: Table A; Target 13296; HLA-B*44:02; C6orf222; ENSG00000189325; TAA
KEIIIQKL

SEQ ID NO: 13297 - protein, 8 aa, Homo sapiens
  misc_feature: Table A; Target 13297; HLA-B*44:03; C6orf222; ENSG00000189325; TAA
KEIIIQKL

SEQ ID NO: 13298 - protein, 8 aa, Homo sapiens
  misc_feature: Table A; Target 13298; HLA-B*49:01; C6orf222; ENSG00000189325; TAA
KEIIIQKL

SEQ ID NO: 13299 - protein, 9 aa, Homo sapiens
  misc_feature: Table A; Target 13299; HLA-B*44:02; C6orf222; ENSG00000189325; TAA
KEIIIQKLV

SEQ ID NO: 13300 - protein, 9 aa, Homo sapiens
  misc_feature: Table A; Target 13300; HLA-B*44:03; C6orf222; ENSG00000189325; TAA
KEIIIQKLV

SEQ ID NO: 13301 - protein, 9 aa, Homo sapiens
  misc_feature: Table A; Target 13301; HLA-B*49:01; C6orf222; ENSG00000189325; TAA
KEIIIQKLV

SEQ ID NO: 13302 - protein, 9 aa, Homo sapiens
  misc_feature: Table A; Target 13302; HLA-A*02:01; C6orf222; ENSG00000189325; TAA
KLVALLQEV

SEQ ID NO: 13303 - protein, 9 aa, Homo sapiens
  misc_feature: Table A; Target 13303; HLA-A*02:03; C6orf222; ENSG00000189325; TAA
KLVALLQEV

SEQ ID NO: 13304 - protein, 9 aa, Homo sapiens
  misc_feature: Table A; Target 13304; HLA-A*02:04; C6orf222; ENSG00000189325; TAA
KLVALLQEV

SEQ ID NO: 13305 - protein, 9 aa, Homo sapiens
  misc_feature: Table A; Target 13305; HLA-A*02:07; C6orf222; ENSG00000189325; TAA
KLVALLQEV

SEQ ID NO: 13306 - protein, 9 aa, Homo sapiens
  misc_feature: Table A; Target 13306; HLA-B*13:02; C6orf222; ENSG00000189325; TAA
KLVALLQEV

SEQ ID NO: 13307 - protein, 9 aa, Homo sapiens
  misc_feature: Table A; Target 13307; HLA-B*55:01; C6orf222; ENSG00000189325; TAA
KLVALLQEV

SEQ ID NO: 13308 - protein, 10 aa, Homo sapiens
  misc_feature: Table A; Target 13308; HLA-B*07:02; C6orf222; ENSG00000189325; TAA
KPDQDAIIQM

SEQ ID NO: 13309 - protein, 10 aa, Homo sapiens
  misc_feature: Table A; Target 13309; HLA-B*35:01; C6orf222; ENSG00000189325; TAA
KPDQDAIIQM

SEQ ID NO: 13310 - protein, 10 aa, Homo sapiens
  misc_feature: Table A; Target 13310; HLA-B*35:03; C6orf222; ENSG00000189325; TAA
KPDQDAIIQM

SEQ ID NO: 13311 - protein, 10 aa, Homo sapiens
  misc_feature: Table A; Target 13311; HLA-B*55:01; C6orf222; ENSG00000189325; TAA
KPDQDAIIQM

SEQ ID NO: 13312 - protein, 9 aa, Homo sapiens
  misc_feature: Table A; Target 13312; HLA-C*06:02; C6orf222; ENSG00000189325; TAA
KRTSKTNPK

SEQ ID NO: 13313 - protein, 9 aa, Homo sapiens
  misc_feature: Table A; Target 13313; HLA-A*32:01; C6orf222; ENSG00000189325; TAA
KSQEKKTSL

SEQ ID NO: 13314 - protein, 9 aa, Homo sapiens
  misc_feature: Table A; Target 13314; HLA-B*08:01; C6orf222; ENSG00000189325; TAA
KSQEKKTSL

SEQ ID NO: 13315 - protein, 9 aa, Homo sapiens
  misc_feature: Table A; Target 13315; HLA-C*16:01; C6orf222; ENSG00000189325; TAA
KSQEKKTSL

SEQ ID NO: 13316 - protein, 9 aa, Homo sapiens
  misc_feature: Table A; Target 13316; HLA-A*32:01; C6orf222; ENSG00000189325; TAA
KSQEKRSSF

SEQ ID NO: 13317 - protein, 9 aa, Homo sapiens
  misc_feature: Table A; Target 13317; HLA-B*58:01; C6orf222; ENSG00000189325; TAA
KSQEKRSSF

SEQ ID NO: 13318 - protein, 9 aa, Homo sapiens
  misc_feature: Table A; Target 13318; HLA-C*16:01; C6orf222; ENSG00000189325; TAA
KSQEKRSSF

SEQ ID NO: 13319 - protein, 9 aa, Homo sapiens
  misc_feature: Table A; Target 13319; HLA-B*13:02; C6orf222; ENSG00000189325; TAA
KSSFLPLCV

SEQ ID NO: 13320 - protein, 9 aa, Homo sapiens
  misc_feature: Table A; Target 13320; HLA-A*31:01; C6orf222; ENSG00000189325; TAA
KTMLNFFVR

SEQ ID NO: 13321 - protein, 8 aa, Homo sapiens
  misc_feature: Table A; Target 13321; HLA-C*05:01; C6orf222; ENSG00000189325; TAA
KVDGTGAL

SEQ ID NO: 13322 - protein, 10 aa, Homo sapiens
  misc_feature: Table A; Target 13322; HLA-C*05:01; C6orf222; ENSG00000189325; TAA
KVDGTGALDV

SEQ ID NO: 13323 - protein, 9 aa, Homo sapiens
  misc_feature: Table A; Target 13323; HLA-B*08:01; C6orf222; ENSG00000189325; TAA
LAEKKARSL

SEQ ID NO: 13324 - protein, 9 aa, Homo sapiens
  misc_feature: Table A; Target 13324; HLA-A*30:01; C6orf222; ENSG00000189325; TAA
LASQLGVAL

SEQ ID NO: 13325 - protein, 9 aa, Homo sapiens
  misc_feature: Table A; Target 13325; HLA-B*07:02; C6orf222; ENSG00000189325; TAA
LASQLGVAL

SEQ ID NO: 13326 - protein, 9 aa, Homo sapiens
  misc_feature: Table A; Target 13326; HLA-B*08:01; C6orf222; ENSG00000189325; TAA
LASQLGVAL

SEQ ID NO: 13327 - protein, 9 aa, Homo sapiens
  misc_feature: Table A; Target 13327; HLA-B*27:02; C6orf222; ENSG00000189325; TAA
LASQLGVAL

SEQ ID NO: 13328 - protein, 9 aa, Homo sapiens
  misc_feature: Table A; Target 13328; HLA-B*27:05; C6orf222; ENSG00000189325; TAA
LASQLGVAL

SEQ ID NO: 13329 - protein, 9 aa, Homo sapiens
  misc_feature: Table A; Target 13329; HLA-B*35:01; C6orf222; ENSG00000189325; TAA
LASQLGVAL

SEQ ID NO: 13330 - protein, 9 aa, Homo sapiens
  misc_feature: Table A; Target 13330; HLA-B*35:03; C6orf222; ENSG00000189325; TAA
LASQLGVAL

SEQ ID NO: 13331 - protein, 9 aa, Homo sapiens
  misc_feature: Table A; Target 13331; HLA-B*38:01; C6orf222; ENSG00000189325; TAA
LASQLGVAL

SEQ ID NO: 13332 - protein, 9 aa, Homo sapiens
  misc_feature: Table A; Target 13332; HLA-B*39:01; C6orf222; ENSG00000189325; TAA
LASQLGVAL

SEQ ID NO: 13333 - protein, 9 aa, Homo sapiens
  misc_feature: Table A; Target 13333; HLA-B*40:01; C6orf222; ENSG00000189325; TAA
LASQLGVAL

SEQ ID NO: 13334 - protein, 9 aa, Homo sapiens
  misc_feature: Table A; Target 13334; HLA-B*46:01; C6orf222; ENSG00000189325; TAA
LASQLGVAL

SEQ ID NO: 13335 - protein, 9 aa, Homo sapiens
  misc_feature: Table A; Target 13335; HLA-B*54:01; C6orf222; ENSG00000189325; TAA
LASQLGVAL

SEQ ID NO: 13336 - protein, 9 aa, Homo sapiens
  misc_feature: Table A; Target 13336; HLA-B*56:01; C6orf222; ENSG00000189325; TAA
LASQLGVAL

SEQ ID NO: 13337 - protein, 9 aa, Homo sapiens
  misc_feature: Table A; Target 13337; HLA-C*01:02; C6orf222; ENSG00000189325; TAA
LASQLGVAL

SEQ ID NO: 13338 - protein, 9 aa, Homo sapiens
  misc_feature: Table A; Target 13338; HLA-C*02:02; C6orf222; ENSG00000189325; TAA
LASQLGVAL

SEQ ID NO: 13339 - protein, 9 aa, Homo sapiens
  misc_feature: Table A; Target 13339; HLA-C*03:03; C6orf222; ENSG00000189325; TAA
LASQLGVAL

SEQ ID NO: 13340 - protein, 9 aa, Homo sapiens
  misc_feature: Table A; Target 13340; HLA-C*03:04; C6orf222; ENSG00000189325; TAA
LASQLGVAL

SEQ ID NO: 13341 - protein, 9 aa, Homo sapiens
  misc_feature: Table A; Target 13341; HLA-C*05:01; C6orf222; ENSG00000189325; TAA
LASQLGVAL

SEQ ID NO: 13342 - protein, 9 aa, Homo sapiens
  misc_feature: Table A; Target 13342; HLA-C*07:04; C6orf222; ENSG00000189325; TAA
LASQLGVAL

SEQ ID NO: 13343 - protein, 9 aa, Homo sapiens
  misc_feature: Table A; Target 13343; HLA-C*07:06; C6orf222; ENSG00000189325; TAA
LASQLGVAL

SEQ ID NO: 13344 - protein, 9 aa, Homo sapiens
  misc_feature: Table A; Target 13344; HLA-C*12:03; C6orf222; ENSG00000189325; TAA
LASQLGVAL

SEQ ID NO: 13345 - protein, 9 aa, Homo sapiens
  misc_feature: Table A; Target 13345; HLA-C*14:02; C6orf222; ENSG00000189325; TAA
LASQLGVAL

SEQ ID NO: 13346 - protein, 9 aa, Homo sapiens
  misc_feature: Table A; Target 13346; HLA-C*16:01; C6orf222; ENSG00000189325; TAA
LASQLGVAL

SEQ ID NO: 13347 - protein, 9 aa, Homo sapiens
  misc_feature: Table A; Target 13347; HLA-C*16:02; C6orf222; ENSG00000189325; TAA
LASQLGVAL

SEQ ID NO: 13348 - protein, 9 aa, Homo sapiens
  misc_feature: Table A; Target 13348; HLA-C*16:04; C6orf222; ENSG00000189325; TAA
LASQLGVAL

SEQ ID NO: 13349 - protein, 9 aa, Homo sapiens
  misc_feature: Table A; Target 13349; HLA-A*30:01; C6orf222; ENSG00000189325; TAA
LEAAGEPAL

SEQ ID NO: 13350 - protein, 9 aa, Homo sapiens
  misc_feature: Table A; Target 13350; HLA-B*18:01; C6orf222; ENSG00000189325; TAA
LEAAGEPAL

SEQ ID NO: 13351 - protein, 9 aa, Homo sapiens
  misc_feature: Table A; Target 13351; HLA-B*35:03; C6orf222; ENSG00000189325; TAA
LEAAGEPAL

SEQ ID NO: 13352 - protein, 9 aa, Homo sapiens
  misc_feature: Table A; Target 13352; HLA-B*37:01; C6orf222; ENSG00000189325; TAA
LEAAGEPAL

SEQ ID NO: 13353 - protein, 9 aa, Homo sapiens
  misc_feature: Table A; Target 13353; HLA-B*38:01; C6orf222; ENSG00000189325; TAA
LEAAGEPAL

SEQ ID NO: 13354 - protein, 9 aa, Homo sapiens
  misc_feature: Table A; Target 13354; HLA-B*39:01; C6orf222; ENSG00000189325; TAA
LEAAGEPAL

SEQ ID NO: 13355 - protein, 9 aa, Homo sapiens
  misc_feature: Table A; Target 13355; HLA-B*40:01; C6orf222; ENSG00000189325; TAA
LEAAGEPAL

SEQ ID NO: 13356 - protein, 9 aa, Homo sapiens
  misc_feature: Table A; Target 13356; HLA-B*40:02; C6orf222; ENSG00000189325; TAA
LEAAGEPAL

SEQ ID NO: 13357 - protein, 9 aa, Homo sapiens
  misc_feature: Table A; Target 13357; HLA-B*44:02; C6orf222; ENSG00000189325; TAA
LEAAGEPAL

SEQ ID NO: 13358 - protein, 9 aa, Homo sapiens
  misc_feature: Table A; Target 13358; HLA-B*44:03; C6orf222; ENSG00000189325; TAA
LEAAGEPAL

SEQ ID NO: 13359 - protein, 9 aa, Homo sapiens
  misc_feature: Table A; Target 13359; HLA-B*49:01; C6orf222; ENSG00000189325; TAA
LEAAGEPAL

SEQ ID NO: 13360 - protein, 9 aa, Homo sapiens
  misc_feature: Table A; Target 13360; HLA-C*02:02; C6orf222; ENSG00000189325; TAA
LEAAGEPAL

SEQ ID NO: 13361 - protein, 9 aa, Homo sapiens
  misc_feature: Table A; Target 13361; HLA-C*03:04; C6orf222; ENSG00000189325; TAA
LEAAGEPAL

SEQ ID NO: 13362 - protein, 9 aa, Homo sapiens
  misc_feature: Table A; Target 13362; HLA-C*16:04; C6orf222; ENSG00000189325; TAA
LEAAGEPAL

SEQ ID NO: 13363 - protein, 9 aa, Homo sapiens
  misc_feature: Table A; Target 13363; HLA-B*49:01; C6orf222; ENSG00000189325; TAA
LEEPKVQEA

SEQ ID NO: 13364 - protein, 9 aa, Homo sapiens
  misc_feature: Table A; Target 13364; HLA-B*57:01; C6orf222; ENSG00000189325; TAA
LLKRVGDQW

SEQ ID NO: 13365 - protein, 9 aa, Homo sapiens
  misc_feature: Table A; Target 13365; HLA-A*02:01; C6orf222; ENSG00000189325; TAA
LLQEVDGQL

SEQ ID NO: 13366 - protein, 9 aa, Homo sapiens
  misc_feature: Table A; Target 13366; HLA-A*02:04; C6orf222; ENSG00000189325; TAA
LLQEVDGQL

SEQ ID NO: 13367 - protein, 9 aa, Homo sapiens
  misc_feature: Table A; Target 13367; HLA-A*02:07; C6orf222; ENSG00000189325; TAA
LLQEVDGQL

SEQ ID NO: 13368 - protein, 9 aa, Homo sapiens
  misc_feature: Table A; Target 13368; HLA-C*05:01; C6orf222; ENSG00000189325; TAA
LLQEVDGQL

SEQ ID NO: 13369 - protein, 9 aa, Homo sapiens
  misc_feature: Table A; Target 13369; HLA-B*07:02; C6orf222; ENSG00000189325; TAA
LPAEGEPVV

SEQ ID NO: 13370 - protein, 9 aa, Homo sapiens
  misc_feature: Table A; Target 13370; HLA-B*35:01; C6orf222; ENSG00000189325; TAA
LPAEGEPVV

SEQ ID NO: 13371 - protein, 9 aa, Homo sapiens
  misc_feature: Table A; Target 13371; HLA-B*35:03; C6orf222; ENSG00000189325; TAA
LPAEGEPVV

SEQ ID NO: 13372 - protein, 9 aa, Homo sapiens
  misc_feature: Table A; Target 13372; HLA-B*51:01; C6orf222; ENSG00000189325; TAA
LPAEGEPVV

SEQ ID NO: 13373 - protein, 9 aa, Homo sapiens
  misc_feature: Table A; Target 13373; HLA-B*54:01; C6orf222; ENSG00000189325; TAA
LPAEGEPVV

SEQ ID NO: 13374 - protein, 9 aa, Homo sapiens
  misc_feature: Table A; Target 13374; HLA-B*55:01; C6orf222; ENSG00000189325; TAA
LPAEGEPVV

SEQ ID NO: 13375 - protein, 9 aa, Homo sapiens
  misc_feature: Table A; Target 13375; HLA-B*56:01; C6orf222; ENSG00000189325; TAA
LPAEGEPVV

SEQ ID NO: 13376 - protein, 9 aa, Homo sapiens
  misc_feature: Table A; Target 13376; HLA-C*03:03; C6orf222; ENSG00000189325; TAA
LPAEGEPVV

SEQ ID NO: 13377 - protein, 10 aa, Homo sapiens
  misc_feature: Table A; Target 13377; HLA-B*35:01; C6orf222; ENSG00000189325; TAA
LPAEGEPVVI

SEQ ID NO: 13378 - protein, 10 aa, Homo sapiens
  misc_feature: Table A; Target 13378; HLA-B*35:03; C6orf222; ENSG00000189325; TAA
LPAEGEPVVI

SEQ ID NO: 13379 - protein, 10 aa, Homo sapiens
  misc_feature: Table A; Target 13379; HLA-B*51:01; C6orf222; ENSG00000189325; TAA
LPAEGEPVVI

SEQ ID NO: 13380 - protein, 10 aa, Homo sapiens
  misc_feature: Table A; Target 13380; HLA-B*54:01; C6orf222; ENSG00000189325; TAA
LPAEGEPVVI

SEQ ID NO: 13381 - protein, 10 aa, Homo sapiens
  misc_feature: Table A; Target 13381; HLA-B*55:01; C6orf222; ENSG00000189325; TAA
LPAEGEPVVI

SEQ ID NO: 13382 - protein, 10 aa, Homo sapiens
  misc_feature: Table A; Target 13382; HLA-B*56:01; C6orf222; ENSG00000189325; TAA
LPAEGEPVVI

SEQ ID NO: 13383 - protein, 10 aa, Homo sapiens
  misc_feature: Table A; Target 13383; HLA-C*05:01; C6orf222; ENSG00000189325; TAA
LPAEGEPVVI

SEQ ID NO: 13384 - protein, 9 aa, Homo sapiens
  misc_feature: Table A; Target 13384; HLA-A*01:01; C6orf222; ENSG00000189325; TAA
LPLDRASEY

SEQ ID NO: 13385 - protein, 9 aa, Homo sapiens
  misc_feature: Table A; Target 13385; HLA-A*26:01; C6orf222; ENSG00000189325; TAA
LPLDRASEY

SEQ ID NO: 13386 - protein, 9 aa, Homo sapiens
  misc_feature: Table A; Target 13386; HLA-A*29:02; C6orf222; ENSG00000189325; TAA
LPLDRASEY

SEQ ID NO: 13387 - protein, 9 aa, Homo sapiens
  misc_feature: Table A; Target 13387; HLA-A*30:02; C6orf222; ENSG00000189325; TAA
LPLDRASEY

SEQ ID NO: 13388 - protein, 9 aa, Homo sapiens
  misc_feature: Table A; Target 13388; HLA-B*07:02; C6orf222; ENSG00000189325; TAA
LPLDRASEY

SEQ ID NO: 13389 - protein, 9 aa, Homo sapiens
  misc_feature: Table A; Target 13389; HLA-B*08:01; C6orf222; ENSG00000189325; TAA
LPLDRASEY

SEQ ID NO: 13390 - protein, 9 aa, Homo sapiens
  misc_feature: Table A; Target 13390; HLA-B*15:01; C6orf222; ENSG00000189325; TAA
LPLDRASEY

SEQ ID NO: 13391 - protein, 9 aa, Homo sapiens
  misc_feature: Table A; Target 13391; HLA-B*15:03; C6orf222; ENSG00000189325; TAA
LPLDRASEY

SEQ ID NO: 13392 - protein, 9 aa, Homo sapiens
  misc_feature: Table A; Target 13392; HLA-B*18:01; C6orf222; ENSG00000189325; TAA
LPLDRASEY

SEQ ID NO: 13393 - protein, 9 aa, Homo sapiens
  misc_feature: Table A; Target 13393; HLA-B*35:01; C6orf222; ENSG00000189325; TAA
LPLDRASEY

SEQ ID NO: 13394 - protein, 9 aa, Homo sapiens
  misc_feature: Table A; Target 13394; HLA-B*35:03; C6orf222; ENSG00000189325; TAA
LPLDRASEY

SEQ ID NO: 13395 - protein, 9 aa, Homo sapiens
  misc_feature: Table A; Target 13395; HLA-B*39:01; C6orf222; ENSG00000189325; TAA
LPLDRASEY

SEQ ID NO: 13396 - protein, 9 aa, Homo sapiens
  misc_feature: Table A; Target 13396; HLA-B*46:01; C6orf222; ENSG00000189325; TAA
LPLDRASEY

SEQ ID NO: 13397 - protein, 9 aa, Homo sapiens
  misc_feature: Table A; Target 13397; HLA-B*51:01; C6orf222; ENSG00000189325; TAA
LPLDRASEY

SEQ ID NO: 13398 - protein, 9 aa, Homo sapiens
  misc_feature: Table A; Target 13398; HLA-B*54:01; C6orf222; ENSG00000189325; TAA
LPLDRASEY

SEQ ID NO: 13399 - protein, 9 aa, Homo sapiens
  misc_feature: Table A; Target 13399; HLA-B*55:01; C6orf222; ENSG00000189325; TAA
LPLDRASEY

SEQ ID NO: 13400 - protein, 9 aa, Homo sapiens
  misc_feature: Table A; Target 13400; HLA-C*01:02; C6orf222; ENSG00000189325; TAA
LPLDRASEY

SEQ ID NO: 13401 - protein, 9 aa, Homo sapiens
  misc_feature: Table A; Target 13401; HLA-C*02:02; C6orf222; ENSG00000189325; TAA
LPLDRASEY

SEQ ID NO: 13402 - protein, 9 aa, Homo sapiens
  misc_feature: Table A; Target 13402; HLA-C*03:03; C6orf222; ENSG00000189325; TAA
LPLDRASEY

SEQ ID NO: 13403 - protein, 9 aa, Homo sapiens
  misc_feature: Table A; Target 13403; HLA-C*05:01; C6orf222; ENSG00000189325; TAA
LPLDRASEY

SEQ ID NO: 13404 - protein, 9 aa, Homo sapiens
  misc_feature: Table A; Target 13404; HLA-C*07:02; C6orf222; ENSG00000189325; TAA
LPLDRASEY

SEQ ID NO: 13405 - protein, 9 aa, Homo sapiens
  misc_feature: Table A; Target 13405; HLA-C*07:04; C6orf222; ENSG00000189325; TAA
LPLDRASEY

SEQ ID NO: 13406 - protein, 9 aa, Homo sapiens
  misc_feature: Table A; Target 13406; HLA-C*14:02; C6orf222; ENSG00000189325; TAA
LPLDRASEY

SEQ ID NO: 13407 - protein, 9 aa, Homo sapiens
  misc_feature: Table A; Target 13407; HLA-C*16:01; C6orf222; ENSG00000189325; TAA
LPLDRASEY

SEQ ID NO: 13408 - protein, 9 aa, Homo sapiens
  misc_feature: Table A; Target 13408; HLA-C*16:02; C6orf222; ENSG00000189325; TAA
LPLDRASEY

SEQ ID NO: 13409 - protein, 8 aa, Homo sapiens
  misc_feature: Table A; Target 13409; HLA-B*07:02; C6orf222; ENSG00000189325; TAA
LPNPAPAV

SEQ ID NO: 13410 - protein, 8 aa, Homo sapiens
  misc_feature: Table A; Target 13410; HLA-B*35:01; C6orf222; ENSG00000189325; TAA
LPNPAPAV

SEQ ID NO: 13411 - protein, 8 aa, Homo sapiens
  misc_feature: Table A; Target 13411; HLA-B*35:03; C6orf222; ENSG00000189325; TAA
LPNPAPAV

SEQ ID NO: 13412 - protein, 8 aa, Homo sapiens
  misc_feature: Table A; Target 13412; HLA-B*51:01; C6orf222; ENSG00000189325; TAA
LPNPAPAV

SEQ ID NO: 13413 - protein, 8 aa, Homo sapiens
  misc_feature: Table A; Target 13413; HLA-B*54:01; C6orf222; ENSG00000189325; TAA
LPNPAPAV

SEQ ID NO: 13414 - protein, 8 aa, Homo sapiens
  misc_feature: Table A; Target 13414; HLA-B*55:01; C6orf222; ENSG00000189325; TAA
LPNPAPAV

SEQ ID NO: 13415 - protein, 8 aa, Homo sapiens
  misc_feature: Table A; Target 13415; HLA-B*56:01; C6orf222; ENSG00000189325; TAA
LPNPAPAV

SEQ ID NO: 13416 - protein, 8 aa, Homo sapiens
  misc_feature: Table A; Target 13416; HLA-C*07:02; C6orf222; ENSG00000189325; TAA
LPNPAPAV

SEQ ID NO: 13417 - protein, 8 aa, Homo sapiens
  misc_feature: Table A; Target 13417; HLA-C*16:02; C6orf222; ENSG00000189325; TAA
LPNPAPAV

SEQ ID NO: 13418 - protein, 9 aa, Homo sapiens
  misc_feature: Table A; Target 13418; HLA-A*31:01; C6orf222; ENSG00000189325; TAA
LPNPAPAVR

SEQ ID NO: 13419 - protein, 9 aa, Homo sapiens
  misc_feature: Table A; Target 13419; HLA-A*33:01; C6orf222; ENSG00000189325; TAA
LPNPAPAVR

SEQ ID NO: 13420 - protein, 9 aa, Homo sapiens
  misc_feature: Table A; Target 13420; HLA-A*33:03; C6orf222; ENSG00000189325; TAA
LPNPAPAVR

SEQ ID NO: 13421 - protein, 9 aa, Homo sapiens
  misc_feature: Table A; Target 13421; HLA-A*68:01; C6orf222; ENSG00000189325; TAA
LPNPAPAVR

SEQ ID NO: 13422 - protein, 9 aa, Homo sapiens
  misc_feature: Table A; Target 13422; HLA-B*07:02; C6orf222; ENSG00000189325; TAA
LPNPAPAVR

SEQ ID NO: 13423 - protein, 9 aa, Homo sapiens
  misc_feature: Table A; Target 13423; HLA-B*35:01; C6orf222; ENSG00000189325; TAA
LPNPAPAVR

SEQ ID NO: 13424 - protein, 9 aa, Homo sapiens
  misc_feature: Table A; Target 13424; HLA-B*35:03; C6orf222; ENSG00000189325; TAA
LPNPAPAVR

SEQ ID NO: 13425 - protein, 9 aa, Homo sapiens
  misc_feature: Table A; Target 13425; HLA-B*51:01; C6orf222; ENSG00000189325; TAA
LPNPAPAVR

SEQ ID NO: 13426 - protein, 9 aa, Homo sapiens
  misc_feature: Table A; Target 13426; HLA-B*54:01; C6orf222; ENSG00000189325; TAA
LPNPAPAVR

SEQ ID NO: 13427 - protein, 9 aa, Homo sapiens
  misc_feature: Table A; Target 13427; HLA-B*55:01; C6orf222; ENSG00000189325; TAA
LPNPAPAVR

SEQ ID NO: 13428 - protein, 9 aa, Homo sapiens
  misc_feature: Table A; Target 13428; HLA-B*56:01; C6orf222; ENSG00000189325; TAA
LPNPAPAVR

SEQ ID NO: 13429 - protein, 9 aa, Homo sapiens
  misc_feature: Table A; Target 13429; HLA-C*07:06; C6orf222; ENSG00000189325; TAA
LPNPAPAVR

SEQ ID NO: 13430 - protein, 10 aa, Homo sapiens
  misc_feature: Table A; Target 13430; HLA-A*03:02; C6orf222; ENSG00000189325; TAA
LPNPAPAVRK

SEQ ID NO: 13431 - protein, 10 aa, Homo sapiens
  misc_feature: Table A; Target 13431; HLA-B*35:01; C6orf222; ENSG00000189325; TAA
LPNPAPAVRK

SEQ ID NO: 13432 - protein, 10 aa, Homo sapiens
  misc_feature: Table A; Target 13432; HLA-B*51:01; C6orf222; ENSG00000189325; TAA
LPNPAPAVRK

SEQ ID NO: 13433 - protein, 10 aa, Homo sapiens
  misc_feature: Table A; Target 13433; HLA-B*56:01; C6orf222; ENSG00000189325; TAA
LPNPAPAVRK

SEQ ID NO: 13434 - protein, 9 aa, Homo sapiens
  misc_feature: Table A; Target 13434; HLA-B*54:01; C6orf222; ENSG00000189325; TAA
LPTAPSRKA

SEQ ID NO: 13435 - protein, 9 aa, Homo sapiens
  misc_feature: Table A; Target 13435; HLA-B*55:01; C6orf222; ENSG00000189325; TAA
LPTAPSRKA

SEQ ID NO: 13436 - protein, 9 aa, Homo sapiens
  misc_feature: Table A; Target 13436; HLA-B*56:01; C6orf222; ENSG00000189325; TAA
LPTAPSRKA

SEQ ID NO: 13437 - protein, 10 aa, Homo sapiens
  misc_feature: Table A; Target 13437; HLA-B*07:02; C6orf222; ENSG00000189325; TAA
LPTAPSRKAL

SEQ ID NO: 13438 - protein, 10 aa, Homo sapiens
  misc_feature: Table A; Target 13438; HLA-C*07:02; C6orf222; ENSG00000189325; TAA
LPTAPSRKAL

SEQ ID NO: 13439 - protein, 8 aa, Homo sapiens
  misc_feature: Table A; Target 13439; HLA-C*05:01; C6orf222; ENSG00000189325; TAA
LQEVDGQL

SEQ ID NO: 13440 - protein, 8 aa, Homo sapiens
  misc_feature: Table A; Target 13440; HLA-B*08:01; C6orf222; ENSG00000189325; TAA
LSKAAAAL

SEQ ID NO: 13441 - protein, 8 aa, Homo sapiens
  misc_feature: Table A; Target 13441; HLA-B*46:01; C6orf222; ENSG00000189325; TAA
LSKAAAAL

SEQ ID NO: 13442 - protein, 8 aa, Homo sapiens
  misc_feature: Table A; Target 13442; HLA-C*03:04; C6orf222; ENSG00000189325; TAA
LSKAAAAL

SEQ ID NO: 13443 - protein, 9 aa, Homo sapiens
  misc_feature: Table A; Target 13443; HLA-A*31:01; C6orf222; ENSG00000189325; TAA
LSKAAAALR

SEQ ID NO: 13444 - protein, 9 aa, Homo sapiens
  misc_feature: Table A; Target 13444; HLA-A*33:01; C6orf222; ENSG00000189325; TAA
LSKAAAALR

SEQ ID NO: 13445 - protein, 9 aa, Homo sapiens
  misc_feature: Table A; Target 13445; HLA-A*33:03; C6orf222; ENSG00000189325; TAA
LSKAAAALR

SEQ ID NO: 13446 - protein, 9 aa, Homo sapiens
  misc_feature: Table A; Target 13446; HLA-C*07:06; C6orf222; ENSG00000189325; TAA
LSKAAAALR

SEQ ID NO: 13447 - protein, 8 aa, Homo sapiens
  misc_feature: Table A; Target 13447; HLA-B*08:01; C6orf222; ENSG00000189325; TAA
LSKLVATL

SEQ ID NO: 13448 - protein, 8 aa, Homo sapiens
  misc_feature: Table A; Target 13448; HLA-B*40:02; C6orf222; ENSG00000189325; TAA
LSKLVATL

SEQ ID NO: 13449 - protein, 8 aa, Homo sapiens
  misc_feature: Table A; Target 13449; HLA-B*46:01; C6orf222; ENSG00000189325; TAA
LSKLVATL

SEQ ID NO: 13450 - protein, 8 aa, Homo sapiens
  misc_feature: Table A; Target 13450; HLA-C*07:04; C6orf222; ENSG00000189325; TAA
LSKLVATL

SEQ ID NO: 13451 - protein, 9 aa, Homo sapiens
  misc_feature: Table A; Target 13451; HLA-A*31:01; C6orf222; ENSG00000189325; TAA
LSKLVATLR

SEQ ID NO: 13452 - protein, 9 aa, Homo sapiens
  misc_feature: Table A; Target 13452; HLA-A*33:01; C6orf222; ENSG00000189325; TAA
LSKLVATLR

SEQ ID NO: 13453 - protein, 9 aa, Homo sapiens
  misc_feature: Table A; Target 13453; HLA-A*33:03; C6orf222; ENSG00000189325; TAA
LSKLVATLR

SEQ ID NO: 13454 - protein, 9 aa, Homo sapiens
  misc_feature: Table A; Target 13454; HLA-B*57:01; C6orf222; ENSG00000189325; TAA
LSKLVATLR

SEQ ID NO: 13455 - protein, 9 aa, Homo sapiens
  misc_feature: Table A; Target 13455; HLA-A*11:01; C6orf222; ENSG00000189325; TAA
LSLPTAPSR

SEQ ID NO: 13456 - protein, 9 aa, Homo sapiens
  misc_feature: Table A; Target 13456; HLA-A*31:01; C6orf222; ENSG00000189325; TAA
LSLPTAPSR

SEQ ID NO: 13457 - protein, 9 aa, Homo sapiens
  misc_feature: Table A; Target 13457; HLA-B*57:01; C6orf222; ENSG00000189325; TAA
LSLPTAPSR

SEQ ID NO: 13458 - protein, 9 aa, Homo sapiens
  misc_feature: Table A; Target 13458; HLA-B*58:01; C6orf222; ENSG00000189325; TAA
LSLPTAPSR

SEQ ID NO: 13459 - protein, 9 aa, Homo sapiens
  misc_feature: Table A; Target 13459; HLA-C*07:06; C6orf222; ENSG00000189325; TAA
LSLPTAPSR

SEQ ID NO: 13460 - protein, 10 aa, Homo sapiens
  misc_feature: Table A; Target 13460; HLA-A*03:01; C6orf222; ENSG00000189325; TAA
LSLPTAPSRK

SEQ ID NO: 13461 - protein, 10 aa, Homo sapiens
  misc_feature: Table A; Target 13461; HLA-A*11:01; C6orf222; ENSG00000189325; TAA
LSLPTAPSRK

SEQ ID NO: 13462 - protein, 9 aa, Homo sapiens
  misc_feature: Table A; Target 13462; HLA-A*02:03; C6orf222; ENSG00000189325; TAA
LVATLRSQV

SEQ ID NO: 13463 - protein, 9 aa, Homo sapiens
  misc_feature: Table A; Target 13463; HLA-A*32:01; C6orf222; ENSG00000189325; TAA
LVATLRSQV

SEQ ID NO: 13464 - protein, 8 aa, Homo sapiens
  misc_feature: Table A; Target 13464; HLA-C*14:02; C6orf222; ENSG00000189325; TAA
LYQFDVSL

SEQ ID NO: 13465 - protein, 11 aa, Homo sapiens
  misc_feature: Table A; Target 13465; HLA-B*27:02; C6orf222; ENSG00000189325; TAA
LYQFDVSLANK

SEQ ID NO: 13466 - protein, 9 aa, Homo sapiens
  misc_feature: Table A; Target 13466; HLA-B*15:03; C6orf222; ENSG00000189325; TAA
NKFAGSNSH

SEQ ID NO: 13467 - protein, 9 aa, Homo sapiens
  misc_feature: Table A; Target 13467; HLA-C*05:01; C6orf222; ENSG00000189325; TAA
PAEGEPVVI

SEQ ID NO: 13468 - protein, 8 aa, Homo sapiens
  misc_feature: Table A; Target 13468; HLA-A*01:01; C6orf222; ENSG00000189325; TAA
PLDRASEY

SEQ ID NO: 13469 - protein, 11 aa, Homo sapiens
  misc_feature: Table A; Target 13469; HLA-B*27:02; C6orf222; ENSG00000189325; TAA
PLEAAGEPALR

SEQ ID NO: 13470 - protein, 9 aa, Homo sapiens
  misc_feature: Table A; Target 13470; HLA-B*07:02; C6orf222; ENSG00000189325; TAA
PSVLPTPSE

SEQ ID NO: 13471 - protein, 9 aa, Homo sapiens
  misc_feature: Table A; Target 13471; HLA-C*07:02; C6orf222; ENSG00000189325; TAA
PTAPSRKAL

SEQ ID NO: 13472 - protein, 9 aa, Homo sapiens
  misc_feature: Table A; Target 13472; HLA-C*16:02; C6orf222; ENSG00000189325; TAA
PTAPSRKAL

SEQ ID NO: 13473 - protein, 9 aa, Homo sapiens
  misc_feature: Table A; Target 13473; HLA-A*24:02; C6orf222; ENSG00000189325; TAA
PYREDQPNI

SEQ ID NO: 13474 - protein, 8 aa, Homo sapiens
  misc_feature: Table A; Target 13474; HLA-B*37:01; C6orf222; ENSG00000189325; TAA
QDAIIQMI

SEQ ID NO: 13475 - protein, 10 aa, Homo sapiens
  misc_feature: Table A; Target 13475; HLA-B*40:01; C6orf222; ENSG00000189325; TAA
QEARGREEGL

SEQ ID NO: 13476 - protein, 11 aa, Homo sapiens
  misc_feature: Table A; Target 13476; HLA-B*27:02; C6orf222; ENSG00000189325; TAA
QEPGEELPLDR

SEQ ID NO: 13477 - protein, 9 aa, Homo sapiens
  misc_feature: Table A; Target 13477; HLA-B*44:02; C6orf222; ENSG00000189325; TAA
QEVDGQLGQ

SEQ ID NO: 13478 - protein, 9 aa, Homo sapiens
  misc_feature: Table A; Target 13478; HLA-B*44:03; C6orf222; ENSG00000189325; TAA
QEVDGQLGQ

SEQ ID NO: 13479 - protein, 9 aa, Homo sapiens
  misc_feature: Table A; Target 13479; HLA-B*49:01; C6orf222; ENSG00000189325; TAA
QEVDGQLGQ

SEQ ID NO: 13480 - protein, 11 aa, Homo sapiens
  misc_feature: Table A; Target 13480; HLA-A*30:01; C6orf222; ENSG00000189325; TAA
QEVDGQLGQQI

SEQ ID NO: 13481 - protein, 11 aa, Homo sapiens
  misc_feature: Table A; Target 13481; HLA-B*13:02; C6orf222; ENSG00000189325; TAA
QEVDGQLGQQI

SEQ ID NO: 13482 - protein, 11 aa, Homo sapiens
  misc_feature: Table A; Target 13482; HLA-B*27:02; C6orf222; ENSG00000189325; TAA
QEVDGQLGQQI

SEQ ID NO: 13483 - protein, 11 aa, Homo sapiens
  misc_feature: Table A; Target 13483; HLA-B*38:01; C6orf222; ENSG00000189325; TAA
QEVDGQLGQQI

SEQ ID NO: 13484 - protein, 11 aa, Homo sapiens
  misc_feature: Table A; Target 13484; HLA-B*39:01; C6orf222; ENSG00000189325; TAA
QEVDGQLGQQI

SEQ ID NO: 13485 - protein, 11 aa, Homo sapiens
  misc_feature: Table A; Target 13485; HLA-B*40:01; C6orf222; ENSG00000189325; TAA
QEVDGQLGQQI

SEQ ID NO: 13486 - protein, 11 aa, Homo sapiens
  misc_feature: Table A; Target 13486; HLA-B*40:02; C6orf222; ENSG00000189325; TAA
QEVDGQLGQQI

SEQ ID NO: 13487 - protein, 11 aa, Homo sapiens
  misc_feature: Table A; Target 13487; HLA-B*44:02; C6orf222; ENSG00000189325; TAA
QEVDGQLGQQI

SEQ ID NO: 13488 - protein, 11 aa, Homo sapiens
  misc_feature: Table A; Target 13488; HLA-B*44:03; C6orf222; ENSG00000189325; TAA
QEVDGQLGQQI

SEQ ID NO: 13489 - protein, 11 aa, Homo sapiens
  misc_feature: Table A; Target 13489; HLA-B*49:01; C6orf222; ENSG00000189325; TAA
QEVDGQLGQQI

SEQ ID NO: 13490 - protein, 11 aa, Homo sapiens
  misc_feature: Table A; Target 13490; HLA-C*16:04; C6orf222; ENSG00000189325; TAA
QEVDGQLGQQI

SEQ ID NO: 13491 - protein, 9 aa, Homo sapiens
  misc_feature: Table A; Target 13491; HLA-C*04:01; C6orf222; ENSG00000189325; TAA
QFDVSLANK

SEQ ID NO: 13492 - protein, 10 aa, Homo sapiens
  misc_feature: Table A; Target 13492; HLA-A*23:01; C6orf222; ENSG00000189325; TAA
QFDVSLANKF

SEQ ID NO: 13493 - protein, 10 aa, Homo sapiens
  misc_feature: Table A; Target 13493; HLA-A*24:02; C6orf222; ENSG00000189325; TAA
QFDVSLANKF

SEQ ID NO: 13494 - protein, 10 aa, Homo sapiens
  misc_feature: Table A; Target 13494; HLA-A*29:02; C6orf222; ENSG00000189325; TAA
QFDVSLANKF

SEQ ID NO: 13495 - protein, 10 aa, Homo sapiens
  misc_feature: Table A; Target 13495; HLA-B*35:01; C6orf222; ENSG00000189325; TAA
QFDVSLANKF

SEQ ID NO: 13496 - protein, 10 aa, Homo sapiens
  misc_feature: Table A; Target 13496; HLA-B*35:03; C6orf222; ENSG00000189325; TAA
QFDVSLANKF

SEQ ID NO: 13497 - protein, 10 aa, Homo sapiens
  misc_feature: Table A; Target 13497; HLA-B*38:01; C6orf222; ENSG00000189325; TAA
QFDVSLANKF

SEQ ID NO: 13498 - protein, 10 aa, Homo sapiens
  misc_feature: Table A; Target 13498; HLA-B*55:01; C6orf222; ENSG00000189325; TAA
QFDVSLANKF

SEQ ID NO: 13499 - protein, 10 aa, Homo sapiens
  misc_feature: Table A; Target 13499; HLA-C*04:01; C6orf222; ENSG00000189325; TAA
QFDVSLANKF

SEQ ID NO: 13500 - protein, 9 aa, Homo sapiens
  misc_feature: Table A; Target 13500; HLA-B*07:02; C6orf222; ENSG00000189325; TAA
QPNITSPKV

SEQ ID NO: 13501 - protein, 9 aa, Homo sapiens
  misc_feature: Table A; Target 13501; HLA-B*51:01; C6orf222; ENSG00000189325; TAA
QPNITSPKV

SEQ ID NO: 13502 - protein, 9 aa, Homo sapiens
  misc_feature: Table A; Target 13502; HLA-B*55:01; C6orf222; ENSG00000189325; TAA
QPNITSPKV

SEQ ID NO: 13503 - protein, 9 aa, Homo sapiens
  misc_feature: Table A; Target 13503; HLA-B*56:01; C6orf222; ENSG00000189325; TAA
QPNITSPKV

SEQ ID NO: 13504 - protein, 9 aa, Homo sapiens
  misc_feature: Table A; Target 13504; HLA-C*07:02; C6orf222; ENSG00000189325; TAA
QPNITSPKV

SEQ ID NO: 13505 - protein, 9 aa, Homo sapiens
  misc_feature: Table A; Target 13505; HLA-B*56:01; C6orf222; ENSG00000189325; TAA
QPQVQQEEV

SEQ ID NO: 13506 - protein, 9 aa, Homo sapiens
  misc_feature: Table A; Target 13506; HLA-A*02:01; C6orf222; ENSG00000189325; TAA
QQGEEQPQV

SEQ ID NO: 13507 - protein, 9 aa, Homo sapiens
  misc_feature: Table A; Target 13507; HLA-B*13:02; C6orf222; ENSG00000189325; TAA
QQGEEQPQV

SEQ ID NO: 13508 - protein, 9 aa, Homo sapiens
  misc_feature: Table A; Target 13508; HLA-B*39:01; C6orf222; ENSG00000189325; TAA
QQGEEQPQV

SEQ ID NO: 13509 - protein, 9 aa, Homo sapiens
  misc_feature: Table A; Target 13509; HLA-B*13:02; C6orf222; ENSG00000189325; TAA
QSLASQLGV

SEQ ID NO: 13510 - protein, 10 aa, Homo sapiens
  misc_feature: Table A; Target 13510; HLA-B*40:01; C6orf222; ENSG00000189325; TAA
REEGLSKAAA

SEQ ID NO: 13511 - protein, 10 aa, Homo sapiens
  misc_feature: Table A; Target 13511; HLA-B*40:02; C6orf222; ENSG00000189325; TAA
REEGLSKAAA

SEQ ID NO: 13512 - protein, 9 aa, Homo sapiens
  misc_feature: Table A; Target 13512; HLA-A*02:01; C6orf222; ENSG00000189325; TAA
RLYQFDVSL

SEQ ID NO: 13513 - protein, 9 aa, Homo sapiens
  misc_feature: Table A; Target 13513; HLA-A*02:03; C6orf222; ENSG00000189325; TAA
RLYQFDVSL

SEQ ID NO: 13514 - protein, 9 aa, Homo sapiens
  misc_feature: Table A; Target 13514; HLA-A*02:04; C6orf222; ENSG00000189325; TAA
RLYQFDVSL

SEQ ID NO: 13515 - protein, 9 aa, Homo sapiens
  misc_feature: Table A; Target 13515; HLA-A*02:07; C6orf222; ENSG00000189325; TAA
RLYQFDVSL

SEQ ID NO: 13516 - protein, 9 aa, Homo sapiens
  misc_feature: Table A; Target 13516; HLA-A*03:01; C6orf222; ENSG00000189325; TAA
RLYQFDVSL

SEQ ID NO: 13517 - protein, 9 aa, Homo sapiens
  misc_feature: Table A; Target 13517; HLA-B*13:02; C6orf222; ENSG00000189325; TAA
RLYQFDVSL

SEQ ID NO: 13518 - protein, 10 aa, Homo sapiens
  misc_feature: Table A; Target 13518; HLA-A*02:03; C6orf222; ENSG00000189325; TAA
RLYQFDVSLA

SEQ ID NO: 13519 - protein, 10 aa, Homo sapiens
  misc_feature: Table A; Target 13519; HLA-B*07:02; C6orf222; ENSG00000189325; TAA
RPQAPGKGSE

SEQ ID NO: 13520 - protein, 9 aa, Homo sapiens
  misc_feature: Table A; Target 13520; HLA-B*07:02; C6orf222; ENSG00000189325; TAA
RPSFLPLCV

SEQ ID NO: 13521 - protein, 9 aa, Homo sapiens
  misc_feature: Table A; Target 13521; HLA-B*56:01; C6orf222; ENSG00000189325; TAA
RPSFLPLCV

SEQ ID NO: 13522 - protein, 8 aa, Homo sapiens
  misc_feature: Table A; Target 13522; HLA-B*07:02; C6orf222; ENSG00000189325; TAA
RPSISSSY

SEQ ID NO: 13523 - protein, 10 aa, Homo sapiens
  misc_feature: Table A; Target 13523; HLA-B*07:02; C6orf222; ENSG00000189325; TAA
RPSISSSYGL

SEQ ID NO: 13524 - protein, 8 aa, Homo sapiens
  misc_feature: Table A; Target 13524; HLA-B*07:02; C6orf222; ENSG00000189325; TAA
RPSTSSSL

SEQ ID NO: 13525 - protein, 8 aa, Homo sapiens
  misc_feature: Table A; Target 13525; HLA-C*07:02; C6orf222; ENSG00000189325; TAA
RPSTSSSL

SEQ ID NO: 13526 - protein, 11 aa, Homo sapiens
  misc_feature: Table A; Target 13526; HLA-A*31:01; C6orf222; ENSG00000189325; TAA
RSGEADLGPAR

SEQ ID NO: 13527 - protein, 11 aa, Homo sapiens
  misc_feature: Table A; Target 13527; HLA-A*03:02; C6orf222; ENSG00000189325; TAA
RSLDRPQAPGK

SEQ ID NO: 13528 - protein, 9 aa, Homo sapiens
  misc_feature: Table A; Target 13528; HLA-A*03:02; C6orf222; ENSG00000189325; TAA
RSQVAHSSK

SEQ ID NO: 13529 - protein, 10 aa, Homo sapiens
  misc_feature: Table A; Target 13529; HLA-A*03:01; C6orf222; ENSG00000189325; TAA
RTGPEEPREK

SEQ ID NO: 13530 - protein, 10 aa, Homo sapiens
  misc_feature: Table A; Target 13530; HLA-A*03:02; C6orf222; ENSG00000189325; TAA
RTGPEEPREK

SEQ ID NO: 13531 - protein, 10 aa, Homo sapiens
  misc_feature: Table A; Target 13531; HLA-A*11:01; C6orf222; ENSG00000189325; TAA
RTGPEEPREK

SEQ ID NO: 13532 - protein, 10 aa, Homo sapiens
  misc_feature: Table A; Target 13532; HLA-B*57:01; C6orf222; ENSG00000189325; TAA
RTGPEEPREK

SEQ ID NO: 13533 - protein, 9 aa, Homo sapiens
  misc_feature: Table A; Target 13533; HLA-A*03:02; C6orf222; ENSG00000189325; TAA
RTSKTNPKK

SEQ ID NO: 13534 - protein, 8 aa, Homo sapiens
  misc_feature: Table A; Target 13534; HLA-B*37:01; C6orf222; ENSG00000189325; TAA
SDHQSFLI

SEQ ID NO: 13535 - protein, 8 aa, Homo sapiens
  misc_feature: Table A; Target 13535; HLA-B*37:01; C6orf222; ENSG00000189325; TAA
SDSPAPSA

SEQ ID NO: 13536 - protein, 8 aa, Homo sapiens
  misc_feature: Table A; Target 13536; HLA-B*37:01; C6orf222; ENSG00000189325; TAA
SDSSLSKL

SEQ ID NO: 13537 - protein, 9 aa, Homo sapiens
  misc_feature: Table A; Target 13537; HLA-B*37:01; C6orf222; ENSG00000189325; TAA
SDSSLSKLV

SEQ ID NO: 13538 - protein, 9 aa, Homo sapiens
  misc_feature: Table A; Target 13538; HLA-C*06:02; C6orf222; ENSG00000189325; TAA
SDSSLSKLV

SEQ ID NO: 13539 - protein, 9 aa, Homo sapiens
  misc_feature: Table A; Target 13539; HLA-C*16:02; C6orf222; ENSG00000189325; TAA
SDSSLSKLV

SEQ ID NO: 13540 - protein, 9 aa, Homo sapiens
  misc_feature: Table A; Target 13540; HLA-B*44:03; C6orf222; ENSG00000189325; TAA
SEAPSQARG

SEQ ID NO: 13541 - protein, 10 aa, Homo sapiens
  misc_feature: Table A; Target 13541; HLA-B*40:01; C6orf222; ENSG00000189325; TAA
SESQEPGEEL

SEQ ID NO: 13542 - protein, 9 aa, Homo sapiens
  misc_feature: Table A; Target 13542; HLA-A*03:01; C6orf222; ENSG00000189325; TAA
SEYKEFIQK

SEQ ID NO: 13543 - protein, 9 aa, Homo sapiens
  misc_feature: Table A; Target 13543; HLA-A*03:02; C6orf222; ENSG00000189325; TAA
SEYKEFIQK

SEQ ID NO: 13544 - protein, 9 aa, Homo sapiens
  misc_feature: Table A; Target 13544; HLA-A*11:01; C6orf222; ENSG00000189325; TAA
SEYKEFIQK

SEQ ID NO: 13545 - protein, 9 aa, Homo sapiens
  misc_feature: Table A; Target 13545; HLA-B*49:01; C6orf222; ENSG00000189325; TAA
SEYKEFIQK

SEQ ID NO: 13546 - protein, 10 aa, Homo sapiens
  misc_feature: Table A; Target 13546; HLA-A*30:01; C6orf222; ENSG00000189325; TAA
SEYKEFIQKI

SEQ ID NO: 13547 - protein, 10 aa, Homo sapiens
  misc_feature: Table A; Target 13547; HLA-B*44:02; C6orf222; ENSG00000189325; TAA
SEYKEFIQKI

SEQ ID NO: 13548 - protein, 10 aa, Homo sapiens
  misc_feature: Table A; Target 13548; HLA-B*44:03; C6orf222; ENSG00000189325; TAA
SEYKEFIQKI

SEQ ID NO: 13549 - protein, 10 aa, Homo sapiens
  misc_feature: Table A; Target 13549; HLA-B*49:01; C6orf222; ENSG00000189325; TAA
SEYKEFIQKI

SEQ ID NO: 13550 - protein, 11 aa, Homo sapiens
  misc_feature: Table A; Target 13550; HLA-A*30:02; C6orf222; ENSG00000189325; TAA
SGHRPSISSSY

SEQ ID NO: 13551 - protein, 11 aa, Homo sapiens
  misc_feature: Table A; Target 13551; HLA-B*15:03; C6orf222; ENSG00000189325; TAA
SGHRPSISSSY

SEQ ID NO: 13552 - protein, 11 aa, Homo sapiens
  misc_feature: Table A; Target 13552; HLA-B*46:01; C6orf222; ENSG00000189325; TAA
SGHRPSISSSY

SEQ ID NO: 13553 - protein, 9 aa, Homo sapiens
  misc_feature: Table A; Target 13553; HLA-B*38:01; C6orf222; ENSG00000189325; TAA
SKEIIIQKL

SEQ ID NO: 13554 - protein, 8 aa, Homo sapiens
  misc_feature: Table A; Target 13554; HLA-B*13:02; C6orf222; ENSG00000189325; TAA
SLASQLGV

SEQ ID NO: 13555 - protein, 9 aa, Homo sapiens
  misc_feature: Table A; Target 13555; HLA-A*02:03; C6orf222; ENSG00000189325; TAA
SLASQLGVA

SEQ ID NO: 13556 - protein, 10 aa, Homo sapiens
  misc_feature: Table A; Target 13556; HLA-A*02:01; C6orf222; ENSG00000189325; TAA
SLASQLGVAL

SEQ ID NO: 13557 - protein, 10 aa, Homo sapiens
  misc_feature: Table A; Target 13557; HLA-A*02:03; C6orf222; ENSG00000189325; TAA
SLASQLGVAL

SEQ ID NO: 13558 - protein, 10 aa, Homo sapiens
  misc_feature: Table A; Target 13558; HLA-A*02:04; C6orf222; ENSG00000189325; TAA
SLASQLGVAL

SEQ ID NO: 13559 - protein, 9 aa, Homo sapiens
  misc_feature: Table A; Target 13559; HLA-A*02:01; C6orf222; ENSG00000189325; TAA
SLDPEDLEC

SEQ ID NO: 13560 - protein, 10 aa, Homo sapiens
  misc_feature: Table A; Target 13560; HLA-A*03:02; C6orf222; ENSG00000189325; TAA
SLDRPQAPGK

SEQ ID NO: 13561 - protein, 9 aa, Homo sapiens
  misc_feature: Table A; Target 13561; HLA-A*03:01; C6orf222; ENSG00000189325; TAA
SLPTAPSRK

SEQ ID NO: 13562 - protein, 9 aa, Homo sapiens
  misc_feature: Table A; Target 13562; HLA-A*03:02; C6orf222; ENSG00000189325; TAA
SLPTAPSRK

SEQ ID NO: 13563 - protein, 11 aa, Homo sapiens
  misc_feature: Table A; Target 13563; HLA-C*01:02; C6orf222; ENSG00000189325; TAA
SLPTAPSRKAL

SEQ ID NO: 13564 - protein, 9 aa, Homo sapiens
  misc_feature: Table A; Target 13564; HLA-A*02:01; C6orf222; ENSG00000189325; TAA
SLSKLVATL

SEQ ID NO: 13565 - protein, 9 aa, Homo sapiens
  misc_feature: Table A; Target 13565; HLA-A*02:03; C6orf222; ENSG00000189325; TAA
SLSKLVATL

SEQ ID NO: 13566 - protein, 9 aa, Homo sapiens
  misc_feature: Table A; Target 13566; HLA-A*02:04; C6orf222; ENSG00000189325; TAA
SLSKLVATL

SEQ ID NO: 13567 - protein, 9 aa, Homo sapiens
  misc_feature: Table A; Target 13567; HLA-A*02:07; C6orf222; ENSG00000189325; TAA
SLSKLVATL

SEQ ID NO: 13568 - protein, 9 aa, Homo sapiens
  misc_feature: Table A; Target 13568; HLA-A*03:02; C6orf222; ENSG00000189325; TAA
SLSKLVATL

SEQ ID NO: 13569 - protein, 9 aa, Homo sapiens
  misc_feature: Table A; Target 13569; HLA-A*68:02; C6orf222; ENSG00000189325; TAA
SLSKLVATL

SEQ ID NO: 13570 - protein, 9 aa, Homo sapiens
  misc_feature: Table A; Target 13570; HLA-B*08:01; C6orf222; ENSG00000189325; TAA
SLSKLVATL

SEQ ID NO: 13571 - protein, 9 aa, Homo sapiens
  misc_feature: Table A; Target 13571; HLA-B*13:02; C6orf222; ENSG00000189325; TAA
SLSKLVATL

SEQ ID NO: 13572 - protein, 9 aa, Homo sapiens
  misc_feature: Table A; Target 13572; HLA-B*37:01; C6orf222; ENSG00000189325; TAA
SLSKLVATL

SEQ ID NO: 13573 - protein, 9 aa, Homo sapiens
  misc_feature: Table A; Target 13573; HLA-B*55:01; C6orf222; ENSG00000189325; TAA
SLSKLVATL

SEQ ID NO: 13574 - protein, 8 aa, Homo sapiens
  misc_feature: Table A; Target 13574; HLA-B*55:01; C6orf222; ENSG00000189325; TAA
SPAPSAEA

SEQ ID NO: 13575 - protein, 8 aa, Homo sapiens
  misc_feature: Table A; Target 13575; HLA-B*56:01; C6orf222; ENSG00000189325; TAA
SPAPSAEA

SEQ ID NO: 13576 - protein, 9 aa, Homo sapiens
  misc_feature: Table A; Target 13576; HLA-B*07:02; C6orf222; ENSG00000189325; TAA
SPAPSAEAH

SEQ ID NO: 13577 - protein, 9 aa, Homo sapiens
  misc_feature: Table A; Target 13577; HLA-B*35:01; C6orf222; ENSG00000189325; TAA
SPAPSAEAH

SEQ ID NO: 13578 - protein, 9 aa, Homo sapiens
  misc_feature: Table A; Target 13578; HLA-B*35:03; C6orf222; ENSG00000189325; TAA
SPAPSAEAH

SEQ ID NO: 13579 - protein, 9 aa, Homo sapiens
  misc_feature: Table A; Target 13579; HLA-C*07:02; C6orf222; ENSG00000189325; TAA
SPAPSAEAH

SEQ ID NO: 13580 - protein, 10 aa, Homo sapiens
  misc_feature: Table A; Target 13580; HLA-B*56:01; C6orf222; ENSG00000189325; TAA
SPAPSAEAHC

SEQ ID NO: 13581 - protein, 8 aa, Homo sapiens
  misc_feature: Table A; Target 13581; HLA-B*08:01; C6orf222; ENSG00000189325; TAA
SQEKKTSL

SEQ ID NO: 13582 - protein, 8 aa, Homo sapiens
  misc_feature: Table A; Target 13582; HLA-A*32:01; C6orf222; ENSG00000189325; TAA
SQEKRSSF

SEQ ID NO: 13583 - protein, 8 aa, Homo sapiens
  misc_feature: Table A; Target 13583; HLA-B*37:01; C6orf222; ENSG00000189325; TAA
SQEKRSSF

SEQ ID NO: 13584 - protein, 8 aa, Homo sapiens
  misc_feature: Table A; Target 13584; HLA-C*05:01; C6orf222; ENSG00000189325; TAA
SQEPGEEL

SEQ ID NO: 13585 - protein, 10 aa, Homo sapiens
  misc_feature: Table A; Target 13585; HLA-B*38:01; C6orf222; ENSG00000189325; TAA
SQEPGEELPL

SEQ ID NO: 13586 - protein, 10 aa, Homo sapiens
  misc_feature: Table A; Target 13586; HLA-B*39:01; C6orf222; ENSG00000189325; TAA
SQEPGEELPL

SEQ ID NO: 13587 - protein, 9 aa, Homo sapiens
  misc_feature: Table A; Target 13587; HLA-B*13:02; C6orf222; ENSG00000189325; TAA
SQHPEPLEA

SEQ ID NO: 13588 - protein, 9 aa, Homo sapiens
  misc_feature: Table A; Target 13588; HLA-B*39:01; C6orf222; ENSG00000189325; TAA
SQHPEPLEA

SEQ ID NO: 13589 - protein, 9 aa, Homo sapiens
  misc_feature: Table A; Target 13589; HLA-A*30:01; C6orf222; ENSG00000189325; TAA
SQVAHSSKL

SEQ ID NO: 13590 - protein, 9 aa, Homo sapiens
  misc_feature: Table A; Target 13590; HLA-B*13:02; C6orf222; ENSG00000189325; TAA
SQVAHSSKL

SEQ ID NO: 13591 - protein, 9 aa, Homo sapiens
  misc_feature: Table A; Target 13591; HLA-B*15:01; C6orf222; ENSG00000189325; TAA
SQVAHSSKL

SEQ ID NO: 13592 - protein, 9 aa, Homo sapiens
  misc_feature: Table A; Target 13592; HLA-B*15:03; C6orf222; ENSG00000189325; TAA
SQVAHSSKL

SEQ ID NO: 13593 - protein, 9 aa, Homo sapiens
  misc_feature: Table A; Target 13593; HLA-B*27:05; C6orf222; ENSG00000189325; TAA
SQVAHSSKL

SEQ ID NO: 13594 - protein, 9 aa, Homo sapiens
  misc_feature: Table A; Target 13594; HLA-B*37:01; C6orf222; ENSG00000189325; TAA
SQVAHSSKL

SEQ ID NO: 13595 - protein, 9 aa, Homo sapiens
  misc_feature: Table A; Target 13595; HLA-B*38:01; C6orf222; ENSG00000189325; TAA
SQVAHSSKL

SEQ ID NO: 13596 - protein, 9 aa, Homo sapiens
  misc_feature: Table A; Target 13596; HLA-B*39:01; C6orf222; ENSG00000189325; TAA
SQVAHSSKL

SEQ ID NO: 13597 - protein, 9 aa, Homo sapiens
  misc_feature: Table A; Target 13597; HLA-B*40:01; C6orf222; ENSG00000189325; TAA
SQVAHSSKL

SEQ ID NO: 13598 - protein, 9 aa, Homo sapiens
  misc_feature: Table A; Target 13598; HLA-C*02:02; C6orf222; ENSG00000189325; TAA
SQVAHSSKL

SEQ ID NO: 13599 - protein, 9 aa, Homo sapiens
  misc_feature: Table A; Target 13599; HLA-C*03:03; C6orf222; ENSG00000189325; TAA
SQVAHSSKL

SEQ ID NO: 13600 - protein, 9 aa, Homo sapiens
  misc_feature: Table A; Target 13600; HLA-C*03:04; C6orf222; ENSG00000189325; TAA
SQVAHSSKL

SEQ ID NO: 13601 - protein, 8 aa, Homo sapiens
  misc_feature: Table A; Target 13601; HLA-B*13:02; C6orf222; ENSG00000189325; TAA
SSFLPLCV

SEQ ID NO: 13602 - protein, 11 aa, Homo sapiens
  misc_feature: Table A; Target 13602; HLA-A*31:01; C6orf222; ENSG00000189325; TAA
SSLSKLVATLR

SEQ ID NO: 13603 - protein, 9 aa, Homo sapiens
  misc_feature: Table A; Target 13603; HLA-A*11:01; C6orf222; ENSG00000189325; TAA
SSPEAWPPK

SEQ ID NO: 13604 - protein, 10 aa, Homo sapiens
  misc_feature: Table A; Target 13604; HLA-A*11:01; C6orf222; ENSG00000189325; TAA
SSPEAWPPKK

SEQ ID NO: 13605 - protein, 10 aa, Homo sapiens
  misc_feature: Table A; Target 13605; HLA-B*27:02; C6orf222; ENSG00000189325; TAA
SSSYGLEEPK

SEQ ID NO: 13606 - protein, 9 aa, Homo sapiens
  misc_feature: Table A; Target 13606; HLA-A*03:01; C6orf222; ENSG00000189325; TAA
SSYGLEEPK

SEQ ID NO: 13607 - protein, 9 aa, Homo sapiens
  misc_feature: Table A; Target 13607; HLA-A*03:02; C6orf222; ENSG00000189325; TAA
SSYGLEEPK

SEQ ID NO: 13608 - protein, 9 aa, Homo sapiens
  misc_feature: Table A; Target 13608; HLA-A*11:01; C6orf222; ENSG00000189325; TAA
SSYGLEEPK

SEQ ID NO: 13609 - protein, 9 aa, Homo sapiens
  misc_feature: Table A; Target 13609; HLA-B*27:02; C6orf222; ENSG00000189325; TAA
SSYGLEEPK

SEQ ID NO: 13610 - protein, 9 aa, Homo sapiens
  misc_feature: Table A; Target 13610; HLA-B*27:05; C6orf222; ENSG00000189325; TAA
SSYGLEEPK

SEQ ID NO: 13611 - protein, 9 aa, Homo sapiens
  misc_feature: Table A; Target 13611; HLA-C*07:06; C6orf222; ENSG00000189325; TAA
SSYGLEEPK

SEQ ID NO: 13612 - protein, 10 aa, Homo sapiens
  misc_feature: Table A; Target 13612; HLA-A*02:01; C6orf222; ENSG00000189325; TAA
SSYGLEEPKV

SEQ ID NO: 13613 - protein, 10 aa, Homo sapiens
  misc_feature: Table A; Target 13613; HLA-B*13:02; C6orf222; ENSG00000189325; TAA
SSYGLEEPKV

SEQ ID NO: 13614 - protein, 10 aa, Homo sapiens
  misc_feature: Table A; Target 13614; HLA-C*06:02; C6orf222; ENSG00000189325; TAA
SSYGLEEPKV

SEQ ID NO: 13615 - protein, 10 aa, Homo sapiens
  misc_feature: Table A; Target 13615; HLA-C*12:03; C6orf222; ENSG00000189325; TAA
SSYGLEEPKV

SEQ ID NO: 13616 - protein, 9 aa, Homo sapiens
  misc_feature: Table A; Target 13616; HLA-C*03:03; C6orf222; ENSG00000189325; TAA
TAAAPTPEE

SEQ ID NO: 13617 - protein, 9 aa, Homo sapiens
  misc_feature: Table A; Target 13617; HLA-C*03:04; C6orf222; ENSG00000189325; TAA
TAAAPTPEE

SEQ ID NO: 13618 - protein, 8 aa, Homo sapiens
  misc_feature: Table A; Target 13618; HLA-B*08:01; C6orf222; ENSG00000189325; TAA
TAPSRKAL

SEQ ID NO: 13619 - protein, 10 aa, Homo sapiens
  misc_feature: Table A; Target 13619; HLA-A*30:01; C6orf222; ENSG00000189325; TAA
TEAGAPGPSV

SEQ ID NO: 13620 - protein, 10 aa, Homo sapiens
  misc_feature: Table A; Target 13620; HLA-B*39:01; C6orf222; ENSG00000189325; TAA
TEAGAPGPSV

SEQ ID NO: 13621 - protein, 10 aa, Homo sapiens
  misc_feature: Table A; Target 13621; HLA-B*40:01; C6orf222; ENSG00000189325; TAA
TEAGAPGPSV

SEQ ID NO: 13622 - protein, 10 aa, Homo sapiens
  misc_feature: Table A; Target 13622; HLA-B*40:02; C6orf222; ENSG00000189325; TAA
TEAGAPGPSV

SEQ ID NO: 13623 - protein, 10 aa, Homo sapiens
  misc_feature: Table A; Target 13623; HLA-B*49:01; C6orf222; ENSG00000189325; TAA
TEAGAPGPSV

SEQ ID NO: 13624 - protein, 10 aa, Homo sapiens
  misc_feature: Table A; Target 13624; HLA-C*16:04; C6orf222; ENSG00000189325; TAA
TEAGAPGPSV

SEQ ID NO: 13625 - protein, 11 aa, Homo sapiens
  misc_feature: Table A; Target 13625; HLA-A*30:01; C6orf222; ENSG00000189325; TAA
TEAGAPGPSVL

SEQ ID NO: 13626 - protein, 11 aa, Homo sapiens
  misc_feature: Table A; Target 13626; HLA-B*39:01; C6orf222; ENSG00000189325; TAA
TEAGAPGPSVL

SEQ ID NO: 13627 - protein, 11 aa, Homo sapiens
  misc_feature: Table A; Target 13627; HLA-B*40:01; C6orf222; ENSG00000189325; TAA
TEAGAPGPSVL

SEQ ID NO: 13628 - protein, 11 aa, Homo sapiens
  misc_feature: Table A; Target 13628; HLA-B*49:01; C6orf222; ENSG00000189325; TAA
TEAGAPGPSVL

SEQ ID NO: 13629 - protein, 8 aa, Homo sapiens
  misc_feature: Table A; Target 13629; HLA-A*31:01; C6orf222; ENSG00000189325; TAA
TMLNFFVR

SEQ ID NO: 13630 - protein, 8 aa, Homo sapiens
  misc_feature: Table A; Target 13630; HLA-C*05:01; C6orf222; ENSG00000189325; TAA
TPEETGDF

SEQ ID NO: 13631 - protein, 9 aa, Homo sapiens
  misc_feature: Table A; Target 13631; HLA-B*35:03; C6orf222; ENSG00000189325; TAA
TPEETGDFL

SEQ ID NO: 13632 - protein, 8 aa, Homo sapiens
  misc_feature: Table A; Target 13632; HLA-B*35:03; C6orf222; ENSG00000189325; TAA
TPEGAPQL

SEQ ID NO: 13633 - protein, 8 aa, Homo sapiens
  misc_feature: Table A; Target 13633; HLA-C*06:02; C6orf222; ENSG00000189325; TAA
TSKTNPKK

SEQ ID NO: 13634 - protein, 9 aa, Homo sapiens
  misc_feature: Table A; Target 13634; HLA-A*02:01; C6orf222; ENSG00000189325; TAA
VALPNPAPA

SEQ ID NO: 13635 - protein, 9 aa, Homo sapiens
  misc_feature: Table A; Target 13635; HLA-A*02:03; C6orf222; ENSG00000189325; TAA
VALPNPAPA

SEQ ID NO: 13636 - protein, 9 aa, Homo sapiens
  misc_feature: Table A; Target 13636; HLA-B*39:01; C6orf222; ENSG00000189325; TAA
VALPNPAPA

SEQ ID NO: 13637 - protein, 9 aa, Homo sapiens
  misc_feature: Table A; Target 13637; HLA-B*46:01; C6orf222; ENSG00000189325; TAA
VALPNPAPA

SEQ ID NO: 13638 - protein, 9 aa, Homo sapiens
  misc_feature: Table A; Target 13638; HLA-B*54:01; C6orf222; ENSG00000189325; TAA
VALPNPAPA

SEQ ID NO: 13639 - protein, 9 aa, Homo sapiens
  misc_feature: Table A; Target 13639; HLA-B*56:01; C6orf222; ENSG00000189325; TAA
VALPNPAPA

SEQ ID NO: 13640 - protein, 9 aa, Homo sapiens
  misc_feature: Table A; Target 13640; HLA-C*01:02; C6orf222; ENSG00000189325; TAA
VALPNPAPA

SEQ ID NO: 13641 - protein, 9 aa, Homo sapiens
  misc_feature: Table A; Target 13641; HLA-C*02:02; C6orf222; ENSG00000189325; TAA
VALPNPAPA

SEQ ID NO: 13642 - protein, 9 aa, Homo sapiens
  misc_feature: Table A; Target 13642; HLA-C*03:03; C6orf222; ENSG00000189325; TAA
VALPNPAPA

SEQ ID NO: 13643 - protein, 9 aa, Homo sapiens
  misc_feature: Table A; Target 13643; HLA-C*03:04; C6orf222; ENSG00000189325; TAA
VALPNPAPA

SEQ ID NO: 13644 - protein, 9 aa, Homo sapiens
  misc_feature: Table A; Target 13644; HLA-C*05:01; C6orf222; ENSG00000189325; TAA
VALPNPAPA

SEQ ID NO: 13645 - protein, 9 aa, Homo sapiens
  misc_feature: Table A; Target 13645; HLA-C*12:03; C6orf222; ENSG00000189325; TAA
VALPNPAPA

SEQ ID NO: 13646 - protein, 9 aa, Homo sapiens
  misc_feature: Table A; Target 13646; HLA-C*16:04; C6orf222; ENSG00000189325; TAA
VALPNPAPA

SEQ ID NO: 13647 - protein, 10 aa, Homo sapiens
  misc_feature: Table A; Target 13647; HLA-A*23:01; C6orf222; ENSG00000189325; TAA
VALPNPAPAV

SEQ ID NO: 13648 - protein, 10 aa, Homo sapiens
  misc_feature: Table A; Target 13648; HLA-B*46:01; C6orf222; ENSG00000189325; TAA
VALPNPAPAV

SEQ ID NO: 13649 - protein, 10 aa, Homo sapiens
  misc_feature: Table A; Target 13649; HLA-B*51:01; C6orf222; ENSG00000189325; TAA
VALPNPAPAV

SEQ ID NO: 13650 - protein, 10 aa, Homo sapiens
  misc_feature: Table A; Target 13650; HLA-B*54:01; C6orf222; ENSG00000189325; TAA
VALPNPAPAV

SEQ ID NO: 13651 - protein, 10 aa, Homo sapiens
  misc_feature: Table A; Target 13651; HLA-B*56:01; C6orf222; ENSG00000189325; TAA
VALPNPAPAV

SEQ ID NO: 13652 - protein, 10 aa, Homo sapiens
  misc_feature: Table A; Target 13652; HLA-C*03:03; C6orf222; ENSG00000189325; TAA
VALPNPAPAV

SEQ ID NO: 13653 - protein, 10 aa, Homo sapiens
  misc_feature: Table A; Target 13653; HLA-C*03:04; C6orf222; ENSG00000189325; TAA
VALPNPAPAV

SEQ ID NO: 13654 - protein, 10 aa, Homo sapiens
  misc_feature: Table A; Target 13654; HLA-C*06:02; C6orf222; ENSG00000189325; TAA
VALPNPAPAV

SEQ ID NO: 13655 - protein, 10 aa, Homo sapiens
  misc_feature: Table A; Target 13655; HLA-C*16:04; C6orf222; ENSG00000189325; TAA
VALPNPAPAV

SEQ ID NO: 13656 - protein, 11 aa, Homo sapiens
  misc_feature: Table A; Target 13656; HLA-A*31:01; C6orf222; ENSG00000189325; TAA
VALPNPAPAVR

SEQ ID NO: 13657 - protein, 11 aa, Homo sapiens
  misc_feature: Table A; Target 13657; HLA-A*33:01; C6orf222; ENSG00000189325; TAA
VALPNPAPAVR

SEQ ID NO: 13658 - protein, 11 aa, Homo sapiens
  misc_feature: Table A; Target 13658; HLA-A*33:03; C6orf222; ENSG00000189325; TAA
VALPNPAPAVR

SEQ ID NO: 13659 - protein, 11 aa, Homo sapiens
  misc_feature: Table A; Target 13659; HLA-A*68:01; C6orf222; ENSG00000189325; TAA
VALPNPAPAVR

SEQ ID NO: 13660 - protein, 11 aa, Homo sapiens
  misc_feature: Table A; Target 13660; HLA-B*57:01; C6orf222; ENSG00000189325; TAA
VALPNPAPAVR

SEQ ID NO: 13661 - protein, 11 aa, Homo sapiens
  misc_feature: Table A; Target 13661; HLA-C*07:06; C6orf222; ENSG00000189325; TAA
VALPNPAPAVR

SEQ ID NO: 13662 - protein, 8 aa, Homo sapiens
  misc_feature: Table A; Target 13662; HLA-B*08:01; C6orf222; ENSG00000189325; TAA
VATLRSQV

SEQ ID NO: 13663 - protein, 8 aa, Homo sapiens
  misc_feature: Table A; Target 13663; HLA-B*51:01; C6orf222; ENSG00000189325; TAA
VATLRSQV

SEQ ID NO: 13664 - protein, 8 aa, Homo sapiens
  misc_feature: Table A; Target 13664; HLA-C*16:01; C6orf222; ENSG00000189325; TAA
VATLRSQV

SEQ ID NO: 13665 - protein, 8 aa, Homo sapiens
  misc_feature: Table A; Target 13665; HLA-C*16:02; C6orf222; ENSG00000189325; TAA
VATLRSQV

SEQ ID NO: 13666 - protein, 9 aa, Homo sapiens
  misc_feature: Table A; Target 13666; HLA-B*08:01; C6orf222; ENSG00000189325; TAA
VATLRSQVA

SEQ ID NO: 13667 - protein, 9 aa, Homo sapiens
  misc_feature: Table A; Target 13667; HLA-B*54:01; C6orf222; ENSG00000189325; TAA
VATLRSQVA

SEQ ID NO: 13668 - protein, 9 aa, Homo sapiens
  misc_feature: Table A; Target 13668; HLA-C*03:04; C6orf222; ENSG00000189325; TAA
VATLRSQVA

SEQ ID NO: 13669 - protein, 9 aa, Homo sapiens
  misc_feature: Table A; Target 13669; HLA-C*16:01; C6orf222; ENSG00000189325; TAA
VATLRSQVA

SEQ ID NO: 13670 - protein, 9 aa, Homo sapiens
  misc_feature: Table A; Target 13670; HLA-C*16:02; C6orf222; ENSG00000189325; TAA
VATLRSQVA

SEQ ID NO: 13671 - protein, 9 aa, Homo sapiens
  misc_feature: Table A; Target 13671; HLA-B*13:02; C6orf222; ENSG00000189325; TAA
VDGQLGQQI

SEQ ID NO: 13672 - protein, 11 aa, Homo sapiens
  misc_feature: Table A; Target 13672; HLA-B*44:02; C6orf222; ENSG00000189325; TAA
VELLKRVGDQW

SEQ ID NO: 13673 - protein, 11 aa, Homo sapiens
  misc_feature: Table A; Target 13673; HLA-B*44:03; C6orf222; ENSG00000189325; TAA
VELLKRVGDQW

SEQ ID NO: 13674 - protein, 8 aa, Homo sapiens
  misc_feature: Table A; Target 13674; HLA-B*18:01; C6orf222; ENSG00000189325; TAA
VENPAPHC

SEQ ID NO: 13675 - protein, 8 aa, Homo sapiens
  misc_feature: Table A; Target 13675; HLA-B*49:01; C6orf222; ENSG00000189325; TAA
VENPAPHC

SEQ ID NO: 13676 - protein, 9 aa, Homo sapiens
  misc_feature: Table A; Target 13676; HLA-A*30:01; C6orf222; ENSG00000189325; TAA
VENPAPHCR

SEQ ID NO: 13677 - protein, 9 aa, Homo sapiens
  misc_feature: Table A; Target 13677; HLA-A*30:02; C6orf222; ENSG00000189325; TAA
VENPAPHCR

SEQ ID NO: 13678 - protein, 9 aa, Homo sapiens
  misc_feature: Table A; Target 13678; HLA-A*31:01; C6orf222; ENSG00000189325; TAA
VENPAPHCR

SEQ ID NO: 13679 - protein, 9 aa, Homo sapiens
  misc_feature: Table A; Target 13679; HLA-A*32:01; C6orf222; ENSG00000189325; TAA
VENPAPHCR

SEQ ID NO: 13680 - protein, 9 aa, Homo sapiens
  misc_feature: Table A; Target 13680; HLA-A*33:01; C6orf222; ENSG00000189325; TAA
VENPAPHCR

SEQ ID NO: 13681 - protein, 9 aa, Homo sapiens
  misc_feature: Table A; Target 13681; HLA-A*33:03; C6orf222; ENSG00000189325; TAA
VENPAPHCR

SEQ ID NO: 13682 - protein, 9 aa, Homo sapiens
  misc_feature: Table A; Target 13682; HLA-B*18:01; C6orf222; ENSG00000189325; TAA
VENPAPHCR

SEQ ID NO: 13683 - protein, 9 aa, Homo sapiens
  misc_feature: Table A; Target 13683; HLA-B*40:01; C6orf222; ENSG00000189325; TAA
VENPAPHCR

SEQ ID NO: 13684 - protein, 9 aa, Homo sapiens
  misc_feature: Table A; Target 13684; HLA-B*44:02; C6orf222; ENSG00000189325; TAA
VENPAPHCR

SEQ ID NO: 13685 - protein, 9 aa, Homo sapiens
  misc_feature: Table A; Target 13685; HLA-B*44:03; C6orf222; ENSG00000189325; TAA
VENPAPHCR

SEQ ID NO: 13686 - protein, 9 aa, Homo sapiens
  misc_feature: Table A; Target 13686; HLA-B*57:01; C6orf222; ENSG00000189325; TAA
VENPAPHCR

SEQ ID NO: 13687 - protein, 9 aa, Homo sapiens
  misc_feature: Table A; Target 13687; HLA-C*02:02; C6orf222; ENSG00000189325; TAA
VENPAPHCR

SEQ ID NO: 13688 - protein, 9 aa, Homo sapiens
  misc_feature: Table A; Target 13688; HLA-C*07:06; C6orf222; ENSG00000189325; TAA
VENPAPHCR

SEQ ID NO: 13689 - protein, 9 aa, Homo sapiens
  misc_feature: Table A; Target 13689; HLA-C*16:04; C6orf222; ENSG00000189325; TAA
VENPAPHCR

SEQ ID NO: 13690 - protein, 9 aa, Homo sapiens
  misc_feature: Table A; Target 13690; HLA-B*46:01; C6orf222; ENSG00000189325; TAA
VGVENPAPH

SEQ ID NO: 13691 - protein, 9 aa, Homo sapiens
  misc_feature: Table A; Target 13691; HLA-C*12:03; C6orf222; ENSG00000189325; TAA
VGVENPAPH

SEQ ID NO: 13692 - protein, 9 aa, Homo sapiens
  misc_feature: Table A; Target 13692; HLA-A*02:03; C6orf222; ENSG00000189325; TAA
VISEAPSQA

SEQ ID NO: 13693 - protein, 10 aa, Homo sapiens
  misc_feature: Table A; Target 13693; HLA-A*68:01; C6orf222; ENSG00000189325; TAA
VISEAPSQAR

SEQ ID NO: 13694 - protein, 10 aa, Homo sapiens
  misc_feature: Table A; Target 13694; HLA-C*07:06; C6orf222; ENSG00000189325; TAA
VISEAPSQAR

SEQ ID NO: 13695 - protein, 9 aa, Homo sapiens
  misc_feature: Table A; Target 13695; HLA-C*05:01; C6orf222; ENSG00000189325; TAA
VQEAPSTEA

SEQ ID NO: 13696 - protein, 9 aa, Homo sapiens
  misc_feature: Table A; Target 13696; HLA-B*27:05; C6orf222; ENSG00000189325; TAA
VRTGPEEPR

SEQ ID NO: 13697 - protein, 8 aa, Homo sapiens
  misc_feature: Table A; Target 13697; HLA-C*16:01; C6orf222; ENSG00000189325; TAA
VSGHRPSI

SEQ ID NO: 13698 - protein, 10 aa, Homo sapiens
  misc_feature: Table A; Target 13698; HLA-A*03:01; C6orf222; ENSG00000189325; TAA
VSSPEAWPPK

SEQ ID NO: 13699 - protein, 10 aa, Homo sapiens
  misc_feature: Table A; Target 13699; HLA-A*03:02; C6orf222; ENSG00000189325; TAA
VSSPEAWPPK

SEQ ID NO: 13700 - protein, 10 aa, Homo sapiens
  misc_feature: Table A; Target 13700; HLA-A*11:01; C6orf222; ENSG00000189325; TAA
VSSPEAWPPK

SEQ ID NO: 13701 - protein, 10 aa, Homo sapiens
  misc_feature: Table A; Target 13701; HLA-B*27:02; C6orf222; ENSG00000189325; TAA
VSSPEAWPPK

SEQ ID NO: 13702 - protein, 11 aa, Homo sapiens
  misc_feature: Table A; Target 13702; HLA-A*31:01; C6orf222; ENSG00000189325; TAA
VTKAAQDQEAR

SEQ ID NO: 13703 - protein, 11 aa, Homo sapiens
  misc_feature: Table A; Target 13703; HLA-A*33:01; C6orf222; ENSG00000189325; TAA
VTKAAQDQEAR

SEQ ID NO: 13704 - protein, 11 aa, Homo sapiens
  misc_feature: Table A; Target 13704; HLA-A*33:03; C6orf222; ENSG00000189325; TAA
VTKAAQDQEAR

SEQ ID NO: 13705 - protein, 11 aa, Homo sapiens
  misc_feature: Table A; Target 13705; HLA-A*68:01; C6orf222; ENSG00000189325; TAA
VTKAAQDQEAR

SEQ ID NO: 13706 - protein, 11 aa, Homo sapiens
  misc_feature: Table A; Target 13706; HLA-B*57:01; C6orf222; ENSG00000189325; TAA
VTKAAQDQEAR

SEQ ID NO: 13707 - protein, 9 aa, Homo sapiens
  misc_feature: Table A; Target 13707; HLA-A*26:01; C6orf222; ENSG00000189325; TAA
VVISEAPSQ

SEQ ID NO: 13708 - protein, 9 aa, Homo sapiens
  misc_feature: Table A; Target 13708; HLA-C*03:03; C6orf222; ENSG00000189325; TAA
VVISEAPSQ

SEQ ID NO: 13709 - protein, 10 aa, Homo sapiens
  misc_feature: Table A; Target 13709; HLA-A*02:03; C6orf222; ENSG00000189325; TAA
VVISEAPSQA

SEQ ID NO: 13710 - protein, 11 aa, Homo sapiens
  misc_feature: Table A; Target 13710; HLA-A*03:02; C6orf222; ENSG00000189325; TAA
VVISEAPSQAR

SEQ ID NO: 13711 - protein, 11 aa, Homo sapiens
  misc_feature: Table A; Target 13711; HLA-A*11:01; C6orf222; ENSG00000189325; TAA
VVISEAPSQAR

SEQ ID NO: 13712 - protein, 11 aa, Homo sapiens
  misc_feature: Table A; Target 13712; HLA-A*31:01; C6orf222; ENSG00000189325; TAA
VVISEAPSQAR

SEQ ID NO: 13713 - protein, 11 aa, Homo sapiens
  misc_feature: Table A; Target 13713; HLA-A*33:01; C6orf222; ENSG00000189325; TAA
VVISEAPSQAR

SEQ ID NO: 13714 - protein, 11 aa, Homo sapiens
  misc_feature: Table A; Target 13714; HLA-A*33:03; C6orf222; ENSG00000189325; TAA
VVISEAPSQAR

SEQ ID NO: 13715 - protein, 11 aa, Homo sapiens
  misc_feature: Table A; Target 13715; HLA-A*68:01; C6orf222; ENSG00000189325; TAA
VVISEAPSQAR

SEQ ID NO: 13716 - protein, 11 aa, Homo sapiens
  misc_feature: Table A; Target 13716; HLA-C*07:06; C6orf222; ENSG00000189325; TAA
VVISEAPSQAR

SEQ ID NO: 13717 - protein, 11 aa, Homo sapiens
  misc_feature: Table A; Target 13717; HLA-A*30:01; C6orf222; ENSG00000189325; TAA
WEEEQSLASQL

SEQ ID NO: 13718 - protein, 11 aa, Homo sapiens
  misc_feature: Table A; Target 13718; HLA-B*40:01; C6orf222; ENSG00000189325; TAA
WEEEQSLASQL

SEQ ID NO: 13719 - protein, 8 aa, Homo sapiens
  misc_feature: Table A; Target 13719; HLA-B*08:01; C6orf222; ENSG00000189325; TAA
WPPKKSSF

SEQ ID NO: 13720 - protein, 8 aa, Homo sapiens
  misc_feature: Table A; Target 13720; HLA-A*30:01; C6orf222; ENSG00000189325; TAA
YEFSDSSL

SEQ ID NO: 13721 - protein, 8 aa, Homo sapiens
  misc_feature: Table A; Target 13721; HLA-B*15:03; C6orf222; ENSG00000189325; TAA
YEFSDSSL

SEQ ID NO: 13722 - protein, 8 aa, Homo sapiens
  misc_feature: Table A; Target 13722; HLA-B*18:01; C6orf222; ENSG00000189325; TAA
YEFSDSSL

SEQ ID NO: 13723 - protein, 8 aa, Homo sapiens
  misc_feature: Table A; Target 13723; HLA-B*37:01; C6orf222; ENSG00000189325; TAA
YEFSDSSL

SEQ ID NO: 13724 - protein, 8 aa, Homo sapiens
  misc_feature: Table A; Target 13724; HLA-B*39:01; C6orf222; ENSG00000189325; TAA
YEFSDSSL

SEQ ID NO: 13725 - protein, 8 aa, Homo sapiens
  misc_feature: Table A; Target 13725; HLA-B*40:01; C6orf222; ENSG00000189325; TAA
YEFSDSSL

SEQ ID NO: 13726 - protein, 8 aa, Homo sapiens
  misc_feature: Table A; Target 13726; HLA-B*40:02; C6orf222; ENSG00000189325; TAA
YEFSDSSL

SEQ ID NO: 13727 - protein, 8 aa, Homo sapiens
  misc_feature: Table A; Target 13727; HLA-B*44:03; C6orf222; ENSG00000189325; TAA
YEFSDSSL

SEQ ID NO: 13728 - protein, 8 aa, Homo sapiens
  misc_feature: Table A; Target 13728; HLA-B*49:01; C6orf222; ENSG00000189325; TAA
YEFSDSSL

SEQ ID NO: 13729 - protein, 8 aa, Homo sapiens
  misc_feature: Table A; Target 13729; HLA-C*02:02; C6orf222; ENSG00000189325; TAA
YEFSDSSL

SEQ ID NO: 13730 - protein, 8 aa, Homo sapiens
  misc_feature: Table A; Target 13730; HLA-C*03:03; C6orf222; ENSG00000189325; TAA
YEFSDSSL

SEQ ID NO: 13731 - protein, 8 aa, Homo sapiens
  misc_feature: Table A; Target 13731; HLA-C*03:04; C6orf222; ENSG00000189325; TAA
YEFSDSSL

SEQ ID NO: 13732 - protein, 8 aa, Homo sapiens
  misc_feature: Table A; Target 13732; HLA-C*14:02; C6orf222; ENSG00000189325; TAA
YEFSDSSL

SEQ ID NO: 13733 - protein, 8 aa, Homo sapiens
  misc_feature: Table A; Target 13733; HLA-C*16:04; C6orf222; ENSG00000189325; TAA
YEFSDSSL

SEQ ID NO: 13734 - protein, 9 aa, Homo sapiens
  misc_feature: Table A; Target 13734; HLA-B*49:01; C6orf222; ENSG00000189325; TAA
YEFSDSSLS

SEQ ID NO: 13735 - protein, 10 aa, Homo sapiens
  misc_feature: Table A; Target 13735; HLA-B*27:02; C6orf222; ENSG00000189325; TAA
YEFSDSSLSK

SEQ ID NO: 13736 - protein, 10 aa, Homo sapiens
  misc_feature: Table A; Target 13736; HLA-B*49:01; C6orf222; ENSG00000189325; TAA
YEFSDSSLSK

SEQ ID NO: 13737 - protein, 11 aa, Homo sapiens
  misc_feature: Table A; Target 13737; HLA-A*30:01; C6orf222; ENSG00000189325; TAA
YEFSDSSLSKL

SEQ ID NO: 13738 - protein, 11 aa, Homo sapiens
  misc_feature: Table A; Target 13738; HLA-B*18:01; C6orf222; ENSG00000189325; TAA
YEFSDSSLSKL

SEQ ID NO: 13739 - protein, 11 aa, Homo sapiens
  misc_feature: Table A; Target 13739; HLA-B*40:01; C6orf222; ENSG00000189325; TAA
YEFSDSSLSKL

SEQ ID NO: 13740 - protein, 11 aa, Homo sapiens
  misc_feature: Table A; Target 13740; HLA-B*40:02; C6orf222; ENSG00000189325; TAA
YEFSDSSLSKL

SEQ ID NO: 13741 - protein, 11 aa, Homo sapiens
  misc_feature: Table A; Target 13741; HLA-B*44:02; C6orf222; ENSG00000189325; TAA
YEFSDSSLSKL

SEQ ID NO: 13742 - protein, 11 aa, Homo sapiens
  misc_feature: Table A; Target 13742; HLA-B*44:03; C6orf222; ENSG00000189325; TAA
YEFSDSSLSKL

SEQ ID NO: 13743 - protein, 11 aa, Homo sapiens
  misc_feature: Table A; Target 13743; HLA-B*49:01; C6orf222; ENSG00000189325; TAA
YEFSDSSLSKL

SEQ ID NO: 13744 - protein, 11 aa, Homo sapiens
  misc_feature: Table A; Target 13744; HLA-C*02:02; C6orf222; ENSG00000189325; TAA
YEFSDSSLSKL

SEQ ID NO: 13745 - protein, 8 aa, Homo sapiens
  misc_feature: Table A; Target 13745; HLA-B*51:01; C6orf222; ENSG00000189325; TAA
YGLEEPKV

SEQ ID NO: 13746 - protein, 8 aa, Homo sapiens
  misc_feature: Table A; Target 13746; HLA-A*02:03; C6orf222; ENSG00000189325; TAA
YQFDVSLA

SEQ ID NO: 13747 - protein, 8 aa, Homo sapiens
  misc_feature: Table A; Target 13747; HLA-B*13:02; C6orf222; ENSG00000189325; TAA
YQFDVSLA

SEQ ID NO: 13748 - protein, 9 aa, Homo sapiens
  misc_feature: Table A; Target 13748; HLA-B*13:02; C6orf222; ENSG00000189325; TAA
YQFDVSLAN

SEQ ID NO: 13749 - protein, 10 aa, Homo sapiens
  misc_feature: Table A; Target 13749; HLA-A*03:01; C6orf222; ENSG00000189325; TAA
YQFDVSLANK

SEQ ID NO: 13750 - protein, 10 aa, Homo sapiens
  misc_feature: Table A; Target 13750; HLA-A*03:02; C6orf222; ENSG00000189325; TAA
YQFDVSLANK

SEQ ID NO: 13751 - protein, 10 aa, Homo sapiens
  misc_feature: Table A; Target 13751; HLA-A*11:01; C6orf222; ENSG00000189325; TAA
YQFDVSLANK

SEQ ID NO: 13752 - protein, 10 aa, Homo sapiens
  misc_feature: Table A; Target 13752; HLA-A*31:01; C6orf222; ENSG00000189325; TAA
YQFDVSLANK

SEQ ID NO: 13753 - protein, 10 aa, Homo sapiens
  misc_feature: Table A; Target 13753; HLA-A*68:01; C6orf222; ENSG00000189325; TAA
YQFDVSLANK

SEQ ID NO: 13754 - protein, 10 aa, Homo sapiens
  misc_feature: Table A; Target 13754; HLA-A*68:02; C6orf222; ENSG00000189325; TAA
YQFDVSLANK

SEQ ID NO: 13755 - protein, 10 aa, Homo sapiens
  misc_feature: Table A; Target 13755; HLA-B*13:02; C6orf222; ENSG00000189325; TAA
YQFDVSLANK

SEQ ID NO: 13756 - protein, 10 aa, Homo sapiens
  misc_feature: Table A; Target 13756; HLA-B*27:02; C6orf222; ENSG00000189325; TAA
YQFDVSLANK

SEQ ID NO: 13757 - protein, 10 aa, Homo sapiens
  misc_feature: Table A; Target 13757; HLA-B*27:05; C6orf222; ENSG00000189325; TAA
YQFDVSLANK

SEQ ID NO: 13758 - protein, 10 aa, Homo sapiens
  misc_feature: Table A; Target 13758; HLA-C*07:06; C6orf222; ENSG00000189325; TAA
YQFDVSLANK

SEQ ID NO: 13759 - protein, 11 aa, Homo sapiens
  misc_feature: Table A; Target 13759; HLA-A*02:07; C6orf222; ENSG00000189325; TAA
YQFDVSLANKF

SEQ ID NO: 13760 - protein, 11 aa, Homo sapiens
  misc_feature: Table A; Target 13760; HLA-A*23:01; C6orf222; ENSG00000189325; TAA
YQFDVSLANKF

SEQ ID NO: 13761 - protein, 11 aa, Homo sapiens
  misc_feature: Table A; Target 13761; HLA-A*24:02; C6orf222; ENSG00000189325; TAA
YQFDVSLANKF

SEQ ID NO: 13762 - protein, 11 aa, Homo sapiens
  misc_feature: Table A; Target 13762; HLA-A*26:01; C6orf222; ENSG00000189325; TAA
YQFDVSLANKF

SEQ ID NO: 13763 - protein, 11 aa, Homo sapiens
  misc_feature: Table A; Target 13763; HLA-A*29:02; C6orf222; ENSG00000189325; TAA
YQFDVSLANKF

SEQ ID NO: 13764 - protein, 11 aa, Homo sapiens
  misc_feature: Table A; Target 13764; HLA-A*30:01; C6orf222; ENSG00000189325; TAA
YQFDVSLANKF

SEQ ID NO: 13765 - protein, 11 aa, Homo sapiens
  misc_feature: Table A; Target 13765; HLA-A*30:02; C6orf222; ENSG00000189325; TAA
YQFDVSLANKF

SEQ ID NO: 13766 - protein, 11 aa, Homo sapiens
  misc_feature: Table A; Target 13766; HLA-A*32:01; C6orf222; ENSG00000189325; TAA
YQFDVSLANKF

SEQ ID NO: 13767 - protein, 11 aa, Homo sapiens
  misc_feature: Table A; Target 13767; HLA-A*68:01; C6orf222; ENSG00000189325; TAA
YQFDVSLANKF

SEQ ID NO: 13768 - protein, 11 aa, Homo sapiens
  misc_feature: Table A; Target 13768; HLA-B*13:02; C6orf222; ENSG00000189325; TAA
YQFDVSLANKF

SEQ ID NO: 13769 - protein, 11 aa, Homo sapiens
  misc_feature: Table A; Target 13769; HLA-B*15:01; C6orf222; ENSG00000189325; TAA
YQFDVSLANKF

SEQ ID NO: 13770 - protein, 11 aa, Homo sapiens
  misc_feature: Table A; Target 13770; HLA-B*15:03; C6orf222; ENSG00000189325; TAA
YQFDVSLANKF

SEQ ID NO: 13771 - protein, 11 aa, Homo sapiens
  misc_feature: Table A; Target 13771; HLA-B*18:01; C6orf222; ENSG00000189325; TAA
YQFDVSLANKF

SEQ ID NO: 13772 - protein, 11 aa, Homo sapiens
  misc_feature: Table A; Target 13772; HLA-B*27:05; C6orf222; ENSG00000189325; TAA
YQFDVSLANKF

SEQ ID NO: 13773 - protein, 11 aa, Homo sapiens
  misc_feature: Table A; Target 13773; HLA-B*38:01; C6orf222; ENSG00000189325; TAA
YQFDVSLANKF

SEQ ID NO: 13774 - protein, 11 aa, Homo sapiens
  misc_feature: Table A; Target 13774; HLA-B*39:01; C6orf222; ENSG00000189325; TAA
YQFDVSLANKF

SEQ ID NO: 13775 - protein, 11 aa, Homo sapiens
  misc_feature: Table A; Target 13775; HLA-B*44:02; C6orf222; ENSG00000189325; TAA
YQFDVSLANKF

SEQ ID NO: 13776 - protein, 11 aa, Homo sapiens
  misc_feature: Table A; Target 13776; HLA-B*44:03; C6orf222; ENSG00000189325; TAA
YQFDVSLANKF

SEQ ID NO: 13777 - protein, 11 aa, Homo sapiens
  misc_feature: Table A; Target 13777; HLA-B*57:01; C6orf222; ENSG00000189325; TAA
YQFDVSLANKF

SEQ ID NO: 13778 - protein, 11 aa, Homo sapiens
  misc_feature: Table A; Target 13778; HLA-C*02:02; C6orf222; ENSG00000189325; TAA
YQFDVSLANKF

SEQ ID NO: 13779 - protein, 11 aa, Homo sapiens
  misc_feature: Table A; Target 13779; HLA-C*06:02; C6orf222; ENSG00000189325; TAA
YQFDVSLANKF

SEQ ID NO: 13780 - protein, 11 aa, Homo sapiens
  misc_feature: Table A; Target 13780; HLA-C*07:04; C6orf222; ENSG00000189325; TAA
YQFDVSLANKF

SEQ ID NO: 13781 - protein, 11 aa, Homo sapiens
  misc_feature: Table A; Target 13781; HLA-C*12:03; C6orf222; ENSG00000189325; TAA
YQFDVSLANKF

SEQ ID NO: 13782 - protein, 11 aa, Homo sapiens
  misc_feature: Table A; Target 13782; HLA-C*16:04; C6orf222; ENSG00000189325; TAA
YQFDVSLANKF

SEQ ID NO: 13783 - protein, 8 aa, Homo sapiens
  misc_feature: Table A; Target 13783; HLA-A*03:01; CLDN16; ENSG00000113946; TAA
AAGVSMAK

SEQ ID NO: 13784 - protein, 8 aa, Homo sapiens
  misc_feature: Table A; Target 13784; HLA-A*03:02; CLDN16; ENSG00000113946; TAA
AAGVSMAK

SEQ ID NO: 13785 - protein, 8 aa, Homo sapiens
  misc_feature: Table A; Target 13785; HLA-A*11:01; CLDN16; ENSG00000113946; TAA
AAGVSMAK

SEQ ID NO: 13786 - protein, 8 aa, Homo sapiens
  misc_feature: Table A; Target 13786; HLA-B*27:02; CLDN16; ENSG00000113946; TAA
AAGVSMAK

SEQ ID NO: 13787 - protein, 8 aa, Homo sapiens
  misc_feature: Table A; Target 13787; HLA-B*27:05; CLDN16; ENSG00000113946; TAA
AAGVSMAK

SEQ ID NO: 13788 - protein, 8 aa, Homo sapiens
  misc_feature: Table A; Target 13788; HLA-B*46:01; CLDN16; ENSG00000113946; TAA
AAGVSMAK

SEQ ID NO: 13789 - protein, 8 aa, Homo sapiens
  misc_feature: Table A; Target 13789; HLA-B*58:01; CLDN16; ENSG00000113946; TAA
AAGVSMAK

SEQ ID NO: 13790 - protein, 8 aa, Homo sapiens
  misc_feature: Table A; Target 13790; HLA-C*01:02; CLDN16; ENSG00000113946; TAA
AAGVSMAK

SEQ ID NO: 13791 - protein, 8 aa, Homo sapiens
  misc_feature: Table A; Target 13791; HLA-C*03:04; CLDN16; ENSG00000113946; TAA
AAGVSMAK

SEQ ID NO: 13792 - protein, 8 aa, Homo sapiens
  misc_feature: Table A; Target 13792; HLA-C*06:02; CLDN16; ENSG00000113946; TAA
AAGVSMAK

SEQ ID NO: 13793 - protein, 8 aa, Homo sapiens
  misc_feature: Table A; Target 13793; HLA-C*07:01; CLDN16; ENSG00000113946; TAA
AAGVSMAK

SEQ ID NO: 13794 - protein, 8 aa, Homo sapiens
  misc_feature: Table A; Target 13794; HLA-C*07:02; CLDN16; ENSG00000113946; TAA
AAGVSMAK

SEQ ID NO: 13795 - protein, 8 aa, Homo sapiens
  misc_feature: Table A; Target 13795; HLA-C*07:06; CLDN16; ENSG00000113946; TAA
AAGVSMAK

SEQ ID NO: 13796 - protein, 8 aa, Homo sapiens
  misc_feature: Table A; Target 13796; HLA-C*12:03; CLDN16; ENSG00000113946; TAA
AAGVSMAK

SEQ ID NO: 13797 - protein, 8 aa, Homo sapiens
  misc_feature: Table A; Target 13797; HLA-C*16:01; CLDN16; ENSG00000113946; TAA
AAGVSMAK

SEQ ID NO: 13798 - protein, 10 aa, Homo sapiens
  misc_feature: Table A; Target 13798; HLA-A*30:02; CLDN16; ENSG00000113946; TAA
AAGVSMAKSY

SEQ ID NO: 13799 - protein, 10 aa, Homo sapiens
  misc_feature: Table A; Target 13799; HLA-B*44:02; CLDN16; ENSG00000113946; TAA
AAGVSMAKSY

SEQ ID NO: 13800 - protein, 10 aa, Homo sapiens
  misc_feature: Table A; Target 13800; HLA-B*44:03; CLDN16; ENSG00000113946; TAA
AAGVSMAKSY

SEQ ID NO: 13801 - protein, 10 aa, Homo sapiens
  misc_feature: Table A; Target 13801; HLA-C*04:01; CLDN16; ENSG00000113946; TAA
AAGVSMAKSY

SEQ ID NO: 13802 - protein, 10 aa, Homo sapiens
  misc_feature: Table A; Target 13802; HLA-C*07:01; CLDN16; ENSG00000113946; TAA
AAGVSMAKSY

SEQ ID NO: 13803 - protein, 10 aa, Homo sapiens
  misc_feature: Table A; Target 13803; HLA-C*12:03; CLDN16; ENSG00000113946; TAA
AAGVSMAKSY

SEQ ID NO: 13804 - protein, 10 aa, Homo sapiens
  misc_feature: Table A; Target 13804; HLA-C*16:02; CLDN16; ENSG00000113946; TAA
AAGVSMAKSY

SEQ ID NO: 13805 - protein, 10 aa, Homo sapiens
  misc_feature: Table A; Target 13805; HLA-C*16:04; CLDN16; ENSG00000113946; TAA
AAGVSMAKSY

SEQ ID NO: 13806 - protein, 10 aa, Homo sapiens
  misc_feature: Table A; Target 13806; HLA-A*03:02; CLDN16; ENSG00000113946; TAA
ADDSLEVSTK

SEQ ID NO: 13807 - protein, 10 aa, Homo sapiens
  misc_feature: Table A; Target 13807; HLA-A*11:01; CLDN16; ENSG00000113946; TAA
ADDSLEVSTK

SEQ ID NO: 13808 - protein, 10 aa, Homo sapiens
  misc_feature: Table A; Target 13808; HLA-B*27:02; CLDN16; ENSG00000113946; TAA
ADDSLEVSTK

SEQ ID NO: 13809 - protein, 9 aa, Homo sapiens
  misc_feature: Table A; Target 13809; HLA-B*37:01; CLDN16; ENSG00000113946; TAA
ADILAGFGF

SEQ ID NO: 13810 - protein, 9 aa, Homo sapiens
  misc_feature: Table A; Target 13810; HLA-B*44:02; CLDN16; ENSG00000113946; TAA
ADILAGFGF

SEQ ID NO: 13811 - protein, 9 aa, Homo sapiens
  misc_feature: Table A; Target 13811; HLA-B*44:03; CLDN16; ENSG00000113946; TAA
ADILAGFGF

SEQ ID NO: 13812 - protein, 8 aa, Homo sapiens
  misc_feature: Table A; Target 13812; HLA-B*37:01; CLDN16; ENSG00000113946; TAA
AEHPLKLV

SEQ ID NO: 13813 - protein, 8 aa, Homo sapiens
  misc_feature: Table A; Target 13813; HLA-B*44:03; CLDN16; ENSG00000113946; TAA
AEHPLKLV

SEQ ID NO: 13814 - protein, 8 aa, Homo sapiens
  misc_feature: Table A; Target 13814; HLA-B*49:01; CLDN16; ENSG00000113946; TAA
AEHPLKLV

SEQ ID NO: 13815 - protein, 9 aa, Homo sapiens
  misc_feature: Table A; Target 13815; HLA-A*30:01; CLDN16; ENSG00000113946; TAA
AEHPLKLVV

SEQ ID NO: 13816 - protein, 9 aa, Homo sapiens
  misc_feature: Table A; Target 13816; HLA-B*13:02; CLDN16; ENSG00000113946; TAA
AEHPLKLVV

SEQ ID NO: 13817 - protein, 9 aa, Homo sapiens
  misc_feature: Table A; Target 13817; HLA-B*18:01; CLDN16; ENSG00000113946; TAA
AEHPLKLVV

SEQ ID NO: 13818 - protein, 9 aa, Homo sapiens
  misc_feature: Table A; Target 13818; HLA-B*37:01; CLDN16; ENSG00000113946; TAA
AEHPLKLVV

SEQ ID NO: 13819 - protein, 9 aa, Homo sapiens
  misc_feature: Table A; Target 13819; HLA-B*40:01; CLDN16; ENSG00000113946; TAA
AEHPLKLVV

SEQ ID NO: 13820 - protein, 9 aa, Homo sapiens
  misc_feature: Table A; Target 13820; HLA-B*40:02; CLDN16; ENSG00000113946; TAA
AEHPLKLVV

SEQ ID NO: 13821 - protein, 9 aa, Homo sapiens
  misc_feature: Table A; Target 13821; HLA-B*44:02; CLDN16; ENSG00000113946; TAA
AEHPLKLVV

SEQ ID NO: 13822 - protein, 9 aa, Homo sapiens
  misc_feature: Table A; Target 13822; HLA-B*44:03; CLDN16; ENSG00000113946; TAA
AEHPLKLVV

SEQ ID NO: 13823 - protein, 9 aa, Homo sapiens
  misc_feature: Table A; Target 13823; HLA-B*49:01; CLDN16; ENSG00000113946; TAA
AEHPLKLVV

SEQ ID NO: 13824 - protein, 9 aa, Homo sapiens
  misc_feature: Table A; Target 13824; HLA-C*02:02; CLDN16; ENSG00000113946; TAA
AEHPLKLVV

SEQ ID NO: 13825 - protein, 9 aa, Homo sapiens
  misc_feature: Table A; Target 13825; HLA-C*16:04; CLDN16; ENSG00000113946; TAA
AEHPLKLVV

SEQ ID NO: 13826 - protein, 10 aa, Homo sapiens
  misc_feature: Table A; Target 13826; HLA-A*30:01; CLDN16; ENSG00000113946; TAA
AEHPLKLVVT

SEQ ID NO: 13827 - protein, 10 aa, Homo sapiens
  misc_feature: Table A; Target 13827; HLA-B*40:02; CLDN16; ENSG00000113946; TAA
AEHPLKLVVT

SEQ ID NO: 13828 - protein, 10 aa, Homo sapiens
  misc_feature: Table A; Target 13828; HLA-B*49:01; CLDN16; ENSG00000113946; TAA
AEHPLKLVVT

SEQ ID NO: 13829 - protein, 9 aa, Homo sapiens
  misc_feature: Table A; Target 13829; HLA-A*23:01; CLDN16; ENSG00000113946; TAA
AFFSAGFLI

SEQ ID NO: 13830 - protein, 9 aa, Homo sapiens
  misc_feature: Table A; Target 13830; HLA-A*24:02; CLDN16; ENSG00000113946; TAA
AFFSAGFLI

SEQ ID NO: 13831 - protein, 10 aa, Homo sapiens
  misc_feature: Table A; Target 13831; HLA-A*29:02; CLDN16; ENSG00000113946; TAA
AFFSAGFLIV

SEQ ID NO: 13832 - protein, 9 aa, Homo sapiens
  misc_feature: Table A; Target 13832; HLA-A*02:03; CLDN16; ENSG00000113946; TAA
AGFGFLTLL

SEQ ID NO: 13833 - protein, 9 aa, Homo sapiens
  misc_feature: Table A; Target 13833; HLA-A*02:04; CLDN16; ENSG00000113946; TAA
AGFGFLTLL

SEQ ID NO: 13834 - protein, 9 aa, Homo sapiens
  misc_feature: Table A; Target 13834; HLA-A*24:02; CLDN16; ENSG00000113946; TAA
AGFLIVATW

SEQ ID NO: 13835 - protein, 9 aa, Homo sapiens
  misc_feature: Table A; Target 13835; HLA-A*25:01; CLDN16; ENSG00000113946; TAA
AGFLIVATW

SEQ ID NO: 13836 - protein, 9 aa, Homo sapiens
  misc_feature: Table A; Target 13836; HLA-A*32:01; CLDN16; ENSG00000113946; TAA
AGFLIVATW

SEQ ID NO: 13837 - protein, 9 aa, Homo sapiens
  misc_feature: Table A; Target 13837; HLA-B*44:02; CLDN16; ENSG00000113946; TAA
AGFLIVATW

SEQ ID NO: 13838 - protein, 9 aa, Homo sapiens
  misc_feature: Table A; Target 13838; HLA-B*44:03; CLDN16; ENSG00000113946; TAA
AGFLIVATW

SEQ ID NO: 13839 - protein, 9 aa, Homo sapiens
  misc_feature: Table A; Target 13839; HLA-B*57:01; CLDN16; ENSG00000113946; TAA
AGFLIVATW

SEQ ID NO: 13840 - protein, 9 aa, Homo sapiens
  misc_feature: Table A; Target 13840; HLA-B*58:01; CLDN16; ENSG00000113946; TAA
AGFLIVATW

SEQ ID NO: 13841 - protein, 9 aa, Homo sapiens
  misc_feature: Table A; Target 13841; HLA-C*02:02; CLDN16; ENSG00000113946; TAA
AGFLIVATW

SEQ ID NO: 13842 - protein, 9 aa, Homo sapiens
  misc_feature: Table A; Target 13842; HLA-C*12:03; CLDN16; ENSG00000113946; TAA
AGFLIVATW

SEQ ID NO: 13843 - protein, 9 aa, Homo sapiens
  misc_feature: Table A; Target 13843; HLA-C*16:04; CLDN16; ENSG00000113946; TAA
AGFLIVATW

SEQ ID NO: 13844 - protein, 11 aa, Homo sapiens
  misc_feature: Table A; Target 13844; HLA-A*30:02; CLDN16; ENSG00000113946; TAA
AGTPGIIGSVW

SEQ ID NO: 13845 - protein, 11 aa, Homo sapiens
  misc_feature: Table A; Target 13845; HLA-B*44:02; CLDN16; ENSG00000113946; TAA
AGTPGIIGSVW

SEQ ID NO: 13846 - protein, 11 aa, Homo sapiens
  misc_feature: Table A; Target 13846; HLA-B*44:03; CLDN16; ENSG00000113946; TAA
AGTPGIIGSVW

SEQ ID NO: 13847 - protein, 11 aa, Homo sapiens
  misc_feature: Table A; Target 13847; HLA-B*57:01; CLDN16; ENSG00000113946; TAA
AGTPGIIGSVW

SEQ ID NO: 13848 - protein, 11 aa, Homo sapiens
  misc_feature: Table A; Target 13848; HLA-B*58:01; CLDN16; ENSG00000113946; TAA
AGTPGIIGSVW

SEQ ID NO: 13849 - protein, 9 aa, Homo sapiens
  misc_feature: Table A; Target 13849; HLA-A*26:01; CLDN16; ENSG00000113946; TAA
AGVSMAKSY

SEQ ID NO: 13850 - protein, 9 aa, Homo sapiens
  misc_feature: Table A; Target 13850; HLA-A*29:02; CLDN16; ENSG00000113946; TAA
AGVSMAKSY

SEQ ID NO: 13851 - protein, 9 aa, Homo sapiens
  misc_feature: Table A; Target 13851; HLA-A*30:02; CLDN16; ENSG00000113946; TAA
AGVSMAKSY

SEQ ID NO: 13852 - protein, 9 aa, Homo sapiens
  misc_feature: Table A; Target 13852; HLA-A*32:01; CLDN16; ENSG00000113946; TAA
AGVSMAKSY

SEQ ID NO: 13853 - protein, 9 aa, Homo sapiens
  misc_feature: Table A; Target 13853; HLA-B*07:02; CLDN16; ENSG00000113946; TAA
AGVSMAKSY

SEQ ID NO: 13854 - protein, 9 aa, Homo sapiens
  misc_feature: Table A; Target 13854; HLA-B*15:01; CLDN16; ENSG00000113946; TAA
AGVSMAKSY

SEQ ID NO: 13855 - protein, 9 aa, Homo sapiens
  misc_feature: Table A; Target 13855; HLA-B*15:03; CLDN16; ENSG00000113946; TAA
AGVSMAKSY

SEQ ID NO: 13856 - protein, 9 aa, Homo sapiens
  misc_feature: Table A; Target 13856; HLA-B*18:01; CLDN16; ENSG00000113946; TAA
AGVSMAKSY

SEQ ID NO: 13857 - protein, 9 aa, Homo sapiens
  misc_feature: Table A; Target 13857; HLA-B*27:02; CLDN16; ENSG00000113946; TAA
AGVSMAKSY

SEQ ID NO: 13858 - protein, 9 aa, Homo sapiens
  misc_feature: Table A; Target 13858; HLA-B*27:05; CLDN16; ENSG00000113946; TAA
AGVSMAKSY

SEQ ID NO: 13859 - protein, 9 aa, Homo sapiens
  misc_feature: Table A; Target 13859; HLA-B*39:01; CLDN16; ENSG00000113946; TAA
AGVSMAKSY

SEQ ID NO: 13860 - protein, 9 aa, Homo sapiens
  misc_feature: Table A; Target 13860; HLA-B*40:02; CLDN16; ENSG00000113946; TAA
AGVSMAKSY

SEQ ID NO: 13861 - protein, 9 aa, Homo sapiens
  misc_feature: Table A; Target 13861; HLA-B*44:02; CLDN16; ENSG00000113946; TAA
AGVSMAKSY

SEQ ID NO: 13862 - protein, 9 aa, Homo sapiens
  misc_feature: Table A; Target 13862; HLA-B*44:03; CLDN16; ENSG00000113946; TAA
AGVSMAKSY

SEQ ID NO: 13863 - protein, 9 aa, Homo sapiens
  misc_feature: Table A; Target 13863; HLA-B*46:01; CLDN16; ENSG00000113946; TAA
AGVSMAKSY

SEQ ID NO: 13864 - protein, 9 aa, Homo sapiens
  misc_feature: Table A; Target 13864; HLA-B*58:01; CLDN16; ENSG00000113946; TAA
AGVSMAKSY

SEQ ID NO: 13865 - protein, 9 aa, Homo sapiens
  misc_feature: Table A; Target 13865; HLA-C*01:02; CLDN16; ENSG00000113946; TAA
AGVSMAKSY

SEQ ID NO: 13866 - protein, 9 aa, Homo sapiens
  misc_feature: Table A; Target 13866; HLA-C*02:02; CLDN16; ENSG00000113946; TAA
AGVSMAKSY

SEQ ID NO: 13867 - protein, 9 aa, Homo sapiens
  misc_feature: Table A; Target 13867; HLA-C*04:01; CLDN16; ENSG00000113946; TAA
AGVSMAKSY

SEQ ID NO: 13868 - protein, 9 aa, Homo sapiens
  misc_feature: Table A; Target 13868; HLA-C*06:02; CLDN16; ENSG00000113946; TAA
AGVSMAKSY

SEQ ID NO: 13869 - protein, 9 aa, Homo sapiens
  misc_feature: Table A; Target 13869; HLA-C*07:01; CLDN16; ENSG00000113946; TAA
AGVSMAKSY

SEQ ID NO: 13870 - protein, 9 aa, Homo sapiens
  misc_feature: Table A; Target 13870; HLA-C*07:02; CLDN16; ENSG00000113946; TAA
AGVSMAKSY

SEQ ID NO: 13871 - protein, 9 aa, Homo sapiens
  misc_feature: Table A; Target 13871; HLA-C*12:03; CLDN16; ENSG00000113946; TAA
AGVSMAKSY

SEQ ID NO: 13872 - protein, 9 aa, Homo sapiens
  misc_feature: Table A; Target 13872; HLA-C*14:02; CLDN16; ENSG00000113946; TAA
AGVSMAKSY

SEQ ID NO: 13873 - protein, 9 aa, Homo sapiens
  misc_feature: Table A; Target 13873; HLA-C*16:01; CLDN16; ENSG00000113946; TAA
AGVSMAKSY

SEQ ID NO: 13874 - protein, 9 aa, Homo sapiens
  misc_feature: Table A; Target 13874; HLA-C*16:02; CLDN16; ENSG00000113946; TAA
AGVSMAKSY

SEQ ID NO: 13875 - protein, 9 aa, Homo sapiens
  misc_feature: Table A; Target 13875; HLA-C*16:04; CLDN16; ENSG00000113946; TAA
AGVSMAKSY

SEQ ID NO: 13876 - protein, 8 aa, Homo sapiens
  misc_feature: Table A; Target 13876; HLA-B*13:02; CLDN16; ENSG00000113946; TAA
ALMITADI

SEQ ID NO: 13877 - protein, 9 aa, Homo sapiens
  misc_feature: Table A; Target 13877; HLA-A*02:04; CLDN16; ENSG00000113946; TAA
ALMITADIL

SEQ ID NO: 13878 - protein, 9 aa, Homo sapiens
  misc_feature: Table A; Target 13878; HLA-B*40:02; CLDN16; ENSG00000113946; TAA
ALMITADIL

SEQ ID NO: 13879 - protein, 9 aa, Homo sapiens
  misc_feature: Table A; Target 13879; HLA-C*07:04; CLDN16; ENSG00000113946; TAA
ALMITADIL

SEQ ID NO: 13880 - protein, 9 aa, Homo sapiens
  misc_feature: Table A; Target 13880; HLA-B*07:02; CLDN16; ENSG00000113946; TAA
APRTETAKM

SEQ ID NO: 13881 - protein, 9 aa, Homo sapiens
  misc_feature: Table A; Target 13881; HLA-B*35:01; CLDN16; ENSG00000113946; TAA
APRTETAKM

SEQ ID NO: 13882 - protein, 9 aa, Homo sapiens
  misc_feature: Table A; Target 13882; HLA-B*55:01; CLDN16; ENSG00000113946; TAA
APRTETAKM

SEQ ID NO: 13883 - protein, 9 aa, Homo sapiens
  misc_feature: Table A; Target 13883; HLA-B*56:01; CLDN16; ENSG00000113946; TAA
APRTETAKM

SEQ ID NO: 13884 - protein, 9 aa, Homo sapiens
  misc_feature: Table A; Target 13884; HLA-C*07:02; CLDN16; ENSG00000113946; TAA
APRTETAKM

SEQ ID NO: 13885 - protein, 10 aa, Homo sapiens
  misc_feature: Table A; Target 13885; HLA-A*30:02; CLDN16; ENSG00000113946; TAA
APRTETAKMY

SEQ ID NO: 13886 - protein, 10 aa, Homo sapiens
  misc_feature: Table A; Target 13886; HLA-B*07:02; CLDN16; ENSG00000113946; TAA
APRTETAKMY

SEQ ID NO: 13887 - protein, 10 aa, Homo sapiens
  misc_feature: Table A; Target 13887; HLA-C*07:02; CLDN16; ENSG00000113946; TAA
APRTETAKMY

SEQ ID NO: 13888 - protein, 11 aa, Homo sapiens
  misc_feature: Table A; Target 13888; HLA-B*07:02; CLDN16; ENSG00000113946; TAA
APRTETAKMYA

SEQ ID NO: 13889 - protein, 11 aa, Homo sapiens
  misc_feature: Table A; Target 13889; HLA-B*54:01; CLDN16; ENSG00000113946; TAA
APRTETAKMYA

SEQ ID NO: 13890 - protein, 11 aa, Homo sapiens
  misc_feature: Table A; Target 13890; HLA-B*55:01; CLDN16; ENSG00000113946; TAA
APRTETAKMYA

SEQ ID NO: 13891 - protein, 11 aa, Homo sapiens
  misc_feature: Table A; Target 13891; HLA-B*56:01; CLDN16; ENSG00000113946; TAA
APRTETAKMYA

SEQ ID NO: 13892 - protein, 11 aa, Homo sapiens
  misc_feature: Table A; Target 13892; HLA-C*07:02; CLDN16; ENSG00000113946; TAA
APRTETAKMYA

SEQ ID NO: 13893 - protein, 9 aa, Homo sapiens
  misc_feature: Table A; Target 13893; HLA-A*01:01; CLDN16; ENSG00000113946; TAA
ATMRDLLQY

SEQ ID NO: 13894 - protein, 9 aa, Homo sapiens
  misc_feature: Table A; Target 13894; HLA-A*03:01; CLDN16; ENSG00000113946; TAA
ATMRDLLQY

SEQ ID NO: 13895 - protein, 9 aa, Homo sapiens
  misc_feature: Table A; Target 13895; HLA-A*03:02; CLDN16; ENSG00000113946; TAA
ATMRDLLQY

SEQ ID NO: 13896 - protein, 9 aa, Homo sapiens
  misc_feature: Table A; Target 13896; HLA-A*11:01; CLDN16; ENSG00000113946; TAA
ATMRDLLQY

SEQ ID NO: 13897 - protein, 9 aa, Homo sapiens
  misc_feature: Table A; Target 13897; HLA-A*25:01; CLDN16; ENSG00000113946; TAA
ATMRDLLQY

SEQ ID NO: 13898 - protein, 9 aa, Homo sapiens
  misc_feature: Table A; Target 13898; HLA-A*26:01; CLDN16; ENSG00000113946; TAA
ATMRDLLQY

SEQ ID NO: 13899 - protein, 9 aa, Homo sapiens
  misc_feature: Table A; Target 13899; HLA-A*29:02; CLDN16; ENSG00000113946; TAA
ATMRDLLQY

SEQ ID NO: 13900 - protein, 9 aa, Homo sapiens
  misc_feature: Table A; Target 13900; HLA-A*30:02; CLDN16; ENSG00000113946; TAA
ATMRDLLQY

SEQ ID NO: 13901 - protein, 9 aa, Homo sapiens
  misc_feature: Table A; Target 13901; HLA-A*32:01; CLDN16; ENSG00000113946; TAA
ATMRDLLQY

SEQ ID NO: 13902 - protein, 9 aa, Homo sapiens
  misc_feature: Table A; Target 13902; HLA-B*15:01; CLDN16; ENSG00000113946; TAA
ATMRDLLQY

SEQ ID NO: 13903 - protein, 9 aa, Homo sapiens
  misc_feature: Table A; Target 13903; HLA-B*44:03; CLDN16; ENSG00000113946; TAA
ATMRDLLQY

SEQ ID NO: 13904 - protein, 9 aa, Homo sapiens
  misc_feature: Table A; Target 13904; HLA-B*46:01; CLDN16; ENSG00000113946; TAA
ATMRDLLQY

SEQ ID NO: 13905 - protein, 9 aa, Homo sapiens
  misc_feature: Table A; Target 13905; HLA-B*57:01; CLDN16; ENSG00000113946; TAA
ATMRDLLQY

SEQ ID NO: 13906 - protein, 9 aa, Homo sapiens
  misc_feature: Table A; Target 13906; HLA-B*58:01; CLDN16; ENSG00000113946; TAA
ATMRDLLQY

SEQ ID NO: 13907 - protein, 9 aa, Homo sapiens
  misc_feature: Table A; Target 13907; HLA-C*02:02; CLDN16; ENSG00000113946; TAA
ATMRDLLQY

SEQ ID NO: 13908 - protein, 9 aa, Homo sapiens
  misc_feature: Table A; Target 13908; HLA-C*07:06; CLDN16; ENSG00000113946; TAA
ATMRDLLQY

SEQ ID NO: 13909 - protein, 9 aa, Homo sapiens
  misc_feature: Table A; Target 13909; HLA-C*16:01; CLDN16; ENSG00000113946; TAA
ATMRDLLQY

SEQ ID NO: 13910 - protein, 9 aa, Homo sapiens
  misc_feature: Table A; Target 13910; HLA-C*16:02; CLDN16; ENSG00000113946; TAA
ATMRDLLQY

SEQ ID NO: 13911 - protein, 9 aa, Homo sapiens
  misc_feature: Table A; Target 13911; HLA-C*16:04; CLDN16; ENSG00000113946; TAA
ATMRDLLQY

SEQ ID NO: 13912 - protein, 10 aa, Homo sapiens
  misc_feature: Table A; Target 13912; HLA-B*57:01; CLDN16; ENSG00000113946; TAA
ATMRDLLQYI

SEQ ID NO: 13913 - protein, 8 aa, Homo sapiens
  misc_feature: Table A; Target 13913; HLA-A*11:01; CLDN16; ENSG00000113946; TAA
AVDVYVER

SEQ ID NO: 13914 - protein, 8 aa, Homo sapiens
  misc_feature: Table A; Target 13914; HLA-A*31:01; CLDN16; ENSG00000113946; TAA
AVDVYVER

SEQ ID NO: 13915 - protein, 8 aa, Homo sapiens
  misc_feature: Table A; Target 13915; HLA-A*33:03; CLDN16; ENSG00000113946; TAA
AVDVYVER

SEQ ID NO: 13916 - protein, 8 aa, Homo sapiens
  misc_feature: Table A; Target 13916; HLA-C*05:01; CLDN16; ENSG00000113946; TAA
AVDVYVER

SEQ ID NO: 13917 - protein, 8 aa, Homo sapiens
  misc_feature: Table A; Target 13917; HLA-C*07:06; CLDN16; ENSG00000113946; TAA
AVDVYVER

SEQ ID NO: 13918 - protein, 9 aa, Homo sapiens
  misc_feature: Table A; Target 13918; HLA-A*02:07; CLDN16; ENSG00000113946; TAA
AVDVYVERS

SEQ ID NO: 13919 - protein, 11 aa, Homo sapiens
  misc_feature: Table A; Target 13919; HLA-B*07:02; CLDN16; ENSG00000113946; TAA
AVDVYVERSTL

SEQ ID NO: 13920 - protein, 11 aa, Homo sapiens
  misc_feature: Table A; Target 13920; HLA-C*05:01; CLDN16; ENSG00000113946; TAA
AVDVYVERSTL

SEQ ID NO: 13921 - protein, 9 aa, Homo sapiens
  misc_feature: Table A; Target 13921; HLA-A*23:01; CLDN16; ENSG00000113946; TAA
AYSAAGVSM

SEQ ID NO: 13922 - protein, 9 aa, Homo sapiens
  misc_feature: Table A; Target 13922; HLA-A*24:02; CLDN16; ENSG00000113946; TAA
AYSAAGVSM

SEQ ID NO: 13923 - protein, 9 aa, Homo sapiens
  misc_feature: Table A; Target 13923; HLA-A*30:01; CLDN16; ENSG00000113946; TAA
AYSAAGVSM

SEQ ID NO: 13924 - protein, 9 aa, Homo sapiens
  misc_feature: Table A; Target 13924; HLA-A*30:02; CLDN16; ENSG00000113946; TAA
AYSAAGVSM

SEQ ID NO: 13925 - protein, 9 aa, Homo sapiens
  misc_feature: Table A; Target 13925; HLA-A*32:01; CLDN16; ENSG00000113946; TAA
AYSAAGVSM

SEQ ID NO: 13926 - protein, 9 aa, Homo sapiens
  misc_feature: Table A; Target 13926; HLA-B*07:02; CLDN16; ENSG00000113946; TAA
AYSAAGVSM

SEQ ID NO: 13927 - protein, 9 aa, Homo sapiens
  misc_feature: Table A; Target 13927; HLA-B*15:01; CLDN16; ENSG00000113946; TAA
AYSAAGVSM

SEQ ID NO: 13928 - protein, 9 aa, Homo sapiens
  misc_feature: Table A; Target 13928; HLA-B*15:03; CLDN16; ENSG00000113946; TAA
AYSAAGVSM

SEQ ID NO: 13929 - protein, 9 aa, Homo sapiens
  misc_feature: Table A; Target 13929; HLA-B*27:05; CLDN16; ENSG00000113946; TAA
AYSAAGVSM

SEQ ID NO: 13930 - protein, 9 aa, Homo sapiens
  misc_feature: Table A; Target 13930; HLA-B*35:01; CLDN16; ENSG00000113946; TAA
AYSAAGVSM

SEQ ID NO: 13931 - protein, 9 aa, Homo sapiens
  misc_feature: Table A; Target 13931; HLA-B*35:03; CLDN16; ENSG00000113946; TAA
AYSAAGVSM

SEQ ID NO: 13932 - protein, 9 aa, Homo sapiens
  misc_feature: Table A; Target 13932; HLA-B*37:01; CLDN16; ENSG00000113946; TAA
AYSAAGVSM

SEQ ID NO: 13933 - protein, 9 aa, Homo sapiens
  misc_feature: Table A; Target 13933; HLA-B*38:01; CLDN16; ENSG00000113946; TAA
AYSAAGVSM

SEQ ID NO: 13934 - protein, 9 aa, Homo sapiens
  misc_feature: Table A; Target 13934; HLA-B*39:01; CLDN16; ENSG00000113946; TAA
AYSAAGVSM

SEQ ID NO: 13935 - protein, 9 aa, Homo sapiens
  misc_feature: Table A; Target 13935; HLA-B*40:02; CLDN16; ENSG00000113946; TAA
AYSAAGVSM

SEQ ID NO: 13936 - protein, 9 aa, Homo sapiens
  misc_feature: Table A; Target 13936; HLA-B*46:01; CLDN16; ENSG00000113946; TAA
AYSAAGVSM

SEQ ID NO: 13937 - protein, 9 aa, Homo sapiens
  misc_feature: Table A; Target 13937; HLA-B*55:01; CLDN16; ENSG00000113946; TAA
AYSAAGVSM

SEQ ID NO: 13938 - protein, 9 aa, Homo sapiens
  misc_feature: Table A; Target 13938; HLA-C*01:02; CLDN16; ENSG00000113946; TAA
AYSAAGVSM

SEQ ID NO: 13939 - protein, 9 aa, Homo sapiens
  misc_feature: Table A; Target 13939; HLA-C*02:02; CLDN16; ENSG00000113946; TAA
AYSAAGVSM

SEQ ID NO: 13940 - protein, 9 aa, Homo sapiens
  misc_feature: Table A; Target 13940; HLA-C*03:03; CLDN16; ENSG00000113946; TAA
AYSAAGVSM

SEQ ID NO: 13941 - protein, 9 aa, Homo sapiens
  misc_feature: Table A; Target 13941; HLA-C*03:04; CLDN16; ENSG00000113946; TAA
AYSAAGVSM

SEQ ID NO: 13942 - protein, 9 aa, Homo sapiens
  misc_feature: Table A; Target 13942; HLA-C*04:01; CLDN16; ENSG00000113946; TAA
AYSAAGVSM

SEQ ID NO: 13943 - protein, 9 aa, Homo sapiens
  misc_feature: Table A; Target 13943; HLA-C*05:01; CLDN16; ENSG00000113946; TAA
AYSAAGVSM

SEQ ID NO: 13944 - protein, 9 aa, Homo sapiens
  misc_feature: Table A; Target 13944; HLA-C*07:02; CLDN16; ENSG00000113946; TAA
AYSAAGVSM

SEQ ID NO: 13945 - protein, 9 aa, Homo sapiens
  misc_feature: Table A; Target 13945; HLA-C*07:04; CLDN16; ENSG00000113946; TAA
AYSAAGVSM

SEQ ID NO: 13946 - protein, 9 aa, Homo sapiens
  misc_feature: Table A; Target 13946; HLA-C*12:03; CLDN16; ENSG00000113946; TAA
AYSAAGVSM

SEQ ID NO: 13947 - protein, 9 aa, Homo sapiens
  misc_feature: Table A; Target 13947; HLA-C*14:02; CLDN16; ENSG00000113946; TAA
AYSAAGVSM

SEQ ID NO: 13948 - protein, 9 aa, Homo sapiens
  misc_feature: Table A; Target 13948; HLA-C*16:01; CLDN16; ENSG00000113946; TAA
AYSAAGVSM

SEQ ID NO: 13949 - protein, 9 aa, Homo sapiens
  misc_feature: Table A; Target 13949; HLA-C*16:02; CLDN16; ENSG00000113946; TAA
AYSAAGVSM

SEQ ID NO: 13950 - protein, 9 aa, Homo sapiens
  misc_feature: Table A; Target 13950; HLA-C*16:04; CLDN16; ENSG00000113946; TAA
AYSAAGVSM

SEQ ID NO: 13951 - protein, 10 aa, Homo sapiens
  misc_feature: Table A; Target 13951; HLA-B*27:05; CLDN16; ENSG00000113946; TAA
AYSAAGVSMA

SEQ ID NO: 13952 - protein, 10 aa, Homo sapiens
  misc_feature: Table A; Target 13952; HLA-C*04:01; CLDN16; ENSG00000113946; TAA
AYSAAGVSMA

SEQ ID NO: 13953 - protein, 10 aa, Homo sapiens
  misc_feature: Table A; Target 13953; HLA-C*07:02; CLDN16; ENSG00000113946; TAA
AYSAAGVSMA

SEQ ID NO: 13954 - protein, 10 aa, Homo sapiens
  misc_feature: Table A; Target 13954; HLA-C*14:02; CLDN16; ENSG00000113946; TAA
AYSAAGVSMA

SEQ ID NO: 13955 - protein, 11 aa, Homo sapiens
  misc_feature: Table A; Target 13955; HLA-A*03:01; CLDN16; ENSG00000113946; TAA
AYSAAGVSMAK

SEQ ID NO: 13956 - protein, 11 aa, Homo sapiens
  misc_feature: Table A; Target 13956; HLA-A*03:02; CLDN16; ENSG00000113946; TAA
AYSAAGVSMAK

SEQ ID NO: 13957 - protein, 11 aa, Homo sapiens
  misc_feature: Table A; Target 13957; HLA-A*11:01; CLDN16; ENSG00000113946; TAA
AYSAAGVSMAK

SEQ ID NO: 13958 - protein, 11 aa, Homo sapiens
  misc_feature: Table A; Target 13958; HLA-A*30:02; CLDN16; ENSG00000113946; TAA
AYSAAGVSMAK

SEQ ID NO: 13959 - protein, 11 aa, Homo sapiens
  misc_feature: Table A; Target 13959; HLA-A*31:01; CLDN16; ENSG00000113946; TAA
AYSAAGVSMAK

SEQ ID NO: 13960 - protein, 11 aa, Homo sapiens
  misc_feature: Table A; Target 13960; HLA-B*27:02; CLDN16; ENSG00000113946; TAA
AYSAAGVSMAK

SEQ ID NO: 13961 - protein, 11 aa, Homo sapiens
  misc_feature: Table A; Target 13961; HLA-B*27:05; CLDN16; ENSG00000113946; TAA
AYSAAGVSMAK

SEQ ID NO: 13962 - protein, 11 aa, Homo sapiens
  misc_feature: Table A; Target 13962; HLA-C*06:02; CLDN16; ENSG00000113946; TAA
AYSAAGVSMAK

SEQ ID NO: 13963 - protein, 11 aa, Homo sapiens
  misc_feature: Table A; Target 13963; HLA-C*07:02; CLDN16; ENSG00000113946; TAA
AYSAAGVSMAK

SEQ ID NO: 13964 - protein, 8 aa, Homo sapiens
  misc_feature: Table A; Target 13964; HLA-C*14:02; CLDN16; ENSG00000113946; TAA
CFLAGAVL

SEQ ID NO: 13965 - protein, 8 aa, Homo sapiens
  misc_feature: Table A; Target 13965; HLA-A*23:01; CLDN16; ENSG00000113946; TAA
CFVAGATL

SEQ ID NO: 13966 - protein, 8 aa, Homo sapiens
  misc_feature: Table A; Target 13966; HLA-C*14:02; CLDN16; ENSG00000113946; TAA
CFVAGATL

SEQ ID NO: 13967 - protein, 9 aa, Homo sapiens
  misc_feature: Table A; Target 13967; HLA-A*23:01; CLDN16; ENSG00000113946; TAA
CFVAGATLL

SEQ ID NO: 13968 - protein, 9 aa, Homo sapiens
  misc_feature: Table A; Target 13968; HLA-A*24:02; CLDN16; ENSG00000113946; TAA
CFVAGATLL

SEQ ID NO: 13969 - protein, 9 aa, Homo sapiens
  misc_feature: Table A; Target 13969; HLA-C*14:02; CLDN16; ENSG00000113946; TAA
CFVAGATLL

SEQ ID NO: 13970 - protein, 10 aa, Homo sapiens
  misc_feature: Table A; Target 13970; HLA-A*23:01; CLDN16; ENSG00000113946; TAA
CFVAGATLLI

SEQ ID NO: 13971 - protein, 10 aa, Homo sapiens
  misc_feature: Table A; Target 13971; HLA-B*39:01; CLDN16; ENSG00000113946; TAA
CHPDGLLATM

SEQ ID NO: 13972 - protein, 9 aa, Homo sapiens
  misc_feature: Table A; Target 13972; HLA-B*27:02; CLDN16; ENSG00000113946; TAA
DDSLEVSTK

SEQ ID NO: 13973 - protein, 9 aa, Homo sapiens
  misc_feature: Table A; Target 13973; HLA-C*07:01; CLDN16; ENSG00000113946; TAA
DDSLEVSTK

SEQ ID NO: 13974 - protein, 11 aa, Homo sapiens
  misc_feature: Table A; Target 13974; HLA-A*33:01; CLDN16; ENSG00000113946; TAA
DDSLEVSTKCR

SEQ ID NO: 13975 - protein, 8 aa, Homo sapiens
  misc_feature: Table A; Target 13975; HLA-B*18:01; CLDN16; ENSG00000113946; TAA
DEYDSILA

SEQ ID NO: 13976 - protein, 8 aa, Homo sapiens
  misc_feature: Table A; Target 13976; HLA-B*49:01; CLDN16; ENSG00000113946; TAA
DEYDSILA

SEQ ID NO: 13977 - protein, 9 aa, Homo sapiens
  misc_feature: Table A; Target 13977; HLA-B*18:01; CLDN16; ENSG00000113946; TAA
DEYDSILAE

SEQ ID NO: 13978 - protein, 10 aa, Homo sapiens
  misc_feature: Table A; Target 13978; HLA-B*18:01; CLDN16; ENSG00000113946; TAA
DEYDSILAEH

SEQ ID NO: 13979 - protein, 9 aa, Homo sapiens
  misc_feature: Table A; Target 13979; HLA-B*18:01; CLDN16; ENSG00000113946; TAA
DGIRTCDEY

SEQ ID NO: 13980 - protein, 9 aa, Homo sapiens
  misc_feature: Table A; Target 13980; HLA-A*33:01; CLDN16; ENSG00000113946; TAA
DILAGFGFL

SEQ ID NO: 13981 - protein, 9 aa, Homo sapiens
  misc_feature: Table A; Target 13981; HLA-A*25:01; CLDN16; ENSG00000113946; TAA
DLLQYIACF

SEQ ID NO: 13982 - protein, 9 aa, Homo sapiens
  misc_feature: Table A; Target 13982; HLA-A*26:01; CLDN16; ENSG00000113946; TAA
DLLQYIACF

SEQ ID NO: 13983 - protein, 9 aa, Homo sapiens
  misc_feature: Table A; Target 13983; HLA-A*33:01; CLDN16; ENSG00000113946; TAA
DLLQYIACF

SEQ ID NO: 13984 - protein, 9 aa, Homo sapiens
  misc_feature: Table A; Target 13984; HLA-B*18:01; CLDN16; ENSG00000113946; TAA
DLLQYIACF

SEQ ID NO: 13985 - protein, 9 aa, Homo sapiens
  misc_feature: Table A; Target 13985; HLA-A*25:01; CLDN16; ENSG00000113946; TAA
DSILAEHPL

SEQ ID NO: 13986 - protein, 9 aa, Homo sapiens
  misc_feature: Table A; Target 13986; HLA-A*33:01; CLDN16; ENSG00000113946; TAA
DSILAEHPL

SEQ ID NO: 13987 - protein, 9 aa, Homo sapiens
  misc_feature: Table A; Target 13987; HLA-A*33:03; CLDN16; ENSG00000113946; TAA
DSILAEHPL

SEQ ID NO: 13988 - protein, 9 aa, Homo sapiens
  misc_feature: Table A; Target 13988; HLA-A*68:01; CLDN16; ENSG00000113946; TAA
DSILAEHPL

SEQ ID NO: 13989 - protein, 9 aa, Homo sapiens
  misc_feature: Table A; Target 13989; HLA-B*35:03; CLDN16; ENSG00000113946; TAA
DSILAEHPL

SEQ ID NO: 13990 - protein, 9 aa, Homo sapiens
  misc_feature: Table A; Target 13990; HLA-B*40:02; CLDN16; ENSG00000113946; TAA
DSILAEHPL

SEQ ID NO: 13991 - protein, 9 aa, Homo sapiens
  misc_feature: Table A; Target 13991; HLA-C*03:03; CLDN16; ENSG00000113946; TAA
DSILAEHPL

SEQ ID NO: 13992 - protein, 8 aa, Homo sapiens
  misc_feature: Table A; Target 13992; HLA-A*33:01; CLDN16; ENSG00000113946; TAA
DSLEVSTK

SEQ ID NO: 13993 - protein, 8 aa, Homo sapiens
  misc_feature: Table A; Target 13993; HLA-B*27:02; CLDN16; ENSG00000113946; TAA
DSLEVSTK

SEQ ID NO: 13994 - protein, 8 aa, Homo sapiens
  misc_feature: Table A; Target 13994; HLA-B*51:01; CLDN16; ENSG00000113946; TAA
DSLEVSTK

SEQ ID NO: 13995 - protein, 10 aa, Homo sapiens
  misc_feature: Table A; Target 13995; HLA-A*33:01; CLDN16; ENSG00000113946; TAA
DSLEVSTKCR

SEQ ID NO: 13996 - protein, 10 aa, Homo sapiens
  misc_feature: Table A; Target 13996; HLA-A*33:03; CLDN16; ENSG00000113946; TAA
DSLEVSTKCR

SEQ ID NO: 13997 - protein, 10 aa, Homo sapiens
  misc_feature: Table A; Target 13997; HLA-A*68:01; CLDN16; ENSG00000113946; TAA
DSLEVSTKCR

SEQ ID NO: 13998 - protein, 10 aa, Homo sapiens
  misc_feature: Table A; Target 13998; HLA-C*07:06; CLDN16; ENSG00000113946; TAA
DSLEVSTKCR

SEQ ID NO: 13999 - protein, 9 aa, Homo sapiens
  misc_feature: Table A; Target 13999; HLA-A*33:01; CLDN16; ENSG00000113946; TAA
DTRHLSGAR

SEQ ID NO: 14000 - protein, 9 aa, Homo sapiens
  misc_feature: Table A; Target 14000; HLA-A*33:03; CLDN16; ENSG00000113946; TAA
DTRHLSGAR

SEQ ID NO: 14001 - protein, 10 aa, Homo sapiens
  misc_feature: Table A; Target 14001; HLA-A*01:01; CLDN16; ENSG00000113946; TAA
DVGPERNYPY

SEQ ID NO: 14002 - protein, 10 aa, Homo sapiens
  misc_feature: Table A; Target 14002; HLA-A*25:01; CLDN16; ENSG00000113946; TAA
DVGPERNYPY

SEQ ID NO: 14003 - protein, 10 aa, Homo sapiens
  misc_feature: Table A; Target 14003; HLA-A*26:01; CLDN16; ENSG00000113946; TAA
DVGPERNYPY

SEQ ID NO: 14004 - protein, 10 aa, Homo sapiens
  misc_feature: Table A; Target 14004; HLA-A*29:02; CLDN16; ENSG00000113946; TAA
DVGPERNYPY

SEQ ID NO: 14005 - protein, 10 aa, Homo sapiens
  misc_feature: Table A; Target 14005; HLA-A*30:02; CLDN16; ENSG00000113946; TAA
DVGPERNYPY

SEQ ID NO: 14006 - protein, 10 aa, Homo sapiens
  misc_feature: Table A; Target 14006; HLA-A*33:01; CLDN16; ENSG00000113946; TAA
DVGPERNYPY

SEQ ID NO: 14007 - protein, 10 aa, Homo sapiens
  misc_feature: Table A; Target 14007; HLA-A*33:03; CLDN16; ENSG00000113946; TAA
DVGPERNYPY

SEQ ID NO: 14008 - protein, 10 aa, Homo sapiens
  misc_feature: Table A; Target 14008; HLA-A*68:01; CLDN16; ENSG00000113946; TAA
DVGPERNYPY

SEQ ID NO: 14009 - protein, 10 aa, Homo sapiens
  misc_feature: Table A; Target 14009; HLA-B*35:01; CLDN16; ENSG00000113946; TAA
DVGPERNYPY

SEQ ID NO: 14010 - protein, 10 aa, Homo sapiens
  misc_feature: Table A; Target 14010; HLA-C*03:03; CLDN16; ENSG00000113946; TAA
DVGPERNYPY

SEQ ID NO: 14011 - protein, 10 aa, Homo sapiens
  misc_feature: Table A; Target 14011; HLA-C*07:01; CLDN16; ENSG00000113946; TAA
DVGPERNYPY

SEQ ID NO: 14012 - protein, 9 aa, Homo sapiens
  misc_feature: Table A; Target 14012; HLA-A*25:01; CLDN16; ENSG00000113946; TAA
DVYVERSTL

SEQ ID NO: 14013 - protein, 9 aa, Homo sapiens
  misc_feature: Table A; Target 14013; HLA-A*26:01; CLDN16; ENSG00000113946; TAA
DVYVERSTL

SEQ ID NO: 14014 - protein, 9 aa, Homo sapiens
  misc_feature: Table A; Target 14014; HLA-A*33:01; CLDN16; ENSG00000113946; TAA
DVYVERSTL

SEQ ID NO: 14015 - protein, 9 aa, Homo sapiens
  misc_feature: Table A; Target 14015; HLA-A*33:03; CLDN16; ENSG00000113946; TAA
DVYVERSTL

SEQ ID NO: 14016 - protein, 9 aa, Homo sapiens
  misc_feature: Table A; Target 14016; HLA-A*68:01; CLDN16; ENSG00000113946; TAA
DVYVERSTL

SEQ ID NO: 14017 - protein, 9 aa, Homo sapiens
  misc_feature: Table A; Target 14017; HLA-A*68:02; CLDN16; ENSG00000113946; TAA
DVYVERSTL

SEQ ID NO: 14018 - protein, 9 aa, Homo sapiens
  misc_feature: Table A; Target 14018; HLA-B*07:02; CLDN16; ENSG00000113946; TAA
DVYVERSTL

SEQ ID NO: 14019 - protein, 9 aa, Homo sapiens
  misc_feature: Table A; Target 14019; HLA-B*08:01; CLDN16; ENSG00000113946; TAA
DVYVERSTL

SEQ ID NO: 14020 - protein, 9 aa, Homo sapiens
  misc_feature: Table A; Target 14020; HLA-B*18:01; CLDN16; ENSG00000113946; TAA
DVYVERSTL

SEQ ID NO: 14021 - protein, 9 aa, Homo sapiens
  misc_feature: Table A; Target 14021; HLA-B*35:01; CLDN16; ENSG00000113946; TAA
DVYVERSTL

SEQ ID NO: 14022 - protein, 9 aa, Homo sapiens
  misc_feature: Table A; Target 14022; HLA-B*35:03; CLDN16; ENSG00000113946; TAA
DVYVERSTL

SEQ ID NO: 14023 - protein, 9 aa, Homo sapiens
  misc_feature: Table A; Target 14023; HLA-B*38:01; CLDN16; ENSG00000113946; TAA
DVYVERSTL

SEQ ID NO: 14024 - protein, 9 aa, Homo sapiens
  misc_feature: Table A; Target 14024; HLA-B*40:02; CLDN16; ENSG00000113946; TAA
DVYVERSTL

SEQ ID NO: 14025 - protein, 9 aa, Homo sapiens
  misc_feature: Table A; Target 14025; HLA-B*51:01; CLDN16; ENSG00000113946; TAA
DVYVERSTL

SEQ ID NO: 14026 - protein, 9 aa, Homo sapiens
  misc_feature: Table A; Target 14026; HLA-C*01:02; CLDN16; ENSG00000113946; TAA
DVYVERSTL

SEQ ID NO: 14027 - protein, 9 aa, Homo sapiens
  misc_feature: Table A; Target 14027; HLA-C*03:03; CLDN16; ENSG00000113946; TAA
DVYVERSTL

SEQ ID NO: 14028 - protein, 9 aa, Homo sapiens
  misc_feature: Table A; Target 14028; HLA-C*03:04; CLDN16; ENSG00000113946; TAA
DVYVERSTL

SEQ ID NO: 14029 - protein, 9 aa, Homo sapiens
  misc_feature: Table A; Target 14029; HLA-C*05:01; CLDN16; ENSG00000113946; TAA
DVYVERSTL

SEQ ID NO: 14030 - protein, 9 aa, Homo sapiens
  misc_feature: Table A; Target 14030; HLA-C*07:02; CLDN16; ENSG00000113946; TAA
DVYVERSTL

SEQ ID NO: 14031 - protein, 9 aa, Homo sapiens
  misc_feature: Table A; Target 14031; HLA-C*07:06; CLDN16; ENSG00000113946; TAA
DVYVERSTL

SEQ ID NO: 14032 - protein, 9 aa, Homo sapiens
  misc_feature: Table A; Target 14032; HLA-C*12:03; CLDN16; ENSG00000113946; TAA
DVYVERSTL

SEQ ID NO: 14033 - protein, 10 aa, Homo sapiens
  misc_feature: Table A; Target 14033; HLA-A*26:01; CLDN16; ENSG00000113946; TAA
DVYVERSTLV

SEQ ID NO: 14034 - protein, 11 aa, Homo sapiens
  misc_feature: Table A; Target 14034; HLA-A*25:01; CLDN16; ENSG00000113946; TAA
DVYVERSTLVL

SEQ ID NO: 14035 - protein, 8 aa, Homo sapiens
  misc_feature: Table A; Target 14035; HLA-B*08:01; CLDN16; ENSG00000113946; TAA
EPYIKVRI

SEQ ID NO: 14036 - protein, 8 aa, Homo sapiens
  misc_feature: Table A; Target 14036; HLA-B*51:01; CLDN16; ENSG00000113946; TAA
EPYIKVRI

SEQ ID NO: 14037 - protein, 8 aa, Homo sapiens
  misc_feature: Table A; Target 14037; HLA-A*68:02; CLDN16; ENSG00000113946; TAA
ETAKMYAV

SEQ ID NO: 14038 - protein, 11 aa, Homo sapiens
  misc_feature: Table A; Target 14038; HLA-A*33:03; CLDN16; ENSG00000113946; TAA
ETAKMYAVDTR

SEQ ID NO: 14039 - protein, 11 aa, Homo sapiens
  misc_feature: Table A; Target 14039; HLA-A*68:01; CLDN16; ENSG00000113946; TAA
ETAKMYAVDTR

SEQ ID NO: 14040 - protein, 8 aa, Homo sapiens
  misc_feature: Table A; Target 14040; HLA-A*33:03; CLDN16; ENSG00000113946; TAA
ETQKTDTR

SEQ ID NO: 14041 - protein, 9 aa, Homo sapiens
  misc_feature: Table A; Target 14041; HLA-A*33:01; CLDN16; ENSG00000113946; TAA
EYDSILAEH

SEQ ID NO: 14042 - protein, 9 aa, Homo sapiens
  misc_feature: Table A; Target 14042; HLA-A*33:03; CLDN16; ENSG00000113946; TAA
EYDSILAEH

SEQ ID NO: 14043 - protein, 11 aa, Homo sapiens
  misc_feature: Table A; Target 14043; HLA-A*24:02; CLDN16; ENSG00000113946; TAA
EYDSILAEHPL

SEQ ID NO: 14044 - protein, 11 aa, Homo sapiens
  misc_feature: Table A; Target 14044; HLA-A*33:03; CLDN16; ENSG00000113946; TAA
EYDSILAEHPL

SEQ ID NO: 14045 - protein, 8 aa, Homo sapiens
  misc_feature: Table A; Target 14045; HLA-B*46:01; CLDN16; ENSG00000113946; TAA
FAFFSAGF

SEQ ID NO: 14046 - protein, 8 aa, Homo sapiens
  misc_feature: Table A; Target 14046; HLA-C*03:04; CLDN16; ENSG00000113946; TAA
FAFFSAGF

SEQ ID NO: 14047 - protein, 10 aa, Homo sapiens
  misc_feature: Table A; Target 14047; HLA-A*68:02; CLDN16; ENSG00000113946; TAA
FAFFSAGFLI

SEQ ID NO: 14048 - protein, 11 aa, Homo sapiens
  misc_feature: Table A; Target 14048; HLA-B*54:01; CLDN16; ENSG00000113946; TAA
FAFFSAGFLIV

SEQ ID NO: 14049 - protein, 9 aa, Homo sapiens
  misc_feature: Table A; Target 14049; HLA-A*29:02; CLDN16; ENSG00000113946; TAA
FFAFFSAGF

SEQ ID NO: 14050 - protein, 8 aa, Homo sapiens
  misc_feature: Table A; Target 14050; HLA-A*23:01; CLDN16; ENSG00000113946; TAA
FFSAGFLI

SEQ ID NO: 14051 - protein, 9 aa, Homo sapiens
  misc_feature: Table A; Target 14051; HLA-A*29:02; CLDN16; ENSG00000113946; TAA
FFSAGFLIV

SEQ ID NO: 14052 - protein, 8 aa, Homo sapiens
  misc_feature: Table A; Target 14052; HLA-B*51:01; CLDN16; ENSG00000113946; TAA
FGFLTLLL

SEQ ID NO: 14053 - protein, 10 aa, Homo sapiens
  misc_feature: Table A; Target 14053; HLA-B*15:03; CLDN16; ENSG00000113946; TAA
FKDVGPERNY

SEQ ID NO: 14054 - protein, 9 aa, Homo sapiens
  misc_feature: Table A; Target 14054; HLA-A*02:01; CLDN16; ENSG00000113946; TAA
FLAGAVLTC

SEQ ID NO: 14055 - protein, 9 aa, Homo sapiens
  misc_feature: Table A; Target 14055; HLA-A*02:03; CLDN16; ENSG00000113946; TAA
FLAGAVLTC

SEQ ID NO: 14056 - protein, 9 aa, Homo sapiens
  misc_feature: Table A; Target 14056; HLA-A*02:04; CLDN16; ENSG00000113946; TAA
FLAGAVLTC

SEQ ID NO: 14057 - protein, 9 aa, Homo sapiens
  misc_feature: Table A; Target 14057; HLA-B*13:02; CLDN16; ENSG00000113946; TAA
FLAGAVLTC

SEQ ID NO: 14058 - protein, 9 aa, Homo sapiens
  misc_feature: Table A; Target 14058; HLA-B*55:01; CLDN16; ENSG00000113946; TAA
FLAGAVLTC

SEQ ID NO: 14059 - protein, 9 aa, Homo sapiens
  misc_feature: Table A; Target 14059; HLA-C*02:02; CLDN16; ENSG00000113946; TAA
FLAGAVLTC

SEQ ID NO: 14060 - protein, 9 aa, Homo sapiens
  misc_feature: Table A; Target 14060; HLA-C*07:04; CLDN16; ENSG00000113946; TAA
FLAGAVLTC

SEQ ID NO: 14061 - protein, 9 aa, Homo sapiens
  misc_feature: Table A; Target 14061; HLA-C*12:03; CLDN16; ENSG00000113946; TAA
FLAGAVLTC

SEQ ID NO: 14062 - protein, 8 aa, Homo sapiens
  misc_feature: Table A; Target 14062; HLA-A*02:07; CLDN16; ENSG00000113946; TAA
FLPDEPYI

SEQ ID NO: 14063 - protein, 10 aa, Homo sapiens
  misc_feature: Table A; Target 14063; HLA-A*02:01; CLDN16; ENSG00000113946; TAA
FLPDEPYIKV

SEQ ID NO: 14064 - protein, 10 aa, Homo sapiens
  misc_feature: Table A; Target 14064; HLA-A*02:03; CLDN16; ENSG00000113946; TAA
FLPDEPYIKV

SEQ ID NO: 14065 - protein, 10 aa, Homo sapiens
  misc_feature: Table A; Target 14065; HLA-A*02:04; CLDN16; ENSG00000113946; TAA
FLPDEPYIKV

SEQ ID NO: 14066 - protein, 10 aa, Homo sapiens
  misc_feature: Table A; Target 14066; HLA-A*02:07; CLDN16; ENSG00000113946; TAA
FLPDEPYIKV

SEQ ID NO: 14067 - protein, 10 aa, Homo sapiens
  misc_feature: Table A; Target 14067; HLA-A*68:02; CLDN16; ENSG00000113946; TAA
FLPDEPYIKV

SEQ ID NO: 14068 - protein, 10 aa, Homo sapiens
  misc_feature: Table A; Target 14068; HLA-B*13:02; CLDN16; ENSG00000113946; TAA
FLPDEPYIKV

SEQ ID NO: 14069 - protein, 10 aa, Homo sapiens
  misc_feature: Table A; Target 14069; HLA-C*02:02; CLDN16; ENSG00000113946; TAA
FLPDEPYIKV

SEQ ID NO: 14070 - protein, 9 aa, Homo sapiens
  misc_feature: Table A; Target 14070; HLA-A*68:02; CLDN16; ENSG00000113946; TAA
FSAGFLIVA

SEQ ID NO: 14071 - protein, 9 aa, Homo sapiens
  misc_feature: Table A; Target 14071; HLA-B*54:01; CLDN16; ENSG00000113946; TAA
FSAGFLIVA

SEQ ID NO: 14072 - protein, 11 aa, Homo sapiens
  misc_feature: Table A; Target 14072; HLA-B*57:01; CLDN16; ENSG00000113946; TAA
FSAGFLIVATW

SEQ ID NO: 14073 - protein, 8 aa, Homo sapiens
  misc_feature: Table A; Target 14073; HLA-C*02:02; CLDN16; ENSG00000113946; TAA
FVAGATLL

SEQ ID NO: 14074 - protein, 8 aa, Homo sapiens
  misc_feature: Table A; Target 14074; HLA-C*03:03; CLDN16; ENSG00000113946; TAA
FVAGATLL

SEQ ID NO: 14075 - protein, 8 aa, Homo sapiens
  misc_feature: Table A; Target 14075; HLA-C*03:04; CLDN16; ENSG00000113946; TAA
FVAGATLL

SEQ ID NO: 14076 - protein, 8 aa, Homo sapiens
  misc_feature: Table A; Target 14076; HLA-C*05:01; CLDN16; ENSG00000113946; TAA
FVAGATLL

SEQ ID NO: 14077 - protein, 8 aa, Homo sapiens
  misc_feature: Table A; Target 14077; HLA-C*07:04; CLDN16; ENSG00000113946; TAA
FVAGATLL

SEQ ID NO: 14078 - protein, 9 aa, Homo sapiens
  misc_feature: Table A; Target 14078; HLA-A*01:01; CLDN16; ENSG00000113946; TAA
FVAGATLLI

SEQ ID NO: 14079 - protein, 9 aa, Homo sapiens
  misc_feature: Table A; Target 14079; HLA-A*02:03; CLDN16; ENSG00000113946; TAA
FVAGATLLI

SEQ ID NO: 14080 - protein, 9 aa, Homo sapiens
  misc_feature: Table A; Target 14080; HLA-A*02:07; CLDN16; ENSG00000113946; TAA
FVAGATLLI

SEQ ID NO: 14081 - protein, 9 aa, Homo sapiens
  misc_feature: Table A; Target 14081; HLA-A*23:01; CLDN16; ENSG00000113946; TAA
FVAGATLLI

SEQ ID NO: 14082 - protein, 9 aa, Homo sapiens
  misc_feature: Table A; Target 14082; HLA-A*24:02; CLDN16; ENSG00000113946; TAA
FVAGATLLI

SEQ ID NO: 14083 - protein, 9 aa, Homo sapiens
  misc_feature: Table A; Target 14083; HLA-A*25:01; CLDN16; ENSG00000113946; TAA
FVAGATLLI

SEQ ID NO: 14084 - protein, 9 aa, Homo sapiens
  misc_feature: Table A; Target 14084; HLA-A*26:01; CLDN16; ENSG00000113946; TAA
FVAGATLLI

SEQ ID NO: 14085 - protein, 9 aa, Homo sapiens
  misc_feature: Table A; Target 14085; HLA-A*29:02; CLDN16; ENSG00000113946; TAA
FVAGATLLI

SEQ ID NO: 14086 - protein, 9 aa, Homo sapiens
  misc_feature: Table A; Target 14086; HLA-A*30:01; CLDN16; ENSG00000113946; TAA
FVAGATLLI

SEQ ID NO: 14087 - protein, 9 aa, Homo sapiens
  misc_feature: Table A; Target 14087; HLA-A*68:02; CLDN16; ENSG00000113946; TAA
FVAGATLLI

SEQ ID NO: 14088 - protein, 9 aa, Homo sapiens
  misc_feature: Table A; Target 14088; HLA-B*13:02; CLDN16; ENSG00000113946; TAA
FVAGATLLI

SEQ ID NO: 14089 - protein, 9 aa, Homo sapiens
  misc_feature: Table A; Target 14089; HLA-B*51:01; CLDN16; ENSG00000113946; TAA
FVAGATLLI

SEQ ID NO: 14090 - protein, 9 aa, Homo sapiens
  misc_feature: Table A; Target 14090; HLA-C*02:02; CLDN16; ENSG00000113946; TAA
FVAGATLLI

SEQ ID NO: 14091 - protein, 9 aa, Homo sapiens
  misc_feature: Table A; Target 14091; HLA-C*07:04; CLDN16; ENSG00000113946; TAA
FVAGATLLI

SEQ ID NO: 14092 - protein, 10 aa, Homo sapiens
  misc_feature: Table A; Target 14092; HLA-B*54:01; CLDN16; ENSG00000113946; TAA
FVAGATLLIA

SEQ ID NO: 14093 - protein, 11 aa, Homo sapiens
  misc_feature: Table A; Target 14093; HLA-B*54:01; CLDN16; ENSG00000113946; TAA
FVAGATLLIAG

SEQ ID NO: 14094 - protein, 9 aa, Homo sapiens
  misc_feature: Table A; Target 14094; HLA-B*15:03; CLDN16; ENSG00000113946; TAA
GAVLTCCLY

SEQ ID NO: 14095 - protein, 9 aa, Homo sapiens
  misc_feature: Table A; Target 14095; HLA-C*07:01; CLDN16; ENSG00000113946; TAA
GAVLTCCLY

SEQ ID NO: 14096 - protein, 9 aa, Homo sapiens
  misc_feature: Table A; Target 14096; HLA-B*07:02; CLDN16; ENSG00000113946; TAA
GCFLAGAVL

SEQ ID NO: 14097 - protein, 9 aa, Homo sapiens
  misc_feature: Table A; Target 14097; HLA-B*15:01; CLDN16; ENSG00000113946; TAA
GCFLAGAVL

SEQ ID NO: 14098 - protein, 9 aa, Homo sapiens
  misc_feature: Table A; Target 14098; HLA-B*15:03; CLDN16; ENSG00000113946; TAA
GCFLAGAVL

SEQ ID NO: 14099 - protein, 9 aa, Homo sapiens
  misc_feature: Table A; Target 14099; HLA-B*46:01; CLDN16; ENSG00000113946; TAA
GCFLAGAVL

SEQ ID NO: 14100 - protein, 9 aa, Homo sapiens
  misc_feature: Table A; Target 14100; HLA-C*01:02; CLDN16; ENSG00000113946; TAA
GCFLAGAVL

SEQ ID NO: 14101 - protein, 9 aa, Homo sapiens
  misc_feature: Table A; Target 14101; HLA-C*03:03; CLDN16; ENSG00000113946; TAA
GCFLAGAVL

SEQ ID NO: 14102 - protein, 9 aa, Homo sapiens
  misc_feature: Table A; Target 14102; HLA-C*03:04; CLDN16; ENSG00000113946; TAA
GCFLAGAVL

SEQ ID NO: 14103 - protein, 9 aa, Homo sapiens
  misc_feature: Table A; Target 14103; HLA-C*07:02; CLDN16; ENSG00000113946; TAA
GCFLAGAVL

SEQ ID NO: 14104 - protein, 9 aa, Homo sapiens
  misc_feature: Table A; Target 14104; HLA-A*29:02; CLDN16; ENSG00000113946; TAA
GFGFLTLLL

SEQ ID NO: 14105 - protein, 9 aa, Homo sapiens
  misc_feature: Table A; Target 14105; HLA-A*02:04; CLDN16; ENSG00000113946; TAA
GIIGSVWYA

SEQ ID NO: 14106 - protein, 9 aa, Homo sapiens
  misc_feature: Table A; Target 14106; HLA-A*26:01; CLDN16; ENSG00000113946; TAA
GMAGSLGCF

SEQ ID NO: 14107 - protein, 9 aa, Homo sapiens
  misc_feature: Table A; Target 14107; HLA-A*30:02; CLDN16; ENSG00000113946; TAA
GMAGSLGCF

SEQ ID NO: 14108 - protein, 9 aa, Homo sapiens
  misc_feature: Table A; Target 14108; HLA-B*15:01; CLDN16; ENSG00000113946; TAA
GMAGSLGCF

SEQ ID NO: 14109 - protein, 9 aa, Homo sapiens
  misc_feature: Table A; Target 14109; HLA-B*15:03; CLDN16; ENSG00000113946; TAA
GMAGSLGCF

SEQ ID NO: 14110 - protein, 9 aa, Homo sapiens
  misc_feature: Table A; Target 14110; HLA-B*46:01; CLDN16; ENSG00000113946; TAA
GMAGSLGCF

SEQ ID NO: 14111 - protein, 10 aa, Homo sapiens
  misc_feature: Table A; Target 14111; HLA-B*07:02; CLDN16; ENSG00000113946; TAA
GPERNYPYSL

SEQ ID NO: 14112 - protein, 10 aa, Homo sapiens
  misc_feature: Table A; Target 14112; HLA-C*07:02; CLDN16; ENSG00000113946; TAA
GPERNYPYSL

SEQ ID NO: 14113 - protein, 9 aa, Homo sapiens
  misc_feature: Table A; Target 14113; HLA-A*02:03; CLDN16; ENSG00000113946; TAA
GTPGIIGSV

SEQ ID NO: 14114 - protein, 9 aa, Homo sapiens
  misc_feature: Table A; Target 14114; HLA-A*02:07; CLDN16; ENSG00000113946; TAA
GTPGIIGSV

SEQ ID NO: 14115 - protein, 9 aa, Homo sapiens
  misc_feature: Table A; Target 14115; HLA-A*26:01; CLDN16; ENSG00000113946; TAA
GTPGIIGSV

SEQ ID NO: 14116 - protein, 9 aa, Homo sapiens
  misc_feature: Table A; Target 14116; HLA-A*68:02; CLDN16; ENSG00000113946; TAA
GTPGIIGSV

SEQ ID NO: 14117 - protein, 9 aa, Homo sapiens
  misc_feature: Table A; Target 14117; HLA-B*13:02; CLDN16; ENSG00000113946; TAA
GTPGIIGSV

SEQ ID NO: 14118 - protein, 10 aa, Homo sapiens
  misc_feature: Table A; Target 14118; HLA-A*25:01; CLDN16; ENSG00000113946; TAA
GTPGIIGSVW

SEQ ID NO: 14119 - protein, 10 aa, Homo sapiens
  misc_feature: Table A; Target 14119; HLA-A*26:01; CLDN16; ENSG00000113946; TAA
GTPGIIGSVW

SEQ ID NO: 14120 - protein, 10 aa, Homo sapiens
  misc_feature: Table A; Target 14120; HLA-A*29:02; CLDN16; ENSG00000113946; TAA
GTPGIIGSVW

SEQ ID NO: 14121 - protein, 10 aa, Homo sapiens
  misc_feature: Table A; Target 14121; HLA-A*32:01; CLDN16; ENSG00000113946; TAA
GTPGIIGSVW

SEQ ID NO: 14122 - protein, 10 aa, Homo sapiens
  misc_feature: Table A; Target 14122; HLA-B*44:02; CLDN16; ENSG00000113946; TAA
GTPGIIGSVW

SEQ ID NO: 14123 - protein, 10 aa, Homo sapiens
  misc_feature: Table A; Target 14123; HLA-B*44:03; CLDN16; ENSG00000113946; TAA
GTPGIIGSVW

SEQ ID NO: 14124 - protein, 10 aa, Homo sapiens
  misc_feature: Table A; Target 14124; HLA-B*57:01; CLDN16; ENSG00000113946; TAA
GTPGIIGSVW

SEQ ID NO: 14125 - protein, 10 aa, Homo sapiens
  misc_feature: Table A; Target 14125; HLA-B*58:01; CLDN16; ENSG00000113946; TAA
GTPGIIGSVW

SEQ ID NO: 14126 - protein, 11 aa, Homo sapiens
  misc_feature: Table A; Target 14126; HLA-A*29:02; CLDN16; ENSG00000113946; TAA
GTPGIIGSVWY

SEQ ID NO: 14127 - protein, 8 aa, Homo sapiens
  misc_feature: Table A; Target 14127; HLA-A*30:02; CLDN16; ENSG00000113946; TAA
GVSMAKSY

SEQ ID NO: 14128 - protein, 8 aa, Homo sapiens
  misc_feature: Table A; Target 14128; HLA-A*32:01; CLDN16; ENSG00000113946; TAA
GVSMAKSY

SEQ ID NO: 14129 - protein, 8 aa, Homo sapiens
  misc_feature: Table A; Target 14129; HLA-B*15:01; CLDN16; ENSG00000113946; TAA
GVSMAKSY

SEQ ID NO: 14130 - protein, 8 aa, Homo sapiens
  misc_feature: Table A; Target 14130; HLA-C*04:01; CLDN16; ENSG00000113946; TAA
GVSMAKSY

SEQ ID NO: 14131 - protein, 8 aa, Homo sapiens
  misc_feature: Table A; Target 14131; HLA-C*07:01; CLDN16; ENSG00000113946; TAA
GVSMAKSY

SEQ ID NO: 14132 - protein, 8 aa, Homo sapiens
  misc_feature: Table A; Target 14132; HLA-C*12:03; CLDN16; ENSG00000113946; TAA
GVSMAKSY

SEQ ID NO: 14133 - protein, 8 aa, Homo sapiens
  misc_feature: Table A; Target 14133; HLA-C*16:01; CLDN16; ENSG00000113946; TAA
GVSMAKSY

SEQ ID NO: 14134 - protein, 8 aa, Homo sapiens
  misc_feature: Table A; Target 14134; HLA-C*16:02; CLDN16; ENSG00000113946; TAA
GVSMAKSY

SEQ ID NO: 14135 - protein, 9 aa, Homo sapiens
  misc_feature: Table A; Target 14135; HLA-C*07:04; CLDN16; ENSG00000113946; TAA
GVSMAKSYS

SEQ ID NO: 14136 - protein, 9 aa, Homo sapiens
  misc_feature: Table A; Target 14136; HLA-A*03:02; CLDN16; ENSG00000113946; TAA
HCQVPETQK

SEQ ID NO: 14137 - protein, 9 aa, Homo sapiens
  misc_feature: Table A; Target 14137; HLA-A*11:01; CLDN16; ENSG00000113946; TAA
HCQVPETQK

SEQ ID NO: 14138 - protein, 9 aa, Homo sapiens
  misc_feature: Table A; Target 14138; HLA-C*07:06; CLDN16; ENSG00000113946; TAA
HCQVPETQK

SEQ ID NO: 14139 - protein, 10 aa, Homo sapiens
  misc_feature: Table A; Target 14139; HLA-C*04:01; CLDN16; ENSG00000113946; TAA
HCQVPETQKT

SEQ ID NO: 14140 - protein, 8 aa, Homo sapiens
  misc_feature: Table A; Target 14140; HLA-A*03:02; CLDN16; ENSG00000113946; TAA
HLQQGVRK

SEQ ID NO: 14141 - protein, 9 aa, Homo sapiens
  misc_feature: Table A; Target 14141; HLA-A*02:03; CLDN16; ENSG00000113946; TAA
HLSGARAGV

SEQ ID NO: 14142 - protein, 9 aa, Homo sapiens
  misc_feature: Table A; Target 14142; HLA-A*29:02; CLDN16; ENSG00000113946; TAA
HNIFLGIQY

SEQ ID NO: 14143 - protein, 9 aa, Homo sapiens
  misc_feature: Table A; Target 14143; HLA-B*35:01; CLDN16; ENSG00000113946; TAA
HNIFLGIQY

SEQ ID NO: 14144 - protein, 9 aa, Homo sapiens
  misc_feature: Table A; Target 14144; HLA-A*32:01; CLDN16; ENSG00000113946; TAA
HPDGLLATM

SEQ ID NO: 14145 - protein, 9 aa, Homo sapiens
  misc_feature: Table A; Target 14145; HLA-B*07:02; CLDN16; ENSG00000113946; TAA
HPDGLLATM

SEQ ID NO: 14146 - protein, 9 aa, Homo sapiens
  misc_feature: Table A; Target 14146; HLA-B*08:01; CLDN16; ENSG00000113946; TAA
HPDGLLATM

SEQ ID NO: 14147 - protein, 9 aa, Homo sapiens
  misc_feature: Table A; Target 14147; HLA-B*18:01; CLDN16; ENSG00000113946; TAA
HPDGLLATM

SEQ ID NO: 14148 - protein, 9 aa, Homo sapiens
  misc_feature: Table A; Target 14148; HLA-B*35:01; CLDN16; ENSG00000113946; TAA
HPDGLLATM

SEQ ID NO: 14149 - protein, 9 aa, Homo sapiens
  misc_feature: Table A; Target 14149; HLA-B*35:03; CLDN16; ENSG00000113946; TAA
HPDGLLATM

SEQ ID NO: 14150 - protein, 9 aa, Homo sapiens
  misc_feature: Table A; Target 14150; HLA-B*38:01; CLDN16; ENSG00000113946; TAA
HPDGLLATM

SEQ ID NO: 14151 - protein, 9 aa, Homo sapiens
  misc_feature: Table A; Target 14151; HLA-B*51:01; CLDN16; ENSG00000113946; TAA
HPDGLLATM

SEQ ID NO: 14152 - protein, 9 aa, Homo sapiens
  misc_feature: Table A; Target 14152; HLA-B*54:01; CLDN16; ENSG00000113946; TAA
HPDGLLATM

SEQ ID NO: 14153 - protein, 9 aa, Homo sapiens
  misc_feature: Table A; Target 14153; HLA-B*55:01; CLDN16; ENSG00000113946; TAA
HPDGLLATM

SEQ ID NO: 14154 - protein, 9 aa, Homo sapiens
  misc_feature: Table A; Target 14154; HLA-B*56:01; CLDN16; ENSG00000113946; TAA
HPDGLLATM

SEQ ID NO: 14155 - protein, 9 aa, Homo sapiens
  misc_feature: Table A; Target 14155; HLA-C*03:03; CLDN16; ENSG00000113946; TAA
HPDGLLATM

SEQ ID NO: 14156 - protein, 9 aa, Homo sapiens
  misc_feature: Table A; Target 14156; HLA-C*04:01; CLDN16; ENSG00000113946; TAA
HPDGLLATM

SEQ ID NO: 14157 - protein, 9 aa, Homo sapiens
  misc_feature: Table A; Target 14157; HLA-C*05:01; CLDN16; ENSG00000113946; TAA
HPDGLLATM

SEQ ID NO: 14158 - protein, 9 aa, Homo sapiens
  misc_feature: Table A; Target 14158; HLA-C*07:04; CLDN16; ENSG00000113946; TAA
HPDGLLATM

SEQ ID NO: 14159 - protein, 9 aa, Homo sapiens
  misc_feature: Table A; Target 14159; HLA-C*07:06; CLDN16; ENSG00000113946; TAA
HPDGLLATM

SEQ ID NO: 14160 - protein, 8 aa, Homo sapiens
  misc_feature: Table A; Target 14160; HLA-B*08:01; CLDN16; ENSG00000113946; TAA
HPLKLVVT

SEQ ID NO: 14161 - protein, 8 aa, Homo sapiens
  misc_feature: Table A; Target 14161; HLA-B*54:01; CLDN16; ENSG00000113946; TAA
HPLKLVVT

SEQ ID NO: 14162 - protein, 8 aa, Homo sapiens
  misc_feature: Table A; Target 14162; HLA-B*55:01; CLDN16; ENSG00000113946; TAA
HPLKLVVT

SEQ ID NO: 14163 - protein, 9 aa, Homo sapiens
  misc_feature: Table A; Target 14163; HLA-A*31:01; CLDN16; ENSG00000113946; TAA
HPLKLVVTR

SEQ ID NO: 14164 - protein, 9 aa, Homo sapiens
  misc_feature: Table A; Target 14164; HLA-A*33:01; CLDN16; ENSG00000113946; TAA
HPLKLVVTR

SEQ ID NO: 14165 - protein, 9 aa, Homo sapiens
  misc_feature: Table A; Target 14165; HLA-A*33:03; CLDN16; ENSG00000113946; TAA
HPLKLVVTR

SEQ ID NO: 14166 - protein, 9 aa, Homo sapiens
  misc_feature: Table A; Target 14166; HLA-A*68:01; CLDN16; ENSG00000113946; TAA
HPLKLVVTR

SEQ ID NO: 14167 - protein, 9 aa, Homo sapiens
  misc_feature: Table A; Target 14167; HLA-B*35:01; CLDN16; ENSG00000113946; TAA
HPLKLVVTR

SEQ ID NO: 14168 - protein, 9 aa, Homo sapiens
  misc_feature: Table A; Target 14168; HLA-B*51:01; CLDN16; ENSG00000113946; TAA
HPLKLVVTR

SEQ ID NO: 14169 - protein, 9 aa, Homo sapiens
  misc_feature: Table A; Target 14169; HLA-B*54:01; CLDN16; ENSG00000113946; TAA
HPLKLVVTR

SEQ ID NO: 14170 - protein, 9 aa, Homo sapiens
  misc_feature: Table A; Target 14170; HLA-B*55:01; CLDN16; ENSG00000113946; TAA
HPLKLVVTR

SEQ ID NO: 14171 - protein, 9 aa, Homo sapiens
  misc_feature: Table A; Target 14171; HLA-B*56:01; CLDN16; ENSG00000113946; TAA
HPLKLVVTR

SEQ ID NO: 14172 - protein, 9 aa, Homo sapiens
  misc_feature: Table A; Target 14172; HLA-C*07:06; CLDN16; ENSG00000113946; TAA
HPLKLVVTR

SEQ ID NO: 14173 - protein, 10 aa, Homo sapiens
  misc_feature: Table A; Target 14173; HLA-B*54:01; CLDN16; ENSG00000113946; TAA
HPLKLVVTRA

SEQ ID NO: 14174 - protein, 8 aa, Homo sapiens
  misc_feature: Table A; Target 14174; HLA-C*05:01; CLDN16; ENSG00000113946; TAA
IAGTPGII

SEQ ID NO: 14175 - protein, 8 aa, Homo sapiens
  misc_feature: Table A; Target 14175; HLA-C*07:01; CLDN16; ENSG00000113946; TAA
IAGTPGII

SEQ ID NO: 14176 - protein, 8 aa, Homo sapiens
  misc_feature: Table A; Target 14176; HLA-C*12:03; CLDN16; ENSG00000113946; TAA
IAGTPGII

SEQ ID NO: 14177 - protein, 9 aa, Homo sapiens
  misc_feature: Table A; Target 14177; HLA-A*30:01; CLDN16; ENSG00000113946; TAA
ICFVAGATL

SEQ ID NO: 14178 - protein, 9 aa, Homo sapiens
  misc_feature: Table A; Target 14178; HLA-B*07:02; CLDN16; ENSG00000113946; TAA
ICFVAGATL

SEQ ID NO: 14179 - protein, 9 aa, Homo sapiens
  misc_feature: Table A; Target 14179; HLA-B*15:01; CLDN16; ENSG00000113946; TAA
ICFVAGATL

SEQ ID NO: 14180 - protein, 9 aa, Homo sapiens
  misc_feature: Table A; Target 14180; HLA-B*15:03; CLDN16; ENSG00000113946; TAA
ICFVAGATL

SEQ ID NO: 14181 - protein, 9 aa, Homo sapiens
  misc_feature: Table A; Target 14181; HLA-B*40:01; CLDN16; ENSG00000113946; TAA
ICFVAGATL

SEQ ID NO: 14182 - protein, 9 aa, Homo sapiens
  misc_feature: Table A; Target 14182; HLA-B*40:02; CLDN16; ENSG00000113946; TAA
ICFVAGATL

SEQ ID NO: 14183 - protein, 9 aa, Homo sapiens
  misc_feature: Table A; Target 14183; HLA-B*46:01; CLDN16; ENSG00000113946; TAA
ICFVAGATL

SEQ ID NO: 14184 - protein, 9 aa, Homo sapiens
  misc_feature: Table A; Target 14184; HLA-C*01:02; CLDN16; ENSG00000113946; TAA
ICFVAGATL

SEQ ID NO: 14185 - protein, 9 aa, Homo sapiens
  misc_feature: Table A; Target 14185; HLA-C*03:03; CLDN16; ENSG00000113946; TAA
ICFVAGATL

SEQ ID NO: 14186 - protein, 9 aa, Homo sapiens
  misc_feature: Table A; Target 14186; HLA-C*03:04; CLDN16; ENSG00000113946; TAA
ICFVAGATL

SEQ ID NO: 14187 - protein, 9 aa, Homo sapiens
  misc_feature: Table A; Target 14187; HLA-C*07:02; CLDN16; ENSG00000113946; TAA
ICFVAGATL

SEQ ID NO: 14188 - protein, 9 aa, Homo sapiens
  misc_feature: Table A; Target 14188; HLA-C*07:04; CLDN16; ENSG00000113946; TAA
ICFVAGATL

SEQ ID NO: 14189 - protein, 9 aa, Homo sapiens
  misc_feature: Table A; Target 14189; HLA-C*14:02; CLDN16; ENSG00000113946; TAA
ICFVAGATL

SEQ ID NO: 14190 - protein, 9 aa, Homo sapiens
  misc_feature: Table A; Target 14190; HLA-C*16:02; CLDN16; ENSG00000113946; TAA
ICFVAGATL

SEQ ID NO: 14191 - protein, 10 aa, Homo sapiens
  misc_feature: Table A; Target 14191; HLA-C*01:02; CLDN16; ENSG00000113946; TAA
ICFVAGATLL

SEQ ID NO: 14192 - protein, 9 aa, Homo sapiens
  misc_feature: Table A; Target 14192; HLA-A*23:01; CLDN16; ENSG00000113946; TAA
IFLGIQYKF

SEQ ID NO: 14193 - protein, 9 aa, Homo sapiens
  misc_feature: Table A; Target 14193; HLA-A*24:02; CLDN16; ENSG00000113946; TAA
IFLGIQYKF

SEQ ID NO: 14194 - protein, 9 aa, Homo sapiens
  misc_feature: Table A; Target 14194; HLA-A*29:02; CLDN16; ENSG00000113946; TAA
IFLGIQYKF

SEQ ID NO: 14195 - protein, 9 aa, Homo sapiens
  misc_feature: Table A; Target 14195; HLA-B*57:01; CLDN16; ENSG00000113946; TAA
IFLGIQYKF

SEQ ID NO: 14196 - protein, 9 aa, Homo sapiens
  misc_feature: Table A; Target 14196; HLA-A*02:07; CLDN16; ENSG00000113946; TAA
IIGSVWYAV

SEQ ID NO: 14197 - protein, 8 aa, Homo sapiens
  misc_feature: Table A; Target 14197; HLA-A*03:01; CLDN16; ENSG00000113946; TAA
ILAEHPLK

SEQ ID NO: 14198 - protein, 9 aa, Homo sapiens
  misc_feature: Table A; Target 14198; HLA-A*01:01; CLDN16; ENSG00000113946; TAA
ILAEHPLKL

SEQ ID NO: 14199 - protein, 9 aa, Homo sapiens
  misc_feature: Table A; Target 14199; HLA-A*02:01; CLDN16; ENSG00000113946; TAA
ILAEHPLKL

SEQ ID NO: 14200 - protein, 9 aa, Homo sapiens
  misc_feature: Table A; Target 14200; HLA-A*02:03; CLDN16; ENSG00000113946; TAA
ILAEHPLKL

SEQ ID NO: 14201 - protein, 9 aa, Homo sapiens
  misc_feature: Table A; Target 14201; HLA-A*02:04; CLDN16; ENSG00000113946; TAA
ILAEHPLKL

SEQ ID NO: 14202 - protein, 9 aa, Homo sapiens
  misc_feature: Table A; Target 14202; HLA-A*02:07; CLDN16; ENSG00000113946; TAA
ILAEHPLKL

SEQ ID NO: 14203 - protein, 9 aa, Homo sapiens
  misc_feature: Table A; Target 14203; HLA-A*03:01; CLDN16; ENSG00000113946; TAA
ILAEHPLKL

SEQ ID NO: 14204 - protein, 9 aa, Homo sapiens
  misc_feature: Table A; Target 14204; HLA-A*03:02; CLDN16; ENSG00000113946; TAA
ILAEHPLKL

SEQ ID NO: 14205 - protein, 9 aa, Homo sapiens
  misc_feature: Table A; Target 14205; HLA-A*23:01; CLDN16; ENSG00000113946; TAA
ILAEHPLKL

SEQ ID NO: 14206 - protein, 9 aa, Homo sapiens
  misc_feature: Table A; Target 14206; HLA-A*24:02; CLDN16; ENSG00000113946; TAA
ILAEHPLKL

SEQ ID NO: 14207 - protein, 9 aa, Homo sapiens
  misc_feature: Table A; Target 14207; HLA-A*26:01; CLDN16; ENSG00000113946; TAA
ILAEHPLKL

SEQ ID NO: 14208 - protein, 9 aa, Homo sapiens
  misc_feature: Table A; Target 14208; HLA-A*29:02; CLDN16; ENSG00000113946; TAA
ILAEHPLKL

SEQ ID NO: 14209 - protein, 9 aa, Homo sapiens
  misc_feature: Table A; Target 14209; HLA-A*30:01; CLDN16; ENSG00000113946; TAA
ILAEHPLKL

SEQ ID NO: 14210 - protein, 9 aa, Homo sapiens
  misc_feature: Table A; Target 14210; HLA-A*31:01; CLDN16; ENSG00000113946; TAA
ILAEHPLKL

SEQ ID NO: 14211 - protein, 9 aa, Homo sapiens
  misc_feature: Table A; Target 14211; HLA-A*32:01; CLDN16; ENSG00000113946; TAA
ILAEHPLKL

SEQ ID NO: 14212 - protein, 9 aa, Homo sapiens
  misc_feature: Table A; Target 14212; HLA-A*68:02; CLDN16; ENSG00000113946; TAA
ILAEHPLKL

SEQ ID NO: 14213 - protein, 9 aa, Homo sapiens
  misc_feature: Table A; Target 14213; HLA-B*08:01; CLDN16; ENSG00000113946; TAA
ILAEHPLKL

SEQ ID NO: 14214 - protein, 9 aa, Homo sapiens
  misc_feature: Table A; Target 14214; HLA-B*13:02; CLDN16; ENSG00000113946; TAA
ILAEHPLKL

SEQ ID NO: 14215 - protein, 9 aa, Homo sapiens
  misc_feature: Table A; Target 14215; HLA-B*15:01; CLDN16; ENSG00000113946; TAA
ILAEHPLKL

SEQ ID NO: 14216 - protein, 9 aa, Homo sapiens
  misc_feature: Table A; Target 14216; HLA-B*27:05; CLDN16; ENSG00000113946; TAA
ILAEHPLKL

SEQ ID NO: 14217 - protein, 9 aa, Homo sapiens
  misc_feature: Table A; Target 14217; HLA-B*35:03; CLDN16; ENSG00000113946; TAA
ILAEHPLKL

SEQ ID NO: 14218 - protein, 9 aa, Homo sapiens
  misc_feature: Table A; Target 14218; HLA-B*37:01; CLDN16; ENSG00000113946; TAA
ILAEHPLKL

SEQ ID NO: 14219 - protein, 9 aa, Homo sapiens
  misc_feature: Table A; Target 14219; HLA-B*38:01; CLDN16; ENSG00000113946; TAA
ILAEHPLKL

SEQ ID NO: 14220 - protein, 9 aa, Homo sapiens
  misc_feature: Table A; Target 14220; HLA-B*40:01; CLDN16; ENSG00000113946; TAA
ILAEHPLKL

SEQ ID NO: 14221 - protein, 9 aa, Homo sapiens
  misc_feature: Table A; Target 14221; HLA-B*51:01; CLDN16; ENSG00000113946; TAA
ILAEHPLKL

SEQ ID NO: 14222 - protein, 9 aa, Homo sapiens
  misc_feature: Table A; Target 14222; HLA-B*55:01; CLDN16; ENSG00000113946; TAA
ILAEHPLKL

SEQ ID NO: 14223 - protein, 9 aa, Homo sapiens
  misc_feature: Table A; Target 14223; HLA-B*58:01; CLDN16; ENSG00000113946; TAA
ILAEHPLKL

SEQ ID NO: 14224 - protein, 9 aa, Homo sapiens
  misc_feature: Table A; Target 14224; HLA-C*02:02; CLDN16; ENSG00000113946; TAA
ILAEHPLKL

SEQ ID NO: 14225 - protein, 9 aa, Homo sapiens
  misc_feature: Table A; Target 14225; HLA-C*03:03; CLDN16; ENSG00000113946; TAA
ILAEHPLKL

SEQ ID NO: 14226 - protein, 9 aa, Homo sapiens
  misc_feature: Table A; Target 14226; HLA-C*03:04; CLDN16; ENSG00000113946; TAA
ILAEHPLKL

SEQ ID NO: 14227 - protein, 9 aa, Homo sapiens
  misc_feature: Table A; Target 14227; HLA-C*05:01; CLDN16; ENSG00000113946; TAA
ILAEHPLKL

SEQ ID NO: 14228 - protein, 9 aa, Homo sapiens
  misc_feature: Table A; Target 14228; HLA-C*06:02; CLDN16; ENSG00000113946; TAA
ILAEHPLKL

SEQ ID NO: 14229 - protein, 9 aa, Homo sapiens
  misc_feature: Table A; Target 14229; HLA-C*07:04; CLDN16; ENSG00000113946; TAA
ILAEHPLKL

SEQ ID NO: 14230 - protein, 9 aa, Homo sapiens
  misc_feature: Table A; Target 14230; HLA-C*12:03; CLDN16; ENSG00000113946; TAA
ILAEHPLKL

SEQ ID NO: 14231 - protein, 9 aa, Homo sapiens
  misc_feature: Table A; Target 14231; HLA-C*14:02; CLDN16; ENSG00000113946; TAA
ILAEHPLKL

SEQ ID NO: 14232 - protein, 9 aa, Homo sapiens
  misc_feature: Table A; Target 14232; HLA-C*16:01; CLDN16; ENSG00000113946; TAA
ILAEHPLKL

SEQ ID NO: 14233 - protein, 9 aa, Homo sapiens
  misc_feature: Table A; Target 14233; HLA-C*16:02; CLDN16; ENSG00000113946; TAA
ILAEHPLKL

SEQ ID NO: 14234 - protein, 9 aa, Homo sapiens
  misc_feature: Table A; Target 14234; HLA-C*16:04; CLDN16; ENSG00000113946; TAA
ILAEHPLKL

SEQ ID NO: 14235 - protein, 10 aa, Homo sapiens
  misc_feature: Table A; Target 14235; HLA-A*02:01; CLDN16; ENSG00000113946; TAA
ILAEHPLKLV

SEQ ID NO: 14236 - protein, 10 aa, Homo sapiens
  misc_feature: Table A; Target 14236; HLA-A*02:03; CLDN16; ENSG00000113946; TAA
ILAEHPLKLV

SEQ ID NO: 14237 - protein, 10 aa, Homo sapiens
  misc_feature: Table A; Target 14237; HLA-A*02:04; CLDN16; ENSG00000113946; TAA
ILAEHPLKLV

SEQ ID NO: 14238 - protein, 10 aa, Homo sapiens
  misc_feature: Table A; Target 14238; HLA-A*02:07; CLDN16; ENSG00000113946; TAA
ILAEHPLKLV

SEQ ID NO: 14239 - protein, 11 aa, Homo sapiens
  misc_feature: Table A; Target 14239; HLA-A*02:01; CLDN16; ENSG00000113946; TAA
ILAEHPLKLVV

SEQ ID NO: 14240 - protein, 11 aa, Homo sapiens
  misc_feature: Table A; Target 14240; HLA-A*02:03; CLDN16; ENSG00000113946; TAA
ILAEHPLKLVV

SEQ ID NO: 14241 - protein, 11 aa, Homo sapiens
  misc_feature: Table A; Target 14241; HLA-A*02:04; CLDN16; ENSG00000113946; TAA
ILAEHPLKLVV

SEQ ID NO: 14242 - protein, 10 aa, Homo sapiens
  misc_feature: Table A; Target 14242; HLA-A*02:01; CLDN16; ENSG00000113946; TAA
ILAGFGFLTL

SEQ ID NO: 14243 - protein, 10 aa, Homo sapiens
  misc_feature: Table A; Target 14243; HLA-A*02:03; CLDN16; ENSG00000113946; TAA
ILAGFGFLTL

SEQ ID NO: 14244 - protein, 10 aa, Homo sapiens
  misc_feature: Table A; Target 14244; HLA-A*02:04; CLDN16; ENSG00000113946; TAA
ILAGFGFLTL

SEQ ID NO: 14245 - protein, 10 aa, Homo sapiens
  misc_feature: Table A; Target 14245; HLA-A*02:07; CLDN16; ENSG00000113946; TAA
ILAGFGFLTL

SEQ ID NO: 14246 - protein, 10 aa, Homo sapiens
  misc_feature: Table A; Target 14246; HLA-A*03:01; CLDN16; ENSG00000113946; TAA
ILAGFGFLTL

SEQ ID NO: 14247 - protein, 10 aa, Homo sapiens
  misc_feature: Table A; Target 14247; HLA-A*23:01; CLDN16; ENSG00000113946; TAA
ILAGFGFLTL

SEQ ID NO: 14248 - protein, 11 aa, Homo sapiens
  misc_feature: Table A; Target 14248; HLA-A*02:01; CLDN16; ENSG00000113946; TAA
ILAGFGFLTLL

SEQ ID NO: 14249 - protein, 11 aa, Homo sapiens
  misc_feature: Table A; Target 14249; HLA-A*02:03; CLDN16; ENSG00000113946; TAA
ILAGFGFLTLL

SEQ ID NO: 14250 - protein, 11 aa, Homo sapiens
  misc_feature: Table A; Target 14250; HLA-A*02:04; CLDN16; ENSG00000113946; TAA
ILAGFGFLTLL

SEQ ID NO: 14251 - protein, 9 aa, Homo sapiens
  misc_feature: Table A; Target 14251; HLA-A*01:01; CLDN16; ENSG00000113946; TAA
ITADILAGF

SEQ ID NO: 14252 - protein, 9 aa, Homo sapiens
  misc_feature: Table A; Target 14252; HLA-A*02:01; CLDN16; ENSG00000113946; TAA
ITADILAGF

SEQ ID NO: 14253 - protein, 9 aa, Homo sapiens
  misc_feature: Table A; Target 14253; HLA-A*02:03; CLDN16; ENSG00000113946; TAA
ITADILAGF

SEQ ID NO: 14254 - protein, 9 aa, Homo sapiens
  misc_feature: Table A; Target 14254; HLA-A*02:07; CLDN16; ENSG00000113946; TAA
ITADILAGF

SEQ ID NO: 14255 - protein, 9 aa, Homo sapiens
  misc_feature: Table A; Target 14255; HLA-A*03:02; CLDN16; ENSG00000113946; TAA
ITADILAGF

SEQ ID NO: 14256 - protein, 9 aa, Homo sapiens
  misc_feature: Table A; Target 14256; HLA-A*11:01; CLDN16; ENSG00000113946; TAA
ITADILAGF

SEQ ID NO: 14257 - protein, 9 aa, Homo sapiens
  misc_feature: Table A; Target 14257; HLA-A*23:01; CLDN16; ENSG00000113946; TAA
ITADILAGF

SEQ ID NO: 14258 - protein, 9 aa, Homo sapiens
  misc_feature: Table A; Target 14258; HLA-A*24:02; CLDN16; ENSG00000113946; TAA
ITADILAGF

SEQ ID NO: 14259 - protein, 9 aa, Homo sapiens
  misc_feature: Table A; Target 14259; HLA-A*25:01; CLDN16; ENSG00000113946; TAA
ITADILAGF

SEQ ID NO: 14260 - protein, 9 aa, Homo sapiens
  misc_feature: Table A; Target 14260; HLA-A*26:01; CLDN16; ENSG00000113946; TAA
ITADILAGF

SEQ ID NO: 14261 - protein, 9 aa, Homo sapiens
  misc_feature: Table A; Target 14261; HLA-A*29:02; CLDN16; ENSG00000113946; TAA
ITADILAGF

SEQ ID NO: 14262 - protein, 9 aa, Homo sapiens
  misc_feature: Table A; Target 14262; HLA-A*30:02; CLDN16; ENSG00000113946; TAA
ITADILAGF

SEQ ID NO: 14263 - protein, 9 aa, Homo sapiens
  misc_feature: Table A; Target 14263; HLA-A*31:01; CLDN16; ENSG00000113946; TAA
ITADILAGF

SEQ ID NO: 14264 - protein, 9 aa, Homo sapiens
  misc_feature: Table A; Target 14264; HLA-A*32:01; CLDN16; ENSG00000113946; TAA
ITADILAGF

SEQ ID NO: 14265 - protein, 9 aa, Homo sapiens
  misc_feature: Table A; Target 14265; HLA-A*33:01; CLDN16; ENSG00000113946; TAA
ITADILAGF

SEQ ID NO: 14266 - protein, 9 aa, Homo sapiens
  misc_feature: Table A; Target 14266; HLA-A*33:03; CLDN16; ENSG00000113946; TAA
ITADILAGF

SEQ ID NO: 14267 - protein, 9 aa, Homo sapiens
  misc_feature: Table A; Target 14267; HLA-A*68:01; CLDN16; ENSG00000113946; TAA
ITADILAGF

SEQ ID NO: 14268 - protein, 9 aa, Homo sapiens
  misc_feature: Table A; Target 14268; HLA-A*68:02; CLDN16; ENSG00000113946; TAA
ITADILAGF

SEQ ID NO: 14269 - protein, 9 aa, Homo sapiens
  misc_feature: Table A; Target 14269; HLA-B*15:01; CLDN16; ENSG00000113946; TAA
ITADILAGF

SEQ ID NO: 14270 - protein, 9 aa, Homo sapiens
  misc_feature: Table A; Target 14270; HLA-B*15:03; CLDN16; ENSG00000113946; TAA
ITADILAGF

SEQ ID NO: 14271 - protein, 9 aa, Homo sapiens
  misc_feature: Table A; Target 14271; HLA-B*27:05; CLDN16; ENSG00000113946; TAA
ITADILAGF

SEQ ID NO: 14272 - protein, 9 aa, Homo sapiens
  misc_feature: Table A; Target 14272; HLA-B*35:01; CLDN16; ENSG00000113946; TAA
ITADILAGF

SEQ ID NO: 14273 - protein, 9 aa, Homo sapiens
  misc_feature: Table A; Target 14273; HLA-B*44:03; CLDN16; ENSG00000113946; TAA
ITADILAGF

SEQ ID NO: 14274 - protein, 9 aa, Homo sapiens
  misc_feature: Table A; Target 14274; HLA-B*46:01; CLDN16; ENSG00000113946; TAA
ITADILAGF

SEQ ID NO: 14275 - protein, 9 aa, Homo sapiens
  misc_feature: Table A; Target 14275; HLA-B*57:01; CLDN16; ENSG00000113946; TAA
ITADILAGF

SEQ ID NO: 14276 - protein, 9 aa, Homo sapiens
  misc_feature: Table A; Target 14276; HLA-B*58:01; CLDN16; ENSG00000113946; TAA
ITADILAGF

SEQ ID NO: 14277 - protein, 9 aa, Homo sapiens
  misc_feature: Table A; Target 14277; HLA-C*01:02; CLDN16; ENSG00000113946; TAA
ITADILAGF

SEQ ID NO: 14278 - protein, 9 aa, Homo sapiens
  misc_feature: Table A; Target 14278; HLA-C*02:02; CLDN16; ENSG00000113946; TAA
ITADILAGF

SEQ ID NO: 14279 - protein, 9 aa, Homo sapiens
  misc_feature: Table A; Target 14279; HLA-C*03:04; CLDN16; ENSG00000113946; TAA
ITADILAGF

SEQ ID NO: 14280 - protein, 9 aa, Homo sapiens
  misc_feature: Table A; Target 14280; HLA-C*04:01; CLDN16; ENSG00000113946; TAA
ITADILAGF

SEQ ID NO: 14281 - protein, 9 aa, Homo sapiens
  misc_feature: Table A; Target 14281; HLA-C*07:04; CLDN16; ENSG00000113946; TAA
ITADILAGF

SEQ ID NO: 14282 - protein, 9 aa, Homo sapiens
  misc_feature: Table A; Target 14282; HLA-C*07:06; CLDN16; ENSG00000113946; TAA
ITADILAGF

SEQ ID NO: 14283 - protein, 9 aa, Homo sapiens
  misc_feature: Table A; Target 14283; HLA-C*12:03; CLDN16; ENSG00000113946; TAA
ITADILAGF

SEQ ID NO: 14284 - protein, 9 aa, Homo sapiens
  misc_feature: Table A; Target 14284; HLA-C*16:01; CLDN16; ENSG00000113946; TAA
ITADILAGF

SEQ ID NO: 14285 - protein, 9 aa, Homo sapiens
  misc_feature: Table A; Target 14285; HLA-C*16:02; CLDN16; ENSG00000113946; TAA
ITADILAGF

SEQ ID NO: 14286 - protein, 9 aa, Homo sapiens
  misc_feature: Table A; Target 14286; HLA-C*16:04; CLDN16; ENSG00000113946; TAA
ITADILAGF

SEQ ID NO: 14287 - protein, 11 aa, Homo sapiens
  misc_feature: Table A; Target 14287; HLA-A*26:01; CLDN16; ENSG00000113946; TAA
ITADILAGFGF

SEQ ID NO: 14288 - protein, 11 aa, Homo sapiens
  misc_feature: Table A; Target 14288; HLA-B*57:01; CLDN16; ENSG00000113946; TAA
ITADILAGFGF

SEQ ID NO: 14289 - protein, 9 aa, Homo sapiens
  misc_feature: Table A; Target 14289; HLA-A*24:02; CLDN16; ENSG00000113946; TAA
IVATWTDCW

SEQ ID NO: 14290 - protein, 9 aa, Homo sapiens
  misc_feature: Table A; Target 14290; HLA-A*25:01; CLDN16; ENSG00000113946; TAA
IVATWTDCW

SEQ ID NO: 14291 - protein, 9 aa, Homo sapiens
  misc_feature: Table A; Target 14291; HLA-B*57:01; CLDN16; ENSG00000113946; TAA
IVATWTDCW

SEQ ID NO: 14292 - protein, 9 aa, Homo sapiens
  misc_feature: Table A; Target 14292; HLA-B*58:01; CLDN16; ENSG00000113946; TAA
IVATWTDCW

SEQ ID NO: 14293 - protein, 8 aa, Homo sapiens
  misc_feature: Table A; Target 14293; HLA-B*13:02; CLDN16; ENSG00000113946; TAA
KAYSAAGV

SEQ ID NO: 14294 - protein, 8 aa, Homo sapiens
  misc_feature: Table A; Target 14294; HLA-B*37:01; CLDN16; ENSG00000113946; TAA
KAYSAAGV

SEQ ID NO: 14295 - protein, 8 aa, Homo sapiens
  misc_feature: Table A; Target 14295; HLA-B*51:01; CLDN16; ENSG00000113946; TAA
KAYSAAGV

SEQ ID NO: 14296 - protein, 8 aa, Homo sapiens
  misc_feature: Table A; Target 14296; HLA-C*02:02; CLDN16; ENSG00000113946; TAA
KAYSAAGV

SEQ ID NO: 14297 - protein, 8 aa, Homo sapiens
  misc_feature: Table A; Target 14297; HLA-C*06:02; CLDN16; ENSG00000113946; TAA
KAYSAAGV

SEQ ID NO: 14298 - protein, 8 aa, Homo sapiens
  misc_feature: Table A; Target 14298; HLA-C*12:03; CLDN16; ENSG00000113946; TAA
KAYSAAGV

SEQ ID NO: 14299 - protein, 8 aa, Homo sapiens
  misc_feature: Table A; Target 14299; HLA-C*16:02; CLDN16; ENSG00000113946; TAA
KAYSAAGV

SEQ ID NO: 14300 - protein, 8 aa, Homo sapiens
  misc_feature: Table A; Target 14300; HLA-C*16:04; CLDN16; ENSG00000113946; TAA
KAYSAAGV

SEQ ID NO: 14301 - protein, 10 aa, Homo sapiens
  misc_feature: Table A; Target 14301; HLA-A*03:01; CLDN16; ENSG00000113946; TAA
KAYSAAGVSM

SEQ ID NO: 14302 - protein, 10 aa, Homo sapiens
  misc_feature: Table A; Target 14302; HLA-A*03:02; CLDN16; ENSG00000113946; TAA
KAYSAAGVSM

SEQ ID NO: 14303 - protein, 10 aa, Homo sapiens
  misc_feature: Table A; Target 14303; HLA-A*11:01; CLDN16; ENSG00000113946; TAA
KAYSAAGVSM

SEQ ID NO: 14304 - protein, 10 aa, Homo sapiens
  misc_feature: Table A; Target 14304; HLA-A*23:01; CLDN16; ENSG00000113946; TAA
KAYSAAGVSM

SEQ ID NO: 14305 - protein, 10 aa, Homo sapiens
  misc_feature: Table A; Target 14305; HLA-A*25:01; CLDN16; ENSG00000113946; TAA
KAYSAAGVSM

SEQ ID NO: 14306 - protein, 10 aa, Homo sapiens
  misc_feature: Table A; Target 14306; HLA-A*26:01; CLDN16; ENSG00000113946; TAA
KAYSAAGVSM

SEQ ID NO: 14307 - protein, 10 aa, Homo sapiens
  misc_feature: Table A; Target 14307; HLA-A*30:01; CLDN16; ENSG00000113946; TAA
KAYSAAGVSM

SEQ ID NO: 14308 - protein, 10 aa, Homo sapiens
  misc_feature: Table A; Target 14308; HLA-A*30:02; CLDN16; ENSG00000113946; TAA
KAYSAAGVSM

SEQ ID NO: 14309 - protein, 10 aa, Homo sapiens
  misc_feature: Table A; Target 14309; HLA-A*31:01; CLDN16; ENSG00000113946; TAA
KAYSAAGVSM

SEQ ID NO: 14310 - protein, 10 aa, Homo sapiens
  misc_feature: Table A; Target 14310; HLA-A*32:01; CLDN16; ENSG00000113946; TAA
KAYSAAGVSM

SEQ ID NO: 14311 - protein, 10 aa, Homo sapiens
  misc_feature: Table A; Target 14311; HLA-B*07:02; CLDN16; ENSG00000113946; TAA
KAYSAAGVSM

SEQ ID NO: 14312 - protein, 10 aa, Homo sapiens
  misc_feature: Table A; Target 14312; HLA-B*08:01; CLDN16; ENSG00000113946; TAA
KAYSAAGVSM

SEQ ID NO: 14313 - protein, 10 aa, Homo sapiens
  misc_feature: Table A; Target 14313; HLA-B*13:02; CLDN16; ENSG00000113946; TAA
KAYSAAGVSM

SEQ ID NO: 14314 - protein, 10 aa, Homo sapiens
  misc_feature: Table A; Target 14314; HLA-B*15:01; CLDN16; ENSG00000113946; TAA
KAYSAAGVSM

SEQ ID NO: 14315 - protein, 10 aa, Homo sapiens
  misc_feature: Table A; Target 14315; HLA-B*15:03; CLDN16; ENSG00000113946; TAA
KAYSAAGVSM

SEQ ID NO: 14316 - protein, 10 aa, Homo sapiens
  misc_feature: Table A; Target 14316; HLA-B*27:02; CLDN16; ENSG00000113946; TAA
KAYSAAGVSM

SEQ ID NO: 14317 - protein, 10 aa, Homo sapiens
  misc_feature: Table A; Target 14317; HLA-B*27:05; CLDN16; ENSG00000113946; TAA
KAYSAAGVSM

SEQ ID NO: 14318 - protein, 10 aa, Homo sapiens
  misc_feature: Table A; Target 14318; HLA-B*35:01; CLDN16; ENSG00000113946; TAA
KAYSAAGVSM

SEQ ID NO: 14319 - protein, 10 aa, Homo sapiens
  misc_feature: Table A; Target 14319; HLA-B*35:03; CLDN16; ENSG00000113946; TAA
KAYSAAGVSM

SEQ ID NO: 14320 - protein, 10 aa, Homo sapiens
  misc_feature: Table A; Target 14320; HLA-B*37:01; CLDN16; ENSG00000113946; TAA
KAYSAAGVSM

SEQ ID NO: 14321 - protein, 10 aa, Homo sapiens
  misc_feature: Table A; Target 14321; HLA-B*38:01; CLDN16; ENSG00000113946; TAA
KAYSAAGVSM

SEQ ID NO: 14322 - protein, 10 aa, Homo sapiens
  misc_feature: Table A; Target 14322; HLA-B*39:01; CLDN16; ENSG00000113946; TAA
KAYSAAGVSM

SEQ ID NO: 14323 - protein, 10 aa, Homo sapiens
  misc_feature: Table A; Target 14323; HLA-B*40:01; CLDN16; ENSG00000113946; TAA
KAYSAAGVSM

SEQ ID NO: 14324 - protein, 10 aa, Homo sapiens
  misc_feature: Table A; Target 14324; HLA-B*40:02; CLDN16; ENSG00000113946; TAA
KAYSAAGVSM

SEQ ID NO: 14325 - protein, 10 aa, Homo sapiens
  misc_feature: Table A; Target 14325; HLA-B*46:01; CLDN16; ENSG00000113946; TAA
KAYSAAGVSM

SEQ ID NO: 14326 - protein, 10 aa, Homo sapiens
  misc_feature: Table A; Target 14326; HLA-B*51:01; CLDN16; ENSG00000113946; TAA
KAYSAAGVSM

SEQ ID NO: 14327 - protein, 10 aa, Homo sapiens
  misc_feature: Table A; Target 14327; HLA-B*54:01; CLDN16; ENSG00000113946; TAA
KAYSAAGVSM

SEQ ID NO: 14328 - protein, 10 aa, Homo sapiens
  misc_feature: Table A; Target 14328; HLA-B*55:01; CLDN16; ENSG00000113946; TAA
KAYSAAGVSM

SEQ ID NO: 14329 - protein, 10 aa, Homo sapiens
  misc_feature: Table A; Target 14329; HLA-B*56:01; CLDN16; ENSG00000113946; TAA
KAYSAAGVSM

SEQ ID NO: 14330 - protein, 10 aa, Homo sapiens
  misc_feature: Table A; Target 14330; HLA-B*57:01; CLDN16; ENSG00000113946; TAA
KAYSAAGVSM

SEQ ID NO: 14331 - protein, 10 aa, Homo sapiens
  misc_feature: Table A; Target 14331; HLA-B*58:01; CLDN16; ENSG00000113946; TAA
KAYSAAGVSM

SEQ ID NO: 14332 - protein, 10 aa, Homo sapiens
  misc_feature: Table A; Target 14332; HLA-C*01:02; CLDN16; ENSG00000113946; TAA
KAYSAAGVSM

SEQ ID NO: 14333 - protein, 10 aa, Homo sapiens
  misc_feature: Table A; Target 14333; HLA-C*02:02; CLDN16; ENSG00000113946; TAA
KAYSAAGVSM

SEQ ID NO: 14334 - protein, 10 aa, Homo sapiens
  misc_feature: Table A; Target 14334; HLA-C*03:03; CLDN16; ENSG00000113946; TAA
KAYSAAGVSM

SEQ ID NO: 14335 - protein, 10 aa, Homo sapiens
  misc_feature: Table A; Target 14335; HLA-C*03:04; CLDN16; ENSG00000113946; TAA
KAYSAAGVSM

SEQ ID NO: 14336 - protein, 10 aa, Homo sapiens
  misc_feature: Table A; Target 14336; HLA-C*04:01; CLDN16; ENSG00000113946; TAA
KAYSAAGVSM

SEQ ID NO: 14337 - protein, 10 aa, Homo sapiens
  misc_feature: Table A; Target 14337; HLA-C*05:01; CLDN16; ENSG00000113946; TAA
KAYSAAGVSM

SEQ ID NO: 14338 - protein, 10 aa, Homo sapiens
  misc_feature: Table A; Target 14338; HLA-C*06:02; CLDN16; ENSG00000113946; TAA
KAYSAAGVSM

SEQ ID NO: 14339 - protein, 10 aa, Homo sapiens
  misc_feature: Table A; Target 14339; HLA-C*07:01; CLDN16; ENSG00000113946; TAA
KAYSAAGVSM

SEQ ID NO: 14340 - protein, 10 aa, Homo sapiens
  misc_feature: Table A; Target 14340; HLA-C*07:02; CLDN16; ENSG00000113946; TAA
KAYSAAGVSM

SEQ ID NO: 14341 - protein, 10 aa, Homo sapiens
  misc_feature: Table A; Target 14341; HLA-C*07:04; CLDN16; ENSG00000113946; TAA
KAYSAAGVSM

SEQ ID NO: 14342 - protein, 10 aa, Homo sapiens
  misc_feature: Table A; Target 14342; HLA-C*07:06; CLDN16; ENSG00000113946; TAA
KAYSAAGVSM

SEQ ID NO: 14343 - protein, 10 aa, Homo sapiens
  misc_feature: Table A; Target 14343; HLA-C*12:03; CLDN16; ENSG00000113946; TAA
KAYSAAGVSM

SEQ ID NO: 14344 - protein, 10 aa, Homo sapiens
  misc_feature: Table A; Target 14344; HLA-C*14:02; CLDN16; ENSG00000113946; TAA
KAYSAAGVSM

SEQ ID NO: 14345 - protein, 10 aa, Homo sapiens
  misc_feature: Table A; Target 14345; HLA-C*16:01; CLDN16; ENSG00000113946; TAA
KAYSAAGVSM

SEQ ID NO: 14346 - protein, 10 aa, Homo sapiens
  misc_feature: Table A; Target 14346; HLA-C*16:02; CLDN16; ENSG00000113946; TAA
KAYSAAGVSM

SEQ ID NO: 14347 - protein, 10 aa, Homo sapiens
  misc_feature: Table A; Target 14347; HLA-C*16:04; CLDN16; ENSG00000113946; TAA
KAYSAAGVSM

SEQ ID NO: 14348 - protein, 11 aa, Homo sapiens
  misc_feature: Table A; Target 14348; HLA-A*02:01; CLDN16; ENSG00000113946; TAA
KAYSAAGVSMA

SEQ ID NO: 14349 - protein, 11 aa, Homo sapiens
  misc_feature: Table A; Target 14349; HLA-B*55:01; CLDN16; ENSG00000113946; TAA
KAYSAAGVSMA

SEQ ID NO: 14350 - protein, 11 aa, Homo sapiens
  misc_feature: Table A; Target 14350; HLA-B*56:01; CLDN16; ENSG00000113946; TAA
KAYSAAGVSMA

SEQ ID NO: 14351 - protein, 11 aa, Homo sapiens
  misc_feature: Table A; Target 14351; HLA-C*06:02; CLDN16; ENSG00000113946; TAA
KAYSAAGVSMA

SEQ ID NO: 14352 - protein, 11 aa, Homo sapiens
  misc_feature: Table A; Target 14352; HLA-C*16:04; CLDN16; ENSG00000113946; TAA
KAYSAAGVSMA

SEQ ID NO: 14353 - protein, 9 aa, Homo sapiens
  misc_feature: Table A; Target 14353; HLA-A*30:02; CLDN16; ENSG00000113946; TAA
KDVGPERNY

SEQ ID NO: 14354 - protein, 9 aa, Homo sapiens
  misc_feature: Table A; Target 14354; HLA-B*44:02; CLDN16; ENSG00000113946; TAA
KDVGPERNY

SEQ ID NO: 14355 - protein, 9 aa, Homo sapiens
  misc_feature: Table A; Target 14355; HLA-B*44:03; CLDN16; ENSG00000113946; TAA
KDVGPERNY

SEQ ID NO: 14356 - protein, 9 aa, Homo sapiens
  misc_feature: Table A; Target 14356; HLA-C*16:01; CLDN16; ENSG00000113946; TAA
KDVGPERNY

SEQ ID NO: 14357 - protein, 9 aa, Homo sapiens
  misc_feature: Table A; Target 14357; HLA-C*16:02; CLDN16; ENSG00000113946; TAA
KDVGPERNY

SEQ ID NO: 14358 - protein, 10 aa, Homo sapiens
  misc_feature: Table A; Target 14358; HLA-C*06:02; CLDN16; ENSG00000113946; TAA
KDVGPERNYP

SEQ ID NO: 14359 - protein, 9 aa, Homo sapiens
  misc_feature: Table A; Target 14359; HLA-A*23:01; CLDN16; ENSG00000113946; TAA
KFLPDEPYI

SEQ ID NO: 14360 - protein, 9 aa, Homo sapiens
  misc_feature: Table A; Target 14360; HLA-A*24:02; CLDN16; ENSG00000113946; TAA
KFLPDEPYI

SEQ ID NO: 14361 - protein, 8 aa, Homo sapiens
  misc_feature: Table A; Target 14361; HLA-B*08:01; CLDN16; ENSG00000113946; TAA
KLVVTRAL

SEQ ID NO: 14362 - protein, 9 aa, Homo sapiens
  misc_feature: Table A; Target 14362; HLA-A*02:01; CLDN16; ENSG00000113946; TAA
KMYAVDTRV

SEQ ID NO: 14363 - protein, 9 aa, Homo sapiens
  misc_feature: Table A; Target 14363; HLA-A*02:03; CLDN16; ENSG00000113946; TAA
KMYAVDTRV

SEQ ID NO: 14364 - protein, 9 aa, Homo sapiens
  misc_feature: Table A; Target 14364; HLA-A*02:04; CLDN16; ENSG00000113946; TAA
KMYAVDTRV

SEQ ID NO: 14365 - protein, 9 aa, Homo sapiens
  misc_feature: Table A; Target 14365; HLA-A*02:07; CLDN16; ENSG00000113946; TAA
KMYAVDTRV

SEQ ID NO: 14366 - protein, 9 aa, Homo sapiens
  misc_feature: Table A; Target 14366; HLA-A*03:01; CLDN16; ENSG00000113946; TAA
KMYAVDTRV

SEQ ID NO: 14367 - protein, 9 aa, Homo sapiens
  misc_feature: Table A; Target 14367; HLA-A*03:02; CLDN16; ENSG00000113946; TAA
KMYAVDTRV

SEQ ID NO: 14368 - protein, 9 aa, Homo sapiens
  misc_feature: Table A; Target 14368; HLA-A*23:01; CLDN16; ENSG00000113946; TAA
KMYAVDTRV

SEQ ID NO: 14369 - protein, 9 aa, Homo sapiens
  misc_feature: Table A; Target 14369; HLA-A*24:02; CLDN16; ENSG00000113946; TAA
KMYAVDTRV

SEQ ID NO: 14370 - protein, 9 aa, Homo sapiens
  misc_feature: Table A; Target 14370; HLA-A*30:01; CLDN16; ENSG00000113946; TAA
KMYAVDTRV

SEQ ID NO: 14371 - protein, 9 aa, Homo sapiens
  misc_feature: Table A; Target 14371; HLA-A*31:01; CLDN16; ENSG00000113946; TAA
KMYAVDTRV

SEQ ID NO: 14372 - protein, 9 aa, Homo sapiens
  misc_feature: Table A; Target 14372; HLA-A*32:01; CLDN16; ENSG00000113946; TAA
KMYAVDTRV

SEQ ID NO: 14373 - protein, 9 aa, Homo sapiens
  misc_feature: Table A; Target 14373; HLA-A*68:02; CLDN16; ENSG00000113946; TAA
KMYAVDTRV

SEQ ID NO: 14374 - protein, 9 aa, Homo sapiens
  misc_feature: Table A; Target 14374; HLA-B*13:02; CLDN16; ENSG00000113946; TAA
KMYAVDTRV

SEQ ID NO: 14375 - protein, 9 aa, Homo sapiens
  misc_feature: Table A; Target 14375; HLA-B*15:03; CLDN16; ENSG00000113946; TAA
KMYAVDTRV

SEQ ID NO: 14376 - protein, 9 aa, Homo sapiens
  misc_feature: Table A; Target 14376; HLA-B*27:05; CLDN16; ENSG00000113946; TAA
KMYAVDTRV

SEQ ID NO: 14377 - protein, 9 aa, Homo sapiens
  misc_feature: Table A; Target 14377; HLA-B*37:01; CLDN16; ENSG00000113946; TAA
KMYAVDTRV

SEQ ID NO: 14378 - protein, 9 aa, Homo sapiens
  misc_feature: Table A; Target 14378; HLA-B*38:01; CLDN16; ENSG00000113946; TAA
KMYAVDTRV

SEQ ID NO: 14379 - protein, 9 aa, Homo sapiens
  misc_feature: Table A; Target 14379; HLA-B*40:02; CLDN16; ENSG00000113946; TAA
KMYAVDTRV

SEQ ID NO: 14380 - protein, 9 aa, Homo sapiens
  misc_feature: Table A; Target 14380; HLA-B*46:01; CLDN16; ENSG00000113946; TAA
KMYAVDTRV

SEQ ID NO: 14381 - protein, 9 aa, Homo sapiens
  misc_feature: Table A; Target 14381; HLA-B*49:01; CLDN16; ENSG00000113946; TAA
KMYAVDTRV

SEQ ID NO: 14382 - protein, 9 aa, Homo sapiens
  misc_feature: Table A; Target 14382; HLA-B*51:01; CLDN16; ENSG00000113946; TAA
KMYAVDTRV

SEQ ID NO: 14383 - protein, 9 aa, Homo sapiens
  misc_feature: Table A; Target 14383; HLA-B*55:01; CLDN16; ENSG00000113946; TAA
KMYAVDTRV

SEQ ID NO: 14384 - protein, 9 aa, Homo sapiens
  misc_feature: Table A; Target 14384; HLA-B*56:01; CLDN16; ENSG00000113946; TAA
KMYAVDTRV

SEQ ID NO: 14385 - protein, 9 aa, Homo sapiens
  misc_feature: Table A; Target 14385; HLA-B*57:01; CLDN16; ENSG00000113946; TAA
KMYAVDTRV

SEQ ID NO: 14386 - protein, 9 aa, Homo sapiens
  misc_feature: Table A; Target 14386; HLA-B*58:01; CLDN16; ENSG00000113946; TAA
KMYAVDTRV

SEQ ID NO: 14387 - protein, 9 aa, Homo sapiens
  misc_feature: Table A; Target 14387; HLA-C*02:02; CLDN16; ENSG00000113946; TAA
KMYAVDTRV

SEQ ID NO: 14388 - protein, 9 aa, Homo sapiens
  misc_feature: Table A; Target 14388; HLA-C*04:01; CLDN16; ENSG00000113946; TAA
KMYAVDTRV

SEQ ID NO: 14389 - protein, 9 aa, Homo sapiens
  misc_feature: Table A; Target 14389; HLA-C*06:02; CLDN16; ENSG00000113946; TAA
KMYAVDTRV

SEQ ID NO: 14390 - protein, 9 aa, Homo sapiens
  misc_feature: Table A; Target 14390; HLA-C*07:02; CLDN16; ENSG00000113946; TAA
KMYAVDTRV

SEQ ID NO: 14391 - protein, 9 aa, Homo sapiens
  misc_feature: Table A; Target 14391; HLA-C*12:03; CLDN16; ENSG00000113946; TAA
KMYAVDTRV

SEQ ID NO: 14392 - protein, 9 aa, Homo sapiens
  misc_feature: Table A; Target 14392; HLA-C*16:02; CLDN16; ENSG00000113946; TAA
KMYAVDTRV

SEQ ID NO: 14393 - protein, 9 aa, Homo sapiens
  misc_feature: Table A; Target 14393; HLA-C*16:04; CLDN16; ENSG00000113946; TAA
KMYAVDTRV

SEQ ID NO: 14394 - protein, 9 aa, Homo sapiens
  misc_feature: Table A; Target 14394; HLA-C*06:02; CLDN16; ENSG00000113946; TAA
KSYSAPRTE

SEQ ID NO: 14395 - protein, 9 aa, Homo sapiens
  misc_feature: Table A; Target 14395; HLA-C*12:03; CLDN16; ENSG00000113946; TAA
KSYSAPRTE

SEQ ID NO: 14396 - protein, 10 aa, Homo sapiens
  misc_feature: Table A; Target 14396; HLA-C*06:02; CLDN16; ENSG00000113946; TAA
KSYSAPRTET

SEQ ID NO: 14397 - protein, 11 aa, Homo sapiens
  misc_feature: Table A; Target 14397; HLA-A*32:01; CLDN16; ENSG00000113946; TAA
KSYSAPRTETA

SEQ ID NO: 14398 - protein, 8 aa, Homo sapiens
  misc_feature: Table A; Target 14398; HLA-C*03:03; CLDN16; ENSG00000113946; TAA
LAEHPLKL

SEQ ID NO: 14399 - protein, 8 aa, Homo sapiens
  misc_feature: Table A; Target 14399; HLA-C*03:04; CLDN16; ENSG00000113946; TAA
LAEHPLKL

SEQ ID NO: 14400 - protein, 8 aa, Homo sapiens
  misc_feature: Table A; Target 14400; HLA-C*05:01; CLDN16; ENSG00000113946; TAA
LAEHPLKL

SEQ ID NO: 14401 - protein, 9 aa, Homo sapiens
  misc_feature: Table A; Target 14401; HLA-B*51:01; CLDN16; ENSG00000113946; TAA
LAEHPLKLV

SEQ ID NO: 14402 - protein, 8 aa, Homo sapiens
  misc_feature: Table A; Target 14402; HLA-C*12:03; CLDN16; ENSG00000113946; TAA
LAGAVLTC

SEQ ID NO: 14403 - protein, 8 aa, Homo sapiens
  misc_feature: Table A; Target 14403; HLA-C*16:01; CLDN16; ENSG00000113946; TAA
LATMRDLL

SEQ ID NO: 14404 - protein, 9 aa, Homo sapiens
  misc_feature: Table A; Target 14404; HLA-A*31:01; CLDN16; ENSG00000113946; TAA
LFKDVGPER

SEQ ID NO: 14405 - protein, 9 aa, Homo sapiens
  misc_feature: Table A; Target 14405; HLA-A*33:01; CLDN16; ENSG00000113946; TAA
LFKDVGPER

SEQ ID NO: 14406 - protein, 9 aa, Homo sapiens
  misc_feature: Table A; Target 14406; HLA-A*33:03; CLDN16; ENSG00000113946; TAA
LFKDVGPER

SEQ ID NO: 14407 - protein, 9 aa, Homo sapiens
  misc_feature: Table A; Target 14407; HLA-C*07:06; CLDN16; ENSG00000113946; TAA
LFKDVGPER

SEQ ID NO: 14408 - protein, 11 aa, Homo sapiens
  misc_feature: Table A; Target 14408; HLA-A*29:02; CLDN16; ENSG00000113946; TAA
LFKDVGPERNY

SEQ ID NO: 14409 - protein, 11 aa, Homo sapiens
  misc_feature: Table A; Target 14409; HLA-A*30:02; CLDN16; ENSG00000113946; TAA
LFKDVGPERNY

SEQ ID NO: 14410 - protein, 11 aa, Homo sapiens
  misc_feature: Table A; Target 14410; HLA-A*01:01; CLDN16; ENSG00000113946; TAA
LLATMRDLLQY

SEQ ID NO: 14411 - protein, 9 aa, Homo sapiens
  misc_feature: Table A; Target 14411; HLA-A*02:01; CLDN16; ENSG00000113946; TAA
LLIAGTPGI

SEQ ID NO: 14412 - protein, 9 aa, Homo sapiens
  misc_feature: Table A; Target 14412; HLA-A*02:03; CLDN16; ENSG00000113946; TAA
LLIAGTPGI

SEQ ID NO: 14413 - protein, 9 aa, Homo sapiens
  misc_feature: Table A; Target 14413; HLA-A*02:04; CLDN16; ENSG00000113946; TAA
LLIAGTPGI

SEQ ID NO: 14414 - protein, 9 aa, Homo sapiens
  misc_feature: Table A; Target 14414; HLA-A*02:07; CLDN16; ENSG00000113946; TAA
LLIAGTPGI

SEQ ID NO: 14415 - protein, 9 aa, Homo sapiens
  misc_feature: Table A; Target 14415; HLA-A*23:01; CLDN16; ENSG00000113946; TAA
LLIAGTPGI

SEQ ID NO: 14416 - protein, 9 aa, Homo sapiens
  misc_feature: Table A; Target 14416; HLA-B*13:02; CLDN16; ENSG00000113946; TAA
LLIAGTPGI

SEQ ID NO: 14417 - protein, 9 aa, Homo sapiens
  misc_feature: Table A; Target 14417; HLA-B*46:01; CLDN16; ENSG00000113946; TAA
LLIAGTPGI

SEQ ID NO: 14418 - protein, 9 aa, Homo sapiens
  misc_feature: Table A; Target 14418; HLA-B*55:01; CLDN16; ENSG00000113946; TAA
LLIAGTPGI

SEQ ID NO: 14419 - protein, 9 aa, Homo sapiens
  misc_feature: Table A; Target 14419; HLA-A*01:01; CLDN16; ENSG00000113946; TAA
LLVTACLYY

SEQ ID NO: 14420 - protein, 9 aa, Homo sapiens
  misc_feature: Table A; Target 14420; HLA-A*29:02; CLDN16; ENSG00000113946; TAA
LLVTACLYY

SEQ ID NO: 14421 - protein, 9 aa, Homo sapiens
  misc_feature: Table A; Target 14421; HLA-C*07:01; CLDN16; ENSG00000113946; TAA
LLVTACLYY

SEQ ID NO: 14422 - protein, 9 aa, Homo sapiens
  misc_feature: Table A; Target 14422; HLA-A*01:01; CLDN16; ENSG00000113946; TAA
LPDEPYIKV

SEQ ID NO: 14423 - protein, 9 aa, Homo sapiens
  misc_feature: Table A; Target 14423; HLA-A*02:07; CLDN16; ENSG00000113946; TAA
LPDEPYIKV

SEQ ID NO: 14424 - protein, 9 aa, Homo sapiens
  misc_feature: Table A; Target 14424; HLA-A*68:02; CLDN16; ENSG00000113946; TAA
LPDEPYIKV

SEQ ID NO: 14425 - protein, 9 aa, Homo sapiens
  misc_feature: Table A; Target 14425; HLA-B*07:02; CLDN16; ENSG00000113946; TAA
LPDEPYIKV

SEQ ID NO: 14426 - protein, 9 aa, Homo sapiens
  misc_feature: Table A; Target 14426; HLA-B*13:02; CLDN16; ENSG00000113946; TAA
LPDEPYIKV

SEQ ID NO: 14427 - protein, 9 aa, Homo sapiens
  misc_feature: Table A; Target 14427; HLA-B*35:01; CLDN16; ENSG00000113946; TAA
LPDEPYIKV

SEQ ID NO: 14428 - protein, 9 aa, Homo sapiens
  misc_feature: Table A; Target 14428; HLA-B*35:03; CLDN16; ENSG00000113946; TAA
LPDEPYIKV

SEQ ID NO: 14429 - protein, 9 aa, Homo sapiens
  misc_feature: Table A; Target 14429; HLA-B*38:01; CLDN16; ENSG00000113946; TAA
LPDEPYIKV

SEQ ID NO: 14430 - protein, 9 aa, Homo sapiens
  misc_feature: Table A; Target 14430; HLA-B*51:01; CLDN16; ENSG00000113946; TAA
LPDEPYIKV

SEQ ID NO: 14431 - protein, 9 aa, Homo sapiens
  misc_feature: Table A; Target 14431; HLA-B*54:01; CLDN16; ENSG00000113946; TAA
LPDEPYIKV

SEQ ID NO: 14432 - protein, 9 aa, Homo sapiens
  misc_feature: Table A; Target 14432; HLA-B*55:01; CLDN16; ENSG00000113946; TAA
LPDEPYIKV

SEQ ID NO: 14433 - protein, 9 aa, Homo sapiens
  misc_feature: Table A; Target 14433; HLA-B*56:01; CLDN16; ENSG00000113946; TAA
LPDEPYIKV

SEQ ID NO: 14434 - protein, 9 aa, Homo sapiens
  misc_feature: Table A; Target 14434; HLA-C*03:03; CLDN16; ENSG00000113946; TAA
LPDEPYIKV

SEQ ID NO: 14435 - protein, 9 aa, Homo sapiens
  misc_feature: Table A; Target 14435; HLA-C*04:01; CLDN16; ENSG00000113946; TAA
LPDEPYIKV

SEQ ID NO: 14436 - protein, 9 aa, Homo sapiens
  misc_feature: Table A; Target 14436; HLA-C*05:01; CLDN16; ENSG00000113946; TAA
LPDEPYIKV

SEQ ID NO: 14437 - protein, 9 aa, Homo sapiens
  misc_feature: Table A; Target 14437; HLA-C*07:02; CLDN16; ENSG00000113946; TAA
LPDEPYIKV

SEQ ID NO: 14438 - protein, 8 aa, Homo sapiens
  misc_feature: Table A; Target 14438; HLA-C*07:01; CLDN16; ENSG00000113946; TAA
LVTACLYY

SEQ ID NO: 14439 - protein, 9 aa, Homo sapiens
  misc_feature: Table A; Target 14439; HLA-A*31:01; CLDN16; ENSG00000113946; TAA
LYYSYCNSR

SEQ ID NO: 14440 - protein, 9 aa, Homo sapiens
  misc_feature: Table A; Target 14440; HLA-A*33:01; CLDN16; ENSG00000113946; TAA
LYYSYCNSR

SEQ ID NO: 14441 - protein, 8 aa, Homo sapiens
  misc_feature: Table A; Target 14441; HLA-C*07:01; CLDN16; ENSG00000113946; TAA
MAGSLGCF

SEQ ID NO: 14442 - protein, 9 aa, Homo sapiens
  misc_feature: Table A; Target 14442; HLA-C*07:01; CLDN16; ENSG00000113946; TAA
MAGSLGCFL

SEQ ID NO: 14443 - protein, 9 aa, Homo sapiens
  misc_feature: Table A; Target 14443; HLA-A*31:01; CLDN16; ENSG00000113946; TAA
MAKSYSAPR

SEQ ID NO: 14444 - protein, 9 aa, Homo sapiens
  misc_feature: Table A; Target 14444; HLA-A*33:01; CLDN16; ENSG00000113946; TAA
MAKSYSAPR

SEQ ID NO: 14445 - protein, 9 aa, Homo sapiens
  misc_feature: Table A; Target 14445; HLA-A*33:03; CLDN16; ENSG00000113946; TAA
MAKSYSAPR

SEQ ID NO: 14446 - protein, 9 aa, Homo sapiens
  misc_feature: Table A; Target 14446; HLA-A*68:01; CLDN16; ENSG00000113946; TAA
MAKSYSAPR

SEQ ID NO: 14447 - protein, 9 aa, Homo sapiens
  misc_feature: Table A; Target 14447; HLA-C*07:06; CLDN16; ENSG00000113946; TAA
MAKSYSAPR

SEQ ID NO: 14448 - protein, 10 aa, Homo sapiens
  misc_feature: Table A; Target 14448; HLA-A*25:01; CLDN16; ENSG00000113946; TAA
MITADILAGF

SEQ ID NO: 14449 - protein, 10 aa, Homo sapiens
  misc_feature: Table A; Target 14449; HLA-A*26:01; CLDN16; ENSG00000113946; TAA
MITADILAGF

SEQ ID NO: 14450 - protein, 10 aa, Homo sapiens
  misc_feature: Table A; Target 14450; HLA-A*68:02; CLDN16; ENSG00000113946; TAA
MITADILAGF

SEQ ID NO: 14451 - protein, 10 aa, Homo sapiens
  misc_feature: Table A; Target 14451; HLA-C*07:01; CLDN16; ENSG00000113946; TAA
MITADILAGF

SEQ ID NO: 14452 - protein, 9 aa, Homo sapiens
  misc_feature: Table A; Target 14452; HLA-A*01:01; CLDN16; ENSG00000113946; TAA
MTSRTPLLV

SEQ ID NO: 14453 - protein, 9 aa, Homo sapiens
  misc_feature: Table A; Target 14453; HLA-A*68:02; CLDN16; ENSG00000113946; TAA
MTSRTPLLV

SEQ ID NO: 14454 - protein, 8 aa, Homo sapiens
  misc_feature: Table A; Target 14454; HLA-B*35:03; CLDN16; ENSG00000113946; TAA
MVNADDSL

SEQ ID NO: 14455 - protein, 8 aa, Homo sapiens
  misc_feature: Table A; Target 14455; HLA-C*04:01; CLDN16; ENSG00000113946; TAA
MYAVDTRV

SEQ ID NO: 14456 - protein, 8 aa, Homo sapiens
  misc_feature: Table A; Target 14456; HLA-C*06:02; CLDN16; ENSG00000113946; TAA
MYAVDTRV

SEQ ID NO: 14457 - protein, 8 aa, Homo sapiens
  misc_feature: Table A; Target 14457; HLA-C*07:01; CLDN16; ENSG00000113946; TAA
MYAVDTRV

SEQ ID NO: 14458 - protein, 8 aa, Homo sapiens
  misc_feature: Table A; Target 14458; HLA-C*14:02; CLDN16; ENSG00000113946; TAA
MYAVDTRV

SEQ ID NO: 14459 - protein, 8 aa, Homo sapiens
  misc_feature: Table A; Target 14459; HLA-C*16:02; CLDN16; ENSG00000113946; TAA
MYAVDTRV

SEQ ID NO: 14460 - protein, 8 aa, Homo sapiens
  misc_feature: Table A; Target 14460; HLA-A*01:01; CLDN16; ENSG00000113946; TAA
NADDSLEV

SEQ ID NO: 14461 - protein, 8 aa, Homo sapiens
  misc_feature: Table A; Target 14461; HLA-B*35:03; CLDN16; ENSG00000113946; TAA
NADDSLEV

SEQ ID NO: 14462 - protein, 8 aa, Homo sapiens
  misc_feature: Table A; Target 14462; HLA-B*51:01; CLDN16; ENSG00000113946; TAA
NADDSLEV

SEQ ID NO: 14463 - protein, 8 aa, Homo sapiens
  misc_feature: Table A; Target 14463; HLA-C*03:03; CLDN16; ENSG00000113946; TAA
NADDSLEV

SEQ ID NO: 14464 - protein, 8 aa, Homo sapiens
  misc_feature: Table A; Target 14464; HLA-C*03:04; CLDN16; ENSG00000113946; TAA
NADDSLEV

SEQ ID NO: 14465 - protein, 8 aa, Homo sapiens
  misc_feature: Table A; Target 14465; HLA-C*05:01; CLDN16; ENSG00000113946; TAA
NADDSLEV

SEQ ID NO: 14466 - protein, 9 aa, Homo sapiens
  misc_feature: Table A; Target 14466; HLA-C*05:01; CLDN16; ENSG00000113946; TAA
NADDSLEVS

SEQ ID NO: 14467 - protein, 10 aa, Homo sapiens
  misc_feature: Table A; Target 14467; HLA-C*05:01; CLDN16; ENSG00000113946; TAA
NADDSLEVST

SEQ ID NO: 14468 - protein, 11 aa, Homo sapiens
  misc_feature: Table A; Target 14468; HLA-A*68:01; CLDN16; ENSG00000113946; TAA
NADDSLEVSTK

SEQ ID NO: 14469 - protein, 11 aa, Homo sapiens
  misc_feature: Table A; Target 14469; HLA-B*27:02; CLDN16; ENSG00000113946; TAA
NADDSLEVSTK

SEQ ID NO: 14470 - protein, 11 aa, Homo sapiens
  misc_feature: Table A; Target 14470; HLA-B*27:05; CLDN16; ENSG00000113946; TAA
NADDSLEVSTK

SEQ ID NO: 14471 - protein, 11 aa, Homo sapiens
  misc_feature: Table A; Target 14471; HLA-C*05:01; CLDN16; ENSG00000113946; TAA
NADDSLEVSTK

SEQ ID NO: 14472 - protein, 11 aa, Homo sapiens
  misc_feature: Table A; Target 14472; HLA-C*07:06; CLDN16; ENSG00000113946; TAA
NADDSLEVSTK

SEQ ID NO: 14473 - protein, 9 aa, Homo sapiens
  misc_feature: Table A; Target 14473; HLA-A*02:03; CLDN16; ENSG00000113946; TAA
NAFDGIRTC

SEQ ID NO: 14474 - protein, 9 aa, Homo sapiens
  misc_feature: Table A; Target 14474; HLA-B*46:01; CLDN16; ENSG00000113946; TAA
NAFDGIRTC

SEQ ID NO: 14475 - protein, 9 aa, Homo sapiens
  misc_feature: Table A; Target 14475; HLA-B*51:01; CLDN16; ENSG00000113946; TAA
NAFDGIRTC

SEQ ID NO: 14476 - protein, 9 aa, Homo sapiens
  misc_feature: Table A; Target 14476; HLA-B*54:01; CLDN16; ENSG00000113946; TAA
NAFDGIRTC

SEQ ID NO: 14477 - protein, 9 aa, Homo sapiens
  misc_feature: Table A; Target 14477; HLA-B*56:01; CLDN16; ENSG00000113946; TAA
NAFDGIRTC

SEQ ID NO: 14478 - protein, 9 aa, Homo sapiens
  misc_feature: Table A; Target 14478; HLA-C*02:02; CLDN16; ENSG00000113946; TAA
NAFDGIRTC

SEQ ID NO: 14479 - protein, 9 aa, Homo sapiens
  misc_feature: Table A; Target 14479; HLA-C*03:03; CLDN16; ENSG00000113946; TAA
NAFDGIRTC

SEQ ID NO: 14480 - protein, 9 aa, Homo sapiens
  misc_feature: Table A; Target 14480; HLA-C*03:04; CLDN16; ENSG00000113946; TAA
NAFDGIRTC

SEQ ID NO: 14481 - protein, 9 aa, Homo sapiens
  misc_feature: Table A; Target 14481; HLA-C*12:03; CLDN16; ENSG00000113946; TAA
NAFDGIRTC

SEQ ID NO: 14482 - protein, 9 aa, Homo sapiens
  misc_feature: Table A; Target 14482; HLA-C*16:01; CLDN16; ENSG00000113946; TAA
NAFDGIRTC

SEQ ID NO: 14483 - protein, 9 aa, Homo sapiens
  misc_feature: Table A; Target 14483; HLA-C*16:02; CLDN16; ENSG00000113946; TAA
NAFDGIRTC

SEQ ID NO: 14484 - protein, 9 aa, Homo sapiens
  misc_feature: Table A; Target 14484; HLA-C*16:04; CLDN16; ENSG00000113946; TAA
NAFDGIRTC

SEQ ID NO: 14485 - protein, 8 aa, Homo sapiens
  misc_feature: Table A; Target 14485; HLA-B*15:01; CLDN16; ENSG00000113946; TAA
NIFLGIQY

SEQ ID NO: 14486 - protein, 8 aa, Homo sapiens
  misc_feature: Table A; Target 14486; HLA-B*15:03; CLDN16; ENSG00000113946; TAA
NIFLGIQY

SEQ ID NO: 14487 - protein, 8 aa, Homo sapiens
  misc_feature: Table A; Target 14487; HLA-B*18:01; CLDN16; ENSG00000113946; TAA
NIFLGIQY

SEQ ID NO: 14488 - protein, 8 aa, Homo sapiens
  misc_feature: Table A; Target 14488; HLA-B*35:01; CLDN16; ENSG00000113946; TAA
NIFLGIQY

SEQ ID NO: 14489 - protein, 8 aa, Homo sapiens
  misc_feature: Table A; Target 14489; HLA-C*01:02; CLDN16; ENSG00000113946; TAA
NIFLGIQY

SEQ ID NO: 14490 - protein, 8 aa, Homo sapiens
  misc_feature: Table A; Target 14490; HLA-C*07:01; CLDN16; ENSG00000113946; TAA
NIFLGIQY

SEQ ID NO: 14491 - protein, 8 aa, Homo sapiens
  misc_feature: Table A; Target 14491; HLA-C*07:04; CLDN16; ENSG00000113946; TAA
NIFLGIQY

SEQ ID NO: 14492 - protein, 9 aa, Homo sapiens
  misc_feature: Table A; Target 14492; HLA-A*03:01; CLDN16; ENSG00000113946; TAA
NIFLGIQYK

SEQ ID NO: 14493 - protein, 9 aa, Homo sapiens
  misc_feature: Table A; Target 14493; HLA-A*03:02; CLDN16; ENSG00000113946; TAA
NIFLGIQYK

SEQ ID NO: 14494 - protein, 9 aa, Homo sapiens
  misc_feature: Table A; Target 14494; HLA-A*11:01; CLDN16; ENSG00000113946; TAA
NIFLGIQYK

SEQ ID NO: 14495 - protein, 8 aa, Homo sapiens
  misc_feature: Table A; Target 14495; HLA-C*04:01; CLDN16; ENSG00000113946; TAA
PDGLLATM

SEQ ID NO: 14496 - protein, 8 aa, Homo sapiens
  misc_feature: Table A; Target 14496; HLA-C*07:01; CLDN16; ENSG00000113946; TAA
PDGLLATM

SEQ ID NO: 14497 - protein, 8 aa, Homo sapiens
  misc_feature: Table A; Target 14497; HLA-C*07:02; CLDN16; ENSG00000113946; TAA
PDGLLATM

SEQ ID NO: 14498 - protein, 9 aa, Homo sapiens
  misc_feature: Table A; Target 14498; HLA-A*29:02; CLDN16; ENSG00000113946; TAA
PLLVTACLY

SEQ ID NO: 14499 - protein, 9 aa, Homo sapiens
  misc_feature: Table A; Target 14499; HLA-B*07:02; CLDN16; ENSG00000113946; TAA
PRTETAKMY

SEQ ID NO: 14500 - protein, 9 aa, Homo sapiens
  misc_feature: Table A; Target 14500; HLA-C*07:01; CLDN16; ENSG00000113946; TAA
PRTETAKMY

SEQ ID NO: 14501 - protein, 9 aa, Homo sapiens
  misc_feature: Table A; Target 14501; HLA-A*24:02; CLDN16; ENSG00000113946; TAA
PYIKVRICF

SEQ ID NO: 14502 - protein, 8 aa, Homo sapiens
  misc_feature: Table A; Target 14502; HLA-B*07:02; CLDN16; ENSG00000113946; TAA
PYSLRKAY

SEQ ID NO: 14503 - protein, 11 aa, Homo sapiens
  misc_feature: Table A; Target 14503; HLA-A*68:01; CLDN16; ENSG00000113946; TAA
QVPETQKTDTR

SEQ ID NO: 14504 - protein, 9 aa, Homo sapiens
  misc_feature: Table A; Target 14504; HLA-A*23:01; CLDN16; ENSG00000113946; TAA
QYIACFFAF

SEQ ID NO: 14505 - protein, 9 aa, Homo sapiens
  misc_feature: Table A; Target 14505; HLA-A*24:02; CLDN16; ENSG00000113946; TAA
QYIACFFAF

SEQ ID NO: 14506 - protein, 11 aa, Homo sapiens
  misc_feature: Table A; Target 14506; HLA-B*15:03; CLDN16; ENSG00000113946; TAA
RKAYSAAGVSM

SEQ ID NO: 14507 - protein, 9 aa, Homo sapiens
  misc_feature: Table A; Target 14507; HLA-A*03:01; CLDN16; ENSG00000113946; TAA
RNYPYSLRK

SEQ ID NO: 14508 - protein, 9 aa, Homo sapiens
  misc_feature: Table A; Target 14508; HLA-B*07:02; CLDN16; ENSG00000113946; TAA
RPVFSHCQV

SEQ ID NO: 14509 - protein, 9 aa, Homo sapiens
  misc_feature: Table A; Target 14509; HLA-B*56:01; CLDN16; ENSG00000113946; TAA
RPVFSHCQV

SEQ ID NO: 14510 - protein, 9 aa, Homo sapiens
  misc_feature: Table A; Target 14510; HLA-B*57:01; CLDN16; ENSG00000113946; TAA
RSTLVLHNI

SEQ ID NO: 14511 - protein, 9 aa, Homo sapiens
  misc_feature: Table A; Target 14511; HLA-B*58:01; CLDN16; ENSG00000113946; TAA
RSTLVLHNI

SEQ ID NO: 14512 - protein, 10 aa, Homo sapiens
  misc_feature: Table A; Target 14512; HLA-B*57:01; CLDN16; ENSG00000113946; TAA
RSTLVLHNIF

SEQ ID NO: 14513 - protein, 9 aa, Homo sapiens
  misc_feature: Table A; Target 14513; HLA-C*01:02; CLDN16; ENSG00000113946; TAA
RTPLLVTAC

SEQ ID NO: 14514 - protein, 8 aa, Homo sapiens
  misc_feature: Table A; Target 14514; HLA-C*12:03; CLDN16; ENSG00000113946; TAA
SAAGVSMA

SEQ ID NO: 14515 - protein, 9 aa, Homo sapiens
  misc_feature: Table A; Target 14515; HLA-A*03:01; CLDN16; ENSG00000113946; TAA
SAAGVSMAK

SEQ ID NO: 14516 - protein, 9 aa, Homo sapiens
  misc_feature: Table A; Target 14516; HLA-A*03:02; CLDN16; ENSG00000113946; TAA
SAAGVSMAK

SEQ ID NO: 14517 - protein, 9 aa, Homo sapiens
  misc_feature: Table A; Target 14517; HLA-A*11:01; CLDN16; ENSG00000113946; TAA
SAAGVSMAK

SEQ ID NO: 14518 - protein, 9 aa, Homo sapiens
  misc_feature: Table A; Target 14518; HLA-A*25:01; CLDN16; ENSG00000113946; TAA
SAAGVSMAK

SEQ ID NO: 14519 - protein, 9 aa, Homo sapiens
  misc_feature: Table A; Target 14519; HLA-A*26:01; CLDN16; ENSG00000113946; TAA
SAAGVSMAK

SEQ ID NO: 14520 - protein, 9 aa, Homo sapiens
  misc_feature: Table A; Target 14520; HLA-A*30:02; CLDN16; ENSG00000113946; TAA
SAAGVSMAK

SEQ ID NO: 14521 - protein, 9 aa, Homo sapiens
  misc_feature: Table A; Target 14521; HLA-A*31:01; CLDN16; ENSG00000113946; TAA
SAAGVSMAK

SEQ ID NO: 14522 - protein, 9 aa, Homo sapiens
  misc_feature: Table A; Target 14522; HLA-A*32:01; CLDN16; ENSG00000113946; TAA
SAAGVSMAK

SEQ ID NO: 14523 - protein, 9 aa, Homo sapiens
  misc_feature: Table A; Target 14523; HLA-A*33:01; CLDN16; ENSG00000113946; TAA
SAAGVSMAK

SEQ ID NO: 14524 - protein, 9 aa, Homo sapiens
  misc_feature: Table A; Target 14524; HLA-A*33:03; CLDN16; ENSG00000113946; TAA
SAAGVSMAK

SEQ ID NO: 14525 - protein, 9 aa, Homo sapiens
  misc_feature: Table A; Target 14525; HLA-A*68:01; CLDN16; ENSG00000113946; TAA
SAAGVSMAK

SEQ ID NO: 14526 - protein, 9 aa, Homo sapiens
  misc_feature: Table A; Target 14526; HLA-A*68:02; CLDN16; ENSG00000113946; TAA
SAAGVSMAK

SEQ ID NO: 14527 - protein, 9 aa, Homo sapiens
  misc_feature: Table A; Target 14527; HLA-B*07:02; CLDN16; ENSG00000113946; TAA
SAAGVSMAK

SEQ ID NO: 14528 - protein, 9 aa, Homo sapiens
  misc_feature: Table A; Target 14528; HLA-B*13:02; CLDN16; ENSG00000113946; TAA
SAAGVSMAK

SEQ ID NO: 14529 - protein, 9 aa, Homo sapiens
  misc_feature: Table A; Target 14529; HLA-B*27:02; CLDN16; ENSG00000113946; TAA
SAAGVSMAK

SEQ ID NO: 14530 - protein, 9 aa, Homo sapiens
  misc_feature: Table A; Target 14530; HLA-B*27:05; CLDN16; ENSG00000113946; TAA
SAAGVSMAK

SEQ ID NO: 14531 - protein, 9 aa, Homo sapiens
  misc_feature: Table A; Target 14531; HLA-B*35:01; CLDN16; ENSG00000113946; TAA
SAAGVSMAK

SEQ ID NO: 14532 - protein, 9 aa, Homo sapiens
  misc_feature: Table A; Target 14532; HLA-B*35:03; CLDN16; ENSG00000113946; TAA
SAAGVSMAK

SEQ ID NO: 14533 - protein, 9 aa, Homo sapiens
  misc_feature: Table A; Target 14533; HLA-B*46:01; CLDN16; ENSG00000113946; TAA
SAAGVSMAK

SEQ ID NO: 14534 - protein, 9 aa, Homo sapiens
  misc_feature: Table A; Target 14534; HLA-B*51:01; CLDN16; ENSG00000113946; TAA
SAAGVSMAK

SEQ ID NO: 14535 - protein, 9 aa, Homo sapiens
  misc_feature: Table A; Target 14535; HLA-B*54:01; CLDN16; ENSG00000113946; TAA
SAAGVSMAK

SEQ ID NO: 14536 - protein, 9 aa, Homo sapiens
  misc_feature: Table A; Target 14536; HLA-B*56:01; CLDN16; ENSG00000113946; TAA
SAAGVSMAK

SEQ ID NO: 14537 - protein, 9 aa, Homo sapiens
  misc_feature: Table A; Target 14537; HLA-B*57:01; CLDN16; ENSG00000113946; TAA
SAAGVSMAK

SEQ ID NO: 14538 - protein, 9 aa, Homo sapiens
  misc_feature: Table A; Target 14538; HLA-B*58:01; CLDN16; ENSG00000113946; TAA
SAAGVSMAK

SEQ ID NO: 14539 - protein, 9 aa, Homo sapiens
  misc_feature: Table A; Target 14539; HLA-C*01:02; CLDN16; ENSG00000113946; TAA
SAAGVSMAK

SEQ ID NO: 14540 - protein, 9 aa, Homo sapiens
  misc_feature: Table A; Target 14540; HLA-C*02:02; CLDN16; ENSG00000113946; TAA
SAAGVSMAK

SEQ ID NO: 14541 - protein, 9 aa, Homo sapiens
  misc_feature: Table A; Target 14541; HLA-C*03:03; CLDN16; ENSG00000113946; TAA
SAAGVSMAK

SEQ ID NO: 14542 - protein, 9 aa, Homo sapiens
  misc_feature: Table A; Target 14542; HLA-C*03:04; CLDN16; ENSG00000113946; TAA
SAAGVSMAK

SEQ ID NO: 14543 - protein, 9 aa, Homo sapiens
  misc_feature: Table A; Target 14543; HLA-C*04:01; CLDN16; ENSG00000113946; TAA
SAAGVSMAK

SEQ ID NO: 14544 - protein, 9 aa, Homo sapiens
  misc_feature: Table A; Target 14544; HLA-C*05:01; CLDN16; ENSG00000113946; TAA
SAAGVSMAK

SEQ ID NO: 14545 - protein, 9 aa, Homo sapiens
  misc_feature: Table A; Target 14545; HLA-C*06:02; CLDN16; ENSG00000113946; TAA
SAAGVSMAK

SEQ ID NO: 14546 - protein, 9 aa, Homo sapiens
  misc_feature: Table A; Target 14546; HLA-C*07:01; CLDN16; ENSG00000113946; TAA
SAAGVSMAK

SEQ ID NO: 14547 - protein, 9 aa, Homo sapiens
  misc_feature: Table A; Target 14547; HLA-C*07:02; CLDN16; ENSG00000113946; TAA
SAAGVSMAK

SEQ ID NO: 14548 - protein, 9 aa, Homo sapiens
  misc_feature: Table A; Target 14548; HLA-C*07:04; CLDN16; ENSG00000113946; TAA
SAAGVSMAK

SEQ ID NO: 14549 - protein, 9 aa, Homo sapiens
  misc_feature: Table A; Target 14549; HLA-C*07:06; CLDN16; ENSG00000113946; TAA
SAAGVSMAK

SEQ ID NO: 14550 - protein, 9 aa, Homo sapiens
  misc_feature: Table A; Target 14550; HLA-C*12:03; CLDN16; ENSG00000113946; TAA
SAAGVSMAK

SEQ ID NO: 14551 - protein, 9 aa, Homo sapiens
  misc_feature: Table A; Target 14551; HLA-C*16:01; CLDN16; ENSG00000113946; TAA
SAAGVSMAK

SEQ ID NO: 14552 - protein, 9 aa, Homo sapiens
  misc_feature: Table A; Target 14552; HLA-C*16:02; CLDN16; ENSG00000113946; TAA
SAAGVSMAK

SEQ ID NO: 14553 - protein, 9 aa, Homo sapiens
  misc_feature: Table A; Target 14553; HLA-C*16:04; CLDN16; ENSG00000113946; TAA
SAAGVSMAK

SEQ ID NO: 14554 - protein, 10 aa, Homo sapiens
  misc_feature: Table A; Target 14554; HLA-C*06:02; CLDN16; ENSG00000113946; TAA
SAAGVSMAKS

SEQ ID NO: 14555 - protein, 11 aa, Homo sapiens
  misc_feature: Table A; Target 14555; HLA-A*25:01; CLDN16; ENSG00000113946; TAA
SAAGVSMAKSY

SEQ ID NO: 14556 - protein, 11 aa, Homo sapiens
  misc_feature: Table A; Target 14556; HLA-A*26:01; CLDN16; ENSG00000113946; TAA
SAAGVSMAKSY

SEQ ID NO: 14557 - protein, 11 aa, Homo sapiens
  misc_feature: Table A; Target 14557; HLA-A*29:02; CLDN16; ENSG00000113946; TAA
SAAGVSMAKSY

SEQ ID NO: 14558 - protein, 11 aa, Homo sapiens
  misc_feature: Table A; Target 14558; HLA-A*30:02; CLDN16; ENSG00000113946; TAA
SAAGVSMAKSY

SEQ ID NO: 14559 - protein, 11 aa, Homo sapiens
  misc_feature: Table A; Target 14559; HLA-A*32:01; CLDN16; ENSG00000113946; TAA
SAAGVSMAKSY

SEQ ID NO: 14560 - protein, 11 aa, Homo sapiens
  misc_feature: Table A; Target 14560; HLA-A*68:01; CLDN16; ENSG00000113946; TAA
SAAGVSMAKSY

SEQ ID NO: 14561 - protein, 11 aa, Homo sapiens
  misc_feature: Table A; Target 14561; HLA-B*15:01; CLDN16; ENSG00000113946; TAA
SAAGVSMAKSY

SEQ ID NO: 14562 - protein, 11 aa, Homo sapiens
  misc_feature: Table A; Target 14562; HLA-B*27:05; CLDN16; ENSG00000113946; TAA
SAAGVSMAKSY

SEQ ID NO: 14563 - protein, 11 aa, Homo sapiens
  misc_feature: Table A; Target 14563; HLA-B*35:01; CLDN16; ENSG00000113946; TAA
SAAGVSMAKSY

SEQ ID NO: 14564 - protein, 11 aa, Homo sapiens
  misc_feature: Table A; Target 14564; HLA-B*44:02; CLDN16; ENSG00000113946; TAA
SAAGVSMAKSY

SEQ ID NO: 14565 - protein, 11 aa, Homo sapiens
  misc_feature: Table A; Target 14565; HLA-B*44:03; CLDN16; ENSG00000113946; TAA
SAAGVSMAKSY

SEQ ID NO: 14566 - protein, 11 aa, Homo sapiens
  misc_feature: Table A; Target 14566; HLA-B*46:01; CLDN16; ENSG00000113946; TAA
SAAGVSMAKSY

SEQ ID NO: 14567 - protein, 11 aa, Homo sapiens
  misc_feature: Table A; Target 14567; HLA-B*55:01; CLDN16; ENSG00000113946; TAA
SAAGVSMAKSY

SEQ ID NO: 14568 - protein, 11 aa, Homo sapiens
  misc_feature: Table A; Target 14568; HLA-B*58:01; CLDN16; ENSG00000113946; TAA
SAAGVSMAKSY

SEQ ID NO: 14569 - protein, 11 aa, Homo sapiens
  misc_feature: Table A; Target 14569; HLA-C*02:02; CLDN16; ENSG00000113946; TAA
SAAGVSMAKSY

SEQ ID NO: 14570 - protein, 11 aa, Homo sapiens
  misc_feature: Table A; Target 14570; HLA-C*03:03; CLDN16; ENSG00000113946; TAA
SAAGVSMAKSY

SEQ ID NO: 14571 - protein, 11 aa, Homo sapiens
  misc_feature: Table A; Target 14571; HLA-C*03:04; CLDN16; ENSG00000113946; TAA
SAAGVSMAKSY

SEQ ID NO: 14572 - protein, 11 aa, Homo sapiens
  misc_feature: Table A; Target 14572; HLA-C*04:01; CLDN16; ENSG00000113946; TAA
SAAGVSMAKSY

SEQ ID NO: 14573 - protein, 11 aa, Homo sapiens
  misc_feature: Table A; Target 14573; HLA-C*06:02; CLDN16; ENSG00000113946; TAA
SAAGVSMAKSY

SEQ ID NO: 14574 - protein, 11 aa, Homo sapiens
  misc_feature: Table A; Target 14574; HLA-C*07:01; CLDN16; ENSG00000113946; TAA
SAAGVSMAKSY

SEQ ID NO: 14575 - protein, 11 aa, Homo sapiens
  misc_feature: Table A; Target 14575; HLA-C*07:04; CLDN16; ENSG00000113946; TAA
SAAGVSMAKSY

SEQ ID NO: 14576 - protein, 11 aa, Homo sapiens
  misc_feature: Table A; Target 14576; HLA-C*07:06; CLDN16; ENSG00000113946; TAA
SAAGVSMAKSY

SEQ ID NO: 14577 - protein, 11 aa, Homo sapiens
  misc_feature: Table A; Target 14577; HLA-C*12:03; CLDN16; ENSG00000113946; TAA
SAAGVSMAKSY

SEQ ID NO: 14578 - protein, 11 aa, Homo sapiens
  misc_feature: Table A; Target 14578; HLA-C*16:01; CLDN16; ENSG00000113946; TAA
SAAGVSMAKSY

SEQ ID NO: 14579 - protein, 11 aa, Homo sapiens
  misc_feature: Table A; Target 14579; HLA-C*16:02; CLDN16; ENSG00000113946; TAA
SAAGVSMAKSY

SEQ ID NO: 14580 - protein, 11 aa, Homo sapiens
  misc_feature: Table A; Target 14580; HLA-C*16:04; CLDN16; ENSG00000113946; TAA
SAAGVSMAKSY

SEQ ID NO: 14581 - protein, 10 aa, Homo sapiens
  misc_feature: Table A; Target 14581; HLA-A*25:01; CLDN16; ENSG00000113946; TAA
SAGFLIVATW

SEQ ID NO: 14582 - protein, 10 aa, Homo sapiens
  misc_feature: Table A; Target 14582; HLA-B*44:02; CLDN16; ENSG00000113946; TAA
SAGFLIVATW

SEQ ID NO: 14583 - protein, 10 aa, Homo sapiens
  misc_feature: Table A; Target 14583; HLA-B*44:03; CLDN16; ENSG00000113946; TAA
SAGFLIVATW

SEQ ID NO: 14584 - protein, 10 aa, Homo sapiens
  misc_feature: Table A; Target 14584; HLA-B*57:01; CLDN16; ENSG00000113946; TAA
SAGFLIVATW

SEQ ID NO: 14585 - protein, 9 aa, Homo sapiens
  misc_feature: Table A; Target 14585; HLA-A*11:01; CLDN16; ENSG00000113946; TAA
SAPRTETAK

SEQ ID NO: 14586 - protein, 9 aa, Homo sapiens
  misc_feature: Table A; Target 14586; HLA-C*01:02; CLDN16; ENSG00000113946; TAA
SAPRTETAK

SEQ ID NO: 14587 - protein, 9 aa, Homo sapiens
  misc_feature: Table A; Target 14587; HLA-A*03:01; CLDN16; ENSG00000113946; TAA
SILAEHPLK

SEQ ID NO: 14588 - protein, 9 aa, Homo sapiens
  misc_feature: Table A; Target 14588; HLA-A*03:02; CLDN16; ENSG00000113946; TAA
SILAEHPLK

SEQ ID NO: 14589 - protein, 9 aa, Homo sapiens
  misc_feature: Table A; Target 14589; HLA-A*11:01; CLDN16; ENSG00000113946; TAA
SILAEHPLK

SEQ ID NO: 14590 - protein, 10 aa, Homo sapiens
  misc_feature: Table A; Target 14590; HLA-A*02:01; CLDN16; ENSG00000113946; TAA
SILAEHPLKL

SEQ ID NO: 14591 - protein, 10 aa, Homo sapiens
  misc_feature: Table A; Target 14591; HLA-A*02:03; CLDN16; ENSG00000113946; TAA
SILAEHPLKL

SEQ ID NO: 14592 - protein, 10 aa, Homo sapiens
  misc_feature: Table A; Target 14592; HLA-A*02:04; CLDN16; ENSG00000113946; TAA
SILAEHPLKL

SEQ ID NO: 14593 - protein, 10 aa, Homo sapiens
  misc_feature: Table A; Target 14593; HLA-A*03:01; CLDN16; ENSG00000113946; TAA
SILAEHPLKL

SEQ ID NO: 14594 - protein, 10 aa, Homo sapiens
  misc_feature: Table A; Target 14594; HLA-A*03:01; CLDN16; ENSG00000113946; TAA
SMAKSYSAPR

SEQ ID NO: 14595 - protein, 10 aa, Homo sapiens
  misc_feature: Table A; Target 14595; HLA-C*07:06; CLDN16; ENSG00000113946; TAA
SMAKSYSAPR

SEQ ID NO: 14596 - protein, 8 aa, Homo sapiens
  misc_feature: Table A; Target 14596; HLA-C*06:02; CLDN16; ENSG00000113946; TAA
SRHLQQGV

SEQ ID NO: 14597 - protein, 9 aa, Homo sapiens
  misc_feature: Table A; Target 14597; HLA-B*27:05; CLDN16; ENSG00000113946; TAA
SRHLQQGVR

SEQ ID NO: 14598 - protein, 10 aa, Homo sapiens
  misc_feature: Table A; Target 14598; HLA-B*27:05; CLDN16; ENSG00000113946; TAA
SRHLQQGVRK

SEQ ID NO: 14599 - protein, 9 aa, Homo sapiens
  misc_feature: Table A; Target 14599; HLA-B*27:05; CLDN16; ENSG00000113946; TAA
SRTPLLVTA

SEQ ID NO: 14600 - protein, 9 aa, Homo sapiens
  misc_feature: Table A; Target 14600; HLA-B*57:01; CLDN16; ENSG00000113946; TAA
STLVLHNIF

SEQ ID NO: 14601 - protein, 10 aa, Homo sapiens
  misc_feature: Table A; Target 14601; HLA-A*68:02; CLDN16; ENSG00000113946; TAA
STLVLHNIFL

SEQ ID NO: 14602 - protein, 9 aa, Homo sapiens
  misc_feature: Table A; Target 14602; HLA-A*29:02; CLDN16; ENSG00000113946; TAA
SVWYAVDVY

SEQ ID NO: 14603 - protein, 9 aa, Homo sapiens
  misc_feature: Table A; Target 14603; HLA-A*30:02; CLDN16; ENSG00000113946; TAA
SVWYAVDVY

SEQ ID NO: 14604 - protein, 9 aa, Homo sapiens
  misc_feature: Table A; Target 14604; HLA-B*35:01; CLDN16; ENSG00000113946; TAA
SVWYAVDVY

SEQ ID NO: 14605 - protein, 10 aa, Homo sapiens
  misc_feature: Table A; Target 14605; HLA-A*02:07; CLDN16; ENSG00000113946; TAA
SVWYAVDVYV

SEQ ID NO: 14606 - protein, 10 aa, Homo sapiens
  misc_feature: Table A; Target 14606; HLA-A*68:02; CLDN16; ENSG00000113946; TAA
SVWYAVDVYV

SEQ ID NO: 14607 - protein, 10 aa, Homo sapiens
  misc_feature: Table A; Target 14607; HLA-C*14:02; CLDN16; ENSG00000113946; TAA
SYSAPRTETA

SEQ ID NO: 14608 - protein, 11 aa, Homo sapiens
  misc_feature: Table A; Target 14608; HLA-C*07:02; CLDN16; ENSG00000113946; TAA
SYSAPRTETAK

SEQ ID NO: 14609 - protein, 8 aa, Homo sapiens
  misc_feature: Table A; Target 14609; HLA-C*07:01; CLDN16; ENSG00000113946; TAA
TACLYYSY

SEQ ID NO: 14610 - protein, 8 aa, Homo sapiens
  misc_feature: Table A; Target 14610; HLA-C*05:01; CLDN16; ENSG00000113946; TAA
TADILAGF

SEQ ID NO: 14611 - protein, 10 aa, Homo sapiens
  misc_feature: Table A; Target 14611; HLA-C*05:01; CLDN16; ENSG00000113946; TAA
TADILAGFGF

SEQ ID NO: 14612 - protein, 10 aa, Homo sapiens
  misc_feature: Table A; Target 14612; HLA-A*68:01; CLDN16; ENSG00000113946; TAA
TAKMYAVDTR

SEQ ID NO: 14613 - protein, 9 aa, Homo sapiens
  misc_feature: Table A; Target 14613; HLA-B*35:03; CLDN16; ENSG00000113946; TAA
TCDEYDSIL

SEQ ID NO: 14614 - protein, 9 aa, Homo sapiens
  misc_feature: Table A; Target 14614; HLA-C*05:01; CLDN16; ENSG00000113946; TAA
TCDEYDSIL

SEQ ID NO: 14615 - protein, 8 aa, Homo sapiens
  misc_feature: Table A; Target 14615; HLA-C*06:02; CLDN16; ENSG00000113946; TAA
TETAKMYA

SEQ ID NO: 14616 - protein, 9 aa, Homo sapiens
  misc_feature: Table A; Target 14616; HLA-A*30:01; CLDN16; ENSG00000113946; TAA
TETAKMYAV

SEQ ID NO: 14617 - protein, 9 aa, Homo sapiens
  misc_feature: Table A; Target 14617; HLA-B*08:01; CLDN16; ENSG00000113946; TAA
TETAKMYAV

SEQ ID NO: 14618 - protein, 9 aa, Homo sapiens
  misc_feature: Table A; Target 14618; HLA-B*13:02; CLDN16; ENSG00000113946; TAA
TETAKMYAV

SEQ ID NO: 14619 - protein, 9 aa, Homo sapiens
  misc_feature: Table A; Target 14619; HLA-B*18:01; CLDN16; ENSG00000113946; TAA
TETAKMYAV

SEQ ID NO: 14620 - protein, 9 aa, Homo sapiens
  misc_feature: Table A; Target 14620; HLA-B*37:01; CLDN16; ENSG00000113946; TAA
TETAKMYAV

SEQ ID NO: 14621 - protein, 9 aa, Homo sapiens
  misc_feature: Table A; Target 14621; HLA-B*40:01; CLDN16; ENSG00000113946; TAA
TETAKMYAV

SEQ ID NO: 14622 - protein, 9 aa, Homo sapiens
  misc_feature: Table A; Target 14622; HLA-B*40:02; CLDN16; ENSG00000113946; TAA
TETAKMYAV

SEQ ID NO: 14623 - protein, 9 aa, Homo sapiens
  misc_feature: Table A; Target 14623; HLA-B*44:03; CLDN16; ENSG00000113946; TAA
TETAKMYAV

SEQ ID NO: 14624 - protein, 9 aa, Homo sapiens
  misc_feature: Table A; Target 14624; HLA-B*49:01; CLDN16; ENSG00000113946; TAA
TETAKMYAV

SEQ ID NO: 14625 - protein, 9 aa, Homo sapiens
  misc_feature: Table A; Target 14625; HLA-C*16:02; CLDN16; ENSG00000113946; TAA
TETAKMYAV

SEQ ID NO: 14626 - protein, 9 aa, Homo sapiens
  misc_feature: Table A; Target 14626; HLA-C*01:02; CLDN16; ENSG00000113946; TAA
TLLIAGTPG

SEQ ID NO: 14627 - protein, 9 aa, Homo sapiens
  misc_feature: Table A; Target 14627; HLA-A*02:01; CLDN16; ENSG00000113946; TAA
TLLLGLDCV

SEQ ID NO: 14628 - protein, 9 aa, Homo sapiens
  misc_feature: Table A; Target 14628; HLA-A*02:04; CLDN16; ENSG00000113946; TAA
TLLLGLDCV

SEQ ID NO: 14629 - protein, 9 aa, Homo sapiens
  misc_feature: Table A; Target 14629; HLA-A*02:01; CLDN16; ENSG00000113946; TAA
TLVLHNIFL

SEQ ID NO: 14630 - protein, 9 aa, Homo sapiens
  misc_feature: Table A; Target 14630; HLA-A*02:03; CLDN16; ENSG00000113946; TAA
TLVLHNIFL

SEQ ID NO: 14631 - protein, 9 aa, Homo sapiens
  misc_feature: Table A; Target 14631; HLA-A*02:04; CLDN16; ENSG00000113946; TAA
TLVLHNIFL

SEQ ID NO: 14632 - protein, 9 aa, Homo sapiens
  misc_feature: Table A; Target 14632; HLA-A*02:03; CLDN16; ENSG00000113946; TAA
TMRDLLQYI

SEQ ID NO: 14633 - protein, 9 aa, Homo sapiens
  misc_feature: Table A; Target 14633; HLA-A*02:04; CLDN16; ENSG00000113946; TAA
TMRDLLQYI

SEQ ID NO: 14634 - protein, 8 aa, Homo sapiens
  misc_feature: Table A; Target 14634; HLA-B*56:01; CLDN16; ENSG00000113946; TAA
TPGIIGSV

SEQ ID NO: 14635 - protein, 9 aa, Homo sapiens
  misc_feature: Table A; Target 14635; HLA-A*25:01; CLDN16; ENSG00000113946; TAA
TPGIIGSVW

SEQ ID NO: 14636 - protein, 9 aa, Homo sapiens
  misc_feature: Table A; Target 14636; HLA-B*07:02; CLDN16; ENSG00000113946; TAA
TPGIIGSVW

SEQ ID NO: 14637 - protein, 9 aa, Homo sapiens
  misc_feature: Table A; Target 14637; HLA-B*35:01; CLDN16; ENSG00000113946; TAA
TPGIIGSVW

SEQ ID NO: 14638 - protein, 9 aa, Homo sapiens
  misc_feature: Table A; Target 14638; HLA-B*35:03; CLDN16; ENSG00000113946; TAA
TPGIIGSVW

SEQ ID NO: 14639 - protein, 9 aa, Homo sapiens
  misc_feature: Table A; Target 14639; HLA-B*38:01; CLDN16; ENSG00000113946; TAA
TPGIIGSVW

SEQ ID NO: 14640 - protein, 9 aa, Homo sapiens
  misc_feature: Table A; Target 14640; HLA-B*44:02; CLDN16; ENSG00000113946; TAA
TPGIIGSVW

SEQ ID NO: 14641 - protein, 9 aa, Homo sapiens
  misc_feature: Table A; Target 14641; HLA-B*44:03; CLDN16; ENSG00000113946; TAA
TPGIIGSVW

SEQ ID NO: 14642 - protein, 9 aa, Homo sapiens
  misc_feature: Table A; Target 14642; HLA-B*57:01; CLDN16; ENSG00000113946; TAA
TPGIIGSVW

SEQ ID NO: 14643 - protein, 9 aa, Homo sapiens
  misc_feature: Table A; Target 14643; HLA-B*58:01; CLDN16; ENSG00000113946; TAA
TPGIIGSVW

SEQ ID NO: 14644 - protein, 9 aa, Homo sapiens
  misc_feature: Table A; Target 14644; HLA-C*07:02; CLDN16; ENSG00000113946; TAA
TPGIIGSVW

SEQ ID NO: 14645 - protein, 9 aa, Homo sapiens
  misc_feature: Table A; Target 14645; HLA-C*07:06; CLDN16; ENSG00000113946; TAA
TPGIIGSVW

SEQ ID NO: 14646 - protein, 8 aa, Homo sapiens
  misc_feature: Table A; Target 14646; HLA-B*54:01; CLDN16; ENSG00000113946; TAA
TPLLVTAC

SEQ ID NO: 14647 - protein, 8 aa, Homo sapiens
  misc_feature: Table A; Target 14647; HLA-B*55:01; CLDN16; ENSG00000113946; TAA
TPLLVTAC

SEQ ID NO: 14648 - protein, 8 aa, Homo sapiens
  misc_feature: Table A; Target 14648; HLA-B*56:01; CLDN16; ENSG00000113946; TAA
TPLLVTAC

SEQ ID NO: 14649 - protein, 9 aa, Homo sapiens
  misc_feature: Table A; Target 14649; HLA-B*07:02; CLDN16; ENSG00000113946; TAA
TPLLVTACL

SEQ ID NO: 14650 - protein, 9 aa, Homo sapiens
  misc_feature: Table A; Target 14650; HLA-B*35:01; CLDN16; ENSG00000113946; TAA
TPLLVTACL

SEQ ID NO: 14651 - protein, 9 aa, Homo sapiens
  misc_feature: Table A; Target 14651; HLA-B*35:03; CLDN16; ENSG00000113946; TAA
TPLLVTACL

SEQ ID NO: 14652 - protein, 9 aa, Homo sapiens
  misc_feature: Table A; Target 14652; HLA-B*54:01; CLDN16; ENSG00000113946; TAA
TPLLVTACL

SEQ ID NO: 14653 - protein, 9 aa, Homo sapiens
  misc_feature: Table A; Target 14653; HLA-B*56:01; CLDN16; ENSG00000113946; TAA
TPLLVTACL

SEQ ID NO: 14654 - protein, 9 aa, Homo sapiens
  misc_feature: Table A; Target 14654; HLA-C*07:02; CLDN16; ENSG00000113946; TAA
TPLLVTACL

SEQ ID NO: 14655 - protein, 10 aa, Homo sapiens
  misc_feature: Table A; Target 14655; HLA-B*35:01; CLDN16; ENSG00000113946; TAA
TPLLVTACLY

SEQ ID NO: 14656 - protein, 10 aa, Homo sapiens
  misc_feature: Table A; Target 14656; HLA-C*07:01; CLDN16; ENSG00000113946; TAA
TPLLVTACLY

SEQ ID NO: 14657 - protein, 9 aa, Homo sapiens
  misc_feature: Table A; Target 14657; HLA-A*32:01; CLDN16; ENSG00000113946; TAA
TQKTDTRHL

SEQ ID NO: 14658 - protein, 8 aa, Homo sapiens
  misc_feature: Table A; Target 14658; HLA-B*51:01; CLDN16; ENSG00000113946; TAA
TSRTPLLV

SEQ ID NO: 14659 - protein, 10 aa, Homo sapiens
  misc_feature: Table A; Target 14659; HLA-A*31:01; CLDN16; ENSG00000113946; TAA
TSRTPLLVTA

SEQ ID NO: 14660 - protein, 10 aa, Homo sapiens
  misc_feature: Table A; Target 14660; HLA-B*40:02; CLDN16; ENSG00000113946; TAA
TSRTPLLVTA

SEQ ID NO: 14661 - protein, 10 aa, Homo sapiens
  misc_feature: Table A; Target 14661; HLA-B*54:01; CLDN16; ENSG00000113946; TAA
TSRTPLLVTA

SEQ ID NO: 14662 - protein, 10 aa, Homo sapiens
  misc_feature: Table A; Target 14662; HLA-B*56:01; CLDN16; ENSG00000113946; TAA
TSRTPLLVTA

SEQ ID NO: 14663 - protein, 10 aa, Homo sapiens
  misc_feature: Table A; Target 14663; HLA-C*06:02; CLDN16; ENSG00000113946; TAA
TSRTPLLVTA

SEQ ID NO: 14664 - protein, 10 aa, Homo sapiens
  misc_feature: Table A; Target 14664; HLA-C*07:02; CLDN16; ENSG00000113946; TAA
TSRTPLLVTA

SEQ ID NO: 14665 - protein, 8 aa, Homo sapiens
  misc_feature: Table A; Target 14665; HLA-A*23:01; CLDN16; ENSG00000113946; TAA
VAGATLLI

SEQ ID NO: 14666 - protein, 8 aa, Homo sapiens
  misc_feature: Table A; Target 14666; HLA-B*13:02; CLDN16; ENSG00000113946; TAA
VAGATLLI

SEQ ID NO: 14667 - protein, 8 aa, Homo sapiens
  misc_feature: Table A; Target 14667; HLA-B*51:01; CLDN16; ENSG00000113946; TAA
VAGATLLI

SEQ ID NO: 14668 - protein, 8 aa, Homo sapiens
  misc_feature: Table A; Target 14668; HLA-C*07:01; CLDN16; ENSG00000113946; TAA
VAGATLLI

SEQ ID NO: 14669 - protein, 10 aa, Homo sapiens
  misc_feature: Table A; Target 14669; HLA-A*30:01; CLDN16; ENSG00000113946; TAA
VDVYVERSTL

SEQ ID NO: 14670 - protein, 10 aa, Homo sapiens
  misc_feature: Table A; Target 14670; HLA-B*07:02; CLDN16; ENSG00000113946; TAA
VDVYVERSTL

SEQ ID NO: 14671 - protein, 10 aa, Homo sapiens
  misc_feature: Table A; Target 14671; HLA-B*40:02; CLDN16; ENSG00000113946; TAA
VDVYVERSTL

SEQ ID NO: 14672 - protein, 8 aa, Homo sapiens
  misc_feature: Table A; Target 14672; HLA-B*18:01; CLDN16; ENSG00000113946; TAA
VERSTLVL

SEQ ID NO: 14673 - protein, 8 aa, Homo sapiens
  misc_feature: Table A; Target 14673; HLA-B*40:02; CLDN16; ENSG00000113946; TAA
VERSTLVL

SEQ ID NO: 14674 - protein, 9 aa, Homo sapiens
  misc_feature: Table A; Target 14674; HLA-A*24:02; CLDN16; ENSG00000113946; TAA
VGPERNYPY

SEQ ID NO: 14675 - protein, 9 aa, Homo sapiens
  misc_feature: Table A; Target 14675; HLA-A*29:02; CLDN16; ENSG00000113946; TAA
VGPERNYPY

SEQ ID NO: 14676 - protein, 9 aa, Homo sapiens
  misc_feature: Table A; Target 14676; HLA-A*30:02; CLDN16; ENSG00000113946; TAA
VGPERNYPY

SEQ ID NO: 14677 - protein, 9 aa, Homo sapiens
  misc_feature: Table A; Target 14677; HLA-B*07:02; CLDN16; ENSG00000113946; TAA
VGPERNYPY

SEQ ID NO: 14678 - protein, 9 aa, Homo sapiens
  misc_feature: Table A; Target 14678; HLA-B*08:01; CLDN16; ENSG00000113946; TAA
VGPERNYPY

SEQ ID NO: 14679 - protein, 9 aa, Homo sapiens
  misc_feature: Table A; Target 14679; HLA-B*15:01; CLDN16; ENSG00000113946; TAA
VGPERNYPY

SEQ ID NO: 14680 - protein, 9 aa, Homo sapiens
  misc_feature: Table A; Target 14680; HLA-B*15:03; CLDN16; ENSG00000113946; TAA
VGPERNYPY

SEQ ID NO: 14681 - protein, 9 aa, Homo sapiens
  misc_feature: Table A; Target 14681; HLA-B*46:01; CLDN16; ENSG00000113946; TAA
VGPERNYPY

SEQ ID NO: 14682 - protein, 9 aa, Homo sapiens
  misc_feature: Table A; Target 14682; HLA-C*01:02; CLDN16; ENSG00000113946; TAA
VGPERNYPY

SEQ ID NO: 14683 - protein, 9 aa, Homo sapiens
  misc_feature: Table A; Target 14683; HLA-C*02:02; CLDN16; ENSG00000113946; TAA
VGPERNYPY

SEQ ID NO: 14684 - protein, 9 aa, Homo sapiens
  misc_feature: Table A; Target 14684; HLA-C*06:02; CLDN16; ENSG00000113946; TAA
VGPERNYPY

SEQ ID NO: 14685 - protein, 9 aa, Homo sapiens
  misc_feature: Table A; Target 14685; HLA-C*07:01; CLDN16; ENSG00000113946; TAA
VGPERNYPY

SEQ ID NO: 14686 - protein, 9 aa, Homo sapiens
  misc_feature: Table A; Target 14686; HLA-C*07:02; CLDN16; ENSG00000113946; TAA
VGPERNYPY

SEQ ID NO: 14687 - protein, 9 aa, Homo sapiens
  misc_feature: Table A; Target 14687; HLA-C*07:04; CLDN16; ENSG00000113946; TAA
VGPERNYPY

SEQ ID NO: 14688 - protein, 9 aa, Homo sapiens
  misc_feature: Table A; Target 14688; HLA-C*12:03; CLDN16; ENSG00000113946; TAA
VGPERNYPY

SEQ ID NO: 14689 - protein, 9 aa, Homo sapiens
  misc_feature: Table A; Target 14689; HLA-C*14:02; CLDN16; ENSG00000113946; TAA
VGPERNYPY

SEQ ID NO: 14690 - protein, 9 aa, Homo sapiens
  misc_feature: Table A; Target 14690; HLA-C*16:01; CLDN16; ENSG00000113946; TAA
VGPERNYPY

SEQ ID NO: 14691 - protein, 11 aa, Homo sapiens
  misc_feature: Table A; Target 14691; HLA-A*02:07; CLDN16; ENSG00000113946; TAA
VGPERNYPYSL

SEQ ID NO: 14692 - protein, 9 aa, Homo sapiens
  misc_feature: Table A; Target 14692; HLA-B*15:03; CLDN16; ENSG00000113946; TAA
VKFLPDEPY

SEQ ID NO: 14693 - protein, 9 aa, Homo sapiens
  misc_feature: Table A; Target 14693; HLA-A*02:01; CLDN16; ENSG00000113946; TAA
VLHNIFLGI

SEQ ID NO: 14694 - protein, 9 aa, Homo sapiens
  misc_feature: Table A; Target 14694; HLA-A*02:03; CLDN16; ENSG00000113946; TAA
VLHNIFLGI

SEQ ID NO: 14695 - protein, 9 aa, Homo sapiens
  misc_feature: Table A; Target 14695; HLA-A*02:04; CLDN16; ENSG00000113946; TAA
VLHNIFLGI

SEQ ID NO: 14696 - protein, 9 aa, Homo sapiens
  misc_feature: Table A; Target 14696; HLA-A*02:07; CLDN16; ENSG00000113946; TAA
VLHNIFLGI

SEQ ID NO: 14697 - protein, 9 aa, Homo sapiens
  misc_feature: Table A; Target 14697; HLA-A*24:02; CLDN16; ENSG00000113946; TAA
VLHNIFLGI

SEQ ID NO: 14698 - protein, 9 aa, Homo sapiens
  misc_feature: Table A; Target 14698; HLA-A*68:02; CLDN16; ENSG00000113946; TAA
VLHNIFLGI

SEQ ID NO: 14699 - protein, 9 aa, Homo sapiens
  misc_feature: Table A; Target 14699; HLA-B*13:02; CLDN16; ENSG00000113946; TAA
VLHNIFLGI

SEQ ID NO: 14700 - protein, 9 aa, Homo sapiens
  misc_feature: Table A; Target 14700; HLA-B*08:01; CLDN16; ENSG00000113946; TAA
VSMAKSYSA

SEQ ID NO: 14701 - protein, 9 aa, Homo sapiens
  misc_feature: Table A; Target 14701; HLA-B*54:01; CLDN16; ENSG00000113946; TAA
VSMAKSYSA

SEQ ID NO: 14702 - protein, 9 aa, Homo sapiens
  misc_feature: Table A; Target 14702; HLA-B*56:01; CLDN16; ENSG00000113946; TAA
VSMAKSYSA

SEQ ID NO: 14703 - protein, 11 aa, Homo sapiens
  misc_feature: Table A; Target 14703; HLA-A*31:01; CLDN16; ENSG00000113946; TAA
VSMAKSYSAPR

SEQ ID NO: 14704 - protein, 11 aa, Homo sapiens
  misc_feature: Table A; Target 14704; HLA-A*33:01; CLDN16; ENSG00000113946; TAA
VSMAKSYSAPR

SEQ ID NO: 14705 - protein, 9 aa, Homo sapiens
  misc_feature: Table A; Target 14705; HLA-A*01:01; CLDN16; ENSG00000113946; TAA
VTACLYYSY

SEQ ID NO: 14706 - protein, 9 aa, Homo sapiens
  misc_feature: Table A; Target 14706; HLA-A*29:02; CLDN16; ENSG00000113946; TAA
VTACLYYSY

SEQ ID NO: 14707 - protein, 9 aa, Homo sapiens
  misc_feature: Table A; Target 14707; HLA-A*30:02; CLDN16; ENSG00000113946; TAA
VTACLYYSY

SEQ ID NO: 14708 - protein, 8 aa, Homo sapiens
  misc_feature: Table A; Target 14708; HLA-B*13:02; CLDN16; ENSG00000113946; TAA
VVTRALMI

SEQ ID NO: 14709 - protein, 8 aa, Homo sapiens
  misc_feature: Table A; Target 14709; HLA-B*51:01; CLDN16; ENSG00000113946; TAA
VVTRALMI

SEQ ID NO: 14710 - protein, 10 aa, Homo sapiens
  misc_feature: Table A; Target 14710; HLA-B*54:01; CLDN16; ENSG00000113946; TAA
VVTRALMITA

SEQ ID NO: 14711 - protein, 10 aa, Homo sapiens
  misc_feature: Table A; Target 14711; HLA-B*56:01; CLDN16; ENSG00000113946; TAA
VVTRALMITA

SEQ ID NO: 14712 - protein, 8 aa, Homo sapiens
  misc_feature: Table A; Target 14712; HLA-A*23:01; CLDN16; ENSG00000113946; TAA
VYVERSTL

SEQ ID NO: 14713 - protein, 8 aa, Homo sapiens
  misc_feature: Table A; Target 14713; HLA-A*24:02; CLDN16; ENSG00000113946; TAA
VYVERSTL

SEQ ID NO: 14714 - protein, 8 aa, Homo sapiens
  misc_feature: Table A; Target 14714; HLA-A*32:01; CLDN16; ENSG00000113946; TAA
VYVERSTL

SEQ ID NO: 14715 - protein, 8 aa, Homo sapiens
  misc_feature: Table A; Target 14715; HLA-B*07:02; CLDN16; ENSG00000113946; TAA
VYVERSTL

SEQ ID NO: 14716 - protein, 8 aa, Homo sapiens
  misc_feature: Table A; Target 14716; HLA-B*08:01; CLDN16; ENSG00000113946; TAA
VYVERSTL

SEQ ID NO: 14717 - protein, 8 aa, Homo sapiens
  misc_feature: Table A; Target 14717; HLA-B*15:03; CLDN16; ENSG00000113946; TAA
VYVERSTL

SEQ ID NO: 14718 - protein, 8 aa, Homo sapiens
  misc_feature: Table A; Target 14718; HLA-B*46:01; CLDN16; ENSG00000113946; TAA
VYVERSTL

SEQ ID NO: 14719 - protein, 8 aa, Homo sapiens
  misc_feature: Table A; Target 14719; HLA-C*01:02; CLDN16; ENSG00000113946; TAA
VYVERSTL

SEQ ID NO: 14720 - protein, 8 aa, Homo sapiens
  misc_feature: Table A; Target 14720; HLA-C*03:04; CLDN16; ENSG00000113946; TAA
VYVERSTL

SEQ ID NO: 14721 - protein, 8 aa, Homo sapiens
  misc_feature: Table A; Target 14721; HLA-C*04:01; CLDN16; ENSG00000113946; TAA
VYVERSTL

SEQ ID NO: 14722 - protein, 8 aa, Homo sapiens
  misc_feature: Table A; Target 14722; HLA-C*07:01; CLDN16; ENSG00000113946; TAA
VYVERSTL

SEQ ID NO: 14723 - protein, 8 aa, Homo sapiens
  misc_feature: Table A; Target 14723; HLA-C*07:02; CLDN16; ENSG00000113946; TAA
VYVERSTL

SEQ ID NO: 14724 - protein, 8 aa, Homo sapiens
  misc_feature: Table A; Target 14724; HLA-C*14:02; CLDN16; ENSG00000113946; TAA
VYVERSTL

SEQ ID NO: 14725 - protein, 8 aa, Homo sapiens
  misc_feature: Table A; Target 14725; HLA-C*16:01; CLDN16; ENSG00000113946; TAA
VYVERSTL

SEQ ID NO: 14726 - protein, 8 aa, Homo sapiens
  misc_feature: Table A; Target 14726; HLA-C*16:02; CLDN16; ENSG00000113946; TAA
VYVERSTL

SEQ ID NO: 14727 - protein, 9 aa, Homo sapiens
  misc_feature: Table A; Target 14727; HLA-A*23:01; CLDN16; ENSG00000113946; TAA
VYVERSTLV

SEQ ID NO: 14728 - protein, 9 aa, Homo sapiens
  misc_feature: Table A; Target 14728; HLA-A*24:02; CLDN16; ENSG00000113946; TAA
VYVERSTLV

SEQ ID NO: 14729 - protein, 9 aa, Homo sapiens
  misc_feature: Table A; Target 14729; HLA-C*04:01; CLDN16; ENSG00000113946; TAA
VYVERSTLV

SEQ ID NO: 14730 - protein, 9 aa, Homo sapiens
  misc_feature: Table A; Target 14730; HLA-C*14:02; CLDN16; ENSG00000113946; TAA
VYVERSTLV

SEQ ID NO: 14731 - protein, 9 aa, Homo sapiens
  misc_feature: Table A; Target 14731; HLA-C*16:01; CLDN16; ENSG00000113946; TAA
VYVERSTLV

SEQ ID NO: 14732 - protein, 9 aa, Homo sapiens
  misc_feature: Table A; Target 14732; HLA-C*16:02; CLDN16; ENSG00000113946; TAA
VYVERSTLV

SEQ ID NO: 14733 - protein, 10 aa, Homo sapiens
  misc_feature: Table A; Target 14733; HLA-A*23:01; CLDN16; ENSG00000113946; TAA
VYVERSTLVL

SEQ ID NO: 14734 - protein, 10 aa, Homo sapiens
  misc_feature: Table A; Target 14734; HLA-A*24:02; CLDN16; ENSG00000113946; TAA
VYVERSTLVL

SEQ ID NO: 14735 - protein, 10 aa, Homo sapiens
  misc_feature: Table A; Target 14735; HLA-C*14:02; CLDN16; ENSG00000113946; TAA
VYVERSTLVL

SEQ ID NO: 14736 - protein, 8 aa, Homo sapiens
  misc_feature: Table A; Target 14736; HLA-B*18:01; CLDN16; ENSG00000113946; TAA
WECVTNAF

SEQ ID NO: 14737 - protein, 8 aa, Homo sapiens
  misc_feature: Table A; Target 14737; HLA-C*12:03; CLDN16; ENSG00000113946; TAA
YAVDVYVE

SEQ ID NO: 14738 - protein, 9 aa, Homo sapiens
  misc_feature: Table A; Target 14738; HLA-A*02:07; CLDN16; ENSG00000113946; TAA
YAVDVYVER

SEQ ID NO: 14739 - protein, 9 aa, Homo sapiens
  misc_feature: Table A; Target 14739; HLA-A*11:01; CLDN16; ENSG00000113946; TAA
YAVDVYVER

SEQ ID NO: 14740 - protein, 9 aa, Homo sapiens
  misc_feature: Table A; Target 14740; HLA-A*25:01; CLDN16; ENSG00000113946; TAA
YAVDVYVER

SEQ ID NO: 14741 - protein, 9 aa, Homo sapiens
  misc_feature: Table A; Target 14741; HLA-A*26:01; CLDN16; ENSG00000113946; TAA
YAVDVYVER

SEQ ID NO: 14742 - protein, 9 aa, Homo sapiens
  misc_feature: Table A; Target 14742; HLA-A*31:01; CLDN16; ENSG00000113946; TAA
YAVDVYVER

SEQ ID NO: 14743 - protein, 9 aa, Homo sapiens
  misc_feature: Table A; Target 14743; HLA-A*33:01; CLDN16; ENSG00000113946; TAA
YAVDVYVER

SEQ ID NO: 14744 - protein, 9 aa, Homo sapiens
  misc_feature: Table A; Target 14744; HLA-A*33:03; CLDN16; ENSG00000113946; TAA
YAVDVYVER

SEQ ID NO: 14745 - protein, 9 aa, Homo sapiens
  misc_feature: Table A; Target 14745; HLA-A*68:01; CLDN16; ENSG00000113946; TAA
YAVDVYVER

SEQ ID NO: 14746 - protein, 9 aa, Homo sapiens
  misc_feature: Table A; Target 14746; HLA-A*68:02; CLDN16; ENSG00000113946; TAA
YAVDVYVER

SEQ ID NO: 14747 - protein, 9 aa, Homo sapiens
  misc_feature: Table A; Target 14747; HLA-B*27:02; CLDN16; ENSG00000113946; TAA
YAVDVYVER

SEQ ID NO: 14748 - protein, 9 aa, Homo sapiens
  misc_feature: Table A; Target 14748; HLA-B*27:05; CLDN16; ENSG00000113946; TAA
YAVDVYVER

SEQ ID NO: 14749 - protein, 9 aa, Homo sapiens
  misc_feature: Table A; Target 14749; HLA-B*35:01; CLDN16; ENSG00000113946; TAA
YAVDVYVER

SEQ ID NO: 14750 - protein, 9 aa, Homo sapiens
  misc_feature: Table A; Target 14750; HLA-B*35:03; CLDN16; ENSG00000113946; TAA
YAVDVYVER

SEQ ID NO: 14751 - protein, 9 aa, Homo sapiens
  misc_feature: Table A; Target 14751; HLA-B*39:01; CLDN16; ENSG00000113946; TAA
YAVDVYVER

SEQ ID NO: 14752 - protein, 9 aa, Homo sapiens
  misc_feature: Table A; Target 14752; HLA-B*46:01; CLDN16; ENSG00000113946; TAA
YAVDVYVER

SEQ ID NO: 14753 - protein, 9 aa, Homo sapiens
  misc_feature: Table A; Target 14753; HLA-B*51:01; CLDN16; ENSG00000113946; TAA
YAVDVYVER

SEQ ID NO: 14754 - protein, 9 aa, Homo sapiens
  misc_feature: Table A; Target 14754; HLA-B*54:01; CLDN16; ENSG00000113946; TAA
YAVDVYVER

SEQ ID NO: 14755 - protein, 9 aa, Homo sapiens
  misc_feature: Table A; Target 14755; HLA-B*57:01; CLDN16; ENSG00000113946; TAA
YAVDVYVER

SEQ ID NO: 14756 - protein, 9 aa, Homo sapiens
  misc_feature: Table A; Target 14756; HLA-C*02:02; CLDN16; ENSG00000113946; TAA
YAVDVYVER

SEQ ID NO: 14757 - protein, 9 aa, Homo sapiens
  misc_feature: Table A; Target 14757; HLA-C*03:03; CLDN16; ENSG00000113946; TAA
YAVDVYVER

SEQ ID NO: 14758 - protein, 9 aa, Homo sapiens
  misc_feature: Table A; Target 14758; HLA-C*03:04; CLDN16; ENSG00000113946; TAA
YAVDVYVER

SEQ ID NO: 14759 - protein, 9 aa, Homo sapiens
  misc_feature: Table A; Target 14759; HLA-C*05:01; CLDN16; ENSG00000113946; TAA
YAVDVYVER

SEQ ID NO: 14760 - protein, 9 aa, Homo sapiens
  misc_feature: Table A; Target 14760; HLA-C*07:06; CLDN16; ENSG00000113946; TAA
YAVDVYVER

SEQ ID NO: 14761 - protein, 9 aa, Homo sapiens
  misc_feature: Table A; Target 14761; HLA-C*12:03; CLDN16; ENSG00000113946; TAA
YAVDVYVER

SEQ ID NO: 14762 - protein, 9 aa, Homo sapiens
  misc_feature: Table A; Target 14762; HLA-C*16:02; CLDN16; ENSG00000113946; TAA
YAVDVYVER

SEQ ID NO: 14763 - protein, 9 aa, Homo sapiens
  misc_feature: Table A; Target 14763; HLA-C*16:04; CLDN16; ENSG00000113946; TAA
YAVDVYVER

SEQ ID NO: 14764 - protein, 8 aa, Homo sapiens
  misc_feature: Table A; Target 14764; HLA-B*18:01; CLDN16; ENSG00000113946; TAA
YDSILAEH

SEQ ID NO: 14765 - protein, 8 aa, Homo sapiens
  misc_feature: Table A; Target 14765; HLA-B*37:01; CLDN16; ENSG00000113946; TAA
YDSILAEH

SEQ ID NO: 14766 - protein, 10 aa, Homo sapiens
  misc_feature: Table A; Target 14766; HLA-B*37:01; CLDN16; ENSG00000113946; TAA
YDSILAEHPL

SEQ ID NO: 14767 - protein, 10 aa, Homo sapiens
  misc_feature: Table A; Target 14767; HLA-B*40:02; CLDN16; ENSG00000113946; TAA
YDSILAEHPL

SEQ ID NO: 14768 - protein, 10 aa, Homo sapiens
  misc_feature: Table A; Target 14768; HLA-C*04:01; CLDN16; ENSG00000113946; TAA
YDSILAEHPL

SEQ ID NO: 14769 - protein, 10 aa, Homo sapiens
  misc_feature: Table A; Target 14769; HLA-C*06:02; CLDN16; ENSG00000113946; TAA
YDSILAEHPL

SEQ ID NO: 14770 - protein, 10 aa, Homo sapiens
  misc_feature: Table A; Target 14770; HLA-C*07:01; CLDN16; ENSG00000113946; TAA
YDSILAEHPL

SEQ ID NO: 14771 - protein, 10 aa, Homo sapiens
  misc_feature: Table A; Target 14771; HLA-C*07:04; CLDN16; ENSG00000113946; TAA
YDSILAEHPL

SEQ ID NO: 14772 - protein, 9 aa, Homo sapiens
  misc_feature: Table A; Target 14772; HLA-A*02:03; CLDN16; ENSG00000113946; TAA
YIKVRICFV

SEQ ID NO: 14773 - protein, 10 aa, Homo sapiens
  misc_feature: Table A; Target 14773; HLA-A*01:01; CLDN16; ENSG00000113946; TAA
YLFKDVGPER

SEQ ID NO: 14774 - protein, 10 aa, Homo sapiens
  misc_feature: Table A; Target 14774; HLA-A*02:01; CLDN16; ENSG00000113946; TAA
YLFKDVGPER

SEQ ID NO: 14775 - protein, 10 aa, Homo sapiens
  misc_feature: Table A; Target 14775; HLA-A*02:03; CLDN16; ENSG00000113946; TAA
YLFKDVGPER

SEQ ID NO: 14776 - protein, 10 aa, Homo sapiens
  misc_feature: Table A; Target 14776; HLA-A*02:07; CLDN16; ENSG00000113946; TAA
YLFKDVGPER

SEQ ID NO: 14777 - protein, 10 aa, Homo sapiens
  misc_feature: Table A; Target 14777; HLA-A*26:01; CLDN16; ENSG00000113946; TAA
YLFKDVGPER

SEQ ID NO: 14778 - protein, 8 aa, Homo sapiens
  misc_feature: Table A; Target 14778; HLA-B*51:01; CLDN16; ENSG00000113946; TAA
YPYSLRKA

SEQ ID NO: 14779 - protein, 8 aa, Homo sapiens
  misc_feature: Table A; Target 14779; HLA-B*54:01; CLDN16; ENSG00000113946; TAA
YPYSLRKA

SEQ ID NO: 14780 - protein, 8 aa, Homo sapiens
  misc_feature: Table A; Target 14780; HLA-B*55:01; CLDN16; ENSG00000113946; TAA
YPYSLRKA

SEQ ID NO: 14781 - protein, 8 aa, Homo sapiens
  misc_feature: Table A; Target 14781; HLA-B*56:01; CLDN16; ENSG00000113946; TAA
YPYSLRKA

SEQ ID NO: 14782 - protein, 9 aa, Homo sapiens
  misc_feature: Table A; Target 14782; HLA-A*29:02; CLDN16; ENSG00000113946; TAA
YPYSLRKAY

SEQ ID NO: 14783 - protein, 9 aa, Homo sapiens
  misc_feature: Table A; Target 14783; HLA-B*35:01; CLDN16; ENSG00000113946; TAA
YPYSLRKAY

SEQ ID NO: 14784 - protein, 9 aa, Homo sapiens
  misc_feature: Table A; Target 14784; HLA-B*51:01; CLDN16; ENSG00000113946; TAA
YPYSLRKAY

SEQ ID NO: 14785 - protein, 9 aa, Homo sapiens
  misc_feature: Table A; Target 14785; HLA-B*54:01; CLDN16; ENSG00000113946; TAA
YPYSLRKAY

SEQ ID NO: 14786 - protein, 9 aa, Homo sapiens
  misc_feature: Table A; Target 14786; HLA-B*55:01; CLDN16; ENSG00000113946; TAA
YPYSLRKAY

SEQ ID NO: 14787 - protein, 9 aa, Homo sapiens
  misc_feature: Table A; Target 14787; HLA-C*02:02; CLDN16; ENSG00000113946; TAA
YPYSLRKAY

SEQ ID NO: 14788 - protein, 10 aa, Homo sapiens
  misc_feature: Table A; Target 14788; HLA-B*54:01; CLDN16; ENSG00000113946; TAA
YPYSLRKAYS

SEQ ID NO: 14789 - protein, 11 aa, Homo sapiens
  misc_feature: Table A; Target 14789; HLA-B*08:01; CLDN16; ENSG00000113946; TAA
YPYSLRKAYSA

SEQ ID NO: 14790 - protein, 11 aa, Homo sapiens
  misc_feature: Table A; Target 14790; HLA-B*54:01; CLDN16; ENSG00000113946; TAA
YPYSLRKAYSA

SEQ ID NO: 14791 - protein, 11 aa, Homo sapiens
  misc_feature: Table A; Target 14791; HLA-B*56:01; CLDN16; ENSG00000113946; TAA
YPYSLRKAYSA

SEQ ID NO: 14792 - protein, 8 aa, Homo sapiens
  misc_feature: Table A; Target 14792; HLA-A*26:01; CLDN16; ENSG00000113946; TAA
YSAAGVSM

SEQ ID NO: 14793 - protein, 8 aa, Homo sapiens
  misc_feature: Table A; Target 14793; HLA-A*30:01; CLDN16; ENSG00000113946; TAA
YSAAGVSM

SEQ ID NO: 14794 - protein, 8 aa, Homo sapiens
  misc_feature: Table A; Target 14794; HLA-A*32:01; CLDN16; ENSG00000113946; TAA
YSAAGVSM

SEQ ID NO: 14795 - protein, 8 aa, Homo sapiens
  misc_feature: Table A; Target 14795; HLA-B*07:02; CLDN16; ENSG00000113946; TAA
YSAAGVSM

SEQ ID NO: 14796 - protein, 8 aa, Homo sapiens
  misc_feature: Table A; Target 14796; HLA-B*08:01; CLDN16; ENSG00000113946; TAA
YSAAGVSM

SEQ ID NO: 14797 - protein, 8 aa, Homo sapiens
  misc_feature: Table A; Target 14797; HLA-B*15:01; CLDN16; ENSG00000113946; TAA
YSAAGVSM

SEQ ID NO: 14798 - protein, 8 aa, Homo sapiens
  misc_feature: Table A; Target 14798; HLA-B*15:03; CLDN16; ENSG00000113946; TAA
YSAAGVSM

SEQ ID NO: 14799 - protein, 8 aa, Homo sapiens
  misc_feature: Table A; Target 14799; HLA-B*18:01; CLDN16; ENSG00000113946; TAA
YSAAGVSM

SEQ ID NO: 14800 - protein, 8 aa, Homo sapiens
  misc_feature: Table A; Target 14800; HLA-B*27:05; CLDN16; ENSG00000113946; TAA
YSAAGVSM

SEQ ID NO: 14801 - protein, 8 aa, Homo sapiens
  misc_feature: Table A; Target 14801; HLA-B*35:01; CLDN16; ENSG00000113946; TAA
YSAAGVSM

SEQ ID NO: 14802 - protein, 8 aa, Homo sapiens
  misc_feature: Table A; Target 14802; HLA-B*35:03; CLDN16; ENSG00000113946; TAA
YSAAGVSM

SEQ ID NO: 14803 - protein, 8 aa, Homo sapiens
  misc_feature: Table A; Target 14803; HLA-B*37:01; CLDN16; ENSG00000113946; TAA
YSAAGVSM

SEQ ID NO: 14804 - protein, 8 aa, Homo sapiens
  misc_feature: Table A; Target 14804; HLA-B*38:01; CLDN16; ENSG00000113946; TAA
YSAAGVSM

SEQ ID NO: 14805 - protein, 8 aa, Homo sapiens
  misc_feature: Table A; Target 14805; HLA-B*39:01; CLDN16; ENSG00000113946; TAA
YSAAGVSM

SEQ ID NO: 14806 - protein, 8 aa, Homo sapiens
  misc_feature: Table A; Target 14806; HLA-B*40:02; CLDN16; ENSG00000113946; TAA
YSAAGVSM

SEQ ID NO: 14807 - protein, 8 aa, Homo sapiens
  misc_feature: Table A; Target 14807; HLA-B*46:01; CLDN16; ENSG00000113946; TAA
YSAAGVSM

SEQ ID NO: 14808 - protein, 8 aa, Homo sapiens
  misc_feature: Table A; Target 14808; HLA-B*51:01; CLDN16; ENSG00000113946; TAA
YSAAGVSM

SEQ ID NO: 14809 - protein, 8 aa, Homo sapiens
  misc_feature: Table A; Target 14809; HLA-B*54:01; CLDN16; ENSG00000113946; TAA
YSAAGVSM

SEQ ID NO: 14810 - protein, 8 aa, Homo sapiens
  misc_feature: Table A; Target 14810; HLA-B*58:01; CLDN16; ENSG00000113946; TAA
YSAAGVSM

SEQ ID NO: 14811 - protein, 8 aa, Homo sapiens
  misc_feature: Table A; Target 14811; HLA-C*01:02; CLDN16; ENSG00000113946; TAA
YSAAGVSM

SEQ ID NO: 14812 - protein, 8 aa, Homo sapiens
  misc_feature: Table A; Target 14812; HLA-C*02:02; CLDN16; ENSG00000113946; TAA
YSAAGVSM

SEQ ID NO: 14813 - protein, 8 aa, Homo sapiens
  misc_feature: Table A; Target 14813; HLA-C*03:03; CLDN16; ENSG00000113946; TAA
YSAAGVSM

SEQ ID NO: 14814 - protein, 8 aa, Homo sapiens
  misc_feature: Table A; Target 14814; HLA-C*03:04; CLDN16; ENSG00000113946; TAA
YSAAGVSM

SEQ ID NO: 14815 - protein, 8 aa, Homo sapiens
  misc_feature: Table A; Target 14815; HLA-C*04:01; CLDN16; ENSG00000113946; TAA
YSAAGVSM

SEQ ID NO: 14816 - protein, 8 aa, Homo sapiens
  misc_feature: Table A; Target 14816; HLA-C*05:01; CLDN16; ENSG00000113946; TAA
YSAAGVSM

SEQ ID NO: 14817 - protein, 8 aa, Homo sapiens
  misc_feature: Table A; Target 14817; HLA-C*07:04; CLDN16; ENSG00000113946; TAA
YSAAGVSM

SEQ ID NO: 14818 - protein, 8 aa, Homo sapiens
  misc_feature: Table A; Target 14818; HLA-C*12:03; CLDN16; ENSG00000113946; TAA
YSAAGVSM

SEQ ID NO: 14819 - protein, 8 aa, Homo sapiens
  misc_feature: Table A; Target 14819; HLA-C*14:02; CLDN16; ENSG00000113946; TAA
YSAAGVSM

SEQ ID NO: 14820 - protein, 8 aa, Homo sapiens
  misc_feature: Table A; Target 14820; HLA-C*16:01; CLDN16; ENSG00000113946; TAA
YSAAGVSM

SEQ ID NO: 14821 - protein, 8 aa, Homo sapiens
  misc_feature: Table A; Target 14821; HLA-C*16:02; CLDN16; ENSG00000113946; TAA
YSAAGVSM

SEQ ID NO: 14822 - protein, 8 aa, Homo sapiens
  misc_feature: Table A; Target 14822; HLA-C*16:04; CLDN16; ENSG00000113946; TAA
YSAAGVSM

SEQ ID NO: 14823 - protein, 9 aa, Homo sapiens
  misc_feature: Table A; Target 14823; HLA-A*01:01; CLDN16; ENSG00000113946; TAA
YSAAGVSMA

SEQ ID NO: 14824 - protein, 9 aa, Homo sapiens
  misc_feature: Table A; Target 14824; HLA-A*02:01; CLDN16; ENSG00000113946; TAA
YSAAGVSMA

SEQ ID NO: 14825 - protein, 9 aa, Homo sapiens
  misc_feature: Table A; Target 14825; HLA-A*02:03; CLDN16; ENSG00000113946; TAA
YSAAGVSMA

SEQ ID NO: 14826 - protein, 9 aa, Homo sapiens
  misc_feature: Table A; Target 14826; HLA-B*27:05; CLDN16; ENSG00000113946; TAA
YSAAGVSMA

SEQ ID NO: 14827 - protein, 9 aa, Homo sapiens
  misc_feature: Table A; Target 14827; HLA-B*39:01; CLDN16; ENSG00000113946; TAA
YSAAGVSMA

SEQ ID NO: 14828 - protein, 9 aa, Homo sapiens
  misc_feature: Table A; Target 14828; HLA-B*54:01; CLDN16; ENSG00000113946; TAA
YSAAGVSMA

SEQ ID NO: 14829 - protein, 9 aa, Homo sapiens
  misc_feature: Table A; Target 14829; HLA-B*56:01; CLDN16; ENSG00000113946; TAA
YSAAGVSMA

SEQ ID NO: 14830 - protein, 9 aa, Homo sapiens
  misc_feature: Table A; Target 14830; HLA-C*02:02; CLDN16; ENSG00000113946; TAA
YSAAGVSMA

SEQ ID NO: 14831 - protein, 9 aa, Homo sapiens
  misc_feature: Table A; Target 14831; HLA-C*06:02; CLDN16; ENSG00000113946; TAA
YSAAGVSMA

SEQ ID NO: 14832 - protein, 9 aa, Homo sapiens
  misc_feature: Table A; Target 14832; HLA-C*07:04; CLDN16; ENSG00000113946; TAA
YSAAGVSMA

SEQ ID NO: 14833 - protein, 9 aa, Homo sapiens
  misc_feature: Table A; Target 14833; HLA-C*12:03; CLDN16; ENSG00000113946; TAA
YSAAGVSMA

SEQ ID NO: 14834 - protein, 9 aa, Homo sapiens
  misc_feature: Table A; Target 14834; HLA-C*14:02; CLDN16; ENSG00000113946; TAA
YSAAGVSMA

SEQ ID NO: 14835 - protein, 9 aa, Homo sapiens
  misc_feature: Table A; Target 14835; HLA-C*16:02; CLDN16; ENSG00000113946; TAA
YSAAGVSMA

SEQ ID NO: 14836 - protein, 10 aa, Homo sapiens
  misc_feature: Table A; Target 14836; HLA-A*01:01; CLDN16; ENSG00000113946; TAA
YSAAGVSMAK

SEQ ID NO: 14837 - protein, 10 aa, Homo sapiens
  misc_feature: Table A; Target 14837; HLA-A*03:01; CLDN16; ENSG00000113946; TAA
YSAAGVSMAK

SEQ ID NO: 14838 - protein, 10 aa, Homo sapiens
  misc_feature: Table A; Target 14838; HLA-A*03:02; CLDN16; ENSG00000113946; TAA
YSAAGVSMAK

SEQ ID NO: 14839 - protein, 10 aa, Homo sapiens
  misc_feature: Table A; Target 14839; HLA-A*11:01; CLDN16; ENSG00000113946; TAA
YSAAGVSMAK

SEQ ID NO: 14840 - protein, 10 aa, Homo sapiens
  misc_feature: Table A; Target 14840; HLA-A*33:01; CLDN16; ENSG00000113946; TAA
YSAAGVSMAK

SEQ ID NO: 14841 - protein, 10 aa, Homo sapiens
  misc_feature: Table A; Target 14841; HLA-A*33:03; CLDN16; ENSG00000113946; TAA
YSAAGVSMAK

SEQ ID NO: 14842 - protein, 10 aa, Homo sapiens
  misc_feature: Table A; Target 14842; HLA-A*68:01; CLDN16; ENSG00000113946; TAA
YSAAGVSMAK

SEQ ID NO: 14843 - protein, 10 aa, Homo sapiens
  misc_feature: Table A; Target 14843; HLA-A*68:02; CLDN16; ENSG00000113946; TAA
YSAAGVSMAK

SEQ ID NO: 14844 - protein, 10 aa, Homo sapiens
  misc_feature: Table A; Target 14844; HLA-B*07:02; CLDN16; ENSG00000113946; TAA
YSAAGVSMAK

SEQ ID NO: 14845 - protein, 10 aa, Homo sapiens
  misc_feature: Table A; Target 14845; HLA-B*13:02; CLDN16; ENSG00000113946; TAA
YSAAGVSMAK

SEQ ID NO: 14846 - protein, 10 aa, Homo sapiens
  misc_feature: Table A; Target 14846; HLA-B*27:02; CLDN16; ENSG00000113946; TAA
YSAAGVSMAK

SEQ ID NO: 14847 - protein, 10 aa, Homo sapiens
  misc_feature: Table A; Target 14847; HLA-B*27:05; CLDN16; ENSG00000113946; TAA
YSAAGVSMAK

SEQ ID NO: 14848 - protein, 10 aa, Homo sapiens
  misc_feature: Table A; Target 14848; HLA-C*01:02; CLDN16; ENSG00000113946; TAA
YSAAGVSMAK

SEQ ID NO: 14849 - protein, 10 aa, Homo sapiens
  misc_feature: Table A; Target 14849; HLA-C*02:02; CLDN16; ENSG00000113946; TAA
YSAAGVSMAK

SEQ ID NO: 14850 - protein, 10 aa, Homo sapiens
  misc_feature: Table A; Target 14850; HLA-C*03:03; CLDN16; ENSG00000113946; TAA
YSAAGVSMAK

SEQ ID NO: 14851 - protein, 10 aa, Homo sapiens
  misc_feature: Table A; Target 14851; HLA-C*06:02; CLDN16; ENSG00000113946; TAA
YSAAGVSMAK

SEQ ID NO: 14852 - protein, 10 aa, Homo sapiens
  misc_feature: Table A; Target 14852; HLA-C*07:01; CLDN16; ENSG00000113946; TAA
YSAAGVSMAK

SEQ ID NO: 14853 - protein, 10 aa, Homo sapiens
  misc_feature: Table A; Target 14853; HLA-C*07:02; CLDN16; ENSG00000113946; TAA
YSAAGVSMAK

SEQ ID NO: 14854 - protein, 10 aa, Homo sapiens
  misc_feature: Table A; Target 14854; HLA-C*07:06; CLDN16; ENSG00000113946; TAA
YSAAGVSMAK

SEQ ID NO: 14855 - protein, 10 aa, Homo sapiens
  misc_feature: Table A; Target 14855; HLA-C*16:04; CLDN16; ENSG00000113946; TAA
YSAAGVSMAK

SEQ ID NO: 14856 - protein, 8 aa, Homo sapiens
  misc_feature: Table A; Target 14856; HLA-C*16:01; CLDN16; ENSG00000113946; TAA
YSAPRTET

SEQ ID NO: 14857 - protein, 8 aa, Homo sapiens
  misc_feature: Table A; Target 14857; HLA-C*16:02; CLDN16; ENSG00000113946; TAA
YSAPRTET

SEQ ID NO: 14858 - protein, 9 aa, Homo sapiens
  misc_feature: Table A; Target 14858; HLA-A*01:01; CLDN16; ENSG00000113946; TAA
YSAPRTETA

SEQ ID NO: 14859 - protein, 9 aa, Homo sapiens
  misc_feature: Table A; Target 14859; HLA-A*02:01; CLDN16; ENSG00000113946; TAA
YSAPRTETA

SEQ ID NO: 14860 - protein, 9 aa, Homo sapiens
  misc_feature: Table A; Target 14860; HLA-A*02:03; CLDN16; ENSG00000113946; TAA
YSAPRTETA

SEQ ID NO: 14861 - protein, 9 aa, Homo sapiens
  misc_feature: Table A; Target 14861; HLA-A*32:01; CLDN16; ENSG00000113946; TAA
YSAPRTETA

SEQ ID NO: 14862 - protein, 9 aa, Homo sapiens
  misc_feature: Table A; Target 14862; HLA-A*68:02; CLDN16; ENSG00000113946; TAA
YSAPRTETA

SEQ ID NO: 14863 - protein, 9 aa, Homo sapiens
  misc_feature: Table A; Target 14863; HLA-B*08:01; CLDN16; ENSG00000113946; TAA
YSAPRTETA

SEQ ID NO: 14864 - protein, 9 aa, Homo sapiens
  misc_feature: Table A; Target 14864; HLA-B*40:02; CLDN16; ENSG00000113946; TAA
YSAPRTETA

SEQ ID NO: 14865 - protein, 9 aa, Homo sapiens
  misc_feature: Table A; Target 14865; HLA-B*46:01; CLDN16; ENSG00000113946; TAA
YSAPRTETA

SEQ ID NO: 14866 - protein, 9 aa, Homo sapiens
  misc_feature: Table A; Target 14866; HLA-B*54:01; CLDN16; ENSG00000113946; TAA
YSAPRTETA

SEQ ID NO: 14867 - protein, 9 aa, Homo sapiens
  misc_feature: Table A; Target 14867; HLA-B*55:01; CLDN16; ENSG00000113946; TAA
YSAPRTETA

SEQ ID NO: 14868 - protein, 9 aa, Homo sapiens
  misc_feature: Table A; Target 14868; HLA-B*56:01; CLDN16; ENSG00000113946; TAA
YSAPRTETA

SEQ ID NO: 14869 - protein, 9 aa, Homo sapiens
  misc_feature: Table A; Target 14869; HLA-B*58:01; CLDN16; ENSG00000113946; TAA
YSAPRTETA

SEQ ID NO: 14870 - protein, 9 aa, Homo sapiens
  misc_feature: Table A; Target 14870; HLA-C*01:02; CLDN16; ENSG00000113946; TAA
YSAPRTETA

SEQ ID NO: 14871 - protein, 9 aa, Homo sapiens
  misc_feature: Table A; Target 14871; HLA-C*02:02; CLDN16; ENSG00000113946; TAA
YSAPRTETA

SEQ ID NO: 14872 - protein, 9 aa, Homo sapiens
  misc_feature: Table A; Target 14872; HLA-C*03:03; CLDN16; ENSG00000113946; TAA
YSAPRTETA

SEQ ID NO: 14873 - protein, 9 aa, Homo sapiens
  misc_feature: Table A; Target 14873; HLA-C*03:04; CLDN16; ENSG00000113946; TAA
YSAPRTETA

SEQ ID NO: 14874 - protein, 9 aa, Homo sapiens
  misc_feature: Table A; Target 14874; HLA-C*06:02; CLDN16; ENSG00000113946; TAA
YSAPRTETA

SEQ ID NO: 14875 - protein, 9 aa, Homo sapiens
  misc_feature: Table A; Target 14875; HLA-C*07:04; CLDN16; ENSG00000113946; TAA
YSAPRTETA

SEQ ID NO: 14876 - protein, 9 aa, Homo sapiens
  misc_feature: Table A; Target 14876; HLA-C*12:03; CLDN16; ENSG00000113946; TAA
YSAPRTETA

SEQ ID NO: 14877 - protein, 9 aa, Homo sapiens
  misc_feature: Table A; Target 14877; HLA-C*16:01; CLDN16; ENSG00000113946; TAA
YSAPRTETA

SEQ ID NO: 14878 - protein, 9 aa, Homo sapiens
  misc_feature: Table A; Target 14878; HLA-C*16:02; CLDN16; ENSG00000113946; TAA
YSAPRTETA

SEQ ID NO: 14879 - protein, 10 aa, Homo sapiens
  misc_feature: Table A; Target 14879; HLA-A*01:01; CLDN16; ENSG00000113946; TAA
YSAPRTETAK

SEQ ID NO: 14880 - protein, 10 aa, Homo sapiens
  misc_feature: Table A; Target 14880; HLA-A*03:02; CLDN16; ENSG00000113946; TAA
YSAPRTETAK

SEQ ID NO: 14881 - protein, 11 aa, Homo sapiens
  misc_feature: Table A; Target 14881; HLA-A*01:01; CLDN16; ENSG00000113946; TAA
YSAPRTETAKM

SEQ ID NO: 14882 - protein, 9 aa, Homo sapiens
  misc_feature: Table A; Target 14882; HLA-B*08:01; CLDN16; ENSG00000113946; TAA
YSLRKAYSA

SEQ ID NO: 14883 - protein, 9 aa, Homo sapiens
  misc_feature: Table A; Target 14883; HLA-B*54:01; CLDN16; ENSG00000113946; TAA
YSLRKAYSA

SEQ ID NO: 14884 - protein, 9 aa, Homo sapiens
  misc_feature: Table A; Target 14884; HLA-C*03:03; CLDN16; ENSG00000113946; TAA
YSYCNSRHL

SEQ ID NO: 14885 - protein, 8 aa, Homo sapiens
  misc_feature: Table A; Target 14885; HLA-C*05:01; CLDN16; ENSG00000113946; TAA
YVERSTLV

SEQ ID NO: 14886 - protein, 9 aa, Homo sapiens
  misc_feature: Table A; Target 14886; HLA-A*01:01; CLDN16; ENSG00000113946; TAA
YVERSTLVL

SEQ ID NO: 14887 - protein, 9 aa, Homo sapiens
  misc_feature: Table A; Target 14887; HLA-A*02:07; CLDN16; ENSG00000113946; TAA
YVERSTLVL

SEQ ID NO: 14888 - protein, 9 aa, Homo sapiens
  misc_feature: Table A; Target 14888; HLA-B*08:01; CLDN16; ENSG00000113946; TAA
YVERSTLVL

SEQ ID NO: 14889 - protein, 9 aa, Homo sapiens
  misc_feature: Table A; Target 14889; HLA-B*35:03; CLDN16; ENSG00000113946; TAA
YVERSTLVL

SEQ ID NO: 14890 - protein, 9 aa, Homo sapiens
  misc_feature: Table A; Target 14890; HLA-B*38:01; CLDN16; ENSG00000113946; TAA
YVERSTLVL

SEQ ID NO: 14891 - protein, 9 aa, Homo sapiens
  misc_feature: Table A; Target 14891; HLA-B*40:01; CLDN16; ENSG00000113946; TAA
YVERSTLVL

SEQ ID NO: 14892 - protein, 9 aa, Homo sapiens
  misc_feature: Table A; Target 14892; HLA-C*03:03; CLDN16; ENSG00000113946; TAA
YVERSTLVL

SEQ ID NO: 14893 - protein, 9 aa, Homo sapiens
  misc_feature: Table A; Target 14893; HLA-C*03:04; CLDN16; ENSG00000113946; TAA
YVERSTLVL

SEQ ID NO: 14894 - protein, 9 aa, Homo sapiens
  misc_feature: Table A; Target 14894; HLA-C*05:01; CLDN16; ENSG00000113946; TAA
YVERSTLVL

SEQ ID NO: 14895 - protein, 9 aa, Homo sapiens
  misc_feature: Table A; Target 14895; HLA-C*07:04; CLDN16; ENSG00000113946; TAA
YVERSTLVL

SEQ ID NO: 14896 - protein, 9 aa, Homo sapiens
  misc_feature: Table A; Target 14896; HLA-C*12:03; CLDN6; ENSG00000184697; TAA
AASGLLLLG

SEQ ID NO: 14897 - protein, 10 aa, Homo sapiens
  misc_feature: Table A; Target 14897; HLA-C*04:01; CLDN6; ENSG00000184697; TAA
AASGLLLLGG

SEQ ID NO: 14898 - protein, 10 aa, Homo sapiens
  misc_feature: Table A; Target 14898; HLA-C*07:02; CLDN6; ENSG00000184697; TAA
AASGLLLLGG

SEQ ID NO: 14899 - protein, 11 aa, Homo sapiens
  misc_feature: Table A; Target 14899; HLA-C*04:01; CLDN6; ENSG00000184697; TAA
AASGLLLLGGG

SEQ ID NO: 14900 - protein, 8 aa, Homo sapiens
  misc_feature: Table A; Target 14900; HLA-B*37:01; CLDN6; ENSG00000184697; TAA
AEAQKREL

SEQ ID NO: 14901 - protein, 8 aa, Homo sapiens
  misc_feature: Table A; Target 14901; HLA-B*44:03; CLDN6; ENSG00000184697; TAA
AEAQKREL

SEQ ID NO: 14902 - protein, 8 aa, Homo sapiens
  misc_feature: Table A; Target 14902; HLA-C*16:01; CLDN6; ENSG00000184697; TAA
AEAQKREL

SEQ ID NO: 14903 - protein, 9 aa, Homo sapiens
  misc_feature: Table A; Target 14903; HLA-A*23:01; CLDN6; ENSG00000184697; TAA
AFIGNSIVV

SEQ ID NO: 14904 - protein, 9 aa, Homo sapiens
  misc_feature: Table A; Target 14904; HLA-B*49:01; CLDN6; ENSG00000184697; TAA
AFIGNSIVV

SEQ ID NO: 14905 - protein, 9 aa, Homo sapiens
  misc_feature: Table A; Target 14905; HLA-C*14:02; CLDN6; ENSG00000184697; TAA
AFIGNSIVV

SEQ ID NO: 14906 - protein, 10 aa, Homo sapiens
  misc_feature: Table A; Target 14906; HLA-C*14:02; CLDN6; ENSG00000184697; TAA
AFIGNSIVVA

SEQ ID NO: 14907 - protein, 8 aa, Homo sapiens
  misc_feature: Table A; Target 14907; HLA-B*13:02; CLDN6; ENSG00000184697; TAA
AGMQILGV

SEQ ID NO: 14908 - protein, 9 aa, Homo sapiens
  misc_feature: Table A; Target 14908; HLA-A*01:01; CLDN6; ENSG00000184697; TAA
AISRGPSEY

SEQ ID NO: 14909 - protein, 9 aa, Homo sapiens
  misc_feature: Table A; Target 14909; HLA-A*30:02; CLDN6; ENSG00000184697; TAA
AISRGPSEY

SEQ ID NO: 14910 - protein, 9 aa, Homo sapiens
  misc_feature: Table A; Target 14910; HLA-A*32:01; CLDN6; ENSG00000184697; TAA
AISRGPSEY

SEQ ID NO: 14911 - protein, 9 aa, Homo sapiens
  misc_feature: Table A; Target 14911; HLA-B*15:01; CLDN6; ENSG00000184697; TAA
AISRGPSEY

SEQ ID NO: 14912 - protein, 9 aa, Homo sapiens
  misc_feature: Table A; Target 14912; HLA-B*15:03; CLDN6; ENSG00000184697; TAA
AISRGPSEY

SEQ ID NO: 14913 - protein, 9 aa, Homo sapiens
  misc_feature: Table A; Target 14913; HLA-B*46:01; CLDN6; ENSG00000184697; TAA
AISRGPSEY

SEQ ID NO: 14914 - protein, 9 aa, Homo sapiens
  misc_feature: Table A; Target 14914; HLA-C*01:02; CLDN6; ENSG00000184697; TAA
AISRGPSEY

SEQ ID NO: 14915 - protein, 9 aa, Homo sapiens
  misc_feature: Table A; Target 14915; HLA-C*07:04; CLDN6; ENSG00000184697; TAA
AISRGPSEY

SEQ ID NO: 14916 - protein, 9 aa, Homo sapiens
  misc_feature: Table A; Target 14916; HLA-C*16:01; CLDN6; ENSG00000184697; TAA
AISRGPSEY

SEQ ID NO: 14917 - protein, 9 aa, Homo sapiens
  misc_feature: Table A; Target 14917; HLA-A*02:07; CLDN6; ENSG00000184697; TAA
ALCVIALLV

SEQ ID NO: 14918 - protein, 9 aa, Homo sapiens
  misc_feature: Table A; Target 14918; HLA-B*13:02; CLDN6; ENSG00000184697; TAA
ALCVIALLV

SEQ ID NO: 14919 - protein, 8 aa, Homo sapiens
  misc_feature: Table A; Target 14919; HLA-A*03:01; CLDN6; ENSG00000184697; TAA
ALFGLLVY

SEQ ID NO: 14920 - protein, 8 aa, Homo sapiens
  misc_feature: Table A; Target 14920; HLA-A*29:02; CLDN6; ENSG00000184697; TAA
ALFGLLVY

SEQ ID NO: 14921 - protein, 9 aa, Homo sapiens
  misc_feature: Table A; Target 14921; HLA-A*02:03; CLDN6; ENSG00000184697; TAA
ALFGLLVYL

SEQ ID NO: 14922 - protein, 9 aa, Homo sapiens
  misc_feature: Table A; Target 14922; HLA-A*02:04; CLDN6; ENSG00000184697; TAA
ALFGLLVYL

SEQ ID NO: 14923 - protein, 9 aa, Homo sapiens
  misc_feature: Table A; Target 14923; HLA-A*02:07; CLDN6; ENSG00000184697; TAA
ALFGLLVYL

SEQ ID NO: 14924 - protein, 9 aa, Homo sapiens
  misc_feature: Table A; Target 14924; HLA-A*03:01; CLDN6; ENSG00000184697; TAA
ALFGLLVYL

SEQ ID NO: 14925 - protein, 9 aa, Homo sapiens
  misc_feature: Table A; Target 14925; HLA-A*29:02; CLDN6; ENSG00000184697; TAA
ALFGLLVYL

SEQ ID NO: 14926 - protein, 9 aa, Homo sapiens
  misc_feature: Table A; Target 14926; HLA-A*31:01; CLDN6; ENSG00000184697; TAA
ALFGLLVYL

SEQ ID NO: 14927 - protein, 9 aa, Homo sapiens
  misc_feature: Table A; Target 14927; HLA-A*68:02; CLDN6; ENSG00000184697; TAA
ALFGLLVYL

SEQ ID NO: 14928 - protein, 9 aa, Homo sapiens
  misc_feature: Table A; Target 14928; HLA-B*13:02; CLDN6; ENSG00000184697; TAA
ALFGLLVYL

SEQ ID NO: 14929 - protein, 10 aa, Homo sapiens
  misc_feature: Table A; Target 14929; HLA-A*02:03; CLDN6; ENSG00000184697; TAA
ALFGLLVYLA

SEQ ID NO: 14930 - protein, 10 aa, Homo sapiens
  misc_feature: Table A; Target 14930; HLA-A*02:04; CLDN6; ENSG00000184697; TAA
ALFGLLVYLA

SEQ ID NO: 14931 - protein, 9 aa, Homo sapiens
  misc_feature: Table A; Target 14931; HLA-A*02:01; CLDN6; ENSG00000184697; TAA
ALLVALFGL

SEQ ID NO: 14932 - protein, 9 aa, Homo sapiens
  misc_feature: Table A; Target 14932; HLA-A*02:04; CLDN6; ENSG00000184697; TAA
ALLVALFGL

SEQ ID NO: 14933 - protein, 9 aa, Homo sapiens
  misc_feature: Table A; Target 14933; HLA-A*02:07; CLDN6; ENSG00000184697; TAA
ALLVALFGL

SEQ ID NO: 14934 - protein, 9 aa, Homo sapiens
  misc_feature: Table A; Target 14934; HLA-A*02:01; CLDN6; ENSG00000184697; TAA
ALPMWKVTA

SEQ ID NO: 14935 - protein, 9 aa, Homo sapiens
  misc_feature: Table A; Target 14935; HLA-A*02:04; CLDN6; ENSG00000184697; TAA
ALPMWKVTA

SEQ ID NO: 14936 - protein, 9 aa, Homo sapiens
  misc_feature: Table A; Target 14936; HLA-A*02:07; CLDN6; ENSG00000184697; TAA
ALPMWKVTA

SEQ ID NO: 14937 - protein, 9 aa, Homo sapiens
  misc_feature: Table A; Target 14937; HLA-A*02:01; CLDN6; ENSG00000184697; TAA
ALPQDLQAA

SEQ ID NO: 14938 - protein, 9 aa, Homo sapiens
  misc_feature: Table A; Target 14938; HLA-A*02:03; CLDN6; ENSG00000184697; TAA
ALPQDLQAA

SEQ ID NO: 14939 - protein, 9 aa, Homo sapiens
  misc_feature: Table A; Target 14939; HLA-A*02:04; CLDN6; ENSG00000184697; TAA
ALPQDLQAA

SEQ ID NO: 14940 - protein, 9 aa, Homo sapiens
  misc_feature: Table A; Target 14940; HLA-A*02:07; CLDN6; ENSG00000184697; TAA
ALPQDLQAA

SEQ ID NO: 14941 - protein, 9 aa, Homo sapiens
  misc_feature: Table A; Target 14941; HLA-B*13:02; CLDN6; ENSG00000184697; TAA
ALPQDLQAA

SEQ ID NO: 14942 - protein, 9 aa, Homo sapiens
  misc_feature: Table A; Target 14942; HLA-B*55:01; CLDN6; ENSG00000184697; TAA
ALPQDLQAA

SEQ ID NO: 14943 - protein, 9 aa, Homo sapiens
  misc_feature: Table A; Target 14943; HLA-C*01:02; CLDN6; ENSG00000184697; TAA
ALPQDLQAA

SEQ ID NO: 14944 - protein, 11 aa, Homo sapiens
  misc_feature: Table A; Target 14944; HLA-A*02:07; CLDN6; ENSG00000184697; TAA
ALPQDLQAARA

SEQ ID NO: 14945 - protein, 10 aa, Homo sapiens
  misc_feature: Table A; Target 14945; HLA-B*07:02; CLDN6; ENSG00000184697; TAA
APAISRGPSE

SEQ ID NO: 14946 - protein, 10 aa, Homo sapiens
  misc_feature: Table A; Target 14946; HLA-C*07:02; CLDN6; ENSG00000184697; TAA
APAISRGPSE

SEQ ID NO: 14947 - protein, 11 aa, Homo sapiens
  misc_feature: Table A; Target 14947; HLA-A*01:01; CLDN6; ENSG00000184697; TAA
APAISRGPSEY

SEQ ID NO: 14948 - protein, 11 aa, Homo sapiens
  misc_feature: Table A; Target 14948; HLA-B*07:02; CLDN6; ENSG00000184697; TAA
APAISRGPSEY

SEQ ID NO: 14949 - protein, 11 aa, Homo sapiens
  misc_feature: Table A; Target 14949; HLA-B*35:01; CLDN6; ENSG00000184697; TAA
APAISRGPSEY

SEQ ID NO: 14950 - protein, 11 aa, Homo sapiens
  misc_feature: Table A; Target 14950; HLA-C*07:02; CLDN6; ENSG00000184697; TAA
APAISRGPSEY

SEQ ID NO: 14951 - protein, 10 aa, Homo sapiens
  misc_feature: Table A; Target 14951; HLA-B*15:01; CLDN6; ENSG00000184697; TAA
AQKRELGASL

SEQ ID NO: 14952 - protein, 10 aa, Homo sapiens
  misc_feature: Table A; Target 14952; HLA-B*15:03; CLDN6; ENSG00000184697; TAA
AQKRELGASL

SEQ ID NO: 14953 - protein, 10 aa, Homo sapiens
  misc_feature: Table A; Target 14953; HLA-B*40:02; CLDN6; ENSG00000184697; TAA
AQKRELGASL

SEQ ID NO: 14954 - protein, 11 aa, Homo sapiens
  misc_feature: Table A; Target 14954; HLA-A*30:02; CLDN6; ENSG00000184697; TAA
AQKRELGASLY

SEQ ID NO: 14955 - protein, 11 aa, Homo sapiens
  misc_feature: Table A; Target 14955; HLA-B*15:01; CLDN6; ENSG00000184697; TAA
AQKRELGASLY

SEQ ID NO: 14956 - protein, 11 aa, Homo sapiens
  misc_feature: Table A; Target 14956; HLA-B*15:03; CLDN6; ENSG00000184697; TAA
AQKRELGASLY

SEQ ID NO: 14957 - protein, 9 aa, Homo sapiens
  misc_feature: Table A; Target 14957; HLA-B*27:05; CLDN6; ENSG00000184697; TAA
ARALCVIAL

SEQ ID NO: 14958 - protein, 9 aa, Homo sapiens
  misc_feature: Table A; Target 14958; HLA-C*06:02; CLDN6; ENSG00000184697; TAA
ARALCVIAL

SEQ ID NO: 14959 - protein, 9 aa, Homo sapiens
  misc_feature: Table A; Target 14959; HLA-C*07:02; CLDN6; ENSG00000184697; TAA
ARALCVIAL

SEQ ID NO: 14960 - protein, 9 aa, Homo sapiens
  misc_feature: Table A; Target 14960; HLA-B*27:02; CLDN6; ENSG00000184697; TAA
ARLVLTSGI

SEQ ID NO: 14961 - protein, 10 aa, Homo sapiens
  misc_feature: Table A; Target 14961; HLA-B*27:02; CLDN6; ENSG00000184697; TAA
ARYSTSAPAI

SEQ ID NO: 14962 - protein, 10 aa, Homo sapiens
  misc_feature: Table A; Target 14962; HLA-B*27:05; CLDN6; ENSG00000184697; TAA
ARYSTSAPAI

SEQ ID NO: 14963 - protein, 10 aa, Homo sapiens
  misc_feature: Table A; Target 14963; HLA-C*06:02; CLDN6; ENSG00000184697; TAA
ARYSTSAPAI

SEQ ID NO: 14964 - protein, 10 aa, Homo sapiens
  misc_feature: Table A; Target 14964; HLA-C*07:02; CLDN6; ENSG00000184697; TAA
ARYSTSAPAI

SEQ ID NO: 14965 - protein, 10 aa, Homo sapiens
  misc_feature: Table A; Target 14965; HLA-C*16:04; CLDN6; ENSG00000184697; TAA
ARYSTSAPAI

SEQ ID NO: 14966 - protein, 8 aa, Homo sapiens
  misc_feature: Table A; Target 14966; HLA-C*12:03; CLDN6; ENSG00000184697; TAA
ASAGMQIL

SEQ ID NO: 14967 - protein, 8 aa, Homo sapiens
  misc_feature: Table A; Target 14967; HLA-C*16:01; CLDN6; ENSG00000184697; TAA
ASAGMQIL

SEQ ID NO: 14968 - protein, 9 aa, Homo sapiens
  misc_feature: Table A; Target 14968; HLA-C*06:02; CLDN6; ENSG00000184697; TAA
ASAGMQILG

SEQ ID NO: 14969 - protein, 10 aa, Homo sapiens
  misc_feature: Table A; Target 14969; HLA-A*02:03; CLDN6; ENSG00000184697; TAA
ASAGMQILGV

SEQ ID NO: 14970 - protein, 10 aa, Homo sapiens
  misc_feature: Table A; Target 14970; HLA-B*13:02; CLDN6; ENSG00000184697; TAA
ASAGMQILGV

SEQ ID NO: 14971 - protein, 11 aa, Homo sapiens
  misc_feature: Table A; Target 14971; HLA-C*02:02; CLDN6; ENSG00000184697; TAA
ASAGMQILGVV

SEQ ID NO: 14972 - protein, 9 aa, Homo sapiens
  misc_feature: Table A; Target 14972; HLA-B*54:01; CLDN6; ENSG00000184697; TAA
ASLYLGWAA

SEQ ID NO: 14973 - protein, 10 aa, Homo sapiens
  misc_feature: Table A; Target 14973; HLA-C*04:01; CLDN6; ENSG00000184697; TAA
CPSGGSQGPS

SEQ ID NO: 14974 - protein, 9 aa, Homo sapiens
  misc_feature: Table A; Target 14974; HLA-A*02:01; CLDN6; ENSG00000184697; TAA
CVIALLVAL

SEQ ID NO: 14975 - protein, 9 aa, Homo sapiens
  misc_feature: Table A; Target 14975; HLA-A*02:04; CLDN6; ENSG00000184697; TAA
CVIALLVAL

SEQ ID NO: 14976 - protein, 9 aa, Homo sapiens
  misc_feature: Table A; Target 14976; HLA-A*31:01; CLDN6; ENSG00000184697; TAA
CVIALLVAL

SEQ ID NO: 14977 - protein, 9 aa, Homo sapiens
  misc_feature: Table A; Target 14977; HLA-A*68:02; CLDN6; ENSG00000184697; TAA
CVIALLVAL

SEQ ID NO: 14978 - protein, 9 aa, Homo sapiens
  misc_feature: Table A; Target 14978; HLA-B*35:03; CLDN6; ENSG00000184697; TAA
CVIALLVAL

SEQ ID NO: 14979 - protein, 9 aa, Homo sapiens
  misc_feature: Table A; Target 14979; HLA-B*46:01; CLDN6; ENSG00000184697; TAA
CVIALLVAL

SEQ ID NO: 14980 - protein, 9 aa, Homo sapiens
  misc_feature: Table A; Target 14980; HLA-A*26:01; CLDN6; ENSG00000184697; TAA
CVVQSTGQM

SEQ ID NO: 14981 - protein, 9 aa, Homo sapiens
  misc_feature: Table A; Target 14981; HLA-B*15:01; CLDN6; ENSG00000184697; TAA
CVVQSTGQM

SEQ ID NO: 14982 - protein, 9 aa, Homo sapiens
  misc_feature: Table A; Target 14982; HLA-B*27:05; CLDN6; ENSG00000184697; TAA
CVVQSTGQM

SEQ ID NO: 14983 - protein, 9 aa, Homo sapiens
  misc_feature: Table A; Target 14983; HLA-C*01:02; CLDN6; ENSG00000184697; TAA
CVVQSTGQM

SEQ ID NO: 14984 - protein, 9 aa, Homo sapiens
  misc_feature: Table A; Target 14984; HLA-C*04:01; CLDN6; ENSG00000184697; TAA
CVVQSTGQM

SEQ ID NO: 14985 - protein, 9 aa, Homo sapiens
  misc_feature: Table A; Target 14985; HLA-C*07:04; CLDN6; ENSG00000184697; TAA
CVVQSTGQM

SEQ ID NO: 14986 - protein, 9 aa, Homo sapiens
  misc_feature: Table A; Target 14986; HLA-C*14:02; CLDN6; ENSG00000184697; TAA
CVVQSTGQM

SEQ ID NO: 14987 - protein, 8 aa, Homo sapiens
  misc_feature: Table A; Target 14987; HLA-B*08:01; CLDN6; ENSG00000184697; TAA
DLQAARAL

SEQ ID NO: 14988 - protein, 8 aa, Homo sapiens
  misc_feature: Table A; Target 14988; HLA-C*07:01; CLDN6; ENSG00000184697; TAA
DSKARLVL

SEQ ID NO: 14989 - protein, 9 aa, Homo sapiens
  misc_feature: Table A; Target 14989; HLA-B*08:01; CLDN6; ENSG00000184697; TAA
DSKARLVLT

SEQ ID NO: 14990 - protein, 9 aa, Homo sapiens
  misc_feature: Table A; Target 14990; HLA-B*08:01; CLDN6; ENSG00000184697; TAA
EAQKRELGA

SEQ ID NO: 14991 - protein, 9 aa, Homo sapiens
  misc_feature: Table A; Target 14991; HLA-B*54:01; CLDN6; ENSG00000184697; TAA
EAQKRELGA

SEQ ID NO: 14992 - protein, 9 aa, Homo sapiens
  misc_feature: Table A; Target 14992; HLA-B*40:02; CLDN6; ENSG00000184697; TAA
EEKDSKARL

SEQ ID NO: 14993 - protein, 9 aa, Homo sapiens
  misc_feature: Table A; Target 14993; HLA-B*44:02; CLDN6; ENSG00000184697; TAA
EEKDSKARL

SEQ ID NO: 14994 - protein, 9 aa, Homo sapiens
  misc_feature: Table A; Target 14994; HLA-B*44:03; CLDN6; ENSG00000184697; TAA
EEKDSKARL

SEQ ID NO: 14995 - protein, 11 aa, Homo sapiens
  misc_feature: Table A; Target 14995; HLA-B*40:02; CLDN6; ENSG00000184697; TAA
EEKDSKARLVL

SEQ ID NO: 14996 - protein, 8 aa, Homo sapiens
  misc_feature: Table A; Target 14996; HLA-C*07:01; CLDN6; ENSG00000184697; TAA
ELGASLYL

SEQ ID NO: 14997 - protein, 10 aa, Homo sapiens
  misc_feature: Table A; Target 14997; HLA-A*25:01; CLDN6; ENSG00000184697; TAA
ELGASLYLGW

SEQ ID NO: 14998 - protein, 10 aa, Homo sapiens
  misc_feature: Table A; Target 14998; HLA-B*44:02; CLDN6; ENSG00000184697; TAA
ELGASLYLGW

SEQ ID NO: 14999 - protein, 10 aa, Homo sapiens
  misc_feature: Table A; Target 14999; HLA-B*44:03; CLDN6; ENSG00000184697; TAA
ELGASLYLGW

SEQ ID NO: 15000 - protein, 8 aa, Homo sapiens
  misc_feature: Table A; Target 15000; HLA-B*54:01; CLDN6; ENSG00000184697; TAA
FGLLVYLA

SEQ ID NO: 15001 - protein, 8 aa, Homo sapiens
  misc_feature: Table A; Target 15001; HLA-B*39:01; CLDN6; ENSG00000184697; TAA
FIGNSIVV

SEQ ID NO: 15002 - protein, 8 aa, Homo sapiens
  misc_feature: Table A; Target 15002; HLA-C*01:02; CLDN6; ENSG00000184697; TAA
FIGNSIVV

SEQ ID NO: 15003 - protein, 8 aa, Homo sapiens
  misc_feature: Table A; Target 15003; HLA-C*02:02; CLDN6; ENSG00000184697; TAA
FIGNSIVV

SEQ ID NO: 15004 - protein, 8 aa, Homo sapiens
  misc_feature: Table A; Target 15004; HLA-C*03:04; CLDN6; ENSG00000184697; TAA
FIGNSIVV

SEQ ID NO: 15005 - protein, 8 aa, Homo sapiens
  misc_feature: Table A; Target 15005; HLA-C*07:04; CLDN6; ENSG00000184697; TAA
FIGNSIVV

SEQ ID NO: 15006 - protein, 8 aa, Homo sapiens
  misc_feature: Table A; Target 15006; HLA-C*12:03; CLDN6; ENSG00000184697; TAA
FIGNSIVV

SEQ ID NO: 15007 - protein, 9 aa, Homo sapiens
  misc_feature: Table A; Target 15007; HLA-B*54:01; CLDN6; ENSG00000184697; TAA
FIGNSIVVA

SEQ ID NO: 15008 - protein, 9 aa, Homo sapiens
  misc_feature: Table A; Target 15008; HLA-C*07:04; CLDN6; ENSG00000184697; TAA
FIGNSIVVA

SEQ ID NO: 15009 - protein, 11 aa, Homo sapiens
  misc_feature: Table A; Target 15009; HLA-A*68:02; CLDN6; ENSG00000184697; TAA
FIGNSIVVAQV

SEQ ID NO: 15010 - protein, 9 aa, Homo sapiens
  misc_feature: Table A; Target 15010; HLA-A*02:01; CLDN6; ENSG00000184697; TAA
FVISGVLTL

SEQ ID NO: 15011 - protein, 9 aa, Homo sapiens
  misc_feature: Table A; Target 15011; HLA-A*02:03; CLDN6; ENSG00000184697; TAA
FVISGVLTL

SEQ ID NO: 15012 - protein, 9 aa, Homo sapiens
  misc_feature: Table A; Target 15012; HLA-A*02:04; CLDN6; ENSG00000184697; TAA
FVISGVLTL

SEQ ID NO: 15013 - protein, 9 aa, Homo sapiens
  misc_feature: Table A; Target 15013; HLA-A*02:07; CLDN6; ENSG00000184697; TAA
FVISGVLTL

SEQ ID NO: 15014 - protein, 9 aa, Homo sapiens
  misc_feature: Table A; Target 15014; HLA-A*23:01; CLDN6; ENSG00000184697; TAA
FVISGVLTL

SEQ ID NO: 15015 - protein, 9 aa, Homo sapiens
  misc_feature: Table A; Target 15015; HLA-A*25:01; CLDN6; ENSG00000184697; TAA
FVISGVLTL

SEQ ID NO: 15016 - protein, 9 aa, Homo sapiens
  misc_feature: Table A; Target 15016; HLA-A*26:01; CLDN6; ENSG00000184697; TAA
FVISGVLTL

SEQ ID NO: 15017 - protein, 9 aa, Homo sapiens
  misc_feature: Table A; Target 15017; HLA-A*30:01; CLDN6; ENSG00000184697; TAA
FVISGVLTL

SEQ ID NO: 15018 - protein, 9 aa, Homo sapiens
  misc_feature: Table A; Target 15018; HLA-A*32:01; CLDN6; ENSG00000184697; TAA
FVISGVLTL

SEQ ID NO: 15019 - protein, 9 aa, Homo sapiens
  misc_feature: Table A; Target 15019; HLA-A*68:02; CLDN6; ENSG00000184697; TAA
FVISGVLTL

SEQ ID NO: 15020 - protein, 9 aa, Homo sapiens
  misc_feature: Table A; Target 15020; HLA-B*13:02; CLDN6; ENSG00000184697; TAA
FVISGVLTL

SEQ ID NO: 15021 - protein, 9 aa, Homo sapiens
  misc_feature: Table A; Target 15021; HLA-B*35:03; CLDN6; ENSG00000184697; TAA
FVISGVLTL

SEQ ID NO: 15022 - protein, 9 aa, Homo sapiens
  misc_feature: Table A; Target 15022; HLA-B*39:01; CLDN6; ENSG00000184697; TAA
FVISGVLTL

SEQ ID NO: 15023 - protein, 9 aa, Homo sapiens
  misc_feature: Table A; Target 15023; HLA-B*40:01; CLDN6; ENSG00000184697; TAA
FVISGVLTL

SEQ ID NO: 15024 - protein, 9 aa, Homo sapiens
  misc_feature: Table A; Target 15024; HLA-B*46:01; CLDN6; ENSG00000184697; TAA
FVISGVLTL

SEQ ID NO: 15025 - protein, 9 aa, Homo sapiens
  misc_feature: Table A; Target 15025; HLA-B*49:01; CLDN6; ENSG00000184697; TAA
FVISGVLTL

SEQ ID NO: 15026 - protein, 9 aa, Homo sapiens
  misc_feature: Table A; Target 15026; HLA-B*51:01; CLDN6; ENSG00000184697; TAA
FVISGVLTL

SEQ ID NO: 15027 - protein, 9 aa, Homo sapiens
  misc_feature: Table A; Target 15027; HLA-C*01:02; CLDN6; ENSG00000184697; TAA
FVISGVLTL

SEQ ID NO: 15028 - protein, 9 aa, Homo sapiens
  misc_feature: Table A; Target 15028; HLA-C*02:02; CLDN6; ENSG00000184697; TAA
FVISGVLTL

SEQ ID NO: 15029 - protein, 9 aa, Homo sapiens
  misc_feature: Table A; Target 15029; HLA-C*03:03; CLDN6; ENSG00000184697; TAA
FVISGVLTL

SEQ ID NO: 15030 - protein, 9 aa, Homo sapiens
  misc_feature: Table A; Target 15030; HLA-C*03:04; CLDN6; ENSG00000184697; TAA
FVISGVLTL

SEQ ID NO: 15031 - protein, 9 aa, Homo sapiens
  misc_feature: Table A; Target 15031; HLA-C*07:04; CLDN6; ENSG00000184697; TAA
FVISGVLTL

SEQ ID NO: 15032 - protein, 9 aa, Homo sapiens
  misc_feature: Table A; Target 15032; HLA-C*14:02; CLDN6; ENSG00000184697; TAA
FVISGVLTL

SEQ ID NO: 15033 - protein, 10 aa, Homo sapiens
  misc_feature: Table A; Target 15033; HLA-A*02:03; CLDN6; ENSG00000184697; TAA
FVISGVLTLI

SEQ ID NO: 15034 - protein, 10 aa, Homo sapiens
  misc_feature: Table A; Target 15034; HLA-A*02:07; CLDN6; ENSG00000184697; TAA
FVISGVLTLI

SEQ ID NO: 15035 - protein, 10 aa, Homo sapiens
  misc_feature: Table A; Target 15035; HLA-A*68:02; CLDN6; ENSG00000184697; TAA
FVISGVLTLI

SEQ ID NO: 15036 - protein, 9 aa, Homo sapiens
  misc_feature: Table A; Target 15036; HLA-A*02:01; CLDN6; ENSG00000184697; TAA
FYNPLVAEA

SEQ ID NO: 15037 - protein, 9 aa, Homo sapiens
  misc_feature: Table A; Target 15037; HLA-A*02:04; CLDN6; ENSG00000184697; TAA
FYNPLVAEA

SEQ ID NO: 15038 - protein, 9 aa, Homo sapiens
  misc_feature: Table A; Target 15038; HLA-A*23:01; CLDN6; ENSG00000184697; TAA
FYNPLVAEA

SEQ ID NO: 15039 - protein, 9 aa, Homo sapiens
  misc_feature: Table A; Target 15039; HLA-A*24:02; CLDN6; ENSG00000184697; TAA
FYNPLVAEA

SEQ ID NO: 15040 - protein, 9 aa, Homo sapiens
  misc_feature: Table A; Target 15040; HLA-A*29:02; CLDN6; ENSG00000184697; TAA
FYNPLVAEA

SEQ ID NO: 15041 - protein, 9 aa, Homo sapiens
  misc_feature: Table A; Target 15041; HLA-A*33:01; CLDN6; ENSG00000184697; TAA
FYNPLVAEA

SEQ ID NO: 15042 - protein, 9 aa, Homo sapiens
  misc_feature: Table A; Target 15042; HLA-A*33:03; CLDN6; ENSG00000184697; TAA
FYNPLVAEA

SEQ ID NO: 15043 - protein, 9 aa, Homo sapiens
  misc_feature: Table A; Target 15043; HLA-B*54:01; CLDN6; ENSG00000184697; TAA
FYNPLVAEA

SEQ ID NO: 15044 - protein, 9 aa, Homo sapiens
  misc_feature: Table A; Target 15044; HLA-B*56:01; CLDN6; ENSG00000184697; TAA
FYNPLVAEA

SEQ ID NO: 15045 - protein, 9 aa, Homo sapiens
  misc_feature: Table A; Target 15045; HLA-C*01:02; CLDN6; ENSG00000184697; TAA
FYNPLVAEA

SEQ ID NO: 15046 - protein, 9 aa, Homo sapiens
  misc_feature: Table A; Target 15046; HLA-C*02:02; CLDN6; ENSG00000184697; TAA
FYNPLVAEA

SEQ ID NO: 15047 - protein, 9 aa, Homo sapiens
  misc_feature: Table A; Target 15047; HLA-C*07:02; CLDN6; ENSG00000184697; TAA
FYNPLVAEA

SEQ ID NO: 15048 - protein, 9 aa, Homo sapiens
  misc_feature: Table A; Target 15048; HLA-C*14:02; CLDN6; ENSG00000184697; TAA
FYNPLVAEA

SEQ ID NO: 15049 - protein, 11 aa, Homo sapiens
  misc_feature: Table A; Target 15049; HLA-A*29:02; CLDN6; ENSG00000184697; TAA
FYNPLVAEAQK

SEQ ID NO: 15050 - protein, 11 aa, Homo sapiens
  misc_feature: Table A; Target 15050; HLA-A*31:01; CLDN6; ENSG00000184697; TAA
FYNPLVAEAQK

SEQ ID NO: 15051 - protein, 11 aa, Homo sapiens
  misc_feature: Table A; Target 15051; HLA-A*33:01; CLDN6; ENSG00000184697; TAA
FYNPLVAEAQK

SEQ ID NO: 15052 - protein, 11 aa, Homo sapiens
  misc_feature: Table A; Target 15052; HLA-A*33:03; CLDN6; ENSG00000184697; TAA
FYNPLVAEAQK

SEQ ID NO: 15053 - protein, 11 aa, Homo sapiens
  misc_feature: Table A; Target 15053; HLA-B*27:02; CLDN6; ENSG00000184697; TAA
FYNPLVAEAQK

SEQ ID NO: 15054 - protein, 9 aa, Homo sapiens
  misc_feature: Table A; Target 15054; HLA-A*30:02; CLDN6; ENSG00000184697; TAA
GGSQGPSHY

SEQ ID NO: 15055 - protein, 9 aa, Homo sapiens
  misc_feature: Table A; Target 15055; HLA-B*15:03; CLDN6; ENSG00000184697; TAA
GGSQGPSHY

SEQ ID NO: 15056 - protein, 9 aa, Homo sapiens
  misc_feature: Table A; Target 15056; HLA-C*07:04; CLDN6; ENSG00000184697; TAA
GGSQGPSHY

SEQ ID NO: 15057 - protein, 9 aa, Homo sapiens
  misc_feature: Table A; Target 15057; HLA-C*16:04; CLDN6; ENSG00000184697; TAA
GGSQGPSHY

SEQ ID NO: 15058 - protein, 10 aa, Homo sapiens
  misc_feature: Table A; Target 15058; HLA-B*27:05; CLDN6; ENSG00000184697; TAA
GGSQGPSHYM

SEQ ID NO: 15059 - protein, 10 aa, Homo sapiens
  misc_feature: Table A; Target 15059; HLA-C*04:01; CLDN6; ENSG00000184697; TAA
GGSQGPSHYM

SEQ ID NO: 15060 - protein, 10 aa, Homo sapiens
  misc_feature: Table A; Target 15060; HLA-C*16:02; CLDN6; ENSG00000184697; TAA
GGSQGPSHYM

SEQ ID NO: 15061 - protein, 9 aa, Homo sapiens
  misc_feature: Table A; Target 15061; HLA-A*02:01; CLDN6; ENSG00000184697; TAA
GIVFVISGV

SEQ ID NO: 15062 - protein, 9 aa, Homo sapiens
  misc_feature: Table A; Target 15062; HLA-A*02:03; CLDN6; ENSG00000184697; TAA
GIVFVISGV

SEQ ID NO: 15063 - protein, 9 aa, Homo sapiens
  misc_feature: Table A; Target 15063; HLA-A*02:04; CLDN6; ENSG00000184697; TAA
GIVFVISGV

SEQ ID NO: 15064 - protein, 9 aa, Homo sapiens
  misc_feature: Table A; Target 15064; HLA-A*02:07; CLDN6; ENSG00000184697; TAA
GIVFVISGV

SEQ ID NO: 15065 - protein, 9 aa, Homo sapiens
  misc_feature: Table A; Target 15065; HLA-A*68:02; CLDN6; ENSG00000184697; TAA
GIVFVISGV

SEQ ID NO: 15066 - protein, 9 aa, Homo sapiens
  misc_feature: Table A; Target 15066; HLA-B*13:02; CLDN6; ENSG00000184697; TAA
GIVFVISGV

SEQ ID NO: 15067 - protein, 9 aa, Homo sapiens
  misc_feature: Table A; Target 15067; HLA-B*27:05; CLDN6; ENSG00000184697; TAA
GIVFVISGV

SEQ ID NO: 15068 - protein, 9 aa, Homo sapiens
  misc_feature: Table A; Target 15068; HLA-B*49:01; CLDN6; ENSG00000184697; TAA
GIVFVISGV

SEQ ID NO: 15069 - protein, 9 aa, Homo sapiens
  misc_feature: Table A; Target 15069; HLA-B*55:01; CLDN6; ENSG00000184697; TAA
GIVFVISGV

SEQ ID NO: 15070 - protein, 10 aa, Homo sapiens
  misc_feature: Table A; Target 15070; HLA-A*02:04; CLDN6; ENSG00000184697; TAA
GLLLLGGGLL

SEQ ID NO: 15071 - protein, 9 aa, Homo sapiens
  misc_feature: Table A; Target 15071; HLA-A*02:01; CLDN6; ENSG00000184697; TAA
GLLVYLAGA

SEQ ID NO: 15072 - protein, 9 aa, Homo sapiens
  misc_feature: Table A; Target 15072; HLA-A*02:03; CLDN6; ENSG00000184697; TAA
GLLVYLAGA

SEQ ID NO: 15073 - protein, 9 aa, Homo sapiens
  misc_feature: Table A; Target 15073; HLA-A*02:04; CLDN6; ENSG00000184697; TAA
GLLVYLAGA

SEQ ID NO: 15074 - protein, 9 aa, Homo sapiens
  misc_feature: Table A; Target 15074; HLA-B*55:01; CLDN6; ENSG00000184697; TAA
GLLVYLAGA

SEQ ID NO: 15075 - protein, 10 aa, Homo sapiens
  misc_feature: Table A; Target 15075; HLA-A*03:01; CLDN6; ENSG00000184697; TAA
GLLVYLAGAK

SEQ ID NO: 15076 - protein, 9 aa, Homo sapiens
  misc_feature: Table A; Target 15076; HLA-B*15:01; CLDN6; ENSG00000184697; TAA
GMQILGVVL

SEQ ID NO: 15077 - protein, 9 aa, Homo sapiens
  misc_feature: Table A; Target 15077; HLA-C*07:04; CLDN6; ENSG00000184697; TAA
GMQILGVVL

SEQ ID NO: 15078 - protein, 9 aa, Homo sapiens
  misc_feature: Table A; Target 15078; HLA-A*02:01; CLDN6; ENSG00000184697; TAA
GNSIVVAQV

SEQ ID NO: 15079 - protein, 9 aa, Homo sapiens
  misc_feature: Table A; Target 15079; HLA-A*02:03; CLDN6; ENSG00000184697; TAA
GNSIVVAQV

SEQ ID NO: 15080 - protein, 9 aa, Homo sapiens
  misc_feature: Table A; Target 15080; HLA-A*30:01; CLDN6; ENSG00000184697; TAA
GNSIVVAQV

SEQ ID NO: 15081 - protein, 9 aa, Homo sapiens
  misc_feature: Table A; Target 15081; HLA-A*68:02; CLDN6; ENSG00000184697; TAA
GNSIVVAQV

SEQ ID NO: 15082 - protein, 9 aa, Homo sapiens
  misc_feature: Table A; Target 15082; HLA-B*13:02; CLDN6; ENSG00000184697; TAA
GNSIVVAQV

SEQ ID NO: 15083 - protein, 9 aa, Homo sapiens
  misc_feature: Table A; Target 15083; HLA-B*27:05; CLDN6; ENSG00000184697; TAA
GNSIVVAQV

SEQ ID NO: 15084 - protein, 9 aa, Homo sapiens
  misc_feature: Table A; Target 15084; HLA-B*37:01; CLDN6; ENSG00000184697; TAA
GNSIVVAQV

SEQ ID NO: 15085 - protein, 9 aa, Homo sapiens
  misc_feature: Table A; Target 15085; HLA-C*06:02; CLDN6; ENSG00000184697; TAA
GNSIVVAQV

SEQ ID NO: 15086 - protein, 8 aa, Homo sapiens
  misc_feature: Table A; Target 15086; HLA-B*27:02; CLDN6; ENSG00000184697; TAA
GPSEYPTK

SEQ ID NO: 15087 - protein, 10 aa, Homo sapiens
  misc_feature: Table A; Target 15087; HLA-A*30:02; CLDN6; ENSG00000184697; TAA
GPSEYPTKNY

SEQ ID NO: 15088 - protein, 10 aa, Homo sapiens
  misc_feature: Table A; Target 15088; HLA-B*35:01; CLDN6; ENSG00000184697; TAA
GPSEYPTKNY

SEQ ID NO: 15089 - protein, 10 aa, Homo sapiens
  misc_feature: Table A; Target 15089; HLA-B*44:03; CLDN6; ENSG00000184697; TAA
GPSEYPTKNY

SEQ ID NO: 15090 - protein, 10 aa, Homo sapiens
  misc_feature: Table A; Target 15090; HLA-C*04:01; CLDN6; ENSG00000184697; TAA
GPSEYPTKNY

SEQ ID NO: 15091 - protein, 10 aa, Homo sapiens
  misc_feature: Table A; Target 15091; HLA-C*12:03; CLDN6; ENSG00000184697; TAA
GPSEYPTKNY

SEQ ID NO: 15092 - protein, 11 aa, Homo sapiens
  misc_feature: Table A; Target 15092; HLA-A*68:01; CLDN6; ENSG00000184697; TAA
GPSEYPTKNYV

SEQ ID NO: 15093 - protein, 11 aa, Homo sapiens
  misc_feature: Table A; Target 15093; HLA-A*68:02; CLDN6; ENSG00000184697; TAA
GPSEYPTKNYV

SEQ ID NO: 15094 - protein, 11 aa, Homo sapiens
  misc_feature: Table A; Target 15094; HLA-B*07:02; CLDN6; ENSG00000184697; TAA
GPSEYPTKNYV

SEQ ID NO: 15095 - protein, 11 aa, Homo sapiens
  misc_feature: Table A; Target 15095; HLA-B*27:05; CLDN6; ENSG00000184697; TAA
GPSEYPTKNYV

SEQ ID NO: 15096 - protein, 11 aa, Homo sapiens
  misc_feature: Table A; Target 15096; HLA-B*51:01; CLDN6; ENSG00000184697; TAA
GPSEYPTKNYV

SEQ ID NO: 15097 - protein, 11 aa, Homo sapiens
  misc_feature: Table A; Target 15097; HLA-B*55:01; CLDN6; ENSG00000184697; TAA
GPSEYPTKNYV

SEQ ID NO: 15098 - protein, 11 aa, Homo sapiens
  misc_feature: Table A; Target 15098; HLA-B*56:01; CLDN6; ENSG00000184697; TAA
GPSEYPTKNYV

SEQ ID NO: 15099 - protein, 11 aa, Homo sapiens
  misc_feature: Table A; Target 15099; HLA-C*06:02; CLDN6; ENSG00000184697; TAA
GPSEYPTKNYV

SEQ ID NO: 15100 - protein, 11 aa, Homo sapiens
  misc_feature: Table A; Target 15100; HLA-C*12:03; CLDN6; ENSG00000184697; TAA
GPSEYPTKNYV

SEQ ID NO: 15101 - protein, 11 aa, Homo sapiens
  misc_feature: Table A; Target 15101; HLA-C*16:02; CLDN6; ENSG00000184697; TAA
GPSEYPTKNYV

SEQ ID NO: 15102 - protein, 9 aa, Homo sapiens
  misc_feature: Table A; Target 15102; HLA-A*29:02; CLDN6; ENSG00000184697; TAA
GPSHYMARY

SEQ ID NO: 15103 - protein, 9 aa, Homo sapiens
  misc_feature: Table A; Target 15103; HLA-A*30:02; CLDN6; ENSG00000184697; TAA
GPSHYMARY

SEQ ID NO: 15104 - protein, 8 aa, Homo sapiens
  misc_feature: Table A; Target 15104; HLA-B*15:01; CLDN6; ENSG00000184697; TAA
GQMQCKVY

SEQ ID NO: 15105 - protein, 8 aa, Homo sapiens
  misc_feature: Table A; Target 15105; HLA-B*15:03; CLDN6; ENSG00000184697; TAA
GQMQCKVY

SEQ ID NO: 15106 - protein, 8 aa, Homo sapiens
  misc_feature: Table A; Target 15106; HLA-A*30:02; CLDN6; ENSG00000184697; TAA
GSQGPSHY

SEQ ID NO: 15107 - protein, 8 aa, Homo sapiens
  misc_feature: Table A; Target 15107; HLA-C*16:02; CLDN6; ENSG00000184697; TAA
GSQGPSHY

SEQ ID NO: 15108 - protein, 9 aa, Homo sapiens
  misc_feature: Table A; Target 15108; HLA-A*30:02; CLDN6; ENSG00000184697; TAA
GSQGPSHYM

SEQ ID NO: 15109 - protein, 9 aa, Homo sapiens
  misc_feature: Table A; Target 15109; HLA-A*32:01; CLDN6; ENSG00000184697; TAA
GSQGPSHYM

SEQ ID NO: 15110 - protein, 9 aa, Homo sapiens
  misc_feature: Table A; Target 15110; HLA-B*15:01; CLDN6; ENSG00000184697; TAA
GSQGPSHYM

SEQ ID NO: 15111 - protein, 9 aa, Homo sapiens
  misc_feature: Table A; Target 15111; HLA-B*27:05; CLDN6; ENSG00000184697; TAA
GSQGPSHYM

SEQ ID NO: 15112 - protein, 9 aa, Homo sapiens
  misc_feature: Table A; Target 15112; HLA-B*46:01; CLDN6; ENSG00000184697; TAA
GSQGPSHYM

SEQ ID NO: 15113 - protein, 9 aa, Homo sapiens
  misc_feature: Table A; Target 15113; HLA-B*58:01; CLDN6; ENSG00000184697; TAA
GSQGPSHYM

SEQ ID NO: 15114 - protein, 9 aa, Homo sapiens
  misc_feature: Table A; Target 15114; HLA-C*03:03; CLDN6; ENSG00000184697; TAA
GSQGPSHYM

SEQ ID NO: 15115 - protein, 9 aa, Homo sapiens
  misc_feature: Table A; Target 15115; HLA-C*03:04; CLDN6; ENSG00000184697; TAA
GSQGPSHYM

SEQ ID NO: 15116 - protein, 9 aa, Homo sapiens
  misc_feature: Table A; Target 15116; HLA-C*04:01; CLDN6; ENSG00000184697; TAA
GSQGPSHYM

SEQ ID NO: 15117 - protein, 9 aa, Homo sapiens
  misc_feature: Table A; Target 15117; HLA-C*06:02; CLDN6; ENSG00000184697; TAA
GSQGPSHYM

SEQ ID NO: 15118 - protein, 9 aa, Homo sapiens
  misc_feature: Table A; Target 15118; HLA-C*07:01; CLDN6; ENSG00000184697; TAA
GSQGPSHYM

SEQ ID NO: 15119 - protein, 9 aa, Homo sapiens
  misc_feature: Table A; Target 15119; HLA-C*07:04; CLDN6; ENSG00000184697; TAA
GSQGPSHYM

SEQ ID NO: 15120 - protein, 9 aa, Homo sapiens
  misc_feature: Table A; Target 15120; HLA-C*12:03; CLDN6; ENSG00000184697; TAA
GSQGPSHYM

SEQ ID NO: 15121 - protein, 9 aa, Homo sapiens
  misc_feature: Table A; Target 15121; HLA-C*16:01; CLDN6; ENSG00000184697; TAA
GSQGPSHYM

SEQ ID NO: 15122 - protein, 9 aa, Homo sapiens
  misc_feature: Table A; Target 15122; HLA-C*16:02; CLDN6; ENSG00000184697; TAA
GSQGPSHYM

SEQ ID NO: 15123 - protein, 11 aa, Homo sapiens
  misc_feature: Table A; Target 15123; HLA-A*11:01; CLDN6; ENSG00000184697; TAA
GSQGPSHYMAR

SEQ ID NO: 15124 - protein, 11 aa, Homo sapiens
  misc_feature: Table A; Target 15124; HLA-A*31:01; CLDN6; ENSG00000184697; TAA
GSQGPSHYMAR

SEQ ID NO: 15125 - protein, 11 aa, Homo sapiens
  misc_feature: Table A; Target 15125; HLA-A*33:01; CLDN6; ENSG00000184697; TAA
GSQGPSHYMAR

SEQ ID NO: 15126 - protein, 9 aa, Homo sapiens
  misc_feature: Table A; Target 15126; HLA-A*02:01; CLDN6; ENSG00000184697; TAA
GVLTLIPVC

SEQ ID NO: 15127 - protein, 10 aa, Homo sapiens
  misc_feature: Table A; Target 15127; HLA-A*25:01; CLDN6; ENSG00000184697; TAA
GVLTLIPVCW

SEQ ID NO: 15128 - protein, 10 aa, Homo sapiens
  misc_feature: Table A; Target 15128; HLA-B*44:02; CLDN6; ENSG00000184697; TAA
GVLTLIPVCW

SEQ ID NO: 15129 - protein, 10 aa, Homo sapiens
  misc_feature: Table A; Target 15129; HLA-B*57:01; CLDN6; ENSG00000184697; TAA
GVLTLIPVCW

SEQ ID NO: 15130 - protein, 9 aa, Homo sapiens
  misc_feature: Table A; Target 15130; HLA-A*25:01; CLDN6; ENSG00000184697; TAA
GVVLTLLGW

SEQ ID NO: 15131 - protein, 9 aa, Homo sapiens
  misc_feature: Table A; Target 15131; HLA-B*57:01; CLDN6; ENSG00000184697; TAA
GVVLTLLGW

SEQ ID NO: 15132 - protein, 9 aa, Homo sapiens
  misc_feature: Table A; Target 15132; HLA-B*58:01; CLDN6; ENSG00000184697; TAA
GVVLTLLGW

SEQ ID NO: 15133 - protein, 8 aa, Homo sapiens
  misc_feature: Table A; Target 15133; HLA-A*23:01; CLDN6; ENSG00000184697; TAA
IALLVALF

SEQ ID NO: 15134 - protein, 8 aa, Homo sapiens
  misc_feature: Table A; Target 15134; HLA-B*51:01; CLDN6; ENSG00000184697; TAA
IALLVALF

SEQ ID NO: 15135 - protein, 8 aa, Homo sapiens
  misc_feature: Table A; Target 15135; HLA-B*57:01; CLDN6; ENSG00000184697; TAA
IALLVALF

SEQ ID NO: 15136 - protein, 8 aa, Homo sapiens
  misc_feature: Table A; Target 15136; HLA-B*54:01; CLDN6; ENSG00000184697; TAA
IGNSIVVA

SEQ ID NO: 15137 - protein, 9 aa, Homo sapiens
  misc_feature: Table A; Target 15137; HLA-A*03:02; CLDN6; ENSG00000184697; TAA
IGNSIVVAQ

SEQ ID NO: 15138 - protein, 9 aa, Homo sapiens
  misc_feature: Table A; Target 15138; HLA-A*31:01; CLDN6; ENSG00000184697; TAA
IGNSIVVAQ

SEQ ID NO: 15139 - protein, 9 aa, Homo sapiens
  misc_feature: Table A; Target 15139; HLA-A*33:01; CLDN6; ENSG00000184697; TAA
IGNSIVVAQ

SEQ ID NO: 15140 - protein, 9 aa, Homo sapiens
  misc_feature: Table A; Target 15140; HLA-A*33:03; CLDN6; ENSG00000184697; TAA
IGNSIVVAQ

SEQ ID NO: 15141 - protein, 9 aa, Homo sapiens
  misc_feature: Table A; Target 15141; HLA-B*07:02; CLDN6; ENSG00000184697; TAA
IGNSIVVAQ

SEQ ID NO: 15142 - protein, 9 aa, Homo sapiens
  misc_feature: Table A; Target 15142; HLA-B*27:02; CLDN6; ENSG00000184697; TAA
IGNSIVVAQ

SEQ ID NO: 15143 - protein, 9 aa, Homo sapiens
  misc_feature: Table A; Target 15143; HLA-B*27:05; CLDN6; ENSG00000184697; TAA
IGNSIVVAQ

SEQ ID NO: 15144 - protein, 9 aa, Homo sapiens
  misc_feature: Table A; Target 15144; HLA-B*35:01; CLDN6; ENSG00000184697; TAA
IGNSIVVAQ

SEQ ID NO: 15145 - protein, 9 aa, Homo sapiens
  misc_feature: Table A; Target 15145; HLA-C*01:02; CLDN6; ENSG00000184697; TAA
IGNSIVVAQ

SEQ ID NO: 15146 - protein, 9 aa, Homo sapiens
  misc_feature: Table A; Target 15146; HLA-C*04:01; CLDN6; ENSG00000184697; TAA
IGNSIVVAQ

SEQ ID NO: 15147 - protein, 9 aa, Homo sapiens
  misc_feature: Table A; Target 15147; HLA-C*06:02; CLDN6; ENSG00000184697; TAA
IGNSIVVAQ

SEQ ID NO: 15148 - protein, 9 aa, Homo sapiens
  misc_feature: Table A; Target 15148; HLA-C*07:01; CLDN6; ENSG00000184697; TAA
IGNSIVVAQ

SEQ ID NO: 15149 - protein, 9 aa, Homo sapiens
  misc_feature: Table A; Target 15149; HLA-C*07:02; CLDN6; ENSG00000184697; TAA
IGNSIVVAQ

SEQ ID NO: 15150 - protein, 9 aa, Homo sapiens
  misc_feature: Table A; Target 15150; HLA-C*07:04; CLDN6; ENSG00000184697; TAA
IGNSIVVAQ

SEQ ID NO: 15151 - protein, 9 aa, Homo sapiens
  misc_feature: Table A; Target 15151; HLA-C*12:03; CLDN6; ENSG00000184697; TAA
IGNSIVVAQ

SEQ ID NO: 15152 - protein, 9 aa, Homo sapiens
  misc_feature: Table A; Target 15152; HLA-C*14:02; CLDN6; ENSG00000184697; TAA
IGNSIVVAQ

SEQ ID NO: 15153 - protein, 9 aa, Homo sapiens
  misc_feature: Table A; Target 15153; HLA-C*16:02; CLDN6; ENSG00000184697; TAA
IGNSIVVAQ

SEQ ID NO: 15154 - protein, 9 aa, Homo sapiens
  misc_feature: Table A; Target 15154; HLA-A*03:01; CLDN6; ENSG00000184697; TAA
IIRDFYNPL

SEQ ID NO: 15155 - protein, 9 aa, Homo sapiens
  misc_feature: Table A; Target 15155; HLA-A*31:01; CLDN6; ENSG00000184697; TAA
IIRDFYNPL

SEQ ID NO: 15156 - protein, 9 aa, Homo sapiens
  misc_feature: Table A; Target 15156; HLA-C*01:02; CLDN6; ENSG00000184697; TAA
IIRDFYNPL

SEQ ID NO: 15157 - protein, 10 aa, Homo sapiens
  misc_feature: Table A; Target 15157; HLA-A*02:03; CLDN6; ENSG00000184697; TAA
IIRDFYNPLV

SEQ ID NO: 15158 - protein, 8 aa, Homo sapiens
  misc_feature: Table A; Target 15158; HLA-A*02:01; CLDN6; ENSG00000184697; TAA
ILGVVLTL

SEQ ID NO: 15159 - protein, 8 aa, Homo sapiens
  misc_feature: Table A; Target 15159; HLA-A*02:03; CLDN6; ENSG00000184697; TAA
ILGVVLTL

SEQ ID NO: 15160 - protein, 8 aa, Homo sapiens
  misc_feature: Table A; Target 15160; HLA-A*02:04; CLDN6; ENSG00000184697; TAA
ILGVVLTL

SEQ ID NO: 15161 - protein, 8 aa, Homo sapiens
  misc_feature: Table A; Target 15161; HLA-A*23:01; CLDN6; ENSG00000184697; TAA
ILGVVLTL

SEQ ID NO: 15162 - protein, 8 aa, Homo sapiens
  misc_feature: Table A; Target 15162; HLA-C*07:04; CLDN6; ENSG00000184697; TAA
ILGVVLTL

SEQ ID NO: 15163 - protein, 8 aa, Homo sapiens
  misc_feature: Table A; Target 15163; HLA-C*12:03; CLDN6; ENSG00000184697; TAA
ILGVVLTL

SEQ ID NO: 15164 - protein, 9 aa, Homo sapiens
  misc_feature: Table A; Target 15164; HLA-A*02:01; CLDN6; ENSG00000184697; TAA
ILGVVLTLL

SEQ ID NO: 15165 - protein, 9 aa, Homo sapiens
  misc_feature: Table A; Target 15165; HLA-A*02:03; CLDN6; ENSG00000184697; TAA
ILGVVLTLL

SEQ ID NO: 15166 - protein, 9 aa, Homo sapiens
  misc_feature: Table A; Target 15166; HLA-A*02:04; CLDN6; ENSG00000184697; TAA
ILGVVLTLL

SEQ ID NO: 15167 - protein, 9 aa, Homo sapiens
  misc_feature: Table A; Target 15167; HLA-A*02:07; CLDN6; ENSG00000184697; TAA
ILGVVLTLL

SEQ ID NO: 15168 - protein, 9 aa, Homo sapiens
  misc_feature: Table A; Target 15168; HLA-A*24:02; CLDN6; ENSG00000184697; TAA
ILGVVLTLL

SEQ ID NO: 15169 - protein, 8 aa, Homo sapiens
  misc_feature: Table A; Target 15169; HLA-A*30:02; CLDN6; ENSG00000184697; TAA
ISRGPSEY

SEQ ID NO: 15170 - protein, 8 aa, Homo sapiens
  misc_feature: Table A; Target 15170; HLA-B*15:01; CLDN6; ENSG00000184697; TAA
ISRGPSEY

SEQ ID NO: 15171 - protein, 8 aa, Homo sapiens
  misc_feature: Table A; Target 15171; HLA-B*15:03; CLDN6; ENSG00000184697; TAA
ISRGPSEY

SEQ ID NO: 15172 - protein, 8 aa, Homo sapiens
  misc_feature: Table A; Target 15172; HLA-B*46:01; CLDN6; ENSG00000184697; TAA
ISRGPSEY

SEQ ID NO: 15173 - protein, 8 aa, Homo sapiens
  misc_feature: Table A; Target 15173; HLA-C*16:01; CLDN6; ENSG00000184697; TAA
ISRGPSEY

SEQ ID NO: 15174 - protein, 8 aa, Homo sapiens
  misc_feature: Table A; Target 15174; HLA-C*16:02; CLDN6; ENSG00000184697; TAA
ISRGPSEY

SEQ ID NO: 15175 - protein, 10 aa, Homo sapiens
  misc_feature: Table A; Target 15175; HLA-C*06:02; CLDN6; ENSG00000184697; TAA
ISRGPSEYPT

SEQ ID NO: 15176 - protein, 10 aa, Homo sapiens
  misc_feature: Table A; Target 15176; HLA-C*07:02; CLDN6; ENSG00000184697; TAA
ISRGPSEYPT

SEQ ID NO: 15177 - protein, 11 aa, Homo sapiens
  misc_feature: Table A; Target 15177; HLA-A*03:02; CLDN6; ENSG00000184697; TAA
ISRGPSEYPTK

SEQ ID NO: 15178 - protein, 8 aa, Homo sapiens
  misc_feature: Table A; Target 15178; HLA-A*02:03; CLDN6; ENSG00000184697; TAA
IVFVISGV

SEQ ID NO: 15179 - protein, 8 aa, Homo sapiens
  misc_feature: Table A; Target 15179; HLA-B*51:01; CLDN6; ENSG00000184697; TAA
IVFVISGV

SEQ ID NO: 15180 - protein, 9 aa, Homo sapiens
  misc_feature: Table A; Target 15180; HLA-A*23:01; CLDN6; ENSG00000184697; TAA
IVFVISGVL

SEQ ID NO: 15181 - protein, 9 aa, Homo sapiens
  misc_feature: Table A; Target 15181; HLA-A*25:01; CLDN6; ENSG00000184697; TAA
IVFVISGVL

SEQ ID NO: 15182 - protein, 9 aa, Homo sapiens
  misc_feature: Table A; Target 15182; HLA-B*07:02; CLDN6; ENSG00000184697; TAA
IVFVISGVL

SEQ ID NO: 15183 - protein, 9 aa, Homo sapiens
  misc_feature: Table A; Target 15183; HLA-B*15:03; CLDN6; ENSG00000184697; TAA
IVFVISGVL

SEQ ID NO: 15184 - protein, 9 aa, Homo sapiens
  misc_feature: Table A; Target 15184; HLA-B*35:01; CLDN6; ENSG00000184697; TAA
IVFVISGVL

SEQ ID NO: 15185 - protein, 9 aa, Homo sapiens
  misc_feature: Table A; Target 15185; HLA-B*35:03; CLDN6; ENSG00000184697; TAA
IVFVISGVL

SEQ ID NO: 15186 - protein, 9 aa, Homo sapiens
  misc_feature: Table A; Target 15186; HLA-B*40:01; CLDN6; ENSG00000184697; TAA
IVFVISGVL

SEQ ID NO: 15187 - protein, 9 aa, Homo sapiens
  misc_feature: Table A; Target 15187; HLA-B*46:01; CLDN6; ENSG00000184697; TAA
IVFVISGVL

SEQ ID NO: 15188 - protein, 9 aa, Homo sapiens
  misc_feature: Table A; Target 15188; HLA-C*01:02; CLDN6; ENSG00000184697; TAA
IVFVISGVL

SEQ ID NO: 15189 - protein, 9 aa, Homo sapiens
  misc_feature: Table A; Target 15189; HLA-C*02:02; CLDN6; ENSG00000184697; TAA
IVFVISGVL

SEQ ID NO: 15190 - protein, 9 aa, Homo sapiens
  misc_feature: Table A; Target 15190; HLA-C*03:03; CLDN6; ENSG00000184697; TAA
IVFVISGVL

SEQ ID NO: 15191 - protein, 9 aa, Homo sapiens
  misc_feature: Table A; Target 15191; HLA-C*03:04; CLDN6; ENSG00000184697; TAA
IVFVISGVL

SEQ ID NO: 15192 - protein, 9 aa, Homo sapiens
  misc_feature: Table A; Target 15192; HLA-C*07:02; CLDN6; ENSG00000184697; TAA
IVFVISGVL

SEQ ID NO: 15193 - protein, 9 aa, Homo sapiens
  misc_feature: Table A; Target 15193; HLA-C*12:03; CLDN6; ENSG00000184697; TAA
IVFVISGVL

SEQ ID NO: 15194 - protein, 9 aa, Homo sapiens
  misc_feature: Table A; Target 15194; HLA-C*16:04; CLDN6; ENSG00000184697; TAA
IVFVISGVL

SEQ ID NO: 15195 - protein, 11 aa, Homo sapiens
  misc_feature: Table A; Target 15195; HLA-A*68:02; CLDN6; ENSG00000184697; TAA
IVFVISGVLTL

SEQ ID NO: 15196 - protein, 8 aa, Homo sapiens
  misc_feature: Table A; Target 15196; HLA-B*57:01; CLDN6; ENSG00000184697; TAA
IVVAQVVW

SEQ ID NO: 15197 - protein, 8 aa, Homo sapiens
  misc_feature: Table A; Target 15197; HLA-B*58:01; CLDN6; ENSG00000184697; TAA
IVVAQVVW

SEQ ID NO: 15198 - protein, 8 aa, Homo sapiens
  misc_feature: Table A; Target 15198; HLA-B*37:01; CLDN6; ENSG00000184697; TAA
KDSKARLV

SEQ ID NO: 15199 - protein, 8 aa, Homo sapiens
  misc_feature: Table A; Target 15199; HLA-C*06:02; CLDN6; ENSG00000184697; TAA
KDSKARLV

SEQ ID NO: 15200 - protein, 9 aa, Homo sapiens
  misc_feature: Table A; Target 15200; HLA-B*37:01; CLDN6; ENSG00000184697; TAA
KDSKARLVL

SEQ ID NO: 15201 - protein, 9 aa, Homo sapiens
  misc_feature: Table A; Target 15201; HLA-B*40:02; CLDN6; ENSG00000184697; TAA
KDSKARLVL

SEQ ID NO: 15202 - protein, 9 aa, Homo sapiens
  misc_feature: Table A; Target 15202; HLA-C*06:02; CLDN6; ENSG00000184697; TAA
KDSKARLVL

SEQ ID NO: 15203 - protein, 9 aa, Homo sapiens
  misc_feature: Table A; Target 15203; HLA-A*01:01; CLDN6; ENSG00000184697; TAA
KRELGASLY

SEQ ID NO: 15204 - protein, 9 aa, Homo sapiens
  misc_feature: Table A; Target 15204; HLA-C*06:02; CLDN6; ENSG00000184697; TAA
KRELGASLY

SEQ ID NO: 15205 - protein, 9 aa, Homo sapiens
  misc_feature: Table A; Target 15205; HLA-C*07:01; CLDN6; ENSG00000184697; TAA
KRELGASLY

SEQ ID NO: 15206 - protein, 9 aa, Homo sapiens
  misc_feature: Table A; Target 15206; HLA-C*16:04; CLDN6; ENSG00000184697; TAA
KRELGASLY

SEQ ID NO: 15207 - protein, 10 aa, Homo sapiens
  misc_feature: Table A; Target 15207; HLA-A*32:01; CLDN6; ENSG00000184697; TAA
KVTAFIGNSI

SEQ ID NO: 15208 - protein, 10 aa, Homo sapiens
  misc_feature: Table A; Target 15208; HLA-B*13:02; CLDN6; ENSG00000184697; TAA
KVTAFIGNSI

SEQ ID NO: 15209 - protein, 10 aa, Homo sapiens
  misc_feature: Table A; Target 15209; HLA-B*58:01; CLDN6; ENSG00000184697; TAA
KVTAFIGNSI

SEQ ID NO: 15210 - protein, 10 aa, Homo sapiens
  misc_feature: Table A; Target 15210; HLA-C*06:02; CLDN6; ENSG00000184697; TAA
KVTAFIGNSI

SEQ ID NO: 15211 - protein, 9 aa, Homo sapiens
  misc_feature: Table A; Target 15211; HLA-A*02:01; CLDN6; ENSG00000184697; TAA
KVYDSLLAL

SEQ ID NO: 15212 - protein, 9 aa, Homo sapiens
  misc_feature: Table A; Target 15212; HLA-A*02:03; CLDN6; ENSG00000184697; TAA
KVYDSLLAL

SEQ ID NO: 15213 - protein, 9 aa, Homo sapiens
  misc_feature: Table A; Target 15213; HLA-A*02:04; CLDN6; ENSG00000184697; TAA
KVYDSLLAL

SEQ ID NO: 15214 - protein, 9 aa, Homo sapiens
  misc_feature: Table A; Target 15214; HLA-A*02:07; CLDN6; ENSG00000184697; TAA
KVYDSLLAL

SEQ ID NO: 15215 - protein, 9 aa, Homo sapiens
  misc_feature: Table A; Target 15215; HLA-A*03:01; CLDN6; ENSG00000184697; TAA
KVYDSLLAL

SEQ ID NO: 15216 - protein, 9 aa, Homo sapiens
  misc_feature: Table A; Target 15216; HLA-A*03:02; CLDN6; ENSG00000184697; TAA
KVYDSLLAL

SEQ ID NO: 15217 - protein, 9 aa, Homo sapiens
  misc_feature: Table A; Target 15217; HLA-A*11:01; CLDN6; ENSG00000184697; TAA
KVYDSLLAL

SEQ ID NO: 15218 - protein, 9 aa, Homo sapiens
  misc_feature: Table A; Target 15218; HLA-A*23:01; CLDN6; ENSG00000184697; TAA
KVYDSLLAL

SEQ ID NO: 15219 - protein, 9 aa, Homo sapiens
  misc_feature: Table A; Target 15219; HLA-A*25:01; CLDN6; ENSG00000184697; TAA
KVYDSLLAL

SEQ ID NO: 15220 - protein, 9 aa, Homo sapiens
  misc_feature: Table A; Target 15220; HLA-A*26:01; CLDN6; ENSG00000184697; TAA
KVYDSLLAL

SEQ ID NO: 15221 - protein, 9 aa, Homo sapiens
  misc_feature: Table A; Target 15221; HLA-A*29:02; CLDN6; ENSG00000184697; TAA
KVYDSLLAL

SEQ ID NO: 15222 - protein, 9 aa, Homo sapiens
  misc_feature: Table A; Target 15222; HLA-A*31:01; CLDN6; ENSG00000184697; TAA
KVYDSLLAL

SEQ ID NO: 15223 - protein, 9 aa, Homo sapiens
  misc_feature: Table A; Target 15223; HLA-A*32:01; CLDN6; ENSG00000184697; TAA
KVYDSLLAL

SEQ ID NO: 15224 - protein, 9 aa, Homo sapiens
  misc_feature: Table A; Target 15224; HLA-A*68:02; CLDN6; ENSG00000184697; TAA
KVYDSLLAL

SEQ ID NO: 15225 - protein, 9 aa, Homo sapiens
  misc_feature: Table A; Target 15225; HLA-B*13:02; CLDN6; ENSG00000184697; TAA
KVYDSLLAL

SEQ ID NO: 15226 - protein, 9 aa, Homo sapiens
  misc_feature: Table A; Target 15226; HLA-B*40:02; CLDN6; ENSG00000184697; TAA
KVYDSLLAL

SEQ ID NO: 15227 - protein, 9 aa, Homo sapiens
  misc_feature: Table A; Target 15227; HLA-B*46:01; CLDN6; ENSG00000184697; TAA
KVYDSLLAL

SEQ ID NO: 15228 - protein, 9 aa, Homo sapiens
  misc_feature: Table A; Target 15228; HLA-B*57:01; CLDN6; ENSG00000184697; TAA
KVYDSLLAL

SEQ ID NO: 15229 - protein, 9 aa, Homo sapiens
  misc_feature: Table A; Target 15229; HLA-B*58:01; CLDN6; ENSG00000184697; TAA
KVYDSLLAL

SEQ ID NO: 15230 - protein, 9 aa, Homo sapiens
  misc_feature: Table A; Target 15230; HLA-C*01:02; CLDN6; ENSG00000184697; TAA
KVYDSLLAL

SEQ ID NO: 15231 - protein, 9 aa, Homo sapiens
  misc_feature: Table A; Target 15231; HLA-C*02:02; CLDN6; ENSG00000184697; TAA
KVYDSLLAL

SEQ ID NO: 15232 - protein, 9 aa, Homo sapiens
  misc_feature: Table A; Target 15232; HLA-C*03:03; CLDN6; ENSG00000184697; TAA
KVYDSLLAL

SEQ ID NO: 15233 - protein, 9 aa, Homo sapiens
  misc_feature: Table A; Target 15233; HLA-C*03:04; CLDN6; ENSG00000184697; TAA
KVYDSLLAL

SEQ ID NO: 15234 - protein, 9 aa, Homo sapiens
  misc_feature: Table A; Target 15234; HLA-C*12:03; CLDN6; ENSG00000184697; TAA
KVYDSLLAL

SEQ ID NO: 15235 - protein, 11 aa, Homo sapiens
  misc_feature: Table A; Target 15235; HLA-A*03:01; CLDN6; ENSG00000184697; TAA
KVYDSLLALPQ

SEQ ID NO: 15236 - protein, 9 aa, Homo sapiens
  misc_feature: Table A; Target 15236; HLA-A*02:01; CLDN6; ENSG00000184697; TAA
LALPQDLQA

SEQ ID NO: 15237 - protein, 9 aa, Homo sapiens
  misc_feature: Table A; Target 15237; HLA-B*27:05; CLDN6; ENSG00000184697; TAA
LALPQDLQA

SEQ ID NO: 15238 - protein, 9 aa, Homo sapiens
  misc_feature: Table A; Target 15238; HLA-B*35:03; CLDN6; ENSG00000184697; TAA
LALPQDLQA

SEQ ID NO: 15239 - protein, 9 aa, Homo sapiens
  misc_feature: Table A; Target 15239; HLA-B*54:01; CLDN6; ENSG00000184697; TAA
LALPQDLQA

SEQ ID NO: 15240 - protein, 9 aa, Homo sapiens
  misc_feature: Table A; Target 15240; HLA-B*55:01; CLDN6; ENSG00000184697; TAA
LALPQDLQA

SEQ ID NO: 15241 - protein, 9 aa, Homo sapiens
  misc_feature: Table A; Target 15241; HLA-B*56:01; CLDN6; ENSG00000184697; TAA
LALPQDLQA

SEQ ID NO: 15242 - protein, 9 aa, Homo sapiens
  misc_feature: Table A; Target 15242; HLA-C*03:03; CLDN6; ENSG00000184697; TAA
LALPQDLQA

SEQ ID NO: 15243 - protein, 9 aa, Homo sapiens
  misc_feature: Table A; Target 15243; HLA-C*03:04; CLDN6; ENSG00000184697; TAA
LALPQDLQA

SEQ ID NO: 15244 - protein, 10 aa, Homo sapiens
  misc_feature: Table A; Target 15244; HLA-A*02:01; CLDN6; ENSG00000184697; TAA
LALPQDLQAA

SEQ ID NO: 15245 - protein, 10 aa, Homo sapiens
  misc_feature: Table A; Target 15245; HLA-B*27:05; CLDN6; ENSG00000184697; TAA
LALPQDLQAA

SEQ ID NO: 15246 - protein, 10 aa, Homo sapiens
  misc_feature: Table A; Target 15246; HLA-B*46:01; CLDN6; ENSG00000184697; TAA
LALPQDLQAA

SEQ ID NO: 15247 - protein, 10 aa, Homo sapiens
  misc_feature: Table A; Target 15247; HLA-B*54:01; CLDN6; ENSG00000184697; TAA
LALPQDLQAA

SEQ ID NO: 15248 - protein, 10 aa, Homo sapiens
  misc_feature: Table A; Target 15248; HLA-B*55:01; CLDN6; ENSG00000184697; TAA
LALPQDLQAA

SEQ ID NO: 15249 - protein, 10 aa, Homo sapiens
  misc_feature: Table A; Target 15249; HLA-B*56:01; CLDN6; ENSG00000184697; TAA
LALPQDLQAA

SEQ ID NO: 15250 - protein, 10 aa, Homo sapiens
  misc_feature: Table A; Target 15250; HLA-C*03:04; CLDN6; ENSG00000184697; TAA
LALPQDLQAA

SEQ ID NO: 15251 - protein, 10 aa, Homo sapiens
  misc_feature: Table A; Target 15251; HLA-C*04:01; CLDN6; ENSG00000184697; TAA
LALPQDLQAA

SEQ ID NO: 15252 - protein, 10 aa, Homo sapiens
  misc_feature: Table A; Target 15252; HLA-C*06:02; CLDN6; ENSG00000184697; TAA
LALPQDLQAA

SEQ ID NO: 15253 - protein, 10 aa, Homo sapiens
  misc_feature: Table A; Target 15253; HLA-C*07:01; CLDN6; ENSG00000184697; TAA
LALPQDLQAA

SEQ ID NO: 15254 - protein, 11 aa, Homo sapiens
  misc_feature: Table A; Target 15254; HLA-A*11:01; CLDN6; ENSG00000184697; TAA
LALPQDLQAAR

SEQ ID NO: 15255 - protein, 11 aa, Homo sapiens
  misc_feature: Table A; Target 15255; HLA-A*29:02; CLDN6; ENSG00000184697; TAA
LALPQDLQAAR

SEQ ID NO: 15256 - protein, 11 aa, Homo sapiens
  misc_feature: Table A; Target 15256; HLA-A*31:01; CLDN6; ENSG00000184697; TAA
LALPQDLQAAR

SEQ ID NO: 15257 - protein, 11 aa, Homo sapiens
  misc_feature: Table A; Target 15257; HLA-A*33:01; CLDN6; ENSG00000184697; TAA
LALPQDLQAAR

SEQ ID NO: 15258 - protein, 11 aa, Homo sapiens
  misc_feature: Table A; Target 15258; HLA-A*33:03; CLDN6; ENSG00000184697; TAA
LALPQDLQAAR

SEQ ID NO: 15259 - protein, 11 aa, Homo sapiens
  misc_feature: Table A; Target 15259; HLA-A*68:01; CLDN6; ENSG00000184697; TAA
LALPQDLQAAR

SEQ ID NO: 15260 - protein, 11 aa, Homo sapiens
  misc_feature: Table A; Target 15260; HLA-B*27:02; CLDN6; ENSG00000184697; TAA
LALPQDLQAAR

SEQ ID NO: 15261 - protein, 11 aa, Homo sapiens
  misc_feature: Table A; Target 15261; HLA-B*27:05; CLDN6; ENSG00000184697; TAA
LALPQDLQAAR

SEQ ID NO: 15262 - protein, 11 aa, Homo sapiens
  misc_feature: Table A; Target 15262; HLA-B*57:01; CLDN6; ENSG00000184697; TAA
LALPQDLQAAR

SEQ ID NO: 15263 - protein, 11 aa, Homo sapiens
  misc_feature: Table A; Target 15263; HLA-C*07:06; CLDN6; ENSG00000184697; TAA
LALPQDLQAAR

SEQ ID NO: 15264 - protein, 9 aa, Homo sapiens
  misc_feature: Table A; Target 15264; HLA-B*57:01; CLDN6; ENSG00000184697; TAA
LGASLYLGW

SEQ ID NO: 15265 - protein, 11 aa, Homo sapiens
  misc_feature: Table A; Target 15265; HLA-A*02:01; CLDN6; ENSG00000184697; TAA
LLALPQDLQAA

SEQ ID NO: 15266 - protein, 11 aa, Homo sapiens
  misc_feature: Table A; Target 15266; HLA-A*02:03; CLDN6; ENSG00000184697; TAA
LLALPQDLQAA

SEQ ID NO: 15267 - protein, 11 aa, Homo sapiens
  misc_feature: Table A; Target 15267; HLA-A*02:04; CLDN6; ENSG00000184697; TAA
LLALPQDLQAA

SEQ ID NO: 15268 - protein, 11 aa, Homo sapiens
  misc_feature: Table A; Target 15268; HLA-B*54:01; CLDN6; ENSG00000184697; TAA
LLALPQDLQAA

SEQ ID NO: 15269 - protein, 11 aa, Homo sapiens
  misc_feature: Table A; Target 15269; HLA-C*06:02; CLDN6; ENSG00000184697; TAA
LLALPQDLQAA

SEQ ID NO: 15270 - protein, 8 aa, Homo sapiens
  misc_feature: Table A; Target 15270; HLA-A*02:03; CLDN6; ENSG00000184697; TAA
LLGWVNGL

SEQ ID NO: 15271 - protein, 8 aa, Homo sapiens
  misc_feature: Table A; Target 15271; HLA-A*02:04; CLDN6; ENSG00000184697; TAA
LLGWVNGL

SEQ ID NO: 15272 - protein, 9 aa, Homo sapiens
  misc_feature: Table A; Target 15272; HLA-A*02:03; CLDN6; ENSG00000184697; TAA
LLGWVNGLV

SEQ ID NO: 15273 - protein, 9 aa, Homo sapiens
  misc_feature: Table A; Target 15273; HLA-A*02:01; CLDN6; ENSG00000184697; TAA
LLLGGGLLC

SEQ ID NO: 15274 - protein, 10 aa, Homo sapiens
  misc_feature: Table A; Target 15274; HLA-A*02:01; CLDN6; ENSG00000184697; TAA
LLLGGGLLCC

SEQ ID NO: 15275 - protein, 9 aa, Homo sapiens
  misc_feature: Table A; Target 15275; HLA-A*02:04; CLDN6; ENSG00000184697; TAA
LLLLGGGLL

SEQ ID NO: 15276 - protein, 8 aa, Homo sapiens
  misc_feature: Table A; Target 15276; HLA-A*02:04; CLDN6; ENSG00000184697; TAA
LLVALFGL

SEQ ID NO: 15277 - protein, 9 aa, Homo sapiens
  misc_feature: Table A; Target 15277; HLA-A*02:07; CLDN6; ENSG00000184697; TAA
LLVALFGLL

SEQ ID NO: 15278 - protein, 9 aa, Homo sapiens
  misc_feature: Table A; Target 15278; HLA-A*03:01; CLDN6; ENSG00000184697; TAA
LLVYLAGAK

SEQ ID NO: 15279 - protein, 9 aa, Homo sapiens
  misc_feature: Table A; Target 15279; HLA-B*27:02; CLDN6; ENSG00000184697; TAA
LLVYLAGAK

SEQ ID NO: 15280 - protein, 8 aa, Homo sapiens
  misc_feature: Table A; Target 15280; HLA-B*08:01; CLDN6; ENSG00000184697; TAA
LPMWKVTA

SEQ ID NO: 15281 - protein, 8 aa, Homo sapiens
  misc_feature: Table A; Target 15281; HLA-B*54:01; CLDN6; ENSG00000184697; TAA
LPMWKVTA

SEQ ID NO: 15282 - protein, 8 aa, Homo sapiens
  misc_feature: Table A; Target 15282; HLA-B*55:01; CLDN6; ENSG00000184697; TAA
LPMWKVTA

SEQ ID NO: 15283 - protein, 8 aa, Homo sapiens
  misc_feature: Table A; Target 15283; HLA-B*56:01; CLDN6; ENSG00000184697; TAA
LPMWKVTA

SEQ ID NO: 15284 - protein, 9 aa, Homo sapiens
  misc_feature: Table A; Target 15284; HLA-B*07:02; CLDN6; ENSG00000184697; TAA
LPMWKVTAF

SEQ ID NO: 15285 - protein, 9 aa, Homo sapiens
  misc_feature: Table A; Target 15285; HLA-B*08:01; CLDN6; ENSG00000184697; TAA
LPMWKVTAF

SEQ ID NO: 15286 - protein, 9 aa, Homo sapiens
  misc_feature: Table A; Target 15286; HLA-B*35:01; CLDN6; ENSG00000184697; TAA
LPMWKVTAF

SEQ ID NO: 15287 - protein, 9 aa, Homo sapiens
  misc_feature: Table A; Target 15287; HLA-B*35:03; CLDN6; ENSG00000184697; TAA
LPMWKVTAF

SEQ ID NO: 15288 - protein, 9 aa, Homo sapiens
  misc_feature: Table A; Target 15288; HLA-B*51:01; CLDN6; ENSG00000184697; TAA
LPMWKVTAF

SEQ ID NO: 15289 - protein, 9 aa, Homo sapiens
  misc_feature: Table A; Target 15289; HLA-B*54:01; CLDN6; ENSG00000184697; TAA
LPMWKVTAF

SEQ ID NO: 15290 - protein, 9 aa, Homo sapiens
  misc_feature: Table A; Target 15290; HLA-B*55:01; CLDN6; ENSG00000184697; TAA
LPMWKVTAF

SEQ ID NO: 15291 - protein, 9 aa, Homo sapiens
  misc_feature: Table A; Target 15291; HLA-B*56:01; CLDN6; ENSG00000184697; TAA
LPMWKVTAF

SEQ ID NO: 15292 - protein, 9 aa, Homo sapiens
  misc_feature: Table A; Target 15292; HLA-C*07:02; CLDN6; ENSG00000184697; TAA
LPMWKVTAF

SEQ ID NO: 15293 - protein, 8 aa, Homo sapiens
  misc_feature: Table A; Target 15293; HLA-B*54:01; CLDN6; ENSG00000184697; TAA
LPQDLQAA

SEQ ID NO: 15294 - protein, 8 aa, Homo sapiens
  misc_feature: Table A; Target 15294; HLA-B*55:01; CLDN6; ENSG00000184697; TAA
LPQDLQAA

SEQ ID NO: 15295 - protein, 8 aa, Homo sapiens
  misc_feature: Table A; Target 15295; HLA-B*56:01; CLDN6; ENSG00000184697; TAA
LPQDLQAA

SEQ ID NO: 15296 - protein, 9 aa, Homo sapiens
  misc_feature: Table A; Target 15296; HLA-A*33:01; CLDN6; ENSG00000184697; TAA
LPQDLQAAR

SEQ ID NO: 15297 - protein, 9 aa, Homo sapiens
  misc_feature: Table A; Target 15297; HLA-A*33:03; CLDN6; ENSG00000184697; TAA
LPQDLQAAR

SEQ ID NO: 15298 - protein, 9 aa, Homo sapiens
  misc_feature: Table A; Target 15298; HLA-A*68:01; CLDN6; ENSG00000184697; TAA
LPQDLQAAR

SEQ ID NO: 15299 - protein, 9 aa, Homo sapiens
  misc_feature: Table A; Target 15299; HLA-B*27:02; CLDN6; ENSG00000184697; TAA
LPQDLQAAR

SEQ ID NO: 15300 - protein, 9 aa, Homo sapiens
  misc_feature: Table A; Target 15300; HLA-B*35:01; CLDN6; ENSG00000184697; TAA
LPQDLQAAR

SEQ ID NO: 15301 - protein, 9 aa, Homo sapiens
  misc_feature: Table A; Target 15301; HLA-B*35:03; CLDN6; ENSG00000184697; TAA
LPQDLQAAR

SEQ ID NO: 15302 - protein, 9 aa, Homo sapiens
  misc_feature: Table A; Target 15302; HLA-B*54:01; CLDN6; ENSG00000184697; TAA
LPQDLQAAR

SEQ ID NO: 15303 - protein, 9 aa, Homo sapiens
  misc_feature: Table A; Target 15303; HLA-B*55:01; CLDN6; ENSG00000184697; TAA
LPQDLQAAR

SEQ ID NO: 15304 - protein, 9 aa, Homo sapiens
  misc_feature: Table A; Target 15304; HLA-B*56:01; CLDN6; ENSG00000184697; TAA
LPQDLQAAR

SEQ ID NO: 15305 - protein, 9 aa, Homo sapiens
  misc_feature: Table A; Target 15305; HLA-C*07:06; CLDN6; ENSG00000184697; TAA
LPQDLQAAR

SEQ ID NO: 15306 - protein, 10 aa, Homo sapiens
  misc_feature: Table A; Target 15306; HLA-B*54:01; CLDN6; ENSG00000184697; TAA
LPQDLQAARA

SEQ ID NO: 15307 - protein, 10 aa, Homo sapiens
  misc_feature: Table A; Target 15307; HLA-B*55:01; CLDN6; ENSG00000184697; TAA
LPQDLQAARA

SEQ ID NO: 15308 - protein, 10 aa, Homo sapiens
  misc_feature: Table A; Target 15308; HLA-B*56:01; CLDN6; ENSG00000184697; TAA
LPQDLQAARA

SEQ ID NO: 15309 - protein, 11 aa, Homo sapiens
  misc_feature: Table A; Target 15309; HLA-B*07:02; CLDN6; ENSG00000184697; TAA
LPQDLQAARAL

SEQ ID NO: 15310 - protein, 11 aa, Homo sapiens
  misc_feature: Table A; Target 15310; HLA-B*35:01; CLDN6; ENSG00000184697; TAA
LPQDLQAARAL

SEQ ID NO: 15311 - protein, 11 aa, Homo sapiens
  misc_feature: Table A; Target 15311; HLA-B*35:03; CLDN6; ENSG00000184697; TAA
LPQDLQAARAL

SEQ ID NO: 15312 - protein, 11 aa, Homo sapiens
  misc_feature: Table A; Target 15312; HLA-B*54:01; CLDN6; ENSG00000184697; TAA
LPQDLQAARAL

SEQ ID NO: 15313 - protein, 11 aa, Homo sapiens
  misc_feature: Table A; Target 15313; HLA-B*55:01; CLDN6; ENSG00000184697; TAA
LPQDLQAARAL

SEQ ID NO: 15314 - protein, 11 aa, Homo sapiens
  misc_feature: Table A; Target 15314; HLA-B*56:01; CLDN6; ENSG00000184697; TAA
LPQDLQAARAL

SEQ ID NO: 15315 - protein, 11 aa, Homo sapiens
  misc_feature: Table A; Target 15315; HLA-C*01:02; CLDN6; ENSG00000184697; TAA
LPQDLQAARAL

SEQ ID NO: 15316 - protein, 11 aa, Homo sapiens
  misc_feature: Table A; Target 15316; HLA-C*04:01; CLDN6; ENSG00000184697; TAA
LPQDLQAARAL

SEQ ID NO: 15317 - protein, 11 aa, Homo sapiens
  misc_feature: Table A; Target 15317; HLA-C*07:02; CLDN6; ENSG00000184697; TAA
LPQDLQAARAL

SEQ ID NO: 15318 - protein, 11 aa, Homo sapiens
  misc_feature: Table A; Target 15318; HLA-C*14:02; CLDN6; ENSG00000184697; TAA
LPQDLQAARAL

SEQ ID NO: 15319 - protein, 9 aa, Homo sapiens
  misc_feature: Table A; Target 15319; HLA-B*08:01; CLDN6; ENSG00000184697; TAA
LQAARALCV

SEQ ID NO: 15320 - protein, 9 aa, Homo sapiens
  misc_feature: Table A; Target 15320; HLA-B*13:02; CLDN6; ENSG00000184697; TAA
LQAARALCV

SEQ ID NO: 15321 - protein, 8 aa, Homo sapiens
  misc_feature: Table A; Target 15321; HLA-B*57:01; CLDN6; ENSG00000184697; TAA
LTLIPVCW

SEQ ID NO: 15322 - protein, 9 aa, Homo sapiens
  misc_feature: Table A; Target 15322; HLA-A*02:01; CLDN6; ENSG00000184697; TAA
LTSGIVFVI

SEQ ID NO: 15323 - protein, 9 aa, Homo sapiens
  misc_feature: Table A; Target 15323; HLA-A*02:03; CLDN6; ENSG00000184697; TAA
LTSGIVFVI

SEQ ID NO: 15324 - protein, 9 aa, Homo sapiens
  misc_feature: Table A; Target 15324; HLA-A*02:04; CLDN6; ENSG00000184697; TAA
LTSGIVFVI

SEQ ID NO: 15325 - protein, 9 aa, Homo sapiens
  misc_feature: Table A; Target 15325; HLA-A*02:07; CLDN6; ENSG00000184697; TAA
LTSGIVFVI

SEQ ID NO: 15326 - protein, 9 aa, Homo sapiens
  misc_feature: Table A; Target 15326; HLA-A*23:01; CLDN6; ENSG00000184697; TAA
LTSGIVFVI

SEQ ID NO: 15327 - protein, 9 aa, Homo sapiens
  misc_feature: Table A; Target 15327; HLA-A*24:02; CLDN6; ENSG00000184697; TAA
LTSGIVFVI

SEQ ID NO: 15328 - protein, 9 aa, Homo sapiens
  misc_feature: Table A; Target 15328; HLA-A*68:01; CLDN6; ENSG00000184697; TAA
LTSGIVFVI

SEQ ID NO: 15329 - protein, 9 aa, Homo sapiens
  misc_feature: Table A; Target 15329; HLA-B*13:02; CLDN6; ENSG00000184697; TAA
LTSGIVFVI

SEQ ID NO: 15330 - protein, 9 aa, Homo sapiens
  misc_feature: Table A; Target 15330; HLA-B*27:02; CLDN6; ENSG00000184697; TAA
LTSGIVFVI

SEQ ID NO: 15331 - protein, 9 aa, Homo sapiens
  misc_feature: Table A; Target 15331; HLA-B*57:01; CLDN6; ENSG00000184697; TAA
LTSGIVFVI

SEQ ID NO: 15332 - protein, 9 aa, Homo sapiens
  misc_feature: Table A; Target 15332; HLA-C*02:02; CLDN6; ENSG00000184697; TAA
LTSGIVFVI

SEQ ID NO: 15333 - protein, 9 aa, Homo sapiens
  misc_feature: Table A; Target 15333; HLA-C*04:01; CLDN6; ENSG00000184697; TAA
LTSGIVFVI

SEQ ID NO: 15334 - protein, 9 aa, Homo sapiens
  misc_feature: Table A; Target 15334; HLA-C*06:02; CLDN6; ENSG00000184697; TAA
LTSGIVFVI

SEQ ID NO: 15335 - protein, 9 aa, Homo sapiens
  misc_feature: Table A; Target 15335; HLA-C*07:01; CLDN6; ENSG00000184697; TAA
LTSGIVFVI

SEQ ID NO: 15336 - protein, 9 aa, Homo sapiens
  misc_feature: Table A; Target 15336; HLA-C*07:04; CLDN6; ENSG00000184697; TAA
LTSGIVFVI

SEQ ID NO: 15337 - protein, 9 aa, Homo sapiens
  misc_feature: Table A; Target 15337; HLA-C*12:03; CLDN6; ENSG00000184697; TAA
LTSGIVFVI

SEQ ID NO: 15338 - protein, 10 aa, Homo sapiens
  misc_feature: Table A; Target 15338; HLA-C*16:01; CLDN6; ENSG00000184697; TAA
LVAEAQKREL

SEQ ID NO: 15339 - protein, 9 aa, Homo sapiens
  misc_feature: Table A; Target 15339; HLA-A*01:01; CLDN6; ENSG00000184697; TAA
LVALFGLLV

SEQ ID NO: 15340 - protein, 9 aa, Homo sapiens
  misc_feature: Table A; Target 15340; HLA-A*68:02; CLDN6; ENSG00000184697; TAA
LVALFGLLV

SEQ ID NO: 15341 - protein, 9 aa, Homo sapiens
  misc_feature: Table A; Target 15341; HLA-B*13:02; CLDN6; ENSG00000184697; TAA
LVALFGLLV

SEQ ID NO: 15342 - protein, 10 aa, Homo sapiens
  misc_feature: Table A; Target 15342; HLA-A*01:01; CLDN6; ENSG00000184697; TAA
LVALFGLLVY

SEQ ID NO: 15343 - protein, 10 aa, Homo sapiens
  misc_feature: Table A; Target 15343; HLA-A*29:02; CLDN6; ENSG00000184697; TAA
LVALFGLLVY

SEQ ID NO: 15344 - protein, 11 aa, Homo sapiens
  misc_feature: Table A; Target 15344; HLA-A*02:04; CLDN6; ENSG00000184697; TAA
LVALFGLLVYL

SEQ ID NO: 15345 - protein, 9 aa, Homo sapiens
  misc_feature: Table A; Target 15345; HLA-A*23:01; CLDN6; ENSG00000184697; TAA
LVLTSGIVF

SEQ ID NO: 15346 - protein, 9 aa, Homo sapiens
  misc_feature: Table A; Target 15346; HLA-A*29:02; CLDN6; ENSG00000184697; TAA
LVLTSGIVF

SEQ ID NO: 15347 - protein, 9 aa, Homo sapiens
  misc_feature: Table A; Target 15347; HLA-A*32:01; CLDN6; ENSG00000184697; TAA
LVLTSGIVF

SEQ ID NO: 15348 - protein, 9 aa, Homo sapiens
  misc_feature: Table A; Target 15348; HLA-B*15:01; CLDN6; ENSG00000184697; TAA
LVLTSGIVF

SEQ ID NO: 15349 - protein, 9 aa, Homo sapiens
  misc_feature: Table A; Target 15349; HLA-B*15:03; CLDN6; ENSG00000184697; TAA
LVLTSGIVF

SEQ ID NO: 15350 - protein, 9 aa, Homo sapiens
  misc_feature: Table A; Target 15350; HLA-B*46:01; CLDN6; ENSG00000184697; TAA
LVLTSGIVF

SEQ ID NO: 15351 - protein, 9 aa, Homo sapiens
  misc_feature: Table A; Target 15351; HLA-B*57:01; CLDN6; ENSG00000184697; TAA
LVLTSGIVF

SEQ ID NO: 15352 - protein, 9 aa, Homo sapiens
  misc_feature: Table A; Target 15352; HLA-C*02:02; CLDN6; ENSG00000184697; TAA
LVLTSGIVF

SEQ ID NO: 15353 - protein, 9 aa, Homo sapiens
  misc_feature: Table A; Target 15353; HLA-C*03:03; CLDN6; ENSG00000184697; TAA
LVLTSGIVF

SEQ ID NO: 15354 - protein, 9 aa, Homo sapiens
  misc_feature: Table A; Target 15354; HLA-C*03:04; CLDN6; ENSG00000184697; TAA
LVLTSGIVF

SEQ ID NO: 15355 - protein, 9 aa, Homo sapiens
  misc_feature: Table A; Target 15355; HLA-C*04:01; CLDN6; ENSG00000184697; TAA
LVLTSGIVF

SEQ ID NO: 15356 - protein, 9 aa, Homo sapiens
  misc_feature: Table A; Target 15356; HLA-C*07:04; CLDN6; ENSG00000184697; TAA
LVLTSGIVF

SEQ ID NO: 15357 - protein, 10 aa, Homo sapiens
  misc_feature: Table A; Target 15357; HLA-A*02:01; CLDN6; ENSG00000184697; TAA
LVLTSGIVFV

SEQ ID NO: 15358 - protein, 10 aa, Homo sapiens
  misc_feature: Table A; Target 15358; HLA-A*02:04; CLDN6; ENSG00000184697; TAA
LVLTSGIVFV

SEQ ID NO: 15359 - protein, 10 aa, Homo sapiens
  misc_feature: Table A; Target 15359; HLA-A*68:02; CLDN6; ENSG00000184697; TAA
LVLTSGIVFV

SEQ ID NO: 15360 - protein, 8 aa, Homo sapiens
  misc_feature: Table A; Target 15360; HLA-A*03:01; CLDN6; ENSG00000184697; TAA
LVYLAGAK

SEQ ID NO: 15361 - protein, 8 aa, Homo sapiens
  misc_feature: Table A; Target 15361; HLA-B*54:01; CLDN6; ENSG00000184697; TAA
MARYSTSA

SEQ ID NO: 15362 - protein, 9 aa, Homo sapiens
  misc_feature: Table A; Target 15362; HLA-B*54:01; CLDN6; ENSG00000184697; TAA
MARYSTSAP

SEQ ID NO: 15363 - protein, 10 aa, Homo sapiens
  misc_feature: Table A; Target 15363; HLA-B*54:01; CLDN6; ENSG00000184697; TAA
MARYSTSAPA

SEQ ID NO: 15364 - protein, 8 aa, Homo sapiens
  misc_feature: Table A; Target 15364; HLA-B*51:01; CLDN6; ENSG00000184697; TAA
MASAGMQI

SEQ ID NO: 15365 - protein, 8 aa, Homo sapiens
  misc_feature: Table A; Target 15365; HLA-C*03:04; CLDN6; ENSG00000184697; TAA
MASAGMQI

SEQ ID NO: 15366 - protein, 8 aa, Homo sapiens
  misc_feature: Table A; Target 15366; HLA-C*16:02; CLDN6; ENSG00000184697; TAA
MASAGMQI

SEQ ID NO: 15367 - protein, 9 aa, Homo sapiens
  misc_feature: Table A; Target 15367; HLA-B*35:01; CLDN6; ENSG00000184697; TAA
MASAGMQIL

SEQ ID NO: 15368 - protein, 9 aa, Homo sapiens
  misc_feature: Table A; Target 15368; HLA-B*35:03; CLDN6; ENSG00000184697; TAA
MASAGMQIL

SEQ ID NO: 15369 - protein, 9 aa, Homo sapiens
  misc_feature: Table A; Target 15369; HLA-B*38:01; CLDN6; ENSG00000184697; TAA
MASAGMQIL

SEQ ID NO: 15370 - protein, 9 aa, Homo sapiens
  misc_feature: Table A; Target 15370; HLA-C*02:02; CLDN6; ENSG00000184697; TAA
MASAGMQIL

SEQ ID NO: 15371 - protein, 9 aa, Homo sapiens
  misc_feature: Table A; Target 15371; HLA-C*03:03; CLDN6; ENSG00000184697; TAA
MASAGMQIL

SEQ ID NO: 15372 - protein, 9 aa, Homo sapiens
  misc_feature: Table A; Target 15372; HLA-C*03:04; CLDN6; ENSG00000184697; TAA
MASAGMQIL

SEQ ID NO: 15373 - protein, 9 aa, Homo sapiens
  misc_feature: Table A; Target 15373; HLA-C*07:04; CLDN6; ENSG00000184697; TAA
MASAGMQIL

SEQ ID NO: 15374 - protein, 9 aa, Homo sapiens
  misc_feature: Table A; Target 15374; HLA-C*07:06; CLDN6; ENSG00000184697; TAA
MASAGMQIL

SEQ ID NO: 15375 - protein, 9 aa, Homo sapiens
  misc_feature: Table A; Target 15375; HLA-C*12:03; CLDN6; ENSG00000184697; TAA
MASAGMQIL

SEQ ID NO: 15376 - protein, 9 aa, Homo sapiens
  misc_feature: Table A; Target 15376; HLA-B*38:01; CLDN6; ENSG00000184697; TAA
MQCKVYDSL

SEQ ID NO: 15377 - protein, 8 aa, Homo sapiens
  misc_feature: Table A; Target 15377; HLA-A*30:01; CLDN6; ENSG00000184697; TAA
MQILGVVL

SEQ ID NO: 15378 - protein, 8 aa, Homo sapiens
  misc_feature: Table A; Target 15378; HLA-B*08:01; CLDN6; ENSG00000184697; TAA
MQILGVVL

SEQ ID NO: 15379 - protein, 8 aa, Homo sapiens
  misc_feature: Table A; Target 15379; HLA-B*15:01; CLDN6; ENSG00000184697; TAA
MQILGVVL

SEQ ID NO: 15380 - protein, 8 aa, Homo sapiens
  misc_feature: Table A; Target 15380; HLA-B*15:03; CLDN6; ENSG00000184697; TAA
MQILGVVL

SEQ ID NO: 15381 - protein, 8 aa, Homo sapiens
  misc_feature: Table A; Target 15381; HLA-B*18:01; CLDN6; ENSG00000184697; TAA
MQILGVVL

SEQ ID NO: 15382 - protein, 8 aa, Homo sapiens
  misc_feature: Table A; Target 15382; HLA-B*27:05; CLDN6; ENSG00000184697; TAA
MQILGVVL

SEQ ID NO: 15383 - protein, 8 aa, Homo sapiens
  misc_feature: Table A; Target 15383; HLA-B*35:03; CLDN6; ENSG00000184697; TAA
MQILGVVL

SEQ ID NO: 15384 - protein, 8 aa, Homo sapiens
  misc_feature: Table A; Target 15384; HLA-B*38:01; CLDN6; ENSG00000184697; TAA
MQILGVVL

SEQ ID NO: 15385 - protein, 8 aa, Homo sapiens
  misc_feature: Table A; Target 15385; HLA-B*39:01; CLDN6; ENSG00000184697; TAA
MQILGVVL

SEQ ID NO: 15386 - protein, 8 aa, Homo sapiens
  misc_feature: Table A; Target 15386; HLA-B*40:01; CLDN6; ENSG00000184697; TAA
MQILGVVL

SEQ ID NO: 15387 - protein, 8 aa, Homo sapiens
  misc_feature: Table A; Target 15387; HLA-B*40:02; CLDN6; ENSG00000184697; TAA
MQILGVVL

SEQ ID NO: 15388 - protein, 8 aa, Homo sapiens
  misc_feature: Table A; Target 15388; HLA-C*03:03; CLDN6; ENSG00000184697; TAA
MQILGVVL

SEQ ID NO: 15389 - protein, 8 aa, Homo sapiens
  misc_feature: Table A; Target 15389; HLA-C*03:04; CLDN6; ENSG00000184697; TAA
MQILGVVL

SEQ ID NO: 15390 - protein, 8 aa, Homo sapiens
  misc_feature: Table A; Target 15390; HLA-C*07:04; CLDN6; ENSG00000184697; TAA
MQILGVVL

SEQ ID NO: 15391 - protein, 8 aa, Homo sapiens
  misc_feature: Table A; Target 15391; HLA-C*14:02; CLDN6; ENSG00000184697; TAA
MQILGVVL

SEQ ID NO: 15392 - protein, 9 aa, Homo sapiens
  misc_feature: Table A; Target 15392; HLA-B*27:05; CLDN6; ENSG00000184697; TAA
MQILGVVLT

SEQ ID NO: 15393 - protein, 10 aa, Homo sapiens
  misc_feature: Table A; Target 15393; HLA-B*38:01; CLDN6; ENSG00000184697; TAA
MQILGVVLTL

SEQ ID NO: 15394 - protein, 10 aa, Homo sapiens
  misc_feature: Table A; Target 15394; HLA-B*40:02; CLDN6; ENSG00000184697; TAA
MQILGVVLTL

SEQ ID NO: 15395 - protein, 10 aa, Homo sapiens
  misc_feature: Table A; Target 15395; HLA-C*07:01; CLDN6; ENSG00000184697; TAA
MSCVVQSTGQ

SEQ ID NO: 15396 - protein, 11 aa, Homo sapiens
  misc_feature: Table A; Target 15396; HLA-C*04:01; CLDN6; ENSG00000184697; TAA
MSCVVQSTGQM

SEQ ID NO: 15397 - protein, 11 aa, Homo sapiens
  misc_feature: Table A; Target 15397; HLA-C*07:01; CLDN6; ENSG00000184697; TAA
MSCVVQSTGQM

SEQ ID NO: 15398 - protein, 8 aa, Homo sapiens
  misc_feature: Table A; Target 15398; HLA-B*08:01; CLDN6; ENSG00000184697; TAA
NGLVSCAL

SEQ ID NO: 15399 - protein, 8 aa, Homo sapiens
  misc_feature: Table A; Target 15399; HLA-C*01:02; CLDN6; ENSG00000184697; TAA
NGLVSCAL

SEQ ID NO: 15400 - protein, 8 aa, Homo sapiens
  misc_feature: Table A; Target 15400; HLA-C*14:02; CLDN6; ENSG00000184697; TAA
NGLVSCAL

SEQ ID NO: 15401 - protein, 9 aa, Homo sapiens
  misc_feature: Table A; Target 15401; HLA-B*35:01; CLDN6; ENSG00000184697; TAA
NPLVAEAQK

SEQ ID NO: 15402 - protein, 8 aa, Homo sapiens
  misc_feature: Table A; Target 15402; HLA-B*51:01; CLDN6; ENSG00000184697; TAA
NSIVVAQV

SEQ ID NO: 15403 - protein, 9 aa, Homo sapiens
  misc_feature: Table A; Target 15403; HLA-A*68:02; CLDN6; ENSG00000184697; TAA
NSIVVAQVV

SEQ ID NO: 15404 - protein, 9 aa, Homo sapiens
  misc_feature: Table A; Target 15404; HLA-B*13:02; CLDN6; ENSG00000184697; TAA
NSIVVAQVV

SEQ ID NO: 15405 - protein, 9 aa, Homo sapiens
  misc_feature: Table A; Target 15405; HLA-C*02:02; CLDN6; ENSG00000184697; TAA
NSIVVAQVV

SEQ ID NO: 15406 - protein, 9 aa, Homo sapiens
  misc_feature: Table A; Target 15406; HLA-C*12:03; CLDN6; ENSG00000184697; TAA
NSIVVAQVV

SEQ ID NO: 15407 - protein, 10 aa, Homo sapiens
  misc_feature: Table A; Target 15407; HLA-B*44:02; CLDN6; ENSG00000184697; TAA
NSIVVAQVVW

SEQ ID NO: 15408 - protein, 10 aa, Homo sapiens
  misc_feature: Table A; Target 15408; HLA-B*57:01; CLDN6; ENSG00000184697; TAA
NSIVVAQVVW

SEQ ID NO: 15409 - protein, 10 aa, Homo sapiens
  misc_feature: Table A; Target 15409; HLA-B*58:01; CLDN6; ENSG00000184697; TAA
NSIVVAQVVW

SEQ ID NO: 15410 - protein, 10 aa, Homo sapiens
  misc_feature: Table A; Target 15410; HLA-C*04:01; CLDN6; ENSG00000184697; TAA
PQDLQAARAL

SEQ ID NO: 15411 - protein, 9 aa, Homo sapiens
  misc_feature: Table A; Target 15411; HLA-A*01:01; CLDN6; ENSG00000184697; TAA
PSEYPTKNY

SEQ ID NO: 15412 - protein, 9 aa, Homo sapiens
  misc_feature: Table A; Target 15412; HLA-A*30:02; CLDN6; ENSG00000184697; TAA
PSEYPTKNY

SEQ ID NO: 15413 - protein, 9 aa, Homo sapiens
  misc_feature: Table A; Target 15413; HLA-B*07:02; CLDN6; ENSG00000184697; TAA
PSEYPTKNY

SEQ ID NO: 15414 - protein, 9 aa, Homo sapiens
  misc_feature: Table A; Target 15414; HLA-C*04:01; CLDN6; ENSG00000184697; TAA
PSEYPTKNY

SEQ ID NO: 15415 - protein, 9 aa, Homo sapiens
  misc_feature: Table A; Target 15415; HLA-C*06:02; CLDN6; ENSG00000184697; TAA
PSEYPTKNY

SEQ ID NO: 15416 - protein, 9 aa, Homo sapiens
  misc_feature: Table A; Target 15416; HLA-C*07:01; CLDN6; ENSG00000184697; TAA
PSEYPTKNY

SEQ ID NO: 15417 - protein, 9 aa, Homo sapiens
  misc_feature: Table A; Target 15417; HLA-C*16:02; CLDN6; ENSG00000184697; TAA
PSEYPTKNY

SEQ ID NO: 15418 - protein, 10 aa, Homo sapiens
  misc_feature: Table A; Target 15418; HLA-A*01:01; CLDN6; ENSG00000184697; TAA
PSEYPTKNYV

SEQ ID NO: 15419 - protein, 10 aa, Homo sapiens
  misc_feature: Table A; Target 15419; HLA-B*07:02; CLDN6; ENSG00000184697; TAA
PSEYPTKNYV

SEQ ID NO: 15420 - protein, 10 aa, Homo sapiens
  misc_feature: Table A; Target 15420; HLA-C*04:01; CLDN6; ENSG00000184697; TAA
PSEYPTKNYV

SEQ ID NO: 15421 - protein, 10 aa, Homo sapiens
  misc_feature: Table A; Target 15421; HLA-C*06:02; CLDN6; ENSG00000184697; TAA
PSEYPTKNYV

SEQ ID NO: 15422 - protein, 10 aa, Homo sapiens
  misc_feature: Table A; Target 15422; HLA-C*07:01; CLDN6; ENSG00000184697; TAA
PSEYPTKNYV

SEQ ID NO: 15423 - protein, 10 aa, Homo sapiens
  misc_feature: Table A; Target 15423; HLA-C*07:02; CLDN6; ENSG00000184697; TAA
PSEYPTKNYV

SEQ ID NO: 15424 - protein, 11 aa, Homo sapiens
  misc_feature: Table A; Target 15424; HLA-A*01:01; CLDN6; ENSG00000184697; TAA
PSGGSQGPSHY

SEQ ID NO: 15425 - protein, 11 aa, Homo sapiens
  misc_feature: Table A; Target 15425; HLA-C*07:01; CLDN6; ENSG00000184697; TAA
PSGGSQGPSHY

SEQ ID NO: 15426 - protein, 8 aa, Homo sapiens
  misc_feature: Table A; Target 15426; HLA-B*51:01; CLDN6; ENSG00000184697; TAA
QAARALCV

SEQ ID NO: 15427 - protein, 9 aa, Homo sapiens
  misc_feature: Table A; Target 15427; HLA-B*51:01; CLDN6; ENSG00000184697; TAA
QAARALCVI

SEQ ID NO: 15428 - protein, 9 aa, Homo sapiens
  misc_feature: Table A; Target 15428; HLA-C*06:02; CLDN6; ENSG00000184697; TAA
QAARALCVI

SEQ ID NO: 15429 - protein, 9 aa, Homo sapiens
  misc_feature: Table A; Target 15429; HLA-C*07:01; CLDN6; ENSG00000184697; TAA
QAARALCVI

SEQ ID NO: 15430 - protein, 9 aa, Homo sapiens
  misc_feature: Table A; Target 15430; HLA-A*30:01; CLDN6; ENSG00000184697; TAA
QDLQAARAL

SEQ ID NO: 15431 - protein, 9 aa, Homo sapiens
  misc_feature: Table A; Target 15431; HLA-B*37:01; CLDN6; ENSG00000184697; TAA
QDLQAARAL

SEQ ID NO: 15432 - protein, 9 aa, Homo sapiens
  misc_feature: Table A; Target 15432; HLA-B*40:02; CLDN6; ENSG00000184697; TAA
QDLQAARAL

SEQ ID NO: 15433 - protein, 8 aa, Homo sapiens
  misc_feature: Table A; Target 15433; HLA-C*07:01; CLDN6; ENSG00000184697; TAA
QGPSHYMA

SEQ ID NO: 15434 - protein, 10 aa, Homo sapiens
  misc_feature: Table A; Target 15434; HLA-C*07:02; CLDN6; ENSG00000184697; TAA
QGPSHYMARY

SEQ ID NO: 15435 - protein, 9 aa, Homo sapiens
  misc_feature: Table A; Target 15435; HLA-A*02:01; CLDN6; ENSG00000184697; TAA
QILGVVLTL

SEQ ID NO: 15436 - protein, 9 aa, Homo sapiens
  misc_feature: Table A; Target 15436; HLA-A*02:03; CLDN6; ENSG00000184697; TAA
QILGVVLTL

SEQ ID NO: 15437 - protein, 9 aa, Homo sapiens
  misc_feature: Table A; Target 15437; HLA-A*02:04; CLDN6; ENSG00000184697; TAA
QILGVVLTL

SEQ ID NO: 15438 - protein, 9 aa, Homo sapiens
  misc_feature: Table A; Target 15438; HLA-A*02:07; CLDN6; ENSG00000184697; TAA
QILGVVLTL

SEQ ID NO: 15439 - protein, 9 aa, Homo sapiens
  misc_feature: Table A; Target 15439; HLA-A*03:01; CLDN6; ENSG00000184697; TAA
QILGVVLTL

SEQ ID NO: 15440 - protein, 9 aa, Homo sapiens
  misc_feature: Table A; Target 15440; HLA-A*23:01; CLDN6; ENSG00000184697; TAA
QILGVVLTL

SEQ ID NO: 15441 - protein, 9 aa, Homo sapiens
  misc_feature: Table A; Target 15441; HLA-A*24:02; CLDN6; ENSG00000184697; TAA
QILGVVLTL

SEQ ID NO: 15442 - protein, 9 aa, Homo sapiens
  misc_feature: Table A; Target 15442; HLA-A*25:01; CLDN6; ENSG00000184697; TAA
QILGVVLTL

SEQ ID NO: 15443 - protein, 9 aa, Homo sapiens
  misc_feature: Table A; Target 15443; HLA-A*29:02; CLDN6; ENSG00000184697; TAA
QILGVVLTL

SEQ ID NO: 15444 - protein, 9 aa, Homo sapiens
  misc_feature: Table A; Target 15444; HLA-A*30:01; CLDN6; ENSG00000184697; TAA
QILGVVLTL

SEQ ID NO: 15445 - protein, 9 aa, Homo sapiens
  misc_feature: Table A; Target 15445; HLA-A*31:01; CLDN6; ENSG00000184697; TAA
QILGVVLTL

SEQ ID NO: 15446 - protein, 9 aa, Homo sapiens
  misc_feature: Table A; Target 15446; HLA-A*32:01; CLDN6; ENSG00000184697; TAA
QILGVVLTL

SEQ ID NO: 15447 - protein, 9 aa, Homo sapiens
  misc_feature: Table A; Target 15447; HLA-A*68:02; CLDN6; ENSG00000184697; TAA
QILGVVLTL

SEQ ID NO: 15448 - protein, 9 aa, Homo sapiens
  misc_feature: Table A; Target 15448; HLA-B*13:02; CLDN6; ENSG00000184697; TAA
QILGVVLTL

SEQ ID NO: 15449 - protein, 9 aa, Homo sapiens
  misc_feature: Table A; Target 15449; HLA-B*35:01; CLDN6; ENSG00000184697; TAA
QILGVVLTL

SEQ ID NO: 15450 - protein, 9 aa, Homo sapiens
  misc_feature: Table A; Target 15450; HLA-B*35:03; CLDN6; ENSG00000184697; TAA
QILGVVLTL

SEQ ID NO: 15451 - protein, 9 aa, Homo sapiens
  misc_feature: Table A; Target 15451; HLA-B*38:01; CLDN6; ENSG00000184697; TAA
QILGVVLTL

SEQ ID NO: 15452 - protein, 9 aa, Homo sapiens
  misc_feature: Table A; Target 15452; HLA-B*40:02; CLDN6; ENSG00000184697; TAA
QILGVVLTL

SEQ ID NO: 15453 - protein, 9 aa, Homo sapiens
  misc_feature: Table A; Target 15453; HLA-B*44:03; CLDN6; ENSG00000184697; TAA
QILGVVLTL

SEQ ID NO: 15454 - protein, 9 aa, Homo sapiens
  misc_feature: Table A; Target 15454; HLA-B*51:01; CLDN6; ENSG00000184697; TAA
QILGVVLTL

SEQ ID NO: 15455 - protein, 9 aa, Homo sapiens
  misc_feature: Table A; Target 15455; HLA-B*58:01; CLDN6; ENSG00000184697; TAA
QILGVVLTL

SEQ ID NO: 15456 - protein, 9 aa, Homo sapiens
  misc_feature: Table A; Target 15456; HLA-C*01:02; CLDN6; ENSG00000184697; TAA
QILGVVLTL

SEQ ID NO: 15457 - protein, 9 aa, Homo sapiens
  misc_feature: Table A; Target 15457; HLA-C*02:02; CLDN6; ENSG00000184697; TAA
QILGVVLTL

SEQ ID NO: 15458 - protein, 9 aa, Homo sapiens
  misc_feature: Table A; Target 15458; HLA-C*03:03; CLDN6; ENSG00000184697; TAA
QILGVVLTL

SEQ ID NO: 15459 - protein, 9 aa, Homo sapiens
  misc_feature: Table A; Target 15459; HLA-C*03:04; CLDN6; ENSG00000184697; TAA
QILGVVLTL

SEQ ID NO: 15460 - protein, 9 aa, Homo sapiens
  misc_feature: Table A; Target 15460; HLA-C*07:04; CLDN6; ENSG00000184697; TAA
QILGVVLTL

SEQ ID NO: 15461 - protein, 9 aa, Homo sapiens
  misc_feature: Table A; Target 15461; HLA-C*07:06; CLDN6; ENSG00000184697; TAA
QILGVVLTL

SEQ ID NO: 15462 - protein, 10 aa, Homo sapiens
  misc_feature: Table A; Target 15462; HLA-A*02:04; CLDN6; ENSG00000184697; TAA
QILGVVLTLL

SEQ ID NO: 15463 - protein, 9 aa, Homo sapiens
  misc_feature: Table A; Target 15463; HLA-B*15:03; CLDN6; ENSG00000184697; TAA
QKRELGASL

SEQ ID NO: 15464 - protein, 10 aa, Homo sapiens
  misc_feature: Table A; Target 15464; HLA-B*15:03; CLDN6; ENSG00000184697; TAA
QKRELGASLY

SEQ ID NO: 15465 - protein, 9 aa, Homo sapiens
  misc_feature: Table A; Target 15465; HLA-A*11:01; CLDN6; ENSG00000184697; TAA
QSTGQMQCK

SEQ ID NO: 15466 - protein, 10 aa, Homo sapiens
  misc_feature: Table A; Target 15466; HLA-C*06:02; CLDN6; ENSG00000184697; TAA
QSTGQMQCKV

SEQ ID NO: 15467 - protein, 8 aa, Homo sapiens
  misc_feature: Table A; Target 15467; HLA-B*37:01; CLDN6; ENSG00000184697; TAA
RDFYNPLV

SEQ ID NO: 15468 - protein, 8 aa, Homo sapiens
  misc_feature: Table A; Target 15468; HLA-A*30:02; CLDN6; ENSG00000184697; TAA
RELGASLY

SEQ ID NO: 15469 - protein, 8 aa, Homo sapiens
  misc_feature: Table A; Target 15469; HLA-B*15:03; CLDN6; ENSG00000184697; TAA
RELGASLY

SEQ ID NO: 15470 - protein, 8 aa, Homo sapiens
  misc_feature: Table A; Target 15470; HLA-B*18:01; CLDN6; ENSG00000184697; TAA
RELGASLY

SEQ ID NO: 15471 - protein, 8 aa, Homo sapiens
  misc_feature: Table A; Target 15471; HLA-B*37:01; CLDN6; ENSG00000184697; TAA
RELGASLY

SEQ ID NO: 15472 - protein, 8 aa, Homo sapiens
  misc_feature: Table A; Target 15472; HLA-B*44:02; CLDN6; ENSG00000184697; TAA
RELGASLY

SEQ ID NO: 15473 - protein, 8 aa, Homo sapiens
  misc_feature: Table A; Target 15473; HLA-B*44:03; CLDN6; ENSG00000184697; TAA
RELGASLY

SEQ ID NO: 15474 - protein, 8 aa, Homo sapiens
  misc_feature: Table A; Target 15474; HLA-C*16:04; CLDN6; ENSG00000184697; TAA
RELGASLY

SEQ ID NO: 15475 - protein, 9 aa, Homo sapiens
  misc_feature: Table A; Target 15475; HLA-A*30:01; CLDN6; ENSG00000184697; TAA
RELGASLYL

SEQ ID NO: 15476 - protein, 9 aa, Homo sapiens
  misc_feature: Table A; Target 15476; HLA-B*37:01; CLDN6; ENSG00000184697; TAA
RELGASLYL

SEQ ID NO: 15477 - protein, 9 aa, Homo sapiens
  misc_feature: Table A; Target 15477; HLA-B*40:01; CLDN6; ENSG00000184697; TAA
RELGASLYL

SEQ ID NO: 15478 - protein, 9 aa, Homo sapiens
  misc_feature: Table A; Target 15478; HLA-B*40:02; CLDN6; ENSG00000184697; TAA
RELGASLYL

SEQ ID NO: 15479 - protein, 9 aa, Homo sapiens
  misc_feature: Table A; Target 15479; HLA-B*44:02; CLDN6; ENSG00000184697; TAA
RELGASLYL

SEQ ID NO: 15480 - protein, 9 aa, Homo sapiens
  misc_feature: Table A; Target 15480; HLA-B*44:03; CLDN6; ENSG00000184697; TAA
RELGASLYL

SEQ ID NO: 15481 - protein, 9 aa, Homo sapiens
  misc_feature: Table A; Target 15481; HLA-B*49:01; CLDN6; ENSG00000184697; TAA
RELGASLYL

SEQ ID NO: 15482 - protein, 11 aa, Homo sapiens
  misc_feature: Table A; Target 15482; HLA-B*44:02; CLDN6; ENSG00000184697; TAA
RELGASLYLGW

SEQ ID NO: 15483 - protein, 11 aa, Homo sapiens
  misc_feature: Table A; Target 15483; HLA-B*44:03; CLDN6; ENSG00000184697; TAA
RELGASLYLGW

SEQ ID NO: 15484 - protein, 11 aa, Homo sapiens
  misc_feature: Table A; Target 15484; HLA-B*57:01; CLDN6; ENSG00000184697; TAA
RELGASLYLGW

SEQ ID NO: 15485 - protein, 11 aa, Homo sapiens
  misc_feature: Table A; Target 15485; HLA-A*30:02; CLDN6; ENSG00000184697; TAA
RGPSEYPTKNY

SEQ ID NO: 15486 - protein, 11 aa, Homo sapiens
  misc_feature: Table A; Target 15486; HLA-A*02:04; CLDN6; ENSG00000184697; TAA
RLVLTSGIVFV

SEQ ID NO: 15487 - protein, 9 aa, Homo sapiens
  misc_feature: Table A; Target 15487; HLA-A*23:01; CLDN6; ENSG00000184697; TAA
RYSTSAPAI

SEQ ID NO: 15488 - protein, 9 aa, Homo sapiens
  misc_feature: Table A; Target 15488; HLA-B*07:02; CLDN6; ENSG00000184697; TAA
RYSTSAPAI

SEQ ID NO: 15489 - protein, 9 aa, Homo sapiens
  misc_feature: Table A; Target 15489; HLA-B*13:02; CLDN6; ENSG00000184697; TAA
RYSTSAPAI

SEQ ID NO: 15490 - protein, 9 aa, Homo sapiens
  misc_feature: Table A; Target 15490; HLA-B*15:03; CLDN6; ENSG00000184697; TAA
RYSTSAPAI

SEQ ID NO: 15491 - protein, 9 aa, Homo sapiens
  misc_feature: Table A; Target 15491; HLA-B*58:01; CLDN6; ENSG00000184697; TAA
RYSTSAPAI

SEQ ID NO: 15492 - protein, 9 aa, Homo sapiens
  misc_feature: Table A; Target 15492; HLA-C*04:01; CLDN6; ENSG00000184697; TAA
RYSTSAPAI

SEQ ID NO: 15493 - protein, 9 aa, Homo sapiens
  misc_feature: Table A; Target 15493; HLA-C*06:02; CLDN6; ENSG00000184697; TAA
RYSTSAPAI

SEQ ID NO: 15494 - protein, 9 aa, Homo sapiens
  misc_feature: Table A; Target 15494; HLA-C*07:02; CLDN6; ENSG00000184697; TAA
RYSTSAPAI

SEQ ID NO: 15495 - protein, 9 aa, Homo sapiens
  misc_feature: Table A; Target 15495; HLA-C*14:02; CLDN6; ENSG00000184697; TAA
RYSTSAPAI

SEQ ID NO: 15496 - protein, 9 aa, Homo sapiens
  misc_feature: Table A; Target 15496; HLA-C*16:02; CLDN6; ENSG00000184697; TAA
RYSTSAPAI

SEQ ID NO: 15497 - protein, 11 aa, Homo sapiens
  misc_feature: Table A; Target 15497; HLA-A*03:01; CLDN6; ENSG00000184697; TAA
RYSTSAPAISR

SEQ ID NO: 15498 - protein, 11 aa, Homo sapiens
  misc_feature: Table A; Target 15498; HLA-A*03:02; CLDN6; ENSG00000184697; TAA
RYSTSAPAISR

SEQ ID NO: 15499 - protein, 11 aa, Homo sapiens
  misc_feature: Table A; Target 15499; HLA-A*31:01; CLDN6; ENSG00000184697; TAA
RYSTSAPAISR

SEQ ID NO: 15500 - protein, 11 aa, Homo sapiens
  misc_feature: Table A; Target 15500; HLA-A*33:01; CLDN6; ENSG00000184697; TAA
RYSTSAPAISR

SEQ ID NO: 15501 - protein, 11 aa, Homo sapiens
  misc_feature: Table A; Target 15501; HLA-A*33:03; CLDN6; ENSG00000184697; TAA
RYSTSAPAISR

SEQ ID NO: 15502 - protein, 9 aa, Homo sapiens
  misc_feature: Table A; Target 15502; HLA-A*02:01; CLDN6; ENSG00000184697; TAA
SAGMQILGV

SEQ ID NO: 15503 - protein, 9 aa, Homo sapiens
  misc_feature: Table A; Target 15503; HLA-A*02:03; CLDN6; ENSG00000184697; TAA
SAGMQILGV

SEQ ID NO: 15504 - protein, 9 aa, Homo sapiens
  misc_feature: Table A; Target 15504; HLA-A*68:02; CLDN6; ENSG00000184697; TAA
SAGMQILGV

SEQ ID NO: 15505 - protein, 9 aa, Homo sapiens
  misc_feature: Table A; Target 15505; HLA-B*13:02; CLDN6; ENSG00000184697; TAA
SAGMQILGV

SEQ ID NO: 15506 - protein, 9 aa, Homo sapiens
  misc_feature: Table A; Target 15506; HLA-B*51:01; CLDN6; ENSG00000184697; TAA
SAGMQILGV

SEQ ID NO: 15507 - protein, 9 aa, Homo sapiens
  misc_feature: Table A; Target 15507; HLA-B*54:01; CLDN6; ENSG00000184697; TAA
SAGMQILGV

SEQ ID NO: 15508 - protein, 9 aa, Homo sapiens
  misc_feature: Table A; Target 15508; HLA-C*06:02; CLDN6; ENSG00000184697; TAA
SAGMQILGV

SEQ ID NO: 15509 - protein, 9 aa, Homo sapiens
  misc_feature: Table A; Target 15509; HLA-C*12:03; CLDN6; ENSG00000184697; TAA
SAGMQILGV

SEQ ID NO: 15510 - protein, 9 aa, Homo sapiens
  misc_feature: Table A; Target 15510; HLA-C*16:02; CLDN6; ENSG00000184697; TAA
SAGMQILGV

SEQ ID NO: 15511 - protein, 9 aa, Homo sapiens
  misc_feature: Table A; Target 15511; HLA-C*06:02; CLDN6; ENSG00000184697; TAA
SAPAISRGP

SEQ ID NO: 15512 - protein, 9 aa, Homo sapiens
  misc_feature: Table A; Target 15512; HLA-C*16:02; CLDN6; ENSG00000184697; TAA
SAPAISRGP

SEQ ID NO: 15513 - protein, 10 aa, Homo sapiens
  misc_feature: Table A; Target 15513; HLA-C*04:01; CLDN6; ENSG00000184697; TAA
SCVVQSTGQM

SEQ ID NO: 15514 - protein, 10 aa, Homo sapiens
  misc_feature: Table A; Target 15514; HLA-C*07:01; CLDN6; ENSG00000184697; TAA
SCVVQSTGQM

SEQ ID NO: 15515 - protein, 8 aa, Homo sapiens
  misc_feature: Table A; Target 15515; HLA-B*15:03; CLDN6; ENSG00000184697; TAA
SEYPTKNY

SEQ ID NO: 15516 - protein, 8 aa, Homo sapiens
  misc_feature: Table A; Target 15516; HLA-B*18:01; CLDN6; ENSG00000184697; TAA
SEYPTKNY

SEQ ID NO: 15517 - protein, 8 aa, Homo sapiens
  misc_feature: Table A; Target 15517; HLA-B*37:01; CLDN6; ENSG00000184697; TAA
SEYPTKNY

SEQ ID NO: 15518 - protein, 8 aa, Homo sapiens
  misc_feature: Table A; Target 15518; HLA-B*44:02; CLDN6; ENSG00000184697; TAA
SEYPTKNY

SEQ ID NO: 15519 - protein, 8 aa, Homo sapiens
  misc_feature: Table A; Target 15519; HLA-B*44:03; CLDN6; ENSG00000184697; TAA
SEYPTKNY

SEQ ID NO: 15520 - protein, 8 aa, Homo sapiens
  misc_feature: Table A; Target 15520; HLA-B*49:01; CLDN6; ENSG00000184697; TAA
SEYPTKNY

SEQ ID NO: 15521 - protein, 8 aa, Homo sapiens
  misc_feature: Table A; Target 15521; HLA-C*02:02; CLDN6; ENSG00000184697; TAA
SEYPTKNY

SEQ ID NO: 15522 - protein, 8 aa, Homo sapiens
  misc_feature: Table A; Target 15522; HLA-C*16:04; CLDN6; ENSG00000184697; TAA
SEYPTKNY

SEQ ID NO: 15523 - protein, 9 aa, Homo sapiens
  misc_feature: Table A; Target 15523; HLA-A*02:03; CLDN6; ENSG00000184697; TAA
SEYPTKNYV

SEQ ID NO: 15524 - protein, 9 aa, Homo sapiens
  misc_feature: Table A; Target 15524; HLA-A*30:01; CLDN6; ENSG00000184697; TAA
SEYPTKNYV

SEQ ID NO: 15525 - protein, 9 aa, Homo sapiens
  misc_feature: Table A; Target 15525; HLA-A*68:02; CLDN6; ENSG00000184697; TAA
SEYPTKNYV

SEQ ID NO: 15526 - protein, 9 aa, Homo sapiens
  misc_feature: Table A; Target 15526; HLA-B*13:02; CLDN6; ENSG00000184697; TAA
SEYPTKNYV

SEQ ID NO: 15527 - protein, 9 aa, Homo sapiens
  misc_feature: Table A; Target 15527; HLA-B*18:01; CLDN6; ENSG00000184697; TAA
SEYPTKNYV

SEQ ID NO: 15528 - protein, 9 aa, Homo sapiens
  misc_feature: Table A; Target 15528; HLA-B*37:01; CLDN6; ENSG00000184697; TAA
SEYPTKNYV

SEQ ID NO: 15529 - protein, 9 aa, Homo sapiens
  misc_feature: Table A; Target 15529; HLA-B*38:01; CLDN6; ENSG00000184697; TAA
SEYPTKNYV

SEQ ID NO: 15530 - protein, 9 aa, Homo sapiens
  misc_feature: Table A; Target 15530; HLA-B*40:01; CLDN6; ENSG00000184697; TAA
SEYPTKNYV

SEQ ID NO: 15531 - protein, 9 aa, Homo sapiens
  misc_feature: Table A; Target 15531; HLA-B*40:02; CLDN6; ENSG00000184697; TAA
SEYPTKNYV

SEQ ID NO: 15532 - protein, 9 aa, Homo sapiens
  misc_feature: Table A; Target 15532; HLA-B*44:02; CLDN6; ENSG00000184697; TAA
SEYPTKNYV

SEQ ID NO: 15533 - protein, 9 aa, Homo sapiens
  misc_feature: Table A; Target 15533; HLA-B*44:03; CLDN6; ENSG00000184697; TAA
SEYPTKNYV

SEQ ID NO: 15534 - protein, 9 aa, Homo sapiens
  misc_feature: Table A; Target 15534; HLA-B*51:01; CLDN6; ENSG00000184697; TAA
SEYPTKNYV

SEQ ID NO: 15535 - protein, 9 aa, Homo sapiens
  misc_feature: Table A; Target 15535; HLA-C*02:02; CLDN6; ENSG00000184697; TAA
SEYPTKNYV

SEQ ID NO: 15536 - protein, 9 aa, Homo sapiens
  misc_feature: Table A; Target 15536; HLA-C*06:02; CLDN6; ENSG00000184697; TAA
SEYPTKNYV

SEQ ID NO: 15537 - protein, 9 aa, Homo sapiens
  misc_feature: Table A; Target 15537; HLA-C*12:03; CLDN6; ENSG00000184697; TAA
SEYPTKNYV

SEQ ID NO: 15538 - protein, 9 aa, Homo sapiens
  misc_feature: Table A; Target 15538; HLA-C*16:02; CLDN6; ENSG00000184697; TAA
SEYPTKNYV

SEQ ID NO: 15539 - protein, 9 aa, Homo sapiens
  misc_feature: Table A; Target 15539; HLA-C*16:04; CLDN6; ENSG00000184697; TAA
SEYPTKNYV

SEQ ID NO: 15540 - protein, 10 aa, Homo sapiens
  misc_feature: Table A; Target 15540; HLA-A*30:02; CLDN6; ENSG00000184697; TAA
SGGSQGPSHY

SEQ ID NO: 15541 - protein, 11 aa, Homo sapiens
  misc_feature: Table A; Target 15541; HLA-C*04:01; CLDN6; ENSG00000184697; TAA
SGGSQGPSHYM

SEQ ID NO: 15542 - protein, 9 aa, Homo sapiens
  misc_feature: Table A; Target 15542; HLA-A*25:01; CLDN6; ENSG00000184697; TAA
SIVVAQVVW

SEQ ID NO: 15543 - protein, 9 aa, Homo sapiens
  misc_feature: Table A; Target 15543; HLA-B*44:02; CLDN6; ENSG00000184697; TAA
SIVVAQVVW

SEQ ID NO: 15544 - protein, 9 aa, Homo sapiens
  misc_feature: Table A; Target 15544; HLA-B*44:03; CLDN6; ENSG00000184697; TAA
SIVVAQVVW

SEQ ID NO: 15545 - protein, 9 aa, Homo sapiens
  misc_feature: Table A; Target 15545; HLA-B*57:01; CLDN6; ENSG00000184697; TAA
SIVVAQVVW

SEQ ID NO: 15546 - protein, 9 aa, Homo sapiens
  misc_feature: Table A; Target 15546; HLA-B*58:01; CLDN6; ENSG00000184697; TAA
SIVVAQVVW

SEQ ID NO: 15547 - protein, 9 aa, Homo sapiens
  misc_feature: Table A; Target 15547; HLA-A*02:01; CLDN6; ENSG00000184697; TAA
SLLALPQDL

SEQ ID NO: 15548 - protein, 9 aa, Homo sapiens
  misc_feature: Table A; Target 15548; HLA-A*02:03; CLDN6; ENSG00000184697; TAA
SLLALPQDL

SEQ ID NO: 15549 - protein, 9 aa, Homo sapiens
  misc_feature: Table A; Target 15549; HLA-A*02:04; CLDN6; ENSG00000184697; TAA
SLLALPQDL

SEQ ID NO: 15550 - protein, 9 aa, Homo sapiens
  misc_feature: Table A; Target 15550; HLA-B*55:01; CLDN6; ENSG00000184697; TAA
SLLALPQDL

SEQ ID NO: 15551 - protein, 11 aa, Homo sapiens
  misc_feature: Table A; Target 15551; HLA-A*02:04; CLDN6; ENSG00000184697; TAA
SLLALPQDLQA

SEQ ID NO: 15552 - protein, 8 aa, Homo sapiens
  misc_feature: Table A; Target 15552; HLA-B*54:01; CLDN6; ENSG00000184697; TAA
SLYLGWAA

SEQ ID NO: 15553 - protein, 10 aa, Homo sapiens
  misc_feature: Table A; Target 15553; HLA-A*02:04; CLDN6; ENSG00000184697; TAA
SLYLGWAASG

SEQ ID NO: 15554 - protein, 8 aa, Homo sapiens
  misc_feature: Table A; Target 15554; HLA-A*30:02; CLDN6; ENSG00000184697; TAA
SQGPSHYM

SEQ ID NO: 15555 - protein, 8 aa, Homo sapiens
  misc_feature: Table A; Target 15555; HLA-A*32:01; CLDN6; ENSG00000184697; TAA
SQGPSHYM

SEQ ID NO: 15556 - protein, 8 aa, Homo sapiens
  misc_feature: Table A; Target 15556; HLA-B*13:02; CLDN6; ENSG00000184697; TAA
SQGPSHYM

SEQ ID NO: 15557 - protein, 8 aa, Homo sapiens
  misc_feature: Table A; Target 15557; HLA-B*15:01; CLDN6; ENSG00000184697; TAA
SQGPSHYM

SEQ ID NO: 15558 - protein, 8 aa, Homo sapiens
  misc_feature: Table A; Target 15558; HLA-B*15:03; CLDN6; ENSG00000184697; TAA
SQGPSHYM

SEQ ID NO: 15559 - protein, 8 aa, Homo sapiens
  misc_feature: Table A; Target 15559; HLA-B*27:05; CLDN6; ENSG00000184697; TAA
SQGPSHYM

SEQ ID NO: 15560 - protein, 8 aa, Homo sapiens
  misc_feature: Table A; Target 15560; HLA-B*37:01; CLDN6; ENSG00000184697; TAA
SQGPSHYM

SEQ ID NO: 15561 - protein, 8 aa, Homo sapiens
  misc_feature: Table A; Target 15561; HLA-B*38:01; CLDN6; ENSG00000184697; TAA
SQGPSHYM

SEQ ID NO: 15562 - protein, 8 aa, Homo sapiens
  misc_feature: Table A; Target 15562; HLA-B*39:01; CLDN6; ENSG00000184697; TAA
SQGPSHYM

SEQ ID NO: 15563 - protein, 8 aa, Homo sapiens
  misc_feature: Table A; Target 15563; HLA-C*01:02; CLDN6; ENSG00000184697; TAA
SQGPSHYM

SEQ ID NO: 15564 - protein, 8 aa, Homo sapiens
  misc_feature: Table A; Target 15564; HLA-C*02:02; CLDN6; ENSG00000184697; TAA
SQGPSHYM

SEQ ID NO: 15565 - protein, 8 aa, Homo sapiens
  misc_feature: Table A; Target 15565; HLA-C*04:01; CLDN6; ENSG00000184697; TAA
SQGPSHYM

SEQ ID NO: 15566 - protein, 8 aa, Homo sapiens
  misc_feature: Table A; Target 15566; HLA-C*06:02; CLDN6; ENSG00000184697; TAA
SQGPSHYM

SEQ ID NO: 15567 - protein, 8 aa, Homo sapiens
  misc_feature: Table A; Target 15567; HLA-C*07:01; CLDN6; ENSG00000184697; TAA
SQGPSHYM

SEQ ID NO: 15568 - protein, 8 aa, Homo sapiens
  misc_feature: Table A; Target 15568; HLA-C*07:02; CLDN6; ENSG00000184697; TAA
SQGPSHYM

SEQ ID NO: 15569 - protein, 8 aa, Homo sapiens
  misc_feature: Table A; Target 15569; HLA-C*07:04; CLDN6; ENSG00000184697; TAA
SQGPSHYM

SEQ ID NO: 15570 - protein, 8 aa, Homo sapiens
  misc_feature: Table A; Target 15570; HLA-C*12:03; CLDN6; ENSG00000184697; TAA
SQGPSHYM

SEQ ID NO: 15571 - protein, 8 aa, Homo sapiens
  misc_feature: Table A; Target 15571; HLA-C*16:01; CLDN6; ENSG00000184697; TAA
SQGPSHYM

SEQ ID NO: 15572 - protein, 8 aa, Homo sapiens
  misc_feature: Table A; Target 15572; HLA-C*16:02; CLDN6; ENSG00000184697; TAA
SQGPSHYM

SEQ ID NO: 15573 - protein, 9 aa, Homo sapiens
  misc_feature: Table A; Target 15573; HLA-B*13:02; CLDN6; ENSG00000184697; TAA
SQGPSHYMA

SEQ ID NO: 15574 - protein, 9 aa, Homo sapiens
  misc_feature: Table A; Target 15574; HLA-B*27:05; CLDN6; ENSG00000184697; TAA
SQGPSHYMA

SEQ ID NO: 15575 - protein, 10 aa, Homo sapiens
  misc_feature: Table A; Target 15575; HLA-A*31:01; CLDN6; ENSG00000184697; TAA
SQGPSHYMAR

SEQ ID NO: 15576 - protein, 11 aa, Homo sapiens
  misc_feature: Table A; Target 15576; HLA-A*30:02; CLDN6; ENSG00000184697; TAA
SQGPSHYMARY

SEQ ID NO: 15577 - protein, 9 aa, Homo sapiens
  misc_feature: Table A; Target 15577; HLA-C*06:02; CLDN6; ENSG00000184697; TAA
SRGPSEYPT

SEQ ID NO: 15578 - protein, 10 aa, Homo sapiens
  misc_feature: Table A; Target 15578; HLA-B*27:05; CLDN6; ENSG00000184697; TAA
SRGPSEYPTK

SEQ ID NO: 15579 - protein, 9 aa, Homo sapiens
  misc_feature: Table A; Target 15579; HLA-C*06:02; CLDN6; ENSG00000184697; TAA
STGQMQCKV

SEQ ID NO: 15580 - protein, 10 aa, Homo sapiens
  misc_feature: Table A; Target 15580; HLA-C*07:01; CLDN6; ENSG00000184697; TAA
STGQMQCKVY

SEQ ID NO: 15581 - protein, 9 aa, Homo sapiens
  misc_feature: Table A; Target 15581; HLA-A*03:02; CLDN6; ENSG00000184697; TAA
STSAPAISR

SEQ ID NO: 15582 - protein, 9 aa, Homo sapiens
  misc_feature: Table A; Target 15582; HLA-A*31:01; CLDN6; ENSG00000184697; TAA
STSAPAISR

SEQ ID NO: 15583 - protein, 9 aa, Homo sapiens
  misc_feature: Table A; Target 15583; HLA-A*33:01; CLDN6; ENSG00000184697; TAA
STSAPAISR

SEQ ID NO: 15584 - protein, 9 aa, Homo sapiens
  misc_feature: Table A; Target 15584; HLA-A*33:03; CLDN6; ENSG00000184697; TAA
STSAPAISR

SEQ ID NO: 15585 - protein, 9 aa, Homo sapiens
  misc_feature: Table A; Target 15585; HLA-A*68:02; CLDN6; ENSG00000184697; TAA
STSAPAISR

SEQ ID NO: 15586 - protein, 9 aa, Homo sapiens
  misc_feature: Table A; Target 15586; HLA-B*13:02; CLDN6; ENSG00000184697; TAA
STSAPAISR

SEQ ID NO: 15587 - protein, 9 aa, Homo sapiens
  misc_feature: Table A; Target 15587; HLA-B*27:02; CLDN6; ENSG00000184697; TAA
STSAPAISR

SEQ ID NO: 15588 - protein, 9 aa, Homo sapiens
  misc_feature: Table A; Target 15588; HLA-B*27:05; CLDN6; ENSG00000184697; TAA
STSAPAISR

SEQ ID NO: 15589 - protein, 9 aa, Homo sapiens
  misc_feature: Table A; Target 15589; HLA-B*57:01; CLDN6; ENSG00000184697; TAA
STSAPAISR

SEQ ID NO: 15590 - protein, 11 aa, Homo sapiens
  misc_feature: Table A; Target 15590; HLA-C*06:02; CLDN6; ENSG00000184697; TAA
STSAPAISRGP

SEQ ID NO: 15591 - protein, 8 aa, Homo sapiens
  misc_feature: Table A; Target 15591; HLA-B*08:01; CLDN6; ENSG00000184697; TAA
TAFIGNSI

SEQ ID NO: 15592 - protein, 8 aa, Homo sapiens
  misc_feature: Table A; Target 15592; HLA-B*13:02; CLDN6; ENSG00000184697; TAA
TAFIGNSI

SEQ ID NO: 15593 - protein, 8 aa, Homo sapiens
  misc_feature: Table A; Target 15593; HLA-B*15:03; CLDN6; ENSG00000184697; TAA
TAFIGNSI

SEQ ID NO: 15594 - protein, 8 aa, Homo sapiens
  misc_feature: Table A; Target 15594; HLA-B*35:01; CLDN6; ENSG00000184697; TAA
TAFIGNSI

SEQ ID NO: 15595 - protein, 8 aa, Homo sapiens
  misc_feature: Table A; Target 15595; HLA-B*35:03; CLDN6; ENSG00000184697; TAA
TAFIGNSI

SEQ ID NO: 15596 - protein, 8 aa, Homo sapiens
  misc_feature: Table A; Target 15596; HLA-B*38:01; CLDN6; ENSG00000184697; TAA
TAFIGNSI

SEQ ID NO: 15597 - protein, 8 aa, Homo sapiens
  misc_feature: Table A; Target 15597; HLA-B*39:01; CLDN6; ENSG00000184697; TAA
TAFIGNSI

SEQ ID NO: 15598 - protein, 8 aa, Homo sapiens
  misc_feature: Table A; Target 15598; HLA-B*46:01; CLDN6; ENSG00000184697; TAA
TAFIGNSI

SEQ ID NO: 15599 - protein, 8 aa, Homo sapiens
  misc_feature: Table A; Target 15599; HLA-B*49:01; CLDN6; ENSG00000184697; TAA
TAFIGNSI

SEQ ID NO: 15600 - protein, 8 aa, Homo sapiens
  misc_feature: Table A; Target 15600; HLA-B*54:01; CLDN6; ENSG00000184697; TAA
TAFIGNSI

SEQ ID NO: 15601 - protein, 8 aa, Homo sapiens
  misc_feature: Table A; Target 15601; HLA-B*58:01; CLDN6; ENSG00000184697; TAA
TAFIGNSI

SEQ ID NO: 15602 - protein, 8 aa, Homo sapiens
  misc_feature: Table A; Target 15602; HLA-C*01:02; CLDN6; ENSG00000184697; TAA
TAFIGNSI

SEQ ID NO: 15603 - protein, 8 aa, Homo sapiens
  misc_feature: Table A; Target 15603; HLA-C*02:02; CLDN6; ENSG00000184697; TAA
TAFIGNSI

SEQ ID NO: 15604 - protein, 8 aa, Homo sapiens
  misc_feature: Table A; Target 15604; HLA-C*03:03; CLDN6; ENSG00000184697; TAA
TAFIGNSI

SEQ ID NO: 15605 - protein, 8 aa, Homo sapiens
  misc_feature: Table A; Target 15605; HLA-C*03:04; CLDN6; ENSG00000184697; TAA
TAFIGNSI

SEQ ID NO: 15606 - protein, 8 aa, Homo sapiens
  misc_feature: Table A; Target 15606; HLA-C*05:01; CLDN6; ENSG00000184697; TAA
TAFIGNSI

SEQ ID NO: 15607 - protein, 8 aa, Homo sapiens
  misc_feature: Table A; Target 15607; HLA-C*07:04; CLDN6; ENSG00000184697; TAA
TAFIGNSI

SEQ ID NO: 15608 - protein, 8 aa, Homo sapiens
  misc_feature: Table A; Target 15608; HLA-C*12:03; CLDN6; ENSG00000184697; TAA
TAFIGNSI

SEQ ID NO: 15609 - protein, 8 aa, Homo sapiens
  misc_feature: Table A; Target 15609; HLA-C*14:02; CLDN6; ENSG00000184697; TAA
TAFIGNSI

SEQ ID NO: 15610 - protein, 8 aa, Homo sapiens
  misc_feature: Table A; Target 15610; HLA-C*16:02; CLDN6; ENSG00000184697; TAA
TAFIGNSI

SEQ ID NO: 15611 - protein, 8 aa, Homo sapiens
  misc_feature: Table A; Target 15611; HLA-C*16:04; CLDN6; ENSG00000184697; TAA
TAFIGNSI

SEQ ID NO: 15612 - protein, 9 aa, Homo sapiens
  misc_feature: Table A; Target 15612; HLA-A*68:02; CLDN6; ENSG00000184697; TAA
TAFIGNSIV

SEQ ID NO: 15613 - protein, 9 aa, Homo sapiens
  misc_feature: Table A; Target 15613; HLA-B*13:02; CLDN6; ENSG00000184697; TAA
TAFIGNSIV

SEQ ID NO: 15614 - protein, 9 aa, Homo sapiens
  misc_feature: Table A; Target 15614; HLA-B*35:01; CLDN6; ENSG00000184697; TAA
TAFIGNSIV

SEQ ID NO: 15615 - protein, 9 aa, Homo sapiens
  misc_feature: Table A; Target 15615; HLA-B*35:03; CLDN6; ENSG00000184697; TAA
TAFIGNSIV

SEQ ID NO: 15616 - protein, 9 aa, Homo sapiens
  misc_feature: Table A; Target 15616; HLA-B*39:01; CLDN6; ENSG00000184697; TAA
TAFIGNSIV

SEQ ID NO: 15617 - protein, 9 aa, Homo sapiens
  misc_feature: Table A; Target 15617; HLA-B*46:01; CLDN6; ENSG00000184697; TAA
TAFIGNSIV

SEQ ID NO: 15618 - protein, 9 aa, Homo sapiens
  misc_feature: Table A; Target 15618; HLA-B*49:01; CLDN6; ENSG00000184697; TAA
TAFIGNSIV

SEQ ID NO: 15619 - protein, 9 aa, Homo sapiens
  misc_feature: Table A; Target 15619; HLA-B*51:01; CLDN6; ENSG00000184697; TAA
TAFIGNSIV

SEQ ID NO: 15620 - protein, 9 aa, Homo sapiens
  misc_feature: Table A; Target 15620; HLA-B*54:01; CLDN6; ENSG00000184697; TAA
TAFIGNSIV

SEQ ID NO: 15621 - protein, 9 aa, Homo sapiens
  misc_feature: Table A; Target 15621; HLA-B*56:01; CLDN6; ENSG00000184697; TAA
TAFIGNSIV

SEQ ID NO: 15622 - protein, 9 aa, Homo sapiens
  misc_feature: Table A; Target 15622; HLA-C*01:02; CLDN6; ENSG00000184697; TAA
TAFIGNSIV

SEQ ID NO: 15623 - protein, 9 aa, Homo sapiens
  misc_feature: Table A; Target 15623; HLA-C*02:02; CLDN6; ENSG00000184697; TAA
TAFIGNSIV

SEQ ID NO: 15624 - protein, 9 aa, Homo sapiens
  misc_feature: Table A; Target 15624; HLA-C*03:03; CLDN6; ENSG00000184697; TAA
TAFIGNSIV

SEQ ID NO: 15625 - protein, 9 aa, Homo sapiens
  misc_feature: Table A; Target 15625; HLA-C*03:04; CLDN6; ENSG00000184697; TAA
TAFIGNSIV

SEQ ID NO: 15626 - protein, 9 aa, Homo sapiens
  misc_feature: Table A; Target 15626; HLA-C*05:01; CLDN6; ENSG00000184697; TAA
TAFIGNSIV

SEQ ID NO: 15627 - protein, 9 aa, Homo sapiens
  misc_feature: Table A; Target 15627; HLA-C*06:02; CLDN6; ENSG00000184697; TAA
TAFIGNSIV

SEQ ID NO: 15628 - protein, 9 aa, Homo sapiens
  misc_feature: Table A; Target 15628; HLA-C*07:01; CLDN6; ENSG00000184697; TAA
TAFIGNSIV

SEQ ID NO: 15629 - protein, 9 aa, Homo sapiens
  misc_feature: Table A; Target 15629; HLA-C*12:03; CLDN6; ENSG00000184697; TAA
TAFIGNSIV

SEQ ID NO: 15630 - protein, 9 aa, Homo sapiens
  misc_feature: Table A; Target 15630; HLA-C*16:02; CLDN6; ENSG00000184697; TAA
TAFIGNSIV

SEQ ID NO: 15631 - protein, 9 aa, Homo sapiens
  misc_feature: Table A; Target 15631; HLA-C*16:04; CLDN6; ENSG00000184697; TAA
TAFIGNSIV

SEQ ID NO: 15632 - protein, 10 aa, Homo sapiens
  misc_feature: Table A; Target 15632; HLA-A*68:02; CLDN6; ENSG00000184697; TAA
TAFIGNSIVV

SEQ ID NO: 15633 - protein, 10 aa, Homo sapiens
  misc_feature: Table A; Target 15633; HLA-B*51:01; CLDN6; ENSG00000184697; TAA
TAFIGNSIVV

SEQ ID NO: 15634 - protein, 10 aa, Homo sapiens
  misc_feature: Table A; Target 15634; HLA-B*54:01; CLDN6; ENSG00000184697; TAA
TAFIGNSIVV

SEQ ID NO: 15635 - protein, 10 aa, Homo sapiens
  misc_feature: Table A; Target 15635; HLA-B*56:01; CLDN6; ENSG00000184697; TAA
TAFIGNSIVV

SEQ ID NO: 15636 - protein, 10 aa, Homo sapiens
  misc_feature: Table A; Target 15636; HLA-C*02:02; CLDN6; ENSG00000184697; TAA
TAFIGNSIVV

SEQ ID NO: 15637 - protein, 10 aa, Homo sapiens
  misc_feature: Table A; Target 15637; HLA-C*12:03; CLDN6; ENSG00000184697; TAA
TAFIGNSIVV

SEQ ID NO: 15638 - protein, 11 aa, Homo sapiens
  misc_feature: Table A; Target 15638; HLA-B*54:01; CLDN6; ENSG00000184697; TAA
TAFIGNSIVVA

SEQ ID NO: 15639 - protein, 11 aa, Homo sapiens
  misc_feature: Table A; Target 15639; HLA-B*56:01; CLDN6; ENSG00000184697; TAA
TAFIGNSIVVA

SEQ ID NO: 15640 - protein, 11 aa, Homo sapiens
  misc_feature: Table A; Target 15640; HLA-C*12:03; CLDN6; ENSG00000184697; TAA
TAFIGNSIVVA

SEQ ID NO: 15641 - protein, 9 aa, Homo sapiens
  misc_feature: Table A; Target 15641; HLA-A*30:02; CLDN6; ENSG00000184697; TAA
TAHAIIRDF

SEQ ID NO: 15642 - protein, 9 aa, Homo sapiens
  misc_feature: Table A; Target 15642; HLA-B*35:01; CLDN6; ENSG00000184697; TAA
TAHAIIRDF

SEQ ID NO: 15643 - protein, 9 aa, Homo sapiens
  misc_feature: Table A; Target 15643; HLA-B*44:02; CLDN6; ENSG00000184697; TAA
TAHAIIRDF

SEQ ID NO: 15644 - protein, 9 aa, Homo sapiens
  misc_feature: Table A; Target 15644; HLA-B*44:03; CLDN6; ENSG00000184697; TAA
TAHAIIRDF

SEQ ID NO: 15645 - protein, 9 aa, Homo sapiens
  misc_feature: Table A; Target 15645; HLA-B*46:01; CLDN6; ENSG00000184697; TAA
TAHAIIRDF

SEQ ID NO: 15646 - protein, 9 aa, Homo sapiens
  misc_feature: Table A; Target 15646; HLA-B*57:01; CLDN6; ENSG00000184697; TAA
TAHAIIRDF

SEQ ID NO: 15647 - protein, 9 aa, Homo sapiens
  misc_feature: Table A; Target 15647; HLA-B*58:01; CLDN6; ENSG00000184697; TAA
TAHAIIRDF

SEQ ID NO: 15648 - protein, 9 aa, Homo sapiens
  misc_feature: Table A; Target 15648; HLA-C*02:02; CLDN6; ENSG00000184697; TAA
TAHAIIRDF

SEQ ID NO: 15649 - protein, 9 aa, Homo sapiens
  misc_feature: Table A; Target 15649; HLA-C*06:02; CLDN6; ENSG00000184697; TAA
TAHAIIRDF

SEQ ID NO: 15650 - protein, 9 aa, Homo sapiens
  misc_feature: Table A; Target 15650; HLA-C*12:03; CLDN6; ENSG00000184697; TAA
TAHAIIRDF

SEQ ID NO: 15651 - protein, 9 aa, Homo sapiens
  misc_feature: Table A; Target 15651; HLA-C*16:01; CLDN6; ENSG00000184697; TAA
TAHAIIRDF

SEQ ID NO: 15652 - protein, 9 aa, Homo sapiens
  misc_feature: Table A; Target 15652; HLA-C*16:02; CLDN6; ENSG00000184697; TAA
TAHAIIRDF

SEQ ID NO: 15653 - protein, 9 aa, Homo sapiens
  misc_feature: Table A; Target 15653; HLA-C*16:04; CLDN6; ENSG00000184697; TAA
TAHAIIRDF

SEQ ID NO: 15654 - protein, 10 aa, Homo sapiens
  misc_feature: Table A; Target 15654; HLA-A*01:01; CLDN6; ENSG00000184697; TAA
TAHAIIRDFY

SEQ ID NO: 15655 - protein, 10 aa, Homo sapiens
  misc_feature: Table A; Target 15655; HLA-A*29:02; CLDN6; ENSG00000184697; TAA
TAHAIIRDFY

SEQ ID NO: 15656 - protein, 10 aa, Homo sapiens
  misc_feature: Table A; Target 15656; HLA-A*30:02; CLDN6; ENSG00000184697; TAA
TAHAIIRDFY

SEQ ID NO: 15657 - protein, 11 aa, Homo sapiens
  misc_feature: Table A; Target 15657; HLA-C*07:01; CLDN6; ENSG00000184697; TAA
TCPSGGSQGPS

SEQ ID NO: 15658 - protein, 8 aa, Homo sapiens
  misc_feature: Table A; Target 15658; HLA-C*06:02; CLDN6; ENSG00000184697; TAA
TGQMQCKV

SEQ ID NO: 15659 - protein, 9 aa, Homo sapiens
  misc_feature: Table A; Target 15659; HLA-A*30:02; CLDN6; ENSG00000184697; TAA
TGQMQCKVY

SEQ ID NO: 15660 - protein, 9 aa, Homo sapiens
  misc_feature: Table A; Target 15660; HLA-C*04:01; CLDN6; ENSG00000184697; TAA
TGQMQCKVY

SEQ ID NO: 15661 - protein, 9 aa, Homo sapiens
  misc_feature: Table A; Target 15661; HLA-C*06:02; CLDN6; ENSG00000184697; TAA
TGQMQCKVY

SEQ ID NO: 15662 - protein, 9 aa, Homo sapiens
  misc_feature: Table A; Target 15662; HLA-C*07:01; CLDN6; ENSG00000184697; TAA
TGQMQCKVY

SEQ ID NO: 15663 - protein, 9 aa, Homo sapiens
  misc_feature: Table A; Target 15663; HLA-C*12:03; CLDN6; ENSG00000184697; TAA
TGQMQCKVY

SEQ ID NO: 15664 - protein, 9 aa, Homo sapiens
  misc_feature: Table A; Target 15664; HLA-C*16:01; CLDN6; ENSG00000184697; TAA
TGQMQCKVY

SEQ ID NO: 15665 - protein, 9 aa, Homo sapiens
  misc_feature: Table A; Target 15665; HLA-C*16:02; CLDN6; ENSG00000184697; TAA
TGQMQCKVY

SEQ ID NO: 15666 - protein, 9 aa, Homo sapiens
  misc_feature: Table A; Target 15666; HLA-A*02:01; CLDN6; ENSG00000184697; TAA
TLIPVCWTA

SEQ ID NO: 15667 - protein, 9 aa, Homo sapiens
  misc_feature: Table A; Target 15667; HLA-A*02:01; CLDN6; ENSG00000184697; TAA
TLLGWVNGL

SEQ ID NO: 15668 - protein, 9 aa, Homo sapiens
  misc_feature: Table A; Target 15668; HLA-A*02:03; CLDN6; ENSG00000184697; TAA
TLLGWVNGL

SEQ ID NO: 15669 - protein, 9 aa, Homo sapiens
  misc_feature: Table A; Target 15669; HLA-A*02:04; CLDN6; ENSG00000184697; TAA
TLLGWVNGL

SEQ ID NO: 15670 - protein, 9 aa, Homo sapiens
  misc_feature: Table A; Target 15670; HLA-A*02:07; CLDN6; ENSG00000184697; TAA
TLLGWVNGL

SEQ ID NO: 15671 - protein, 8 aa, Homo sapiens
  misc_feature: Table A; Target 15671; HLA-A*03:02; CLDN6; ENSG00000184697; TAA
TSAPAISR

SEQ ID NO: 15672 - protein, 8 aa, Homo sapiens
  misc_feature: Table A; Target 15672; HLA-A*11:01; CLDN6; ENSG00000184697; TAA
TSAPAISR

SEQ ID NO: 15673 - protein, 8 aa, Homo sapiens
  misc_feature: Table A; Target 15673; HLA-A*31:01; CLDN6; ENSG00000184697; TAA
TSAPAISR

SEQ ID NO: 15674 - protein, 8 aa, Homo sapiens
  misc_feature: Table A; Target 15674; HLA-A*33:01; CLDN6; ENSG00000184697; TAA
TSAPAISR

SEQ ID NO: 15675 - protein, 8 aa, Homo sapiens
  misc_feature: Table A; Target 15675; HLA-A*33:03; CLDN6; ENSG00000184697; TAA
TSAPAISR

SEQ ID NO: 15676 - protein, 8 aa, Homo sapiens
  misc_feature: Table A; Target 15676; HLA-A*68:01; CLDN6; ENSG00000184697; TAA
TSAPAISR

SEQ ID NO: 15677 - protein, 8 aa, Homo sapiens
  misc_feature: Table A; Target 15677; HLA-C*07:06; CLDN6; ENSG00000184697; TAA
TSAPAISR

SEQ ID NO: 15678 - protein, 10 aa, Homo sapiens
  misc_feature: Table A; Target 15678; HLA-C*06:02; CLDN6; ENSG00000184697; TAA
TSAPAISRGP

SEQ ID NO: 15679 - protein, 11 aa, Homo sapiens
  misc_feature: Table A; Target 15679; HLA-C*04:01; CLDN6; ENSG00000184697; TAA
TSAPAISRGPS

SEQ ID NO: 15680 - protein, 8 aa, Homo sapiens
  misc_feature: Table A; Target 15680; HLA-B*13:02; CLDN6; ENSG00000184697; TAA
TSGIVFVI

SEQ ID NO: 15681 - protein, 8 aa, Homo sapiens
  misc_feature: Table A; Target 15681; HLA-C*06:02; CLDN6; ENSG00000184697; TAA
TSGIVFVI

SEQ ID NO: 15682 - protein, 8 aa, Homo sapiens
  misc_feature: Table A; Target 15682; HLA-C*07:01; CLDN6; ENSG00000184697; TAA
TSGIVFVI

SEQ ID NO: 15683 - protein, 8 aa, Homo sapiens
  misc_feature: Table A; Target 15683; HLA-C*12:03; CLDN6; ENSG00000184697; TAA
TSGIVFVI

SEQ ID NO: 15684 - protein, 9 aa, Homo sapiens
  misc_feature: Table A; Target 15684; HLA-B*07:02; CLDN6; ENSG00000184697; TAA
VAEAQKREL

SEQ ID NO: 15685 - protein, 9 aa, Homo sapiens
  misc_feature: Table A; Target 15685; HLA-B*08:01; CLDN6; ENSG00000184697; TAA
VAEAQKREL

SEQ ID NO: 15686 - protein, 9 aa, Homo sapiens
  misc_feature: Table A; Target 15686; HLA-B*46:01; CLDN6; ENSG00000184697; TAA
VAEAQKREL

SEQ ID NO: 15687 - protein, 9 aa, Homo sapiens
  misc_feature: Table A; Target 15687; HLA-B*51:01; CLDN6; ENSG00000184697; TAA
VAEAQKREL

SEQ ID NO: 15688 - protein, 9 aa, Homo sapiens
  misc_feature: Table A; Target 15688; HLA-B*58:01; CLDN6; ENSG00000184697; TAA
VAEAQKREL

SEQ ID NO: 15689 - protein, 9 aa, Homo sapiens
  misc_feature: Table A; Target 15689; HLA-C*01:02; CLDN6; ENSG00000184697; TAA
VAEAQKREL

SEQ ID NO: 15690 - protein, 9 aa, Homo sapiens
  misc_feature: Table A; Target 15690; HLA-C*03:03; CLDN6; ENSG00000184697; TAA
VAEAQKREL

SEQ ID NO: 15691 - protein, 9 aa, Homo sapiens
  misc_feature: Table A; Target 15691; HLA-C*03:04; CLDN6; ENSG00000184697; TAA
VAEAQKREL

SEQ ID NO: 15692 - protein, 9 aa, Homo sapiens
  misc_feature: Table A; Target 15692; HLA-C*05:01; CLDN6; ENSG00000184697; TAA
VAEAQKREL

SEQ ID NO: 15693 - protein, 9 aa, Homo sapiens
  misc_feature: Table A; Target 15693; HLA-C*07:02; CLDN6; ENSG00000184697; TAA
VAEAQKREL

SEQ ID NO: 15694 - protein, 9 aa, Homo sapiens
  misc_feature: Table A; Target 15694; HLA-C*14:02; CLDN6; ENSG00000184697; TAA
VAEAQKREL

SEQ ID NO: 15695 - protein, 9 aa, Homo sapiens
  misc_feature: Table A; Target 15695; HLA-C*16:01; CLDN6; ENSG00000184697; TAA
VAEAQKREL

SEQ ID NO: 15696 - protein, 9 aa, Homo sapiens
  misc_feature: Table A; Target 15696; HLA-C*16:02; CLDN6; ENSG00000184697; TAA
VAEAQKREL

SEQ ID NO: 15697 - protein, 8 aa, Homo sapiens
  misc_feature: Table A; Target 15697; HLA-B*51:01; CLDN6; ENSG00000184697; TAA
VALFGLLV

SEQ ID NO: 15698 - protein, 9 aa, Homo sapiens
  misc_feature: Table A; Target 15698; HLA-A*01:01; CLDN6; ENSG00000184697; TAA
VALFGLLVY

SEQ ID NO: 15699 - protein, 9 aa, Homo sapiens
  misc_feature: Table A; Target 15699; HLA-A*03:01; CLDN6; ENSG00000184697; TAA
VALFGLLVY

SEQ ID NO: 15700 - protein, 9 aa, Homo sapiens
  misc_feature: Table A; Target 15700; HLA-A*29:02; CLDN6; ENSG00000184697; TAA
VALFGLLVY

SEQ ID NO: 15701 - protein, 9 aa, Homo sapiens
  misc_feature: Table A; Target 15701; HLA-B*15:03; CLDN6; ENSG00000184697; TAA
VALFGLLVY

SEQ ID NO: 15702 - protein, 9 aa, Homo sapiens
  misc_feature: Table A; Target 15702; HLA-B*35:01; CLDN6; ENSG00000184697; TAA
VALFGLLVY

SEQ ID NO: 15703 - protein, 9 aa, Homo sapiens
  misc_feature: Table A; Target 15703; HLA-B*46:01; CLDN6; ENSG00000184697; TAA
VALFGLLVY

SEQ ID NO: 15704 - protein, 9 aa, Homo sapiens
  misc_feature: Table A; Target 15704; HLA-B*57:01; CLDN6; ENSG00000184697; TAA
VALFGLLVY

SEQ ID NO: 15705 - protein, 9 aa, Homo sapiens
  misc_feature: Table A; Target 15705; HLA-C*02:02; CLDN6; ENSG00000184697; TAA
VALFGLLVY

SEQ ID NO: 15706 - protein, 9 aa, Homo sapiens
  misc_feature: Table A; Target 15706; HLA-C*07:01; CLDN6; ENSG00000184697; TAA
VALFGLLVY

SEQ ID NO: 15707 - protein, 9 aa, Homo sapiens
  misc_feature: Table A; Target 15707; HLA-C*12:03; CLDN6; ENSG00000184697; TAA
VALFGLLVY

SEQ ID NO: 15708 - protein, 10 aa, Homo sapiens
  misc_feature: Table A; Target 15708; HLA-A*02:01; CLDN6; ENSG00000184697; TAA
VALFGLLVYL

SEQ ID NO: 15709 - protein, 10 aa, Homo sapiens
  misc_feature: Table A; Target 15709; HLA-A*02:04; CLDN6; ENSG00000184697; TAA
VALFGLLVYL

SEQ ID NO: 15710 - protein, 10 aa, Homo sapiens
  misc_feature: Table A; Target 15710; HLA-A*24:02; CLDN6; ENSG00000184697; TAA
VALFGLLVYL

SEQ ID NO: 15711 - protein, 10 aa, Homo sapiens
  misc_feature: Table A; Target 15711; HLA-B*57:01; CLDN6; ENSG00000184697; TAA
VAQVVWEGLW

SEQ ID NO: 15712 - protein, 10 aa, Homo sapiens
  misc_feature: Table A; Target 15712; HLA-B*40:01; CLDN6; ENSG00000184697; TAA
VEEKDSKARL

SEQ ID NO: 15713 - protein, 10 aa, Homo sapiens
  misc_feature: Table A; Target 15713; HLA-B*40:02; CLDN6; ENSG00000184697; TAA
VEEKDSKARL

SEQ ID NO: 15714 - protein, 10 aa, Homo sapiens
  misc_feature: Table A; Target 15714; HLA-B*44:03; CLDN6; ENSG00000184697; TAA
VEEKDSKARL

SEQ ID NO: 15715 - protein, 8 aa, Homo sapiens
  misc_feature: Table A; Target 15715; HLA-A*23:01; CLDN6; ENSG00000184697; TAA
VFVISGVL

SEQ ID NO: 15716 - protein, 8 aa, Homo sapiens
  misc_feature: Table A; Target 15716; HLA-C*14:02; CLDN6; ENSG00000184697; TAA
VFVISGVL

SEQ ID NO: 15717 - protein, 10 aa, Homo sapiens
  misc_feature: Table A; Target 15717; HLA-A*23:01; CLDN6; ENSG00000184697; TAA
VFVISGVLTL

SEQ ID NO: 15718 - protein, 11 aa, Homo sapiens
  misc_feature: Table A; Target 15718; HLA-A*23:01; CLDN6; ENSG00000184697; TAA
VFVISGVLTLI

SEQ ID NO: 15719 - protein, 9 aa, Homo sapiens
  misc_feature: Table A; Target 15719; HLA-A*23:01; CLDN6; ENSG00000184697; TAA
VIALLVALF

SEQ ID NO: 15720 - protein, 9 aa, Homo sapiens
  misc_feature: Table A; Target 15720; HLA-A*24:02; CLDN6; ENSG00000184697; TAA
VIALLVALF

SEQ ID NO: 15721 - protein, 9 aa, Homo sapiens
  misc_feature: Table A; Target 15721; HLA-A*29:02; CLDN6; ENSG00000184697; TAA
VIALLVALF

SEQ ID NO: 15722 - protein, 9 aa, Homo sapiens
  misc_feature: Table A; Target 15722; HLA-B*57:01; CLDN6; ENSG00000184697; TAA
VIALLVALF

SEQ ID NO: 15723 - protein, 9 aa, Homo sapiens
  misc_feature: Table A; Target 15723; HLA-A*02:01; CLDN6; ENSG00000184697; TAA
VISGVLTLI

SEQ ID NO: 15724 - protein, 9 aa, Homo sapiens
  misc_feature: Table A; Target 15724; HLA-A*02:03; CLDN6; ENSG00000184697; TAA
VISGVLTLI

SEQ ID NO: 15725 - protein, 9 aa, Homo sapiens
  misc_feature: Table A; Target 15725; HLA-A*02:04; CLDN6; ENSG00000184697; TAA
VISGVLTLI

SEQ ID NO: 15726 - protein, 9 aa, Homo sapiens
  misc_feature: Table A; Target 15726; HLA-A*02:07; CLDN6; ENSG00000184697; TAA
VISGVLTLI

SEQ ID NO: 15727 - protein, 9 aa, Homo sapiens
  misc_feature: Table A; Target 15727; HLA-A*23:01; CLDN6; ENSG00000184697; TAA
VISGVLTLI

SEQ ID NO: 15728 - protein, 9 aa, Homo sapiens
  misc_feature: Table A; Target 15728; HLA-A*24:02; CLDN6; ENSG00000184697; TAA
VISGVLTLI

SEQ ID NO: 15729 - protein, 9 aa, Homo sapiens
  misc_feature: Table A; Target 15729; HLA-A*32:01; CLDN6; ENSG00000184697; TAA
VISGVLTLI

SEQ ID NO: 15730 - protein, 9 aa, Homo sapiens
  misc_feature: Table A; Target 15730; HLA-B*13:02; CLDN6; ENSG00000184697; TAA
VISGVLTLI

SEQ ID NO: 15731 - protein, 9 aa, Homo sapiens
  misc_feature: Table A; Target 15731; HLA-A*24:02; CLDN6; ENSG00000184697; TAA
VLTLIPVCW

SEQ ID NO: 15732 - protein, 9 aa, Homo sapiens
  misc_feature: Table A; Target 15732; HLA-B*44:02; CLDN6; ENSG00000184697; TAA
VLTLIPVCW

SEQ ID NO: 15733 - protein, 9 aa, Homo sapiens
  misc_feature: Table A; Target 15733; HLA-B*57:01; CLDN6; ENSG00000184697; TAA
VLTLIPVCW

SEQ ID NO: 15734 - protein, 8 aa, Homo sapiens
  misc_feature: Table A; Target 15734; HLA-A*23:01; CLDN6; ENSG00000184697; TAA
VLTSGIVF

SEQ ID NO: 15735 - protein, 8 aa, Homo sapiens
  misc_feature: Table A; Target 15735; HLA-A*32:01; CLDN6; ENSG00000184697; TAA
VLTSGIVF

SEQ ID NO: 15736 - protein, 8 aa, Homo sapiens
  misc_feature: Table A; Target 15736; HLA-B*15:01; CLDN6; ENSG00000184697; TAA
VLTSGIVF

SEQ ID NO: 15737 - protein, 8 aa, Homo sapiens
  misc_feature: Table A; Target 15737; HLA-B*15:03; CLDN6; ENSG00000184697; TAA
VLTSGIVF

SEQ ID NO: 15738 - protein, 8 aa, Homo sapiens
  misc_feature: Table A; Target 15738; HLA-B*39:01; CLDN6; ENSG00000184697; TAA
VLTSGIVF

SEQ ID NO: 15739 - protein, 8 aa, Homo sapiens
  misc_feature: Table A; Target 15739; HLA-B*46:01; CLDN6; ENSG00000184697; TAA
VLTSGIVF

SEQ ID NO: 15740 - protein, 8 aa, Homo sapiens
  misc_feature: Table A; Target 15740; HLA-C*03:04; CLDN6; ENSG00000184697; TAA
VLTSGIVF

SEQ ID NO: 15741 - protein, 8 aa, Homo sapiens
  misc_feature: Table A; Target 15741; HLA-C*07:04; CLDN6; ENSG00000184697; TAA
VLTSGIVF

SEQ ID NO: 15742 - protein, 8 aa, Homo sapiens
  misc_feature: Table A; Target 15742; HLA-C*16:01; CLDN6; ENSG00000184697; TAA
VLTSGIVF

SEQ ID NO: 15743 - protein, 9 aa, Homo sapiens
  misc_feature: Table A; Target 15743; HLA-A*02:03; CLDN6; ENSG00000184697; TAA
VLTSGIVFV

SEQ ID NO: 15744 - protein, 9 aa, Homo sapiens
  misc_feature: Table A; Target 15744; HLA-A*02:04; CLDN6; ENSG00000184697; TAA
VLTSGIVFV

SEQ ID NO: 15745 - protein, 9 aa, Homo sapiens
  misc_feature: Table A; Target 15745; HLA-A*02:07; CLDN6; ENSG00000184697; TAA
VLTSGIVFV

SEQ ID NO: 15746 - protein, 9 aa, Homo sapiens
  misc_feature: Table A; Target 15746; HLA-A*68:02; CLDN6; ENSG00000184697; TAA
VLTSGIVFV

SEQ ID NO: 15747 - protein, 9 aa, Homo sapiens
  misc_feature: Table A; Target 15747; HLA-B*13:02; CLDN6; ENSG00000184697; TAA
VLTSGIVFV

SEQ ID NO: 15748 - protein, 9 aa, Homo sapiens
  misc_feature: Table A; Target 15748; HLA-B*55:01; CLDN6; ENSG00000184697; TAA
VLTSGIVFV

SEQ ID NO: 15749 - protein, 10 aa, Homo sapiens
  misc_feature: Table A; Target 15749; HLA-A*02:01; CLDN6; ENSG00000184697; TAA
VLTSGIVFVI

SEQ ID NO: 15750 - protein, 10 aa, Homo sapiens
  misc_feature: Table A; Target 15750; HLA-A*02:03; CLDN6; ENSG00000184697; TAA
VLTSGIVFVI

SEQ ID NO: 15751 - protein, 10 aa, Homo sapiens
  misc_feature: Table A; Target 15751; HLA-A*02:04; CLDN6; ENSG00000184697; TAA
VLTSGIVFVI

SEQ ID NO: 15752 - protein, 10 aa, Homo sapiens
  misc_feature: Table A; Target 15752; HLA-A*23:01; CLDN6; ENSG00000184697; TAA
VLTSGIVFVI

SEQ ID NO: 15753 - protein, 9 aa, Homo sapiens
  misc_feature: Table A; Target 15753; HLA-C*07:02; CLDN6; ENSG00000184697; TAA
VNGLVSCAL

SEQ ID NO: 15754 - protein, 9 aa, Homo sapiens
  misc_feature: Table A; Target 15754; HLA-B*13:02; CLDN6; ENSG00000184697; TAA
VQSTGQMQC

SEQ ID NO: 15755 - protein, 10 aa, Homo sapiens
  misc_feature: Table A; Target 15755; HLA-A*03:01; CLDN6; ENSG00000184697; TAA
VQSTGQMQCK

SEQ ID NO: 15756 - protein, 10 aa, Homo sapiens
  misc_feature: Table A; Target 15756; HLA-A*03:02; CLDN6; ENSG00000184697; TAA
VQSTGQMQCK

SEQ ID NO: 15757 - protein, 10 aa, Homo sapiens
  misc_feature: Table A; Target 15757; HLA-A*11:01; CLDN6; ENSG00000184697; TAA
VQSTGQMQCK

SEQ ID NO: 15758 - protein, 10 aa, Homo sapiens
  misc_feature: Table A; Target 15758; HLA-B*27:02; CLDN6; ENSG00000184697; TAA
VQSTGQMQCK

SEQ ID NO: 15759 - protein, 10 aa, Homo sapiens
  misc_feature: Table A; Target 15759; HLA-C*06:02; CLDN6; ENSG00000184697; TAA
VQSTGQMQCK

SEQ ID NO: 15760 - protein, 9 aa, Homo sapiens
  misc_feature: Table A; Target 15760; HLA-A*02:03; CLDN6; ENSG00000184697; TAA
VTAFIGNSI

SEQ ID NO: 15761 - protein, 9 aa, Homo sapiens
  misc_feature: Table A; Target 15761; HLA-A*30:01; CLDN6; ENSG00000184697; TAA
VTAFIGNSI

SEQ ID NO: 15762 - protein, 9 aa, Homo sapiens
  misc_feature: Table A; Target 15762; HLA-A*32:01; CLDN6; ENSG00000184697; TAA
VTAFIGNSI

SEQ ID NO: 15763 - protein, 9 aa, Homo sapiens
  misc_feature: Table A; Target 15763; HLA-A*68:02; CLDN6; ENSG00000184697; TAA
VTAFIGNSI

SEQ ID NO: 15764 - protein, 9 aa, Homo sapiens
  misc_feature: Table A; Target 15764; HLA-B*13:02; CLDN6; ENSG00000184697; TAA
VTAFIGNSI

SEQ ID NO: 15765 - protein, 9 aa, Homo sapiens
  misc_feature: Table A; Target 15765; HLA-B*38:01; CLDN6; ENSG00000184697; TAA
VTAFIGNSI

SEQ ID NO: 15766 - protein, 9 aa, Homo sapiens
  misc_feature: Table A; Target 15766; HLA-B*39:01; CLDN6; ENSG00000184697; TAA
VTAFIGNSI

SEQ ID NO: 15767 - protein, 9 aa, Homo sapiens
  misc_feature: Table A; Target 15767; HLA-B*46:01; CLDN6; ENSG00000184697; TAA
VTAFIGNSI

SEQ ID NO: 15768 - protein, 9 aa, Homo sapiens
  misc_feature: Table A; Target 15768; HLA-B*51:01; CLDN6; ENSG00000184697; TAA
VTAFIGNSI

SEQ ID NO: 15769 - protein, 9 aa, Homo sapiens
  misc_feature: Table A; Target 15769; HLA-B*58:01; CLDN6; ENSG00000184697; TAA
VTAFIGNSI

SEQ ID NO: 15770 - protein, 9 aa, Homo sapiens
  misc_feature: Table A; Target 15770; HLA-C*01:02; CLDN6; ENSG00000184697; TAA
VTAFIGNSI

SEQ ID NO: 15771 - protein, 9 aa, Homo sapiens
  misc_feature: Table A; Target 15771; HLA-C*02:02; CLDN6; ENSG00000184697; TAA
VTAFIGNSI

SEQ ID NO: 15772 - protein, 9 aa, Homo sapiens
  misc_feature: Table A; Target 15772; HLA-C*03:03; CLDN6; ENSG00000184697; TAA
VTAFIGNSI

SEQ ID NO: 15773 - protein, 9 aa, Homo sapiens
  misc_feature: Table A; Target 15773; HLA-C*03:04; CLDN6; ENSG00000184697; TAA
VTAFIGNSI

SEQ ID NO: 15774 - protein, 9 aa, Homo sapiens
  misc_feature: Table A; Target 15774; HLA-C*06:02; CLDN6; ENSG00000184697; TAA
VTAFIGNSI

SEQ ID NO: 15775 - protein, 9 aa, Homo sapiens
  misc_feature: Table A; Target 15775; HLA-C*07:04; CLDN6; ENSG00000184697; TAA
VTAFIGNSI

SEQ ID NO: 15776 - protein, 9 aa, Homo sapiens
  misc_feature: Table A; Target 15776; HLA-C*12:03; CLDN6; ENSG00000184697; TAA
VTAFIGNSI

SEQ ID NO: 15777 - protein, 9 aa, Homo sapiens
  misc_feature: Table A; Target 15777; HLA-C*16:01; CLDN6; ENSG00000184697; TAA
VTAFIGNSI

SEQ ID NO: 15778 - protein, 9 aa, Homo sapiens
  misc_feature: Table A; Target 15778; HLA-C*16:02; CLDN6; ENSG00000184697; TAA
VTAFIGNSI

SEQ ID NO: 15779 - protein, 9 aa, Homo sapiens
  misc_feature: Table A; Target 15779; HLA-C*16:04; CLDN6; ENSG00000184697; TAA
VTAFIGNSI

SEQ ID NO: 15780 - protein, 10 aa, Homo sapiens
  misc_feature: Table A; Target 15780; HLA-A*68:02; CLDN6; ENSG00000184697; TAA
VTAFIGNSIV

SEQ ID NO: 15781 - protein, 11 aa, Homo sapiens
  misc_feature: Table A; Target 15781; HLA-A*68:02; CLDN6; ENSG00000184697; TAA
VTAFIGNSIVV

SEQ ID NO: 15782 - protein, 10 aa, Homo sapiens
  misc_feature: Table A; Target 15782; HLA-A*68:02; CLDN6; ENSG00000184697; TAA
VVAQVVWEGL

SEQ ID NO: 15783 - protein, 11 aa, Homo sapiens
  misc_feature: Table A; Target 15783; HLA-B*57:01; CLDN6; ENSG00000184697; TAA
VVAQVVWEGLW

SEQ ID NO: 15784 - protein, 8 aa, Homo sapiens
  misc_feature: Table A; Target 15784; HLA-B*57:01; CLDN6; ENSG00000184697; TAA
VVLTLLGW

SEQ ID NO: 15785 - protein, 8 aa, Homo sapiens
  misc_feature: Table A; Target 15785; HLA-B*39:01; CLDN6; ENSG00000184697; TAA
VVQSTGQM

SEQ ID NO: 15786 - protein, 8 aa, Homo sapiens
  misc_feature: Table A; Target 15786; HLA-C*01:02; CLDN6; ENSG00000184697; TAA
VVQSTGQM

SEQ ID NO: 15787 - protein, 8 aa, Homo sapiens
  misc_feature: Table A; Target 15787; HLA-C*04:01; CLDN6; ENSG00000184697; TAA
VVQSTGQM

SEQ ID NO: 15788 - protein, 8 aa, Homo sapiens
  misc_feature: Table A; Target 15788; HLA-C*05:01; CLDN6; ENSG00000184697; TAA
VVQSTGQM

SEQ ID NO: 15789 - protein, 8 aa, Homo sapiens
  misc_feature: Table A; Target 15789; HLA-C*14:02; CLDN6; ENSG00000184697; TAA
VVQSTGQM

SEQ ID NO: 15790 - protein, 9 aa, Homo sapiens
  misc_feature: Table A; Target 15790; HLA-C*01:02; CLDN6; ENSG00000184697; TAA
VVQSTGQMQ

SEQ ID NO: 15791 - protein, 10 aa, Homo sapiens
  misc_feature: Table A; Target 15791; HLA-C*01:02; CLDN6; ENSG00000184697; TAA
VVQSTGQMQC

SEQ ID NO: 15792 - protein, 11 aa, Homo sapiens
  misc_feature: Table A; Target 15792; HLA-A*03:01; CLDN6; ENSG00000184697; TAA
VVQSTGQMQCK

SEQ ID NO: 15793 - protein, 11 aa, Homo sapiens
  misc_feature: Table A; Target 15793; HLA-A*03:02; CLDN6; ENSG00000184697; TAA
VVQSTGQMQCK

SEQ ID NO: 15794 - protein, 11 aa, Homo sapiens
  misc_feature: Table A; Target 15794; HLA-A*31:01; CLDN6; ENSG00000184697; TAA
VVQSTGQMQCK

SEQ ID NO: 15795 - protein, 11 aa, Homo sapiens
  misc_feature: Table A; Target 15795; HLA-A*68:01; CLDN6; ENSG00000184697; TAA
VVQSTGQMQCK

SEQ ID NO: 15796 - protein, 11 aa, Homo sapiens
  misc_feature: Table A; Target 15796; HLA-B*27:02; CLDN6; ENSG00000184697; TAA
VVQSTGQMQCK

SEQ ID NO: 15797 - protein, 11 aa, Homo sapiens
  misc_feature: Table A; Target 15797; HLA-B*27:05; CLDN6; ENSG00000184697; TAA
VVQSTGQMQCK

SEQ ID NO: 15798 - protein, 11 aa, Homo sapiens
  misc_feature: Table A; Target 15798; HLA-C*06:02; CLDN6; ENSG00000184697; TAA
VVQSTGQMQCK

SEQ ID NO: 15799 - protein, 11 aa, Homo sapiens
  misc_feature: Table A; Target 15799; HLA-C*07:06; CLDN6; ENSG00000184697; TAA
VVQSTGQMQCK

SEQ ID NO: 15800 - protein, 8 aa, Homo sapiens
  misc_feature: Table A; Target 15800; HLA-A*23:01; CLDN6; ENSG00000184697; TAA
VYDSLLAL

SEQ ID NO: 15801 - protein, 8 aa, Homo sapiens
  misc_feature: Table A; Target 15801; HLA-C*04:01; CLDN6; ENSG00000184697; TAA
VYDSLLAL

SEQ ID NO: 15802 - protein, 8 aa, Homo sapiens
  misc_feature: Table A; Target 15802; HLA-C*14:02; CLDN6; ENSG00000184697; TAA
VYDSLLAL

SEQ ID NO: 15803 - protein, 10 aa, Homo sapiens
  misc_feature: Table A; Target 15803; HLA-C*06:02; CLDN6; ENSG00000184697; TAA
VYLAGAKCTT

SEQ ID NO: 15804 - protein, 10 aa, Homo sapiens
  misc_feature: Table A; Target 15804; HLA-C*07:01; CLDN6; ENSG00000184697; TAA
VYLAGAKCTT

SEQ ID NO: 15805 - protein, 10 aa, Homo sapiens
  misc_feature: Table A; Target 15805; HLA-C*07:02; CLDN6; ENSG00000184697; TAA
VYLAGAKCTT

SEQ ID NO: 15806 - protein, 8 aa, Homo sapiens
  misc_feature: Table A; Target 15806; HLA-B*51:01; CLDN6; ENSG00000184697; TAA
WAASGLLL

SEQ ID NO: 15807 - protein, 8 aa, Homo sapiens
  misc_feature: Table A; Target 15807; HLA-C*03:03; CLDN6; ENSG00000184697; TAA
WAASGLLL

SEQ ID NO: 15808 - protein, 8 aa, Homo sapiens
  misc_feature: Table A; Target 15808; HLA-C*03:04; CLDN6; ENSG00000184697; TAA
WAASGLLL

SEQ ID NO: 15809 - protein, 9 aa, Homo sapiens
  misc_feature: Table A; Target 15809; HLA-C*03:04; CLDN6; ENSG00000184697; TAA
WAASGLLLL

SEQ ID NO: 15810 - protein, 9 aa, Homo sapiens
  misc_feature: Table A; Target 15810; HLA-C*06:02; CLDN6; ENSG00000184697; TAA
YLAGAKCTT

SEQ ID NO: 15811 - protein, 9 aa, Homo sapiens
  misc_feature: Table A; Target 15811; HLA-A*02:03; CLDN6; ENSG00000184697; TAA
YLGWAASGL

SEQ ID NO: 15812 - protein, 9 aa, Homo sapiens
  misc_feature: Table A; Target 15812; HLA-A*02:04; CLDN6; ENSG00000184697; TAA
YLGWAASGL

SEQ ID NO: 15813 - protein, 9 aa, Homo sapiens
  misc_feature: Table A; Target 15813; HLA-A*02:07; CLDN6; ENSG00000184697; TAA
YLGWAASGL

SEQ ID NO: 15814 - protein, 11 aa, Homo sapiens
  misc_feature: Table A; Target 15814; HLA-A*02:04; CLDN6; ENSG00000184697; TAA
YLGWAASGLLL

SEQ ID NO: 15815 - protein, 9 aa, Homo sapiens
  misc_feature: Table A; Target 15815; HLA-A*02:01; CLDN6; ENSG00000184697; TAA
YMARYSTSA

SEQ ID NO: 15816 - protein, 9 aa, Homo sapiens
  misc_feature: Table A; Target 15816; HLA-A*02:03; CLDN6; ENSG00000184697; TAA
YMARYSTSA

SEQ ID NO: 15817 - protein, 9 aa, Homo sapiens
  misc_feature: Table A; Target 15817; HLA-B*46:01; CLDN6; ENSG00000184697; TAA
YMARYSTSA

SEQ ID NO: 15818 - protein, 9 aa, Homo sapiens
  misc_feature: Table A; Target 15818; HLA-B*54:01; CLDN6; ENSG00000184697; TAA
YMARYSTSA

SEQ ID NO: 15819 - protein, 9 aa, Homo sapiens
  misc_feature: Table A; Target 15819; HLA-B*55:01; CLDN6; ENSG00000184697; TAA
YMARYSTSA

SEQ ID NO: 15820 - protein, 8 aa, Homo sapiens
  misc_feature: Table A; Target 15820; HLA-B*54:01; CLDN6; ENSG00000184697; TAA
YNPLVAEA

SEQ ID NO: 15821 - protein, 10 aa, Homo sapiens
  misc_feature: Table A; Target 15821; HLA-B*27:02; CLDN6; ENSG00000184697; TAA
YNPLVAEAQK

SEQ ID NO: 15822 - protein, 10 aa, Homo sapiens
  misc_feature: Table A; Target 15822; HLA-C*07:02; CLDN6; ENSG00000184697; TAA
YNPLVAEAQK

SEQ ID NO: 15823 - protein, 8 aa, Homo sapiens
  misc_feature: Table A; Target 15823; HLA-A*02:01; CLDN6; ENSG00000184697; TAA
YSTSAPAI

SEQ ID NO: 15824 - protein, 8 aa, Homo sapiens
  misc_feature: Table A; Target 15824; HLA-A*23:01; CLDN6; ENSG00000184697; TAA
YSTSAPAI

SEQ ID NO: 15825 - protein, 8 aa, Homo sapiens
  misc_feature: Table A; Target 15825; HLA-A*30:01; CLDN6; ENSG00000184697; TAA
YSTSAPAI

SEQ ID NO: 15826 - protein, 8 aa, Homo sapiens
  misc_feature: Table A; Target 15826; HLA-A*32:01; CLDN6; ENSG00000184697; TAA
YSTSAPAI

SEQ ID NO: 15827 - protein, 8 aa, Homo sapiens
  misc_feature: Table A; Target 15827; HLA-B*07:02; CLDN6; ENSG00000184697; TAA
YSTSAPAI

SEQ ID NO: 15828 - protein, 8 aa, Homo sapiens
  misc_feature: Table A; Target 15828; HLA-B*13:02; CLDN6; ENSG00000184697; TAA
YSTSAPAI

SEQ ID NO: 15829 - protein, 8 aa, Homo sapiens
  misc_feature: Table A; Target 15829; HLA-B*27:05; CLDN6; ENSG00000184697; TAA
YSTSAPAI

SEQ ID NO: 15830 - protein, 8 aa, Homo sapiens
  misc_feature: Table A; Target 15830; HLA-B*39:01; CLDN6; ENSG00000184697; TAA
YSTSAPAI

SEQ ID NO: 15831 - protein, 8 aa, Homo sapiens
  misc_feature: Table A; Target 15831; HLA-B*40:01; CLDN6; ENSG00000184697; TAA
YSTSAPAI

SEQ ID NO: 15832 - protein, 8 aa, Homo sapiens
  misc_feature: Table A; Target 15832; HLA-B*40:02; CLDN6; ENSG00000184697; TAA
YSTSAPAI

SEQ ID NO: 15833 - protein, 8 aa, Homo sapiens
  misc_feature: Table A; Target 15833; HLA-B*46:01; CLDN6; ENSG00000184697; TAA
YSTSAPAI

SEQ ID NO: 15834 - protein, 8 aa, Homo sapiens
  misc_feature: Table A; Target 15834; HLA-B*49:01; CLDN6; ENSG00000184697; TAA
YSTSAPAI

SEQ ID NO: 15835 - protein, 8 aa, Homo sapiens
  misc_feature: Table A; Target 15835; HLA-B*51:01; CLDN6; ENSG00000184697; TAA
YSTSAPAI

SEQ ID NO: 15836 - protein, 8 aa, Homo sapiens
  misc_feature: Table A; Target 15836; HLA-B*54:01; CLDN6; ENSG00000184697; TAA
YSTSAPAI

SEQ ID NO: 15837 - protein, 8 aa, Homo sapiens
  misc_feature: Table A; Target 15837; HLA-B*55:01; CLDN6; ENSG00000184697; TAA
YSTSAPAI

SEQ ID NO: 15838 - protein, 8 aa, Homo sapiens
  misc_feature: Table A; Target 15838; HLA-B*58:01; CLDN6; ENSG00000184697; TAA
YSTSAPAI

SEQ ID NO: 15839 - protein, 8 aa, Homo sapiens
  misc_feature: Table A; Target 15839; HLA-C*01:02; CLDN6; ENSG00000184697; TAA
YSTSAPAI

SEQ ID NO: 15840 - protein, 8 aa, Homo sapiens
  misc_feature: Table A; Target 15840; HLA-C*02:02; CLDN6; ENSG00000184697; TAA
YSTSAPAI

SEQ ID NO: 15841 - protein, 8 aa, Homo sapiens
  misc_feature: Table A; Target 15841; HLA-C*03:03; CLDN6; ENSG00000184697; TAA
YSTSAPAI

SEQ ID NO: 15842 - protein, 8 aa, Homo sapiens
  misc_feature: Table A; Target 15842; HLA-C*03:04; CLDN6; ENSG00000184697; TAA
YSTSAPAI

SEQ ID NO: 15843 - protein, 8 aa, Homo sapiens
  misc_feature: Table A; Target 15843; HLA-C*04:01; CLDN6; ENSG00000184697; TAA
YSTSAPAI

SEQ ID NO: 15844 - protein, 8 aa, Homo sapiens
  misc_feature: Table A; Target 15844; HLA-C*05:01; CLDN6; ENSG00000184697; TAA
YSTSAPAI

SEQ ID NO: 15845 - protein, 8 aa, Homo sapiens
  misc_feature: Table A; Target 15845; HLA-C*06:02; CLDN6; ENSG00000184697; TAA
YSTSAPAI

SEQ ID NO: 15846 - protein, 8 aa, Homo sapiens
  misc_feature: Table A; Target 15846; HLA-C*07:01; CLDN6; ENSG00000184697; TAA
YSTSAPAI

SEQ ID NO: 15847 - protein, 8 aa, Homo sapiens
  misc_feature: Table A; Target 15847; HLA-C*07:02; CLDN6; ENSG00000184697; TAA
YSTSAPAI

SEQ ID NO: 15848 - protein, 8 aa, Homo sapiens
  misc_feature: Table A; Target 15848; HLA-C*12:03; CLDN6; ENSG00000184697; TAA
YSTSAPAI

SEQ ID NO: 15849 - protein, 8 aa, Homo sapiens
  misc_feature: Table A; Target 15849; HLA-C*14:02; CLDN6; ENSG00000184697; TAA
YSTSAPAI

SEQ ID NO: 15850 - protein, 8 aa, Homo sapiens
  misc_feature: Table A; Target 15850; HLA-C*16:01; CLDN6; ENSG00000184697; TAA
YSTSAPAI

SEQ ID NO: 15851 - protein, 8 aa, Homo sapiens
  misc_feature: Table A; Target 15851; HLA-C*16:02; CLDN6; ENSG00000184697; TAA
YSTSAPAI

SEQ ID NO: 15852 - protein, 8 aa, Homo sapiens
  misc_feature: Table A; Target 15852; HLA-C*16:04; CLDN6; ENSG00000184697; TAA
YSTSAPAI

SEQ ID NO: 15853 - protein, 10 aa, Homo sapiens
  misc_feature: Table A; Target 15853; HLA-A*03:01; CLDN6; ENSG00000184697; TAA
YSTSAPAISR

SEQ ID NO: 15854 - protein, 10 aa, Homo sapiens
  misc_feature: Table A; Target 15854; HLA-A*11:01; CLDN6; ENSG00000184697; TAA
YSTSAPAISR

SEQ ID NO: 15855 - protein, 10 aa, Homo sapiens
  misc_feature: Table A; Target 15855; HLA-A*31:01; CLDN6; ENSG00000184697; TAA
YSTSAPAISR

SEQ ID NO: 15856 - protein, 10 aa, Homo sapiens
  misc_feature: Table A; Target 15856; HLA-A*33:01; CLDN6; ENSG00000184697; TAA
YSTSAPAISR

SEQ ID NO: 15857 - protein, 10 aa, Homo sapiens
  misc_feature: Table A; Target 15857; HLA-A*33:03; CLDN6; ENSG00000184697; TAA
YSTSAPAISR

SEQ ID NO: 15858 - protein, 10 aa, Homo sapiens
  misc_feature: Table A; Target 15858; HLA-A*68:02; CLDN6; ENSG00000184697; TAA
YSTSAPAISR

SEQ ID NO: 15859 - protein, 10 aa, Homo sapiens
  misc_feature: Table A; Target 15859; HLA-B*27:02; CLDN6; ENSG00000184697; TAA
YSTSAPAISR

SEQ ID NO: 15860 - protein, 10 aa, Homo sapiens
  misc_feature: Table A; Target 15860; HLA-B*54:01; CLDN6; ENSG00000184697; TAA
YSTSAPAISR

SEQ ID NO: 15861 - protein, 10 aa, Homo sapiens
  misc_feature: Table A; Target 15861; HLA-B*57:01; CLDN6; ENSG00000184697; TAA
YSTSAPAISR

SEQ ID NO: 15862 - protein, 10 aa, Homo sapiens
  misc_feature: Table A; Target 15862; HLA-C*07:02; CLDN6; ENSG00000184697; TAA
YSTSAPAISR

SEQ ID NO: 15863 - protein, 10 aa, Homo sapiens
  misc_feature: Table A; Target 15863; HLA-C*07:06; CLDN6; ENSG00000184697; TAA
YSTSAPAISR

SEQ ID NO: 15864 - protein, 9 aa, Homo sapiens
  misc_feature: Table A; Target 15864; HLA-B*15:03; CLEC3A; ENSG00000166509; TAA
AKNGLVICI

SEQ ID NO: 15865 - protein, 8 aa, Homo sapiens
  misc_feature: Table A; Target 15865; HLA-A*02:03; CLEC3A; ENSG00000166509; TAA
ALKEIQAL

SEQ ID NO: 15866 - protein, 8 aa, Homo sapiens
  misc_feature: Table A; Target 15866; HLA-A*02:04; CLEC3A; ENSG00000166509; TAA
ALKEIQAL

SEQ ID NO: 15867 - protein, 8 aa, Homo sapiens
  misc_feature: Table A; Target 15867; HLA-B*08:01; CLEC3A; ENSG00000166509; TAA
ALKEIQAL

SEQ ID NO: 15868 - protein, 8 aa, Homo sapiens
  misc_feature: Table A; Target 15868; HLA-B*15:01; CLEC3A; ENSG00000166509; TAA
ALKEIQAL

SEQ ID NO: 15869 - protein, 8 aa, Homo sapiens
  misc_feature: Table A; Target 15869; HLA-B*37:01; CLEC3A; ENSG00000166509; TAA
ALKEIQAL

SEQ ID NO: 15870 - protein, 10 aa, Homo sapiens
  misc_feature: Table A; Target 15870; HLA-A*02:03; CLEC3A; ENSG00000166509; TAA
ALKEIQALQT

SEQ ID NO: 15871 - protein, 11 aa, Homo sapiens
  misc_feature: Table A; Target 15871; HLA-A*02:01; CLEC3A; ENSG00000166509; TAA
ALKEIQALQTV

SEQ ID NO: 15872 - protein, 11 aa, Homo sapiens
  misc_feature: Table A; Target 15872; HLA-A*02:03; CLEC3A; ENSG00000166509; TAA
ALKEIQALQTV

SEQ ID NO: 15873 - protein, 11 aa, Homo sapiens
  misc_feature: Table A; Target 15873; HLA-A*02:04; CLEC3A; ENSG00000166509; TAA
ALKEIQALQTV

SEQ ID NO: 15874 - protein, 11 aa, Homo sapiens
  misc_feature: Table A; Target 15874; HLA-A*02:07; CLEC3A; ENSG00000166509; TAA
ALKEIQALQTV

SEQ ID NO: 15875 - protein, 11 aa, Homo sapiens
  misc_feature: Table A; Target 15875; HLA-B*13:02; CLEC3A; ENSG00000166509; TAA
ALKEIQALQTV

SEQ ID NO: 15876 - protein, 11 aa, Homo sapiens
  misc_feature: Table A; Target 15876; HLA-B*55:01; CLEC3A; ENSG00000166509; TAA
ALKEIQALQTV

SEQ ID NO: 15877 - protein, 8 aa, Homo sapiens
  misc_feature: Table A; Target 15877; HLA-C*16:02; CLEC3A; ENSG00000166509; TAA
ASEGLKHF

SEQ ID NO: 15878 - protein, 11 aa, Homo sapiens
  misc_feature: Table A; Target 15878; HLA-A*03:01; CLEC3A; ENSG00000166509; TAA
CVLFSQSAQGK

SEQ ID NO: 15879 - protein, 11 aa, Homo sapiens
  misc_feature: Table A; Target 15879; HLA-A*03:02; CLEC3A; ENSG00000166509; TAA
CVLFSQSAQGK

SEQ ID NO: 15880 - protein, 11 aa, Homo sapiens
  misc_feature: Table A; Target 15880; HLA-A*11:01; CLEC3A; ENSG00000166509; TAA
CVLFSQSAQGK

SEQ ID NO: 15881 - protein, 8 aa, Homo sapiens
  misc_feature: Table A; Target 15881; HLA-C*14:02; CLEC3A; ENSG00000166509; TAA
CYLASEGL

SEQ ID NO: 15882 - protein, 11 aa, Homo sapiens
  misc_feature: Table A; Target 15882; HLA-A*24:02; CLEC3A; ENSG00000166509; TAA
CYLASEGLKHF

SEQ ID NO: 15883 - protein, 9 aa, Homo sapiens
  misc_feature: Table A; Target 15883; HLA-A*25:01; CLEC3A; ENSG00000166509; TAA
DEINALQDY

SEQ ID NO: 15884 - protein, 9 aa, Homo sapiens
  misc_feature: Table A; Target 15884; HLA-A*26:01; CLEC3A; ENSG00000166509; TAA
DEINALQDY

SEQ ID NO: 15885 - protein, 9 aa, Homo sapiens
  misc_feature: Table A; Target 15885; HLA-A*30:01; CLEC3A; ENSG00000166509; TAA
DEINALQDY

SEQ ID NO: 15886 - protein, 9 aa, Homo sapiens
  misc_feature: Table A; Target 15886; HLA-B*15:03; CLEC3A; ENSG00000166509; TAA
DEINALQDY

SEQ ID NO: 15887 - protein, 9 aa, Homo sapiens
  misc_feature: Table A; Target 15887; HLA-B*18:01; CLEC3A; ENSG00000166509; TAA
DEINALQDY

SEQ ID NO: 15888 - protein, 9 aa, Homo sapiens
  misc_feature: Table A; Target 15888; HLA-B*27:02; CLEC3A; ENSG00000166509; TAA
DEINALQDY

SEQ ID NO: 15889 - protein, 9 aa, Homo sapiens
  misc_feature: Table A; Target 15889; HLA-B*27:05; CLEC3A; ENSG00000166509; TAA
DEINALQDY

SEQ ID NO: 15890 - protein, 9 aa, Homo sapiens
  misc_feature: Table A; Target 15890; HLA-B*35:01; CLEC3A; ENSG00000166509; TAA
DEINALQDY

SEQ ID NO: 15891 - protein, 9 aa, Homo sapiens
  misc_feature: Table A; Target 15891; HLA-B*39:01; CLEC3A; ENSG00000166509; TAA
DEINALQDY

SEQ ID NO: 15892 - protein, 9 aa, Homo sapiens
  misc_feature: Table A; Target 15892; HLA-B*40:01; CLEC3A; ENSG00000166509; TAA
DEINALQDY

SEQ ID NO: 15893 - protein, 9 aa, Homo sapiens
  misc_feature: Table A; Target 15893; HLA-B*44:02; CLEC3A; ENSG00000166509; TAA
DEINALQDY

SEQ ID NO: 15894 - protein, 9 aa, Homo sapiens
  misc_feature: Table A; Target 15894; HLA-B*44:03; CLEC3A; ENSG00000166509; TAA
DEINALQDY

SEQ ID NO: 15895 - protein, 9 aa, Homo sapiens
  misc_feature: Table A; Target 15895; HLA-C*04:01; CLEC3A; ENSG00000166509; TAA
DEINALQDY

SEQ ID NO: 15896 - protein, 9 aa, Homo sapiens
  misc_feature: Table A; Target 15896; HLA-C*07:01; CLEC3A; ENSG00000166509; TAA
DEINALQDY

SEQ ID NO: 15897 - protein, 9 aa, Homo sapiens
  misc_feature: Table A; Target 15897; HLA-C*12:03; CLEC3A; ENSG00000166509; TAA
DEINALQDY

SEQ ID NO: 15898 - protein, 9 aa, Homo sapiens
  misc_feature: Table A; Target 15898; HLA-C*16:04; CLEC3A; ENSG00000166509; TAA
DEINALQDY

SEQ ID NO: 15899 - protein, 11 aa, Homo sapiens
  misc_feature: Table A; Target 15899; HLA-B*27:02; CLEC3A; ENSG00000166509; TAA
DEINALQDYGK

SEQ ID NO: 15900 - protein, 11 aa, Homo sapiens
  misc_feature: Table A; Target 15900; HLA-B*27:05; CLEC3A; ENSG00000166509; TAA
DEINALQDYGK

SEQ ID NO: 15901 - protein, 11 aa, Homo sapiens
  misc_feature: Table A; Target 15901; HLA-C*04:01; CLEC3A; ENSG00000166509; TAA
DEINALQDYGK

SEQ ID NO: 15902 - protein, 8 aa, Homo sapiens
  misc_feature: Table A; Target 15902; HLA-B*08:01; CLEC3A; ENSG00000166509; TAA
DGDLKTQI

SEQ ID NO: 15903 - protein, 8 aa, Homo sapiens
  misc_feature: Table A; Target 15903; HLA-B*51:01; CLEC3A; ENSG00000166509; TAA
DGDLKTQI

SEQ ID NO: 15904 - protein, 8 aa, Homo sapiens
  misc_feature: Table A; Target 15904; HLA-A*33:01; CLEC3A; ENSG00000166509; TAA
DLKTQIEK

SEQ ID NO: 15905 - protein, 8 aa, Homo sapiens
  misc_feature: Table A; Target 15905; HLA-B*08:01; CLEC3A; ENSG00000166509; TAA
DLKTQIEK

SEQ ID NO: 15906 - protein, 9 aa, Homo sapiens
  misc_feature: Table A; Target 15906; HLA-A*02:03; CLEC3A; ENSG00000166509; TAA
DLKTQIEKL

SEQ ID NO: 15907 - protein, 9 aa, Homo sapiens
  misc_feature: Table A; Target 15907; HLA-A*25:01; CLEC3A; ENSG00000166509; TAA
DLKTQIEKL

SEQ ID NO: 15908 - protein, 9 aa, Homo sapiens
  misc_feature: Table A; Target 15908; HLA-A*26:01; CLEC3A; ENSG00000166509; TAA
DLKTQIEKL

SEQ ID NO: 15909 - protein, 9 aa, Homo sapiens
  misc_feature: Table A; Target 15909; HLA-A*33:01; CLEC3A; ENSG00000166509; TAA
DLKTQIEKL

SEQ ID NO: 15910 - protein, 9 aa, Homo sapiens
  misc_feature: Table A; Target 15910; HLA-B*08:01; CLEC3A; ENSG00000166509; TAA
DLKTQIEKL

SEQ ID NO: 15911 - protein, 9 aa, Homo sapiens
  misc_feature: Table A; Target 15911; HLA-A*33:01; CLEC3A; ENSG00000166509; TAA
DQTTSHTSR

SEQ ID NO: 15912 - protein, 9 aa, Homo sapiens
  misc_feature: Table A; Target 15912; HLA-A*33:03; CLEC3A; ENSG00000166509; TAA
DQTTSHTSR

SEQ ID NO: 15913 - protein, 9 aa, Homo sapiens
  misc_feature: Table A; Target 15913; HLA-A*68:01; CLEC3A; ENSG00000166509; TAA
DQTTSHTSR

SEQ ID NO: 15914 - protein, 9 aa, Homo sapiens
  misc_feature: Table A; Target 15914; HLA-B*39:01; CLEC3A; ENSG00000166509; TAA
DQTTSHTSR

SEQ ID NO: 15915 - protein, 9 aa, Homo sapiens
  misc_feature: Table A; Target 15915; HLA-C*07:06; CLEC3A; ENSG00000166509; TAA
DQTTSHTSR

SEQ ID NO: 15916 - protein, 10 aa, Homo sapiens
  misc_feature: Table A; Target 15916; HLA-B*38:01; CLEC3A; ENSG00000166509; TAA
DQTTSHTSRL

SEQ ID NO: 15917 - protein, 9 aa, Homo sapiens
  misc_feature: Table A; Target 15917; HLA-B*27:05; CLEC3A; ENSG00000166509; TAA
DRAQPNGGK

SEQ ID NO: 15918 - protein, 9 aa, Homo sapiens
  misc_feature: Table A; Target 15918; HLA-A*03:02; CLEC3A; ENSG00000166509; TAA
DVNGIAISF

SEQ ID NO: 15919 - protein, 9 aa, Homo sapiens
  misc_feature: Table A; Target 15919; HLA-A*23:01; CLEC3A; ENSG00000166509; TAA
DVNGIAISF

SEQ ID NO: 15920 - protein, 9 aa, Homo sapiens
  misc_feature: Table A; Target 15920; HLA-A*25:01; CLEC3A; ENSG00000166509; TAA
DVNGIAISF

SEQ ID NO: 15921 - protein, 9 aa, Homo sapiens
  misc_feature: Table A; Target 15921; HLA-A*26:01; CLEC3A; ENSG00000166509; TAA
DVNGIAISF

SEQ ID NO: 15922 - protein, 9 aa, Homo sapiens
  misc_feature: Table A; Target 15922; HLA-A*29:02; CLEC3A; ENSG00000166509; TAA
DVNGIAISF

SEQ ID NO: 15923 - protein, 9 aa, Homo sapiens
  misc_feature: Table A; Target 15923; HLA-A*31:01; CLEC3A; ENSG00000166509; TAA
DVNGIAISF

SEQ ID NO: 15924 - protein, 9 aa, Homo sapiens
  misc_feature: Table A; Target 15924; HLA-A*32:01; CLEC3A; ENSG00000166509; TAA
DVNGIAISF

SEQ ID NO: 15925 - protein, 9 aa, Homo sapiens
  misc_feature: Table A; Target 15925; HLA-A*33:01; CLEC3A; ENSG00000166509; TAA
DVNGIAISF

SEQ ID NO: 15926 - protein, 9 aa, Homo sapiens
  misc_feature: Table A; Target 15926; HLA-A*33:03; CLEC3A; ENSG00000166509; TAA
DVNGIAISF

SEQ ID NO: 15927 - protein, 9 aa, Homo sapiens
  misc_feature: Table A; Target 15927; HLA-A*68:01; CLEC3A; ENSG00000166509; TAA
DVNGIAISF

SEQ ID NO: 15928 - protein, 9 aa, Homo sapiens
  misc_feature: Table A; Target 15928; HLA-A*68:02; CLEC3A; ENSG00000166509; TAA
DVNGIAISF

SEQ ID NO: 15929 - protein, 9 aa, Homo sapiens
  misc_feature: Table A; Target 15929; HLA-B*15:01; CLEC3A; ENSG00000166509; TAA
DVNGIAISF

SEQ ID NO: 15930 - protein, 9 aa, Homo sapiens
  misc_feature: Table A; Target 15930; HLA-B*15:03; CLEC3A; ENSG00000166509; TAA
DVNGIAISF

SEQ ID NO: 15931 - protein, 9 aa, Homo sapiens
  misc_feature: Table A; Target 15931; HLA-B*18:01; CLEC3A; ENSG00000166509; TAA
DVNGIAISF

SEQ ID NO: 15932 - protein, 9 aa, Homo sapiens
  misc_feature: Table A; Target 15932; HLA-B*27:02; CLEC3A; ENSG00000166509; TAA
DVNGIAISF

SEQ ID NO: 15933 - protein, 9 aa, Homo sapiens
  misc_feature: Table A; Target 15933; HLA-B*35:01; CLEC3A; ENSG00000166509; TAA
DVNGIAISF

SEQ ID NO: 15934 - protein, 9 aa, Homo sapiens
  misc_feature: Table A; Target 15934; HLA-B*35:03; CLEC3A; ENSG00000166509; TAA
DVNGIAISF

SEQ ID NO: 15935 - protein, 9 aa, Homo sapiens
  misc_feature: Table A; Target 15935; HLA-B*38:01; CLEC3A; ENSG00000166509; TAA
DVNGIAISF

SEQ ID NO: 15936 - protein, 9 aa, Homo sapiens
  misc_feature: Table A; Target 15936; HLA-B*39:01; CLEC3A; ENSG00000166509; TAA
DVNGIAISF

SEQ ID NO: 15937 - protein, 9 aa, Homo sapiens
  misc_feature: Table A; Target 15937; HLA-B*44:02; CLEC3A; ENSG00000166509; TAA
DVNGIAISF

SEQ ID NO: 15938 - protein, 9 aa, Homo sapiens
  misc_feature: Table A; Target 15938; HLA-B*44:03; CLEC3A; ENSG00000166509; TAA
DVNGIAISF

SEQ ID NO: 15939 - protein, 9 aa, Homo sapiens
  misc_feature: Table A; Target 15939; HLA-C*02:02; CLEC3A; ENSG00000166509; TAA
DVNGIAISF

SEQ ID NO: 15940 - protein, 9 aa, Homo sapiens
  misc_feature: Table A; Target 15940; HLA-C*07:04; CLEC3A; ENSG00000166509; TAA
DVNGIAISF

SEQ ID NO: 15941 - protein, 9 aa, Homo sapiens
  misc_feature: Table A; Target 15941; HLA-C*07:06; CLEC3A; ENSG00000166509; TAA
DVNGIAISF

SEQ ID NO: 15942 - protein, 9 aa, Homo sapiens
  misc_feature: Table A; Target 15942; HLA-C*16:04; CLEC3A; ENSG00000166509; TAA
DVNGIAISF

SEQ ID NO: 15943 - protein, 10 aa, Homo sapiens
  misc_feature: Table A; Target 15943; HLA-A*25:01; CLEC3A; ENSG00000166509; TAA
DVNGIAISFL

SEQ ID NO: 15944 - protein, 10 aa, Homo sapiens
  misc_feature: Table A; Target 15944; HLA-A*26:01; CLEC3A; ENSG00000166509; TAA
DVNGIAISFL

SEQ ID NO: 15945 - protein, 10 aa, Homo sapiens
  misc_feature: Table A; Target 15945; HLA-A*33:01; CLEC3A; ENSG00000166509; TAA
DVNGIAISFL

SEQ ID NO: 15946 - protein, 10 aa, Homo sapiens
  misc_feature: Table A; Target 15946; HLA-A*68:01; CLEC3A; ENSG00000166509; TAA
DVNGIAISFL

SEQ ID NO: 15947 - protein, 10 aa, Homo sapiens
  misc_feature: Table A; Target 15947; HLA-A*68:02; CLEC3A; ENSG00000166509; TAA
DVNGIAISFL

SEQ ID NO: 15948 - protein, 9 aa, Homo sapiens
  misc_feature: Table A; Target 15948; HLA-A*33:01; CLEC3A; ENSG00000166509; TAA
EANEDCISK

SEQ ID NO: 15949 - protein, 9 aa, Homo sapiens
  misc_feature: Table A; Target 15949; HLA-A*33:03; CLEC3A; ENSG00000166509; TAA
EANEDCISK

SEQ ID NO: 15950 - protein, 9 aa, Homo sapiens
  misc_feature: Table A; Target 15950; HLA-A*68:01; CLEC3A; ENSG00000166509; TAA
EANEDCISK

SEQ ID NO: 15951 - protein, 9 aa, Homo sapiens
  misc_feature: Table A; Target 15951; HLA-C*07:06; CLEC3A; ENSG00000166509; TAA
EANEDCISK

SEQ ID NO: 15952 - protein, 9 aa, Homo sapiens
  misc_feature: Table A; Target 15952; HLA-A*33:01; CLEC3A; ENSG00000166509; TAA
EGLKHFHEA

SEQ ID NO: 15953 - protein, 9 aa, Homo sapiens
  misc_feature: Table A; Target 15953; HLA-B*54:01; CLEC3A; ENSG00000166509; TAA
EGLKHFHEA

SEQ ID NO: 15954 - protein, 10 aa, Homo sapiens
  misc_feature: Table A; Target 15954; HLA-A*03:02; CLEC3A; ENSG00000166509; TAA
EINALQDYGK

SEQ ID NO: 15955 - protein, 10 aa, Homo sapiens
  misc_feature: Table A; Target 15955; HLA-A*33:03; CLEC3A; ENSG00000166509; TAA
EINALQDYGK

SEQ ID NO: 15956 - protein, 10 aa, Homo sapiens
  misc_feature: Table A; Target 15956; HLA-A*68:01; CLEC3A; ENSG00000166509; TAA
EINALQDYGK

SEQ ID NO: 15957 - protein, 10 aa, Homo sapiens
  misc_feature: Table A; Target 15957; HLA-A*68:02; CLEC3A; ENSG00000166509; TAA
EINALQDYGK

SEQ ID NO: 15958 - protein, 10 aa, Homo sapiens
  misc_feature: Table A; Target 15958; HLA-B*27:02; CLEC3A; ENSG00000166509; TAA
EINALQDYGK

SEQ ID NO: 15959 - protein, 11 aa, Homo sapiens
  misc_feature: Table A; Target 15959; HLA-A*33:01; CLEC3A; ENSG00000166509; TAA
EINALQDYGKR

SEQ ID NO: 15960 - protein, 11 aa, Homo sapiens
  misc_feature: Table A; Target 15960; HLA-A*33:03; CLEC3A; ENSG00000166509; TAA
EINALQDYGKR

SEQ ID NO: 15961 - protein, 11 aa, Homo sapiens
  misc_feature: Table A; Target 15961; HLA-A*68:01; CLEC3A; ENSG00000166509; TAA
EINALQDYGKR

SEQ ID NO: 15962 - protein, 9 aa, Homo sapiens
  misc_feature: Table A; Target 15962; HLA-C*12:03; CLEC3A; ENSG00000166509; TAA
EIQALQTVC

SEQ ID NO: 15963 - protein, 11 aa, Homo sapiens
  misc_feature: Table A; Target 15963; HLA-A*33:01; CLEC3A; ENSG00000166509; TAA
EIQALQTVCLR

SEQ ID NO: 15964 - protein, 11 aa, Homo sapiens
  misc_feature: Table A; Target 15964; HLA-A*33:03; CLEC3A; ENSG00000166509; TAA
EIQALQTVCLR

SEQ ID NO: 15965 - protein, 11 aa, Homo sapiens
  misc_feature: Table A; Target 15965; HLA-A*68:01; CLEC3A; ENSG00000166509; TAA
EIQALQTVCLR

SEQ ID NO: 15966 - protein, 11 aa, Homo sapiens
  misc_feature: Table A; Target 15966; HLA-A*25:01; CLEC3A; ENSG00000166509; TAA
EVNALKEIQAL

SEQ ID NO: 15967 - protein, 11 aa, Homo sapiens
  misc_feature: Table A; Target 15967; HLA-A*26:01; CLEC3A; ENSG00000166509; TAA
EVNALKEIQAL

SEQ ID NO: 15968 - protein, 11 aa, Homo sapiens
  misc_feature: Table A; Target 15968; HLA-A*68:01; CLEC3A; ENSG00000166509; TAA
EVNALKEIQAL

SEQ ID NO: 15969 - protein, 11 aa, Homo sapiens
  misc_feature: Table A; Target 15969; HLA-A*68:02; CLEC3A; ENSG00000166509; TAA
EVNALKEIQAL

SEQ ID NO: 15970 - protein, 9 aa, Homo sapiens
  misc_feature: Table A; Target 15970; HLA-B*27:05; CLEC3A; ENSG00000166509; TAA
FHEANEDCI

SEQ ID NO: 15971 - protein, 9 aa, Homo sapiens
  misc_feature: Table A; Target 15971; HLA-B*38:01; CLEC3A; ENSG00000166509; TAA
FHEANEDCI

SEQ ID NO: 15972 - protein, 9 aa, Homo sapiens
  misc_feature: Table A; Target 15972; HLA-B*39:01; CLEC3A; ENSG00000166509; TAA
FHEANEDCI

SEQ ID NO: 15973 - protein, 9 aa, Homo sapiens
  misc_feature: Table A; Target 15973; HLA-A*25:01; CLEC3A; ENSG00000166509; TAA
FSQSAQGKW

SEQ ID NO: 15974 - protein, 9 aa, Homo sapiens
  misc_feature: Table A; Target 15974; HLA-A*32:01; CLEC3A; ENSG00000166509; TAA
FSQSAQGKW

SEQ ID NO: 15975 - protein, 9 aa, Homo sapiens
  misc_feature: Table A; Target 15975; HLA-B*44:02; CLEC3A; ENSG00000166509; TAA
FSQSAQGKW

SEQ ID NO: 15976 - protein, 9 aa, Homo sapiens
  misc_feature: Table A; Target 15976; HLA-B*57:01; CLEC3A; ENSG00000166509; TAA
FSQSAQGKW

SEQ ID NO: 15977 - protein, 9 aa, Homo sapiens
  misc_feature: Table A; Target 15977; HLA-B*58:01; CLEC3A; ENSG00000166509; TAA
FSQSAQGKW

SEQ ID NO: 15978 - protein, 9 aa, Homo sapiens
  misc_feature: Table A; Target 15978; HLA-C*06:02; CLEC3A; ENSG00000166509; TAA
FSQSAQGKW

SEQ ID NO: 15979 - protein, 9 aa, Homo sapiens
  misc_feature: Table A; Target 15979; HLA-C*12:03; CLEC3A; ENSG00000166509; TAA
FSQSAQGKW

SEQ ID NO: 15980 - protein, 9 aa, Homo sapiens
  misc_feature: Table A; Target 15980; HLA-C*16:02; CLEC3A; ENSG00000166509; TAA
FSQSAQGKW

SEQ ID NO: 15981 - protein, 9 aa, Homo sapiens
  misc_feature: Table A; Target 15981; HLA-A*01:01; CLEC3A; ENSG00000166509; TAA
FVDVNGIAI

SEQ ID NO: 15982 - protein, 9 aa, Homo sapiens
  misc_feature: Table A; Target 15982; HLA-A*02:01; CLEC3A; ENSG00000166509; TAA
FVDVNGIAI

SEQ ID NO: 15983 - protein, 9 aa, Homo sapiens
  misc_feature: Table A; Target 15983; HLA-A*02:07; CLEC3A; ENSG00000166509; TAA
FVDVNGIAI

SEQ ID NO: 15984 - protein, 9 aa, Homo sapiens
  misc_feature: Table A; Target 15984; HLA-A*25:01; CLEC3A; ENSG00000166509; TAA
FVDVNGIAI

SEQ ID NO: 15985 - protein, 9 aa, Homo sapiens
  misc_feature: Table A; Target 15985; HLA-A*30:01; CLEC3A; ENSG00000166509; TAA
FVDVNGIAI

SEQ ID NO: 15986 - protein, 9 aa, Homo sapiens
  misc_feature: Table A; Target 15986; HLA-A*68:02; CLEC3A; ENSG00000166509; TAA
FVDVNGIAI

SEQ ID NO: 15987 - protein, 9 aa, Homo sapiens
  misc_feature: Table A; Target 15987; HLA-B*13:02; CLEC3A; ENSG00000166509; TAA
FVDVNGIAI

SEQ ID NO: 15988 - protein, 9 aa, Homo sapiens
  misc_feature: Table A; Target 15988; HLA-B*27:05; CLEC3A; ENSG00000166509; TAA
FVDVNGIAI

SEQ ID NO: 15989 - protein, 9 aa, Homo sapiens
  misc_feature: Table A; Target 15989; HLA-B*35:01; CLEC3A; ENSG00000166509; TAA
FVDVNGIAI

SEQ ID NO: 15990 - protein, 9 aa, Homo sapiens
  misc_feature: Table A; Target 15990; HLA-B*35:03; CLEC3A; ENSG00000166509; TAA
FVDVNGIAI

SEQ ID NO: 15991 - protein, 9 aa, Homo sapiens
  misc_feature: Table A; Target 15991; HLA-B*38:01; CLEC3A; ENSG00000166509; TAA
FVDVNGIAI

SEQ ID NO: 15992 - protein, 9 aa, Homo sapiens
  misc_feature: Table A; Target 15992; HLA-B*39:01; CLEC3A; ENSG00000166509; TAA
FVDVNGIAI

SEQ ID NO: 15993 - protein, 9 aa, Homo sapiens
  misc_feature: Table A; Target 15993; HLA-B*40:01; CLEC3A; ENSG00000166509; TAA
FVDVNGIAI

SEQ ID NO: 15994 - protein, 9 aa, Homo sapiens
  misc_feature: Table A; Target 15994; HLA-B*40:02; CLEC3A; ENSG00000166509; TAA
FVDVNGIAI

SEQ ID NO: 15995 - protein, 9 aa, Homo sapiens
  misc_feature: Table A; Target 15995; HLA-B*46:01; CLEC3A; ENSG00000166509; TAA
FVDVNGIAI

SEQ ID NO: 15996 - protein, 9 aa, Homo sapiens
  misc_feature: Table A; Target 15996; HLA-B*49:01; CLEC3A; ENSG00000166509; TAA
FVDVNGIAI

SEQ ID NO: 15997 - protein, 9 aa, Homo sapiens
  misc_feature: Table A; Target 15997; HLA-B*51:01; CLEC3A; ENSG00000166509; TAA
FVDVNGIAI

SEQ ID NO: 15998 - protein, 9 aa, Homo sapiens
  misc_feature: Table A; Target 15998; HLA-B*55:01; CLEC3A; ENSG00000166509; TAA
FVDVNGIAI

SEQ ID NO: 15999 - protein, 9 aa, Homo sapiens
  misc_feature: Table A; Target 15999; HLA-B*58:01; CLEC3A; ENSG00000166509; TAA
FVDVNGIAI

SEQ ID NO: 16000 - protein, 9 aa, Homo sapiens
  misc_feature: Table A; Target 16000; HLA-C*01:02; CLEC3A; ENSG00000166509; TAA
FVDVNGIAI

SEQ ID NO: 16001 - protein, 9 aa, Homo sapiens
  misc_feature: Table A; Target 16001; HLA-C*02:02; CLEC3A; ENSG00000166509; TAA
FVDVNGIAI

SEQ ID NO: 16002 - protein, 9 aa, Homo sapiens
  misc_feature: Table A; Target 16002; HLA-C*03:03; CLEC3A; ENSG00000166509; TAA
FVDVNGIAI

SEQ ID NO: 16003 - protein, 9 aa, Homo sapiens
  misc_feature: Table A; Target 16003; HLA-C*03:04; CLEC3A; ENSG00000166509; TAA
FVDVNGIAI

SEQ ID NO: 16004 - protein, 9 aa, Homo sapiens
  misc_feature: Table A; Target 16004; HLA-C*04:01; CLEC3A; ENSG00000166509; TAA
FVDVNGIAI

SEQ ID NO: 16005 - protein, 9 aa, Homo sapiens
  misc_feature: Table A; Target 16005; HLA-C*05:01; CLEC3A; ENSG00000166509; TAA
FVDVNGIAI

SEQ ID NO: 16006 - protein, 9 aa, Homo sapiens
  misc_feature: Table A; Target 16006; HLA-C*07:02; CLEC3A; ENSG00000166509; TAA
FVDVNGIAI

SEQ ID NO: 16007 - protein, 9 aa, Homo sapiens
  misc_feature: Table A; Target 16007; HLA-C*07:04; CLEC3A; ENSG00000166509; TAA
FVDVNGIAI

SEQ ID NO: 16008 - protein, 11 aa, Homo sapiens
  misc_feature: Table A; Target 16008; HLA-A*01:01; CLEC3A; ENSG00000166509; TAA
FVDVNGIAISF

SEQ ID NO: 16009 - protein, 11 aa, Homo sapiens
  misc_feature: Table A; Target 16009; HLA-A*02:07; CLEC3A; ENSG00000166509; TAA
FVDVNGIAISF

SEQ ID NO: 16010 - protein, 11 aa, Homo sapiens
  misc_feature: Table A; Target 16010; HLA-B*35:01; CLEC3A; ENSG00000166509; TAA
FVDVNGIAISF

SEQ ID NO: 16011 - protein, 11 aa, Homo sapiens
  misc_feature: Table A; Target 16011; HLA-B*38:01; CLEC3A; ENSG00000166509; TAA
FVDVNGIAISF

SEQ ID NO: 16012 - protein, 11 aa, Homo sapiens
  misc_feature: Table A; Target 16012; HLA-C*02:02; CLEC3A; ENSG00000166509; TAA
FVDVNGIAISF

SEQ ID NO: 16013 - protein, 11 aa, Homo sapiens
  misc_feature: Table A; Target 16013; HLA-C*05:01; CLEC3A; ENSG00000166509; TAA
FVDVNGIAISF

SEQ ID NO: 16014 - protein, 9 aa, Homo sapiens
  misc_feature: Table A; Target 16014; HLA-A*03:02; CLEC3A; ENSG00000166509; TAA
GDLKTQIEK

SEQ ID NO: 16015 - protein, 9 aa, Homo sapiens
  misc_feature: Table A; Target 16015; HLA-A*11:01; CLEC3A; ENSG00000166509; TAA
GDLKTQIEK

SEQ ID NO: 16016 - protein, 10 aa, Homo sapiens
  misc_feature: Table A; Target 16016; HLA-A*30:01; CLEC3A; ENSG00000166509; TAA
GDLKTQIEKL

SEQ ID NO: 16017 - protein, 10 aa, Homo sapiens
  misc_feature: Table A; Target 16017; HLA-B*40:01; CLEC3A; ENSG00000166509; TAA
GDLKTQIEKL

SEQ ID NO: 16018 - protein, 10 aa, Homo sapiens
  misc_feature: Table A; Target 16018; HLA-B*40:02; CLEC3A; ENSG00000166509; TAA
GDLKTQIEKL

SEQ ID NO: 16019 - protein, 11 aa, Homo sapiens
  misc_feature: Table A; Target 16019; HLA-B*44:02; CLEC3A; ENSG00000166509; TAA
GDLKTQIEKLW

SEQ ID NO: 16020 - protein, 9 aa, Homo sapiens
  misc_feature: Table A; Target 16020; HLA-A*25:01; CLEC3A; ENSG00000166509; TAA
GIAISFLNW

SEQ ID NO: 16021 - protein, 9 aa, Homo sapiens
  misc_feature: Table A; Target 16021; HLA-B*44:03; CLEC3A; ENSG00000166509; TAA
GIAISFLNW

SEQ ID NO: 16022 - protein, 9 aa, Homo sapiens
  misc_feature: Table A; Target 16022; HLA-B*57:01; CLEC3A; ENSG00000166509; TAA
GIAISFLNW

SEQ ID NO: 16023 - protein, 10 aa, Homo sapiens
  misc_feature: Table A; Target 16023; HLA-A*03:01; CLEC3A; ENSG00000166509; TAA
GINDMVTEGK

SEQ ID NO: 16024 - protein, 10 aa, Homo sapiens
  misc_feature: Table A; Target 16024; HLA-A*03:02; CLEC3A; ENSG00000166509; TAA
GINDMVTEGK

SEQ ID NO: 16025 - protein, 10 aa, Homo sapiens
  misc_feature: Table A; Target 16025; HLA-A*11:01; CLEC3A; ENSG00000166509; TAA
GINDMVTEGK

SEQ ID NO: 16026 - protein, 10 aa, Homo sapiens
  misc_feature: Table A; Target 16026; HLA-B*27:02; CLEC3A; ENSG00000166509; TAA
GINDMVTEGK

SEQ ID NO: 16027 - protein, 9 aa, Homo sapiens
  misc_feature: Table A; Target 16027; HLA-B*13:02; CLEC3A; ENSG00000166509; TAA
GKFVDVNGI

SEQ ID NO: 16028 - protein, 9 aa, Homo sapiens
  misc_feature: Table A; Target 16028; HLA-B*15:03; CLEC3A; ENSG00000166509; TAA
GKFVDVNGI

SEQ ID NO: 16029 - protein, 9 aa, Homo sapiens
  misc_feature: Table A; Target 16029; HLA-B*38:01; CLEC3A; ENSG00000166509; TAA
GKFVDVNGI

SEQ ID NO: 16030 - protein, 9 aa, Homo sapiens
  misc_feature: Table A; Target 16030; HLA-B*15:03; CLEC3A; ENSG00000166509; TAA
GKRENCVLF

SEQ ID NO: 16031 - protein, 9 aa, Homo sapiens
  misc_feature: Table A; Target 16031; HLA-B*13:02; CLEC3A; ENSG00000166509; TAA
GLVICILVI

SEQ ID NO: 16032 - protein, 8 aa, Homo sapiens
  misc_feature: Table A; Target 16032; HLA-B*49:01; CLEC3A; ENSG00000166509; TAA
HEANEDCI

SEQ ID NO: 16033 - protein, 10 aa, Homo sapiens
  misc_feature: Table A; Target 16033; HLA-B*27:02; CLEC3A; ENSG00000166509; TAA
HEANEDCISK

SEQ ID NO: 16034 - protein, 8 aa, Homo sapiens
  misc_feature: Table A; Target 16034; HLA-B*57:01; CLEC3A; ENSG00000166509; TAA
IAISFLNW

SEQ ID NO: 16035 - protein, 8 aa, Homo sapiens
  misc_feature: Table A; Target 16035; HLA-B*40:02; CLEC3A; ENSG00000166509; TAA
IEKLWTEV

SEQ ID NO: 16036 - protein, 8 aa, Homo sapiens
  misc_feature: Table A; Target 16036; HLA-B*49:01; CLEC3A; ENSG00000166509; TAA
IEKLWTEV

SEQ ID NO: 16037 - protein, 11 aa, Homo sapiens
  misc_feature: Table A; Target 16037; HLA-A*30:01; CLEC3A; ENSG00000166509; TAA
IEKLWTEVNAL

SEQ ID NO: 16038 - protein, 11 aa, Homo sapiens
  misc_feature: Table A; Target 16038; HLA-B*40:02; CLEC3A; ENSG00000166509; TAA
IEKLWTEVNAL

SEQ ID NO: 16039 - protein, 8 aa, Homo sapiens
  misc_feature: Table A; Target 16039; HLA-A*23:01; CLEC3A; ENSG00000166509; TAA
ILVITLLL

SEQ ID NO: 16040 - protein, 9 aa, Homo sapiens
  misc_feature: Table A; Target 16040; HLA-B*27:02; CLEC3A; ENSG00000166509; TAA
INALQDYGK

SEQ ID NO: 16041 - protein, 8 aa, Homo sapiens
  misc_feature: Table A; Target 16041; HLA-B*07:02; CLEC3A; ENSG00000166509; TAA
IPRNSDEI

SEQ ID NO: 16042 - protein, 8 aa, Homo sapiens
  misc_feature: Table A; Target 16042; HLA-B*51:01; CLEC3A; ENSG00000166509; TAA
IPRNSDEI

SEQ ID NO: 16043 - protein, 8 aa, Homo sapiens
  misc_feature: Table A; Target 16043; HLA-B*56:01; CLEC3A; ENSG00000166509; TAA
IPRNSDEI

SEQ ID NO: 16044 - protein, 10 aa, Homo sapiens
  misc_feature: Table A; Target 16044; HLA-B*56:01; CLEC3A; ENSG00000166509; TAA
IPRNSDEINA

SEQ ID NO: 16045 - protein, 11 aa, Homo sapiens
  misc_feature: Table A; Target 16045; HLA-B*07:02; CLEC3A; ENSG00000166509; TAA
IPRNSDEINAL

SEQ ID NO: 16046 - protein, 11 aa, Homo sapiens
  misc_feature: Table A; Target 16046; HLA-B*35:01; CLEC3A; ENSG00000166509; TAA
IPRNSDEINAL

SEQ ID NO: 16047 - protein, 11 aa, Homo sapiens
  misc_feature: Table A; Target 16047; HLA-B*35:03; CLEC3A; ENSG00000166509; TAA
IPRNSDEINAL

SEQ ID NO: 16048 - protein, 11 aa, Homo sapiens
  misc_feature: Table A; Target 16048; HLA-B*51:01; CLEC3A; ENSG00000166509; TAA
IPRNSDEINAL

SEQ ID NO: 16049 - protein, 11 aa, Homo sapiens
  misc_feature: Table A; Target 16049; HLA-B*54:01; CLEC3A; ENSG00000166509; TAA
IPRNSDEINAL

SEQ ID NO: 16050 - protein, 11 aa, Homo sapiens
  misc_feature: Table A; Target 16050; HLA-B*55:01; CLEC3A; ENSG00000166509; TAA
IPRNSDEINAL

SEQ ID NO: 16051 - protein, 11 aa, Homo sapiens
  misc_feature: Table A; Target 16051; HLA-B*56:01; CLEC3A; ENSG00000166509; TAA
IPRNSDEINAL

SEQ ID NO: 16052 - protein, 11 aa, Homo sapiens
  misc_feature: Table A; Target 16052; HLA-C*07:02; CLEC3A; ENSG00000166509; TAA
IPRNSDEINAL

SEQ ID NO: 16053 - protein, 9 aa, Homo sapiens
  misc_feature: Table A; Target 16053; HLA-A*30:01; CLEC3A; ENSG00000166509; TAA
IQALQTVCL

SEQ ID NO: 16054 - protein, 9 aa, Homo sapiens
  misc_feature: Table A; Target 16054; HLA-B*13:02; CLEC3A; ENSG00000166509; TAA
IQALQTVCL

SEQ ID NO: 16055 - protein, 9 aa, Homo sapiens
  misc_feature: Table A; Target 16055; HLA-B*15:01; CLEC3A; ENSG00000166509; TAA
IQALQTVCL

SEQ ID NO: 16056 - protein, 9 aa, Homo sapiens
  misc_feature: Table A; Target 16056; HLA-B*15:03; CLEC3A; ENSG00000166509; TAA
IQALQTVCL

SEQ ID NO: 16057 - protein, 9 aa, Homo sapiens
  misc_feature: Table A; Target 16057; HLA-B*27:05; CLEC3A; ENSG00000166509; TAA
IQALQTVCL

SEQ ID NO: 16058 - protein, 9 aa, Homo sapiens
  misc_feature: Table A; Target 16058; HLA-B*38:01; CLEC3A; ENSG00000166509; TAA
IQALQTVCL

SEQ ID NO: 16059 - protein, 9 aa, Homo sapiens
  misc_feature: Table A; Target 16059; HLA-B*39:01; CLEC3A; ENSG00000166509; TAA
IQALQTVCL

SEQ ID NO: 16060 - protein, 9 aa, Homo sapiens
  misc_feature: Table A; Target 16060; HLA-B*40:01; CLEC3A; ENSG00000166509; TAA
IQALQTVCL

SEQ ID NO: 16061 - protein, 9 aa, Homo sapiens
  misc_feature: Table A; Target 16061; HLA-C*06:02; CLEC3A; ENSG00000166509; TAA
IQALQTVCL

SEQ ID NO: 16062 - protein, 9 aa, Homo sapiens
  misc_feature: Table A; Target 16062; HLA-C*07:04; CLEC3A; ENSG00000166509; TAA
IQALQTVCL

SEQ ID NO: 16063 - protein, 9 aa, Homo sapiens
  misc_feature: Table A; Target 16063; HLA-A*02:03; CLEC3A; ENSG00000166509; TAA
ISKGGILVI

SEQ ID NO: 16064 - protein, 9 aa, Homo sapiens
  misc_feature: Table A; Target 16064; HLA-A*23:01; CLEC3A; ENSG00000166509; TAA
ISKGGILVI

SEQ ID NO: 16065 - protein, 9 aa, Homo sapiens
  misc_feature: Table A; Target 16065; HLA-A*30:01; CLEC3A; ENSG00000166509; TAA
ISKGGILVI

SEQ ID NO: 16066 - protein, 9 aa, Homo sapiens
  misc_feature: Table A; Target 16066; HLA-A*32:01; CLEC3A; ENSG00000166509; TAA
ISKGGILVI

SEQ ID NO: 16067 - protein, 9 aa, Homo sapiens
  misc_feature: Table A; Target 16067; HLA-B*13:02; CLEC3A; ENSG00000166509; TAA
ISKGGILVI

SEQ ID NO: 16068 - protein, 9 aa, Homo sapiens
  misc_feature: Table A; Target 16068; HLA-B*40:02; CLEC3A; ENSG00000166509; TAA
ISKGGILVI

SEQ ID NO: 16069 - protein, 9 aa, Homo sapiens
  misc_feature: Table A; Target 16069; HLA-B*46:01; CLEC3A; ENSG00000166509; TAA
ISKGGILVI

SEQ ID NO: 16070 - protein, 9 aa, Homo sapiens
  misc_feature: Table A; Target 16070; HLA-B*51:01; CLEC3A; ENSG00000166509; TAA
ISKGGILVI

SEQ ID NO: 16071 - protein, 9 aa, Homo sapiens
  misc_feature: Table A; Target 16071; HLA-B*57:01; CLEC3A; ENSG00000166509; TAA
ISKGGILVI

SEQ ID NO: 16072 - protein, 9 aa, Homo sapiens
  misc_feature: Table A; Target 16072; HLA-C*02:02; CLEC3A; ENSG00000166509; TAA
ISKGGILVI

SEQ ID NO: 16073 - protein, 9 aa, Homo sapiens
  misc_feature: Table A; Target 16073; HLA-C*06:02; CLEC3A; ENSG00000166509; TAA
ISKGGILVI

SEQ ID NO: 16074 - protein, 9 aa, Homo sapiens
  misc_feature: Table A; Target 16074; HLA-C*12:03; CLEC3A; ENSG00000166509; TAA
ISKGGILVI

SEQ ID NO: 16075 - protein, 9 aa, Homo sapiens
  misc_feature: Table A; Target 16075; HLA-C*16:02; CLEC3A; ENSG00000166509; TAA
ISKGGILVI

SEQ ID NO: 16076 - protein, 11 aa, Homo sapiens
  misc_feature: Table A; Target 16076; HLA-A*31:01; CLEC3A; ENSG00000166509; TAA
ISKGGILVIPR

SEQ ID NO: 16077 - protein, 9 aa, Homo sapiens
  misc_feature: Table A; Target 16077; HLA-B*40:02; CLEC3A; ENSG00000166509; TAA
KCYLASEGL

SEQ ID NO: 16078 - protein, 9 aa, Homo sapiens
  misc_feature: Table A; Target 16078; HLA-C*06:02; CLEC3A; ENSG00000166509; TAA
KCYLASEGL

SEQ ID NO: 16079 - protein, 10 aa, Homo sapiens
  misc_feature: Table A; Target 16079; HLA-A*03:01; CLEC3A; ENSG00000166509; TAA
KCYLASEGLK

SEQ ID NO: 16080 - protein, 9 aa, Homo sapiens
  misc_feature: Table A; Target 16080; HLA-B*40:02; CLEC3A; ENSG00000166509; TAA
KDGDLKTQI

SEQ ID NO: 16081 - protein, 11 aa, Homo sapiens
  misc_feature: Table A; Target 16081; HLA-A*03:02; CLEC3A; ENSG00000166509; TAA
KDGDLKTQIEK

SEQ ID NO: 16082 - protein, 9 aa, Homo sapiens
  misc_feature: Table A; Target 16082; HLA-A*02:01; CLEC3A; ENSG00000166509; TAA
KEIQALQTV

SEQ ID NO: 16083 - protein, 9 aa, Homo sapiens
  misc_feature: Table A; Target 16083; HLA-A*02:03; CLEC3A; ENSG00000166509; TAA
KEIQALQTV

SEQ ID NO: 16084 - protein, 9 aa, Homo sapiens
  misc_feature: Table A; Target 16084; HLA-A*02:07; CLEC3A; ENSG00000166509; TAA
KEIQALQTV

SEQ ID NO: 16085 - protein, 9 aa, Homo sapiens
  misc_feature: Table A; Target 16085; HLA-A*30:01; CLEC3A; ENSG00000166509; TAA
KEIQALQTV

SEQ ID NO: 16086 - protein, 9 aa, Homo sapiens
  misc_feature: Table A; Target 16086; HLA-B*13:02; CLEC3A; ENSG00000166509; TAA
KEIQALQTV

SEQ ID NO: 16087 - protein, 9 aa, Homo sapiens
  misc_feature: Table A; Target 16087; HLA-B*18:01; CLEC3A; ENSG00000166509; TAA
KEIQALQTV

SEQ ID NO: 16088 - protein, 9 aa, Homo sapiens
  misc_feature: Table A; Target 16088; HLA-B*37:01; CLEC3A; ENSG00000166509; TAA
KEIQALQTV

SEQ ID NO: 16089 - protein, 9 aa, Homo sapiens
  misc_feature: Table A; Target 16089; HLA-B*40:01; CLEC3A; ENSG00000166509; TAA
KEIQALQTV

SEQ ID NO: 16090 - protein, 9 aa, Homo sapiens
  misc_feature: Table A; Target 16090; HLA-B*40:02; CLEC3A; ENSG00000166509; TAA
KEIQALQTV

SEQ ID NO: 16091 - protein, 9 aa, Homo sapiens
  misc_feature: Table A; Target 16091; HLA-B*44:02; CLEC3A; ENSG00000166509; TAA
KEIQALQTV

SEQ ID NO: 16092 - protein, 9 aa, Homo sapiens
  misc_feature: Table A; Target 16092; HLA-B*44:03; CLEC3A; ENSG00000166509; TAA
KEIQALQTV

SEQ ID NO: 16093 - protein, 9 aa, Homo sapiens
  misc_feature: Table A; Target 16093; HLA-B*49:01; CLEC3A; ENSG00000166509; TAA
KEIQALQTV

SEQ ID NO: 16094 - protein, 9 aa, Homo sapiens
  misc_feature: Table A; Target 16094; HLA-B*55:01; CLEC3A; ENSG00000166509; TAA
KEIQALQTV

SEQ ID NO: 16095 - protein, 9 aa, Homo sapiens
  misc_feature: Table A; Target 16095; HLA-C*02:02; CLEC3A; ENSG00000166509; TAA
KEIQALQTV

SEQ ID NO: 16096 - protein, 9 aa, Homo sapiens
  misc_feature: Table A; Target 16096; HLA-C*06:02; CLEC3A; ENSG00000166509; TAA
KEIQALQTV

SEQ ID NO: 16097 - protein, 9 aa, Homo sapiens
  misc_feature: Table A; Target 16097; HLA-C*16:04; CLEC3A; ENSG00000166509; TAA
KEIQALQTV

SEQ ID NO: 16098 - protein, 10 aa, Homo sapiens
  misc_feature: Table A; Target 16098; HLA-A*30:01; CLEC3A; ENSG00000166509; TAA
KEIQALQTVC

SEQ ID NO: 16099 - protein, 10 aa, Homo sapiens
  misc_feature: Table A; Target 16099; HLA-B*40:01; CLEC3A; ENSG00000166509; TAA
KEIQALQTVC

SEQ ID NO: 16100 - protein, 10 aa, Homo sapiens
  misc_feature: Table A; Target 16100; HLA-B*40:02; CLEC3A; ENSG00000166509; TAA
KEIQALQTVC

SEQ ID NO: 16101 - protein, 10 aa, Homo sapiens
  misc_feature: Table A; Target 16101; HLA-B*49:01; CLEC3A; ENSG00000166509; TAA
KEIQALQTVC

SEQ ID NO: 16102 - protein, 11 aa, Homo sapiens
  misc_feature: Table A; Target 16102; HLA-A*30:01; CLEC3A; ENSG00000166509; TAA
KEIQALQTVCL

SEQ ID NO: 16103 - protein, 11 aa, Homo sapiens
  misc_feature: Table A; Target 16103; HLA-B*40:01; CLEC3A; ENSG00000166509; TAA
KEIQALQTVCL

SEQ ID NO: 16104 - protein, 11 aa, Homo sapiens
  misc_feature: Table A; Target 16104; HLA-B*40:02; CLEC3A; ENSG00000166509; TAA
KEIQALQTVCL

SEQ ID NO: 16105 - protein, 11 aa, Homo sapiens
  misc_feature: Table A; Target 16105; HLA-B*44:02; CLEC3A; ENSG00000166509; TAA
KEIQALQTVCL

SEQ ID NO: 16106 - protein, 11 aa, Homo sapiens
  misc_feature: Table A; Target 16106; HLA-B*44:03; CLEC3A; ENSG00000166509; TAA
KEIQALQTVCL

SEQ ID NO: 16107 - protein, 11 aa, Homo sapiens
  misc_feature: Table A; Target 16107; HLA-B*49:01; CLEC3A; ENSG00000166509; TAA
KEIQALQTVCL

SEQ ID NO: 16108 - protein, 8 aa, Homo sapiens
  misc_feature: Table A; Target 16108; HLA-A*23:01; CLEC3A; ENSG00000166509; TAA
KFVDVNGI

SEQ ID NO: 16109 - protein, 10 aa, Homo sapiens
  misc_feature: Table A; Target 16109; HLA-A*23:01; CLEC3A; ENSG00000166509; TAA
KFVDVNGIAI

SEQ ID NO: 16110 - protein, 10 aa, Homo sapiens
  misc_feature: Table A; Target 16110; HLA-A*24:02; CLEC3A; ENSG00000166509; TAA
KFVDVNGIAI

SEQ ID NO: 16111 - protein, 10 aa, Homo sapiens
  misc_feature: Table A; Target 16111; HLA-B*40:02; CLEC3A; ENSG00000166509; TAA
KFVDVNGIAI

SEQ ID NO: 16112 - protein, 10 aa, Homo sapiens
  misc_feature: Table A; Target 16112; HLA-C*04:01; CLEC3A; ENSG00000166509; TAA
KFVDVNGIAI

SEQ ID NO: 16113 - protein, 10 aa, Homo sapiens
  misc_feature: Table A; Target 16113; HLA-C*06:02; CLEC3A; ENSG00000166509; TAA
KFVDVNGIAI

SEQ ID NO: 16114 - protein, 10 aa, Homo sapiens
  misc_feature: Table A; Target 16114; HLA-C*07:01; CLEC3A; ENSG00000166509; TAA
KFVDVNGIAI

SEQ ID NO: 16115 - protein, 10 aa, Homo sapiens
  misc_feature: Table A; Target 16115; HLA-C*14:02; CLEC3A; ENSG00000166509; TAA
KFVDVNGIAI

SEQ ID NO: 16116 - protein, 9 aa, Homo sapiens
  misc_feature: Table A; Target 16116; HLA-A*31:01; CLEC3A; ENSG00000166509; TAA
KGGILVIPR

SEQ ID NO: 16117 - protein, 9 aa, Homo sapiens
  misc_feature: Table A; Target 16117; HLA-A*02:01; CLEC3A; ENSG00000166509; TAA
KLWTEVNAL

SEQ ID NO: 16118 - protein, 9 aa, Homo sapiens
  misc_feature: Table A; Target 16118; HLA-A*02:03; CLEC3A; ENSG00000166509; TAA
KLWTEVNAL

SEQ ID NO: 16119 - protein, 9 aa, Homo sapiens
  misc_feature: Table A; Target 16119; HLA-A*02:04; CLEC3A; ENSG00000166509; TAA
KLWTEVNAL

SEQ ID NO: 16120 - protein, 9 aa, Homo sapiens
  misc_feature: Table A; Target 16120; HLA-A*02:07; CLEC3A; ENSG00000166509; TAA
KLWTEVNAL

SEQ ID NO: 16121 - protein, 9 aa, Homo sapiens
  misc_feature: Table A; Target 16121; HLA-A*03:01; CLEC3A; ENSG00000166509; TAA
KLWTEVNAL

SEQ ID NO: 16122 - protein, 9 aa, Homo sapiens
  misc_feature: Table A; Target 16122; HLA-A*30:01; CLEC3A; ENSG00000166509; TAA
KLWTEVNAL

SEQ ID NO: 16123 - protein, 9 aa, Homo sapiens
  misc_feature: Table A; Target 16123; HLA-A*31:01; CLEC3A; ENSG00000166509; TAA
KLWTEVNAL

SEQ ID NO: 16124 - protein, 9 aa, Homo sapiens
  misc_feature: Table A; Target 16124; HLA-B*15:03; CLEC3A; ENSG00000166509; TAA
KLWTEVNAL

SEQ ID NO: 16125 - protein, 9 aa, Homo sapiens
  misc_feature: Table A; Target 16125; HLA-B*37:01; CLEC3A; ENSG00000166509; TAA
KLWTEVNAL

SEQ ID NO: 16126 - protein, 9 aa, Homo sapiens
  misc_feature: Table A; Target 16126; HLA-B*40:01; CLEC3A; ENSG00000166509; TAA
KLWTEVNAL

SEQ ID NO: 16127 - protein, 9 aa, Homo sapiens
  misc_feature: Table A; Target 16127; HLA-B*40:02; CLEC3A; ENSG00000166509; TAA
KLWTEVNAL

SEQ ID NO: 16128 - protein, 9 aa, Homo sapiens
  misc_feature: Table A; Target 16128; HLA-B*55:01; CLEC3A; ENSG00000166509; TAA
KLWTEVNAL

SEQ ID NO: 16129 - protein, 9 aa, Homo sapiens
  misc_feature: Table A; Target 16129; HLA-C*01:02; CLEC3A; ENSG00000166509; TAA
KLWTEVNAL

SEQ ID NO: 16130 - protein, 9 aa, Homo sapiens
  misc_feature: Table A; Target 16130; HLA-C*06:02; CLEC3A; ENSG00000166509; TAA
KLWTEVNAL

SEQ ID NO: 16131 - protein, 10 aa, Homo sapiens
  misc_feature: Table A; Target 16131; HLA-A*03:01; CLEC3A; ENSG00000166509; TAA
KLWTEVNALK

SEQ ID NO: 16132 - protein, 10 aa, Homo sapiens
  misc_feature: Table A; Target 16132; HLA-A*03:02; CLEC3A; ENSG00000166509; TAA
KLWTEVNALK

SEQ ID NO: 16133 - protein, 8 aa, Homo sapiens
  misc_feature: Table A; Target 16133; HLA-B*57:01; CLEC3A; ENSG00000166509; TAA
KTQIEKLW

SEQ ID NO: 16134 - protein, 9 aa, Homo sapiens
  misc_feature: Table A; Target 16134; HLA-B*57:01; CLEC3A; ENSG00000166509; TAA
LASEGLKHF

SEQ ID NO: 16135 - protein, 9 aa, Homo sapiens
  misc_feature: Table A; Target 16135; HLA-C*02:02; CLEC3A; ENSG00000166509; TAA
LASEGLKHF

SEQ ID NO: 16136 - protein, 9 aa, Homo sapiens
  misc_feature: Table A; Target 16136; HLA-C*07:01; CLEC3A; ENSG00000166509; TAA
LASEGLKHF

SEQ ID NO: 16137 - protein, 9 aa, Homo sapiens
  misc_feature: Table A; Target 16137; HLA-C*12:03; CLEC3A; ENSG00000166509; TAA
LASEGLKHF

SEQ ID NO: 16138 - protein, 9 aa, Homo sapiens
  misc_feature: Table A; Target 16138; HLA-C*16:01; CLEC3A; ENSG00000166509; TAA
LASEGLKHF

SEQ ID NO: 16139 - protein, 9 aa, Homo sapiens
  misc_feature: Table A; Target 16139; HLA-C*16:02; CLEC3A; ENSG00000166509; TAA
LASEGLKHF

SEQ ID NO: 16140 - protein, 10 aa, Homo sapiens
  misc_feature: Table A; Target 16140; HLA-A*31:01; CLEC3A; ENSG00000166509; TAA
LDQTTSHTSR

SEQ ID NO: 16141 - protein, 10 aa, Homo sapiens
  misc_feature: Table A; Target 16141; HLA-A*33:01; CLEC3A; ENSG00000166509; TAA
LDQTTSHTSR

SEQ ID NO: 16142 - protein, 10 aa, Homo sapiens
  misc_feature: Table A; Target 16142; HLA-A*68:01; CLEC3A; ENSG00000166509; TAA
LDQTTSHTSR

SEQ ID NO: 16143 - protein, 10 aa, Homo sapiens
  misc_feature: Table A; Target 16143; HLA-B*27:02; CLEC3A; ENSG00000166509; TAA
LDQTTSHTSR

SEQ ID NO: 16144 - protein, 10 aa, Homo sapiens
  misc_feature: Table A; Target 16144; HLA-C*07:01; CLEC3A; ENSG00000166509; TAA
LDQTTSHTSR

SEQ ID NO: 16145 - protein, 10 aa, Homo sapiens
  misc_feature: Table A; Target 16145; HLA-C*07:02; CLEC3A; ENSG00000166509; TAA
LDQTTSHTSR

SEQ ID NO: 16146 - protein, 10 aa, Homo sapiens
  misc_feature: Table A; Target 16146; HLA-C*07:06; CLEC3A; ENSG00000166509; TAA
LDQTTSHTSR

SEQ ID NO: 16147 - protein, 10 aa, Homo sapiens
  misc_feature: Table A; Target 16147; HLA-C*16:02; CLEC3A; ENSG00000166509; TAA
LDQTTSHTSR

SEQ ID NO: 16148 - protein, 9 aa, Homo sapiens
  misc_feature: Table A; Target 16148; HLA-B*27:05; CLEC3A; ENSG00000166509; TAA
LGINDMVTE

SEQ ID NO: 16149 - protein, 8 aa, Homo sapiens
  misc_feature: Table A; Target 16149; HLA-C*05:01; CLEC3A; ENSG00000166509; TAA
LLDQTTSH

SEQ ID NO: 16150 - protein, 9 aa, Homo sapiens
  misc_feature: Table A; Target 16150; HLA-A*01:01; CLEC3A; ENSG00000166509; TAA
LLDQTTSHT

SEQ ID NO: 16151 - protein, 9 aa, Homo sapiens
  misc_feature: Table A; Target 16151; HLA-A*02:01; CLEC3A; ENSG00000166509; TAA
LLDQTTSHT

SEQ ID NO: 16152 - protein, 9 aa, Homo sapiens
  misc_feature: Table A; Target 16152; HLA-A*02:07; CLEC3A; ENSG00000166509; TAA
LLDQTTSHT

SEQ ID NO: 16153 - protein, 9 aa, Homo sapiens
  misc_feature: Table A; Target 16153; HLA-C*04:01; CLEC3A; ENSG00000166509; TAA
LLDQTTSHT

SEQ ID NO: 16154 - protein, 11 aa, Homo sapiens
  misc_feature: Table A; Target 16154; HLA-A*01:01; CLEC3A; ENSG00000166509; TAA
LLDQTTSHTSR

SEQ ID NO: 16155 - protein, 11 aa, Homo sapiens
  misc_feature: Table A; Target 16155; HLA-A*02:07; CLEC3A; ENSG00000166509; TAA
LLDQTTSHTSR

SEQ ID NO: 16156 - protein, 11 aa, Homo sapiens
  misc_feature: Table A; Target 16156; HLA-A*03:01; CLEC3A; ENSG00000166509; TAA
LLDQTTSHTSR

SEQ ID NO: 16157 - protein, 11 aa, Homo sapiens
  misc_feature: Table A; Target 16157; HLA-A*03:02; CLEC3A; ENSG00000166509; TAA
LLDQTTSHTSR

SEQ ID NO: 16158 - protein, 11 aa, Homo sapiens
  misc_feature: Table A; Target 16158; HLA-A*31:01; CLEC3A; ENSG00000166509; TAA
LLDQTTSHTSR

SEQ ID NO: 16159 - protein, 11 aa, Homo sapiens
  misc_feature: Table A; Target 16159; HLA-A*33:01; CLEC3A; ENSG00000166509; TAA
LLDQTTSHTSR

SEQ ID NO: 16160 - protein, 11 aa, Homo sapiens
  misc_feature: Table A; Target 16160; HLA-A*68:01; CLEC3A; ENSG00000166509; TAA
LLDQTTSHTSR

SEQ ID NO: 16161 - protein, 11 aa, Homo sapiens
  misc_feature: Table A; Target 16161; HLA-B*27:02; CLEC3A; ENSG00000166509; TAA
LLDQTTSHTSR

SEQ ID NO: 16162 - protein, 11 aa, Homo sapiens
  misc_feature: Table A; Target 16162; HLA-B*55:01; CLEC3A; ENSG00000166509; TAA
LLDQTTSHTSR

SEQ ID NO: 16163 - protein, 11 aa, Homo sapiens
  misc_feature: Table A; Target 16163; HLA-C*04:01; CLEC3A; ENSG00000166509; TAA
LLDQTTSHTSR

SEQ ID NO: 16164 - protein, 11 aa, Homo sapiens
  misc_feature: Table A; Target 16164; HLA-C*05:01; CLEC3A; ENSG00000166509; TAA
LLDQTTSHTSR

SEQ ID NO: 16165 - protein, 9 aa, Homo sapiens
  misc_feature: Table A; Target 16165; HLA-A*02:01; CLEC3A; ENSG00000166509; TAA
LLLDQTTSH

SEQ ID NO: 16166 - protein, 9 aa, Homo sapiens
  misc_feature: Table A; Target 16166; HLA-A*03:01; CLEC3A; ENSG00000166509; TAA
LLLDQTTSH

SEQ ID NO: 16167 - protein, 9 aa, Homo sapiens
  misc_feature: Table A; Target 16167; HLA-A*32:01; CLEC3A; ENSG00000166509; TAA
LLLDQTTSH

SEQ ID NO: 16168 - protein, 9 aa, Homo sapiens
  misc_feature: Table A; Target 16168; HLA-B*46:01; CLEC3A; ENSG00000166509; TAA
LLLDQTTSH

SEQ ID NO: 16169 - protein, 9 aa, Homo sapiens
  misc_feature: Table A; Target 16169; HLA-B*55:01; CLEC3A; ENSG00000166509; TAA
LLLDQTTSH

SEQ ID NO: 16170 - protein, 9 aa, Homo sapiens
  misc_feature: Table A; Target 16170; HLA-C*01:02; CLEC3A; ENSG00000166509; TAA
LLLDQTTSH

SEQ ID NO: 16171 - protein, 9 aa, Homo sapiens
  misc_feature: Table A; Target 16171; HLA-C*14:02; CLEC3A; ENSG00000166509; TAA
LLLDQTTSH

SEQ ID NO: 16172 - protein, 10 aa, Homo sapiens
  misc_feature: Table A; Target 16172; HLA-C*04:01; CLEC3A; ENSG00000166509; TAA
LLLDQTTSHT

SEQ ID NO: 16173 - protein, 10 aa, Homo sapiens
  misc_feature: Table A; Target 16173; HLA-C*06:02; CLEC3A; ENSG00000166509; TAA
LLLDQTTSHT

SEQ ID NO: 16174 - protein, 10 aa, Homo sapiens
  misc_feature: Table A; Target 16174; HLA-C*07:01; CLEC3A; ENSG00000166509; TAA
LLLDQTTSHT

SEQ ID NO: 16175 - protein, 11 aa, Homo sapiens
  misc_feature: Table A; Target 16175; HLA-B*27:05; CLEC3A; ENSG00000166509; TAA
LLLDQTTSHTS

SEQ ID NO: 16176 - protein, 9 aa, Homo sapiens
  misc_feature: Table A; Target 16176; HLA-B*38:01; CLEC3A; ENSG00000166509; TAA
LQDYGKRSL

SEQ ID NO: 16177 - protein, 9 aa, Homo sapiens
  misc_feature: Table A; Target 16177; HLA-C*03:04; CLEC3A; ENSG00000166509; TAA
LQDYGKRSL

SEQ ID NO: 16178 - protein, 8 aa, Homo sapiens
  misc_feature: Table A; Target 16178; HLA-C*14:02; CLEC3A; ENSG00000166509; TAA
LWTEVNAL

SEQ ID NO: 16179 - protein, 8 aa, Homo sapiens
  misc_feature: Table A; Target 16179; HLA-B*08:01; CLEC3A; ENSG00000166509; TAA
MAKNGLVI

SEQ ID NO: 16180 - protein, 8 aa, Homo sapiens
  misc_feature: Table A; Target 16180; HLA-B*46:01; CLEC3A; ENSG00000166509; TAA
MAKNGLVI

SEQ ID NO: 16181 - protein, 8 aa, Homo sapiens
  misc_feature: Table A; Target 16181; HLA-B*51:01; CLEC3A; ENSG00000166509; TAA
MAKNGLVI

SEQ ID NO: 16182 - protein, 8 aa, Homo sapiens
  misc_feature: Table A; Target 16182; HLA-C*03:03; CLEC3A; ENSG00000166509; TAA
MAKNGLVI

SEQ ID NO: 16183 - protein, 8 aa, Homo sapiens
  misc_feature: Table A; Target 16183; HLA-C*03:04; CLEC3A; ENSG00000166509; TAA
MAKNGLVI

SEQ ID NO: 16184 - protein, 8 aa, Homo sapiens
  misc_feature: Table A; Target 16184; HLA-C*16:02; CLEC3A; ENSG00000166509; TAA
MVTEGKFV

SEQ ID NO: 16185 - protein, 10 aa, Homo sapiens
  misc_feature: Table A; Target 16185; HLA-A*68:02; CLEC3A; ENSG00000166509; TAA
MVTEGKFVDV

SEQ ID NO: 16186 - protein, 9 aa, Homo sapiens
  misc_feature: Table A; Target 16186; HLA-A*02:04; CLEC3A; ENSG00000166509; TAA
NALKEIQAL

SEQ ID NO: 16187 - protein, 9 aa, Homo sapiens
  misc_feature: Table A; Target 16187; HLA-A*23:01; CLEC3A; ENSG00000166509; TAA
NALKEIQAL

SEQ ID NO: 16188 - protein, 9 aa, Homo sapiens
  misc_feature: Table A; Target 16188; HLA-A*25:01; CLEC3A; ENSG00000166509; TAA
NALKEIQAL

SEQ ID NO: 16189 - protein, 9 aa, Homo sapiens
  misc_feature: Table A; Target 16189; HLA-A*30:01; CLEC3A; ENSG00000166509; TAA
NALKEIQAL

SEQ ID NO: 16190 - protein, 9 aa, Homo sapiens
  misc_feature: Table A; Target 16190; HLA-A*33:01; CLEC3A; ENSG00000166509; TAA
NALKEIQAL

SEQ ID NO: 16191 - protein, 9 aa, Homo sapiens
  misc_feature: Table A; Target 16191; HLA-B*07:02; CLEC3A; ENSG00000166509; TAA
NALKEIQAL

SEQ ID NO: 16192 - protein, 9 aa, Homo sapiens
  misc_feature: Table A; Target 16192; HLA-B*08:01; CLEC3A; ENSG00000166509; TAA
NALKEIQAL

SEQ ID NO: 16193 - protein, 9 aa, Homo sapiens
  misc_feature: Table A; Target 16193; HLA-B*18:01; CLEC3A; ENSG00000166509; TAA
NALKEIQAL

SEQ ID NO: 16194 - protein, 9 aa, Homo sapiens
  misc_feature: Table A; Target 16194; HLA-B*27:05; CLEC3A; ENSG00000166509; TAA
NALKEIQAL

SEQ ID NO: 16195 - protein, 9 aa, Homo sapiens
  misc_feature: Table A; Target 16195; HLA-B*35:01; CLEC3A; ENSG00000166509; TAA
NALKEIQAL

SEQ ID NO: 16196 - protein, 9 aa, Homo sapiens
  misc_feature: Table A; Target 16196; HLA-B*35:03; CLEC3A; ENSG00000166509; TAA
NALKEIQAL

SEQ ID NO: 16197 - protein, 9 aa, Homo sapiens
  misc_feature: Table A; Target 16197; HLA-B*38:01; CLEC3A; ENSG00000166509; TAA
NALKEIQAL

SEQ ID NO: 16198 - protein, 9 aa, Homo sapiens
  misc_feature: Table A; Target 16198; HLA-B*39:01; CLEC3A; ENSG00000166509; TAA
NALKEIQAL

SEQ ID NO: 16199 - protein, 9 aa, Homo sapiens
  misc_feature: Table A; Target 16199; HLA-B*40:01; CLEC3A; ENSG00000166509; TAA
NALKEIQAL

SEQ ID NO: 16200 - protein, 9 aa, Homo sapiens
  misc_feature: Table A; Target 16200; HLA-B*40:02; CLEC3A; ENSG00000166509; TAA
NALKEIQAL

SEQ ID NO: 16201 - protein, 9 aa, Homo sapiens
  misc_feature: Table A; Target 16201; HLA-B*46:01; CLEC3A; ENSG00000166509; TAA
NALKEIQAL

SEQ ID NO: 16202 - protein, 9 aa, Homo sapiens
  misc_feature: Table A; Target 16202; HLA-B*51:01; CLEC3A; ENSG00000166509; TAA
NALKEIQAL

SEQ ID NO: 16203 - protein, 9 aa, Homo sapiens
  misc_feature: Table A; Target 16203; HLA-B*54:01; CLEC3A; ENSG00000166509; TAA
NALKEIQAL

SEQ ID NO: 16204 - protein, 9 aa, Homo sapiens
  misc_feature: Table A; Target 16204; HLA-B*55:01; CLEC3A; ENSG00000166509; TAA
NALKEIQAL

SEQ ID NO: 16205 - protein, 9 aa, Homo sapiens
  misc_feature: Table A; Target 16205; HLA-B*58:01; CLEC3A; ENSG00000166509; TAA
NALKEIQAL

SEQ ID NO: 16206 - protein, 9 aa, Homo sapiens
  misc_feature: Table A; Target 16206; HLA-C*01:02; CLEC3A; ENSG00000166509; TAA
NALKEIQAL

SEQ ID NO: 16207 - protein, 9 aa, Homo sapiens
  misc_feature: Table A; Target 16207; HLA-C*02:02; CLEC3A; ENSG00000166509; TAA
NALKEIQAL

SEQ ID NO: 16208 - protein, 9 aa, Homo sapiens
  misc_feature: Table A; Target 16208; HLA-C*03:03; CLEC3A; ENSG00000166509; TAA
NALKEIQAL

SEQ ID NO: 16209 - protein, 9 aa, Homo sapiens
  misc_feature: Table A; Target 16209; HLA-C*03:04; CLEC3A; ENSG00000166509; TAA
NALKEIQAL

SEQ ID NO: 16210 - protein, 9 aa, Homo sapiens
  misc_feature: Table A; Target 16210; HLA-C*05:01; CLEC3A; ENSG00000166509; TAA
NALKEIQAL

SEQ ID NO: 16211 - protein, 9 aa, Homo sapiens
  misc_feature: Table A; Target 16211; HLA-C*07:04; CLEC3A; ENSG00000166509; TAA
NALKEIQAL

SEQ ID NO: 16212 - protein, 9 aa, Homo sapiens
  misc_feature: Table A; Target 16212; HLA-C*07:06; CLEC3A; ENSG00000166509; TAA
NALKEIQAL

SEQ ID NO: 16213 - protein, 9 aa, Homo sapiens
  misc_feature: Table A; Target 16213; HLA-C*14:02; CLEC3A; ENSG00000166509; TAA
NALKEIQAL

SEQ ID NO: 16214 - protein, 9 aa, Homo sapiens
  misc_feature: Table A; Target 16214; HLA-C*16:01; CLEC3A; ENSG00000166509; TAA
NALKEIQAL

SEQ ID NO: 16215 - protein, 9 aa, Homo sapiens
  misc_feature: Table A; Target 16215; HLA-C*16:02; CLEC3A; ENSG00000166509; TAA
NALKEIQAL

SEQ ID NO: 16216 - protein, 8 aa, Homo sapiens
  misc_feature: Table A; Target 16216; HLA-B*27:02; CLEC3A; ENSG00000166509; TAA
NALQDYGK

SEQ ID NO: 16217 - protein, 9 aa, Homo sapiens
  misc_feature: Table A; Target 16217; HLA-A*33:01; CLEC3A; ENSG00000166509; TAA
NALQDYGKR

SEQ ID NO: 16218 - protein, 9 aa, Homo sapiens
  misc_feature: Table A; Target 16218; HLA-B*54:01; CLEC3A; ENSG00000166509; TAA
NCVLFSQSA

SEQ ID NO: 16219 - protein, 8 aa, Homo sapiens
  misc_feature: Table A; Target 16219; HLA-B*37:01; CLEC3A; ENSG00000166509; TAA
NDMVTEGK

SEQ ID NO: 16220 - protein, 9 aa, Homo sapiens
  misc_feature: Table A; Target 16220; HLA-B*18:01; CLEC3A; ENSG00000166509; TAA
NDMVTEGKF

SEQ ID NO: 16221 - protein, 9 aa, Homo sapiens
  misc_feature: Table A; Target 16221; HLA-B*37:01; CLEC3A; ENSG00000166509; TAA
NDMVTEGKF

SEQ ID NO: 16222 - protein, 9 aa, Homo sapiens
  misc_feature: Table A; Target 16222; HLA-B*44:02; CLEC3A; ENSG00000166509; TAA
NDMVTEGKF

SEQ ID NO: 16223 - protein, 9 aa, Homo sapiens
  misc_feature: Table A; Target 16223; HLA-B*44:03; CLEC3A; ENSG00000166509; TAA
NDMVTEGKF

SEQ ID NO: 16224 - protein, 8 aa, Homo sapiens
  misc_feature: Table A; Target 16224; HLA-C*03:04; CLEC3A; ENSG00000166509; TAA
NSDEINAL

SEQ ID NO: 16225 - protein, 8 aa, Homo sapiens
  misc_feature: Table A; Target 16225; HLA-C*04:01; CLEC3A; ENSG00000166509; TAA
NSDEINAL

SEQ ID NO: 16226 - protein, 8 aa, Homo sapiens
  misc_feature: Table A; Target 16226; HLA-C*05:01; CLEC3A; ENSG00000166509; TAA
NSDEINAL

SEQ ID NO: 16227 - protein, 9 aa, Homo sapiens
  misc_feature: Table A; Target 16227; HLA-A*01:01; CLEC3A; ENSG00000166509; TAA
NSDEINALQ

SEQ ID NO: 16228 - protein, 11 aa, Homo sapiens
  misc_feature: Table A; Target 16228; HLA-A*01:01; CLEC3A; ENSG00000166509; TAA
NSDEINALQDY

SEQ ID NO: 16229 - protein, 11 aa, Homo sapiens
  misc_feature: Table A; Target 16229; HLA-C*05:01; CLEC3A; ENSG00000166509; TAA
NSDEINALQDY

SEQ ID NO: 16230 - protein, 10 aa, Homo sapiens
  misc_feature: Table A; Target 16230; HLA-B*38:01; CLEC3A; ENSG00000166509; TAA
PRNSDEINAL

SEQ ID NO: 16231 - protein, 10 aa, Homo sapiens
  misc_feature: Table A; Target 16231; HLA-B*39:01; CLEC3A; ENSG00000166509; TAA
PRNSDEINAL

SEQ ID NO: 16232 - protein, 8 aa, Homo sapiens
  misc_feature: Table A; Target 16232; HLA-B*08:01; CLEC3A; ENSG00000166509; TAA
QALQTVCL

SEQ ID NO: 16233 - protein, 8 aa, Homo sapiens
  misc_feature: Table A; Target 16233; HLA-B*35:03; CLEC3A; ENSG00000166509; TAA
QALQTVCL

SEQ ID NO: 16234 - protein, 8 aa, Homo sapiens
  misc_feature: Table A; Target 16234; HLA-B*51:01; CLEC3A; ENSG00000166509; TAA
QALQTVCL

SEQ ID NO: 16235 - protein, 9 aa, Homo sapiens
  misc_feature: Table A; Target 16235; HLA-A*31:01; CLEC3A; ENSG00000166509; TAA
QALQTVCLR

SEQ ID NO: 16236 - protein, 9 aa, Homo sapiens
  misc_feature: Table A; Target 16236; HLA-A*33:01; CLEC3A; ENSG00000166509; TAA
QALQTVCLR

SEQ ID NO: 16237 - protein, 9 aa, Homo sapiens
  misc_feature: Table A; Target 16237; HLA-A*33:03; CLEC3A; ENSG00000166509; TAA
QALQTVCLR

SEQ ID NO: 16238 - protein, 9 aa, Homo sapiens
  misc_feature: Table A; Target 16238; HLA-A*68:01; CLEC3A; ENSG00000166509; TAA
QALQTVCLR

SEQ ID NO: 16239 - protein, 9 aa, Homo sapiens
  misc_feature: Table A; Target 16239; HLA-B*27:02; CLEC3A; ENSG00000166509; TAA
QALQTVCLR

SEQ ID NO: 16240 - protein, 9 aa, Homo sapiens
  misc_feature: Table A; Target 16240; HLA-C*07:01; CLEC3A; ENSG00000166509; TAA
QALQTVCLR

SEQ ID NO: 16241 - protein, 9 aa, Homo sapiens
  misc_feature: Table A; Target 16241; HLA-C*07:06; CLEC3A; ENSG00000166509; TAA
QALQTVCLR

SEQ ID NO: 16242 - protein, 8 aa, Homo sapiens
  misc_feature: Table A; Target 16242; HLA-B*08:01; CLEC3A; ENSG00000166509; TAA
QDYGKRSL

SEQ ID NO: 16243 - protein, 8 aa, Homo sapiens
  misc_feature: Table A; Target 16243; HLA-B*37:01; CLEC3A; ENSG00000166509; TAA
QDYGKRSL

SEQ ID NO: 16244 - protein, 9 aa, Homo sapiens
  misc_feature: Table A; Target 16244; HLA-C*06:02; CLEC3A; ENSG00000166509; TAA
QDYGKRSLP

SEQ ID NO: 16245 - protein, 10 aa, Homo sapiens
  misc_feature: Table A; Target 16245; HLA-B*07:02; CLEC3A; ENSG00000166509; TAA
QPNGGKRENC

SEQ ID NO: 16246 - protein, 8 aa, Homo sapiens
  misc_feature: Table A; Target 16246; HLA-A*31:01; CLEC3A; ENSG00000166509; TAA
QTTSHTSR

SEQ ID NO: 16247 - protein, 8 aa, Homo sapiens
  misc_feature: Table A; Target 16247; HLA-A*33:01; CLEC3A; ENSG00000166509; TAA
QTTSHTSR

SEQ ID NO: 16248 - protein, 8 aa, Homo sapiens
  misc_feature: Table A; Target 16248; HLA-A*33:03; CLEC3A; ENSG00000166509; TAA
QTTSHTSR

SEQ ID NO: 16249 - protein, 9 aa, Homo sapiens
  misc_feature: Table A; Target 16249; HLA-A*25:01; CLEC3A; ENSG00000166509; TAA
QTTSHTSRL

SEQ ID NO: 16250 - protein, 9 aa, Homo sapiens
  misc_feature: Table A; Target 16250; HLA-A*26:01; CLEC3A; ENSG00000166509; TAA
QTTSHTSRL

SEQ ID NO: 16251 - protein, 9 aa, Homo sapiens
  misc_feature: Table A; Target 16251; HLA-A*32:01; CLEC3A; ENSG00000166509; TAA
QTTSHTSRL

SEQ ID NO: 16252 - protein, 9 aa, Homo sapiens
  misc_feature: Table A; Target 16252; HLA-A*68:02; CLEC3A; ENSG00000166509; TAA
QTTSHTSRL

SEQ ID NO: 16253 - protein, 9 aa, Homo sapiens
  misc_feature: Table A; Target 16253; HLA-B*58:01; CLEC3A; ENSG00000166509; TAA
QTTSHTSRL

SEQ ID NO: 16254 - protein, 9 aa, Homo sapiens
  misc_feature: Table A; Target 16254; HLA-C*06:02; CLEC3A; ENSG00000166509; TAA
QTTSHTSRL

SEQ ID NO: 16255 - protein, 9 aa, Homo sapiens
  misc_feature: Table A; Target 16255; HLA-C*12:03; CLEC3A; ENSG00000166509; TAA
QTTSHTSRL

SEQ ID NO: 16256 - protein, 9 aa, Homo sapiens
  misc_feature: Table A; Target 16256; HLA-C*16:01; CLEC3A; ENSG00000166509; TAA
QTTSHTSRL

SEQ ID NO: 16257 - protein, 9 aa, Homo sapiens
  misc_feature: Table A; Target 16257; HLA-C*16:02; CLEC3A; ENSG00000166509; TAA
QTTSHTSRL

SEQ ID NO: 16258 - protein, 10 aa, Homo sapiens
  misc_feature: Table A; Target 16258; HLA-A*03:01; CLEC3A; ENSG00000166509; TAA
QTTSHTSRLK

SEQ ID NO: 16259 - protein, 10 aa, Homo sapiens
  misc_feature: Table A; Target 16259; HLA-A*03:02; CLEC3A; ENSG00000166509; TAA
QTTSHTSRLK

SEQ ID NO: 16260 - protein, 10 aa, Homo sapiens
  misc_feature: Table A; Target 16260; HLA-A*11:01; CLEC3A; ENSG00000166509; TAA
QTTSHTSRLK

SEQ ID NO: 16261 - protein, 10 aa, Homo sapiens
  misc_feature: Table A; Target 16261; HLA-C*06:02; CLEC3A; ENSG00000166509; TAA
QTTSHTSRLK

SEQ ID NO: 16262 - protein, 9 aa, Homo sapiens
  misc_feature: Table A; Target 16262; HLA-A*31:01; CLEC3A; ENSG00000166509; TAA
RAQPNGGKR

SEQ ID NO: 16263 - protein, 9 aa, Homo sapiens
  misc_feature: Table A; Target 16263; HLA-A*30:02; CLEC3A; ENSG00000166509; TAA
RSLPGVNDF

SEQ ID NO: 16264 - protein, 9 aa, Homo sapiens
  misc_feature: Table A; Target 16264; HLA-A*32:01; CLEC3A; ENSG00000166509; TAA
RSLPGVNDF

SEQ ID NO: 16265 - protein, 9 aa, Homo sapiens
  misc_feature: Table A; Target 16265; HLA-B*57:01; CLEC3A; ENSG00000166509; TAA
RSLPGVNDF

SEQ ID NO: 16266 - protein, 9 aa, Homo sapiens
  misc_feature: Table A; Target 16266; HLA-B*58:01; CLEC3A; ENSG00000166509; TAA
RSLPGVNDF

SEQ ID NO: 16267 - protein, 10 aa, Homo sapiens
  misc_feature: Table A; Target 16267; HLA-A*30:02; CLEC3A; ENSG00000166509; TAA
RSLPGVNDFW

SEQ ID NO: 16268 - protein, 10 aa, Homo sapiens
  misc_feature: Table A; Target 16268; HLA-B*57:01; CLEC3A; ENSG00000166509; TAA
RSLPGVNDFW

SEQ ID NO: 16269 - protein, 10 aa, Homo sapiens
  misc_feature: Table A; Target 16269; HLA-B*58:01; CLEC3A; ENSG00000166509; TAA
RSLPGVNDFW

SEQ ID NO: 16270 - protein, 9 aa, Homo sapiens
  misc_feature: Table A; Target 16270; HLA-B*07:02; CLEC3A; ENSG00000166509; TAA
RVRDKDGDL

SEQ ID NO: 16271 - protein, 10 aa, Homo sapiens
  misc_feature: Table A; Target 16271; HLA-A*03:01; CLEC3A; ENSG00000166509; TAA
RVRDKDGDLK

SEQ ID NO: 16272 - protein, 9 aa, Homo sapiens
  misc_feature: Table A; Target 16272; HLA-A*24:02; CLEC3A; ENSG00000166509; TAA
SLPGVNDFW

SEQ ID NO: 16273 - protein, 11 aa, Homo sapiens
  misc_feature: Table A; Target 16273; HLA-A*02:07; CLEC3A; ENSG00000166509; TAA
SLPGVNDFWLG

SEQ ID NO: 16274 - protein, 8 aa, Homo sapiens
  misc_feature: Table A; Target 16274; HLA-A*32:01; CLEC3A; ENSG00000166509; TAA
SQSAQGKW

SEQ ID NO: 16275 - protein, 8 aa, Homo sapiens
  misc_feature: Table A; Target 16275; HLA-B*58:01; CLEC3A; ENSG00000166509; TAA
SQSAQGKW

SEQ ID NO: 16276 - protein, 9 aa, Homo sapiens
  misc_feature: Table A; Target 16276; HLA-B*57:01; CLEC3A; ENSG00000166509; TAA
SSKRYICEF

SEQ ID NO: 16277 - protein, 8 aa, Homo sapiens
  misc_feature: Table A; Target 16277; HLA-A*30:01; CLEC3A; ENSG00000166509; TAA
TEGKFVDV

SEQ ID NO: 16278 - protein, 8 aa, Homo sapiens
  misc_feature: Table A; Target 16278; HLA-B*18:01; CLEC3A; ENSG00000166509; TAA
TEGKFVDV

SEQ ID NO: 16279 - protein, 8 aa, Homo sapiens
  misc_feature: Table A; Target 16279; HLA-B*37:01; CLEC3A; ENSG00000166509; TAA
TEGKFVDV

SEQ ID NO: 16280 - protein, 8 aa, Homo sapiens
  misc_feature: Table A; Target 16280; HLA-B*40:01; CLEC3A; ENSG00000166509; TAA
TEGKFVDV

SEQ ID NO: 16281 - protein, 8 aa, Homo sapiens
  misc_feature: Table A; Target 16281; HLA-B*40:02; CLEC3A; ENSG00000166509; TAA
TEGKFVDV

SEQ ID NO: 16282 - protein, 8 aa, Homo sapiens
  misc_feature: Table A; Target 16282; HLA-B*49:01; CLEC3A; ENSG00000166509; TAA
TEGKFVDV

SEQ ID NO: 16283 - protein, 11 aa, Homo sapiens
  misc_feature: Table A; Target 16283; HLA-B*49:01; CLEC3A; ENSG00000166509; TAA
TEGKFVDVNGI

SEQ ID NO: 16284 - protein, 9 aa, Homo sapiens
  misc_feature: Table A; Target 16284; HLA-A*30:01; CLEC3A; ENSG00000166509; TAA
TEVNALKEI

SEQ ID NO: 16285 - protein, 9 aa, Homo sapiens
  misc_feature: Table A; Target 16285; HLA-B*13:02; CLEC3A; ENSG00000166509; TAA
TEVNALKEI

SEQ ID NO: 16286 - protein, 9 aa, Homo sapiens
  misc_feature: Table A; Target 16286; HLA-B*18:01; CLEC3A; ENSG00000166509; TAA
TEVNALKEI

SEQ ID NO: 16287 - protein, 9 aa, Homo sapiens
  misc_feature: Table A; Target 16287; HLA-B*27:02; CLEC3A; ENSG00000166509; TAA
TEVNALKEI

SEQ ID NO: 16288 - protein, 9 aa, Homo sapiens
  misc_feature: Table A; Target 16288; HLA-B*38:01; CLEC3A; ENSG00000166509; TAA
TEVNALKEI

SEQ ID NO: 16289 - protein, 9 aa, Homo sapiens
  misc_feature: Table A; Target 16289; HLA-B*40:01; CLEC3A; ENSG00000166509; TAA
TEVNALKEI

SEQ ID NO: 16290 - protein, 9 aa, Homo sapiens
  misc_feature: Table A; Target 16290; HLA-B*40:02; CLEC3A; ENSG00000166509; TAA
TEVNALKEI

SEQ ID NO: 16291 - protein, 9 aa, Homo sapiens
  misc_feature: Table A; Target 16291; HLA-B*44:02; CLEC3A; ENSG00000166509; TAA
TEVNALKEI

SEQ ID NO: 16292 - protein, 9 aa, Homo sapiens
  misc_feature: Table A; Target 16292; HLA-B*44:03; CLEC3A; ENSG00000166509; TAA
TEVNALKEI

SEQ ID NO: 16293 - protein, 9 aa, Homo sapiens
  misc_feature: Table A; Target 16293; HLA-B*49:01; CLEC3A; ENSG00000166509; TAA
TEVNALKEI

SEQ ID NO: 16294 - protein, 9 aa, Homo sapiens
  misc_feature: Table A; Target 16294; HLA-C*02:02; CLEC3A; ENSG00000166509; TAA
TEVNALKEI

SEQ ID NO: 16295 - protein, 9 aa, Homo sapiens
  misc_feature: Table A; Target 16295; HLA-C*06:02; CLEC3A; ENSG00000166509; TAA
TEVNALKEI

SEQ ID NO: 16296 - protein, 9 aa, Homo sapiens
  misc_feature: Table A; Target 16296; HLA-C*12:03; CLEC3A; ENSG00000166509; TAA
TEVNALKEI

SEQ ID NO: 16297 - protein, 9 aa, Homo sapiens
  misc_feature: Table A; Target 16297; HLA-C*16:02; CLEC3A; ENSG00000166509; TAA
TEVNALKEI

SEQ ID NO: 16298 - protein, 9 aa, Homo sapiens
  misc_feature: Table A; Target 16298; HLA-C*16:04; CLEC3A; ENSG00000166509; TAA
TEVNALKEI

SEQ ID NO: 16299 - protein, 11 aa, Homo sapiens
  misc_feature: Table A; Target 16299; HLA-A*30:01; CLEC3A; ENSG00000166509; TAA
TEVNALKEIQA

SEQ ID NO: 16300 - protein, 11 aa, Homo sapiens
  misc_feature: Table A; Target 16300; HLA-B*40:02; CLEC3A; ENSG00000166509; TAA
TEVNALKEIQA

SEQ ID NO: 16301 - protein, 11 aa, Homo sapiens
  misc_feature: Table A; Target 16301; HLA-C*04:01; CLEC3A; ENSG00000166509; TAA
TLLLDQTTSHT

SEQ ID NO: 16302 - protein, 11 aa, Homo sapiens
  misc_feature: Table A; Target 16302; HLA-C*07:01; CLEC3A; ENSG00000166509; TAA
TLLLDQTTSHT

SEQ ID NO: 16303 - protein, 10 aa, Homo sapiens
  misc_feature: Table A; Target 16303; HLA-A*02:03; CLEC3A; ENSG00000166509; TAA
TQIEKLWTEV

SEQ ID NO: 16304 - protein, 8 aa, Homo sapiens
  misc_feature: Table A; Target 16304; HLA-A*11:01; CLEC3A; ENSG00000166509; TAA
TSHTSRLK

SEQ ID NO: 16305 - protein, 8 aa, Homo sapiens
  misc_feature: Table A; Target 16305; HLA-C*04:01; CLEC3A; ENSG00000166509; TAA
TSHTSRLK

SEQ ID NO: 16306 - protein, 8 aa, Homo sapiens
  misc_feature: Table A; Target 16306; HLA-C*06:02; CLEC3A; ENSG00000166509; TAA
TSHTSRLK

SEQ ID NO: 16307 - protein, 8 aa, Homo sapiens
  misc_feature: Table A; Target 16307; HLA-C*07:02; CLEC3A; ENSG00000166509; TAA
TSHTSRLK

SEQ ID NO: 16308 - protein, 8 aa, Homo sapiens
  misc_feature: Table A; Target 16308; HLA-C*16:01; CLEC3A; ENSG00000166509; TAA
TSHTSRLK

SEQ ID NO: 16309 - protein, 8 aa, Homo sapiens
  misc_feature: Table A; Target 16309; HLA-C*16:02; CLEC3A; ENSG00000166509; TAA
TTSHTSRL

SEQ ID NO: 16310 - protein, 9 aa, Homo sapiens
  misc_feature: Table A; Target 16310; HLA-A*03:01; CLEC3A; ENSG00000166509; TAA
TTSHTSRLK

SEQ ID NO: 16311 - protein, 9 aa, Homo sapiens
  misc_feature: Table A; Target 16311; HLA-A*03:02; CLEC3A; ENSG00000166509; TAA
TTSHTSRLK

SEQ ID NO: 16312 - protein, 9 aa, Homo sapiens
  misc_feature: Table A; Target 16312; HLA-A*11:01; CLEC3A; ENSG00000166509; TAA
TTSHTSRLK

SEQ ID NO: 16313 - protein, 9 aa, Homo sapiens
  misc_feature: Table A; Target 16313; HLA-A*68:01; CLEC3A; ENSG00000166509; TAA
TTSHTSRLK

SEQ ID NO: 16314 - protein, 9 aa, Homo sapiens
  misc_feature: Table A; Target 16314; HLA-C*06:02; CLEC3A; ENSG00000166509; TAA
TTSHTSRLK

SEQ ID NO: 16315 - protein, 9 aa, Homo sapiens
  misc_feature: Table A; Target 16315; HLA-C*16:01; CLEC3A; ENSG00000166509; TAA
TTSHTSRLK

SEQ ID NO: 16316 - protein, 9 aa, Homo sapiens
  misc_feature: Table A; Target 16316; HLA-C*16:02; CLEC3A; ENSG00000166509; TAA
TTSHTSRLK

SEQ ID NO: 16317 - protein, 8 aa, Homo sapiens
  misc_feature: Table A; Target 16317; HLA-A*30:01; CLEC3A; ENSG00000166509; TAA
VDVNGIAI

SEQ ID NO: 16318 - protein, 8 aa, Homo sapiens
  misc_feature: Table A; Target 16318; HLA-B*37:01; CLEC3A; ENSG00000166509; TAA
VDVNGIAI

SEQ ID NO: 16319 - protein, 8 aa, Homo sapiens
  misc_feature: Table A; Target 16319; HLA-B*40:02; CLEC3A; ENSG00000166509; TAA
VDVNGIAI

SEQ ID NO: 16320 - protein, 10 aa, Homo sapiens
  misc_feature: Table A; Target 16320; HLA-A*23:01; CLEC3A; ENSG00000166509; TAA
VDVNGIAISF

SEQ ID NO: 16321 - protein, 10 aa, Homo sapiens
  misc_feature: Table A; Target 16321; HLA-B*18:01; CLEC3A; ENSG00000166509; TAA
VDVNGIAISF

SEQ ID NO: 16322 - protein, 10 aa, Homo sapiens
  misc_feature: Table A; Target 16322; HLA-B*27:02; CLEC3A; ENSG00000166509; TAA
VDVNGIAISF

SEQ ID NO: 16323 - protein, 10 aa, Homo sapiens
  misc_feature: Table A; Target 16323; HLA-B*37:01; CLEC3A; ENSG00000166509; TAA
VDVNGIAISF

SEQ ID NO: 16324 - protein, 10 aa, Homo sapiens
  misc_feature: Table A; Target 16324; HLA-B*44:02; CLEC3A; ENSG00000166509; TAA
VDVNGIAISF

SEQ ID NO: 16325 - protein, 10 aa, Homo sapiens
  misc_feature: Table A; Target 16325; HLA-B*44:03; CLEC3A; ENSG00000166509; TAA
VDVNGIAISF

SEQ ID NO: 16326 - protein, 10 aa, Homo sapiens
  misc_feature: Table A; Target 16326; HLA-B*57:01; CLEC3A; ENSG00000166509; TAA
VDVNGIAISF

SEQ ID NO: 16327 - protein, 10 aa, Homo sapiens
  misc_feature: Table A; Target 16327; HLA-B*58:01; CLEC3A; ENSG00000166509; TAA
VDVNGIAISF

SEQ ID NO: 16328 - protein, 10 aa, Homo sapiens
  misc_feature: Table A; Target 16328; HLA-C*07:01; CLEC3A; ENSG00000166509; TAA
VDVNGIAISF

SEQ ID NO: 16329 - protein, 10 aa, Homo sapiens
  misc_feature: Table A; Target 16329; HLA-C*12:03; CLEC3A; ENSG00000166509; TAA
VDVNGIAISF

SEQ ID NO: 16330 - protein, 10 aa, Homo sapiens
  misc_feature: Table A; Target 16330; HLA-C*16:04; CLEC3A; ENSG00000166509; TAA
VDVNGIAISF

SEQ ID NO: 16331 - protein, 9 aa, Homo sapiens
  misc_feature: Table A; Target 16331; HLA-A*02:01; CLEC3A; ENSG00000166509; TAA
VLFSQSAQG

SEQ ID NO: 16332 - protein, 9 aa, Homo sapiens
  misc_feature: Table A; Target 16332; HLA-A*02:03; CLEC3A; ENSG00000166509; TAA
VLFSQSAQG

SEQ ID NO: 16333 - protein, 10 aa, Homo sapiens
  misc_feature: Table A; Target 16333; HLA-A*03:01; CLEC3A; ENSG00000166509; TAA
VLFSQSAQGK

SEQ ID NO: 16334 - protein, 10 aa, Homo sapiens
  misc_feature: Table A; Target 16334; HLA-A*03:02; CLEC3A; ENSG00000166509; TAA
VLFSQSAQGK

SEQ ID NO: 16335 - protein, 10 aa, Homo sapiens
  misc_feature: Table A; Target 16335; HLA-A*11:01; CLEC3A; ENSG00000166509; TAA
VLFSQSAQGK

SEQ ID NO: 16336 - protein, 10 aa, Homo sapiens
  misc_feature: Table A; Target 16336; HLA-B*27:05; CLEC3A; ENSG00000166509; TAA
VLFSQSAQGK

SEQ ID NO: 16337 - protein, 11 aa, Homo sapiens
  misc_feature: Table A; Target 16337; HLA-A*03:01; CLEC3A; ENSG00000166509; TAA
VLFSQSAQGKW

SEQ ID NO: 16338 - protein, 11 aa, Homo sapiens
  misc_feature: Table A; Target 16338; HLA-A*24:02; CLEC3A; ENSG00000166509; TAA
VLFSQSAQGKW

SEQ ID NO: 16339 - protein, 11 aa, Homo sapiens
  misc_feature: Table A; Target 16339; HLA-A*29:02; CLEC3A; ENSG00000166509; TAA
VLFSQSAQGKW

SEQ ID NO: 16340 - protein, 11 aa, Homo sapiens
  misc_feature: Table A; Target 16340; HLA-A*32:01; CLEC3A; ENSG00000166509; TAA
VLFSQSAQGKW

SEQ ID NO: 16341 - protein, 11 aa, Homo sapiens
  misc_feature: Table A; Target 16341; HLA-B*44:02; CLEC3A; ENSG00000166509; TAA
VLFSQSAQGKW

SEQ ID NO: 16342 - protein, 11 aa, Homo sapiens
  misc_feature: Table A; Target 16342; HLA-B*44:03; CLEC3A; ENSG00000166509; TAA
VLFSQSAQGKW

SEQ ID NO: 16343 - protein, 11 aa, Homo sapiens
  misc_feature: Table A; Target 16343; HLA-B*57:01; CLEC3A; ENSG00000166509; TAA
VLFSQSAQGKW

SEQ ID NO: 16344 - protein, 11 aa, Homo sapiens
  misc_feature: Table A; Target 16344; HLA-B*58:01; CLEC3A; ENSG00000166509; TAA
VLFSQSAQGKW

SEQ ID NO: 16345 - protein, 11 aa, Homo sapiens
  misc_feature: Table A; Target 16345; HLA-C*16:02; CLEC3A; ENSG00000166509; TAA
VLFSQSAQGKW

SEQ ID NO: 16346 - protein, 11 aa, Homo sapiens
  misc_feature: Table A; Target 16346; HLA-C*16:04; CLEC3A; ENSG00000166509; TAA
VLFSQSAQGKW

SEQ ID NO: 16347 - protein, 8 aa, Homo sapiens
  misc_feature: Table A; Target 16347; HLA-B*18:01; CLEC3A; ENSG00000166509; TAA
VNGIAISF

SEQ ID NO: 16348 - protein, 8 aa, Homo sapiens
  misc_feature: Table A; Target 16348; HLA-B*37:01; CLEC3A; ENSG00000166509; TAA
VNGIAISF

SEQ ID NO: 16349 - protein, 9 aa, Homo sapiens
  misc_feature: Table A; Target 16349; HLA-A*01:01; CLEC3A; ENSG00000166509; TAA
VTEGKFVDV

SEQ ID NO: 16350 - protein, 9 aa, Homo sapiens
  misc_feature: Table A; Target 16350; HLA-A*02:07; CLEC3A; ENSG00000166509; TAA
VTEGKFVDV

SEQ ID NO: 16351 - protein, 9 aa, Homo sapiens
  misc_feature: Table A; Target 16351; HLA-A*68:02; CLEC3A; ENSG00000166509; TAA
VTEGKFVDV

SEQ ID NO: 16352 - protein, 9 aa, Homo sapiens
  misc_feature: Table A; Target 16352; HLA-C*04:01; CLEC3A; ENSG00000166509; TAA
VTEGKFVDV

SEQ ID NO: 16353 - protein, 9 aa, Homo sapiens
  misc_feature: Table A; Target 16353; HLA-C*05:01; CLEC3A; ENSG00000166509; TAA
VTEGKFVDV

SEQ ID NO: 16354 - protein, 9 aa, Homo sapiens
  misc_feature: Table A; Target 16354; HLA-C*06:02; CLEC3A; ENSG00000166509; TAA
VTEGKFVDV

SEQ ID NO: 16355 - protein, 9 aa, Homo sapiens
  misc_feature: Table A; Target 16355; HLA-C*07:04; CLEC3A; ENSG00000166509; TAA
VTEGKFVDV

SEQ ID NO: 16356 - protein, 9 aa, Homo sapiens
  misc_feature: Table A; Target 16356; HLA-C*12:03; CLEC3A; ENSG00000166509; TAA
VTEGKFVDV

SEQ ID NO: 16357 - protein, 9 aa, Homo sapiens
  misc_feature: Table A; Target 16357; HLA-C*16:02; CLEC3A; ENSG00000166509; TAA
VTEGKFVDV

SEQ ID NO: 16358 - protein, 10 aa, Homo sapiens
  misc_feature: Table A; Target 16358; HLA-C*07:01; CLEC3A; ENSG00000166509; TAA
VTEGKFVDVN

SEQ ID NO: 16359 - protein, 9 aa, Homo sapiens
  misc_feature: Table A; Target 16359; HLA-A*01:01; CLEC3A; ENSG00000166509; TAA
YLASEGLKH

SEQ ID NO: 16360 - protein, 9 aa, Homo sapiens
  misc_feature: Table A; Target 16360; HLA-A*03:01; CLEC3A; ENSG00000166509; TAA
YLASEGLKH

SEQ ID NO: 16361 - protein, 9 aa, Homo sapiens
  misc_feature: Table A; Target 16361; HLA-A*29:02; CLEC3A; ENSG00000166509; TAA
YLASEGLKH

SEQ ID NO: 16362 - protein, 10 aa, Homo sapiens
  misc_feature: Table A; Target 16362; HLA-A*02:01; CLEC3A; ENSG00000166509; TAA
YLASEGLKHF

SEQ ID NO: 16363 - protein, 10 aa, Homo sapiens
  misc_feature: Table A; Target 16363; HLA-A*02:03; CLEC3A; ENSG00000166509; TAA
YLASEGLKHF

SEQ ID NO: 16364 - protein, 10 aa, Homo sapiens
  misc_feature: Table A; Target 16364; HLA-A*02:04; CLEC3A; ENSG00000166509; TAA
YLASEGLKHF

SEQ ID NO: 16365 - protein, 10 aa, Homo sapiens
  misc_feature: Table A; Target 16365; HLA-A*02:07; CLEC3A; ENSG00000166509; TAA
YLASEGLKHF

SEQ ID NO: 16366 - protein, 10 aa, Homo sapiens
  misc_feature: Table A; Target 16366; HLA-A*24:02; CLEC3A; ENSG00000166509; TAA
YLASEGLKHF

SEQ ID NO: 16367 - protein, 10 aa, Homo sapiens
  misc_feature: Table A; Target 16367; HLA-A*25:01; CLEC3A; ENSG00000166509; TAA
YLASEGLKHF

SEQ ID NO: 16368 - protein, 10 aa, Homo sapiens
  misc_feature: Table A; Target 16368; HLA-A*26:01; CLEC3A; ENSG00000166509; TAA
YLASEGLKHF

SEQ ID NO: 16369 - protein, 10 aa, Homo sapiens
  misc_feature: Table A; Target 16369; HLA-A*29:02; CLEC3A; ENSG00000166509; TAA
YLASEGLKHF

SEQ ID NO: 16370 - protein, 10 aa, Homo sapiens
  misc_feature: Table A; Target 16370; HLA-A*33:01; CLEC3A; ENSG00000166509; TAA
YLASEGLKHF

SEQ ID NO: 16371 - protein, 10 aa, Homo sapiens
  misc_feature: Table A; Target 16371; HLA-C*07:01; CLEC3A; ENSG00000166509; TAA
YLASEGLKHF

SEQ ID NO: 16372 - protein, 9 aa, Homo sapiens
  misc_feature: Table A; Target 16372; HLA-B*13:02; COL23A1; ENSG00000050767; TAA
AAACLLLGV

SEQ ID NO: 16373 - protein, 9 aa, Homo sapiens
  misc_feature: Table A; Target 16373; HLA-A*32:01; COL23A1; ENSG00000050767; TAA
AAALQGRVA

SEQ ID NO: 16374 - protein, 9 aa, Homo sapiens
  misc_feature: Table A; Target 16374; HLA-B*46:01; COL23A1; ENSG00000050767; TAA
AAALQGRVA

SEQ ID NO: 16375 - protein, 9 aa, Homo sapiens
  misc_feature: Table A; Target 16375; HLA-B*54:01; COL23A1; ENSG00000050767; TAA
AAALQGRVA

SEQ ID NO: 16376 - protein, 9 aa, Homo sapiens
  misc_feature: Table A; Target 16376; HLA-B*55:01; COL23A1; ENSG00000050767; TAA
AAALQGRVA

SEQ ID NO: 16377 - protein, 9 aa, Homo sapiens
  misc_feature: Table A; Target 16377; HLA-B*56:01; COL23A1; ENSG00000050767; TAA
AAALQGRVA

SEQ ID NO: 16378 - protein, 9 aa, Homo sapiens
  misc_feature: Table A; Target 16378; HLA-C*02:02; COL23A1; ENSG00000050767; TAA
AAALQGRVA

SEQ ID NO: 16379 - protein, 9 aa, Homo sapiens
  misc_feature: Table A; Target 16379; HLA-C*03:03; COL23A1; ENSG00000050767; TAA
AAALQGRVA

SEQ ID NO: 16380 - protein, 9 aa, Homo sapiens
  misc_feature: Table A; Target 16380; HLA-C*03:04; COL23A1; ENSG00000050767; TAA
AAALQGRVA

SEQ ID NO: 16381 - protein, 9 aa, Homo sapiens
  misc_feature: Table A; Target 16381; HLA-C*12:03; COL23A1; ENSG00000050767; TAA
AAALQGRVA

SEQ ID NO: 16382 - protein, 9 aa, Homo sapiens
  misc_feature: Table A; Target 16382; HLA-C*16:01; COL23A1; ENSG00000050767; TAA
AAALQGRVA

SEQ ID NO: 16383 - protein, 9 aa, Homo sapiens
  misc_feature: Table A; Target 16383; HLA-C*16:02; COL23A1; ENSG00000050767; TAA
AAALQGRVA

SEQ ID NO: 16384 - protein, 10 aa, Homo sapiens
  misc_feature: Table A; Target 16384; HLA-B*54:01; COL23A1; ENSG00000050767; TAA
AAALQGRVAA

SEQ ID NO: 16385 - protein, 10 aa, Homo sapiens
  misc_feature: Table A; Target 16385; HLA-B*56:01; COL23A1; ENSG00000050767; TAA
AAALQGRVAA

SEQ ID NO: 16386 - protein, 11 aa, Homo sapiens
  misc_feature: Table A; Target 16386; HLA-B*07:02; COL23A1; ENSG00000050767; TAA
AAALQGRVAAL

SEQ ID NO: 16387 - protein, 11 aa, Homo sapiens
  misc_feature: Table A; Target 16387; HLA-C*01:02; COL23A1; ENSG00000050767; TAA
AAALQGRVAAL

SEQ ID NO: 16388 - protein, 11 aa, Homo sapiens
  misc_feature: Table A; Target 16388; HLA-C*03:04; COL23A1; ENSG00000050767; TAA
AAALQGRVAAL

SEQ ID NO: 16389 - protein, 11 aa, Homo sapiens
  misc_feature: Table A; Target 16389; HLA-C*07:02; COL23A1; ENSG00000050767; TAA
AAALQGRVAAL

SEQ ID NO: 16390 - protein, 11 aa, Homo sapiens
  misc_feature: Table A; Target 16390; HLA-C*16:01; COL23A1; ENSG00000050767; TAA
AAALQGRVAAL

SEQ ID NO: 16391 - protein, 10 aa, Homo sapiens
  misc_feature: Table A; Target 16391; HLA-B*54:01; COL23A1; ENSG00000050767; TAA
AACLLLGVQA

SEQ ID NO: 16392 - protein, 11 aa, Homo sapiens
  misc_feature: Table A; Target 16392; HLA-B*56:01; COL23A1; ENSG00000050767; TAA
AAGGGGGGRSA

SEQ ID NO: 16393 - protein, 9 aa, Homo sapiens
  misc_feature: Table A; Target 16393; HLA-A*11:01; COL23A1; ENSG00000050767; TAA
AAGPPGPPG

SEQ ID NO: 16394 - protein, 9 aa, Homo sapiens
  misc_feature: Table A; Target 16394; HLA-C*03:03; COL23A1; ENSG00000050767; TAA
AAGPPGPPG

SEQ ID NO: 16395 - protein, 9 aa, Homo sapiens
  misc_feature: Table A; Target 16395; HLA-C*03:04; COL23A1; ENSG00000050767; TAA
AAGPPGPPG

SEQ ID NO: 16396 - protein, 9 aa, Homo sapiens
  misc_feature: Table A; Target 16396; HLA-C*16:01; COL23A1; ENSG00000050767; TAA
AAGPPGPPG

SEQ ID NO: 16397 - protein, 11 aa, Homo sapiens
  misc_feature: Table A; Target 16397; HLA-C*04:01; COL23A1; ENSG00000050767; TAA
AAGPPGPPGPP

SEQ ID NO: 16398 - protein, 11 aa, Homo sapiens
  misc_feature: Table A; Target 16398; HLA-C*06:02; COL23A1; ENSG00000050767; TAA
AAGPPGPPGPP

SEQ ID NO: 16399 - protein, 8 aa, Homo sapiens
  misc_feature: Table A; Target 16399; HLA-C*16:01; COL23A1; ENSG00000050767; TAA
AAGPRGAP

SEQ ID NO: 16400 - protein, 8 aa, Homo sapiens
  misc_feature: Table A; Target 16400; HLA-C*16:02; COL23A1; ENSG00000050767; TAA
AAGPRGAP

SEQ ID NO: 16401 - protein, 10 aa, Homo sapiens
  misc_feature: Table A; Target 16401; HLA-B*58:01; COL23A1; ENSG00000050767; TAA
AAGPRGAPGL

SEQ ID NO: 16402 - protein, 11 aa, Homo sapiens
  misc_feature: Table A; Target 16402; HLA-A*03:01; COL23A1; ENSG00000050767; TAA
AAGPRGAPGLK

SEQ ID NO: 16403 - protein, 11 aa, Homo sapiens
  misc_feature: Table A; Target 16403; HLA-A*03:02; COL23A1; ENSG00000050767; TAA
AAGPRGAPGLK

SEQ ID NO: 16404 - protein, 11 aa, Homo sapiens
  misc_feature: Table A; Target 16404; HLA-A*11:01; COL23A1; ENSG00000050767; TAA
AAGPRGAPGLK

SEQ ID NO: 16405 - protein, 9 aa, Homo sapiens
  misc_feature: Table A; Target 16405; HLA-B*35:03; COL23A1; ENSG00000050767; TAA
AALEEEREL

SEQ ID NO: 16406 - protein, 9 aa, Homo sapiens
  misc_feature: Table A; Target 16406; HLA-B*58:01; COL23A1; ENSG00000050767; TAA
AALEEEREL

SEQ ID NO: 16407 - protein, 9 aa, Homo sapiens
  misc_feature: Table A; Target 16407; HLA-C*03:03; COL23A1; ENSG00000050767; TAA
AALEEEREL

SEQ ID NO: 16408 - protein, 9 aa, Homo sapiens
  misc_feature: Table A; Target 16408; HLA-C*03:04; COL23A1; ENSG00000050767; TAA
AALEEEREL

SEQ ID NO: 16409 - protein, 9 aa, Homo sapiens
  misc_feature: Table A; Target 16409; HLA-C*16:01; COL23A1; ENSG00000050767; TAA
AALEEEREL

SEQ ID NO: 16410 - protein, 9 aa, Homo sapiens
  misc_feature: Table A; Target 16410; HLA-C*16:02; COL23A1; ENSG00000050767; TAA
AALEEEREL

SEQ ID NO: 16411 - protein, 10 aa, Homo sapiens
  misc_feature: Table A; Target 16411; HLA-B*40:01; COL23A1; ENSG00000050767; TAA
AALEEERELL

SEQ ID NO: 16412 - protein, 11 aa, Homo sapiens
  misc_feature: Table A; Target 16412; HLA-A*11:01; COL23A1; ENSG00000050767; TAA
AALEEERELLR

SEQ ID NO: 16413 - protein, 11 aa, Homo sapiens
  misc_feature: Table A; Target 16413; HLA-A*29:02; COL23A1; ENSG00000050767; TAA
AALEEERELLR

SEQ ID NO: 16414 - protein, 11 aa, Homo sapiens
  misc_feature: Table A; Target 16414; HLA-A*31:01; COL23A1; ENSG00000050767; TAA
AALEEERELLR

SEQ ID NO: 16415 - protein, 11 aa, Homo sapiens
  misc_feature: Table A; Target 16415; HLA-A*33:03; COL23A1; ENSG00000050767; TAA
AALEEERELLR

SEQ ID NO: 16416 - protein, 11 aa, Homo sapiens
  misc_feature: Table A; Target 16416; HLA-B*57:01; COL23A1; ENSG00000050767; TAA
AALEEERELLR

SEQ ID NO: 16417 - protein, 8 aa, Homo sapiens
  misc_feature: Table A; Target 16417; HLA-C*03:03; COL23A1; ENSG00000050767; TAA
AALQGRVA

SEQ ID NO: 16418 - protein, 8 aa, Homo sapiens
  misc_feature: Table A; Target 16418; HLA-C*03:04; COL23A1; ENSG00000050767; TAA
AALQGRVA

SEQ ID NO: 16419 - protein, 8 aa, Homo sapiens
  misc_feature: Table A; Target 16419; HLA-C*16:01; COL23A1; ENSG00000050767; TAA
AALQGRVA

SEQ ID NO: 16420 - protein, 9 aa, Homo sapiens
  misc_feature: Table A; Target 16420; HLA-A*32:01; COL23A1; ENSG00000050767; TAA
AALQGRVAA

SEQ ID NO: 16421 - protein, 9 aa, Homo sapiens
  misc_feature: Table A; Target 16421; HLA-B*08:01; COL23A1; ENSG00000050767; TAA
AALQGRVAA

SEQ ID NO: 16422 - protein, 9 aa, Homo sapiens
  misc_feature: Table A; Target 16422; HLA-B*46:01; COL23A1; ENSG00000050767; TAA
AALQGRVAA

SEQ ID NO: 16423 - protein, 9 aa, Homo sapiens
  misc_feature: Table A; Target 16423; HLA-B*54:01; COL23A1; ENSG00000050767; TAA
AALQGRVAA

SEQ ID NO: 16424 - protein, 9 aa, Homo sapiens
  misc_feature: Table A; Target 16424; HLA-B*55:01; COL23A1; ENSG00000050767; TAA
AALQGRVAA

SEQ ID NO: 16425 - protein, 9 aa, Homo sapiens
  misc_feature: Table A; Target 16425; HLA-B*56:01; COL23A1; ENSG00000050767; TAA
AALQGRVAA

SEQ ID NO: 16426 - protein, 9 aa, Homo sapiens
  misc_feature: Table A; Target 16426; HLA-C*01:02; COL23A1; ENSG00000050767; TAA
AALQGRVAA

SEQ ID NO: 16427 - protein, 9 aa, Homo sapiens
  misc_feature: Table A; Target 16427; HLA-C*03:03; COL23A1; ENSG00000050767; TAA
AALQGRVAA

SEQ ID NO: 16428 - protein, 9 aa, Homo sapiens
  misc_feature: Table A; Target 16428; HLA-C*03:04; COL23A1; ENSG00000050767; TAA
AALQGRVAA

SEQ ID NO: 16429 - protein, 9 aa, Homo sapiens
  misc_feature: Table A; Target 16429; HLA-C*16:01; COL23A1; ENSG00000050767; TAA
AALQGRVAA

SEQ ID NO: 16430 - protein, 10 aa, Homo sapiens
  misc_feature: Table A; Target 16430; HLA-A*02:04; COL23A1; ENSG00000050767; TAA
AALQGRVAAL

SEQ ID NO: 16431 - protein, 10 aa, Homo sapiens
  misc_feature: Table A; Target 16431; HLA-B*07:02; COL23A1; ENSG00000050767; TAA
AALQGRVAAL

SEQ ID NO: 16432 - protein, 10 aa, Homo sapiens
  misc_feature: Table A; Target 16432; HLA-B*08:01; COL23A1; ENSG00000050767; TAA
AALQGRVAAL

SEQ ID NO: 16433 - protein, 10 aa, Homo sapiens
  misc_feature: Table A; Target 16433; HLA-B*37:01; COL23A1; ENSG00000050767; TAA
AALQGRVAAL

SEQ ID NO: 16434 - protein, 10 aa, Homo sapiens
  misc_feature: Table A; Target 16434; HLA-B*40:02; COL23A1; ENSG00000050767; TAA
AALQGRVAAL

SEQ ID NO: 16435 - protein, 10 aa, Homo sapiens
  misc_feature: Table A; Target 16435; HLA-B*46:01; COL23A1; ENSG00000050767; TAA
AALQGRVAAL

SEQ ID NO: 16436 - protein, 10 aa, Homo sapiens
  misc_feature: Table A; Target 16436; HLA-C*01:02; COL23A1; ENSG00000050767; TAA
AALQGRVAAL

SEQ ID NO: 16437 - protein, 10 aa, Homo sapiens
  misc_feature: Table A; Target 16437; HLA-C*03:03; COL23A1; ENSG00000050767; TAA
AALQGRVAAL

SEQ ID NO: 16438 - protein, 10 aa, Homo sapiens
  misc_feature: Table A; Target 16438; HLA-C*03:04; COL23A1; ENSG00000050767; TAA
AALQGRVAAL

SEQ ID NO: 16439 - protein, 10 aa, Homo sapiens
  misc_feature: Table A; Target 16439; HLA-C*07:02; COL23A1; ENSG00000050767; TAA
AALQGRVAAL

SEQ ID NO: 16440 - protein, 10 aa, Homo sapiens
  misc_feature: Table A; Target 16440; HLA-C*14:02; COL23A1; ENSG00000050767; TAA
AALQGRVAAL

SEQ ID NO: 16441 - protein, 10 aa, Homo sapiens
  misc_feature: Table A; Target 16441; HLA-C*16:01; COL23A1; ENSG00000050767; TAA
AALQGRVAAL

SEQ ID NO: 16442 - protein, 9 aa, Homo sapiens
  misc_feature: Table A; Target 16442; HLA-B*44:02; COL23A1; ENSG00000050767; TAA
AEPHLERLL

SEQ ID NO: 16443 - protein, 9 aa, Homo sapiens
  misc_feature: Table A; Target 16443; HLA-B*44:03; COL23A1; ENSG00000050767; TAA
AEPHLERLL

SEQ ID NO: 16444 - protein, 10 aa, Homo sapiens
  misc_feature: Table A; Target 16444; HLA-A*25:01; COL23A1; ENSG00000050767; TAA
AGPPGALDAW

SEQ ID NO: 16445 - protein, 10 aa, Homo sapiens
  misc_feature: Table A; Target 16445; HLA-A*30:02; COL23A1; ENSG00000050767; TAA
AGPPGALDAW

SEQ ID NO: 16446 - protein, 10 aa, Homo sapiens
  misc_feature: Table A; Target 16446; HLA-B*57:01; COL23A1; ENSG00000050767; TAA
AGPPGALDAW

SEQ ID NO: 16447 - protein, 10 aa, Homo sapiens
  misc_feature: Table A; Target 16447; HLA-B*58:01; COL23A1; ENSG00000050767; TAA
AGPPGALDAW

SEQ ID NO: 16448 - protein, 9 aa, Homo sapiens
  misc_feature: Table A; Target 16448; HLA-B*39:01; COL23A1; ENSG00000050767; TAA
AGPPGPPGP

SEQ ID NO: 16449 - protein, 9 aa, Homo sapiens
  misc_feature: Table A; Target 16449; HLA-C*04:01; COL23A1; ENSG00000050767; TAA
AGPPGPPGP

SEQ ID NO: 16450 - protein, 10 aa, Homo sapiens
  misc_feature: Table A; Target 16450; HLA-C*04:01; COL23A1; ENSG00000050767; TAA
AGPPGPPGPP

SEQ ID NO: 16451 - protein, 10 aa, Homo sapiens
  misc_feature: Table A; Target 16451; HLA-C*06:02; COL23A1; ENSG00000050767; TAA
AGPPGPPGPP

SEQ ID NO: 16452 - protein, 10 aa, Homo sapiens
  misc_feature: Table A; Target 16452; HLA-C*07:02; COL23A1; ENSG00000050767; TAA
AGPPGPPGPP

SEQ ID NO: 16453 - protein, 11 aa, Homo sapiens
  misc_feature: Table A; Target 16453; HLA-C*06:02; COL23A1; ENSG00000050767; TAA
AGPPGPPGPPG

SEQ ID NO: 16454 - protein, 11 aa, Homo sapiens
  misc_feature: Table A; Target 16454; HLA-C*07:02; COL23A1; ENSG00000050767; TAA
AGPPGPPGPPG

SEQ ID NO: 16455 - protein, 9 aa, Homo sapiens
  misc_feature: Table A; Target 16455; HLA-C*01:02; COL23A1; ENSG00000050767; TAA
AGPRGAPGL

SEQ ID NO: 16456 - protein, 9 aa, Homo sapiens
  misc_feature: Table A; Target 16456; HLA-B*07:02; COL23A1; ENSG00000050767; TAA
AGSRAVSAL

SEQ ID NO: 16457 - protein, 9 aa, Homo sapiens
  misc_feature: Table A; Target 16457; HLA-B*37:01; COL23A1; ENSG00000050767; TAA
AGSRAVSAL

SEQ ID NO: 16458 - protein, 9 aa, Homo sapiens
  misc_feature: Table A; Target 16458; HLA-B*40:01; COL23A1; ENSG00000050767; TAA
AGSRAVSAL

SEQ ID NO: 16459 - protein, 9 aa, Homo sapiens
  misc_feature: Table A; Target 16459; HLA-B*40:02; COL23A1; ENSG00000050767; TAA
AGSRAVSAL

SEQ ID NO: 16460 - protein, 9 aa, Homo sapiens
  misc_feature: Table A; Target 16460; HLA-C*01:02; COL23A1; ENSG00000050767; TAA
AGSRAVSAL

SEQ ID NO: 16461 - protein, 9 aa, Homo sapiens
  misc_feature: Table A; Target 16461; HLA-C*03:03; COL23A1; ENSG00000050767; TAA
AGSRAVSAL

SEQ ID NO: 16462 - protein, 9 aa, Homo sapiens
  misc_feature: Table A; Target 16462; HLA-C*03:04; COL23A1; ENSG00000050767; TAA
AGSRAVSAL

SEQ ID NO: 16463 - protein, 9 aa, Homo sapiens
  misc_feature: Table A; Target 16463; HLA-C*06:02; COL23A1; ENSG00000050767; TAA
AGSRAVSAL

SEQ ID NO: 16464 - protein, 9 aa, Homo sapiens
  misc_feature: Table A; Target 16464; HLA-C*07:02; COL23A1; ENSG00000050767; TAA
AGSRAVSAL

SEQ ID NO: 16465 - protein, 9 aa, Homo sapiens
  misc_feature: Table A; Target 16465; HLA-C*07:04; COL23A1; ENSG00000050767; TAA
AGSRAVSAL

SEQ ID NO: 16466 - protein, 9 aa, Homo sapiens
  misc_feature: Table A; Target 16466; HLA-C*14:02; COL23A1; ENSG00000050767; TAA
AGSRAVSAL

SEQ ID NO: 16467 - protein, 9 aa, Homo sapiens
  misc_feature: Table A; Target 16467; HLA-C*16:01; COL23A1; ENSG00000050767; TAA
AGSRAVSAL

SEQ ID NO: 16468 - protein, 9 aa, Homo sapiens
  misc_feature: Table A; Target 16468; HLA-C*16:02; COL23A1; ENSG00000050767; TAA
AGSRAVSAL

SEQ ID NO: 16469 - protein, 10 aa, Homo sapiens
  misc_feature: Table A; Target 16469; HLA-A*02:01; COL23A1; ENSG00000050767; TAA
ALDAWAEPHL

SEQ ID NO: 16470 - protein, 10 aa, Homo sapiens
  misc_feature: Table A; Target 16470; HLA-A*02:04; COL23A1; ENSG00000050767; TAA
ALDAWAEPHL

SEQ ID NO: 16471 - protein, 10 aa, Homo sapiens
  misc_feature: Table A; Target 16471; HLA-A*02:07; COL23A1; ENSG00000050767; TAA
ALDAWAEPHL

SEQ ID NO: 16472 - protein, 9 aa, Homo sapiens
  misc_feature: Table A; Target 16472; HLA-A*02:07; COL23A1; ENSG00000050767; TAA
ALEEERELL

SEQ ID NO: 16473 - protein, 9 aa, Homo sapiens
  misc_feature: Table A; Target 16473; HLA-B*38:01; COL23A1; ENSG00000050767; TAA
ALEEERELL

SEQ ID NO: 16474 - protein, 9 aa, Homo sapiens
  misc_feature: Table A; Target 16474; HLA-B*55:01; COL23A1; ENSG00000050767; TAA
ALEEERELL

SEQ ID NO: 16475 - protein, 9 aa, Homo sapiens
  misc_feature: Table A; Target 16475; HLA-C*05:01; COL23A1; ENSG00000050767; TAA
ALEEERELL

SEQ ID NO: 16476 - protein, 10 aa, Homo sapiens
  misc_feature: Table A; Target 16476; HLA-A*01:01; COL23A1; ENSG00000050767; TAA
ALEEERELLR

SEQ ID NO: 16477 - protein, 9 aa, Homo sapiens
  misc_feature: Table A; Target 16477; HLA-A*02:01; COL23A1; ENSG00000050767; TAA
ALQGRVAAL

SEQ ID NO: 16478 - protein, 9 aa, Homo sapiens
  misc_feature: Table A; Target 16478; HLA-A*02:03; COL23A1; ENSG00000050767; TAA
ALQGRVAAL

SEQ ID NO: 16479 - protein, 9 aa, Homo sapiens
  misc_feature: Table A; Target 16479; HLA-A*02:04; COL23A1; ENSG00000050767; TAA
ALQGRVAAL

SEQ ID NO: 16480 - protein, 9 aa, Homo sapiens
  misc_feature: Table A; Target 16480; HLA-A*02:07; COL23A1; ENSG00000050767; TAA
ALQGRVAAL

SEQ ID NO: 16481 - protein, 9 aa, Homo sapiens
  misc_feature: Table A; Target 16481; HLA-A*32:01; COL23A1; ENSG00000050767; TAA
ALQGRVAAL

SEQ ID NO: 16482 - protein, 9 aa, Homo sapiens
  misc_feature: Table A; Target 16482; HLA-B*07:02; COL23A1; ENSG00000050767; TAA
ALQGRVAAL

SEQ ID NO: 16483 - protein, 9 aa, Homo sapiens
  misc_feature: Table A; Target 16483; HLA-B*08:01; COL23A1; ENSG00000050767; TAA
ALQGRVAAL

SEQ ID NO: 16484 - protein, 9 aa, Homo sapiens
  misc_feature: Table A; Target 16484; HLA-B*15:01; COL23A1; ENSG00000050767; TAA
ALQGRVAAL

SEQ ID NO: 16485 - protein, 9 aa, Homo sapiens
  misc_feature: Table A; Target 16485; HLA-B*37:01; COL23A1; ENSG00000050767; TAA
ALQGRVAAL

SEQ ID NO: 16486 - protein, 9 aa, Homo sapiens
  misc_feature: Table A; Target 16486; HLA-B*46:01; COL23A1; ENSG00000050767; TAA
ALQGRVAAL

SEQ ID NO: 16487 - protein, 9 aa, Homo sapiens
  misc_feature: Table A; Target 16487; HLA-B*55:01; COL23A1; ENSG00000050767; TAA
ALQGRVAAL

SEQ ID NO: 16488 - protein, 9 aa, Homo sapiens
  misc_feature: Table A; Target 16488; HLA-C*01:02; COL23A1; ENSG00000050767; TAA
ALQGRVAAL

SEQ ID NO: 16489 - protein, 9 aa, Homo sapiens
  misc_feature: Table A; Target 16489; HLA-C*03:03; COL23A1; ENSG00000050767; TAA
ALQGRVAAL

SEQ ID NO: 16490 - protein, 9 aa, Homo sapiens
  misc_feature: Table A; Target 16490; HLA-C*07:02; COL23A1; ENSG00000050767; TAA
ALQGRVAAL

SEQ ID NO: 16491 - protein, 9 aa, Homo sapiens
  misc_feature: Table A; Target 16491; HLA-C*14:02; COL23A1; ENSG00000050767; TAA
ALQGRVAAL

SEQ ID NO: 16492 - protein, 9 aa, Homo sapiens
  misc_feature: Table A; Target 16492; HLA-C*16:01; COL23A1; ENSG00000050767; TAA
ALQGRVAAL

SEQ ID NO: 16493 - protein, 9 aa, Homo sapiens
  misc_feature: Table A; Target 16493; HLA-C*16:02; COL23A1; ENSG00000050767; TAA
ALQGRVAAL

SEQ ID NO: 16494 - protein, 8 aa, Homo sapiens
  misc_feature: Table A; Target 16494; HLA-A*03:02; COL23A1; ENSG00000050767; TAA
AQGPAGPK

SEQ ID NO: 16495 - protein, 8 aa, Homo sapiens
  misc_feature: Table A; Target 16495; HLA-A*11:01; COL23A1; ENSG00000050767; TAA
AQGPAGPK

SEQ ID NO: 16496 - protein, 11 aa, Homo sapiens
  misc_feature: Table A; Target 16496; HLA-C*04:01; COL23A1; ENSG00000050767; TAA
AQLIVEPGPPG

SEQ ID NO: 16497 - protein, 10 aa, Homo sapiens
  misc_feature: Table A; Target 16497; HLA-B*27:05; COL23A1; ENSG00000050767; TAA
ARGPPGDTGK

SEQ ID NO: 16498 - protein, 9 aa, Homo sapiens
  misc_feature: Table A; Target 16498; HLA-A*01:01; COL23A1; ENSG00000050767; TAA
ASDSLQESL

SEQ ID NO: 16499 - protein, 9 aa, Homo sapiens
  misc_feature: Table A; Target 16499; HLA-A*02:07; COL23A1; ENSG00000050767; TAA
ASDSLQESL

SEQ ID NO: 16500 - protein, 9 aa, Homo sapiens
  misc_feature: Table A; Target 16500; HLA-B*38:01; COL23A1; ENSG00000050767; TAA
ASDSLQESL

SEQ ID NO: 16501 - protein, 9 aa, Homo sapiens
  misc_feature: Table A; Target 16501; HLA-B*58:01; COL23A1; ENSG00000050767; TAA
ASDSLQESL

SEQ ID NO: 16502 - protein, 9 aa, Homo sapiens
  misc_feature: Table A; Target 16502; HLA-C*05:01; COL23A1; ENSG00000050767; TAA
ASDSLQESL

SEQ ID NO: 16503 - protein, 9 aa, Homo sapiens
  misc_feature: Table A; Target 16503; HLA-A*32:01; COL23A1; ENSG00000050767; TAA
ATTAGSRAV

SEQ ID NO: 16504 - protein, 9 aa, Homo sapiens
  misc_feature: Table A; Target 16504; HLA-B*13:02; COL23A1; ENSG00000050767; TAA
ATTAGSRAV

SEQ ID NO: 16505 - protein, 9 aa, Homo sapiens
  misc_feature: Table A; Target 16505; HLA-C*03:04; COL23A1; ENSG00000050767; TAA
ATTAGSRAV

SEQ ID NO: 16506 - protein, 9 aa, Homo sapiens
  misc_feature: Table A; Target 16506; HLA-C*06:02; COL23A1; ENSG00000050767; TAA
ATTAGSRAV

SEQ ID NO: 16507 - protein, 9 aa, Homo sapiens
  misc_feature: Table A; Target 16507; HLA-C*16:01; COL23A1; ENSG00000050767; TAA
ATTAGSRAV

SEQ ID NO: 16508 - protein, 9 aa, Homo sapiens
  misc_feature: Table A; Target 16508; HLA-C*16:02; COL23A1; ENSG00000050767; TAA
ATTAGSRAV

SEQ ID NO: 16509 - protein, 9 aa, Homo sapiens
  misc_feature: Table A; Target 16509; HLA-A*03:01; COL23A1; ENSG00000050767; TAA
AVSALCLLL

SEQ ID NO: 16510 - protein, 9 aa, Homo sapiens
  misc_feature: Table A; Target 16510; HLA-A*29:02; COL23A1; ENSG00000050767; TAA
AVSALCLLL

SEQ ID NO: 16511 - protein, 9 aa, Homo sapiens
  misc_feature: Table A; Target 16511; HLA-B*13:02; COL23A1; ENSG00000050767; TAA
AVSALCLLL

SEQ ID NO: 16512 - protein, 9 aa, Homo sapiens
  misc_feature: Table A; Target 16512; HLA-A*02:01; COL23A1; ENSG00000050767; TAA
CLLLGVQAA

SEQ ID NO: 16513 - protein, 9 aa, Homo sapiens
  misc_feature: Table A; Target 16513; HLA-A*02:03; COL23A1; ENSG00000050767; TAA
CLLLGVQAA

SEQ ID NO: 16514 - protein, 9 aa, Homo sapiens
  misc_feature: Table A; Target 16514; HLA-B*55:01; COL23A1; ENSG00000050767; TAA
CLLLGVQAA

SEQ ID NO: 16515 - protein, 8 aa, Homo sapiens
  misc_feature: Table A; Target 16515; HLA-B*51:01; COL23A1; ENSG00000050767; TAA
DAGKGNAA

SEQ ID NO: 16516 - protein, 8 aa, Homo sapiens
  misc_feature: Table A; Target 16516; HLA-B*35:03; COL23A1; ENSG00000050767; TAA
DAWAEPHL

SEQ ID NO: 16517 - protein, 8 aa, Homo sapiens
  misc_feature: Table A; Target 16517; HLA-B*51:01; COL23A1; ENSG00000050767; TAA
DAWAEPHL

SEQ ID NO: 16518 - protein, 9 aa, Homo sapiens
  misc_feature: Table A; Target 16518; HLA-A*33:01; COL23A1; ENSG00000050767; TAA
DAWAEPHLE

SEQ ID NO: 16519 - protein, 10 aa, Homo sapiens
  misc_feature: Table A; Target 16519; HLA-A*33:01; COL23A1; ENSG00000050767; TAA
DAWAEPHLER

SEQ ID NO: 16520 - protein, 10 aa, Homo sapiens
  misc_feature: Table A; Target 16520; HLA-A*33:03; COL23A1; ENSG00000050767; TAA
DAWAEPHLER

SEQ ID NO: 16521 - protein, 10 aa, Homo sapiens
  misc_feature: Table A; Target 16521; HLA-C*07:06; COL23A1; ENSG00000050767; TAA
DAWAEPHLER

SEQ ID NO: 16522 - protein, 10 aa, Homo sapiens
  misc_feature: Table A; Target 16522; HLA-A*33:01; COL23A1; ENSG00000050767; TAA
DGKPGLPGPK

SEQ ID NO: 16523 - protein, 10 aa, Homo sapiens
  misc_feature: Table A; Target 16523; HLA-C*07:02; COL23A1; ENSG00000050767; TAA
DGKPGLPGPK

SEQ ID NO: 16524 - protein, 8 aa, Homo sapiens
  misc_feature: Table A; Target 16524; HLA-B*08:01; COL23A1; ENSG00000050767; TAA
DGLAKIRT

SEQ ID NO: 16525 - protein, 9 aa, Homo sapiens
  misc_feature: Table A; Target 16525; HLA-B*08:01; COL23A1; ENSG00000050767; TAA
DGLAKIRTA

SEQ ID NO: 16526 - protein, 9 aa, Homo sapiens
  misc_feature: Table A; Target 16526; HLA-B*51:01; COL23A1; ENSG00000050767; TAA
DGLAKIRTA

SEQ ID NO: 16527 - protein, 9 aa, Homo sapiens
  misc_feature: Table A; Target 16527; HLA-B*54:01; COL23A1; ENSG00000050767; TAA
DGLAKIRTA

SEQ ID NO: 16528 - protein, 10 aa, Homo sapiens
  misc_feature: Table A; Target 16528; HLA-A*33:01; COL23A1; ENSG00000050767; TAA
DGLAKIRTAR

SEQ ID NO: 16529 - protein, 9 aa, Homo sapiens
  misc_feature: Table A; Target 16529; HLA-A*25:01; COL23A1; ENSG00000050767; TAA
DGLPVPGCW

SEQ ID NO: 16530 - protein, 8 aa, Homo sapiens
  misc_feature: Table A; Target 16530; HLA-B*08:01; COL23A1; ENSG00000050767; TAA
DGRILDAL

SEQ ID NO: 16531 - protein, 8 aa, Homo sapiens
  misc_feature: Table A; Target 16531; HLA-B*18:01; COL23A1; ENSG00000050767; TAA
DGRILDAL

SEQ ID NO: 16532 - protein, 8 aa, Homo sapiens
  misc_feature: Table A; Target 16532; HLA-B*51:01; COL23A1; ENSG00000050767; TAA
DGRILDAL

SEQ ID NO: 16533 - protein, 8 aa, Homo sapiens
  misc_feature: Table A; Target 16533; HLA-B*51:01; COL23A1; ENSG00000050767; TAA
DGYPGPLG

SEQ ID NO: 16534 - protein, 9 aa, Homo sapiens
  misc_feature: Table A; Target 16534; HLA-A*23:01; COL23A1; ENSG00000050767; TAA
DGYPGPLGL

SEQ ID NO: 16535 - protein, 9 aa, Homo sapiens
  misc_feature: Table A; Target 16535; HLA-A*25:01; COL23A1; ENSG00000050767; TAA
DGYPGPLGL

SEQ ID NO: 16536 - protein, 9 aa, Homo sapiens
  misc_feature: Table A; Target 16536; HLA-A*26:01; COL23A1; ENSG00000050767; TAA
DGYPGPLGL

SEQ ID NO: 16537 - protein, 9 aa, Homo sapiens
  misc_feature: Table A; Target 16537; HLA-A*30:01; COL23A1; ENSG00000050767; TAA
DGYPGPLGL

SEQ ID NO: 16538 - protein, 9 aa, Homo sapiens
  misc_feature: Table A; Target 16538; HLA-A*33:01; COL23A1; ENSG00000050767; TAA
DGYPGPLGL

SEQ ID NO: 16539 - protein, 9 aa, Homo sapiens
  misc_feature: Table A; Target 16539; HLA-A*33:03; COL23A1; ENSG00000050767; TAA
DGYPGPLGL

SEQ ID NO: 16540 - protein, 9 aa, Homo sapiens
  misc_feature: Table A; Target 16540; HLA-A*68:01; COL23A1; ENSG00000050767; TAA
DGYPGPLGL

SEQ ID NO: 16541 - protein, 9 aa, Homo sapiens
  misc_feature: Table A; Target 16541; HLA-A*68:02; COL23A1; ENSG00000050767; TAA
DGYPGPLGL

SEQ ID NO: 16542 - protein, 9 aa, Homo sapiens
  misc_feature: Table A; Target 16542; HLA-B*07:02; COL23A1; ENSG00000050767; TAA
DGYPGPLGL

SEQ ID NO: 16543 - protein, 9 aa, Homo sapiens
  misc_feature: Table A; Target 16543; HLA-B*08:01; COL23A1; ENSG00000050767; TAA
DGYPGPLGL

SEQ ID NO: 16544 - protein, 9 aa, Homo sapiens
  misc_feature: Table A; Target 16544; HLA-B*13:02; COL23A1; ENSG00000050767; TAA
DGYPGPLGL

SEQ ID NO: 16545 - protein, 9 aa, Homo sapiens
  misc_feature: Table A; Target 16545; HLA-B*15:03; COL23A1; ENSG00000050767; TAA
DGYPGPLGL

SEQ ID NO: 16546 - protein, 9 aa, Homo sapiens
  misc_feature: Table A; Target 16546; HLA-B*18:01; COL23A1; ENSG00000050767; TAA
DGYPGPLGL

SEQ ID NO: 16547 - protein, 9 aa, Homo sapiens
  misc_feature: Table A; Target 16547; HLA-B*27:05; COL23A1; ENSG00000050767; TAA
DGYPGPLGL

SEQ ID NO: 16548 - protein, 9 aa, Homo sapiens
  misc_feature: Table A; Target 16548; HLA-B*35:01; COL23A1; ENSG00000050767; TAA
DGYPGPLGL

SEQ ID NO: 16549 - protein, 9 aa, Homo sapiens
  misc_feature: Table A; Target 16549; HLA-B*35:03; COL23A1; ENSG00000050767; TAA
DGYPGPLGL

SEQ ID NO: 16550 - protein, 9 aa, Homo sapiens
  misc_feature: Table A; Target 16550; HLA-B*38:01; COL23A1; ENSG00000050767; TAA
DGYPGPLGL

SEQ ID NO: 16551 - protein, 9 aa, Homo sapiens
  misc_feature: Table A; Target 16551; HLA-B*39:01; COL23A1; ENSG00000050767; TAA
DGYPGPLGL

SEQ ID NO: 16552 - protein, 9 aa, Homo sapiens
  misc_feature: Table A; Target 16552; HLA-B*40:02; COL23A1; ENSG00000050767; TAA
DGYPGPLGL

SEQ ID NO: 16553 - protein, 9 aa, Homo sapiens
  misc_feature: Table A; Target 16553; HLA-B*49:01; COL23A1; ENSG00000050767; TAA
DGYPGPLGL

SEQ ID NO: 16554 - protein, 9 aa, Homo sapiens
  misc_feature: Table A; Target 16554; HLA-B*51:01; COL23A1; ENSG00000050767; TAA
DGYPGPLGL

SEQ ID NO: 16555 - protein, 9 aa, Homo sapiens
  misc_feature: Table A; Target 16555; HLA-C*01:02; COL23A1; ENSG00000050767; TAA
DGYPGPLGL

SEQ ID NO: 16556 - protein, 9 aa, Homo sapiens
  misc_feature: Table A; Target 16556; HLA-C*02:02; COL23A1; ENSG00000050767; TAA
DGYPGPLGL

SEQ ID NO: 16557 - protein, 9 aa, Homo sapiens
  misc_feature: Table A; Target 16557; HLA-C*03:03; COL23A1; ENSG00000050767; TAA
DGYPGPLGL

SEQ ID NO: 16558 - protein, 9 aa, Homo sapiens
  misc_feature: Table A; Target 16558; HLA-C*03:04; COL23A1; ENSG00000050767; TAA
DGYPGPLGL

SEQ ID NO: 16559 - protein, 9 aa, Homo sapiens
  misc_feature: Table A; Target 16559; HLA-C*05:01; COL23A1; ENSG00000050767; TAA
DGYPGPLGL

SEQ ID NO: 16560 - protein, 9 aa, Homo sapiens
  misc_feature: Table A; Target 16560; HLA-C*06:02; COL23A1; ENSG00000050767; TAA
DGYPGPLGL

SEQ ID NO: 16561 - protein, 9 aa, Homo sapiens
  misc_feature: Table A; Target 16561; HLA-C*07:01; COL23A1; ENSG00000050767; TAA
DGYPGPLGL

SEQ ID NO: 16562 - protein, 9 aa, Homo sapiens
  misc_feature: Table A; Target 16562; HLA-C*07:02; COL23A1; ENSG00000050767; TAA
DGYPGPLGL

SEQ ID NO: 16563 - protein, 9 aa, Homo sapiens
  misc_feature: Table A; Target 16563; HLA-C*07:04; COL23A1; ENSG00000050767; TAA
DGYPGPLGL

SEQ ID NO: 16564 - protein, 9 aa, Homo sapiens
  misc_feature: Table A; Target 16564; HLA-C*07:06; COL23A1; ENSG00000050767; TAA
DGYPGPLGL

SEQ ID NO: 16565 - protein, 9 aa, Homo sapiens
  misc_feature: Table A; Target 16565; HLA-C*12:03; COL23A1; ENSG00000050767; TAA
DGYPGPLGL

SEQ ID NO: 16566 - protein, 9 aa, Homo sapiens
  misc_feature: Table A; Target 16566; HLA-C*16:02; COL23A1; ENSG00000050767; TAA
DGYPGPLGL

SEQ ID NO: 16567 - protein, 9 aa, Homo sapiens
  misc_feature: Table A; Target 16567; HLA-C*16:04; COL23A1; ENSG00000050767; TAA
DGYPGPLGL

SEQ ID NO: 16568 - protein, 11 aa, Homo sapiens
  misc_feature: Table A; Target 16568; HLA-C*04:01; COL23A1; ENSG00000050767; TAA
DGYPGPLGLDG

SEQ ID NO: 16569 - protein, 9 aa, Homo sapiens
  misc_feature: Table A; Target 16569; HLA-B*35:03; COL23A1; ENSG00000050767; TAA
DPGPPGQSG

SEQ ID NO: 16570 - protein, 10 aa, Homo sapiens
  misc_feature: Table A; Target 16570; HLA-A*68:01; COL23A1; ENSG00000050767; TAA
DPGPPGQSGR

SEQ ID NO: 16571 - protein, 10 aa, Homo sapiens
  misc_feature: Table A; Target 16571; HLA-C*07:06; COL23A1; ENSG00000050767; TAA
DPGPPGQSGR

SEQ ID NO: 16572 - protein, 10 aa, Homo sapiens
  misc_feature: Table A; Target 16572; HLA-A*33:01; COL23A1; ENSG00000050767; TAA
DSLQESLAQL

SEQ ID NO: 16573 - protein, 10 aa, Homo sapiens
  misc_feature: Table A; Target 16573; HLA-A*33:01; COL23A1; ENSG00000050767; TAA
DTVVIDYDGR

SEQ ID NO: 16574 - protein, 10 aa, Homo sapiens
  misc_feature: Table A; Target 16574; HLA-A*68:01; COL23A1; ENSG00000050767; TAA
DTVVIDYDGR

SEQ ID NO: 16575 - protein, 10 aa, Homo sapiens
  misc_feature: Table A; Target 16575; HLA-B*27:02; COL23A1; ENSG00000050767; TAA
DTVVIDYDGR

SEQ ID NO: 16576 - protein, 11 aa, Homo sapiens
  misc_feature: Table A; Target 16576; HLA-A*68:02; COL23A1; ENSG00000050767; TAA
DTVVIDYDGRI

SEQ ID NO: 16577 - protein, 8 aa, Homo sapiens
  misc_feature: Table A; Target 16577; HLA-B*08:01; COL23A1; ENSG00000050767; TAA
EPHLERLL

SEQ ID NO: 16578 - protein, 10 aa, Homo sapiens
  misc_feature: Table A; Target 16578; HLA-A*25:01; COL23A1; ENSG00000050767; TAA
EQGDTVVIDY

SEQ ID NO: 16579 - protein, 10 aa, Homo sapiens
  misc_feature: Table A; Target 16579; HLA-A*26:01; COL23A1; ENSG00000050767; TAA
EQGDTVVIDY

SEQ ID NO: 16580 - protein, 10 aa, Homo sapiens
  misc_feature: Table A; Target 16580; HLA-B*44:02; COL23A1; ENSG00000050767; TAA
EQGDTVVIDY

SEQ ID NO: 16581 - protein, 10 aa, Homo sapiens
  misc_feature: Table A; Target 16581; HLA-B*44:03; COL23A1; ENSG00000050767; TAA
EQGDTVVIDY

SEQ ID NO: 16582 - protein, 10 aa, Homo sapiens
  misc_feature: Table A; Target 16582; HLA-C*07:04; COL23A1; ENSG00000050767; TAA
EQGDTVVIDY

SEQ ID NO: 16583 - protein, 9 aa, Homo sapiens
  misc_feature: Table A; Target 16583; HLA-B*39:01; COL23A1; ENSG00000050767; TAA
ERAGGGGDA

SEQ ID NO: 16584 - protein, 10 aa, Homo sapiens
  misc_feature: Table A; Target 16584; HLA-B*39:01; COL23A1; ENSG00000050767; TAA
ERAGGGGDAG

SEQ ID NO: 16585 - protein, 11 aa, Homo sapiens
  misc_feature: Table A; Target 16585; HLA-A*68:01; COL23A1; ENSG00000050767; TAA
ESASDSLQESL

SEQ ID NO: 16586 - protein, 9 aa, Homo sapiens
  misc_feature: Table A; Target 16586; HLA-B*27:05; COL23A1; ENSG00000050767; TAA
GAAGPPGPP

SEQ ID NO: 16587 - protein, 9 aa, Homo sapiens
  misc_feature: Table A; Target 16587; HLA-C*06:02; COL23A1; ENSG00000050767; TAA
GAAGPPGPP

SEQ ID NO: 16588 - protein, 9 aa, Homo sapiens
  misc_feature: Table A; Target 16588; HLA-B*07:02; COL23A1; ENSG00000050767; TAA
GAAGPRGAP

SEQ ID NO: 16589 - protein, 9 aa, Homo sapiens
  misc_feature: Table A; Target 16589; HLA-C*07:02; COL23A1; ENSG00000050767; TAA
GAAGPRGAP

SEQ ID NO: 16590 - protein, 9 aa, Homo sapiens
  misc_feature: Table A; Target 16590; HLA-C*16:01; COL23A1; ENSG00000050767; TAA
GAAGPRGAP

SEQ ID NO: 16591 - protein, 9 aa, Homo sapiens
  misc_feature: Table A; Target 16591; HLA-C*07:06; COL23A1; ENSG00000050767; TAA
GAPGDFGPR

SEQ ID NO: 16592 - protein, 9 aa, Homo sapiens
  misc_feature: Table A; Target 16592; HLA-A*03:01; COL23A1; ENSG00000050767; TAA
GAQGPAGPK

SEQ ID NO: 16593 - protein, 9 aa, Homo sapiens
  misc_feature: Table A; Target 16593; HLA-A*03:02; COL23A1; ENSG00000050767; TAA
GAQGPAGPK

SEQ ID NO: 16594 - protein, 9 aa, Homo sapiens
  misc_feature: Table A; Target 16594; HLA-A*11:01; COL23A1; ENSG00000050767; TAA
GAQGPAGPK

SEQ ID NO: 16595 - protein, 9 aa, Homo sapiens
  misc_feature: Table A; Target 16595; HLA-C*07:06; COL23A1; ENSG00000050767; TAA
GAQGPAGPK

SEQ ID NO: 16596 - protein, 8 aa, Homo sapiens
  misc_feature: Table A; Target 16596; HLA-B*18:01; COL23A1; ENSG00000050767; TAA
GDTVVIDY

SEQ ID NO: 16597 - protein, 8 aa, Homo sapiens
  misc_feature: Table A; Target 16597; HLA-B*37:01; COL23A1; ENSG00000050767; TAA
GDTVVIDY

SEQ ID NO: 16598 - protein, 8 aa, Homo sapiens
  misc_feature: Table A; Target 16598; HLA-C*07:04; COL23A1; ENSG00000050767; TAA
GDTVVIDY

SEQ ID NO: 16599 - protein, 8 aa, Homo sapiens
  misc_feature: Table A; Target 16599; HLA-C*16:02; COL23A1; ENSG00000050767; TAA
GDTVVIDY

SEQ ID NO: 16600 - protein, 8 aa, Homo sapiens
  misc_feature: Table A; Target 16600; HLA-B*40:01; COL23A1; ENSG00000050767; TAA
GEAGEMGL

SEQ ID NO: 16601 - protein, 8 aa, Homo sapiens
  misc_feature: Table A; Target 16601; HLA-B*44:03; COL23A1; ENSG00000050767; TAA
GEAGEMGL

SEQ ID NO: 16602 - protein, 11 aa, Homo sapiens
  misc_feature: Table A; Target 16602; HLA-A*30:01; COL23A1; ENSG00000050767; TAA
GEAGEMGLSGL

SEQ ID NO: 16603 - protein, 11 aa, Homo sapiens
  misc_feature: Table A; Target 16603; HLA-B*40:01; COL23A1; ENSG00000050767; TAA
GEAGEMGLSGL

SEQ ID NO: 16604 - protein, 11 aa, Homo sapiens
  misc_feature: Table A; Target 16604; HLA-B*49:01; COL23A1; ENSG00000050767; TAA
GEAGEMGLSGL

SEQ ID NO: 16605 - protein, 11 aa, Homo sapiens
  misc_feature: Table A; Target 16605; HLA-A*30:01; COL23A1; ENSG00000050767; TAA
GEKGESASDSL

SEQ ID NO: 16606 - protein, 11 aa, Homo sapiens
  misc_feature: Table A; Target 16606; HLA-B*39:01; COL23A1; ENSG00000050767; TAA
GEKGESASDSL

SEQ ID NO: 16607 - protein, 11 aa, Homo sapiens
  misc_feature: Table A; Target 16607; HLA-B*40:01; COL23A1; ENSG00000050767; TAA
GEKGESASDSL

SEQ ID NO: 16608 - protein, 11 aa, Homo sapiens
  misc_feature: Table A; Target 16608; HLA-B*40:02; COL23A1; ENSG00000050767; TAA
GEKGESASDSL

SEQ ID NO: 16609 - protein, 9 aa, Homo sapiens
  misc_feature: Table A; Target 16609; HLA-B*40:02; COL23A1; ENSG00000050767; TAA
GELGLPGAP

SEQ ID NO: 16610 - protein, 11 aa, Homo sapiens
  misc_feature: Table A; Target 16610; HLA-B*44:02; COL23A1; ENSG00000050767; TAA
GELGLPGAPGI

SEQ ID NO: 16611 - protein, 11 aa, Homo sapiens
  misc_feature: Table A; Target 16611; HLA-B*44:03; COL23A1; ENSG00000050767; TAA
GELGLPGAPGI

SEQ ID NO: 16612 - protein, 11 aa, Homo sapiens
  misc_feature: Table A; Target 16612; HLA-B*49:01; COL23A1; ENSG00000050767; TAA
GELGLPGAPGI

SEQ ID NO: 16613 - protein, 8 aa, Homo sapiens
  misc_feature: Table A; Target 16613; HLA-B*37:01; COL23A1; ENSG00000050767; TAA
GEMGLSGL

SEQ ID NO: 16614 - protein, 8 aa, Homo sapiens
  misc_feature: Table A; Target 16614; HLA-B*40:01; COL23A1; ENSG00000050767; TAA
GEMGLSGL

SEQ ID NO: 16615 - protein, 8 aa, Homo sapiens
  misc_feature: Table A; Target 16615; HLA-B*49:01; COL23A1; ENSG00000050767; TAA
GEMGLSGL

SEQ ID NO: 16616 - protein, 9 aa, Homo sapiens
  misc_feature: Table A; Target 16616; HLA-B*49:01; COL23A1; ENSG00000050767; TAA
GEMGLSGLP

SEQ ID NO: 16617 - protein, 10 aa, Homo sapiens
  misc_feature: Table A; Target 16617; HLA-B*40:02; COL23A1; ENSG00000050767; TAA
GEMGLSGLPG

SEQ ID NO: 16618 - protein, 10 aa, Homo sapiens
  misc_feature: Table A; Target 16618; HLA-B*49:01; COL23A1; ENSG00000050767; TAA
GEMGLSGLPG

SEQ ID NO: 16619 - protein, 11 aa, Homo sapiens
  misc_feature: Table A; Target 16619; HLA-A*30:01; COL23A1; ENSG00000050767; TAA
GEMGLSGLPGA

SEQ ID NO: 16620 - protein, 9 aa, Homo sapiens
  misc_feature: Table A; Target 16620; HLA-B*40:02; COL23A1; ENSG00000050767; TAA
GEMGPKGPP

SEQ ID NO: 16621 - protein, 10 aa, Homo sapiens
  misc_feature: Table A; Target 16621; HLA-C*04:01; COL23A1; ENSG00000050767; TAA
GEMGPKGPPG

SEQ ID NO: 16622 - protein, 8 aa, Homo sapiens
  misc_feature: Table A; Target 16622; HLA-B*40:01; COL23A1; ENSG00000050767; TAA
GEPGPAGL

SEQ ID NO: 16623 - protein, 8 aa, Homo sapiens
  misc_feature: Table A; Target 16623; HLA-B*37:01; COL23A1; ENSG00000050767; TAA
GEPGPPGL

SEQ ID NO: 16624 - protein, 8 aa, Homo sapiens
  misc_feature: Table A; Target 16624; HLA-B*40:01; COL23A1; ENSG00000050767; TAA
GEPGPPGL

SEQ ID NO: 16625 - protein, 9 aa, Homo sapiens
  misc_feature: Table A; Target 16625; HLA-B*40:01; COL23A1; ENSG00000050767; TAA
GEPGQDGEM

SEQ ID NO: 16626 - protein, 11 aa, Homo sapiens
  misc_feature: Table A; Target 16626; HLA-C*04:01; COL23A1; ENSG00000050767; TAA
GEPGQDGEMGP

SEQ ID NO: 16627 - protein, 9 aa, Homo sapiens
  misc_feature: Table A; Target 16627; HLA-A*30:01; COL23A1; ENSG00000050767; TAA
GEQGDTVVI

SEQ ID NO: 16628 - protein, 9 aa, Homo sapiens
  misc_feature: Table A; Target 16628; HLA-B*13:02; COL23A1; ENSG00000050767; TAA
GEQGDTVVI

SEQ ID NO: 16629 - protein, 9 aa, Homo sapiens
  misc_feature: Table A; Target 16629; HLA-B*40:01; COL23A1; ENSG00000050767; TAA
GEQGDTVVI

SEQ ID NO: 16630 - protein, 9 aa, Homo sapiens
  misc_feature: Table A; Target 16630; HLA-B*40:02; COL23A1; ENSG00000050767; TAA
GEQGDTVVI

SEQ ID NO: 16631 - protein, 9 aa, Homo sapiens
  misc_feature: Table A; Target 16631; HLA-B*44:02; COL23A1; ENSG00000050767; TAA
GEQGDTVVI

SEQ ID NO: 16632 - protein, 9 aa, Homo sapiens
  misc_feature: Table A; Target 16632; HLA-B*44:03; COL23A1; ENSG00000050767; TAA
GEQGDTVVI

SEQ ID NO: 16633 - protein, 9 aa, Homo sapiens
  misc_feature: Table A; Target 16633; HLA-B*49:01; COL23A1; ENSG00000050767; TAA
GEQGDTVVI

SEQ ID NO: 16634 - protein, 11 aa, Homo sapiens
  misc_feature: Table A; Target 16634; HLA-A*30:02; COL23A1; ENSG00000050767; TAA
GEQGDTVVIDY

SEQ ID NO: 16635 - protein, 11 aa, Homo sapiens
  misc_feature: Table A; Target 16635; HLA-B*27:02; COL23A1; ENSG00000050767; TAA
GEQGDTVVIDY

SEQ ID NO: 16636 - protein, 11 aa, Homo sapiens
  misc_feature: Table A; Target 16636; HLA-B*39:01; COL23A1; ENSG00000050767; TAA
GEQGDTVVIDY

SEQ ID NO: 16637 - protein, 11 aa, Homo sapiens
  misc_feature: Table A; Target 16637; HLA-B*44:02; COL23A1; ENSG00000050767; TAA
GEQGDTVVIDY

SEQ ID NO: 16638 - protein, 11 aa, Homo sapiens
  misc_feature: Table A; Target 16638; HLA-B*44:03; COL23A1; ENSG00000050767; TAA
GEQGDTVVIDY

SEQ ID NO: 16639 - protein, 11 aa, Homo sapiens
  misc_feature: Table A; Target 16639; HLA-C*16:04; COL23A1; ENSG00000050767; TAA
GEQGDTVVIDY

SEQ ID NO: 16640 - protein, 11 aa, Homo sapiens
  misc_feature: Table A; Target 16640; HLA-C*06:02; COL23A1; ENSG00000050767; TAA
GERGPSGLPGP

SEQ ID NO: 16641 - protein, 8 aa, Homo sapiens
  misc_feature: Table A; Target 16641; HLA-A*30:01; COL23A1; ENSG00000050767; TAA
GESASDSL

SEQ ID NO: 16642 - protein, 8 aa, Homo sapiens
  misc_feature: Table A; Target 16642; HLA-B*37:01; COL23A1; ENSG00000050767; TAA
GESASDSL

SEQ ID NO: 16643 - protein, 8 aa, Homo sapiens
  misc_feature: Table A; Target 16643; HLA-B*40:01; COL23A1; ENSG00000050767; TAA
GESASDSL

SEQ ID NO: 16644 - protein, 9 aa, Homo sapiens
  misc_feature: Table A; Target 16644; HLA-A*03:02; COL23A1; ENSG00000050767; TAA
GIDGEKGPK

SEQ ID NO: 16645 - protein, 9 aa, Homo sapiens
  misc_feature: Table A; Target 16645; HLA-A*11:01; COL23A1; ENSG00000050767; TAA
GIDGEKGPK

SEQ ID NO: 16646 - protein, 9 aa, Homo sapiens
  misc_feature: Table A; Target 16646; HLA-C*01:02; COL23A1; ENSG00000050767; TAA
GIPGAKGEL

SEQ ID NO: 16647 - protein, 8 aa, Homo sapiens
  misc_feature: Table A; Target 16647; HLA-A*02:03; COL23A1; ENSG00000050767; TAA
GLAKIRTA

SEQ ID NO: 16648 - protein, 9 aa, Homo sapiens
  misc_feature: Table A; Target 16648; HLA-A*03:01; COL23A1; ENSG00000050767; TAA
GLAKIRTAR

SEQ ID NO: 16649 - protein, 9 aa, Homo sapiens
  misc_feature: Table A; Target 16649; HLA-A*03:02; COL23A1; ENSG00000050767; TAA
GLDGAKGEK

SEQ ID NO: 16650 - protein, 9 aa, Homo sapiens
  misc_feature: Table A; Target 16650; HLA-A*03:01; COL23A1; ENSG00000050767; TAA
GLIGLPGTK

SEQ ID NO: 16651 - protein, 9 aa, Homo sapiens
  misc_feature: Table A; Target 16651; HLA-A*03:02; COL23A1; ENSG00000050767; TAA
GLIGLPGTK

SEQ ID NO: 16652 - protein, 9 aa, Homo sapiens
  misc_feature: Table A; Target 16652; HLA-B*15:01; COL23A1; ENSG00000050767; TAA
GLKGEAGEM

SEQ ID NO: 16653 - protein, 9 aa, Homo sapiens
  misc_feature: Table A; Target 16653; HLA-B*46:01; COL23A1; ENSG00000050767; TAA
GLKGEAGEM

SEQ ID NO: 16654 - protein, 11 aa, Homo sapiens
  misc_feature: Table A; Target 16654; HLA-A*02:01; COL23A1; ENSG00000050767; TAA
GLKGEAGEMGL

SEQ ID NO: 16655 - protein, 11 aa, Homo sapiens
  misc_feature: Table A; Target 16655; HLA-A*02:03; COL23A1; ENSG00000050767; TAA
GLKGEAGEMGL

SEQ ID NO: 16656 - protein, 10 aa, Homo sapiens
  misc_feature: Table A; Target 16656; HLA-A*02:03; COL23A1; ENSG00000050767; TAA
GLKGEQGDTV

SEQ ID NO: 16657 - protein, 11 aa, Homo sapiens
  misc_feature: Table A; Target 16657; HLA-A*02:07; COL23A1; ENSG00000050767; TAA
GLPGPVGPPGL

SEQ ID NO: 16658 - protein, 9 aa, Homo sapiens
  misc_feature: Table A; Target 16658; HLA-A*03:01; COL23A1; ENSG00000050767; TAA
GLQGIQGPK

SEQ ID NO: 16659 - protein, 9 aa, Homo sapiens
  misc_feature: Table A; Target 16659; HLA-A*03:02; COL23A1; ENSG00000050767; TAA
GLQGIQGPK

SEQ ID NO: 16660 - protein, 9 aa, Homo sapiens
  misc_feature: Table A; Target 16660; HLA-A*11:01; COL23A1; ENSG00000050767; TAA
GLQGIQGPK

SEQ ID NO: 16661 - protein, 9 aa, Homo sapiens
  misc_feature: Table A; Target 16661; HLA-B*27:05; COL23A1; ENSG00000050767; TAA
GLQGIQGPK

SEQ ID NO: 16662 - protein, 9 aa, Homo sapiens
  misc_feature: Table A; Target 16662; HLA-B*56:01; COL23A1; ENSG00000050767; TAA
GPAGLKGEA

SEQ ID NO: 16663 - protein, 9 aa, Homo sapiens
  misc_feature: Table A; Target 16663; HLA-B*07:02; COL23A1; ENSG00000050767; TAA
GPAGPKGEP

SEQ ID NO: 16664 - protein, 9 aa, Homo sapiens
  misc_feature: Table A; Target 16664; HLA-C*07:02; COL23A1; ENSG00000050767; TAA
GPAGPKGEP

SEQ ID NO: 16665 - protein, 9 aa, Homo sapiens
  misc_feature: Table A; Target 16665; HLA-B*07:02; COL23A1; ENSG00000050767; TAA
GPKGEPGSM

SEQ ID NO: 16666 - protein, 9 aa, Homo sapiens
  misc_feature: Table A; Target 16666; HLA-C*07:02; COL23A1; ENSG00000050767; TAA
GPKGEPGSM

SEQ ID NO: 16667 - protein, 9 aa, Homo sapiens
  misc_feature: Table A; Target 16667; HLA-C*07:02; COL23A1; ENSG00000050767; TAA
GPKGPPGPK

SEQ ID NO: 16668 - protein, 10 aa, Homo sapiens
  misc_feature: Table A; Target 16668; HLA-B*56:01; COL23A1; ENSG00000050767; TAA
GPMGLQGIQG

SEQ ID NO: 16669 - protein, 9 aa, Homo sapiens
  misc_feature: Table A; Target 16669; HLA-B*07:02; COL23A1; ENSG00000050767; TAA
GPPGPPGPM

SEQ ID NO: 16670 - protein, 9 aa, Homo sapiens
  misc_feature: Table A; Target 16670; HLA-C*07:02; COL23A1; ENSG00000050767; TAA
GPPGPPGPM

SEQ ID NO: 16671 - protein, 8 aa, Homo sapiens
  misc_feature: Table A; Target 16671; HLA-B*07:02; COL23A1; ENSG00000050767; TAA
GPRGAPGL

SEQ ID NO: 16672 - protein, 8 aa, Homo sapiens
  misc_feature: Table A; Target 16672; HLA-C*07:02; COL23A1; ENSG00000050767; TAA
GPRGAPGL

SEQ ID NO: 16673 - protein, 9 aa, Homo sapiens
  misc_feature: Table A; Target 16673; HLA-B*07:02; COL23A1; ENSG00000050767; TAA
GPRGAPGLK

SEQ ID NO: 16674 - protein, 10 aa, Homo sapiens
  misc_feature: Table A; Target 16674; HLA-B*07:02; COL23A1; ENSG00000050767; TAA
GPRGAPGLKG

SEQ ID NO: 16675 - protein, 9 aa, Homo sapiens
  misc_feature: Table A; Target 16675; HLA-B*07:02; COL23A1; ENSG00000050767; TAA
GPRGAQGPA

SEQ ID NO: 16676 - protein, 9 aa, Homo sapiens
  misc_feature: Table A; Target 16676; HLA-C*07:02; COL23A1; ENSG00000050767; TAA
GPRGAQGPA

SEQ ID NO: 16677 - protein, 11 aa, Homo sapiens
  misc_feature: Table A; Target 16677; HLA-B*07:02; COL23A1; ENSG00000050767; TAA
GPRGAQGPAGP

SEQ ID NO: 16678 - protein, 11 aa, Homo sapiens
  misc_feature: Table A; Target 16678; HLA-C*07:02; COL23A1; ENSG00000050767; TAA
GPRGAQGPAGP

SEQ ID NO: 16679 - protein, 9 aa, Homo sapiens
  misc_feature: Table A; Target 16679; HLA-B*07:02; COL23A1; ENSG00000050767; TAA
GPSGLPGPV

SEQ ID NO: 16680 - protein, 9 aa, Homo sapiens
  misc_feature: Table A; Target 16680; HLA-B*56:01; COL23A1; ENSG00000050767; TAA
GPSGLPGPV

SEQ ID NO: 16681 - protein, 10 aa, Homo sapiens
  misc_feature: Table A; Target 16681; HLA-B*56:01; COL23A1; ENSG00000050767; TAA
GPSGLPGPVG

SEQ ID NO: 16682 - protein, 11 aa, Homo sapiens
  misc_feature: Table A; Target 16682; HLA-B*56:01; COL23A1; ENSG00000050767; TAA
GPVGPPGLIGL

SEQ ID NO: 16683 - protein, 9 aa, Homo sapiens
  misc_feature: Table A; Target 16683; HLA-C*07:04; COL23A1; ENSG00000050767; TAA
GQKGEPGPP

SEQ ID NO: 16684 - protein, 11 aa, Homo sapiens
  misc_feature: Table A; Target 16684; HLA-B*27:05; COL23A1; ENSG00000050767; TAA
GRDGYPGPLGL

SEQ ID NO: 16685 - protein, 9 aa, Homo sapiens
  misc_feature: Table A; Target 16685; HLA-B*27:05; COL23A1; ENSG00000050767; TAA
GRSATTAGS

SEQ ID NO: 16686 - protein, 10 aa, Homo sapiens
  misc_feature: Table A; Target 16686; HLA-B*27:05; COL23A1; ENSG00000050767; TAA
GRSATTAGSR

SEQ ID NO: 16687 - protein, 10 aa, Homo sapiens
  misc_feature: Table A; Target 16687; HLA-B*27:02; COL23A1; ENSG00000050767; TAA
GRVAALEEER

SEQ ID NO: 16688 - protein, 10 aa, Homo sapiens
  misc_feature: Table A; Target 16688; HLA-B*27:05; COL23A1; ENSG00000050767; TAA
GRVAALEEER

SEQ ID NO: 16689 - protein, 9 aa, Homo sapiens
  misc_feature: Table A; Target 16689; HLA-A*03:01; COL23A1; ENSG00000050767; TAA
GTDGAAGPR

SEQ ID NO: 16690 - protein, 9 aa, Homo sapiens
  misc_feature: Table A; Target 16690; HLA-A*03:02; COL23A1; ENSG00000050767; TAA
GTDGAAGPR

SEQ ID NO: 16691 - protein, 9 aa, Homo sapiens
  misc_feature: Table A; Target 16691; HLA-A*11:01; COL23A1; ENSG00000050767; TAA
GTDGAAGPR

SEQ ID NO: 16692 - protein, 9 aa, Homo sapiens
  misc_feature: Table A; Target 16692; HLA-A*31:01; COL23A1; ENSG00000050767; TAA
GTDGAAGPR

SEQ ID NO: 16693 - protein, 9 aa, Homo sapiens
  misc_feature: Table A; Target 16693; HLA-A*33:03; COL23A1; ENSG00000050767; TAA
GTDGAAGPR

SEQ ID NO: 16694 - protein, 9 aa, Homo sapiens
  misc_feature: Table A; Target 16694; HLA-A*68:01; COL23A1; ENSG00000050767; TAA
GTDGAAGPR

SEQ ID NO: 16695 - protein, 9 aa, Homo sapiens
  misc_feature: Table A; Target 16695; HLA-C*07:06; COL23A1; ENSG00000050767; TAA
GTDGAAGPR

SEQ ID NO: 16696 - protein, 10 aa, Homo sapiens
  misc_feature: Table A; Target 16696; HLA-A*11:01; COL23A1; ENSG00000050767; TAA
GTPSQPGPPG

SEQ ID NO: 16697 - protein, 9 aa, Homo sapiens
  misc_feature: Table A; Target 16697; HLA-A*03:01; COL23A1; ENSG00000050767; TAA
GVDGAPGPK

SEQ ID NO: 16698 - protein, 9 aa, Homo sapiens
  misc_feature: Table A; Target 16698; HLA-A*03:02; COL23A1; ENSG00000050767; TAA
GVDGAPGPK

SEQ ID NO: 16699 - protein, 9 aa, Homo sapiens
  misc_feature: Table A; Target 16699; HLA-A*11:01; COL23A1; ENSG00000050767; TAA
GVDGAPGPK

SEQ ID NO: 16700 - protein, 9 aa, Homo sapiens
  misc_feature: Table A; Target 16700; HLA-A*68:01; COL23A1; ENSG00000050767; TAA
GVDGAPGPK

SEQ ID NO: 16701 - protein, 9 aa, Homo sapiens
  misc_feature: Table A; Target 16701; HLA-C*05:01; COL23A1; ENSG00000050767; TAA
GVDGAPGPK

SEQ ID NO: 16702 - protein, 10 aa, Homo sapiens
  misc_feature: Table A; Target 16702; HLA-A*03:02; COL23A1; ENSG00000050767; TAA
GVQAAALQGR

SEQ ID NO: 16703 - protein, 10 aa, Homo sapiens
  misc_feature: Table A; Target 16703; HLA-A*11:01; COL23A1; ENSG00000050767; TAA
GVQAAALQGR

SEQ ID NO: 16704 - protein, 10 aa, Homo sapiens
  misc_feature: Table A; Target 16704; HLA-A*31:01; COL23A1; ENSG00000050767; TAA
GVQAAALQGR

SEQ ID NO: 16705 - protein, 10 aa, Homo sapiens
  misc_feature: Table A; Target 16705; HLA-A*33:03; COL23A1; ENSG00000050767; TAA
GVQAAALQGR

SEQ ID NO: 16706 - protein, 10 aa, Homo sapiens
  misc_feature: Table A; Target 16706; HLA-A*68:01; COL23A1; ENSG00000050767; TAA
GVQAAALQGR

SEQ ID NO: 16707 - protein, 10 aa, Homo sapiens
  misc_feature: Table A; Target 16707; HLA-C*07:06; COL23A1; ENSG00000050767; TAA
GVQAAALQGR

SEQ ID NO: 16708 - protein, 8 aa, Homo sapiens
  misc_feature: Table A; Target 16708; HLA-C*03:04; COL23A1; ENSG00000050767; TAA
IDYDGRIL

SEQ ID NO: 16709 - protein, 11 aa, Homo sapiens
  misc_feature: Table A; Target 16709; HLA-A*30:01; COL23A1; ENSG00000050767; TAA
IDYDGRILDAL

SEQ ID NO: 16710 - protein, 11 aa, Homo sapiens
  misc_feature: Table A; Target 16710; HLA-B*40:01; COL23A1; ENSG00000050767; TAA
IDYDGRILDAL

SEQ ID NO: 16711 - protein, 11 aa, Homo sapiens
  misc_feature: Table A; Target 16711; HLA-B*40:02; COL23A1; ENSG00000050767; TAA
IDYDGRILDAL

SEQ ID NO: 16712 - protein, 11 aa, Homo sapiens
  misc_feature: Table A; Target 16712; HLA-C*06:02; COL23A1; ENSG00000050767; TAA
IDYDGRILDAL

SEQ ID NO: 16713 - protein, 8 aa, Homo sapiens
  misc_feature: Table A; Target 16713; HLA-B*07:02; COL23A1; ENSG00000050767; TAA
IPGAKGEL

SEQ ID NO: 16714 - protein, 8 aa, Homo sapiens
  misc_feature: Table A; Target 16714; HLA-B*08:01; COL23A1; ENSG00000050767; TAA
IPGAKGEL

SEQ ID NO: 16715 - protein, 8 aa, Homo sapiens
  misc_feature: Table A; Target 16715; HLA-C*07:02; COL23A1; ENSG00000050767; TAA
IPGAKGEL

SEQ ID NO: 16716 - protein, 10 aa, Homo sapiens
  misc_feature: Table A; Target 16716; HLA-B*07:02; COL23A1; ENSG00000050767; TAA
IVEPGPPGPP

SEQ ID NO: 16717 - protein, 10 aa, Homo sapiens
  misc_feature: Table A; Target 16717; HLA-B*27:05; COL23A1; ENSG00000050767; TAA
IVEPGPPGPP

SEQ ID NO: 16718 - protein, 10 aa, Homo sapiens
  misc_feature: Table A; Target 16718; HLA-C*04:01; COL23A1; ENSG00000050767; TAA
IVEPGPPGPP

SEQ ID NO: 16719 - protein, 10 aa, Homo sapiens
  misc_feature: Table A; Target 16719; HLA-C*05:01; COL23A1; ENSG00000050767; TAA
IVEPGPPGPP

SEQ ID NO: 16720 - protein, 10 aa, Homo sapiens
  misc_feature: Table A; Target 16720; HLA-C*06:02; COL23A1; ENSG00000050767; TAA
IVEPGPPGPP

SEQ ID NO: 16721 - protein, 10 aa, Homo sapiens
  misc_feature: Table A; Target 16721; HLA-C*07:02; COL23A1; ENSG00000050767; TAA
IVEPGPPGPP

SEQ ID NO: 16722 - protein, 10 aa, Homo sapiens
  misc_feature: Table A; Target 16722; HLA-C*07:04; COL23A1; ENSG00000050767; TAA
IVEPGPPGPP

SEQ ID NO: 16723 - protein, 10 aa, Homo sapiens
  misc_feature: Table A; Target 16723; HLA-A*31:01; COL23A1; ENSG00000050767; TAA
KGAPGDFGPR

SEQ ID NO: 16724 - protein, 9 aa, Homo sapiens
  misc_feature: Table A; Target 16724; HLA-A*32:01; COL23A1; ENSG00000050767; TAA
KGASGERGP

SEQ ID NO: 16725 - protein, 9 aa, Homo sapiens
  misc_feature: Table A; Target 16725; HLA-A*03:02; COL23A1; ENSG00000050767; TAA
KGEPGVPGK

SEQ ID NO: 16726 - protein, 9 aa, Homo sapiens
  misc_feature: Table A; Target 16726; HLA-A*32:01; COL23A1; ENSG00000050767; TAA
KGPPGPQGP

SEQ ID NO: 16727 - protein, 10 aa, Homo sapiens
  misc_feature: Table A; Target 16727; HLA-C*04:01; COL23A1; ENSG00000050767; TAA
KGPPGPQGPP

SEQ ID NO: 16728 - protein, 10 aa, Homo sapiens
  misc_feature: Table A; Target 16728; HLA-C*06:02; COL23A1; ENSG00000050767; TAA
KGPPGPQGPP

SEQ ID NO: 16729 - protein, 10 aa, Homo sapiens
  misc_feature: Table A; Target 16729; HLA-C*07:02; COL23A1; ENSG00000050767; TAA
KGPPGPQGPP

SEQ ID NO: 16730 - protein, 11 aa, Homo sapiens
  misc_feature: Table A; Target 16730; HLA-C*06:02; COL23A1; ENSG00000050767; TAA
KGPPGPQGPPG

SEQ ID NO: 16731 - protein, 8 aa, Homo sapiens
  misc_feature: Table A; Target 16731; HLA-A*02:07; COL23A1; ENSG00000050767; TAA
KLDGLAKI

SEQ ID NO: 16732 - protein, 8 aa, Homo sapiens
  misc_feature: Table A; Target 16732; HLA-B*40:01; COL23A1; ENSG00000050767; TAA
LEEERELL

SEQ ID NO: 16733 - protein, 9 aa, Homo sapiens
  misc_feature: Table A; Target 16733; HLA-A*02:01; COL23A1; ENSG00000050767; TAA
LGLPGAPGI

SEQ ID NO: 16734 - protein, 9 aa, Homo sapiens
  misc_feature: Table A; Target 16734; HLA-B*13:02; COL23A1; ENSG00000050767; TAA
LGLPGAPGI

SEQ ID NO: 16735 - protein, 9 aa, Homo sapiens
  misc_feature: Table A; Target 16735; HLA-B*51:01; COL23A1; ENSG00000050767; TAA
LGLPGAPGI

SEQ ID NO: 16736 - protein, 8 aa, Homo sapiens
  misc_feature: Table A; Target 16736; HLA-C*03:03; COL23A1; ENSG00000050767; TAA
LGVQAAAL

SEQ ID NO: 16737 - protein, 8 aa, Homo sapiens
  misc_feature: Table A; Target 16737; HLA-C*03:04; COL23A1; ENSG00000050767; TAA
LGVQAAAL

SEQ ID NO: 16738 - protein, 8 aa, Homo sapiens
  misc_feature: Table A; Target 16738; HLA-C*16:01; COL23A1; ENSG00000050767; TAA
LGVQAAAL

SEQ ID NO: 16739 - protein, 9 aa, Homo sapiens
  misc_feature: Table A; Target 16739; HLA-C*03:03; COL23A1; ENSG00000050767; TAA
LIVEPGPPG

SEQ ID NO: 16740 - protein, 9 aa, Homo sapiens
  misc_feature: Table A; Target 16740; HLA-C*03:04; COL23A1; ENSG00000050767; TAA
LIVEPGPPG

SEQ ID NO: 16741 - protein, 9 aa, Homo sapiens
  misc_feature: Table A; Target 16741; HLA-A*02:03; COL23A1; ENSG00000050767; TAA
LLGVQAAAL

SEQ ID NO: 16742 - protein, 9 aa, Homo sapiens
  misc_feature: Table A; Target 16742; HLA-A*02:04; COL23A1; ENSG00000050767; TAA
LLGVQAAAL

SEQ ID NO: 16743 - protein, 9 aa, Homo sapiens
  misc_feature: Table A; Target 16743; HLA-B*08:01; COL23A1; ENSG00000050767; TAA
LLGVQAAAL

SEQ ID NO: 16744 - protein, 9 aa, Homo sapiens
  misc_feature: Table A; Target 16744; HLA-C*01:02; COL23A1; ENSG00000050767; TAA
LLGVQAAAL

SEQ ID NO: 16745 - protein, 9 aa, Homo sapiens
  misc_feature: Table A; Target 16745; HLA-C*07:02; COL23A1; ENSG00000050767; TAA
LLGVQAAAL

SEQ ID NO: 16746 - protein, 9 aa, Homo sapiens
  misc_feature: Table A; Target 16746; HLA-C*07:04; COL23A1; ENSG00000050767; TAA
LLGVQAAAL

SEQ ID NO: 16747 - protein, 9 aa, Homo sapiens
  misc_feature: Table A; Target 16747; HLA-C*14:02; COL23A1; ENSG00000050767; TAA
LLGVQAAAL

SEQ ID NO: 16748 - protein, 8 aa, Homo sapiens
  misc_feature: Table A; Target 16748; HLA-A*02:01; COL23A1; ENSG00000050767; TAA
LLLGVQAA

SEQ ID NO: 16749 - protein, 9 aa, Homo sapiens
  misc_feature: Table A; Target 16749; HLA-A*02:01; COL23A1; ENSG00000050767; TAA
LLLGVQAAA

SEQ ID NO: 16750 - protein, 9 aa, Homo sapiens
  misc_feature: Table A; Target 16750; HLA-A*02:04; COL23A1; ENSG00000050767; TAA
LLLGVQAAA

SEQ ID NO: 16751 - protein, 9 aa, Homo sapiens
  misc_feature: Table A; Target 16751; HLA-B*54:01; COL23A1; ENSG00000050767; TAA
LLLGVQAAA

SEQ ID NO: 16752 - protein, 10 aa, Homo sapiens
  misc_feature: Table A; Target 16752; HLA-A*02:04; COL23A1; ENSG00000050767; TAA
LLLGVQAAAL

SEQ ID NO: 16753 - protein, 10 aa, Homo sapiens
  misc_feature: Table A; Target 16753; HLA-A*02:07; COL23A1; ENSG00000050767; TAA
LLLGVQAAAL

SEQ ID NO: 16754 - protein, 10 aa, Homo sapiens
  misc_feature: Table A; Target 16754; HLA-C*07:02; COL23A1; ENSG00000050767; TAA
LLLGVQAAAL

SEQ ID NO: 16755 - protein, 10 aa, Homo sapiens
  misc_feature: Table A; Target 16755; HLA-C*07:04; COL23A1; ENSG00000050767; TAA
LLLGVQAAAL

SEQ ID NO: 16756 - protein, 9 aa, Homo sapiens
  misc_feature: Table A; Target 16756; HLA-A*02:01; COL23A1; ENSG00000050767; TAA
LLLSVGSAA

SEQ ID NO: 16757 - protein, 9 aa, Homo sapiens
  misc_feature: Table A; Target 16757; HLA-A*02:03; COL23A1; ENSG00000050767; TAA
LLLSVGSAA

SEQ ID NO: 16758 - protein, 9 aa, Homo sapiens
  misc_feature: Table A; Target 16758; HLA-B*54:01; COL23A1; ENSG00000050767; TAA
LLLSVGSAA

SEQ ID NO: 16759 - protein, 9 aa, Homo sapiens
  misc_feature: Table A; Target 16759; HLA-B*55:01; COL23A1; ENSG00000050767; TAA
LLLSVGSAA

SEQ ID NO: 16760 - protein, 9 aa, Homo sapiens
  misc_feature: Table A; Target 16760; HLA-C*03:03; COL23A1; ENSG00000050767; TAA
LLLSVGSAA

SEQ ID NO: 16761 - protein, 9 aa, Homo sapiens
  misc_feature: Table A; Target 16761; HLA-C*14:02; COL23A1; ENSG00000050767; TAA
LLLSVGSAA

SEQ ID NO: 16762 - protein, 10 aa, Homo sapiens
  misc_feature: Table A; Target 16762; HLA-A*02:01; COL23A1; ENSG00000050767; TAA
LLLSVGSAAA

SEQ ID NO: 16763 - protein, 10 aa, Homo sapiens
  misc_feature: Table A; Target 16763; HLA-A*02:03; COL23A1; ENSG00000050767; TAA
LLLSVGSAAA

SEQ ID NO: 16764 - protein, 9 aa, Homo sapiens
  misc_feature: Table A; Target 16764; HLA-A*02:03; COL23A1; ENSG00000050767; TAA
LLREKLDGL

SEQ ID NO: 16765 - protein, 9 aa, Homo sapiens
  misc_feature: Table A; Target 16765; HLA-A*02:04; COL23A1; ENSG00000050767; TAA
LLREKLDGL

SEQ ID NO: 16766 - protein, 9 aa, Homo sapiens
  misc_feature: Table A; Target 16766; HLA-A*02:07; COL23A1; ENSG00000050767; TAA
LLREKLDGL

SEQ ID NO: 16767 - protein, 9 aa, Homo sapiens
  misc_feature: Table A; Target 16767; HLA-B*08:01; COL23A1; ENSG00000050767; TAA
LLREKLDGL

SEQ ID NO: 16768 - protein, 8 aa, Homo sapiens
  misc_feature: Table A; Target 16768; HLA-C*01:02; COL23A1; ENSG00000050767; TAA
LLSVGSAA

SEQ ID NO: 16769 - protein, 8 aa, Homo sapiens
  misc_feature: Table A; Target 16769; HLA-C*14:02; COL23A1; ENSG00000050767; TAA
LLSVGSAA

SEQ ID NO: 16770 - protein, 9 aa, Homo sapiens
  misc_feature: Table A; Target 16770; HLA-A*02:01; COL23A1; ENSG00000050767; TAA
LLSVGSAAA

SEQ ID NO: 16771 - protein, 9 aa, Homo sapiens
  misc_feature: Table A; Target 16771; HLA-A*02:03; COL23A1; ENSG00000050767; TAA
LLSVGSAAA

SEQ ID NO: 16772 - protein, 9 aa, Homo sapiens
  misc_feature: Table A; Target 16772; HLA-B*39:01; COL23A1; ENSG00000050767; TAA
LLSVGSAAA

SEQ ID NO: 16773 - protein, 9 aa, Homo sapiens
  misc_feature: Table A; Target 16773; HLA-C*14:02; COL23A1; ENSG00000050767; TAA
LLSVGSAAA

SEQ ID NO: 16774 - protein, 9 aa, Homo sapiens
  misc_feature: Table A; Target 16774; HLA-B*07:02; COL23A1; ENSG00000050767; TAA
LPGPVGPPG

SEQ ID NO: 16775 - protein, 9 aa, Homo sapiens
  misc_feature: Table A; Target 16775; HLA-B*35:01; COL23A1; ENSG00000050767; TAA
LPGPVGPPG

SEQ ID NO: 16776 - protein, 9 aa, Homo sapiens
  misc_feature: Table A; Target 16776; HLA-B*35:03; COL23A1; ENSG00000050767; TAA
LPGPVGPPG

SEQ ID NO: 16777 - protein, 9 aa, Homo sapiens
  misc_feature: Table A; Target 16777; HLA-B*54:01; COL23A1; ENSG00000050767; TAA
LPGPVGPPG

SEQ ID NO: 16778 - protein, 9 aa, Homo sapiens
  misc_feature: Table A; Target 16778; HLA-B*56:01; COL23A1; ENSG00000050767; TAA
LPGPVGPPG

SEQ ID NO: 16779 - protein, 9 aa, Homo sapiens
  misc_feature: Table A; Target 16779; HLA-C*04:01; COL23A1; ENSG00000050767; TAA
LPGPVGPPG

SEQ ID NO: 16780 - protein, 10 aa, Homo sapiens
  misc_feature: Table A; Target 16780; HLA-B*07:02; COL23A1; ENSG00000050767; TAA
LPGPVGPPGL

SEQ ID NO: 16781 - protein, 10 aa, Homo sapiens
  misc_feature: Table A; Target 16781; HLA-B*35:03; COL23A1; ENSG00000050767; TAA
LPGPVGPPGL

SEQ ID NO: 16782 - protein, 10 aa, Homo sapiens
  misc_feature: Table A; Target 16782; HLA-B*56:01; COL23A1; ENSG00000050767; TAA
LPGPVGPPGL

SEQ ID NO: 16783 - protein, 8 aa, Homo sapiens
  misc_feature: Table A; Target 16783; HLA-C*05:01; COL23A1; ENSG00000050767; TAA
LQESLAQL

SEQ ID NO: 16784 - protein, 9 aa, Homo sapiens
  misc_feature: Table A; Target 16784; HLA-B*13:02; COL23A1; ENSG00000050767; TAA
LQESLAQLI

SEQ ID NO: 16785 - protein, 9 aa, Homo sapiens
  misc_feature: Table A; Target 16785; HLA-B*38:01; COL23A1; ENSG00000050767; TAA
LQESLAQLI

SEQ ID NO: 16786 - protein, 9 aa, Homo sapiens
  misc_feature: Table A; Target 16786; HLA-C*07:04; COL23A1; ENSG00000050767; TAA
LQESLAQLI

SEQ ID NO: 16787 - protein, 8 aa, Homo sapiens
  misc_feature: Table A; Target 16787; HLA-A*32:01; COL23A1; ENSG00000050767; TAA
LQGRVAAL

SEQ ID NO: 16788 - protein, 8 aa, Homo sapiens
  misc_feature: Table A; Target 16788; HLA-B*08:01; COL23A1; ENSG00000050767; TAA
LQGRVAAL

SEQ ID NO: 16789 - protein, 8 aa, Homo sapiens
  misc_feature: Table A; Target 16789; HLA-B*15:01; COL23A1; ENSG00000050767; TAA
LQGRVAAL

SEQ ID NO: 16790 - protein, 8 aa, Homo sapiens
  misc_feature: Table A; Target 16790; HLA-C*07:04; COL23A1; ENSG00000050767; TAA
LQGRVAAL

SEQ ID NO: 16791 - protein, 8 aa, Homo sapiens
  misc_feature: Table A; Target 16791; HLA-C*12:03; COL23A1; ENSG00000050767; TAA
LQGRVAAL

SEQ ID NO: 16792 - protein, 10 aa, Homo sapiens
  misc_feature: Table A; Target 16792; HLA-C*07:02; COL23A1; ENSG00000050767; TAA
LSGLPGADGL

SEQ ID NO: 16793 - protein, 9 aa, Homo sapiens
  misc_feature: Table A; Target 16793; HLA-C*03:03; COL23A1; ENSG00000050767; TAA
LSVGSAAAC

SEQ ID NO: 16794 - protein, 9 aa, Homo sapiens
  misc_feature: Table A; Target 16794; HLA-C*03:04; COL23A1; ENSG00000050767; TAA
LSVGSAAAC

SEQ ID NO: 16795 - protein, 10 aa, Homo sapiens
  misc_feature: Table A; Target 16795; HLA-B*07:02; COL23A1; ENSG00000050767; TAA
LSVGSAAACL

SEQ ID NO: 16796 - protein, 9 aa, Homo sapiens
  misc_feature: Table A; Target 16796; HLA-B*54:01; COL23A1; ENSG00000050767; TAA
MGLSGLPGA

SEQ ID NO: 16797 - protein, 9 aa, Homo sapiens
  misc_feature: Table A; Target 16797; HLA-B*56:01; COL23A1; ENSG00000050767; TAA
MGLSGLPGA

SEQ ID NO: 16798 - protein, 10 aa, Homo sapiens
  misc_feature: Table A; Target 16798; HLA-C*07:02; COL23A1; ENSG00000050767; TAA
MGPKGPPGPK

SEQ ID NO: 16799 - protein, 10 aa, Homo sapiens
  misc_feature: Table A; Target 16799; HLA-A*33:01; COL23A1; ENSG00000050767; TAA
NAAGGGGGGR

SEQ ID NO: 16800 - protein, 10 aa, Homo sapiens
  misc_feature: Table A; Target 16800; HLA-A*33:03; COL23A1; ENSG00000050767; TAA
NAAGGGGGGR

SEQ ID NO: 16801 - protein, 10 aa, Homo sapiens
  misc_feature: Table A; Target 16801; HLA-A*68:01; COL23A1; ENSG00000050767; TAA
NAAGGGGGGR

SEQ ID NO: 16802 - protein, 10 aa, Homo sapiens
  misc_feature: Table A; Target 16802; HLA-C*07:06; COL23A1; ENSG00000050767; TAA
NAAGGGGGGR

SEQ ID NO: 16803 - protein, 10 aa, Homo sapiens
  misc_feature: Table A; Target 16803; HLA-B*27:02; COL23A1; ENSG00000050767; TAA
NGVDGAPGPK

SEQ ID NO: 16804 - protein, 10 aa, Homo sapiens
  misc_feature: Table A; Target 16804; HLA-C*07:02; COL23A1; ENSG00000050767; TAA
PGPPGPPGPM

SEQ ID NO: 16805 - protein, 10 aa, Homo sapiens
  misc_feature: Table A; Target 16805; HLA-C*07:02; COL23A1; ENSG00000050767; TAA
PGPPGPPGPP

SEQ ID NO: 16806 - protein, 10 aa, Homo sapiens
  misc_feature: Table A; Target 16806; HLA-B*27:02; COL23A1; ENSG00000050767; TAA
PGQDGEMGPK

SEQ ID NO: 16807 - protein, 10 aa, Homo sapiens
  misc_feature: Table A; Target 16807; HLA-A*03:02; COL23A1; ENSG00000050767; TAA
PSQPGPPGPK

SEQ ID NO: 16808 - protein, 10 aa, Homo sapiens
  misc_feature: Table A; Target 16808; HLA-A*11:01; COL23A1; ENSG00000050767; TAA
PSQPGPPGPK

SEQ ID NO: 16809 - protein, 9 aa, Homo sapiens
  misc_feature: Table A; Target 16809; HLA-C*16:02; COL23A1; ENSG00000050767; TAA
QAAALQGRV

SEQ ID NO: 16810 - protein, 10 aa, Homo sapiens
  misc_feature: Table A; Target 16810; HLA-B*54:01; COL23A1; ENSG00000050767; TAA
QAAALQGRVA

SEQ ID NO: 16811 - protein, 10 aa, Homo sapiens
  misc_feature: Table A; Target 16811; HLA-B*56:01; COL23A1; ENSG00000050767; TAA
QAAALQGRVA

SEQ ID NO: 16812 - protein, 10 aa, Homo sapiens
  misc_feature: Table A; Target 16812; HLA-C*06:02; COL23A1; ENSG00000050767; TAA
QAAALQGRVA

SEQ ID NO: 16813 - protein, 10 aa, Homo sapiens
  misc_feature: Table A; Target 16813; HLA-C*07:01; COL23A1; ENSG00000050767; TAA
QAAALQGRVA

SEQ ID NO: 16814 - protein, 10 aa, Homo sapiens
  misc_feature: Table A; Target 16814; HLA-C*12:03; COL23A1; ENSG00000050767; TAA
QAAALQGRVA

SEQ ID NO: 16815 - protein, 10 aa, Homo sapiens
  misc_feature: Table A; Target 16815; HLA-C*16:01; COL23A1; ENSG00000050767; TAA
QAAALQGRVA

SEQ ID NO: 16816 - protein, 10 aa, Homo sapiens
  misc_feature: Table A; Target 16816; HLA-C*16:02; COL23A1; ENSG00000050767; TAA
QAAALQGRVA

SEQ ID NO: 16817 - protein, 11 aa, Homo sapiens
  misc_feature: Table A; Target 16817; HLA-B*54:01; COL23A1; ENSG00000050767; TAA
QAAALQGRVAA

SEQ ID NO: 16818 - protein, 11 aa, Homo sapiens
  misc_feature: Table A; Target 16818; HLA-B*56:01; COL23A1; ENSG00000050767; TAA
QAAALQGRVAA

SEQ ID NO: 16819 - protein, 8 aa, Homo sapiens
  misc_feature: Table A; Target 16819; HLA-B*13:02; COL23A1; ENSG00000050767; TAA
QESLAQLI

SEQ ID NO: 16820 - protein, 8 aa, Homo sapiens
  misc_feature: Table A; Target 16820; HLA-B*18:01; COL23A1; ENSG00000050767; TAA
QESLAQLI

SEQ ID NO: 16821 - protein, 8 aa, Homo sapiens
  misc_feature: Table A; Target 16821; HLA-B*37:01; COL23A1; ENSG00000050767; TAA
QESLAQLI

SEQ ID NO: 16822 - protein, 8 aa, Homo sapiens
  misc_feature: Table A; Target 16822; HLA-B*44:02; COL23A1; ENSG00000050767; TAA
QESLAQLI

SEQ ID NO: 16823 - protein, 8 aa, Homo sapiens
  misc_feature: Table A; Target 16823; HLA-B*49:01; COL23A1; ENSG00000050767; TAA
QESLAQLI

SEQ ID NO: 16824 - protein, 9 aa, Homo sapiens
  misc_feature: Table A; Target 16824; HLA-A*30:01; COL23A1; ENSG00000050767; TAA
QESLAQLIV

SEQ ID NO: 16825 - protein, 9 aa, Homo sapiens
  misc_feature: Table A; Target 16825; HLA-B*13:02; COL23A1; ENSG00000050767; TAA
QESLAQLIV

SEQ ID NO: 16826 - protein, 9 aa, Homo sapiens
  misc_feature: Table A; Target 16826; HLA-B*18:01; COL23A1; ENSG00000050767; TAA
QESLAQLIV

SEQ ID NO: 16827 - protein, 9 aa, Homo sapiens
  misc_feature: Table A; Target 16827; HLA-B*49:01; COL23A1; ENSG00000050767; TAA
QESLAQLIV

SEQ ID NO: 16828 - protein, 9 aa, Homo sapiens
  misc_feature: Table A; Target 16828; HLA-A*01:01; COL23A1; ENSG00000050767; TAA
QGDTVVIDY

SEQ ID NO: 16829 - protein, 9 aa, Homo sapiens
  misc_feature: Table A; Target 16829; HLA-B*35:01; COL23A1; ENSG00000050767; TAA
QGDTVVIDY

SEQ ID NO: 16830 - protein, 9 aa, Homo sapiens
  misc_feature: Table A; Target 16830; HLA-B*55:01; COL23A1; ENSG00000050767; TAA
QGDTVVIDY

SEQ ID NO: 16831 - protein, 10 aa, Homo sapiens
  misc_feature: Table A; Target 16831; HLA-C*04:01; COL23A1; ENSG00000050767; TAA
QGQDGAAGPP

SEQ ID NO: 16832 - protein, 10 aa, Homo sapiens
  misc_feature: Table A; Target 16832; HLA-C*06:02; COL23A1; ENSG00000050767; TAA
QLIVEPGPPG

SEQ ID NO: 16833 - protein, 8 aa, Homo sapiens
  misc_feature: Table A; Target 16833; HLA-A*32:01; COL23A1; ENSG00000050767; TAA
RAGPPGAL

SEQ ID NO: 16834 - protein, 8 aa, Homo sapiens
  misc_feature: Table A; Target 16834; HLA-B*07:02; COL23A1; ENSG00000050767; TAA
RAGPPGAL

SEQ ID NO: 16835 - protein, 8 aa, Homo sapiens
  misc_feature: Table A; Target 16835; HLA-C*03:04; COL23A1; ENSG00000050767; TAA
RAGPPGAL

SEQ ID NO: 16836 - protein, 8 aa, Homo sapiens
  misc_feature: Table A; Target 16836; HLA-C*05:01; COL23A1; ENSG00000050767; TAA
RAGPPGAL

SEQ ID NO: 16837 - protein, 8 aa, Homo sapiens
  misc_feature: Table A; Target 16837; HLA-C*12:03; COL23A1; ENSG00000050767; TAA
RAGPPGAL

SEQ ID NO: 16838 - protein, 11 aa, Homo sapiens
  misc_feature: Table A; Target 16838; HLA-A*24:02; COL23A1; ENSG00000050767; TAA
RAGPPGALDAW

SEQ ID NO: 16839 - protein, 11 aa, Homo sapiens
  misc_feature: Table A; Target 16839; HLA-A*25:01; COL23A1; ENSG00000050767; TAA
RAGPPGALDAW

SEQ ID NO: 16840 - protein, 11 aa, Homo sapiens
  misc_feature: Table A; Target 16840; HLA-A*30:02; COL23A1; ENSG00000050767; TAA
RAGPPGALDAW

SEQ ID NO: 16841 - protein, 11 aa, Homo sapiens
  misc_feature: Table A; Target 16841; HLA-A*31:01; COL23A1; ENSG00000050767; TAA
RAGPPGALDAW

SEQ ID NO: 16842 - protein, 11 aa, Homo sapiens
  misc_feature: Table A; Target 16842; HLA-A*32:01; COL23A1; ENSG00000050767; TAA
RAGPPGALDAW

SEQ ID NO: 16843 - protein, 11 aa, Homo sapiens
  misc_feature: Table A; Target 16843; HLA-B*44:02; COL23A1; ENSG00000050767; TAA
RAGPPGALDAW

SEQ ID NO: 16844 - protein, 11 aa, Homo sapiens
  misc_feature: Table A; Target 16844; HLA-B*44:03; COL23A1; ENSG00000050767; TAA
RAGPPGALDAW

SEQ ID NO: 16845 - protein, 11 aa, Homo sapiens
  misc_feature: Table A; Target 16845; HLA-B*57:01; COL23A1; ENSG00000050767; TAA
RAGPPGALDAW

SEQ ID NO: 16846 - protein, 11 aa, Homo sapiens
  misc_feature: Table A; Target 16846; HLA-B*58:01; COL23A1; ENSG00000050767; TAA
RAGPPGALDAW

SEQ ID NO: 16847 - protein, 11 aa, Homo sapiens
  misc_feature: Table A; Target 16847; HLA-C*16:04; COL23A1; ENSG00000050767; TAA
RAGPPGALDAW

SEQ ID NO: 16848 - protein, 8 aa, Homo sapiens
  misc_feature: Table A; Target 16848; HLA-C*03:04; COL23A1; ENSG00000050767; TAA
RAVSALCL

SEQ ID NO: 16849 - protein, 8 aa, Homo sapiens
  misc_feature: Table A; Target 16849; HLA-B*37:01; COL23A1; ENSG00000050767; TAA
REAPSECV

SEQ ID NO: 16850 - protein, 8 aa, Homo sapiens
  misc_feature: Table A; Target 16850; HLA-B*49:01; COL23A1; ENSG00000050767; TAA
REAPSECV

SEQ ID NO: 16851 - protein, 9 aa, Homo sapiens
  misc_feature: Table A; Target 16851; HLA-A*30:01; COL23A1; ENSG00000050767; TAA
REAPSECVC

SEQ ID NO: 16852 - protein, 9 aa, Homo sapiens
  misc_feature: Table A; Target 16852; HLA-B*40:01; COL23A1; ENSG00000050767; TAA
REAPSECVC

SEQ ID NO: 16853 - protein, 9 aa, Homo sapiens
  misc_feature: Table A; Target 16853; HLA-B*40:02; COL23A1; ENSG00000050767; TAA
REAPSECVC

SEQ ID NO: 16854 - protein, 10 aa, Homo sapiens
  misc_feature: Table A; Target 16854; HLA-B*40:02; COL23A1; ENSG00000050767; TAA
REKLDGLAKI

SEQ ID NO: 16855 - protein, 10 aa, Homo sapiens
  misc_feature: Table A; Target 16855; HLA-B*44:02; COL23A1; ENSG00000050767; TAA
REKLDGLAKI

SEQ ID NO: 16856 - protein, 10 aa, Homo sapiens
  misc_feature: Table A; Target 16856; HLA-B*49:01; COL23A1; ENSG00000050767; TAA
REKLDGLAKI

SEQ ID NO: 16857 - protein, 10 aa, Homo sapiens
  misc_feature: Table A; Target 16857; HLA-A*03:01; COL23A1; ENSG00000050767; TAA
RGAQGPAGPK

SEQ ID NO: 16858 - protein, 10 aa, Homo sapiens
  misc_feature: Table A; Target 16858; HLA-A*03:02; COL23A1; ENSG00000050767; TAA
RGAQGPAGPK

SEQ ID NO: 16859 - protein, 10 aa, Homo sapiens
  misc_feature: Table A; Target 16859; HLA-C*06:02; COL23A1; ENSG00000050767; TAA
RILDALKGPP

SEQ ID NO: 16860 - protein, 10 aa, Homo sapiens
  misc_feature: Table A; Target 16860; HLA-A*02:04; COL23A1; ENSG00000050767; TAA
RLLREKLDGL

SEQ ID NO: 16861 - protein, 11 aa, Homo sapiens
  misc_feature: Table A; Target 16861; HLA-C*06:02; COL23A1; ENSG00000050767; TAA
RSATTAGSRAV

SEQ ID NO: 16862 - protein, 9 aa, Homo sapiens
  misc_feature: Table A; Target 16862; HLA-A*02:01; COL23A1; ENSG00000050767; TAA
SALCLLLSV

SEQ ID NO: 16863 - protein, 9 aa, Homo sapiens
  misc_feature: Table A; Target 16863; HLA-B*51:01; COL23A1; ENSG00000050767; TAA
SALCLLLSV

SEQ ID NO: 16864 - protein, 10 aa, Homo sapiens
  misc_feature: Table A; Target 16864; HLA-B*35:03; COL23A1; ENSG00000050767; TAA
SASDSLQESL

SEQ ID NO: 16865 - protein, 10 aa, Homo sapiens
  misc_feature: Table A; Target 16865; HLA-B*38:01; COL23A1; ENSG00000050767; TAA
SASDSLQESL

SEQ ID NO: 16866 - protein, 10 aa, Homo sapiens
  misc_feature: Table A; Target 16866; HLA-B*39:01; COL23A1; ENSG00000050767; TAA
SASDSLQESL

SEQ ID NO: 16867 - protein, 10 aa, Homo sapiens
  misc_feature: Table A; Target 16867; HLA-C*07:06; COL23A1; ENSG00000050767; TAA
SASDSLQESL

SEQ ID NO: 16868 - protein, 8 aa, Homo sapiens
  misc_feature: Table A; Target 16868; HLA-C*07:06; COL23A1; ENSG00000050767; TAA
SATTAGSR

SEQ ID NO: 16869 - protein, 9 aa, Homo sapiens
  misc_feature: Table A; Target 16869; HLA-C*16:01; COL23A1; ENSG00000050767; TAA
SATTAGSRA

SEQ ID NO: 16870 - protein, 9 aa, Homo sapiens
  misc_feature: Table A; Target 16870; HLA-C*16:02; COL23A1; ENSG00000050767; TAA
SATTAGSRA

SEQ ID NO: 16871 - protein, 10 aa, Homo sapiens
  misc_feature: Table A; Target 16871; HLA-C*03:04; COL23A1; ENSG00000050767; TAA
SATTAGSRAV

SEQ ID NO: 16872 - protein, 10 aa, Homo sapiens
  misc_feature: Table A; Target 16872; HLA-C*06:02; COL23A1; ENSG00000050767; TAA
SATTAGSRAV

SEQ ID NO: 16873 - protein, 10 aa, Homo sapiens
  misc_feature: Table A; Target 16873; HLA-C*16:01; COL23A1; ENSG00000050767; TAA
SATTAGSRAV

SEQ ID NO: 16874 - protein, 10 aa, Homo sapiens
  misc_feature: Table A; Target 16874; HLA-C*16:02; COL23A1; ENSG00000050767; TAA
SATTAGSRAV

SEQ ID NO: 16875 - protein, 11 aa, Homo sapiens
  misc_feature: Table A; Target 16875; HLA-C*16:01; COL23A1; ENSG00000050767; TAA
SATTAGSRAVS

SEQ ID NO: 16876 - protein, 8 aa, Homo sapiens
  misc_feature: Table A; Target 16876; HLA-B*37:01; COL23A1; ENSG00000050767; TAA
SDSLQESL

SEQ ID NO: 16877 - protein, 8 aa, Homo sapiens
  misc_feature: Table A; Target 16877; HLA-B*38:01; COL23A1; ENSG00000050767; TAA
SDSLQESL

SEQ ID NO: 16878 - protein, 9 aa, Homo sapiens
  misc_feature: Table A; Target 16878; HLA-B*39:01; COL23A1; ENSG00000050767; TAA
SGLPGADGL

SEQ ID NO: 16879 - protein, 9 aa, Homo sapiens
  misc_feature: Table A; Target 16879; HLA-C*01:02; COL23A1; ENSG00000050767; TAA
SGLPGADGL

SEQ ID NO: 16880 - protein, 10 aa, Homo sapiens
  misc_feature: Table A; Target 16880; HLA-A*11:01; COL23A1; ENSG00000050767; TAA
SGLPGADGLK

SEQ ID NO: 16881 - protein, 10 aa, Homo sapiens
  misc_feature: Table A; Target 16881; HLA-B*27:02; COL23A1; ENSG00000050767; TAA
SGLPGADGLK

SEQ ID NO: 16882 - protein, 9 aa, Homo sapiens
  misc_feature: Table A; Target 16882; HLA-A*31:01; COL23A1; ENSG00000050767; TAA
SGLPGPVGP

SEQ ID NO: 16883 - protein, 9 aa, Homo sapiens
  misc_feature: Table A; Target 16883; HLA-A*02:01; COL23A1; ENSG00000050767; TAA
SLQESLAQL

SEQ ID NO: 16884 - protein, 9 aa, Homo sapiens
  misc_feature: Table A; Target 16884; HLA-A*02:03; COL23A1; ENSG00000050767; TAA
SLQESLAQL

SEQ ID NO: 16885 - protein, 9 aa, Homo sapiens
  misc_feature: Table A; Target 16885; HLA-A*02:04; COL23A1; ENSG00000050767; TAA
SLQESLAQL

SEQ ID NO: 16886 - protein, 9 aa, Homo sapiens
  misc_feature: Table A; Target 16886; HLA-A*02:07; COL23A1; ENSG00000050767; TAA
SLQESLAQL

SEQ ID NO: 16887 - protein, 9 aa, Homo sapiens
  misc_feature: Table A; Target 16887; HLA-B*55:01; COL23A1; ENSG00000050767; TAA
SLQESLAQL

SEQ ID NO: 16888 - protein, 9 aa, Homo sapiens
  misc_feature: Table A; Target 16888; HLA-C*01:02; COL23A1; ENSG00000050767; TAA
SLQESLAQL

SEQ ID NO: 16889 - protein, 9 aa, Homo sapiens
  misc_feature: Table A; Target 16889; HLA-C*14:02; COL23A1; ENSG00000050767; TAA
SLQESLAQL

SEQ ID NO: 16890 - protein, 10 aa, Homo sapiens
  misc_feature: Table A; Target 16890; HLA-B*13:02; COL23A1; ENSG00000050767; TAA
SLQESLAQLI

SEQ ID NO: 16891 - protein, 9 aa, Homo sapiens
  misc_feature: Table A; Target 16891; HLA-A*11:01; COL23A1; ENSG00000050767; TAA
SQPGPPGPK

SEQ ID NO: 16892 - protein, 9 aa, Homo sapiens
  misc_feature: Table A; Target 16892; HLA-B*27:05; COL23A1; ENSG00000050767; TAA
SRAVSALCL

SEQ ID NO: 16893 - protein, 9 aa, Homo sapiens
  misc_feature: Table A; Target 16893; HLA-B*07:02; COL23A1; ENSG00000050767; TAA
SVGSAAACL

SEQ ID NO: 16894 - protein, 9 aa, Homo sapiens
  misc_feature: Table A; Target 16894; HLA-B*35:03; COL23A1; ENSG00000050767; TAA
SVGSAAACL

SEQ ID NO: 16895 - protein, 9 aa, Homo sapiens
  misc_feature: Table A; Target 16895; HLA-C*01:02; COL23A1; ENSG00000050767; TAA
SVGSAAACL

SEQ ID NO: 16896 - protein, 9 aa, Homo sapiens
  misc_feature: Table A; Target 16896; HLA-C*07:04; COL23A1; ENSG00000050767; TAA
SVGSAAACL

SEQ ID NO: 16897 - protein, 9 aa, Homo sapiens
  misc_feature: Table A; Target 16897; HLA-B*08:01; COL23A1; ENSG00000050767; TAA
TAGSRAVSA

SEQ ID NO: 16898 - protein, 9 aa, Homo sapiens
  misc_feature: Table A; Target 16898; HLA-B*54:01; COL23A1; ENSG00000050767; TAA
TAGSRAVSA

SEQ ID NO: 16899 - protein, 9 aa, Homo sapiens
  misc_feature: Table A; Target 16899; HLA-B*55:01; COL23A1; ENSG00000050767; TAA
TAGSRAVSA

SEQ ID NO: 16900 - protein, 9 aa, Homo sapiens
  misc_feature: Table A; Target 16900; HLA-B*56:01; COL23A1; ENSG00000050767; TAA
TAGSRAVSA

SEQ ID NO: 16901 - protein, 9 aa, Homo sapiens
  misc_feature: Table A; Target 16901; HLA-C*01:02; COL23A1; ENSG00000050767; TAA
TAGSRAVSA

SEQ ID NO: 16902 - protein, 9 aa, Homo sapiens
  misc_feature: Table A; Target 16902; HLA-C*03:04; COL23A1; ENSG00000050767; TAA
TAGSRAVSA

SEQ ID NO: 16903 - protein, 9 aa, Homo sapiens
  misc_feature: Table A; Target 16903; HLA-C*12:03; COL23A1; ENSG00000050767; TAA
TAGSRAVSA

SEQ ID NO: 16904 - protein, 9 aa, Homo sapiens
  misc_feature: Table A; Target 16904; HLA-C*14:02; COL23A1; ENSG00000050767; TAA
TAGSRAVSA

SEQ ID NO: 16905 - protein, 9 aa, Homo sapiens
  misc_feature: Table A; Target 16905; HLA-C*16:01; COL23A1; ENSG00000050767; TAA
TAGSRAVSA

SEQ ID NO: 16906 - protein, 10 aa, Homo sapiens
  misc_feature: Table A; Target 16906; HLA-B*07:02; COL23A1; ENSG00000050767; TAA
TAGSRAVSAL

SEQ ID NO: 16907 - protein, 10 aa, Homo sapiens
  misc_feature: Table A; Target 16907; HLA-C*01:02; COL23A1; ENSG00000050767; TAA
TAGSRAVSAL

SEQ ID NO: 16908 - protein, 10 aa, Homo sapiens
  misc_feature: Table A; Target 16908; HLA-C*07:02; COL23A1; ENSG00000050767; TAA
TAGSRAVSAL

SEQ ID NO: 16909 - protein, 9 aa, Homo sapiens
  misc_feature: Table A; Target 16909; HLA-C*16:02; COL23A1; ENSG00000050767; TAA
TAREAPSEC

SEQ ID NO: 16910 - protein, 10 aa, Homo sapiens
  misc_feature: Table A; Target 16910; HLA-B*51:01; COL23A1; ENSG00000050767; TAA
TAREAPSECV

SEQ ID NO: 16911 - protein, 9 aa, Homo sapiens
  misc_feature: Table A; Target 16911; HLA-B*07:02; COL23A1; ENSG00000050767; TAA
TPSQPGPPG

SEQ ID NO: 16912 - protein, 9 aa, Homo sapiens
  misc_feature: Table A; Target 16912; HLA-B*56:01; COL23A1; ENSG00000050767; TAA
TPSQPGPPG

SEQ ID NO: 16913 - protein, 9 aa, Homo sapiens
  misc_feature: Table A; Target 16913; HLA-C*04:01; COL23A1; ENSG00000050767; TAA
TPSQPGPPG

SEQ ID NO: 16914 - protein, 8 aa, Homo sapiens
  misc_feature: Table A; Target 16914; HLA-C*06:02; COL23A1; ENSG00000050767; TAA
TTAGSRAV

SEQ ID NO: 16915 - protein, 8 aa, Homo sapiens
  misc_feature: Table A; Target 16915; HLA-C*16:01; COL23A1; ENSG00000050767; TAA
TTAGSRAV

SEQ ID NO: 16916 - protein, 8 aa, Homo sapiens
  misc_feature: Table A; Target 16916; HLA-C*16:02; COL23A1; ENSG00000050767; TAA
TTAGSRAV

SEQ ID NO: 16917 - protein, 10 aa, Homo sapiens
  misc_feature: Table A; Target 16917; HLA-B*56:01; COL23A1; ENSG00000050767; TAA
TTAGSRAVSA

SEQ ID NO: 16918 - protein, 11 aa, Homo sapiens
  misc_feature: Table A; Target 16918; HLA-A*25:01; COL23A1; ENSG00000050767; TAA
TTAGSRAVSAL

SEQ ID NO: 16919 - protein, 11 aa, Homo sapiens
  misc_feature: Table A; Target 16919; HLA-A*68:01; COL23A1; ENSG00000050767; TAA
TTAGSRAVSAL

SEQ ID NO: 16920 - protein, 11 aa, Homo sapiens
  misc_feature: Table A; Target 16920; HLA-A*68:02; COL23A1; ENSG00000050767; TAA
TTAGSRAVSAL

SEQ ID NO: 16921 - protein, 11 aa, Homo sapiens
  misc_feature: Table A; Target 16921; HLA-B*07:02; COL23A1; ENSG00000050767; TAA
TTAGSRAVSAL

SEQ ID NO: 16922 - protein, 11 aa, Homo sapiens
  misc_feature: Table A; Target 16922; HLA-B*27:05; COL23A1; ENSG00000050767; TAA
TTAGSRAVSAL

SEQ ID NO: 16923 - protein, 11 aa, Homo sapiens
  misc_feature: Table A; Target 16923; HLA-C*01:02; COL23A1; ENSG00000050767; TAA
TTAGSRAVSAL

SEQ ID NO: 16924 - protein, 11 aa, Homo sapiens
  misc_feature: Table A; Target 16924; HLA-C*06:02; COL23A1; ENSG00000050767; TAA
TTAGSRAVSAL

SEQ ID NO: 16925 - protein, 11 aa, Homo sapiens
  misc_feature: Table A; Target 16925; HLA-C*07:02; COL23A1; ENSG00000050767; TAA
TTAGSRAVSAL

SEQ ID NO: 16926 - protein, 11 aa, Homo sapiens
  misc_feature: Table A; Target 16926; HLA-C*12:03; COL23A1; ENSG00000050767; TAA
TTAGSRAVSAL

SEQ ID NO: 16927 - protein, 9 aa, Homo sapiens
  misc_feature: Table A; Target 16927; HLA-A*68:01; COL23A1; ENSG00000050767; TAA
TVVIDYDGR

SEQ ID NO: 16928 - protein, 10 aa, Homo sapiens
  misc_feature: Table A; Target 16928; HLA-C*03:03; COL23A1; ENSG00000050767; TAA
VAALEEEREL

SEQ ID NO: 16929 - protein, 8 aa, Homo sapiens
  misc_feature: Table A; Target 16929; HLA-A*03:02; COL23A1; ENSG00000050767; TAA
VDGAPGPK

SEQ ID NO: 16930 - protein, 8 aa, Homo sapiens
  misc_feature: Table A; Target 16930; HLA-A*11:01; COL23A1; ENSG00000050767; TAA
VDGAPGPK

SEQ ID NO: 16931 - protein, 8 aa, Homo sapiens
  misc_feature: Table A; Target 16931; HLA-B*27:02; COL23A1; ENSG00000050767; TAA
VDGAPGPK

SEQ ID NO: 16932 - protein, 9 aa, Homo sapiens
  misc_feature: Table A; Target 16932; HLA-B*40:02; COL23A1; ENSG00000050767; TAA
VEPGPPGPP

SEQ ID NO: 16933 - protein, 9 aa, Homo sapiens
  misc_feature: Table A; Target 16933; HLA-C*04:01; COL23A1; ENSG00000050767; TAA
VEPGPPGPP

SEQ ID NO: 16934 - protein, 9 aa, Homo sapiens
  misc_feature: Table A; Target 16934; HLA-C*06:02; COL23A1; ENSG00000050767; TAA
VEPGPPGPP

SEQ ID NO: 16935 - protein, 9 aa, Homo sapiens
  misc_feature: Table A; Target 16935; HLA-C*07:02; COL23A1; ENSG00000050767; TAA
VEPGPPGPP

SEQ ID NO: 16936 - protein, 9 aa, Homo sapiens
  misc_feature: Table A; Target 16936; HLA-C*07:04; COL23A1; ENSG00000050767; TAA
VEPGPPGPP

SEQ ID NO: 16937 - protein, 9 aa, Homo sapiens
  misc_feature: Table A; Target 16937; HLA-C*12:03; COL23A1; ENSG00000050767; TAA
VEPGPPGPP

SEQ ID NO: 16938 - protein, 9 aa, Homo sapiens
  misc_feature: Table A; Target 16938; HLA-A*02:07; COL23A1; ENSG00000050767; TAA
VGPPGLIGL

SEQ ID NO: 16939 - protein, 9 aa, Homo sapiens
  misc_feature: Table A; Target 16939; HLA-C*01:02; COL23A1; ENSG00000050767; TAA
VGPPGLIGL

SEQ ID NO: 16940 - protein, 9 aa, Homo sapiens
  misc_feature: Table A; Target 16940; HLA-B*07:02; COL23A1; ENSG00000050767; TAA
VGSAAACLL

SEQ ID NO: 16941 - protein, 10 aa, Homo sapiens
  misc_feature: Table A; Target 16941; HLA-B*07:02; COL23A1; ENSG00000050767; TAA
VGSAAACLLL

SEQ ID NO: 16942 - protein, 9 aa, Homo sapiens
  misc_feature: Table A; Target 16942; HLA-C*03:03; COL23A1; ENSG00000050767; TAA
VIDYDGRIL

SEQ ID NO: 16943 - protein, 9 aa, Homo sapiens
  misc_feature: Table A; Target 16943; HLA-C*03:04; COL23A1; ENSG00000050767; TAA
VIDYDGRIL

SEQ ID NO: 16944 - protein, 9 aa, Homo sapiens
  misc_feature: Table A; Target 16944; HLA-A*31:01; COL23A1; ENSG00000050767; TAA
VQAAALQGR

SEQ ID NO: 16945 - protein, 9 aa, Homo sapiens
  misc_feature: Table A; Target 16945; HLA-A*33:03; COL23A1; ENSG00000050767; TAA
VQAAALQGR

SEQ ID NO: 16946 - protein, 9 aa, Homo sapiens
  misc_feature: Table A; Target 16946; HLA-C*07:06; COL23A1; ENSG00000050767; TAA
VQAAALQGR

SEQ ID NO: 16947 - protein, 10 aa, Homo sapiens
  misc_feature: Table A; Target 16947; HLA-B*13:02; COL23A1; ENSG00000050767; TAA
VQAAALQGRV

SEQ ID NO: 16948 - protein, 9 aa, Homo sapiens
  misc_feature: Table A; Target 16948; HLA-A*30:01; COL23A1; ENSG00000050767; TAA
YDGRILDAL

SEQ ID NO: 16949 - protein, 9 aa, Homo sapiens
  misc_feature: Table A; Target 16949; HLA-A*68:02; COL23A1; ENSG00000050767; TAA
YDGRILDAL

SEQ ID NO: 16950 - protein, 9 aa, Homo sapiens
  misc_feature: Table A; Target 16950; HLA-B*40:01; COL23A1; ENSG00000050767; TAA
YDGRILDAL

SEQ ID NO: 16951 - protein, 9 aa, Homo sapiens
  misc_feature: Table A; Target 16951; HLA-B*40:02; COL23A1; ENSG00000050767; TAA
YDGRILDAL

SEQ ID NO: 16952 - protein, 9 aa, Homo sapiens
  misc_feature: Table A; Target 16952; HLA-B*54:01; COL23A1; ENSG00000050767; TAA
YPGPLGLDG

SEQ ID NO: 16953 - protein, 9 aa, Homo sapiens
  misc_feature: Table A; Target 16953; HLA-B*56:01; COL23A1; ENSG00000050767; TAA
YPGPLGLDG

SEQ ID NO: 16954 - protein, 10 aa, Homo sapiens
  misc_feature: Table A; Target 16954; HLA-B*27:02; COL23A1; ENSG00000050767; TAA
YPGPLGLDGK

SEQ ID NO: 16955 - protein, 10 aa, Homo sapiens
  misc_feature: Table A; Target 16955; HLA-B*35:01; COL23A1; ENSG00000050767; TAA
YPGPLGLDGK

SEQ ID NO: 16956 - protein, 9 aa, Homo sapiens
  misc_feature: Table A; Target 16956; HLA-A*23:01; COX7B2; ENSG00000170516; TAA
AFCVATWVF

SEQ ID NO: 16957 - protein, 9 aa, Homo sapiens
  misc_feature: Table A; Target 16957; HLA-A*24:02; COX7B2; ENSG00000170516; TAA
AFCVATWVF

SEQ ID NO: 16958 - protein, 10 aa, Homo sapiens
  misc_feature: Table A; Target 16958; HLA-A*02:01; COX7B2; ENSG00000170516; TAA
ALSSLKIQSI

SEQ ID NO: 16959 - protein, 10 aa, Homo sapiens
  misc_feature: Table A; Target 16959; HLA-A*02:03; COX7B2; ENSG00000170516; TAA
ALSSLKIQSI

SEQ ID NO: 16960 - protein, 10 aa, Homo sapiens
  misc_feature: Table A; Target 16960; HLA-A*02:04; COX7B2; ENSG00000170516; TAA
ALSSLKIQSI

SEQ ID NO: 16961 - protein, 10 aa, Homo sapiens
  misc_feature: Table A; Target 16961; HLA-A*32:01; COX7B2; ENSG00000170516; TAA
ALSSLKIQSI

SEQ ID NO: 16962 - protein, 10 aa, Homo sapiens
  misc_feature: Table A; Target 16962; HLA-B*13:02; COX7B2; ENSG00000170516; TAA
ALSSLKIQSI

SEQ ID NO: 16963 - protein, 10 aa, Homo sapiens
  misc_feature: Table A; Target 16963; HLA-B*55:01; COX7B2; ENSG00000170516; TAA
ALSSLKIQSI

SEQ ID NO: 16964 - protein, 9 aa, Homo sapiens
  misc_feature: Table A; Target 16964; HLA-B*27:02; COX7B2; ENSG00000170516; TAA
ARNALSSLK

SEQ ID NO: 16965 - protein, 9 aa, Homo sapiens
  misc_feature: Table A; Target 16965; HLA-B*27:05; COX7B2; ENSG00000170516; TAA
ARNALSSLK

SEQ ID NO: 16966 - protein, 9 aa, Homo sapiens
  misc_feature: Table A; Target 16966; HLA-C*16:04; COX7B2; ENSG00000170516; TAA
ARNALSSLK

SEQ ID NO: 16967 - protein, 8 aa, Homo sapiens
  misc_feature: Table A; Target 16967; HLA-B*13:02; COX7B2; ENSG00000170516; TAA
ASGTAFCV

SEQ ID NO: 16968 - protein, 8 aa, Homo sapiens
  misc_feature: Table A; Target 16968; HLA-C*06:02; COX7B2; ENSG00000170516; TAA
ASGTAFCV

SEQ ID NO: 16969 - protein, 11 aa, Homo sapiens
  misc_feature: Table A; Target 16969; HLA-B*57:01; COX7B2; ENSG00000170516; TAA
ASGTAFCVATW

SEQ ID NO: 16970 - protein, 8 aa, Homo sapiens
  misc_feature: Table A; Target 16970; HLA-A*31:01; COX7B2; ENSG00000170516; TAA
ATQIGIEW

SEQ ID NO: 16971 - protein, 8 aa, Homo sapiens
  misc_feature: Table A; Target 16971; HLA-A*32:01; COX7B2; ENSG00000170516; TAA
ATQIGIEW

SEQ ID NO: 16972 - protein, 8 aa, Homo sapiens
  misc_feature: Table A; Target 16972; HLA-B*57:01; COX7B2; ENSG00000170516; TAA
ATQIGIEW

SEQ ID NO: 16973 - protein, 8 aa, Homo sapiens
  misc_feature: Table A; Target 16973; HLA-B*58:01; COX7B2; ENSG00000170516; TAA
ATQIGIEW

SEQ ID NO: 16974 - protein, 8 aa, Homo sapiens
  misc_feature: Table A; Target 16974; HLA-C*16:01; COX7B2; ENSG00000170516; TAA
ATQIGIEW

SEQ ID NO: 16975 - protein, 9 aa, Homo sapiens
  misc_feature: Table A; Target 16975; HLA-A*03:01; COX7B2; ENSG00000170516; TAA
AVLASGTAF

SEQ ID NO: 16976 - protein, 9 aa, Homo sapiens
  misc_feature: Table A; Target 16976; HLA-A*03:02; COX7B2; ENSG00000170516; TAA
AVLASGTAF

SEQ ID NO: 16977 - protein, 9 aa, Homo sapiens
  misc_feature: Table A; Target 16977; HLA-A*11:01; COX7B2; ENSG00000170516; TAA
AVLASGTAF

SEQ ID NO: 16978 - protein, 9 aa, Homo sapiens
  misc_feature: Table A; Target 16978; HLA-A*23:01; COX7B2; ENSG00000170516; TAA
AVLASGTAF

SEQ ID NO: 16979 - protein, 9 aa, Homo sapiens
  misc_feature: Table A; Target 16979; HLA-A*24:02; COX7B2; ENSG00000170516; TAA
AVLASGTAF

SEQ ID NO: 16980 - protein, 9 aa, Homo sapiens
  misc_feature: Table A; Target 16980; HLA-A*25:01; COX7B2; ENSG00000170516; TAA
AVLASGTAF

SEQ ID NO: 16981 - protein, 9 aa, Homo sapiens
  misc_feature: Table A; Target 16981; HLA-A*26:01; COX7B2; ENSG00000170516; TAA
AVLASGTAF

SEQ ID NO: 16982 - protein, 9 aa, Homo sapiens
  misc_feature: Table A; Target 16982; HLA-A*29:02; COX7B2; ENSG00000170516; TAA
AVLASGTAF

SEQ ID NO: 16983 - protein, 9 aa, Homo sapiens
  misc_feature: Table A; Target 16983; HLA-A*30:02; COX7B2; ENSG00000170516; TAA
AVLASGTAF

SEQ ID NO: 16984 - protein, 9 aa, Homo sapiens
  misc_feature: Table A; Target 16984; HLA-A*31:01; COX7B2; ENSG00000170516; TAA
AVLASGTAF

SEQ ID NO: 16985 - protein, 9 aa, Homo sapiens
  misc_feature: Table A; Target 16985; HLA-A*32:01; COX7B2; ENSG00000170516; TAA
AVLASGTAF

SEQ ID NO: 16986 - protein, 9 aa, Homo sapiens
  misc_feature: Table A; Target 16986; HLA-B*07:02; COX7B2; ENSG00000170516; TAA
AVLASGTAF

SEQ ID NO: 16987 - protein, 9 aa, Homo sapiens
  misc_feature: Table A; Target 16987; HLA-B*08:01; COX7B2; ENSG00000170516; TAA
AVLASGTAF

SEQ ID NO: 16988 - protein, 9 aa, Homo sapiens
  misc_feature: Table A; Target 16988; HLA-B*13:02; COX7B2; ENSG00000170516; TAA
AVLASGTAF

SEQ ID NO: 16989 - protein, 9 aa, Homo sapiens
  misc_feature: Table A; Target 16989; HLA-B*15:03; COX7B2; ENSG00000170516; TAA
AVLASGTAF

SEQ ID NO: 16990 - protein, 9 aa, Homo sapiens
  misc_feature: Table A; Target 16990; HLA-B*27:05; COX7B2; ENSG00000170516; TAA
AVLASGTAF

SEQ ID NO: 16991 - protein, 9 aa, Homo sapiens
  misc_feature: Table A; Target 16991; HLA-B*35:01; COX7B2; ENSG00000170516; TAA
AVLASGTAF

SEQ ID NO: 16992 - protein, 9 aa, Homo sapiens
  misc_feature: Table A; Target 16992; HLA-B*35:03; COX7B2; ENSG00000170516; TAA
AVLASGTAF

SEQ ID NO: 16993 - protein, 9 aa, Homo sapiens
  misc_feature: Table A; Target 16993; HLA-B*37:01; COX7B2; ENSG00000170516; TAA
AVLASGTAF

SEQ ID NO: 16994 - protein, 9 aa, Homo sapiens
  misc_feature: Table A; Target 16994; HLA-B*38:01; COX7B2; ENSG00000170516; TAA
AVLASGTAF

SEQ ID NO: 16995 - protein, 9 aa, Homo sapiens
  misc_feature: Table A; Target 16995; HLA-B*39:01; COX7B2; ENSG00000170516; TAA
AVLASGTAF

SEQ ID NO: 16996 - protein, 9 aa, Homo sapiens
  misc_feature: Table A; Target 16996; HLA-B*40:02; COX7B2; ENSG00000170516; TAA
AVLASGTAF

SEQ ID NO: 16997 - protein, 9 aa, Homo sapiens
  misc_feature: Table A; Target 16997; HLA-B*44:02; COX7B2; ENSG00000170516; TAA
AVLASGTAF

SEQ ID NO: 16998 - protein, 9 aa, Homo sapiens
  misc_feature: Table A; Target 16998; HLA-B*44:03; COX7B2; ENSG00000170516; TAA
AVLASGTAF

SEQ ID NO: 16999 - protein, 9 aa, Homo sapiens
  misc_feature: Table A; Target 16999; HLA-B*46:01; COX7B2; ENSG00000170516; TAA
AVLASGTAF

SEQ ID NO: 17000 - protein, 9 aa, Homo sapiens
  misc_feature: Table A; Target 17000; HLA-B*55:01; COX7B2; ENSG00000170516; TAA
AVLASGTAF

SEQ ID NO: 17001 - protein, 9 aa, Homo sapiens
  misc_feature: Table A; Target 17001; HLA-B*57:01; COX7B2; ENSG00000170516; TAA
AVLASGTAF

SEQ ID NO: 17002 - protein, 9 aa, Homo sapiens
  misc_feature: Table A; Target 17002; HLA-B*58:01; COX7B2; ENSG00000170516; TAA
AVLASGTAF

SEQ ID NO: 17003 - protein, 9 aa, Homo sapiens
  misc_feature: Table A; Target 17003; HLA-C*01:02; COX7B2; ENSG00000170516; TAA
AVLASGTAF

SEQ ID NO: 17004 - protein, 9 aa, Homo sapiens
  misc_feature: Table A; Target 17004; HLA-C*02:02; COX7B2; ENSG00000170516; TAA
AVLASGTAF

SEQ ID NO: 17005 - protein, 9 aa, Homo sapiens
  misc_feature: Table A; Target 17005; HLA-C*03:03; COX7B2; ENSG00000170516; TAA
AVLASGTAF

SEQ ID NO: 17006 - protein, 9 aa, Homo sapiens
  misc_feature: Table A; Target 17006; HLA-C*03:04; COX7B2; ENSG00000170516; TAA
AVLASGTAF

SEQ ID NO: 17007 - protein, 9 aa, Homo sapiens
  misc_feature: Table A; Target 17007; HLA-C*04:01; COX7B2; ENSG00000170516; TAA
AVLASGTAF

SEQ ID NO: 17008 - protein, 9 aa, Homo sapiens
  misc_feature: Table A; Target 17008; HLA-C*05:01; COX7B2; ENSG00000170516; TAA
AVLASGTAF

SEQ ID NO: 17009 - protein, 9 aa, Homo sapiens
  misc_feature: Table A; Target 17009; HLA-C*07:02; COX7B2; ENSG00000170516; TAA
AVLASGTAF

SEQ ID NO: 17010 - protein, 9 aa, Homo sapiens
  misc_feature: Table A; Target 17010; HLA-C*07:04; COX7B2; ENSG00000170516; TAA
AVLASGTAF

SEQ ID NO: 17011 - protein, 9 aa, Homo sapiens
  misc_feature: Table A; Target 17011; HLA-C*07:06; COX7B2; ENSG00000170516; TAA
AVLASGTAF

SEQ ID NO: 17012 - protein, 9 aa, Homo sapiens
  misc_feature: Table A; Target 17012; HLA-C*14:02; COX7B2; ENSG00000170516; TAA
AVLASGTAF

SEQ ID NO: 17013 - protein, 9 aa, Homo sapiens
  misc_feature: Table A; Target 17013; HLA-C*16:01; COX7B2; ENSG00000170516; TAA
AVLASGTAF

SEQ ID NO: 17014 - protein, 9 aa, Homo sapiens
  misc_feature: Table A; Target 17014; HLA-C*16:04; COX7B2; ENSG00000170516; TAA
AVLASGTAF

SEQ ID NO: 17015 - protein, 11 aa, Homo sapiens
  misc_feature: Table A; Target 17015; HLA-A*02:01; COX7B2; ENSG00000170516; TAA
AVLASGTAFCV

SEQ ID NO: 17016 - protein, 11 aa, Homo sapiens
  misc_feature: Table A; Target 17016; HLA-B*13:02; COX7B2; ENSG00000170516; TAA
AVLASGTAFCV

SEQ ID NO: 17017 - protein, 9 aa, Homo sapiens
  misc_feature: Table A; Target 17017; HLA-A*02:04; COX7B2; ENSG00000170516; TAA
CVATWVFTA

SEQ ID NO: 17018 - protein, 8 aa, Homo sapiens
  misc_feature: Table A; Target 17018; HLA-B*15:03; COX7B2; ENSG00000170516; TAA
DKYGNAVL

SEQ ID NO: 17019 - protein, 9 aa, Homo sapiens
  misc_feature: Table A; Target 17019; HLA-B*15:03; COX7B2; ENSG00000170516; TAA
DKYGNAVLA

SEQ ID NO: 17020 - protein, 9 aa, Homo sapiens
  misc_feature: Table A; Target 17020; HLA-C*12:03; COX7B2; ENSG00000170516; TAA
DKYGNAVLA

SEQ ID NO: 17021 - protein, 9 aa, Homo sapiens
  misc_feature: Table A; Target 17021; HLA-A*33:01; COX7B2; ENSG00000170516; TAA
EWNLSPVGR

SEQ ID NO: 17022 - protein, 9 aa, Homo sapiens
  misc_feature: Table A; Target 17022; HLA-A*33:03; COX7B2; ENSG00000170516; TAA
EWNLSPVGR

SEQ ID NO: 17023 - protein, 9 aa, Homo sapiens
  misc_feature: Table A; Target 17023; HLA-B*38:01; COX7B2; ENSG00000170516; TAA
FHDKYGNAV

SEQ ID NO: 17024 - protein, 9 aa, Homo sapiens
  misc_feature: Table A; Target 17024; HLA-B*39:01; COX7B2; ENSG00000170516; TAA
FHDKYGNAV

SEQ ID NO: 17025 - protein, 10 aa, Homo sapiens
  misc_feature: Table A; Target 17025; HLA-B*38:01; COX7B2; ENSG00000170516; TAA
FHDKYGNAVL

SEQ ID NO: 17026 - protein, 10 aa, Homo sapiens
  misc_feature: Table A; Target 17026; HLA-B*39:01; COX7B2; ENSG00000170516; TAA
FHDKYGNAVL

SEQ ID NO: 17027 - protein, 8 aa, Homo sapiens
  misc_feature: Table A; Target 17027; HLA-B*07:02; COX7B2; ENSG00000170516; TAA
FPLARNAL

SEQ ID NO: 17028 - protein, 8 aa, Homo sapiens
  misc_feature: Table A; Target 17028; HLA-B*35:01; COX7B2; ENSG00000170516; TAA
FPLARNAL

SEQ ID NO: 17029 - protein, 8 aa, Homo sapiens
  misc_feature: Table A; Target 17029; HLA-B*35:03; COX7B2; ENSG00000170516; TAA
FPLARNAL

SEQ ID NO: 17030 - protein, 8 aa, Homo sapiens
  misc_feature: Table A; Target 17030; HLA-B*54:01; COX7B2; ENSG00000170516; TAA
FPLARNAL

SEQ ID NO: 17031 - protein, 8 aa, Homo sapiens
  misc_feature: Table A; Target 17031; HLA-B*55:01; COX7B2; ENSG00000170516; TAA
FPLARNAL

SEQ ID NO: 17032 - protein, 8 aa, Homo sapiens
  misc_feature: Table A; Target 17032; HLA-B*56:01; COX7B2; ENSG00000170516; TAA
FPLARNAL

SEQ ID NO: 17033 - protein, 8 aa, Homo sapiens
  misc_feature: Table A; Target 17033; HLA-C*07:02; COX7B2; ENSG00000170516; TAA
FPLARNAL

SEQ ID NO: 17034 - protein, 8 aa, Homo sapiens
  misc_feature: Table A; Target 17034; HLA-C*16:01; COX7B2; ENSG00000170516; TAA
FPLARNAL

SEQ ID NO: 17035 - protein, 9 aa, Homo sapiens
  misc_feature: Table A; Target 17035; HLA-B*54:01; COX7B2; ENSG00000170516; TAA
FPLARNALS

SEQ ID NO: 17036 - protein, 10 aa, Homo sapiens
  misc_feature: Table A; Target 17036; HLA-B*54:01; COX7B2; ENSG00000170516; TAA
FPLARNALSS

SEQ ID NO: 17037 - protein, 11 aa, Homo sapiens
  misc_feature: Table A; Target 17037; HLA-B*07:02; COX7B2; ENSG00000170516; TAA
FPLARNALSSL

SEQ ID NO: 17038 - protein, 11 aa, Homo sapiens
  misc_feature: Table A; Target 17038; HLA-B*08:01; COX7B2; ENSG00000170516; TAA
FPLARNALSSL

SEQ ID NO: 17039 - protein, 11 aa, Homo sapiens
  misc_feature: Table A; Target 17039; HLA-B*35:01; COX7B2; ENSG00000170516; TAA
FPLARNALSSL

SEQ ID NO: 17040 - protein, 11 aa, Homo sapiens
  misc_feature: Table A; Target 17040; HLA-B*35:03; COX7B2; ENSG00000170516; TAA
FPLARNALSSL

SEQ ID NO: 17041 - protein, 11 aa, Homo sapiens
  misc_feature: Table A; Target 17041; HLA-B*51:01; COX7B2; ENSG00000170516; TAA
FPLARNALSSL

SEQ ID NO: 17042 - protein, 11 aa, Homo sapiens
  misc_feature: Table A; Target 17042; HLA-B*54:01; COX7B2; ENSG00000170516; TAA
FPLARNALSSL

SEQ ID NO: 17043 - protein, 11 aa, Homo sapiens
  misc_feature: Table A; Target 17043; HLA-B*55:01; COX7B2; ENSG00000170516; TAA
FPLARNALSSL

SEQ ID NO: 17044 - protein, 11 aa, Homo sapiens
  misc_feature: Table A; Target 17044; HLA-C*04:01; COX7B2; ENSG00000170516; TAA
FPLARNALSSL

SEQ ID NO: 17045 - protein, 11 aa, Homo sapiens
  misc_feature: Table A; Target 17045; HLA-C*07:02; COX7B2; ENSG00000170516; TAA
FPLARNALSSL

SEQ ID NO: 17046 - protein, 8 aa, Homo sapiens
  misc_feature: Table A; Target 17046; HLA-A*68:02; COX7B2; ENSG00000170516; TAA
FTATQIGI

SEQ ID NO: 17047 - protein, 10 aa, Homo sapiens
  misc_feature: Table A; Target 17047; HLA-A*01:01; COX7B2; ENSG00000170516; TAA
FTATQIGIEW

SEQ ID NO: 17048 - protein, 10 aa, Homo sapiens
  misc_feature: Table A; Target 17048; HLA-A*24:02; COX7B2; ENSG00000170516; TAA
FTATQIGIEW

SEQ ID NO: 17049 - protein, 10 aa, Homo sapiens
  misc_feature: Table A; Target 17049; HLA-A*25:01; COX7B2; ENSG00000170516; TAA
FTATQIGIEW

SEQ ID NO: 17050 - protein, 10 aa, Homo sapiens
  misc_feature: Table A; Target 17050; HLA-A*26:01; COX7B2; ENSG00000170516; TAA
FTATQIGIEW

SEQ ID NO: 17051 - protein, 10 aa, Homo sapiens
  misc_feature: Table A; Target 17051; HLA-A*29:02; COX7B2; ENSG00000170516; TAA
FTATQIGIEW

SEQ ID NO: 17052 - protein, 10 aa, Homo sapiens
  misc_feature: Table A; Target 17052; HLA-A*31:01; COX7B2; ENSG00000170516; TAA
FTATQIGIEW

SEQ ID NO: 17053 - protein, 10 aa, Homo sapiens
  misc_feature: Table A; Target 17053; HLA-A*32:01; COX7B2; ENSG00000170516; TAA
FTATQIGIEW

SEQ ID NO: 17054 - protein, 10 aa, Homo sapiens
  misc_feature: Table A; Target 17054; HLA-A*33:01; COX7B2; ENSG00000170516; TAA
FTATQIGIEW

SEQ ID NO: 17055 - protein, 10 aa, Homo sapiens
  misc_feature: Table A; Target 17055; HLA-A*33:03; COX7B2; ENSG00000170516; TAA
FTATQIGIEW

SEQ ID NO: 17056 - protein, 10 aa, Homo sapiens
  misc_feature: Table A; Target 17056; HLA-A*68:01; COX7B2; ENSG00000170516; TAA
FTATQIGIEW

SEQ ID NO: 17057 - protein, 10 aa, Homo sapiens
  misc_feature: Table A; Target 17057; HLA-A*68:02; COX7B2; ENSG00000170516; TAA
FTATQIGIEW

SEQ ID NO: 17058 - protein, 10 aa, Homo sapiens
  misc_feature: Table A; Target 17058; HLA-B*27:02; COX7B2; ENSG00000170516; TAA
FTATQIGIEW

SEQ ID NO: 17059 - protein, 10 aa, Homo sapiens
  misc_feature: Table A; Target 17059; HLA-B*27:05; COX7B2; ENSG00000170516; TAA
FTATQIGIEW

SEQ ID NO: 17060 - protein, 10 aa, Homo sapiens
  misc_feature: Table A; Target 17060; HLA-B*35:01; COX7B2; ENSG00000170516; TAA
FTATQIGIEW

SEQ ID NO: 17061 - protein, 10 aa, Homo sapiens
  misc_feature: Table A; Target 17061; HLA-B*44:02; COX7B2; ENSG00000170516; TAA
FTATQIGIEW

SEQ ID NO: 17062 - protein, 10 aa, Homo sapiens
  misc_feature: Table A; Target 17062; HLA-B*44:03; COX7B2; ENSG00000170516; TAA
FTATQIGIEW

SEQ ID NO: 17063 - protein, 10 aa, Homo sapiens
  misc_feature: Table A; Target 17063; HLA-B*58:01; COX7B2; ENSG00000170516; TAA
FTATQIGIEW

SEQ ID NO: 17064 - protein, 10 aa, Homo sapiens
  misc_feature: Table A; Target 17064; HLA-C*02:02; COX7B2; ENSG00000170516; TAA
FTATQIGIEW

SEQ ID NO: 17065 - protein, 10 aa, Homo sapiens
  misc_feature: Table A; Target 17065; HLA-C*04:01; COX7B2; ENSG00000170516; TAA
FTATQIGIEW

SEQ ID NO: 17066 - protein, 10 aa, Homo sapiens
  misc_feature: Table A; Target 17066; HLA-C*07:06; COX7B2; ENSG00000170516; TAA
FTATQIGIEW

SEQ ID NO: 17067 - protein, 10 aa, Homo sapiens
  misc_feature: Table A; Target 17067; HLA-C*12:03; COX7B2; ENSG00000170516; TAA
FTATQIGIEW

SEQ ID NO: 17068 - protein, 10 aa, Homo sapiens
  misc_feature: Table A; Target 17068; HLA-C*16:01; COX7B2; ENSG00000170516; TAA
FTATQIGIEW

SEQ ID NO: 17069 - protein, 10 aa, Homo sapiens
  misc_feature: Table A; Target 17069; HLA-C*16:04; COX7B2; ENSG00000170516; TAA
FTATQIGIEW

SEQ ID NO: 17070 - protein, 11 aa, Homo sapiens
  misc_feature: Table A; Target 17070; HLA-B*15:01; COX7B2; ENSG00000170516; TAA
GNAVLASGTAF

SEQ ID NO: 17071 - protein, 11 aa, Homo sapiens
  misc_feature: Table A; Target 17071; HLA-B*15:03; COX7B2; ENSG00000170516; TAA
GNAVLASGTAF

SEQ ID NO: 17072 - protein, 11 aa, Homo sapiens
  misc_feature: Table A; Target 17072; HLA-B*27:02; COX7B2; ENSG00000170516; TAA
GNAVLASGTAF

SEQ ID NO: 17073 - protein, 11 aa, Homo sapiens
  misc_feature: Table A; Target 17073; HLA-B*27:05; COX7B2; ENSG00000170516; TAA
GNAVLASGTAF

SEQ ID NO: 17074 - protein, 11 aa, Homo sapiens
  misc_feature: Table A; Target 17074; HLA-B*39:01; COX7B2; ENSG00000170516; TAA
GNAVLASGTAF

SEQ ID NO: 17075 - protein, 11 aa, Homo sapiens
  misc_feature: Table A; Target 17075; HLA-C*04:01; COX7B2; ENSG00000170516; TAA
GNAVLASGTAF

SEQ ID NO: 17076 - protein, 11 aa, Homo sapiens
  misc_feature: Table A; Target 17076; HLA-C*07:04; COX7B2; ENSG00000170516; TAA
GNAVLASGTAF

SEQ ID NO: 17077 - protein, 11 aa, Homo sapiens
  misc_feature: Table A; Target 17077; HLA-C*12:03; COX7B2; ENSG00000170516; TAA
GNAVLASGTAF

SEQ ID NO: 17078 - protein, 11 aa, Homo sapiens
  misc_feature: Table A; Target 17078; HLA-C*16:04; COX7B2; ENSG00000170516; TAA
GNAVLASGTAF

SEQ ID NO: 17079 - protein, 8 aa, Homo sapiens
  misc_feature: Table A; Target 17079; HLA-C*16:04; COX7B2; ENSG00000170516; TAA
GRVTPKEW

SEQ ID NO: 17080 - protein, 9 aa, Homo sapiens
  misc_feature: Table A; Target 17080; HLA-B*27:05; COX7B2; ENSG00000170516; TAA
GRVTPKEWK

SEQ ID NO: 17081 - protein, 9 aa, Homo sapiens
  misc_feature: Table A; Target 17081; HLA-A*24:02; COX7B2; ENSG00000170516; TAA
GTAFCVATW

SEQ ID NO: 17082 - protein, 9 aa, Homo sapiens
  misc_feature: Table A; Target 17082; HLA-A*25:01; COX7B2; ENSG00000170516; TAA
GTAFCVATW

SEQ ID NO: 17083 - protein, 9 aa, Homo sapiens
  misc_feature: Table A; Target 17083; HLA-A*26:01; COX7B2; ENSG00000170516; TAA
GTAFCVATW

SEQ ID NO: 17084 - protein, 9 aa, Homo sapiens
  misc_feature: Table A; Target 17084; HLA-A*32:01; COX7B2; ENSG00000170516; TAA
GTAFCVATW

SEQ ID NO: 17085 - protein, 9 aa, Homo sapiens
  misc_feature: Table A; Target 17085; HLA-B*44:02; COX7B2; ENSG00000170516; TAA
GTAFCVATW

SEQ ID NO: 17086 - protein, 9 aa, Homo sapiens
  misc_feature: Table A; Target 17086; HLA-B*44:03; COX7B2; ENSG00000170516; TAA
GTAFCVATW

SEQ ID NO: 17087 - protein, 9 aa, Homo sapiens
  misc_feature: Table A; Target 17087; HLA-B*57:01; COX7B2; ENSG00000170516; TAA
GTAFCVATW

SEQ ID NO: 17088 - protein, 9 aa, Homo sapiens
  misc_feature: Table A; Target 17088; HLA-B*58:01; COX7B2; ENSG00000170516; TAA
GTAFCVATW

SEQ ID NO: 17089 - protein, 9 aa, Homo sapiens
  misc_feature: Table A; Target 17089; HLA-C*12:03; COX7B2; ENSG00000170516; TAA
GTAFCVATW

SEQ ID NO: 17090 - protein, 9 aa, Homo sapiens
  misc_feature: Table A; Target 17090; HLA-C*16:04; COX7B2; ENSG00000170516; TAA
GTAFCVATW

SEQ ID NO: 17091 - protein, 8 aa, Homo sapiens
  misc_feature: Table A; Target 17091; HLA-B*08:01; COX7B2; ENSG00000170516; TAA
HDKYGNAV

SEQ ID NO: 17092 - protein, 8 aa, Homo sapiens
  misc_feature: Table A; Target 17092; HLA-B*37:01; COX7B2; ENSG00000170516; TAA
HDKYGNAV

SEQ ID NO: 17093 - protein, 8 aa, Homo sapiens
  misc_feature: Table A; Target 17093; HLA-B*40:02; COX7B2; ENSG00000170516; TAA
HDKYGNAV

SEQ ID NO: 17094 - protein, 8 aa, Homo sapiens
  misc_feature: Table A; Target 17094; HLA-C*16:02; COX7B2; ENSG00000170516; TAA
HDKYGNAV

SEQ ID NO: 17095 - protein, 9 aa, Homo sapiens
  misc_feature: Table A; Target 17095; HLA-B*37:01; COX7B2; ENSG00000170516; TAA
HDKYGNAVL

SEQ ID NO: 17096 - protein, 9 aa, Homo sapiens
  misc_feature: Table A; Target 17096; HLA-B*40:02; COX7B2; ENSG00000170516; TAA
HDKYGNAVL

SEQ ID NO: 17097 - protein, 9 aa, Homo sapiens
  misc_feature: Table A; Target 17097; HLA-C*07:01; COX7B2; ENSG00000170516; TAA
HDKYGNAVL

SEQ ID NO: 17098 - protein, 8 aa, Homo sapiens
  misc_feature: Table A; Target 17098; HLA-C*07:01; COX7B2; ENSG00000170516; TAA
HSPDFHDK

SEQ ID NO: 17099 - protein, 9 aa, Homo sapiens
  misc_feature: Table A; Target 17099; HLA-A*01:01; COX7B2; ENSG00000170516; TAA
HSPDFHDKY

(The sequence listing continues in the following parts.)
